United States Patent Application Publication US 2007/0042381 A1 - sequence listing, part 48

SEQ ID NO: 2152842 - RNA, 19 nt, Human herpesvirus 8 [Kaposi`s sarcoma-associated h
gucuacuucgcuaacugua

SEQ ID NO: 2152843 - RNA, 17 nt, Human herpesvirus 8 [Kaposi`s sarcoma-associated h
ucuguuacuggcaccua

SEQ ID NO: 2152844 - RNA, 20 nt, Human herpesvirus 8 [Kaposi`s sarcoma-associated h
ggcgcgccacagucgagccg

SEQ ID NO: 2152845 - RNA, 21 nt, Human herpesvirus 8 [Kaposi`s sarcoma-associated h
caccacgcccgggggccagga

SEQ ID NO: 2152846 - RNA, 14 nt, Human herpesvirus 8 [Kaposi`s sarcoma-associated h
aggaagcauccgga

SEQ ID NO: 2152847 - RNA, 14 nt, Human herpesvirus 8 [Kaposi`s sarcoma-associated h
auaaaagagagaau

SEQ ID NO: 2152848 - RNA, 18 nt, Human herpesvirus 8 [Kaposi`s sarcoma-associated h
aacgcacaucagcggcac

SEQ ID NO: 2152849 - RNA, 17 nt, Human herpesvirus 8 [Kaposi`s sarcoma-associated h
gcauaauaaaacaaaua

SEQ ID NO: 2152850 - RNA, 13 nt, Human herpesvirus 8 [Kaposi`s sarcoma-associated h
gauguuuuccagc

SEQ ID NO: 2152851 - RNA, 15 nt, Human herpesvirus 8 [Kaposi`s sarcoma-associated h
cggagccggaagaua

SEQ ID NO: 2152852 - RNA, 22 nt, Human herpesvirus 8 [Kaposi`s sarcoma-associated h
cgacaaggacuuuuauagauuu

SEQ ID NO: 2152853 - RNA, 20 nt, Human herpesvirus 8 [Kaposi`s sarcoma-associated h
gcaugugguuaagcuuugca

SEQ ID NO: 2152854 - RNA, 17 nt, Human herpesvirus 8 [Kaposi`s sarcoma-associated h
cacggaaggcaguggag

SEQ ID NO: 2152855 - RNA, 17 nt, Human herpesvirus 8 [Kaposi`s sarcoma-associated h
ugcaauacccuguuuca

SEQ ID NO: 2152856 - RNA, 14 nt, Human herpesvirus 8 [Kaposi`s sarcoma-associated h
cgucgccuuaccau

SEQ ID NO: 2152857 - RNA, 17 nt, Human herpesvirus 8 [Kaposi`s sarcoma-associated h
aguguuaucuuugcagu

SEQ ID NO: 2152858 - RNA, 13 nt, Human herpesvirus 8 [Kaposi`s sarcoma-associated h
uugcagugugcag

SEQ ID NO: 2152859 - RNA, 16 nt, Human herpesvirus 8 [Kaposi`s sarcoma-associated h
augcucaggucuguca

SEQ ID NO: 2152860 - RNA, 12 nt, Human herpesvirus 8 [Kaposi`s sarcoma-associated h
cggcgcgccugu

SEQ ID NO: 2152861 - RNA, 15 nt, Human herpesvirus 8 [Kaposi`s sarcoma-associated h
ccacaucggugccuu

SEQ ID NO: 2152862 - RNA, 16 nt, Human herpesvirus 8 [Kaposi`s sarcoma-associated h
gcuaggauucgugcag

SEQ ID NO: 2152863 - RNA, 20 nt, Human herpesvirus 8 [Kaposi`s sarcoma-associated h
caacaugcccuuuucugaaa

SEQ ID NO: 2152864 - RNA, 13 nt, Human herpesvirus 8 [Kaposi`s sarcoma-associated h
gugaaguucauau

SEQ ID NO: 2152865 - RNA, 22 nt, Human herpesvirus 8 [Kaposi`s sarcoma-associated h
guucauauucccaccuccaccu

SEQ ID NO: 2152866 - RNA, 17 nt, Human herpesvirus 8 [Kaposi`s sarcoma-associated h
agacaaacaugugggcu

SEQ ID NO: 2152867 - RNA, 15 nt, Human herpesvirus 8 [Kaposi`s sarcoma-associated h
cagaagagcauuuuu

SEQ ID NO: 2152868 - RNA, 15 nt, Human herpesvirus 8 [Kaposi`s sarcoma-associated h
ccuucgaggccaggc

SEQ ID NO: 2152869 - RNA, 19 nt, Human herpesvirus 8 [Kaposi`s sarcoma-associated h
uaaaagcauugucuuaagu

SEQ ID NO: 2152870 - RNA, 22 nt, Human herpesvirus 8 [Kaposi`s sarcoma-associated h
accauccccccaccccucauuu

SEQ ID NO: 2152871 - RNA, 23 nt, Human herpesvirus 8 [Kaposi`s sarcoma-associated h
gaaucgaacaauaauaaaaacau

SEQ ID NO: 2152872 - RNA, 18 nt, Human herpesvirus 8 [Kaposi`s sarcoma-associated h
ugguugauugugacuauu

SEQ ID NO: 2152873 - RNA, 23 nt, Human herpesvirus 8 [Kaposi`s sarcoma-associated h
ccaacauguaaauuggccacugc

SEQ ID NO: 2152874 - RNA, 17 nt, Human herpesvirus 8 [Kaposi`s sarcoma-associated h
ugcucuuccuccuaguc

SEQ ID NO: 2152875 - RNA, 12 nt, Human herpesvirus 8 [Kaposi`s sarcoma-associated h
cggacgccagga

SEQ ID NO: 2152876 - RNA, 14 nt, Human herpesvirus 8 [Kaposi`s sarcoma-associated h
uuuuguugugagca

SEQ ID NO: 2152877 - RNA, 16 nt, Human herpesvirus 8 [Kaposi`s sarcoma-associated h
gaacagaagacccaga

SEQ ID NO: 2152878 - RNA, 17 nt, Human herpesvirus 8 [Kaposi`s sarcoma-associated h
aaucuggcaugcuggga

SEQ ID NO: 2152879 - RNA, 21 nt, Human herpesvirus 8 [Kaposi`s sarcoma-associated h
accugaggugcucuucccaca

SEQ ID NO: 2152880 - RNA, 13 nt, Human herpesvirus 8 [Kaposi`s sarcoma-associated h
acuaccagccauc

SEQ ID NO: 2152881 - RNA, 23 nt, Human herpesvirus 8 [Kaposi`s sarcoma-associated h
guggcaacauacauuuuucugaa

SEQ ID NO: 2152882 - RNA, 17 nt, Human herpesvirus 8 [Kaposi`s sarcoma-associated h
cgccaccuagcgggcac

SEQ ID NO: 2152883 - RNA, 20 nt, Human herpesvirus 8 [Kaposi`s sarcoma-associated h
guguaucccccacaggacaa

SEQ ID NO: 2152884 - RNA, 17 nt, Human herpesvirus 8 [Kaposi`s sarcoma-associated h
uuagauggcacagaguc

SEQ ID NO: 2152885 - RNA, 21 nt, Human herpesvirus 8 [Kaposi`s sarcoma-associated h
uggcaagaaauccgagcaccu

SEQ ID NO: 2152886 - RNA, 18 nt, Human herpesvirus 8 [Kaposi`s sarcoma-associated h
gaagcaaagugucucacc

SEQ ID NO: 2152887 - RNA, 23 nt, Human herpesvirus 8 [Kaposi`s sarcoma-associated h
uaaaagacucuagauaaaugggu

SEQ ID NO: 2152888 - RNA, 22 nt, Human herpesvirus 8 [Kaposi`s sarcoma-associated h
auggcaguggacacagucuggg

SEQ ID NO: 2152889 - RNA, 24 nt, Human herpesvirus 8 [Kaposi`s sarcoma-associated h
agucgggacucgcgcaugcgugaa

SEQ ID NO: 2152890 - RNA, 18 nt, Human herpesvirus 8 [Kaposi`s sarcoma-associated h
cggugcaugugacccggc

SEQ ID NO: 2152891 - RNA, 20 nt, Human herpesvirus 8 [Kaposi`s sarcoma-associated h
agcccuguuucugugccccc

SEQ ID NO: 2152892 - RNA, 14 nt, Human herpesvirus 8 [Kaposi`s sarcoma-associated h
ccauagcagucgcc

SEQ ID NO: 2152893 - RNA, 19 nt, Human herpesvirus 8 [Kaposi`s sarcoma-associated h
ccaagaucuuccagucucc

SEQ ID NO: 2152894 - RNA, 19 nt, Human herpesvirus 8 [Kaposi`s sarcoma-associated h
ccaacuucaucacaucccc

SEQ ID NO: 2152895 - RNA, 22 nt, Human herpesvirus 8 [Kaposi`s sarcoma-associated h
augucauuuuuacuuuuacaag

SEQ ID NO: 2152896 - RNA, 16 nt, Human herpesvirus 8 [Kaposi`s sarcoma-associated h
cgccccuggugggaca

SEQ ID NO: 2152897 - RNA, 13 nt, Human herpesvirus 8 [Kaposi`s sarcoma-associated h
cccggauuccucc

SEQ ID NO: 2152898 - RNA, 21 nt, Human herpesvirus 8 [Kaposi`s sarcoma-associated h
ucauguaccuggcguccagcu

SEQ ID NO: 2152899 - RNA, 22 nt, Human herpesvirus 8 [Kaposi`s sarcoma-associated h
cacuauggggucaggguggacg

SEQ ID NO: 2152900 - RNA, 19 nt, Human herpesvirus 8 [Kaposi`s sarcoma-associated h
agacggucuuuaggggcac

SEQ ID NO: 2152901 - RNA, 20 nt, Human herpesvirus 8 [Kaposi`s sarcoma-associated h
cacccuauuggucacaucuc

SEQ ID NO: 2152902 - RNA, 14 nt, Human herpesvirus 8 [Kaposi`s sarcoma-associated h
acgcagggugcggu

SEQ ID NO: 2152903 - RNA, 20 nt, Human herpesvirus 8 [Kaposi`s sarcoma-associated h
cagccucacggacaacgcca

SEQ ID NO: 2152904 - RNA, 15 nt, Human herpesvirus 8 [Kaposi`s sarcoma-associated h
gcagacgaccccccg

SEQ ID NO: 2152905 - RNA, 17 nt, Human herpesvirus 8 [Kaposi`s sarcoma-associated h
cugguucaggauuucga

SEQ ID NO: 2152906 - RNA, 14 nt, Human herpesvirus 8 [Kaposi`s sarcoma-associated h
cugucagauuuaca

SEQ ID NO: 2152907 - RNA, 14 nt, Human herpesvirus 8 [Kaposi`s sarcoma-associated h
cgacagcucgggcg

SEQ ID NO: 2152908 - RNA, 21 nt, Human herpesvirus 8 [Kaposi`s sarcoma-associated h
cgaaguguugauccuggggcg

SEQ ID NO: 2152909 - RNA, 12 nt, Human herpesvirus 8 [Kaposi`s sarcoma-associated h
ccacgcuaugug

SEQ ID NO: 2152910 - RNA, 19 nt, Human herpesvirus 8 [Kaposi`s sarcoma-associated h
aucugguugacacccugga

SEQ ID NO: 2152911 - RNA, 20 nt, Human herpesvirus 8 [Kaposi`s sarcoma-associated h
caugcugccacugccacgga

SEQ ID NO: 2152912 - RNA, 12 nt, Human herpesvirus 8 [Kaposi`s sarcoma-associated h
cauaauccccgg

SEQ ID NO: 2152913 - RNA, 17 nt, Human herpesvirus 8 [Kaposi`s sarcoma-associated h
aguauagugguuuacau

SEQ ID NO: 2152914 - RNA, 15 nt, Human herpesvirus 8 [Kaposi`s sarcoma-associated h
aacgugccugccaag

SEQ ID NO: 2152915 - RNA, 22 nt, Human herpesvirus 8 [Kaposi`s sarcoma-associated h
ucccagggugcgaaggaccuga

SEQ ID NO: 2152916 - RNA, 14 nt, Human herpesvirus 8 [Kaposi`s sarcoma-associated h
acuaaaaaggccac

SEQ ID NO: 2152917 - RNA, 20 nt, Human herpesvirus 8 [Kaposi`s sarcoma-associated h
caccaagccucccgugauug

SEQ ID NO: 2152918 - RNA, 17 nt, Human herpesvirus 8 [Kaposi`s sarcoma-associated h
cacggugcacugaagcg

SEQ ID NO: 2152919 - RNA, 19 nt, Human herpesvirus 8 [Kaposi`s sarcoma-associated h
acaucccccccgcaggcca

SEQ ID NO: 2152920 - RNA, 22 nt, Human herpesvirus 8 [Kaposi`s sarcoma-associated h
acaugagagacugcaggccauc

SEQ ID NO: 2152921 - RNA, 23 nt, Human herpesvirus 8 [Kaposi`s sarcoma-associated h
aaggcacaacucuacugcacaaa

SEQ ID NO: 2152922 - RNA, 16 nt, Human herpesvirus 8 [Kaposi`s sarcoma-associated h
caagaucuuccagucu

SEQ ID NO: 2152923 - RNA, 19 nt, Human herpesvirus 8 [Kaposi`s sarcoma-associated h
caacuucaucacauccccg

SEQ ID NO: 2152924 - RNA, 12 nt, Human herpesvirus 8 [Kaposi`s sarcoma-associated h
aucaucgguagc

SEQ ID NO: 2152925 - RNA, 23 nt, Human herpesvirus 8 [Kaposi`s sarcoma-associated h
cacacguagggcuuuacccucug

SEQ ID NO: 2152926 - RNA, 17 nt, Human herpesvirus 8 [Kaposi`s sarcoma-associated h
ccaugggugcuggugug

SEQ ID NO: 2152927 - RNA, 20 nt, Human herpesvirus 8 [Kaposi`s sarcoma-associated h
cuggcaugcugggauuuaga

SEQ ID NO: 2152928 - RNA, 19 nt, Human herpesvirus 8 [Kaposi`s sarcoma-associated h
cgggguccacggcgauguc

SEQ ID NO: 2152929 - RNA, 13 nt, Human herpesvirus 8 [Kaposi`s sarcoma-associated h
gccauucgcacca

SEQ ID NO: 2152930 - RNA, 20 nt, Human herpesvirus 8 [Kaposi`s sarcoma-associated h
ggaauacguccgucgguagc

SEQ ID NO: 2152931 - RNA, 16 nt, Human herpesvirus 8 [Kaposi`s sarcoma-associated h
gugacgugacgcccug

SEQ ID NO: 2152932 - RNA, 21 nt, Human herpesvirus 8 [Kaposi`s sarcoma-associated h
gccuagugggguggcgcgcca

SEQ ID NO: 2152933 - RNA, 23 nt, Human herpesvirus 8 [Kaposi`s sarcoma-associated h
ugaugguguuggacaccaccguc

SEQ ID NO: 2152934 - RNA, 23 nt, Human herpesvirus 8 [Kaposi`s sarcoma-associated h
guggcuuuugccuaaaaagaugc

SEQ ID NO: 2152935 - RNA, 20 nt, Human herpesvirus 8 [Kaposi`s sarcoma-associated h
uucacccgagccacaucguc

SEQ ID NO: 2152936 - RNA, 13 nt, Human herpesvirus 8 [Kaposi`s sarcoma-associated h
uucccccaucguc

SEQ ID NO: 2152937 - RNA, 19 nt, Human herpesvirus 8 [Kaposi`s sarcoma-associated h
uugugcucgacggagacac

SEQ ID NO: 2152938 - RNA, 19 nt, Human herpesvirus 8 [Kaposi`s sarcoma-associated h
uuggguugggaggugaccc

SEQ ID NO: 2152939 - RNA, 20 nt, Human herpesvirus 8 [Kaposi`s sarcoma-associated h
uguccucauuagucgggacu

SEQ ID NO: 2152940 - RNA, 16 nt, Human herpesvirus 8 [Kaposi`s sarcoma-associated h
ccgcccccuggugcuc

SEQ ID NO: 2152941 - RNA, 16 nt, Human herpesvirus 8 [Kaposi`s sarcoma-associated h
uccuccggugacugga

SEQ ID NO: 2152942 - RNA, 13 nt, Human herpesvirus 8 [Kaposi`s sarcoma-associated h
ggcgcucagggug

SEQ ID NO: 2152943 - RNA, 20 nt, Human herpesvirus 8 [Kaposi`s sarcoma-associated h
aggaucggaucuuuuacaau

SEQ ID NO: 2152944 - RNA, 20 nt, Human herpesvirus 8 [Kaposi`s sarcoma-associated h
agauaacggugucuaacugc

SEQ ID NO: 2152945 - RNA, 23 nt, Human herpesvirus 8 [Kaposi`s sarcoma-associated h
agcacacugugugguugguggug

SEQ ID NO: 2152946 - RNA, 17 nt, Human herpesvirus 8 [Kaposi`s sarcoma-associated h
agcacuagguuagguug

SEQ ID NO: 2152947 - RNA, 16 nt, Human herpesvirus 8 [Kaposi`s sarcoma-associated h
accugaugcaggccac

SEQ ID NO: 2152948 - RNA, 20 nt, Human herpesvirus 8 [Kaposi`s sarcoma-associated h
cauccgcgagccauucaucg

SEQ ID NO: 2152949 - RNA, 13 nt, Human herpesvirus 8 [Kaposi`s sarcoma-associated h
ccacagcaucccc

SEQ ID NO: 2152950 - RNA, 20 nt, Human herpesvirus 8 [Kaposi`s sarcoma-associated h
ccacaggacaagcugaugug

SEQ ID NO: 2152951 - RNA, 15 nt, Human herpesvirus 8 [Kaposi`s sarcoma-associated h
cguaaaccucgggcc

SEQ ID NO: 2152952 - RNA, 23 nt, Human herpesvirus 8 [Kaposi`s sarcoma-associated h
gaaugguaccauggcaaaaaaca

SEQ ID NO: 2152953 - RNA, 20 nt, Human herpesvirus 8 [Kaposi`s sarcoma-associated h
ucaccggaggaaugguggac

SEQ ID NO: 2152954 - RNA, 17 nt, Human herpesvirus 8 [Kaposi`s sarcoma-associated h
ugccaauaacccgcccu

SEQ ID NO: 2152955 - RNA, 22 nt, Human herpesvirus 8 [Kaposi`s sarcoma-associated h
ucacggacuuuauuauagaugc

SEQ ID NO: 2152956 - RNA, 23 nt, Human herpesvirus 8 [Kaposi`s sarcoma-associated h
gagugucaguaaaauaaaauaca

SEQ ID NO: 2152957 - RNA, 13 nt, Human herpesvirus 8 [Kaposi`s sarcoma-associated h
gagguuugaggcg

SEQ ID NO: 2152958 - RNA, 19 nt, Human herpesvirus 8 [Kaposi`s sarcoma-associated h
gcaccacggauggaauccg

SEQ ID NO: 2152959 - RNA, 23 nt, Human
agcuucuuaauauaacugccuua

SEQ ID NO: 2152960 - RNA, 22 nt, Human
agcuucuuaauauaacugccuu

SEQ ID NO: 2152961 - RNA, 21 nt, Human
agcuucuuaauauaacugccu

SEQ ID NO: 2152962 - RNA, 20 nt, Human
agcuucuuaauauaacugcc

SEQ ID NO: 2152963 - RNA, 23 nt, Human
agcuuccuuuguuuuuuuuuccu

SEQ ID NO: 2152964 - RNA, 20 nt, Human
agggacucaucauuuccauu

SEQ ID NO: 2152965 - RNA, 14 nt, Human
agaugaccccuccc

SEQ ID NO: 2152966 - RNA, 18 nt, Human
agagaggacgugggcggc

SEQ ID NO: 2152967 - RNA, 23 nt, Human
agcccaaagugguauagaaaugc

SEQ ID NO: 2152968 - RNA, 20 nt, Human
agcccaaagugguauagaaa

SEQ ID NO: 2152969 - RNA, 11 nt, Human
agccuccugag

SEQ ID NO: 2152970 - RNA, 11 nt, Human
augaccccucc

SEQ ID NO: 2152971 - RNA, 15 nt, Human
aucucucuucuuuuc

SEQ ID NO: 2152972 - RNA, 16 nt, Human
agucaaggaguggcuu

SEQ ID NO: 2152973 - RNA, 16 nt, Human
aguccacaguggaacc

SEQ ID NO: 2152974 - RNA, 23 nt, Human
aguuguuaauaaaaguacauguu

SEQ ID NO: 2152975 - RNA, 17 nt, Human
auaugcaguuuuccuua

SEQ ID NO: 2152976 - RNA, 24 nt, Human
acaacuugcacguauuuuaauagc

SEQ ID NO: 2152977 - RNA, 16 nt, Human
acauccaagcuuccuu

SEQ ID NO: 2152978 - RNA, 17 nt, Human
acauguuaaacuuacuu

SEQ ID NO: 2152979 - RNA, 20 nt, Human
agaaaagggaacugaacauu

SEQ ID NO: 2152980 - RNA, 19 nt, Human
acgugauuuugcuguagaa

SEQ ID NO: 2152981 - RNA, 14 nt, Human
aacuuuuuuuuaag

SEQ ID NO: 2152982 - RNA, 20 nt, Human
aacuuuuuuuuaaguuacac

SEQ ID NO: 2152983 - RNA, 14 nt, Human
aacugaauuuuguc

SEQ ID NO: 2152984 - RNA, 15 nt, Human
aacugaauuuugucu

SEQ ID NO: 2152985 - RNA, 23 nt, Human
aaagugagacuuugaggguguau

SEQ ID NO: 2152986 - RNA, 12 nt, Human
aaagugcuggga

SEQ ID NO: 2152987 - RNA, 21 nt, Human
aaagggaacugaacauuccag

SEQ ID NO: 2152988 - RNA, 16 nt, Human
aaagggaacugaacau

SEQ ID NO: 2152989 - RNA, 22 nt, Human
aauauaacugccuuaaaacuuu

SEQ ID NO: 2152990 - RNA, 21 nt, Human
aagaaauuuccacucaggucu

SEQ ID NO: 2152991 - RNA, 15 nt, Human
aaguuguuaauaaaa

SEQ ID NO: 2152992 - RNA, 17 nt, Human
aagugguauagaaaugc

SEQ ID NO: 2152993 - RNA, 13 nt, Human
aagugguauagaa

SEQ ID NO: 2152994 - RNA, 20 nt, Human
cugaguagcuggauuacagg

SEQ ID NO: 2152995 - RNA, 19 nt, Human
cugaguagcuggauuacag

SEQ ID NO: 2152996 - RNA, 21 nt, Human
cucgugguaggacuguagaaa

SEQ ID NO: 2152997 - RNA, 12 nt, Human
cucucaccuccu

SEQ ID NO: 2152998 - RNA, 17 nt, Human
cuccuaaaguagacuuc

SEQ ID NO: 2152999 - RNA, 13 nt, Human
cucaaacuccuga

SEQ ID NO: 2153000 - RNA, 14 nt, Human
cucaaacuccugac

SEQ ID NO: 2153001 - RNA, 13 nt, Human
cuacaguguacag

SEQ ID NO: 2153002 - RNA, 17 nt, Human
cgacugccaucuuggac

SEQ ID NO: 2153003 - RNA, 18 nt, Human
cgugauuuugcuguagaa

SEQ ID NO: 2153004 - RNA, 11 nt, Human
cccagcuguuu

SEQ ID NO: 2153005 - RNA, 21 nt, Human
ccuguccuucucucaccuccu

SEQ ID NO: 2153006 - RNA, 23 nt, Human
ccgcaggauuugggcucuuggaa

SEQ ID NO: 2153007 - RNA, 16 nt, Human
cauguuggccaggcug

SEQ ID NO: 2153008 - RNA, 17 nt, Human
cagucaaggaguggcuu

SEQ ID NO: 2153009 - RNA, 17 nt, Human
caggccacggcagccua

SEQ ID NO: 2153010 - RNA, 21 nt, Human
cagcuguuuaugcauagauaa

SEQ ID NO: 2153011 - RNA, 23 nt, Human
caccuacaguguacagucuugua

SEQ ID NO: 2153012 - RNA, 18 nt, Human
cacauuuuucagauauaa

SEQ ID NO: 2153013 - RNA, 14 nt, Human
cacauuuuucagau

SEQ ID NO: 2153014 - RNA, 22 nt, Human
caaguaauccaccugccucggc

SEQ ID NO: 2153015 - RNA, 13 nt, Human
auuuuuaaagaaa

SEQ ID NO: 2153016 - RNA, 20 nt, Human
auuuuuaaagaaaaguuuug

SEQ ID NO: 2153017 - RNA, 13 nt, Human
auuguacaguuuu

SEQ ID NO: 2153018 - RNA, 15 nt, Human
auuucagauuuguga

SEQ ID NO: 2153019 - RNA, 16 nt, Human
ggauuuuugucuugug

SEQ ID NO: 2153020 - RNA, 14 nt, Human
ggauuuuugucuug

SEQ ID NO: 2153021 - RNA, 21 nt, Human
gguuccggaauccuguccuca

SEQ ID NO: 2153022 - RNA, 21 nt, Human
aaaguauccugcuucugauau

SEQ ID NO: 2153023 - RNA, 20 nt, Human
aaagugguauagaaaugcug

SEQ ID NO: 2153024 - RNA, 17 nt, Human
aaagugguauagaaaug

SEQ ID NO: 2153025 - RNA, 16 nt, Human
aaagugguauagaaau

SEQ ID NO: 2153026 - RNA, 14 nt, Human
aaagcuagaaauga

SEQ ID NO: 2153027 - RNA, 15 nt, Human
guaaagcuagaaaug

SEQ ID NO: 2153028 - RNA, 16 nt, Human
guaaagcuagaaauga

SEQ ID NO: 2153029 - RNA, 17 nt, Human
gggggccaccuccccag

SEQ ID NO: 2153030 - RNA, 13 nt, Human
gguauagaaaugc

SEQ ID NO: 2153031 - RNA, 14 nt, Human
gggcugggcagcug

SEQ ID NO: 2153032 - RNA, 13 nt, Human
gggcugggcagcu

SEQ ID NO: 2153033 - RNA, 15 nt, Human
aaaaucugcuaggga

SEQ ID NO: 2153034 - RNA, 22 nt, Human
gcuuuugcuggucacugccaug

SEQ ID NO: 2153035 - RNA, 21 nt, Human
gcuuuugcuggucacugccau

SEQ ID NO: 2153036 - RNA, 19 nt, Human
gcuuuugcuggucacugcc

SEQ ID NO: 2153037 - RNA, 15 nt, Human
gcuuuugcuggucac

SEQ ID NO: 2153038 - RNA, 12 nt, Human
gcggcagagagg

SEQ ID NO: 2153039 - RNA, 12 nt, Human
gcccccagacgc

SEQ ID NO: 2153040 - RNA, 22 nt, Human
gauggaaaaaccacccccaaau

SEQ ID NO: 2153041 - RNA, 17 nt, Human
gagaggacgugggcggc

SEQ ID NO: 2153042 - RNA, 16 nt, Human
gagaggacgugggcgg

SEQ ID NO: 2153043 - RNA, 22 nt, Human
gaggacgugggcggcagagagg

SEQ ID NO: 2153044 - RNA, 20 nt, Human
gaggacgugggcggcagaga

SEQ ID NO: 2153045 - RNA, 18 nt, Human
gaggacgugggcggcaga

SEQ ID NO: 2153046 - RNA, 16 nt, Human
gaggacgugggcggca

SEQ ID NO: 2153047 - RNA, 15 nt, Human
gaggacgugggcggc

SEQ ID NO: 2153048 - RNA, 23 nt, Human
gaggacuguugacauccaagcuu

SEQ ID NO: 2153049 - RNA, 14 nt, Human
cuuuuuuuuaaguu

SEQ ID NO: 2153050 - RNA, 16 nt, Human
cugguuuuucaguuuu

SEQ ID NO: 2153051 - RNA, 15 nt, Human
cugguuuuucaguuu

SEQ ID NO: 2153052 - RNA, 14 nt, Human
cugguuuuucaguu

SEQ ID NO: 2153053 - RNA, 23 nt, Human
cuguccuucucucaccuccuaaa

SEQ ID NO: 2153054 - RNA, 20 nt, Human
cuguccuucucucaccuccu

SEQ ID NO: 2153055 - RNA, 15 nt, Human
cuguccuucucucac

SEQ ID NO: 2153056 - RNA, 14 nt, Human
uuuugcuguagaag

SEQ ID NO: 2153057 - RNA, 13 nt, Human
uuuugcuguagaa

SEQ ID NO: 2153058 - RNA, 19 nt, Human
uuuuguuucauauugaugu

SEQ ID NO: 2153059 - RNA, 12 nt, Human
uuuuguuucaua

SEQ ID NO: 2153060 - RNA, 13 nt, Human
auuaaguuguuaa

SEQ ID NO: 2153061 - RNA, 20 nt, Human
auuaaguuguuaauaaaagu

SEQ ID NO: 2153062 - RNA, 19 nt, Human
auuaaguuguuaauaaaag

SEQ ID NO: 2153063 - RNA, 14 nt, Human
auuaaguuguuaau

SEQ ID NO: 2153064 - RNA, 14 nt, Human
augugcccccagac

SEQ ID NO: 2153065 - RNA, 12 nt, Human
augugcccccag

SEQ ID NO: 2153066 - RNA, 20 nt, Human
uuuuaggccaaaaaaaugua

SEQ ID NO: 2153067 - RNA, 12 nt, Human
uuuucaguuuuc

SEQ ID NO: 2153068 - RNA, 14 nt, Human
uuuucaguuuucag

SEQ ID NO: 2153069 - RNA, 18 nt, Human
auucuccugccucagccu

SEQ ID NO: 2153070 - RNA, 22 nt, Human
auuuccacucaggucuguuuuc

SEQ ID NO: 2153071 - RNA, 16 nt, Human
auuuuacuuuuuccug

SEQ ID NO: 2153072 - RNA, 17 nt, Human
auuuuacuuuuuccugg

SEQ ID NO: 2153073 - RNA, 21 nt, Human
augagccaccgcgcccagccu

SEQ ID NO: 2153074 - RNA, 18 nt, Human
augagccaccgcgcccag

SEQ ID NO: 2153075 - RNA, 16 nt, Human
uuucucaaagaaauuu

SEQ ID NO: 2153076 - RNA, 15 nt, Human
uuucucaaagaaauu

SEQ ID NO: 2153077 - RNA, 14 nt, Human
uuucucaaagaaau

SEQ ID NO: 2153078 - RNA, 21 nt, Human
uuucuuuaguuuuugugaagu

SEQ ID NO: 2153079 - RNA, 19 nt, Human
uuuccuuaaauuaucuaaa

SEQ ID NO: 2153080 - RNA, 21 nt, Human
uuuaaagaaaaguuuuguaaa

SEQ ID NO: 2153081 - RNA, 17 nt, Human
uuuaaagaaaaguuuug

SEQ ID NO: 2153082 - RNA, 15 nt, Human
uuuaaagaaaaguuu

SEQ ID NO: 2153083 - RNA, 13 nt, Human
uuuaaagaaaagu

SEQ ID NO: 2153084 - RNA, 19 nt, Human
uuuauuaaauguagaaagu

SEQ ID NO: 2153085 - RNA, 15 nt, Human
uuucaguuuucagga

SEQ ID NO: 2153086 - RNA, 22 nt, Human
uucagauauaaaagacugacca

SEQ ID NO: 2153087 - RNA, 20 nt, Human
uucauaucuauuuauuaaau

SEQ ID NO: 2153088 - RNA, 19 nt, Human
uuccuaacaggauuagaca

SEQ ID NO: 2153089 - RNA, 21 nt, Human
uuccggaauccuguccucagc

SEQ ID NO: 2153090 - RNA, 16 nt, Human
aucaauucauaucuau

SEQ ID NO: 2153091 - RNA, 12 nt, Human
auauuguacagu

SEQ ID NO: 2153092 - RNA, 14 nt, Human
auauuguacaguuu

SEQ ID NO: 2153093 - RNA, 13 nt, Human
auauuguacaguu

SEQ ID NO: 2153094 - RNA, 18 nt, Human
auccuguccucagcuucu

SEQ ID NO: 2153095 - RNA, 17 nt, Human
auccuguccucagcuuc

SEQ ID NO: 2153096 - RNA, 14 nt, Human
auccuguccucagc

SEQ ID NO: 2153097 - RNA, 21 nt, Human
auccugcuucugauaugcagu

SEQ ID NO: 2153098 - RNA, 19 nt, Human
auccugcuucugauaugca

SEQ ID NO: 2153099 - RNA, 13 nt, Human
uucucucaccucc

SEQ ID NO: 2153100 - RNA, 16 nt, Human
aucccacuugccccug

SEQ ID NO: 2153101 - RNA, 13 nt, Human
auccaauuggaua

SEQ ID NO: 2153102 - RNA, 23 nt, Human
uggcuuacuacaugugggagcuu

SEQ ID NO: 2153103 - RNA, 20 nt, Human
uggcuuacuacaugugggag

SEQ ID NO: 2153104 - RNA, 17 nt, Human
uggcugcggcacccuug

SEQ ID NO: 2153105 - RNA, 16 nt, Human
uggcugcggcacccuu

SEQ ID NO: 2153106 - RNA, 13 nt, Human
uggcugcccacac

SEQ ID NO: 2153107 - RNA, 13 nt, Human
aggccacggcagc

SEQ ID NO: 2153108 - RNA, 22 nt, Human
aggccaacccaaaauaagcagg

SEQ ID NO: 2153109 - RNA, 13 nt, Human
aggccaaaaaaau

SEQ ID NO: 2153110 - RNA, 16 nt, Human
uggccaaguucuuagu

SEQ ID NO: 2153111 - RNA, 19 nt, Human
ugccugcggaguugugcac

SEQ ID NO: 2153112 - RNA, 17 nt, Human
ugccucagccuccugag

SEQ ID NO: 2153113 - RNA, 13 nt, Human
ugauucuccugcc

SEQ ID NO: 2153114 - RNA, 20 nt, Human
ugauuucagcaccuacagug

SEQ ID NO: 2153115 - RNA, 21 nt, Human
ugauuucagcaccuacagugu

SEQ ID NO: 2153116 - RNA, 16 nt, Human
aguguacagucuugua

SEQ ID NO: 2153117 - RNA, 15 nt, Human
aguguacagucuugu

SEQ ID NO: 2153118 - RNA, 13 nt, Human
aguguacagucuu

SEQ ID NO: 2153119 - RNA, 16 nt, Human
uguucuuaagacguga

SEQ ID NO: 2153120 - RNA, 17 nt, Human
aguguacagucuuguau

SEQ ID NO: 2153121 - RNA, 13 nt, Human
uuaccuaauuaga

SEQ ID NO: 2153122 - RNA, 18 nt, Human
auaacugccuuaaaacuu

SEQ ID NO: 2153123 - RNA, 20 nt, Human
auaaccaaagcccaaagugg

SEQ ID NO: 2153124 - RNA, 22 nt, Human
ugggucuucagggggccaggug

SEQ ID NO: 2153125 - RNA, 20 nt, Human
uggugaacauugcaauagaa

SEQ ID NO: 2153126 - RNA, 15 nt, Human
uggugaacauugcaa

SEQ ID NO: 2153127 - RNA, 22 nt, Human
ugugaagaucacguuccuuccc

SEQ ID NO: 2153128 - RNA, 13 nt, Human
agucuuuuccaug

SEQ ID NO: 2153129 - RNA, 15 nt, Human
agucuuuuccaugaa

SEQ ID NO: 2153130 - RNA, 20 nt, Human
ugucucgugguaggacugua

SEQ ID NO: 2153131 - RNA, 19 nt, Human
ugucucgugguaggacugu

SEQ ID NO: 2153132 - RNA, 18 nt, Human
ugucucgugguaggacug

SEQ ID NO: 2153133 - RNA, 21 nt, Human
ugucucgugguaggacuguag

SEQ ID NO: 2153134 - RNA, 18 nt, Human
ugucuuguguuucuuuag

SEQ ID NO: 2153135 - RNA, 19 nt, Human
uguccuucucucaccuccu

SEQ ID NO: 2153136 - RNA, 18 nt, Human
uguccuucucucaccucc

SEQ ID NO: 2153137 - RNA, 21 nt, Human
uguccuucucucaccuccuaa

SEQ ID NO: 2153138 - RNA, 20 nt, Human
ugucccuuucugugugaaga

SEQ ID NO: 2153139 - RNA, 21 nt, Human
uguauuaaguuguuaauaaaa

SEQ ID NO: 2153140 - RNA, 17 nt, Human
aguagcuggauuacagg

SEQ ID NO: 2153141 - RNA, 23 nt, Human
ucuuuuuuuuuuuuuaaagacag

SEQ ID NO: 2153142 - RNA, 21 nt, Human
agcaccuacaguguacagucu

SEQ ID NO: 2153143 - RNA, 19 nt, Human
agcaccuacaguguacagu

SEQ ID NO: 2153144 - RNA, 15 nt, Human
agcaccuacagugua

SEQ ID NO: 2153145 - RNA, 14 nt, Human
agcaccuacagugu

SEQ ID NO: 2153146 - RNA, 22 nt, Human
agcaccuacaguguacagucuu

SEQ ID NO: 2153147 - RNA, 16 nt, Human
agaucguucucugccu

SEQ ID NO: 2153148 - RNA, 16 nt, Human
ugaccugccaggcaca

SEQ ID NO: 2153149 - RNA, 19 nt, Human
ugaccugccaggcacacug

SEQ ID NO: 2153150 - RNA, 19 nt, Human
ugacuauuuuucagaaucu

SEQ ID NO: 2153151 - RNA, 16 nt, Human
ucuguugcccaggcug

SEQ ID NO: 2153152 - RNA, 19 nt, Human
agaagauggcacuuauaac

SEQ ID NO: 2153153 - RNA, 20 nt, Human
agaaagcccuuaggaagaau

SEQ ID NO: 2153154 - RNA, 22 nt, Human
agaaagcccuuaggaagaauuu

SEQ ID NO: 2153155 - RNA, 16 nt, Human
acugaacauuccagag

SEQ ID NO: 2153156 - RNA, 13 nt, Human
acugaacauucca

SEQ ID NO: 2153157 - RNA, 14 nt, Human
acugcaacuucugc

SEQ ID NO: 2153158 - RNA, 16 nt, Human
acugcaacuucugccu

SEQ ID NO: 2153159 - RNA, 22 nt, Human
acgucccuccacguucaccccu

SEQ ID NO: 2153160 - RNA, 12 nt, Human
acgucccuccac

SEQ ID NO: 2153161 - RNA, 13 nt, Human
acguucaccccuc

SEQ ID NO: 2153162 - RNA, 18 nt, Human
acguaaagcuagaaauga

SEQ ID NO: 2153163 - RNA, 17 nt, Human
acguaaagcuagaaaug

SEQ ID NO: 2153164 - RNA, 20 nt, Human
acucaagacuuccagagccu

SEQ ID NO: 2153165 - RNA, 16 nt, Human
ucaguuuucaggagug

SEQ ID NO: 2153166 - RNA, 13 nt, Human
ucagggggccagg

SEQ ID NO: 2153167 - RNA, 12 nt, Human
ucagggggccag

SEQ ID NO: 2153168 - RNA, 12 nt, Human
acccuucuuuuc

SEQ ID NO: 2153169 - RNA, 14 nt, Human
acauugcaauagaa

SEQ ID NO: 2153170 - RNA, 16 nt, Human
acauugcaauagaaau

SEQ ID NO: 2153171 - RNA, 15 nt, Human
acauugcaauagaaa

SEQ ID NO: 2153172 - RNA, 18 nt, Human
ucacguaaagcuagaaau

SEQ ID NO: 2153173 - RNA, 20 nt, Human
ucacguaaagcuagaaauga

SEQ ID NO: 2153174 - RNA, 19 nt, Human
ucacguaaagcuagaaaug

SEQ ID NO: 2153175 - RNA, 15 nt, Human
ucaccauguuggcca

SEQ ID NO: 2153176 - RNA, 21 nt, Human
ucaccauguuggccaggcugg

SEQ ID NO: 2153177 - RNA, 23 nt, Human
aauauuguacaguuuuuauugcu

SEQ ID NO: 2153178 - RNA, 17 nt, Human
aauauuguacaguuuuu

SEQ ID NO: 2153179 - RNA, 15 nt, Human
aauauuguacaguuu

SEQ ID NO: 2153180 - RNA, 14 nt, Human
aauauuguacaguu

SEQ ID NO: 2153181 - RNA, 12 nt, Human
aauauuccagag

SEQ ID NO: 2153182 - RNA, 20 nt, Human
uaacuagaacugaauuuugu

SEQ ID NO: 2153183 - RNA, 17 nt, Human
uaacuagaacugaauuu

SEQ ID NO: 2153184 - RNA, 14 nt, Human
uaacuagaacugaa

SEQ ID NO: 2153185 - RNA, 12 nt, Human
uaacuagaacug

SEQ ID NO: 2153186 - RNA, 18 nt, Human
uaacauggugugcuucuu

SEQ ID NO: 2153187 - RNA, 21 nt, Human
aauccuguccucagcuucuua

SEQ ID NO: 2153188 - RNA, 18 nt, Human
aauccuguccucagcuuc

SEQ ID NO: 2153189 - RNA, 15 nt, Human
aauccuguccucagc

SEQ ID NO: 2153190 - RNA, 14 nt, Human
aauccuggggaaca

SEQ ID NO: 2153191 - RNA, 21 nt, Human
aauccuggggaacauagaacu

SEQ ID NO: 2153192 - RNA, 13 nt, Human
aaucuuucugcag

SEQ ID NO: 2153193 - RNA, 13 nt, Human
aaugacacagucu

SEQ ID NO: 2153194 - RNA, 19 nt, Human
uaauagcgucauaacuaga

SEQ ID NO: 2153195 - RNA, 18 nt, Human
aaugcugguuuuucaguu

SEQ ID NO: 2153196 - RNA, 13 nt, Human
aaugugcccccag

SEQ ID NO: 2153197 - RNA, 13 nt, Human
uacaugugggagc

SEQ ID NO: 2153198 - RNA, 14 nt, Human
aauugacuuauuua

SEQ ID NO: 2153199 - RNA, 22 nt, Human
acagucaaggaguggcuuacua

SEQ ID NO: 2153200 - RNA, 21 nt, Human
uagugaaucacguaaagcuag

SEQ ID NO: 2153201 - RNA, 14 nt, Human
uaggacuguagaaa

SEQ ID NO: 2153202 - RNA, 13 nt, Human
uaggacuguagaa

SEQ ID NO: 2153203 - RNA, 19 nt, Human
aagaaagcccuuaggaaga

SEQ ID NO: 2153204 - RNA, 19 nt, Human
gugaaguuuaauugacuua

SEQ ID NO: 2153205 - RNA, 17 nt, Human
aacguuuuuccuguucu

SEQ ID NO: 2153206 - RNA, 20 nt, Human
gucuuguguuucuuuaguuu

SEQ ID NO: 2153207 - RNA, 20 nt, Human
gucacugccauggaggcaca

SEQ ID NO: 2153208 - RNA, 16 nt, Human
gucacugccauggagg

SEQ ID NO: 2153209 - RNA, 17 nt, Human
aaauuucucuacugucu

SEQ ID NO: 2153210 - RNA, 23 nt, Human
gucuaggcaggaccuguggccaa

SEQ ID NO: 2153211 - RNA, 13 nt, Human
uaaaacugucccu

SEQ ID NO: 2153212 - RNA, 20 nt, Human
uaaaaguacauguuaaacuu

SEQ ID NO: 2153213 - RNA, 21 nt, Human
aagugauucuccugccucagc

SEQ ID NO: 2153214 - RNA, 14 nt, Human
aaguuacacauuuu

SEQ ID NO: 2153215 - RNA, 22 nt, Human
guuccggaauccuguccucagc

SEQ ID NO: 2153216 - RNA, 19 nt, Human
guuccggaauccuguccuc

SEQ ID NO: 2153217 - RNA, 23 nt, Human
aagcuuccuuuguuuuuuuuucc

SEQ ID NO: 2153218 - RNA, 16 nt, Human
guucuuaagacgugau

SEQ ID NO: 2153219 - RNA, 22 nt, Human
guuagaguccaacguggggcag

SEQ ID NO: 2153220 - RNA, 12 nt, Human
guuaauaaaagu

SEQ ID NO: 2153221 - RNA, 16 nt, Human
guguuucuuuaguuuu

SEQ ID NO: 2153222 - RNA, 13 nt, Human
guguuucuuuagu

SEQ ID NO: 2153223 - RNA, 23 nt, Human
aagauggcacuuauaaccaaagc

SEQ ID NO: 2153224 - RNA, 19 nt, Human
cacaguggaaccagcccag

SEQ ID NO: 2153225 - RNA, 20 nt, Human
caaagugcugggauuacagg

SEQ ID NO: 2153226 - RNA, 19 nt, Human
caaagugcugggauuacag

SEQ ID NO: 2153227 - RNA, 14 nt, Human
caauauuguacagu

SEQ ID NO: 2153228 - RNA, 19 nt, Human
uuaugauuuuuaaagaaaa

SEQ ID NO: 2153229 - RNA, 16 nt, Human
uuaugauuuuuaaaga

SEQ ID NO: 2153230 - RNA, 13 nt, Human
uucauuuuuccua

SEQ ID NO: 2153231 - RNA, 15 nt, Human
uucauuuuuccuaac

SEQ ID NO: 2153232 - RNA, 13 nt, Human
uuccagagccuca

SEQ ID NO: 2153233 - RNA, 12 nt, Human
uucagauauaaa

SEQ ID NO: 2153234 - RNA, 15 nt, Human
uucagauauaaaaga

SEQ ID NO: 2153235 - RNA, 14 nt, Human
uucagauauaaaag

SEQ ID NO: 2153236 - RNA, 19 nt, Human
uucagauauaaaagacuga

SEQ ID NO: 2153237 - RNA, 13 nt, Human
uucugugugaaga

SEQ ID NO: 2153238 - RNA, 23 nt, Human
uucuuaguugcuguaugucucgu

SEQ ID NO: 2153239 - RNA, 15 nt, Human
uucuuaguugcugua

SEQ ID NO: 2153240 - RNA, 14 nt, Human
uucuuaguugcugu

SEQ ID NO: 2153241 - RNA, 22 nt, Human
uucugauaugcaguuuuccuua

SEQ ID NO: 2153242 - RNA, 23 nt, Human
uuucagcaccuacaguguacagu

SEQ ID NO: 2153243 - RNA, 18 nt, Human
uuucagauauaaaagacu

SEQ ID NO: 2153244 - RNA, 16 nt, Human
uuucagauauaaaaga

SEQ ID NO: 2153245 - RNA, 14 nt, Human
uuucagauauaaaa

SEQ ID NO: 2153246 - RNA, 21 nt, Human
uuuaauagcgucauaacuaga

SEQ ID NO: 2153247 - RNA, 22 nt, Human
uuuaauagcgucauaacuagaa

SEQ ID NO: 2153248 - RNA, 18 nt, Human
uuuaaguuacacauuuuu

SEQ ID NO: 2153249 - RNA, 19 nt, Human
uuguuaauaaaaguacaug

SEQ ID NO: 2153250 - RNA, 14 nt, Human
uuguuaauaaaagu

SEQ ID NO: 2153251 - RNA, 21 nt, Human
uuguuaauaaaaguacauguu

SEQ ID NO: 2153252 - RNA, 19 nt, Human
uuguguuucuuuaguuuuu

SEQ ID NO: 2153253 - RNA, 19 nt, Human
uugcacguauuuuaauagc

SEQ ID NO: 2153254 - RNA, 20 nt, Human
uuuuuaauaaagacaggguu

SEQ ID NO: 2153255 - RNA, 17 nt, Human
uuuuuaauaaagacagg

SEQ ID NO: 2153256 - RNA, 18 nt, Human
uuuuuaaguuacacauuu

SEQ ID NO: 2153257 - RNA, 15 nt, Human
uuuuucaguuuucag

SEQ ID NO: 2153258 - RNA, 12 nt, Human
uuuuucaguuuu

SEQ ID NO: 2153259 - RNA, 15 nt, Human
uuuucagauauaaaa

SEQ ID NO: 2153260 - RNA, 14 nt, Human
ugcaacuucugccu

SEQ ID NO: 2153261 - RNA, 13 nt, Human
ugcaacuucugcc

SEQ ID NO: 2153262 - RNA, 16 nt, Human
ugauuuugcuguagaa

SEQ ID NO: 2153263 - RNA, 14 nt, Human
ugauuuugcuguag

SEQ ID NO: 2153264 - RNA, 19 nt, Human
ugauuuugcuguagaagau

SEQ ID NO: 2153265 - RNA, 17 nt, Human
ugauuuugcuguagaag

SEQ ID NO: 2153266 - RNA, 19 nt, Human
ugauuuuuaaagaaaaguu

SEQ ID NO: 2153267 - RNA, 21 nt, Human
ugcaaugacacagucuuggcu

SEQ ID NO: 2153268 - RNA, 19 nt, Human
ugauaugcaguuuuccuua

SEQ ID NO: 2153269 - RNA, 18 nt, Human
uggggcagcacagagagg

SEQ ID NO: 2153270 - RNA, 16 nt, Human
uggggcagcacagaga

SEQ ID NO: 2153271 - RNA, 22 nt, Human
uggggcagcacagagagggggc

SEQ ID NO: 2153272 - RNA, 14 nt, Human
uggggcagcacaga

SEQ ID NO: 2153273 - RNA, 13 nt, Human
uggggcagcacag

SEQ ID NO: 2153274 - RNA, 23 nt, Human
uggccuccaaguccacaguggaa

SEQ ID NO: 2153275 - RNA, 13 nt, Human
uggccuccaaguc

SEQ ID NO: 2153276 - RNA, 19 nt, Human
ugucuaggcaggaccugug

SEQ ID NO: 2153277 - RNA, 17 nt, Human
ugucuaggcaggaccug

SEQ ID NO: 2153278 - RNA, 20 nt, Human
ugguuccggaauccuguccu

SEQ ID NO: 2153279 - RNA, 20 nt, Human
ugguggggcugccaggggag

SEQ ID NO: 2153280 - RNA, 16 nt, Human
ugguuuuucaguuuuc

SEQ ID NO: 2153281 - RNA, 23 nt, Human
ucccguggaacguuuuuccuguu

SEQ ID NO: 2153282 - RNA, 22 nt, Human
ucccguggaacguuuuuccugu

SEQ ID NO: 2153283 - RNA, 16 nt, Human
ucccguggaacguuuu

SEQ ID NO: 2153284 - RNA, 23 nt, Human
uccuuuguuuuuuuuuccugucc

SEQ ID NO: 2153285 - RNA, 19 nt, Human
uccuuuguuuuuuuuuccu

SEQ ID NO: 2153286 - RNA, 22 nt, Human
uccuguccuucucucaccuccu

SEQ ID NO: 2153287 - RNA, 16 nt, Human
uccuguccucagcuuc

SEQ ID NO: 2153288 - RNA, 14 nt, Human
uccugccucagccu

SEQ ID NO: 2153289 - RNA, 22 nt, Human
ucucaaagaaauuuccacucag

SEQ ID NO: 2153290 - RNA, 21 nt, Human
ucucaaagaaauuuccacuca

SEQ ID NO: 2153291 - RNA, 19 nt, Human
ucucaaagaaauuuccacu

SEQ ID NO: 2153292 - RNA, 22 nt, Human
ucgagguuucucaaagaaauuu

SEQ ID NO: 2153293 - RNA, 16 nt, Human
ucgagguuucucaaag

SEQ ID NO: 2153294 - RNA, 19 nt, Human
ucucgugguaggacuguag

SEQ ID NO: 2153295 - RNA, 21 nt, Human
ucucgugguaggacuguagaa

SEQ ID NO: 2153296 - RNA, 19 nt, Human
ucuucuuuuugcuucaaaa

SEQ ID NO: 2153297 - RNA, 20 nt, Human
ucaaagaaauuuccacucag

SEQ ID NO: 2153298 - RNA, 19 nt, Human
ucaaagaaauuuccacuca

SEQ ID NO: 2153299 - RNA, 13 nt, Human
ucaaagaaauuuc

SEQ ID NO: 2153300 - RNA, 12 nt, Human
ucaaagaaauuu

SEQ ID NO: 2153301 - RNA, 15 nt, Human
ucaaaugagaaaaug

SEQ ID NO: 2153302 - RNA, 13 nt, Human
uauuuauauaaau

SEQ ID NO: 2153303 - RNA, 18 nt, Human
ucaagugauucuccugcc

SEQ ID NO: 2153304 - RNA, 19 nt, Human
ucaagugauucuccugccu

SEQ ID NO: 2153305 - RNA, 21 nt, Human
uauugcuugcacaaaccaauu

SEQ ID NO: 2153306 - RNA, 19 nt, Human
uauugcuuguuggauuuuu

SEQ ID NO: 2153307 - RNA, 17 nt, Human
ucaccccuccacccuug

SEQ ID NO: 2153308 - RNA, 12 nt, Human
ucaccccuccac

SEQ ID NO: 2153309 - RNA, 17 nt, Human
ucagauauaaaagacug

SEQ ID NO: 2153310 - RNA, 14 nt, Human
ucagauauaaaaga

SEQ ID NO: 2153311 - RNA, 20 nt, Human
ucagauauaaaagacugacc

SEQ ID NO: 2153312 - RNA, 18 nt, Human
ucagauauaaaagacuga

SEQ ID NO: 2153313 - RNA, 21 nt, Human
ucagccuccugaguagcugga

SEQ ID NO: 2153314 - RNA, 13 nt, Human
ucagccuccugag

SEQ ID NO: 2153315 - RNA, 20 nt, Human
ucagccuccugaguagcugg

SEQ ID NO: 2153316 - RNA, 21 nt, Human
ucagggagugggcuaagcacg

SEQ ID NO: 2153317 - RNA, 16 nt, Human
ggccguggcugcccac

SEQ ID NO: 2153318 - RNA, 13 nt, Human
ggccguggcugcc

SEQ ID NO: 2153319 - RNA, 17 nt, Human
ggaggcacacagcugca

SEQ ID NO: 2153320 - RNA, 16 nt, Human
ggaggcacacagcugc

SEQ ID NO: 2153321 - RNA, 16 nt, Human
gccuuaaaacuuuaau

SEQ ID NO: 2153322 - RNA, 15 nt, Human
gcugcggcacccuug

SEQ ID NO: 2153323 - RNA, 14 nt, Human
gcugcggcacccuu

SEQ ID NO: 2153324 - RNA, 22 nt, Human
gcuuacaagccagcuggagaaa

SEQ ID NO: 2153325 - RNA, 13 nt, Human
gcuguuagagucc

SEQ ID NO: 2153326 - RNA, 18 nt, Human
gcuggucacugccaugga

SEQ ID NO: 2153327 - RNA, 15 nt, Human
gcuggucacugccau

SEQ ID NO: 2153328 - RNA, 13 nt, Human
gcuggucacugcc

SEQ ID NO: 2153329 - RNA, 19 nt, Human
gcuggucucaaacuccuga

SEQ ID NO: 2153330 - RNA, 20 nt, Human
gcuggucucaaacuccugac

SEQ ID NO: 2153331 - RNA, 21 nt, Human
gcuuacuacaugugggagcuu

SEQ ID NO: 2153332 - RNA, 14 nt, Human
gcuuguuggauuuu

SEQ ID NO: 2153333 - RNA, 15 nt, Human
gcagaugaccccucc

SEQ ID NO: 2153334 - RNA, 16 nt, Human
gcagaugaccccuccc

SEQ ID NO: 2153335 - RNA, 12 nt, Human
gccaaguucuua

SEQ ID NO: 2153336 - RNA, 13 nt, Human
gccacggcagccu

SEQ ID NO: 2153337 - RNA, 17 nt, Human
gccaccuccccaggccg

SEQ ID NO: 2153338 - RNA, 15 nt, Human
gccaccuccccaggc

SEQ ID NO: 2153339 - RNA, 17 nt, Human
gccaccgcgcccagccu

SEQ ID NO: 2153340 - RNA, 21 nt, Human
gauggcacuuauaaccaaagc

SEQ ID NO: 2153341 - RNA, 12 nt, Human
gaguagcuggau

SEQ ID NO: 2153342 - RNA, 18 nt, Human
gagccaccgcgcccagcc

SEQ ID NO: 2153343 - RNA, 24 nt, Human
gaggcacacagcugcagagacaga

SEQ ID NO: 2153344 - RNA, 20 nt, Human
gaggcacacagcugcagaga

SEQ ID NO: 2153345 - RNA, 20 nt, Human
gaggcggccccggccggggu

SEQ ID NO: 2153346 - RNA, 16 nt, Human
cucaagacuuccagag

SEQ ID NO: 2153347 - RNA, 14 nt, Human
cucaagacuuccag

SEQ ID NO: 2153348 - RNA, 18 nt, Human
cuccacguucaccccucc

SEQ ID NO: 2153349 - RNA, 16 nt, Human
cuccacguucaccccu

SEQ ID NO: 2153350 - RNA, 20 nt, Human
cuccacguucaccccuccac

SEQ ID NO: 2153351 - RNA, 23 nt, Human
cuccaaguccacaguggaaccag

SEQ ID NO: 2153352 - RNA, 13 nt, Human
cucauuaaaaaaa

SEQ ID NO: 2153353 - RNA, 20 nt, Human
cuccuuagaaguggaaguag

SEQ ID NO: 2153354 - RNA, 17 nt, Human
cuccuuagaaguggaag

SEQ ID NO: 2153355 - RNA, 13 nt, Human
cuccuuagaagug

SEQ ID NO: 2153356 - RNA, 21 nt, Human
cuccugccucagccuccugag

SEQ ID NO: 2153357 - RNA, 21 nt, Human
cugcggcacccuugcgcuuuu

SEQ ID NO: 2153358 - RNA, 15 nt, Human
cugaacauuccagag

SEQ ID NO: 2153359 - RNA, 20 nt, Human
cucuuuguucuaaagaugga

SEQ ID NO: 2153360 - RNA, 22 nt, Human
cucuguugcccaggcuggagug

SEQ ID NO: 2153361 - RNA, 20 nt, Human
cucuguugcccaggcuggag

SEQ ID NO: 2153362 - RNA, 23 nt, Human
gaaaugcugguuuuucaguuuuc

SEQ ID NO: 2153363 - RNA, 22 nt, Human
gaauccuguccucagcuucuua

SEQ ID NO: 2153364 - RNA, 18 nt, Human
gaaguuuaauugacuuau

SEQ ID NO: 2153365 - RNA, 18 nt, Human
cuuuguucuaaagaugga

SEQ ID NO: 2153366 - RNA, 21 nt, Human
cuuguuggauuuuugucuugu

SEQ ID NO: 2153367 - RNA, 21 nt, Human
cuuguguuucuuuaguuuuug

SEQ ID NO: 2153368 - RNA, 23 nt, Human
cuuguuggauuuuugucuugugu

SEQ ID NO: 2153369 - RNA, 15 nt, Human
cuuuaguuuuuguga

SEQ ID NO: 2153370 - RNA, 13 nt, Human
cuuuaguuuuugu

SEQ ID NO: 2153371 - RNA, 17 nt, Human
cuuuauuaaauguagaa

SEQ ID NO: 2153372 - RNA, 17 nt, Human
cuucauuuuuccuaaca

SEQ ID NO: 2153373 - RNA, 16 nt, Human
cuucauuuuuccuaac

SEQ ID NO: 2153374 - RNA, 14 nt, Human
cuucauuuuuccua

SEQ ID NO: 2153375 - RNA, 13 nt, Human
cuucauuuuuccu

SEQ ID NO: 2153376 - RNA, 22 nt, Human
cuuccuuuguuuuuuuuuccug

SEQ ID NO: 2153377 - RNA, 20 nt, Human
cuucccccgcaaugugcccc

SEQ ID NO: 2153378 - RNA, 23 nt, Human
cuguugacauccaagcuuccuuu

SEQ ID NO: 2153379 - RNA, 20 nt, Human
cuguugacauccaagcuucc

SEQ ID NO: 2153380 - RNA, 18 nt, Human
cuguucuuaagacgugau

SEQ ID NO: 2153381 - RNA, 16 nt, Human
cuuagaaguggaagua

SEQ ID NO: 2153382 - RNA, 21 nt, Human
ccuaccggcaauuuccggcca

SEQ ID NO: 2153383 - RNA, 20 nt, Human
ccuaccggcaauuuccggcc

SEQ ID NO: 2153384 - RNA, 21 nt, Human
ccgcaaugugcccccagacgc

SEQ ID NO: 2153385 - RNA, 18 nt, Human
ccuccacguucaccccuc

SEQ ID NO: 2153386 - RNA, 17 nt, Human
ccuccacguucaccccu

SEQ ID NO: 2153387 - RNA, 13 nt, Human
cccacacacccca

SEQ ID NO: 2153388 - RNA, 18 nt, Human
cccuccacguucaccccu

SEQ ID NO: 2153389 - RNA, 12 nt, Human
cccuaaugccug

SEQ ID NO: 2153390 - RNA, 17 nt, Human
cccgucgacguagaacc

SEQ ID NO: 2153391 - RNA, 16 nt, Human
ccuucucucaccuccu

SEQ ID NO: 2153392 - RNA, 18 nt, Human
ccuucucucaccuccuaa

SEQ ID NO: 2153393 - RNA, 17 nt, Human
ccuucucucaccuccua

SEQ ID NO: 2153394 - RNA, 19 nt, Human
ccuucucucaccuccuaaa

SEQ ID NO: 2153395 - RNA, 23 nt, Human
ccuuaaaacuuuaaucccacuug

SEQ ID NO: 2153396 - RNA, 14 nt, Human
ccuuagaaguggaa

SEQ ID NO: 2153397 - RNA, 23 nt, Human
ccaccuccccaggccguggcugc

SEQ ID NO: 2153398 - RNA, 16 nt, Human
ccaccuccccaggccg

SEQ ID NO: 2153399 - RNA, 13 nt, Human
ccaccuccccagg

SEQ ID NO: 2153400 - RNA, 17 nt, Human
ccacguucaccccucca

SEQ ID NO: 2153401 - RNA, 15 nt, Human
ccacguucaccccuc

SEQ ID NO: 2153402 - RNA, 14 nt, Human
ccacguucaccccu

SEQ ID NO: 2153403 - RNA, 12 nt, Human
ccacacacccca

SEQ ID NO: 2153404 - RNA, 13 nt, Human
ccacacaccccaa

SEQ ID NO: 2153405 - RNA, 19 nt, Human
ccagccucaucucuuuguu

SEQ ID NO: 2153406 - RNA, 16 nt, Human
ccaggccguggcugcc

SEQ ID NO: 2153407 - RNA, 14 nt, Human
ccaggccguggcug

SEQ ID NO: 2153408 - RNA, 18 nt, Human
ccaggccguggcugccca

SEQ ID NO: 2153409 - RNA, 21 nt, Human
cccaaagugguauagaaaugc

SEQ ID NO: 2153410 - RNA, 20 nt, Human
cccaaagugguauagaaaug

SEQ ID NO: 2153411 - RNA, 22 nt, Human
cauuuuacuuuuuccuggcuca

SEQ ID NO: 2153412 - RNA, 20 nt, Human
cauuuuacuuuuuccuggcu

SEQ ID NO: 2153413 - RNA, 17 nt, Human
cauuuuacuuuuuccug

SEQ ID NO: 2153414 - RNA, 22 nt, Human
cauuuacccuucuuuucugacu

SEQ ID NO: 2153415 - RNA, 20 nt, Human
cauggaggcacacagcugca

SEQ ID NO: 2153416 - RNA, 19 nt, Human
cauggaggcacacagcugc

SEQ ID NO: 2153417 - RNA, 16 nt, Human
cauggaggcacacagc

SEQ ID NO: 2153418 - RNA, 13 nt, Human
cauggaggcacac

SEQ ID NO: 2153419 - RNA, 20 nt, Human
caugcgggcugggcagcugu

SEQ ID NO: 2153420 - RNA, 19 nt, Human
caugcgggcugggcagcug

SEQ ID NO: 2153421 - RNA, 18 nt, Human
caugcgggcugggcagcu

SEQ ID NO: 2153422 - RNA, 15 nt, Human
caugcgggcugggca

SEQ ID NO: 2153423 - RNA, 21 nt, Human
caugcgggcugggcagcuguu

SEQ ID NO: 2153424 - RNA, 22 nt, Human
cauuaaaaaaaaaaaaaaaagu

SEQ ID NO: 2153425 - RNA, 14 nt, Human
cauguguuccaagg

SEQ ID NO: 2153426 - RNA, 19 nt, Human
cagggggccaggugcacag

SEQ ID NO: 2153427 - RNA, 11 nt, Human
cagggggccag

SEQ ID NO: 2153428 - RNA, 16 nt, Human
cagggggccaggugca

SEQ ID NO: 2153429 - RNA, 13 nt, Human
cagggggccaggu

SEQ ID NO: 2153430 - RNA, 23 nt, Human
caggcuggucucaaacuccugac

SEQ ID NO: 2153431 - RNA, 17 nt, Human
caggaguggguugauuu

SEQ ID NO: 2153432 - RNA, 17 nt, Human
cagucuuguauuaaguu

SEQ ID NO: 2153433 - RNA, 16 nt, Human
cagucuuggcucacug

SEQ ID NO: 2153434 - RNA, 22 nt, Human
cagcuucuuaauauaacugccu

SEQ ID NO: 2153435 - RNA, 17 nt, Human
caggaccuguggccaag

SEQ ID NO: 2153436 - RNA, 18 nt, Human
cagcuggagaaauauggu

SEQ ID NO: 2153437 - RNA, 20 nt, Human
cagccuccugaguagcugga

SEQ ID NO: 2153438 - RNA, 17 nt, Human
cagacgcacgugggucu

SEQ ID NO: 2153439 - RNA, 15 nt, Human
cagacgucccuccac

SEQ ID NO: 2153440 - RNA, 19 nt, Human
cagaaaacgguuaaaacug

SEQ ID NO: 2153441 - RNA, 20 nt, Human
cagaaaacgguuaaaacugu

SEQ ID NO: 2153442 - RNA, 16 nt, Human
cagagacagagaggac

SEQ ID NO: 2153443 - RNA, 14 nt, Human
cagagacagagagg

SEQ ID NO: 2153444 - RNA, 18 nt, Human
cagaugaccccuccccua

SEQ ID NO: 2153445 - RNA, 14 nt, Human
cagaugaccccucc

SEQ ID NO: 2153446 - RNA, 13 nt, Human
cagaugaccccuc

SEQ ID NO: 2153447 - RNA, 23 nt, Human
cagagucucgcucuguugcccag

SEQ ID NO: 2153448 - RNA, 15 nt, Human
caccuccccaggccg

SEQ ID NO: 2153449 - RNA, 14 nt, Human
caccuccccaggcc

SEQ ID NO: 2153450 - RNA, 21 nt, Human
caccuccccaggccguggcug

SEQ ID NO: 2153451 - RNA, 23 nt, Human
caccugguuccggaauccugucc

SEQ ID NO: 2153452 - RNA, 21 nt, Human
caccugguuccggaauccugu

SEQ ID NO: 2153453 - RNA, 20 nt, Human
caccugguuccggaauccug

SEQ ID NO: 2153454 - RNA, 16 nt, Human
caccugguuccggaau

SEQ ID NO: 2153455 - RNA, 23 nt, Human
cacguaguagggucaggccacgg

SEQ ID NO: 2153456 - RNA, 21 nt, Human
cacguaguagggucaggccac

SEQ ID NO: 2153457 - RNA, 20 nt, Human
cacguaguagggucaggcca

SEQ ID NO: 2153458 - RNA, 19 nt, Human
cacguaguagggucaggcc

SEQ ID NO: 2153459 - RNA, 17 nt, Human
cacguaguagggucagg

SEQ ID NO: 2153460 - RNA, 20 nt, Human
cacguuccuucccccgcaau

SEQ ID NO: 2153461 - RNA, 13 nt, Human
cacguucaccccu

SEQ ID NO: 2153462 - RNA, 16 nt, Human
cacucaggucuguuuu

SEQ ID NO: 2153463 - RNA, 18 nt, Human
cacuugccccuguuaccu

SEQ ID NO: 2153464 - RNA, 22 nt, Human
cacugccauggaggcacacagc

SEQ ID NO: 2153465 - RNA, 19 nt, Human
cacugccauggaggcacac

SEQ ID NO: 2153466 - RNA, 17 nt, Human
cacugccauggaggcac

SEQ ID NO: 2153467 - RNA, 17 nt, Human
cacugcaacuucugccu

SEQ ID NO: 2153468 - RNA, 16 nt, Human
cacugcaacuucugcc

SEQ ID NO: 2153469 - RNA, 12 nt, Human
auggaggcacac

SEQ ID NO: 2153470 - RNA, 19 nt, Human
aguggcuuacuacaugugg

SEQ ID NO: 2153471 - RNA, 16 nt, Human
aguuguuaauaaaagu

SEQ ID NO: 2153472 - RNA, 22 nt, Human
auaaauuuuuuuuguuucauau

SEQ ID NO: 2153473 - RNA, 19 nt, Human
auaaauuuuuuuuguuuca

SEQ ID NO: 2153474 - RNA, 18 nt, Human
aggaguggguugauuuca

SEQ ID NO: 2153475 - RNA, 16 nt, Human
agaggacgugggcggc

SEQ ID NO: 2153476 - RNA, 14 nt, Human
agaggacgugggcg

SEQ ID NO: 2153477 - RNA, 14 nt, Human
agacgucccuccac

SEQ ID NO: 2153478 - RNA, 17 nt, Human
agacgugauuuugcugu

SEQ ID NO: 2153479 - RNA, 16 nt, Human
aaucucuccauucccg

SEQ ID NO: 2153480 - RNA, 20 nt, Human
aaugauccccagcuguuuau

SEQ ID NO: 2153481 - RNA, 19 nt, Human
aaugauccccagcuguuua

SEQ ID NO: 2153482 - RNA, 22 nt, Human
aaugauccccagcuguuuaugc

SEQ ID NO: 2153483 - RNA, 16 nt, Human
aaugauccccagcugu

SEQ ID NO: 2153484 - RNA, 12 nt, Human
aauguuuccuuu

SEQ ID NO: 2153485 - RNA, 13 nt, Human
aauguuuccuuua

SEQ ID NO: 2153486 - RNA, 15 nt, Human
aaguaguggagcccc

SEQ ID NO: 2153487 - RNA, 18 nt, Human
aaguauccugcuucugau

SEQ ID NO: 2153488 - RNA, 19 nt, Human
aaguccacaguggaaccag

SEQ ID NO: 2153489 - RNA, 14 nt, Human
aaguccacagugga

SEQ ID NO: 2153490 - RNA, 19 nt, Human
aaagcccuuaggaagaauu

SEQ ID NO: 2153491 - RNA, 18 nt, Human
aaauuuuuuuuguuucau

SEQ ID NO: 2153492 - RNA, 17 nt, Human
aaauuuuuuuuguuuca

SEQ ID NO: 2153493 - RNA, 18 nt, Human
accccuccccuaaugccu

SEQ ID NO: 2153494 - RNA, 15 nt, Human
accagcccagacccu

SEQ ID NO: 2153495 - RNA, 14 nt, Human
acacauuuuucaga

SEQ ID NO: 2153496 - RNA, 15 nt, Human
acuuauuuauauaaa

SEQ ID NO: 2153497 - RNA, 18 nt, Human
acuauuuuucagaaucuc

SEQ ID NO: 2153498 - RNA, 14 nt, Human
acuauuuuucagaa

SEQ ID NO: 2153499 - RNA, 17 nt, Human
cucgugguaggacugua

SEQ ID NO: 2153500 - RNA, 16 nt, Human
cucgugguaggacugu

SEQ ID NO: 2153501 - RNA, 15 nt, Human
cucgugguaggacug

SEQ ID NO: 2153502 - RNA, 21 nt, Human
cgagguuucucaaagaaauuu

SEQ ID NO: 2153503 - RNA, 22 nt, Human
cucaaagaaauuuccacucagg

SEQ ID NO: 2153504 - RNA, 14 nt, Human
cuauuuuucagaau

SEQ ID NO: 2153505 - RNA, 20 nt, Human
ccugguuccggaauccuguc

SEQ ID NO: 2153506 - RNA, 21 nt, Human
ccugguuccggaauccugucc

SEQ ID NO: 2153507 - RNA, 23 nt, Human
ccuaauuagagcagaugaccccu

SEQ ID NO: 2153508 - RNA, 14 nt, Human
ccuaauuagagcag

SEQ ID NO: 2153509 - RNA, 14 nt, Human
ccucaaaugagaaa

SEQ ID NO: 2153510 - RNA, 21 nt, Human
ccucgagguuucucaaagaaa

SEQ ID NO: 2153511 - RNA, 20 nt, Human
cccaggcuggagugcaauga

SEQ ID NO: 2153512 - RNA, 12 nt, Human
caagauuucaga

SEQ ID NO: 2153513 - RNA, 20 nt, Human
cagaaagguuuucuucuuuu

SEQ ID NO: 2153514 - RNA, 22 nt, Human
caaaugagaaaaugucuuuauu

SEQ ID NO: 2153515 - RNA, 16 nt, Human
auugcuuguuggauuu

SEQ ID NO: 2153516 - RNA, 14 nt, Human
auugcuugcacaaa

SEQ ID NO: 2153517 - RNA, 15 nt, Human
cagucaaggaguggc

SEQ ID NO: 2153518 - RNA, 23 nt, Human
caggugcacagacgucccuccac

SEQ ID NO: 2153519 - RNA, 15 nt, Human
caggugcacagacgu

SEQ ID NO: 2153520 - RNA, 15 nt, Human
cagcugcagagacag

SEQ ID NO: 2153521 - RNA, 16 nt, Human
cagcugcagagacaga

SEQ ID NO: 2153522 - RNA, 20 nt, Human
cagcacagagagggggccac

SEQ ID NO: 2153523 - RNA, 17 nt, Human
cagcacagagagggggc

SEQ ID NO: 2153524 - RNA, 13 nt, Human
cagcacagagagg

SEQ ID NO: 2153525 - RNA, 12 nt, Human
cagcacagagag

SEQ ID NO: 2153526 - RNA, 15 nt, Human
cagcaccuacagugu

SEQ ID NO: 2153527 - RNA, 20 nt, Human
cagcaccuacaguguacagu

SEQ ID NO: 2153528 - RNA, 22 nt, Human
ccaaagugguauagaaaugcug

SEQ ID NO: 2153529 - RNA, 22 nt, Human
cauagcuuacaagccagcugga

SEQ ID NO: 2153530 - RNA, 19 nt, Human
cuguagaaaagggaacuga

SEQ ID NO: 2153531 - RNA, 20 nt, Human
cuuacauuuuacuuuuuccu

SEQ ID NO: 2153532 - RNA, 17 nt, Human
cuuacaagccagcugga

SEQ ID NO: 2153533 - RNA, 16 nt, Human
cuuacaagccagcugg

SEQ ID NO: 2153534 - RNA, 15 nt, Human
cuuaggaagaauuuu

SEQ ID NO: 2153535 - RNA, 23 nt, Human
cuuggguucaagugauucuccug

SEQ ID NO: 2153536 - RNA, 18 nt, Human
cuucuuaauauaacugcc

SEQ ID NO: 2153537 - RNA, 20 nt, Human
cuucuuaauauaacugccuu

SEQ ID NO: 2153538 - RNA, 19 nt, Human
gcacacagcugcagagaca

SEQ ID NO: 2153539 - RNA, 21 nt, Human
gcaccuacaguguacagucuu

SEQ ID NO: 2153540 - RNA, 19 nt, Human
gcaccuacaguguacaguc

SEQ ID NO: 2153541 - RNA, 18 nt, Human
gcaccuacaguguacagu

SEQ ID NO: 2153542 - RNA, 14 nt, Human
gcagcuguuagagu

SEQ ID NO: 2153543 - RNA, 17 nt, Human
gcagcuguuagagucca

SEQ ID NO: 2153544 - RNA, 17 nt, Human
gacaggguuucaccaug

SEQ ID NO: 2153545 - RNA, 22 nt, Human
gaguccaacguggggcagcaca

SEQ ID NO: 2153546 - RNA, 20 nt, Human
gaguccaacguggggcagca

SEQ ID NO: 2153547 - RNA, 16 nt, Human
aaaacgguuaaaacug

SEQ ID NO: 2153548 - RNA, 18 nt, Human
aaaacgguuaaaacuguc

SEQ ID NO: 2153549 - RNA, 12 nt, Human
guagaagauggc

SEQ ID NO: 2153550 - RNA, 14 nt, Human
guacucauuaaaaa

SEQ ID NO: 2153551 - RNA, 16 nt, Human
aaaguacauguuaaac

SEQ ID NO: 2153552 - RNA, 15 nt, Human
guaauccaccugccu

SEQ ID NO: 2153553 - RNA, 14 nt, Human
gggggccaggugca

SEQ ID NO: 2153554 - RNA, 17 nt, Human
aaacgguuaaaacuguc

SEQ ID NO: 2153555 - RNA, 15 nt, Human
aaacgguuaaaacug

SEQ ID NO: 2153556 - RNA, 12 nt, Human
aaacugucccuu

SEQ ID NO: 2153557 - RNA, 19 nt, Human
aaagacugaccaauauugu

SEQ ID NO: 2153558 - RNA, 9 nt, Human
aaagacaga

SEQ ID NO: 2153559 - RNA, 15 nt, Human
gccccugcucuggug

SEQ ID NO: 2153560 - RNA, 23 nt, Human
ggacuuucuuuucgccguggcug

SEQ ID NO: 2153561 - RNA, 21 nt, Human
ggacuuucuuuucgccguggc

SEQ ID NO: 2153562 - RNA, 19 nt, Human
ggaauccuguccucagcuu

SEQ ID NO: 2153563 - RNA, 14 nt, Human
ggaauccuguccuc

SEQ ID NO: 2153564 - RNA, 13 nt, Human
auuugucaacaaa

SEQ ID NO: 2153565 - RNA, 15 nt, Human
auuugucaacaaagu

SEQ ID NO: 2153566 - RNA, 16 nt, Human
auuuccacucaggucu

SEQ ID NO: 2153567 - RNA, 16 nt, Human
auuggauuugucuuug

SEQ ID NO: 2153568 - RNA, 21 nt, Human
auuguacaguuuuuauugcuu

SEQ ID NO: 2153569 - RNA, 15 nt, Human
auuguacaguuuuua

SEQ ID NO: 2153570 - RNA, 14 nt, Human
auuguacaguuuuu

SEQ ID NO: 2153571 - RNA, 20 nt, Human
auuuugcuguagaagauggc

SEQ ID NO: 2153572 - RNA, 18 nt, Human
auuuuguauauuuguauu

SEQ ID NO: 2153573 - RNA, 12 nt, Human
auuuugucuuua

SEQ ID NO: 2153574 - RNA, 16 nt, Human
auuuuucagauauaaa

SEQ ID NO: 2153575 - RNA, 14 nt, Human
auuuuugucuugug

SEQ ID NO: 2153576 - RNA, 19 nt, Human
auuccagagcguguaguga

SEQ ID NO: 2153577 - RNA, 19 nt, Human
auuaucuaaaaucugcuag

SEQ ID NO: 2153578 - RNA, 18 nt, Human
augcgggcugggcagcug

SEQ ID NO: 2153579 - RNA, 17 nt, Human
augcgggcugggcagcu

SEQ ID NO: 2153580 - RNA, 19 nt, Human
augcgggcugggcagcugu

SEQ ID NO: 2153581 - RNA, 14 nt, Human
uuucugcagaaaca

SEQ ID NO: 2153582 - RNA, 17 nt, Human
auguaaaagacuuuuuu

SEQ ID NO: 2153583 - RNA, 19 nt, Human
uuugucuuuggugaacauu

SEQ ID NO: 2153584 - RNA, 21 nt, Human
uuugucuuguguuucuuuagu

SEQ ID NO: 2153585 - RNA, 16 nt, Human
augucucgugguagga

SEQ ID NO: 2153586 - RNA, 15 nt, Human
augucucgugguagg

SEQ ID NO: 2153587 - RNA, 19 nt, Human
augucucgugguaggacug

SEQ ID NO: 2153588 - RNA, 19 nt, Human
auguaugaggaauuucugu

SEQ ID NO: 2153589 - RNA, 18 nt, Human
aucaguagccagcaucug

SEQ ID NO: 2153590 - RNA, 21 nt, Human
uucuucuuuuugcuucaaaaa

SEQ ID NO: 2153591 - RNA, 17 nt, Human
uucuucuuuuugcuuca

SEQ ID NO: 2153592 - RNA, 23 nt, Human
uucuuaagacgugauuuugcugu

SEQ ID NO: 2153593 - RNA, 21 nt, Human
uucuuaagacgugauuuugcu

SEQ ID NO: 2153594 - RNA, 24 nt, Human
uuccuguccuucucucaccuccua

SEQ ID NO: 2153595 - RNA, 23 nt, Human
uuccuguccuucucucaccuccu

SEQ ID NO: 2153596 - RNA, 23 nt, Human
uucccguggaacguuuuuccugu

SEQ ID NO: 2153597 - RNA, 14 nt, Human
aucguucucugccu

SEQ ID NO: 2153598 - RNA, 20 nt, Human
aucugcuagggaauaucaau

SEQ ID NO: 2153599 - RNA, 21 nt, Human
uuggugaacauugcaauagaa

SEQ ID NO: 2153600 - RNA, 13 nt, Human
aucuuucugcaga

SEQ ID NO: 2153601 - RNA, 21 nt, Human
uuaguuuuugugaaguuuaau

SEQ ID NO: 2153602 - RNA, 18 nt, Human
uuaguuuuugugaaguuu

SEQ ID NO: 2153603 - RNA, 18 nt, Human
auaacuuuuuuuuaaguu

SEQ ID NO: 2153604 - RNA, 20 nt, Human
uuacagggaugagccaccgc

SEQ ID NO: 2153605 - RNA, 16 nt, Human
uuaauaaaaguacaug

SEQ ID NO: 2153606 - RNA, 20 nt, Human
aguuuuuauugcuuguugga

SEQ ID NO: 2153607 - RNA, 13 nt, Human
auacgauaaauaa

SEQ ID NO: 2153608 - RNA, 22 nt, Human
auagaaaugcugguuuuucagu

SEQ ID NO: 2153609 - RNA, 19 nt, Human
auagaaaugcugguuuuuc

SEQ ID NO: 2153610 - RNA, 13 nt, Human
auagaaaugcugg

SEQ ID NO: 2153611 - RNA, 19 nt, Human
agucucgcucuguugccca

SEQ ID NO: 2153612 - RNA, 18 nt, Human
agugguauagaaaugcug

SEQ ID NO: 2153613 - RNA, 16 nt, Human
agugguauagaaaugc

SEQ ID NO: 2153614 - RNA, 15 nt, Human
agugguauagaaaug

SEQ ID NO: 2153615 - RNA, 14 nt, Human
agugguauagaaau

SEQ ID NO: 2153616 - RNA, 19 nt, Human
uguuaauaaaaguacaugu

SEQ ID NO: 2153617 - RNA, 18 nt, Human
uguuaauaaaaguacaug

SEQ ID NO: 2153618 - RNA, 13 nt, Human
uguuaauaaaagu

SEQ ID NO: 2153619 - RNA, 22 nt, Human
uguagugaaucacguaaagcua

SEQ ID NO: 2153620 - RNA, 12 nt, Human
uguacaguuuuu

SEQ ID NO: 2153621 - RNA, 16 nt, Human
agguuucucaaagaaa

SEQ ID NO: 2153622 - RNA, 19 nt, Human
agguuucucaaagaaauuu

SEQ ID NO: 2153623 - RNA, 21 nt, Human
uggcucacugcaacuucugcc

SEQ ID NO: 2153624 - RNA, 20 nt, Human
aggccguggcugcccacaca

SEQ ID NO: 2153625 - RNA, 12 nt, Human
aggccguggcug

SEQ ID NO: 2153626 - RNA, 14 nt, Human
uggaaguaguggag

SEQ ID NO: 2153627 - RNA, 17 nt, Human
uggaaguaguggagccc

SEQ ID NO: 2153628 - RNA, 17 nt, Human
agcuggagaaauauggu

SEQ ID NO: 2153629 - RNA, 16 nt, Human
ugcccacacaccccaa

SEQ ID NO: 2153630 - RNA, 22 nt, Human
agccuaccggcaauuuccggcc

SEQ ID NO: 2153631 - RNA, 24 nt, Human
ugcagagacagagaggacgugggc

SEQ ID NO: 2153632 - RNA, 19 nt, Human
ugcacguaguagggucagg

SEQ ID NO: 2153633 - RNA, 22 nt, Human
ugcacguaguagggucaggcca

SEQ ID NO: 2153634 - RNA, 17 nt, Human
ugcacguauuuuaauag

SEQ ID NO: 2153635 - RNA, 12 nt, Human
ugcaguuuuccu

SEQ ID NO: 2153636 - RNA, 19 nt, Human
acuuugaggguguauauuu

SEQ ID NO: 2153637 - RNA, 15 nt, Human
acuuuuuuuuaaguu

SEQ ID NO: 2153638 - RNA, 20 nt, Human
agaaaacgguuaaaacuguc

SEQ ID NO: 2153639 - RNA, 15 nt, Human
agaaagaagaugaau

SEQ ID NO: 2153640 - RNA, 15 nt, Human
ucugcagaaacagaa

SEQ ID NO: 2153641 - RNA, 21 nt, Human
agaacucaugacggaagaguu

SEQ ID NO: 2153642 - RNA, 15 nt, Human
ucuuaauauaacugc

SEQ ID NO: 2153643 - RNA, 19 nt, Human
ucuuaauauaacugccuua

SEQ ID NO: 2153644 - RNA, 18 nt, Human
ucuuaauauaacugccuu

SEQ ID NO: 2153645 - RNA, 19 nt, Human
agacaggguuucaccaugu

SEQ ID NO: 2153646 - RNA, 19 nt, Human
agaccuaacgagaaauaga

SEQ ID NO: 2153647 - RNA, 17 nt, Human
agcagaugaccccuccc

SEQ ID NO: 2153648 - RNA, 18 nt, Human
agaucacguuccuucccc

SEQ ID NO: 2153649 - RNA, 21 nt, Human
agcaaaaccaaauauuccaga

SEQ ID NO: 2153650 - RNA, 21 nt, Human
ugacuuauuuauauaaauuuu

SEQ ID NO: 2153651 - RNA, 17 nt, Human
ugacuuauuuauauaaa

SEQ ID NO: 2153652 - RNA, 20 nt, Human
ugacuuauuuauauaaauuu

SEQ ID NO: 2153653 - RNA, 20 nt, Human
accuccccaggccguggcug

SEQ ID NO: 2153654 - RNA, 19 nt, Human
accuccccaggccguggcu

SEQ ID NO: 2153655 - RNA, 14 nt, Human
accuccccaggccg

SEQ ID NO: 2153656 - RNA, 13 nt, Human
accuccccaggcc

SEQ ID NO: 2153657 - RNA, 17 nt, Human
uccacguucaccccucc

SEQ ID NO: 2153658 - RNA, 22 nt, Human
accugguuccggaauccugucc

SEQ ID NO: 2153659 - RNA, 18 nt, Human
uccaacguggggcagcac

SEQ ID NO: 2153660 - RNA, 17 nt, Human
uccaacguggggcagca

SEQ ID NO: 2153661 - RNA, 19 nt, Human
uccaacguggggcagcaca

SEQ ID NO: 2153662 - RNA, 14 nt, Human
uccacagugacucc

SEQ ID NO: 2153663 - RNA, 20 nt, Human
uccacaguggaaccagccca

SEQ ID NO: 2153664 - RNA, 16 nt, Human
uccacaguggaaccag

SEQ ID NO: 2153665 - RNA, 19 nt, Human
uccugaguagcuggauuac

SEQ ID NO: 2153666 - RNA, 19 nt, Human
uccuguucuuaagacguga

SEQ ID NO: 2153667 - RNA, 23 nt, Human
acuguagaaaagggaacugaaca

SEQ ID NO: 2153668 - RNA, 23 nt, Human
uccccaggccguggcugcccaca

SEQ ID NO: 2153669 - RNA, 21 nt, Human
uccccaggccguggcugccca

SEQ ID NO: 2153670 - RNA, 19 nt, Human
uccccaggccguggcugcc

SEQ ID NO: 2153671 - RNA, 17 nt, Human
acucaagacuuccagag

SEQ ID NO: 2153672 - RNA, 15 nt, Human
acuccugaccucaag

SEQ ID NO: 2153673 - RNA, 15 nt, Human
acagagaggacgugg

SEQ ID NO: 2153674 - RNA, 21 nt, Human
acagagagggggccaccuccc

SEQ ID NO: 2153675 - RNA, 17 nt, Human
uauuguacaguuuuuau

SEQ ID NO: 2153676 - RNA, 15 nt, Human
uauuguacaguuuuu

SEQ ID NO: 2153677 - RNA, 14 nt, Human
uauuguacaguuuu

SEQ ID NO: 2153678 - RNA, 13 nt, Human
uauuguacaguuu

SEQ ID NO: 2153679 - RNA, 12 nt, Human
uauuguacaguu

SEQ ID NO: 2153680 - RNA, 11 nt, Human
uauuguacagu

SEQ ID NO: 2153681 - RNA, 18 nt, Human
acagucaaggaguggcuu

SEQ ID NO: 2153682 - RNA, 17 nt, Human
acagucaaggaguggcu

SEQ ID NO: 2153683 - RNA, 21 nt, Human
acaguuaaaugagaacaugaa

SEQ ID NO: 2153684 - RNA, 14 nt, Human
acagucuuguauua

SEQ ID NO: 2153685 - RNA, 22 nt, Human
acagucuuguauuaaguuguua

SEQ ID NO: 2153686 - RNA, 18 nt, Human
acagucuuguauuaaguu

SEQ ID NO: 2153687 - RNA, 15 nt, Human
acagucuuguauuaa

SEQ ID NO: 2153688 - RNA, 16 nt, Human
aauuucucuacugucu

SEQ ID NO: 2153689 - RNA, 21 nt, Human
uagaaccucgagguuucucaa

SEQ ID NO: 2153690 - RNA, 22 nt, Human
uagaacugaauuuugucuuuau

SEQ ID NO: 2153691 - RNA, 17 nt, Human
uagaacugaauuuuguc

SEQ ID NO: 2153692 - RNA, 13 nt, Human
uagaacugaauuu

SEQ ID NO: 2153693 - RNA, 18 nt, Human
uagaagauggcacuuaua

SEQ ID NO: 2153694 - RNA, 19 nt, Human
uagagcagaugaccccucc

SEQ ID NO: 2153695 - RNA, 15 nt, Human
acaagccagcuggag

SEQ ID NO: 2153696 - RNA, 13 nt, Human
acaagccagcugg

SEQ ID NO: 2153697 - RNA, 13 nt, Human
uaauuuuuuacua

SEQ ID NO: 2153698 - RNA, 22 nt, Human
uaauuuuuguguuuuuaauaaa

SEQ ID NO: 2153699 - RNA, 18 nt, Human
uacaagccagcuggagaa

SEQ ID NO: 2153700 - RNA, 12 nt, Human
uacagucuugua

SEQ ID NO: 2153701 - RNA, 13 nt, Human
uacagucuuguau

SEQ ID NO: 2153702 - RNA, 14 nt, Human
aaguuuaauugacu

SEQ ID NO: 2153703 - RNA, 19 nt, Human
guuuuuuuuuccuguccuu

SEQ ID NO: 2153704 - RNA, 20 nt, Human
guuuuuuuuuccuguccuuc

SEQ ID NO: 2153705 - RNA, 17 nt, Human
aaguuacacauuuuuca

SEQ ID NO: 2153706 - RNA, 13 nt, Human
uaaagauggaaaa

SEQ ID NO: 2153707 - RNA, 9 nt, Human
uaaagacag

SEQ ID NO: 2153708 - RNA, 10 nt, Human
uaaagacaga

SEQ ID NO: 2153709 - RNA, 19 nt, Human
uaaacccaguaguggugac

SEQ ID NO: 2153710 - RNA, 19 nt, Human
uaaauuuuuuuuguuucau

SEQ ID NO: 2153711 - RNA, 22 nt, Human
aagaaaaguuuuguaaauuucu

SEQ ID NO: 2153712 - RNA, 21 nt, Human
aagaaaaguuuuguaaauuuc

SEQ ID NO: 2153713 - RNA, 16 nt, Human
aagaaaaguuuuguaa

SEQ ID NO: 2153714 - RNA, 15 nt, Human
aagaaaaguuuugua

SEQ ID NO: 2153715 - RNA, 14 nt, Human
aacuuggaaauagu

SEQ ID NO: 2153716 - RNA, 16 nt, Human
aagcaagauuucagau

SEQ ID NO: 2153717 - RNA, 16 nt, Human
aaccaaauauuccaga

SEQ ID NO: 2153718 - RNA, 16 nt, Human
gucucaaacuccugac

SEQ ID NO: 2153719 - RNA, 18 nt, Human
gucuucagggggccaggu

SEQ ID NO: 2153720 - RNA, 18 nt, Human
aacguggggcagcacaga

SEQ ID NO: 2153721 - RNA, 17 nt, Human
aacguggggcagcacag

SEQ ID NO: 2153722 - RNA, 22 nt, Human
aacguggggcagcacagagagg

SEQ ID NO: 2153723 - RNA, 17 nt, Human
aacuagaacugaauuuu

SEQ ID NO: 2153724 - RNA, 22 nt, Human
gugacaugcgggcugggcagcu

SEQ ID NO: 2153725 - RNA, 21 nt, Human
gugacaugcgggcugggcagc

SEQ ID NO: 2153726 - RNA, 20 nt, Human
gugacaugcgggcugggcag

SEQ ID NO: 2153727 - RNA, 16 nt, Human
gugacaugcgggcugg

SEQ ID NO: 2153728 - RNA, 15 nt, Human
aacugaacauuccag

SEQ ID NO: 2153729 - RNA, 14 nt, Human
caagugauucuccu

SEQ ID NO: 2153730 - RNA, 21 nt, Human
caagugauucuccugccucag

SEQ ID NO: 2153731 - RNA, 22 nt, Human
caagugauucuccugccucagc

SEQ ID NO: 2153732 - RNA, 16 nt, Human
caagugauucuccugc

SEQ ID NO: 2153733 - RNA, 22 nt, Human
cacagagagggggccaccuccc

SEQ ID NO: 2153734 - RNA, 16 nt, Human
cacagacgucccucca

SEQ ID NO: 2153735 - RNA, 21 nt, Human
caaugacacagucuuggcuca

SEQ ID NO: 2153736 - RNA, 19 nt, Human
caaugacacagucuuggcu

SEQ ID NO: 2153737 - RNA, 14 nt, Human
caaugacacagucu

SEQ ID NO: 2153738 - RNA, 13 nt, Human
uucugugcagcca

SEQ ID NO: 2153739 - RNA, 18 nt, Human
uugcagcgauuaauaaca

SEQ ID NO: 2153740 - RNA, 19 nt, Human
uugcagcgauuaauaacag

SEQ ID NO: 2153741 - RNA, 19 nt, Human
uugucuuuggugaacauug

SEQ ID NO: 2153742 - RNA, 22 nt, Human
uuuccuaacaggauuagacagu

SEQ ID NO: 2153743 - RNA, 18 nt, Human
uuuccuaacaggauuaga

SEQ ID NO: 2153744 - RNA, 17 nt, Human
uuuccacucaggucugu

SEQ ID NO: 2153745 - RNA, 21 nt, Human
uuugaggguguauauuuucug

SEQ ID NO: 2153746 - RNA, 15 nt, Human
uuaguugcuguaugu

SEQ ID NO: 2153747 - RNA, 13 nt, Human
uuaguugcuguau

SEQ ID NO: 2153748 - RNA, 14 nt, Human
uuaugcauagauaa

SEQ ID NO: 2153749 - RNA, 19 nt, Human
uuauugcagcgauuaauaa

SEQ ID NO: 2153750 - RNA, 18 nt, Human
uuccacucaggucuguuu

SEQ ID NO: 2153751 - RNA, 15 nt, Human
uucuaaagauggaaa

SEQ ID NO: 2153752 - RNA, 18 nt, Human
uuacuacaugugggagcu

SEQ ID NO: 2153753 - RNA, 21 nt, Human
uuagagcagaugaccccuccc

SEQ ID NO: 2153754 - RNA, 22 nt, Human
uuaggccaaaaaaauguaagau

SEQ ID NO: 2153755 - RNA, 20 nt, Human
uguuucauauugaugugugu

SEQ ID NO: 2153756 - RNA, 23 nt, Human
uuaauauaacugccuuaaaacuu

SEQ ID NO: 2153757 - RNA, 15 nt, Human
uuaauauaacugccu

SEQ ID NO: 2153758 - RNA, 12 nt, Human
uuaaagacagag

SEQ ID NO: 2153759 - RNA, 11 nt, Human
uuaaagacaga

SEQ ID NO: 2153760 - RNA, 21 nt, Human
ugguaugugacaugcgggcug

SEQ ID NO: 2153761 - RNA, 17 nt, Human
uggaggcacacagcugc

SEQ ID NO: 2153762 - RNA, 17 nt, Human
uggauuuuugucuugug

SEQ ID NO: 2153763 - RNA, 13 nt, Human
uggccaggcuggu

SEQ ID NO: 2153764 - RNA, 18 nt, Human
ugcgcuuuugcuggucac

SEQ ID NO: 2153765 - RNA, 17 nt, Human
ugcgcuuuugcugguca

SEQ ID NO: 2153766 - RNA, 16 nt, Human
ugcuggucacugccau

SEQ ID NO: 2153767 - RNA, 15 nt, Human
ugcugguuuuucagu

SEQ ID NO: 2153768 - RNA, 12 nt, Human
ugcugguuuuuc

SEQ ID NO: 2153769 - RNA, 18 nt, Human
ugcugguuuuucaguuuu

SEQ ID NO: 2153770 - RNA, 16 nt, Human
ugcugguuuuucaguu

SEQ ID NO: 2153771 - RNA, 18 nt, Human
ugaacauugcaauagaaa

SEQ ID NO: 2153772 - RNA, 12 nt, Human
ucuuguguuucu

SEQ ID NO: 2153773 - RNA, 20 nt, Human
ucgugguaggacuguagaaa

SEQ ID NO: 2153774 - RNA, 15 nt, Human
ucgugguaggacugu

SEQ ID NO: 2153775 - RNA, 14 nt, Human
ucgugguaggacug

SEQ ID NO: 2153776 - RNA, 14 nt, Human
uccuuagaagugga

SEQ ID NO: 2153777 - RNA, 15 nt, Human
uauugcuugcacaaa

SEQ ID NO: 2153778 - RNA, 22 nt, Human
uauugcagcgauuaauaacagg

SEQ ID NO: 2153779 - RNA, 15 nt, Human
uauuaaguuguuaau

SEQ ID NO: 2153780 - RNA, 18 nt, Human
uauguugguagauucuaa

SEQ ID NO: 2153781 - RNA, 16 nt, Human
guggcugcccacacac

SEQ ID NO: 2153782 - RNA, 18 nt, Human
uauacgauaaauaacuuu

SEQ ID NO: 2153783 - RNA, 23 nt, Human
uauauaaauuuuuuuuguuucau

SEQ ID NO: 2153784 - RNA, 23 nt, Human
uaugauuuuuaaagaaaaguuuu

SEQ ID NO: 2153785 - RNA, 12 nt, Human
uaugauuuuuaa

SEQ ID NO: 2153786 - RNA, 12 nt, Human
uaugaauaacau

SEQ ID NO: 2153787 - RNA, 14 nt, Human
guggccaaguucuu

SEQ ID NO: 2153788 - RNA, 22 nt, Human
guggaacguuuuuccuguucuu

SEQ ID NO: 2153789 - RNA, 16 nt, Human
gugagcuccuaagcca

SEQ ID NO: 2153790 - RNA, 18 nt, Human
gugaaucacguaaagcua

SEQ ID NO: 2153791 - RNA, 16 nt, Human
gugaaucacguaaagc

SEQ ID NO: 2153792 - RNA, 12 nt, Human
gugcccccagac

SEQ ID NO: 2153793 - RNA, 16 nt, Human
gugauuuugcuguaga

SEQ ID NO: 2153794 - RNA, 13 nt, Human
gugauucuccugc

SEQ ID NO: 2153795 - RNA, 13 nt, Human
guccucagcuucu

SEQ ID NO: 2153796 - RNA, 17 nt, Human
guccucagcuucuuaau

SEQ ID NO: 2153797 - RNA, 13 nt, Human
gucucgugguagg

SEQ ID NO: 2153798 - RNA, 15 nt, Human
gucaaggaguggcuu

SEQ ID NO: 2153799 - RNA, 17 nt, Human
gucauaacuagaacuga

SEQ ID NO: 2153800 - RNA, 22 nt, Human
gucauaacuagaacugaauuuu

SEQ ID NO: 2153801 - RNA, 14 nt, Human
ggggcugccagggg

SEQ ID NO: 2153802 - RNA, 20 nt, Human
ggguuucaccauguuggcca

SEQ ID NO: 2153803 - RNA, 14 nt, Human
ggugaacauugcaa

SEQ ID NO: 2153804 - RNA, 19 nt, Human
guaagaucguucucugccu

SEQ ID NO: 2153805 - RNA, 15 nt, Human
guaaaagacuuuuuu

SEQ ID NO: 2153806 - RNA, 14 nt, Human
guacagucuuguau

SEQ ID NO: 2153807 - RNA, 13 nt, Human
guacagucuugua

SEQ ID NO: 2153808 - RNA, 16 nt, Human
guacagucuuguauua

SEQ ID NO: 2153809 - RNA, 13 nt, Human
guacaguuuuuau

SEQ ID NO: 2153810 - RNA, 12 nt, Human
guacaguuuuua

SEQ ID NO: 2153811 - RNA, 20 nt, Human
guagaaaagggaacugaaca

SEQ ID NO: 2153812 - RNA, 16 nt, Human
gcgggcugggcagcug

SEQ ID NO: 2153813 - RNA, 14 nt, Human
gcgggcugggcagc

SEQ ID NO: 2153814 - RNA, 18 nt, Human
gccucagccuccugagua

SEQ ID NO: 2153815 - RNA, 16 nt, Human
gccucagccuccugag

SEQ ID NO: 2153816 - RNA, 20 nt, Human
ggagugcaaugacacagucu

SEQ ID NO: 2153817 - RNA, 20 nt, Human
gagggggccaccuccccagg

SEQ ID NO: 2153818 - RNA, 18 nt, Human
gagggggccaccucccca

SEQ ID NO: 2153819 - RNA, 22 nt, Human
gagggggccaccuccccaggcc

SEQ ID NO: 2153820 - RNA, 15 nt, Human
gaguggguugauuuc

SEQ ID NO: 2153821 - RNA, 20 nt, Human
gagguuucucaaagaaauuu

SEQ ID NO: 2153822 - RNA, 17 nt, Human
gcacagagagggggcca

SEQ ID NO: 2153823 - RNA, 15 nt, Human
gcacagagagggggc

SEQ ID NO: 2153824 - RNA, 18 nt, Human
gcacagacgucccuccac

SEQ ID NO: 2153825 - RNA, 23 nt, Human
gcacagagagggggccaccuccc

SEQ ID NO: 2153826 - RNA, 19 nt, Human
gcacagagagggggccacc

SEQ ID NO: 2153827 - RNA, 18 nt, Human
gauuacaggcaugugcca

SEQ ID NO: 2153828 - RNA, 16 nt, Human
gauuuugcuguagaag

SEQ ID NO: 2153829 - RNA, 20 nt, Human
gauuacagggaugagccacc

SEQ ID NO: 2153830 - RNA, 18 nt, Human
gauuacagggaugagcca

SEQ ID NO: 2153831 - RNA, 19 nt, Human
gacagagaggacgugggcg

SEQ ID NO: 2153832 - RNA, 18 nt, Human
gacagagaggacgugggc

SEQ ID NO: 2153833 - RNA, 15 nt, Human
gacaugcgggcuggg

SEQ ID NO: 2153834 - RNA, 14 nt, Human
gacaugcgggcugg

SEQ ID NO: 2153835 - RNA, 22 nt, Human
gacaugcgggcugggcagcugu

SEQ ID NO: 2153836 - RNA, 21 nt, Human
gacaugcgggcugggcagcug

SEQ ID NO: 2153837 - RNA, 20 nt, Human
gacaugcgggcugggcagcu

SEQ ID NO: 2153838 - RNA, 18 nt, Human
gacaugcgggcugggcag

SEQ ID NO: 2153839 - RNA, 19 nt, Human
gaccccuccccuaaugccu

SEQ ID NO: 2153840 - RNA, 18 nt, Human
gagagggggccaccuccc

SEQ ID NO: 2153841 - RNA, 21 nt, Human
gagccagcagccuggcucucc

SEQ ID NO: 2153842 - RNA, 19 nt, Human
cuggcaguggaacuaagaa

SEQ ID NO: 2153843 - RNA, 17 nt, Human
cugguuccggaauccug

SEQ ID NO: 2153844 - RNA, 18 nt, Human
cugguuccggaauccugu

SEQ ID NO: 2153845 - RNA, 15 nt, Human
cuguccucagcuucu

SEQ ID NO: 2153846 - RNA, 17 nt, Human
cuguccucagcuucuua

SEQ ID NO: 2153847 - RNA, 18 nt, Human
cuguggccaaguucuuag

SEQ ID NO: 2153848 - RNA, 16 nt, Human
cuguggccaaguucuu

SEQ ID NO: 2153849 - RNA, 20 nt, Human
cuucuccuuagaaguggaag

SEQ ID NO: 2153850 - RNA, 19 nt, Human
gaaaaguuuuguaaauuuc

SEQ ID NO: 2153851 - RNA, 19 nt, Human
ccuuuguuuuuuuuuccug

SEQ ID NO: 2153852 - RNA, 17 nt, Human
cggaauccuguccucag

SEQ ID NO: 2153853 - RNA, 18 nt, Human
cggaauccuguccucagc

SEQ ID NO: 2153854 - RNA, 15 nt, Human
cggaauccuguccuc

SEQ ID NO: 2153855 - RNA, 18 nt, Human
cgcacgugggucuucagg

SEQ ID NO: 2153856 - RNA, 13 nt, Human
ccugccucagccu

SEQ ID NO: 2153857 - RNA, 17 nt, Human
cuacaugugggagcuuu

SEQ ID NO: 2153858 - RNA, 16 nt, Human
cuacaugugggagcuu

SEQ ID NO: 2153859 - RNA, 14 nt, Human
cuaauuagagcaga

SEQ ID NO: 2153860 - RNA, 22 nt, Human
cuccaaguccacaguggaacca

SEQ ID NO: 2153861 - RNA, 14 nt, Human
ccguggcugcggca

SEQ ID NO: 2153862 - RNA, 15 nt, Human
ccuacaguguacagu

SEQ ID NO: 2153863 - RNA, 20 nt, Human
ccuacaguguacagucuugu

SEQ ID NO: 2153864 - RNA, 16 nt, Human
ccuacaguguacaguc

SEQ ID NO: 2153865 - RNA, 23 nt, Human
ccagagccucaaaugagaaaaug

SEQ ID NO: 2153866 - RNA, 20 nt, Human
ccagagccucaaaugagaaa

SEQ ID NO: 2153867 - RNA, 16 nt, Human
ccaggugcacagacgu

SEQ ID NO: 2153868 - RNA, 13 nt, Human
ccaggugcacaga

SEQ ID NO: 2153869 - RNA, 19 nt, Human
ccaggugcacagacguccc

SEQ ID NO: 2153870 - RNA, 14 nt, Human
ccaggcuggucuca

SEQ ID NO: 2153871 - RNA, 17 nt, Human
accggcaauuuccggcc

SEQ ID NO: 2153872 - RNA, 18 nt, Human
accggcaauuuccggcca

SEQ ID NO: 2153873 - RNA, 19 nt, Human
acgcacgugggucuucagg

SEQ ID NO: 2153874 - RNA, 20 nt, Human
acgcacgugggucuucaggg

SEQ ID NO: 2153875 - RNA, 19 nt, Human
accuguggccaaguucuua

SEQ ID NO: 2153876 - RNA, 18 nt, Human
accuguggccaaguucuu

SEQ ID NO: 2153877 - RNA, 14 nt, Human
acuaaucuuucugc

SEQ ID NO: 2153878 - RNA, 17 nt, Human
acuauugcuugcacaaa

SEQ ID NO: 2153879 - RNA, 13 nt, Human
acuucugccucuu

SEQ ID NO: 2153880 - RNA, 21 nt, Human
acugaccaauauuguacaguu

SEQ ID NO: 2153881 - RNA, 20 nt, Human
acugaccaauauuguacagu

SEQ ID NO: 2153882 - RNA, 22 nt, Human
acugaccaauauuguacaguuu

SEQ ID NO: 2153883 - RNA, 21 nt, Human
acagcugcagagacagagagg

SEQ ID NO: 2153884 - RNA, 17 nt, Human
acagcugcagagacaga

SEQ ID NO: 2153885 - RNA, 15 nt, Human
acagcugcagagaca

SEQ ID NO: 2153886 - RNA, 17 nt, Human
acaguguacagucuugu

SEQ ID NO: 2153887 - RNA, 15 nt, Human
acaguguacagucuu

SEQ ID NO: 2153888 - RNA, 18 nt, Human
acaguguacagucuugua

SEQ ID NO: 2153889 - RNA, 13 nt, Human
acaguguacaguc

SEQ ID NO: 2153890 - RNA, 12 nt, Human
acaguguacagu

SEQ ID NO: 2153891 - RNA, 23 nt, Human
aaguagacuucauuuuuccuaac

SEQ ID NO: 2153892 - RNA, 19 nt, Human
aaguagacuucauuuuucc

SEQ ID NO: 2153893 - RNA, 14 nt, Human
aacuuacuuagugu

SEQ ID NO: 2153894 - RNA, 19 nt, Human
aauccaccugccucggccu

SEQ ID NO: 2153895 - RNA, 18 nt, Human
aauccaccugccucggcc

SEQ ID NO: 2153896 - RNA, 13 nt, Human
aauauaacugccu

SEQ ID NO: 2153897 - RNA, 16 nt, Human
aauagaaauccaauug

SEQ ID NO: 2153898 - RNA, 17 nt, Human
aauagaaauggggaacu

SEQ ID NO: 2153899 - RNA, 22 nt, Human
aaguucuuaguugcuguauguc

SEQ ID NO: 2153900 - RNA, 15 nt, Human
aaguucuuaguugcu

SEQ ID NO: 2153901 - RNA, 16 nt, Human
aacaggauuagacagu

SEQ ID NO: 2153902 - RNA, 19 nt, Human
aacaggauuagacagucaa

SEQ ID NO: 2153903 - RNA, 14 nt, Human
aacgguuaaaacug

SEQ ID NO: 2153904 - RNA, 13 nt, Human
aacgguuaaaacu

SEQ ID NO: 2153905 - RNA, 18 nt, Human
aaagcccaaagugguaua

SEQ ID NO: 2153906 - RNA, 16 nt, Human
aggaccuguggccaag

SEQ ID NO: 2153907 - RNA, 22 nt, Human
aggcuggucucaaacuccugac

SEQ ID NO: 2153908 - RNA, 11 nt, Human
agacagagucu

SEQ ID NO: 2153909 - RNA, 12 nt, Human
agagggggccac

SEQ ID NO: 2153910 - RNA, 19 nt, Human
agagagggggccaccuccc

SEQ ID NO: 2153911 - RNA, 16 nt, Human
agagagggggccaccu

SEQ ID NO: 2153912 - RNA, 14 nt, Human
agagagggggccac

SEQ ID NO: 2153913 - RNA, 17 nt, Human
agagccucaaaugagaa

SEQ ID NO: 2153914 - RNA, 14 nt, Human
agagccucaaauga

SEQ ID NO: 2153915 - RNA, 22 nt, Human
agacugaccaauauuguacagu

SEQ ID NO: 2153916 - RNA, 16 nt, Human
augccugcggaguugu

SEQ ID NO: 2153917 - RNA, 19 nt, Human
auggaggcacacagcugca

SEQ ID NO: 2153918 - RNA, 23 nt, Human
aguccaacguggggcagcacaga

SEQ ID NO: 2153919 - RNA, 22 nt, Human
aguccaacguggggcagcacag

SEQ ID NO: 2153920 - RNA, 20 nt, Human
aguccaacguggggcagcac

SEQ ID NO: 2153921 - RNA, 19 nt, Human
aguccaacguggggcagca

SEQ ID NO: 2153922 - RNA, 18 nt, Human
aguccaacguggggcagc

SEQ ID NO: 2153923 - RNA, 16 nt, Human
auaugcaguuuuccuu

SEQ ID NO: 2153924 - RNA, 22 nt, Human
cucagccuccugaguagcugga

SEQ ID NO: 2153925 - RNA, 14 nt, Human
cucagccuccugag

SEQ ID NO: 2153926 - RNA, 20 nt, Human
cguggggcagcacagagagg

SEQ ID NO: 2153927 - RNA, 22 nt, Human
cgugggucuucagggggccagg

SEQ ID NO: 2153928 - RNA, 17 nt, Human
cggcucuggccuccaag

SEQ ID NO: 2153929 - RNA, 17 nt, Human
cuacaguguacagucuu

SEQ ID NO: 2153930 - RNA, 16 nt, Human
cuacaguguacagucu

SEQ ID NO: 2153931 - RNA, 14 nt, Human
cuacaguguacagu

SEQ ID NO: 2153932 - RNA, 15 nt, Human
cuacaguguacaguc

SEQ ID NO: 2153933 - RNA, 20 nt, Human
cuacaguguacagucuugua

SEQ ID NO: 2153934 - RNA, 15 nt, Human
cuagaacugaauuuu

SEQ ID NO: 2153935 - RNA, 23 nt, Human
cuagaaaugauccccagcuguuu

SEQ ID NO: 2153936 - RNA, 13 nt, Human
cgccguggcugcg

SEQ ID NO: 2153937 - RNA, 20 nt, Human
ccuucugaaaaaguauccug

SEQ ID NO: 2153938 - RNA, 21 nt, Human
ccuccaaguccacaguggaac

SEQ ID NO: 2153939 - RNA, 18 nt, Human
ccuccaaguccacagugg

SEQ ID NO: 2153940 - RNA, 14 nt, Human
ccucagccuccuga

SEQ ID NO: 2153941 - RNA, 19 nt, Human
ccugaguagcuggauuaca

SEQ ID NO: 2153942 - RNA, 15 nt, Human
ccugaguagcuggau

SEQ ID NO: 2153943 - RNA, 20 nt, Human
ccugaguagcuggauuacag

SEQ ID NO: 2153944 - RNA, 22 nt, Human
cagcuguuagaguccaacgugg

SEQ ID NO: 2153945 - RNA, 16 nt, Human
caggccacggcagccu

SEQ ID NO: 2153946 - RNA, 21 nt, Human
cagagaggacgugggcggcag

SEQ ID NO: 2153947 - RNA, 18 nt, Human
cagagaggacgugggcgg

SEQ ID NO: 2153948 - RNA, 17 nt, Human
cagagaggacgugggcg

SEQ ID NO: 2153949 - RNA, 16 nt, Human
cagagaggacgugggc

SEQ ID NO: 2153950 - RNA, 17 nt, Human
ccaagcuuccuuuguuu

SEQ ID NO: 2153951 - RNA, 22 nt, Human
ccaaagugcugggauuacaggg

SEQ ID NO: 2153952 - RNA, 20 nt, Human
ccaacguggggcagcacaga

SEQ ID NO: 2153953 - RNA, 16 nt, Human
ccaacguggggcagca

SEQ ID NO: 2153954 - RNA, 15 nt, Human
ccaacguggggcagc

SEQ ID NO: 2153955 - RNA, 19 nt, Human
ccaaagugguauagaaaug

SEQ ID NO: 2153956 - RNA, 15 nt, Human
cacacagcugcagag

SEQ ID NO: 2153957 - RNA, 17 nt, Human
caaguccacaguggaac

SEQ ID NO: 2153958 - RNA, 23 nt, Human
caccugccucggccucccaaagu

SEQ ID NO: 2153959 - RNA, 17 nt, Human
caccuacaguguacagu

SEQ ID NO: 2153960 - RNA, 16 nt, Human
caccuacaguguacag

SEQ ID NO: 2153961 - RNA, 13 nt, Human
caccuacagugua

SEQ ID NO: 2153962 - RNA, 20 nt, Human
caccuacaguguacagucuu

SEQ ID NO: 2153963 - RNA, 19 nt, Human
auuagcauuugucaacaaa

SEQ ID NO: 2153964 - RNA, 13 nt, Human
cuggcucaucucu

SEQ ID NO: 2153965 - RNA, 12 nt, Human
cugggcagcugu

SEQ ID NO: 2153966 - RNA, 23 nt, Human
cuuuuuuuuuuuuuaaagacaga

SEQ ID NO: 2153967 - RNA, 22 nt, Human
cuuuuuuuuuuuuuaaagacag

SEQ ID NO: 2153968 - RNA, 19 nt, Human
cuugcgcuuuugcugguca

SEQ ID NO: 2153969 - RNA, 17 nt, Human
gauacgacaacuugcac

SEQ ID NO: 2153970 - RNA, 18 nt, Human
gauaugcaguuuuccuua

SEQ ID NO: 2153971 - RNA, 22 nt, Human
gacagucaaggaguggcuuacu

SEQ ID NO: 2153972 - RNA, 19 nt, Human
gacagucaaggaguggcuu

SEQ ID NO: 2153973 - RNA, 17 nt, Human
gacagucaaggaguggc

SEQ ID NO: 2153974 - RNA, 16 nt, Human
gacagucaaggagugg

SEQ ID NO: 2153975 - RNA, 23 nt, Human
ggccuccaaguccacaguggaac

SEQ ID NO: 2153976 - RNA, 14 nt, Human
gggcggcagagagg

SEQ ID NO: 2153977 - RNA, 13 nt, Human
aaaaugucuuuau

SEQ ID NO: 2153978 - RNA, 19 nt, Human
ggucuucagggggccaggu

SEQ ID NO: 2153979 - RNA, 19 nt, Human
gguuucaccauguuggcca

SEQ ID NO: 2153980 - RNA, 19 nt, Human
gcuuacaagccagcuggag

SEQ ID NO: 2153981 - RNA, 13 nt, Human
gcuuacaagccag

SEQ ID NO: 2153982 - RNA, 19 nt, Human
gcuucuuaauauaacugcc

SEQ ID NO: 2153983 - RNA, 22 nt, Human
gcuucuuaauauaacugccuua

SEQ ID NO: 2153984 - RNA, 21 nt, Human
gcuucuuaauauaacugccuu

SEQ ID NO: 2153985 - RNA, 17 nt, Human
ggaacugaacauuccag

SEQ ID NO: 2153986 - RNA, 18 nt, Human
gcugcagagacagagagg

SEQ ID NO: 2153987 - RNA, 15 nt, Human
gccauguguuccaag

SEQ ID NO: 2153988 - RNA, 16 nt, Human
gccauguguuccaagg

SEQ ID NO: 2153989 - RNA, 11 nt, Human
gcuagaaauga

SEQ ID NO: 2153990 - RNA, 16 nt, Human
uugaugugugucuagg

SEQ ID NO: 2153991 - RNA, 19 nt, Human
uugcacaaaccaauuaaac

SEQ ID NO: 2153992 - RNA, 17 nt, Human
augagaaaaugucuuua

SEQ ID NO: 2153993 - RNA, 13 nt, Human
augcugguuuuuc

SEQ ID NO: 2153994 - RNA, 22 nt, Human
uuuaugggucagaguuccgacu

SEQ ID NO: 2153995 - RNA, 15 nt, Human
augcaguuuuccuua

SEQ ID NO: 2153996 - RNA, 16 nt, Human
augauuuuuaaagaaa

SEQ ID NO: 2153997 - RNA, 14 nt, Human
augauuuuuaaaga

SEQ ID NO: 2153998 - RNA, 21 nt, Human
uucgccguggcugcggcaccc

SEQ ID NO: 2153999 - RNA, 20 nt, Human
uucgccguggcugcggcacc

SEQ ID NO: 2154000 - RNA, 14 nt, Human
uucgccguggcugc

SEQ ID NO: 2154001 - RNA, 23 nt, Human
uucuuuucgccguggcugcggca

SEQ ID NO: 2154002 - RNA, 20 nt, Human
auauaacugccuuaaaacuu

SEQ ID NO: 2154003 - RNA, 13 nt, Human
auauaacugccuu

SEQ ID NO: 2154004 - RNA, 16 nt, Human
auauaaaagacugacc

SEQ ID NO: 2154005 - RNA, 12 nt, Human
auugcaauagaa

SEQ ID NO: 2154006 - RNA, 19 nt, Human
auuuacccuucuuuucuga

SEQ ID NO: 2154007 - RNA, 21 nt, Human
auuagagcagaugaccccucc

SEQ ID NO: 2154008 - RNA, 17 nt, Human
uuuucagauauaaaaga

SEQ ID NO: 2154009 - RNA, 21 nt, Human
uuuucagauauaaaagacuga

SEQ ID NO: 2154010 - RNA, 19 nt, Human
uuuucagauauaaaagacu

SEQ ID NO: 2154011 - RNA, 22 nt, Human
uuuucagauauaaaagacugac

SEQ ID NO: 2154012 - RNA, 22 nt, Human
uuuuaaguuacacauuuuucag

SEQ ID NO: 2154013 - RNA, 21 nt, Human
uuuuaaguuacacauuuuuca

SEQ ID NO: 2154014 - RNA, 16 nt, Human
auguuggccaggcugg

SEQ ID NO: 2154015 - RNA, 21 nt, Human
uuugcuguagaagauggcacu

SEQ ID NO: 2154016 - RNA, 13 nt, Human
uuugcuguagaag

SEQ ID NO: 2154017 - RNA, 15 nt, Human
uuugcuucaaaaaca

SEQ ID NO: 2154018 - RNA, 23 nt, Human
uuagacagucaaggaguggcuua

SEQ ID NO: 2154019 - RNA, 18 nt, Human
auaaucucuccauucccg

SEQ ID NO: 2154020 - RNA, 15 nt, Human
aguuuaauugacuua

SEQ ID NO: 2154021 - RNA, 14 nt, Human
aguuuaauugacuu

SEQ ID NO: 2154022 - RNA, 18 nt, Human
aguuuaauugacuuauuu

SEQ ID NO: 2154023 - RNA, 21 nt, Human
uuaauugacuuauuuauauaa

SEQ ID NO: 2154024 - RNA, 15 nt, Human
aguuuuguaaauuuc

SEQ ID NO: 2154025 - RNA, 12 nt, Human
aguuuuguaaau

SEQ ID NO: 2154026 - RNA, 15 nt, Human
aguuuuuauugcuug

SEQ ID NO: 2154027 - RNA, 16 nt, Human
aguggaaccagcccag

SEQ ID NO: 2154028 - RNA, 21 nt, Human
uguugcccaggcuggagugca

SEQ ID NO: 2154029 - RNA, 14 nt, Human
uguugcccaggcug

SEQ ID NO: 2154030 - RNA, 15 nt, Human
uguugcccaggcugg

SEQ ID NO: 2154031 - RNA, 22 nt, Human
agugauucuccugccucagccu

SEQ ID NO: 2154032 - RNA, 16 nt, Human
agugcaaugacacagu

SEQ ID NO: 2154033 - RNA, 18 nt, Human
agugcaaugacacagucu

SEQ ID NO: 2154034 - RNA, 20 nt, Human
ugugucuaggcaggaccugu

SEQ ID NO: 2154035 - RNA, 19 nt, Human
ugugucuaggcaggaccug

SEQ ID NO: 2154036 - RNA, 17 nt, Human
agugcugggauuacagg

SEQ ID NO: 2154037 - RNA, 22 nt, Human
aggugcacagacgucccuccac

SEQ ID NO: 2154038 - RNA, 23 nt, Human
aggugcacagacgucccuccacg

SEQ ID NO: 2154039 - RNA, 20 nt, Human
uguaagaucguucucugccu

SEQ ID NO: 2154040 - RNA, 19 nt, Human
uguaagaucguucucugcc

SEQ ID NO: 2154041 - RNA, 14 nt, Human
aguaauccaccugc

SEQ ID NO: 2154042 - RNA, 17 nt, Human
ugguacucauuaaaaaa

SEQ ID NO: 2154043 - RNA, 18 nt, Human
uggucucaaacuccugac

SEQ ID NO: 2154044 - RNA, 15 nt, Human
ugccuuaaaacuuua

SEQ ID NO: 2154045 - RNA, 16 nt, Human
ugcgggcugggcagcu

SEQ ID NO: 2154046 - RNA, 15 nt, Human
ugcgggcugggcagc

SEQ ID NO: 2154047 - RNA, 14 nt, Human
ugcgggcugggcag

SEQ ID NO: 2154048 - RNA, 13 nt, Human
ugcgggcugggca

SEQ ID NO: 2154049 - RNA, 17 nt, Human
ugcgggcugggcagcug

SEQ ID NO: 2154050 - RNA, 21 nt, Human
ugcuucaaaaacauucuuaca

SEQ ID NO: 2154051 - RNA, 13 nt, Human
ugcuucaaaaaca

SEQ ID NO: 2154052 - RNA, 13 nt, Human
uggauuggauuug

SEQ ID NO: 2154053 - RNA, 12 nt, Human
agccucaucucu

SEQ ID NO: 2154054 - RNA, 19 nt, Human
ugauucuccugccucagcc

SEQ ID NO: 2154055 - RNA, 11 nt, Human
agcuagaaaug

SEQ ID NO: 2154056 - RNA, 12 nt, Human
agcuagaaauga

SEQ ID NO: 2154057 - RNA, 13 nt, Human
ugaguagcuggau

SEQ ID NO: 2154058 - RNA, 19 nt, Human
ugauauguugguagauucu

SEQ ID NO: 2154059 - RNA, 14 nt, Human
agcaagauuucaga

SEQ ID NO: 2154060 - RNA, 23 nt, Human
ugacacagucuuggcucacugca

SEQ ID NO: 2154061 - RNA, 22 nt, Human
ugacacagucuuggcucacugc

SEQ ID NO: 2154062 - RNA, 21 nt, Human
ucuuuauuaaauguagaaagu

SEQ ID NO: 2154063 - RNA, 17 nt, Human
ucuuuauuaaauguaga

SEQ ID NO: 2154064 - RNA, 16 nt, Human
ucuuuaugauuuuuaa

SEQ ID NO: 2154065 - RNA, 22 nt, Human
ucuuuggugaacauugcaauag

SEQ ID NO: 2154066 - RNA, 16 nt, Human
ucuuuggugaacauug

SEQ ID NO: 2154067 - RNA, 22 nt, Human
ugaaaaaguauccugcuucuga

SEQ ID NO: 2154068 - RNA, 21 nt, Human
agaacugaauuuugucuuuau

SEQ ID NO: 2154069 - RNA, 21 nt, Human
agaaaugcugguuuuucaguu

SEQ ID NO: 2154070 - RNA, 20 nt, Human
agaaaugcugguuuuucagu

SEQ ID NO: 2154071 - RNA, 14 nt, Human
ucucuccauucccg

SEQ ID NO: 2154072 - RNA, 17 nt, Human
ucucgcucuguugccca

SEQ ID NO: 2154073 - RNA, 21 nt, Human
ucuccuuagaaguggaaguag

SEQ ID NO: 2154074 - RNA, 15 nt, Human
ucuccuuagaagugg

SEQ ID NO: 2154075 - RNA, 21 nt, Human
acuuucuuuucgccguggcug

SEQ ID NO: 2154076 - RNA, 20 nt, Human
acuuucuuuucgccguggcu

SEQ ID NO: 2154077 - RNA, 23 nt, Human
acuuugaggguguauauuuucug

SEQ ID NO: 2154078 - RNA, 14 nt, Human
ucgccguggcugcg

SEQ ID NO: 2154079 - RNA, 21 nt, Human
ucgcucuguugcccaggcugg

SEQ ID NO: 2154080 - RNA, 13 nt, Human
ucguucucugccu

SEQ ID NO: 2154081 - RNA, 18 nt, Human
ucacugcaacuucugccu

SEQ ID NO: 2154082 - RNA, 17 nt, Human
ucacugcaacuucugcc

SEQ ID NO: 2154083 - RNA, 16 nt, Human
ucaggccacggcagcc

SEQ ID NO: 2154084 - RNA, 14 nt, Human
ucaggccacggcag

SEQ ID NO: 2154085 - RNA, 17 nt, Human
ucaggccacggcagccu

SEQ ID NO: 2154086 - RNA, 13 nt, Human
ucauaacuagaac

SEQ ID NO: 2154087 - RNA, 15 nt, Human
ucauaacuagaacug

SEQ ID NO: 2154088 - RNA, 11 nt, Human
acauuuuguau

SEQ ID NO: 2154089 - RNA, 18 nt, Human
acauuuuacuuuuuccug

SEQ ID NO: 2154090 - RNA, 21 nt, Human
acauuuuucagauauaaaaga

SEQ ID NO: 2154091 - RNA, 19 nt, Human
ucaaguaauccaccugccu

SEQ ID NO: 2154092 - RNA, 17 nt, Human
ucaagcaagauuucaga

SEQ ID NO: 2154093 - RNA, 16 nt, Human
ucacagccacuuggga

SEQ ID NO: 2154094 - RNA, 20 nt, Human
ucccaaagugcugggauuac

SEQ ID NO: 2154095 - RNA, 23 nt, Human
acuagaacugaauuuugucuuua

SEQ ID NO: 2154096 - RNA, 19 nt, Human
acuagaacugaauuuuguc

SEQ ID NO: 2154097 - RNA, 18 nt, Human
acuagaacugaauuuugu

SEQ ID NO: 2154098 - RNA, 17 nt, Human
acuagaacugaauuuug

SEQ ID NO: 2154099 - RNA, 16 nt, Human
acuagaacugaauuuu

SEQ ID NO: 2154100 - RNA, 15 nt, Human
uaggcaggaccugug

SEQ ID NO: 2154101 - RNA, 14 nt, Human
uaggcaggaccugu

SEQ ID NO: 2154102 - RNA, 19 nt, Human
uauaacugccuuaaaacuu

SEQ ID NO: 2154103 - RNA, 20 nt, Human
uauaacugccuuaaaacuuu

SEQ ID NO: 2154104 - RNA, 16 nt, Human
acagacgucccuccac

SEQ ID NO: 2154105 - RNA, 15 nt, Human
acagacgucccucca

SEQ ID NO: 2154106 - RNA, 20 nt, Human
acagaaaacgguuaaaacug

SEQ ID NO: 2154107 - RNA, 16 nt, Human
acagaaagguuuucuu

SEQ ID NO: 2154108 - RNA, 21 nt, Human
uaugucucgugguaggacugu

SEQ ID NO: 2154109 - RNA, 22 nt, Human
aauuagagcagaugaccccucc

SEQ ID NO: 2154110 - RNA, 12 nt, Human
aauuagagcaga

SEQ ID NO: 2154111 - RNA, 20 nt, Human
aaugagaaaaugucuuuauu

SEQ ID NO: 2154112 - RNA, 21 nt, Human
uaaguuacacauuuuucagau

SEQ ID NO: 2154113 - RNA, 20 nt, Human
aaucacguaaagcuagaaau

SEQ ID NO: 2154114 - RNA, 21 nt, Human
aaucacguaaagcuagaaaug

SEQ ID NO: 2154115 - RNA, 15 nt, Human
aaucacguaaagcua

SEQ ID NO: 2154116 - RNA, 18 nt, Human
aauagcgucauaacuaga

SEQ ID NO: 2154117 - RNA, 18 nt, Human
aagacuuccagagccuca

SEQ ID NO: 2154118 - RNA, 16 nt, Human
aagacuuccagagccu

SEQ ID NO: 2154119 - RNA, 22 nt, Human
aagacgugauuuugcuguagaa

SEQ ID NO: 2154120 - RNA, 16 nt, Human
aagacgugauuuugcu

SEQ ID NO: 2154121 - RNA, 23 nt, Human
aagacgugauuuugcuguagaag

SEQ ID NO: 2154122 - RNA, 17 nt, Human
aagaucguucucugccu

SEQ ID NO: 2154123 - RNA, 16 nt, Human
aagaucguucucugcc

SEQ ID NO: 2154124 - RNA, 13 nt, Human
uaaaacuuuaauc

SEQ ID NO: 2154125 - RNA, 13 nt, Human
uaaaagacuuuuu

SEQ ID NO: 2154126 - RNA, 21 nt, Human
aaguaauccaccugccucggc

SEQ ID NO: 2154127 - RNA, 18 nt, Human
aagugagacuuugagggu

SEQ ID NO: 2154128 - RNA, 14 nt, Human
guuuuucaguuuuc

SEQ ID NO: 2154129 - RNA, 19 nt, Human
guuuuuccuguucuuaaga

SEQ ID NO: 2154130 - RNA, 18 nt, Human
guuucucaaagaaauuuc

SEQ ID NO: 2154131 - RNA, 17 nt, Human
guuucucaaagaaauuu

SEQ ID NO: 2154132 - RNA, 14 nt, Human
guuucucaaagaaa

SEQ ID NO: 2154133 - RNA, 21 nt, Human
guccaacguggggcagcacag

SEQ ID NO: 2154134 - RNA, 20 nt, Human
guccaacguggggcagcaca

SEQ ID NO: 2154135 - RNA, 18 nt, Human
guccaacguggggcagca

SEQ ID NO: 2154136 - RNA, 15 nt, Human
gucaggccacggcag

SEQ ID NO: 2154137 - RNA, 14 nt, Human
gucaggccacggca

SEQ ID NO: 2154138 - RNA, 12 nt, Human
gucaggccacgg

SEQ ID NO: 2154139 - RNA, 18 nt, Human
gucaggccacggcagccu

SEQ ID NO: 2154140 - RNA, 16 nt, Human
gucaggccacggcagc

SEQ ID NO: 2154141 - RNA, 13 nt, Human
gucauaacuagaa

SEQ ID NO: 2154142 - RNA, 22 nt, Human
aaauguaagaucguucucugcc

SEQ ID NO: 2154143 - RNA, 14 nt, Human
aaauguaagaucgu

SEQ ID NO: 2154144 - RNA, 22 nt, Human
guauauuuguauuuaaaugaaa

SEQ ID NO: 2154145 - RNA, 16 nt, Human
gucuuuggugaacauu

SEQ ID NO: 2154146 - RNA, 22 nt, Human
aaccucgagguuucucaaagaa

SEQ ID NO: 2154147 - RNA, 21 nt, Human
aaccucgagguuucucaaaga

SEQ ID NO: 2154148 - RNA, 17 nt, Human
aacugccuuaaaacuuu

SEQ ID NO: 2154149 - RNA, 22 nt, Human
gugcacagacgucccuccacgu

SEQ ID NO: 2154150 - RNA, 20 nt, Human
gugcacagacgucccuccac

SEQ ID NO: 2154151 - RNA, 22 nt, Human
aacuucuccccugguagaaaga

SEQ ID NO: 2154152 - RNA, 13 nt, Human
cacaguggaacca

SEQ ID NO: 2154153 - RNA, 19 nt, Human
cacagcugcagagacagag

SEQ ID NO: 2154154 - RNA, 18 nt, Human
cacagcugcagagacaga

SEQ ID NO: 2154155 - RNA, 13 nt, Human
caaugugccccca

SEQ ID NO: 2154156 - RNA, 19 nt, Human
caauagauauuuaccuuuu

SEQ ID NO: 2154157 - RNA, 18 nt, Human
caacguggggcagcacag

SEQ ID NO: 2154158 - RNA, 17 nt, Human
caacguggggcagcaca

SEQ ID NO: 2154159 - RNA, 15 nt, Human
caacguggggcagca

SEQ ID NO: 2154160 - RNA, 12 nt, Human
caacguggggca

SEQ ID NO: 2154161 - RNA, 19 nt, Human
caaagaaauuuccacucag

SEQ ID NO: 2154162 - RNA, 18 nt, Human
caaagaaauuuccacuca

SEQ ID NO: 2154163 - RNA, 12 nt, Human
caaagaaauuuc

SEQ ID NO: 2154164 - RNA, 20 nt, Human
uguuggauuuuugucuugug

SEQ ID NO: 2154165 - RNA, 19 nt, Human
uguugacauccaagcuucc

SEQ ID NO: 2154166 - RNA, 17 nt, Human
uguugacauccaagcuu

SEQ ID NO: 2154167 - RNA, 20 nt, Human
uguuaccuaauuagagcaga

SEQ ID NO: 2154168 - RNA, 23 nt, Human
ugugugaagaucacguuccuucc

SEQ ID NO: 2154169 - RNA, 20 nt, Human
uguguuuuuaauaaagacag

SEQ ID NO: 2154170 - RNA, 15 nt, Human
uguguuuuuaauaaa

SEQ ID NO: 2154171 - RNA, 22 nt, Human
ugugugucuaggcaggaccugu

SEQ ID NO: 2154172 - RNA, 14 nt, Human
uuaaaacuuuaauc

SEQ ID NO: 2154173 - RNA, 18 nt, Human
uuaaagaaaaguuuugua

SEQ ID NO: 2154174 - RNA, 15 nt, Human
uuacacauuuuucag

SEQ ID NO: 2154175 - RNA, 23 nt, Human
uuacacauuuuucagauauaaaa

SEQ ID NO: 2154176 - RNA, 17 nt, Human
uuacacauuuuucagau

SEQ ID NO: 2154177 - RNA, 15 nt, Human
uuaaauguagaaagu

SEQ ID NO: 2154178 - RNA, 14 nt, Human
uguccucagcuucu

SEQ ID NO: 2154179 - RNA, 21 nt, Human
uguacagucuuguauuaaguu

SEQ ID NO: 2154180 - RNA, 17 nt, Human
uguacagucuuguauua

SEQ ID NO: 2154181 - RNA, 13 nt, Human
ugcccaggcugga

SEQ ID NO: 2154182 - RNA, 20 nt, Human
ugcccaggcuggagugcaau

SEQ ID NO: 2154183 - RNA, 18 nt, Human
ugcccaggcuggagugca

SEQ ID NO: 2154184 - RNA, 21 nt, Human
ugggauuacagggaugagcca

SEQ ID NO: 2154185 - RNA, 16 nt, Human
ugguauagaaaugcug

SEQ ID NO: 2154186 - RNA, 14 nt, Human
ugguauagaaaugc

SEQ ID NO: 2154187 - RNA, 22 nt, Human
ugguauagaaaugcugguuuuu

SEQ ID NO: 2154188 - RNA, 13 nt, Human
ugguauagaaaug

SEQ ID NO: 2154189 - RNA, 21 nt, Human
uggaacguuuuuccuguucuu

SEQ ID NO: 2154190 - RNA, 22 nt, Human
uccggaauccuguccucagcuu

SEQ ID NO: 2154191 - RNA, 18 nt, Human
uccggaauccuguccuca

SEQ ID NO: 2154192 - RNA, 15 nt, Human
uccggaauccugucc

SEQ ID NO: 2154193 - RNA, 15 nt, Human
ucccacuugccccug

SEQ ID NO: 2154194 - RNA, 22 nt, Human
ucagcaccuacaguguacaguc

SEQ ID NO: 2154195 - RNA, 21 nt, Human
ucagcaccuacaguguacagu

SEQ ID NO: 2154196 - RNA, 20 nt, Human
ucagcaccuacaguguacag

SEQ ID NO: 2154197 - RNA, 18 nt, Human
ugaaaacagaaaacgguu

SEQ ID NO: 2154198 - RNA, 22 nt, Human
ucuuuucgccguggcugcggca

SEQ ID NO: 2154199 - RNA, 20 nt, Human
ucugccucacauagcuuaca

SEQ ID NO: 2154200 - RNA, 14 nt, Human
ugacucuuggcaca

SEQ ID NO: 2154201 - RNA, 19 nt, Human
ugacucuuggcacagcaug

SEQ ID NO: 2154202 - RNA, 18 nt, Human
ugacaugcgggcugggca

SEQ ID NO: 2154203 - RNA, 17 nt, Human
ugacaugcgggcugggc

SEQ ID NO: 2154204 - RNA, 22 nt, Human
ugacaugcgggcugggcagcug

SEQ ID NO: 2154205 - RNA, 21 nt, Human
ugacaugcgggcugggcagcu

SEQ ID NO: 2154206 - RNA, 20 nt, Human
ugacaugcgggcugggcagc

SEQ ID NO: 2154207 - RNA, 19 nt, Human
ugacaugcgggcugggcag

SEQ ID NO: 2154208 - RNA, 13 nt, Human
ugacauccaagcu

SEQ ID NO: 2154209 - RNA, 17 nt, Human
ugacauccaagcuuccu

SEQ ID NO: 2154210 - RNA, 17 nt, Human
ugaaucacguaaagcua

SEQ ID NO: 2154211 - RNA, 23 nt, Human
ugaaucacguaaagcuagaaaug

SEQ ID NO: 2154212 - RNA, 15 nt, Human
uaccuaauuagagca

SEQ ID NO: 2154213 - RNA, 20 nt, Human
uaccuaauuagagcagauga

SEQ ID NO: 2154214 - RNA, 17 nt, Human
uaccuaauuagagcaga

SEQ ID NO: 2154215 - RNA, 11 nt, Human
uauagaaaugc

SEQ ID NO: 2154216 - RNA, 15 nt, Human
uaagccaugggagac

SEQ ID NO: 2154217 - RNA, 22 nt, Human
uaauuagagcagaugaccccuc

SEQ ID NO: 2154218 - RNA, 11 nt, Human
uaauguuuccu

SEQ ID NO: 2154219 - RNA, 15 nt, Human
uaaauguagaaagug

SEQ ID NO: 2154220 - RNA, 22 nt, Human
uaaagaaaaguuuuguaaauuu

SEQ ID NO: 2154221 - RNA, 16 nt, Human
uaaagaaaaguuuugu

SEQ ID NO: 2154222 - RNA, 17 nt, Human
guuuuuaauaaagacag

SEQ ID NO: 2154223 - RNA, 15 nt, Human
guuguuaauaaaagu

SEQ ID NO: 2154224 - RNA, 14 nt, Human
guuuuguaaauuuc

SEQ ID NO: 2154225 - RNA, 12 nt, Human
guuuuguaaauu

SEQ ID NO: 2154226 - RNA, 24 nt, Human
guuuucaggaguggguugauuuca

SEQ ID NO: 2154227 - RNA, 16 nt, Human
guuucuuuaguuuuug

SEQ ID NO: 2154228 - RNA, 16 nt, Human
guucaccccuccaccc

SEQ ID NO: 2154229 - RNA, 14 nt, Human
guucaccccuccac

SEQ ID NO: 2154230 - RNA, 12 nt, Human
guucaccccucc

SEQ ID NO: 2154231 - RNA, 19 nt, Human
guuaccuaauuagagcaga

SEQ ID NO: 2154232 - RNA, 10 nt, Human
guuaccuaau

SEQ ID NO: 2154233 - RNA, 20 nt, Human
guuggauuuuugucuugugu

SEQ ID NO: 2154234 - RNA, 14 nt, Human
guuggauuuuuguc

SEQ ID NO: 2154235 - RNA, 23 nt, Human
guugauuucagcaccuacagugu

SEQ ID NO: 2154236 - RNA, 14 nt, Human
guucuaaagaugga

SEQ ID NO: 2154237 - RNA, 20 nt, Human
guucuaaagauggaaaaacc

SEQ ID NO: 2154238 - RNA, 17 nt, Human
guucuaaagauggaaaa

SEQ ID NO: 2154239 - RNA, 23 nt, Human
guucuaaagauggaaaaaccacc

SEQ ID NO: 2154240 - RNA, 18 nt, Human
guggcugcggcacccuug

SEQ ID NO: 2154241 - RNA, 20 nt, Human
guggcuuacuacauguggga

SEQ ID NO: 2154242 - RNA, 23 nt, Human
guggggcagcacagagagggggc

SEQ ID NO: 2154243 - RNA, 19 nt, Human
guggggcagcacagagagg

SEQ ID NO: 2154244 - RNA, 14 nt, Human
guggggcagcacag

SEQ ID NO: 2154245 - RNA, 12 nt, Human
guggggcagcac

SEQ ID NO: 2154246 - RNA, 16 nt, Human
gugggcggcagagagg

SEQ ID NO: 2154247 - RNA, 13 nt, Human
gugggcggcagag

SEQ ID NO: 2154248 - RNA, 12 nt, Human
gugggcuaagca

SEQ ID NO: 2154249 - RNA, 14 nt, Human
gugguauagaaaug

SEQ ID NO: 2154250 - RNA, 22 nt, Human
guguacagucuuguauuaaguu

SEQ ID NO: 2154251 - RNA, 16 nt, Human
guguacagucuuguau

SEQ ID NO: 2154252 - RNA, 13 nt, Human
guguacagucuug

SEQ ID NO: 2154253 - RNA, 17 nt, Human
guuacacauuuuucaga

SEQ ID NO: 2154254 - RNA, 16 nt, Human
guuacacauuuuucag

SEQ ID NO: 2154255 - RNA, 12 nt, Human
guuaaaacuguc

SEQ ID NO: 2154256 - RNA, 19 nt, Human
guuaaacuuacuuaguguu

SEQ ID NO: 2154257 - RNA, 19 nt, Human
gugucuaggcaggaccugu

SEQ ID NO: 2154258 - RNA, 19 nt, Human
gucucgugguaggacugua

SEQ ID NO: 2154259 - RNA, 22 nt, Human
guauuaaguuguuaauaaaagu

SEQ ID NO: 2154260 - RNA, 21 nt, Human
gucccuccacguucaccccuc

SEQ ID NO: 2154261 - RNA, 20 nt, Human
gucccuccacguucaccccu

SEQ ID NO: 2154262 - RNA, 19 nt, Human
gucccuccacguucacccc

SEQ ID NO: 2154263 - RNA, 21 nt, Human
guccacaguggaaccagccca

SEQ ID NO: 2154264 - RNA, 19 nt, Human
guccacaguggaaccagcc

SEQ ID NO: 2154265 - RNA, 16 nt, Human
guccacaguggaacca

SEQ ID NO: 2154266 - RNA, 18 nt, Human
guaguagggucaggccac

SEQ ID NO: 2154267 - RNA, 22 nt, Human
guagggucaggccacggcagcc

SEQ ID NO: 2154268 - RNA, 21 nt, Human
guagggucaggccacggcagc

SEQ ID NO: 2154269 - RNA, 14 nt, Human
guauagaaaugcug

SEQ ID NO: 2154270 - RNA, 22 nt, Human
guauagaaaugcugguuuuuca

SEQ ID NO: 2154271 - RNA, 15 nt, Human
guauagaaaugcugg

SEQ ID NO: 2154272 - RNA, 23 nt, Human
guauagaaaugcugguuuuucag

SEQ ID NO: 2154273 - RNA, 14 nt, Human
uuuuaaagaaaagu

SEQ ID NO: 2154274 - RNA, 15 nt, Human
uuuuaaagaaaaguu

SEQ ID NO: 2154275 - RNA, 22 nt, Human
uuuggugaacauugcaauagaa

SEQ ID NO: 2154276 - RNA, 23 nt, Human
uuuggugaacauugcaauagaaa

SEQ ID NO: 2154277 - RNA, 14 nt, Human
uuuuuccuguccuu

SEQ ID NO: 2154278 - RNA, 13 nt, Human
uuuuuuguuucau

SEQ ID NO: 2154279 - RNA, 12 nt, Human
uuuuuuguuuca

SEQ ID NO: 2154280 - RNA, 17 nt, Human
uuuuuaaagacagaguc

SEQ ID NO: 2154281 - RNA, 20 nt, Human
uuuuuaaagaaaaguuuugu

SEQ ID NO: 2154282 - RNA, 12 nt, Human
uuuuuaaagaaa

SEQ ID NO: 2154283 - RNA, 13 nt, Human
uuuugucuugugu

SEQ ID NO: 2154284 - RNA, 13 nt, Human
gccuuaaaacuuu

SEQ ID NO: 2154285 - RNA, 12 nt, Human
gccuuaaaacuu

SEQ ID NO: 2154286 - RNA, 22 nt, Human
gccccuguuaccuaauuagagc

SEQ ID NO: 2154287 - RNA, 15 nt, Human
gcccaggcuggagug

SEQ ID NO: 2154288 - RNA, 15 nt, Human
gauuuuugucuugug

SEQ ID NO: 2154289 - RNA, 22 nt, Human
gauuugucuuuggugaacauug

SEQ ID NO: 2154290 - RNA, 20 nt, Human
gauuugucuuuggugaacau

SEQ ID NO: 2154291 - RNA, 14 nt, Human
gauccccagcuguu

SEQ ID NO: 2154292 - RNA, 21 nt, Human
gauaaauaacuuuuuuuuaag

SEQ ID NO: 2154293 - RNA, 16 nt, Human
gauaaauaacuuuuuu

SEQ ID NO: 2154294 - RNA, 14 nt, Human
gcagcacagagagg

SEQ ID NO: 2154295 - RNA, 23 nt, Human
gcacgugggucuucagggggcca

SEQ ID NO: 2154296 - RNA, 21 nt, Human
gcacguaguagggucaggcca

SEQ ID NO: 2154297 - RNA, 20 nt, Human
gcacguaguagggucaggcc

SEQ ID NO: 2154298 - RNA, 16 nt, Human
gcacguaguaggguca

SEQ ID NO: 2154299 - RNA, 15 nt, Human
gcacguauuuuaaua

SEQ ID NO: 2154300 - RNA, 14 nt, Human
gcacguauuuuaau

SEQ ID NO: 2154301 - RNA, 22 nt, Human
gacgucccuccacguucacccc

SEQ ID NO: 2154302 - RNA, 12 nt, Human
gacgucccucca

SEQ ID NO: 2154303 - RNA, 22 nt, Human
gagacagagaggacgugggcgg

SEQ ID NO: 2154304 - RNA, 23 nt, Human
gaacaugaaaacagaaaacgguu

SEQ ID NO: 2154305 - RNA, 19 nt, Human
gaaauuuccacucaggucu

SEQ ID NO: 2154306 - RNA, 20 nt, Human
gaaauuuccacucaggucug

SEQ ID NO: 2154307 - RNA, 16 nt, Human
cuuuucgccguggcug

SEQ ID NO: 2154308 - RNA, 21 nt, Human
cuuuguuuuuuuuuccugucc

SEQ ID NO: 2154309 - RNA, 16 nt, Human
cuuuguuuuuuuuucc

SEQ ID NO: 2154310 - RNA, 23 nt, Human
cuuuguuuuuuuuuccuguccuu

SEQ ID NO: 2154311 - RNA, 21 nt, Human
cuuucuuuucgccguggcugc

SEQ ID NO: 2154312 - RNA, 24 nt, Human
cuuggcucacugcaacuucugccu

SEQ ID NO: 2154313 - RNA, 17 nt, Human
cuuguauuaaguuguua

SEQ ID NO: 2154314 - RNA, 13 nt, Human
cuuguauuaaguu

SEQ ID NO: 2154315 - RNA, 23 nt, Human
cuuguauuaaguuguuaauaaaa

SEQ ID NO: 2154316 - RNA, 22 nt, Human
cuuguauuaaguuguuaauaaa

SEQ ID NO: 2154317 - RNA, 19 nt, Human
cuugcacguauuuuaauag

SEQ ID NO: 2154318 - RNA, 23 nt, Human
cugccauggaggcacacagcugc

SEQ ID NO: 2154319 - RNA, 21 nt, Human
cugccauggaggcacacagcu

SEQ ID NO: 2154320 - RNA, 14 nt, Human
cuggucacugccau

SEQ ID NO: 2154321 - RNA, 22 nt, Human
cuggucacugccauggaggcac

SEQ ID NO: 2154322 - RNA, 20 nt, Human
cuguaugucucgugguagga

SEQ ID NO: 2154323 - RNA, 19 nt, Human
cucuuggguucaagugauu

SEQ ID NO: 2154324 - RNA, 21 nt, Human
cugaccaauauuguacaguuu

SEQ ID NO: 2154325 - RNA, 20 nt, Human
cugaccaauauuguacaguu

SEQ ID NO: 2154326 - RNA, 19 nt, Human
cugaccaauauuguacagu

SEQ ID NO: 2154327 - RNA, 18 nt, Human
cugaccaauauuguacag

SEQ ID NO: 2154328 - RNA, 15 nt, Human
cugaccaauauugua

SEQ ID NO: 2154329 - RNA, 21 nt, Human
cuccccaggccguggcugccc

SEQ ID NO: 2154330 - RNA, 22 nt, Human
cucccaaagugcugggauuaca

SEQ ID NO: 2154331 - RNA, 19 nt, Human
cgcuuuugcuggucacugc

SEQ ID NO: 2154332 - RNA, 13 nt, Human
cggcagagaggac

SEQ ID NO: 2154333 - RNA, 11 nt, Human
cggcagagagg

SEQ ID NO: 2154334 - RNA, 16 nt, Human
cgggguggauuggauu

SEQ ID NO: 2154335 - RNA, 18 nt, Human
cguggggcagcacagaga

SEQ ID NO: 2154336 - RNA, 12 nt, Human
cguggggcagca

SEQ ID NO: 2154337 - RNA, 17 nt, Human
cgugggcggcagagagg

SEQ ID NO: 2154338 - RNA, 15 nt, Human
cguggaacguuuuuc

SEQ ID NO: 2154339 - RNA, 20 nt, Human
cguggaacguuuuuccuguu

SEQ ID NO: 2154340 - RNA, 20 nt, Human
cucacauagcuuacaagcca

SEQ ID NO: 2154341 - RNA, 16 nt, Human
cuaggcaggaccugug

SEQ ID NO: 2154342 - RNA, 15 nt, Human
cuaggcaggaccugu

SEQ ID NO: 2154343 - RNA, 23 nt, Human
cuaagcacgggccauaugaauaa

SEQ ID NO: 2154344 - RNA, 20 nt, Human
cuaagcacgggccauaugaa

SEQ ID NO: 2154345 - RNA, 21 nt, Human
cccuccccuaaugccugcgga

SEQ ID NO: 2154346 - RNA, 18 nt, Human
cccgcaaugugcccccag

SEQ ID NO: 2154347 - RNA, 22 nt, Human
cccgcaaugugcccccagacgc

SEQ ID NO: 2154348 - RNA, 11 nt, Human
cccuucuuuuu

SEQ ID NO: 2154349 - RNA, 23 nt, Human
ccucccaaagugcugggauuaca

SEQ ID NO: 2154350 - RNA, 20 nt, Human
ccauggaggcacacagcugc

SEQ ID NO: 2154351 - RNA, 17 nt, Human
ccauggaggcacacagc

SEQ ID NO: 2154352 - RNA, 21 nt, Human
ccauggaggcacacagcugca

SEQ ID NO: 2154353 - RNA, 13 nt, Human
ccauggaggcaca

SEQ ID NO: 2154354 - RNA, 23 nt, Human
ccauguuggccaggcuggucuca

SEQ ID NO: 2154355 - RNA, 12 nt, Human
caugugggagcu

SEQ ID NO: 2154356 - RNA, 18 nt, Human
ccaauauuguacaguuuu

SEQ ID NO: 2154357 - RNA, 16 nt, Human
ccaauauuguacaguu

SEQ ID NO: 2154358 - RNA, 15 nt, Human
ccaauauuguacagu

SEQ ID NO: 2154359 - RNA, 14 nt, Human
ccaauauuguacag

SEQ ID NO: 2154360 - RNA, 14 nt, Human
cauugcaauagaaa

SEQ ID NO: 2154361 - RNA, 15 nt, Human
cauugcaauagaaau

SEQ ID NO: 2154362 - RNA, 13 nt, Human
cauugcaauagaa

SEQ ID NO: 2154363 - RNA, 16 nt, Human
caguggaaccagccca

SEQ ID NO: 2154364 - RNA, 15 nt, Human
caguguacagucuug

SEQ ID NO: 2154365 - RNA, 12 nt, Human
caguguacaguc

SEQ ID NO: 2154366 - RNA, 18 nt, Human
caguguacagucuuguau

SEQ ID NO: 2154367 - RNA, 17 nt, Human
caguguacagucuugua

SEQ ID NO: 2154368 - RNA, 15 nt, Human
caguuuuuauugcuu

SEQ ID NO: 2154369 - RNA, 13 nt, Human
cauaacuagaacu

SEQ ID NO: 2154370 - RNA, 15 nt, Human
aaagcccaaaguggu

SEQ ID NO: 2154371 - RNA, 22 nt, Human
aaaugcugguuuuucaguuuuc

SEQ ID NO: 2154372 - RNA, 12 nt, Human
aagacagagucu

SEQ ID NO: 2154373 - RNA, 13 nt, Human
aagcuagaaauga

SEQ ID NO: 2154374 - RNA, 12 nt, Human
aauaaagacagg

SEQ ID NO: 2154375 - RNA, 11 nt, Human
aauaaagacag

SEQ ID NO: 2154376 - RNA, 21 nt, Human
aauuuccacucaggucuguuu

SEQ ID NO: 2154377 - RNA, 22 nt, Human
aauuggauacgacaacuugcac

SEQ ID NO: 2154378 - RNA, 13 nt, Human
acauccaagcuuc

SEQ ID NO: 2154379 - RNA, 22 nt, Human
acaugcgggcugggcagcuguu

SEQ ID NO: 2154380 - RNA, 21 nt, Human
acaugcgggcugggcagcugu

SEQ ID NO: 2154381 - RNA, 19 nt, Human
acaugcgggcugggcagcu

SEQ ID NO: 2154382 - RNA, 17 nt, Human
acaugcgggcugggcag

SEQ ID NO: 2154383 - RNA, 16 nt, Human
acaugcgggcugggca

SEQ ID NO: 2154384 - RNA, 14 nt, Human
acaugcgggcuggg

SEQ ID NO: 2154385 - RNA, 15 nt, Human
acaggauuagacagu

SEQ ID NO: 2154386 - RNA, 18 nt, Human
acaguggaaccagcccag

SEQ ID NO: 2154387 - RNA, 17 nt, Human
accuguggccaaguucu

SEQ ID NO: 2154388 - RNA, 21 nt, Human
acugccauggaggcacacagc

SEQ ID NO: 2154389 - RNA, 18 nt, Human
acugccauggaggcacac

SEQ ID NO: 2154390 - RNA, 20 nt, Human
acugauguaugaggaauuuc

SEQ ID NO: 2154391 - RNA, 22 nt, Human
aggcaugugccacccacccaac

SEQ ID NO: 2154392 - RNA, 12 nt, Human
agacugaccaau

SEQ ID NO: 2154393 - RNA, 21 nt, Human
agacugaccaauauuguacag

SEQ ID NO: 2154394 - RNA, 18 nt, Human
agaagaugaaugagcaaa

SEQ ID NO: 2154395 - RNA, 12 nt, Human
agcacagagagg

SEQ ID NO: 2154396 - RNA, 23 nt, Human
agcacagagagggggccaccucc

SEQ ID NO: 2154397 - RNA, 21 nt, Human
agcacagagagggggccaccu

SEQ ID NO: 2154398 - RNA, 20 nt, Human
agcacagagagggggccacc

SEQ ID NO: 2154399 - RNA, 19 nt, Human
agcacagagagggggccac

SEQ ID NO: 2154400 - RNA, 15 nt, Human
agauauaaaagacug

SEQ ID NO: 2154401 - RNA, 11 nt, Human
auaaagacagg

SEQ ID NO: 2154402 - RNA, 19 nt, Human
aguuacacauuuuucagau

SEQ ID NO: 2154403 - RNA, 16 nt, Human
aguuacacauuuuuca

SEQ ID NO: 2154404 - RNA, 13 nt, Human
aguuacacauuuu

SEQ ID NO: 2154405 - RNA, 19 nt, Human
agugauucuccugccucag

SEQ ID NO: 2154406 - RNA, 16 nt, Human
cuccccuaaugccugc

SEQ ID NO: 2154407 - RNA, 15 nt, Human
cuccccuaaugccug

SEQ ID NO: 2154408 - RNA, 21 nt, Human
ccuugcgcuuuugcuggucac

SEQ ID NO: 2154409 - RNA, 23 nt, Human
ccuguuaccuaauuagagcagau

SEQ ID NO: 2154410 - RNA, 22 nt, Human
ccuguuaccuaauuagagcaga

SEQ ID NO: 2154411 - RNA, 21 nt, Human
ccuguuaccuaauuagagcag

SEQ ID NO: 2154412 - RNA, 20 nt, Human
cguucaccccuccacccuug

SEQ ID NO: 2154413 - RNA, 15 nt, Human
cguucaccccuccac

SEQ ID NO: 2154414 - RNA, 17 nt, Human
cuaaaguagacuucauu

SEQ ID NO: 2154415 - RNA, 22 nt, Human
cuaagaaagcccuuaggaagaa

SEQ ID NO: 2154416 - RNA, 22 nt, Human
cgcucuguugcccaggcuggag

SEQ ID NO: 2154417 - RNA, 19 nt, Human
cgcucuguugcccaggcug

SEQ ID NO: 2154418 - RNA, 17 nt, Human
cgggcugggcagcuguu

SEQ ID NO: 2154419 - RNA, 16 nt, Human
cgggcugggcagcugu

SEQ ID NO: 2154420 - RNA, 15 nt, Human
cgggcugggcagcug

SEQ ID NO: 2154421 - RNA, 14 nt, Human
cgggcugggcagcu

SEQ ID NO: 2154422 - RNA, 16 nt, Human
cguaaagcuagaaaug

SEQ ID NO: 2154423 - RNA, 17 nt, Human
cguaaagcuagaaauga

SEQ ID NO: 2154424 - RNA, 23 nt, Human
ccagacgcacgugggucuucagg

SEQ ID NO: 2154425 - RNA, 18 nt, Human
ccagacgcacgugggucu

SEQ ID NO: 2154426 - RNA, 13 nt, Human
ccuccccaggccg

SEQ ID NO: 2154427 - RNA, 15 nt, Human
ccucagccuccugag

SEQ ID NO: 2154428 - RNA, 16 nt, Human
ccucgagguuucucaa

SEQ ID NO: 2154429 - RNA, 11 nt, Human
caguuuuccuu

SEQ ID NO: 2154430 - RNA, 19 nt, Human
caggccguggcugcccaca

SEQ ID NO: 2154431 - RNA, 17 nt, Human
caggccguggcugccca

SEQ ID NO: 2154432 - RNA, 15 nt, Human
caggccguggcugcc

SEQ ID NO: 2154433 - RNA, 15 nt, Human
cagagagggggccac

SEQ ID NO: 2154434 - RNA, 22 nt, Human
cagagagggggccaccucccca

SEQ ID NO: 2154435 - RNA, 20 nt, Human
cagagagggggccaccuccc

SEQ ID NO: 2154436 - RNA, 22 nt, Human
cagauauaaaagacugaccaau

SEQ ID NO: 2154437 - RNA, 15 nt, Human
auuuuuuuuguuuca

SEQ ID NO: 2154438 - RNA, 15 nt, Human
auuuauauaaauuuu

SEQ ID NO: 2154439 - RNA, 16 nt, Human
caauauuguacaguuu

SEQ ID NO: 2154440 - RNA, 15 nt, Human
caauauuguacaguu

SEQ ID NO: 2154441 - RNA, 18 nt, Human
caauauuguacaguuuuu

SEQ ID NO: 2154442 - RNA, 17 nt, Human
caauauuguacaguuuu

SEQ ID NO: 2154443 - RNA, 20 nt, Human
caauuggauacgacaacuug

SEQ ID NO: 2154444 - RNA, 14 nt, Human
cugcaacuucugcc

SEQ ID NO: 2154445 - RNA, 15 nt, Human
cugcaacuucugccu

SEQ ID NO: 2154446 - RNA, 21 nt, Human
cugggcagcuguuagagucca

SEQ ID NO: 2154447 - RNA, 16 nt, Human
cuuuuaggccaaaaaa

SEQ ID NO: 2154448 - RNA, 18 nt, Human
cuuuuaggccaaaaaaau

SEQ ID NO: 2154449 - RNA, 15 nt, Human
cuuuggugaacauug

SEQ ID NO: 2154450 - RNA, 18 nt, Human
gauguaaaagacuuuuuu

SEQ ID NO: 2154451 - RNA, 18 nt, Human
gauucuccugccucagcc

SEQ ID NO: 2154452 - RNA, 19 nt, Human
gagugcaaugacacagucu

SEQ ID NO: 2154453 - RNA, 21 nt, Human
gaagggcuuggacucaagcaa

SEQ ID NO: 2154454 - RNA, 11 nt, Human
gacuguagaaa

SEQ ID NO: 2154455 - RNA, 19 nt, Human
ggcugcccacacaccccaa

SEQ ID NO: 2154456 - RNA, 17 nt, Human
ggcugcccacacacccc

SEQ ID NO: 2154457 - RNA, 20 nt, Human
ggcugcccacacaccccaau

SEQ ID NO: 2154458 - RNA, 16 nt, Human
gggcagcacagagagg

SEQ ID NO: 2154459 - RNA, 19 nt, Human
gggcagcuguuagagucca

SEQ ID NO: 2154460 - RNA, 18 nt, Human
aaaagggaacugaacauu

SEQ ID NO: 2154461 - RNA, 20 nt, Human
ggugcacagacgucccucca

SEQ ID NO: 2154462 - RNA, 13 nt, Human
aaagcuagaaaug

SEQ ID NO: 2154463 - RNA, 21 nt, Human
gggucaggccacggcagccua

SEQ ID NO: 2154464 - RNA, 17 nt, Human
gggucaggccacggcag

SEQ ID NO: 2154465 - RNA, 15 nt, Human
gggucaggccacggc

SEQ ID NO: 2154466 - RNA, 11 nt, Human
aaacuccugac

SEQ ID NO: 2154467 - RNA, 13 nt, Human
ggccucccaaagu

SEQ ID NO: 2154468 - RNA, 14 nt, Human
ggccaggugcacag

SEQ ID NO: 2154469 - RNA, 23 nt, Human
ggacuguugacauccaagcuucc

SEQ ID NO: 2154470 - RNA, 13 nt, Human
gcugggcagcugu

SEQ ID NO: 2154471 - RNA, 12 nt, Human
gcugggcagcug

SEQ ID NO: 2154472 - RNA, 14 nt, Human
gcugggcagcuguu

SEQ ID NO: 2154473 - RNA, 17 nt, Human
gcugggauuacagggau

SEQ ID NO: 2154474 - RNA, 17 nt, Human
gcugcccacacacccca

SEQ ID NO: 2154475 - RNA, 15 nt, Human
gcugguuuuucaguu

SEQ ID NO: 2154476 - RNA, 14 nt, Human
gcugguuuuucagu

SEQ ID NO: 2154477 - RNA, 23 nt, Human
gcuuccuuuguuuuuuuuuccug

SEQ ID NO: 2154478 - RNA, 22 nt, Human
gcuuccuuuguuuuuuuuuccu

SEQ ID NO: 2154479 - RNA, 17 nt, Human
gcucuggccuccaaguc

SEQ ID NO: 2154480 - RNA, 15 nt, Human
gcucuggccuccaag

SEQ ID NO: 2154481 - RNA, 22 nt, Human
gccuaccggcaauuuccggcca

SEQ ID NO: 2154482 - RNA, 21 nt, Human
auguuaaacuuacuuaguguu

SEQ ID NO: 2154483 - RNA, 19 nt, Human
augugacaugcgggcuggg

SEQ ID NO: 2154484 - RNA, 13 nt, Human
uuuguuucauauu

SEQ ID NO: 2154485 - RNA, 21 nt, Human
uuuugugaaguuuaauugacu

SEQ ID NO: 2154486 - RNA, 21 nt, Human
uuuaaaugaaagugagacuuu

SEQ ID NO: 2154487 - RNA, 13 nt, Human
uuuaaaugaaagu

SEQ ID NO: 2154488 - RNA, 20 nt, Human
uuuacccuucuuuucugacu

SEQ ID NO: 2154489 - RNA, 15 nt, Human
uugcaauagaaaucc

SEQ ID NO: 2154490 - RNA, 22 nt, Human
uugcaauagaaauccaauugga

SEQ ID NO: 2154491 - RNA, 22 nt, Human
aucucuuuguucuaaagaugga

SEQ ID NO: 2154492 - RNA, 16 nt, Human
augaaagugagacuuu

SEQ ID NO: 2154493 - RNA, 14 nt, Human
uuguaaauuucucu

SEQ ID NO: 2154494 - RNA, 22 nt, Human
uucagggggccaggugcacaga

SEQ ID NO: 2154495 - RNA, 13 nt, Human
uucagggggccag

SEQ ID NO: 2154496 - RNA, 22 nt, Human
auauaaauuuuuuuuguuucau

SEQ ID NO: 2154497 - RNA, 17 nt, Human
auauaaauuuuuuuugu

SEQ ID NO: 2154498 - RNA, 22 nt, Human
uucagcaccuacaguguacagu

SEQ ID NO: 2154499 - RNA, 23 nt, Human
uucagcaccuacaguguacaguc

SEQ ID NO: 2154500 - RNA, 22 nt, Human
auagcuuacaagccagcuggag

SEQ ID NO: 2154501 - RNA, 20 nt, Human
uucaagugauucuccugccu

SEQ ID NO: 2154502 - RNA, 18 nt, Human
auagcgucauaacuagaa

SEQ ID NO: 2154503 - RNA, 20 nt, Human
auagcgucauaacuagaacu

SEQ ID NO: 2154504 - RNA, 20 nt, Human
uuccuguucuuaagacguga

SEQ ID NO: 2154505 - RNA, 21 nt, Human
uuccuuuguuuuuuuuuccug

SEQ ID NO: 2154506 - RNA, 21 nt, Human
aucacguaaagcuagaaauga

SEQ ID NO: 2154507 - RNA, 14 nt, Human
aucacguaaagcua

SEQ ID NO: 2154508 - RNA, 13 nt, Human
auauugaugugug

SEQ ID NO: 2154509 - RNA, 20 nt, Human
auauuuguauuuaaaugaaa

SEQ ID NO: 2154510 - RNA, 22 nt, Human
ugugcccccagacgcacguggg

SEQ ID NO: 2154511 - RNA, 16 nt, Human
ugugcccccagacgca

SEQ ID NO: 2154512 - RNA, 18 nt, Human
uguggccaaguucuuagu

SEQ ID NO: 2154513 - RNA, 18 nt, Human
agucuuguauuaaguugu

SEQ ID NO: 2154514 - RNA, 16 nt, Human
agucuuguauuaaguu

SEQ ID NO: 2154515 - RNA, 15 nt, Human
agucuuggcucacug

SEQ ID NO: 2154516 - RNA, 22 nt, Human
agucuuguauuaaguuguuaau

SEQ ID NO: 2154517 - RNA, 15 nt, Human
ugucuuguguuucuu

SEQ ID NO: 2154518 - RNA, 17 nt, Human
aguggaaguaguggagc

SEQ ID NO: 2154519 - RNA, 16 nt, Human
aguucuuaguugcugu

SEQ ID NO: 2154520 - RNA, 15 nt, Human
uuaaauuucuaccgc

SEQ ID NO: 2154521 - RNA, 21 nt, Human
aguucuuaguugcuguauguc

SEQ ID NO: 2154522 - RNA, 20 nt, Human
aguucuuaguugcuguaugu

SEQ ID NO: 2154523 - RNA, 14 nt, Human
auaaauaacuuuuu

SEQ ID NO: 2154524 - RNA, 12 nt, Human
auaaauaacuuu

SEQ ID NO: 2154525 - RNA, 19 nt, Human
auaacuagaacugaauuuu

SEQ ID NO: 2154526 - RNA, 21 nt, Human
auaaaaguacauguuaaacuu

SEQ ID NO: 2154527 - RNA, 15 nt, Human
auaaaaguacauguu

SEQ ID NO: 2154528 - RNA, 22 nt, Human
uuaaguuacacauuuuucagau

SEQ ID NO: 2154529 - RNA, 14 nt, Human
uuaauaaagacagg

SEQ ID NO: 2154530 - RNA, 13 nt, Human
uuaauaaagacag

SEQ ID NO: 2154531 - RNA, 15 nt, Human
agggggccaggugca

SEQ ID NO: 2154532 - RNA, 19 nt, Human
agggggccaccuccccagg

SEQ ID NO: 2154533 - RNA, 15 nt, Human
agggggccaccuccc

SEQ ID NO: 2154534 - RNA, 10 nt, Human
agggggccac

SEQ ID NO: 2154535 - RNA, 22 nt, Human
uggucacugccauggaggcaca

SEQ ID NO: 2154536 - RNA, 14 nt, Human
uggucacugccaug

SEQ ID NO: 2154537 - RNA, 13 nt, Human
uggucacugccau

SEQ ID NO: 2154538 - RNA, 14 nt, Human
aguacauguuaaac

SEQ ID NO: 2154539 - RNA, 21 nt, Human
uguagaaaagggaacugaaca

SEQ ID NO: 2154540 - RNA, 20 nt, Human
uguagaaaagggaacugaac

SEQ ID NO: 2154541 - RNA, 19 nt, Human
uguagaaaagggaacugaa

SEQ ID NO: 2154542 - RNA, 18 nt, Human
uguagaaaagggaacuga

SEQ ID NO: 2154543 - RNA, 23 nt, Human
uguagaaaagggaacugaacauu

SEQ ID NO: 2154544 - RNA, 13 nt, Human
aguagggucaggc

SEQ ID NO: 2154545 - RNA, 18 nt, Human
uguaugucucgugguagg

SEQ ID NO: 2154546 - RNA, 19 nt, Human
agcugcagagacagagagg

SEQ ID NO: 2154547 - RNA, 18 nt, Human
agcugcagagacagagag

SEQ ID NO: 2154548 - RNA, 17 nt, Human
agcugcagagacagaga

SEQ ID NO: 2154549 - RNA, 15 nt, Human
agcugcagagacaga

SEQ ID NO: 2154550 - RNA, 19 nt, Human
agcuuacaagccagcugga

SEQ ID NO: 2154551 - RNA, 17 nt, Human
agcuuacaagccagcug

SEQ ID NO: 2154552 - RNA, 15 nt, Human
agcuuacaagccagc

SEQ ID NO: 2154553 - RNA, 13 nt, Human
agcuguuuaugca

SEQ ID NO: 2154554 - RNA, 23 nt, Human
aggcacacagcugcagagacaga

SEQ ID NO: 2154555 - RNA, 18 nt, Human
aggcacacagcugcagag

SEQ ID NO: 2154556 - RNA, 14 nt, Human
aggcacacagcugc

SEQ ID NO: 2154557 - RNA, 17 nt, Human
uggagugcaaugacaca

SEQ ID NO: 2154558 - RNA, 20 nt, Human
aggacgugggcggcagagag

SEQ ID NO: 2154559 - RNA, 14 nt, Human
aggacgugggcggc

SEQ ID NO: 2154560 - RNA, 21 nt, Human
aggaccuguggccaaguucuu

SEQ ID NO: 2154561 - RNA, 19 nt, Human
agccuccugaguagcugga

SEQ ID NO: 2154562 - RNA, 16 nt, Human
agcauuugucaacaaa

SEQ ID NO: 2154563 - RNA, 21 nt, Human
ugaccaauauuguacaguuuu

SEQ ID NO: 2154564 - RNA, 19 nt, Human
ugaccaauauuguacaguu

SEQ ID NO: 2154565 - RNA, 18 nt, Human
ugaccaauauuguacagu

SEQ ID NO: 2154566 - RNA, 17 nt, Human
ugaccaauauuguacag

SEQ ID NO: 2154567 - RNA, 15 nt, Human
ucuuuaguuuuugug

SEQ ID NO: 2154568 - RNA, 21 nt, Human
ucuuucugcagaaacagaaag

SEQ ID NO: 2154569 - RNA, 22 nt, Human
ucuuucugcagaaacagaaagg

SEQ ID NO: 2154570 - RNA, 13 nt, Human
agagacagagagg

SEQ ID NO: 2154571 - RNA, 17 nt, Human
agacuucauuuuuccua

SEQ ID NO: 2154572 - RNA, 15 nt, Human
agacuuccagagccu

SEQ ID NO: 2154573 - RNA, 17 nt, Human
agacagucaaggagugg

SEQ ID NO: 2154574 - RNA, 20 nt, Human
agacagucaaggaguggcuu

SEQ ID NO: 2154575 - RNA, 22 nt, Human
agaaauuuccacucaggucugu

SEQ ID NO: 2154576 - RNA, 16 nt, Human
agaaauuuccacucag

SEQ ID NO: 2154577 - RNA, 16 nt, Human
acugccuuaaaacuuu

SEQ ID NO: 2154578 - RNA, 15 nt, Human
acugccuuaaaacuu

SEQ ID NO: 2154579 - RNA, 14 nt, Human
acugccuuaaaacu

SEQ ID NO: 2154580 - RNA, 20 nt, Human
uccuucucucaccuccuaaa

SEQ ID NO: 2154581 - RNA, 21 nt, Human
uccuuuaauuuuuuacuauuu

SEQ ID NO: 2154582 - RNA, 20 nt, Human
ucccuccacguucaccccuc

SEQ ID NO: 2154583 - RNA, 19 nt, Human
ucccuccacguucaccccu

SEQ ID NO: 2154584 - RNA, 18 nt, Human
ucccuccacguucacccc

SEQ ID NO: 2154585 - RNA, 13 nt, Human
uccccuaaugccu

SEQ ID NO: 2154586 - RNA, 16 nt, Human
acguucaccccuccac

SEQ ID NO: 2154587 - RNA, 14 nt, Human
acguucaccccucc

SEQ ID NO: 2154588 - RNA, 20 nt, Human
acguggggcagcacagagag

SEQ ID NO: 2154589 - RNA, 19 nt, Human
acguggggcagcacagaga

SEQ ID NO: 2154590 - RNA, 15 nt, Human
acguggggcagcaca

SEQ ID NO: 2154591 - RNA, 14 nt, Human
acguggggcagcac

SEQ ID NO: 2154592 - RNA, 22 nt, Human
acgugggucuucagggggccag

SEQ ID NO: 2154593 - RNA, 15 nt, Human
acgugggcggcagag

SEQ ID NO: 2154594 - RNA, 20 nt, Human
acgugggcggcagagaggac

SEQ ID NO: 2154595 - RNA, 20 nt, Human
accuacaguguacagucuug

SEQ ID NO: 2154596 - RNA, 18 nt, Human
accuacaguguacagucu

SEQ ID NO: 2154597 - RNA, 17 nt, Human
accuacaguguacaguc

SEQ ID NO: 2154598 - RNA, 16 nt, Human
accuacaguguacagu

SEQ ID NO: 2154599 - RNA, 16 nt, Human
accuaauuagagcaga

SEQ ID NO: 2154600 - RNA, 15 nt, Human
accuaauuagagcag

SEQ ID NO: 2154601 - RNA, 19 nt, Human
accuaauuagagcagauga

SEQ ID NO: 2154602 - RNA, 15 nt, Human
accuacaguguacag

SEQ ID NO: 2154603 - RNA, 14 nt, Human
uccagagacuggga

SEQ ID NO: 2154604 - RNA, 17 nt, Human
uccacucaggucuguuu

SEQ ID NO: 2154605 - RNA, 19 nt, Human
uccaaguccacaguggaac

SEQ ID NO: 2154606 - RNA, 15 nt, Human
acaguuuuuauugcu

SEQ ID NO: 2154607 - RNA, 21 nt, Human
acauagcuuacaagccagcug

SEQ ID NO: 2154608 - RNA, 15 nt, Human
ucaagacuuccagag

SEQ ID NO: 2154609 - RNA, 13 nt, Human
ucagcuucuuaau

SEQ ID NO: 2154610 - RNA, 14 nt, Human
ucagcuucuuaaua

SEQ ID NO: 2154611 - RNA, 16 nt, Human
acccccaaauuuucuu

SEQ ID NO: 2154612 - RNA, 17 nt, Human
ucagaaucucucuucuu

SEQ ID NO: 2154613 - RNA, 17 nt, Human
accaauauuguacaguu

SEQ ID NO: 2154614 - RNA, 16 nt, Human
accaauauuguacagu

SEQ ID NO: 2154615 - RNA, 14 nt, Human
accaauauuguaca

SEQ ID NO: 2154616 - RNA, 15 nt, Human
accaauauuguacag

SEQ ID NO: 2154617 - RNA, 19 nt, Human
accaauauuguacaguuuu

SEQ ID NO: 2154618 - RNA, 18 nt, Human
accaauauuguacaguuu

SEQ ID NO: 2154619 - RNA, 19 nt, Human
acacagcugcagagacaga

SEQ ID NO: 2154620 - RNA, 19 nt, Human
acacagucuuggcucacug

SEQ ID NO: 2154621 - RNA, 14 nt, Human
uauaaaagacugac

SEQ ID NO: 2154622 - RNA, 10 nt, Human
uaguuuuugu

SEQ ID NO: 2154623 - RNA, 20 nt, Human
acagauguaaaagacuuuuu

SEQ ID NO: 2154624 - RNA, 21 nt, Human
aauugacuuauuuauauaaau

SEQ ID NO: 2154625 - RNA, 21 nt, Human
uagcuuacaagccagcuggag

SEQ ID NO: 2154626 - RNA, 13 nt, Human
uacuuuuuccugg

SEQ ID NO: 2154627 - RNA, 15 nt, Human
aaguuuuguaaauuu

SEQ ID NO: 2154628 - RNA, 13 nt, Human
uaaauaacuuuuu

SEQ ID NO: 2154629 - RNA, 12 nt, Human
aauaacuuuuuu

SEQ ID NO: 2154630 - RNA, 13 nt, Human
aauauuguacagu

SEQ ID NO: 2154631 - RNA, 17 nt, Human
uaauaaaaguacauguu

SEQ ID NO: 2154632 - RNA, 21 nt, Human
uaauagcgucauaacuagaac

SEQ ID NO: 2154633 - RNA, 14 nt, Human
aaugugacucaaga

SEQ ID NO: 2154634 - RNA, 19 nt, Human
uacacauuuuucagauaua

SEQ ID NO: 2154635 - RNA, 21 nt, Human
uacacauuuuucagauauaaa

SEQ ID NO: 2154636 - RNA, 17 nt, Human
uacacauuuuucagaua

SEQ ID NO: 2154637 - RNA, 15 nt, Human
uacacauuuuucaga

SEQ ID NO: 2154638 - RNA, 19 nt, Human
guggaaguaguggagcccc

SEQ ID NO: 2154639 - RNA, 21 nt, Human
gugggucuucagggggccagg

SEQ ID NO: 2154640 - RNA, 17 nt, Human
gugggucuucagggggc

SEQ ID NO: 2154641 - RNA, 13 nt, Human
gugggucuucagg

SEQ ID NO: 2154642 - RNA, 15 nt, Human
aagcaagauuucaga

SEQ ID NO: 2154643 - RNA, 14 nt, Human
guucuucaucuaag

SEQ ID NO: 2154644 - RNA, 19 nt, Human
guucuuaguugcuguaugu

SEQ ID NO: 2154645 - RNA, 19 nt, Human
guccuucucucaccuccua

SEQ ID NO: 2154646 - RNA, 18 nt, Human
guccuucucucaccuccu

SEQ ID NO: 2154647 - RNA, 17 nt, Human
guccuucucucaccucc

SEQ ID NO: 2154648 - RNA, 16 nt, Human
aacauugcaauagaaa

SEQ ID NO: 2154649 - RNA, 15 nt, Human
aacauugcaauagaa

SEQ ID NO: 2154650 - RNA, 14 nt, Human
aacauugcaauaga

SEQ ID NO: 2154651 - RNA, 17 nt, Human
aacauugcaauagaaau

SEQ ID NO: 2154652 - RNA, 23 nt, Human
aaaugauccccagcuguuuaugc

SEQ ID NO: 2154653 - RNA, 14 nt, Human
aaaugaaagugaga

SEQ ID NO: 2154654 - RNA, 17 nt, Human
guagcuggauuacaggc

SEQ ID NO: 2154655 - RNA, 15 nt, Human
guaggacuguagaaa

SEQ ID NO: 2154656 - RNA, 14 nt, Human
aaauuuccacucag

SEQ ID NO: 2154657 - RNA, 22 nt, Human
aaauuuccacucaggucuguuu

SEQ ID NO: 2154658 - RNA, 13 nt, Human
cacacaccccaau

SEQ ID NO: 2154659 - RNA, 20 nt, Human
caagugauucuccugccuca

SEQ ID NO: 2154660 - RNA, 14 nt, Human
caagccagcuggag

SEQ ID NO: 2154661 - RNA, 17 nt, Human
caaagcccaaaguggua

SEQ ID NO: 2154662 - RNA, 19 nt, Human
caaagcccaaagugguaua

SEQ ID NO: 2154663 - RNA, 13 nt, Human
caaauauuccaga

SEQ ID NO: 2154664 - RNA, 17 nt, Human
caaauauuccagagacu

SEQ ID NO: 2154665 - RNA, 19 nt, Human
caaagugguauagaaaugc

SEQ ID NO: 2154666 - RNA, 18 nt, Human
caaagugguauagaaaug

SEQ ID NO: 2154667 - RNA, 19 nt, Human
caccauguuggccaggcug

SEQ ID NO: 2154668 - RNA, 23 nt, Human
uuguauuuaaaugaaagugagac

SEQ ID NO: 2154669 - RNA, 13 nt, Human
uuuauugcuuguu

SEQ ID NO: 2154670 - RNA, 12 nt, Human
uucaguuuucag

SEQ ID NO: 2154671 - RNA, 13 nt, Human
uucuaaagaugga

SEQ ID NO: 2154672 - RNA, 20 nt, Human
uucucaaagaaauuuccacu

SEQ ID NO: 2154673 - RNA, 19 nt, Human
uucucaaagaaauuuccac

SEQ ID NO: 2154674 - RNA, 15 nt, Human
uucucaaagaaauuu

SEQ ID NO: 2154675 - RNA, 13 nt, Human
uucucaaagaaau

SEQ ID NO: 2154676 - RNA, 15 nt, Human
uugcuggucacugcc

SEQ ID NO: 2154677 - RNA, 20 nt, Human
uugcuguagaagauggcacu

SEQ ID NO: 2154678 - RNA, 18 nt, Human
uuggauuuuugucuugug

SEQ ID NO: 2154679 - RNA, 13 nt, Human
uuguacaguuuuu

SEQ ID NO: 2154680 - RNA, 12 nt, Human
uuguacaguuuu

SEQ ID NO: 2154681 - RNA, 16 nt, Human
uuguacaguuuuuauu

SEQ ID NO: 2154682 - RNA, 21 nt, Human
ugugacaugcgggcugggcag

SEQ ID NO: 2154683 - RNA, 19 nt, Human
ugugacaugcgggcugggc

SEQ ID NO: 2154684 - RNA, 17 nt, Human
ugugacaugcgggcugg

SEQ ID NO: 2154685 - RNA, 18 nt, Human
ugguaggacuguagaaaa

SEQ ID NO: 2154686 - RNA, 17 nt, Human
ugguaggacuguagaaa

SEQ ID NO: 2154687 - RNA, 12 nt, Human
uguacagucuug

SEQ ID NO: 2154688 - RNA, 15 nt, Human
uguacagucuuguau

SEQ ID NO: 2154689 - RNA, 14 nt, Human
uguacagucuugua

SEQ ID NO: 2154690 - RNA, 15 nt, Human
uguauuuaaaugaaa

SEQ ID NO: 2154691 - RNA, 23 nt, Human
uguuagaguccaacguggggcag

SEQ ID NO: 2154692 - RNA, 18 nt, Human
uguuagaguccaacgugg

SEQ ID NO: 2154693 - RNA, 17 nt, Human
uguuggauuuuugucuu

SEQ ID NO: 2154694 - RNA, 14 nt, Human
uguuggccaggcug

SEQ ID NO: 2154695 - RNA, 20 nt, Human
uuaauagcgucauaacuaga

SEQ ID NO: 2154696 - RNA, 19 nt, Human
ugcacagacgucccuccac

SEQ ID NO: 2154697 - RNA, 23 nt, Human
ugccauggaggcacacagcugca

SEQ ID NO: 2154698 - RNA, 18 nt, Human
ugccauggaggcacacag

SEQ ID NO: 2154699 - RNA, 17 nt, Human
ugccauggaggcacaca

SEQ ID NO: 2154700 - RNA, 16 nt, Human
ugccauggaggcacac

SEQ ID NO: 2154701 - RNA, 19 nt, Human
ugggcggcagagaggacug

SEQ ID NO: 2154702 - RNA, 15 nt, Human
ugggcggcagagagg

SEQ ID NO: 2154703 - RNA, 13 nt, Human
ugggcggcagaga

SEQ ID NO: 2154704 - RNA, 19 nt, Human
uggaggcacacagcugcag

SEQ ID NO: 2154705 - RNA, 18 nt, Human
uggaggcacacagcugca

SEQ ID NO: 2154706 - RNA, 22 nt, Human
uggaggcacacagcugcagaga

SEQ ID NO: 2154707 - RNA, 19 nt, Human
uggauacgacaacuugcac

SEQ ID NO: 2154708 - RNA, 14 nt, Human
ugcuuguuggauuu

SEQ ID NO: 2154709 - RNA, 20 nt, Human
uggaaaaaccacccccaaau

SEQ ID NO: 2154710 - RNA, 15 nt, Human
ucuucagggggccag

SEQ ID NO: 2154711 - RNA, 22 nt, Human
ucuuguauuaaguuguuaauaa

SEQ ID NO: 2154712 - RNA, 18 nt, Human
ucuuguauuaaguuguua

SEQ ID NO: 2154713 - RNA, 16 nt, Human
ucuuguauuaaguugu

SEQ ID NO: 2154714 - RNA, 16 nt, Human
ucuuuuuauacuauua

SEQ ID NO: 2154715 - RNA, 17 nt, Human
ugaacauugcaauagaa

SEQ ID NO: 2154716 - RNA, 15 nt, Human
ugaacauugcaauag

SEQ ID NO: 2154717 - RNA, 14 nt, Human
ugaacauuccagag

SEQ ID NO: 2154718 - RNA, 13 nt, Human
ugaacauuccaga

SEQ ID NO: 2154719 - RNA, 17 nt, Human
ucucaaagaaauuucca

SEQ ID NO: 2154720 - RNA, 14 nt, Human
ucucaaacuccuga

SEQ ID NO: 2154721 - RNA, 21 nt, Human
ucucuacugucucaguuuaca

SEQ ID NO: 2154722 - RNA, 17 nt, Human
ucucuuuguucuaaaga

SEQ ID NO: 2154723 - RNA, 21 nt, Human
ucccaaagugcugggauuaca

SEQ ID NO: 2154724 - RNA, 13 nt, Human
uccccuucacucc

SEQ ID NO: 2154725 - RNA, 21 nt, Human
ucccccgcaaugugcccccag

SEQ ID NO: 2154726 - RNA, 20 nt, Human
ucccccgcaaugugccccca

SEQ ID NO: 2154727 - RNA, 14 nt, Human
uccccagcuguuua

SEQ ID NO: 2154728 - RNA, 15 nt, Human
uccccagcuguuuau

SEQ ID NO: 2154729 - RNA, 15 nt, Human
ucaaaaacauucuua

SEQ ID NO: 2154730 - RNA, 12 nt, Human
guuuuucaguuu

SEQ ID NO: 2154731 - RNA, 15 nt, Human
uaaagcuagaaauga

SEQ ID NO: 2154732 - RNA, 14 nt, Human
uaaagcuagaaaug

SEQ ID NO: 2154733 - RNA, 18 nt, Human
uaacugccuuaaaacuuu

SEQ ID NO: 2154734 - RNA, 16 nt, Human
uaacaggauuagacag

SEQ ID NO: 2154735 - RNA, 18 nt, Human
uaagaucguucucugccu

SEQ ID NO: 2154736 - RNA, 12 nt, Human
uaauuagagcag

SEQ ID NO: 2154737 - RNA, 23 nt, Human
uaauauaacugccuuaaaacuuu

SEQ ID NO: 2154738 - RNA, 22 nt, Human
uaauauaacugccuuaaaacuu

SEQ ID NO: 2154739 - RNA, 21 nt, Human
uaauauaacugccuuaaaacu

SEQ ID NO: 2154740 - RNA, 16 nt, Human
uaauauaacugccuua

SEQ ID NO: 2154741 - RNA, 13 nt, Human
uaauaaagacagg

SEQ ID NO: 2154742 - RNA, 15 nt, Human
uagaaagaagaugaa

SEQ ID NO: 2154743 - RNA, 18 nt, Human
uacuacaugugggagcuu

SEQ ID NO: 2154744 - RNA, 15 nt, Human
uacgacaacuugcac

SEQ ID NO: 2154745 - RNA, 14 nt, Human
uacgacaacuugca

SEQ ID NO: 2154746 - RNA, 21 nt, Human
uacauuuuguauauuuguauu

SEQ ID NO: 2154747 - RNA, 16 nt, Human
uacaguguacagucuu

SEQ ID NO: 2154748 - RNA, 15 nt, Human
uacaguguacagucu

SEQ ID NO: 2154749 - RNA, 22 nt, Human
uacaguguacagucuuguauua

SEQ ID NO: 2154750 - RNA, 13 nt, Human
uacaguguacagu

SEQ ID NO: 2154751 - RNA, 22 nt, Human
uagaguccaacguggggcagca

SEQ ID NO: 2154752 - RNA, 19 nt, Human
uagaguccaacguggggca

SEQ ID NO: 2154753 - RNA, 22 nt, Human
uauccugcuucugauaugcagu

SEQ ID NO: 2154754 - RNA, 21 nt, Human
uauaaauuuuuuuuguuucau

SEQ ID NO: 2154755 - RNA, 17 nt, Human
uauaaauuuuuuuuguu

SEQ ID NO: 2154756 - RNA, 12 nt, Human
ggccaaguucuu

SEQ ID NO: 2154757 - RNA, 16 nt, Human
gcuggauuacaggcau

SEQ ID NO: 2154758 - RNA, 19 nt, Human
ggaaaaaccacccccaaau

SEQ ID NO: 2154759 - RNA, 14 nt, Human
ggcugggcagcugu

SEQ ID NO: 2154760 - RNA, 13 nt, Human
ggcugggcagcug

SEQ ID NO: 2154761 - RNA, 22 nt, Human
ggcuuacuacaugugggagcuu

SEQ ID NO: 2154762 - RNA, 17 nt, Human
gggccaccuccccaggc

SEQ ID NO: 2154763 - RNA, 16 nt, Human
gggccaccuccccagg

SEQ ID NO: 2154764 - RNA, 15 nt, Human
gggccaccuccccag

SEQ ID NO: 2154765 - RNA, 22 nt, Human
gggccaccuccccaggccgugg

SEQ ID NO: 2154766 - RNA, 19 nt, Human
gggccaccuccccaggccg

SEQ ID NO: 2154767 - RNA, 20 nt, Human
gggucuucagggggccaggu

SEQ ID NO: 2154768 - RNA, 15 nt, Human
ggucacugccaugga

SEQ ID NO: 2154769 - RNA, 16 nt, Human
ggucaggccacggcag

SEQ ID NO: 2154770 - RNA, 13 nt, Human
gguuaaaacuguc

SEQ ID NO: 2154771 - RNA, 11 nt, Human
gguuaaaacug

SEQ ID NO: 2154772 - RNA, 17 nt, Human
ggucucaaacuccugac

SEQ ID NO: 2154773 - RNA, 17 nt, Human
gcgcuuuugcuggucac

SEQ ID NO: 2154774 - RNA, 15 nt, Human
gccguggcugcggca

SEQ ID NO: 2154775 - RNA, 14 nt, Human
gccguggcugcggc

SEQ ID NO: 2154776 - RNA, 18 nt, Human
gccguggcugcggcaccc

SEQ ID NO: 2154777 - RNA, 12 nt, Human
gccgggguggau

SEQ ID NO: 2154778 - RNA, 14 nt, Human
gccacggcagccua

SEQ ID NO: 2154779 - RNA, 13 nt, Human
gccagcuggagaa

SEQ ID NO: 2154780 - RNA, 18 nt, Human
gccauggaggcacacagc

SEQ ID NO: 2154781 - RNA, 16 nt, Human
gccauggaggcacaca

SEQ ID NO: 2154782 - RNA, 15 nt, Human
gccauggaggcacac

SEQ ID NO: 2154783 - RNA, 21 nt, Human
gccauggaggcacacagcugc

SEQ ID NO: 2154784 - RNA, 13 nt, Human
gcccacacacccc

SEQ ID NO: 2154785 - RNA, 19 nt, Human
gcccaaagugguauagaaa

SEQ ID NO: 2154786 - RNA, 15 nt, Human
gcagagacagagagg

SEQ ID NO: 2154787 - RNA, 17 nt, Human
gaugaccccuccccuaa

SEQ ID NO: 2154788 - RNA, 16 nt, Human
gaugaccccuccccua

SEQ ID NO: 2154789 - RNA, 12 nt, Human
gaugaccccucc

SEQ ID NO: 2154790 - RNA, 16 nt, Human
gacuucauuuuuccua

SEQ ID NO: 2154791 - RNA, 15 nt, Human
gacuucauuuuuccu

SEQ ID NO: 2154792 - RNA, 18 nt, Human
gauauaaaagacugacca

SEQ ID NO: 2154793 - RNA, 23 nt, Human
gaaguaguggagccccugcucug

SEQ ID NO: 2154794 - RNA, 17 nt, Human
gaacauugcaauagaaa

SEQ ID NO: 2154795 - RNA, 15 nt, Human
gaacauugcaauaga

SEQ ID NO: 2154796 - RNA, 13 nt, Human
gaacauugcaaua

SEQ ID NO: 2154797 - RNA, 15 nt, Human
gaacguuuuuccugu

SEQ ID NO: 2154798 - RNA, 12 nt, Human
gaacguuuuucc

SEQ ID NO: 2154799 - RNA, 16 nt, Human
gacgugauuuugcugu

SEQ ID NO: 2154800 - RNA, 17 nt, Human
gacgugauuuugcugua

SEQ ID NO: 2154801 - RNA, 19 nt, Human
gaccuguggccaaguucuu

SEQ ID NO: 2154802 - RNA, 16 nt, Human
gacuuauuuauauaaa

SEQ ID NO: 2154803 - RNA, 22 nt, Human
gacugaccaauauuguacaguu

SEQ ID NO: 2154804 - RNA, 21 nt, Human
gacugaccaauauuguacagu

SEQ ID NO: 2154805 - RNA, 16 nt, Human
gacauccaagcuuccu

SEQ ID NO: 2154806 - RNA, 15 nt, Human
gacauccaagcuucc

SEQ ID NO: 2154807 - RNA, 17 nt, Human
gacauccaagcuuccuu

SEQ ID NO: 2154808 - RNA, 21 nt, Human
gaccaauauuguacaguuuuu

SEQ ID NO: 2154809 - RNA, 19 nt, Human
gaccaauauuguacaguuu

SEQ ID NO: 2154810 - RNA, 18 nt, Human
gaccaauauuguacaguu

SEQ ID NO: 2154811 - RNA, 17 nt, Human
gaccaauauuguacagu

SEQ ID NO: 2154812 - RNA, 17 nt, Human
gaaaacgguuaaaacug

SEQ ID NO: 2154813 - RNA, 18 nt, Human
gaaaagggaacugaacau

SEQ ID NO: 2154814 - RNA, 15 nt, Human
cuuucugcagaaaca

SEQ ID NO: 2154815 - RNA, 18 nt, Human
cuucucucaccuccuaaa

SEQ ID NO: 2154816 - RNA, 16 nt, Human
cuucucucaccuccua

SEQ ID NO: 2154817 - RNA, 15 nt, Human
cuucucucaccuccu

SEQ ID NO: 2154818 - RNA, 14 nt, Human
cuucucucaccucc

SEQ ID NO: 2154819 - RNA, 23 nt, Human
cuucagggggccaggugcacaga

SEQ ID NO: 2154820 - RNA, 15 nt, Human
cuucagggggccagg

SEQ ID NO: 2154821 - RNA, 14 nt, Human
cuucagggggccag

SEQ ID NO: 2154822 - RNA, 18 nt, Human
cuuacuacaugugggagc

SEQ ID NO: 2154823 - RNA, 20 nt, Human
cuuacuacaugugggagcuu

SEQ ID NO: 2154824 - RNA, 14 nt, Human
cuuacuuaguguua

SEQ ID NO: 2154825 - RNA, 21 nt, Human
cucuccauucccguggaacgu

SEQ ID NO: 2154826 - RNA, 24 nt, Human
cuccauucccguggaacguuuuuc

SEQ ID NO: 2154827 - RNA, 15 nt, Human
cucaggucuguuuuc

SEQ ID NO: 2154828 - RNA, 17 nt, Human
cucgagguuucucaaag

SEQ ID NO: 2154829 - RNA, 21 nt, Human
cuccugaguagcuggauuaca

SEQ ID NO: 2154830 - RNA, 17 nt, Human
cugcagagacagagagg

SEQ ID NO: 2154831 - RNA, 17 nt, Human
cugccauggaggcacac

SEQ ID NO: 2154832 - RNA, 20 nt, Human
cugccauggaggcacacagc

SEQ ID NO: 2154833 - RNA, 18 nt, Human
cuggucucaaacuccuga

SEQ ID NO: 2154834 - RNA, 22 nt, Human
ccggaauccuguccucagcuuc

SEQ ID NO: 2154835 - RNA, 20 nt, Human
ccggaauccuguccucagcu

SEQ ID NO: 2154836 - RNA, 19 nt, Human
ccggaauccuguccucagc

SEQ ID NO: 2154837 - RNA, 19 nt, Human
ccuaaaguagacuucauuu

SEQ ID NO: 2154838 - RNA, 18 nt, Human
ccccuaaugccugcggag

SEQ ID NO: 2154839 - RNA, 19 nt, Human
ccccuccccuaaugccugc

SEQ ID NO: 2154840 - RNA, 15 nt, Human
ccuguccucagcuuc

SEQ ID NO: 2154841 - RNA, 20 nt, Human
ccuguggccaaguucuuagu

SEQ ID NO: 2154842 - RNA, 19 nt, Human
cguggcugcggcacccuug

SEQ ID NO: 2154843 - RNA, 21 nt, Human
cguggcugcccacacacccca

SEQ ID NO: 2154844 - RNA, 12 nt, Human
cguucucugccu

SEQ ID NO: 2154845 - RNA, 17 nt, Human
cguaguagggucaggcc

SEQ ID NO: 2154846 - RNA, 17 nt, Human
cgucauaacuagaacug

SEQ ID NO: 2154847 - RNA, 16 nt, Human
cgucauaacuagaacu

SEQ ID NO: 2154848 - RNA, 14 nt, Human
cgucauaacuagaa

SEQ ID NO: 2154849 - RNA, 16 nt, Human
cgucgacguagaaccu

SEQ ID NO: 2154850 - RNA, 20 nt, Human
cgcaaugugcccccagacgc

SEQ ID NO: 2154851 - RNA, 18 nt, Human
cgcaaugugcccccagac

SEQ ID NO: 2154852 - RNA, 21 nt, Human
cggaauccuguccucagcuuc

SEQ ID NO: 2154853 - RNA, 16 nt, Human
cggcaauuuccggcca

SEQ ID NO: 2154854 - RNA, 14 nt, Human
cggccucccaaagu

SEQ ID NO: 2154855 - RNA, 15 nt, Human
cccaggccguggcug

SEQ ID NO: 2154856 - RNA, 14 nt, Human
cccacacaccccaa

SEQ ID NO: 2154857 - RNA, 24 nt, Human
ccagcuggagaaauaugguacuca

SEQ ID NO: 2154858 - RNA, 21 nt, Human
ccaccugguuccggaauccug

SEQ ID NO: 2154859 - RNA, 16 nt, Human
ccacucaggucuguuu

SEQ ID NO: 2154860 - RNA, 11 nt, Human
ccacucagguc

SEQ ID NO: 2154861 - RNA, 20 nt, Human
ccacaguggaaccagcccag

SEQ ID NO: 2154862 - RNA, 17 nt, Human
ccaaauuuucuuuuuau

SEQ ID NO: 2154863 - RNA, 18 nt, Human
cauuuuuccuaacaggau

SEQ ID NO: 2154864 - RNA, 13 nt, Human
cauuuuuccuaac

SEQ ID NO: 2154865 - RNA, 20 nt, Human
cauuuuucagauauaaaaga

SEQ ID NO: 2154866 - RNA, 18 nt, Human
cauuuuucagauauaaaa

SEQ ID NO: 2154867 - RNA, 18 nt, Human
caccaguuccuuucaaug

SEQ ID NO: 2154868 - RNA, 16 nt, Human
caccagguagaacaca

SEQ ID NO: 2154869 - RNA, 16 nt, Human
caccagucauuuuuca

SEQ ID NO: 2154870 - RNA, 20 nt, Human
cacaugcccuaaugucugua

SEQ ID NO: 2154871 - RNA, 19 nt, Human
cacaugcccuaaugucugu

SEQ ID NO: 2154872 - RNA, 18 nt, Human
cacaugcccuaaugucug

SEQ ID NO: 2154873 - RNA, 19 nt, Human
cacagugagggagauccca

SEQ ID NO: 2154874 - RNA, 16 nt, Human
cacaggaugaagcauu

SEQ ID NO: 2154875 - RNA, 20 nt, Human
cacacgccucccacuggggu

SEQ ID NO: 2154876 - RNA, 17 nt, Human
cacacgccucccacugg

SEQ ID NO: 2154877 - RNA, 19 nt, Human
cacagcccaaagaaggaaa

SEQ ID NO: 2154878 - RNA, 13 nt, Human
caccauucagguc

SEQ ID NO: 2154879 - RNA, 13 nt, Human
caccauugaaggc

SEQ ID NO: 2154880 - RNA, 17 nt, Human
caccauuuaaaaacagg

SEQ ID NO: 2154881 - RNA, 15 nt, Human
caccauugaacugua

SEQ ID NO: 2154882 - RNA, 16 nt, Human
caccauugaaggcuua

SEQ ID NO: 2154883 - RNA, 14 nt, Human
caccauugaaggcu

SEQ ID NO: 2154884 - RNA, 15 nt, Human
caccauugaaggcuu

SEQ ID NO: 2154885 - RNA, 20 nt, Human
cacccaagaccucagggcac

SEQ ID NO: 2154886 - RNA, 22 nt, Human
caaagggcuccucuccagucug

SEQ ID NO: 2154887 - RNA, 14 nt, Human
caaagggcccagau

SEQ ID NO: 2154888 - RNA, 12 nt, Human
caaagggcccag

SEQ ID NO: 2154889 - RNA, 16 nt, Human
caaagagaaaaagaaa

SEQ ID NO: 2154890 - RNA, 15 nt, Human
caaagagaaaaagaa

SEQ ID NO: 2154891 - RNA, 21 nt, Human
auuuuaagacguguuuguguu

SEQ ID NO: 2154892 - RNA, 21 nt, Human
auuuuaaugcaccugaauguu

SEQ ID NO: 2154893 - RNA, 16 nt, Human
caagcccccccuucca

SEQ ID NO: 2154894 - RNA, 14 nt, Human
caagcccccccuuc

SEQ ID NO: 2154895 - RNA, 17 nt, Human
caagcccccccuuccac

SEQ ID NO: 2154896 - RNA, 16 nt, Human
caagacuguuagcccu

SEQ ID NO: 2154897 - RNA, 24 nt, Human
caagaccucagggcacaaagaugg

SEQ ID NO: 2154898 - RNA, 23 nt, Human
caagaccucagggcacaaagaug

SEQ ID NO: 2154899 - RNA, 16 nt, Human
caagaccucagggcac

SEQ ID NO: 2154900 - RNA, 15 nt, Human
caagaccucagggca

SEQ ID NO: 2154901 - RNA, 22 nt, Human
caagguaacuguacugggccau

SEQ ID NO: 2154902 - RNA, 16 nt, Human
caagguaacuguacug

SEQ ID NO: 2154903 - RNA, 21 nt, Human
caagguuauaugcacuuucuc

SEQ ID NO: 2154904 - RNA, 15 nt, Human
caaccuauuuugaag

SEQ ID NO: 2154905 - RNA, 16 nt, Human
caaccuauuuugaagu

SEQ ID NO: 2154906 - RNA, 22 nt, Human
cacaaucucauugaggagcauu

SEQ ID NO: 2154907 - RNA, 19 nt, Human
cacacagcaagucaggguu

SEQ ID NO: 2154908 - RNA, 20 nt, Human
caaugguuugcaaggaagcc

SEQ ID NO: 2154909 - RNA, 19 nt, Human
caaugguuugcaaggaagc

SEQ ID NO: 2154910 - RNA, 18 nt, Human
caaugguuugcaaggaag

SEQ ID NO: 2154911 - RNA, 17 nt, Human
caaugguuugcaaggaa

SEQ ID NO: 2154912 - RNA, 16 nt, Human
caaugguuugcaagga

SEQ ID NO: 2154913 - RNA, 13 nt, Human
caaugguuugcaa

SEQ ID NO: 2154914 - RNA, 13 nt, Human
cacaaaguggcau

SEQ ID NO: 2154915 - RNA, 14 nt, Human
caauaucagacuuu

SEQ ID NO: 2154916 - RNA, 15 nt, Human
guauuuuuuaaagcu

SEQ ID NO: 2154917 - RNA, 15 nt, Human
aaauuacucuuucuc

SEQ ID NO: 2154918 - RNA, 14 nt, Human
aaauuacucuuucu

SEQ ID NO: 2154919 - RNA, 19 nt, Human
guaucaauaccaaauagcu

SEQ ID NO: 2154920 - RNA, 21 nt, Human
guaucacucugugucugagug

SEQ ID NO: 2154921 - RNA, 20 nt, Human
aaauguaccuucagaauaag

SEQ ID NO: 2154922 - RNA, 18 nt, Human
guaggacccaagcagaga

SEQ ID NO: 2154923 - RNA, 14 nt, Human
aaaucuacaguaca

SEQ ID NO: 2154924 - RNA, 18 nt, Human
aaaucuaggaaaauauuu

SEQ ID NO: 2154925 - RNA, 20 nt, Human
aaaucuaggaaaauauuuug

SEQ ID NO: 2154926 - RNA, 16 nt, Human
aaaucuaggaaaauau

SEQ ID NO: 2154927 - RNA, 14 nt, Human
aaaucuauauuuug

SEQ ID NO: 2154928 - RNA, 19 nt, Human
aaaugaacgauauguagca

SEQ ID NO: 2154929 - RNA, 22 nt, Human
aaaugaacgauauguagcagaa

SEQ ID NO: 2154930 - RNA, 23 nt, Human
aaaugaacgauauguagcagaaa

SEQ ID NO: 2154931 - RNA, 21 nt, Human
aaaugaguuaccuacauuuua

SEQ ID NO: 2154932 - RNA, 16 nt, Human
aaaugaucuuuucaag

SEQ ID NO: 2154933 - RNA, 16 nt, Human
aaaugcaaaaaucucu

SEQ ID NO: 2154934 - RNA, 15 nt, Human
aaaugcaaaaaucuc

SEQ ID NO: 2154935 - RNA, 16 nt, Human
aaaugcaacaacaugu

SEQ ID NO: 2154936 - RNA, 13 nt, Human
guccucugaauga

SEQ ID NO: 2154937 - RNA, 17 nt, Human
guccucugaaugaaccu

SEQ ID NO: 2154938 - RNA, 14 nt, Human
guccuuccaccucg

SEQ ID NO: 2154939 - RNA, 19 nt, Human
aacagacucgauucauauu

SEQ ID NO: 2154940 - RNA, 16 nt, Human
aacaauauugucugaa

SEQ ID NO: 2154941 - RNA, 20 nt, Human
aacaaugacuaauucuugca

SEQ ID NO: 2154942 - RNA, 21 nt, Human
aacaaugacuaauucuugcau

SEQ ID NO: 2154943 - RNA, 14 nt, Human
aacacugcuugugu

SEQ ID NO: 2154944 - RNA, 23 nt, Human
aacacugauuuccccuuuugcau

SEQ ID NO: 2154945 - RNA, 17 nt, Human
aacacugcuuguguuuu

SEQ ID NO: 2154946 - RNA, 22 nt, Human
aacacugauuuccccuuuugca

SEQ ID NO: 2154947 - RNA, 15 nt, Human
aacacugauuucccc

SEQ ID NO: 2154948 - RNA, 14 nt, Human
aacacugauuuccc

SEQ ID NO: 2154949 - RNA, 16 nt, Human
aacacugucuugaaga

SEQ ID NO: 2154950 - RNA, 15 nt, Human
guccuucucauucau

SEQ ID NO: 2154951 - RNA, 13 nt, Human
gucuccuggcggu

SEQ ID NO: 2154952 - RNA, 13 nt, Human
aacauuuuuggua

SEQ ID NO: 2154953 - RNA, 16 nt, Human
aaccaaucuacaaucu

SEQ ID NO: 2154954 - RNA, 20 nt, Human
aacccccacuggacugaccu

SEQ ID NO: 2154955 - RNA, 12 nt, Human
aaccuauuucuc

SEQ ID NO: 2154956 - RNA, 18 nt, Human
aaccuauuucucuuucuu

SEQ ID NO: 2154957 - RNA, 15 nt, Human
aaccuauuucucuuu

SEQ ID NO: 2154958 - RNA, 15 nt, Human
aaccuauuuugaagu

SEQ ID NO: 2154959 - RNA, 16 nt, Human
aaccauggugcuuguu

SEQ ID NO: 2154960 - RNA, 17 nt, Human
aacccauauuguaaaac

SEQ ID NO: 2154961 - RNA, 21 nt, Human
aacccauauuguaaaacaggu

SEQ ID NO: 2154962 - RNA, 17 nt, Human
aacccagucacugugag

SEQ ID NO: 2154963 - RNA, 18 nt, Human
aacuagcuuggaaacugg

SEQ ID NO: 2154964 - RNA, 19 nt, Human
aacuacagaaaaaccagag

SEQ ID NO: 2154965 - RNA, 17 nt, Human
gucuuucuuuuuggaca

SEQ ID NO: 2154966 - RNA, 21 nt, Human
aaccucuccucauguucugcu

SEQ ID NO: 2154967 - RNA, 15 nt, Human
guucucuagaaagaa

SEQ ID NO: 2154968 - RNA, 14 nt, Human
guucucuagaaaga

SEQ ID NO: 2154969 - RNA, 12 nt, Human
guucucuagaaa

SEQ ID NO: 2154970 - RNA, 23 nt, Human
guucccauccucuucuuuuagca

SEQ ID NO: 2154971 - RNA, 21 nt, Human
guucccauccucuucuuuuag

SEQ ID NO: 2154972 - RNA, 15 nt, Human
aagcuuuaccagcug

SEQ ID NO: 2154973 - RNA, 13 nt, Human
guuaaugcuuucu

SEQ ID NO: 2154974 - RNA, 17 nt, Human
guuacacagugugaaua

SEQ ID NO: 2154975 - RNA, 14 nt, Human
guuaaguucuauug

SEQ ID NO: 2154976 - RNA, 22 nt, Human
guuaaguuuuucccuucaucug

SEQ ID NO: 2154977 - RNA, 15 nt, Human
guuaaugcuuucuga

SEQ ID NO: 2154978 - RNA, 16 nt, Human
guuaagcuuugacacu

SEQ ID NO: 2154979 - RNA, 11 nt, Human
guguuuguguu

SEQ ID NO: 2154980 - RNA, 14 nt, Human
guuaagcuuugaca

SEQ ID NO: 2154981 - RNA, 17 nt, Human
aaggccagaccugcaga

SEQ ID NO: 2154982 - RNA, 20 nt, Human
aaggccagaccugcagacgc

SEQ ID NO: 2154983 - RNA, 18 nt, Human
aaggccagaccugcagac

SEQ ID NO: 2154984 - RNA, 19 nt, Human
guuuaauuuuauaaacaaa

SEQ ID NO: 2154985 - RNA, 15 nt, Human
guuuaauuuaaagcc

SEQ ID NO: 2154986 - RNA, 14 nt, Human
guuuaauuuaaagc

SEQ ID NO: 2154987 - RNA, 19 nt, Human
guuuacaagcccccccuuc

SEQ ID NO: 2154988 - RNA, 18 nt, Human
guuuacaagcccccccuu

SEQ ID NO: 2154989 - RNA, 22 nt, Human
guuuacaagcccccccuuccac

SEQ ID NO: 2154990 - RNA, 14 nt, Human
guuguacuucauuu

SEQ ID NO: 2154991 - RNA, 23 nt, Human
guuguauacuuccuuaugcuucu

SEQ ID NO: 2154992 - RNA, 23 nt, Human
guuuuaggucuagccuaugugga

SEQ ID NO: 2154993 - RNA, 21 nt, Human
guuuuaauuuauacuggcaug

SEQ ID NO: 2154994 - RNA, 22 nt, Human
guuuuaauuuauacuggcaugc

SEQ ID NO: 2154995 - RNA, 15 nt, Human
guuugcaaggaagcc

SEQ ID NO: 2154996 - RNA, 14 nt, Human
guuugcaaggaagc

SEQ ID NO: 2154997 - RNA, 13 nt, Human
guuugcaaggaag

SEQ ID NO: 2154998 - RNA, 22 nt, Human
guuugcaaggaagccacagcug

SEQ ID NO: 2154999 - RNA, 17 nt, Human
guuugcaaggaagccac

SEQ ID NO: 2155000 - RNA, 18 nt, Human
guuugccgguggugcagg

SEQ ID NO: 2155001 - RNA, 19 nt, Human
guuugccgguggugcaggu

SEQ ID NO: 2155002 - RNA, 19 nt, Human
guuugggauccuauugaac

SEQ ID NO: 2155003 - RNA, 13 nt, Human
aagcaagacugag

SEQ ID NO: 2155004 - RNA, 14 nt, Human
aagcaaagggcucc

SEQ ID NO: 2155005 - RNA, 13 nt, Human
gugggagggggag

SEQ ID NO: 2155006 - RNA, 15 nt, Human
aagaccucagggcac

SEQ ID NO: 2155007 - RNA, 22 nt, Human
guggaccaucgcugucaugagu

SEQ ID NO: 2155008 - RNA, 17 nt, Human
guggauuauuucauuuu

SEQ ID NO: 2155009 - RNA, 23 nt, Human
aagaaauaucugagcucuuugca

SEQ ID NO: 2155010 - RNA, 17 nt, Human
aagaaggaaaaggcagg

SEQ ID NO: 2155011 - RNA, 20 nt, Human
aacuugucaaaaaacaaaaa

SEQ ID NO: 2155012 - RNA, 13 nt, Human
aacuuuaaauuau

SEQ ID NO: 2155013 - RNA, 13 nt, Human
aauguauuuucuu

SEQ ID NO: 2155014 - RNA, 23 nt, Human
aauguauuuucuucaccucugcu

SEQ ID NO: 2155015 - RNA, 18 nt, Human
aauguacgaugagaaauu

SEQ ID NO: 2155016 - RNA, 20 nt, Human
aauguacuaggauacugcug

SEQ ID NO: 2155017 - RNA, 19 nt, Human
uaauuuauacuggcaugcu

SEQ ID NO: 2155018 - RNA, 21 nt, Human
uaauuucagcuucuauauauu

SEQ ID NO: 2155019 - RNA, 14 nt, Human
uaauuuauacuggc

SEQ ID NO: 2155020 - RNA, 13 nt, Human
aaugcuuucugaa

SEQ ID NO: 2155021 - RNA, 19 nt, Human
aaugcuuuagaaagguuuu

SEQ ID NO: 2155022 - RNA, 17 nt, Human
aaugcuuucugaagcuu

SEQ ID NO: 2155023 - RNA, 20 nt, Human
aaugcagucuguccaggcuc

SEQ ID NO: 2155024 - RNA, 19 nt, Human
aaugcagucuguccaggcu

SEQ ID NO: 2155025 - RNA, 14 nt, Human
uaauacuguauuug

SEQ ID NO: 2155026 - RNA, 12 nt, Human
uaauacuguauu

SEQ ID NO: 2155027 - RNA, 20 nt, Human
uaauacgaauuguuucacaa

SEQ ID NO: 2155028 - RNA, 12 nt, Human
uaauacuauauu

SEQ ID NO: 2155029 - RNA, 15 nt, Human
uaaugguuugaauau

SEQ ID NO: 2155030 - RNA, 20 nt, Human
aaugacucaggacauccccc

SEQ ID NO: 2155031 - RNA, 20 nt, Human
aaucuacugugguguuuugu

SEQ ID NO: 2155032 - RNA, 16 nt, Human
aaucuaggaaaauauu

SEQ ID NO: 2155033 - RNA, 18 nt, Human
aaucuaggaaaauauuuu

SEQ ID NO: 2155034 - RNA, 21 nt, Human
aauauuuuccaugaaaaugca

SEQ ID NO: 2155035 - RNA, 12 nt, Human
aauauccuuugc

SEQ ID NO: 2155036 - RNA, 23 nt, Human
aauagccacugcauaccaaccug

SEQ ID NO: 2155037 - RNA, 18 nt, Human
aauagauacagcagaggc

SEQ ID NO: 2155038 - RNA, 15 nt, Human
aauagcuuuuguguc

SEQ ID NO: 2155039 - RNA, 17 nt, Human
aauaaaacauuuucaca

SEQ ID NO: 2155040 - RNA, 19 nt, Human
aauaaaacauuuucacaca

SEQ ID NO: 2155041 - RNA, 19 nt, Human
aauaaaguuggucuuuuga

SEQ ID NO: 2155042 - RNA, 21 nt, Human
aauaaauauugucuuuuugua

SEQ ID NO: 2155043 - RNA, 16 nt, Human
aauaaauauugucuuu

SEQ ID NO: 2155044 - RNA, 23 nt, Human
aauaaauauugucuuuuuguaug

SEQ ID NO: 2155045 - RNA, 17 nt, Human
aauaaccaaucuacaau

SEQ ID NO: 2155046 - RNA, 22 nt, Human
uacuuuguucugcuguucucua

SEQ ID NO: 2155047 - RNA, 14 nt, Human
uacuuuguucugcu

SEQ ID NO: 2155048 - RNA, 19 nt, Human
aauuuuguuuucuugauuu

SEQ ID NO: 2155049 - RNA, 19 nt, Human
acaaaguggcauaaaaaac

SEQ ID NO: 2155050 - RNA, 19 nt, Human
acaaaguuccaaaaugcca

SEQ ID NO: 2155051 - RNA, 15 nt, Human
aauuuuuuuuuccuu

SEQ ID NO: 2155052 - RNA, 21 nt, Human
acaaucucccuucacaaguuu

SEQ ID NO: 2155053 - RNA, 17 nt, Human
acaaucucccuucacaa

SEQ ID NO: 2155054 - RNA, 18 nt, Human
acaauauugacuuugucu

SEQ ID NO: 2155055 - RNA, 15 nt, Human
acaauauugacuuug

SEQ ID NO: 2155056 - RNA, 14 nt, Human
acaauaccuuauuu

SEQ ID NO: 2155057 - RNA, 13 nt, Human
acaaauguaugau

SEQ ID NO: 2155058 - RNA, 14 nt, Human
acaagcccccccuu

SEQ ID NO: 2155059 - RNA, 18 nt, Human
acaagcccccccuuccac

SEQ ID NO: 2155060 - RNA, 17 nt, Human
acaagcccccccuucca

SEQ ID NO: 2155061 - RNA, 15 nt, Human
acaagcaaacccaga

SEQ ID NO: 2155062 - RNA, 18 nt, Human
aauugagcugcagaaacg

SEQ ID NO: 2155063 - RNA, 17 nt, Human
uacugacugagaauaua

SEQ ID NO: 2155064 - RNA, 20 nt, Human
uacugggccauguugugccu

SEQ ID NO: 2155065 - RNA, 22 nt, Human
aaugugucuuucuuuuuggaca

SEQ ID NO: 2155066 - RNA, 14 nt, Human
uacggacacccccu

SEQ ID NO: 2155067 - RNA, 13 nt, Human
uacggacaccccc

SEQ ID NO: 2155068 - RNA, 15 nt, Human
uacuaggauacugcu

SEQ ID NO: 2155069 - RNA, 22 nt, Human
uacuuccuuaugcuucuuucaa

SEQ ID NO: 2155070 - RNA, 16 nt, Human
aauuuauaaaaaggug

SEQ ID NO: 2155071 - RNA, 22 nt, Human
aauuuauaaaaagguguuuuga

SEQ ID NO: 2155072 - RNA, 16 nt, Human
uauauuuauacuguau

SEQ ID NO: 2155073 - RNA, 15 nt, Human
acagagcaagacucu

SEQ ID NO: 2155074 - RNA, 21 nt, Human
acagagcugggauguuucugu

SEQ ID NO: 2155075 - RNA, 18 nt, Human
acagagcugggauguuuc

SEQ ID NO: 2155076 - RNA, 10 nt, Human
acagagcugg

SEQ ID NO: 2155077 - RNA, 14 nt, Human
acagagcugggaug

SEQ ID NO: 2155078 - RNA, 19 nt, Human
acacucaccucuaaaacag

SEQ ID NO: 2155079 - RNA, 18 nt, Human
acacucaccucuaaaaca

SEQ ID NO: 2155080 - RNA, 15 nt, Human
acacucacuucucuu

SEQ ID NO: 2155081 - RNA, 22 nt, Human
acacugaaauauacacacagca

SEQ ID NO: 2155082 - RNA, 17 nt, Human
acacugaaauauacaca

SEQ ID NO: 2155083 - RNA, 18 nt, Human
acacugaaauauacacac

SEQ ID NO: 2155084 - RNA, 20 nt, Human
acacugaaauauacacacag

SEQ ID NO: 2155085 - RNA, 21 nt, Human
acacugaaauauacacacagc

SEQ ID NO: 2155086 - RNA, 20 nt, Human
acacucugggcuccagagug

SEQ ID NO: 2155087 - RNA, 12 nt, Human
uaguuuugcaua

SEQ ID NO: 2155088 - RNA, 17 nt, Human
uaguaaggaguucauuu

SEQ ID NO: 2155089 - RNA, 13 nt, Human
acaauggcagaug

SEQ ID NO: 2155090 - RNA, 13 nt, Human
accacacuggacu

SEQ ID NO: 2155091 - RNA, 16 nt, Human
accacacuggacuccg

SEQ ID NO: 2155092 - RNA, 15 nt, Human
accaauugcuuuguc

SEQ ID NO: 2155093 - RNA, 18 nt, Human
accacugcacucuagccu

SEQ ID NO: 2155094 - RNA, 12 nt, Human
ucaccucugcua

SEQ ID NO: 2155095 - RNA, 19 nt, Human
accaggcuugccugcaggc

SEQ ID NO: 2155096 - RNA, 20 nt, Human
ucaccucuaaaacaguccuu

SEQ ID NO: 2155097 - RNA, 18 nt, Human
accaggcuugccugcagg

SEQ ID NO: 2155098 - RNA, 16 nt, Human
ucaccuucaguaaccc

SEQ ID NO: 2155099 - RNA, 22 nt, Human
ucacuacgggggggagaaggaa

SEQ ID NO: 2155100 - RNA, 21 nt, Human
ucacuacgggggggagaagga

SEQ ID NO: 2155101 - RNA, 21 nt, Human
ucagaagggagcuagccagag

SEQ ID NO: 2155102 - RNA, 23 nt, Human
ucagaagggagcuagccagagga

SEQ ID NO: 2155103 - RNA, 22 nt, Human
acccagacggcuccacuaggac

SEQ ID NO: 2155104 - RNA, 21 nt, Human
acccagacggcuccacuagga

SEQ ID NO: 2155105 - RNA, 17 nt, Human
acccagacggcuccacu

SEQ ID NO: 2155106 - RNA, 20 nt, Human
accauguuuguggcuauuaa

SEQ ID NO: 2155107 - RNA, 18 nt, Human
accauuaugaagaagaga

SEQ ID NO: 2155108 - RNA, 15 nt, Human
accauugaacuguac

SEQ ID NO: 2155109 - RNA, 16 nt, Human
accauugaaggcuuaa

SEQ ID NO: 2155110 - RNA, 13 nt, Human
accauugaaggcu

SEQ ID NO: 2155111 - RNA, 14 nt, Human
ucacucuucucagc

SEQ ID NO: 2155112 - RNA, 13 nt, Human
ucacucuucucag

SEQ ID NO: 2155113 - RNA, 17 nt, Human
ucacucuucucagccac

SEQ ID NO: 2155114 - RNA, 18 nt, Human
ucacucuucucagccacu

SEQ ID NO: 2155115 - RNA, 18 nt, Human
ucagcauugauauuugug

SEQ ID NO: 2155116 - RNA, 14 nt, Human
ucagccagggccug

SEQ ID NO: 2155117 - RNA, 13 nt, Human
acccccgcccccu

SEQ ID NO: 2155118 - RNA, 13 nt, Human
ucaaguagcauuu

SEQ ID NO: 2155119 - RNA, 13 nt, Human
acauucuuaaaaa

SEQ ID NO: 2155120 - RNA, 13 nt, Human
acauucaggagcu

SEQ ID NO: 2155121 - RNA, 17 nt, Human
uauuuuuaauuaaauaa

SEQ ID NO: 2155122 - RNA, 18 nt, Human
uauuuguguauuuaacag

SEQ ID NO: 2155123 - RNA, 17 nt, Human
uauuuguguauuuaaca

SEQ ID NO: 2155124 - RNA, 15 nt, Human
uauuuguguauuuaa

SEQ ID NO: 2155125 - RNA, 13 nt, Human
uauuuguguauuu

SEQ ID NO: 2155126 - RNA, 17 nt, Human
uauuugugcauuuucua

SEQ ID NO: 2155127 - RNA, 13 nt, Human
uauuugugcauuu

SEQ ID NO: 2155128 - RNA, 19 nt, Human
ucaaacaaacucucugaac

SEQ ID NO: 2155129 - RNA, 15 nt, Human
ucaaagccacacucu

SEQ ID NO: 2155130 - RNA, 14 nt, Human
ucaaaggccagacc

SEQ ID NO: 2155131 - RNA, 18 nt, Human
ucaaagcugcuuuauuca

SEQ ID NO: 2155132 - RNA, 12 nt, Human
ucaaaggccaga

SEQ ID NO: 2155133 - RNA, 19 nt, Human
acauagcgaauacaaaauu

SEQ ID NO: 2155134 - RNA, 12 nt, Human
acaucugauaac

SEQ ID NO: 2155135 - RNA, 13 nt, Human
acaguuuugugaa

SEQ ID NO: 2155136 - RNA, 10 nt, Human
acauacauug

SEQ ID NO: 2155137 - RNA, 14 nt, Human
acaguuuuuaaacu

SEQ ID NO: 2155138 - RNA, 12 nt, Human
acaguuuuuaaa

SEQ ID NO: 2155139 - RNA, 16 nt, Human
acauaccuaagcaaac

SEQ ID NO: 2155140 - RNA, 15 nt, Human
uaugaagaagagagu

SEQ ID NO: 2155141 - RNA, 22 nt, Human
accugccacccugggccuggca

SEQ ID NO: 2155142 - RNA, 18 nt, Human
accuguuuuuuuucuuuu

SEQ ID NO: 2155143 - RNA, 17 nt, Human
accuuauuuaaguaacu

SEQ ID NO: 2155144 - RNA, 22 nt, Human
accucaaagcaccugaacaguu

SEQ ID NO: 2155145 - RNA, 16 nt, Human
accuaaauaaccaauc

SEQ ID NO: 2155146 - RNA, 13 nt, Human
ucauccugcaggc

SEQ ID NO: 2155147 - RNA, 12 nt, Human
ucauccugcagg

SEQ ID NO: 2155148 - RNA, 18 nt, Human
ucauccuauucuuucgaa

SEQ ID NO: 2155149 - RNA, 17 nt, Human
ucauccccucacuugcc

SEQ ID NO: 2155150 - RNA, 16 nt, Human
accucaaccaaugcca

SEQ ID NO: 2155151 - RNA, 13 nt, Human
accucucccaggg

SEQ ID NO: 2155152 - RNA, 20 nt, Human
ucauugaauuauaaaagcca

SEQ ID NO: 2155153 - RNA, 18 nt, Human
ucauugaauuauaaaagc

SEQ ID NO: 2155154 - RNA, 18 nt, Human
accucuaaaacaguccuu

SEQ ID NO: 2155155 - RNA, 13 nt, Human
ucauuaccacagg

SEQ ID NO: 2155156 - RNA, 23 nt, Human
acgugggcugggcccacaaaggc

SEQ ID NO: 2155157 - RNA, 18 nt, Human
acguguacuacaauuuaa

SEQ ID NO: 2155158 - RNA, 14 nt, Human
acguuccuaagcug

SEQ ID NO: 2155159 - RNA, 20 nt, Human
acguauguuuuuguguauuu

SEQ ID NO: 2155160 - RNA, 19 nt, Human
uccauucucaccuauccac

SEQ ID NO: 2155161 - RNA, 15 nt, Human
uccaugaaaaugcaa

SEQ ID NO: 2155162 - RNA, 16 nt, Human
uccaugaaaaugcaac

SEQ ID NO: 2155163 - RNA, 18 nt, Human
ucccauccucuucuuuua

SEQ ID NO: 2155164 - RNA, 15 nt, Human
ucccauccccugugg

SEQ ID NO: 2155165 - RNA, 12 nt, Human
ucccagcaauuu

SEQ ID NO: 2155166 - RNA, 17 nt, Human
acuacaauuuaaagcaa

SEQ ID NO: 2155167 - RNA, 22 nt, Human
acuacaauuuaaagcaaaggag

SEQ ID NO: 2155168 - RNA, 21 nt, Human
acuacucauacuuaagcaaaa

SEQ ID NO: 2155169 - RNA, 20 nt, Human
uccccuugucugaacuggag

SEQ ID NO: 2155170 - RNA, 20 nt, Human
uccccuuuauguacaggaug

SEQ ID NO: 2155171 - RNA, 17 nt, Human
uccccuuuauguacagg

SEQ ID NO: 2155172 - RNA, 15 nt, Human
acucauguuauuuuu

SEQ ID NO: 2155173 - RNA, 19 nt, Human
ucccuggugagagggccgg

SEQ ID NO: 2155174 - RNA, 23 nt, Human
ucccuggugagagggccgggcag

SEQ ID NO: 2155175 - RNA, 21 nt, Human
ucccuggugagagggccgggc

SEQ ID NO: 2155176 - RNA, 14 nt, Human
ucccuggggugggg

SEQ ID NO: 2155177 - RNA, 20 nt, Human
uccuuguagccuuuugacuu

SEQ ID NO: 2155178 - RNA, 19 nt, Human
uccuuguagccuuuugacu

SEQ ID NO: 2155179 - RNA, 15 nt, Human
uccuuguagccuuuu

SEQ ID NO: 2155180 - RNA, 15 nt, Human
uccuuccagcccaga

SEQ ID NO: 2155181 - RNA, 12 nt, Human
uccuuccaccuc

SEQ ID NO: 2155182 - RNA, 20 nt, Human
ucgcggcggagcuggccccg

SEQ ID NO: 2155183 - RNA, 19 nt, Human
ucgcggcggagcuggcccc

SEQ ID NO: 2155184 - RNA, 18 nt, Human
ucgcggcggagcuggccc

SEQ ID NO: 2155185 - RNA, 16 nt, Human
ucgcggcggagcuggc

SEQ ID NO: 2155186 - RNA, 18 nt, Human
ucgagaccagccuggcca

SEQ ID NO: 2155187 - RNA, 14 nt, Human
ucgagaccagccug

SEQ ID NO: 2155188 - RNA, 17 nt, Human
ucgagaccagccuggcc

SEQ ID NO: 2155189 - RNA, 13 nt, Human
ucgagaccagccu

SEQ ID NO: 2155190 - RNA, 17 nt, Human
ucgacuucgggcuggcc

SEQ ID NO: 2155191 - RNA, 15 nt, Human
acugccucucacagc

SEQ ID NO: 2155192 - RNA, 22 nt, Human
acugccucucacagcugaguug

SEQ ID NO: 2155193 - RNA, 22 nt, Human
acugcauaccaaccugggcaau

SEQ ID NO: 2155194 - RNA, 16 nt, Human
acugcuuguguuuuua

SEQ ID NO: 2155195 - RNA, 18 nt, Human
acugcuuguguuuuuaac

SEQ ID NO: 2155196 - RNA, 13 nt, Human
ucuaaaaugaguu

SEQ ID NO: 2155197 - RNA, 19 nt, Human
acuguuauccuauuuagau

SEQ ID NO: 2155198 - RNA, 19 nt, Human
ucucccacuagacaagucc

SEQ ID NO: 2155199 - RNA, 20 nt, Human
ucucauugaauuauaaaagc

SEQ ID NO: 2155200 - RNA, 18 nt, Human
ucuccagggucagaaaca

SEQ ID NO: 2155201 - RNA, 21 nt, Human
ucuccagggucagaaacagga

SEQ ID NO: 2155202 - RNA, 19 nt, Human
acuugcucuggaccugccc

SEQ ID NO: 2155203 - RNA, 18 nt, Human
acuugcucuggaccugcc

SEQ ID NO: 2155204 - RNA, 17 nt, Human
acuugcucuggaccugc

SEQ ID NO: 2155205 - RNA, 16 nt, Human
acuugcucuggaccug

SEQ ID NO: 2155206 - RNA, 15 nt, Human
acuugcucuggaccu

SEQ ID NO: 2155207 - RNA, 14 nt, Human
acuugcucuggacc

SEQ ID NO: 2155208 - RNA, 12 nt, Human
acuugcucugga

SEQ ID NO: 2155209 - RNA, 14 nt, Human
acuucgggcuggcc

SEQ ID NO: 2155210 - RNA, 18 nt, Human
acuuccuuaugcuucuuu

SEQ ID NO: 2155211 - RNA, 14 nt, Human
ucucugcuuuaaag

SEQ ID NO: 2155212 - RNA, 14 nt, Human
agaaaaagaaaugc

SEQ ID NO: 2155213 - RNA, 19 nt, Human
agaaaaaccagaggcagcu

SEQ ID NO: 2155214 - RNA, 15 nt, Human
agaaaaagaaaugca

SEQ ID NO: 2155215 - RNA, 20 nt, Human
agaaacgaagccaucuuucu

SEQ ID NO: 2155216 - RNA, 13 nt, Human
agaaacaggaccg

SEQ ID NO: 2155217 - RNA, 16 nt, Human
agaauuagcugcuucu

SEQ ID NO: 2155218 - RNA, 13 nt, Human
ucugggcuccaga

SEQ ID NO: 2155219 - RNA, 14 nt, Human
agaauuagcugcuu

SEQ ID NO: 2155220 - RNA, 16 nt, Human
ucuguuuaugcuuuug

SEQ ID NO: 2155221 - RNA, 18 nt, Human
ucugugaauugagcugca

SEQ ID NO: 2155222 - RNA, 14 nt, Human
ucuguaucuuuucu

SEQ ID NO: 2155223 - RNA, 17 nt, Human
ucuguaucacucugugu

SEQ ID NO: 2155224 - RNA, 18 nt, Human
agacaguccuaacaauau

SEQ ID NO: 2155225 - RNA, 14 nt, Human
ucuuacaaacaugu

SEQ ID NO: 2155226 - RNA, 19 nt, Human
agacuguugucccugcacu

SEQ ID NO: 2155227 - RNA, 23 nt, Human
agacucgauucauauugaauaua

SEQ ID NO: 2155228 - RNA, 13 nt, Human
agagaaaaagaaa

SEQ ID NO: 2155229 - RNA, 20 nt, Human
agacucgauucauauugaau

SEQ ID NO: 2155230 - RNA, 17 nt, Human
ucuuguaaauaaagccc

SEQ ID NO: 2155231 - RNA, 13 nt, Human
ucuuguaaauaaa

SEQ ID NO: 2155232 - RNA, 18 nt, Human
ucuuguaaauaaagcccu

SEQ ID NO: 2155233 - RNA, 21 nt, Human
ucuuauucuuucguucaguua

SEQ ID NO: 2155234 - RNA, 18 nt, Human
ucuuauucaaagaaauau

SEQ ID NO: 2155235 - RNA, 14 nt, Human
ucuuauucuuucgu

SEQ ID NO: 2155236 - RNA, 19 nt, Human
agacaugcagccuaaggcu

SEQ ID NO: 2155237 - RNA, 15 nt, Human
agacucauauuacug

SEQ ID NO: 2155238 - RNA, 22 nt, Human
agacucauauuacugguaggaa

SEQ ID NO: 2155239 - RNA, 18 nt, Human
agaccuggacacaggccu

SEQ ID NO: 2155240 - RNA, 16 nt, Human
agaccuggacacaggc

SEQ ID NO: 2155241 - RNA, 20 nt, Human
agacucacaaccugaaccua

SEQ ID NO: 2155242 - RNA, 19 nt, Human
agaccuggacacaggccug

SEQ ID NO: 2155243 - RNA, 13 nt, Human
agacucaaaugcu

SEQ ID NO: 2155244 - RNA, 13 nt, Human
agaccucagggca

SEQ ID NO: 2155245 - RNA, 15 nt, Human
agaccucagggcaca

SEQ ID NO: 2155246 - RNA, 14 nt, Human
agaccucagggcac

SEQ ID NO: 2155247 - RNA, 21 nt, Human
ugacaguggccgcccaaggcc

SEQ ID NO: 2155248 - RNA, 22 nt, Human
agauguucuacuuuguucugcu

SEQ ID NO: 2155249 - RNA, 15 nt, Human
agauguucuacuuug

SEQ ID NO: 2155250 - RNA, 14 nt, Human
agauguucuacuuu

SEQ ID NO: 2155251 - RNA, 17 nt, Human
ugaagcacagaccccuu

SEQ ID NO: 2155252 - RNA, 20 nt, Human
agaguugugacaacuuccug

SEQ ID NO: 2155253 - RNA, 13 nt, Human
agauaaagccaga

SEQ ID NO: 2155254 - RNA, 13 nt, Human
agauaugcaaaag

SEQ ID NO: 2155255 - RNA, 17 nt, Human
agagccacaggucuuua

SEQ ID NO: 2155256 - RNA, 20 nt, Human
agagccacaggucuuuaugu

SEQ ID NO: 2155257 - RNA, 21 nt, Human
agagcaagacucugucuaaaa

SEQ ID NO: 2155258 - RNA, 18 nt, Human
agagcaagacucugucua

SEQ ID NO: 2155259 - RNA, 15 nt, Human
agagcaagacucugu

SEQ ID NO: 2155260 - RNA, 16 nt, Human
ugaaauauacacacag

SEQ ID NO: 2155261 - RNA, 17 nt, Human
ugaaauauacacacagc

SEQ ID NO: 2155262 - RNA, 15 nt, Human
ugaaauauacacaca

SEQ ID NO: 2155263 - RNA, 18 nt, Human
ugaaauaugcuggcugga

SEQ ID NO: 2155264 - RNA, 12 nt, Human
agagcuuucuuu

SEQ ID NO: 2155265 - RNA, 16 nt, Human
agagcuuucuuucaca

SEQ ID NO: 2155266 - RNA, 14 nt, Human
agagcuuucuuuca

SEQ ID NO: 2155267 - RNA, 17 nt, Human
agaggcagcuucuuugc

SEQ ID NO: 2155268 - RNA, 16 nt, Human
ugaaccuauuucucuu

SEQ ID NO: 2155269 - RNA, 22 nt, Human
ugaaccuaggagugccccauuc

SEQ ID NO: 2155270 - RNA, 21 nt, Human
ugaaccuaggagugccccauu

SEQ ID NO: 2155271 - RNA, 21 nt, Human
ugaacgauauguagcagaaag

SEQ ID NO: 2155272 - RNA, 20 nt, Human
ugaacgauauguagcagaaa

SEQ ID NO: 2155273 - RNA, 16 nt, Human
agcauuuacugugucu

SEQ ID NO: 2155274 - RNA, 13 nt, Human
agcauuuuccucu

SEQ ID NO: 2155275 - RNA, 12 nt, Human
agcauuuuccuc

SEQ ID NO: 2155276 - RNA, 15 nt, Human
agcauuuuguauuug

SEQ ID NO: 2155277 - RNA, 21 nt, Human
agcauuuuccucugcuuugaa

SEQ ID NO: 2155278 - RNA, 18 nt, Human
agcauuuuccucugcuuu

SEQ ID NO: 2155279 - RNA, 17 nt, Human
agcauuuuccucugcuu

SEQ ID NO: 2155280 - RNA, 14 nt, Human
agcauuuuccucug

SEQ ID NO: 2155281 - RNA, 22 nt, Human
agcauuuuccucugcuuugaaa

SEQ ID NO: 2155282 - RNA, 16 nt, Human
agccaaaacagaucca

SEQ ID NO: 2155283 - RNA, 15 nt, Human
agcauuuuuuaaaaa

SEQ ID NO: 2155284 - RNA, 19 nt, Human
agcauuaugauguggguca

SEQ ID NO: 2155285 - RNA, 16 nt, Human
agcauggguucauccu

SEQ ID NO: 2155286 - RNA, 17 nt, Human
agcaucacuugggauua

SEQ ID NO: 2155287 - RNA, 17 nt, Human
agccacaaccacauaca

SEQ ID NO: 2155288 - RNA, 13 nt, Human
agccacagcuggu

SEQ ID NO: 2155289 - RNA, 21 nt, Human
agccacacucugggcuccaga

SEQ ID NO: 2155290 - RNA, 20 nt, Human
agccacagugagggagaucc

SEQ ID NO: 2155291 - RNA, 22 nt, Human
agccacagugagggagauccca

SEQ ID NO: 2155292 - RNA, 21 nt, Human
ugauggcccauucuacuugcu

SEQ ID NO: 2155293 - RNA, 20 nt, Human
ugauggcccauucuacuugc

SEQ ID NO: 2155294 - RNA, 19 nt, Human
ugauggcccauucuacuug

SEQ ID NO: 2155295 - RNA, 18 nt, Human
ugauggcccauucuacuu

SEQ ID NO: 2155296 - RNA, 17 nt, Human
ugauggcccauucuacu

SEQ ID NO: 2155297 - RNA, 12 nt, Human
agcauacaacuu

SEQ ID NO: 2155298 - RNA, 13 nt, Human
agcaguaaaauag

SEQ ID NO: 2155299 - RNA, 23 nt, Human
ugaguuacaccagaccuguucug

SEQ ID NO: 2155300 - RNA, 23 nt, Human
ugaguggcuucacuccugcugua

SEQ ID NO: 2155301 - RNA, 22 nt, Human
ugaguggcuucacuccugcugu

SEQ ID NO: 2155302 - RNA, 19 nt, Human
ugaguggcuucacuccugc

SEQ ID NO: 2155303 - RNA, 15 nt, Human
ugcagguagaccugu

SEQ ID NO: 2155304 - RNA, 22 nt, Human
ugcagguagaccugucuccugg

SEQ ID NO: 2155305 - RNA, 18 nt, Human
ugcagguagaccugucuc

SEQ ID NO: 2155306 - RNA, 16 nt, Human
ugcaggugaaacccag

SEQ ID NO: 2155307 - RNA, 18 nt, Human
ugcaugaagguuucugaa

SEQ ID NO: 2155308 - RNA, 13 nt, Human
ugcaugaagguuu

SEQ ID NO: 2155309 - RNA, 21 nt, Human
ugcaugaagguuucugaaaau

SEQ ID NO: 2155310 - RNA, 19 nt, Human
ugcaugaagguuucugaaa

SEQ ID NO: 2155311 - RNA, 19 nt, Human
ugcauagagccacguaugu

SEQ ID NO: 2155312 - RNA, 17 nt, Human
ugcauagagccacguau

SEQ ID NO: 2155313 - RNA, 18 nt, Human
agccugguuuagccugga

SEQ ID NO: 2155314 - RNA, 13 nt, Human
ugcauggacugug

SEQ ID NO: 2155315 - RNA, 21 nt, Human
agccugguuuagccuggaugu

SEQ ID NO: 2155316 - RNA, 17 nt, Human
ugauuuccccuuuugca

SEQ ID NO: 2155317 - RNA, 23 nt, Human
ugauuuccccuuuugcauucucc

SEQ ID NO: 2155318 - RNA, 13 nt, Human
ugcaaggcaaaga

SEQ ID NO: 2155319 - RNA, 20 nt, Human
ugcaaggaagccacagcugg

SEQ ID NO: 2155320 - RNA, 19 nt, Human
ugcaaggaagccacagcug

SEQ ID NO: 2155321 - RNA, 23 nt, Human
ugcaagccccugcuccagaagau

SEQ ID NO: 2155322 - RNA, 15 nt, Human
ugcaacaacauguau

SEQ ID NO: 2155323 - RNA, 13 nt, Human
ugcaacaacaugu

SEQ ID NO: 2155324 - RNA, 14 nt, Human
ugcacucagcucuu

SEQ ID NO: 2155325 - RNA, 18 nt, Human
agcccugggaucacugug

SEQ ID NO: 2155326 - RNA, 16 nt, Human
agcccugggaucacug

SEQ ID NO: 2155327 - RNA, 19 nt, Human
aggacgugggcugggccca

SEQ ID NO: 2155328 - RNA, 15 nt, Human
aggacgugggcuggg

SEQ ID NO: 2155329 - RNA, 15 nt, Human
aggagccuaggccag

SEQ ID NO: 2155330 - RNA, 15 nt, Human
aggagcacacccagc

SEQ ID NO: 2155331 - RNA, 13 nt, Human
aggaucuuuugaa

SEQ ID NO: 2155332 - RNA, 18 nt, Human
aggaucuuuugaacccag

SEQ ID NO: 2155333 - RNA, 16 nt, Human
aggagccuaggccagg

SEQ ID NO: 2155334 - RNA, 14 nt, Human
ugcuuuguguucuu

SEQ ID NO: 2155335 - RNA, 23 nt, Human
uggaugcggaacccaaauuacgu

SEQ ID NO: 2155336 - RNA, 13 nt, Human
uggauuauuucau

SEQ ID NO: 2155337 - RNA, 13 nt, Human
aggccagcugccu

SEQ ID NO: 2155338 - RNA, 23 nt, Human
aggcccccgggugugaagcacag

SEQ ID NO: 2155339 - RNA, 20 nt, Human
aggcagcuuuuucucuccca

SEQ ID NO: 2155340 - RNA, 18 nt, Human
aggcaggugaauuguuug

SEQ ID NO: 2155341 - RNA, 21 nt, Human
ugcuacaggggccagaagaug

SEQ ID NO: 2155342 - RNA, 15 nt, Human
ugcuacaggggccag

SEQ ID NO: 2155343 - RNA, 21 nt, Human
ugcuaaugucaaacuugaguc

SEQ ID NO: 2155344 - RNA, 20 nt, Human
agcuuugcuucucucucuaa

SEQ ID NO: 2155345 - RNA, 20 nt, Human
aggaaaagcggacaucagcu

SEQ ID NO: 2155346 - RNA, 13 nt, Human
ugcuauuugcaau

SEQ ID NO: 2155347 - RNA, 14 nt, Human
aggaaacaacagcu

SEQ ID NO: 2155348 - RNA, 15 nt, Human
aggaaacaacagcuu

SEQ ID NO: 2155349 - RNA, 23 nt, Human
aggaauuaaguuagggaauggca

SEQ ID NO: 2155350 - RNA, 18 nt, Human
aggaagccacagcuggug

SEQ ID NO: 2155351 - RNA, 16 nt, Human
aggaagccacagcugg

SEQ ID NO: 2155352 - RNA, 15 nt, Human
aggaagccacagcug

SEQ ID NO: 2155353 - RNA, 20 nt, Human
aggaagaucucugcagggcc

SEQ ID NO: 2155354 - RNA, 21 nt, Human
aggaagaucucugcagggccg

SEQ ID NO: 2155355 - RNA, 21 nt, Human
agcugcagaaacgaagccauc

SEQ ID NO: 2155356 - RNA, 14 nt, Human
agcugcaggggcau

SEQ ID NO: 2155357 - RNA, 15 nt, Human
ugccucagcccugac

SEQ ID NO: 2155358 - RNA, 16 nt, Human
ugccucagcccugacc

SEQ ID NO: 2155359 - RNA, 13 nt, Human
agcucgcuaaagu

SEQ ID NO: 2155360 - RNA, 13 nt, Human
agcuccaguucga

SEQ ID NO: 2155361 - RNA, 22 nt, Human
agcucccaggugcagccagagg

SEQ ID NO: 2155362 - RNA, 21 nt, Human
agcucccaggugcagccagag

SEQ ID NO: 2155363 - RNA, 20 nt, Human
agcucccaggugcagccaga

SEQ ID NO: 2155364 - RNA, 15 nt, Human
agcucccaggugcag

SEQ ID NO: 2155365 - RNA, 18 nt, Human
ugccauacuguaugcagu

SEQ ID NO: 2155366 - RNA, 19 nt, Human
ugccucagcccugacccug

SEQ ID NO: 2155367 - RNA, 19 nt, Human
agcugggguucaugacaau

SEQ ID NO: 2155368 - RNA, 19 nt, Human
uguaucaguggauuuccca

SEQ ID NO: 2155369 - RNA, 23 nt, Human
uguaucacucugugucugagugg

SEQ ID NO: 2155370 - RNA, 17 nt, Human
uguauguuuuuuuucug

SEQ ID NO: 2155371 - RNA, 17 nt, Human
uguauucccaguuacuu

SEQ ID NO: 2155372 - RNA, 19 nt, Human
uguauguucagaagaaauu

SEQ ID NO: 2155373 - RNA, 11 nt, Human
uguacuuugug

SEQ ID NO: 2155374 - RNA, 19 nt, Human
aguaaaauaaauauugucu

SEQ ID NO: 2155375 - RNA, 22 nt, Human
aguaaaauaaauauugucuuuu

SEQ ID NO: 2155376 - RNA, 20 nt, Human
aguaaaauaaauauugucuu

SEQ ID NO: 2155377 - RNA, 22 nt, Human
aguagcauuuacugugucuuug

SEQ ID NO: 2155378 - RNA, 14 nt, Human
aguagcauuuacug

SEQ ID NO: 2155379 - RNA, 13 nt, Human
ugguuaaugccau

SEQ ID NO: 2155380 - RNA, 20 nt, Human
aggugauaaaugucaguagu

SEQ ID NO: 2155381 - RNA, 13 nt, Human
aggugucuguauc

SEQ ID NO: 2155382 - RNA, 18 nt, Human
uguaaauaaagcccuggg

SEQ ID NO: 2155383 - RNA, 14 nt, Human
uguaaauaaagccc

SEQ ID NO: 2155384 - RNA, 13 nt, Human
uguaaauaaagcc

SEQ ID NO: 2155385 - RNA, 21 nt, Human
uguaaaguuauucuugaaguc

SEQ ID NO: 2155386 - RNA, 15 nt, Human
uguaaaguccccaga

SEQ ID NO: 2155387 - RNA, 21 nt, Human
ugguuugccgguggugcaggu

SEQ ID NO: 2155388 - RNA, 22 nt, Human
ugguuaggauggcaggacgugg

SEQ ID NO: 2155389 - RNA, 12 nt, Human
ugguuaggaugg

SEQ ID NO: 2155390 - RNA, 19 nt, Human
ugggugaaggcuggcauga

SEQ ID NO: 2155391 - RNA, 16 nt, Human
ugggugagguaauaaa

SEQ ID NO: 2155392 - RNA, 16 nt, Human
uggggaggaaauagaa

SEQ ID NO: 2155393 - RNA, 14 nt, Human
ugggguccagggag

SEQ ID NO: 2155394 - RNA, 12 nt, Human
ugggcacugaag

SEQ ID NO: 2155395 - RNA, 23 nt, Human
agggcagcgggagccucccugcc

SEQ ID NO: 2155396 - RNA, 13 nt, Human
agggaaguuuugu

SEQ ID NO: 2155397 - RNA, 13 nt, Human
agggacaaagagg

SEQ ID NO: 2155398 - RNA, 16 nt, Human
agggaauugcagagua

SEQ ID NO: 2155399 - RNA, 15 nt, Human
agggaauggcacagc

SEQ ID NO: 2155400 - RNA, 22 nt, Human
agggagcuccaacucagaaggg

SEQ ID NO: 2155401 - RNA, 15 nt, Human
agggagcugcagggg

SEQ ID NO: 2155402 - RNA, 21 nt, Human
agggagcaaguccuucccuuu

SEQ ID NO: 2155403 - RNA, 19 nt, Human
agggagcaaguccuucccu

SEQ ID NO: 2155404 - RNA, 18 nt, Human
ugggagaaugucaguuca

SEQ ID NO: 2155405 - RNA, 15 nt, Human
uuaauuccuuuccag

SEQ ID NO: 2155406 - RNA, 14 nt, Human
uuaauuuaaagcca

SEQ ID NO: 2155407 - RNA, 16 nt, Human
uuaauuuauacuggca

SEQ ID NO: 2155408 - RNA, 18 nt, Human
uuaaguuagggaauggca

SEQ ID NO: 2155409 - RNA, 17 nt, Human
auaaaaucugauaugua

SEQ ID NO: 2155410 - RNA, 15 nt, Human
uuacagucuauuuga

SEQ ID NO: 2155411 - RNA, 24 nt, Human
auaaagugcugcggagcaagagga

SEQ ID NO: 2155412 - RNA, 24 nt, Human
uuacugguaggaacuugagaacuu

SEQ ID NO: 2155413 - RNA, 20 nt, Human
uuacugguaggaacuugaga

SEQ ID NO: 2155414 - RNA, 18 nt, Human
uuacaucaaggcuucaaa

SEQ ID NO: 2155415 - RNA, 13 nt, Human
uuaacagggaggg

SEQ ID NO: 2155416 - RNA, 15 nt, Human
aguucugcucauucu

SEQ ID NO: 2155417 - RNA, 21 nt, Human
aguucugcucauucuaaugau

SEQ ID NO: 2155418 - RNA, 14 nt, Human
uguuuucuugauuu

SEQ ID NO: 2155419 - RNA, 21 nt, Human
uguuugacgggaaacaaaacu

SEQ ID NO: 2155420 - RNA, 18 nt, Human
agugugaguaaucugaga

SEQ ID NO: 2155421 - RNA, 14 nt, Human
aguguacucccagg

SEQ ID NO: 2155422 - RNA, 15 nt, Human
aguguacucccaggg

SEQ ID NO: 2155423 - RNA, 23 nt, Human
agugugguguuuccugcaggcca

SEQ ID NO: 2155424 - RNA, 17 nt, Human
uguucccaccugcugga

SEQ ID NO: 2155425 - RNA, 18 nt, Human
uguucccauccucuucuu

SEQ ID NO: 2155426 - RNA, 21 nt, Human
ugugguguuuccugcaggcca

SEQ ID NO: 2155427 - RNA, 14 nt, Human
uguggugguuguga

SEQ ID NO: 2155428 - RNA, 13 nt, Human
ugugaaauuccca

SEQ ID NO: 2155429 - RNA, 19 nt, Human
ugugaccuugagaagauuc

SEQ ID NO: 2155430 - RNA, 14 nt, Human
agucuugcagcuga

SEQ ID NO: 2155431 - RNA, 17 nt, Human
agucuugacgaguguga

SEQ ID NO: 2155432 - RNA, 16 nt, Human
agugagggagauccca

SEQ ID NO: 2155433 - RNA, 16 nt, Human
uguggagucauucuca

SEQ ID NO: 2155434 - RNA, 14 nt, Human
ugugauugugccua

SEQ ID NO: 2155435 - RNA, 19 nt, Human
ugugccaaccuauuuugaa

SEQ ID NO: 2155436 - RNA, 21 nt, Human
ugugcauuuucuaaacagaga

SEQ ID NO: 2155437 - RNA, 19 nt, Human
ugugcauuuucuaaacaga

SEQ ID NO: 2155438 - RNA, 14 nt, Human
ugugcauuuucuaa

SEQ ID NO: 2155439 - RNA, 13 nt, Human
ugugcauuuucua

SEQ ID NO: 2155440 - RNA, 16 nt, Human
ugugccauuuugcauu

SEQ ID NO: 2155441 - RNA, 17 nt, Human
auauuuguguauuuaac

SEQ ID NO: 2155442 - RNA, 18 nt, Human
auauuugugcauuuucua

SEQ ID NO: 2155443 - RNA, 21 nt, Human
auauuugugcauuuucuaaac

SEQ ID NO: 2155444 - RNA, 17 nt, Human
auauuugugcauuuucu

SEQ ID NO: 2155445 - RNA, 14 nt, Human
auauuugugcauuu

SEQ ID NO: 2155446 - RNA, 19 nt, Human
auauuugguuuuccuguau

SEQ ID NO: 2155447 - RNA, 16 nt, Human
auauuugguuuuccug

SEQ ID NO: 2155448 - RNA, 21 nt, Human
auauugaauauaauauauuug

SEQ ID NO: 2155449 - RNA, 18 nt, Human
auauugaauauaauauau

SEQ ID NO: 2155450 - RNA, 23 nt, Human
auauucuggagucaucauucccu

SEQ ID NO: 2155451 - RNA, 16 nt, Human
uuccuuuggaagaaaa

SEQ ID NO: 2155452 - RNA, 20 nt, Human
uuccuuuuauuucuucacca

SEQ ID NO: 2155453 - RNA, 17 nt, Human
uuccuuuggaagaaaaa

SEQ ID NO: 2155454 - RNA, 21 nt, Human
aucaagaguugugacaacuuc

SEQ ID NO: 2155455 - RNA, 22 nt, Human
auauuuugaucuucaacaaauu

SEQ ID NO: 2155456 - RNA, 19 nt, Human
auauuuugaucuucaacaa

SEQ ID NO: 2155457 - RNA, 17 nt, Human
auauuuugaucuucaac

SEQ ID NO: 2155458 - RNA, 16 nt, Human
auauuuugaucuucaa

SEQ ID NO: 2155459 - RNA, 15 nt, Human
auauuuugaucuuca

SEQ ID NO: 2155460 - RNA, 12 nt, Human
auauuuugaucu

SEQ ID NO: 2155461 - RNA, 18 nt, Human
auauuuucauuaaaagcu

SEQ ID NO: 2155462 - RNA, 15 nt, Human
uuccucugcuuugaa

SEQ ID NO: 2155463 - RNA, 13 nt, Human
uuccucugcuuug

SEQ ID NO: 2155464 - RNA, 13 nt, Human
uucugggaagcaa

SEQ ID NO: 2155465 - RNA, 19 nt, Human
uucugaaaauuaacacugc

SEQ ID NO: 2155466 - RNA, 22 nt, Human
aucauucccuucgacagcauuu

SEQ ID NO: 2155467 - RNA, 15 nt, Human
aucaguggauuuccc

SEQ ID NO: 2155468 - RNA, 17 nt, Human
aucaguggauuucccau

SEQ ID NO: 2155469 - RNA, 16 nt, Human
aucaguggauuuccca

SEQ ID NO: 2155470 - RNA, 18 nt, Human
aucaguggauuucccauc

SEQ ID NO: 2155471 - RNA, 19 nt, Human
uucuauaaaauacugguau

SEQ ID NO: 2155472 - RNA, 15 nt, Human
uuccuuuugaaagaa

SEQ ID NO: 2155473 - RNA, 23 nt, Human
uuccuuuugaaagaaucagucuu

SEQ ID NO: 2155474 - RNA, 17 nt, Human
uucaaguuaaauuuuau

SEQ ID NO: 2155475 - RNA, 21 nt, Human
uucaauaaaaaaaagaaauga

SEQ ID NO: 2155476 - RNA, 23 nt, Human
uucaauaaaaaaaagaaaugaaa

SEQ ID NO: 2155477 - RNA, 17 nt, Human
uucaaggccauccuucc

SEQ ID NO: 2155478 - RNA, 16 nt, Human
uucaaggccauccuuc

SEQ ID NO: 2155479 - RNA, 21 nt, Human
uucaaaaaaaaaaaaaagaga

SEQ ID NO: 2155480 - RNA, 14 nt, Human
uuauuucuaaaaua

SEQ ID NO: 2155481 - RNA, 15 nt, Human
uucaaacauuuacca

SEQ ID NO: 2155482 - RNA, 21 nt, Human
auagcuucaccccaaucccag

SEQ ID NO: 2155483 - RNA, 22 nt, Human
auagcuucaccccaaucccagc

SEQ ID NO: 2155484 - RNA, 14 nt, Human
auauauacauauau

SEQ ID NO: 2155485 - RNA, 16 nt, Human
uucagaauaagcuucc

SEQ ID NO: 2155486 - RNA, 19 nt, Human
auauaaauguuaagaaaaa

SEQ ID NO: 2155487 - RNA, 15 nt, Human
auauaaacacuauau

SEQ ID NO: 2155488 - RNA, 13 nt, Human
auauaaacacuau

SEQ ID NO: 2155489 - RNA, 13 nt, Human
uucagggucauag

SEQ ID NO: 2155490 - RNA, 14 nt, Human
uucaguaggaacug

SEQ ID NO: 2155491 - RNA, 14 nt, Human
uucauauuugcacu

SEQ ID NO: 2155492 - RNA, 15 nt, Human
uucauauuucuuugg

SEQ ID NO: 2155493 - RNA, 15 nt, Human
uucauauuugcacua

SEQ ID NO: 2155494 - RNA, 14 nt, Human
auauccuuugccuc

SEQ ID NO: 2155495 - RNA, 21 nt, Human
uucauggccuuugauaaaugu

SEQ ID NO: 2155496 - RNA, 15 nt, Human
uugguuuuccuguau

SEQ ID NO: 2155497 - RNA, 13 nt, Human
uugguuuuccugu

SEQ ID NO: 2155498 - RNA, 22 nt, Human
uugguuaagcuuugacacugga

SEQ ID NO: 2155499 - RNA, 20 nt, Human
uugguuaagcuuugacacug

SEQ ID NO: 2155500 - RNA, 19 nt, Human
uugguuaagcuuugacacu

SEQ ID NO: 2155501 - RNA, 13 nt, Human
uugguguugacau

SEQ ID NO: 2155502 - RNA, 14 nt, Human
augaaccuucuggc

SEQ ID NO: 2155503 - RNA, 17 nt, Human
augaaccuucuggccuc

SEQ ID NO: 2155504 - RNA, 14 nt, Human
augaagcaaacaca

SEQ ID NO: 2155505 - RNA, 15 nt, Human
augaagcaaacacau

SEQ ID NO: 2155506 - RNA, 15 nt, Human
uugcucuggaccugc

SEQ ID NO: 2155507 - RNA, 16 nt, Human
uugcucuggaccugcc

SEQ ID NO: 2155508 - RNA, 16 nt, Human
uugcuuuguguucuuu

SEQ ID NO: 2155509 - RNA, 15 nt, Human
uugcuuuguguucuu

SEQ ID NO: 2155510 - RNA, 17 nt, Human
aucugugaauugagcug

SEQ ID NO: 2155511 - RNA, 22 nt, Human
aucuuguggcuuugcaaccauu

SEQ ID NO: 2155512 - RNA, 19 nt, Human
aucugaaaaauacuuuugg

SEQ ID NO: 2155513 - RNA, 21 nt, Human
aucugagaaacaaugacuaau

SEQ ID NO: 2155514 - RNA, 15 nt, Human
uugccaagaccuuuc

SEQ ID NO: 2155515 - RNA, 14 nt, Human
uugccaagaccuuu

SEQ ID NO: 2155516 - RNA, 17 nt, Human
uugccaagaccuuucaa

SEQ ID NO: 2155517 - RNA, 16 nt, Human
aucuaggaaaauauuu

SEQ ID NO: 2155518 - RNA, 22 nt, Human
aucuaggaaaauauuuugaucu

SEQ ID NO: 2155519 - RNA, 19 nt, Human
aucuaggaaaauauuuuga

SEQ ID NO: 2155520 - RNA, 17 nt, Human
aucuaggaaaauauuuu

SEQ ID NO: 2155521 - RNA, 20 nt, Human
aucuaggaaaauauuuugau

SEQ ID NO: 2155522 - RNA, 19 nt, Human
aucuaauuuauaaaaaggu

SEQ ID NO: 2155523 - RNA, 23 nt, Human
aucuaauuuauaaaaagguguuu

SEQ ID NO: 2155524 - RNA, 13 nt, Human
aucuaauuuauaa

SEQ ID NO: 2155525 - RNA, 14 nt, Human
aucuaauuuauaaa

SEQ ID NO: 2155526 - RNA, 15 nt, Human
aucuaauuuauaaaa

SEQ ID NO: 2155527 - RNA, 21 nt, Human
uugagaaaaaaagaauaguug

SEQ ID NO: 2155528 - RNA, 20 nt, Human
augcgacacugggaggccag

SEQ ID NO: 2155529 - RNA, 14 nt, Human
uuuacugaagccuu

SEQ ID NO: 2155530 - RNA, 19 nt, Human
uuuacuguuauccuauuua

SEQ ID NO: 2155531 - RNA, 18 nt, Human
uuuacuguuauccuauuu

SEQ ID NO: 2155532 - RNA, 17 nt, Human
augcucagaccagcucu

SEQ ID NO: 2155533 - RNA, 12 nt, Human
augcucagacca

SEQ ID NO: 2155534 - RNA, 14 nt, Human
augcucagaccagc

SEQ ID NO: 2155535 - RNA, 22 nt, Human
uuuaagggaguguacucccagg

SEQ ID NO: 2155536 - RNA, 19 nt, Human
uuuaagacguguuuguguu

SEQ ID NO: 2155537 - RNA, 17 nt, Human
uuuaagacguguuugug

SEQ ID NO: 2155538 - RNA, 14 nt, Human
augcacucagcucu

SEQ ID NO: 2155539 - RNA, 16 nt, Human
augauuuacagagaag

SEQ ID NO: 2155540 - RNA, 11 nt, Human
augcaaaaauc

SEQ ID NO: 2155541 - RNA, 19 nt, Human
uuguagccuuuugacuuuc

SEQ ID NO: 2155542 - RNA, 16 nt, Human
uuguagccuuuugacu

SEQ ID NO: 2155543 - RNA, 15 nt, Human
uuguagccuuuugac

SEQ ID NO: 2155544 - RNA, 23 nt, Human
augaguuagaauaauaaauauuu

SEQ ID NO: 2155545 - RNA, 19 nt, Human
augaguuagaauaauaaau

SEQ ID NO: 2155546 - RNA, 14 nt, Human
uuguguauuuaaca

SEQ ID NO: 2155547 - RNA, 13 nt, Human
uuguguauuuaac

SEQ ID NO: 2155548 - RNA, 21 nt, Human
uuguguauuuaacagggaggg

SEQ ID NO: 2155549 - RNA, 22 nt, Human
uugugucaacaugaacaaauuu

SEQ ID NO: 2155550 - RNA, 22 nt, Human
uuuuguucccauccucuucuuu

SEQ ID NO: 2155551 - RNA, 15 nt, Human
auuaagccuuccaca

SEQ ID NO: 2155552 - RNA, 12 nt, Human
uuuuuguauguu

SEQ ID NO: 2155553 - RNA, 13 nt, Human
uuuuuggacauuu

SEQ ID NO: 2155554 - RNA, 19 nt, Human
uuuuuauuuguuugugcau

SEQ ID NO: 2155555 - RNA, 16 nt, Human
auucaaagaaauaucu

SEQ ID NO: 2155556 - RNA, 14 nt, Human
auucaaagaaauau

SEQ ID NO: 2155557 - RNA, 18 nt, Human
auuaguuuugcauaauuu

SEQ ID NO: 2155558 - RNA, 12 nt, Human
auucacuucacg

SEQ ID NO: 2155559 - RNA, 13 nt, Human
auucacuucacgc

SEQ ID NO: 2155560 - RNA, 15 nt, Human
uuugugcauuuucua

SEQ ID NO: 2155561 - RNA, 13 nt, Human
uuugugcauuuuc

SEQ ID NO: 2155562 - RNA, 15 nt, Human
uuuguuuguuuuccu

SEQ ID NO: 2155563 - RNA, 23 nt, Human
augugacauucuuaaaaaaagaa

SEQ ID NO: 2155564 - RNA, 18 nt, Human
augugacauucuuaaaaa

SEQ ID NO: 2155565 - RNA, 22 nt, Human
auguauauauuuuuuaaaaauc

SEQ ID NO: 2155566 - RNA, 23 nt, Human
auguauaauauuuuuaauuaaau

SEQ ID NO: 2155567 - RNA, 14 nt, Human
auguauaauauuuu

SEQ ID NO: 2155568 - RNA, 22 nt, Human
uuugcuaacuagcuuggaaacu

SEQ ID NO: 2155569 - RNA, 14 nt, Human
uuucccuucaucug

SEQ ID NO: 2155570 - RNA, 15 nt, Human
uuucccuugaggaaa

SEQ ID NO: 2155571 - RNA, 22 nt, Human
uuucccugcuuaaugaaaagcu

SEQ ID NO: 2155572 - RNA, 18 nt, Human
uuugaucuucaacaaauu

SEQ ID NO: 2155573 - RNA, 15 nt, Human
uuugaucuucaacaa

SEQ ID NO: 2155574 - RNA, 12 nt, Human
uuugaucuucaa

SEQ ID NO: 2155575 - RNA, 14 nt, Human
uuugacuuucauug

SEQ ID NO: 2155576 - RNA, 18 nt, Human
auguguuuaugugagcug

SEQ ID NO: 2155577 - RNA, 20 nt, Human
auguugcugugcacggugga

SEQ ID NO: 2155578 - RNA, 19 nt, Human
uuuuauugaaucuauuuaa

SEQ ID NO: 2155579 - RNA, 15 nt, Human
uuuucuacuguuuua

SEQ ID NO: 2155580 - RNA, 23 nt, Human
uuuucuguuacuuuguuuuuuaa

SEQ ID NO: 2155581 - RNA, 23 nt, Human
auugaauauaauauauuugugua

SEQ ID NO: 2155582 - RNA, 16 nt, Human
auugaaucuauuuaag

SEQ ID NO: 2155583 - RNA, 14 nt, Human
auugaaucuauuua

SEQ ID NO: 2155584 - RNA, 10 nt, Human
auugaaucua

SEQ ID NO: 2155585 - RNA, 14 nt, Human
auugaacagcaaag

SEQ ID NO: 2155586 - RNA, 15 nt, Human
auugaaggcuuaaac

SEQ ID NO: 2155587 - RNA, 19 nt, Human
auugaaggcuuaaacccau

SEQ ID NO: 2155588 - RNA, 16 nt, Human
auugcauauauacaua

SEQ ID NO: 2155589 - RNA, 15 nt, Human
auuggaacagugaau

SEQ ID NO: 2155590 - RNA, 18 nt, Human
auugaaucuauuuaagua

SEQ ID NO: 2155591 - RNA, 13 nt, Human
auuucuucaccag

SEQ ID NO: 2155592 - RNA, 16 nt, Human
auuucuucaccagauu

SEQ ID NO: 2155593 - RNA, 21 nt, Human
auuugagaauauaaaaaacuu

SEQ ID NO: 2155594 - RNA, 14 nt, Human
auuugagaauauaa

SEQ ID NO: 2155595 - RNA, 20 nt, Human
auuugauaguauugugcaua

SEQ ID NO: 2155596 - RNA, 18 nt, Human
auuugguuuagaacauaa

SEQ ID NO: 2155597 - RNA, 16 nt, Human
auuuacagagaaguga

SEQ ID NO: 2155598 - RNA, 23 nt, Human
auuuauuggccccccgaccuugu

SEQ ID NO: 2155599 - RNA, 17 nt, Human
auuucuaaaauauaaga

SEQ ID NO: 2155600 - RNA, 17 nt, Human
gccucuggaaagcaaag

SEQ ID NO: 2155601 - RNA, 15 nt, Human
gccucuggaaagcaa

SEQ ID NO: 2155602 - RNA, 15 nt, Human
gccuccuggcccagg

SEQ ID NO: 2155603 - RNA, 19 nt, Human
gccuccuggcccaggugag

SEQ ID NO: 2155604 - RNA, 14 nt, Human
gccugcgagggcag

SEQ ID NO: 2155605 - RNA, 15 nt, Human
gccgccugguacuca

SEQ ID NO: 2155606 - RNA, 13 nt, Human
gccgccugguacu

SEQ ID NO: 2155607 - RNA, 18 nt, Human
gccgccugguacucaagc

SEQ ID NO: 2155608 - RNA, 14 nt, Human
gccgcccaaggccc

SEQ ID NO: 2155609 - RNA, 15 nt, Human
gcccuaaaagcacac

SEQ ID NO: 2155610 - RNA, 15 nt, Human
gcccuaaugucugua

SEQ ID NO: 2155611 - RNA, 23 nt, Human
gccacuuuuuuuuuuaaucucca

SEQ ID NO: 2155612 - RNA, 19 nt, Human
gccacugcauaccaaccug

SEQ ID NO: 2155613 - RNA, 18 nt, Human
gccacccugaggccucug

SEQ ID NO: 2155614 - RNA, 23 nt, Human
gccauguugugccucccugguga

SEQ ID NO: 2155615 - RNA, 22 nt, Human
gccauguugugccucccuggug

SEQ ID NO: 2155616 - RNA, 21 nt, Human
gccauguugugccucccuggu

SEQ ID NO: 2155617 - RNA, 20 nt, Human
gccauguugugccucccugg

SEQ ID NO: 2155618 - RNA, 19 nt, Human
gccauguugugccucccug

SEQ ID NO: 2155619 - RNA, 21 nt, Human
gccagaccugcagacgcccag

SEQ ID NO: 2155620 - RNA, 14 nt, Human
gccagaccugcaga

SEQ ID NO: 2155621 - RNA, 13 nt, Human
gccagaccugcag

SEQ ID NO: 2155622 - RNA, 19 nt, Human
gccagaagaugaacagacu

SEQ ID NO: 2155623 - RNA, 20 nt, Human
gccagaagaugaacagacug

SEQ ID NO: 2155624 - RNA, 13 nt, Human
gcucaccuuuguu

SEQ ID NO: 2155625 - RNA, 13 nt, Human
gcuucuuugccaa

SEQ ID NO: 2155626 - RNA, 20 nt, Human
gcuguaaauuuggcuucugu

SEQ ID NO: 2155627 - RNA, 22 nt, Human
gcuguaaauuuggcuucuguug

SEQ ID NO: 2155628 - RNA, 17 nt, Human
gcuguaaauuuggcuuc

SEQ ID NO: 2155629 - RNA, 19 nt, Human
gcuguaaauuuggcuucug

SEQ ID NO: 2155630 - RNA, 18 nt, Human
gcuguaaauuuggcuucu

SEQ ID NO: 2155631 - RNA, 20 nt, Human
gcuucacuccugcuguaaau

SEQ ID NO: 2155632 - RNA, 18 nt, Human
gcuucacuccugcuguaa

SEQ ID NO: 2155633 - RNA, 17 nt, Human
gcuucacuccugcugua

SEQ ID NO: 2155634 - RNA, 16 nt, Human
gcuucacuccugcugu

SEQ ID NO: 2155635 - RNA, 15 nt, Human
gcuucacuccugcug

SEQ ID NO: 2155636 - RNA, 17 nt, Human
gcuucagaauuaaaacu

SEQ ID NO: 2155637 - RNA, 20 nt, Human
gcuucaccccaaucccagcu

SEQ ID NO: 2155638 - RNA, 19 nt, Human
gcuucaccccaaucccagc

SEQ ID NO: 2155639 - RNA, 22 nt, Human
gcuuaaacccauauuguaaaac

SEQ ID NO: 2155640 - RNA, 22 nt, Human
gcugggcacacgccucccacug

SEQ ID NO: 2155641 - RNA, 20 nt, Human
gcugggcacacgccucccac

SEQ ID NO: 2155642 - RNA, 18 nt, Human
ggacuagagggaccucuc

SEQ ID NO: 2155643 - RNA, 19 nt, Human
ggacuagagggaccucucc

SEQ ID NO: 2155644 - RNA, 21 nt, Human
ggacuagagggaccucuccca

SEQ ID NO: 2155645 - RNA, 16 nt, Human
ggacuagagcuuucuu

SEQ ID NO: 2155646 - RNA, 20 nt, Human
ggaccggguggaagggaugg

SEQ ID NO: 2155647 - RNA, 16 nt, Human
ggaggugucuguauca

SEQ ID NO: 2155648 - RNA, 17 nt, Human
ggaggccagugagccac

SEQ ID NO: 2155649 - RNA, 16 nt, Human
ggaggccagugagcca

SEQ ID NO: 2155650 - RNA, 12 nt, Human
ggagcuggcccc

SEQ ID NO: 2155651 - RNA, 18 nt, Human
ggagcuggccccgccgcc

SEQ ID NO: 2155652 - RNA, 19 nt, Human
ggagcuuccuguccuccca

SEQ ID NO: 2155653 - RNA, 16 nt, Human
ggagcuggccccgccg

SEQ ID NO: 2155654 - RNA, 15 nt, Human
ggagcuggccccgcc

SEQ ID NO: 2155655 - RNA, 21 nt, Human
ggagcaggcggugggcaccca

SEQ ID NO: 2155656 - RNA, 14 nt, Human
ggcauuucccccac

SEQ ID NO: 2155657 - RNA, 13 nt, Human
ggccaacauggua

SEQ ID NO: 2155658 - RNA, 20 nt, Human
ggccaacccuucuccucuug

SEQ ID NO: 2155659 - RNA, 16 nt, Human
ggccaacccuucuccu

SEQ ID NO: 2155660 - RNA, 16 nt, Human
ggccaaggagggugag

SEQ ID NO: 2155661 - RNA, 23 nt, Human
ggcccauucuacuugcucuggac

SEQ ID NO: 2155662 - RNA, 22 nt, Human
ggcccauucuacuugcucugga

SEQ ID NO: 2155663 - RNA, 21 nt, Human
ggcccauucuacuugcucugg

SEQ ID NO: 2155664 - RNA, 19 nt, Human
ggcccauucuacuugcucu

SEQ ID NO: 2155665 - RNA, 18 nt, Human
ggcccauucuacuugcuc

SEQ ID NO: 2155666 - RNA, 15 nt, Human
ggcccauucuacuug

SEQ ID NO: 2155667 - RNA, 14 nt, Human
ggcccauucuacuu

SEQ ID NO: 2155668 - RNA, 21 nt, Human
ggaugacaugcacucagcucu

SEQ ID NO: 2155669 - RNA, 23 nt, Human
ggauguuucugucacaucagcuc

SEQ ID NO: 2155670 - RNA, 19 nt, Human
ggcaaaggguccagaagga

SEQ ID NO: 2155671 - RNA, 14 nt, Human
ggcaggacaggaaa

SEQ ID NO: 2155672 - RNA, 18 nt, Human
ggcaggacgugggcuggg

SEQ ID NO: 2155673 - RNA, 18 nt, Human
aaacuaaggcccucuuga

SEQ ID NO: 2155674 - RNA, 17 nt, Human
aaacuacaaaaauuaac

SEQ ID NO: 2155675 - RNA, 19 nt, Human
aaacgcucucuacucugcu

SEQ ID NO: 2155676 - RNA, 18 nt, Human
gggucagccagggccugc

SEQ ID NO: 2155677 - RNA, 16 nt, Human
gggucagccagggccu

SEQ ID NO: 2155678 - RNA, 16 nt, Human
gggucagaaacaggac

SEQ ID NO: 2155679 - RNA, 18 nt, Human
gggucagaaacaggaccg

SEQ ID NO: 2155680 - RNA, 22 nt, Human
ggggucgacuucgggcuggcca

SEQ ID NO: 2155681 - RNA, 22 nt, Human
ggggcgccgcaaaccacacugg

SEQ ID NO: 2155682 - RNA, 21 nt, Human
ggggcgaucgcggcggagcug

SEQ ID NO: 2155683 - RNA, 21 nt, Human
aaacauuuaccaaucauauua

SEQ ID NO: 2155684 - RNA, 20 nt, Human
aaacauuuaccaaucauauu

SEQ ID NO: 2155685 - RNA, 14 nt, Human
aaacauaagugcaa

SEQ ID NO: 2155686 - RNA, 19 nt, Human
aaagcggacaucagcuggu

SEQ ID NO: 2155687 - RNA, 20 nt, Human
aaagcacacucauccccuca

SEQ ID NO: 2155688 - RNA, 19 nt, Human
aaagcuugaguaaaauaaa

SEQ ID NO: 2155689 - RNA, 17 nt, Human
aaagcuugaguaaaaua

SEQ ID NO: 2155690 - RNA, 16 nt, Human
aaagcaaaaagugaug

SEQ ID NO: 2155691 - RNA, 17 nt, Human
aaagagaaaaagaaaug

SEQ ID NO: 2155692 - RNA, 22 nt, Human
aaagauuacuuuuucuuuaugu

SEQ ID NO: 2155693 - RNA, 19 nt, Human
aaagaugggugaaggcugg

SEQ ID NO: 2155694 - RNA, 18 nt, Human
gguauucgcuugagaaaa

SEQ ID NO: 2155695 - RNA, 20 nt, Human
gguccagaaggagacaggca

SEQ ID NO: 2155696 - RNA, 22 nt, Human
gggauuucaccacucaaaggcc

SEQ ID NO: 2155697 - RNA, 15 nt, Human
aaaaguaaauguaca

SEQ ID NO: 2155698 - RNA, 13 nt, Human
aaaauaaaguugg

SEQ ID NO: 2155699 - RNA, 21 nt, Human
aaaauaaauauugucuuuuug

SEQ ID NO: 2155700 - RNA, 23 nt, Human
aaaauaaauauugucuuuuugua

SEQ ID NO: 2155701 - RNA, 19 nt, Human
aaaacauuuucacacaaua

SEQ ID NO: 2155702 - RNA, 12 nt, Human
aaaaaucuguuu

SEQ ID NO: 2155703 - RNA, 18 nt, Human
aaaagcuguauuuugaaa

SEQ ID NO: 2155704 - RNA, 13 nt, Human
aaaagcugcucag

SEQ ID NO: 2155705 - RNA, 20 nt, Human
aaaagcuacaguuuugugaa

SEQ ID NO: 2155706 - RNA, 13 nt, Human
gggagaccuggac

SEQ ID NO: 2155707 - RNA, 19 nt, Human
ggcuccugagggagcucca

SEQ ID NO: 2155708 - RNA, 13 nt, Human
aaaaaaaaaccaa

SEQ ID NO: 2155709 - RNA, 11 nt, Human
aaaaaaaaugg

SEQ ID NO: 2155710 - RNA, 11 nt, Human
aaaaaaaagag

SEQ ID NO: 2155711 - RNA, 12 nt, Human
aaaaaagaaaug

SEQ ID NO: 2155712 - RNA, 13 nt, Human
gggaaaagcagcu

SEQ ID NO: 2155713 - RNA, 16 nt, Human
gacuguugucccugca

SEQ ID NO: 2155714 - RNA, 14 nt, Human
gacuguugucccug

SEQ ID NO: 2155715 - RNA, 13 nt, Human
gacuguugucccu

SEQ ID NO: 2155716 - RNA, 20 nt, Human
gacuguugucccugcacucu

SEQ ID NO: 2155717 - RNA, 15 nt, Human
gacuuucauuggaaa

SEQ ID NO: 2155718 - RNA, 12 nt, Human
gaccucucccag

SEQ ID NO: 2155719 - RNA, 14 nt, Human
gaccucucccaggg

SEQ ID NO: 2155720 - RNA, 24 nt, Human
gaccaugcgacacugggaggccag

SEQ ID NO: 2155721 - RNA, 18 nt, Human
gacauuuaccuuuuugaa

SEQ ID NO: 2155722 - RNA, 18 nt, Human
gacauuguuaaaauaaag

SEQ ID NO: 2155723 - RNA, 13 nt, Human
gacagaagaaggc

SEQ ID NO: 2155724 - RNA, 16 nt, Human
gacagugaauauucaa

SEQ ID NO: 2155725 - RNA, 23 nt, Human
gacauucaguauauaaaauaugu

SEQ ID NO: 2155726 - RNA, 16 nt, Human
gacacaggaugaagca

SEQ ID NO: 2155727 - RNA, 15 nt, Human
gacagaacacugucu

SEQ ID NO: 2155728 - RNA, 14 nt, Human
gacagaacacuguc

SEQ ID NO: 2155729 - RNA, 13 nt, Human
gacagaacacugu

SEQ ID NO: 2155730 - RNA, 16 nt, Human
gaaggggacccccgcc

SEQ ID NO: 2155731 - RNA, 15 nt, Human
gaaggccucgcagga

SEQ ID NO: 2155732 - RNA, 14 nt, Human
gaaggccucgcagg

SEQ ID NO: 2155733 - RNA, 18 nt, Human
gaaggcuggcaugaucca

SEQ ID NO: 2155734 - RNA, 14 nt, Human
gaaggcuggcauga

SEQ ID NO: 2155735 - RNA, 18 nt, Human
gaaggccucgcaggaaga

SEQ ID NO: 2155736 - RNA, 18 nt, Human
gaagcucuugaagacacu

SEQ ID NO: 2155737 - RNA, 22 nt, Human
gaagcugaggcaggugaauugu

SEQ ID NO: 2155738 - RNA, 19 nt, Human
gaagcucucgggcuaggaa

SEQ ID NO: 2155739 - RNA, 20 nt, Human
gaauauaauauauuugugua

SEQ ID NO: 2155740 - RNA, 19 nt, Human
gaauauaauauauuugugu

SEQ ID NO: 2155741 - RNA, 16 nt, Human
gaauauaauacuguau

SEQ ID NO: 2155742 - RNA, 14 nt, Human
gaauauaaacacua

SEQ ID NO: 2155743 - RNA, 21 nt, Human
gaauauaaacacuauauggca

SEQ ID NO: 2155744 - RNA, 13 nt, Human
gaauauaaacacu

SEQ ID NO: 2155745 - RNA, 23 nt, Human
gaauaguugaaccuauuucucuu

SEQ ID NO: 2155746 - RNA, 13 nt, Human
gaaguuaugggaa

SEQ ID NO: 2155747 - RNA, 21 nt, Human
gaaggggacccccgcccccug

SEQ ID NO: 2155748 - RNA, 20 nt, Human
gaaggggacccccgcccccu

SEQ ID NO: 2155749 - RNA, 18 nt, Human
gaaggggacccccgcccc

SEQ ID NO: 2155750 - RNA, 13 nt, Human
gaagcaaacacau

SEQ ID NO: 2155751 - RNA, 15 nt, Human
gaagcaaacacauua

SEQ ID NO: 2155752 - RNA, 17 nt, Human
gaagcaaacacauuaag

SEQ ID NO: 2155753 - RNA, 21 nt, Human
gaacugccuuuggcagaguuc

SEQ ID NO: 2155754 - RNA, 12 nt, Human
gaacugaacacc

SEQ ID NO: 2155755 - RNA, 21 nt, Human
gaacugaacaccauugaaggc

SEQ ID NO: 2155756 - RNA, 22 nt, Human
gaacugaacaccauugaaggcu

SEQ ID NO: 2155757 - RNA, 23 nt, Human
gaacugaacaccauugaaggcuu

SEQ ID NO: 2155758 - RNA, 17 nt, Human
gaacuggagccaugggc

SEQ ID NO: 2155759 - RNA, 18 nt, Human
gaacuggagccaugggca

SEQ ID NO: 2155760 - RNA, 21 nt, Human
gagugcaagccccugcuccag

SEQ ID NO: 2155761 - RNA, 23 nt, Human
gaggugaacaagcaaacccagac

SEQ ID NO: 2155762 - RNA, 14 nt, Human
gaggcauaaagacu

SEQ ID NO: 2155763 - RNA, 19 nt, Human
gauucuucccauucuccau

SEQ ID NO: 2155764 - RNA, 16 nt, Human
gauuuagauaugcaaa

SEQ ID NO: 2155765 - RNA, 12 nt, Human
gauggacagacu

SEQ ID NO: 2155766 - RNA, 13 nt, Human
gcaagucaggguu

SEQ ID NO: 2155767 - RNA, 20 nt, Human
cuuuuacugaagccuuucuu

SEQ ID NO: 2155768 - RNA, 21 nt, Human
cuuuggggcuuuuacaccagu

SEQ ID NO: 2155769 - RNA, 20 nt, Human
cuuuggggcuuuuacaccag

SEQ ID NO: 2155770 - RNA, 16 nt, Human
cuuuuagcaguaaaau

SEQ ID NO: 2155771 - RNA, 17 nt, Human
cuuuuauuucuuaaaca

SEQ ID NO: 2155772 - RNA, 20 nt, Human
cuuuuagggagcuggucuga

SEQ ID NO: 2155773 - RNA, 23 nt, Human
cuuucuccuuuguacuuugugcu

SEQ ID NO: 2155774 - RNA, 15 nt, Human
cuuugagguugcuuu

SEQ ID NO: 2155775 - RNA, 17 nt, Human
cuuugagguugcuuugu

SEQ ID NO: 2155776 - RNA, 12 nt, Human
cuuuaauauaaa

SEQ ID NO: 2155777 - RNA, 22 nt, Human
cuuuacaagauggguccaggau

SEQ ID NO: 2155778 - RNA, 17 nt, Human
cuugacagaacacuguc

SEQ ID NO: 2155779 - RNA, 16 nt, Human
cuugacagaacacugu

SEQ ID NO: 2155780 - RNA, 14 nt, Human
cuugacagaacacu

SEQ ID NO: 2155781 - RNA, 11 nt, Human
cuugaagucag

SEQ ID NO: 2155782 - RNA, 14 nt, Human
cuuccaugugaggg

SEQ ID NO: 2155783 - RNA, 14 nt, Human
cuucaccucugcua

SEQ ID NO: 2155784 - RNA, 16 nt, Human
cuucaccuccuuucaa

SEQ ID NO: 2155785 - RNA, 18 nt, Human
cuucacuguccuccaagc

SEQ ID NO: 2155786 - RNA, 21 nt, Human
cuucacuguccuccaagccag

SEQ ID NO: 2155787 - RNA, 19 nt, Human
cuucacugugaccuugaga

SEQ ID NO: 2155788 - RNA, 19 nt, Human
cuuauuaaauggaaacuga

SEQ ID NO: 2155789 - RNA, 19 nt, Human
cugugucugaguggcuuca

SEQ ID NO: 2155790 - RNA, 18 nt, Human
cugugaccuugagaagau

SEQ ID NO: 2155791 - RNA, 18 nt, Human
cugugucugaguggcuuc

SEQ ID NO: 2155792 - RNA, 15 nt, Human
cugugucugaguggc

SEQ ID NO: 2155793 - RNA, 11 nt, Human
cuuaaaaugau

SEQ ID NO: 2155794 - RNA, 11 nt, Human
cuuacacccac

SEQ ID NO: 2155795 - RNA, 20 nt, Human
cuuacacccacaguggaaag

SEQ ID NO: 2155796 - RNA, 20 nt, Human
cugggccauguugugccucc

SEQ ID NO: 2155797 - RNA, 19 nt, Human
cugggccauguugugccuc

SEQ ID NO: 2155798 - RNA, 17 nt, Human
cugggcccacaaaggca

SEQ ID NO: 2155799 - RNA, 19 nt, Human
cugggugacagagcaagac

SEQ ID NO: 2155800 - RNA, 14 nt, Human
cugcuuaaugaaaa

SEQ ID NO: 2155801 - RNA, 17 nt, Human
cugcaccguacugugga

SEQ ID NO: 2155802 - RNA, 14 nt, Human
cugaugacuugcuu

SEQ ID NO: 2155803 - RNA, 23 nt, Human
cugaugacucaagauucccagga

SEQ ID NO: 2155804 - RNA, 22 nt, Human
cugaugacucaagauucccagg

SEQ ID NO: 2155805 - RNA, 20 nt, Human
cugaugacucaagauuccca

SEQ ID NO: 2155806 - RNA, 18 nt, Human
cugaugacucaagauucc

SEQ ID NO: 2155807 - RNA, 15 nt, Human
cugaugacucaagau

SEQ ID NO: 2155808 - RNA, 14 nt, Human
cugaugacucaaga

SEQ ID NO: 2155809 - RNA, 18 nt, Human
cugcaggccaggccagcu

SEQ ID NO: 2155810 - RNA, 23 nt, Human
cugcaggccaggccagcugccuc

SEQ ID NO: 2155811 - RNA, 17 nt, Human
cugcaggccaggccagc

SEQ ID NO: 2155812 - RNA, 23 nt, Human
cugcccccgcauccccugccucc

SEQ ID NO: 2155813 - RNA, 22 nt, Human
cugcccccgcauccccugccuc

SEQ ID NO: 2155814 - RNA, 21 nt, Human
cugcccccgcauccccugccu

SEQ ID NO: 2155815 - RNA, 20 nt, Human
cugcccccgcauccccugcc

SEQ ID NO: 2155816 - RNA, 18 nt, Human
cugcccccgcauccccug

SEQ ID NO: 2155817 - RNA, 16 nt, Human
cugcccccgcaucccc

SEQ ID NO: 2155818 - RNA, 15 nt, Human
cugcccccgcauccc

SEQ ID NO: 2155819 - RNA, 14 nt, Human
cugcccccgcaucc

SEQ ID NO: 2155820 - RNA, 11 nt, Human
cugccagggcc

SEQ ID NO: 2155821 - RNA, 22 nt, Human
caauugcuuugucauauagcug

SEQ ID NO: 2155822 - RNA, 22 nt, Human
caauauuuuccaugaaaaugca

SEQ ID NO: 2155823 - RNA, 20 nt, Human
caauauuuuccaugaaaaug

SEQ ID NO: 2155824 - RNA, 19 nt, Human
caauauuuuccaugaaaau

SEQ ID NO: 2155825 - RNA, 16 nt, Human
caauauuuuccaugaa

SEQ ID NO: 2155826 - RNA, 15 nt, Human
caauauuuuccauga

SEQ ID NO: 2155827 - RNA, 13 nt, Human
caauauuuuccau

SEQ ID NO: 2155828 - RNA, 11 nt, Human
caauauuuucc

SEQ ID NO: 2155829 - RNA, 17 nt, Human
caauuucaaauuacucu

SEQ ID NO: 2155830 - RNA, 16 nt, Human
caaggcccagaugugg

SEQ ID NO: 2155831 - RNA, 23 nt, Human
caaggccauccuucccugucugc

SEQ ID NO: 2155832 - RNA, 17 nt, Human
caaggccauccuucccu

SEQ ID NO: 2155833 - RNA, 15 nt, Human
caaggccauccuucc

SEQ ID NO: 2155834 - RNA, 14 nt, Human
caagcaagacugag

SEQ ID NO: 2155835 - RNA, 13 nt, Human
caagcaagacuga

SEQ ID NO: 2155836 - RNA, 17 nt, Human
caagcaaacccagacgg

SEQ ID NO: 2155837 - RNA, 14 nt, Human
caagcaaacccaga

SEQ ID NO: 2155838 - RNA, 19 nt, Human
cacccugaggccucuggaa

SEQ ID NO: 2155839 - RNA, 23 nt, Human
caccugccacccugggccuggca

SEQ ID NO: 2155840 - RNA, 18 nt, Human
cacgcuuucagcgaauga

SEQ ID NO: 2155841 - RNA, 16 nt, Human
auuuaaguaacuuuaa

SEQ ID NO: 2155842 - RNA, 21 nt, Human
auuucaauuuccaagagcuga

SEQ ID NO: 2155843 - RNA, 23 nt, Human
auuucaccacucaaaggccagac

SEQ ID NO: 2155844 - RNA, 21 nt, Human
auuucaccacucaaaggccag

SEQ ID NO: 2155845 - RNA, 18 nt, Human
auuucucuuucuuuacaa

SEQ ID NO: 2155846 - RNA, 16 nt, Human
auuucucuuucuuuac

SEQ ID NO: 2155847 - RNA, 21 nt, Human
auuucuuaaacaaauguauga

SEQ ID NO: 2155848 - RNA, 13 nt, Human
auuucuuaaacaa

SEQ ID NO: 2155849 - RNA, 15 nt, Human
auuuuuuuuaaacaa

SEQ ID NO: 2155850 - RNA, 12 nt, Human
auuuuuauccau

SEQ ID NO: 2155851 - RNA, 18 nt, Human
caaacaugugguuaaugc

SEQ ID NO: 2155852 - RNA, 12 nt, Human
auuuguuaaugg

SEQ ID NO: 2155853 - RNA, 13 nt, Human
auuuuauaaacaa

SEQ ID NO: 2155854 - RNA, 19 nt, Human
auugagcugcagaaacgaa

SEQ ID NO: 2155855 - RNA, 17 nt, Human
auugagcugcagaaacg

SEQ ID NO: 2155856 - RNA, 14 nt, Human
auucgcuugagaaa

SEQ ID NO: 2155857 - RNA, 18 nt, Human
auuagaucuucaaacaga

SEQ ID NO: 2155858 - RNA, 19 nt, Human
auuagaucuucaaacagaa

SEQ ID NO: 2155859 - RNA, 20 nt, Human
auuagaucuucaaacagaau

SEQ ID NO: 2155860 - RNA, 21 nt, Human
auucaauaaaaaaaagaaaug

SEQ ID NO: 2155861 - RNA, 18 nt, Human
auucaauaaaaaaaagaa

SEQ ID NO: 2155862 - RNA, 12 nt, Human
auucaauaaaaa

SEQ ID NO: 2155863 - RNA, 22 nt, Human
auucaauaaaaaaaagaaauga

SEQ ID NO: 2155864 - RNA, 17 nt, Human
auucauauugaauauaa

SEQ ID NO: 2155865 - RNA, 14 nt, Human
auucauauugaaua

SEQ ID NO: 2155866 - RNA, 13 nt, Human
auucauauugaau

SEQ ID NO: 2155867 - RNA, 11 nt, Human
auuaacacugc

SEQ ID NO: 2155868 - RNA, 16 nt, Human
auuacagggcacaggc

SEQ ID NO: 2155869 - RNA, 15 nt, Human
auuacagggcacagg

SEQ ID NO: 2155870 - RNA, 15 nt, Human
cagccaggccccagg

SEQ ID NO: 2155871 - RNA, 16 nt, Human
cagacuguugucccug

SEQ ID NO: 2155872 - RNA, 18 nt, Human
cagacuguugucccugca

SEQ ID NO: 2155873 - RNA, 16 nt, Human
cagacugaucaggacc

SEQ ID NO: 2155874 - RNA, 17 nt, Human
cagacugaucaggaccu

SEQ ID NO: 2155875 - RNA, 22 nt, Human
cagacugaccuugaugagcugu

SEQ ID NO: 2155876 - RNA, 13 nt, Human
cagacugaccuug

SEQ ID NO: 2155877 - RNA, 22 nt, Human
cagacucgauucauauugaaua

SEQ ID NO: 2155878 - RNA, 23 nt, Human
cagacuccugacugucucccggg

SEQ ID NO: 2155879 - RNA, 16 nt, Human
caggccuuaucuccaa

SEQ ID NO: 2155880 - RNA, 17 nt, Human
caggccuuaucuccaag

SEQ ID NO: 2155881 - RNA, 22 nt, Human
caggccuuaucuccaagaccag

SEQ ID NO: 2155882 - RNA, 23 nt, Human
cagggcuuacggcccuggccuug

SEQ ID NO: 2155883 - RNA, 20 nt, Human
cagggcuuacggcccuggcc

SEQ ID NO: 2155884 - RNA, 18 nt, Human
cagggcuuacggcccugg

SEQ ID NO: 2155885 - RNA, 16 nt, Human
cagggcuuacggcccu

SEQ ID NO: 2155886 - RNA, 19 nt, Human
cagggagcauuuuccucca

SEQ ID NO: 2155887 - RNA, 21 nt, Human
cagggagcaggcggugggcac

SEQ ID NO: 2155888 - RNA, 20 nt, Human
cagggagaccuggacacagg

SEQ ID NO: 2155889 - RNA, 21 nt, Human
cagggagaccuggacacaggc

SEQ ID NO: 2155890 - RNA, 14 nt, Human
caggccaggccagc

SEQ ID NO: 2155891 - RNA, 23 nt, Human
caggaccuccaagccacugagca

SEQ ID NO: 2155892 - RNA, 20 nt, Human
caggaccuccaagccacuga

SEQ ID NO: 2155893 - RNA, 19 nt, Human
caggaccuccaagccacug

SEQ ID NO: 2155894 - RNA, 17 nt, Human
caggaccuccaagccac

SEQ ID NO: 2155895 - RNA, 24 nt, Human
caguuugaaugcagucuguccagg

SEQ ID NO: 2155896 - RNA, 20 nt, Human
caucagcuaaacaccacguc

SEQ ID NO: 2155897 - RNA, 18 nt, Human
caucagcuaaacaccacg

SEQ ID NO: 2155898 - RNA, 12 nt, Human
cauccugcaggc

SEQ ID NO: 2155899 - RNA, 22 nt, Human
caucguuuucuucacuguccuc

SEQ ID NO: 2155900 - RNA, 17 nt, Human
caucugguuaggauggc

SEQ ID NO: 2155901 - RNA, 16 nt, Human
cagucuauuugagacu

SEQ ID NO: 2155902 - RNA, 15 nt, Human
cagugcaacacugaa

SEQ ID NO: 2155903 - RNA, 22 nt, Human
caguucauguauguucagaaga

SEQ ID NO: 2155904 - RNA, 20 nt, Human
cauugggugagguaauaaac

SEQ ID NO: 2155905 - RNA, 23 nt, Human
ccaaaaaagcuguauuuugaaaa

SEQ ID NO: 2155906 - RNA, 20 nt, Human
ccaaaaaagcuguauuuuga

SEQ ID NO: 2155907 - RNA, 22 nt, Human
ccaaaaaagcuguauuuugaaa

SEQ ID NO: 2155908 - RNA, 14 nt, Human
ccaaaagcugcuca

SEQ ID NO: 2155909 - RNA, 23 nt, Human
ccaaggagaugaagcaaacacau

SEQ ID NO: 2155910 - RNA, 14 nt, Human
ccaaggagaugaag

SEQ ID NO: 2155911 - RNA, 20 nt, Human
ccaaggagggugagugcaag

SEQ ID NO: 2155912 - RNA, 11 nt, Human
ccaauucuuac

SEQ ID NO: 2155913 - RNA, 14 nt, Human
ccaacucagaaggg

SEQ ID NO: 2155914 - RNA, 14 nt, Human
cauguucugcuuuc

SEQ ID NO: 2155915 - RNA, 16 nt, Human
caugggaaggugggcg

SEQ ID NO: 2155916 - RNA, 18 nt, Human
ccucgaauuuuguuuucu

SEQ ID NO: 2155917 - RNA, 13 nt, Human
ccucgaauuuugu

SEQ ID NO: 2155918 - RNA, 16 nt, Human
ccuccuacccugcgcc

SEQ ID NO: 2155919 - RNA, 20 nt, Human
ccucccuggugagagggccg

SEQ ID NO: 2155920 - RNA, 13 nt, Human
ccucccacugggg

SEQ ID NO: 2155921 - RNA, 15 nt, Human
ccucccacugggguc

SEQ ID NO: 2155922 - RNA, 21 nt, Human
ccggcccuccuacccugcgcc

SEQ ID NO: 2155923 - RNA, 15 nt, Human
cccugcccuccccuc

SEQ ID NO: 2155924 - RNA, 14 nt, Human
cccugcccuccccu

SEQ ID NO: 2155925 - RNA, 12 nt, Human
cccugacccugu

SEQ ID NO: 2155926 - RNA, 19 nt, Human
cccugacccuguggaagca

SEQ ID NO: 2155927 - RNA, 15 nt, Human
cccugacccugugga

SEQ ID NO: 2155928 - RNA, 16 nt, Human
cccugacccuguauau

SEQ ID NO: 2155929 - RNA, 18 nt, Human
cccuccuacccugcgccc

SEQ ID NO: 2155930 - RNA, 17 nt, Human
cccuccuacccugcgcc

SEQ ID NO: 2155931 - RNA, 23 nt, Human
cccucgcuuggacggcugggcac

SEQ ID NO: 2155932 - RNA, 21 nt, Human
cccucgcuuggacggcugggc

SEQ ID NO: 2155933 - RNA, 21 nt, Human
ccagaccugcagacgcccaga

SEQ ID NO: 2155934 - RNA, 20 nt, Human
ccagaccugcagacgcccag

SEQ ID NO: 2155935 - RNA, 16 nt, Human
ccagaccugcagacgc

SEQ ID NO: 2155936 - RNA, 14 nt, Human
ccagaccugcagac

SEQ ID NO: 2155937 - RNA, 20 nt, Human
ccagacggcuccacuaggac

SEQ ID NO: 2155938 - RNA, 15 nt, Human
ccagacggcuccacu

SEQ ID NO: 2155939 - RNA, 16 nt, Human
ccagagaaagcgcaga

SEQ ID NO: 2155940 - RNA, 21 nt, Human
ccagacuccugacugucuccc

SEQ ID NO: 2155941 - RNA, 20 nt, Human
ccagacuccugacugucucc

SEQ ID NO: 2155942 - RNA, 23 nt, Human
ccagaucuacuugguugucaagu

SEQ ID NO: 2155943 - RNA, 17 nt, Human
ccagcgggaauggcagc

SEQ ID NO: 2155944 - RNA, 23 nt, Human
ccagcgggaauggcagcugccac

SEQ ID NO: 2155945 - RNA, 21 nt, Human
ccagcggacaguggcaggaca

SEQ ID NO: 2155946 - RNA, 19 nt, Human
ccagcggacaguggcagga

SEQ ID NO: 2155947 - RNA, 18 nt, Human
ccagcggacaguggcagg

SEQ ID NO: 2155948 - RNA, 17 nt, Human
ccagcggacaguggcag

SEQ ID NO: 2155949 - RNA, 16 nt, Human
ccagcggacaguggca

SEQ ID NO: 2155950 - RNA, 15 nt, Human
ccagcggacaguggc

SEQ ID NO: 2155951 - RNA, 17 nt, Human
ccaggaguucugcucau

SEQ ID NO: 2155952 - RNA, 16 nt, Human
ccaggaguucugcuca

SEQ ID NO: 2155953 - RNA, 15 nt, Human
ccaggaguucugcuc

SEQ ID NO: 2155954 - RNA, 23 nt, Human
ccaggcagggccaacccuucucc

SEQ ID NO: 2155955 - RNA, 19 nt, Human
ccaggcagggccaacccuu

SEQ ID NO: 2155956 - RNA, 17 nt, Human
ccaguccuuccaccucg

SEQ ID NO: 2155957 - RNA, 13 nt, Human
ccaguccuuccac

SEQ ID NO: 2155958 - RNA, 21 nt, Human
ccaugugaaaaggcaaaaagc

SEQ ID NO: 2155959 - RNA, 20 nt, Human
ccaugagauagcauuagcug

SEQ ID NO: 2155960 - RNA, 21 nt, Human
ccaugggcacaaagggcccag

SEQ ID NO: 2155961 - RNA, 14 nt, Human
cccacccugggacc

SEQ ID NO: 2155962 - RNA, 15 nt, Human
ccauuuaaaaacagg

SEQ ID NO: 2155963 - RNA, 14 nt, Human
cccaagcagagaag

SEQ ID NO: 2155964 - RNA, 15 nt, Human
ccccauucuuuugua

SEQ ID NO: 2155965 - RNA, 11 nt, Human
cccccuuccac

SEQ ID NO: 2155966 - RNA, 16 nt, Human
ccccgcauccccugcc

SEQ ID NO: 2155967 - RNA, 19 nt, Human
ccccgcauccccugccucc

SEQ ID NO: 2155968 - RNA, 17 nt, Human
ccccgcauccccugccu

SEQ ID NO: 2155969 - RNA, 21 nt, Human
ccccgcccccugcccuccccu

SEQ ID NO: 2155970 - RNA, 18 nt, Human
ccccgcccccugcccucc

SEQ ID NO: 2155971 - RNA, 17 nt, Human
ccccgcccccugcccuc

SEQ ID NO: 2155972 - RNA, 13 nt, Human
ccccgcccccugc

SEQ ID NO: 2155973 - RNA, 22 nt, Human
cccauucuuuuguaauuuaaau

SEQ ID NO: 2155974 - RNA, 21 nt, Human
cccauucuuuuguaauuuaaa

SEQ ID NO: 2155975 - RNA, 20 nt, Human
cccauucuuuuguaauuuaa

SEQ ID NO: 2155976 - RNA, 17 nt, Human
cccauucuuuuguaauu

SEQ ID NO: 2155977 - RNA, 14 nt, Human
cccauucuuuugua

SEQ ID NO: 2155978 - RNA, 23 nt, Human
cggugggcacccacccugggacc

SEQ ID NO: 2155979 - RNA, 19 nt, Human
cggugggcacccacccugg

SEQ ID NO: 2155980 - RNA, 18 nt, Human
cggugggcacccacccug

SEQ ID NO: 2155981 - RNA, 15 nt, Human
cggugggcacccacc

SEQ ID NO: 2155982 - RNA, 20 nt, Human
cgguggcucacgccuguaau

SEQ ID NO: 2155983 - RNA, 14 nt, Human
cgugaucaaagcca

SEQ ID NO: 2155984 - RNA, 18 nt, Human
cgugaucaaagccacacu

SEQ ID NO: 2155985 - RNA, 21 nt, Human
cgugaucaaagccacacucug

SEQ ID NO: 2155986 - RNA, 19 nt, Human
ccuuaugcuucuuucaaau

SEQ ID NO: 2155987 - RNA, 16 nt, Human
ccuuaucuccaagacc

SEQ ID NO: 2155988 - RNA, 22 nt, Human
ccuuaucuccaagaccagagau

SEQ ID NO: 2155989 - RNA, 16 nt, Human
ccuuucaaagccauuu

SEQ ID NO: 2155990 - RNA, 18 nt, Human
ccuucccugucugccagg

SEQ ID NO: 2155991 - RNA, 16 nt, Human
cucccccuagccauuu

SEQ ID NO: 2155992 - RNA, 23 nt, Human
cucccacugggguccagggagca

SEQ ID NO: 2155993 - RNA, 21 nt, Human
cuccggcccuccuacccugcg

SEQ ID NO: 2155994 - RNA, 18 nt, Human
cuccuacccugcgcccag

SEQ ID NO: 2155995 - RNA, 15 nt, Human
cuccuacccugcgcc

SEQ ID NO: 2155996 - RNA, 14 nt, Human
cuccuggcccaggu

SEQ ID NO: 2155997 - RNA, 12 nt, Human
cuccuggcccag

SEQ ID NO: 2155998 - RNA, 19 nt, Human
cucugcagggccgccaggg

SEQ ID NO: 2155999 - RNA, 13 nt, Human
cucugcagggccg

SEQ ID NO: 2156000 - RNA, 20 nt, Human
cuccuuuguacuuugugcuu

SEQ ID NO: 2156001 - RNA, 17 nt, Human
cuccuuuguacuuugug

SEQ ID NO: 2156002 - RNA, 14 nt, Human
cuccuuuguacuuu

SEQ ID NO: 2156003 - RNA, 13 nt, Human
cuccuuuguacuu

SEQ ID NO: 2156004 - RNA, 21 nt, Human
cucuccccucagagugcaagc

SEQ ID NO: 2156005 - RNA, 20 nt, Human
cucucccugacccuguauau

SEQ ID NO: 2156006 - RNA, 14 nt, Human
cucucccugacccu

SEQ ID NO: 2156007 - RNA, 13 nt, Human
cucucccugaccc

SEQ ID NO: 2156008 - RNA, 12 nt, Human
cucucccugacc

SEQ ID NO: 2156009 - RNA, 20 nt, Human
cucagggaaaagcagcucuc

SEQ ID NO: 2156010 - RNA, 22 nt, Human
cucagggaaaagcagcucuccc

SEQ ID NO: 2156011 - RNA, 17 nt, Human
cucagggaaaagcagcu

SEQ ID NO: 2156012 - RNA, 23 nt, Human
cucagggaaaagcagcucucccc

SEQ ID NO: 2156013 - RNA, 18 nt, Human
cucaggccucugugccgc

SEQ ID NO: 2156014 - RNA, 13 nt, Human
cucaggccucugu

SEQ ID NO: 2156015 - RNA, 16 nt, Human
cucagaccagcucuuc

SEQ ID NO: 2156016 - RNA, 14 nt, Human
cucagaccagcucu

SEQ ID NO: 2156017 - RNA, 15 nt, Human
cucagaccagcucuu

SEQ ID NO: 2156018 - RNA, 16 nt, Human
cuacaaaaauuaacug

SEQ ID NO: 2156019 - RNA, 13 nt, Human
cuaugucuuguuu

SEQ ID NO: 2156020 - RNA, 13 nt, Human
cucaauauuuucc

SEQ ID NO: 2156021 - RNA, 19 nt, Human
cucaauauuuuccaugaaa

SEQ ID NO: 2156022 - RNA, 18 nt, Human
cucaauauuuuccaugaa

SEQ ID NO: 2156023 - RNA, 22 nt, Human
cucaauauuuuccaugaaaaug

SEQ ID NO: 2156024 - RNA, 12 nt, Human
agugaauauuca

SEQ ID NO: 2156025 - RNA, 18 nt, Human
agugaauaacugcaaagu

SEQ ID NO: 2156026 - RNA, 15 nt, Human
agucuguccaggcuc

SEQ ID NO: 2156027 - RNA, 12 nt, Human
aguccucugaau

SEQ ID NO: 2156028 - RNA, 14 nt, Human
aguccucugaauga

SEQ ID NO: 2156029 - RNA, 13 nt, Human
aggggccagaaga

SEQ ID NO: 2156030 - RNA, 17 nt, Human
aggggccagaagaugaa

SEQ ID NO: 2156031 - RNA, 20 nt, Human
aguaacccccacuggacuga

SEQ ID NO: 2156032 - RNA, 19 nt, Human
auaaaaaaaagaaaugaaa

SEQ ID NO: 2156033 - RNA, 17 nt, Human
auaaaaaaaagaaauga

SEQ ID NO: 2156034 - RNA, 21 nt, Human
auaagcuaacaccagacagac

SEQ ID NO: 2156035 - RNA, 15 nt, Human
auacuguugugcgca

SEQ ID NO: 2156036 - RNA, 17 nt, Human
auacugucucuuucaug

SEQ ID NO: 2156037 - RNA, 18 nt, Human
augagcugugcacaaagu

SEQ ID NO: 2156038 - RNA, 22 nt, Human
augagcugugcacaaaguggca

SEQ ID NO: 2156039 - RNA, 18 nt, Human
augaccuucuaggaagcu

SEQ ID NO: 2156040 - RNA, 17 nt, Human
augaccuucuaggaagc

SEQ ID NO: 2156041 - RNA, 22 nt, Human
augcuuucugaagcuuuaccag

SEQ ID NO: 2156042 - RNA, 22 nt, Human
augggacaaaguuccaaaaugc

SEQ ID NO: 2156043 - RNA, 19 nt, Human
aucccccccaccucucccu

SEQ ID NO: 2156044 - RNA, 17 nt, Human
auccuuccucacaccag

SEQ ID NO: 2156045 - RNA, 13 nt, Human
auccuuuuuuaaa

SEQ ID NO: 2156046 - RNA, 16 nt, Human
auccuuuuuuaaaagu

SEQ ID NO: 2156047 - RNA, 22 nt, Human
auccuuuuuuaaaaguaaaugu

SEQ ID NO: 2156048 - RNA, 22 nt, Human
auccacuucuuucagcagacug

SEQ ID NO: 2156049 - RNA, 14 nt, Human
auccacuucuuuca

SEQ ID NO: 2156050 - RNA, 17 nt, Human
aucaugaccagcaaaua

SEQ ID NO: 2156051 - RNA, 21 nt, Human
agaugggugaaggcuggcaug

SEQ ID NO: 2156052 - RNA, 17 nt, Human
agaugggugaaggcugg

SEQ ID NO: 2156053 - RNA, 17 nt, Human
agaucucugcagggccg

SEQ ID NO: 2156054 - RNA, 16 nt, Human
agaucucugcagggcc

SEQ ID NO: 2156055 - RNA, 13 nt, Human
agcccaaagaagg

SEQ ID NO: 2156056 - RNA, 15 nt, Human
agccauuuuuacugu

SEQ ID NO: 2156057 - RNA, 19 nt, Human
agaagggagcuagccagag

SEQ ID NO: 2156058 - RNA, 18 nt, Human
agaagggagcuagccaga

SEQ ID NO: 2156059 - RNA, 13 nt, Human
agaagagccacag

SEQ ID NO: 2156060 - RNA, 11 nt, Human
agaagagccac

SEQ ID NO: 2156061 - RNA, 22 nt, Human
agaagagccacagugagggaga

SEQ ID NO: 2156062 - RNA, 14 nt, Human
agaagagccacagu

SEQ ID NO: 2156063 - RNA, 19 nt, Human
agaacauugguauucgcuu

SEQ ID NO: 2156064 - RNA, 13 nt, Human
agaaucucuuucg

SEQ ID NO: 2156065 - RNA, 21 nt, Human
agaacaauauugacuuugucu

SEQ ID NO: 2156066 - RNA, 20 nt, Human
agaacaauauugacuuuguc

SEQ ID NO: 2156067 - RNA, 16 nt, Human
agaacacaaggucauu

SEQ ID NO: 2156068 - RNA, 19 nt, Human
agaacaauauugacuuugu

SEQ ID NO: 2156069 - RNA, 17 nt, Human
agaacaauauugacuuu

SEQ ID NO: 2156070 - RNA, 11 nt, Human
agaacacuggu

SEQ ID NO: 2156071 - RNA, 19 nt, Human
agaacauguagaaaacaaa

SEQ ID NO: 2156072 - RNA, 18 nt, Human
agaacauguagaaaacaa

SEQ ID NO: 2156073 - RNA, 17 nt, Human
agaacauguagaaaaca

SEQ ID NO: 2156074 - RNA, 14 nt, Human
agaacauguagaaa

SEQ ID NO: 2156075 - RNA, 17 nt, Human
agaacauaaagcaaaua

SEQ ID NO: 2156076 - RNA, 16 nt, Human
agaacauaaagcaaau

SEQ ID NO: 2156077 - RNA, 14 nt, Human
agaacauaaagcaa

SEQ ID NO: 2156078 - RNA, 22 nt, Human
agagaggcagaagaacccuggc

SEQ ID NO: 2156079 - RNA, 15 nt, Human
agagaggcaauggcu

SEQ ID NO: 2156080 - RNA, 17 nt, Human
agacuauauuguacaca

SEQ ID NO: 2156081 - RNA, 16 nt, Human
agaccuuucaaagcca

SEQ ID NO: 2156082 - RNA, 19 nt, Human
agaccuuuuaacuccucaa

SEQ ID NO: 2156083 - RNA, 19 nt, Human
agaccuuucaaagccauuu

SEQ ID NO: 2156084 - RNA, 21 nt, Human
aggaugguaauucuuauucuu

SEQ ID NO: 2156085 - RNA, 18 nt, Human
aggagacaggcagagcug

SEQ ID NO: 2156086 - RNA, 13 nt, Human
aggagacaggcag

SEQ ID NO: 2156087 - RNA, 14 nt, Human
aggagacccacagg

SEQ ID NO: 2156088 - RNA, 23 nt, Human
aggaguucagggucauagcaugc

SEQ ID NO: 2156089 - RNA, 22 nt, Human
aggauggcaggacgugggcugg

SEQ ID NO: 2156090 - RNA, 15 nt, Human
aggauggcaggacgu

SEQ ID NO: 2156091 - RNA, 15 nt, Human
aggaguucugcucau

SEQ ID NO: 2156092 - RNA, 14 nt, Human
aggaguucugcuca

SEQ ID NO: 2156093 - RNA, 19 nt, Human
agggaucuauacuugcuuu

SEQ ID NO: 2156094 - RNA, 18 nt, Human
agggaucuauacuugcuu

SEQ ID NO: 2156095 - RNA, 13 nt, Human
aggggcaugggaa

SEQ ID NO: 2156096 - RNA, 19 nt, Human
agggcguggaaaggggcag

SEQ ID NO: 2156097 - RNA, 17 nt, Human
agggauuguuucuguuu

SEQ ID NO: 2156098 - RNA, 18 nt, Human
aggcucuguuuaugcuuu

SEQ ID NO: 2156099 - RNA, 16 nt, Human
aggcucuguuuaugcu

SEQ ID NO: 2156100 - RNA, 14 nt, Human
aggcuuacacccac

SEQ ID NO: 2156101 - RNA, 14 nt, Human
aggcuuaaacccau

SEQ ID NO: 2156102 - RNA, 22 nt, Human
agcuacaccuuucuccuuugua

SEQ ID NO: 2156103 - RNA, 21 nt, Human
agcuacaccuuucuccuuugu

SEQ ID NO: 2156104 - RNA, 15 nt, Human
agccuuucuuuugga

SEQ ID NO: 2156105 - RNA, 16 nt, Human
agcucuuggcuccacu

SEQ ID NO: 2156106 - RNA, 14 nt, Human
agcucuuugcacua

SEQ ID NO: 2156107 - RNA, 13 nt, Human
agcugacucacac

SEQ ID NO: 2156108 - RNA, 21 nt, Human
agcuggugguaucugaguuga

SEQ ID NO: 2156109 - RNA, 15 nt, Human
agcuguauuuugaaa

SEQ ID NO: 2156110 - RNA, 18 nt, Human
aggaagacccaacacaug

SEQ ID NO: 2156111 - RNA, 18 nt, Human
aggaacuugagaacuuua

SEQ ID NO: 2156112 - RNA, 21 nt, Human
aggaaaaaaaucguccaggga

SEQ ID NO: 2156113 - RNA, 22 nt, Human
aggaaaaaaaucguccagggag

SEQ ID NO: 2156114 - RNA, 18 nt, Human
acugaucaggaccuccaa

SEQ ID NO: 2156115 - RNA, 22 nt, Human
acugauuuccccuuuugcauuc

SEQ ID NO: 2156116 - RNA, 12 nt, Human
acugauuucccc

SEQ ID NO: 2156117 - RNA, 19 nt, Human
acugauuuccccuuuugca

SEQ ID NO: 2156118 - RNA, 17 nt, Human
acugauuuccccuuuug

SEQ ID NO: 2156119 - RNA, 23 nt, Human
acugauuuccccuuuugcauucu

SEQ ID NO: 2156120 - RNA, 21 nt, Human
acugauuuccccuuuugcauu

SEQ ID NO: 2156121 - RNA, 20 nt, Human
acugauuuccccuuuugcau

SEQ ID NO: 2156122 - RNA, 15 nt, Human
acuccggcccuccua

SEQ ID NO: 2156123 - RNA, 14 nt, Human
acuccggcccuccu

SEQ ID NO: 2156124 - RNA, 13 nt, Human
acuccggcccucc

SEQ ID NO: 2156125 - RNA, 23 nt, Human
acugcccagcggacaguggcagg

SEQ ID NO: 2156126 - RNA, 16 nt, Human
acugcccagcggacag

SEQ ID NO: 2156127 - RNA, 14 nt, Human
acugcccagcggac

SEQ ID NO: 2156128 - RNA, 16 nt, Human
acuucaaacugagauc

SEQ ID NO: 2156129 - RNA, 22 nt, Human
acuucuuggcuuggugaggaaa

SEQ ID NO: 2156130 - RNA, 14 nt, Human
accuguaaucccag

SEQ ID NO: 2156131 - RNA, 16 nt, Human
accuguaaucccagca

SEQ ID NO: 2156132 - RNA, 19 nt, Human
accuguaaucccagcacuu

SEQ ID NO: 2156133 - RNA, 16 nt, Human
acggacacccccucgc

SEQ ID NO: 2156134 - RNA, 15 nt, Human
acggacacccccucg

SEQ ID NO: 2156135 - RNA, 18 nt, Human
acgcaaacuuugagccuu

SEQ ID NO: 2156136 - RNA, 20 nt, Human
acccuguauauagcccagcc

SEQ ID NO: 2156137 - RNA, 18 nt, Human
acccuguauauagcccag

SEQ ID NO: 2156138 - RNA, 15 nt, Human
acccuguauauagcc

SEQ ID NO: 2156139 - RNA, 22 nt, Human
acccugggccuggcagcucagc

SEQ ID NO: 2156140 - RNA, 15 nt, Human
acccugggccuggca

SEQ ID NO: 2156141 - RNA, 12 nt, Human
acccugggaccu

SEQ ID NO: 2156142 - RNA, 23 nt, Human
acccugggaccuaggggcgccgc

SEQ ID NO: 2156143 - RNA, 16 nt, Human
acccuggccugagaag

SEQ ID NO: 2156144 - RNA, 19 nt, Human
acccuaaaaagcagagcuu

SEQ ID NO: 2156145 - RNA, 22 nt, Human
acccuaaggucauuaccacagg

SEQ ID NO: 2156146 - RNA, 21 nt, Human
acccuaauagacuaaaugaaa

SEQ ID NO: 2156147 - RNA, 17 nt, Human
accuccaagccacugag

SEQ ID NO: 2156148 - RNA, 13 nt, Human
acaggcagagcug

SEQ ID NO: 2156149 - RNA, 20 nt, Human
acaguggcaggacaggaaaa

SEQ ID NO: 2156150 - RNA, 18 nt, Human
acaguggcaggacaggaa

SEQ ID NO: 2156151 - RNA, 13 nt, Human
acaguggcaggac

SEQ ID NO: 2156152 - RNA, 12 nt, Human
acaguggcagga

SEQ ID NO: 2156153 - RNA, 23 nt, Human
acaugugguuacacagugugaau

SEQ ID NO: 2156154 - RNA, 18 nt, Human
acauccccccgccaaaag

SEQ ID NO: 2156155 - RNA, 18 nt, Human
acaugcacucagcucuug

SEQ ID NO: 2156156 - RNA, 17 nt, Human
acaugcacucagcucuu

SEQ ID NO: 2156157 - RNA, 14 nt, Human
aauucuaacuuuuu

SEQ ID NO: 2156158 - RNA, 14 nt, Human
aauuaucuaauuua

SEQ ID NO: 2156159 - RNA, 15 nt, Human
aauuaucuaauuuau

SEQ ID NO: 2156160 - RNA, 18 nt, Human
aauuaucuaauuuauaaa

SEQ ID NO: 2156161 - RNA, 19 nt, Human
aauuaucuaauuuauaaaa

SEQ ID NO: 2156162 - RNA, 19 nt, Human
acaaacaugugguuaaugc

SEQ ID NO: 2156163 - RNA, 14 nt, Human
acaaacauaagugc

SEQ ID NO: 2156164 - RNA, 16 nt, Human
acaaacaaacaaacaa

SEQ ID NO: 2156165 - RNA, 22 nt, Human
acaacauguauaauauuuuuaa

SEQ ID NO: 2156166 - RNA, 14 nt, Human
acaacauguauaau

SEQ ID NO: 2156167 - RNA, 18 nt, Human
acaaccacauacaacaca

SEQ ID NO: 2156168 - RNA, 22 nt, Human
acaaacucucugaaccccuccc

SEQ ID NO: 2156169 - RNA, 15 nt, Human
acaaacucucugaac

SEQ ID NO: 2156170 - RNA, 18 nt, Human
acaaguggcaaccugcuu

SEQ ID NO: 2156171 - RNA, 15 nt, Human
acacgcaggagcaca

SEQ ID NO: 2156172 - RNA, 14 nt, Human
acacgcaggagcac

SEQ ID NO: 2156173 - RNA, 13 nt, Human
acacgcaggagca

SEQ ID NO: 2156174 - RNA, 11 nt, Human
aauaaagcccu

SEQ ID NO: 2156175 - RNA, 15 nt, Human
aauaaagcccuggga

SEQ ID NO: 2156176 - RNA, 16 nt, Human
aaguugggacucugga

SEQ ID NO: 2156177 - RNA, 14 nt, Human
aaguggcauaaaaa

SEQ ID NO: 2156178 - RNA, 21 nt, Human
aagugcugcggagcaagagga

SEQ ID NO: 2156179 - RNA, 19 nt, Human
aagugcugcggagcaagag

SEQ ID NO: 2156180 - RNA, 13 nt, Human
aagugcugcggag

SEQ ID NO: 2156181 - RNA, 20 nt, Human
aaucugauauguauuguuug

SEQ ID NO: 2156182 - RNA, 22 nt, Human
aaugauggcccauucuacuugc

SEQ ID NO: 2156183 - RNA, 21 nt, Human
aaugauggcccauucuacuug

SEQ ID NO: 2156184 - RNA, 20 nt, Human
aaugauggcccauucuacuu

SEQ ID NO: 2156185 - RNA, 14 nt, Human
aaugauggcccauu

SEQ ID NO: 2156186 - RNA, 13 nt, Human
aaugauggcccau

SEQ ID NO: 2156187 - RNA, 19 nt, Human
aaugaugcuauuugcaauu

SEQ ID NO: 2156188 - RNA, 12 nt, Human
aaggcaacuggg

SEQ ID NO: 2156189 - RNA, 16 nt, Human
aagacagagcugggau

SEQ ID NO: 2156190 - RNA, 15 nt, Human
aagacagagcuggga

SEQ ID NO: 2156191 - RNA, 18 nt, Human
aagagaaaaagaaaugca

SEQ ID NO: 2156192 - RNA, 17 nt, Human
aagagaaaaagaaaugc

SEQ ID NO: 2156193 - RNA, 17 nt, Human
aagaacuucuauaauug

SEQ ID NO: 2156194 - RNA, 14 nt, Human
aagacacugaaaua

SEQ ID NO: 2156195 - RNA, 21 nt, Human
aagacacugaaauauacacac

SEQ ID NO: 2156196 - RNA, 22 nt, Human
aagacacugaaauauacacaca

SEQ ID NO: 2156197 - RNA, 23 nt, Human
aagacaauggcuuacuccaggag

SEQ ID NO: 2156198 - RNA, 23 nt, Human
aagaguguggagucauucucauu

SEQ ID NO: 2156199 - RNA, 22 nt, Human
aagaguguggagucauucucau

SEQ ID NO: 2156200 - RNA, 21 nt, Human
aagaguguggagucauucuca

SEQ ID NO: 2156201 - RNA, 15 nt, Human
aagaguccucugaau

SEQ ID NO: 2156202 - RNA, 14 nt, Human
aaaugcuuuagaaa

SEQ ID NO: 2156203 - RNA, 20 nt, Human
aaauagauggauuuguauca

SEQ ID NO: 2156204 - RNA, 17 nt, Human
aaauauuuugaucuuca

SEQ ID NO: 2156205 - RNA, 23 nt, Human
aaauauuuugaucuucaacaaau

SEQ ID NO: 2156206 - RNA, 22 nt, Human
aaauauuuugaucuucaacaaa

SEQ ID NO: 2156207 - RNA, 22 nt, Human
aacaugguaaacgcugucccua

SEQ ID NO: 2156208 - RNA, 18 nt, Human
aacagccacuacauuacu

SEQ ID NO: 2156209 - RNA, 15 nt, Human
aacaugaacaaauuu

SEQ ID NO: 2156210 - RNA, 16 nt, Human
aaagccauuuuaggcu

SEQ ID NO: 2156211 - RNA, 15 nt, Human
aaaaucuauauuuug

SEQ ID NO: 2156212 - RNA, 13 nt, Human
aaaacaggcagcu

SEQ ID NO: 2156213 - RNA, 12 nt, Human
aaaacagguaga

SEQ ID NO: 2156214 - RNA, 17 nt, Human
aaaacagguagaauuau

SEQ ID NO: 2156215 - RNA, 17 nt, Human
aaaacuuuuuauauuuu

SEQ ID NO: 2156216 - RNA, 20 nt, Human
aaaacuuuuuauauuuuaua

SEQ ID NO: 2156217 - RNA, 12 nt, Human
aaaagaaaugaa

SEQ ID NO: 2156218 - RNA, 17 nt, Human
aaaagaacaauauugac

SEQ ID NO: 2156219 - RNA, 13 nt, Human
aaaagacagggcu

SEQ ID NO: 2156220 - RNA, 22 nt, Human
aaaagucauaaaauguaucuuc

SEQ ID NO: 2156221 - RNA, 21 nt, Human
cauuuuucagaccuuuuaacu

SEQ ID NO: 2156222 - RNA, 23 nt, Human
cauuuuaggaaaaaaaaaagcau

SEQ ID NO: 2156223 - RNA, 18 nt, Human
cauuuguuuguuuuccuu

SEQ ID NO: 2156224 - RNA, 16 nt, Human
cauuuguuuguuuucc

SEQ ID NO: 2156225 - RNA, 19 nt, Human
cauuuuguaacaaaugaac

SEQ ID NO: 2156226 - RNA, 20 nt, Human
cauuugcuaacuagcuugga

SEQ ID NO: 2156227 - RNA, 15 nt, Human
cauuguauuagaucu

SEQ ID NO: 2156228 - RNA, 13 nt, Human
ccaacacgcagga

SEQ ID NO: 2156229 - RNA, 15 nt, Human
ccaagcaagacugag

SEQ ID NO: 2156230 - RNA, 12 nt, Human
ccaagccacuga

SEQ ID NO: 2156231 - RNA, 19 nt, Human
ccacagggcaccugccacc

SEQ ID NO: 2156232 - RNA, 11 nt, Human
ccacagggcac

SEQ ID NO: 2156233 - RNA, 15 nt, Human
ccacucaaaggccag

SEQ ID NO: 2156234 - RNA, 14 nt, Human
ccacucaaaggcca

SEQ ID NO: 2156235 - RNA, 17 nt, Human
ccagacagacaacacug

SEQ ID NO: 2156236 - RNA, 20 nt, Human
ccagaagaugaacagacuga

SEQ ID NO: 2156237 - RNA, 19 nt, Human
ccagaagaugaacagacug

SEQ ID NO: 2156238 - RNA, 23 nt, Human
ccagaagaugaacagacugaccu

SEQ ID NO: 2156239 - RNA, 22 nt, Human
ccagaagauagcuucaccccaa

SEQ ID NO: 2156240 - RNA, 18 nt, Human
ccagaagaugaacagacu

SEQ ID NO: 2156241 - RNA, 24 nt, Human
ccagaaacuguucccaccugcugg

SEQ ID NO: 2156242 - RNA, 12 nt, Human
ccagcugccucc

SEQ ID NO: 2156243 - RNA, 22 nt, Human
ccaguauaaaacaccuaaauaa

SEQ ID NO: 2156244 - RNA, 18 nt, Human
ccaggugcaaccagggag

SEQ ID NO: 2156245 - RNA, 21 nt, Human
ccaggugaguccuagagcuac

SEQ ID NO: 2156246 - RNA, 17 nt, Human
ccaggcuugccugcagg

SEQ ID NO: 2156247 - RNA, 18 nt, Human
ccaggcuugccugcaggc

SEQ ID NO: 2156248 - RNA, 12 nt, Human
ccaggcuuggaa

SEQ ID NO: 2156249 - RNA, 12 nt, Human
cccaaagaagga

SEQ ID NO: 2156250 - RNA, 14 nt, Human
ccaugccucagccc

SEQ ID NO: 2156251 - RNA, 12 nt, Human
ccaugccucagc

SEQ ID NO: 2156252 - RNA, 16 nt, Human
ccaugccucagcccug

SEQ ID NO: 2156253 - RNA, 15 nt, Human
ccaugccucagcccu

SEQ ID NO: 2156254 - RNA, 21 nt, Human
ccaugccucagcccugacccu

SEQ ID NO: 2156255 - RNA, 23 nt, Human
ccaugccucccccuagccauuuu

SEQ ID NO: 2156256 - RNA, 21 nt, Human
ccaugaagaggaugcugugaa

SEQ ID NO: 2156257 - RNA, 19 nt, Human
ccaugaagaggaugcugug

SEQ ID NO: 2156258 - RNA, 22 nt, Human
ccaucugguuaggauggcagga

SEQ ID NO: 2156259 - RNA, 21 nt, Human
cccaauucuuacaaacaugug

SEQ ID NO: 2156260 - RNA, 20 nt, Human
cccaaucccagcuaccucaa

SEQ ID NO: 2156261 - RNA, 19 nt, Human
cccaaucccagcuaccuca

SEQ ID NO: 2156262 - RNA, 18 nt, Human
cccaacacgcaggagcac

SEQ ID NO: 2156263 - RNA, 22 nt, Human
cccagcuaccucaaccaaugcc

SEQ ID NO: 2156264 - RNA, 14 nt, Human
cccagcuaccucaa

SEQ ID NO: 2156265 - RNA, 20 nt, Human
cccagcggacaguggcagga

SEQ ID NO: 2156266 - RNA, 18 nt, Human
cccagcggacaguggcag

SEQ ID NO: 2156267 - RNA, 23 nt, Human
cccagcggacaguggcaggacag

SEQ ID NO: 2156268 - RNA, 21 nt, Human
cccaggugcagccagaggcac

SEQ ID NO: 2156269 - RNA, 20 nt, Human
cccaggugcagccagaggca

SEQ ID NO: 2156270 - RNA, 15 nt, Human
cccaggugcagccag

SEQ ID NO: 2156271 - RNA, 23 nt, Human
cccaggcagggccaacccuucuc

SEQ ID NO: 2156272 - RNA, 15 nt, Human
cccaggcagggccaa

SEQ ID NO: 2156273 - RNA, 23 nt, Human
cccaggaguucugcucauucuaa

SEQ ID NO: 2156274 - RNA, 21 nt, Human
cccaggaguucugcucauucu

SEQ ID NO: 2156275 - RNA, 18 nt, Human
cccaggaguucugcucau

SEQ ID NO: 2156276 - RNA, 17 nt, Human
cccaggaguucugcuca

SEQ ID NO: 2156277 - RNA, 15 nt, Human
cccaggaguucugcu

SEQ ID NO: 2156278 - RNA, 14 nt, Human
cccaggaguucugc

SEQ ID NO: 2156279 - RNA, 24 nt, Human
cccauucuacuugcucuggaccug

SEQ ID NO: 2156280 - RNA, 23 nt, Human
cccauucuacuugcucuggaccu

SEQ ID NO: 2156281 - RNA, 22 nt, Human
cccauucuacuugcucuggacc

SEQ ID NO: 2156282 - RNA, 21 nt, Human
cccauucuacuugcucuggac

SEQ ID NO: 2156283 - RNA, 20 nt, Human
cccauucuacuugcucugga

SEQ ID NO: 2156284 - RNA, 19 nt, Human
cccauucuacuugcucugg

SEQ ID NO: 2156285 - RNA, 18 nt, Human
cccauucuacuugcucug

SEQ ID NO: 2156286 - RNA, 17 nt, Human
cccauucuacuugcucu

SEQ ID NO: 2156287 - RNA, 15 nt, Human
cccauucuacuugcu

SEQ ID NO: 2156288 - RNA, 14 nt, Human
cccauucuacuugc

SEQ ID NO: 2156289 - RNA, 13 nt, Human
cccauucuacuug

SEQ ID NO: 2156290 - RNA, 17 nt, Human
cggcugggcacacgccu

SEQ ID NO: 2156291 - RNA, 16 nt, Human
cggcugggcacacgcc

SEQ ID NO: 2156292 - RNA, 20 nt, Human
cggcugggcacacgccuccc

SEQ ID NO: 2156293 - RNA, 12 nt, Human
cggcugggcaca

SEQ ID NO: 2156294 - RNA, 23 nt, Human
cgggcaggggagggucagccagg

SEQ ID NO: 2156295 - RNA, 15 nt, Human
cggggagggugacag

SEQ ID NO: 2156296 - RNA, 22 nt, Human
cggggagggugacaguggccgc

SEQ ID NO: 2156297 - RNA, 14 nt, Human
cggacacccccucg

SEQ ID NO: 2156298 - RNA, 12 nt, Human
cggacacccccu

SEQ ID NO: 2156299 - RNA, 22 nt, Human
cgcucaccuuuguuuagaacac

SEQ ID NO: 2156300 - RNA, 21 nt, Human
cgauuucccugguuuuagucu

SEQ ID NO: 2156301 - RNA, 19 nt, Human
cgaucgcggcggagcuggc

SEQ ID NO: 2156302 - RNA, 17 nt, Human
cgagggcagcgggagcc

SEQ ID NO: 2156303 - RNA, 14 nt, Human
ccuuugauaaaugu

SEQ ID NO: 2156304 - RNA, 15 nt, Human
ccuuuggcagaguuc

SEQ ID NO: 2156305 - RNA, 14 nt, Human
ccuuucuccuuugu

SEQ ID NO: 2156306 - RNA, 15 nt, Human
ccuuucuccuuugua

SEQ ID NO: 2156307 - RNA, 19 nt, Human
cgcccccacccugagcgcc

SEQ ID NO: 2156308 - RNA, 12 nt, Human
cgcccccugccc

SEQ ID NO: 2156309 - RNA, 12 nt, Human
cgcccucccagg

SEQ ID NO: 2156310 - RNA, 13 nt, Human
cgcccucccaggc

SEQ ID NO: 2156311 - RNA, 21 nt, Human
cgcgucgcccucccaggcucu

SEQ ID NO: 2156312 - RNA, 16 nt, Human
cgucgcccucccaggc

SEQ ID NO: 2156313 - RNA, 15 nt, Human
cgucgcccucccagg

SEQ ID NO: 2156314 - RNA, 19 nt, Human
cgucauuacagggcacagg

SEQ ID NO: 2156315 - RNA, 11 nt, Human
cguccagggag

SEQ ID NO: 2156316 - RNA, 11 nt, Human
cgucaacaaau

SEQ ID NO: 2156317 - RNA, 20 nt, Human
cguaugaguuagaauaauaa

SEQ ID NO: 2156318 - RNA, 16 nt, Human
cgguggacccagacac

SEQ ID NO: 2156319 - RNA, 22 nt, Human
cggugcuguccucagguggcca

SEQ ID NO: 2156320 - RNA, 21 nt, Human
cggugcuguccucagguggcc

SEQ ID NO: 2156321 - RNA, 17 nt, Human
cggugcuguccucaggu

SEQ ID NO: 2156322 - RNA, 16 nt, Human
cggugcuguccucagg

SEQ ID NO: 2156323 - RNA, 13 nt, Human
cguucucccuggg

SEQ ID NO: 2156324 - RNA, 12 nt, Human
cguucucccugg

SEQ ID NO: 2156325 - RNA, 16 nt, Human
cguuuuguuuugugcc

SEQ ID NO: 2156326 - RNA, 20 nt, Human
cguuugaagacauugcacca

SEQ ID NO: 2156327 - RNA, 22 nt, Human
ccuucaguaacccccacuggac

SEQ ID NO: 2156328 - RNA, 16 nt, Human
ccuucaguaaccccca

SEQ ID NO: 2156329 - RNA, 22 nt, Human
ccuguccucccagcuccucacu

SEQ ID NO: 2156330 - RNA, 13 nt, Human
ccuguccucccag

SEQ ID NO: 2156331 - RNA, 16 nt, Human
ccugugccuccaucag

SEQ ID NO: 2156332 - RNA, 18 nt, Human
ccuguaggauuuuuuucu

SEQ ID NO: 2156333 - RNA, 18 nt, Human
ccugauuuagauaugcaa

SEQ ID NO: 2156334 - RNA, 21 nt, Human
ccugcuguaaauuuggcuucu

SEQ ID NO: 2156335 - RNA, 15 nt, Human
ccugcuuccauggcc

SEQ ID NO: 2156336 - RNA, 15 nt, Human
ccuggacuagaggga

SEQ ID NO: 2156337 - RNA, 22 nt, Human
ccuggacuagagggaccucucc

SEQ ID NO: 2156338 - RNA, 23 nt, Human
ccugggaggcgggcgcacugccu

SEQ ID NO: 2156339 - RNA, 19 nt, Human
ccccuagccauuuuuacug

SEQ ID NO: 2156340 - RNA, 14 nt, Human
ccccuagccauuuu

SEQ ID NO: 2156341 - RNA, 15 nt, Human
cccccgcauccccug

SEQ ID NO: 2156342 - RNA, 18 nt, Human
cccccgcauccccugccu

SEQ ID NO: 2156343 - RNA, 12 nt, Human
cccccgcccccu

SEQ ID NO: 2156344 - RNA, 16 nt, Human
cccccgcccccugccc

SEQ ID NO: 2156345 - RNA, 14 nt, Human
cccccgcccccugc

SEQ ID NO: 2156346 - RNA, 13 nt, Human
cccccgcccccug

SEQ ID NO: 2156347 - RNA, 13 nt, Human
ccccccuuccacu

SEQ ID NO: 2156348 - RNA, 12 nt, Human
ccccccuuccac

SEQ ID NO: 2156349 - RNA, 11 nt, Human
ccccccuucca

SEQ ID NO: 2156350 - RNA, 13 nt, Human
cccccugcccucc

SEQ ID NO: 2156351 - RNA, 13 nt, Human
cccccccuuccac

SEQ ID NO: 2156352 - RNA, 12 nt, Human
cccccccuucca

SEQ ID NO: 2156353 - RNA, 12 nt, Human
ccccacuggacu

SEQ ID NO: 2156354 - RNA, 20 nt, Human
ccccacuggacugaccuggu

SEQ ID NO: 2156355 - RNA, 19 nt, Human
ccccacuggacugaccugg

SEQ ID NO: 2156356 - RNA, 17 nt, Human
cccuuuugcauucuccc

SEQ ID NO: 2156357 - RNA, 21 nt, Human
ccuaaaccaaaaacugaaagu

SEQ ID NO: 2156358 - RNA, 22 nt, Human
ccucacacacagacucauauua

SEQ ID NO: 2156359 - RNA, 13 nt, Human
ccuagaggcccca

SEQ ID NO: 2156360 - RNA, 14 nt, Human
ccucuuuucucugc

SEQ ID NO: 2156361 - RNA, 17 nt, Human
ccugaacugaacaccau

SEQ ID NO: 2156362 - RNA, 13 nt, Human
ccugaaccuagga

SEQ ID NO: 2156363 - RNA, 24 nt, Human
ccucugguuugccgguggugcagg

SEQ ID NO: 2156364 - RNA, 16 nt, Human
ccucuggaaagcaaag

SEQ ID NO: 2156365 - RNA, 14 nt, Human
ccucugcuuugaaa

SEQ ID NO: 2156366 - RNA, 12 nt, Human
ccucucccaggg

SEQ ID NO: 2156367 - RNA, 12 nt, Human
ccucagguggcc

SEQ ID NO: 2156368 - RNA, 16 nt, Human
ccucagguggccaugc

SEQ ID NO: 2156369 - RNA, 15 nt, Human
ccucagguggccaug

SEQ ID NO: 2156370 - RNA, 21 nt, Human
ccucagguggccaugccucag

SEQ ID NO: 2156371 - RNA, 18 nt, Human
ccucagguggccaugccu

SEQ ID NO: 2156372 - RNA, 11 nt, Human
ccucagguggc

SEQ ID NO: 2156373 - RNA, 11 nt, Human
ccucagggcac

SEQ ID NO: 2156374 - RNA, 19 nt, Human
ccucaggccucugugccgc

SEQ ID NO: 2156375 - RNA, 14 nt, Human
ccucaggccucugu

SEQ ID NO: 2156376 - RNA, 16 nt, Human
ccuccccucucugcac

SEQ ID NO: 2156377 - RNA, 15 nt, Human
ccuccuggcccaggu

SEQ ID NO: 2156378 - RNA, 23 nt, Human
cugggcguaguggcucacaccug

SEQ ID NO: 2156379 - RNA, 13 nt, Human
cuggcuucucuga

SEQ ID NO: 2156380 - RNA, 17 nt, Human
cugggaggcgggcgcac

SEQ ID NO: 2156381 - RNA, 14 nt, Human
cugggaggccagug

SEQ ID NO: 2156382 - RNA, 23 nt, Human
cugggcacacgccucccacuggg

SEQ ID NO: 2156383 - RNA, 22 nt, Human
cugggcacacgccucccacugg

SEQ ID NO: 2156384 - RNA, 17 nt, Human
cugggcacacgccuccc

SEQ ID NO: 2156385 - RNA, 16 nt, Human
cugggcacacgccucc

SEQ ID NO: 2156386 - RNA, 20 nt, Human
cuggacuagagggaccucuc

SEQ ID NO: 2156387 - RNA, 21 nt, Human
cuggacuagagggaccucucc

SEQ ID NO: 2156388 - RNA, 23 nt, Human
cuggacuagagggaccucuccca

SEQ ID NO: 2156389 - RNA, 21 nt, Human
cuggagccaugggcacaaagg

SEQ ID NO: 2156390 - RNA, 15 nt, Human
cuggagccaugggca

SEQ ID NO: 2156391 - RNA, 19 nt, Human
cuggcaauguuuauuucau

SEQ ID NO: 2156392 - RNA, 17 nt, Human
cuggccucccacagacu

SEQ ID NO: 2156393 - RNA, 19 nt, Human
cuggccucccacagacuca

SEQ ID NO: 2156394 - RNA, 17 nt, Human
cuggccaacaugguaaa

SEQ ID NO: 2156395 - RNA, 20 nt, Human
cugcccuccccucucugcac

SEQ ID NO: 2156396 - RNA, 14 nt, Human
cugcccuccccucu

SEQ ID NO: 2156397 - RNA, 10 nt, Human
cugcccuccc

SEQ ID NO: 2156398 - RNA, 16 nt, Human
cugcaggggcauggga

SEQ ID NO: 2156399 - RNA, 19 nt, Human
cugcagggccgccagggag

SEQ ID NO: 2156400 - RNA, 18 nt, Human
cugcagggccgccaggga

SEQ ID NO: 2156401 - RNA, 17 nt, Human
cugccucaggccucugu

SEQ ID NO: 2156402 - RNA, 16 nt, Human
cugccucaggccucug

SEQ ID NO: 2156403 - RNA, 15 nt, Human
cugccucaggccucu

SEQ ID NO: 2156404 - RNA, 24 nt, Human
cugcucucuuuuucuccaggguca

SEQ ID NO: 2156405 - RNA, 20 nt, Human
cugcucucuuuuucuccagg

SEQ ID NO: 2156406 - RNA, 21 nt, Human
cugcuccccucugcacggacc

SEQ ID NO: 2156407 - RNA, 18 nt, Human
cugcaccauuuaaaaaca

SEQ ID NO: 2156408 - RNA, 22 nt, Human
cugaguggcuucacuccugcug

SEQ ID NO: 2156409 - RNA, 21 nt, Human
cugaguggcuucacuccugcu

SEQ ID NO: 2156410 - RNA, 19 nt, Human
cugaguggcuucacuccug

SEQ ID NO: 2156411 - RNA, 16 nt, Human
cugaguggcuucacuc

SEQ ID NO: 2156412 - RNA, 23 nt, Human
cugaguggcuucacuccugcugu

SEQ ID NO: 2156413 - RNA, 15 nt, Human
cugaguggcuucacu

SEQ ID NO: 2156414 - RNA, 13 nt, Human
cugaguggcuuca

SEQ ID NO: 2156415 - RNA, 22 nt, Human
cugauguuccuuuggaagaaaa

SEQ ID NO: 2156416 - RNA, 21 nt, Human
cuccucuuguaaauaaagccc

SEQ ID NO: 2156417 - RNA, 20 nt, Human
cuccucuuguaaauaaagcc

SEQ ID NO: 2156418 - RNA, 14 nt, Human
cuccucuuguaaau

SEQ ID NO: 2156419 - RNA, 13 nt, Human
cuccucuuguaaa

SEQ ID NO: 2156420 - RNA, 12 nt, Human
cuccucuuguaa

SEQ ID NO: 2156421 - RNA, 17 nt, Human
cuccucacucaccuuca

SEQ ID NO: 2156422 - RNA, 23 nt, Human
cucccaggugcagccagaggcac

SEQ ID NO: 2156423 - RNA, 12 nt, Human
cucgaauuuugu

SEQ ID NO: 2156424 - RNA, 23 nt, Human
cucgacguuuacaagcccccccu

SEQ ID NO: 2156425 - RNA, 14 nt, Human
cucgcauugacaca

SEQ ID NO: 2156426 - RNA, 22 nt, Human
cucgcuuggacggcugggcaca

SEQ ID NO: 2156427 - RNA, 21 nt, Human
cucuaacaauguauuuucuuc

SEQ ID NO: 2156428 - RNA, 12 nt, Human
cuaaaagcacac

SEQ ID NO: 2156429 - RNA, 13 nt, Human
cucauccugcagg

SEQ ID NO: 2156430 - RNA, 14 nt, Human
cucauccugcaggc

SEQ ID NO: 2156431 - RNA, 17 nt, Human
cucaucgccagacaacu

SEQ ID NO: 2156432 - RNA, 17 nt, Human
cucauugaauuauaaaa

SEQ ID NO: 2156433 - RNA, 11 nt, Human
cucauuuacug

SEQ ID NO: 2156434 - RNA, 20 nt, Human
cucauuuaaaguauuuuauu

SEQ ID NO: 2156435 - RNA, 19 nt, Human
cucauuuaaaguauuuuau

SEQ ID NO: 2156436 - RNA, 14 nt, Human
cucauuuaaaguau

SEQ ID NO: 2156437 - RNA, 11 nt, Human
cucucccaggg

SEQ ID NO: 2156438 - RNA, 18 nt, Human
cucucaucgccagacaac

SEQ ID NO: 2156439 - RNA, 18 nt, Human
cucucugcaccguacugu

SEQ ID NO: 2156440 - RNA, 12 nt, Human
cucuggacugug

SEQ ID NO: 2156441 - RNA, 14 nt, Human
cucuggaccugccc

SEQ ID NO: 2156442 - RNA, 21 nt, Human
cucuggaccugcccccgcauc

SEQ ID NO: 2156443 - RNA, 13 nt, Human
cucuggaccugcc

SEQ ID NO: 2156444 - RNA, 12 nt, Human
cucuggaccugc

SEQ ID NO: 2156445 - RNA, 13 nt, Human
cucuggaaagcaa

SEQ ID NO: 2156446 - RNA, 14 nt, Human
cucuuggcuccacu

SEQ ID NO: 2156447 - RNA, 19 nt, Human
cucuuggaggugucuguau

SEQ ID NO: 2156448 - RNA, 14 nt, Human
cucuuguaaauaaa

SEQ ID NO: 2156449 - RNA, 12 nt, Human
cucuuguaaaua

SEQ ID NO: 2156450 - RNA, 20 nt, Human
cucuugaagacacugaaaua

SEQ ID NO: 2156451 - RNA, 21 nt, Human
cucuugaagacacugaaauau

SEQ ID NO: 2156452 - RNA, 24 nt, Human
cucuuguaaauaaagcccugggau

SEQ ID NO: 2156453 - RNA, 23 nt, Human
cucuuguaaauaaagcccuggga

SEQ ID NO: 2156454 - RNA, 20 nt, Human
cucuuguaaauaaagcccug

SEQ ID NO: 2156455 - RNA, 19 nt, Human
cucuuguaaauaaagcccu

SEQ ID NO: 2156456 - RNA, 18 nt, Human
cucuuguaaauaaagccc

SEQ ID NO: 2156457 - RNA, 17 nt, Human
cucuuguaaauaaagcc

SEQ ID NO: 2156458 - RNA, 19 nt, Human
cucuucagguuguaaaaaa

SEQ ID NO: 2156459 - RNA, 22 nt, Human
cugaaugaaccuucuggccucc

SEQ ID NO: 2156460 - RNA, 14 nt, Human
cuuacuccaggaga

SEQ ID NO: 2156461 - RNA, 17 nt, Human
cuuacggcccuggccuu

SEQ ID NO: 2156462 - RNA, 16 nt, Human
cuuacggcccuggccu

SEQ ID NO: 2156463 - RNA, 15 nt, Human
cuuacggcccuggcc

SEQ ID NO: 2156464 - RNA, 20 nt, Human
cuuauuuaaguaacuuuaaa

SEQ ID NO: 2156465 - RNA, 16 nt, Human
cuuaucuccaagacca

SEQ ID NO: 2156466 - RNA, 13 nt, Human
cuuaucuccaaga

SEQ ID NO: 2156467 - RNA, 14 nt, Human
cuuaucuccaagac

SEQ ID NO: 2156468 - RNA, 19 nt, Human
cuuaucaagaguugugaca

SEQ ID NO: 2156469 - RNA, 22 nt, Human
cuuaggugugauuauaaaauca

SEQ ID NO: 2156470 - RNA, 19 nt, Human
cuuaauauucuggagucau

SEQ ID NO: 2156471 - RNA, 14 nt, Human
cuuaauauucugga

SEQ ID NO: 2156472 - RNA, 14 nt, Human
cuguuuuguaaagu

SEQ ID NO: 2156473 - RNA, 17 nt, Human
cuguuuuguaaaguccc

SEQ ID NO: 2156474 - RNA, 16 nt, Human
cuguuuuguaaagucc

SEQ ID NO: 2156475 - RNA, 21 nt, Human
cuguuuuguaaaguccccaga

SEQ ID NO: 2156476 - RNA, 15 nt, Human
cuguuuaugcuuuug

SEQ ID NO: 2156477 - RNA, 13 nt, Human
cuuccagcccaga

SEQ ID NO: 2156478 - RNA, 17 nt, Human
cuucgacagcauuuucc

SEQ ID NO: 2156479 - RNA, 15 nt, Human
cuucgacagcauuuu

SEQ ID NO: 2156480 - RNA, 14 nt, Human
cuucgacagcauuu

SEQ ID NO: 2156481 - RNA, 15 nt, Human
cuuccuuuugaggga

SEQ ID NO: 2156482 - RNA, 17 nt, Human
cuuccuugcuuaaggua

SEQ ID NO: 2156483 - RNA, 21 nt, Human
cuucgacagcauuuuccucug

SEQ ID NO: 2156484 - RNA, 12 nt, Human
cuucucagccac

SEQ ID NO: 2156485 - RNA, 19 nt, Human
cuucgggcuggccaucugg

SEQ ID NO: 2156486 - RNA, 20 nt, Human
cuuugaaagccccagaaauc

SEQ ID NO: 2156487 - RNA, 19 nt, Human
cuuugaaagccccagaaau

SEQ ID NO: 2156488 - RNA, 14 nt, Human
cuuuggcagaguuc

SEQ ID NO: 2156489 - RNA, 16 nt, Human
cuuugccaagaccuuu

SEQ ID NO: 2156490 - RNA, 20 nt, Human
cuuugccaagaccuuucaaa

SEQ ID NO: 2156491 - RNA, 17 nt, Human
cuuugccaagaccuuuc

SEQ ID NO: 2156492 - RNA, 22 nt, Human
gaaaacgcucucuacucugcuu

SEQ ID NO: 2156493 - RNA, 13 nt, Human
gaaaaccucuccu

SEQ ID NO: 2156494 - RNA, 13 nt, Human
cuuuuuaaaaaua

SEQ ID NO: 2156495 - RNA, 18 nt, Human
cuuuugaacccaggaguu

SEQ ID NO: 2156496 - RNA, 20 nt, Human
cuuuugaacccaggaguuca

SEQ ID NO: 2156497 - RNA, 22 nt, Human
cuuuuugauuacaguguagcuu

SEQ ID NO: 2156498 - RNA, 13 nt, Human
cuuuugaacccag

SEQ ID NO: 2156499 - RNA, 14 nt, Human
cuuuugaacccagg

SEQ ID NO: 2156500 - RNA, 15 nt, Human
cuugagaaaaaaaga

SEQ ID NO: 2156501 - RNA, 22 nt, Human
cuugagaaaaaaagaauaguug

SEQ ID NO: 2156502 - RNA, 16 nt, Human
cuugagaaaaaaagaa

SEQ ID NO: 2156503 - RNA, 19 nt, Human
cuugagaacuuuauuucca

SEQ ID NO: 2156504 - RNA, 21 nt, Human
cuugagaagauucuucccauu

SEQ ID NO: 2156505 - RNA, 17 nt, Human
cuugagaagauucuucc

SEQ ID NO: 2156506 - RNA, 16 nt, Human
cuucuggccucccaca

SEQ ID NO: 2156507 - RNA, 19 nt, Human
cuucuggccucccacagac

SEQ ID NO: 2156508 - RNA, 15 nt, Human
cuucuggccucccac

SEQ ID NO: 2156509 - RNA, 14 nt, Human
cuucuggccuccca

SEQ ID NO: 2156510 - RNA, 18 nt, Human
cuugcucuggaccugccc

SEQ ID NO: 2156511 - RNA, 17 nt, Human
cuugcucuggaccugcc

SEQ ID NO: 2156512 - RNA, 16 nt, Human
cuugcucuggaccugc

SEQ ID NO: 2156513 - RNA, 15 nt, Human
cuugcucuggaccug

SEQ ID NO: 2156514 - RNA, 14 nt, Human
cuugcucuggaccu

SEQ ID NO: 2156515 - RNA, 13 nt, Human
cuugcucuggacc

SEQ ID NO: 2156516 - RNA, 12 nt, Human
cuuguagccuuu

SEQ ID NO: 2156517 - RNA, 16 nt, Human
cuuguagccuuuugac

SEQ ID NO: 2156518 - RNA, 14 nt, Human
cuuguagccuuuug

SEQ ID NO: 2156519 - RNA, 17 nt, Human
cuuguagccuuuugacu

SEQ ID NO: 2156520 - RNA, 22 nt, Human
cuuguguuuuuaacucaauauu

SEQ ID NO: 2156521 - RNA, 17 nt, Human
cuuguuaaugcuuucug

SEQ ID NO: 2156522 - RNA, 18 nt, Human
cuuguuaaugcuuucuga

SEQ ID NO: 2156523 - RNA, 14 nt, Human
cuugggcccucugg

SEQ ID NO: 2156524 - RNA, 15 nt, Human
cuugggcccucuggu

SEQ ID NO: 2156525 - RNA, 13 nt, Human
gacaucagcuggu

SEQ ID NO: 2156526 - RNA, 16 nt, Human
gaccaaggagaugaag

SEQ ID NO: 2156527 - RNA, 13 nt, Human
gaccagcaaauac

SEQ ID NO: 2156528 - RNA, 17 nt, Human
gacccagacacaucgca

SEQ ID NO: 2156529 - RNA, 18 nt, Human
gacccccgcccccugccc

SEQ ID NO: 2156530 - RNA, 16 nt, Human
gacccccgcccccugc

SEQ ID NO: 2156531 - RNA, 15 nt, Human
gacccccgcccccug

SEQ ID NO: 2156532 - RNA, 11 nt, Human
gacccccgccc

SEQ ID NO: 2156533 - RNA, 19 nt, Human
gacccccgcccccugcccu

SEQ ID NO: 2156534 - RNA, 23 nt, Human
gacagacucacaaccugaaccua

SEQ ID NO: 2156535 - RNA, 15 nt, Human
gacugaccuggucca

SEQ ID NO: 2156536 - RNA, 23 nt, Human
gacugaccugguccacagggcac

SEQ ID NO: 2156537 - RNA, 22 nt, Human
gacugaccugguccacagggca

SEQ ID NO: 2156538 - RNA, 20 nt, Human
gacugaccugguccacaggg

SEQ ID NO: 2156539 - RNA, 19 nt, Human
gacugaccugguccacagg

SEQ ID NO: 2156540 - RNA, 19 nt, Human
gacugaccuugaugagcug

SEQ ID NO: 2156541 - RNA, 15 nt, Human
gacugaucaggaccu

SEQ ID NO: 2156542 - RNA, 16 nt, Human
gaccugucuccuggcg

SEQ ID NO: 2156543 - RNA, 15 nt, Human
gaccugucuccuggc

SEQ ID NO: 2156544 - RNA, 19 nt, Human
gaccugguccacagggcac

SEQ ID NO: 2156545 - RNA, 18 nt, Human
gaccugguccacagggca

SEQ ID NO: 2156546 - RNA, 17 nt, Human
gaccugguccacagggc

SEQ ID NO: 2156547 - RNA, 15 nt, Human
gaccuucuaggaagc

SEQ ID NO: 2156548 - RNA, 12 nt, Human
gacggcuccacu

SEQ ID NO: 2156549 - RNA, 18 nt, Human
gacggcugggcacacgcc

SEQ ID NO: 2156550 - RNA, 13 nt, Human
gacggcugggcac

SEQ ID NO: 2156551 - RNA, 12 nt, Human
gacggcugggca

SEQ ID NO: 2156552 - RNA, 18 nt, Human
gacggcuccacuaggacu

SEQ ID NO: 2156553 - RNA, 12 nt, Human
gacuaaaugaaa

SEQ ID NO: 2156554 - RNA, 18 nt, Human
gacuaacuaucaaauaga

SEQ ID NO: 2156555 - RNA, 18 nt, Human
gacguuuacaagcccccc

SEQ ID NO: 2156556 - RNA, 20 nt, Human
gacgugggcugggcccacaa

SEQ ID NO: 2156557 - RNA, 13 nt, Human
gacgugggcuggg

SEQ ID NO: 2156558 - RNA, 21 nt, Human
gaacgauauguagcagaaagg

SEQ ID NO: 2156559 - RNA, 18 nt, Human
gaacgauauguagcagaa

SEQ ID NO: 2156560 - RNA, 18 nt, Human
gaaccuauuucucuuucu

SEQ ID NO: 2156561 - RNA, 21 nt, Human
gaaccuauuucucuuucuuua

SEQ ID NO: 2156562 - RNA, 17 nt, Human
gaaccuauuucucuuuc

SEQ ID NO: 2156563 - RNA, 16 nt, Human
gaaccuauuucucuuu

SEQ ID NO: 2156564 - RNA, 22 nt, Human
gaacauaaagcaaauagacaca

SEQ ID NO: 2156565 - RNA, 15 nt, Human
gaacauaaagcaaau

SEQ ID NO: 2156566 - RNA, 19 nt, Human
gaagaaaaaaggccuugaa

SEQ ID NO: 2156567 - RNA, 21 nt, Human
gaagagaguccauauuucaau

SEQ ID NO: 2156568 - RNA, 13 nt, Human
gaagagccacagu

SEQ ID NO: 2156569 - RNA, 12 nt, Human
gaagagccacag

SEQ ID NO: 2156570 - RNA, 12 nt, Human
gaaguaugggaa

SEQ ID NO: 2156571 - RNA, 16 nt, Human
gaauaauaaauauuua

SEQ ID NO: 2156572 - RNA, 11 nt, Human
gaauaauaaau

SEQ ID NO: 2156573 - RNA, 21 nt, Human
gaauauuuucauuaaaagcua

SEQ ID NO: 2156574 - RNA, 20 nt, Human
gaauauuuucauuaaaagcu

SEQ ID NO: 2156575 - RNA, 19 nt, Human
gaauauuugguuuuccugu

SEQ ID NO: 2156576 - RNA, 13 nt, Human
gaauaccuguggu

SEQ ID NO: 2156577 - RNA, 14 nt, Human
gaauugagcugcag

SEQ ID NO: 2156578 - RNA, 16 nt, Human
gaauugagcugcagaa

SEQ ID NO: 2156579 - RNA, 15 nt, Human
gaaugaaccuucugg

SEQ ID NO: 2156580 - RNA, 17 nt, Human
gaaugaaccuucuggcc

SEQ ID NO: 2156581 - RNA, 13 nt, Human
gauauaaauaaaa

SEQ ID NO: 2156582 - RNA, 23 nt, Human
gauaguggggagacuucuuggcu

SEQ ID NO: 2156583 - RNA, 15 nt, Human
gauauaaauaaaaca

SEQ ID NO: 2156584 - RNA, 18 nt, Human
gaguucgagaccagccug

SEQ ID NO: 2156585 - RNA, 21 nt, Human
gaguucugcucauucuaauga

SEQ ID NO: 2156586 - RNA, 20 nt, Human
gaguucugcucauucuaaug

SEQ ID NO: 2156587 - RNA, 16 nt, Human
gaguucugcucauucu

SEQ ID NO: 2156588 - RNA, 18 nt, Human
gaugacaacuacagaaaa

SEQ ID NO: 2156589 - RNA, 13 nt, Human
gaugaacagacug

SEQ ID NO: 2156590 - RNA, 15 nt, Human
gauuaauuccuuucc

SEQ ID NO: 2156591 - RNA, 18 nt, Human
gauuaauauggggaugca

SEQ ID NO: 2156592 - RNA, 23 nt, Human
gauguucuacuuuguucugcugu

SEQ ID NO: 2156593 - RNA, 21 nt, Human
gauguucuacuuuguucugcu

SEQ ID NO: 2156594 - RNA, 16 nt, Human
gauuuaaacaaacaaa

SEQ ID NO: 2156595 - RNA, 23 nt, Human
gcaaaugcuaaugucaaacuuga

SEQ ID NO: 2156596 - RNA, 21 nt, Human
gcaaagacuauucccuucuaa

SEQ ID NO: 2156597 - RNA, 22 nt, Human
gcaaagacuauucccuucuaac

SEQ ID NO: 2156598 - RNA, 22 nt, Human
gcaaagugaaguugcuucuucu

SEQ ID NO: 2156599 - RNA, 15 nt, Human
gcaaacccagacggc

SEQ ID NO: 2156600 - RNA, 13 nt, Human
gcagaugcaauga

SEQ ID NO: 2156601 - RNA, 19 nt, Human
gcagaugcaaugacucagg

SEQ ID NO: 2156602 - RNA, 20 nt, Human
gcagaugcuagcacaugccc

SEQ ID NO: 2156603 - RNA, 17 nt, Human
gcagauggaaaggagcc

SEQ ID NO: 2156604 - RNA, 20 nt, Human
gcaggagcacacccagcccc

SEQ ID NO: 2156605 - RNA, 17 nt, Human
gcaggagcacacccagc

SEQ ID NO: 2156606 - RNA, 16 nt, Human
gcaggagcacacccag

SEQ ID NO: 2156607 - RNA, 20 nt, Human
gcagcagguggcagaauggg

SEQ ID NO: 2156608 - RNA, 15 nt, Human
gcacuaagauauuuc

SEQ ID NO: 2156609 - RNA, 17 nt, Human
gcacccacccugggacc

SEQ ID NO: 2156610 - RNA, 14 nt, Human
gcacccacccuggg

SEQ ID NO: 2156611 - RNA, 13 nt, Human
gcacccacccugg

SEQ ID NO: 2156612 - RNA, 23 nt, Human
gcauauauuggguuccauucuca

SEQ ID NO: 2156613 - RNA, 14 nt, Human
gccaaaagcugcuc

SEQ ID NO: 2156614 - RNA, 15 nt, Human
gccaaaagcugcuca

SEQ ID NO: 2156615 - RNA, 23 nt, Human
gcauuuuguauuugucuaacugg

SEQ ID NO: 2156616 - RNA, 14 nt, Human
gcauuuuguauuug

SEQ ID NO: 2156617 - RNA, 16 nt, Human
gcauuuucuaaacaga

SEQ ID NO: 2156618 - RNA, 21 nt, Human
gcauuuuccucugcuuugaaa

SEQ ID NO: 2156619 - RNA, 18 nt, Human
gcauuuuccucugcuuug

SEQ ID NO: 2156620 - RNA, 15 nt, Human
gcauuuuccucugcu

SEQ ID NO: 2156621 - RNA, 13 nt, Human
gcauuuuccucug

SEQ ID NO: 2156622 - RNA, 20 nt, Human
gcauuuuccuccaucgcagu

SEQ ID NO: 2156623 - RNA, 23 nt, Human
gcccacaaaggcaaaggguccag

SEQ ID NO: 2156624 - RNA, 23 nt, Human
gccauggauggaaaacgcucucu

SEQ ID NO: 2156625 - RNA, 13 nt, Human
gccagggccugcg

SEQ ID NO: 2156626 - RNA, 14 nt, Human
gccagggccugcga

SEQ ID NO: 2156627 - RNA, 16 nt, Human
gccagggccugcgagg

SEQ ID NO: 2156628 - RNA, 18 nt, Human
gccaggugcaaccaggga

SEQ ID NO: 2156629 - RNA, 20 nt, Human
gccagucuugacgaguguga

SEQ ID NO: 2156630 - RNA, 13 nt, Human
gccagcugccucc

SEQ ID NO: 2156631 - RNA, 19 nt, Human
gccagcgggaauggcagcu

SEQ ID NO: 2156632 - RNA, 22 nt, Human
gccagagcuacccgcagaguuc

SEQ ID NO: 2156633 - RNA, 18 nt, Human
gcccgcggggacauuggg

SEQ ID NO: 2156634 - RNA, 24 nt, Human
gcccuccuacccugcgcccagucc

SEQ ID NO: 2156635 - RNA, 19 nt, Human
gcccuccuacccugcgccc

SEQ ID NO: 2156636 - RNA, 19 nt, Human
gcccuccccucucugcacc

SEQ ID NO: 2156637 - RNA, 18 nt, Human
gcccuccccucucugcac

SEQ ID NO: 2156638 - RNA, 15 nt, Human
gcccuccccucucug

SEQ ID NO: 2156639 - RNA, 13 nt, Human
gccccgccgccug

SEQ ID NO: 2156640 - RNA, 20 nt, Human
gccccauucuuuuguaauuu

SEQ ID NO: 2156641 - RNA, 21 nt, Human
gccccaggcagggccaacccu

SEQ ID NO: 2156642 - RNA, 21 nt, Human
gcccaggugaguccuagagcu

SEQ ID NO: 2156643 - RNA, 13 nt, Human
gccgggcagaggg

SEQ ID NO: 2156644 - RNA, 22 nt, Human
gccgcaaaccacacuggacucc

SEQ ID NO: 2156645 - RNA, 21 nt, Human
gccgcaaaccacacuggacuc

SEQ ID NO: 2156646 - RNA, 19 nt, Human
gccgcaaaccacacuggac

SEQ ID NO: 2156647 - RNA, 17 nt, Human
gccgcaaaccacacugg

SEQ ID NO: 2156648 - RNA, 16 nt, Human
gccgcaaaccacacug

SEQ ID NO: 2156649 - RNA, 19 nt, Human
gccguugauucacuucacg

SEQ ID NO: 2156650 - RNA, 16 nt, Human
gccucccugccucagg

SEQ ID NO: 2156651 - RNA, 14 nt, Human
gccucccugccuca

SEQ ID NO: 2156652 - RNA, 17 nt, Human
gccucccugccucaggc

SEQ ID NO: 2156653 - RNA, 21 nt, Human
gccucccccuagccauuuuua

SEQ ID NO: 2156654 - RNA, 18 nt, Human
gccucccccuagccauuu

SEQ ID NO: 2156655 - RNA, 22 nt, Human
gccucagcccugacccugugga

SEQ ID NO: 2156656 - RNA, 17 nt, Human
gccucagcccugacccu

SEQ ID NO: 2156657 - RNA, 18 nt, Human
gccugaagaguccucuga

SEQ ID NO: 2156658 - RNA, 20 nt, Human
gccugaagaguccucugaau

SEQ ID NO: 2156659 - RNA, 15 nt, Human
gcggacaguggcagg

SEQ ID NO: 2156660 - RNA, 14 nt, Human
gcggacaguggcag

SEQ ID NO: 2156661 - RNA, 16 nt, Human
gcggacaucagcuggu

SEQ ID NO: 2156662 - RNA, 19 nt, Human
gcggacaguggcaggacag

SEQ ID NO: 2156663 - RNA, 16 nt, Human
gcggacaguggcagga

SEQ ID NO: 2156664 - RNA, 19 nt, Human
gcgcccaguccuuccaccu

SEQ ID NO: 2156665 - RNA, 17 nt, Human
gcgcccaguccuuccac

SEQ ID NO: 2156666 - RNA, 21 nt, Human
gcuaacuagcuuggaaacugg

SEQ ID NO: 2156667 - RNA, 20 nt, Human
gcuacaccuuucuccuuugu

SEQ ID NO: 2156668 - RNA, 15 nt, Human
gcuacaccuuucucc

SEQ ID NO: 2156669 - RNA, 13 nt, Human
gcuacaccuuucu

SEQ ID NO: 2156670 - RNA, 16 nt, Human
gcgucgcccucccagg

SEQ ID NO: 2156671 - RNA, 14 nt, Human
gccuguaaucccag

SEQ ID NO: 2156672 - RNA, 14 nt, Human
gccugguuuagccu

SEQ ID NO: 2156673 - RNA, 16 nt, Human
gccuuuuauuucuuaa

SEQ ID NO: 2156674 - RNA, 12 nt, Human
gccuuuucuauu

SEQ ID NO: 2156675 - RNA, 16 nt, Human
gccuuuugacuuucau

SEQ ID NO: 2156676 - RNA, 17 nt, Human
gccuugggcccucuggu

SEQ ID NO: 2156677 - RNA, 12 nt, Human
ggugacaguggc

SEQ ID NO: 2156678 - RNA, 10 nt, Human
gguggccaug

SEQ ID NO: 2156679 - RNA, 20 nt, Human
gguggccaugccucagcccu

SEQ ID NO: 2156680 - RNA, 17 nt, Human
gguggccaugccucagc

SEQ ID NO: 2156681 - RNA, 21 nt, Human
ggugagagggccgggcagagg

SEQ ID NO: 2156682 - RNA, 20 nt, Human
ggugagagggccgggcagag

SEQ ID NO: 2156683 - RNA, 21 nt, Human
gguggugcagguagaccuguc

SEQ ID NO: 2156684 - RNA, 15 nt, Human
ggucagaaacaggac

SEQ ID NO: 2156685 - RNA, 17 nt, Human
ggucagaaacaggaccg

SEQ ID NO: 2156686 - RNA, 16 nt, Human
ggucagaaacaggacc

SEQ ID NO: 2156687 - RNA, 18 nt, Human
ggucagaaacaggaccgg

SEQ ID NO: 2156688 - RNA, 11 nt, Human
gguagaacaca

SEQ ID NO: 2156689 - RNA, 20 nt, Human
gguaccaguugaaauuuuug

SEQ ID NO: 2156690 - RNA, 15 nt, Human
gggugaaggcuggca

SEQ ID NO: 2156691 - RNA, 14 nt, Human
gggugaaggcuggc

SEQ ID NO: 2156692 - RNA, 13 nt, Human
gggugaaggcugg

SEQ ID NO: 2156693 - RNA, 12 nt, Human
gggugaaggcug

SEQ ID NO: 2156694 - RNA, 20 nt, Human
ggguucaccugggcugaggc

SEQ ID NO: 2156695 - RNA, 21 nt, Human
ggguuggagcaguagcuggag

SEQ ID NO: 2156696 - RNA, 14 nt, Human
ggggagggugacag

SEQ ID NO: 2156697 - RNA, 16 nt, Human
gggcacaaagggccca

SEQ ID NO: 2156698 - RNA, 17 nt, Human
gggcacaaagggcccag

SEQ ID NO: 2156699 - RNA, 15 nt, Human
gggcacaaagggccc

SEQ ID NO: 2156700 - RNA, 20 nt, Human
gggaugacaugcacucagcu

SEQ ID NO: 2156701 - RNA, 18 nt, Human
gggacugaaaaccucucc

SEQ ID NO: 2156702 - RNA, 19 nt, Human
gggacugaaaaccucuccu

SEQ ID NO: 2156703 - RNA, 19 nt, Human
gggaguggggaagugaucu

SEQ ID NO: 2156704 - RNA, 18 nt, Human
gggaguguacucccaggg

SEQ ID NO: 2156705 - RNA, 17 nt, Human
gggaguguacucccagg

SEQ ID NO: 2156706 - RNA, 16 nt, Human
gggcacaggccaugga

SEQ ID NO: 2156707 - RNA, 14 nt, Human
gggcacaggccaug

SEQ ID NO: 2156708 - RNA, 15 nt, Human
gggcacacgccuccc

SEQ ID NO: 2156709 - RNA, 19 nt, Human
gggcacacgccucccacug

SEQ ID NO: 2156710 - RNA, 12 nt, Human
gggcaccugcca

SEQ ID NO: 2156711 - RNA, 12 nt, Human
gggcacccaccc

SEQ ID NO: 2156712 - RNA, 23 nt, Human
gggcaggggagggucagccaggg

SEQ ID NO: 2156713 - RNA, 13 nt, Human
ggcuuacacccac

SEQ ID NO: 2156714 - RNA, 17 nt, Human
ggcuuacggcccuggcc

SEQ ID NO: 2156715 - RNA, 16 nt, Human
ggcuuacggcccuggc

SEQ ID NO: 2156716 - RNA, 23 nt, Human
ggcuuaaacccauauuguaaaac

SEQ ID NO: 2156717 - RNA, 22 nt, Human
gggaauggcacagcccaaagaa

SEQ ID NO: 2156718 - RNA, 16 nt, Human
gggaauggcacagccc

SEQ ID NO: 2156719 - RNA, 18 nt, Human
gggaaggggacccccgcc

SEQ ID NO: 2156720 - RNA, 15 nt, Human
gggaauggcagcugc

SEQ ID NO: 2156721 - RNA, 16 nt, Human
gggacaaagaggccuu

SEQ ID NO: 2156722 - RNA, 15 nt, Human
gggacaaagaggccu

SEQ ID NO: 2156723 - RNA, 22 nt, Human
gggacaaagaggccuuuaacca

SEQ ID NO: 2156724 - RNA, 17 nt, Human
gggaccuauaacugccc

SEQ ID NO: 2156725 - RNA, 12 nt, Human
gggaccucuccc

SEQ ID NO: 2156726 - RNA, 19 nt, Human
gggaccuauaacugcccag

SEQ ID NO: 2156727 - RNA, 16 nt, Human
gggaccucucccaggg

SEQ ID NO: 2156728 - RNA, 23 nt, Human
gggaccucucccagggucccugg

SEQ ID NO: 2156729 - RNA, 15 nt, Human
ggcugauggaguaaa

SEQ ID NO: 2156730 - RNA, 14 nt, Human
ggaaaacgcucucu

SEQ ID NO: 2156731 - RNA, 21 nt, Human
gcuuuuacugaagccuuucuu

SEQ ID NO: 2156732 - RNA, 13 nt, Human
gcuuuaauaaugu

SEQ ID NO: 2156733 - RNA, 15 nt, Human
gcuuuggagaagagu

SEQ ID NO: 2156734 - RNA, 15 nt, Human
gcuuugggagaaugu

SEQ ID NO: 2156735 - RNA, 14 nt, Human
ggaaaauauuuuga

SEQ ID NO: 2156736 - RNA, 12 nt, Human
ggaaaauauuuu

SEQ ID NO: 2156737 - RNA, 21 nt, Human
ggaaccguaggacccaagcag

SEQ ID NO: 2156738 - RNA, 16 nt, Human
ggaaccguaggaccca

SEQ ID NO: 2156739 - RNA, 20 nt, Human
ggaagaucucugcagggccg

SEQ ID NO: 2156740 - RNA, 19 nt, Human
ggaagaucucugcagggcc

SEQ ID NO: 2156741 - RNA, 24 nt, Human
gcuggccccgccgccugguacuca

SEQ ID NO: 2156742 - RNA, 23 nt, Human
gcuggccccgccgccugguacuc

SEQ ID NO: 2156743 - RNA, 22 nt, Human
gcuggccccgccgccugguacu

SEQ ID NO: 2156744 - RNA, 13 nt, Human
gcuggccccgccg

SEQ ID NO: 2156745 - RNA, 20 nt, Human
gcugcucagggaaaagcagc

SEQ ID NO: 2156746 - RNA, 21 nt, Human
gcugcucagggaaaagcagcu

SEQ ID NO: 2156747 - RNA, 16 nt, Human
gcuagcacaugcccua

SEQ ID NO: 2156748 - RNA, 13 nt, Human
gcuguauuuugaa

SEQ ID NO: 2156749 - RNA, 15 nt, Human
ggccaggccagcugc

SEQ ID NO: 2156750 - RNA, 17 nt, Human
ggccaggccagcugccu

SEQ ID NO: 2156751 - RNA, 18 nt, Human
ggccccgccgccugguac

SEQ ID NO: 2156752 - RNA, 15 nt, Human
ggccccgccgccugg

SEQ ID NO: 2156753 - RNA, 14 nt, Human
ggccccgccgccug

SEQ ID NO: 2156754 - RNA, 22 nt, Human
ggcaccugccacccugggccug

SEQ ID NO: 2156755 - RNA, 19 nt, Human
ggagugagaggucucucuu

SEQ ID NO: 2156756 - RNA, 20 nt, Human
ggaggaucuuuugaacccag

SEQ ID NO: 2156757 - RNA, 12 nt, Human
ggaccucuccca

SEQ ID NO: 2156758 - RNA, 14 nt, Human
ggaccucucccagg

SEQ ID NO: 2156759 - RNA, 15 nt, Human
ggaccucucccaggg

SEQ ID NO: 2156760 - RNA, 23 nt, Human
ggaccugcccccgcauccccugc

SEQ ID NO: 2156761 - RNA, 11 nt, Human
ggaccugcccc

SEQ ID NO: 2156762 - RNA, 10 nt, Human
ggaccugccc

SEQ ID NO: 2156763 - RNA, 22 nt, Human
ggaccugcccccgcauccccug

SEQ ID NO: 2156764 - RNA, 21 nt, Human
ggagaccuggacacaggccug

SEQ ID NO: 2156765 - RNA, 21 nt, Human
uauauuuuauacauuaacuuc

SEQ ID NO: 2156766 - RNA, 23 nt, Human
uauauaauacugacugagaauau

SEQ ID NO: 2156767 - RNA, 23 nt, Human
uauacuugcuuuguguucuuugu

SEQ ID NO: 2156768 - RNA, 15 nt, Human
uauauacauauauau

SEQ ID NO: 2156769 - RNA, 17 nt, Human
uauaugauuuuuaucca

SEQ ID NO: 2156770 - RNA, 14 nt, Human
uauauuuuaauuug

SEQ ID NO: 2156771 - RNA, 20 nt, Human
uauauuuguguauuuaacag

SEQ ID NO: 2156772 - RNA, 16 nt, Human
uauauuuguguauuua

SEQ ID NO: 2156773 - RNA, 22 nt, Human
uagaguuucaaccaugaagucu

SEQ ID NO: 2156774 - RNA, 12 nt, Human
uagauguuuccu

SEQ ID NO: 2156775 - RNA, 15 nt, Human
uagauguucuacuuu

SEQ ID NO: 2156776 - RNA, 16 nt, Human
uaggaacuugagaacu

SEQ ID NO: 2156777 - RNA, 22 nt, Human
uaggccaggugcaaccagggag

SEQ ID NO: 2156778 - RNA, 20 nt, Human
uagccuauguggauuuuuuc

SEQ ID NO: 2156779 - RNA, 13 nt, Human
uagcaguaaaaua

SEQ ID NO: 2156780 - RNA, 16 nt, Human
uagccauuuuuacugu

SEQ ID NO: 2156781 - RNA, 17 nt, Human
uagccauuuuuacuguu

SEQ ID NO: 2156782 - RNA, 18 nt, Human
uacacaccuuauauuuac

SEQ ID NO: 2156783 - RNA, 18 nt, Human
uaccaaauagcuucuguu

SEQ ID NO: 2156784 - RNA, 22 nt, Human
uaccaaucauauuaauacaaug

SEQ ID NO: 2156785 - RNA, 13 nt, Human
uaccaaucauauu

SEQ ID NO: 2156786 - RNA, 18 nt, Human
uacugauguuccuuugga

SEQ ID NO: 2156787 - RNA, 17 nt, Human
uacugauguuccuuugg

SEQ ID NO: 2156788 - RNA, 17 nt, Human
uagaaagacagagcugg

SEQ ID NO: 2156789 - RNA, 23 nt, Human
uagaaagaauauuugguuuuccu

SEQ ID NO: 2156790 - RNA, 22 nt, Human
uagaaaggggcaguuuaaagca

SEQ ID NO: 2156791 - RNA, 18 nt, Human
uagaaagugccagaaagu

SEQ ID NO: 2156792 - RNA, 17 nt, Human
uagaaagugccagaaag

SEQ ID NO: 2156793 - RNA, 22 nt, Human
uagaacauaaagcaaauagaca

SEQ ID NO: 2156794 - RNA, 16 nt, Human
uagaacauaaagcaaa

SEQ ID NO: 2156795 - RNA, 18 nt, Human
uagaacauaaagcaaaua

SEQ ID NO: 2156796 - RNA, 17 nt, Human
uagaacauaaagcaaau

SEQ ID NO: 2156797 - RNA, 12 nt, Human
uacuguauuuga

SEQ ID NO: 2156798 - RNA, 16 nt, Human
uacugugguguuuugu

SEQ ID NO: 2156799 - RNA, 13 nt, Human
uacugugucuuug

SEQ ID NO: 2156800 - RNA, 23 nt, Human
uacugugucuuugguuugugcua

SEQ ID NO: 2156801 - RNA, 15 nt, Human
uacuugcucuggacc

SEQ ID NO: 2156802 - RNA, 14 nt, Human
uacuugcucuggac

SEQ ID NO: 2156803 - RNA, 12 nt, Human
uacuugcucugg

SEQ ID NO: 2156804 - RNA, 13 nt, Human
uacuuuaauaaau

SEQ ID NO: 2156805 - RNA, 20 nt, Human
uacuugcucuggaccugccc

SEQ ID NO: 2156806 - RNA, 18 nt, Human
uacuugcucuggaccugc

SEQ ID NO: 2156807 - RNA, 17 nt, Human
uacuugcucuggaccug

SEQ ID NO: 2156808 - RNA, 16 nt, Human
uacuugcucuggaccu

SEQ ID NO: 2156809 - RNA, 14 nt, Human
uacuugcuuugugu

SEQ ID NO: 2156810 - RNA, 22 nt, Human
uacuugcucuggaccugccccc

SEQ ID NO: 2156811 - RNA, 19 nt, Human
uaauauaaaguuggaugcg

SEQ ID NO: 2156812 - RNA, 14 nt, Human
uaauauaaaguugg

SEQ ID NO: 2156813 - RNA, 20 nt, Human
uaauacaaugaugcuauuug

SEQ ID NO: 2156814 - RNA, 14 nt, Human
uaaucugagaaaca

SEQ ID NO: 2156815 - RNA, 18 nt, Human
uaaucuuaucaagaguug

SEQ ID NO: 2156816 - RNA, 22 nt, Human
uaaugauggcccauucuacuug

SEQ ID NO: 2156817 - RNA, 18 nt, Human
uaaugauggcccauucua

SEQ ID NO: 2156818 - RNA, 14 nt, Human
uaaugauggcccau

SEQ ID NO: 2156819 - RNA, 16 nt, Human
uaauauggggaugcag

SEQ ID NO: 2156820 - RNA, 19 nt, Human
uaauauauuuguguauuua

SEQ ID NO: 2156821 - RNA, 20 nt, Human
uaauauauuuguguauuuaa

SEQ ID NO: 2156822 - RNA, 12 nt, Human
uaauucugggaa

SEQ ID NO: 2156823 - RNA, 19 nt, Human
uaauucuugcauauuuugu

SEQ ID NO: 2156824 - RNA, 15 nt, Human
uaauucuugcauauu

SEQ ID NO: 2156825 - RNA, 14 nt, Human
uaauucuuauucuu

SEQ ID NO: 2156826 - RNA, 20 nt, Human
uaauucuucaccuuaggaau

SEQ ID NO: 2156827 - RNA, 15 nt, Human
uaauuaaauagcuuu

SEQ ID NO: 2156828 - RNA, 21 nt, Human
uaauuaaauaaaaaucugugg

SEQ ID NO: 2156829 - RNA, 12 nt, Human
uaauuuggcagg

SEQ ID NO: 2156830 - RNA, 16 nt, Human
uaacaauguauuuucu

SEQ ID NO: 2156831 - RNA, 14 nt, Human
uaacaauguauuuu

SEQ ID NO: 2156832 - RNA, 23 nt, Human
uaacugcccagcggacaguggca

SEQ ID NO: 2156833 - RNA, 17 nt, Human
uaacugcccagcggaca

SEQ ID NO: 2156834 - RNA, 19 nt, Human
uaacugcaaagugaaguug

SEQ ID NO: 2156835 - RNA, 22 nt, Human
uaaccaaucuacaaucucccuu

SEQ ID NO: 2156836 - RNA, 15 nt, Human
uaaccaaucuacaau

SEQ ID NO: 2156837 - RNA, 14 nt, Human
uaaccaaucuacaa

SEQ ID NO: 2156838 - RNA, 21 nt, Human
uaaauaaaacauuuucacaca

SEQ ID NO: 2156839 - RNA, 22 nt, Human
uaaauaaaacauuuucacacaa

SEQ ID NO: 2156840 - RNA, 10 nt, Human
uaaauauuua

SEQ ID NO: 2156841 - RNA, 23 nt, Human
uaaauauugucuuuuuguauguc

SEQ ID NO: 2156842 - RNA, 20 nt, Human
uaaauauugucuuuuuguau

SEQ ID NO: 2156843 - RNA, 17 nt, Human
uaaauauugucuuuuug

SEQ ID NO: 2156844 - RNA, 16 nt, Human
uaaauauugucuuuuu

SEQ ID NO: 2156845 - RNA, 15 nt, Human
uaaauauugucuuuu

SEQ ID NO: 2156846 - RNA, 13 nt, Human
uaaauauugucuu

SEQ ID NO: 2156847 - RNA, 18 nt, Human
uaaacaauaucagacuuu

SEQ ID NO: 2156848 - RNA, 12 nt, Human
uaaacaaaugua

SEQ ID NO: 2156849 - RNA, 19 nt, Human
uaaacaaauguaugauuac

SEQ ID NO: 2156850 - RNA, 21 nt, Human
uaaaaucugauauguauuguu

SEQ ID NO: 2156851 - RNA, 20 nt, Human
uaaaaucugauauguauugu

SEQ ID NO: 2156852 - RNA, 23 nt, Human
uaaaaucugauauguauuguuug

SEQ ID NO: 2156853 - RNA, 22 nt, Human
uaaaaucugauauguauuguuu

SEQ ID NO: 2156854 - RNA, 16 nt, Human
uaaaaaaaagaaauga

SEQ ID NO: 2156855 - RNA, 12 nt, Human
uaaaaaaaagaa

SEQ ID NO: 2156856 - RNA, 17 nt, Human
uaaaaaaagaagagaaa

SEQ ID NO: 2156857 - RNA, 15 nt, Human
uaaaaacaggcagcu

SEQ ID NO: 2156858 - RNA, 23 nt, Human
uaaaaaacaugugguuacacagu

SEQ ID NO: 2156859 - RNA, 18 nt, Human
guuuuccuguauaggaau

SEQ ID NO: 2156860 - RNA, 20 nt, Human
guuuuccuuuuauuucuuca

SEQ ID NO: 2156861 - RNA, 19 nt, Human
guuuuuaacucaauauuuu

SEQ ID NO: 2156862 - RNA, 15 nt, Human
guuuuuaacucaaua

SEQ ID NO: 2156863 - RNA, 19 nt, Human
guuuuguggaggagcucag

SEQ ID NO: 2156864 - RNA, 14 nt, Human
guuuccugcaggcc

SEQ ID NO: 2156865 - RNA, 16 nt, Human
guuuccugcaggccag

SEQ ID NO: 2156866 - RNA, 23 nt, Human
guuuccaguacaccuuucagcca

SEQ ID NO: 2156867 - RNA, 12 nt, Human
guuuagccugga

SEQ ID NO: 2156868 - RNA, 21 nt, Human
guuugaaucuauuuaucuuca

SEQ ID NO: 2156869 - RNA, 17 nt, Human
guuugaauauaaacacu

SEQ ID NO: 2156870 - RNA, 19 nt, Human
guuugaauauaaacacuau

SEQ ID NO: 2156871 - RNA, 13 nt, Human
guuugaauauaaa

SEQ ID NO: 2156872 - RNA, 17 nt, Human
guuuccuuccagcccag

SEQ ID NO: 2156873 - RNA, 21 nt, Human
ucaaacuaggggacaaagcaa

SEQ ID NO: 2156874 - RNA, 16 nt, Human
uauuuuauacauuaac

SEQ ID NO: 2156875 - RNA, 12 nt, Human
uauuuuuuaaag

SEQ ID NO: 2156876 - RNA, 14 nt, Human
uauuugagaauaua

SEQ ID NO: 2156877 - RNA, 20 nt, Human
uauuucuuaaacaaauguau

SEQ ID NO: 2156878 - RNA, 15 nt, Human
uauuucucuuucuuu

SEQ ID NO: 2156879 - RNA, 16 nt, Human
uauuucucuuucuuua

SEQ ID NO: 2156880 - RNA, 13 nt, Human
uauuucucuuucu

SEQ ID NO: 2156881 - RNA, 20 nt, Human
uaucugagcucuuugcacua

SEQ ID NO: 2156882 - RNA, 19 nt, Human
uaucugagcucuuugcacu

SEQ ID NO: 2156883 - RNA, 13 nt, Human
ucaauuaacaaua

SEQ ID NO: 2156884 - RNA, 17 nt, Human
ucaaugguuugcaagga

SEQ ID NO: 2156885 - RNA, 13 nt, Human
ucacaauacuguu

SEQ ID NO: 2156886 - RNA, 17 nt, Human
ucacaaguuuuuuuacu

SEQ ID NO: 2156887 - RNA, 19 nt, Human
ucacacaauacaauaaguu

SEQ ID NO: 2156888 - RNA, 23 nt, Human
ucacacacagacucauauuacug

SEQ ID NO: 2156889 - RNA, 14 nt, Human
ucacacacagacug

SEQ ID NO: 2156890 - RNA, 14 nt, Human
ucaaagaaauaucu

SEQ ID NO: 2156891 - RNA, 15 nt, Human
ucaacguuaauaauu

SEQ ID NO: 2156892 - RNA, 16 nt, Human
ucaagcccgcggggac

SEQ ID NO: 2156893 - RNA, 23 nt, Human
ucacagggacugaaaaccucucc

SEQ ID NO: 2156894 - RNA, 19 nt, Human
ucacuccugcuguaaauuu

SEQ ID NO: 2156895 - RNA, 16 nt, Human
ucacuccugcuguaaa

SEQ ID NO: 2156896 - RNA, 15 nt, Human
ucacuccugcuguaa

SEQ ID NO: 2156897 - RNA, 14 nt, Human
ucacuccugcugua

SEQ ID NO: 2156898 - RNA, 13 nt, Human
ucacuccugcugu

SEQ ID NO: 2156899 - RNA, 12 nt, Human
ucacuccugcug

SEQ ID NO: 2156900 - RNA, 14 nt, Human
ucagaccagcucuu

SEQ ID NO: 2156901 - RNA, 23 nt, Human
ucagagugcaagccccugcucca

SEQ ID NO: 2156902 - RNA, 23 nt, Human
uccccagagaaagcgcagaugcu

SEQ ID NO: 2156903 - RNA, 17 nt, Human
uccccagagaaagcgca

SEQ ID NO: 2156904 - RNA, 16 nt, Human
ucccccuagccauuuu

SEQ ID NO: 2156905 - RNA, 14 nt, Human
ucccccuagccauu

SEQ ID NO: 2156906 - RNA, 15 nt, Human
ucccccuagccauuu

SEQ ID NO: 2156907 - RNA, 22 nt, Human
uccccugccccuuuacggacac

SEQ ID NO: 2156908 - RNA, 17 nt, Human
uccccugccuccauccu

SEQ ID NO: 2156909 - RNA, 15 nt, Human
uccccugccuccauc

SEQ ID NO: 2156910 - RNA, 13 nt, Human
uccccugccucca

SEQ ID NO: 2156911 - RNA, 12 nt, Human
uccccugccucc

SEQ ID NO: 2156912 - RNA, 22 nt, Human
uccauggccguguagaagcaug

SEQ ID NO: 2156913 - RNA, 19 nt, Human
ucccaacaaacauugaugc

SEQ ID NO: 2156914 - RNA, 19 nt, Human
ucccaggaguucugcucau

SEQ ID NO: 2156915 - RNA, 18 nt, Human
ucccaggaguucugcuca

SEQ ID NO: 2156916 - RNA, 15 nt, Human
ucccaggaguucugc

SEQ ID NO: 2156917 - RNA, 21 nt, Human
ucccaggcucucaacagggga

SEQ ID NO: 2156918 - RNA, 19 nt, Human
ucccauucuccauuuguua

SEQ ID NO: 2156919 - RNA, 16 nt, Human
ucccauucuccauuug

SEQ ID NO: 2156920 - RNA, 18 nt, Human
uccaccucgacguuuaca

SEQ ID NO: 2156921 - RNA, 14 nt, Human
uccagaaggagaca

SEQ ID NO: 2156922 - RNA, 19 nt, Human
uccagaaggagacaggcag

SEQ ID NO: 2156923 - RNA, 20 nt, Human
uccacuucuuucagcagacu

SEQ ID NO: 2156924 - RNA, 16 nt, Human
ucaucucucuuuaaua

SEQ ID NO: 2156925 - RNA, 20 nt, Human
ucaguucuugccacuuuuuu

SEQ ID NO: 2156926 - RNA, 20 nt, Human
ucagucuucucucacuuuga

SEQ ID NO: 2156927 - RNA, 13 nt, Human
ucagcagacugau

SEQ ID NO: 2156928 - RNA, 15 nt, Human
ucugaacuggagcca

SEQ ID NO: 2156929 - RNA, 14 nt, Human
ucugaacuggagcc

SEQ ID NO: 2156930 - RNA, 19 nt, Human
ucugaaaauuaacacugcu

SEQ ID NO: 2156931 - RNA, 18 nt, Human
ucugaaaauuaacacugc

SEQ ID NO: 2156932 - RNA, 17 nt, Human
ucugaaaauuaacacug

SEQ ID NO: 2156933 - RNA, 18 nt, Human
ucucugcaccguacugug

SEQ ID NO: 2156934 - RNA, 13 nt, Human
ucucuuucuuuac

SEQ ID NO: 2156935 - RNA, 18 nt, Human
ucucuuucuuuacaagau

SEQ ID NO: 2156936 - RNA, 20 nt, Human
ucugaacuggagccaugggc

SEQ ID NO: 2156937 - RNA, 18 nt, Human
ucugagcucuuugcacua

SEQ ID NO: 2156938 - RNA, 13 nt, Human
ucucuacucugcu

SEQ ID NO: 2156939 - RNA, 18 nt, Human
ucucuacagguuugggua

SEQ ID NO: 2156940 - RNA, 18 nt, Human
ucucugaggaagcugggg

SEQ ID NO: 2156941 - RNA, 22 nt, Human
ucucagguuaagugugaguaau

SEQ ID NO: 2156942 - RNA, 21 nt, Human
ucuccucuuguaaauaaagcc

SEQ ID NO: 2156943 - RNA, 23 nt, Human
ucuccucuuguaaauaaagcccu

SEQ ID NO: 2156944 - RNA, 17 nt, Human
ucuccugaaguucagcc

SEQ ID NO: 2156945 - RNA, 15 nt, Human
ucucccugacccugu

SEQ ID NO: 2156946 - RNA, 13 nt, Human
ucuccucuuguaa

SEQ ID NO: 2156947 - RNA, 15 nt, Human
ucuccucuuguaaau

SEQ ID NO: 2156948 - RNA, 14 nt, Human
ucuccucuuguaaa

SEQ ID NO: 2156949 - RNA, 22 nt, Human
uccuuuuuuguuccuuuuuccu

SEQ ID NO: 2156950 - RNA, 14 nt, Human
uccuuuuuuaaaag

SEQ ID NO: 2156951 - RNA, 18 nt, Human
ugaacagacugaccuuga

SEQ ID NO: 2156952 - RNA, 17 nt, Human
ugaacagacugaccuug

SEQ ID NO: 2156953 - RNA, 17 nt, Human
ugaacaccauugaaggc

SEQ ID NO: 2156954 - RNA, 20 nt, Human
ugaacaccauugaaggcuua

SEQ ID NO: 2156955 - RNA, 22 nt, Human
ugaacugaacaccauugaaggc

SEQ ID NO: 2156956 - RNA, 12 nt, Human
ugaacugaacac

SEQ ID NO: 2156957 - RNA, 13 nt, Human
ugaacugaacacc

SEQ ID NO: 2156958 - RNA, 14 nt, Human
ugaacugaacacca

SEQ ID NO: 2156959 - RNA, 16 nt, Human
ugaagaggaugcugug

SEQ ID NO: 2156960 - RNA, 16 nt, Human
ugaaggcuggcaugau

SEQ ID NO: 2156961 - RNA, 13 nt, Human
ugaaggcuggcau

SEQ ID NO: 2156962 - RNA, 12 nt, Human
ugaaggcuggca

SEQ ID NO: 2156963 - RNA, 11 nt, Human
ugaaggcuggc

SEQ ID NO: 2156964 - RNA, 15 nt, Human
ucuuucacaaaaaag

SEQ ID NO: 2156965 - RNA, 15 nt, Human
ucuuuuuauugaauc

SEQ ID NO: 2156966 - RNA, 14 nt, Human
ucuuuuuauugaau

SEQ ID NO: 2156967 - RNA, 13 nt, Human
ucuuuuuauugaa

SEQ ID NO: 2156968 - RNA, 15 nt, Human
ucuuuuguaauuuaa

SEQ ID NO: 2156969 - RNA, 19 nt, Human
ugaaaugcagagucaauga

SEQ ID NO: 2156970 - RNA, 20 nt, Human
ucuugacgagugugaagcuu

SEQ ID NO: 2156971 - RNA, 16 nt, Human
ucugugucugaguggc

SEQ ID NO: 2156972 - RNA, 17 nt, Human
uggaaaaaaaaaagaca

SEQ ID NO: 2156973 - RNA, 16 nt, Human
uggaaaaaaaaaagac

SEQ ID NO: 2156974 - RNA, 15 nt, Human
uggaaccaggcuugg

SEQ ID NO: 2156975 - RNA, 20 nt, Human
ugcuuguuaaugcuuucuga

SEQ ID NO: 2156976 - RNA, 22 nt, Human
ugggcgggcaggggagggucag

SEQ ID NO: 2156977 - RNA, 17 nt, Human
ugggcgggcaggggagg

SEQ ID NO: 2156978 - RNA, 15 nt, Human
uggguuccauucuca

SEQ ID NO: 2156979 - RNA, 21 nt, Human
uggguucauccuauucuuucg

SEQ ID NO: 2156980 - RNA, 20 nt, Human
uggguccaggauuccucuuu

SEQ ID NO: 2156981 - RNA, 18 nt, Human
uggccuugggcccucugg

SEQ ID NO: 2156982 - RNA, 23 nt, Human
ugccauggacagaagaaggcagc

SEQ ID NO: 2156983 - RNA, 20 nt, Human
ugccauggacagaagaaggc

SEQ ID NO: 2156984 - RNA, 18 nt, Human
ugccauggacagaagaag

SEQ ID NO: 2156985 - RNA, 22 nt, Human
ugccaguaaaaaaaaaaaaugg

SEQ ID NO: 2156986 - RNA, 14 nt, Human
ugccaguaaaaaaa

SEQ ID NO: 2156987 - RNA, 17 nt, Human
ugccaaccuauuuugaa

SEQ ID NO: 2156988 - RNA, 20 nt, Human
ugccaaaaaaagacagggcu

SEQ ID NO: 2156989 - RNA, 20 nt, Human
ugaaggcuggcaugauccaa

SEQ ID NO: 2156990 - RNA, 14 nt, Human
ugcagccagaggca

SEQ ID NO: 2156991 - RNA, 13 nt, Human
ugcagccagaggc

SEQ ID NO: 2156992 - RNA, 11 nt, Human
ugcagccagag

SEQ ID NO: 2156993 - RNA, 15 nt, Human
ugccuagaggcccca

SEQ ID NO: 2156994 - RNA, 18 nt, Human
ugcgcccaguccuuccac

SEQ ID NO: 2156995 - RNA, 17 nt, Human
ugcgcccaguccuucca

SEQ ID NO: 2156996 - RNA, 15 nt, Human
ugcugaguugguguu

SEQ ID NO: 2156997 - RNA, 20 nt, Human
ugcucaggagaccuggagga

SEQ ID NO: 2156998 - RNA, 16 nt, Human
ugcuagcacaugcccu

SEQ ID NO: 2156999 - RNA, 12 nt, Human
ugcuagcacaug

SEQ ID NO: 2157000 - RNA, 20 nt, Human
ugcuagccggccacuuugga

SEQ ID NO: 2157001 - RNA, 20 nt, Human
ugcgucauuacagggcacag

SEQ ID NO: 2157002 - RNA, 22 nt, Human
uuaauauggggaugcagcauua

SEQ ID NO: 2157003 - RNA, 16 nt, Human
uuaauauggggaugca

SEQ ID NO: 2157004 - RNA, 18 nt, Human
uuacggcccuggccuugg

SEQ ID NO: 2157005 - RNA, 16 nt, Human
uuacggacacccccuc

SEQ ID NO: 2157006 - RNA, 23 nt, Human
uuaccuuuuugaaaaagaaaaca

SEQ ID NO: 2157007 - RNA, 14 nt, Human
uuaaagcaaaggag

SEQ ID NO: 2157008 - RNA, 15 nt, Human
uuaaauagcuuuugu

SEQ ID NO: 2157009 - RNA, 19 nt, Human
uuaaauggaaacugaaacu

SEQ ID NO: 2157010 - RNA, 12 nt, Human
uguuuuguaaag

SEQ ID NO: 2157011 - RNA, 23 nt, Human
uguucugcccaaugccuuuuuga

SEQ ID NO: 2157012 - RNA, 10 nt, Human
uguguuuguu

SEQ ID NO: 2157013 - RNA, 20 nt, Human
uguguuuguucuuuuuauug

SEQ ID NO: 2157014 - RNA, 17 nt, Human
uguguuuaugugagcug

SEQ ID NO: 2157015 - RNA, 22 nt, Human
uguguauuuaacagggagggga

SEQ ID NO: 2157016 - RNA, 20 nt, Human
uguguauuuaacagggaggg

SEQ ID NO: 2157017 - RNA, 18 nt, Human
uguguauuuaacagggag

SEQ ID NO: 2157018 - RNA, 13 nt, Human
uguguauuuaaca

SEQ ID NO: 2157019 - RNA, 19 nt, Human
uguauugcauauauacaua

SEQ ID NO: 2157020 - RNA, 18 nt, Human
uguauuuaacagggaggg

SEQ ID NO: 2157021 - RNA, 12 nt, Human
uguagcagaaag

SEQ ID NO: 2157022 - RNA, 15 nt, Human
uguauaauauuuuua

SEQ ID NO: 2157023 - RNA, 18 nt, Human
ugucauauagcugguuau

SEQ ID NO: 2157024 - RNA, 20 nt, Human
ugucacguuuuguuuugugc

SEQ ID NO: 2157025 - RNA, 20 nt, Human
uguauuuguuaaugguuuga

SEQ ID NO: 2157026 - RNA, 18 nt, Human
uguauuuguuaaugguuu

SEQ ID NO: 2157027 - RNA, 22 nt, Human
ugucauagaaagugccagaaag

SEQ ID NO: 2157028 - RNA, 17 nt, Human
ugucauagaaagugcca

SEQ ID NO: 2157029 - RNA, 19 nt, Human
uguaccaugugcuacaggg

SEQ ID NO: 2157030 - RNA, 19 nt, Human
uguacaggaugcuuugguu

SEQ ID NO: 2157031 - RNA, 12 nt, Human
uguacuacaauu

SEQ ID NO: 2157032 - RNA, 18 nt, Human
uguacuaggauacugcug

SEQ ID NO: 2157033 - RNA, 12 nt, Human
uguacucccagg

SEQ ID NO: 2157034 - RNA, 16 nt, Human
uguaaaucugcucagg

SEQ ID NO: 2157035 - RNA, 13 nt, Human
uguaaaucugcuc

SEQ ID NO: 2157036 - RNA, 15 nt, Human
uguaaucccagcacu

SEQ ID NO: 2157037 - RNA, 16 nt, Human
ugugaguaaucugaga

SEQ ID NO: 2157038 - RNA, 19 nt, Human
ugugaguaaucugagaaac

SEQ ID NO: 2157039 - RNA, 17 nt, Human
ugugcaauaauuuacau

SEQ ID NO: 2157040 - RNA, 14 nt, Human
ugucucacauggga

SEQ ID NO: 2157041 - RNA, 13 nt, Human
ugucugccagggc

SEQ ID NO: 2157042 - RNA, 20 nt, Human
ugugcuacaggggccagaag

SEQ ID NO: 2157043 - RNA, 18 nt, Human
ugugcuacaggggccaga

SEQ ID NO: 2157044 - RNA, 17 nt, Human
ugugcuacaggggccag

SEQ ID NO: 2157045 - RNA, 15 nt, Human
ugugcuacaggggcc

SEQ ID NO: 2157046 - RNA, 13 nt, Human
ugugcagacuuca

SEQ ID NO: 2157047 - RNA, 17 nt, Human
ugugcacaaaguggcau

SEQ ID NO: 2157048 - RNA, 14 nt, Human
ugugcacaaagugg

SEQ ID NO: 2157049 - RNA, 19 nt, Human
ugugcauagagccacguau

SEQ ID NO: 2157050 - RNA, 20 nt, Human
uguggaaaagaaacacgcac

SEQ ID NO: 2157051 - RNA, 15 nt, Human
uguggaaaagaaaca

SEQ ID NO: 2157052 - RNA, 15 nt, Human
uguggguaccuguau

SEQ ID NO: 2157053 - RNA, 15 nt, Human
ugugggucaaggaau

SEQ ID NO: 2157054 - RNA, 23 nt, Human
uguggggaaccaauugcuuuguc

SEQ ID NO: 2157055 - RNA, 19 nt, Human
uuguacacaccuuauauuu

SEQ ID NO: 2157056 - RNA, 22 nt, Human
uuguaaaguccccagagaaagc

SEQ ID NO: 2157057 - RNA, 16 nt, Human
uuguaaaguccccaga

SEQ ID NO: 2157058 - RNA, 15 nt, Human
uuggccaaacaagug

SEQ ID NO: 2157059 - RNA, 16 nt, Human
uuggguuccauucuca

SEQ ID NO: 2157060 - RNA, 16 nt, Human
uuggaagaaaaaaucu

SEQ ID NO: 2157061 - RNA, 21 nt, Human
uugcguggaauugugcugagu

SEQ ID NO: 2157062 - RNA, 12 nt, Human
uugccugcaggc

SEQ ID NO: 2157063 - RNA, 23 nt, Human
uugacgagugugaagcuuccuug

SEQ ID NO: 2157064 - RNA, 18 nt, Human
uugaggaaacaacagcuu

SEQ ID NO: 2157065 - RNA, 19 nt, Human
uugaggggagagggaacgg

SEQ ID NO: 2157066 - RNA, 17 nt, Human
uugaucuucaacaaauu

SEQ ID NO: 2157067 - RNA, 16 nt, Human
uugaucuucaacaaau

SEQ ID NO: 2157068 - RNA, 15 nt, Human
uugaucuucaacaaa

SEQ ID NO: 2157069 - RNA, 13 nt, Human
uugaucuucaaca

SEQ ID NO: 2157070 - RNA, 11 nt, Human
uugaucuucaa

SEQ ID NO: 2157071 - RNA, 20 nt, Human
uugauuuuuacguuugaaga

SEQ ID NO: 2157072 - RNA, 13 nt, Human
uugaagacacuga

SEQ ID NO: 2157073 - RNA, 15 nt, Human
uugaagacacugaaa

SEQ ID NO: 2157074 - RNA, 22 nt, Human
uugaagacacugaaauauacac

SEQ ID NO: 2157075 - RNA, 20 nt, Human
uugaaucuauuuaucuucau

SEQ ID NO: 2157076 - RNA, 17 nt, Human
uugaaucuauuuaucuu

SEQ ID NO: 2157077 - RNA, 22 nt, Human
uucuucacuguccuccaagcca

SEQ ID NO: 2157078 - RNA, 15 nt, Human
uucucauccugcagg

SEQ ID NO: 2157079 - RNA, 20 nt, Human
uucucaugauuuacagagaa

SEQ ID NO: 2157080 - RNA, 17 nt, Human
uucucaugauuuacaga

SEQ ID NO: 2157081 - RNA, 23 nt, Human
uucuaaugauggcccauucuacu

SEQ ID NO: 2157082 - RNA, 16 nt, Human
uucuaaugauggccca

SEQ ID NO: 2157083 - RNA, 14 nt, Human
uucuccagggucag

SEQ ID NO: 2157084 - RNA, 14 nt, Human
uucuaaacagagau

SEQ ID NO: 2157085 - RNA, 18 nt, Human
uuccuuuccagguauuuu

SEQ ID NO: 2157086 - RNA, 14 nt, Human
uuccuuccagccca

SEQ ID NO: 2157087 - RNA, 14 nt, Human
uucauaaucuuugc

SEQ ID NO: 2157088 - RNA, 16 nt, Human
uucaugaguuuuuccc

SEQ ID NO: 2157089 - RNA, 24 nt, Human
uuccaugaaaaugcaacaacaugu

SEQ ID NO: 2157090 - RNA, 15 nt, Human
uuccaugaaaaugca

SEQ ID NO: 2157091 - RNA, 20 nt, Human
uuccacuuuuuuuuguaugu

SEQ ID NO: 2157092 - RNA, 15 nt, Human
uucauuuuaugaaga

SEQ ID NO: 2157093 - RNA, 17 nt, Human
uucaccccaaucccagc

SEQ ID NO: 2157094 - RNA, 14 nt, Human
uucaaauugugugu

SEQ ID NO: 2157095 - RNA, 21 nt, Human
uucaaauugugugugcucugc

SEQ ID NO: 2157096 - RNA, 22 nt, Human
uucaaugguuugcaaggaagcc

SEQ ID NO: 2157097 - RNA, 20 nt, Human
uucaaugguuugcaaggaag

SEQ ID NO: 2157098 - RNA, 23 nt, Human
uucaaugguuugcaaggaagcca

SEQ ID NO: 2157099 - RNA, 20 nt, Human
uucaauguuuuuaaaaaucu

SEQ ID NO: 2157100 - RNA, 21 nt, Human
uuuacaagcccccccuuccac

SEQ ID NO: 2157101 - RNA, 15 nt, Human
uuuacaagccccccc

SEQ ID NO: 2157102 - RNA, 21 nt, Human
uuuaaucuccaccagucauuu

SEQ ID NO: 2157103 - RNA, 14 nt, Human
uuucucuuucuuua

SEQ ID NO: 2157104 - RNA, 12 nt, Human
uuucucuuucuu

SEQ ID NO: 2157105 - RNA, 17 nt, Human
uuuccucuuccugccua

SEQ ID NO: 2157106 - RNA, 20 nt, Human
uuucagcauugauauuugug

SEQ ID NO: 2157107 - RNA, 15 nt, Human
uuucagcauugauau

SEQ ID NO: 2157108 - RNA, 14 nt, Human
uuucagcauugaua

SEQ ID NO: 2157109 - RNA, 22 nt, Human
uuucauuggaaauuaggaugua

SEQ ID NO: 2157110 - RNA, 20 nt, Human
uuuauuuguuugugcauuug

SEQ ID NO: 2157111 - RNA, 13 nt, Human
uuuauuucuuaaa

SEQ ID NO: 2157112 - RNA, 16 nt, Human
uuugguuaagcuuuga

SEQ ID NO: 2157113 - RNA, 13 nt, Human
uuuguguucuuug

SEQ ID NO: 2157114 - RNA, 14 nt, Human
uuuguucccauccu

SEQ ID NO: 2157115 - RNA, 23 nt, Human
uuuguucccauccucuucuuuua

SEQ ID NO: 2157116 - RNA, 16 nt, Human
uuugagcauggguuca

SEQ ID NO: 2157117 - RNA, 18 nt, Human
uuugauaguauugugcau

SEQ ID NO: 2157118 - RNA, 19 nt, Human
uuugcauaauaaaugcuuc

SEQ ID NO: 2157119 - RNA, 13 nt, Human
uuuuaauuugaua

SEQ ID NO: 2157120 - RNA, 19 nt, Human
uuuuacugaagccuuucuu

SEQ ID NO: 2157121 - RNA, 15 nt, Human
uuuuacugaagccuu

SEQ ID NO: 2157122 - RNA, 23 nt, Human
uuuucacacaauacaauaaguua

SEQ ID NO: 2157123 - RNA, 12 nt, Human
caaaccuucaca

SEQ ID NO: 2157124 - RNA, 14 nt, Human
caaacucucugaac

SEQ ID NO: 2157125 - RNA, 16 nt, Human
caaacagaaaacaugu

SEQ ID NO: 2157126 - RNA, 12 nt, Human
caagagcugagg

SEQ ID NO: 2157127 - RNA, 18 nt, Human
caaaguuccaaaaugcca

SEQ ID NO: 2157128 - RNA, 16 nt, Human
caaaguuccaaaaugc

SEQ ID NO: 2157129 - RNA, 17 nt, Human
caaagagaaaaagaaau

SEQ ID NO: 2157130 - RNA, 21 nt, Human
caaagagaaaaagaaaugcaa

SEQ ID NO: 2157131 - RNA, 20 nt, Human
caaagagaaaaagaaaugca

SEQ ID NO: 2157132 - RNA, 19 nt, Human
caaagagaaaaagaaaugc

SEQ ID NO: 2157133 - RNA, 19 nt, Human
caaagaaggaaaaggcagg

SEQ ID NO: 2157134 - RNA, 22 nt, Human
caaagaacauguagaaaacaaa

SEQ ID NO: 2157135 - RNA, 21 nt, Human
caaagaacauguagaaaacaa

SEQ ID NO: 2157136 - RNA, 10 nt, Human
caacagaaaa

SEQ ID NO: 2157137 - RNA, 14 nt, Human
caacagaaaaaugg

SEQ ID NO: 2157138 - RNA, 19 nt, Human
caaauuacucuuucuccau

SEQ ID NO: 2157139 - RNA, 16 nt, Human
caaauuacucuuucuc

SEQ ID NO: 2157140 - RNA, 15 nt, Human
caaauuuuauuugua

SEQ ID NO: 2157141 - RNA, 13 nt, Human
caaggagaugaag

SEQ ID NO: 2157142 - RNA, 23 nt, Human
caaggagaugaagcaaacacauu

SEQ ID NO: 2157143 - RNA, 12 nt, Human
caauauccuuug

SEQ ID NO: 2157144 - RNA, 20 nt, Human
caauauccuuugccucaagg

SEQ ID NO: 2157145 - RNA, 15 nt, Human
caauauccuuugccu

SEQ ID NO: 2157146 - RNA, 13 nt, Human
caauauccuuugc

SEQ ID NO: 2157147 - RNA, 20 nt, Human
caaugugucuuucuuuuugg

SEQ ID NO: 2157148 - RNA, 17 nt, Human
caauguuuuuaaaaauc

SEQ ID NO: 2157149 - RNA, 21 nt, Human
caauguuuauuucauaaagaa

SEQ ID NO: 2157150 - RNA, 17 nt, Human
caauguuguuuuaagac

SEQ ID NO: 2157151 - RNA, 16 nt, Human
caauuuuuuuuuccuu

SEQ ID NO: 2157152 - RNA, 18 nt, Human
caauguuuuuaaaaaucu

SEQ ID NO: 2157153 - RNA, 21 nt, Human
cacaauaccuuauuuaaguaa

SEQ ID NO: 2157154 - RNA, 13 nt, Human
cacaauacaauaa

SEQ ID NO: 2157155 - RNA, 15 nt, Human
cacaaagggcccaga

SEQ ID NO: 2157156 - RNA, 16 nt, Human
cacaaagggcccagau

SEQ ID NO: 2157157 - RNA, 13 nt, Human
cacaaagggccca

SEQ ID NO: 2157158 - RNA, 20 nt, Human
cacaaaggcaaaggguccag

SEQ ID NO: 2157159 - RNA, 22 nt, Human
cacaguggaaagacagcuucuc

SEQ ID NO: 2157160 - RNA, 14 nt, Human
aacuguacugggcc

SEQ ID NO: 2157161 - RNA, 22 nt, Human
aacuguaccaugugcuacaggg

SEQ ID NO: 2157162 - RNA, 16 nt, Human
aacuguaccaugugcu

SEQ ID NO: 2157163 - RNA, 22 nt, Human
aacuucuuauaggaaagcuuga

SEQ ID NO: 2157164 - RNA, 22 nt, Human
gugaugcuaaagguuguauugc

SEQ ID NO: 2157165 - RNA, 16 nt, Human
gugaugcccugcccuu

SEQ ID NO: 2157166 - RNA, 23 nt, Human
gugcacaaaguggcauaaaaaac

SEQ ID NO: 2157167 - RNA, 21 nt, Human
gugcacaaaguggcauaaaaa

SEQ ID NO: 2157168 - RNA, 14 nt, Human
gugcacaaaguggc

SEQ ID NO: 2157169 - RNA, 15 nt, Human
gugcaagccccugcu

SEQ ID NO: 2157170 - RNA, 13 nt, Human
gugcaaccaggga

SEQ ID NO: 2157171 - RNA, 12 nt, Human
gugccucccugg

SEQ ID NO: 2157172 - RNA, 15 nt, Human
gugccucccugguga

SEQ ID NO: 2157173 - RNA, 13 nt, Human
gugccucccuggu

SEQ ID NO: 2157174 - RNA, 15 nt, Human
aacugcaaagugaag

SEQ ID NO: 2157175 - RNA, 18 nt, Human
aacugcaaagugaaguug

SEQ ID NO: 2157176 - RNA, 13 nt, Human
aacugaaagugaa

SEQ ID NO: 2157177 - RNA, 18 nt, Human
gugaacuucuugaaucua

SEQ ID NO: 2157178 - RNA, 15 nt, Human
aaccugaaccuagga

SEQ ID NO: 2157179 - RNA, 21 nt, Human
aacccagacggcuccacuagg

SEQ ID NO: 2157180 - RNA, 17 nt, Human
aacccagcaacagaaaa

SEQ ID NO: 2157181 - RNA, 16 nt, Human
aacccagcaacagaaa

SEQ ID NO: 2157182 - RNA, 23 nt, Human
aacccagcaacagaaaaauggag

SEQ ID NO: 2157183 - RNA, 12 nt, Human
aacccccacugg

SEQ ID NO: 2157184 - RNA, 16 nt, Human
aacccccacuggacug

SEQ ID NO: 2157185 - RNA, 18 nt, Human
aaccccgucaacaaaucu

SEQ ID NO: 2157186 - RNA, 17 nt, Human
aaccccgucaacaaauc

SEQ ID NO: 2157187 - RNA, 16 nt, Human
aaccccgucaacaaau

SEQ ID NO: 2157188 - RNA, 15 nt, Human
aaccccgucaacaaa

SEQ ID NO: 2157189 - RNA, 14 nt, Human
aaccccgucaacaa

SEQ ID NO: 2157190 - RNA, 22 nt, Human
aacccaaauuacguguacuaca

SEQ ID NO: 2157191 - RNA, 15 nt, Human
aaccauuuucauuug

SEQ ID NO: 2157192 - RNA, 21 nt, Human
aacaguuaauuaguuaacagu

SEQ ID NO: 2157193 - RNA, 15 nt, Human
gucuuuuuaaaaaua

SEQ ID NO: 2157194 - RNA, 23 nt, Human
gucuguaucaguggauuucccau

SEQ ID NO: 2157195 - RNA, 22 nt, Human
gucuguaucaguggauuuccca

SEQ ID NO: 2157196 - RNA, 15 nt, Human
gucuguaucagugga

SEQ ID NO: 2157197 - RNA, 16 nt, Human
gucuguaucacucugu

SEQ ID NO: 2157198 - RNA, 17 nt, Human
aacuacugcaccauuua

SEQ ID NO: 2157199 - RNA, 16 nt, Human
aacuacugcaccauuu

SEQ ID NO: 2157200 - RNA, 20 nt, Human
aacuacugcaccauuuaaaa

SEQ ID NO: 2157201 - RNA, 15 nt, Human
guauaauauuuuuaa

SEQ ID NO: 2157202 - RNA, 12 nt, Human
guauaauauuuu

SEQ ID NO: 2157203 - RNA, 21 nt, Human
guaucaguggauuucccaucc

SEQ ID NO: 2157204 - RNA, 20 nt, Human
gucaaacaaacucucugaac

SEQ ID NO: 2157205 - RNA, 13 nt, Human
aaauugugugugc

SEQ ID NO: 2157206 - RNA, 21 nt, Human
aaauugugugugcucugcuuc

SEQ ID NO: 2157207 - RNA, 22 nt, Human
aaauugugugugcucugcuuca

SEQ ID NO: 2157208 - RNA, 21 nt, Human
aaaugucacguuuuguuuugu

SEQ ID NO: 2157209 - RNA, 22 nt, Human
aaauuaguaggcucauuuacug

SEQ ID NO: 2157210 - RNA, 18 nt, Human
aaauuuggccaaacaagu

SEQ ID NO: 2157211 - RNA, 23 nt, Human
gucaggaguucgagaccagccug

SEQ ID NO: 2157212 - RNA, 19 nt, Human
gucagaauuagcugcuucu

SEQ ID NO: 2157213 - RNA, 22 nt, Human
gucaacaaaucuaggaaaauau

SEQ ID NO: 2157214 - RNA, 12 nt, Human
gucaacaaaucu

SEQ ID NO: 2157215 - RNA, 16 nt, Human
aacaauguauuuucuu

SEQ ID NO: 2157216 - RNA, 20 nt, Human
aacaauguuguuuuaagacu

SEQ ID NO: 2157217 - RNA, 20 nt, Human
gucauuuuucagaccuuuua

SEQ ID NO: 2157218 - RNA, 11 nt, Human
aacagggaggg

SEQ ID NO: 2157219 - RNA, 20 nt, Human
guuucugaaaauuaacacug

SEQ ID NO: 2157220 - RNA, 21 nt, Human
guuucugaaaauuaacacugc

SEQ ID NO: 2157221 - RNA, 21 nt, Human
guuuacagucuauuugagacu

SEQ ID NO: 2157222 - RNA, 16 nt, Human
guuuacagucuauuug

SEQ ID NO: 2157223 - RNA, 14 nt, Human
guuuacagucuauu

SEQ ID NO: 2157224 - RNA, 13 nt, Human
guuuauuuuaaga

SEQ ID NO: 2157225 - RNA, 22 nt, Human
aaggaagccacagcugguggua

SEQ ID NO: 2157226 - RNA, 12 nt, Human
aaggagggugag

SEQ ID NO: 2157227 - RNA, 19 nt, Human
aaggagccuaggccaggug

SEQ ID NO: 2157228 - RNA, 18 nt, Human
aaggagccuaggccaggu

SEQ ID NO: 2157229 - RNA, 21 nt, Human
aaggagccuaggccaggugca

SEQ ID NO: 2157230 - RNA, 16 nt, Human
aaggagccuaggccag

SEQ ID NO: 2157231 - RNA, 15 nt, Human
aaggagaugaagcaa

SEQ ID NO: 2157232 - RNA, 21 nt, Human
aaggcccacgagcuuguucuu

SEQ ID NO: 2157233 - RNA, 22 nt, Human
aaggccauccuucccugucugc

SEQ ID NO: 2157234 - RNA, 23 nt, Human
guugcuucuucuacuucagucuu

SEQ ID NO: 2157235 - RNA, 14 nt, Human
aaguauuuuauucu

SEQ ID NO: 2157236 - RNA, 18 nt, Human
uaaaauacgguaccuggc

SEQ ID NO: 2157237 - RNA, 18 nt, Human
aagaucucugcagggccg

SEQ ID NO: 2157238 - RNA, 17 nt, Human
aagaugaacagacugac

SEQ ID NO: 2157239 - RNA, 15 nt, Human
aagaugaacagacug

SEQ ID NO: 2157240 - RNA, 16 nt, Human
guguggguaccuguau

SEQ ID NO: 2157241 - RNA, 17 nt, Human
guguggguaccuguauu

SEQ ID NO: 2157242 - RNA, 23 nt, Human
gugucaggaugguaauucuuauu

SEQ ID NO: 2157243 - RNA, 22 nt, Human
aagauggguccaggauuccucu

SEQ ID NO: 2157244 - RNA, 18 nt, Human
aagaugggugaaggcugg

SEQ ID NO: 2157245 - RNA, 16 nt, Human
aagacguguuuguguu

SEQ ID NO: 2157246 - RNA, 15 nt, Human
aagacguguuugugu

SEQ ID NO: 2157247 - RNA, 23 nt, Human
aagacguguuuguguuugugugu

SEQ ID NO: 2157248 - RNA, 20 nt, Human
aagacuauccaacuuaacau

SEQ ID NO: 2157249 - RNA, 20 nt, Human
aagacuugcauuuaaaugug

SEQ ID NO: 2157250 - RNA, 11 nt, Human
aagagccacag

SEQ ID NO: 2157251 - RNA, 13 nt, Human
aagaccuuucaaa

SEQ ID NO: 2157252 - RNA, 17 nt, Human
aagaggaugcugugaaa

SEQ ID NO: 2157253 - RNA, 17 nt, Human
guggccgcccaaggccc

SEQ ID NO: 2157254 - RNA, 14 nt, Human
aagaggaugcugug

SEQ ID NO: 2157255 - RNA, 22 nt, Human
aagagccacaggucuuuauguu

SEQ ID NO: 2157256 - RNA, 15 nt, Human
aagagccacaggucu

SEQ ID NO: 2157257 - RNA, 16 nt, Human
aagcccccccuuccac

SEQ ID NO: 2157258 - RNA, 19 nt, Human
aagcccugggaucacugug

SEQ ID NO: 2157259 - RNA, 17 nt, Human
gugugugcucugcuuca

SEQ ID NO: 2157260 - RNA, 13 nt, Human
guuagggaauggc

SEQ ID NO: 2157261 - RNA, 15 nt, Human
guucaaacauuuacc

SEQ ID NO: 2157262 - RNA, 20 nt, Human
guuagaauaauaaauauuua

SEQ ID NO: 2157263 - RNA, 22 nt, Human
guuacuuuucauauuugcacua

SEQ ID NO: 2157264 - RNA, 21 nt, Human
guuacuuuucauauuugcacu

SEQ ID NO: 2157265 - RNA, 18 nt, Human
guuacuuuucauauuugc

SEQ ID NO: 2157266 - RNA, 15 nt, Human
guuaggauggcagga

SEQ ID NO: 2157267 - RNA, 16 nt, Human
aauagacuaaaugaaa

SEQ ID NO: 2157268 - RNA, 15 nt, Human
aauagacuaaaugaa

SEQ ID NO: 2157269 - RNA, 21 nt, Human
aauacaccagguagaacacaa

SEQ ID NO: 2157270 - RNA, 16 nt, Human
uaaauguuaagaaaaa

SEQ ID NO: 2157271 - RNA, 15 nt, Human
uaacuagcuuggaaa

SEQ ID NO: 2157272 - RNA, 17 nt, Human
uaacuuccaugugaggg

SEQ ID NO: 2157273 - RNA, 15 nt, Human
uaagacguguuugug

SEQ ID NO: 2157274 - RNA, 19 nt, Human
uaaguuuccuuccagccca

SEQ ID NO: 2157275 - RNA, 21 nt, Human
uaaguuuccuuccagcccaga

SEQ ID NO: 2157276 - RNA, 11 nt, Human
aaucuauuuaa

SEQ ID NO: 2157277 - RNA, 17 nt, Human
aaucuauuuaucuucau

SEQ ID NO: 2157278 - RNA, 12 nt, Human
aaucuauuuaag

SEQ ID NO: 2157279 - RNA, 14 nt, Human
aaucccagcaauuu

SEQ ID NO: 2157280 - RNA, 18 nt, Human
aaugacuaauucuugcau

SEQ ID NO: 2157281 - RNA, 17 nt, Human
aaugacuaauucuugca

SEQ ID NO: 2157282 - RNA, 20 nt, Human
aaugacuaauucuugcauau

SEQ ID NO: 2157283 - RNA, 17 nt, Human
aaugagaggcauuuccc

SEQ ID NO: 2157284 - RNA, 17 nt, Human
aaugagauuaauuccuu

SEQ ID NO: 2157285 - RNA, 18 nt, Human
aaugagauuaauuccuuu

SEQ ID NO: 2157286 - RNA, 22 nt, Human
aaugagaagaaaauggaaccag

SEQ ID NO: 2157287 - RNA, 19 nt, Human
aaugaguuaccuacauuuu

SEQ ID NO: 2157288 - RNA, 19 nt, Human
uaauuuaaagccacaacca

SEQ ID NO: 2157289 - RNA, 12 nt, Human
uaauuuaaagcc

SEQ ID NO: 2157290 - RNA, 13 nt, Human
uaauuuauaaaaa

SEQ ID NO: 2157291 - RNA, 16 nt, Human
uaauuuauaaaaaggu

SEQ ID NO: 2157292 - RNA, 13 nt, Human
aaugcaaaaaucu

SEQ ID NO: 2157293 - RNA, 18 nt, Human
aauggauaaaaucugaua

SEQ ID NO: 2157294 - RNA, 19 nt, Human
aaugguuugcaaggaagcc

SEQ ID NO: 2157295 - RNA, 18 nt, Human
aaugguuugcaaggaagc

SEQ ID NO: 2157296 - RNA, 17 nt, Human
aaugguuugcaaggaag

SEQ ID NO: 2157297 - RNA, 15 nt, Human
uacagagaagugaau

SEQ ID NO: 2157298 - RNA, 23 nt, Human
uacagagaagugaauaacugcaa

SEQ ID NO: 2157299 - RNA, 18 nt, Human
uacaaugaugcuauuugc

SEQ ID NO: 2157300 - RNA, 14 nt, Human
aauggaaccaggcu

SEQ ID NO: 2157301 - RNA, 18 nt, Human
aaugcuuuagaaagguuu

SEQ ID NO: 2157302 - RNA, 17 nt, Human
aauggaaccaggcuugg

SEQ ID NO: 2157303 - RNA, 16 nt, Human
aauggaaccaggcuug

SEQ ID NO: 2157304 - RNA, 22 nt, Human
uaccuguguauuuuuuaaagcu

SEQ ID NO: 2157305 - RNA, 15 nt, Human
aauguuagauaguua

SEQ ID NO: 2157306 - RNA, 13 nt, Human
uacaggggccaga

SEQ ID NO: 2157307 - RNA, 20 nt, Human
uacagggcacaggccaugga

SEQ ID NO: 2157308 - RNA, 15 nt, Human
uacaggggccagaag

SEQ ID NO: 2157309 - RNA, 17 nt, Human
uacagggguucuggaaa

SEQ ID NO: 2157310 - RNA, 17 nt, Human
uaccaugugcuacaggg

SEQ ID NO: 2157311 - RNA, 22 nt, Human
aauuaaguuagggaauggcaca

SEQ ID NO: 2157312 - RNA, 18 nt, Human
acaggacuuaaaaugaca

SEQ ID NO: 2157313 - RNA, 21 nt, Human
acagcuucucauccugcaggc

SEQ ID NO: 2157314 - RNA, 20 nt, Human
acagcuucucauccugcagg

SEQ ID NO: 2157315 - RNA, 15 nt, Human
acagcuauauuucug

SEQ ID NO: 2157316 - RNA, 16 nt, Human
acagcaagucaggguu

SEQ ID NO: 2157317 - RNA, 12 nt, Human
acagcaagucag

SEQ ID NO: 2157318 - RNA, 13 nt, Human
acagcgcuaugca

SEQ ID NO: 2157319 - RNA, 16 nt, Human
uauggcagugucuuuc

SEQ ID NO: 2157320 - RNA, 13 nt, Human
uauggcagugucu

SEQ ID NO: 2157321 - RNA, 23 nt, Human
uaugggaaaugagaggcauuucc

SEQ ID NO: 2157322 - RNA, 11 nt, Human
acagaaaaacc

SEQ ID NO: 2157323 - RNA, 22 nt, Human
uaucaauuggaaaggaagaaaa

SEQ ID NO: 2157324 - RNA, 15 nt, Human
uauccccucuacucu

SEQ ID NO: 2157325 - RNA, 14 nt, Human
uauaacugcccagc

SEQ ID NO: 2157326 - RNA, 14 nt, Human
uauauauuuuaauu

SEQ ID NO: 2157327 - RNA, 22 nt, Human
uauagcccagccaggccccagg

SEQ ID NO: 2157328 - RNA, 14 nt, Human
uaggauguaaaucu

SEQ ID NO: 2157329 - RNA, 14 nt, Human
uaggauacugcugc

SEQ ID NO: 2157330 - RNA, 13 nt, Human
uaggaaaauauuu

SEQ ID NO: 2157331 - RNA, 22 nt, Human
uagggcaggagugagaggucuc

SEQ ID NO: 2157332 - RNA, 21 nt, Human
uagcuucaccccaaucccagc

SEQ ID NO: 2157333 - RNA, 20 nt, Human
uagcuuggaaacuggaugag

SEQ ID NO: 2157334 - RNA, 15 nt, Human
uagcuuggaaacugg

SEQ ID NO: 2157335 - RNA, 19 nt, Human
uagcuuuugugucuuacau

SEQ ID NO: 2157336 - RNA, 16 nt, Human
uagcuuuugugucuua

SEQ ID NO: 2157337 - RNA, 18 nt, Human
acaaaucuaggaaaauau

SEQ ID NO: 2157338 - RNA, 22 nt, Human
acaaaucuaggaaaauauuuug

SEQ ID NO: 2157339 - RNA, 12 nt, Human
acacaauacaau

SEQ ID NO: 2157340 - RNA, 14 nt, Human
acacaauacaauaa

SEQ ID NO: 2157341 - RNA, 18 nt, Human
acaaugaugcuauuugca

SEQ ID NO: 2157342 - RNA, 20 nt, Human
acaaugaugcuauuugcaau

SEQ ID NO: 2157343 - RNA, 15 nt, Human
uaguaaaaauacaaa

SEQ ID NO: 2157344 - RNA, 17 nt, Human
acacacagacucauauu

SEQ ID NO: 2157345 - RNA, 16 nt, Human
acacaggccugcucuc

SEQ ID NO: 2157346 - RNA, 12 nt, Human
acaaaacaaaaa

SEQ ID NO: 2157347 - RNA, 22 nt, Human
acaaaaagguaaaacuuuuuau

SEQ ID NO: 2157348 - RNA, 12 nt, Human
acaaaacaaaac

SEQ ID NO: 2157349 - RNA, 11 nt, Human
acaaaaaagug

SEQ ID NO: 2157350 - RNA, 12 nt, Human
acaaaaaagaag

SEQ ID NO: 2157351 - RNA, 22 nt, Human
acaaaggugaaaauuguuugua

SEQ ID NO: 2157352 - RNA, 15 nt, Human
uagagggaccucucc

SEQ ID NO: 2157353 - RNA, 19 nt, Human
uagagggaccucucccagg

SEQ ID NO: 2157354 - RNA, 20 nt, Human
uagagggaccucucccaggg

SEQ ID NO: 2157355 - RNA, 21 nt, Human
uagcacaacgugguacuauuu

SEQ ID NO: 2157356 - RNA, 12 nt, Human
aauuuggcuucu

SEQ ID NO: 2157357 - RNA, 18 nt, Human
aauuuggcuucuguuguc

SEQ ID NO: 2157358 - RNA, 20 nt, Human
uacuuuucauauuugcacua

SEQ ID NO: 2157359 - RNA, 19 nt, Human
uacuuuucauauuugcacu

SEQ ID NO: 2157360 - RNA, 20 nt, Human
acuacgggggggagaaggaa

SEQ ID NO: 2157361 - RNA, 20 nt, Human
acuagagggaccucucccag

SEQ ID NO: 2157362 - RNA, 21 nt, Human
acuagagggaccucucccagg

SEQ ID NO: 2157363 - RNA, 22 nt, Human
acuagagggaccucucccaggg

SEQ ID NO: 2157364 - RNA, 19 nt, Human
uccccaucgccagcugaug

SEQ ID NO: 2157365 - RNA, 20 nt, Human
uccccaucgccagcugauga

SEQ ID NO: 2157366 - RNA, 19 nt, Human
ucccccaccccauuucucu

SEQ ID NO: 2157367 - RNA, 14 nt, Human
uccccucucugcac

SEQ ID NO: 2157368 - RNA, 23 nt, Human
uccccguaugaguuagaauaaua

SEQ ID NO: 2157369 - RNA, 22 nt, Human
acucaauauuuuccaugaaaau

SEQ ID NO: 2157370 - RNA, 21 nt, Human
acucaauauuuuccaugaaaa

SEQ ID NO: 2157371 - RNA, 18 nt, Human
acucaauauuuuccauga

SEQ ID NO: 2157372 - RNA, 15 nt, Human
acucaauauuuucca

SEQ ID NO: 2157373 - RNA, 12 nt, Human
acucaauauuuu

SEQ ID NO: 2157374 - RNA, 19 nt, Human
acucacauggcuauguuuu

SEQ ID NO: 2157375 - RNA, 16 nt, Human
acucacauggcuaugu

SEQ ID NO: 2157376 - RNA, 23 nt, Human
acucaauauuuuccaugaaaaug

SEQ ID NO: 2157377 - RNA, 20 nt, Human
acucacauggcuauguuuua

SEQ ID NO: 2157378 - RNA, 16 nt, Human
acucaccucuaaaaca

SEQ ID NO: 2157379 - RNA, 22 nt, Human
ucccugacccuguauauagccc

SEQ ID NO: 2157380 - RNA, 17 nt, Human
ucccugacccuguauau

SEQ ID NO: 2157381 - RNA, 16 nt, Human
ucccugacccuguaua

SEQ ID NO: 2157382 - RNA, 17 nt, Human
acucagaagggagcuag

SEQ ID NO: 2157383 - RNA, 17 nt, Human
acugaaaaccucuccuc

SEQ ID NO: 2157384 - RNA, 15 nt, Human
acugaaaaccucucc

SEQ ID NO: 2157385 - RNA, 16 nt, Human
acugaaaaccucuccu

SEQ ID NO: 2157386 - RNA, 12 nt, Human
uccucuuguaaa

SEQ ID NO: 2157387 - RNA, 15 nt, Human
uccucuuuucucugc

SEQ ID NO: 2157388 - RNA, 21 nt, Human
uccucuuguaaauaaagcccu

SEQ ID NO: 2157389 - RNA, 19 nt, Human
uccucuuguaaauaaagcc

SEQ ID NO: 2157390 - RNA, 18 nt, Human
uccucuuguaaauaaagc

SEQ ID NO: 2157391 - RNA, 20 nt, Human
uccucuuguaaauaaagccc

SEQ ID NO: 2157392 - RNA, 12 nt, Human
acucuucucagc

SEQ ID NO: 2157393 - RNA, 19 nt, Human
acucgauucauauugaaua

SEQ ID NO: 2157394 - RNA, 23 nt, Human
uccggcccuccuacccugcgccc

SEQ ID NO: 2157395 - RNA, 21 nt, Human
uccggcccuccuacccugcgc

SEQ ID NO: 2157396 - RNA, 20 nt, Human
uccuacccugcgcccagucc

SEQ ID NO: 2157397 - RNA, 19 nt, Human
uccauuuguuaucugggaa

SEQ ID NO: 2157398 - RNA, 17 nt, Human
uccauuuguuaucuggg

SEQ ID NO: 2157399 - RNA, 23 nt, Human
acggcccuggccuugggcccucu

SEQ ID NO: 2157400 - RNA, 14 nt, Human
acggcccuggccuu

SEQ ID NO: 2157401 - RNA, 12 nt, Human
acggcccuggcc

SEQ ID NO: 2157402 - RNA, 12 nt, Human
uccaugaaaaug

SEQ ID NO: 2157403 - RNA, 20 nt, Human
acgccgcccuaaaagcacac

SEQ ID NO: 2157404 - RNA, 19 nt, Human
uccagggagcauuuuccuc

SEQ ID NO: 2157405 - RNA, 21 nt, Human
uccagggacgaagaagagcca

SEQ ID NO: 2157406 - RNA, 17 nt, Human
acgaagccaucuuucuu

SEQ ID NO: 2157407 - RNA, 15 nt, Human
acgaagaagagccac

SEQ ID NO: 2157408 - RNA, 18 nt, Human
acgaagaagagccacagu

SEQ ID NO: 2157409 - RNA, 17 nt, Human
acgaagaagagccacag

SEQ ID NO: 2157410 - RNA, 14 nt, Human
accugaaccuagga

SEQ ID NO: 2157411 - RNA, 16 nt, Human
accugaacugaacacc

SEQ ID NO: 2157412 - RNA, 14 nt, Human
ucauaaucuuugcu

SEQ ID NO: 2157413 - RNA, 15 nt, Human
ucauaaucuuugcuu

SEQ ID NO: 2157414 - RNA, 22 nt, Human
accugauuaacugaggcaucca

SEQ ID NO: 2157415 - RNA, 17 nt, Human
accugauuaacugaggc

SEQ ID NO: 2157416 - RNA, 18 nt, Human
ucauuuuucagaccuuuu

SEQ ID NO: 2157417 - RNA, 17 nt, Human
ucauuuuguaacaaaug

SEQ ID NO: 2157418 - RNA, 20 nt, Human
ucauuuuguaacaaaugaac

SEQ ID NO: 2157419 - RNA, 14 nt, Human
accuggacacaggc

SEQ ID NO: 2157420 - RNA, 17 nt, Human
accuggacacaggccug

SEQ ID NO: 2157421 - RNA, 21 nt, Human
accuggcuuuuuauuguauuu

SEQ ID NO: 2157422 - RNA, 17 nt, Human
accuugaugagcugugc

SEQ ID NO: 2157423 - RNA, 22 nt, Human
accuucuggccucccacagacu

SEQ ID NO: 2157424 - RNA, 18 nt, Human
accuucuggccucccaca

SEQ ID NO: 2157425 - RNA, 14 nt, Human
accuucagaauaag

SEQ ID NO: 2157426 - RNA, 22 nt, Human
accuucacugugaccuugagaa

SEQ ID NO: 2157427 - RNA, 17 nt, Human
accuucacacacagacu

SEQ ID NO: 2157428 - RNA, 23 nt, Human
accuucacacacagacuguuguc

SEQ ID NO: 2157429 - RNA, 22 nt, Human
accuucaguaacccccacugga

SEQ ID NO: 2157430 - RNA, 15 nt, Human
ucacaugggacaaag

SEQ ID NO: 2157431 - RNA, 21 nt, Human
accaaugccaaaaaaagacag

SEQ ID NO: 2157432 - RNA, 19 nt, Human
accaaaaacugaaagugaa

SEQ ID NO: 2157433 - RNA, 17 nt, Human
ucaagauucccaggagu

SEQ ID NO: 2157434 - RNA, 16 nt, Human
ucaagauucccaggag

SEQ ID NO: 2157435 - RNA, 15 nt, Human
ucaagauucccagga

SEQ ID NO: 2157436 - RNA, 20 nt, Human
ucaagauucccaggaguucu

SEQ ID NO: 2157437 - RNA, 19 nt, Human
ucaagauucccaggaguuc

SEQ ID NO: 2157438 - RNA, 22 nt, Human
ucaagauucccaggaguucugc

SEQ ID NO: 2157439 - RNA, 18 nt, Human
ucaauauuuuccaugaaa

SEQ ID NO: 2157440 - RNA, 17 nt, Human
ucaauauuuuccaugaa

SEQ ID NO: 2157441 - RNA, 16 nt, Human
ucaauauuuuccauga

SEQ ID NO: 2157442 - RNA, 15 nt, Human
ucaauauuuuccaug

SEQ ID NO: 2157443 - RNA, 24 nt, Human
ucaaguacauaaaguacauaacaa

SEQ ID NO: 2157444 - RNA, 21 nt, Human
accaaaaaagcuguauuuuga

SEQ ID NO: 2157445 - RNA, 15 nt, Human
acauuuuaaugcacc

SEQ ID NO: 2157446 - RNA, 19 nt, Human
acauuuuaaugcaccugaa

SEQ ID NO: 2157447 - RNA, 23 nt, Human
acauugggaaggggacccccgcc

SEQ ID NO: 2157448 - RNA, 19 nt, Human
acauugggaaggggacccc

SEQ ID NO: 2157449 - RNA, 15 nt, Human
acauugggaagggga

SEQ ID NO: 2157450 - RNA, 22 nt, Human
acauugguauucgcuugagaaa

SEQ ID NO: 2157451 - RNA, 14 nt, Human
uauuuugaucuuca

SEQ ID NO: 2157452 - RNA, 12 nt, Human
uauuuugaucuu

SEQ ID NO: 2157453 - RNA, 18 nt, Human
uauuuugaucuucaacaa

SEQ ID NO: 2157454 - RNA, 16 nt, Human
uauuuugaucuucaac

SEQ ID NO: 2157455 - RNA, 15 nt, Human
uauuuugaucuucaa

SEQ ID NO: 2157456 - RNA, 13 nt, Human
uauuuuuauuugu

SEQ ID NO: 2157457 - RNA, 17 nt, Human
uauuuuuauuuguuugu

SEQ ID NO: 2157458 - RNA, 16 nt, Human
uauuuuguaacuucca

SEQ ID NO: 2157459 - RNA, 22 nt, Human
uauuuguuaaugguuugaauau

SEQ ID NO: 2157460 - RNA, 20 nt, Human
uauuuguuaaugguuugaau

SEQ ID NO: 2157461 - RNA, 22 nt, Human
uauuuguaggggaacucauuug

SEQ ID NO: 2157462 - RNA, 20 nt, Human
acauguauaauauuuuuaau

SEQ ID NO: 2157463 - RNA, 19 nt, Human
acauguauaauauuuuuaa

SEQ ID NO: 2157464 - RNA, 14 nt, Human
acauguauaauauu

SEQ ID NO: 2157465 - RNA, 17 nt, Human
acauuaagccuuccaca

SEQ ID NO: 2157466 - RNA, 22 nt, Human
ucauaagagccacaggucuuua

SEQ ID NO: 2157467 - RNA, 14 nt, Human
ucauaaagaauugu

SEQ ID NO: 2157468 - RNA, 17 nt, Human
acccuggaaaaugaauc

SEQ ID NO: 2157469 - RNA, 17 nt, Human
acccccacuggacugac

SEQ ID NO: 2157470 - RNA, 22 nt, Human
acccugcgcccaguccuuccac

SEQ ID NO: 2157471 - RNA, 18 nt, Human
acccugaggccucuggaa

SEQ ID NO: 2157472 - RNA, 17 nt, Human
ucacuucacgcuuucag

SEQ ID NO: 2157473 - RNA, 22 nt, Human
accaugugcuacaggggccaga

SEQ ID NO: 2157474 - RNA, 23 nt, Human
accaugcgacacugggaggccag

SEQ ID NO: 2157475 - RNA, 22 nt, Human
accaugcgacacugggaggcca

SEQ ID NO: 2157476 - RNA, 17 nt, Human
acccagcaacagaaaaa

SEQ ID NO: 2157477 - RNA, 18 nt, Human
ucagaauuagcugcuucu

SEQ ID NO: 2157478 - RNA, 13 nt, Human
ucguucucccugg

SEQ ID NO: 2157479 - RNA, 22 nt, Human
acuguggggaaccaauugcuuu

SEQ ID NO: 2157480 - RNA, 20 nt, Human
ucuaaagaguuuauuuuaag

SEQ ID NO: 2157481 - RNA, 21 nt, Human
ucuaaagaguuuauuuuaaga

SEQ ID NO: 2157482 - RNA, 20 nt, Human
acugggccauguugugccuc

SEQ ID NO: 2157483 - RNA, 14 nt, Human
ucgcccucccaggc

SEQ ID NO: 2157484 - RNA, 13 nt, Human
ucgcccucccagg

SEQ ID NO: 2157485 - RNA, 17 nt, Human
ucgcccucccaggcucu

SEQ ID NO: 2157486 - RNA, 17 nt, Human
acugaaauauacacaca

SEQ ID NO: 2157487 - RNA, 15 nt, Human
acugaaauauacaca

SEQ ID NO: 2157488 - RNA, 16 nt, Human
acugaaauauacacac

SEQ ID NO: 2157489 - RNA, 15 nt, Human
acuguacugggccau

SEQ ID NO: 2157490 - RNA, 16 nt, Human
acuguccuccaagcca

SEQ ID NO: 2157491 - RNA, 18 nt, Human
acuguccuccaagccagc

SEQ ID NO: 2157492 - RNA, 22 nt, Human
acuguaucucuaauacagugug

SEQ ID NO: 2157493 - RNA, 22 nt, Human
acuuccaugugaggguuuucag

SEQ ID NO: 2157494 - RNA, 20 nt, Human
acuuccagugcaacacugaa

SEQ ID NO: 2157495 - RNA, 20 nt, Human
acuucaggcuugauaauacu

SEQ ID NO: 2157496 - RNA, 18 nt, Human
acuucaggcuugauaaua

SEQ ID NO: 2157497 - RNA, 16 nt, Human
acuucaugcaggugaa

SEQ ID NO: 2157498 - RNA, 23 nt, Human
acuucauggccuuugauaaaugu

SEQ ID NO: 2157499 - RNA, 22 nt, Human
acuucauggccuuugauaaaug

SEQ ID NO: 2157500 - RNA, 16 nt, Human
acuucccccaaauuua

SEQ ID NO: 2157501 - RNA, 11 nt, Human
acuucccccaa

SEQ ID NO: 2157502 - RNA, 16 nt, Human
ucuaggaaaauauuuu

SEQ ID NO: 2157503 - RNA, 22 nt, Human
ucuaggaaaauauuuugaucuu

SEQ ID NO: 2157504 - RNA, 21 nt, Human
ucuaggaaaauauuuugaucu

SEQ ID NO: 2157505 - RNA, 20 nt, Human
acuuccugagggaucuauac

SEQ ID NO: 2157506 - RNA, 22 nt, Human
acuucggcagauacugucucuu

SEQ ID NO: 2157507 - RNA, 14 nt, Human
acuucucuuccuug

SEQ ID NO: 2157508 - RNA, 20 nt, Human
acuugacagaacacugucuu

SEQ ID NO: 2157509 - RNA, 18 nt, Human
acuugacagaacacuguc

SEQ ID NO: 2157510 - RNA, 17 nt, Human
acuugacagaacacugu

SEQ ID NO: 2157511 - RNA, 18 nt, Human
acuugaguuacaccagac

SEQ ID NO: 2157512 - RNA, 21 nt, Human
acuugaguuacaccagaccug

SEQ ID NO: 2157513 - RNA, 22 nt, Human
acuugccgcgucgcccucccag

SEQ ID NO: 2157514 - RNA, 23 nt, Human
acuugccgcgucgcccucccagg

SEQ ID NO: 2157515 - RNA, 10 nt, Human
acuuugugcu

SEQ ID NO: 2157516 - RNA, 18 nt, Human
agaaagacagagcuggga

SEQ ID NO: 2157517 - RNA, 22 nt, Human
agaaacuguucccaccugcugg

SEQ ID NO: 2157518 - RNA, 15 nt, Human
agaaacuguucccac

SEQ ID NO: 2157519 - RNA, 21 nt, Human
agaaacuguucccaccugcug

SEQ ID NO: 2157520 - RNA, 15 nt, Human
agaagcauacaacuu

SEQ ID NO: 2157521 - RNA, 15 nt, Human
agaacuuuauuucca

SEQ ID NO: 2157522 - RNA, 13 nt, Human
ucuggccucccac

SEQ ID NO: 2157523 - RNA, 14 nt, Human
ucuggccucccaca

SEQ ID NO: 2157524 - RNA, 13 nt, Human
agaauauaauacu

SEQ ID NO: 2157525 - RNA, 23 nt, Human
agaauaguugaaccuauuucucu

SEQ ID NO: 2157526 - RNA, 21 nt, Human
agaauaguugaaccuauuucu

SEQ ID NO: 2157527 - RNA, 16 nt, Human
agaauauaaaaaacuu

SEQ ID NO: 2157528 - RNA, 20 nt, Human
agaauaguugaaccuauuuc

SEQ ID NO: 2157529 - RNA, 16 nt, Human
agaaggagacaggcag

SEQ ID NO: 2157530 - RNA, 19 nt, Human
agaagcucucgggcuagga

SEQ ID NO: 2157531 - RNA, 16 nt, Human
ugaaaaggcaaaaagc

SEQ ID NO: 2157532 - RNA, 19 nt, Human
ucuuugguuuaauuuaaag

SEQ ID NO: 2157533 - RNA, 17 nt, Human
ucuuugugucaacauga

SEQ ID NO: 2157534 - RNA, 9 nt, Human
ugaaaaaga

SEQ ID NO: 2157535 - RNA, 11 nt, Human
agagcugaggc

SEQ ID NO: 2157536 - RNA, 15 nt, Human
ucuuuauguugaguc

SEQ ID NO: 2157537 - RNA, 17 nt, Human
ucuuggcuuggugagga

SEQ ID NO: 2157538 - RNA, 14 nt, Human
agaccugucuccug

SEQ ID NO: 2157539 - RNA, 16 nt, Human
agaccugucuccuggc

SEQ ID NO: 2157540 - RNA, 15 nt, Human
agaccugucuccugg

SEQ ID NO: 2157541 - RNA, 19 nt, Human
ucuucccauucuccauuug

SEQ ID NO: 2157542 - RNA, 15 nt, Human
ucuucccauucucca

SEQ ID NO: 2157543 - RNA, 14 nt, Human
ucuucccauucucc

SEQ ID NO: 2157544 - RNA, 13 nt, Human
ucuucccauucuc

SEQ ID NO: 2157545 - RNA, 20 nt, Human
ucuucaaccagggauuguuu

SEQ ID NO: 2157546 - RNA, 12 nt, Human
agacauugcacc

SEQ ID NO: 2157547 - RNA, 16 nt, Human
agaguuucaaccauga

SEQ ID NO: 2157548 - RNA, 18 nt, Human
ugaaaguccagaaacugu

SEQ ID NO: 2157549 - RNA, 16 nt, Human
ugaaaguccagaaacu

SEQ ID NO: 2157550 - RNA, 18 nt, Human
ugaagccuuucuuuugga

SEQ ID NO: 2157551 - RNA, 22 nt, Human
ugaaggggccaaggagggugag

SEQ ID NO: 2157552 - RNA, 13 nt, Human
ugaauaaagugcu

SEQ ID NO: 2157553 - RNA, 17 nt, Human
ugagaacuuuauuucca

SEQ ID NO: 2157554 - RNA, 20 nt, Human
ugagaagaaaauggaaccag

SEQ ID NO: 2157555 - RNA, 22 nt, Human
ugagaagaaaauggaaccaggc

SEQ ID NO: 2157556 - RNA, 22 nt, Human
ugagaagauucuucccauucuc

SEQ ID NO: 2157557 - RNA, 23 nt, Human
ugagaagauucuucccauucucc

SEQ ID NO: 2157558 - RNA, 12 nt, Human
agcaagaggagg

SEQ ID NO: 2157559 - RNA, 17 nt, Human
agcaagacuguuagccc

SEQ ID NO: 2157560 - RNA, 22 nt, Human
agauucccaggaguucugcuca

SEQ ID NO: 2157561 - RNA, 17 nt, Human
agauucccaggaguucu

SEQ ID NO: 2157562 - RNA, 19 nt, Human
agauucccaggaguucugc

SEQ ID NO: 2157563 - RNA, 10 nt, Human
agauggaaag

SEQ ID NO: 2157564 - RNA, 14 nt, Human
ugacucacaccuga

SEQ ID NO: 2157565 - RNA, 19 nt, Human
ugacucacaccugaacuga

SEQ ID NO: 2157566 - RNA, 16 nt, Human
ugacucaagauuccca

SEQ ID NO: 2157567 - RNA, 15 nt, Human
ugacucaagauuccc

SEQ ID NO: 2157568 - RNA, 14 nt, Human
ugacucaagauucc

SEQ ID NO: 2157569 - RNA, 22 nt, Human
ugacucaagauucccaggaguu

SEQ ID NO: 2157570 - RNA, 21 nt, Human
ugacucaagauucccaggagu

SEQ ID NO: 2157571 - RNA, 20 nt, Human
ugacucaagauucccaggag

SEQ ID NO: 2157572 - RNA, 19 nt, Human
ugacucaagauucccagga

SEQ ID NO: 2157573 - RNA, 18 nt, Human
ugacucaagauucccagg

SEQ ID NO: 2157574 - RNA, 17 nt, Human
ugacucaagauucccag

SEQ ID NO: 2157575 - RNA, 17 nt, Human
ugaccuucuaggaagcu

SEQ ID NO: 2157576 - RNA, 15 nt, Human
ugauauguauuguuu

SEQ ID NO: 2157577 - RNA, 16 nt, Human
ugauauuugugcauuu

SEQ ID NO: 2157578 - RNA, 19 nt, Human
ugauauuugugcauuuucu

SEQ ID NO: 2157579 - RNA, 17 nt, Human
ugauauuugugcauuuu

SEQ ID NO: 2157580 - RNA, 18 nt, Human
ugaucaaagccacacucu

SEQ ID NO: 2157581 - RNA, 19 nt, Human
agcauugauauuugugcau

SEQ ID NO: 2157582 - RNA, 21 nt, Human
agcauugauauuugugcauuu

SEQ ID NO: 2157583 - RNA, 18 nt, Human
agcauugauauuugugca

SEQ ID NO: 2157584 - RNA, 15 nt, Human
agcauugauauuugu

SEQ ID NO: 2157585 - RNA, 23 nt, Human
agcauugugugugcagacuucag

SEQ ID NO: 2157586 - RNA, 20 nt, Human
agcauuucgcgauggacaga

SEQ ID NO: 2157587 - RNA, 21 nt, Human
agcauugggugagguaauaaa

SEQ ID NO: 2157588 - RNA, 22 nt, Human
ugaguaaaauaaauauugucuu

SEQ ID NO: 2157589 - RNA, 16 nt, Human
ugagacacaggaugaa

SEQ ID NO: 2157590 - RNA, 19 nt, Human
ugagacacaggaugaagca

SEQ ID NO: 2157591 - RNA, 14 nt, Human
ugagucaauuggaa

SEQ ID NO: 2157592 - RNA, 23 nt, Human
ugagucacaaagaacauguagaa

SEQ ID NO: 2157593 - RNA, 23 nt, Human
agccaugggcacaaagggcccag

SEQ ID NO: 2157594 - RNA, 22 nt, Human
agccaugggcacaaagggccca

SEQ ID NO: 2157595 - RNA, 15 nt, Human
agccaggccccaggc

SEQ ID NO: 2157596 - RNA, 14 nt, Human
agccaggccccagg

SEQ ID NO: 2157597 - RNA, 13 nt, Human
agccacugaagua

SEQ ID NO: 2157598 - RNA, 19 nt, Human
ugauuaauuaaauagcuuu

SEQ ID NO: 2157599 - RNA, 15 nt, Human
agccacugagcaaug

SEQ ID NO: 2157600 - RNA, 20 nt, Human
ugaugacaacuacagaaaaa

SEQ ID NO: 2157601 - RNA, 19 nt, Human
ugaugagcugugcacaaag

SEQ ID NO: 2157602 - RNA, 24 nt, Human
ugaugagcugugcacaaaguggca

SEQ ID NO: 2157603 - RNA, 12 nt, Human
agcuagccagag

SEQ ID NO: 2157604 - RNA, 19 nt, Human
agcuagccagaggacugug

SEQ ID NO: 2157605 - RNA, 17 nt, Human
agcuagccagaggacug

SEQ ID NO: 2157606 - RNA, 22 nt, Human
agcggugcuguccucagguggc

SEQ ID NO: 2157607 - RNA, 18 nt, Human
agcguacucaucaucaac

SEQ ID NO: 2157608 - RNA, 14 nt, Human
agcuaccucaacca

SEQ ID NO: 2157609 - RNA, 23 nt, Human
agcuaccucaaccaaugccaaaa

SEQ ID NO: 2157610 - RNA, 18 nt, Human
agcucauaagagccacag

SEQ ID NO: 2157611 - RNA, 18 nt, Human
ugcccagcggacaguggc

SEQ ID NO: 2157612 - RNA, 18 nt, Human
ugcauaagguuuuuaugc

SEQ ID NO: 2157613 - RNA, 12 nt, Human
ugcauaccaacc

SEQ ID NO: 2157614 - RNA, 14 nt, Human
ugcauaccaaccug

SEQ ID NO: 2157615 - RNA, 18 nt, Human
ugcauaccaaccugggca

SEQ ID NO: 2157616 - RNA, 13 nt, Human
ugccaaguuuguu

SEQ ID NO: 2157617 - RNA, 16 nt, Human
agccuuccacacucac

SEQ ID NO: 2157618 - RNA, 19 nt, Human
ugcaccauuuaaaaacagg

SEQ ID NO: 2157619 - RNA, 18 nt, Human
aggccaaggcggguggau

SEQ ID NO: 2157620 - RNA, 20 nt, Human
uggccaugccucagcccuga

SEQ ID NO: 2157621 - RNA, 18 nt, Human
uggccaugccucagcccu

SEQ ID NO: 2157622 - RNA, 17 nt, Human
uggccaugccucagccc

SEQ ID NO: 2157623 - RNA, 15 nt, Human
uggccaugccucagc

SEQ ID NO: 2157624 - RNA, 14 nt, Human
uggccaugccucag

SEQ ID NO: 2157625 - RNA, 17 nt, Human
uggccaugaugacaacu

SEQ ID NO: 2157626 - RNA, 21 nt, Human
uggccugaagaguccucugaa

SEQ ID NO: 2157627 - RNA, 16 nt, Human
uggccaaacaaguguu

SEQ ID NO: 2157628 - RNA, 22 nt, Human
uggccaugaagaggaugcugug

SEQ ID NO: 2157629 - RNA, 20 nt, Human
aggcaaaggguccagaagga

SEQ ID NO: 2157630 - RNA, 19 nt, Human
aggcaaaggguccagaagg

SEQ ID NO: 2157631 - RNA, 16 nt, Human
aggcaaaggguccaga

SEQ ID NO: 2157632 - RNA, 11 nt, Human
uggaccugccc

SEQ ID NO: 2157633 - RNA, 13 nt, Human
uggacacaggccu

SEQ ID NO: 2157634 - RNA, 15 nt, Human
uggacacaggccugc

SEQ ID NO: 2157635 - RNA, 17 nt, Human
aggcaagguuauaugca

SEQ ID NO: 2157636 - RNA, 18 nt, Human
aggcaccucaagaagaag

SEQ ID NO: 2157637 - RNA, 12 nt, Human
aggcaccucaag

SEQ ID NO: 2157638 - RNA, 15 nt, Human
ugcuuguauagguuu

SEQ ID NO: 2157639 - RNA, 21 nt, Human
ugcuuuuggggggcauauauu

SEQ ID NO: 2157640 - RNA, 19 nt, Human
uggaagggauggggugcca

SEQ ID NO: 2157641 - RNA, 13 nt, Human
aggauacugcugc

SEQ ID NO: 2157642 - RNA, 22 nt, Human
aggagcugacucacaccugaac

SEQ ID NO: 2157643 - RNA, 16 nt, Human
aggagcuuccuguccu

SEQ ID NO: 2157644 - RNA, 11 nt, Human
aggagcuuccu

SEQ ID NO: 2157645 - RNA, 20 nt, Human
aggagcuuccuguccuccca

SEQ ID NO: 2157646 - RNA, 15 nt, Human
aggaaauagaauuga

SEQ ID NO: 2157647 - RNA, 14 nt, Human
agcuuuaccagcug

SEQ ID NO: 2157648 - RNA, 13 nt, Human
agcuuuaaaagaa

SEQ ID NO: 2157649 - RNA, 15 nt, Human
agcuuuaaaagaaaa

SEQ ID NO: 2157650 - RNA, 23 nt, Human
ugcucauucuaaugauggcccau

SEQ ID NO: 2157651 - RNA, 21 nt, Human
ugcucauucuaaugauggccc

SEQ ID NO: 2157652 - RNA, 19 nt, Human
ugcucauucuaaugauggc

SEQ ID NO: 2157653 - RNA, 17 nt, Human
ugccuuuggcagaguuc

SEQ ID NO: 2157654 - RNA, 14 nt, Human
agcuucuuugccaa

SEQ ID NO: 2157655 - RNA, 19 nt, Human
agcuggccccgccgccugg

SEQ ID NO: 2157656 - RNA, 18 nt, Human
agcuggccccgccgccug

SEQ ID NO: 2157657 - RNA, 15 nt, Human
agcuggccccgccgc

SEQ ID NO: 2157658 - RNA, 14 nt, Human
agcuggccccgccg

SEQ ID NO: 2157659 - RNA, 22 nt, Human
ugcccagcggacaguggcagga

SEQ ID NO: 2157660 - RNA, 21 nt, Human
ugcccagcggacaguggcagg

SEQ ID NO: 2157661 - RNA, 20 nt, Human
ugcccagcggacaguggcag

SEQ ID NO: 2157662 - RNA, 19 nt, Human
ugcccagcggacaguggca

SEQ ID NO: 2157663 - RNA, 13 nt, Human
agcuggccccgcc

SEQ ID NO: 2157664 - RNA, 21 nt, Human
uggucagguauuucaguucuu

SEQ ID NO: 2157665 - RNA, 20 nt, Human
agguauucaauauccuuugc

SEQ ID NO: 2157666 - RNA, 20 nt, Human
uggguggggaggaaauagaa

SEQ ID NO: 2157667 - RNA, 20 nt, Human
aggggcgugggaguggccug

SEQ ID NO: 2157668 - RNA, 23 nt, Human
aggggcgccgcaaaccacacugg

SEQ ID NO: 2157669 - RNA, 18 nt, Human
ugggccauguugugccuc

SEQ ID NO: 2157670 - RNA, 16 nt, Human
ugggcacccacccugg

SEQ ID NO: 2157671 - RNA, 14 nt, Human
ugggcacccacccu

SEQ ID NO: 2157672 - RNA, 20 nt, Human
ugggcacccacccugggacc

SEQ ID NO: 2157673 - RNA, 22 nt, Human
ugggcacacgccucccacuggg

SEQ ID NO: 2157674 - RNA, 17 nt, Human
aggccuuaucuccaaga

SEQ ID NO: 2157675 - RNA, 19 nt, Human
aggccuuaucuccaagacc

SEQ ID NO: 2157676 - RNA, 20 nt, Human
ugggagguggagguugcagu

SEQ ID NO: 2157677 - RNA, 20 nt, Human
agggccgggcagaggggcag

SEQ ID NO: 2157678 - RNA, 23 nt, Human
agggccgccagggagaccuggac

SEQ ID NO: 2157679 - RNA, 20 nt, Human
agggccgccagggagaccug

SEQ ID NO: 2157680 - RNA, 16 nt, Human
agggccgggcagaggg

SEQ ID NO: 2157681 - RNA, 18 nt, Human
agggccgggcagaggggc

SEQ ID NO: 2157682 - RNA, 18 nt, Human
ugggcccacaaaggcaaa

SEQ ID NO: 2157683 - RNA, 16 nt, Human
ugggcugggcccacaa

SEQ ID NO: 2157684 - RNA, 15 nt, Human
aguacaauucuuacu

SEQ ID NO: 2157685 - RNA, 19 nt, Human
aguacaccacaagggucac

SEQ ID NO: 2157686 - RNA, 21 nt, Human
aguagaaagacagagcuggga

SEQ ID NO: 2157687 - RNA, 20 nt, Human
aguagaaagacagagcuggg

SEQ ID NO: 2157688 - RNA, 12 nt, Human
aguaaaaauaca

SEQ ID NO: 2157689 - RNA, 13 nt, Human
aguaaaaauacaa

SEQ ID NO: 2157690 - RNA, 18 nt, Human
aguaaggaguucauuuua

SEQ ID NO: 2157691 - RNA, 19 nt, Human
aguaaaaauacaaaaauua

SEQ ID NO: 2157692 - RNA, 13 nt, Human
uguacuuugugcu

SEQ ID NO: 2157693 - RNA, 11 nt, Human
uguagaaaaca

SEQ ID NO: 2157694 - RNA, 19 nt, Human
uguaacuuccaugugaggg

SEQ ID NO: 2157695 - RNA, 13 nt, Human
aggugcagccaga

SEQ ID NO: 2157696 - RNA, 12 nt, Human
agguggccaugc

SEQ ID NO: 2157697 - RNA, 18 nt, Human
aggugcagccagaggcac

SEQ ID NO: 2157698 - RNA, 17 nt, Human
aggugcagccagaggca

SEQ ID NO: 2157699 - RNA, 16 nt, Human
aggugcagccagaggc

SEQ ID NO: 2157700 - RNA, 15 nt, Human
aggugcagccagagg

SEQ ID NO: 2157701 - RNA, 14 nt, Human
aggugcagccagag

SEQ ID NO: 2157702 - RNA, 19 nt, Human
agguggccaugccucagcc

SEQ ID NO: 2157703 - RNA, 18 nt, Human
agguggccaugccucagc

SEQ ID NO: 2157704 - RNA, 15 nt, Human
aggugcaaccaggga

SEQ ID NO: 2157705 - RNA, 13 nt, Human
aggugcaaccagg

SEQ ID NO: 2157706 - RNA, 22 nt, Human
ugucaggggcggggagggugac

SEQ ID NO: 2157707 - RNA, 18 nt, Human
aguagugccuuuacuuca

SEQ ID NO: 2157708 - RNA, 18 nt, Human
aguaggggaagacaugca

SEQ ID NO: 2157709 - RNA, 17 nt, Human
aguaggcucauuuacug

SEQ ID NO: 2157710 - RNA, 17 nt, Human
uguauuuuuuaaagcua

SEQ ID NO: 2157711 - RNA, 16 nt, Human
uguauuuuuuaaagcu

SEQ ID NO: 2157712 - RNA, 14 nt, Human
uguauuuuuuaaag

SEQ ID NO: 2157713 - RNA, 19 nt, Human
agucagaauuagcugcuuc

SEQ ID NO: 2157714 - RNA, 14 nt, Human
ugucuaaaaaacaa

SEQ ID NO: 2157715 - RNA, 13 nt, Human
ugucuaaaaaaca

SEQ ID NO: 2157716 - RNA, 18 nt, Human
ugucuaaaaaacaaaaca

SEQ ID NO: 2157717 - RNA, 20 nt, Human
aguccagaaacuguucccac

SEQ ID NO: 2157718 - RNA, 14 nt, Human
ugugguuaaugcca

SEQ ID NO: 2157719 - RNA, 15 nt, Human
ugugguuaaugccau

SEQ ID NO: 2157720 - RNA, 20 nt, Human
ugugguuaaugccauggaca

SEQ ID NO: 2157721 - RNA, 17 nt, Human
uguuaaugguuugaaua

SEQ ID NO: 2157722 - RNA, 15 nt, Human
uguuaaugcuuucug

SEQ ID NO: 2157723 - RNA, 20 nt, Human
uguuaacauuuuugguaguc

SEQ ID NO: 2157724 - RNA, 17 nt, Human
uguuaacauuuuuggua

SEQ ID NO: 2157725 - RNA, 15 nt, Human
agugccaaguuuguu

SEQ ID NO: 2157726 - RNA, 19 nt, Human
agugccccauucuuuugua

SEQ ID NO: 2157727 - RNA, 20 nt, Human
agugccccauucuuuuguaa

SEQ ID NO: 2157728 - RNA, 16 nt, Human
uguggauuuuuuccua

SEQ ID NO: 2157729 - RNA, 14 nt, Human
ugugcucugcuuca

SEQ ID NO: 2157730 - RNA, 14 nt, Human
ugugccucccuggu

SEQ ID NO: 2157731 - RNA, 16 nt, Human
ugugccucccugguga

SEQ ID NO: 2157732 - RNA, 15 nt, Human
aguuagaauaauaaa

SEQ ID NO: 2157733 - RNA, 19 nt, Human
aguuagaauaauaaauauu

SEQ ID NO: 2157734 - RNA, 18 nt, Human
aguuagaauaauaaauau

SEQ ID NO: 2157735 - RNA, 22 nt, Human
aguggaaagacagcuucucauc

SEQ ID NO: 2157736 - RNA, 19 nt, Human
aguggagaacugggcuugc

SEQ ID NO: 2157737 - RNA, 19 nt, Human
uguuauccuuuuuuaaaag

SEQ ID NO: 2157738 - RNA, 13 nt, Human
uguuauccuauuu

SEQ ID NO: 2157739 - RNA, 15 nt, Human
uguucuacuuuguuc

SEQ ID NO: 2157740 - RNA, 21 nt, Human
aguucgaugggcccaauucuu

SEQ ID NO: 2157741 - RNA, 14 nt, Human
uguuuaugcuuuug

SEQ ID NO: 2157742 - RNA, 19 nt, Human
uguuuauuaguuuugcaua

SEQ ID NO: 2157743 - RNA, 22 nt, Human
uguugguuacccuccuagcuuu

SEQ ID NO: 2157744 - RNA, 16 nt, Human
uguugugccucccugg

SEQ ID NO: 2157745 - RNA, 18 nt, Human
uguuguuccuuuugaaag

SEQ ID NO: 2157746 - RNA, 14 nt, Human
uguuguuccuuuug

SEQ ID NO: 2157747 - RNA, 15 nt, Human
uguuguuccuuuuga

SEQ ID NO: 2157748 - RNA, 22 nt, Human
uuaaucuccaccagucauuuuu

SEQ ID NO: 2157749 - RNA, 22 nt, Human
uuaagggaguguacucccaggg

SEQ ID NO: 2157750 - RNA, 18 nt, Human
uuaaaaaaaucaaaacaa

SEQ ID NO: 2157751 - RNA, 12 nt, Human
uuaaaaaaauca

SEQ ID NO: 2157752 - RNA, 18 nt, Human
uuaaaaaaagaagagaaa

SEQ ID NO: 2157753 - RNA, 12 nt, Human
uuaaaaaaagaa

SEQ ID NO: 2157754 - RNA, 12 nt, Human
uuaaaguauuuu

SEQ ID NO: 2157755 - RNA, 22 nt, Human
uuaaacaaauguaugauuacau

SEQ ID NO: 2157756 - RNA, 15 nt, Human
auaaucuauaugcug

SEQ ID NO: 2157757 - RNA, 22 nt, Human
auaauacuauauuuauacugua

SEQ ID NO: 2157758 - RNA, 16 nt, Human
uuacugaagccuuucu

SEQ ID NO: 2157759 - RNA, 20 nt, Human
uuagaacacugguuuaaagg

SEQ ID NO: 2157760 - RNA, 18 nt, Human
uuacccuccuagcuuucc

SEQ ID NO: 2157761 - RNA, 20 nt, Human
auaaccaugugaaaaggcaa

SEQ ID NO: 2157762 - RNA, 11 nt, Human
auaaauauuua

SEQ ID NO: 2157763 - RNA, 23 nt, Human
auaaauauugucuuuuuguaugu

SEQ ID NO: 2157764 - RNA, 21 nt, Human
auaaauauugucuuuuuguau

SEQ ID NO: 2157765 - RNA, 20 nt, Human
auaaauauugucuuuuugua

SEQ ID NO: 2157766 - RNA, 22 nt, Human
uuugggaaaaaaacauacacaa

SEQ ID NO: 2157767 - RNA, 23 nt, Human
augucaggggcggggagggugac

SEQ ID NO: 2157768 - RNA, 21 nt, Human
auguagucagaauuagcugcu

SEQ ID NO: 2157769 - RNA, 20 nt, Human
uuuguaggggaacucauuug

SEQ ID NO: 2157770 - RNA, 18 nt, Human
uuuguaggggaacucauu

SEQ ID NO: 2157771 - RNA, 19 nt, Human
augucuguaucacucugug

SEQ ID NO: 2157772 - RNA, 13 nt, Human
uuuuaacucaaua

SEQ ID NO: 2157773 - RNA, 21 nt, Human
uuuuaaccccgucaacaaauc

SEQ ID NO: 2157774 - RNA, 20 nt, Human
uuuuaaccccgucaacaaau

SEQ ID NO: 2157775 - RNA, 18 nt, Human
uuuuaaccccgucaacaa

SEQ ID NO: 2157776 - RNA, 16 nt, Human
uuuuaaccccgucaac

SEQ ID NO: 2157777 - RNA, 19 nt, Human
uuuuaagacguguuugugu

SEQ ID NO: 2157778 - RNA, 13 nt, Human
uuuguuugugcau

SEQ ID NO: 2157779 - RNA, 13 nt, Human
auguugaggugga

SEQ ID NO: 2157780 - RNA, 18 nt, Human
uuuuagauacuuugcuag

SEQ ID NO: 2157781 - RNA, 13 nt, Human
uuuucagcauuga

SEQ ID NO: 2157782 - RNA, 19 nt, Human
uuuuccaugaaaaugcaac

SEQ ID NO: 2157783 - RNA, 18 nt, Human
uuuuccaugaaaaugcaa

SEQ ID NO: 2157784 - RNA, 13 nt, Human
uuuuaugcauguu

SEQ ID NO: 2157785 - RNA, 19 nt, Human
uuuuaugccuuuuauuucu

SEQ ID NO: 2157786 - RNA, 17 nt, Human
auguuuuuguguauuug

SEQ ID NO: 2157787 - RNA, 18 nt, Human
auguugugccucccuggu

SEQ ID NO: 2157788 - RNA, 23 nt, Human
auguuuauuucauaaagaauugu

SEQ ID NO: 2157789 - RNA, 13 nt, Human
auuacucuuucuc

SEQ ID NO: 2157790 - RNA, 20 nt, Human
auuaauauggggaugcagca

SEQ ID NO: 2157791 - RNA, 12 nt, Human
uuuuuuaaaaaa

SEQ ID NO: 2157792 - RNA, 23 nt, Human
auucccuucgacagcauuuuccu

SEQ ID NO: 2157793 - RNA, 20 nt, Human
auucccuucgacagcauuuu

SEQ ID NO: 2157794 - RNA, 17 nt, Human
auuuaacagggagggga

SEQ ID NO: 2157795 - RNA, 15 nt, Human
auuuaaacaaacaaa

SEQ ID NO: 2157796 - RNA, 21 nt, Human
auuguuugggauccuauugaa

SEQ ID NO: 2157797 - RNA, 12 nt, Human
auuguuugaacc

SEQ ID NO: 2157798 - RNA, 15 nt, Human
auugucuuuuuguau

SEQ ID NO: 2157799 - RNA, 15 nt, Human
auucuacuugcucug

SEQ ID NO: 2157800 - RNA, 13 nt, Human
auucuacuugcuc

SEQ ID NO: 2157801 - RNA, 12 nt, Human
auucuacuugcu

SEQ ID NO: 2157802 - RNA, 23 nt, Human
auucuacuugcucuggaccugcc

SEQ ID NO: 2157803 - RNA, 21 nt, Human
auucuacuugcucuggaccug

SEQ ID NO: 2157804 - RNA, 20 nt, Human
auucuacuugcucuggaccu

SEQ ID NO: 2157805 - RNA, 19 nt, Human
auucuacuugcucuggacc

SEQ ID NO: 2157806 - RNA, 18 nt, Human
auucuacuugcucuggac

SEQ ID NO: 2157807 - RNA, 17 nt, Human
auucuacuugcucugga

SEQ ID NO: 2157808 - RNA, 16 nt, Human
auucuacuugcucugg

SEQ ID NO: 2157809 - RNA, 22 nt, Human
auucuacuugcucuggaccugc

SEQ ID NO: 2157810 - RNA, 22 nt, Human
auuuguaggggaacucauuugg

SEQ ID NO: 2157811 - RNA, 19 nt, Human
auuuguaggggaacucauu

SEQ ID NO: 2157812 - RNA, 22 nt, Human
auuuuauuuguaggggaacuca

SEQ ID NO: 2157813 - RNA, 16 nt, Human
auuuaccuuuuugaaa

SEQ ID NO: 2157814 - RNA, 21 nt, Human
auuuagcuccaaaccuucaca

SEQ ID NO: 2157815 - RNA, 14 nt, Human
auuugguuuuccug

SEQ ID NO: 2157816 - RNA, 16 nt, Human
auuugguuuuccugua

SEQ ID NO: 2157817 - RNA, 15 nt, Human
auauaaauaaaacau

SEQ ID NO: 2157818 - RNA, 18 nt, Human
auauaaauaaaacauuuu

SEQ ID NO: 2157819 - RNA, 13 nt, Human
auauauauuuuaa

SEQ ID NO: 2157820 - RNA, 13 nt, Human
uucacuucacgcu

SEQ ID NO: 2157821 - RNA, 22 nt, Human
uucacuguccuccaagccagcg

SEQ ID NO: 2157822 - RNA, 22 nt, Human
uucacugugaccuugagaagau

SEQ ID NO: 2157823 - RNA, 21 nt, Human
auaguugaaccuauuucucuu

SEQ ID NO: 2157824 - RNA, 14 nt, Human
auauaaaaaacuuu

SEQ ID NO: 2157825 - RNA, 16 nt, Human
auaguggggagacuuc

SEQ ID NO: 2157826 - RNA, 20 nt, Human
uucacacacagacuguuguc

SEQ ID NO: 2157827 - RNA, 17 nt, Human
auagcuuuugugucuua

SEQ ID NO: 2157828 - RNA, 15 nt, Human
uuccagugcaacacu

SEQ ID NO: 2157829 - RNA, 19 nt, Human
uuccagugcaacacugaag

SEQ ID NO: 2157830 - RNA, 21 nt, Human
uuccagugcaacacugaagcu

SEQ ID NO: 2157831 - RNA, 18 nt, Human
uuccacacucaccucuaa

SEQ ID NO: 2157832 - RNA, 13 nt, Human
uuccaagagcuga

SEQ ID NO: 2157833 - RNA, 12 nt, Human
uuccaagagcug

SEQ ID NO: 2157834 - RNA, 21 nt, Human
auauauuuguguauuuaacag

SEQ ID NO: 2157835 - RNA, 17 nt, Human
auauauuuguguauuua

SEQ ID NO: 2157836 - RNA, 22 nt, Human
auauauuuguguauuuaacagg

SEQ ID NO: 2157837 - RNA, 21 nt, Human
auauauuggguuccauucuca

SEQ ID NO: 2157838 - RNA, 17 nt, Human
auauauuggguuccauu

SEQ ID NO: 2157839 - RNA, 13 nt, Human
auauauuugugua

SEQ ID NO: 2157840 - RNA, 19 nt, Human
auauauguauauauaugca

SEQ ID NO: 2157841 - RNA, 14 nt, Human
uucauauugaauau

SEQ ID NO: 2157842 - RNA, 13 nt, Human
uucuuuuguaauu

SEQ ID NO: 2157843 - RNA, 15 nt, Human
uucuuuuuauugaau

SEQ ID NO: 2157844 - RNA, 17 nt, Human
uugaacccaggaguuca

SEQ ID NO: 2157845 - RNA, 19 nt, Human
uucuuugugucaacaugaa

SEQ ID NO: 2157846 - RNA, 17 nt, Human
uucuuaaacaaauguau

SEQ ID NO: 2157847 - RNA, 15 nt, Human
uucuuacaaacaugu

SEQ ID NO: 2157848 - RNA, 14 nt, Human
uucuccucuuguaa

SEQ ID NO: 2157849 - RNA, 13 nt, Human
uucuccucuugua

SEQ ID NO: 2157850 - RNA, 19 nt, Human
uucuccucuuguaaauaaa

SEQ ID NO: 2157851 - RNA, 17 nt, Human
uucuccucuuguaaaua

SEQ ID NO: 2157852 - RNA, 22 nt, Human
uucuccucuuguaaauaaagcc

SEQ ID NO: 2157853 - RNA, 22 nt, Human
uucucuuucuuuacaagauggg

SEQ ID NO: 2157854 - RNA, 16 nt, Human
uucucuuucuuuacaa

SEQ ID NO: 2157855 - RNA, 11 nt, Human
uucucuuucuu

SEQ ID NO: 2157856 - RNA, 20 nt, Human
uucgaugggcccaauucuua

SEQ ID NO: 2157857 - RNA, 21 nt, Human
uucgaugggcccaauucuuac

SEQ ID NO: 2157858 - RNA, 16 nt, Human
uucgacagcauuuucc

SEQ ID NO: 2157859 - RNA, 23 nt, Human
uucgacagcauuuuccucugcuu

SEQ ID NO: 2157860 - RNA, 15 nt, Human
uucgagaccagccug

SEQ ID NO: 2157861 - RNA, 16 nt, Human
uucgagaccagccugg

SEQ ID NO: 2157862 - RNA, 19 nt, Human
uucgagaccagccuggcca

SEQ ID NO: 2157863 - RNA, 14 nt, Human
uucgagaccagccu

SEQ ID NO: 2157864 - RNA, 22 nt, Human
uucgcgauggacagacucacaa

SEQ ID NO: 2157865 - RNA, 16 nt, Human
auauuuuccaugaaaa

SEQ ID NO: 2157866 - RNA, 18 nt, Human
auauuuuccaugaaaaug

SEQ ID NO: 2157867 - RNA, 15 nt, Human
auauuuuuaauuaaa

SEQ ID NO: 2157868 - RNA, 11 nt, Human
auauuuuaauu

SEQ ID NO: 2157869 - RNA, 21 nt, Human
augcaacaacauguauaauau

SEQ ID NO: 2157870 - RNA, 16 nt, Human
augcaacaacauguau

SEQ ID NO: 2157871 - RNA, 14 nt, Human
augcaacaacaugu

SEQ ID NO: 2157872 - RNA, 19 nt, Human
uuguucugcuguucucuag

SEQ ID NO: 2157873 - RNA, 17 nt, Human
uuguggcuauuaaaacu

SEQ ID NO: 2157874 - RNA, 21 nt, Human
augcagccuaaggcuguauga

SEQ ID NO: 2157875 - RNA, 17 nt, Human
augcaggugaaacccag

SEQ ID NO: 2157876 - RNA, 20 nt, Human
augcagucuguccaggcucg

SEQ ID NO: 2157877 - RNA, 19 nt, Human
augcagucuguccaggcuc

SEQ ID NO: 2157878 - RNA, 18 nt, Human
augcaggugaaacccagu

SEQ ID NO: 2157879 - RNA, 18 nt, Human
augcagucuguccaggcu

SEQ ID NO: 2157880 - RNA, 19 nt, Human
uuuagcaguaaaauagcug

SEQ ID NO: 2157881 - RNA, 22 nt, Human
uuucccccaccccauuucucuc

SEQ ID NO: 2157882 - RNA, 20 nt, Human
auggacagaagaaggcagca

SEQ ID NO: 2157883 - RNA, 19 nt, Human
auggacagaagaaggcagc

SEQ ID NO: 2157884 - RNA, 13 nt, Human
uuucagaccuuuu

SEQ ID NO: 2157885 - RNA, 12 nt, Human
uuucagaccuuu

SEQ ID NO: 2157886 - RNA, 16 nt, Human
uuucauauuugcacua

SEQ ID NO: 2157887 - RNA, 23 nt, Human
auggcacagcccaaagaaggaaa

SEQ ID NO: 2157888 - RNA, 21 nt, Human
auggccguguagaagcauggu

SEQ ID NO: 2157889 - RNA, 18 nt, Human
auggccguguagaagcau

SEQ ID NO: 2157890 - RNA, 18 nt, Human
auggccuuugauaaaugu

SEQ ID NO: 2157891 - RNA, 18 nt, Human
auggcuaccuaaaaagau

SEQ ID NO: 2157892 - RNA, 19 nt, Human
augacauuguuaaaauaaa

SEQ ID NO: 2157893 - RNA, 21 nt, Human
augagaagaaaauggaaccag

SEQ ID NO: 2157894 - RNA, 14 nt, Human
augagaacucugag

SEQ ID NO: 2157895 - RNA, 13 nt, Human
augagacacagga

SEQ ID NO: 2157896 - RNA, 14 nt, Human
augagacacaggau

SEQ ID NO: 2157897 - RNA, 23 nt, Human
augagaagaaaauggaaccaggc

SEQ ID NO: 2157898 - RNA, 16 nt, Human
uugguuuaauuuaaag

SEQ ID NO: 2157899 - RNA, 12 nt, Human
aucuuugugaag

SEQ ID NO: 2157900 - RNA, 22 nt, Human
aucuuuuguucccauccucuuc

SEQ ID NO: 2157901 - RNA, 16 nt, Human
aucuuuuguucccauc

SEQ ID NO: 2157902 - RNA, 22 nt, Human
uuggaugggacuagagcuuucu

SEQ ID NO: 2157903 - RNA, 22 nt, Human
augaagauauuugcuuuaauaa

SEQ ID NO: 2157904 - RNA, 21 nt, Human
augaaccuucuggccucccac

SEQ ID NO: 2157905 - RNA, 24 nt, Human
augaaccuucuggccucccacaga

SEQ ID NO: 2157906 - RNA, 16 nt, Human
uuggggggcauauauu

SEQ ID NO: 2157907 - RNA, 15 nt, Human
uugcaauuccugcuc

SEQ ID NO: 2157908 - RNA, 13 nt, Human
uugauucacuuca

SEQ ID NO: 2157909 - RNA, 17 nt, Human
uugaugcugacagucau

SEQ ID NO: 2157910 - RNA, 21 nt, Human
aucuugauaccaccuauauag

SEQ ID NO: 2157911 - RNA, 22 nt, Human
aucugguaccaguugaaauuuu

SEQ ID NO: 2157912 - RNA, 16 nt, Human
uugccgguggugcagg

SEQ ID NO: 2157913 - RNA, 22 nt, Human
uugccgcgucgcccucccaggc

SEQ ID NO: 2157914 - RNA, 18 nt, Human
uugccgcgucgcccuccc

SEQ ID NO: 2157915 - RNA, 21 nt, Human
uugccgcgucgcccucccagg

SEQ ID NO: 2157916 - RNA, 18 nt, Human
aucugagcucuuugcacu

SEQ ID NO: 2157917 - RNA, 19 nt, Human
aucugagcucuuugcacua

SEQ ID NO: 2157918 - RNA, 18 nt, Human
aucugauauguauuguuu

SEQ ID NO: 2157919 - RNA, 14 nt, Human
aucugauauguauu

SEQ ID NO: 2157920 - RNA, 12 nt, Human
gcggagcuggcc

SEQ ID NO: 2157921 - RNA, 18 nt, Human
gcggagcaagaggaggcc

SEQ ID NO: 2157922 - RNA, 17 nt, Human
gcggagcaagaggaggc

SEQ ID NO: 2157923 - RNA, 17 nt, Human
gcggagcuggccccgcc

SEQ ID NO: 2157924 - RNA, 14 nt, Human
gcggagcuggcccc

SEQ ID NO: 2157925 - RNA, 16 nt, Human
gcggaggagagagagg

SEQ ID NO: 2157926 - RNA, 20 nt, Human
gcgugaucaaagccacacuc

SEQ ID NO: 2157927 - RNA, 14 nt, Human
gccucgcaggaaga

SEQ ID NO: 2157928 - RNA, 13 nt, Human
gcccauucuacuu

SEQ ID NO: 2157929 - RNA, 15 nt, Human
gcccauucuacuugc

SEQ ID NO: 2157930 - RNA, 14 nt, Human
gcccauucuacuug

SEQ ID NO: 2157931 - RNA, 20 nt, Human
gcccauucuacuugcucugg

SEQ ID NO: 2157932 - RNA, 19 nt, Human
gcccauucuacuugcucug

SEQ ID NO: 2157933 - RNA, 18 nt, Human
gcccauucuacuugcucu

SEQ ID NO: 2157934 - RNA, 17 nt, Human
gcccauucuacuugcuc

SEQ ID NO: 2157935 - RNA, 22 nt, Human
gcccauucuacuugcucuggac

SEQ ID NO: 2157936 - RNA, 21 nt, Human
gcccauucuacuugcucugga

SEQ ID NO: 2157937 - RNA, 20 nt, Human
gcccccgcauccccugccuc

SEQ ID NO: 2157938 - RNA, 18 nt, Human
gcccccgcauccccugcc

SEQ ID NO: 2157939 - RNA, 16 nt, Human
gcccccgcauccccug

SEQ ID NO: 2157940 - RNA, 14 nt, Human
gccaggccccaggc

SEQ ID NO: 2157941 - RNA, 13 nt, Human
gccaggccagcug

SEQ ID NO: 2157942 - RNA, 13 nt, Human
gccaggccccagg

SEQ ID NO: 2157943 - RNA, 12 nt, Human
gccaggccagcu

SEQ ID NO: 2157944 - RNA, 17 nt, Human
gcugcaggggcauggga

SEQ ID NO: 2157945 - RNA, 23 nt, Human
gcucucuuuuucuccagggucag

SEQ ID NO: 2157946 - RNA, 22 nt, Human
gcucucuuuuucuccaggguca

SEQ ID NO: 2157947 - RNA, 14 nt, Human
gcugaaaaaaaauu

SEQ ID NO: 2157948 - RNA, 22 nt, Human
gcucccaggugcagccagaggc

SEQ ID NO: 2157949 - RNA, 20 nt, Human
gcucccaggugcagccagag

SEQ ID NO: 2157950 - RNA, 19 nt, Human
gcucccaggugcagccaga

SEQ ID NO: 2157951 - RNA, 14 nt, Human
gcucccaggugcag

SEQ ID NO: 2157952 - RNA, 17 nt, Human
gcuccucuccagucuga

SEQ ID NO: 2157953 - RNA, 18 nt, Human
ggaagacccaacacaugg

SEQ ID NO: 2157954 - RNA, 20 nt, Human
ggaagacccaacacauggga

SEQ ID NO: 2157955 - RNA, 16 nt, Human
ggaaacaacagcuuua

SEQ ID NO: 2157956 - RNA, 13 nt, Human
ggaaacaacagcu

SEQ ID NO: 2157957 - RNA, 13 nt, Human
ggaaacagacucg

SEQ ID NO: 2157958 - RNA, 22 nt, Human
ggaaacagacucgauucauauu

SEQ ID NO: 2157959 - RNA, 21 nt, Human
gcuuccuguccucccagcucc

SEQ ID NO: 2157960 - RNA, 16 nt, Human
gcuuccuguccuccca

SEQ ID NO: 2157961 - RNA, 19 nt, Human
gcuuucugaagcuuuacca

SEQ ID NO: 2157962 - RNA, 12 nt, Human
gcuuaaugaaaa

SEQ ID NO: 2157963 - RNA, 22 nt, Human
gcuucaacauucuuugcaagau

SEQ ID NO: 2157964 - RNA, 19 nt, Human
gcugugcacaaaguggcau

SEQ ID NO: 2157965 - RNA, 21 nt, Human
gcugugcacaaaguggcauaa

SEQ ID NO: 2157966 - RNA, 13 nt, Human
gguuucugaaaau

SEQ ID NO: 2157967 - RNA, 19 nt, Human
gguuccucguucucccugg

SEQ ID NO: 2157968 - RNA, 18 nt, Human
ggugggcacccacccugg

SEQ ID NO: 2157969 - RNA, 17 nt, Human
ggugggcacccacccug

SEQ ID NO: 2157970 - RNA, 20 nt, Human
guaaaauaaauauugucuuu

SEQ ID NO: 2157971 - RNA, 19 nt, Human
guaaaauaaauauugucuu

SEQ ID NO: 2157972 - RNA, 15 nt, Human
aaaguuuucccuuga

SEQ ID NO: 2157973 - RNA, 19 nt, Human
aaaguuauugugauauccu

SEQ ID NO: 2157974 - RNA, 18 nt, Human
gguuugaauauaaacacu

SEQ ID NO: 2157975 - RNA, 15 nt, Human
gguuugaauauaaac

SEQ ID NO: 2157976 - RNA, 14 nt, Human
gguuugcaaggaag

SEQ ID NO: 2157977 - RNA, 21 nt, Human
gguuugccgguggugcaggua

SEQ ID NO: 2157978 - RNA, 17 nt, Human
gguuugccgguggugca

SEQ ID NO: 2157979 - RNA, 23 nt, Human
ggugcuguccucagguggccaug

SEQ ID NO: 2157980 - RNA, 20 nt, Human
ggugcuguccucagguggcc

SEQ ID NO: 2157981 - RNA, 19 nt, Human
ggugcuguccucagguggc

SEQ ID NO: 2157982 - RNA, 15 nt, Human
ggugcuguccucagg

SEQ ID NO: 2157983 - RNA, 16 nt, Human
aaagcaucacuuggga

SEQ ID NO: 2157984 - RNA, 18 nt, Human
aaagcagcucuccccuca

SEQ ID NO: 2157985 - RNA, 15 nt, Human
aaagcagcucucccc

SEQ ID NO: 2157986 - RNA, 23 nt, Human
aaagaaguaggggaagacaugca

SEQ ID NO: 2157987 - RNA, 16 nt, Human
gguccagggagcaggc

SEQ ID NO: 2157988 - RNA, 12 nt, Human
gguccagggagc

SEQ ID NO: 2157989 - RNA, 15 nt, Human
gguccacagggcacc

SEQ ID NO: 2157990 - RNA, 21 nt, Human
gguaugaccuucuaggaagcu

SEQ ID NO: 2157991 - RNA, 14 nt, Human
gguccacagggcac

SEQ ID NO: 2157992 - RNA, 18 nt, Human
aaaaugugccauuuugca

SEQ ID NO: 2157993 - RNA, 16 nt, Human
aaacaaaacaaaacaa

SEQ ID NO: 2157994 - RNA, 14 nt, Human
gggccgccagggag

SEQ ID NO: 2157995 - RNA, 16 nt, Human
aaaaucuguggugguc

SEQ ID NO: 2157996 - RNA, 21 nt, Human
aaaaugaguuaccuacauuuu

SEQ ID NO: 2157997 - RNA, 14 nt, Human
gggaagagggggcg

SEQ ID NO: 2157998 - RNA, 21 nt, Human
aaaacccagcaacagaaaaau

SEQ ID NO: 2157999 - RNA, 19 nt, Human
aaaaccaauguuuugcagu

SEQ ID NO: 2158000 - RNA, 20 nt, Human
aaaacaguccuucaaacuuc

SEQ ID NO: 2158001 - RNA, 22 nt, Human
aaaacagguagaauuaucuaau

SEQ ID NO: 2158002 - RNA, 14 nt, Human
aaaaaucuauauuu

SEQ ID NO: 2158003 - RNA, 16 nt, Human
aaaagcagcucucccc

SEQ ID NO: 2158004 - RNA, 17 nt, Human
aaaagcagcucuccccu

SEQ ID NO: 2158005 - RNA, 21 nt, Human
aaaagcacacucauccccuca

SEQ ID NO: 2158006 - RNA, 21 nt, Human
gggagcaggcggugggcaccc

SEQ ID NO: 2158007 - RNA, 17 nt, Human
gggaggccagugagcca

SEQ ID NO: 2158008 - RNA, 15 nt, Human
gggagcaggcggugg

SEQ ID NO: 2158009 - RNA, 15 nt, Human
gggcaggccagagcu

SEQ ID NO: 2158010 - RNA, 14 nt, Human
aaaagguaaaacuu

SEQ ID NO: 2158011 - RNA, 23 nt, Human
aaaagguaaaacuuuuuauauuu

SEQ ID NO: 2158012 - RNA, 21 nt, Human
gggcagcgggagccucccugc

SEQ ID NO: 2158013 - RNA, 19 nt, Human
ggccuugggcccucugguu

SEQ ID NO: 2158014 - RNA, 22 nt, Human
ggcggugggcacccacccuggg

SEQ ID NO: 2158015 - RNA, 21 nt, Human
ggcggugggcacccacccugg

SEQ ID NO: 2158016 - RNA, 15 nt, Human
ggcccaggugagucc

SEQ ID NO: 2158017 - RNA, 22 nt, Human
ggcauauauuggguuccauucu

SEQ ID NO: 2158018 - RNA, 20 nt, Human
ggcauccuuccucacaccag

SEQ ID NO: 2158019 - RNA, 14 nt, Human
ggccaugccucagc

SEQ ID NO: 2158020 - RNA, 22 nt, Human
ggccaucugguuaggauggcag

SEQ ID NO: 2158021 - RNA, 21 nt, Human
ggccaucugguuaggauggca

SEQ ID NO: 2158022 - RNA, 20 nt, Human
ggccauccuucccugucugc

SEQ ID NO: 2158023 - RNA, 22 nt, Human
ggccagagcuacccgcagaguu

SEQ ID NO: 2158024 - RNA, 14 nt, Human
ggccaaacaagugu

SEQ ID NO: 2158025 - RNA, 14 nt, Human
ggaguucugcucau

SEQ ID NO: 2158026 - RNA, 22 nt, Human
ggagugcuuaucccuucuuuuu

SEQ ID NO: 2158027 - RNA, 14 nt, Human
ggauaauuagcauc

SEQ ID NO: 2158028 - RNA, 19 nt, Human
ggauaauuagcaucucagg

SEQ ID NO: 2158029 - RNA, 22 nt, Human
ggauggcaggacgugggcuggg

SEQ ID NO: 2158030 - RNA, 21 nt, Human
ggauggcaggacgugggcugg

SEQ ID NO: 2158031 - RNA, 17 nt, Human
ggcacaaagggcccaga

SEQ ID NO: 2158032 - RNA, 17 nt, Human
ggcacaggccauggaug

SEQ ID NO: 2158033 - RNA, 23 nt, Human
ggcacaggccauggauggaaaac

SEQ ID NO: 2158034 - RNA, 20 nt, Human
ggagguggagguugcaguga

SEQ ID NO: 2158035 - RNA, 19 nt, Human
ggagguggagguugcagug

SEQ ID NO: 2158036 - RNA, 23 nt, Human
ggaggugaacaagcaaacccaga

SEQ ID NO: 2158037 - RNA, 17 nt, Human
ggaggccuuccagggac

SEQ ID NO: 2158038 - RNA, 21 nt, Human
ggaggaaggcuuacacccaca

SEQ ID NO: 2158039 - RNA, 12 nt, Human
ggagcugcaggg

SEQ ID NO: 2158040 - RNA, 20 nt, Human
ggagcugcaggggcauggga

SEQ ID NO: 2158041 - RNA, 14 nt, Human
ggagcugcaggggc

SEQ ID NO: 2158042 - RNA, 20 nt, Human
ggagcuggccccgccgccug

SEQ ID NO: 2158043 - RNA, 15 nt, Human
ggagcauugggaccu

SEQ ID NO: 2158044 - RNA, 23 nt, Human
gacacugaaauauacacacagca

SEQ ID NO: 2158045 - RNA, 23 nt, Human
gacagacaacacugggaaacaga

SEQ ID NO: 2158046 - RNA, 19 nt, Human
gaauuuuguuuucuugauu

SEQ ID NO: 2158047 - RNA, 18 nt, Human
gacaaaaucaucuuugug

SEQ ID NO: 2158048 - RNA, 16 nt, Human
gaauuauaaaagccag

SEQ ID NO: 2158049 - RNA, 14 nt, Human
gaauuaucuaauuu

SEQ ID NO: 2158050 - RNA, 14 nt, Human
gaagcuaagcugca

SEQ ID NO: 2158051 - RNA, 17 nt, Human
gaagugaauaacugcaa

SEQ ID NO: 2158052 - RNA, 21 nt, Human
gaagcugucauaaaaagacaa

SEQ ID NO: 2158053 - RNA, 17 nt, Human
gaagcugggguucauga

SEQ ID NO: 2158054 - RNA, 17 nt, Human
gaagggagcuagccaga

SEQ ID NO: 2158055 - RNA, 18 nt, Human
gaagggauaugugaaaca

SEQ ID NO: 2158056 - RNA, 12 nt, Human
gaaugacuccuu

SEQ ID NO: 2158057 - RNA, 20 nt, Human
gaaugagauuaauuccuuuc

SEQ ID NO: 2158058 - RNA, 20 nt, Human
gagaggcagaagaacccugg

SEQ ID NO: 2158059 - RNA, 17 nt, Human
gagcauggguucauccu

SEQ ID NO: 2158060 - RNA, 16 nt, Human
gacugaaaaccucucc

SEQ ID NO: 2158061 - RNA, 17 nt, Human
gacugaaaaccucuccu

SEQ ID NO: 2158062 - RNA, 18 nt, Human
gacugaaaaccucuccuc

SEQ ID NO: 2158063 - RNA, 20 nt, Human
gacugaaaaccucuccucau

SEQ ID NO: 2158064 - RNA, 19 nt, Human
gagaagugaauaacugcaa

SEQ ID NO: 2158065 - RNA, 15 nt, Human
gauaugcaaaagcug

SEQ ID NO: 2158066 - RNA, 14 nt, Human
gauaugcaaaagcu

SEQ ID NO: 2158067 - RNA, 17 nt, Human
gauaugugaaacaaugu

SEQ ID NO: 2158068 - RNA, 15 nt, Human
gauaugugaaacaau

SEQ ID NO: 2158069 - RNA, 18 nt, Human
gagucaauuggaaagacu

SEQ ID NO: 2158070 - RNA, 20 nt, Human
gaggugggaggaucuuuuga

SEQ ID NO: 2158071 - RNA, 22 nt, Human
gagucacaaagaacauguagaa

SEQ ID NO: 2158072 - RNA, 21 nt, Human
gauuauuuucuacacauacau

SEQ ID NO: 2158073 - RNA, 14 nt, Human
gcaccguacugugg

SEQ ID NO: 2158074 - RNA, 14 nt, Human
gcagccagaggcac

SEQ ID NO: 2158075 - RNA, 12 nt, Human
gcagccagaggc

SEQ ID NO: 2158076 - RNA, 20 nt, Human
gcauaauaaaugcuucagug

SEQ ID NO: 2158077 - RNA, 14 nt, Human
gcauaauaaaugcu

SEQ ID NO: 2158078 - RNA, 11 nt, Human
gcauaauaaau

SEQ ID NO: 2158079 - RNA, 15 nt, Human
gcaggcuucaaacua

SEQ ID NO: 2158080 - RNA, 21 nt, Human
cuuggcacccaagaccucagg

SEQ ID NO: 2158081 - RNA, 12 nt, Human
cuugccugcagg

SEQ ID NO: 2158082 - RNA, 13 nt, Human
cuugccugcaggc

SEQ ID NO: 2158083 - RNA, 21 nt, Human
cuugaugagcugugcacaaag

SEQ ID NO: 2158084 - RNA, 13 nt, Human
cuucuaggaagcu

SEQ ID NO: 2158085 - RNA, 20 nt, Human
cuucuguugucaccuucacc

SEQ ID NO: 2158086 - RNA, 19 nt, Human
cuucuguugucaccuucac

SEQ ID NO: 2158087 - RNA, 21 nt, Human
cuucuguugucaccuucaccu

SEQ ID NO: 2158088 - RNA, 15 nt, Human
cuucuguugucaccu

SEQ ID NO: 2158089 - RNA, 14 nt, Human
cuucacuccugcug

SEQ ID NO: 2158090 - RNA, 13 nt, Human
cuucacuccugcu

SEQ ID NO: 2158091 - RNA, 15 nt, Human
cuucacuccugcugu

SEQ ID NO: 2158092 - RNA, 21 nt, Human
cuucacguagaacauugguau

SEQ ID NO: 2158093 - RNA, 17 nt, Human
cuucacuguccuccaag

SEQ ID NO: 2158094 - RNA, 22 nt, Human
cuucaugcaggugaaacccagu

SEQ ID NO: 2158095 - RNA, 19 nt, Human
gaaaaaaaucguccaggga

SEQ ID NO: 2158096 - RNA, 18 nt, Human
gaaaaaccagaggcagcu

SEQ ID NO: 2158097 - RNA, 15 nt, Human
cuuuuuuucuacugu

SEQ ID NO: 2158098 - RNA, 20 nt, Human
cuuuuuuguguuuuuaaaag

SEQ ID NO: 2158099 - RNA, 15 nt, Human
cuuuugcauucuccc

SEQ ID NO: 2158100 - RNA, 14 nt, Human
cuuuugcauucucc

SEQ ID NO: 2158101 - RNA, 13 nt, Human
cuuuugcauucuc

SEQ ID NO: 2158102 - RNA, 12 nt, Human
cuuuuguaauuu

SEQ ID NO: 2158103 - RNA, 15 nt, Human
gaaaauggaaccagg

SEQ ID NO: 2158104 - RNA, 18 nt, Human
gaaaauggaaccaggcuu

SEQ ID NO: 2158105 - RNA, 14 nt, Human
cuuuguacuuugug

SEQ ID NO: 2158106 - RNA, 14 nt, Human
cuuugauguauuuu

SEQ ID NO: 2158107 - RNA, 17 nt, Human
cuuugauguauuuuccc

SEQ ID NO: 2158108 - RNA, 20 nt, Human
cuuucaaugguuugcaagga

SEQ ID NO: 2158109 - RNA, 22 nt, Human
cuuucaaugguuugcaaggaag

SEQ ID NO: 2158110 - RNA, 21 nt, Human
cuuucaaugguuugcaaggaa

SEQ ID NO: 2158111 - RNA, 14 nt, Human
cuuucacaaaaaag

SEQ ID NO: 2158112 - RNA, 16 nt, Human
cuuucacaaaaaagaa

SEQ ID NO: 2158113 - RNA, 15 nt, Human
cuuucacaaaaaaga

SEQ ID NO: 2158114 - RNA, 23 nt, Human
cuggugagagggccgggcagagg

SEQ ID NO: 2158115 - RNA, 22 nt, Human
cuggugagagggccgggcagag

SEQ ID NO: 2158116 - RNA, 21 nt, Human
cuggugagagggccgggcaga

SEQ ID NO: 2158117 - RNA, 22 nt, Human
cuggccccgccgccugguacuc

SEQ ID NO: 2158118 - RNA, 16 nt, Human
cuggccccgccgccug

SEQ ID NO: 2158119 - RNA, 14 nt, Human
cuggccccgccgcc

SEQ ID NO: 2158120 - RNA, 12 nt, Human
cuggccccgccg

SEQ ID NO: 2158121 - RNA, 23 nt, Human
cuggccccgccgccugguacuca

SEQ ID NO: 2158122 - RNA, 12 nt, Human
cuggcagcucag

SEQ ID NO: 2158123 - RNA, 19 nt, Human
cugguuugccgguggugca

SEQ ID NO: 2158124 - RNA, 24 nt, Human
cugucacugcucuggacugugugg

SEQ ID NO: 2158125 - RNA, 13 nt, Human
cugucacuguggg

SEQ ID NO: 2158126 - RNA, 17 nt, Human
cugucacugcucuggac

SEQ ID NO: 2158127 - RNA, 17 nt, Human
cugaccuugaugagcug

SEQ ID NO: 2158128 - RNA, 16 nt, Human
cugaccuugaugagcu

SEQ ID NO: 2158129 - RNA, 16 nt, Human
cugcauuuguauauuu

SEQ ID NO: 2158130 - RNA, 12 nt, Human
auuagcugcuuc

SEQ ID NO: 2158131 - RNA, 21 nt, Human
auuaugaugugggucaaggaa

SEQ ID NO: 2158132 - RNA, 23 nt, Human
auuaugagacacaggaugaagca

SEQ ID NO: 2158133 - RNA, 13 nt, Human
auuagcugcuucu

SEQ ID NO: 2158134 - RNA, 21 nt, Human
auuagcugcuucuauguuuca

SEQ ID NO: 2158135 - RNA, 22 nt, Human
auugugugugcagacuucagga

SEQ ID NO: 2158136 - RNA, 19 nt, Human
auugugugugcagacuuca

SEQ ID NO: 2158137 - RNA, 14 nt, Human
auucuugaagucag

SEQ ID NO: 2158138 - RNA, 18 nt, Human
auugauauaaauaaaaca

SEQ ID NO: 2158139 - RNA, 19 nt, Human
auugauauaaauaaaacau

SEQ ID NO: 2158140 - RNA, 24 nt, Human
caaacccagacggcuccacuagga

SEQ ID NO: 2158141 - RNA, 20 nt, Human
caaacccagacggcuccacu

SEQ ID NO: 2158142 - RNA, 16 nt, Human
caacacgcaggagcac

SEQ ID NO: 2158143 - RNA, 15 nt, Human
caacacgcaggagca

SEQ ID NO: 2158144 - RNA, 22 nt, Human
caaagaugggugaaggcuggca

SEQ ID NO: 2158145 - RNA, 21 nt, Human
caaagaugggugaaggcuggc

SEQ ID NO: 2158146 - RNA, 20 nt, Human
caaagaugggugaaggcugg

SEQ ID NO: 2158147 - RNA, 21 nt, Human
auuuuaugccuuuuauuucuu

SEQ ID NO: 2158148 - RNA, 20 nt, Human
auuuuaugccuuuuauuucu

SEQ ID NO: 2158149 - RNA, 16 nt, Human
auuugugcauuuucua

SEQ ID NO: 2158150 - RNA, 22 nt, Human
auuuguguauuuaacagggagg

SEQ ID NO: 2158151 - RNA, 14 nt, Human
auuuguguauuuaa

SEQ ID NO: 2158152 - RNA, 17 nt, Human
auuuguuuguuuuccuu

SEQ ID NO: 2158153 - RNA, 13 nt, Human
cacugggaaacag

SEQ ID NO: 2158154 - RNA, 18 nt, Human
cacugggaaacagaggcu

SEQ ID NO: 2158155 - RNA, 16 nt, Human
cacugcauaccaaccu

SEQ ID NO: 2158156 - RNA, 19 nt, Human
cacugggguccagggagca

SEQ ID NO: 2158157 - RNA, 14 nt, Human
caauggcagaugua

SEQ ID NO: 2158158 - RNA, 13 nt, Human
caauuuaaagcaa

SEQ ID NO: 2158159 - RNA, 13 nt, Human
ccaaugccaaaaa

SEQ ID NO: 2158160 - RNA, 12 nt, Human
ccacccugggac

SEQ ID NO: 2158161 - RNA, 13 nt, Human
ccacccugggacc

SEQ ID NO: 2158162 - RNA, 23 nt, Human
cauuaugaugugggucaaggaau

SEQ ID NO: 2158163 - RNA, 22 nt, Human
cauuaugaugugggucaaggaa

SEQ ID NO: 2158164 - RNA, 13 nt, Human
cauucucauugaa

SEQ ID NO: 2158165 - RNA, 17 nt, Human
cauucuccauuuguuau

SEQ ID NO: 2158166 - RNA, 12 nt, Human
cauucuccauuu

SEQ ID NO: 2158167 - RNA, 23 nt, Human
cauugggaaggggacccccgccc

SEQ ID NO: 2158168 - RNA, 15 nt, Human
caugaccagcaaaua

SEQ ID NO: 2158169 - RNA, 12 nt, Human
caugaccagcaa

SEQ ID NO: 2158170 - RNA, 19 nt, Human
cauccugugccuccaucag

SEQ ID NO: 2158171 - RNA, 12 nt, Human
caguuuaaagca

SEQ ID NO: 2158172 - RNA, 15 nt, Human
cauacaacacaaaga

SEQ ID NO: 2158173 - RNA, 17 nt, Human
cauacaacacaaagaga

SEQ ID NO: 2158174 - RNA, 16 nt, Human
cauacaacacaaagag

SEQ ID NO: 2158175 - RNA, 9 nt, Human
cagagcugg

SEQ ID NO: 2158176 - RNA, 20 nt, Human
cagagcuacccgcagaguuc

SEQ ID NO: 2158177 - RNA, 22 nt, Human
cagcgggaauggcagcugccac

SEQ ID NO: 2158178 - RNA, 23 nt, Human
cagcgggaauggcagcugccacg

SEQ ID NO: 2158179 - RNA, 18 nt, Human
cagcgggagccucccugc

SEQ ID NO: 2158180 - RNA, 20 nt, Human
cagcgggagccucccugccu

SEQ ID NO: 2158181 - RNA, 16 nt, Human
cagcgggaauggcagc

SEQ ID NO: 2158182 - RNA, 19 nt, Human
cagcgggagccucccugcc

SEQ ID NO: 2158183 - RNA, 17 nt, Human
cagcccccacauccugu

SEQ ID NO: 2158184 - RNA, 13 nt, Human
cagccagaggcac

SEQ ID NO: 2158185 - RNA, 15 nt, Human
caggccagcugccuc

SEQ ID NO: 2158186 - RNA, 14 nt, Human
caggacaggaaaaa

SEQ ID NO: 2158187 - RNA, 20 nt, Human
caguaaaauagcugagggaa

SEQ ID NO: 2158188 - RNA, 14 nt, Human
caguaaaauagcug

SEQ ID NO: 2158189 - RNA, 19 nt, Human
caguaaaaaaaaaaaaugg

SEQ ID NO: 2158190 - RNA, 16 nt, Human
cagggaggggaagagg

SEQ ID NO: 2158191 - RNA, 19 nt, Human
ccugacccuguauauagcc

SEQ ID NO: 2158192 - RNA, 17 nt, Human
ccugacccuguauauag

SEQ ID NO: 2158193 - RNA, 20 nt, Human
ccucuuguaaauaaagcccu

SEQ ID NO: 2158194 - RNA, 18 nt, Human
ccucuuguaaauaaagcc

SEQ ID NO: 2158195 - RNA, 17 nt, Human
ccucuuguaaauaaagc

SEQ ID NO: 2158196 - RNA, 14 nt, Human
ccucuuguaaauaa

SEQ ID NO: 2158197 - RNA, 13 nt, Human
ccucuuguaaaua

SEQ ID NO: 2158198 - RNA, 12 nt, Human
ccucuuguaaau

SEQ ID NO: 2158199 - RNA, 13 nt, Human
ccugacugucucc

SEQ ID NO: 2158200 - RNA, 12 nt, Human
ccucucugcacc

SEQ ID NO: 2158201 - RNA, 15 nt, Human
ccuggaggagcagag

SEQ ID NO: 2158202 - RNA, 16 nt, Human
ccugcccauuggagag

SEQ ID NO: 2158203 - RNA, 16 nt, Human
ccuauuucucuuucuu

SEQ ID NO: 2158204 - RNA, 15 nt, Human
ccuauuucucuuucu

SEQ ID NO: 2158205 - RNA, 13 nt, Human
ccuauuucucuuu

SEQ ID NO: 2158206 - RNA, 12 nt, Human
ccuauuucucuu

SEQ ID NO: 2158207 - RNA, 21 nt, Human
ccucagcccugacccugugga

SEQ ID NO: 2158208 - RNA, 20 nt, Human
ccuaggagugccccauucuu

SEQ ID NO: 2158209 - RNA, 23 nt, Human
ccuaagcaaacccagugucagga

SEQ ID NO: 2158210 - RNA, 22 nt, Human
ccguaguagauguucuacuuug

SEQ ID NO: 2158211 - RNA, 17 nt, Human
ccguaggacccaagcag

SEQ ID NO: 2158212 - RNA, 11 nt, Human
ccgucaacaaa

SEQ ID NO: 2158213 - RNA, 22 nt, Human
cccuggccuugggcccucuggu

SEQ ID NO: 2158214 - RNA, 21 nt, Human
cccuggccuugggcccucugg

SEQ ID NO: 2158215 - RNA, 11 nt, Human
cccuggccuga

SEQ ID NO: 2158216 - RNA, 11 nt, Human
ccgcccccugc

SEQ ID NO: 2158217 - RNA, 17 nt, Human
ccgcccccugcccuccc

SEQ ID NO: 2158218 - RNA, 16 nt, Human
ccgcccccugcccucc

SEQ ID NO: 2158219 - RNA, 20 nt, Human
ccgaauguugagguggacuc

SEQ ID NO: 2158220 - RNA, 20 nt, Human
ccgccagggagaccuggaca

SEQ ID NO: 2158221 - RNA, 21 nt, Human
ccgccaaaagcugcucaggga

SEQ ID NO: 2158222 - RNA, 21 nt, Human
ccccuuuauguacaggaugcu

SEQ ID NO: 2158223 - RNA, 12 nt, Human
ccccuuuugcau

SEQ ID NO: 2158224 - RNA, 22 nt, Human
ccccaucgccagcugaugacuc

SEQ ID NO: 2158225 - RNA, 19 nt, Human
ccccaucgccagcugauga

SEQ ID NO: 2158226 - RNA, 23 nt, Human
ccccaucgccagcugaugacuca

SEQ ID NO: 2158227 - RNA, 22 nt, Human
ccccagagaaagcgcagaugcu

SEQ ID NO: 2158228 - RNA, 15 nt, Human
cccauauuguaaaac

SEQ ID NO: 2158229 - RNA, 18 nt, Human
cccauauuguaaaacagg

SEQ ID NO: 2158230 - RNA, 19 nt, Human
cccauauuguaaaacaggu

SEQ ID NO: 2158231 - RNA, 22 nt, Human
ccaguuccuuucaaugguuugc

SEQ ID NO: 2158232 - RNA, 21 nt, Human
ccaguuccuuucaaugguuug

SEQ ID NO: 2158233 - RNA, 14 nt, Human
ccauggugcuuguu

SEQ ID NO: 2158234 - RNA, 22 nt, Human
ccagggcuuacggcccuggccu

SEQ ID NO: 2158235 - RNA, 21 nt, Human
ccagggcuuacggcccuggcc

SEQ ID NO: 2158236 - RNA, 13 nt, Human
ccagggucccugg

SEQ ID NO: 2158237 - RNA, 19 nt, Human
ccagggucagaaacaggac

SEQ ID NO: 2158238 - RNA, 18 nt, Human
ccagggucagaaacagga

SEQ ID NO: 2158239 - RNA, 17 nt, Human
ccagggucagaaacagg

SEQ ID NO: 2158240 - RNA, 10 nt, Human
ccagggucag

SEQ ID NO: 2158241 - RNA, 21 nt, Human
ccagaguggggaugacaugca

SEQ ID NO: 2158242 - RNA, 20 nt, Human
ccagcuacaccuuucuccuu

SEQ ID NO: 2158243 - RNA, 19 nt, Human
ccagcuacaccuuucuccu

SEQ ID NO: 2158244 - RNA, 18 nt, Human
ccagcuacaccuuucucc

SEQ ID NO: 2158245 - RNA, 17 nt, Human
ccuucuggccucccaca

SEQ ID NO: 2158246 - RNA, 20 nt, Human
ccuucuggccucccacagac

SEQ ID NO: 2158247 - RNA, 18 nt, Human
ccuucuggccucccacag

SEQ ID NO: 2158248 - RNA, 12 nt, Human
ccuuuucuauuc

SEQ ID NO: 2158249 - RNA, 13 nt, Human
ccuuuugcauucu

SEQ ID NO: 2158250 - RNA, 15 nt, Human
cgccucccacugggg

SEQ ID NO: 2158251 - RNA, 19 nt, Human
cgccucccacuggggucca

SEQ ID NO: 2158252 - RNA, 16 nt, Human
cgccucccacuggggu

SEQ ID NO: 2158253 - RNA, 20 nt, Human
cgccgccugguacucaagcc

SEQ ID NO: 2158254 - RNA, 23 nt, Human
cgccgcaaaccacacuggacucc

SEQ ID NO: 2158255 - RNA, 22 nt, Human
cgccgcaaaccacacuggacuc

SEQ ID NO: 2158256 - RNA, 21 nt, Human
cgccgcaaaccacacuggacu

SEQ ID NO: 2158257 - RNA, 15 nt, Human
cgccgccugguacuc

SEQ ID NO: 2158258 - RNA, 14 nt, Human
cgccgccugguacu

SEQ ID NO: 2158259 - RNA, 20 nt, Human
cgccgcaaaccacacuggac

SEQ ID NO: 2158260 - RNA, 19 nt, Human
cgccgcaaaccacacugga

SEQ ID NO: 2158261 - RNA, 22 nt, Human
cgagugugaagcuuccuuggcu

SEQ ID NO: 2158262 - RNA, 14 nt, Human
cggagcaagaggag

SEQ ID NO: 2158263 - RNA, 13 nt, Human
cggcggagcuggc

SEQ ID NO: 2158264 - RNA, 21 nt, Human
cggcggagcuggccccgccgc

SEQ ID NO: 2158265 - RNA, 19 nt, Human
cggcggagcuggccccgcc

SEQ ID NO: 2158266 - RNA, 16 nt, Human
cuagccuauguggauu

SEQ ID NO: 2158267 - RNA, 18 nt, Human
cuagccggccacuuugga

SEQ ID NO: 2158268 - RNA, 15 nt, Human
cuaguuguuaucaau

SEQ ID NO: 2158269 - RNA, 12 nt, Human
cuaauuuauaaa

SEQ ID NO: 2158270 - RNA, 18 nt, Human
cuaaagaguuuauuuuaa

SEQ ID NO: 2158271 - RNA, 19 nt, Human
cuaaagaguuuauuuuaag

SEQ ID NO: 2158272 - RNA, 22 nt, Human
cuauccaucaugaccagcaaau

SEQ ID NO: 2158273 - RNA, 19 nt, Human
cuccagucugaucugugaa

SEQ ID NO: 2158274 - RNA, 13 nt, Human
cuccccucagagu

SEQ ID NO: 2158275 - RNA, 16 nt, Human
cuccccucagagugca

SEQ ID NO: 2158276 - RNA, 12 nt, Human
cucccugacccu

SEQ ID NO: 2158277 - RNA, 23 nt, Human
cucccugacccuguauauagccc

SEQ ID NO: 2158278 - RNA, 17 nt, Human
cucccugacccuguaua

SEQ ID NO: 2158279 - RNA, 16 nt, Human
cucccugacccuguau

SEQ ID NO: 2158280 - RNA, 14 nt, Human
cucccugacccugu

SEQ ID NO: 2158281 - RNA, 23 nt, Human
cuccagaagauagcuucacccca

SEQ ID NO: 2158282 - RNA, 14 nt, Human
cuccagaagauagc

SEQ ID NO: 2158283 - RNA, 15 nt, Human
cuccagaagauagcu

SEQ ID NO: 2158284 - RNA, 21 nt, Human
cuccagggucagaaacaggac

SEQ ID NO: 2158285 - RNA, 20 nt, Human
cuccagggucagaaacagga

SEQ ID NO: 2158286 - RNA, 20 nt, Human
cucuccucauguucugcuuu

SEQ ID NO: 2158287 - RNA, 16 nt, Human
cucuccucacacacag

SEQ ID NO: 2158288 - RNA, 23 nt, Human
cucugcgugcagggacaaagagg

SEQ ID NO: 2158289 - RNA, 22 nt, Human
cucugcgugcagggacaaagag

SEQ ID NO: 2158290 - RNA, 18 nt, Human
cucugcaccguacugugg

SEQ ID NO: 2158291 - RNA, 14 nt, Human
cugaaaaccucucc

SEQ ID NO: 2158292 - RNA, 15 nt, Human
cugaaaaccucuccu

SEQ ID NO: 2158293 - RNA, 17 nt, Human
cugaaaaccucuccuca

SEQ ID NO: 2158294 - RNA, 20 nt, Human
cugaaaaccucuccucaugu

SEQ ID NO: 2158295 - RNA, 17 nt, Human
cugaaaauuaacacugc

SEQ ID NO: 2158296 - RNA, 16 nt, Human
cugaaaauuaacacug

SEQ ID NO: 2158297 - RNA, 18 nt, Human
cugaagcuuuaccagcug

SEQ ID NO: 2158298 - RNA, 14 nt, Human
cugaagcuuuacca

SEQ ID NO: 2158299 - RNA, 21 nt, Human
cugaagggauaugugaaacaa

SEQ ID NO: 2158300 - RNA, 19 nt, Human
cugaagggauaugugaaac

SEQ ID NO: 2158301 - RNA, 12 nt, Human
cugacccuguau

SEQ ID NO: 2158302 - RNA, 13 nt, Human
cugacccugugga

SEQ ID NO: 2158303 - RNA, 22 nt, Human
cugacccuguauauagcccagc

SEQ ID NO: 2158304 - RNA, 21 nt, Human
cugacccuguauauagcccag

SEQ ID NO: 2158305 - RNA, 20 nt, Human
cugacccuguauauagccca

SEQ ID NO: 2158306 - RNA, 19 nt, Human
cugacccuguauauagccc

SEQ ID NO: 2158307 - RNA, 18 nt, Human
cugacccuguauauagcc

SEQ ID NO: 2158308 - RNA, 15 nt, Human
cugacccuguauaua

SEQ ID NO: 2158309 - RNA, 13 nt, Human
cugacccuguaua

SEQ ID NO: 2158310 - RNA, 20 nt, Human
auaugcaguaaaagaaagaa

SEQ ID NO: 2158311 - RNA, 22 nt, Human
auauuuccaggcugcauuugua

SEQ ID NO: 2158312 - RNA, 23 nt, Human
auauuuccaggcugcauuuguau

SEQ ID NO: 2158313 - RNA, 12 nt, Human
auacuugcuuug

SEQ ID NO: 2158314 - RNA, 16 nt, Human
auagaaagugccagaa

SEQ ID NO: 2158315 - RNA, 19 nt, Human
auagaaagugccagaaagu

SEQ ID NO: 2158316 - RNA, 13 nt, Human
auauacacacagc

SEQ ID NO: 2158317 - RNA, 20 nt, Human
auauaauauauuuguguauu

SEQ ID NO: 2158318 - RNA, 17 nt, Human
auauaauauauuugugu

SEQ ID NO: 2158319 - RNA, 19 nt, Human
auaauguaaacaauaucag

SEQ ID NO: 2158320 - RNA, 16 nt, Human
auacaaugaugcuauu

SEQ ID NO: 2158321 - RNA, 22 nt, Human
auacaaugaugcuauuugcaau

SEQ ID NO: 2158322 - RNA, 21 nt, Human
auacaaugaugcuauuugcaa

SEQ ID NO: 2158323 - RNA, 22 nt, Human
aguuugaaucuauuuaucuuca

SEQ ID NO: 2158324 - RNA, 18 nt, Human
auaaaacauuuucacaca

SEQ ID NO: 2158325 - RNA, 20 nt, Human
auaaaacauuuucacacaau

SEQ ID NO: 2158326 - RNA, 12 nt, Human
auaaagcaaaua

SEQ ID NO: 2158327 - RNA, 18 nt, Human
auaaagcaaauagacaca

SEQ ID NO: 2158328 - RNA, 14 nt, Human
auaaagcaaauaga

SEQ ID NO: 2158329 - RNA, 17 nt, Human
aguccaacaauguuguu

SEQ ID NO: 2158330 - RNA, 11 nt, Human
aguccuuccac

SEQ ID NO: 2158331 - RNA, 14 nt, Human
agucaauuaacaau

SEQ ID NO: 2158332 - RNA, 18 nt, Human
agucacaaagaacaugua

SEQ ID NO: 2158333 - RNA, 20 nt, Human
aguacuggcugauggaguaa

SEQ ID NO: 2158334 - RNA, 18 nt, Human
aguaacccccacuggacu

SEQ ID NO: 2158335 - RNA, 22 nt, Human
aguugacuugacagaacacugu

SEQ ID NO: 2158336 - RNA, 20 nt, Human
aguugugacaacuuccugag

SEQ ID NO: 2158337 - RNA, 18 nt, Human
aguugugacaacuuccug

SEQ ID NO: 2158338 - RNA, 16 nt, Human
aguucagccacccuga

SEQ ID NO: 2158339 - RNA, 15 nt, Human
aguucagccacccug

SEQ ID NO: 2158340 - RNA, 20 nt, Human
agugaucuuuuguucccauc

SEQ ID NO: 2158341 - RNA, 17 nt, Human
aguggcuuuaaugaaua

SEQ ID NO: 2158342 - RNA, 14 nt, Human
agugucaggaggaa

SEQ ID NO: 2158343 - RNA, 18 nt, Human
augcuuuagaaagguuuu

SEQ ID NO: 2158344 - RNA, 21 nt, Human
augauggcccauucuacuugc

SEQ ID NO: 2158345 - RNA, 20 nt, Human
augauggcccauucuacuug

SEQ ID NO: 2158346 - RNA, 19 nt, Human
augauggcccauucuacuu

SEQ ID NO: 2158347 - RNA, 15 nt, Human
augauggcccauucu

SEQ ID NO: 2158348 - RNA, 12 nt, Human
augauggcccau

SEQ ID NO: 2158349 - RNA, 20 nt, Human
augaugacaacuacagaaaa

SEQ ID NO: 2158350 - RNA, 15 nt, Human
augaucuuuucaagu

SEQ ID NO: 2158351 - RNA, 20 nt, Human
augguaauucuuauucuuuc

SEQ ID NO: 2158352 - RNA, 18 nt, Human
augugaaaaggcaaaaag

SEQ ID NO: 2158353 - RNA, 23 nt, Human
auguauuguuugggauccuauug

SEQ ID NO: 2158354 - RNA, 14 nt, Human
augaccagcaaaua

SEQ ID NO: 2158355 - RNA, 15 nt, Human
augaaguuguaggua

SEQ ID NO: 2158356 - RNA, 20 nt, Human
augaaaaugcaacaacaugu

SEQ ID NO: 2158357 - RNA, 15 nt, Human
aucuauacuugcuuu

SEQ ID NO: 2158358 - RNA, 16 nt, Human
aucuauuuaucuucau

SEQ ID NO: 2158359 - RNA, 13 nt, Human
aucuauuuaagua

SEQ ID NO: 2158360 - RNA, 17 nt, Human
aucucucuuuaauauaa

SEQ ID NO: 2158361 - RNA, 14 nt, Human
aucuucaacaaauu

SEQ ID NO: 2158362 - RNA, 13 nt, Human
aucuucaacaaau

SEQ ID NO: 2158363 - RNA, 12 nt, Human
aucuucaacaaa

SEQ ID NO: 2158364 - RNA, 16 nt, Human
aucaaagccacacucu

SEQ ID NO: 2158365 - RNA, 14 nt, Human
aucaaagccacacu

SEQ ID NO: 2158366 - RNA, 15 nt, Human
aucaucuuugugaag

SEQ ID NO: 2158367 - RNA, 22 nt, Human
aucgcggcggagcuggccccgc

SEQ ID NO: 2158368 - RNA, 20 nt, Human
aucgcggcggagcuggcccc

SEQ ID NO: 2158369 - RNA, 19 nt, Human
aucgccagcugaugacuca

SEQ ID NO: 2158370 - RNA, 23 nt, Human
aucgccagcugaugacucaagau

SEQ ID NO: 2158371 - RNA, 21 nt, Human
aucgccagcugaugacucaag

SEQ ID NO: 2158372 - RNA, 22 nt, Human
auccuucccugucugccagggc

SEQ ID NO: 2158373 - RNA, 19 nt, Human
auccuucccugucugccag

SEQ ID NO: 2158374 - RNA, 20 nt, Human
agacugaccuugaugagcug

SEQ ID NO: 2158375 - RNA, 15 nt, Human
agacugaggggucga

SEQ ID NO: 2158376 - RNA, 14 nt, Human
agagagaggcagaa

SEQ ID NO: 2158377 - RNA, 15 nt, Human
agagagaggcaaugg

SEQ ID NO: 2158378 - RNA, 12 nt, Human
agacagagcugg

SEQ ID NO: 2158379 - RNA, 22 nt, Human
agacccaacacaugggaccuau

SEQ ID NO: 2158380 - RNA, 13 nt, Human
agaccagccuggc

SEQ ID NO: 2158381 - RNA, 15 nt, Human
agaccagccuggcca

SEQ ID NO: 2158382 - RNA, 12 nt, Human
agaccagcucuu

SEQ ID NO: 2158383 - RNA, 13 nt, Human
agaccagcucuuc

SEQ ID NO: 2158384 - RNA, 18 nt, Human
agaagugaauaacugcaa

SEQ ID NO: 2158385 - RNA, 19 nt, Human
agaaguaggggaagacaug

SEQ ID NO: 2158386 - RNA, 18 nt, Human
agaaguaggggaagacau

SEQ ID NO: 2158387 - RNA, 22 nt, Human
agaagguuugguccagccuggu

SEQ ID NO: 2158388 - RNA, 22 nt, Human
agaagagaguccauauuucaau

SEQ ID NO: 2158389 - RNA, 18 nt, Human
acuuuccucuuccugccu

SEQ ID NO: 2158390 - RNA, 15 nt, Human
agcaaugccugccca

SEQ ID NO: 2158391 - RNA, 23 nt, Human
agcacaaugucucacaugggaca

SEQ ID NO: 2158392 - RNA, 18 nt, Human
agaugaacagacugaccu

SEQ ID NO: 2158393 - RNA, 17 nt, Human
agaugaagcaaacacau

SEQ ID NO: 2158394 - RNA, 18 nt, Human
agaugaagcaaacacauu

SEQ ID NO: 2158395 - RNA, 19 nt, Human
agaugaagcaaacacauua

SEQ ID NO: 2158396 - RNA, 21 nt, Human
agagugcaagccccugcucca

SEQ ID NO: 2158397 - RNA, 19 nt, Human
agauguaaaguuauucuug

SEQ ID NO: 2158398 - RNA, 22 nt, Human
agauucuucccauucuccauuu

SEQ ID NO: 2158399 - RNA, 19 nt, Human
agauucuucccauucucca

SEQ ID NO: 2158400 - RNA, 23 nt, Human
agcaaaggaguagaaagacagag

SEQ ID NO: 2158401 - RNA, 23 nt, Human
agauucuucccauucuccauuug

SEQ ID NO: 2158402 - RNA, 13 nt, Human
agcaaacacauua

SEQ ID NO: 2158403 - RNA, 13 nt, Human
agcaaacccagac

SEQ ID NO: 2158404 - RNA, 15 nt, Human
agcaaacccagacgg

SEQ ID NO: 2158405 - RNA, 18 nt, Human
aggcuaaagcccagagac

SEQ ID NO: 2158406 - RNA, 21 nt, Human
aggcuaaagcccagagacagc

SEQ ID NO: 2158407 - RNA, 21 nt, Human
aggcggugggcacccacccug

SEQ ID NO: 2158408 - RNA, 14 nt, Human
aggcggugggcacc

SEQ ID NO: 2158409 - RNA, 18 nt, Human
aggccaggugcaaccagg

SEQ ID NO: 2158410 - RNA, 14 nt, Human
aggccagugagcca

SEQ ID NO: 2158411 - RNA, 21 nt, Human
aggccauccuucccugucugc

SEQ ID NO: 2158412 - RNA, 13 nt, Human
aggccaggccagc

SEQ ID NO: 2158413 - RNA, 15 nt, Human
aggccaggccagcug

SEQ ID NO: 2158414 - RNA, 12 nt, Human
aggccaggugca

SEQ ID NO: 2158415 - RNA, 11 nt, Human
aggucuagccu

SEQ ID NO: 2158416 - RNA, 17 nt, Human
agggccugcgagggcag

SEQ ID NO: 2158417 - RNA, 15 nt, Human
agggucagaaacagg

SEQ ID NO: 2158418 - RNA, 19 nt, Human
agggucagaaacaggaccg

SEQ ID NO: 2158419 - RNA, 21 nt, Human
agcuucaccccaaucccagcu

SEQ ID NO: 2158420 - RNA, 12 nt, Human
agcuucaaagcu

SEQ ID NO: 2158421 - RNA, 18 nt, Human
agcuucaccccaauccca

SEQ ID NO: 2158422 - RNA, 20 nt, Human
agcuucaccccaaucccagc

SEQ ID NO: 2158423 - RNA, 17 nt, Human
agcugaggcaauucuaa

SEQ ID NO: 2158424 - RNA, 15 nt, Human
aaagcccagagacag

SEQ ID NO: 2158425 - RNA, 14 nt, Human
aaagccccagaaau

SEQ ID NO: 2158426 - RNA, 22 nt, Human
aaauaaaacauuuucacacaau

SEQ ID NO: 2158427 - RNA, 18 nt, Human
aaauaaaacauuuucaca

SEQ ID NO: 2158428 - RNA, 12 nt, Human
aaauaaaacauu

SEQ ID NO: 2158429 - RNA, 19 nt, Human
aaaguauuuuauucuuauu

SEQ ID NO: 2158430 - RNA, 16 nt, Human
aaagugccagaaagug

SEQ ID NO: 2158431 - RNA, 22 nt, Human
aaacccauauuguaaaacaggu

SEQ ID NO: 2158432 - RNA, 21 nt, Human
aaaauauuuugaucuucaaca

SEQ ID NO: 2158433 - RNA, 15 nt, Human
aaaaucaaaacaaaa

SEQ ID NO: 2158434 - RNA, 18 nt, Human
aaaaucaaaacaaaaaaa

SEQ ID NO: 2158435 - RNA, 19 nt, Human
aaaauauuuugaucuucaa

SEQ ID NO: 2158436 - RNA, 14 nt, Human
aaaauuaacacugc

SEQ ID NO: 2158437 - RNA, 12 nt, Human
aaacaggcagcu

SEQ ID NO: 2158438 - RNA, 21 nt, Human
aaacaggacuuaaaaugacau

SEQ ID NO: 2158439 - RNA, 13 nt, Human
aacuguucccacc

SEQ ID NO: 2158440 - RNA, 15 nt, Human
aacuguucccaccug

SEQ ID NO: 2158441 - RNA, 18 nt, Human
aacuguucccaccugcug

SEQ ID NO: 2158442 - RNA, 12 nt, Human
aacaggaccggg

SEQ ID NO: 2158443 - RNA, 19 nt, Human
aacaggacuuaaaaugaca

SEQ ID NO: 2158444 - RNA, 17 nt, Human
aacaggaccggguggaa

SEQ ID NO: 2158445 - RNA, 21 nt, Human
aacacuauauggcagugucuu

SEQ ID NO: 2158446 - RNA, 20 nt, Human
aacacuauauggcagugucu

SEQ ID NO: 2158447 - RNA, 18 nt, Human
aacacuauauggcagugu

SEQ ID NO: 2158448 - RNA, 14 nt, Human
aacacuauauggca

SEQ ID NO: 2158449 - RNA, 21 nt, Human
aacccuucuccucuuguaaau

SEQ ID NO: 2158450 - RNA, 20 nt, Human
aacccuucuccucuuguaaa

SEQ ID NO: 2158451 - RNA, 18 nt, Human
aacccuucuccucuugua

SEQ ID NO: 2158452 - RNA, 11 nt, Human
aacccuucucc

SEQ ID NO: 2158453 - RNA, 19 nt, Human
aaccagggauuguuucugu

SEQ ID NO: 2158454 - RNA, 16 nt, Human
aaccagggauuguuuc

SEQ ID NO: 2158455 - RNA, 15 nt, Human
aaccagggauuguuu

SEQ ID NO: 2158456 - RNA, 15 nt, Human
aaccagggagcugca

SEQ ID NO: 2158457 - RNA, 19 nt, Human
aaaugcuaaugucaaacuu

SEQ ID NO: 2158458 - RNA, 21 nt, Human
aaaugcuaaugucaaacuuga

SEQ ID NO: 2158459 - RNA, 16 nt, Human
aaauugguucuuuauu

SEQ ID NO: 2158460 - RNA, 14 nt, Human
aacaaacaaacaaa

SEQ ID NO: 2158461 - RNA, 18 nt, Human
aacaaacauugaugcuga

SEQ ID NO: 2158462 - RNA, 19 nt, Human
aacaaaugaacgauaugua

SEQ ID NO: 2158463 - RNA, 23 nt, Human
aacaaaucuaggaaaauauuuug

SEQ ID NO: 2158464 - RNA, 21 nt, Human
aacaaaucuaggaaaauauuu

SEQ ID NO: 2158465 - RNA, 20 nt, Human
aacaaaucuaggaaaauauu

SEQ ID NO: 2158466 - RNA, 19 nt, Human
aacaaaucuaggaaaauau

SEQ ID NO: 2158467 - RNA, 16 nt, Human
aacaaacucucugaac

SEQ ID NO: 2158468 - RNA, 14 nt, Human
aauaauaaauauuu

SEQ ID NO: 2158469 - RNA, 18 nt, Human
aauaaagccuucaaacuc

SEQ ID NO: 2158470 - RNA, 15 nt, Human
aauaauaaauauuua

SEQ ID NO: 2158471 - RNA, 19 nt, Human
aauauaaauguuaagaaaa

SEQ ID NO: 2158472 - RNA, 12 nt, Human
aauauaaauguu

SEQ ID NO: 2158473 - RNA, 14 nt, Human
aauauaaacacuau

SEQ ID NO: 2158474 - RNA, 13 nt, Human
aauauaaacacua

SEQ ID NO: 2158475 - RNA, 16 nt, Human
aauaugcuggcuggag

SEQ ID NO: 2158476 - RNA, 14 nt, Human
aauaugcuggcugg

SEQ ID NO: 2158477 - RNA, 22 nt, Human
aaucuccaccagucauuuuuca

SEQ ID NO: 2158478 - RNA, 21 nt, Human
aaucuccaccagucauuuuuc

SEQ ID NO: 2158479 - RNA, 18 nt, Human
aaucucccuucacaaguu

SEQ ID NO: 2158480 - RNA, 22 nt, Human
aaugguauuugaauuaaauguu

SEQ ID NO: 2158481 - RNA, 15 nt, Human
aaugcucagaccagc

SEQ ID NO: 2158482 - RNA, 22 nt, Human
aagacagcuucucauccugcag

SEQ ID NO: 2158483 - RNA, 21 nt, Human
aagacagggcugauaagcuaa

SEQ ID NO: 2158484 - RNA, 14 nt, Human
aagacaugcagccu

SEQ ID NO: 2158485 - RNA, 13 nt, Human
aagagagaaacaa

SEQ ID NO: 2158486 - RNA, 17 nt, Human
aagauuacuuuuucuuu

SEQ ID NO: 2158487 - RNA, 23 nt, Human
aagauucuucccauucuccauuu

SEQ ID NO: 2158488 - RNA, 21 nt, Human
aagauucuucccauucuccau

SEQ ID NO: 2158489 - RNA, 20 nt, Human
aagauucuucccauucucca

SEQ ID NO: 2158490 - RNA, 19 nt, Human
aagauucuucccauucucc

SEQ ID NO: 2158491 - RNA, 15 nt, Human
aagauucuucccauu

SEQ ID NO: 2158492 - RNA, 22 nt, Human
aagauucuucccauucuccauu

SEQ ID NO: 2158493 - RNA, 17 nt, Human
aaguagcauuuacugug

SEQ ID NO: 2158494 - RNA, 16 nt, Human
aaguagcauuuacugu

SEQ ID NO: 2158495 - RNA, 11 nt, Human
aaguagcauuu

SEQ ID NO: 2158496 - RNA, 15 nt, Human
aagggauaugugaaa

SEQ ID NO: 2158497 - RNA, 19 nt, Human
aagggaguguacucccagg

SEQ ID NO: 2158498 - RNA, 14 nt, Human
aagcugcuuuauuc

SEQ ID NO: 2158499 - RNA, 21 nt, Human
aaggcaaaggguccagaagga

SEQ ID NO: 2158500 - RNA, 16 nt, Human
acaguguagcuugccc

SEQ ID NO: 2158501 - RNA, 17 nt, Human
acagcugaguuguugag

SEQ ID NO: 2158502 - RNA, 18 nt, Human
acagugagggagauccca

SEQ ID NO: 2158503 - RNA, 21 nt, Human
acagggcugauaagcuaacac

SEQ ID NO: 2158504 - RNA, 22 nt, Human
acaucagcuggucaaacaaacu

SEQ ID NO: 2158505 - RNA, 18 nt, Human
acauacaacacaaagaga

SEQ ID NO: 2158506 - RNA, 17 nt, Human
acauacaacacaaagag

SEQ ID NO: 2158507 - RNA, 17 nt, Human
accaaggagaugaagca

SEQ ID NO: 2158508 - RNA, 16 nt, Human
acauuuaccuuuuuga

SEQ ID NO: 2158509 - RNA, 18 nt, Human
acauuuaccaaucauauu

SEQ ID NO: 2158510 - RNA, 15 nt, Human
acauuuaccaaucau

SEQ ID NO: 2158511 - RNA, 20 nt, Human
acccauauuguaaaacaggu

SEQ ID NO: 2158512 - RNA, 16 nt, Human
acccauauuguaaaac

SEQ ID NO: 2158513 - RNA, 23 nt, Human
acccaugccucccccuagccauu

SEQ ID NO: 2158514 - RNA, 23 nt, Human
aauuuauuuuuaccuucacugug

SEQ ID NO: 2158515 - RNA, 21 nt, Human
aauuucagcuucuauauauug

SEQ ID NO: 2158516 - RNA, 16 nt, Human
aauuguauuuuaguaa

SEQ ID NO: 2158517 - RNA, 15 nt, Human
aauugguucuuuauu

SEQ ID NO: 2158518 - RNA, 18 nt, Human
acaaccugaaccuaggag

SEQ ID NO: 2158519 - RNA, 14 nt, Human
acaaccugaaccua

SEQ ID NO: 2158520 - RNA, 13 nt, Human
acaaccugaaccu

SEQ ID NO: 2158521 - RNA, 13 nt, Human
acaauuuaaagca

SEQ ID NO: 2158522 - RNA, 20 nt, Human
acaauuuaaagcaaaggagu

SEQ ID NO: 2158523 - RNA, 14 nt, Human
acaauuuaaagcaa

SEQ ID NO: 2158524 - RNA, 14 nt, Human
acacugggaaacag

SEQ ID NO: 2158525 - RNA, 20 nt, Human
acacugggaggccagugagc

SEQ ID NO: 2158526 - RNA, 15 nt, Human
acacugggaggccag

SEQ ID NO: 2158527 - RNA, 14 nt, Human
acacugggaggcca

SEQ ID NO: 2158528 - RNA, 11 nt, Human
acuauuuuauu

SEQ ID NO: 2158529 - RNA, 17 nt, Human
acuauuuuauuuucuaa

SEQ ID NO: 2158530 - RNA, 22 nt, Human
acucugugucugaguggcuuca

SEQ ID NO: 2158531 - RNA, 16 nt, Human
acucugugucugagug

SEQ ID NO: 2158532 - RNA, 15 nt, Human
acucugugucugagu

SEQ ID NO: 2158533 - RNA, 21 nt, Human
acucugucuaaaaaacaaaac

SEQ ID NO: 2158534 - RNA, 16 nt, Human
acuugggaggcugagg

SEQ ID NO: 2158535 - RNA, 15 nt, Human
acuauugcauuuuac

SEQ ID NO: 2158536 - RNA, 18 nt, Human
accuguguauuuuuuaaa

SEQ ID NO: 2158537 - RNA, 23 nt, Human
acgcugucccuaguaaaaauaca

SEQ ID NO: 2158538 - RNA, 17 nt, Human
acuaacuaucaaauaga

SEQ ID NO: 2158539 - RNA, 14 nt, Human
accccaaucccagc

SEQ ID NO: 2158540 - RNA, 12 nt, Human
accucagggcac

SEQ ID NO: 2158541 - RNA, 23 nt, Human
cauaagagccacaggucuuuaug

SEQ ID NO: 2158542 - RNA, 11 nt, Human
cauaagguuuu

SEQ ID NO: 2158543 - RNA, 16 nt, Human
cauaagguuuuuaugc

SEQ ID NO: 2158544 - RNA, 17 nt, Human
cauaagguuuuuaugca

SEQ ID NO: 2158545 - RNA, 17 nt, Human
cauaauaaaugcuucag

SEQ ID NO: 2158546 - RNA, 20 nt, Human
cauaaagcaaauagacacag

SEQ ID NO: 2158547 - RNA, 13 nt, Human
cauaaagcaaaua

SEQ ID NO: 2158548 - RNA, 22 nt, Human
cauaaccaugugaaaaggcaaa

SEQ ID NO: 2158549 - RNA, 20 nt, Human
cauaacagauuuuuuuugga

SEQ ID NO: 2158550 - RNA, 22 nt, Human
caguugguguucaaauagcacu

SEQ ID NO: 2158551 - RNA, 18 nt, Human
cagugugaauaaagugcu

SEQ ID NO: 2158552 - RNA, 17 nt, Human
caguggcaggacaggaa

SEQ ID NO: 2158553 - RNA, 19 nt, Human
caguucuugccacuuuuuu

SEQ ID NO: 2158554 - RNA, 15 nt, Human
caguuccuuucaaug

SEQ ID NO: 2158555 - RNA, 15 nt, Human
caguuaaguuuuucc

SEQ ID NO: 2158556 - RNA, 21 nt, Human
cagugugucgagucaaaaugu

SEQ ID NO: 2158557 - RNA, 24 nt, Human
caguguuggccaugaugacaacua

SEQ ID NO: 2158558 - RNA, 22 nt, Human
caucucagguuaagugugagua

SEQ ID NO: 2158559 - RNA, 15 nt, Human
cauacuuaagcaaaa

SEQ ID NO: 2158560 - RNA, 22 nt, Human
cauaguuggggucauagauguu

SEQ ID NO: 2158561 - RNA, 17 nt, Human
cauauccguauauaucc

SEQ ID NO: 2158562 - RNA, 15 nt, Human
cauaucauguacagu

SEQ ID NO: 2158563 - RNA, 14 nt, Human
cauauuuuguaacu

SEQ ID NO: 2158564 - RNA, 14 nt, Human
cauauuucuuuggc

SEQ ID NO: 2158565 - RNA, 12 nt, Human
cauauuucaauu

SEQ ID NO: 2158566 - RNA, 15 nt, Human
cauuuaaaguauuuu

SEQ ID NO: 2158567 - RNA, 17 nt, Human
cauuuacugugucuuug

SEQ ID NO: 2158568 - RNA, 21 nt, Human
cauuucccccaccccauuucu

SEQ ID NO: 2158569 - RNA, 20 nt, Human
cauuucccccaccccauuuc

SEQ ID NO: 2158570 - RNA, 10 nt, Human
cauuucucuc

SEQ ID NO: 2158571 - RNA, 15 nt, Human
cauuucucuccucac

SEQ ID NO: 2158572 - RNA, 21 nt, Human
ccaaaccuucacacacagacu

SEQ ID NO: 2158573 - RNA, 18 nt, Human
ccaaaccuucacacacag

SEQ ID NO: 2158574 - RNA, 18 nt, Human
cauuuuguaacaaaugaa

SEQ ID NO: 2158575 - RNA, 19 nt, Human
ccaauucuuacaaacaugu

SEQ ID NO: 2158576 - RNA, 18 nt, Human
ccaauucuuacaaacaug

SEQ ID NO: 2158577 - RNA, 17 nt, Human
ccaauuuuuuuuuccuu

SEQ ID NO: 2158578 - RNA, 16 nt, Human
ccaauuuuuuuuuccu

SEQ ID NO: 2158579 - RNA, 20 nt, Human
ccacaaaggcaaagggucca

SEQ ID NO: 2158580 - RNA, 16 nt, Human
ccacaaaggcaaaggg

SEQ ID NO: 2158581 - RNA, 13 nt, Human
ccaaggcucuguu

SEQ ID NO: 2158582 - RNA, 22 nt, Human
ccaagagcugaggcaauucuaa

SEQ ID NO: 2158583 - RNA, 21 nt, Human
ccaaccuauuuugaaguacca

SEQ ID NO: 2158584 - RNA, 14 nt, Human
ccaaccuauuuuga

SEQ ID NO: 2158585 - RNA, 21 nt, Human
ccaacccuucuccucuuguaa

SEQ ID NO: 2158586 - RNA, 13 nt, Human
ccaacccuucucc

SEQ ID NO: 2158587 - RNA, 11 nt, Human
ccaacccuucu

SEQ ID NO: 2158588 - RNA, 17 nt, Human
ccaagaccucagggcac

SEQ ID NO: 2158589 - RNA, 22 nt, Human
caugugguuaaugccauggaca

SEQ ID NO: 2158590 - RNA, 23 nt, Human
caugugguuacacagugugaaua

SEQ ID NO: 2158591 - RNA, 16 nt, Human
caugugguuacacagu

SEQ ID NO: 2158592 - RNA, 17 nt, Human
caugugguuaaugccau

SEQ ID NO: 2158593 - RNA, 16 nt, Human
cauggugcccuggcuu

SEQ ID NO: 2158594 - RNA, 22 nt, Human
caugugaaaaggcaaaaagcau

SEQ ID NO: 2158595 - RNA, 22 nt, Human
caugcagucugggaguggggaa

SEQ ID NO: 2158596 - RNA, 22 nt, Human
caugcagccuaaggcuguauga

SEQ ID NO: 2158597 - RNA, 16 nt, Human
caugccucagcccuga

SEQ ID NO: 2158598 - RNA, 14 nt, Human
caugccucagcccu

SEQ ID NO: 2158599 - RNA, 11 nt, Human
caugccucagc

SEQ ID NO: 2158600 - RNA, 20 nt, Human
caugccucagcccugacccu

SEQ ID NO: 2158601 - RNA, 19 nt, Human
caugccucagcccugaccc

SEQ ID NO: 2158602 - RNA, 21 nt, Human
caugccucccccuagccauuu

SEQ ID NO: 2158603 - RNA, 14 nt, Human
cauggauggaaaac

SEQ ID NO: 2158604 - RNA, 19 nt, Human
caugcugugauugugccua

SEQ ID NO: 2158605 - RNA, 21 nt, Human
cauggacagaagaaggcagca

SEQ ID NO: 2158606 - RNA, 15 nt, Human
cauggacagaagaag

SEQ ID NO: 2158607 - RNA, 22 nt, Human
caugcgacacugggaggccagu

SEQ ID NO: 2158608 - RNA, 23 nt, Human
ccaucgccagcugaugacucaag

SEQ ID NO: 2158609 - RNA, 21 nt, Human
ccaucgccagcugaugacuca

SEQ ID NO: 2158610 - RNA, 19 nt, Human
ccaucgccagcugaugacu

SEQ ID NO: 2158611 - RNA, 22 nt, Human
ccaucgccagcugaugacucaa

SEQ ID NO: 2158612 - RNA, 17 nt, Human
ccaucgccagcugauga

SEQ ID NO: 2158613 - RNA, 20 nt, Human
ccauccuucccugucugcca

SEQ ID NO: 2158614 - RNA, 14 nt, Human
ccaucuuucuuugg

SEQ ID NO: 2158615 - RNA, 16 nt, Human
ccauccucuucuuuua

SEQ ID NO: 2158616 - RNA, 18 nt, Human
ccaggccuuaucuccaag

SEQ ID NO: 2158617 - RNA, 17 nt, Human
ccagggagaccuggaca

SEQ ID NO: 2158618 - RNA, 16 nt, Human
ccagggagaccuggac

SEQ ID NO: 2158619 - RNA, 18 nt, Human
ccagggacgaagaagagc

SEQ ID NO: 2158620 - RNA, 23 nt, Human
ccagggacgaagaagagccacag

SEQ ID NO: 2158621 - RNA, 21 nt, Human
ccagggacgaagaagagccac

SEQ ID NO: 2158622 - RNA, 20 nt, Human
ccagggacgaagaagagcca

SEQ ID NO: 2158623 - RNA, 19 nt, Human
ccagggacgaagaagagcc

SEQ ID NO: 2158624 - RNA, 23 nt, Human
ccagcugaugacucaagauuccc

SEQ ID NO: 2158625 - RNA, 22 nt, Human
ccagcugaugacucaagauucc

SEQ ID NO: 2158626 - RNA, 17 nt, Human
ccagcugaugacucaag

SEQ ID NO: 2158627 - RNA, 16 nt, Human
ccagcugaugacucaa

SEQ ID NO: 2158628 - RNA, 15 nt, Human
ccagcugaugacuca

SEQ ID NO: 2158629 - RNA, 11 nt, Human
ccagccuggcc

SEQ ID NO: 2158630 - RNA, 18 nt, Human
ccaugugcuacaggggcc

SEQ ID NO: 2158631 - RNA, 23 nt, Human
ccaugugcuacaggggccagaag

SEQ ID NO: 2158632 - RNA, 21 nt, Human
ccaugugaggguuuucagcau

SEQ ID NO: 2158633 - RNA, 16 nt, Human
ccauggauggaaaacg

SEQ ID NO: 2158634 - RNA, 22 nt, Human
ccaugaaaaugcaacaacaugu

SEQ ID NO: 2158635 - RNA, 16 nt, Human
ccaugcgacacuggga

SEQ ID NO: 2158636 - RNA, 22 nt, Human
ccaugcgacacugggaggccag

SEQ ID NO: 2158637 - RNA, 21 nt, Human
ccaugcgacacugggaggcca

SEQ ID NO: 2158638 - RNA, 11 nt, Human
cccagacacau

SEQ ID NO: 2158639 - RNA, 23 nt, Human
cccagacacaucgcacuguggau

SEQ ID NO: 2158640 - RNA, 20 nt, Human
cccagacacaucgcacugug

SEQ ID NO: 2158641 - RNA, 21 nt, Human
cccagacggcuccacuaggac

SEQ ID NO: 2158642 - RNA, 19 nt, Human
cccagcuacucgggaagcu

SEQ ID NO: 2158643 - RNA, 17 nt, Human
cccaguccuuccaccuc

SEQ ID NO: 2158644 - RNA, 16 nt, Human
cccaguccuuccaccu

SEQ ID NO: 2158645 - RNA, 14 nt, Human
cccaguccuuccac

SEQ ID NO: 2158646 - RNA, 23 nt, Human
cccaucgccagcugaugacucaa

SEQ ID NO: 2158647 - RNA, 13 nt, Human
ccuccauccuagu

SEQ ID NO: 2158648 - RNA, 19 nt, Human
ccucaguucuugccacuuu

SEQ ID NO: 2158649 - RNA, 18 nt, Human
ccucuccucauguucugc

SEQ ID NO: 2158650 - RNA, 20 nt, Human
ccucugaaugaaccuucugg

SEQ ID NO: 2158651 - RNA, 15 nt, Human
ccucucccugacccu

SEQ ID NO: 2158652 - RNA, 12 nt, Human
ccucucccugac

SEQ ID NO: 2158653 - RNA, 21 nt, Human
ccucucccugacccuguauau

SEQ ID NO: 2158654 - RNA, 11 nt, Human
ccucucccagg

SEQ ID NO: 2158655 - RNA, 21 nt, Human
cccuuuauugaaaaaauaaaa

SEQ ID NO: 2158656 - RNA, 19 nt, Human
ccuaacauaccuaagcaaa

SEQ ID NO: 2158657 - RNA, 16 nt, Human
ccuaaaccaaaaacug

SEQ ID NO: 2158658 - RNA, 15 nt, Human
ccuauucuuucgaaa

SEQ ID NO: 2158659 - RNA, 11 nt, Human
ccucacacagc

SEQ ID NO: 2158660 - RNA, 18 nt, Human
ccucagcccugacccugu

SEQ ID NO: 2158661 - RNA, 17 nt, Human
ccucagcccugacccug

SEQ ID NO: 2158662 - RNA, 16 nt, Human
ccucagcccugacccu

SEQ ID NO: 2158663 - RNA, 15 nt, Human
ccucagcccugaccc

SEQ ID NO: 2158664 - RNA, 13 nt, Human
ccucagcccugac

SEQ ID NO: 2158665 - RNA, 14 nt, Human
ccucagagugcaag

SEQ ID NO: 2158666 - RNA, 21 nt, Human
ccucagagugcaagccccugc

SEQ ID NO: 2158667 - RNA, 21 nt, Human
cccgcggggacauugggaagg

SEQ ID NO: 2158668 - RNA, 21 nt, Human
cccuaaggucauuaccacagg

SEQ ID NO: 2158669 - RNA, 14 nt, Human
cccuaaaagcacac

SEQ ID NO: 2158670 - RNA, 19 nt, Human
cuaaggucauuaccacagg

SEQ ID NO: 2158671 - RNA, 15 nt, Human
cuacccgcagaguuc

SEQ ID NO: 2158672 - RNA, 16 nt, Human
cuacaauuuaaagcaa

SEQ ID NO: 2158673 - RNA, 23 nt, Human
cuacagaaaaaccagaggcagcu

SEQ ID NO: 2158674 - RNA, 13 nt, Human
cuacagaaaaacc

SEQ ID NO: 2158675 - RNA, 13 nt, Human
cuaaugauggccc

SEQ ID NO: 2158676 - RNA, 23 nt, Human
cuaaugauggcccauucuacuug

SEQ ID NO: 2158677 - RNA, 22 nt, Human
cuaaugauggcccauucuacuu

SEQ ID NO: 2158678 - RNA, 19 nt, Human
cuaaugugccuaguucuuu

SEQ ID NO: 2158679 - RNA, 18 nt, Human
cuaaugucuguaucacuc

SEQ ID NO: 2158680 - RNA, 19 nt, Human
cuacuugcucuggaccugc

SEQ ID NO: 2158681 - RNA, 18 nt, Human
cuacuugcucuggaccug

SEQ ID NO: 2158682 - RNA, 17 nt, Human
cuacuugcucuggaccu

SEQ ID NO: 2158683 - RNA, 16 nt, Human
cuacuugcucuggacc

SEQ ID NO: 2158684 - RNA, 15 nt, Human
cuacuugcucuggac

SEQ ID NO: 2158685 - RNA, 14 nt, Human
cuacuugcucugga

SEQ ID NO: 2158686 - RNA, 13 nt, Human
cuacuugcucugg

SEQ ID NO: 2158687 - RNA, 21 nt, Human
cuacuugcucuggaccugccc

SEQ ID NO: 2158688 - RNA, 21 nt, Human
cuacuuuaauaaaugguuauu

SEQ ID NO: 2158689 - RNA, 21 nt, Human
cuacugugguguuuuguuuau

SEQ ID NO: 2158690 - RNA, 13 nt, Human
cuagcacaugccc

SEQ ID NO: 2158691 - RNA, 18 nt, Human
cuagagggaccucuccca

SEQ ID NO: 2158692 - RNA, 19 nt, Human
cuagagggaccucucccag

SEQ ID NO: 2158693 - RNA, 20 nt, Human
cuagagggaccucucccagg

SEQ ID NO: 2158694 - RNA, 21 nt, Human
cuagagggaccucucccaggg

SEQ ID NO: 2158695 - RNA, 22 nt, Human
cuagagcuuucuuucacaaaaa

SEQ ID NO: 2158696 - RNA, 14 nt, Human
cuagagcuuucuuu

SEQ ID NO: 2158697 - RNA, 14 nt, Human
cuaggccaggugca

SEQ ID NO: 2158698 - RNA, 11 nt, Human
cuaggccaggu

SEQ ID NO: 2158699 - RNA, 22 nt, Human
cuaggccaggugcaaccaggga

SEQ ID NO: 2158700 - RNA, 20 nt, Human
cuaggccaggugcaaccagg

SEQ ID NO: 2158701 - RNA, 23 nt, Human
cuaggaagaucucugcagggccg

SEQ ID NO: 2158702 - RNA, 17 nt, Human
cuaggacuucaaauugg

SEQ ID NO: 2158703 - RNA, 15 nt, Human
cuaggauacugcugc

SEQ ID NO: 2158704 - RNA, 14 nt, Human
cuaggauacugcug

SEQ ID NO: 2158705 - RNA, 16 nt, Human
cucacauuacacacac

SEQ ID NO: 2158706 - RNA, 23 nt, Human
cucaccccagacuccugacuguc

SEQ ID NO: 2158707 - RNA, 22 nt, Human
cucaaaugcucagaccagcucu

SEQ ID NO: 2158708 - RNA, 12 nt, Human
cuauuuugaagu

SEQ ID NO: 2158709 - RNA, 18 nt, Human
cucaacuagcagauacag

SEQ ID NO: 2158710 - RNA, 22 nt, Human
cgugggcugggcccacaaaggc

SEQ ID NO: 2158711 - RNA, 17 nt, Human
cgugcagggacaaagag

SEQ ID NO: 2158712 - RNA, 19 nt, Human
cuaaaacuacaaaaauuaa

SEQ ID NO: 2158713 - RNA, 23 nt, Human
cguuuacaagcccccccuuccac

SEQ ID NO: 2158714 - RNA, 15 nt, Human
cuaacaccagacaga

SEQ ID NO: 2158715 - RNA, 17 nt, Human
cgggagccucccugccu

SEQ ID NO: 2158716 - RNA, 15 nt, Human
cgggagccucccugc

SEQ ID NO: 2158717 - RNA, 22 nt, Human
cgggagccucccugccucaggc

SEQ ID NO: 2158718 - RNA, 19 nt, Human
cgggagccucccugccuca

SEQ ID NO: 2158719 - RNA, 23 nt, Human
cgcugucccuaguaaaaauacaa

SEQ ID NO: 2158720 - RNA, 13 nt, Human
cgcuugagaaaaa

SEQ ID NO: 2158721 - RNA, 23 nt, Human
cgcggcggagcuggccccgccgc

SEQ ID NO: 2158722 - RNA, 22 nt, Human
cgcggcggagcuggccccgccg

SEQ ID NO: 2158723 - RNA, 21 nt, Human
cgcggcggagcuggccccgcc

SEQ ID NO: 2158724 - RNA, 18 nt, Human
cgcggcggagcuggcccc

SEQ ID NO: 2158725 - RNA, 17 nt, Human
cgcggcggagcuggccc

SEQ ID NO: 2158726 - RNA, 15 nt, Human
cgcggcggagcuggc

SEQ ID NO: 2158727 - RNA, 13 nt, Human
cgccagcugauga

SEQ ID NO: 2158728 - RNA, 20 nt, Human
cgccagcugaugacucaaga

SEQ ID NO: 2158729 - RNA, 18 nt, Human
cgccagcugaugacucaa

SEQ ID NO: 2158730 - RNA, 17 nt, Human
cgccagcugaugacuca

SEQ ID NO: 2158731 - RNA, 16 nt, Human
cgccagcugaugacuc

SEQ ID NO: 2158732 - RNA, 15 nt, Human
cgccagcugaugacu

SEQ ID NO: 2158733 - RNA, 14 nt, Human
cgcccccugcccuc

SEQ ID NO: 2158734 - RNA, 16 nt, Human
cgcccaguccuuccac

SEQ ID NO: 2158735 - RNA, 19 nt, Human
cgcccccugcccuccccuc

SEQ ID NO: 2158736 - RNA, 15 nt, Human
cgcccccugcccucc

SEQ ID NO: 2158737 - RNA, 15 nt, Human
cgcccaguccuucca

SEQ ID NO: 2158738 - RNA, 14 nt, Human
cgcccaguccuucc

SEQ ID NO: 2158739 - RNA, 21 nt, Human
cgcccagauuaugagacacag

SEQ ID NO: 2158740 - RNA, 18 nt, Human
cucccaggugcagccaga

SEQ ID NO: 2158741 - RNA, 17 nt, Human
cucccaggugcagccag

SEQ ID NO: 2158742 - RNA, 13 nt, Human
cucuacucugcuu

SEQ ID NO: 2158743 - RNA, 12 nt, Human
cucuacucugcu

SEQ ID NO: 2158744 - RNA, 16 nt, Human
cucuacucuuacuucc

SEQ ID NO: 2158745 - RNA, 14 nt, Human
cucuacucugcuuu

SEQ ID NO: 2158746 - RNA, 22 nt, Human
cucucuacuaaaacuacaaaaa

SEQ ID NO: 2158747 - RNA, 23 nt, Human
cucucuacuaaaacuacaaaaau

SEQ ID NO: 2158748 - RNA, 18 nt, Human
cugaagaguccucugaau

SEQ ID NO: 2158749 - RNA, 15 nt, Human
cugaagaguccucug

SEQ ID NO: 2158750 - RNA, 16 nt, Human
cugaagaguccucuga

SEQ ID NO: 2158751 - RNA, 14 nt, Human
cugaagaguccucu

SEQ ID NO: 2158752 - RNA, 17 nt, Human
cugacagucaugcaguc

SEQ ID NO: 2158753 - RNA, 22 nt, Human
cugacucacaccugaacugaac

SEQ ID NO: 2158754 - RNA, 20 nt, Human
cugacugucucccgggacua

SEQ ID NO: 2158755 - RNA, 23 nt, Human
cugagaauauaauacuguauuug

SEQ ID NO: 2158756 - RNA, 20 nt, Human
cugagaauauaauacuguau

SEQ ID NO: 2158757 - RNA, 23 nt, Human
cugagaagguuugguccagccug

SEQ ID NO: 2158758 - RNA, 17 nt, Human
cugagcucuuugcacua

SEQ ID NO: 2158759 - RNA, 22 nt, Human
cugagccagugucaggaggaag

SEQ ID NO: 2158760 - RNA, 16 nt, Human
cugagccagugucagg

SEQ ID NO: 2158761 - RNA, 22 nt, Human
cugagcgccuggguccagggga

SEQ ID NO: 2158762 - RNA, 15 nt, Human
cugagcgccuggguc

SEQ ID NO: 2158763 - RNA, 22 nt, Human
cucuucuuuuagcaguaaaaua

SEQ ID NO: 2158764 - RNA, 18 nt, Human
cugaaauauacacacagc

SEQ ID NO: 2158765 - RNA, 19 nt, Human
cugaaauauacacacagca

SEQ ID NO: 2158766 - RNA, 12 nt, Human
cucuuugcacua

SEQ ID NO: 2158767 - RNA, 20 nt, Human
cugaacaccauugaaggcuu

SEQ ID NO: 2158768 - RNA, 11 nt, Human
cugaacaccau

SEQ ID NO: 2158769 - RNA, 18 nt, Human
cugaacaccauugaaggc

SEQ ID NO: 2158770 - RNA, 19 nt, Human
cugaacaccauugaaggcu

SEQ ID NO: 2158771 - RNA, 19 nt, Human
cugaacugauggguuucuc

SEQ ID NO: 2158772 - RNA, 13 nt, Human
cugaacugaacac

SEQ ID NO: 2158773 - RNA, 16 nt, Human
cucucugaaccccucc

SEQ ID NO: 2158774 - RNA, 13 nt, Human
cucugcuuugaaa

SEQ ID NO: 2158775 - RNA, 14 nt, Human
cucugcuuuaaagu

SEQ ID NO: 2158776 - RNA, 16 nt, Human
cuguauuugagaauau

SEQ ID NO: 2158777 - RNA, 19 nt, Human
cugucccuaguaaaaauac

SEQ ID NO: 2158778 - RNA, 21 nt, Human
cugucccuaguaaaaauacaa

SEQ ID NO: 2158779 - RNA, 12 nt, Human
cugucuccuggc

SEQ ID NO: 2158780 - RNA, 17 nt, Human
cuggucagguauuucag

SEQ ID NO: 2158781 - RNA, 22 nt, Human
cugguccacagggcaccugcca

SEQ ID NO: 2158782 - RNA, 16 nt, Human
cugguccacagggcac

SEQ ID NO: 2158783 - RNA, 13 nt, Human
cugguccacaggg

SEQ ID NO: 2158784 - RNA, 23 nt, Human
cuguaccaugugcuacaggggcc

SEQ ID NO: 2158785 - RNA, 19 nt, Human
cuggcuuuuuauuguauuu

SEQ ID NO: 2158786 - RNA, 11 nt, Human
cugggaaacag

SEQ ID NO: 2158787 - RNA, 15 nt, Human
cugggaaacagaggc

SEQ ID NO: 2158788 - RNA, 16 nt, Human
cugggaaacagaggcu

SEQ ID NO: 2158789 - RNA, 13 nt, Human
cuggcuggaguga

SEQ ID NO: 2158790 - RNA, 20 nt, Human
cugggaugggaggagaggac

SEQ ID NO: 2158791 - RNA, 13 nt, Human
cuggccucccaca

SEQ ID NO: 2158792 - RNA, 14 nt, Human
cuggccucccacag

SEQ ID NO: 2158793 - RNA, 18 nt, Human
cuggcaugauccaagcaa

SEQ ID NO: 2158794 - RNA, 17 nt, Human
cuggcaugauccaagca

SEQ ID NO: 2158795 - RNA, 18 nt, Human
cuggcaugcuaaagccuu

SEQ ID NO: 2158796 - RNA, 15 nt, Human
cugcauaccaaccug

SEQ ID NO: 2158797 - RNA, 16 nt, Human
cugcauaccaaccugg

SEQ ID NO: 2158798 - RNA, 17 nt, Human
cugccacccugggccug

SEQ ID NO: 2158799 - RNA, 16 nt, Human
cugccacccugggccu

SEQ ID NO: 2158800 - RNA, 23 nt, Human
cugccacccugggccuggcagcu

SEQ ID NO: 2158801 - RNA, 15 nt, Human
cugcagacgcccaga

SEQ ID NO: 2158802 - RNA, 16 nt, Human
cugcagugaggcugug

SEQ ID NO: 2158803 - RNA, 22 nt, Human
cugcuguaaauuuggcuucugu

SEQ ID NO: 2158804 - RNA, 23 nt, Human
cugcgcccaguccuuccaccucg

SEQ ID NO: 2158805 - RNA, 19 nt, Human
cugcgcccaguccuuccac

SEQ ID NO: 2158806 - RNA, 18 nt, Human
cugcgcccaguccuucca

SEQ ID NO: 2158807 - RNA, 16 nt, Human
cuugagucacaaagaa

SEQ ID NO: 2158808 - RNA, 13 nt, Human
cuugcauauuuug

SEQ ID NO: 2158809 - RNA, 14 nt, Human
cuugaguaaaauaa

SEQ ID NO: 2158810 - RNA, 13 nt, Human
cuugaguaaaaua

SEQ ID NO: 2158811 - RNA, 12 nt, Human
cuugaguaaaau

SEQ ID NO: 2158812 - RNA, 12 nt, Human
cuucuuuuagca

SEQ ID NO: 2158813 - RNA, 23 nt, Human
cuucuuuuagcaguaaaauagcu

SEQ ID NO: 2158814 - RNA, 17 nt, Human
cuugcuuuguguucuuu

SEQ ID NO: 2158815 - RNA, 19 nt, Human
cuugcuuuguguucuuugu

SEQ ID NO: 2158816 - RNA, 18 nt, Human
cuugcuuuguguucuuug

SEQ ID NO: 2158817 - RNA, 14 nt, Human
cuugcauugcagag

SEQ ID NO: 2158818 - RNA, 16 nt, Human
cuuucuuucacaaaaa

SEQ ID NO: 2158819 - RNA, 15 nt, Human
cuuucaaagccauuu

SEQ ID NO: 2158820 - RNA, 17 nt, Human
cuuucaaagccauuuua

SEQ ID NO: 2158821 - RNA, 22 nt, Human
cuuucaugaguuuuucccagcu

SEQ ID NO: 2158822 - RNA, 18 nt, Human
cuuucaugaguuuuuccc

SEQ ID NO: 2158823 - RNA, 14 nt, Human
cuuuguuuuuauuu

SEQ ID NO: 2158824 - RNA, 22 nt, Human
cuuuggagaagaguguggaguc

SEQ ID NO: 2158825 - RNA, 17 nt, Human
cuuuggaagaaaaaauc

SEQ ID NO: 2158826 - RNA, 15 nt, Human
cuuuggaagaaaaaa

SEQ ID NO: 2158827 - RNA, 21 nt, Human
cuuuuaacuccucaauuccaa

SEQ ID NO: 2158828 - RNA, 20 nt, Human
cuuuuaacuccucaauucca

SEQ ID NO: 2158829 - RNA, 19 nt, Human
gaaauucaacguuaauaau

SEQ ID NO: 2158830 - RNA, 23 nt, Human
gaaauucaacguuaauaauucug

SEQ ID NO: 2158831 - RNA, 14 nt, Human
gaaauuaggaugua

SEQ ID NO: 2158832 - RNA, 20 nt, Human
gaacauguagaaaacaaaau

SEQ ID NO: 2158833 - RNA, 17 nt, Human
gaaaugcaaaaaucucu

SEQ ID NO: 2158834 - RNA, 14 nt, Human
gaaaugcaaaaauc

SEQ ID NO: 2158835 - RNA, 20 nt, Human
gaaaugagaggcauuucccc

SEQ ID NO: 2158836 - RNA, 14 nt, Human
gaaagcaaagggcu

SEQ ID NO: 2158837 - RNA, 11 nt, Human
gaaaaauggag

SEQ ID NO: 2158838 - RNA, 22 nt, Human
gaaaaagaaaugcaaaaaucuc

SEQ ID NO: 2158839 - RNA, 14 nt, Human
gaaaaagaaaugca

SEQ ID NO: 2158840 - RNA, 13 nt, Human
gaaaaagaaaugc

SEQ ID NO: 2158841 - RNA, 20 nt, Human
gaaacgaagccaucuuucuu

SEQ ID NO: 2158842 - RNA, 14 nt, Human
gaaacgcagacacu

SEQ ID NO: 2158843 - RNA, 22 nt, Human
gaaaggagccuaggccaggugc

SEQ ID NO: 2158844 - RNA, 19 nt, Human
gaaaggagccuaggccagg

SEQ ID NO: 2158845 - RNA, 16 nt, Human
gaaagugccagaaagu

SEQ ID NO: 2158846 - RNA, 16 nt, Human
gaaagugaaaguccag

SEQ ID NO: 2158847 - RNA, 14 nt, Human
gaagaguccucuga

SEQ ID NO: 2158848 - RNA, 16 nt, Human
gaagaguccucugaau

SEQ ID NO: 2158849 - RNA, 22 nt, Human
gaagauucuucccauucuccau

SEQ ID NO: 2158850 - RNA, 21 nt, Human
gaagauucuucccauucucca

SEQ ID NO: 2158851 - RNA, 21 nt, Human
gaagaguguggagucauucuc

SEQ ID NO: 2158852 - RNA, 22 nt, Human
gaagaucucugcagggccgcca

SEQ ID NO: 2158853 - RNA, 19 nt, Human
gaagaucucugcagggccg

SEQ ID NO: 2158854 - RNA, 24 nt, Human
gaacuuuccacauucagagcuuac

SEQ ID NO: 2158855 - RNA, 14 nt, Human
gaacuuuauuucca

SEQ ID NO: 2158856 - RNA, 18 nt, Human
gagacacaggaugaagca

SEQ ID NO: 2158857 - RNA, 17 nt, Human
gagacacaggaugaagc

SEQ ID NO: 2158858 - RNA, 11 nt, Human
gagacacagga

SEQ ID NO: 2158859 - RNA, 23 nt, Human
gagaagauucuucccauucucca

SEQ ID NO: 2158860 - RNA, 14 nt, Human
gacuccggcccucc

SEQ ID NO: 2158861 - RNA, 13 nt, Human
gagaccagccugg

SEQ ID NO: 2158862 - RNA, 14 nt, Human
gagaccagccuggc

SEQ ID NO: 2158863 - RNA, 18 nt, Human
gagagaggcaauggcucc

SEQ ID NO: 2158864 - RNA, 23 nt, Human
gagagggccgggcagaggggcag

SEQ ID NO: 2158865 - RNA, 22 nt, Human
gaggaaaaaaaucguccaggga

SEQ ID NO: 2158866 - RNA, 18 nt, Human
gaggaaacaacagcuuua

SEQ ID NO: 2158867 - RNA, 14 nt, Human
gagcucuuugcacu

SEQ ID NO: 2158868 - RNA, 17 nt, Human
gagcugaggcaauucua

SEQ ID NO: 2158869 - RNA, 21 nt, Human
gagcucuuggaggugucugua

SEQ ID NO: 2158870 - RNA, 21 nt, Human
gagcucccaggugcagccaga

SEQ ID NO: 2158871 - RNA, 20 nt, Human
gagcucccaggugcagccag

SEQ ID NO: 2158872 - RNA, 16 nt, Human
gagcucccaggugcag

SEQ ID NO: 2158873 - RNA, 18 nt, Human
gagcuagccagaggacug

SEQ ID NO: 2158874 - RNA, 15 nt, Human
gagcuagccagagga

SEQ ID NO: 2158875 - RNA, 14 nt, Human
gagcuagccagagg

SEQ ID NO: 2158876 - RNA, 13 nt, Human
gagcuagccagag

SEQ ID NO: 2158877 - RNA, 12 nt, Human
gagcuagccaga

SEQ ID NO: 2158878 - RNA, 22 nt, Human
gagcagagaucacaccacugca

SEQ ID NO: 2158879 - RNA, 20 nt, Human
gagcagagaucacaccacug

SEQ ID NO: 2158880 - RNA, 14 nt, Human
gagccucccugccu

SEQ ID NO: 2158881 - RNA, 13 nt, Human
gagccucccugcc

SEQ ID NO: 2158882 - RNA, 12 nt, Human
gagccucccugc

SEQ ID NO: 2158883 - RNA, 19 nt, Human
gagccucccugccucaggc

SEQ ID NO: 2158884 - RNA, 15 nt, Human
gagccucccugccuc

SEQ ID NO: 2158885 - RNA, 16 nt, Human
gagccuaggccaggug

SEQ ID NO: 2158886 - RNA, 17 nt, Human
gagccuaggccaggugc

SEQ ID NO: 2158887 - RNA, 15 nt, Human
gagccuaggccaggu

SEQ ID NO: 2158888 - RNA, 14 nt, Human
gagccuaggccagg

SEQ ID NO: 2158889 - RNA, 18 nt, Human
gacgaagaagagccacag

SEQ ID NO: 2158890 - RNA, 22 nt, Human
gacggcugggcacacgccuccc

SEQ ID NO: 2158891 - RNA, 16 nt, Human
gacgaagaagagccac

SEQ ID NO: 2158892 - RNA, 14 nt, Human
gaccuugaugagcu

SEQ ID NO: 2158893 - RNA, 15 nt, Human
gaccuugaugagcug

SEQ ID NO: 2158894 - RNA, 13 nt, Human
gaccuugaugagc

SEQ ID NO: 2158895 - RNA, 18 nt, Human
gaccuggacacaggccug

SEQ ID NO: 2158896 - RNA, 14 nt, Human
gacguguuuguguu

SEQ ID NO: 2158897 - RNA, 18 nt, Human
gacuaauucuugcauauu

SEQ ID NO: 2158898 - RNA, 12 nt, Human
gacuaauucuug

SEQ ID NO: 2158899 - RNA, 14 nt, Human
gacccuguggaagc

SEQ ID NO: 2158900 - RNA, 17 nt, Human
gaccugcagacgcccag

SEQ ID NO: 2158901 - RNA, 23 nt, Human
gaccugcccccgcauccccugcc

SEQ ID NO: 2158902 - RNA, 21 nt, Human
gacauagcaucuuguggcuuu

SEQ ID NO: 2158903 - RNA, 14 nt, Human
gacaggcagagcug

SEQ ID NO: 2158904 - RNA, 16 nt, Human
gacagcauuuuccucu

SEQ ID NO: 2158905 - RNA, 23 nt, Human
gacagcauuuuccucugcuuuga

SEQ ID NO: 2158906 - RNA, 20 nt, Human
gacagcauuuuccucugcuu

SEQ ID NO: 2158907 - RNA, 21 nt, Human
gacagcuucucauccugcagg

SEQ ID NO: 2158908 - RNA, 22 nt, Human
gacagcuucucauccugcaggc

SEQ ID NO: 2158909 - RNA, 12 nt, Human
gacaccuuucau

SEQ ID NO: 2158910 - RNA, 12 nt, Human
gacacaggccug

SEQ ID NO: 2158911 - RNA, 13 nt, Human
gacacccccucgc

SEQ ID NO: 2158912 - RNA, 19 nt, Human
gcacugccucucacagcug

SEQ ID NO: 2158913 - RNA, 21 nt, Human
gcacugccucucacagcugag

SEQ ID NO: 2158914 - RNA, 16 nt, Human
gcacugccucucacag

SEQ ID NO: 2158915 - RNA, 14 nt, Human
gcacugccucucac

SEQ ID NO: 2158916 - RNA, 13 nt, Human
gcacugccucuca

SEQ ID NO: 2158917 - RNA, 21 nt, Human
gcacggaccaugcgacacugg

SEQ ID NO: 2158918 - RNA, 20 nt, Human
gcacgguggacccagacaca

SEQ ID NO: 2158919 - RNA, 20 nt, Human
gcaccauuuaaaaacaggca

SEQ ID NO: 2158920 - RNA, 21 nt, Human
gcacccaagaccucagggcac

SEQ ID NO: 2158921 - RNA, 17 nt, Human
gcacccaagaccucagg

SEQ ID NO: 2158922 - RNA, 15 nt, Human
gcagauacugucucu

SEQ ID NO: 2158923 - RNA, 22 nt, Human
gcagcgggagccucccugccuc

SEQ ID NO: 2158924 - RNA, 13 nt, Human
gcaggacaggaaa

SEQ ID NO: 2158925 - RNA, 16 nt, Human
gccaaaaaaagacagg

SEQ ID NO: 2158926 - RNA, 14 nt, Human
gccaaaaaaagaca

SEQ ID NO: 2158927 - RNA, 18 nt, Human
gcaugaucugaaaaauac

SEQ ID NO: 2158928 - RNA, 16 nt, Human
gcaugaucugaaaaau

SEQ ID NO: 2158929 - RNA, 23 nt, Human
gcaugauccaagcaagacugagg

SEQ ID NO: 2158930 - RNA, 22 nt, Human
gcaugauccaagcaagacugag

SEQ ID NO: 2158931 - RNA, 19 nt, Human
gcaugauccaagcaagacu

SEQ ID NO: 2158932 - RNA, 18 nt, Human
gcaugauccaagcaagac

SEQ ID NO: 2158933 - RNA, 13 nt, Human
gcaugaagguuuc

SEQ ID NO: 2158934 - RNA, 20 nt, Human
gcaucuuguggcuuugcaac

SEQ ID NO: 2158935 - RNA, 14 nt, Human
gcauauuuuguaac

SEQ ID NO: 2158936 - RNA, 21 nt, Human
gcaggggagggucagccaggg

SEQ ID NO: 2158937 - RNA, 19 nt, Human
gcaggggagggucagccag

SEQ ID NO: 2158938 - RNA, 20 nt, Human
gcaggggagggucagccagg

SEQ ID NO: 2158939 - RNA, 19 nt, Human
gcagggccaacccuucucc

SEQ ID NO: 2158940 - RNA, 23 nt, Human
gcagggccgccagggagaccugg

SEQ ID NO: 2158941 - RNA, 15 nt, Human
gcagggccgccaggg

SEQ ID NO: 2158942 - RNA, 15 nt, Human
gcagugccugauaag

SEQ ID NO: 2158943 - RNA, 20 nt, Human
gcaguggagguagaaugacu

SEQ ID NO: 2158944 - RNA, 18 nt, Human
gcaguggagguagaauga

SEQ ID NO: 2158945 - RNA, 17 nt, Human
gcagguagaccugucuc

SEQ ID NO: 2158946 - RNA, 19 nt, Human
gcagguagaccugucuccu

SEQ ID NO: 2158947 - RNA, 15 nt, Human
gcaggugaauuguuu

SEQ ID NO: 2158948 - RNA, 20 nt, Human
gcaggugaaacccagucacu

SEQ ID NO: 2158949 - RNA, 17 nt, Human
gcaggugaaacccaguc

SEQ ID NO: 2158950 - RNA, 16 nt, Human
gcaggugaaacccagu

SEQ ID NO: 2158951 - RNA, 16 nt, Human
gauaaauacaaggccc

SEQ ID NO: 2158952 - RNA, 16 nt, Human
gauaagcuucaaagcu

SEQ ID NO: 2158953 - RNA, 16 nt, Human
gauaguauugugcaua

SEQ ID NO: 2158954 - RNA, 23 nt, Human
gaucuauacuugcuuuguguucu

SEQ ID NO: 2158955 - RNA, 16 nt, Human
gaucuauacuugcuuu

SEQ ID NO: 2158956 - RNA, 21 nt, Human
gaucgcggcggagcuggcccc

SEQ ID NO: 2158957 - RNA, 15 nt, Human
gaugaagcauuuaca

SEQ ID NO: 2158958 - RNA, 15 nt, Human
gaugaagcaaacaca

SEQ ID NO: 2158959 - RNA, 16 nt, Human
gaugaagcaaacacau

SEQ ID NO: 2158960 - RNA, 19 nt, Human
gaugaagcaaacacauuaa

SEQ ID NO: 2158961 - RNA, 15 nt, Human
gauggauuuguauca

SEQ ID NO: 2158962 - RNA, 16 nt, Human
gaugcagcauuaugau

SEQ ID NO: 2158963 - RNA, 21 nt, Human
gaugcagcauuuuguauuugu

SEQ ID NO: 2158964 - RNA, 19 nt, Human
gaugacaacuacagaaaaa

SEQ ID NO: 2158965 - RNA, 20 nt, Human
gaugacaugcacucagcucu

SEQ ID NO: 2158966 - RNA, 22 nt, Human
gauuuuuacguuugaagacauu

SEQ ID NO: 2158967 - RNA, 22 nt, Human
gauuuccccuuuugcauucucc

SEQ ID NO: 2158968 - RNA, 23 nt, Human
gauuuccccuuuugcauucuccc

SEQ ID NO: 2158969 - RNA, 19 nt, Human
gauuuccccuuuugcauuc

SEQ ID NO: 2158970 - RNA, 17 nt, Human
gauuuccccuuuugcau

SEQ ID NO: 2158971 - RNA, 22 nt, Human
gauuucccauccccugugggaa

SEQ ID NO: 2158972 - RNA, 20 nt, Human
gauuucccauccccuguggg

SEQ ID NO: 2158973 - RNA, 16 nt, Human
gauuuccccuuuugca

SEQ ID NO: 2158974 - RNA, 18 nt, Human
gcaaaggguccagaagga

SEQ ID NO: 2158975 - RNA, 22 nt, Human
gcaaaggguccagaaggagaca

SEQ ID NO: 2158976 - RNA, 15 nt, Human
gcaacagaaaaaugg

SEQ ID NO: 2158977 - RNA, 17 nt, Human
gcaacagaaaaauggag

SEQ ID NO: 2158978 - RNA, 16 nt, Human
gcaaggguucccucaa

SEQ ID NO: 2158979 - RNA, 18 nt, Human
gcaaggguucccucaaga

SEQ ID NO: 2158980 - RNA, 15 nt, Human
gcaagccccugcucc

SEQ ID NO: 2158981 - RNA, 22 nt, Human
gccccaggcagggccaacccuu

SEQ ID NO: 2158982 - RNA, 23 nt, Human
gccccauucuuuuguaauuuaaa

SEQ ID NO: 2158983 - RNA, 22 nt, Human
gccccauucuuuuguaauuuaa

SEQ ID NO: 2158984 - RNA, 19 nt, Human
gcccccugcccuccccucu

SEQ ID NO: 2158985 - RNA, 14 nt, Human
gcccccugcccucc

SEQ ID NO: 2158986 - RNA, 12 nt, Human
gcccccugcccu

SEQ ID NO: 2158987 - RNA, 22 nt, Human
gccccuuuacggacacccccuc

SEQ ID NO: 2158988 - RNA, 20 nt, Human
gccccuuuacggacaccccc

SEQ ID NO: 2158989 - RNA, 15 nt, Human
gccccuuuacggaca

SEQ ID NO: 2158990 - RNA, 18 nt, Human
gcccuccuacccugcgcc

SEQ ID NO: 2158991 - RNA, 14 nt, Human
gcccugacccugug

SEQ ID NO: 2158992 - RNA, 17 nt, Human
gcccugacccuguggaa

SEQ ID NO: 2158993 - RNA, 17 nt, Human
gcccuccuacccugcgc

SEQ ID NO: 2158994 - RNA, 12 nt, Human
gcccucccaggc

SEQ ID NO: 2158995 - RNA, 21 nt, Human
gcccucccaggcucucaacag

SEQ ID NO: 2158996 - RNA, 20 nt, Human
gcccaagguuaaaaaguuca

SEQ ID NO: 2158997 - RNA, 23 nt, Human
gccaugaagaggaugcugugaaa

SEQ ID NO: 2158998 - RNA, 14 nt, Human
gccaugccucagcc

SEQ ID NO: 2158999 - RNA, 13 nt, Human
gccaugccucagc

SEQ ID NO: 2159000 - RNA, 21 nt, Human
gccaugccucagcccugaccc

SEQ ID NO: 2159001 - RNA, 17 nt, Human
gccaugccucagcccug

SEQ ID NO: 2159002 - RNA, 23 nt, Human
gccaucugguuaggauggcagga

SEQ ID NO: 2159003 - RNA, 17 nt, Human
gccaaggcucuguuuau

SEQ ID NO: 2159004 - RNA, 13 nt, Human
gccagaggcaccu

SEQ ID NO: 2159005 - RNA, 19 nt, Human
gccagcugaugacucaaga

SEQ ID NO: 2159006 - RNA, 18 nt, Human
gccagcugaugacucaag

SEQ ID NO: 2159007 - RNA, 14 nt, Human
gccagcugaugacu

SEQ ID NO: 2159008 - RNA, 17 nt, Human
gccagcugaugacucaa

SEQ ID NO: 2159009 - RNA, 16 nt, Human
gccagcugaugacuca

SEQ ID NO: 2159010 - RNA, 23 nt, Human
gccuuaucuccaagaccagagau

SEQ ID NO: 2159011 - RNA, 16 nt, Human
gccuggguccagggga

SEQ ID NO: 2159012 - RNA, 16 nt, Human
gccuuuggcagaguuc

SEQ ID NO: 2159013 - RNA, 20 nt, Human
gcuacaguuuugugaaucuu

SEQ ID NO: 2159014 - RNA, 15 nt, Human
gcuacaggggccaga

SEQ ID NO: 2159015 - RNA, 15 nt, Human
gcuaaagcccagaga

SEQ ID NO: 2159016 - RNA, 18 nt, Human
gcgggcaggggaggguca

SEQ ID NO: 2159017 - RNA, 23 nt, Human
gcgggcgcacugccucucacagc

SEQ ID NO: 2159018 - RNA, 17 nt, Human
gcgggcgcacugccucu

SEQ ID NO: 2159019 - RNA, 22 nt, Human
gcgggcgcacugccucucacag

SEQ ID NO: 2159020 - RNA, 18 nt, Human
gcggugggcacccacccu

SEQ ID NO: 2159021 - RNA, 19 nt, Human
gcgguuccucguucucccu

SEQ ID NO: 2159022 - RNA, 17 nt, Human
gcgucgcccucccaggc

SEQ ID NO: 2159023 - RNA, 19 nt, Human
gcgccgcaaaccacacugg

SEQ ID NO: 2159024 - RNA, 21 nt, Human
gcgccgcaaaccacacuggac

SEQ ID NO: 2159025 - RNA, 18 nt, Human
gcgacacugggaggccag

SEQ ID NO: 2159026 - RNA, 19 nt, Human
gccgcaccauugaacugua

SEQ ID NO: 2159027 - RNA, 15 nt, Human
gccguaguagauguu

SEQ ID NO: 2159028 - RNA, 22 nt, Human
gccguaguagauguucuacuuu

SEQ ID NO: 2159029 - RNA, 15 nt, Human
gccgguggugcaggu

SEQ ID NO: 2159030 - RNA, 14 nt, Human
gccucccacugggg

SEQ ID NO: 2159031 - RNA, 13 nt, Human
gccucccacuggg

SEQ ID NO: 2159032 - RNA, 15 nt, Human
gccucccuggugaga

SEQ ID NO: 2159033 - RNA, 13 nt, Human
gccucccugguga

SEQ ID NO: 2159034 - RNA, 18 nt, Human
uuuuuaaaaacuaaaaaa

SEQ ID NO: 2159035 - RNA, 11 nt, Human
uuuuuaaaagu

SEQ ID NO: 2159036 - RNA, 15 nt, Human
uuuuuaaagcuacaa

SEQ ID NO: 2159037 - RNA, 22 nt, Human
uuuugguuaagcuuugacacug

SEQ ID NO: 2159038 - RNA, 21 nt, Human
uuuugguuaagcuuugacacu

SEQ ID NO: 2159039 - RNA, 19 nt, Human
uuuugguuaagcuuugaca

SEQ ID NO: 2159040 - RNA, 18 nt, Human
uuuuguaacuuccaugug

SEQ ID NO: 2159041 - RNA, 15 nt, Human
uuuuguaacaaauga

SEQ ID NO: 2159042 - RNA, 14 nt, Human
uuuuguaauuuaaa

SEQ ID NO: 2159043 - RNA, 21 nt, Human
uuuuugaaaaagaaaacacuu

SEQ ID NO: 2159044 - RNA, 15 nt, Human
uuuuuccuucucugg

SEQ ID NO: 2159045 - RNA, 20 nt, Human
uuugaaucuauuuaucuuca

SEQ ID NO: 2159046 - RNA, 22 nt, Human
uuuuaaaaguuacuccuuuuag

SEQ ID NO: 2159047 - RNA, 18 nt, Human
uuuuaaaaguaaauguac

SEQ ID NO: 2159048 - RNA, 14 nt, Human
uuuguucuuuuuau

SEQ ID NO: 2159049 - RNA, 13 nt, Human
uuuuaauuaaaua

SEQ ID NO: 2159050 - RNA, 21 nt, Human
uuuuaaagaccugacaccuuu

SEQ ID NO: 2159051 - RNA, 15 nt, Human
uuucugaagcuuuac

SEQ ID NO: 2159052 - RNA, 18 nt, Human
uuucugaagcuuuaccag

SEQ ID NO: 2159053 - RNA, 19 nt, Human
uuucuacuuguuauaaacu

SEQ ID NO: 2159054 - RNA, 14 nt, Human
uuaccaaucauauu

SEQ ID NO: 2159055 - RNA, 16 nt, Human
uuucuuaaacaaaugu

SEQ ID NO: 2159056 - RNA, 23 nt, Human
uuucuuaucacaaaaaagaaaau

SEQ ID NO: 2159057 - RNA, 23 nt, Human
uuucuucaccucugcuacucaag

SEQ ID NO: 2159058 - RNA, 13 nt, Human
guauacuuccuua

SEQ ID NO: 2159059 - RNA, 19 nt, Human
guauacuuccuuaugcuuc

SEQ ID NO: 2159060 - RNA, 15 nt, Human
guauauagcccagcc

SEQ ID NO: 2159061 - RNA, 21 nt, Human
guauauauuuuuuaaaaaucu

SEQ ID NO: 2159062 - RNA, 18 nt, Human
guaucuacuuuaauaaau

SEQ ID NO: 2159063 - RNA, 19 nt, Human
guauguuuuuguguauuug

SEQ ID NO: 2159064 - RNA, 23 nt, Human
guauguuuuuguguauuuguuaa

SEQ ID NO: 2159065 - RNA, 22 nt, Human
guagucagaauuagcugcuucu

SEQ ID NO: 2159066 - RNA, 21 nt, Human
guagucagaauuagcugcuuc

SEQ ID NO: 2159067 - RNA, 14 nt, Human
guagcauuuacugu

SEQ ID NO: 2159068 - RNA, 20 nt, Human
guagcauuuacugugucuuu

SEQ ID NO: 2159069 - RNA, 15 nt, Human
guagcaguagaugca

SEQ ID NO: 2159070 - RNA, 16 nt, Human
guagcacauguaugcu

SEQ ID NO: 2159071 - RNA, 16 nt, Human
guagauguucuacuuu

SEQ ID NO: 2159072 - RNA, 18 nt, Human
guccaggggaggccuucc

SEQ ID NO: 2159073 - RNA, 13 nt, Human
guccacagggcac

SEQ ID NO: 2159074 - RNA, 19 nt, Human
guauuuuauaauucuggga

SEQ ID NO: 2159075 - RNA, 21 nt, Human
guauuuuaguaagagauuccu

SEQ ID NO: 2159076 - RNA, 13 nt, Human
guauuuugaaaau

SEQ ID NO: 2159077 - RNA, 20 nt, Human
guauuuucuucaccucugcu

SEQ ID NO: 2159078 - RNA, 13 nt, Human
gucugccagggcc

SEQ ID NO: 2159079 - RNA, 12 nt, Human
gucugccagggc

SEQ ID NO: 2159080 - RNA, 11 nt, Human
gucugccaggg

SEQ ID NO: 2159081 - RNA, 20 nt, Human
gucuguguuuuuuuggcagu

SEQ ID NO: 2159082 - RNA, 23 nt, Human
gucuguuuuguaaaguccccaga

SEQ ID NO: 2159083 - RNA, 15 nt, Human
gucuguuuuguaaag

SEQ ID NO: 2159084 - RNA, 14 nt, Human
gucuguuuuguaaa

SEQ ID NO: 2159085 - RNA, 12 nt, Human
gugcagccagag

SEQ ID NO: 2159086 - RNA, 14 nt, Human
gugcagccagaggc

SEQ ID NO: 2159087 - RNA, 13 nt, Human
gugcagccagagg

SEQ ID NO: 2159088 - RNA, 17 nt, Human
gugccauuuugcauuuu

SEQ ID NO: 2159089 - RNA, 13 nt, Human
gugaucaaagcca

SEQ ID NO: 2159090 - RNA, 22 nt, Human
gugacagagcaagacucugucu

SEQ ID NO: 2159091 - RNA, 19 nt, Human
gugaacaagcaaacccaga

SEQ ID NO: 2159092 - RNA, 14 nt, Human
gugaauuguuugaa

SEQ ID NO: 2159093 - RNA, 17 nt, Human
gugaauuguuugaaccu

SEQ ID NO: 2159094 - RNA, 17 nt, Human
gugucgagucaaaaugu

SEQ ID NO: 2159095 - RNA, 17 nt, Human
gugucugaguggcuuca

SEQ ID NO: 2159096 - RNA, 15 nt, Human
gugugcucugcuuca

SEQ ID NO: 2159097 - RNA, 21 nt, Human
guuaacuauuuuauuuucuaa

SEQ ID NO: 2159098 - RNA, 23 nt, Human
guguucaaggccauccuucccug

SEQ ID NO: 2159099 - RNA, 15 nt, Human
guguuuuuaacucaa

SEQ ID NO: 2159100 - RNA, 13 nt, Human
guguacucccagg

SEQ ID NO: 2159101 - RNA, 21 nt, Human
guguacucccagggcuuacgg

SEQ ID NO: 2159102 - RNA, 23 nt, Human
gugggcgggcaggggagggucag

SEQ ID NO: 2159103 - RNA, 17 nt, Human
guggggaagugaucuuu

SEQ ID NO: 2159104 - RNA, 16 nt, Human
guggggaggaaauaga

SEQ ID NO: 2159105 - RNA, 17 nt, Human
guggcuucacuccugcu

SEQ ID NO: 2159106 - RNA, 16 nt, Human
guggcuucacuccugc

SEQ ID NO: 2159107 - RNA, 20 nt, Human
gugggcacccacccugggac

SEQ ID NO: 2159108 - RNA, 16 nt, Human
gugggcacccacccug

SEQ ID NO: 2159109 - RNA, 23 nt, Human
guggcuucacuccugcuguaaau

SEQ ID NO: 2159110 - RNA, 20 nt, Human
guggcuauuaaaacucuuuu

SEQ ID NO: 2159111 - RNA, 19 nt, Human
guggcuauuaaaacucuuu

SEQ ID NO: 2159112 - RNA, 17 nt, Human
guggcuauuaaaacucu

SEQ ID NO: 2159113 - RNA, 20 nt, Human
guucgagaccagccuggcca

SEQ ID NO: 2159114 - RNA, 16 nt, Human
guucgagaccagccug

SEQ ID NO: 2159115 - RNA, 18 nt, Human
guucgacagugaauauuc

SEQ ID NO: 2159116 - RNA, 16 nt, Human
guucucuuaaaaggua

SEQ ID NO: 2159117 - RNA, 17 nt, Human
guucugagagaaaaaga

SEQ ID NO: 2159118 - RNA, 18 nt, Human
guugaaccuauuucucuu

SEQ ID NO: 2159119 - RNA, 16 nt, Human
guugaaccuauuucuc

SEQ ID NO: 2159120 - RNA, 15 nt, Human
guugaaccuauuucu

SEQ ID NO: 2159121 - RNA, 13 nt, Human
guuacuauaugcc

SEQ ID NO: 2159122 - RNA, 19 nt, Human
guuauccauuuaaaaaugg

SEQ ID NO: 2159123 - RNA, 18 nt, Human
guucaaggccauccuucc

SEQ ID NO: 2159124 - RNA, 19 nt, Human
guucaaggccauccuuccc

SEQ ID NO: 2159125 - RNA, 14 nt, Human
guucagaagaaauu

SEQ ID NO: 2159126 - RNA, 13 nt, Human
guucacucuucuc

SEQ ID NO: 2159127 - RNA, 20 nt, Human
guucacucuucucagccacu

SEQ ID NO: 2159128 - RNA, 12 nt, Human
guucaugacaau

SEQ ID NO: 2159129 - RNA, 20 nt, Human
guucauccuauucuuucgaa

SEQ ID NO: 2159130 - RNA, 23 nt, Human
guucagccacccugaggccucug

SEQ ID NO: 2159131 - RNA, 18 nt, Human
guuccucguucucccugg

SEQ ID NO: 2159132 - RNA, 20 nt, Human
guuccucguucucccuggga

SEQ ID NO: 2159133 - RNA, 17 nt, Human
guuccucguucucccug

SEQ ID NO: 2159134 - RNA, 14 nt, Human
guuccucguucucc

SEQ ID NO: 2159135 - RNA, 19 nt, Human
guuucuguuuaacuucuua

SEQ ID NO: 2159136 - RNA, 14 nt, Human
guuucuguuuaacu

SEQ ID NO: 2159137 - RNA, 16 nt, Human
guuugguccagccugg

SEQ ID NO: 2159138 - RNA, 18 nt, Human
guuuguggcuauuaaaac

SEQ ID NO: 2159139 - RNA, 15 nt, Human
guuuguggcuauuaa

SEQ ID NO: 2159140 - RNA, 18 nt, Human
guuuguuuuccuuuuauu

SEQ ID NO: 2159141 - RNA, 13 nt, Human
guuuguuuuccuu

SEQ ID NO: 2159142 - RNA, 17 nt, Human
guuuuguaaagucccca

SEQ ID NO: 2159143 - RNA, 13 nt, Human
guuuuguaaaguc

SEQ ID NO: 2159144 - RNA, 19 nt, Human
guuuucagcauugauauuu

SEQ ID NO: 2159145 - RNA, 20 nt, Human
guuuucccuugaggaaacaa

SEQ ID NO: 2159146 - RNA, 23 nt, Human
guugugacaacuuccugagggau

SEQ ID NO: 2159147 - RNA, 18 nt, Human
guugugccucccugguga

SEQ ID NO: 2159148 - RNA, 16 nt, Human
guugugccucccuggu

SEQ ID NO: 2159149 - RNA, 12 nt, Human
guugucccugca

SEQ ID NO: 2159150 - RNA, 14 nt, Human
guugucaccuucac

SEQ ID NO: 2159151 - RNA, 21 nt, Human
uaaaacagguagaauuaucua

SEQ ID NO: 2159152 - RNA, 23 nt, Human
uaaaacaccuaaauaaccaaucu

SEQ ID NO: 2159153 - RNA, 11 nt, Human
uaaaagcacac

SEQ ID NO: 2159154 - RNA, 18 nt, Human
uaaaacauuuucacacaa

SEQ ID NO: 2159155 - RNA, 15 nt, Human
uaaaacauuuucaca

SEQ ID NO: 2159156 - RNA, 17 nt, Human
uaaaacauuuucacaca

SEQ ID NO: 2159157 - RNA, 22 nt, Human
uaaaacagguagaauuaucuaa

SEQ ID NO: 2159158 - RNA, 18 nt, Human
uaaagaaaaucucuguga

SEQ ID NO: 2159159 - RNA, 14 nt, Human
uaaaguuauucuug

SEQ ID NO: 2159160 - RNA, 13 nt, Human
uaaaguuauucuu

SEQ ID NO: 2159161 - RNA, 19 nt, Human
uaaaguuauucuugaaguc

SEQ ID NO: 2159162 - RNA, 16 nt, Human
uaaaccaaaaacugaa

SEQ ID NO: 2159163 - RNA, 21 nt, Human
uaaauguaccuucagaauaag

SEQ ID NO: 2159164 - RNA, 22 nt, Human
uaaauggaaacugaaacuacug

SEQ ID NO: 2159165 - RNA, 11 nt, Human
uaaauggcugc

SEQ ID NO: 2159166 - RNA, 18 nt, Human
uaaauggaaacugaaacu

SEQ ID NO: 2159167 - RNA, 16 nt, Human
uaaauggaaacugaaa

SEQ ID NO: 2159168 - RNA, 17 nt, Human
uaaauuuggcuucuguu

SEQ ID NO: 2159169 - RNA, 14 nt, Human
uaaauuuggcuucu

SEQ ID NO: 2159170 - RNA, 14 nt, Human
uaacaccagcauug

SEQ ID NO: 2159171 - RNA, 19 nt, Human
uaacaccugauuaacugag

SEQ ID NO: 2159172 - RNA, 18 nt, Human
uaacaccugauuaacuga

SEQ ID NO: 2159173 - RNA, 22 nt, Human
uaaccaugugaaaaggcaaaaa

SEQ ID NO: 2159174 - RNA, 17 nt, Human
uaaccauggugcuuguu

SEQ ID NO: 2159175 - RNA, 22 nt, Human
uaacucaauauuuuccaugaaa

SEQ ID NO: 2159176 - RNA, 14 nt, Human
uaacucaauauuuu

SEQ ID NO: 2159177 - RNA, 19 nt, Human
uaacuauuuuauuuucuaa

SEQ ID NO: 2159178 - RNA, 17 nt, Human
uaacuccucaauuccaa

SEQ ID NO: 2159179 - RNA, 18 nt, Human
uaacccccacuggacuga

SEQ ID NO: 2159180 - RNA, 18 nt, Human
uaaccccgucaacaaauc

SEQ ID NO: 2159181 - RNA, 17 nt, Human
uaaccccgucaacaaau

SEQ ID NO: 2159182 - RNA, 16 nt, Human
uaaccccgucaacaaa

SEQ ID NO: 2159183 - RNA, 23 nt, Human
uaauguuguuccuuuugaaagaa

SEQ ID NO: 2159184 - RNA, 16 nt, Human
uaauuagcaucucagg

SEQ ID NO: 2159185 - RNA, 18 nt, Human
uaaggucauuaccacagg

SEQ ID NO: 2159186 - RNA, 12 nt, Human
uaauaaauauuu

SEQ ID NO: 2159187 - RNA, 14 nt, Human
uauaaacacuauau

SEQ ID NO: 2159188 - RNA, 17 nt, Human
uaguugaaccuauuucu

SEQ ID NO: 2159189 - RNA, 19 nt, Human
uaguugaaacgcagacacu

SEQ ID NO: 2159190 - RNA, 23 nt, Human
uaguagauguucuacuuuguucu

SEQ ID NO: 2159191 - RNA, 18 nt, Human
uagcauauaauucuauau

SEQ ID NO: 2159192 - RNA, 20 nt, Human
uagauacuuugcuagccggc

SEQ ID NO: 2159193 - RNA, 16 nt, Human
uagccggccacuuugg

SEQ ID NO: 2159194 - RNA, 15 nt, Human
uagaauuaucuaauu

SEQ ID NO: 2159195 - RNA, 16 nt, Human
uagaauuaucuaauuu

SEQ ID NO: 2159196 - RNA, 19 nt, Human
uagaauuaucuaauuuaua

SEQ ID NO: 2159197 - RNA, 21 nt, Human
uagaauuaucuaauuuauaaa

SEQ ID NO: 2159198 - RNA, 22 nt, Human
uagaauuaucuaauuuauaaaa

SEQ ID NO: 2159199 - RNA, 23 nt, Human
uagaauuaucuaauuuauaaaaa

SEQ ID NO: 2159200 - RNA, 17 nt, Human
uagaauaauaaauauuu

SEQ ID NO: 2159201 - RNA, 16 nt, Human
uagaauaauaaauauu

SEQ ID NO: 2159202 - RNA, 14 nt, Human
uacuuguuauaaac

SEQ ID NO: 2159203 - RNA, 14 nt, Human
uagacuaaaugaaa

SEQ ID NO: 2159204 - RNA, 16 nt, Human
uagaccugucuccugg

SEQ ID NO: 2159205 - RNA, 14 nt, Human
uagaccugucuccu

SEQ ID NO: 2159206 - RNA, 13 nt, Human
uagacuaaaugaa

SEQ ID NO: 2159207 - RNA, 16 nt, Human
uaccuucauaugcagu

SEQ ID NO: 2159208 - RNA, 18 nt, Human
uacuguggaaaagaaaca

SEQ ID NO: 2159209 - RNA, 17 nt, Human
uacucauuuaaaguauu

SEQ ID NO: 2159210 - RNA, 23 nt, Human
uacucccagggcuuacggcccug

SEQ ID NO: 2159211 - RNA, 20 nt, Human
uacugcaccauuuaaaaaca

SEQ ID NO: 2159212 - RNA, 17 nt, Human
uacaaacaugugguuaa

SEQ ID NO: 2159213 - RNA, 19 nt, Human
uaauuccuuuccagguauu

SEQ ID NO: 2159214 - RNA, 17 nt, Human
uacaacacaaagagaaa

SEQ ID NO: 2159215 - RNA, 15 nt, Human
uacaacacaaagaga

SEQ ID NO: 2159216 - RNA, 23 nt, Human
uacaacccgguucacucuucuca

SEQ ID NO: 2159217 - RNA, 13 nt, Human
uacacaauguguc

SEQ ID NO: 2159218 - RNA, 16 nt, Human
uacacaaugugucuuu

SEQ ID NO: 2159219 - RNA, 22 nt, Human
uacacagugugaauaaagugcu

SEQ ID NO: 2159220 - RNA, 11 nt, Human
uacacagugug

SEQ ID NO: 2159221 - RNA, 18 nt, Human
ugaaucuauuuaucuuca

SEQ ID NO: 2159222 - RNA, 16 nt, Human
ugaaucuauuuaagua

SEQ ID NO: 2159223 - RNA, 14 nt, Human
ugaaucuauuuaag

SEQ ID NO: 2159224 - RNA, 15 nt, Human
ugaaugaaccuucug

SEQ ID NO: 2159225 - RNA, 16 nt, Human
ugaaugaaccuucugg

SEQ ID NO: 2159226 - RNA, 23 nt, Human
ugaaugcagucuguccaggcucg

SEQ ID NO: 2159227 - RNA, 22 nt, Human
ugaaugcagucuguccaggcuc

SEQ ID NO: 2159228 - RNA, 17 nt, Human
ugaagaguccucugaau

SEQ ID NO: 2159229 - RNA, 23 nt, Human
ugaagaguccucugaaugaaccu

SEQ ID NO: 2159230 - RNA, 18 nt, Human
ugaaggccucgcaggaag

SEQ ID NO: 2159231 - RNA, 16 nt, Human
ugaaggccucgcagga

SEQ ID NO: 2159232 - RNA, 22 nt, Human
ugacagagcaagacucugucua

SEQ ID NO: 2159233 - RNA, 18 nt, Human
ugacaugcacucagcucu

SEQ ID NO: 2159234 - RNA, 15 nt, Human
ugaauuguuugaacc

SEQ ID NO: 2159235 - RNA, 15 nt, Human
ugacaacuacagaaa

SEQ ID NO: 2159236 - RNA, 22 nt, Human
ugacaacuacagaaaaaccaga

SEQ ID NO: 2159237 - RNA, 16 nt, Human
ugacaacuacagaaaa

SEQ ID NO: 2159238 - RNA, 17 nt, Human
ugacuuucauuggaaau

SEQ ID NO: 2159239 - RNA, 15 nt, Human
ugacuuucauuggaa

SEQ ID NO: 2159240 - RNA, 23 nt, Human
ugacuaauucuugcauauuuugu

SEQ ID NO: 2159241 - RNA, 22 nt, Human
ugacuaauucuugcauauuuug

SEQ ID NO: 2159242 - RNA, 17 nt, Human
ugacuaauucuugcaua

SEQ ID NO: 2159243 - RNA, 15 nt, Human
ugacuaauucuugca

SEQ ID NO: 2159244 - RNA, 14 nt, Human
ugagaaaaaaagaa

SEQ ID NO: 2159245 - RNA, 11 nt, Human
ugacuuugucu

SEQ ID NO: 2159246 - RNA, 17 nt, Human
ugagagggccgggcaga

SEQ ID NO: 2159247 - RNA, 14 nt, Human
ugagagggccgggc

SEQ ID NO: 2159248 - RNA, 18 nt, Human
ugaggucauagcagugcu

SEQ ID NO: 2159249 - RNA, 20 nt, Human
ugagcugugcacaaaguggc

SEQ ID NO: 2159250 - RNA, 12 nt, Human
ugagcugucacu

SEQ ID NO: 2159251 - RNA, 17 nt, Human
ugagcugcagaaacgaa

SEQ ID NO: 2159252 - RNA, 15 nt, Human
ugagcugcagaaacg

SEQ ID NO: 2159253 - RNA, 14 nt, Human
ugagcugcagaaac

SEQ ID NO: 2159254 - RNA, 16 nt, Human
ugagcucuuugcacua

SEQ ID NO: 2159255 - RNA, 15 nt, Human
ugagcucuuugcacu

SEQ ID NO: 2159256 - RNA, 18 nt, Human
ucugcaccguacugugga

SEQ ID NO: 2159257 - RNA, 14 nt, Human
ucugucuaaaaaac

SEQ ID NO: 2159258 - RNA, 15 nt, Human
ucugucuaaaaaaca

SEQ ID NO: 2159259 - RNA, 13 nt, Human
ucuggaccugccc

SEQ ID NO: 2159260 - RNA, 12 nt, Human
ucuggaccugcc

SEQ ID NO: 2159261 - RNA, 16 nt, Human
ucuuuucauugaacag

SEQ ID NO: 2159262 - RNA, 22 nt, Human
ucuuguggcuuugcaaccauuu

SEQ ID NO: 2159263 - RNA, 21 nt, Human
ucuuaucacaaaaaagaaaau

SEQ ID NO: 2159264 - RNA, 23 nt, Human
ucuuaucaagaguugugacaacu

SEQ ID NO: 2159265 - RNA, 20 nt, Human
ucuucauuugaaugucuucu

SEQ ID NO: 2159266 - RNA, 21 nt, Human
ucuucuuuuagcaguaaaaua

SEQ ID NO: 2159267 - RNA, 23 nt, Human
ucaggaggaaggcuuacacccac

SEQ ID NO: 2159268 - RNA, 16 nt, Human
ucaggaggaaggcuua

SEQ ID NO: 2159269 - RNA, 18 nt, Human
ucaggaccuccaagccac

SEQ ID NO: 2159270 - RNA, 20 nt, Human
ucaggaccuccaagccacug

SEQ ID NO: 2159271 - RNA, 13 nt, Human
ucaggacacuaau

SEQ ID NO: 2159272 - RNA, 17 nt, Human
ucaguuaaguuuuuccc

SEQ ID NO: 2159273 - RNA, 18 nt, Human
ucaguuaaguuuuucccu

SEQ ID NO: 2159274 - RNA, 11 nt, Human
ucagguggcca

SEQ ID NO: 2159275 - RNA, 13 nt, Human
ucagguggccaug

SEQ ID NO: 2159276 - RNA, 16 nt, Human
ucauacuuaagcaaaa

SEQ ID NO: 2159277 - RNA, 19 nt, Human
ucauagaaagugccagaaa

SEQ ID NO: 2159278 - RNA, 17 nt, Human
ucaucaacccuaaaaag

SEQ ID NO: 2159279 - RNA, 14 nt, Human
ucaucauuuuuccu

SEQ ID NO: 2159280 - RNA, 14 nt, Human
ucaucuuugugaag

SEQ ID NO: 2159281 - RNA, 22 nt, Human
ucccacugggguccagggagca

SEQ ID NO: 2159282 - RNA, 14 nt, Human
ucccagggcuuacg

SEQ ID NO: 2159283 - RNA, 21 nt, Human
uccaugugaggguuuucagca

SEQ ID NO: 2159284 - RNA, 22 nt, Human
ucauguauguucagaagaaauu

SEQ ID NO: 2159285 - RNA, 19 nt, Human
ucauguauguucagaagaa

SEQ ID NO: 2159286 - RNA, 21 nt, Human
ucauguauguucagaagaaau

SEQ ID NO: 2159287 - RNA, 12 nt, Human
uccaagagcuga

SEQ ID NO: 2159288 - RNA, 23 nt, Human
uccacacucaccucuaaaacagu

SEQ ID NO: 2159289 - RNA, 17 nt, Human
uccaagccacugagcaa

SEQ ID NO: 2159290 - RNA, 15 nt, Human
uccaagccagcggga

SEQ ID NO: 2159291 - RNA, 18 nt, Human
uccacuuucagugaaagc

SEQ ID NO: 2159292 - RNA, 14 nt, Human
uccuauuuagaugg

SEQ ID NO: 2159293 - RNA, 19 nt, Human
uccuauuuugcauaauaaa

SEQ ID NO: 2159294 - RNA, 21 nt, Human
ucgccagcugaugacucaaga

SEQ ID NO: 2159295 - RNA, 20 nt, Human
ucgccagcugaugacucaag

SEQ ID NO: 2159296 - RNA, 19 nt, Human
ucgccagcugaugacucaa

SEQ ID NO: 2159297 - RNA, 18 nt, Human
ucgccagcugaugacuca

SEQ ID NO: 2159298 - RNA, 16 nt, Human
ucgccagcugaugacu

SEQ ID NO: 2159299 - RNA, 15 nt, Human
ucgauucauauugaa

SEQ ID NO: 2159300 - RNA, 17 nt, Human
ucgauucauauugaaua

SEQ ID NO: 2159301 - RNA, 20 nt, Human
ucgcaggaagacccaacaca

SEQ ID NO: 2159302 - RNA, 18 nt, Human
uccuuuguacuuugugcu

SEQ ID NO: 2159303 - RNA, 13 nt, Human
uccuuuguacuuu

SEQ ID NO: 2159304 - RNA, 12 nt, Human
ucucacaaacau

SEQ ID NO: 2159305 - RNA, 12 nt, Human
ucguccagggag

SEQ ID NO: 2159306 - RNA, 23 nt, Human
ucuaaugauggcccauucuacuu

SEQ ID NO: 2159307 - RNA, 22 nt, Human
ucuaaugauggcccauucuacu

SEQ ID NO: 2159308 - RNA, 16 nt, Human
ucuaaugauggcccau

SEQ ID NO: 2159309 - RNA, 13 nt, Human
ucuaauuuauaaa

SEQ ID NO: 2159310 - RNA, 14 nt, Human
ucuaauuuauaaaa

SEQ ID NO: 2159311 - RNA, 22 nt, Human
ucuacucauuuaaaguauuuua

SEQ ID NO: 2159312 - RNA, 20 nt, Human
ucuaggccuccuggcccagg

SEQ ID NO: 2159313 - RNA, 13 nt, Human
uggaaccaggcuu

SEQ ID NO: 2159314 - RNA, 12 nt, Human
uggacagaagaa

SEQ ID NO: 2159315 - RNA, 21 nt, Human
uggacuagagggaccucuccc

SEQ ID NO: 2159316 - RNA, 22 nt, Human
ugcuuugaaagccccagaaauc

SEQ ID NO: 2159317 - RNA, 23 nt, Human
ugcuuugaaagccccagaaauca

SEQ ID NO: 2159318 - RNA, 23 nt, Human
uggaaagacagcuucucauccug

SEQ ID NO: 2159319 - RNA, 15 nt, Human
uggaaagcaaagggc

SEQ ID NO: 2159320 - RNA, 12 nt, Human
uggaaagcaaag

SEQ ID NO: 2159321 - RNA, 19 nt, Human
uggaaagacagcuucucau

SEQ ID NO: 2159322 - RNA, 23 nt, Human
uggauuucccauccccuguggga

SEQ ID NO: 2159323 - RNA, 19 nt, Human
uggaggagcucaggacacu

SEQ ID NO: 2159324 - RNA, 20 nt, Human
uggcaggacgugggcugggc

SEQ ID NO: 2159325 - RNA, 13 nt, Human
uggcaggacagga

SEQ ID NO: 2159326 - RNA, 19 nt, Human
ugguauucgcuugagaaaa

SEQ ID NO: 2159327 - RNA, 21 nt, Human
ugggggcggggugggaaagau

SEQ ID NO: 2159328 - RNA, 23 nt, Human
ugggaccuauaacugcccagcgg

SEQ ID NO: 2159329 - RNA, 19 nt, Human
ugggaccuaggggcgccgc

SEQ ID NO: 2159330 - RNA, 24 nt, Human
ugggaccuccaccguugguguuca

SEQ ID NO: 2159331 - RNA, 16 nt, Human
uggcccauucuacuug

SEQ ID NO: 2159332 - RNA, 15 nt, Human
uggcccauucuacuu

SEQ ID NO: 2159333 - RNA, 22 nt, Human
uggcccauucuacuugcucugg

SEQ ID NO: 2159334 - RNA, 21 nt, Human
uggcccauucuacuugcucug

SEQ ID NO: 2159335 - RNA, 20 nt, Human
uggcccauucuacuugcucu

SEQ ID NO: 2159336 - RNA, 17 nt, Human
uggcccauucuacuugc

SEQ ID NO: 2159337 - RNA, 23 nt, Human
uggcccauucuacuugcucugga

SEQ ID NO: 2159338 - RNA, 18 nt, Human
uggcuucucugaggaagc

SEQ ID NO: 2159339 - RNA, 16 nt, Human
uggcuucucugaggaa

SEQ ID NO: 2159340 - RNA, 15 nt, Human
uggcuucucugagga

SEQ ID NO: 2159341 - RNA, 19 nt, Human
uggcuucuguugucaccuu

SEQ ID NO: 2159342 - RNA, 14 nt, Human
uggcuuuaaugaau

SEQ ID NO: 2159343 - RNA, 24 nt, Human
ugcauauuuuguaacuuccaugug

SEQ ID NO: 2159344 - RNA, 22 nt, Human
ugcacuuucucaugauuuacag

SEQ ID NO: 2159345 - RNA, 15 nt, Human
ugcaggccaggccag

SEQ ID NO: 2159346 - RNA, 17 nt, Human
ugcauauauacauauau

SEQ ID NO: 2159347 - RNA, 16 nt, Human
ugcucagaccagcucu

SEQ ID NO: 2159348 - RNA, 17 nt, Human
ugcucagaccagcucuu

SEQ ID NO: 2159349 - RNA, 21 nt, Human
ugcucagggaaaagcagcucu

SEQ ID NO: 2159350 - RNA, 22 nt, Human
ugcucagggaaaagcagcucuc

SEQ ID NO: 2159351 - RNA, 23 nt, Human
ugcugcgucauuacagggcacag

SEQ ID NO: 2159352 - RNA, 20 nt, Human
ugcugcggagcaagaggagg

SEQ ID NO: 2159353 - RNA, 16 nt, Human
ugcugcggagcaagag

SEQ ID NO: 2159354 - RNA, 15 nt, Human
ugcugcggagcaaga

SEQ ID NO: 2159355 - RNA, 14 nt, Human
ugcugcauacauuc

SEQ ID NO: 2159356 - RNA, 21 nt, Human
ugccucucacagcugaguugu

SEQ ID NO: 2159357 - RNA, 18 nt, Human
ugccucucacagcugagu

SEQ ID NO: 2159358 - RNA, 17 nt, Human
ugccucucacagcugag

SEQ ID NO: 2159359 - RNA, 14 nt, Human
ugccucucacagcu

SEQ ID NO: 2159360 - RNA, 17 nt, Human
ugcuaaagccuuccuau

SEQ ID NO: 2159361 - RNA, 19 nt, Human
uguaaucccagcuacucgg

SEQ ID NO: 2159362 - RNA, 20 nt, Human
uguaaucccagcuacucggg

SEQ ID NO: 2159363 - RNA, 13 nt, Human
uguagcagaaagg

SEQ ID NO: 2159364 - RNA, 15 nt, Human
uguacugggccaugu

SEQ ID NO: 2159365 - RNA, 18 nt, Human
uguagccuuuugacuuuc

SEQ ID NO: 2159366 - RNA, 14 nt, Human
ugucaccuucaccu

SEQ ID NO: 2159367 - RNA, 13 nt, Human
ugucaccuucacc

SEQ ID NO: 2159368 - RNA, 16 nt, Human
uguauuuaaaaaaauc

SEQ ID NO: 2159369 - RNA, 22 nt, Human
uguauuuucuucaccucugcua

SEQ ID NO: 2159370 - RNA, 14 nt, Human
uguccucagguggc

SEQ ID NO: 2159371 - RNA, 19 nt, Human
uguccucagguggccaugc

SEQ ID NO: 2159372 - RNA, 18 nt, Human
uguccucagguggccaug

SEQ ID NO: 2159373 - RNA, 18 nt, Human
ugugaauugagcugcaga

SEQ ID NO: 2159374 - RNA, 22 nt, Human
uguggcuauuaaaacucuuuua

SEQ ID NO: 2159375 - RNA, 22 nt, Human
uuaacuugucaaaaaacaaaaa

SEQ ID NO: 2159376 - RNA, 16 nt, Human
uuaacuugucaaaaaa

SEQ ID NO: 2159377 - RNA, 21 nt, Human
uuaauacaaugaugcuauuug

SEQ ID NO: 2159378 - RNA, 17 nt, Human
uuacacagugugaauaa

SEQ ID NO: 2159379 - RNA, 19 nt, Human
uuacaacccgguucacucu

SEQ ID NO: 2159380 - RNA, 20 nt, Human
uuaauuaaauagcuuuugug

SEQ ID NO: 2159381 - RNA, 19 nt, Human
uuaauuaaauagcuuuugu

SEQ ID NO: 2159382 - RNA, 15 nt, Human
uuaauuaaauagcuu

SEQ ID NO: 2159383 - RNA, 22 nt, Human
uuaaagccacaaccacauacaa

SEQ ID NO: 2159384 - RNA, 20 nt, Human
uuaaacuaaggcccucuuga

SEQ ID NO: 2159385 - RNA, 12 nt, Human
uguuuuuaaaag

SEQ ID NO: 2159386 - RNA, 12 nt, Human
uguuuuuaacuc

SEQ ID NO: 2159387 - RNA, 11 nt, Human
uguuugugugu

SEQ ID NO: 2159388 - RNA, 22 nt, Human
uguuuagaacacugguuuaaag

SEQ ID NO: 2159389 - RNA, 21 nt, Human
uguuuccaguacaccuuucag

SEQ ID NO: 2159390 - RNA, 16 nt, Human
uguuuccugcaggcca

SEQ ID NO: 2159391 - RNA, 18 nt, Human
ugugugugcagacuucag

SEQ ID NO: 2159392 - RNA, 14 nt, Human
uguguuuuuaaaag

SEQ ID NO: 2159393 - RNA, 22 nt, Human
uguguggagcucgcuaaaguca

SEQ ID NO: 2159394 - RNA, 21 nt, Human
uguuagcccaagguuaaaaag

SEQ ID NO: 2159395 - RNA, 15 nt, Human
uguucagaagaaauu

SEQ ID NO: 2159396 - RNA, 22 nt, Human
uguucagaagaaauucugucau

SEQ ID NO: 2159397 - RNA, 14 nt, Human
uguugacaugugcu

SEQ ID NO: 2159398 - RNA, 17 nt, Human
uguucuuuuuauugaau

SEQ ID NO: 2159399 - RNA, 14 nt, Human
uguucuuuuuauug

SEQ ID NO: 2159400 - RNA, 18 nt, Human
uguucugcuguucucuag

SEQ ID NO: 2159401 - RNA, 14 nt, Human
uguucugcuguucu

SEQ ID NO: 2159402 - RNA, 16 nt, Human
uguuuaacuucuuaua

SEQ ID NO: 2159403 - RNA, 19 nt, Human
caaugaugcuauuugcaau

SEQ ID NO: 2159404 - RNA, 18 nt, Human
caaugaugcuauuugcaa

SEQ ID NO: 2159405 - RNA, 17 nt, Human
caaugaugcuauuugca

SEQ ID NO: 2159406 - RNA, 13 nt, Human
caaugaugcuauu

SEQ ID NO: 2159407 - RNA, 22 nt, Human
caaugccaaaaaaagacagggc

SEQ ID NO: 2159408 - RNA, 20 nt, Human
cacaaagagaaaaagaaaug

SEQ ID NO: 2159409 - RNA, 22 nt, Human
cacaaagaugggugaaggcugg

SEQ ID NO: 2159410 - RNA, 18 nt, Human
cacaaagagaaaaagaaa

SEQ ID NO: 2159411 - RNA, 13 nt, Human
cacaaaaaagaag

SEQ ID NO: 2159412 - RNA, 12 nt, Human
cacaaaaaagaa

SEQ ID NO: 2159413 - RNA, 18 nt, Human
cacagacucaaaugcuca

SEQ ID NO: 2159414 - RNA, 14 nt, Human
cacagacucauauu

SEQ ID NO: 2159415 - RNA, 23 nt, Human
cacagacuguugucccugcacuc

SEQ ID NO: 2159416 - RNA, 22 nt, Human
cacagacuguugucccugcacu

SEQ ID NO: 2159417 - RNA, 20 nt, Human
cacacuggacuccggcccuc

SEQ ID NO: 2159418 - RNA, 19 nt, Human
cacacuggacuccggcccu

SEQ ID NO: 2159419 - RNA, 13 nt, Human
cacacuggacucc

SEQ ID NO: 2159420 - RNA, 14 nt, Human
cacacucauccccu

SEQ ID NO: 2159421 - RNA, 22 nt, Human
cacacagacuguugucccugca

SEQ ID NO: 2159422 - RNA, 15 nt, Human
cacacagacuguugu

SEQ ID NO: 2159423 - RNA, 20 nt, Human
cacacagacucauauuacug

SEQ ID NO: 2159424 - RNA, 14 nt, Human
cacaaccugaaccu

SEQ ID NO: 2159425 - RNA, 22 nt, Human
cacaccaggcuugccugcaggc

SEQ ID NO: 2159426 - RNA, 21 nt, Human
cacaccaggcuugccugcagg

SEQ ID NO: 2159427 - RNA, 22 nt, Human
cacaccuguaaucccagcacuu

SEQ ID NO: 2159428 - RNA, 22 nt, Human
cacauacaacacaaagagaaaa

SEQ ID NO: 2159429 - RNA, 13 nt, Human
cacauacaacaca

SEQ ID NO: 2159430 - RNA, 15 nt, Human
caccacgucacuuca

SEQ ID NO: 2159431 - RNA, 22 nt, Human
caccacucaaaggccagaccug

SEQ ID NO: 2159432 - RNA, 18 nt, Human
caccacucaaaggccaga

SEQ ID NO: 2159433 - RNA, 18 nt, Human
cacauggcuauguuuuag

SEQ ID NO: 2159434 - RNA, 17 nt, Human
cacauuagacuauccau

SEQ ID NO: 2159435 - RNA, 23 nt, Human
cacauuaagccuuccacacucac

SEQ ID NO: 2159436 - RNA, 16 nt, Human
caaggaagccacagcu

SEQ ID NO: 2159437 - RNA, 21 nt, Human
caagccccugcuccagaagau

SEQ ID NO: 2159438 - RNA, 18 nt, Human
caagcccccccuuccacu

SEQ ID NO: 2159439 - RNA, 16 nt, Human
caaccugaaccuagga

SEQ ID NO: 2159440 - RNA, 13 nt, Human
caaccugaaccua

SEQ ID NO: 2159441 - RNA, 12 nt, Human
caaccugaaccu

SEQ ID NO: 2159442 - RNA, 23 nt, Human
caacccuucuccucuuguaaaua

SEQ ID NO: 2159443 - RNA, 21 nt, Human
caacccuucuccucuuguaaa

SEQ ID NO: 2159444 - RNA, 20 nt, Human
caacccuucuccucuuguaa

SEQ ID NO: 2159445 - RNA, 10 nt, Human
caacccuucu

SEQ ID NO: 2159446 - RNA, 15 nt, Human
caacuuaacaugaaa

SEQ ID NO: 2159447 - RNA, 23 nt, Human
caacauguauaauauuuuuaauu

SEQ ID NO: 2159448 - RNA, 19 nt, Human
caacauguauaauauuuuu

SEQ ID NO: 2159449 - RNA, 18 nt, Human
caacauguauaauauuuu

SEQ ID NO: 2159450 - RNA, 17 nt, Human
caacauguauaauauuu

SEQ ID NO: 2159451 - RNA, 14 nt, Human
caacauucuuugca

SEQ ID NO: 2159452 - RNA, 13 nt, Human
caacauguauaau

SEQ ID NO: 2159453 - RNA, 22 nt, Human
caaccacauacaacacaaagag

SEQ ID NO: 2159454 - RNA, 23 nt, Human
caaauugugugugcucugcuuca

SEQ ID NO: 2159455 - RNA, 16 nt, Human
caaaggaguagaaaga

SEQ ID NO: 2159456 - RNA, 19 nt, Human
caaagaggccuuuaaccau

SEQ ID NO: 2159457 - RNA, 23 nt, Human
caaacuuccagugcaacacugaa

SEQ ID NO: 2159458 - RNA, 15 nt, Human
caaauagcacuugac

SEQ ID NO: 2159459 - RNA, 14 nt, Human
cacccacccuggga

SEQ ID NO: 2159460 - RNA, 13 nt, Human
cacccacccuggg

SEQ ID NO: 2159461 - RNA, 21 nt, Human
aacugaacaccauugaaggcu

SEQ ID NO: 2159462 - RNA, 22 nt, Human
aacugaacaccauugaaggcuu

SEQ ID NO: 2159463 - RNA, 23 nt, Human
aacugaacaccauugaaggcuua

SEQ ID NO: 2159464 - RNA, 19 nt, Human
gugaguccuagagcuacag

SEQ ID NO: 2159465 - RNA, 20 nt, Human
gugaaggccucgcaggaaga

SEQ ID NO: 2159466 - RNA, 12 nt, Human
gugaaggccucg

SEQ ID NO: 2159467 - RNA, 13 nt, Human
gugaaggcuggca

SEQ ID NO: 2159468 - RNA, 12 nt, Human
gugaaggcuggc

SEQ ID NO: 2159469 - RNA, 14 nt, Human
gugaaggcuggcau

SEQ ID NO: 2159470 - RNA, 19 nt, Human
gucuuuguuaaguucuauu

SEQ ID NO: 2159471 - RNA, 20 nt, Human
aaccaugaagucucuaacaa

SEQ ID NO: 2159472 - RNA, 22 nt, Human
aaccacauacaacacaaagaga

SEQ ID NO: 2159473 - RNA, 13 nt, Human
aacauuuucacac

SEQ ID NO: 2159474 - RNA, 15 nt, Human
aacauuuuacccaca

SEQ ID NO: 2159475 - RNA, 17 nt, Human
aacauuuuacccacaca

SEQ ID NO: 2159476 - RNA, 18 nt, Human
gucgacuucgggcuggcc

SEQ ID NO: 2159477 - RNA, 15 nt, Human
gucgcccucccaggc

SEQ ID NO: 2159478 - RNA, 16 nt, Human
guagccuuuugacuuu

SEQ ID NO: 2159479 - RNA, 12 nt, Human
aagcaaacacau

SEQ ID NO: 2159480 - RNA, 13 nt, Human
aagcaaacacauu

SEQ ID NO: 2159481 - RNA, 14 nt, Human
aagcaaacacauua

SEQ ID NO: 2159482 - RNA, 13 nt, Human
aagcaaacccaga

SEQ ID NO: 2159483 - RNA, 19 nt, Human
aagcaaacccagacggcuc

SEQ ID NO: 2159484 - RNA, 16 nt, Human
aagcaaacccagacgg

SEQ ID NO: 2159485 - RNA, 23 nt, Human
gugguuaaugccauggacagaag

SEQ ID NO: 2159486 - RNA, 14 nt, Human
gugguuacacagug

SEQ ID NO: 2159487 - RNA, 13 nt, Human
gugguuacacagu

SEQ ID NO: 2159488 - RNA, 13 nt, Human
guguucuuugugu

SEQ ID NO: 2159489 - RNA, 19 nt, Human
aagacccaacacaugggac

SEQ ID NO: 2159490 - RNA, 15 nt, Human
aagagauuccugagc

SEQ ID NO: 2159491 - RNA, 18 nt, Human
aagagcugaggcaauucu

SEQ ID NO: 2159492 - RNA, 11 nt, Human
aagagcugagg

SEQ ID NO: 2159493 - RNA, 23 nt, Human
gugggaaagauuacuuuuucuuu

SEQ ID NO: 2159494 - RNA, 20 nt, Human
gugguguuuccugcaggcca

SEQ ID NO: 2159495 - RNA, 14 nt, Human
gugggucaaggaau

SEQ ID NO: 2159496 - RNA, 19 nt, Human
aagaaggcagcagguggca

SEQ ID NO: 2159497 - RNA, 18 nt, Human
gugcuguccucagguggc

SEQ ID NO: 2159498 - RNA, 20 nt, Human
aagaaguaggggaagacaug

SEQ ID NO: 2159499 - RNA, 23 nt, Human
aagaccagagauaguggggagac

SEQ ID NO: 2159500 - RNA, 14 nt, Human
guggcaaccugcuu

SEQ ID NO: 2159501 - RNA, 12 nt, Human
uaacaaaugaac

SEQ ID NO: 2159502 - RNA, 17 nt, Human
uaaauagcuuuuguguc

SEQ ID NO: 2159503 - RNA, 14 nt, Human
aauacaauaaguua

SEQ ID NO: 2159504 - RNA, 22 nt, Human
uaaauaacuggaggaauuuucu

SEQ ID NO: 2159505 - RNA, 23 nt, Human
uaaagucauggucauugcaggaa

SEQ ID NO: 2159506 - RNA, 18 nt, Human
aauaaaaaaaagaaauga

SEQ ID NO: 2159507 - RNA, 20 nt, Human
aauaaaaaaaagaaaugaaa

SEQ ID NO: 2159508 - RNA, 18 nt, Human
aauaaagguuguuuugaa

SEQ ID NO: 2159509 - RNA, 23 nt, Human
uaaacccauauuguaaaacaggu

SEQ ID NO: 2159510 - RNA, 17 nt, Human
uaaagauaaagccagaa

SEQ ID NO: 2159511 - RNA, 23 nt, Human
aaguguuuaacuugucaaaaaac

SEQ ID NO: 2159512 - RNA, 21 nt, Human
aaguucuauuggaaaaaccac

SEQ ID NO: 2159513 - RNA, 16 nt, Human
aaguucagccacccug

SEQ ID NO: 2159514 - RNA, 21 nt, Human
aaguuuucccuugaggaaaca

SEQ ID NO: 2159515 - RNA, 22 nt, Human
aaguuuucccuugaggaaacaa

SEQ ID NO: 2159516 - RNA, 16 nt, Human
guucucccugggaggc

SEQ ID NO: 2159517 - RNA, 14 nt, Human
aagcuuugacacug

SEQ ID NO: 2159518 - RNA, 19 nt, Human
aaggagacaggcagagcug

SEQ ID NO: 2159519 - RNA, 16 nt, Human
aaggagacaggcagag

SEQ ID NO: 2159520 - RNA, 14 nt, Human
aaggagacaggcag

SEQ ID NO: 2159521 - RNA, 15 nt, Human
aaggccucgcaggaa

SEQ ID NO: 2159522 - RNA, 17 nt, Human
aaggccucgcaggaaga

SEQ ID NO: 2159523 - RNA, 18 nt, Human
aaggccucgcaggaagac

SEQ ID NO: 2159524 - RNA, 23 nt, Human
guuuuuuucauugccaaaaacua

SEQ ID NO: 2159525 - RNA, 16 nt, Human
aaggguucccucaaga

SEQ ID NO: 2159526 - RNA, 13 nt, Human
uacagucuauuug

SEQ ID NO: 2159527 - RNA, 22 nt, Human
aauguagugaagggauguauca

SEQ ID NO: 2159528 - RNA, 23 nt, Human
aaugguuugaauauaaacacuau

SEQ ID NO: 2159529 - RNA, 17 nt, Human
aaugguuugaauauaaa

SEQ ID NO: 2159530 - RNA, 22 nt, Human
uacaaucucccuucacaaguuu

SEQ ID NO: 2159531 - RNA, 14 nt, Human
aaugguuugaauau

SEQ ID NO: 2159532 - RNA, 20 nt, Human
uacaccuuucuccuuuguac

SEQ ID NO: 2159533 - RNA, 19 nt, Human
uacaccuuucuccuuugua

SEQ ID NO: 2159534 - RNA, 18 nt, Human
uacaccuuucuccuuugu

SEQ ID NO: 2159535 - RNA, 12 nt, Human
aauuaacacugc

SEQ ID NO: 2159536 - RNA, 14 nt, Human
aauuaacagaaaaa

SEQ ID NO: 2159537 - RNA, 14 nt, Human
uacccgcagaguuc

SEQ ID NO: 2159538 - RNA, 15 nt, Human
uacaagcccccccuu

SEQ ID NO: 2159539 - RNA, 14 nt, Human
uacaagcccccccu

SEQ ID NO: 2159540 - RNA, 19 nt, Human
uacaagcccccccuuccac

SEQ ID NO: 2159541 - RNA, 22 nt, Human
uaauuugauaguauugugcaua

SEQ ID NO: 2159542 - RNA, 18 nt, Human
aaugcaacaacauguaua

SEQ ID NO: 2159543 - RNA, 15 nt, Human
aaugcaacaacaugu

SEQ ID NO: 2159544 - RNA, 17 nt, Human
uaaugugccuaguucuu

SEQ ID NO: 2159545 - RNA, 18 nt, Human
uaaugucaaacuugaguc

SEQ ID NO: 2159546 - RNA, 13 nt, Human
uaaugucaaacuu

SEQ ID NO: 2159547 - RNA, 16 nt, Human
acaagcaaacccagac

SEQ ID NO: 2159548 - RNA, 19 nt, Human
acaagcaaacccagacggc

SEQ ID NO: 2159549 - RNA, 14 nt, Human
acaacacaaagaga

SEQ ID NO: 2159550 - RNA, 23 nt, Human
uagagcuuucuuucacaaaaaag

SEQ ID NO: 2159551 - RNA, 12 nt, Human
uagagcuuucuu

SEQ ID NO: 2159552 - RNA, 22 nt, Human
uagacaaguccagccuggcaag

SEQ ID NO: 2159553 - RNA, 23 nt, Human
acaaaaaaaccucuuaauauucu

SEQ ID NO: 2159554 - RNA, 17 nt, Human
aauuugagauacaaaca

SEQ ID NO: 2159555 - RNA, 21 nt, Human
aauuugauaguauugugcaua

SEQ ID NO: 2159556 - RNA, 15 nt, Human
aauuuaaagccacaa

SEQ ID NO: 2159557 - RNA, 20 nt, Human
aauuuaaagaaguaugggaa

SEQ ID NO: 2159558 - RNA, 12 nt, Human
aauuuaaagcaa

SEQ ID NO: 2159559 - RNA, 20 nt, Human
aauuguuuguaagugaagug

SEQ ID NO: 2159560 - RNA, 21 nt, Human
aauugugugugcucugcuuca

SEQ ID NO: 2159561 - RNA, 12 nt, Human
aauuguuucaca

SEQ ID NO: 2159562 - RNA, 17 nt, Human
aauucuugcauauuuug

SEQ ID NO: 2159563 - RNA, 13 nt, Human
aauucuugcauau

SEQ ID NO: 2159564 - RNA, 23 nt, Human
uacccugcgcccaguccuuccac

SEQ ID NO: 2159565 - RNA, 21 nt, Human
uacccugcgcccaguccuucc

SEQ ID NO: 2159566 - RNA, 23 nt, Human
aauucuuauuuuuuaaaaagcua

SEQ ID NO: 2159567 - RNA, 19 nt, Human
aauucuuauuuuuuaaaaa

SEQ ID NO: 2159568 - RNA, 15 nt, Human
aauucuuauucuuuc

SEQ ID NO: 2159569 - RNA, 17 nt, Human
aauucuuacaaacaugu

SEQ ID NO: 2159570 - RNA, 21 nt, Human
uacucaaguagcauuuacugu

SEQ ID NO: 2159571 - RNA, 19 nt, Human
uacucaaguagcauuuacu

SEQ ID NO: 2159572 - RNA, 15 nt, Human
uacucaagcccgcgg

SEQ ID NO: 2159573 - RNA, 13 nt, Human
uacguaugagacg

SEQ ID NO: 2159574 - RNA, 23 nt, Human
acagucuauuugagacuccucag

SEQ ID NO: 2159575 - RNA, 19 nt, Human
acagugugaauaaagugcu

SEQ ID NO: 2159576 - RNA, 17 nt, Human
acagggcaccugccacc

SEQ ID NO: 2159577 - RNA, 13 nt, Human
acagggcacaggc

SEQ ID NO: 2159578 - RNA, 15 nt, Human
acagggcaccugcca

SEQ ID NO: 2159579 - RNA, 16 nt, Human
acagggcacaggccau

SEQ ID NO: 2159580 - RNA, 15 nt, Human
uauuaguuuugcaua

SEQ ID NO: 2159581 - RNA, 20 nt, Human
uauucaauaaaaaaaagaaa

SEQ ID NO: 2159582 - RNA, 23 nt, Human
uauucaauaaaaaaaagaaauga

SEQ ID NO: 2159583 - RNA, 22 nt, Human
uauucaauaaaaaaaagaaaug

SEQ ID NO: 2159584 - RNA, 14 nt, Human
uauugucuuuuugu

SEQ ID NO: 2159585 - RNA, 20 nt, Human
uauuuaaguaacuuuaaauu

SEQ ID NO: 2159586 - RNA, 22 nt, Human
uauuucaauuuccaagagcuga

SEQ ID NO: 2159587 - RNA, 22 nt, Human
uauuuagcuccaaaccuucaca

SEQ ID NO: 2159588 - RNA, 21 nt, Human
uauugaauauaauauauuugu

SEQ ID NO: 2159589 - RNA, 20 nt, Human
uauugaauauaauauauuug

SEQ ID NO: 2159590 - RNA, 22 nt, Human
uauugaauauaauauauuugug

SEQ ID NO: 2159591 - RNA, 11 nt, Human
uauugaaucua

SEQ ID NO: 2159592 - RNA, 17 nt, Human
uauugaaucuauuuaag

SEQ ID NO: 2159593 - RNA, 16 nt, Human
uauugaaucuauuuaa

SEQ ID NO: 2159594 - RNA, 22 nt, Human
uauucuuucgaaagaagaaaau

SEQ ID NO: 2159595 - RNA, 14 nt, Human
uauugacuuugucu

SEQ ID NO: 2159596 - RNA, 17 nt, Human
uauuggguuccauucuc

SEQ ID NO: 2159597 - RNA, 15 nt, Human
uauuguaaaacaggu

SEQ ID NO: 2159598 - RNA, 17 nt, Human
uauucuuauucaaagaa

SEQ ID NO: 2159599 - RNA, 14 nt, Human
uauucuuauucaaa

SEQ ID NO: 2159600 - RNA, 20 nt, Human
acagacuguugucccugcac

SEQ ID NO: 2159601 - RNA, 19 nt, Human
acagacuguugucccugca

SEQ ID NO: 2159602 - RNA, 19 nt, Human
acagacugaccuugaugag

SEQ ID NO: 2159603 - RNA, 20 nt, Human
acagacucaaaugcucagac

SEQ ID NO: 2159604 - RNA, 22 nt, Human
acagacucacaaccugaaccua

SEQ ID NO: 2159605 - RNA, 20 nt, Human
acagacucacaaccugaacc

SEQ ID NO: 2159606 - RNA, 22 nt, Human
acagacucgauucauauugaau

SEQ ID NO: 2159607 - RNA, 18 nt, Human
uaugaugugggucaagga

SEQ ID NO: 2159608 - RNA, 19 nt, Human
acagcccaaagaaggaaaa

SEQ ID NO: 2159609 - RNA, 12 nt, Human
uauacacacagc

SEQ ID NO: 2159610 - RNA, 18 nt, Human
uauagguuuuaaagaccu

SEQ ID NO: 2159611 - RNA, 19 nt, Human
uagucagaauuagcugcuu

SEQ ID NO: 2159612 - RNA, 16 nt, Human
acacaucgcacugugg

SEQ ID NO: 2159613 - RNA, 21 nt, Human
acaccaggcuugccugcaggc

SEQ ID NO: 2159614 - RNA, 12 nt, Human
acacccagcccc

SEQ ID NO: 2159615 - RNA, 19 nt, Human
acaccuaaauaaccaaucu

SEQ ID NO: 2159616 - RNA, 17 nt, Human
acacccagcccccacau

SEQ ID NO: 2159617 - RNA, 20 nt, Human
acucauuuaaaguauuuuau

SEQ ID NO: 2159618 - RNA, 16 nt, Human
ucccuguaggauuuuu

SEQ ID NO: 2159619 - RNA, 23 nt, Human
uccucagguggccaugccucagc

SEQ ID NO: 2159620 - RNA, 15 nt, Human
uccucacacacagac

SEQ ID NO: 2159621 - RNA, 20 nt, Human
uccucaauuccaacacugau

SEQ ID NO: 2159622 - RNA, 18 nt, Human
uccccuuuugcauucucc

SEQ ID NO: 2159623 - RNA, 15 nt, Human
acuauauuguacaca

SEQ ID NO: 2159624 - RNA, 16 nt, Human
acuaaaacuacaaaaa

SEQ ID NO: 2159625 - RNA, 20 nt, Human
uccagccugguuuagccugg

SEQ ID NO: 2159626 - RNA, 21 nt, Human
uccagcuauuuuuauuuguuu

SEQ ID NO: 2159627 - RNA, 18 nt, Human
acguuuacaagccccccc

SEQ ID NO: 2159628 - RNA, 17 nt, Human
ucccaggugcagccaga

SEQ ID NO: 2159629 - RNA, 21 nt, Human
acuguaccaugugcuacaggg

SEQ ID NO: 2159630 - RNA, 12 nt, Human
acuguacaugug

SEQ ID NO: 2159631 - RNA, 22 nt, Human
acugggaugggaggagaggaca

SEQ ID NO: 2159632 - RNA, 17 nt, Human
ucgacagugaauauuca

SEQ ID NO: 2159633 - RNA, 22 nt, Human
ucgacagcauuuuccucugcuu

SEQ ID NO: 2159634 - RNA, 18 nt, Human
uccuuucaagguaacugu

SEQ ID NO: 2159635 - RNA, 19 nt, Human
uccuuucaaugguuugcaa

SEQ ID NO: 2159636 - RNA, 14 nt, Human
uccuuuccagguau

SEQ ID NO: 2159637 - RNA, 22 nt, Human
ucgaauuuuguuuucuugauuu

SEQ ID NO: 2159638 - RNA, 16 nt, Human
acugccuuuggcagag

SEQ ID NO: 2159639 - RNA, 19 nt, Human
acugccuuuggcagaguuc

SEQ ID NO: 2159640 - RNA, 16 nt, Human
acugcauaccaaccug

SEQ ID NO: 2159641 - RNA, 20 nt, Human
acugcauaccaaccugggca

SEQ ID NO: 2159642 - RNA, 22 nt, Human
acugcugcgucauuacagggca

SEQ ID NO: 2159643 - RNA, 16 nt, Human
uccuuccucacaccag

SEQ ID NO: 2159644 - RNA, 21 nt, Human
uccuuccucacaccaggcuug

SEQ ID NO: 2159645 - RNA, 10 nt, Human
acuggcaugc

SEQ ID NO: 2159646 - RNA, 19 nt, Human
uccugugccuccaucagcu

SEQ ID NO: 2159647 - RNA, 14 nt, Human
uccugcaggccagg

SEQ ID NO: 2159648 - RNA, 19 nt, Human
uccugcaggccaggccagc

SEQ ID NO: 2159649 - RNA, 20 nt, Human
uccugcaggccaggccagcu

SEQ ID NO: 2159650 - RNA, 12 nt, Human
uccacagggcac

SEQ ID NO: 2159651 - RNA, 20 nt, Human
uccaacacugauuuccccuu

SEQ ID NO: 2159652 - RNA, 20 nt, Human
ucauuugcuaacuagcuugg

SEQ ID NO: 2159653 - RNA, 19 nt, Human
ucauuuguuuguuuuccuu

SEQ ID NO: 2159654 - RNA, 18 nt, Human
accugguccacagggcac

SEQ ID NO: 2159655 - RNA, 17 nt, Human
accugguccacagggca

SEQ ID NO: 2159656 - RNA, 16 nt, Human
accugguccacagggc

SEQ ID NO: 2159657 - RNA, 15 nt, Human
accugguccacaggg

SEQ ID NO: 2159658 - RNA, 15 nt, Human
uccaccagucauuuu

SEQ ID NO: 2159659 - RNA, 14 nt, Human
uccaccagucauuu

SEQ ID NO: 2159660 - RNA, 18 nt, Human
uccaccagucauuuuuca

SEQ ID NO: 2159661 - RNA, 16 nt, Human
uccaccagucauuuuu

SEQ ID NO: 2159662 - RNA, 23 nt, Human
accuuaggaauaaucuccuguua

SEQ ID NO: 2159663 - RNA, 12 nt, Human
accuauccacac

SEQ ID NO: 2159664 - RNA, 12 nt, Human
ucauauugaaua

SEQ ID NO: 2159665 - RNA, 16 nt, Human
ucaugaccagcaaaua

SEQ ID NO: 2159666 - RNA, 15 nt, Human
ucaugaccagcaaau

SEQ ID NO: 2159667 - RNA, 18 nt, Human
ucauucuaaugauggccc

SEQ ID NO: 2159668 - RNA, 22 nt, Human
accuccuuucaagguaacugua

SEQ ID NO: 2159669 - RNA, 14 nt, Human
accucuccucaugu

SEQ ID NO: 2159670 - RNA, 23 nt, Human
accucucccugacccuguauaua

SEQ ID NO: 2159671 - RNA, 22 nt, Human
accucucccugacccuguauau

SEQ ID NO: 2159672 - RNA, 17 nt, Human
accucucccugacccug

SEQ ID NO: 2159673 - RNA, 14 nt, Human
accucucccugacc

SEQ ID NO: 2159674 - RNA, 15 nt, Human
accagccugaccaaa

SEQ ID NO: 2159675 - RNA, 11 nt, Human
accagccuggc

SEQ ID NO: 2159676 - RNA, 12 nt, Human
accagccuggcc

SEQ ID NO: 2159677 - RNA, 15 nt, Human
accagccuggccaac

SEQ ID NO: 2159678 - RNA, 20 nt, Human
accagccuggccaacauggu

SEQ ID NO: 2159679 - RNA, 15 nt, Human
accacucaaaggcca

SEQ ID NO: 2159680 - RNA, 22 nt, Human
accacacuggacuccggcccuc

SEQ ID NO: 2159681 - RNA, 21 nt, Human
accacacuggacuccggcccu

SEQ ID NO: 2159682 - RNA, 20 nt, Human
uauuucaguuuuaaauguac

SEQ ID NO: 2159683 - RNA, 15 nt, Human
ucacuguccuccaag

SEQ ID NO: 2159684 - RNA, 16 nt, Human
ucacuguccuccaagc

SEQ ID NO: 2159685 - RNA, 19 nt, Human
ucacuguccuccaagccag

SEQ ID NO: 2159686 - RNA, 19 nt, Human
accagggauuguuucuguu

SEQ ID NO: 2159687 - RNA, 18 nt, Human
accagggauuguuucugu

SEQ ID NO: 2159688 - RNA, 16 nt, Human
accagggauuguuucu

SEQ ID NO: 2159689 - RNA, 19 nt, Human
accagggagcugcaggggc

SEQ ID NO: 2159690 - RNA, 23 nt, Human
accaugaagucucuaacaaugua

SEQ ID NO: 2159691 - RNA, 16 nt, Human
accauuuaaaaacagg

SEQ ID NO: 2159692 - RNA, 14 nt, Human
accauuuaaaaaca

SEQ ID NO: 2159693 - RNA, 23 nt, Human
accauuuaaaaacaggcagcuca

SEQ ID NO: 2159694 - RNA, 21 nt, Human
accauuuaaaaacaggcagcu

SEQ ID NO: 2159695 - RNA, 19 nt, Human
acccaagaccucagggcac

SEQ ID NO: 2159696 - RNA, 18 nt, Human
acccaagaccucagggca

SEQ ID NO: 2159697 - RNA, 14 nt, Human
acccccgcccccug

SEQ ID NO: 2159698 - RNA, 21 nt, Human
acccccgcccccugcccuccc

SEQ ID NO: 2159699 - RNA, 20 nt, Human
acccccgcccccugcccucc

SEQ ID NO: 2159700 - RNA, 19 nt, Human
acccccgcccccugcccuc

SEQ ID NO: 2159701 - RNA, 18 nt, Human
acccccgcccccugcccu

SEQ ID NO: 2159702 - RNA, 15 nt, Human
acccccgcccccugc

SEQ ID NO: 2159703 - RNA, 15 nt, Human
accccauuucucucc

SEQ ID NO: 2159704 - RNA, 14 nt, Human
accccauuucucuc

SEQ ID NO: 2159705 - RNA, 19 nt, Human
accccauuucucuccucac

SEQ ID NO: 2159706 - RNA, 16 nt, Human
ucagcccugacccugu

SEQ ID NO: 2159707 - RNA, 13 nt, Human
ucagcccugaccc

SEQ ID NO: 2159708 - RNA, 12 nt, Human
ucagaagaaauu

SEQ ID NO: 2159709 - RNA, 15 nt, Human
ucagggucauagcau

SEQ ID NO: 2159710 - RNA, 21 nt, Human
acccuucuccucuuguaaaua

SEQ ID NO: 2159711 - RNA, 19 nt, Human
acccuucuccucuuguaaa

SEQ ID NO: 2159712 - RNA, 17 nt, Human
acccuucuccucuugua

SEQ ID NO: 2159713 - RNA, 15 nt, Human
acccuucuccucuug

SEQ ID NO: 2159714 - RNA, 19 nt, Human
agauuaugagacacaggau

SEQ ID NO: 2159715 - RNA, 19 nt, Human
ugacuugacagaacacugu

SEQ ID NO: 2159716 - RNA, 17 nt, Human
ugacuugacagaacacu

SEQ ID NO: 2159717 - RNA, 22 nt, Human
agcaacauuuuacccacacaca

SEQ ID NO: 2159718 - RNA, 16 nt, Human
agcaacagaaaaaugg

SEQ ID NO: 2159719 - RNA, 20 nt, Human
agcaacauuuuacccacaca

SEQ ID NO: 2159720 - RNA, 13 nt, Human
agcaacagaaaaa

SEQ ID NO: 2159721 - RNA, 19 nt, Human
agaugcuagcacaugcccu

SEQ ID NO: 2159722 - RNA, 22 nt, Human
agaugugguugcauaagguuuu

SEQ ID NO: 2159723 - RNA, 21 nt, Human
agaugugguugcauaagguuu

SEQ ID NO: 2159724 - RNA, 16 nt, Human
ugacagucaugcaguc

SEQ ID NO: 2159725 - RNA, 20 nt, Human
ugaccaaaauggugaaaccu

SEQ ID NO: 2159726 - RNA, 15 nt, Human
agauccuuccuuuug

SEQ ID NO: 2159727 - RNA, 16 nt, Human
ugaauauaaacacuau

SEQ ID NO: 2159728 - RNA, 22 nt, Human
ugaauauaauauauuuguguau

SEQ ID NO: 2159729 - RNA, 21 nt, Human
ugaauauaauauauuugugua

SEQ ID NO: 2159730 - RNA, 14 nt, Human
ugaauauaaacacu

SEQ ID NO: 2159731 - RNA, 15 nt, Human
ugaauauaaacacua

SEQ ID NO: 2159732 - RNA, 16 nt, Human
ugaagguuucugaaaa

SEQ ID NO: 2159733 - RNA, 13 nt, Human
ugaagguuucuga

SEQ ID NO: 2159734 - RNA, 13 nt, Human
ugaagcuuuacca

SEQ ID NO: 2159735 - RNA, 12 nt, Human
ugaagcuuccuu

SEQ ID NO: 2159736 - RNA, 14 nt, Human
agaguccucugaau

SEQ ID NO: 2159737 - RNA, 12 nt, Human
agaguccucuga

SEQ ID NO: 2159738 - RNA, 13 nt, Human
agaguccucugaa

SEQ ID NO: 2159739 - RNA, 11 nt, Human
ugaagaagaga

SEQ ID NO: 2159740 - RNA, 21 nt, Human
agaggccuuuaaccauggugc

SEQ ID NO: 2159741 - RNA, 18 nt, Human
agaggcaauggcuccuuc

SEQ ID NO: 2159742 - RNA, 13 nt, Human
agaggcagaagaa

SEQ ID NO: 2159743 - RNA, 17 nt, Human
agaggcagaagaacccu

SEQ ID NO: 2159744 - RNA, 15 nt, Human
agagggaccucuccc

SEQ ID NO: 2159745 - RNA, 16 nt, Human
agagggaccucuccca

SEQ ID NO: 2159746 - RNA, 19 nt, Human
agagggaccucucccaggg

SEQ ID NO: 2159747 - RNA, 13 nt, Human
ugaagccuuucuu

SEQ ID NO: 2159748 - RNA, 20 nt, Human
agcagaggauaauuagcauc

SEQ ID NO: 2159749 - RNA, 19 nt, Human
agcagaugcaaugacucag

SEQ ID NO: 2159750 - RNA, 23 nt, Human
ugagggaucuauacuugcuuugu

SEQ ID NO: 2159751 - RNA, 23 nt, Human
ugaggggucgacuucgggcuggc

SEQ ID NO: 2159752 - RNA, 23 nt, Human
ugaggaaaaaaaucguccaggga

SEQ ID NO: 2159753 - RNA, 16 nt, Human
ugaggaaacaacagcu

SEQ ID NO: 2159754 - RNA, 20 nt, Human
ugagcggugcuguccucagg

SEQ ID NO: 2159755 - RNA, 21 nt, Human
ugagcggugcuguccucaggu

SEQ ID NO: 2159756 - RNA, 23 nt, Human
agcacaugcccuaaugucuguau

SEQ ID NO: 2159757 - RNA, 18 nt, Human
ugagcaauguauaacccc

SEQ ID NO: 2159758 - RNA, 17 nt, Human
ugagcaauguauaaccc

SEQ ID NO: 2159759 - RNA, 18 nt, Human
agcagaaaggcacgucca

SEQ ID NO: 2159760 - RNA, 19 nt, Human
agcagacugaucaggaccu

SEQ ID NO: 2159761 - RNA, 18 nt, Human
agcagacugaucaggacc

SEQ ID NO: 2159762 - RNA, 17 nt, Human
agcagacugaucaggac

SEQ ID NO: 2159763 - RNA, 16 nt, Human
agcagacugaucagga

SEQ ID NO: 2159764 - RNA, 19 nt, Human
agaccugacaccuuucaua

SEQ ID NO: 2159765 - RNA, 19 nt, Human
agaccugcagacgcccaga

SEQ ID NO: 2159766 - RNA, 17 nt, Human
agacuguugucccugca

SEQ ID NO: 2159767 - RNA, 23 nt, Human
agacagcuucucauccugcaggc

SEQ ID NO: 2159768 - RNA, 22 nt, Human
agacagcuucucauccugcagg

SEQ ID NO: 2159769 - RNA, 13 nt, Human
agacacugaaaua

SEQ ID NO: 2159770 - RNA, 22 nt, Human
agacacugaaauauacacacag

SEQ ID NO: 2159771 - RNA, 20 nt, Human
agacacugaaauauacacac

SEQ ID NO: 2159772 - RNA, 21 nt, Human
agacacugaaauauacacaca

SEQ ID NO: 2159773 - RNA, 12 nt, Human
ucuucaacaaau

SEQ ID NO: 2159774 - RNA, 17 nt, Human
ucuuauuuuuuaaaaag

SEQ ID NO: 2159775 - RNA, 18 nt, Human
ucuuaauauucuggaguc

SEQ ID NO: 2159776 - RNA, 14 nt, Human
ucuuaauauucugg

SEQ ID NO: 2159777 - RNA, 16 nt, Human
agaaggaaaaggcagg

SEQ ID NO: 2159778 - RNA, 19 nt, Human
agaacucauguuauuuuuu

SEQ ID NO: 2159779 - RNA, 22 nt, Human
agaacucauguuauuuuuuaac

SEQ ID NO: 2159780 - RNA, 20 nt, Human
agaagaaaauggaaccaggc

SEQ ID NO: 2159781 - RNA, 19 nt, Human
agaagaaaauggaaccagg

SEQ ID NO: 2159782 - RNA, 15 nt, Human
ucugagaaacaauga

SEQ ID NO: 2159783 - RNA, 15 nt, Human
agaaagacagagcug

SEQ ID NO: 2159784 - RNA, 13 nt, Human
agaagcuaagcug

SEQ ID NO: 2159785 - RNA, 14 nt, Human
ucuggaaagcaaag

SEQ ID NO: 2159786 - RNA, 17 nt, Human
ucugcugguuuuaacaa

SEQ ID NO: 2159787 - RNA, 21 nt, Human
ucugcuguucucuagaaagaa

SEQ ID NO: 2159788 - RNA, 22 nt, Human
ucugcucaggagaccuggagga

SEQ ID NO: 2159789 - RNA, 21 nt, Human
agaagaaggcagcagguggca

SEQ ID NO: 2159790 - RNA, 14 nt, Human
agaagaaggcagca

SEQ ID NO: 2159791 - RNA, 13 nt, Human
agaagaaggcagc

SEQ ID NO: 2159792 - RNA, 23 nt, Human
agaagaaaauggaaccaggcuug

SEQ ID NO: 2159793 - RNA, 22 nt, Human
agaagaaaauggaaccaggcuu

SEQ ID NO: 2159794 - RNA, 23 nt, Human
agaaaacacuuaaaaugaucauu

SEQ ID NO: 2159795 - RNA, 12 nt, Human
ucucuuucuuua

SEQ ID NO: 2159796 - RNA, 15 nt, Human
ucucuuucaugaguu

SEQ ID NO: 2159797 - RNA, 18 nt, Human
ucucugccauaaaugauu

SEQ ID NO: 2159798 - RNA, 17 nt, Human
acuuuuuuuuguauguu

SEQ ID NO: 2159799 - RNA, 21 nt, Human
ucucugcgugcagggacaaag

SEQ ID NO: 2159800 - RNA, 23 nt, Human
acuuuuuugcuauccagcuauuu

SEQ ID NO: 2159801 - RNA, 15 nt, Human
acuuuuucuuuaugu

SEQ ID NO: 2159802 - RNA, 17 nt, Human
acuuugggaggccaagg

SEQ ID NO: 2159803 - RNA, 19 nt, Human
ugcauaauaaaugcuucag

SEQ ID NO: 2159804 - RNA, 11 nt, Human
ugcauaauaaa

SEQ ID NO: 2159805 - RNA, 19 nt, Human
ugcagucuguccaggcucg

SEQ ID NO: 2159806 - RNA, 13 nt, Human
ugcauaauuucag

SEQ ID NO: 2159807 - RNA, 12 nt, Human
agccuaggccag

SEQ ID NO: 2159808 - RNA, 14 nt, Human
agccuaggccaggu

SEQ ID NO: 2159809 - RNA, 13 nt, Human
agccuaggccagg

SEQ ID NO: 2159810 - RNA, 22 nt, Human
agccuauguggauuuuuuccua

SEQ ID NO: 2159811 - RNA, 22 nt, Human
agcuauuuuuauuuguuugugc

SEQ ID NO: 2159812 - RNA, 19 nt, Human
agcuacucgggaagcugag

SEQ ID NO: 2159813 - RNA, 17 nt, Human
agcuauugauauaaaua

SEQ ID NO: 2159814 - RNA, 23 nt, Human
agcuauugauauaaauaaaacau

SEQ ID NO: 2159815 - RNA, 17 nt, Human
agcugggauguuucugu

SEQ ID NO: 2159816 - RNA, 20 nt, Human
agcugugcacaaaguggcau

SEQ ID NO: 2159817 - RNA, 15 nt, Human
agcugugcacaaagu

SEQ ID NO: 2159818 - RNA, 14 nt, Human
ugccuuuacuucag

SEQ ID NO: 2159819 - RNA, 19 nt, Human
ugcgacacugggaggccag

SEQ ID NO: 2159820 - RNA, 15 nt, Human
agcucuccccucaga

SEQ ID NO: 2159821 - RNA, 22 nt, Human
agcugaugacucaagauuccca

SEQ ID NO: 2159822 - RNA, 19 nt, Human
agcucuugaagacacugaa

SEQ ID NO: 2159823 - RNA, 15 nt, Human
agcugaugacucaag

SEQ ID NO: 2159824 - RNA, 11 nt, Human
agcugaugacu

SEQ ID NO: 2159825 - RNA, 12 nt, Human
ugccuccauccu

SEQ ID NO: 2159826 - RNA, 15 nt, Human
ugccuccauccuagu

SEQ ID NO: 2159827 - RNA, 20 nt, Human
ugccgcgucgcccucccagg

SEQ ID NO: 2159828 - RNA, 16 nt, Human
ugccgcgucgcccucc

SEQ ID NO: 2159829 - RNA, 21 nt, Human
ugccgcgucgcccucccaggc

SEQ ID NO: 2159830 - RNA, 18 nt, Human
ugcccuuggcacccaaga

SEQ ID NO: 2159831 - RNA, 19 nt, Human
aggaauuuucuccaauuuu

SEQ ID NO: 2159832 - RNA, 16 nt, Human
aggaauuuucuccaau

SEQ ID NO: 2159833 - RNA, 21 nt, Human
aggaaagcuugaguaaaauaa

SEQ ID NO: 2159834 - RNA, 19 nt, Human
ugcuauccagcuauuuuua

SEQ ID NO: 2159835 - RNA, 12 nt, Human
ugcucuggaccu

SEQ ID NO: 2159836 - RNA, 16 nt, Human
ugcucuggaccugccc

SEQ ID NO: 2159837 - RNA, 15 nt, Human
ugcucuggaccugcc

SEQ ID NO: 2159838 - RNA, 14 nt, Human
ugcucuggaccugc

SEQ ID NO: 2159839 - RNA, 13 nt, Human
ugcucuggaccug

SEQ ID NO: 2159840 - RNA, 20 nt, Human
ugcucuggaccugcccccgc

SEQ ID NO: 2159841 - RNA, 23 nt, Human
agcuuggaaacuggaugagguca

SEQ ID NO: 2159842 - RNA, 14 nt, Human
agcuuucuuucaca

SEQ ID NO: 2159843 - RNA, 20 nt, Human
agcuuucuuucacaaaaaag

SEQ ID NO: 2159844 - RNA, 22 nt, Human
agcuuugacacuggaaugaguu

SEQ ID NO: 2159845 - RNA, 17 nt, Human
agcuuugacacuggaau

SEQ ID NO: 2159846 - RNA, 22 nt, Human
aggaaaauauuuugaucuucaa

SEQ ID NO: 2159847 - RNA, 15 nt, Human
aggaaaauauuuuga

SEQ ID NO: 2159848 - RNA, 13 nt, Human
aggaaaauauuuu

SEQ ID NO: 2159849 - RNA, 21 nt, Human
aggccccugucucagggugag

SEQ ID NO: 2159850 - RNA, 18 nt, Human
aggcauccuuccucacac

SEQ ID NO: 2159851 - RNA, 20 nt, Human
aggcauccuuccucacacca

SEQ ID NO: 2159852 - RNA, 18 nt, Human
uggcacagcccaaagaag

SEQ ID NO: 2159853 - RNA, 20 nt, Human
uggcacagcccaaagaagga

SEQ ID NO: 2159854 - RNA, 22 nt, Human
uggcagauguaaaguuauucuu

SEQ ID NO: 2159855 - RNA, 21 nt, Human
aggcuauuguccccuaaacca

SEQ ID NO: 2159856 - RNA, 14 nt, Human
aggccuuuaaccau

SEQ ID NO: 2159857 - RNA, 15 nt, Human
aggcucauuuacugu

SEQ ID NO: 2159858 - RNA, 14 nt, Human
aggcucauuuacug

SEQ ID NO: 2159859 - RNA, 19 nt, Human
uggcucacaccuguaaucc

SEQ ID NO: 2159860 - RNA, 16 nt, Human
uggcucacaccuguaa

SEQ ID NO: 2159861 - RNA, 15 nt, Human
ugggaaacagaggcu

SEQ ID NO: 2159862 - RNA, 16 nt, Human
aggcuugccugcaggc

SEQ ID NO: 2159863 - RNA, 15 nt, Human
aggcuugccugcagg

SEQ ID NO: 2159864 - RNA, 17 nt, Human
aggcuugccugcaggca

SEQ ID NO: 2159865 - RNA, 16 nt, Human
agggaaaagcagcucu

SEQ ID NO: 2159866 - RNA, 18 nt, Human
aggcugggcguaguggcu

SEQ ID NO: 2159867 - RNA, 16 nt, Human
agggccaacccuucuc

SEQ ID NO: 2159868 - RNA, 15 nt, Human
agggccaacccuucu

SEQ ID NO: 2159869 - RNA, 21 nt, Human
agggccaacccuucuccucuu

SEQ ID NO: 2159870 - RNA, 17 nt, Human
agggccaacccuucucc

SEQ ID NO: 2159871 - RNA, 17 nt, Human
agggaguguacucccag

SEQ ID NO: 2159872 - RNA, 16 nt, Human
agggaguguacuccca

SEQ ID NO: 2159873 - RNA, 18 nt, Human
agggaguguacucccagg

SEQ ID NO: 2159874 - RNA, 19 nt, Human
agggcuccucuccagucug

SEQ ID NO: 2159875 - RNA, 19 nt, Human
agggcuuacggcccuggcc

SEQ ID NO: 2159876 - RNA, 20 nt, Human
agggcuuacggcccuggccu

SEQ ID NO: 2159877 - RNA, 18 nt, Human
agggcuuacggcccuggc

SEQ ID NO: 2159878 - RNA, 15 nt, Human
agggcuuacggcccu

SEQ ID NO: 2159879 - RNA, 16 nt, Human
agggagaccuggacac

SEQ ID NO: 2159880 - RNA, 21 nt, Human
agggagaagacuauauuguac

SEQ ID NO: 2159881 - RNA, 19 nt, Human
agggagcaggcggugggca

SEQ ID NO: 2159882 - RNA, 22 nt, Human
agggagaccuggacacaggccu

SEQ ID NO: 2159883 - RNA, 21 nt, Human
agggagaccuggacacaggcc

SEQ ID NO: 2159884 - RNA, 18 nt, Human
ugggacuagagcuuucuu

SEQ ID NO: 2159885 - RNA, 23 nt, Human
agggagcuagccagaggacugug

SEQ ID NO: 2159886 - RNA, 17 nt, Human
agggagcuagccagagg

SEQ ID NO: 2159887 - RNA, 17 nt, Human
agggagcauuuuccucc

SEQ ID NO: 2159888 - RNA, 15 nt, Human
agggagcauuuuccu

SEQ ID NO: 2159889 - RNA, 16 nt, Human
agggagcgagggagaa

SEQ ID NO: 2159890 - RNA, 16 nt, Human
agggagcuagccagag

SEQ ID NO: 2159891 - RNA, 15 nt, Human
agggagcuagccaga

SEQ ID NO: 2159892 - RNA, 12 nt, Human
ugggaggcgggc

SEQ ID NO: 2159893 - RNA, 15 nt, Human
ugggcaauauagcaa

SEQ ID NO: 2159894 - RNA, 16 nt, Human
ugggcaauauagcaag

SEQ ID NO: 2159895 - RNA, 19 nt, Human
ugggcacaaagggcccaga

SEQ ID NO: 2159896 - RNA, 21 nt, Human
ugggcacacgccucccacugg

SEQ ID NO: 2159897 - RNA, 16 nt, Human
ugggcacacgccuccc

SEQ ID NO: 2159898 - RNA, 20 nt, Human
ugggcacaaagggcccagau

SEQ ID NO: 2159899 - RNA, 14 nt, Human
agguuucugaaaau

SEQ ID NO: 2159900 - RNA, 23 nt, Human
agguuucugaaaauuaacacugc

SEQ ID NO: 2159901 - RNA, 15 nt, Human
agguuucugaaaauu

SEQ ID NO: 2159902 - RNA, 16 nt, Human
aggugggcgggcaggg

SEQ ID NO: 2159903 - RNA, 15 nt, Human
aggugugauuauaaa

SEQ ID NO: 2159904 - RNA, 18 nt, Human
agguugcagugagcagag

SEQ ID NO: 2159905 - RNA, 22 nt, Human
uguagucagaauuagcugcuuc

SEQ ID NO: 2159906 - RNA, 20 nt, Human
aguagcaguagaugcaugua

SEQ ID NO: 2159907 - RNA, 17 nt, Human
aguagauguucuacuuu

SEQ ID NO: 2159908 - RNA, 17 nt, Human
aguaccaccaaaaaagc

SEQ ID NO: 2159909 - RNA, 22 nt, Human
aguaccaccaaaaaagcuguau

SEQ ID NO: 2159910 - RNA, 20 nt, Human
aguaaucugagaaacaauga

SEQ ID NO: 2159911 - RNA, 15 nt, Human
aguauuaaaauuugg

SEQ ID NO: 2159912 - RNA, 20 nt, Human
agucauaaaauguaucuucc

SEQ ID NO: 2159913 - RNA, 24 nt, Human
agucacugugagcucccaggugca

SEQ ID NO: 2159914 - RNA, 23 nt, Human
agucacugugagcucccaggugc

SEQ ID NO: 2159915 - RNA, 15 nt, Human
aguggauuucccauc

SEQ ID NO: 2159916 - RNA, 12 nt, Human
ugugucugagug

SEQ ID NO: 2159917 - RNA, 20 nt, Human
aguguggagucauucucauu

SEQ ID NO: 2159918 - RNA, 18 nt, Human
aguguggagucauucuca

SEQ ID NO: 2159919 - RNA, 23 nt, Human
aguguggagucauucucauugaa

SEQ ID NO: 2159920 - RNA, 20 nt, Human
uguucgacagugaauauuca

SEQ ID NO: 2159921 - RNA, 23 nt, Human
ugugagcucccaggugcagccag

SEQ ID NO: 2159922 - RNA, 19 nt, Human
ugugagcucccaggugcag

SEQ ID NO: 2159923 - RNA, 13 nt, Human
ugugacuggucag

SEQ ID NO: 2159924 - RNA, 23 nt, Human
agugagcggugcuguccucaggu

SEQ ID NO: 2159925 - RNA, 22 nt, Human
agugagcggugcuguccucagg

SEQ ID NO: 2159926 - RNA, 17 nt, Human
agugcaacacugaagcu

SEQ ID NO: 2159927 - RNA, 18 nt, Human
agugcaagccccugcucc

SEQ ID NO: 2159928 - RNA, 15 nt, Human
agugcaagccccugc

SEQ ID NO: 2159929 - RNA, 17 nt, Human
agugcaagccccugcuc

SEQ ID NO: 2159930 - RNA, 21 nt, Human
auagacagaauagauagcacu

SEQ ID NO: 2159931 - RNA, 15 nt, Human
auagacuaaaugaaa

SEQ ID NO: 2159932 - RNA, 13 nt, Human
auagauguuuccu

SEQ ID NO: 2159933 - RNA, 16 nt, Human
auacuggcaugcuaaa

SEQ ID NO: 2159934 - RNA, 12 nt, Human
auacuggcaugc

SEQ ID NO: 2159935 - RNA, 19 nt, Human
auacugacugagaauauaa

SEQ ID NO: 2159936 - RNA, 15 nt, Human
uuauucaaagaaaua

SEQ ID NO: 2159937 - RNA, 23 nt, Human
uuauucaauaaaaaaaagaaaug

SEQ ID NO: 2159938 - RNA, 13 nt, Human
uuauuaguuuugc

SEQ ID NO: 2159939 - RNA, 12 nt, Human
uuauuaguuuug

SEQ ID NO: 2159940 - RNA, 20 nt, Human
uuaucacaaaaaagaaaaug

SEQ ID NO: 2159941 - RNA, 23 nt, Human
auacauauauguauauauaugca

SEQ ID NO: 2159942 - RNA, 21 nt, Human
uuaugaugugggucaaggaau

SEQ ID NO: 2159943 - RNA, 20 nt, Human
uuaugaugugggucaaggaa

SEQ ID NO: 2159944 - RNA, 23 nt, Human
aguuuuucccagcuacaccuuuc

SEQ ID NO: 2159945 - RNA, 22 nt, Human
aguuuuucccagcuacaccuuu

SEQ ID NO: 2159946 - RNA, 13 nt, Human
auaaaaaaaagaa

SEQ ID NO: 2159947 - RNA, 21 nt, Human
uuaaguuuccuuccagcccag

SEQ ID NO: 2159948 - RNA, 20 nt, Human
uuaaguuuccuuccagccca

SEQ ID NO: 2159949 - RNA, 17 nt, Human
uuaagacguguuugugu

SEQ ID NO: 2159950 - RNA, 16 nt, Human
uuaagacguguuugug

SEQ ID NO: 2159951 - RNA, 13 nt, Human
uuaagacguguuu

SEQ ID NO: 2159952 - RNA, 15 nt, Human
uuaaucuuaucaaga

SEQ ID NO: 2159953 - RNA, 19 nt, Human
uuaacacugcuuguguuuu

SEQ ID NO: 2159954 - RNA, 14 nt, Human
uuaacagaaaaaca

SEQ ID NO: 2159955 - RNA, 23 nt, Human
aguuuaucgaccaguuugaaucu

SEQ ID NO: 2159956 - RNA, 20 nt, Human
uuacagggcacaggccaugg

SEQ ID NO: 2159957 - RNA, 17 nt, Human
uuacaguguagcuugcc

SEQ ID NO: 2159958 - RNA, 12 nt, Human
uuacaaacaugu

SEQ ID NO: 2159959 - RNA, 15 nt, Human
uuacaaacauguggu

SEQ ID NO: 2159960 - RNA, 19 nt, Human
uuagaauaauaaauauuua

SEQ ID NO: 2159961 - RNA, 19 nt, Human
uuauaaaaagguguuuuga

SEQ ID NO: 2159962 - RNA, 14 nt, Human
auaauauuuuuaau

SEQ ID NO: 2159963 - RNA, 20 nt, Human
auaauauuuuuaauuaaaua

SEQ ID NO: 2159964 - RNA, 14 nt, Human
auaauauauuugug

SEQ ID NO: 2159965 - RNA, 20 nt, Human
aucuuucuuuggaugggacu

SEQ ID NO: 2159966 - RNA, 11 nt, Human
aucuuuugaac

SEQ ID NO: 2159967 - RNA, 22 nt, Human
aucuuuucauugaacagcaaag

SEQ ID NO: 2159968 - RNA, 21 nt, Human
uuggccccccgaccuuguaga

SEQ ID NO: 2159969 - RNA, 17 nt, Human
aucuguaucuuuucucu

SEQ ID NO: 2159970 - RNA, 17 nt, Human
aucugguuaggauggca

SEQ ID NO: 2159971 - RNA, 13 nt, Human
uugcucuggaccu

SEQ ID NO: 2159972 - RNA, 14 nt, Human
uugcucuggaccug

SEQ ID NO: 2159973 - RNA, 17 nt, Human
uugacagaacacugucu

SEQ ID NO: 2159974 - RNA, 16 nt, Human
uugacagaacacuguc

SEQ ID NO: 2159975 - RNA, 15 nt, Human
uugacagaacacugu

SEQ ID NO: 2159976 - RNA, 14 nt, Human
uugacagaacacug

SEQ ID NO: 2159977 - RNA, 20 nt, Human
uugaaucuauuuaaguaaaa

SEQ ID NO: 2159978 - RNA, 17 nt, Human
uugaaucuauuuaagua

SEQ ID NO: 2159979 - RNA, 15 nt, Human
uugaaucuauuuaag

SEQ ID NO: 2159980 - RNA, 11 nt, Human
uugaaggcuua

SEQ ID NO: 2159981 - RNA, 12 nt, Human
uugaaggcuuaa

SEQ ID NO: 2159982 - RNA, 21 nt, Human
uugacuugacagaacacuguc

SEQ ID NO: 2159983 - RNA, 20 nt, Human
uugacuugacagaacacugu

SEQ ID NO: 2159984 - RNA, 19 nt, Human
uugacuugacagaacacug

SEQ ID NO: 2159985 - RNA, 11 nt, Human
uugacuuuguc

SEQ ID NO: 2159986 - RNA, 12 nt, Human
uugacuuugucu

SEQ ID NO: 2159987 - RNA, 22 nt, Human
uugagacuccucaguucuugcc

SEQ ID NO: 2159988 - RNA, 18 nt, Human
uugagucuguuuuguaaa

SEQ ID NO: 2159989 - RNA, 15 nt, Human
uugagucuguuuugu

SEQ ID NO: 2159990 - RNA, 17 nt, Human
aucuccaccagucauuu

SEQ ID NO: 2159991 - RNA, 22 nt, Human
aucuccaccagucauuuuucag

SEQ ID NO: 2159992 - RNA, 18 nt, Human
aucuccaagaccagagau

SEQ ID NO: 2159993 - RNA, 21 nt, Human
aucucagguuaagugugagua

SEQ ID NO: 2159994 - RNA, 16 nt, Human
aucuacuuuaauaaau

SEQ ID NO: 2159995 - RNA, 13 nt, Human
uugcaaggaagcc

SEQ ID NO: 2159996 - RNA, 12 nt, Human
uugcaaggaagc

SEQ ID NO: 2159997 - RNA, 12 nt, Human
uugcauucuccc

SEQ ID NO: 2159998 - RNA, 18 nt, Human
uugcauauuuuguaacuu

SEQ ID NO: 2159999 - RNA, 14 nt, Human
uugcauauauacau

SEQ ID NO: 2160000 - RNA, 14 nt, Human
uuccuguccuccca

SEQ ID NO: 2160001 - RNA, 20 nt, Human
uuccuguccucccagcuccu

SEQ ID NO: 2160002 - RNA, 14 nt, Human
uucgcuugagaaaa

SEQ ID NO: 2160003 - RNA, 16 nt, Human
uucgcuugagaaaaaa

SEQ ID NO: 2160004 - RNA, 20 nt, Human
uucggcagauacugucucuu

SEQ ID NO: 2160005 - RNA, 19 nt, Human
uugaaagccccagaaauca

SEQ ID NO: 2160006 - RNA, 13 nt, Human
uugaaccuauuuc

SEQ ID NO: 2160007 - RNA, 16 nt, Human
uugaaccuauuucucu

SEQ ID NO: 2160008 - RNA, 15 nt, Human
uugaaccuauuucuc

SEQ ID NO: 2160009 - RNA, 19 nt, Human
uugaaccuauuucucuuuc

SEQ ID NO: 2160010 - RNA, 16 nt, Human
auccguauauaucccc

SEQ ID NO: 2160011 - RNA, 16 nt, Human
auccaagcaagacuga

SEQ ID NO: 2160012 - RNA, 13 nt, Human
uuuggcagaguuc

SEQ ID NO: 2160013 - RNA, 14 nt, Human
auguaugauuacau

SEQ ID NO: 2160014 - RNA, 19 nt, Human
auguauguucagaagaaau

SEQ ID NO: 2160015 - RNA, 20 nt, Human
auguauguucagaagaaauu

SEQ ID NO: 2160016 - RNA, 16 nt, Human
uuugugaaucuuugug

SEQ ID NO: 2160017 - RNA, 24 nt, Human
uuugugaaggccucgcaggaagac

SEQ ID NO: 2160018 - RNA, 15 nt, Human
augugauuuaaacaa

SEQ ID NO: 2160019 - RNA, 20 nt, Human
auguacgaugagaaauucaa

SEQ ID NO: 2160020 - RNA, 20 nt, Human
auguacuaggauacugcugc

SEQ ID NO: 2160021 - RNA, 21 nt, Human
uuugcaaggaagccacagcug

SEQ ID NO: 2160022 - RNA, 14 nt, Human
uuugcaaggaagcc

SEQ ID NO: 2160023 - RNA, 12 nt, Human
uuugcaaggaag

SEQ ID NO: 2160024 - RNA, 19 nt, Human
uuugacgggaaacaaaacu

SEQ ID NO: 2160025 - RNA, 18 nt, Human
augguuugcaaggaagcc

SEQ ID NO: 2160026 - RNA, 17 nt, Human
augguuugcaaggaagc

SEQ ID NO: 2160027 - RNA, 16 nt, Human
augguuugcaaggaag

SEQ ID NO: 2160028 - RNA, 22 nt, Human
augguuugaauauaaacacuau

SEQ ID NO: 2160029 - RNA, 21 nt, Human
augguuugaauauaaacacua

SEQ ID NO: 2160030 - RNA, 23 nt, Human
auggugcuuguuaaugcuuucug

SEQ ID NO: 2160031 - RNA, 16 nt, Human
uuucuuucacaaaaaa

SEQ ID NO: 2160032 - RNA, 12 nt, Human
auggggaugcag

SEQ ID NO: 2160033 - RNA, 20 nt, Human
uuugaaaaagaaaacacuua

SEQ ID NO: 2160034 - RNA, 18 nt, Human
augggugaaggcuggcau

SEQ ID NO: 2160035 - RNA, 17 nt, Human
augggugaaggcuggca

SEQ ID NO: 2160036 - RNA, 16 nt, Human
augggugaaggcuggc

SEQ ID NO: 2160037 - RNA, 15 nt, Human
augggugaaggcugg

SEQ ID NO: 2160038 - RNA, 21 nt, Human
auggguccaggauuccucuuu

SEQ ID NO: 2160039 - RNA, 19 nt, Human
auggguccaggauuccucu

SEQ ID NO: 2160040 - RNA, 14 nt, Human
augggugaaggcug

SEQ ID NO: 2160041 - RNA, 23 nt, Human
augcuaaagguuguauugcauau

SEQ ID NO: 2160042 - RNA, 20 nt, Human
augccucccccuagccauuu

SEQ ID NO: 2160043 - RNA, 24 nt, Human
augccucagcccugacccugugga

SEQ ID NO: 2160044 - RNA, 20 nt, Human
augccucagcccugacccug

SEQ ID NO: 2160045 - RNA, 18 nt, Human
augccaaaaaaagacagg

SEQ ID NO: 2160046 - RNA, 17 nt, Human
augccauggacagaaga

SEQ ID NO: 2160047 - RNA, 19 nt, Human
augccauggacagaagaag

SEQ ID NO: 2160048 - RNA, 18 nt, Human
augccauggacagaagaa

SEQ ID NO: 2160049 - RNA, 13 nt, Human
uuuaauuuaaagc

SEQ ID NO: 2160050 - RNA, 15 nt, Human
uuuaaguaacuuuaa

SEQ ID NO: 2160051 - RNA, 13 nt, Human
uuuaauuaaauaa

SEQ ID NO: 2160052 - RNA, 15 nt, Human
uuguucuuuguucuu

SEQ ID NO: 2160053 - RNA, 13 nt, Human
uuguucuuuuuau

SEQ ID NO: 2160054 - RNA, 21 nt, Human
uuguucccauccucuucuuuu

SEQ ID NO: 2160055 - RNA, 19 nt, Human
augauuaauuaaauagcuu

SEQ ID NO: 2160056 - RNA, 17 nt, Human
augauccaagcaagacu

SEQ ID NO: 2160057 - RNA, 15 nt, Human
augauccaagcaaga

SEQ ID NO: 2160058 - RNA, 24 nt, Human
augcaccugaauguuagauaguua

SEQ ID NO: 2160059 - RNA, 14 nt, Human
augcuauuugcaau

SEQ ID NO: 2160060 - RNA, 21 nt, Human
augcuauuugcaauuccugcu

SEQ ID NO: 2160061 - RNA, 17 nt, Human
uuuccaugaaaaugcaa

SEQ ID NO: 2160062 - RNA, 14 nt, Human
uuuccccuuuugca

SEQ ID NO: 2160063 - RNA, 15 nt, Human
auggcagugucuuuc

SEQ ID NO: 2160064 - RNA, 24 nt, Human
auggcccauucuacuugcucugga

SEQ ID NO: 2160065 - RNA, 23 nt, Human
auggcccauucuacuugcucugg

SEQ ID NO: 2160066 - RNA, 19 nt, Human
auggcccauucuacuugcu

SEQ ID NO: 2160067 - RNA, 17 nt, Human
auggcccauucuacuug

SEQ ID NO: 2160068 - RNA, 15 nt, Human
auggcccauucuacu

SEQ ID NO: 2160069 - RNA, 14 nt, Human
auggcagcugccac

SEQ ID NO: 2160070 - RNA, 21 nt, Human
auggcaggacgugggcugggc

SEQ ID NO: 2160071 - RNA, 20 nt, Human
auggcaggacgugggcuggg

SEQ ID NO: 2160072 - RNA, 13 nt, Human
auuaucuaauuua

SEQ ID NO: 2160073 - RNA, 14 nt, Human
auuaucuaauuuau

SEQ ID NO: 2160074 - RNA, 20 nt, Human
auucccaggaguucugcuca

SEQ ID NO: 2160075 - RNA, 18 nt, Human
auucccaggaguucugcu

SEQ ID NO: 2160076 - RNA, 12 nt, Human
auucccaggagu

SEQ ID NO: 2160077 - RNA, 11 nt, Human
auucccaggag

SEQ ID NO: 2160078 - RNA, 21 nt, Human
auucccaggaguucugcucau

SEQ ID NO: 2160079 - RNA, 19 nt, Human
auucuaacuuuuuugcuau

SEQ ID NO: 2160080 - RNA, 18 nt, Human
auucuaaugauggcccau

SEQ ID NO: 2160081 - RNA, 17 nt, Human
auucuaaugauggccca

SEQ ID NO: 2160082 - RNA, 21 nt, Human
auucuaaugauggcccauucu

SEQ ID NO: 2160083 - RNA, 23 nt, Human
auucuaaugauggcccauucuac

SEQ ID NO: 2160084 - RNA, 21 nt, Human
auucuuacaaacaugugguua

SEQ ID NO: 2160085 - RNA, 16 nt, Human
auucuuacaaacaugu

SEQ ID NO: 2160086 - RNA, 21 nt, Human
auucuuaagacuugcauuuaa

SEQ ID NO: 2160087 - RNA, 17 nt, Human
auucuuacaaacaugug

SEQ ID NO: 2160088 - RNA, 16 nt, Human
auucuucccauucucc

SEQ ID NO: 2160089 - RNA, 18 nt, Human
auucuucccauucuccau

SEQ ID NO: 2160090 - RNA, 17 nt, Human
auucuucccauucucca

SEQ ID NO: 2160091 - RNA, 22 nt, Human
auucuucccauucuccauuugu

SEQ ID NO: 2160092 - RNA, 13 nt, Human
auugacuuugucu

SEQ ID NO: 2160093 - RNA, 19 nt, Human
auucuaggccuccuggccc

SEQ ID NO: 2160094 - RNA, 18 nt, Human
auucuaggccuccuggcc

SEQ ID NO: 2160095 - RNA, 20 nt, Human
auucuaggccuccuggccca

SEQ ID NO: 2160096 - RNA, 12 nt, Human
auuuuuuaaagc

SEQ ID NO: 2160097 - RNA, 23 nt, Human
auuuuuuaaaaaucuauauuuug

SEQ ID NO: 2160098 - RNA, 15 nt, Human
auuuuuuaaaaacua

SEQ ID NO: 2160099 - RNA, 22 nt, Human
auuuuuuaaccccgucaacaaa

SEQ ID NO: 2160100 - RNA, 23 nt, Human
auuuuuuaaccccgucaacaaau

SEQ ID NO: 2160101 - RNA, 21 nt, Human
auuuuuuaaccccgucaacaa

SEQ ID NO: 2160102 - RNA, 21 nt, Human
auuuuuugguuaagcuuugac

SEQ ID NO: 2160103 - RNA, 20 nt, Human
auuuuucagaccuuuuaacu

SEQ ID NO: 2160104 - RNA, 17 nt, Human
auuuuguaacaaaugaa

SEQ ID NO: 2160105 - RNA, 19 nt, Human
auuuuguaacuuccaugug

SEQ ID NO: 2160106 - RNA, 19 nt, Human
auuuugcauaauaaaugcu

SEQ ID NO: 2160107 - RNA, 15 nt, Human
auuuugcauaauaaa

SEQ ID NO: 2160108 - RNA, 19 nt, Human
auuuugaucuucaacaaau

SEQ ID NO: 2160109 - RNA, 17 nt, Human
auuuugaucuucaacaa

SEQ ID NO: 2160110 - RNA, 20 nt, Human
auuuugaucuucaacaaauu

SEQ ID NO: 2160111 - RNA, 16 nt, Human
auuuugaucuucaaca

SEQ ID NO: 2160112 - RNA, 13 nt, Human
auuuugaucuuca

SEQ ID NO: 2160113 - RNA, 15 nt, Human
auuuuccaugaaaau

SEQ ID NO: 2160114 - RNA, 19 nt, Human
auuuuaagacguguuugug

SEQ ID NO: 2160115 - RNA, 20 nt, Human
auugggaaggggacccccgc

SEQ ID NO: 2160116 - RNA, 18 nt, Human
auuggguuccauucucac

SEQ ID NO: 2160117 - RNA, 16 nt, Human
auuuccaagagcugag

SEQ ID NO: 2160118 - RNA, 15 nt, Human
auuuccaagagcuga

SEQ ID NO: 2160119 - RNA, 16 nt, Human
auuuccccuuuugcau

SEQ ID NO: 2160120 - RNA, 22 nt, Human
auuuccccuuuugcauucuccc

SEQ ID NO: 2160121 - RNA, 21 nt, Human
auuuccccuuuugcauucucc

SEQ ID NO: 2160122 - RNA, 17 nt, Human
auuuggcuucuguuguc

SEQ ID NO: 2160123 - RNA, 20 nt, Human
auuuguccucuuuacaugaa

SEQ ID NO: 2160124 - RNA, 20 nt, Human
auuuuaagacguguuugugu

SEQ ID NO: 2160125 - RNA, 21 nt, Human
ggaaguuuuguggaggagcuc

SEQ ID NO: 2160126 - RNA, 13 nt, Human
ggaacuugagaac

SEQ ID NO: 2160127 - RNA, 20 nt, Human
ggaacuuauuaaauggaaac

SEQ ID NO: 2160128 - RNA, 16 nt, Human
ggacuccggcccuccu

SEQ ID NO: 2160129 - RNA, 13 nt, Human
ggacgugggcugg

SEQ ID NO: 2160130 - RNA, 15 nt, Human
ggacccccgcccccu

SEQ ID NO: 2160131 - RNA, 14 nt, Human
ggacccccgccccc

SEQ ID NO: 2160132 - RNA, 22 nt, Human
ggacccccgcccccugcccucc

SEQ ID NO: 2160133 - RNA, 20 nt, Human
ggacccccgcccccugcccu

SEQ ID NO: 2160134 - RNA, 19 nt, Human
ggacccccgcccccugccc

SEQ ID NO: 2160135 - RNA, 16 nt, Human
ggacccccgcccccug

SEQ ID NO: 2160136 - RNA, 23 nt, Human
ggacccccgcccccugcccuccc

SEQ ID NO: 2160137 - RNA, 15 nt, Human
ggacggcugggcaca

SEQ ID NO: 2160138 - RNA, 21 nt, Human
gcuuucuuucacaaaaaagaa

SEQ ID NO: 2160139 - RNA, 21 nt, Human
gcuuugaaagccccagaaauc

SEQ ID NO: 2160140 - RNA, 12 nt, Human
gcuggagugagg

SEQ ID NO: 2160141 - RNA, 19 nt, Human
gcccucaaacuugacucua

SEQ ID NO: 2160142 - RNA, 14 nt, Human
gcccccccuuccac

SEQ ID NO: 2160143 - RNA, 13 nt, Human
gcccccccuucca

SEQ ID NO: 2160144 - RNA, 15 nt, Human
gcccccccuuccacu

SEQ ID NO: 2160145 - RNA, 16 nt, Human
gccuaggccaggugca

SEQ ID NO: 2160146 - RNA, 14 nt, Human
gccuaggccaggug

SEQ ID NO: 2160147 - RNA, 13 nt, Human
gccuaggccaggu

SEQ ID NO: 2160148 - RNA, 13 nt, Human
gcgcacugccucu

SEQ ID NO: 2160149 - RNA, 15 nt, Human
gcgcaccgaaaaacu

SEQ ID NO: 2160150 - RNA, 15 nt, Human
gccuccaucagcuaa

SEQ ID NO: 2160151 - RNA, 14 nt, Human
gccuccauccuagu

SEQ ID NO: 2160152 - RNA, 19 nt, Human
gcgugcagggacaaagagg

SEQ ID NO: 2160153 - RNA, 18 nt, Human
gcgugcagggacaaagag

SEQ ID NO: 2160154 - RNA, 16 nt, Human
gcucagaccagcucuu

SEQ ID NO: 2160155 - RNA, 15 nt, Human
gcucagggaaaagca

SEQ ID NO: 2160156 - RNA, 17 nt, Human
gcucagggaaaagcagc

SEQ ID NO: 2160157 - RNA, 22 nt, Human
gcuauuuuuauuuguuugugca

SEQ ID NO: 2160158 - RNA, 22 nt, Human
gcuauugauauaaauaaaacau

SEQ ID NO: 2160159 - RNA, 19 nt, Human
gcuauuugcaauuccugcu

SEQ ID NO: 2160160 - RNA, 17 nt, Human
gcuauuugcaauuccug

SEQ ID NO: 2160161 - RNA, 19 nt, Human
gcuccugagggagcuccaa

SEQ ID NO: 2160162 - RNA, 17 nt, Human
gcuccugagggagcucc

SEQ ID NO: 2160163 - RNA, 20 nt, Human
gcuccccucugcacggacca

SEQ ID NO: 2160164 - RNA, 14 nt, Human
aaagacagagcugg

SEQ ID NO: 2160165 - RNA, 22 nt, Human
aaagacagggcugauaagcuaa

SEQ ID NO: 2160166 - RNA, 19 nt, Human
aaacuuccagugcaacacu

SEQ ID NO: 2160167 - RNA, 21 nt, Human
aaacuuccagugcaacacuga

SEQ ID NO: 2160168 - RNA, 22 nt, Human
aaacuuccagugcaacacugaa

SEQ ID NO: 2160169 - RNA, 20 nt, Human
aaacuuuccucuuccugccu

SEQ ID NO: 2160170 - RNA, 13 nt, Human
aaaggaagaaaaa

SEQ ID NO: 2160171 - RNA, 20 nt, Human
aaaggagccuaggccaggug

SEQ ID NO: 2160172 - RNA, 21 nt, Human
aaagcugcucagggaaaagca

SEQ ID NO: 2160173 - RNA, 12 nt, Human
ggugcaaccagg

SEQ ID NO: 2160174 - RNA, 17 nt, Human
ggucgacuucgggcugg

SEQ ID NO: 2160175 - RNA, 15 nt, Human
gguggaguuaaucuu

SEQ ID NO: 2160176 - RNA, 12 nt, Human
ggugcagguaga

SEQ ID NO: 2160177 - RNA, 17 nt, Human
ggugcagccagaggcac

SEQ ID NO: 2160178 - RNA, 13 nt, Human
ggugcagccagag

SEQ ID NO: 2160179 - RNA, 20 nt, Human
aaacuaggggacaaagcaaa

SEQ ID NO: 2160180 - RNA, 11 nt, Human
aaaccucuccu

SEQ ID NO: 2160181 - RNA, 22 nt, Human
aaaccucuccucauguucugcu

SEQ ID NO: 2160182 - RNA, 17 nt, Human
ggguccagggagcaggc

SEQ ID NO: 2160183 - RNA, 20 nt, Human
ggguccaggauuccucuuuu

SEQ ID NO: 2160184 - RNA, 16 nt, Human
ggguccagggagcagg

SEQ ID NO: 2160185 - RNA, 18 nt, Human
ggguccaggauuccucuu

SEQ ID NO: 2160186 - RNA, 17 nt, Human
ggguccagaaggagaca

SEQ ID NO: 2160187 - RNA, 17 nt, Human
gggucgacuucgggcug

SEQ ID NO: 2160188 - RNA, 15 nt, Human
ggggacccccgcccc

SEQ ID NO: 2160189 - RNA, 13 nt, Human
ggggacccccgcc

SEQ ID NO: 2160190 - RNA, 18 nt, Human
ggggacccccgcccccug

SEQ ID NO: 2160191 - RNA, 20 nt, Human
aaacaugugguuacacagug

SEQ ID NO: 2160192 - RNA, 15 nt, Human
ggggaauucaucucu

SEQ ID NO: 2160193 - RNA, 22 nt, Human
aaacaauguuaacauuuuuggu

SEQ ID NO: 2160194 - RNA, 15 nt, Human
aaauauacacacagc

SEQ ID NO: 2160195 - RNA, 14 nt, Human
aaaguuauucuuga

SEQ ID NO: 2160196 - RNA, 18 nt, Human
aaauaaccaaucuacaau

SEQ ID NO: 2160197 - RNA, 21 nt, Human
aaauaacuggaggaauuuucu

SEQ ID NO: 2160198 - RNA, 20 nt, Human
guacucaucaucaacccuaa

SEQ ID NO: 2160199 - RNA, 18 nt, Human
guacuaggauacugcugc

SEQ ID NO: 2160200 - RNA, 22 nt, Human
guacuaggauacugcugcguca

SEQ ID NO: 2160201 - RNA, 19 nt, Human
guacuggcugauggaguaa

SEQ ID NO: 2160202 - RNA, 17 nt, Human
guagaauuaucuaauuu

SEQ ID NO: 2160203 - RNA, 22 nt, Human
guagaauuaucuaauuuauaaa

SEQ ID NO: 2160204 - RNA, 22 nt, Human
guagaacacaaggucauuugcu

SEQ ID NO: 2160205 - RNA, 19 nt, Human
guagaccugucuccuggcg

SEQ ID NO: 2160206 - RNA, 21 nt, Human
guagaccugucuccuggcggu

SEQ ID NO: 2160207 - RNA, 21 nt, Human
guaccaugugcuacaggggcc

SEQ ID NO: 2160208 - RNA, 15 nt, Human
guaccaccaaaaaag

SEQ ID NO: 2160209 - RNA, 12 nt, Human
aaaacucuuuua

SEQ ID NO: 2160210 - RNA, 23 nt, Human
aaaacugaaagugaaaguccaga

SEQ ID NO: 2160211 - RNA, 15 nt, Human
gggacauugggaagg

SEQ ID NO: 2160212 - RNA, 11 nt, Human
aaaaccaggcc

SEQ ID NO: 2160213 - RNA, 22 nt, Human
aaaagccagcaggcuucaaacu

SEQ ID NO: 2160214 - RNA, 24 nt, Human
gggagcaggcggugggcacccacc

SEQ ID NO: 2160215 - RNA, 17 nt, Human
gggagggucagccaggg

SEQ ID NO: 2160216 - RNA, 16 nt, Human
ggcuucucugaggaag

SEQ ID NO: 2160217 - RNA, 15 nt, Human
ggcuucucugaggaa

SEQ ID NO: 2160218 - RNA, 18 nt, Human
ggcaguuuaaagcacaau

SEQ ID NO: 2160219 - RNA, 23 nt, Human
ggcacugaagggauaugugaaac

SEQ ID NO: 2160220 - RNA, 16 nt, Human
ggcccuccuacccugc

SEQ ID NO: 2160221 - RNA, 21 nt, Human
ggcccuccuacccugcgccca

SEQ ID NO: 2160222 - RNA, 19 nt, Human
ggcccuccuacccugcgcc

SEQ ID NO: 2160223 - RNA, 17 nt, Human
ggcccuccuacccugcg

SEQ ID NO: 2160224 - RNA, 20 nt, Human
ggcccuccuacccugcgccc

SEQ ID NO: 2160225 - RNA, 23 nt, Human
gagugccccauucuuuuguaauu

SEQ ID NO: 2160226 - RNA, 19 nt, Human
gagguggagguugcaguga

SEQ ID NO: 2160227 - RNA, 21 nt, Human
gagaagcucucgggcuaggaa

SEQ ID NO: 2160228 - RNA, 22 nt, Human
gaagcauggugcccuggcuucu

SEQ ID NO: 2160229 - RNA, 20 nt, Human
gacucaagauucccaggagu

SEQ ID NO: 2160230 - RNA, 19 nt, Human
gacucaagauucccaggag

SEQ ID NO: 2160231 - RNA, 18 nt, Human
gacucaagauucccagga

SEQ ID NO: 2160232 - RNA, 17 nt, Human
gacucaagauucccagg

SEQ ID NO: 2160233 - RNA, 16 nt, Human
gacucaagauucccag

SEQ ID NO: 2160234 - RNA, 12 nt, Human
gacucaagauuc

SEQ ID NO: 2160235 - RNA, 22 nt, Human
gacucaaaugcucagaccagcu

SEQ ID NO: 2160236 - RNA, 18 nt, Human
gacuauauuguacacacc

SEQ ID NO: 2160237 - RNA, 22 nt, Human
gacucaagauucccaggaguuc

SEQ ID NO: 2160238 - RNA, 19 nt, Human
gacucacaaccugaaccua

SEQ ID NO: 2160239 - RNA, 18 nt, Human
gacucacaaccugaaccu

SEQ ID NO: 2160240 - RNA, 23 nt, Human
gacucacaccugaacugaacacc

SEQ ID NO: 2160241 - RNA, 14 nt, Human
gacucacaccugaa

SEQ ID NO: 2160242 - RNA, 22 nt, Human
gcacugaagggauaugugaaac

SEQ ID NO: 2160243 - RNA, 20 nt, Human
gcacucuuuaagggagugua

SEQ ID NO: 2160244 - RNA, 17 nt, Human
gcacugaaaaaaaaucu

SEQ ID NO: 2160245 - RNA, 14 nt, Human
gcagggacaaagag

SEQ ID NO: 2160246 - RNA, 21 nt, Human
gcagggacaaagaggccuuua

SEQ ID NO: 2160247 - RNA, 15 nt, Human
gcagggacaaagagg

SEQ ID NO: 2160248 - RNA, 22 nt, Human
gcauguacccuaaggucauuac

SEQ ID NO: 2160249 - RNA, 16 nt, Human
gccaaccuauuuugaa

SEQ ID NO: 2160250 - RNA, 22 nt, Human
gcauugugugugcagacuucag

SEQ ID NO: 2160251 - RNA, 22 nt, Human
gccaacccuucuccucuuguaa

SEQ ID NO: 2160252 - RNA, 13 nt, Human
gccaacccuucuc

SEQ ID NO: 2160253 - RNA, 23 nt, Human
gccaacccuucuccucuuguaaa

SEQ ID NO: 2160254 - RNA, 15 nt, Human
gccaaccuauuuuga

SEQ ID NO: 2160255 - RNA, 21 nt, Human
gccaaggagggugagugcaag

SEQ ID NO: 2160256 - RNA, 20 nt, Human
gccaaggagggugagugcaa

SEQ ID NO: 2160257 - RNA, 13 nt, Human
gaugcugugaaau

SEQ ID NO: 2160258 - RNA, 19 nt, Human
gaugcugugaaauucccaa

SEQ ID NO: 2160259 - RNA, 17 nt, Human
cuugggucccagggaag

SEQ ID NO: 2160260 - RNA, 17 nt, Human
cuuucagcagacugauc

SEQ ID NO: 2160261 - RNA, 20 nt, Human
cuuugguuuaauuuaaagcc

SEQ ID NO: 2160262 - RNA, 19 nt, Human
cuuugguuauauuuagcuc

SEQ ID NO: 2160263 - RNA, 21 nt, Human
gaagacacugaaauauacaca

SEQ ID NO: 2160264 - RNA, 19 nt, Human
gaagacccaacacauggga

SEQ ID NO: 2160265 - RNA, 14 nt, Human
gaagacauugcacc

SEQ ID NO: 2160266 - RNA, 15 nt, Human
gaaccaggcuuggaa

SEQ ID NO: 2160267 - RNA, 16 nt, Human
gaaccauguuuguggc

SEQ ID NO: 2160268 - RNA, 19 nt, Human
gaacaccauugaaggcuua

SEQ ID NO: 2160269 - RNA, 20 nt, Human
gaacaccauugaaggcuuaa

SEQ ID NO: 2160270 - RNA, 20 nt, Human
gaacaauauugacuuugucu

SEQ ID NO: 2160271 - RNA, 19 nt, Human
gaacaauauugacuuuguc

SEQ ID NO: 2160272 - RNA, 16 nt, Human
gaacaccauugaaggc

SEQ ID NO: 2160273 - RNA, 20 nt, Human
gaaaggggcaguuuaaagca

SEQ ID NO: 2160274 - RNA, 15 nt, Human
gaaacaacagcuuua

SEQ ID NO: 2160275 - RNA, 21 nt, Human
gaaacaacagcuuuaaaagaa

SEQ ID NO: 2160276 - RNA, 21 nt, Human
cuguugucaccuucaccuccu

SEQ ID NO: 2160277 - RNA, 23 nt, Human
cuguugucaccuucaccuccuuu

SEQ ID NO: 2160278 - RNA, 18 nt, Human
cuguugucaccuucaccu

SEQ ID NO: 2160279 - RNA, 17 nt, Human
cuguugucaccuucacc

SEQ ID NO: 2160280 - RNA, 23 nt, Human
cuguucaauguuuuuaaaaaucu

SEQ ID NO: 2160281 - RNA, 22 nt, Human
cuguucaauguuuuuaaaaauc

SEQ ID NO: 2160282 - RNA, 16 nt, Human
cuguacugggccaugu

SEQ ID NO: 2160283 - RNA, 15 nt, Human
cuguccuccaagcca

SEQ ID NO: 2160284 - RNA, 17 nt, Human
cuguccuccaagccagc

SEQ ID NO: 2160285 - RNA, 14 nt, Human
cugucauagaaagu

SEQ ID NO: 2160286 - RNA, 23 nt, Human
cuguguauuuuuuaaagcuacaa

SEQ ID NO: 2160287 - RNA, 19 nt, Human
cuguguauuuuuuaaagcu

SEQ ID NO: 2160288 - RNA, 23 nt, Human
cugccuccgcgugaucaaagcca

SEQ ID NO: 2160289 - RNA, 23 nt, Human
cugcucagggaaaagcagcucuc

SEQ ID NO: 2160290 - RNA, 22 nt, Human
cugcucagggaaaagcagcucu

SEQ ID NO: 2160291 - RNA, 14 nt, Human
cuggacugaccugg

SEQ ID NO: 2160292 - RNA, 21 nt, Human
cuggacugaccugguccacag

SEQ ID NO: 2160293 - RNA, 13 nt, Human
cauaauuucagcu

SEQ ID NO: 2160294 - RNA, 22 nt, Human
cauccuucccugucugccaggg

SEQ ID NO: 2160295 - RNA, 18 nt, Human
cauccuuccucacaccag

SEQ ID NO: 2160296 - RNA, 21 nt, Human
cauccuucccugucugccagg

SEQ ID NO: 2160297 - RNA, 15 nt, Human
cauccuucccugucu

SEQ ID NO: 2160298 - RNA, 16 nt, Human
cauccccugccuccau

SEQ ID NO: 2160299 - RNA, 13 nt, Human
cauccccugccuc

SEQ ID NO: 2160300 - RNA, 22 nt, Human
cauccccugccuccauccuagu

SEQ ID NO: 2160301 - RNA, 15 nt, Human
cauccccugccucca

SEQ ID NO: 2160302 - RNA, 14 nt, Human
cauccccugccucc

SEQ ID NO: 2160303 - RNA, 18 nt, Human
caugaagguuucugaaaa

SEQ ID NO: 2160304 - RNA, 15 nt, Human
caugaagguuucuga

SEQ ID NO: 2160305 - RNA, 20 nt, Human
cauguauaauauuuuuaauu

SEQ ID NO: 2160306 - RNA, 18 nt, Human
cauguauaauauuuuuaa

SEQ ID NO: 2160307 - RNA, 15 nt, Human
cauguauaauauuuu

SEQ ID NO: 2160308 - RNA, 18 nt, Human
cauguugcuguuuccagu

SEQ ID NO: 2160309 - RNA, 21 nt, Human
cauuaugaugugggucaagga

SEQ ID NO: 2160310 - RNA, 24 nt, Human
ccaacggcaagggaacaaguacuu

SEQ ID NO: 2160311 - RNA, 18 nt, Human
ccaaucccagcuaccuca

SEQ ID NO: 2160312 - RNA, 12 nt, Human
cauuggaaauua

SEQ ID NO: 2160313 - RNA, 22 nt, Human
ccacacuggacuccggcccucc

SEQ ID NO: 2160314 - RNA, 21 nt, Human
ccacacuggacuccggcccuc

SEQ ID NO: 2160315 - RNA, 14 nt, Human
ccaccagucauuuu

SEQ ID NO: 2160316 - RNA, 20 nt, Human
cagagcugggauguuucugu

SEQ ID NO: 2160317 - RNA, 17 nt, Human
cagaggggcagauggaa

SEQ ID NO: 2160318 - RNA, 14 nt, Human
cagaggggcagaug

SEQ ID NO: 2160319 - RNA, 15 nt, Human
cagcguacucaucau

SEQ ID NO: 2160320 - RNA, 23 nt, Human
caggugaguccuagagcuacagg

SEQ ID NO: 2160321 - RNA, 22 nt, Human
caggugaguccuagagcuacag

SEQ ID NO: 2160322 - RNA, 16 nt, Human
caggugcagccagagg

SEQ ID NO: 2160323 - RNA, 15 nt, Human
caggugcagccagag

SEQ ID NO: 2160324 - RNA, 14 nt, Human
caggugcagccaga

SEQ ID NO: 2160325 - RNA, 19 nt, Human
caggugcagccagaggcac

SEQ ID NO: 2160326 - RNA, 17 nt, Human
caggugcagccagaggc

SEQ ID NO: 2160327 - RNA, 20 nt, Human
caggugaguccuagagcuac

SEQ ID NO: 2160328 - RNA, 22 nt, Human
cagucugaugagaacucugagc

SEQ ID NO: 2160329 - RNA, 15 nt, Human
caguccuuccaccuc

SEQ ID NO: 2160330 - RNA, 15 nt, Human
cagucugaucuguga

SEQ ID NO: 2160331 - RNA, 17 nt, Human
caggcggugggcaccca

SEQ ID NO: 2160332 - RNA, 15 nt, Human
caggcggugggcacc

SEQ ID NO: 2160333 - RNA, 21 nt, Human
caggcggugggcacccacccu

SEQ ID NO: 2160334 - RNA, 12 nt, Human
caggagcuuccu

SEQ ID NO: 2160335 - RNA, 23 nt, Human
caggagcuuccuguccucccagc

SEQ ID NO: 2160336 - RNA, 20 nt, Human
auugugugugcucugcuuca

SEQ ID NO: 2160337 - RNA, 19 nt, Human
auugugugugcucugcuuc

SEQ ID NO: 2160338 - RNA, 12 nt, Human
auuucauaaaga

SEQ ID NO: 2160339 - RNA, 12 nt, Human
auuccuuuccag

SEQ ID NO: 2160340 - RNA, 13 nt, Human
auucuugcauauu

SEQ ID NO: 2160341 - RNA, 12 nt, Human
auucuugcauau

SEQ ID NO: 2160342 - RNA, 16 nt, Human
auucaauauccuuugc

SEQ ID NO: 2160343 - RNA, 19 nt, Human
auucaauauccuuugccuc

SEQ ID NO: 2160344 - RNA, 21 nt, Human
caaaugcuaaugucaaacuug

SEQ ID NO: 2160345 - RNA, 15 nt, Human
caaaugcuaauguca

SEQ ID NO: 2160346 - RNA, 22 nt, Human
caacaaaucuaggaaaauauuu

SEQ ID NO: 2160347 - RNA, 16 nt, Human
caaaggguccagaagg

SEQ ID NO: 2160348 - RNA, 21 nt, Human
caaaggguccagaaggagaca

SEQ ID NO: 2160349 - RNA, 17 nt, Human
caaaggguccagaagga

SEQ ID NO: 2160350 - RNA, 22 nt, Human
caacaacauguauaauauuuuu

SEQ ID NO: 2160351 - RNA, 21 nt, Human
caacaacauguauaauauuuu

SEQ ID NO: 2160352 - RNA, 17 nt, Human
caacuacagaaaaacca

SEQ ID NO: 2160353 - RNA, 19 nt, Human
caaccagggagcugcaggg

SEQ ID NO: 2160354 - RNA, 22 nt, Human
caaccagggauuguuucuguuu

SEQ ID NO: 2160355 - RNA, 17 nt, Human
caaccagggagcugcag

SEQ ID NO: 2160356 - RNA, 18 nt, Human
auuuucuucaccucugcu

SEQ ID NO: 2160357 - RNA, 20 nt, Human
caaacaugugguuaaugcca

SEQ ID NO: 2160358 - RNA, 21 nt, Human
cacugggaggccagugagcca

SEQ ID NO: 2160359 - RNA, 14 nt, Human
cacugggaggccag

SEQ ID NO: 2160360 - RNA, 23 nt, Human
cacucugugucugaguggcuuca

SEQ ID NO: 2160361 - RNA, 17 nt, Human
cacucugugucugagug

SEQ ID NO: 2160362 - RNA, 22 nt, Human
caccuuucauaaucuuugcuuu

SEQ ID NO: 2160363 - RNA, 16 nt, Human
caccuuucuccuuugu

SEQ ID NO: 2160364 - RNA, 21 nt, Human
caccuuuguuuagaacacugg

SEQ ID NO: 2160365 - RNA, 17 nt, Human
caauuuccaagagcuga

SEQ ID NO: 2160366 - RNA, 18 nt, Human
caauggcuuacuccagga

SEQ ID NO: 2160367 - RNA, 19 nt, Human
caauggcuaccuaaaaaga

SEQ ID NO: 2160368 - RNA, 12 nt, Human
caaucccagcua

SEQ ID NO: 2160369 - RNA, 17 nt, Human
caaucccagcuaccuca

SEQ ID NO: 2160370 - RNA, 20 nt, Human
caaucauauuaauacaauga

SEQ ID NO: 2160371 - RNA, 20 nt, Human
caccaggcuugccugcaggc

SEQ ID NO: 2160372 - RNA, 22 nt, Human
cacagggacugaaaaccucucc

SEQ ID NO: 2160373 - RNA, 15 nt, Human
cccagggaaguuuug

SEQ ID NO: 2160374 - RNA, 21 nt, Human
cccagccaggccccaggcagg

SEQ ID NO: 2160375 - RNA, 21 nt, Human
cccacugggguccagggagca

SEQ ID NO: 2160376 - RNA, 16 nt, Human
cccauccccuguggga

SEQ ID NO: 2160377 - RNA, 22 nt, Human
cccaucgccagcugaugacuca

SEQ ID NO: 2160378 - RNA, 21 nt, Human
cccaucgccagcugaugacuc

SEQ ID NO: 2160379 - RNA, 20 nt, Human
cccauccucuucuuuuagca

SEQ ID NO: 2160380 - RNA, 19 nt, Human
cccauccucuucuuuuagc

SEQ ID NO: 2160381 - RNA, 15 nt, Human
cccucacucucuaca

SEQ ID NO: 2160382 - RNA, 22 nt, Human
ccagcuauugauauaaauaaaa

SEQ ID NO: 2160383 - RNA, 23 nt, Human
ccaguuccuuucaaugguuugca

SEQ ID NO: 2160384 - RNA, 22 nt, Human
ccaugaugacaacuacagaaaa

SEQ ID NO: 2160385 - RNA, 18 nt, Human
cccaagaccucagggcac

SEQ ID NO: 2160386 - RNA, 15 nt, Human
ccucgcaggaagacc

SEQ ID NO: 2160387 - RNA, 12 nt, Human
ccucgcuuggac

SEQ ID NO: 2160388 - RNA, 20 nt, Human
ccuccgcgugaucaaagcca

SEQ ID NO: 2160389 - RNA, 15 nt, Human
ccucccaggcucuca

SEQ ID NO: 2160390 - RNA, 22 nt, Human
ccgguucacucuucucagccac

SEQ ID NO: 2160391 - RNA, 17 nt, Human
cccuucuccucuuguaa

SEQ ID NO: 2160392 - RNA, 20 nt, Human
cccuucuccucuuguaaaua

SEQ ID NO: 2160393 - RNA, 18 nt, Human
cccuucuccucuuguaaa

SEQ ID NO: 2160394 - RNA, 14 nt, Human
ccuggauguugcug

SEQ ID NO: 2160395 - RNA, 13 nt, Human
ccugucuccuggc

SEQ ID NO: 2160396 - RNA, 16 nt, Human
ccugucuccuggcggu

SEQ ID NO: 2160397 - RNA, 19 nt, Human
ccugccucaggccucugug

SEQ ID NO: 2160398 - RNA, 19 nt, Human
ccugauaagcuucaaagcu

SEQ ID NO: 2160399 - RNA, 15 nt, Human
ccugagggagcucca

SEQ ID NO: 2160400 - RNA, 22 nt, Human
ccugagggaucuauacuugcuu

SEQ ID NO: 2160401 - RNA, 13 nt, Human
ccugagggagcuc

SEQ ID NO: 2160402 - RNA, 22 nt, Human
cucaaaggccagaccugcagac

SEQ ID NO: 2160403 - RNA, 13 nt, Human
cucaaaggccaga

SEQ ID NO: 2160404 - RNA, 19 nt, Human
cuauguggauuuuuuccua

SEQ ID NO: 2160405 - RNA, 18 nt, Human
cuauguggauuuuuuccu

SEQ ID NO: 2160406 - RNA, 17 nt, Human
cucacaaccugaaccua

SEQ ID NO: 2160407 - RNA, 16 nt, Human
cucacaaccugaaccu

SEQ ID NO: 2160408 - RNA, 20 nt, Human
cucacaaccugaaccuagga

SEQ ID NO: 2160409 - RNA, 19 nt, Human
cucaccuauccacacaaca

SEQ ID NO: 2160410 - RNA, 16 nt, Human
cucaccucuaaaacag

SEQ ID NO: 2160411 - RNA, 22 nt, Human
cucagaagggagcuagccagag

SEQ ID NO: 2160412 - RNA, 21 nt, Human
cucagaagggagcuagccaga

SEQ ID NO: 2160413 - RNA, 18 nt, Human
cuacucaaguagcauuua

SEQ ID NO: 2160414 - RNA, 17 nt, Human
cuacucaaguagcauuu

SEQ ID NO: 2160415 - RNA, 20 nt, Human
cuacucaaguagcauuuacu

SEQ ID NO: 2160416 - RNA, 13 nt, Human
cuacuaaaacuac

SEQ ID NO: 2160417 - RNA, 18 nt, Human
cuaggccuccuggcccag

SEQ ID NO: 2160418 - RNA, 17 nt, Human
cuaggccuccuggccca

SEQ ID NO: 2160419 - RNA, 19 nt, Human
cuaggccuccuggcccagg

SEQ ID NO: 2160420 - RNA, 16 nt, Human
cgcauccccugccucc

SEQ ID NO: 2160421 - RNA, 15 nt, Human
cgcauccccugccuc

SEQ ID NO: 2160422 - RNA, 14 nt, Human
cgcauccccugccu

SEQ ID NO: 2160423 - RNA, 13 nt, Human
cgcauccccugcc

SEQ ID NO: 2160424 - RNA, 18 nt, Human
cgcauccccugccuccau

SEQ ID NO: 2160425 - RNA, 22 nt, Human
cgguucacucuucucagccacu

SEQ ID NO: 2160426 - RNA, 19 nt, Human
cgguuccucguucucccug

SEQ ID NO: 2160427 - RNA, 21 nt, Human
cgguuccucguucucccuggg

SEQ ID NO: 2160428 - RNA, 12 nt, Human
cguguuuguguu

SEQ ID NO: 2160429 - RNA, 21 nt, Human
cuccccaucgccagcugauga

SEQ ID NO: 2160430 - RNA, 23 nt, Human
cuccccaucgccagcugaugacu

SEQ ID NO: 2160431 - RNA, 19 nt, Human
cugaggaagcugggguuca

SEQ ID NO: 2160432 - RNA, 14 nt, Human
cugacaccuuucau

SEQ ID NO: 2160433 - RNA, 18 nt, Human
acucaaaugcucagacca

SEQ ID NO: 2160434 - RNA, 21 nt, Human
acucaaaugcucagaccagcu

SEQ ID NO: 2160435 - RNA, 23 nt, Human
acucaaaugcucagaccagcucu

SEQ ID NO: 2160436 - RNA, 22 nt, Human
acucauauuacugguaggaacu

SEQ ID NO: 2160437 - RNA, 15 nt, Human
acucauauuacuggu

SEQ ID NO: 2160438 - RNA, 13 nt, Human
acucauauuacug

SEQ ID NO: 2160439 - RNA, 17 nt, Human
accugucuccuggcggu

SEQ ID NO: 2160440 - RNA, 19 nt, Human
accuuucauaaucuuugcu

SEQ ID NO: 2160441 - RNA, 21 nt, Human
accuuucauaaucuuugcuuu

SEQ ID NO: 2160442 - RNA, 20 nt, Human
accuuucauaaucuuugcuu

SEQ ID NO: 2160443 - RNA, 22 nt, Human
acuaauucuugcauauuuugua

SEQ ID NO: 2160444 - RNA, 14 nt, Human
acuaauucuugcau

SEQ ID NO: 2160445 - RNA, 17 nt, Human
acgcuuugggagaaugu

SEQ ID NO: 2160446 - RNA, 19 nt, Human
acgcuuucagcgaaugaca

SEQ ID NO: 2160447 - RNA, 19 nt, Human
acuucacgcuuucagcgaa

SEQ ID NO: 2160448 - RNA, 15 nt, Human
acuggagccaugggc

SEQ ID NO: 2160449 - RNA, 20 nt, Human
acugguaggaacuugagaac

SEQ ID NO: 2160450 - RNA, 15 nt, Human
acucugucuaaaaaa

SEQ ID NO: 2160451 - RNA, 19 nt, Human
agaaagguuuugagcaugg

SEQ ID NO: 2160452 - RNA, 21 nt, Human
agaaagguuuugagcaugggu

SEQ ID NO: 2160453 - RNA, 20 nt, Human
agaaaggggcaguuuaaagc

SEQ ID NO: 2160454 - RNA, 20 nt, Human
agaaaauggaaccaggcuug

SEQ ID NO: 2160455 - RNA, 19 nt, Human
agaaaauggaaccaggcuu

SEQ ID NO: 2160456 - RNA, 19 nt, Human
acuuuucauauuugcacua

SEQ ID NO: 2160457 - RNA, 12 nt, Human
acuuuauuucca

SEQ ID NO: 2160458 - RNA, 21 nt, Human
acuuuauuuccaaguuguuca

SEQ ID NO: 2160459 - RNA, 21 nt, Human
acacagacuguugucccugca

SEQ ID NO: 2160460 - RNA, 15 nt, Human
acaacuacagaaaaa

SEQ ID NO: 2160461 - RNA, 20 nt, Human
acaacuacagaaaaaccaga

SEQ ID NO: 2160462 - RNA, 19 nt, Human
acaacuacagaaaaaccag

SEQ ID NO: 2160463 - RNA, 15 nt, Human
acaggaugcuuuggu

SEQ ID NO: 2160464 - RNA, 23 nt, Human
acacugcuuguguuuuuaacuca

SEQ ID NO: 2160465 - RNA, 16 nt, Human
acacuggacuccggcc

SEQ ID NO: 2160466 - RNA, 19 nt, Human
acacugcuuguguuuuuaa

SEQ ID NO: 2160467 - RNA, 17 nt, Human
acagaggcuauuguccc

SEQ ID NO: 2160468 - RNA, 13 nt, Human
accagaggcagcu

SEQ ID NO: 2160469 - RNA, 22 nt, Human
accccucccucacucccaccug

SEQ ID NO: 2160470 - RNA, 13 nt, Human
aacaacauguaua

SEQ ID NO: 2160471 - RNA, 21 nt, Human
aacacauuaagccuuccacac

SEQ ID NO: 2160472 - RNA, 19 nt, Human
aacaccauugaaggcuuaa

SEQ ID NO: 2160473 - RNA, 15 nt, Human
aacaccauugaaggc

SEQ ID NO: 2160474 - RNA, 17 nt, Human
aacaccauugaaggcuu

SEQ ID NO: 2160475 - RNA, 14 nt, Human
aacacgcaggagca

SEQ ID NO: 2160476 - RNA, 13 nt, Human
aacacgcaggagc

SEQ ID NO: 2160477 - RNA, 21 nt, Human
aaauuaacacugcuuguguuu

SEQ ID NO: 2160478 - RNA, 18 nt, Human
aaauuaacagaaaaacag

SEQ ID NO: 2160479 - RNA, 13 nt, Human
aaauuaacacugc

SEQ ID NO: 2160480 - RNA, 12 nt, Human
aaauuaacacug

SEQ ID NO: 2160481 - RNA, 19 nt, Human
aaccuaggagugccccauu

SEQ ID NO: 2160482 - RNA, 21 nt, Human
aacccuaaaaagcagagcuuu

SEQ ID NO: 2160483 - RNA, 14 nt, Human
aaccagaggcagcu

SEQ ID NO: 2160484 - RNA, 23 nt, Human
aacccuucuccucuuguaaauaa

SEQ ID NO: 2160485 - RNA, 13 nt, Human
aacuuaacaugaa

SEQ ID NO: 2160486 - RNA, 18 nt, Human
aacugagauccuuccuuu

SEQ ID NO: 2160487 - RNA, 19 nt, Human
aacgcucucuacucugcuu

SEQ ID NO: 2160488 - RNA, 15 nt, Human
aacgcagacacugag

SEQ ID NO: 2160489 - RNA, 12 nt, Human
aacucagaaggg

SEQ ID NO: 2160490 - RNA, 19 nt, Human
aaagccacaaccacauaca

SEQ ID NO: 2160491 - RNA, 17 nt, Human
aaaggccagaccugcag

SEQ ID NO: 2160492 - RNA, 20 nt, Human
aaaggccagaccugcagacg

SEQ ID NO: 2160493 - RNA, 12 nt, Human
aaaguccccaga

SEQ ID NO: 2160494 - RNA, 19 nt, Human
aaauaaaguuggucuuuug

SEQ ID NO: 2160495 - RNA, 15 nt, Human
aaauagcuucuguuu

SEQ ID NO: 2160496 - RNA, 12 nt, Human
aaaaagaaauga

SEQ ID NO: 2160497 - RNA, 21 nt, Human
aaacacgcacuuagucucuaa

SEQ ID NO: 2160498 - RNA, 14 nt, Human
aaagaaaugcaaaa

SEQ ID NO: 2160499 - RNA, 13 nt, Human
aaagaaaugcaaa

SEQ ID NO: 2160500 - RNA, 22 nt, Human
aaacugagauccuuccuuuuga

SEQ ID NO: 2160501 - RNA, 13 nt, Human
aaagaaauaucug

SEQ ID NO: 2160502 - RNA, 12 nt, Human
aaacucucugaa

SEQ ID NO: 2160503 - RNA, 13 nt, Human
aaacucucugaac

SEQ ID NO: 2160504 - RNA, 20 nt, Human
aaaccauuaugaagaagaga

SEQ ID NO: 2160505 - RNA, 19 nt, Human
aaaccccuacccucacaau

SEQ ID NO: 2160506 - RNA, 17 nt, Human
aagggagcuagccagag

SEQ ID NO: 2160507 - RNA, 17 nt, Human
aagcuacaaucuguuca

SEQ ID NO: 2160508 - RNA, 20 nt, Human
aaggcagggagcgagggaga

SEQ ID NO: 2160509 - RNA, 14 nt, Human
aagcuguauuuuga

SEQ ID NO: 2160510 - RNA, 22 nt, Human
aagcugggguucaugacaaugg

SEQ ID NO: 2160511 - RNA, 16 nt, Human
aagcugggguucauga

SEQ ID NO: 2160512 - RNA, 16 nt, Human
aagauucccaggaguu

SEQ ID NO: 2160513 - RNA, 15 nt, Human
aagauucccaggagu

SEQ ID NO: 2160514 - RNA, 14 nt, Human
aagauucccaggag

SEQ ID NO: 2160515 - RNA, 13 nt, Human
aagauucccagga

SEQ ID NO: 2160516 - RNA, 19 nt, Human
aagauucccaggaguucug

SEQ ID NO: 2160517 - RNA, 17 nt, Human
aagauucccaggaguuc

SEQ ID NO: 2160518 - RNA, 21 nt, Human
aagauucccaggaguucugcu

SEQ ID NO: 2160519 - RNA, 17 nt, Human
aagauaaagccagaagc

SEQ ID NO: 2160520 - RNA, 13 nt, Human
aacuuuauuucca

SEQ ID NO: 2160521 - RNA, 19 nt, Human
aacuuuccucuuccugccu

SEQ ID NO: 2160522 - RNA, 14 nt, Human
aagccacagcuggu

SEQ ID NO: 2160523 - RNA, 22 nt, Human
aagcagcggucagcagacaagg

SEQ ID NO: 2160524 - RNA, 23 nt, Human
aaugucacguuuuguuuugugcc

SEQ ID NO: 2160525 - RNA, 22 nt, Human
aaugucacguuuuguuuugugc

SEQ ID NO: 2160526 - RNA, 17 nt, Human
aaugaaguuguagguaa

SEQ ID NO: 2160527 - RNA, 21 nt, Human
aauacuauauuuauacuguau

SEQ ID NO: 2160528 - RNA, 21 nt, Human
agagaaaaagaaaugcaaaaa

SEQ ID NO: 2160529 - RNA, 20 nt, Human
agagaaaaagaaaugcaaaa

SEQ ID NO: 2160530 - RNA, 16 nt, Human
agagaaaaagaaaugc

SEQ ID NO: 2160531 - RNA, 14 nt, Human
agagaaaaagaaau

SEQ ID NO: 2160532 - RNA, 12 nt, Human
agagaaaaagag

SEQ ID NO: 2160533 - RNA, 16 nt, Human
agaggacaagggaaau

SEQ ID NO: 2160534 - RNA, 18 nt, Human
agagggccgggcagaggg

SEQ ID NO: 2160535 - RNA, 17 nt, Human
agagggccgggcagagg

SEQ ID NO: 2160536 - RNA, 15 nt, Human
agagggccgggcaga

SEQ ID NO: 2160537 - RNA, 20 nt, Human
agaguguggagucauucuca

SEQ ID NO: 2160538 - RNA, 20 nt, Human
agcacacucauccccucacu

SEQ ID NO: 2160539 - RNA, 14 nt, Human
agcacacucauccc

SEQ ID NO: 2160540 - RNA, 23 nt, Human
agcagcugaaauaugcuggcugg

SEQ ID NO: 2160541 - RNA, 22 nt, Human
agcagcugaaauaugcuggcug

SEQ ID NO: 2160542 - RNA, 12 nt, Human
agcagcucuccc

SEQ ID NO: 2160543 - RNA, 14 nt, Human
agcagcucuccccu

SEQ ID NO: 2160544 - RNA, 21 nt, Human
agcaugcugugauugugccua

SEQ ID NO: 2160545 - RNA, 23 nt, Human
agccucccugccucaggccucug

SEQ ID NO: 2160546 - RNA, 14 nt, Human
agccucccugccuc

SEQ ID NO: 2160547 - RNA, 13 nt, Human
agccucccugccu

SEQ ID NO: 2160548 - RNA, 12 nt, Human
agccucccugcc

SEQ ID NO: 2160549 - RNA, 17 nt, Human
aggaguuauuuguaaug

SEQ ID NO: 2160550 - RNA, 14 nt, Human
aggaugcuuugguu

SEQ ID NO: 2160551 - RNA, 18 nt, Human
aggacccaagcagagaag

SEQ ID NO: 2160552 - RNA, 15 nt, Human
aggacccaagcagag

SEQ ID NO: 2160553 - RNA, 13 nt, Human
aggacccaagcag

SEQ ID NO: 2160554 - RNA, 12 nt, Human
aggacccaagca

SEQ ID NO: 2160555 - RNA, 20 nt, Human
agcugaaauaugcuggcugg

SEQ ID NO: 2160556 - RNA, 18 nt, Human
agcugaaauaugcuggcu

SEQ ID NO: 2160557 - RNA, 17 nt, Human
agcugaaaguugggacu

SEQ ID NO: 2160558 - RNA, 14 nt, Human
agcugaaaguuggg

SEQ ID NO: 2160559 - RNA, 16 nt, Human
agcugcucagggaaaa

SEQ ID NO: 2160560 - RNA, 21 nt, Human
agcugcucagggaaaagcagc

SEQ ID NO: 2160561 - RNA, 22 nt, Human
agcuuccccaacacgcaggagc

SEQ ID NO: 2160562 - RNA, 20 nt, Human
agguggagguugcagugagc

SEQ ID NO: 2160563 - RNA, 12 nt, Human
agggucccuggg

SEQ ID NO: 2160564 - RNA, 21 nt, Human
aggguccagaaggagacaggc

SEQ ID NO: 2160565 - RNA, 19 nt, Human
aggguccagaaggagacag

SEQ ID NO: 2160566 - RNA, 18 nt, Human
aggguccagaaggagaca

SEQ ID NO: 2160567 - RNA, 23 nt, Human
agggucagccagggccugcgagg

SEQ ID NO: 2160568 - RNA, 19 nt, Human
agggucagccagggccugc

SEQ ID NO: 2160569 - RNA, 18 nt, Human
agggucagccagggccug

SEQ ID NO: 2160570 - RNA, 17 nt, Human
agggucagccagggccu

SEQ ID NO: 2160571 - RNA, 15 nt, Human
agggucagccagggc

SEQ ID NO: 2160572 - RNA, 16 nt, Human
agggaccucucccagg

SEQ ID NO: 2160573 - RNA, 13 nt, Human
agggaccucuccc

SEQ ID NO: 2160574 - RNA, 15 nt, Human
agggaccucucccag

SEQ ID NO: 2160575 - RNA, 22 nt, Human
agggacgaagaagagccacagu

SEQ ID NO: 2160576 - RNA, 21 nt, Human
agggacgaagaagagccacag

SEQ ID NO: 2160577 - RNA, 17 nt, Human
agggacgaagaagagcc

SEQ ID NO: 2160578 - RNA, 12 nt, Human
auaaaaaggugu

SEQ ID NO: 2160579 - RNA, 20 nt, Human
auaaagcccugggaucacug

SEQ ID NO: 2160580 - RNA, 14 nt, Human
auaaagcccuggga

SEQ ID NO: 2160581 - RNA, 22 nt, Human
auagcaucuuguggcuuugcaa

SEQ ID NO: 2160582 - RNA, 14 nt, Human
auauuuacguauga

SEQ ID NO: 2160583 - RNA, 17 nt, Human
aguugaaccuauuucuc

SEQ ID NO: 2160584 - RNA, 19 nt, Human
aguugaaccuauuucucuu

SEQ ID NO: 2160585 - RNA, 18 nt, Human
aguuccaaaaugccaaau

SEQ ID NO: 2160586 - RNA, 22 nt, Human
aguucauguauguucagaagaa

SEQ ID NO: 2160587 - RNA, 20 nt, Human
aguggcuucacuccugcugu

SEQ ID NO: 2160588 - RNA, 21 nt, Human
aguggcuucacuccugcugua

SEQ ID NO: 2160589 - RNA, 19 nt, Human
aguggcuucacuccugcug

SEQ ID NO: 2160590 - RNA, 18 nt, Human
aguggcuucacuccugcu

SEQ ID NO: 2160591 - RNA, 19 nt, Human
agugaaguugcuucuucua

SEQ ID NO: 2160592 - RNA, 17 nt, Human
agugaagugagaaguuc

SEQ ID NO: 2160593 - RNA, 23 nt, Human
agucugcgucucugcuuuaaagu

SEQ ID NO: 2160594 - RNA, 23 nt, Human
auggaaaggagccuaggccaggu

SEQ ID NO: 2160595 - RNA, 16 nt, Human
auggaaacugaaacua

SEQ ID NO: 2160596 - RNA, 17 nt, Human
augaugcuauuugcaau

SEQ ID NO: 2160597 - RNA, 16 nt, Human
augaugcuauuugcaa

SEQ ID NO: 2160598 - RNA, 11 nt, Human
auuaaauagcu

SEQ ID NO: 2160599 - RNA, 13 nt, Human
auguucugcuuuc

SEQ ID NO: 2160600 - RNA, 22 nt, Human
auguuccuuuggaagaaaaaau

SEQ ID NO: 2160601 - RNA, 23 nt, Human
auguauuuucuucaccucugcua

SEQ ID NO: 2160602 - RNA, 17 nt, Human
augaagguuucugaaaa

SEQ ID NO: 2160603 - RNA, 19 nt, Human
augaagguuucugaaaauu

SEQ ID NO: 2160604 - RNA, 13 nt, Human
aucuauauuuugg

SEQ ID NO: 2160605 - RNA, 15 nt, Human
aucuauuaaaaccac

SEQ ID NO: 2160606 - RNA, 18 nt, Human
aucucccuucacaaguuu

SEQ ID NO: 2160607 - RNA, 21 nt, Human
auccuauugaaccauguuugu

SEQ ID NO: 2160608 - RNA, 13 nt, Human
auccuauucuuuc

SEQ ID NO: 2160609 - RNA, 13 nt, Human
auccccugccucc

SEQ ID NO: 2160610 - RNA, 12 nt, Human
auccccugccuc

SEQ ID NO: 2160611 - RNA, 18 nt, Human
aucagcuccacuuucagu

SEQ ID NO: 2160612 - RNA, 22 nt, Human
aucagcuggucaaacaaacucu

SEQ ID NO: 2160613 - RNA, 19 nt, Human
aaaaacccagcaacagaaa

SEQ ID NO: 2160614 - RNA, 13 nt, Human
ccagggccugcga

SEQ ID NO: 2160615 - RNA, 14 nt, Human
ccagggccugcgag

SEQ ID NO: 2160616 - RNA, 19 nt, Human
ccagggagcugcaggggca

SEQ ID NO: 2160617 - RNA, 15 nt, Human
ccagggagcugcagg

SEQ ID NO: 2160618 - RNA, 13 nt, Human
ccagggagcugca

SEQ ID NO: 2160619 - RNA, 15 nt, Human
ccaggugcagccaga

SEQ ID NO: 2160620 - RNA, 14 nt, Human
ccaggugcagccag

SEQ ID NO: 2160621 - RNA, 14 nt, Human
ccagguagaacaca

SEQ ID NO: 2160622 - RNA, 16 nt, Human
ccaggugcagccagag

SEQ ID NO: 2160623 - RNA, 21 nt, Human
ccagugaugcuaaagguugua

SEQ ID NO: 2160624 - RNA, 14 nt, Human
ccagugcaacacug

SEQ ID NO: 2160625 - RNA, 20 nt, Human
ccauucuacuugcucuggac

SEQ ID NO: 2160626 - RNA, 19 nt, Human
ccauucucaccuauccaca

SEQ ID NO: 2160627 - RNA, 17 nt, Human
ccauuaugaagaagaga

SEQ ID NO: 2160628 - RNA, 15 nt, Human
ccauuauguccuagu

SEQ ID NO: 2160629 - RNA, 12 nt, Human
ccauucuacuug

SEQ ID NO: 2160630 - RNA, 17 nt, Human
ccauucuacuugcucug

SEQ ID NO: 2160631 - RNA, 13 nt, Human
ccauucuacuugc

SEQ ID NO: 2160632 - RNA, 22 nt, Human
ccauucuacuugcucuggaccu

SEQ ID NO: 2160633 - RNA, 19 nt, Human
ccauucuacuugcucugga

SEQ ID NO: 2160634 - RNA, 18 nt, Human
ccauucuacuugcucugg

SEQ ID NO: 2160635 - RNA, 15 nt, Human
ccauuucucuccuca

SEQ ID NO: 2160636 - RNA, 23 nt, Human
ccaucugguuaggauggcaggac

SEQ ID NO: 2160637 - RNA, 15 nt, Human
ccauuuuuacuguua

SEQ ID NO: 2160638 - RNA, 13 nt, Human
cccacagacucaa

SEQ ID NO: 2160639 - RNA, 23 nt, Human
cccacagacucaaaugcucagac

SEQ ID NO: 2160640 - RNA, 14 nt, Human
ccagauuuaaauaa

SEQ ID NO: 2160641 - RNA, 18 nt, Human
ccagcuccucacucaccu

SEQ ID NO: 2160642 - RNA, 18 nt, Human
ccaccucucccugacccu

SEQ ID NO: 2160643 - RNA, 17 nt, Human
ccaccucucccugaccc

SEQ ID NO: 2160644 - RNA, 16 nt, Human
ccaccucucccugacc

SEQ ID NO: 2160645 - RNA, 18 nt, Human
ccagaaggagacaggcag

SEQ ID NO: 2160646 - RNA, 17 nt, Human
ccagaaggagacaggca

SEQ ID NO: 2160647 - RNA, 14 nt, Human
ccagaaggagacag

SEQ ID NO: 2160648 - RNA, 18 nt, Human
ccacugcauaccaaccug

SEQ ID NO: 2160649 - RNA, 19 nt, Human
ccacugcauaccaaccugg

SEQ ID NO: 2160650 - RNA, 22 nt, Human
ccacugggguccagggagcagg

SEQ ID NO: 2160651 - RNA, 19 nt, Human
ccacugggguccagggagc

SEQ ID NO: 2160652 - RNA, 18 nt, Human
ccacugggguccagggag

SEQ ID NO: 2160653 - RNA, 13 nt, Human
ccacuggacugac

SEQ ID NO: 2160654 - RNA, 12 nt, Human
ccuaggccaggu

SEQ ID NO: 2160655 - RNA, 11 nt, Human
ccuaggccagg

SEQ ID NO: 2160656 - RNA, 15 nt, Human
ccuaggccaggugca

SEQ ID NO: 2160657 - RNA, 14 nt, Human
ccgccugguacuca

SEQ ID NO: 2160658 - RNA, 15 nt, Human
ccgggcagaggggca

SEQ ID NO: 2160659 - RNA, 12 nt, Human
ccgggcagaggg

SEQ ID NO: 2160660 - RNA, 16 nt, Human
cccugccucaggccuc

SEQ ID NO: 2160661 - RNA, 21 nt, Human
cccugccucaggccucugugc

SEQ ID NO: 2160662 - RNA, 18 nt, Human
cccugccuccauccuagu

SEQ ID NO: 2160663 - RNA, 13 nt, Human
cccugccuccauc

SEQ ID NO: 2160664 - RNA, 12 nt, Human
cccugccuccau

SEQ ID NO: 2160665 - RNA, 19 nt, Human
cccugcuccagaagauagc

SEQ ID NO: 2160666 - RNA, 22 nt, Human
cccuugaggaaacaacagcuuu

SEQ ID NO: 2160667 - RNA, 13 nt, Human
cccuuccaggggu

SEQ ID NO: 2160668 - RNA, 22 nt, Human
cccuggugagagggccgggcag

SEQ ID NO: 2160669 - RNA, 15 nt, Human
cccuguauauagccc

SEQ ID NO: 2160670 - RNA, 18 nt, Human
cccuguauauagcccagc

SEQ ID NO: 2160671 - RNA, 17 nt, Human
cccuguauauagcccag

SEQ ID NO: 2160672 - RNA, 13 nt, Human
ccccaaucccagc

SEQ ID NO: 2160673 - RNA, 13 nt, Human
ccccaccccauuu

SEQ ID NO: 2160674 - RNA, 17 nt, Human
ccccaccucucccugac

SEQ ID NO: 2160675 - RNA, 12 nt, Human
ccccaccucucc

SEQ ID NO: 2160676 - RNA, 21 nt, Human
cccagagaaagcgcagaugcu

SEQ ID NO: 2160677 - RNA, 22 nt, Human
cccccaccucucccugacccug

SEQ ID NO: 2160678 - RNA, 21 nt, Human
ccccucgcuuggacggcuggg

SEQ ID NO: 2160679 - RNA, 16 nt, Human
ccccugccuccauccu

SEQ ID NO: 2160680 - RNA, 15 nt, Human
ccccugccuccaucc

SEQ ID NO: 2160681 - RNA, 23 nt, Human
ccccugcccuccccucucugcac

SEQ ID NO: 2160682 - RNA, 15 nt, Human
cccgcauccccugcc

SEQ ID NO: 2160683 - RNA, 14 nt, Human
cccgcauccccugc

SEQ ID NO: 2160684 - RNA, 19 nt, Human
cccgcauccccugccucca

SEQ ID NO: 2160685 - RNA, 18 nt, Human
cccgcauccccugccucc

SEQ ID NO: 2160686 - RNA, 17 nt, Human
cccgcauccccugccuc

SEQ ID NO: 2160687 - RNA, 16 nt, Human
cccgcauccccugccu

SEQ ID NO: 2160688 - RNA, 20 nt, Human
cccgcauccccugccuccau

SEQ ID NO: 2160689 - RNA, 15 nt, Human
cccgccaaaagcugc

SEQ ID NO: 2160690 - RNA, 16 nt, Human
cuccaccagucauuuu

SEQ ID NO: 2160691 - RNA, 20 nt, Human
cuccagaguggggaugacau

SEQ ID NO: 2160692 - RNA, 15 nt, Human
cuccaaaccuucaca

SEQ ID NO: 2160693 - RNA, 14 nt, Human
cuccaaaccuucac

SEQ ID NO: 2160694 - RNA, 21 nt, Human
cuccaaaccuucacacacaga

SEQ ID NO: 2160695 - RNA, 16 nt, Human
cuccaaaccuucacac

SEQ ID NO: 2160696 - RNA, 21 nt, Human
cucauucuaaugauggcccau

SEQ ID NO: 2160697 - RNA, 17 nt, Human
cucaguucuugccacuu

SEQ ID NO: 2160698 - RNA, 20 nt, Human
cucauucuaaugauggccca

SEQ ID NO: 2160699 - RNA, 18 nt, Human
cucauucuaaugauggcc

SEQ ID NO: 2160700 - RNA, 14 nt, Human
cucauucuaaugau

SEQ ID NO: 2160701 - RNA, 12 nt, Human
cucccaggcucu

SEQ ID NO: 2160702 - RNA, 13 nt, Human
cucccaggcucuc

SEQ ID NO: 2160703 - RNA, 13 nt, Human
cucagcccugacc

SEQ ID NO: 2160704 - RNA, 15 nt, Human
cucagcccugacccu

SEQ ID NO: 2160705 - RNA, 14 nt, Human
cucagcccugaccc

SEQ ID NO: 2160706 - RNA, 17 nt, Human
cucagcccugacccugu

SEQ ID NO: 2160707 - RNA, 21 nt, Human
cucagguggccaugccucagc

SEQ ID NO: 2160708 - RNA, 20 nt, Human
cucagguggccaugccucag

SEQ ID NO: 2160709 - RNA, 19 nt, Human
cucagguggccaugccuca

SEQ ID NO: 2160710 - RNA, 18 nt, Human
cucagguggccaugccuc

SEQ ID NO: 2160711 - RNA, 15 nt, Human
cucagguggccaugc

SEQ ID NO: 2160712 - RNA, 13 nt, Human
cucagguggccau

SEQ ID NO: 2160713 - RNA, 12 nt, Human
cucagguggcca

SEQ ID NO: 2160714 - RNA, 17 nt, Human
cucagcucuuggcucca

SEQ ID NO: 2160715 - RNA, 18 nt, Human
cucagcucuuggcuccac

SEQ ID NO: 2160716 - RNA, 20 nt, Human
cucagcucuuggcuccacug

SEQ ID NO: 2160717 - RNA, 22 nt, Human
cucagcuuccccaacacgcagg

SEQ ID NO: 2160718 - RNA, 17 nt, Human
cucagcuuccccaacac

SEQ ID NO: 2160719 - RNA, 16 nt, Human
cuauuggaaaaaccac

SEQ ID NO: 2160720 - RNA, 9 nt, Human
cuauuuaag

SEQ ID NO: 2160721 - RNA, 15 nt, Human
cucacaccugaacug

SEQ ID NO: 2160722 - RNA, 14 nt, Human
cucaaguagcauuu

SEQ ID NO: 2160723 - RNA, 20 nt, Human
cucaaguagcauuuacugug

SEQ ID NO: 2160724 - RNA, 18 nt, Human
cucaaguagcauuuacug

SEQ ID NO: 2160725 - RNA, 15 nt, Human
cucaaguagcauuua

SEQ ID NO: 2160726 - RNA, 17 nt, Human
cucaagcccgcggggac

SEQ ID NO: 2160727 - RNA, 14 nt, Human
cucaagauucccag

SEQ ID NO: 2160728 - RNA, 13 nt, Human
cucaagauuccca

SEQ ID NO: 2160729 - RNA, 21 nt, Human
cucaagauucccaggaguucu

SEQ ID NO: 2160730 - RNA, 17 nt, Human
cucaagauucccaggag

SEQ ID NO: 2160731 - RNA, 16 nt, Human
cucaagauucccagga

SEQ ID NO: 2160732 - RNA, 15 nt, Human
cucaagauucccagg

SEQ ID NO: 2160733 - RNA, 17 nt, Human
cuauuucucuuucuuua

SEQ ID NO: 2160734 - RNA, 14 nt, Human
cuauuucucuuucu

SEQ ID NO: 2160735 - RNA, 12 nt, Human
cuauuucucuuu

SEQ ID NO: 2160736 - RNA, 18 nt, Human
cuauuugcaauuccugcu

SEQ ID NO: 2160737 - RNA, 11 nt, Human
cuauuugcaau

SEQ ID NO: 2160738 - RNA, 16 nt, Human
cuauuugagacuccuc

SEQ ID NO: 2160739 - RNA, 21 nt, Human
cuauuugcaauuccugcuccu

SEQ ID NO: 2160740 - RNA, 15 nt, Human
cuaggaaaauauuuu

SEQ ID NO: 2160741 - RNA, 17 nt, Human
cuaggaaaauauuuuga

SEQ ID NO: 2160742 - RNA, 19 nt, Human
cuauacuugcuuuguguuc

SEQ ID NO: 2160743 - RNA, 21 nt, Human
cuauucuuucgaaagaagaaa

SEQ ID NO: 2160744 - RNA, 21 nt, Human
cuauugauauaaauaaaacau

SEQ ID NO: 2160745 - RNA, 16 nt, Human
cuacucgggaagcuga

SEQ ID NO: 2160746 - RNA, 14 nt, Human
cuacugcaccauuu

SEQ ID NO: 2160747 - RNA, 18 nt, Human
cuacugcaccauuuaaaa

SEQ ID NO: 2160748 - RNA, 17 nt, Human
cuagagggaccucuccc

SEQ ID NO: 2160749 - RNA, 14 nt, Human
cuagagggaccucu

SEQ ID NO: 2160750 - RNA, 15 nt, Human
cuagagggaccucuc

SEQ ID NO: 2160751 - RNA, 16 nt, Human
cuagagggaccucucc

SEQ ID NO: 2160752 - RNA, 18 nt, Human
cuagaaagaauauuuggu

SEQ ID NO: 2160753 - RNA, 23 nt, Human
cuacuguuuuaauuuauacuggc

SEQ ID NO: 2160754 - RNA, 15 nt, Human
cuacaccuuucuccu

SEQ ID NO: 2160755 - RNA, 20 nt, Human
cuacaccuuucuccuuugua

SEQ ID NO: 2160756 - RNA, 18 nt, Human
cuacaccuuucuccuuug

SEQ ID NO: 2160757 - RNA, 22 nt, Human
cuaagcuggagugcuuaucccu

SEQ ID NO: 2160758 - RNA, 12 nt, Human
cuaauacaccag

SEQ ID NO: 2160759 - RNA, 18 nt, Human
cuaauagacuaaaugaaa

SEQ ID NO: 2160760 - RNA, 17 nt, Human
cuaauagacuaaaugaa

SEQ ID NO: 2160761 - RNA, 20 nt, Human
cuaauagacuaaaugaaauc

SEQ ID NO: 2160762 - RNA, 16 nt, Human
cuaaaaaacaaaacaa

SEQ ID NO: 2160763 - RNA, 11 nt, Human
cuaaaaauaau

SEQ ID NO: 2160764 - RNA, 13 nt, Human
cuacccucacaau

SEQ ID NO: 2160765 - RNA, 16 nt, Human
cuacaggggccagaag

SEQ ID NO: 2160766 - RNA, 14 nt, Human
cuacaggggccaga

SEQ ID NO: 2160767 - RNA, 13 nt, Human
cuacaggggccag

SEQ ID NO: 2160768 - RNA, 17 nt, Human
cuacagguuuggguaca

SEQ ID NO: 2160769 - RNA, 13 nt, Human
ccugcccuuggca

SEQ ID NO: 2160770 - RNA, 13 nt, Human
ccugcccuccccu

SEQ ID NO: 2160771 - RNA, 19 nt, Human
ccugcccccgcauccccug

SEQ ID NO: 2160772 - RNA, 22 nt, Human
ccugcccccgcauccccugccu

SEQ ID NO: 2160773 - RNA, 20 nt, Human
ccugcccccgcauccccugc

SEQ ID NO: 2160774 - RNA, 23 nt, Human
ccugcccccgcauccccugccuc

SEQ ID NO: 2160775 - RNA, 15 nt, Human
ccucuuccugccuag

SEQ ID NO: 2160776 - RNA, 21 nt, Human
ccugaagaguccucugaauga

SEQ ID NO: 2160777 - RNA, 17 nt, Human
ccugagcgccugggucc

SEQ ID NO: 2160778 - RNA, 21 nt, Human
ccugaggccucuggaaagcaa

SEQ ID NO: 2160779 - RNA, 21 nt, Human
ccugccacccugggccuggca

SEQ ID NO: 2160780 - RNA, 15 nt, Human
ccugccacccugggc

SEQ ID NO: 2160781 - RNA, 24 nt, Human
ccugccacccugggccuggcagcu

SEQ ID NO: 2160782 - RNA, 23 nt, Human
ccuggguccaggggaggccuucc

SEQ ID NO: 2160783 - RNA, 21 nt, Human
ccuguauauagcccagccagg

SEQ ID NO: 2160784 - RNA, 16 nt, Human
ccuguauauagcccag

SEQ ID NO: 2160785 - RNA, 13 nt, Human
ccuguauauagcc

SEQ ID NO: 2160786 - RNA, 23 nt, Human
ccuguauauagcccagccaggcc

SEQ ID NO: 2160787 - RNA, 21 nt, Human
ccugggguggggauagggagc

SEQ ID NO: 2160788 - RNA, 23 nt, Human
cgcaccgaaaaacuaaaaauaau

SEQ ID NO: 2160789 - RNA, 21 nt, Human
cgaugggcccaauucuuacaa

SEQ ID NO: 2160790 - RNA, 12 nt, Human
cgcacugccucu

SEQ ID NO: 2160791 - RNA, 17 nt, Human
cgaggagguaaugaauu

SEQ ID NO: 2160792 - RNA, 13 nt, Human
cggacaguggcag

SEQ ID NO: 2160793 - RNA, 15 nt, Human
cggacaguggcagga

SEQ ID NO: 2160794 - RNA, 24 nt, Human
cgcaggaagacccaacacauggga

SEQ ID NO: 2160795 - RNA, 12 nt, Human
cgcacuguggau

SEQ ID NO: 2160796 - RNA, 12 nt, Human
cgcccaaggccc

SEQ ID NO: 2160797 - RNA, 15 nt, Human
cgcggggacauuggg

SEQ ID NO: 2160798 - RNA, 22 nt, Human
cggcccuccuacccugcgccca

SEQ ID NO: 2160799 - RNA, 23 nt, Human
cggcccuccuacccugcgcccag

SEQ ID NO: 2160800 - RNA, 20 nt, Human
cggcccuccuacccugcgcc

SEQ ID NO: 2160801 - RNA, 17 nt, Human
ccuugucugaacuggag

SEQ ID NO: 2160802 - RNA, 20 nt, Human
cgaagccaucuuucuuugga

SEQ ID NO: 2160803 - RNA, 22 nt, Human
cgaaugacaaaaucaucuuugu

SEQ ID NO: 2160804 - RNA, 18 nt, Human
cgaaugacaaaaucaucu

SEQ ID NO: 2160805 - RNA, 16 nt, Human
ccuucuccucuuguaa

SEQ ID NO: 2160806 - RNA, 15 nt, Human
ccuucuccucuugua

SEQ ID NO: 2160807 - RNA, 17 nt, Human
ccuucuccucuuguaaa

SEQ ID NO: 2160808 - RNA, 14 nt, Human
ccuuccagcccaga

SEQ ID NO: 2160809 - RNA, 13 nt, Human
ccuuccagcccag

SEQ ID NO: 2160810 - RNA, 18 nt, Human
ccuugagaagauucuucc

SEQ ID NO: 2160811 - RNA, 18 nt, Human
ccuugaggaaacaacagc

SEQ ID NO: 2160812 - RNA, 21 nt, Human
ccuugaggaaacaacagcuuu

SEQ ID NO: 2160813 - RNA, 17 nt, Human
gaaaauauuuugaucuu

SEQ ID NO: 2160814 - RNA, 23 nt, Human
gaaaauauuuugaucuucaacaa

SEQ ID NO: 2160815 - RNA, 20 nt, Human
gaaaauauuuugaucuucaa

SEQ ID NO: 2160816 - RNA, 19 nt, Human
gaaaauauuuugaucuuca

SEQ ID NO: 2160817 - RNA, 22 nt, Human
gaaaacaggacuuaaaaugaca

SEQ ID NO: 2160818 - RNA, 20 nt, Human
gaaaacaggacuuaaaauga

SEQ ID NO: 2160819 - RNA, 11 nt, Human
gaaaaggcagg

SEQ ID NO: 2160820 - RNA, 12 nt, Human
gaaaaggcaaaa

SEQ ID NO: 2160821 - RNA, 17 nt, Human
cuuuguuaaguucuauu

SEQ ID NO: 2160822 - RNA, 19 nt, Human
cuuuguguucuuuguguca

SEQ ID NO: 2160823 - RNA, 19 nt, Human
cuuuuuauugaaucuauuu

SEQ ID NO: 2160824 - RNA, 14 nt, Human
cuuuuguucccauc

SEQ ID NO: 2160825 - RNA, 14 nt, Human
cuuuuuauugaauc

SEQ ID NO: 2160826 - RNA, 13 nt, Human
cuuuuuauugaau

SEQ ID NO: 2160827 - RNA, 17 nt, Human
cuuuuguucccauccuc

SEQ ID NO: 2160828 - RNA, 17 nt, Human
cuuuuuauugaaucuau

SEQ ID NO: 2160829 - RNA, 15 nt, Human
cuuuuuauugaaucu

SEQ ID NO: 2160830 - RNA, 21 nt, Human
cuuuuucuuuuuuucuuuggu

SEQ ID NO: 2160831 - RNA, 15 nt, Human
gaaagccccagaaau

SEQ ID NO: 2160832 - RNA, 14 nt, Human
gaaagcgcagaugc

SEQ ID NO: 2160833 - RNA, 16 nt, Human
gaaaaugaaucccucu

SEQ ID NO: 2160834 - RNA, 20 nt, Human
gaaaaugcaacaacauguau

SEQ ID NO: 2160835 - RNA, 18 nt, Human
gaaaaugcaacaacaugu

SEQ ID NO: 2160836 - RNA, 21 nt, Human
gaaaccauuaugaagaagaga

SEQ ID NO: 2160837 - RNA, 19 nt, Human
cuuucccugcuuaaugaaa

SEQ ID NO: 2160838 - RNA, 22 nt, Human
cuuuccauuugguuuagaacau

SEQ ID NO: 2160839 - RNA, 21 nt, Human
cuuuauguacaggaugcuuug

SEQ ID NO: 2160840 - RNA, 23 nt, Human
cuuuauguacaggaugcuuuggu

SEQ ID NO: 2160841 - RNA, 22 nt, Human
cuuguauagguuuuaaagaccu

SEQ ID NO: 2160842 - RNA, 18 nt, Human
cuuuacggacacccccuc

SEQ ID NO: 2160843 - RNA, 23 nt, Human
cuucuccucuuguaaauaaagcc

SEQ ID NO: 2160844 - RNA, 18 nt, Human
cuucuccucuuguaaaua

SEQ ID NO: 2160845 - RNA, 17 nt, Human
cuucuccucuuguaaau

SEQ ID NO: 2160846 - RNA, 15 nt, Human
cuucuccucuuguaa

SEQ ID NO: 2160847 - RNA, 14 nt, Human
cuucuccucuugua

SEQ ID NO: 2160848 - RNA, 18 nt, Human
cuucucucucuaaaauga

SEQ ID NO: 2160849 - RNA, 20 nt, Human
cuucuccugaaguucagcca

SEQ ID NO: 2160850 - RNA, 19 nt, Human
cuugacucuacugaucuga

SEQ ID NO: 2160851 - RNA, 13 nt, Human
cuugaggaaacaa

SEQ ID NO: 2160852 - RNA, 18 nt, Human
cuugaggaaacaacagcu

SEQ ID NO: 2160853 - RNA, 20 nt, Human
cuugaggaaacaacagcuuu

SEQ ID NO: 2160854 - RNA, 21 nt, Human
cuugaggaaacaacagcuuua

SEQ ID NO: 2160855 - RNA, 21 nt, Human
cuuauaggaaagcuugaguaa

SEQ ID NO: 2160856 - RNA, 17 nt, Human
cuuauaggaaagcuuga

SEQ ID NO: 2160857 - RNA, 16 nt, Human
cuuaucccuucuuuuu

SEQ ID NO: 2160858 - RNA, 17 nt, Human
cuuaucccuucuuuuuc

SEQ ID NO: 2160859 - RNA, 23 nt, Human
cuuaucacaaaaaagaaaaugaa

SEQ ID NO: 2160860 - RNA, 21 nt, Human
cuucaaacuaggggacaaagc

SEQ ID NO: 2160861 - RNA, 14 nt, Human
cuucaaccagggau

SEQ ID NO: 2160862 - RNA, 22 nt, Human
cuucaaccagggauuguuucug

SEQ ID NO: 2160863 - RNA, 19 nt, Human
cuuccagggacgaagaaga

SEQ ID NO: 2160864 - RNA, 22 nt, Human
cuuccagggacgaagaagagcc

SEQ ID NO: 2160865 - RNA, 18 nt, Human
cuucaccccaaucccagc

SEQ ID NO: 2160866 - RNA, 22 nt, Human
cuguggaaaagaaacacgcacu

SEQ ID NO: 2160867 - RNA, 19 nt, Human
cuguggaaaagaaacacgc

SEQ ID NO: 2160868 - RNA, 13 nt, Human
cugucucagggug

SEQ ID NO: 2160869 - RNA, 18 nt, Human
cugugcacaaaguggcau

SEQ ID NO: 2160870 - RNA, 19 nt, Human
cugugcacaaaguggcaua

SEQ ID NO: 2160871 - RNA, 16 nt, Human
cugugccuccaucagc

SEQ ID NO: 2160872 - RNA, 15 nt, Human
cugugccuccaucag

SEQ ID NO: 2160873 - RNA, 17 nt, Human
cuguucccaccugcugg

SEQ ID NO: 2160874 - RNA, 21 nt, Human
cuguggggaaccaauugcuuu

SEQ ID NO: 2160875 - RNA, 12 nt, Human
cuguccucaggu

SEQ ID NO: 2160876 - RNA, 18 nt, Human
cuguccucagguggccau

SEQ ID NO: 2160877 - RNA, 17 nt, Human
cuguccucagguggcca

SEQ ID NO: 2160878 - RNA, 16 nt, Human
cuguccucagguggcc

SEQ ID NO: 2160879 - RNA, 15 nt, Human
cuguccucagguggc

SEQ ID NO: 2160880 - RNA, 12 nt, Human
cuguccuccaag

SEQ ID NO: 2160881 - RNA, 13 nt, Human
cuguccaggcucg

SEQ ID NO: 2160882 - RNA, 12 nt, Human
cuguccaggcuc

SEQ ID NO: 2160883 - RNA, 20 nt, Human
cuguaucaguggauuuccca

SEQ ID NO: 2160884 - RNA, 14 nt, Human
cuguaucacucugu

SEQ ID NO: 2160885 - RNA, 15 nt, Human
cuguaucaguggauu

SEQ ID NO: 2160886 - RNA, 16 nt, Human
cuguaucacucugugu

SEQ ID NO: 2160887 - RNA, 16 nt, Human
cuguauauagcccagc

SEQ ID NO: 2160888 - RNA, 18 nt, Human
cuggucaaacaaacucuc

SEQ ID NO: 2160889 - RNA, 23 nt, Human
cuggucaaacaaacucucugaac

SEQ ID NO: 2160890 - RNA, 17 nt, Human
cuggucaaacaaacucu

SEQ ID NO: 2160891 - RNA, 16 nt, Human
cugggguccagggagc

SEQ ID NO: 2160892 - RNA, 15 nt, Human
cugggguccagggag

SEQ ID NO: 2160893 - RNA, 17 nt, Human
cugguaccaguugaaau

SEQ ID NO: 2160894 - RNA, 16 nt, Human
cugguaccaguugaaa

SEQ ID NO: 2160895 - RNA, 14 nt, Human
cugguacucaagcc

SEQ ID NO: 2160896 - RNA, 22 nt, Human
cuggccaucugguuaggauggc

SEQ ID NO: 2160897 - RNA, 16 nt, Human
cuggccuugggcccuc

SEQ ID NO: 2160898 - RNA, 20 nt, Human
cuggccuugggcccucuggu

SEQ ID NO: 2160899 - RNA, 15 nt, Human
cuggagugaggaaaa

SEQ ID NO: 2160900 - RNA, 18 nt, Human
cuggagucaucauucccu

SEQ ID NO: 2160901 - RNA, 19 nt, Human
cuggaccugcccccgcauc

SEQ ID NO: 2160902 - RNA, 17 nt, Human
cuggaccugcccccgca

SEQ ID NO: 2160903 - RNA, 12 nt, Human
cuggaccugccc

SEQ ID NO: 2160904 - RNA, 18 nt, Human
cuggacuccggcccuccu

SEQ ID NO: 2160905 - RNA, 15 nt, Human
cuggacuccggcccu

SEQ ID NO: 2160906 - RNA, 13 nt, Human
cuggacuccggcc

SEQ ID NO: 2160907 - RNA, 15 nt, Human
cuggacacaggccug

SEQ ID NO: 2160908 - RNA, 14 nt, Human
cuggacacaggccu

SEQ ID NO: 2160909 - RNA, 13 nt, Human
cuggacacaggcc

SEQ ID NO: 2160910 - RNA, 15 nt, Human
cugcuggaaacagac

SEQ ID NO: 2160911 - RNA, 19 nt, Human
cugcuguaaauuuggcuuc

SEQ ID NO: 2160912 - RNA, 17 nt, Human
cugcuguaaauuuggcu

SEQ ID NO: 2160913 - RNA, 21 nt, Human
cugcugguuuuaacaacugug

SEQ ID NO: 2160914 - RNA, 15 nt, Human
cugcgagggcagcgg

SEQ ID NO: 2160915 - RNA, 13 nt, Human
cugccuccauccu

SEQ ID NO: 2160916 - RNA, 14 nt, Human
cugccuccauccua

SEQ ID NO: 2160917 - RNA, 19 nt, Human
gagaucccauccccuuguc

SEQ ID NO: 2160918 - RNA, 15 nt, Human
gagaugaagcaaaca

SEQ ID NO: 2160919 - RNA, 18 nt, Human
gagaugaagcaaacacau

SEQ ID NO: 2160920 - RNA, 20 nt, Human
gagaugaagcaaacacauua

SEQ ID NO: 2160921 - RNA, 13 nt, Human
gagcaacauuuua

SEQ ID NO: 2160922 - RNA, 15 nt, Human
gagcaagaggaggcc

SEQ ID NO: 2160923 - RNA, 20 nt, Human
gagcaaggguucccucaaga

SEQ ID NO: 2160924 - RNA, 15 nt, Human
gagagagaggcagaa

SEQ ID NO: 2160925 - RNA, 13 nt, Human
gagagagcuggag

SEQ ID NO: 2160926 - RNA, 15 nt, Human
gagagcaacauuuua

SEQ ID NO: 2160927 - RNA, 18 nt, Human
gagagccccucacacagc

SEQ ID NO: 2160928 - RNA, 19 nt, Human
gagacagcuugaucaaagg

SEQ ID NO: 2160929 - RNA, 19 nt, Human
gagacaggcagagcugcuc

SEQ ID NO: 2160930 - RNA, 16 nt, Human
gagacaggcagagcug

SEQ ID NO: 2160931 - RNA, 14 nt, Human
gagacaggcagagc

SEQ ID NO: 2160932 - RNA, 12 nt, Human
gagacaggcaga

SEQ ID NO: 2160933 - RNA, 16 nt, Human
gagaacuuuauuucca

SEQ ID NO: 2160934 - RNA, 19 nt, Human
gagaaagcgcagaugcuag

SEQ ID NO: 2160935 - RNA, 18 nt, Human
gacuugacagaacacugu

SEQ ID NO: 2160936 - RNA, 16 nt, Human
gacuugacagaacacu

SEQ ID NO: 2160937 - RNA, 17 nt, Human
gacuagagggaccucuc

SEQ ID NO: 2160938 - RNA, 19 nt, Human
gacuagagggaccucuccc

SEQ ID NO: 2160939 - RNA, 20 nt, Human
gacuagagggaccucuccca

SEQ ID NO: 2160940 - RNA, 23 nt, Human
gacuagagggaccucucccaggg

SEQ ID NO: 2160941 - RNA, 15 nt, Human
gacuagagcuuucuu

SEQ ID NO: 2160942 - RNA, 18 nt, Human
gacuagagcuuucuuuca

SEQ ID NO: 2160943 - RNA, 17 nt, Human
gaccuauaacugcccag

SEQ ID NO: 2160944 - RNA, 22 nt, Human
gacuccggcccuccuacccugc

SEQ ID NO: 2160945 - RNA, 15 nt, Human
gacuccggcccuccu

SEQ ID NO: 2160946 - RNA, 11 nt, Human
gacccuguaua

SEQ ID NO: 2160947 - RNA, 19 nt, Human
gacccuguauauagcccag

SEQ ID NO: 2160948 - RNA, 17 nt, Human
gacccuguauauagccc

SEQ ID NO: 2160949 - RNA, 12 nt, Human
gaccagccuggc

SEQ ID NO: 2160950 - RNA, 22 nt, Human
gaccagccuggccaacauggua

SEQ ID NO: 2160951 - RNA, 14 nt, Human
gacaugcacucagc

SEQ ID NO: 2160952 - RNA, 23 nt, Human
gacauccccccgccaaaagcugc

SEQ ID NO: 2160953 - RNA, 18 nt, Human
gacaguggcaggacagga

SEQ ID NO: 2160954 - RNA, 13 nt, Human
gacaguggcagga

SEQ ID NO: 2160955 - RNA, 15 nt, Human
gacaguggcaggaca

SEQ ID NO: 2160956 - RNA, 19 nt, Human
gacaacacugggaaacaga

SEQ ID NO: 2160957 - RNA, 15 nt, Human
gacaacuacagaaaa

SEQ ID NO: 2160958 - RNA, 16 nt, Human
gacaauggcagaugua

SEQ ID NO: 2160959 - RNA, 19 nt, Human
gacaaggagaagagcaagg

SEQ ID NO: 2160960 - RNA, 17 nt, Human
gaauggcacagcccaaa

SEQ ID NO: 2160961 - RNA, 22 nt, Human
gaauggcacagcccaaagaagg

SEQ ID NO: 2160962 - RNA, 13 nt, Human
gaauggcagcugc

SEQ ID NO: 2160963 - RNA, 16 nt, Human
gaauggcagcugccac

SEQ ID NO: 2160964 - RNA, 22 nt, Human
gaaugcagucuguccaggcucg

SEQ ID NO: 2160965 - RNA, 20 nt, Human
gaaugcagucuguccaggcu

SEQ ID NO: 2160966 - RNA, 18 nt, Human
gaaucucugaauuugaga

SEQ ID NO: 2160967 - RNA, 18 nt, Human
gaaucuagggagggggaa

SEQ ID NO: 2160968 - RNA, 14 nt, Human
gaauugcagaguac

SEQ ID NO: 2160969 - RNA, 22 nt, Human
gauugcguggaauugugcugag

SEQ ID NO: 2160970 - RNA, 20 nt, Human
gcaaaccacacuggacuccg

SEQ ID NO: 2160971 - RNA, 18 nt, Human
gcaaaccacacuggacuc

SEQ ID NO: 2160972 - RNA, 17 nt, Human
gcaaaccacacuggacu

SEQ ID NO: 2160973 - RNA, 15 nt, Human
gcaaaccacacugga

SEQ ID NO: 2160974 - RNA, 17 nt, Human
gcaaaggaguagaaaga

SEQ ID NO: 2160975 - RNA, 22 nt, Human
gcaaaccacacuggacuccggc

SEQ ID NO: 2160976 - RNA, 13 nt, Human
gaugguaauucuu

SEQ ID NO: 2160977 - RNA, 17 nt, Human
gaugugggucaaggaau

SEQ ID NO: 2160978 - RNA, 15 nt, Human
gaugccauuacauuu

SEQ ID NO: 2160979 - RNA, 20 nt, Human
gauggcccauucuacuugcu

SEQ ID NO: 2160980 - RNA, 19 nt, Human
gauggcccauucuacuugc

SEQ ID NO: 2160981 - RNA, 18 nt, Human
gauggcccauucuacuug

SEQ ID NO: 2160982 - RNA, 22 nt, Human
gauggcccauucuacuugcucu

SEQ ID NO: 2160983 - RNA, 21 nt, Human
gaugggugaaggcuggcauga

SEQ ID NO: 2160984 - RNA, 16 nt, Human
gaugggugaaggcugg

SEQ ID NO: 2160985 - RNA, 20 nt, Human
gcacacucauccccucacuu

SEQ ID NO: 2160986 - RNA, 19 nt, Human
gcacacgccucccacuggg

SEQ ID NO: 2160987 - RNA, 17 nt, Human
gcacacgccucccacug

SEQ ID NO: 2160988 - RNA, 14 nt, Human
gcacacgccuccca

SEQ ID NO: 2160989 - RNA, 14 nt, Human
gcacaaaguggcau

SEQ ID NO: 2160990 - RNA, 15 nt, Human
gcaauguuuauuuca

SEQ ID NO: 2160991 - RNA, 16 nt, Human
gcaauuccugcuccua

SEQ ID NO: 2160992 - RNA, 23 nt, Human
gcaauuucaaauuacucuuucuc

SEQ ID NO: 2160993 - RNA, 13 nt, Human
gcacaaaguggca

SEQ ID NO: 2160994 - RNA, 16 nt, Human
gcacaaagggcccaga

SEQ ID NO: 2160995 - RNA, 23 nt, Human
gcacaaagaugggugaaggcugg

SEQ ID NO: 2160996 - RNA, 18 nt, Human
gcacuguggauuauuuca

SEQ ID NO: 2160997 - RNA, 15 nt, Human
gaguaaucugagaaa

SEQ ID NO: 2160998 - RNA, 20 nt, Human
gaguagaaagacagagcugg

SEQ ID NO: 2160999 - RNA, 17 nt, Human
gaguagaaagacagagc

SEQ ID NO: 2161000 - RNA, 22 nt, Human
gaguagaaagacagagcuggga

SEQ ID NO: 2161001 - RNA, 17 nt, Human
gagucuguuuuguaaag

SEQ ID NO: 2161002 - RNA, 16 nt, Human
gagucuguuuuguaaa

SEQ ID NO: 2161003 - RNA, 13 nt, Human
gaguccucugaau

SEQ ID NO: 2161004 - RNA, 17 nt, Human
gaguccuagagcuacag

SEQ ID NO: 2161005 - RNA, 15 nt, Human
gaguguacucccagg

SEQ ID NO: 2161006 - RNA, 23 nt, Human
gaguugacuugacagaacacugu

SEQ ID NO: 2161007 - RNA, 23 nt, Human
gauagcuucaccccaaucccagc

SEQ ID NO: 2161008 - RNA, 21 nt, Human
gaggggucgacuucgggcugg

SEQ ID NO: 2161009 - RNA, 23 nt, Human
gagggcagcgggagccucccugc

SEQ ID NO: 2161010 - RNA, 18 nt, Human
gagggcagcgggagccuc

SEQ ID NO: 2161011 - RNA, 16 nt, Human
gagggcagcgggagcc

SEQ ID NO: 2161012 - RNA, 22 nt, Human
gagggagcaaguccuucccuuu

SEQ ID NO: 2161013 - RNA, 23 nt, Human
gagggagcuccaacucagaaggg

SEQ ID NO: 2161014 - RNA, 15 nt, Human
gagguagaaugacuc

SEQ ID NO: 2161015 - RNA, 19 nt, Human
gagguagaaugacuccuug

SEQ ID NO: 2161016 - RNA, 22 nt, Human
gagguauucaauauccuuugcc

SEQ ID NO: 2161017 - RNA, 15 nt, Human
gagggugagugcaag

SEQ ID NO: 2161018 - RNA, 15 nt, Human
gagggucagccaggg

SEQ ID NO: 2161019 - RNA, 14 nt, Human
gagggucagccagg

SEQ ID NO: 2161020 - RNA, 18 nt, Human
gagggucagccagggccu

SEQ ID NO: 2161021 - RNA, 16 nt, Human
gagggucagccagggc

SEQ ID NO: 2161022 - RNA, 18 nt, Human
gaggcaagguuauaugca

SEQ ID NO: 2161023 - RNA, 16 nt, Human
gaggccagugagccac

SEQ ID NO: 2161024 - RNA, 18 nt, Human
gaggccguugauucacuu

SEQ ID NO: 2161025 - RNA, 14 nt, Human
gaggccuuuaacca

SEQ ID NO: 2161026 - RNA, 18 nt, Human
gaggccucuggaaagcaa

SEQ ID NO: 2161027 - RNA, 13 nt, Human
ggaugcagcauua

SEQ ID NO: 2161028 - RNA, 21 nt, Human
ggcaauauagcaagaucccau

SEQ ID NO: 2161029 - RNA, 14 nt, Human
ggcacccacccugg

SEQ ID NO: 2161030 - RNA, 13 nt, Human
ggcacccacccug

SEQ ID NO: 2161031 - RNA, 11 nt, Human
ggcaugcuaaa

SEQ ID NO: 2161032 - RNA, 17 nt, Human
ggcaugcuaaagccuuc

SEQ ID NO: 2161033 - RNA, 13 nt, Human
ggcagcuucuuug

SEQ ID NO: 2161034 - RNA, 21 nt, Human
ggcagcguacucaucaucaac

SEQ ID NO: 2161035 - RNA, 22 nt, Human
ggccauguugugccucccuggu

SEQ ID NO: 2161036 - RNA, 16 nt, Human
ggccauguugugccuc

SEQ ID NO: 2161037 - RNA, 21 nt, Human
ggccauguugugccucccugg

SEQ ID NO: 2161038 - RNA, 18 nt, Human
ggcaugggaaggugggcg

SEQ ID NO: 2161039 - RNA, 13 nt, Human
ggcccuggccuug

SEQ ID NO: 2161040 - RNA, 21 nt, Human
ggccucuggaaagcaaagggc

SEQ ID NO: 2161041 - RNA, 23 nt, Human
ggcggagcuggccccgccgccug

SEQ ID NO: 2161042 - RNA, 20 nt, Human
ggcggagcuggccccgccgc

SEQ ID NO: 2161043 - RNA, 17 nt, Human
ggcggagcuggccccgc

SEQ ID NO: 2161044 - RNA, 15 nt, Human
ggcggagcuggcccc

SEQ ID NO: 2161045 - RNA, 14 nt, Human
ggcggagcuggccc

SEQ ID NO: 2161046 - RNA, 13 nt, Human
ggcggagcuggcc

SEQ ID NO: 2161047 - RNA, 22 nt, Human
ggcgccgcaaaccacacuggac

SEQ ID NO: 2161048 - RNA, 20 nt, Human
ggcgccgcaaaccacacugg

SEQ ID NO: 2161049 - RNA, 13 nt, Human
ggccugaagaguc

SEQ ID NO: 2161050 - RNA, 19 nt, Human
ggccugaagaguccucuga

SEQ ID NO: 2161051 - RNA, 23 nt, Human
ggccugaagaguccucugaauga

SEQ ID NO: 2161052 - RNA, 16 nt, Human
ggcucacaccuguaau

SEQ ID NO: 2161053 - RNA, 15 nt, Human
ggaauggcacagccc

SEQ ID NO: 2161054 - RNA, 20 nt, Human
ggaauucaucucucuuuaau

SEQ ID NO: 2161055 - RNA, 20 nt, Human
ggaauuuucuccaauuuuuu

SEQ ID NO: 2161056 - RNA, 16 nt, Human
ggaaggggacccccgc

SEQ ID NO: 2161057 - RNA, 19 nt, Human
ggaaggugggcgggcaggg

SEQ ID NO: 2161058 - RNA, 22 nt, Human
ggaaggggacccccgcccccug

SEQ ID NO: 2161059 - RNA, 17 nt, Human
ggaaggggacccccgcc

SEQ ID NO: 2161060 - RNA, 17 nt, Human
ggaccaaggagaugaag

SEQ ID NO: 2161061 - RNA, 19 nt, Human
ggagaugaagcaaacacau

SEQ ID NO: 2161062 - RNA, 14 nt, Human
ggaaaagcagcucu

SEQ ID NO: 2161063 - RNA, 18 nt, Human
ggaaaagcagcucucccc

SEQ ID NO: 2161064 - RNA, 19 nt, Human
ggaaaagcggacaucagcu

SEQ ID NO: 2161065 - RNA, 20 nt, Human
ggaaaaggcagggagcgagg

SEQ ID NO: 2161066 - RNA, 20 nt, Human
gcuuuagaaagguuuugagc

SEQ ID NO: 2161067 - RNA, 21 nt, Human
ggaaaggggcaggccagagcu

SEQ ID NO: 2161068 - RNA, 14 nt, Human
ggaaccaggcuugg

SEQ ID NO: 2161069 - RNA, 21 nt, Human
gcuguccucagguggccaugc

SEQ ID NO: 2161070 - RNA, 22 nt, Human
gcuucucauccugcaggcagcu

SEQ ID NO: 2161071 - RNA, 15 nt, Human
gccucaggccucugu

SEQ ID NO: 2161072 - RNA, 13 nt, Human
gccucccacagac

SEQ ID NO: 2161073 - RNA, 12 nt, Human
gccucccacugg

SEQ ID NO: 2161074 - RNA, 15 nt, Human
gccugauaagcuuca

SEQ ID NO: 2161075 - RNA, 20 nt, Human
gccugauaagcuucaaagcu

SEQ ID NO: 2161076 - RNA, 20 nt, Human
gccugggugacagagcaaga

SEQ ID NO: 2161077 - RNA, 22 nt, Human
gccugggugacagagcaagacu

SEQ ID NO: 2161078 - RNA, 20 nt, Human
gccuggcagcucagcuuccc

SEQ ID NO: 2161079 - RNA, 13 nt, Human
gccuggcagcuca

SEQ ID NO: 2161080 - RNA, 13 nt, Human
gcagacgcccaga

SEQ ID NO: 2161081 - RNA, 17 nt, Human
gcccugggaucacugug

SEQ ID NO: 2161082 - RNA, 20 nt, Human
gcccuggccuugggcccucu

SEQ ID NO: 2161083 - RNA, 16 nt, Human
gcgucauuacagggca

SEQ ID NO: 2161084 - RNA, 23 nt, Human
gcgucauuacagggcacaggcca

SEQ ID NO: 2161085 - RNA, 22 nt, Human
gcgucauuacagggcacaggcc

SEQ ID NO: 2161086 - RNA, 15 nt, Human
gcgugaucaaagcca

SEQ ID NO: 2161087 - RNA, 19 nt, Human
gcgugaucaaagccacacu

SEQ ID NO: 2161088 - RNA, 16 nt, Human
gcuaaagcccagagac

SEQ ID NO: 2161089 - RNA, 14 nt, Human
gcuaaagccuuccu

SEQ ID NO: 2161090 - RNA, 16 nt, Human
gcuaacaccagacaga

SEQ ID NO: 2161091 - RNA, 22 nt, Human
gcuacccgcagaguucucagaa

SEQ ID NO: 2161092 - RNA, 16 nt, Human
gcuacccgcagaguuc

SEQ ID NO: 2161093 - RNA, 18 nt, Human
gcuagccagaggacugug

SEQ ID NO: 2161094 - RNA, 15 nt, Human
gcuagccagaggacu

SEQ ID NO: 2161095 - RNA, 13 nt, Human
gcuagccagagga

SEQ ID NO: 2161096 - RNA, 12 nt, Human
gcuagccagagg

SEQ ID NO: 2161097 - RNA, 22 nt, Human
gcuccaaaccuucacacacaga

SEQ ID NO: 2161098 - RNA, 21 nt, Human
gcuccaaaccuucacacacag

SEQ ID NO: 2161099 - RNA, 15 nt, Human
gcuccaaaccuucac

SEQ ID NO: 2161100 - RNA, 14 nt, Human
gcuccaaaccuuca

SEQ ID NO: 2161101 - RNA, 17 nt, Human
gcugacucacaccugaa

SEQ ID NO: 2161102 - RNA, 22 nt, Human
gcucuggaccugcccccgcauc

SEQ ID NO: 2161103 - RNA, 17 nt, Human
gcucuggaccugccccc

SEQ ID NO: 2161104 - RNA, 15 nt, Human
gcucuggaccugccc

SEQ ID NO: 2161105 - RNA, 14 nt, Human
gcucuggaccugcc

SEQ ID NO: 2161106 - RNA, 13 nt, Human
gcucuggaccugc

SEQ ID NO: 2161107 - RNA, 12 nt, Human
gcucuggaccug

SEQ ID NO: 2161108 - RNA, 11 nt, Human
gcucuggaccu

SEQ ID NO: 2161109 - RNA, 20 nt, Human
gcucuuccgaaaaccaggcc

SEQ ID NO: 2161110 - RNA, 22 nt, Human
gcugagugaaaaaucuguggaa

SEQ ID NO: 2161111 - RNA, 13 nt, Human
gcugaguuggugu

SEQ ID NO: 2161112 - RNA, 21 nt, Human
gcugaguuguugagucuguuu

SEQ ID NO: 2161113 - RNA, 18 nt, Human
gcugaguuguugagucug

SEQ ID NO: 2161114 - RNA, 13 nt, Human
gcugaugacucaa

SEQ ID NO: 2161115 - RNA, 22 nt, Human
gcugaugacucaagauucccag

SEQ ID NO: 2161116 - RNA, 23 nt, Human
gcugaugacucaagauucccagg

SEQ ID NO: 2161117 - RNA, 22 nt, Human
gcugcaucccccccaccucucc

SEQ ID NO: 2161118 - RNA, 21 nt, Human
guagaaagacagagcugggau

SEQ ID NO: 2161119 - RNA, 18 nt, Human
guagaaagacagagcugg

SEQ ID NO: 2161120 - RNA, 10 nt, Human
guacuuugug

SEQ ID NO: 2161121 - RNA, 12 nt, Human
guacuacaauuu

SEQ ID NO: 2161122 - RNA, 15 nt, Human
guacuacaauuuaaa

SEQ ID NO: 2161123 - RNA, 21 nt, Human
guaccuucagaauaagcuucc

SEQ ID NO: 2161124 - RNA, 14 nt, Human
guacaguuuuauuu

SEQ ID NO: 2161125 - RNA, 18 nt, Human
guacaggaugcuuugguu

SEQ ID NO: 2161126 - RNA, 19 nt, Human
guaaucugagaaacaauga

SEQ ID NO: 2161127 - RNA, 17 nt, Human
guaaucugagaaacaau

SEQ ID NO: 2161128 - RNA, 14 nt, Human
guaaucugagaaac

SEQ ID NO: 2161129 - RNA, 17 nt, Human
guaauucuuauucuuuc

SEQ ID NO: 2161130 - RNA, 15 nt, Human
guaauucuuauucuu

SEQ ID NO: 2161131 - RNA, 19 nt, Human
guaaaagaaagaaagaaaa

SEQ ID NO: 2161132 - RNA, 12 nt, Human
guaaaaauacaa

SEQ ID NO: 2161133 - RNA, 17 nt, Human
gguuuacagucuauuug

SEQ ID NO: 2161134 - RNA, 10 nt, Human
gguuuuccug

SEQ ID NO: 2161135 - RNA, 15 nt, Human
gguuuucuguuacuu

SEQ ID NO: 2161136 - RNA, 15 nt, Human
guaaauaaagcccug

SEQ ID NO: 2161137 - RNA, 14 nt, Human
guaaauaaagcccu

SEQ ID NO: 2161138 - RNA, 13 nt, Human
guaaauaaagccc

SEQ ID NO: 2161139 - RNA, 18 nt, Human
guaaaguccccagagaaa

SEQ ID NO: 2161140 - RNA, 16 nt, Human
guaaaguccccagaga

SEQ ID NO: 2161141 - RNA, 23 nt, Human
guaaaguccccagagaaagcgca

SEQ ID NO: 2161142 - RNA, 13 nt, Human
ggugaaggcuggc

SEQ ID NO: 2161143 - RNA, 19 nt, Human
ggucagccagggccugcga

SEQ ID NO: 2161144 - RNA, 13 nt, Human
ggucagccagggc

SEQ ID NO: 2161145 - RNA, 22 nt, Human
gguagaccugucuccuggcggu

SEQ ID NO: 2161146 - RNA, 19 nt, Human
gguagaccugucuccuggc

SEQ ID NO: 2161147 - RNA, 14 nt, Human
gguagaccugucuc

SEQ ID NO: 2161148 - RNA, 20 nt, Human
ggggagggugacaguggccg

SEQ ID NO: 2161149 - RNA, 18 nt, Human
gggcuuacggcccuggcc

SEQ ID NO: 2161150 - RNA, 16 nt, Human
gggcuuacggcccugg

SEQ ID NO: 2161151 - RNA, 18 nt, Human
gggcgaucgcggcggagc

SEQ ID NO: 2161152 - RNA, 22 nt, Human
gggcgaucgcggcggagcuggc

SEQ ID NO: 2161153 - RNA, 22 nt, Human
gggcgccgcaaaccacacugga

SEQ ID NO: 2161154 - RNA, 16 nt, Human
gggccuggcagcucag

SEQ ID NO: 2161155 - RNA, 13 nt, Human
gucagccagggcc

SEQ ID NO: 2161156 - RNA, 10 nt, Human
gucagccagg

SEQ ID NO: 2161157 - RNA, 16 nt, Human
gucagccagggccugc

SEQ ID NO: 2161158 - RNA, 14 nt, Human
gucagccagggccu

SEQ ID NO: 2161159 - RNA, 19 nt, Human
gucauagauguuuccuugc

SEQ ID NO: 2161160 - RNA, 21 nt, Human
guccagggagcauuuuccucc

SEQ ID NO: 2161161 - RNA, 17 nt, Human
guccaggauuccucuuu

SEQ ID NO: 2161162 - RNA, 20 nt, Human
guccagaaggagacaggcag

SEQ ID NO: 2161163 - RNA, 19 nt, Human
guccagaaggagacaggca

SEQ ID NO: 2161164 - RNA, 17 nt, Human
guccagaaggagacagg

SEQ ID NO: 2161165 - RNA, 16 nt, Human
guccagaaggagacag

SEQ ID NO: 2161166 - RNA, 14 nt, Human
guccagaaggagac

SEQ ID NO: 2161167 - RNA, 11 nt, Human
guccagaagga

SEQ ID NO: 2161168 - RNA, 14 nt, Human
guauuuguuaaugg

SEQ ID NO: 2161169 - RNA, 15 nt, Human
gucaauguacuagga

SEQ ID NO: 2161170 - RNA, 21 nt, Human
guauuagaguuucaaccauga

SEQ ID NO: 2161171 - RNA, 18 nt, Human
guauucaauauccuuugc

SEQ ID NO: 2161172 - RNA, 23 nt, Human
gucugaguggcuucacuccugcu

SEQ ID NO: 2161173 - RNA, 15 nt, Human
gucugaguggcuuca

SEQ ID NO: 2161174 - RNA, 15 nt, Human
guccucagguggcca

SEQ ID NO: 2161175 - RNA, 14 nt, Human
guccucagguggcc

SEQ ID NO: 2161176 - RNA, 14 nt, Human
guccuccaagccag

SEQ ID NO: 2161177 - RNA, 23 nt, Human
guccucagguggccaugccucag

SEQ ID NO: 2161178 - RNA, 17 nt, Human
guccucagguggccaug

SEQ ID NO: 2161179 - RNA, 16 nt, Human
guccucagguggccau

SEQ ID NO: 2161180 - RNA, 15 nt, Human
guccucccagcuccu

SEQ ID NO: 2161181 - RNA, 22 nt, Human
gugcaugaagguuucugaaaau

SEQ ID NO: 2161182 - RNA, 22 nt, Human
gugcagguagaccugucuccug

SEQ ID NO: 2161183 - RNA, 17 nt, Human
gugcagggacaaagagg

SEQ ID NO: 2161184 - RNA, 15 nt, Human
gugcagguagaccug

SEQ ID NO: 2161185 - RNA, 21 nt, Human
gugcagguagaccugucuccu

SEQ ID NO: 2161186 - RNA, 23 nt, Human
gugaaauucccaacaaacauuga

SEQ ID NO: 2161187 - RNA, 12 nt, Human
gugaaauuccca

SEQ ID NO: 2161188 - RNA, 20 nt, Human
gugaaagcaucacuugggau

SEQ ID NO: 2161189 - RNA, 24 nt, Human
gugaaacccagucacugugagcuc

SEQ ID NO: 2161190 - RNA, 22 nt, Human
gugagcucccaggugcagccag

SEQ ID NO: 2161191 - RNA, 23 nt, Human
guggaggagcucaggacacuaau

SEQ ID NO: 2161192 - RNA, 20 nt, Human
guggaggagcucaggacacu

SEQ ID NO: 2161193 - RNA, 16 nt, Human
guggaggagcucagga

SEQ ID NO: 2161194 - RNA, 15 nt, Human
guggagucauucuca

SEQ ID NO: 2161195 - RNA, 13 nt, Human
gugcuuuauauuu

SEQ ID NO: 2161196 - RNA, 18 nt, Human
guggaaaugcgcaugagu

SEQ ID NO: 2161197 - RNA, 16 nt, Human
gugcuucaacauucuu

SEQ ID NO: 2161198 - RNA, 23 nt, Human
gugcugaguugguguugacaugu

SEQ ID NO: 2161199 - RNA, 13 nt, Human
uaucuaauuuaua

SEQ ID NO: 2161200 - RNA, 15 nt, Human
uaugagacacaggau

SEQ ID NO: 2161201 - RNA, 16 nt, Human
uaugaccuucuaggaa

SEQ ID NO: 2161202 - RNA, 18 nt, Human
uaugaccuucuaggaagc

SEQ ID NO: 2161203 - RNA, 13 nt, Human
uaugcuucuuuca

SEQ ID NO: 2161204 - RNA, 20 nt, Human
uauauguauuuaaaaaaauc

SEQ ID NO: 2161205 - RNA, 13 nt, Human
uauacuggcaugc

SEQ ID NO: 2161206 - RNA, 23 nt, Human
uauacuggcaugcuaaagccuuc

SEQ ID NO: 2161207 - RNA, 15 nt, Human
uauaauauauuugug

SEQ ID NO: 2161208 - RNA, 22 nt, Human
uauaauauuuuuaauuaaauaa

SEQ ID NO: 2161209 - RNA, 22 nt, Human
uauaauauauuuguguauuuaa

SEQ ID NO: 2161210 - RNA, 16 nt, Human
uauaauauauuugugu

SEQ ID NO: 2161211 - RNA, 15 nt, Human
uauaauacuguauuu

SEQ ID NO: 2161212 - RNA, 16 nt, Human
uaggacccaagcagag

SEQ ID NO: 2161213 - RNA, 14 nt, Human
uaggacccaagcag

SEQ ID NO: 2161214 - RNA, 20 nt, Human
uaggcucauuuacuguuuua

SEQ ID NO: 2161215 - RNA, 17 nt, Human
uaggcucauuuacuguu

SEQ ID NO: 2161216 - RNA, 16 nt, Human
uaggcucauuuacugu

SEQ ID NO: 2161217 - RNA, 20 nt, Human
uaggucuagccuauguggau

SEQ ID NO: 2161218 - RNA, 20 nt, Human
uaguaggugaguuuucaccu

SEQ ID NO: 2161219 - RNA, 16 nt, Human
uauguucagaagaaau

SEQ ID NO: 2161220 - RNA, 16 nt, Human
uauucauuuuuguuau

SEQ ID NO: 2161221 - RNA, 13 nt, Human
uauuuaucuucau

SEQ ID NO: 2161222 - RNA, 23 nt, Human
ucaccacucaaaggccagaccug

SEQ ID NO: 2161223 - RNA, 22 nt, Human
ucaccacucaaaggccagaccu

SEQ ID NO: 2161224 - RNA, 20 nt, Human
ucaccacucaaaggccagac

SEQ ID NO: 2161225 - RNA, 22 nt, Human
ucacaccaggcuugccugcagg

SEQ ID NO: 2161226 - RNA, 21 nt, Human
ucacaccaggcuugccugcag

SEQ ID NO: 2161227 - RNA, 23 nt, Human
ucacaccaggcuugccugcaggc

SEQ ID NO: 2161228 - RNA, 20 nt, Human
ucacaagggacgcuuuggga

SEQ ID NO: 2161229 - RNA, 18 nt, Human
ucacaagggacgcuuugg

SEQ ID NO: 2161230 - RNA, 22 nt, Human
ucacacacagacuguugucccu

SEQ ID NO: 2161231 - RNA, 19 nt, Human
ucacacacagacuguuguc

SEQ ID NO: 2161232 - RNA, 23 nt, Human
ucaauuccaacacugauuucccc

SEQ ID NO: 2161233 - RNA, 19 nt, Human
ucaauaaaaaaaagaaaug

SEQ ID NO: 2161234 - RNA, 22 nt, Human
ucaauaaaaaaaagaaaugaaa

SEQ ID NO: 2161235 - RNA, 14 nt, Human
ucaauguuuuuaaa

SEQ ID NO: 2161236 - RNA, 18 nt, Human
ucaauguuuuuaaaaauc

SEQ ID NO: 2161237 - RNA, 22 nt, Human
ucaaacuuccagugcaacacug

SEQ ID NO: 2161238 - RNA, 18 nt, Human
uauuugcacuaagauauu

SEQ ID NO: 2161239 - RNA, 14 nt, Human
uauuugcaauuccu

SEQ ID NO: 2161240 - RNA, 16 nt, Human
ucggcagauacugucu

SEQ ID NO: 2161241 - RNA, 13 nt, Human
ucuacuugcucug

SEQ ID NO: 2161242 - RNA, 16 nt, Human
ucuacuugcucuggac

SEQ ID NO: 2161243 - RNA, 15 nt, Human
ucuacuugcucugga

SEQ ID NO: 2161244 - RNA, 14 nt, Human
ucuacuugcucugg

SEQ ID NO: 2161245 - RNA, 23 nt, Human
ucuacaaucucccuucacaaguu

SEQ ID NO: 2161246 - RNA, 16 nt, Human
ucuacacauacaugua

SEQ ID NO: 2161247 - RNA, 17 nt, Human
ucuacuugcucuggacc

SEQ ID NO: 2161248 - RNA, 18 nt, Human
ucuacuugcucuggaccu

SEQ ID NO: 2161249 - RNA, 18 nt, Human
ucuccccucagagugcaa

SEQ ID NO: 2161250 - RNA, 13 nt, Human
ucuccccucagag

SEQ ID NO: 2161251 - RNA, 15 nt, Human
ucucaugauuuacag

SEQ ID NO: 2161252 - RNA, 19 nt, Human
ucucaucgccagacaacug

SEQ ID NO: 2161253 - RNA, 15 nt, Human
ucucauccugcaggc

SEQ ID NO: 2161254 - RNA, 13 nt, Human
ucucauccugcag

SEQ ID NO: 2161255 - RNA, 17 nt, Human
uccuccaucgcaguguu

SEQ ID NO: 2161256 - RNA, 12 nt, Human
uccuccaagcca

SEQ ID NO: 2161257 - RNA, 14 nt, Human
uccuccaagccagc

SEQ ID NO: 2161258 - RNA, 21 nt, Human
uccuaguuaaucaucauuuuu

SEQ ID NO: 2161259 - RNA, 15 nt, Human
uccuacccugcgccc

SEQ ID NO: 2161260 - RNA, 23 nt, Human
uccugacugucucccgggacuac

SEQ ID NO: 2161261 - RNA, 23 nt, Human
uccugagccagugucaggaggaa

SEQ ID NO: 2161262 - RNA, 20 nt, Human
uccacuuuuuuuuguauguu

SEQ ID NO: 2161263 - RNA, 16 nt, Human
ucaggucaggaguucg

SEQ ID NO: 2161264 - RNA, 19 nt, Human
ucagcucuuggcuccacug

SEQ ID NO: 2161265 - RNA, 12 nt, Human
ucaggacacuaa

SEQ ID NO: 2161266 - RNA, 11 nt, Human
ucaggccucug

SEQ ID NO: 2161267 - RNA, 15 nt, Human
ucauagauguuuccu

SEQ ID NO: 2161268 - RNA, 23 nt, Human
uccaaaccuucacacacagacug

SEQ ID NO: 2161269 - RNA, 22 nt, Human
uccaaaccuucacacacagacu

SEQ ID NO: 2161270 - RNA, 18 nt, Human
uccaaaccuucacacaca

SEQ ID NO: 2161271 - RNA, 14 nt, Human
uccaaaccuucaca

SEQ ID NO: 2161272 - RNA, 13 nt, Human
uccaaaccuucac

SEQ ID NO: 2161273 - RNA, 11 nt, Human
ucauuuacugu

SEQ ID NO: 2161274 - RNA, 15 nt, Human
ucauuuacuguuuua

SEQ ID NO: 2161275 - RNA, 17 nt, Human
ucuugcauauuuuguaa

SEQ ID NO: 2161276 - RNA, 14 nt, Human
ucuuucaugaguuu

SEQ ID NO: 2161277 - RNA, 12 nt, Human
ucuuucaugagu

SEQ ID NO: 2161278 - RNA, 21 nt, Human
ucuuugccaagaccuuucaaa

SEQ ID NO: 2161279 - RNA, 15 nt, Human
ucuuugauccuucuc

SEQ ID NO: 2161280 - RNA, 12 nt, Human
ucuuucuuugga

SEQ ID NO: 2161281 - RNA, 22 nt, Human
ugaacaguuuaucgaccaguuu

SEQ ID NO: 2161282 - RNA, 23 nt, Human
ugaacaagcaaacccagacggcu

SEQ ID NO: 2161283 - RNA, 16 nt, Human
ugaaauauuuuacagu

SEQ ID NO: 2161284 - RNA, 17 nt, Human
ugaaagccccagaaauc

SEQ ID NO: 2161285 - RNA, 16 nt, Human
ugaaagccccagaaau

SEQ ID NO: 2161286 - RNA, 15 nt, Human
ugaaagccccagaaa

SEQ ID NO: 2161287 - RNA, 11 nt, Human
ugaaacccagu

SEQ ID NO: 2161288 - RNA, 20 nt, Human
ugaaacccagucacugugag

SEQ ID NO: 2161289 - RNA, 21 nt, Human
ugacagaacacugucuugaag

SEQ ID NO: 2161290 - RNA, 17 nt, Human
ugacagaacacugucuu

SEQ ID NO: 2161291 - RNA, 16 nt, Human
ugacagaacacugucu

SEQ ID NO: 2161292 - RNA, 15 nt, Human
ugacagaacacuguc

SEQ ID NO: 2161293 - RNA, 14 nt, Human
ugacagaacacugu

SEQ ID NO: 2161294 - RNA, 13 nt, Human
ugacagaacacug

SEQ ID NO: 2161295 - RNA, 20 nt, Human
ugacccuguauauagcccag

SEQ ID NO: 2161296 - RNA, 19 nt, Human
ugacccuguauauagccca

SEQ ID NO: 2161297 - RNA, 18 nt, Human
ugacccuguauauagccc

SEQ ID NO: 2161298 - RNA, 17 nt, Human
ugacccuguauauagcc

SEQ ID NO: 2161299 - RNA, 18 nt, Human
ugaauugagcugcagaaa

SEQ ID NO: 2161300 - RNA, 13 nt, Human
ugaaucuuugugc

SEQ ID NO: 2161301 - RNA, 20 nt, Human
ugauucacuucacgcuuuca

SEQ ID NO: 2161302 - RNA, 18 nt, Human
ugaugugggucaaggaau

SEQ ID NO: 2161303 - RNA, 14 nt, Human
ugaugcccugcccu

SEQ ID NO: 2161304 - RNA, 14 nt, Human
ugaucuucaacaaa

SEQ ID NO: 2161305 - RNA, 21 nt, Human
ugaucuucaacaaauugcccu

SEQ ID NO: 2161306 - RNA, 15 nt, Human
ugaucuucaacaaau

SEQ ID NO: 2161307 - RNA, 22 nt, Human
ugaucuucaacaaauugcccuu

SEQ ID NO: 2161308 - RNA, 19 nt, Human
ugaucugugaauugagcug

SEQ ID NO: 2161309 - RNA, 12 nt, Human
ugaucaggaccu

SEQ ID NO: 2161310 - RNA, 20 nt, Human
ugaucaggaccuccaagcca

SEQ ID NO: 2161311 - RNA, 18 nt, Human
ugauccaagcaagacuga

SEQ ID NO: 2161312 - RNA, 17 nt, Human
ugagucgcgcaccgaaa

SEQ ID NO: 2161313 - RNA, 17 nt, Human
ugagucuguuuuguaaa

SEQ ID NO: 2161314 - RNA, 16 nt, Human
ugagucuguuuuguaa

SEQ ID NO: 2161315 - RNA, 18 nt, Human
ugagucuguuuuguaaag

SEQ ID NO: 2161316 - RNA, 23 nt, Human
ugaguuuucaccucgaauuuugu

SEQ ID NO: 2161317 - RNA, 23 nt, Human
ugaguugacuugacagaacacug

SEQ ID NO: 2161318 - RNA, 14 nt, Human
ugagggagauccca

SEQ ID NO: 2161319 - RNA, 18 nt, Human
ugcuguaaauuuggcuuc

SEQ ID NO: 2161320 - RNA, 20 nt, Human
ugcuguaaauuuggcuucug

SEQ ID NO: 2161321 - RNA, 19 nt, Human
ugcuguaaauuuggcuucu

SEQ ID NO: 2161322 - RNA, 15 nt, Human
ugcugguuuuaacaa

SEQ ID NO: 2161323 - RNA, 16 nt, Human
ugcugguuuuaacaac

SEQ ID NO: 2161324 - RNA, 20 nt, Human
ugcuaacuagcuuggaaacu

SEQ ID NO: 2161325 - RNA, 22 nt, Human
ugcuaacuagcuuggaaacugg

SEQ ID NO: 2161326 - RNA, 19 nt, Human
ugcuacucaaguagcauuu

SEQ ID NO: 2161327 - RNA, 14 nt, Human
ugcucagaccagcu

SEQ ID NO: 2161328 - RNA, 19 nt, Human
ugcucagggaaaagcagcu

SEQ ID NO: 2161329 - RNA, 20 nt, Human
ugcuaggcccccggguguga

SEQ ID NO: 2161330 - RNA, 20 nt, Human
ugccguuacuuuucauauuu

SEQ ID NO: 2161331 - RNA, 22 nt, Human
ugccguuacuuuucauauuugc

SEQ ID NO: 2161332 - RNA, 15 nt, Human
ugcauuuguauauuu

SEQ ID NO: 2161333 - RNA, 15 nt, Human
ugcagggacaaagag

SEQ ID NO: 2161334 - RNA, 16 nt, Human
ugcagggacaaagagg

SEQ ID NO: 2161335 - RNA, 17 nt, Human
uggcccaggugaguccu

SEQ ID NO: 2161336 - RNA, 20 nt, Human
uggccccgccgccugguacu

SEQ ID NO: 2161337 - RNA, 15 nt, Human
uggccccgccgccug

SEQ ID NO: 2161338 - RNA, 13 nt, Human
uggccccgccgcc

SEQ ID NO: 2161339 - RNA, 21 nt, Human
uggccccgccgccugguacuc

SEQ ID NO: 2161340 - RNA, 18 nt, Human
uggccucccacagacuca

SEQ ID NO: 2161341 - RNA, 17 nt, Human
uggcaaggguucaccug

SEQ ID NO: 2161342 - RNA, 22 nt, Human
uggcagaauggggugcaugaag

SEQ ID NO: 2161343 - RNA, 22 nt, Human
uggaggagcucaggacacuaau

SEQ ID NO: 2161344 - RNA, 20 nt, Human
uggaggagcucaggacacua

SEQ ID NO: 2161345 - RNA, 17 nt, Human
uggacuccggcccuccu

SEQ ID NO: 2161346 - RNA, 19 nt, Human
uggacugaccugguccaca

SEQ ID NO: 2161347 - RNA, 17 nt, Human
uggacugaccuggucca

SEQ ID NO: 2161348 - RNA, 14 nt, Human
uggacuccggcccu

SEQ ID NO: 2161349 - RNA, 13 nt, Human
ugggucaaggaau

SEQ ID NO: 2161350 - RNA, 16 nt, Human
uggucaaacaaacucu

SEQ ID NO: 2161351 - RNA, 21 nt, Human
uggucaaacaaacucucugaa

SEQ ID NO: 2161352 - RNA, 22 nt, Human
uggucaaacaaacucucugaac

SEQ ID NO: 2161353 - RNA, 23 nt, Human
uggugcagguagaccugucuccu

SEQ ID NO: 2161354 - RNA, 21 nt, Human
uggugcagguagaccugucuc

SEQ ID NO: 2161355 - RNA, 15 nt, Human
uggggauauaauacu

SEQ ID NO: 2161356 - RNA, 13 nt, Human
ugggcccucuggu

SEQ ID NO: 2161357 - RNA, 14 nt, Human
ugggcccucugguu

SEQ ID NO: 2161358 - RNA, 16 nt, Human
ugggcccucugguuug

SEQ ID NO: 2161359 - RNA, 14 nt, Human
ugggauguuucugu

SEQ ID NO: 2161360 - RNA, 19 nt, Human
uuaaccccgucaacaaauc

SEQ ID NO: 2161361 - RNA, 18 nt, Human
uuaaccccgucaacaaau

SEQ ID NO: 2161362 - RNA, 17 nt, Human
uuaaccccgucaacaaa

SEQ ID NO: 2161363 - RNA, 19 nt, Human
uuaacuauuuuauuuucua

SEQ ID NO: 2161364 - RNA, 12 nt, Human
uuaacucaauau

SEQ ID NO: 2161365 - RNA, 20 nt, Human
uuacaagcccccccuuccac

SEQ ID NO: 2161366 - RNA, 19 nt, Human
uuacaagcccccccuucca

SEQ ID NO: 2161367 - RNA, 17 nt, Human
uuacaagcccccccuuc

SEQ ID NO: 2161368 - RNA, 17 nt, Human
uguuuguaagugaagug

SEQ ID NO: 2161369 - RNA, 14 nt, Human
uuaaaaguaaaugu

SEQ ID NO: 2161370 - RNA, 19 nt, Human
uuaaagaaguaugggaaau

SEQ ID NO: 2161371 - RNA, 10 nt, Human
uguuuuuaaa

SEQ ID NO: 2161372 - RNA, 19 nt, Human
uguuuuguaaaguccccag

SEQ ID NO: 2161373 - RNA, 17 nt, Human
uguuuugucuuacaaag

SEQ ID NO: 2161374 - RNA, 15 nt, Human
uuaggauggcaggac

SEQ ID NO: 2161375 - RNA, 18 nt, Human
uuagucucuaaagaguuu

SEQ ID NO: 2161376 - RNA, 20 nt, Human
uuagcugcuucuauguuuca

SEQ ID NO: 2161377 - RNA, 12 nt, Human
uuagcugcuucu

SEQ ID NO: 2161378 - RNA, 14 nt, Human
uuacugugucuuug

SEQ ID NO: 2161379 - RNA, 13 nt, Human
uuacugugucuuu

SEQ ID NO: 2161380 - RNA, 21 nt, Human
uuacuuuucauauuugcacua

SEQ ID NO: 2161381 - RNA, 16 nt, Human
uuacuuuucauauuug

SEQ ID NO: 2161382 - RNA, 16 nt, Human
uuccuuguagccuuuu

SEQ ID NO: 2161383 - RNA, 19 nt, Human
uuccuuguagccuuuugac

SEQ ID NO: 2161384 - RNA, 18 nt, Human
uuccuuguagccuuuuga

SEQ ID NO: 2161385 - RNA, 14 nt, Human
uucgggcuggccau

SEQ ID NO: 2161386 - RNA, 17 nt, Human
uucccugcuuaaugaaa

SEQ ID NO: 2161387 - RNA, 19 nt, Human
uucccuucgacagcauuuu

SEQ ID NO: 2161388 - RNA, 21 nt, Human
uuccucacaccaggcuugccu

SEQ ID NO: 2161389 - RNA, 21 nt, Human
uucccccaccccauuucucuc

SEQ ID NO: 2161390 - RNA, 23 nt, Human
uucccccaaauuuaaagaaguau

SEQ ID NO: 2161391 - RNA, 19 nt, Human
uucccauccucuucuuuua

SEQ ID NO: 2161392 - RNA, 13 nt, Human
uuccauucucacc

SEQ ID NO: 2161393 - RNA, 23 nt, Human
uuccaugugaggguuuucagcau

SEQ ID NO: 2161394 - RNA, 20 nt, Human
uuauugaaucuauuuaagua

SEQ ID NO: 2161395 - RNA, 18 nt, Human
uuauugaaucuauuuaag

SEQ ID NO: 2161396 - RNA, 12 nt, Human
uuaugcuuuugg

SEQ ID NO: 2161397 - RNA, 17 nt, Human
uuaugcauguuuguugu

SEQ ID NO: 2161398 - RNA, 15 nt, Human
uuaugccuuuuauuu

SEQ ID NO: 2161399 - RNA, 14 nt, Human
uucaaagccauuuu

SEQ ID NO: 2161400 - RNA, 13 nt, Human
uucaaagccauuu

SEQ ID NO: 2161401 - RNA, 12 nt, Human
uuauuuuaagac

SEQ ID NO: 2161402 - RNA, 14 nt, Human
uucacuccugcugu

SEQ ID NO: 2161403 - RNA, 19 nt, Human
uucaauuuccaagagcuga

SEQ ID NO: 2161404 - RNA, 17 nt, Human
uucaauuuccaagagcu

SEQ ID NO: 2161405 - RNA, 17 nt, Human
uucacaaacagaaaaca

SEQ ID NO: 2161406 - RNA, 14 nt, Human
uucacguagaacau

SEQ ID NO: 2161407 - RNA, 19 nt, Human
uuugaauauaaacacuaua

SEQ ID NO: 2161408 - RNA, 18 nt, Human
uuugaauauaaacacuau

SEQ ID NO: 2161409 - RNA, 17 nt, Human
uuugaauauaaacacua

SEQ ID NO: 2161410 - RNA, 15 nt, Human
uuugccaagaccuuu

SEQ ID NO: 2161411 - RNA, 16 nt, Human
uuuggacuguuuuguu

SEQ ID NO: 2161412 - RNA, 16 nt, Human
uuugcuucucucucua

SEQ ID NO: 2161413 - RNA, 17 nt, Human
uuuguaaaguccccaga

SEQ ID NO: 2161414 - RNA, 12 nt, Human
uuuguauguuuu

SEQ ID NO: 2161415 - RNA, 10 nt, Human
uuuguauguu

SEQ ID NO: 2161416 - RNA, 18 nt, Human
uuuguauguuuuuuuucu

SEQ ID NO: 2161417 - RNA, 22 nt, Human
uuucauuuuguaacaaaugaac

SEQ ID NO: 2161418 - RNA, 17 nt, Human
uuucagugaaagcauca

SEQ ID NO: 2161419 - RNA, 21 nt, Human
uuucauuuguuuguuuuccuu

SEQ ID NO: 2161420 - RNA, 21 nt, Human
uuucaaugguuugcaaggaag

SEQ ID NO: 2161421 - RNA, 20 nt, Human
uuuaugccuuuuauuucuua

SEQ ID NO: 2161422 - RNA, 14 nt, Human
uuucaauuuccaag

SEQ ID NO: 2161423 - RNA, 17 nt, Human
uuuccucugcuuugaaa

SEQ ID NO: 2161424 - RNA, 13 nt, Human
uuuccucugcuuu

SEQ ID NO: 2161425 - RNA, 16 nt, Human
uuucucuccucacaca

SEQ ID NO: 2161426 - RNA, 20 nt, Human
uuucugaaaauuaacacugc

SEQ ID NO: 2161427 - RNA, 19 nt, Human
uuucugaaaauuaacacug

SEQ ID NO: 2161428 - RNA, 16 nt, Human
uuucuccuuuguacuu

SEQ ID NO: 2161429 - RNA, 13 nt, Human
uuguucaaacauu

SEQ ID NO: 2161430 - RNA, 19 nt, Human
uuguuuauuaguuuugcau

SEQ ID NO: 2161431 - RNA, 12 nt, Human
uuguuucuguuu

SEQ ID NO: 2161432 - RNA, 13 nt, Human
uuguuuguuuucc

SEQ ID NO: 2161433 - RNA, 20 nt, Human
uuuaaaaguuacuccuuuua

SEQ ID NO: 2161434 - RNA, 13 nt, Human
uuuauacuguaua

SEQ ID NO: 2161435 - RNA, 17 nt, Human
uuuauacuggcaugcua

SEQ ID NO: 2161436 - RNA, 21 nt, Human
uuuaaccccgucaacaaaucu

SEQ ID NO: 2161437 - RNA, 18 nt, Human
uuuaaccccgucaacaaa

SEQ ID NO: 2161438 - RNA, 17 nt, Human
uuuaaccccgucaacaa

SEQ ID NO: 2161439 - RNA, 16 nt, Human
uuuaaccccgucaaca

SEQ ID NO: 2161440 - RNA, 21 nt, Human
uuuaaccauggugcuuguuaa

SEQ ID NO: 2161441 - RNA, 19 nt, Human
uuuacccacacacagauaa

SEQ ID NO: 2161442 - RNA, 12 nt, Human
uugcauaauaaa

SEQ ID NO: 2161443 - RNA, 13 nt, Human
uugcauaagguuu

SEQ ID NO: 2161444 - RNA, 18 nt, Human
uugauauuugugcauuuu

SEQ ID NO: 2161445 - RNA, 21 nt, Human
uugauauuugugcauuuucua

SEQ ID NO: 2161446 - RNA, 20 nt, Human
uugauauuugugcauuuucu

SEQ ID NO: 2161447 - RNA, 19 nt, Human
uugaauuaaauguucaucu

SEQ ID NO: 2161448 - RNA, 21 nt, Human
uucuguaucuacuuuaauaaa

SEQ ID NO: 2161449 - RNA, 17 nt, Human
uucuguaucuacuuuaa

SEQ ID NO: 2161450 - RNA, 15 nt, Human
uucuggccucccaca

SEQ ID NO: 2161451 - RNA, 14 nt, Human
uucuggccucccac

SEQ ID NO: 2161452 - RNA, 22 nt, Human
uucuuauaggaaagcuugagua

SEQ ID NO: 2161453 - RNA, 21 nt, Human
uucuuucccugcuuaaugaaa

SEQ ID NO: 2161454 - RNA, 17 nt, Human
uuguagcauccucuuua

SEQ ID NO: 2161455 - RNA, 21 nt, Human
uugggaaggggacccccgccc

SEQ ID NO: 2161456 - RNA, 13 nt, Human
uugggauuaauau

SEQ ID NO: 2161457 - RNA, 17 nt, Human
caauauugacuuugucu

SEQ ID NO: 2161458 - RNA, 16 nt, Human
caauauugacuuuguc

SEQ ID NO: 2161459 - RNA, 14 nt, Human
caauauugacuuug

SEQ ID NO: 2161460 - RNA, 13 nt, Human
caauauagcaaga

SEQ ID NO: 2161461 - RNA, 12 nt, Human
caauauagcaag

SEQ ID NO: 2161462 - RNA, 14 nt, Human
caaugacuaauucu

SEQ ID NO: 2161463 - RNA, 22 nt, Human
caauguacuaggauacugcugc

SEQ ID NO: 2161464 - RNA, 23 nt, Human
caauguagucagaauuagcugcu

SEQ ID NO: 2161465 - RNA, 21 nt, Human
caauguacuaggauacugcug

SEQ ID NO: 2161466 - RNA, 21 nt, Human
caaugacuaauucuugcauau

SEQ ID NO: 2161467 - RNA, 14 nt, Human
caauguuaacauuu

SEQ ID NO: 2161468 - RNA, 20 nt, Human
caacacugggaaacagaggc

SEQ ID NO: 2161469 - RNA, 23 nt, Human
caacacugauuuccccuuuugca

SEQ ID NO: 2161470 - RNA, 21 nt, Human
caacacugauuuccccuuuug

SEQ ID NO: 2161471 - RNA, 22 nt, Human
caagacucugucuaaaaaacaa

SEQ ID NO: 2161472 - RNA, 23 nt, Human
caagacucugucuaaaaaacaaa

SEQ ID NO: 2161473 - RNA, 20 nt, Human
caaggagggugagugcaagg

SEQ ID NO: 2161474 - RNA, 19 nt, Human
caaggagggugagugcaag

SEQ ID NO: 2161475 - RNA, 22 nt, Human
caagccagcgggaauggcagcu

SEQ ID NO: 2161476 - RNA, 22 nt, Human
caaagggggaggcuaaagccca

SEQ ID NO: 2161477 - RNA, 23 nt, Human
caaauacucauuuuaggaaaaaa

SEQ ID NO: 2161478 - RNA, 22 nt, Human
caaacuaggggacaaagcaaaa

SEQ ID NO: 2161479 - RNA, 20 nt, Human
caaacuaggggacaaagcaa

SEQ ID NO: 2161480 - RNA, 21 nt, Human
caaaggccagaccugcagacg

SEQ ID NO: 2161481 - RNA, 20 nt, Human
caaaggccagaccugcagac

SEQ ID NO: 2161482 - RNA, 19 nt, Human
caaaggccagaccugcaga

SEQ ID NO: 2161483 - RNA, 18 nt, Human
caaaggccagaccugcag

SEQ ID NO: 2161484 - RNA, 22 nt, Human
caaaggccagaccugcagacgc

SEQ ID NO: 2161485 - RNA, 13 nt, Human
caaacacauuaag

SEQ ID NO: 2161486 - RNA, 23 nt, Human
caaacacauuaagccuuccacac

SEQ ID NO: 2161487 - RNA, 15 nt, Human
caaaauggauaaaau

SEQ ID NO: 2161488 - RNA, 23 nt, Human
caaaauggauaaaaucugauaug

SEQ ID NO: 2161489 - RNA, 18 nt, Human
caaaauggauaaaaucug

SEQ ID NO: 2161490 - RNA, 13 nt, Human
caaaacaaaacaa

SEQ ID NO: 2161491 - RNA, 18 nt, Human
caaaacagaggcacuuaa

SEQ ID NO: 2161492 - RNA, 21 nt, Human
caaaaacccagcaacagaaaa

SEQ ID NO: 2161493 - RNA, 22 nt, Human
cacagugugaauaaagugcugc

SEQ ID NO: 2161494 - RNA, 13 nt, Human
cacagugugaaua

SEQ ID NO: 2161495 - RNA, 14 nt, Human
aagcaaaaagugau

SEQ ID NO: 2161496 - RNA, 17 nt, Human
guguauuuaacagggag

SEQ ID NO: 2161497 - RNA, 18 nt, Human
guguauuuaacagggagg

SEQ ID NO: 2161498 - RNA, 17 nt, Human
aagauagcuucacccca

SEQ ID NO: 2161499 - RNA, 13 nt, Human
gugguugugaucc

SEQ ID NO: 2161500 - RNA, 19 nt, Human
gugcugcggagcaagagga

SEQ ID NO: 2161501 - RNA, 16 nt, Human
gugugaauaaagugcu

SEQ ID NO: 2161502 - RNA, 19 nt, Human
aagcacacucauccccuca

SEQ ID NO: 2161503 - RNA, 21 nt, Human
aagcacaaugucucacauggg

SEQ ID NO: 2161504 - RNA, 15 nt, Human
aagcauguguuugca

SEQ ID NO: 2161505 - RNA, 20 nt, Human
guuauuggccuuuucuauuc

SEQ ID NO: 2161506 - RNA, 16 nt, Human
aagccuuccacacuca

SEQ ID NO: 2161507 - RNA, 20 nt, Human
guugacuugacagaacacug

SEQ ID NO: 2161508 - RNA, 19 nt, Human
guugacuugacagaacacu

SEQ ID NO: 2161509 - RNA, 17 nt, Human
guucuugccacuuuuuu

SEQ ID NO: 2161510 - RNA, 13 nt, Human
aagcuuccuuggc

SEQ ID NO: 2161511 - RNA, 21 nt, Human
aagcucuugaagacacugaaa

SEQ ID NO: 2161512 - RNA, 19 nt, Human
aagcucuugaagacacuga

SEQ ID NO: 2161513 - RNA, 20 nt, Human
aagcucuugaagacacugaa

SEQ ID NO: 2161514 - RNA, 17 nt, Human
aagcucuugaagacacu

SEQ ID NO: 2161515 - RNA, 14 nt, Human
aaguuaaauuuuau

SEQ ID NO: 2161516 - RNA, 20 nt, Human
aaguuaugggaauaccugug

SEQ ID NO: 2161517 - RNA, 12 nt, Human
aagugccagaaa

SEQ ID NO: 2161518 - RNA, 16 nt, Human
uaaaauguaucuucca

SEQ ID NO: 2161519 - RNA, 21 nt, Human
aaguuuccuuccagcccagaa

SEQ ID NO: 2161520 - RNA, 20 nt, Human
aaguuuccuuccagcccaga

SEQ ID NO: 2161521 - RNA, 19 nt, Human
aaguuuccuuccagcccag

SEQ ID NO: 2161522 - RNA, 18 nt, Human
aaguuuccuuccagccca

SEQ ID NO: 2161523 - RNA, 18 nt, Human
uaaaauaaauauugucuu

SEQ ID NO: 2161524 - RNA, 14 nt, Human
uaaaauaaauauug

SEQ ID NO: 2161525 - RNA, 17 nt, Human
uaaaauaaauauugucu

SEQ ID NO: 2161526 - RNA, 13 nt, Human
uaaaacuuuuuau

SEQ ID NO: 2161527 - RNA, 23 nt, Human
uaaaacuuuuuauauuuuauaca

SEQ ID NO: 2161528 - RNA, 19 nt, Human
uaaaagaaagaaagaaaaa

SEQ ID NO: 2161529 - RNA, 14 nt, Human
uaaaacucuuuuaa

SEQ ID NO: 2161530 - RNA, 15 nt, Human
uaaaacuacaaaaau

SEQ ID NO: 2161531 - RNA, 18 nt, Human
aaguaacuuuaaauuaug

SEQ ID NO: 2161532 - RNA, 16 nt, Human
aagguuucugaaaauu

SEQ ID NO: 2161533 - RNA, 18 nt, Human
aagguuugguccagccug

SEQ ID NO: 2161534 - RNA, 20 nt, Human
aaggggacccccgcccccug

SEQ ID NO: 2161535 - RNA, 16 nt, Human
aaggggacccccgccc

SEQ ID NO: 2161536 - RNA, 15 nt, Human
aaggcuuaaacccau

SEQ ID NO: 2161537 - RNA, 22 nt, Human
guuuuaaagaccugacaccuuu

SEQ ID NO: 2161538 - RNA, 13 nt, Human
aaguaacuuuaaa

SEQ ID NO: 2161539 - RNA, 19 nt, Human
guuuuaauuuauacuggca

SEQ ID NO: 2161540 - RNA, 21 nt, Human
aaguauugcugaguccaacaa

SEQ ID NO: 2161541 - RNA, 23 nt, Human
gucuagccuauguggauuuuuuc

SEQ ID NO: 2161542 - RNA, 18 nt, Human
gucgcgcaccgaaaaacu

SEQ ID NO: 2161543 - RNA, 15 nt, Human
gucgagucaaaaugu

SEQ ID NO: 2161544 - RNA, 20 nt, Human
guccucuuuacaugaaacua

SEQ ID NO: 2161545 - RNA, 19 nt, Human
aacauaaagcaaauagaca

SEQ ID NO: 2161546 - RNA, 14 nt, Human
aacauaaagcaaau

SEQ ID NO: 2161547 - RNA, 17 nt, Human
aacauguauaauauuuu

SEQ ID NO: 2161548 - RNA, 14 nt, Human
aacauucaggagcu

SEQ ID NO: 2161549 - RNA, 13 nt, Human
aacauucaggagc

SEQ ID NO: 2161550 - RNA, 20 nt, Human
aacacaaagagaaaaagaaa

SEQ ID NO: 2161551 - RNA, 23 nt, Human
guccccagagaaagcgcagaugc

SEQ ID NO: 2161552 - RNA, 12 nt, Human
guccccagagaa

SEQ ID NO: 2161553 - RNA, 23 nt, Human
gucacaaagaacauguagaaaac

SEQ ID NO: 2161554 - RNA, 15 nt, Human
gucacugcucuggac

SEQ ID NO: 2161555 - RNA, 15 nt, Human
gucagaaacaggacc

SEQ ID NO: 2161556 - RNA, 21 nt, Human
aaauucaacguuaauaauucu

SEQ ID NO: 2161557 - RNA, 21 nt, Human
aaauuaggauguaaaucugcu

SEQ ID NO: 2161558 - RNA, 20 nt, Human
aaauucccaacaaacauuga

SEQ ID NO: 2161559 - RNA, 18 nt, Human
aaauguaugauuacauca

SEQ ID NO: 2161560 - RNA, 14 nt, Human
aaauguaucuucca

SEQ ID NO: 2161561 - RNA, 17 nt, Human
aaauguauauauguaua

SEQ ID NO: 2161562 - RNA, 23 nt, Human
guauuguuugggauccuauugaa

SEQ ID NO: 2161563 - RNA, 9 nt, Human
guauuuaac

SEQ ID NO: 2161564 - RNA, 20 nt, Human
guauuguuugggauccuauu

SEQ ID NO: 2161565 - RNA, 22 nt, Human
gucuucaaccagggauuguuuc

SEQ ID NO: 2161566 - RNA, 12 nt, Human
gucuauuugaga

SEQ ID NO: 2161567 - RNA, 22 nt, Human
gucucuuucaugaguuuuuccc

SEQ ID NO: 2161568 - RNA, 12 nt, Human
aaccuucuggcc

SEQ ID NO: 2161569 - RNA, 19 nt, Human
aaccuucacacacagacug

SEQ ID NO: 2161570 - RNA, 17 nt, Human
aaccuucuggccuccca

SEQ ID NO: 2161571 - RNA, 13 nt, Human
gugaauaaagugc

SEQ ID NO: 2161572 - RNA, 15 nt, Human
gugaaguugcuucuu

SEQ ID NO: 2161573 - RNA, 14 nt, Human
gugaauaaagugcu

SEQ ID NO: 2161574 - RNA, 12 nt, Human
aacucucugaac

SEQ ID NO: 2161575 - RNA, 14 nt, Human
aacucuuuuaacag

SEQ ID NO: 2161576 - RNA, 13 nt, Human
aacucuuuuaaca

SEQ ID NO: 2161577 - RNA, 14 nt, Human
aagaagagaaagaa

SEQ ID NO: 2161578 - RNA, 15 nt, Human
aagaagagccacagu

SEQ ID NO: 2161579 - RNA, 14 nt, Human
aagaagagccacag

SEQ ID NO: 2161580 - RNA, 20 nt, Human
gugcuacaggggccagaaga

SEQ ID NO: 2161581 - RNA, 19 nt, Human
gugcuacaggggccagaag

SEQ ID NO: 2161582 - RNA, 16 nt, Human
gugcuacaggggccag

SEQ ID NO: 2161583 - RNA, 21 nt, Human
aacuugagaacuuuauuucca

SEQ ID NO: 2161584 - RNA, 22 nt, Human
aacuugagaacuuuauuuccaa

SEQ ID NO: 2161585 - RNA, 18 nt, Human
aacuugagaacuuuauuu

SEQ ID NO: 2161586 - RNA, 20 nt, Human
gugaucuuuuguucccaucc

SEQ ID NO: 2161587 - RNA, 21 nt, Human
uagggaauggcacagcccaaa

SEQ ID NO: 2161588 - RNA, 20 nt, Human
acaaugacuaauucuugcau

SEQ ID NO: 2161589 - RNA, 21 nt, Human
acaauaaguuaacuauuuuau

SEQ ID NO: 2161590 - RNA, 21 nt, Human
acaaauuuuuauuucuaaaau

SEQ ID NO: 2161591 - RNA, 15 nt, Human
uagccagaggacugu

SEQ ID NO: 2161592 - RNA, 18 nt, Human
acaaauuuuuauuucuaa

SEQ ID NO: 2161593 - RNA, 16 nt, Human
acaaauuuuuauuucu

SEQ ID NO: 2161594 - RNA, 14 nt, Human
acaaagggcccaga

SEQ ID NO: 2161595 - RNA, 18 nt, Human
acaaaggcaaagggucca

SEQ ID NO: 2161596 - RNA, 22 nt, Human
acaaagaugggugaaggcuggc

SEQ ID NO: 2161597 - RNA, 21 nt, Human
acaaagaugggugaaggcugg

SEQ ID NO: 2161598 - RNA, 20 nt, Human
acacagugugaauaaagugc

SEQ ID NO: 2161599 - RNA, 23 nt, Human
acacaaugugucuuucuuuuugg

SEQ ID NO: 2161600 - RNA, 17 nt, Human
acacaaugugucuuucu

SEQ ID NO: 2161601 - RNA, 15 nt, Human
acaauguauuuucuu

SEQ ID NO: 2161602 - RNA, 15 nt, Human
acaccuuauauuuac

SEQ ID NO: 2161603 - RNA, 22 nt, Human
acaccuuucuccuuuguacuuu

SEQ ID NO: 2161604 - RNA, 17 nt, Human
acaccuuucuccuuugu

SEQ ID NO: 2161605 - RNA, 14 nt, Human
acaccuuucuccuu

SEQ ID NO: 2161606 - RNA, 17 nt, Human
acaccauugaaggcuua

SEQ ID NO: 2161607 - RNA, 15 nt, Human
uaguuacuauaugcc

SEQ ID NO: 2161608 - RNA, 12 nt, Human
acagggagggga

SEQ ID NO: 2161609 - RNA, 10 nt, Human
acagggaggg

SEQ ID NO: 2161610 - RNA, 22 nt, Human
acagggacugaaaaccucuccu

SEQ ID NO: 2161611 - RNA, 16 nt, Human
uauucaauauccuuug

SEQ ID NO: 2161612 - RNA, 22 nt, Human
uauguuuuuuuucugcuggaaa

SEQ ID NO: 2161613 - RNA, 15 nt, Human
uauguuuuuuuucug

SEQ ID NO: 2161614 - RNA, 18 nt, Human
uauguuuuuguguauuug

SEQ ID NO: 2161615 - RNA, 14 nt, Human
uauguuuuugugua

SEQ ID NO: 2161616 - RNA, 15 nt, Human
uauuaaaacucuuuu

SEQ ID NO: 2161617 - RNA, 15 nt, Human
uaugugaaacaaugu

SEQ ID NO: 2161618 - RNA, 23 nt, Human
uauauuuagcuccaaaccuucac

SEQ ID NO: 2161619 - RNA, 15 nt, Human
uaucuccaagaccag

SEQ ID NO: 2161620 - RNA, 17 nt, Human
uaugcuaaaauacauuu

SEQ ID NO: 2161621 - RNA, 20 nt, Human
uaugccuuugauguauuuuc

SEQ ID NO: 2161622 - RNA, 22 nt, Human
uaugccguuacuuuucauauuu

SEQ ID NO: 2161623 - RNA, 21 nt, Human
uacucugcuuuuuuucuacug

SEQ ID NO: 2161624 - RNA, 22 nt, Human
uacguuugaagacauugcacca

SEQ ID NO: 2161625 - RNA, 16 nt, Human
uacguuugaagacauu

SEQ ID NO: 2161626 - RNA, 15 nt, Human
aauuagcugcuucua

SEQ ID NO: 2161627 - RNA, 14 nt, Human
aauuagcugcuucu

SEQ ID NO: 2161628 - RNA, 15 nt, Human
uaccuguauucccag

SEQ ID NO: 2161629 - RNA, 17 nt, Human
aauucccaacaaacauu

SEQ ID NO: 2161630 - RNA, 18 nt, Human
aauucaacguuaauaauu

SEQ ID NO: 2161631 - RNA, 21 nt, Human
aauucaacguuaauaauucug

SEQ ID NO: 2161632 - RNA, 22 nt, Human
aauuaguaggcucauuuacugu

SEQ ID NO: 2161633 - RNA, 21 nt, Human
aauuaguaggcucauuuacug

SEQ ID NO: 2161634 - RNA, 16 nt, Human
aauguuaacauuuuug

SEQ ID NO: 2161635 - RNA, 17 nt, Human
aaugugccuaguucuuu

SEQ ID NO: 2161636 - RNA, 14 nt, Human
aauggaaacugaaa

SEQ ID NO: 2161637 - RNA, 21 nt, Human
aaugccauggacagaagaagg

SEQ ID NO: 2161638 - RNA, 13 nt, Human
aauggcuccuuca

SEQ ID NO: 2161639 - RNA, 19 nt, Human
aauggcacagcccaaagaa

SEQ ID NO: 2161640 - RNA, 20 nt, Human
aauggcacagcccaaagaag

SEQ ID NO: 2161641 - RNA, 17 nt, Human
aauggcacagcccaaag

SEQ ID NO: 2161642 - RNA, 17 nt, Human
uaauagacuaaaugaaa

SEQ ID NO: 2161643 - RNA, 22 nt, Human
aaucuuaucaagaguugugaca

SEQ ID NO: 2161644 - RNA, 14 nt, Human
uaaucccagcuacu

SEQ ID NO: 2161645 - RNA, 14 nt, Human
uaaucccagcaauu

SEQ ID NO: 2161646 - RNA, 14 nt, Human
uaauauuuuuaauu

SEQ ID NO: 2161647 - RNA, 15 nt, Human
uaauauuuuuaauua

SEQ ID NO: 2161648 - RNA, 22 nt, Human
uaaugucuguaucacucugugu

SEQ ID NO: 2161649 - RNA, 15 nt, Human
uaagcuuugacacug

SEQ ID NO: 2161650 - RNA, 16 nt, Human
uaaguuguuauuucag

SEQ ID NO: 2161651 - RNA, 15 nt, Human
aaucaucuuugugaa

SEQ ID NO: 2161652 - RNA, 19 nt, Human
aaucauauuaauacaauga

SEQ ID NO: 2161653 - RNA, 14 nt, Human
aauauauuugugua

SEQ ID NO: 2161654 - RNA, 13 nt, Human
aauauauuugugu

SEQ ID NO: 2161655 - RNA, 21 nt, Human
uaaaauuuggccaaacaagug

SEQ ID NO: 2161656 - RNA, 22 nt, Human
aauaguugaaccuauuucucuu

SEQ ID NO: 2161657 - RNA, 24 nt, Human
aauauauuuguguauuuaacaggg

SEQ ID NO: 2161658 - RNA, 13 nt, Human
aauaucagacuuu

SEQ ID NO: 2161659 - RNA, 21 nt, Human
aauauauuuguguauuuaaca

SEQ ID NO: 2161660 - RNA, 19 nt, Human
aauauauuuguguauuuaa

SEQ ID NO: 2161661 - RNA, 10 nt, Human
aauauucugg

SEQ ID NO: 2161662 - RNA, 16 nt, Human
aauauugacuuugucu

SEQ ID NO: 2161663 - RNA, 15 nt, Human
aauauugacuuuguc

SEQ ID NO: 2161664 - RNA, 14 nt, Human
aauauugacuuugu

SEQ ID NO: 2161665 - RNA, 13 nt, Human
aauauugucuuuu

SEQ ID NO: 2161666 - RNA, 21 nt, Human
aauauugucuuuuuguauguc

SEQ ID NO: 2161667 - RNA, 18 nt, Human
aauauuugguuuuccugu

SEQ ID NO: 2161668 - RNA, 21 nt, Human
aauauuuugaucuucaacaaa

SEQ ID NO: 2161669 - RNA, 20 nt, Human
aauauuuugaucuucaacaa

SEQ ID NO: 2161670 - RNA, 13 nt, Human
aauauuuugaucu

SEQ ID NO: 2161671 - RNA, 23 nt, Human
aauauuuugaucuucaacaaauu

SEQ ID NO: 2161672 - RNA, 14 nt, Human
ucacaaccugaacc

SEQ ID NO: 2161673 - RNA, 19 nt, Human
ucacaaccugaaccuagga

SEQ ID NO: 2161674 - RNA, 16 nt, Human
ucacaaccugaaccua

SEQ ID NO: 2161675 - RNA, 20 nt, Human
ucaauuuccaagagcugagg

SEQ ID NO: 2161676 - RNA, 18 nt, Human
ucaauuuccaagagcuga

SEQ ID NO: 2161677 - RNA, 13 nt, Human
ucaauuuccaaga

SEQ ID NO: 2161678 - RNA, 14 nt, Human
ucacaaaaaagaag

SEQ ID NO: 2161679 - RNA, 23 nt, Human
ucacguuuuguuuugugccaacc

SEQ ID NO: 2161680 - RNA, 23 nt, Human
ucacuacccuaauagacuaaaug

SEQ ID NO: 2161681 - RNA, 12 nt, Human
accagcugaaag

SEQ ID NO: 2161682 - RNA, 20 nt, Human
accagcugaaaguugggacu

SEQ ID NO: 2161683 - RNA, 12 nt, Human
ucacuugagacc

SEQ ID NO: 2161684 - RNA, 15 nt, Human
accagucauuuuuca

SEQ ID NO: 2161685 - RNA, 14 nt, Human
accagucauuuuuc

SEQ ID NO: 2161686 - RNA, 16 nt, Human
accagucauuuuucag

SEQ ID NO: 2161687 - RNA, 16 nt, Human
ucacugugagcuccca

SEQ ID NO: 2161688 - RNA, 16 nt, Human
acauuguuaaaauaaa

SEQ ID NO: 2161689 - RNA, 13 nt, Human
acauuuucacaca

SEQ ID NO: 2161690 - RNA, 15 nt, Human
acauuuucacacaau

SEQ ID NO: 2161691 - RNA, 20 nt, Human
acauuuucacacaauacaau

SEQ ID NO: 2161692 - RNA, 16 nt, Human
ucaauauccuuugccu

SEQ ID NO: 2161693 - RNA, 14 nt, Human
ucaauauccuuugc

SEQ ID NO: 2161694 - RNA, 18 nt, Human
acauguagaaaacaaaau

SEQ ID NO: 2161695 - RNA, 22 nt, Human
ucaaccagggauuguuucuguu

SEQ ID NO: 2161696 - RNA, 20 nt, Human
ucaaccagggauuguuucug

SEQ ID NO: 2161697 - RNA, 17 nt, Human
ucaaccagggauuguuu

SEQ ID NO: 2161698 - RNA, 14 nt, Human
ucaacauucuuugc

SEQ ID NO: 2161699 - RNA, 16 nt, Human
ucaacaaauugcccuu

SEQ ID NO: 2161700 - RNA, 17 nt, Human
ucaaccaaugccaaaaa

SEQ ID NO: 2161701 - RNA, 21 nt, Human
acaugguaaacgcugucccua

SEQ ID NO: 2161702 - RNA, 23 nt, Human
acccuucuccucuuguaaauaaa

SEQ ID NO: 2161703 - RNA, 19 nt, Human
accgaaaaacuaaaaauaa

SEQ ID NO: 2161704 - RNA, 20 nt, Human
ucagccacccugaggccucu

SEQ ID NO: 2161705 - RNA, 19 nt, Human
ucagccacccugaggccuc

SEQ ID NO: 2161706 - RNA, 18 nt, Human
ucagcuccacuuucagug

SEQ ID NO: 2161707 - RNA, 16 nt, Human
acccccucgcuuggac

SEQ ID NO: 2161708 - RNA, 15 nt, Human
accccaguuuuuguu

SEQ ID NO: 2161709 - RNA, 15 nt, Human
ucaguggauuuccca

SEQ ID NO: 2161710 - RNA, 14 nt, Human
ucauauuugcacua

SEQ ID NO: 2161711 - RNA, 13 nt, Human
ucauauuugcacu

SEQ ID NO: 2161712 - RNA, 20 nt, Human
ucauaugcaaagcauauuaa

SEQ ID NO: 2161713 - RNA, 14 nt, Human
ucauauugaauaua

SEQ ID NO: 2161714 - RNA, 15 nt, Human
accuaggggcgccgc

SEQ ID NO: 2161715 - RNA, 22 nt, Human
accuauuucucuuucuuuacaa

SEQ ID NO: 2161716 - RNA, 19 nt, Human
accuauuucucuuucuuua

SEQ ID NO: 2161717 - RNA, 14 nt, Human
accuauuucucuuu

SEQ ID NO: 2161718 - RNA, 11 nt, Human
accuauuucuc

SEQ ID NO: 2161719 - RNA, 17 nt, Human
ucaucgccagacaacug

SEQ ID NO: 2161720 - RNA, 20 nt, Human
ucaucuacucauuuaaagua

SEQ ID NO: 2161721 - RNA, 16 nt, Human
acucaagauucccagg

SEQ ID NO: 2161722 - RNA, 15 nt, Human
acucaagauucccag

SEQ ID NO: 2161723 - RNA, 14 nt, Human
acucaagcccgcgg

SEQ ID NO: 2161724 - RNA, 19 nt, Human
acucaagauucccaggagu

SEQ ID NO: 2161725 - RNA, 23 nt, Human
acucaagauucccaggaguucug

SEQ ID NO: 2161726 - RNA, 18 nt, Human
acucaagauucccaggag

SEQ ID NO: 2161727 - RNA, 17 nt, Human
acucaagauucccagga

SEQ ID NO: 2161728 - RNA, 15 nt, Human
acucaaguagcauuu

SEQ ID NO: 2161729 - RNA, 21 nt, Human
acucacaaccugaaccuagga

SEQ ID NO: 2161730 - RNA, 16 nt, Human
acucaaguagcauuua

SEQ ID NO: 2161731 - RNA, 15 nt, Human
acuagagcuuucuuu

SEQ ID NO: 2161732 - RNA, 18 nt, Human
acuagagggaccucuccc

SEQ ID NO: 2161733 - RNA, 19 nt, Human
acuagagggaccucuccca

SEQ ID NO: 2161734 - RNA, 15 nt, Human
acuacugcaccauuu

SEQ ID NO: 2161735 - RNA, 16 nt, Human
ucccagcuaccucaac

SEQ ID NO: 2161736 - RNA, 16 nt, Human
ucccagcuacaccuuu

SEQ ID NO: 2161737 - RNA, 18 nt, Human
acuacagaaaaaccagag

SEQ ID NO: 2161738 - RNA, 22 nt, Human
acguuugaagacauugcaccag

SEQ ID NO: 2161739 - RNA, 18 nt, Human
uccagugcaacacugaag

SEQ ID NO: 2161740 - RNA, 22 nt, Human
acggcugggcacacgccuccca

SEQ ID NO: 2161741 - RNA, 11 nt, Human
acggcugggca

SEQ ID NO: 2161742 - RNA, 22 nt, Human
acggcuccacuaggacuucaaa

SEQ ID NO: 2161743 - RNA, 18 nt, Human
acgcucucuacucugcuu

SEQ ID NO: 2161744 - RNA, 15 nt, Human
acgcucucuacucug

SEQ ID NO: 2161745 - RNA, 14 nt, Human
acgccucccacugg

SEQ ID NO: 2161746 - RNA, 15 nt, Human
acgccucccacuggg

SEQ ID NO: 2161747 - RNA, 20 nt, Human
accuuucuccuuuguacuuu

SEQ ID NO: 2161748 - RNA, 19 nt, Human
accuuucuccuuuguacuu

SEQ ID NO: 2161749 - RNA, 23 nt, Human
accuuucuccuuuguacuuugug

SEQ ID NO: 2161750 - RNA, 22 nt, Human
ucauucccuucgacagcauuuu

SEQ ID NO: 2161751 - RNA, 23 nt, Human
ucauucccuucgacagcauuuuc

SEQ ID NO: 2161752 - RNA, 21 nt, Human
ucauucccuucgacagcauuu

SEQ ID NO: 2161753 - RNA, 20 nt, Human
ucauucccuucgacagcauu

SEQ ID NO: 2161754 - RNA, 16 nt, Human
accuuucuccuuugua

SEQ ID NO: 2161755 - RNA, 15 nt, Human
accuuucuccuuugu

SEQ ID NO: 2161756 - RNA, 22 nt, Human
uccaggauuccucuuuucucug

SEQ ID NO: 2161757 - RNA, 18 nt, Human
uccaggauuccucuuuuc

SEQ ID NO: 2161758 - RNA, 15 nt, Human
uccaggauuccucuu

SEQ ID NO: 2161759 - RNA, 18 nt, Human
acugcaccauuuaaaaac

SEQ ID NO: 2161760 - RNA, 22 nt, Human
uccugcuguaaauuuggcuucu

SEQ ID NO: 2161761 - RNA, 20 nt, Human
acugaacaccauugaaggcu

SEQ ID NO: 2161762 - RNA, 21 nt, Human
acugaacaccauugaaggcuu

SEQ ID NO: 2161763 - RNA, 22 nt, Human
acugaacaccauugaaggcuua

SEQ ID NO: 2161764 - RNA, 19 nt, Human
acugaacaccauugaaggc

SEQ ID NO: 2161765 - RNA, 20 nt, Human
acugagauccuuccuuuuga

SEQ ID NO: 2161766 - RNA, 17 nt, Human
acugaccugguccacag

SEQ ID NO: 2161767 - RNA, 13 nt, Human
acugaccuugaug

SEQ ID NO: 2161768 - RNA, 19 nt, Human
acugaccuugaugagcugu

SEQ ID NO: 2161769 - RNA, 22 nt, Human
acugaccugguccacagggcac

SEQ ID NO: 2161770 - RNA, 21 nt, Human
acugaccugguccacagggca

SEQ ID NO: 2161771 - RNA, 14 nt, Human
acuccugcuguaaa

SEQ ID NO: 2161772 - RNA, 22 nt, Human
acuccucaguucuugccacuuu

SEQ ID NO: 2161773 - RNA, 17 nt, Human
acuccucaguucuugcc

SEQ ID NO: 2161774 - RNA, 21 nt, Human
acucacaccugaacugaacac

SEQ ID NO: 2161775 - RNA, 19 nt, Human
acucucugaaccccucccu

SEQ ID NO: 2161776 - RNA, 21 nt, Human
acucucugaaccccucccucc

SEQ ID NO: 2161777 - RNA, 18 nt, Human
acucucugaaccccuccc

SEQ ID NO: 2161778 - RNA, 16 nt, Human
uccucagguggccaug

SEQ ID NO: 2161779 - RNA, 13 nt, Human
uccucagguggcc

SEQ ID NO: 2161780 - RNA, 18 nt, Human
uccucagguggccaugcc

SEQ ID NO: 2161781 - RNA, 22 nt, Human
uccucagguggccaugccucag

SEQ ID NO: 2161782 - RNA, 16 nt, Human
agaaaugcaaaaaucu

SEQ ID NO: 2161783 - RNA, 14 nt, Human
agaaaugcaaaaau

SEQ ID NO: 2161784 - RNA, 19 nt, Human
ucuccuuuguacuuugugc

SEQ ID NO: 2161785 - RNA, 20 nt, Human
ucuccuuuguacuuugugcu

SEQ ID NO: 2161786 - RNA, 21 nt, Human
ucugaagcuuuaccagcugaa

SEQ ID NO: 2161787 - RNA, 17 nt, Human
ucugaguggcuucacuc

SEQ ID NO: 2161788 - RNA, 21 nt, Human
ucugaguggcuucacuccugc

SEQ ID NO: 2161789 - RNA, 22 nt, Human
ucugaguggcuucacuccugcu

SEQ ID NO: 2161790 - RNA, 20 nt, Human
ucugcagggccgccagggag

SEQ ID NO: 2161791 - RNA, 22 nt, Human
agaagauucuucccauucucca

SEQ ID NO: 2161792 - RNA, 22 nt, Human
agaagaaauucugucauagaaa

SEQ ID NO: 2161793 - RNA, 18 nt, Human
agaagaaauucugucaua

SEQ ID NO: 2161794 - RNA, 22 nt, Human
agaacugccuuuggcagaguuc

SEQ ID NO: 2161795 - RNA, 21 nt, Human
agaaauucugucauagaaagu

SEQ ID NO: 2161796 - RNA, 23 nt, Human
agaaauucugucauagaaagugc

SEQ ID NO: 2161797 - RNA, 16 nt, Human
ucugcgugcagggaca

SEQ ID NO: 2161798 - RNA, 19 nt, Human
ucugcgucucugcuuuaaa

SEQ ID NO: 2161799 - RNA, 20 nt, Human
ucugcgucucugcuuuaaag

SEQ ID NO: 2161800 - RNA, 15 nt, Human
ucugcucauucuaau

SEQ ID NO: 2161801 - RNA, 18 nt, Human
ucuguugucaccuucacc

SEQ ID NO: 2161802 - RNA, 17 nt, Human
ucuguugucaccuucac

SEQ ID NO: 2161803 - RNA, 16 nt, Human
ucuguugucaccuuca

SEQ ID NO: 2161804 - RNA, 19 nt, Human
agacacaucgcacugugga

SEQ ID NO: 2161805 - RNA, 21 nt, Human
agacacagucauacugucacu

SEQ ID NO: 2161806 - RNA, 13 nt, Human
agacacaggauga

SEQ ID NO: 2161807 - RNA, 16 nt, Human
agaauaauaaauauuu

SEQ ID NO: 2161808 - RNA, 12 nt, Human
agaauaauaaau

SEQ ID NO: 2161809 - RNA, 15 nt, Human
agaauggggugcaug

SEQ ID NO: 2161810 - RNA, 19 nt, Human
agaauauuugguuuuccug

SEQ ID NO: 2161811 - RNA, 19 nt, Human
agaaucagucuugcagcug

SEQ ID NO: 2161812 - RNA, 14 nt, Human
agaauuaucuaauu

SEQ ID NO: 2161813 - RNA, 15 nt, Human
agaauuaucuaauuu

SEQ ID NO: 2161814 - RNA, 17 nt, Human
agaauuaucuaauuuau

SEQ ID NO: 2161815 - RNA, 19 nt, Human
ucugggaguggggaaguga

SEQ ID NO: 2161816 - RNA, 18 nt, Human
agaauuaucuaauuuaua

SEQ ID NO: 2161817 - RNA, 20 nt, Human
agaauuaucuaauuuauaaa

SEQ ID NO: 2161818 - RNA, 21 nt, Human
agaauuaucuaauuuauaaaa

SEQ ID NO: 2161819 - RNA, 22 nt, Human
ucuccaccagucauuuuucaga

SEQ ID NO: 2161820 - RNA, 20 nt, Human
ucuccaauuuuuuuuuccuu

SEQ ID NO: 2161821 - RNA, 16 nt, Human
ucuccucauguucugc

SEQ ID NO: 2161822 - RNA, 17 nt, Human
acuuuuuauauuuuaua

SEQ ID NO: 2161823 - RNA, 21 nt, Human
acuuuuuauauuuuauacauu

SEQ ID NO: 2161824 - RNA, 13 nt, Human
acuuuguucugcu

SEQ ID NO: 2161825 - RNA, 13 nt, Human
acuuaagcaaaag

SEQ ID NO: 2161826 - RNA, 11 nt, Human
acuuauuaaau

SEQ ID NO: 2161827 - RNA, 23 nt, Human
ucuacagguuuggguacaagugg

SEQ ID NO: 2161828 - RNA, 18 nt, Human
acuguucccaccugcugg

SEQ ID NO: 2161829 - RNA, 21 nt, Human
acuucccccaaauuuaaagaa

SEQ ID NO: 2161830 - RNA, 15 nt, Human
ucuauuuaaguaaaa

SEQ ID NO: 2161831 - RNA, 19 nt, Human
ucuauuuaucuucauuuga

SEQ ID NO: 2161832 - RNA, 15 nt, Human
ucuauuuaucuucau

SEQ ID NO: 2161833 - RNA, 15 nt, Human
ucuauacuugcuuug

SEQ ID NO: 2161834 - RNA, 17 nt, Human
ugaccuugaugagcugu

SEQ ID NO: 2161835 - RNA, 20 nt, Human
ugaccugguccacagggcac

SEQ ID NO: 2161836 - RNA, 15 nt, Human
ugaccugguccacag

SEQ ID NO: 2161837 - RNA, 22 nt, Human
ugaccuugaugagcugugcaca

SEQ ID NO: 2161838 - RNA, 19 nt, Human
ugaccuugaugagcugugc

SEQ ID NO: 2161839 - RNA, 18 nt, Human
ugaccuugaugagcugug

SEQ ID NO: 2161840 - RNA, 12 nt, Human
agauucccagga

SEQ ID NO: 2161841 - RNA, 14 nt, Human
agauucccaggagu

SEQ ID NO: 2161842 - RNA, 13 nt, Human
agauucccaggag

SEQ ID NO: 2161843 - RNA, 15 nt, Human
agauucccaggaguu

SEQ ID NO: 2161844 - RNA, 16 nt, Human
agauucccaggaguuc

SEQ ID NO: 2161845 - RNA, 15 nt, Human
agauuaauuccuuuc

SEQ ID NO: 2161846 - RNA, 20 nt, Human
agaugcaaugacucaggaca

SEQ ID NO: 2161847 - RNA, 23 nt, Human
ugacaccuuucauaaucuuugcu

SEQ ID NO: 2161848 - RNA, 20 nt, Human
ugacaccuuucauaaucuuu

SEQ ID NO: 2161849 - RNA, 20 nt, Human
agcaaggguucccucaagag

SEQ ID NO: 2161850 - RNA, 14 nt, Human
agcaagucaggguu

SEQ ID NO: 2161851 - RNA, 16 nt, Human
ugagauuaauuccuuu

SEQ ID NO: 2161852 - RNA, 14 nt, Human
ugagauuaauuccu

SEQ ID NO: 2161853 - RNA, 18 nt, Human
ugaaaaugcaacaacaug

SEQ ID NO: 2161854 - RNA, 21 nt, Human
ugaaaaugcaacaacauguau

SEQ ID NO: 2161855 - RNA, 20 nt, Human
ugaaaaugcaacaacaugua

SEQ ID NO: 2161856 - RNA, 23 nt, Human
ugaaaaugcaacaacauguauaa

SEQ ID NO: 2161857 - RNA, 16 nt, Human
ugaaaauuaacacugc

SEQ ID NO: 2161858 - RNA, 15 nt, Human
ugaaaauuaacacug

SEQ ID NO: 2161859 - RNA, 14 nt, Human
ugaaaauuaacacu

SEQ ID NO: 2161860 - RNA, 18 nt, Human
ugaaaauuaacacugcuu

SEQ ID NO: 2161861 - RNA, 11 nt, Human
ucuuugugaag

SEQ ID NO: 2161862 - RNA, 16 nt, Human
ucuuugugaaggccuc

SEQ ID NO: 2161863 - RNA, 15 nt, Human
ucuuuuuuucuuugg

SEQ ID NO: 2161864 - RNA, 20 nt, Human
ucuuucccugcuuaaugaaa

SEQ ID NO: 2161865 - RNA, 21 nt, Human
agacucugucuaaaaaacaaa

SEQ ID NO: 2161866 - RNA, 20 nt, Human
agacucugucuaaaaaacaa

SEQ ID NO: 2161867 - RNA, 18 nt, Human
agacucugucuaaaaaac

SEQ ID NO: 2161868 - RNA, 13 nt, Human
agacucugucuaa

SEQ ID NO: 2161869 - RNA, 17 nt, Human
agacuccucaguucuug

SEQ ID NO: 2161870 - RNA, 23 nt, Human
agacuccugacugucucccggga

SEQ ID NO: 2161871 - RNA, 11 nt, Human
agacuccucag

SEQ ID NO: 2161872 - RNA, 14 nt, Human
agaggcauuucccc

SEQ ID NO: 2161873 - RNA, 13 nt, Human
agaggcauuuccc

SEQ ID NO: 2161874 - RNA, 16 nt, Human
ugaagggauaugugaa

SEQ ID NO: 2161875 - RNA, 18 nt, Human
ugaagguuucugaaaauu

SEQ ID NO: 2161876 - RNA, 14 nt, Human
ugaagcaaacacau

SEQ ID NO: 2161877 - RNA, 15 nt, Human
ugaagcaaacacauu

SEQ ID NO: 2161878 - RNA, 13 nt, Human
ugaagcaaacaca

SEQ ID NO: 2161879 - RNA, 21 nt, Human
ugaauauuuucauuaaaagcu

SEQ ID NO: 2161880 - RNA, 19 nt, Human
ugaauauuuucauuaaaag

SEQ ID NO: 2161881 - RNA, 12 nt, Human
ugaaguaccacc

SEQ ID NO: 2161882 - RNA, 20 nt, Human
ugaaauuuuugguuauaaau

SEQ ID NO: 2161883 - RNA, 17 nt, Human
ugucaacaugaacaaau

SEQ ID NO: 2161884 - RNA, 17 nt, Human
agguuugguccagccug

SEQ ID NO: 2161885 - RNA, 21 nt, Human
ugucccuaguaaaaauacaaa

SEQ ID NO: 2161886 - RNA, 15 nt, Human
agucaucauucccuu

SEQ ID NO: 2161887 - RNA, 23 nt, Human
aguccauauuucaauuuccaaga

SEQ ID NO: 2161888 - RNA, 13 nt, Human
aguccccagagaa

SEQ ID NO: 2161889 - RNA, 21 nt, Human
aguccauauuucaauuuccaa

SEQ ID NO: 2161890 - RNA, 11 nt, Human
ugucuccuggc

SEQ ID NO: 2161891 - RNA, 21 nt, Human
ugucuccuggcgguuccucgu

SEQ ID NO: 2161892 - RNA, 13 nt, Human
ugucucuuucaug

SEQ ID NO: 2161893 - RNA, 15 nt, Human
agucuguuuuguaaa

SEQ ID NO: 2161894 - RNA, 16 nt, Human
agucuguuuuguaaag

SEQ ID NO: 2161895 - RNA, 22 nt, Human
ugugaagcacagaccccuucca

SEQ ID NO: 2161896 - RNA, 14 nt, Human
agugaaagcaucac

SEQ ID NO: 2161897 - RNA, 15 nt, Human
agugagccacuccgg

SEQ ID NO: 2161898 - RNA, 16 nt, Human
ugugaugcccugcccu

SEQ ID NO: 2161899 - RNA, 14 nt, Human
uggugaaaccuccu

SEQ ID NO: 2161900 - RNA, 20 nt, Human
agguagaccugucuccuggc

SEQ ID NO: 2161901 - RNA, 22 nt, Human
agguagaauuaucuaauuuaua

SEQ ID NO: 2161902 - RNA, 14 nt, Human
aggguuggagcagu

SEQ ID NO: 2161903 - RNA, 23 nt, Human
agguaugaccuucuaggaagcuc

SEQ ID NO: 2161904 - RNA, 22 nt, Human
agguaugaccuucuaggaagcu

SEQ ID NO: 2161905 - RNA, 20 nt, Human
agguaugaccuucuaggaag

SEQ ID NO: 2161906 - RNA, 15 nt, Human
aggucaggaguucga

SEQ ID NO: 2161907 - RNA, 14 nt, Human
ugggugaaggcugg

SEQ ID NO: 2161908 - RNA, 16 nt, Human
ugggugaaggcuggca

SEQ ID NO: 2161909 - RNA, 15 nt, Human
ugggugaaggcuggc

SEQ ID NO: 2161910 - RNA, 19 nt, Human
ugguaaacgcugucccuag

SEQ ID NO: 2161911 - RNA, 17 nt, Human
ugguaauucuuauucuu

SEQ ID NO: 2161912 - RNA, 14 nt, Human
ugguccagccuggu

SEQ ID NO: 2161913 - RNA, 21 nt, Human
ugguccacagggcaccugcca

SEQ ID NO: 2161914 - RNA, 15 nt, Human
ugguccacagggcac

SEQ ID NO: 2161915 - RNA, 14 nt, Human
ugguccacagggca

SEQ ID NO: 2161916 - RNA, 13 nt, Human
ugguccacagggc

SEQ ID NO: 2161917 - RNA, 21 nt, Human
aggggucgacuucgggcuggc

SEQ ID NO: 2161918 - RNA, 19 nt, Human
aggggucgacuucgggcug

SEQ ID NO: 2161919 - RNA, 19 nt, Human
aggggagggucagccaggg

SEQ ID NO: 2161920 - RNA, 18 nt, Human
aggggagggucagccagg

SEQ ID NO: 2161921 - RNA, 15 nt, Human
aggggaggccuucca

SEQ ID NO: 2161922 - RNA, 22 nt, Human
aggggacccccgcccccugccc

SEQ ID NO: 2161923 - RNA, 14 nt, Human
aggggacccccgcc

SEQ ID NO: 2161924 - RNA, 19 nt, Human
aggggacccccgcccccug

SEQ ID NO: 2161925 - RNA, 18 nt, Human
aggggacccccgcccccu

SEQ ID NO: 2161926 - RNA, 15 nt, Human
aggggacccccgccc

SEQ ID NO: 2161927 - RNA, 15 nt, Human
ugggaauaccugugg

SEQ ID NO: 2161928 - RNA, 15 nt, Human
ugguuuaauuuaaag

SEQ ID NO: 2161929 - RNA, 16 nt, Human
ugguuaagcuuugaca

SEQ ID NO: 2161930 - RNA, 17 nt, Human
ugguuugcaaggaagcc

SEQ ID NO: 2161931 - RNA, 15 nt, Human
ugguuugcaaggaag

SEQ ID NO: 2161932 - RNA, 20 nt, Human
ugguuuuaacaacugugcuu

SEQ ID NO: 2161933 - RNA, 13 nt, Human
ugguuuuccugua

SEQ ID NO: 2161934 - RNA, 15 nt, Human
uguagaagcauggug

SEQ ID NO: 2161935 - RNA, 16 nt, Human
auaaccaaucuacaau

SEQ ID NO: 2161936 - RNA, 23 nt, Human
auaacugcccagcggacaguggc

SEQ ID NO: 2161937 - RNA, 13 nt, Human
auaacugcccagc

SEQ ID NO: 2161938 - RNA, 20 nt, Human
auaacugcaaagugaaguug

SEQ ID NO: 2161939 - RNA, 16 nt, Human
auaaauguuaagaaaa

SEQ ID NO: 2161940 - RNA, 15 nt, Human
auaaauguuaagaaa

SEQ ID NO: 2161941 - RNA, 19 nt, Human
auaacuggaggaauuuucu

SEQ ID NO: 2161942 - RNA, 16 nt, Human
uuacccacacacagau

SEQ ID NO: 2161943 - RNA, 22 nt, Human
auaaacauuuguagcauccucu

SEQ ID NO: 2161944 - RNA, 13 nt, Human
auaaauaaaacau

SEQ ID NO: 2161945 - RNA, 23 nt, Human
auaaagugcugcggagcaagagg

SEQ ID NO: 2161946 - RNA, 22 nt, Human
auaaagugcugcggagcaagag

SEQ ID NO: 2161947 - RNA, 22 nt, Human
auaaguuaacuauuuuauuuuc

SEQ ID NO: 2161948 - RNA, 19 nt, Human
auaauucugggaagcaaaa

SEQ ID NO: 2161949 - RNA, 15 nt, Human
auaauuguauauaug

SEQ ID NO: 2161950 - RNA, 18 nt, Human
auaaucaucucugucaca

SEQ ID NO: 2161951 - RNA, 23 nt, Human
uuaucaagaguugugacaacuuc

SEQ ID NO: 2161952 - RNA, 22 nt, Human
uuaucaagaguugugacaacuu

SEQ ID NO: 2161953 - RNA, 24 nt, Human
auaccaaauagcuucuguuuuguu

SEQ ID NO: 2161954 - RNA, 17 nt, Human
auacauucuguaauaca

SEQ ID NO: 2161955 - RNA, 16 nt, Human
auacaacacaaagaga

SEQ ID NO: 2161956 - RNA, 15 nt, Human
auacaacacaaagag

SEQ ID NO: 2161957 - RNA, 16 nt, Human
uuauagccgaaaugau

SEQ ID NO: 2161958 - RNA, 14 nt, Human
uuauacuggcaugc

SEQ ID NO: 2161959 - RNA, 21 nt, Human
uuauaccuguguauuuuuuaa

SEQ ID NO: 2161960 - RNA, 18 nt, Human
uuauacuuuguaaagaca

SEQ ID NO: 2161961 - RNA, 10 nt, Human
uuagccugga

SEQ ID NO: 2161962 - RNA, 19 nt, Human
uuagcaguaaaauagcuga

SEQ ID NO: 2161963 - RNA, 16 nt, Human
uuagcaguaaaauagc

SEQ ID NO: 2161964 - RNA, 14 nt, Human
uuagcaguaaaaua

SEQ ID NO: 2161965 - RNA, 19 nt, Human
aguguagcauccuaaagau

SEQ ID NO: 2161966 - RNA, 20 nt, Human
uguuauguagugugcuuuuu

SEQ ID NO: 2161967 - RNA, 19 nt, Human
uguucccauccucuucuuu

SEQ ID NO: 2161968 - RNA, 14 nt, Human
uguucaaacauuua

SEQ ID NO: 2161969 - RNA, 13 nt, Human
aguggcauaaaaa

SEQ ID NO: 2161970 - RNA, 16 nt, Human
aguggcaggacaggaa

SEQ ID NO: 2161971 - RNA, 13 nt, Human
aguggcaggacag

SEQ ID NO: 2161972 - RNA, 17 nt, Human
aguggcaggacaggaaa

SEQ ID NO: 2161973 - RNA, 17 nt, Human
aguuagggaauggcaca

SEQ ID NO: 2161974 - RNA, 17 nt, Human
aguguuuaacuugucaa

SEQ ID NO: 2161975 - RNA, 17 nt, Human
aguucgagaccagccug

SEQ ID NO: 2161976 - RNA, 19 nt, Human
aguucgagaccagccuggc

SEQ ID NO: 2161977 - RNA, 13 nt, Human
uguugucaccuuc

SEQ ID NO: 2161978 - RNA, 18 nt, Human
aguuuucccuugaggaaa

SEQ ID NO: 2161979 - RNA, 20 nt, Human
aguuuucccuugaggaaaca

SEQ ID NO: 2161980 - RNA, 17 nt, Human
aguuuucaccucgaauu

SEQ ID NO: 2161981 - RNA, 15 nt, Human
aguuucaaccaugaa

SEQ ID NO: 2161982 - RNA, 15 nt, Human
aguuuauuuuaagac

SEQ ID NO: 2161983 - RNA, 19 nt, Human
aguuuccuuccagcccaga

SEQ ID NO: 2161984 - RNA, 22 nt, Human
uguuuuaauuuauacuggcaug

SEQ ID NO: 2161985 - RNA, 22 nt, Human
agccagcgggaauggcagcugc

SEQ ID NO: 2161986 - RNA, 15 nt, Human
agccagggccugcga

SEQ ID NO: 2161987 - RNA, 23 nt, Human
ugaugacucaagauucccaggag

SEQ ID NO: 2161988 - RNA, 16 nt, Human
agcaccugaacaguuu

SEQ ID NO: 2161989 - RNA, 22 nt, Human
ugaugacucaagauucccagga

SEQ ID NO: 2161990 - RNA, 15 nt, Human
ugaugacucaagauu

SEQ ID NO: 2161991 - RNA, 14 nt, Human
ugaugacucaagau

SEQ ID NO: 2161992 - RNA, 14 nt, Human
agccagaggacugu

SEQ ID NO: 2161993 - RNA, 13 nt, Human
agccagaggacug

SEQ ID NO: 2161994 - RNA, 17 nt, Human
agccagaggacugugau

SEQ ID NO: 2161995 - RNA, 20 nt, Human
agcccgcggggacauuggga

SEQ ID NO: 2161996 - RNA, 15 nt, Human
agcccgcggggacau

SEQ ID NO: 2161997 - RNA, 15 nt, Human
agcccccccuuccac

SEQ ID NO: 2161998 - RNA, 13 nt, Human
agcccccccuucc

SEQ ID NO: 2161999 - RNA, 17 nt, Human
agcccuugcauugcaga

SEQ ID NO: 2162000 - RNA, 16 nt, Human
ugcacucuagccuggg

SEQ ID NO: 2162001 - RNA, 14 nt, Human
ugcagacgcccaga

SEQ ID NO: 2162002 - RNA, 16 nt, Human
ugccucaggccucugu

SEQ ID NO: 2162003 - RNA, 18 nt, Human
ugccucaggccucugugc

SEQ ID NO: 2162004 - RNA, 21 nt, Human
ugcccuccccucucugcaccg

SEQ ID NO: 2162005 - RNA, 17 nt, Human
ugcccuccccucucugc

SEQ ID NO: 2162006 - RNA, 14 nt, Human
ugcccuccccucuc

SEQ ID NO: 2162007 - RNA, 16 nt, Human
ugcccuaaugucugua

SEQ ID NO: 2162008 - RNA, 17 nt, Human
agcuacccgcagaguuc

SEQ ID NO: 2162009 - RNA, 14 nt, Human
ugccauuuugcauu

SEQ ID NO: 2162010 - RNA, 19 nt, Human
ugcccaaaguuuuauuuuu

SEQ ID NO: 2162011 - RNA, 18 nt, Human
ugcccccgcauccccugc

SEQ ID NO: 2162012 - RNA, 21 nt, Human
ugcccccgcauccccugccuc

SEQ ID NO: 2162013 - RNA, 20 nt, Human
ugcccccgcauccccugccu

SEQ ID NO: 2162014 - RNA, 22 nt, Human
ugcccccgcauccccugccucc

SEQ ID NO: 2162015 - RNA, 18 nt, Human
ugccccauucuuuuguaa

SEQ ID NO: 2162016 - RNA, 12 nt, Human
ugccccauucuu

SEQ ID NO: 2162017 - RNA, 17 nt, Human
agcgggagccucccugc

SEQ ID NO: 2162018 - RNA, 20 nt, Human
agcgggaauggcagcugcca

SEQ ID NO: 2162019 - RNA, 19 nt, Human
agcggacaucagcugguca

SEQ ID NO: 2162020 - RNA, 20 nt, Human
agcggacaguggcaggacag

SEQ ID NO: 2162021 - RNA, 17 nt, Human
agcggacaguggcagga

SEQ ID NO: 2162022 - RNA, 16 nt, Human
agcggacaguggcagg

SEQ ID NO: 2162023 - RNA, 15 nt, Human
agcggacaguggcag

SEQ ID NO: 2162024 - RNA, 14 nt, Human
agcggacaguggca

SEQ ID NO: 2162025 - RNA, 21 nt, Human
ugcauucucccuccuucccuu

SEQ ID NO: 2162026 - RNA, 11 nt, Human
ugcauucuccc

SEQ ID NO: 2162027 - RNA, 16 nt, Human
uggcaugauccaagca

SEQ ID NO: 2162028 - RNA, 19 nt, Human
aggccucuggaaagcaaag

SEQ ID NO: 2162029 - RNA, 17 nt, Human
aggccucgcaggaagac

SEQ ID NO: 2162030 - RNA, 14 nt, Human
aggccucgcaggaa

SEQ ID NO: 2162031 - RNA, 13 nt, Human
aggccucgcagga

SEQ ID NO: 2162032 - RNA, 15 nt, Human
aggccucugugccgc

SEQ ID NO: 2162033 - RNA, 14 nt, Human
aggccuccuggccc

SEQ ID NO: 2162034 - RNA, 14 nt, Human
aggccagaccugca

SEQ ID NO: 2162035 - RNA, 14 nt, Human
uggagucauucuca

SEQ ID NO: 2162036 - RNA, 15 nt, Human
uggagucauucucau

SEQ ID NO: 2162037 - RNA, 12 nt, Human
aggccagaccug

SEQ ID NO: 2162038 - RNA, 23 nt, Human
uggcacccaagaccucagggcac

SEQ ID NO: 2162039 - RNA, 14 nt, Human
uggcacccaagacc

SEQ ID NO: 2162040 - RNA, 20 nt, Human
uggcugcaucccccccaccu

SEQ ID NO: 2162041 - RNA, 19 nt, Human
uggcuucacuccugcugua

SEQ ID NO: 2162042 - RNA, 18 nt, Human
uggcuucacuccugcugu

SEQ ID NO: 2162043 - RNA, 23 nt, Human
uggcuucacuccugcuguaaauu

SEQ ID NO: 2162044 - RNA, 16 nt, Human
uggcuucacuccugcu

SEQ ID NO: 2162045 - RNA, 14 nt, Human
uggcuucacuccug

SEQ ID NO: 2162046 - RNA, 19 nt, Human
ugggaaggggacccccgcc

SEQ ID NO: 2162047 - RNA, 22 nt, Human
ugggaaggggacccccgccccc

SEQ ID NO: 2162048 - RNA, 22 nt, Human
ugggaacuuauuaaauggaaac

SEQ ID NO: 2162049 - RNA, 20 nt, Human
aggcucucaacaggggagag

SEQ ID NO: 2162050 - RNA, 12 nt, Human
aggcuggcauga

SEQ ID NO: 2162051 - RNA, 12 nt, Human
ugcuguccucag

SEQ ID NO: 2162052 - RNA, 18 nt, Human
ugcuguccucagguggcc

SEQ ID NO: 2162053 - RNA, 14 nt, Human
ugcuguccucaggu

SEQ ID NO: 2162054 - RNA, 19 nt, Human
ugcuguccucagguggcca

SEQ ID NO: 2162055 - RNA, 21 nt, Human
ugcuguccucagguggccaug

SEQ ID NO: 2162056 - RNA, 20 nt, Human
aggacauccccccgccaaaa

SEQ ID NO: 2162057 - RNA, 17 nt, Human
ugcugugaaauucccaa

SEQ ID NO: 2162058 - RNA, 12 nt, Human
ugcucugcuuca

SEQ ID NO: 2162059 - RNA, 22 nt, Human
uggaaauuaggauguaaaucug

SEQ ID NO: 2162060 - RNA, 18 nt, Human
aggauaauuagcaucuca

SEQ ID NO: 2162061 - RNA, 14 nt, Human
uggacccagacaca

SEQ ID NO: 2162062 - RNA, 22 nt, Human
uggaaaggagccuaggccaggu

SEQ ID NO: 2162063 - RNA, 21 nt, Human
uggaaaggagccuaggccagg

SEQ ID NO: 2162064 - RNA, 18 nt, Human
aggagcauuuuuuaaaaa

SEQ ID NO: 2162065 - RNA, 21 nt, Human
aggacugugaugcccugcccu

SEQ ID NO: 2162066 - RNA, 20 nt, Human
aggacugugaugcccugccc

SEQ ID NO: 2162067 - RNA, 14 nt, Human
aggacugugaugcc

SEQ ID NO: 2162068 - RNA, 12 nt, Human
uucuguuuaacu

SEQ ID NO: 2162069 - RNA, 17 nt, Human
uucuugcauauuuugua

SEQ ID NO: 2162070 - RNA, 14 nt, Human
uucuugcauauuuu

SEQ ID NO: 2162071 - RNA, 20 nt, Human
uucuugcauauuuuguaacu

SEQ ID NO: 2162072 - RNA, 18 nt, Human
uucugaagcuuuaccagc

SEQ ID NO: 2162073 - RNA, 17 nt, Human
uucuccuuuguacuuug

SEQ ID NO: 2162074 - RNA, 14 nt, Human
uucuccuuuguacu

SEQ ID NO: 2162075 - RNA, 12 nt, Human
uucuccuuugua

SEQ ID NO: 2162076 - RNA, 20 nt, Human
uucucccuccuucccuuccu

SEQ ID NO: 2162077 - RNA, 21 nt, Human
aucacucugugucugaguggc

SEQ ID NO: 2162078 - RNA, 15 nt, Human
aucaguguuggccau

SEQ ID NO: 2162079 - RNA, 20 nt, Human
auccucuucuuuuagcagua

SEQ ID NO: 2162080 - RNA, 18 nt, Human
auccucuucuuuuagcag

SEQ ID NO: 2162081 - RNA, 13 nt, Human
auccucuucuuuu

SEQ ID NO: 2162082 - RNA, 23 nt, Human
aucguccagggagcauuuuccuc

SEQ ID NO: 2162083 - RNA, 13 nt, Human
aucguccagggag

SEQ ID NO: 2162084 - RNA, 12 nt, Human
aucguccaggga

SEQ ID NO: 2162085 - RNA, 18 nt, Human
uugaauauaaacacuaua

SEQ ID NO: 2162086 - RNA, 16 nt, Human
uugaauauaaacacua

SEQ ID NO: 2162087 - RNA, 15 nt, Human
uugaauauaaacacu

SEQ ID NO: 2162088 - RNA, 21 nt, Human
uugaauauaauauauuugugu

SEQ ID NO: 2162089 - RNA, 20 nt, Human
uugaauauaauauauuugug

SEQ ID NO: 2162090 - RNA, 22 nt, Human
uugaauauaauauauuugugua

SEQ ID NO: 2162091 - RNA, 14 nt, Human
uugaguaaaauaaa

SEQ ID NO: 2162092 - RNA, 12 nt, Human
uugaguaaaaua

SEQ ID NO: 2162093 - RNA, 18 nt, Human
uugaguaaaauaaauauu

SEQ ID NO: 2162094 - RNA, 18 nt, Human
uugacacuggaaugaguu

SEQ ID NO: 2162095 - RNA, 18 nt, Human
uugagaacuuuauuucca

SEQ ID NO: 2162096 - RNA, 17 nt, Human
auauugucuuuuuguau

SEQ ID NO: 2162097 - RNA, 14 nt, Human
auauugucuuuuug

SEQ ID NO: 2162098 - RNA, 17 nt, Human
auauuguaaaacaggua

SEQ ID NO: 2162099 - RNA, 16 nt, Human
auauuguaaaacaggu

SEQ ID NO: 2162100 - RNA, 19 nt, Human
auauuggguuccauucuca

SEQ ID NO: 2162101 - RNA, 22 nt, Human
auauuaaagagaaagcccgcuu

SEQ ID NO: 2162102 - RNA, 21 nt, Human
uucccagcuacaccuuucucc

SEQ ID NO: 2162103 - RNA, 20 nt, Human
uucccaggaguucugcucau

SEQ ID NO: 2162104 - RNA, 19 nt, Human
uucccaggaguucugcuca

SEQ ID NO: 2162105 - RNA, 23 nt, Human
aucaauguaccuuuuuugguagu

SEQ ID NO: 2162106 - RNA, 20 nt, Human
aucacucugugucugagugg

SEQ ID NO: 2162107 - RNA, 16 nt, Human
aucacucugugucuga

SEQ ID NO: 2162108 - RNA, 17 nt, Human
auauuuuuuaaaaaucu

SEQ ID NO: 2162109 - RNA, 23 nt, Human
auauuuuuuaaaaaucuauauuu

SEQ ID NO: 2162110 - RNA, 16 nt, Human
uuccucuuuucucugc

SEQ ID NO: 2162111 - RNA, 12 nt, Human
auauuugcacua

SEQ ID NO: 2162112 - RNA, 13 nt, Human
uuccccuuuugca

SEQ ID NO: 2162113 - RNA, 16 nt, Human
uucagugaaagcauca

SEQ ID NO: 2162114 - RNA, 21 nt, Human
uucaguaacccccacuggacu

SEQ ID NO: 2162115 - RNA, 13 nt, Human
auauauuuuaauu

SEQ ID NO: 2162116 - RNA, 13 nt, Human
uucagaagaaauu

SEQ ID NO: 2162117 - RNA, 19 nt, Human
uuccaguacaccuuucagc

SEQ ID NO: 2162118 - RNA, 15 nt, Human
uucauuaaaagcuac

SEQ ID NO: 2162119 - RNA, 20 nt, Human
auauggggaugcagcauuau

SEQ ID NO: 2162120 - RNA, 16 nt, Human
auauggggaugcagca

SEQ ID NO: 2162121 - RNA, 17 nt, Human
auauguagcagaaaggc

SEQ ID NO: 2162122 - RNA, 20 nt, Human
uuucccagcuacaccuuucu

SEQ ID NO: 2162123 - RNA, 14 nt, Human
uuucauaaucuuug

SEQ ID NO: 2162124 - RNA, 12 nt, Human
uuucauaaucuu

SEQ ID NO: 2162125 - RNA, 20 nt, Human
uuucauaguuggggucauag

SEQ ID NO: 2162126 - RNA, 13 nt, Human
augcugugaaauu

SEQ ID NO: 2162127 - RNA, 17 nt, Human
auggaaccaggcuugga

SEQ ID NO: 2162128 - RNA, 16 nt, Human
auggaaccaggcuugg

SEQ ID NO: 2162129 - RNA, 14 nt, Human
uuuauguacaggau

SEQ ID NO: 2162130 - RNA, 22 nt, Human
augccguuacuuuucauauuug

SEQ ID NO: 2162131 - RNA, 20 nt, Human
augccguuacuuuucauauu

SEQ ID NO: 2162132 - RNA, 14 nt, Human
augccguuacuuuu

SEQ ID NO: 2162133 - RNA, 13 nt, Human
augccucagcccu

SEQ ID NO: 2162134 - RNA, 17 nt, Human
uuuacggacacccccuc

SEQ ID NO: 2162135 - RNA, 13 nt, Human
uuuacggacaccc

SEQ ID NO: 2162136 - RNA, 16 nt, Human
uuuccuuccagcccag

SEQ ID NO: 2162137 - RNA, 15 nt, Human
uuuccuuccagccca

SEQ ID NO: 2162138 - RNA, 15 nt, Human
uuucuaaacagagau

SEQ ID NO: 2162139 - RNA, 13 nt, Human
uuucguucaguua

SEQ ID NO: 2162140 - RNA, 22 nt, Human
uuucgauucguuaagagagcaa

SEQ ID NO: 2162141 - RNA, 15 nt, Human
augggaccuauaacu

SEQ ID NO: 2162142 - RNA, 22 nt, Human
augggaccuauaacugcccagc

SEQ ID NO: 2162143 - RNA, 20 nt, Human
augggcacaaagggcccaga

SEQ ID NO: 2162144 - RNA, 18 nt, Human
augggcacaaagggccca

SEQ ID NO: 2162145 - RNA, 15 nt, Human
uuucuuucacaaaaa

SEQ ID NO: 2162146 - RNA, 19 nt, Human
uuucugcuggaaacagacu

SEQ ID NO: 2162147 - RNA, 20 nt, Human
uuugaaagccccagaaauca

SEQ ID NO: 2162148 - RNA, 23 nt, Human
uuucuccauauuagauuuaccca

SEQ ID NO: 2162149 - RNA, 15 nt, Human
uuucuccagggucag

SEQ ID NO: 2162150 - RNA, 16 nt, Human
uuucuaaacagagaug

SEQ ID NO: 2162151 - RNA, 17 nt, Human
augagauuaauuccuuu

SEQ ID NO: 2162152 - RNA, 17 nt, Human
augaguggcuuuaauga

SEQ ID NO: 2162153 - RNA, 13 nt, Human
augaguuuuuccc

SEQ ID NO: 2162154 - RNA, 17 nt, Human
uugucaccuucaccucc

SEQ ID NO: 2162155 - RNA, 19 nt, Human
uugucccggauuuuuguua

SEQ ID NO: 2162156 - RNA, 19 nt, Human
uugugugugcucugcuuca

SEQ ID NO: 2162157 - RNA, 22 nt, Human
uugugaaggccucgcaggaaga

SEQ ID NO: 2162158 - RNA, 14 nt, Human
augaucugaaaaau

SEQ ID NO: 2162159 - RNA, 18 nt, Human
uuguaaaaaaaaaaaaca

SEQ ID NO: 2162160 - RNA, 17 nt, Human
augacaacuacagaaaa

SEQ ID NO: 2162161 - RNA, 23 nt, Human
augacaaaaucaucuuugugaag

SEQ ID NO: 2162162 - RNA, 13 nt, Human
uugcuuguucucu

SEQ ID NO: 2162163 - RNA, 23 nt, Human
uugcugaaggcuaaauucacagc

SEQ ID NO: 2162164 - RNA, 17 nt, Human
uuggacggcugggcaca

SEQ ID NO: 2162165 - RNA, 17 nt, Human
aucuuugugaaggccuc

SEQ ID NO: 2162166 - RNA, 13 nt, Human
aucuuugugaagg

SEQ ID NO: 2162167 - RNA, 20 nt, Human
auuuucacacaauacaauaa

SEQ ID NO: 2162168 - RNA, 15 nt, Human
auuuuccucugcuuu

SEQ ID NO: 2162169 - RNA, 19 nt, Human
auuuuccucugcuuugaaa

SEQ ID NO: 2162170 - RNA, 15 nt, Human
auuuucauuaaaagc

SEQ ID NO: 2162171 - RNA, 13 nt, Human
auuuucauuuguu

SEQ ID NO: 2162172 - RNA, 23 nt, Human
auuucauuuuguaacaaaugaac

SEQ ID NO: 2162173 - RNA, 21 nt, Human
auuucauuuuguaacaaauga

SEQ ID NO: 2162174 - RNA, 21 nt, Human
auuucccccaccccauuucuc

SEQ ID NO: 2162175 - RNA, 23 nt, Human
auuucccccaccccauuucucuc

SEQ ID NO: 2162176 - RNA, 21 nt, Human
auuucccauccccugugggaa

SEQ ID NO: 2162177 - RNA, 15 nt, Human
auuuccccuuuugca

SEQ ID NO: 2162178 - RNA, 15 nt, Human
auuuacugugucuuu

SEQ ID NO: 2162179 - RNA, 12 nt, Human
auuuacuguuuu

SEQ ID NO: 2162180 - RNA, 22 nt, Human
auuuaaaaacaggcagcucaua

SEQ ID NO: 2162181 - RNA, 14 nt, Human
auuuaaaaaaauca

SEQ ID NO: 2162182 - RNA, 21 nt, Human
auuuaguaggugaguuuucac

SEQ ID NO: 2162183 - RNA, 13 nt, Human
auuuagauaugca

SEQ ID NO: 2162184 - RNA, 16 nt, Human
auuuauaaaaaggugu

SEQ ID NO: 2162185 - RNA, 16 nt, Human
auucuuauuuuuuaaa

SEQ ID NO: 2162186 - RNA, 18 nt, Human
auucuuauucaaagaaau

SEQ ID NO: 2162187 - RNA, 17 nt, Human
auucuuuuguaauuuaa

SEQ ID NO: 2162188 - RNA, 16 nt, Human
auucuuuuguaauuua

SEQ ID NO: 2162189 - RNA, 13 nt, Human
auucuuuuguaau

SEQ ID NO: 2162190 - RNA, 15 nt, Human
auucuuaaaaaaaga

SEQ ID NO: 2162191 - RNA, 17 nt, Human
auucugucauagaaagu

SEQ ID NO: 2162192 - RNA, 18 nt, Human
auucugucauagaaagug

SEQ ID NO: 2162193 - RNA, 12 nt, Human
auucuggaguca

SEQ ID NO: 2162194 - RNA, 15 nt, Human
auuguauuuguuucu

SEQ ID NO: 2162195 - RNA, 14 nt, Human
auucuccauuuguu

SEQ ID NO: 2162196 - RNA, 18 nt, Human
auucuccauuuguuaucu

SEQ ID NO: 2162197 - RNA, 16 nt, Human
auucuccauuuguuau

SEQ ID NO: 2162198 - RNA, 19 nt, Human
auucuccauuuguuaucug

SEQ ID NO: 2162199 - RNA, 16 nt, Human
auuccaacacugauuu

SEQ ID NO: 2162200 - RNA, 17 nt, Human
uuuuagggagcuggucu

SEQ ID NO: 2162201 - RNA, 18 nt, Human
uuuucauugaacagcaaa

SEQ ID NO: 2162202 - RNA, 22 nt, Human
uuuucuccaauuuuuuuuuccu

SEQ ID NO: 2162203 - RNA, 16 nt, Human
uuuucauauuugcacu

SEQ ID NO: 2162204 - RNA, 11 nt, Human
auuaaaaccac

SEQ ID NO: 2162205 - RNA, 21 nt, Human
augugcuacaggggccagaag

SEQ ID NO: 2162206 - RNA, 19 nt, Human
augugcuacaggggccaga

SEQ ID NO: 2162207 - RNA, 15 nt, Human
augugcuacaggggc

SEQ ID NO: 2162208 - RNA, 13 nt, Human
augugcuacaggg

SEQ ID NO: 2162209 - RNA, 23 nt, Human
augugcuacaggggccagaagau

SEQ ID NO: 2162210 - RNA, 17 nt, Human
auguggauuuuuuccua

SEQ ID NO: 2162211 - RNA, 16 nt, Human
auguucagaagaaauu

SEQ ID NO: 2162212 - RNA, 17 nt, Human
auguucagaagaaauuc

SEQ ID NO: 2162213 - RNA, 20 nt, Human
auuaauacaaugaugcuauu

SEQ ID NO: 2162214 - RNA, 23 nt, Human
uuuuuauugaaucuauuuaagua

SEQ ID NO: 2162215 - RNA, 15 nt, Human
uuuuuguguauuugu

SEQ ID NO: 2162216 - RNA, 22 nt, Human
uuuuuacguuugaagacauugc

SEQ ID NO: 2162217 - RNA, 14 nt, Human
uuuugagcaugggu

SEQ ID NO: 2162218 - RNA, 19 nt, Human
uuuugaucuucaacaaauu

SEQ ID NO: 2162219 - RNA, 18 nt, Human
uuuugaucuucaacaaau

SEQ ID NO: 2162220 - RNA, 13 nt, Human
uuuugaucuucaa

SEQ ID NO: 2162221 - RNA, 15 nt, Human
uuuugcauaauuuca

SEQ ID NO: 2162222 - RNA, 20 nt, Human
uuuugcaucucacaaacaua

SEQ ID NO: 2162223 - RNA, 18 nt, Human
cugucuaaaaaacaaaac

SEQ ID NO: 2162224 - RNA, 14 nt, Human
cugucuaaaaaaca

SEQ ID NO: 2162225 - RNA, 18 nt, Human
cuguaaauuuggcuucug

SEQ ID NO: 2162226 - RNA, 17 nt, Human
cuguaaauuuggcuucu

SEQ ID NO: 2162227 - RNA, 20 nt, Human
cuggucugaugacuugcuua

SEQ ID NO: 2162228 - RNA, 21 nt, Human
cugugaauugagcugcagaaa

SEQ ID NO: 2162229 - RNA, 19 nt, Human
cugugaauugagcugcaga

SEQ ID NO: 2162230 - RNA, 15 nt, Human
cugugaauugagcug

SEQ ID NO: 2162231 - RNA, 23 nt, Human
cugugaauugagcugcagaaacg

SEQ ID NO: 2162232 - RNA, 17 nt, Human
cuguuauccuauuuaga

SEQ ID NO: 2162233 - RNA, 20 nt, Human
cuuaaaauacgguaccuggc

SEQ ID NO: 2162234 - RNA, 14 nt, Human
cuuaaacaaaugua

SEQ ID NO: 2162235 - RNA, 16 nt, Human
cugccucucacagcug

SEQ ID NO: 2162236 - RNA, 14 nt, Human
cugccucucacagc

SEQ ID NO: 2162237 - RNA, 22 nt, Human
cugccucucacagcugaguugu

SEQ ID NO: 2162238 - RNA, 21 nt, Human
cugccucucacagcugaguug

SEQ ID NO: 2162239 - RNA, 20 nt, Human
cugcuacucaaguagcauuu

SEQ ID NO: 2162240 - RNA, 23 nt, Human
cugcuacucaaguagcauuuacu

SEQ ID NO: 2162241 - RNA, 19 nt, Human
cuggaaacauucaggagcu

SEQ ID NO: 2162242 - RNA, 17 nt, Human
cuggcagcucagcuucc

SEQ ID NO: 2162243 - RNA, 13 nt, Human
cuggcagcucagc

SEQ ID NO: 2162244 - RNA, 15 nt, Human
cuuuuuuucuuuggu

SEQ ID NO: 2162245 - RNA, 13 nt, Human
cuuuugugucuua

SEQ ID NO: 2162246 - RNA, 15 nt, Human
cuuuuuuuuguaugu

SEQ ID NO: 2162247 - RNA, 14 nt, Human
gaaaagcagcucuc

SEQ ID NO: 2162248 - RNA, 17 nt, Human
gaaaagcagcucucccc

SEQ ID NO: 2162249 - RNA, 18 nt, Human
gaaaagcggacaucagcu

SEQ ID NO: 2162250 - RNA, 13 nt, Human
gaaaauuaacacu

SEQ ID NO: 2162251 - RNA, 15 nt, Human
gaaaauuaacacugc

SEQ ID NO: 2162252 - RNA, 20 nt, Human
gaaaagcggacaucagcugg

SEQ ID NO: 2162253 - RNA, 20 nt, Human
gaaacuguucccaccugcug

SEQ ID NO: 2162254 - RNA, 21 nt, Human
gaaacuguucccaccugcugg

SEQ ID NO: 2162255 - RNA, 22 nt, Human
gaaacuguucccaccugcugga

SEQ ID NO: 2162256 - RNA, 16 nt, Human
gaaagacagagcuggg

SEQ ID NO: 2162257 - RNA, 14 nt, Human
gaaagacagagcug

SEQ ID NO: 2162258 - RNA, 17 nt, Human
gaaagaauuucauaugc

SEQ ID NO: 2162259 - RNA, 17 nt, Human
gaaagacagcuucucau

SEQ ID NO: 2162260 - RNA, 16 nt, Human
gaaagacagcuucuca

SEQ ID NO: 2162261 - RNA, 13 nt, Human
gaaagguuuugag

SEQ ID NO: 2162262 - RNA, 21 nt, Human
gaacaagcaaacccagacggc

SEQ ID NO: 2162263 - RNA, 16 nt, Human
gaacaagcaaacccag

SEQ ID NO: 2162264 - RNA, 18 nt, Human
cuugccgcgucgcccucc

SEQ ID NO: 2162265 - RNA, 21 nt, Human
cuugccgcgucgcccucccag

SEQ ID NO: 2162266 - RNA, 23 nt, Human
cuugccgcgucgcccucccaggc

SEQ ID NO: 2162267 - RNA, 20 nt, Human
cuugucucccagcucagggc

SEQ ID NO: 2162268 - RNA, 21 nt, Human
cuuuaagggaguguacuccca

SEQ ID NO: 2162269 - RNA, 23 nt, Human
cuuuaagggaguguacucccagg

SEQ ID NO: 2162270 - RNA, 21 nt, Human
cuucuucuacuucagucuucu

SEQ ID NO: 2162271 - RNA, 15 nt, Human
cuucuauaauuguau

SEQ ID NO: 2162272 - RNA, 16 nt, Human
cuucuauauauuguau

SEQ ID NO: 2162273 - RNA, 23 nt, Human
gaggggcagauggaaaggagccu

SEQ ID NO: 2162274 - RNA, 17 nt, Human
gagcuggccccgccgcc

SEQ ID NO: 2162275 - RNA, 16 nt, Human
gagcuggccccgccgc

SEQ ID NO: 2162276 - RNA, 14 nt, Human
gagcuggccccgcc

SEQ ID NO: 2162277 - RNA, 13 nt, Human
gagcuggccccgc

SEQ ID NO: 2162278 - RNA, 20 nt, Human
gagaggcaauggcuccuuca

SEQ ID NO: 2162279 - RNA, 20 nt, Human
gagacuccucaguucuugcc

SEQ ID NO: 2162280 - RNA, 18 nt, Human
gagaaguucauauuucuu

SEQ ID NO: 2162281 - RNA, 20 nt, Human
gagaccuggacacaggccug

SEQ ID NO: 2162282 - RNA, 19 nt, Human
gagaccuggacacaggccu

SEQ ID NO: 2162283 - RNA, 10 nt, Human
gagaaaaaga

SEQ ID NO: 2162284 - RNA, 19 nt, Human
gacuuuuuuuuuuuauaau

SEQ ID NO: 2162285 - RNA, 12 nt, Human
gagaaaaagacc

SEQ ID NO: 2162286 - RNA, 16 nt, Human
gagaaaaagaaaugca

SEQ ID NO: 2162287 - RNA, 15 nt, Human
gagaaaaagaaaugc

SEQ ID NO: 2162288 - RNA, 14 nt, Human
gagaaaaagaaaug

SEQ ID NO: 2162289 - RNA, 16 nt, Human
gaccuccaagccacug

SEQ ID NO: 2162290 - RNA, 13 nt, Human
gaccucagggcac

SEQ ID NO: 2162291 - RNA, 17 nt, Human
gacacugggaggccagu

SEQ ID NO: 2162292 - RNA, 16 nt, Human
gacacugggaggccag

SEQ ID NO: 2162293 - RNA, 23 nt, Human
gacacugggaggccagugagcca

SEQ ID NO: 2162294 - RNA, 20 nt, Human
gacaaaguuccaaaaugcca

SEQ ID NO: 2162295 - RNA, 18 nt, Human
gacaaaguuccaaaaugc

SEQ ID NO: 2162296 - RNA, 15 nt, Human
gaauuagcugcuucu

SEQ ID NO: 2162297 - RNA, 20 nt, Human
gacaaagaggccuuuaacca

SEQ ID NO: 2162298 - RNA, 21 nt, Human
gaauuaaguuagggaauggca

SEQ ID NO: 2162299 - RNA, 18 nt, Human
gaauuaaguuagggaaug

SEQ ID NO: 2162300 - RNA, 16 nt, Human
gaucucugcagggccg

SEQ ID NO: 2162301 - RNA, 15 nt, Human
gaucucugcagggcc

SEQ ID NO: 2162302 - RNA, 20 nt, Human
gaucucugcagggccgccag

SEQ ID NO: 2162303 - RNA, 17 nt, Human
gauacugucucuuucau

SEQ ID NO: 2162304 - RNA, 17 nt, Human
gaucaaaggcacacagc

SEQ ID NO: 2162305 - RNA, 13 nt, Human
gauauuugugcau

SEQ ID NO: 2162306 - RNA, 14 nt, Human
gcaaccugcuucca

SEQ ID NO: 2162307 - RNA, 23 nt, Human
gcaaccagggagcugcaggggca

SEQ ID NO: 2162308 - RNA, 17 nt, Human
gcaaccagggagcugca

SEQ ID NO: 2162309 - RNA, 16 nt, Human
gcauccccugccucca

SEQ ID NO: 2162310 - RNA, 17 nt, Human
gcauccccugccuccau

SEQ ID NO: 2162311 - RNA, 15 nt, Human
gcauccccugccucc

SEQ ID NO: 2162312 - RNA, 14 nt, Human
gcauccccugccuc

SEQ ID NO: 2162313 - RNA, 13 nt, Human
gcauccccugccu

SEQ ID NO: 2162314 - RNA, 19 nt, Human
gcauccuaaagauaaagcc

SEQ ID NO: 2162315 - RNA, 20 nt, Human
gcauccuaaagauaaagcca

SEQ ID NO: 2162316 - RNA, 23 nt, Human
gcauccacuucuuucagcagacu

SEQ ID NO: 2162317 - RNA, 13 nt, Human
gcaguuuaaagca

SEQ ID NO: 2162318 - RNA, 13 nt, Human
gcagugagcagag

SEQ ID NO: 2162319 - RNA, 17 nt, Human
gcagucuguccaggcuc

SEQ ID NO: 2162320 - RNA, 22 nt, Human
gcagcugaaauaugcuggcugg

SEQ ID NO: 2162321 - RNA, 19 nt, Human
gcagcugaaauaugcuggc

SEQ ID NO: 2162322 - RNA, 18 nt, Human
gcagcugaaauaugcugg

SEQ ID NO: 2162323 - RNA, 12 nt, Human
gcagcucucccc

SEQ ID NO: 2162324 - RNA, 20 nt, Human
gcagcucauaagagccacag

SEQ ID NO: 2162325 - RNA, 16 nt, Human
gcagaaaauugccuaa

SEQ ID NO: 2162326 - RNA, 23 nt, Human
gcagaaacgaagccaucuuucuu

SEQ ID NO: 2162327 - RNA, 17 nt, Human
gcagaaacgaagccauc

SEQ ID NO: 2162328 - RNA, 11 nt, Human
gcccccugccc

SEQ ID NO: 2162329 - RNA, 14 nt, Human
gcccaggaugcugc

SEQ ID NO: 2162330 - RNA, 18 nt, Human
gcauuuacugugucuuug

SEQ ID NO: 2162331 - RNA, 17 nt, Human
gcauuuacugugucuuu

SEQ ID NO: 2162332 - RNA, 17 nt, Human
gccgcgucgcccuccca

SEQ ID NO: 2162333 - RNA, 16 nt, Human
gcggcggagcuggccc

SEQ ID NO: 2162334 - RNA, 20 nt, Human
gcggcggagcuggccccgcc

SEQ ID NO: 2162335 - RNA, 18 nt, Human
gcggcggagcuggccccg

SEQ ID NO: 2162336 - RNA, 19 nt, Human
gcgggaauggcagcugcca

SEQ ID NO: 2162337 - RNA, 14 nt, Human
gcgggagccucccu

SEQ ID NO: 2162338 - RNA, 19 nt, Human
gcuauuaaaacucuuuuaa

SEQ ID NO: 2162339 - RNA, 18 nt, Human
gcuauuaaaacucuuuua

SEQ ID NO: 2162340 - RNA, 21 nt, Human
ggaaaggagccuaggccaggu

SEQ ID NO: 2162341 - RNA, 19 nt, Human
ggaaaggagccuaggccag

SEQ ID NO: 2162342 - RNA, 17 nt, Human
ggaaacuggaugagguc

SEQ ID NO: 2162343 - RNA, 19 nt, Human
ggaaaaaaaucguccaggg

SEQ ID NO: 2162344 - RNA, 13 nt, Human
ggaaacagaggcu

SEQ ID NO: 2162345 - RNA, 17 nt, Human
gcuuuugugucuuacau

SEQ ID NO: 2162346 - RNA, 19 nt, Human
gcuuugcaaccauuuucau

SEQ ID NO: 2162347 - RNA, 14 nt, Human
ggacaucagcuggu

SEQ ID NO: 2162348 - RNA, 20 nt, Human
ggacauccccccgccaaaag

SEQ ID NO: 2162349 - RNA, 18 nt, Human
ggacauagcgaauacaaa

SEQ ID NO: 2162350 - RNA, 17 nt, Human
ggacaguggcaggacag

SEQ ID NO: 2162351 - RNA, 16 nt, Human
ggacaguggcaggaca

SEQ ID NO: 2162352 - RNA, 12 nt, Human
ggacaguggcag

SEQ ID NO: 2162353 - RNA, 14 nt, Human
ggacaguggcagga

SEQ ID NO: 2162354 - RNA, 13 nt, Human
ggacaguggcagg

SEQ ID NO: 2162355 - RNA, 15 nt, Human
ggacacccccucgcu

SEQ ID NO: 2162356 - RNA, 20 nt, Human
ggaaugagauuaauuccuuu

SEQ ID NO: 2162357 - RNA, 18 nt, Human
ggacacaggccugcucuc

SEQ ID NO: 2162358 - RNA, 13 nt, Human
ggacacaggccug

SEQ ID NO: 2162359 - RNA, 15 nt, Human
gcugagcaaacaugu

SEQ ID NO: 2162360 - RNA, 15 nt, Human
gcugaggcaauucua

SEQ ID NO: 2162361 - RNA, 14 nt, Human
gcugaggcaauucu

SEQ ID NO: 2162362 - RNA, 18 nt, Human
gcugugcacaaaguggca

SEQ ID NO: 2162363 - RNA, 17 nt, Human
aaaauauuuugaucuuc

SEQ ID NO: 2162364 - RNA, 15 nt, Human
aaaauauuuugaucu

SEQ ID NO: 2162365 - RNA, 18 nt, Human
aaaaugcaacaacaugua

SEQ ID NO: 2162366 - RNA, 16 nt, Human
aaaauggaaccaggcu

SEQ ID NO: 2162367 - RNA, 23 nt, Human
aaaauggcuucagaauuaaaacu

SEQ ID NO: 2162368 - RNA, 16 nt, Human
gggccugcgagggcag

SEQ ID NO: 2162369 - RNA, 20 nt, Human
gggccgccagggagaccugg

SEQ ID NO: 2162370 - RNA, 17 nt, Human
gggccauguugugccuc

SEQ ID NO: 2162371 - RNA, 23 nt, Human
gggccgccagggagaccuggaca

SEQ ID NO: 2162372 - RNA, 17 nt, Human
gggccgggcagaggggc

SEQ ID NO: 2162373 - RNA, 23 nt, Human
aaacuuccagugcaacacugaag

SEQ ID NO: 2162374 - RNA, 19 nt, Human
gguccaggauuccucuuuu

SEQ ID NO: 2162375 - RNA, 16 nt, Human
ggucauagcagugcuu

SEQ ID NO: 2162376 - RNA, 21 nt, Human
gguccagaaggagacaggcag

SEQ ID NO: 2162377 - RNA, 20 nt, Human
aaacuguucccaccugcugg

SEQ ID NO: 2162378 - RNA, 21 nt, Human
aaacuguucccaccugcugga

SEQ ID NO: 2162379 - RNA, 14 nt, Human
aaacuaaaaauaau

SEQ ID NO: 2162380 - RNA, 13 nt, Human
aaacgcagacacu

SEQ ID NO: 2162381 - RNA, 17 nt, Human
gggguccagggagcagg

SEQ ID NO: 2162382 - RNA, 17 nt, Human
ggggcccaugaaagagg

SEQ ID NO: 2162383 - RNA, 15 nt, Human
aaaccaaaaacugaa

SEQ ID NO: 2162384 - RNA, 15 nt, Human
aaaccagaggcagcu

SEQ ID NO: 2162385 - RNA, 19 nt, Human
aaacgaagccaucuuucuu

SEQ ID NO: 2162386 - RNA, 18 nt, Human
aaacgaagccaucuuucu

SEQ ID NO: 2162387 - RNA, 11 nt, Human
aaaccuucaca

SEQ ID NO: 2162388 - RNA, 20 nt, Human
aaaccuucacacacagacug

SEQ ID NO: 2162389 - RNA, 12 nt, Human
gggucaaggaau

SEQ ID NO: 2162390 - RNA, 18 nt, Human
gggucauagauguuuccu

SEQ ID NO: 2162391 - RNA, 13 nt, Human
ggguccagaagga

SEQ ID NO: 2162392 - RNA, 13 nt, Human
aaacauuuucaca

SEQ ID NO: 2162393 - RNA, 14 nt, Human
aaacauuuucacac

SEQ ID NO: 2162394 - RNA, 16 nt, Human
aaacauuuucacacaa

SEQ ID NO: 2162395 - RNA, 22 nt, Human
aaacauuuucacacaauacaau

SEQ ID NO: 2162396 - RNA, 13 nt, Human
guaacaaaugaac

SEQ ID NO: 2162397 - RNA, 15 nt, Human
guaaauuuggcuucu

SEQ ID NO: 2162398 - RNA, 13 nt, Human
guaaauuuggcuu

SEQ ID NO: 2162399 - RNA, 16 nt, Human
guaaauuuggcuucug

SEQ ID NO: 2162400 - RNA, 14 nt, Human
guaaaguccccaga

SEQ ID NO: 2162401 - RNA, 20 nt, Human
guaaacgcugucccuaguaa

SEQ ID NO: 2162402 - RNA, 16 nt, Human
guaaacgcugucccua

SEQ ID NO: 2162403 - RNA, 23 nt, Human
aaauaucugagcucuuugcacua

SEQ ID NO: 2162404 - RNA, 12 nt, Human
aaauauugucuu

SEQ ID NO: 2162405 - RNA, 20 nt, Human
aaauauugucuuuuuguaug

SEQ ID NO: 2162406 - RNA, 17 nt, Human
aaauauugucuuuuugu

SEQ ID NO: 2162407 - RNA, 15 nt, Human
aaagcuguauuuuga

SEQ ID NO: 2162408 - RNA, 17 nt, Human
aaagcuguauuuugaaa

SEQ ID NO: 2162409 - RNA, 13 nt, Human
aaagguuuugagc

SEQ ID NO: 2162410 - RNA, 19 nt, Human
aaagguuguuuugaaacug

SEQ ID NO: 2162411 - RNA, 17 nt, Human
gguguugacaugugcuu

SEQ ID NO: 2162412 - RNA, 19 nt, Human
ggcacacgccucccacugg

SEQ ID NO: 2162413 - RNA, 18 nt, Human
ggcacacgccucccacug

SEQ ID NO: 2162414 - RNA, 17 nt, Human
ggcacacgccucccacu

SEQ ID NO: 2162415 - RNA, 15 nt, Human
ggcacacgccuccca

SEQ ID NO: 2162416 - RNA, 12 nt, Human
ggcacacgccuc

SEQ ID NO: 2162417 - RNA, 18 nt, Human
ggcagggccaacccuucu

SEQ ID NO: 2162418 - RNA, 22 nt, Human
ggcaggggagggucagccaggg

SEQ ID NO: 2162419 - RNA, 20 nt, Human
ggcaggggagggucagccag

SEQ ID NO: 2162420 - RNA, 23 nt, Human
ggccaacccuucuccucuuguaa

SEQ ID NO: 2162421 - RNA, 22 nt, Human
ggccagaccugcagacgcccag

SEQ ID NO: 2162422 - RNA, 18 nt, Human
ggccagaccugcagacgc

SEQ ID NO: 2162423 - RNA, 15 nt, Human
ggccagaccugcaga

SEQ ID NO: 2162424 - RNA, 22 nt, Human
ggaguggggaagugaucuuuug

SEQ ID NO: 2162425 - RNA, 19 nt, Human
ggaguguacucccagggcu

SEQ ID NO: 2162426 - RNA, 18 nt, Human
ggaguguacucccagggc

SEQ ID NO: 2162427 - RNA, 15 nt, Human
ggaguguacucccag

SEQ ID NO: 2162428 - RNA, 18 nt, Human
ggaucuauacuugcuuug

SEQ ID NO: 2162429 - RNA, 20 nt, Human
ggaggcuaaagcccagagac

SEQ ID NO: 2162430 - RNA, 18 nt, Human
ggagggggaauguaguga

SEQ ID NO: 2162431 - RNA, 16 nt, Human
ggccuggcagcucagc

SEQ ID NO: 2162432 - RNA, 14 nt, Human
ggccuggcagcuca

SEQ ID NO: 2162433 - RNA, 21 nt, Human
ggcgaucgcggcggagcuggc

SEQ ID NO: 2162434 - RNA, 17 nt, Human
ggccucccacagacuca

SEQ ID NO: 2162435 - RNA, 14 nt, Human
ggccucccacagac

SEQ ID NO: 2162436 - RNA, 16 nt, Human
ggccucccacagacuc

SEQ ID NO: 2162437 - RNA, 11 nt, Human
aaaaaaagaca

SEQ ID NO: 2162438 - RNA, 11 nt, Human
aaaaaaagaaa

SEQ ID NO: 2162439 - RNA, 11 nt, Human
aaaaaaaccaa

SEQ ID NO: 2162440 - RNA, 12 nt, Human
aaaaaagaaaau

SEQ ID NO: 2162441 - RNA, 22 nt, Human
ggcuggcaugauccaagcaaga

SEQ ID NO: 2162442 - RNA, 12 nt, Human
ggcuggcaugau

SEQ ID NO: 2162443 - RNA, 17 nt, Human
auuuauacuguauauau

SEQ ID NO: 2162444 - RNA, 16 nt, Human
auuuauacuggcaugc

SEQ ID NO: 2162445 - RNA, 15 nt, Human
auuuauacuggcaug

SEQ ID NO: 2162446 - RNA, 19 nt, Human
auuguacacaccuuauauu

SEQ ID NO: 2162447 - RNA, 14 nt, Human
auuguaaaacaggu

SEQ ID NO: 2162448 - RNA, 22 nt, Human
auucaucucucuuuaauauaaa

SEQ ID NO: 2162449 - RNA, 17 nt, Human
auucaucucucuuuaau

SEQ ID NO: 2162450 - RNA, 19 nt, Human
auugauauuugugcauuuu

SEQ ID NO: 2162451 - RNA, 22 nt, Human
auugauauuugugcauuuucua

SEQ ID NO: 2162452 - RNA, 18 nt, Human
auugauauuugugcauuu

SEQ ID NO: 2162453 - RNA, 16 nt, Human
auugauauuugugcau

SEQ ID NO: 2162454 - RNA, 13 nt, Human
auugauauuugug

SEQ ID NO: 2162455 - RNA, 17 nt, Human
auucuuucgaaagaaga

SEQ ID NO: 2162456 - RNA, 17 nt, Human
auuccucuuuucucugc

SEQ ID NO: 2162457 - RNA, 15 nt, Human
auuccucuuuucucu

SEQ ID NO: 2162458 - RNA, 12 nt, Human
auuccucuuuuc

SEQ ID NO: 2162459 - RNA, 15 nt, Human
auuuuauacauuaac

SEQ ID NO: 2162460 - RNA, 14 nt, Human
auuuuauaauucug

SEQ ID NO: 2162461 - RNA, 14 nt, Human
caaaccacacugga

SEQ ID NO: 2162462 - RNA, 14 nt, Human
caaaagcugcucag

SEQ ID NO: 2162463 - RNA, 15 nt, Human
caaaccacacuggac

SEQ ID NO: 2162464 - RNA, 12 nt, Human
caaaagcugcuc

SEQ ID NO: 2162465 - RNA, 23 nt, Human
caaaaaaaccucuuaauauucug

SEQ ID NO: 2162466 - RNA, 21 nt, Human
auuuuuacguuugaagacauu

SEQ ID NO: 2162467 - RNA, 17 nt, Human
caaauuuuauuuguagg

SEQ ID NO: 2162468 - RNA, 20 nt, Human
caaaucuaggaaaauauuuu

SEQ ID NO: 2162469 - RNA, 23 nt, Human
caaaucuaggaaaauauuuugau

SEQ ID NO: 2162470 - RNA, 12 nt, Human
caacacaaagag

SEQ ID NO: 2162471 - RNA, 15 nt, Human
caacacaaagagaaa

SEQ ID NO: 2162472 - RNA, 13 nt, Human
caacacaaagaga

SEQ ID NO: 2162473 - RNA, 23 nt, Human
caacacaaagagaaaaagaaaug

SEQ ID NO: 2162474 - RNA, 22 nt, Human
caacacaaagagaaaaagaaau

SEQ ID NO: 2162475 - RNA, 20 nt, Human
caacacaaagagaaaaagaa

SEQ ID NO: 2162476 - RNA, 16 nt, Human
caacacaaagagaaaa

SEQ ID NO: 2162477 - RNA, 19 nt, Human
caagauucccaggaguucu

SEQ ID NO: 2162478 - RNA, 16 nt, Human
caagauucccaggagu

SEQ ID NO: 2162479 - RNA, 15 nt, Human
caagauucccaggag

SEQ ID NO: 2162480 - RNA, 14 nt, Human
caagauucccagga

SEQ ID NO: 2162481 - RNA, 21 nt, Human
caagauucccaggaguucugc

SEQ ID NO: 2162482 - RNA, 20 nt, Human
caagauucccaggaguucug

SEQ ID NO: 2162483 - RNA, 13 nt, Human
caagauucccagg

SEQ ID NO: 2162484 - RNA, 17 nt, Human
caaguagcauuuacugu

SEQ ID NO: 2162485 - RNA, 16 nt, Human
caaguagcauuuacug

SEQ ID NO: 2162486 - RNA, 17 nt, Human
caaguuguucaaacauu

SEQ ID NO: 2162487 - RNA, 21 nt, Human
caauaaaaaaaagaaaugaaa

SEQ ID NO: 2162488 - RNA, 20 nt, Human
caauaaaaaaaagaaaugaa

SEQ ID NO: 2162489 - RNA, 19 nt, Human
caauaaaaaaaagaaauga

SEQ ID NO: 2162490 - RNA, 16 nt, Human
caauaaaaaaaagaaa

SEQ ID NO: 2162491 - RNA, 13 nt, Human
caauaaaaaaaag

SEQ ID NO: 2162492 - RNA, 19 nt, Human
caauucuuacaaacaugug

SEQ ID NO: 2162493 - RNA, 18 nt, Human
caauucuuacaaacaugu

SEQ ID NO: 2162494 - RNA, 17 nt, Human
caauucuuacaaacaug

SEQ ID NO: 2162495 - RNA, 12 nt, Human
caauuuaaagca

SEQ ID NO: 2162496 - RNA, 24 nt, Human
cacaucagcuccacuuucagugaa

SEQ ID NO: 2162497 - RNA, 23 nt, Human
cacagguaugaccuucuaggaag

SEQ ID NO: 2162498 - RNA, 23 nt, Human
caccuaaauaaccaaucuacaau

SEQ ID NO: 2162499 - RNA, 22 nt, Human
caccuaaauaaccaaucuacaa

SEQ ID NO: 2162500 - RNA, 23 nt, Human
caccucaagaagaagaggggcau

SEQ ID NO: 2162501 - RNA, 16 nt, Human
cacugaaauauacaca

SEQ ID NO: 2162502 - RNA, 20 nt, Human
cacugaaauauacacacagc

SEQ ID NO: 2162503 - RNA, 17 nt, Human
cacucuucucagccacu

SEQ ID NO: 2162504 - RNA, 14 nt, Human
cacucuucucagcc

SEQ ID NO: 2162505 - RNA, 13 nt, Human
cacucuucucagc

SEQ ID NO: 2162506 - RNA, 15 nt, Human
cacuaauacaccagg

SEQ ID NO: 2162507 - RNA, 11 nt, Human
cagaacacugu

SEQ ID NO: 2162508 - RNA, 19 nt, Human
cagaauagauagcacugaa

SEQ ID NO: 2162509 - RNA, 14 nt, Human
cagaauacacuuaa

SEQ ID NO: 2162510 - RNA, 19 nt, Human
cacuuucagugaaagcauc

SEQ ID NO: 2162511 - RNA, 18 nt, Human
cacuuucagugaaagcau

SEQ ID NO: 2162512 - RNA, 17 nt, Human
cacuuucagugaaagca

SEQ ID NO: 2162513 - RNA, 23 nt, Human
cagcugaugacucaagauuccca

SEQ ID NO: 2162514 - RNA, 22 nt, Human
cagcugaugacucaagauuccc

SEQ ID NO: 2162515 - RNA, 21 nt, Human
cagcugaugacucaagauucc

SEQ ID NO: 2162516 - RNA, 16 nt, Human
cagcugaugacucaag

SEQ ID NO: 2162517 - RNA, 15 nt, Human
cagcugaugacucaa

SEQ ID NO: 2162518 - RNA, 13 nt, Human
cagcugaugacuc

SEQ ID NO: 2162519 - RNA, 18 nt, Human
cagcugagugaaaaaucu

SEQ ID NO: 2162520 - RNA, 12 nt, Human
cagcugaguugu

SEQ ID NO: 2162521 - RNA, 23 nt, Human
cagcugagugaaaaaucugugga

SEQ ID NO: 2162522 - RNA, 22 nt, Human
cagccagggccugcgagggcag

SEQ ID NO: 2162523 - RNA, 21 nt, Human
cagccagggccugcgagggca

SEQ ID NO: 2162524 - RNA, 16 nt, Human
cagccagggccugcga

SEQ ID NO: 2162525 - RNA, 23 nt, Human
cagccagggccugcgagggcagc

SEQ ID NO: 2162526 - RNA, 20 nt, Human
cagggagcauuuuccuccau

SEQ ID NO: 2162527 - RNA, 14 nt, Human
cagggagcugcagg

SEQ ID NO: 2162528 - RNA, 17 nt, Human
cagggagcugcaggggc

SEQ ID NO: 2162529 - RNA, 15 nt, Human
cagggagcugcaggg

SEQ ID NO: 2162530 - RNA, 18 nt, Human
cagggagcugcaggggca

SEQ ID NO: 2162531 - RNA, 15 nt, Human
cagucaauuaacaau

SEQ ID NO: 2162532 - RNA, 14 nt, Human
cagucaauuaacaa

SEQ ID NO: 2162533 - RNA, 24 nt, Human
caggugcaaccagggagcugcagg

SEQ ID NO: 2162534 - RNA, 18 nt, Human
caggugcaaccagggagc

SEQ ID NO: 2162535 - RNA, 15 nt, Human
caggugcaaccaggg

SEQ ID NO: 2162536 - RNA, 14 nt, Human
cauguagaaaacaa

SEQ ID NO: 2162537 - RNA, 21 nt, Human
cauguugugccucccugguga

SEQ ID NO: 2162538 - RNA, 19 nt, Human
cauguugugccucccuggu

SEQ ID NO: 2162539 - RNA, 18 nt, Human
cauguugugccucccugg

SEQ ID NO: 2162540 - RNA, 13 nt, Human
cauguugugccuc

SEQ ID NO: 2162541 - RNA, 20 nt, Human
cauguugugccucccuggug

SEQ ID NO: 2162542 - RNA, 22 nt, Human
cauucuaaugauggcccauucu

SEQ ID NO: 2162543 - RNA, 13 nt, Human
cauucuaaugaug

SEQ ID NO: 2162544 - RNA, 21 nt, Human
cauucuacuugcucuggaccu

SEQ ID NO: 2162545 - RNA, 20 nt, Human
cauucuacuugcucuggacc

SEQ ID NO: 2162546 - RNA, 18 nt, Human
cauucuacuugcucugga

SEQ ID NO: 2162547 - RNA, 17 nt, Human
cauucuacuugcucugg

SEQ ID NO: 2162548 - RNA, 16 nt, Human
cauucuacuugcucug

SEQ ID NO: 2162549 - RNA, 15 nt, Human
cauucuacuugcucu

SEQ ID NO: 2162550 - RNA, 14 nt, Human
cauucuacuugcuc

SEQ ID NO: 2162551 - RNA, 13 nt, Human
cauucuacuugcu

SEQ ID NO: 2162552 - RNA, 19 nt, Human
cauucuaaugauggcccau

SEQ ID NO: 2162553 - RNA, 12 nt, Human
cauucuacuugc

SEQ ID NO: 2162554 - RNA, 11 nt, Human
cauucuacuug

SEQ ID NO: 2162555 - RNA, 23 nt, Human
cauucuacuugcucuggaccugc

SEQ ID NO: 2162556 - RNA, 22 nt, Human
cauucuacuugcucuggaccug

SEQ ID NO: 2162557 - RNA, 23 nt, Human
cauucuaggccuccuggcccagg

SEQ ID NO: 2162558 - RNA, 20 nt, Human
caugauuuacagagaaguga

SEQ ID NO: 2162559 - RNA, 16 nt, Human
caugauuuacagagaa

SEQ ID NO: 2162560 - RNA, 21 nt, Human
caucgccagcugaugacucaa

SEQ ID NO: 2162561 - RNA, 20 nt, Human
caucgccagcugaugacuca

SEQ ID NO: 2162562 - RNA, 16 nt, Human
caucgccagcugauga

SEQ ID NO: 2162563 - RNA, 13 nt, Human
caucgccagacaa

SEQ ID NO: 2162564 - RNA, 14 nt, Human
caucgcacugugga

SEQ ID NO: 2162565 - RNA, 13 nt, Human
caucgcacugugg

SEQ ID NO: 2162566 - RNA, 15 nt, Human
cauccccugugggaa

SEQ ID NO: 2162567 - RNA, 14 nt, Human
cauauuaauacaau

SEQ ID NO: 2162568 - RNA, 23 nt, Human
cauauuaauacaaugaugcuauu

SEQ ID NO: 2162569 - RNA, 12 nt, Human
cauuuguauauu

SEQ ID NO: 2162570 - RNA, 15 nt, Human
ccaaucauauuaaua

SEQ ID NO: 2162571 - RNA, 22 nt, Human
ccgcauccccugccuccauccu

SEQ ID NO: 2162572 - RNA, 18 nt, Human
ccgcauccccugccucca

SEQ ID NO: 2162573 - RNA, 17 nt, Human
ccgcauccccugccucc

SEQ ID NO: 2162574 - RNA, 16 nt, Human
ccgcauccccugccuc

SEQ ID NO: 2162575 - RNA, 15 nt, Human
ccgcauccccugccu

SEQ ID NO: 2162576 - RNA, 14 nt, Human
ccgcauccccugcc

SEQ ID NO: 2162577 - RNA, 13 nt, Human
ccgcauccccugc

SEQ ID NO: 2162578 - RNA, 16 nt, Human
cccugucugccagggc

SEQ ID NO: 2162579 - RNA, 18 nt, Human
ccuguaaucccagcacuu

SEQ ID NO: 2162580 - RNA, 15 nt, Human
ccugguuuagccugg

SEQ ID NO: 2162581 - RNA, 15 nt, Human
ccugucugccagggc

SEQ ID NO: 2162582 - RNA, 17 nt, Human
ccugccuccauccuagu

SEQ ID NO: 2162583 - RNA, 14 nt, Human
ccugccuccauccu

SEQ ID NO: 2162584 - RNA, 11 nt, Human
ccauuucucuc

SEQ ID NO: 2162585 - RNA, 22 nt, Human
cccagggcuuacggcccuggcc

SEQ ID NO: 2162586 - RNA, 15 nt, Human
cccucagagugcaag

SEQ ID NO: 2162587 - RNA, 17 nt, Human
cccucaagaggaaguga

SEQ ID NO: 2162588 - RNA, 11 nt, Human
ccauugaaggc

SEQ ID NO: 2162589 - RNA, 12 nt, Human
ccauugaaggcu

SEQ ID NO: 2162590 - RNA, 22 nt, Human
ccauucuuuuguaauuuaaaug

SEQ ID NO: 2162591 - RNA, 18 nt, Human
ccauucuuuuguaauuua

SEQ ID NO: 2162592 - RNA, 16 nt, Human
ccauucuuuuguaauu

SEQ ID NO: 2162593 - RNA, 15 nt, Human
ccauucuuuuguaau

SEQ ID NO: 2162594 - RNA, 17 nt, Human
ccauugaaggcuuaaac

SEQ ID NO: 2162595 - RNA, 21 nt, Human
ccauugaaggcuuaaacccau

SEQ ID NO: 2162596 - RNA, 21 nt, Human
ccagucacugugagcucccag

SEQ ID NO: 2162597 - RNA, 15 nt, Human
ccaggauuccucuuu

SEQ ID NO: 2162598 - RNA, 18 nt, Human
ccaggauuccucuuuucu

SEQ ID NO: 2162599 - RNA, 17 nt, Human
ccagcuacaccuuucuc

SEQ ID NO: 2162600 - RNA, 22 nt, Human
cgugaucaaagccacacucugg

SEQ ID NO: 2162601 - RNA, 17 nt, Human
cgccuggguccagggga

SEQ ID NO: 2162602 - RNA, 21 nt, Human
cggagcuggccccgccgccug

SEQ ID NO: 2162603 - RNA, 16 nt, Human
cggagcuggccccgcc

SEQ ID NO: 2162604 - RNA, 13 nt, Human
cggagcuggcccc

SEQ ID NO: 2162605 - RNA, 15 nt, Human
cggcuccacuaggac

SEQ ID NO: 2162606 - RNA, 18 nt, Human
cgggcgcacugccucuca

SEQ ID NO: 2162607 - RNA, 15 nt, Human
cgggcgcacugccuc

SEQ ID NO: 2162608 - RNA, 22 nt, Human
cgggcgcacugccucucacagc

SEQ ID NO: 2162609 - RNA, 17 nt, Human
cgggcgcacugccucuc

SEQ ID NO: 2162610 - RNA, 16 nt, Human
cgggcgcacugccucu

SEQ ID NO: 2162611 - RNA, 20 nt, Human
ccuuuuuuaaaaguaaaugu

SEQ ID NO: 2162612 - RNA, 13 nt, Human
ccuuuuuuaaaag

SEQ ID NO: 2162613 - RNA, 16 nt, Human
cgacagcauuuuccuc

SEQ ID NO: 2162614 - RNA, 17 nt, Human
cgacacugggaggccag

SEQ ID NO: 2162615 - RNA, 19 nt, Human
ccuuuacggacacccccuc

SEQ ID NO: 2162616 - RNA, 14 nt, Human
ccuuuacggacacc

SEQ ID NO: 2162617 - RNA, 14 nt, Human
cgccucccacuggg

SEQ ID NO: 2162618 - RNA, 13 nt, Human
cgccucccacugg

SEQ ID NO: 2162619 - RNA, 23 nt, Human
cgcaggagcacacccagccccca

SEQ ID NO: 2162620 - RNA, 18 nt, Human
cgcaggagcacacccagc

SEQ ID NO: 2162621 - RNA, 17 nt, Human
cuaauuuauaaaaaggu

SEQ ID NO: 2162622 - RNA, 13 nt, Human
cuaauuuauaaaa

SEQ ID NO: 2162623 - RNA, 14 nt, Human
cuaauuuauaaaaa

SEQ ID NO: 2162624 - RNA, 17 nt, Human
cuaauucuugcauauuu

SEQ ID NO: 2162625 - RNA, 21 nt, Human
cuacucauacuuaagcaaaag

SEQ ID NO: 2162626 - RNA, 20 nt, Human
cuacucauacuuaagcaaaa

SEQ ID NO: 2162627 - RNA, 11 nt, Human
cucaauauuuu

SEQ ID NO: 2162628 - RNA, 17 nt, Human
cucucacagcugaguug

SEQ ID NO: 2162629 - RNA, 16 nt, Human
cucguucucccuggga

SEQ ID NO: 2162630 - RNA, 21 nt, Human
cucuaaagaguuuauuuuaag

SEQ ID NO: 2162631 - RNA, 14 nt, Human
cucguucucccugg

SEQ ID NO: 2162632 - RNA, 13 nt, Human
cuccaagccagcg

SEQ ID NO: 2162633 - RNA, 16 nt, Human
cuccaacucagaaggg

SEQ ID NO: 2162634 - RNA, 16 nt, Human
cucauguucugcuuuc

SEQ ID NO: 2162635 - RNA, 15 nt, Human
cucauguucugcuuu

SEQ ID NO: 2162636 - RNA, 21 nt, Human
cugaccugguccacagggcac

SEQ ID NO: 2162637 - RNA, 20 nt, Human
cugaccugguccacagggca

SEQ ID NO: 2162638 - RNA, 18 nt, Human
cugaccugguccacaggg

SEQ ID NO: 2162639 - RNA, 17 nt, Human
cugaccugguccacagg

SEQ ID NO: 2162640 - RNA, 16 nt, Human
cugaccugguccacag

SEQ ID NO: 2162641 - RNA, 12 nt, Human
cucuuuucucug

SEQ ID NO: 2162642 - RNA, 19 nt, Human
cugaagccuuucuuuugga

SEQ ID NO: 2162643 - RNA, 18 nt, Human
aaguuguucaaacauuua

SEQ ID NO: 2162644 - RNA, 22 nt, Human
aauaaguuaacuauuuuauuuu

SEQ ID NO: 2162645 - RNA, 13 nt, Human
aagguuguauugc

SEQ ID NO: 2162646 - RNA, 17 nt, Human
aagguuguauugcauau

SEQ ID NO: 2162647 - RNA, 18 nt, Human
aagguuguuuugaaacug

SEQ ID NO: 2162648 - RNA, 15 nt, Human
aaguaugggaaauga

SEQ ID NO: 2162649 - RNA, 21 nt, Human
aagucucucauucuaggccuc

SEQ ID NO: 2162650 - RNA, 17 nt, Human
aagucucuaacaaugua

SEQ ID NO: 2162651 - RNA, 15 nt, Human
aagaacaauauugac

SEQ ID NO: 2162652 - RNA, 21 nt, Human
aagaacaauauugacuuuguc

SEQ ID NO: 2162653 - RNA, 16 nt, Human
aagaaaugcaaaaauc

SEQ ID NO: 2162654 - RNA, 20 nt, Human
aagccagaagcuaagcugca

SEQ ID NO: 2162655 - RNA, 17 nt, Human
aagcagcucuccccuca

SEQ ID NO: 2162656 - RNA, 14 nt, Human
aagcagcucucccc

SEQ ID NO: 2162657 - RNA, 13 nt, Human
aagcagcucuccc

SEQ ID NO: 2162658 - RNA, 16 nt, Human
aagcagagaagcucuc

SEQ ID NO: 2162659 - RNA, 14 nt, Human
aagcagagaagcuc

SEQ ID NO: 2162660 - RNA, 15 nt, Human
aagccaucuuucuuu

SEQ ID NO: 2162661 - RNA, 13 nt, Human
aauauacacacag

SEQ ID NO: 2162662 - RNA, 14 nt, Human
aauauaauacugua

SEQ ID NO: 2162663 - RNA, 18 nt, Human
aauaugguguacauucuu

SEQ ID NO: 2162664 - RNA, 17 nt, Human
aaugaucuuuucaaguu

SEQ ID NO: 2162665 - RNA, 21 nt, Human
aaucugcugguuuuaacaacu

SEQ ID NO: 2162666 - RNA, 17 nt, Human
aaugucuucuagaauau

SEQ ID NO: 2162667 - RNA, 22 nt, Human
aaagucucucauucuaggccuc

SEQ ID NO: 2162668 - RNA, 20 nt, Human
aaagugaaaguccagaaacu

SEQ ID NO: 2162669 - RNA, 14 nt, Human
aaagugcugcggag

SEQ ID NO: 2162670 - RNA, 12 nt, Human
aaauaaagcccu

SEQ ID NO: 2162671 - RNA, 23 nt, Human
aaauggcugcaucccccccaccu

SEQ ID NO: 2162672 - RNA, 22 nt, Human
aaauggcuucagaauuaaaacu

SEQ ID NO: 2162673 - RNA, 20 nt, Human
aaacagacucgauucauauu

SEQ ID NO: 2162674 - RNA, 20 nt, Human
aaagauauaugaauaugaca

SEQ ID NO: 2162675 - RNA, 21 nt, Human
aacuuauuaaauggaaacuga

SEQ ID NO: 2162676 - RNA, 13 nt, Human
aacucaauauuuu

SEQ ID NO: 2162677 - RNA, 12 nt, Human
aacucaauauuu

SEQ ID NO: 2162678 - RNA, 21 nt, Human
aacucaauauuuuccaugaaa

SEQ ID NO: 2162679 - RNA, 20 nt, Human
aacucaauauuuuccaugaa

SEQ ID NO: 2162680 - RNA, 14 nt, Human
aacucaauauuuuc

SEQ ID NO: 2162681 - RNA, 9 nt, Human
aacaaaaca

SEQ ID NO: 2162682 - RNA, 20 nt, Human
accugcccccgcauccccug

SEQ ID NO: 2162683 - RNA, 18 nt, Human
accugcccccgcaucccc

SEQ ID NO: 2162684 - RNA, 23 nt, Human
accugcccccgcauccccugccu

SEQ ID NO: 2162685 - RNA, 16 nt, Human
accucuuaauauucug

SEQ ID NO: 2162686 - RNA, 18 nt, Human
accuuucaaagccauuuu

SEQ ID NO: 2162687 - RNA, 15 nt, Human
accuuucaaagccau

SEQ ID NO: 2162688 - RNA, 18 nt, Human
accuuucauaaucuuugc

SEQ ID NO: 2162689 - RNA, 14 nt, Human
acucugggcuccag

SEQ ID NO: 2162690 - RNA, 16 nt, Human
acucugggcuccagag

SEQ ID NO: 2162691 - RNA, 14 nt, Human
acucaaaggccaga

SEQ ID NO: 2162692 - RNA, 22 nt, Human
acucagcucuuggcuccacugg

SEQ ID NO: 2162693 - RNA, 15 nt, Human
acuaggauacugcug

SEQ ID NO: 2162694 - RNA, 21 nt, Human
acuagggugaggguuuucugu

SEQ ID NO: 2162695 - RNA, 17 nt, Human
acuaggggacaaagcaa

SEQ ID NO: 2162696 - RNA, 22 nt, Human
agaaaauggaaccaggcuugga

SEQ ID NO: 2162697 - RNA, 14 nt, Human
acuuucauuggaaa

SEQ ID NO: 2162698 - RNA, 18 nt, Human
acuuucagugaaagcauc

SEQ ID NO: 2162699 - RNA, 12 nt, Human
acugcauuuuag

SEQ ID NO: 2162700 - RNA, 18 nt, Human
acuggacuccggcccucc

SEQ ID NO: 2162701 - RNA, 19 nt, Human
acuggacuccggcccuccu

SEQ ID NO: 2162702 - RNA, 16 nt, Human
acuggacuccggcccu

SEQ ID NO: 2162703 - RNA, 14 nt, Human
acuggacuccggcc

SEQ ID NO: 2162704 - RNA, 21 nt, Human
acugugagcucccaggugcag

SEQ ID NO: 2162705 - RNA, 18 nt, Human
acugugaugcccugcccu

SEQ ID NO: 2162706 - RNA, 23 nt, Human
acugucuguguuuuuuuggcagu

SEQ ID NO: 2162707 - RNA, 15 nt, Human
acuucuuucagcaga

SEQ ID NO: 2162708 - RNA, 15 nt, Human
acuguugucccugca

SEQ ID NO: 2162709 - RNA, 24 nt, Human
acuguuuuaauuuauacuggcaug

SEQ ID NO: 2162710 - RNA, 15 nt, Human
acaucgcacugugga

SEQ ID NO: 2162711 - RNA, 16 nt, Human
acauccugugccucca

SEQ ID NO: 2162712 - RNA, 13 nt, Human
acauaaagcaaau

SEQ ID NO: 2162713 - RNA, 18 nt, Human
acauaaagcaaauagaca

SEQ ID NO: 2162714 - RNA, 15 nt, Human
acauaaagcaaauag

SEQ ID NO: 2162715 - RNA, 21 nt, Human
acauaaagcaaauagacacag

SEQ ID NO: 2162716 - RNA, 21 nt, Human
acauuuguagcauccucuuua

SEQ ID NO: 2162717 - RNA, 14 nt, Human
accccgucaacaaa

SEQ ID NO: 2162718 - RNA, 21 nt, Human
acaaagagaaaaagaaaugca

SEQ ID NO: 2162719 - RNA, 20 nt, Human
acaaagagaaaaagaaaugc

SEQ ID NO: 2162720 - RNA, 14 nt, Human
acaaagagaaaaag

SEQ ID NO: 2162721 - RNA, 15 nt, Human
aauuuuauaaacaaa

SEQ ID NO: 2162722 - RNA, 14 nt, Human
aauuauaaaagcca

SEQ ID NO: 2162723 - RNA, 22 nt, Human
acacaaagagaaaaagaaaugc

SEQ ID NO: 2162724 - RNA, 22 nt, Human
acaaugugucuuucuuuuugga

SEQ ID NO: 2162725 - RNA, 17 nt, Human
acaauguuaacauuuuu

SEQ ID NO: 2162726 - RNA, 23 nt, Human
acaaugugucuuucuuuuuggac

SEQ ID NO: 2162727 - RNA, 15 nt, Human
acacagacucauauu

SEQ ID NO: 2162728 - RNA, 16 nt, Human
acacagacucauauua

SEQ ID NO: 2162729 - RNA, 14 nt, Human
acaccagacagaca

SEQ ID NO: 2162730 - RNA, 22 nt, Human
acagguagaauuaucuaauuua

SEQ ID NO: 2162731 - RNA, 14 nt, Human
acaggggccagaag

SEQ ID NO: 2162732 - RNA, 12 nt, Human
acaggggccaga

SEQ ID NO: 2162733 - RNA, 23 nt, Human
acaggggccagaagaugaacaga

SEQ ID NO: 2162734 - RNA, 17 nt, Human
acaggggccagaagaug

SEQ ID NO: 2162735 - RNA, 18 nt, Human
acagcccaaagaaggaaa

SEQ ID NO: 2162736 - RNA, 17 nt, Human
acagcccaaagaaggaa

SEQ ID NO: 2162737 - RNA, 16 nt, Human
acagcccaaagaagga

SEQ ID NO: 2162738 - RNA, 19 nt, Human
acagcauuuuccucugcuu

SEQ ID NO: 2162739 - RNA, 14 nt, Human
acagcauuuuccuc

SEQ ID NO: 2162740 - RNA, 18 nt, Human
acagcauuuuccucugcu

SEQ ID NO: 2162741 - RNA, 15 nt, Human
acagcauuuuccucu

SEQ ID NO: 2162742 - RNA, 23 nt, Human
acagaguacuuggcuguuagccc

SEQ ID NO: 2162743 - RNA, 22 nt, Human
acacugauuuccccuuuugcau

SEQ ID NO: 2162744 - RNA, 21 nt, Human
acacugaagcucuugaagaca

SEQ ID NO: 2162745 - RNA, 20 nt, Human
acagaagaaggcagcaggug

SEQ ID NO: 2162746 - RNA, 16 nt, Human
acagaagaaggcagca

SEQ ID NO: 2162747 - RNA, 14 nt, Human
acagaacacugucu

SEQ ID NO: 2162748 - RNA, 12 nt, Human
acagaacacugu

SEQ ID NO: 2162749 - RNA, 13 nt, Human
acacugucuugaa

SEQ ID NO: 2162750 - RNA, 21 nt, Human
acacugauuuccccuuuugca

SEQ ID NO: 2162751 - RNA, 22 nt, Human
auauccuucuagaucauacaca

SEQ ID NO: 2162752 - RNA, 14 nt, Human
auauuuagcuccaa

SEQ ID NO: 2162753 - RNA, 16 nt, Human
auauagcccagccagg

SEQ ID NO: 2162754 - RNA, 21 nt, Human
auacuuccuuaugcuucuuuc

SEQ ID NO: 2162755 - RNA, 19 nt, Human
auaacagauuuuuuuugga

SEQ ID NO: 2162756 - RNA, 14 nt, Human
auacuuaagcaaaa

SEQ ID NO: 2162757 - RNA, 16 nt, Human
auacuuaagcaaaagu

SEQ ID NO: 2162758 - RNA, 17 nt, Human
auaccugggauacugug

SEQ ID NO: 2162759 - RNA, 13 nt, Human
auaccuaagcaaa

SEQ ID NO: 2162760 - RNA, 20 nt, Human
auaccugggauacugugccc

SEQ ID NO: 2162761 - RNA, 16 nt, Human
aguuaacuauuuuauu

SEQ ID NO: 2162762 - RNA, 18 nt, Human
agugugaauaaagugcug

SEQ ID NO: 2162763 - RNA, 20 nt, Human
agugugaagcuuccuuggcu

SEQ ID NO: 2162764 - RNA, 20 nt, Human
agucauucucauugaauuau

SEQ ID NO: 2162765 - RNA, 22 nt, Human
aucuuaucaagaguugugacaa

SEQ ID NO: 2162766 - RNA, 15 nt, Human
aucugggcacugaag

SEQ ID NO: 2162767 - RNA, 16 nt, Human
augacuaauucuugca

SEQ ID NO: 2162768 - RNA, 17 nt, Human
augacuaauucuugcau

SEQ ID NO: 2162769 - RNA, 19 nt, Human
augacucaggacauccccc

SEQ ID NO: 2162770 - RNA, 23 nt, Human
augacucaagauucccaggaguu

SEQ ID NO: 2162771 - RNA, 22 nt, Human
augacucaagauucccaggagu

SEQ ID NO: 2162772 - RNA, 21 nt, Human
augacucaagauucccaggag

SEQ ID NO: 2162773 - RNA, 20 nt, Human
augacucaagauucccagga

SEQ ID NO: 2162774 - RNA, 19 nt, Human
augacucaagauucccagg

SEQ ID NO: 2162775 - RNA, 16 nt, Human
augacucaagauuccc

SEQ ID NO: 2162776 - RNA, 15 nt, Human
augacucaagauucc

SEQ ID NO: 2162777 - RNA, 22 nt, Human
aucccuaggucuugggagcucu

SEQ ID NO: 2162778 - RNA, 16 nt, Human
augugggucaaggaau

SEQ ID NO: 2162779 - RNA, 21 nt, Human
augugguuacacagugugaau

SEQ ID NO: 2162780 - RNA, 17 nt, Human
auguacaggaugcuuug

SEQ ID NO: 2162781 - RNA, 14 nt, Human
auguacaggaugcu

SEQ ID NO: 2162782 - RNA, 20 nt, Human
auguacaauaagaacuucua

SEQ ID NO: 2162783 - RNA, 20 nt, Human
auguacaggaugcuuugguu

SEQ ID NO: 2162784 - RNA, 14 nt, Human
augccuuuuauuuc

SEQ ID NO: 2162785 - RNA, 19 nt, Human
augaugugggucaaggaau

SEQ ID NO: 2162786 - RNA, 14 nt, Human
augcuucuuucaaa

SEQ ID NO: 2162787 - RNA, 21 nt, Human
auggaaaacgcucucuacucu

SEQ ID NO: 2162788 - RNA, 19 nt, Human
auggaaaacgcucucuacu

SEQ ID NO: 2162789 - RNA, 21 nt, Human
auggauggaaaacgcucucua

SEQ ID NO: 2162790 - RNA, 12 nt, Human
auggauggaaaa

SEQ ID NO: 2162791 - RNA, 18 nt, Human
augggaaggugggcgggc

SEQ ID NO: 2162792 - RNA, 21 nt, Human
augggaaggugggcgggcagg

SEQ ID NO: 2162793 - RNA, 13 nt, Human
agcccugacccug

SEQ ID NO: 2162794 - RNA, 21 nt, Human
agcccugacccuguggaagca

SEQ ID NO: 2162795 - RNA, 17 nt, Human
agcccugacccugugga

SEQ ID NO: 2162796 - RNA, 15 nt, Human
agcccugacccugug

SEQ ID NO: 2162797 - RNA, 16 nt, Human
agcccaaagaaggaaa

SEQ ID NO: 2162798 - RNA, 14 nt, Human
agcccaaagaagga

SEQ ID NO: 2162799 - RNA, 16 nt, Human
agccaaggcucuguuu

SEQ ID NO: 2162800 - RNA, 21 nt, Human
agccaaggcucuguuuaugcu

SEQ ID NO: 2162801 - RNA, 17 nt, Human
agcaugaucugaaaaau

SEQ ID NO: 2162802 - RNA, 14 nt, Human
agagaaagcgcaga

SEQ ID NO: 2162803 - RNA, 19 nt, Human
agacugaucaggaccucca

SEQ ID NO: 2162804 - RNA, 17 nt, Human
agacugaucaggaccuc

SEQ ID NO: 2162805 - RNA, 16 nt, Human
agacugaucaggaccu

SEQ ID NO: 2162806 - RNA, 14 nt, Human
agacugaucaggac

SEQ ID NO: 2162807 - RNA, 14 nt, Human
agacguguuugugu

SEQ ID NO: 2162808 - RNA, 13 nt, Human
agacuaaaugaaa

SEQ ID NO: 2162809 - RNA, 12 nt, Human
agacuaaaugaa

SEQ ID NO: 2162810 - RNA, 19 nt, Human
agaucuucaaacagaauaa

SEQ ID NO: 2162811 - RNA, 15 nt, Human
agauaguuacuauau

SEQ ID NO: 2162812 - RNA, 18 nt, Human
agaggauaauuagcaucu

SEQ ID NO: 2162813 - RNA, 18 nt, Human
agaggaugcugugaaauu

SEQ ID NO: 2162814 - RNA, 18 nt, Human
agaggggcagauggaaag

SEQ ID NO: 2162815 - RNA, 17 nt, Human
agauacuuugcuagccg

SEQ ID NO: 2162816 - RNA, 21 nt, Human
agggacgcuuugggagaaugu

SEQ ID NO: 2162817 - RNA, 19 nt, Human
aggggcagauggaaaggag

SEQ ID NO: 2162818 - RNA, 15 nt, Human
aggggcagauggaaa

SEQ ID NO: 2162819 - RNA, 19 nt, Human
agggcacaggccauggaug

SEQ ID NO: 2162820 - RNA, 17 nt, Human
agggcacaggccaugga

SEQ ID NO: 2162821 - RNA, 14 nt, Human
agggcacaggccau

SEQ ID NO: 2162822 - RNA, 16 nt, Human
agggcacaaagauggg

SEQ ID NO: 2162823 - RNA, 15 nt, Human
agcuuccuuggcuuu

SEQ ID NO: 2162824 - RNA, 14 nt, Human
agcuuccuuggcuu

SEQ ID NO: 2162825 - RNA, 19 nt, Human
agcuucucauccugcaggc

SEQ ID NO: 2162826 - RNA, 15 nt, Human
agcugagugaaaaau

SEQ ID NO: 2162827 - RNA, 16 nt, Human
agcuccucacucaccu

SEQ ID NO: 2162828 - RNA, 16 nt, Human
aggauuccucuuuucu

SEQ ID NO: 2162829 - RNA, 15 nt, Human
aggauuccucuuuuc

SEQ ID NO: 2162830 - RNA, 19 nt, Human
aggauuccucuuuucucug

SEQ ID NO: 2162831 - RNA, 21 nt, Human
aggagaacucauguuauuuuu

SEQ ID NO: 2162832 - RNA, 15 nt, Human
aggaccuccaagcca

SEQ ID NO: 2162833 - RNA, 21 nt, Human
aggaccuccaagccacugagc

SEQ ID NO: 2162834 - RNA, 14 nt, Human
aaaaagaaguaggg

SEQ ID NO: 2162835 - RNA, 19 nt, Human
aaaaacuuugccagccauu

SEQ ID NO: 2162836 - RNA, 16 nt, Human
aaaaagaugacccauu

SEQ ID NO: 2162837 - RNA, 14 nt, Human
aaaaagacagggcu

SEQ ID NO: 2162838 - RNA, 18 nt, Human
aaaaauugguucuuuauu

SEQ ID NO: 2162839 - RNA, 23 nt, Human
cacugauuuccccuuuugcauuc

SEQ ID NO: 2162840 - RNA, 15 nt, Human
cacugauuuccccuu

SEQ ID NO: 2162841 - RNA, 17 nt, Human
cacugagaucuguuuga

SEQ ID NO: 2162842 - RNA, 16 nt, Human
cacucugggcuccaga

SEQ ID NO: 2162843 - RNA, 17 nt, Human
cacucugggcuccagag

SEQ ID NO: 2162844 - RNA, 14 nt, Human
cacucugggcucca

SEQ ID NO: 2162845 - RNA, 15 nt, Human
cacucugggcuccag

SEQ ID NO: 2162846 - RNA, 16 nt, Human
cacugccucucacagc

SEQ ID NO: 2162847 - RNA, 17 nt, Human
cacugccucucacagcu

SEQ ID NO: 2162848 - RNA, 15 nt, Human
cacugccucucacag

SEQ ID NO: 2162849 - RNA, 14 nt, Human
cacugccucucaca

SEQ ID NO: 2162850 - RNA, 19 nt, Human
cacuggacuccggcccucc

SEQ ID NO: 2162851 - RNA, 16 nt, Human
cacuggacugaccugg

SEQ ID NO: 2162852 - RNA, 17 nt, Human
cacuggacugaccuggu

SEQ ID NO: 2162853 - RNA, 16 nt, Human
cacuggacuccggccc

SEQ ID NO: 2162854 - RNA, 15 nt, Human
cacuggacuccggcc

SEQ ID NO: 2162855 - RNA, 22 nt, Human
cacuugccgcgucgcccuccca

SEQ ID NO: 2162856 - RNA, 13 nt, Human
cacuucucuuccu

SEQ ID NO: 2162857 - RNA, 18 nt, Human
cacuucaggucaggaguu

SEQ ID NO: 2162858 - RNA, 17 nt, Human
cacuucacgcuuucagc

SEQ ID NO: 2162859 - RNA, 22 nt, Human
cacugugagcucccaggugcag

SEQ ID NO: 2162860 - RNA, 15 nt, Human
cacugugugcuauuu

SEQ ID NO: 2162861 - RNA, 14 nt, Human
cacuguccuccaag

SEQ ID NO: 2162862 - RNA, 17 nt, Human
cacuguccuccaagcca

SEQ ID NO: 2162863 - RNA, 18 nt, Human
cacuguccuccaagccag

SEQ ID NO: 2162864 - RNA, 14 nt, Human
cacugucuugaaga

SEQ ID NO: 2162865 - RNA, 17 nt, Human
cacugugaccuugagaa

SEQ ID NO: 2162866 - RNA, 17 nt, Human
cacugugagcucccagg

SEQ ID NO: 2162867 - RNA, 16 nt, Human
cacugugagcucccag

SEQ ID NO: 2162868 - RNA, 22 nt, Human
cacucagcucuuggcuccacug

SEQ ID NO: 2162869 - RNA, 16 nt, Human
cacucauccccucacu

SEQ ID NO: 2162870 - RNA, 16 nt, Human
cacuccugcuguaaau

SEQ ID NO: 2162871 - RNA, 12 nt, Human
cacuccugcugu

SEQ ID NO: 2162872 - RNA, 11 nt, Human
cacuccugcug

SEQ ID NO: 2162873 - RNA, 16 nt, Human
cacucgcauugacaca

SEQ ID NO: 2162874 - RNA, 13 nt, Human
cacuccugcugua

SEQ ID NO: 2162875 - RNA, 12 nt, Human
cacucaaaggcc

SEQ ID NO: 2162876 - RNA, 20 nt, Human
cacucaaaggccagaccugc

SEQ ID NO: 2162877 - RNA, 15 nt, Human
cacucaaaggccaga

SEQ ID NO: 2162878 - RNA, 23 nt, Human
cacucaaaggccagaccugcaga

SEQ ID NO: 2162879 - RNA, 22 nt, Human
cacucaaaggccagaccugcag

SEQ ID NO: 2162880 - RNA, 15 nt, Human
cacguuuuguuuugu

SEQ ID NO: 2162881 - RNA, 18 nt, Human
cacguuuuguuuugugcc

SEQ ID NO: 2162882 - RNA, 16 nt, Human
cacgccucccacuggg

SEQ ID NO: 2162883 - RNA, 15 nt, Human
cacgccucccacugg

SEQ ID NO: 2162884 - RNA, 14 nt, Human
cacgccucccacug

SEQ ID NO: 2162885 - RNA, 13 nt, Human
cacgccucccacu

SEQ ID NO: 2162886 - RNA, 18 nt, Human
cacgccucccacuggggu

SEQ ID NO: 2162887 - RNA, 17 nt, Human
cacgccucccacugggg

SEQ ID NO: 2162888 - RNA, 22 nt, Human
cacgccucccacugggguccag

SEQ ID NO: 2162889 - RNA, 23 nt, Human
cacgccuguaaucccagcaauuu

SEQ ID NO: 2162890 - RNA, 15 nt, Human
caccuuauauuuacg

SEQ ID NO: 2162891 - RNA, 10 nt, Human
caccuucacc

SEQ ID NO: 2162892 - RNA, 23 nt, Human
caccuucaguaacccccacugga

SEQ ID NO: 2162893 - RNA, 20 nt, Human
cacgcaggagcacacccagc

SEQ ID NO: 2162894 - RNA, 19 nt, Human
cacgcaggagcacacccag

SEQ ID NO: 2162895 - RNA, 12 nt, Human
cacgcaggagca

SEQ ID NO: 2162896 - RNA, 16 nt, Human
caccuguaaucccagc

SEQ ID NO: 2162897 - RNA, 18 nt, Human
caccuguaaucccagcac

SEQ ID NO: 2162898 - RNA, 22 nt, Human
caccucugcuacucaaguagca

SEQ ID NO: 2162899 - RNA, 13 nt, Human
caccugaacugaa

SEQ ID NO: 2162900 - RNA, 17 nt, Human
caccugaacugaacacc

SEQ ID NO: 2162901 - RNA, 19 nt, Human
caccugaacugaacaccau

SEQ ID NO: 2162902 - RNA, 15 nt, Human
caccugcuggaguga

SEQ ID NO: 2162903 - RNA, 20 nt, Human
caccugccacccugggccug

SEQ ID NO: 2162904 - RNA, 15 nt, Human
caccugccacccugg

SEQ ID NO: 2162905 - RNA, 20 nt, Human
caccucgaauuuuguuuucu

SEQ ID NO: 2162906 - RNA, 15 nt, Human
caccucgaauuuugu

SEQ ID NO: 2162907 - RNA, 23 nt, Human
caccuccuuucaagguaacugua

SEQ ID NO: 2162908 - RNA, 19 nt, Human
caccucucccugacccugu

SEQ ID NO: 2162909 - RNA, 14 nt, Human
caccguacugugga

SEQ ID NO: 2162910 - RNA, 14 nt, Human
caccgaaaaacuaa

SEQ ID NO: 2162911 - RNA, 20 nt, Human
cagagugcaagccccugcuc

SEQ ID NO: 2162912 - RNA, 18 nt, Human
cagagugcaagccccugc

SEQ ID NO: 2162913 - RNA, 23 nt, Human
cagagugcaagccccugcuccag

SEQ ID NO: 2162914 - RNA, 14 nt, Human
cagaugcaaugacu

SEQ ID NO: 2162915 - RNA, 19 nt, Human
cagagaagcucucgggcua

SEQ ID NO: 2162916 - RNA, 22 nt, Human
cagagauaguggggagacuucu

SEQ ID NO: 2162917 - RNA, 14 nt, Human
cagaggacugugau

SEQ ID NO: 2162918 - RNA, 21 nt, Human
cagaggacugugaugcccugc

SEQ ID NO: 2162919 - RNA, 19 nt, Human
cagaaacuguucccaccug

SEQ ID NO: 2162920 - RNA, 13 nt, Human
cagaaacaggacc

SEQ ID NO: 2162921 - RNA, 23 nt, Human
cacuuuuuuuuuuaaucuccacc

SEQ ID NO: 2162922 - RNA, 13 nt, Human
cagaaaaaccaga

SEQ ID NO: 2162923 - RNA, 23 nt, Human
cacuuugggaggccaaggagggc

SEQ ID NO: 2162924 - RNA, 20 nt, Human
cacuuuggauuucaucagac

SEQ ID NO: 2162925 - RNA, 22 nt, Human
cacuuucucaugauuuacagag

SEQ ID NO: 2162926 - RNA, 15 nt, Human
cagaagaugaacaga

SEQ ID NO: 2162927 - RNA, 18 nt, Human
cagaagaugaacagacug

SEQ ID NO: 2162928 - RNA, 14 nt, Human
cagaagaaggcagc

SEQ ID NO: 2162929 - RNA, 15 nt, Human
cagaagaacccuggc

SEQ ID NO: 2162930 - RNA, 15 nt, Human
cagaagaaggcagca

SEQ ID NO: 2162931 - RNA, 20 nt, Human
cagaagauagcuucacccca

SEQ ID NO: 2162932 - RNA, 17 nt, Human
cagaagcuaagcugcag

SEQ ID NO: 2162933 - RNA, 13 nt, Human
cagaaggagacag

SEQ ID NO: 2162934 - RNA, 18 nt, Human
cagaaggagacaggcaga

SEQ ID NO: 2162935 - RNA, 17 nt, Human
cagaaggagacaggcag

SEQ ID NO: 2162936 - RNA, 22 nt, Human
cagaaggagacaggcagagcug

SEQ ID NO: 2162937 - RNA, 21 nt, Human
cagaagggagcuagccagagg

SEQ ID NO: 2162938 - RNA, 20 nt, Human
cagaagggagcuagccagag

SEQ ID NO: 2162939 - RNA, 19 nt, Human
cagaagggagcuagccaga

SEQ ID NO: 2162940 - RNA, 22 nt, Human
cagacucaaaugcucagaccag

SEQ ID NO: 2162941 - RNA, 23 nt, Human
cagacucaaaugcucagaccagc

SEQ ID NO: 2162942 - RNA, 19 nt, Human
cagacucacaaccugaacc

SEQ ID NO: 2162943 - RNA, 20 nt, Human
cagaccuuuuaacuccucaa

SEQ ID NO: 2162944 - RNA, 14 nt, Human
cagacgcccagauu

SEQ ID NO: 2162945 - RNA, 20 nt, Human
cagaccugcagacgcccaga

SEQ ID NO: 2162946 - RNA, 21 nt, Human
cagacucacaaccugaaccua

SEQ ID NO: 2162947 - RNA, 20 nt, Human
cagacucacaaccugaaccu

SEQ ID NO: 2162948 - RNA, 16 nt, Human
cagacucauauuacug

SEQ ID NO: 2162949 - RNA, 16 nt, Human
cagagaaagcgcagau

SEQ ID NO: 2162950 - RNA, 15 nt, Human
cagagaaagcgcaga

SEQ ID NO: 2162951 - RNA, 13 nt, Human
cagagaaagcgca

SEQ ID NO: 2162952 - RNA, 17 nt, Human
cagagaaagcgcagaug

SEQ ID NO: 2162953 - RNA, 13 nt, Human
cagaccagcucuu

SEQ ID NO: 2162954 - RNA, 18 nt, Human
cagaauggggugcaugaa

SEQ ID NO: 2162955 - RNA, 19 nt, Human
cagccugguuuagccugga

SEQ ID NO: 2162956 - RNA, 18 nt, Human
cagcuauugauauaaaua

SEQ ID NO: 2162957 - RNA, 13 nt, Human
cagcuauuuuuau

SEQ ID NO: 2162958 - RNA, 13 nt, Human
cagcgaaugacaa

SEQ ID NO: 2162959 - RNA, 18 nt, Human
cagcuacaccuuucuccu

SEQ ID NO: 2162960 - RNA, 21 nt, Human
cagcuaccucaaccaaugcca

SEQ ID NO: 2162961 - RNA, 16 nt, Human
cagcccugacccugug

SEQ ID NO: 2162962 - RNA, 13 nt, Human
cagcccugacccu

SEQ ID NO: 2162963 - RNA, 19 nt, Human
cagcuggugguaucugagu

SEQ ID NO: 2162964 - RNA, 19 nt, Human
cagcugaaauaugcuggcu

SEQ ID NO: 2162965 - RNA, 22 nt, Human
cagcugaaauaugcuggcugga

SEQ ID NO: 2162966 - RNA, 21 nt, Human
cagcugaaauaugcuggcugg

SEQ ID NO: 2162967 - RNA, 16 nt, Human
cagcucuuggcuccac

SEQ ID NO: 2162968 - RNA, 17 nt, Human
cagcucuuggcuccacu

SEQ ID NO: 2162969 - RNA, 18 nt, Human
cagcucuuggcuccacug

SEQ ID NO: 2162970 - RNA, 12 nt, Human
cagcucuccccu

SEQ ID NO: 2162971 - RNA, 16 nt, Human
cagcucauaagagcca

SEQ ID NO: 2162972 - RNA, 14 nt, Human
cagcucauaagagc

SEQ ID NO: 2162973 - RNA, 14 nt, Human
cagcucagcuuccc

SEQ ID NO: 2162974 - RNA, 13 nt, Human
cagcucagcuucc

SEQ ID NO: 2162975 - RNA, 22 nt, Human
caggaagacccaacacauggga

SEQ ID NO: 2162976 - RNA, 19 nt, Human
caggaagacccaacacaug

SEQ ID NO: 2162977 - RNA, 18 nt, Human
cagcuucucauccugcag

SEQ ID NO: 2162978 - RNA, 20 nt, Human
cagcuucucauccugcaggc

SEQ ID NO: 2162979 - RNA, 19 nt, Human
cagcuucucauccugcagg

SEQ ID NO: 2162980 - RNA, 21 nt, Human
cagcuucucauccugcaggca

SEQ ID NO: 2162981 - RNA, 23 nt, Human
cagcuugaucaaaggcacacagc

SEQ ID NO: 2162982 - RNA, 19 nt, Human
cagcuugaucaaaggcaca

SEQ ID NO: 2162983 - RNA, 17 nt, Human
caggaaaaacccgucaa

SEQ ID NO: 2162984 - RNA, 22 nt, Human
cagcauugauauuugugcauuu

SEQ ID NO: 2162985 - RNA, 21 nt, Human
cagcauugauauuugugcauu

SEQ ID NO: 2162986 - RNA, 15 nt, Human
cagcauuuuccucug

SEQ ID NO: 2162987 - RNA, 13 nt, Human
cagcauuuuccuc

SEQ ID NO: 2162988 - RNA, 23 nt, Human
cagcauuuuccucugcuuugaaa

SEQ ID NO: 2162989 - RNA, 20 nt, Human
cagcauugauauuugugcau

SEQ ID NO: 2162990 - RNA, 19 nt, Human
cagcauugauauuugugca

SEQ ID NO: 2162991 - RNA, 18 nt, Human
cagcauugauauuugugc

SEQ ID NO: 2162992 - RNA, 17 nt, Human
cagcauugauauuugug

SEQ ID NO: 2162993 - RNA, 21 nt, Human
cagcaucuuaccuucauaugc

SEQ ID NO: 2162994 - RNA, 17 nt, Human
cagcccaaagaaggaaa

SEQ ID NO: 2162995 - RNA, 16 nt, Human
cagauggaaaggagcc

SEQ ID NO: 2162996 - RNA, 14 nt, Human
cagauggaaaggag

SEQ ID NO: 2162997 - RNA, 21 nt, Human
cagauuaugagacacaggaug

SEQ ID NO: 2162998 - RNA, 19 nt, Human
cagauuaugagacacagga

SEQ ID NO: 2162999 - RNA, 17 nt, Human
cagcaacagaaaaaugg

SEQ ID NO: 2163000 - RNA, 14 nt, Human
cagcaacagaaaaa

SEQ ID NO: 2163001 - RNA, 13 nt, Human
cagcaacagaaaa

SEQ ID NO: 2163002 - RNA, 20 nt, Human
cagauuuuuuuuggacuguu

SEQ ID NO: 2163003 - RNA, 18 nt, Human
cagcagacugaucaggac

SEQ ID NO: 2163004 - RNA, 11 nt, Human
cagcagacuga

SEQ ID NO: 2163005 - RNA, 15 nt, Human
cagcaagucaggguu

SEQ ID NO: 2163006 - RNA, 18 nt, Human
cagucuugacgaguguga

SEQ ID NO: 2163007 - RNA, 23 nt, Human
cagucuuauagcaagacuguuag

SEQ ID NO: 2163008 - RNA, 12 nt, Human
caguccuuccac

SEQ ID NO: 2163009 - RNA, 14 nt, Human
cagugaaagcauca

SEQ ID NO: 2163010 - RNA, 13 nt, Human
cagugaaagcauc

SEQ ID NO: 2163011 - RNA, 17 nt, Human
cagugagcagagaucac

SEQ ID NO: 2163012 - RNA, 13 nt, Human
cagugagccacuc

SEQ ID NO: 2163013 - RNA, 18 nt, Human
caguagcaguagaugcau

SEQ ID NO: 2163014 - RNA, 20 nt, Human
cagucauuuuucagaccuuu

SEQ ID NO: 2163015 - RNA, 21 nt, Human
cagucauuuuucagaccuuuu

SEQ ID NO: 2163016 - RNA, 16 nt, Human
cagggucagaaacagg

SEQ ID NO: 2163017 - RNA, 10 nt, Human
cagggucaga

SEQ ID NO: 2163018 - RNA, 19 nt, Human
cagggucagaaacaggacc

SEQ ID NO: 2163019 - RNA, 18 nt, Human
cagggucagaaacaggac

SEQ ID NO: 2163020 - RNA, 12 nt, Human
cagggucccugg

SEQ ID NO: 2163021 - RNA, 19 nt, Human
cagguagaacacaagguca

SEQ ID NO: 2163022 - RNA, 20 nt, Human
cagguagaauuaucuaauuu

SEQ ID NO: 2163023 - RNA, 21 nt, Human
cagguagaccugucuccuggc

SEQ ID NO: 2163024 - RNA, 19 nt, Human
cagguagaccugucuccug

SEQ ID NO: 2163025 - RNA, 18 nt, Human
cagguagaccugucuccu

SEQ ID NO: 2163026 - RNA, 22 nt, Human
cagguagaauuaucuaauuuau

SEQ ID NO: 2163027 - RNA, 23 nt, Human
cagguagaauuaucuaauuuaua

SEQ ID NO: 2163028 - RNA, 20 nt, Human
cagguaugaccuucuaggaa

SEQ ID NO: 2163029 - RNA, 20 nt, Human
caggucaggaguucgagacc

SEQ ID NO: 2163030 - RNA, 18 nt, Human
cagguauuuuauaauucu

SEQ ID NO: 2163031 - RNA, 19 nt, Human
cagguauuuuauaauucug

SEQ ID NO: 2163032 - RNA, 23 nt, Human
cagguauuuuauaauucugggaa

SEQ ID NO: 2163033 - RNA, 15 nt, Human
cagguggccaugccu

SEQ ID NO: 2163034 - RNA, 13 nt, Human
cagguggccaugc

SEQ ID NO: 2163035 - RNA, 19 nt, Human
cagguggccaugccucagc

SEQ ID NO: 2163036 - RNA, 16 nt, Human
caggugaaacccaguc

SEQ ID NO: 2163037 - RNA, 14 nt, Human
caggugaauuguuu

SEQ ID NO: 2163038 - RNA, 21 nt, Human
caggaguucgagaccagccug

SEQ ID NO: 2163039 - RNA, 23 nt, Human
caggaguucgagaccagccuggc

SEQ ID NO: 2163040 - RNA, 15 nt, Human
caggaguucugcuca

SEQ ID NO: 2163041 - RNA, 14 nt, Human
caggaguucugcuc

SEQ ID NO: 2163042 - RNA, 22 nt, Human
caggaguucugcucauucuaau

SEQ ID NO: 2163043 - RNA, 20 nt, Human
caggaguucugcucauucua

SEQ ID NO: 2163044 - RNA, 16 nt, Human
caggaguucugcucau

SEQ ID NO: 2163045 - RNA, 16 nt, Human
caggacgugggcuggg

SEQ ID NO: 2163046 - RNA, 17 nt, Human
caggacgugggcugggc

SEQ ID NO: 2163047 - RNA, 15 nt, Human
caggacuuaaaauga

SEQ ID NO: 2163048 - RNA, 20 nt, Human
caggagaacucauguuauuu

SEQ ID NO: 2163049 - RNA, 16 nt, Human
caggagacccacaggu

SEQ ID NO: 2163050 - RNA, 19 nt, Human
caggagcacacccagcccc

SEQ ID NO: 2163051 - RNA, 16 nt, Human
caggagcacacccagc

SEQ ID NO: 2163052 - RNA, 15 nt, Human
caggagcacacccag

SEQ ID NO: 2163053 - RNA, 21 nt, Human
caggagcacacccagccccca

SEQ ID NO: 2163054 - RNA, 14 nt, Human
caggaugguaauuc

SEQ ID NO: 2163055 - RNA, 15 nt, Human
caggaugguaauucu

SEQ ID NO: 2163056 - RNA, 22 nt, Human
caggauuccucuuuucucugcc

SEQ ID NO: 2163057 - RNA, 20 nt, Human
caggauuccucuuuucucug

SEQ ID NO: 2163058 - RNA, 17 nt, Human
caggauuccucuuuucu

SEQ ID NO: 2163059 - RNA, 16 nt, Human
caggauuccucuuuuc

SEQ ID NO: 2163060 - RNA, 15 nt, Human
caggaugcuuugguu

SEQ ID NO: 2163061 - RNA, 15 nt, Human
caggaugaagcauuu

SEQ ID NO: 2163062 - RNA, 14 nt, Human
caggaugaagcauu

SEQ ID NO: 2163063 - RNA, 22 nt, Human
caggcagcuuuuucucucccac

SEQ ID NO: 2163064 - RNA, 19 nt, Human
caggcagcuuuuucucucc

SEQ ID NO: 2163065 - RNA, 23 nt, Human
caggcagcucauaagagccacag

SEQ ID NO: 2163066 - RNA, 22 nt, Human
caggcagcucauaagagccaca

SEQ ID NO: 2163067 - RNA, 21 nt, Human
caggcagcucauaagagccac

SEQ ID NO: 2163068 - RNA, 22 nt, Human
caggcagggccaacccuucucc

SEQ ID NO: 2163069 - RNA, 20 nt, Human
caggcagggccaacccuucu

SEQ ID NO: 2163070 - RNA, 18 nt, Human
caggccccaggcagggcc

SEQ ID NO: 2163071 - RNA, 18 nt, Human
caggcuugccugcaggca

SEQ ID NO: 2163072 - RNA, 17 nt, Human
caggcuugccugcaggc

SEQ ID NO: 2163073 - RNA, 16 nt, Human
caggcuugccugcagg

SEQ ID NO: 2163074 - RNA, 15 nt, Human
caggcuugccugcag

SEQ ID NO: 2163075 - RNA, 15 nt, Human
cagggaaaagcagcu

SEQ ID NO: 2163076 - RNA, 13 nt, Human
caggcucucaaca

SEQ ID NO: 2163077 - RNA, 14 nt, Human
caggcucucaacag

SEQ ID NO: 2163078 - RNA, 22 nt, Human
caggggagggucagccagggcc

SEQ ID NO: 2163079 - RNA, 20 nt, Human
caggggagggucagccaggg

SEQ ID NO: 2163080 - RNA, 19 nt, Human
caggggagggucagccagg

SEQ ID NO: 2163081 - RNA, 20 nt, Human
caggggauuucaccacucaa

SEQ ID NO: 2163082 - RNA, 18 nt, Human
caggggagggucagccag

SEQ ID NO: 2163083 - RNA, 14 nt, Human
caggggccagaaga

SEQ ID NO: 2163084 - RNA, 18 nt, Human
cagggccaacccuucucc

SEQ ID NO: 2163085 - RNA, 13 nt, Human
cagggccaacccu

SEQ ID NO: 2163086 - RNA, 13 nt, Human
cagggccugcgag

SEQ ID NO: 2163087 - RNA, 22 nt, Human
cagggccgccagggagaccugg

SEQ ID NO: 2163088 - RNA, 16 nt, Human
cagggccgccagggag

SEQ ID NO: 2163089 - RNA, 14 nt, Human
cagggccgccaggg

SEQ ID NO: 2163090 - RNA, 20 nt, Human
cagggacugaaaaccucucc

SEQ ID NO: 2163091 - RNA, 21 nt, Human
cagggacugaaaaccucuccu

SEQ ID NO: 2163092 - RNA, 23 nt, Human
cagggacugaaaaccucuccuca

SEQ ID NO: 2163093 - RNA, 23 nt, Human
cagggacgaagaagagccacagu

SEQ ID NO: 2163094 - RNA, 22 nt, Human
cagggacgaagaagagccacag

SEQ ID NO: 2163095 - RNA, 19 nt, Human
cagggacgaagaagagcca

SEQ ID NO: 2163096 - RNA, 18 nt, Human
cagggauuguuucuguuu

SEQ ID NO: 2163097 - RNA, 18 nt, Human
cagggcacaggccaugga

SEQ ID NO: 2163098 - RNA, 15 nt, Human
cagggcacaggccau

SEQ ID NO: 2163099 - RNA, 15 nt, Human
cagggcaccugccac

SEQ ID NO: 2163100 - RNA, 17 nt, Human
cagggaaaagcagcucu

SEQ ID NO: 2163101 - RNA, 19 nt, Human
cagggaaaagcagcucucc

SEQ ID NO: 2163102 - RNA, 20 nt, Human
cagggaaaagcagcucuccc

SEQ ID NO: 2163103 - RNA, 21 nt, Human
cagggaaaagcagcucucccc

SEQ ID NO: 2163104 - RNA, 23 nt, Human
cagggacaaagaggccuuuaacc

SEQ ID NO: 2163105 - RNA, 18 nt, Human
cagggacaaagaggccuu

SEQ ID NO: 2163106 - RNA, 17 nt, Human
cagggacaaagaggccu

SEQ ID NO: 2163107 - RNA, 13 nt, Human
cagggacaaagag

SEQ ID NO: 2163108 - RNA, 22 nt, Human
caugugcuacaggggccagaag

SEQ ID NO: 2163109 - RNA, 20 nt, Human
caugugcuacaggggccaga

SEQ ID NO: 2163110 - RNA, 17 nt, Human
caugugcuacaggggcc

SEQ ID NO: 2163111 - RNA, 19 nt, Human
cauggugcuuguuaaugcu

SEQ ID NO: 2163112 - RNA, 20 nt, Human
cauguaaagcaguauuaaaa

SEQ ID NO: 2163113 - RNA, 19 nt, Human
cauguacccuaaggucauu

SEQ ID NO: 2163114 - RNA, 21 nt, Human
cauguaaagcaguauuaaaau

SEQ ID NO: 2163115 - RNA, 22 nt, Human
caugggaccuauaacugcccag

SEQ ID NO: 2163116 - RNA, 18 nt, Human
caugggaccuauaacugc

SEQ ID NO: 2163117 - RNA, 21 nt, Human
caugggcacaaagggcccaga

SEQ ID NO: 2163118 - RNA, 19 nt, Human
caugggcacaaagggccca

SEQ ID NO: 2163119 - RNA, 23 nt, Human
cauuuacaacccgguucacucuu

SEQ ID NO: 2163120 - RNA, 15 nt, Human
cauuuaccuuuuuga

SEQ ID NO: 2163121 - RNA, 14 nt, Human
cauuuacaacccgg

SEQ ID NO: 2163122 - RNA, 15 nt, Human
cauugaacagcaaag

SEQ ID NO: 2163123 - RNA, 14 nt, Human
cauugaacagcaaa

SEQ ID NO: 2163124 - RNA, 17 nt, Human
cauugaauuauaaaagc

SEQ ID NO: 2163125 - RNA, 14 nt, Human
cauugaaggcuuaa

SEQ ID NO: 2163126 - RNA, 13 nt, Human
cauugaaggcuua

SEQ ID NO: 2163127 - RNA, 19 nt, Human
cauucuuuuguaauuuaaa

SEQ ID NO: 2163128 - RNA, 19 nt, Human
cauugauauuugugcauuu

SEQ ID NO: 2163129 - RNA, 16 nt, Human
cauugauauuugugca

SEQ ID NO: 2163130 - RNA, 12 nt, Human
cauugaugcuga

SEQ ID NO: 2163131 - RNA, 23 nt, Human
cauugauauuugugcauuuucua

SEQ ID NO: 2163132 - RNA, 22 nt, Human
cauugauauuugugcauuuucu

SEQ ID NO: 2163133 - RNA, 20 nt, Human
cauuuuacccacacacagau

SEQ ID NO: 2163134 - RNA, 12 nt, Human
cauuuuuacugu

SEQ ID NO: 2163135 - RNA, 20 nt, Human
cauuuuccucugcuuugaaa

SEQ ID NO: 2163136 - RNA, 17 nt, Human
cauuuuccucugcuuug

SEQ ID NO: 2163137 - RNA, 15 nt, Human
cauuuuccucugcuu

SEQ ID NO: 2163138 - RNA, 14 nt, Human
cauuuuccucugcu

SEQ ID NO: 2163139 - RNA, 11 nt, Human
cauuuucaucu

SEQ ID NO: 2163140 - RNA, 12 nt, Human
cauucuuuugua

SEQ ID NO: 2163141 - RNA, 18 nt, Human
cauucuuuuguaauuuaa

SEQ ID NO: 2163142 - RNA, 16 nt, Human
cauucuuuuguaauuu

SEQ ID NO: 2163143 - RNA, 15 nt, Human
cauucuuuuguaauu

SEQ ID NO: 2163144 - RNA, 14 nt, Human
cauucuuuuguaau

SEQ ID NO: 2163145 - RNA, 13 nt, Human
cauucuuaaaaaa

SEQ ID NO: 2163146 - RNA, 22 nt, Human
cauuacagggcacaggccaugg

SEQ ID NO: 2163147 - RNA, 21 nt, Human
cauuacagggcacaggccaug

SEQ ID NO: 2163148 - RNA, 16 nt, Human
cauuaagccuuccaca

SEQ ID NO: 2163149 - RNA, 20 nt, Human
cauucccuucgacagcauuu

SEQ ID NO: 2163150 - RNA, 18 nt, Human
cauucaguauauaaaaua

SEQ ID NO: 2163151 - RNA, 16 nt, Human
cauucaggagcuuccu

SEQ ID NO: 2163152 - RNA, 17 nt, Human
caucaugaccagcaaau

SEQ ID NO: 2163153 - RNA, 12 nt, Human
caucauucccuu

SEQ ID NO: 2163154 - RNA, 14 nt, Human
cauauuugcacuaa

SEQ ID NO: 2163155 - RNA, 13 nt, Human
cauauuugcacua

SEQ ID NO: 2163156 - RNA, 12 nt, Human
cauauuugcacu

SEQ ID NO: 2163157 - RNA, 13 nt, Human
cauauuguaaaac

SEQ ID NO: 2163158 - RNA, 16 nt, Human
cauauuguaaaacagg

SEQ ID NO: 2163159 - RNA, 17 nt, Human
cauauuguaaaacaggu

SEQ ID NO: 2163160 - RNA, 19 nt, Human
cauauuguaaaacagguag

SEQ ID NO: 2163161 - RNA, 22 nt, Human
cauauauuggguuccauucuca

SEQ ID NO: 2163162 - RNA, 18 nt, Human
cauauauuggguuccauu

SEQ ID NO: 2163163 - RNA, 19 nt, Human
cagugcuugauugcgugga

SEQ ID NO: 2163164 - RNA, 14 nt, Human
caucuuugugaagg

SEQ ID NO: 2163165 - RNA, 13 nt, Human
caucuuugugaag

SEQ ID NO: 2163166 - RNA, 14 nt, Human
caucuuucuuugga

SEQ ID NO: 2163167 - RNA, 22 nt, Human
caucuuugugaaggccucgcag

SEQ ID NO: 2163168 - RNA, 22 nt, Human
caugaaaaugcaacaacaugua

SEQ ID NO: 2163169 - RNA, 15 nt, Human
caugaaaaugcaaca

SEQ ID NO: 2163170 - RNA, 13 nt, Human
caugaaaaugcaa

SEQ ID NO: 2163171 - RNA, 21 nt, Human
caugaagaggaugcugugaaa

SEQ ID NO: 2163172 - RNA, 18 nt, Human
caugaagaggaugcugug

SEQ ID NO: 2163173 - RNA, 21 nt, Human
caugaugacaacuacagaaaa

SEQ ID NO: 2163174 - RNA, 15 nt, Human
caugcacucagcucu

SEQ ID NO: 2163175 - RNA, 16 nt, Human
caugcacucagcucuu

SEQ ID NO: 2163176 - RNA, 20 nt, Human
caugauccaagcaagacuga

SEQ ID NO: 2163177 - RNA, 14 nt, Human
caucucucuuuaau

SEQ ID NO: 2163178 - RNA, 23 nt, Human
cccaaucccagcuaccucaacca

SEQ ID NO: 2163179 - RNA, 14 nt, Human
ccauuuguuaucug

SEQ ID NO: 2163180 - RNA, 17 nt, Human
ccauucuccauuuguua

SEQ ID NO: 2163181 - RNA, 13 nt, Human
ccauucuccauuu

SEQ ID NO: 2163182 - RNA, 14 nt, Human
ccauauuguaaaac

SEQ ID NO: 2163183 - RNA, 18 nt, Human
ccauauuguaaaacaggu

SEQ ID NO: 2163184 - RNA, 17 nt, Human
ccauguugugccucccu

SEQ ID NO: 2163185 - RNA, 22 nt, Human
ccauguugugccucccugguga

SEQ ID NO: 2163186 - RNA, 20 nt, Human
ccauguugugccucccuggu

SEQ ID NO: 2163187 - RNA, 21 nt, Human
ccauguuuguggcuauuaaaa

SEQ ID NO: 2163188 - RNA, 18 nt, Human
ccaggcgcaggggcucac

SEQ ID NO: 2163189 - RNA, 15 nt, Human
ccaggccagcugccu

SEQ ID NO: 2163190 - RNA, 20 nt, Human
ccaguaaaaaaaaaaaaugg

SEQ ID NO: 2163191 - RNA, 18 nt, Human
ccagggagaccuggacac

SEQ ID NO: 2163192 - RNA, 22 nt, Human
ccagggagaccuggacacaggc

SEQ ID NO: 2163193 - RNA, 21 nt, Human
ccagggagaccuggacacagg

SEQ ID NO: 2163194 - RNA, 23 nt, Human
ccagggagaccuggacacaggcc

SEQ ID NO: 2163195 - RNA, 21 nt, Human
ccagggagcauuuuccuccau

SEQ ID NO: 2163196 - RNA, 20 nt, Human
ccagggagcauuuuccucca

SEQ ID NO: 2163197 - RNA, 19 nt, Human
ccagggagcauuuuccucc

SEQ ID NO: 2163198 - RNA, 21 nt, Human
ccagcagucaauuaacaauaa

SEQ ID NO: 2163199 - RNA, 17 nt, Human
ccagccaggccccaggc

SEQ ID NO: 2163200 - RNA, 21 nt, Human
ccagagcuacccgcagaguuc

SEQ ID NO: 2163201 - RNA, 20 nt, Human
ccagagcuacccgcagaguu

SEQ ID NO: 2163202 - RNA, 18 nt, Human
ccagaggcagcuucuuug

SEQ ID NO: 2163203 - RNA, 22 nt, Human
ccagaggcaccucaagaagaag

SEQ ID NO: 2163204 - RNA, 19 nt, Human
ccagaggcagcuucuuugc

SEQ ID NO: 2163205 - RNA, 22 nt, Human
ccagaggacugugaugcccugc

SEQ ID NO: 2163206 - RNA, 20 nt, Human
ccagaggacugugaugcccu

SEQ ID NO: 2163207 - RNA, 14 nt, Human
ccacacuggacucc

SEQ ID NO: 2163208 - RNA, 13 nt, Human
ccacacuggacuc

SEQ ID NO: 2163209 - RNA, 19 nt, Human
ccacauacaacacaaagag

SEQ ID NO: 2163210 - RNA, 20 nt, Human
ccacauacaacacaaagaga

SEQ ID NO: 2163211 - RNA, 16 nt, Human
ccacucaaaggccaga

SEQ ID NO: 2163212 - RNA, 19 nt, Human
ccacucaaaggccagaccu

SEQ ID NO: 2163213 - RNA, 18 nt, Human
ccacuggacugaccuggu

SEQ ID NO: 2163214 - RNA, 17 nt, Human
ccuguuuuuuuucuuuu

SEQ ID NO: 2163215 - RNA, 14 nt, Human
ccuguuuuuuuucu

SEQ ID NO: 2163216 - RNA, 14 nt, Human
ccuucuaggaagcu

SEQ ID NO: 2163217 - RNA, 16 nt, Human
ccuucgacagcauuuu

SEQ ID NO: 2163218 - RNA, 17 nt, Human
ccuugggcccucugguu

SEQ ID NO: 2163219 - RNA, 21 nt, Human
ccuuggcuuuuacugaagccu

SEQ ID NO: 2163220 - RNA, 18 nt, Human
ccuuccuuguagccuuuu

SEQ ID NO: 2163221 - RNA, 17 nt, Human
ccuuccuuguagccuuu

SEQ ID NO: 2163222 - RNA, 15 nt, Human
ccuucgacagcauuu

SEQ ID NO: 2163223 - RNA, 13 nt, Human
cgagaccagccug

SEQ ID NO: 2163224 - RNA, 14 nt, Human
cgagaccagccugg

SEQ ID NO: 2163225 - RNA, 15 nt, Human
cgagaccagccuggc

SEQ ID NO: 2163226 - RNA, 16 nt, Human
cgagaccagccuggcc

SEQ ID NO: 2163227 - RNA, 13 nt, Human
cgaaaaccaggcc

SEQ ID NO: 2163228 - RNA, 22 nt, Human
cgaaaaccaggccuuaucucca

SEQ ID NO: 2163229 - RNA, 18 nt, Human
ccuuuuauuucuucacca

SEQ ID NO: 2163230 - RNA, 13 nt, Human
ccuuuuauuucuu

SEQ ID NO: 2163231 - RNA, 15 nt, Human
cgaagaagagccaca

SEQ ID NO: 2163232 - RNA, 17 nt, Human
cgaagaagagccacagu

SEQ ID NO: 2163233 - RNA, 16 nt, Human
cgaagaagagccacag

SEQ ID NO: 2163234 - RNA, 18 nt, Human
cgaagaagagccacagug

SEQ ID NO: 2163235 - RNA, 14 nt, Human
cgaauacaaaauug

SEQ ID NO: 2163236 - RNA, 15 nt, Human
cgauucauauugaau

SEQ ID NO: 2163237 - RNA, 16 nt, Human
cgcaaaccacacugga

SEQ ID NO: 2163238 - RNA, 15 nt, Human
cgcaaaccacacugg

SEQ ID NO: 2163239 - RNA, 18 nt, Human
cgcaaaccacacuggacu

SEQ ID NO: 2163240 - RNA, 16 nt, Human
cgccagggagaccugg

SEQ ID NO: 2163241 - RNA, 19 nt, Human
ccugcacucuuuaagggag

SEQ ID NO: 2163242 - RNA, 12 nt, Human
ccugcaggccag

SEQ ID NO: 2163243 - RNA, 18 nt, Human
ccugcaggccaggccagc

SEQ ID NO: 2163244 - RNA, 16 nt, Human
ccugcaggccaggcca

SEQ ID NO: 2163245 - RNA, 19 nt, Human
ccugcgagggcagcgggag

SEQ ID NO: 2163246 - RNA, 20 nt, Human
ccugcgcccaguccuuccac

SEQ ID NO: 2163247 - RNA, 18 nt, Human
ccugcgcccaguccuucc

SEQ ID NO: 2163248 - RNA, 13 nt, Human
ccugcgagggcag

SEQ ID NO: 2163249 - RNA, 22 nt, Human
ccugcgcccaguccuuccaccu

SEQ ID NO: 2163250 - RNA, 19 nt, Human
ccugguacucaagcccgcg

SEQ ID NO: 2163251 - RNA, 16 nt, Human
ccugguacucaagccc

SEQ ID NO: 2163252 - RNA, 15 nt, Human
ccugguacucaagcc

SEQ ID NO: 2163253 - RNA, 21 nt, Human
ccuggugagagggccgggcag

SEQ ID NO: 2163254 - RNA, 17 nt, Human
ccugguccacagggcac

SEQ ID NO: 2163255 - RNA, 14 nt, Human
ccuggcagcucagc

SEQ ID NO: 2163256 - RNA, 20 nt, Human
ccuggacacaggccugcucu

SEQ ID NO: 2163257 - RNA, 16 nt, Human
ccuggacacaggccug

SEQ ID NO: 2163258 - RNA, 13 nt, Human
ccuggacacaggc

SEQ ID NO: 2163259 - RNA, 16 nt, Human
cccgcccccugcccuc

SEQ ID NO: 2163260 - RNA, 17 nt, Human
cccgcccccugcccucc

SEQ ID NO: 2163261 - RNA, 18 nt, Human
cccgccgccugguacuca

SEQ ID NO: 2163262 - RNA, 15 nt, Human
cccuaguaaaaauac

SEQ ID NO: 2163263 - RNA, 18 nt, Human
cccucugguuugccggug

SEQ ID NO: 2163264 - RNA, 24 nt, Human
cccugggaggcgggcgcacugccu

SEQ ID NO: 2163265 - RNA, 13 nt, Human
cccacacacagau

SEQ ID NO: 2163266 - RNA, 15 nt, Human
cccacaaaggcaaag

SEQ ID NO: 2163267 - RNA, 20 nt, Human
ccucguucucccugggaggc

SEQ ID NO: 2163268 - RNA, 18 nt, Human
ccucguucucccugggag

SEQ ID NO: 2163269 - RNA, 17 nt, Human
ccucguucucccuggga

SEQ ID NO: 2163270 - RNA, 16 nt, Human
ccucguucucccuggg

SEQ ID NO: 2163271 - RNA, 15 nt, Human
ccucguucucccugg

SEQ ID NO: 2163272 - RNA, 15 nt, Human
ccucccugccucagg

SEQ ID NO: 2163273 - RNA, 22 nt, Human
ccgccugguacucaagcccgcg

SEQ ID NO: 2163274 - RNA, 22 nt, Human
ccgcgugaucaaagccacacuc

SEQ ID NO: 2163275 - RNA, 19 nt, Human
ccgcgucgcccucccaggc

SEQ ID NO: 2163276 - RNA, 17 nt, Human
ccgcgucgcccucccag

SEQ ID NO: 2163277 - RNA, 20 nt, Human
ccgcggggacauugggaagg

SEQ ID NO: 2163278 - RNA, 16 nt, Human
ccgcaaaccacacugg

SEQ ID NO: 2163279 - RNA, 15 nt, Human
ccgcaaaccacacug

SEQ ID NO: 2163280 - RNA, 21 nt, Human
ccgcaaaccacacuggacucc

SEQ ID NO: 2163281 - RNA, 16 nt, Human
ccuauaacugcccagc

SEQ ID NO: 2163282 - RNA, 18 nt, Human
ccuaaaagcacacucauc

SEQ ID NO: 2163283 - RNA, 17 nt, Human
ccuaaaagcacacucau

SEQ ID NO: 2163284 - RNA, 23 nt, Human
cuguuuuaauuuauacuggcaug

SEQ ID NO: 2163285 - RNA, 20 nt, Human
cuuccacuuuuuuuuguaug

SEQ ID NO: 2163286 - RNA, 21 nt, Human
cuuccacuuuuuuuuguaugu

SEQ ID NO: 2163287 - RNA, 22 nt, Human
cuuccccaccccaguuuuuguu

SEQ ID NO: 2163288 - RNA, 18 nt, Human
cuuccccaacacgcagga

SEQ ID NO: 2163289 - RNA, 13 nt, Human
cuucccauucucc

SEQ ID NO: 2163290 - RNA, 14 nt, Human
cuucccauucucca

SEQ ID NO: 2163291 - RNA, 20 nt, Human
cuuccuuguagccuuuugac

SEQ ID NO: 2163292 - RNA, 17 nt, Human
cuuccuuguagccuuuu

SEQ ID NO: 2163293 - RNA, 13 nt, Human
cuuccuuggcuuu

SEQ ID NO: 2163294 - RNA, 21 nt, Human
cuuccuuguagccuuuugacu

SEQ ID NO: 2163295 - RNA, 15 nt, Human
cuuccuuaugcuucu

SEQ ID NO: 2163296 - RNA, 17 nt, Human
cuuccuuaugcuucuuu

SEQ ID NO: 2163297 - RNA, 17 nt, Human
cuucucauccugcaggc

SEQ ID NO: 2163298 - RNA, 16 nt, Human
cuucucauccugcagg

SEQ ID NO: 2163299 - RNA, 15 nt, Human
cuucucauccugcag

SEQ ID NO: 2163300 - RNA, 20 nt, Human
cuucaguaacccccacugga

SEQ ID NO: 2163301 - RNA, 22 nt, Human
cuucaguaacccccacuggacu

SEQ ID NO: 2163302 - RNA, 18 nt, Human
cuucaggucaggaguucg

SEQ ID NO: 2163303 - RNA, 13 nt, Human
cuucacacacaga

SEQ ID NO: 2163304 - RNA, 14 nt, Human
cugucuguguuuuu

SEQ ID NO: 2163305 - RNA, 14 nt, Human
cugucugccagggc

SEQ ID NO: 2163306 - RNA, 22 nt, Human
cugugauugggcguagaagugg

SEQ ID NO: 2163307 - RNA, 15 nt, Human
cugugcacgguggac

SEQ ID NO: 2163308 - RNA, 14 nt, Human
cugugaaauuccca

SEQ ID NO: 2163309 - RNA, 22 nt, Human
cugugaaauucccaacaaacau

SEQ ID NO: 2163310 - RNA, 20 nt, Human
cugugagcucccaggugcag

SEQ ID NO: 2163311 - RNA, 16 nt, Human
cugugauugugccuac

SEQ ID NO: 2163312 - RNA, 14 nt, Human
cugugaugcccugc

SEQ ID NO: 2163313 - RNA, 20 nt, Human
cugugucuuugguuugugcu

SEQ ID NO: 2163314 - RNA, 11 nt, Human
cugugggaaau

SEQ ID NO: 2163315 - RNA, 13 nt, Human
cugugggaaauua

SEQ ID NO: 2163316 - RNA, 20 nt, Human
cugggguggggauagggagc

SEQ ID NO: 2163317 - RNA, 23 nt, Human
cugcucauucuaaugauggccca

SEQ ID NO: 2163318 - RNA, 22 nt, Human
cugcucauucuaaugauggccc

SEQ ID NO: 2163319 - RNA, 14 nt, Human
cugggauguuucug

SEQ ID NO: 2163320 - RNA, 19 nt, Human
cugggauguuucugucaca

SEQ ID NO: 2163321 - RNA, 20 nt, Human
cugggccuggcagcucagcu

SEQ ID NO: 2163322 - RNA, 18 nt, Human
cugggccuggcagcucag

SEQ ID NO: 2163323 - RNA, 16 nt, Human
cugguuaggauggcag

SEQ ID NO: 2163324 - RNA, 19 nt, Human
cugguuaggauggcaggac

SEQ ID NO: 2163325 - RNA, 18 nt, Human
cugguuaggauggcagga

SEQ ID NO: 2163326 - RNA, 17 nt, Human
cuguaaucccagcacuu

SEQ ID NO: 2163327 - RNA, 18 nt, Human
cuguaaucccagcaauuu

SEQ ID NO: 2163328 - RNA, 20 nt, Human
cuguauuuugaaaaugcuuu

SEQ ID NO: 2163329 - RNA, 21 nt, Human
cuuuauucaauaaaaaaaaga

SEQ ID NO: 2163330 - RNA, 21 nt, Human
cuuuauugaaaaaauaaaaaa

SEQ ID NO: 2163331 - RNA, 12 nt, Human
cuuuauuuccaa

SEQ ID NO: 2163332 - RNA, 17 nt, Human
cuuucagugaaagcauc

SEQ ID NO: 2163333 - RNA, 15 nt, Human
cuuucagugaaagca

SEQ ID NO: 2163334 - RNA, 18 nt, Human
cuuucauaaucuuugcuu

SEQ ID NO: 2163335 - RNA, 17 nt, Human
cuuucauaaucuuugcu

SEQ ID NO: 2163336 - RNA, 12 nt, Human
cuuguaaauaaa

SEQ ID NO: 2163337 - RNA, 19 nt, Human
cuuguaaauaaagcccugg

SEQ ID NO: 2163338 - RNA, 17 nt, Human
cuuguaaauaaagcccu

SEQ ID NO: 2163339 - RNA, 16 nt, Human
cuuguaaauaaagccc

SEQ ID NO: 2163340 - RNA, 15 nt, Human
cuuguaaauaaagcc

SEQ ID NO: 2163341 - RNA, 15 nt, Human
cuuguggcuuugcaa

SEQ ID NO: 2163342 - RNA, 19 nt, Human
cuuuagaaagguuuugagc

SEQ ID NO: 2163343 - RNA, 20 nt, Human
cuuuagaaagguuuugagca

SEQ ID NO: 2163344 - RNA, 15 nt, Human
cuuggaggugucugu

SEQ ID NO: 2163345 - RNA, 20 nt, Human
cuuggcuuuuacugaagccu

SEQ ID NO: 2163346 - RNA, 21 nt, Human
cuuggaaacuggaugagguca

SEQ ID NO: 2163347 - RNA, 22 nt, Human
cuuggaaccguaggacccaagc

SEQ ID NO: 2163348 - RNA, 12 nt, Human
cuuuggcuuuuu

SEQ ID NO: 2163349 - RNA, 20 nt, Human
cuuuguucugcuguucucua

SEQ ID NO: 2163350 - RNA, 14 nt, Human
cuuuguucugcugu

SEQ ID NO: 2163351 - RNA, 17 nt, Human
cuuuucauauuugcacu

SEQ ID NO: 2163352 - RNA, 18 nt, Human
cuuuucauauuugcacua

SEQ ID NO: 2163353 - RNA, 12 nt, Human
cuuuucucugcc

SEQ ID NO: 2163354 - RNA, 16 nt, Human
cuuuuuucuuuuuccu

SEQ ID NO: 2163355 - RNA, 18 nt, Human
cuuuugacuuucauugga

SEQ ID NO: 2163356 - RNA, 12 nt, Human
gaaacagaggcu

SEQ ID NO: 2163357 - RNA, 20 nt, Human
gaaucuauuuaucuucauuu

SEQ ID NO: 2163358 - RNA, 16 nt, Human
gaaucuauuuaaguaa

SEQ ID NO: 2163359 - RNA, 15 nt, Human
gaaucuauuuaagua

SEQ ID NO: 2163360 - RNA, 13 nt, Human
gaaucuauuuaag

SEQ ID NO: 2163361 - RNA, 19 nt, Human
gaaucuauuuaucuucauu

SEQ ID NO: 2163362 - RNA, 18 nt, Human
gaaucuauuuaucuucau

SEQ ID NO: 2163363 - RNA, 18 nt, Human
gaagcuuuaccagcugaa

SEQ ID NO: 2163364 - RNA, 12 nt, Human
gaagcuuuacca

SEQ ID NO: 2163365 - RNA, 18 nt, Human
gaaggaaaaggcagggag

SEQ ID NO: 2163366 - RNA, 15 nt, Human
gaagccaucuuucuu

SEQ ID NO: 2163367 - RNA, 15 nt, Human
gaaggagacaggcag

SEQ ID NO: 2163368 - RNA, 18 nt, Human
gaaggagacaggcagagc

SEQ ID NO: 2163369 - RNA, 16 nt, Human
gaaggagacaggcaga

SEQ ID NO: 2163370 - RNA, 20 nt, Human
gaaggaaaaggcagggagcg

SEQ ID NO: 2163371 - RNA, 17 nt, Human
gaaggcagcagguggca

SEQ ID NO: 2163372 - RNA, 15 nt, Human
gaaauauacacacag

SEQ ID NO: 2163373 - RNA, 17 nt, Human
gaaauauacacacagca

SEQ ID NO: 2163374 - RNA, 15 nt, Human
gaagaagagccacag

SEQ ID NO: 2163375 - RNA, 14 nt, Human
gaagaagagccaca

SEQ ID NO: 2163376 - RNA, 23 nt, Human
gaagaaaauggaaccaggcuugg

SEQ ID NO: 2163377 - RNA, 22 nt, Human
gaacuagcauauaauucuauau

SEQ ID NO: 2163378 - RNA, 18 nt, Human
gaaccuucuggccuccca

SEQ ID NO: 2163379 - RNA, 21 nt, Human
gaaccuucuggccucccacag

SEQ ID NO: 2163380 - RNA, 14 nt, Human
gaacagaagaaaau

SEQ ID NO: 2163381 - RNA, 13 nt, Human
gaacagaagaaaa

SEQ ID NO: 2163382 - RNA, 15 nt, Human
gaaccguaggaccca

SEQ ID NO: 2163383 - RNA, 21 nt, Human
cucugugucugaguggcuuca

SEQ ID NO: 2163384 - RNA, 20 nt, Human
cucugugucugaguggcuuc

SEQ ID NO: 2163385 - RNA, 14 nt, Human
cucugugucugagu

SEQ ID NO: 2163386 - RNA, 15 nt, Human
cucuguuuaugcuuu

SEQ ID NO: 2163387 - RNA, 13 nt, Human
cucuguuuaugcu

SEQ ID NO: 2163388 - RNA, 15 nt, Human
cucuucucagccacu

SEQ ID NO: 2163389 - RNA, 14 nt, Human
cucuucucagccac

SEQ ID NO: 2163390 - RNA, 13 nt, Human
cucugaggaagcu

SEQ ID NO: 2163391 - RNA, 19 nt, Human
cucugaauuugagauacaa

SEQ ID NO: 2163392 - RNA, 23 nt, Human
cugaaagugaaaguccagaaacu

SEQ ID NO: 2163393 - RNA, 19 nt, Human
cugaaagugaaaguccaga

SEQ ID NO: 2163394 - RNA, 16 nt, Human
cugaaccccucccucc

SEQ ID NO: 2163395 - RNA, 19 nt, Human
cugaaguucagccacccug

SEQ ID NO: 2163396 - RNA, 17 nt, Human
cugcggagcaagaggag

SEQ ID NO: 2163397 - RNA, 16 nt, Human
cugcggagcaagagga

SEQ ID NO: 2163398 - RNA, 18 nt, Human
cugccuuuggcagaguuc

SEQ ID NO: 2163399 - RNA, 20 nt, Human
cugcgugcagggacaaagag

SEQ ID NO: 2163400 - RNA, 18 nt, Human
cugccuggacuagaggga

SEQ ID NO: 2163401 - RNA, 22 nt, Human
cugcccagcggacaguggcagg

SEQ ID NO: 2163402 - RNA, 18 nt, Human
cugauuuccccuuuugca

SEQ ID NO: 2163403 - RNA, 15 nt, Human
cugauuuccccuuuu

SEQ ID NO: 2163404 - RNA, 13 nt, Human
cugauuuccccuu

SEQ ID NO: 2163405 - RNA, 19 nt, Human
cugauuuccccuuuugcau

SEQ ID NO: 2163406 - RNA, 16 nt, Human
cugauuuagauaugca

SEQ ID NO: 2163407 - RNA, 20 nt, Human
cugcacucuagccuggguga

SEQ ID NO: 2163408 - RNA, 20 nt, Human
cugaguugacuugacagaac

SEQ ID NO: 2163409 - RNA, 21 nt, Human
cugaguugguguugacaugug

SEQ ID NO: 2163410 - RNA, 20 nt, Human
cugaguuguugagucuguuu

SEQ ID NO: 2163411 - RNA, 14 nt, Human
cugagugaaaaauc

SEQ ID NO: 2163412 - RNA, 13 nt, Human
cugagugaaaaau

SEQ ID NO: 2163413 - RNA, 21 nt, Human
cugagugaaaaaucuguggaa

SEQ ID NO: 2163414 - RNA, 14 nt, Human
cugauaagcuucaa

SEQ ID NO: 2163415 - RNA, 18 nt, Human
cugaucaggaccuccaag

SEQ ID NO: 2163416 - RNA, 20 nt, Human
cugagggagcuccaacucag

SEQ ID NO: 2163417 - RNA, 14 nt, Human
cuccuucccuuccu

SEQ ID NO: 2163418 - RNA, 14 nt, Human
cuccugcuguaaau

SEQ ID NO: 2163419 - RNA, 23 nt, Human
cuccugcuguaaauuuggcuucu

SEQ ID NO: 2163420 - RNA, 12 nt, Human
cucgcaggaaga

SEQ ID NO: 2163421 - RNA, 17 nt, Human
cucgauucauauugaau

SEQ ID NO: 2163422 - RNA, 13 nt, Human
cucgcaggaagac

SEQ ID NO: 2163423 - RNA, 15 nt, Human
cuccucaguucuugc

SEQ ID NO: 2163424 - RNA, 19 nt, Human
cucccuggugagagggccg

SEQ ID NO: 2163425 - RNA, 18 nt, Human
cucccugccucaggccuc

SEQ ID NO: 2163426 - RNA, 20 nt, Human
cuccacaccauucaggucuu

SEQ ID NO: 2163427 - RNA, 18 nt, Human
cuccacaccauucagguc

SEQ ID NO: 2163428 - RNA, 18 nt, Human
cuccaauuuuuuuuuccu

SEQ ID NO: 2163429 - RNA, 19 nt, Human
cuccaauuuuuuuuuccuu

SEQ ID NO: 2163430 - RNA, 20 nt, Human
cucaagaagaagaggggcau

SEQ ID NO: 2163431 - RNA, 19 nt, Human
cucaagaagaagaggggca

SEQ ID NO: 2163432 - RNA, 13 nt, Human
cucacagcugagu

SEQ ID NO: 2163433 - RNA, 15 nt, Human
cucacagcugaguug

SEQ ID NO: 2163434 - RNA, 23 nt, Human
cucacaccaggcuugccugcagg

SEQ ID NO: 2163435 - RNA, 14 nt, Human
cuauuuaucuucau

SEQ ID NO: 2163436 - RNA, 17 nt, Human
cuauuccuguaaugaaa

SEQ ID NO: 2163437 - RNA, 16 nt, Human
cucaaaugcucagacc

SEQ ID NO: 2163438 - RNA, 19 nt, Human
cucaaaugcucagaccagc

SEQ ID NO: 2163439 - RNA, 13 nt, Human
cucagagugcaag

SEQ ID NO: 2163440 - RNA, 14 nt, Human
cucacucaccuuca

SEQ ID NO: 2163441 - RNA, 18 nt, Human
cgccagggagaccuggac

SEQ ID NO: 2163442 - RNA, 16 nt, Human
cuaguaaaaauacaaa

SEQ ID NO: 2163443 - RNA, 15 nt, Human
cuauauuguacacac

SEQ ID NO: 2163444 - RNA, 14 nt, Human
cuauauuguacaca

SEQ ID NO: 2163445 - RNA, 13 nt, Human
cuauauuguacac

SEQ ID NO: 2163446 - RNA, 16 nt, Human
cuaugagcuaaauguc

SEQ ID NO: 2163447 - RNA, 11 nt, Human
gaggccuucca

SEQ ID NO: 2163448 - RNA, 20 nt, Human
gaggccccugucucagggug

SEQ ID NO: 2163449 - RNA, 15 nt, Human
gaggccagugagcca

SEQ ID NO: 2163450 - RNA, 19 nt, Human
gagggaacggaaauaaagg

SEQ ID NO: 2163451 - RNA, 13 nt, Human
gagggaccucucc

SEQ ID NO: 2163452 - RNA, 14 nt, Human
gagggaccucuccc

SEQ ID NO: 2163453 - RNA, 15 nt, Human
gagggaccucuccca

SEQ ID NO: 2163454 - RNA, 17 nt, Human
gagggaccucucccagg

SEQ ID NO: 2163455 - RNA, 18 nt, Human
gagggaccucucccaggg

SEQ ID NO: 2163456 - RNA, 19 nt, Human
gaggagguaaugaauuaaa

SEQ ID NO: 2163457 - RNA, 18 nt, Human
gaggagcucaggacacua

SEQ ID NO: 2163458 - RNA, 22 nt, Human
gagcaggcggugggcacccacc

SEQ ID NO: 2163459 - RNA, 18 nt, Human
gagcaggcggugggcacc

SEQ ID NO: 2163460 - RNA, 15 nt, Human
gagccacuccggccc

SEQ ID NO: 2163461 - RNA, 18 nt, Human
gagccaugggcacaaagg

SEQ ID NO: 2163462 - RNA, 17 nt, Human
gagccaugggcacaaag

SEQ ID NO: 2163463 - RNA, 15 nt, Human
gagcacacccagccc

SEQ ID NO: 2163464 - RNA, 13 nt, Human
gagcacacccagc

SEQ ID NO: 2163465 - RNA, 16 nt, Human
gagcacacccagcccc

SEQ ID NO: 2163466 - RNA, 14 nt, Human
gagcucaggacacu

SEQ ID NO: 2163467 - RNA, 17 nt, Human
gagcucaggacacuaau

SEQ ID NO: 2163468 - RNA, 18 nt, Human
gagcuacccgcagaguuc

SEQ ID NO: 2163469 - RNA, 19 nt, Human
gagcuccaacucagaaggg

SEQ ID NO: 2163470 - RNA, 18 nt, Human
gagcuccaacucagaagg

SEQ ID NO: 2163471 - RNA, 22 nt, Human
gagcucccaggugcagccagag

SEQ ID NO: 2163472 - RNA, 19 nt, Human
gagcugcaggggcauggga

SEQ ID NO: 2163473 - RNA, 19 nt, Human
gagcuuccuguccucccag

SEQ ID NO: 2163474 - RNA, 19 nt, Human
gagcggugcuguccucagg

SEQ ID NO: 2163475 - RNA, 23 nt, Human
gaguaaaauaaauauugucuuuu

SEQ ID NO: 2163476 - RNA, 22 nt, Human
gaguaaaauaaauauugucuuu

SEQ ID NO: 2163477 - RNA, 22 nt, Human
gaguuuuucccagcuacaccuu

SEQ ID NO: 2163478 - RNA, 20 nt, Human
gaguggcuucacuccugcug

SEQ ID NO: 2163479 - RNA, 19 nt, Human
gaguggcuucacuccugcu

SEQ ID NO: 2163480 - RNA, 15 nt, Human
gaguggcuucacucc

SEQ ID NO: 2163481 - RNA, 22 nt, Human
gaguuagaauaauaaauauuua

SEQ ID NO: 2163482 - RNA, 21 nt, Human
gaguuagaauaauaaauauuu

SEQ ID NO: 2163483 - RNA, 16 nt, Human
gaguuagaauaauaaa

SEQ ID NO: 2163484 - RNA, 20 nt, Human
gauggcaggacgugggcugg

SEQ ID NO: 2163485 - RNA, 23 nt, Human
gaugggacuagagcuuucuuuca

SEQ ID NO: 2163486 - RNA, 13 nt, Human
gaugcuauuugca

SEQ ID NO: 2163487 - RNA, 14 nt, Human
gaugcuauuugcaa

SEQ ID NO: 2163488 - RNA, 13 nt, Human
gaugcccugcccu

SEQ ID NO: 2163489 - RNA, 13 nt, Human
gaugacucaagau

SEQ ID NO: 2163490 - RNA, 16 nt, Human
gaugacucaagauucc

SEQ ID NO: 2163491 - RNA, 14 nt, Human
gaugacucaagauu

SEQ ID NO: 2163492 - RNA, 23 nt, Human
gaugacucaagauucccaggagu

SEQ ID NO: 2163493 - RNA, 22 nt, Human
gaugacucaagauucccaggag

SEQ ID NO: 2163494 - RNA, 21 nt, Human
gaugacucaagauucccagga

SEQ ID NO: 2163495 - RNA, 16 nt, Human
gaucuucaacaaauug

SEQ ID NO: 2163496 - RNA, 13 nt, Human
gaucuucaacaaa

SEQ ID NO: 2163497 - RNA, 15 nt, Human
gaucuucaacaaauu

SEQ ID NO: 2163498 - RNA, 16 nt, Human
gaucuuuucaaguuaa

SEQ ID NO: 2163499 - RNA, 24 nt, Human
gaucuuuuguucccauccucuucu

SEQ ID NO: 2163500 - RNA, 18 nt, Human
gaucuuuuguucccaucc

SEQ ID NO: 2163501 - RNA, 15 nt, Human
gaucuuuuguuccca

SEQ ID NO: 2163502 - RNA, 16 nt, Human
gaugggcccaauucuu

SEQ ID NO: 2163503 - RNA, 15 nt, Human
gauuccugagccagu

SEQ ID NO: 2163504 - RNA, 21 nt, Human
gauucccaggaguucugcuca

SEQ ID NO: 2163505 - RNA, 13 nt, Human
gauucccaggagu

SEQ ID NO: 2163506 - RNA, 12 nt, Human
gauucccaggag

SEQ ID NO: 2163507 - RNA, 19 nt, Human
gauucccaggaguucugcu

SEQ ID NO: 2163508 - RNA, 16 nt, Human
gauucacuucacgcuu

SEQ ID NO: 2163509 - RNA, 15 nt, Human
gccacaggucuuuau

SEQ ID NO: 2163510 - RNA, 22 nt, Human
gccacacucugggcuccagagu

SEQ ID NO: 2163511 - RNA, 18 nt, Human
gccauggacagaagaagg

SEQ ID NO: 2163512 - RNA, 13 nt, Human
gccauuuugcauu

SEQ ID NO: 2163513 - RNA, 20 nt, Human
gccauuuugcauuuucaucu

SEQ ID NO: 2163514 - RNA, 21 nt, Human
gccaugggcacaaagggccca

SEQ ID NO: 2163515 - RNA, 14 nt, Human
gccauuuuuacugu

SEQ ID NO: 2163516 - RNA, 20 nt, Human
gccagugaugcuaaagguug

SEQ ID NO: 2163517 - RNA, 19 nt, Human
gccagugaugcuaaagguu

SEQ ID NO: 2163518 - RNA, 15 nt, Human
gccagugagccacuc

SEQ ID NO: 2163519 - RNA, 19 nt, Human
gccagggagaccuggacac

SEQ ID NO: 2163520 - RNA, 18 nt, Human
gccagggagaccuggaca

SEQ ID NO: 2163521 - RNA, 15 nt, Human
gccagggagaccugg

SEQ ID NO: 2163522 - RNA, 21 nt, Human
gccaguaaaaaaaaaaaaugg

SEQ ID NO: 2163523 - RNA, 22 nt, Human
gccagggagaccuggacacagg

SEQ ID NO: 2163524 - RNA, 21 nt, Human
gccagggagaccuggacacag

SEQ ID NO: 2163525 - RNA, 18 nt, Human
gcccagcggacaguggca

SEQ ID NO: 2163526 - RNA, 21 nt, Human
gcccagcggacaguggcagga

SEQ ID NO: 2163527 - RNA, 20 nt, Human
gcccagcggacaguggcagg

SEQ ID NO: 2163528 - RNA, 19 nt, Human
gcccagcggacaguggcag

SEQ ID NO: 2163529 - RNA, 17 nt, Human
gcccaguccuuccaccu

SEQ ID NO: 2163530 - RNA, 15 nt, Human
gcccaguccuuccac

SEQ ID NO: 2163531 - RNA, 14 nt, Human
gcccaguccuucca

SEQ ID NO: 2163532 - RNA, 19 nt, Human
gcccaguccuuccaccucg

SEQ ID NO: 2163533 - RNA, 18 nt, Human
gcccaguccuuccaccuc

SEQ ID NO: 2163534 - RNA, 19 nt, Human
gcccagauuaugagacaca

SEQ ID NO: 2163535 - RNA, 22 nt, Human
gcccagauuaaagucuuuaucc

SEQ ID NO: 2163536 - RNA, 22 nt, Human
gcccagauuaugagacacagga

SEQ ID NO: 2163537 - RNA, 20 nt, Human
gcccagauuaugagacacag

SEQ ID NO: 2163538 - RNA, 17 nt, Human
gcccagccaggccccag

SEQ ID NO: 2163539 - RNA, 16 nt, Human
gcccagccaggcccca

SEQ ID NO: 2163540 - RNA, 15 nt, Human
gcccagccaggcccc

SEQ ID NO: 2163541 - RNA, 14 nt, Human
gcccagccaggccc

SEQ ID NO: 2163542 - RNA, 22 nt, Human
gcccaauucuuacaaacaugug

SEQ ID NO: 2163543 - RNA, 22 nt, Human
gcagauguaaaguuauucuuga

SEQ ID NO: 2163544 - RNA, 20 nt, Human
gcagauguaaaguuauucuu

SEQ ID NO: 2163545 - RNA, 17 nt, Human
gcagagaagcucucggg

SEQ ID NO: 2163546 - RNA, 18 nt, Human
gcagacugaucaggaccu

SEQ ID NO: 2163547 - RNA, 19 nt, Human
gcagaggggcagauggaaa

SEQ ID NO: 2163548 - RNA, 15 nt, Human
gcagcucagcuuccc

SEQ ID NO: 2163549 - RNA, 17 nt, Human
gcaggacgugggcuggg

SEQ ID NO: 2163550 - RNA, 17 nt, Human
gcacagcccaaagaagg

SEQ ID NO: 2163551 - RNA, 22 nt, Human
gcauccacuucuuucagcagac

SEQ ID NO: 2163552 - RNA, 23 nt, Human
gcaggcggugggcacccacccug

SEQ ID NO: 2163553 - RNA, 16 nt, Human
gcaggcggugggcacc

SEQ ID NO: 2163554 - RNA, 15 nt, Human
gcaggcggugggcac

SEQ ID NO: 2163555 - RNA, 14 nt, Human
gcaggcggugggca

SEQ ID NO: 2163556 - RNA, 17 nt, Human
gcaggccaggccagcug

SEQ ID NO: 2163557 - RNA, 15 nt, Human
gcaggccaggccagc

SEQ ID NO: 2163558 - RNA, 16 nt, Human
gcaggccaggccagcu

SEQ ID NO: 2163559 - RNA, 21 nt, Human
gcuuguuaaugcuuucugaag

SEQ ID NO: 2163560 - RNA, 23 nt, Human
gcuuguuaaugcuuucugaagcu

SEQ ID NO: 2163561 - RNA, 13 nt, Human
gcuuguuaaugcu

SEQ ID NO: 2163562 - RNA, 16 nt, Human
gcuuggacggcugggc

SEQ ID NO: 2163563 - RNA, 18 nt, Human
gcuuggaaacuggaugag

SEQ ID NO: 2163564 - RNA, 14 nt, Human
gcuugccugcaggc

SEQ ID NO: 2163565 - RNA, 13 nt, Human
gcuugccugcagg

SEQ ID NO: 2163566 - RNA, 19 nt, Human
gcuucuguugucaccuuca

SEQ ID NO: 2163567 - RNA, 20 nt, Human
gcuuugguuauauuuagcuc

SEQ ID NO: 2163568 - RNA, 19 nt, Human
gcuuacggcccuggccuug

SEQ ID NO: 2163569 - RNA, 17 nt, Human
gcuuacggcccuggccu

SEQ ID NO: 2163570 - RNA, 16 nt, Human
gcuuacggcccuggcc

SEQ ID NO: 2163571 - RNA, 15 nt, Human
gcuuacggcccuggc

SEQ ID NO: 2163572 - RNA, 12 nt, Human
gcuuacggcccu

SEQ ID NO: 2163573 - RNA, 18 nt, Human
gcuucucauccugcaggc

SEQ ID NO: 2163574 - RNA, 17 nt, Human
gcuucucauccugcagg

SEQ ID NO: 2163575 - RNA, 17 nt, Human
gcuucuguugucaccuu

SEQ ID NO: 2163576 - RNA, 16 nt, Human
gcuucuguugucaccu

SEQ ID NO: 2163577 - RNA, 16 nt, Human
gcuucucauccugcag

SEQ ID NO: 2163578 - RNA, 22 nt, Human
gcuggucaaacaaacucucuga

SEQ ID NO: 2163579 - RNA, 20 nt, Human
gcuguccucagguggccaug

SEQ ID NO: 2163580 - RNA, 19 nt, Human
gcuguccucagguggccau

SEQ ID NO: 2163581 - RNA, 18 nt, Human
gcuguccucagguggcca

SEQ ID NO: 2163582 - RNA, 13 nt, Human
gcuguccucaggu

SEQ ID NO: 2163583 - RNA, 17 nt, Human
gcugcgucauuacaggg

SEQ ID NO: 2163584 - RNA, 16 nt, Human
gcugcggagcaagagg

SEQ ID NO: 2163585 - RNA, 15 nt, Human
gcugcggagcaagag

SEQ ID NO: 2163586 - RNA, 20 nt, Human
gcuggaaacagacucgauuc

SEQ ID NO: 2163587 - RNA, 21 nt, Human
gcuggcaugauccaagcaaga

SEQ ID NO: 2163588 - RNA, 23 nt, Human
gcuggccaucugguuaggauggc

SEQ ID NO: 2163589 - RNA, 12 nt, Human
gcucuuugcacu

SEQ ID NO: 2163590 - RNA, 13 nt, Human
gcucuuugcacua

SEQ ID NO: 2163591 - RNA, 19 nt, Human
gccuuccuauuuugcauaa

SEQ ID NO: 2163592 - RNA, 15 nt, Human
gccuuguugaugugg

SEQ ID NO: 2163593 - RNA, 18 nt, Human
gcgccgcaaaccacacug

SEQ ID NO: 2163594 - RNA, 17 nt, Human
gcgccgcaaaccacacu

SEQ ID NO: 2163595 - RNA, 22 nt, Human
gcgcccaguccuuccaccucga

SEQ ID NO: 2163596 - RNA, 20 nt, Human
gccuggauguugcugugcac

SEQ ID NO: 2163597 - RNA, 12 nt, Human
gcucauuuacug

SEQ ID NO: 2163598 - RNA, 14 nt, Human
gcucauucuaauga

SEQ ID NO: 2163599 - RNA, 18 nt, Human
gcucauucuaaugauggc

SEQ ID NO: 2163600 - RNA, 17 nt, Human
gcucauuuacuguuuua

SEQ ID NO: 2163601 - RNA, 14 nt, Human
gcucacaccuguaa

SEQ ID NO: 2163602 - RNA, 19 nt, Human
gcuauccagcuauuuuuau

SEQ ID NO: 2163603 - RNA, 18 nt, Human
gcggugcuguccucaggu

SEQ ID NO: 2163604 - RNA, 16 nt, Human
gcggugcuguccucag

SEQ ID NO: 2163605 - RNA, 14 nt, Human
ggagccucccugcc

SEQ ID NO: 2163606 - RNA, 18 nt, Human
ggagccuaggccaggugc

SEQ ID NO: 2163607 - RNA, 17 nt, Human
ggagccuaggccaggug

SEQ ID NO: 2163608 - RNA, 16 nt, Human
ggagccuaggccaggu

SEQ ID NO: 2163609 - RNA, 18 nt, Human
ggagccucccugccucag

SEQ ID NO: 2163610 - RNA, 22 nt, Human
ggagccucccugccucaggccu

SEQ ID NO: 2163611 - RNA, 16 nt, Human
ggagccucccugccuc

SEQ ID NO: 2163612 - RNA, 15 nt, Human
ggagccucccugccu

SEQ ID NO: 2163613 - RNA, 17 nt, Human
ggagacaggcagagcug

SEQ ID NO: 2163614 - RNA, 13 nt, Human
ggagcaagaggag

SEQ ID NO: 2163615 - RNA, 15 nt, Human
ggagcaagaggaggc

SEQ ID NO: 2163616 - RNA, 17 nt, Human
ggagcacacccagcccc

SEQ ID NO: 2163617 - RNA, 15 nt, Human
ggagcacacccagcc

SEQ ID NO: 2163618 - RNA, 14 nt, Human
ggagcacacccagc

SEQ ID NO: 2163619 - RNA, 15 nt, Human
ggagcuagccagagg

SEQ ID NO: 2163620 - RNA, 12 nt, Human
ggagcuagccag

SEQ ID NO: 2163621 - RNA, 20 nt, Human
ggagcuccaacucagaaggg

SEQ ID NO: 2163622 - RNA, 14 nt, Human
ggacagaagaaggc

SEQ ID NO: 2163623 - RNA, 23 nt, Human
ggacagacucacaaccugaaccu

SEQ ID NO: 2163624 - RNA, 12 nt, Human
ggagacaggcag

SEQ ID NO: 2163625 - RNA, 18 nt, Human
ggacugaaaaccucuccu

SEQ ID NO: 2163626 - RNA, 16 nt, Human
ggacugaaaaccucuc

SEQ ID NO: 2163627 - RNA, 17 nt, Human
ggacugaaaaccucucc

SEQ ID NO: 2163628 - RNA, 20 nt, Human
ggacgaagaagagccacagu

SEQ ID NO: 2163629 - RNA, 19 nt, Human
ggacgaagaagagccacag

SEQ ID NO: 2163630 - RNA, 23 nt, Human
ggaccaugcgacacugggaggcc

SEQ ID NO: 2163631 - RNA, 15 nt, Human
ggauuccucuuuucu

SEQ ID NO: 2163632 - RNA, 18 nt, Human
ggauuccucuuuucucug

SEQ ID NO: 2163633 - RNA, 13 nt, Human
ggauuccucuuuu

SEQ ID NO: 2163634 - RNA, 22 nt, Human
ggcacccaagaccucagggcac

SEQ ID NO: 2163635 - RNA, 18 nt, Human
ggcacccaagaccucagg

SEQ ID NO: 2163636 - RNA, 18 nt, Human
ggcagagcugcuccccuc

SEQ ID NO: 2163637 - RNA, 21 nt, Human
ggccagaagaugaacagacug

SEQ ID NO: 2163638 - RNA, 14 nt, Human
ggccagaagaugaa

SEQ ID NO: 2163639 - RNA, 12 nt, Human
ggcagcugccac

SEQ ID NO: 2163640 - RNA, 21 nt, Human
ggcagaguucuauaauguaaa

SEQ ID NO: 2163641 - RNA, 15 nt, Human
ggcaugauccaagca

SEQ ID NO: 2163642 - RNA, 18 nt, Human
ggcaugauccaagcaaga

SEQ ID NO: 2163643 - RNA, 16 nt, Human
ggcaugauccaagcaa

SEQ ID NO: 2163644 - RNA, 14 nt, Human
ggccgggcagaggg

SEQ ID NO: 2163645 - RNA, 16 nt, Human
ggccgggcagaggggc

SEQ ID NO: 2163646 - RNA, 19 nt, Human
ggccucgcaggaagaccca

SEQ ID NO: 2163647 - RNA, 14 nt, Human
ggcgcacugccucu

SEQ ID NO: 2163648 - RNA, 16 nt, Human
ggcgcacugccucuca

SEQ ID NO: 2163649 - RNA, 19 nt, Human
ggcgccgcaaaccacacug

SEQ ID NO: 2163650 - RNA, 16 nt, Human
ggcuggagugaggaaa

SEQ ID NO: 2163651 - RNA, 14 nt, Human
ggcuggagugagga

SEQ ID NO: 2163652 - RNA, 13 nt, Human
ggcuugccugcag

SEQ ID NO: 2163653 - RNA, 17 nt, Human
ggcuucacuccugcugu

SEQ ID NO: 2163654 - RNA, 15 nt, Human
ggcuucacuccugcu

SEQ ID NO: 2163655 - RNA, 15 nt, Human
ggcuugccugcaggc

SEQ ID NO: 2163656 - RNA, 14 nt, Human
ggcuugccugcagg

SEQ ID NO: 2163657 - RNA, 21 nt, Human
gggacgaagaagagccacagu

SEQ ID NO: 2163658 - RNA, 20 nt, Human
gggacgaagaagagccacag

SEQ ID NO: 2163659 - RNA, 19 nt, Human
gggacgaagaagagccaca

SEQ ID NO: 2163660 - RNA, 17 nt, Human
gggacgaagaagagcca

SEQ ID NO: 2163661 - RNA, 13 nt, Human
gggacccccgccc

SEQ ID NO: 2163662 - RNA, 19 nt, Human
gggacccccgcccccugcc

SEQ ID NO: 2163663 - RNA, 18 nt, Human
gggacccccgcccccugc

SEQ ID NO: 2163664 - RNA, 17 nt, Human
gggacccccgcccccug

SEQ ID NO: 2163665 - RNA, 14 nt, Human
gggacccccgcccc

SEQ ID NO: 2163666 - RNA, 24 nt, Human
gggacccccgcccccugcccuccc

SEQ ID NO: 2163667 - RNA, 21 nt, Human
gggacccccgcccccugcccu

SEQ ID NO: 2163668 - RNA, 15 nt, Human
ggcuuugcaaccauu

SEQ ID NO: 2163669 - RNA, 21 nt, Human
ggcuuugcaaccauuuucauu

SEQ ID NO: 2163670 - RNA, 18 nt, Human
ggcuuuuacugaagccuu

SEQ ID NO: 2163671 - RNA, 20 nt, Human
ggcuuuuacugaagccuuuc

SEQ ID NO: 2163672 - RNA, 16 nt, Human
gggagcugcaggggca

SEQ ID NO: 2163673 - RNA, 18 nt, Human
gggagcuagccagaggac

SEQ ID NO: 2163674 - RNA, 15 nt, Human
gggagcuagccagag

SEQ ID NO: 2163675 - RNA, 21 nt, Human
gggagcuccaacucagaaggg

SEQ ID NO: 2163676 - RNA, 12 nt, Human
gggagccucccu

SEQ ID NO: 2163677 - RNA, 21 nt, Human
gggagccucccugccucaggc

SEQ ID NO: 2163678 - RNA, 15 nt, Human
ucaggcuugauaaua

SEQ ID NO: 2163679 - RNA, 16 nt, Human
ucagggaaaagcagcu

SEQ ID NO: 2163680 - RNA, 18 nt, Human
ucagggaaaagcagcucu

SEQ ID NO: 2163681 - RNA, 19 nt, Human
ucagggaaaagcagcucuc

SEQ ID NO: 2163682 - RNA, 23 nt, Human
ucagggaaaagcagcucuccccu

SEQ ID NO: 2163683 - RNA, 19 nt, Human
ucacucugugucugagugg

SEQ ID NO: 2163684 - RNA, 18 nt, Human
ucagacgcacucgcauug

SEQ ID NO: 2163685 - RNA, 18 nt, Human
ucagaccuuuuaacuccu

SEQ ID NO: 2163686 - RNA, 14 nt, Human
ucagaaacaggacc

SEQ ID NO: 2163687 - RNA, 23 nt, Human
uccacacaacauauccguauaua

SEQ ID NO: 2163688 - RNA, 22 nt, Human
uauucgcuugagaaaaaaagaa

SEQ ID NO: 2163689 - RNA, 17 nt, Human
uauucgcuugagaaaaa

SEQ ID NO: 2163690 - RNA, 14 nt, Human
uauucgcuugagaa

SEQ ID NO: 2163691 - RNA, 17 nt, Human
uauguaugguauccaag

SEQ ID NO: 2163692 - RNA, 18 nt, Human
uauguacaggaugcuuug

SEQ ID NO: 2163693 - RNA, 23 nt, Human
uauguugagucgcgcaccgaaaa

SEQ ID NO: 2163694 - RNA, 20 nt, Human
uauuaaauggaaacugaaac

SEQ ID NO: 2163695 - RNA, 19 nt, Human
uauuaaauggaaacugaaa

SEQ ID NO: 2163696 - RNA, 18 nt, Human
uauuaaauggaaacugaa

SEQ ID NO: 2163697 - RNA, 17 nt, Human
uauuaaauggaaacuga

SEQ ID NO: 2163698 - RNA, 21 nt, Human
uauuaauacaaugaugcuauu

SEQ ID NO: 2163699 - RNA, 23 nt, Human
uauuaauacaaugaugcuauuug

SEQ ID NO: 2163700 - RNA, 16 nt, Human
ucaauaaaaaaaagaa

SEQ ID NO: 2163701 - RNA, 19 nt, Human
ucaaugguuugcaaggaag

SEQ ID NO: 2163702 - RNA, 18 nt, Human
ucaaugguuugcaaggaa

SEQ ID NO: 2163703 - RNA, 23 nt, Human
ucaauguacuaggauacugcugc

SEQ ID NO: 2163704 - RNA, 22 nt, Human
ucaauguacuaggauacugcug

SEQ ID NO: 2163705 - RNA, 20 nt, Human
ucacaccugaacugaacacc

SEQ ID NO: 2163706 - RNA, 16 nt, Human
uauuuuccaugaaaau

SEQ ID NO: 2163707 - RNA, 20 nt, Human
uauuuuccaugaaaaugcaa

SEQ ID NO: 2163708 - RNA, 14 nt, Human
ucaaaugcucagac

SEQ ID NO: 2163709 - RNA, 19 nt, Human
ucaaaugcucagaccagcu

SEQ ID NO: 2163710 - RNA, 21 nt, Human
ucaaaugcucagaccagcucu

SEQ ID NO: 2163711 - RNA, 18 nt, Human
ucaacccuaaaaagcaga

SEQ ID NO: 2163712 - RNA, 22 nt, Human
ucaacccuaaaaagcagagcuu

SEQ ID NO: 2163713 - RNA, 23 nt, Human
ucaacccuaaaaagcagagcuuu

SEQ ID NO: 2163714 - RNA, 14 nt, Human
ucaaaaaacaaaaa

SEQ ID NO: 2163715 - RNA, 14 nt, Human
ucuucucagccacu

SEQ ID NO: 2163716 - RNA, 13 nt, Human
ucuguuuuguaaa

SEQ ID NO: 2163717 - RNA, 22 nt, Human
ucuguuuuguaaaguccccaga

SEQ ID NO: 2163718 - RNA, 15 nt, Human
ucuguuuuguaaagu

SEQ ID NO: 2163719 - RNA, 17 nt, Human
ucuuaaacaaauguaug

SEQ ID NO: 2163720 - RNA, 16 nt, Human
ucugcugguuuuaaca

SEQ ID NO: 2163721 - RNA, 17 nt, Human
ucugguuaggauggcag

SEQ ID NO: 2163722 - RNA, 13 nt, Human
ucucuaacaaugu

SEQ ID NO: 2163723 - RNA, 22 nt, Human
ucucuaaagaguuuauuuuaag

SEQ ID NO: 2163724 - RNA, 21 nt, Human
ucucuaaagaguuuauuuuaa

SEQ ID NO: 2163725 - RNA, 19 nt, Human
ucucuaaagaguuuauuuu

SEQ ID NO: 2163726 - RNA, 11 nt, Human
ucucugaaccc

SEQ ID NO: 2163727 - RNA, 14 nt, Human
ucgagucaaaaugu

SEQ ID NO: 2163728 - RNA, 19 nt, Human
ucuaacaauguauuuucuu

SEQ ID NO: 2163729 - RNA, 23 nt, Human
ucuauauuuugggaaaaaaacau

SEQ ID NO: 2163730 - RNA, 15 nt, Human
ucuacuuuaauaaau

SEQ ID NO: 2163731 - RNA, 14 nt, Human
ucuacuuuaauaaa

SEQ ID NO: 2163732 - RNA, 22 nt, Human
ucuacuugcucuggaccugccc

SEQ ID NO: 2163733 - RNA, 21 nt, Human
ucuacuugcucuggaccugcc

SEQ ID NO: 2163734 - RNA, 20 nt, Human
ucuacuugcucuggaccugc

SEQ ID NO: 2163735 - RNA, 19 nt, Human
ucuacuugcucuggaccug

SEQ ID NO: 2163736 - RNA, 20 nt, Human
uccuuuuaaaucuugauacc

SEQ ID NO: 2163737 - RNA, 24 nt, Human
uccuuuuauuucuucaccagauuu

SEQ ID NO: 2163738 - RNA, 16 nt, Human
ucccuaguaaaaauac

SEQ ID NO: 2163739 - RNA, 17 nt, Human
ucccuucgacagcauuu

SEQ ID NO: 2163740 - RNA, 20 nt, Human
ucccuuccuuguagccuuuu

SEQ ID NO: 2163741 - RNA, 23 nt, Human
ucccuugaggaaacaacagcuuu

SEQ ID NO: 2163742 - RNA, 18 nt, Human
ucccugccucaggccucu

SEQ ID NO: 2163743 - RNA, 17 nt, Human
ucccugccucaggccuc

SEQ ID NO: 2163744 - RNA, 16 nt, Human
ucccugccucaggccu

SEQ ID NO: 2163745 - RNA, 11 nt, Human
ucccugccuca

SEQ ID NO: 2163746 - RNA, 20 nt, Human
ucccugccucaggccucugu

SEQ ID NO: 2163747 - RNA, 19 nt, Human
uccucguucucccugggag

SEQ ID NO: 2163748 - RNA, 16 nt, Human
uccucguucucccugg

SEQ ID NO: 2163749 - RNA, 15 nt, Human
uccucguucucccug

SEQ ID NO: 2163750 - RNA, 21 nt, Human
uccucguucucccugggaggc

SEQ ID NO: 2163751 - RNA, 17 nt, Human
uccucauguucugcuuu

SEQ ID NO: 2163752 - RNA, 15 nt, Human
uccucugcuuugaaa

SEQ ID NO: 2163753 - RNA, 17 nt, Human
uccucugcuuugaaagc

SEQ ID NO: 2163754 - RNA, 21 nt, Human
uccuauucuuucgaaagaaga

SEQ ID NO: 2163755 - RNA, 13 nt, Human
uguaaaacaggua

SEQ ID NO: 2163756 - RNA, 14 nt, Human
uguaaaacagguag

SEQ ID NO: 2163757 - RNA, 22 nt, Human
uguaaaacagguagaauuaucu

SEQ ID NO: 2163758 - RNA, 12 nt, Human
uguaaaacaggu

SEQ ID NO: 2163759 - RNA, 18 nt, Human
uguaaauuuggcuucugu

SEQ ID NO: 2163760 - RNA, 16 nt, Human
uguaaauuuggcuucu

SEQ ID NO: 2163761 - RNA, 21 nt, Human
uguaaauuuggcuucuguugu

SEQ ID NO: 2163762 - RNA, 15 nt, Human
uggugguaucugagu

SEQ ID NO: 2163763 - RNA, 15 nt, Human
uggugggagggggag

SEQ ID NO: 2163764 - RNA, 16 nt, Human
ugucugaguggcuuca

SEQ ID NO: 2163765 - RNA, 18 nt, Human
uguccucccagcuccuca

SEQ ID NO: 2163766 - RNA, 17 nt, Human
uguccuccaagccagcg

SEQ ID NO: 2163767 - RNA, 17 nt, Human
ugucacagggacugaaa

SEQ ID NO: 2163768 - RNA, 16 nt, Human
uggcagcugccacgcc

SEQ ID NO: 2163769 - RNA, 21 nt, Human
uggaaacuggaugaggucaua

SEQ ID NO: 2163770 - RNA, 18 nt, Human
uggaaacauucaggagcu

SEQ ID NO: 2163771 - RNA, 23 nt, Human
ugcuuucugaagcuuuaccagcu

SEQ ID NO: 2163772 - RNA, 21 nt, Human
ugcuuucugaagcuuuaccag

SEQ ID NO: 2163773 - RNA, 20 nt, Human
ugcuuucugaagcuuuacca

SEQ ID NO: 2163774 - RNA, 15 nt, Human
ugcuuucugaagcuu

SEQ ID NO: 2163775 - RNA, 12 nt, Human
ugcuuaaugaaa

SEQ ID NO: 2163776 - RNA, 14 nt, Human
ugcuuaaugaaaag

SEQ ID NO: 2163777 - RNA, 22 nt, Human
ugcuuccauggccguguagaag

SEQ ID NO: 2163778 - RNA, 23 nt, Human
ugcuuccauggccguguagaagc

SEQ ID NO: 2163779 - RNA, 15 nt, Human
uggacggcugggcac

SEQ ID NO: 2163780 - RNA, 14 nt, Human
uggacauuuaccuu

SEQ ID NO: 2163781 - RNA, 14 nt, Human
uggcaaccugcuuc

SEQ ID NO: 2163782 - RNA, 13 nt, Human
uggcaaccugcuu

SEQ ID NO: 2163783 - RNA, 14 nt, Human
ugauauccuucuag

SEQ ID NO: 2163784 - RNA, 14 nt, Human
ugauauaaauaaaa

SEQ ID NO: 2163785 - RNA, 14 nt, Human
ugaucugaaaaaua

SEQ ID NO: 2163786 - RNA, 13 nt, Human
ugaugcuauuugc

SEQ ID NO: 2163787 - RNA, 20 nt, Human
ugaugcuauuugcaauuccu

SEQ ID NO: 2163788 - RNA, 16 nt, Human
ugauagugguggaguu

SEQ ID NO: 2163789 - RNA, 20 nt, Human
ugaguugguguugacaugug

SEQ ID NO: 2163790 - RNA, 15 nt, Human
ugagguugcuuuguu

SEQ ID NO: 2163791 - RNA, 16 nt, Human
ugaguccuagagcuac

SEQ ID NO: 2163792 - RNA, 22 nt, Human
ucuugaaucuagggagggggaa

SEQ ID NO: 2163793 - RNA, 22 nt, Human
ugagaaauucaacguuaauaau

SEQ ID NO: 2163794 - RNA, 14 nt, Human
ugagaggcauuucc

SEQ ID NO: 2163795 - RNA, 16 nt, Human
ugagaggcauuucccc

SEQ ID NO: 2163796 - RNA, 18 nt, Human
ugagauccuuccuuuuga

SEQ ID NO: 2163797 - RNA, 23 nt, Human
ugagcucccaggugcagccagag

SEQ ID NO: 2163798 - RNA, 21 nt, Human
ugagcucccaggugcagccag

SEQ ID NO: 2163799 - RNA, 16 nt, Human
ugcaaugacucaggac

SEQ ID NO: 2163800 - RNA, 17 nt, Human
ugcacucuuuaagggag

SEQ ID NO: 2163801 - RNA, 20 nt, Human
ugcacaaaguggcauaaaaa

SEQ ID NO: 2163802 - RNA, 15 nt, Human
ugcacaaaguggcau

SEQ ID NO: 2163803 - RNA, 14 nt, Human
ugcacaaaguggca

SEQ ID NO: 2163804 - RNA, 21 nt, Human
ugcaaccagggagcugcaggg

SEQ ID NO: 2163805 - RNA, 20 nt, Human
ugcaaccagggagcugcagg

SEQ ID NO: 2163806 - RNA, 17 nt, Human
ugcaaccagggagcugc

SEQ ID NO: 2163807 - RNA, 17 nt, Human
ugccacaguauauuuuu

SEQ ID NO: 2163808 - RNA, 17 nt, Human
ugcaucccccccaccuc

SEQ ID NO: 2163809 - RNA, 15 nt, Human
ugcaucccccccacc

SEQ ID NO: 2163810 - RNA, 23 nt, Human
ugcauguuuguuguauacuuccu

SEQ ID NO: 2163811 - RNA, 13 nt, Human
ugccucccuggug

SEQ ID NO: 2163812 - RNA, 14 nt, Human
ugccucccugguga

SEQ ID NO: 2163813 - RNA, 22 nt, Human
ugccucccuggugagagggccg

SEQ ID NO: 2163814 - RNA, 22 nt, Human
ugccuccgcgugaucaaagcca

SEQ ID NO: 2163815 - RNA, 18 nt, Human
uuuucccagcuacaccuu

SEQ ID NO: 2163816 - RNA, 19 nt, Human
uuuucccagcuacaccuuu

SEQ ID NO: 2163817 - RNA, 15 nt, Human
uuuucuucacugucc

SEQ ID NO: 2163818 - RNA, 14 nt, Human
uuuuaccuucacug

SEQ ID NO: 2163819 - RNA, 20 nt, Human
uuuguguauuuaacagggag

SEQ ID NO: 2163820 - RNA, 13 nt, Human
uuuguguauuuaa

SEQ ID NO: 2163821 - RNA, 23 nt, Human
uuugguaguggaaaaaaaaaaga

SEQ ID NO: 2163822 - RNA, 13 nt, Human
uuugcauucuccc

SEQ ID NO: 2163823 - RNA, 23 nt, Human
uuucccuuugagguugcuuuguu

SEQ ID NO: 2163824 - RNA, 20 nt, Human
uuugcacuaagauauuucca

SEQ ID NO: 2163825 - RNA, 19 nt, Human
uuuuucauugccaaaaacu

SEQ ID NO: 2163826 - RNA, 13 nt, Human
uuuuuaaucucca

SEQ ID NO: 2163827 - RNA, 19 nt, Human
uuuuuaaccccgucaacaa

SEQ ID NO: 2163828 - RNA, 20 nt, Human
uuuugacuuucauuggaaau

SEQ ID NO: 2163829 - RNA, 22 nt, Human
uuuuuaacucaauauuuuccau

SEQ ID NO: 2163830 - RNA, 20 nt, Human
uuuuuuaaccccgucaacaa

SEQ ID NO: 2163831 - RNA, 13 nt, Human
uuuuuuaaaaacu

SEQ ID NO: 2163832 - RNA, 23 nt, Human
uuuuucccuucaucugggcacug

SEQ ID NO: 2163833 - RNA, 19 nt, Human
uuuuucccagcuacaccuu

SEQ ID NO: 2163834 - RNA, 16 nt, Human
uugcacuaagauauuu

SEQ ID NO: 2163835 - RNA, 13 nt, Human
uuguaaaacaggu

SEQ ID NO: 2163836 - RNA, 15 nt, Human
uuguaaaacagguag

SEQ ID NO: 2163837 - RNA, 14 nt, Human
uuguaaaacaggua

SEQ ID NO: 2163838 - RNA, 17 nt, Human
uuguuaauauucauuuu

SEQ ID NO: 2163839 - RNA, 19 nt, Human
uuguuaaugguuugaauau

SEQ ID NO: 2163840 - RNA, 13 nt, Human
uuguuaucuggga

SEQ ID NO: 2163841 - RNA, 22 nt, Human
uuguggaggagcucaggacacu

SEQ ID NO: 2163842 - RNA, 13 nt, Human
uuguguucuuugu

SEQ ID NO: 2163843 - RNA, 22 nt, Human
uugugccaaccuauuuugaagu

SEQ ID NO: 2163844 - RNA, 17 nt, Human
uugugccucccugguga

SEQ ID NO: 2163845 - RNA, 18 nt, Human
uuuaacuccucaauucca

SEQ ID NO: 2163846 - RNA, 24 nt, Human
uuuaacucaauauuuuccaugaaa

SEQ ID NO: 2163847 - RNA, 21 nt, Human
uuuacaccaguuccuuucaau

SEQ ID NO: 2163848 - RNA, 18 nt, Human
uuuacagucuauuugaga

SEQ ID NO: 2163849 - RNA, 16 nt, Human
uuuacagucuauuuga

SEQ ID NO: 2163850 - RNA, 22 nt, Human
uuucacaaacagaaaacaugua

SEQ ID NO: 2163851 - RNA, 19 nt, Human
uuucaauuuccaagagcug

SEQ ID NO: 2163852 - RNA, 14 nt, Human
uuucagcagacuga

SEQ ID NO: 2163853 - RNA, 16 nt, Human
uuuccaagagcugagg

SEQ ID NO: 2163854 - RNA, 14 nt, Human
uuuccaagagcuga

SEQ ID NO: 2163855 - RNA, 13 nt, Human
uuuccaagagcug

SEQ ID NO: 2163856 - RNA, 15 nt, Human
uucugcucauucuaa

SEQ ID NO: 2163857 - RNA, 19 nt, Human
uucugcucauucuaaugau

SEQ ID NO: 2163858 - RNA, 18 nt, Human
uucucugaggaagcuggg

SEQ ID NO: 2163859 - RNA, 13 nt, Human
uucucugaggaag

SEQ ID NO: 2163860 - RNA, 23 nt, Human
uucucauugaauuauaaaagcca

SEQ ID NO: 2163861 - RNA, 13 nt, Human
uucuacuugcucu

SEQ ID NO: 2163862 - RNA, 16 nt, Human
uucuacuugcucugga

SEQ ID NO: 2163863 - RNA, 14 nt, Human
uucuacuugcucug

SEQ ID NO: 2163864 - RNA, 23 nt, Human
uucuacuugcucuggaccugccc

SEQ ID NO: 2163865 - RNA, 20 nt, Human
uucuacuugcucuggaccug

SEQ ID NO: 2163866 - RNA, 19 nt, Human
uucuacuugcucuggaccu

SEQ ID NO: 2163867 - RNA, 22 nt, Human
uucuacuugcucuggaccugcc

SEQ ID NO: 2163868 - RNA, 21 nt, Human
uuccugcaggccaggccagcu

SEQ ID NO: 2163869 - RNA, 23 nt, Human
uuccugagggaucuauacuugcu

SEQ ID NO: 2163870 - RNA, 22 nt, Human
uuccauggccguguagaagcau

SEQ ID NO: 2163871 - RNA, 20 nt, Human
uuccuuguagccuuuugacu

SEQ ID NO: 2163872 - RNA, 16 nt, Human
uuccuuuauguucuca

SEQ ID NO: 2163873 - RNA, 18 nt, Human
uucugcuggaaacagacu

SEQ ID NO: 2163874 - RNA, 14 nt, Human
uucugcuguucucu

SEQ ID NO: 2163875 - RNA, 19 nt, Human
uucuuucacaaaaaagaag

SEQ ID NO: 2163876 - RNA, 13 nt, Human
uucuucccauucu

SEQ ID NO: 2163877 - RNA, 17 nt, Human
uucuucccauucuccau

SEQ ID NO: 2163878 - RNA, 18 nt, Human
uugauauaaauaaaacau

SEQ ID NO: 2163879 - RNA, 20 nt, Human
uugaacuguaccaugugcua

SEQ ID NO: 2163880 - RNA, 15 nt, Human
uucaauauccuuugc

SEQ ID NO: 2163881 - RNA, 19 nt, Human
uuauuucuuaaacaaaugu

SEQ ID NO: 2163882 - RNA, 16 nt, Human
uucaaccaugaagucu

SEQ ID NO: 2163883 - RNA, 22 nt, Human
uucaaccagggauuguuucugu

SEQ ID NO: 2163884 - RNA, 18 nt, Human
uucaaccagggauuguuu

SEQ ID NO: 2163885 - RNA, 11 nt, Human
uuccagaaucc

SEQ ID NO: 2163886 - RNA, 21 nt, Human
uucauuuuuguuauccuuuuu

SEQ ID NO: 2163887 - RNA, 22 nt, Human
uuccaacacugauuuccccuuu

SEQ ID NO: 2163888 - RNA, 16 nt, Human
uuccaacacugauuuc

SEQ ID NO: 2163889 - RNA, 15 nt, Human
uucauaaagaauugu

SEQ ID NO: 2163890 - RNA, 16 nt, Human
uuauuaaauggaaacu

SEQ ID NO: 2163891 - RNA, 11 nt, Human
uuaucuaauuu

SEQ ID NO: 2163892 - RNA, 16 nt, Human
uuaucuaauuuauaaa

SEQ ID NO: 2163893 - RNA, 17 nt, Human
uuaucuaauuuauaaaa

SEQ ID NO: 2163894 - RNA, 24 nt, Human
uuauccuuuuuuaaaaguaaaugu

SEQ ID NO: 2163895 - RNA, 13 nt, Human immunodeficiency virus 1 (HIV-1)
aagauagaagagg

SEQ ID NO: 2163896 - RNA, 18 nt, Human immunodeficiency virus 1 (HIV-1)
ugaggcgcaacagcaucu

SEQ ID NO: 2163897 - RNA, 20 nt, Human immunodeficiency virus 1 (HIV-1)
ugcacugauuugaagaauga

SEQ ID NO: 2163898 - RNA, 19 nt, Human immunodeficiency virus 1 (HIV-1)
aaaaucugaaaacaggaaa

SEQ ID NO: 2163899 - RNA, 19 nt, Human immunodeficiency virus 1 (HIV-1)
ggauggagugggacagaga

SEQ ID NO: 2163900 - RNA, 19 nt, Human immunodeficiency virus 1 (HIV-1)
aggauauguuacuaauaga

SEQ ID NO: 2163901 - RNA, 18 nt, Human immunodeficiency virus 1 (HIV-1)
aguaucaacucaacugcu

SEQ ID NO: 2163902 - RNA, 19 nt, Human immunodeficiency virus 1 (HIV-1)
cauuaucguuucagaccca

SEQ ID NO: 2163903 - RNA, 16 nt, Human immunodeficiency virus 1 (HIV-1)
agacaucacuaugaaa

SEQ ID NO: 2163904 - RNA, 14 nt, Human immunodeficiency virus 1 (HIV-1)
auuuagaaggaaaa

SEQ ID NO: 2163905 - RNA, 20 nt, Human immunodeficiency virus 1 (HIV-1)
agagggagccacacaaugaa

SEQ ID NO: 2163906 - RNA, 18 nt, Human immunodeficiency virus 1 (HIV-1)
auggaaaaggaagggaaa

SEQ ID NO: 2163907 - RNA, 22 nt, Human immunodeficiency virus 1 (HIV-1)
aagggacuuuccgcuggggacu

SEQ ID NO: 2163908 - RNA, 22 nt, Human immunodeficiency virus 1 (HIV-1)
ugccucuucagcuaccaccgcu

SEQ ID NO: 2163909 - RNA, 15 nt, Human immunodeficiency virus 1 (HIV-1)
acgagcugagccagc

SEQ ID NO: 2163910 - RNA, 16 nt, Human immunodeficiency virus 1 (HIV-1)
gaccagaucugagccu

SEQ ID NO: 2163911 - RNA, 16 nt, Human immunodeficiency virus 1 (HIV-1)
gccacuuuuuaaaaga

SEQ ID NO: 2163912 - RNA, 20 nt, Human immunodeficiency virus 1 (HIV-1)
aagauaauagugacauaaaa

SEQ ID NO: 2163913 - RNA, 20 nt, Human immunodeficiency virus 1 (HIV-1)
caaugcugcuugugccuggc

SEQ ID NO: 2163914 - RNA, 21 nt, Human immunodeficiency virus 1 (HIV-1)
accuggauggagugggacaga

SEQ ID NO: 2163915 - RNA, 18 nt, Human immunodeficiency virus 1 (HIV-1)
agaacagucagacucauc

SEQ ID NO: 2163916 - RNA, 20 nt, Human immunodeficiency virus 1 (HIV-1)
uaacaccaaaaaagauaaag

SEQ ID NO: 2163917 - RNA, 23 nt, Human immunodeficiency virus 1 (HIV-1)
ggagaaauaucagcacuugugga

SEQ ID NO: 2163918 - RNA, 19 nt, Human immunodeficiency virus 1 (HIV-1)
ccggaguacuucaagaacu

SEQ ID NO: 2163919 - RNA, 17 nt, Human immunodeficiency virus 1 (HIV-1)
auacuugggcaggagug

SEQ ID NO: 2163920 - RNA, 22 nt, Human immunodeficiency virus 1 (HIV-1)
gcaaucacaaguagcaauacag

SEQ ID NO: 2163921 - RNA, 16 nt, Human immunodeficiency virus 1 (HIV-1)
aaguaagacaguauga

SEQ ID NO: 2163922 - RNA, 16 nt, Human immunodeficiency virus 1 (HIV-1)
guaauaaaucucugga

SEQ ID NO: 2163923 - RNA, 21 nt, Human immunodeficiency virus 1 (HIV-1)
auauaaaguaguaaaaauuga

SEQ ID NO: 2163924 - RNA, 20 nt, Human immunodeficiency virus 1 (HIV-1)
cagaauaaaacaaauuauaa

SEQ ID NO: 2163925 - RNA, 18 nt, Human immunodeficiency virus 1 (HIV-1)
aaguaguacaaggagcuu

SEQ ID NO: 2163926 - RNA, 19 nt, Human immunodeficiency virus 1 (HIV-1)
auuugggguugcucuggaa

SEQ ID NO: 2163927 - RNA, 23 nt, Human immunodeficiency virus 1 (HIV-1)
cgcagggggugggaagcccucaa

SEQ ID NO: 2163928 - RNA, 14 nt, Human immunodeficiency virus 1 (HIV-1)
cugggucucucugg

SEQ ID NO: 2163929 - RNA, 16 nt, Human immunodeficiency virus 1 (HIV-1)
ugggcaaguuugugga

SEQ ID NO: 2163930 - RNA, 16 nt, Human immunodeficiency virus 1 (HIV-1)
cagcuuguuacacccu

SEQ ID NO: 2163931 - RNA, 21 nt, Human immunodeficiency virus 1 (HIV-1)
agcccucaaauauugguggaa

SEQ ID NO: 2163932 - RNA, 16 nt, Human immunodeficiency virus 1 (HIV-1)
cugcugacaucgagcu

SEQ ID NO: 2163933 - RNA, 15 nt, Human immunodeficiency virus 1 (HIV-1)
aaggaguaguagaau

SEQ ID NO: 2163934 - RNA, 14 nt, Human immunodeficiency virus 1 (HIV-1)
cacccugugagccu

SEQ ID NO: 2163935 - RNA, 14 nt, Human immunodeficiency virus 1 (HIV-1)
agcaguagcugagg

SEQ ID NO: 2163936 - RNA, 15 nt, Human immunodeficiency virus 1 (HIV-1)
aaugaacaagaauua

SEQ ID NO: 2163937 - RNA, 16 nt, Human immunodeficiency virus 1 (HIV-1)
agacaguggcaaugag

SEQ ID NO: 2163938 - RNA, 18 nt, Human immunodeficiency virus 1 (HIV-1)
gccucuucagcuaccacc

SEQ ID NO: 2163939 - RNA, 13 nt, Human immunodeficiency virus 1 (HIV-1)
acacuuuaaaaca

SEQ ID NO: 2163940 - RNA, 15 nt, Human immunodeficiency virus 1 (HIV-1)
auauuaagacaaaga

SEQ ID NO: 2163941 - RNA, 21 nt, Human immunodeficiency virus 1 (HIV-1)
agggauuauggaaaacagaug

SEQ ID NO: 2163942 - RNA, 12 nt, Human immunodeficiency virus 1 (HIV-1)
guagaaauuaau

SEQ ID NO: 2163943 - RNA, 12 nt, Human immunodeficiency virus 1 (HIV-1)
uugggagcagca

SEQ ID NO: 2163944 - RNA, 23 nt, Human immunodeficiency virus 1 (HIV-1)
augagggacaauuggagaaguga

SEQ ID NO: 2163945 - RNA, 13 nt, Human immunodeficiency virus 1 (HIV-1)
cugggagcucucu

SEQ ID NO: 2163946 - RNA, 15 nt, Human immunodeficiency virus 1 (HIV-1)
aagagaucaggcuga

SEQ ID NO: 2163947 - RNA, 15 nt, Human immunodeficiency virus 1 (HIV-1)
aaguuuaguaaaaca

SEQ ID NO: 2163948 - RNA, 19 nt, Human immunodeficiency virus 1 (HIV-1)
aauuaggaaaagcaggaua

SEQ ID NO: 2163949 - RNA, 18 nt, Human immunodeficiency virus 1 (HIV-1)
aguacuucaagaacugcu

SEQ ID NO: 2163950 - RNA, 16 nt, Human immunodeficiency virus 1 (HIV-1)
uccggaguacuucaag

SEQ ID NO: 2163951 - RNA, 23 nt, Human immunodeficiency virus 1 (HIV-1)
aaaaguagugugauuggauggcc

SEQ ID NO: 2163952 - RNA, 11 nt, Human immunodeficiency virus 1 (HIV-1)
cgagcccucag

SEQ ID NO: 2163953 - RNA, 22 nt, Human immunodeficiency virus 1 (HIV-1)
uauucgccacauaccuagaaga

SEQ ID NO: 2163954 - RNA, 13 nt, Human immunodeficiency virus 1 (HIV-1)
ccugagugggagu

SEQ ID NO: 2163955 - RNA, 16 nt, Human immunodeficiency virus 1 (HIV-1)
uaaaaaguguugcuuu

SEQ ID NO: 2163956 - RNA, 14 nt, Human immunodeficiency virus 1 (HIV-1)
aauagcaacaauga

SEQ ID NO: 2163957 - RNA, 14 nt, Human immunodeficiency virus 1 (HIV-1)
gcuagcaaauuaag

SEQ ID NO: 2163958 - RNA, 14 nt, Human immunodeficiency virus 1 (HIV-1)
cagagacagaucca

SEQ ID NO: 2163959 - RNA, 16 nt, Human immunodeficiency virus 1 (HIV-1)
acuggcagaaaacaga

SEQ ID NO: 2163960 - RNA, 22 nt, Human immunodeficiency virus 1 (HIV-1)
cuuuccagggaggcguggccug

SEQ ID NO: 2163961 - RNA, 12 nt, Human immunodeficiency virus 1 (HIV-1)
caagaauuauug

SEQ ID NO: 2163962 - RNA, 14 nt, Human immunodeficiency virus 1 (HIV-1)
cgagcugagccagc

SEQ ID NO: 2163963 - RNA, 22 nt, Human immunodeficiency virus 1 (HIV-1)
accagaucugagccugggagcu

SEQ ID NO: 2163964 - RNA, 17 nt, Human immunodeficiency virus 1 (HIV-1)
augagagugaaggagaa

SEQ ID NO: 2163965 - RNA, 12 nt, Human immunodeficiency virus 1 (HIV-1)
cagaagaagagg

SEQ ID NO: 2163966 - RNA, 23 nt, Human immunodeficiency virus 1 (HIV-1)
augcuccuugggauguugaugau

SEQ ID NO: 2163967 - RNA, 20 nt, Human immunodeficiency virus 1 (HIV-1)
cagagaacuuaauaagagaa

SEQ ID NO: 2163968 - RNA, 13 nt, Human immunodeficiency virus 1 (HIV-1)
ccauuuucagaau

SEQ ID NO: 2163969 - RNA, 10 nt, Human immunodeficiency virus 1 (HIV-1)
gacagagaaa

SEQ ID NO: 2163970 - RNA, 22 nt, Human immunodeficiency virus 1 (HIV-1)
acaauuacacaagcuuaauaca

SEQ ID NO: 2163971 - RNA, 18 nt, Human immunodeficiency virus 1 (HIV-1)
cagggggugggaagcccu

SEQ ID NO: 2163972 - RNA, 12 nt, Human immunodeficiency virus 1 (HIV-1)
acacaaugaaug

SEQ ID NO: 2163973 - RNA, 20 nt, Human immunodeficiency virus 1 (HIV-1)
aagaaugagacgagcugagc

SEQ ID NO: 2163974 - RNA, 23 nt, Human immunodeficiency virus 1 (HIV-1)
ucaaauauuacagggcugcuauu

SEQ ID NO: 2163975 - RNA, 15 nt, Human immunodeficiency virus 1 (HIV-1)
agacgagcugagcca

SEQ ID NO: 2163976 - RNA, 23 nt, Human immunodeficiency virus 1 (HIV-1)
aacugcuuguaccaauugcuauu

SEQ ID NO: 2163977 - RNA, 20 nt, Human immunodeficiency virus 1 (HIV-1)
caguauuggagucaggaacu

SEQ ID NO: 2163978 - RNA, 17 nt, Human immunodeficiency virus 1 (HIV-1)
guuacacccugugagcc

SEQ ID NO: 2163979 - RNA, 19 nt, Human immunodeficiency virus 1 (HIV-1)
cuggggaguggcgagcccu

SEQ ID NO: 2163980 - RNA, 21 nt, Human immunodeficiency virus 1 (HIV-1)
ggcuaacuagggaacccacug

SEQ ID NO: 2163981 - RNA, 16 nt, Human immunodeficiency virus 1 (HIV-1)
agcucaucagaacagu

SEQ ID NO: 2163982 - RNA, 19 nt, Human immunodeficiency virus 1 (HIV-1)
aguagugccaagaagaaaa

SEQ ID NO: 2163983 - RNA, 16 nt, Human immunodeficiency virus 1 (HIV-1)
aauaaguucagaagua

SEQ ID NO: 2163984 - RNA, 18 nt, Human immunodeficiency virus 1 (HIV-1)
acagagaaauuaacaauu

SEQ ID NO: 2163985 - RNA, 13 nt, Human immunodeficiency virus 1 (HIV-1)
uagugcagcagca

SEQ ID NO: 2163986 - RNA, 18 nt, Human immunodeficiency virus 1 (HIV-1)
guacugggucucucuggu

SEQ ID NO: 2163987 - RNA, 23 nt, Human immunodeficiency virus 1 (HIV-1)
gaauaggcguuacucgacagagg

SEQ ID NO: 2163988 - RNA, 16 nt, Human immunodeficiency virus 1 (HIV-1)
cagggcuuggaaagga

SEQ ID NO: 2163989 - RNA, 17 nt, Human immunodeficiency virus 1 (HIV-1)
aaauuuguacagagaug

SEQ ID NO: 2163990 - RNA, 17 nt, Human immunodeficiency virus 1 (HIV-1)
uagagcuauucgccaca

SEQ ID NO: 2163991 - RNA, 20 nt, Human immunodeficiency virus 1 (HIV-1)
agaauucugcaacaacugcu

SEQ ID NO: 2163992 - RNA, 19 nt, Human immunodeficiency virus 1 (HIV-1)
uguacagagauggaaaagg

SEQ ID NO: 2163993 - RNA, 15 nt, Human immunodeficiency virus 1 (HIV-1)
agaaaagaaugaaca

SEQ ID NO: 2163994 - RNA, 18 nt, Human immunodeficiency virus 1 (HIV-1)
aaauuaaagccaggaaug

SEQ ID NO: 2163995 - RNA, 22 nt, Human immunodeficiency virus 1 (HIV-1)
uggggaguggcgagcccucaga

SEQ ID NO: 2163996 - RNA, 16 nt, Human immunodeficiency virus 1 (HIV-1)
acauaccuagaagaau

SEQ ID NO: 2163997 - RNA, 16 nt, Human immunodeficiency virus 1 (HIV-1)
acgaucugcggagccu

SEQ ID NO: 2163998 - RNA, 15 nt, Human immunodeficiency virus 1 (HIV-1)
agaucugagccuggg

SEQ ID NO: 2163999 - RNA, 18 nt, Human immunodeficiency virus 1 (HIV-1)
caaugagagugaaggaga

SEQ ID NO: 2164000 - RNA, 19 nt, Human immunodeficiency virus 1 (HIV-1)
acaguggcaaugagaguga

SEQ ID NO: 2164001 - RNA, 13 nt, Human immunodeficiency virus 1 (HIV-1)
ccugggcgggacu

SEQ ID NO: 2164002 - RNA, 22 nt, Human immunodeficiency virus 1 (HIV-1)
uagcaguagcugaggggacaga

SEQ ID NO: 2164003 - RNA, 16 nt, Human immunodeficiency virus 1 (HIV-1)
augcuaguuggaguaa

SEQ ID NO: 2164004 - RNA, 14 nt, Human immunodeficiency virus 1 (HIV-1)
acaggagcagauga

SEQ ID NO: 2164005 - RNA, 19 nt, Human immunodeficiency virus 1 (HIV-1)
caguggacaaauuagaugu

SEQ ID NO: 2164006 - RNA, 12 nt, Human immunodeficiency virus 1 (HIV-1)
cacaagaggagg

SEQ ID NO: 2164007 - RNA, 14 nt, Human immunodeficiency virus 1 (HIV-1)
gcagaauaaaacaa

SEQ ID NO: 2164008 - RNA, 16 nt, Human immunodeficiency virus 1 (HIV-1)
aaaguaagacaguaug

SEQ ID NO: 2164009 - RNA, 16 nt, Human immunodeficiency virus 1 (HIV-1)
aaaggauuuugcuaua

SEQ ID NO: 2164010 - RNA, 13 nt, Human immunodeficiency virus 1 (HIV-1)
caguugagccaga

SEQ ID NO: 2164011 - RNA, 20 nt, Human immunodeficiency virus 1 (HIV-1)
ucaaugccacagccauagca

SEQ ID NO: 2164012 - RNA, 14 nt, Human immunodeficiency virus 1 (HIV-1)
caacaauacaagaa

SEQ ID NO: 2164013 - RNA, 16 nt, Human immunodeficiency virus 1 (HIV-1)
gaagacuucaggaagu

SEQ ID NO: 2164014 - RNA, 20 nt, Human immunodeficiency virus 1 (HIV-1)
aauagacagguuaauugaua

SEQ ID NO: 2164015 - RNA, 13 nt, Human immunodeficiency virus 1 (HIV-1)
cugagccagcagc

SEQ ID NO: 2164016 - RNA, 15 nt, Human immunodeficiency virus 1 (HIV-1)
caucaagcagcucca

SEQ ID NO: 2164017 - RNA, 19 nt, Human immunodeficiency virus 1 (HIV-1)
aaguaguauugguaaaugu

SEQ ID NO: 2164018 - RNA, 15 nt, Human immunodeficiency virus 1 (HIV-1)
uaacaauuacacaag

SEQ ID NO: 2164019 - RNA, 11 nt, Human immunodeficiency virus 1 (HIV-1)
gcaccacugcu

SEQ ID NO: 2164020 - RNA, 17 nt, Human immunodeficiency virus 1 (HIV-1)
uaaaauuagcaggaaga

SEQ ID NO: 2164021 - RNA, 14 nt, Human immunodeficiency virus 1 (HIV-1)
caauagauaaugau

SEQ ID NO: 2164022 - RNA, 16 nt, Human immunodeficiency virus 1 (HIV-1)
aauuauucauaaugau

SEQ ID NO: 2164023 - RNA, 15 nt, Human immunodeficiency virus 1 (HIV-1)
cagggaggcguggcc

SEQ ID NO: 2164024 - RNA, 20 nt, Human immunodeficiency virus 1 (HIV-1)
ucagguaccuuuaagaccaa

SEQ ID NO: 2164025 - RNA, 16 nt, Human immunodeficiency virus 1 (HIV-1)
gaauaaguucagaagu

SEQ ID NO: 2164026 - RNA, 14 nt, Human immunodeficiency virus 1 (HIV-1)
agauucuaaaagaa

SEQ ID NO: 2164027 - RNA, 20 nt, Human immunodeficiency virus 1 (HIV-1)
cagggaggcguggccugggc

SEQ ID NO: 2164028 - RNA, 16 nt, Human immunodeficiency virus 1 (HIV-1)
gauggggcaccaugcu

SEQ ID NO: 2164029 - RNA, 18 nt, Human immunodeficiency virus 1 (HIV-1)
aguugucacccuaacuga

SEQ ID NO: 2164030 - RNA, 15 nt, Human immunodeficiency virus 1 (HIV-1)
ugcugcuugugccug

SEQ ID NO: 2164031 - RNA, 18 nt, Human immunodeficiency virus 1 (HIV-1)
agaacagaugcaugagga

SEQ ID NO: 2164032 - RNA, 13 nt, Human immunodeficiency virus 1 (HIV-1)
gagagauaaaaaa

SEQ ID NO: 2164033 - RNA, 13 nt, Human immunodeficiency virus 1 (HIV-1)
agaccuggaggag

SEQ ID NO: 2164034 - RNA, 21 nt, Human immunodeficiency virus 1 (HIV-1)
cugggacgaucugcggagccu

SEQ ID NO: 2164035 - RNA, 20 nt, Human immunodeficiency virus 1 (HIV-1)
aagaauaguagacauaauag

SEQ ID NO: 2164036 - RNA, 13 nt, Human immunodeficiency virus 1 (HIV-1)
cagaucugagccu

SEQ ID NO: 2164037 - RNA, 12 nt, Human immunodeficiency virus 1 (HIV-1)
caccagcaauau

SEQ ID NO: 2164038 - RNA, 16 nt, Human immunodeficiency virus 1 (HIV-1)
ugcagcagcagaacaa

SEQ ID NO: 2164039 - RNA, 23 nt, Human immunodeficiency virus 1 (HIV-1)
aagcauaagagguaaggugcaga

SEQ ID NO: 2164040 - RNA, 9 nt, Human immunodeficiency virus 1 (HIV-1)
ggggggacu

SEQ ID NO: 2164041 - RNA, 22 nt, Human immunodeficiency virus 1 (HIV-1)
uccagagaggaccagggagagc

SEQ ID NO: 2164042 - RNA, 17 nt, Human immunodeficiency virus 1 (HIV-1)
agaaguaguacaaggag

SEQ ID NO: 2164043 - RNA, 17 nt, Human immunodeficiency virus 1 (HIV-1)
aaaauaaccacagaaag

SEQ ID NO: 2164044 - RNA, 18 nt, Human immunodeficiency virus 1 (HIV-1)
agcacuaacagaaguaau

SEQ ID NO: 2164045 - RNA, 20 nt, Human immunodeficiency virus 1 (HIV-1)
uuacucgacagaggagagca

SEQ ID NO: 2164046 - RNA, 21 nt, Human immunodeficiency virus 1 (HIV-1)
gcuauugaggcgcaacagcau

SEQ ID NO: 2164047 - RNA, 18 nt, Human immunodeficiency virus 1 (HIV-1)
aguaaacauaguaacaga

SEQ ID NO: 2164048 - RNA, 19 nt, Human immunodeficiency virus 1 (HIV-1)
agacagggcuuggaaagga

SEQ ID NO: 2164049 - RNA, 12 nt, Human immunodeficiency virus 1 (HIV-1)
cagggacagcag

SEQ ID NO: 2164050 - RNA, 19 nt, Human immunodeficiency virus 1 (HIV-1)
uaagaauaguuuuugcugu

SEQ ID NO: 2164051 - RNA, 22 nt, Human immunodeficiency virus 1 (HIV-1)
aaucuuagagccuuuuagaaaa

SEQ ID NO: 2164052 - RNA, 13 nt, Human immunodeficiency virus 1 (HIV-1)
aggcguggccugg

SEQ ID NO: 2164053 - RNA, 14 nt, Human immunodeficiency virus 1 (HIV-1)
cugagccugggagc

SEQ ID NO: 2164054 - RNA, 20 nt, Human immunodeficiency virus 1 (HIV-1)
cagacauacaaacuaaagaa

SEQ ID NO: 2164055 - RNA, 21 nt, Human immunodeficiency virus 1 (HIV-1)
caggaagaagcggagacagcg

SEQ ID NO: 2164056 - RNA, 19 nt, Human immunodeficiency virus 1 (HIV-1)
aagcuugccuugagugcuu

SEQ ID NO: 2164057 - RNA, 12 nt, Human immunodeficiency virus 1 (HIV-1)
cugcuuaagccu

SEQ ID NO: 2164058 - RNA, 14 nt, Human immunodeficiency virus 1 (HIV-1)
cugcuauuaacaag

SEQ ID NO: 2164059 - RNA, 22 nt, Human immunodeficiency virus 1 (HIV-1)
aagcaguaaguaguacauguaa

SEQ ID NO: 2164060 - RNA, 16 nt, Human immunodeficiency virus 1 (HIV-1)
acaaucacccucccau

SEQ ID NO: 2164061 - RNA, 21 nt, Human immunodeficiency virus 1 (HIV-1)
guaccaguugagccagauaag

SEQ ID NO: 2164062 - RNA, 23 nt, Human immunodeficiency virus 1 (HIV-1)
acuuuggaaaggaccagcaaagc

SEQ ID NO: 2164063 - RNA, 16 nt, Human immunodeficiency virus 1 (HIV-1)
cacaauuuuaaaagaa

SEQ ID NO: 2164064 - RNA, 15 nt, Human immunodeficiency virus 1 (HIV-1)
auuaagagaacaauu

SEQ ID NO: 2164065 - RNA, 15 nt, Human immunodeficiency virus 1 (HIV-1)
augauaauggagaaa

SEQ ID NO: 2164066 - RNA, 24 nt, Human immunodeficiency virus 1 (HIV-1)
caggaguggaagccauaauaagaa

SEQ ID NO: 2164067 - RNA, 12 nt, Human immunodeficiency virus 1 (HIV-1)
ggacagauaggg

SEQ ID NO: 2164068 - RNA, 22 nt, Human immunodeficiency virus 1 (HIV-1)
acagacauacaaacuaaagaau

SEQ ID NO: 2164069 - RNA, 17 nt, Human immunodeficiency virus 1 (HIV-1)
acauaccuagaagaaua

SEQ ID NO: 2164070 - RNA, 21 nt, Human immunodeficiency virus 1 (HIV-1)
uagaaaucuguggacauaaag

SEQ ID NO: 2164071 - RNA, 22 nt, Human immunodeficiency virus 1 (HIV-1)
uacacuccuuaauugaagaauc

SEQ ID NO: 2164072 - RNA, 14 nt, Human immunodeficiency virus 1 (HIV-1)
aaggcagcuguaga

SEQ ID NO: 2164073 - RNA, 23 nt, Human immunodeficiency virus 1 (HIV-1)
aguccgagaucuucagaccugga

SEQ ID NO: 2164074 - RNA, 14 nt, Human immunodeficiency virus 1 (HIV-1)
caauuuuaaaagaa

SEQ ID NO: 2164075 - RNA, 17 nt, Human immunodeficiency virus 1 (HIV-1)
gaaguaguacaaggagc

SEQ ID NO: 2164076 - RNA, 19 nt, Human immunodeficiency virus 1 (HIV-1)
uggaacagauuuggaauca

SEQ ID NO: 2164077 - RNA, 18 nt, Human immunodeficiency virus 1 (HIV-1)
uacaagacccaacaacaa

SEQ ID NO: 2164078 - RNA, 16 nt, Human immunodeficiency virus 1 (HIV-1)
aaucuguggacauaaa

SEQ ID NO: 2164079 - RNA, 18 nt, Human immunodeficiency virus 1 (HIV-1)
agcaggacauaacaaggu

SEQ ID NO: 2164080 - RNA, 13 nt, Human immunodeficiency virus 1 (HIV-1)
gacaccagggauu

SEQ ID NO: 2164081 - RNA, 12 nt, Human immunodeficiency virus 1 (HIV-1)
gagaacaccagc

SEQ ID NO: 2164082 - RNA, 12 nt, Human immunodeficiency virus 1 (HIV-1)
acagggagacua

SEQ ID NO: 2164083 - RNA, 19 nt, Human immunodeficiency virus 1 (HIV-1)
gagccagcagcagauaggg

SEQ ID NO: 2164084 - RNA, 21 nt, Human immunodeficiency virus 1 (HIV-1)
cagacucugcuauaagaaagg

SEQ ID NO: 2164085 - RNA, 14 nt, Human immunodeficiency virus 1 (HIV-1)
gcaggggaaagaau

SEQ ID NO: 2164086 - RNA, 22 nt, Human immunodeficiency virus 1 (HIV-1)
ggaaggaagcaaccaccacucu

SEQ ID NO: 2164087 - RNA, 11 nt, Human immunodeficiency virus 1 (HIV-1)
uuaggaaaagc

SEQ ID NO: 2164088 - RNA, 22 nt, Human immunodeficiency virus 1 (HIV-1)
ucugagccugggagcucucugg

SEQ ID NO: 2164089 - RNA, 17 nt, Human immunodeficiency virus 1 (HIV-1)
acagagaaauuaacaau

SEQ ID NO: 2164090 - RNA, 16 nt, Human immunodeficiency virus 1 (HIV-1)
aaaauaaccacagaaa

SEQ ID NO: 2164091 - RNA, 17 nt, Human immunodeficiency virus 1 (HIV-1)
cacaaucacccucccau

SEQ ID NO: 2164092 - RNA, 15 nt, Human immunodeficiency virus 1 (HIV-1)
guaauaccacuaaca

SEQ ID NO: 2164093 - RNA, 20 nt, Human immunodeficiency virus 1 (HIV-1)
aaaugucagcuaaaaggaga

SEQ ID NO: 2164094 - RNA, 14 nt, Human immunodeficiency virus 1 (HIV-1)
uagggugggagcag

SEQ ID NO: 2164095 - RNA, 14 nt, Human immunodeficiency virus 1 (HIV-1)
acaguuuuaauugu

SEQ ID NO: 2164096 - RNA, 21 nt, Human immunodeficiency virus 1 (HIV-1)
acaaucacccucccaugcaga

SEQ ID NO: 2164097 - RNA, 11 nt, Human immunodeficiency virus 1 (HIV-1)
ugccaggaaga

SEQ ID NO: 2164098 - RNA, 13 nt, Human immunodeficiency virus 1 (HIV-1)
caggaagaagcgg

SEQ ID NO: 2164099 - RNA, 11 nt, Human immunodeficiency virus 1 (HIV-1)
ugggaagcccu

SEQ ID NO: 2164100 - RNA, 21 nt, Human immunodeficiency virus 1 (HIV-1)
agcagaacuacacaccagggc

SEQ ID NO: 2164101 - RNA, 21 nt, Human immunodeficiency virus 1 (HIV-1)
cugaacaucuuaagacagcag

SEQ ID NO: 2164102 - RNA, 20 nt, Human immunodeficiency virus 1 (HIV-1)
gagccugggagcucucuggc

SEQ ID NO: 2164103 - RNA, 14 nt, Human immunodeficiency virus 1 (HIV-1)
gaaacugacagagg

SEQ ID NO: 2164104 - RNA, 13 nt, Human immunodeficiency virus 1 (HIV-1)
auuugaagaauga

SEQ ID NO: 2164105 - RNA, 23 nt, Human immunodeficiency virus 1 (HIV-1)
ccagcuuguuacacccugugagc

SEQ ID NO: 2164106 - RNA, 16 nt, Human immunodeficiency virus 1 (HIV-1)
auagaauggaggaaaa

SEQ ID NO: 2164107 - RNA, 18 nt, Human immunodeficiency virus 1 (HIV-1)
cagacucugcuauaagaa

SEQ ID NO: 2164108 - RNA, 20 nt, Human immunodeficiency virus 1 (HIV-1)
uacaggccagacaauuauug

SEQ ID NO: 2164109 - RNA, 18 nt, Human immunodeficiency virus 1 (HIV-1)
cugagccugggagcucuc

SEQ ID NO: 2164110 - RNA, 20 nt, Human immunodeficiency virus 1 (HIV-1)
aauaccaauagauaaugaua

SEQ ID NO: 2164111 - RNA, 21 nt, Human immunodeficiency virus 1 (HIV-1)
ugcagagagaaaaaagagcag

SEQ ID NO: 2164112 - RNA, 15 nt, Human immunodeficiency virus 1 (HIV-1)
aacugacagaggaua

SEQ ID NO: 2164113 - RNA, 23 nt, Human immunodeficiency virus 1 (HIV-1)
ccagcaagaaaagaaugaacaag

SEQ ID NO: 2164114 - RNA, 14 nt, Human immunodeficiency virus 1 (HIV-1)
aaauuagcaggaag

SEQ ID NO: 2164115 - RNA, 17 nt, Human immunodeficiency virus 1 (HIV-1)
ggagagagagacagaga

SEQ ID NO: 2164116 - RNA, 13 nt, Human immunodeficiency virus 1 (HIV-1)
auucauaaugaua

SEQ ID NO: 2164117 - RNA, 12 nt, Human immunodeficiency virus 1 (HIV-1)
gagcagcaucuc

SEQ ID NO: 2164118 - RNA, 15 nt, Human immunodeficiency virus 1 (HIV-1)
cuggggcaucaagca

SEQ ID NO: 2164119 - RNA, 19 nt, Human immunodeficiency virus 1 (HIV-1)
agugugauuggauggccua

SEQ ID NO: 2164120 - RNA, 22 nt, Human immunodeficiency virus 1 (HIV-1)
gaaaaggggggacuggaagggc

SEQ ID NO: 2164121 - RNA, 15 nt, Human immunodeficiency virus 1 (HIV-1)
aacauggagcaauca

SEQ ID NO: 2164122 - RNA, 20 nt, Human immunodeficiency virus 1 (HIV-1)
gaacaucuuaagacagcagu

SEQ ID NO: 2164123 - RNA, 14 nt, Human immunodeficiency virus 1 (HIV-1)
agcuaguaccaguu

SEQ ID NO: 2164124 - RNA, 13 nt, Human immunodeficiency virus 1 (HIV-1)
auaauagcaauag

SEQ ID NO: 2164125 - RNA, 17 nt, Human immunodeficiency virus 1 (HIV-1)
aguacuucaagaacugc

SEQ ID NO: 2164126 - RNA, 14 nt, Human immunodeficiency virus 1 (HIV-1)
cagcaagaaaagaa

SEQ ID NO: 2164127 - RNA, 16 nt, Human immunodeficiency virus 1 (HIV-1)
uaauucaacacaacug

SEQ ID NO: 2164128 - RNA, 14 nt, Human immunodeficiency virus 1 (HIV-1)
acuuuaaaacagau

SEQ ID NO: 2164129 - RNA, 14 nt, Human immunodeficiency virus 1 (HIV-1)
auacaaaaggaaac

SEQ ID NO: 2164130 - RNA, 22 nt, Human immunodeficiency virus 1 (HIV-1)
aaacaauggccauugacagaag

SEQ ID NO: 2164131 - RNA, 19 nt, Human immunodeficiency virus 1 (HIV-1)
agaagaggccaauaaagga

SEQ ID NO: 2164132 - RNA, 18 nt, Human immunodeficiency virus 1 (HIV-1)
ugugcuuccacagggaug

SEQ ID NO: 2164133 - RNA, 17 nt, Human immunodeficiency virus 1 (HIV-1)
aguaccaguugagccag

SEQ ID NO: 2164134 - RNA, 16 nt, Human immunodeficiency virus 1 (HIV-1)
aauuguggaggggaau

SEQ ID NO: 2164135 - RNA, 17 nt, Human immunodeficiency virus 1 (HIV-1)
caaggcaaagagaagag

SEQ ID NO: 2164136 - RNA, 10 nt, Human immunodeficiency virus 1 (HIV-1)
cuucugggac

SEQ ID NO: 2164137 - RNA, 16 nt, Human immunodeficiency virus 1 (HIV-1)
uagcaauacagcagcu

SEQ ID NO: 2164138 - RNA, 23 nt, Human immunodeficiency virus 1 (HIV-1)
aauucacucccaaagaagacaag

SEQ ID NO: 2164139 - RNA, 13 nt, Human immunodeficiency virus 1 (HIV-1)
agcugaggggaca

SEQ ID NO: 2164140 - RNA, 14 nt, Human immunodeficiency virus 1 (HIV-1)
aucaagcaggaauu

SEQ ID NO: 2164141 - RNA, 22 nt, Human immunodeficiency virus 1 (HIV-1)
augcagaauaaaacaaauuaua

SEQ ID NO: 2164142 - RNA, 23 nt, Human immunodeficiency virus 1 (HIV-1)
ugagccugcaugggauggaugac

SEQ ID NO: 2164143 - RNA, 15 nt, Human immunodeficiency virus 1 (HIV-1)
aaauaugcaagaaug

SEQ ID NO: 2164144 - RNA, 19 nt, Human immunodeficiency virus 1 (HIV-1)
caguauuugccauaaagaa

SEQ ID NO: 2164145 - RNA, 14 nt, Human immunodeficiency virus 1 (HIV-1)
aggcguggccuggg

SEQ ID NO: 2164146 - RNA, 17 nt, Human immunodeficiency virus 1 (HIV-1)
ggagcagcaggaagcac

SEQ ID NO: 2164147 - RNA, 18 nt, Human immunodeficiency virus 1 (HIV-1)
accaaugacuuacaaggc

SEQ ID NO: 2164148 - RNA, 23 nt, Human immunodeficiency virus 1 (HIV-1)
gcacccaccaaggcaaagagaag

SEQ ID NO: 2164149 - RNA, 21 nt, Human immunodeficiency virus 1 (HIV-1)
cauuagcccuauugagacugu

SEQ ID NO: 2164150 - RNA, 16 nt, Human immunodeficiency virus 1 (HIV-1)
aucagaugcuaaagca

SEQ ID NO: 2164151 - RNA, 12 nt, Human immunodeficiency virus 1 (HIV-1)
cagaaauuguaa

SEQ ID NO: 2164152 - RNA, 10 nt, Human immunodeficiency virus 1 (HIV-1)
aagcccucaa

SEQ ID NO: 2164153 - RNA, 16 nt, Human immunodeficiency virus 1 (HIV-1)
uagcacccaccaaggc

SEQ ID NO: 2164154 - RNA, 21 nt, Human immunodeficiency virus 1 (HIV-1)
gcaucuccuauggcaggaaga

SEQ ID NO: 2164155 - RNA, 22 nt, Human immunodeficiency virus 1 (HIV-1)
aauuaugguaccaguuagagaa

SEQ ID NO: 2164156 - RNA, 15 nt, Human immunodeficiency virus 1 (HIV-1)
aaggaauagaagaag

SEQ ID NO: 2164157 - RNA, 20 nt, Human immunodeficiency virus 1 (HIV-1)
uugucugguauagugcagca

SEQ ID NO: 2164158 - RNA, 15 nt, Human immunodeficiency virus 1 (HIV-1)
aauuauauaaauaua

SEQ ID NO: 2164159 - RNA, 20 nt, Human immunodeficiency virus 1 (HIV-1)
uacuguaagggaaagaauga

SEQ ID NO: 2164160 - RNA, 15 nt, Human immunodeficiency virus 1 (HIV-1)
uaccacacacaaggc

SEQ ID NO: 2164161 - RNA, 18 nt, Human immunodeficiency virus 1 (HIV-1)
cagccuaaaacugcuugu

SEQ ID NO: 2164162 - RNA, 20 nt, Human immunodeficiency virus 1 (HIV-1)
agggcugcuauuaacaagag

SEQ ID NO: 2164163 - RNA, 17 nt, Human immunodeficiency virus 1 (HIV-1)
augcagaauaaaacaaa

SEQ ID NO: 2164164 - RNA, 14 nt, Human immunodeficiency virus 1 (HIV-1)
gagcaaucacaagu

SEQ ID NO: 2164165 - RNA, 18 nt, Human immunodeficiency virus 1 (HIV-1)
cuguagaaauuaauugua

SEQ ID NO: 2164166 - RNA, 19 nt, Human immunodeficiency virus 1 (HIV-1)
aauaucagcacaagcauaa

SEQ ID NO: 2164167 - RNA, 19 nt, Human immunodeficiency virus 1 (HIV-1)
cuuggcacuuaucugggac

SEQ ID NO: 2164168 - RNA, 23 nt, Human immunodeficiency virus 1 (HIV-1)
agugccaagaagaaaagcaaaga

SEQ ID NO: 2164169 - RNA, 23 nt, Human immunodeficiency virus 1 (HIV-1)
aauuacaaaaacaaauuacaaaa

SEQ ID NO: 2164170 - RNA, 22 nt, Human immunodeficiency virus 1 (HIV-1)
guccaaagguauccuuugagcc

SEQ ID NO: 2164171 - RNA, 17 nt, Human immunodeficiency virus 1 (HIV-1)
gagcccucagauccugc

SEQ ID NO: 2164172 - RNA, 16 nt, Human immunodeficiency virus 1 (HIV-1)
gacccggagagagaag

SEQ ID NO: 2164173 - RNA, 17 nt, Human immunodeficiency virus 1 (HIV-1)
uacagcagcuaccaaug

SEQ ID NO: 2164174 - RNA, 13 nt, Human immunodeficiency virus 1 (HIV-1)
agaaaaauugugg

SEQ ID NO: 2164175 - RNA, 21 nt, Human immunodeficiency virus 1 (HIV-1)
cagucuagcagaagaagaggu

SEQ ID NO: 2164176 - RNA, 15 nt, Human immunodeficiency virus 1 (HIV-1)
gucagauauccacug

SEQ ID NO: 2164177 - RNA, 21 nt, Human immunodeficiency virus 1 (HIV-1)
gggacgaucugcggagccugu

SEQ ID NO: 2164178 - RNA, 21 nt, Human immunodeficiency virus 1 (HIV-1)
auaaaauuauucauaaugaua

SEQ ID NO: 2164179 - RNA, 13 nt, Human immunodeficiency virus 1 (HIV-1)
uggaaaacucauu

SEQ ID NO: 2164180 - RNA, 16 nt, Human immunodeficiency virus 1 (HIV-1)
caguauuggagucagg

SEQ ID NO: 2164181 - RNA, 13 nt, Human immunodeficiency virus 1 (HIV-1)
caggguuaaaaaa

SEQ ID NO: 2164182 - RNA, 16 nt, Human immunodeficiency virus 1 (HIV-1)
auagaauauaggaaaa

SEQ ID NO: 2164183 - RNA, 18 nt, Human immunodeficiency virus 1 (HIV-1)
agugggacagagaaauua

SEQ ID NO: 2164184 - RNA, 20 nt, Human immunodeficiency virus 1 (HIV-1)
acugucaaugacauacagaa

SEQ ID NO: 2164185 - RNA, 18 nt, Human immunodeficiency virus 1 (HIV-1)
acgcagggggugggaagc

SEQ ID NO: 2164186 - RNA, 17 nt, Human immunodeficiency virus 1 (HIV-1)
gcaagaauccuggcugu

SEQ ID NO: 2164187 - RNA, 13 nt, Human immunodeficiency virus 1 (HIV-1)
uuacccagggauu

SEQ ID NO: 2164188 - RNA, 18 nt, Human immunodeficiency virus 1 (HIV-1)
acaggagaaagagacugg

SEQ ID NO: 2164189 - RNA, 15 nt, Human immunodeficiency virus 1 (HIV-1)
caauaguagcaauag

SEQ ID NO: 2164190 - RNA, 12 nt, Human immunodeficiency virus 1 (HIV-1)
gggacuggaagg

SEQ ID NO: 2164191 - RNA, 16 nt, Human immunodeficiency virus 1 (HIV-1)
uggcccgagagcugca

SEQ ID NO: 2164192 - RNA, 15 nt, Human immunodeficiency virus 1 (HIV-1)
acaagccccagaaga

SEQ ID NO: 2164193 - RNA, 15 nt, Human immunodeficiency virus 1 (HIV-1)
cuguacugggucucu

SEQ ID NO: 2164194 - RNA, 13 nt, Human immunodeficiency virus 1 (HIV-1)
acuaauagaaaga

SEQ ID NO: 2164195 - RNA, 20 nt, Human immunodeficiency virus 1 (HIV-1)
ucucugguuagaccagaucu

SEQ ID NO: 2164196 - RNA, 21 nt, Human immunodeficiency virus 1 (HIV-1)
uccuuggguucuugggagcag

SEQ ID NO: 2164197 - RNA, 18 nt, Human immunodeficiency virus 1 (HIV-1)
aguagugccaagaagaaa

SEQ ID NO: 2164198 - RNA, 15 nt, Human immunodeficiency virus 1 (HIV-1)
agggauuauggaaaa

SEQ ID NO: 2164199 - RNA, 13 nt, Human immunodeficiency virus 1 (HIV-1)
ccagggagagcau

SEQ ID NO: 2164200 - RNA, 21 nt, Human immunodeficiency virus 1 (HIV-1)
acugaaggaagugacacaauc

SEQ ID NO: 2164201 - RNA, 14 nt, Human immunodeficiency virus 1 (HIV-1)
guaccaguugagcc

SEQ ID NO: 2164202 - RNA, 21 nt, Human immunodeficiency virus 1 (HIV-1)
uagaccagaucugagccuggg

SEQ ID NO: 2164203 - RNA, 13 nt, Human immunodeficiency virus 1 (HIV-1)
aucaacagcuccu

SEQ ID NO: 2164204 - RNA, 15 nt, Human immunodeficiency virus 1 (HIV-1)
aaccccgaggggacc

SEQ ID NO: 2164205 - RNA, 14 nt, Human immunodeficiency virus 1 (HIV-1)
agcucaucagaaca

SEQ ID NO: 2164206 - RNA, 14 nt, Human immunodeficiency virus 1 (HIV-1)
cccauaguaggagc

SEQ ID NO: 2164207 - RNA, 22 nt, Human immunodeficiency virus 1 (HIV-1)
aaauuaggaaaagcaggauaug

SEQ ID NO: 2164208 - RNA, 23 nt, Human immunodeficiency virus 1 (HIV-1)
aguccaggaauauggcaacuaga

SEQ ID NO: 2164209 - RNA, 20 nt, Human immunodeficiency virus 1 (HIV-1)
accagcuauaaguugacaag

SEQ ID NO: 2164210 - RNA, 17 nt, Human immunodeficiency virus 1 (HIV-1)
agacauacaaacuaaag

SEQ ID NO: 2164211 - RNA, 19 nt, Human immunodeficiency virus 1 (HIV-1)
agcaaauuaagagaacaau

SEQ ID NO: 2164212 - RNA, 13 nt, Human immunodeficiency virus 1 (HIV-1)
auggaaaacagau

SEQ ID NO: 2164213 - RNA, 13 nt, Human immunodeficiency virus 1 (HIV-1)
caagcauaagagg

SEQ ID NO: 2164214 - RNA, 13 nt, Human immunodeficiency virus 1 (HIV-1)
cagaggagagcaa

SEQ ID NO: 2164215 - RNA, 14 nt, Human immunodeficiency virus 1 (HIV-1)
auuuucagaauugg

SEQ ID NO: 2164216 - RNA, 12 nt, Human immunodeficiency virus 1 (HIV-1)
ugccccucccau

SEQ ID NO: 2164217 - RNA, 15 nt, Human immunodeficiency virus 1 (HIV-1)
agcacaagcauaaga

SEQ ID NO: 2164218 - RNA, 15 nt, Human immunodeficiency virus 1 (HIV-1)
uacaauguacacaug

SEQ ID NO: 2164219 - RNA, 23 nt, Human immunodeficiency virus 1 (HIV-1)
cagcagcuaccaaugcugcuugu

SEQ ID NO: 2164220 - RNA, 23 nt, Human immunodeficiency virus 1 (HIV-1)
uaggaaaauauuaagacaaagaa

SEQ ID NO: 2164221 - RNA, 14 nt, Human immunodeficiency virus 1 (HIV-1)
aucaagcagcucca

SEQ ID NO: 2164222 - RNA, 17 nt, Human immunodeficiency virus 1 (HIV-1)
agggacaauuggagaag

SEQ ID NO: 2164223 - RNA, 14 nt, Human immunodeficiency virus 1 (HIV-1)
cagagaggaccagg

SEQ ID NO: 2164224 - RNA, 13 nt, Human immunodeficiency virus 1 (HIV-1)
ccuggcuagaagc

SEQ ID NO: 2164225 - RNA, 19 nt, Human immunodeficiency virus 1 (HIV-1)
gugggacagagaaauuaac

SEQ ID NO: 2164226 - RNA, 21 nt, Human immunodeficiency virus 1 (HIV-1)
gaacccacugcuuaagccuca

SEQ ID NO: 2164227 - RNA, 22 nt, Human immunodeficiency virus 1 (HIV-1)
uagaggaaccaaagcacuaaca

SEQ ID NO: 2164228 - RNA, 22 nt, Human immunodeficiency virus 1 (HIV-1)
cuuaauacacuccuuaauugaa

SEQ ID NO: 2164229 - RNA, 18 nt, Human immunodeficiency virus 1 (HIV-1)
agucaggaacuaaagaau

SEQ ID NO: 2164230 - RNA, 17 nt, Human immunodeficiency virus 1 (HIV-1)
cagauagggugggagca

SEQ ID NO: 2164231 - RNA, 15 nt, Human immunodeficiency virus 1 (HIV-1)
gacaauggcagcaau

SEQ ID NO: 2164232 - RNA, 21 nt, Human immunodeficiency virus 1 (HIV-1)
caaugcugcuugugccuggcu

SEQ ID NO: 2164233 - RNA, 23 nt, Human immunodeficiency virus 1 (HIV-1)
acaauggccauugacagaagaaa

SEQ ID NO: 2164234 - RNA, 13 nt, Human immunodeficiency virus 1 (HIV-1)
ugagccagcagca

SEQ ID NO: 2164235 - RNA, 21 nt, Human immunodeficiency virus 1 (HIV-1)
gaacuacacaccagggccagg

SEQ ID NO: 2164236 - RNA, 19 nt, Human immunodeficiency virus 1 (HIV-1)
acagaaaauuuuaacaugu

SEQ ID NO: 2164237 - RNA, 13 nt, Human immunodeficiency virus 1 (HIV-1)
agcuuaagaauga

SEQ ID NO: 2164238 - RNA, 16 nt, Human immunodeficiency virus 1 (HIV-1)
uagaacauggaaaagu

SEQ ID NO: 2164239 - RNA, 19 nt, Human immunodeficiency virus 1 (HIV-1)
gaguaauaaaucucuggaa

SEQ ID NO: 2164240 - RNA, 14 nt, Human immunodeficiency virus 1 (HIV-1)
guggaucuaccaca

SEQ ID NO: 2164241 - RNA, 15 nt, Human immunodeficiency virus 1 (HIV-1)
aagcacaagaggagg

SEQ ID NO: 2164242 - RNA, 19 nt, Human immunodeficiency virus 1 (HIV-1)
agcaauacagcagcuacca

SEQ ID NO: 2164243 - RNA, 17 nt, Human immunodeficiency virus 1 (HIV-1)
auaggguuauagaagua

SEQ ID NO: 2164244 - RNA, 18 nt, Human immunodeficiency virus 1 (HIV-1)
cagaucugagccugggag

SEQ ID NO: 2164245 - RNA, 14 nt, Human immunodeficiency virus 1 (HIV-1)
auauccacugaccu

SEQ ID NO: 2164246 - RNA, 18 nt, Human immunodeficiency virus 1 (HIV-1)
gaauccguauccagagag

SEQ ID NO: 2164247 - RNA, 19 nt, Human immunodeficiency virus 1 (HIV-1)
uaaacugcccauacaaaag

SEQ ID NO: 2164248 - RNA, 16 nt, Human immunodeficiency virus 1 (HIV-1)
ccugggagcucucugg

SEQ ID NO: 2164249 - RNA, 21 nt, Human immunodeficiency virus 1 (HIV-1)
uagcagaccaacuaauucauc

SEQ ID NO: 2164250 - RNA, 13 nt, Human immunodeficiency virus 1 (HIV-1)
uuugacagccgcc

SEQ ID NO: 2164251 - RNA, 19 nt, Human immunodeficiency virus 1 (HIV-1)
aaagcuugccuugagugcu

SEQ ID NO: 2164252 - RNA, 12 nt, Human immunodeficiency virus 1 (HIV-1)
cugagccuggga

SEQ ID NO: 2164253 - RNA, 16 nt, Human immunodeficiency virus 1 (HIV-1)
accaaggcaaagagaa

SEQ ID NO: 2164254 - RNA, 13 nt, Human immunodeficiency virus 1 (HIV-1)
auagaggagcuga

SEQ ID NO: 2164255 - RNA, 22 nt, Human immunodeficiency virus 1 (HIV-1)
aucaagcuucucuaucaaagca

SEQ ID NO: 2164256 - RNA, 16 nt, Human immunodeficiency virus 1 (HIV-1)
gaagccauaauaagaa

SEQ ID NO: 2164257 - RNA, 21 nt, Human immunodeficiency virus 1 (HIV-1)
acaguacuaaauggagaaaau

SEQ ID NO: 2164258 - RNA, 14 nt, Human immunodeficiency virus 1 (HIV-1)
gguucuugggagca

SEQ ID NO: 2164259 - RNA, 15 nt, Human immunodeficiency virus 1 (HIV-1)
augacaugguagaac

SEQ ID NO: 2164260 - RNA, 16 nt, Human immunodeficiency virus 1 (HIV-1)
aguggcgagcccucag

SEQ ID NO: 2164261 - RNA, 15 nt, Human immunodeficiency virus 1 (HIV-1)
uuuagaaggaaaagu

SEQ ID NO: 2164262 - RNA, 23 nt, Human immunodeficiency virus 1 (HIV-1)
aggccaauaaaggagagaacacc

SEQ ID NO: 2164263 - RNA, 20 nt, Human immunodeficiency virus 1 (HIV-1)
agucuccauagaauggagga

SEQ ID NO: 2164264 - RNA, 22 nt, Human immunodeficiency virus 1 (HIV-1)
cacaagaggaggaggagguggg

SEQ ID NO: 2164265 - RNA, 18 nt, Human immunodeficiency virus 1 (HIV-1)
uugugccuggcuagaagc

SEQ ID NO: 2164266 - RNA, 21 nt, Human immunodeficiency virus 1 (HIV-1)
cuggcuagaagcacaagagga

SEQ ID NO: 2164267 - RNA, 19 nt, Human immunodeficiency virus 1 (HIV-1)
ggaacagauuuggaaucac

SEQ ID NO: 2164268 - RNA, 13 nt, Human immunodeficiency virus 1 (HIV-1)
agaagcacaagag

SEQ ID NO: 2164269 - RNA, 21 nt, Human immunodeficiency virus 1 (HIV-1)
aacuggcagaaaacagagaga

SEQ ID NO: 2164270 - RNA, 12 nt, Human immunodeficiency virus 1 (HIV-1)
guugcucuggaa

SEQ ID NO: 2164271 - RNA, 23 nt, Human immunodeficiency virus 1 (HIV-1)
uugccuguacugggucucucugg

SEQ ID NO: 2164272 - RNA, 23 nt, Human immunodeficiency virus 1 (HIV-1)
gcacaagaggaggaggagguggg

SEQ ID NO: 2164273 - RNA, 17 nt, Human immunodeficiency virus 1 (HIV-1)
ugggguaccugugugga

SEQ ID NO: 2164274 - RNA, 18 nt, Human immunodeficiency virus 1 (HIV-1)
uuggaaauaauaaaacaa

SEQ ID NO: 2164275 - RNA, 15 nt, Human immunodeficiency virus 1 (HIV-1)
aucugacuuagaaau

SEQ ID NO: 2164276 - RNA, 18 nt, Human immunodeficiency virus 1 (HIV-1)
aacauuaguagagcaaaa

SEQ ID NO: 2164277 - RNA, 12 nt, Human immunodeficiency virus 1 (HIV-1)
aaauagaggagc

SEQ ID NO: 2164278 - RNA, 23 nt, Human immunodeficiency virus 1 (HIV-1)
cacccugugagccugcaugggau

SEQ ID NO: 2164279 - RNA, 20 nt, Human immunodeficiency virus 1 (HIV-1)
auaucagcacaagcauaaga

SEQ ID NO: 2164280 - RNA, 22 nt, Human immunodeficiency virus 1 (HIV-1)
aggaaccaaagcacuaacagaa

SEQ ID NO: 2164281 - RNA, 14 nt, Human immunodeficiency virus 1 (HIV-1)
caguauuagaagaa

SEQ ID NO: 2164282 - RNA, 19 nt, Human immunodeficiency virus 1 (HIV-1)
uaguacagcugaacacauc

SEQ ID NO: 2164283 - RNA, 17 nt, Human immunodeficiency virus 1 (HIV-1)
aggaaaauaugcaagaa

SEQ ID NO: 2164284 - RNA, 22 nt, Human immunodeficiency virus 1 (HIV-1)
uagcagaacuacacaccagggc

SEQ ID NO: 2164285 - RNA, 20 nt, Human immunodeficiency virus 1 (HIV-1)
uaauagaggaagacaaaaag

SEQ ID NO: 2164286 - RNA, 21 nt, Human immunodeficiency virus 1 (HIV-1)
agucacaccucagguaccuuu

SEQ ID NO: 2164287 - RNA, 21 nt, Human immunodeficiency virus 1 (HIV-1)
uuaagaccaaugacuuacaag

SEQ ID NO: 2164288 - RNA, 14 nt, Human immunodeficiency virus 1 (HIV-1)
agcccucagauccu

SEQ ID NO: 2164289 - RNA, 17 nt, Human immunodeficiency virus 1 (HIV-1)
aggguuaaaaaagaaaa

SEQ ID NO: 2164290 - RNA, 20 nt, Human immunodeficiency virus 1 (HIV-1)
caguggauauauagaagcag

SEQ ID NO: 2164291 - RNA, 23 nt, Human immunodeficiency virus 1 (HIV-1)
gaagaaucgcaaaaccagcaaga

SEQ ID NO: 2164292 - RNA, 23 nt, Human immunodeficiency virus 1 (HIV-1)
ugguuagaccagaucugagccug

SEQ ID NO: 2164293 - RNA, 11 nt, Human immunodeficiency virus 1 (HIV-1)
aggaggggacc

SEQ ID NO: 2164294 - RNA, 14 nt, Human immunodeficiency virus 1 (HIV-1)
auaccacuaacaga

SEQ ID NO: 2164295 - RNA, 22 nt, Human immunodeficiency virus 1 (HIV-1)
aaaguaggaaaagcaauguaug

SEQ ID NO: 2164296 - RNA, 15 nt, Human immunodeficiency virus 1 (HIV-1)
agauaaaaaacugcu

SEQ ID NO: 2164297 - RNA, 19 nt, Human immunodeficiency virus 1 (HIV-1)
cagauaagauagaagaggc

SEQ ID NO: 2164298 - RNA, 17 nt, Human immunodeficiency virus 1 (HIV-1)
cuguagaaauuaauugu

SEQ ID NO: 2164299 - RNA, 22 nt, Human immunodeficiency virus 1 (HIV-1)
uggaaagauaccuaaaggauca

SEQ ID NO: 2164300 - RNA, 20 nt, Human immunodeficiency virus 1 (HIV-1)
gacuagagcccuggaagcau

SEQ ID NO: 2164301 - RNA, 16 nt, Human immunodeficiency virus 1 (HIV-1)
acccugugagccugca

SEQ ID NO: 2164302 - RNA, 16 nt, Human immunodeficiency virus 1 (HIV-1)
gagcugagccagcagc

SEQ ID NO: 2164303 - RNA, 13 nt, Human immunodeficiency virus 1 (HIV-1)
uaccaaugcugcu

SEQ ID NO: 2164304 - RNA, 18 nt, Human immunodeficiency virus 1 (HIV-1)
caaggcaaagagaagagu

SEQ ID NO: 2164305 - RNA, 18 nt, Human immunodeficiency virus 1 (HIV-1)
gcagucuagcagaagaag

SEQ ID NO: 2164306 - RNA, 19 nt, Human immunodeficiency virus 1 (HIV-1)
cuagagcuuuuagaggagc

SEQ ID NO: 2164307 - RNA, 19 nt, Human immunodeficiency virus 1 (HIV-1)
ugagacaagcacauuguaa

SEQ ID NO: 2164308 - RNA, 16 nt, Human immunodeficiency virus 1 (HIV-1)
aaagcacuaacagaag

SEQ ID NO: 2164309 - RNA, 15 nt, Human immunodeficiency virus 1 (HIV-1)
uuggcacuagcagca

SEQ ID NO: 2164310 - RNA, 13 nt, Human immunodeficiency virus 1 (HIV-1)
agacuucaggaag

SEQ ID NO: 2164311 - RNA, 19 nt, Human immunodeficiency virus 1 (HIV-1)
uuuguggaauugguuuaac

SEQ ID NO: 2164312 - RNA, 19 nt, Human immunodeficiency virus 1 (HIV-1)
agaaucuaugaauaaagaa

SEQ ID NO: 2164313 - RNA, 16 nt, Human immunodeficiency virus 1 (HIV-1)
aacagauggcagguga

SEQ ID NO: 2164314 - RNA, 15 nt, Human immunodeficiency virus 1 (HIV-1)
acugcuguuaaaugg

SEQ ID NO: 2164315 - RNA, 20 nt, Human immunodeficiency virus 1 (HIV-1)
ccagcagcagauaggguggg

SEQ ID NO: 2164316 - RNA, 16 nt, Human immunodeficiency virus 1 (HIV-1)
aggcguggccugggcg

SEQ ID NO: 2164317 - RNA, 12 nt, Human immunodeficiency virus 1 (HIV-1)
agcaacaaugag

SEQ ID NO: 2164318 - RNA, 14 nt, Human immunodeficiency virus 1 (HIV-1)
gcaauacagcagcu

SEQ ID NO: 2164319 - RNA, 18 nt, Human immunodeficiency virus 1 (HIV-1)
gugccucuucagcuacca

SEQ ID NO: 2164320 - RNA, 19 nt, Human immunodeficiency virus 1 (HIV-1)
aggauuagaacauggaaaa

SEQ ID NO: 2164321 - RNA, 18 nt, Human immunodeficiency virus 1 (HIV-1)
acauaccuagaagaauaa

SEQ ID NO: 2164322 - RNA, 17 nt, Human immunodeficiency virus 1 (HIV-1)
aacuagggaacccacug

SEQ ID NO: 2164323 - RNA, 17 nt, Human immunodeficiency virus 1 (HIV-1)
aucuccuauggcaggaa

SEQ ID NO: 2164324 - RNA, 21 nt, Human immunodeficiency virus 1 (HIV-1)
aguggaagccauaauaagaau

SEQ ID NO: 2164325 - RNA, 22 nt, Human immunodeficiency virus 1 (HIV-1)
gcagcaucucgagaccuggaaa

SEQ ID NO: 2164326 - RNA, 15 nt, Human immunodeficiency virus 1 (HIV-1)
aguacuugguuuaau

SEQ ID NO: 2164327 - RNA, 17 nt, Human immunodeficiency virus 1 (HIV-1)
uacagagguacauaaug

SEQ ID NO: 2164328 - RNA, 22 nt, Human immunodeficiency virus 1 (HIV-1)
augaauaaagaauuaaagaaaa

SEQ ID NO: 2164329 - RNA, 12 nt, Human immunodeficiency virus 1 (HIV-1)
ggaaggaagcaa

SEQ ID NO: 2164330 - RNA, 17 nt, Human immunodeficiency virus 1 (HIV-1)
augaguuugccaggaag

SEQ ID NO: 2164331 - RNA, 22 nt, Human immunodeficiency virus 1 (HIV-1)
acuuaauagcagaaauacagaa

SEQ ID NO: 2164332 - RNA, 11 nt, Human immunodeficiency virus 1 (HIV-1)
ugggagcagca

SEQ ID NO: 2164333 - RNA, 13 nt, Human immunodeficiency virus 1 (HIV-1)
guguaaaauuaac

SEQ ID NO: 2164334 - RNA, 11 nt, Human immunodeficiency virus 1 (HIV-1)
cccucagaucc

SEQ ID NO: 2164335 - RNA, 22 nt, Human immunodeficiency virus 1 (HIV-1)
uggggcaccaugcuccuuggga

SEQ ID NO: 2164336 - RNA, 22 nt, Human immunodeficiency virus 1 (HIV-1)
uuuuagaggagcuuaagaauga

SEQ ID NO: 2164337 - RNA, 20 nt, Human immunodeficiency virus 1 (HIV-1)
acagagggagccacacaaug

SEQ ID NO: 2164338 - RNA, 18 nt, Human immunodeficiency virus 1 (HIV-1)
aggcuugguagguuuaag

SEQ ID NO: 2164339 - RNA, 19 nt, Human immunodeficiency virus 1 (HIV-1)
agcaaaauggaauaacacu

SEQ ID NO: 2164340 - RNA, 18 nt, Human immunodeficiency virus 1 (HIV-1)
gagucaggaacuaaagaa

SEQ ID NO: 2164341 - RNA, 15 nt, Human immunodeficiency virus 1 (HIV-1)
aucucgagaccugga

SEQ ID NO: 2164342 - RNA, 15 nt, Human immunodeficiency virus 1 (HIV-1)
uaacaaauuggcugu

SEQ ID NO: 2164343 - RNA, 16 nt, Human immunodeficiency virus 1 (HIV-1)
acacaacaaaucagaa

SEQ ID NO: 2164344 - RNA, 21 nt, Human immunodeficiency virus 1 (HIV-1)
uagaaauagggcagcauagaa

SEQ ID NO: 2164345 - RNA, 15 nt, Human immunodeficiency virus 1 (HIV-1)
aaguagacaggauga

SEQ ID NO: 2164346 - RNA, 17 nt, Human immunodeficiency virus 1 (HIV-1)
accaauagauaaugaua

SEQ ID NO: 2164347 - RNA, 20 nt, Human immunodeficiency virus 1 (HIV-1)
agaacaauuuggaaauaaua

SEQ ID NO: 2164348 - RNA, 22 nt, Human immunodeficiency virus 1 (HIV-1)
gauggaaaggaucaccagcaau

SEQ ID NO: 2164349 - RNA, 14 nt, Human immunodeficiency virus 1 (HIV-1)
gugaacggauccuu

SEQ ID NO: 2164350 - RNA, 12 nt, Human immunodeficiency virus 1 (HIV-1)
agaucugagccu

SEQ ID NO: 2164351 - RNA, 14 nt, Human immunodeficiency virus 1 (HIV-1)
agccuaaaacugcu

SEQ ID NO: 2164352 - RNA, 20 nt, Human immunodeficiency virus 1 (HIV-1)
cugggacgaucugcggagcc

SEQ ID NO: 2164353 - RNA, 18 nt, Human immunodeficiency virus 1 (HIV-1)
uagaaucuaugaauaaag

SEQ ID NO: 2164354 - RNA, 18 nt, Human immunodeficiency virus 1 (HIV-1)
gccacauaccuagaagaa

SEQ ID NO: 2164355 - RNA, 15 nt, Human immunodeficiency virus 1 (HIV-1)
aucacacgaccugga

SEQ ID NO: 2164356 - RNA, 19 nt, Human immunodeficiency virus 1 (HIV-1)
acccucccaugcagaauaa

SEQ ID NO: 2164357 - RNA, 18 nt, Human immunodeficiency virus 1 (HIV-1)
agcaagaaauggagccag

SEQ ID NO: 2164358 - RNA, 19 nt, Human immunodeficiency virus 1 (HIV-1)
uaucagcacuuguggagau

SEQ ID NO: 2164359 - RNA, 10 nt, Human immunodeficiency virus 1 (HIV-1)
gacuggaagg

SEQ ID NO: 2164360 - RNA, 19 nt, Human immunodeficiency virus 1 (HIV-1)
uagcuugcucaaugccaca

SEQ ID NO: 2164361 - RNA, 17 nt, Human immunodeficiency virus 1 (HIV-1)
cagcuaccaccgcuuga

SEQ ID NO: 2164362 - RNA, 19 nt, Human immunodeficiency virus 1 (HIV-1)
aauaacaccaaaaaagaua

SEQ ID NO: 2164363 - RNA, 19 nt, Human immunodeficiency virus 1 (HIV-1)
augggauggaugacccgga

SEQ ID NO: 2164364 - RNA, 21 nt, Human immunodeficiency virus 1 (HIV-1)
auaguaguagcgggagaauga

SEQ ID NO: 2164365 - RNA, 22 nt, Human immunodeficiency virus 1 (HIV-1)
uggcgagcccucagauccugca

SEQ ID NO: 2164366 - RNA, 21 nt, Human immunodeficiency virus 1 (HIV-1)
uuuccagggaggcguggccug

SEQ ID NO: 2164367 - RNA, 16 nt, Human immunodeficiency virus 1 (HIV-1)
gaagcauccaggaagu

SEQ ID NO: 2164368 - RNA, 21 nt, Human immunodeficiency virus 1 (HIV-1)
agcaguuaauaaaaaaggaaa

SEQ ID NO: 2164369 - RNA, 22 nt, Human immunodeficiency virus 1 (HIV-1)
gaaccaaagcacuaacagaagu

SEQ ID NO: 2164370 - RNA, 18 nt, Human immunodeficiency virus 1 (HIV-1)
ccgcuugagagacuuacu

SEQ ID NO: 2164371 - RNA, 19 nt, Human immunodeficiency virus 1 (HIV-1)
uuaauaaaaaaggaaaagg

SEQ ID NO: 2164372 - RNA, 18 nt, Human immunodeficiency virus 1 (HIV-1)
aagaauaagacagggcuu

SEQ ID NO: 2164373 - RNA, 19 nt, Human immunodeficiency virus 1 (HIV-1)
uaggaaaauauuaagacaa

SEQ ID NO: 2164374 - RNA, 16 nt, Human immunodeficiency virus 1 (HIV-1)
acacaccagggccagg

SEQ ID NO: 2164375 - RNA, 14 nt, Human immunodeficiency virus 1 (HIV-1)
auuacaaaaacaaa

SEQ ID NO: 2164376 - RNA, 13 nt, Human immunodeficiency virus 1 (HIV-1)
ccagaucugagcc

SEQ ID NO: 2164377 - RNA, 18 nt, Human immunodeficiency virus 1 (HIV-1)
ucuccuauggcaggaaga

SEQ ID NO: 2164378 - RNA, 13 nt, Human immunodeficiency virus 1 (HIV-1)
agccucaauaaag

SEQ ID NO: 2164379 - RNA, 13 nt, Human immunodeficiency virus 1 (HIV-1)
aacccacaagaag

SEQ ID NO: 2164380 - RNA, 23 nt, Human immunodeficiency virus 1 (HIV-1)
ggcuaacuagggaacccacugcu

SEQ ID NO: 2164381 - RNA, 18 nt, Human immunodeficiency virus 1 (HIV-1)
ugcgauucuaaaauguaa

SEQ ID NO: 2164382 - RNA, 16 nt, Human immunodeficiency virus 1 (HIV-1)
agcaagaaaagaauga

SEQ ID NO: 2164383 - RNA, 15 nt, Human immunodeficiency virus 1 (HIV-1)
uguaguccaggaaua

SEQ ID NO: 2164384 - RNA, 15 nt, Human immunodeficiency virus 1 (HIV-1)
uaguaucaacucaac

SEQ ID NO: 2164385 - RNA, 14 nt, Human immunodeficiency virus 1 (HIV-1)
cucagauccugcau

SEQ ID NO: 2164386 - RNA, 12 nt, Human immunodeficiency virus 1 (HIV-1)
cgacagaggaga

SEQ ID NO: 2164387 - RNA, 15 nt, Human immunodeficiency virus 1 (HIV-1)
ugcagaauaaaacaa

SEQ ID NO: 2164388 - RNA, 22 nt, Human immunodeficiency virus 1 (HIV-1)
acaauuuggaaauaauaaaaca

SEQ ID NO: 2164389 - RNA, 14 nt, Human immunodeficiency virus 1 (HIV-1)
gcaaauuaagagaa

SEQ ID NO: 2164390 - RNA, 17 nt, Human immunodeficiency virus 1 (HIV-1)
uacacccugugagccug

SEQ ID NO: 2164391 - RNA, 11 nt, Human immunodeficiency virus 1 (HIV-1)
uaaaauuauuc

SEQ ID NO: 2164392 - RNA, 15 nt, Human immunodeficiency virus 1 (HIV-1)
gaccagaucugagcc

SEQ ID NO: 2164393 - RNA, 18 nt, Human immunodeficiency virus 1 (HIV-1)
augagacgagcugagcca

SEQ ID NO: 2164394 - RNA, 15 nt, Human immunodeficiency virus 1 (HIV-1)
auacaagaaaaagaa

SEQ ID NO: 2164395 - RNA, 14 nt, Human immunodeficiency virus 1 (HIV-1)
aauagugacauaaa

SEQ ID NO: 2164396 - RNA, 17 nt, Human immunodeficiency virus 1 (HIV-1)
acauuaguagagcaaaa

SEQ ID NO: 2164397 - RNA, 17 nt, Human immunodeficiency virus 1 (HIV-1)
acaaaucagaagacuga

SEQ ID NO: 2164398 - RNA, 13 nt, Human immunodeficiency virus 1 (HIV-1)
ccaaugacuuaca

SEQ ID NO: 2164399 - RNA, 23 nt, Human immunodeficiency virus 1 (HIV-1)
uggcaggaagaagcggagacagc

SEQ ID NO: 2164400 - RNA, 14 nt, Human immunodeficiency virus 1 (HIV-1)
gaacuacacaccag

SEQ ID NO: 2164401 - RNA, 17 nt, Human immunodeficiency virus 1 (HIV-1)
auguaugccccucccau

SEQ ID NO: 2164402 - RNA, 21 nt, Human immunodeficiency virus 1 (HIV-1)
agggagacuaaauuaggaaaa

SEQ ID NO: 2164403 - RNA, 21 nt, Human immunodeficiency virus 1 (HIV-1)
uggaaaaacauggagcaauca

SEQ ID NO: 2164404 - RNA, 16 nt, Human immunodeficiency virus 1 (HIV-1)
acaguauuagaagaaa

SEQ ID NO: 2164405 - RNA, 13 nt, Human immunodeficiency virus 1 (HIV-1)
cagauauccacug

SEQ ID NO: 2164406 - RNA, 16 nt, Human immunodeficiency virus 1 (HIV-1)
cagaccuggaggagga

SEQ ID NO: 2164407 - RNA, 23 nt, Human immunodeficiency virus 1 (HIV-1)
ggaguagcacccaccaaggcaaa

SEQ ID NO: 2164408 - RNA, 23 nt, Human immunodeficiency virus 1 (HIV-1)
agggucaaauaacacugaaggaa

SEQ ID NO: 2164409 - RNA, 15 nt, Human immunodeficiency virus 1 (HIV-1)
agauccuagacuaga

SEQ ID NO: 2164410 - RNA, 17 nt, Human immunodeficiency virus 1 (HIV-1)
gccacuuuuuaaaagaa

SEQ ID NO: 2164411 - RNA, 22 nt, Human immunodeficiency virus 1 (HIV-1)
cugguuagaccagaucugagcc

SEQ ID NO: 2164412 - RNA, 23 nt, Human immunodeficiency virus 1 (HIV-1)
cagaacuacacaccagggccagg

SEQ ID NO: 2164413 - RNA, 17 nt, Human immunodeficiency virus 1 (HIV-1)
guuacucgacagaggag

SEQ ID NO: 2164414 - RNA, 14 nt, Human immunodeficiency virus 1 (HIV-1)
uaccacacacaagg

SEQ ID NO: 2164415 - RNA, 21 nt, Human immunodeficiency virus 1 (HIV-1)
ccagggaggcguggccugggc

SEQ ID NO: 2164416 - RNA, 18 nt, Human immunodeficiency virus 1 (HIV-1)
ugccuggcuagaagcaca

SEQ ID NO: 2164417 - RNA, 18 nt, Human immunodeficiency virus 1 (HIV-1)
uuguaacgaggauugugg

SEQ ID NO: 2164418 - RNA, 18 nt, Human immunodeficiency virus 1 (HIV-1)
cagaccuggaggaggaga

SEQ ID NO: 2164419 - RNA, 15 nt, Human immunodeficiency virus 1 (HIV-1)
cucauccaagaauaa

SEQ ID NO: 2164420 - RNA, 23 nt, Human immunodeficiency virus 1 (HIV-1)
auauccacugaccuuuggauggu

SEQ ID NO: 2164421 - RNA, 17 nt, Human immunodeficiency virus 1 (HIV-1)
gcuauaagauggguggc

SEQ ID NO: 2164422 - RNA, 23 nt, Human immunodeficiency virus 1 (HIV-1)
guaacgcacaguuuuaauugugg

SEQ ID NO: 2164423 - RNA, 16 nt, Human immunodeficiency virus 1 (HIV-1)
cagacccaccucccaa

SEQ ID NO: 2164424 - RNA, 22 nt, Human immunodeficiency virus 1 (HIV-1)
agaaucgcaaaaccagcaagaa

SEQ ID NO: 2164425 - RNA, 18 nt, Human immunodeficiency virus 1 (HIV-1)
gaccagaucugagccugg

SEQ ID NO: 2164426 - RNA, 19 nt, Human immunodeficiency virus 1 (HIV-1)
caccaaggcaaagagaaga

SEQ ID NO: 2164427 - RNA, 20 nt, Human immunodeficiency virus 1 (HIV-1)
auggccuacuguaagggaaa

SEQ ID NO: 2164428 - RNA, 17 nt, Human immunodeficiency virus 1 (HIV-1)
gagagauucuaaaagaa

SEQ ID NO: 2164429 - RNA, 18 nt, Human immunodeficiency virus 1 (HIV-1)
aacaaauuauaaacaugu

SEQ ID NO: 2164430 - RNA, 14 nt, Human immunodeficiency virus 1 (HIV-1)
aaucaaauaauaga

SEQ ID NO: 2164431 - RNA, 16 nt, Human immunodeficiency virus 1 (HIV-1)
ccugauuagcagaacu

SEQ ID NO: 2164432 - RNA, 10 nt, Human immunodeficiency virus 1 (HIV-1)
aucucuggaa

SEQ ID NO: 2164433 - RNA, 13 nt, Human immunodeficiency virus 1 (HIV-1)
agcaagaaaagaa

SEQ ID NO: 2164434 - RNA, 18 nt, Human immunodeficiency virus 1 (HIV-1)
accaaagcacuaacagaa

SEQ ID NO: 2164435 - RNA, 16 nt, Human immunodeficiency virus 1 (HIV-1)
gcagucuagcagaaga

SEQ ID NO: 2164436 - RNA, 14 nt, Human immunodeficiency virus 1 (HIV-1)
agaaaagcaaagau

SEQ ID NO: 2164437 - RNA, 16 nt, Human immunodeficiency virus 1 (HIV-1)
cgagaucuucagaccu

SEQ ID NO: 2164438 - RNA, 21 nt, Human
gccucuuggaccucugcucug

SEQ ID NO: 2164439 - RNA, 18 nt, Human
gccugcgcccaccccgcu

SEQ ID NO: 2164440 - RNA, 23 nt, Human
gccugccuugaagccacugaagc

SEQ ID NO: 2164441 - RNA, 16 nt, Human
gccugccuugaagcca

SEQ ID NO: 2164442 - RNA, 21 nt, Human
gccugcgccaccgcccagaga

SEQ ID NO: 2164443 - RNA, 16 nt, Human
gccugccucuucucua

SEQ ID NO: 2164444 - RNA, 22 nt, Human
gccugccuccagggcuggacug

SEQ ID NO: 2164445 - RNA, 17 nt, Human
gccugccuccagggcug

SEQ ID NO: 2164446 - RNA, 18 nt, Human
gccugccuccagggcugg

SEQ ID NO: 2164447 - RNA, 17 nt, Human
gccugccuguucccauu

SEQ ID NO: 2164448 - RNA, 13 nt, Human
gccugccugucug

SEQ ID NO: 2164449 - RNA, 14 nt, Human
gccugccugucugu

SEQ ID NO: 2164450 - RNA, 16 nt, Human
gccugccugucugucu

SEQ ID NO: 2164451 - RNA, 22 nt, Human
gccugccugucugucucuccau

SEQ ID NO: 2164452 - RNA, 12 nt, Human
gccugccuggag

SEQ ID NO: 2164453 - RNA, 13 nt, Human
gccugccuggagc

SEQ ID NO: 2164454 - RNA, 14 nt, Human
gccugccuggagcg

SEQ ID NO: 2164455 - RNA, 13 nt, Human
gccugccuggcag

SEQ ID NO: 2164456 - RNA, 15 nt, Human
gccugccuggcaggc

SEQ ID NO: 2164457 - RNA, 16 nt, Human
gccugccuggcaggcu

SEQ ID NO: 2164458 - RNA, 17 nt, Human
gccugccuggcaggcug

SEQ ID NO: 2164459 - RNA, 15 nt, Human
gccuggccccucagg

SEQ ID NO: 2164460 - RNA, 16 nt, Human
gccuggccccucaggg

SEQ ID NO: 2164461 - RNA, 17 nt, Human
gccuggccccucagggu

SEQ ID NO: 2164462 - RNA, 21 nt, Human
gccugugugacaucaguggca

SEQ ID NO: 2164463 - RNA, 22 nt, Human
gccugugucccaugacccaccc

SEQ ID NO: 2164464 - RNA, 23 nt, Human
gccugugucccaugacccacccc

SEQ ID NO: 2164465 - RNA, 21 nt, Human
gccuguguccaugcgcucagg

SEQ ID NO: 2164466 - RNA, 23 nt, Human
gccuguguccaugcgcucagggc

SEQ ID NO: 2164467 - RNA, 15 nt, Human
gccugugucccauga

SEQ ID NO: 2164468 - RNA, 19 nt, Human
gccugugucccaugaccca

SEQ ID NO: 2164469 - RNA, 20 nt, Human
gccugugucccaugacccac

SEQ ID NO: 2164470 - RNA, 21 nt, Human
gccugugucccaugacccacc

SEQ ID NO: 2164471 - RNA, 20 nt, Human
gccuguguccaugcgcucag

SEQ ID NO: 2164472 - RNA, 21 nt, Human
gccugggaucccucauccuca

SEQ ID NO: 2164473 - RNA, 18 nt, Human
gccugggaucccucaucc

SEQ ID NO: 2164474 - RNA, 22 nt, Human
gccugggaggucaaggcugcag

SEQ ID NO: 2164475 - RNA, 14 nt, Human
gccugggaucccuc

SEQ ID NO: 2164476 - RNA, 15 nt, Human
gccugggaauguauu

SEQ ID NO: 2164477 - RNA, 23 nt, Human
gccugggaauguauuauucugca

SEQ ID NO: 2164478 - RNA, 21 nt, Human
gccugggaggucaaggcugca

SEQ ID NO: 2164479 - RNA, 17 nt, Human
gccuggcuucuggagcc

SEQ ID NO: 2164480 - RNA, 16 nt, Human
gccuggcuucuggagc

SEQ ID NO: 2164481 - RNA, 15 nt, Human
gccuggcuucuggag

SEQ ID NO: 2164482 - RNA, 14 nt, Human
gccuggcuucugga

SEQ ID NO: 2164483 - RNA, 22 nt, Human
gccuggcuucuggagcccuugg

SEQ ID NO: 2164484 - RNA, 18 nt, Human
gccuggcuucuggagccc

SEQ ID NO: 2164485 - RNA, 23 nt, Human
gccuggcuucuggagcccuuggg

SEQ ID NO: 2164486 - RNA, 10 nt, Human
gccuggccug

SEQ ID NO: 2164487 - RNA, 15 nt, Human
gccuggccggcaacc

SEQ ID NO: 2164488 - RNA, 18 nt, Human
gccuggccggcaacccca

SEQ ID NO: 2164489 - RNA, 20 nt, Human
gccuggccccucaggguccc

SEQ ID NO: 2164490 - RNA, 22 nt, Human
gccuggccccucagggucccug

SEQ ID NO: 2164491 - RNA, 17 nt, Human
gccuccugccugccccu

SEQ ID NO: 2164492 - RNA, 23 nt, Human
gccuccugccugccccucucccg

SEQ ID NO: 2164493 - RNA, 13 nt, Human
gccuccuguguaa

SEQ ID NO: 2164494 - RNA, 18 nt, Human
gccuccuguguagcuggg

SEQ ID NO: 2164495 - RNA, 12 nt, Human
gccucugcuggc

SEQ ID NO: 2164496 - RNA, 15 nt, Human
gccucugcugccaug

SEQ ID NO: 2164497 - RNA, 12 nt, Human
gccucuggcuag

SEQ ID NO: 2164498 - RNA, 17 nt, Human
gccucuggauuguggga

SEQ ID NO: 2164499 - RNA, 13 nt, Human
gccuccugugugu

SEQ ID NO: 2164500 - RNA, 12 nt, Human
gccucugugccu

SEQ ID NO: 2164501 - RNA, 23 nt, Human
gccucuggcuagaggccagcccc

SEQ ID NO: 2164502 - RNA, 22 nt, Human
gccucuggcuagaggccagccc

SEQ ID NO: 2164503 - RNA, 21 nt, Human
gccucuggcuagaggccagcc

SEQ ID NO: 2164504 - RNA, 19 nt, Human
gccucuggcuagaggccag

SEQ ID NO: 2164505 - RNA, 18 nt, Human
gccucuggcuagaggcca

SEQ ID NO: 2164506 - RNA, 13 nt, Human
gccucuggcuaga

SEQ ID NO: 2164507 - RNA, 12 nt, Human
gccucugggacu

SEQ ID NO: 2164508 - RNA, 12 nt, Human
gccuccucaucc

SEQ ID NO: 2164509 - RNA, 15 nt, Human
gccuccucaucccgu

SEQ ID NO: 2164510 - RNA, 13 nt, Human
gccuccuccagcc

SEQ ID NO: 2164511 - RNA, 15 nt, Human
gccuccuccugacca

SEQ ID NO: 2164512 - RNA, 14 nt, Human
gccuccugccugcc

SEQ ID NO: 2164513 - RNA, 18 nt, Human
gccuccugcccuuaccug

SEQ ID NO: 2164514 - RNA, 17 nt, Human
gccuccucccuuagcuc

SEQ ID NO: 2164515 - RNA, 13 nt, Human
gccuccuccugac

SEQ ID NO: 2164516 - RNA, 16 nt, Human
gccuccuccuucccaa

SEQ ID NO: 2164517 - RNA, 17 nt, Human
gccuccucaucccgugu

SEQ ID NO: 2164518 - RNA, 22 nt, Human
gccuccucaucccguguucucc

SEQ ID NO: 2164519 - RNA, 14 nt, Human
gccuccucaucugg

SEQ ID NO: 2164520 - RNA, 23 nt, Human
gccuccucaucugggggagugga

SEQ ID NO: 2164521 - RNA, 16 nt, Human
gccuccucccuuagcu

SEQ ID NO: 2164522 - RNA, 23 nt, Human
gccucuucucuacucuagggaaa

SEQ ID NO: 2164523 - RNA, 12 nt, Human
gccucuucucua

SEQ ID NO: 2164524 - RNA, 17 nt, Human
gccucuucuagagccgu

SEQ ID NO: 2164525 - RNA, 19 nt, Human
gccucuuaaagcugccugu

SEQ ID NO: 2164526 - RNA, 17 nt, Human
gccucuguuugacaaac

SEQ ID NO: 2164527 - RNA, 15 nt, Human
gccucuucugggagg

SEQ ID NO: 2164528 - RNA, 14 nt, Human
gccucuucugggag

SEQ ID NO: 2164529 - RNA, 15 nt, Human
gccucuucuucuuca

SEQ ID NO: 2164530 - RNA, 18 nt, Human
gccucuucugggagggca

SEQ ID NO: 2164531 - RNA, 21 nt, Human
gccucuucuucuucagaagac

SEQ ID NO: 2164532 - RNA, 20 nt, Human
gccucuucuucuucagaaga

SEQ ID NO: 2164533 - RNA, 16 nt, Human
gccucuucuucuucag

SEQ ID NO: 2164534 - RNA, 18 nt, Human
gccucuuaaagcugccug

SEQ ID NO: 2164535 - RNA, 18 nt, Human
gccucuguguccuucccu

SEQ ID NO: 2164536 - RNA, 21 nt, Human
gccucuguguccuucccugca

SEQ ID NO: 2164537 - RNA, 20 nt, Human
gccucugugucacuggcugc

SEQ ID NO: 2164538 - RNA, 22 nt, Human
gccucugugucacuggcugccu

SEQ ID NO: 2164539 - RNA, 14 nt, Human
gccucuguguccuu

SEQ ID NO: 2164540 - RNA, 15 nt, Human
gccucuguguccuuc

SEQ ID NO: 2164541 - RNA, 22 nt, Human
gccucuuccucccucauuccac

SEQ ID NO: 2164542 - RNA, 12 nt, Human
gccucuuccucc

SEQ ID NO: 2164543 - RNA, 21 nt, Human
gccucuguggagccccagcau

SEQ ID NO: 2164544 - RNA, 18 nt, Human
gccucugugcugugugug

SEQ ID NO: 2164545 - RNA, 12 nt, Human
gccucuguguca

SEQ ID NO: 2164546 - RNA, 15 nt, Human
gccucugugucacug

SEQ ID NO: 2164547 - RNA, 16 nt, Human
gccucugugucacugg

SEQ ID NO: 2164548 - RNA, 19 nt, Human
gccucugugucacuggcug

SEQ ID NO: 2164549 - RNA, 11 nt, Human
gccucugugcu

SEQ ID NO: 2164550 - RNA, 12 nt, Human
gccucugugcug

SEQ ID NO: 2164551 - RNA, 14 nt, Human
gccucugugcugug

SEQ ID NO: 2164552 - RNA, 17 nt, Human
gccucugugcugugugu

SEQ ID NO: 2164553 - RNA, 20 nt, Human
gccucuugcggucccuucuu

SEQ ID NO: 2164554 - RNA, 21 nt, Human
gccucuugagcaguggcuggu

SEQ ID NO: 2164555 - RNA, 19 nt, Human
gccucuugagcaguggcug

SEQ ID NO: 2164556 - RNA, 20 nt, Human
gccucuugagcaguggcugg

SEQ ID NO: 2164557 - RNA, 18 nt, Human
gccucuugagcaguggcu

SEQ ID NO: 2164558 - RNA, 17 nt, Human
gccugcccaggccccug

SEQ ID NO: 2164559 - RNA, 18 nt, Human
gccugcccaggccccugc

SEQ ID NO: 2164560 - RNA, 21 nt, Human
gccugccgguaaacacgccug

SEQ ID NO: 2164561 - RNA, 11 nt, Human
gccugccucca

SEQ ID NO: 2164562 - RNA, 16 nt, Human
gccugccuccagggcu

SEQ ID NO: 2164563 - RNA, 16 nt, Human
gccugccgguaaacac

SEQ ID NO: 2164564 - RNA, 20 nt, Human
gccucuuggaccucugcucu

SEQ ID NO: 2164565 - RNA, 19 nt, Human
gccugcccaggccccugcc

SEQ ID NO: 2164566 - RNA, 20 nt, Human
gccugcccaggccccugcca

SEQ ID NO: 2164567 - RNA, 18 nt, Human
gccucuuggaaaaaguga

SEQ ID NO: 2164568 - RNA, 17 nt, Human
gccucuuggaccucugc

SEQ ID NO: 2164569 - RNA, 18 nt, Human
gccucuuggaccucugcu

SEQ ID NO: 2164570 - RNA, 19 nt, Human
gccucuuggaccucugcuc

SEQ ID NO: 2164571 - RNA, 22 nt, Human
gccuaccggcaauuuccggcca

SEQ ID NO: 2164572 - RNA, 21 nt, Human
gccuaccccgcagacaccuug

SEQ ID NO: 2164573 - RNA, 14 nt, Human
gccuaccccgcaga

SEQ ID NO: 2164574 - RNA, 17 nt, Human
gccuaccccgcagacac

SEQ ID NO: 2164575 - RNA, 12 nt, Human
gccuacucacga

SEQ ID NO: 2164576 - RNA, 17 nt, Human
gccuacuccaaaauguu

SEQ ID NO: 2164577 - RNA, 19 nt, Human
gccggccucucuggccucc

SEQ ID NO: 2164578 - RNA, 13 nt, Human
gccuaccugcucu

SEQ ID NO: 2164579 - RNA, 14 nt, Human
gccuaccugcucuc

SEQ ID NO: 2164580 - RNA, 20 nt, Human
gccggccucucuggccuccc

SEQ ID NO: 2164581 - RNA, 14 nt, Human
gccggcccuggggc

SEQ ID NO: 2164582 - RNA, 13 nt, Human
gccggcccugggg

SEQ ID NO: 2164583 - RNA, 12 nt, Human
gccggccucucu

SEQ ID NO: 2164584 - RNA, 13 nt, Human
gccggccucucug

SEQ ID NO: 2164585 - RNA, 20 nt, Human
gccggcccuggggcuaggcu

SEQ ID NO: 2164586 - RNA, 12 nt, Human
gccggcccuggg

SEQ ID NO: 2164587 - RNA, 13 nt, Human
gccggccaggugg

SEQ ID NO: 2164588 - RNA, 18 nt, Human
gccggccaggugggcggg

SEQ ID NO: 2164589 - RNA, 19 nt, Human
gccuacaugcuuugugaac

SEQ ID NO: 2164590 - RNA, 14 nt, Human
gccggccucucugg

SEQ ID NO: 2164591 - RNA, 15 nt, Human
gccggccucucuggc

SEQ ID NO: 2164592 - RNA, 16 nt, Human
gccggccucucuggcc

SEQ ID NO: 2164593 - RNA, 18 nt, Human
gccggccucucuggccuc

SEQ ID NO: 2164594 - RNA, 17 nt, Human
gccuacccacccccagg

SEQ ID NO: 2164595 - RNA, 16 nt, Human
gccuacccacccccag

SEQ ID NO: 2164596 - RNA, 14 nt, Human
gccgcccaaggccc

SEQ ID NO: 2164597 - RNA, 21 nt, Human
gccgccauugccaccaggaga

SEQ ID NO: 2164598 - RNA, 13 nt, Human
gccgccucccagc

SEQ ID NO: 2164599 - RNA, 12 nt, Human
gccgccucccag

SEQ ID NO: 2164600 - RNA, 17 nt, Human
gccgccucccagccugg

SEQ ID NO: 2164601 - RNA, 16 nt, Human
gccgccucccagccug

SEQ ID NO: 2164602 - RNA, 15 nt, Human
gccgccucccagccu

SEQ ID NO: 2164603 - RNA, 14 nt, Human
gccgccucccagcc

SEQ ID NO: 2164604 - RNA, 18 nt, Human
gccgccauugccaccagg

SEQ ID NO: 2164605 - RNA, 17 nt, Human
gccgccauugccaccag

SEQ ID NO: 2164606 - RNA, 16 nt, Human
gccgccauugccacca

SEQ ID NO: 2164607 - RNA, 16 nt, Human
gccgccaugcuccugg

SEQ ID NO: 2164608 - RNA, 18 nt, Human
gccgcauucccugaguca

SEQ ID NO: 2164609 - RNA, 16 nt, Human
gccgcauucccugagu

SEQ ID NO: 2164610 - RNA, 20 nt, Human
gcccuguugacacaggucuu

SEQ ID NO: 2164611 - RNA, 17 nt, Human
gcccuguuguguauaga

SEQ ID NO: 2164612 - RNA, 16 nt, Human
gcccuuacacuuacug

SEQ ID NO: 2164613 - RNA, 20 nt, Human
gcccuuacacuuacuguugu

SEQ ID NO: 2164614 - RNA, 15 nt, Human
gccgccaugcuccug

SEQ ID NO: 2164615 - RNA, 16 nt, Human
gcccuuaccugccagg

SEQ ID NO: 2164616 - RNA, 20 nt, Human
gcccuuaccugccaggaagc

SEQ ID NO: 2164617 - RNA, 18 nt, Human
gccgccugguacucaagc

SEQ ID NO: 2164618 - RNA, 23 nt, Human
gccgcuccugucugccagccagc

SEQ ID NO: 2164619 - RNA, 15 nt, Human
gccgcucggaggccc

SEQ ID NO: 2164620 - RNA, 16 nt, Human
gccgcucggaggcccc

SEQ ID NO: 2164621 - RNA, 17 nt, Human
gccgcucggaggcccca

SEQ ID NO: 2164622 - RNA, 18 nt, Human
gccgcucggaggccccaa

SEQ ID NO: 2164623 - RNA, 20 nt, Human
gccgcucggaggccccaaag

SEQ ID NO: 2164624 - RNA, 21 nt, Human
gccgcucggaggccccaaagg

SEQ ID NO: 2164625 - RNA, 22 nt, Human
gccgcucggaggccccaaagga

SEQ ID NO: 2164626 - RNA, 13 nt, Human
gccgccugguacu

SEQ ID NO: 2164627 - RNA, 15 nt, Human
gccgccugguacuca

SEQ ID NO: 2164628 - RNA, 23 nt, Human
gccgccugcccgucucucuccca

SEQ ID NO: 2164629 - RNA, 19 nt, Human
gccgccucccagccugggg

SEQ ID NO: 2164630 - RNA, 13 nt, Human
gccgccucgccca

SEQ ID NO: 2164631 - RNA, 15 nt, Human
gccgccucgcccacc

SEQ ID NO: 2164632 - RNA, 16 nt, Human
gccgccucgcccaccg

SEQ ID NO: 2164633 - RNA, 17 nt, Human
gccgccucgcccaccgc

SEQ ID NO: 2164634 - RNA, 17 nt, Human
gccgcuguucacccaca

SEQ ID NO: 2164635 - RNA, 16 nt, Human
gccgcuguucacccac

SEQ ID NO: 2164636 - RNA, 16 nt, Human
gccgcuuuucuccucu

SEQ ID NO: 2164637 - RNA, 14 nt, Human
gccggccagccccu

SEQ ID NO: 2164638 - RNA, 12 nt, Human
gccggccagccc

SEQ ID NO: 2164639 - RNA, 15 nt, Human
gccggcauggcuggg

SEQ ID NO: 2164640 - RNA, 15 nt, Human
gccgcuguucaccca

SEQ ID NO: 2164641 - RNA, 23 nt, Human
gccgcugugagccccugguccug

SEQ ID NO: 2164642 - RNA, 12 nt, Human
gccgcugugagc

SEQ ID NO: 2164643 - RNA, 17 nt, Human
gccgcugugagccccug

SEQ ID NO: 2164644 - RNA, 17 nt, Human
gccgcugccacccaccu

SEQ ID NO: 2164645 - RNA, 19 nt, Human
gccgcugcccggcgcccuc

SEQ ID NO: 2164646 - RNA, 12 nt, Human
gccgcugccacg

SEQ ID NO: 2164647 - RNA, 14 nt, Human
gccgcugccaccca

SEQ ID NO: 2164648 - RNA, 12 nt, Human
gccgcugccacc

SEQ ID NO: 2164649 - RNA, 16 nt, Human
gccgcugaguggcagg

SEQ ID NO: 2164650 - RNA, 17 nt, Human
gccgcugagcgaggaga

SEQ ID NO: 2164651 - RNA, 15 nt, Human
gccgcugagcgagga

SEQ ID NO: 2164652 - RNA, 14 nt, Human
gcccugccuccuuu

SEQ ID NO: 2164653 - RNA, 13 nt, Human
gcccugccucugu

SEQ ID NO: 2164654 - RNA, 15 nt, Human
gcccugccucuguuu

SEQ ID NO: 2164655 - RNA, 16 nt, Human
gcccugcugaguccca

SEQ ID NO: 2164656 - RNA, 11 nt, Human
gcccugccuga

SEQ ID NO: 2164657 - RNA, 12 nt, Human
gcccugccugag

SEQ ID NO: 2164658 - RNA, 13 nt, Human
gcccugccugagg

SEQ ID NO: 2164659 - RNA, 14 nt, Human
gcccugccugaggg

SEQ ID NO: 2164660 - RNA, 16 nt, Human
gcccugccuccuuugu

SEQ ID NO: 2164661 - RNA, 22 nt, Human
gcccugccuccuuugugaggaa

SEQ ID NO: 2164662 - RNA, 19 nt, Human
gcccuguugacacaggucu

SEQ ID NO: 2164663 - RNA, 21 nt, Human
gcccuguugacacaggucuuu

SEQ ID NO: 2164664 - RNA, 16 nt, Human
gcccuguugacacagg

SEQ ID NO: 2164665 - RNA, 20 nt, Human
gcccuguucagcuacuccca

SEQ ID NO: 2164666 - RNA, 22 nt, Human
gcccuguucucuaccaagcuau

SEQ ID NO: 2164667 - RNA, 22 nt, Human
gcccugcugcugacccagccug

SEQ ID NO: 2164668 - RNA, 17 nt, Human
gcccuguucagcuacuc

SEQ ID NO: 2164669 - RNA, 17 nt, Human
gcccuguuaaaagauga

SEQ ID NO: 2164670 - RNA, 14 nt, Human
gcccuguuaaaaga

SEQ ID NO: 2164671 - RNA, 23 nt, Human
gcccugcugccgccucccagccu

SEQ ID NO: 2164672 - RNA, 22 nt, Human
gcccugcugccgccucccagcc

SEQ ID NO: 2164673 - RNA, 21 nt, Human
gcccugcugccgccucccagc

SEQ ID NO: 2164674 - RNA, 13 nt, Human
gcccuguuaaaag

SEQ ID NO: 2164675 - RNA, 22 nt, Human
gcccugcugagucccaggcuga

SEQ ID NO: 2164676 - RNA, 21 nt, Human
gcccugcugagucccaggcug

SEQ ID NO: 2164677 - RNA, 23 nt, Human
gcccugcugagucccaggcugag

SEQ ID NO: 2164678 - RNA, 15 nt, Human
gcccugccugagggc

SEQ ID NO: 2164679 - RNA, 16 nt, Human
gcccugccugagggcc

SEQ ID NO: 2164680 - RNA, 22 nt, Human
gcccauggcccucccaguaccu

SEQ ID NO: 2164681 - RNA, 15 nt, Human
gcccaugggcacugc

SEQ ID NO: 2164682 - RNA, 16 nt, Human
gcccaugggcacugcu

SEQ ID NO: 2164683 - RNA, 17 nt, Human
gcccaugggcacugcug

SEQ ID NO: 2164684 - RNA, 20 nt, Human
gcccaugggagcugguuaga

SEQ ID NO: 2164685 - RNA, 21 nt, Human
gcccaugguugagaaaugaau

SEQ ID NO: 2164686 - RNA, 22 nt, Human
gcccaugggcacugcugggugg

SEQ ID NO: 2164687 - RNA, 23 nt, Human
gcccaugggcacugcuggguggc

SEQ ID NO: 2164688 - RNA, 18 nt, Human
gcccaugggcacugcugg

SEQ ID NO: 2164689 - RNA, 19 nt, Human
gcccaugggcacugcuggg

SEQ ID NO: 2164690 - RNA, 20 nt, Human
gcccaugggcacugcugggu

SEQ ID NO: 2164691 - RNA, 21 nt, Human
gcccaugggcacugcugggug

SEQ ID NO: 2164692 - RNA, 19 nt, Human
gcccaugucgcgcucagca

SEQ ID NO: 2164693 - RNA, 20 nt, Human
gcccaugucgcgcucagcau

SEQ ID NO: 2164694 - RNA, 21 nt, Human
gcccaugucgcgcucagcaug

SEQ ID NO: 2164695 - RNA, 16 nt, Human
gcccacugcccacccc

SEQ ID NO: 2164696 - RNA, 19 nt, Human
gcccacugcccacccccuc

SEQ ID NO: 2164697 - RNA, 18 nt, Human
gcccacugcccacccccu

SEQ ID NO: 2164698 - RNA, 18 nt, Human
gcccacuauggucaucuu

SEQ ID NO: 2164699 - RNA, 23 nt, Human
gcccacuagacccacuggacuca

SEQ ID NO: 2164700 - RNA, 13 nt, Human
gcccacucccugc

SEQ ID NO: 2164701 - RNA, 23 nt, Human
gcccacguccugucagugccgcc

SEQ ID NO: 2164702 - RNA, 15 nt, Human
gcccacguccuguca

SEQ ID NO: 2164703 - RNA, 16 nt, Human
gcccacguccugucag

SEQ ID NO: 2164704 - RNA, 17 nt, Human
gcccacuagacccacug

SEQ ID NO: 2164705 - RNA, 15 nt, Human
gcccacguagggcgg

SEQ ID NO: 2164706 - RNA, 16 nt, Human
gcccacguagggcggc

SEQ ID NO: 2164707 - RNA, 17 nt, Human
gcccacguagggcggca

SEQ ID NO: 2164708 - RNA, 13 nt, Human
gcccacguccugu

SEQ ID NO: 2164709 - RNA, 14 nt, Human
gcccacguccuguc

SEQ ID NO: 2164710 - RNA, 17 nt, Human
gcccacucugcucgccu

SEQ ID NO: 2164711 - RNA, 19 nt, Human
gcccacucccugcaaccug

SEQ ID NO: 2164712 - RNA, 14 nt, Human
gcccacucccugca

SEQ ID NO: 2164713 - RNA, 15 nt, Human
gcccacucccugcaa

SEQ ID NO: 2164714 - RNA, 23 nt, Human
gcccuaaugcgcaggcuggcccu

SEQ ID NO: 2164715 - RNA, 15 nt, Human
gcccuaaaagcacac

SEQ ID NO: 2164716 - RNA, 23 nt, Human
gcccguugucucccuggcccuca

SEQ ID NO: 2164717 - RNA, 19 nt, Human
gcccuaaaauuccacugcg

SEQ ID NO: 2164718 - RNA, 16 nt, Human
gcccuacagaggucuc

SEQ ID NO: 2164719 - RNA, 15 nt, Human
gcccuacaccuugag

SEQ ID NO: 2164720 - RNA, 13 nt, Human
gcccuaccagcgc

SEQ ID NO: 2164721 - RNA, 20 nt, Human
gcccuacagaggucucugcc

SEQ ID NO: 2164722 - RNA, 21 nt, Human
gcccuacagaggucucugccg

SEQ ID NO: 2164723 - RNA, 14 nt, Human
gcccuacuauucag

SEQ ID NO: 2164724 - RNA, 20 nt, Human
gcccuaccagcgcccgcugg

SEQ ID NO: 2164725 - RNA, 21 nt, Human
gcccuaccagcgcccgcuggg

SEQ ID NO: 2164726 - RNA, 22 nt, Human
gcccuaccagcgcccgcugggc

SEQ ID NO: 2164727 - RNA, 23 nt, Human
gcccuaccagcgcccgcugggcu

SEQ ID NO: 2164728 - RNA, 21 nt, Human
gcccuacuucuuugcuuugcc

SEQ ID NO: 2164729 - RNA, 17 nt, Human
gcccuagagcacacugu

SEQ ID NO: 2164730 - RNA, 13 nt, Human
gcccuagagcaca

SEQ ID NO: 2164731 - RNA, 19 nt, Human
gcccuagagcacacuguag

SEQ ID NO: 2164732 - RNA, 18 nt, Human
gcccguguggccccuuca

SEQ ID NO: 2164733 - RNA, 17 nt, Human
gcccguguggccccuuc

SEQ ID NO: 2164734 - RNA, 16 nt, Human
gcccguguggccccuu

SEQ ID NO: 2164735 - RNA, 15 nt, Human
gcccguguggccccu

SEQ ID NO: 2164736 - RNA, 13 nt, Human
gcccguguggccc

SEQ ID NO: 2164737 - RNA, 20 nt, Human
gcccgugacauccccacccu

SEQ ID NO: 2164738 - RNA, 22 nt, Human
gcccuaaaguguauuuuuuuac

SEQ ID NO: 2164739 - RNA, 17 nt, Human
gcccguugaggaugagg

SEQ ID NO: 2164740 - RNA, 16 nt, Human
gcccguugucucccug

SEQ ID NO: 2164741 - RNA, 17 nt, Human
gcccguugucucccugg

SEQ ID NO: 2164742 - RNA, 18 nt, Human
gcccguugucucccuggc

SEQ ID NO: 2164743 - RNA, 19 nt, Human
gcccguugucucccuggcc

SEQ ID NO: 2164744 - RNA, 20 nt, Human
gcccguugucucccuggccc

SEQ ID NO: 2164745 - RNA, 21 nt, Human
gcccguugucucccuggcccu

SEQ ID NO: 2164746 - RNA, 22 nt, Human
gcccguugucucccuggcccuc

SEQ ID NO: 2164747 - RNA, 15 nt, Human
gccccugcccggcug

SEQ ID NO: 2164748 - RNA, 16 nt, Human
gccccuggaugcagcc

SEQ ID NO: 2164749 - RNA, 18 nt, Human
gccccuggaugcagccuc

SEQ ID NO: 2164750 - RNA, 22 nt, Human
gccccuggaugcagccucacag

SEQ ID NO: 2164751 - RNA, 13 nt, Human
gccccugcccggc

SEQ ID NO: 2164752 - RNA, 14 nt, Human
gccccugcccggcu

SEQ ID NO: 2164753 - RNA, 22 nt, Human
gccccugccccgucaccaucuc

SEQ ID NO: 2164754 - RNA, 20 nt, Human
gccccugccccgucaccauc

SEQ ID NO: 2164755 - RNA, 16 nt, Human
gccccugccccgucac

SEQ ID NO: 2164756 - RNA, 15 nt, Human
gccccugccccguca

SEQ ID NO: 2164757 - RNA, 14 nt, Human
gccccugccccguc

SEQ ID NO: 2164758 - RNA, 17 nt, Human
gcccccucgugccaguc

SEQ ID NO: 2164759 - RNA, 12 nt, Human
gccccugccccg

SEQ ID NO: 2164760 - RNA, 14 nt, Human
gcccccucugcccu

SEQ ID NO: 2164761 - RNA, 12 nt, Human
gcccccucgugc

SEQ ID NO: 2164762 - RNA, 14 nt, Human
gcccccucgugcca

SEQ ID NO: 2164763 - RNA, 16 nt, Human
gcccccucgugccagu

SEQ ID NO: 2164764 - RNA, 13 nt, Human
gcccccaucucau

SEQ ID NO: 2164765 - RNA, 21 nt, Human
gcccccaguccccaccccugc

SEQ ID NO: 2164766 - RNA, 22 nt, Human
gcccccaguccccaccccugcc

SEQ ID NO: 2164767 - RNA, 18 nt, Human
gcccccuccgcccugcca

SEQ ID NO: 2164768 - RNA, 20 nt, Human
gcccccuccgcccugccacu

SEQ ID NO: 2164769 - RNA, 22 nt, Human
gcccccuccgcccugccacuca

SEQ ID NO: 2164770 - RNA, 16 nt, Human
gcccccuccucuagcu

SEQ ID NO: 2164771 - RNA, 19 nt, Human
gcccccuccucuagcugug

SEQ ID NO: 2164772 - RNA, 20 nt, Human
gcccccuccucuagcugugg

SEQ ID NO: 2164773 - RNA, 21 nt, Human
gcccccuccucuagcuguggg

SEQ ID NO: 2164774 - RNA, 15 nt, Human
gcccccuccucuccc

SEQ ID NO: 2164775 - RNA, 16 nt, Human
gcccccuccucuccca

SEQ ID NO: 2164776 - RNA, 17 nt, Human
gcccccuccucucccau

SEQ ID NO: 2164777 - RNA, 21 nt, Human
gcccccuccucucccaucccc

SEQ ID NO: 2164778 - RNA, 19 nt, Human
gcccccuccucucccaucc

SEQ ID NO: 2164779 - RNA, 17 nt, Human
gcccccaggcugcugga

SEQ ID NO: 2164780 - RNA, 16 nt, Human
gcccccaggcugcugg

SEQ ID NO: 2164781 - RNA, 20 nt, Human
gcccccagggcacuucacag

SEQ ID NO: 2164782 - RNA, 22 nt, Human
gcccccagggcacuucacagag

SEQ ID NO: 2164783 - RNA, 23 nt, Human
gccccaaaaccacagcccuguca

SEQ ID NO: 2164784 - RNA, 17 nt, Human
gcccccaggacugggcc

SEQ ID NO: 2164785 - RNA, 18 nt, Human
gcccccaggacugggcca

SEQ ID NO: 2164786 - RNA, 19 nt, Human
gccccaaaacucuccucug

SEQ ID NO: 2164787 - RNA, 16 nt, Human
gcccccaggugccagu

SEQ ID NO: 2164788 - RNA, 15 nt, Human
gcccccaguccccac

SEQ ID NO: 2164789 - RNA, 17 nt, Human
gcccccaguccccaccc

SEQ ID NO: 2164790 - RNA, 18 nt, Human
gcccccaguccccacccc

SEQ ID NO: 2164791 - RNA, 20 nt, Human
gcccccaguccccaccccug

SEQ ID NO: 2164792 - RNA, 22 nt, Human
gccccaaaaccacagcccuguc

SEQ ID NO: 2164793 - RNA, 21 nt, Human
gccccaaaaccacagcccugu

SEQ ID NO: 2164794 - RNA, 20 nt, Human
gccccaaaaccacagcccug

SEQ ID NO: 2164795 - RNA, 19 nt, Human
gccccaaaaccacagcccu

SEQ ID NO: 2164796 - RNA, 16 nt, Human
gccccaaaaccacagc

SEQ ID NO: 2164797 - RNA, 15 nt, Human
gccccaaaaccacag

SEQ ID NO: 2164798 - RNA, 18 nt, Human
gccccaaaacucuccucu

SEQ ID NO: 2164799 - RNA, 15 nt, Human
gcccaugugugagug

SEQ ID NO: 2164800 - RNA, 14 nt, Human
gcccaugugugagu

SEQ ID NO: 2164801 - RNA, 13 nt, Human
gcccaugugugag

SEQ ID NO: 2164802 - RNA, 20 nt, Human
gcccaugugugagugugugc

SEQ ID NO: 2164803 - RNA, 17 nt, Human
gcccauguguucccucu

SEQ ID NO: 2164804 - RNA, 22 nt, Human
gcacuuggagccaaggguucag

SEQ ID NO: 2164805 - RNA, 16 nt, Human
gcacuuggagaggcug

SEQ ID NO: 2164806 - RNA, 14 nt, Human
gcacuuggccucug

SEQ ID NO: 2164807 - RNA, 15 nt, Human
gcacuuggcugcaua

SEQ ID NO: 2164808 - RNA, 16 nt, Human
gcacuuggagccaagg

SEQ ID NO: 2164809 - RNA, 13 nt, Human
gcacuuggagcca

SEQ ID NO: 2164810 - RNA, 18 nt, Human
gcacuuggagacuuguau

SEQ ID NO: 2164811 - RNA, 20 nt, Human
gccacaugagucccaguggg

SEQ ID NO: 2164812 - RNA, 21 nt, Human
gccacauggcuuccuccugcg

SEQ ID NO: 2164813 - RNA, 22 nt, Human
gccacauggcuuccuccugcgc

SEQ ID NO: 2164814 - RNA, 16 nt, Human
gccacauuccugaugc

SEQ ID NO: 2164815 - RNA, 20 nt, Human
gccacauuccugaugcuucu

SEQ ID NO: 2164816 - RNA, 17 nt, Human
gccacauggggcugggc

SEQ ID NO: 2164817 - RNA, 14 nt, Human
gccacauuuggaau

SEQ ID NO: 2164818 - RNA, 15 nt, Human
gccacaugggaggcu

SEQ ID NO: 2164819 - RNA, 20 nt, Human
gccacauggggcugggcagc

SEQ ID NO: 2164820 - RNA, 19 nt, Human
gccacauuuggaauacuuu

SEQ ID NO: 2164821 - RNA, 16 nt, Human
gccacauugggcagcg

SEQ ID NO: 2164822 - RNA, 22 nt, Human
gccacauuuggaauacuuuuug

SEQ ID NO: 2164823 - RNA, 12 nt, Human
gccaccaacucu

SEQ ID NO: 2164824 - RNA, 22 nt, Human
gccaccaacucuugcaggucuc

SEQ ID NO: 2164825 - RNA, 19 nt, Human
gccaccaagagggacgccu

SEQ ID NO: 2164826 - RNA, 14 nt, Human
gccaccaagaggga

SEQ ID NO: 2164827 - RNA, 22 nt, Human
gccaccaacauacucccaucug

SEQ ID NO: 2164828 - RNA, 16 nt, Human
gccaccaccccccacu

SEQ ID NO: 2164829 - RNA, 22 nt, Human
gccaccaccccccacucugugc

SEQ ID NO: 2164830 - RNA, 14 nt, Human
gccaccacgcccgg

SEQ ID NO: 2164831 - RNA, 13 nt, Human
gccaccacccccc

SEQ ID NO: 2164832 - RNA, 22 nt, Human
gccaccaagagggacgccuggg

SEQ ID NO: 2164833 - RNA, 13 nt, Human
gccaccacgcccg

SEQ ID NO: 2164834 - RNA, 17 nt, Human
gccaccaaaggccaggg

SEQ ID NO: 2164835 - RNA, 16 nt, Human
gccaccaaaggccagg

SEQ ID NO: 2164836 - RNA, 19 nt, Human
gccaccaacauacucccau

SEQ ID NO: 2164837 - RNA, 20 nt, Human
gccaccaacauacucccauc

SEQ ID NO: 2164838 - RNA, 21 nt, Human
gccaccaacauacucccaucu

SEQ ID NO: 2164839 - RNA, 23 nt, Human
gccaccauauucagugcuguggc

SEQ ID NO: 2164840 - RNA, 16 nt, Human
gccaccagucacuguc

SEQ ID NO: 2164841 - RNA, 18 nt, Human
gccaccauccuauugcaa

SEQ ID NO: 2164842 - RNA, 22 nt, Human
gccaccauauucagugcugugg

SEQ ID NO: 2164843 - RNA, 20 nt, Human
gccaccaggcuggcgcagcc

SEQ ID NO: 2164844 - RNA, 18 nt, Human
gccaccaggcuggcgcag

SEQ ID NO: 2164845 - RNA, 19 nt, Human
gccaccaggcuggcgcagc

SEQ ID NO: 2164846 - RNA, 18 nt, Human
gccaccauggccagccaa

SEQ ID NO: 2164847 - RNA, 17 nt, Human
gccaccauggccagcca

SEQ ID NO: 2164848 - RNA, 16 nt, Human
gccaccauggccagcc

SEQ ID NO: 2164849 - RNA, 14 nt, Human
gccaccauggccag

SEQ ID NO: 2164850 - RNA, 22 nt, Human
gccaccaugcccagcucagagg

SEQ ID NO: 2164851 - RNA, 16 nt, Human
gccaccaugcccagcu

SEQ ID NO: 2164852 - RNA, 12 nt, Human
gccaccauccug

SEQ ID NO: 2164853 - RNA, 17 nt, Human
gccaccauccugcagcc

SEQ ID NO: 2164854 - RNA, 14 nt, Human
gccaccauccugcu

SEQ ID NO: 2164855 - RNA, 15 nt, Human
gccaccauccugcug

SEQ ID NO: 2164856 - RNA, 15 nt, Human
gccaccacguccagc

SEQ ID NO: 2164857 - RNA, 14 nt, Human
gccaccacguccag

SEQ ID NO: 2164858 - RNA, 16 nt, Human
gccaccacguccagcu

SEQ ID NO: 2164859 - RNA, 12 nt, Human
gccaccagagac

SEQ ID NO: 2164860 - RNA, 10 nt, Human
gccaccagcg

SEQ ID NO: 2164861 - RNA, 19 nt, Human
gccaccagagaccguccuc

SEQ ID NO: 2164862 - RNA, 21 nt, Human
gccaccagagaccguccucac

SEQ ID NO: 2164863 - RNA, 22 nt, Human
gccaccagagaccguccucacc

SEQ ID NO: 2164864 - RNA, 23 nt, Human
gccaccagagaccguccucaccc

SEQ ID NO: 2164865 - RNA, 12 nt, Human
gccaccaggcca

SEQ ID NO: 2164866 - RNA, 12 nt, Human
gccaccaggaug

SEQ ID NO: 2164867 - RNA, 15 nt, Human
gccaccaggccaccu

SEQ ID NO: 2164868 - RNA, 18 nt, Human
gccaccaggccaccuccc

SEQ ID NO: 2164869 - RNA, 20 nt, Human
gccaccaggccaccucccca

SEQ ID NO: 2164870 - RNA, 17 nt, Human
gccaccaggauggcccu

SEQ ID NO: 2164871 - RNA, 12 nt, Human
gccaccaggcug

SEQ ID NO: 2164872 - RNA, 13 nt, Human
gccaccaggcugg

SEQ ID NO: 2164873 - RNA, 14 nt, Human
gccaccaggcuggc

SEQ ID NO: 2164874 - RNA, 16 nt, Human
gccaccaggcuggcgc

SEQ ID NO: 2164875 - RNA, 17 nt, Human
gccaccaggcuggcgca

SEQ ID NO: 2164876 - RNA, 12 nt, Human
gccacccugggc

SEQ ID NO: 2164877 - RNA, 13 nt, Human
gccacccugggcu

SEQ ID NO: 2164878 - RNA, 14 nt, Human
gccacccugggcuc

SEQ ID NO: 2164879 - RNA, 16 nt, Human
gccacccucaugcugu

SEQ ID NO: 2164880 - RNA, 15 nt, Human
gccacccucaugcug

SEQ ID NO: 2164881 - RNA, 16 nt, Human
gccaccccuccuuccu

SEQ ID NO: 2164882 - RNA, 18 nt, Human
gccacccguucugcuggc

SEQ ID NO: 2164883 - RNA, 21 nt, Human
gccacccguucugcuggccug

SEQ ID NO: 2164884 - RNA, 22 nt, Human
gccacccguucugcuggccugg

SEQ ID NO: 2164885 - RNA, 21 nt, Human
gccaccccgggcucucugcug

SEQ ID NO: 2164886 - RNA, 15 nt, Human
gccaccccuccuucc

SEQ ID NO: 2164887 - RNA, 13 nt, Human
gccacccucaugc

SEQ ID NO: 2164888 - RNA, 18 nt, Human
gccacccuaccuguucag

SEQ ID NO: 2164889 - RNA, 23 nt, Human
gccacccguucugcuggccugga

SEQ ID NO: 2164890 - RNA, 13 nt, Human
gccacccuaccug

SEQ ID NO: 2164891 - RNA, 19 nt, Human
gccacccuaccuguucagu

SEQ ID NO: 2164892 - RNA, 19 nt, Human
gccaccccgggcucucugc

SEQ ID NO: 2164893 - RNA, 18 nt, Human
gccaccccgggcucucug

SEQ ID NO: 2164894 - RNA, 20 nt, Human
gccaccccacccucccugga

SEQ ID NO: 2164895 - RNA, 21 nt, Human
gccaccccacccucccuggag

SEQ ID NO: 2164896 - RNA, 22 nt, Human
gccaccccacccucccuggagu

SEQ ID NO: 2164897 - RNA, 22 nt, Human
gccaccauuccuggaaaccaca

SEQ ID NO: 2164898 - RNA, 14 nt, Human
gccaccauuccugg

SEQ ID NO: 2164899 - RNA, 16 nt, Human
gccaccauuccuggaa

SEQ ID NO: 2164900 - RNA, 21 nt, Human
gccacccaccucccugccucc

SEQ ID NO: 2164901 - RNA, 18 nt, Human
gccacccaccucccugcc

SEQ ID NO: 2164902 - RNA, 17 nt, Human
gccacccaccucccugc

SEQ ID NO: 2164903 - RNA, 16 nt, Human
gccacccaccucccug

SEQ ID NO: 2164904 - RNA, 15 nt, Human
gccaccccacccucc

SEQ ID NO: 2164905 - RNA, 18 nt, Human
gccaccccacccucccug

SEQ ID NO: 2164906 - RNA, 19 nt, Human
gccacugcauaccaaccug

SEQ ID NO: 2164907 - RNA, 22 nt, Human
gccaccgccgacuuuguacccc

SEQ ID NO: 2164908 - RNA, 15 nt, Human
gccacugcacuccgg

SEQ ID NO: 2164909 - RNA, 18 nt, Human
gccacugcccgagcuggu

SEQ ID NO: 2164910 - RNA, 17 nt, Human
gccacugcccgagcugg

SEQ ID NO: 2164911 - RNA, 16 nt, Human
gccacugcccgagcug

SEQ ID NO: 2164912 - RNA, 22 nt, Human
gccacugcacuccagccugggc

SEQ ID NO: 2164913 - RNA, 21 nt, Human
gccacugcacuccagccuggg

SEQ ID NO: 2164914 - RNA, 20 nt, Human
gccacugcacuccagccugg

SEQ ID NO: 2164915 - RNA, 19 nt, Human
gccacugcacuccagccug

SEQ ID NO: 2164916 - RNA, 21 nt, Human
gccacugcacuauagccuagg

SEQ ID NO: 2164917 - RNA, 18 nt, Human
gccacugcacuccagccu

SEQ ID NO: 2164918 - RNA, 13 nt, Human
gccacccugggga

SEQ ID NO: 2164919 - RNA, 19 nt, Human
gccacccuggggagaaagu

SEQ ID NO: 2164920 - RNA, 23 nt, Human
gccacugcaccgggccacagaga

SEQ ID NO: 2164921 - RNA, 16 nt, Human
gccaccgccuccuaca

SEQ ID NO: 2164922 - RNA, 17 nt, Human
gccacccugggcucugu

SEQ ID NO: 2164923 - RNA, 18 nt, Human
gccacccugggcucugug

SEQ ID NO: 2164924 - RNA, 19 nt, Human
gccacccugggcucugugg

SEQ ID NO: 2164925 - RNA, 21 nt, Human
gccacccugggcucugugggc

SEQ ID NO: 2164926 - RNA, 10 nt, Human
gccagaaaaa

SEQ ID NO: 2164927 - RNA, 20 nt, Human
gccagaaaaacguguugccu

SEQ ID NO: 2164928 - RNA, 18 nt, Human
gccagaacaguuuguaca

SEQ ID NO: 2164929 - RNA, 16 nt, Human
gccagaacaguuugua

SEQ ID NO: 2164930 - RNA, 12 nt, Human
gccagaaauaaa

SEQ ID NO: 2164931 - RNA, 23 nt, Human
gccacuuuugacuagggauucag

SEQ ID NO: 2164932 - RNA, 23 nt, Human
gccacuuugguacauggccagug

SEQ ID NO: 2164933 - RNA, 22 nt, Human
gccacuuugguacauggccagu

SEQ ID NO: 2164934 - RNA, 21 nt, Human
gccacuuugguacauggccag

SEQ ID NO: 2164935 - RNA, 19 nt, Human
gccacuuugcaaaggagcu

SEQ ID NO: 2164936 - RNA, 13 nt, Human
gccacuucccagg

SEQ ID NO: 2164937 - RNA, 21 nt, Human
gccacuuaccuucaauaaagu

SEQ ID NO: 2164938 - RNA, 19 nt, Human
gccacuuaccuucaauaaa

SEQ ID NO: 2164939 - RNA, 14 nt, Human
gccacuuaccuuca

SEQ ID NO: 2164940 - RNA, 18 nt, Human
gccacuuaaaauguucac

SEQ ID NO: 2164941 - RNA, 23 nt, Human
gccacuuaccuucaauaaaguau

SEQ ID NO: 2164942 - RNA, 22 nt, Human
gccacuuaccuucaauaaagua

SEQ ID NO: 2164943 - RNA, 15 nt, Human
gccacuucccaggua

SEQ ID NO: 2164944 - RNA, 14 nt, Human
gccacuucugggug

SEQ ID NO: 2164945 - RNA, 20 nt, Human
gccacuucuggguggggcag

SEQ ID NO: 2164946 - RNA, 21 nt, Human
gccacuugaugacccccaacc

SEQ ID NO: 2164947 - RNA, 23 nt, Human
gccacuucuggguggggcagugg

SEQ ID NO: 2164948 - RNA, 19 nt, Human
gccacugugaagagaacca

SEQ ID NO: 2164949 - RNA, 18 nt, Human
gccacugugaagagaacc

SEQ ID NO: 2164950 - RNA, 17 nt, Human
gccacuggccaucucca

SEQ ID NO: 2164951 - RNA, 21 nt, Human
gccacugcccgagcuggugca

SEQ ID NO: 2164952 - RNA, 19 nt, Human
gccacugcccgagcuggug

SEQ ID NO: 2164953 - RNA, 18 nt, Human
gccacugccuucgcuucu

SEQ ID NO: 2164954 - RNA, 23 nt, Human
gccacugccuucgcuucuugccu

SEQ ID NO: 2164955 - RNA, 12 nt, Human
gccacuggccau

SEQ ID NO: 2164956 - RNA, 16 nt, Human
gccacuggccaucucc

SEQ ID NO: 2164957 - RNA, 22 nt, Human
gccacugccuucgcuucuugcc

SEQ ID NO: 2164958 - RNA, 13 nt, Human
gccacugcugcuu

SEQ ID NO: 2164959 - RNA, 12 nt, Human
gccacugccucu

SEQ ID NO: 2164960 - RNA, 13 nt, Human
gccacugccucuu

SEQ ID NO: 2164961 - RNA, 16 nt, Human
gccacugccucuuccu

SEQ ID NO: 2164962 - RNA, 17 nt, Human
gccacugccucuuccuc

SEQ ID NO: 2164963 - RNA, 20 nt, Human
gccauguuccaauaaacagg

SEQ ID NO: 2164964 - RNA, 19 nt, Human
gccauguuccaauaaacag

SEQ ID NO: 2164965 - RNA, 22 nt, Human
gccauucacuucauaauccagu

SEQ ID NO: 2164966 - RNA, 21 nt, Human
gccauucacuucauaauccag

SEQ ID NO: 2164967 - RNA, 14 nt, Human
gccauuccaacagc

SEQ ID NO: 2164968 - RNA, 18 nt, Human
gccauucacugcccccag

SEQ ID NO: 2164969 - RNA, 20 nt, Human
gccauuccugguacccagcc

SEQ ID NO: 2164970 - RNA, 22 nt, Human
gccauuccugguacccagccau

SEQ ID NO: 2164971 - RNA, 16 nt, Human
gccauucucaagcccu

SEQ ID NO: 2164972 - RNA, 18 nt, Human
gccauucucaagcccugc

SEQ ID NO: 2164973 - RNA, 18 nt, Human
gccauuccccgucucugg

SEQ ID NO: 2164974 - RNA, 17 nt, Human
gccauuccccgucucug

SEQ ID NO: 2164975 - RNA, 19 nt, Human
gccauguuggccaggcugg

SEQ ID NO: 2164976 - RNA, 20 nt, Human
gccauguuggccaggcuggu

SEQ ID NO: 2164977 - RNA, 22 nt, Human
gccauguuggccaggcuggucu

SEQ ID NO: 2164978 - RNA, 24 nt, Human
gccauguuggccaggcuggucuca

SEQ ID NO: 2164979 - RNA, 18 nt, Human
gcccaccuuggcucaagu

SEQ ID NO: 2164980 - RNA, 17 nt, Human
gccauucuccacagcaa

SEQ ID NO: 2164981 - RNA, 13 nt, Human
gcccacgccccca

SEQ ID NO: 2164982 - RNA, 14 nt, Human
gcccacgcccccac

SEQ ID NO: 2164983 - RNA, 15 nt, Human
gcccacgcuggagug

SEQ ID NO: 2164984 - RNA, 17 nt, Human
gccauucugacucauau

SEQ ID NO: 2164985 - RNA, 16 nt, Human
gcccacgcuggagugc

SEQ ID NO: 2164986 - RNA, 17 nt, Human
gcccacgcuggagugca

SEQ ID NO: 2164987 - RNA, 19 nt, Human
gccauauucuguuggccag

SEQ ID NO: 2164988 - RNA, 20 nt, Human
gccauauucuguuggccagu

SEQ ID NO: 2164989 - RNA, 15 nt, Human
gccauguagaagcug

SEQ ID NO: 2164990 - RNA, 16 nt, Human
gccauguagaagcugc

SEQ ID NO: 2164991 - RNA, 18 nt, Human
gccauguagaagcugcau

SEQ ID NO: 2164992 - RNA, 21 nt, Human
gccauauugcacaugucuuaa

SEQ ID NO: 2164993 - RNA, 22 nt, Human
gccauauugcacaugucuuaau

SEQ ID NO: 2164994 - RNA, 20 nt, Human
gccaugguacccccuucugg

SEQ ID NO: 2164995 - RNA, 21 nt, Human
gccaugguacccccuucuggg

SEQ ID NO: 2164996 - RNA, 15 nt, Human
gccauguuggccagg

SEQ ID NO: 2164997 - RNA, 16 nt, Human
gccauguuggccaggc

SEQ ID NO: 2164998 - RNA, 17 nt, Human
gccauguuggccaggcu

SEQ ID NO: 2164999 - RNA, 18 nt, Human
gccauguuggccaggcug

SEQ ID NO: 2165000 - RNA, 17 nt, Human
gccaugugaagagggag

SEQ ID NO: 2165001 - RNA, 15 nt, Human
gccaugugaagaggg

SEQ ID NO: 2165002 - RNA, 14 nt, Human
gccauguuggccag

SEQ ID NO: 2165003 - RNA, 22 nt, Human
gccaugucugggaacagggacg

SEQ ID NO: 2165004 - RNA, 21 nt, Human
gccaggccugggucugugucu

SEQ ID NO: 2165005 - RNA, 14 nt, Human
gccaggccuggguc

SEQ ID NO: 2165006 - RNA, 13 nt, Human
gccaggccgggcc

SEQ ID NO: 2165007 - RNA, 17 nt, Human
gccaggccucuuggcag

SEQ ID NO: 2165008 - RNA, 21 nt, Human
gccaggccucuuggcagucac

SEQ ID NO: 2165009 - RNA, 22 nt, Human
gccaggagcucuucaggccucc

SEQ ID NO: 2165010 - RNA, 13 nt, Human
gccaggagcuggg

SEQ ID NO: 2165011 - RNA, 22 nt, Human
gccaggagcugggcagaaggcc

SEQ ID NO: 2165012 - RNA, 23 nt, Human
gccaggagcugggcagaaggcca

SEQ ID NO: 2165013 - RNA, 16 nt, Human
gccaggaggccaggcu

SEQ ID NO: 2165014 - RNA, 20 nt, Human
gccaggagcucuucaggccu

SEQ ID NO: 2165015 - RNA, 14 nt, Human
gccagccagcagcc

SEQ ID NO: 2165016 - RNA, 13 nt, Human
gccagccagcagc

SEQ ID NO: 2165017 - RNA, 12 nt, Human
gccagccagcag

SEQ ID NO: 2165018 - RNA, 19 nt, Human
gccaggaguuugagaccag

SEQ ID NO: 2165019 - RNA, 17 nt, Human
gccaggaucauggugua

SEQ ID NO: 2165020 - RNA, 19 nt, Human
gccaggaucaugguguaau

SEQ ID NO: 2165021 - RNA, 23 nt, Human
gccaggccacaagacccuugugg

SEQ ID NO: 2165022 - RNA, 12 nt, Human
gccaggccagag

SEQ ID NO: 2165023 - RNA, 15 nt, Human
gccaggccaccagga

SEQ ID NO: 2165024 - RNA, 16 nt, Human
gccaggccaccaggau

SEQ ID NO: 2165025 - RNA, 19 nt, Human
gccaggccaccaggauggc

SEQ ID NO: 2165026 - RNA, 20 nt, Human
gccaggauggaacacggcca

SEQ ID NO: 2165027 - RNA, 22 nt, Human
gccaggaucaugguguaauaag

SEQ ID NO: 2165028 - RNA, 24 nt, Human
gccaggaucaugguguaauaagac

SEQ ID NO: 2165029 - RNA, 13 nt, Human
gccaggccagagg

SEQ ID NO: 2165030 - RNA, 15 nt, Human
gccaggcccucugcc

SEQ ID NO: 2165031 - RNA, 19 nt, Human
gccaggccacuggccccug

SEQ ID NO: 2165032 - RNA, 16 nt, Human
gccaggcccucugccc

SEQ ID NO: 2165033 - RNA, 17 nt, Human
gccaggcccucugccca

SEQ ID NO: 2165034 - RNA, 21 nt, Human
gccaggcccucugcccacucc

SEQ ID NO: 2165035 - RNA, 23 nt, Human
gccaggccggcgagcccugugga

SEQ ID NO: 2165036 - RNA, 20 nt, Human
gccaggccggcgagcccugu

SEQ ID NO: 2165037 - RNA, 19 nt, Human
gccaggccggcgagcccug

SEQ ID NO: 2165038 - RNA, 20 nt, Human
gccaggccaccuccagaaac

SEQ ID NO: 2165039 - RNA, 19 nt, Human
gccaggcccucugcccacu

SEQ ID NO: 2165040 - RNA, 20 nt, Human
gccaggcccucugcccacuc

SEQ ID NO: 2165041 - RNA, 21 nt, Human
gccagaagcugagcaccaggg

SEQ ID NO: 2165042 - RNA, 18 nt, Human
gccagaagggggccauga

SEQ ID NO: 2165043 - RNA, 19 nt, Human
gccagaagauccccucagg

SEQ ID NO: 2165044 - RNA, 12 nt, Human
gccagaagcuga

SEQ ID NO: 2165045 - RNA, 17 nt, Human
gccagaaccuggagggc

SEQ ID NO: 2165046 - RNA, 18 nt, Human
gccagaacguggcucugc

SEQ ID NO: 2165047 - RNA, 20 nt, Human
gccagaacguggcucugcug

SEQ ID NO: 2165048 - RNA, 22 nt, Human
gccagaacguggcucugcuggc

SEQ ID NO: 2165049 - RNA, 17 nt, Human
gccagaagauccccuca

SEQ ID NO: 2165050 - RNA, 18 nt, Human
gccagaagauccccucag

SEQ ID NO: 2165051 - RNA, 14 nt, Human
gccagacauguggu

SEQ ID NO: 2165052 - RNA, 18 nt, Human
gccagacaugccacaagg

SEQ ID NO: 2165053 - RNA, 13 nt, Human
gccagacacucug

SEQ ID NO: 2165054 - RNA, 15 nt, Human
gccagacacucugcu

SEQ ID NO: 2165055 - RNA, 22 nt, Human
gccagacaucaacagauaaaua

SEQ ID NO: 2165056 - RNA, 21 nt, Human
gccagaaguuugucaagucaa

SEQ ID NO: 2165057 - RNA, 15 nt, Human
gccagaauuucaaac

SEQ ID NO: 2165058 - RNA, 17 nt, Human
gccagacacaggcccuc

SEQ ID NO: 2165059 - RNA, 16 nt, Human
gccagacacaggcccu

SEQ ID NO: 2165060 - RNA, 17 nt, Human
gccagacccccuggaga

SEQ ID NO: 2165061 - RNA, 19 nt, Human
gccagacacucugcucugc

SEQ ID NO: 2165062 - RNA, 23 nt, Human
gccagacggcacccacccagcac

SEQ ID NO: 2165063 - RNA, 22 nt, Human
gccagacggcacccacccagca

SEQ ID NO: 2165064 - RNA, 14 nt, Human
gccagcaaagcccc

SEQ ID NO: 2165065 - RNA, 16 nt, Human
gccagcaaagccccau

SEQ ID NO: 2165066 - RNA, 23 nt, Human
gccagcaaagccccaugcuggag

SEQ ID NO: 2165067 - RNA, 13 nt, Human
gccagcaaugaca

SEQ ID NO: 2165068 - RNA, 14 nt, Human
gccagcaacugaau

SEQ ID NO: 2165069 - RNA, 16 nt, Human
gccagcaacugaauaa

SEQ ID NO: 2165070 - RNA, 22 nt, Human
gccagcaaagccccaugcugga

SEQ ID NO: 2165071 - RNA, 13 nt, Human
gccagcaacugaa

SEQ ID NO: 2165072 - RNA, 13 nt, Human
gccagcacacagg

SEQ ID NO: 2165073 - RNA, 12 nt, Human
gccagcacacag

SEQ ID NO: 2165074 - RNA, 20 nt, Human
gccagcaaugacaucucagg

SEQ ID NO: 2165075 - RNA, 23 nt, Human
gccagcaaugacaucucaggggc

SEQ ID NO: 2165076 - RNA, 21 nt, Human
gccagcaaugauguccagaag

SEQ ID NO: 2165077 - RNA, 22 nt, Human
gccagcaaugauguccagaaga

SEQ ID NO: 2165078 - RNA, 22 nt, Human
gccagcacacagggcagugagg

SEQ ID NO: 2165079 - RNA, 20 nt, Human
gccagcacagaaacagagga

SEQ ID NO: 2165080 - RNA, 22 nt, Human
gccagcacagaaacagaggaga

SEQ ID NO: 2165081 - RNA, 18 nt, Human
gccagcacacagggcagu

SEQ ID NO: 2165082 - RNA, 17 nt, Human
gccagcacacagggcag

SEQ ID NO: 2165083 - RNA, 16 nt, Human
gccagcacacagggca

SEQ ID NO: 2165084 - RNA, 15 nt, Human
gccagcacacagggc

SEQ ID NO: 2165085 - RNA, 15 nt, Human
gccagcagccagcuc

SEQ ID NO: 2165086 - RNA, 13 nt, Human
gccagcagccagc

SEQ ID NO: 2165087 - RNA, 12 nt, Human
gccagcagccag

SEQ ID NO: 2165088 - RNA, 17 nt, Human
gccagcagacauuguca

SEQ ID NO: 2165089 - RNA, 15 nt, Human
gccagcagacauugu

SEQ ID NO: 2165090 - RNA, 16 nt, Human
gccagcagacauuguc

SEQ ID NO: 2165091 - RNA, 20 nt, Human
gccagcacuuguccagcuga

SEQ ID NO: 2165092 - RNA, 13 nt, Human
gccagcagacauu

SEQ ID NO: 2165093 - RNA, 14 nt, Human
gccagcagacauug

SEQ ID NO: 2165094 - RNA, 19 nt, Human
gccagcacuuguccagcug

SEQ ID NO: 2165095 - RNA, 14 nt, Human
gccagcacuugucc

SEQ ID NO: 2165096 - RNA, 14 nt, Human
gccagcaccuggca

SEQ ID NO: 2165097 - RNA, 15 nt, Human
gccagcacuuguaua

SEQ ID NO: 2165098 - RNA, 16 nt, Human
gccagcacuuguauau

SEQ ID NO: 2165099 - RNA, 23 nt, Human
gccagcagccagcucucagccaa

SEQ ID NO: 2165100 - RNA, 22 nt, Human
gccagcagccagcucucagcca

SEQ ID NO: 2165101 - RNA, 21 nt, Human
gccagcagccagcucucagcc

SEQ ID NO: 2165102 - RNA, 20 nt, Human
gccagcagccagcucucagc

SEQ ID NO: 2165103 - RNA, 19 nt, Human
gccagcagccagcucucag

SEQ ID NO: 2165104 - RNA, 18 nt, Human
gccagcagccagcucuca

SEQ ID NO: 2165105 - RNA, 17 nt, Human
gccagcagccagcucuc

SEQ ID NO: 2165106 - RNA, 16 nt, Human
gccagcagccagcucu

SEQ ID NO: 2165107 - RNA, 13 nt, Human
gccagcaggcucu

SEQ ID NO: 2165108 - RNA, 16 nt, Human
gccagcaggcucucag

SEQ ID NO: 2165109 - RNA, 17 nt, Human
gccagcaggcucucagg

SEQ ID NO: 2165110 - RNA, 18 nt, Human
gccagcaggcucucaggc

SEQ ID NO: 2165111 - RNA, 19 nt, Human
gccagcaggcucucaggcc

SEQ ID NO: 2165112 - RNA, 20 nt, Human
gccagcaggcucucaggcca

SEQ ID NO: 2165113 - RNA, 21 nt, Human
gccagcaggcucucaggccag

SEQ ID NO: 2165114 - RNA, 23 nt, Human
gccagcaggcucucaggccagcu

SEQ ID NO: 2165115 - RNA, 16 nt, Human
gcucuacaucuucugc

SEQ ID NO: 2165116 - RNA, 17 nt, Human
gcucuacaucuucugcc

SEQ ID NO: 2165117 - RNA, 15 nt, Human
gcucucaggccagcu

SEQ ID NO: 2165118 - RNA, 16 nt, Human
gcucucaggccagcug

SEQ ID NO: 2165119 - RNA, 20 nt, Human
gcucuacagcuaaucagcau

SEQ ID NO: 2165120 - RNA, 22 nt, Human
gcucuacagcuaaucagcauuc

SEQ ID NO: 2165121 - RNA, 13 nt, Human
gcucucaggccag

SEQ ID NO: 2165122 - RNA, 14 nt, Human
gcucucaggccagc

SEQ ID NO: 2165123 - RNA, 20 nt, Human
gcucccaggcauuccccagg

SEQ ID NO: 2165124 - RNA, 21 nt, Human
gcucccaggcauuccccagga

SEQ ID NO: 2165125 - RNA, 22 nt, Human
gcucccaggcauuccccaggag

SEQ ID NO: 2165126 - RNA, 14 nt, Human
gcuccccagcccag

SEQ ID NO: 2165127 - RNA, 13 nt, Human
gcuccccagccca

SEQ ID NO: 2165128 - RNA, 20 nt, Human
gcuccccacugccuacugca

SEQ ID NO: 2165129 - RNA, 19 nt, Human
gcuccccacugccuacugc

SEQ ID NO: 2165130 - RNA, 17 nt, Human
gcucccauuucuacucu

SEQ ID NO: 2165131 - RNA, 18 nt, Human
gcucccauuucuacucuc

SEQ ID NO: 2165132 - RNA, 16 nt, Human
gcuccccagcccaggg

SEQ ID NO: 2165133 - RNA, 15 nt, Human
gcuccccagcccagg

SEQ ID NO: 2165134 - RNA, 14 nt, Human
gcuccccagcccug

SEQ ID NO: 2165135 - RNA, 15 nt, Human
gcuccccagcccugg

SEQ ID NO: 2165136 - RNA, 16 nt, Human
gcuccccagcccuggc

SEQ ID NO: 2165137 - RNA, 18 nt, Human
gcuccccagcccuggcuc

SEQ ID NO: 2165138 - RNA, 20 nt, Human
gcuccccagcccuggcucug

SEQ ID NO: 2165139 - RNA, 14 nt, Human
gcuccccagcccca

SEQ ID NO: 2165140 - RNA, 16 nt, Human
gcuccccgccuguucc

SEQ ID NO: 2165141 - RNA, 18 nt, Human
gcucccccuguccccuca

SEQ ID NO: 2165142 - RNA, 19 nt, Human
gcuccccagcccuggcucu

SEQ ID NO: 2165143 - RNA, 12 nt, Human
gcucccccuguc

SEQ ID NO: 2165144 - RNA, 13 nt, Human
gcucccccugucc

SEQ ID NO: 2165145 - RNA, 14 nt, Human
gcucccccuguccc

SEQ ID NO: 2165146 - RNA, 17 nt, Human
gcuccccgccuguuccc

SEQ ID NO: 2165147 - RNA, 20 nt, Human
gcuccccgccuguucccccg

SEQ ID NO: 2165148 - RNA, 12 nt, Human
gcuccccuccaa

SEQ ID NO: 2165149 - RNA, 22 nt, Human
gcuccccgccuguucccccgcc

SEQ ID NO: 2165150 - RNA, 16 nt, Human
gcuccucugggcagga

SEQ ID NO: 2165151 - RNA, 14 nt, Human
gcuccucugggcag

SEQ ID NO: 2165152 - RNA, 13 nt, Human
gcuccucugggca

SEQ ID NO: 2165153 - RNA, 12 nt, Human
gcuccucugggc

SEQ ID NO: 2165154 - RNA, 19 nt, Human
gcuccucugggcaggaccu

SEQ ID NO: 2165155 - RNA, 11 nt, Human
gcuccucuggg

SEQ ID NO: 2165156 - RNA, 18 nt, Human
gcuccucuccuggaggau

SEQ ID NO: 2165157 - RNA, 12 nt, Human
gcuccucugcuu

SEQ ID NO: 2165158 - RNA, 14 nt, Human
gcuccucuccugga

SEQ ID NO: 2165159 - RNA, 15 nt, Human
gcuccucuccuggag

SEQ ID NO: 2165160 - RNA, 16 nt, Human
gcuccucuccuggagg

SEQ ID NO: 2165161 - RNA, 17 nt, Human
gcuccucuccuggagga

SEQ ID NO: 2165162 - RNA, 15 nt, Human
gcuccccucccuccu

SEQ ID NO: 2165163 - RNA, 13 nt, Human
gcuccccuccucu

SEQ ID NO: 2165164 - RNA, 18 nt, Human
gcuccccuccucuccccu

SEQ ID NO: 2165165 - RNA, 18 nt, Human
gcuccccucggagaagag

SEQ ID NO: 2165166 - RNA, 15 nt, Human
gcuccccucggagaa

SEQ ID NO: 2165167 - RNA, 22 nt, Human
gcuccugccaccacgcccggcu

SEQ ID NO: 2165168 - RNA, 19 nt, Human
gcuccugccaguguggaac

SEQ ID NO: 2165169 - RNA, 12 nt, Human
gcuccugcccac

SEQ ID NO: 2165170 - RNA, 15 nt, Human
gcuccugccgcagag

SEQ ID NO: 2165171 - RNA, 17 nt, Human
gcuccugccgcagagcu

SEQ ID NO: 2165172 - RNA, 15 nt, Human
gcuccugccuucugu

SEQ ID NO: 2165173 - RNA, 22 nt, Human
gcuccugccgcagagcuggccg

SEQ ID NO: 2165174 - RNA, 18 nt, Human
gcuccugccgcagagcug

SEQ ID NO: 2165175 - RNA, 19 nt, Human
gcuccugccgcagagcugg

SEQ ID NO: 2165176 - RNA, 19 nt, Human
gcuccugccuucuguccug

SEQ ID NO: 2165177 - RNA, 17 nt, Human
gcuccugccuucugucc

SEQ ID NO: 2165178 - RNA, 18 nt, Human
gcuccugccuucuguccu

SEQ ID NO: 2165179 - RNA, 14 nt, Human
gcuccugcuccaca

SEQ ID NO: 2165180 - RNA, 17 nt, Human
gcuccugcuccacagcc

SEQ ID NO: 2165181 - RNA, 20 nt, Human
gcuccugcuccacagccauc

SEQ ID NO: 2165182 - RNA, 15 nt, Human
gcucggaggaagccc

SEQ ID NO: 2165183 - RNA, 21 nt, Human
gcucgcuguugcugaauaggc

SEQ ID NO: 2165184 - RNA, 14 nt, Human
gcucgcuguugcug

SEQ ID NO: 2165185 - RNA, 16 nt, Human
gcucgcuguugcugaa

SEQ ID NO: 2165186 - RNA, 13 nt, Human
gcucgcuguugcu

SEQ ID NO: 2165187 - RNA, 22 nt, Human
gcucgcugcugcgcccugggcu

SEQ ID NO: 2165188 - RNA, 11 nt, Human
gcuccugcugc

SEQ ID NO: 2165189 - RNA, 12 nt, Human
gcuccugcugca

SEQ ID NO: 2165190 - RNA, 15 nt, Human
gcuccugcugcacca

SEQ ID NO: 2165191 - RNA, 23 nt, Human
gcucggaggcugcccccggcccc

SEQ ID NO: 2165192 - RNA, 17 nt, Human
gcucggaggcugccccc

SEQ ID NO: 2165193 - RNA, 18 nt, Human
gcucggaggcugcccccg

SEQ ID NO: 2165194 - RNA, 14 nt, Human
gcuccugcugcacc

SEQ ID NO: 2165195 - RNA, 14 nt, Human
gcucggaggcccca

SEQ ID NO: 2165196 - RNA, 18 nt, Human
gcucggaggccccaaagg

SEQ ID NO: 2165197 - RNA, 19 nt, Human
gcucggaggccccaaagga

SEQ ID NO: 2165198 - RNA, 21 nt, Human
gcucggaggccccaaaggaaa

SEQ ID NO: 2165199 - RNA, 14 nt, Human
gcucggaggcugcc

SEQ ID NO: 2165200 - RNA, 15 nt, Human
gcucggaggcugccc

SEQ ID NO: 2165201 - RNA, 16 nt, Human
gcucggaggcugcccc

SEQ ID NO: 2165202 - RNA, 12 nt, Human
gcucgggcccag

SEQ ID NO: 2165203 - RNA, 13 nt, Human
gcucgggcccagg

SEQ ID NO: 2165204 - RNA, 14 nt, Human
gcucgggcccaggc

SEQ ID NO: 2165205 - RNA, 15 nt, Human
gcucgggcccaggcc

SEQ ID NO: 2165206 - RNA, 11 nt, Human
gcucuggcuga

SEQ ID NO: 2165207 - RNA, 22 nt, Human
gcucugccaacuucuucagagc

SEQ ID NO: 2165208 - RNA, 15 nt, Human
gcucuggcugaaccc

SEQ ID NO: 2165209 - RNA, 16 nt, Human
gcucuggcugaacccu

SEQ ID NO: 2165210 - RNA, 19 nt, Human
gcucuggcugaacccugug

SEQ ID NO: 2165211 - RNA, 20 nt, Human
gcucuggcugaacccugugc

SEQ ID NO: 2165212 - RNA, 21 nt, Human
gcucuggcugaacccugugcu

SEQ ID NO: 2165213 - RNA, 15 nt, Human
gcucuguccugggag

SEQ ID NO: 2165214 - RNA, 14 nt, Human
gcucuguccuggga

SEQ ID NO: 2165215 - RNA, 17 nt, Human
gcucuguguugccaugu

SEQ ID NO: 2165216 - RNA, 21 nt, Human
gcucugggauagcugacccag

SEQ ID NO: 2165217 - RNA, 16 nt, Human
gcucuguccugggagu

SEQ ID NO: 2165218 - RNA, 19 nt, Human
gcucugucgcccaggcugg

SEQ ID NO: 2165219 - RNA, 22 nt, Human
gcucuggcugaacccugugcug

SEQ ID NO: 2165220 - RNA, 15 nt, Human
gcucugggagaggau

SEQ ID NO: 2165221 - RNA, 20 nt, Human
gcugaaauacugaggggucu

SEQ ID NO: 2165222 - RNA, 15 nt, Human
gcugaaaugcugcau

SEQ ID NO: 2165223 - RNA, 14 nt, Human
gcugaaauucuccu

SEQ ID NO: 2165224 - RNA, 15 nt, Human
gcugaaauucuccug

SEQ ID NO: 2165225 - RNA, 16 nt, Human
gcugaaauucuccugg

SEQ ID NO: 2165226 - RNA, 19 nt, Human
gcucuucagugggagaaaa

SEQ ID NO: 2165227 - RNA, 17 nt, Human
gcucuucauaauucuaa

SEQ ID NO: 2165228 - RNA, 19 nt, Human
gcucuucauaauucuaaga

SEQ ID NO: 2165229 - RNA, 12 nt, Human
gcugaaauacug

SEQ ID NO: 2165230 - RNA, 14 nt, Human
gcucuucauguuuc

SEQ ID NO: 2165231 - RNA, 15 nt, Human
gcucuuccaggcugg

SEQ ID NO: 2165232 - RNA, 16 nt, Human
gcucuuccaggcuggg

SEQ ID NO: 2165233 - RNA, 18 nt, Human
gcucuucaggccucccuc

SEQ ID NO: 2165234 - RNA, 15 nt, Human
gcucuucaggccucc

SEQ ID NO: 2165235 - RNA, 12 nt, Human
gcucuucaggcc

SEQ ID NO: 2165236 - RNA, 12 nt, Human
gcucuuccaggc

SEQ ID NO: 2165237 - RNA, 16 nt, Human
gcucuuagcagcuucc

SEQ ID NO: 2165238 - RNA, 19 nt, Human
gcucuuaauuguucauuuu

SEQ ID NO: 2165239 - RNA, 19 nt, Human
gcucuuagcagcuuccaga

SEQ ID NO: 2165240 - RNA, 17 nt, Human
gcucuuagcagcuucca

SEQ ID NO: 2165241 - RNA, 18 nt, Human
gcucuuagcagcuuccag

SEQ ID NO: 2165242 - RNA, 16 nt, Human
gcugacagacacaggc

SEQ ID NO: 2165243 - RNA, 23 nt, Human
gcugagcgaggagaugcuccuug

SEQ ID NO: 2165244 - RNA, 14 nt, Human
gcugagcgccagga

SEQ ID NO: 2165245 - RNA, 14 nt, Human
gcugagcucucugu

SEQ ID NO: 2165246 - RNA, 14 nt, Human
gcugacagacacag

SEQ ID NO: 2165247 - RNA, 15 nt, Human
gcugacagacacagg

SEQ ID NO: 2165248 - RNA, 14 nt, Human
gcugaauuaucuau

SEQ ID NO: 2165249 - RNA, 23 nt, Human
gcugaaggacugugacaggcagc

SEQ ID NO: 2165250 - RNA, 20 nt, Human
gcugaauguugggacugcua

SEQ ID NO: 2165251 - RNA, 23 nt, Human
gcugaauguugggacugcuaaau

SEQ ID NO: 2165252 - RNA, 19 nt, Human
gcugaauaggcgaucacaa

SEQ ID NO: 2165253 - RNA, 21 nt, Human
gcugaaggacugugacaggca

SEQ ID NO: 2165254 - RNA, 22 nt, Human
gcugaaggacugugacaggcag

SEQ ID NO: 2165255 - RNA, 17 nt, Human
gcugaauguugggacug

SEQ ID NO: 2165256 - RNA, 15 nt, Human
gcugaauccagauca

SEQ ID NO: 2165257 - RNA, 22 nt, Human
gcugaauacagaggcaacugca

SEQ ID NO: 2165258 - RNA, 17 nt, Human
gcugaaugguuuucaaa

SEQ ID NO: 2165259 - RNA, 12 nt, Human
gcugaaggcucg

SEQ ID NO: 2165260 - RNA, 20 nt, Human
gcugaaggcucgagcaugcc

SEQ ID NO: 2165261 - RNA, 13 nt, Human
gcugaagcugccu

SEQ ID NO: 2165262 - RNA, 15 nt, Human
gcugaagcugccugc

SEQ ID NO: 2165263 - RNA, 18 nt, Human
gcugaagauggcauccug

SEQ ID NO: 2165264 - RNA, 21 nt, Human
gcugaacacuccaauuaagga

SEQ ID NO: 2165265 - RNA, 20 nt, Human
gcugaacacuccaauuaagg

SEQ ID NO: 2165266 - RNA, 12 nt, Human
gcugaaggacug

SEQ ID NO: 2165267 - RNA, 13 nt, Human
gcugaaggacugu

SEQ ID NO: 2165268 - RNA, 14 nt, Human
gcugaaggacugug

SEQ ID NO: 2165269 - RNA, 19 nt, Human
gcugaaggaaaccagugca

SEQ ID NO: 2165270 - RNA, 16 nt, Human
gcugaagcugccugcu

SEQ ID NO: 2165271 - RNA, 17 nt, Human
gcugaagcugccugcuu

SEQ ID NO: 2165272 - RNA, 16 nt, Human
gcugaaaugcugcauu

SEQ ID NO: 2165273 - RNA, 17 nt, Human
gcugaaauucuccugga

SEQ ID NO: 2165274 - RNA, 18 nt, Human
gcugaaauucuccuggag

SEQ ID NO: 2165275 - RNA, 17 nt, Human
gcugaaauuuuauaugc

SEQ ID NO: 2165276 - RNA, 15 nt, Human
gcugaaauuuuauau

SEQ ID NO: 2165277 - RNA, 20 nt, Human
gcucugacagaaagcagaua

SEQ ID NO: 2165278 - RNA, 15 nt, Human
gcucugacccaguga

SEQ ID NO: 2165279 - RNA, 17 nt, Human
gcucugacccagugaga

SEQ ID NO: 2165280 - RNA, 21 nt, Human
gcucugaccgaaacagcgcug

SEQ ID NO: 2165281 - RNA, 15 nt, Human
gcucugcacagaugg

SEQ ID NO: 2165282 - RNA, 13 nt, Human
gcucugcagccca

SEQ ID NO: 2165283 - RNA, 15 nt, Human
gcucugcagcccagg

SEQ ID NO: 2165284 - RNA, 18 nt, Human
gcucugcagcccagggac

SEQ ID NO: 2165285 - RNA, 18 nt, Human
gcucugcacagauggauu

SEQ ID NO: 2165286 - RNA, 14 nt, Human
gcucugcacagaug

SEQ ID NO: 2165287 - RNA, 13 nt, Human
gcucugcacagau

SEQ ID NO: 2165288 - RNA, 12 nt, Human
gcucugcacaga

SEQ ID NO: 2165289 - RNA, 11 nt, Human
gcucugcacag

SEQ ID NO: 2165290 - RNA, 23 nt, Human
gcucugcaauuccccucugcugc

SEQ ID NO: 2165291 - RNA, 13 nt, Human
gcucugagccagu

SEQ ID NO: 2165292 - RNA, 18 nt, Human
gcucugcaauuccccucu

SEQ ID NO: 2165293 - RNA, 20 nt, Human
gcucugagcaaauguggcuc

SEQ ID NO: 2165294 - RNA, 21 nt, Human
gcucugagcaaauguggcucc

SEQ ID NO: 2165295 - RNA, 23 nt, Human
gcucuggagcccacuguacuugc

SEQ ID NO: 2165296 - RNA, 13 nt, Human
gcucuggagggga

SEQ ID NO: 2165297 - RNA, 23 nt, Human
gcucugccaacuucuucagagcu

SEQ ID NO: 2165298 - RNA, 15 nt, Human
gcucuggaggggagg

SEQ ID NO: 2165299 - RNA, 16 nt, Human
gcucuggaggggaggg

SEQ ID NO: 2165300 - RNA, 19 nt, Human
gcucugcagcccagggacc

SEQ ID NO: 2165301 - RNA, 14 nt, Human
gcucugcaggcacc

SEQ ID NO: 2165302 - RNA, 15 nt, Human
gcucugcaggcaccu

SEQ ID NO: 2165303 - RNA, 16 nt, Human
gcucugcaggcaccuu

SEQ ID NO: 2165304 - RNA, 18 nt, Human
gcucugcaggcaccuuag

SEQ ID NO: 2165305 - RNA, 11 nt, Human
gcucugcaugc

SEQ ID NO: 2165306 - RNA, 15 nt, Human
gcucugcaugcggcc

SEQ ID NO: 2165307 - RNA, 16 nt, Human
gcucugcaugcggccc

SEQ ID NO: 2165308 - RNA, 17 nt, Human
gcucugcaugcggccca

SEQ ID NO: 2165309 - RNA, 18 nt, Human
gcucugcaugcggcccag

SEQ ID NO: 2165310 - RNA, 19 nt, Human
gcucugcaugcggcccagc

SEQ ID NO: 2165311 - RNA, 20 nt, Human
gcucugcaugcggcccagcc

SEQ ID NO: 2165312 - RNA, 21 nt, Human
gcucugcaugcggcccagccc

SEQ ID NO: 2165313 - RNA, 22 nt, Human
gcucugcaugcggcccagcccg

SEQ ID NO: 2165314 - RNA, 15 nt, Human
gcucugcauuugucu

SEQ ID NO: 2165315 - RNA, 19 nt, Human
gccuguuauaacucugcac

SEQ ID NO: 2165316 - RNA, 11 nt, Human
gccuguucagu

SEQ ID NO: 2165317 - RNA, 20 nt, Human
gccuguucagcuccagcuca

SEQ ID NO: 2165318 - RNA, 22 nt, Human
gccugugugacaucaguggcau

SEQ ID NO: 2165319 - RNA, 22 nt, Human
gccuguuagacucuuacuuuuu

SEQ ID NO: 2165320 - RNA, 19 nt, Human
gccuguucagcuccagcuc

SEQ ID NO: 2165321 - RNA, 24 nt, Human
gccuguucaguuacagaaaguggu

SEQ ID NO: 2165322 - RNA, 12 nt, Human
gccuguucaguu

SEQ ID NO: 2165323 - RNA, 13 nt, Human
gccuguucaguua

SEQ ID NO: 2165324 - RNA, 15 nt, Human
gccuguucaguuaca

SEQ ID NO: 2165325 - RNA, 16 nt, Human
gccuguucaguuacag

SEQ ID NO: 2165326 - RNA, 19 nt, Human
gccuguucaguuacagaaa

SEQ ID NO: 2165327 - RNA, 20 nt, Human
gccuguucaguuacagaaag

SEQ ID NO: 2165328 - RNA, 21 nt, Human
gccuguucaguuacagaaagu

SEQ ID NO: 2165329 - RNA, 22 nt, Human
gccuguucaguuacagaaagug

SEQ ID NO: 2165330 - RNA, 18 nt, Human
gcuaggaacacuccuuca

SEQ ID NO: 2165331 - RNA, 19 nt, Human
gcuaggaacacuccuucac

SEQ ID NO: 2165332 - RNA, 21 nt, Human
gcuaggaacacuccuucacag

SEQ ID NO: 2165333 - RNA, 18 nt, Human
gcuaugggagccccaggg

SEQ ID NO: 2165334 - RNA, 23 nt, Human
gcuagucaagcuccuccucccug

SEQ ID NO: 2165335 - RNA, 21 nt, Human
gcuagucaagcuccuccuccc

SEQ ID NO: 2165336 - RNA, 16 nt, Human
gcuagucaagcuccuc

SEQ ID NO: 2165337 - RNA, 19 nt, Human
gcuagucaagcuccuccuc

SEQ ID NO: 2165338 - RNA, 18 nt, Human
gcuagucaagcuccuccu

SEQ ID NO: 2165339 - RNA, 18 nt, Human
gcuaggcauacaaguagg

SEQ ID NO: 2165340 - RNA, 16 nt, Human
gcuaguaucaaaagaa

SEQ ID NO: 2165341 - RNA, 21 nt, Human
gcuaguaauuggaaaggcagc

SEQ ID NO: 2165342 - RNA, 14 nt, Human
gcuaggccuggcca

SEQ ID NO: 2165343 - RNA, 15 nt, Human
gcuaggccuggccag

SEQ ID NO: 2165344 - RNA, 21 nt, Human
gcuaugggagccccagggucu

SEQ ID NO: 2165345 - RNA, 19 nt, Human
gcuaugggagccccagggu

SEQ ID NO: 2165346 - RNA, 19 nt, Human
gcuauggggauagaugugu

SEQ ID NO: 2165347 - RNA, 18 nt, Human
gcuauggggagaaaagac

SEQ ID NO: 2165348 - RNA, 14 nt, Human
gcuauggugagaug

SEQ ID NO: 2165349 - RNA, 15 nt, Human
gcuauggugagaugc

SEQ ID NO: 2165350 - RNA, 16 nt, Human
gcuauggugagaugca

SEQ ID NO: 2165351 - RNA, 21 nt, Human
gcuauggggauagaugugugg

SEQ ID NO: 2165352 - RNA, 22 nt, Human
gcuauguauggaauacaguguu

SEQ ID NO: 2165353 - RNA, 22 nt, Human
gcuauggugagaugcagcugga

SEQ ID NO: 2165354 - RNA, 11 nt, Human
gcuaugugacu

SEQ ID NO: 2165355 - RNA, 16 nt, Human
gcuauugucaccaggg

SEQ ID NO: 2165356 - RNA, 22 nt, Human
gcucaccuggggugugggaggc

SEQ ID NO: 2165357 - RNA, 15 nt, Human
gcucaccuguugcuu

SEQ ID NO: 2165358 - RNA, 19 nt, Human
gcucaccuguugcuuacaa

SEQ ID NO: 2165359 - RNA, 20 nt, Human
gcucaccuguugcuuacaau

SEQ ID NO: 2165360 - RNA, 13 nt, Human
gcucaccuggggu

SEQ ID NO: 2165361 - RNA, 12 nt, Human
gcucaccugggg

SEQ ID NO: 2165362 - RNA, 17 nt, Human
gcuauuuccauuccaga

SEQ ID NO: 2165363 - RNA, 15 nt, Human
gcuauuucaucuauu

SEQ ID NO: 2165364 - RNA, 14 nt, Human
gcuauuucaucuau

SEQ ID NO: 2165365 - RNA, 13 nt, Human
gcuauuuaaaacu

SEQ ID NO: 2165366 - RNA, 16 nt, Human
gcuauuguaaauaugu

SEQ ID NO: 2165367 - RNA, 22 nt, Human
gcuauuguuucuuuaagaaagu

SEQ ID NO: 2165368 - RNA, 22 nt, Human
gcuauuuaaaaaaaaaagagga

SEQ ID NO: 2165369 - RNA, 14 nt, Human
gcuauuuaaaacuu

SEQ ID NO: 2165370 - RNA, 21 nt, Human
gcuauugucaccagggcugga

SEQ ID NO: 2165371 - RNA, 20 nt, Human
gcuauugucaccagggcugg

SEQ ID NO: 2165372 - RNA, 21 nt, Human
gcucaccuguugcuuacaauu

SEQ ID NO: 2165373 - RNA, 22 nt, Human
gcucaccuguugcuuacaauuu

SEQ ID NO: 2165374 - RNA, 22 nt, Human
gcucacgccuaugaucccagca

SEQ ID NO: 2165375 - RNA, 21 nt, Human
gcucacgccuaugaucccagc

SEQ ID NO: 2165376 - RNA, 22 nt, Human
gcucacgccuguaaucccagca

SEQ ID NO: 2165377 - RNA, 23 nt, Human
gcucacgccuguaaucccagcac

SEQ ID NO: 2165378 - RNA, 21 nt, Human
gcucacgccuguaaucccagc

SEQ ID NO: 2165379 - RNA, 23 nt, Human
gcucaccuguugcuuacaauuuu

SEQ ID NO: 2165380 - RNA, 15 nt, Human
gcucacgucacacuu

SEQ ID NO: 2165381 - RNA, 14 nt, Human
gcucacgucacacu

SEQ ID NO: 2165382 - RNA, 22 nt, Human
gcucacgugagagugucuucac

SEQ ID NO: 2165383 - RNA, 17 nt, Human
gcucacgugugugacuc

SEQ ID NO: 2165384 - RNA, 16 nt, Human
gcucacuaccuccuca

SEQ ID NO: 2165385 - RNA, 15 nt, Human
gcucacgugugugac

SEQ ID NO: 2165386 - RNA, 13 nt, Human
gcucacgugugug

SEQ ID NO: 2165387 - RNA, 18 nt, Human
gcucacuaccuccucagg

SEQ ID NO: 2165388 - RNA, 21 nt, Human
gcucacuaccuccucagggau

SEQ ID NO: 2165389 - RNA, 14 nt, Human
gcucacuaugaauc

SEQ ID NO: 2165390 - RNA, 16 nt, Human
gcucacuaugaaucua

SEQ ID NO: 2165391 - RNA, 15 nt, Human
gcucagagagggugg

SEQ ID NO: 2165392 - RNA, 14 nt, Human
gcucaggagcccug

SEQ ID NO: 2165393 - RNA, 22 nt, Human
gcucagagagggugggaguggg

SEQ ID NO: 2165394 - RNA, 18 nt, Human
gcucagagagggugggag

SEQ ID NO: 2165395 - RNA, 20 nt, Human
gcucagagagggugggagug

SEQ ID NO: 2165396 - RNA, 20 nt, Human
gcucaggggcguguggcuca

SEQ ID NO: 2165397 - RNA, 15 nt, Human
gcucaggucccuggg

SEQ ID NO: 2165398 - RNA, 17 nt, Human
gcucagggccuggcuca

SEQ ID NO: 2165399 - RNA, 19 nt, Human
gcucaggacucagaagccu

SEQ ID NO: 2165400 - RNA, 23 nt, Human
gcucagggccaugcugaggccug

SEQ ID NO: 2165401 - RNA, 13 nt, Human
gcucagggccugg

SEQ ID NO: 2165402 - RNA, 16 nt, Human
gcucagggccuggcuc

SEQ ID NO: 2165403 - RNA, 21 nt, Human
gcucaggagcccugggaggcu

SEQ ID NO: 2165404 - RNA, 18 nt, Human
gcucaggacucagaagcc

SEQ ID NO: 2165405 - RNA, 17 nt, Human
gcucaggacucagaagc

SEQ ID NO: 2165406 - RNA, 12 nt, Human
gcucagggccug

SEQ ID NO: 2165407 - RNA, 15 nt, Human
gcucaggagcccugg

SEQ ID NO: 2165408 - RNA, 18 nt, Human
gcucaggagcccugggag

SEQ ID NO: 2165409 - RNA, 19 nt, Human
gcucaggucccuggggcua

SEQ ID NO: 2165410 - RNA, 21 nt, Human
gcucagguggggucacucugg

SEQ ID NO: 2165411 - RNA, 22 nt, Human
gcucagguggggucacucuggc

SEQ ID NO: 2165412 - RNA, 16 nt, Human
gcuucuuucauuuucu

SEQ ID NO: 2165413 - RNA, 23 nt, Human
gcuucuuucuuugggaauauuug

SEQ ID NO: 2165414 - RNA, 12 nt, Human
gcuucuuucuuu

SEQ ID NO: 2165415 - RNA, 18 nt, Human
gcuucuuucuuugggaau

SEQ ID NO: 2165416 - RNA, 23 nt, Human
gcuucuuuuaguuguaucucuuu

SEQ ID NO: 2165417 - RNA, 17 nt, Human
gcuugaaaaaugugcaa

SEQ ID NO: 2165418 - RNA, 14 nt, Human
gcuuggccugcugu

SEQ ID NO: 2165419 - RNA, 19 nt, Human
gcuugaaacccguggcgcu

SEQ ID NO: 2165420 - RNA, 14 nt, Human
gcuuggcugcuugg

SEQ ID NO: 2165421 - RNA, 15 nt, Human
gcuuggccugcugug

SEQ ID NO: 2165422 - RNA, 16 nt, Human
gcuuggccugcuguga

SEQ ID NO: 2165423 - RNA, 22 nt, Human
gcuuccuuuguuuuuuuuuccu

SEQ ID NO: 2165424 - RNA, 22 nt, Human
gcuuccuuggcaucacagggca

SEQ ID NO: 2165425 - RNA, 23 nt, Human
gcuuccuuuguuuuuuuuuccug

SEQ ID NO: 2165426 - RNA, 12 nt, Human
gcuuccuuucuu

SEQ ID NO: 2165427 - RNA, 21 nt, Human
gcuucgaggcccagcgaccuc

SEQ ID NO: 2165428 - RNA, 19 nt, Human
gcuucgaggcccagcgacc

SEQ ID NO: 2165429 - RNA, 22 nt, Human
gcuucgguuucuaacuuggagc

SEQ ID NO: 2165430 - RNA, 19 nt, Human
gcuucuugccucugugcug

SEQ ID NO: 2165431 - RNA, 20 nt, Human
gcuucgggcccuucccacag

SEQ ID NO: 2165432 - RNA, 18 nt, Human
gcuucgggcccuucccac

SEQ ID NO: 2165433 - RNA, 20 nt, Human
gcuucuugccucugugcugu

SEQ ID NO: 2165434 - RNA, 21 nt, Human
gcuucuugccucugugcugug

SEQ ID NO: 2165435 - RNA, 21 nt, Human
gcuuggguguaacaggucucc

SEQ ID NO: 2165436 - RNA, 19 nt, Human
gcuuggguguaacaggucu

SEQ ID NO: 2165437 - RNA, 20 nt, Human
gcuuggguggagaagccauu

SEQ ID NO: 2165438 - RNA, 21 nt, Human
gcuuggguggagaagccauug

SEQ ID NO: 2165439 - RNA, 16 nt, Human
gcuuggguggagaagc

SEQ ID NO: 2165440 - RNA, 17 nt, Human
gcuuggguggagaagcc

SEQ ID NO: 2165441 - RNA, 18 nt, Human
gcuuggguggagaagcca

SEQ ID NO: 2165442 - RNA, 19 nt, Human
gcuuggguggagaagccau

SEQ ID NO: 2165443 - RNA, 24 nt, Human
gcuugggggaugacuagaggcagg

SEQ ID NO: 2165444 - RNA, 16 nt, Human
gcuuggggcuuccuaa

SEQ ID NO: 2165445 - RNA, 13 nt, Human
gcuuggguggaga

SEQ ID NO: 2165446 - RNA, 14 nt, Human
gcuuggguggagaa

SEQ ID NO: 2165447 - RNA, 16 nt, Human
gcuuguacauaaugcg

SEQ ID NO: 2165448 - RNA, 14 nt, Human
gcuuguacauaaug

SEQ ID NO: 2165449 - RNA, 14 nt, Human
gcuugggacaaauc

SEQ ID NO: 2165450 - RNA, 19 nt, Human
gcuugggaccgccagaugg

SEQ ID NO: 2165451 - RNA, 14 nt, Human
gcuugggcccagcu

SEQ ID NO: 2165452 - RNA, 15 nt, Human
gcuugggcccagcug

SEQ ID NO: 2165453 - RNA, 17 nt, Human
gcuugggcccagcuggg

SEQ ID NO: 2165454 - RNA, 18 nt, Human
gcuugggcccagcugggc

SEQ ID NO: 2165455 - RNA, 19 nt, Human
gcuugggcccagcugggcu

SEQ ID NO: 2165456 - RNA, 20 nt, Human
gcuugggcccagcugggcuc

SEQ ID NO: 2165457 - RNA, 19 nt, Human
gcuugggcuucauccuccu

SEQ ID NO: 2165458 - RNA, 16 nt, Human
gcuuggggcucacaca

SEQ ID NO: 2165459 - RNA, 20 nt, Human
gcuuggggcucacacaccug

SEQ ID NO: 2165460 - RNA, 20 nt, Human
gcuuccauuugugugugugc

SEQ ID NO: 2165461 - RNA, 15 nt, Human
gcuucccccauagcc

SEQ ID NO: 2165462 - RNA, 14 nt, Human
gcuucccccauagc

SEQ ID NO: 2165463 - RNA, 19 nt, Human
gcuucccauuguggcuccu

SEQ ID NO: 2165464 - RNA, 17 nt, Human
gcuucccauccuacccu

SEQ ID NO: 2165465 - RNA, 22 nt, Human
gcuucccauccuacccucgggc

SEQ ID NO: 2165466 - RNA, 18 nt, Human
gcuucccccauagccacc

SEQ ID NO: 2165467 - RNA, 16 nt, Human
gcuucccccauagcca

SEQ ID NO: 2165468 - RNA, 16 nt, Human
gcuuccccucucuccu

SEQ ID NO: 2165469 - RNA, 14 nt, Human
gcuuccccucucuc

SEQ ID NO: 2165470 - RNA, 18 nt, Human
gcuucccaguggcugcug

SEQ ID NO: 2165471 - RNA, 19 nt, Human
gcuucccaguggcugcugc

SEQ ID NO: 2165472 - RNA, 20 nt, Human
gcuucccaguggcugcugcc

SEQ ID NO: 2165473 - RNA, 21 nt, Human
gcuucccaguggcugcugccc

SEQ ID NO: 2165474 - RNA, 22 nt, Human
gcuucccaguggcugcugccca

SEQ ID NO: 2165475 - RNA, 12 nt, Human
gcuucccauccu

SEQ ID NO: 2165476 - RNA, 13 nt, Human
gcuucccauccua

SEQ ID NO: 2165477 - RNA, 18 nt, Human
gcuuccccucucuccucc

SEQ ID NO: 2165478 - RNA, 13 nt, Human
gcuucccuaaucu

SEQ ID NO: 2165479 - RNA, 23 nt, Human
gcuucccgcucagcccucccugc

SEQ ID NO: 2165480 - RNA, 15 nt, Human
gcuucccucugccug

SEQ ID NO: 2165481 - RNA, 13 nt, Human
gcuucccucugcc

SEQ ID NO: 2165482 - RNA, 12 nt, Human
gcuucccucugc

SEQ ID NO: 2165483 - RNA, 14 nt, Human
gcuucccuaaucua

SEQ ID NO: 2165484 - RNA, 15 nt, Human
gcuucccgcucagcc

SEQ ID NO: 2165485 - RNA, 16 nt, Human
gcuucccgcucagccc

SEQ ID NO: 2165486 - RNA, 17 nt, Human
gcuucccgcucagcccu

SEQ ID NO: 2165487 - RNA, 18 nt, Human
gcuucccgcucagcccuc

SEQ ID NO: 2165488 - RNA, 23 nt, Human
gcuucccucugccugucccucuc

SEQ ID NO: 2165489 - RNA, 20 nt, Human
gcuucccucugccugucccu

SEQ ID NO: 2165490 - RNA, 19 nt, Human
gcuucccucugccuguccc

SEQ ID NO: 2165491 - RNA, 17 nt, Human
gcuucccucugccuguc

SEQ ID NO: 2165492 - RNA, 14 nt, Human
gcuuccgcauccua

SEQ ID NO: 2165493 - RNA, 18 nt, Human
gcuucccugacucauucu

SEQ ID NO: 2165494 - RNA, 14 nt, Human
gcuucccugacuca

SEQ ID NO: 2165495 - RNA, 22 nt, Human
gcuuccuucugugaaaguacau

SEQ ID NO: 2165496 - RNA, 17 nt, Human
gcuuccuucauuuccuc

SEQ ID NO: 2165497 - RNA, 14 nt, Human
gcuuccuucauuuc

SEQ ID NO: 2165498 - RNA, 13 nt, Human
gcuuccuucauuu

SEQ ID NO: 2165499 - RNA, 21 nt, Human
gcuuccuagaaguuacugaau

SEQ ID NO: 2165500 - RNA, 23 nt, Human
gcuuccuacccacaccucugcca

SEQ ID NO: 2165501 - RNA, 18 nt, Human
gcuuccuagaaguuacug

SEQ ID NO: 2165502 - RNA, 18 nt, Human
gcuuccggcuccugugcu

SEQ ID NO: 2165503 - RNA, 16 nt, Human
gcuuccggcuccugug

SEQ ID NO: 2165504 - RNA, 22 nt, Human
gcuuccuacccacaccucugcc

SEQ ID NO: 2165505 - RNA, 14 nt, Human
gcuggguucugcac

SEQ ID NO: 2165506 - RNA, 17 nt, Human
gcuggguuggcgcaccc

SEQ ID NO: 2165507 - RNA, 21 nt, Human
gcuggguuggcgcacccuccc

SEQ ID NO: 2165508 - RNA, 22 nt, Human
gcuggguuggcgcacccucccc

SEQ ID NO: 2165509 - RNA, 16 nt, Human
gcuggguuggugcaca

SEQ ID NO: 2165510 - RNA, 14 nt, Human
gcuggguuggaggg

SEQ ID NO: 2165511 - RNA, 21 nt, Human
gcuggguuggaggguguccca

SEQ ID NO: 2165512 - RNA, 15 nt, Human
gcuggguucuaccca

SEQ ID NO: 2165513 - RNA, 15 nt, Human
gcuggguucugaucc

SEQ ID NO: 2165514 - RNA, 15 nt, Human
gcuguaaauaaaugc

SEQ ID NO: 2165515 - RNA, 14 nt, Human
gcuguaaaaucuug

SEQ ID NO: 2165516 - RNA, 16 nt, Human
gcuguaaaaugcauga

SEQ ID NO: 2165517 - RNA, 14 nt, Human
gcuguaaauaaaug

SEQ ID NO: 2165518 - RNA, 20 nt, Human
gcuguaaaaugcaugauuuu

SEQ ID NO: 2165519 - RNA, 16 nt, Human
gcuguaagaagagacu

SEQ ID NO: 2165520 - RNA, 14 nt, Human
gcugguuuuucagu

SEQ ID NO: 2165521 - RNA, 15 nt, Human
gcugguuuuucaguu

SEQ ID NO: 2165522 - RNA, 22 nt, Human
gcugguuuuguaagaugcuggg

SEQ ID NO: 2165523 - RNA, 14 nt, Human
gcuguaucuuguuu

SEQ ID NO: 2165524 - RNA, 18 nt, Human
gcuguaucuuguuuuucc

SEQ ID NO: 2165525 - RNA, 16 nt, Human
gcuguaucuuguuuuu

SEQ ID NO: 2165526 - RNA, 17 nt, Human
gcuguauuaagccacuu

SEQ ID NO: 2165527 - RNA, 21 nt, Human
gcuguacaaauauaagaauaa

SEQ ID NO: 2165528 - RNA, 20 nt, Human
gcuguaucccaugagccuca

SEQ ID NO: 2165529 - RNA, 23 nt, Human
gcuguaucccaugagccucagca

SEQ ID NO: 2165530 - RNA, 24 nt, Human
gcuguaagaagagacugggaagau

SEQ ID NO: 2165531 - RNA, 17 nt, Human
gcuguaaggcaugaagg

SEQ ID NO: 2165532 - RNA, 19 nt, Human
gcuguaaggcaugaaggau

SEQ ID NO: 2165533 - RNA, 18 nt, Human
gcuguaaggcaugaagga

SEQ ID NO: 2165534 - RNA, 22 nt, Human
gcuguaaucuaugaauucuaag

SEQ ID NO: 2165535 - RNA, 12 nt, Human
gcuguacacugc

SEQ ID NO: 2165536 - RNA, 16 nt, Human
gcuguacacugcacga

SEQ ID NO: 2165537 - RNA, 16 nt, Human
gcuguacaaauauaag

SEQ ID NO: 2165538 - RNA, 21 nt, Human
gcuguaaugaaacaccuucuc

SEQ ID NO: 2165539 - RNA, 12 nt, Human
gcuuaaagaugu

SEQ ID NO: 2165540 - RNA, 16 nt, Human
gcuuaaaggugucuuc

SEQ ID NO: 2165541 - RNA, 17 nt, Human
gcuuaaaggugucuucc

SEQ ID NO: 2165542 - RNA, 20 nt, Human
gcuuaaaggugucuuccucc

SEQ ID NO: 2165543 - RNA, 22 nt, Human
gcuuaaaggugucuuccuccca

SEQ ID NO: 2165544 - RNA, 23 nt, Human
gcuuaaaggugucuuccucccaa

SEQ ID NO: 2165545 - RNA, 22 nt, Human
gcuucaaggauccugagccaga

SEQ ID NO: 2165546 - RNA, 19 nt, Human
gcuucaccccaaucccagc

SEQ ID NO: 2165547 - RNA, 14 nt, Human
gcuucaccagagca

SEQ ID NO: 2165548 - RNA, 15 nt, Human
gcuucaccagagcau

SEQ ID NO: 2165549 - RNA, 20 nt, Human
gcuucaccccaaucccagcu

SEQ ID NO: 2165550 - RNA, 22 nt, Human
gcuucacccugaaugguuccau

SEQ ID NO: 2165551 - RNA, 14 nt, Human
gcuuaacuucacau

SEQ ID NO: 2165552 - RNA, 22 nt, Human
gcuucaauacccaaauccucuc

SEQ ID NO: 2165553 - RNA, 15 nt, Human
gcuucaauuaauaaa

SEQ ID NO: 2165554 - RNA, 17 nt, Human
gcuucacuguauaaaua

SEQ ID NO: 2165555 - RNA, 19 nt, Human
gcuucagcauauuuauagc

SEQ ID NO: 2165556 - RNA, 16 nt, Human
gcuucagccacaguuu

SEQ ID NO: 2165557 - RNA, 17 nt, Human
gcuucagcauauuuaua

SEQ ID NO: 2165558 - RNA, 14 nt, Human
gcuucagccaggag

SEQ ID NO: 2165559 - RNA, 22 nt, Human
gcuucagccacaguuuccucau

SEQ ID NO: 2165560 - RNA, 14 nt, Human
gcuucacuguauaa

SEQ ID NO: 2165561 - RNA, 15 nt, Human
gcuucacuguauaaa

SEQ ID NO: 2165562 - RNA, 16 nt, Human
gcuucacuguauaaau

SEQ ID NO: 2165563 - RNA, 20 nt, Human
gcuucacggaagagccuugc

SEQ ID NO: 2165564 - RNA, 21 nt, Human
gcuguuggcugggggccucag

SEQ ID NO: 2165565 - RNA, 22 nt, Human
gcuguuggcugggggccucagu

SEQ ID NO: 2165566 - RNA, 16 nt, Human
gcuguugucccucugc

SEQ ID NO: 2165567 - RNA, 15 nt, Human
gcuguuguacauuua

SEQ ID NO: 2165568 - RNA, 16 nt, Human
gcuguuguacauuuau

SEQ ID NO: 2165569 - RNA, 12 nt, Human
gcuguuguacau

SEQ ID NO: 2165570 - RNA, 13 nt, Human
gcuguuguacauu

SEQ ID NO: 2165571 - RNA, 14 nt, Human
gcuguuguacauuu

SEQ ID NO: 2165572 - RNA, 17 nt, Human
gcuguugucccucugcu

SEQ ID NO: 2165573 - RNA, 18 nt, Human
gcuguugucccucugcua

SEQ ID NO: 2165574 - RNA, 16 nt, Human
gcugugagccccuggu

SEQ ID NO: 2165575 - RNA, 20 nt, Human
gcugugagccccugguccug

SEQ ID NO: 2165576 - RNA, 15 nt, Human
gcuguggaagcaaca

SEQ ID NO: 2165577 - RNA, 19 nt, Human
gcugugcugcccugcccac

SEQ ID NO: 2165578 - RNA, 22 nt, Human
gcugugcugcccugcccaccug

SEQ ID NO: 2165579 - RNA, 21 nt, Human
gcugugcucuggacaggcaug

SEQ ID NO: 2165580 - RNA, 12 nt, Human
gcugugcugccc

SEQ ID NO: 2165581 - RNA, 13 nt, Human
gcugugcugcccu

SEQ ID NO: 2165582 - RNA, 13 nt, Human
gcugugagccuug

SEQ ID NO: 2165583 - RNA, 20 nt, Human
gcugugaauuuguguaagga

SEQ ID NO: 2165584 - RNA, 22 nt, Human
gcugugacaauggcaacaauuu

SEQ ID NO: 2165585 - RNA, 18 nt, Human
gcugugaacauggacucu

SEQ ID NO: 2165586 - RNA, 13 nt, Human
gcugugaaaaaaa

SEQ ID NO: 2165587 - RNA, 16 nt, Human
gcugugacuucuccag

SEQ ID NO: 2165588 - RNA, 17 nt, Human
gcugugacuucuccagg

SEQ ID NO: 2165589 - RNA, 15 nt, Human
gcugugagacagugg

SEQ ID NO: 2165590 - RNA, 18 nt, Human
gcugugagacagugggaa

SEQ ID NO: 2165591 - RNA, 20 nt, Human
gcugugagacagugggaaau

SEQ ID NO: 2165592 - RNA, 23 nt, Human
gcugugagacagugggaaauauu

SEQ ID NO: 2165593 - RNA, 12 nt, Human
gcugugagcccc

SEQ ID NO: 2165594 - RNA, 15 nt, Human
gcugugagccccugg

SEQ ID NO: 2165595 - RNA, 21 nt, Human
gcugaggggggccgugcccag

SEQ ID NO: 2165596 - RNA, 22 nt, Human
gcugaggggaggaucacuggag

SEQ ID NO: 2165597 - RNA, 18 nt, Human
gcugagggugagugggug

SEQ ID NO: 2165598 - RNA, 23 nt, Human
gcugaggggggccgugcccaggg

SEQ ID NO: 2165599 - RNA, 23 nt, Human
gcugaggaaaggccagcuggcag

SEQ ID NO: 2165600 - RNA, 22 nt, Human
gcugaggaaaggccagcuggca

SEQ ID NO: 2165601 - RNA, 21 nt, Human
gcugaggaaaggccagcuggc

SEQ ID NO: 2165602 - RNA, 17 nt, Human
gcugaggaaaggccagc

SEQ ID NO: 2165603 - RNA, 14 nt, Human
gcugaggaggccuc

SEQ ID NO: 2165604 - RNA, 16 nt, Human
gcugaggaaaggccag

SEQ ID NO: 2165605 - RNA, 15 nt, Human
gcugaggaaaggcca

SEQ ID NO: 2165606 - RNA, 12 nt, Human
gcugaggaaagg

SEQ ID NO: 2165607 - RNA, 16 nt, Human
gcugagggaccagcca

SEQ ID NO: 2165608 - RNA, 16 nt, Human
gcugaggaggccucca

SEQ ID NO: 2165609 - RNA, 14 nt, Human
gcugagggagccug

SEQ ID NO: 2165610 - RNA, 21 nt, Human
gcugagggauggacugaugcu

SEQ ID NO: 2165611 - RNA, 22 nt, Human
gcugagggauggacugaugcuu

SEQ ID NO: 2165612 - RNA, 23 nt, Human
gcugagggauggacugaugcuuu

SEQ ID NO: 2165613 - RNA, 15 nt, Human
gcugagggaccagcc

SEQ ID NO: 2165614 - RNA, 18 nt, Human
gcugaggcuggcacagga

SEQ ID NO: 2165615 - RNA, 16 nt, Human
gcugaggcuggcacag

SEQ ID NO: 2165616 - RNA, 15 nt, Human
gcugaggcuggcaca

SEQ ID NO: 2165617 - RNA, 14 nt, Human
gcugcaccggcugg

SEQ ID NO: 2165618 - RNA, 16 nt, Human
gcugcaccggcuggcc

SEQ ID NO: 2165619 - RNA, 17 nt, Human
gcugcaccggcuggccu

SEQ ID NO: 2165620 - RNA, 20 nt, Human
gcugcaccugccagccuggc

SEQ ID NO: 2165621 - RNA, 19 nt, Human
gcugcaccugccagccugg

SEQ ID NO: 2165622 - RNA, 18 nt, Human
gcugcaccugccagccug

SEQ ID NO: 2165623 - RNA, 17 nt, Human
gcugcaccugccagccu

SEQ ID NO: 2165624 - RNA, 22 nt, Human
gcugcaccggcuggccuggccc

SEQ ID NO: 2165625 - RNA, 18 nt, Human
gcugcaccggcuggccug

SEQ ID NO: 2165626 - RNA, 19 nt, Human
gcugcaccggcuggccugg

SEQ ID NO: 2165627 - RNA, 22 nt, Human
gcugcaccugccagccuggcuu

SEQ ID NO: 2165628 - RNA, 21 nt, Human
gcugcaccugccagccuggcu

SEQ ID NO: 2165629 - RNA, 14 nt, Human
gcugcacucugugc

SEQ ID NO: 2165630 - RNA, 15 nt, Human
gcugcacucugugcc

SEQ ID NO: 2165631 - RNA, 16 nt, Human
gcugcacucugugccc

SEQ ID NO: 2165632 - RNA, 17 nt, Human
gcugcacucugugccca

SEQ ID NO: 2165633 - RNA, 12 nt, Human
gcugccagagaa

SEQ ID NO: 2165634 - RNA, 14 nt, Human
gcugccacuuuuua

SEQ ID NO: 2165635 - RNA, 18 nt, Human
gcugcacucugugcccau

SEQ ID NO: 2165636 - RNA, 19 nt, Human
gcugcacucugugcccaug

SEQ ID NO: 2165637 - RNA, 20 nt, Human
gcugcacucugugcccaugg

SEQ ID NO: 2165638 - RNA, 19 nt, Human
gcugccagccgagauagcc

SEQ ID NO: 2165639 - RNA, 21 nt, Human
gcugccagccgagauagccaa

SEQ ID NO: 2165640 - RNA, 21 nt, Human
gcugccauccagguucagcuu

SEQ ID NO: 2165641 - RNA, 18 nt, Human
gcugccagcucuguauca

SEQ ID NO: 2165642 - RNA, 17 nt, Human
gcugccagcucuguauc

SEQ ID NO: 2165643 - RNA, 22 nt, Human
gcugccauggcgugucccucuc

SEQ ID NO: 2165644 - RNA, 23 nt, Human
gcugccauggcgugucccucucg

SEQ ID NO: 2165645 - RNA, 23 nt, Human
gcugccauccagguucagcuugu

SEQ ID NO: 2165646 - RNA, 23 nt, Human
gcugcugccuuuagucgcugagg

SEQ ID NO: 2165647 - RNA, 13 nt, Human
gcugcugcccugc

SEQ ID NO: 2165648 - RNA, 12 nt, Human
gcugcugcgccc

SEQ ID NO: 2165649 - RNA, 17 nt, Human
gcugcugcgcccugggc

SEQ ID NO: 2165650 - RNA, 20 nt, Human
gcugcugcuaaucuucaggg

SEQ ID NO: 2165651 - RNA, 15 nt, Human
gcugcugcugcgccc

SEQ ID NO: 2165652 - RNA, 12 nt, Human
gcugcugcugcu

SEQ ID NO: 2165653 - RNA, 21 nt, Human
gcugcugcguggcauagccca

SEQ ID NO: 2165654 - RNA, 12 nt, Human
gcugcugcccag

SEQ ID NO: 2165655 - RNA, 13 nt, Human
gcugcugcccagg

SEQ ID NO: 2165656 - RNA, 15 nt, Human
gcugcugcccaggcc

SEQ ID NO: 2165657 - RNA, 17 nt, Human
gcugcugcccccacccc

SEQ ID NO: 2165658 - RNA, 21 nt, Human
gcugccuggcccccagcugug

SEQ ID NO: 2165659 - RNA, 19 nt, Human
gcugcuccuagagggaggg

SEQ ID NO: 2165660 - RNA, 22 nt, Human
gcugccuggcccccagcugugg

SEQ ID NO: 2165661 - RNA, 21 nt, Human
gcugcuccuagagggaggggc

SEQ ID NO: 2165662 - RNA, 23 nt, Human
gcugcuccuagagggaggggccu

SEQ ID NO: 2165663 - RNA, 19 nt, Human
gcugccugggaucccucau

SEQ ID NO: 2165664 - RNA, 16 nt, Human
gcugccugggaucccu

SEQ ID NO: 2165665 - RNA, 18 nt, Human
gcugccugggaucccuca

SEQ ID NO: 2165666 - RNA, 23 nt, Human
gcugcuccuccagggccacgugc

SEQ ID NO: 2165667 - RNA, 18 nt, Human
gcugcuccuccagggcca

SEQ ID NO: 2165668 - RNA, 15 nt, Human
gcugcuccuccaggg

SEQ ID NO: 2165669 - RNA, 14 nt, Human
gcugcuccuccagg

SEQ ID NO: 2165670 - RNA, 12 nt, Human
gcugcuccucca

SEQ ID NO: 2165671 - RNA, 11 nt, Human
gcugcuccucc

SEQ ID NO: 2165672 - RNA, 13 nt, Human
gcugcuccucaug

SEQ ID NO: 2165673 - RNA, 17 nt, Human
gcugcuccuuccuucac

SEQ ID NO: 2165674 - RNA, 22 nt, Human
gcugcucugaauuaguccuugc

SEQ ID NO: 2165675 - RNA, 23 nt, Human
gcugcucuauuguagcauuucuu

SEQ ID NO: 2165676 - RNA, 12 nt, Human
gcugcucuggaa

SEQ ID NO: 2165677 - RNA, 17 nt, Human
gcugcccacacacccca

SEQ ID NO: 2165678 - RNA, 17 nt, Human
gcugccaugugaagagg

SEQ ID NO: 2165679 - RNA, 21 nt, Human
gcugccaugugaagagggaga

SEQ ID NO: 2165680 - RNA, 13 nt, Human
gcugccaugugaa

SEQ ID NO: 2165681 - RNA, 14 nt, Human
gcugcccagaguug

SEQ ID NO: 2165682 - RNA, 17 nt, Human
gcugcccagaguugcug

SEQ ID NO: 2165683 - RNA, 12 nt, Human
gcugcccaggcc

SEQ ID NO: 2165684 - RNA, 14 nt, Human
gcugcccaggccca

SEQ ID NO: 2165685 - RNA, 19 nt, Human
gcugcccaggggagcccuc

SEQ ID NO: 2165686 - RNA, 23 nt, Human
gcugccccauuuauccaccucca

SEQ ID NO: 2165687 - RNA, 18 nt, Human
gcugccccaucagugcuc

SEQ ID NO: 2165688 - RNA, 14 nt, Human
gcugccccagccag

SEQ ID NO: 2165689 - RNA, 16 nt, Human
gcugccccagccagau

SEQ ID NO: 2165690 - RNA, 18 nt, Human
gcugcccaggggagcccu

SEQ ID NO: 2165691 - RNA, 14 nt, Human
gcugccccaaccug

SEQ ID NO: 2165692 - RNA, 16 nt, Human
gcugccccaaccugcu

SEQ ID NO: 2165693 - RNA, 17 nt, Human
gcugccccaaccugcug

SEQ ID NO: 2165694 - RNA, 18 nt, Human
gcugccccaaccugcuga

SEQ ID NO: 2165695 - RNA, 20 nt, Human
gcugccccaaccugcugaag

SEQ ID NO: 2165696 - RNA, 19 nt, Human
gcugccccacagguguguu

SEQ ID NO: 2165697 - RNA, 12 nt, Human
gcugccccagcc

SEQ ID NO: 2165698 - RNA, 20 nt, Human
gcugccgccucccagccugg

SEQ ID NO: 2165699 - RNA, 19 nt, Human
gcugccgccucccagccug

SEQ ID NO: 2165700 - RNA, 18 nt, Human
gcugccgccucccagccu

SEQ ID NO: 2165701 - RNA, 16 nt, Human
gcugccgccucccagc

SEQ ID NO: 2165702 - RNA, 15 nt, Human
gcugccgccucccag

SEQ ID NO: 2165703 - RNA, 13 nt, Human
gcugccgccuccc

SEQ ID NO: 2165704 - RNA, 22 nt, Human
gcugccgcaccccagagugugg

SEQ ID NO: 2165705 - RNA, 18 nt, Human
gcugccgcaccccagagu

SEQ ID NO: 2165706 - RNA, 15 nt, Human
gcugccgcaccccag

SEQ ID NO: 2165707 - RNA, 16 nt, Human
gcugccuaaguggcug

SEQ ID NO: 2165708 - RNA, 17 nt, Human
gcugccuaaguggcugc

SEQ ID NO: 2165709 - RNA, 13 nt, Human
gcugccguggggc

SEQ ID NO: 2165710 - RNA, 22 nt, Human
gcugccguggggccgccgccuc

SEQ ID NO: 2165711 - RNA, 17 nt, Human
gcugccgccccacccag

SEQ ID NO: 2165712 - RNA, 18 nt, Human
gcugccuaaguggcugcu

SEQ ID NO: 2165713 - RNA, 11 nt, Human
gcugccugccu

SEQ ID NO: 2165714 - RNA, 13 nt, Human
gcugccugccugu

SEQ ID NO: 2165715 - RNA, 14 nt, Human
gcugccugccuguc

SEQ ID NO: 2165716 - RNA, 15 nt, Human
gcugccugccugucu

SEQ ID NO: 2165717 - RNA, 16 nt, Human
gcugccugccugucug

SEQ ID NO: 2165718 - RNA, 21 nt, Human
gcugccugcgcccaccccgcu

SEQ ID NO: 2165719 - RNA, 22 nt, Human
gcugccugcgcccaccccgcuc

SEQ ID NO: 2165720 - RNA, 22 nt, Human
gcugccugccgguaaacacgcc

SEQ ID NO: 2165721 - RNA, 22 nt, Human
gcugccugcccguaaacacgcc

SEQ ID NO: 2165722 - RNA, 13 nt, Human
gcugccugcccgu

SEQ ID NO: 2165723 - RNA, 17 nt, Human
gcugccugcccacacag

SEQ ID NO: 2165724 - RNA, 19 nt, Human
gcugccuggcccccagcug

SEQ ID NO: 2165725 - RNA, 21 nt, Human
gcugccugcuuuucacugcug

SEQ ID NO: 2165726 - RNA, 13 nt, Human
gcugccugggauc

SEQ ID NO: 2165727 - RNA, 18 nt, Human
gcugccugcccacacagg

SEQ ID NO: 2165728 - RNA, 15 nt, Human
gcugccugcccacac

SEQ ID NO: 2165729 - RNA, 14 nt, Human
gcugccugcccaca

SEQ ID NO: 2165730 - RNA, 16 nt, Human
gcuggacggcauuccu

SEQ ID NO: 2165731 - RNA, 14 nt, Human
gcuggacuacccac

SEQ ID NO: 2165732 - RNA, 19 nt, Human
gcuggacggggacugggga

SEQ ID NO: 2165733 - RNA, 21 nt, Human
gcuggacggggacuggggaug

SEQ ID NO: 2165734 - RNA, 13 nt, Human
gcuggacugaggc

SEQ ID NO: 2165735 - RNA, 14 nt, Human
gcuggacugaggcc

SEQ ID NO: 2165736 - RNA, 22 nt, Human
gcuggacucucagucucugagc

SEQ ID NO: 2165737 - RNA, 21 nt, Human
gcuggacucucagucucugag

SEQ ID NO: 2165738 - RNA, 14 nt, Human
gcuggagcucugcc

SEQ ID NO: 2165739 - RNA, 16 nt, Human
gcuggacugaggccug

SEQ ID NO: 2165740 - RNA, 17 nt, Human
gcuggacugaggccuga

SEQ ID NO: 2165741 - RNA, 18 nt, Human
gcuggacugaggccugag

SEQ ID NO: 2165742 - RNA, 19 nt, Human
gcuggacugaggccugagc

SEQ ID NO: 2165743 - RNA, 22 nt, Human
gcuggagcuggcgucugucuuc

SEQ ID NO: 2165744 - RNA, 12 nt, Human
gcuggagcuggc

SEQ ID NO: 2165745 - RNA, 21 nt, Human
gcuggaggacuagaaccugga

SEQ ID NO: 2165746 - RNA, 23 nt, Human
gcuggaggacuagaaccuggagg

SEQ ID NO: 2165747 - RNA, 17 nt, Human
gcuggagcucugcccau

SEQ ID NO: 2165748 - RNA, 12 nt, Human
gcuggagugcag

SEQ ID NO: 2165749 - RNA, 20 nt, Human
gcugggcacacgccucccac

SEQ ID NO: 2165750 - RNA, 22 nt, Human
gcugggcacacgccucccacug

SEQ ID NO: 2165751 - RNA, 19 nt, Human
gcugggauuacagguguga

SEQ ID NO: 2165752 - RNA, 17 nt, Human
gcugggauuacagggau

SEQ ID NO: 2165753 - RNA, 17 nt, Human
gcugggauuacaggugu

SEQ ID NO: 2165754 - RNA, 18 nt, Human
gcugggauuacaggugug

SEQ ID NO: 2165755 - RNA, 13 nt, Human
gcugggcagaagg

SEQ ID NO: 2165756 - RNA, 19 nt, Human
gcugggcagaaggccaaga

SEQ ID NO: 2165757 - RNA, 13 nt, Human
gcugggcagagga

SEQ ID NO: 2165758 - RNA, 14 nt, Human
gcugggcagaggaa

SEQ ID NO: 2165759 - RNA, 15 nt, Human
gcugggcagaggaaa

SEQ ID NO: 2165760 - RNA, 14 nt, Human
gcuggagugcagug

SEQ ID NO: 2165761 - RNA, 15 nt, Human
gcuggagugcaguga

SEQ ID NO: 2165762 - RNA, 16 nt, Human
gcuggccuggccccuc

SEQ ID NO: 2165763 - RNA, 17 nt, Human
gcuggccuggccccuca

SEQ ID NO: 2165764 - RNA, 16 nt, Human
gcugggauuacaggug

SEQ ID NO: 2165765 - RNA, 23 nt, Human
gcugggauuacaggcuccugcca

SEQ ID NO: 2165766 - RNA, 22 nt, Human
gcugggauuacaggcuccugcc

SEQ ID NO: 2165767 - RNA, 18 nt, Human
gcuggccuggccccucag

SEQ ID NO: 2165768 - RNA, 19 nt, Human
gcuggccuggccccucagg

SEQ ID NO: 2165769 - RNA, 14 nt, Human
gcugggcagcuguu

SEQ ID NO: 2165770 - RNA, 16 nt, Human
gcugggucgcccugga

SEQ ID NO: 2165771 - RNA, 17 nt, Human
gcugggucgcccuggac

SEQ ID NO: 2165772 - RNA, 18 nt, Human
gcugggucgcccuggacu

SEQ ID NO: 2165773 - RNA, 18 nt, Human
gcugggugcgaccccauc

SEQ ID NO: 2165774 - RNA, 14 nt, Human
gcuggguggcacug

SEQ ID NO: 2165775 - RNA, 15 nt, Human
gcuggguggcacugc

SEQ ID NO: 2165776 - RNA, 17 nt, Human
gcuggguggcacugcca

SEQ ID NO: 2165777 - RNA, 13 nt, Human
gcuggguggccca

SEQ ID NO: 2165778 - RNA, 14 nt, Human
gcuggguggcccau

SEQ ID NO: 2165779 - RNA, 19 nt, Human
gcugggucgcccuggacug

SEQ ID NO: 2165780 - RNA, 15 nt, Human
gcuggguguggcgca

SEQ ID NO: 2165781 - RNA, 17 nt, Human
gcugggugguacccucu

SEQ ID NO: 2165782 - RNA, 16 nt, Human
gcuggguucauuugug

SEQ ID NO: 2165783 - RNA, 16 nt, Human
gcuggguggcccaucc

SEQ ID NO: 2165784 - RNA, 20 nt, Human
gcuggguggcccaucccccc

SEQ ID NO: 2165785 - RNA, 21 nt, Human
gcuggguggcccauccccccu

SEQ ID NO: 2165786 - RNA, 22 nt, Human
gcuggguggcccauccccccuc

SEQ ID NO: 2165787 - RNA, 12 nt, Human
gcugggcagcug

SEQ ID NO: 2165788 - RNA, 13 nt, Human
gcugggcagcugu

SEQ ID NO: 2165789 - RNA, 12 nt, Human
gcugggcagcua

SEQ ID NO: 2165790 - RNA, 13 nt, Human
gcugggcagcuac

SEQ ID NO: 2165791 - RNA, 19 nt, Human
gcugggcagaggaaagcaa

SEQ ID NO: 2165792 - RNA, 16 nt, Human
gcugggcagaggaaag

SEQ ID NO: 2165793 - RNA, 17 nt, Human
gcugggcagaggaaagc

SEQ ID NO: 2165794 - RNA, 12 nt, Human
gcugggcucccu

SEQ ID NO: 2165795 - RNA, 16 nt, Human
gcugggcucccuuccc

SEQ ID NO: 2165796 - RNA, 17 nt, Human
gcugggcucccuuccca

SEQ ID NO: 2165797 - RNA, 20 nt, Human
gcugggcucccuucccaccu

SEQ ID NO: 2165798 - RNA, 22 nt, Human
ggagagcgccugccccucccag

SEQ ID NO: 2165799 - RNA, 20 nt, Human
ggagagcuagaacccggcag

SEQ ID NO: 2165800 - RNA, 20 nt, Human
ggagagcgccugccccuccc

SEQ ID NO: 2165801 - RNA, 18 nt, Human
ggagagcgccugccccuc

SEQ ID NO: 2165802 - RNA, 22 nt, Human
ggagagcuagaacccggcaggc

SEQ ID NO: 2165803 - RNA, 16 nt, Human
ggagagcuagaaccug

SEQ ID NO: 2165804 - RNA, 18 nt, Human
ggagagcuagaaccugga

SEQ ID NO: 2165805 - RNA, 19 nt, Human
ggagagcuagaaccuggag

SEQ ID NO: 2165806 - RNA, 15 nt, Human
ggagagcuagcagca

SEQ ID NO: 2165807 - RNA, 22 nt, Human
ggagagcuagaaccuggagggc

SEQ ID NO: 2165808 - RNA, 20 nt, Human
ggagagcuagaaccuggaga

SEQ ID NO: 2165809 - RNA, 22 nt, Human
ggagagcuagaaccuggagagc

SEQ ID NO: 2165810 - RNA, 20 nt, Human
ggagagcuagaaccuggagg

SEQ ID NO: 2165811 - RNA, 21 nt, Human
ggagagcuagaaccuggaggg

SEQ ID NO: 2165812 - RNA, 16 nt, Human
ggagagcgccugcccc

SEQ ID NO: 2165813 - RNA, 16 nt, Human
ggagagccugcuggca

SEQ ID NO: 2165814 - RNA, 13 nt, Human
ggagagccugcug

SEQ ID NO: 2165815 - RNA, 14 nt, Human
ggagagccugcugg

SEQ ID NO: 2165816 - RNA, 11 nt, Human
ggagagccugc

SEQ ID NO: 2165817 - RNA, 12 nt, Human
ggagagccugcu

SEQ ID NO: 2165818 - RNA, 22 nt, Human
ggagagccuuccagggguggga

SEQ ID NO: 2165819 - RNA, 17 nt, Human
ggagagccuuccagggg

SEQ ID NO: 2165820 - RNA, 18 nt, Human
ggagagccuuccaggggu

SEQ ID NO: 2165821 - RNA, 12 nt, Human
ggagagcccagc

SEQ ID NO: 2165822 - RNA, 11 nt, Human
ggagagcccag

SEQ ID NO: 2165823 - RNA, 21 nt, Human
ggagagccagcccucccuguc

SEQ ID NO: 2165824 - RNA, 18 nt, Human
ggagagccagcccucccu

SEQ ID NO: 2165825 - RNA, 23 nt, Human
ggagagccagcccucccuguccu

SEQ ID NO: 2165826 - RNA, 13 nt, Human
ggagagccuucca

SEQ ID NO: 2165827 - RNA, 16 nt, Human
ggagagccuuccaggg

SEQ ID NO: 2165828 - RNA, 14 nt, Human
ggagagaggggaau

SEQ ID NO: 2165829 - RNA, 12 nt, Human
ggagagagggga

SEQ ID NO: 2165830 - RNA, 17 nt, Human
ggagagaguugaaccua

SEQ ID NO: 2165831 - RNA, 20 nt, Human
ggagagaguugaaccuaaac

SEQ ID NO: 2165832 - RNA, 21 nt, Human
ggagagaggggaauaauagaa

SEQ ID NO: 2165833 - RNA, 11 nt, Human
ggagagcagcg

SEQ ID NO: 2165834 - RNA, 12 nt, Human
ggagagcaggcu

SEQ ID NO: 2165835 - RNA, 13 nt, Human
ggagagcaggcug

SEQ ID NO: 2165836 - RNA, 23 nt, Human
ggagagcaggcuggcagcucucc

SEQ ID NO: 2165837 - RNA, 14 nt, Human
ggagagcaggcugg

SEQ ID NO: 2165838 - RNA, 16 nt, Human
ggagagcaggcuggca

SEQ ID NO: 2165839 - RNA, 15 nt, Human
ggagagccagcccuc

SEQ ID NO: 2165840 - RNA, 14 nt, Human
ggagagccagcccu

SEQ ID NO: 2165841 - RNA, 12 nt, Human
ggagagccagcc

SEQ ID NO: 2165842 - RNA, 11 nt, Human
ggagagccagc

SEQ ID NO: 2165843 - RNA, 14 nt, Human
ggagagccagagaa

SEQ ID NO: 2165844 - RNA, 15 nt, Human
ggagagccagagaag

SEQ ID NO: 2165845 - RNA, 16 nt, Human
ggagagccagagaagu

SEQ ID NO: 2165846 - RNA, 21 nt, Human
ggagagccagagaagugacag

SEQ ID NO: 2165847 - RNA, 16 nt, Human
ggagagccagaaccug

SEQ ID NO: 2165848 - RNA, 22 nt, Human
ggagagccaccaagagggacgc

SEQ ID NO: 2165849 - RNA, 19 nt, Human
ggagagccagaaccuggag

SEQ ID NO: 2165850 - RNA, 20 nt, Human
ggagagccagaaccuggagg

SEQ ID NO: 2165851 - RNA, 21 nt, Human
ggagagccagaaccuggaggg

SEQ ID NO: 2165852 - RNA, 13 nt, Human
ggagagccagaga

SEQ ID NO: 2165853 - RNA, 14 nt, Human
ggagagagacucca

SEQ ID NO: 2165854 - RNA, 14 nt, Human
ggagagagaaagcc

SEQ ID NO: 2165855 - RNA, 17 nt, Human
ggagagagaaagccagg

SEQ ID NO: 2165856 - RNA, 18 nt, Human
ggagagagaaagccaggc

SEQ ID NO: 2165857 - RNA, 20 nt, Human
ggagagagaaagccaggcag

SEQ ID NO: 2165858 - RNA, 21 nt, Human
ggagagagaaagccaggcagg

SEQ ID NO: 2165859 - RNA, 19 nt, Human
ggagagagacguguacaua

SEQ ID NO: 2165860 - RNA, 19 nt, Human
ggagagagagagagagagg

SEQ ID NO: 2165861 - RNA, 22 nt, Human
ggagagagcagcuucugccacu

SEQ ID NO: 2165862 - RNA, 10 nt, Human
ggagagaggc

SEQ ID NO: 2165863 - RNA, 13 nt, Human
ggagagaggcaga

SEQ ID NO: 2165864 - RNA, 16 nt, Human
ggagagaggcagagag

SEQ ID NO: 2165865 - RNA, 18 nt, Human
ggagagaggcagagagcg

SEQ ID NO: 2165866 - RNA, 10 nt, Human
ggagagagaa

SEQ ID NO: 2165867 - RNA, 11 nt, Human
ggagagagaaa

SEQ ID NO: 2165868 - RNA, 12 nt, Human
ggagagagaaag

SEQ ID NO: 2165869 - RNA, 22 nt, Human
ggagacuuagggcaccaggggu

SEQ ID NO: 2165870 - RNA, 14 nt, Human
ggacuagccccugu

SEQ ID NO: 2165871 - RNA, 22 nt, Human
ggacuagccccuguggagacug

SEQ ID NO: 2165872 - RNA, 15 nt, Human
ggacuauagcccagg

SEQ ID NO: 2165873 - RNA, 16 nt, Human
ggacuaggguccuggg

SEQ ID NO: 2165874 - RNA, 22 nt, Human
ggacucaaugcacugacauugu

SEQ ID NO: 2165875 - RNA, 15 nt, Human
ggacucacuugccca

SEQ ID NO: 2165876 - RNA, 19 nt, Human
ggacucaauuucuccccag

SEQ ID NO: 2165877 - RNA, 20 nt, Human
ggacuauauuugggccugcu

SEQ ID NO: 2165878 - RNA, 13 nt, Human
ggacucagcccug

SEQ ID NO: 2165879 - RNA, 18 nt, Human
ggacucagaagccucugg

SEQ ID NO: 2165880 - RNA, 18 nt, Human
ggacucaauuucucccca

SEQ ID NO: 2165881 - RNA, 17 nt, Human
ggacucagaagccucug

SEQ ID NO: 2165882 - RNA, 21 nt, Human
ggacuagagggaccucuccca

SEQ ID NO: 2165883 - RNA, 19 nt, Human
ggacuagagggaccucucc

SEQ ID NO: 2165884 - RNA, 18 nt, Human
ggacuagagggaccucuc

SEQ ID NO: 2165885 - RNA, 14 nt, Human
ggacuagaaccugg

SEQ ID NO: 2165886 - RNA, 17 nt, Human
ggacuagaaccuggagg

SEQ ID NO: 2165887 - RNA, 21 nt, Human
ggaccucagaguccaggcccc

SEQ ID NO: 2165888 - RNA, 21 nt, Human
ggaccuauguccuaaggacac

SEQ ID NO: 2165889 - RNA, 16 nt, Human
ggaccucagcugcuuc

SEQ ID NO: 2165890 - RNA, 21 nt, Human
ggacuacguuaagggaaggaa

SEQ ID NO: 2165891 - RNA, 12 nt, Human
ggaccucaggcc

SEQ ID NO: 2165892 - RNA, 20 nt, Human
ggaccuaggauaucuucucc

SEQ ID NO: 2165893 - RNA, 19 nt, Human
ggaccucagaguccaggcc

SEQ ID NO: 2165894 - RNA, 17 nt, Human
ggaccuauguccuaagg

SEQ ID NO: 2165895 - RNA, 20 nt, Human
ggacuacaggugugagucac

SEQ ID NO: 2165896 - RNA, 23 nt, Human
ggacuguugacauccaagcuucc

SEQ ID NO: 2165897 - RNA, 15 nt, Human
ggacucagccuucag

SEQ ID NO: 2165898 - RNA, 23 nt, Human
ggacuguuuuuuccugagcuugg

SEQ ID NO: 2165899 - RNA, 21 nt, Human
ggacuguuuuuuccugagcuu

SEQ ID NO: 2165900 - RNA, 20 nt, Human
ggacuguuuuuuccugagcu

SEQ ID NO: 2165901 - RNA, 23 nt, Human
ggacugugugcucaggagcccug

SEQ ID NO: 2165902 - RNA, 17 nt, Human
ggacucagcccugaggu

SEQ ID NO: 2165903 - RNA, 16 nt, Human
ggacucagcccugagg

SEQ ID NO: 2165904 - RNA, 15 nt, Human
ggacucagcccugag

SEQ ID NO: 2165905 - RNA, 14 nt, Human
ggacucagcccuga

SEQ ID NO: 2165906 - RNA, 22 nt, Human
ggacugugugcucaggagcccu

SEQ ID NO: 2165907 - RNA, 17 nt, Human
ggacuuagcugggagaa

SEQ ID NO: 2165908 - RNA, 15 nt, Human
ggacuuagaaagcag

SEQ ID NO: 2165909 - RNA, 17 nt, Human
ggacuuagaaagcaggg

SEQ ID NO: 2165910 - RNA, 18 nt, Human
ggacuuagaaagcagggg

SEQ ID NO: 2165911 - RNA, 15 nt, Human
ggacuuaacggcucc

SEQ ID NO: 2165912 - RNA, 17 nt, Human
ggacuuaacggcuccag

SEQ ID NO: 2165913 - RNA, 19 nt, Human
ggacuuaacggcuccagga

SEQ ID NO: 2165914 - RNA, 20 nt, Human
ggacuuaacggcuccaggau

SEQ ID NO: 2165915 - RNA, 20 nt, Human
ggacuuagaaagcaggggcu

SEQ ID NO: 2165916 - RNA, 21 nt, Human
ggacuucacgaaguguugcau

SEQ ID NO: 2165917 - RNA, 11 nt, Human
ggacuuccugu

SEQ ID NO: 2165918 - RNA, 21 nt, Human
ggacuuccuguccagcuccaa

SEQ ID NO: 2165919 - RNA, 20 nt, Human
ggacuuccuguccagcucca

SEQ ID NO: 2165920 - RNA, 19 nt, Human
ggacuuccuguccagcucc

SEQ ID NO: 2165921 - RNA, 18 nt, Human
ggacuuccuguccagcuc

SEQ ID NO: 2165922 - RNA, 15 nt, Human
ggagaaccucaggcu

SEQ ID NO: 2165923 - RNA, 20 nt, Human
ggagaaccaaaucuggaagc

SEQ ID NO: 2165924 - RNA, 17 nt, Human
ggagaaccuugugccug

SEQ ID NO: 2165925 - RNA, 18 nt, Human
ggagaaccuugugccugg

SEQ ID NO: 2165926 - RNA, 18 nt, Human
ggagaacuagaaccugga

SEQ ID NO: 2165927 - RNA, 22 nt, Human
ggagaacuagaaccuggagggc

SEQ ID NO: 2165928 - RNA, 22 nt, Human
ggagaaccaaaaagaggcuaug

SEQ ID NO: 2165929 - RNA, 23 nt, Human
ggagaaaugcauccauuccucag

SEQ ID NO: 2165930 - RNA, 17 nt, Human
ggagaaauguuguucau

SEQ ID NO: 2165931 - RNA, 20 nt, Human
ggagaaaugcauccauuccu

SEQ ID NO: 2165932 - RNA, 14 nt, Human
ggagaaacagagac

SEQ ID NO: 2165933 - RNA, 15 nt, Human
ggagaaauugacaga

SEQ ID NO: 2165934 - RNA, 14 nt, Human
ggagaaauugacag

SEQ ID NO: 2165935 - RNA, 13 nt, Human
ggagaaacagaga

SEQ ID NO: 2165936 - RNA, 11 nt, Human
ggagaaacaca

SEQ ID NO: 2165937 - RNA, 20 nt, Human
ggagaaaauucaauuguaaa

SEQ ID NO: 2165938 - RNA, 18 nt, Human
ggagaaaugaaaaaauau

SEQ ID NO: 2165939 - RNA, 13 nt, Human
ggagaacuagaga

SEQ ID NO: 2165940 - RNA, 22 nt, Human
ggagacugcugagucaacccaa

SEQ ID NO: 2165941 - RNA, 14 nt, Human
ggagacugcuuccc

SEQ ID NO: 2165942 - RNA, 15 nt, Human
ggagacugcuuccca

SEQ ID NO: 2165943 - RNA, 20 nt, Human
ggagacugggcugagggagc

SEQ ID NO: 2165944 - RNA, 17 nt, Human
ggagacugggcugaggg

SEQ ID NO: 2165945 - RNA, 13 nt, Human
ggagacugggcug

SEQ ID NO: 2165946 - RNA, 18 nt, Human
ggagacugcuucccaucc

SEQ ID NO: 2165947 - RNA, 19 nt, Human
ggagacugcuucccauccu

SEQ ID NO: 2165948 - RNA, 16 nt, Human
ggagacugucucaaga

SEQ ID NO: 2165949 - RNA, 23 nt, Human
ggagacugggcugagggagccug

SEQ ID NO: 2165950 - RNA, 23 nt, Human
ggagacugcuucccauccuaccc

SEQ ID NO: 2165951 - RNA, 15 nt, Human
ggagacuggggggcu

SEQ ID NO: 2165952 - RNA, 18 nt, Human
ggagacuggggggcuuga

SEQ ID NO: 2165953 - RNA, 20 nt, Human
ggagacugguccugugugca

SEQ ID NO: 2165954 - RNA, 15 nt, Human
ggacuuggaagcucc

SEQ ID NO: 2165955 - RNA, 15 nt, Human
ggacuuccuugcucu

SEQ ID NO: 2165956 - RNA, 23 nt, Human
ggacuuccuguccagcuccaacc

SEQ ID NO: 2165957 - RNA, 18 nt, Human
ggacuuccuugcucuccc

SEQ ID NO: 2165958 - RNA, 14 nt, Human
ggacuuguauauuu

SEQ ID NO: 2165959 - RNA, 16 nt, Human
ggacuuggagguagcu

SEQ ID NO: 2165960 - RNA, 17 nt, Human
ggacuuggaagcuccgc

SEQ ID NO: 2165961 - RNA, 13 nt, Human
ggagaaaacacuu

SEQ ID NO: 2165962 - RNA, 12 nt, Human
ggagaaaaacaa

SEQ ID NO: 2165963 - RNA, 13 nt, Human
ggacuuuucugca

SEQ ID NO: 2165964 - RNA, 19 nt, Human
ggagaaaauggacguguua

SEQ ID NO: 2165965 - RNA, 18 nt, Human
ggacuuuuauuuccagug

SEQ ID NO: 2165966 - RNA, 16 nt, Human
ggacuugugucucugu

SEQ ID NO: 2165967 - RNA, 15 nt, Human
ggacuuguauauuug

SEQ ID NO: 2165968 - RNA, 19 nt, Human
ggacuuguauauuuguaca

SEQ ID NO: 2165969 - RNA, 20 nt, Human
ggacuuguauauuuguacaa

SEQ ID NO: 2165970 - RNA, 17 nt, Human
ggaccgguacagaaagg

SEQ ID NO: 2165971 - RNA, 17 nt, Human
ggaccuaaauggccuca

SEQ ID NO: 2165972 - RNA, 22 nt, Human
ggaccuaaauggccucaugugg

SEQ ID NO: 2165973 - RNA, 23 nt, Human
ggaccgccagauggggccucugu

SEQ ID NO: 2165974 - RNA, 23 nt, Human
ggaccgggccgcuagaugggcau

SEQ ID NO: 2165975 - RNA, 19 nt, Human
ggacccgcucuggaccaac

SEQ ID NO: 2165976 - RNA, 15 nt, Human
ggacccgcucuggac

SEQ ID NO: 2165977 - RNA, 17 nt, Human
ggacccgcucuggacca

SEQ ID NO: 2165978 - RNA, 19 nt, Human
ggacccugaggcccagagg

SEQ ID NO: 2165979 - RNA, 20 nt, Human
ggacccggaggggccuggca

SEQ ID NO: 2165980 - RNA, 21 nt, Human
ggacccggaggggccuggcag

SEQ ID NO: 2165981 - RNA, 14 nt, Human
ggacccugaggccc

SEQ ID NO: 2165982 - RNA, 15 nt, Human
ggacccugaggccca

SEQ ID NO: 2165983 - RNA, 18 nt, Human
ggacccugaggcccagag

SEQ ID NO: 2165984 - RNA, 13 nt, Human
ggaccccucaccu

SEQ ID NO: 2165985 - RNA, 16 nt, Human
ggaccccuccucccuu

SEQ ID NO: 2165986 - RNA, 21 nt, Human
ggaccccgagccuggcuccaa

SEQ ID NO: 2165987 - RNA, 13 nt, Human
ggaccccugcccu

SEQ ID NO: 2165988 - RNA, 14 nt, Human
ggacccgcucugga

SEQ ID NO: 2165989 - RNA, 18 nt, Human
ggaccccuggugguucac

SEQ ID NO: 2165990 - RNA, 18 nt, Human
ggaccccaucugugaaua

SEQ ID NO: 2165991 - RNA, 17 nt, Human
ggaccccaucugugaau

SEQ ID NO: 2165992 - RNA, 14 nt, Human
ggaccccaucugug

SEQ ID NO: 2165993 - RNA, 21 nt, Human
ggaccccagcugugagccuug

SEQ ID NO: 2165994 - RNA, 20 nt, Human
ggaccccaucugugaauaag

SEQ ID NO: 2165995 - RNA, 18 nt, Human
ggaccccagcugugagcc

SEQ ID NO: 2165996 - RNA, 13 nt, Human
ggacccccagcuu

SEQ ID NO: 2165997 - RNA, 18 nt, Human
ggaccccgagccuggcuc

SEQ ID NO: 2165998 - RNA, 12 nt, Human
ggaccccagcug

SEQ ID NO: 2165999 - RNA, 11 nt, Human
ggaccccagcu

SEQ ID NO: 2166000 - RNA, 13 nt, Human
ggaccccagcugg

SEQ ID NO: 2166001 - RNA, 14 nt, Human
ggaccccagcuggg

SEQ ID NO: 2166002 - RNA, 18 nt, Human
ggaccccagcugggaggc

SEQ ID NO: 2166003 - RNA, 20 nt, Human
ggaccccagcugggaggcaa

SEQ ID NO: 2166004 - RNA, 21 nt, Human
ggaccccagcugggaggcaag

SEQ ID NO: 2166005 - RNA, 23 nt, Human
gcuuggguguaacaggucuccuc

SEQ ID NO: 2166006 - RNA, 22 nt, Human
gcuuggguguaacaggucuccu

SEQ ID NO: 2166007 - RNA, 22 nt, Human
gcuugguggaugaaaugucagu

SEQ ID NO: 2166008 - RNA, 19 nt, Human
gcuuguacauaaugcgugc

SEQ ID NO: 2166009 - RNA, 18 nt, Human
ggagguguggagccgagg

SEQ ID NO: 2166010 - RNA, 21 nt, Human
ggagguuaaggcugaggaaag

SEQ ID NO: 2166011 - RNA, 19 nt, Human
ggagguuaaggcugaggaa

SEQ ID NO: 2166012 - RNA, 17 nt, Human
ggagguuaaggcugagg

SEQ ID NO: 2166013 - RNA, 21 nt, Human
ggagguguuuaaagagagguu

SEQ ID NO: 2166014 - RNA, 16 nt, Human
ggagguucucucggag

SEQ ID NO: 2166015 - RNA, 19 nt, Human
ggaggcugaggcaggagga

SEQ ID NO: 2166016 - RNA, 13 nt, Human
ggaggcugaggcg

SEQ ID NO: 2166017 - RNA, 19 nt, Human
ggaggugucaggcugcugg

SEQ ID NO: 2166018 - RNA, 18 nt, Human
ggaggucgaggcaggagg

SEQ ID NO: 2166019 - RNA, 14 nt, Human
ggagguugcaggga

SEQ ID NO: 2166020 - RNA, 12 nt, Human
ggagguugcagg

SEQ ID NO: 2166021 - RNA, 19 nt, Human
ggagguugaucagaucuga

SEQ ID NO: 2166022 - RNA, 12 nt, Human
ggagguugauaa

SEQ ID NO: 2166023 - RNA, 14 nt, Human
ggagguugaagcca

SEQ ID NO: 2166024 - RNA, 16 nt, Human
ggagguugaagccaag

SEQ ID NO: 2166025 - RNA, 20 nt, Human
ggagguugcagugagcugag

SEQ ID NO: 2166026 - RNA, 17 nt, Human
ggagguugcagggagcc

SEQ ID NO: 2166027 - RNA, 21 nt, Human
ggagguugcagugagcugaga

SEQ ID NO: 2166028 - RNA, 17 nt, Human
ggaggcugaggcaggag

SEQ ID NO: 2166029 - RNA, 18 nt, Human
ggaggcugaggcagaaga

SEQ ID NO: 2166030 - RNA, 16 nt, Human
ggaggcugaggcagaa

SEQ ID NO: 2166031 - RNA, 15 nt, Human
ggaggcugaggcaga

SEQ ID NO: 2166032 - RNA, 19 nt, Human
ggaggcugagacaggagaa

SEQ ID NO: 2166033 - RNA, 14 nt, Human
ggaggcugaggcag

SEQ ID NO: 2166034 - RNA, 12 nt, Human
ggaggcugaggc

SEQ ID NO: 2166035 - RNA, 15 nt, Human
ggaggcugagacagg

SEQ ID NO: 2166036 - RNA, 18 nt, Human
ggaggcugagacaggaga

SEQ ID NO: 2166037 - RNA, 16 nt, Human
ggaggucgaggcagga

SEQ ID NO: 2166038 - RNA, 15 nt, Human
ggaggucgaggcagg

SEQ ID NO: 2166039 - RNA, 21 nt, Human
ggaggcucuggagcccacugu

SEQ ID NO: 2166040 - RNA, 19 nt, Human
ggaggcccaguucacccug

SEQ ID NO: 2166041 - RNA, 15 nt, Human
ggaggccccaaagga

SEQ ID NO: 2166042 - RNA, 15 nt, Human
ggaggcucuggagcc

SEQ ID NO: 2166043 - RNA, 14 nt, Human
ggaggcugagacag

SEQ ID NO: 2166044 - RNA, 19 nt, Human
ggaggcugagaugggagaa

SEQ ID NO: 2166045 - RNA, 15 nt, Human
ggaggcugagauggg

SEQ ID NO: 2166046 - RNA, 15 nt, Human
ggagcuggccccgcc

SEQ ID NO: 2166047 - RNA, 16 nt, Human
ggagcuggccccgccg

SEQ ID NO: 2166048 - RNA, 21 nt, Human
ggagcuucucugaugugauau

SEQ ID NO: 2166049 - RNA, 15 nt, Human
ggagcuugggaaugg

SEQ ID NO: 2166050 - RNA, 20 nt, Human
ggagcuuucaaagaaggaau

SEQ ID NO: 2166051 - RNA, 12 nt, Human
ggagcuggcccc

SEQ ID NO: 2166052 - RNA, 23 nt, Human
ggagcugcuggcuugcagugcgc

SEQ ID NO: 2166053 - RNA, 15 nt, Human
ggagcugcuggcuug

SEQ ID NO: 2166054 - RNA, 13 nt, Human
ggagcugcuggcu

SEQ ID NO: 2166055 - RNA, 18 nt, Human
ggagcugcuauagccugg

SEQ ID NO: 2166056 - RNA, 19 nt, Human
ggagcugcuauagccuggg

SEQ ID NO: 2166057 - RNA, 24 nt, Human
ggagcugcucacuaccuccucagg

SEQ ID NO: 2166058 - RNA, 21 nt, Human
ggagcugccuuggcucagaca

SEQ ID NO: 2166059 - RNA, 18 nt, Human
ggagcugccuuggcucag

SEQ ID NO: 2166060 - RNA, 17 nt, Human
ggagcucuucaggccuc

SEQ ID NO: 2166061 - RNA, 19 nt, Human
ggagcuccucuccuggagg

SEQ ID NO: 2166062 - RNA, 20 nt, Human
ggagcuccucuccuggagga

SEQ ID NO: 2166063 - RNA, 13 nt, Human
ggagcuccucucc

SEQ ID NO: 2166064 - RNA, 17 nt, Human
ggagcuccucuccugga

SEQ ID NO: 2166065 - RNA, 18 nt, Human
ggagcuccucuccuggag

SEQ ID NO: 2166066 - RNA, 16 nt, Human
ggagcugaguggggga

SEQ ID NO: 2166067 - RNA, 20 nt, Human
ggagcucuucaggccucccu

SEQ ID NO: 2166068 - RNA, 18 nt, Human
ggagcucuucaggccucc

SEQ ID NO: 2166069 - RNA, 17 nt, Human
ggagcugccuuggcuca

SEQ ID NO: 2166070 - RNA, 21 nt, Human
ggagcuccucuccuggaggau

SEQ ID NO: 2166071 - RNA, 15 nt, Human
ggagcugaaaaauca

SEQ ID NO: 2166072 - RNA, 22 nt, Human
ggagcugccuguucagcuccag

SEQ ID NO: 2166073 - RNA, 13 nt, Human
ggagccccagggu

SEQ ID NO: 2166074 - RNA, 12 nt, Human
ggagccccaggg

SEQ ID NO: 2166075 - RNA, 13 nt, Human
ggagccccaggcc

SEQ ID NO: 2166076 - RNA, 14 nt, Human
ggagccccaggccu

SEQ ID NO: 2166077 - RNA, 20 nt, Human
ggagccccaggccucugugu

SEQ ID NO: 2166078 - RNA, 22 nt, Human
ggagccccaggccucugugucc

SEQ ID NO: 2166079 - RNA, 20 nt, Human
ggagccccagggucuucccu

SEQ ID NO: 2166080 - RNA, 14 nt, Human
ggagccccaggguc

SEQ ID NO: 2166081 - RNA, 14 nt, Human
ggagccccagugcc

SEQ ID NO: 2166082 - RNA, 16 nt, Human
ggagccccauuccugg

SEQ ID NO: 2166083 - RNA, 17 nt, Human
ggagccccauuccuggg

SEQ ID NO: 2166084 - RNA, 23 nt, Human
ggagccccaggccucuguguccu

SEQ ID NO: 2166085 - RNA, 20 nt, Human
ggagcuccacucugcuucuc

SEQ ID NO: 2166086 - RNA, 13 nt, Human
ggagccccagccc

SEQ ID NO: 2166087 - RNA, 12 nt, Human
ggagcccacugu

SEQ ID NO: 2166088 - RNA, 15 nt, Human
ggagccccagccccc

SEQ ID NO: 2166089 - RNA, 16 nt, Human
ggagccccagcccccu

SEQ ID NO: 2166090 - RNA, 20 nt, Human
ggagccccagcccccuuugg

SEQ ID NO: 2166091 - RNA, 17 nt, Human
ggagccccagcuacccu

SEQ ID NO: 2166092 - RNA, 18 nt, Human
ggagccccagcuacccuu

SEQ ID NO: 2166093 - RNA, 18 nt, Human
ggagcccacuguacuugc

SEQ ID NO: 2166094 - RNA, 22 nt, Human
ggagcccacuguacuugcucuu

SEQ ID NO: 2166095 - RNA, 18 nt, Human
ggagccaguaaacagagg

SEQ ID NO: 2166096 - RNA, 17 nt, Human
ggaggccauugugugag

SEQ ID NO: 2166097 - RNA, 13 nt, Human
ggaggcccaguuc

SEQ ID NO: 2166098 - RNA, 17 nt, Human
ggaggcucuggagccca

SEQ ID NO: 2166099 - RNA, 20 nt, Human
ggaggcucuggagcccacug

SEQ ID NO: 2166100 - RNA, 18 nt, Human
ggaggccaaggugggagg

SEQ ID NO: 2166101 - RNA, 17 nt, Human
ggaggcauggcccuggg

SEQ ID NO: 2166102 - RNA, 23 nt, Human
ggaggccaggccggcgagcccug

SEQ ID NO: 2166103 - RNA, 14 nt, Human
ggaggccaggccgg

SEQ ID NO: 2166104 - RNA, 13 nt, Human
ggaggccagccuu

SEQ ID NO: 2166105 - RNA, 19 nt, Human
ggaggaagcagguugaggg

SEQ ID NO: 2166106 - RNA, 11 nt, Human
ggaggaagccc

SEQ ID NO: 2166107 - RNA, 17 nt, Human
ggaggaagcagaauaaa

SEQ ID NO: 2166108 - RNA, 19 nt, Human
ggaggaagcagaauaaagc

SEQ ID NO: 2166109 - RNA, 20 nt, Human
ggaggaagcagaauaaagca

SEQ ID NO: 2166110 - RNA, 22 nt, Human
ggaggaagcagaauaaagcaau

SEQ ID NO: 2166111 - RNA, 12 nt, Human
ggaggaaagcaa

SEQ ID NO: 2166112 - RNA, 21 nt, Human
ggaggaagaagcuuaggcagg

SEQ ID NO: 2166113 - RNA, 11 nt, Human
ggaggaagcag

SEQ ID NO: 2166114 - RNA, 12 nt, Human
ggaggaagcaga

SEQ ID NO: 2166115 - RNA, 13 nt, Human
ggaggaagcagaa

SEQ ID NO: 2166116 - RNA, 14 nt, Human
ggaggaagcagaau

SEQ ID NO: 2166117 - RNA, 15 nt, Human
ggaggaagcagaaua

SEQ ID NO: 2166118 - RNA, 14 nt, Human
ggaggcaucugcac

SEQ ID NO: 2166119 - RNA, 15 nt, Human
ggaggcauggcccug

SEQ ID NO: 2166120 - RNA, 16 nt, Human
ggaggcauggcccugg

SEQ ID NO: 2166121 - RNA, 23 nt, Human
ggaggaagcagaauaaagcaauu

SEQ ID NO: 2166122 - RNA, 21 nt, Human
ggaggcaugugaugagaggaa

SEQ ID NO: 2166123 - RNA, 20 nt, Human
ggaggaaaaccaagccgugg

SEQ ID NO: 2166124 - RNA, 21 nt, Human
ggagcuuuuuuccuuaaucca

SEQ ID NO: 2166125 - RNA, 21 nt, Human
ggaggaaaaccaagccguggc

SEQ ID NO: 2166126 - RNA, 22 nt, Human
ggaggaaaaccaagccguggcu

SEQ ID NO: 2166127 - RNA, 18 nt, Human
ggaggaacacugcacucu

SEQ ID NO: 2166128 - RNA, 23 nt, Human
ggaggaaauuugaauggguccau

SEQ ID NO: 2166129 - RNA, 12 nt, Human
ggaggaagagaa

SEQ ID NO: 2166130 - RNA, 21 nt, Human
ggagcaggcggugggcaccca

SEQ ID NO: 2166131 - RNA, 15 nt, Human
ggagcaggggcgugg

SEQ ID NO: 2166132 - RNA, 14 nt, Human
ggagcagugcaggc

SEQ ID NO: 2166133 - RNA, 18 nt, Human
ggagcagugcaggcacag

SEQ ID NO: 2166134 - RNA, 18 nt, Human
ggagcaguaucaugaagc

SEQ ID NO: 2166135 - RNA, 12 nt, Human
ggagcagugucu

SEQ ID NO: 2166136 - RNA, 13 nt, Human
ggagccagggcug

SEQ ID NO: 2166137 - RNA, 22 nt, Human
ggagccaugcgcccccuccgcc

SEQ ID NO: 2166138 - RNA, 23 nt, Human
ggagccaugcgcccccuccgccc

SEQ ID NO: 2166139 - RNA, 15 nt, Human
ggagcccacuguacu

SEQ ID NO: 2166140 - RNA, 13 nt, Human
ggagcagccacau

SEQ ID NO: 2166141 - RNA, 12 nt, Human
ggagcagagggg

SEQ ID NO: 2166142 - RNA, 21 nt, Human
ggagcagccacauuccugaug

SEQ ID NO: 2166143 - RNA, 15 nt, Human
ggagcaggagauuga

SEQ ID NO: 2166144 - RNA, 13 nt, Human
ggagcagccucag

SEQ ID NO: 2166145 - RNA, 16 nt, Human
ggagcaggagauugag

SEQ ID NO: 2166146 - RNA, 21 nt, Human
ggagcaggagauugagaagga

SEQ ID NO: 2166147 - RNA, 22 nt, Human
ggagcaggagauugagaaggag

SEQ ID NO: 2166148 - RNA, 23 nt, Human
ggagcaggagauugagaaggaga

SEQ ID NO: 2166149 - RNA, 19 nt, Human
ggagcagagcaagucugca

SEQ ID NO: 2166150 - RNA, 15 nt, Human
ggagcagaccacccc

SEQ ID NO: 2166151 - RNA, 20 nt, Human
ggagcagacaggaggaauca

SEQ ID NO: 2166152 - RNA, 17 nt, Human
ggagcagagcucugccg

SEQ ID NO: 2166153 - RNA, 12 nt, Human
ggagcagaacug

SEQ ID NO: 2166154 - RNA, 13 nt, Human
ggagcagaaucag

SEQ ID NO: 2166155 - RNA, 16 nt, Human
ggagcagaacugaacc

SEQ ID NO: 2166156 - RNA, 23 nt, Human
ggagcagaaucaguauugggagc

SEQ ID NO: 2166157 - RNA, 14 nt, Human
ggccaggugcacag

SEQ ID NO: 2166158 - RNA, 14 nt, Human
ggccaggugcagug

SEQ ID NO: 2166159 - RNA, 23 nt, Human
ggccagggucacugaaggccugg

SEQ ID NO: 2166160 - RNA, 16 nt, Human
ggccagggugagagcu

SEQ ID NO: 2166161 - RNA, 21 nt, Human
ggccaggucccagcuugagcu

SEQ ID NO: 2166162 - RNA, 19 nt, Human
ggccagcccggcugguuuu

SEQ ID NO: 2166163 - RNA, 16 nt, Human
ggccagccuccgagag

SEQ ID NO: 2166164 - RNA, 19 nt, Human
ggccagccuccgagaggga

SEQ ID NO: 2166165 - RNA, 22 nt, Human
ggccagccuccgagagggagag

SEQ ID NO: 2166166 - RNA, 20 nt, Human
ggccagccuccgagagggag

SEQ ID NO: 2166167 - RNA, 17 nt, Human
ggccaggggucucccug

SEQ ID NO: 2166168 - RNA, 17 nt, Human
ggccagguuucugccca

SEQ ID NO: 2166169 - RNA, 23 nt, Human
ggccaggugggcgggcagcacag

SEQ ID NO: 2166170 - RNA, 20 nt, Human
ggccaguaagggaaauagaa

SEQ ID NO: 2166171 - RNA, 19 nt, Human
ggccagguggccacuccag

SEQ ID NO: 2166172 - RNA, 14 nt, Human
ggccaguccaggcu

SEQ ID NO: 2166173 - RNA, 16 nt, Human
ggccaguaccuuucca

SEQ ID NO: 2166174 - RNA, 18 nt, Human
ggccaguaccuuuccauu

SEQ ID NO: 2166175 - RNA, 15 nt, Human
ggccaguccaggcug

SEQ ID NO: 2166176 - RNA, 16 nt, Human
ggccaguccaggcugc

SEQ ID NO: 2166177 - RNA, 21 nt, Human
ggccaguaucuauauaugugu

SEQ ID NO: 2166178 - RNA, 21 nt, Human
ggccaguccaggcugccgugg

SEQ ID NO: 2166179 - RNA, 16 nt, Human
ggccaaggagggugag

SEQ ID NO: 2166180 - RNA, 16 nt, Human
ggccaaggagcugcua

SEQ ID NO: 2166181 - RNA, 16 nt, Human
ggccaaggccuucucc

SEQ ID NO: 2166182 - RNA, 18 nt, Human
ggccaaggccuucuccuc

SEQ ID NO: 2166183 - RNA, 19 nt, Human
ggccaaggccuucuccucc

SEQ ID NO: 2166184 - RNA, 16 nt, Human
ggccagaguggccugg

SEQ ID NO: 2166185 - RNA, 15 nt, Human
ggccagaguggccug

SEQ ID NO: 2166186 - RNA, 14 nt, Human
ggccagaguggccu

SEQ ID NO: 2166187 - RNA, 18 nt, Human
ggccaagugcaggcuggc

SEQ ID NO: 2166188 - RNA, 16 nt, Human
ggccaagugcaggcug

SEQ ID NO: 2166189 - RNA, 23 nt, Human
ggccagagggagugacagaggca

SEQ ID NO: 2166190 - RNA, 16 nt, Human
ggccaacccuucuccu

SEQ ID NO: 2166191 - RNA, 20 nt, Human
ggccaacccuucuccucuug

SEQ ID NO: 2166192 - RNA, 13 nt, Human
ggccaacauggua

SEQ ID NO: 2166193 - RNA, 18 nt, Human
ggccaacaccagggaugg

SEQ ID NO: 2166194 - RNA, 15 nt, Human
ggccaacaccaggga

SEQ ID NO: 2166195 - RNA, 12 nt, Human
ggccaacaaagc

SEQ ID NO: 2166196 - RNA, 15 nt, Human
ggccaacaaagcugu

SEQ ID NO: 2166197 - RNA, 16 nt, Human
ggccaacaaagcuguu

SEQ ID NO: 2166198 - RNA, 13 nt, Human
ggccaaaguguua

SEQ ID NO: 2166199 - RNA, 21 nt, Human
ggccaaauuauuuguguaaua

SEQ ID NO: 2166200 - RNA, 14 nt, Human
ggccaacaaagaac

SEQ ID NO: 2166201 - RNA, 13 nt, Human
ggccaagguggga

SEQ ID NO: 2166202 - RNA, 21 nt, Human
ggccaaggaugccccgucccc

SEQ ID NO: 2166203 - RNA, 15 nt, Human
ggccaaggagcugcu

SEQ ID NO: 2166204 - RNA, 14 nt, Human
ggccaaggagcugc

SEQ ID NO: 2166205 - RNA, 19 nt, Human
ggccaacaucgugaaaccc

SEQ ID NO: 2166206 - RNA, 21 nt, Human
ggccagccccucccaccacag

SEQ ID NO: 2166207 - RNA, 18 nt, Human
ggccagccccucccacca

SEQ ID NO: 2166208 - RNA, 23 nt, Human
ggccagccccucccaccacagca

SEQ ID NO: 2166209 - RNA, 14 nt, Human
ggccagcccggcug

SEQ ID NO: 2166210 - RNA, 15 nt, Human
ggccagcccggcugg

SEQ ID NO: 2166211 - RNA, 16 nt, Human
ggccagcccggcuggu

SEQ ID NO: 2166212 - RNA, 18 nt, Human
ggccagcccggcugguuu

SEQ ID NO: 2166213 - RNA, 16 nt, Human
ggccagccccucccac

SEQ ID NO: 2166214 - RNA, 15 nt, Human
ggccagccccuccca

SEQ ID NO: 2166215 - RNA, 14 nt, Human
ggccagccccuccc

SEQ ID NO: 2166216 - RNA, 20 nt, Human
ggccagccccggcccugggc

SEQ ID NO: 2166217 - RNA, 12 nt, Human
ggccagccccuc

SEQ ID NO: 2166218 - RNA, 17 nt, Human
ggccagccccggcccug

SEQ ID NO: 2166219 - RNA, 19 nt, Human
ggccagccccggcccuggg

SEQ ID NO: 2166220 - RNA, 19 nt, Human
ggccagaguauuggucucc

SEQ ID NO: 2166221 - RNA, 18 nt, Human
ggccagcaccaucucuuu

SEQ ID NO: 2166222 - RNA, 19 nt, Human
ggccagaguggccuggcca

SEQ ID NO: 2166223 - RNA, 18 nt, Human
ggccagaguggccuggcc

SEQ ID NO: 2166224 - RNA, 20 nt, Human
ggccagaguggccuggccag

SEQ ID NO: 2166225 - RNA, 12 nt, Human
ggccagauccag

SEQ ID NO: 2166226 - RNA, 17 nt, Human
ggccagaugcaccagcc

SEQ ID NO: 2166227 - RNA, 16 nt, Human
ggccagauccagccug

SEQ ID NO: 2166228 - RNA, 13 nt, Human
ggccagauccagc

SEQ ID NO: 2166229 - RNA, 19 nt, Human
ggccagaugcaccagcccu

SEQ ID NO: 2166230 - RNA, 20 nt, Human
ggccagaugcaccagcccuu

SEQ ID NO: 2166231 - RNA, 13 nt, Human
ggcauugcuuucc

SEQ ID NO: 2166232 - RNA, 18 nt, Human
ggcauuggcagcaggugc

SEQ ID NO: 2166233 - RNA, 12 nt, Human
ggcauugcuuuc

SEQ ID NO: 2166234 - RNA, 16 nt, Human
ggcauugauggggaag

SEQ ID NO: 2166235 - RNA, 19 nt, Human
ggcauugucccugugccua

SEQ ID NO: 2166236 - RNA, 19 nt, Human
ggcauuggcagcaggugcu

SEQ ID NO: 2166237 - RNA, 21 nt, Human
ggcauuggcagcaggugcugc

SEQ ID NO: 2166238 - RNA, 12 nt, Human
ggcauuguggga

SEQ ID NO: 2166239 - RNA, 22 nt, Human
ggccaaaggagggucaggaagg

SEQ ID NO: 2166240 - RNA, 21 nt, Human
ggccaaaggagggucaggaag

SEQ ID NO: 2166241 - RNA, 21 nt, Human
ggccaaaggaagcacaugccu

SEQ ID NO: 2166242 - RNA, 15 nt, Human
ggccaaagccaaagc

SEQ ID NO: 2166243 - RNA, 12 nt, Human
ggccaaaggaag

SEQ ID NO: 2166244 - RNA, 23 nt, Human
ggcauugauggggaaggaggcug

SEQ ID NO: 2166245 - RNA, 15 nt, Human
ggcauuccugcuuau

SEQ ID NO: 2166246 - RNA, 12 nt, Human
ggcauuccuucu

SEQ ID NO: 2166247 - RNA, 12 nt, Human
ggcauucucuga

SEQ ID NO: 2166248 - RNA, 16 nt, Human
ggccccaaaaccacag

SEQ ID NO: 2166249 - RNA, 21 nt, Human
ggccccaaaaccacagcccug

SEQ ID NO: 2166250 - RNA, 20 nt, Human
ggccccaaaaccacagcccu

SEQ ID NO: 2166251 - RNA, 24 nt, Human
ggcccauaucugugaaaugcuggc

SEQ ID NO: 2166252 - RNA, 16 nt, Human
ggcccaucaguguacc

SEQ ID NO: 2166253 - RNA, 22 nt, Human
ggcccaucaguguacccccgcc

SEQ ID NO: 2166254 - RNA, 13 nt, Human
ggcccaucccccc

SEQ ID NO: 2166255 - RNA, 19 nt, Human
ggcccauccccccucacca

SEQ ID NO: 2166256 - RNA, 16 nt, Human
ggcccauccccccuca

SEQ ID NO: 2166257 - RNA, 18 nt, Human
ggcccauccccccucacc

SEQ ID NO: 2166258 - RNA, 14 nt, Human
ggccccaccaccua

SEQ ID NO: 2166259 - RNA, 19 nt, Human
ggccccagccuggcccagc

SEQ ID NO: 2166260 - RNA, 15 nt, Human
ggccccaccaccuag

SEQ ID NO: 2166261 - RNA, 18 nt, Human
ggccccaggaaaggccca

SEQ ID NO: 2166262 - RNA, 20 nt, Human
ggccccagccuggcccagcu

SEQ ID NO: 2166263 - RNA, 21 nt, Human
ggccccagccuggcccagcuc

SEQ ID NO: 2166264 - RNA, 22 nt, Human
ggccccagccuggcccagcucc

SEQ ID NO: 2166265 - RNA, 23 nt, Human
ggccccagccuggcccagcuccc

SEQ ID NO: 2166266 - RNA, 18 nt, Human
ggccccagggcuacccuc

SEQ ID NO: 2166267 - RNA, 13 nt, Human
ggccccagucagc

SEQ ID NO: 2166268 - RNA, 15 nt, Human
ggccccagucagccu

SEQ ID NO: 2166269 - RNA, 17 nt, Human
ggccccagggcuacccu

SEQ ID NO: 2166270 - RNA, 22 nt, Human
ggccccaggcauugccaagggc

SEQ ID NO: 2166271 - RNA, 15 nt, Human
ggccccaggaagccg

SEQ ID NO: 2166272 - RNA, 14 nt, Human
ggccccaggaagcc

SEQ ID NO: 2166273 - RNA, 13 nt, Human
ggccccaggaagc

SEQ ID NO: 2166274 - RNA, 21 nt, Human
ggccccaggaccuggcugcca

SEQ ID NO: 2166275 - RNA, 16 nt, Human
ggccccaggaccuggc

SEQ ID NO: 2166276 - RNA, 15 nt, Human
ggcccgccuggcaga

SEQ ID NO: 2166277 - RNA, 16 nt, Human
ggcccgcacagagcug

SEQ ID NO: 2166278 - RNA, 23 nt, Human
ggcccgccuggcagaacugagcu

SEQ ID NO: 2166279 - RNA, 19 nt, Human
ggcccgccuggcagaacug

SEQ ID NO: 2166280 - RNA, 15 nt, Human
ggcccgacagccugg

SEQ ID NO: 2166281 - RNA, 16 nt, Human
ggcccgacagccuggc

SEQ ID NO: 2166282 - RNA, 17 nt, Human
ggcccgacagccuggca

SEQ ID NO: 2166283 - RNA, 16 nt, Human
ggccccagucagccuc

SEQ ID NO: 2166284 - RNA, 17 nt, Human
ggccccagucagccucu

SEQ ID NO: 2166285 - RNA, 21 nt, Human
ggccccagucagccucucucc

SEQ ID NO: 2166286 - RNA, 23 nt, Human
ggccccagucagccucucuccca

SEQ ID NO: 2166287 - RNA, 22 nt, Human
ggcccucccuguuccccagaga

SEQ ID NO: 2166288 - RNA, 21 nt, Human
ggcccucccuguuccccagag

SEQ ID NO: 2166289 - RNA, 20 nt, Human
ggcccucccuguuccccaga

SEQ ID NO: 2166290 - RNA, 19 nt, Human
ggcccucccuguuccccag

SEQ ID NO: 2166291 - RNA, 12 nt, Human
ggcccucccagu

SEQ ID NO: 2166292 - RNA, 13 nt, Human
ggcccgcuugccu

SEQ ID NO: 2166293 - RNA, 14 nt, Human
ggcccgcuugccuc

SEQ ID NO: 2166294 - RNA, 17 nt, Human
ggcccgcuugccucggc

SEQ ID NO: 2166295 - RNA, 19 nt, Human
ggcccgcuugccucggcuc

SEQ ID NO: 2166296 - RNA, 21 nt, Human
ggcccgcuugccucggcuccu

SEQ ID NO: 2166297 - RNA, 12 nt, Human
ggcccucagcau

SEQ ID NO: 2166298 - RNA, 20 nt, Human
ggcccucauuaaugacacuu

SEQ ID NO: 2166299 - RNA, 20 nt, Human
ggcccucagcauauuuguau

SEQ ID NO: 2166300 - RNA, 13 nt, Human
ggcccagccccca

SEQ ID NO: 2166301 - RNA, 16 nt, Human
ggcccagcccccacag

SEQ ID NO: 2166302 - RNA, 17 nt, Human
ggcccagcccccacagu

SEQ ID NO: 2166303 - RNA, 19 nt, Human
ggcccagcccccacagugc

SEQ ID NO: 2166304 - RNA, 16 nt, Human
ggcccagcgaccucgg

SEQ ID NO: 2166305 - RNA, 16 nt, Human
ggcccagcggccccuc

SEQ ID NO: 2166306 - RNA, 12 nt, Human
ggcccagccggc

SEQ ID NO: 2166307 - RNA, 16 nt, Human
ggcccagccggccucu

SEQ ID NO: 2166308 - RNA, 17 nt, Human
ggcccagccggccucuc

SEQ ID NO: 2166309 - RNA, 19 nt, Human
ggcccagccggccucucug

SEQ ID NO: 2166310 - RNA, 20 nt, Human
ggcccagccggccucucugg

SEQ ID NO: 2166311 - RNA, 21 nt, Human
ggcccagccggccucucuggc

SEQ ID NO: 2166312 - RNA, 22 nt, Human
ggcccagccggccucucuggcc

SEQ ID NO: 2166313 - RNA, 16 nt, Human
ggcccagcccugcugg

SEQ ID NO: 2166314 - RNA, 22 nt, Human
ggcccagcccugcuggccgccu

SEQ ID NO: 2166315 - RNA, 12 nt, Human
ggcccagcccug

SEQ ID NO: 2166316 - RNA, 13 nt, Human
ggcccagcccugc

SEQ ID NO: 2166317 - RNA, 14 nt, Human
ggcccagcccugcu

SEQ ID NO: 2166318 - RNA, 15 nt, Human
ggcccagcccugcug

SEQ ID NO: 2166319 - RNA, 21 nt, Human
ggcccagcccccacagugcug

SEQ ID NO: 2166320 - RNA, 11 nt, Human
ggcccagcccg

SEQ ID NO: 2166321 - RNA, 12 nt, Human
ggcccagcccgg

SEQ ID NO: 2166322 - RNA, 14 nt, Human
ggcccagcccggcu

SEQ ID NO: 2166323 - RNA, 15 nt, Human
ggcccagcccggcuc

SEQ ID NO: 2166324 - RNA, 16 nt, Human
ggcccagcccggcucc

SEQ ID NO: 2166325 - RNA, 19 nt, Human
ggcccagcccggcucccac

SEQ ID NO: 2166326 - RNA, 20 nt, Human
ggcccagggagaggccauga

SEQ ID NO: 2166327 - RNA, 23 nt, Human
ggcccagggacaccagccaggcu

SEQ ID NO: 2166328 - RNA, 19 nt, Human
ggcccagggacaccagcca

SEQ ID NO: 2166329 - RNA, 20 nt, Human
ggcccagggacaccagccag

SEQ ID NO: 2166330 - RNA, 10 nt, Human
ggcccaggga

SEQ ID NO: 2166331 - RNA, 17 nt, Human
ggcccagggacaccagc

SEQ ID NO: 2166332 - RNA, 14 nt, Human
ggcccagggcccag

SEQ ID NO: 2166333 - RNA, 15 nt, Human
ggcccaggcaggcca

SEQ ID NO: 2166334 - RNA, 13 nt, Human
ggcccaggccauc

SEQ ID NO: 2166335 - RNA, 13 nt, Human
ggccucccaaagu

SEQ ID NO: 2166336 - RNA, 16 nt, Human
ggccucccaaagugcu

SEQ ID NO: 2166337 - RNA, 13 nt, Human
ggccucccaacuc

SEQ ID NO: 2166338 - RNA, 14 nt, Human
ggccucccaacuca

SEQ ID NO: 2166339 - RNA, 18 nt, Human
ggcccuuccucuccacug

SEQ ID NO: 2166340 - RNA, 15 nt, Human
ggcccucccuuggaa

SEQ ID NO: 2166341 - RNA, 23 nt, Human
ggcccucccuuggaaaccugccc

SEQ ID NO: 2166342 - RNA, 23 nt, Human
ggcccucccuguuccccagagaa

SEQ ID NO: 2166343 - RNA, 14 nt, Human
ggcccucccaguac

SEQ ID NO: 2166344 - RNA, 13 nt, Human
ggcccucccuugg

SEQ ID NO: 2166345 - RNA, 19 nt, Human
ggcccuuccucuccacugc

SEQ ID NO: 2166346 - RNA, 22 nt, Human
ggcccuuccucuccacugccuu

SEQ ID NO: 2166347 - RNA, 23 nt, Human
ggcccuuccucuccacugccuuc

SEQ ID NO: 2166348 - RNA, 15 nt, Human
ggcccuccgacagcc

SEQ ID NO: 2166349 - RNA, 20 nt, Human
ggccuccggcgucagccucc

SEQ ID NO: 2166350 - RNA, 21 nt, Human
ggccuccggcgucagccucca

SEQ ID NO: 2166351 - RNA, 22 nt, Human
ggccuccggcgucagccuccag

SEQ ID NO: 2166352 - RNA, 23 nt, Human
ggccuccggcgucagccuccagc

SEQ ID NO: 2166353 - RNA, 23 nt, Human
ggccucccucucucuucugcucc

SEQ ID NO: 2166354 - RNA, 15 nt, Human
ggccucccucucucu

SEQ ID NO: 2166355 - RNA, 22 nt, Human
ggccuccccugccaccaggcca

SEQ ID NO: 2166356 - RNA, 14 nt, Human
ggccuccccugcug

SEQ ID NO: 2166357 - RNA, 14 nt, Human
ggccuccggccucc

SEQ ID NO: 2166358 - RNA, 16 nt, Human
ggccuccggccucccc

SEQ ID NO: 2166359 - RNA, 19 nt, Human
ggccuccggcgucagccuc

SEQ ID NO: 2166360 - RNA, 15 nt, Human
ggccuccccugcuga

SEQ ID NO: 2166361 - RNA, 14 nt, Human
ggccucccacccga

SEQ ID NO: 2166362 - RNA, 20 nt, Human
ggccucccacccgaugcugc

SEQ ID NO: 2166363 - RNA, 21 nt, Human
ggccucccacccgaugcugcu

SEQ ID NO: 2166364 - RNA, 23 nt, Human
ggccucccacccgaugcugcuuu

SEQ ID NO: 2166365 - RNA, 15 nt, Human
ggccuccccugccac

SEQ ID NO: 2166366 - RNA, 17 nt, Human
ggccuccccugccacca

SEQ ID NO: 2166367 - RNA, 19 nt, Human
ggccuccccugccaccagg

SEQ ID NO: 2166368 - RNA, 20 nt, Human
ggcaaccacaggcagcauuu

SEQ ID NO: 2166369 - RNA, 19 nt, Human
ggcaacauugcuggcugga

SEQ ID NO: 2166370 - RNA, 19 nt, Human
ggcaacagaucuggaaccu

SEQ ID NO: 2166371 - RNA, 14 nt, Human
ggcaacaucuuuau

SEQ ID NO: 2166372 - RNA, 19 nt, Human
ggcaacagagcaagauccu

SEQ ID NO: 2166373 - RNA, 15 nt, Human
ggcaacagaucugga

SEQ ID NO: 2166374 - RNA, 14 nt, Human
ggcaacagaucugg

SEQ ID NO: 2166375 - RNA, 21 nt, Human
ggcaaccacaggcagcauuua

SEQ ID NO: 2166376 - RNA, 16 nt, Human
ggcaaccccaguucug

SEQ ID NO: 2166377 - RNA, 17 nt, Human
ggcaaccccaguucugc

SEQ ID NO: 2166378 - RNA, 18 nt, Human
ggcaaccccaguucugcu

SEQ ID NO: 2166379 - RNA, 19 nt, Human
ggcaaccacuaagaauuca

SEQ ID NO: 2166380 - RNA, 16 nt, Human
ggcaaccacuaagaau

SEQ ID NO: 2166381 - RNA, 20 nt, Human
ggcaaccccaguucugcucc

SEQ ID NO: 2166382 - RNA, 21 nt, Human
ggcaaccccaguucugcuccu

SEQ ID NO: 2166383 - RNA, 20 nt, Human
ggcaaagguggcucuccagu

SEQ ID NO: 2166384 - RNA, 12 nt, Human
ggcaaauaaaag

SEQ ID NO: 2166385 - RNA, 16 nt, Human
ggcaaaucaguuacua

SEQ ID NO: 2166386 - RNA, 16 nt, Human
ggcaaauaucuugaaa

SEQ ID NO: 2166387 - RNA, 13 nt, Human
ggcaaaugacuuu

SEQ ID NO: 2166388 - RNA, 21 nt, Human
ggcaacacagcgagacuccgu

SEQ ID NO: 2166389 - RNA, 12 nt, Human
ggcaacagagca

SEQ ID NO: 2166390 - RNA, 20 nt, Human
ggcaacacagcgagacuccg

SEQ ID NO: 2166391 - RNA, 20 nt, Human
ggcaaauuaacuugaguuuu

SEQ ID NO: 2166392 - RNA, 16 nt, Human
ggcaaaugcccaaggg

SEQ ID NO: 2166393 - RNA, 13 nt, Human
ggcaaaugcccaa

SEQ ID NO: 2166394 - RNA, 16 nt, Human
ggcaaauuaacuugag

SEQ ID NO: 2166395 - RNA, 13 nt, Human
ggcaaacaggcag

SEQ ID NO: 2166396 - RNA, 23 nt, Human
ggcaaaaugagagggcaguguuu

SEQ ID NO: 2166397 - RNA, 23 nt, Human
ggcaaacaggcaguuggccagag

SEQ ID NO: 2166398 - RNA, 16 nt, Human
ggcaaagacagaagcc

SEQ ID NO: 2166399 - RNA, 17 nt, Human
ggcaaacuucagacuga

SEQ ID NO: 2166400 - RNA, 13 nt, Human
ggcaaacccauca

SEQ ID NO: 2166401 - RNA, 22 nt, Human
ggcaaagcacgaaauguuauuu

SEQ ID NO: 2166402 - RNA, 18 nt, Human
ggcaaagcuuuuagaaau

SEQ ID NO: 2166403 - RNA, 16 nt, Human
ggcaaaggaaggugga

SEQ ID NO: 2166404 - RNA, 17 nt, Human
ggcaaaggaagguggau

SEQ ID NO: 2166405 - RNA, 19 nt, Human
ggcaaaggaagguggaugg

SEQ ID NO: 2166406 - RNA, 20 nt, Human
ggcaaagggagcagaacuga

SEQ ID NO: 2166407 - RNA, 21 nt, Human
ggcaaagggagcagaacugaa

SEQ ID NO: 2166408 - RNA, 23 nt, Human
ggauguuucugucacaucagcuc

SEQ ID NO: 2166409 - RNA, 23 nt, Human
ggauguuuuaauuccaugaaucg

SEQ ID NO: 2166410 - RNA, 18 nt, Human
ggauguuuuucaugaaaa

SEQ ID NO: 2166411 - RNA, 23 nt, Human
ggauuaaacuuaaucuaaaugga

SEQ ID NO: 2166412 - RNA, 16 nt, Human
ggauuaauaugaaaac

SEQ ID NO: 2166413 - RNA, 15 nt, Human
ggauuaauaugaaaa

SEQ ID NO: 2166414 - RNA, 14 nt, Human
ggauuaauaugaaa

SEQ ID NO: 2166415 - RNA, 18 nt, Human
ggauuugaugcuguuuga

SEQ ID NO: 2166416 - RNA, 14 nt, Human
ggauuugccccuuc

SEQ ID NO: 2166417 - RNA, 22 nt, Human
ggauuugccccuucccaucucu

SEQ ID NO: 2166418 - RNA, 15 nt, Human
ggauuaaccucugca

SEQ ID NO: 2166419 - RNA, 16 nt, Human
ggauuaaccucugcac

SEQ ID NO: 2166420 - RNA, 17 nt, Human
ggauuaaccucugcacu

SEQ ID NO: 2166421 - RNA, 18 nt, Human
ggauuaaccucugcacua

SEQ ID NO: 2166422 - RNA, 21 nt, Human
ggauuuugauccaagcugguc

SEQ ID NO: 2166423 - RNA, 13 nt, Human
ggcaaaauugcaa

SEQ ID NO: 2166424 - RNA, 16 nt, Human
ggcaaaauccuugcuu

SEQ ID NO: 2166425 - RNA, 12 nt, Human
ggauuuugagua

SEQ ID NO: 2166426 - RNA, 16 nt, Human
ggauuuugucaagcag

SEQ ID NO: 2166427 - RNA, 16 nt, Human
ggauuuucaucagggg

SEQ ID NO: 2166428 - RNA, 22 nt, Human
ggauuuucuauuguuacucugg

SEQ ID NO: 2166429 - RNA, 19 nt, Human
ggauuuggguuggaaguga

SEQ ID NO: 2166430 - RNA, 22 nt, Human
ggauuuuaacaaaagcaagacu

SEQ ID NO: 2166431 - RNA, 21 nt, Human
ggaugacaugcacucagcucu

SEQ ID NO: 2166432 - RNA, 15 nt, Human
ggaugacaugucccu

SEQ ID NO: 2166433 - RNA, 20 nt, Human
ggaugacaugucccuacacc

SEQ ID NO: 2166434 - RNA, 16 nt, Human
ggaugacaugucccua

SEQ ID NO: 2166435 - RNA, 21 nt, Human
ggaugaauuccaaauucugcu

SEQ ID NO: 2166436 - RNA, 18 nt, Human
ggaugaaugaggucccag

SEQ ID NO: 2166437 - RNA, 14 nt, Human
ggaugaaugagguc

SEQ ID NO: 2166438 - RNA, 22 nt, Human
ggaugaaugaggucccaggcag

SEQ ID NO: 2166439 - RNA, 23 nt, Human
ggaugaauguaugugcacuguca

SEQ ID NO: 2166440 - RNA, 18 nt, Human
ggaugacuagaggcaggg

SEQ ID NO: 2166441 - RNA, 23 nt, Human
ggaugacgguauuaugcuucuug

SEQ ID NO: 2166442 - RNA, 21 nt, Human
ggaugagaauuugagugcucu

SEQ ID NO: 2166443 - RNA, 16 nt, Human
ggaugacaugugacuc

SEQ ID NO: 2166444 - RNA, 14 nt, Human
ggaugaccagaaca

SEQ ID NO: 2166445 - RNA, 22 nt, Human
ggaugacgguauuaugcuucuu

SEQ ID NO: 2166446 - RNA, 19 nt, Human
ggaugacuagaggcaggga

SEQ ID NO: 2166447 - RNA, 14 nt, Human
ggaugagagcccag

SEQ ID NO: 2166448 - RNA, 23 nt, Human
ggaugagaauuugagugcucuga

SEQ ID NO: 2166449 - RNA, 15 nt, Human
ggaugagagcccaga

SEQ ID NO: 2166450 - RNA, 16 nt, Human
ggaugagagcccagag

SEQ ID NO: 2166451 - RNA, 18 nt, Human
ggaugagagcccagaggu

SEQ ID NO: 2166452 - RNA, 19 nt, Human
ggaugagagcccagaggua

SEQ ID NO: 2166453 - RNA, 12 nt, Human
ggaugagaaagg

SEQ ID NO: 2166454 - RNA, 22 nt, Human
ggaugagaaagguugaagcacc

SEQ ID NO: 2166455 - RNA, 20 nt, Human
ggauguaaacagugccugcu

SEQ ID NO: 2166456 - RNA, 13 nt, Human
ggaugucuuccuu

SEQ ID NO: 2166457 - RNA, 14 nt, Human
ggaugucuuccuug

SEQ ID NO: 2166458 - RNA, 17 nt, Human
ggaugucuuccuuggag

SEQ ID NO: 2166459 - RNA, 21 nt, Human
ggauguaaacagugccugcug

SEQ ID NO: 2166460 - RNA, 19 nt, Human
ggauguaaacagugccugc

SEQ ID NO: 2166461 - RNA, 18 nt, Human
ggauguaaacagugccug

SEQ ID NO: 2166462 - RNA, 17 nt, Human
ggauguaaacagugccu

SEQ ID NO: 2166463 - RNA, 16 nt, Human
ggauguaaacagugcc

SEQ ID NO: 2166464 - RNA, 20 nt, Human
ggaugagagcccagagguaa

SEQ ID NO: 2166465 - RNA, 23 nt, Human
ggaugagagcccagagguaacag

SEQ ID NO: 2166466 - RNA, 15 nt, Human
ggaugguguucaaaa

SEQ ID NO: 2166467 - RNA, 22 nt, Human
ggaugguucccuugaugaagaa

SEQ ID NO: 2166468 - RNA, 23 nt, Human
ggaugguucccuugaugaagaag

SEQ ID NO: 2166469 - RNA, 15 nt, Human
ggauguucuggcccu

SEQ ID NO: 2166470 - RNA, 23 nt, Human
ggauguucagcacugucccuugc

SEQ ID NO: 2166471 - RNA, 13 nt, Human
ggaugugugcaug

SEQ ID NO: 2166472 - RNA, 20 nt, Human
ggauguucagcacugucccu

SEQ ID NO: 2166473 - RNA, 16 nt, Human
ggaugugguggcagug

SEQ ID NO: 2166474 - RNA, 23 nt, Human
ggaugugggagggagcagacagg

SEQ ID NO: 2166475 - RNA, 15 nt, Human
ggaugugggagggag

SEQ ID NO: 2166476 - RNA, 22 nt, Human
ggaugugggguccccaucaucc

SEQ ID NO: 2166477 - RNA, 17 nt, Human
ggauguggcugcagcag

SEQ ID NO: 2166478 - RNA, 23 nt, Human
ggauguggcugcagcagcggugg

SEQ ID NO: 2166479 - RNA, 18 nt, Human
ggaugugauuguggaaug

SEQ ID NO: 2166480 - RNA, 22 nt, Human
ggaugugaauugccugcagaga

SEQ ID NO: 2166481 - RNA, 16 nt, Human
ggcaggcuggcuggcc

SEQ ID NO: 2166482 - RNA, 20 nt, Human
ggcaggcuggccaguccagg

SEQ ID NO: 2166483 - RNA, 11 nt, Human
ggcaggcuggc

SEQ ID NO: 2166484 - RNA, 12 nt, Human
ggcaggcuggcc

SEQ ID NO: 2166485 - RNA, 13 nt, Human
ggcaggcuggcca

SEQ ID NO: 2166486 - RNA, 17 nt, Human
ggcaggcuggccagucc

SEQ ID NO: 2166487 - RNA, 13 nt, Human
ggcaggcccugca

SEQ ID NO: 2166488 - RNA, 14 nt, Human
ggcaggcccugcac

SEQ ID NO: 2166489 - RNA, 15 nt, Human
ggcaggcccugcacu

SEQ ID NO: 2166490 - RNA, 16 nt, Human
ggcaggcccugcacug

SEQ ID NO: 2166491 - RNA, 19 nt, Human
ggcaggcccugcacugucc

SEQ ID NO: 2166492 - RNA, 21 nt, Human
ggcaggcccugcacuguccug

SEQ ID NO: 2166493 - RNA, 10 nt, Human
ggcaggcagu

SEQ ID NO: 2166494 - RNA, 16 nt, Human
ggcaggcugacaucug

SEQ ID NO: 2166495 - RNA, 18 nt, Human
ggcaggcugacaucugug

SEQ ID NO: 2166496 - RNA, 15 nt, Human
ggcaggcucacugcc

SEQ ID NO: 2166497 - RNA, 16 nt, Human
ggcaggcucacugcca

SEQ ID NO: 2166498 - RNA, 19 nt, Human
ggcaggcucacugccaggc

SEQ ID NO: 2166499 - RNA, 22 nt, Human
ggcaggcucacugccaggccag

SEQ ID NO: 2166500 - RNA, 22 nt, Human
ggcaggcccugcacuguccugc

SEQ ID NO: 2166501 - RNA, 17 nt, Human
ggcaggcuaaggcgugg

SEQ ID NO: 2166502 - RNA, 21 nt, Human
ggcaggcuaaggcguggagcu

SEQ ID NO: 2166503 - RNA, 22 nt, Human
ggcaggcuaaggcguggagcug

SEQ ID NO: 2166504 - RNA, 18 nt, Human
ggcaggcuagaaccuggc

SEQ ID NO: 2166505 - RNA, 19 nt, Human
ggcaggcuagaaccuggca

SEQ ID NO: 2166506 - RNA, 13 nt, Human
ggcaggcucacug

SEQ ID NO: 2166507 - RNA, 16 nt, Human
ggcaggacucagcucc

SEQ ID NO: 2166508 - RNA, 21 nt, Human
ggcaggacucagcuccccaga

SEQ ID NO: 2166509 - RNA, 23 nt, Human
ggcaggacucagcuccccagagu

SEQ ID NO: 2166510 - RNA, 18 nt, Human
ggcaggcacagcacaggg

SEQ ID NO: 2166511 - RNA, 23 nt, Human
ggcaggaccuucgggcugugccc

SEQ ID NO: 2166512 - RNA, 21 nt, Human
ggcaggaccuucgggcugugc

SEQ ID NO: 2166513 - RNA, 15 nt, Human
ggcaggcagcgccaa

SEQ ID NO: 2166514 - RNA, 13 nt, Human
ggcaggcagcgcc

SEQ ID NO: 2166515 - RNA, 14 nt, Human
ggcaggcagcgcca

SEQ ID NO: 2166516 - RNA, 23 nt, Human
ggcaggacaugcugaagccaaag

SEQ ID NO: 2166517 - RNA, 21 nt, Human
ggcaggacaacgaggaagccc

SEQ ID NO: 2166518 - RNA, 20 nt, Human
ggcaggacaacgaggaagcc

SEQ ID NO: 2166519 - RNA, 21 nt, Human
ggcaggaccucagaguccagg

SEQ ID NO: 2166520 - RNA, 15 nt, Human
ggcaggaccucagag

SEQ ID NO: 2166521 - RNA, 14 nt, Human
ggcaggaccaggac

SEQ ID NO: 2166522 - RNA, 15 nt, Human
ggcaggaccaggacu

SEQ ID NO: 2166523 - RNA, 18 nt, Human
ggcaggacaacgaggaag

SEQ ID NO: 2166524 - RNA, 19 nt, Human
ggcaggacaacgaggaagc

SEQ ID NO: 2166525 - RNA, 22 nt, Human
ggcagccucccauccagggccc

SEQ ID NO: 2166526 - RNA, 21 nt, Human
ggcagccucccauccagggcc

SEQ ID NO: 2166527 - RNA, 14 nt, Human
ggcagccucccauc

SEQ ID NO: 2166528 - RNA, 22 nt, Human
ggcagccgugccuucagcucua

SEQ ID NO: 2166529 - RNA, 19 nt, Human
ggcagccgugccuucagcu

SEQ ID NO: 2166530 - RNA, 21 nt, Human
ggcagccgugccuucagcucu

SEQ ID NO: 2166531 - RNA, 18 nt, Human
ggcagccgugccuucagc

SEQ ID NO: 2166532 - RNA, 15 nt, Human
ggcagccaggcugcc

SEQ ID NO: 2166533 - RNA, 13 nt, Human
ggcagccaggcug

SEQ ID NO: 2166534 - RNA, 19 nt, Human
ggcagccaggcugccaagg

SEQ ID NO: 2166535 - RNA, 12 nt, Human
ggcagccaggcu

SEQ ID NO: 2166536 - RNA, 23 nt, Human
ggcagagauuggaaugggcagcu

SEQ ID NO: 2166537 - RNA, 14 nt, Human
ggcagccaggccac

SEQ ID NO: 2166538 - RNA, 10 nt, Human
ggcagagcag

SEQ ID NO: 2166539 - RNA, 15 nt, Human
ggcagccaggccaca

SEQ ID NO: 2166540 - RNA, 17 nt, Human
ggcagccaggccacaag

SEQ ID NO: 2166541 - RNA, 14 nt, Human
ggcacuuuuuaauu

SEQ ID NO: 2166542 - RNA, 22 nt, Human
ggcacuuugaaggggccucacc

SEQ ID NO: 2166543 - RNA, 22 nt, Human
ggcagaaagcaaaugugaccug

SEQ ID NO: 2166544 - RNA, 17 nt, Human
ggcagaaagcaaaauua

SEQ ID NO: 2166545 - RNA, 11 nt, Human
ggcagaaaauu

SEQ ID NO: 2166546 - RNA, 17 nt, Human
ggcagaaaauugcacaa

SEQ ID NO: 2166547 - RNA, 13 nt, Human
ggcagaacugagc

SEQ ID NO: 2166548 - RNA, 20 nt, Human
ggcagaacagccgcuccugu

SEQ ID NO: 2166549 - RNA, 18 nt, Human
ggcagaacagccgcuccu

SEQ ID NO: 2166550 - RNA, 14 nt, Human
ggcagaacagccgc

SEQ ID NO: 2166551 - RNA, 16 nt, Human
ggcagaaaguggccau

SEQ ID NO: 2166552 - RNA, 14 nt, Human
ggcagaaaguggcc

SEQ ID NO: 2166553 - RNA, 20 nt, Human
ggcagaaagguucugcccgg

SEQ ID NO: 2166554 - RNA, 22 nt, Human
ggcagaaagguucugcccggga

SEQ ID NO: 2166555 - RNA, 14 nt, Human
ggcagaacacuaac

SEQ ID NO: 2166556 - RNA, 15 nt, Human
ggcagaacacuaacc

SEQ ID NO: 2166557 - RNA, 20 nt, Human
ggcagaacacuaaccugacc

SEQ ID NO: 2166558 - RNA, 21 nt, Human
ggcagaacacuaaccugaccg

SEQ ID NO: 2166559 - RNA, 23 nt, Human
ggcagaagaauugaacccaggag

SEQ ID NO: 2166560 - RNA, 22 nt, Human
ggcagaagaauugaacccagga

SEQ ID NO: 2166561 - RNA, 12 nt, Human
ggcagaagacac

SEQ ID NO: 2166562 - RNA, 15 nt, Human
ggcagaagacaccag

SEQ ID NO: 2166563 - RNA, 17 nt, Human
ggcagaagaauugaacc

SEQ ID NO: 2166564 - RNA, 21 nt, Human
ggcagaacugagcuccucugg

SEQ ID NO: 2166565 - RNA, 15 nt, Human
ggcagaacugagcuc

SEQ ID NO: 2166566 - RNA, 14 nt, Human
ggcagaacugagcu

SEQ ID NO: 2166567 - RNA, 12 nt, Human
ggcagaaggaag

SEQ ID NO: 2166568 - RNA, 14 nt, Human
ggcagagaaucaua

SEQ ID NO: 2166569 - RNA, 9 nt, Human
ggcagagag

SEQ ID NO: 2166570 - RNA, 10 nt, Human
ggcagagagc

SEQ ID NO: 2166571 - RNA, 19 nt, Human
ggcagagagcggucucagg

SEQ ID NO: 2166572 - RNA, 14 nt, Human
ggcagacuggguuu

SEQ ID NO: 2166573 - RNA, 14 nt, Human
ggcagagaaagaag

SEQ ID NO: 2166574 - RNA, 17 nt, Human
ggcagagaaagaagaga

SEQ ID NO: 2166575 - RNA, 18 nt, Human
ggcagagaaagaagagac

SEQ ID NO: 2166576 - RNA, 21 nt, Human
ggcagagaaagaagagacagg

SEQ ID NO: 2166577 - RNA, 16 nt, Human
ggcagaaggccaagag

SEQ ID NO: 2166578 - RNA, 22 nt, Human
ggcagaagacaccagagcagau

SEQ ID NO: 2166579 - RNA, 15 nt, Human
ggcagaagggagaag

SEQ ID NO: 2166580 - RNA, 19 nt, Human
ggcagaauaaucuuugggu

SEQ ID NO: 2166581 - RNA, 17 nt, Human
ggcagaaggcaaaccca

SEQ ID NO: 2166582 - RNA, 20 nt, Human
ggcagaagacaccagagcag

SEQ ID NO: 2166583 - RNA, 21 nt, Human
ggcagaagacaccagagcaga

SEQ ID NO: 2166584 - RNA, 16 nt, Human
ggcagaagacaccaga

SEQ ID NO: 2166585 - RNA, 17 nt, Human
ggcagaagacaccagag

SEQ ID NO: 2166586 - RNA, 18 nt, Human
ggcagaagacaccagagc

SEQ ID NO: 2166587 - RNA, 19 nt, Human
ggcagaagacaccagagca

SEQ ID NO: 2166588 - RNA, 23 nt, Human
ggcugggacguggcucagccagc

SEQ ID NO: 2166589 - RNA, 19 nt, Human
ggcugggacguggcucagc

SEQ ID NO: 2166590 - RNA, 18 nt, Human
ggcugggacguggcucag

SEQ ID NO: 2166591 - RNA, 19 nt, Human
ggcugggaacucaccuggg

SEQ ID NO: 2166592 - RNA, 21 nt, Human
ggcugggaacugcagaccugu

SEQ ID NO: 2166593 - RNA, 23 nt, Human
ggcugggaacugcagaccugucc

SEQ ID NO: 2166594 - RNA, 17 nt, Human
ggcuggcuaacuggaag

SEQ ID NO: 2166595 - RNA, 20 nt, Human
ggcuggcggcuacucagcag

SEQ ID NO: 2166596 - RNA, 19 nt, Human
ggcuggcgcagccaaggcc

SEQ ID NO: 2166597 - RNA, 21 nt, Human
ggcuggcgcagccaaggccga

SEQ ID NO: 2166598 - RNA, 14 nt, Human
ggcuggccuuccug

SEQ ID NO: 2166599 - RNA, 14 nt, Human
ggcuggcgcagcca

SEQ ID NO: 2166600 - RNA, 16 nt, Human
ggcuggcgcagccaag

SEQ ID NO: 2166601 - RNA, 17 nt, Human
ggcuggcgcagccaagg

SEQ ID NO: 2166602 - RNA, 22 nt, Human
ggcuggcuccagaugcagggca

SEQ ID NO: 2166603 - RNA, 16 nt, Human
ggcuggcucccucuug

SEQ ID NO: 2166604 - RNA, 24 nt, Human
ggcuggcuccagaugcagggcagu

SEQ ID NO: 2166605 - RNA, 15 nt, Human
ggcuggcugcaguga

SEQ ID NO: 2166606 - RNA, 14 nt, Human
ggcuggcugcagug

SEQ ID NO: 2166607 - RNA, 13 nt, Human
ggcuggcugggca

SEQ ID NO: 2166608 - RNA, 12 nt, Human
ggcuggcugggg

SEQ ID NO: 2166609 - RNA, 13 nt, Human
ggcuggcuggggc

SEQ ID NO: 2166610 - RNA, 13 nt, Human
ggcuggcuucagg

SEQ ID NO: 2166611 - RNA, 16 nt, Human
ggcuggcuucaggagg

SEQ ID NO: 2166612 - RNA, 20 nt, Human
ggcugcccacacaccccaau

SEQ ID NO: 2166613 - RNA, 18 nt, Human
ggcugcccacuaugguca

SEQ ID NO: 2166614 - RNA, 19 nt, Human
ggcugccccaaccugcuga

SEQ ID NO: 2166615 - RNA, 19 nt, Human
ggcugcccccggcccccug

SEQ ID NO: 2166616 - RNA, 20 nt, Human
ggcugcccccggcccccugg

SEQ ID NO: 2166617 - RNA, 21 nt, Human
ggcugcccccggcccccuggu

SEQ ID NO: 2166618 - RNA, 17 nt, Human
ggcuggaucugugaggg

SEQ ID NO: 2166619 - RNA, 17 nt, Human
ggcugcccacacacccc

SEQ ID NO: 2166620 - RNA, 19 nt, Human
ggcugcccacacaccccaa

SEQ ID NO: 2166621 - RNA, 18 nt, Human
ggcugccaugugaagagg

SEQ ID NO: 2166622 - RNA, 15 nt, Human
ggcuggauguggugg

SEQ ID NO: 2166623 - RNA, 15 nt, Human
ggcuggaugaaauuu

SEQ ID NO: 2166624 - RNA, 19 nt, Human
ggcuggaugugguggcaua

SEQ ID NO: 2166625 - RNA, 18 nt, Human
ggcuggaugugguggcau

SEQ ID NO: 2166626 - RNA, 21 nt, Human
ggcuggauuuugaauuuucuu

SEQ ID NO: 2166627 - RNA, 13 nt, Human
ggcuggcacagga

SEQ ID NO: 2166628 - RNA, 19 nt, Human
ggcuggcaccgccuucucu

SEQ ID NO: 2166629 - RNA, 14 nt, Human
ggcuggcagcucuc

SEQ ID NO: 2166630 - RNA, 15 nt, Human
ggcuggcagcucucc

SEQ ID NO: 2166631 - RNA, 16 nt, Human
ggcuggcagcucucca

SEQ ID NO: 2166632 - RNA, 15 nt, Human
ggcuggcacaggaca

SEQ ID NO: 2166633 - RNA, 14 nt, Human
ggcuggcacaggac

SEQ ID NO: 2166634 - RNA, 18 nt, Human
ggcuggcagcucuccagu

SEQ ID NO: 2166635 - RNA, 20 nt, Human
ggcuggcagcucuccaguca

SEQ ID NO: 2166636 - RNA, 13 nt, Human
ggcuggcccagcc

SEQ ID NO: 2166637 - RNA, 14 nt, Human
ggcuggcccagccc

SEQ ID NO: 2166638 - RNA, 15 nt, Human
ggcuggcccagcccu

SEQ ID NO: 2166639 - RNA, 16 nt, Human
ggcuggcccagcccug

SEQ ID NO: 2166640 - RNA, 17 nt, Human
ggcuggcccagcccugc

SEQ ID NO: 2166641 - RNA, 18 nt, Human
ggcuggcccagcccugcu

SEQ ID NO: 2166642 - RNA, 14 nt, Human
ggcuggcgugcagu

SEQ ID NO: 2166643 - RNA, 16 nt, Human
ggcuggcccugcccug

SEQ ID NO: 2166644 - RNA, 21 nt, Human
ggcuggcccagcccugcuggc

SEQ ID NO: 2166645 - RNA, 13 nt, Human
ggcuggccuuccu

SEQ ID NO: 2166646 - RNA, 16 nt, Human
ggcuggcgugcagugg

SEQ ID NO: 2166647 - RNA, 20 nt, Human
ggcuggcgugcaguggugcg

SEQ ID NO: 2166648 - RNA, 15 nt, Human
ggcuggcccugcccu

SEQ ID NO: 2166649 - RNA, 14 nt, Human
ggcuggcccugccc

SEQ ID NO: 2166650 - RNA, 13 nt, Human
ggcuggcccugcc

SEQ ID NO: 2166651 - RNA, 19 nt, Human
ggcuggcccagcccugcug

SEQ ID NO: 2166652 - RNA, 20 nt, Human
ggcuggcccagcccugcugg

SEQ ID NO: 2166653 - RNA, 22 nt, Human
ggcuggcccagcccugcuggcc

SEQ ID NO: 2166654 - RNA, 17 nt, Human
ggcuggccuggccccuc

SEQ ID NO: 2166655 - RNA, 22 nt, Human
ggcuggccuggccccucagggu

SEQ ID NO: 2166656 - RNA, 9 nt, Human
ggcuccugc

SEQ ID NO: 2166657 - RNA, 12 nt, Human
ggcuccugccac

SEQ ID NO: 2166658 - RNA, 12 nt, Human
ggcuccugccag

SEQ ID NO: 2166659 - RNA, 13 nt, Human
ggcuccugccacc

SEQ ID NO: 2166660 - RNA, 12 nt, Human
ggcuccugaggg

SEQ ID NO: 2166661 - RNA, 12 nt, Human
ggcuccucucag

SEQ ID NO: 2166662 - RNA, 17 nt, Human
ggcuccucccggugccc

SEQ ID NO: 2166663 - RNA, 22 nt, Human
ggcuccgucaguaucaggccug

SEQ ID NO: 2166664 - RNA, 18 nt, Human
ggcuccgucaguaucagg

SEQ ID NO: 2166665 - RNA, 15 nt, Human
ggcuccgaacacccu

SEQ ID NO: 2166666 - RNA, 24 nt, Human
ggcuccgucaguaucaggccugcc

SEQ ID NO: 2166667 - RNA, 20 nt, Human
ggcuccuaucuguguuuuga

SEQ ID NO: 2166668 - RNA, 20 nt, Human
ggcucccuucccaccucucu

SEQ ID NO: 2166669 - RNA, 22 nt, Human
ggcucccuucccaccucucuca

SEQ ID NO: 2166670 - RNA, 16 nt, Human
ggcucccuucccaccu

SEQ ID NO: 2166671 - RNA, 17 nt, Human
ggcucccuucccaccuc

SEQ ID NO: 2166672 - RNA, 18 nt, Human
ggcucccuucccaccucu

SEQ ID NO: 2166673 - RNA, 20 nt, Human
ggcugaaagaggccaaugcc

SEQ ID NO: 2166674 - RNA, 16 nt, Human
ggcucuucuccccaga

SEQ ID NO: 2166675 - RNA, 22 nt, Human
ggcucuucucauuucaccccuc

SEQ ID NO: 2166676 - RNA, 13 nt, Human
ggcucuucucauu

SEQ ID NO: 2166677 - RNA, 20 nt, Human
ggcucuucucauuucacccc

SEQ ID NO: 2166678 - RNA, 20 nt, Human
ggcucuuccaggcugggaga

SEQ ID NO: 2166679 - RNA, 12 nt, Human
ggcucuucucau

SEQ ID NO: 2166680 - RNA, 20 nt, Human
ggcuccuuuuucucccucug

SEQ ID NO: 2166681 - RNA, 19 nt, Human
ggcucgauuuuguaucugc

SEQ ID NO: 2166682 - RNA, 23 nt, Human
ggcucuuccaggcugggagagcc

SEQ ID NO: 2166683 - RNA, 24 nt, Human
ggcucuuccaggcugggagagccu

SEQ ID NO: 2166684 - RNA, 21 nt, Human
ggcucgagcaguccugccuca

SEQ ID NO: 2166685 - RNA, 20 nt, Human
ggcucgaaucucugugccuu

SEQ ID NO: 2166686 - RNA, 18 nt, Human
ggcucgaaucucugugcc

SEQ ID NO: 2166687 - RNA, 19 nt, Human
ggcucgaaucucugugccu

SEQ ID NO: 2166688 - RNA, 18 nt, Human
ggcucgagcaugccugga

SEQ ID NO: 2166689 - RNA, 17 nt, Human
ggcuccugccuucuguc

SEQ ID NO: 2166690 - RNA, 12 nt, Human
ggcuccuuucuc

SEQ ID NO: 2166691 - RNA, 13 nt, Human
ggcuccuuucucc

SEQ ID NO: 2166692 - RNA, 17 nt, Human
ggcuccuuucuccagcc

SEQ ID NO: 2166693 - RNA, 19 nt, Human
ggcuccuuucuccagccag

SEQ ID NO: 2166694 - RNA, 13 nt, Human
ggcucgaaucucu

SEQ ID NO: 2166695 - RNA, 20 nt, Human
ggcuccuuucuccagccagc

SEQ ID NO: 2166696 - RNA, 21 nt, Human
ggcuccuuucuccagccagca

SEQ ID NO: 2166697 - RNA, 15 nt, Human
ggcucgaaucucugu

SEQ ID NO: 2166698 - RNA, 17 nt, Human
ggcucgaaucucugugc

SEQ ID NO: 2166699 - RNA, 17 nt, Human
ggcugcagggaguccga

SEQ ID NO: 2166700 - RNA, 21 nt, Human
ggcugaacacuccaauuaagg

SEQ ID NO: 2166701 - RNA, 14 nt, Human
ggcugaacccugug

SEQ ID NO: 2166702 - RNA, 15 nt, Human
ggcugaacccugugc

SEQ ID NO: 2166703 - RNA, 16 nt, Human
ggcugaacccugugcu

SEQ ID NO: 2166704 - RNA, 17 nt, Human
ggcugaacccugugcug

SEQ ID NO: 2166705 - RNA, 19 nt, Human
ggcugaacccugugcuggu

SEQ ID NO: 2166706 - RNA, 20 nt, Human
ggcugaacccugugcuggug

SEQ ID NO: 2166707 - RNA, 11 nt, Human
ggcugaaagcc

SEQ ID NO: 2166708 - RNA, 14 nt, Human
ggcugaaauucucc

SEQ ID NO: 2166709 - RNA, 16 nt, Human
ggcugaaauucuccug

SEQ ID NO: 2166710 - RNA, 17 nt, Human
ggcugaaauucuccugg

SEQ ID NO: 2166711 - RNA, 18 nt, Human
ggcugaaauucuccugga

SEQ ID NO: 2166712 - RNA, 19 nt, Human
ggcugaaauucuccuggag

SEQ ID NO: 2166713 - RNA, 21 nt, Human
ggcugaaauucuccuggaggu

SEQ ID NO: 2166714 - RNA, 22 nt, Human
ggcugaaauucuccuggagguc

SEQ ID NO: 2166715 - RNA, 22 nt, Human
ggcugcagugacgugcaccugu

SEQ ID NO: 2166716 - RNA, 20 nt, Human
ggcugaacggggagaaaagg

SEQ ID NO: 2166717 - RNA, 17 nt, Human
ggcugaacggggagaaa

SEQ ID NO: 2166718 - RNA, 15 nt, Human
ggcugaacggggaga

SEQ ID NO: 2166719 - RNA, 23 nt, Human
ggcugaacccugugcuggugucc

SEQ ID NO: 2166720 - RNA, 21 nt, Human
ggcugaacccugugcuggugu

SEQ ID NO: 2166721 - RNA, 22 nt, Human
ggcugaacccugugcugguguc

SEQ ID NO: 2166722 - RNA, 20 nt, Human
ggcugcaugcgggcuuccuc

SEQ ID NO: 2166723 - RNA, 13 nt, Human
ggcugccaccaag

SEQ ID NO: 2166724 - RNA, 23 nt, Human
ggcugcaucugggauucccacca

SEQ ID NO: 2166725 - RNA, 15 nt, Human
ggcugcagugagcca

SEQ ID NO: 2166726 - RNA, 22 nt, Human
ggcugcaugcgggcuuccuccu

SEQ ID NO: 2166727 - RNA, 12 nt, Human
aaaaaaaaaguu

SEQ ID NO: 2166728 - RNA, 13 nt, Human
aaaaaaaaaguuc

SEQ ID NO: 2166729 - RNA, 10 nt, Human
aaaaaaaaga

SEQ ID NO: 2166730 - RNA, 13 nt, Human
aaaaaaaaagaaa

SEQ ID NO: 2166731 - RNA, 13 nt, Human
aaaaaaacacaaa

SEQ ID NO: 2166732 - RNA, 11 nt, Human
aaaaaaaagaa

SEQ ID NO: 2166733 - RNA, 13 nt, Human
aaaaaaaauacuu

SEQ ID NO: 2166734 - RNA, 11 nt, Human
aaaaaaaaguu

SEQ ID NO: 2166735 - RNA, 12 nt, Human
aaaaaaaaguua

SEQ ID NO: 2166736 - RNA, 12 nt, Human
aaaaaaguuaua

SEQ ID NO: 2166737 - RNA, 13 nt, Human
aaaaaaguuauau

SEQ ID NO: 2166738 - RNA, 15 nt, Human
aaaaaaguuauauag

SEQ ID NO: 2166739 - RNA, 18 nt, Human
aaaaaaguuauauagguu

SEQ ID NO: 2166740 - RNA, 21 nt, Human
aaaaaagaggaaagaaugaaa

SEQ ID NO: 2166741 - RNA, 13 nt, Human
aaaaaagauauau

SEQ ID NO: 2166742 - RNA, 19 nt, Human
aaaaaaggacaauuucaaa

SEQ ID NO: 2166743 - RNA, 16 nt, Human
aaaaaaggcauuguuu

SEQ ID NO: 2166744 - RNA, 20 nt, Human
aaaaaauaaucuauuucuau

SEQ ID NO: 2166745 - RNA, 11 nt, Human
aaaaaauacug

SEQ ID NO: 2166746 - RNA, 14 nt, Human
aaaaaauacugcca

SEQ ID NO: 2166747 - RNA, 20 nt, Human
aaaaaaguuuacaaguguau

SEQ ID NO: 2166748 - RNA, 12 nt, Human
aaaaaaguuuua

SEQ ID NO: 2166749 - RNA, 16 nt, Human
aaaaaauaaaacauuu

SEQ ID NO: 2166750 - RNA, 11 nt, Human
aaaaaauacuu

SEQ ID NO: 2166751 - RNA, 16 nt, Human
aaaaaauacugccaga

SEQ ID NO: 2166752 - RNA, 20 nt, Human
aaaaaauacugccagaugcu

SEQ ID NO: 2166753 - RNA, 13 nt, Human
aaaaaauacuugu

SEQ ID NO: 2166754 - RNA, 13 nt, Human
aaaaagcuucccc

SEQ ID NO: 2166755 - RNA, 19 nt, Human
aaaaagcuuccaugauucu

SEQ ID NO: 2166756 - RNA, 19 nt, Human
aaaaaggaaaaaauuaaua

SEQ ID NO: 2166757 - RNA, 18 nt, Human
aaaaagcucauauuuugu

SEQ ID NO: 2166758 - RNA, 20 nt, Human
aaaaagcuccuguccuccca

SEQ ID NO: 2166759 - RNA, 19 nt, Human
aaaaagcucauauuuugua

SEQ ID NO: 2166760 - RNA, 20 nt, Human
aaaaagcuccaaaugcagcu

SEQ ID NO: 2166761 - RNA, 22 nt, Human
aaaaagggcagggcaucuccug

SEQ ID NO: 2166762 - RNA, 21 nt, Human
aaaaagggauccguacauuca

SEQ ID NO: 2166763 - RNA, 21 nt, Human
aaaaaguaaguaccacucagg

SEQ ID NO: 2166764 - RNA, 19 nt, Human
aaaaaguaggaaaugaaug

SEQ ID NO: 2166765 - RNA, 14 nt, Human
aaaaaguauuauuu

SEQ ID NO: 2166766 - RNA, 13 nt, Human
aaaaaguauuauu

SEQ ID NO: 2166767 - RNA, 19 nt, Human
aaaaaguauuauuuuccaa

SEQ ID NO: 2166768 - RNA, 15 nt, Human
aaaaaguauuauuuu

SEQ ID NO: 2166769 - RNA, 22 nt, Human
aaaaagucuacgcucuccuuuc

SEQ ID NO: 2166770 - RNA, 13 nt, Human
aaaaagugacaca

SEQ ID NO: 2166771 - RNA, 20 nt, Human
aaaaagucagacugcuggga

SEQ ID NO: 2166772 - RNA, 13 nt, Human
gggaaaagcagcu

SEQ ID NO: 2166773 - RNA, 16 nt, Human
ggcuuuuuuuuucucu

SEQ ID NO: 2166774 - RNA, 23 nt, Human
gggaaaaucagccugcuccagcu

SEQ ID NO: 2166775 - RNA, 18 nt, Human
gggaaaauuauuugcaua

SEQ ID NO: 2166776 - RNA, 17 nt, Human
gggaaaauuauuugcau

SEQ ID NO: 2166777 - RNA, 14 nt, Human
gggaaacuuggcuc

SEQ ID NO: 2166778 - RNA, 21 nt, Human
gggaaagacauccauaaagaa

SEQ ID NO: 2166779 - RNA, 13 nt, Human
gggaaaaucagcc

SEQ ID NO: 2166780 - RNA, 15 nt, Human
ggcuucucucucacc

SEQ ID NO: 2166781 - RNA, 16 nt, Human
ggcuucucucucacca

SEQ ID NO: 2166782 - RNA, 23 nt, Human
gggaaaaagaggaucuggagaac

SEQ ID NO: 2166783 - RNA, 17 nt, Human
ggcuuuuuuuuucucuu

SEQ ID NO: 2166784 - RNA, 20 nt, Human
ggcuucucauacguccacca

SEQ ID NO: 2166785 - RNA, 21 nt, Human
ggcuucucauacguccaccau

SEQ ID NO: 2166786 - RNA, 16 nt, Human
ggcuucuccgccagcc

SEQ ID NO: 2166787 - RNA, 17 nt, Human
ggcuucuccgccagccu

SEQ ID NO: 2166788 - RNA, 18 nt, Human
ggcuucuccgccagccuc

SEQ ID NO: 2166789 - RNA, 21 nt, Human
ggcuucuccgccagccuccuc

SEQ ID NO: 2166790 - RNA, 23 nt, Human
ggcuucuccgccagccuccucug

SEQ ID NO: 2166791 - RNA, 12 nt, Human
ggcuucuccuga

SEQ ID NO: 2166792 - RNA, 13 nt, Human
ggcuucuccugac

SEQ ID NO: 2166793 - RNA, 15 nt, Human
ggcuucuccugaccc

SEQ ID NO: 2166794 - RNA, 16 nt, Human
ggcuucuccugaccca

SEQ ID NO: 2166795 - RNA, 11 nt, Human
ggcuucucucu

SEQ ID NO: 2166796 - RNA, 12 nt, Human
ggcuucucucuc

SEQ ID NO: 2166797 - RNA, 13 nt, Human
ggcuucucucuca

SEQ ID NO: 2166798 - RNA, 21 nt, Human
ggcuuccagaaaaccccagca

SEQ ID NO: 2166799 - RNA, 22 nt, Human
ggcuuccaagguggucugcucg

SEQ ID NO: 2166800 - RNA, 13 nt, Human
ggcuuccagagag

SEQ ID NO: 2166801 - RNA, 14 nt, Human
ggcuuccagagagu

SEQ ID NO: 2166802 - RNA, 20 nt, Human
ggcuuccagagaguccucug

SEQ ID NO: 2166803 - RNA, 22 nt, Human
ggcuuccagagaguccucugga

SEQ ID NO: 2166804 - RNA, 12 nt, Human
ggcuuccaggua

SEQ ID NO: 2166805 - RNA, 18 nt, Human
ggcuucauuagagcaggc

SEQ ID NO: 2166806 - RNA, 16 nt, Human
ggcuucaugccagcua

SEQ ID NO: 2166807 - RNA, 14 nt, Human
ggcuucauucaagu

SEQ ID NO: 2166808 - RNA, 17 nt, Human
ggcuucauucaagucua

SEQ ID NO: 2166809 - RNA, 14 nt, Human
ggcuuccaaggugg

SEQ ID NO: 2166810 - RNA, 19 nt, Human
ggcuuccaagguggucugc

SEQ ID NO: 2166811 - RNA, 16 nt, Human
ggcuucaguggcagcu

SEQ ID NO: 2166812 - RNA, 18 nt, Human
ggcuucaggggagucccg

SEQ ID NO: 2166813 - RNA, 15 nt, Human
ggcuucaugccagcu

SEQ ID NO: 2166814 - RNA, 22 nt, Human
ggcuuccauuugugugugugca

SEQ ID NO: 2166815 - RNA, 18 nt, Human
ggcuuccauuugugugug

SEQ ID NO: 2166816 - RNA, 17 nt, Human
ggcuuccauuugugugu

SEQ ID NO: 2166817 - RNA, 21 nt, Human
ggcuuccagguaucuccagga

SEQ ID NO: 2166818 - RNA, 17 nt, Human
ggcuucccaguggcugc

SEQ ID NO: 2166819 - RNA, 21 nt, Human
ggcuuccucuagaagccaagg

SEQ ID NO: 2166820 - RNA, 19 nt, Human
ggcuucccaguggcugcug

SEQ ID NO: 2166821 - RNA, 20 nt, Human
ggcuucccaguggcugcugc

SEQ ID NO: 2166822 - RNA, 21 nt, Human
ggcuucccaguggcugcugcc

SEQ ID NO: 2166823 - RNA, 22 nt, Human
ggcuucccaguggcugcugccc

SEQ ID NO: 2166824 - RNA, 19 nt, Human
ggcuuccugcguccuccuc

SEQ ID NO: 2166825 - RNA, 20 nt, Human
ggcuuccugcguccuccuca

SEQ ID NO: 2166826 - RNA, 12 nt, Human
ggcuuccuuucu

SEQ ID NO: 2166827 - RNA, 23 nt, Human
aaaaaguguuuauuuuucauauu

SEQ ID NO: 2166828 - RNA, 12 nt, Human
aaaaaguuauau

SEQ ID NO: 2166829 - RNA, 17 nt, Human
aaaaaguuauauagguu

SEQ ID NO: 2166830 - RNA, 10 nt, Human
ggcuggugcc

SEQ ID NO: 2166831 - RNA, 15 nt, Human
ggcuggugccagccu

SEQ ID NO: 2166832 - RNA, 18 nt, Human
ggcuggugccagccuucc

SEQ ID NO: 2166833 - RNA, 14 nt, Human
ggcugguggcccag

SEQ ID NO: 2166834 - RNA, 13 nt, Human
ggcugguggccca

SEQ ID NO: 2166835 - RNA, 19 nt, Human
ggcuggugcuguggccagg

SEQ ID NO: 2166836 - RNA, 13 nt, Human
aaaaaguguuuau

SEQ ID NO: 2166837 - RNA, 12 nt, Human
aaaaaguguuua

SEQ ID NO: 2166838 - RNA, 14 nt, Human
aaaaagugacacag

SEQ ID NO: 2166839 - RNA, 15 nt, Human
aaaaagugacacagc

SEQ ID NO: 2166840 - RNA, 16 nt, Human
aaaaagugacacagca

SEQ ID NO: 2166841 - RNA, 17 nt, Human
aaaaagugacacagcag

SEQ ID NO: 2166842 - RNA, 19 nt, Human
aaaaagugacacagcagcu

SEQ ID NO: 2166843 - RNA, 20 nt, Human
aaaaagugacacagcagcuu

SEQ ID NO: 2166844 - RNA, 23 nt, Human
aaaaagugacacagcagcuucac

SEQ ID NO: 2166845 - RNA, 19 nt, Human
ggcuguaucccaugagccu

SEQ ID NO: 2166846 - RNA, 16 nt, Human
ggcuggugucaccuga

SEQ ID NO: 2166847 - RNA, 16 nt, Human
ggcugguggcccagga

SEQ ID NO: 2166848 - RNA, 21 nt, Human
ggcugguggcucccggagggc

SEQ ID NO: 2166849 - RNA, 13 nt, Human
ggcuggugggagg

SEQ ID NO: 2166850 - RNA, 17 nt, Human
ggcuggugggaggggcg

SEQ ID NO: 2166851 - RNA, 18 nt, Human
ggcugucaguaugacauu

SEQ ID NO: 2166852 - RNA, 18 nt, Human
ggcugucagcaggaagca

SEQ ID NO: 2166853 - RNA, 17 nt, Human
ggcugucagcaggaagc

SEQ ID NO: 2166854 - RNA, 16 nt, Human
ggcugucagcaggaag

SEQ ID NO: 2166855 - RNA, 15 nt, Human
ggcugucagcaggaa

SEQ ID NO: 2166856 - RNA, 11 nt, Human
ggcuguccagu

SEQ ID NO: 2166857 - RNA, 15 nt, Human
ggcuguccagugccc

SEQ ID NO: 2166858 - RNA, 17 nt, Human
ggcugucaucugugcac

SEQ ID NO: 2166859 - RNA, 14 nt, Human
ggcugucaucugug

SEQ ID NO: 2166860 - RNA, 20 nt, Human
ggcuucagcauauuuauagc

SEQ ID NO: 2166861 - RNA, 16 nt, Human
ggcuguccagugccca

SEQ ID NO: 2166862 - RNA, 19 nt, Human
ggcuguccagugcccauuc

SEQ ID NO: 2166863 - RNA, 15 nt, Human
ggcuucaguggcagc

SEQ ID NO: 2166864 - RNA, 20 nt, Human
ggcuguaucccaugagccuc

SEQ ID NO: 2166865 - RNA, 22 nt, Human
ggcuguaucccaugagccucag

SEQ ID NO: 2166866 - RNA, 23 nt, Human
ggcuguaucccaugagccucagc

SEQ ID NO: 2166867 - RNA, 15 nt, Human
ggcugucaauuacag

SEQ ID NO: 2166868 - RNA, 14 nt, Human
gggacuucuuuuca

SEQ ID NO: 2166869 - RNA, 13 nt, Human
gggacuugaaguu

SEQ ID NO: 2166870 - RNA, 12 nt, Human
gggacugugugu

SEQ ID NO: 2166871 - RNA, 15 nt, Human
gggacuuccuugcuc

SEQ ID NO: 2166872 - RNA, 19 nt, Human
gggacuuccuugcucuccc

SEQ ID NO: 2166873 - RNA, 20 nt, Human
gggacuuccuugcucucccu

SEQ ID NO: 2166874 - RNA, 21 nt, Human
gggacugucuuucagauacau

SEQ ID NO: 2166875 - RNA, 20 nt, Human
gggacuggggaugugggagg

SEQ ID NO: 2166876 - RNA, 12 nt, Human
gggacuggguuu

SEQ ID NO: 2166877 - RNA, 20 nt, Human
gggacuggguuuggacccca

SEQ ID NO: 2166878 - RNA, 21 nt, Human
gggacuggguuuggaccccag

SEQ ID NO: 2166879 - RNA, 17 nt, Human
gggacugggagggccca

SEQ ID NO: 2166880 - RNA, 15 nt, Human
gggacugggagggcc

SEQ ID NO: 2166881 - RNA, 14 nt, Human
gggacugggagggc

SEQ ID NO: 2166882 - RNA, 13 nt, Human
gggacugggaggg

SEQ ID NO: 2166883 - RNA, 15 nt, Human
gggacugcuaaauaa

SEQ ID NO: 2166884 - RNA, 19 nt, Human
gggacuggaaccagggaga

SEQ ID NO: 2166885 - RNA, 20 nt, Human
gggacugggagccgcagcag

SEQ ID NO: 2166886 - RNA, 16 nt, Human
gggacugcuaaauaaa

SEQ ID NO: 2166887 - RNA, 12 nt, Human
gggagagccagc

SEQ ID NO: 2166888 - RNA, 23 nt, Human
gggagagcaggcuggcagcucuc

SEQ ID NO: 2166889 - RNA, 15 nt, Human
gggagagcaggcugg

SEQ ID NO: 2166890 - RNA, 16 nt, Human
gggagagcaggcuggc

SEQ ID NO: 2166891 - RNA, 23 nt, Human
gggagagagagagagagaggaca

SEQ ID NO: 2166892 - RNA, 12 nt, Human
gggagagcaggc

SEQ ID NO: 2166893 - RNA, 13 nt, Human
gggagagcaggcu

SEQ ID NO: 2166894 - RNA, 14 nt, Human
gggagagcaggcug

SEQ ID NO: 2166895 - RNA, 11 nt, Human
gggaggcagag

SEQ ID NO: 2166896 - RNA, 12 nt, Human
gggagagagaga

SEQ ID NO: 2166897 - RNA, 18 nt, Human
gggagagagacguguaca

SEQ ID NO: 2166898 - RNA, 14 nt, Human
gggagagagagaga

SEQ ID NO: 2166899 - RNA, 22 nt, Human
gggagagagagagagagaggac

SEQ ID NO: 2166900 - RNA, 13 nt, Human
gggagagacccuu

SEQ ID NO: 2166901 - RNA, 12 nt, Human
gggagagaccuc

SEQ ID NO: 2166902 - RNA, 22 nt, Human
gggagagaccucaucaggauga

SEQ ID NO: 2166903 - RNA, 20 nt, Human
gggagacugggcugagggag

SEQ ID NO: 2166904 - RNA, 19 nt, Human
gggagacugggcugaggga

SEQ ID NO: 2166905 - RNA, 16 nt, Human
gggagacugggcugag

SEQ ID NO: 2166906 - RNA, 14 nt, Human
gggagacugggcug

SEQ ID NO: 2166907 - RNA, 20 nt, Human
gggaggcagagguugcagug

SEQ ID NO: 2166908 - RNA, 13 nt, Human
gggaggcagccgg

SEQ ID NO: 2166909 - RNA, 18 nt, Human
gggacuugaaucuuucca

SEQ ID NO: 2166910 - RNA, 16 nt, Human
gggaggcauggcccug

SEQ ID NO: 2166911 - RNA, 12 nt, Human
gggagagcccag

SEQ ID NO: 2166912 - RNA, 15 nt, Human
gggagagccagcucc

SEQ ID NO: 2166913 - RNA, 14 nt, Human
gggagagccagcuc

SEQ ID NO: 2166914 - RNA, 17 nt, Human
gggaggcauggcccugg

SEQ ID NO: 2166915 - RNA, 13 nt, Human
gggaggccaagga

SEQ ID NO: 2166916 - RNA, 13 nt, Human
gggagggcagcag

SEQ ID NO: 2166917 - RNA, 11 nt, Human
gggagggcagc

SEQ ID NO: 2166918 - RNA, 13 nt, Human
gggagggccuggg

SEQ ID NO: 2166919 - RNA, 21 nt, Human
gggagggcggcaggggccugg

SEQ ID NO: 2166920 - RNA, 22 nt, Human
gggagggcggcaggggccugga

SEQ ID NO: 2166921 - RNA, 11 nt, Human
gggagggcucc

SEQ ID NO: 2166922 - RNA, 13 nt, Human
gggagggcuccag

SEQ ID NO: 2166923 - RNA, 20 nt, Human
aaaagcuauggugagaugca

SEQ ID NO: 2166924 - RNA, 15 nt, Human
aaaagcuauuagcca

SEQ ID NO: 2166925 - RNA, 17 nt, Human
aaaagcuauuagccagg

SEQ ID NO: 2166926 - RNA, 14 nt, Human
aaaagcucauauuu

SEQ ID NO: 2166927 - RNA, 20 nt, Human
aaaagcuauuagccaggauc

SEQ ID NO: 2166928 - RNA, 21 nt, Human
aaaagcuauuagccaggauca

SEQ ID NO: 2166929 - RNA, 22 nt, Human
aaaagcuccauuuuuagugaaa

SEQ ID NO: 2166930 - RNA, 13 nt, Human
aaaagcugcucag

SEQ ID NO: 2166931 - RNA, 10 nt, Human
aaaagcugau

SEQ ID NO: 2166932 - RNA, 13 nt, Human
aaaagcuccuguc

SEQ ID NO: 2166933 - RNA, 20 nt, Human
aaaagcucuuacacuacauu

SEQ ID NO: 2166934 - RNA, 18 nt, Human
aaaagcucauauuuugua

SEQ ID NO: 2166935 - RNA, 12 nt, Human
aaaagcuccugu

SEQ ID NO: 2166936 - RNA, 14 nt, Human
aaaagcuuccauga

SEQ ID NO: 2166937 - RNA, 14 nt, Human
aaaagcugggcagg

SEQ ID NO: 2166938 - RNA, 17 nt, Human
aaaacuuguaaaugcug

SEQ ID NO: 2166939 - RNA, 19 nt, Human
aaaacuuuacuaagaugac

SEQ ID NO: 2166940 - RNA, 14 nt, Human
aaaacuuuccucgc

SEQ ID NO: 2166941 - RNA, 16 nt, Human
aaaacuuuccucgccu

SEQ ID NO: 2166942 - RNA, 20 nt, Human
aaaacuuuccucgccugaca

SEQ ID NO: 2166943 - RNA, 22 nt, Human
aaaacuugauguguuaucucuu

SEQ ID NO: 2166944 - RNA, 21 nt, Human
aaaacuuuaugcuaagugaaa

SEQ ID NO: 2166945 - RNA, 20 nt, Human
aaaacuuuacuaagaugaca

SEQ ID NO: 2166946 - RNA, 19 nt, Human
aaaagccugcaauuucaua

SEQ ID NO: 2166947 - RNA, 16 nt, Human
aaaagccuguuuaaga

SEQ ID NO: 2166948 - RNA, 18 nt, Human
aaaagccuguuuaagaga

SEQ ID NO: 2166949 - RNA, 20 nt, Human
aaaaaucugcagaaggaaaa

SEQ ID NO: 2166950 - RNA, 18 nt, Human
aaaaaucugcagaaggaa

SEQ ID NO: 2166951 - RNA, 18 nt, Human
gggaacagacaggagaaa

SEQ ID NO: 2166952 - RNA, 22 nt, Human
aaaaaucugaccaaaacaaaca

SEQ ID NO: 2166953 - RNA, 15 nt, Human
aaaaaugauguucau

SEQ ID NO: 2166954 - RNA, 18 nt, Human
aaaaaugcaaauccuaug

SEQ ID NO: 2166955 - RNA, 20 nt, Human
aaaaaugcaaauccuaugug

SEQ ID NO: 2166956 - RNA, 20 nt, Human
aaaaaugacuaaaaauauua

SEQ ID NO: 2166957 - RNA, 17 nt, Human
aaaaaugacagauguug

SEQ ID NO: 2166958 - RNA, 14 nt, Human
aaaaaugaaauuau

SEQ ID NO: 2166959 - RNA, 12 nt, Human
aaaaaugaaagc

SEQ ID NO: 2166960 - RNA, 18 nt, Human
aaaaaugcccuuaaauca

SEQ ID NO: 2166961 - RNA, 23 nt, Human
aaaaaugcaaauccuaugugauu

SEQ ID NO: 2166962 - RNA, 22 nt, Human
aaaaaugcaaauccuaugugau

SEQ ID NO: 2166963 - RNA, 21 nt, Human
aaaaaugcacguagcugaggc

SEQ ID NO: 2166964 - RNA, 22 nt, Human
aaaaaugucuuggguaggcggg

SEQ ID NO: 2166965 - RNA, 12 nt, Human
aaaaaugccuuu

SEQ ID NO: 2166966 - RNA, 13 nt, Human
aaaaaugccuuug

SEQ ID NO: 2166967 - RNA, 18 nt, Human
aaaaaugugcaaaacagc

SEQ ID NO: 2166968 - RNA, 12 nt, Human
aaaaauguguaa

SEQ ID NO: 2166969 - RNA, 20 nt, Human
aaaaauguuaaaauguauuc

SEQ ID NO: 2166970 - RNA, 12 nt, Human
aaaaauuaaaau

SEQ ID NO: 2166971 - RNA, 16 nt, Human
aaaaauguuggauuua

SEQ ID NO: 2166972 - RNA, 20 nt, Human
aaaaauguuggauuuauaaa

SEQ ID NO: 2166973 - RNA, 14 nt, Human
gggaacagacugga

SEQ ID NO: 2166974 - RNA, 19 nt, Human
gggaacagacaacagaagu

SEQ ID NO: 2166975 - RNA, 19 nt, Human
gggaacaaggguggcaucc

SEQ ID NO: 2166976 - RNA, 14 nt, Human
gggaaauggugccu

SEQ ID NO: 2166977 - RNA, 14 nt, Human
gggaaauaagagag

SEQ ID NO: 2166978 - RNA, 17 nt, Human
gggaaauacuacuccug

SEQ ID NO: 2166979 - RNA, 13 nt, Human
gggaaaggggugc

SEQ ID NO: 2166980 - RNA, 22 nt, Human
gggaaaggcucugaaagccagc

SEQ ID NO: 2166981 - RNA, 15 nt, Human
gggaaaggauauuuu

SEQ ID NO: 2166982 - RNA, 15 nt, Human
gggaaagccaccucu

SEQ ID NO: 2166983 - RNA, 19 nt, Human
gggaaagccagugacucca

SEQ ID NO: 2166984 - RNA, 22 nt, Human
gggaaagccagugacuccagga

SEQ ID NO: 2166985 - RNA, 16 nt, Human
gggaacagacaggaga

SEQ ID NO: 2166986 - RNA, 15 nt, Human
gggaacagacaggag

SEQ ID NO: 2166987 - RNA, 14 nt, Human
gggaacagacagga

SEQ ID NO: 2166988 - RNA, 17 nt, Human
aaaaaucucaaauuucu

SEQ ID NO: 2166989 - RNA, 22 nt, Human
gggaacagacuggaagcacagc

SEQ ID NO: 2166990 - RNA, 20 nt, Human
aaaaaucucaaauuucuaaa

SEQ ID NO: 2166991 - RNA, 19 nt, Human
aaaaaucucaaauuucuaa

SEQ ID NO: 2166992 - RNA, 19 nt, Human
aaaacauuuucacacaaua

SEQ ID NO: 2166993 - RNA, 21 nt, Human
aaaacauuuuuuaauagaaua

SEQ ID NO: 2166994 - RNA, 16 nt, Human
aaaacauuuuaaaugg

SEQ ID NO: 2166995 - RNA, 17 nt, Human
aaaacauuuuaaaugga

SEQ ID NO: 2166996 - RNA, 13 nt, Human
aaaaauuagcuga

SEQ ID NO: 2166997 - RNA, 22 nt, Human
aaaaauguuggauuuauaaaug

SEQ ID NO: 2166998 - RNA, 15 nt, Human
aaaaccaauguucuc

SEQ ID NO: 2166999 - RNA, 14 nt, Human
aaaaccaagaagau

SEQ ID NO: 2167000 - RNA, 13 nt, Human
aaaaccaaagagg

SEQ ID NO: 2167001 - RNA, 22 nt, Human
aaaaccaaagagggcuuccucu

SEQ ID NO: 2167002 - RNA, 19 nt, Human
aaaacauuuuaaauggaca

SEQ ID NO: 2167003 - RNA, 14 nt, Human
aaaacguggcugcu

SEQ ID NO: 2167004 - RNA, 16 nt, Human
aaaacguggcugcuuc

SEQ ID NO: 2167005 - RNA, 17 nt, Human
aaaacguggcugcuuca

SEQ ID NO: 2167006 - RNA, 18 nt, Human
aaaacguggcugcuucaa

SEQ ID NO: 2167007 - RNA, 21 nt, Human
aaaacuacaaaucaaguauuu

SEQ ID NO: 2167008 - RNA, 18 nt, Human
aaaacuaaauagcaugua

SEQ ID NO: 2167009 - RNA, 19 nt, Human
aaaacuaaauagcauguau

SEQ ID NO: 2167010 - RNA, 22 nt, Human
aaaacuaaauagcauguauugu

SEQ ID NO: 2167011 - RNA, 18 nt, Human
aaaacuaaaucucuaaua

SEQ ID NO: 2167012 - RNA, 19 nt, Human
aaaacuaaaucucuaauau

SEQ ID NO: 2167013 - RNA, 19 nt, Human
aaaacguuuuauuguguuu

SEQ ID NO: 2167014 - RNA, 17 nt, Human
aaaacguuuuauugugu

SEQ ID NO: 2167015 - RNA, 16 nt, Human
aaaacguuuuauugug

SEQ ID NO: 2167016 - RNA, 15 nt, Human
aaaacguuuuauugu

SEQ ID NO: 2167017 - RNA, 19 nt, Human
aaaaccaagccguggcuuc

SEQ ID NO: 2167018 - RNA, 21 nt, Human
aaaacguggcugcuucaagga

SEQ ID NO: 2167019 - RNA, 19 nt, Human
aaaacugcguuaaaggcuc

SEQ ID NO: 2167020 - RNA, 19 nt, Human
aaaacugcucauaugaugu

SEQ ID NO: 2167021 - RNA, 18 nt, Human
aaaacugauuuuuuuuuc

SEQ ID NO: 2167022 - RNA, 22 nt, Human
aaaacugauuuuuuuuuccuuc

SEQ ID NO: 2167023 - RNA, 14 nt, Human
aaaauacaaaauua

SEQ ID NO: 2167024 - RNA, 14 nt, Human
aaaauaccagccag

SEQ ID NO: 2167025 - RNA, 21 nt, Human
aaaauaauuuuuauauuugaa

SEQ ID NO: 2167026 - RNA, 23 nt, Human
aaaauaauuuuuauauuugaaau

SEQ ID NO: 2167027 - RNA, 15 nt, Human
aaaauacuauucuga

SEQ ID NO: 2167028 - RNA, 22 nt, Human
aaaauagcaacacucuauauuu

SEQ ID NO: 2167029 - RNA, 21 nt, Human
aaaauagcaacacucuauauu

SEQ ID NO: 2167030 - RNA, 22 nt, Human
aaaauacuauuuuuacugccac

SEQ ID NO: 2167031 - RNA, 22 nt, Human
aaaauagauaagaguagaaacu

SEQ ID NO: 2167032 - RNA, 15 nt, Human
aaaauaccagccagu

SEQ ID NO: 2167033 - RNA, 14 nt, Human
aaaauaccaaggaa

SEQ ID NO: 2167034 - RNA, 15 nt, Human
aaaauaaauauauau

SEQ ID NO: 2167035 - RNA, 12 nt, Human
aaaauaaauaua

SEQ ID NO: 2167036 - RNA, 14 nt, Human
aaaauaaauauaua

SEQ ID NO: 2167037 - RNA, 11 nt, Human
aaaauaaauau

SEQ ID NO: 2167038 - RNA, 12 nt, Human
aaaauaaauaaa

SEQ ID NO: 2167039 - RNA, 14 nt, Human
aaaauaacacacau

SEQ ID NO: 2167040 - RNA, 12 nt, Human
aaaauaaauuau

SEQ ID NO: 2167041 - RNA, 12 nt, Human
aaaaguaacuug

SEQ ID NO: 2167042 - RNA, 22 nt, Human
aaaaguaaguaccacucaggcc

SEQ ID NO: 2167043 - RNA, 23 nt, Human
aaaagguuuuauuuuguaauuau

SEQ ID NO: 2167044 - RNA, 19 nt, Human
aaaagguuuuauuuuguaa

SEQ ID NO: 2167045 - RNA, 11 nt, Human
aaaaguaaaca

SEQ ID NO: 2167046 - RNA, 15 nt, Human
aaaagguuuuauuuu

SEQ ID NO: 2167047 - RNA, 16 nt, Human
aaaagguuuuauuuug

SEQ ID NO: 2167048 - RNA, 17 nt, Human
aaaagguuuuauuuugu

SEQ ID NO: 2167049 - RNA, 23 nt, Human
aaaaguaaguaccacucaggcca

SEQ ID NO: 2167050 - RNA, 15 nt, Human
aaaaguacaauuuac

SEQ ID NO: 2167051 - RNA, 21 nt, Human
aaaaguacauuuaauacagca

SEQ ID NO: 2167052 - RNA, 13 nt, Human
aaaaguacauuua

SEQ ID NO: 2167053 - RNA, 17 nt, Human
aaaaguacauuuaauac

SEQ ID NO: 2167054 - RNA, 18 nt, Human
aaaauagguauacagugg

SEQ ID NO: 2167055 - RNA, 18 nt, Human
aaaauaguaaaugcuuug

SEQ ID NO: 2167056 - RNA, 19 nt, Human
aaaauaguaaaugcuuugu

SEQ ID NO: 2167057 - RNA, 12 nt, Human
aaaauagcuugu

SEQ ID NO: 2167058 - RNA, 21 nt, Human
aaaauagcuuguauaguguaa

SEQ ID NO: 2167059 - RNA, 13 nt, Human
aaaauagcuugua

SEQ ID NO: 2167060 - RNA, 19 nt, Human
aaaauagcuuguauagugu

SEQ ID NO: 2167061 - RNA, 10 nt, Human
aaaauagcca

SEQ ID NO: 2167062 - RNA, 17 nt, Human
aaaauagcaauccuaaa

SEQ ID NO: 2167063 - RNA, 23 nt, Human
aaaauagcaaccuuuuuaucucc

SEQ ID NO: 2167064 - RNA, 12 nt, Human
aaaauagccugc

SEQ ID NO: 2167065 - RNA, 10 nt, Human
aaaauauaac

SEQ ID NO: 2167066 - RNA, 13 nt, Human
aaaauauaaaaua

SEQ ID NO: 2167067 - RNA, 22 nt, Human
aaaauauaaaacugcguuaaag

SEQ ID NO: 2167068 - RNA, 10 nt, Human
aaaauauaaa

SEQ ID NO: 2167069 - RNA, 14 nt, Human
aaaauauaaaacug

SEQ ID NO: 2167070 - RNA, 17 nt, Human
aaaauauaaaacugcgu

SEQ ID NO: 2167071 - RNA, 18 nt, Human
aaaauaguggugugauuu

SEQ ID NO: 2167072 - RNA, 21 nt, Human
aaaauaguugagccagcagac

SEQ ID NO: 2167073 - RNA, 23 nt, Human
aaaauaguuaagacaugauuucc

SEQ ID NO: 2167074 - RNA, 18 nt, Human
aaaauaguugagccagca

SEQ ID NO: 2167075 - RNA, 20 nt, Human
aaaauaguugagccagcaga

SEQ ID NO: 2167076 - RNA, 20 nt, Human
aaaauauggguugcauuugg

SEQ ID NO: 2167077 - RNA, 21 nt, Human
aaaauauggaacuucuaauau

SEQ ID NO: 2167078 - RNA, 14 nt, Human
aaaauauauuuaau

SEQ ID NO: 2167079 - RNA, 18 nt, Human
aaaauauauaucaaauau

SEQ ID NO: 2167080 - RNA, 21 nt, Human
aaaauauagcuguacaaauau

SEQ ID NO: 2167081 - RNA, 24 nt, Human
aaaauauaauuuuuuagagagcug

SEQ ID NO: 2167082 - RNA, 11 nt, Human
aaaauauacug

SEQ ID NO: 2167083 - RNA, 15 nt, Human
aaaauauacuguaaa

SEQ ID NO: 2167084 - RNA, 14 nt, Human
aaaauauacuguaa

SEQ ID NO: 2167085 - RNA, 13 nt, Human
aaaauauacugua

SEQ ID NO: 2167086 - RNA, 12 nt, Human
aaaauauacugu

SEQ ID NO: 2167087 - RNA, 16 nt, Human
aaaauauagcuguaca

SEQ ID NO: 2167088 - RNA, 20 nt, Human
aaaauauagcuguacaaaua

SEQ ID NO: 2167089 - RNA, 23 nt, Human
aaaauauacuguaaagaaagaga

SEQ ID NO: 2167090 - RNA, 22 nt, Human
aaaauauacuguaaagaaagag

SEQ ID NO: 2167091 - RNA, 20 nt, Human
aaaauauacuguaaagaaag

SEQ ID NO: 2167092 - RNA, 18 nt, Human
aaaauauacuguaaagaa

SEQ ID NO: 2167093 - RNA, 17 nt, Human
aaaauauacuguaaaga

SEQ ID NO: 2167094 - RNA, 16 nt, Human
aaaauauacuguaaag

SEQ ID NO: 2167095 - RNA, 20 nt, Human
gggauuuccagccagggcug

SEQ ID NO: 2167096 - RNA, 17 nt, Human
gggauuucucccagcuc

SEQ ID NO: 2167097 - RNA, 19 nt, Human
gggauucugguuccagggu

SEQ ID NO: 2167098 - RNA, 21 nt, Human
gggauucuacuuuaagcacua

SEQ ID NO: 2167099 - RNA, 15 nt, Human
gggauuuccaugaug

SEQ ID NO: 2167100 - RNA, 14 nt, Human
gggcaaacaggcag

SEQ ID NO: 2167101 - RNA, 16 nt, Human
gggcaaaacugaauua

SEQ ID NO: 2167102 - RNA, 18 nt, Human
gggcaaaauucccaggga

SEQ ID NO: 2167103 - RNA, 23 nt, Human
gggcagagcagagaccaucccug

SEQ ID NO: 2167104 - RNA, 15 nt, Human
gggauuucucccagc

SEQ ID NO: 2167105 - RNA, 21 nt, Human
gggcaaaaaacucgaggacug

SEQ ID NO: 2167106 - RNA, 17 nt, Human
gggcagagccgggaagc

SEQ ID NO: 2167107 - RNA, 11 nt, Human
gggcagagcug

SEQ ID NO: 2167108 - RNA, 16 nt, Human
gggcagagcuggcucu

SEQ ID NO: 2167109 - RNA, 17 nt, Human
gggcagagcuggcucug

SEQ ID NO: 2167110 - RNA, 19 nt, Human
gggcagagcuggcucugag

SEQ ID NO: 2167111 - RNA, 14 nt, Human
gggcagagccggga

SEQ ID NO: 2167112 - RNA, 13 nt, Human
gggcagagccggg

SEQ ID NO: 2167113 - RNA, 14 nt, Human
gggcagagcccaag

SEQ ID NO: 2167114 - RNA, 12 nt, Human
gggcagagccca

SEQ ID NO: 2167115 - RNA, 15 nt, Human
gggcaaacaggcagu

SEQ ID NO: 2167116 - RNA, 16 nt, Human
gggauucaggcugcuu

SEQ ID NO: 2167117 - RNA, 15 nt, Human
gggauucaggcugcu

SEQ ID NO: 2167118 - RNA, 15 nt, Human
gggauucccaccaag

SEQ ID NO: 2167119 - RNA, 13 nt, Human
gggauuccugacc

SEQ ID NO: 2167120 - RNA, 14 nt, Human
gggauuccugaccc

SEQ ID NO: 2167121 - RNA, 14 nt, Human
gggauucaggcugc

SEQ ID NO: 2167122 - RNA, 16 nt, Human
gggauuccugacccag

SEQ ID NO: 2167123 - RNA, 17 nt, Human
gggauuccugacccagg

SEQ ID NO: 2167124 - RNA, 19 nt, Human
gggauuccugacccaggcc

SEQ ID NO: 2167125 - RNA, 21 nt, Human
gggauuccugacccaggccgc

SEQ ID NO: 2167126 - RNA, 21 nt, Human
gggaggggcgcuggcccagcc

SEQ ID NO: 2167127 - RNA, 19 nt, Human
gggaggggcgcuggcccag

SEQ ID NO: 2167128 - RNA, 20 nt, Human
gggaggggcgcuggcccagc

SEQ ID NO: 2167129 - RNA, 14 nt, Human
gggaggggccuagg

SEQ ID NO: 2167130 - RNA, 13 nt, Human
gggaggggcccgc

SEQ ID NO: 2167131 - RNA, 16 nt, Human
gggaggggcaggcuga

SEQ ID NO: 2167132 - RNA, 17 nt, Human
gggaggggcaggcugac

SEQ ID NO: 2167133 - RNA, 10 nt, Human
gggaggggcg

SEQ ID NO: 2167134 - RNA, 18 nt, Human
gggaggggcgcccaccuc

SEQ ID NO: 2167135 - RNA, 16 nt, Human
gggaggggcgcuggcc

SEQ ID NO: 2167136 - RNA, 18 nt, Human
gggaggggcgcuggccca

SEQ ID NO: 2167137 - RNA, 15 nt, Human
gggagggcccacuuc

SEQ ID NO: 2167138 - RNA, 12 nt, Human
gggaggggcagg

SEQ ID NO: 2167139 - RNA, 13 nt, Human
gggaggggcaggc

SEQ ID NO: 2167140 - RNA, 14 nt, Human
gggaggggcaggcu

SEQ ID NO: 2167141 - RNA, 18 nt, Human
aaaagggaacugaacauu

SEQ ID NO: 2167142 - RNA, 14 nt, Human
aaaagggaagucua

SEQ ID NO: 2167143 - RNA, 19 nt, Human
aaaagggaaguugugccuu

SEQ ID NO: 2167144 - RNA, 20 nt, Human
aaaagggaaguugugccuuu

SEQ ID NO: 2167145 - RNA, 20 nt, Human
aaaaggcuagguacacagcu

SEQ ID NO: 2167146 - RNA, 16 nt, Human
aaaagggacugagaaa

SEQ ID NO: 2167147 - RNA, 19 nt, Human
gggcagcuguuagagucca

SEQ ID NO: 2167148 - RNA, 18 nt, Human
gggcagcugggcccaacc

SEQ ID NO: 2167149 - RNA, 19 nt, Human
gggcagcugggcccaaccc

SEQ ID NO: 2167150 - RNA, 18 nt, Human
gggcaggaaggagagccu

SEQ ID NO: 2167151 - RNA, 16 nt, Human
gggcaggaaggagagc

SEQ ID NO: 2167152 - RNA, 21 nt, Human
gggcaggaaggagagccugcu

SEQ ID NO: 2167153 - RNA, 19 nt, Human
gggcaggaaggagagccug

SEQ ID NO: 2167154 - RNA, 19 nt, Human
gggcagcuugccccggccc

SEQ ID NO: 2167155 - RNA, 23 nt, Human
gggcaggacucagcuccccagag

SEQ ID NO: 2167156 - RNA, 18 nt, Human
gggcaggagggcccuacc

SEQ ID NO: 2167157 - RNA, 22 nt, Human
gggcaggacucagcuccccaga

SEQ ID NO: 2167158 - RNA, 16 nt, Human
gggcagcacagagagg

SEQ ID NO: 2167159 - RNA, 12 nt, Human
gggcagcacagc

SEQ ID NO: 2167160 - RNA, 20 nt, Human
gggcagcagaaggggguggu

SEQ ID NO: 2167161 - RNA, 13 nt, Human
gggcagcacagca

SEQ ID NO: 2167162 - RNA, 14 nt, Human
gggcagcacagcaa

SEQ ID NO: 2167163 - RNA, 16 nt, Human
gggcagccaggcugcc

SEQ ID NO: 2167164 - RNA, 14 nt, Human
gggcagccaggcug

SEQ ID NO: 2167165 - RNA, 17 nt, Human
gggcagccaaacccaug

SEQ ID NO: 2167166 - RNA, 13 nt, Human
gggcagccaggcu

SEQ ID NO: 2167167 - RNA, 20 nt, Human
gggcagcauagcaagacaca

SEQ ID NO: 2167168 - RNA, 14 nt, Human
gggcagcagggcua

SEQ ID NO: 2167169 - RNA, 13 nt, Human
gggcagcugggcc

SEQ ID NO: 2167170 - RNA, 14 nt, Human
gggcagcugggccc

SEQ ID NO: 2167171 - RNA, 16 nt, Human
gggcagcugggcccaa

SEQ ID NO: 2167172 - RNA, 17 nt, Human
gggcagcugggcccaac

SEQ ID NO: 2167173 - RNA, 17 nt, Human
gguccaugggcagagcc

SEQ ID NO: 2167174 - RNA, 14 nt, Human
gguccaccccaugu

SEQ ID NO: 2167175 - RNA, 12 nt, Human
ggucccaacagg

SEQ ID NO: 2167176 - RNA, 18 nt, Human
gguccaugggcagagccc

SEQ ID NO: 2167177 - RNA, 16 nt, Human
gguccaugggcagagc

SEQ ID NO: 2167178 - RNA, 22 nt, Human
ggucccaacaggaggacaauuc

SEQ ID NO: 2167179 - RNA, 23 nt, Human
ggucccaacaggaggacaauuca

SEQ ID NO: 2167180 - RNA, 15 nt, Human
ggucccaagcugggc

SEQ ID NO: 2167181 - RNA, 20 nt, Human
gguccacccaggagccccga

SEQ ID NO: 2167182 - RNA, 22 nt, Human
gguccacccaggagccccgagg

SEQ ID NO: 2167183 - RNA, 23 nt, Human
ggucccaagcugggccccagccc

SEQ ID NO: 2167184 - RNA, 13 nt, Human
ggucccacacugg

SEQ ID NO: 2167185 - RNA, 16 nt, Human
ggucccaagcugggcc

SEQ ID NO: 2167186 - RNA, 19 nt, Human
ggucccaagcugggcccca

SEQ ID NO: 2167187 - RNA, 20 nt, Human
ggucccaagcugggccccag

SEQ ID NO: 2167188 - RNA, 21 nt, Human
ggucccaagcugggccccagc

SEQ ID NO: 2167189 - RNA, 12 nt, Human
ggucccacccca

SEQ ID NO: 2167190 - RNA, 18 nt, Human
aaacuuguuacuaaagaa

SEQ ID NO: 2167191 - RNA, 24 nt, Human
aaacuuuuuugaaauaauaaaucu

SEQ ID NO: 2167192 - RNA, 16 nt, Human
aaagaaugauuaugaa

SEQ ID NO: 2167193 - RNA, 20 nt, Human
aaacuuuacccaaaaacuaa

SEQ ID NO: 2167194 - RNA, 14 nt, Human
aaacuuuaccuuuu

SEQ ID NO: 2167195 - RNA, 13 nt, Human
aaacuuuaauaua

SEQ ID NO: 2167196 - RNA, 19 nt, Human
gguauuccuuuuguguaca

SEQ ID NO: 2167197 - RNA, 12 nt, Human
gguauuguauuu

SEQ ID NO: 2167198 - RNA, 17 nt, Human
gguauuguauuuauuca

SEQ ID NO: 2167199 - RNA, 18 nt, Human
gguauuccuuuuguguac

SEQ ID NO: 2167200 - RNA, 14 nt, Human
gguauuccugccuc

SEQ ID NO: 2167201 - RNA, 14 nt, Human
gguauuagaaagug

SEQ ID NO: 2167202 - RNA, 18 nt, Human
gguauuaugcuucuugga

SEQ ID NO: 2167203 - RNA, 20 nt, Human
gguauuacacuguauuugua

SEQ ID NO: 2167204 - RNA, 23 nt, Human
gguauuggcuagagguucaaaga

SEQ ID NO: 2167205 - RNA, 19 nt, Human
gguccacccaggagccccg

SEQ ID NO: 2167206 - RNA, 15 nt, Human
gguccaaauaaaaac

SEQ ID NO: 2167207 - RNA, 11 nt, Human
gguccaaauaa

SEQ ID NO: 2167208 - RNA, 17 nt, Human
gguccaaauaaaaacua

SEQ ID NO: 2167209 - RNA, 15 nt, Human
ggucauuuaugaaaa

SEQ ID NO: 2167210 - RNA, 20 nt, Human
ggucaugcccuccucuccca

SEQ ID NO: 2167211 - RNA, 15 nt, Human
ggucaugguggugca

SEQ ID NO: 2167212 - RNA, 15 nt, Human
ggucaugcccuccuc

SEQ ID NO: 2167213 - RNA, 17 nt, Human
ggucaugcccuccucuc

SEQ ID NO: 2167214 - RNA, 16 nt, Human
ggucaugcccuccucu

SEQ ID NO: 2167215 - RNA, 21 nt, Human
gguauggaaggguuuguggcu

SEQ ID NO: 2167216 - RNA, 14 nt, Human
gguaugugugugua

SEQ ID NO: 2167217 - RNA, 17 nt, Human
gguauaaugguugacug

SEQ ID NO: 2167218 - RNA, 16 nt, Human
gguauaaaagaugggg

SEQ ID NO: 2167219 - RNA, 18 nt, Human
gguauaaguggugugugu

SEQ ID NO: 2167220 - RNA, 18 nt, Human
gguaguugcaauugaauu

SEQ ID NO: 2167221 - RNA, 12 nt, Human
gguauaaaagau

SEQ ID NO: 2167222 - RNA, 13 nt, Human
gguauaaaagaug

SEQ ID NO: 2167223 - RNA, 21 nt, Human
gguauaaaacuuuccucgccu

SEQ ID NO: 2167224 - RNA, 22 nt, Human
gguauaaaacuuuccucgccug

SEQ ID NO: 2167225 - RNA, 19 nt, Human
gguaguuaguagcauguug

SEQ ID NO: 2167226 - RNA, 16 nt, Human
gguaguuaguagcaug

SEQ ID NO: 2167227 - RNA, 22 nt, Human
gguaguacuccugcaaaauuuu

SEQ ID NO: 2167228 - RNA, 23 nt, Human
gguaguacuccugcaaaauuuua

SEQ ID NO: 2167229 - RNA, 14 nt, Human
aaacuguauugaug

SEQ ID NO: 2167230 - RNA, 22 nt, Human
aaacuguauugaugacaguagu

SEQ ID NO: 2167231 - RNA, 16 nt, Human
aaacuguagucucagg

SEQ ID NO: 2167232 - RNA, 15 nt, Human
aaacuguagucucag

SEQ ID NO: 2167233 - RNA, 18 nt, Human
aaacuguagaaaugauga

SEQ ID NO: 2167234 - RNA, 16 nt, Human
aaacuguagaaaugau

SEQ ID NO: 2167235 - RNA, 15 nt, Human
aaacuguagaaauga

SEQ ID NO: 2167236 - RNA, 17 nt, Human
aaagaugcucuucugug

SEQ ID NO: 2167237 - RNA, 23 nt, Human
aaagauggggucuguaaaaucuu

SEQ ID NO: 2167238 - RNA, 22 nt, Human
aaagaugccggguuuuauauuu

SEQ ID NO: 2167239 - RNA, 22 nt, Human
aaagaugcaucuaccgcucuug

SEQ ID NO: 2167240 - RNA, 20 nt, Human
aaagaugcaaggaccaggac

SEQ ID NO: 2167241 - RNA, 14 nt, Human
aaagaugcaaugua

SEQ ID NO: 2167242 - RNA, 20 nt, Human
aaagaggcugaaagaggcca

SEQ ID NO: 2167243 - RNA, 21 nt, Human
aaagaugauuuaaaagggaag

SEQ ID NO: 2167244 - RNA, 22 nt, Human
aaagauuacuuuuucuuuaugu

SEQ ID NO: 2167245 - RNA, 21 nt, Human
aaagauguuugucagauauga

SEQ ID NO: 2167246 - RNA, 19 nt, Human
aaagauuacuuagaggaaa

SEQ ID NO: 2167247 - RNA, 19 nt, Human
aaagauucagguauguugc

SEQ ID NO: 2167248 - RNA, 20 nt, Human
aaagauguuugucagauaug

SEQ ID NO: 2167249 - RNA, 14 nt, Human
aaagauuuucagaa

SEQ ID NO: 2167250 - RNA, 15 nt, Human
aaagauuuucagaaa

SEQ ID NO: 2167251 - RNA, 20 nt, Human
aaagauucauuuuuaaucau

SEQ ID NO: 2167252 - RNA, 13 nt, Human
aaagauucauuuu

SEQ ID NO: 2167253 - RNA, 15 nt, Human
aaagauucauuuuua

SEQ ID NO: 2167254 - RNA, 19 nt, Human
aaagauucauuuuuaauca

SEQ ID NO: 2167255 - RNA, 18 nt, Human
aaagagagaauguagaua

SEQ ID NO: 2167256 - RNA, 22 nt, Human
aaagagagaaaacuuauuugag

SEQ ID NO: 2167257 - RNA, 22 nt, Human
aaagagagaaaauaaaaaguua

SEQ ID NO: 2167258 - RNA, 21 nt, Human
aaagagagaaaauaaaaaguu

SEQ ID NO: 2167259 - RNA, 20 nt, Human
aaagaggcagcuugaaacug

SEQ ID NO: 2167260 - RNA, 19 nt, Human
aaagagagaaaauaaaaag

SEQ ID NO: 2167261 - RNA, 18 nt, Human
aaagagagaaaauaaaaa

SEQ ID NO: 2167262 - RNA, 17 nt, Human
aaagagagaaaauaaaa

SEQ ID NO: 2167263 - RNA, 16 nt, Human
aaagagagaaaauaaa

SEQ ID NO: 2167264 - RNA, 15 nt, Human
aaagagagaaaauaa

SEQ ID NO: 2167265 - RNA, 14 nt, Human
aaagagagaaaaua

SEQ ID NO: 2167266 - RNA, 13 nt, Human
aaagagagaaaau

SEQ ID NO: 2167267 - RNA, 13 nt, Human
aaagagagaaaac

SEQ ID NO: 2167268 - RNA, 18 nt, Human
aaagagagaaaacuuauu

SEQ ID NO: 2167269 - RNA, 13 nt, Human
aaagagagaaugu

SEQ ID NO: 2167270 - RNA, 16 nt, Human
aaagaggcugaaagag

SEQ ID NO: 2167271 - RNA, 20 nt, Human
aaagaggcgucuguauauuu

SEQ ID NO: 2167272 - RNA, 18 nt, Human
aaagaggcgucuguauau

SEQ ID NO: 2167273 - RNA, 15 nt, Human
aaagaugagugagca

SEQ ID NO: 2167274 - RNA, 13 nt, Human
aaagaggcuaugu

SEQ ID NO: 2167275 - RNA, 18 nt, Human
aaagaggcuaugugagca

SEQ ID NO: 2167276 - RNA, 18 nt, Human
aaagagaaaaaaaguuug

SEQ ID NO: 2167277 - RNA, 13 nt, Human
aaagagaaaagaa

SEQ ID NO: 2167278 - RNA, 12 nt, Human
aaagagaaaaga

SEQ ID NO: 2167279 - RNA, 14 nt, Human
aaagagaaaagaaa

SEQ ID NO: 2167280 - RNA, 20 nt, Human
aaagacuuaguauauuuucu

SEQ ID NO: 2167281 - RNA, 18 nt, Human
aaagacuuaguauauuuu

SEQ ID NO: 2167282 - RNA, 19 nt, Human
aaagacuuuuccaacccuc

SEQ ID NO: 2167283 - RNA, 14 nt, Human
aaagagaaggagcc

SEQ ID NO: 2167284 - RNA, 15 nt, Human
aaagagaaguauuau

SEQ ID NO: 2167285 - RNA, 18 nt, Human
aaagagaacuuccagauc

SEQ ID NO: 2167286 - RNA, 21 nt, Human
aaagagaauugggggcuuagg

SEQ ID NO: 2167287 - RNA, 12 nt, Human
aaagagagaaaa

SEQ ID NO: 2167288 - RNA, 15 nt, Human
aaagagacuggagca

SEQ ID NO: 2167289 - RNA, 18 nt, Human
aaagagagaaaaacaaau

SEQ ID NO: 2167290 - RNA, 17 nt, Human
aaagagaccuaccucag

SEQ ID NO: 2167291 - RNA, 18 nt, Human
aaagagaccuaccucagg

SEQ ID NO: 2167292 - RNA, 20 nt, Human
aaagagaccuaccucagguu

SEQ ID NO: 2167293 - RNA, 21 nt, Human
aaagagaccuaccucagguug

SEQ ID NO: 2167294 - RNA, 15 nt, Human
aaagacuguacaaag

SEQ ID NO: 2167295 - RNA, 15 nt, Human
aaagacucaguguuc

SEQ ID NO: 2167296 - RNA, 14 nt, Human
aaagacuccaaaga

SEQ ID NO: 2167297 - RNA, 23 nt, Human
aaagacuauucaaacagucucag

SEQ ID NO: 2167298 - RNA, 13 nt, Human
aaagacuccaaag

SEQ ID NO: 2167299 - RNA, 17 nt, Human
aaagaauggaaggugga

SEQ ID NO: 2167300 - RNA, 12 nt, Human
aaagaaugggca

SEQ ID NO: 2167301 - RNA, 18 nt, Human
aaagaaugggcaguuaca

SEQ ID NO: 2167302 - RNA, 23 nt, Human
aaagaaugggcaguuacaugcau

SEQ ID NO: 2167303 - RNA, 22 nt, Human
aaagacuauucaaacagucuca

SEQ ID NO: 2167304 - RNA, 22 nt, Human
ggucugcucuuucucugccagu

SEQ ID NO: 2167305 - RNA, 22 nt, Human
ggucuggagaagcagugagccg

SEQ ID NO: 2167306 - RNA, 23 nt, Human
ggucuggagaagcucccaggaac

SEQ ID NO: 2167307 - RNA, 22 nt, Human
ggucuggcagccucccauccag

SEQ ID NO: 2167308 - RNA, 15 nt, Human
ggucuggcagccucc

SEQ ID NO: 2167309 - RNA, 21 nt, Human
aaagauuuucagaaaauauua

SEQ ID NO: 2167310 - RNA, 14 nt, Human
ggucugucccacca

SEQ ID NO: 2167311 - RNA, 14 nt, Human
ggucuguagggauu

SEQ ID NO: 2167312 - RNA, 18 nt, Human
ggucuguacguuaccucu

SEQ ID NO: 2167313 - RNA, 12 nt, Human
ggucuguaaaau

SEQ ID NO: 2167314 - RNA, 14 nt, Human
ggucuguaaaaucu

SEQ ID NO: 2167315 - RNA, 17 nt, Human
ggucugggacuuccuug

SEQ ID NO: 2167316 - RNA, 16 nt, Human
ggucugggacuuccuu

SEQ ID NO: 2167317 - RNA, 21 nt, Human
ggucugggaggaauggacaga

SEQ ID NO: 2167318 - RNA, 13 nt, Human
ggucuggcugcuu

SEQ ID NO: 2167319 - RNA, 14 nt, Human
ggucuggccucagg

SEQ ID NO: 2167320 - RNA, 15 nt, Human
ggucuggcugagcug

SEQ ID NO: 2167321 - RNA, 15 nt, Human
ggucugucccaccag

SEQ ID NO: 2167322 - RNA, 13 nt, Human
ggucuguucuuga

SEQ ID NO: 2167323 - RNA, 12 nt, Human
ggucuguucuuu

SEQ ID NO: 2167324 - RNA, 24 nt, Human
ggucugugagaugcuagaacuccc

SEQ ID NO: 2167325 - RNA, 14 nt, Human
ggucugugagaugc

SEQ ID NO: 2167326 - RNA, 21 nt, Human
ggucuugaacuccuggccuca

SEQ ID NO: 2167327 - RNA, 22 nt, Human
ggucuugaacuccuggccucaa

SEQ ID NO: 2167328 - RNA, 19 nt, Human
ggucuguucuuuccaaagu

SEQ ID NO: 2167329 - RNA, 17 nt, Human
ggucuguucuuuccaaa

SEQ ID NO: 2167330 - RNA, 20 nt, Human
ggugcacagacgucccucca

SEQ ID NO: 2167331 - RNA, 15 nt, Human
ggugauuucagagag

SEQ ID NO: 2167332 - RNA, 16 nt, Human
ggugcacagugauuuu

SEQ ID NO: 2167333 - RNA, 15 nt, Human
ggugcacagugauuu

SEQ ID NO: 2167334 - RNA, 16 nt, Human
ggugcagagcugaaga

SEQ ID NO: 2167335 - RNA, 15 nt, Human
ggugccaguuauggc

SEQ ID NO: 2167336 - RNA, 22 nt, Human
ggugauuacauaaucuguacaa

SEQ ID NO: 2167337 - RNA, 16 nt, Human
ggugaugcugggcugg

SEQ ID NO: 2167338 - RNA, 13 nt, Human
ggugaugccaggu

SEQ ID NO: 2167339 - RNA, 15 nt, Human
ggugaugcugggcug

SEQ ID NO: 2167340 - RNA, 16 nt, Human
ggugcacaagcuccaa

SEQ ID NO: 2167341 - RNA, 22 nt, Human
ggugcacaagcuccaagcuccc

SEQ ID NO: 2167342 - RNA, 16 nt, Human
ggucuuucauggggug

SEQ ID NO: 2167343 - RNA, 21 nt, Human
ggucuuucauggggugaugcu

SEQ ID NO: 2167344 - RNA, 19 nt, Human
ggucuuuccuaucauggag

SEQ ID NO: 2167345 - RNA, 19 nt, Human
ggucuuuccuaaggcugca

SEQ ID NO: 2167346 - RNA, 18 nt, Human
ggucuuuccuaaggcugc

SEQ ID NO: 2167347 - RNA, 21 nt, Human
ggucuugguuccagccugcca

SEQ ID NO: 2167348 - RNA, 20 nt, Human
ggucuugguuccagccugcc

SEQ ID NO: 2167349 - RNA, 18 nt, Human
ggucuuggagcugagccu

SEQ ID NO: 2167350 - RNA, 23 nt, Human
ggucuuggagcugagccucucac

SEQ ID NO: 2167351 - RNA, 13 nt, Human
ggucuugggaaau

SEQ ID NO: 2167352 - RNA, 20 nt, Human
ggucuugggaaauaugaaug

SEQ ID NO: 2167353 - RNA, 13 nt, Human
ggucuugaucucc

SEQ ID NO: 2167354 - RNA, 18 nt, Human
ggucuguucuugaagcag

SEQ ID NO: 2167355 - RNA, 16 nt, Human
ggucuguuggcaggcu

SEQ ID NO: 2167356 - RNA, 18 nt, Human
ggucuguuggcaggcugg

SEQ ID NO: 2167357 - RNA, 17 nt, Human
ggucuuuugacaugugg

SEQ ID NO: 2167358 - RNA, 17 nt, Human
ggucuuuuuaugcauuu

SEQ ID NO: 2167359 - RNA, 21 nt, Human
ggugauccacucgccuucauc

SEQ ID NO: 2167360 - RNA, 21 nt, Human
ggucuuuugacauguggaaag

SEQ ID NO: 2167361 - RNA, 20 nt, Human
ggucuuuucaucugggaaag

SEQ ID NO: 2167362 - RNA, 16 nt, Human
ggucuuuucaucuggg

SEQ ID NO: 2167363 - RNA, 19 nt, Human
ggucuuuguaagaguguag

SEQ ID NO: 2167364 - RNA, 19 nt, Human
ggucuuuucaucugggaaa

SEQ ID NO: 2167365 - RNA, 12 nt, Human
ggucuuuguaag

SEQ ID NO: 2167366 - RNA, 13 nt, Human
ggucuuuguaaga

SEQ ID NO: 2167367 - RNA, 14 nt, Human
ggucuuuguaagag

SEQ ID NO: 2167368 - RNA, 15 nt, Human
ggucuuuguaagagu

SEQ ID NO: 2167369 - RNA, 20 nt, Human
ggucuuuguaagaguguaga

SEQ ID NO: 2167370 - RNA, 20 nt, Human
aaagcuugaagaucguuagu

SEQ ID NO: 2167371 - RNA, 19 nt, Human
aaagcuugcaacaaaauuc

SEQ ID NO: 2167372 - RNA, 21 nt, Human
aaagcuucuaucccaggaggu

SEQ ID NO: 2167373 - RNA, 19 nt, Human
aaagcuucuaucccaggag

SEQ ID NO: 2167374 - RNA, 16 nt, Human
aaaggaaaaagcacaa

SEQ ID NO: 2167375 - RNA, 19 nt, Human
aaaggaaaaagcacaagaa

SEQ ID NO: 2167376 - RNA, 19 nt, Human
aaagcuuuuuauuccuccu

SEQ ID NO: 2167377 - RNA, 11 nt, Human
aaagcuucccc

SEQ ID NO: 2167378 - RNA, 20 nt, Human
aaagcuuccaugauucuauu

SEQ ID NO: 2167379 - RNA, 18 nt, Human
aaagcuuccaugauucua

SEQ ID NO: 2167380 - RNA, 17 nt, Human
aaagcuuccaugauucu

SEQ ID NO: 2167381 - RNA, 23 nt, Human
aaagcuaaaaugauuuuaucugu

SEQ ID NO: 2167382 - RNA, 15 nt, Human
aaagcuauggugaga

SEQ ID NO: 2167383 - RNA, 22 nt, Human
aaagcuauggugagaugcagcu

SEQ ID NO: 2167384 - RNA, 15 nt, Human
aaagcuauuagccag

SEQ ID NO: 2167385 - RNA, 17 nt, Human
aaagcuauuagccagga

SEQ ID NO: 2167386 - RNA, 18 nt, Human
aaagcuauuagccaggau

SEQ ID NO: 2167387 - RNA, 19 nt, Human
aaagcuauuagccaggauc

SEQ ID NO: 2167388 - RNA, 20 nt, Human
aaagcuauuagccaggauca

SEQ ID NO: 2167389 - RNA, 22 nt, Human
aaagcuauuagccaggaucaug

SEQ ID NO: 2167390 - RNA, 23 nt, Human
aaagcuauuagccaggaucaugg

SEQ ID NO: 2167391 - RNA, 14 nt, Human
aaaggaagucuagg

SEQ ID NO: 2167392 - RNA, 23 nt, Human
aaaggaagguucuggugugaacu

SEQ ID NO: 2167393 - RNA, 20 nt, Human
aaaggaagguucugguguga

SEQ ID NO: 2167394 - RNA, 17 nt, Human
aaaggaaucauuucuau

SEQ ID NO: 2167395 - RNA, 21 nt, Human
aaaggaauccacucccaggca

SEQ ID NO: 2167396 - RNA, 18 nt, Human
aaaggaaaauaguaaugu

SEQ ID NO: 2167397 - RNA, 11 nt, Human
aaaggaaagag

SEQ ID NO: 2167398 - RNA, 23 nt, Human
aaaggaauuggcauguguauguu

SEQ ID NO: 2167399 - RNA, 15 nt, Human
aaaggacaauuucaa

SEQ ID NO: 2167400 - RNA, 16 nt, Human
aaaggacaauuucaaa

SEQ ID NO: 2167401 - RNA, 22 nt, Human
aaaggacaccuuuuaacucacc

SEQ ID NO: 2167402 - RNA, 19 nt, Human
aaaggacagaguaugaaca

SEQ ID NO: 2167403 - RNA, 13 nt, Human
aaaggaauuuaaa

SEQ ID NO: 2167404 - RNA, 20 nt, Human
aaagcacacucauccccuca

SEQ ID NO: 2167405 - RNA, 21 nt, Human
aaagcaauuuuccuugaagcc

SEQ ID NO: 2167406 - RNA, 22 nt, Human
aaagcaauuuuccuugaagccg

SEQ ID NO: 2167407 - RNA, 23 nt, Human
aaagcaauuuuccuugaagccga

SEQ ID NO: 2167408 - RNA, 20 nt, Human
ggugcccagaaugaggcugc

SEQ ID NO: 2167409 - RNA, 23 nt, Human
ggugcccagaauaaguuauugca

SEQ ID NO: 2167410 - RNA, 14 nt, Human
ggugcccacaggcc

SEQ ID NO: 2167411 - RNA, 13 nt, Human
ggugcccacaggc

SEQ ID NO: 2167412 - RNA, 14 nt, Human
ggugcccaagccag

SEQ ID NO: 2167413 - RNA, 17 nt, Human
ggugcccaagccagagg

SEQ ID NO: 2167414 - RNA, 18 nt, Human
ggugcccaagccagaggc

SEQ ID NO: 2167415 - RNA, 22 nt, Human
ggugcccaagcucagaaggcuc

SEQ ID NO: 2167416 - RNA, 23 nt, Human
ggugcccaagccagaggcugggu

SEQ ID NO: 2167417 - RNA, 21 nt, Human
ggugcccaagccagaggcugg

SEQ ID NO: 2167418 - RNA, 22 nt, Human
ggugcccaagccagaggcuggg

SEQ ID NO: 2167419 - RNA, 16 nt, Human
aaagcacauugaaaga

SEQ ID NO: 2167420 - RNA, 16 nt, Human
aaagcacaguuugaac

SEQ ID NO: 2167421 - RNA, 17 nt, Human
aaagcacaguuugaaca

SEQ ID NO: 2167422 - RNA, 17 nt, Human
aaagcaccaaaauaaga

SEQ ID NO: 2167423 - RNA, 16 nt, Human
aaagcaccaaaauaag

SEQ ID NO: 2167424 - RNA, 13 nt, Human
aaagcacaagaag

SEQ ID NO: 2167425 - RNA, 16 nt, Human
aaagcacaagaagcgu

SEQ ID NO: 2167426 - RNA, 22 nt, Human
aaagcacaggugggcuucccag

SEQ ID NO: 2167427 - RNA, 14 nt, Human
aaagcacaguguua

SEQ ID NO: 2167428 - RNA, 20 nt, Human
aaagcacaguguuaaaugaa

SEQ ID NO: 2167429 - RNA, 21 nt, Human
aaagcacaguguuaaaugaaa

SEQ ID NO: 2167430 - RNA, 15 nt, Human
aaagcacaguuugaa

SEQ ID NO: 2167431 - RNA, 21 nt, Human
aaagcaccaaaauaagaaaag

SEQ ID NO: 2167432 - RNA, 20 nt, Human
aaagcaccaaaauaagaaaa

SEQ ID NO: 2167433 - RNA, 19 nt, Human
aaagcaccaaaauaagaaa

SEQ ID NO: 2167434 - RNA, 18 nt, Human
aaagcaccaaaauaagaa

SEQ ID NO: 2167435 - RNA, 17 nt, Human
aaagcagugcaugcugu

SEQ ID NO: 2167436 - RNA, 19 nt, Human
aaagcggacaucagcuggu

SEQ ID NO: 2167437 - RNA, 22 nt, Human
aaagcaccaaaauaagaaaaga

SEQ ID NO: 2167438 - RNA, 23 nt, Human
aaagcaccaaaauaagaaaagau

SEQ ID NO: 2167439 - RNA, 16 nt, Human
aaagcagugcaugcug

SEQ ID NO: 2167440 - RNA, 23 nt, Human
aaagcaguuaacuuuaagacuga

SEQ ID NO: 2167441 - RNA, 21 nt, Human
aaagcagugcaugcugucccu

SEQ ID NO: 2167442 - RNA, 22 nt, Human
aaagcagugcaugcugucccuu

SEQ ID NO: 2167443 - RNA, 17 nt, Human
aaagcuaggccuggcca

SEQ ID NO: 2167444 - RNA, 18 nt, Human
aaagcuaggccuggccag

SEQ ID NO: 2167445 - RNA, 18 nt, Human
aaagcuaaaguaucugua

SEQ ID NO: 2167446 - RNA, 17 nt, Human
aaagcuaaaaugauuuu

SEQ ID NO: 2167447 - RNA, 14 nt, Human
aaacauaaauaaaa

SEQ ID NO: 2167448 - RNA, 17 nt, Human
aaacauaaauaaaauga

SEQ ID NO: 2167449 - RNA, 13 nt, Human
aaacauaaauaaa

SEQ ID NO: 2167450 - RNA, 21 nt, Human
aaacacagacauucugccagg

SEQ ID NO: 2167451 - RNA, 17 nt, Human
aaacacacugaggcagg

SEQ ID NO: 2167452 - RNA, 19 nt, Human
aaacacacugaggcaggga

SEQ ID NO: 2167453 - RNA, 16 nt, Human
aaacacacugaggcag

SEQ ID NO: 2167454 - RNA, 15 nt, Human
aaacacacugaggca

SEQ ID NO: 2167455 - RNA, 23 nt, Human
aaacacaccaggcugugggccuc

SEQ ID NO: 2167456 - RNA, 18 nt, Human
aaacacaccaggcugugg

SEQ ID NO: 2167457 - RNA, 17 nt, Human
aaacacaccaggcugug

SEQ ID NO: 2167458 - RNA, 16 nt, Human
aaacacaccaggcugu

SEQ ID NO: 2167459 - RNA, 14 nt, Human
aaacacaauauuuu

SEQ ID NO: 2167460 - RNA, 13 nt, Human
aaacacaaaugca

SEQ ID NO: 2167461 - RNA, 14 nt, Human
aaacacaaaugcag

SEQ ID NO: 2167462 - RNA, 19 nt, Human
aaacacaaaugcagggauu

SEQ ID NO: 2167463 - RNA, 15 nt, Human
aaacaauaaaugugc

SEQ ID NO: 2167464 - RNA, 15 nt, Human
aaacaagugcuggca

SEQ ID NO: 2167465 - RNA, 14 nt, Human
aaacaauaaagaga

SEQ ID NO: 2167466 - RNA, 15 nt, Human
aaacaauaaagagau

SEQ ID NO: 2167467 - RNA, 14 nt, Human
aaacacaacuauau

SEQ ID NO: 2167468 - RNA, 21 nt, Human
aaacauaauucuuguauauua

SEQ ID NO: 2167469 - RNA, 20 nt, Human
aaacauaaucuucugccuuc

SEQ ID NO: 2167470 - RNA, 13 nt, Human
aaacauaauucuu

SEQ ID NO: 2167471 - RNA, 13 nt, Human
aaacauauauaac

SEQ ID NO: 2167472 - RNA, 16 nt, Human
aaacauauauaacaau

SEQ ID NO: 2167473 - RNA, 19 nt, Human
aaacauauauaacaaugcu

SEQ ID NO: 2167474 - RNA, 22 nt, Human
aaacaugcuacacacugcaugu

SEQ ID NO: 2167475 - RNA, 16 nt, Human
aaacaugcuacacacu

SEQ ID NO: 2167476 - RNA, 21 nt, Human
aaacauauauaacaaugcugu

SEQ ID NO: 2167477 - RNA, 24 nt, Human
ggggaaaaucagccugcuccagcu

SEQ ID NO: 2167478 - RNA, 13 nt, Human
ggggaaagcacag

SEQ ID NO: 2167479 - RNA, 13 nt, Human
ggggaacuccugg

SEQ ID NO: 2167480 - RNA, 21 nt, Human
ggggaacucagauccagggac

SEQ ID NO: 2167481 - RNA, 18 nt, Human
ggggaacucagauccagg

SEQ ID NO: 2167482 - RNA, 22 nt, Human
ggggaaaggcaagguccggccc

SEQ ID NO: 2167483 - RNA, 17 nt, Human
ggggaaaggcaaggucc

SEQ ID NO: 2167484 - RNA, 13 nt, Human
ggggaccucaggc

SEQ ID NO: 2167485 - RNA, 15 nt, Human
ggggaccucaggccu

SEQ ID NO: 2167486 - RNA, 16 nt, Human
ggggaccucaggccug

SEQ ID NO: 2167487 - RNA, 17 nt, Human
ggggaccucaggccugg

SEQ ID NO: 2167488 - RNA, 13 nt, Human
ggggccaggcugg

SEQ ID NO: 2167489 - RNA, 14 nt, Human
ggggccaggcuggg

SEQ ID NO: 2167490 - RNA, 16 nt, Human
ggggccaggcuggguc

SEQ ID NO: 2167491 - RNA, 17 nt, Human
ggggccaguuggucccc

SEQ ID NO: 2167492 - RNA, 19 nt, Human
ggggccaguuggucccccu

SEQ ID NO: 2167493 - RNA, 16 nt, Human
ggggcccugccuccuu

SEQ ID NO: 2167494 - RNA, 19 nt, Human
ggggcccugccuccuuugu

SEQ ID NO: 2167495 - RNA, 23 nt, Human
ggggcccugccuccuuugugagg

SEQ ID NO: 2167496 - RNA, 12 nt, Human
gggcuggcccag

SEQ ID NO: 2167497 - RNA, 13 nt, Human
gggcuggcccagc

SEQ ID NO: 2167498 - RNA, 14 nt, Human
gggcuggcccagcc

SEQ ID NO: 2167499 - RNA, 16 nt, Human
gggcuggcccagcccu

SEQ ID NO: 2167500 - RNA, 14 nt, Human
gggcuggacugagg

SEQ ID NO: 2167501 - RNA, 18 nt, Human
gggcuggaaucuggagag

SEQ ID NO: 2167502 - RNA, 21 nt, Human
gggcuggaaucuggagagcua

SEQ ID NO: 2167503 - RNA, 15 nt, Human
gggcuggacugaggc

SEQ ID NO: 2167504 - RNA, 19 nt, Human
gggcuggacugaggccuga

SEQ ID NO: 2167505 - RNA, 19 nt, Human
aaaauauuauaacuuaaaa

SEQ ID NO: 2167506 - RNA, 16 nt, Human
aaaauauuauaacuua

SEQ ID NO: 2167507 - RNA, 21 nt, Human
aaaauauuauguguuuccaua

SEQ ID NO: 2167508 - RNA, 18 nt, Human
gggcugcuuccuccugga

SEQ ID NO: 2167509 - RNA, 19 nt, Human
gggcugcuuccuccuggaa

SEQ ID NO: 2167510 - RNA, 20 nt, Human
gggcugcuuccuccuggaaa

SEQ ID NO: 2167511 - RNA, 11 nt, Human
gggcuggaaca

SEQ ID NO: 2167512 - RNA, 23 nt, Human
gggcuggaacagauucacacugu

SEQ ID NO: 2167513 - RNA, 14 nt, Human
aaaauauguucuuu

SEQ ID NO: 2167514 - RNA, 14 nt, Human
aaaauauuaugugu

SEQ ID NO: 2167515 - RNA, 15 nt, Human
aaaauauuauguguu

SEQ ID NO: 2167516 - RNA, 21 nt, Human
aaaauguaagcuguuuauuuu

SEQ ID NO: 2167517 - RNA, 22 nt, Human
aaaauggaggccauugugugag

SEQ ID NO: 2167518 - RNA, 21 nt, Human
aaaauggacguguuaugacuc

SEQ ID NO: 2167519 - RNA, 14 nt, Human
aaaauguauaugca

SEQ ID NO: 2167520 - RNA, 21 nt, Human
aaaauguaggcuuaguuugug

SEQ ID NO: 2167521 - RNA, 21 nt, Human
aaaauguaggguuauaauaau

SEQ ID NO: 2167522 - RNA, 10 nt, Human
aaaauguacu

SEQ ID NO: 2167523 - RNA, 18 nt, Human
aaaauguacugagauuuu

SEQ ID NO: 2167524 - RNA, 22 nt, Human
aaaauuuaaaggguguacuuau

SEQ ID NO: 2167525 - RNA, 12 nt, Human
aaacaaaauaga

SEQ ID NO: 2167526 - RNA, 19 nt, Human
aaaauuuuuaaucuuuaau

SEQ ID NO: 2167527 - RNA, 19 nt, Human
aaaauuuuuucucuaggaa

SEQ ID NO: 2167528 - RNA, 16 nt, Human
aaaauugugauguguc

SEQ ID NO: 2167529 - RNA, 13 nt, Human
aaaauugugauca

SEQ ID NO: 2167530 - RNA, 21 nt, Human
aaaauuguauagagauaugca

SEQ ID NO: 2167531 - RNA, 21 nt, Human
aaaauuguauguuaaguuacu

SEQ ID NO: 2167532 - RNA, 17 nt, Human
aaaauugguuggagaau

SEQ ID NO: 2167533 - RNA, 16 nt, Human
aaaauugguuggagaa

SEQ ID NO: 2167534 - RNA, 17 nt, Human
aaaauguauaugcacuu

SEQ ID NO: 2167535 - RNA, 15 nt, Human
aaaauuguaaaauug

SEQ ID NO: 2167536 - RNA, 13 nt, Human
aaaauuguauaga

SEQ ID NO: 2167537 - RNA, 15 nt, Human
aaaauuguauagaga

SEQ ID NO: 2167538 - RNA, 16 nt, Human
aaaauuguauagagau

SEQ ID NO: 2167539 - RNA, 21 nt, Human
aaaauuguuuugagcuuucca

SEQ ID NO: 2167540 - RNA, 20 nt, Human
aaaauuguuaauuuuuccua

SEQ ID NO: 2167541 - RNA, 15 nt, Human
aaaauuuuuaaucuu

SEQ ID NO: 2167542 - RNA, 16 nt, Human
aaaauuuuuaaucuuu

SEQ ID NO: 2167543 - RNA, 12 nt, Human
aaacaaagccag

SEQ ID NO: 2167544 - RNA, 20 nt, Human
aaacaaaauuuguuugaaau

SEQ ID NO: 2167545 - RNA, 11 nt, Human
aaacaaagaag

SEQ ID NO: 2167546 - RNA, 13 nt, Human
aaacaaagaaauu

SEQ ID NO: 2167547 - RNA, 14 nt, Human
aaacaaaauuucua

SEQ ID NO: 2167548 - RNA, 15 nt, Human
aaacaaaauuucuau

SEQ ID NO: 2167549 - RNA, 17 nt, Human
aaacaacucuuugagaa

SEQ ID NO: 2167550 - RNA, 19 nt, Human
aaacaacuucaauauccaa

SEQ ID NO: 2167551 - RNA, 18 nt, Human
aaacaagaccacguuucu

SEQ ID NO: 2167552 - RNA, 17 nt, Human
aaacaaggaugaauuaa

SEQ ID NO: 2167553 - RNA, 23 nt, Human
aaacauuuaacuuguuuccaaug

SEQ ID NO: 2167554 - RNA, 21 nt, Human
aaacauugguucuuguauuaa

SEQ ID NO: 2167555 - RNA, 20 nt, Human
aaacauugguucuuguauua

SEQ ID NO: 2167556 - RNA, 18 nt, Human
aaacauugguucuuguau

SEQ ID NO: 2167557 - RNA, 20 nt, Human
aaacauugaaguaaugaauu

SEQ ID NO: 2167558 - RNA, 17 nt, Human
aaacauugguucuugua

SEQ ID NO: 2167559 - RNA, 12 nt, Human
aaaccaagaaga

SEQ ID NO: 2167560 - RNA, 18 nt, Human
aaaccaaaucacugaacu

SEQ ID NO: 2167561 - RNA, 14 nt, Human
aaaccaagccgugg

SEQ ID NO: 2167562 - RNA, 21 nt, Human
aaaccaaagagggcuuccucu

SEQ ID NO: 2167563 - RNA, 15 nt, Human
aaaccaaagaagaaa

SEQ ID NO: 2167564 - RNA, 17 nt, Human
aaaccaaagagggcuuc

SEQ ID NO: 2167565 - RNA, 19 nt, Human
aaaccaaagagggcuuccu

SEQ ID NO: 2167566 - RNA, 20 nt, Human
aaaccaaagagggcuuccuc

SEQ ID NO: 2167567 - RNA, 14 nt, Human
aaaccaaagaagaa

SEQ ID NO: 2167568 - RNA, 15 nt, Human
aaaccaaaaacugaa

SEQ ID NO: 2167569 - RNA, 22 nt, Human
gggucucacuauguugcccagg

SEQ ID NO: 2167570 - RNA, 20 nt, Human
gggucgucaccaccucuccu

SEQ ID NO: 2167571 - RNA, 19 nt, Human
gggucaggaaggaugagca

SEQ ID NO: 2167572 - RNA, 14 nt, Human
gggucuagggagag

SEQ ID NO: 2167573 - RNA, 12 nt, Human
gggucucacucu

SEQ ID NO: 2167574 - RNA, 23 nt, Human
gggucucacuauguugcccaggc

SEQ ID NO: 2167575 - RNA, 12 nt, Human
aaacauguuucc

SEQ ID NO: 2167576 - RNA, 19 nt, Human
aaacauguuucuuuguaau

SEQ ID NO: 2167577 - RNA, 22 nt, Human
aaacauguuucuuuguaaugaa

SEQ ID NO: 2167578 - RNA, 23 nt, Human
aaacauguuucuuuguaaugaaa

SEQ ID NO: 2167579 - RNA, 21 nt, Human
ggggcgaucgcggcggagcug

SEQ ID NO: 2167580 - RNA, 13 nt, Human
ggggcgaggcaga

SEQ ID NO: 2167581 - RNA, 14 nt, Human
ggggcgcccaccuc

SEQ ID NO: 2167582 - RNA, 22 nt, Human
ggggcgccgcaaaccacacugg

SEQ ID NO: 2167583 - RNA, 22 nt, Human
gggguccuucaaguuagcucag

SEQ ID NO: 2167584 - RNA, 19 nt, Human
ggggcgcccaccuccccac

SEQ ID NO: 2167585 - RNA, 20 nt, Human
ggggucucccucuccugccu

SEQ ID NO: 2167586 - RNA, 19 nt, Human
ggggucucccucuccugcc

SEQ ID NO: 2167587 - RNA, 15 nt, Human
ggggucuccaggagg

SEQ ID NO: 2167588 - RNA, 22 nt, Human
ggggucucccucuccugccuac

SEQ ID NO: 2167589 - RNA, 21 nt, Human
ggggucuggaguugaucugga

SEQ ID NO: 2167590 - RNA, 20 nt, Human
ggggucuggaguugaucugg

SEQ ID NO: 2167591 - RNA, 23 nt, Human
ggggucugggaggaauggacaga

SEQ ID NO: 2167592 - RNA, 21 nt, Human
ggggcccugguccuuccaggc

SEQ ID NO: 2167593 - RNA, 12 nt, Human
ggggcccugguc

SEQ ID NO: 2167594 - RNA, 21 nt, Human
ggggccuugcgguauccgccc

SEQ ID NO: 2167595 - RNA, 17 nt, Human
ggggcgaggcagaggac

SEQ ID NO: 2167596 - RNA, 19 nt, Human
gggucagacgccugaggaa

SEQ ID NO: 2167597 - RNA, 13 nt, Human
ggguauauucauu

SEQ ID NO: 2167598 - RNA, 23 nt, Human
ggguauaaaacuuuccucgccug

SEQ ID NO: 2167599 - RNA, 19 nt, Human
gggucagccagggccaggg

SEQ ID NO: 2167600 - RNA, 13 nt, Human
gggucaggaagga

SEQ ID NO: 2167601 - RNA, 12 nt, Human
gggucagccagg

SEQ ID NO: 2167602 - RNA, 13 nt, Human
gggucagccaggg

SEQ ID NO: 2167603 - RNA, 17 nt, Human
gggucagccagggccag

SEQ ID NO: 2167604 - RNA, 15 nt, Human
gggucaggccacggc

SEQ ID NO: 2167605 - RNA, 14 nt, Human
gggucaggagaggg

SEQ ID NO: 2167606 - RNA, 17 nt, Human
gggucaggccacggcag

SEQ ID NO: 2167607 - RNA, 21 nt, Human
gggucaggccacggcagccua

SEQ ID NO: 2167608 - RNA, 18 nt, Human
ggguaggaggaugggcuc

SEQ ID NO: 2167609 - RNA, 12 nt, Human
ggguaggcggga

SEQ ID NO: 2167610 - RNA, 23 nt, Human
ggguagcuguaaggcaugaagga

SEQ ID NO: 2167611 - RNA, 15 nt, Human
ggggucuguaaaauc

SEQ ID NO: 2167612 - RNA, 23 nt, Human
ggggucuguguguuuaugugugu

SEQ ID NO: 2167613 - RNA, 16 nt, Human
ggguaggcgggaagga

SEQ ID NO: 2167614 - RNA, 20 nt, Human
ggguaucaggugcugccauc

SEQ ID NO: 2167615 - RNA, 12 nt, Human
aaacgcugccug

SEQ ID NO: 2167616 - RNA, 16 nt, Human
aaacgcugccugccca

SEQ ID NO: 2167617 - RNA, 14 nt, Human
aaacgcugccugcc

SEQ ID NO: 2167618 - RNA, 23 nt, Human
aaacggauuagggcauuugagaa

SEQ ID NO: 2167619 - RNA, 12 nt, Human
aaacggauuauu

SEQ ID NO: 2167620 - RNA, 14 nt, Human
aaacggauuauuuu

SEQ ID NO: 2167621 - RNA, 16 nt, Human
aaacggauuauuuuuu

SEQ ID NO: 2167622 - RNA, 18 nt, Human
aaacggauuauuuuuuca

SEQ ID NO: 2167623 - RNA, 20 nt, Human
aaacggauuauuuuuucaga

SEQ ID NO: 2167624 - RNA, 23 nt, Human
aaacggccucacuaggcuucugg

SEQ ID NO: 2167625 - RNA, 21 nt, Human
aaacggauuauuuuuucagac

SEQ ID NO: 2167626 - RNA, 22 nt, Human
aaacggauuauuuuuucagacc

SEQ ID NO: 2167627 - RNA, 23 nt, Human
aaacggauuauuuuuucagaccg

SEQ ID NO: 2167628 - RNA, 13 nt, Human
aaacggcccucuu

SEQ ID NO: 2167629 - RNA, 17 nt, Human
aaaccacagcccuguca

SEQ ID NO: 2167630 - RNA, 16 nt, Human
aaaccacagcccuguc

SEQ ID NO: 2167631 - RNA, 15 nt, Human
aaaccacagcccugu

SEQ ID NO: 2167632 - RNA, 15 nt, Human
aaaccaagcaaagga

SEQ ID NO: 2167633 - RNA, 18 nt, Human
aaaccacagcccugucag

SEQ ID NO: 2167634 - RNA, 14 nt, Human
aaaccacagcugcu

SEQ ID NO: 2167635 - RNA, 14 nt, Human
aaaccaccagaagc

SEQ ID NO: 2167636 - RNA, 21 nt, Human
aaaccacauuggagauguuua

SEQ ID NO: 2167637 - RNA, 15 nt, Human
aaaccacagcaguug

SEQ ID NO: 2167638 - RNA, 16 nt, Human
aaaccacagcaguuga

SEQ ID NO: 2167639 - RNA, 22 nt, Human
aaacuacacaucccuaaugugu

SEQ ID NO: 2167640 - RNA, 20 nt, Human
aaacuaccuaacauuauuua

SEQ ID NO: 2167641 - RNA, 18 nt, Human
aaacuaaggcccucuuga

SEQ ID NO: 2167642 - RNA, 15 nt, Human
aaacuaacagauaag

SEQ ID NO: 2167643 - RNA, 20 nt, Human
aaacuaaauuguaaacuccu

SEQ ID NO: 2167644 - RNA, 20 nt, Human
aaacuaacagauaagcaaga

SEQ ID NO: 2167645 - RNA, 16 nt, Human
aaacuaauauuuuaug

SEQ ID NO: 2167646 - RNA, 11 nt, Human
aaacuaaucca

SEQ ID NO: 2167647 - RNA, 18 nt, Human
aaacgucuuauuguggua

SEQ ID NO: 2167648 - RNA, 13 nt, Human
aaacuaaauugua

SEQ ID NO: 2167649 - RNA, 15 nt, Human
aaacuaaauuguaaa

SEQ ID NO: 2167650 - RNA, 20 nt, Human
aaacguggcugcuucaagga

SEQ ID NO: 2167651 - RNA, 17 nt, Human
aaacguggcugcuucaa

SEQ ID NO: 2167652 - RNA, 12 nt, Human
aaacgugaaaau

SEQ ID NO: 2167653 - RNA, 16 nt, Human
aaacguggcugcuuca

SEQ ID NO: 2167654 - RNA, 11 nt, Human
aaacuccugac

SEQ ID NO: 2167655 - RNA, 14 nt, Human
aaacuccugccccu

SEQ ID NO: 2167656 - RNA, 22 nt, Human
aaacuccugccccuguucucuu

SEQ ID NO: 2167657 - RNA, 11 nt, Human
aaacugccccc

SEQ ID NO: 2167658 - RNA, 12 nt, Human
aaacugcccccu

SEQ ID NO: 2167659 - RNA, 19 nt, Human
aaacuccgucuuagaagug

SEQ ID NO: 2167660 - RNA, 23 nt, Human
aaacucccacuugucaugugaca

SEQ ID NO: 2167661 - RNA, 16 nt, Human
aaacuccacaucugcc

SEQ ID NO: 2167662 - RNA, 23 nt, Human
aaacuagcucgugauuggcauau

SEQ ID NO: 2167663 - RNA, 19 nt, Human
aaacuccacaucugccuua

SEQ ID NO: 2167664 - RNA, 17 nt, Human
aaacuccacaucugccu

SEQ ID NO: 2167665 - RNA, 18 nt, Human
aaacuccacaucugccuu

SEQ ID NO: 2167666 - RNA, 14 nt, Human
aaacuagcauaucu

SEQ ID NO: 2167667 - RNA, 15 nt, Human
aaacuagcucgugau

SEQ ID NO: 2167668 - RNA, 19 nt, Human
aaacuagcauaucugccuu

SEQ ID NO: 2167669 - RNA, 20 nt, Human
aaacuagcauaucugccuuu

SEQ ID NO: 2167670 - RNA, 21 nt, Human
aaacuagcauaucugccuuua

SEQ ID NO: 2167671 - RNA, 22 nt, Human
aaacuagcauaucugccuuuau

SEQ ID NO: 2167672 - RNA, 22 nt, Human
aaacugguuuguugcagccaaa

SEQ ID NO: 2167673 - RNA, 22 nt, Human
aaacugguauuuuaucuuugau

SEQ ID NO: 2167674 - RNA, 16 nt, Human
aaacuggggccucccu

SEQ ID NO: 2167675 - RNA, 16 nt, Human
aaacugguauuuuauc

SEQ ID NO: 2167676 - RNA, 16 nt, Human
aaacuggguuccugca

SEQ ID NO: 2167677 - RNA, 20 nt, Human
aaacuggggccuccagaacu

SEQ ID NO: 2167678 - RNA, 15 nt, Human
aaacuggguuccugc

SEQ ID NO: 2167679 - RNA, 20 nt, Human
aaacuggcaaacuucagacu

SEQ ID NO: 2167680 - RNA, 13 nt, Human
aaacuggcuuugg

SEQ ID NO: 2167681 - RNA, 14 nt, Human
aaacuggcuuuggc

SEQ ID NO: 2167682 - RNA, 18 nt, Human
aaacuggggccuccagaa

SEQ ID NO: 2167683 - RNA, 17 nt, Human
aaacuggggccuccaga

SEQ ID NO: 2167684 - RNA, 20 nt, Human
aaacugcccccucugcccug

SEQ ID NO: 2167685 - RNA, 19 nt, Human
aaacugcccccucugcccu

SEQ ID NO: 2167686 - RNA, 17 nt, Human
aaacugcccccucugcc

SEQ ID NO: 2167687 - RNA, 13 nt, Human
aaacugcccccuc

SEQ ID NO: 2167688 - RNA, 16 nt, Human
aaacuggauuaaacuu

SEQ ID NO: 2167689 - RNA, 14 nt, Human
gacuuucagguacu

SEQ ID NO: 2167690 - RNA, 12 nt, Human
gacuuucaggua

SEQ ID NO: 2167691 - RNA, 19 nt, Human
gacuuuauuuucugguaga

SEQ ID NO: 2167692 - RNA, 17 nt, Human
gacuuuagucugcaaaa

SEQ ID NO: 2167693 - RNA, 21 nt, Human
gacuuuaucuaauaccucugu

SEQ ID NO: 2167694 - RNA, 22 nt, Human
gacuuuaucuaauaccucugug

SEQ ID NO: 2167695 - RNA, 13 nt, Human
gacuuuagggacu

SEQ ID NO: 2167696 - RNA, 23 nt, Human
gacuguucaagagcacacuuggc

SEQ ID NO: 2167697 - RNA, 18 nt, Human
gacuuguuuuugcacaug

SEQ ID NO: 2167698 - RNA, 22 nt, Human
gacuguguguugccacaggaca

SEQ ID NO: 2167699 - RNA, 21 nt, Human
gacuguguguugccacaggac

SEQ ID NO: 2167700 - RNA, 21 nt, Human
gacuguugggguggguauaaa

SEQ ID NO: 2167701 - RNA, 14 nt, Human
gacuguuccugucu

SEQ ID NO: 2167702 - RNA, 22 nt, Human
gacuguuagaaaauggacacug

SEQ ID NO: 2167703 - RNA, 14 nt, Human
gacuguucaagagc

SEQ ID NO: 2167704 - RNA, 18 nt, Human
gacuguucaagagcacac

SEQ ID NO: 2167705 - RNA, 19 nt, Human
gacuguucaagagcacacu

SEQ ID NO: 2167706 - RNA, 15 nt, Human
gacuguggcugcuag

SEQ ID NO: 2167707 - RNA, 14 nt, Human
gacuguggcugcua

SEQ ID NO: 2167708 - RNA, 12 nt, Human
gacuguggcugc

SEQ ID NO: 2167709 - RNA, 13 nt, Human
gacugugaugcca

SEQ ID NO: 2167710 - RNA, 20 nt, Human
gacugugacaggcagcagag

SEQ ID NO: 2167711 - RNA, 19 nt, Human
gacugugaugccacacaga

SEQ ID NO: 2167712 - RNA, 22 nt, Human
gacugugugcucaggagcccug

SEQ ID NO: 2167713 - RNA, 11 nt, Human
gacuguagaaa

SEQ ID NO: 2167714 - RNA, 18 nt, Human
gacugaauuguccccagu

SEQ ID NO: 2167715 - RNA, 13 nt, Human
gacuguagggagg

SEQ ID NO: 2167716 - RNA, 22 nt, Human
gacuguagggagggcggcaggg

SEQ ID NO: 2167717 - RNA, 23 nt, Human
gacuguagggagggcggcagggg

SEQ ID NO: 2167718 - RNA, 14 nt, Human
gacuguauauaaag

SEQ ID NO: 2167719 - RNA, 19 nt, Human
gacuguauauaaaggaaaa

SEQ ID NO: 2167720 - RNA, 15 nt, Human
gacuguauuugugac

SEQ ID NO: 2167721 - RNA, 14 nt, Human
gacuguauuuguga

SEQ ID NO: 2167722 - RNA, 13 nt, Human
gacugucuuucag

SEQ ID NO: 2167723 - RNA, 16 nt, Human
gacuguauuugugacu

SEQ ID NO: 2167724 - RNA, 17 nt, Human
gacugugacaggcagca

SEQ ID NO: 2167725 - RNA, 18 nt, Human
gacugugacaggcagcag

SEQ ID NO: 2167726 - RNA, 19 nt, Human
gacugugacaggcagcaga

SEQ ID NO: 2167727 - RNA, 18 nt, Human
gacugaagaugcagcuca

SEQ ID NO: 2167728 - RNA, 16 nt, Human
gacugaagccugcagg

SEQ ID NO: 2167729 - RNA, 14 nt, Human
gacugaauuucuuu

SEQ ID NO: 2167730 - RNA, 18 nt, Human
gacuguacuccucccagg

SEQ ID NO: 2167731 - RNA, 23 nt, Human
gacuguacuccucccaggcgccc

SEQ ID NO: 2167732 - RNA, 22 nt, Human
gacucaccucccccaucucuuc

SEQ ID NO: 2167733 - RNA, 15 nt, Human
gacucaccuccccca

SEQ ID NO: 2167734 - RNA, 23 nt, Human
gacucacuuaucccaagagaaug

SEQ ID NO: 2167735 - RNA, 18 nt, Human
gacucaccucugccucaa

SEQ ID NO: 2167736 - RNA, 17 nt, Human
gacucaccuguuacuug

SEQ ID NO: 2167737 - RNA, 17 nt, Human
gacucaccucugccuca

SEQ ID NO: 2167738 - RNA, 15 nt, Human
gacucaccucugccu

SEQ ID NO: 2167739 - RNA, 14 nt, Human
gacucaccucugcc

SEQ ID NO: 2167740 - RNA, 13 nt, Human
gacucaccucugc

SEQ ID NO: 2167741 - RNA, 12 nt, Human
gacucaccucug

SEQ ID NO: 2167742 - RNA, 12 nt, Human
gacucacccaag

SEQ ID NO: 2167743 - RNA, 12 nt, Human
gacucugccucc

SEQ ID NO: 2167744 - RNA, 16 nt, Human
gacucugccuccucuu

SEQ ID NO: 2167745 - RNA, 10 nt, Human
gacucugccc

SEQ ID NO: 2167746 - RNA, 12 nt, Human
gacucugccccc

SEQ ID NO: 2167747 - RNA, 13 nt, Human
gacucugcccccu

SEQ ID NO: 2167748 - RNA, 14 nt, Human
gacucugcccccug

SEQ ID NO: 2167749 - RNA, 15 nt, Human
gacucugcccccugc

SEQ ID NO: 2167750 - RNA, 16 nt, Human
gacucugcccccugcu

SEQ ID NO: 2167751 - RNA, 17 nt, Human
gacucugcccccugcug

SEQ ID NO: 2167752 - RNA, 18 nt, Human
gacucugcccccugcugg

SEQ ID NO: 2167753 - RNA, 20 nt, Human
gacucugcacaugucuugua

SEQ ID NO: 2167754 - RNA, 17 nt, Human
gacucagaagccucugg

SEQ ID NO: 2167755 - RNA, 16 nt, Human
gacucagaagccucug

SEQ ID NO: 2167756 - RNA, 15 nt, Human
gacucagaagccucu

SEQ ID NO: 2167757 - RNA, 13 nt, Human
gacucagaagccu

SEQ ID NO: 2167758 - RNA, 19 nt, Human
gacucugucucaaaaaaac

SEQ ID NO: 2167759 - RNA, 22 nt, Human
gacucugcccccugcuggcucu

SEQ ID NO: 2167760 - RNA, 19 nt, Human
gacucugcccccugcuggc

SEQ ID NO: 2167761 - RNA, 21 nt, Human
gacucugcccccugcuggcuc

SEQ ID NO: 2167762 - RNA, 14 nt, Human
gacucuuaagaaga

SEQ ID NO: 2167763 - RNA, 15 nt, Human
gacucuuaagaagac

SEQ ID NO: 2167764 - RNA, 18 nt, Human
gacucuguggggccuugg

SEQ ID NO: 2167765 - RNA, 17 nt, Human
gacucuguggggccuug

SEQ ID NO: 2167766 - RNA, 15 nt, Human
gacucuuacuuuuua

SEQ ID NO: 2167767 - RNA, 21 nt, Human
gacucuuaagaagacugcauu

SEQ ID NO: 2167768 - RNA, 9 nt, Human
gacucuugu

SEQ ID NO: 2167769 - RNA, 15 nt, Human
gacucuugcucuuuc

SEQ ID NO: 2167770 - RNA, 16 nt, Human
gacucuugcucuuucu

SEQ ID NO: 2167771 - RNA, 14 nt, Human
gacucuuguuuuca

SEQ ID NO: 2167772 - RNA, 12 nt, Human
gacucuugcucu

SEQ ID NO: 2167773 - RNA, 17 nt, Human
gacucuucugagcaccu

SEQ ID NO: 2167774 - RNA, 16 nt, Human
gaccucguccuccccc

SEQ ID NO: 2167775 - RNA, 15 nt, Human
gaccucguccucccc

SEQ ID NO: 2167776 - RNA, 21 nt, Human
gaccucguccucccccugcca

SEQ ID NO: 2167777 - RNA, 19 nt, Human
gaccucguccucccccugc

SEQ ID NO: 2167778 - RNA, 18 nt, Human
gaccucguccucccccug

SEQ ID NO: 2167779 - RNA, 17 nt, Human
gaccucguccucccccu

SEQ ID NO: 2167780 - RNA, 23 nt, Human
gaccauccacucuacccucccac

SEQ ID NO: 2167781 - RNA, 21 nt, Human
gaccauccacucuacccuccc

SEQ ID NO: 2167782 - RNA, 13 nt, Human
gaccauccuauuu

SEQ ID NO: 2167783 - RNA, 20 nt, Human
gaccaucccugaaggccccg

SEQ ID NO: 2167784 - RNA, 14 nt, Human
gaccucucccaggg

SEQ ID NO: 2167785 - RNA, 22 nt, Human
gaccucuccccuggaacugucu

SEQ ID NO: 2167786 - RNA, 12 nt, Human
gaccucucccag

SEQ ID NO: 2167787 - RNA, 22 nt, Human
gaccucguccucccccugccag

SEQ ID NO: 2167788 - RNA, 14 nt, Human
gaccucugcagcaa

SEQ ID NO: 2167789 - RNA, 16 nt, Human
gaccucugcucugagg

SEQ ID NO: 2167790 - RNA, 15 nt, Human
gaccucugcucugag

SEQ ID NO: 2167791 - RNA, 16 nt, Human
gaccucuguuguccuc

SEQ ID NO: 2167792 - RNA, 19 nt, Human
gaccucuccaucuucagcu

SEQ ID NO: 2167793 - RNA, 14 nt, Human
gaccugaggaagcg

SEQ ID NO: 2167794 - RNA, 13 nt, Human
gaccugaggaagc

SEQ ID NO: 2167795 - RNA, 22 nt, Human
gaccugagcuccccaccacccc

SEQ ID NO: 2167796 - RNA, 18 nt, Human
gaccugagcuccccacca

SEQ ID NO: 2167797 - RNA, 16 nt, Human
gaccugagcuccccac

SEQ ID NO: 2167798 - RNA, 15 nt, Human
gaccugacuauugaa

SEQ ID NO: 2167799 - RNA, 22 nt, Human
gaccugaaguucaccauuaaaa

SEQ ID NO: 2167800 - RNA, 13 nt, Human
gaccugaaguuca

SEQ ID NO: 2167801 - RNA, 16 nt, Human
gaccugaagagugguc

SEQ ID NO: 2167802 - RNA, 12 nt, Human
gaccugaagaau

SEQ ID NO: 2167803 - RNA, 12 nt, Human
gaccucuguugu

SEQ ID NO: 2167804 - RNA, 14 nt, Human
gaccucuguugucc

SEQ ID NO: 2167805 - RNA, 11 nt, Human
gaccugaggcc

SEQ ID NO: 2167806 - RNA, 13 nt, Human
gaccugaggcccu

SEQ ID NO: 2167807 - RNA, 14 nt, Human
gaccugaggcccuu

SEQ ID NO: 2167808 - RNA, 16 nt, Human
gacgccaucccagccc

SEQ ID NO: 2167809 - RNA, 15 nt, Human
gacgcgucuccuguu

SEQ ID NO: 2167810 - RNA, 17 nt, Human
gacgcucucuggccuuc

SEQ ID NO: 2167811 - RNA, 16 nt, Human
gacgcucucuggccuu

SEQ ID NO: 2167812 - RNA, 19 nt, Human
gacgccugggggugccagg

SEQ ID NO: 2167813 - RNA, 12 nt, Human
gacgccuggggg

SEQ ID NO: 2167814 - RNA, 14 nt, Human
gacgcgucuccugu

SEQ ID NO: 2167815 - RNA, 21 nt, Human
gacgccugggggugccaggac

SEQ ID NO: 2167816 - RNA, 17 nt, Human
gacgccaucccagcccc

SEQ ID NO: 2167817 - RNA, 18 nt, Human
gacgccaucccagcccca

SEQ ID NO: 2167818 - RNA, 16 nt, Human
gacgcuacccgggaag

SEQ ID NO: 2167819 - RNA, 18 nt, Human
gacgcuacccgggaaggg

SEQ ID NO: 2167820 - RNA, 19 nt, Human
gacgcuacccgggaagggg

SEQ ID NO: 2167821 - RNA, 15 nt, Human
gacgcucucuggccu

SEQ ID NO: 2167822 - RNA, 17 nt, Human
gacacaggaugaaggca

SEQ ID NO: 2167823 - RNA, 20 nt, Human
gacacaggaugaaggcaaug

SEQ ID NO: 2167824 - RNA, 17 nt, Human
gacacagcucuucucca

SEQ ID NO: 2167825 - RNA, 22 nt, Human
gacacagcucuucuccaggcug

SEQ ID NO: 2167826 - RNA, 23 nt, Human
gacacagcucuucuccaggcugu

SEQ ID NO: 2167827 - RNA, 12 nt, Human
gacacaggcccg

SEQ ID NO: 2167828 - RNA, 23 nt, Human
gacacagcuuuaucaccagagag

SEQ ID NO: 2167829 - RNA, 22 nt, Human
gacacagcuuuaucaccagaga

SEQ ID NO: 2167830 - RNA, 14 nt, Human
gacacagcucuucu

SEQ ID NO: 2167831 - RNA, 16 nt, Human
gacacagcucuucucc

SEQ ID NO: 2167832 - RNA, 13 nt, Human
gacacagcucuuc

SEQ ID NO: 2167833 - RNA, 18 nt, Human
gacacagaaaauguugag

SEQ ID NO: 2167834 - RNA, 16 nt, Human
gacacagaaaauguug

SEQ ID NO: 2167835 - RNA, 11 nt, Human
gacacagaaaa

SEQ ID NO: 2167836 - RNA, 15 nt, Human
gacacacugaagaag

SEQ ID NO: 2167837 - RNA, 16 nt, Human
gacacacugaagaagc

SEQ ID NO: 2167838 - RNA, 13 nt, Human
gacagaacacugu

SEQ ID NO: 2167839 - RNA, 14 nt, Human
gacagaacacuguc

SEQ ID NO: 2167840 - RNA, 15 nt, Human
gacagaacacugucu

SEQ ID NO: 2167841 - RNA, 21 nt, Human
gacagaaagcagaacagugau

SEQ ID NO: 2167842 - RNA, 17 nt, Human
gacagcccgggcucugc

SEQ ID NO: 2167843 - RNA, 15 nt, Human
gacagaagcagcucu

SEQ ID NO: 2167844 - RNA, 20 nt, Human
gacagaaccccuacaugaaa

SEQ ID NO: 2167845 - RNA, 13 nt, Human
gacauucaugccu

SEQ ID NO: 2167846 - RNA, 21 nt, Human
gacauucaccugccccaacuc

SEQ ID NO: 2167847 - RNA, 16 nt, Human
gacauuccaagacagu

SEQ ID NO: 2167848 - RNA, 22 nt, Human
gacagugccugggaauguauua

SEQ ID NO: 2167849 - RNA, 21 nt, Human
gacagugccugggaauguauu

SEQ ID NO: 2167850 - RNA, 17 nt, Human
gacagugccugggaaug

SEQ ID NO: 2167851 - RNA, 16 nt, Human
gacagugaucuccaua

SEQ ID NO: 2167852 - RNA, 16 nt, Human
gacagugcuucagccu

SEQ ID NO: 2167853 - RNA, 18 nt, Human
gacauucaccugccccaa

SEQ ID NO: 2167854 - RNA, 13 nt, Human
gacagugccuggg

SEQ ID NO: 2167855 - RNA, 21 nt, Human
gacagugaucuccauauguua

SEQ ID NO: 2167856 - RNA, 15 nt, Human
gacagugaucuccau

SEQ ID NO: 2167857 - RNA, 21 nt, Human
gacagugagacucugucucag

SEQ ID NO: 2167858 - RNA, 13 nt, Human
gacagaagaaggc

SEQ ID NO: 2167859 - RNA, 20 nt, Human
gacagcccgggcucugccuc

SEQ ID NO: 2167860 - RNA, 16 nt, Human
gacagaagcagcucuu

SEQ ID NO: 2167861 - RNA, 18 nt, Human
gacagcccgggcucugcc

SEQ ID NO: 2167862 - RNA, 19 nt, Human
gacagcccgggcucugccu

SEQ ID NO: 2167863 - RNA, 17 nt, Human
gacauuguuggcagcau

SEQ ID NO: 2167864 - RNA, 15 nt, Human
gacauugucaauaaa

SEQ ID NO: 2167865 - RNA, 18 nt, Human
gacauuguggcacauucu

SEQ ID NO: 2167866 - RNA, 14 nt, Human
gacauugucaauaa

SEQ ID NO: 2167867 - RNA, 13 nt, Human
gacauugucaaua

SEQ ID NO: 2167868 - RNA, 17 nt, Human
gacauugucagcaaauu

SEQ ID NO: 2167869 - RNA, 19 nt, Human
gacauuguagagcuucugg

SEQ ID NO: 2167870 - RNA, 12 nt, Human
gacauugucaau

SEQ ID NO: 2167871 - RNA, 14 nt, Human
gacauugcggacag

SEQ ID NO: 2167872 - RNA, 15 nt, Human
gacauugcggacagc

SEQ ID NO: 2167873 - RNA, 14 nt, Human
gacauucugccagg

SEQ ID NO: 2167874 - RNA, 22 nt, Human
gacauucugccaggcccccaag

SEQ ID NO: 2167875 - RNA, 11 nt, Human
gacauucuguc

SEQ ID NO: 2167876 - RNA, 17 nt, Human
gacauucugccaggccc

SEQ ID NO: 2167877 - RNA, 23 nt, Human
gacauucugucgccuuagcaugu

SEQ ID NO: 2167878 - RNA, 17 nt, Human
gacagugcuucagccug

SEQ ID NO: 2167879 - RNA, 16 nt, Human
gacauucaugccuggc

SEQ ID NO: 2167880 - RNA, 18 nt, Human
gacauucaugccuggcuu

SEQ ID NO: 2167881 - RNA, 20 nt, Human
gacauuccuaaacuaucuuu

SEQ ID NO: 2167882 - RNA, 22 nt, Human
gacauuccuaaacuaucuuuuu

SEQ ID NO: 2167883 - RNA, 16 nt, Human
gacauuccugggcaca

SEQ ID NO: 2167884 - RNA, 17 nt, Human
gacauuccugggcacag

SEQ ID NO: 2167885 - RNA, 23 nt, Human
gacauuccugggcacaguuuggu

SEQ ID NO: 2167886 - RNA, 22 nt, Human
gacauuguuuugccaacauugc

SEQ ID NO: 2167887 - RNA, 22 nt, Human
gacauuguuggcagcauaaagg

SEQ ID NO: 2167888 - RNA, 13 nt, Human
gacauuguuuugc

SEQ ID NO: 2167889 - RNA, 14 nt, Human
gacauuguuuugcc

SEQ ID NO: 2167890 - RNA, 20 nt, Human
gacauuguuuugccaacauu

SEQ ID NO: 2167891 - RNA, 19 nt, Human
gacauuguuggccaaagcc

SEQ ID NO: 2167892 - RNA, 11 nt, Human
gacauuuccca

SEQ ID NO: 2167893 - RNA, 21 nt, Human
gacauuguuuugccaacauug

SEQ ID NO: 2167894 - RNA, 18 nt, Human
gacauuuauacucuuuuu

SEQ ID NO: 2167895 - RNA, 16 nt, Human
gacauuucucuaagag

SEQ ID NO: 2167896 - RNA, 13 nt, Human
gacauuucucuaa

SEQ ID NO: 2167897 - RNA, 16 nt, Human
gacauuucuuugugcu

SEQ ID NO: 2167898 - RNA, 19 nt, Human
gacauuucucuuacugcaa

SEQ ID NO: 2167899 - RNA, 20 nt, Human
gacauuucucuuacugcaaa

SEQ ID NO: 2167900 - RNA, 21 nt, Human
gacauuucucuuacugcaaau

SEQ ID NO: 2167901 - RNA, 15 nt, Human
gacauuugccuugcu

SEQ ID NO: 2167902 - RNA, 16 nt, Human
gacauuugcucaugga

SEQ ID NO: 2167903 - RNA, 17 nt, Human
gacauuugcucauggaa

SEQ ID NO: 2167904 - RNA, 22 nt, Human
gaccagccuggccaacauggua

SEQ ID NO: 2167905 - RNA, 17 nt, Human
gaccagccugggcagca

SEQ ID NO: 2167906 - RNA, 12 nt, Human
gaccagccuggg

SEQ ID NO: 2167907 - RNA, 12 nt, Human
gaccagcucagg

SEQ ID NO: 2167908 - RNA, 23 nt, Human
gaccagccuguuggacccgcucu

SEQ ID NO: 2167909 - RNA, 23 nt, Human
gaccagcuggggcguggggaggg

SEQ ID NO: 2167910 - RNA, 11 nt, Human
gaccagcuggg

SEQ ID NO: 2167911 - RNA, 12 nt, Human
gaccagcugggg

SEQ ID NO: 2167912 - RNA, 13 nt, Human
gaccagcuggggc

SEQ ID NO: 2167913 - RNA, 18 nt, Human
gaccagggauuuccauga

SEQ ID NO: 2167914 - RNA, 22 nt, Human
gaccagcucaggacagaugcca

SEQ ID NO: 2167915 - RNA, 14 nt, Human
gaccagcucaggac

SEQ ID NO: 2167916 - RNA, 13 nt, Human
gaccagcucagga

SEQ ID NO: 2167917 - RNA, 19 nt, Human
gaccauccacucuacccuc

SEQ ID NO: 2167918 - RNA, 15 nt, Human
gaccauaauguuaca

SEQ ID NO: 2167919 - RNA, 13 nt, Human
gaccauacuaauu

SEQ ID NO: 2167920 - RNA, 20 nt, Human
gaccauaauguuacauuauu

SEQ ID NO: 2167921 - RNA, 16 nt, Human
gaccagggcagggcca

SEQ ID NO: 2167922 - RNA, 15 nt, Human
gaccagggcagggcc

SEQ ID NO: 2167923 - RNA, 20 nt, Human
gaccagggauuuccaugaug

SEQ ID NO: 2167924 - RNA, 14 nt, Human
gaccagggcagggc

SEQ ID NO: 2167925 - RNA, 22 nt, Human
gaccagggagccuuugguucug

SEQ ID NO: 2167926 - RNA, 15 nt, Human
gaccagggagccuuu

SEQ ID NO: 2167927 - RNA, 14 nt, Human
gaccagggagccuu

SEQ ID NO: 2167928 - RNA, 12 nt, Human
gaccaucccuga

SEQ ID NO: 2167929 - RNA, 13 nt, Human
gaccaucccugaa

SEQ ID NO: 2167930 - RNA, 18 nt, Human
gaccaucccugaaggccc

SEQ ID NO: 2167931 - RNA, 19 nt, Human
gaccaucccugaaggcccc

SEQ ID NO: 2167932 - RNA, 19 nt, Human
gaagcucagcccacccccc

SEQ ID NO: 2167933 - RNA, 15 nt, Human
gaagcucugaaguca

SEQ ID NO: 2167934 - RNA, 13 nt, Human
gaagcucugaagu

SEQ ID NO: 2167935 - RNA, 23 nt, Human
gaagcuccucuccccagcccaga

SEQ ID NO: 2167936 - RNA, 22 nt, Human
gaagcuccucuccccagcccag

SEQ ID NO: 2167937 - RNA, 21 nt, Human
gaagcuccucuccccagccca

SEQ ID NO: 2167938 - RNA, 20 nt, Human
gaagcuccucuccccagccc

SEQ ID NO: 2167939 - RNA, 18 nt, Human
gaagcucagcccaccccc

SEQ ID NO: 2167940 - RNA, 17 nt, Human
gaagcucagcccacccc

SEQ ID NO: 2167941 - RNA, 15 nt, Human
gaagcucagcccacc

SEQ ID NO: 2167942 - RNA, 14 nt, Human
gaagcucagcccac

SEQ ID NO: 2167943 - RNA, 19 nt, Human
gaagcuccucuccccagcc

SEQ ID NO: 2167944 - RNA, 17 nt, Human
gaagcuccucuccccag

SEQ ID NO: 2167945 - RNA, 22 nt, Human
gaagcuccgcuuucuacccagc

SEQ ID NO: 2167946 - RNA, 18 nt, Human
gaagcugaggcgggagaa

SEQ ID NO: 2167947 - RNA, 17 nt, Human
gaagcugagcaccaggg

SEQ ID NO: 2167948 - RNA, 14 nt, Human
gaagcugagcacca

SEQ ID NO: 2167949 - RNA, 19 nt, Human
gaagcugagcaccagggga

SEQ ID NO: 2167950 - RNA, 17 nt, Human
gaagcugaugcuuugcu

SEQ ID NO: 2167951 - RNA, 21 nt, Human
gaagcugaugcuuugcuucaa

SEQ ID NO: 2167952 - RNA, 17 nt, Human
gaaggccccgcccaggc

SEQ ID NO: 2167953 - RNA, 18 nt, Human
gaagcucuugaagacacu

SEQ ID NO: 2167954 - RNA, 22 nt, Human
gaagcugaaaaccuaaguccuu

SEQ ID NO: 2167955 - RNA, 19 nt, Human
gaagcugacgaacuuccau

SEQ ID NO: 2167956 - RNA, 18 nt, Human
gaagcugacgaacuucca

SEQ ID NO: 2167957 - RNA, 22 nt, Human
gaagcugaagugcauccaaagg

SEQ ID NO: 2167958 - RNA, 23 nt, Human
gaagcugaagugcauccaaaggu

SEQ ID NO: 2167959 - RNA, 20 nt, Human
gaagcucugaagucacauca

SEQ ID NO: 2167960 - RNA, 16 nt, Human
gaagcucugaagucac

SEQ ID NO: 2167961 - RNA, 12 nt, Human
gaagcucuggcu

SEQ ID NO: 2167962 - RNA, 19 nt, Human
gaagcucuggcugaacccu

SEQ ID NO: 2167963 - RNA, 20 nt, Human
gaagcucuggcugaacccug

SEQ ID NO: 2167964 - RNA, 23 nt, Human
gaagcucuggcugaacccugugc

SEQ ID NO: 2167965 - RNA, 12 nt, Human
gaagcuagcucc

SEQ ID NO: 2167966 - RNA, 13 nt, Human
gaagcucagccca

SEQ ID NO: 2167967 - RNA, 12 nt, Human
gaagcucagccc

SEQ ID NO: 2167968 - RNA, 14 nt, Human
gaagcucagacugg

SEQ ID NO: 2167969 - RNA, 22 nt, Human
gaagcucaccuguugcuuacaa

SEQ ID NO: 2167970 - RNA, 19 nt, Human
gaagcuauaaauuccucuu

SEQ ID NO: 2167971 - RNA, 20 nt, Human
gaagcucaccuguugcuuac

SEQ ID NO: 2167972 - RNA, 19 nt, Human
gaagcuccgcuuucuaccc

SEQ ID NO: 2167973 - RNA, 20 nt, Human
gaagcuaucguaaaauuaag

SEQ ID NO: 2167974 - RNA, 14 nt, Human
gaagcuagcucccc

SEQ ID NO: 2167975 - RNA, 15 nt, Human
gaagcuagcuccccu

SEQ ID NO: 2167976 - RNA, 16 nt, Human
gaagcuagcuccccuc

SEQ ID NO: 2167977 - RNA, 22 nt, Human
gaagcuagcuccccuccucucc

SEQ ID NO: 2167978 - RNA, 17 nt, Human
gaagcuagcuccccucc

SEQ ID NO: 2167979 - RNA, 19 nt, Human
gaagcuagcuccccuccuc

SEQ ID NO: 2167980 - RNA, 18 nt, Human
gaaggcucuucuccccag

SEQ ID NO: 2167981 - RNA, 23 nt, Human
gaaggcucuucuccccagaguuc

SEQ ID NO: 2167982 - RNA, 16 nt, Human
gaaggcuggcugggca

SEQ ID NO: 2167983 - RNA, 13 nt, Human
gaaggcuggcugg

SEQ ID NO: 2167984 - RNA, 15 nt, Human
gaaggcuggguucug

SEQ ID NO: 2167985 - RNA, 19 nt, Human
gaaggcuggguucugaucc

SEQ ID NO: 2167986 - RNA, 22 nt, Human
gaaggccgagaagcaagaaaga

SEQ ID NO: 2167987 - RNA, 20 nt, Human
gaaggccucccuagccagca

SEQ ID NO: 2167988 - RNA, 18 nt, Human
gaaggccgagaagcaaga

SEQ ID NO: 2167989 - RNA, 17 nt, Human
gaaggccgagaagcaag

SEQ ID NO: 2167990 - RNA, 21 nt, Human
gaaggcucgagcaugccugga

SEQ ID NO: 2167991 - RNA, 18 nt, Human
gaaggccccgcccaggcu

SEQ ID NO: 2167992 - RNA, 19 nt, Human
gaaggccccgcccaggcuu

SEQ ID NO: 2167993 - RNA, 16 nt, Human
gaaggggacccccgcc

SEQ ID NO: 2167994 - RNA, 21 nt, Human
gaagggcuuggacucaagcaa

SEQ ID NO: 2167995 - RNA, 21 nt, Human
gaagggcccuucacugccuuu

SEQ ID NO: 2167996 - RNA, 19 nt, Human
gaagggccagucugggcug

SEQ ID NO: 2167997 - RNA, 20 nt, Human
gaagggccagucugggcugc

SEQ ID NO: 2167998 - RNA, 19 nt, Human
gaagggcuagaaccuggag

SEQ ID NO: 2167999 - RNA, 20 nt, Human
gaagggcuagaaccuggaga

SEQ ID NO: 2168000 - RNA, 22 nt, Human
gaagggcuagaaccuggagagc

SEQ ID NO: 2168001 - RNA, 20 nt, Human
gaagggcuagaaccuggagg

SEQ ID NO: 2168002 - RNA, 22 nt, Human
gaagggccaguccugccuggcc

SEQ ID NO: 2168003 - RNA, 14 nt, Human
gaagggccagucug

SEQ ID NO: 2168004 - RNA, 18 nt, Human
gaagggccagucugggcu

SEQ ID NO: 2168005 - RNA, 20 nt, Human
gaagggccaguccugccugg

SEQ ID NO: 2168006 - RNA, 19 nt, Human
gaagggccaguccugccug

SEQ ID NO: 2168007 - RNA, 18 nt, Human
gaagggccaguccugccu

SEQ ID NO: 2168008 - RNA, 16 nt, Human
gaagggccaguccugc

SEQ ID NO: 2168009 - RNA, 14 nt, Human
gaagggccaguccu

SEQ ID NO: 2168010 - RNA, 11 nt, Human
gaagggccagu

SEQ ID NO: 2168011 - RNA, 17 nt, Human
gaaggcuguccuuaccc

SEQ ID NO: 2168012 - RNA, 12 nt, Human
gaaggcuguccu

SEQ ID NO: 2168013 - RNA, 21 nt, Human
gaaggcucuucuccccagagu

SEQ ID NO: 2168014 - RNA, 14 nt, Human
gaagggccagagcc

SEQ ID NO: 2168015 - RNA, 16 nt, Human
gaaggcuucucucugu

SEQ ID NO: 2168016 - RNA, 18 nt, Human
gaagggccagagccaggg

SEQ ID NO: 2168017 - RNA, 17 nt, Human
gaagggccagagccagg

SEQ ID NO: 2168018 - RNA, 16 nt, Human
gaagggccagagccag

SEQ ID NO: 2168019 - RNA, 15 nt, Human
gaagggccagagcca

SEQ ID NO: 2168020 - RNA, 20 nt, Human
gaaggcuggguucugauccu

SEQ ID NO: 2168021 - RNA, 22 nt, Human
gaaggcuggguucugauccuag

SEQ ID NO: 2168022 - RNA, 18 nt, Human
gaaggggacccccgcccc

SEQ ID NO: 2168023 - RNA, 20 nt, Human
gaaggggacccccgcccccu

SEQ ID NO: 2168024 - RNA, 21 nt, Human
gaaggggacccccgcccccug

SEQ ID NO: 2168025 - RNA, 22 nt, Human
gaaggggagauaaggguaucug

SEQ ID NO: 2168026 - RNA, 15 nt, Human
gaaggggaggagggc

SEQ ID NO: 2168027 - RNA, 23 nt, Human
gaaggggaggcagccggcaccca

SEQ ID NO: 2168028 - RNA, 17 nt, Human
gaaggggaggagggcgg

SEQ ID NO: 2168029 - RNA, 24 nt, Human
gaagugugggucugugugugugua

SEQ ID NO: 2168030 - RNA, 21 nt, Human
gaagugugggucugugugugu

SEQ ID NO: 2168031 - RNA, 15 nt, Human
gaaguguguuuccuu

SEQ ID NO: 2168032 - RNA, 17 nt, Human
gaaguguuaauacuagu

SEQ ID NO: 2168033 - RNA, 13 nt, Human
gaaguguugcaug

SEQ ID NO: 2168034 - RNA, 15 nt, Human
gaaguguugcaugga

SEQ ID NO: 2168035 - RNA, 18 nt, Human
gaaguguugcauggaugu

SEQ ID NO: 2168036 - RNA, 21 nt, Human
gaaguguugcauggauguuuu

SEQ ID NO: 2168037 - RNA, 22 nt, Human
gaaguguugcauggauguuuua

SEQ ID NO: 2168038 - RNA, 21 nt, Human
gaaguguuucacgagagcccg

SEQ ID NO: 2168039 - RNA, 22 nt, Human
gaaguguuucacgagagcccgg

SEQ ID NO: 2168040 - RNA, 14 nt, Human
gaaguuacugaaug

SEQ ID NO: 2168041 - RNA, 18 nt, Human
gaaguuacuguuauagag

SEQ ID NO: 2168042 - RNA, 15 nt, Human
gaaguuaacagagac

SEQ ID NO: 2168043 - RNA, 15 nt, Human
gaaguuacugaaugc

SEQ ID NO: 2168044 - RNA, 16 nt, Human
gaaguuacugaaugca

SEQ ID NO: 2168045 - RNA, 13 nt, Human
gaaguuagaauuc

SEQ ID NO: 2168046 - RNA, 14 nt, Human
gaaguuagaauucc

SEQ ID NO: 2168047 - RNA, 20 nt, Human
gaaguuagaauuccuucagg

SEQ ID NO: 2168048 - RNA, 21 nt, Human
gaaguuagaauuccuucaggg

SEQ ID NO: 2168049 - RNA, 21 nt, Human
gaaguuauuuucuacaguggu

SEQ ID NO: 2168050 - RNA, 15 nt, Human
gaaguucaccauuaa

SEQ ID NO: 2168051 - RNA, 19 nt, Human
gaaguucaccauuaaaagg

SEQ ID NO: 2168052 - RNA, 20 nt, Human
gaaguucaccauuaaaaggg

SEQ ID NO: 2168053 - RNA, 22 nt, Human
gaaguucaccauuaaaagggau

SEQ ID NO: 2168054 - RNA, 15 nt, Human
gaaguugaaugggca

SEQ ID NO: 2168055 - RNA, 16 nt, Human
gaauaguugagcccca

SEQ ID NO: 2168056 - RNA, 13 nt, Human
gaauauaaacacu

SEQ ID NO: 2168057 - RNA, 18 nt, Human
gaauaguauccuccaggu

SEQ ID NO: 2168058 - RNA, 19 nt, Human
gaauaguauccuccagguu

SEQ ID NO: 2168059 - RNA, 20 nt, Human
gaauaguauccuccagguuu

SEQ ID NO: 2168060 - RNA, 21 nt, Human
gaauaguauccuccagguuuu

SEQ ID NO: 2168061 - RNA, 22 nt, Human
gaaguuguuacuaacuaaacuc

SEQ ID NO: 2168062 - RNA, 14 nt, Human
gaaguuguuuguca

SEQ ID NO: 2168063 - RNA, 16 nt, Human
gaauaguauccuccag

SEQ ID NO: 2168064 - RNA, 17 nt, Human
gaauaguauccuccagg

SEQ ID NO: 2168065 - RNA, 22 nt, Human
gaaguuggagugaguguggcuc

SEQ ID NO: 2168066 - RNA, 17 nt, Human
gaaguugcagugagcug

SEQ ID NO: 2168067 - RNA, 18 nt, Human
gaaguugauauagaacag

SEQ ID NO: 2168068 - RNA, 21 nt, Human
gaaguugauauagaacagugc

SEQ ID NO: 2168069 - RNA, 20 nt, Human
gaaguugugccuuuuauagc

SEQ ID NO: 2168070 - RNA, 21 nt, Human
gaaguuguuacuaacuaaacu

SEQ ID NO: 2168071 - RNA, 21 nt, Human
gaauauaaacacuauauggca

SEQ ID NO: 2168072 - RNA, 14 nt, Human
gaauauaaacacua

SEQ ID NO: 2168073 - RNA, 23 nt, Human
gaauagucuagauggcuccucuc

SEQ ID NO: 2168074 - RNA, 16 nt, Human
gaauauaauacuguau

SEQ ID NO: 2168075 - RNA, 19 nt, Human
gaauauaauauauuugugu

SEQ ID NO: 2168076 - RNA, 20 nt, Human
gaauauaauauauuugugua

SEQ ID NO: 2168077 - RNA, 12 nt, Human
gaauauaauuau

SEQ ID NO: 2168078 - RNA, 13 nt, Human
gaauauaauuauc

SEQ ID NO: 2168079 - RNA, 21 nt, Human
gaauaugggagaaauagugug

SEQ ID NO: 2168080 - RNA, 12 nt, Human
gaauauuagcuu

SEQ ID NO: 2168081 - RNA, 21 nt, Human
gaauauuagcuuuacuguuug

SEQ ID NO: 2168082 - RNA, 20 nt, Human
gaauauuagugaccucagcu

SEQ ID NO: 2168083 - RNA, 14 nt, Human
gaauauugcugaug

SEQ ID NO: 2168084 - RNA, 15 nt, Human
gaauauugcugaugg

SEQ ID NO: 2168085 - RNA, 11 nt, Human
gaauauuugaa

SEQ ID NO: 2168086 - RNA, 12 nt, Human
gaauauuugaau

SEQ ID NO: 2168087 - RNA, 13 nt, Human
gaauauuugaauc

SEQ ID NO: 2168088 - RNA, 20 nt, Human
gaauauuuauauuucacuau

SEQ ID NO: 2168089 - RNA, 19 nt, Human
gaauauuuccauauggauu

SEQ ID NO: 2168090 - RNA, 10 nt, Human
gaauauuuga

SEQ ID NO: 2168091 - RNA, 19 nt, Human
gaauauuuauuaccucuga

SEQ ID NO: 2168092 - RNA, 21 nt, Human
gaauauuuauuaccucugaua

SEQ ID NO: 2168093 - RNA, 13 nt, Human
gaauauuuauuac

SEQ ID NO: 2168094 - RNA, 15 nt, Human
gaauauuuauuaccu

SEQ ID NO: 2168095 - RNA, 17 nt, Human
gaauauuuauuaccucu

SEQ ID NO: 2168096 - RNA, 18 nt, Human
gaauauuuauuaccucug

SEQ ID NO: 2168097 - RNA, 18 nt, Human
gaauauuuauauuucacu

SEQ ID NO: 2168098 - RNA, 10 nt, Human
gaauauuuau

SEQ ID NO: 2168099 - RNA, 19 nt, Human
gaauauuuauauuucacua

SEQ ID NO: 2168100 - RNA, 12 nt, Human
gaauauuuauua

SEQ ID NO: 2168101 - RNA, 11 nt, Human
gaauauucagg

SEQ ID NO: 2168102 - RNA, 13 nt, Human
gaauauuguccau

SEQ ID NO: 2168103 - RNA, 12 nt, Human
gaauauucagga

SEQ ID NO: 2168104 - RNA, 19 nt, Human
gaauauugcugauggugca

SEQ ID NO: 2168105 - RNA, 20 nt, Human
gaauauugcugauggugcaa

SEQ ID NO: 2168106 - RNA, 23 nt, Human
gaagacaccagagcagaugcaga

SEQ ID NO: 2168107 - RNA, 20 nt, Human
gaagcagaugcaaagaggca

SEQ ID NO: 2168108 - RNA, 19 nt, Human
gaagcagaugcaaagaggc

SEQ ID NO: 2168109 - RNA, 21 nt, Human
gaagcagaugcaaagaggcaa

SEQ ID NO: 2168110 - RNA, 15 nt, Human
gaagcagaggaagga

SEQ ID NO: 2168111 - RNA, 20 nt, Human
gaagcagaauaaagcaauuu

SEQ ID NO: 2168112 - RNA, 21 nt, Human
gaagcagaauaaagcaauuuu

SEQ ID NO: 2168113 - RNA, 23 nt, Human
gaagcagaauaaagcaauuuucc

SEQ ID NO: 2168114 - RNA, 22 nt, Human
gaagcagaauaaagcaauuuuc

SEQ ID NO: 2168115 - RNA, 23 nt, Human
gaagcacuuugggauucuuucca

SEQ ID NO: 2168116 - RNA, 12 nt, Human
gaagcagaauaa

SEQ ID NO: 2168117 - RNA, 13 nt, Human
gaagcagaauaaa

SEQ ID NO: 2168118 - RNA, 14 nt, Human
gaagcagaauaaag

SEQ ID NO: 2168119 - RNA, 15 nt, Human
gaagcagaauaaagc

SEQ ID NO: 2168120 - RNA, 16 nt, Human
gaagcagaauaaagca

SEQ ID NO: 2168121 - RNA, 17 nt, Human
gaagcagaauaaagcaa

SEQ ID NO: 2168122 - RNA, 18 nt, Human
gaagcagaauaaagcaau

SEQ ID NO: 2168123 - RNA, 19 nt, Human
gaagcagaauaaagcaauu

SEQ ID NO: 2168124 - RNA, 17 nt, Human
gaagcaaacacauuaag

SEQ ID NO: 2168125 - RNA, 16 nt, Human
gaagcaaagcaccagc

SEQ ID NO: 2168126 - RNA, 17 nt, Human
gaagcaaacuaagcccc

SEQ ID NO: 2168127 - RNA, 23 nt, Human
gaagcaacccaaauguucaucaa

SEQ ID NO: 2168128 - RNA, 16 nt, Human
gaagcaacgaagggaa

SEQ ID NO: 2168129 - RNA, 20 nt, Human
gaagcaaugcuucaucccuu

SEQ ID NO: 2168130 - RNA, 16 nt, Human
gaagcaacagaaaaaa

SEQ ID NO: 2168131 - RNA, 19 nt, Human
gaagcaauaaagaagagug

SEQ ID NO: 2168132 - RNA, 18 nt, Human
gaagcaauaaagaagagu

SEQ ID NO: 2168133 - RNA, 15 nt, Human
gaagcacaugccucu

SEQ ID NO: 2168134 - RNA, 17 nt, Human
gaagcacaugccucucu

SEQ ID NO: 2168135 - RNA, 20 nt, Human
gaagcacaugccucucucag

SEQ ID NO: 2168136 - RNA, 15 nt, Human
gaagcaaacacauua

SEQ ID NO: 2168137 - RNA, 13 nt, Human
gaagcaaacacau

SEQ ID NO: 2168138 - RNA, 22 nt, Human
gaagacaccagagcagaugcag

SEQ ID NO: 2168139 - RNA, 18 nt, Human
gaagacaccagagcagau

SEQ ID NO: 2168140 - RNA, 21 nt, Human
gaagacaccagagcagaugca

SEQ ID NO: 2168141 - RNA, 14 nt, Human
gaagcaaaauuuuu

SEQ ID NO: 2168142 - RNA, 23 nt, Human
gaagauuuugaaauuuuuauuaa

SEQ ID NO: 2168143 - RNA, 14 nt, Human
gaagacaccagagc

SEQ ID NO: 2168144 - RNA, 15 nt, Human
gaagacaccagagca

SEQ ID NO: 2168145 - RNA, 16 nt, Human
gaagacaccagagcag

SEQ ID NO: 2168146 - RNA, 17 nt, Human
gaagacaccagagcaga

SEQ ID NO: 2168147 - RNA, 21 nt, Human
gaagacacagacugcgauuug

SEQ ID NO: 2168148 - RNA, 12 nt, Human
gaagacacagac

SEQ ID NO: 2168149 - RNA, 21 nt, Human
gaagaauuuucagaccccagc

SEQ ID NO: 2168150 - RNA, 20 nt, Human
gaagaauuuucagaccccag

SEQ ID NO: 2168151 - RNA, 17 nt, Human
gaagaauuuucagaccc

SEQ ID NO: 2168152 - RNA, 16 nt, Human
gaagacaaugacuuac

SEQ ID NO: 2168153 - RNA, 23 nt, Human
gaagacaaugugaaaagaaaaau

SEQ ID NO: 2168154 - RNA, 22 nt, Human
gaagacaaugacuuacuguaca

SEQ ID NO: 2168155 - RNA, 23 nt, Human
gaacuggacucaggaugcccagg

SEQ ID NO: 2168156 - RNA, 21 nt, Human
gaacuggacucaggaugccca

SEQ ID NO: 2168157 - RNA, 15 nt, Human
gaacuggacucagga

SEQ ID NO: 2168158 - RNA, 14 nt, Human
gaacuggacucagg

SEQ ID NO: 2168159 - RNA, 22 nt, Human
gaacuggacccuguugcuaagc

SEQ ID NO: 2168160 - RNA, 23 nt, Human
gaacuggacccuguugcuaagcc

SEQ ID NO: 2168161 - RNA, 16 nt, Human
gaacugcuuucuuucg

SEQ ID NO: 2168162 - RNA, 18 nt, Human
gaacuggacccuguugcu

SEQ ID NO: 2168163 - RNA, 20 nt, Human
gaacuggacccuguugcuaa

SEQ ID NO: 2168164 - RNA, 20 nt, Human
gaacugcugggcuuggcagc

SEQ ID NO: 2168165 - RNA, 17 nt, Human
gaacugcugggcuuggc

SEQ ID NO: 2168166 - RNA, 20 nt, Human
gaacugaaccggcuuuacca

SEQ ID NO: 2168167 - RNA, 12 nt, Human
gaacucugaaau

SEQ ID NO: 2168168 - RNA, 21 nt, Human
gaacugccuuuggcagaguuc

SEQ ID NO: 2168169 - RNA, 22 nt, Human
gaacugcuagucaagugcgucc

SEQ ID NO: 2168170 - RNA, 17 nt, Human
gaacugccucuuuccug

SEQ ID NO: 2168171 - RNA, 19 nt, Human
gaacugagcuccucugggc

SEQ ID NO: 2168172 - RNA, 17 nt, Human
gaacugagcuccucugg

SEQ ID NO: 2168173 - RNA, 12 nt, Human
gaacugaacuca

SEQ ID NO: 2168174 - RNA, 17 nt, Human
gaacugaaguuucacau

SEQ ID NO: 2168175 - RNA, 11 nt, Human
gaacuggcugc

SEQ ID NO: 2168176 - RNA, 12 nt, Human
gaacuggcugca

SEQ ID NO: 2168177 - RNA, 19 nt, Human
gaagaauauucaggacuua

SEQ ID NO: 2168178 - RNA, 20 nt, Human
gaagaaucuguuucccagca

SEQ ID NO: 2168179 - RNA, 17 nt, Human
gaagaauauucaggacu

SEQ ID NO: 2168180 - RNA, 14 nt, Human
gaagaauauucagg

SEQ ID NO: 2168181 - RNA, 15 nt, Human
gaagaauuuucagac

SEQ ID NO: 2168182 - RNA, 23 nt, Human
gaagaauuuuaaaaaugaauccu

SEQ ID NO: 2168183 - RNA, 14 nt, Human
gaagaauuuuaaaa

SEQ ID NO: 2168184 - RNA, 15 nt, Human
gaagaauuuuaaaaa

SEQ ID NO: 2168185 - RNA, 13 nt, Human
gaagaauuuguua

SEQ ID NO: 2168186 - RNA, 14 nt, Human
gaagaauuuguuau

SEQ ID NO: 2168187 - RNA, 12 nt, Human
gaagaauuuuaa

SEQ ID NO: 2168188 - RNA, 13 nt, Human
gaagaauuuuaaa

SEQ ID NO: 2168189 - RNA, 20 nt, Human
gaagaauugaacccaggagg

SEQ ID NO: 2168190 - RNA, 19 nt, Human
gaagaauugaacccaggag

SEQ ID NO: 2168191 - RNA, 18 nt, Human
gaagaauugaacccagga

SEQ ID NO: 2168192 - RNA, 23 nt, Human
gaagaauugaacccaggaggugg

SEQ ID NO: 2168193 - RNA, 14 nt, Human
gaagaaugaacaaa

SEQ ID NO: 2168194 - RNA, 12 nt, Human
gaagaauuccag

SEQ ID NO: 2168195 - RNA, 13 nt, Human
gaacccugugcug

SEQ ID NO: 2168196 - RNA, 18 nt, Human
gaacccugcguggggaca

SEQ ID NO: 2168197 - RNA, 16 nt, Human
gaacccuuggcuugcc

SEQ ID NO: 2168198 - RNA, 12 nt, Human
gaacccuuggcu

SEQ ID NO: 2168199 - RNA, 19 nt, Human
gaacccugcguggggacag

SEQ ID NO: 2168200 - RNA, 14 nt, Human
gaacccugugcugg

SEQ ID NO: 2168201 - RNA, 17 nt, Human
gaacccugugcuggugu

SEQ ID NO: 2168202 - RNA, 17 nt, Human
gaaccgagcaaagauca

SEQ ID NO: 2168203 - RNA, 19 nt, Human
gaacccuuuuggcccccga

SEQ ID NO: 2168204 - RNA, 18 nt, Human
gaacccuuuuggcccccg

SEQ ID NO: 2168205 - RNA, 17 nt, Human
gaacccuuuuggccccc

SEQ ID NO: 2168206 - RNA, 23 nt, Human
gaacccugugcugguguccugac

SEQ ID NO: 2168207 - RNA, 21 nt, Human
gaacccuuggcuugcccacgu

SEQ ID NO: 2168208 - RNA, 20 nt, Human
gaacccuuggcuugcccacg

SEQ ID NO: 2168209 - RNA, 18 nt, Human
gaacccuuggcuugccca

SEQ ID NO: 2168210 - RNA, 17 nt, Human
gaacccuuggcuugccc

SEQ ID NO: 2168211 - RNA, 23 nt, Human
gaacccuuuuggcccccgagcug

SEQ ID NO: 2168212 - RNA, 19 nt, Human
gaaccgagcaaagaucaaa

SEQ ID NO: 2168213 - RNA, 21 nt, Human
gaaccgagcaaagaucaaaau

SEQ ID NO: 2168214 - RNA, 23 nt, Human
gaaccgagcaaagaucaaaauaa

SEQ ID NO: 2168215 - RNA, 21 nt, Human
gaaccgaggggcucaggaaaa

SEQ ID NO: 2168216 - RNA, 18 nt, Human
gaaccgaggggcucagga

SEQ ID NO: 2168217 - RNA, 14 nt, Human
gaacuccugggcuc

SEQ ID NO: 2168218 - RNA, 15 nt, Human
gaacuccuugauuuu

SEQ ID NO: 2168219 - RNA, 21 nt, Human
gaaccgcagaagccuccccag

SEQ ID NO: 2168220 - RNA, 20 nt, Human
gaaccgcagaagccucccca

SEQ ID NO: 2168221 - RNA, 17 nt, Human
gaacucucuccacccua

SEQ ID NO: 2168222 - RNA, 20 nt, Human
gaacucugacaacagacuuc

SEQ ID NO: 2168223 - RNA, 20 nt, Human
gaacuccugggcucaagcag

SEQ ID NO: 2168224 - RNA, 22 nt, Human
gaacuccuugauuuuagccuuc

SEQ ID NO: 2168225 - RNA, 14 nt, Human
gaacugaaaucaua

SEQ ID NO: 2168226 - RNA, 16 nt, Human
gaacucuggcuuccag

SEQ ID NO: 2168227 - RNA, 13 nt, Human
gaguuuaaagcaa

SEQ ID NO: 2168228 - RNA, 16 nt, Human
gaguuuaaauuguaau

SEQ ID NO: 2168229 - RNA, 22 nt, Human
gaguuguuuucagacucagacu

SEQ ID NO: 2168230 - RNA, 16 nt, Human
gaguuguuuucagacu

SEQ ID NO: 2168231 - RNA, 15 nt, Human
gaguuguugcccugg

SEQ ID NO: 2168232 - RNA, 13 nt, Human
gaguuggcuggga

SEQ ID NO: 2168233 - RNA, 22 nt, Human
gaguuguuacauuuuuaagugc

SEQ ID NO: 2168234 - RNA, 18 nt, Human
gaguugauucagcucugc

SEQ ID NO: 2168235 - RNA, 14 nt, Human
gaguugaugucucc

SEQ ID NO: 2168236 - RNA, 18 nt, Human
gaguugcugcaaaccuga

SEQ ID NO: 2168237 - RNA, 16 nt, Human
gaggugaaagggagcu

SEQ ID NO: 2168238 - RNA, 23 nt, Human
gaggugaccccagguuucuaugu

SEQ ID NO: 2168239 - RNA, 14 nt, Human
gaggucucuugagg

SEQ ID NO: 2168240 - RNA, 16 nt, Human
gaggucucugccggcu

SEQ ID NO: 2168241 - RNA, 22 nt, Human
gaggucucgcugaugcugggcu

SEQ ID NO: 2168242 - RNA, 23 nt, Human
gaggucucgcugaugcugggcug

SEQ ID NO: 2168243 - RNA, 17 nt, Human
gaggucucgcugaugcu

SEQ ID NO: 2168244 - RNA, 20 nt, Human
gaggucucgcugaugcuggg

SEQ ID NO: 2168245 - RNA, 22 nt, Human
gaggucuuuugacauguggaaa

SEQ ID NO: 2168246 - RNA, 15 nt, Human
gaggucucuugaggg

SEQ ID NO: 2168247 - RNA, 19 nt, Human
gaggucuuuugacaugugg

SEQ ID NO: 2168248 - RNA, 15 nt, Human
gaggugaaagggagc

SEQ ID NO: 2168249 - RNA, 15 nt, Human
gaggucgaggcagga

SEQ ID NO: 2168250 - RNA, 20 nt, Human
gaggucgggaguucgagacc

SEQ ID NO: 2168251 - RNA, 22 nt, Human
gaggucgaccccaaagccccuu

SEQ ID NO: 2168252 - RNA, 21 nt, Human
gaggucgguagguucagccaa

SEQ ID NO: 2168253 - RNA, 22 nt, Human
gaggucgguagguucagccaag

SEQ ID NO: 2168254 - RNA, 23 nt, Human
gaggucgguagguucagccaagg

SEQ ID NO: 2168255 - RNA, 13 nt, Human
gaggucuaaucua

SEQ ID NO: 2168256 - RNA, 21 nt, Human
gagugcaagccccugcuccag

SEQ ID NO: 2168257 - RNA, 16 nt, Human
gagugcaacaguagca

SEQ ID NO: 2168258 - RNA, 22 nt, Human
gagugauacaacuucaagugca

SEQ ID NO: 2168259 - RNA, 19 nt, Human
gagugcaaugacacagucu

SEQ ID NO: 2168260 - RNA, 19 nt, Human
gaguggagguuaaggcuga

SEQ ID NO: 2168261 - RNA, 17 nt, Human
gaguggaggaggccugg

SEQ ID NO: 2168262 - RNA, 18 nt, Human
gaguggaggaggccuggg

SEQ ID NO: 2168263 - RNA, 18 nt, Human
gaguggaguggaagaaga

SEQ ID NO: 2168264 - RNA, 16 nt, Human
gagugcagccguuuga

SEQ ID NO: 2168265 - RNA, 23 nt, Human
gagugcagccguuugagaagaaa

SEQ ID NO: 2168266 - RNA, 19 nt, Human
gagugaguguggcuccccu

SEQ ID NO: 2168267 - RNA, 19 nt, Human
gagugauagucuuuugcuu

SEQ ID NO: 2168268 - RNA, 20 nt, Human
gagugacggucccacacugg

SEQ ID NO: 2168269 - RNA, 18 nt, Human
gagugacucgaggguugg

SEQ ID NO: 2168270 - RNA, 15 nt, Human
gagugacucgagggu

SEQ ID NO: 2168271 - RNA, 18 nt, Human
gagucccaaggaaagccc

SEQ ID NO: 2168272 - RNA, 20 nt, Human
gaguccauucucccagguac

SEQ ID NO: 2168273 - RNA, 19 nt, Human
gagugacaguggauugcau

SEQ ID NO: 2168274 - RNA, 15 nt, Human
gagugacggucccac

SEQ ID NO: 2168275 - RNA, 18 nt, Human
gagugacggucccacacu

SEQ ID NO: 2168276 - RNA, 20 nt, Human
gagugacagaggcagcccca

SEQ ID NO: 2168277 - RNA, 18 nt, Human
gaguggaugauguuucgu

SEQ ID NO: 2168278 - RNA, 19 nt, Human
gaguggaucuccaaggacc

SEQ ID NO: 2168279 - RNA, 22 nt, Human
gaguggaucuccaaggaccagg

SEQ ID NO: 2168280 - RNA, 16 nt, Human
gaguggaucuccaagg

SEQ ID NO: 2168281 - RNA, 17 nt, Human
gaguggaucuccaagga

SEQ ID NO: 2168282 - RNA, 16 nt, Human
gaguugaucuggaacc

SEQ ID NO: 2168283 - RNA, 14 nt, Human
gaguugaucuggaa

SEQ ID NO: 2168284 - RNA, 23 nt, Human
gaguggcaggggacaggagucca

SEQ ID NO: 2168285 - RNA, 14 nt, Human
gaguggcaggggac

SEQ ID NO: 2168286 - RNA, 16 nt, Human
gaguggcaggggacag

SEQ ID NO: 2168287 - RNA, 19 nt, Human
gaguggcaggggacaggag

SEQ ID NO: 2168288 - RNA, 17 nt, Human
gaguugauucagcucug

SEQ ID NO: 2168289 - RNA, 16 nt, Human
gaguugauucagcucu

SEQ ID NO: 2168290 - RNA, 15 nt, Human
gaguugauucagcuc

SEQ ID NO: 2168291 - RNA, 21 nt, Human
gaguugaucuggaacccagac

SEQ ID NO: 2168292 - RNA, 20 nt, Human
gaguugaucuggaacccaga

SEQ ID NO: 2168293 - RNA, 19 nt, Human
gaguugaucuggaacccag

SEQ ID NO: 2168294 - RNA, 17 nt, Human
gaguugaucuggaaccc

SEQ ID NO: 2168295 - RNA, 20 nt, Human
gagucacccaugaagacagg

SEQ ID NO: 2168296 - RNA, 14 nt, Human
gagucaccaggaau

SEQ ID NO: 2168297 - RNA, 20 nt, Human
gagguggaagcccuccuucc

SEQ ID NO: 2168298 - RNA, 17 nt, Human
gagucaccaagcccagu

SEQ ID NO: 2168299 - RNA, 15 nt, Human
gagguggaagcccuc

SEQ ID NO: 2168300 - RNA, 19 nt, Human
gagguggaagaagggagaa

SEQ ID NO: 2168301 - RNA, 17 nt, Human
gagguggaagaagggag

SEQ ID NO: 2168302 - RNA, 18 nt, Human
gagguggaagaagggaga

SEQ ID NO: 2168303 - RNA, 15 nt, Human
gagucaccaagccca

SEQ ID NO: 2168304 - RNA, 16 nt, Human
gagucaccaagcccag

SEQ ID NO: 2168305 - RNA, 20 nt, Human
gagguggaagagggcugcaa

SEQ ID NO: 2168306 - RNA, 17 nt, Human
gagguggaagagggcug

SEQ ID NO: 2168307 - RNA, 22 nt, Human
gaggugcuuaagcagaagcauu

SEQ ID NO: 2168308 - RNA, 13 nt, Human
gagguggaagaag

SEQ ID NO: 2168309 - RNA, 15 nt, Human
gagguggaagaaggg

SEQ ID NO: 2168310 - RNA, 16 nt, Human
gagguggaagaaggga

SEQ ID NO: 2168311 - RNA, 20 nt, Human
gaggugcuuaagcagaagca

SEQ ID NO: 2168312 - RNA, 22 nt, Human
gagucagggaccccugcccuug

SEQ ID NO: 2168313 - RNA, 18 nt, Human
gagucagggaccccugcc

SEQ ID NO: 2168314 - RNA, 17 nt, Human
gagucagggaccccugc

SEQ ID NO: 2168315 - RNA, 18 nt, Human
gagucagggagagcugaa

SEQ ID NO: 2168316 - RNA, 11 nt, Human
gagucagccuu

SEQ ID NO: 2168317 - RNA, 22 nt, Human
gagucagacauuuuaagauggu

SEQ ID NO: 2168318 - RNA, 22 nt, Human
gagucagaaguuucugccgcag

SEQ ID NO: 2168319 - RNA, 12 nt, Human
gagucccaccuu

SEQ ID NO: 2168320 - RNA, 14 nt, Human
gagucccaaggaaa

SEQ ID NO: 2168321 - RNA, 17 nt, Human
gaguccauucucccagg

SEQ ID NO: 2168322 - RNA, 18 nt, Human
gaguccauucucccaggu

SEQ ID NO: 2168323 - RNA, 18 nt, Human
gagucagguuugggguuc

SEQ ID NO: 2168324 - RNA, 15 nt, Human
gaguccauucuccca

SEQ ID NO: 2168325 - RNA, 16 nt, Human
gaguccauucucccag

SEQ ID NO: 2168326 - RNA, 16 nt, Human
gagucccaaggaaagc

SEQ ID NO: 2168327 - RNA, 15 nt, Human
gagucccaaggaaag

SEQ ID NO: 2168328 - RNA, 18 nt, Human
gagugacagaggcagccc

SEQ ID NO: 2168329 - RNA, 12 nt, Human
gagcugcuggcu

SEQ ID NO: 2168330 - RNA, 13 nt, Human
gagcugcugcccu

SEQ ID NO: 2168331 - RNA, 14 nt, Human
gagcugcugcccug

SEQ ID NO: 2168332 - RNA, 16 nt, Human
gagcugcucuggaaaa

SEQ ID NO: 2168333 - RNA, 14 nt, Human
gagcugcucugaau

SEQ ID NO: 2168334 - RNA, 24 nt, Human
gagcugcucugaauuaguccuugc

SEQ ID NO: 2168335 - RNA, 21 nt, Human
gagcugcuauagccuggggug

SEQ ID NO: 2168336 - RNA, 13 nt, Human
gagcugcucacua

SEQ ID NO: 2168337 - RNA, 20 nt, Human
gagcugcuauagccuggggu

SEQ ID NO: 2168338 - RNA, 18 nt, Human
gagcugcuauagccuggg

SEQ ID NO: 2168339 - RNA, 22 nt, Human
gagcugccuuggcucagacaug

SEQ ID NO: 2168340 - RNA, 21 nt, Human
gagcugccuuggcucagacau

SEQ ID NO: 2168341 - RNA, 21 nt, Human
gagcugcuggcuugcagugcg

SEQ ID NO: 2168342 - RNA, 16 nt, Human
gagcugcuggcuugca

SEQ ID NO: 2168343 - RNA, 18 nt, Human
gagcgcaccugcccccug

SEQ ID NO: 2168344 - RNA, 22 nt, Human
gagccuucugaggacauuccaa

SEQ ID NO: 2168345 - RNA, 13 nt, Human
gagccuugaacuu

SEQ ID NO: 2168346 - RNA, 23 nt, Human
gagccuuccaggggugggacacc

SEQ ID NO: 2168347 - RNA, 16 nt, Human
gagcgcaucaggccug

SEQ ID NO: 2168348 - RNA, 12 nt, Human
gagcgccccucc

SEQ ID NO: 2168349 - RNA, 17 nt, Human
gagcgcccgcgcccgcg

SEQ ID NO: 2168350 - RNA, 20 nt, Human
gagcgcaccugcccccuggu

SEQ ID NO: 2168351 - RNA, 21 nt, Human
gagcgcccacuagacccacug

SEQ ID NO: 2168352 - RNA, 18 nt, Human
gagcugccuuggcucaga

SEQ ID NO: 2168353 - RNA, 15 nt, Human
gagcugccuuggcuc

SEQ ID NO: 2168354 - RNA, 19 nt, Human
gagcgccuccauccaaggc

SEQ ID NO: 2168355 - RNA, 23 nt, Human
gagcgccuccauccaaggccagg

SEQ ID NO: 2168356 - RNA, 21 nt, Human
gagcgccgugaguucucaggg

SEQ ID NO: 2168357 - RNA, 22 nt, Human
gagcgccgugaguucucagggc

SEQ ID NO: 2168358 - RNA, 20 nt, Human
gagccuuccaggggugggac

SEQ ID NO: 2168359 - RNA, 14 nt, Human
gaggggccucaggu

SEQ ID NO: 2168360 - RNA, 13 nt, Human
gaggggcccgagc

SEQ ID NO: 2168361 - RNA, 22 nt, Human
gaggggccccugcuucuccagc

SEQ ID NO: 2168362 - RNA, 14 nt, Human
gaggggccccugcu

SEQ ID NO: 2168363 - RNA, 17 nt, Human
gaggggcccgcuugccu

SEQ ID NO: 2168364 - RNA, 21 nt, Human
gaggggcccguugucucccug

SEQ ID NO: 2168365 - RNA, 12 nt, Human
gaggggccucuu

SEQ ID NO: 2168366 - RNA, 23 nt, Human
gaggggccuaggccucagccaga

SEQ ID NO: 2168367 - RNA, 22 nt, Human
gaggggccuaggccucagccag

SEQ ID NO: 2168368 - RNA, 19 nt, Human
gaggggccuaggccucagc

SEQ ID NO: 2168369 - RNA, 17 nt, Human
gaggggccuaggccuca

SEQ ID NO: 2168370 - RNA, 19 nt, Human
gaggggcauggccagcagc

SEQ ID NO: 2168371 - RNA, 15 nt, Human
gaggggcagguaaac

SEQ ID NO: 2168372 - RNA, 22 nt, Human
gaggggcaucugccccuccccc

SEQ ID NO: 2168373 - RNA, 17 nt, Human
gaggggcaucugccccu

SEQ ID NO: 2168374 - RNA, 14 nt, Human
gaggggcaggcuga

SEQ ID NO: 2168375 - RNA, 16 nt, Human
gaggggcaggcugaca

SEQ ID NO: 2168376 - RNA, 13 nt, Human
gaggggcaggccc

SEQ ID NO: 2168377 - RNA, 14 nt, Human
gaggggcaggcccu

SEQ ID NO: 2168378 - RNA, 15 nt, Human
gaggggcaggcccug

SEQ ID NO: 2168379 - RNA, 17 nt, Human
gaggggcaggcccugca

SEQ ID NO: 2168380 - RNA, 23 nt, Human
gaggggcaggcccugcacugucc

SEQ ID NO: 2168381 - RNA, 13 nt, Human
gaggggcaggcug

SEQ ID NO: 2168382 - RNA, 15 nt, Human
gagggcuggaaucug

SEQ ID NO: 2168383 - RNA, 13 nt, Human
gagggcuggaauc

SEQ ID NO: 2168384 - RNA, 18 nt, Human
gagggcuggaaucuggag

SEQ ID NO: 2168385 - RNA, 19 nt, Human
gagggcuggaaucuggaga

SEQ ID NO: 2168386 - RNA, 20 nt, Human
gagggcuggaaucuggagag

SEQ ID NO: 2168387 - RNA, 21 nt, Human
gagggcuggaaucuggagagc

SEQ ID NO: 2168388 - RNA, 20 nt, Human
gaggcugcagaaggccaaga

SEQ ID NO: 2168389 - RNA, 13 nt, Human
gagggcugcccug

SEQ ID NO: 2168390 - RNA, 12 nt, Human
gaggcugaggcg

SEQ ID NO: 2168391 - RNA, 15 nt, Human
gaggcugaggcuggc

SEQ ID NO: 2168392 - RNA, 19 nt, Human
gaggcugaggcuggcacag

SEQ ID NO: 2168393 - RNA, 16 nt, Human
gaggcugaggcuggca

SEQ ID NO: 2168394 - RNA, 19 nt, Human
gaggcugcagccaggccac

SEQ ID NO: 2168395 - RNA, 20 nt, Human
gaggcugaggcuggcacagg

SEQ ID NO: 2168396 - RNA, 18 nt, Human
gaggcugcagccaggcca

SEQ ID NO: 2168397 - RNA, 13 nt, Human
gaggcagggucag

SEQ ID NO: 2168398 - RNA, 14 nt, Human
gaggcagugggucc

SEQ ID NO: 2168399 - RNA, 19 nt, Human
gaggcagugggucccacuu

SEQ ID NO: 2168400 - RNA, 22 nt, Human
gaggcagugggucccacuuccc

SEQ ID NO: 2168401 - RNA, 22 nt, Human
gaggccaaggugggaggauugc

SEQ ID NO: 2168402 - RNA, 17 nt, Human
gaggccaaggugggagg

SEQ ID NO: 2168403 - RNA, 15 nt, Human
gaggcagggucucac

SEQ ID NO: 2168404 - RNA, 12 nt, Human
gaggcagguccc

SEQ ID NO: 2168405 - RNA, 16 nt, Human
gaggcagguccccaga

SEQ ID NO: 2168406 - RNA, 13 nt, Human
gaggcaggucccc

SEQ ID NO: 2168407 - RNA, 15 nt, Human
gaggaccuuaucugu

SEQ ID NO: 2168408 - RNA, 19 nt, Human
gaggaccuuaucugugcgu

SEQ ID NO: 2168409 - RNA, 22 nt, Human
gaggacgagcgauugaggugua

SEQ ID NO: 2168410 - RNA, 15 nt, Human
gaggacgcucucugg

SEQ ID NO: 2168411 - RNA, 14 nt, Human
gaggcaggggcgga

SEQ ID NO: 2168412 - RNA, 23 nt, Human
gaggcagggccuugcccagagau

SEQ ID NO: 2168413 - RNA, 15 nt, Human
gaggcaggggcggag

SEQ ID NO: 2168414 - RNA, 14 nt, Human
gaggcagggucuca

SEQ ID NO: 2168415 - RNA, 17 nt, Human
gaggcugaggcaggagg

SEQ ID NO: 2168416 - RNA, 16 nt, Human
gaggcugaggcaggag

SEQ ID NO: 2168417 - RNA, 18 nt, Human
gaggcugaggcagaagaa

SEQ ID NO: 2168418 - RNA, 16 nt, Human
gaggcugaggcagaag

SEQ ID NO: 2168419 - RNA, 14 nt, Human
gaggcugaggccug

SEQ ID NO: 2168420 - RNA, 16 nt, Human
gaggcugaggccugga

SEQ ID NO: 2168421 - RNA, 18 nt, Human
gaggcugaggccuggacu

SEQ ID NO: 2168422 - RNA, 19 nt, Human
gaggcugaggccuggacuu

SEQ ID NO: 2168423 - RNA, 23 nt, Human
gaggcuccacuuggucugugaga

SEQ ID NO: 2168424 - RNA, 12 nt, Human
gaggcuccacuu

SEQ ID NO: 2168425 - RNA, 12 nt, Human
gaggcucagguc

SEQ ID NO: 2168426 - RNA, 18 nt, Human
gaggcuacuguaaggcaa

SEQ ID NO: 2168427 - RNA, 18 nt, Human
gaggccaccucuccaagg

SEQ ID NO: 2168428 - RNA, 21 nt, Human
gaggcuagaaccaagaagggc

SEQ ID NO: 2168429 - RNA, 20 nt, Human
gaggcuauuauuuucacugu

SEQ ID NO: 2168430 - RNA, 10 nt, Human
gaggcucagg

SEQ ID NO: 2168431 - RNA, 18 nt, Human
gaggcuccacuuggucug

SEQ ID NO: 2168432 - RNA, 19 nt, Human
gaggcuccacuuggucugu

SEQ ID NO: 2168433 - RNA, 17 nt, Human
gaggccaagugcaggcu

SEQ ID NO: 2168434 - RNA, 16 nt, Human
gaggccacaugagucc

SEQ ID NO: 2168435 - RNA, 17 nt, Human
gaggccacaugaguccc

SEQ ID NO: 2168436 - RNA, 22 nt, Human
gaggccacaugagucccagugg

SEQ ID NO: 2168437 - RNA, 21 nt, Human
gaggccacacucagcacaagg

SEQ ID NO: 2168438 - RNA, 18 nt, Human
gaggccacacucagcaca

SEQ ID NO: 2168439 - RNA, 15 nt, Human
gaggccaagugcagg

SEQ ID NO: 2168440 - RNA, 12 nt, Human
gaggccaccucu

SEQ ID NO: 2168441 - RNA, 14 nt, Human
gaggccaccucucc

SEQ ID NO: 2168442 - RNA, 15 nt, Human
gaggccaccucucca

SEQ ID NO: 2168443 - RNA, 23 nt, Human
gaggccacaugagucccaguggg

SEQ ID NO: 2168444 - RNA, 10 nt, Human
gaggccaccu

SEQ ID NO: 2168445 - RNA, 16 nt, Human
gaggccaccucuccaa

SEQ ID NO: 2168446 - RNA, 17 nt, Human
gaggccaccucuccaag

SEQ ID NO: 2168447 - RNA, 20 nt, Human
gaggccaccucuccaagggc

SEQ ID NO: 2168448 - RNA, 13 nt, Human
gaggccagagaca

SEQ ID NO: 2168449 - RNA, 14 nt, Human
gaggccagagacac

SEQ ID NO: 2168450 - RNA, 19 nt, Human
gaggccagagacacaagcc

SEQ ID NO: 2168451 - RNA, 22 nt, Human
gaggcuagugugguguuuccug

SEQ ID NO: 2168452 - RNA, 23 nt, Human
gauuauucccuguacaauauuua

SEQ ID NO: 2168453 - RNA, 22 nt, Human
gauuauucauuuaaaaugauua

SEQ ID NO: 2168454 - RNA, 20 nt, Human
gauuauucauuuaaaaugau

SEQ ID NO: 2168455 - RNA, 21 nt, Human
gauuauucauuuaaaaugauu

SEQ ID NO: 2168456 - RNA, 14 nt, Human
gauuauuguauuua

SEQ ID NO: 2168457 - RNA, 17 nt, Human
gauuauucugauuccac

SEQ ID NO: 2168458 - RNA, 19 nt, Human
gauuauucugauuccacuu

SEQ ID NO: 2168459 - RNA, 12 nt, Human
gauuauuggaaa

SEQ ID NO: 2168460 - RNA, 15 nt, Human
gauuauucaguguca

SEQ ID NO: 2168461 - RNA, 13 nt, Human
gauuauucauuua

SEQ ID NO: 2168462 - RNA, 14 nt, Human
gauuauucauuuaa

SEQ ID NO: 2168463 - RNA, 15 nt, Human
gauuauucauuuaaa

SEQ ID NO: 2168464 - RNA, 16 nt, Human
gauuauucauuuaaaa

SEQ ID NO: 2168465 - RNA, 19 nt, Human
gauuauucauuuaaaauga

SEQ ID NO: 2168466 - RNA, 14 nt, Human
gauuauucaguguc

SEQ ID NO: 2168467 - RNA, 13 nt, Human
gauuauucagugu

SEQ ID NO: 2168468 - RNA, 21 nt, Human
gauuauaguugugggugggag

SEQ ID NO: 2168469 - RNA, 20 nt, Human
gauuauaggcaccuaccacc

SEQ ID NO: 2168470 - RNA, 14 nt, Human
gauuauggagcuuu

SEQ ID NO: 2168471 - RNA, 20 nt, Human
gauuauagauuggagccacc

SEQ ID NO: 2168472 - RNA, 14 nt, Human
gauuauauuaugaa

SEQ ID NO: 2168473 - RNA, 21 nt, Human
gauguaggguaaggugccuuc

SEQ ID NO: 2168474 - RNA, 20 nt, Human
gauguaggguaaggugccuu

SEQ ID NO: 2168475 - RNA, 19 nt, Human
gauguaggguaaggugccu

SEQ ID NO: 2168476 - RNA, 17 nt, Human
gauguaggcauucugga

SEQ ID NO: 2168477 - RNA, 18 nt, Human
gauguauccaugggggca

SEQ ID NO: 2168478 - RNA, 20 nt, Human
gauguauguugaagccuuug

SEQ ID NO: 2168479 - RNA, 18 nt, Human
gauguauuuuuguacccu

SEQ ID NO: 2168480 - RNA, 15 nt, Human
gaugucaauuucugu

SEQ ID NO: 2168481 - RNA, 18 nt, Human
gaugucaauuucuguguu

SEQ ID NO: 2168482 - RNA, 13 nt, Human
gaugucacagggc

SEQ ID NO: 2168483 - RNA, 15 nt, Human
gaugucacagggcca

SEQ ID NO: 2168484 - RNA, 19 nt, Human
gauguaugcagcuaucugg

SEQ ID NO: 2168485 - RNA, 21 nt, Human
gauguauguugaagccuuugu

SEQ ID NO: 2168486 - RNA, 18 nt, Human
gauucuccugccucagcc

SEQ ID NO: 2168487 - RNA, 16 nt, Human
gauucugcaguaaauc

SEQ ID NO: 2168488 - RNA, 15 nt, Human
gauucugcaguaaau

SEQ ID NO: 2168489 - RNA, 14 nt, Human
gauucugagagcug

SEQ ID NO: 2168490 - RNA, 15 nt, Human
gauucuccugccuca

SEQ ID NO: 2168491 - RNA, 17 nt, Human
gauucuccugccucagc

SEQ ID NO: 2168492 - RNA, 21 nt, Human
gauuuaguguuuuuaccucug

SEQ ID NO: 2168493 - RNA, 22 nt, Human
gauuuagugaaagcuagagaua

SEQ ID NO: 2168494 - RNA, 20 nt, Human
gauuuaggagaagccaggaa

SEQ ID NO: 2168495 - RNA, 15 nt, Human
gauuuagaacuguau

SEQ ID NO: 2168496 - RNA, 18 nt, Human
gauuuauaaaugcuauuu

SEQ ID NO: 2168497 - RNA, 13 nt, Human
gauuuauaaaugc

SEQ ID NO: 2168498 - RNA, 22 nt, Human
gauuuaguguuuuuaccucugu

SEQ ID NO: 2168499 - RNA, 22 nt, Human
gauuuacaguuucaaaaacugu

SEQ ID NO: 2168500 - RNA, 20 nt, Human
gauuuaccuguuuucgcacc

SEQ ID NO: 2168501 - RNA, 15 nt, Human
gauuuacgcucauug

SEQ ID NO: 2168502 - RNA, 16 nt, Human
gauuuaccacuugugu

SEQ ID NO: 2168503 - RNA, 17 nt, Human
gauuuauaguuuguaca

SEQ ID NO: 2168504 - RNA, 20 nt, Human
gauuuauaguuuguacaugc

SEQ ID NO: 2168505 - RNA, 21 nt, Human
gauuuauaguuuguacaugca

SEQ ID NO: 2168506 - RNA, 12 nt, Human
gauuuaucaaau

SEQ ID NO: 2168507 - RNA, 13 nt, Human
gauuuaucaaauc

SEQ ID NO: 2168508 - RNA, 14 nt, Human
gauuuaucaaauca

SEQ ID NO: 2168509 - RNA, 15 nt, Human
gauuuaucaaaucag

SEQ ID NO: 2168510 - RNA, 20 nt, Human
gauuuuuuacagcugccugc

SEQ ID NO: 2168511 - RNA, 15 nt, Human
gauucugggaggaag

SEQ ID NO: 2168512 - RNA, 22 nt, Human
gauucuggauaaagccacugaa

SEQ ID NO: 2168513 - RNA, 22 nt, Human
gauucugggaggaagcagguug

SEQ ID NO: 2168514 - RNA, 17 nt, Human
gauucugguuccagggu

SEQ ID NO: 2168515 - RNA, 16 nt, Human
gauucuucaaaagcau

SEQ ID NO: 2168516 - RNA, 22 nt, Human
gauucugguuccagggucccuc

SEQ ID NO: 2168517 - RNA, 21 nt, Human
gauucugcaguaaaucuuuua

SEQ ID NO: 2168518 - RNA, 19 nt, Human
gauucugcaguaaaucuuu

SEQ ID NO: 2168519 - RNA, 18 nt, Human
gauucugcaguaaaucuu

SEQ ID NO: 2168520 - RNA, 13 nt, Human
gauucugcuuuua

SEQ ID NO: 2168521 - RNA, 17 nt, Human
gauucuggauaaagcca

SEQ ID NO: 2168522 - RNA, 19 nt, Human
gauucuggauaaagccacu

SEQ ID NO: 2168523 - RNA, 18 nt, Human
gauucuuccucccucccu

SEQ ID NO: 2168524 - RNA, 17 nt, Human
gauucuuccucccuccc

SEQ ID NO: 2168525 - RNA, 16 nt, Human
gauuuacaguuucaaa

SEQ ID NO: 2168526 - RNA, 14 nt, Human
gauucuuccaucug

SEQ ID NO: 2168527 - RNA, 23 nt, Human
gauucuuauguagcaggaaauaa

SEQ ID NO: 2168528 - RNA, 15 nt, Human
gauuuaccacuugug

SEQ ID NO: 2168529 - RNA, 21 nt, Human
gaucugcucagcccuggaggu

SEQ ID NO: 2168530 - RNA, 17 nt, Human
gaucugcucagcccugg

SEQ ID NO: 2168531 - RNA, 18 nt, Human
gaucugcucagcccugga

SEQ ID NO: 2168532 - RNA, 19 nt, Human
gaucugcucagcccuggag

SEQ ID NO: 2168533 - RNA, 20 nt, Human
gaucugcucagcccuggagg

SEQ ID NO: 2168534 - RNA, 13 nt, Human
gaucugcucagcc

SEQ ID NO: 2168535 - RNA, 14 nt, Human
gaucugcucagccc

SEQ ID NO: 2168536 - RNA, 15 nt, Human
gaucugcucagcccu

SEQ ID NO: 2168537 - RNA, 16 nt, Human
gaucugcucagcccug

SEQ ID NO: 2168538 - RNA, 19 nt, Human
gaugaggugcugggaggga

SEQ ID NO: 2168539 - RNA, 20 nt, Human
gaugaguccccugugagauu

SEQ ID NO: 2168540 - RNA, 17 nt, Human
gaugaggugcugggagg

SEQ ID NO: 2168541 - RNA, 16 nt, Human
gaugaggugcugggag

SEQ ID NO: 2168542 - RNA, 14 nt, Human
gaugaggugcuggg

SEQ ID NO: 2168543 - RNA, 14 nt, Human
gaugaggggaggaa

SEQ ID NO: 2168544 - RNA, 16 nt, Human
gaugagugagcaugcc

SEQ ID NO: 2168545 - RNA, 18 nt, Human
gaugauacaagauuagaa

SEQ ID NO: 2168546 - RNA, 15 nt, Human
gaugaucuaggaaga

SEQ ID NO: 2168547 - RNA, 21 nt, Human
gaugaucuaggaagacuuugg

SEQ ID NO: 2168548 - RNA, 16 nt, Human
gaugaucuuuaaaaua

SEQ ID NO: 2168549 - RNA, 12 nt, Human
gauggacagacu

SEQ ID NO: 2168550 - RNA, 16 nt, Human
gaugcuggaugcuccu

SEQ ID NO: 2168551 - RNA, 14 nt, Human
gaugcuggaugcuc

SEQ ID NO: 2168552 - RNA, 16 nt, Human
gaugcuggagagguua

SEQ ID NO: 2168553 - RNA, 14 nt, Human
gaugcuggagaggu

SEQ ID NO: 2168554 - RNA, 15 nt, Human
gaugcuggagagguu

SEQ ID NO: 2168555 - RNA, 16 nt, Human
gaugcuggagaagaga

SEQ ID NO: 2168556 - RNA, 19 nt, Human
gaugcuggagaagagagga

SEQ ID NO: 2168557 - RNA, 20 nt, Human
gaugcuggagaagagaggag

SEQ ID NO: 2168558 - RNA, 21 nt, Human
gaugcuggagaagagaggaga

SEQ ID NO: 2168559 - RNA, 22 nt, Human
gauggagacuccaugagaagcc

SEQ ID NO: 2168560 - RNA, 16 nt, Human
gauggagagaggggaa

SEQ ID NO: 2168561 - RNA, 22 nt, Human
gauggagcagagcaagucugca

SEQ ID NO: 2168562 - RNA, 15 nt, Human
gauggagagagggga

SEQ ID NO: 2168563 - RNA, 14 nt, Human
gauggagagagggg

SEQ ID NO: 2168564 - RNA, 22 nt, Human
gauggagacugguccugugugc

SEQ ID NO: 2168565 - RNA, 23 nt, Human
gauggagacugguccugugugca

SEQ ID NO: 2168566 - RNA, 16 nt, Human
gaugcugccugaguca

SEQ ID NO: 2168567 - RNA, 14 nt, Human
gaugcugccugagu

SEQ ID NO: 2168568 - RNA, 11 nt, Human
gaugcugcuuu

SEQ ID NO: 2168569 - RNA, 12 nt, Human
gaugcugcuuuc

SEQ ID NO: 2168570 - RNA, 15 nt, Human
gaugcugcuuucccc

SEQ ID NO: 2168571 - RNA, 14 nt, Human
gaugcuggagaaga

SEQ ID NO: 2168572 - RNA, 23 nt, Human
gaugcugccagggcgccaucgcc

SEQ ID NO: 2168573 - RNA, 12 nt, Human
gaugcugccccu

SEQ ID NO: 2168574 - RNA, 12 nt, Human
gaugcugccuga

SEQ ID NO: 2168575 - RNA, 13 nt, Human
gaugcugccccuc

SEQ ID NO: 2168576 - RNA, 18 nt, Human
gaugauacauccaaagca

SEQ ID NO: 2168577 - RNA, 21 nt, Human
gaugauacaagauuagaagcu

SEQ ID NO: 2168578 - RNA, 15 nt, Human
gaugaucuacucaga

SEQ ID NO: 2168579 - RNA, 13 nt, Human
gaugcugauguuc

SEQ ID NO: 2168580 - RNA, 21 nt, Human
gaugaucuacucagaaauuuu

SEQ ID NO: 2168581 - RNA, 15 nt, Human
gaugcugauguucag

SEQ ID NO: 2168582 - RNA, 16 nt, Human
gaugcugauguucagu

SEQ ID NO: 2168583 - RNA, 17 nt, Human
gaugcugauguucagug

SEQ ID NO: 2168584 - RNA, 18 nt, Human
gaugcugauguucagugu

SEQ ID NO: 2168585 - RNA, 19 nt, Human
gaugcugauguucagugua

SEQ ID NO: 2168586 - RNA, 18 nt, Human
gauguaaaagacuuuuuu

SEQ ID NO: 2168587 - RNA, 16 nt, Human
gauguaaacagugccu

SEQ ID NO: 2168588 - RNA, 22 nt, Human
gauggagcgcaccugcccccug

SEQ ID NO: 2168589 - RNA, 22 nt, Human
gaugguucccuugaugaagaag

SEQ ID NO: 2168590 - RNA, 16 nt, Human
gauggagcgcaccugc

SEQ ID NO: 2168591 - RNA, 22 nt, Human
gauggagcccaggcgggagcgg

SEQ ID NO: 2168592 - RNA, 17 nt, Human
gaugguucguucuguuu

SEQ ID NO: 2168593 - RNA, 20 nt, Human
gauggagccagcucugcauu

SEQ ID NO: 2168594 - RNA, 14 nt, Human
gauggagcccaggc

SEQ ID NO: 2168595 - RNA, 17 nt, Human
gauggagcccaggcggg

SEQ ID NO: 2168596 - RNA, 19 nt, Human
gauggagcccaggcgggag

SEQ ID NO: 2168597 - RNA, 21 nt, Human
gauguaaacagugccugcuga

SEQ ID NO: 2168598 - RNA, 20 nt, Human
gauguaaacagugccugcug

SEQ ID NO: 2168599 - RNA, 19 nt, Human
gauguaaacagugccugcu

SEQ ID NO: 2168600 - RNA, 14 nt, Human
gauguagauuuauu

SEQ ID NO: 2168601 - RNA, 17 nt, Human
gauguagauuuauuuca

SEQ ID NO: 2168602 - RNA, 15 nt, Human
gauguagauuuauuu

SEQ ID NO: 2168603 - RNA, 18 nt, Human
gauguagccaugaccuua

SEQ ID NO: 2168604 - RNA, 18 nt, Human
gauguagaggagaaacug

SEQ ID NO: 2168605 - RNA, 17 nt, Human
gauguagaggagaaacu

SEQ ID NO: 2168606 - RNA, 17 nt, Human
gcacucacccaugugcc

SEQ ID NO: 2168607 - RNA, 17 nt, Human
gcacucacagaccugga

SEQ ID NO: 2168608 - RNA, 19 nt, Human
gcacucacagaccuggagc

SEQ ID NO: 2168609 - RNA, 16 nt, Human
gcacucacagaccugg

SEQ ID NO: 2168610 - RNA, 19 nt, Human
gcacuccucgguacuccca

SEQ ID NO: 2168611 - RNA, 20 nt, Human
gcacuccucgguacucccau

SEQ ID NO: 2168612 - RNA, 21 nt, Human
gcacucgggaaaccuggggcu

SEQ ID NO: 2168613 - RNA, 18 nt, Human
gcacuuggacucuugcuc

SEQ ID NO: 2168614 - RNA, 14 nt, Human
gcacuugcaucugu

SEQ ID NO: 2168615 - RNA, 14 nt, Human
gcacuccggaggua

SEQ ID NO: 2168616 - RNA, 17 nt, Human
gcacuccggccugauga

SEQ ID NO: 2168617 - RNA, 23 nt, Human
gcacucccuugguggcaagagcc

SEQ ID NO: 2168618 - RNA, 16 nt, Human
gcacuccccugcuggg

SEQ ID NO: 2168619 - RNA, 22 nt, Human
gcacuccccugcuggguguggc

SEQ ID NO: 2168620 - RNA, 13 nt, Human
gcacucagaagac

SEQ ID NO: 2168621 - RNA, 16 nt, Human
gcacucagaagacacu

SEQ ID NO: 2168622 - RNA, 17 nt, Human
gcacucagaagacacug

SEQ ID NO: 2168623 - RNA, 20 nt, Human
gcacucacagaccuggagcc

SEQ ID NO: 2168624 - RNA, 19 nt, Human
gcacucacccaugugccaa

SEQ ID NO: 2168625 - RNA, 20 nt, Human
gcacucacccaugugccaag

SEQ ID NO: 2168626 - RNA, 23 nt, Human
gcacucacccaugugccaaggug

SEQ ID NO: 2168627 - RNA, 17 nt, Human
gcacuccccugcugggu

SEQ ID NO: 2168628 - RNA, 21 nt, Human
gcaccuauagucccagcuacu

SEQ ID NO: 2168629 - RNA, 21 nt, Human
gcaccucacagaaaugagauc

SEQ ID NO: 2168630 - RNA, 18 nt, Human
gcaccuauagucccagcu

SEQ ID NO: 2168631 - RNA, 17 nt, Human
gcaccuauagucccagc

SEQ ID NO: 2168632 - RNA, 23 nt, Human
gcaccuacuacaucgcccuccac

SEQ ID NO: 2168633 - RNA, 21 nt, Human
gcaccuacuacaucgcccucc

SEQ ID NO: 2168634 - RNA, 14 nt, Human
gcaccuacuuacau

SEQ ID NO: 2168635 - RNA, 17 nt, Human
gcaccuaccaucaggga

SEQ ID NO: 2168636 - RNA, 19 nt, Human
gcaccuaccaucagggaca

SEQ ID NO: 2168637 - RNA, 20 nt, Human
gcaccuaccaucagggacag

SEQ ID NO: 2168638 - RNA, 23 nt, Human
gcaccuaccaucagggacaggau

SEQ ID NO: 2168639 - RNA, 16 nt, Human
gcaccuaguccaguga

SEQ ID NO: 2168640 - RNA, 23 nt, Human
gcaccgggccacagagaaaguac

SEQ ID NO: 2168641 - RNA, 13 nt, Human
gcacaucucugcu

SEQ ID NO: 2168642 - RNA, 21 nt, Human
gcaccuaccaccacgcccggc

SEQ ID NO: 2168643 - RNA, 22 nt, Human
gcaccuaccaccacgcccggcu

SEQ ID NO: 2168644 - RNA, 15 nt, Human
gcaccuaccaucagg

SEQ ID NO: 2168645 - RNA, 17 nt, Human
gcacauccuaugcaaua

SEQ ID NO: 2168646 - RNA, 20 nt, Human
gcacauccuaugcaauauau

SEQ ID NO: 2168647 - RNA, 14 nt, Human
gcaccgggccacag

SEQ ID NO: 2168648 - RNA, 23 nt, Human
gcacaucagcacgauuucuguuu

SEQ ID NO: 2168649 - RNA, 22 nt, Human
gcacaucagcacgauuucuguu

SEQ ID NO: 2168650 - RNA, 15 nt, Human
gauuuuuuuuucaua

SEQ ID NO: 2168651 - RNA, 14 nt, Human
gauuuuuuucugag

SEQ ID NO: 2168652 - RNA, 19 nt, Human
gauuuuuugcauuccugac

SEQ ID NO: 2168653 - RNA, 13 nt, Human
gcaagucaggguu

SEQ ID NO: 2168654 - RNA, 12 nt, Human
gcaagucaggac

SEQ ID NO: 2168655 - RNA, 24 nt, Human
gcaagucagaggauggccaguguc

SEQ ID NO: 2168656 - RNA, 15 nt, Human
gcaagucagaggaug

SEQ ID NO: 2168657 - RNA, 19 nt, Human
gcaagucagaggauggcca

SEQ ID NO: 2168658 - RNA, 21 nt, Human
gcaagucagaggauggccagu

SEQ ID NO: 2168659 - RNA, 23 nt, Human
gcaagucagaggauggccagugu

SEQ ID NO: 2168660 - RNA, 22 nt, Human
gcaagucccugacucucuguga

SEQ ID NO: 2168661 - RNA, 20 nt, Human
gcaagucccugacucucugu

SEQ ID NO: 2168662 - RNA, 17 nt, Human
gcaagucauggcugugc

SEQ ID NO: 2168663 - RNA, 17 nt, Human
gcaagugucugugugca

SEQ ID NO: 2168664 - RNA, 16 nt, Human
gcaagugucugugugc

SEQ ID NO: 2168665 - RNA, 15 nt, Human
gcaagugucugugug

SEQ ID NO: 2168666 - RNA, 21 nt, Human
gcaaguguaugcacgugugca

SEQ ID NO: 2168667 - RNA, 19 nt, Human
gcaagugauugggacagag

SEQ ID NO: 2168668 - RNA, 20 nt, Human
gcaagugauugggacagagg

SEQ ID NO: 2168669 - RNA, 23 nt, Human
gcaagugugugcacaugugugcg

SEQ ID NO: 2168670 - RNA, 13 nt, Human
gcaagugugugca

SEQ ID NO: 2168671 - RNA, 12 nt, Human
gcaagugugugc

SEQ ID NO: 2168672 - RNA, 23 nt, Human
gcaaguguguaugugcgugugug

SEQ ID NO: 2168673 - RNA, 22 nt, Human
gcaagugugugcaugugugcga

SEQ ID NO: 2168674 - RNA, 21 nt, Human
gcaagugugugcaugugugcg

SEQ ID NO: 2168675 - RNA, 19 nt, Human
gcaagugugugcaugugug

SEQ ID NO: 2168676 - RNA, 17 nt, Human
gcaaguucuagagaaga

SEQ ID NO: 2168677 - RNA, 22 nt, Human
gcaauagucaaauugugugaaa

SEQ ID NO: 2168678 - RNA, 20 nt, Human
gcaauaguguguucugauua

SEQ ID NO: 2168679 - RNA, 17 nt, Human
gcaauaguguguucuga

SEQ ID NO: 2168680 - RNA, 14 nt, Human
gcaauauagaaaca

SEQ ID NO: 2168681 - RNA, 13 nt, Human
gcaauaguguguu

SEQ ID NO: 2168682 - RNA, 17 nt, Human
gcaauagugggcccucc

SEQ ID NO: 2168683 - RNA, 20 nt, Human
gcaaguucuagagaagaggc

SEQ ID NO: 2168684 - RNA, 17 nt, Human
gcaauauagaaacacga

SEQ ID NO: 2168685 - RNA, 17 nt, Human
gcaauauaucuaaauug

SEQ ID NO: 2168686 - RNA, 23 nt, Human
gcaauauaucuaaauugaauaau

SEQ ID NO: 2168687 - RNA, 18 nt, Human
gcaagucagaauagaaau

SEQ ID NO: 2168688 - RNA, 20 nt, Human
gcaaguauuagaauaccaca

SEQ ID NO: 2168689 - RNA, 22 nt, Human
gcacaagcugcacccucaggca

SEQ ID NO: 2168690 - RNA, 21 nt, Human
gcaauauuaaugccuuuaaag

SEQ ID NO: 2168691 - RNA, 14 nt, Human
gcaauauguaaaua

SEQ ID NO: 2168692 - RNA, 19 nt, Human
gcacaaggcugaccaagag

SEQ ID NO: 2168693 - RNA, 17 nt, Human
gcacaauaaaaauguuu

SEQ ID NO: 2168694 - RNA, 16 nt, Human
gcacaauaaaaauguu

SEQ ID NO: 2168695 - RNA, 14 nt, Human
gcacaccgggcacu

SEQ ID NO: 2168696 - RNA, 17 nt, Human
gcacacccacucagcuc

SEQ ID NO: 2168697 - RNA, 15 nt, Human
gcacacccagguuug

SEQ ID NO: 2168698 - RNA, 18 nt, Human
gcacacccacucagcucc

SEQ ID NO: 2168699 - RNA, 19 nt, Human
gcacaauauugaacuuuuu

SEQ ID NO: 2168700 - RNA, 20 nt, Human
gcacaauauugaacuuuuuu

SEQ ID NO: 2168701 - RNA, 14 nt, Human
gcacacauuuuuua

SEQ ID NO: 2168702 - RNA, 15 nt, Human
gcacaauaguaaccu

SEQ ID NO: 2168703 - RNA, 20 nt, Human
gcacaauaguaaccugggua

SEQ ID NO: 2168704 - RNA, 17 nt, Human
gcacaauauugaacuuu

SEQ ID NO: 2168705 - RNA, 21 nt, Human
gcacauagcuaucaagugugc

SEQ ID NO: 2168706 - RNA, 15 nt, Human
gcacaguucaugguu

SEQ ID NO: 2168707 - RNA, 23 nt, Human
gcacaguuuucuggcuggagccu

SEQ ID NO: 2168708 - RNA, 23 nt, Human
gcacaguuuucugagaaagacua

SEQ ID NO: 2168709 - RNA, 22 nt, Human
gcacaguuuucugagaaagacu

SEQ ID NO: 2168710 - RNA, 20 nt, Human
gcacaguuuucugagaaaga

SEQ ID NO: 2168711 - RNA, 14 nt, Human
gcacagugccugca

SEQ ID NO: 2168712 - RNA, 16 nt, Human
gcacagugguggcagg

SEQ ID NO: 2168713 - RNA, 17 nt, Human
gcacagugguggcaggg

SEQ ID NO: 2168714 - RNA, 18 nt, Human
gcacagugguggcagggc

SEQ ID NO: 2168715 - RNA, 22 nt, Human
gcacagugguggcagggccuag

SEQ ID NO: 2168716 - RNA, 15 nt, Human
gcacagugucugggc

SEQ ID NO: 2168717 - RNA, 17 nt, Human
gcacagugucugggcug

SEQ ID NO: 2168718 - RNA, 18 nt, Human
gcacagugucugggcuga

SEQ ID NO: 2168719 - RNA, 19 nt, Human
gcacagugucugggcugac

SEQ ID NO: 2168720 - RNA, 21 nt, Human
gcacagugucugggcugacug

SEQ ID NO: 2168721 - RNA, 23 nt, Human
gcacagugucugggcugacuggg

SEQ ID NO: 2168722 - RNA, 17 nt, Human
gcacaguguuaaaugaa

SEQ ID NO: 2168723 - RNA, 20 nt, Human
gcacaguguuaaaugaaauu

SEQ ID NO: 2168724 - RNA, 19 nt, Human
gcacagugcaucucagccc

SEQ ID NO: 2168725 - RNA, 20 nt, Human
gcacagugcaucucagccca

SEQ ID NO: 2168726 - RNA, 21 nt, Human
gcacagugcaucucagcccac

SEQ ID NO: 2168727 - RNA, 21 nt, Human
cuuuuagggagagucauauuu

SEQ ID NO: 2168728 - RNA, 13 nt, Human
cuuuuauugucag

SEQ ID NO: 2168729 - RNA, 15 nt, Human
cuuuucaaaacauuu

SEQ ID NO: 2168730 - RNA, 22 nt, Human
cuuuucaaauagggucuaacuc

SEQ ID NO: 2168731 - RNA, 23 nt, Human
cuuuucaacuuggcuuccuuucu

SEQ ID NO: 2168732 - RNA, 17 nt, Human
cuuuuauuucuuaaaca

SEQ ID NO: 2168733 - RNA, 19 nt, Human
cuuuuauuuagcaccaggg

SEQ ID NO: 2168734 - RNA, 21 nt, Human
cuuuuauuguauaaacuauca

SEQ ID NO: 2168735 - RNA, 18 nt, Human
cuuuuauaaacuuuaccu

SEQ ID NO: 2168736 - RNA, 16 nt, Human
cuuuuauaaacuuuac

SEQ ID NO: 2168737 - RNA, 13 nt, Human
cuuuuagccuagu

SEQ ID NO: 2168738 - RNA, 22 nt, Human
cuuuuagcucaaacguggcuuu

SEQ ID NO: 2168739 - RNA, 16 nt, Human
cuuuuaggccaaaaaa

SEQ ID NO: 2168740 - RNA, 23 nt, Human
cuuuuagaaauacugcaagaaaa

SEQ ID NO: 2168741 - RNA, 21 nt, Human
cuuuuagaaauacugcaagaa

SEQ ID NO: 2168742 - RNA, 19 nt, Human
cuuuuagaaauacugcaag

SEQ ID NO: 2168743 - RNA, 15 nt, Human
cuuuuagaaauacug

SEQ ID NO: 2168744 - RNA, 18 nt, Human
cuuugguggcuuugcauu

SEQ ID NO: 2168745 - RNA, 14 nt, Human
cuuugguggcuuug

SEQ ID NO: 2168746 - RNA, 17 nt, Human
cuuugguggcuuugcau

SEQ ID NO: 2168747 - RNA, 18 nt, Human
cuuuuaggccaaaaaaau

SEQ ID NO: 2168748 - RNA, 17 nt, Human
cuuuuaggacccuuccc

SEQ ID NO: 2168749 - RNA, 16 nt, Human
cuuuuagggagaguca

SEQ ID NO: 2168750 - RNA, 20 nt, Human
cuuuuagggagagucauauu

SEQ ID NO: 2168751 - RNA, 15 nt, Human
cuuuuauaaacuuua

SEQ ID NO: 2168752 - RNA, 20 nt, Human
cuuuggggcuuuuacaccag

SEQ ID NO: 2168753 - RNA, 21 nt, Human
cuuuggggcuuuuacaccagu

SEQ ID NO: 2168754 - RNA, 22 nt, Human
cuuuggguaccuauuuucauug

SEQ ID NO: 2168755 - RNA, 18 nt, Human
cuuuggguaccuauuuuc

SEQ ID NO: 2168756 - RNA, 21 nt, Human
cuuuggguaccuauuuucauu

SEQ ID NO: 2168757 - RNA, 21 nt, Human
cuuuggggucagccagggcca

SEQ ID NO: 2168758 - RNA, 17 nt, Human
cuuuggggucagccagg

SEQ ID NO: 2168759 - RNA, 17 nt, Human
cuuugggguuuuuuaau

SEQ ID NO: 2168760 - RNA, 22 nt, Human
cuuugguacauggccaguguga

SEQ ID NO: 2168761 - RNA, 17 nt, Human
cuuuggguuaagcauua

SEQ ID NO: 2168762 - RNA, 20 nt, Human
cuuuggguuaagcauuacca

SEQ ID NO: 2168763 - RNA, 22 nt, Human
cuuuggguuaagcauuaccacu

SEQ ID NO: 2168764 - RNA, 16 nt, Human
cuuuggucuacacugu

SEQ ID NO: 2168765 - RNA, 20 nt, Human
cuuuuacugaagccuuucuu

SEQ ID NO: 2168766 - RNA, 17 nt, Human
cuuugguggagauaaag

SEQ ID NO: 2168767 - RNA, 14 nt, Human
cuuugguagaaaag

SEQ ID NO: 2168768 - RNA, 20 nt, Human
cuuuggucuacacugugcug

SEQ ID NO: 2168769 - RNA, 13 nt, Human
cuuugagugaucc

SEQ ID NO: 2168770 - RNA, 22 nt, Human
cuuugagguggaagagggcugc

SEQ ID NO: 2168771 - RNA, 21 nt, Human
cuuugagugucuuaauuaaaa

SEQ ID NO: 2168772 - RNA, 22 nt, Human
cuuugaguuuccucaggcugcu

SEQ ID NO: 2168773 - RNA, 19 nt, Human
cuuugaguuuccucaggcu

SEQ ID NO: 2168774 - RNA, 18 nt, Human
cuuugaguuuccucaggc

SEQ ID NO: 2168775 - RNA, 17 nt, Human
cuuugaguuuccucagg

SEQ ID NO: 2168776 - RNA, 16 nt, Human
cuuugaguuuccucag

SEQ ID NO: 2168777 - RNA, 21 nt, Human
cuuugagugcaguccugauca

SEQ ID NO: 2168778 - RNA, 14 nt, Human
cuuugauaaaauaa

SEQ ID NO: 2168779 - RNA, 17 nt, Human
cuuugauaaaauaaaug

SEQ ID NO: 2168780 - RNA, 18 nt, Human
cuuugauaaaauaaauga

SEQ ID NO: 2168781 - RNA, 13 nt, Human
cuuugauaauguu

SEQ ID NO: 2168782 - RNA, 14 nt, Human
cuuugauaauguua

SEQ ID NO: 2168783 - RNA, 15 nt, Human
cuuugauaauguuaa

SEQ ID NO: 2168784 - RNA, 16 nt, Human
cuuugauaauguuaaa

SEQ ID NO: 2168785 - RNA, 19 nt, Human
cuuugauguuaacacauuu

SEQ ID NO: 2168786 - RNA, 14 nt, Human
cuuugauucuccuu

SEQ ID NO: 2168787 - RNA, 21 nt, Human
cuuugauucauaguaacuucu

SEQ ID NO: 2168788 - RNA, 13 nt, Human
cuuugauucuccu

SEQ ID NO: 2168789 - RNA, 19 nt, Human
cuuugauucauaguaacuu

SEQ ID NO: 2168790 - RNA, 12 nt, Human
cuuugauucaua

SEQ ID NO: 2168791 - RNA, 17 nt, Human
cuuugauuaauccagaa

SEQ ID NO: 2168792 - RNA, 20 nt, Human
cuuugauuaaagacuccagu

SEQ ID NO: 2168793 - RNA, 16 nt, Human
cuuugauuaauccaga

SEQ ID NO: 2168794 - RNA, 23 nt, Human
cuuugauguuaacacauuuugua

SEQ ID NO: 2168795 - RNA, 20 nt, Human
cuuugauguuaacacauuuu

SEQ ID NO: 2168796 - RNA, 21 nt, Human
cuuugauguuaacacauuuug

SEQ ID NO: 2168797 - RNA, 16 nt, Human
cuuugagcuuaagaau

SEQ ID NO: 2168798 - RNA, 21 nt, Human
cuuugagcccacaaagccuua

SEQ ID NO: 2168799 - RNA, 19 nt, Human
cuuucucgauuuuaucuuu

SEQ ID NO: 2168800 - RNA, 14 nt, Human
cuuugacucaccug

SEQ ID NO: 2168801 - RNA, 20 nt, Human
cuuugagauagaagaacugc

SEQ ID NO: 2168802 - RNA, 14 nt, Human
cuuugagguggaag

SEQ ID NO: 2168803 - RNA, 13 nt, Human
cuuugaggaaacc

SEQ ID NO: 2168804 - RNA, 17 nt, Human
cuuugagguggaagagg

SEQ ID NO: 2168805 - RNA, 16 nt, Human
cuuugagguggaagag

SEQ ID NO: 2168806 - RNA, 13 nt, Human
cuuucucuacuuu

SEQ ID NO: 2168807 - RNA, 18 nt, Human
cuuugacgccaucccagc

SEQ ID NO: 2168808 - RNA, 19 nt, Human
cuuugacgccaucccagcc

SEQ ID NO: 2168809 - RNA, 21 nt, Human
cuuugacgccaucccagcccc

SEQ ID NO: 2168810 - RNA, 22 nt, Human
cuuugacgccaucccagcccca

SEQ ID NO: 2168811 - RNA, 23 nt, Human
cuuucuccuuuguacuuugugcu

SEQ ID NO: 2168812 - RNA, 18 nt, Human
cuuucucgauuuuaucuu

SEQ ID NO: 2168813 - RNA, 23 nt, Human
cuuucuccuuagucuucucauag

SEQ ID NO: 2168814 - RNA, 21 nt, Human
cuuucuccuuagucuucucau

SEQ ID NO: 2168815 - RNA, 20 nt, Human
cuuucuccuuagucuucuca

SEQ ID NO: 2168816 - RNA, 15 nt, Human
cuuucuccuuagucu

SEQ ID NO: 2168817 - RNA, 24 nt, Human
cuuucuccccugcccccaggacug

SEQ ID NO: 2168818 - RNA, 22 nt, Human
cuuucuccccugcccccaggac

SEQ ID NO: 2168819 - RNA, 23 nt, Human
cuuucuccccugcccccaggacu

SEQ ID NO: 2168820 - RNA, 20 nt, Human
cuuucucccaggccaggcuc

SEQ ID NO: 2168821 - RNA, 19 nt, Human
cuuucucccaggccaggcu

SEQ ID NO: 2168822 - RNA, 15 nt, Human
cuuucuauuccaaag

SEQ ID NO: 2168823 - RNA, 13 nt, Human
cuuucucccaggc

SEQ ID NO: 2168824 - RNA, 17 nt, Human
cuuucuauccucuguaa

SEQ ID NO: 2168825 - RNA, 21 nt, Human
cuuucucccaggccaggcucc

SEQ ID NO: 2168826 - RNA, 14 nt, Human
cuuucuccccugcc

SEQ ID NO: 2168827 - RNA, 18 nt, Human
cuuucuccccugccccca

SEQ ID NO: 2168828 - RNA, 19 nt, Human
cuuucuccccugcccccag

SEQ ID NO: 2168829 - RNA, 23 nt, Human
cuuucuagcuguugagcuguuuu

SEQ ID NO: 2168830 - RNA, 20 nt, Human
cuuucuaguccuauucuauu

SEQ ID NO: 2168831 - RNA, 21 nt, Human
cuuucuaguccuauucuauug

SEQ ID NO: 2168832 - RNA, 16 nt, Human
cuuucuaguggucuuu

SEQ ID NO: 2168833 - RNA, 18 nt, Human
cuuucuaguggucuuugu

SEQ ID NO: 2168834 - RNA, 19 nt, Human
cuuucuaguggucuuugua

SEQ ID NO: 2168835 - RNA, 20 nt, Human
cuuucuaguggucuuuguaa

SEQ ID NO: 2168836 - RNA, 14 nt, Human
cuuucuagcuguug

SEQ ID NO: 2168837 - RNA, 19 nt, Human
cuuucguuuguuuguuuca

SEQ ID NO: 2168838 - RNA, 18 nt, Human
cuuucuaaacaagauuuu

SEQ ID NO: 2168839 - RNA, 16 nt, Human
cuuucuauccucugua

SEQ ID NO: 2168840 - RNA, 12 nt, Human
cuuucuaucauu

SEQ ID NO: 2168841 - RNA, 14 nt, Human
cuuucuaucauuuu

SEQ ID NO: 2168842 - RNA, 18 nt, Human
cuuucuaguucagcugcc

SEQ ID NO: 2168843 - RNA, 21 nt, Human
cuuucuaguggucuuuguaag

SEQ ID NO: 2168844 - RNA, 22 nt, Human
cuuucuaguggucuuuguaaga

SEQ ID NO: 2168845 - RNA, 23 nt, Human
cuuucuaguggucuuuguaagag

SEQ ID NO: 2168846 - RNA, 17 nt, Human
cuuucuaguucagcugc

SEQ ID NO: 2168847 - RNA, 21 nt, Human
cuuuccuuuccccagcccagg

SEQ ID NO: 2168848 - RNA, 20 nt, Human
cuuucgacuugcauuuuugc

SEQ ID NO: 2168849 - RNA, 18 nt, Human
cuuuccuuuuuuaaaaau

SEQ ID NO: 2168850 - RNA, 17 nt, Human
cuuuccuuuuuuaaaaa

SEQ ID NO: 2168851 - RNA, 22 nt, Human
cuuucggggagaggcugaggac

SEQ ID NO: 2168852 - RNA, 15 nt, Human
cuuucguacauuggc

SEQ ID NO: 2168853 - RNA, 21 nt, Human
cuuucgacuugcauuuuugca

SEQ ID NO: 2168854 - RNA, 15 nt, Human
cuuucgcacagcagu

SEQ ID NO: 2168855 - RNA, 20 nt, Human
cuuucagauaacuguuauuu

SEQ ID NO: 2168856 - RNA, 19 nt, Human
cuuucagauacaugguugu

SEQ ID NO: 2168857 - RNA, 19 nt, Human
cuuuacaauguucauccca

SEQ ID NO: 2168858 - RNA, 23 nt, Human
cuuuaauuuuuuuaaccaaaggu

SEQ ID NO: 2168859 - RNA, 20 nt, Human
cuuuaauuuuuuuaaccaaa

SEQ ID NO: 2168860 - RNA, 21 nt, Human
cuuuaauuuuuuuaaccaaag

SEQ ID NO: 2168861 - RNA, 21 nt, Human
cuuuaaucuucaguuuuaucu

SEQ ID NO: 2168862 - RNA, 17 nt, Human
cuuuaaucuucaguuuu

SEQ ID NO: 2168863 - RNA, 22 nt, Human
cuuuaaucuucaguuuuaucuu

SEQ ID NO: 2168864 - RNA, 12 nt, Human
cuuuaauauaaa

SEQ ID NO: 2168865 - RNA, 17 nt, Human
cuuuaaguuucaggaua

SEQ ID NO: 2168866 - RNA, 17 nt, Human
cuuuaagugcacaacau

SEQ ID NO: 2168867 - RNA, 14 nt, Human
cuuuaaucuucagu

SEQ ID NO: 2168868 - RNA, 21 nt, Human
cuuuaauaucaucaguauuga

SEQ ID NO: 2168869 - RNA, 19 nt, Human
cuuuaauaucaucaguauu

SEQ ID NO: 2168870 - RNA, 18 nt, Human
cuuuaauaucaucaguau

SEQ ID NO: 2168871 - RNA, 16 nt, Human
cuugugcagaaaacau

SEQ ID NO: 2168872 - RNA, 22 nt, Human
cuuucacuauuuccuuuauaau

SEQ ID NO: 2168873 - RNA, 15 nt, Human
cuuuacacucaggcu

SEQ ID NO: 2168874 - RNA, 21 nt, Human
cuuucacuauuuccuuuauaa

SEQ ID NO: 2168875 - RNA, 16 nt, Human
cuuucacuauuuccuu

SEQ ID NO: 2168876 - RNA, 23 nt, Human
cuuuacacauucggcucccugga

SEQ ID NO: 2168877 - RNA, 22 nt, Human
cuuuacacaucagucacaaguu

SEQ ID NO: 2168878 - RNA, 21 nt, Human
cuuuacacauucggcucccug

SEQ ID NO: 2168879 - RNA, 20 nt, Human
cuuucaauaggaaaaacuga

SEQ ID NO: 2168880 - RNA, 21 nt, Human
cuuucaauaggaaaaacugau

SEQ ID NO: 2168881 - RNA, 22 nt, Human
cuuucaauaggaaaaacugauu

SEQ ID NO: 2168882 - RNA, 17 nt, Human
cuugugauuauuuauua

SEQ ID NO: 2168883 - RNA, 15 nt, Human
cuugugauuauuuau

SEQ ID NO: 2168884 - RNA, 17 nt, Human
cuugugaggaaagucau

SEQ ID NO: 2168885 - RNA, 19 nt, Human
cuugugaggaaagucauug

SEQ ID NO: 2168886 - RNA, 23 nt, Human
cuugugaggaaagucauuggcuu

SEQ ID NO: 2168887 - RNA, 13 nt, Human
cuugugaggaaag

SEQ ID NO: 2168888 - RNA, 16 nt, Human
cuugugaggaaaguca

SEQ ID NO: 2168889 - RNA, 22 nt, Human
cuuuaaaguaugaaucuaugcc

SEQ ID NO: 2168890 - RNA, 15 nt, Human
cuuuaaaucugugau

SEQ ID NO: 2168891 - RNA, 16 nt, Human
cuuguggacacagcuc

SEQ ID NO: 2168892 - RNA, 16 nt, Human
cuuuaaaguaugaauc

SEQ ID NO: 2168893 - RNA, 14 nt, Human
cuuguggacacagc

SEQ ID NO: 2168894 - RNA, 15 nt, Human
cuuguggacacagcu

SEQ ID NO: 2168895 - RNA, 13 nt, Human
cuuguggacacag

SEQ ID NO: 2168896 - RNA, 20 nt, Human
cuugugcacccucuauccca

SEQ ID NO: 2168897 - RNA, 23 nt, Human
cuugugcacccucuaucccaaua

SEQ ID NO: 2168898 - RNA, 14 nt, Human
cuugacagaacacu

SEQ ID NO: 2168899 - RNA, 22 nt, Human
cuugacaccugcugagaaaaca

SEQ ID NO: 2168900 - RNA, 16 nt, Human
cuugacagaacacugu

SEQ ID NO: 2168901 - RNA, 17 nt, Human
cuugacagaacacuguc

SEQ ID NO: 2168902 - RNA, 13 nt, Human
cuugacaccugcu

SEQ ID NO: 2168903 - RNA, 15 nt, Human
cuugacaccugcuga

SEQ ID NO: 2168904 - RNA, 23 nt, Human
cuugaaugaugccaugaggaaca

SEQ ID NO: 2168905 - RNA, 14 nt, Human
cuugacaacaucug

SEQ ID NO: 2168906 - RNA, 14 nt, Human
cuugaauccuaggg

SEQ ID NO: 2168907 - RNA, 18 nt, Human
cuugaauccuagggccug

SEQ ID NO: 2168908 - RNA, 14 nt, Human
cuugccuagggccu

SEQ ID NO: 2168909 - RNA, 23 nt, Human
cuugccgucuaccugaggggccu

SEQ ID NO: 2168910 - RNA, 12 nt, Human
cuugacagggca

SEQ ID NO: 2168911 - RNA, 20 nt, Human
cuugccgucuaccugagggg

SEQ ID NO: 2168912 - RNA, 20 nt, Human
cuugccuagggccuggucca

SEQ ID NO: 2168913 - RNA, 19 nt, Human
cuugccuagggccuggucc

SEQ ID NO: 2168914 - RNA, 18 nt, Human
cuugccuagggccugguc

SEQ ID NO: 2168915 - RNA, 16 nt, Human
cuugccuagggccugg

SEQ ID NO: 2168916 - RNA, 15 nt, Human
cuugccucaaugcca

SEQ ID NO: 2168917 - RNA, 19 nt, Human
cuugccucuguccccuucu

SEQ ID NO: 2168918 - RNA, 23 nt, Human
cuugccucuguccccuucucuca

SEQ ID NO: 2168919 - RNA, 13 nt, Human
cuugccucugugc

SEQ ID NO: 2168920 - RNA, 14 nt, Human
cuugccucugugcu

SEQ ID NO: 2168921 - RNA, 15 nt, Human
cuugccucugugcug

SEQ ID NO: 2168922 - RNA, 16 nt, Human
cuugccucugugcugu

SEQ ID NO: 2168923 - RNA, 19 nt, Human
cuugccucugugcugugug

SEQ ID NO: 2168924 - RNA, 20 nt, Human
cuugccucugugcugugugu

SEQ ID NO: 2168925 - RNA, 12 nt, Human
cuugccucuucc

SEQ ID NO: 2168926 - RNA, 13 nt, Human
cuugccucuuccu

SEQ ID NO: 2168927 - RNA, 16 nt, Human
cuugccucuuccuuga

SEQ ID NO: 2168928 - RNA, 18 nt, Human
cuugccucuuccuugaag

SEQ ID NO: 2168929 - RNA, 19 nt, Human
cuugcucuccccugcccug

SEQ ID NO: 2168930 - RNA, 17 nt, Human
cuugccugaacauccuu

SEQ ID NO: 2168931 - RNA, 17 nt, Human
cuugccucaaugccagu

SEQ ID NO: 2168932 - RNA, 18 nt, Human
cuugccugaacauccuuc

SEQ ID NO: 2168933 - RNA, 20 nt, Human
cuugccugaacauccuuccu

SEQ ID NO: 2168934 - RNA, 22 nt, Human
cuugccugaacauccuuccuuc

SEQ ID NO: 2168935 - RNA, 14 nt, Human
cuugccugauauaa

SEQ ID NO: 2168936 - RNA, 16 nt, Human
cuugccugcacaaacu

SEQ ID NO: 2168937 - RNA, 20 nt, Human
cuugcucgcuguaaaaucuu

SEQ ID NO: 2168938 - RNA, 14 nt, Human
cuugcucucccucu

SEQ ID NO: 2168939 - RNA, 20 nt, Human
cuugcucuccccugcccugc

SEQ ID NO: 2168940 - RNA, 15 nt, Human
cuugcucucccucuu

SEQ ID NO: 2168941 - RNA, 17 nt, Human
cuugcucucccucuucu

SEQ ID NO: 2168942 - RNA, 20 nt, Human
cuugcucucccucuucucaa

SEQ ID NO: 2168943 - RNA, 15 nt, Human
cuugcucucuggccu

SEQ ID NO: 2168944 - RNA, 12 nt, Human
cuugcucugcug

SEQ ID NO: 2168945 - RNA, 16 nt, Human
cuuggcaugccuucca

SEQ ID NO: 2168946 - RNA, 17 nt, Human
cuuggcaucagcuggcg

SEQ ID NO: 2168947 - RNA, 14 nt, Human
cuugcucugcaggc

SEQ ID NO: 2168948 - RNA, 16 nt, Human
cuuggcaucagcuggc

SEQ ID NO: 2168949 - RNA, 22 nt, Human
cuuggcaucacagggcagagcc

SEQ ID NO: 2168950 - RNA, 20 nt, Human
cuuggcaucacagggcagag

SEQ ID NO: 2168951 - RNA, 22 nt, Human
cuugcucucuggccuuuuccua

SEQ ID NO: 2168952 - RNA, 13 nt, Human
cuugcucugcacc

SEQ ID NO: 2168953 - RNA, 14 nt, Human
cuugcucugcaccc

SEQ ID NO: 2168954 - RNA, 17 nt, Human
cuuggccagaagggggc

SEQ ID NO: 2168955 - RNA, 15 nt, Human
cuuggccaagcaggg

SEQ ID NO: 2168956 - RNA, 17 nt, Human
cuuggccaagcagggag

SEQ ID NO: 2168957 - RNA, 20 nt, Human
cuuggcaugccuuccagcac

SEQ ID NO: 2168958 - RNA, 17 nt, Human
cuuggcaugccuuccag

SEQ ID NO: 2168959 - RNA, 22 nt, Human
cuuggccagaagggggccauga

SEQ ID NO: 2168960 - RNA, 18 nt, Human
cuuggccaguuaucccuu

SEQ ID NO: 2168961 - RNA, 18 nt, Human
cuucuucagagacuccug

SEQ ID NO: 2168962 - RNA, 22 nt, Human
cuucuucagagacuccugcagg

SEQ ID NO: 2168963 - RNA, 19 nt, Human
cuucugacgugccuuuugc

SEQ ID NO: 2168964 - RNA, 20 nt, Human
cuucugacgugccuuuugca

SEQ ID NO: 2168965 - RNA, 21 nt, Human
cuucugacugcugauucuccc

SEQ ID NO: 2168966 - RNA, 13 nt, Human
cuucugacugcug

SEQ ID NO: 2168967 - RNA, 22 nt, Human
cuucugacgugccuuuugcacc

SEQ ID NO: 2168968 - RNA, 13 nt, Human
cuucuuaaagagu

SEQ ID NO: 2168969 - RNA, 17 nt, Human
cuucuguuuucuguuuc

SEQ ID NO: 2168970 - RNA, 14 nt, Human
cuucuguuuucugu

SEQ ID NO: 2168971 - RNA, 15 nt, Human
cuucuguuuucuguu

SEQ ID NO: 2168972 - RNA, 14 nt, Human
cuucuuaaaguauu

SEQ ID NO: 2168973 - RNA, 19 nt, Human
cuucuuaaaguauucuucu

SEQ ID NO: 2168974 - RNA, 20 nt, Human
cuucugagcuauuucaucua

SEQ ID NO: 2168975 - RNA, 18 nt, Human
cuucugagcuauuucauc

SEQ ID NO: 2168976 - RNA, 20 nt, Human
cuucuucagagacuccugca

SEQ ID NO: 2168977 - RNA, 21 nt, Human
cuucuucagagacuccugcag

SEQ ID NO: 2168978 - RNA, 18 nt, Human
cuucugacuuaagugugc

SEQ ID NO: 2168979 - RNA, 17 nt, Human
cuucugagcuauuucau

SEQ ID NO: 2168980 - RNA, 16 nt, Human
cuucugagcuauuuca

SEQ ID NO: 2168981 - RNA, 15 nt, Human
cuucuguuuuauaau

SEQ ID NO: 2168982 - RNA, 20 nt, Human
cuucuguuuuauaauuuugu

SEQ ID NO: 2168983 - RNA, 10 nt, Human
cuugaaguug

SEQ ID NO: 2168984 - RNA, 22 nt, Human
cuugaaguuguuacuaacuaaa

SEQ ID NO: 2168985 - RNA, 22 nt, Human
cuugaauauccccucccaguca

SEQ ID NO: 2168986 - RNA, 20 nt, Human
cuugaaugaugccaugagga

SEQ ID NO: 2168987 - RNA, 12 nt, Human
cuuccaugugga

SEQ ID NO: 2168988 - RNA, 14 nt, Human
cuuccauguggaga

SEQ ID NO: 2168989 - RNA, 19 nt, Human
cuuccauggcccucauuaa

SEQ ID NO: 2168990 - RNA, 18 nt, Human
cuuccaugucggccucua

SEQ ID NO: 2168991 - RNA, 22 nt, Human
cuuccaugucggccucuaaccc

SEQ ID NO: 2168992 - RNA, 17 nt, Human
cuuccaugucgccucug

SEQ ID NO: 2168993 - RNA, 18 nt, Human
cuuccaugucgccucugc

SEQ ID NO: 2168994 - RNA, 19 nt, Human
cuuccaugucgccucugca

SEQ ID NO: 2168995 - RNA, 20 nt, Human
cuuccaugucgccucugcau

SEQ ID NO: 2168996 - RNA, 15 nt, Human
cuuccaugucgccuc

SEQ ID NO: 2168997 - RNA, 16 nt, Human
cuuccaugucgccucu

SEQ ID NO: 2168998 - RNA, 17 nt, Human
cuuccaugauucuauuu

SEQ ID NO: 2168999 - RNA, 14 nt, Human
cuuccaugauucua

SEQ ID NO: 2169000 - RNA, 16 nt, Human
cuuccauggcccucau

SEQ ID NO: 2169001 - RNA, 16 nt, Human
cuuccauggacuuugu

SEQ ID NO: 2169002 - RNA, 17 nt, Human
cuuccauggacuuuguu

SEQ ID NO: 2169003 - RNA, 18 nt, Human
cuuccagugaggcucugc

SEQ ID NO: 2169004 - RNA, 17 nt, Human
cuuccagugaggcucug

SEQ ID NO: 2169005 - RNA, 19 nt, Human
cuuccagugaggcucugcc

SEQ ID NO: 2169006 - RNA, 20 nt, Human
cuuccagugaggcucugccc

SEQ ID NO: 2169007 - RNA, 15 nt, Human
cuucacuguugaaaa

SEQ ID NO: 2169008 - RNA, 16 nt, Human
cuucacuguugaaaau

SEQ ID NO: 2169009 - RNA, 18 nt, Human
cuucacuguugaaaauua

SEQ ID NO: 2169010 - RNA, 19 nt, Human
cuucacuguugaaaauuau

SEQ ID NO: 2169011 - RNA, 21 nt, Human
cuucacuguccuccaagccag

SEQ ID NO: 2169012 - RNA, 18 nt, Human
cuucacuguccuccaagc

SEQ ID NO: 2169013 - RNA, 20 nt, Human
cuucaccugauucaacuaaa

SEQ ID NO: 2169014 - RNA, 18 nt, Human
cuucaccugauucaacua

SEQ ID NO: 2169015 - RNA, 21 nt, Human
cuucaccugauucaacuaaaa

SEQ ID NO: 2169016 - RNA, 17 nt, Human
cuucaccuuugucccca

SEQ ID NO: 2169017 - RNA, 20 nt, Human
cuucaccuuuguccccaccg

SEQ ID NO: 2169018 - RNA, 15 nt, Human
cuucaccucacugaa

SEQ ID NO: 2169019 - RNA, 14 nt, Human
cuucaccuuugucc

SEQ ID NO: 2169020 - RNA, 17 nt, Human
cuuauuagaacaggcaa

SEQ ID NO: 2169021 - RNA, 11 nt, Human
cuuauuagaac

SEQ ID NO: 2169022 - RNA, 18 nt, Human
cuuauugcccacgcugga

SEQ ID NO: 2169023 - RNA, 17 nt, Human
cuucagaagacacugca

SEQ ID NO: 2169024 - RNA, 19 nt, Human
cuucagacacaaaagucca

SEQ ID NO: 2169025 - RNA, 19 nt, Human
cuucagacagagaggacug

SEQ ID NO: 2169026 - RNA, 20 nt, Human
cuucagaaagugugcuuuau

SEQ ID NO: 2169027 - RNA, 16 nt, Human
cuucagaaugugauuu

SEQ ID NO: 2169028 - RNA, 11 nt, Human
cuucagacaua

SEQ ID NO: 2169029 - RNA, 21 nt, Human
cuucacuucugaccacacuuc

SEQ ID NO: 2169030 - RNA, 19 nt, Human
cuucacuucugaccacacu

SEQ ID NO: 2169031 - RNA, 17 nt, Human
cuucacuucugaccaca

SEQ ID NO: 2169032 - RNA, 16 nt, Human
cuucacuucugaccac

SEQ ID NO: 2169033 - RNA, 15 nt, Human
cuucacuucugacca

SEQ ID NO: 2169034 - RNA, 13 nt, Human
cuucacuucuccc

SEQ ID NO: 2169035 - RNA, 14 nt, Human
cuucacuucuccca

SEQ ID NO: 2169036 - RNA, 15 nt, Human
cuucacuuuaauucu

SEQ ID NO: 2169037 - RNA, 16 nt, Human
cuucacuuuaauucuc

SEQ ID NO: 2169038 - RNA, 21 nt, Human
cuucacuuuaauucucaugug

SEQ ID NO: 2169039 - RNA, 14 nt, Human
cuucagacuuugcu

SEQ ID NO: 2169040 - RNA, 15 nt, Human
cuucagacuuugcuu

SEQ ID NO: 2169041 - RNA, 20 nt, Human
cuucagacagagaggacugu

SEQ ID NO: 2169042 - RNA, 18 nt, Human
cuucagacuuugcuuccc

SEQ ID NO: 2169043 - RNA, 19 nt, Human
cuucagacuuugcuuccca

SEQ ID NO: 2169044 - RNA, 16 nt, Human
cuucagagacuccugc

SEQ ID NO: 2169045 - RNA, 21 nt, Human
cuucagagacuccugcaggca

SEQ ID NO: 2169046 - RNA, 22 nt, Human
cuucagagacuccugcaggcag

SEQ ID NO: 2169047 - RNA, 18 nt, Human
cuucagugggagaaaaca

SEQ ID NO: 2169048 - RNA, 17 nt, Human
cuucaucccacaaucuu

SEQ ID NO: 2169049 - RNA, 19 nt, Human
cuucauccggcagccugga

SEQ ID NO: 2169050 - RNA, 15 nt, Human
cuucauccuccucag

SEQ ID NO: 2169051 - RNA, 18 nt, Human
cuucaguuaagccuuugg

SEQ ID NO: 2169052 - RNA, 17 nt, Human
cuucaguuaugauuuuu

SEQ ID NO: 2169053 - RNA, 20 nt, Human
cuucaguguauggaaauaaa

SEQ ID NO: 2169054 - RNA, 13 nt, Human
cuucaucccucug

SEQ ID NO: 2169055 - RNA, 18 nt, Human
cuucaguggcagcugcuu

SEQ ID NO: 2169056 - RNA, 15 nt, Human
cuucagugggagaaa

SEQ ID NO: 2169057 - RNA, 13 nt, Human
cuucagugggaga

SEQ ID NO: 2169058 - RNA, 17 nt, Human
cuucaguguauggaaau

SEQ ID NO: 2169059 - RNA, 17 nt, Human
cuucaguuaagccuuug

SEQ ID NO: 2169060 - RNA, 23 nt, Human
cuucagagacuccugcaggcagc

SEQ ID NO: 2169061 - RNA, 24 nt, Human
cuucagagacuccugcaggcagcc

SEQ ID NO: 2169062 - RNA, 15 nt, Human
cuucaugcucagccc

SEQ ID NO: 2169063 - RNA, 16 nt, Human
cuucaugccagcuacu

SEQ ID NO: 2169064 - RNA, 14 nt, Human
cuucaugccagcua

SEQ ID NO: 2169065 - RNA, 15 nt, Human
cuucaugccagcuac

SEQ ID NO: 2169066 - RNA, 23 nt, Human
cuucaugcauggaaauucccuuc

SEQ ID NO: 2169067 - RNA, 21 nt, Human
cuucaugcauggaaauucccu

SEQ ID NO: 2169068 - RNA, 13 nt, Human
cuucauggauggg

SEQ ID NO: 2169069 - RNA, 19 nt, Human
cuucaugcucagcccugac

SEQ ID NO: 2169070 - RNA, 17 nt, Human
cuucaugcucagcccug

SEQ ID NO: 2169071 - RNA, 23 nt, Human
cuucaugcugucuacacuaagag

SEQ ID NO: 2169072 - RNA, 19 nt, Human
cuucaucguggggcucuca

SEQ ID NO: 2169073 - RNA, 17 nt, Human
cuucaucgaaucuacua

SEQ ID NO: 2169074 - RNA, 15 nt, Human
cuucaucgaaucuac

SEQ ID NO: 2169075 - RNA, 11 nt, Human
cuucauccucu

SEQ ID NO: 2169076 - RNA, 16 nt, Human
cuucauccuccucaga

SEQ ID NO: 2169077 - RNA, 22 nt, Human
cuucaucucccaaagugcuggg

SEQ ID NO: 2169078 - RNA, 13 nt, Human
cuucaucucccac

SEQ ID NO: 2169079 - RNA, 13 nt, Human
cuucaucuccagg

SEQ ID NO: 2169080 - RNA, 17 nt, Human
cuucaucuccagggagu

SEQ ID NO: 2169081 - RNA, 20 nt, Human
cuucaucucccaccuagcag

SEQ ID NO: 2169082 - RNA, 19 nt, Human
cuucaucucccaccuagca

SEQ ID NO: 2169083 - RNA, 21 nt, Human
cuuagcaggagaggagagcca

SEQ ID NO: 2169084 - RNA, 22 nt, Human
cuuagcaggagaggagagccag

SEQ ID NO: 2169085 - RNA, 18 nt, Human
cuuagcagcuuccagauu

SEQ ID NO: 2169086 - RNA, 13 nt, Human
cuuagcaggagag

SEQ ID NO: 2169087 - RNA, 14 nt, Human
cuuagcaggagagg

SEQ ID NO: 2169088 - RNA, 21 nt, Human
cuuagcagggaaacagcuaau

SEQ ID NO: 2169089 - RNA, 23 nt, Human
cuuagcagcuaucucucagugaa

SEQ ID NO: 2169090 - RNA, 22 nt, Human
cuuagcagcuaucucucaguga

SEQ ID NO: 2169091 - RNA, 15 nt, Human
cuuagcagcuuccag

SEQ ID NO: 2169092 - RNA, 16 nt, Human
cuuagcagcuuccaga

SEQ ID NO: 2169093 - RNA, 17 nt, Human
cuuagcagcuuccagau

SEQ ID NO: 2169094 - RNA, 18 nt, Human
cuuagcagggaaacagcu

SEQ ID NO: 2169095 - RNA, 12 nt, Human
cuuauugcccac

SEQ ID NO: 2169096 - RNA, 13 nt, Human
cuuauugcccacg

SEQ ID NO: 2169097 - RNA, 13 nt, Human
cuuauuaaaguuc

SEQ ID NO: 2169098 - RNA, 14 nt, Human
cuuauuaaaguucu

SEQ ID NO: 2169099 - RNA, 18 nt, Human
cuuauuaaaguucuguaa

SEQ ID NO: 2169100 - RNA, 19 nt, Human
cuuauguagcaggaaauaa

SEQ ID NO: 2169101 - RNA, 22 nt, Human
cuuaugggcuggguucuaccca

SEQ ID NO: 2169102 - RNA, 23 nt, Human
cuuaugggcuggguucuacccag

SEQ ID NO: 2169103 - RNA, 14 nt, Human
cuuauggaauugau

SEQ ID NO: 2169104 - RNA, 14 nt, Human
cuuaugggcugggu

SEQ ID NO: 2169105 - RNA, 21 nt, Human
cuuaugggcuggguucuaccc

SEQ ID NO: 2169106 - RNA, 23 nt, Human
cuuauggaauugauuugcauuga

SEQ ID NO: 2169107 - RNA, 21 nt, Human
cuuauggaauugauuugcauu

SEQ ID NO: 2169108 - RNA, 20 nt, Human
cuuauggaauugauuugcau

SEQ ID NO: 2169109 - RNA, 19 nt, Human
cuuauggaauugauuugca

SEQ ID NO: 2169110 - RNA, 17 nt, Human
cuuauggaauugauuug

SEQ ID NO: 2169111 - RNA, 16 nt, Human
cuuauggaauugauuu

SEQ ID NO: 2169112 - RNA, 13 nt, Human
cugugucuguguu

SEQ ID NO: 2169113 - RNA, 16 nt, Human
cuguucacuuuuccuc

SEQ ID NO: 2169114 - RNA, 18 nt, Human
cuguucacuuuuccuccc

SEQ ID NO: 2169115 - RNA, 17 nt, Human
cuguucacuuuuccucc

SEQ ID NO: 2169116 - RNA, 15 nt, Human
cuguucacucuacuu

SEQ ID NO: 2169117 - RNA, 16 nt, Human
cugugucuugcaaugg

SEQ ID NO: 2169118 - RNA, 19 nt, Human
cugugucuugcaauggcag

SEQ ID NO: 2169119 - RNA, 22 nt, Human
cuguucagcuacucccacuccc

SEQ ID NO: 2169120 - RNA, 13 nt, Human
cuguucagcucca

SEQ ID NO: 2169121 - RNA, 16 nt, Human
cugugucuguguuuua

SEQ ID NO: 2169122 - RNA, 14 nt, Human
cuguucagcuccag

SEQ ID NO: 2169123 - RNA, 17 nt, Human
cugugucucuuuucucu

SEQ ID NO: 2169124 - RNA, 14 nt, Human
cugugucuugcaau

SEQ ID NO: 2169125 - RNA, 14 nt, Human
cugugucucccuuc

SEQ ID NO: 2169126 - RNA, 19 nt, Human
cugugucucccuucauccu

SEQ ID NO: 2169127 - RNA, 13 nt, Human
cuguguagcuggg

SEQ ID NO: 2169128 - RNA, 21 nt, Human
cugugucagguggggcagcuu

SEQ ID NO: 2169129 - RNA, 20 nt, Human
cugugucagcauagaaguaa

SEQ ID NO: 2169130 - RNA, 19 nt, Human
cugugucagguggggcagc

SEQ ID NO: 2169131 - RNA, 19 nt, Human
cuguguaacagcuccuugg

SEQ ID NO: 2169132 - RNA, 18 nt, Human
cuguguaacagcuccuug

SEQ ID NO: 2169133 - RNA, 22 nt, Human
cuguguaacagcuccuugggag

SEQ ID NO: 2169134 - RNA, 19 nt, Human
cuguguaaucauuucuugg

SEQ ID NO: 2169135 - RNA, 14 nt, Human
cuguguacaaagaa

SEQ ID NO: 2169136 - RNA, 21 nt, Human
cuguguacagaauucugcuac

SEQ ID NO: 2169137 - RNA, 15 nt, Human
cuguguacaaagaaa

SEQ ID NO: 2169138 - RNA, 16 nt, Human
cuguguacaaagaaau

SEQ ID NO: 2169139 - RNA, 19 nt, Human
cuguguacauaacugaaaa

SEQ ID NO: 2169140 - RNA, 17 nt, Human
cuguguacauaacugaa

SEQ ID NO: 2169141 - RNA, 22 nt, Human
cuguguacauaacugaaaaugu

SEQ ID NO: 2169142 - RNA, 20 nt, Human
cuguguacauaacugaaaau

SEQ ID NO: 2169143 - RNA, 22 nt, Human
cugugcugcccgucuucagccu

SEQ ID NO: 2169144 - RNA, 20 nt, Human
cugugcugcccgucuucagc

SEQ ID NO: 2169145 - RNA, 17 nt, Human
cugugcucaggacucag

SEQ ID NO: 2169146 - RNA, 11 nt, Human
cugugcugccc

SEQ ID NO: 2169147 - RNA, 20 nt, Human
cugugcugagucugaaggcu

SEQ ID NO: 2169148 - RNA, 22 nt, Human
cugugcugagucugaaggcugg

SEQ ID NO: 2169149 - RNA, 16 nt, Human
cugugaccugugggga

SEQ ID NO: 2169150 - RNA, 14 nt, Human
cugugacucuuuuu

SEQ ID NO: 2169151 - RNA, 17 nt, Human
cugugacuucagcucug

SEQ ID NO: 2169152 - RNA, 20 nt, Human
cugugaccagcacugucuca

SEQ ID NO: 2169153 - RNA, 23 nt, Human
cugugaccagucugacccuuaca

SEQ ID NO: 2169154 - RNA, 15 nt, Human
cugugaccugugggg

SEQ ID NO: 2169155 - RNA, 14 nt, Human
cugugaccuguggg

SEQ ID NO: 2169156 - RNA, 13 nt, Human
cugugaccugugg

SEQ ID NO: 2169157 - RNA, 14 nt, Human
cugugagaccccca

SEQ ID NO: 2169158 - RNA, 15 nt, Human
cugugagacaguggg

SEQ ID NO: 2169159 - RNA, 19 nt, Human
cugugagacagugggaaau

SEQ ID NO: 2169160 - RNA, 21 nt, Human
cugugacuucuccaggucuca

SEQ ID NO: 2169161 - RNA, 12 nt, Human
cugugagacagu

SEQ ID NO: 2169162 - RNA, 14 nt, Human
cugugacugauguu

SEQ ID NO: 2169163 - RNA, 16 nt, Human
cugugacuucuccagg

SEQ ID NO: 2169164 - RNA, 22 nt, Human
cugugacuucagcucuguuuua

SEQ ID NO: 2169165 - RNA, 16 nt, Human
cugugcuaugaauuuu

SEQ ID NO: 2169166 - RNA, 15 nt, Human
cugugcuaugaauuu

SEQ ID NO: 2169167 - RNA, 22 nt, Human
cugugcuagggaaacuucccgu

SEQ ID NO: 2169168 - RNA, 16 nt, Human
cugugcucaggacuca

SEQ ID NO: 2169169 - RNA, 15 nt, Human
cugugcucaggacuc

SEQ ID NO: 2169170 - RNA, 12 nt, Human
cugugcucagga

SEQ ID NO: 2169171 - RNA, 13 nt, Human
cugugcuaugaau

SEQ ID NO: 2169172 - RNA, 18 nt, Human
cugugcuacuuugccuuu

SEQ ID NO: 2169173 - RNA, 21 nt, Human
cugugcuagggaaacuucccg

SEQ ID NO: 2169174 - RNA, 18 nt, Human
cugugcuaauaacagugc

SEQ ID NO: 2169175 - RNA, 14 nt, Human
cugugcuacuuugc

SEQ ID NO: 2169176 - RNA, 16 nt, Human
cugugcuacuuugccu

SEQ ID NO: 2169177 - RNA, 17 nt, Human
cugugcuacuuugccuu

SEQ ID NO: 2169178 - RNA, 17 nt, Human
cugugcguuacuaauug

SEQ ID NO: 2169179 - RNA, 14 nt, Human
cugugcgugaaaca

SEQ ID NO: 2169180 - RNA, 16 nt, Human
cugugcgugaaacaca

SEQ ID NO: 2169181 - RNA, 23 nt, Human
cugugaccaggaaggaagucagc

SEQ ID NO: 2169182 - RNA, 18 nt, Human
cugugaccaggaaggaag

SEQ ID NO: 2169183 - RNA, 14 nt, Human
cugugaccagcacu

SEQ ID NO: 2169184 - RNA, 17 nt, Human
cugugaccaaugucuug

SEQ ID NO: 2169185 - RNA, 16 nt, Human
cugugaccaaugucuu

SEQ ID NO: 2169186 - RNA, 15 nt, Human
cugugaccaaugucu

SEQ ID NO: 2169187 - RNA, 24 nt, Human
cugugacauggugccugagaggca

SEQ ID NO: 2169188 - RNA, 13 nt, Human
cugugacauguaa

SEQ ID NO: 2169189 - RNA, 16 nt, Human
cugugacauggugccu

SEQ ID NO: 2169190 - RNA, 17 nt, Human
cugugacauggugccug

SEQ ID NO: 2169191 - RNA, 18 nt, Human
cugugacauggugccuga

SEQ ID NO: 2169192 - RNA, 19 nt, Human
cugugacauggugccugag

SEQ ID NO: 2169193 - RNA, 20 nt, Human
cugugacauggugccugaga

SEQ ID NO: 2169194 - RNA, 21 nt, Human
cugugacauggugccugagag

SEQ ID NO: 2169195 - RNA, 22 nt, Human
cugugacauggugccugagagg

SEQ ID NO: 2169196 - RNA, 23 nt, Human
cugugacauggugccugagaggc

SEQ ID NO: 2169197 - RNA, 20 nt, Human
cuuacacccacaguggaaag

SEQ ID NO: 2169198 - RNA, 17 nt, Human
cuuacacuuacuguugu

SEQ ID NO: 2169199 - RNA, 11 nt, Human
cuuacacccac

SEQ ID NO: 2169200 - RNA, 13 nt, Human
cuuacacacaaaa

SEQ ID NO: 2169201 - RNA, 19 nt, Human
cuuacacaucucagacccu

SEQ ID NO: 2169202 - RNA, 13 nt, Human
cuuacacaauggu

SEQ ID NO: 2169203 - RNA, 21 nt, Human
cuuaaaggcugugguaguacu

SEQ ID NO: 2169204 - RNA, 18 nt, Human
cuuaaaggugucuuccuc

SEQ ID NO: 2169205 - RNA, 16 nt, Human
cuuaaaggugucuucc

SEQ ID NO: 2169206 - RNA, 21 nt, Human
cuuaaaggugucuuccuccca

SEQ ID NO: 2169207 - RNA, 14 nt, Human
cuuaaagucaguaa

SEQ ID NO: 2169208 - RNA, 23 nt, Human
cuuaaagcugccuguaguuagga

SEQ ID NO: 2169209 - RNA, 18 nt, Human
cuuaaagcugccuguagu

SEQ ID NO: 2169210 - RNA, 23 nt, Human
cuuaaaggcugugguaguacucc

SEQ ID NO: 2169211 - RNA, 20 nt, Human
cuuaaaggcaccaucuaaua

SEQ ID NO: 2169212 - RNA, 18 nt, Human
cuguuggcacucacagac

SEQ ID NO: 2169213 - RNA, 19 nt, Human
cuuaaacaaaaauuaaaau

SEQ ID NO: 2169214 - RNA, 13 nt, Human
cuuaaacaaaaau

SEQ ID NO: 2169215 - RNA, 19 nt, Human
cuuaaagauuuaucaaauc

SEQ ID NO: 2169216 - RNA, 20 nt, Human
cuuaaagauuuaucaaauca

SEQ ID NO: 2169217 - RNA, 16 nt, Human
cuuaaagauuuaucaa

SEQ ID NO: 2169218 - RNA, 13 nt, Human
cuuaaaauauuuu

SEQ ID NO: 2169219 - RNA, 17 nt, Human
cuuaaaauauauuucag

SEQ ID NO: 2169220 - RNA, 20 nt, Human
cuguugggguggguauaaaa

SEQ ID NO: 2169221 - RNA, 14 nt, Human
cuuaaaauauuuua

SEQ ID NO: 2169222 - RNA, 24 nt, Human
cuuaaaauguucacuuuugacaaa

SEQ ID NO: 2169223 - RNA, 18 nt, Human
cuuaaaauauuccugcau

SEQ ID NO: 2169224 - RNA, 20 nt, Human
cuuaaaauauuccugcauuu

SEQ ID NO: 2169225 - RNA, 17 nt, Human
cuguugggguggguaua

SEQ ID NO: 2169226 - RNA, 18 nt, Human
cuguugggguggguauaa

SEQ ID NO: 2169227 - RNA, 22 nt, Human
cuguuggauuuguuuaaaagga

SEQ ID NO: 2169228 - RNA, 20 nt, Human
cuguuggacccgcucuggac

SEQ ID NO: 2169229 - RNA, 19 nt, Human
cuguuggauuuguuuaaaa

SEQ ID NO: 2169230 - RNA, 16 nt, Human
cuguugcuuacaauuu

SEQ ID NO: 2169231 - RNA, 18 nt, Human
cuguuggacccgcucugg

SEQ ID NO: 2169232 - RNA, 19 nt, Human
cuguuggacccgcucugga

SEQ ID NO: 2169233 - RNA, 22 nt, Human
cuguuggacccgcucuggacca

SEQ ID NO: 2169234 - RNA, 16 nt, Human
cuguugggccaggagc

SEQ ID NO: 2169235 - RNA, 17 nt, Human
cuguugggccaggagcc

SEQ ID NO: 2169236 - RNA, 20 nt, Human
cuguugggccaggagccucc

SEQ ID NO: 2169237 - RNA, 15 nt, Human
cuuacagccucugac

SEQ ID NO: 2169238 - RNA, 14 nt, Human
cuuacagcugggug

SEQ ID NO: 2169239 - RNA, 17 nt, Human
cuuacccucauguucuu

SEQ ID NO: 2169240 - RNA, 19 nt, Human
cuuacccucauguucuuaa

SEQ ID NO: 2169241 - RNA, 18 nt, Human
cuuacccucauguucuua

SEQ ID NO: 2169242 - RNA, 16 nt, Human
cuuaccuccugcccag

SEQ ID NO: 2169243 - RNA, 15 nt, Human
cuuaccuccugccca

SEQ ID NO: 2169244 - RNA, 14 nt, Human
cuuaccuccugccc

SEQ ID NO: 2169245 - RNA, 21 nt, Human
cuuaccuaaacagauauaaau

SEQ ID NO: 2169246 - RNA, 13 nt, Human
cuuaccuccugcc

SEQ ID NO: 2169247 - RNA, 13 nt, Human
cuuaccucggugc

SEQ ID NO: 2169248 - RNA, 15 nt, Human
cuuacccuuagggag

SEQ ID NO: 2169249 - RNA, 20 nt, Human
cuuaccccuuagccucccug

SEQ ID NO: 2169250 - RNA, 16 nt, Human
cuuacagccucugacu

SEQ ID NO: 2169251 - RNA, 17 nt, Human
cuuacccucaccuguca

SEQ ID NO: 2169252 - RNA, 18 nt, Human
cuuaccuaaacagauaua

SEQ ID NO: 2169253 - RNA, 19 nt, Human
cuuaccuaaacagauauaa

SEQ ID NO: 2169254 - RNA, 20 nt, Human
cuuaccgugagcgacaaaga

SEQ ID NO: 2169255 - RNA, 22 nt, Human
cuuaccuaaacagauauaaaug

SEQ ID NO: 2169256 - RNA, 18 nt, Human
cuuaccuaccacaugcca

SEQ ID NO: 2169257 - RNA, 16 nt, Human
cuuagcagcuaucucu

SEQ ID NO: 2169258 - RNA, 14 nt, Human
cuuagcagaugcug

SEQ ID NO: 2169259 - RNA, 21 nt, Human
cuuagcacuaccacuccugcc

SEQ ID NO: 2169260 - RNA, 13 nt, Human
cuuaccucuuccg

SEQ ID NO: 2169261 - RNA, 20 nt, Human
cuuagauguuccaguaaucu

SEQ ID NO: 2169262 - RNA, 18 nt, Human
cuuagauguucuaagucu

SEQ ID NO: 2169263 - RNA, 14 nt, Human
cuuagauguucuaa

SEQ ID NO: 2169264 - RNA, 21 nt, Human
cuuagauuagcucuggaccag

SEQ ID NO: 2169265 - RNA, 16 nt, Human
cuuagauuagcucugg

SEQ ID NO: 2169266 - RNA, 17 nt, Human
cuuagauuagcucugga

SEQ ID NO: 2169267 - RNA, 18 nt, Human
cuuagauuagcucuggac

SEQ ID NO: 2169268 - RNA, 20 nt, Human
cuuagauuagcucuggacca

SEQ ID NO: 2169269 - RNA, 15 nt, Human
cuuaccucuuccgga

SEQ ID NO: 2169270 - RNA, 20 nt, Human
cuuaccuccugcccaggaga

SEQ ID NO: 2169271 - RNA, 19 nt, Human
cuuaccuccugcccaggag

SEQ ID NO: 2169272 - RNA, 18 nt, Human
cuuaccuccugcccagga

SEQ ID NO: 2169273 - RNA, 17 nt, Human
cuuaccuccugcccagg

SEQ ID NO: 2169274 - RNA, 13 nt, Human
cuuaccugccagg

SEQ ID NO: 2169275 - RNA, 19 nt, Human
cuuagauguauauauuucc

SEQ ID NO: 2169276 - RNA, 21 nt, Human
cuuaccucggugccuuccucu

SEQ ID NO: 2169277 - RNA, 19 nt, Human
cuuaccucggugccuuccu

SEQ ID NO: 2169278 - RNA, 14 nt, Human
cuguugcugccuca

SEQ ID NO: 2169279 - RNA, 15 nt, Human
cuguugcuuacaauu

SEQ ID NO: 2169280 - RNA, 17 nt, Human
cuguugcugccucaugc

SEQ ID NO: 2169281 - RNA, 16 nt, Human
cuguugcugccucaug

SEQ ID NO: 2169282 - RNA, 15 nt, Human
cuguugcugccucau

SEQ ID NO: 2169283 - RNA, 18 nt, Human
cugggagaaauugacaga

SEQ ID NO: 2169284 - RNA, 14 nt, Human
cuggcccugccuuc

SEQ ID NO: 2169285 - RNA, 20 nt, Human
cuggccgaggguccuggcuc

SEQ ID NO: 2169286 - RNA, 19 nt, Human
cuggccgaggguccuggcu

SEQ ID NO: 2169287 - RNA, 21 nt, Human
cuggccgaggguccuggcucc

SEQ ID NO: 2169288 - RNA, 17 nt, Human
cuggccgaggguccugg

SEQ ID NO: 2169289 - RNA, 12 nt, Human
cuggcccuggcu

SEQ ID NO: 2169290 - RNA, 13 nt, Human
cuggcccugugcc

SEQ ID NO: 2169291 - RNA, 12 nt, Human
cuggcccuuccu

SEQ ID NO: 2169292 - RNA, 22 nt, Human
cuggcuaugcauuugaaaauuu

SEQ ID NO: 2169293 - RNA, 16 nt, Human
cuggcuaugcauuuga

SEQ ID NO: 2169294 - RNA, 15 nt, Human
cuggcuaugcauuug

SEQ ID NO: 2169295 - RNA, 19 nt, Human
cuggcuagaguccucacuc

SEQ ID NO: 2169296 - RNA, 18 nt, Human
cuggcuagaguccucacu

SEQ ID NO: 2169297 - RNA, 17 nt, Human
cuggcuagaguccucac

SEQ ID NO: 2169298 - RNA, 16 nt, Human
cuggcuagaguccuca

SEQ ID NO: 2169299 - RNA, 21 nt, Human
cuggcuagaguccucacuccc

SEQ ID NO: 2169300 - RNA, 20 nt, Human
cuggcuagaguccucacucc

SEQ ID NO: 2169301 - RNA, 22 nt, Human
cuggcuagaguccucacuccca

SEQ ID NO: 2169302 - RNA, 14 nt, Human
cuggcuaugcauuu

SEQ ID NO: 2169303 - RNA, 13 nt, Human
cuggcuaugcauu

SEQ ID NO: 2169304 - RNA, 17 nt, Human
cuggcuccugaggggca

SEQ ID NO: 2169305 - RNA, 16 nt, Human
cuggcuccugaggggc

SEQ ID NO: 2169306 - RNA, 15 nt, Human
cuggcuccugagggg

SEQ ID NO: 2169307 - RNA, 14 nt, Human
cuggcuccugaggg

SEQ ID NO: 2169308 - RNA, 24 nt, Human
cuggcucccucuuggucuucccag

SEQ ID NO: 2169309 - RNA, 23 nt, Human
cuggcucccucuuggucuuccca

SEQ ID NO: 2169310 - RNA, 20 nt, Human
cuggcuccguccaggagccu

SEQ ID NO: 2169311 - RNA, 12 nt, Human
cuggcuccucaa

SEQ ID NO: 2169312 - RNA, 14 nt, Human
cugggacaugggaa

SEQ ID NO: 2169313 - RNA, 18 nt, Human
cugggacaugggaaaggg

SEQ ID NO: 2169314 - RNA, 22 nt, Human
cugggacaugggaaaggggaag

SEQ ID NO: 2169315 - RNA, 22 nt, Human
cugggaccacagguucaugcca

SEQ ID NO: 2169316 - RNA, 14 nt, Human
cugggaccacguga

SEQ ID NO: 2169317 - RNA, 20 nt, Human
cugggacguggcucagccag

SEQ ID NO: 2169318 - RNA, 16 nt, Human
cugggaccacgugaga

SEQ ID NO: 2169319 - RNA, 18 nt, Human
cugggacguggcucagcc

SEQ ID NO: 2169320 - RNA, 13 nt, Human
cugggacuacagg

SEQ ID NO: 2169321 - RNA, 15 nt, Human
cugggacuacaggca

SEQ ID NO: 2169322 - RNA, 16 nt, Human
cugggacuacaggcac

SEQ ID NO: 2169323 - RNA, 16 nt, Human
cugggagaaaugaaaa

SEQ ID NO: 2169324 - RNA, 23 nt, Human
cugggacguggcucagccagcac

SEQ ID NO: 2169325 - RNA, 21 nt, Human
cugggacguggcucagccagc

SEQ ID NO: 2169326 - RNA, 18 nt, Human
cugggacuugcaaaaagg

SEQ ID NO: 2169327 - RNA, 17 nt, Human
cugggagaaaugaaaaa

SEQ ID NO: 2169328 - RNA, 22 nt, Human
cugggagaaccaaaaagaggcu

SEQ ID NO: 2169329 - RNA, 17 nt, Human
cugggugacagagugag

SEQ ID NO: 2169330 - RNA, 23 nt, Human
cugggugacagagcaagacucug

SEQ ID NO: 2169331 - RNA, 14 nt, Human
cugggugacauuug

SEQ ID NO: 2169332 - RNA, 21 nt, Human
cugggugccccguccacggcu

SEQ ID NO: 2169333 - RNA, 13 nt, Human
cugggugacagag

SEQ ID NO: 2169334 - RNA, 22 nt, Human
cugggugacagagcaagacucu

SEQ ID NO: 2169335 - RNA, 14 nt, Human
cuggggcgugggga

SEQ ID NO: 2169336 - RNA, 15 nt, Human
cuggggcguggggag

SEQ ID NO: 2169337 - RNA, 16 nt, Human
cuggggcguggggagg

SEQ ID NO: 2169338 - RNA, 15 nt, Human
cuggggcgggccccu

SEQ ID NO: 2169339 - RNA, 18 nt, Human
cuggggcgggccccucau

SEQ ID NO: 2169340 - RNA, 15 nt, Human
cugggugcucccuac

SEQ ID NO: 2169341 - RNA, 23 nt, Human
cuggguggacauggccccuguga

SEQ ID NO: 2169342 - RNA, 14 nt, Human
cugggugcucccua

SEQ ID NO: 2169343 - RNA, 23 nt, Human
cugggugcgaccccaucugccca

SEQ ID NO: 2169344 - RNA, 21 nt, Human
cugggugcgaccccaucugcc

SEQ ID NO: 2169345 - RNA, 22 nt, Human
cugggugcgaccccaucugccc

SEQ ID NO: 2169346 - RNA, 20 nt, Human
cugggugcaugaucuugagc

SEQ ID NO: 2169347 - RNA, 20 nt, Human
cugggugcccaagcucagaa

SEQ ID NO: 2169348 - RNA, 21 nt, Human
cugggugcccaagcucagaag

SEQ ID NO: 2169349 - RNA, 19 nt, Human
cugggugcgaccccaucug

SEQ ID NO: 2169350 - RNA, 20 nt, Human
cuggguggcaccagcagccu

SEQ ID NO: 2169351 - RNA, 18 nt, Human
cuggguggcaccagcagc

SEQ ID NO: 2169352 - RNA, 12 nt, Human
cuggggccucuu

SEQ ID NO: 2169353 - RNA, 14 nt, Human
cuggggccuggacc

SEQ ID NO: 2169354 - RNA, 23 nt, Human
cuggggccucggagccucauccg

SEQ ID NO: 2169355 - RNA, 16 nt, Human
cuggggccuggaccug

SEQ ID NO: 2169356 - RNA, 17 nt, Human
cuggggccuggaccugc

SEQ ID NO: 2169357 - RNA, 19 nt, Human
cuggggccuggaccugccu

SEQ ID NO: 2169358 - RNA, 18 nt, Human
cuggggccuggaccugcc

SEQ ID NO: 2169359 - RNA, 13 nt, Human
cuggggagaaagu

SEQ ID NO: 2169360 - RNA, 23 nt, Human
cugggcccagaagguugugauga

SEQ ID NO: 2169361 - RNA, 14 nt, Human
cugggcccagaagg

SEQ ID NO: 2169362 - RNA, 20 nt, Human
cuggggaccugguacccucc

SEQ ID NO: 2169363 - RNA, 22 nt, Human
cuggggaccugguacccuccug

SEQ ID NO: 2169364 - RNA, 17 nt, Human
cuggggacggggggccc

SEQ ID NO: 2169365 - RNA, 19 nt, Human
cuggggacggggggcccca

SEQ ID NO: 2169366 - RNA, 22 nt, Human
cuggggacggggggccccaguc

SEQ ID NO: 2169367 - RNA, 23 nt, Human
cuggggacggggggccccaguca

SEQ ID NO: 2169368 - RNA, 18 nt, Human
cugggcccaacccugucu

SEQ ID NO: 2169369 - RNA, 19 nt, Human
cugggcccaacccugucug

SEQ ID NO: 2169370 - RNA, 22 nt, Human
cugggccauucuccacagcaac

SEQ ID NO: 2169371 - RNA, 14 nt, Human
cugggcccaacccu

SEQ ID NO: 2169372 - RNA, 17 nt, Human
cugggcccaacccuguc

SEQ ID NO: 2169373 - RNA, 19 nt, Human
cugggccauucuccacagc

SEQ ID NO: 2169374 - RNA, 21 nt, Human
cugggccauucuccacagcaa

SEQ ID NO: 2169375 - RNA, 20 nt, Human
cugggccauucuccacagca

SEQ ID NO: 2169376 - RNA, 13 nt, Human
cugggcauugcuu

SEQ ID NO: 2169377 - RNA, 12 nt, Human
cugggcauugcu

SEQ ID NO: 2169378 - RNA, 21 nt, Human
cugggcagcuguuagagucca

SEQ ID NO: 2169379 - RNA, 20 nt, Human
cugggcagguuggugggggc

SEQ ID NO: 2169380 - RNA, 17 nt, Human
cugggcaggacucagcu

SEQ ID NO: 2169381 - RNA, 16 nt, Human
cugggcauagaugcag

SEQ ID NO: 2169382 - RNA, 23 nt, Human
cugggcauagaugcaggugagcc

SEQ ID NO: 2169383 - RNA, 15 nt, Human
cugggcauccucagg

SEQ ID NO: 2169384 - RNA, 14 nt, Human
cugggcaucuguuc

SEQ ID NO: 2169385 - RNA, 15 nt, Human
cugggcaucuguucu

SEQ ID NO: 2169386 - RNA, 17 nt, Human
cugggcaucuguucugg

SEQ ID NO: 2169387 - RNA, 18 nt, Human
cugggcaucuguucuggu

SEQ ID NO: 2169388 - RNA, 12 nt, Human
cugggcagagga

SEQ ID NO: 2169389 - RNA, 13 nt, Human
cugggcagaggaa

SEQ ID NO: 2169390 - RNA, 16 nt, Human
cugggcagaggaaagc

SEQ ID NO: 2169391 - RNA, 18 nt, Human
cugggcagcauagcaaga

SEQ ID NO: 2169392 - RNA, 17 nt, Human
cugggcagcauagcaag

SEQ ID NO: 2169393 - RNA, 20 nt, Human
cugggcagaggaaagcaaag

SEQ ID NO: 2169394 - RNA, 18 nt, Human
cugggcagccaggcugcc

SEQ ID NO: 2169395 - RNA, 16 nt, Human
cugggcagccaggcug

SEQ ID NO: 2169396 - RNA, 15 nt, Human
cugggcagccaggcu

SEQ ID NO: 2169397 - RNA, 17 nt, Human
cugggcagccaggcugc

SEQ ID NO: 2169398 - RNA, 11 nt, Human
cugggcagcua

SEQ ID NO: 2169399 - RNA, 20 nt, Human
cugggcagcuaccauuuccc

SEQ ID NO: 2169400 - RNA, 23 nt, Human
cuggugcuauaggcuggagaagc

SEQ ID NO: 2169401 - RNA, 22 nt, Human
cuggugcuauaggcuggagaag

SEQ ID NO: 2169402 - RNA, 20 nt, Human
cuggugcuauaggcuggaga

SEQ ID NO: 2169403 - RNA, 21 nt, Human
cuggugcuauaggcuggagaa

SEQ ID NO: 2169404 - RNA, 19 nt, Human
cuggugcuauaggcuggag

SEQ ID NO: 2169405 - RNA, 14 nt, Human
cuggugcccggaga

SEQ ID NO: 2169406 - RNA, 21 nt, Human
cuggugccagccuuccucugc

SEQ ID NO: 2169407 - RNA, 20 nt, Human
cuggugcccuaaccucugag

SEQ ID NO: 2169408 - RNA, 13 nt, Human
cuggugccagccu

SEQ ID NO: 2169409 - RNA, 14 nt, Human
cuggugccagccuu

SEQ ID NO: 2169410 - RNA, 17 nt, Human
cuggugccagccuuccu

SEQ ID NO: 2169411 - RNA, 12 nt, Human
cuggugccucac

SEQ ID NO: 2169412 - RNA, 21 nt, Human
cuggugccucaccccuugcca

SEQ ID NO: 2169413 - RNA, 23 nt, Human
cuggugcccuaaccucugaguca

SEQ ID NO: 2169414 - RNA, 13 nt, Human
cuggguggucugc

SEQ ID NO: 2169415 - RNA, 15 nt, Human
cugggugcuggcugc

SEQ ID NO: 2169416 - RNA, 19 nt, Human
cugggugguacccucugga

SEQ ID NO: 2169417 - RNA, 16 nt, Human
cugggugguacccucu

SEQ ID NO: 2169418 - RNA, 21 nt, Human
cuggguggcaccagcagccug

SEQ ID NO: 2169419 - RNA, 21 nt, Human
cuggguggucugcaggcaggg

SEQ ID NO: 2169420 - RNA, 19 nt, Human
cuggguggucugcaggcag

SEQ ID NO: 2169421 - RNA, 14 nt, Human
cuggguguggcgca

SEQ ID NO: 2169422 - RNA, 19 nt, Human
cuggugcauuacagagagg

SEQ ID NO: 2169423 - RNA, 18 nt, Human
cuggugcauuacagagag

SEQ ID NO: 2169424 - RNA, 17 nt, Human
cuggugcauuacagaga

SEQ ID NO: 2169425 - RNA, 16 nt, Human
cuggugcauuacagag

SEQ ID NO: 2169426 - RNA, 15 nt, Human
cuggugcauuacaga

SEQ ID NO: 2169427 - RNA, 14 nt, Human
cuggugcauuacag

SEQ ID NO: 2169428 - RNA, 20 nt, Human
cuggugccaauuucaaguuc

SEQ ID NO: 2169429 - RNA, 18 nt, Human
cuggugccaauuucaagu

SEQ ID NO: 2169430 - RNA, 16 nt, Human
cuggugccaauuucaa

SEQ ID NO: 2169431 - RNA, 15 nt, Human
cuggugccaauuuca

SEQ ID NO: 2169432 - RNA, 12 nt, Human
cuggugcagugg

SEQ ID NO: 2169433 - RNA, 15 nt, Human
cuggguguggcgcag

SEQ ID NO: 2169434 - RNA, 20 nt, Human
cugcugucuaaccugugacc

SEQ ID NO: 2169435 - RNA, 14 nt, Human
cugcugucucagcc

SEQ ID NO: 2169436 - RNA, 15 nt, Human
cugcugucucagccu

SEQ ID NO: 2169437 - RNA, 23 nt, Human
cugcugugaauuuguguaaggau

SEQ ID NO: 2169438 - RNA, 19 nt, Human
cugcugugcugugcccaag

SEQ ID NO: 2169439 - RNA, 16 nt, Human
cugcugugauuccacu

SEQ ID NO: 2169440 - RNA, 22 nt, Human
cugcugugauuccacuacaccu

SEQ ID NO: 2169441 - RNA, 14 nt, Human
cugcugugugccuu

SEQ ID NO: 2169442 - RNA, 20 nt, Human
cugcuuaacuucacauauug

SEQ ID NO: 2169443 - RNA, 16 nt, Human
cugcugaaggcucauu

SEQ ID NO: 2169444 - RNA, 14 nt, Human
cugcucacauaucu

SEQ ID NO: 2169445 - RNA, 16 nt, Human
cugcucacauaucugu

SEQ ID NO: 2169446 - RNA, 19 nt, Human
cugcucacauaucugucau

SEQ ID NO: 2169447 - RNA, 12 nt, Human
cugcugaaggcu

SEQ ID NO: 2169448 - RNA, 16 nt, Human
cugcucacuaccuccu

SEQ ID NO: 2169449 - RNA, 19 nt, Human
cugcucacuaccuccucag

SEQ ID NO: 2169450 - RNA, 13 nt, Human
cugcugacagugu

SEQ ID NO: 2169451 - RNA, 15 nt, Human
cugcugacaguguug

SEQ ID NO: 2169452 - RNA, 23 nt, Human
cugcugagucccaggcugagccu

SEQ ID NO: 2169453 - RNA, 19 nt, Human
cugcugagucccaggcuga

SEQ ID NO: 2169454 - RNA, 20 nt, Human
cugcucacuaccuccucagg

SEQ ID NO: 2169455 - RNA, 21 nt, Human
cugcucacuaccuccucaggg

SEQ ID NO: 2169456 - RNA, 12 nt, Human
cugcugacagug

SEQ ID NO: 2169457 - RNA, 15 nt, Human
cugcugaaggcucga

SEQ ID NO: 2169458 - RNA, 13 nt, Human
cugcugaaggcuc

SEQ ID NO: 2169459 - RNA, 14 nt, Human
cugcugaaggcucg

SEQ ID NO: 2169460 - RNA, 14 nt, Human
cugcuuaaugaaaa

SEQ ID NO: 2169461 - RNA, 18 nt, Human
cugcuuacaauucccugc

SEQ ID NO: 2169462 - RNA, 20 nt, Human
cugcuuacaauucccugcug

SEQ ID NO: 2169463 - RNA, 15 nt, Human
cugcuuaggagagac

SEQ ID NO: 2169464 - RNA, 16 nt, Human
cugcuuaggagagacc

SEQ ID NO: 2169465 - RNA, 20 nt, Human
cugcuuagaauccaaacuug

SEQ ID NO: 2169466 - RNA, 22 nt, Human
cugcuuacaauucccugcuguc

SEQ ID NO: 2169467 - RNA, 23 nt, Human
cugcuuaccagauaaugcuacuu

SEQ ID NO: 2169468 - RNA, 19 nt, Human
cuggacugugugcucagga

SEQ ID NO: 2169469 - RNA, 22 nt, Human
cuggacugugugcucaggagcc

SEQ ID NO: 2169470 - RNA, 14 nt, Human
cuggagaagcagug

SEQ ID NO: 2169471 - RNA, 20 nt, Human
cuggagaagagaggagagga

SEQ ID NO: 2169472 - RNA, 18 nt, Human
cuggagaagagaggagag

SEQ ID NO: 2169473 - RNA, 19 nt, Human
cuggagaagagaggagagg

SEQ ID NO: 2169474 - RNA, 15 nt, Human
cuggacuugagcuug

SEQ ID NO: 2169475 - RNA, 18 nt, Human
cugcuuaggagagaccga

SEQ ID NO: 2169476 - RNA, 16 nt, Human
cuggagaagagaggag

SEQ ID NO: 2169477 - RNA, 13 nt, Human
cuggacuugagcu

SEQ ID NO: 2169478 - RNA, 23 nt, Human
cugcuuaucaauaaaccuguuug

SEQ ID NO: 2169479 - RNA, 23 nt, Human
cuggacugugugcucaggagccc

SEQ ID NO: 2169480 - RNA, 11 nt, Human
cuggagacagc

SEQ ID NO: 2169481 - RNA, 22 nt, Human
cuggagaagucuuagacuugaa

SEQ ID NO: 2169482 - RNA, 19 nt, Human
cuggagaagcugaugcuuu

SEQ ID NO: 2169483 - RNA, 15 nt, Human
cuggagaagcugaug

SEQ ID NO: 2169484 - RNA, 17 nt, Human
cuggagaagcugaugcu

SEQ ID NO: 2169485 - RNA, 21 nt, Human
cuggagaagcagugagccgca

SEQ ID NO: 2169486 - RNA, 18 nt, Human
cuggagaagcucacccaa

SEQ ID NO: 2169487 - RNA, 19 nt, Human
cuggagaagcucacccaau

SEQ ID NO: 2169488 - RNA, 15 nt, Human
cuggagaagcuccca

SEQ ID NO: 2169489 - RNA, 19 nt, Human
cuggagaagcucccaggaa

SEQ ID NO: 2169490 - RNA, 20 nt, Human
cuggagaagcucccaggaac

SEQ ID NO: 2169491 - RNA, 22 nt, Human
cuggagaagcucccaggaacaa

SEQ ID NO: 2169492 - RNA, 13 nt, Human
cuggagaagcuga

SEQ ID NO: 2169493 - RNA, 15 nt, Human
cuggaguucugguuc

SEQ ID NO: 2169494 - RNA, 13 nt, Human
cuggagacagccc

SEQ ID NO: 2169495 - RNA, 14 nt, Human
cuggagacagcccc

SEQ ID NO: 2169496 - RNA, 15 nt, Human
cuggagacagcccca

SEQ ID NO: 2169497 - RNA, 16 nt, Human
cuggagacagccccag

SEQ ID NO: 2169498 - RNA, 17 nt, Human
cuggagacagccccaga

SEQ ID NO: 2169499 - RNA, 19 nt, Human
cuggagacagccccagagc

SEQ ID NO: 2169500 - RNA, 20 nt, Human
cuggagacagccccagagca

SEQ ID NO: 2169501 - RNA, 21 nt, Human
cuggagacagccccagagcag

SEQ ID NO: 2169502 - RNA, 21 nt, Human
cuggaucugggacccuuuccu

SEQ ID NO: 2169503 - RNA, 20 nt, Human
cuggaucugggacccuuucc

SEQ ID NO: 2169504 - RNA, 23 nt, Human
cuggaucuccucaaguccccaag

SEQ ID NO: 2169505 - RNA, 14 nt, Human
cuggaucugugagg

SEQ ID NO: 2169506 - RNA, 17 nt, Human
cuggaguugaucuggaa

SEQ ID NO: 2169507 - RNA, 16 nt, Human
cuggaguugaucugga

SEQ ID NO: 2169508 - RNA, 15 nt, Human
cuggaguugaucugg

SEQ ID NO: 2169509 - RNA, 16 nt, Human
cuggaguucugguucc

SEQ ID NO: 2169510 - RNA, 17 nt, Human
cuggaguucugguuccu

SEQ ID NO: 2169511 - RNA, 23 nt, Human
cuggauggagcccaggcgggagc

SEQ ID NO: 2169512 - RNA, 16 nt, Human
cuggaugcuccuucca

SEQ ID NO: 2169513 - RNA, 11 nt, Human
cuggauggagc

SEQ ID NO: 2169514 - RNA, 15 nt, Human
cuggauggagcccag

SEQ ID NO: 2169515 - RNA, 16 nt, Human
cuggauggagcccagg

SEQ ID NO: 2169516 - RNA, 17 nt, Human
cuggauggagcccaggc

SEQ ID NO: 2169517 - RNA, 18 nt, Human
cuggauggagcccaggcg

SEQ ID NO: 2169518 - RNA, 14 nt, Human
cuggaugcauuucu

SEQ ID NO: 2169519 - RNA, 13 nt, Human
cuggaugagacuu

SEQ ID NO: 2169520 - RNA, 22 nt, Human
cuggaugaaauaacuccuucuu

SEQ ID NO: 2169521 - RNA, 13 nt, Human
cuggaugaaauuu

SEQ ID NO: 2169522 - RNA, 13 nt, Human
cuggaugaagauu

SEQ ID NO: 2169523 - RNA, 23 nt, Human
cuggaugaagauucuccugugcu

SEQ ID NO: 2169524 - RNA, 22 nt, Human
cuggaugcagccucacaguccu

SEQ ID NO: 2169525 - RNA, 20 nt, Human
cuggaugauggucuucagcc

SEQ ID NO: 2169526 - RNA, 13 nt, Human
cugcauuggcuuu

SEQ ID NO: 2169527 - RNA, 14 nt, Human
cugcauuuaaaaga

SEQ ID NO: 2169528 - RNA, 19 nt, Human
cugccccgugcagacugga

SEQ ID NO: 2169529 - RNA, 18 nt, Human
cugccccgugcagacugg

SEQ ID NO: 2169530 - RNA, 22 nt, Human
cugccccgugcagacuggaggg

SEQ ID NO: 2169531 - RNA, 13 nt, Human
cugccccucccuu

SEQ ID NO: 2169532 - RNA, 14 nt, Human
cugccccucccuuc

SEQ ID NO: 2169533 - RNA, 17 nt, Human
cugccccucccuucaac

SEQ ID NO: 2169534 - RNA, 18 nt, Human
cugccccuccucucugcc

SEQ ID NO: 2169535 - RNA, 17 nt, Human
cugccccuccucucugc

SEQ ID NO: 2169536 - RNA, 19 nt, Human
cugcccugugggcccccaa

SEQ ID NO: 2169537 - RNA, 19 nt, Human
cugccccuccucucugccc

SEQ ID NO: 2169538 - RNA, 19 nt, Human
cugcccuguuguguauaga

SEQ ID NO: 2169539 - RNA, 21 nt, Human
cugcccuguuguguauagaug

SEQ ID NO: 2169540 - RNA, 12 nt, Human
cugcccuuaccu

SEQ ID NO: 2169541 - RNA, 16 nt, Human
cugcccuuaccugcca

SEQ ID NO: 2169542 - RNA, 17 nt, Human
cugcccuuaccugccag

SEQ ID NO: 2169543 - RNA, 11 nt, Human
cugccagggcc

SEQ ID NO: 2169544 - RNA, 23 nt, Human
cugccagggagacagagcucaca

SEQ ID NO: 2169545 - RNA, 16 nt, Human
cugccagggcagggcc

SEQ ID NO: 2169546 - RNA, 15 nt, Human
cugccagggcagggc

SEQ ID NO: 2169547 - RNA, 13 nt, Human
cugccagggcagg

SEQ ID NO: 2169548 - RNA, 12 nt, Human
cugccagggcag

SEQ ID NO: 2169549 - RNA, 11 nt, Human
cugccagggca

SEQ ID NO: 2169550 - RNA, 13 nt, Human
cugccagggagcu

SEQ ID NO: 2169551 - RNA, 12 nt, Human
cugccagggagc

SEQ ID NO: 2169552 - RNA, 16 nt, Human
cugccagggagacaga

SEQ ID NO: 2169553 - RNA, 17 nt, Human
cugccagggagacagag

SEQ ID NO: 2169554 - RNA, 18 nt, Human
cugccagggagacagagc

SEQ ID NO: 2169555 - RNA, 19 nt, Human
cugccagggagacagagcu

SEQ ID NO: 2169556 - RNA, 23 nt, Human
cugccagggacagaggggguggc

SEQ ID NO: 2169557 - RNA, 18 nt, Human
cugcauuuaaaagauaca

SEQ ID NO: 2169558 - RNA, 17 nt, Human
cugcauuuaaaagauac

SEQ ID NO: 2169559 - RNA, 20 nt, Human
cugccagggacagagggggu

SEQ ID NO: 2169560 - RNA, 22 nt, Human
cugccagggacagagggggugg

SEQ ID NO: 2169561 - RNA, 22 nt, Human
cugccagucccccugccccagg

SEQ ID NO: 2169562 - RNA, 16 nt, Human
cugccaguccuagcug

SEQ ID NO: 2169563 - RNA, 17 nt, Human
cugccaguccuagcugc

SEQ ID NO: 2169564 - RNA, 18 nt, Human
cugccagucucacugugg

SEQ ID NO: 2169565 - RNA, 18 nt, Human
cugccaguccuagcugca

SEQ ID NO: 2169566 - RNA, 21 nt, Human
cugccaguccuagcugcacag

SEQ ID NO: 2169567 - RNA, 12 nt, Human
cugccagugaca

SEQ ID NO: 2169568 - RNA, 16 nt, Human
cugccagugacagaca

SEQ ID NO: 2169569 - RNA, 20 nt, Human
cugccagucccccugcccca

SEQ ID NO: 2169570 - RNA, 21 nt, Human
cugccagucccccugccccag

SEQ ID NO: 2169571 - RNA, 17 nt, Human
cugccagucccccugcc

SEQ ID NO: 2169572 - RNA, 20 nt, Human
cugccagugccuuaccuccu

SEQ ID NO: 2169573 - RNA, 18 nt, Human
cugccagugccuuaccuc

SEQ ID NO: 2169574 - RNA, 17 nt, Human
cugccagugccuuaccu

SEQ ID NO: 2169575 - RNA, 14 nt, Human
cugccagugccuua

SEQ ID NO: 2169576 - RNA, 13 nt, Human
cugccagugccuu

SEQ ID NO: 2169577 - RNA, 12 nt, Human
cugccagugccu

SEQ ID NO: 2169578 - RNA, 23 nt, Human
cugccagugacagacaggcucuu

SEQ ID NO: 2169579 - RNA, 19 nt, Human
cugccagugacagacaggc

SEQ ID NO: 2169580 - RNA, 21 nt, Human
cugccagugacagacaggcuc

SEQ ID NO: 2169581 - RNA, 22 nt, Human
cugccagugccuuaccuccugc

SEQ ID NO: 2169582 - RNA, 21 nt, Human
cugccagugccuuaccuccug

SEQ ID NO: 2169583 - RNA, 23 nt, Human
cugccagugccuuaccuccugcc

SEQ ID NO: 2169584 - RNA, 15 nt, Human
cugccaguguggaac

SEQ ID NO: 2169585 - RNA, 13 nt, Human
cugccaguuuugu

SEQ ID NO: 2169586 - RNA, 12 nt, Human
cugccaguuuug

SEQ ID NO: 2169587 - RNA, 13 nt, Human
cugccauaaaaca

SEQ ID NO: 2169588 - RNA, 20 nt, Human
cugccauaaaacauuaagaa

SEQ ID NO: 2169589 - RNA, 22 nt, Human
cugccauaaaacauuaagaaaa

SEQ ID NO: 2169590 - RNA, 23 nt, Human
cugccauaaaacauuaagaaaau

SEQ ID NO: 2169591 - RNA, 23 nt, Human
cugcccccagcucuucuccccag

SEQ ID NO: 2169592 - RNA, 21 nt, Human
cugccccccagccucuggcau

SEQ ID NO: 2169593 - RNA, 13 nt, Human
cugccccccagcc

SEQ ID NO: 2169594 - RNA, 16 nt, Human
cugccccccagccucu

SEQ ID NO: 2169595 - RNA, 19 nt, Human
cugccccccagccucuggc

SEQ ID NO: 2169596 - RNA, 19 nt, Human
cugcccccaggacugggcc

SEQ ID NO: 2169597 - RNA, 12 nt, Human
cugccccccagc

SEQ ID NO: 2169598 - RNA, 17 nt, Human
cugcccccaggacuggg

SEQ ID NO: 2169599 - RNA, 18 nt, Human
cugcccccaggacugggc

SEQ ID NO: 2169600 - RNA, 13 nt, Human
cugcccccaggac

SEQ ID NO: 2169601 - RNA, 14 nt, Human
cugcccccaggacu

SEQ ID NO: 2169602 - RNA, 15 nt, Human
cugcccccaggacug

SEQ ID NO: 2169603 - RNA, 16 nt, Human
cugcccccaggacugg

SEQ ID NO: 2169604 - RNA, 16 nt, Human
cugcccccggcccccu

SEQ ID NO: 2169605 - RNA, 17 nt, Human
cugcccccggcccccug

SEQ ID NO: 2169606 - RNA, 18 nt, Human
cugcccccggcccccugg

SEQ ID NO: 2169607 - RNA, 17 nt, Human
cugccccgcccagcugc

SEQ ID NO: 2169608 - RNA, 16 nt, Human
cugccccgcccagcug

SEQ ID NO: 2169609 - RNA, 15 nt, Human
cugccccgcccagcu

SEQ ID NO: 2169610 - RNA, 23 nt, Human
cugcccccuucucccacacugcu

SEQ ID NO: 2169611 - RNA, 22 nt, Human
cugcccccuucucccacacugc

SEQ ID NO: 2169612 - RNA, 17 nt, Human
cugccccgugcagacug

SEQ ID NO: 2169613 - RNA, 15 nt, Human
cugccccgugcagac

SEQ ID NO: 2169614 - RNA, 22 nt, Human
cugccccgucucaugaggggcc

SEQ ID NO: 2169615 - RNA, 23 nt, Human
cugccccgucaccaucucaggcc

SEQ ID NO: 2169616 - RNA, 21 nt, Human
cugccccgucaccaucucagg

SEQ ID NO: 2169617 - RNA, 19 nt, Human
cugccccgucaccaucuca

SEQ ID NO: 2169618 - RNA, 18 nt, Human
cugccccgucaccaucuc

SEQ ID NO: 2169619 - RNA, 23 nt, Human
cugccccgcccccaguccccacc

SEQ ID NO: 2169620 - RNA, 23 nt, Human
cugccccggggaggggcgcucgc

SEQ ID NO: 2169621 - RNA, 14 nt, Human
cugccccgccccca

SEQ ID NO: 2169622 - RNA, 16 nt, Human
cugccccgcccccagu

SEQ ID NO: 2169623 - RNA, 17 nt, Human
cugccccgcccccaguc

SEQ ID NO: 2169624 - RNA, 18 nt, Human
cugccccgcccccagucc

SEQ ID NO: 2169625 - RNA, 19 nt, Human
cugcccccaccacggccac

SEQ ID NO: 2169626 - RNA, 22 nt, Human
cugcccccaaauaagaagggau

SEQ ID NO: 2169627 - RNA, 22 nt, Human
cugcccccaccacggccacugg

SEQ ID NO: 2169628 - RNA, 21 nt, Human
cugccccauuuauccaccucc

SEQ ID NO: 2169629 - RNA, 22 nt, Human
cugccccauuuauccaccucca

SEQ ID NO: 2169630 - RNA, 14 nt, Human
cugcccccaaauaa

SEQ ID NO: 2169631 - RNA, 15 nt, Human
cugcccccaaauaag

SEQ ID NO: 2169632 - RNA, 17 nt, Human
cugccauccagggaugc

SEQ ID NO: 2169633 - RNA, 16 nt, Human
cugcccccagccccgg

SEQ ID NO: 2169634 - RNA, 15 nt, Human
cugcccccaccccgg

SEQ ID NO: 2169635 - RNA, 12 nt, Human
cugcccccacga

SEQ ID NO: 2169636 - RNA, 21 nt, Human
cugcccccacgagggucagga

SEQ ID NO: 2169637 - RNA, 14 nt, Human
cugcccccacuucc

SEQ ID NO: 2169638 - RNA, 16 nt, Human
cugcccccacuuccug

SEQ ID NO: 2169639 - RNA, 18 nt, Human
cugcccccacuuccuguu

SEQ ID NO: 2169640 - RNA, 16 nt, Human
cugccauauucuguug

SEQ ID NO: 2169641 - RNA, 16 nt, Human
cugccauccagguuca

SEQ ID NO: 2169642 - RNA, 18 nt, Human
cugccauccagguucagc

SEQ ID NO: 2169643 - RNA, 19 nt, Human
cugccauccagguucagcu

SEQ ID NO: 2169644 - RNA, 17 nt, Human
cugcaggccaggccagc

SEQ ID NO: 2169645 - RNA, 24 nt, Human
cugcaggccaagagcagaggcagc

SEQ ID NO: 2169646 - RNA, 23 nt, Human
cugcaggccaagagcagaggcag

SEQ ID NO: 2169647 - RNA, 22 nt, Human
cugcaggccaagagcagaggca

SEQ ID NO: 2169648 - RNA, 23 nt, Human
cugcaggccaggccagcugccuc

SEQ ID NO: 2169649 - RNA, 18 nt, Human
cugcaggccaggccagcu

SEQ ID NO: 2169650 - RNA, 20 nt, Human
cugcaggccccgcuugucca

SEQ ID NO: 2169651 - RNA, 14 nt, Human
cugcaggccccgcu

SEQ ID NO: 2169652 - RNA, 11 nt, Human
cugcaggcccc

SEQ ID NO: 2169653 - RNA, 17 nt, Human
cugcaggcaucacagcu

SEQ ID NO: 2169654 - RNA, 21 nt, Human
cugcaggccaagagcagaggc

SEQ ID NO: 2169655 - RNA, 19 nt, Human
cugcaggccaagagcagag

SEQ ID NO: 2169656 - RNA, 15 nt, Human
cugcaggccaagagc

SEQ ID NO: 2169657 - RNA, 12 nt, Human
cugcaggcaggg

SEQ ID NO: 2169658 - RNA, 11 nt, Human
cugcaggcagg

SEQ ID NO: 2169659 - RNA, 17 nt, Human
cugcaggcagacacgga

SEQ ID NO: 2169660 - RNA, 12 nt, Human
cugcaggcagac

SEQ ID NO: 2169661 - RNA, 13 nt, Human
cugcaggcagaca

SEQ ID NO: 2169662 - RNA, 14 nt, Human
cugcaggcagacac

SEQ ID NO: 2169663 - RNA, 15 nt, Human
cugcaggcagacacg

SEQ ID NO: 2169664 - RNA, 23 nt, Human
cugcaggccccgcuuguccagcg

SEQ ID NO: 2169665 - RNA, 22 nt, Human
cugcaggccccgcuuguccagc

SEQ ID NO: 2169666 - RNA, 13 nt, Human
cugcaggcccugg

SEQ ID NO: 2169667 - RNA, 14 nt, Human
cugcaggcccuggc

SEQ ID NO: 2169668 - RNA, 15 nt, Human
cugcaggcccuggcc

SEQ ID NO: 2169669 - RNA, 16 nt, Human
cugcaggcccuggccu

SEQ ID NO: 2169670 - RNA, 17 nt, Human
cugcaggcccuggccuc

SEQ ID NO: 2169671 - RNA, 18 nt, Human
cugcaggcccuggccucc

SEQ ID NO: 2169672 - RNA, 19 nt, Human
cugcaggcccuggccuccc

SEQ ID NO: 2169673 - RNA, 16 nt, Human
cugcaggaguuaaaaa

SEQ ID NO: 2169674 - RNA, 23 nt, Human
cugcaggacuugagaagaccuca

SEQ ID NO: 2169675 - RNA, 19 nt, Human
cugcaggacuugagaagac

SEQ ID NO: 2169676 - RNA, 22 nt, Human
cugcaggaccugccuguagccc

SEQ ID NO: 2169677 - RNA, 20 nt, Human
cugcaggauugauuaugcag

SEQ ID NO: 2169678 - RNA, 21 nt, Human
cugcaggauugauuaugcaga

SEQ ID NO: 2169679 - RNA, 12 nt, Human
cugcaggcaccu

SEQ ID NO: 2169680 - RNA, 20 nt, Human
cugcaggcaccuuaguggcu

SEQ ID NO: 2169681 - RNA, 21 nt, Human
cugcaggaccugccuguagcc

SEQ ID NO: 2169682 - RNA, 18 nt, Human
cugcaggaccugccugua

SEQ ID NO: 2169683 - RNA, 17 nt, Human
cugcaggaccugccugu

SEQ ID NO: 2169684 - RNA, 16 nt, Human
cugcaggaccugccug

SEQ ID NO: 2169685 - RNA, 15 nt, Human
cugcaggaccugccu

SEQ ID NO: 2169686 - RNA, 14 nt, Human
cugcaggaccugcc

SEQ ID NO: 2169687 - RNA, 12 nt, Human
cugcagcuuugu

SEQ ID NO: 2169688 - RNA, 17 nt, Human
cugcagcuguuuuaguu

SEQ ID NO: 2169689 - RNA, 17 nt, Human
cugcaggaaauggcugu

SEQ ID NO: 2169690 - RNA, 12 nt, Human
cugcagcuuuac

SEQ ID NO: 2169691 - RNA, 14 nt, Human
cugcagcuuuacau

SEQ ID NO: 2169692 - RNA, 21 nt, Human
cugcagcuuuacaugcaauuu

SEQ ID NO: 2169693 - RNA, 13 nt, Human
cugcaggcagcca

SEQ ID NO: 2169694 - RNA, 14 nt, Human
cugcaggcagccag

SEQ ID NO: 2169695 - RNA, 15 nt, Human
cugcaggcagccagg

SEQ ID NO: 2169696 - RNA, 16 nt, Human
cugcaggcagccaggc

SEQ ID NO: 2169697 - RNA, 17 nt, Human
cugcaggcagccaggcc

SEQ ID NO: 2169698 - RNA, 18 nt, Human
cugcaggcagccaggcca

SEQ ID NO: 2169699 - RNA, 19 nt, Human
cugcaggcagccaggccac

SEQ ID NO: 2169700 - RNA, 20 nt, Human
cugcaggcagccaggccaca

SEQ ID NO: 2169701 - RNA, 17 nt, Human
cugcacuccagccuggg

SEQ ID NO: 2169702 - RNA, 16 nt, Human
cugcacuccagccugg

SEQ ID NO: 2169703 - RNA, 19 nt, Human
cugcacuccagccugggcg

SEQ ID NO: 2169704 - RNA, 18 nt, Human
cugcacuccagccugggc

SEQ ID NO: 2169705 - RNA, 14 nt, Human
cugcacuccagccu

SEQ ID NO: 2169706 - RNA, 14 nt, Human
cugcacucaagcuu

SEQ ID NO: 2169707 - RNA, 18 nt, Human
cugcacuccagccugggu

SEQ ID NO: 2169708 - RNA, 20 nt, Human
cugcacuccagccugggcga

SEQ ID NO: 2169709 - RNA, 24 nt, Human
cugcagccucaaccuccugggcua

SEQ ID NO: 2169710 - RNA, 19 nt, Human
cugcacuccagccugggug

SEQ ID NO: 2169711 - RNA, 23 nt, Human
cugcagccucaaccuccugggcu

SEQ ID NO: 2169712 - RNA, 20 nt, Human
cugcagcggccacacuguac

SEQ ID NO: 2169713 - RNA, 20 nt, Human
cugcagccuuugccuccccg

SEQ ID NO: 2169714 - RNA, 18 nt, Human
cugcagccuuugccuccc

SEQ ID NO: 2169715 - RNA, 20 nt, Human
cugcagccuggaggccgggu

SEQ ID NO: 2169716 - RNA, 17 nt, Human
cugcagcucacccagcc

SEQ ID NO: 2169717 - RNA, 13 nt, Human
cugcagcugaccu

SEQ ID NO: 2169718 - RNA, 14 nt, Human
cugcagcugaccuc

SEQ ID NO: 2169719 - RNA, 23 nt, Human
cugcagcuguuuuaguuaaauuu

SEQ ID NO: 2169720 - RNA, 12 nt, Human
cugcagcugacc

SEQ ID NO: 2169721 - RNA, 21 nt, Human
cugcagcugaccucuguuguc

SEQ ID NO: 2169722 - RNA, 15 nt, Human
cugcagccuggaggc

SEQ ID NO: 2169723 - RNA, 14 nt, Human
cugcagccuggagg

SEQ ID NO: 2169724 - RNA, 11 nt, Human
cugcagccugg

SEQ ID NO: 2169725 - RNA, 20 nt, Human
cugcagccuccuccugacca

SEQ ID NO: 2169726 - RNA, 18 nt, Human
cugcagccuccuucuccu

SEQ ID NO: 2169727 - RNA, 13 nt, Human
cugcagccuccuc

SEQ ID NO: 2169728 - RNA, 16 nt, Human
cugcagccuccuccug

SEQ ID NO: 2169729 - RNA, 17 nt, Human
cugcagccuccuccuga

SEQ ID NO: 2169730 - RNA, 18 nt, Human
cugcagccuccuccugac

SEQ ID NO: 2169731 - RNA, 16 nt, Human
cugcacuauagccuag

SEQ ID NO: 2169732 - RNA, 17 nt, Human
cugcacuauagccuagg

SEQ ID NO: 2169733 - RNA, 18 nt, Human
cugcacuauagccuaggu

SEQ ID NO: 2169734 - RNA, 20 nt, Human
cugcacuauagccuagguga

SEQ ID NO: 2169735 - RNA, 16 nt, Human
cugcacuaauuugaug

SEQ ID NO: 2169736 - RNA, 16 nt, Human
cugcacuacuccucug

SEQ ID NO: 2169737 - RNA, 18 nt, Human
cugcacuacuccucugca

SEQ ID NO: 2169738 - RNA, 12 nt, Human
cugcacgucaug

SEQ ID NO: 2169739 - RNA, 19 nt, Human
cugcacggugggccuugcu

SEQ ID NO: 2169740 - RNA, 20 nt, Human
cugcacggugggccuugcug

SEQ ID NO: 2169741 - RNA, 18 nt, Human
cugcacggugggccuugc

SEQ ID NO: 2169742 - RNA, 22 nt, Human
cugcacgaauggaagaggcacc

SEQ ID NO: 2169743 - RNA, 15 nt, Human
cugcacuccagccug

SEQ ID NO: 2169744 - RNA, 16 nt, Human
cugcacuccagccuga

SEQ ID NO: 2169745 - RNA, 20 nt, Human
cugcacuccagccugagcga

SEQ ID NO: 2169746 - RNA, 17 nt, Human
cugcacuccagccugag

SEQ ID NO: 2169747 - RNA, 13 nt, Human
cugcacuccagcc

SEQ ID NO: 2169748 - RNA, 23 nt, Human
cugcacuacuccucugcagugcc

SEQ ID NO: 2169749 - RNA, 16 nt, Human
cugcacuacugacaug

SEQ ID NO: 2169750 - RNA, 14 nt, Human
cugcacuacugaca

SEQ ID NO: 2169751 - RNA, 19 nt, Human
cugcacuacuccucugcag

SEQ ID NO: 2169752 - RNA, 20 nt, Human
cugcacuacuccucugcagu

SEQ ID NO: 2169753 - RNA, 22 nt, Human
cugcacuauagccuaggugaca

SEQ ID NO: 2169754 - RNA, 23 nt, Human
cugcacuauagccuaggugacag

SEQ ID NO: 2169755 - RNA, 17 nt, Human
cugaugacagagcgaga

SEQ ID NO: 2169756 - RNA, 16 nt, Human
cucuuauucaguaaaa

SEQ ID NO: 2169757 - RNA, 16 nt, Human
cugaugacagagcgag

SEQ ID NO: 2169758 - RNA, 15 nt, Human
cugaugacagagcga

SEQ ID NO: 2169759 - RNA, 15 nt, Human
cucuuaugggcuggg

SEQ ID NO: 2169760 - RNA, 22 nt, Human
cucuuauagaauauuuauuacc

SEQ ID NO: 2169761 - RNA, 11 nt, Human
cucuuaucuca

SEQ ID NO: 2169762 - RNA, 15 nt, Human
cucuuaucucaguca

SEQ ID NO: 2169763 - RNA, 21 nt, Human
cucuuaucucagucaugcaua

SEQ ID NO: 2169764 - RNA, 22 nt, Human
cucuuaucucagucaugcauaa

SEQ ID NO: 2169765 - RNA, 23 nt, Human
cucuuaucucagucaugcauaaa

SEQ ID NO: 2169766 - RNA, 14 nt, Human
cucuuaugggcugg

SEQ ID NO: 2169767 - RNA, 22 nt, Human
cugaugcucccuccccugcccu

SEQ ID NO: 2169768 - RNA, 21 nt, Human
cugaugcucccuccccugccc

SEQ ID NO: 2169769 - RNA, 19 nt, Human
cugaugcucccuccccugc

SEQ ID NO: 2169770 - RNA, 18 nt, Human
cugaugcucccuccccug

SEQ ID NO: 2169771 - RNA, 17 nt, Human
cugaugcucccuccccu

SEQ ID NO: 2169772 - RNA, 15 nt, Human
cugaugcucccuccc

SEQ ID NO: 2169773 - RNA, 14 nt, Human
cugaugcucccucc

SEQ ID NO: 2169774 - RNA, 12 nt, Human
cugaugcucccu

SEQ ID NO: 2169775 - RNA, 20 nt, Human
cugaugauuucuugaaaagg

SEQ ID NO: 2169776 - RNA, 17 nt, Human
cugaugaugugccuggg

SEQ ID NO: 2169777 - RNA, 20 nt, Human
cugaugauuuguuuuuguau

SEQ ID NO: 2169778 - RNA, 23 nt, Human
cugaugcagucacguggaggagc

SEQ ID NO: 2169779 - RNA, 19 nt, Human
cugaugccaaguuguuuga

SEQ ID NO: 2169780 - RNA, 24 nt, Human
cugaugcucccuccccugcccugg

SEQ ID NO: 2169781 - RNA, 23 nt, Human
cugaugcucccuccccugcccug

SEQ ID NO: 2169782 - RNA, 14 nt, Human
cugaugcugccccu

SEQ ID NO: 2169783 - RNA, 12 nt, Human
cugaugcugaca

SEQ ID NO: 2169784 - RNA, 13 nt, Human
cugaugcugggcu

SEQ ID NO: 2169785 - RNA, 14 nt, Human
cugaugcugggcug

SEQ ID NO: 2169786 - RNA, 15 nt, Human
cugaugcugggcugg

SEQ ID NO: 2169787 - RNA, 16 nt, Human
cugaugcugggcuggg

SEQ ID NO: 2169788 - RNA, 17 nt, Human
cugaugcugggcugggu

SEQ ID NO: 2169789 - RNA, 18 nt, Human
cugaugcugggcugggug

SEQ ID NO: 2169790 - RNA, 19 nt, Human
cugaugcugggcugggugc

SEQ ID NO: 2169791 - RNA, 16 nt, Human
cugaugcuucuucaga

SEQ ID NO: 2169792 - RNA, 17 nt, Human
cugaugcuucuucagag

SEQ ID NO: 2169793 - RNA, 17 nt, Human
cugaugcuuugcuucaa

SEQ ID NO: 2169794 - RNA, 22 nt, Human
cugaugcuuugcuucaaaucca

SEQ ID NO: 2169795 - RNA, 18 nt, Human
cugaugcuuuuagcucaa

SEQ ID NO: 2169796 - RNA, 14 nt, Human
cugauggacaagga

SEQ ID NO: 2169797 - RNA, 15 nt, Human
cugauggaccuguca

SEQ ID NO: 2169798 - RNA, 20 nt, Human
cugaugcuucuucagagacu

SEQ ID NO: 2169799 - RNA, 18 nt, Human
cugaugcuucuucagaga

SEQ ID NO: 2169800 - RNA, 19 nt, Human
cugaugcuucuucagagac

SEQ ID NO: 2169801 - RNA, 18 nt, Human
cugaugggcaacccccag

SEQ ID NO: 2169802 - RNA, 21 nt, Human
cugaugggcaacccccagccu

SEQ ID NO: 2169803 - RNA, 22 nt, Human
cugauggcacuuagcuaucaga

SEQ ID NO: 2169804 - RNA, 16 nt, Human
cugauggcaggauggc

SEQ ID NO: 2169805 - RNA, 17 nt, Human
cugauggcaggauggcc

SEQ ID NO: 2169806 - RNA, 19 nt, Human
cugauggcaggauggccug

SEQ ID NO: 2169807 - RNA, 22 nt, Human
cugauggcaggauggccuggcc

SEQ ID NO: 2169808 - RNA, 19 nt, Human
cugauggcuucuccagggu

SEQ ID NO: 2169809 - RNA, 12 nt, Human
cugauggcuucu

SEQ ID NO: 2169810 - RNA, 18 nt, Human
cugauggcuucuccaggg

SEQ ID NO: 2169811 - RNA, 24 nt, Human
cugaugggcaacccccagccugcu

SEQ ID NO: 2169812 - RNA, 22 nt, Human
cugaugggcaacccccagccug

SEQ ID NO: 2169813 - RNA, 23 nt, Human
cugaugggcaacccccagccugc

SEQ ID NO: 2169814 - RNA, 21 nt, Human
cugcaaaggguaucaggugcu

SEQ ID NO: 2169815 - RNA, 18 nt, Human
cugcaaagcccagcuuga

SEQ ID NO: 2169816 - RNA, 17 nt, Human
cugcaaagcccagcuug

SEQ ID NO: 2169817 - RNA, 16 nt, Human
cugaugguacaggaaa

SEQ ID NO: 2169818 - RNA, 23 nt, Human
cugcaaagguaauaauacagcca

SEQ ID NO: 2169819 - RNA, 22 nt, Human
cugcaaaggacuguuuuuuccu

SEQ ID NO: 2169820 - RNA, 13 nt, Human
cugcaaaggacug

SEQ ID NO: 2169821 - RNA, 23 nt, Human
cugcaaaggacagauccagggac

SEQ ID NO: 2169822 - RNA, 15 nt, Human
cugcaaaggaaauac

SEQ ID NO: 2169823 - RNA, 16 nt, Human
cugcaaaggacagauc

SEQ ID NO: 2169824 - RNA, 14 nt, Human
cugcaaaggacaga

SEQ ID NO: 2169825 - RNA, 22 nt, Human
cugcaaaggguaucaggugcug

SEQ ID NO: 2169826 - RNA, 17 nt, Human
cugcaccguacugugga

SEQ ID NO: 2169827 - RNA, 14 nt, Human
cugcaccucccccc

SEQ ID NO: 2169828 - RNA, 11 nt, Human
cugcaccuccc

SEQ ID NO: 2169829 - RNA, 20 nt, Human
cugcaccuccccccacugca

SEQ ID NO: 2169830 - RNA, 19 nt, Human
cugcaccuccccccacugc

SEQ ID NO: 2169831 - RNA, 18 nt, Human
cugcaccuccccccacug

SEQ ID NO: 2169832 - RNA, 17 nt, Human
cugcaccuccccccacu

SEQ ID NO: 2169833 - RNA, 20 nt, Human
cugcaccugccagccuggcu

SEQ ID NO: 2169834 - RNA, 13 nt, Human
cugcaccugugca

SEQ ID NO: 2169835 - RNA, 14 nt, Human
cugcaccugugcag

SEQ ID NO: 2169836 - RNA, 19 nt, Human
cugcaccugccagccuggc

SEQ ID NO: 2169837 - RNA, 18 nt, Human
cugcaccugccagccugg

SEQ ID NO: 2169838 - RNA, 17 nt, Human
cugcaccugccagccug

SEQ ID NO: 2169839 - RNA, 16 nt, Human
cugcaccugccagccu

SEQ ID NO: 2169840 - RNA, 13 nt, Human
cugcaccugccag

SEQ ID NO: 2169841 - RNA, 22 nt, Human
cugcaccuccccccacugcagg

SEQ ID NO: 2169842 - RNA, 21 nt, Human
cugcaccuccccccacugcag

SEQ ID NO: 2169843 - RNA, 12 nt, Human
cugcaagucaga

SEQ ID NO: 2169844 - RNA, 13 nt, Human
cugcaagucagag

SEQ ID NO: 2169845 - RNA, 14 nt, Human
cugcaagucagagg

SEQ ID NO: 2169846 - RNA, 23 nt, Human
cugcaagguuuaggcugguggcc

SEQ ID NO: 2169847 - RNA, 22 nt, Human
cugcaagguuuaggcugguggc

SEQ ID NO: 2169848 - RNA, 20 nt, Human
cugcaagguuuaggcuggug

SEQ ID NO: 2169849 - RNA, 18 nt, Human
cugcaagguuuaggcugg

SEQ ID NO: 2169850 - RNA, 19 nt, Human
cugcaagucaguccaggau

SEQ ID NO: 2169851 - RNA, 20 nt, Human
cugcaccgggccacagagaa

SEQ ID NO: 2169852 - RNA, 15 nt, Human
cugcaagucagagga

SEQ ID NO: 2169853 - RNA, 16 nt, Human
cugcaagucagaggau

SEQ ID NO: 2169854 - RNA, 19 nt, Human
cugcaagucagaggauggc

SEQ ID NO: 2169855 - RNA, 21 nt, Human
cugcaagucagaggauggcca

SEQ ID NO: 2169856 - RNA, 23 nt, Human
cugcaccgggccacagagaaagu

SEQ ID NO: 2169857 - RNA, 20 nt, Human
cugcaagcacaucugcauuu

SEQ ID NO: 2169858 - RNA, 20 nt, Human
cugcaagauucugaaacauu

SEQ ID NO: 2169859 - RNA, 14 nt, Human
cugcaagcagggcu

SEQ ID NO: 2169860 - RNA, 18 nt, Human
cugcaagcagggcucugc

SEQ ID NO: 2169861 - RNA, 19 nt, Human
cugcaagcagggcucugcc

SEQ ID NO: 2169862 - RNA, 19 nt, Human
cugcaagccgacuacaccu

SEQ ID NO: 2169863 - RNA, 12 nt, Human
cugcaagccugc

SEQ ID NO: 2169864 - RNA, 21 nt, Human
cugcaagagccuuggugucca

SEQ ID NO: 2169865 - RNA, 19 nt, Human
cugcaagauucugaaacau

SEQ ID NO: 2169866 - RNA, 23 nt, Human
cugcaagagccuugguguccacc

SEQ ID NO: 2169867 - RNA, 19 nt, Human
cugcaagagccuugguguc

SEQ ID NO: 2169868 - RNA, 18 nt, Human
cugcaagagccuuggugu

SEQ ID NO: 2169869 - RNA, 17 nt, Human
cugcaagagccuuggug

SEQ ID NO: 2169870 - RNA, 15 nt, Human
cugcaagagccuugg

SEQ ID NO: 2169871 - RNA, 14 nt, Human
cugcaagagccuug

SEQ ID NO: 2169872 - RNA, 13 nt, Human
cugcaagagccuu

SEQ ID NO: 2169873 - RNA, 21 nt, Human
cugcaagaaaaugauguguac

SEQ ID NO: 2169874 - RNA, 21 nt, Human
cugcaacuuuaagcagcucuu

SEQ ID NO: 2169875 - RNA, 20 nt, Human
cugcaagaauugaagcagga

SEQ ID NO: 2169876 - RNA, 12 nt, Human
cugcaagggagu

SEQ ID NO: 2169877 - RNA, 14 nt, Human
cugcaagccugcgu

SEQ ID NO: 2169878 - RNA, 13 nt, Human
cugcaagccugcg

SEQ ID NO: 2169879 - RNA, 13 nt, Human
cugcaaggccuuu

SEQ ID NO: 2169880 - RNA, 16 nt, Human
cugcaaggccuuucug

SEQ ID NO: 2169881 - RNA, 17 nt, Human
cugcaaggccuuucugu

SEQ ID NO: 2169882 - RNA, 17 nt, Human
cugcaaggucuuugguu

SEQ ID NO: 2169883 - RNA, 17 nt, Human
cugcaagggcuccccac

SEQ ID NO: 2169884 - RNA, 22 nt, Human
cugcaagggcuccccacugccu

SEQ ID NO: 2169885 - RNA, 18 nt, Human
cugcaaggccuuucugug

SEQ ID NO: 2169886 - RNA, 20 nt, Human
cugcaaggccuuucugugug

SEQ ID NO: 2169887 - RNA, 22 nt, Human
cugcaagggcagaacacuaacc

SEQ ID NO: 2169888 - RNA, 16 nt, Human
cugcaagggcucccca

SEQ ID NO: 2169889 - RNA, 15 nt, Human
cugcaacuucugccu

SEQ ID NO: 2169890 - RNA, 18 nt, Human
cugcaacuuguaaaugug

SEQ ID NO: 2169891 - RNA, 14 nt, Human
cugcaacuucugcc

SEQ ID NO: 2169892 - RNA, 15 nt, Human
cugcaacucaaggac

SEQ ID NO: 2169893 - RNA, 23 nt, Human
cugcaacucaaggacuuugcagc

SEQ ID NO: 2169894 - RNA, 18 nt, Human
cugcaagaauugaagcag

SEQ ID NO: 2169895 - RNA, 19 nt, Human
cugcaacuuguaaaugugg

SEQ ID NO: 2169896 - RNA, 17 nt, Human
cugcaacggcuuagacu

SEQ ID NO: 2169897 - RNA, 17 nt, Human
cugcaacuuuaagcagc

SEQ ID NO: 2169898 - RNA, 19 nt, Human
cugcaacuuuaagcagcuc

SEQ ID NO: 2169899 - RNA, 20 nt, Human
cugcaacuuuaagcagcucu

SEQ ID NO: 2169900 - RNA, 15 nt, Human
cugcaaccuguugau

SEQ ID NO: 2169901 - RNA, 13 nt, Human
cugcaaccuccgc

SEQ ID NO: 2169902 - RNA, 22 nt, Human
cugcaaccugauugugucucuu

SEQ ID NO: 2169903 - RNA, 22 nt, Human
cugcaaccuucgccaccugggu

SEQ ID NO: 2169904 - RNA, 20 nt, Human
cugcaaccuucgccaccugg

SEQ ID NO: 2169905 - RNA, 19 nt, Human
cugcaaccuucgccaccug

SEQ ID NO: 2169906 - RNA, 17 nt, Human
cugcaaccuucgccacc

SEQ ID NO: 2169907 - RNA, 21 nt, Human
cugcaaaucagccaugugcug

SEQ ID NO: 2169908 - RNA, 19 nt, Human
cugcaaauccuugugggaa

SEQ ID NO: 2169909 - RNA, 16 nt, Human
cugcaaauccuugugg

SEQ ID NO: 2169910 - RNA, 20 nt, Human
cugcaaccuccgccucuugg

SEQ ID NO: 2169911 - RNA, 12 nt, Human
cugcaacaggcu

SEQ ID NO: 2169912 - RNA, 15 nt, Human
cugcaaaugucauca

SEQ ID NO: 2169913 - RNA, 22 nt, Human
cugcaaccuccgccucuugggu

SEQ ID NO: 2169914 - RNA, 14 nt, Human
cugcaaccugauug

SEQ ID NO: 2169915 - RNA, 19 nt, Human
cugcaaccugauugugucu

SEQ ID NO: 2169916 - RNA, 21 nt, Human
cugcaaccugauugugucucu

SEQ ID NO: 2169917 - RNA, 22 nt, Human
cucaauauuuuccaugaaaaug

SEQ ID NO: 2169918 - RNA, 15 nt, Human
cucaaucaagaaaau

SEQ ID NO: 2169919 - RNA, 18 nt, Human
cucaaucccagcuacuca

SEQ ID NO: 2169920 - RNA, 15 nt, Human
cucaauccauguucu

SEQ ID NO: 2169921 - RNA, 14 nt, Human
cucaauccauguuc

SEQ ID NO: 2169922 - RNA, 14 nt, Human
cucaauccucuaag

SEQ ID NO: 2169923 - RNA, 22 nt, Human
cucaauccuaauuucuccuccc

SEQ ID NO: 2169924 - RNA, 23 nt, Human
cucaauccuaauuucuccucccu

SEQ ID NO: 2169925 - RNA, 14 nt, Human
cucaauccuaauuu

SEQ ID NO: 2169926 - RNA, 19 nt, Human
cucaauccuaauuucuccu

SEQ ID NO: 2169927 - RNA, 20 nt, Human
cucaauccuaauuucuccuc

SEQ ID NO: 2169928 - RNA, 14 nt, Human
cucaauggacugga

SEQ ID NO: 2169929 - RNA, 17 nt, Human
cucaauggacuggaagg

SEQ ID NO: 2169930 - RNA, 20 nt, Human
cucaauggacuggaagggga

SEQ ID NO: 2169931 - RNA, 19 nt, Human
cucaauguuacuaucugcu

SEQ ID NO: 2169932 - RNA, 18 nt, Human
cucaauucccccuggcca

SEQ ID NO: 2169933 - RNA, 19 nt, Human
cucaauucccccuggccac

SEQ ID NO: 2169934 - RNA, 21 nt, Human
cucaaugugaaucagacccua

SEQ ID NO: 2169935 - RNA, 14 nt, Human
cucaaugugaccag

SEQ ID NO: 2169936 - RNA, 20 nt, Human
cucaaugugaaucagacccu

SEQ ID NO: 2169937 - RNA, 18 nt, Human
cucaaugugaccaggggu

SEQ ID NO: 2169938 - RNA, 15 nt, Human
cucaaugugaccagg

SEQ ID NO: 2169939 - RNA, 16 nt, Human
cucaaugugaccaggg

SEQ ID NO: 2169940 - RNA, 23 nt, Human
cucaauuauuuugcauuuuuucu

SEQ ID NO: 2169941 - RNA, 18 nt, Human
cucaauauuuuccaugaa

SEQ ID NO: 2169942 - RNA, 19 nt, Human
cucaauauuuuccaugaaa

SEQ ID NO: 2169943 - RNA, 13 nt, Human
cucaauauuuucc

SEQ ID NO: 2169944 - RNA, 23 nt, Human
cucaauaaaaucauguacauuuc

SEQ ID NO: 2169945 - RNA, 22 nt, Human
cucaauaaaaucauguacauuu

SEQ ID NO: 2169946 - RNA, 13 nt, Human
cucaauaaaauca

SEQ ID NO: 2169947 - RNA, 20 nt, Human
cucaaguuuuucagaaagca

SEQ ID NO: 2169948 - RNA, 18 nt, Human
cucaaguuuuucagaaag

SEQ ID NO: 2169949 - RNA, 19 nt, Human
cucaaguuuuucagaaagc

SEQ ID NO: 2169950 - RNA, 14 nt, Human
cucaaguugaaaga

SEQ ID NO: 2169951 - RNA, 22 nt, Human
cucaagugucucaguccaccug

SEQ ID NO: 2169952 - RNA, 22 nt, Human
cucaagugcccucuccgagcug

SEQ ID NO: 2169953 - RNA, 22 nt, Human
cucaagugggaacgacugggca

SEQ ID NO: 2169954 - RNA, 9 nt, Human
cucaagugc

SEQ ID NO: 2169955 - RNA, 15 nt, Human
cucaagugcccucuc

SEQ ID NO: 2169956 - RNA, 20 nt, Human
cuauguuuuuguucaaagcc

SEQ ID NO: 2169957 - RNA, 20 nt, Human
cuauguuuacaaauggacau

SEQ ID NO: 2169958 - RNA, 20 nt, Human
cuaugugacuugcaucgugg

SEQ ID NO: 2169959 - RNA, 18 nt, Human
cuauguuuugacauuuuu

SEQ ID NO: 2169960 - RNA, 19 nt, Human
cuauguuuugacauuuuua

SEQ ID NO: 2169961 - RNA, 21 nt, Human
cucaagugauucuccugccuc

SEQ ID NO: 2169962 - RNA, 22 nt, Human
cuauguuuuuguucaaagccag

SEQ ID NO: 2169963 - RNA, 22 nt, Human
cuauguccuaaggacacacuaa

SEQ ID NO: 2169964 - RNA, 23 nt, Human
cuauguccuaaggacacacuaau

SEQ ID NO: 2169965 - RNA, 15 nt, Human
cuauguccuaaggac

SEQ ID NO: 2169966 - RNA, 18 nt, Human
cuauguccuaaggacaca

SEQ ID NO: 2169967 - RNA, 20 nt, Human
cuauguccuaaggacacacu

SEQ ID NO: 2169968 - RNA, 21 nt, Human
cuauguccuaaggacacacua

SEQ ID NO: 2169969 - RNA, 14 nt, Human
cuaugugagaccau

SEQ ID NO: 2169970 - RNA, 16 nt, Human
cuaugucccuugcugu

SEQ ID NO: 2169971 - RNA, 14 nt, Human
cuauguccuaagga

SEQ ID NO: 2169972 - RNA, 13 nt, Human
cuaugucccuugc

SEQ ID NO: 2169973 - RNA, 21 nt, Human
cuaucucaucuaucucaaucc

SEQ ID NO: 2169974 - RNA, 12 nt, Human
cuaucucaucua

SEQ ID NO: 2169975 - RNA, 13 nt, Human
cuauccuggcucu

SEQ ID NO: 2169976 - RNA, 19 nt, Human
cuauccuggcucuuuggag

SEQ ID NO: 2169977 - RNA, 18 nt, Human
cuaucucaauccuaauuu

SEQ ID NO: 2169978 - RNA, 18 nt, Human
cuaucucauuuccaagca

SEQ ID NO: 2169979 - RNA, 13 nt, Human
cuaucucccccag

SEQ ID NO: 2169980 - RNA, 14 nt, Human
cuaucucccccagc

SEQ ID NO: 2169981 - RNA, 18 nt, Human
cuauguugcccaggcagg

SEQ ID NO: 2169982 - RNA, 19 nt, Human
cuauguugcccaggcaggu

SEQ ID NO: 2169983 - RNA, 21 nt, Human
cuauguugcccaggcaggucu

SEQ ID NO: 2169984 - RNA, 22 nt, Human
cuauguugcccaggcaggucuu

SEQ ID NO: 2169985 - RNA, 12 nt, Human
cuaugugacaau

SEQ ID NO: 2169986 - RNA, 17 nt, Human
cuaugugagcacaaagg

SEQ ID NO: 2169987 - RNA, 18 nt, Human
cuauguucuaagaaguga

SEQ ID NO: 2169988 - RNA, 19 nt, Human
cuaucaccuccccuccuug

SEQ ID NO: 2169989 - RNA, 17 nt, Human
cuaucaccuccccuccu

SEQ ID NO: 2169990 - RNA, 16 nt, Human
cuaucaccuccccucc

SEQ ID NO: 2169991 - RNA, 21 nt, Human
cuaucagaggugaaagcuaua

SEQ ID NO: 2169992 - RNA, 13 nt, Human
cuaucagaagacc

SEQ ID NO: 2169993 - RNA, 19 nt, Human
cuaucagaguugcugcaaa

SEQ ID NO: 2169994 - RNA, 15 nt, Human
cuaucagccugucuc

SEQ ID NO: 2169995 - RNA, 20 nt, Human
cuaucagccugucucuucca

SEQ ID NO: 2169996 - RNA, 12 nt, Human
cuaucagugugc

SEQ ID NO: 2169997 - RNA, 16 nt, Human
cuaucagugugccccc

SEQ ID NO: 2169998 - RNA, 15 nt, Human
cuaucaccuccccuc

SEQ ID NO: 2169999 - RNA, 14 nt, Human
cuaucaccuccccu

SEQ ID NO: 2170000 - RNA, 17 nt, Human
cuaucaccuauuuccau

SEQ ID NO: 2170001 - RNA, 16 nt, Human
cuaucaccuauuucca

SEQ ID NO: 2170002 - RNA, 13 nt, Human
cuauccuacccca

SEQ ID NO: 2170003 - RNA, 14 nt, Human
cuaucauggaguga

SEQ ID NO: 2170004 - RNA, 17 nt, Human
cuaucagugugcccccc

SEQ ID NO: 2170005 - RNA, 18 nt, Human
cuaucagugugcccccca

SEQ ID NO: 2170006 - RNA, 21 nt, Human
cuaucagugugccccccaucc

SEQ ID NO: 2170007 - RNA, 23 nt, Human
cuaucagugugccccccauccug

SEQ ID NO: 2170008 - RNA, 17 nt, Human
cuauccuacuuccccuu

SEQ ID NO: 2170009 - RNA, 12 nt, Human
cuauccucugua

SEQ ID NO: 2170010 - RNA, 13 nt, Human
cuauccucuguaa

SEQ ID NO: 2170011 - RNA, 19 nt, Human
cuauccugaaaauucugua

SEQ ID NO: 2170012 - RNA, 15 nt, Human
cuaauuuuggaugga

SEQ ID NO: 2170013 - RNA, 20 nt, Human
cuacaaaaccugauguuaaa

SEQ ID NO: 2170014 - RNA, 18 nt, Human
cuacaaaauuugaaauuu

SEQ ID NO: 2170015 - RNA, 17 nt, Human
cuacaaaauuugaaauu

SEQ ID NO: 2170016 - RNA, 21 nt, Human
cuacaaaaccugauguuaaaa

SEQ ID NO: 2170017 - RNA, 13 nt, Human
cuacaaacaaaau

SEQ ID NO: 2170018 - RNA, 15 nt, Human
cuacaaacaaaauuu

SEQ ID NO: 2170019 - RNA, 17 nt, Human
cuacaaacaaaauuucu

SEQ ID NO: 2170020 - RNA, 20 nt, Human
cuacaaacaaaauuucuauu

SEQ ID NO: 2170021 - RNA, 15 nt, Human
cucagaccagcucuu

SEQ ID NO: 2170022 - RNA, 14 nt, Human
cucagaccagcucu

SEQ ID NO: 2170023 - RNA, 16 nt, Human
cucagaccagcucuuc

SEQ ID NO: 2170024 - RNA, 13 nt, Human
cucagacccccac

SEQ ID NO: 2170025 - RNA, 22 nt, Human
cucagacccccacucucauucc

SEQ ID NO: 2170026 - RNA, 16 nt, Human
cucagacccccacucu

SEQ ID NO: 2170027 - RNA, 15 nt, Human
cucagacccccacuc

SEQ ID NO: 2170028 - RNA, 14 nt, Human
cucagacccccacu

SEQ ID NO: 2170029 - RNA, 14 nt, Human
cucagacuccauuu

SEQ ID NO: 2170030 - RNA, 23 nt, Human
cucagacccccacucucauuccc

SEQ ID NO: 2170031 - RNA, 22 nt, Human
cucagacucuuuuuguaccugg

SEQ ID NO: 2170032 - RNA, 17 nt, Human
cucagaagccugaggcu

SEQ ID NO: 2170033 - RNA, 16 nt, Human
cucagaagccugaggc

SEQ ID NO: 2170034 - RNA, 18 nt, Human
cucagaagccugaggcug

SEQ ID NO: 2170035 - RNA, 15 nt, Human
cucagaagccugagg

SEQ ID NO: 2170036 - RNA, 14 nt, Human
cucagaagccugag

SEQ ID NO: 2170037 - RNA, 13 nt, Human
cucagaagccuga

SEQ ID NO: 2170038 - RNA, 17 nt, Human
cucagaagccucugggu

SEQ ID NO: 2170039 - RNA, 11 nt, Human
cucagaagccu

SEQ ID NO: 2170040 - RNA, 15 nt, Human
cucagaagccucugg

SEQ ID NO: 2170041 - RNA, 13 nt, Human
cucagaagaaaga

SEQ ID NO: 2170042 - RNA, 23 nt, Human
cucagaagacacugaugggcaac

SEQ ID NO: 2170043 - RNA, 19 nt, Human
cucagccucccgaauagcu

SEQ ID NO: 2170044 - RNA, 21 nt, Human
cucagccucccgaauagcugg

SEQ ID NO: 2170045 - RNA, 21 nt, Human
cucagcccugggccccaccac

SEQ ID NO: 2170046 - RNA, 11 nt, Human
cucagcccugu

SEQ ID NO: 2170047 - RNA, 19 nt, Human
cucagcccugggccccacc

SEQ ID NO: 2170048 - RNA, 15 nt, Human
cucagcccugggccc

SEQ ID NO: 2170049 - RNA, 22 nt, Human
cucagccuccuguguagcuggg

SEQ ID NO: 2170050 - RNA, 20 nt, Human
cucagccucaauaagccuug

SEQ ID NO: 2170051 - RNA, 22 nt, Human
cucagccucccgaauagcuggg

SEQ ID NO: 2170052 - RNA, 14 nt, Human
cucagcccugggcc

SEQ ID NO: 2170053 - RNA, 13 nt, Human
cucagcccugggc

SEQ ID NO: 2170054 - RNA, 12 nt, Human
cucagcccuggg

SEQ ID NO: 2170055 - RNA, 22 nt, Human
cucagcccuggaggugccagca

SEQ ID NO: 2170056 - RNA, 15 nt, Human
cucagcccuggaggu

SEQ ID NO: 2170057 - RNA, 18 nt, Human
cucagcccuggaggugcc

SEQ ID NO: 2170058 - RNA, 19 nt, Human
cucagcccuggaggugcca

SEQ ID NO: 2170059 - RNA, 20 nt, Human
cucagcccuggaggugccag

SEQ ID NO: 2170060 - RNA, 11 nt, Human
cucagcccugg

SEQ ID NO: 2170061 - RNA, 12 nt, Human
cucagcccugga

SEQ ID NO: 2170062 - RNA, 13 nt, Human
cucagcccuggag

SEQ ID NO: 2170063 - RNA, 14 nt, Human
cucagcccuggagg

SEQ ID NO: 2170064 - RNA, 15 nt, Human
cucagcccugaggug

SEQ ID NO: 2170065 - RNA, 14 nt, Human
cucagcccugaggu

SEQ ID NO: 2170066 - RNA, 13 nt, Human
cucagcccugagg

SEQ ID NO: 2170067 - RNA, 19 nt, Human
cucagcccugacuggugcu

SEQ ID NO: 2170068 - RNA, 16 nt, Human
cucagacuuaccagga

SEQ ID NO: 2170069 - RNA, 13 nt, Human
cucagcccugacu

SEQ ID NO: 2170070 - RNA, 18 nt, Human
cucagcccugacuggugc

SEQ ID NO: 2170071 - RNA, 17 nt, Human
cucaccuuucccaucuu

SEQ ID NO: 2170072 - RNA, 20 nt, Human
cucacgccuaugaucccagc

SEQ ID NO: 2170073 - RNA, 19 nt, Human
cucacgcaccucccauccu

SEQ ID NO: 2170074 - RNA, 16 nt, Human
cucacgcaccucccau

SEQ ID NO: 2170075 - RNA, 15 nt, Human
cucacgcaccuccca

SEQ ID NO: 2170076 - RNA, 20 nt, Human
cucacgaauauuaugcccag

SEQ ID NO: 2170077 - RNA, 16 nt, Human
cucaccuuuucccggg

SEQ ID NO: 2170078 - RNA, 16 nt, Human
cucacgugagaguguc

SEQ ID NO: 2170079 - RNA, 21 nt, Human
cucacgggcaugggcacuccc

SEQ ID NO: 2170080 - RNA, 13 nt, Human
cucacguguguga

SEQ ID NO: 2170081 - RNA, 19 nt, Human
cucacgggcaguagcugug

SEQ ID NO: 2170082 - RNA, 17 nt, Human
cucacgggcaugggcac

SEQ ID NO: 2170083 - RNA, 23 nt, Human
cucacgccuguaaucccagcagu

SEQ ID NO: 2170084 - RNA, 22 nt, Human
cucacgccuguaaucccagcag

SEQ ID NO: 2170085 - RNA, 22 nt, Human
cucacgccuguaaucccagcau

SEQ ID NO: 2170086 - RNA, 21 nt, Human
cucacgccuguaaucccagca

SEQ ID NO: 2170087 - RNA, 20 nt, Human
cucacgccuguaaucccagc

SEQ ID NO: 2170088 - RNA, 19 nt, Human
cucacgccuguaaucccag

SEQ ID NO: 2170089 - RNA, 18 nt, Human
cucacgccuguaauccca

SEQ ID NO: 2170090 - RNA, 13 nt, Human
cucacgccuguaa

SEQ ID NO: 2170091 - RNA, 13 nt, Human
cucagaagacacu

SEQ ID NO: 2170092 - RNA, 21 nt, Human
cucagaacccuuggcuugccc

SEQ ID NO: 2170093 - RNA, 14 nt, Human
cucagaacccuugg

SEQ ID NO: 2170094 - RNA, 15 nt, Human
cucacuaggccccca

SEQ ID NO: 2170095 - RNA, 17 nt, Human
cucacuaccuccucagg

SEQ ID NO: 2170096 - RNA, 18 nt, Human
cucacuaccuccucaggg

SEQ ID NO: 2170097 - RNA, 20 nt, Human
cucacuacccuauucucucu

SEQ ID NO: 2170098 - RNA, 12 nt, Human
cucacuaccucc

SEQ ID NO: 2170099 - RNA, 15 nt, Human
cucacuaccuccuca

SEQ ID NO: 2170100 - RNA, 16 nt, Human
cucacuaccuccucag

SEQ ID NO: 2170101 - RNA, 18 nt, Human
cucacuaggcccccacuu

SEQ ID NO: 2170102 - RNA, 22 nt, Human
cucacuaggcccccacuugccu

SEQ ID NO: 2170103 - RNA, 20 nt, Human
cucacuaccuccucagggau

SEQ ID NO: 2170104 - RNA, 17 nt, Human
cucagaaauuuuuauuu

SEQ ID NO: 2170105 - RNA, 21 nt, Human
cucagaaauuuuuauuuuucu

SEQ ID NO: 2170106 - RNA, 15 nt, Human
cucagaagacacuga

SEQ ID NO: 2170107 - RNA, 17 nt, Human
cucagaagacacugaug

SEQ ID NO: 2170108 - RNA, 20 nt, Human
cucagaagacacugaugggc

SEQ ID NO: 2170109 - RNA, 22 nt, Human
cucagaagacacugaugggcaa

SEQ ID NO: 2170110 - RNA, 23 nt, Human
cucaggccuauaaccccagcucc

SEQ ID NO: 2170111 - RNA, 20 nt, Human
cucaggccugacucucagca

SEQ ID NO: 2170112 - RNA, 15 nt, Human
cucaggccacaccgg

SEQ ID NO: 2170113 - RNA, 22 nt, Human
cucaggccugggggcugggcag

SEQ ID NO: 2170114 - RNA, 11 nt, Human
cucaggccugg

SEQ ID NO: 2170115 - RNA, 16 nt, Human
cucaggccagcugcuu

SEQ ID NO: 2170116 - RNA, 17 nt, Human
cucaggccagcugcuug

SEQ ID NO: 2170117 - RNA, 18 nt, Human
cucaggccagcugcuugg

SEQ ID NO: 2170118 - RNA, 23 nt, Human
cucaggccgaaggaggagucagg

SEQ ID NO: 2170119 - RNA, 17 nt, Human
cucagccucugaauaug

SEQ ID NO: 2170120 - RNA, 23 nt, Human
cucagccuccuguguagcuggga

SEQ ID NO: 2170121 - RNA, 15 nt, Human
cucagccuggccaga

SEQ ID NO: 2170122 - RNA, 14 nt, Human
cucagccuggccag

SEQ ID NO: 2170123 - RNA, 13 nt, Human
cucagccuggcca

SEQ ID NO: 2170124 - RNA, 20 nt, Human
cucagccuggccagacacag

SEQ ID NO: 2170125 - RNA, 19 nt, Human
cucagccuggccagacaca

SEQ ID NO: 2170126 - RNA, 17 nt, Human
cucagccuggccagaca

SEQ ID NO: 2170127 - RNA, 16 nt, Human
cucagccuggccagac

SEQ ID NO: 2170128 - RNA, 19 nt, Human
cucaggccaacaagccaac

SEQ ID NO: 2170129 - RNA, 20 nt, Human
cucaggccaagaaacgucuu

SEQ ID NO: 2170130 - RNA, 21 nt, Human
cucaggccaaacucaccugcc

SEQ ID NO: 2170131 - RNA, 19 nt, Human
cucaggccaaacucaccug

SEQ ID NO: 2170132 - RNA, 20 nt, Human
cucaggccaaacucaccugc

SEQ ID NO: 2170133 - RNA, 23 nt, Human
cucagggaaaagcagcucucccc

SEQ ID NO: 2170134 - RNA, 19 nt, Human
cucagggacagagacaccu

SEQ ID NO: 2170135 - RNA, 17 nt, Human
cucagggaaaggccagu

SEQ ID NO: 2170136 - RNA, 20 nt, Human
cucagggacagagacaccug

SEQ ID NO: 2170137 - RNA, 17 nt, Human
cucagggaaaagcagcu

SEQ ID NO: 2170138 - RNA, 21 nt, Human
cucaggcuuucacuauuuccu

SEQ ID NO: 2170139 - RNA, 22 nt, Human
cucaggcuuucacuauuuccuu

SEQ ID NO: 2170140 - RNA, 17 nt, Human
cucaggcuuccuuggca

SEQ ID NO: 2170141 - RNA, 17 nt, Human
cucaggcuggugggagg

SEQ ID NO: 2170142 - RNA, 15 nt, Human
cucaggcuugaaaug

SEQ ID NO: 2170143 - RNA, 22 nt, Human
cucagggaaaagcagcucuccc

SEQ ID NO: 2170144 - RNA, 20 nt, Human
cucagggaaaagcagcucuc

SEQ ID NO: 2170145 - RNA, 14 nt, Human
cucagggacagaga

SEQ ID NO: 2170146 - RNA, 17 nt, Human
cucaggcugcuggagga

SEQ ID NO: 2170147 - RNA, 16 nt, Human
cucaggcugcuggagg

SEQ ID NO: 2170148 - RNA, 15 nt, Human
cucaggcugcuggag

SEQ ID NO: 2170149 - RNA, 14 nt, Human
cucaggcugcugga

SEQ ID NO: 2170150 - RNA, 13 nt, Human
cucaggcugcugg

SEQ ID NO: 2170151 - RNA, 12 nt, Human
cucaggcugcug

SEQ ID NO: 2170152 - RNA, 11 nt, Human
cucaggcugcu

SEQ ID NO: 2170153 - RNA, 22 nt, Human
cucaggcucugcccugcccuag

SEQ ID NO: 2170154 - RNA, 19 nt, Human
cucaggcucugcccugccc

SEQ ID NO: 2170155 - RNA, 17 nt, Human
cucaggcucugcccugc

SEQ ID NO: 2170156 - RNA, 16 nt, Human
cucaggcucugcccug

SEQ ID NO: 2170157 - RNA, 15 nt, Human
cucaggcucugcccu

SEQ ID NO: 2170158 - RNA, 14 nt, Human
cucaggcucugccc

SEQ ID NO: 2170159 - RNA, 21 nt, Human
cucaggcgauccaccugucuc

SEQ ID NO: 2170160 - RNA, 13 nt, Human
cucaggcucugcc

SEQ ID NO: 2170161 - RNA, 20 nt, Human
cucaggcgauccaccugucu

SEQ ID NO: 2170162 - RNA, 23 nt, Human
cucaggugucccugcacuugcag

SEQ ID NO: 2170163 - RNA, 14 nt, Human
cucagguguugcca

SEQ ID NO: 2170164 - RNA, 22 nt, Human
cucagguugucugaagucacug

SEQ ID NO: 2170165 - RNA, 15 nt, Human
cucagguguugccaa

SEQ ID NO: 2170166 - RNA, 12 nt, Human
cucagguuccua

SEQ ID NO: 2170167 - RNA, 20 nt, Human
cucagguuccuauggcuggc

SEQ ID NO: 2170168 - RNA, 20 nt, Human
cucagguugcugguugcugu

SEQ ID NO: 2170169 - RNA, 21 nt, Human
cucagguugcugguugcugug

SEQ ID NO: 2170170 - RNA, 22 nt, Human
cucagguugcugguugcugugu

SEQ ID NO: 2170171 - RNA, 23 nt, Human
cucagguugcugguugcugugug

SEQ ID NO: 2170172 - RNA, 12 nt, Human
cucaugcaucuc

SEQ ID NO: 2170173 - RNA, 14 nt, Human
cucaugcagccgug

SEQ ID NO: 2170174 - RNA, 15 nt, Human
cucaugcagccguga

SEQ ID NO: 2170175 - RNA, 14 nt, Human
cucaugcaucucca

SEQ ID NO: 2170176 - RNA, 16 nt, Human
cucaugcaucuccacc

SEQ ID NO: 2170177 - RNA, 17 nt, Human
cucaugcaucuccaccu

SEQ ID NO: 2170178 - RNA, 18 nt, Human
cucaugcaucuccaccug

SEQ ID NO: 2170179 - RNA, 14 nt, Human
cucauggccccucu

SEQ ID NO: 2170180 - RNA, 15 nt, Human
cucauggccccucug

SEQ ID NO: 2170181 - RNA, 17 nt, Human
cucauggccccucugac

SEQ ID NO: 2170182 - RNA, 19 nt, Human
cucauggccccucugaccu

SEQ ID NO: 2170183 - RNA, 20 nt, Human
cucaugaucuugugacauau

SEQ ID NO: 2170184 - RNA, 19 nt, Human
cucaugaucuugugacaua

SEQ ID NO: 2170185 - RNA, 16 nt, Human
cucaugcaaaucaauu

SEQ ID NO: 2170186 - RNA, 20 nt, Human
cucaugcaaaucaauuacug

SEQ ID NO: 2170187 - RNA, 19 nt, Human
cucaugcaaaucaauuacu

SEQ ID NO: 2170188 - RNA, 22 nt, Human
cucaugaggggcccgagcagaa

SEQ ID NO: 2170189 - RNA, 23 nt, Human
cucaugauagaaggcuaugggga

SEQ ID NO: 2170190 - RNA, 21 nt, Human
cucaguccuccccucacagcc

SEQ ID NO: 2170191 - RNA, 22 nt, Human
cucagucuggcccuuccuuuuc

SEQ ID NO: 2170192 - RNA, 20 nt, Human
cucagucuggcccuuccuuu

SEQ ID NO: 2170193 - RNA, 17 nt, Human
cucagucccccaacaga

SEQ ID NO: 2170194 - RNA, 14 nt, Human
cucaguccuccccu

SEQ ID NO: 2170195 - RNA, 16 nt, Human
cucaguccuccccuca

SEQ ID NO: 2170196 - RNA, 17 nt, Human
cucaguccuccccucac

SEQ ID NO: 2170197 - RNA, 18 nt, Human
cucaguccuccccucaca

SEQ ID NO: 2170198 - RNA, 19 nt, Human
cucaguccuccccucacag

SEQ ID NO: 2170199 - RNA, 20 nt, Human
cucaguccuccccucacagc

SEQ ID NO: 2170200 - RNA, 18 nt, Human
cucaguccaccugagcug

SEQ ID NO: 2170201 - RNA, 17 nt, Human
cucaguccaccugagcu

SEQ ID NO: 2170202 - RNA, 16 nt, Human
cucaguccaccugagc

SEQ ID NO: 2170203 - RNA, 18 nt, Human
cucagucauuagacuccu

SEQ ID NO: 2170204 - RNA, 22 nt, Human
cucagucaugcauaaauaugca

SEQ ID NO: 2170205 - RNA, 23 nt, Human
cucagucaugcauaaauaugcag

SEQ ID NO: 2170206 - RNA, 16 nt, Human
cucaguccaugaagau

SEQ ID NO: 2170207 - RNA, 22 nt, Human
cucagguuguaguaaagaaauu

SEQ ID NO: 2170208 - RNA, 19 nt, Human
cucagguuguaguaaagaa

SEQ ID NO: 2170209 - RNA, 14 nt, Human
cucagguugucuga

SEQ ID NO: 2170210 - RNA, 13 nt, Human
cucagucauaauc

SEQ ID NO: 2170211 - RNA, 13 nt, Human
cucagucaguauu

SEQ ID NO: 2170212 - RNA, 14 nt, Human
cucagucaugcaua

SEQ ID NO: 2170213 - RNA, 15 nt, Human
cucagucaugcauaa

SEQ ID NO: 2170214 - RNA, 16 nt, Human
cucagucaugcauaaa

SEQ ID NO: 2170215 - RNA, 18 nt, Human
cucagucaugcauaaaua

SEQ ID NO: 2170216 - RNA, 15 nt, Human
cucaguccauagcag

SEQ ID NO: 2170217 - RNA, 17 nt, Human
cucaguccauagcagag

SEQ ID NO: 2170218 - RNA, 12 nt, Human
cucucccugacc

SEQ ID NO: 2170219 - RNA, 13 nt, Human
cucucccugaccc

SEQ ID NO: 2170220 - RNA, 14 nt, Human
cucucccugacccu

SEQ ID NO: 2170221 - RNA, 20 nt, Human
cucucccugacccuguauau

SEQ ID NO: 2170222 - RNA, 12 nt, Human
cucuccuccaga

SEQ ID NO: 2170223 - RNA, 16 nt, Human
cucucccucuucucaa

SEQ ID NO: 2170224 - RNA, 13 nt, Human
cucuccuccagag

SEQ ID NO: 2170225 - RNA, 15 nt, Human
cucuccuccagaguc

SEQ ID NO: 2170226 - RNA, 16 nt, Human
cucuccuccagaguca

SEQ ID NO: 2170227 - RNA, 13 nt, Human
cucucuggccuuc

SEQ ID NO: 2170228 - RNA, 16 nt, Human
cucucuggccuucggc

SEQ ID NO: 2170229 - RNA, 14 nt, Human
cucucuggccuucg

SEQ ID NO: 2170230 - RNA, 19 nt, Human
cucucccgguucuuccagu

SEQ ID NO: 2170231 - RNA, 18 nt, Human
cucuccccucaaagucug

SEQ ID NO: 2170232 - RNA, 21 nt, Human
cucuccccucaaagucugcaa

SEQ ID NO: 2170233 - RNA, 12 nt, Human
cucuccccucaa

SEQ ID NO: 2170234 - RNA, 14 nt, Human
cucuccccucaaag

SEQ ID NO: 2170235 - RNA, 13 nt, Human
cucucccccaccc

SEQ ID NO: 2170236 - RNA, 16 nt, Human
cucucccccacccccu

SEQ ID NO: 2170237 - RNA, 17 nt, Human
cucuccccccccccucc

SEQ ID NO: 2170238 - RNA, 19 nt, Human
cucuccccccccccuccaa

SEQ ID NO: 2170239 - RNA, 21 nt, Human
cucuccccccccccuccaauc

SEQ ID NO: 2170240 - RNA, 23 nt, Human
cucuccccccccccuccaauccu

SEQ ID NO: 2170241 - RNA, 22 nt, Human
cucucccucuggcccugccuuc

SEQ ID NO: 2170242 - RNA, 21 nt, Human
cucucccucuggcccugccuu

SEQ ID NO: 2170243 - RNA, 19 nt, Human
cucucccucuggcccugcc

SEQ ID NO: 2170244 - RNA, 18 nt, Human
cucucccucuggcccugc

SEQ ID NO: 2170245 - RNA, 13 nt, Human
cucucccucuggc

SEQ ID NO: 2170246 - RNA, 12 nt, Human
cucucccucugg

SEQ ID NO: 2170247 - RNA, 23 nt, Human
cucucccucaacaagggagagac

SEQ ID NO: 2170248 - RNA, 17 nt, Human
cucucccuccccugcca

SEQ ID NO: 2170249 - RNA, 13 nt, Human
cucucccuccccu

SEQ ID NO: 2170250 - RNA, 15 nt, Human
cucucccgucagggc

SEQ ID NO: 2170251 - RNA, 16 nt, Human
cucucccgucagggcc

SEQ ID NO: 2170252 - RNA, 17 nt, Human
cucucccgucagggccc

SEQ ID NO: 2170253 - RNA, 21 nt, Human
cucucccgucagggcccaagu

SEQ ID NO: 2170254 - RNA, 21 nt, Human
cucuaugccagcucaguccca

SEQ ID NO: 2170255 - RNA, 22 nt, Human
cucuaugggcagaucuaccccu

SEQ ID NO: 2170256 - RNA, 19 nt, Human
cucuauguucuaagaagug

SEQ ID NO: 2170257 - RNA, 16 nt, Human
cucuccccaugauguu

SEQ ID NO: 2170258 - RNA, 15 nt, Human
cucuccccaugaugu

SEQ ID NO: 2170259 - RNA, 20 nt, Human
cucucuuaggagcagagcuc

SEQ ID NO: 2170260 - RNA, 18 nt, Human
cucucuuauagaauauuu

SEQ ID NO: 2170261 - RNA, 16 nt, Human
cucucugugcugugga

SEQ ID NO: 2170262 - RNA, 19 nt, Human
cucucugugggcuggcagu

SEQ ID NO: 2170263 - RNA, 19 nt, Human
cucucuuauagaauauuua

SEQ ID NO: 2170264 - RNA, 21 nt, Human
cucucuuauagaauauuuauu

SEQ ID NO: 2170265 - RNA, 16 nt, Human
cucucuucugcuccac

SEQ ID NO: 2170266 - RNA, 15 nt, Human
cucucuucugcucca

SEQ ID NO: 2170267 - RNA, 14 nt, Human
cucucuucugcucc

SEQ ID NO: 2170268 - RNA, 12 nt, Human
cucucuucugcu

SEQ ID NO: 2170269 - RNA, 23 nt, Human
cucucuuauagaauauuuauuac

SEQ ID NO: 2170270 - RNA, 23 nt, Human
cucucuggggcaggguuauuccu

SEQ ID NO: 2170271 - RNA, 18 nt, Human
cucucuggggccacacag

SEQ ID NO: 2170272 - RNA, 19 nt, Human
cucucuggggccacacaga

SEQ ID NO: 2170273 - RNA, 20 nt, Human
cucucuggggccacacagaa

SEQ ID NO: 2170274 - RNA, 15 nt, Human
cucucuggcugggga

SEQ ID NO: 2170275 - RNA, 15 nt, Human
cucuccuccccaaau

SEQ ID NO: 2170276 - RNA, 17 nt, Human
cucucuggccuuuuccu

SEQ ID NO: 2170277 - RNA, 19 nt, Human
cucucuggccuuuuccuau

SEQ ID NO: 2170278 - RNA, 13 nt, Human
cucucuggcuggg

SEQ ID NO: 2170279 - RNA, 11 nt, Human
cucuccucccc

SEQ ID NO: 2170280 - RNA, 13 nt, Human
cuccuuuguacuu

SEQ ID NO: 2170281 - RNA, 14 nt, Human
cuccuuuguacuuu

SEQ ID NO: 2170282 - RNA, 17 nt, Human
cuccuuuguacuuugug

SEQ ID NO: 2170283 - RNA, 20 nt, Human
cuccuuuguacuuugugcuu

SEQ ID NO: 2170284 - RNA, 19 nt, Human
cuccuuucaccccagggcc

SEQ ID NO: 2170285 - RNA, 20 nt, Human
cuccuuucacaaccuucugu

SEQ ID NO: 2170286 - RNA, 17 nt, Human
cuccuuugugaggaagc

SEQ ID NO: 2170287 - RNA, 18 nt, Human
cuccuuugugaggaagcc

SEQ ID NO: 2170288 - RNA, 17 nt, Human
cuccuuuggccauucca

SEQ ID NO: 2170289 - RNA, 12 nt, Human
cuccuuuguaua

SEQ ID NO: 2170290 - RNA, 13 nt, Human
cuccuuuguauau

SEQ ID NO: 2170291 - RNA, 11 nt, Human
cucggugguac

SEQ ID NO: 2170292 - RNA, 19 nt, Human
cucggugguaccaggucuc

SEQ ID NO: 2170293 - RNA, 16 nt, Human
cucgguguggagaagc

SEQ ID NO: 2170294 - RNA, 23 nt, Human
cucgguguggagaagcggcuggc

SEQ ID NO: 2170295 - RNA, 17 nt, Human
cucgguguggagaagcg

SEQ ID NO: 2170296 - RNA, 20 nt, Human
cucgucggggggacagcucc

SEQ ID NO: 2170297 - RNA, 24 nt, Human
cucguccucccccugccagugccu

SEQ ID NO: 2170298 - RNA, 17 nt, Human
cucgucugacugugugu

SEQ ID NO: 2170299 - RNA, 14 nt, Human
cucgucuucauuaa

SEQ ID NO: 2170300 - RNA, 22 nt, Human
cucguccucccccugccagugc

SEQ ID NO: 2170301 - RNA, 20 nt, Human
cucguccucccccugccagu

SEQ ID NO: 2170302 - RNA, 18 nt, Human
cucguccucccccugcca

SEQ ID NO: 2170303 - RNA, 17 nt, Human
cucguccucccccugcc

SEQ ID NO: 2170304 - RNA, 16 nt, Human
cucguccucccccugc

SEQ ID NO: 2170305 - RNA, 17 nt, Human
cucuaugccagcucagu

SEQ ID NO: 2170306 - RNA, 15 nt, Human
cucuaucuugcucug

SEQ ID NO: 2170307 - RNA, 20 nt, Human
cucuaugaacucuguuuucu

SEQ ID NO: 2170308 - RNA, 16 nt, Human
cucuaucuugcucugu

SEQ ID NO: 2170309 - RNA, 18 nt, Human
cucuaucuugcucuguaa

SEQ ID NO: 2170310 - RNA, 24 nt, Human
cucgugccagucgcgcugccugug

SEQ ID NO: 2170311 - RNA, 22 nt, Human
cucgugccagucgcgcugccug

SEQ ID NO: 2170312 - RNA, 18 nt, Human
cucgugauuggcauauaa

SEQ ID NO: 2170313 - RNA, 21 nt, Human
cucgugccagucgcgcugccu

SEQ ID NO: 2170314 - RNA, 18 nt, Human
cucugcagcugaccucug

SEQ ID NO: 2170315 - RNA, 15 nt, Human
cucugcaggcaccuu

SEQ ID NO: 2170316 - RNA, 21 nt, Human
cucugcuccucuccccagcaa

SEQ ID NO: 2170317 - RNA, 15 nt, Human
cucugcucgccuuag

SEQ ID NO: 2170318 - RNA, 13 nt, Human
cucugcucgccuu

SEQ ID NO: 2170319 - RNA, 14 nt, Human
cucugcaggcaccu

SEQ ID NO: 2170320 - RNA, 14 nt, Human
cucugcuccuggag

SEQ ID NO: 2170321 - RNA, 22 nt, Human
cucugcuccuggagccuuugaa

SEQ ID NO: 2170322 - RNA, 19 nt, Human
cucugcagccagcccagcc

SEQ ID NO: 2170323 - RNA, 18 nt, Human
cucugcagccagcccagc

SEQ ID NO: 2170324 - RNA, 17 nt, Human
cucugcagccagcccag

SEQ ID NO: 2170325 - RNA, 16 nt, Human
cucugcagccagccca

SEQ ID NO: 2170326 - RNA, 15 nt, Human
cucugcagccagccc

SEQ ID NO: 2170327 - RNA, 17 nt, Human
cucugcacuccccugcu

SEQ ID NO: 2170328 - RNA, 20 nt, Human
cucugcaggaaauggcugug

SEQ ID NO: 2170329 - RNA, 12 nt, Human
cucugcagcuga

SEQ ID NO: 2170330 - RNA, 14 nt, Human
cucugcagcugacc

SEQ ID NO: 2170331 - RNA, 15 nt, Human
cucugcagcugaccu

SEQ ID NO: 2170332 - RNA, 16 nt, Human
cucugcagcugaccuc

SEQ ID NO: 2170333 - RNA, 14 nt, Human
cucugcagcccagg

SEQ ID NO: 2170334 - RNA, 16 nt, Human
cucugcagcccaggga

SEQ ID NO: 2170335 - RNA, 21 nt, Human
cucugcugacagacacaggcc

SEQ ID NO: 2170336 - RNA, 22 nt, Human
cucugcugacagacacaggccc

SEQ ID NO: 2170337 - RNA, 20 nt, Human
cucugcugacagacacaggc

SEQ ID NO: 2170338 - RNA, 17 nt, Human
cucugcuccuggagccu

SEQ ID NO: 2170339 - RNA, 15 nt, Human
cucugcucugaggcu

SEQ ID NO: 2170340 - RNA, 17 nt, Human
cucugcucgccuuagca

SEQ ID NO: 2170341 - RNA, 16 nt, Human
cucugcucgccuuagc

SEQ ID NO: 2170342 - RNA, 15 nt, Human
cucugcugccauggc

SEQ ID NO: 2170343 - RNA, 13 nt, Human
cucugcugccaug

SEQ ID NO: 2170344 - RNA, 13 nt, Human
cucugcugcuggc

SEQ ID NO: 2170345 - RNA, 23 nt, Human
cucugcugacagacacaggcccg

SEQ ID NO: 2170346 - RNA, 11 nt, Human
cucugcucugc

SEQ ID NO: 2170347 - RNA, 12 nt, Human
cucugcucugcc

SEQ ID NO: 2170348 - RNA, 15 nt, Human
cucugcucugcccuu

SEQ ID NO: 2170349 - RNA, 13 nt, Human
cucugcucugccc

SEQ ID NO: 2170350 - RNA, 14 nt, Human
cucugcucugcccu

SEQ ID NO: 2170351 - RNA, 18 nt, Human
cucugcuggcccagccaa

SEQ ID NO: 2170352 - RNA, 14 nt, Human
cucugcuggcccag

SEQ ID NO: 2170353 - RNA, 13 nt, Human
cucugcugcuuag

SEQ ID NO: 2170354 - RNA, 13 nt, Human
cucugcugccgcc

SEQ ID NO: 2170355 - RNA, 11 nt, Human
cucugcugcuu

SEQ ID NO: 2170356 - RNA, 13 nt, Human
cucuguacagagc

SEQ ID NO: 2170357 - RNA, 14 nt, Human
cucuguacagagcc

SEQ ID NO: 2170358 - RNA, 15 nt, Human
cucuguacagagccc

SEQ ID NO: 2170359 - RNA, 16 nt, Human
cucugcugcuggcugg

SEQ ID NO: 2170360 - RNA, 16 nt, Human
cucugcugcugucccu

SEQ ID NO: 2170361 - RNA, 21 nt, Human
cucugcugccgccccacccag

SEQ ID NO: 2170362 - RNA, 21 nt, Human
cucugcugcugucccuccccc

SEQ ID NO: 2170363 - RNA, 22 nt, Human
cucugcugcugucccucccccu

SEQ ID NO: 2170364 - RNA, 14 nt, Human
cucugcugcuggcu

SEQ ID NO: 2170365 - RNA, 15 nt, Human
cucugcugcuggcug

SEQ ID NO: 2170366 - RNA, 19 nt, Human
cucuuaggaagagaaacca

SEQ ID NO: 2170367 - RNA, 13 nt, Human
cucuuagcugucu

SEQ ID NO: 2170368 - RNA, 16 nt, Human
cucuuauagaauauuu

SEQ ID NO: 2170369 - RNA, 13 nt, Human
cucuuagcugagu

SEQ ID NO: 2170370 - RNA, 17 nt, Human
cucuuauagaauauuua

SEQ ID NO: 2170371 - RNA, 18 nt, Human
cucuuauagaauauuuau

SEQ ID NO: 2170372 - RNA, 20 nt, Human
cucuuauagaauauuuauua

SEQ ID NO: 2170373 - RNA, 21 nt, Human
cucuuauagaauauuuauuac

SEQ ID NO: 2170374 - RNA, 23 nt, Human
cucuguccccuucucucaucucu

SEQ ID NO: 2170375 - RNA, 11 nt, Human
cucuguccuga

SEQ ID NO: 2170376 - RNA, 13 nt, Human
cucuguccugacu

SEQ ID NO: 2170377 - RNA, 12 nt, Human
cucuuagcugag

SEQ ID NO: 2170378 - RNA, 18 nt, Human
cucuguccugacuucagg

SEQ ID NO: 2170379 - RNA, 13 nt, Human
cucugcuggccug

SEQ ID NO: 2170380 - RNA, 22 nt, Human
cucugucccacuuggcaucagc

SEQ ID NO: 2170381 - RNA, 16 nt, Human
cucuguacagagccca

SEQ ID NO: 2170382 - RNA, 14 nt, Human
cucuguccccuucu

SEQ ID NO: 2170383 - RNA, 14 nt, Human
cucugcuggccgga

SEQ ID NO: 2170384 - RNA, 15 nt, Human
cucuguccccuucuc

SEQ ID NO: 2170385 - RNA, 17 nt, Human
cucuguccccuucucuc

SEQ ID NO: 2170386 - RNA, 18 nt, Human
cucuguccccuucucuca

SEQ ID NO: 2170387 - RNA, 21 nt, Human
cucuguccccuucucucaucu

SEQ ID NO: 2170388 - RNA, 15 nt, Human
cucugcacagaugga

SEQ ID NO: 2170389 - RNA, 14 nt, Human
cucugcacagaugg

SEQ ID NO: 2170390 - RNA, 10 nt, Human
cucugcacag

SEQ ID NO: 2170391 - RNA, 13 nt, Human
cucugcacauguc

SEQ ID NO: 2170392 - RNA, 14 nt, Human
cucugcacaugucu

SEQ ID NO: 2170393 - RNA, 14 nt, Human
cucugcacuccccu

SEQ ID NO: 2170394 - RNA, 15 nt, Human
cucugcacuccccug

SEQ ID NO: 2170395 - RNA, 16 nt, Human
cucugcacuccccugc

SEQ ID NO: 2170396 - RNA, 21 nt, Human
cucugcacaagcugcacccuc

SEQ ID NO: 2170397 - RNA, 20 nt, Human
cucugcacaagcugcacccu

SEQ ID NO: 2170398 - RNA, 19 nt, Human
cuccuggcccacugcaucg

SEQ ID NO: 2170399 - RNA, 23 nt, Human
cuccucuucuuuuuuuucauuau

SEQ ID NO: 2170400 - RNA, 19 nt, Human
cuccucuucugacgugccu

SEQ ID NO: 2170401 - RNA, 12 nt, Human
cuccucuugcca

SEQ ID NO: 2170402 - RNA, 15 nt, Human
cuccucuugccacug

SEQ ID NO: 2170403 - RNA, 16 nt, Human
cuccucuugccacugc

SEQ ID NO: 2170404 - RNA, 22 nt, Human
cuccuggcucuugauacccccc

SEQ ID NO: 2170405 - RNA, 19 nt, Human
cuccuggccucaagugauu

SEQ ID NO: 2170406 - RNA, 18 nt, Human
cuccugggcuaagugauc

SEQ ID NO: 2170407 - RNA, 20 nt, Human
cuccugggcccucucugcuc

SEQ ID NO: 2170408 - RNA, 19 nt, Human
cuccugggcccucucugcu

SEQ ID NO: 2170409 - RNA, 17 nt, Human
cuccugggcccucucug

SEQ ID NO: 2170410 - RNA, 15 nt, Human
cuccugggcccucuc

SEQ ID NO: 2170411 - RNA, 13 nt, Human
cuccucugggcag

SEQ ID NO: 2170412 - RNA, 12 nt, Human
cuccucugggca

SEQ ID NO: 2170413 - RNA, 21 nt, Human
cuccucuggacggcaggcuca

SEQ ID NO: 2170414 - RNA, 15 nt, Human
cuccucugcugcugg

SEQ ID NO: 2170415 - RNA, 13 nt, Human
cuccucugcugcu

SEQ ID NO: 2170416 - RNA, 14 nt, Human
cuccucugcugcug

SEQ ID NO: 2170417 - RNA, 13 nt, Human
cuccucugucccu

SEQ ID NO: 2170418 - RNA, 14 nt, Human
cuccucuuccaggc

SEQ ID NO: 2170419 - RNA, 18 nt, Human
cuccucuguccagggccc

SEQ ID NO: 2170420 - RNA, 17 nt, Human
cuccucuguccagggcc

SEQ ID NO: 2170421 - RNA, 14 nt, Human
cuccucuguccagg

SEQ ID NO: 2170422 - RNA, 23 nt, Human
cuccucugggcaggaccucagag

SEQ ID NO: 2170423 - RNA, 15 nt, Human
cuccucugggcagga

SEQ ID NO: 2170424 - RNA, 12 nt, Human
cuccucugucca

SEQ ID NO: 2170425 - RNA, 16 nt, Human
cuccucuguccagggc

SEQ ID NO: 2170426 - RNA, 15 nt, Human
cuccucuguccaggg

SEQ ID NO: 2170427 - RNA, 15 nt, Human
cuccucuguccaggc

SEQ ID NO: 2170428 - RNA, 15 nt, Human
cuccugucugccagc

SEQ ID NO: 2170429 - RNA, 14 nt, Human
cuccugucugccag

SEQ ID NO: 2170430 - RNA, 16 nt, Human
cuccugucugccagcc

SEQ ID NO: 2170431 - RNA, 16 nt, Human
cuccuuguaaagacug

SEQ ID NO: 2170432 - RNA, 13 nt, Human
cuccugucugcca

SEQ ID NO: 2170433 - RNA, 13 nt, Human
cuccuguccuuua

SEQ ID NO: 2170434 - RNA, 21 nt, Human
cuccuguccucccauccccug

SEQ ID NO: 2170435 - RNA, 14 nt, Human
cuccuuguguuacu

SEQ ID NO: 2170436 - RNA, 16 nt, Human
cuccuuguggccuggg

SEQ ID NO: 2170437 - RNA, 17 nt, Human
cuccugucuaacugcug

SEQ ID NO: 2170438 - RNA, 15 nt, Human
cuccuuguccaccca

SEQ ID NO: 2170439 - RNA, 20 nt, Human
cuccuuguggccugggccuc

SEQ ID NO: 2170440 - RNA, 16 nt, Human
cuccuuguccacccac

SEQ ID NO: 2170441 - RNA, 18 nt, Human
cuccuuguggccugggcc

SEQ ID NO: 2170442 - RNA, 13 nt, Human
cuccuuucacaac

SEQ ID NO: 2170443 - RNA, 15 nt, Human
cuccuuguuccuaga

SEQ ID NO: 2170444 - RNA, 14 nt, Human
cuccuuguuccuag

SEQ ID NO: 2170445 - RNA, 13 nt, Human
cuccuuguuccua

SEQ ID NO: 2170446 - RNA, 12 nt, Human
cuccuuguuccu

SEQ ID NO: 2170447 - RNA, 18 nt, Human
cuccuugugguuuauguc

SEQ ID NO: 2170448 - RNA, 17 nt, Human
cuccuugugguuuaugu

SEQ ID NO: 2170449 - RNA, 15 nt, Human
cuccuuucaccacau

SEQ ID NO: 2170450 - RNA, 16 nt, Human
cuccuuucacaaccuu

SEQ ID NO: 2170451 - RNA, 17 nt, Human
cuccuuucacaaccuuc

SEQ ID NO: 2170452 - RNA, 23 nt, Human
cuccuggucuugagaugucuucu

SEQ ID NO: 2170453 - RNA, 15 nt, Human
cuccuggucuugaga

SEQ ID NO: 2170454 - RNA, 14 nt, Human
cuccuggugggucc

SEQ ID NO: 2170455 - RNA, 20 nt, Human
cuccugguggguccaggggc

SEQ ID NO: 2170456 - RNA, 22 nt, Human
cuccuggguuuuguauucucug

SEQ ID NO: 2170457 - RNA, 23 nt, Human
cuccuggguuuuguauucucuga

SEQ ID NO: 2170458 - RNA, 13 nt, Human
cuccugggcucag

SEQ ID NO: 2170459 - RNA, 22 nt, Human
cuccugggcccucucugcucug

SEQ ID NO: 2170460 - RNA, 21 nt, Human
cuccugggcccucucugcucu

SEQ ID NO: 2170461 - RNA, 17 nt, Human
cuccuguacuuuuucca

SEQ ID NO: 2170462 - RNA, 14 nt, Human
cuccuguaauuccu

SEQ ID NO: 2170463 - RNA, 16 nt, Human
cuccuguaauuccuac

SEQ ID NO: 2170464 - RNA, 14 nt, Human
cuccuguccaaccu

SEQ ID NO: 2170465 - RNA, 18 nt, Human
cuccuguaauuccuaccu

SEQ ID NO: 2170466 - RNA, 12 nt, Human
cuccuguccucc

SEQ ID NO: 2170467 - RNA, 13 nt, Human
cuccuguccuccc

SEQ ID NO: 2170468 - RNA, 15 nt, Human
cuccuguccucccau

SEQ ID NO: 2170469 - RNA, 20 nt, Human
cuccuguccucccauccccu

SEQ ID NO: 2170470 - RNA, 16 nt, Human
cuccuguaccucuuga

SEQ ID NO: 2170471 - RNA, 20 nt, Human
cuccuguaacauacuggccu

SEQ ID NO: 2170472 - RNA, 17 nt, Human
cuccugguggguccagg

SEQ ID NO: 2170473 - RNA, 21 nt, Human
cuccuguaaaugguguacaua

SEQ ID NO: 2170474 - RNA, 22 nt, Human
cuccuguaacauacuggccugg

SEQ ID NO: 2170475 - RNA, 23 nt, Human
cuccuguaacauacuggccugga

SEQ ID NO: 2170476 - RNA, 15 nt, Human
cuccuacccugcgcc

SEQ ID NO: 2170477 - RNA, 18 nt, Human
cuccuaccccucccagcu

SEQ ID NO: 2170478 - RNA, 19 nt, Human
cuccuaccccucccagcug

SEQ ID NO: 2170479 - RNA, 18 nt, Human
cuccuacccugcgcccag

SEQ ID NO: 2170480 - RNA, 23 nt, Human
cuccuaccccucccagcugacag

SEQ ID NO: 2170481 - RNA, 21 nt, Human
cuccuaccgaaaccuugccuu

SEQ ID NO: 2170482 - RNA, 15 nt, Human
cuccuaccucagccu

SEQ ID NO: 2170483 - RNA, 14 nt, Human
cuccuaccucagcc

SEQ ID NO: 2170484 - RNA, 13 nt, Human
cuccuaccucagc

SEQ ID NO: 2170485 - RNA, 12 nt, Human
cuccuaccucag

SEQ ID NO: 2170486 - RNA, 18 nt, Human
cuccuaccucagccuaga

SEQ ID NO: 2170487 - RNA, 16 nt, Human
cuccuaccucagccua

SEQ ID NO: 2170488 - RNA, 13 nt, Human
cuccuaccuggua

SEQ ID NO: 2170489 - RNA, 22 nt, Human
cuccuaccgaaaccuugccuuu

SEQ ID NO: 2170490 - RNA, 12 nt, Human
cuccuagacuga

SEQ ID NO: 2170491 - RNA, 17 nt, Human
cuccucugccaccuccc

SEQ ID NO: 2170492 - RNA, 16 nt, Human
cuccucugccaccucc

SEQ ID NO: 2170493 - RNA, 15 nt, Human
cuccucugccaccuc

SEQ ID NO: 2170494 - RNA, 14 nt, Human
cuccucugccaccu

SEQ ID NO: 2170495 - RNA, 12 nt, Human
cuccucugccac

SEQ ID NO: 2170496 - RNA, 11 nt, Human
cuccucugcca

SEQ ID NO: 2170497 - RNA, 17 nt, Human
cuccucugcagugccuu

SEQ ID NO: 2170498 - RNA, 18 nt, Human
cuccucugcagugccuug

SEQ ID NO: 2170499 - RNA, 16 nt, Human
cuccucugcagugccu

SEQ ID NO: 2170500 - RNA, 22 nt, Human
cuccucugacucagggcuccug

SEQ ID NO: 2170501 - RNA, 20 nt, Human
cuccucugacucagggcucc

SEQ ID NO: 2170502 - RNA, 19 nt, Human
cuccucugacucagggcuc

SEQ ID NO: 2170503 - RNA, 18 nt, Human
cuccucugacucagggcu

SEQ ID NO: 2170504 - RNA, 13 nt, Human
cuccucugacuca

SEQ ID NO: 2170505 - RNA, 21 nt, Human
cuccggcccuccuacccugcg

SEQ ID NO: 2170506 - RNA, 15 nt, Human
cuccggccuccccuc

SEQ ID NO: 2170507 - RNA, 14 nt, Human
cuccggccuccccu

SEQ ID NO: 2170508 - RNA, 20 nt, Human
cuccggccugaugacagagc

SEQ ID NO: 2170509 - RNA, 22 nt, Human
cuccggagugagaagcuuugcc

SEQ ID NO: 2170510 - RNA, 16 nt, Human
cuccggaucgaggccu

SEQ ID NO: 2170511 - RNA, 13 nt, Human
cuccggagacagg

SEQ ID NO: 2170512 - RNA, 14 nt, Human
cuccuaccccuccc

SEQ ID NO: 2170513 - RNA, 16 nt, Human
cuccuaccccucccag

SEQ ID NO: 2170514 - RNA, 17 nt, Human
cuccuaccccucccagc

SEQ ID NO: 2170515 - RNA, 23 nt, Human
cuccggcgucagccuccagccuc

SEQ ID NO: 2170516 - RNA, 22 nt, Human
cuccggccugaugacagagcga

SEQ ID NO: 2170517 - RNA, 14 nt, Human
cuccggcgucagcc

SEQ ID NO: 2170518 - RNA, 16 nt, Human
cuccggcgucagccuc

SEQ ID NO: 2170519 - RNA, 17 nt, Human
cuccggcgucagccucc

SEQ ID NO: 2170520 - RNA, 18 nt, Human
cuccggcgucagccucca

SEQ ID NO: 2170521 - RNA, 20 nt, Human
cuccggcgucagccuccagc

SEQ ID NO: 2170522 - RNA, 21 nt, Human
cuccggcgucagccuccagcc

SEQ ID NO: 2170523 - RNA, 22 nt, Human
cuccggcgucagccuccagccu

SEQ ID NO: 2170524 - RNA, 23 nt, Human
cuccgcuuucuacccagcgagcc

SEQ ID NO: 2170525 - RNA, 23 nt, Human
cucccacugggguccagggagca

SEQ ID NO: 2170526 - RNA, 19 nt, Human
cucccacuucccugacacu

SEQ ID NO: 2170527 - RNA, 18 nt, Human
cucccacuucccugacac

SEQ ID NO: 2170528 - RNA, 24 nt, Human
cucccagaacacacuccaucagcu

SEQ ID NO: 2170529 - RNA, 13 nt, Human
cucccacuuggcc

SEQ ID NO: 2170530 - RNA, 15 nt, Human
cucccacuuggccaa

SEQ ID NO: 2170531 - RNA, 16 nt, Human
cucccagaacacacuc

SEQ ID NO: 2170532 - RNA, 15 nt, Human
cucccagaccugccu

SEQ ID NO: 2170533 - RNA, 22 nt, Human
cucccacuuggccaagcaggga

SEQ ID NO: 2170534 - RNA, 17 nt, Human
cucccagaccugccucu

SEQ ID NO: 2170535 - RNA, 20 nt, Human
cucccagaccugccucuucc

SEQ ID NO: 2170536 - RNA, 11 nt, Human
cucccagcuga

SEQ ID NO: 2170537 - RNA, 20 nt, Human
cuccaguauucuugucaaaa

SEQ ID NO: 2170538 - RNA, 15 nt, Human
cucccacaggcccuu

SEQ ID NO: 2170539 - RNA, 14 nt, Human
cucccacaggcccu

SEQ ID NO: 2170540 - RNA, 16 nt, Human
cucccacaggcccuuc

SEQ ID NO: 2170541 - RNA, 20 nt, Human
cucccacaggcccuuccucu

SEQ ID NO: 2170542 - RNA, 21 nt, Human
cucccacaggcccuuccucuc

SEQ ID NO: 2170543 - RNA, 11 nt, Human
cucccacagug

SEQ ID NO: 2170544 - RNA, 12 nt, Human
cucccacaguga

SEQ ID NO: 2170545 - RNA, 14 nt, Human
cucccacugaguuu

SEQ ID NO: 2170546 - RNA, 14 nt, Human
cucccacagugacu

SEQ ID NO: 2170547 - RNA, 20 nt, Human
cucccacagugacucgggcu

SEQ ID NO: 2170548 - RNA, 22 nt, Human
cucccacagugacucgggcucc

SEQ ID NO: 2170549 - RNA, 21 nt, Human
cucccacgugggagacaagaa

SEQ ID NO: 2170550 - RNA, 14 nt, Human
cuccaguauucuug

SEQ ID NO: 2170551 - RNA, 22 nt, Human
cuccagguuuuucaauuaaacg

SEQ ID NO: 2170552 - RNA, 23 nt, Human
cuccagguuuuucaauuaaacgg

SEQ ID NO: 2170553 - RNA, 18 nt, Human
cuccagguuuuucaauua

SEQ ID NO: 2170554 - RNA, 19 nt, Human
cuccagguuuuucaauuaa

SEQ ID NO: 2170555 - RNA, 20 nt, Human
cuccagguuuuucaauuaaa

SEQ ID NO: 2170556 - RNA, 21 nt, Human
cuccagguuuuucaauuaaac

SEQ ID NO: 2170557 - RNA, 14 nt, Human
cuccaggugugcac

SEQ ID NO: 2170558 - RNA, 12 nt, Human
cuccagguuuuu

SEQ ID NO: 2170559 - RNA, 13 nt, Human
cuccagguuuuuc

SEQ ID NO: 2170560 - RNA, 14 nt, Human
cuccagguuuuuca

SEQ ID NO: 2170561 - RNA, 15 nt, Human
cuccagguuuuucaa

SEQ ID NO: 2170562 - RNA, 16 nt, Human
cuccagguuuuucaau

SEQ ID NO: 2170563 - RNA, 17 nt, Human
cuccagguuuuucaauu

SEQ ID NO: 2170564 - RNA, 23 nt, Human
cuccaggugcacaagcuccaagc

SEQ ID NO: 2170565 - RNA, 14 nt, Human
cuccagguggcucu

SEQ ID NO: 2170566 - RNA, 17 nt, Human
cuccagguggcucugag

SEQ ID NO: 2170567 - RNA, 15 nt, Human
cuccaggcuccuuua

SEQ ID NO: 2170568 - RNA, 23 nt, Human
cuccaggcuccuuuagcgcccag

SEQ ID NO: 2170569 - RNA, 20 nt, Human
cuccaggcuguaucccauga

SEQ ID NO: 2170570 - RNA, 15 nt, Human
cucaugguggguuca

SEQ ID NO: 2170571 - RNA, 16 nt, Human
cucaugggguccaagu

SEQ ID NO: 2170572 - RNA, 20 nt, Human
cucauggccccucugaccug

SEQ ID NO: 2170573 - RNA, 16 nt, Human
cucauguaucaucugg

SEQ ID NO: 2170574 - RNA, 16 nt, Human
cucauguacauacccu

SEQ ID NO: 2170575 - RNA, 19 nt, Human
cucauguaucaucuggaua

SEQ ID NO: 2170576 - RNA, 20 nt, Human
cucaugcaucuccaccugcu

SEQ ID NO: 2170577 - RNA, 17 nt, Human
cucauguaucaucugga

SEQ ID NO: 2170578 - RNA, 11 nt, Human
cucccccugcc

SEQ ID NO: 2170579 - RNA, 17 nt, Human
cucccccucccccuucu

SEQ ID NO: 2170580 - RNA, 13 nt, Human
cuccccggcccua

SEQ ID NO: 2170581 - RNA, 22 nt, Human
cucccccgggaggggcccgcuu

SEQ ID NO: 2170582 - RNA, 18 nt, Human
cucccccgggaggggccc

SEQ ID NO: 2170583 - RNA, 21 nt, Human
cucccccgggaggggcccgcu

SEQ ID NO: 2170584 - RNA, 15 nt, Human
cucccccgccacucc

SEQ ID NO: 2170585 - RNA, 13 nt, Human
cucccccgggagg

SEQ ID NO: 2170586 - RNA, 17 nt, Human
cucccccgggaggggcc

SEQ ID NO: 2170587 - RNA, 21 nt, Human
cucccccccaugcacugugaa

SEQ ID NO: 2170588 - RNA, 20 nt, Human
cucccccccaugcacuguga

SEQ ID NO: 2170589 - RNA, 16 nt, Human
cuccccccccccucca

SEQ ID NO: 2170590 - RNA, 17 nt, Human
cuccccccccccuccaa

SEQ ID NO: 2170591 - RNA, 13 nt, Human
cucccccccgggg

SEQ ID NO: 2170592 - RNA, 12 nt, Human
cucccccgccac

SEQ ID NO: 2170593 - RNA, 21 nt, Human
cucccccccggggcuggguug

SEQ ID NO: 2170594 - RNA, 14 nt, Human
cucccccgccacuc

SEQ ID NO: 2170595 - RNA, 14 nt, Human
cucccccccggggc

SEQ ID NO: 2170596 - RNA, 15 nt, Human
cucccccccggggcu

SEQ ID NO: 2170597 - RNA, 18 nt, Human
cucccccccggggcuggg

SEQ ID NO: 2170598 - RNA, 19 nt, Human
cucccccccggggcugggu

SEQ ID NO: 2170599 - RNA, 19 nt, Human
cucccaggagacaguucaa

SEQ ID NO: 2170600 - RNA, 18 nt, Human
cucccccccaugcacugu

SEQ ID NO: 2170601 - RNA, 11 nt, Human
cucccaggaag

SEQ ID NO: 2170602 - RNA, 16 nt, Human
cucccaggagacaguu

SEQ ID NO: 2170603 - RNA, 18 nt, Human
cucccaggaacugggcca

SEQ ID NO: 2170604 - RNA, 21 nt, Human
cucccagcugacaguccucuc

SEQ ID NO: 2170605 - RNA, 11 nt, Human
cucccaggaac

SEQ ID NO: 2170606 - RNA, 18 nt, Human
cucccagcugacaguccu

SEQ ID NO: 2170607 - RNA, 20 nt, Human
cucccagcugacaguccucu

SEQ ID NO: 2170608 - RNA, 23 nt, Human
cucccagcugacaguccucucca

SEQ ID NO: 2170609 - RNA, 15 nt, Human
cuccccuaaugccug

SEQ ID NO: 2170610 - RNA, 16 nt, Human
cuccccuaaugccugc

SEQ ID NO: 2170611 - RNA, 19 nt, Human
cuccccuauccacccagcc

SEQ ID NO: 2170612 - RNA, 18 nt, Human
cuccccuauccacccagc

SEQ ID NO: 2170613 - RNA, 17 nt, Human
cuccccuauccacccag

SEQ ID NO: 2170614 - RNA, 15 nt, Human
cuccccuaccacugu

SEQ ID NO: 2170615 - RNA, 14 nt, Human
cuccccggcucgag

SEQ ID NO: 2170616 - RNA, 14 nt, Human
cuccccggcccuac

SEQ ID NO: 2170617 - RNA, 16 nt, Human
cuccccggcccuacca

SEQ ID NO: 2170618 - RNA, 13 nt, Human
cuccccucacagc

SEQ ID NO: 2170619 - RNA, 20 nt, Human
cuccccucaaagucugcaac

SEQ ID NO: 2170620 - RNA, 14 nt, Human
cuccccucacagcc

SEQ ID NO: 2170621 - RNA, 23 nt, Human
cuccccuauccacccagcccauu

SEQ ID NO: 2170622 - RNA, 21 nt, Human
cuccccuauccacccagccca

SEQ ID NO: 2170623 - RNA, 10 nt, Human
cuccccucaa

SEQ ID NO: 2170624 - RNA, 18 nt, Human
cuccccucaaagucugca

SEQ ID NO: 2170625 - RNA, 15 nt, Human
cuccccucacagccu

SEQ ID NO: 2170626 - RNA, 16 nt, Human
cuccccucacagccuc

SEQ ID NO: 2170627 - RNA, 17 nt, Human
cuccccucacagccucu

SEQ ID NO: 2170628 - RNA, 18 nt, Human
cuccccucacagccucug

SEQ ID NO: 2170629 - RNA, 17 nt, Human
cucccucgucgagcugg

SEQ ID NO: 2170630 - RNA, 19 nt, Human
cucccucuacugggagccu

SEQ ID NO: 2170631 - RNA, 13 nt, Human
cucccucuacugg

SEQ ID NO: 2170632 - RNA, 12 nt, Human
cucccucccaca

SEQ ID NO: 2170633 - RNA, 20 nt, Human
cucccucuuucccucccuuc

SEQ ID NO: 2170634 - RNA, 12 nt, Human
cucccucuccug

SEQ ID NO: 2170635 - RNA, 21 nt, Human
cucccucucacugucugagag

SEQ ID NO: 2170636 - RNA, 22 nt, Human
cucccucucacugucugagagu

SEQ ID NO: 2170637 - RNA, 19 nt, Human
cucccuccugccgacuccu

SEQ ID NO: 2170638 - RNA, 20 nt, Human
cucccucuacugggagccua

SEQ ID NO: 2170639 - RNA, 14 nt, Human
cucccucuauuuau

SEQ ID NO: 2170640 - RNA, 10 nt, Human
cucccucuca

SEQ ID NO: 2170641 - RNA, 14 nt, Human
cucccucucacugu

SEQ ID NO: 2170642 - RNA, 15 nt, Human
cucccucucacuguc

SEQ ID NO: 2170643 - RNA, 16 nt, Human
cucccucucacugucu

SEQ ID NO: 2170644 - RNA, 23 nt, Human
cucccugaaaauguuuuucugcc

SEQ ID NO: 2170645 - RNA, 21 nt, Human
cucccugaaaauguuuuucug

SEQ ID NO: 2170646 - RNA, 19 nt, Human
cucccugaaccaucccuga

SEQ ID NO: 2170647 - RNA, 13 nt, Human
cucccugaagcca

SEQ ID NO: 2170648 - RNA, 14 nt, Human
cucccugaagccag

SEQ ID NO: 2170649 - RNA, 20 nt, Human
cucccugaaguaagcaaaga

SEQ ID NO: 2170650 - RNA, 15 nt, Human
cucccugaagccagc

SEQ ID NO: 2170651 - RNA, 16 nt, Human
cucccugaagccagcc

SEQ ID NO: 2170652 - RNA, 17 nt, Human
cucccugaagccagccu

SEQ ID NO: 2170653 - RNA, 18 nt, Human
cucccugaagccagccuu

SEQ ID NO: 2170654 - RNA, 18 nt, Human
cucccugaagccuuugca

SEQ ID NO: 2170655 - RNA, 19 nt, Human
cucccugaagccagccuuc

SEQ ID NO: 2170656 - RNA, 16 nt, Human
cucccugacccgucua

SEQ ID NO: 2170657 - RNA, 18 nt, Human
ccuucccugucugccagg

SEQ ID NO: 2170658 - RNA, 17 nt, Human
ccuucccugucccucua

SEQ ID NO: 2170659 - RNA, 15 nt, Human
ccuucccugggcugu

SEQ ID NO: 2170660 - RNA, 18 nt, Human
ccuucccugggcugugcu

SEQ ID NO: 2170661 - RNA, 19 nt, Human
ccuucccugggcugugcua

SEQ ID NO: 2170662 - RNA, 12 nt, Human
ccuucccugucc

SEQ ID NO: 2170663 - RNA, 13 nt, Human
ccuucccuguccc

SEQ ID NO: 2170664 - RNA, 14 nt, Human
ccuucccugucccu

SEQ ID NO: 2170665 - RNA, 15 nt, Human
ccuucccugucccuc

SEQ ID NO: 2170666 - RNA, 16 nt, Human
ccuucccugucccucu

SEQ ID NO: 2170667 - RNA, 12 nt, Human
ccuucccugcaa

SEQ ID NO: 2170668 - RNA, 14 nt, Human
ccuucccugggcug

SEQ ID NO: 2170669 - RNA, 11 nt, Human
ccuucccuggc

SEQ ID NO: 2170670 - RNA, 12 nt, Human
ccuucccucucc

SEQ ID NO: 2170671 - RNA, 24 nt, Human
ccuucccucaccuuggcaccagac

SEQ ID NO: 2170672 - RNA, 16 nt, Human
ccuucccuugagcccu

SEQ ID NO: 2170673 - RNA, 17 nt, Human
ccuucccuucuccaucu

SEQ ID NO: 2170674 - RNA, 18 nt, Human
ccuuccuaauuccacagc

SEQ ID NO: 2170675 - RNA, 19 nt, Human
ccuuccguaacccaacucu

SEQ ID NO: 2170676 - RNA, 20 nt, Human
ccuuccuaauuccacagcug

SEQ ID NO: 2170677 - RNA, 19 nt, Human
ccuuccuaauuccacagcu

SEQ ID NO: 2170678 - RNA, 22 nt, Human
ccuuccccuugcccagggcuca

SEQ ID NO: 2170679 - RNA, 23 nt, Human
ccuucccucaccuuggcaccaga

SEQ ID NO: 2170680 - RNA, 12 nt, Human
ccuucccuagcu

SEQ ID NO: 2170681 - RNA, 15 nt, Human
ccuucccuagcuuua

SEQ ID NO: 2170682 - RNA, 20 nt, Human
ccuuccccuugcccagggcu

SEQ ID NO: 2170683 - RNA, 18 nt, Human
ccuuccccuugcccaggg

SEQ ID NO: 2170684 - RNA, 18 nt, Human
ccuuccccucccuggcuc

SEQ ID NO: 2170685 - RNA, 17 nt, Human
ccuuccccucccuggcu

SEQ ID NO: 2170686 - RNA, 15 nt, Human
ccuuccccucccugg

SEQ ID NO: 2170687 - RNA, 13 nt, Human
ccuuccccgaggg

SEQ ID NO: 2170688 - RNA, 23 nt, Human
ccuuccccgagggaugaugccac

SEQ ID NO: 2170689 - RNA, 22 nt, Human
ccuuccccucccuggcucccau

SEQ ID NO: 2170690 - RNA, 19 nt, Human
ccuuccccucccuggcucc

SEQ ID NO: 2170691 - RNA, 16 nt, Human
ccuuccccuccuucuc

SEQ ID NO: 2170692 - RNA, 15 nt, Human
ccuuccccagccucu

SEQ ID NO: 2170693 - RNA, 22 nt, Human
ccuuccccacugccugcccacc

SEQ ID NO: 2170694 - RNA, 13 nt, Human
ccuuccccagccu

SEQ ID NO: 2170695 - RNA, 12 nt, Human
ccuuccccacug

SEQ ID NO: 2170696 - RNA, 23 nt, Human
ccuucccaugacccaggcugggc

SEQ ID NO: 2170697 - RNA, 20 nt, Human
ccuuccccacugccugccca

SEQ ID NO: 2170698 - RNA, 19 nt, Human
ccuuccccacugcacacac

SEQ ID NO: 2170699 - RNA, 19 nt, Human
ccuucccccuccaauccca

SEQ ID NO: 2170700 - RNA, 13 nt, Human
ccuuccccauggg

SEQ ID NO: 2170701 - RNA, 15 nt, Human
ccuuccccagcgucc

SEQ ID NO: 2170702 - RNA, 17 nt, Human
ccuucccccucccaggg

SEQ ID NO: 2170703 - RNA, 16 nt, Human
ccuucccccucccagg

SEQ ID NO: 2170704 - RNA, 20 nt, Human
ccuucccccucccagggcca

SEQ ID NO: 2170705 - RNA, 16 nt, Human
ccuuccucuccacugc

SEQ ID NO: 2170706 - RNA, 17 nt, Human
ccuuccucuccacugcc

SEQ ID NO: 2170707 - RNA, 20 nt, Human
ccuucucuccagccccugga

SEQ ID NO: 2170708 - RNA, 21 nt, Human
ccuuccucuccacccucccag

SEQ ID NO: 2170709 - RNA, 19 nt, Human
ccuuccucgcagagaggcc

SEQ ID NO: 2170710 - RNA, 15 nt, Human
ccuuccucgcagaga

SEQ ID NO: 2170711 - RNA, 17 nt, Human
ccuuccucgcagagagg

SEQ ID NO: 2170712 - RNA, 13 nt, Human
ccuuccuccuggg

SEQ ID NO: 2170713 - RNA, 12 nt, Human
ccuuccuccugg

SEQ ID NO: 2170714 - RNA, 14 nt, Human
ccuuccucuccacu

SEQ ID NO: 2170715 - RNA, 15 nt, Human
ccuuccucuccacug

SEQ ID NO: 2170716 - RNA, 22 nt, Human
ccuuccucccaccucccccucc

SEQ ID NO: 2170717 - RNA, 20 nt, Human
ccuuccucauccaccccauc

SEQ ID NO: 2170718 - RNA, 21 nt, Human
ccuuccucauccaccccaucc

SEQ ID NO: 2170719 - RNA, 16 nt, Human
ccuuccucauccaccc

SEQ ID NO: 2170720 - RNA, 17 nt, Human
ccuuccucauccacccc

SEQ ID NO: 2170721 - RNA, 18 nt, Human
ccuuccucauccacccca

SEQ ID NO: 2170722 - RNA, 19 nt, Human
ccuuccucauccaccccau

SEQ ID NO: 2170723 - RNA, 14 nt, Human
ccuuccucacugcc

SEQ ID NO: 2170724 - RNA, 15 nt, Human
ccuuccucacuucca

SEQ ID NO: 2170725 - RNA, 22 nt, Human
ccuuccucaguuuaauccuucu

SEQ ID NO: 2170726 - RNA, 21 nt, Human
ccuuccuaauuccacagcugc

SEQ ID NO: 2170727 - RNA, 20 nt, Human
ccuuccuacacccuuggacu

SEQ ID NO: 2170728 - RNA, 16 nt, Human
ccuuccuacagauagu

SEQ ID NO: 2170729 - RNA, 20 nt, Human
ccuuccucuccacugccuuc

SEQ ID NO: 2170730 - RNA, 22 nt, Human
ccuuccucuccacccucccaga

SEQ ID NO: 2170731 - RNA, 15 nt, Human
ccuucucuccucccc

SEQ ID NO: 2170732 - RNA, 16 nt, Human
ccuucucuccucccca

SEQ ID NO: 2170733 - RNA, 20 nt, Human
ccuucucucucaauuuuugg

SEQ ID NO: 2170734 - RNA, 17 nt, Human
ccuucucuccuccccaa

SEQ ID NO: 2170735 - RNA, 20 nt, Human
ccuucucuccuccccaaauc

SEQ ID NO: 2170736 - RNA, 21 nt, Human
ccuucucuccagccccuggau

SEQ ID NO: 2170737 - RNA, 23 nt, Human
ccuucucuccagccccuggaugc

SEQ ID NO: 2170738 - RNA, 22 nt, Human
ccuucucugcuccaccacaucc

SEQ ID NO: 2170739 - RNA, 21 nt, Human
ccuucucuguagggaacucug

SEQ ID NO: 2170740 - RNA, 17 nt, Human
ccuucucugucucaugu

SEQ ID NO: 2170741 - RNA, 20 nt, Human
ccuucucugcuccaccacau

SEQ ID NO: 2170742 - RNA, 17 nt, Human
ccuucucugcuccacca

SEQ ID NO: 2170743 - RNA, 16 nt, Human
ccuucucugcuccacc

SEQ ID NO: 2170744 - RNA, 14 nt, Human
ccuucucugcucca

SEQ ID NO: 2170745 - RNA, 13 nt, Human
ccuucucugcucc

SEQ ID NO: 2170746 - RNA, 14 nt, Human
ccuucucugaagga

SEQ ID NO: 2170747 - RNA, 16 nt, Human
ccuucucugaaggaca

SEQ ID NO: 2170748 - RNA, 22 nt, Human
ccuucuguccuacucuguguca

SEQ ID NO: 2170749 - RNA, 14 nt, Human
ccuucucuuaauuu

SEQ ID NO: 2170750 - RNA, 15 nt, Human
ccuucuguccuggug

SEQ ID NO: 2170751 - RNA, 21 nt, Human
ccuucucuguucauuuccuca

SEQ ID NO: 2170752 - RNA, 19 nt, Human
ccuucucuguucauuuccu

SEQ ID NO: 2170753 - RNA, 16 nt, Human
ccuucuguccuggugu

SEQ ID NO: 2170754 - RNA, 17 nt, Human
ccuucuguccugguguc

SEQ ID NO: 2170755 - RNA, 20 nt, Human
ccuucuguccuacucugugu

SEQ ID NO: 2170756 - RNA, 21 nt, Human
ccuucuguccuacucuguguc

SEQ ID NO: 2170757 - RNA, 17 nt, Human
ccuucucuucacaguca

SEQ ID NO: 2170758 - RNA, 18 nt, Human
ccuucucuguucauuucc

SEQ ID NO: 2170759 - RNA, 17 nt, Human
ccuucucuguucauuuc

SEQ ID NO: 2170760 - RNA, 13 nt, Human
ccuucucuguuca

SEQ ID NO: 2170761 - RNA, 19 nt, Human
ccuucucugucucaugugu

SEQ ID NO: 2170762 - RNA, 13 nt, Human
ccuuuauuuuaga

SEQ ID NO: 2170763 - RNA, 21 nt, Human
ccuuuauuguguuugucauua

SEQ ID NO: 2170764 - RNA, 15 nt, Human
ccuuucaauaggaaa

SEQ ID NO: 2170765 - RNA, 16 nt, Human
ccuuuauuaaaaucuu

SEQ ID NO: 2170766 - RNA, 14 nt, Human
ccuuuauuaaaauc

SEQ ID NO: 2170767 - RNA, 23 nt, Human
ccuuuauuacccccuccuucaga

SEQ ID NO: 2170768 - RNA, 14 nt, Human
ccuuuauucuggca

SEQ ID NO: 2170769 - RNA, 12 nt, Human
ccuuuauugugu

SEQ ID NO: 2170770 - RNA, 13 nt, Human
ccuuuauugugau

SEQ ID NO: 2170771 - RNA, 15 nt, Human
ccuuuauuguguuug

SEQ ID NO: 2170772 - RNA, 20 nt, Human
ccuuuauuguguuugucauu

SEQ ID NO: 2170773 - RNA, 12 nt, Human
ccuuucccucca

SEQ ID NO: 2170774 - RNA, 12 nt, Human
ccuuucccuucu

SEQ ID NO: 2170775 - RNA, 15 nt, Human
ccuuucccuucuugg

SEQ ID NO: 2170776 - RNA, 20 nt, Human
ccuuucccuccacuccuucc

SEQ ID NO: 2170777 - RNA, 16 nt, Human
ccuuucaaauuucaca

SEQ ID NO: 2170778 - RNA, 15 nt, Human
ccuuucaaauuucac

SEQ ID NO: 2170779 - RNA, 18 nt, Human
ccuuucaauaggaaaaac

SEQ ID NO: 2170780 - RNA, 17 nt, Human
ccuuucaauaggaaaaa

SEQ ID NO: 2170781 - RNA, 21 nt, Human
ccuugcgcuuuugcuggucac

SEQ ID NO: 2170782 - RNA, 15 nt, Human
ccuugcgcuguugcg

SEQ ID NO: 2170783 - RNA, 23 nt, Human
ccuugccugaacauccuuccuuc

SEQ ID NO: 2170784 - RNA, 16 nt, Human
ccuugccuccugugua

SEQ ID NO: 2170785 - RNA, 21 nt, Human
ccuugccugaacauccuuccu

SEQ ID NO: 2170786 - RNA, 21 nt, Human
ccuugccaggguuucgagaag

SEQ ID NO: 2170787 - RNA, 13 nt, Human
ccuugccagacau

SEQ ID NO: 2170788 - RNA, 24 nt, Human
ccuugccaccccacccucccugga

SEQ ID NO: 2170789 - RNA, 13 nt, Human
ccuugccagagau

SEQ ID NO: 2170790 - RNA, 12 nt, Human
ccuugccagaga

SEQ ID NO: 2170791 - RNA, 23 nt, Human
ccuugccaccccacccucccugg

SEQ ID NO: 2170792 - RNA, 16 nt, Human
ccuugccagagaucca

SEQ ID NO: 2170793 - RNA, 17 nt, Human
ccuugcuaccucaaggg

SEQ ID NO: 2170794 - RNA, 14 nt, Human
ccuugcuaccucaa

SEQ ID NO: 2170795 - RNA, 12 nt, Human
ccuugcuaccuc

SEQ ID NO: 2170796 - RNA, 11 nt, Human
ccuugcuaccu

SEQ ID NO: 2170797 - RNA, 14 nt, Human
ccuugcuacccaga

SEQ ID NO: 2170798 - RNA, 20 nt, Human
ccuugcgguauccgccccca

SEQ ID NO: 2170799 - RNA, 21 nt, Human
ccuugcggggauaaagagaga

SEQ ID NO: 2170800 - RNA, 18 nt, Human
ccuugcucgcuguaaaau

SEQ ID NO: 2170801 - RNA, 18 nt, Human
ccuuuagugguggccauu

SEQ ID NO: 2170802 - RNA, 19 nt, Human
ccuuuaguaccugaaaagu

SEQ ID NO: 2170803 - RNA, 18 nt, Human
ccuuuaguaccugaaaag

SEQ ID NO: 2170804 - RNA, 23 nt, Human
ccuugcucaaccauggcugaagg

SEQ ID NO: 2170805 - RNA, 19 nt, Human
ccuuuauauuuagugaacu

SEQ ID NO: 2170806 - RNA, 22 nt, Human
ccuuuauaaugaggaugauuau

SEQ ID NO: 2170807 - RNA, 19 nt, Human
ccuuuauguggaaaacaga

SEQ ID NO: 2170808 - RNA, 23 nt, Human
ccuuuauguggaaaacagaacau

SEQ ID NO: 2170809 - RNA, 23 nt, Human
ccuugcaguucagcaccacccua

SEQ ID NO: 2170810 - RNA, 13 nt, Human
ccuugccacccca

SEQ ID NO: 2170811 - RNA, 17 nt, Human
ccuugccaccccacccu

SEQ ID NO: 2170812 - RNA, 19 nt, Human
ccuugccaccccacccucc

SEQ ID NO: 2170813 - RNA, 14 nt, Human
ccuugcauaauggu

SEQ ID NO: 2170814 - RNA, 22 nt, Human
ccuugcaguucagcaccacccu

SEQ ID NO: 2170815 - RNA, 20 nt, Human
ccuugcaguucagcaccacc

SEQ ID NO: 2170816 - RNA, 19 nt, Human
ccuugcaguucagcaccac

SEQ ID NO: 2170817 - RNA, 17 nt, Human
ccuugcaguucagcacc

SEQ ID NO: 2170818 - RNA, 15 nt, Human
ccuugcagcuaguuu

SEQ ID NO: 2170819 - RNA, 20 nt, Human
ccuugcagcacucacacagg

SEQ ID NO: 2170820 - RNA, 21 nt, Human
ccuugcagcacucacacagga

SEQ ID NO: 2170821 - RNA, 16 nt, Human
ccuugcaccugcaucc

SEQ ID NO: 2170822 - RNA, 14 nt, Human
ccuugcaccugcau

SEQ ID NO: 2170823 - RNA, 13 nt, Human
ccuugcaccugca

SEQ ID NO: 2170824 - RNA, 12 nt, Human
ccuugcaccugc

SEQ ID NO: 2170825 - RNA, 18 nt, Human
ccuugcaccccucacucu

SEQ ID NO: 2170826 - RNA, 14 nt, Human
ccuugcacauagua

SEQ ID NO: 2170827 - RNA, 13 nt, Human
ccuugcaccccuc

SEQ ID NO: 2170828 - RNA, 14 nt, Human
ccuugcaccccuca

SEQ ID NO: 2170829 - RNA, 17 nt, Human
ccuugcaccccucacuc

SEQ ID NO: 2170830 - RNA, 15 nt, Human
ccuugcaagaaucag

SEQ ID NO: 2170831 - RNA, 22 nt, Human
ccuugcacacuccccugcacug

SEQ ID NO: 2170832 - RNA, 19 nt, Human
ccuugcacacuccccugca

SEQ ID NO: 2170833 - RNA, 18 nt, Human
ccuugcacacucagaagc

SEQ ID NO: 2170834 - RNA, 22 nt, Human
ccuuaucuccaagaccagagau

SEQ ID NO: 2170835 - RNA, 16 nt, Human
ccuuaucuccaagacc

SEQ ID NO: 2170836 - RNA, 20 nt, Human
ccuuaucugugcgugaaaca

SEQ ID NO: 2170837 - RNA, 13 nt, Human
ccuuaucugugcg

SEQ ID NO: 2170838 - RNA, 16 nt, Human
ccuuauccucugaucu

SEQ ID NO: 2170839 - RNA, 15 nt, Human
ccuuauccucugauc

SEQ ID NO: 2170840 - RNA, 18 nt, Human
ccuuauccucugaucucc

SEQ ID NO: 2170841 - RNA, 12 nt, Human
ccuuauggaaca

SEQ ID NO: 2170842 - RNA, 17 nt, Human
ccuuaucugugcucagg

SEQ ID NO: 2170843 - RNA, 15 nt, Human
ccuuaucugugcuca

SEQ ID NO: 2170844 - RNA, 13 nt, Human
ccuuaucuugcac

SEQ ID NO: 2170845 - RNA, 15 nt, Human
ccuuaucauucauuc

SEQ ID NO: 2170846 - RNA, 17 nt, Human
ccuuaucaccagcugcc

SEQ ID NO: 2170847 - RNA, 16 nt, Human
ccuuaucauucauucu

SEQ ID NO: 2170848 - RNA, 17 nt, Human
ccuuaucauucauucuu

SEQ ID NO: 2170849 - RNA, 13 nt, Human
ccuuauccaggac

SEQ ID NO: 2170850 - RNA, 14 nt, Human
ccuuauccaggacu

SEQ ID NO: 2170851 - RNA, 15 nt, Human
ccuuauccaggacuc

SEQ ID NO: 2170852 - RNA, 17 nt, Human
ccuuauccaggacucug

SEQ ID NO: 2170853 - RNA, 13 nt, Human
ccuuauccucuga

SEQ ID NO: 2170854 - RNA, 18 nt, Human
ccuuaucaaaggacacca

SEQ ID NO: 2170855 - RNA, 14 nt, Human
ccuuaucaaaggac

SEQ ID NO: 2170856 - RNA, 12 nt, Human
ccuuaucaagug

SEQ ID NO: 2170857 - RNA, 13 nt, Human
ccuuaucaagugu

SEQ ID NO: 2170858 - RNA, 14 nt, Human
ccuuaucaaguguc

SEQ ID NO: 2170859 - RNA, 15 nt, Human
ccuuaucaagugucu

SEQ ID NO: 2170860 - RNA, 16 nt, Human
ccuuaucaagugucuu

SEQ ID NO: 2170861 - RNA, 13 nt, Human
ccuuaucaccagc

SEQ ID NO: 2170862 - RNA, 20 nt, Human
ccuuaucaccagcugccucu

SEQ ID NO: 2170863 - RNA, 16 nt, Human
ccuuaggcagggaagu

SEQ ID NO: 2170864 - RNA, 13 nt, Human
ccuuaggccuucc

SEQ ID NO: 2170865 - RNA, 15 nt, Human
ccuuaggccuuccuc

SEQ ID NO: 2170866 - RNA, 14 nt, Human
ccuuaggccuuccu

SEQ ID NO: 2170867 - RNA, 20 nt, Human
ccuuaggugauccacucgcc

SEQ ID NO: 2170868 - RNA, 23 nt, Human
ccuuaggccuuccucucuccaga

SEQ ID NO: 2170869 - RNA, 22 nt, Human
ccuuagcuuagaccucagccug

SEQ ID NO: 2170870 - RNA, 21 nt, Human
ccuuagcuuagaccucagccu

SEQ ID NO: 2170871 - RNA, 20 nt, Human
ccuuagcuuagaccucagcc

SEQ ID NO: 2170872 - RNA, 19 nt, Human
ccuuagcuuagaccucagc

SEQ ID NO: 2170873 - RNA, 15 nt, Human
ccuuaggcagggaag

SEQ ID NO: 2170874 - RNA, 13 nt, Human
ccuuaggcaggga

SEQ ID NO: 2170875 - RNA, 23 nt, Human
ccuuagcuuagaccucagccugu

SEQ ID NO: 2170876 - RNA, 13 nt, Human
ccuuagucuucuc

SEQ ID NO: 2170877 - RNA, 14 nt, Human
ccuuaguacugagu

SEQ ID NO: 2170878 - RNA, 14 nt, Human
ccuuagucuucuca

SEQ ID NO: 2170879 - RNA, 16 nt, Human
ccuuaguggcuuuuuu

SEQ ID NO: 2170880 - RNA, 20 nt, Human
ccuuaguggcuuuuuuccuc

SEQ ID NO: 2170881 - RNA, 20 nt, Human
ccuuagguuuuuuuccuucu

SEQ ID NO: 2170882 - RNA, 14 nt, Human
ccuuagucucaguu

SEQ ID NO: 2170883 - RNA, 20 nt, Human
ccuuagucucaguuugugug

SEQ ID NO: 2170884 - RNA, 13 nt, Human
ccuuaucaaagga

SEQ ID NO: 2170885 - RNA, 20 nt, Human
ccuuaguguuucugugcaug

SEQ ID NO: 2170886 - RNA, 12 nt, Human
ccuuaguguuuc

SEQ ID NO: 2170887 - RNA, 14 nt, Human
ccuuaguguuucug

SEQ ID NO: 2170888 - RNA, 16 nt, Human
ccuuaguguuucugug

SEQ ID NO: 2170889 - RNA, 19 nt, Human
ccuuaguguuucugugcau

SEQ ID NO: 2170890 - RNA, 21 nt, Human
ccuuaucugugcgugaaacac

SEQ ID NO: 2170891 - RNA, 22 nt, Human
ccuuauuacacggaaaacggug

SEQ ID NO: 2170892 - RNA, 21 nt, Human
ccuuauuagagugucuuucca

SEQ ID NO: 2170893 - RNA, 16 nt, Human
ccuuauuagagugucu

SEQ ID NO: 2170894 - RNA, 22 nt, Human
ccuuauggaacacucugagacu

SEQ ID NO: 2170895 - RNA, 19 nt, Human
ccuuauggaacacucugag

SEQ ID NO: 2170896 - RNA, 20 nt, Human
ccuuauggaacacucugaga

SEQ ID NO: 2170897 - RNA, 14 nt, Human
ccuuauggaacacu

SEQ ID NO: 2170898 - RNA, 16 nt, Human
ccuuauggaacacucu

SEQ ID NO: 2170899 - RNA, 17 nt, Human
ccuuauggaacacucug

SEQ ID NO: 2170900 - RNA, 18 nt, Human
ccuuauggaacacucuga

SEQ ID NO: 2170901 - RNA, 19 nt, Human
ccuucccaggaguggagga

SEQ ID NO: 2170902 - RNA, 21 nt, Human
ccuucccagcucucccucugg

SEQ ID NO: 2170903 - RNA, 19 nt, Human
ccuucccagcucucccucu

SEQ ID NO: 2170904 - RNA, 14 nt, Human
ccuucccaucgcug

SEQ ID NO: 2170905 - RNA, 15 nt, Human
ccuucccaucgcugu

SEQ ID NO: 2170906 - RNA, 22 nt, Human
ccuucccagcucucccucuggc

SEQ ID NO: 2170907 - RNA, 15 nt, Human
ccuucccaucucuuc

SEQ ID NO: 2170908 - RNA, 18 nt, Human
ccuucccaugacccaggc

SEQ ID NO: 2170909 - RNA, 21 nt, Human
ccuucccaugacccaggcugg

SEQ ID NO: 2170910 - RNA, 15 nt, Human
ccuucccaugcccug

SEQ ID NO: 2170911 - RNA, 18 nt, Human
ccuucccagcucucccuc

SEQ ID NO: 2170912 - RNA, 17 nt, Human
ccuucccagcucucccu

SEQ ID NO: 2170913 - RNA, 14 nt, Human
ccuucccagcucuc

SEQ ID NO: 2170914 - RNA, 13 nt, Human
ccuucccagcucu

SEQ ID NO: 2170915 - RNA, 12 nt, Human
ccuucccagcuc

SEQ ID NO: 2170916 - RNA, 18 nt, Human
ccuucccacucaccccgg

SEQ ID NO: 2170917 - RNA, 15 nt, Human
ccuucccacucaccc

SEQ ID NO: 2170918 - RNA, 17 nt, Human
ccuucccacucaccccg

SEQ ID NO: 2170919 - RNA, 12 nt, Human
ccuucccaccuc

SEQ ID NO: 2170920 - RNA, 15 nt, Human
ccuuauucaggaaaa

SEQ ID NO: 2170921 - RNA, 22 nt, Human
ccuucccacccaucgcugugug

SEQ ID NO: 2170922 - RNA, 14 nt, Human
ccuucccaccucuc

SEQ ID NO: 2170923 - RNA, 19 nt, Human
ccuucccaccucucucacu

SEQ ID NO: 2170924 - RNA, 18 nt, Human
ccuuagcuuagaccucag

SEQ ID NO: 2170925 - RNA, 17 nt, Human
ccuuagcuuagaccuca

SEQ ID NO: 2170926 - RNA, 22 nt, Human
ccuuagcuggcauuacagcugg

SEQ ID NO: 2170927 - RNA, 19 nt, Human
ccuuagcuggcauuacagc

SEQ ID NO: 2170928 - RNA, 16 nt, Human
ccuuagccucccugaa

SEQ ID NO: 2170929 - RNA, 15 nt, Human
ccuuagccucccuga

SEQ ID NO: 2170930 - RNA, 14 nt, Human
ccuuagccucccug

SEQ ID NO: 2170931 - RNA, 18 nt, Human
ccuuagcccccacccacu

SEQ ID NO: 2170932 - RNA, 21 nt, Human
ccuuagcccccacccacuucc

SEQ ID NO: 2170933 - RNA, 15 nt, Human
ccuuagcccccaccc

SEQ ID NO: 2170934 - RNA, 10 nt, Human
ccuuagccag

SEQ ID NO: 2170935 - RNA, 16 nt, Human
ccuuagcauguuugcu

SEQ ID NO: 2170936 - RNA, 19 nt, Human
ccuuagcauguuugcugaa

SEQ ID NO: 2170937 - RNA, 22 nt, Human
ccuuagcacaggggggccgccg

SEQ ID NO: 2170938 - RNA, 20 nt, Human
ccuuagcacuaccacuccug

SEQ ID NO: 2170939 - RNA, 19 nt, Human
ccuguuggacccgcucugg

SEQ ID NO: 2170940 - RNA, 17 nt, Human
ccuguugcuuacaauuu

SEQ ID NO: 2170941 - RNA, 20 nt, Human
ccuguuggacccgcucugga

SEQ ID NO: 2170942 - RNA, 23 nt, Human
ccuguuggacccgcucuggacca

SEQ ID NO: 2170943 - RNA, 17 nt, Human
ccuguuggauuuguuua

SEQ ID NO: 2170944 - RNA, 24 nt, Human
ccuguuggauuuguuuaaaaggau

SEQ ID NO: 2170945 - RNA, 16 nt, Human
ccuuagcaaauucugu

SEQ ID NO: 2170946 - RNA, 19 nt, Human
ccuuagcagggaaacagcu

SEQ ID NO: 2170947 - RNA, 20 nt, Human
ccuuagcagggaaacagcua

SEQ ID NO: 2170948 - RNA, 16 nt, Human
ccuguugcuuacaauu

SEQ ID NO: 2170949 - RNA, 22 nt, Human
ccuguugcuaagccccagcaag

SEQ ID NO: 2170950 - RNA, 13 nt, Human
ccuguugcuaagc

SEQ ID NO: 2170951 - RNA, 14 nt, Human
ccuguugcuaagcc

SEQ ID NO: 2170952 - RNA, 16 nt, Human
ccuguugggccaggag

SEQ ID NO: 2170953 - RNA, 12 nt, Human
ccuguugcuaag

SEQ ID NO: 2170954 - RNA, 22 nt, Human
ccuguugcacccagcccugguc

SEQ ID NO: 2170955 - RNA, 23 nt, Human
ccuguugcacccagcccuggucu

SEQ ID NO: 2170956 - RNA, 18 nt, Human
ccuguugcacccagcccu

SEQ ID NO: 2170957 - RNA, 19 nt, Human
ccuguugcacccagcccug

SEQ ID NO: 2170958 - RNA, 20 nt, Human
ccuguugcacccagcccugg

SEQ ID NO: 2170959 - RNA, 21 nt, Human
ccuguugcacccagcccuggu

SEQ ID NO: 2170960 - RNA, 20 nt, Human
ccuguugacgaagucucuuu

SEQ ID NO: 2170961 - RNA, 23 nt, Human
ccuguugacgaagucucuuuucu

SEQ ID NO: 2170962 - RNA, 14 nt, Human
ccuguugcacccag

SEQ ID NO: 2170963 - RNA, 15 nt, Human
ccuguugcacccagc

SEQ ID NO: 2170964 - RNA, 16 nt, Human
ccuguugcacccagcc

SEQ ID NO: 2170965 - RNA, 17 nt, Human
ccuguugcacccagccc

SEQ ID NO: 2170966 - RNA, 17 nt, Human
ccuguugggccaggagc

SEQ ID NO: 2170967 - RNA, 18 nt, Human
ccuguugggccaggagcc

SEQ ID NO: 2170968 - RNA, 19 nt, Human
ccuguugggccaggagccu

SEQ ID NO: 2170969 - RNA, 20 nt, Human
ccuguugggccaggagccuc

SEQ ID NO: 2170970 - RNA, 13 nt, Human
ccuguuccccaga

SEQ ID NO: 2170971 - RNA, 12 nt, Human
ccuguucccauu

SEQ ID NO: 2170972 - RNA, 18 nt, Human
ccuguucccaugagauga

SEQ ID NO: 2170973 - RNA, 23 nt, Human
ccuguuccccagagaaaggggag

SEQ ID NO: 2170974 - RNA, 22 nt, Human
ccuguucccccgccgcuuuucu

SEQ ID NO: 2170975 - RNA, 17 nt, Human
ccuguuccccucacugg

SEQ ID NO: 2170976 - RNA, 16 nt, Human
ccuguuccccagagaa

SEQ ID NO: 2170977 - RNA, 15 nt, Human
ccuguuccccagaga

SEQ ID NO: 2170978 - RNA, 18 nt, Human
ccuguuccccucacugga

SEQ ID NO: 2170979 - RNA, 22 nt, Human
ccuguuccccucacuggaugaa

SEQ ID NO: 2170980 - RNA, 21 nt, Human
ccuguucugaacuguggggug

SEQ ID NO: 2170981 - RNA, 14 nt, Human
ccuguucugaacug

SEQ ID NO: 2170982 - RNA, 13 nt, Human
ccuguucugaacu

SEQ ID NO: 2170983 - RNA, 22 nt, Human
ccuguugacacaggucuuuccu

SEQ ID NO: 2170984 - RNA, 19 nt, Human
ccuguugacacaggucuuu

SEQ ID NO: 2170985 - RNA, 17 nt, Human
ccuguugacacaggucu

SEQ ID NO: 2170986 - RNA, 16 nt, Human
ccuguucugcuuuccu

SEQ ID NO: 2170987 - RNA, 12 nt, Human
ccuguucuggca

SEQ ID NO: 2170988 - RNA, 17 nt, Human
ccuguucuggcagaguu

SEQ ID NO: 2170989 - RNA, 19 nt, Human
ccuguucagugucccgggc

SEQ ID NO: 2170990 - RNA, 11 nt, Human
ccuguucaguu

SEQ ID NO: 2170991 - RNA, 15 nt, Human
ccuguucaguuacag

SEQ ID NO: 2170992 - RNA, 17 nt, Human
ccuguucaguuacagaa

SEQ ID NO: 2170993 - RNA, 19 nt, Human
ccuguucaguuacagaaag

SEQ ID NO: 2170994 - RNA, 20 nt, Human
ccuguucaguuacagaaagu

SEQ ID NO: 2170995 - RNA, 23 nt, Human
ccuguucagcuccagcucaccag

SEQ ID NO: 2170996 - RNA, 20 nt, Human
ccuguucagcuccagcucac

SEQ ID NO: 2170997 - RNA, 21 nt, Human
ccuguucagcuccagcucacc

SEQ ID NO: 2170998 - RNA, 14 nt, Human
ccuguucagcucca

SEQ ID NO: 2170999 - RNA, 15 nt, Human
ccuguucagcuccag

SEQ ID NO: 2171000 - RNA, 16 nt, Human
ccuguucagcuccagc

SEQ ID NO: 2171001 - RNA, 19 nt, Human
ccuguucagcuccagcuca

SEQ ID NO: 2171002 - RNA, 21 nt, Human
ccuguuaccuaauuagagcag

SEQ ID NO: 2171003 - RNA, 22 nt, Human
ccuguuaccuaauuagagcaga

SEQ ID NO: 2171004 - RNA, 23 nt, Human
ccuguuaccuaauuagagcagau

SEQ ID NO: 2171005 - RNA, 13 nt, Human
ccuguucagcucc

SEQ ID NO: 2171006 - RNA, 18 nt, Human
ccuguuagcuguuauuuc

SEQ ID NO: 2171007 - RNA, 21 nt, Human
ccuguucacucuacuuagcau

SEQ ID NO: 2171008 - RNA, 16 nt, Human
ccuguuagcagacagg

SEQ ID NO: 2171009 - RNA, 15 nt, Human
ccuguuagcagacag

SEQ ID NO: 2171010 - RNA, 23 nt, Human
ccuguuacuugaaauaccaguga

SEQ ID NO: 2171011 - RNA, 19 nt, Human
ccuguuaccuacuuugacu

SEQ ID NO: 2171012 - RNA, 14 nt, Human
ccuguuacuuaccu

SEQ ID NO: 2171013 - RNA, 22 nt, Human
ccuguuacuugaaauaccagug

SEQ ID NO: 2171014 - RNA, 18 nt, Human
ccuguuaccuacuuugac

SEQ ID NO: 2171015 - RNA, 17 nt, Human
ccuguuaccuacuuuga

SEQ ID NO: 2171016 - RNA, 22 nt, Human
ccugcugccgccucccagccug

SEQ ID NO: 2171017 - RNA, 20 nt, Human
ccugcugcuguguuuuugcu

SEQ ID NO: 2171018 - RNA, 11 nt, Human
ccugcuggccc

SEQ ID NO: 2171019 - RNA, 19 nt, Human
ccugcuggcacccaccgug

SEQ ID NO: 2171020 - RNA, 15 nt, Human
ccugcuggcacccac

SEQ ID NO: 2171021 - RNA, 13 nt, Human
ccugcuggccccu

SEQ ID NO: 2171022 - RNA, 12 nt, Human
ccugcuggcccc

SEQ ID NO: 2171023 - RNA, 9 nt, Human
ccugcuggc

SEQ ID NO: 2171024 - RNA, 21 nt, Human
cgugaucaaagccacacucug

SEQ ID NO: 2171025 - RNA, 18 nt, Human
cgugaucaaagccacacu

SEQ ID NO: 2171026 - RNA, 15 nt, Human
cguguuaugacucca

SEQ ID NO: 2171027 - RNA, 16 nt, Human
cguguucuccuuuucc

SEQ ID NO: 2171028 - RNA, 15 nt, Human
cguguugccuugaac

SEQ ID NO: 2171029 - RNA, 22 nt, Human
cguguugccuugaaccacuucc

SEQ ID NO: 2171030 - RNA, 19 nt, Human
cguguuaugacuccagaau

SEQ ID NO: 2171031 - RNA, 14 nt, Human
cgugaucaaagcca

SEQ ID NO: 2171032 - RNA, 20 nt, Human
cgugaguucucagggcuccu

SEQ ID NO: 2171033 - RNA, 21 nt, Human
cgugaguucucagggcuccug

SEQ ID NO: 2171034 - RNA, 15 nt, Human
cgugaguucucaggg

SEQ ID NO: 2171035 - RNA, 16 nt, Human
cgugaguucucagggc

SEQ ID NO: 2171036 - RNA, 18 nt, Human
cgugaguucucagggcuc

SEQ ID NO: 2171037 - RNA, 19 nt, Human
cgugaguucucagggcucc

SEQ ID NO: 2171038 - RNA, 19 nt, Human
cgugagugaaccaucauua

SEQ ID NO: 2171039 - RNA, 14 nt, Human
cgugaguucucagg

SEQ ID NO: 2171040 - RNA, 16 nt, Human
cgugaggccagagaca

SEQ ID NO: 2171041 - RNA, 19 nt, Human
cgugaguccuggcauggga

SEQ ID NO: 2171042 - RNA, 18 nt, Human
cgugaguccuggcauggg

SEQ ID NO: 2171043 - RNA, 15 nt, Human
cguucaccccuccac

SEQ ID NO: 2171044 - RNA, 19 nt, Human
cguucaacuuuuccuuuga

SEQ ID NO: 2171045 - RNA, 22 nt, Human
cguuauguguguauauguaugu

SEQ ID NO: 2171046 - RNA, 14 nt, Human
cguuauuauaauug

SEQ ID NO: 2171047 - RNA, 16 nt, Human
cguuauuauaauugua

SEQ ID NO: 2171048 - RNA, 15 nt, Human
cguuauuguugacuu

SEQ ID NO: 2171049 - RNA, 20 nt, Human
cguuagucgugagcucuugu

SEQ ID NO: 2171050 - RNA, 16 nt, Human
cguuaugguguuucuc

SEQ ID NO: 2171051 - RNA, 13 nt, Human
cguuagcuccugu

SEQ ID NO: 2171052 - RNA, 15 nt, Human
cguguuucugacucu

SEQ ID NO: 2171053 - RNA, 14 nt, Human
cguguuucugacuc

SEQ ID NO: 2171054 - RNA, 14 nt, Human
cguuagcuccugug

SEQ ID NO: 2171055 - RNA, 15 nt, Human
cguuagcuccugugg

SEQ ID NO: 2171056 - RNA, 16 nt, Human
cguuagcuccuguggc

SEQ ID NO: 2171057 - RNA, 17 nt, Human
cguuagcuccuguggcc

SEQ ID NO: 2171058 - RNA, 20 nt, Human
cguucaccccuccacccuug

SEQ ID NO: 2171059 - RNA, 17 nt, Human
cgugacagacuccugag

SEQ ID NO: 2171060 - RNA, 11 nt, Human
cuaaagcagug

SEQ ID NO: 2171061 - RNA, 20 nt, Human
cuaaagcaauaaugguccca

SEQ ID NO: 2171062 - RNA, 18 nt, Human
cuaaagcaguggacacca

SEQ ID NO: 2171063 - RNA, 11 nt, Human
cuaaagcugcc

SEQ ID NO: 2171064 - RNA, 22 nt, Human
cuaagaaagcccuuaggaagaa

SEQ ID NO: 2171065 - RNA, 20 nt, Human
cuaagaaauaugcacaauag

SEQ ID NO: 2171066 - RNA, 22 nt, Human
cuaacuuggagccccagugcca

SEQ ID NO: 2171067 - RNA, 14 nt, Human
cuaacuuggagccg

SEQ ID NO: 2171068 - RNA, 20 nt, Human
cuaagaaagaggagugcuug

SEQ ID NO: 2171069 - RNA, 14 nt, Human
cuaagaaccuggaa

SEQ ID NO: 2171070 - RNA, 21 nt, Human
cuaagaaagaggagugcuugu

SEQ ID NO: 2171071 - RNA, 20 nt, Human
cuaagaaauaaaacuguuaa

SEQ ID NO: 2171072 - RNA, 16 nt, Human
cuaagaaccuggaacu

SEQ ID NO: 2171073 - RNA, 15 nt, Human
cuaagaaccuggaac

SEQ ID NO: 2171074 - RNA, 23 nt, Human
cuaagaagaaaauugcugugccu

SEQ ID NO: 2171075 - RNA, 21 nt, Human
cuaacuuggagccccagugcc

SEQ ID NO: 2171076 - RNA, 20 nt, Human
cuaacuuggagccccagugc

SEQ ID NO: 2171077 - RNA, 17 nt, Human
cuaacuuggagccccag

SEQ ID NO: 2171078 - RNA, 12 nt, Human
cuaacuaaacuc

SEQ ID NO: 2171079 - RNA, 13 nt, Human
cuaacuaaacucu

SEQ ID NO: 2171080 - RNA, 19 nt, Human
cuaacuaaacucucuuugg

SEQ ID NO: 2171081 - RNA, 22 nt, Human
cuaacguugagccccuggaggc

SEQ ID NO: 2171082 - RNA, 14 nt, Human
cuaacuugucuuug

SEQ ID NO: 2171083 - RNA, 22 nt, Human
cuaacuugucuuuggacccuga

SEQ ID NO: 2171084 - RNA, 17 nt, Human
cuaaaguagacuucauu

SEQ ID NO: 2171085 - RNA, 15 nt, Human
cuaaaguaugaagca

SEQ ID NO: 2171086 - RNA, 16 nt, Human
cuaaaguauguaaagu

SEQ ID NO: 2171087 - RNA, 20 nt, Human
cuaaaguauguaaaguaugu

SEQ ID NO: 2171088 - RNA, 20 nt, Human
cuaaagguguugucccuucu

SEQ ID NO: 2171089 - RNA, 19 nt, Human
cuaaagguguugucccuuc

SEQ ID NO: 2171090 - RNA, 17 nt, Human
cuaaagcccaaccuccu

SEQ ID NO: 2171091 - RNA, 23 nt, Human
cuaaaguaaaaacaaagaaauua

SEQ ID NO: 2171092 - RNA, 15 nt, Human
cuaacguaaauacac

SEQ ID NO: 2171093 - RNA, 17 nt, Human
cuaacguugagccccug

SEQ ID NO: 2171094 - RNA, 20 nt, Human
cuaacgacuucagggcaggg

SEQ ID NO: 2171095 - RNA, 15 nt, Human
cuaaagugagcucua

SEQ ID NO: 2171096 - RNA, 19 nt, Human
cuaaaguguauuuuuuuac

SEQ ID NO: 2171097 - RNA, 20 nt, Human
cuaacgaaguauccuucagc

SEQ ID NO: 2171098 - RNA, 22 nt, Human
cgugagccacugcaccgggcca

SEQ ID NO: 2171099 - RNA, 15 nt, Human
cgugacagacuccug

SEQ ID NO: 2171100 - RNA, 16 nt, Human
cgugacagacuccuga

SEQ ID NO: 2171101 - RNA, 12 nt, Human
cgugagccaggu

SEQ ID NO: 2171102 - RNA, 13 nt, Human
cgugagccaggua

SEQ ID NO: 2171103 - RNA, 21 nt, Human
cgugagccagguaaugaggga

SEQ ID NO: 2171104 - RNA, 19 nt, Human
cgugaggaugucacucaga

SEQ ID NO: 2171105 - RNA, 15 nt, Human
cgugagcucuuguga

SEQ ID NO: 2171106 - RNA, 19 nt, Human
cgugagcgacaaagaugau

SEQ ID NO: 2171107 - RNA, 14 nt, Human
cgugaggccagaga

SEQ ID NO: 2171108 - RNA, 14 nt, Human
cgugagccacugca

SEQ ID NO: 2171109 - RNA, 17 nt, Human
cgugacaauaaaacauu

SEQ ID NO: 2171110 - RNA, 19 nt, Human
cgugacaauaaaacauuaa

SEQ ID NO: 2171111 - RNA, 15 nt, Human
cgugagccacugcac

SEQ ID NO: 2171112 - RNA, 20 nt, Human
cgugagccacugcaccgggc

SEQ ID NO: 2171113 - RNA, 14 nt, Human
cgugacaacacuug

SEQ ID NO: 2171114 - RNA, 15 nt, Human
cgugacaacacuugu

SEQ ID NO: 2171115 - RNA, 19 nt, Human
cuaaguuucaguugauuuu

SEQ ID NO: 2171116 - RNA, 14 nt, Human
cuaaguuuuuaugg

SEQ ID NO: 2171117 - RNA, 10 nt, Human
cuaauaaaac

SEQ ID NO: 2171118 - RNA, 15 nt, Human
cuaaguccuuuaugu

SEQ ID NO: 2171119 - RNA, 17 nt, Human
cuaaguauuucccagca

SEQ ID NO: 2171120 - RNA, 14 nt, Human
cuaaguauuuccca

SEQ ID NO: 2171121 - RNA, 16 nt, Human
cuaaguauuucccagc

SEQ ID NO: 2171122 - RNA, 13 nt, Human
cuaaguauuuccc

SEQ ID NO: 2171123 - RNA, 18 nt, Human
cuaaguuccacugagcuc

SEQ ID NO: 2171124 - RNA, 20 nt, Human
cuaaguuccacugagcucca

SEQ ID NO: 2171125 - RNA, 13 nt, Human
cuaaguuucaguu

SEQ ID NO: 2171126 - RNA, 12 nt, Human
cuaauuuuuaag

SEQ ID NO: 2171127 - RNA, 22 nt, Human
cuaauuugcauuaaauucacaa

SEQ ID NO: 2171128 - RNA, 19 nt, Human
cuaauuucuccucccuucc

SEQ ID NO: 2171129 - RNA, 21 nt, Human
cuaauuugcauuaaauucaca

SEQ ID NO: 2171130 - RNA, 19 nt, Human
cuaauuugcauuaaauuca

SEQ ID NO: 2171131 - RNA, 19 nt, Human
cuacaaaaagcauaaaaau

SEQ ID NO: 2171132 - RNA, 20 nt, Human
cuacaaaaacacagcaaggg

SEQ ID NO: 2171133 - RNA, 13 nt, Human
cuaauaaaagcau

SEQ ID NO: 2171134 - RNA, 16 nt, Human
cuaauuugauguuuac

SEQ ID NO: 2171135 - RNA, 12 nt, Human
cuaauuugcauu

SEQ ID NO: 2171136 - RNA, 14 nt, Human
cuaauuugcauuaa

SEQ ID NO: 2171137 - RNA, 13 nt, Human
cuaauuugcauua

SEQ ID NO: 2171138 - RNA, 15 nt, Human
cuaauuugauguuua

SEQ ID NO: 2171139 - RNA, 20 nt, Human
cuaauuucuccucccuuccu

SEQ ID NO: 2171140 - RNA, 18 nt, Human
cuaauuucuccucccuuc

SEQ ID NO: 2171141 - RNA, 14 nt, Human
cuaagacuacagca

SEQ ID NO: 2171142 - RNA, 17 nt, Human
cuaagaauucaaacugg

SEQ ID NO: 2171143 - RNA, 16 nt, Human
cuaagagaaguuauuu

SEQ ID NO: 2171144 - RNA, 11 nt, Human
cuaagagaagu

SEQ ID NO: 2171145 - RNA, 22 nt, Human
cuaagacuccucggccuggcuc

SEQ ID NO: 2171146 - RNA, 23 nt, Human
cuaagacuccucggccuggcucc

SEQ ID NO: 2171147 - RNA, 19 nt, Human
cuaagagaaguuauuuucu

SEQ ID NO: 2171148 - RNA, 20 nt, Human
cgguggcucacgccuguaau

SEQ ID NO: 2171149 - RNA, 15 nt, Human
cggugggcacccacc

SEQ ID NO: 2171150 - RNA, 18 nt, Human
cggugggcacccacccug

SEQ ID NO: 2171151 - RNA, 20 nt, Human
cgguggcucaggccuauaac

SEQ ID NO: 2171152 - RNA, 16 nt, Human
cggggaacuccuggaa

SEQ ID NO: 2171153 - RNA, 22 nt, Human
cgguggcuagucaagcuccucc

SEQ ID NO: 2171154 - RNA, 11 nt, Human
cgguggcucac

SEQ ID NO: 2171155 - RNA, 21 nt, Human
cgguggcuagucaagcuccuc

SEQ ID NO: 2171156 - RNA, 20 nt, Human
cgguggcuagucaagcuccu

SEQ ID NO: 2171157 - RNA, 15 nt, Human
cggggaacuccugga

SEQ ID NO: 2171158 - RNA, 14 nt, Human
cggggaacuccugg

SEQ ID NO: 2171159 - RNA, 15 nt, Human
cgggcuuuuccccgg

SEQ ID NO: 2171160 - RNA, 12 nt, Human
cgggcugugccc

SEQ ID NO: 2171161 - RNA, 19 nt, Human
cggugggcacccacccugg

SEQ ID NO: 2171162 - RNA, 23 nt, Human
cggugggcacccacccugggacc

SEQ ID NO: 2171163 - RNA, 17 nt, Human
cguaaagcuagaaauga

SEQ ID NO: 2171164 - RNA, 16 nt, Human
cguaaagcuagaaaug

SEQ ID NO: 2171165 - RNA, 20 nt, Human
cgguggcugacaccuguaau

SEQ ID NO: 2171166 - RNA, 15 nt, Human
cguaaccacggaaaa

SEQ ID NO: 2171167 - RNA, 20 nt, Human
cguaaauacacaacacacac

SEQ ID NO: 2171168 - RNA, 15 nt, Human
cguaacuggcugugu

SEQ ID NO: 2171169 - RNA, 12 nt, Human
cguaaccagcca

SEQ ID NO: 2171170 - RNA, 13 nt, Human
cguaaccagccag

SEQ ID NO: 2171171 - RNA, 14 nt, Human
cguaaccagccaga

SEQ ID NO: 2171172 - RNA, 23 nt, Human
cguaaccagccagauccucuugg

SEQ ID NO: 2171173 - RNA, 12 nt, Human
cguaacccaacu

SEQ ID NO: 2171174 - RNA, 14 nt, Human
cguaacccaacucu

SEQ ID NO: 2171175 - RNA, 19 nt, Human
cguaacccaacucuccugg

SEQ ID NO: 2171176 - RNA, 17 nt, Human
cguacauucaauguuua

SEQ ID NO: 2171177 - RNA, 13 nt, Human
cguaccccacccu

SEQ ID NO: 2171178 - RNA, 14 nt, Human
cguaccccacccuc

SEQ ID NO: 2171179 - RNA, 15 nt, Human
cguaccccacccuca

SEQ ID NO: 2171180 - RNA, 14 nt, Human
cguacaugugaggc

SEQ ID NO: 2171181 - RNA, 13 nt, Human
cguacaguucuuc

SEQ ID NO: 2171182 - RNA, 22 nt, Human
cguacaguucuucgggaagaga

SEQ ID NO: 2171183 - RNA, 22 nt, Human
cguacacauuuuauuuuauuau

SEQ ID NO: 2171184 - RNA, 16 nt, Human
cguaaguuuaaaggau

SEQ ID NO: 2171185 - RNA, 22 nt, Human
cguacuuagcagcuaucucuca

SEQ ID NO: 2171186 - RNA, 18 nt, Human
cguagaaguuuuuguacu

SEQ ID NO: 2171187 - RNA, 19 nt, Human
cguagaaguuuuuguacug

SEQ ID NO: 2171188 - RNA, 23 nt, Human
cguagaaguuuuuguacuguaaa

SEQ ID NO: 2171189 - RNA, 14 nt, Human
cgggcugggcagcu

SEQ ID NO: 2171190 - RNA, 15 nt, Human
cgggcugggcagcug

SEQ ID NO: 2171191 - RNA, 16 nt, Human
cgggcugggcagcugu

SEQ ID NO: 2171192 - RNA, 17 nt, Human
cgggcugggcagcuguu

SEQ ID NO: 2171193 - RNA, 16 nt, Human
cgggcugggagcucug

SEQ ID NO: 2171194 - RNA, 20 nt, Human
cgggcugggagcucugcaga

SEQ ID NO: 2171195 - RNA, 12 nt, Human
cgggcucugccu

SEQ ID NO: 2171196 - RNA, 13 nt, Human
cgggcucugccuc

SEQ ID NO: 2171197 - RNA, 17 nt, Human
cgggcuccugugcccuu

SEQ ID NO: 2171198 - RNA, 14 nt, Human
cgggcugccugggc

SEQ ID NO: 2171199 - RNA, 15 nt, Human
cgggcugccugggcu

SEQ ID NO: 2171200 - RNA, 16 nt, Human
cgggcugccugggcug

SEQ ID NO: 2171201 - RNA, 19 nt, Human
cgggcucagcaaaagaugc

SEQ ID NO: 2171202 - RNA, 16 nt, Human
cgggccuggagaacua

SEQ ID NO: 2171203 - RNA, 20 nt, Human
cgggccuggagaacuagaga

SEQ ID NO: 2171204 - RNA, 15 nt, Human
cgggcucucugcugu

SEQ ID NO: 2171205 - RNA, 14 nt, Human
cgggcucucugcug

SEQ ID NO: 2171206 - RNA, 20 nt, Human
cgggcucagggaccacagca

SEQ ID NO: 2171207 - RNA, 14 nt, Human
cgggcuccugugcc

SEQ ID NO: 2171208 - RNA, 15 nt, Human
cgggcuccugugccc

SEQ ID NO: 2171209 - RNA, 16 nt, Human
cgggcuccugugcccu

SEQ ID NO: 2171210 - RNA, 18 nt, Human
cgggcucagggaccacag

SEQ ID NO: 2171211 - RNA, 19 nt, Human
cgggccgacggagccggga

SEQ ID NO: 2171212 - RNA, 20 nt, Human
cggcuacucagcagcccucc

SEQ ID NO: 2171213 - RNA, 19 nt, Human
cggcuacucagcagcccuc

SEQ ID NO: 2171214 - RNA, 18 nt, Human
cggcuacucagcagcccu

SEQ ID NO: 2171215 - RNA, 16 nt, Human
cggcuacucagcagcc

SEQ ID NO: 2171216 - RNA, 14 nt, Human
cggcuacucagcag

SEQ ID NO: 2171217 - RNA, 13 nt, Human
cggcuacucagca

SEQ ID NO: 2171218 - RNA, 12 nt, Human
cggcuacucagc

SEQ ID NO: 2171219 - RNA, 21 nt, Human
cggcuacucagcagcccuccu

SEQ ID NO: 2171220 - RNA, 23 nt, Human
cgggccagccaggcgggcucaag

SEQ ID NO: 2171221 - RNA, 17 nt, Human
cgggccagccaggcggg

SEQ ID NO: 2171222 - RNA, 18 nt, Human
cgggccagccaggcgggc

SEQ ID NO: 2171223 - RNA, 20 nt, Human
cgggccagccaggcgggcuc

SEQ ID NO: 2171224 - RNA, 21 nt, Human
cgggccagccaggcgggcuca

SEQ ID NO: 2171225 - RNA, 13 nt, Human
cgggccagccagg

SEQ ID NO: 2171226 - RNA, 14 nt, Human
cgggccagccaggc

SEQ ID NO: 2171227 - RNA, 15 nt, Human
cgggccagccaggcg

SEQ ID NO: 2171228 - RNA, 16 nt, Human
cgggccagccaggcgg

SEQ ID NO: 2171229 - RNA, 12 nt, Human
cgggccccucau

SEQ ID NO: 2171230 - RNA, 15 nt, Human
cgggccccugggcuu

SEQ ID NO: 2171231 - RNA, 23 nt, Human
cgggccccugggcuuggccugcu

SEQ ID NO: 2171232 - RNA, 15 nt, Human
cgggcccaggccauc

SEQ ID NO: 2171233 - RNA, 21 nt, Human
cgggcccuucccacaggacau

SEQ ID NO: 2171234 - RNA, 18 nt, Human
cgggcccguugaggauga

SEQ ID NO: 2171235 - RNA, 22 nt, Human
cgggcccguugaggaugaggcc

SEQ ID NO: 2171236 - RNA, 11 nt, Human
cgggcccuccc

SEQ ID NO: 2171237 - RNA, 17 nt, Human
cgggcccucccuuggaa

SEQ ID NO: 2171238 - RNA, 11 nt, Human
cgggcccaccu

SEQ ID NO: 2171239 - RNA, 13 nt, Human
cgggcccaccugg

SEQ ID NO: 2171240 - RNA, 15 nt, Human
cgggcccaccuggcc

SEQ ID NO: 2171241 - RNA, 16 nt, Human
cgggcccaccuggcca

SEQ ID NO: 2171242 - RNA, 17 nt, Human
cgggcccaccuggccac

SEQ ID NO: 2171243 - RNA, 18 nt, Human
cgggcccaccuggccacc

SEQ ID NO: 2171244 - RNA, 19 nt, Human
cgggcccaccuggccaccu

SEQ ID NO: 2171245 - RNA, 20 nt, Human
cgggcccaccuggccaccug

SEQ ID NO: 2171246 - RNA, 12 nt, Human
cgggcccagccc

SEQ ID NO: 2171247 - RNA, 15 nt, Human
cgggcccagccccca

SEQ ID NO: 2171248 - RNA, 18 nt, Human
cgggcccagcccccacag

SEQ ID NO: 2171249 - RNA, 23 nt, Human
cgggcccagcccccacagugcug

SEQ ID NO: 2171250 - RNA, 13 nt, Human
cgggcccaggcca

SEQ ID NO: 2171251 - RNA, 13 nt, Human
cggaggcugcccc

SEQ ID NO: 2171252 - RNA, 18 nt, Human
cggaggccccaaaggaaa

SEQ ID NO: 2171253 - RNA, 23 nt, Human
cggagagcgccugccccucccag

SEQ ID NO: 2171254 - RNA, 17 nt, Human
cggagaguacagugagc

SEQ ID NO: 2171255 - RNA, 18 nt, Human
cggagaguacagugagcc

SEQ ID NO: 2171256 - RNA, 19 nt, Human
cggagaguacagugagcca

SEQ ID NO: 2171257 - RNA, 21 nt, Human
cggagaguacagugagccaag

SEQ ID NO: 2171258 - RNA, 14 nt, Human
cggagacgggaccg

SEQ ID NO: 2171259 - RNA, 15 nt, Human
cggagacgggaccgg

SEQ ID NO: 2171260 - RNA, 20 nt, Human
cggagacggagucccaccuu

SEQ ID NO: 2171261 - RNA, 17 nt, Human
cggagacggagucccac

SEQ ID NO: 2171262 - RNA, 18 nt, Human
cggaggcuugucagagcu

SEQ ID NO: 2171263 - RNA, 17 nt, Human
cggaggcuugggaccgc

SEQ ID NO: 2171264 - RNA, 15 nt, Human
cggaggcuugggacc

SEQ ID NO: 2171265 - RNA, 16 nt, Human
cggaggcuugggaccg

SEQ ID NO: 2171266 - RNA, 16 nt, Human
cggaggcugcccccgg

SEQ ID NO: 2171267 - RNA, 19 nt, Human
cggaggcugcccccggccc

SEQ ID NO: 2171268 - RNA, 22 nt, Human
cggaggcugcccccggcccccu

SEQ ID NO: 2171269 - RNA, 23 nt, Human
cggaggcuugucagagcugggag

SEQ ID NO: 2171270 - RNA, 21 nt, Human
cggaggcuugucagagcuggg

SEQ ID NO: 2171271 - RNA, 20 nt, Human
cggaggcuugucagagcugg

SEQ ID NO: 2171272 - RNA, 19 nt, Human
cggaggcuugucagagcug

SEQ ID NO: 2171273 - RNA, 19 nt, Human
cggagggaauugaggucug

SEQ ID NO: 2171274 - RNA, 17 nt, Human
cggagggauuccccuaa

SEQ ID NO: 2171275 - RNA, 21 nt, Human
cggagucccaccuuggcugca

SEQ ID NO: 2171276 - RNA, 22 nt, Human
cggagucccaccuuggcugcag

SEQ ID NO: 2171277 - RNA, 23 nt, Human
cggagucccaccuuggcugcagg

SEQ ID NO: 2171278 - RNA, 15 nt, Human
cggaggggccuggca

SEQ ID NO: 2171279 - RNA, 15 nt, Human
cggagucguggggug

SEQ ID NO: 2171280 - RNA, 20 nt, Human
cggcgucagccuccagccuc

SEQ ID NO: 2171281 - RNA, 23 nt, Human
cggcgucagccuccagccucugu

SEQ ID NO: 2171282 - RNA, 18 nt, Human
cggcuaauuuuuguauuu

SEQ ID NO: 2171283 - RNA, 14 nt, Human
cggcgucagccucc

SEQ ID NO: 2171284 - RNA, 15 nt, Human
cggcgucagccucca

SEQ ID NO: 2171285 - RNA, 16 nt, Human
cggcgucagccuccag

SEQ ID NO: 2171286 - RNA, 17 nt, Human
cggcgucagccuccagc

SEQ ID NO: 2171287 - RNA, 18 nt, Human
cggcgucagccuccagcc

SEQ ID NO: 2171288 - RNA, 19 nt, Human
cggcgucagccuccagccu

SEQ ID NO: 2171289 - RNA, 19 nt, Human
cgcucuguugcccaggcug

SEQ ID NO: 2171290 - RNA, 20 nt, Human
cgcucugucgcccaggcugg

SEQ ID NO: 2171291 - RNA, 15 nt, Human
cgcucugucacccag

SEQ ID NO: 2171292 - RNA, 20 nt, Human
cgcucugcuggccuggccgg

SEQ ID NO: 2171293 - RNA, 21 nt, Human
cgcucugcuggccuggccggc

SEQ ID NO: 2171294 - RNA, 15 nt, Human
cgcucugcuggccug

SEQ ID NO: 2171295 - RNA, 16 nt, Human
cgcucugcuggccugg

SEQ ID NO: 2171296 - RNA, 17 nt, Human
cgcucugcuggccuggc

SEQ ID NO: 2171297 - RNA, 18 nt, Human
cgcucugcuggccuggcc

SEQ ID NO: 2171298 - RNA, 22 nt, Human
cgcucuguugcccaggcuggag

SEQ ID NO: 2171299 - RNA, 21 nt, Human
cgcucuuggcagguacucagc

SEQ ID NO: 2171300 - RNA, 13 nt, Human
cgcugaauaaaug

SEQ ID NO: 2171301 - RNA, 23 nt, Human
cgcugacaaccaccgcuccccag

SEQ ID NO: 2171302 - RNA, 14 nt, Human
cgcugaauaaaugu

SEQ ID NO: 2171303 - RNA, 15 nt, Human
cgcugaauaaauguc

SEQ ID NO: 2171304 - RNA, 13 nt, Human
cgcugaguggcag

SEQ ID NO: 2171305 - RNA, 17 nt, Human
cgcugaguggacuggag

SEQ ID NO: 2171306 - RNA, 14 nt, Human
cgcugaguggcagg

SEQ ID NO: 2171307 - RNA, 16 nt, Human
cgcugaguggcagggg

SEQ ID NO: 2171308 - RNA, 19 nt, Human
cgcugccccuggcagcccc

SEQ ID NO: 2171309 - RNA, 20 nt, Human
cgcugccccuggcagccccu

SEQ ID NO: 2171310 - RNA, 21 nt, Human
cgccaccuggcauuccuucug

SEQ ID NO: 2171311 - RNA, 20 nt, Human
cgccaccuggcauuccuucu

SEQ ID NO: 2171312 - RNA, 21 nt, Human
cgccugcaaacgcugccugcc

SEQ ID NO: 2171313 - RNA, 20 nt, Human
cgccugcaaacgcugccugc

SEQ ID NO: 2171314 - RNA, 22 nt, Human
cgccugcauguaaacacgccug

SEQ ID NO: 2171315 - RNA, 17 nt, Human
cgccugcauguaaacac

SEQ ID NO: 2171316 - RNA, 22 nt, Human
cgccugcaaacgcugccugccg

SEQ ID NO: 2171317 - RNA, 22 nt, Human
cgccugcaaacgcugccugccc

SEQ ID NO: 2171318 - RNA, 15 nt, Human
cgccacauggcuucc

SEQ ID NO: 2171319 - RNA, 16 nt, Human
cgccacauggcuuccu

SEQ ID NO: 2171320 - RNA, 17 nt, Human
cgccacauggcuuccuc

SEQ ID NO: 2171321 - RNA, 18 nt, Human
cgccacauggcuuccucc

SEQ ID NO: 2171322 - RNA, 22 nt, Human
cgccacauggcuuccuccugcg

SEQ ID NO: 2171323 - RNA, 23 nt, Human
cgccacauggcuuccuccugcgc

SEQ ID NO: 2171324 - RNA, 17 nt, Human
cgccaccccuccuuccu

SEQ ID NO: 2171325 - RNA, 15 nt, Human
cgccaccauuccugg

SEQ ID NO: 2171326 - RNA, 16 nt, Human
cgccaccauuccugga

SEQ ID NO: 2171327 - RNA, 13 nt, Human
cgccaccauccug

SEQ ID NO: 2171328 - RNA, 23 nt, Human
cgccaccauccugcagccuccuc

SEQ ID NO: 2171329 - RNA, 11 nt, Human
cgccaccauuc

SEQ ID NO: 2171330 - RNA, 16 nt, Human
cgccugccccucccag

SEQ ID NO: 2171331 - RNA, 15 nt, Human
cgccugccccuccca

SEQ ID NO: 2171332 - RNA, 14 nt, Human
cgccugccaguccu

SEQ ID NO: 2171333 - RNA, 15 nt, Human
cgccugccaguccua

SEQ ID NO: 2171334 - RNA, 17 nt, Human
cgccugcccucauggcc

SEQ ID NO: 2171335 - RNA, 20 nt, Human
cgccugcccgucucucuccc

SEQ ID NO: 2171336 - RNA, 23 nt, Human
cgccugcccgucucucucccaug

SEQ ID NO: 2171337 - RNA, 20 nt, Human
cgccugcccucauggccccu

SEQ ID NO: 2171338 - RNA, 22 nt, Human
cgccugcccucauggccccucu

SEQ ID NO: 2171339 - RNA, 13 nt, Human
cgccugcccuccc

SEQ ID NO: 2171340 - RNA, 17 nt, Human
cgccugcccuccccaga

SEQ ID NO: 2171341 - RNA, 20 nt, Human
cgccugcccuccccagagca

SEQ ID NO: 2171342 - RNA, 19 nt, Human
cgccugccuccccugugca

SEQ ID NO: 2171343 - RNA, 12 nt, Human
cgcucugcaugc

SEQ ID NO: 2171344 - RNA, 19 nt, Human
cgcucugcaugcggcccag

SEQ ID NO: 2171345 - RNA, 20 nt, Human
cgcucugcaugcggcccagc

SEQ ID NO: 2171346 - RNA, 21 nt, Human
cgcucugcaugcggcccagcc

SEQ ID NO: 2171347 - RNA, 22 nt, Human
cgcucugcaugcggcccagccc

SEQ ID NO: 2171348 - RNA, 23 nt, Human
cgcucugcaugcggcccagcccg

SEQ ID NO: 2171349 - RNA, 23 nt, Human
cgcuggcccagccggccucucug

SEQ ID NO: 2171350 - RNA, 24 nt, Human
cgcuggcccagccggccucucugg

SEQ ID NO: 2171351 - RNA, 18 nt, Human
cgcuggagguggggccug

SEQ ID NO: 2171352 - RNA, 10 nt, Human
cgcuggccca

SEQ ID NO: 2171353 - RNA, 11 nt, Human
cgcuggcccag

SEQ ID NO: 2171354 - RNA, 12 nt, Human
cgcuggcccagc

SEQ ID NO: 2171355 - RNA, 13 nt, Human
cgcuggcccagcc

SEQ ID NO: 2171356 - RNA, 14 nt, Human
cgcuggcccagccg

SEQ ID NO: 2171357 - RNA, 15 nt, Human
cgcuggcccagccgg

SEQ ID NO: 2171358 - RNA, 16 nt, Human
cgcuggcccagccggc

SEQ ID NO: 2171359 - RNA, 18 nt, Human
cgcugccgcaccccagag

SEQ ID NO: 2171360 - RNA, 13 nt, Human
cgcugccgcaccc

SEQ ID NO: 2171361 - RNA, 21 nt, Human
cgcugcccggcgcccucuguc

SEQ ID NO: 2171362 - RNA, 22 nt, Human
cgcugcccggcgcccucugucc

SEQ ID NO: 2171363 - RNA, 20 nt, Human
cgcugaguggcaggggacag

SEQ ID NO: 2171364 - RNA, 19 nt, Human
cgcugcccggcgcccucug

SEQ ID NO: 2171365 - RNA, 20 nt, Human
cgcugcccggcgcccucugu

SEQ ID NO: 2171366 - RNA, 20 nt, Human
cgcugccuaaguggcugcug

SEQ ID NO: 2171367 - RNA, 17 nt, Human
cgcugccuaaguggcug

SEQ ID NO: 2171368 - RNA, 21 nt, Human
cgcugccgcaccccagagugu

SEQ ID NO: 2171369 - RNA, 20 nt, Human
cgcugccgcaccccagagug

SEQ ID NO: 2171370 - RNA, 15 nt, Human
cgcugccugcccaca

SEQ ID NO: 2171371 - RNA, 13 nt, Human
cgcugccugugug

SEQ ID NO: 2171372 - RNA, 17 nt, Human
cgcuggagugcagugag

SEQ ID NO: 2171373 - RNA, 18 nt, Human
cgcuggagugcagugagc

SEQ ID NO: 2171374 - RNA, 13 nt, Human
ccuuuccuuccuu

SEQ ID NO: 2171375 - RNA, 13 nt, Human
ccuuuccuguagc

SEQ ID NO: 2171376 - RNA, 21 nt, Human
ccuuuccuuccuucccuggcu

SEQ ID NO: 2171377 - RNA, 12 nt, Human
ccuuuucccaac

SEQ ID NO: 2171378 - RNA, 12 nt, Human
ccuuuccuuccu

SEQ ID NO: 2171379 - RNA, 18 nt, Human
ccuuuccuuccaucccua

SEQ ID NO: 2171380 - RNA, 16 nt, Human
ccuuuccuuccauccc

SEQ ID NO: 2171381 - RNA, 16 nt, Human
ccuuuccucaggcaag

SEQ ID NO: 2171382 - RNA, 22 nt, Human
ccuuuccuggacacucagaccu

SEQ ID NO: 2171383 - RNA, 20 nt, Human
ccuuuucgcaggauucuucc

SEQ ID NO: 2171384 - RNA, 21 nt, Human
ccuuuucccggggaggagaga

SEQ ID NO: 2171385 - RNA, 13 nt, Human
ccuuuucccugcu

SEQ ID NO: 2171386 - RNA, 14 nt, Human
ccuuuucccugcuu

SEQ ID NO: 2171387 - RNA, 15 nt, Human
ccuuuucccugcuuc

SEQ ID NO: 2171388 - RNA, 18 nt, Human
ccuuuuccauuugaaaga

SEQ ID NO: 2171389 - RNA, 21 nt, Human
ccuuuuccauuugaaagaaag

SEQ ID NO: 2171390 - RNA, 16 nt, Human
ccuuuucccggggagg

SEQ ID NO: 2171391 - RNA, 19 nt, Human
ccuuuucccugcuuccagg

SEQ ID NO: 2171392 - RNA, 19 nt, Human
cgcagugcuucucuacaga

SEQ ID NO: 2171393 - RNA, 15 nt, Human
cgcagugccucuggu

SEQ ID NO: 2171394 - RNA, 21 nt, Human
cgcagucgucgcacagucucu

SEQ ID NO: 2171395 - RNA, 22 nt, Human
cgcagucgucgcacagucucuc

SEQ ID NO: 2171396 - RNA, 16 nt, Human
cgcagucgucgcacag

SEQ ID NO: 2171397 - RNA, 17 nt, Human
cgcagucgucgcacagu

SEQ ID NO: 2171398 - RNA, 19 nt, Human
cgcagucgucgcacagucu

SEQ ID NO: 2171399 - RNA, 23 nt, Human
cgcagugugcacuaaggggcccg

SEQ ID NO: 2171400 - RNA, 22 nt, Human
cgcagugugcacuaaggggccc

SEQ ID NO: 2171401 - RNA, 17 nt, Human
cgcagugugcacuaagg

SEQ ID NO: 2171402 - RNA, 21 nt, Human
cgccaagguagccaucccaug

SEQ ID NO: 2171403 - RNA, 22 nt, Human
cgccaagguagccaucccauga

SEQ ID NO: 2171404 - RNA, 20 nt, Human
cgagucucuucuccacugga

SEQ ID NO: 2171405 - RNA, 21 nt, Human
cgagucucuucuccacuggau

SEQ ID NO: 2171406 - RNA, 11 nt, Human
cgagugccagg

SEQ ID NO: 2171407 - RNA, 14 nt, Human
cgagugccaggacu

SEQ ID NO: 2171408 - RNA, 14 nt, Human
cgagguagaguuug

SEQ ID NO: 2171409 - RNA, 22 nt, Human
cgcaggcuggcccugcccuggu

SEQ ID NO: 2171410 - RNA, 21 nt, Human
cgcaggcuggcccugcccugg

SEQ ID NO: 2171411 - RNA, 15 nt, Human
cgcagucgucgcaca

SEQ ID NO: 2171412 - RNA, 16 nt, Human
cgcagggguugcagug

SEQ ID NO: 2171413 - RNA, 13 nt, Human
cgcaggggaaacg

SEQ ID NO: 2171414 - RNA, 17 nt, Human
cgcagucaggggcagcu

SEQ ID NO: 2171415 - RNA, 19 nt, Human
cgaggggaggguggcaggu

SEQ ID NO: 2171416 - RNA, 18 nt, Human
cgaggggaggguggcagg

SEQ ID NO: 2171417 - RNA, 21 nt, Human
cgagggcagggaccacacccu

SEQ ID NO: 2171418 - RNA, 12 nt, Human
cgagggcaggga

SEQ ID NO: 2171419 - RNA, 15 nt, Human
cgaggguccuggcuc

SEQ ID NO: 2171420 - RNA, 14 nt, Human
cgaggguccuggcu

SEQ ID NO: 2171421 - RNA, 18 nt, Human
cgaggggugucuugggca

SEQ ID NO: 2171422 - RNA, 19 nt, Human
cgaggggugucuugggcag

SEQ ID NO: 2171423 - RNA, 17 nt, Human
cgaggggcgggacccag

SEQ ID NO: 2171424 - RNA, 21 nt, Human
cgaggggcgggacccaggcac

SEQ ID NO: 2171425 - RNA, 16 nt, Human
cgaggggcucaggaaa

SEQ ID NO: 2171426 - RNA, 17 nt, Human
cgaggggcucaggaaaa

SEQ ID NO: 2171427 - RNA, 20 nt, Human
cgaggggcucucagcucagc

SEQ ID NO: 2171428 - RNA, 17 nt, Human
cgagucucuucuccacu

SEQ ID NO: 2171429 - RNA, 18 nt, Human
cgagucucuucuccacug

SEQ ID NO: 2171430 - RNA, 23 nt, Human
cgaggguccuggcuccugagggg

SEQ ID NO: 2171431 - RNA, 16 nt, Human
cgaggguccuggcucc

SEQ ID NO: 2171432 - RNA, 16 nt, Human
cgagucucuucuccac

SEQ ID NO: 2171433 - RNA, 14 nt, Human
cccauucuuuugua

SEQ ID NO: 2171434 - RNA, 20 nt, Human
cccauucuuccuaguuuucu

SEQ ID NO: 2171435 - RNA, 17 nt, Human
cccauucuuuuguaauu

SEQ ID NO: 2171436 - RNA, 20 nt, Human
cccauucuuuuguaauuuaa

SEQ ID NO: 2171437 - RNA, 21 nt, Human
cccauucuuuuguaauuuaaa

SEQ ID NO: 2171438 - RNA, 22 nt, Human
cccauucuuuuguaauuuaaau

SEQ ID NO: 2171439 - RNA, 14 nt, Human
cccauugcccuggu

SEQ ID NO: 2171440 - RNA, 14 nt, Human
cccauugccuccuc

SEQ ID NO: 2171441 - RNA, 17 nt, Human
cccauugccuccuccuu

SEQ ID NO: 2171442 - RNA, 20 nt, Human
ccccaaaaaccucacccgag

SEQ ID NO: 2171443 - RNA, 19 nt, Human
ccccaaaaccacagcccug

SEQ ID NO: 2171444 - RNA, 16 nt, Human
ccccaaaaccacagcc

SEQ ID NO: 2171445 - RNA, 15 nt, Human
ccccaaaaccacagc

SEQ ID NO: 2171446 - RNA, 14 nt, Human
cccauugucccucu

SEQ ID NO: 2171447 - RNA, 18 nt, Human
ccccaaaacucuccucug

SEQ ID NO: 2171448 - RNA, 11 nt, Human
ccccagcaggu

SEQ ID NO: 2171449 - RNA, 18 nt, Human
ccccagcaggugcugacu

SEQ ID NO: 2171450 - RNA, 19 nt, Human
ccccagcauuccagccccu

SEQ ID NO: 2171451 - RNA, 23 nt, Human
ccccagcaguugaaugacaacag

SEQ ID NO: 2171452 - RNA, 12 nt, Human
ccccagcaggug

SEQ ID NO: 2171453 - RNA, 9 nt, Human
ccccagcca

SEQ ID NO: 2171454 - RNA, 22 nt, Human
ccccaaaaccacagcccuguca

SEQ ID NO: 2171455 - RNA, 20 nt, Human
ccccaaaaccacagcccugu

SEQ ID NO: 2171456 - RNA, 23 nt, Human
ccccaaaaccacagcccugucag

SEQ ID NO: 2171457 - RNA, 16 nt, Human
ccccagcacugaggaa

SEQ ID NO: 2171458 - RNA, 20 nt, Human
ccccaaaacucuccucugcu

SEQ ID NO: 2171459 - RNA, 12 nt, Human
ccccagcccacc

SEQ ID NO: 2171460 - RNA, 16 nt, Human
ccccauucuuccuagu

SEQ ID NO: 2171461 - RNA, 23 nt, Human
ccccauucuuccuaguuuucucc

SEQ ID NO: 2171462 - RNA, 21 nt, Human
ccccauucuuccuaguuuucu

SEQ ID NO: 2171463 - RNA, 21 nt, Human
ccccauucugccugcccaggc

SEQ ID NO: 2171464 - RNA, 14 nt, Human
ccccagccccaucc

SEQ ID NO: 2171465 - RNA, 14 nt, Human
ccccagccccaaaa

SEQ ID NO: 2171466 - RNA, 11 nt, Human
ccccagccaga

SEQ ID NO: 2171467 - RNA, 23 nt, Human
ccccagccagauggacuccagcc

SEQ ID NO: 2171468 - RNA, 13 nt, Human
ccccagcccaagu

SEQ ID NO: 2171469 - RNA, 14 nt, Human
ccccagcccaaguc

SEQ ID NO: 2171470 - RNA, 15 nt, Human
ccccagcccaagucc

SEQ ID NO: 2171471 - RNA, 16 nt, Human
ccccagcccaagucca

SEQ ID NO: 2171472 - RNA, 10 nt, Human
ccccagcccc

SEQ ID NO: 2171473 - RNA, 12 nt, Human
ccccagccccaa

SEQ ID NO: 2171474 - RNA, 13 nt, Human
ccccgcccccugc

SEQ ID NO: 2171475 - RNA, 12 nt, Human
ccccgcccccag

SEQ ID NO: 2171476 - RNA, 16 nt, Human
ccccgcccccaguccc

SEQ ID NO: 2171477 - RNA, 17 nt, Human
ccccgcccccugcccuc

SEQ ID NO: 2171478 - RNA, 18 nt, Human
ccccgcccccugcccucc

SEQ ID NO: 2171479 - RNA, 21 nt, Human
ccccgcccccugcccuccccu

SEQ ID NO: 2171480 - RNA, 16 nt, Human
ccccgccccgccccac

SEQ ID NO: 2171481 - RNA, 18 nt, Human
ccccgccugcccucaugg

SEQ ID NO: 2171482 - RNA, 20 nt, Human
ccccgccccacauuccgaca

SEQ ID NO: 2171483 - RNA, 17 nt, Human
ccccgccccacauuccg

SEQ ID NO: 2171484 - RNA, 16 nt, Human
ccccgccccacauucc

SEQ ID NO: 2171485 - RNA, 13 nt, Human
ccccgccccacau

SEQ ID NO: 2171486 - RNA, 14 nt, Human
ccccgcccaggcug

SEQ ID NO: 2171487 - RNA, 15 nt, Human
ccccgcccaggcugg

SEQ ID NO: 2171488 - RNA, 16 nt, Human
ccccgcccaggcuggc

SEQ ID NO: 2171489 - RNA, 19 nt, Human
ccccgcccaggcuggccag

SEQ ID NO: 2171490 - RNA, 14 nt, Human
ccccgcccaggcuu

SEQ ID NO: 2171491 - RNA, 13 nt, Human
ccccgccccgccc

SEQ ID NO: 2171492 - RNA, 14 nt, Human
ccccgccuguuccc

SEQ ID NO: 2171493 - RNA, 13 nt, Human
ccccggccaccug

SEQ ID NO: 2171494 - RNA, 14 nt, Human
ccccggccaccugc

SEQ ID NO: 2171495 - RNA, 18 nt, Human
ccccggccaccugcggug

SEQ ID NO: 2171496 - RNA, 23 nt, Human
ccccgcccagcugcaccugccag

SEQ ID NO: 2171497 - RNA, 17 nt, Human
ccccgcccagcugcacc

SEQ ID NO: 2171498 - RNA, 12 nt, Human
ccccgcccaggc

SEQ ID NO: 2171499 - RNA, 22 nt, Human
cccccuucucugcuccaccaca

SEQ ID NO: 2171500 - RNA, 17 nt, Human
cccccuucucugcucca

SEQ ID NO: 2171501 - RNA, 20 nt, Human
ccccgcagaccuccccagcc

SEQ ID NO: 2171502 - RNA, 21 nt, Human
ccccgcagaccuccccagccc

SEQ ID NO: 2171503 - RNA, 23 nt, Human
ccccgcagaccuccccagccccu

SEQ ID NO: 2171504 - RNA, 16 nt, Human
cccccuucucugcucc

SEQ ID NO: 2171505 - RNA, 15 nt, Human
cccccuucucugcuc

SEQ ID NO: 2171506 - RNA, 17 nt, Human
cccccuucucccacacu

SEQ ID NO: 2171507 - RNA, 15 nt, Human
cccccuucucccaca

SEQ ID NO: 2171508 - RNA, 14 nt, Human
cccccuucucccac

SEQ ID NO: 2171509 - RNA, 13 nt, Human
cccccuucuccca

SEQ ID NO: 2171510 - RNA, 11 nt, Human
cccccuuccac

SEQ ID NO: 2171511 - RNA, 23 nt, Human
cccccuucagugcccaccaacau

SEQ ID NO: 2171512 - RNA, 15 nt, Human
cccccuucagugccc

SEQ ID NO: 2171513 - RNA, 14 nt, Human
cccccuucagugcc

SEQ ID NO: 2171514 - RNA, 14 nt, Human
cccccuuccaugga

SEQ ID NO: 2171515 - RNA, 15 nt, Human
ccccauucuuuugua

SEQ ID NO: 2171516 - RNA, 17 nt, Human
ccccauugccuccuccu

SEQ ID NO: 2171517 - RNA, 15 nt, Human
ccccauuguggucac

SEQ ID NO: 2171518 - RNA, 23 nt, Human
cccauucugccugcccaggcccc

SEQ ID NO: 2171519 - RNA, 12 nt, Human
cccauucuuccu

SEQ ID NO: 2171520 - RNA, 21 nt, Human
cccauucuuccuaguuuucuc

SEQ ID NO: 2171521 - RNA, 18 nt, Human
cccagcccagcugguggg

SEQ ID NO: 2171522 - RNA, 21 nt, Human
cccagcccauucucucuccug

SEQ ID NO: 2171523 - RNA, 20 nt, Human
cccagcuggggccaggcugg

SEQ ID NO: 2171524 - RNA, 23 nt, Human
cccagccccaaaacucuccucug

SEQ ID NO: 2171525 - RNA, 21 nt, Human
cccagcccaggguucccccag

SEQ ID NO: 2171526 - RNA, 18 nt, Human
cccagcccagggcuccug

SEQ ID NO: 2171527 - RNA, 16 nt, Human
cccagcccagagacau

SEQ ID NO: 2171528 - RNA, 11 nt, Human
cccagcccagg

SEQ ID NO: 2171529 - RNA, 21 nt, Human
cccagccccaaaacucuccuc

SEQ ID NO: 2171530 - RNA, 16 nt, Human
cccagcccagcuggug

SEQ ID NO: 2171531 - RNA, 13 nt, Human
cccagcccagcug

SEQ ID NO: 2171532 - RNA, 15 nt, Human
cccagcccagagaca

SEQ ID NO: 2171533 - RNA, 14 nt, Human
cccagcccagagac

SEQ ID NO: 2171534 - RNA, 13 nt, Human
cccagcccagaga

SEQ ID NO: 2171535 - RNA, 12 nt, Human
cccagcccagag

SEQ ID NO: 2171536 - RNA, 17 nt, Human
cccagcccacuucugcc

SEQ ID NO: 2171537 - RNA, 12 nt, Human
cccagccacccc

SEQ ID NO: 2171538 - RNA, 20 nt, Human
cccagcauuuuacugauuca

SEQ ID NO: 2171539 - RNA, 11 nt, Human
cccagcccaga

SEQ ID NO: 2171540 - RNA, 19 nt, Human
cccagcccacuucugccau

SEQ ID NO: 2171541 - RNA, 17 nt, Human
cccagccaaacccuguc

SEQ ID NO: 2171542 - RNA, 15 nt, Human
cccagcauugcuggu

SEQ ID NO: 2171543 - RNA, 18 nt, Human
cccagcauugcugguucu

SEQ ID NO: 2171544 - RNA, 22 nt, Human
cccagcauuccagccccucugg

SEQ ID NO: 2171545 - RNA, 19 nt, Human
cccagcauuccagccccuc

SEQ ID NO: 2171546 - RNA, 20 nt, Human
cccagcauuccagccccucu

SEQ ID NO: 2171547 - RNA, 21 nt, Human
cccagcauccuuuucugcaga

SEQ ID NO: 2171548 - RNA, 17 nt, Human
cccagcauaugggggcc

SEQ ID NO: 2171549 - RNA, 19 nt, Human
cccagcagguggggagggg

SEQ ID NO: 2171550 - RNA, 16 nt, Human
cccagcaguuugggag

SEQ ID NO: 2171551 - RNA, 18 nt, Human
cccagcauuccagccccu

SEQ ID NO: 2171552 - RNA, 22 nt, Human
cccagcuggugggaagcgucug

SEQ ID NO: 2171553 - RNA, 19 nt, Human
cccagcuggugggaagcgu

SEQ ID NO: 2171554 - RNA, 16 nt, Human
cccagcuggugggaag

SEQ ID NO: 2171555 - RNA, 22 nt, Human
cccagcccauucucucuccugu

SEQ ID NO: 2171556 - RNA, 19 nt, Human
cccagcugggucaggcagg

SEQ ID NO: 2171557 - RNA, 17 nt, Human
cccagcugggucaggca

SEQ ID NO: 2171558 - RNA, 18 nt, Human
cccaggcuggcgugcagu

SEQ ID NO: 2171559 - RNA, 22 nt, Human
cccagcuggggccaggcugggu

SEQ ID NO: 2171560 - RNA, 23 nt, Human
cccagcuggggccaggcuggguc

SEQ ID NO: 2171561 - RNA, 15 nt, Human
cccagcugugagccu

SEQ ID NO: 2171562 - RNA, 16 nt, Human
cccagcugugagccuu

SEQ ID NO: 2171563 - RNA, 17 nt, Human
cccagcugugagccuug

SEQ ID NO: 2171564 - RNA, 20 nt, Human
cccagggagcggaaagcagc

SEQ ID NO: 2171565 - RNA, 22 nt, Human
cccagggagcggaaagcagcuc

SEQ ID NO: 2171566 - RNA, 21 nt, Human
cccagggagcggaaagcagcu

SEQ ID NO: 2171567 - RNA, 19 nt, Human
cccaggcuggcgugcagug

SEQ ID NO: 2171568 - RNA, 20 nt, Human
cccaggcuggcgugcagugg

SEQ ID NO: 2171569 - RNA, 15 nt, Human
cccaucccacacccu

SEQ ID NO: 2171570 - RNA, 13 nt, Human
cccaucccacacc

SEQ ID NO: 2171571 - RNA, 14 nt, Human
cccauccaggcagu

SEQ ID NO: 2171572 - RNA, 14 nt, Human
cccauccucuguac

SEQ ID NO: 2171573 - RNA, 20 nt, Human
cccauccagucucccaacuu

SEQ ID NO: 2171574 - RNA, 13 nt, Human
cccauccagggcc

SEQ ID NO: 2171575 - RNA, 21 nt, Human
cccauccaguucaugagaauc

SEQ ID NO: 2171576 - RNA, 14 nt, Human
cccauccaguucau

SEQ ID NO: 2171577 - RNA, 13 nt, Human
cccauccaggcag

SEQ ID NO: 2171578 - RNA, 20 nt, Human
cccaucauucaugcuacugc

SEQ ID NO: 2171579 - RNA, 12 nt, Human
cccaucauucau

SEQ ID NO: 2171580 - RNA, 15 nt, Human
cccaucauucaugcu

SEQ ID NO: 2171581 - RNA, 20 nt, Human
cccagggccagggcccugca

SEQ ID NO: 2171582 - RNA, 23 nt, Human
cccagggccacucugccucugcc

SEQ ID NO: 2171583 - RNA, 18 nt, Human
cccagggccagggcccug

SEQ ID NO: 2171584 - RNA, 12 nt, Human
cccaucauccca

SEQ ID NO: 2171585 - RNA, 14 nt, Human
cccaucaucccagc

SEQ ID NO: 2171586 - RNA, 17 nt, Human
cccagggccagggcccu

SEQ ID NO: 2171587 - RNA, 15 nt, Human
cccagggccagggcc

SEQ ID NO: 2171588 - RNA, 18 nt, Human
cccagggccacucugccu

SEQ ID NO: 2171589 - RNA, 18 nt, Human
cccagggcacuucacaga

SEQ ID NO: 2171590 - RNA, 20 nt, Human
cccagggcacuucacagagu

SEQ ID NO: 2171591 - RNA, 22 nt, Human
cccagggcacuucacagagugu

SEQ ID NO: 2171592 - RNA, 20 nt, Human
cccauccucuguacagagcc

SEQ ID NO: 2171593 - RNA, 19 nt, Human
cccauccccauccuccagc

SEQ ID NO: 2171594 - RNA, 15 nt, Human
cccauccucuguaca

SEQ ID NO: 2171595 - RNA, 19 nt, Human
cccauccucuguacagagc

SEQ ID NO: 2171596 - RNA, 20 nt, Human
cccaacuuuguggaugucuu

SEQ ID NO: 2171597 - RNA, 14 nt, Human
cccaagccagaggc

SEQ ID NO: 2171598 - RNA, 15 nt, Human
cccaagccagaggcu

SEQ ID NO: 2171599 - RNA, 20 nt, Human
cccaagaauagaugcugacu

SEQ ID NO: 2171600 - RNA, 21 nt, Human
cccaagaauagaugcugacug

SEQ ID NO: 2171601 - RNA, 23 nt, Human
cccaagccuacuuuugccauuga

SEQ ID NO: 2171602 - RNA, 16 nt, Human
cccaagccagaggcug

SEQ ID NO: 2171603 - RNA, 20 nt, Human
cccaagcccccuccuugucu

SEQ ID NO: 2171604 - RNA, 18 nt, Human
cccaagcccgacuugcug

SEQ ID NO: 2171605 - RNA, 23 nt, Human
cccaagcccgacuugcuguuuug

SEQ ID NO: 2171606 - RNA, 16 nt, Human
cccaagccuggcaagg

SEQ ID NO: 2171607 - RNA, 17 nt, Human
cccaagcucuuguggua

SEQ ID NO: 2171608 - RNA, 13 nt, Human
cccaagcugggcc

SEQ ID NO: 2171609 - RNA, 14 nt, Human
cccaagcuuagaac

SEQ ID NO: 2171610 - RNA, 19 nt, Human
cccaagcuguuuucuucua

SEQ ID NO: 2171611 - RNA, 14 nt, Human
cccaagcugggccc

SEQ ID NO: 2171612 - RNA, 18 nt, Human
cccaagcugggccccagc

SEQ ID NO: 2171613 - RNA, 21 nt, Human
cccaagcugggccccagccca

SEQ ID NO: 2171614 - RNA, 22 nt, Human
cccaagcugggccccagcccac

SEQ ID NO: 2171615 - RNA, 17 nt, Human
cccaagcucugcuccuc

SEQ ID NO: 2171616 - RNA, 12 nt, Human
cccaagcucaga

SEQ ID NO: 2171617 - RNA, 18 nt, Human
cccaccaugucugcccca

SEQ ID NO: 2171618 - RNA, 15 nt, Human
cccacccaagcuugg

SEQ ID NO: 2171619 - RNA, 15 nt, Human
cccacccaagggccu

SEQ ID NO: 2171620 - RNA, 19 nt, Human
cccaaggaaagccccagca

SEQ ID NO: 2171621 - RNA, 14 nt, Human
cccaaggaaagccc

SEQ ID NO: 2171622 - RNA, 14 nt, Human
cccaagcuuggcag

SEQ ID NO: 2171623 - RNA, 18 nt, Human
cccaagcuuggcagccga

SEQ ID NO: 2171624 - RNA, 20 nt, Human
cccaagcuuggcagccgagc

SEQ ID NO: 2171625 - RNA, 22 nt, Human
cccaagcuuggcagccgagcuc

SEQ ID NO: 2171626 - RNA, 18 nt, Human
cccaccaucaugucuggc

SEQ ID NO: 2171627 - RNA, 22 nt, Human
cccacccccuucucugcuccac

SEQ ID NO: 2171628 - RNA, 15 nt, Human
cccaccccgcucugc

SEQ ID NO: 2171629 - RNA, 16 nt, Human
cccaccccgcucugca

SEQ ID NO: 2171630 - RNA, 13 nt, Human
cccaccccgggga

SEQ ID NO: 2171631 - RNA, 14 nt, Human
cccaccccggggac

SEQ ID NO: 2171632 - RNA, 17 nt, Human
cccaccccggggacccu

SEQ ID NO: 2171633 - RNA, 18 nt, Human
cccaccccggggacccug

SEQ ID NO: 2171634 - RNA, 19 nt, Human
cccacccccuucucugcuc

SEQ ID NO: 2171635 - RNA, 16 nt, Human
cccacccccuucucug

SEQ ID NO: 2171636 - RNA, 23 nt, Human
cccacccccuucagugcccacca

SEQ ID NO: 2171637 - RNA, 19 nt, Human
cccacccccuucagugccc

SEQ ID NO: 2171638 - RNA, 18 nt, Human
cccacccccugcccugca

SEQ ID NO: 2171639 - RNA, 19 nt, Human
cccacccccugcccugcac

SEQ ID NO: 2171640 - RNA, 19 nt, Human
cccacccccuccccagggg

SEQ ID NO: 2171641 - RNA, 13 nt, Human
cccacccccugcc

SEQ ID NO: 2171642 - RNA, 17 nt, Human
cccacccccuccccagg

SEQ ID NO: 2171643 - RNA, 15 nt, Human
cccacccccucaagc

SEQ ID NO: 2171644 - RNA, 14 nt, Human
cccacccccugccc

SEQ ID NO: 2171645 - RNA, 15 nt, Human
cccacccccugcccu

SEQ ID NO: 2171646 - RNA, 16 nt, Human
cccacccccugcccug

SEQ ID NO: 2171647 - RNA, 17 nt, Human
cccacccccugcccugc

SEQ ID NO: 2171648 - RNA, 18 nt, Human
cccacccaagggccuggc

SEQ ID NO: 2171649 - RNA, 13 nt, Human
cccacccccucaa

SEQ ID NO: 2171650 - RNA, 16 nt, Human
cccacccaagcuuggc

SEQ ID NO: 2171651 - RNA, 18 nt, Human
cccacccaagcuuggcag

SEQ ID NO: 2171652 - RNA, 22 nt, Human
cccacccaagcuuggcagccga

SEQ ID NO: 2171653 - RNA, 22 nt, Human
ccauuguuugaaacaaagaagg

SEQ ID NO: 2171654 - RNA, 21 nt, Human
ccauuguuugaaacaaagaag

SEQ ID NO: 2171655 - RNA, 12 nt, Human
ccauugugugag

SEQ ID NO: 2171656 - RNA, 15 nt, Human
ccauuguuugaaaca

SEQ ID NO: 2171657 - RNA, 13 nt, Human
ccauuuaaagcuu

SEQ ID NO: 2171658 - RNA, 13 nt, Human
cccaaccugcucu

SEQ ID NO: 2171659 - RNA, 14 nt, Human
cccaaccugcucuc

SEQ ID NO: 2171660 - RNA, 21 nt, Human
cccaaccugcucuccucuugc

SEQ ID NO: 2171661 - RNA, 11 nt, Human
cccaacugucu

SEQ ID NO: 2171662 - RNA, 12 nt, Human
cccaacucuccu

SEQ ID NO: 2171663 - RNA, 15 nt, Human
cccaacucuccugga

SEQ ID NO: 2171664 - RNA, 12 nt, Human
cccaacuguuau

SEQ ID NO: 2171665 - RNA, 15 nt, Human
cccaacugucuuuuu

SEQ ID NO: 2171666 - RNA, 13 nt, Human
cccaacugucuuu

SEQ ID NO: 2171667 - RNA, 15 nt, Human
cccaacucuccccug

SEQ ID NO: 2171668 - RNA, 20 nt, Human
cccaacucuccccugaccug

SEQ ID NO: 2171669 - RNA, 23 nt, Human
cccaaccugcucuccucuugcca

SEQ ID NO: 2171670 - RNA, 14 nt, Human
cccaaccugcugaa

SEQ ID NO: 2171671 - RNA, 16 nt, Human
ccauugucuuguucug

SEQ ID NO: 2171672 - RNA, 17 nt, Human
ccauugucuuguucugu

SEQ ID NO: 2171673 - RNA, 10 nt, Human
ccauugucuu

SEQ ID NO: 2171674 - RNA, 22 nt, Human
ccauugucccucugccccaucc

SEQ ID NO: 2171675 - RNA, 15 nt, Human
ccauugucuuguucu

SEQ ID NO: 2171676 - RNA, 19 nt, Human
ccauugucccucugcccca

SEQ ID NO: 2171677 - RNA, 17 nt, Human
ccauugucccucugccc

SEQ ID NO: 2171678 - RNA, 15 nt, Human
ccauugucccucugc

SEQ ID NO: 2171679 - RNA, 19 nt, Human
ccauuguccaauccuaugu

SEQ ID NO: 2171680 - RNA, 23 nt, Human
ccauuguaacuuggauguagcca

SEQ ID NO: 2171681 - RNA, 22 nt, Human
ccauuguggucacaggaaguag

SEQ ID NO: 2171682 - RNA, 20 nt, Human
ccauugucuuguucugugau

SEQ ID NO: 2171683 - RNA, 20 nt, Human
ccauuguggcuccuaucugu

SEQ ID NO: 2171684 - RNA, 13 nt, Human
ccauugguguuga

SEQ ID NO: 2171685 - RNA, 14 nt, Human
cccacccugggacc

SEQ ID NO: 2171686 - RNA, 20 nt, Human
cccaccccggggacccugug

SEQ ID NO: 2171687 - RNA, 21 nt, Human
cccaccccggggacccuguga

SEQ ID NO: 2171688 - RNA, 13 nt, Human
cccacccugggcc

SEQ ID NO: 2171689 - RNA, 14 nt, Human
cccacccugggccc

SEQ ID NO: 2171690 - RNA, 18 nt, Human
cccacccuggugggccaa

SEQ ID NO: 2171691 - RNA, 15 nt, Human
cccacccugggcucu

SEQ ID NO: 2171692 - RNA, 15 nt, Human
cccaccgcagacagg

SEQ ID NO: 2171693 - RNA, 18 nt, Human
cccaccgcagacaggacc

SEQ ID NO: 2171694 - RNA, 18 nt, Human
cccacuguacuugcucuu

SEQ ID NO: 2171695 - RNA, 19 nt, Human
cccacuguacuugcucuug

SEQ ID NO: 2171696 - RNA, 23 nt, Human
cccacuguacuugcucuugaugc

SEQ ID NO: 2171697 - RNA, 13 nt, Human
cccacuguccugg

SEQ ID NO: 2171698 - RNA, 14 nt, Human
cccacuguccuggg

SEQ ID NO: 2171699 - RNA, 16 nt, Human
cccacuguccugggcg

SEQ ID NO: 2171700 - RNA, 22 nt, Human
cccacuguccugggccugcaga

SEQ ID NO: 2171701 - RNA, 16 nt, Human
cccacuguccugggcc

SEQ ID NO: 2171702 - RNA, 15 nt, Human
cccacuguccugggc

SEQ ID NO: 2171703 - RNA, 14 nt, Human
ccaugggcacugcu

SEQ ID NO: 2171704 - RNA, 15 nt, Human
ccaugggcacugcug

SEQ ID NO: 2171705 - RNA, 21 nt, Human
ccaugagcaccccaaggcugc

SEQ ID NO: 2171706 - RNA, 22 nt, Human
ccaugagcaccccaaggcugcg

SEQ ID NO: 2171707 - RNA, 16 nt, Human
ccaugggcagagccca

SEQ ID NO: 2171708 - RNA, 14 nt, Human
ccaugggcagagcc

SEQ ID NO: 2171709 - RNA, 16 nt, Human
ccaugggcacugcugg

SEQ ID NO: 2171710 - RNA, 17 nt, Human
ccaugggcacugcuggg

SEQ ID NO: 2171711 - RNA, 20 nt, Human
ccaugggcacugcugggugg

SEQ ID NO: 2171712 - RNA, 22 nt, Human
ccaugggcacugcuggguggcc

SEQ ID NO: 2171713 - RNA, 18 nt, Human
ccaugggcacugugggua

SEQ ID NO: 2171714 - RNA, 13 nt, Human
ccaugagccucag

SEQ ID NO: 2171715 - RNA, 16 nt, Human
ccaugaggaacaaggc

SEQ ID NO: 2171716 - RNA, 17 nt, Human
ccaugaggaacaaggca

SEQ ID NO: 2171717 - RNA, 18 nt, Human
ccaugaggaacaaggcaa

SEQ ID NO: 2171718 - RNA, 23 nt, Human
ccaugagaugauacauccaaagc

SEQ ID NO: 2171719 - RNA, 22 nt, Human
ccaugagaauaagagaaagaaa

SEQ ID NO: 2171720 - RNA, 18 nt, Human
ccaugacuugagaaacaa

SEQ ID NO: 2171721 - RNA, 13 nt, Human
ccaugagaagagg

SEQ ID NO: 2171722 - RNA, 17 nt, Human
ccaugagaagagggccu

SEQ ID NO: 2171723 - RNA, 18 nt, Human
ccaugagaagagggccug

SEQ ID NO: 2171724 - RNA, 19 nt, Human
ccaugagaagagggccugu

SEQ ID NO: 2171725 - RNA, 21 nt, Human
ccaugagaagagggccugugg

SEQ ID NO: 2171726 - RNA, 16 nt, Human
ccaugaccuuacauuu

SEQ ID NO: 2171727 - RNA, 17 nt, Human
ccaugucugccccauca

SEQ ID NO: 2171728 - RNA, 13 nt, Human
ccaugucugcauu

SEQ ID NO: 2171729 - RNA, 20 nt, Human
ccaugucucugagcauuaga

SEQ ID NO: 2171730 - RNA, 16 nt, Human
ccaugucucucagaau

SEQ ID NO: 2171731 - RNA, 15 nt, Human
ccaugucggccucua

SEQ ID NO: 2171732 - RNA, 13 nt, Human
ccaugucggccuc

SEQ ID NO: 2171733 - RNA, 14 nt, Human
ccaugucggccucu

SEQ ID NO: 2171734 - RNA, 15 nt, Human
ccaugucucgacuca

SEQ ID NO: 2171735 - RNA, 14 nt, Human
ccaugucucgacuc

SEQ ID NO: 2171736 - RNA, 20 nt, Human
ccaugguacccccuucuggg

SEQ ID NO: 2171737 - RNA, 19 nt, Human
ccaugucgccucugcauuc

SEQ ID NO: 2171738 - RNA, 19 nt, Human
ccaugguacccccuucugg

SEQ ID NO: 2171739 - RNA, 18 nt, Human
ccaugucgcgcucagcau

SEQ ID NO: 2171740 - RNA, 17 nt, Human
ccaugggccuccugugu

SEQ ID NO: 2171741 - RNA, 17 nt, Human
ccaugggcagagcccaa

SEQ ID NO: 2171742 - RNA, 13 nt, Human
ccaugggcucuga

SEQ ID NO: 2171743 - RNA, 13 nt, Human
ccaugggcuucac

SEQ ID NO: 2171744 - RNA, 16 nt, Human
ccaugggcuucacugu

SEQ ID NO: 2171745 - RNA, 19 nt, Human
ccaugggcuucacuguaua

SEQ ID NO: 2171746 - RNA, 20 nt, Human
ccaugggcuucacuguauaa

SEQ ID NO: 2171747 - RNA, 21 nt, Human
ccaugggcuucacuguauaaa

SEQ ID NO: 2171748 - RNA, 11 nt, Human
ccauggggaag

SEQ ID NO: 2171749 - RNA, 14 nt, Human
ccaugggggcaggg

SEQ ID NO: 2171750 - RNA, 13 nt, Human
ccaugggggcagg

SEQ ID NO: 2171751 - RNA, 20 nt, Human
ccauggggagggauucuggu

SEQ ID NO: 2171752 - RNA, 12 nt, Human
ccauggggaggg

SEQ ID NO: 2171753 - RNA, 18 nt, Human
ccauggggagggauucug

SEQ ID NO: 2171754 - RNA, 15 nt, Human
ccaugguacccccuu

SEQ ID NO: 2171755 - RNA, 16 nt, Human
ccaugguacccccuuc

SEQ ID NO: 2171756 - RNA, 18 nt, Human
ccaugguacccccuucug

SEQ ID NO: 2171757 - RNA, 23 nt, Human
ccaugggguaggaggaugggcuc

SEQ ID NO: 2171758 - RNA, 14 nt, Human
ccaugguacccccu

SEQ ID NO: 2171759 - RNA, 13 nt, Human
ccaguccuuccac

SEQ ID NO: 2171760 - RNA, 17 nt, Human
ccaguccuuccaccucg

SEQ ID NO: 2171761 - RNA, 18 nt, Human
ccagucgauaucucacuu

SEQ ID NO: 2171762 - RNA, 14 nt, Human
ccagucgcgcugcc

SEQ ID NO: 2171763 - RNA, 15 nt, Human
ccagucgcgcugccu

SEQ ID NO: 2171764 - RNA, 16 nt, Human
ccagucgcgcugccug

SEQ ID NO: 2171765 - RNA, 19 nt, Human
ccagucgcgcugccugugu

SEQ ID NO: 2171766 - RNA, 17 nt, Human
ccagucgcgcugccugu

SEQ ID NO: 2171767 - RNA, 18 nt, Human
ccagucgcgcugccugug

SEQ ID NO: 2171768 - RNA, 22 nt, Human
ccaguccugccuggccaggcag

SEQ ID NO: 2171769 - RNA, 21 nt, Human
ccaguccugccuggccaggca

SEQ ID NO: 2171770 - RNA, 19 nt, Human
ccaguccugccuggccagg

SEQ ID NO: 2171771 - RNA, 18 nt, Human
ccaguccugccuggccag

SEQ ID NO: 2171772 - RNA, 12 nt, Human
ccaguccuggcc

SEQ ID NO: 2171773 - RNA, 14 nt, Human
ccaguauucuuguc

SEQ ID NO: 2171774 - RNA, 13 nt, Human
ccaguccuggccu

SEQ ID NO: 2171775 - RNA, 15 nt, Human
ccaguccuggccugg

SEQ ID NO: 2171776 - RNA, 20 nt, Human
ccaguccuggccuggcuucu

SEQ ID NO: 2171777 - RNA, 17 nt, Human
ccaguccugccuggcca

SEQ ID NO: 2171778 - RNA, 16 nt, Human
ccaguccugccuggcc

SEQ ID NO: 2171779 - RNA, 15 nt, Human
ccaguccugccuggc

SEQ ID NO: 2171780 - RNA, 14 nt, Human
ccaguccugccugg

SEQ ID NO: 2171781 - RNA, 22 nt, Human
ccaguauucuagguagugcccu

SEQ ID NO: 2171782 - RNA, 12 nt, Human
ccaguauucuug

SEQ ID NO: 2171783 - RNA, 19 nt, Human
ccagucaccccggccaccu

SEQ ID NO: 2171784 - RNA, 17 nt, Human
ccagucaccccggccac

SEQ ID NO: 2171785 - RNA, 18 nt, Human
ccagucaccccggccacc

SEQ ID NO: 2171786 - RNA, 16 nt, Human
ccaggggaugggaggu

SEQ ID NO: 2171787 - RNA, 23 nt, Human
ccaggcucuuuggggucagccag

SEQ ID NO: 2171788 - RNA, 15 nt, Human
ccaggggcaggcaca

SEQ ID NO: 2171789 - RNA, 16 nt, Human
ccaggggcaggcacag

SEQ ID NO: 2171790 - RNA, 17 nt, Human
ccaggggcaggcacagc

SEQ ID NO: 2171791 - RNA, 15 nt, Human
ccaggggccaugaau

SEQ ID NO: 2171792 - RNA, 18 nt, Human
ccaggggcaggcacagca

SEQ ID NO: 2171793 - RNA, 19 nt, Human
ccaggggcaggcacagcac

SEQ ID NO: 2171794 - RNA, 21 nt, Human
ccaggggcauguauuggccug

SEQ ID NO: 2171795 - RNA, 22 nt, Human
ccaggggcauguauuggccugg

SEQ ID NO: 2171796 - RNA, 23 nt, Human
ccaggggcauguauuggccugga

SEQ ID NO: 2171797 - RNA, 19 nt, Human
ccaggggcccaaggcggcc

SEQ ID NO: 2171798 - RNA, 22 nt, Human
ccaggggcccaaggcggccccu

SEQ ID NO: 2171799 - RNA, 18 nt, Human
ccaggggcccacagggaa

SEQ ID NO: 2171800 - RNA, 19 nt, Human
ccaggggcccacagggaac

SEQ ID NO: 2171801 - RNA, 12 nt, Human
ccaggggccccu

SEQ ID NO: 2171802 - RNA, 14 nt, Human
ccaggggccccucc

SEQ ID NO: 2171803 - RNA, 17 nt, Human
ccaggggccccuccagc

SEQ ID NO: 2171804 - RNA, 22 nt, Human
ccaggggccccuccagcuugug

SEQ ID NO: 2171805 - RNA, 13 nt, Human
ccaggcugccaag

SEQ ID NO: 2171806 - RNA, 22 nt, Human
ccaggcugagccucagucuccc

SEQ ID NO: 2171807 - RNA, 19 nt, Human
ccaggcugagccucagucu

SEQ ID NO: 2171808 - RNA, 17 nt, Human
ccaggcugagccucagu

SEQ ID NO: 2171809 - RNA, 16 nt, Human
ccaggcugagccucag

SEQ ID NO: 2171810 - RNA, 14 nt, Human
ccaggcugagccuc

SEQ ID NO: 2171811 - RNA, 13 nt, Human
ccaggcugagccu

SEQ ID NO: 2171812 - RNA, 23 nt, Human
ccaggcugaccacagcacagcca

SEQ ID NO: 2171813 - RNA, 21 nt, Human
ccaggcugaccacagcacagc

SEQ ID NO: 2171814 - RNA, 20 nt, Human
ccaggggugggacacccugu

SEQ ID NO: 2171815 - RNA, 21 nt, Human
ccaggggugggacacccugug

SEQ ID NO: 2171816 - RNA, 22 nt, Human
ccaggggugggacacccuguga

SEQ ID NO: 2171817 - RNA, 13 nt, Human
ccaguaucuugaa

SEQ ID NO: 2171818 - RNA, 19 nt, Human
ccaguaucuugaagacuuu

SEQ ID NO: 2171819 - RNA, 22 nt, Human
ccaguaucuugaagacuuuucu

SEQ ID NO: 2171820 - RNA, 16 nt, Human
ccagucaccccggcca

SEQ ID NO: 2171821 - RNA, 18 nt, Human
ccaggggccccuccagcu

SEQ ID NO: 2171822 - RNA, 19 nt, Human
ccaggggccccuccagcuu

SEQ ID NO: 2171823 - RNA, 20 nt, Human
ccaggggccccuccagcuug

SEQ ID NO: 2171824 - RNA, 15 nt, Human
ccaguaugagcccua

SEQ ID NO: 2171825 - RNA, 19 nt, Human
ccaggcagggccaacccuu

SEQ ID NO: 2171826 - RNA, 23 nt, Human
ccaggcagggccaacccuucucc

SEQ ID NO: 2171827 - RNA, 14 nt, Human
ccaggcaggcugug

SEQ ID NO: 2171828 - RNA, 20 nt, Human
ccaggcaggcuaaggcgugg

SEQ ID NO: 2171829 - RNA, 18 nt, Human
ccaggcaggcuaaggcgu

SEQ ID NO: 2171830 - RNA, 21 nt, Human
ccaggcagaucugugccccau

SEQ ID NO: 2171831 - RNA, 20 nt, Human
ccaggcagaucugugcccca

SEQ ID NO: 2171832 - RNA, 23 nt, Human
ccaggcagaucugugccccaugc

SEQ ID NO: 2171833 - RNA, 20 nt, Human
ccaggcugaccacagcacag

SEQ ID NO: 2171834 - RNA, 19 nt, Human
ccaggcugaccacagcaca

SEQ ID NO: 2171835 - RNA, 18 nt, Human
ccaggcugaccacagcac

SEQ ID NO: 2171836 - RNA, 17 nt, Human
ccaggcugaccacagca

SEQ ID NO: 2171837 - RNA, 16 nt, Human
ccaggcugaccacagc

SEQ ID NO: 2171838 - RNA, 15 nt, Human
ccaggcugaccacag

SEQ ID NO: 2171839 - RNA, 20 nt, Human
ccaggcugaagcagguuccc

SEQ ID NO: 2171840 - RNA, 13 nt, Human
ccaggcugaagca

SEQ ID NO: 2171841 - RNA, 19 nt, Human
ccaggcagguagccagggg

SEQ ID NO: 2171842 - RNA, 14 nt, Human
ccaggcucugugcu

SEQ ID NO: 2171843 - RNA, 15 nt, Human
ccaggcucugugcug

SEQ ID NO: 2171844 - RNA, 19 nt, Human
ccaggcucugugcugaccc

SEQ ID NO: 2171845 - RNA, 20 nt, Human
ccaggcucugugcugacccu

SEQ ID NO: 2171846 - RNA, 22 nt, Human
ccaggcucugugcugacccucc

SEQ ID NO: 2171847 - RNA, 23 nt, Human
ccaggcucugugcugacccuccu

SEQ ID NO: 2171848 - RNA, 22 nt, Human
ccaggcucuuuggggucagcca

SEQ ID NO: 2171849 - RNA, 13 nt, Human
ccaggcucugugc

SEQ ID NO: 2171850 - RNA, 14 nt, Human
ccaggcagguagcc

SEQ ID NO: 2171851 - RNA, 18 nt, Human
ccaggcagguagccaggg

SEQ ID NO: 2171852 - RNA, 21 nt, Human
ccaggcaggcuaaggcgugga

SEQ ID NO: 2171853 - RNA, 15 nt, Human
ccaggcagggguggg

SEQ ID NO: 2171854 - RNA, 21 nt, Human
ccaggcaggggugggggugga

SEQ ID NO: 2171855 - RNA, 22 nt, Human
ccaggcagggguggggguggag

SEQ ID NO: 2171856 - RNA, 18 nt, Human
ccaggaguuugagaccag

SEQ ID NO: 2171857 - RNA, 17 nt, Human
ccaggaguuugagacca

SEQ ID NO: 2171858 - RNA, 22 nt, Human
ccaggaguuugaggcugcagcg

SEQ ID NO: 2171859 - RNA, 21 nt, Human
ccaggaguuugaggcugcagc

SEQ ID NO: 2171860 - RNA, 20 nt, Human
ccaggaguuugaggcugcag

SEQ ID NO: 2171861 - RNA, 17 nt, Human
ccaggaguuugaggcug

SEQ ID NO: 2171862 - RNA, 13 nt, Human
ccagcggccccuc

SEQ ID NO: 2171863 - RNA, 23 nt, Human
ccagcgggaauggcagcugccac

SEQ ID NO: 2171864 - RNA, 17 nt, Human
ccagcgggaauggcagc

SEQ ID NO: 2171865 - RNA, 13 nt, Human
ccagcggcugagu

SEQ ID NO: 2171866 - RNA, 14 nt, Human
ccagcggccccucc

SEQ ID NO: 2171867 - RNA, 15 nt, Human
ccagcggccccuccc

SEQ ID NO: 2171868 - RNA, 22 nt, Human
ccagcgccuaguggggucuccc

SEQ ID NO: 2171869 - RNA, 16 nt, Human
ccagcgcccgcugggc

SEQ ID NO: 2171870 - RNA, 17 nt, Human
ccagcgcccgcugggcu

SEQ ID NO: 2171871 - RNA, 18 nt, Human
ccagcgcccgcugggcug

SEQ ID NO: 2171872 - RNA, 19 nt, Human
ccagcgcccgcugggcuga

SEQ ID NO: 2171873 - RNA, 22 nt, Human
ccagcgcccgcugggcugagcc

SEQ ID NO: 2171874 - RNA, 13 nt, Human
ccagcguccuccu

SEQ ID NO: 2171875 - RNA, 15 nt, Human
ccagcgucccagucu

SEQ ID NO: 2171876 - RNA, 21 nt, Human
ccagcgucccagucucuggca

SEQ ID NO: 2171877 - RNA, 20 nt, Human
ccagcuugaaaccuucacuu

SEQ ID NO: 2171878 - RNA, 17 nt, Human
ccagcguccuccucugu

SEQ ID NO: 2171879 - RNA, 23 nt, Human
ccagcuugcucuucagugggaga

SEQ ID NO: 2171880 - RNA, 16 nt, Human
ccagcuugcucuucag

SEQ ID NO: 2171881 - RNA, 14 nt, Human
ccagcuugcucuuc

SEQ ID NO: 2171882 - RNA, 22 nt, Human
ccagcgucccagucucuggcag

SEQ ID NO: 2171883 - RNA, 18 nt, Human
ccagcuugggcccagcug

SEQ ID NO: 2171884 - RNA, 19 nt, Human
ccagcuugggcccagcugg

SEQ ID NO: 2171885 - RNA, 21 nt, Human
ccagcuugggcccagcugggc

SEQ ID NO: 2171886 - RNA, 22 nt, Human
ccagcuugggcccagcugggcu

SEQ ID NO: 2171887 - RNA, 24 nt, Human
ccagcuugggcccagcugggcucu

SEQ ID NO: 2171888 - RNA, 23 nt, Human
ccagcuugggcccagcugggcuc

SEQ ID NO: 2171889 - RNA, 17 nt, Human
ccagcuuguuauuuaua

SEQ ID NO: 2171890 - RNA, 15 nt, Human
ccagcuuguuauuua

SEQ ID NO: 2171891 - RNA, 16 nt, Human
ccagcuuguuauuuau

SEQ ID NO: 2171892 - RNA, 20 nt, Human
ccaggaaaggcuccaggagc

SEQ ID NO: 2171893 - RNA, 17 nt, Human
ccaggaaaggcuccagg

SEQ ID NO: 2171894 - RNA, 17 nt, Human
ccagcuuguggagcccc

SEQ ID NO: 2171895 - RNA, 18 nt, Human
ccagcuuguggagcccca

SEQ ID NO: 2171896 - RNA, 19 nt, Human
ccagcuuguggagccccac

SEQ ID NO: 2171897 - RNA, 22 nt, Human
ccagcuuguggagccccacacu

SEQ ID NO: 2171898 - RNA, 23 nt, Human
ccagcuuguggagccccacacug

SEQ ID NO: 2171899 - RNA, 18 nt, Human
ccaggaaaggcuccagga

SEQ ID NO: 2171900 - RNA, 19 nt, Human
ccaggaaaggcuccaggag

SEQ ID NO: 2171901 - RNA, 12 nt, Human
ccagcagccugg

SEQ ID NO: 2171902 - RNA, 11 nt, Human
ccagcagccug

SEQ ID NO: 2171903 - RNA, 12 nt, Human
ccagcagcccua

SEQ ID NO: 2171904 - RNA, 21 nt, Human
ccagcagcccuaaggaucucu

SEQ ID NO: 2171905 - RNA, 22 nt, Human
ccagcagaaaugccuuacccuc

SEQ ID NO: 2171906 - RNA, 17 nt, Human
ccagcagaaaugccuua

SEQ ID NO: 2171907 - RNA, 16 nt, Human
ccagcagaaaugccuu

SEQ ID NO: 2171908 - RNA, 13 nt, Human
ccagcagccugga

SEQ ID NO: 2171909 - RNA, 23 nt, Human
ccagccccauccucuguacagag

SEQ ID NO: 2171910 - RNA, 13 nt, Human
ccagcccccacag

SEQ ID NO: 2171911 - RNA, 16 nt, Human
ccagcccccacagugc

SEQ ID NO: 2171912 - RNA, 18 nt, Human
ccagcccccacagugcug

SEQ ID NO: 2171913 - RNA, 21 nt, Human
ccagcccccacagugcugucu

SEQ ID NO: 2171914 - RNA, 15 nt, Human
ccagcccccuuuggg

SEQ ID NO: 2171915 - RNA, 13 nt, Human
ccagccccuggau

SEQ ID NO: 2171916 - RNA, 20 nt, Human
ccagcccccuuugggcccag

SEQ ID NO: 2171917 - RNA, 21 nt, Human
ccagcccccuuugggcccagg

SEQ ID NO: 2171918 - RNA, 22 nt, Human
ccagcccccuuugggcccaggg

SEQ ID NO: 2171919 - RNA, 23 nt, Human
ccagcccccuuugggcccaggga

SEQ ID NO: 2171920 - RNA, 14 nt, Human
ccagccccuggaug

SEQ ID NO: 2171921 - RNA, 15 nt, Human
ccagccccuggaugc

SEQ ID NO: 2171922 - RNA, 21 nt, Human
ccagcgagcccugguggcagu

SEQ ID NO: 2171923 - RNA, 18 nt, Human
ccagccccuucugaccca

SEQ ID NO: 2171924 - RNA, 16 nt, Human
ccagcgaggaggcucc

SEQ ID NO: 2171925 - RNA, 17 nt, Human
ccagccccggcccuggg

SEQ ID NO: 2171926 - RNA, 18 nt, Human
ccagccccggcccugggc

SEQ ID NO: 2171927 - RNA, 14 nt, Human
ccagcgcccgcugg

SEQ ID NO: 2171928 - RNA, 18 nt, Human
ccagccccuggaugcagc

SEQ ID NO: 2171929 - RNA, 15 nt, Human
ccagccccuucugac

SEQ ID NO: 2171930 - RNA, 16 nt, Human
ccagccccuucugacc

SEQ ID NO: 2171931 - RNA, 17 nt, Human
ccagccccuucugaccc

SEQ ID NO: 2171932 - RNA, 19 nt, Human
ccagaucuggucccuugca

SEQ ID NO: 2171933 - RNA, 19 nt, Human
ccagaugaggcuggccaag

SEQ ID NO: 2171934 - RNA, 13 nt, Human
ccagaugcaccag

SEQ ID NO: 2171935 - RNA, 14 nt, Human
ccagaugcaccagc

SEQ ID NO: 2171936 - RNA, 19 nt, Human
ccagaugaugggggagggg

SEQ ID NO: 2171937 - RNA, 19 nt, Human
ccagauauucaagucaccu

SEQ ID NO: 2171938 - RNA, 20 nt, Human
ccagauaccagccccuguau

SEQ ID NO: 2171939 - RNA, 21 nt, Human
ccagauacuucccauuuugga

SEQ ID NO: 2171940 - RNA, 13 nt, Human
ccagauaccagcc

SEQ ID NO: 2171941 - RNA, 16 nt, Human
ccagauaccagccccu

SEQ ID NO: 2171942 - RNA, 21 nt, Human
ccagauacacccaaaguauca

SEQ ID NO: 2171943 - RNA, 14 nt, Human
ccagauaagaaugc

SEQ ID NO: 2171944 - RNA, 22 nt, Human
ccagauaaaauuauagauggga

SEQ ID NO: 2171945 - RNA, 20 nt, Human
ccagaguuuuuauguagcag

SEQ ID NO: 2171946 - RNA, 19 nt, Human
ccagauaaaauuauagaug

SEQ ID NO: 2171947 - RNA, 13 nt, Human
ccagaucuggucc

SEQ ID NO: 2171948 - RNA, 19 nt, Human
ccagaucggaucuguugca

SEQ ID NO: 2171949 - RNA, 22 nt, Human
ccagaucggaucuguugcaaac

SEQ ID NO: 2171950 - RNA, 18 nt, Human
ccagaucaccagcccggc

SEQ ID NO: 2171951 - RNA, 21 nt, Human
ccagaucaccagcccggccug

SEQ ID NO: 2171952 - RNA, 23 nt, Human
ccagagagagaagugccccugcu

SEQ ID NO: 2171953 - RNA, 18 nt, Human
ccagagagcaacucugag

SEQ ID NO: 2171954 - RNA, 22 nt, Human
ccagagagagaagugccccugc

SEQ ID NO: 2171955 - RNA, 21 nt, Human
ccagagagagaagugccccug

SEQ ID NO: 2171956 - RNA, 20 nt, Human
ccagagagcaacucugagau

SEQ ID NO: 2171957 - RNA, 21 nt, Human
ccagagagcaacucugagauc

SEQ ID NO: 2171958 - RNA, 22 nt, Human
ccagagagccuggugcugcugc

SEQ ID NO: 2171959 - RNA, 21 nt, Human
ccagagagccuggugcugcug

SEQ ID NO: 2171960 - RNA, 16 nt, Human
ccagagaggaaucaga

SEQ ID NO: 2171961 - RNA, 19 nt, Human
ccagagagggacugacacc

SEQ ID NO: 2171962 - RNA, 23 nt, Human
ccagagagggacugacacccaug

SEQ ID NO: 2171963 - RNA, 13 nt, Human
ccagagagggugg

SEQ ID NO: 2171964 - RNA, 23 nt, Human
ccagagggguggguuccucuucc

SEQ ID NO: 2171965 - RNA, 16 nt, Human
ccagagggugggcuuc

SEQ ID NO: 2171966 - RNA, 17 nt, Human
ccagagguaacagaaca

SEQ ID NO: 2171967 - RNA, 18 nt, Human
ccagagguaacagaacag

SEQ ID NO: 2171968 - RNA, 19 nt, Human
ccagagguaacagaacagc

SEQ ID NO: 2171969 - RNA, 21 nt, Human
ccagagguaacagaacagcuu

SEQ ID NO: 2171970 - RNA, 23 nt, Human
ccagagguaacagaacagcuuca

SEQ ID NO: 2171971 - RNA, 19 nt, Human
ccagaggugggcagguggu

SEQ ID NO: 2171972 - RNA, 17 nt, Human
ccagaguuccugcggag

SEQ ID NO: 2171973 - RNA, 11 nt, Human
ccagaguugcu

SEQ ID NO: 2171974 - RNA, 12 nt, Human
ccagaguugcug

SEQ ID NO: 2171975 - RNA, 15 nt, Human
ccagaguugcuggga

SEQ ID NO: 2171976 - RNA, 21 nt, Human
ccagaguugcugggagcugaa

SEQ ID NO: 2171977 - RNA, 22 nt, Human
ccagagguaacagaacagcuuc

SEQ ID NO: 2171978 - RNA, 14 nt, Human
ccagaggugggcag

SEQ ID NO: 2171979 - RNA, 15 nt, Human
ccagaggugggcagg

SEQ ID NO: 2171980 - RNA, 16 nt, Human
ccagaggugggcaggu

SEQ ID NO: 2171981 - RNA, 17 nt, Human
ccagaggugggcaggug

SEQ ID NO: 2171982 - RNA, 18 nt, Human
ccagaggugggcaggugg

SEQ ID NO: 2171983 - RNA, 22 nt, Human
ccagaggugggcaggugguggc

SEQ ID NO: 2171984 - RNA, 14 nt, Human
ccagacucucugug

SEQ ID NO: 2171985 - RNA, 22 nt, Human
ccagacugcuuccaauuuucug

SEQ ID NO: 2171986 - RNA, 12 nt, Human
ccagacugugga

SEQ ID NO: 2171987 - RNA, 13 nt, Human
ccagacuguggag

SEQ ID NO: 2171988 - RNA, 16 nt, Human
ccagacuguggagaaa

SEQ ID NO: 2171989 - RNA, 14 nt, Human
ccagacuuccuuga

SEQ ID NO: 2171990 - RNA, 13 nt, Human
ccagacuuccuug

SEQ ID NO: 2171991 - RNA, 15 nt, Human
ccagacuuccuugag

SEQ ID NO: 2171992 - RNA, 18 nt, Human
ccagacuguggagaaaua

SEQ ID NO: 2171993 - RNA, 13 nt, Human
ccagacuguguau

SEQ ID NO: 2171994 - RNA, 17 nt, Human
ccagacuguguauucau

SEQ ID NO: 2171995 - RNA, 15 nt, Human
ccagacuguuagaaa

SEQ ID NO: 2171996 - RNA, 22 nt, Human
ccagacuuuacaugacacagcu

SEQ ID NO: 2171997 - RNA, 16 nt, Human
ccagagaaaggggagc

SEQ ID NO: 2171998 - RNA, 20 nt, Human
ccagagaaaggggagcccac

SEQ ID NO: 2171999 - RNA, 19 nt, Human
ccagagaaaggggagccca

SEQ ID NO: 2172000 - RNA, 21 nt, Human
ccagacuuuacaugacacagc

SEQ ID NO: 2172001 - RNA, 20 nt, Human
ccagacuuuacaugacacag

SEQ ID NO: 2172002 - RNA, 23 nt, Human
ccagagaagcaucggagggaauu

SEQ ID NO: 2172003 - RNA, 23 nt, Human
ccagagaaaggggagcccacugu

SEQ ID NO: 2172004 - RNA, 12 nt, Human
ccagagaagcua

SEQ ID NO: 2172005 - RNA, 14 nt, Human
ccagagaagccccu

SEQ ID NO: 2172006 - RNA, 18 nt, Human
ccagagaagccccuuccc

SEQ ID NO: 2172007 - RNA, 20 nt, Human
ccagagaagccccuucccca

SEQ ID NO: 2172008 - RNA, 14 nt, Human
ccagagaagugaca

SEQ ID NO: 2172009 - RNA, 15 nt, Human
ccagagaagugacag

SEQ ID NO: 2172010 - RNA, 16 nt, Human
ccagagaagugacagg

SEQ ID NO: 2172011 - RNA, 23 nt, Human
ccagagacaggaaaauccucugg

SEQ ID NO: 2172012 - RNA, 23 nt, Human
ccagagacauacuugaagggcca

SEQ ID NO: 2172013 - RNA, 22 nt, Human
ccagagacauacuugaagggcc

SEQ ID NO: 2172014 - RNA, 20 nt, Human
ccagagacauacuugaaggg

SEQ ID NO: 2172015 - RNA, 18 nt, Human
ccagagaccguccucacc

SEQ ID NO: 2172016 - RNA, 19 nt, Human
ccagagaccguccucaccc

SEQ ID NO: 2172017 - RNA, 21 nt, Human
ccagagaccguccucaccccu

SEQ ID NO: 2172018 - RNA, 19 nt, Human
ccagagacggaagccuuuu

SEQ ID NO: 2172019 - RNA, 15 nt, Human
ccagagacucagagg

SEQ ID NO: 2172020 - RNA, 20 nt, Human
ccagagagagaagugccccu

SEQ ID NO: 2172021 - RNA, 19 nt, Human
ccagagagagaagugcccc

SEQ ID NO: 2172022 - RNA, 18 nt, Human
ccagagagagaagugccc

SEQ ID NO: 2172023 - RNA, 14 nt, Human
ccagagagagaagu

SEQ ID NO: 2172024 - RNA, 12 nt, Human
ccagagacagga

SEQ ID NO: 2172025 - RNA, 22 nt, Human
ccagagaagugacagggaagcu

SEQ ID NO: 2172026 - RNA, 16 nt, Human
ccagagaauucuuaga

SEQ ID NO: 2172027 - RNA, 17 nt, Human
ccagagaagugacaggg

SEQ ID NO: 2172028 - RNA, 18 nt, Human
ccagagaagugacaggga

SEQ ID NO: 2172029 - RNA, 19 nt, Human
ccagagaagugacagggaa

SEQ ID NO: 2172030 - RNA, 20 nt, Human
ccagagaagugacagggaag

SEQ ID NO: 2172031 - RNA, 15 nt, Human
ccagagacaggaaaa

SEQ ID NO: 2172032 - RNA, 14 nt, Human
ccagagacaggaaa

SEQ ID NO: 2172033 - RNA, 13 nt, Human
ccagagacaggaa

SEQ ID NO: 2172034 - RNA, 18 nt, Human
ccagagacauacuugaag

SEQ ID NO: 2172035 - RNA, 17 nt, Human
ccagagacauacuugaa

SEQ ID NO: 2172036 - RNA, 16 nt, Human
ccagagacacaagccu

SEQ ID NO: 2172037 - RNA, 18 nt, Human
ccagagacacaagccuuc

SEQ ID NO: 2172038 - RNA, 15 nt, Human
ccagacggcacccac

SEQ ID NO: 2172039 - RNA, 19 nt, Human
ccagacgguucaccagccu

SEQ ID NO: 2172040 - RNA, 18 nt, Human
ccagacgguucaccagcc

SEQ ID NO: 2172041 - RNA, 17 nt, Human
ccagacgguucaccagc

SEQ ID NO: 2172042 - RNA, 16 nt, Human
ccagacggcacccacc

SEQ ID NO: 2172043 - RNA, 16 nt, Human
ccagacgguucaccag

SEQ ID NO: 2172044 - RNA, 20 nt, Human
ccagacgguucaccagccuc

SEQ ID NO: 2172045 - RNA, 17 nt, Human
ccagacguaggggaggg

SEQ ID NO: 2172046 - RNA, 18 nt, Human
ccagacuccaccaagccu

SEQ ID NO: 2172047 - RNA, 14 nt, Human
ccagacuccaccaa

SEQ ID NO: 2172048 - RNA, 24 nt, Human
ccagaccugauccuggaggcccag

SEQ ID NO: 2172049 - RNA, 14 nt, Human
ccagaccugccucu

SEQ ID NO: 2172050 - RNA, 23 nt, Human
ccagaccuguuagcagacaggcc

SEQ ID NO: 2172051 - RNA, 21 nt, Human
ccagaccuguuagcagacagg

SEQ ID NO: 2172052 - RNA, 20 nt, Human
ccagaccuguuagcagacag

SEQ ID NO: 2172053 - RNA, 21 nt, Human
ccagaccugccucuucccccu

SEQ ID NO: 2172054 - RNA, 18 nt, Human
ccagacgcacgugggucu

SEQ ID NO: 2172055 - RNA, 23 nt, Human
ccagacgcacgugggucuucagg

SEQ ID NO: 2172056 - RNA, 18 nt, Human
ccagaccuuugaggauau

SEQ ID NO: 2172057 - RNA, 14 nt, Human
ccagaccuuuuauc

SEQ ID NO: 2172058 - RNA, 15 nt, Human
ccagaccuucuagga

SEQ ID NO: 2172059 - RNA, 19 nt, Human
ccagaccuuguucacacuc

SEQ ID NO: 2172060 - RNA, 20 nt, Human
ccagacgaugucuucauacc

SEQ ID NO: 2172061 - RNA, 13 nt, Human
ccagacgaugucu

SEQ ID NO: 2172062 - RNA, 17 nt, Human
ccagacccggcugcgug

SEQ ID NO: 2172063 - RNA, 16 nt, Human
ccagacccggcugcgu

SEQ ID NO: 2172064 - RNA, 15 nt, Human
ccagaccugagcucc

SEQ ID NO: 2172065 - RNA, 13 nt, Human
ccagaccugagcu

SEQ ID NO: 2172066 - RNA, 23 nt, Human
ccagaccugauccuggaggccca

SEQ ID NO: 2172067 - RNA, 21 nt, Human
ccagaccugauccuggaggcc

SEQ ID NO: 2172068 - RNA, 20 nt, Human
ccagaccugauccuggaggc

SEQ ID NO: 2172069 - RNA, 19 nt, Human
ccagaccugauccuggagg

SEQ ID NO: 2172070 - RNA, 18 nt, Human
ccagaccugauccuggag

SEQ ID NO: 2172071 - RNA, 17 nt, Human
ccagaccugauccugga

SEQ ID NO: 2172072 - RNA, 16 nt, Human
ccagaccugauccugg

SEQ ID NO: 2172073 - RNA, 15 nt, Human
ccagaccugauccug

SEQ ID NO: 2172074 - RNA, 22 nt, Human
ccacuuuuguucuugguuugua

SEQ ID NO: 2172075 - RNA, 21 nt, Human
ccacuuuuguucuugguuugu

SEQ ID NO: 2172076 - RNA, 15 nt, Human
ccacuuuuguucuug

SEQ ID NO: 2172077 - RNA, 14 nt, Human
ccacuuuuguucuu

SEQ ID NO: 2172078 - RNA, 21 nt, Human
ccacuuugguacauggccagu

SEQ ID NO: 2172079 - RNA, 18 nt, Human
ccacuuuggucccgugca

SEQ ID NO: 2172080 - RNA, 21 nt, Human
ccacuuuggucccgugcagcu

SEQ ID NO: 2172081 - RNA, 17 nt, Human
ccacuuuggccuccguu

SEQ ID NO: 2172082 - RNA, 15 nt, Human
ccacuuuguucuuua

SEQ ID NO: 2172083 - RNA, 20 nt, Human
ccacuuuguucuuuaggaga

SEQ ID NO: 2172084 - RNA, 14 nt, Human
ccacuuuguuggaa

SEQ ID NO: 2172085 - RNA, 16 nt, Human
ccacuuuuauucauuu

SEQ ID NO: 2172086 - RNA, 22 nt, Human
ccacuuuguuucguggggaggu

SEQ ID NO: 2172087 - RNA, 20 nt, Human
ccacuuugcacagcucuccg

SEQ ID NO: 2172088 - RNA, 20 nt, Human
ccacuuucuagccagaggag

SEQ ID NO: 2172089 - RNA, 18 nt, Human
ccacuuucuagccagagg

SEQ ID NO: 2172090 - RNA, 19 nt, Human
ccacuuucuagccagagga

SEQ ID NO: 2172091 - RNA, 13 nt, Human
ccacuuucuagcc

SEQ ID NO: 2172092 - RNA, 19 nt, Human
ccacuuggucugugagaug

SEQ ID NO: 2172093 - RNA, 17 nt, Human
ccacuuggucugugaga

SEQ ID NO: 2172094 - RNA, 16 nt, Human
ccacuuggucugugag

SEQ ID NO: 2172095 - RNA, 15 nt, Human
ccacuuggucuguga

SEQ ID NO: 2172096 - RNA, 19 nt, Human
ccacuugucccacuaucug

SEQ ID NO: 2172097 - RNA, 17 nt, Human
ccacuugggucuucccu

SEQ ID NO: 2172098 - RNA, 15 nt, Human
ccacuuguccgcugg

SEQ ID NO: 2172099 - RNA, 21 nt, Human
ccacuuguccgcuggguggua

SEQ ID NO: 2172100 - RNA, 20 nt, Human
ccacuugucccacuaucugg

SEQ ID NO: 2172101 - RNA, 22 nt, Human
ccacuuggucugugagaugcua

SEQ ID NO: 2172102 - RNA, 20 nt, Human
ccacuuggucugugagaugc

SEQ ID NO: 2172103 - RNA, 16 nt, Human
ccacuucuuuuauaac

SEQ ID NO: 2172104 - RNA, 20 nt, Human
ccacuucuuguuccccacug

SEQ ID NO: 2172105 - RNA, 19 nt, Human
ccacuucuuguuccccacu

SEQ ID NO: 2172106 - RNA, 15 nt, Human
ccacuucuggguggg

SEQ ID NO: 2172107 - RNA, 17 nt, Human
ccacuucccugacacug

SEQ ID NO: 2172108 - RNA, 12 nt, Human
ccacuucccuca

SEQ ID NO: 2172109 - RNA, 15 nt, Human
ccacuucccugacac

SEQ ID NO: 2172110 - RNA, 23 nt, Human
ccacuucccagguaagcaggagg

SEQ ID NO: 2172111 - RNA, 13 nt, Human
ccacuuccccucc

SEQ ID NO: 2172112 - RNA, 14 nt, Human
ccacuuccccuccu

SEQ ID NO: 2172113 - RNA, 19 nt, Human
ccacuuccccuccuacccc

SEQ ID NO: 2172114 - RNA, 14 nt, Human
ccacuucccugggc

SEQ ID NO: 2172115 - RNA, 12 nt, Human
ccacuugccucu

SEQ ID NO: 2172116 - RNA, 13 nt, Human
ccacuugccucuu

SEQ ID NO: 2172117 - RNA, 16 nt, Human
ccacuugccucuuccu

SEQ ID NO: 2172118 - RNA, 17 nt, Human
ccacuugccucuuccuu

SEQ ID NO: 2172119 - RNA, 19 nt, Human
ccacuugccucuuccuuga

SEQ ID NO: 2172120 - RNA, 22 nt, Human
ccacuugccucuuccuugaaga

SEQ ID NO: 2172121 - RNA, 21 nt, Human
ccacuuggaggccuuucaucc

SEQ ID NO: 2172122 - RNA, 12 nt, Human
ccacuuggccaa

SEQ ID NO: 2172123 - RNA, 16 nt, Human
ccacuugggucuuccc

SEQ ID NO: 2172124 - RNA, 21 nt, Human
ccacuuggcuacacagggaug

SEQ ID NO: 2172125 - RNA, 18 nt, Human
ccacuuggcaucagcugg

SEQ ID NO: 2172126 - RNA, 17 nt, Human
ccacuuggccaagcagg

SEQ ID NO: 2172127 - RNA, 12 nt, Human
ccacuuggucug

SEQ ID NO: 2172128 - RNA, 17 nt, Human
ccacugcacuccagccu

SEQ ID NO: 2172129 - RNA, 14 nt, Human
ccacugcacuccag

SEQ ID NO: 2172130 - RNA, 21 nt, Human
ccacuucauucuugaaagcug

SEQ ID NO: 2172131 - RNA, 23 nt, Human
ccacuucauucuugaaagcugug

SEQ ID NO: 2172132 - RNA, 14 nt, Human
ccacuucccaggua

SEQ ID NO: 2172133 - RNA, 19 nt, Human
ccacugcacuauagccuag

SEQ ID NO: 2172134 - RNA, 20 nt, Human
ccacugcacuauagccuagg

SEQ ID NO: 2172135 - RNA, 13 nt, Human
ccacugcaccggg

SEQ ID NO: 2172136 - RNA, 14 nt, Human
ccacugcaccgggc

SEQ ID NO: 2172137 - RNA, 17 nt, Human
ccacugcaccgggccac

SEQ ID NO: 2172138 - RNA, 19 nt, Human
ccacugcaccgggccacag

SEQ ID NO: 2172139 - RNA, 12 nt, Human
ccacugagcucc

SEQ ID NO: 2172140 - RNA, 13 nt, Human
ccacugcacacac

SEQ ID NO: 2172141 - RNA, 13 nt, Human
ccacugagggcag

SEQ ID NO: 2172142 - RNA, 22 nt, Human
ccacugauagaugucuauucuu

SEQ ID NO: 2172143 - RNA, 11 nt, Human
ccacugagcuc

SEQ ID NO: 2172144 - RNA, 13 nt, Human
ccacugaccagaa

SEQ ID NO: 2172145 - RNA, 18 nt, Human
ccacugcacacaccucag

SEQ ID NO: 2172146 - RNA, 14 nt, Human
ccacugcacagagc

SEQ ID NO: 2172147 - RNA, 16 nt, Human
ccacugcacagagcuc

SEQ ID NO: 2172148 - RNA, 20 nt, Human
ccacugcacagagcucucca

SEQ ID NO: 2172149 - RNA, 23 nt, Human
ccacugcacagagcucuccagcu

SEQ ID NO: 2172150 - RNA, 11 nt, Human
ccacugcaccc

SEQ ID NO: 2172151 - RNA, 13 nt, Human
ccacugcaccccc

SEQ ID NO: 2172152 - RNA, 14 nt, Human
ccacugcacccccu

SEQ ID NO: 2172153 - RNA, 17 nt, Human
ccacugcacccccuccu

SEQ ID NO: 2172154 - RNA, 18 nt, Human
ccacugcacccccuccug

SEQ ID NO: 2172155 - RNA, 19 nt, Human
ccacugcacccccuccugc

SEQ ID NO: 2172156 - RNA, 20 nt, Human
ccacugcacccccuccugcu

SEQ ID NO: 2172157 - RNA, 21 nt, Human
ccacugcacccccuccugcug

SEQ ID NO: 2172158 - RNA, 22 nt, Human
ccacugcacccccuccugcugc

SEQ ID NO: 2172159 - RNA, 23 nt, Human
ccacugcacccccuccugcugca

SEQ ID NO: 2172160 - RNA, 18 nt, Human
ccacugcaccccgucuca

SEQ ID NO: 2172161 - RNA, 19 nt, Human
ccacugacagccucccacc

SEQ ID NO: 2172162 - RNA, 17 nt, Human
ccacugacagccuccca

SEQ ID NO: 2172163 - RNA, 16 nt, Human
ccacugacagccuccc

SEQ ID NO: 2172164 - RNA, 15 nt, Human
ccacugacagccucc

SEQ ID NO: 2172165 - RNA, 21 nt, Human
ccacugaaguagugugcaguu

SEQ ID NO: 2172166 - RNA, 16 nt, Human
ccacugaagcugggau

SEQ ID NO: 2172167 - RNA, 15 nt, Human
ccacugaagcuggga

SEQ ID NO: 2172168 - RNA, 14 nt, Human
ccacugaagcuggg

SEQ ID NO: 2172169 - RNA, 22 nt, Human
ccacucugugccugaccuugag

SEQ ID NO: 2172170 - RNA, 11 nt, Human
ccacucugugc

SEQ ID NO: 2172171 - RNA, 21 nt, Human
cccucgcuuggacggcugggc

SEQ ID NO: 2172172 - RNA, 23 nt, Human
cccucgcuuggacggcugggcac

SEQ ID NO: 2172173 - RNA, 13 nt, Human
cccucggagaaga

SEQ ID NO: 2172174 - RNA, 22 nt, Human
cccucgaagcgcgccacucgcu

SEQ ID NO: 2172175 - RNA, 17 nt, Human
cccuccucucccauccc

SEQ ID NO: 2172176 - RNA, 13 nt, Human
cccucgcccccgc

SEQ ID NO: 2172177 - RNA, 14 nt, Human
cccucgcugccagc

SEQ ID NO: 2172178 - RNA, 14 nt, Human
cccucgcugcuucu

SEQ ID NO: 2172179 - RNA, 15 nt, Human
cccucgcugcuucug

SEQ ID NO: 2172180 - RNA, 18 nt, Human
cccugaaagcccugagcu

SEQ ID NO: 2172181 - RNA, 19 nt, Human
cccucgggucuccucacuc

SEQ ID NO: 2172182 - RNA, 21 nt, Human
cccucgggucuccucacuccc

SEQ ID NO: 2172183 - RNA, 18 nt, Human
cccucgggucuccucacu

SEQ ID NO: 2172184 - RNA, 17 nt, Human
cccucgggcgagucacu

SEQ ID NO: 2172185 - RNA, 22 nt, Human
cccucgggcccagcccccacag

SEQ ID NO: 2172186 - RNA, 15 nt, Human
cccucgggcccagcc

SEQ ID NO: 2172187 - RNA, 19 nt, Human
cccucgggcccagccccca

SEQ ID NO: 2172188 - RNA, 20 nt, Human
cccucgggcccaccuggcca

SEQ ID NO: 2172189 - RNA, 21 nt, Human
cccucgggcccaccuggccac

SEQ ID NO: 2172190 - RNA, 13 nt, Human
cccucgggcccag

SEQ ID NO: 2172191 - RNA, 14 nt, Human
cccucgggcccagc

SEQ ID NO: 2172192 - RNA, 14 nt, Human
cccucgggcccacc

SEQ ID NO: 2172193 - RNA, 17 nt, Human
cccucgcugcuucugug

SEQ ID NO: 2172194 - RNA, 15 nt, Human
cccucgggcccaccu

SEQ ID NO: 2172195 - RNA, 16 nt, Human
cccucgggcccaccug

SEQ ID NO: 2172196 - RNA, 18 nt, Human
cccucgggcccaccuggc

SEQ ID NO: 2172197 - RNA, 19 nt, Human
cccucgggcccaccuggcc

SEQ ID NO: 2172198 - RNA, 17 nt, Human
cccuccuacccugcgcc

SEQ ID NO: 2172199 - RNA, 18 nt, Human
cccuccuacccugcgccc

SEQ ID NO: 2172200 - RNA, 11 nt, Human
cccuccuccug

SEQ ID NO: 2172201 - RNA, 18 nt, Human
cccuccuccuggacuccu

SEQ ID NO: 2172202 - RNA, 16 nt, Human
cccuccuccuggacuc

SEQ ID NO: 2172203 - RNA, 23 nt, Human
cccuccguggcaucaccuuaggc

SEQ ID NO: 2172204 - RNA, 18 nt, Human
cccuccguggcaucaccu

SEQ ID NO: 2172205 - RNA, 15 nt, Human
cccuccuaccccucc

SEQ ID NO: 2172206 - RNA, 18 nt, Human
cccuccuaccccucccag

SEQ ID NO: 2172207 - RNA, 20 nt, Human
cccuccuaccccucccagcu

SEQ ID NO: 2172208 - RNA, 21 nt, Human
cccuccuaccccucccagcug

SEQ ID NO: 2172209 - RNA, 22 nt, Human
cccuccuaccccucccagcuga

SEQ ID NO: 2172210 - RNA, 21 nt, Human
cccuccgccuucacuccggug

SEQ ID NO: 2172211 - RNA, 13 nt, Human
cccuccgccuuca

SEQ ID NO: 2172212 - RNA, 22 nt, Human
cccuccgccuucacuccggugu

SEQ ID NO: 2172213 - RNA, 21 nt, Human
cccucgaagcgcgccacucgc

SEQ ID NO: 2172214 - RNA, 19 nt, Human
cccucgaagcgcgccacuc

SEQ ID NO: 2172215 - RNA, 15 nt, Human
cccucgaagcgcgcc

SEQ ID NO: 2172216 - RNA, 15 nt, Human
cccuccuuuuuaugu

SEQ ID NO: 2172217 - RNA, 23 nt, Human
cccucgaggcggaucuuuggaca

SEQ ID NO: 2172218 - RNA, 22 nt, Human
cccucgaggcggaucuuuggac

SEQ ID NO: 2172219 - RNA, 20 nt, Human
cccuccuaucaccuccccuc

SEQ ID NO: 2172220 - RNA, 18 nt, Human
cccuccucuagcuguggg

SEQ ID NO: 2172221 - RNA, 13 nt, Human
cccuccucuccca

SEQ ID NO: 2172222 - RNA, 19 nt, Human
cccuccucuagcugugggg

SEQ ID NO: 2172223 - RNA, 14 nt, Human
cccuccucucugcc

SEQ ID NO: 2172224 - RNA, 14 nt, Human
cccuccucucccau

SEQ ID NO: 2172225 - RNA, 23 nt, Human
cccuccucccuuuuuccuugucc

SEQ ID NO: 2172226 - RNA, 15 nt, Human
cccuccucucccauc

SEQ ID NO: 2172227 - RNA, 16 nt, Human
cccuccucucccaucc

SEQ ID NO: 2172228 - RNA, 18 nt, Human
cccugaaccaucccugau

SEQ ID NO: 2172229 - RNA, 11 nt, Human
cccugaagcca

SEQ ID NO: 2172230 - RNA, 14 nt, Human
cccugaagccagcc

SEQ ID NO: 2172231 - RNA, 15 nt, Human
cccugaagccagccu

SEQ ID NO: 2172232 - RNA, 13 nt, Human
cccugaaccaucc

SEQ ID NO: 2172233 - RNA, 14 nt, Human
cccugaacaagaau

SEQ ID NO: 2172234 - RNA, 14 nt, Human
cccugaaggaacca

SEQ ID NO: 2172235 - RNA, 18 nt, Human
cccugaagccagccuucu

SEQ ID NO: 2172236 - RNA, 16 nt, Human
cccugaagccagccuu

SEQ ID NO: 2172237 - RNA, 17 nt, Human
cccugaagccagccuuc

SEQ ID NO: 2172238 - RNA, 12 nt, Human
cccugaaggccc

SEQ ID NO: 2172239 - RNA, 13 nt, Human
cccugaaggcccc

SEQ ID NO: 2172240 - RNA, 14 nt, Human
cccugaaggccccg

SEQ ID NO: 2172241 - RNA, 16 nt, Human
cccugaaggccccgcc

SEQ ID NO: 2172242 - RNA, 19 nt, Human
cccugaaggccccgcccag

SEQ ID NO: 2172243 - RNA, 14 nt, Human
cccugacaacacuc

SEQ ID NO: 2172244 - RNA, 17 nt, Human
cccugaaggggccauga

SEQ ID NO: 2172245 - RNA, 23 nt, Human
cccugaaggaacauuccuuaguc

SEQ ID NO: 2172246 - RNA, 20 nt, Human
cccugaagugagcacagccu

SEQ ID NO: 2172247 - RNA, 15 nt, Human
cccugaaucccccuu

SEQ ID NO: 2172248 - RNA, 20 nt, Human
cccugaaucccccuugccac

SEQ ID NO: 2172249 - RNA, 20 nt, Human
cccugaaggccccgcccagg

SEQ ID NO: 2172250 - RNA, 22 nt, Human
cccugaaggccccgcccaggcu

SEQ ID NO: 2172251 - RNA, 16 nt, Human
cccugacaacacucau

SEQ ID NO: 2172252 - RNA, 22 nt, Human
cccugacaacacucauugaccu

SEQ ID NO: 2172253 - RNA, 21 nt, Human
cccugaaucccccuugccacc

SEQ ID NO: 2172254 - RNA, 23 nt, Human
cccugaaucccccuugccacccc

SEQ ID NO: 2172255 - RNA, 20 nt, Human
cccugaaugguuccaugccu

SEQ ID NO: 2172256 - RNA, 20 nt, Human
cccugacacugcggggcuug

SEQ ID NO: 2172257 - RNA, 14 nt, Human
cccuccgcccugcc

SEQ ID NO: 2172258 - RNA, 15 nt, Human
cccuccgcccugcca

SEQ ID NO: 2172259 - RNA, 16 nt, Human
cccuccgcccugccac

SEQ ID NO: 2172260 - RNA, 19 nt, Human
cccuccgcccugccacuca

SEQ ID NO: 2172261 - RNA, 18 nt, Human
ccccggcccuaccagcgc

SEQ ID NO: 2172262 - RNA, 16 nt, Human
ccccggccccagccag

SEQ ID NO: 2172263 - RNA, 17 nt, Human
ccccggccccagccaga

SEQ ID NO: 2172264 - RNA, 18 nt, Human
ccccggccccagccagag

SEQ ID NO: 2172265 - RNA, 19 nt, Human
ccccggccccagccagagu

SEQ ID NO: 2172266 - RNA, 12 nt, Human
ccccggcccccu

SEQ ID NO: 2172267 - RNA, 13 nt, Human
ccccggcccccug

SEQ ID NO: 2172268 - RNA, 18 nt, Human
ccccggccccggccccag

SEQ ID NO: 2172269 - RNA, 13 nt, Human
ccccggcccuacc

SEQ ID NO: 2172270 - RNA, 16 nt, Human
cccugacccuguauau

SEQ ID NO: 2172271 - RNA, 15 nt, Human
cccugacccugugga

SEQ ID NO: 2172272 - RNA, 19 nt, Human
cccugacccuguggaagca

SEQ ID NO: 2172273 - RNA, 12 nt, Human
cccugacccugu

SEQ ID NO: 2172274 - RNA, 17 nt, Human
cccugaccucccucuaa

SEQ ID NO: 2172275 - RNA, 21 nt, Human
cccugaccucccagcccuaug

SEQ ID NO: 2172276 - RNA, 22 nt, Human
cccugaccucccagcccuaugg

SEQ ID NO: 2172277 - RNA, 16 nt, Human
cccugaccugugagcc

SEQ ID NO: 2172278 - RNA, 11 nt, Human
cccugaccucc

SEQ ID NO: 2172279 - RNA, 14 nt, Human
cccugaccucccag

SEQ ID NO: 2172280 - RNA, 15 nt, Human
cccugaccucccagc

SEQ ID NO: 2172281 - RNA, 16 nt, Human
cccugaccucccagcc

SEQ ID NO: 2172282 - RNA, 17 nt, Human
cccugaccucccagccc

SEQ ID NO: 2172283 - RNA, 18 nt, Human
cccugaccucccagcccu

SEQ ID NO: 2172284 - RNA, 19 nt, Human
cccugaccucccagcccua

SEQ ID NO: 2172285 - RNA, 20 nt, Human
cccugaccucccagcccuau

SEQ ID NO: 2172286 - RNA, 17 nt, Human
cccugacucucugugac

SEQ ID NO: 2172287 - RNA, 13 nt, Human
cccugacucucug

SEQ ID NO: 2172288 - RNA, 18 nt, Human
cccugacucucugugacc

SEQ ID NO: 2172289 - RNA, 13 nt, Human
cccugacugggag

SEQ ID NO: 2172290 - RNA, 20 nt, Human
cccugaccugugagcccagc

SEQ ID NO: 2172291 - RNA, 15 nt, Human
cccugacucauucug

SEQ ID NO: 2172292 - RNA, 21 nt, Human
cccugacucauucugaaggag

SEQ ID NO: 2172293 - RNA, 19 nt, Human
cccugacucauucugaagg

SEQ ID NO: 2172294 - RNA, 20 nt, Human
cccugagacaaauggaggcc

SEQ ID NO: 2172295 - RNA, 23 nt, Human
cccugagacaaauggaggccugu

SEQ ID NO: 2172296 - RNA, 18 nt, Human
cccugagaucucugcagg

SEQ ID NO: 2172297 - RNA, 16 nt, Human
cccugagacaaaugga

SEQ ID NO: 2172298 - RNA, 17 nt, Human
cccugagacaaauggag

SEQ ID NO: 2172299 - RNA, 14 nt, Human
cccugacuggugcu

SEQ ID NO: 2172300 - RNA, 22 nt, Human
cccugagcucgguggacccagg

SEQ ID NO: 2172301 - RNA, 14 nt, Human
cccugagcugaggc

SEQ ID NO: 2172302 - RNA, 13 nt, Human
cccugagcugagg

SEQ ID NO: 2172303 - RNA, 21 nt, Human
cccugagcugaggcagcagug

SEQ ID NO: 2172304 - RNA, 19 nt, Human
cccugagcugaggcagcag

SEQ ID NO: 2172305 - RNA, 17 nt, Human
cccugagcugaggcagc

SEQ ID NO: 2172306 - RNA, 16 nt, Human
cccugagcugaggcag

SEQ ID NO: 2172307 - RNA, 16 nt, Human
cccugagcuuucugcu

SEQ ID NO: 2172308 - RNA, 20 nt, Human
cccugcccaccuggccucug

SEQ ID NO: 2172309 - RNA, 16 nt, Human
cccugagcaaugucug

SEQ ID NO: 2172310 - RNA, 18 nt, Human
cccugagcaaugucugug

SEQ ID NO: 2172311 - RNA, 20 nt, Human
cccugagcaaugucugugcu

SEQ ID NO: 2172312 - RNA, 21 nt, Human
cccugagcaaugucugugcua

SEQ ID NO: 2172313 - RNA, 14 nt, Human
cccugagcaggauu

SEQ ID NO: 2172314 - RNA, 12 nt, Human
cccugagcucgg

SEQ ID NO: 2172315 - RNA, 21 nt, Human
cccugagccccuuccuugcuc

SEQ ID NO: 2172316 - RNA, 15 nt, Human
cccugagccccuucc

SEQ ID NO: 2172317 - RNA, 17 nt, Human
cccugagccccuuccuu

SEQ ID NO: 2172318 - RNA, 12 nt, Human
cccugagccccu

SEQ ID NO: 2172319 - RNA, 14 nt, Human
cccugcccuccccu

SEQ ID NO: 2172320 - RNA, 13 nt, Human
cccugcccucauc

SEQ ID NO: 2172321 - RNA, 18 nt, Human
cccugcccucaucucucu

SEQ ID NO: 2172322 - RNA, 17 nt, Human
cccugcccuagcuccac

SEQ ID NO: 2172323 - RNA, 10 nt, Human
cccugcccuc

SEQ ID NO: 2172324 - RNA, 16 nt, Human
cccugcccuagcucca

SEQ ID NO: 2172325 - RNA, 14 nt, Human
cccugcccuagcuc

SEQ ID NO: 2172326 - RNA, 19 nt, Human
cccugccccugccccguca

SEQ ID NO: 2172327 - RNA, 18 nt, Human
cccugccccugccccguc

SEQ ID NO: 2172328 - RNA, 17 nt, Human
cccugccccugccccgu

SEQ ID NO: 2172329 - RNA, 13 nt, Human
cccugccccugcc

SEQ ID NO: 2172330 - RNA, 14 nt, Human
cccugcccggcugc

SEQ ID NO: 2172331 - RNA, 17 nt, Human
cccugcccggcugcgga

SEQ ID NO: 2172332 - RNA, 18 nt, Human
cccugccccucccuucaa

SEQ ID NO: 2172333 - RNA, 19 nt, Human
cccugccccucccuucaac

SEQ ID NO: 2172334 - RNA, 12 nt, Human
cccugccccugc

SEQ ID NO: 2172335 - RNA, 21 nt, Human
cccugccccgucaccaucuca

SEQ ID NO: 2172336 - RNA, 23 nt, Human
cccugccccucccuucaaccauu

SEQ ID NO: 2172337 - RNA, 15 nt, Human
cccugccccgucacc

SEQ ID NO: 2172338 - RNA, 17 nt, Human
cccugccccucccuuca

SEQ ID NO: 2172339 - RNA, 16 nt, Human
cccugccccccagccu

SEQ ID NO: 2172340 - RNA, 19 nt, Human
cccugccccccagccucug

SEQ ID NO: 2172341 - RNA, 21 nt, Human
cccugccccccagccucuggc

SEQ ID NO: 2172342 - RNA, 16 nt, Human
cccugccccagcaaga

SEQ ID NO: 2172343 - RNA, 13 nt, Human
cccugccccagcc

SEQ ID NO: 2172344 - RNA, 15 nt, Human
cccugccccagccca

SEQ ID NO: 2172345 - RNA, 12 nt, Human
cccugcccaugu

SEQ ID NO: 2172346 - RNA, 17 nt, Human
cccugccccagcccaag

SEQ ID NO: 2172347 - RNA, 19 nt, Human
cccugccccagcccaaguc

SEQ ID NO: 2172348 - RNA, 20 nt, Human
cccugccccagcccaagucc

SEQ ID NO: 2172349 - RNA, 20 nt, Human
cccugcccccaaauaagaag

SEQ ID NO: 2172350 - RNA, 14 nt, Human
cccugcccccacca

SEQ ID NO: 2172351 - RNA, 16 nt, Human
cccugcccccacuucc

SEQ ID NO: 2172352 - RNA, 17 nt, Human
cccugcccccacuuccu

SEQ ID NO: 2172353 - RNA, 18 nt, Human
cccugcccccacuuccug

SEQ ID NO: 2172354 - RNA, 14 nt, Human
cccugaggagccag

SEQ ID NO: 2172355 - RNA, 14 nt, Human
cccugagcugaggg

SEQ ID NO: 2172356 - RNA, 22 nt, Human
cccugcccaccuggccucugca

SEQ ID NO: 2172357 - RNA, 15 nt, Human
cccugccccccagcc

SEQ ID NO: 2172358 - RNA, 20 nt, Human
cccugccccccagcccuccu

SEQ ID NO: 2172359 - RNA, 14 nt, Human
cccugccccccagc

SEQ ID NO: 2172360 - RNA, 23 nt, Human
cccugcccccaggacugggccac

SEQ ID NO: 2172361 - RNA, 12 nt, Human
cccugcccccca

SEQ ID NO: 2172362 - RNA, 13 nt, Human
cccugcccccagg

SEQ ID NO: 2172363 - RNA, 20 nt, Human
cccugcccccacuuccuguu

SEQ ID NO: 2172364 - RNA, 18 nt, Human
cccugcccccagccccgg

SEQ ID NO: 2172365 - RNA, 14 nt, Human
cccugcccccagga

SEQ ID NO: 2172366 - RNA, 16 nt, Human
cccugcccccaggacu

SEQ ID NO: 2172367 - RNA, 17 nt, Human
cccugcccccaggacug

SEQ ID NO: 2172368 - RNA, 18 nt, Human
cccugcccccaggacugg

SEQ ID NO: 2172369 - RNA, 20 nt, Human
cccugcccccaggacugggc

SEQ ID NO: 2172370 - RNA, 22 nt, Human
cccugcccccaggacugggcca

SEQ ID NO: 2172371 - RNA, 15 nt, Human
cccugcccuccccuc

SEQ ID NO: 2172372 - RNA, 13 nt, Human
cccugcccucgug

SEQ ID NO: 2172373 - RNA, 14 nt, Human
cccugcccucgugg

SEQ ID NO: 2172374 - RNA, 16 nt, Human
cccugcccucguggcc

SEQ ID NO: 2172375 - RNA, 17 nt, Human
cccugcccucguggcca

SEQ ID NO: 2172376 - RNA, 18 nt, Human
cccugcccucguggccag

SEQ ID NO: 2172377 - RNA, 19 nt, Human
cccugcccucguggccagc

SEQ ID NO: 2172378 - RNA, 11 nt, Human
cccugcccugc

SEQ ID NO: 2172379 - RNA, 12 nt, Human
cccugcccugca

SEQ ID NO: 2172380 - RNA, 13 nt, Human
cccugcccugcac

SEQ ID NO: 2172381 - RNA, 20 nt, Human
cccugcccucguggccagcc

SEQ ID NO: 2172382 - RNA, 21 nt, Human
cccugcccucguggccagccc

SEQ ID NO: 2172383 - RNA, 22 nt, Human
cccugcccucguggccagcccg

SEQ ID NO: 2172384 - RNA, 13 nt, Human
cccugcccugcug

SEQ ID NO: 2172385 - RNA, 12 nt, Human
cccugcccuggu

SEQ ID NO: 2172386 - RNA, 11 nt, Human
cccugcccugg

SEQ ID NO: 2172387 - RNA, 13 nt, Human
cccugcccuggga

SEQ ID NO: 2172388 - RNA, 14 nt, Human
cccuggaggugcca

SEQ ID NO: 2172389 - RNA, 15 nt, Human
cccuggaggugccag

SEQ ID NO: 2172390 - RNA, 16 nt, Human
cccuggaggugccagc

SEQ ID NO: 2172391 - RNA, 17 nt, Human
cccuggaggugccagca

SEQ ID NO: 2172392 - RNA, 18 nt, Human
cccuggaggugccagcaa

SEQ ID NO: 2172393 - RNA, 20 nt, Human
cccuggaggugccagcaaag

SEQ ID NO: 2172394 - RNA, 22 nt, Human
cccuggaggugccagcaaagcc

SEQ ID NO: 2172395 - RNA, 13 nt, Human
cccuggagguggc

SEQ ID NO: 2172396 - RNA, 23 nt, Human
cccuggaggugccagcaaagccc

SEQ ID NO: 2172397 - RNA, 18 nt, Human
cccuggagucaugccaag

SEQ ID NO: 2172398 - RNA, 15 nt, Human
cccuggagugcaguu

SEQ ID NO: 2172399 - RNA, 20 nt, Human
cccuggaguguggcugagga

SEQ ID NO: 2172400 - RNA, 21 nt, Human
cccuggaguguggcugaggag

SEQ ID NO: 2172401 - RNA, 15 nt, Human
cccugcccuggucca

SEQ ID NO: 2172402 - RNA, 14 nt, Human
cccugcccuggucc

SEQ ID NO: 2172403 - RNA, 22 nt, Human
cccugcccugguuuccugcccu

SEQ ID NO: 2172404 - RNA, 18 nt, Human
cccugcccugguccaggg

SEQ ID NO: 2172405 - RNA, 23 nt, Human
cccugcccugguuuccugcccug

SEQ ID NO: 2172406 - RNA, 19 nt, Human
cccuggauccaucaggcca

SEQ ID NO: 2172407 - RNA, 20 nt, Human
cccuggccgaguccaagcug

SEQ ID NO: 2172408 - RNA, 15 nt, Human
cccuggccgcccccu

SEQ ID NO: 2172409 - RNA, 22 nt, Human
cccuggcccucaaggccuccca

SEQ ID NO: 2172410 - RNA, 23 nt, Human
cccuggcccucaaggccucccac

SEQ ID NO: 2172411 - RNA, 14 nt, Human
cccuggcccugagg

SEQ ID NO: 2172412 - RNA, 16 nt, Human
cccuggcccugaggug

SEQ ID NO: 2172413 - RNA, 17 nt, Human
cccuggcccugaggugu

SEQ ID NO: 2172414 - RNA, 11 nt, Human
cccuggccucc

SEQ ID NO: 2172415 - RNA, 13 nt, Human
cccuggccucccc

SEQ ID NO: 2172416 - RNA, 14 nt, Human
cccuggccuccccu

SEQ ID NO: 2172417 - RNA, 23 nt, Human
cccuggaucaguccuuugaucag

SEQ ID NO: 2172418 - RNA, 23 nt, Human
cccuggaguguggcugaggaggc

SEQ ID NO: 2172419 - RNA, 13 nt, Human
cccuggaugcagc

SEQ ID NO: 2172420 - RNA, 17 nt, Human
cccuggaugcagccuca

SEQ ID NO: 2172421 - RNA, 21 nt, Human
cccuggaugcagccucacagu

SEQ ID NO: 2172422 - RNA, 19 nt, Human
cccuggcucucagaaggua

SEQ ID NO: 2172423 - RNA, 13 nt, Human
cccuggcucugca

SEQ ID NO: 2172424 - RNA, 14 nt, Human
cccuggcugaagga

SEQ ID NO: 2172425 - RNA, 15 nt, Human
cccuggcugaaggac

SEQ ID NO: 2172426 - RNA, 18 nt, Human
cccuggcugaaggacugu

SEQ ID NO: 2172427 - RNA, 19 nt, Human
cccuggcugaaggacugug

SEQ ID NO: 2172428 - RNA, 19 nt, Human
cccuggcugaccccaaaga

SEQ ID NO: 2172429 - RNA, 23 nt, Human
cccuggcugaccccaaagagccu

SEQ ID NO: 2172430 - RNA, 13 nt, Human
cccuggcugcccu

SEQ ID NO: 2172431 - RNA, 14 nt, Human
cccuggcugcccug

SEQ ID NO: 2172432 - RNA, 15 nt, Human
cccuggcugcccugg

SEQ ID NO: 2172433 - RNA, 16 nt, Human
cccuggcugcccuggc

SEQ ID NO: 2172434 - RNA, 17 nt, Human
cccuggcugcccuggcc

SEQ ID NO: 2172435 - RNA, 18 nt, Human
cccuggcugcccuggccc

SEQ ID NO: 2172436 - RNA, 23 nt, Human
cccuggcucccaugaccauacug

SEQ ID NO: 2172437 - RNA, 15 nt, Human
cccuggcucccauga

SEQ ID NO: 2172438 - RNA, 21 nt, Human
cccuggccuccggcgucagcc

SEQ ID NO: 2172439 - RNA, 14 nt, Human
cccuggcucccaug

SEQ ID NO: 2172440 - RNA, 13 nt, Human
cccuggcucccau

SEQ ID NO: 2172441 - RNA, 20 nt, Human
cccuggcucccacaggcccu

SEQ ID NO: 2172442 - RNA, 19 nt, Human
cccuggccucugugccuuc

SEQ ID NO: 2172443 - RNA, 18 nt, Human
cccuggccucugugccuu

SEQ ID NO: 2172444 - RNA, 15 nt, Human
cccuggccucugugc

SEQ ID NO: 2172445 - RNA, 13 nt, Human
cccuggccucugu

SEQ ID NO: 2172446 - RNA, 20 nt, Human
cccuggccuccggcgucagc

SEQ ID NO: 2172447 - RNA, 19 nt, Human
cccuggccuccccugccac

SEQ ID NO: 2172448 - RNA, 20 nt, Human
cccuggccuccccugccacc

SEQ ID NO: 2172449 - RNA, 21 nt, Human
ccggcccuccuacccugcgcc

SEQ ID NO: 2172450 - RNA, 19 nt, Human
ccggcccugggcucggagg

SEQ ID NO: 2172451 - RNA, 12 nt, Human
ccggcccugggg

SEQ ID NO: 2172452 - RNA, 22 nt, Human
ccggcccugggcucggaggcug

SEQ ID NO: 2172453 - RNA, 24 nt, Human
ccggcccugggcucggaggcugcc

SEQ ID NO: 2172454 - RNA, 13 nt, Human
ccggcccuggggc

SEQ ID NO: 2172455 - RNA, 15 nt, Human
ccggccccugcuggu

SEQ ID NO: 2172456 - RNA, 16 nt, Human
ccggccaccugcggug

SEQ ID NO: 2172457 - RNA, 22 nt, Human
ccggcaguucugggugcucccu

SEQ ID NO: 2172458 - RNA, 17 nt, Human
ccggcaguucugggugc

SEQ ID NO: 2172459 - RNA, 14 nt, Human
ccggcauggcuggg

SEQ ID NO: 2172460 - RNA, 14 nt, Human
ccggcaugggaaag

SEQ ID NO: 2172461 - RNA, 12 nt, Human
ccggccaccucu

SEQ ID NO: 2172462 - RNA, 13 nt, Human
ccggccaccucug

SEQ ID NO: 2172463 - RNA, 14 nt, Human
ccggccaccucugc

SEQ ID NO: 2172464 - RNA, 15 nt, Human
ccggccaccucugcg

SEQ ID NO: 2172465 - RNA, 18 nt, Human
ccggcaggguccuagaaa

SEQ ID NO: 2172466 - RNA, 15 nt, Human
ccggcuccaggcucc

SEQ ID NO: 2172467 - RNA, 22 nt, Human
ccgucgaggggcucucagcuca

SEQ ID NO: 2172468 - RNA, 16 nt, Human
ccguccugccuguggc

SEQ ID NO: 2172469 - RNA, 21 nt, Human
ccgucgaggggcucucagcuc

SEQ ID NO: 2172470 - RNA, 14 nt, Human
ccgucuaccugagg

SEQ ID NO: 2172471 - RNA, 15 nt, Human
ccgucuaccugaggg

SEQ ID NO: 2172472 - RNA, 12 nt, Human
ccggcuccaggc

SEQ ID NO: 2172473 - RNA, 23 nt, Human
ccggccucagcaccccugucucu

SEQ ID NO: 2172474 - RNA, 12 nt, Human
ccggccucucug

SEQ ID NO: 2172475 - RNA, 13 nt, Human
ccggccucucugg

SEQ ID NO: 2172476 - RNA, 15 nt, Human
ccggccucucuggcc

SEQ ID NO: 2172477 - RNA, 16 nt, Human
ccggccucucuggccu

SEQ ID NO: 2172478 - RNA, 13 nt, Human
ccggcuccaggcu

SEQ ID NO: 2172479 - RNA, 14 nt, Human
ccggcuccaggcuc

SEQ ID NO: 2172480 - RNA, 17 nt, Human
ccgucuaccugaggggc

SEQ ID NO: 2172481 - RNA, 12 nt, Human
ccgugaggccag

SEQ ID NO: 2172482 - RNA, 13 nt, Human
ccgugaggccaga

SEQ ID NO: 2172483 - RNA, 14 nt, Human
ccgugaggccagag

SEQ ID NO: 2172484 - RNA, 16 nt, Human
ccgugaggccagagac

SEQ ID NO: 2172485 - RNA, 20 nt, Human
ccuaacgaaguauccuucag

SEQ ID NO: 2172486 - RNA, 15 nt, Human
ccuaacucauacugu

SEQ ID NO: 2172487 - RNA, 18 nt, Human
ccuaacucauacugugcu

SEQ ID NO: 2172488 - RNA, 14 nt, Human
ccgugaggauguca

SEQ ID NO: 2172489 - RNA, 13 nt, Human
ccuaacucauacu

SEQ ID NO: 2172490 - RNA, 17 nt, Human
ccuaagaaucuuuagag

SEQ ID NO: 2172491 - RNA, 20 nt, Human
ccuaagaccggcggccauga

SEQ ID NO: 2172492 - RNA, 17 nt, Human
ccuagcacuuugggagg

SEQ ID NO: 2172493 - RNA, 12 nt, Human
ccuagcagcacc

SEQ ID NO: 2172494 - RNA, 22 nt, Human
ccuaaugacaucaccacaguuu

SEQ ID NO: 2172495 - RNA, 19 nt, Human
ccuagcauacguacacauu

SEQ ID NO: 2172496 - RNA, 23 nt, Human
ccuagcagcaccguucugugcac

SEQ ID NO: 2172497 - RNA, 21 nt, Human
ccuagcagcaccguucugugc

SEQ ID NO: 2172498 - RNA, 20 nt, Human
ccuagcagcaccguucugug

SEQ ID NO: 2172499 - RNA, 17 nt, Human
ccuagccgaccucagcc

SEQ ID NO: 2172500 - RNA, 16 nt, Human
ccuagccgaccucagc

SEQ ID NO: 2172501 - RNA, 15 nt, Human
ccuagccgaccucag

SEQ ID NO: 2172502 - RNA, 14 nt, Human
ccuagccgaccuca

SEQ ID NO: 2172503 - RNA, 13 nt, Human
ccuagcccucuca

SEQ ID NO: 2172504 - RNA, 20 nt, Human
ccuagcccucucacauuuau

SEQ ID NO: 2172505 - RNA, 19 nt, Human
ccuagccgaccucagccuu

SEQ ID NO: 2172506 - RNA, 18 nt, Human
ccuagccgaccucagccu

SEQ ID NO: 2172507 - RNA, 20 nt, Human
ccuagccgaccucagccuuc

SEQ ID NO: 2172508 - RNA, 12 nt, Human
ccuagcagagag

SEQ ID NO: 2172509 - RNA, 20 nt, Human
ccuagccugugccucuggga

SEQ ID NO: 2172510 - RNA, 21 nt, Human
ccuaaucccugggcauugcuu

SEQ ID NO: 2172511 - RNA, 21 nt, Human
ccuaauccaggcagauccagg

SEQ ID NO: 2172512 - RNA, 20 nt, Human
ccuaauccaggcagauccag

SEQ ID NO: 2172513 - RNA, 19 nt, Human
ccuaauccaggcagaucca

SEQ ID NO: 2172514 - RNA, 18 nt, Human
ccuaauccaggcagaucc

SEQ ID NO: 2172515 - RNA, 22 nt, Human
ccuaaggaucucucaggagcac

SEQ ID NO: 2172516 - RNA, 23 nt, Human
ccuaaggaucucucaggagcaca

SEQ ID NO: 2172517 - RNA, 17 nt, Human
ccuaaggacacacuaau

SEQ ID NO: 2172518 - RNA, 16 nt, Human
ccuaaggaucucucag

SEQ ID NO: 2172519 - RNA, 17 nt, Human
ccuaaggaucucucagg

SEQ ID NO: 2172520 - RNA, 19 nt, Human
ccuaaggaucucucaggag

SEQ ID NO: 2172521 - RNA, 22 nt, Human
ccuaaucccugggcauugcuuu

SEQ ID NO: 2172522 - RNA, 24 nt, Human
ccuaaggaucucucaggagcacag

SEQ ID NO: 2172523 - RNA, 20 nt, Human
ccuaaucuauggucgggaga

SEQ ID NO: 2172524 - RNA, 14 nt, Human
ccuaaucuucugaa

SEQ ID NO: 2172525 - RNA, 15 nt, Human
ccuaaggacacacua

SEQ ID NO: 2172526 - RNA, 15 nt, Human
ccgaaggugcuggag

SEQ ID NO: 2172527 - RNA, 23 nt, Human
ccgaaggugcuggaggugggagc

SEQ ID NO: 2172528 - RNA, 13 nt, Human
ccgaagucuuuug

SEQ ID NO: 2172529 - RNA, 21 nt, Human
ccgaaguggacuggccccugg

SEQ ID NO: 2172530 - RNA, 23 nt, Human
ccgaaggugaggagcuugaaacc

SEQ ID NO: 2172531 - RNA, 16 nt, Human
ccgaauagcugggacu

SEQ ID NO: 2172532 - RNA, 17 nt, Human
ccgaauagcugggacua

SEQ ID NO: 2172533 - RNA, 18 nt, Human
ccgaccagacaccuugac

SEQ ID NO: 2172534 - RNA, 15 nt, Human
ccgaccaccugccca

SEQ ID NO: 2172535 - RNA, 15 nt, Human
ccgcagacaggacca

SEQ ID NO: 2172536 - RNA, 13 nt, Human
ccgaccagacacc

SEQ ID NO: 2172537 - RNA, 17 nt, Human
ccgaccagacaccuuga

SEQ ID NO: 2172538 - RNA, 19 nt, Human
ccgaaagggacuuggaagc

SEQ ID NO: 2172539 - RNA, 24 nt, Human
ccgaaacaggcuacucuccucggc

SEQ ID NO: 2172540 - RNA, 14 nt, Human
cccuuccuugcucu

SEQ ID NO: 2172541 - RNA, 17 nt, Human
cccuuccuuuucccugc

SEQ ID NO: 2172542 - RNA, 17 nt, Human
ccgaaaccaaagaagaa

SEQ ID NO: 2172543 - RNA, 18 nt, Human
cccuuccuuuucccugcu

SEQ ID NO: 2172544 - RNA, 16 nt, Human
ccgaaaacguggcugc

SEQ ID NO: 2172545 - RNA, 17 nt, Human
ccgaaaacguggcugcu

SEQ ID NO: 2172546 - RNA, 15 nt, Human
cccuuccucuuucca

SEQ ID NO: 2172547 - RNA, 22 nt, Human
cccugugcagccgcugagcgag

SEQ ID NO: 2172548 - RNA, 22 nt, Human
ccgcccagcugcaccugccagc

SEQ ID NO: 2172549 - RNA, 17 nt, Human
ccgcccagcugcaccug

SEQ ID NO: 2172550 - RNA, 19 nt, Human
ccgcccacuguccugggcg

SEQ ID NO: 2172551 - RNA, 16 nt, Human
ccgcccacuguccugg

SEQ ID NO: 2172552 - RNA, 18 nt, Human
ccgcccacuguccugggc

SEQ ID NO: 2172553 - RNA, 22 nt, Human
ccgcccagagacccaagcugcc

SEQ ID NO: 2172554 - RNA, 23 nt, Human
ccgcccacaggaagccugcaguc

SEQ ID NO: 2172555 - RNA, 13 nt, Human
ccgcccacugucc

SEQ ID NO: 2172556 - RNA, 15 nt, Human
ccgcccacuguccug

SEQ ID NO: 2172557 - RNA, 12 nt, Human
ccgcccaggcuu

SEQ ID NO: 2172558 - RNA, 20 nt, Human
ccgcccaggcuggccagccc

SEQ ID NO: 2172559 - RNA, 22 nt, Human
ccgcccaggcuggccagcccca

SEQ ID NO: 2172560 - RNA, 14 nt, Human
ccgcccaggcuggc

SEQ ID NO: 2172561 - RNA, 16 nt, Human
ccgcccaggcuggcca

SEQ ID NO: 2172562 - RNA, 17 nt, Human
ccgcccaggcuggccag

SEQ ID NO: 2172563 - RNA, 18 nt, Human
ccgcccaggcuggccagc

SEQ ID NO: 2172564 - RNA, 20 nt, Human
ccgcagaccuccccagcccc

SEQ ID NO: 2172565 - RNA, 21 nt, Human
ccgcagaccuccccagccccu

SEQ ID NO: 2172566 - RNA, 16 nt, Human
ccgaccacaccagagc

SEQ ID NO: 2172567 - RNA, 13 nt, Human
ccgcagaccuccc

SEQ ID NO: 2172568 - RNA, 15 nt, Human
ccgcagaccucccca

SEQ ID NO: 2172569 - RNA, 16 nt, Human
ccgcagaccuccccag

SEQ ID NO: 2172570 - RNA, 17 nt, Human
ccgcagaccuccccagc

SEQ ID NO: 2172571 - RNA, 18 nt, Human
ccgcagaccuccccagcc

SEQ ID NO: 2172572 - RNA, 19 nt, Human
ccgcagaccuccccagccc

SEQ ID NO: 2172573 - RNA, 16 nt, Human
ccgcagacaggaccag

SEQ ID NO: 2172574 - RNA, 17 nt, Human
ccgcagacaggaccagg

SEQ ID NO: 2172575 - RNA, 16 nt, Human
cccuguccuccucgga

SEQ ID NO: 2172576 - RNA, 15 nt, Human
cccuguccuccucgg

SEQ ID NO: 2172577 - RNA, 14 nt, Human
cccuguccuccucg

SEQ ID NO: 2172578 - RNA, 18 nt, Human
cccuguccucacugcucc

SEQ ID NO: 2172579 - RNA, 14 nt, Human
cccuguccucacug

SEQ ID NO: 2172580 - RNA, 15 nt, Human
cccuguccucacugc

SEQ ID NO: 2172581 - RNA, 16 nt, Human
cccuguccucacugcu

SEQ ID NO: 2172582 - RNA, 17 nt, Human
cccuguccucacugcuc

SEQ ID NO: 2172583 - RNA, 13 nt, Human
cccuguccucacu

SEQ ID NO: 2172584 - RNA, 13 nt, Human
cccugucccucua

SEQ ID NO: 2172585 - RNA, 24 nt, Human
cccugucccucccaccucugugac

SEQ ID NO: 2172586 - RNA, 16 nt, Human
cccugucgagacacuu

SEQ ID NO: 2172587 - RNA, 20 nt, Human
cccugucgagacacuugccu

SEQ ID NO: 2172588 - RNA, 15 nt, Human
cccugucgagacacu

SEQ ID NO: 2172589 - RNA, 20 nt, Human
cccuguccucucuggcuggg

SEQ ID NO: 2172590 - RNA, 22 nt, Human
cccuguccugauggucagcucc

SEQ ID NO: 2172591 - RNA, 23 nt, Human
cccuguccugauggucagcuccc

SEQ ID NO: 2172592 - RNA, 21 nt, Human
cccuuccucuccacugccuuc

SEQ ID NO: 2172593 - RNA, 14 nt, Human
cccugucuaaaaaa

SEQ ID NO: 2172594 - RNA, 22 nt, Human
cccugugcaaccucuuggccug

SEQ ID NO: 2172595 - RNA, 23 nt, Human
cccugugauggggcccugccucc

SEQ ID NO: 2172596 - RNA, 21 nt, Human
cccugugauggggcccugccu

SEQ ID NO: 2172597 - RNA, 22 nt, Human
cccugugauggggcccugccuc

SEQ ID NO: 2172598 - RNA, 15 nt, Human
ccucccacugggguc

SEQ ID NO: 2172599 - RNA, 13 nt, Human
ccucccacugggg

SEQ ID NO: 2172600 - RNA, 18 nt, Human
ccucccagaacacacucc

SEQ ID NO: 2172601 - RNA, 21 nt, Human
ccucccagaccugccucuucc

SEQ ID NO: 2172602 - RNA, 17 nt, Human
ccucccagaacacacuc

SEQ ID NO: 2172603 - RNA, 19 nt, Human
ccucccaccucugugaccu

SEQ ID NO: 2172604 - RNA, 12 nt, Human
ccucccaccucu

SEQ ID NO: 2172605 - RNA, 13 nt, Human
ccucccaccucug

SEQ ID NO: 2172606 - RNA, 14 nt, Human
ccucccaccucugu

SEQ ID NO: 2172607 - RNA, 15 nt, Human
ccucccaccucugug

SEQ ID NO: 2172608 - RNA, 21 nt, Human
ccucaugcccacccccugccc

SEQ ID NO: 2172609 - RNA, 22 nt, Human
ccucaugcccacccccugcccu

SEQ ID NO: 2172610 - RNA, 23 nt, Human
ccucaugcccacccccugcccug

SEQ ID NO: 2172611 - RNA, 20 nt, Human
ccuccccagcagguggggag

SEQ ID NO: 2172612 - RNA, 17 nt, Human
ccuccccagcagguggg

SEQ ID NO: 2172613 - RNA, 16 nt, Human
ccuccccagcaggugg

SEQ ID NO: 2172614 - RNA, 12 nt, Human
ccuccccagcag

SEQ ID NO: 2172615 - RNA, 13 nt, Human
ccuccccacgccc

SEQ ID NO: 2172616 - RNA, 15 nt, Human
ccuccccacgcccuc

SEQ ID NO: 2172617 - RNA, 17 nt, Human
ccuccccacgcccuccc

SEQ ID NO: 2172618 - RNA, 22 nt, Human
ccuccccacggccgcuccaggg

SEQ ID NO: 2172619 - RNA, 12 nt, Human
ccuccccagcuc

SEQ ID NO: 2172620 - RNA, 22 nt, Human
ccuccccagcauuccagccccu

SEQ ID NO: 2172621 - RNA, 12 nt, Human
ccuccccagccc

SEQ ID NO: 2172622 - RNA, 14 nt, Human
ccuccccagccccu

SEQ ID NO: 2172623 - RNA, 15 nt, Human
ccuccccagccccua

SEQ ID NO: 2172624 - RNA, 16 nt, Human
ccuccccagccccuag

SEQ ID NO: 2172625 - RNA, 17 nt, Human
ccuccccagccccuagc

SEQ ID NO: 2172626 - RNA, 22 nt, Human
ccuccccagccccuagcccagg

SEQ ID NO: 2172627 - RNA, 13 nt, Human
ccucaugcccacc

SEQ ID NO: 2172628 - RNA, 15 nt, Human
ccucaugcaucucca

SEQ ID NO: 2172629 - RNA, 18 nt, Human
ccucaugcaucuccaccu

SEQ ID NO: 2172630 - RNA, 14 nt, Human
ccucaugcccaccc

SEQ ID NO: 2172631 - RNA, 15 nt, Human
ccucaugcccacccc

SEQ ID NO: 2172632 - RNA, 20 nt, Human
ccucaugcccacccccugcc

SEQ ID NO: 2172633 - RNA, 24 nt, Human
ccucaugcccacccccugcccugc

SEQ ID NO: 2172634 - RNA, 13 nt, Human
ccucaggcaggaa

SEQ ID NO: 2172635 - RNA, 13 nt, Human
ccucaugcaucuc

SEQ ID NO: 2172636 - RNA, 11 nt, Human
ccucaggcagg

SEQ ID NO: 2172637 - RNA, 17 nt, Human
ccucccaacucacccca

SEQ ID NO: 2172638 - RNA, 20 nt, Human
ccucccaacucaccccagcc

SEQ ID NO: 2172639 - RNA, 21 nt, Human
ccucccaacucaccccagccc

SEQ ID NO: 2172640 - RNA, 23 nt, Human
ccucccaacucaccccagcccca

SEQ ID NO: 2172641 - RNA, 15 nt, Human
ccucagccuccugag

SEQ ID NO: 2172642 - RNA, 18 nt, Human
ccucagccuccugaguag

SEQ ID NO: 2172643 - RNA, 17 nt, Human
ccuaggaauucccagcc

SEQ ID NO: 2172644 - RNA, 16 nt, Human
ccuaggaauucccagc

SEQ ID NO: 2172645 - RNA, 14 nt, Human
ccucagccuggcca

SEQ ID NO: 2172646 - RNA, 13 nt, Human
ccucagccuggcc

SEQ ID NO: 2172647 - RNA, 12 nt, Human
ccucagccuggc

SEQ ID NO: 2172648 - RNA, 11 nt, Human
ccucagccugg

SEQ ID NO: 2172649 - RNA, 20 nt, Human
ccucaggcaaggucuggccu

SEQ ID NO: 2172650 - RNA, 19 nt, Human
ccucaggaggcaggaccuu

SEQ ID NO: 2172651 - RNA, 18 nt, Human
ccucagccuggccagaca

SEQ ID NO: 2172652 - RNA, 17 nt, Human
ccucagccuggccagac

SEQ ID NO: 2172653 - RNA, 16 nt, Human
ccucagccuggccaga

SEQ ID NO: 2172654 - RNA, 15 nt, Human
ccucagccuggccag

SEQ ID NO: 2172655 - RNA, 15 nt, Human
ccucaggcacuagcc

SEQ ID NO: 2172656 - RNA, 16 nt, Human
ccucaggcacuagccu

SEQ ID NO: 2172657 - RNA, 17 nt, Human
ccucaggcacuagccuu

SEQ ID NO: 2172658 - RNA, 18 nt, Human
ccucaggcacuagccuuu

SEQ ID NO: 2172659 - RNA, 13 nt, Human
ccucaggcagcuc

SEQ ID NO: 2172660 - RNA, 19 nt, Human
ccucaggcacuagccuuug

SEQ ID NO: 2172661 - RNA, 22 nt, Human
ccucaggcacuagccuuuggcu

SEQ ID NO: 2172662 - RNA, 14 nt, Human
ccucaggcagcuca

SEQ ID NO: 2172663 - RNA, 15 nt, Human
ccucaggcagcucaa

SEQ ID NO: 2172664 - RNA, 22 nt, Human
ccuagccuuauccucugaucuc

SEQ ID NO: 2172665 - RNA, 18 nt, Human
ccuagcugcuacaaagaa

SEQ ID NO: 2172666 - RNA, 23 nt, Human
ccuagcugcacagggcagcuggg

SEQ ID NO: 2172667 - RNA, 14 nt, Human
ccuagcugcuacaa

SEQ ID NO: 2172668 - RNA, 15 nt, Human
ccuagcugcuacaaa

SEQ ID NO: 2172669 - RNA, 17 nt, Human
ccuagcugcuacaaaga

SEQ ID NO: 2172670 - RNA, 19 nt, Human
ccuagcugcacagggcagc

SEQ ID NO: 2172671 - RNA, 21 nt, Human
ccuagcugcacagggcagcug

SEQ ID NO: 2172672 - RNA, 22 nt, Human
ccuagcugcacagggcagcugg

SEQ ID NO: 2172673 - RNA, 20 nt, Human
ccuagcuugggaggcuuccc

SEQ ID NO: 2172674 - RNA, 15 nt, Human
ccuagcuuagagccu

SEQ ID NO: 2172675 - RNA, 21 nt, Human
ccuagcuugggaggcuucccc

SEQ ID NO: 2172676 - RNA, 17 nt, Human
ccuagcuuuagacccug

SEQ ID NO: 2172677 - RNA, 23 nt, Human
ccuagcuuuagacccuggguggg

SEQ ID NO: 2172678 - RNA, 18 nt, Human
ccuagcuuuagacccugg

SEQ ID NO: 2172679 - RNA, 20 nt, Human
ccuagcuuuagacccugggu

SEQ ID NO: 2172680 - RNA, 21 nt, Human
ccuagcuuuagacccugggug

SEQ ID NO: 2172681 - RNA, 22 nt, Human
ccuagcuuuagacccugggugg

SEQ ID NO: 2172682 - RNA, 21 nt, Human
ccuagcugugaccucuccccu

SEQ ID NO: 2172683 - RNA, 13 nt, Human
ccuccccaggccg

SEQ ID NO: 2172684 - RNA, 14 nt, Human
ccuccccaggggag

SEQ ID NO: 2172685 - RNA, 12 nt, Human
ccuccccagggg

SEQ ID NO: 2172686 - RNA, 15 nt, Human
ccucccuggguucag

SEQ ID NO: 2172687 - RNA, 13 nt, Human
ccucccuggguuc

SEQ ID NO: 2172688 - RNA, 14 nt, Human
ccucccuggguuca

SEQ ID NO: 2172689 - RNA, 22 nt, Human
ccucccuggcugcccuggcccu

SEQ ID NO: 2172690 - RNA, 23 nt, Human
ccucccuggcugcccuggcccug

SEQ ID NO: 2172691 - RNA, 10 nt, Human
ccucccuggg

SEQ ID NO: 2172692 - RNA, 12 nt, Human
ccucccuggguu

SEQ ID NO: 2172693 - RNA, 14 nt, Human
ccucccuguccucc

SEQ ID NO: 2172694 - RNA, 11 nt, Human
ccucccugucc

SEQ ID NO: 2172695 - RNA, 12 nt, Human
ccucccuguccu

SEQ ID NO: 2172696 - RNA, 12 nt, Human
ccucccugucaa

SEQ ID NO: 2172697 - RNA, 23 nt, Human
ccucccugucaaagcugucacuu

SEQ ID NO: 2172698 - RNA, 21 nt, Human
ccucccuguugaagcucuggu

SEQ ID NO: 2172699 - RNA, 15 nt, Human
ccucccuguccuccu

SEQ ID NO: 2172700 - RNA, 22 nt, Human
ccucccuguugacgaagucucu

SEQ ID NO: 2172701 - RNA, 23 nt, Human
ccucccuguugacgaagucucuu

SEQ ID NO: 2172702 - RNA, 14 nt, Human
ccucccuguuugaa

SEQ ID NO: 2172703 - RNA, 13 nt, Human
ccucccuuagcuc

SEQ ID NO: 2172704 - RNA, 19 nt, Human
ccuccgauccuuccuccca

SEQ ID NO: 2172705 - RNA, 16 nt, Human
ccucccuguccuccuc

SEQ ID NO: 2172706 - RNA, 18 nt, Human
ccucccuguuccccagag

SEQ ID NO: 2172707 - RNA, 20 nt, Human
ccucccuguuccccagagaa

SEQ ID NO: 2172708 - RNA, 19 nt, Human
ccucccuguuccccagaga

SEQ ID NO: 2172709 - RNA, 20 nt, Human
ccucccuggcucccaugacc

SEQ ID NO: 2172710 - RNA, 18 nt, Human
ccucccuggcucccauga

SEQ ID NO: 2172711 - RNA, 16 nt, Human
ccucccuggcucccau

SEQ ID NO: 2172712 - RNA, 15 nt, Human
ccucccuggcuccca

SEQ ID NO: 2172713 - RNA, 12 nt, Human
ccucccuggcug

SEQ ID NO: 2172714 - RNA, 14 nt, Human
ccucccuggcugcc

SEQ ID NO: 2172715 - RNA, 15 nt, Human
ccucccuggcugccc

SEQ ID NO: 2172716 - RNA, 16 nt, Human
ccucccuggcugcccu

SEQ ID NO: 2172717 - RNA, 17 nt, Human
ccucccuggcugcccug

SEQ ID NO: 2172718 - RNA, 18 nt, Human
ccucccuggcugcccugg

SEQ ID NO: 2172719 - RNA, 20 nt, Human
ccucccuggcugcccuggcc

SEQ ID NO: 2172720 - RNA, 21 nt, Human
ccucccuggcugcccuggccc

SEQ ID NO: 2172721 - RNA, 14 nt, Human
ccucccuggcuccc

SEQ ID NO: 2172722 - RNA, 13 nt, Human
ccucccuggcucc

SEQ ID NO: 2172723 - RNA, 12 nt, Human
ccucccuggcuc

SEQ ID NO: 2172724 - RNA, 15 nt, Human
ccucccuggccuguu

SEQ ID NO: 2172725 - RNA, 23 nt, Human
ccucccuggaguguggcugagga

SEQ ID NO: 2172726 - RNA, 23 nt, Human
ccucccugcuguccccucuugcc

SEQ ID NO: 2172727 - RNA, 21 nt, Human
ccucccugcuguccccucuug

SEQ ID NO: 2172728 - RNA, 22 nt, Human
ccucccugcuguccccucuugc

SEQ ID NO: 2172729 - RNA, 14 nt, Human
ccucccuggccugu

SEQ ID NO: 2172730 - RNA, 12 nt, Human
ccucccuggagu

SEQ ID NO: 2172731 - RNA, 13 nt, Human
ccucccuggagug

SEQ ID NO: 2172732 - RNA, 14 nt, Human
ccucccugcugucc

SEQ ID NO: 2172733 - RNA, 15 nt, Human
ccucccugcuguccc

SEQ ID NO: 2172734 - RNA, 19 nt, Human
ccucccugcuguccccucu

SEQ ID NO: 2172735 - RNA, 20 nt, Human
ccucccugcuguccccucuu

SEQ ID NO: 2172736 - RNA, 16 nt, Human
ccuccuacccugcgcc

SEQ ID NO: 2172737 - RNA, 20 nt, Human
ccuccuaccccucccagcug

SEQ ID NO: 2172738 - RNA, 21 nt, Human
ccuccuaccccucccagcuga

SEQ ID NO: 2172739 - RNA, 16 nt, Human
ccuccuaccccuccca

SEQ ID NO: 2172740 - RNA, 17 nt, Human
ccuccuaccccucccag

SEQ ID NO: 2172741 - RNA, 18 nt, Human
ccuccuaccccucccagc

SEQ ID NO: 2172742 - RNA, 19 nt, Human
ccuccuaccccucccagcu

SEQ ID NO: 2172743 - RNA, 15 nt, Human
ccuccuaagagagag

SEQ ID NO: 2172744 - RNA, 15 nt, Human
ccuccuaccccuccc

SEQ ID NO: 2172745 - RNA, 15 nt, Human
ccuccguauuucaga

SEQ ID NO: 2172746 - RNA, 16 nt, Human
ccuccguauuucagac

SEQ ID NO: 2172747 - RNA, 18 nt, Human
ccuccguccaggagccug

SEQ ID NO: 2172748 - RNA, 14 nt, Human
ccuccgugcuuccu

SEQ ID NO: 2172749 - RNA, 16 nt, Human
ccuccguugggcccca

SEQ ID NO: 2172750 - RNA, 16 nt, Human
ccuccgccaggcgaga

SEQ ID NO: 2172751 - RNA, 14 nt, Human
ccuccgccaggcga

SEQ ID NO: 2172752 - RNA, 23 nt, Human
ccuccgccauucucaagcccugc

SEQ ID NO: 2172753 - RNA, 12 nt, Human
ccuccgcccugc

SEQ ID NO: 2172754 - RNA, 13 nt, Human
ccuccgcccugcc

SEQ ID NO: 2172755 - RNA, 14 nt, Human
ccuccgcccugcca

SEQ ID NO: 2172756 - RNA, 15 nt, Human
ccuccgcccugccac

SEQ ID NO: 2172757 - RNA, 16 nt, Human
ccuccgcccugccacu

SEQ ID NO: 2172758 - RNA, 18 nt, Human
ccuccgcccugccacuca

SEQ ID NO: 2172759 - RNA, 16 nt, Human
ccuccgccucccgggu

SEQ ID NO: 2172760 - RNA, 13 nt, Human
ccuccgccucccg

SEQ ID NO: 2172761 - RNA, 18 nt, Human
ccuccgggaccuggugcu

SEQ ID NO: 2172762 - RNA, 23 nt, Human
ccuccggcgucagccuccagccu

SEQ ID NO: 2172763 - RNA, 19 nt, Human
ccucgaagcgcgccacucg

SEQ ID NO: 2172764 - RNA, 18 nt, Human
ccucgaagcgcgccacuc

SEQ ID NO: 2172765 - RNA, 20 nt, Human
ccuccuuucucuucucuguu

SEQ ID NO: 2172766 - RNA, 21 nt, Human
ccuccuuucucuucucuguuc

SEQ ID NO: 2172767 - RNA, 14 nt, Human
ccucgcccuggguc

SEQ ID NO: 2172768 - RNA, 16 nt, Human
ccucgagcagaugaug

SEQ ID NO: 2172769 - RNA, 14 nt, Human
ccucgagggcaggg

SEQ ID NO: 2172770 - RNA, 16 nt, Human
ccucgagggcagggac

SEQ ID NO: 2172771 - RNA, 16 nt, Human
ccucgaacuggcugca

SEQ ID NO: 2172772 - RNA, 15 nt, Human
ccucgaacuggcugc

SEQ ID NO: 2172773 - RNA, 15 nt, Human
ccuccuuucucuucu

SEQ ID NO: 2172774 - RNA, 16 nt, Human
ccuccuuucucuucuc

SEQ ID NO: 2172775 - RNA, 18 nt, Human
ccuccuuugugaggaagc

SEQ ID NO: 2172776 - RNA, 19 nt, Human
ccuccuuugugaggaagcc

SEQ ID NO: 2172777 - RNA, 20 nt, Human
ccuccuuugugaggaagccg

SEQ ID NO: 2172778 - RNA, 18 nt, Human
ccucgggcccagccccca

SEQ ID NO: 2172779 - RNA, 16 nt, Human
ccucgggcccagcccc

SEQ ID NO: 2172780 - RNA, 17 nt, Human
ccucgggcccagccccc

SEQ ID NO: 2172781 - RNA, 17 nt, Human
ccucucggaaggcuggc

SEQ ID NO: 2172782 - RNA, 22 nt, Human
ccucuccuuuguauauuauuuc

SEQ ID NO: 2172783 - RNA, 16 nt, Human
ccucucgagggcaggg

SEQ ID NO: 2172784 - RNA, 21 nt, Human
ccucuccuuguggccugggcc

SEQ ID NO: 2172785 - RNA, 14 nt, Human
ccucuccuuuguau

SEQ ID NO: 2172786 - RNA, 15 nt, Human
ccucuccuuuguaua

SEQ ID NO: 2172787 - RNA, 16 nt, Human
ccucuccuuuguauau

SEQ ID NO: 2172788 - RNA, 18 nt, Human
ccucuccuuuguauauua

SEQ ID NO: 2172789 - RNA, 15 nt, Human
ccucuccuuccugug

SEQ ID NO: 2172790 - RNA, 13 nt, Human
ccucuccuuccug

SEQ ID NO: 2172791 - RNA, 20 nt, Human
ccucggcuuuucucagcugg

SEQ ID NO: 2172792 - RNA, 19 nt, Human
ccucggcuuuucucagcug

SEQ ID NO: 2172793 - RNA, 12 nt, Human
ccucgcugcuuc

SEQ ID NO: 2172794 - RNA, 15 nt, Human
ccucggcuccugcug

SEQ ID NO: 2172795 - RNA, 16 nt, Human
ccucggcuccugcugc

SEQ ID NO: 2172796 - RNA, 17 nt, Human
ccucggcuccugcugca

SEQ ID NO: 2172797 - RNA, 18 nt, Human
ccucggcuccugcugcac

SEQ ID NO: 2172798 - RNA, 19 nt, Human
ccucggcuccugcugcacc

SEQ ID NO: 2172799 - RNA, 20 nt, Human
ccucggcuccugcugcacca

SEQ ID NO: 2172800 - RNA, 22 nt, Human
ccucggcuccugcugcaccaac

SEQ ID NO: 2172801 - RNA, 17 nt, Human
ccucgggaaccucacuc

SEQ ID NO: 2172802 - RNA, 21 nt, Human
ccucgggaaccucacucuugc

SEQ ID NO: 2172803 - RNA, 23 nt, Human
ccucgggaaccucacucuugcca

SEQ ID NO: 2172804 - RNA, 13 nt, Human
ccucgggcccacc

SEQ ID NO: 2172805 - RNA, 14 nt, Human
ccucgggcccaccu

SEQ ID NO: 2172806 - RNA, 15 nt, Human
ccucgggcccaccug

SEQ ID NO: 2172807 - RNA, 16 nt, Human
ccucgggcccaccugg

SEQ ID NO: 2172808 - RNA, 17 nt, Human
ccucgggcccaccuggc

SEQ ID NO: 2172809 - RNA, 19 nt, Human
ccucgggcccaccuggcca

SEQ ID NO: 2172810 - RNA, 20 nt, Human
ccucgggcccaccuggccac

SEQ ID NO: 2172811 - RNA, 21 nt, Human
ccucgggcccaccuggccacc

SEQ ID NO: 2172812 - RNA, 22 nt, Human
ccucgggcccaccuggccaccu

SEQ ID NO: 2172813 - RNA, 13 nt, Human
ccucgggcccagc

SEQ ID NO: 2172814 - RNA, 14 nt, Human
ccucgggcccagcc

SEQ ID NO: 2172815 - RNA, 15 nt, Human
ccucgggcccagccc

SEQ ID NO: 2172816 - RNA, 20 nt, Human
ccucgcugccagcucuguau

SEQ ID NO: 2172817 - RNA, 19 nt, Human
ccucgcugccagcucugua

SEQ ID NO: 2172818 - RNA, 14 nt, Human
ccucgcugccagcu

SEQ ID NO: 2172819 - RNA, 13 nt, Human
ccucgcugccagc

SEQ ID NO: 2172820 - RNA, 12 nt, Human
ccucgccuggcc

SEQ ID NO: 2172821 - RNA, 13 nt, Human
ccucgccuggccu

SEQ ID NO: 2172822 - RNA, 14 nt, Human
ccucgccuggccug

SEQ ID NO: 2172823 - RNA, 15 nt, Human
ccucgccuggccuga

SEQ ID NO: 2172824 - RNA, 16 nt, Human
ccucgccuggccugag

SEQ ID NO: 2172825 - RNA, 18 nt, Human
ccucgccuggccugaggu

SEQ ID NO: 2172826 - RNA, 13 nt, Human
ccucgccugacaa

SEQ ID NO: 2172827 - RNA, 17 nt, Human
ccucgagggcagggacu

SEQ ID NO: 2172828 - RNA, 19 nt, Human
ccucucgguggccagcagg

SEQ ID NO: 2172829 - RNA, 21 nt, Human
ccucucggaaggcuggcuggg

SEQ ID NO: 2172830 - RNA, 16 nt, Human
ccucucugcagguccc

SEQ ID NO: 2172831 - RNA, 17 nt, Human
ccucucugcaggucccu

SEQ ID NO: 2172832 - RNA, 18 nt, Human
ccucucugcaggucccua

SEQ ID NO: 2172833 - RNA, 19 nt, Human
ccucucugcaggucccuaa

SEQ ID NO: 2172834 - RNA, 12 nt, Human
ccucucucacuc

SEQ ID NO: 2172835 - RNA, 13 nt, Human
ccucugccucaau

SEQ ID NO: 2172836 - RNA, 12 nt, Human
ccucugccucaa

SEQ ID NO: 2172837 - RNA, 11 nt, Human
ccucugccuca

SEQ ID NO: 2172838 - RNA, 20 nt, Human
ccucugccucugacacacag

SEQ ID NO: 2172839 - RNA, 14 nt, Human
ccucugcccugcgg

SEQ ID NO: 2172840 - RNA, 13 nt, Human
ccucugcccugcg

SEQ ID NO: 2172841 - RNA, 12 nt, Human
ccucugcccugc

SEQ ID NO: 2172842 - RNA, 11 nt, Human
ccucugcccug

SEQ ID NO: 2172843 - RNA, 21 nt, Human
ccucugccucugacacacagc

SEQ ID NO: 2172844 - RNA, 23 nt, Human
ccucugccucugacacacagcuc

SEQ ID NO: 2172845 - RNA, 11 nt, Human
ccucugccuga

SEQ ID NO: 2172846 - RNA, 20 nt, Human
ccucugccugaagucacaca

SEQ ID NO: 2172847 - RNA, 15 nt, Human
ccugccucuucucua

SEQ ID NO: 2172848 - RNA, 13 nt, Human
ccugccucugccc

SEQ ID NO: 2172849 - RNA, 14 nt, Human
ccugccucuguuug

SEQ ID NO: 2172850 - RNA, 20 nt, Human
ccugccuccugccugccccu

SEQ ID NO: 2172851 - RNA, 20 nt, Human
ccugccucucugcagguccc

SEQ ID NO: 2172852 - RNA, 21 nt, Human
ccugccucucugcaggucccu

SEQ ID NO: 2172853 - RNA, 15 nt, Human
ccugccucuguuuga

SEQ ID NO: 2172854 - RNA, 14 nt, Human
ccugccugagggcc

SEQ ID NO: 2172855 - RNA, 18 nt, Human
ccugccugagggccccuc

SEQ ID NO: 2172856 - RNA, 19 nt, Human
ccugccugagggccccucu

SEQ ID NO: 2172857 - RNA, 20 nt, Human
ccugccugagggccccucug

SEQ ID NO: 2172858 - RNA, 21 nt, Human
ccugccugagggccccucugc

SEQ ID NO: 2172859 - RNA, 22 nt, Human
ccugccugagggccccucugcc

SEQ ID NO: 2172860 - RNA, 12 nt, Human
ccugccuggagc

SEQ ID NO: 2172861 - RNA, 10 nt, Human
ccugcugcau

SEQ ID NO: 2172862 - RNA, 22 nt, Human
ccugcugcaguugccagucacc

SEQ ID NO: 2172863 - RNA, 21 nt, Human
ccugcugccgccucccagccu

SEQ ID NO: 2172864 - RNA, 18 nt, Human
ccugcugccgccucccag

SEQ ID NO: 2172865 - RNA, 15 nt, Human
ccugcugccgccucc

SEQ ID NO: 2172866 - RNA, 14 nt, Human
ccugcugccgccuc

SEQ ID NO: 2172867 - RNA, 11 nt, Human
ccugcugcagu

SEQ ID NO: 2172868 - RNA, 13 nt, Human
ccugccuggagcg

SEQ ID NO: 2172869 - RNA, 15 nt, Human
ccugcugcaggggcu

SEQ ID NO: 2172870 - RNA, 17 nt, Human
ccugcugcaggggcucu

SEQ ID NO: 2172871 - RNA, 20 nt, Human
ccugcugcaggggcucugga

SEQ ID NO: 2172872 - RNA, 21 nt, Human
ccugcugcaggggcucuggag

SEQ ID NO: 2172873 - RNA, 22 nt, Human
ccugcugcaggggcucuggaga

SEQ ID NO: 2172874 - RNA, 23 nt, Human
ccugcugcaggggcucuggagag

SEQ ID NO: 2172875 - RNA, 12 nt, Human
ccugcugcaguu

SEQ ID NO: 2172876 - RNA, 16 nt, Human
ccugcugcaguugcca

SEQ ID NO: 2172877 - RNA, 17 nt, Human
ccugccucucugcaggu

SEQ ID NO: 2172878 - RNA, 23 nt, Human
ccugccuccuuugugaggaagcc

SEQ ID NO: 2172879 - RNA, 21 nt, Human
ccugccuccuuugugaggaag

SEQ ID NO: 2172880 - RNA, 22 nt, Human
ccugccuccuuugugaggaagc

SEQ ID NO: 2172881 - RNA, 13 nt, Human
ccugccuccuuug

SEQ ID NO: 2172882 - RNA, 15 nt, Human
ccugccuccuuugug

SEQ ID NO: 2172883 - RNA, 19 nt, Human
ccugccuccuuugugagga

SEQ ID NO: 2172884 - RNA, 20 nt, Human
ccugccuccuuugugaggaa

SEQ ID NO: 2172885 - RNA, 17 nt, Human
ccucuucuucuucagaa

SEQ ID NO: 2172886 - RNA, 16 nt, Human
ccucuucuucuucaga

SEQ ID NO: 2172887 - RNA, 15 nt, Human
ccucuucuucuucag

SEQ ID NO: 2172888 - RNA, 15 nt, Human
ccucuuggaccucug

SEQ ID NO: 2172889 - RNA, 17 nt, Human
ccucuuggaccucugcu

SEQ ID NO: 2172890 - RNA, 18 nt, Human
ccucuuggaccucugcuc

SEQ ID NO: 2172891 - RNA, 19 nt, Human
ccucuuggaccucugcucu

SEQ ID NO: 2172892 - RNA, 21 nt, Human
ccucuuggaccucugcucuga

SEQ ID NO: 2172893 - RNA, 15 nt, Human
ccucuuggcugccuu

SEQ ID NO: 2172894 - RNA, 13 nt, Human
ccucuuggccuga

SEQ ID NO: 2172895 - RNA, 16 nt, Human
ccucuuugagugaagc

SEQ ID NO: 2172896 - RNA, 11 nt, Human
ccucuuugcuu

SEQ ID NO: 2172897 - RNA, 15 nt, Human
ccucuuggcagucac

SEQ ID NO: 2172898 - RNA, 15 nt, Human
ccucuuugcauggaa

SEQ ID NO: 2172899 - RNA, 19 nt, Human
ccucuuuggucuacacugu

SEQ ID NO: 2172900 - RNA, 17 nt, Human
ccucuuugcuuugcuuu

SEQ ID NO: 2172901 - RNA, 15 nt, Human
ccucuuugcuuugcu

SEQ ID NO: 2172902 - RNA, 14 nt, Human
ccucuuugcuuugc

SEQ ID NO: 2172903 - RNA, 13 nt, Human
ccucuuugcuuug

SEQ ID NO: 2172904 - RNA, 14 nt, Human
ccucuuuggcuccc

SEQ ID NO: 2172905 - RNA, 18 nt, Human
ccucuuuggcuccccugu

SEQ ID NO: 2172906 - RNA, 20 nt, Human
ccucuucugacgugccuuuu

SEQ ID NO: 2172907 - RNA, 17 nt, Human
ccucuucugacgugccu

SEQ ID NO: 2172908 - RNA, 18 nt, Human
ccucuucugacgugccuu

SEQ ID NO: 2172909 - RNA, 15 nt, Human
ccucuucuggcucaa

SEQ ID NO: 2172910 - RNA, 14 nt, Human
ccucuucugcaucu

SEQ ID NO: 2172911 - RNA, 20 nt, Human
ccucuucugcuuaggagaga

SEQ ID NO: 2172912 - RNA, 21 nt, Human
ccucuucugggagggcagcag

SEQ ID NO: 2172913 - RNA, 18 nt, Human
ccucuucugggagggcag

SEQ ID NO: 2172914 - RNA, 17 nt, Human
ccucuucugggagggca

SEQ ID NO: 2172915 - RNA, 13 nt, Human
ccucuucugggag

SEQ ID NO: 2172916 - RNA, 12 nt, Human
ccucuucucuuc

SEQ ID NO: 2172917 - RNA, 14 nt, Human
ccucuucucuuccu

SEQ ID NO: 2172918 - RNA, 16 nt, Human
ccucuucucuuccugu

SEQ ID NO: 2172919 - RNA, 17 nt, Human
ccucuucucuuccugua

SEQ ID NO: 2172920 - RNA, 21 nt, Human
ccucugccugaagucacacag

SEQ ID NO: 2172921 - RNA, 19 nt, Human
ccucugccugucccucuca

SEQ ID NO: 2172922 - RNA, 21 nt, Human
ccucugccugaaccuuccauc

SEQ ID NO: 2172923 - RNA, 19 nt, Human
ccucugccugaaccuucca

SEQ ID NO: 2172924 - RNA, 14 nt, Human
ccucugccucaaug

SEQ ID NO: 2172925 - RNA, 15 nt, Human
ccucugccugucucc

SEQ ID NO: 2172926 - RNA, 22 nt, Human
ccucugccugucccucucaggc

SEQ ID NO: 2172927 - RNA, 13 nt, Human
ccucugcggaccc

SEQ ID NO: 2172928 - RNA, 19 nt, Human
ccucugccugucuccccca

SEQ ID NO: 2172929 - RNA, 16 nt, Human
ccucugcggaccccag

SEQ ID NO: 2172930 - RNA, 17 nt, Human
ccucugcggaccccagc

SEQ ID NO: 2172931 - RNA, 18 nt, Human
ccucugcggaccccagcu

SEQ ID NO: 2172932 - RNA, 20 nt, Human
ccucugcggaccccagcugu

SEQ ID NO: 2172933 - RNA, 11 nt, Human
ccucugcuacg

SEQ ID NO: 2172934 - RNA, 21 nt, Human
ccucugcuacguuccuauugu

SEQ ID NO: 2172935 - RNA, 16 nt, Human
ccugcagagagaagcc

SEQ ID NO: 2172936 - RNA, 13 nt, Human
ccugcagagagaa

SEQ ID NO: 2172937 - RNA, 15 nt, Human
ccugcagagagaagc

SEQ ID NO: 2172938 - RNA, 14 nt, Human
ccugcagagggcac

SEQ ID NO: 2172939 - RNA, 23 nt, Human
ccugcaggcagccaggccacaag

SEQ ID NO: 2172940 - RNA, 18 nt, Human
ccugcaggcagccaggcc

SEQ ID NO: 2172941 - RNA, 19 nt, Human
ccugcaggcagccaggcca

SEQ ID NO: 2172942 - RNA, 20 nt, Human
ccugcaggcagccaggccac

SEQ ID NO: 2172943 - RNA, 21 nt, Human
ccugcaggcagccaggccaca

SEQ ID NO: 2172944 - RNA, 15 nt, Human
ccugcaggcagccag

SEQ ID NO: 2172945 - RNA, 12 nt, Human
ccugcagagggc

SEQ ID NO: 2172946 - RNA, 16 nt, Human
ccugcaggcagccagg

SEQ ID NO: 2172947 - RNA, 17 nt, Human
ccugcaggcagccaggc

SEQ ID NO: 2172948 - RNA, 18 nt, Human
ccugaguuccuagccacc

SEQ ID NO: 2172949 - RNA, 16 nt, Human
ccugcagacucacugu

SEQ ID NO: 2172950 - RNA, 11 nt, Human
ccugcagagag

SEQ ID NO: 2172951 - RNA, 23 nt, Human
ccugaguggaucuccaaggacca

SEQ ID NO: 2172952 - RNA, 16 nt, Human
ccugaguggugccaaa

SEQ ID NO: 2172953 - RNA, 14 nt, Human
ccugaguuccuagc

SEQ ID NO: 2172954 - RNA, 17 nt, Human
ccugcagagcugcgggc

SEQ ID NO: 2172955 - RNA, 14 nt, Human
ccugcagagcugcg

SEQ ID NO: 2172956 - RNA, 13 nt, Human
ccugcagagcugc

SEQ ID NO: 2172957 - RNA, 12 nt, Human
ccugcagagcug

SEQ ID NO: 2172958 - RNA, 14 nt, Human
ccugagugccuggc

SEQ ID NO: 2172959 - RNA, 15 nt, Human
ccugagugccuggcc

SEQ ID NO: 2172960 - RNA, 13 nt, Human
ccugaguggaucu

SEQ ID NO: 2172961 - RNA, 14 nt, Human
ccugaguggaucuc

SEQ ID NO: 2172962 - RNA, 18 nt, Human
ccugaguggaucuccaag

SEQ ID NO: 2172963 - RNA, 14 nt, Human
ccugaguggugcca

SEQ ID NO: 2172964 - RNA, 19 nt, Human
ccugaguggaucuccaagg

SEQ ID NO: 2172965 - RNA, 20 nt, Human
ccugaguggaucuccaagga

SEQ ID NO: 2172966 - RNA, 16 nt, Human
ccugagucuccugugc

SEQ ID NO: 2172967 - RNA, 18 nt, Human
ccugagucuccugugccc

SEQ ID NO: 2172968 - RNA, 23 nt, Human
ccugagucugcuauauuuucaug

SEQ ID NO: 2172969 - RNA, 16 nt, Human
ccugaggggccucuua

SEQ ID NO: 2172970 - RNA, 23 nt, Human
ccugaggggcaucugccccuccc

SEQ ID NO: 2172971 - RNA, 22 nt, Human
ccugaggggcaucugccccucc

SEQ ID NO: 2172972 - RNA, 20 nt, Human
ccugaggggcaucugccccu

SEQ ID NO: 2172973 - RNA, 19 nt, Human
ccugaggggcaucugcccc

SEQ ID NO: 2172974 - RNA, 12 nt, Human
ccugaggggccu

SEQ ID NO: 2172975 - RNA, 18 nt, Human
ccugaggggcaucugccc

SEQ ID NO: 2172976 - RNA, 20 nt, Human
ccugacuccucuaagccacu

SEQ ID NO: 2172977 - RNA, 14 nt, Human
ccugaggcuguggu

SEQ ID NO: 2172978 - RNA, 16 nt, Human
ccugaccugucucacc

SEQ ID NO: 2172979 - RNA, 14 nt, Human
ccugaccugugagc

SEQ ID NO: 2172980 - RNA, 19 nt, Human
ccucuuuggcuccccugua

SEQ ID NO: 2172981 - RNA, 20 nt, Human
ccucuuuggcuccccuguac

SEQ ID NO: 2172982 - RNA, 21 nt, Human
ccugaccugugagcccagcug

SEQ ID NO: 2172983 - RNA, 20 nt, Human
ccugaccugugagcccagcu

SEQ ID NO: 2172984 - RNA, 19 nt, Human
ccugaccugugagcccagc

SEQ ID NO: 2172985 - RNA, 18 nt, Human
ccugaccugugagcccag

SEQ ID NO: 2172986 - RNA, 10 nt, Human
ccugacucaa

SEQ ID NO: 2172987 - RNA, 13 nt, Human
ccugacucauucu

SEQ ID NO: 2172988 - RNA, 22 nt, Human
ccugaccuugaggagucuugug

SEQ ID NO: 2172989 - RNA, 23 nt, Human
ccugaccuugaggagucuugugu

SEQ ID NO: 2172990 - RNA, 21 nt, Human
ccucuuugcuuugcuuucugc

SEQ ID NO: 2172991 - RNA, 21 nt, Human
ccugaccuugaggagucuugu

SEQ ID NO: 2172992 - RNA, 22 nt, Human
ccugaccugugagcccagcugg

SEQ ID NO: 2172993 - RNA, 13 nt, Human
ccugacuccucua

SEQ ID NO: 2172994 - RNA, 15 nt, Human
ccugacuccucuaag

SEQ ID NO: 2172995 - RNA, 18 nt, Human
ccugacucgucugacugu

SEQ ID NO: 2172996 - RNA, 17 nt, Human
ccugaggcugggcuccc

SEQ ID NO: 2172997 - RNA, 19 nt, Human
ccugaggcugggcucccuu

SEQ ID NO: 2172998 - RNA, 21 nt, Human
ccugaggcugggcucccuucc

SEQ ID NO: 2172999 - RNA, 20 nt, Human
caugggaaaugucaacaagu

SEQ ID NO: 2173000 - RNA, 19 nt, Human
caugggaagacgaggcccu

SEQ ID NO: 2173001 - RNA, 20 nt, Human
caugggaagacgaggcccuc

SEQ ID NO: 2173002 - RNA, 19 nt, Human
cauggcuugccacagcucu

SEQ ID NO: 2173003 - RNA, 15 nt, Human
cauggcuugccacag

SEQ ID NO: 2173004 - RNA, 18 nt, Human
cauggcuugccacagcuc

SEQ ID NO: 2173005 - RNA, 18 nt, Human
caugggaaagccaccucu

SEQ ID NO: 2173006 - RNA, 18 nt, Human
caugggaaaggggaaguu

SEQ ID NO: 2173007 - RNA, 14 nt, Human
cauggccgugaacu

SEQ ID NO: 2173008 - RNA, 16 nt, Human
cauggccuaugcacau

SEQ ID NO: 2173009 - RNA, 21 nt, Human
cauggccucuucagaucucua

SEQ ID NO: 2173010 - RNA, 15 nt, Human
cauggcuuccuccug

SEQ ID NO: 2173011 - RNA, 17 nt, Human
cauggcuuccuccugcg

SEQ ID NO: 2173012 - RNA, 20 nt, Human
cauggccuauuauauuaaaa

SEQ ID NO: 2173013 - RNA, 21 nt, Human
cauggccuauuauauuaaaau

SEQ ID NO: 2173014 - RNA, 16 nt, Human
cauggcuuccuccucc

SEQ ID NO: 2173015 - RNA, 18 nt, Human
cauggcuuccuccucccu

SEQ ID NO: 2173016 - RNA, 22 nt, Human
cauggccucuucagaucucuaa

SEQ ID NO: 2173017 - RNA, 17 nt, Human
cauggccuaugcacaua

SEQ ID NO: 2173018 - RNA, 19 nt, Human
cauggccuaugcacauaug

SEQ ID NO: 2173019 - RNA, 16 nt, Human
caugcuccuggcccac

SEQ ID NO: 2173020 - RNA, 14 nt, Human
caugcuccuggccc

SEQ ID NO: 2173021 - RNA, 17 nt, Human
caugcuccuggcccacu

SEQ ID NO: 2173022 - RNA, 20 nt, Human
caugcuccuggcccacugca

SEQ ID NO: 2173023 - RNA, 15 nt, Human
cauggccagguggcc

SEQ ID NO: 2173024 - RNA, 20 nt, Human
caugcaaggggaaaaucuca

SEQ ID NO: 2173025 - RNA, 19 nt, Human
caugcaaggggaaaaucuc

SEQ ID NO: 2173026 - RNA, 12 nt, Human
cauggccccucu

SEQ ID NO: 2173027 - RNA, 13 nt, Human
cauggccccucug

SEQ ID NO: 2173028 - RNA, 16 nt, Human
cauggccccucugacc

SEQ ID NO: 2173029 - RNA, 22 nt, Human
cauggcccucauuaaugacacu

SEQ ID NO: 2173030 - RNA, 15 nt, Human
cauggcccucauuaa

SEQ ID NO: 2173031 - RNA, 15 nt, Human
cauggccccugugag

SEQ ID NO: 2173032 - RNA, 16 nt, Human
cauggccccugugagu

SEQ ID NO: 2173033 - RNA, 17 nt, Human
cauggccccucugaccu

SEQ ID NO: 2173034 - RNA, 18 nt, Human
cauggccccucugaccug

SEQ ID NO: 2173035 - RNA, 14 nt, Human
cauggcccuggggu

SEQ ID NO: 2173036 - RNA, 12 nt, Human
cauggcccuggg

SEQ ID NO: 2173037 - RNA, 23 nt, Human
cauggcccucccaguaccuccug

SEQ ID NO: 2173038 - RNA, 14 nt, Human
cauggcccucccag

SEQ ID NO: 2173039 - RNA, 22 nt, Human
cauggcccucccaguaccuccu

SEQ ID NO: 2173040 - RNA, 14 nt, Human
caugcaaggggaaa

SEQ ID NO: 2173041 - RNA, 22 nt, Human
caugcaaaugcuguauucuucu

SEQ ID NO: 2173042 - RNA, 16 nt, Human
caugcaaaugcuguau

SEQ ID NO: 2173043 - RNA, 14 nt, Human
caugcaaaugcugu

SEQ ID NO: 2173044 - RNA, 16 nt, Human
caugcaaaggcuggga

SEQ ID NO: 2173045 - RNA, 14 nt, Human
caugcaaaggcugg

SEQ ID NO: 2173046 - RNA, 15 nt, Human
caugcaaaggcuggg

SEQ ID NO: 2173047 - RNA, 15 nt, Human
caugcaaggucauuu

SEQ ID NO: 2173048 - RNA, 12 nt, Human
caugcaagguca

SEQ ID NO: 2173049 - RNA, 17 nt, Human
caugacaagccccaggc

SEQ ID NO: 2173050 - RNA, 16 nt, Human
caugacaagccccagg

SEQ ID NO: 2173051 - RNA, 18 nt, Human
caugacaagccccaggca

SEQ ID NO: 2173052 - RNA, 23 nt, Human
caugauggagucagguuuggggu

SEQ ID NO: 2173053 - RNA, 19 nt, Human
caugauggagucagguuug

SEQ ID NO: 2173054 - RNA, 12 nt, Human
caugauggaguc

SEQ ID NO: 2173055 - RNA, 15 nt, Human
caugaugcugggauu

SEQ ID NO: 2173056 - RNA, 19 nt, Human
caugauggcaacagaucug

SEQ ID NO: 2173057 - RNA, 15 nt, Human
caugauggcaacaga

SEQ ID NO: 2173058 - RNA, 19 nt, Human
caugauggagcgcaccugc

SEQ ID NO: 2173059 - RNA, 18 nt, Human
caugauggagcgcaccug

SEQ ID NO: 2173060 - RNA, 16 nt, Human
caugaugcugggauuu

SEQ ID NO: 2173061 - RNA, 15 nt, Human
caugacaagccccag

SEQ ID NO: 2173062 - RNA, 14 nt, Human
caugacaagcccca

SEQ ID NO: 2173063 - RNA, 21 nt, Human
caugacaacuuugccagcuuu

SEQ ID NO: 2173064 - RNA, 19 nt, Human
caugacaacuuugccagcu

SEQ ID NO: 2173065 - RNA, 21 nt, Human
caugaauuuuuuucaucuucu

SEQ ID NO: 2173066 - RNA, 13 nt, Human
caugacaaagacu

SEQ ID NO: 2173067 - RNA, 16 nt, Human
caugaauuugugaagg

SEQ ID NO: 2173068 - RNA, 16 nt, Human
caugaaugcacacuag

SEQ ID NO: 2173069 - RNA, 22 nt, Human
caugaaugguauggaacucucu

SEQ ID NO: 2173070 - RNA, 21 nt, Human
caugaaucccacccacaugug

SEQ ID NO: 2173071 - RNA, 15 nt, Human
caugaaucgcuucuc

SEQ ID NO: 2173072 - RNA, 16 nt, Human
caugaaucgcuucucu

SEQ ID NO: 2173073 - RNA, 17 nt, Human
caugaaucgcuucucuu

SEQ ID NO: 2173074 - RNA, 18 nt, Human
caugaaucgcuucucuuu

SEQ ID NO: 2173075 - RNA, 20 nt, Human
caugaaucgcuucucuuuug

SEQ ID NO: 2173076 - RNA, 15 nt, Human
caugaaucugcaaug

SEQ ID NO: 2173077 - RNA, 21 nt, Human
caugaauauuuaguguucaua

SEQ ID NO: 2173078 - RNA, 20 nt, Human
caucugucaccaauugguua

SEQ ID NO: 2173079 - RNA, 23 nt, Human
caugaaguuuccuuggcuggugc

SEQ ID NO: 2173080 - RNA, 16 nt, Human
caugaauccaguccag

SEQ ID NO: 2173081 - RNA, 14 nt, Human
cauguucugcuuuc

SEQ ID NO: 2173082 - RNA, 13 nt, Human
cauguuaauuuca

SEQ ID NO: 2173083 - RNA, 18 nt, Human
cauguucuuaauucuuag

SEQ ID NO: 2173084 - RNA, 18 nt, Human
cauguuggccaggcuggu

SEQ ID NO: 2173085 - RNA, 17 nt, Human
cauguuggccaggcugg

SEQ ID NO: 2173086 - RNA, 19 nt, Human
cauguuggccaggcugguc

SEQ ID NO: 2173087 - RNA, 19 nt, Human
cauuauauuuauuacugua

SEQ ID NO: 2173088 - RNA, 19 nt, Human
cauuaucacuuuaaagccc

SEQ ID NO: 2173089 - RNA, 20 nt, Human
cauguuggccaggcugcucu

SEQ ID NO: 2173090 - RNA, 12 nt, Human
cauuaucaugug

SEQ ID NO: 2173091 - RNA, 13 nt, Human
cauuaucaugugu

SEQ ID NO: 2173092 - RNA, 14 nt, Human
cauuaucaugugua

SEQ ID NO: 2173093 - RNA, 15 nt, Human
cauuaucauguguaa

SEQ ID NO: 2173094 - RNA, 16 nt, Human
cauuaucauguguaau

SEQ ID NO: 2173095 - RNA, 18 nt, Human
cauuaucauguguaauca

SEQ ID NO: 2173096 - RNA, 22 nt, Human
cauuaucauguguaaucaauaa

SEQ ID NO: 2173097 - RNA, 13 nt, Human
cauuaucccugaa

SEQ ID NO: 2173098 - RNA, 17 nt, Human
cauguuacauaagauaa

SEQ ID NO: 2173099 - RNA, 16 nt, Human
cauguuacauaagaua

SEQ ID NO: 2173100 - RNA, 15 nt, Human
cauguccaagaagcc

SEQ ID NO: 2173101 - RNA, 16 nt, Human
cauguccaagaagccc

SEQ ID NO: 2173102 - RNA, 21 nt, Human
cauguuacauaagauaaaugu

SEQ ID NO: 2173103 - RNA, 17 nt, Human
cauguuaccuccuauaa

SEQ ID NO: 2173104 - RNA, 19 nt, Human
cauguauuggccuggaggu

SEQ ID NO: 2173105 - RNA, 16 nt, Human
cauguucuuaauucuu

SEQ ID NO: 2173106 - RNA, 13 nt, Human
cauguucuuaauu

SEQ ID NO: 2173107 - RNA, 22 nt, Human
cauguauguuuugguaucuguu

SEQ ID NO: 2173108 - RNA, 12 nt, Human
cauguauguuuu

SEQ ID NO: 2173109 - RNA, 21 nt, Human
cauguauguuuugguaucugu

SEQ ID NO: 2173110 - RNA, 17 nt, Human
cauguaugucuuggaca

SEQ ID NO: 2173111 - RNA, 18 nt, Human
cauguaugucuuggacac

SEQ ID NO: 2173112 - RNA, 21 nt, Human
cauguaugucuuggacacugu

SEQ ID NO: 2173113 - RNA, 22 nt, Human
cauguaugucuuggacacugua

SEQ ID NO: 2173114 - RNA, 23 nt, Human
cauguaucuaugcauuuucugga

SEQ ID NO: 2173115 - RNA, 13 nt, Human
cauguaugucuug

SEQ ID NO: 2173116 - RNA, 17 nt, Human
cauguauugcacauugu

SEQ ID NO: 2173117 - RNA, 18 nt, Human
cauguauugcacauugua

SEQ ID NO: 2173118 - RNA, 21 nt, Human
cauguauugcacauuguaaaa

SEQ ID NO: 2173119 - RNA, 15 nt, Human
cauguauuauuucau

SEQ ID NO: 2173120 - RNA, 14 nt, Human
cauguauuggccug

SEQ ID NO: 2173121 - RNA, 15 nt, Human
cauguauuggccugg

SEQ ID NO: 2173122 - RNA, 16 nt, Human
cauguauuggccugga

SEQ ID NO: 2173123 - RNA, 17 nt, Human
cauguauuggccuggag

SEQ ID NO: 2173124 - RNA, 18 nt, Human
cauguauuggccuggagg

SEQ ID NO: 2173125 - RNA, 20 nt, Human
cauucuccuuguguuacuaa

SEQ ID NO: 2173126 - RNA, 13 nt, Human
cauucucugaaga

SEQ ID NO: 2173127 - RNA, 12 nt, Human
cauucucugaag

SEQ ID NO: 2173128 - RNA, 20 nt, Human
cauucucucuccuguccaac

SEQ ID NO: 2173129 - RNA, 18 nt, Human
cauucucucuccugucca

SEQ ID NO: 2173130 - RNA, 16 nt, Human
cauucucucuccuguc

SEQ ID NO: 2173131 - RNA, 15 nt, Human
cauucucucuccugu

SEQ ID NO: 2173132 - RNA, 16 nt, Human
cauucucucuccugua

SEQ ID NO: 2173133 - RNA, 12 nt, Human
cauucucucucc

SEQ ID NO: 2173134 - RNA, 16 nt, Human
cauucugaaggagccc

SEQ ID NO: 2173135 - RNA, 23 nt, Human
cauucucugucucauccaucauc

SEQ ID NO: 2173136 - RNA, 19 nt, Human
cauucucugucucauccau

SEQ ID NO: 2173137 - RNA, 14 nt, Human
cauucucugucuca

SEQ ID NO: 2173138 - RNA, 23 nt, Human
cauuaucgggagcagugucuucc

SEQ ID NO: 2173139 - RNA, 21 nt, Human
cauuaucgggagcagugucuu

SEQ ID NO: 2173140 - RNA, 20 nt, Human
cauuaucgggagcagugucu

SEQ ID NO: 2173141 - RNA, 18 nt, Human
cauuaucgggagcagugu

SEQ ID NO: 2173142 - RNA, 17 nt, Human
cauuaucgggagcagug

SEQ ID NO: 2173143 - RNA, 14 nt, Human
cauuaucccugaau

SEQ ID NO: 2173144 - RNA, 16 nt, Human
cauuaucgggagcagu

SEQ ID NO: 2173145 - RNA, 13 nt, Human
cauuauuaucaac

SEQ ID NO: 2173146 - RNA, 19 nt, Human
cauuauuaguacugcucuu

SEQ ID NO: 2173147 - RNA, 17 nt, Human
cauucuccaccugccag

SEQ ID NO: 2173148 - RNA, 18 nt, Human
cauucuccaccugccagg

SEQ ID NO: 2173149 - RNA, 19 nt, Human
cauucuccaccugccaggg

SEQ ID NO: 2173150 - RNA, 21 nt, Human
cauucuccaccugccagggac

SEQ ID NO: 2173151 - RNA, 21 nt, Human
ccaacuccagaaagugacaag

SEQ ID NO: 2173152 - RNA, 21 nt, Human
ccaacucaccccagccccaaa

SEQ ID NO: 2173153 - RNA, 20 nt, Human
ccaaaucacugaacuuugcu

SEQ ID NO: 2173154 - RNA, 14 nt, Human
ccaacucaccugag

SEQ ID NO: 2173155 - RNA, 16 nt, Human
ccaagcucugcuccuc

SEQ ID NO: 2173156 - RNA, 12 nt, Human
ccaacuccagga

SEQ ID NO: 2173157 - RNA, 14 nt, Human
ccaagcucugcucc

SEQ ID NO: 2173158 - RNA, 15 nt, Human
ccaagcucugcuccu

SEQ ID NO: 2173159 - RNA, 15 nt, Human
ccaaaucaaaauaug

SEQ ID NO: 2173160 - RNA, 23 nt, Human
ccaaagugccacucauuccugua

SEQ ID NO: 2173161 - RNA, 15 nt, Human
ccaaaucagcugcua

SEQ ID NO: 2173162 - RNA, 23 nt, Human
ccaaaucagcugcuacuacuccu

SEQ ID NO: 2173163 - RNA, 16 nt, Human
ccaaaucauaguggcu

SEQ ID NO: 2173164 - RNA, 14 nt, Human
ccaacuauggccug

SEQ ID NO: 2173165 - RNA, 15 nt, Human
ccaacuauggccugu

SEQ ID NO: 2173166 - RNA, 16 nt, Human
ccaacuauggccugug

SEQ ID NO: 2173167 - RNA, 13 nt, Human
ccaacucacccca

SEQ ID NO: 2173168 - RNA, 11 nt, Human
ccaauucuuac

SEQ ID NO: 2173169 - RNA, 20 nt, Human
ccaauuccuugcacauagua

SEQ ID NO: 2173170 - RNA, 12 nt, Human
ccaauuccuugu

SEQ ID NO: 2173171 - RNA, 14 nt, Human
ccaauuccuuguag

SEQ ID NO: 2173172 - RNA, 16 nt, Human
ccaauucagacaggca

SEQ ID NO: 2173173 - RNA, 14 nt, Human
ccaauucagacagg

SEQ ID NO: 2173174 - RNA, 19 nt, Human
ccaauucgaacuuuuucca

SEQ ID NO: 2173175 - RNA, 21 nt, Human
ccaauucaacccuuugcccca

SEQ ID NO: 2173176 - RNA, 15 nt, Human
ccaauuauguuaaac

SEQ ID NO: 2173177 - RNA, 17 nt, Human
ccaauuauguuaaacua

SEQ ID NO: 2173178 - RNA, 21 nt, Human
ccaauggagacugucucaaga

SEQ ID NO: 2173179 - RNA, 14 nt, Human
ccaauuauguuaaa

SEQ ID NO: 2173180 - RNA, 23 nt, Human
ccaauggacuaacuugucuuugg

SEQ ID NO: 2173181 - RNA, 14 nt, Human
ccaaugggagcuca

SEQ ID NO: 2173182 - RNA, 20 nt, Human
ccaaggagggugagugcaag

SEQ ID NO: 2173183 - RNA, 12 nt, Human
ccaaggaggauu

SEQ ID NO: 2173184 - RNA, 18 nt, Human
ccaaugccccacuggcag

SEQ ID NO: 2173185 - RNA, 14 nt, Human
ccaaugcugauguc

SEQ ID NO: 2173186 - RNA, 18 nt, Human
ccaaugcuuuuaucaaac

SEQ ID NO: 2173187 - RNA, 17 nt, Human
ccaaugcugauguccuc

SEQ ID NO: 2173188 - RNA, 17 nt, Human
ccaauggaaccuccuuu

SEQ ID NO: 2173189 - RNA, 18 nt, Human
ccaauggaaccuccuuuc

SEQ ID NO: 2173190 - RNA, 19 nt, Human
ccaauggaaccuccuuucu

SEQ ID NO: 2173191 - RNA, 14 nt, Human
ccaaggagaugaag

SEQ ID NO: 2173192 - RNA, 23 nt, Human
ccaaggagaugaagcaaacacau

SEQ ID NO: 2173193 - RNA, 21 nt, Human
ccaaggaggaaaaacagacaa

SEQ ID NO: 2173194 - RNA, 13 nt, Human
ccaaggaggaaaa

SEQ ID NO: 2173195 - RNA, 22 nt, Human
ccaaggagcugcuauagccugg

SEQ ID NO: 2173196 - RNA, 16 nt, Human
ccaaggagcugcuaua

SEQ ID NO: 2173197 - RNA, 15 nt, Human
ccaaggagcugcuau

SEQ ID NO: 2173198 - RNA, 14 nt, Human
ccaaggagcugcua

SEQ ID NO: 2173199 - RNA, 13 nt, Human
ccaaggagcugcu

SEQ ID NO: 2173200 - RNA, 12 nt, Human
ccaaggagcugc

SEQ ID NO: 2173201 - RNA, 19 nt, Human
ccaaggagaaacagagaca

SEQ ID NO: 2173202 - RNA, 14 nt, Human
ccaaggagacacaa

SEQ ID NO: 2173203 - RNA, 21 nt, Human
ccaaggagaaacagagacagg

SEQ ID NO: 2173204 - RNA, 18 nt, Human
ccaaggagaaacagagac

SEQ ID NO: 2173205 - RNA, 15 nt, Human
ccaaggagaaacaga

SEQ ID NO: 2173206 - RNA, 14 nt, Human
ccaaggagaaacag

SEQ ID NO: 2173207 - RNA, 15 nt, Human
ccaaggacugccgac

SEQ ID NO: 2173208 - RNA, 13 nt, Human
ccaaggacugccg

SEQ ID NO: 2173209 - RNA, 11 nt, Human
ccaaggacugc

SEQ ID NO: 2173210 - RNA, 18 nt, Human
ccaaggaccccucaccuu

SEQ ID NO: 2173211 - RNA, 23 nt, Human
ccaaggacugagggacucugaag

SEQ ID NO: 2173212 - RNA, 22 nt, Human
ccaaggaccccucaccuugcaa

SEQ ID NO: 2173213 - RNA, 15 nt, Human
ccaaggacugaggga

SEQ ID NO: 2173214 - RNA, 18 nt, Human
ccaaggaaaccacagcug

SEQ ID NO: 2173215 - RNA, 19 nt, Human
ccaaggaaaccacagcugc

SEQ ID NO: 2173216 - RNA, 20 nt, Human
ccaaggaaaccacagcugcu

SEQ ID NO: 2173217 - RNA, 21 nt, Human
ccaaggaaaccacagcugcug

SEQ ID NO: 2173218 - RNA, 22 nt, Human
ccaaggaaaccacagcugcugg

SEQ ID NO: 2173219 - RNA, 23 nt, Human
ccaaggaaaccacagcugcugga

SEQ ID NO: 2173220 - RNA, 16 nt, Human
ccaaggaccccucacc

SEQ ID NO: 2173221 - RNA, 15 nt, Human
ccaaggaccccucac

SEQ ID NO: 2173222 - RNA, 14 nt, Human
ccaaggaccccuca

SEQ ID NO: 2173223 - RNA, 14 nt, Human
ccaaggaccagguu

SEQ ID NO: 2173224 - RNA, 13 nt, Human
ccaaggaccaggu

SEQ ID NO: 2173225 - RNA, 14 nt, Human
ccaaagugcuggga

SEQ ID NO: 2173226 - RNA, 16 nt, Human
ccaaagucuuaaaaua

SEQ ID NO: 2173227 - RNA, 13 nt, Human
ccaaaguauuuuu

SEQ ID NO: 2173228 - RNA, 22 nt, Human
ccaaaguacacuguuucaaacu

SEQ ID NO: 2173229 - RNA, 14 nt, Human
ccaaaagcugcuca

SEQ ID NO: 2173230 - RNA, 14 nt, Human
ccaaaagcacuuac

SEQ ID NO: 2173231 - RNA, 14 nt, Human
ccaaaaggcagaag

SEQ ID NO: 2173232 - RNA, 13 nt, Human
ccaaaaaaauacu

SEQ ID NO: 2173233 - RNA, 21 nt, Human
ccaaaagucaaaaggugccug

SEQ ID NO: 2173234 - RNA, 23 nt, Human
ccaaaagauugcugaaauuuuau

SEQ ID NO: 2173235 - RNA, 15 nt, Human
ccaaaagcuuuuuau

SEQ ID NO: 2173236 - RNA, 22 nt, Human
ccaaaagucaaaaggugccugu

SEQ ID NO: 2173237 - RNA, 15 nt, Human
ccaaaaguggccucu

SEQ ID NO: 2173238 - RNA, 21 nt, Human
ccaaaaguggccucuuugucu

SEQ ID NO: 2173239 - RNA, 18 nt, Human
ccaaaaguggccucuuug

SEQ ID NO: 2173240 - RNA, 21 nt, Human
cauuuuuuuucagcagacuau

SEQ ID NO: 2173241 - RNA, 23 nt, Human
cauuuuuuuuaagaaaaaggaug

SEQ ID NO: 2173242 - RNA, 16 nt, Human
cauuuguuggaaugaa

SEQ ID NO: 2173243 - RNA, 14 nt, Human
cauuuguauaaaau

SEQ ID NO: 2173244 - RNA, 16 nt, Human
cauuuguauaaaauaa

SEQ ID NO: 2173245 - RNA, 22 nt, Human
cauuugggguagcuagaggaac

SEQ ID NO: 2173246 - RNA, 17 nt, Human
cauuugggguagcuaga

SEQ ID NO: 2173247 - RNA, 21 nt, Human
cauuuggcagggguggcugcc

SEQ ID NO: 2173248 - RNA, 18 nt, Human
cauuuggcauuuauuugu

SEQ ID NO: 2173249 - RNA, 18 nt, Human
cauuugggagacauguga

SEQ ID NO: 2173250 - RNA, 20 nt, Human
cauuugggagacaugugaca

SEQ ID NO: 2173251 - RNA, 21 nt, Human
cauuuggugguuucagaaaug

SEQ ID NO: 2173252 - RNA, 20 nt, Human
cauuuggucaagauuuugaa

SEQ ID NO: 2173253 - RNA, 20 nt, Human
cauuuaucaaucaguauaau

SEQ ID NO: 2173254 - RNA, 18 nt, Human
cauuuaucaaucaguaua

SEQ ID NO: 2173255 - RNA, 20 nt, Human
cauuuauccaccuccaucuu

SEQ ID NO: 2173256 - RNA, 17 nt, Human
cauuuaucuuucuacag

SEQ ID NO: 2173257 - RNA, 17 nt, Human
cauuuaugagcucuuca

SEQ ID NO: 2173258 - RNA, 16 nt, Human
cauuuaugaagcaagc

SEQ ID NO: 2173259 - RNA, 19 nt, Human
cauuuggcagagcuucuuc

SEQ ID NO: 2173260 - RNA, 15 nt, Human
cauuuaugauuuaau

SEQ ID NO: 2173261 - RNA, 16 nt, Human
cauuuaugauuuaaua

SEQ ID NO: 2173262 - RNA, 23 nt, Human
cauuuaugagcucuucauguuuc

SEQ ID NO: 2173263 - RNA, 20 nt, Human
cauuuaugagcucuucaugu

SEQ ID NO: 2173264 - RNA, 18 nt, Human
cauuggguggguaaauuc

SEQ ID NO: 2173265 - RNA, 19 nt, Human
cauuggguggguaaauuca

SEQ ID NO: 2173266 - RNA, 23 nt, Human
cauuggguuguagccaaagguuc

SEQ ID NO: 2173267 - RNA, 21 nt, Human
cauuggguccugggucuuuca

SEQ ID NO: 2173268 - RNA, 20 nt, Human
cauuggguccugggucuuuc

SEQ ID NO: 2173269 - RNA, 16 nt, Human
cauuuaggugaggaag

SEQ ID NO: 2173270 - RNA, 14 nt, Human
cauugguggacuac

SEQ ID NO: 2173271 - RNA, 20 nt, Human
cauuuaguccaaugucuuuu

SEQ ID NO: 2173272 - RNA, 14 nt, Human
cauuuaguucuuug

SEQ ID NO: 2173273 - RNA, 17 nt, Human
cauuuagucaugugacc

SEQ ID NO: 2173274 - RNA, 20 nt, Human
cauuuaguucuuuguuauuu

SEQ ID NO: 2173275 - RNA, 17 nt, Human
cauuuaguuugauuauu

SEQ ID NO: 2173276 - RNA, 18 nt, Human
cauuuaggugaggaagca

SEQ ID NO: 2173277 - RNA, 14 nt, Human
cauugguucuugua

SEQ ID NO: 2173278 - RNA, 15 nt, Human
cauuuagguuucuga

SEQ ID NO: 2173279 - RNA, 15 nt, Human
cauuuagucauguga

SEQ ID NO: 2173280 - RNA, 18 nt, Human
cauuggacccacaugagg

SEQ ID NO: 2173281 - RNA, 16 nt, Human
cauuggacccuuccau

SEQ ID NO: 2173282 - RNA, 16 nt, Human
cauuggagauguuuag

SEQ ID NO: 2173283 - RNA, 20 nt, Human
cauuggauucugagagcugu

SEQ ID NO: 2173284 - RNA, 15 nt, Human
cauuggauucugaga

SEQ ID NO: 2173285 - RNA, 17 nt, Human
cauuggacccuuccaug

SEQ ID NO: 2173286 - RNA, 18 nt, Human
cauuggaagaccccaccc

SEQ ID NO: 2173287 - RNA, 20 nt, Human
cauuggaagaccccacccaa

SEQ ID NO: 2173288 - RNA, 17 nt, Human
cauuggaagaccccacc

SEQ ID NO: 2173289 - RNA, 16 nt, Human
caguucauguuugcuu

SEQ ID NO: 2173290 - RNA, 21 nt, Human
caguucaguggcagggcucag

SEQ ID NO: 2173291 - RNA, 22 nt, Human
caguucaguggcagggcucagg

SEQ ID NO: 2173292 - RNA, 23 nt, Human
caguucauauguaccauguacau

SEQ ID NO: 2173293 - RNA, 18 nt, Human
caguucaguaccuggagg

SEQ ID NO: 2173294 - RNA, 19 nt, Human
caguucaguaccuggagga

SEQ ID NO: 2173295 - RNA, 20 nt, Human
caguucaguaccuggaggag

SEQ ID NO: 2173296 - RNA, 21 nt, Human
caguucaguaccuggaggagg

SEQ ID NO: 2173297 - RNA, 22 nt, Human
caguucaguaccuggaggagga

SEQ ID NO: 2173298 - RNA, 18 nt, Human
caguucaguggcagggcu

SEQ ID NO: 2173299 - RNA, 19 nt, Human
caguucaguggcagggcuc

SEQ ID NO: 2173300 - RNA, 20 nt, Human
caguucaguggcagggcuca

SEQ ID NO: 2173301 - RNA, 23 nt, Human
caguucaguaauaaacuguguuu

SEQ ID NO: 2173302 - RNA, 15 nt, Human
caguucaguaccugg

SEQ ID NO: 2173303 - RNA, 16 nt, Human
caguucaguaccugga

SEQ ID NO: 2173304 - RNA, 23 nt, Human
caguucaggagucccaaggaaag

SEQ ID NO: 2173305 - RNA, 20 nt, Human
caguucaggagucccaagga

SEQ ID NO: 2173306 - RNA, 17 nt, Human
caguucaggagucccaa

SEQ ID NO: 2173307 - RNA, 17 nt, Human
caguucagcaccacccu

SEQ ID NO: 2173308 - RNA, 15 nt, Human
caguucagcuugggg

SEQ ID NO: 2173309 - RNA, 16 nt, Human
caguucagcaccaccc

SEQ ID NO: 2173310 - RNA, 13 nt, Human
caguucagcacca

SEQ ID NO: 2173311 - RNA, 14 nt, Human
caguucagcuuggg

SEQ ID NO: 2173312 - RNA, 23 nt, Human
caguucagaaucacuucugagaa

SEQ ID NO: 2173313 - RNA, 16 nt, Human
caguucaccugcacuu

SEQ ID NO: 2173314 - RNA, 14 nt, Human
caguucaagaaagc

SEQ ID NO: 2173315 - RNA, 13 nt, Human
caguucacccuga

SEQ ID NO: 2173316 - RNA, 19 nt, Human
caguucaaucucccgcugc

SEQ ID NO: 2173317 - RNA, 22 nt, Human
caguucaaucucccgcugcugc

SEQ ID NO: 2173318 - RNA, 23 nt, Human
caguucaaucucccgcugcugcu

SEQ ID NO: 2173319 - RNA, 20 nt, Human
caguuaugugaaugaucucu

SEQ ID NO: 2173320 - RNA, 18 nt, Human
caguuaugugaaugaucu

SEQ ID NO: 2173321 - RNA, 22 nt, Human
caguuaugauuuuuuuuucaua

SEQ ID NO: 2173322 - RNA, 22 nt, Human
caguuauuauauuuacaaaugg

SEQ ID NO: 2173323 - RNA, 15 nt, Human
caguucauugcacuu

SEQ ID NO: 2173324 - RNA, 21 nt, Human
caguucccagaaggcauauca

SEQ ID NO: 2173325 - RNA, 13 nt, Human
caguucccagaau

SEQ ID NO: 2173326 - RNA, 14 nt, Human
caguucccagaauc

SEQ ID NO: 2173327 - RNA, 23 nt, Human
caguucaguggcagggcucagga

SEQ ID NO: 2173328 - RNA, 18 nt, Human
caguucauguuugcuuca

SEQ ID NO: 2173329 - RNA, 18 nt, Human
caguucauugcacuuuga

SEQ ID NO: 2173330 - RNA, 23 nt, Human
caguucccagaaucaaagcaaug

SEQ ID NO: 2173331 - RNA, 15 nt, Human
caguucccagaauca

SEQ ID NO: 2173332 - RNA, 16 nt, Human
caguucccagaaucaa

SEQ ID NO: 2173333 - RNA, 15 nt, Human
cagugcaacacugaa

SEQ ID NO: 2173334 - RNA, 20 nt, Human
cagugcaaaugucagauaca

SEQ ID NO: 2173335 - RNA, 17 nt, Human
cagugcaacagcacugg

SEQ ID NO: 2173336 - RNA, 21 nt, Human
cagugcccacaggaucagucu

SEQ ID NO: 2173337 - RNA, 16 nt, Human
cagugcccaccaacau

SEQ ID NO: 2173338 - RNA, 19 nt, Human
cagugcaagagacucuggc

SEQ ID NO: 2173339 - RNA, 11 nt, Human
cagugcaagag

SEQ ID NO: 2173340 - RNA, 18 nt, Human
cagugcaagagacucugg

SEQ ID NO: 2173341 - RNA, 18 nt, Human
cagugcccacaggaucag

SEQ ID NO: 2173342 - RNA, 22 nt, Human
cagugcccacaggaucagucug

SEQ ID NO: 2173343 - RNA, 12 nt, Human
cagucugcugcc

SEQ ID NO: 2173344 - RNA, 22 nt, Human
cagugauuuuuuucuuguaauu

SEQ ID NO: 2173345 - RNA, 15 nt, Human
cagugcaaaugucag

SEQ ID NO: 2173346 - RNA, 19 nt, Human
cagugauuuuuuucuugua

SEQ ID NO: 2173347 - RNA, 23 nt, Human
cagucugauucccaagcucugcu

SEQ ID NO: 2173348 - RNA, 22 nt, Human
cagugauuaccagggacugagg

SEQ ID NO: 2173349 - RNA, 13 nt, Human
cagugggugcccc

SEQ ID NO: 2173350 - RNA, 23 nt, Human
cagugggucccacuuccccuccu

SEQ ID NO: 2173351 - RNA, 15 nt, Human
cagugguaagcucug

SEQ ID NO: 2173352 - RNA, 20 nt, Human
cagugguaugaucacggcuc

SEQ ID NO: 2173353 - RNA, 14 nt, Human
cagugggucccacu

SEQ ID NO: 2173354 - RNA, 15 nt, Human
cagugggucccacuu

SEQ ID NO: 2173355 - RNA, 17 nt, Human
cagugggucccacuucc

SEQ ID NO: 2173356 - RNA, 18 nt, Human
cagugggucccacuuccc

SEQ ID NO: 2173357 - RNA, 20 nt, Human
cagugggucccacuuccccu

SEQ ID NO: 2173358 - RNA, 22 nt, Human
cagugggucccacuuccccucc

SEQ ID NO: 2173359 - RNA, 16 nt, Human
cagugggagcugccug

SEQ ID NO: 2173360 - RNA, 21 nt, Human
cagugcccaccaacaucccau

SEQ ID NO: 2173361 - RNA, 17 nt, Human
cagugggagcugccugu

SEQ ID NO: 2173362 - RNA, 18 nt, Human
cagugggagcugccuguu

SEQ ID NO: 2173363 - RNA, 13 nt, Human
caguuacucugaa

SEQ ID NO: 2173364 - RNA, 18 nt, Human
caguuacucagcccuggg

SEQ ID NO: 2173365 - RNA, 17 nt, Human
caguuacucagcccugg

SEQ ID NO: 2173366 - RNA, 16 nt, Human
caguuacucagcccug

SEQ ID NO: 2173367 - RNA, 15 nt, Human
caguuacucagcccu

SEQ ID NO: 2173368 - RNA, 14 nt, Human
caguuacucagccc

SEQ ID NO: 2173369 - RNA, 13 nt, Human
caguuacucagcc

SEQ ID NO: 2173370 - RNA, 20 nt, Human
caguuacucagaauucucua

SEQ ID NO: 2173371 - RNA, 16 nt, Human
caguuacucugaaggg

SEQ ID NO: 2173372 - RNA, 15 nt, Human
caguuacucugaagg

SEQ ID NO: 2173373 - RNA, 19 nt, Human
caguuacucagcccugggc

SEQ ID NO: 2173374 - RNA, 19 nt, Human
caguuaggguugaguuacu

SEQ ID NO: 2173375 - RNA, 21 nt, Human
cagugcaagagacucuggccu

SEQ ID NO: 2173376 - RNA, 16 nt, Human
caguuagcaaacuuug

SEQ ID NO: 2173377 - RNA, 15 nt, Human
caguuagcaaacuuu

SEQ ID NO: 2173378 - RNA, 21 nt, Human
cagugguaugaucacggcuca

SEQ ID NO: 2173379 - RNA, 13 nt, Human
caguggucucaca

SEQ ID NO: 2173380 - RNA, 18 nt, Human
caguggucaaaccgcacu

SEQ ID NO: 2173381 - RNA, 19 nt, Human
cagugguccauggaaugcu

SEQ ID NO: 2173382 - RNA, 20 nt, Human
cagugguccacaucccggga

SEQ ID NO: 2173383 - RNA, 17 nt, Human
cagugguaagcucuggc

SEQ ID NO: 2173384 - RNA, 20 nt, Human
cagugguaagcucuggcuuu

SEQ ID NO: 2173385 - RNA, 23 nt, Human
caguggugaagaaaacuccuuua

SEQ ID NO: 2173386 - RNA, 14 nt, Human
caguggugaagaaa

SEQ ID NO: 2173387 - RNA, 17 nt, Human
caguggugaagaaaacu

SEQ ID NO: 2173388 - RNA, 19 nt, Human
caguggugcgaucuggguu

SEQ ID NO: 2173389 - RNA, 21 nt, Human
caguuauuauauuuacaaaug

SEQ ID NO: 2173390 - RNA, 17 nt, Human
caguuauuauauuuaca

SEQ ID NO: 2173391 - RNA, 20 nt, Human
caguuauggcuauaggugcu

SEQ ID NO: 2173392 - RNA, 19 nt, Human
caguuauggcuauaggugc

SEQ ID NO: 2173393 - RNA, 13 nt, Human
caguuauggcuau

SEQ ID NO: 2173394 - RNA, 21 nt, Human
caguuauaaguagcaggccaa

SEQ ID NO: 2173395 - RNA, 23 nt, Human
cagucuauccacagagaguccca

SEQ ID NO: 2173396 - RNA, 22 nt, Human
cagucuacccagagaagccccu

SEQ ID NO: 2173397 - RNA, 13 nt, Human
cagucuauccaca

SEQ ID NO: 2173398 - RNA, 15 nt, Human
cagucuauccacaga

SEQ ID NO: 2173399 - RNA, 16 nt, Human
cagucuauccacagag

SEQ ID NO: 2173400 - RNA, 17 nt, Human
cagucuauccacagaga

SEQ ID NO: 2173401 - RNA, 22 nt, Human
cagucuauccacagagaguccc

SEQ ID NO: 2173402 - RNA, 22 nt, Human
cagucucggguggcuagucaga

SEQ ID NO: 2173403 - RNA, 15 nt, Human
cagucucggguggcu

SEQ ID NO: 2173404 - RNA, 18 nt, Human
cagucucccuuucccuuc

SEQ ID NO: 2173405 - RNA, 22 nt, Human
cagucucccuucucccaugagg

SEQ ID NO: 2173406 - RNA, 22 nt, Human
cagucucccuuucccuucuugg

SEQ ID NO: 2173407 - RNA, 21 nt, Human
cagucugauucccaagcucug

SEQ ID NO: 2173408 - RNA, 22 nt, Human
cagucugauucccaagcucugc

SEQ ID NO: 2173409 - RNA, 21 nt, Human
cagucucucucucucucuccc

SEQ ID NO: 2173410 - RNA, 23 nt, Human
cagucuacccaccucagccuccu

SEQ ID NO: 2173411 - RNA, 14 nt, Human
cagucuacccagag

SEQ ID NO: 2173412 - RNA, 15 nt, Human
cagucuacccagaga

SEQ ID NO: 2173413 - RNA, 19 nt, Human
cagucuacccagagaagcc

SEQ ID NO: 2173414 - RNA, 21 nt, Human
cagucuacccaccucagccuc

SEQ ID NO: 2173415 - RNA, 18 nt, Human
cagucuaauuuuuauuca

SEQ ID NO: 2173416 - RNA, 13 nt, Human
cagucuaauuuuu

SEQ ID NO: 2173417 - RNA, 17 nt, Human
cagucuaauuuuuauuc

SEQ ID NO: 2173418 - RNA, 17 nt, Human
cagucgugccugugucc

SEQ ID NO: 2173419 - RNA, 15 nt, Human
cagucgugccugugu

SEQ ID NO: 2173420 - RNA, 16 nt, Human
caucuguaacucuaaa

SEQ ID NO: 2173421 - RNA, 17 nt, Human
caucuguaccucugccu

SEQ ID NO: 2173422 - RNA, 20 nt, Human
caucuguauaaguaagaaaa

SEQ ID NO: 2173423 - RNA, 21 nt, Human
caucuguauaaguaagaaaau

SEQ ID NO: 2173424 - RNA, 22 nt, Human
caucuguauaaguaagaaaaua

SEQ ID NO: 2173425 - RNA, 19 nt, Human
caucuguaacucuaaaaga

SEQ ID NO: 2173426 - RNA, 18 nt, Human
caucuguauacccucugu

SEQ ID NO: 2173427 - RNA, 19 nt, Human
caucuguauacccucuguu

SEQ ID NO: 2173428 - RNA, 20 nt, Human
caucuguauacccucuguuu

SEQ ID NO: 2173429 - RNA, 21 nt, Human
caucuguauacccucuguuuc

SEQ ID NO: 2173430 - RNA, 23 nt, Human
caucuggauaggagccugcuggu

SEQ ID NO: 2173431 - RNA, 23 nt, Human
caucuggccguugauguuggcug

SEQ ID NO: 2173432 - RNA, 16 nt, Human
caucuggauaggagcc

SEQ ID NO: 2173433 - RNA, 19 nt, Human
caucuaaccucaucuucuu

SEQ ID NO: 2173434 - RNA, 18 nt, Human
caucuaaccucaucuucu

SEQ ID NO: 2173435 - RNA, 20 nt, Human
caucuggcaacaucuuuauc

SEQ ID NO: 2173436 - RNA, 18 nt, Human
caucuggauaggagccug

SEQ ID NO: 2173437 - RNA, 20 nt, Human
caucuggauaggagccugcu

SEQ ID NO: 2173438 - RNA, 21 nt, Human
caucuggauaggagccugcug

SEQ ID NO: 2173439 - RNA, 22 nt, Human
caucuggauaggagccugcugg

SEQ ID NO: 2173440 - RNA, 22 nt, Human
caucguuuucuucacuguccuc

SEQ ID NO: 2173441 - RNA, 23 nt, Human
caucuaaaaauagacuuaaaucu

SEQ ID NO: 2173442 - RNA, 20 nt, Human
cauccugcagccuccuccug

SEQ ID NO: 2173443 - RNA, 20 nt, Human
cauccugccuuagagccagg

SEQ ID NO: 2173444 - RNA, 21 nt, Human
cauccugccuuagagccaggc

SEQ ID NO: 2173445 - RNA, 15 nt, Human
caucuaaauaccugc

SEQ ID NO: 2173446 - RNA, 15 nt, Human
caucuaaccucaucu

SEQ ID NO: 2173447 - RNA, 18 nt, Human
caucuaaauaccugcccu

SEQ ID NO: 2173448 - RNA, 21 nt, Human
caucuaaacugcccccucugc

SEQ ID NO: 2173449 - RNA, 15 nt, Human
caucuaaacugcccc

SEQ ID NO: 2173450 - RNA, 12 nt, Human
cauccugcaggc

SEQ ID NO: 2173451 - RNA, 22 nt, Human
cauccugacucugcccccugcu

SEQ ID NO: 2173452 - RNA, 17 nt, Human
cauccugacucugcccc

SEQ ID NO: 2173453 - RNA, 19 nt, Human
cauccugacucugcccccu

SEQ ID NO: 2173454 - RNA, 20 nt, Human
cauccugacucugcccccug

SEQ ID NO: 2173455 - RNA, 12 nt, Human
cauccugcagcc

SEQ ID NO: 2173456 - RNA, 19 nt, Human
cauccugaggcuccacuug

SEQ ID NO: 2173457 - RNA, 18 nt, Human
cauccugaggcuccacuu

SEQ ID NO: 2173458 - RNA, 14 nt, Human
caucagcuccagcu

SEQ ID NO: 2173459 - RNA, 13 nt, Human
caucagcugcuga

SEQ ID NO: 2173460 - RNA, 19 nt, Human
cauccauuccucagggaca

SEQ ID NO: 2173461 - RNA, 18 nt, Human
cauccauuccucagggac

SEQ ID NO: 2173462 - RNA, 17 nt, Human
cauccauuccucaggga

SEQ ID NO: 2173463 - RNA, 16 nt, Human
cauccauuccucaggg

SEQ ID NO: 2173464 - RNA, 19 nt, Human
cauccauuucaucuauuuc

SEQ ID NO: 2173465 - RNA, 22 nt, Human
cauccauuuauuuggcaucugu

SEQ ID NO: 2173466 - RNA, 19 nt, Human
caucccaaacccuucagug

SEQ ID NO: 2173467 - RNA, 14 nt, Human
caucagaaggagaa

SEQ ID NO: 2173468 - RNA, 19 nt, Human
caucagcacgauuucuguu

SEQ ID NO: 2173469 - RNA, 11 nt, Human
caucagaagga

SEQ ID NO: 2173470 - RNA, 20 nt, Human
caucagcauaccuuuauugu

SEQ ID NO: 2173471 - RNA, 13 nt, Human
caucagaagauaa

SEQ ID NO: 2173472 - RNA, 13 nt, Human
caucagcauaccu

SEQ ID NO: 2173473 - RNA, 17 nt, Human
caucagcauaccuuuau

SEQ ID NO: 2173474 - RNA, 18 nt, Human
caucagcauaccuuuauu

SEQ ID NO: 2173475 - RNA, 21 nt, Human
caucagcacgauuucuguuua

SEQ ID NO: 2173476 - RNA, 13 nt, Human
caucccacugcuc

SEQ ID NO: 2173477 - RNA, 14 nt, Human
caucccacacccug

SEQ ID NO: 2173478 - RNA, 11 nt, Human
caucccagccc

SEQ ID NO: 2173479 - RNA, 23 nt, Human
cauccauuucaucuauuucugag

SEQ ID NO: 2173480 - RNA, 20 nt, Human
cauccauuucaucuauuucu

SEQ ID NO: 2173481 - RNA, 23 nt, Human
caucccaaaaucauaagauauuu

SEQ ID NO: 2173482 - RNA, 15 nt, Human
caucccacaaguggu

SEQ ID NO: 2173483 - RNA, 13 nt, Human
caucccaacuguc

SEQ ID NO: 2173484 - RNA, 20 nt, Human
caucccaaacccuucagugc

SEQ ID NO: 2173485 - RNA, 12 nt, Human
caucccagcccc

SEQ ID NO: 2173486 - RNA, 22 nt, Human
cauccucuguacagagcccacg

SEQ ID NO: 2173487 - RNA, 14 nt, Human
cauccucuucugcu

SEQ ID NO: 2173488 - RNA, 11 nt, Human
caucccagagg

SEQ ID NO: 2173489 - RNA, 19 nt, Human
caucccacgcacuccauga

SEQ ID NO: 2173490 - RNA, 16 nt, Human
cauccugacucugccc

SEQ ID NO: 2173491 - RNA, 15 nt, Human
cauccucuucugcuu

SEQ ID NO: 2173492 - RNA, 18 nt, Human
cauccucuucugcuuagg

SEQ ID NO: 2173493 - RNA, 17 nt, Human
caucagaaacacccuca

SEQ ID NO: 2173494 - RNA, 17 nt, Human
caucacuuuucagugau

SEQ ID NO: 2173495 - RNA, 11 nt, Human
caucagaaagg

SEQ ID NO: 2173496 - RNA, 19 nt, Human
caucagaaacacccucaca

SEQ ID NO: 2173497 - RNA, 14 nt, Human
caucagaaaggaau

SEQ ID NO: 2173498 - RNA, 19 nt, Human
caucacuuguacaaaauaa

SEQ ID NO: 2173499 - RNA, 15 nt, Human
caucacuuuucagug

SEQ ID NO: 2173500 - RNA, 16 nt, Human
caucacuuuucaguga

SEQ ID NO: 2173501 - RNA, 15 nt, Human
caguuugagacagga

SEQ ID NO: 2173502 - RNA, 18 nt, Human
caguuugagacaggagac

SEQ ID NO: 2173503 - RNA, 16 nt, Human
caguuugagacaggag

SEQ ID NO: 2173504 - RNA, 23 nt, Human
caguuuguuaguaugaggcauuu

SEQ ID NO: 2173505 - RNA, 18 nt, Human
caguuuguuuacacacgu

SEQ ID NO: 2173506 - RNA, 14 nt, Human
caguuuguuuacac

SEQ ID NO: 2173507 - RNA, 16 nt, Human
caguuuguuuacacac

SEQ ID NO: 2173508 - RNA, 16 nt, Human
caguuuuaacuagaau

SEQ ID NO: 2173509 - RNA, 13 nt, Human
caguuuguuuaca

SEQ ID NO: 2173510 - RNA, 21 nt, Human
caguuuguuaguaugaggcau

SEQ ID NO: 2173511 - RNA, 22 nt, Human
caguuucagguguuuaguugca

SEQ ID NO: 2173512 - RNA, 15 nt, Human
caguuucagguguuu

SEQ ID NO: 2173513 - RNA, 17 nt, Human
caguuuccucaucuguc

SEQ ID NO: 2173514 - RNA, 23 nt, Human
caguuucacuuucacauagaugu

SEQ ID NO: 2173515 - RNA, 18 nt, Human
caguuucaauucagugcu

SEQ ID NO: 2173516 - RNA, 13 nt, Human
caguuugaacaaa

SEQ ID NO: 2173517 - RNA, 15 nt, Human
caguuucuuagcuuu

SEQ ID NO: 2173518 - RNA, 18 nt, Human
caguuucuuagcuuuuua

SEQ ID NO: 2173519 - RNA, 14 nt, Human
caguuucugccucu

SEQ ID NO: 2173520 - RNA, 15 nt, Human
caguuucuguccugc

SEQ ID NO: 2173521 - RNA, 19 nt, Human
caguuucuguccugcuggu

SEQ ID NO: 2173522 - RNA, 19 nt, Human
caguuuaucauucaagugu

SEQ ID NO: 2173523 - RNA, 23 nt, Human
caguuguucaauaauaaauauuu

SEQ ID NO: 2173524 - RNA, 14 nt, Human
caguuuaucauuca

SEQ ID NO: 2173525 - RNA, 15 nt, Human
caguuuaucauucaa

SEQ ID NO: 2173526 - RNA, 16 nt, Human
caguuuaucauucaag

SEQ ID NO: 2173527 - RNA, 18 nt, Human
caguuuaucauucaagug

SEQ ID NO: 2173528 - RNA, 18 nt, Human
caguuguuagugugucuu

SEQ ID NO: 2173529 - RNA, 22 nt, Human
caguuguuagugugucuuagug

SEQ ID NO: 2173530 - RNA, 11 nt, Human
caguuuuccuu

SEQ ID NO: 2173531 - RNA, 13 nt, Human
caguuuuccauug

SEQ ID NO: 2173532 - RNA, 18 nt, Human
caguuuuccaugaaaacg

SEQ ID NO: 2173533 - RNA, 17 nt, Human
caguuuuccaugaaaac

SEQ ID NO: 2173534 - RNA, 16 nt, Human
caguuuuccaugaaaa

SEQ ID NO: 2173535 - RNA, 15 nt, Human
caguuuuccaugaaa

SEQ ID NO: 2173536 - RNA, 14 nt, Human
caguuuuccaugaa

SEQ ID NO: 2173537 - RNA, 13 nt, Human
caguuuuccauga

SEQ ID NO: 2173538 - RNA, 12 nt, Human
caguuuuccaug

SEQ ID NO: 2173539 - RNA, 22 nt, Human
caguuuucaagucaaauuaaua

SEQ ID NO: 2173540 - RNA, 12 nt, Human
caguuuucauaa

SEQ ID NO: 2173541 - RNA, 15 nt, Human
caguuuuacucugcu

SEQ ID NO: 2173542 - RNA, 15 nt, Human
caguuuuaucauuuu

SEQ ID NO: 2173543 - RNA, 23 nt, Human
caguuuucaagucaaauuaauaa

SEQ ID NO: 2173544 - RNA, 18 nt, Human
caguuuuauccacagaaa

SEQ ID NO: 2173545 - RNA, 15 nt, Human
cauaauguauaaaga

SEQ ID NO: 2173546 - RNA, 14 nt, Human
cauaaugggguccu

SEQ ID NO: 2173547 - RNA, 14 nt, Human
cauaauguauuguu

SEQ ID NO: 2173548 - RNA, 11 nt, Human
cauaaugugaa

SEQ ID NO: 2173549 - RNA, 22 nt, Human
cauaaugggguccuggccaucc

SEQ ID NO: 2173550 - RNA, 14 nt, Human
cauaaugcuacugu

SEQ ID NO: 2173551 - RNA, 15 nt, Human
cauaaugcuacuguc

SEQ ID NO: 2173552 - RNA, 17 nt, Human
cauaauguuacauuauu

SEQ ID NO: 2173553 - RNA, 17 nt, Human
cauaaugugaaguguua

SEQ ID NO: 2173554 - RNA, 19 nt, Human
cauaaugugaaguguuaau

SEQ ID NO: 2173555 - RNA, 12 nt, Human
cauaaugugaag

SEQ ID NO: 2173556 - RNA, 13 nt, Human
cauaaugugaagu

SEQ ID NO: 2173557 - RNA, 15 nt, Human
cauaaugugaagugu

SEQ ID NO: 2173558 - RNA, 16 nt, Human
cauaaugugaaguguu

SEQ ID NO: 2173559 - RNA, 13 nt, Human
caguuuuccuucu

SEQ ID NO: 2173560 - RNA, 19 nt, Human
caguuuuccaugaaaacgu

SEQ ID NO: 2173561 - RNA, 16 nt, Human
cauaaugcuacugucu

SEQ ID NO: 2173562 - RNA, 23 nt, Human
cauaaugcgugcauaccacuuuu

SEQ ID NO: 2173563 - RNA, 23 nt, Human
cauacaggaagguagaaauaucu

SEQ ID NO: 2173564 - RNA, 16 nt, Human
cauacagggauggugu

SEQ ID NO: 2173565 - RNA, 18 nt, Human
cauacagcauuacaaauu

SEQ ID NO: 2173566 - RNA, 12 nt, Human
cauacagcucua

SEQ ID NO: 2173567 - RNA, 21 nt, Human
cauacaggauuugaacucaga

SEQ ID NO: 2173568 - RNA, 16 nt, Human
cauacaguuugcacuu

SEQ ID NO: 2173569 - RNA, 19 nt, Human
cauacagggaugguguuca

SEQ ID NO: 2173570 - RNA, 17 nt, Human
cauaauuaugacaguua

SEQ ID NO: 2173571 - RNA, 15 nt, Human
cauaauuaugacagu

SEQ ID NO: 2173572 - RNA, 19 nt, Human
cauaauuaugacaguuaua

SEQ ID NO: 2173573 - RNA, 18 nt, Human
cauaauuauuauuuggcc

SEQ ID NO: 2173574 - RNA, 14 nt, Human
cauaauuaugacag

SEQ ID NO: 2173575 - RNA, 15 nt, Human
cauaauuaaaguguc

SEQ ID NO: 2173576 - RNA, 16 nt, Human
cauaauuaaagugucc

SEQ ID NO: 2173577 - RNA, 17 nt, Human
cauaauuaaagugucca

SEQ ID NO: 2173578 - RNA, 18 nt, Human
cauaauuaaaguguccau

SEQ ID NO: 2173579 - RNA, 18 nt, Human
cauaauguuacauuauua

SEQ ID NO: 2173580 - RNA, 14 nt, Human
cauaauuaaagugu

SEQ ID NO: 2173581 - RNA, 18 nt, Human
cauagcagauuuuaauuu

SEQ ID NO: 2173582 - RNA, 16 nt, Human
cauagguauuucaaaa

SEQ ID NO: 2173583 - RNA, 14 nt, Human
cauaggucacuggc

SEQ ID NO: 2173584 - RNA, 15 nt, Human
cauaggucacuggcu

SEQ ID NO: 2173585 - RNA, 16 nt, Human
cauagcagauuuuaau

SEQ ID NO: 2173586 - RNA, 17 nt, Human
cauagcagauuuuaauu

SEQ ID NO: 2173587 - RNA, 23 nt, Human
cauagcagagaaugaaagggccc

SEQ ID NO: 2173588 - RNA, 19 nt, Human
cauagcagcuuauucacaa

SEQ ID NO: 2173589 - RNA, 13 nt, Human
cauauguaaaaua

SEQ ID NO: 2173590 - RNA, 16 nt, Human
cauaggugaucucauu

SEQ ID NO: 2173591 - RNA, 21 nt, Human
cauaggucacuggcucuccaa

SEQ ID NO: 2173592 - RNA, 16 nt, Human
cauaggucacuggcuc

SEQ ID NO: 2173593 - RNA, 17 nt, Human
cauaggucacuggcucu

SEQ ID NO: 2173594 - RNA, 18 nt, Human
cauaggucacuggcucuc

SEQ ID NO: 2173595 - RNA, 19 nt, Human
cauaggucacuggcucucc

SEQ ID NO: 2173596 - RNA, 16 nt, Human
cauagguuuaauaauu

SEQ ID NO: 2173597 - RNA, 13 nt, Human
cauauuaugucuu

SEQ ID NO: 2173598 - RNA, 21 nt, Human
cauauuauuuuauguugcaua

SEQ ID NO: 2173599 - RNA, 14 nt, Human
cauauuaggaaaau

SEQ ID NO: 2173600 - RNA, 20 nt, Human
cauauuaggaaaauaugggu

SEQ ID NO: 2173601 - RNA, 15 nt, Human
cauauguuacacuaa

SEQ ID NO: 2173602 - RNA, 17 nt, Human
cauaugugaauauggac

SEQ ID NO: 2173603 - RNA, 17 nt, Human
cauauguugaauacuuu

SEQ ID NO: 2173604 - RNA, 16 nt, Human
cauauguugaauacuu

SEQ ID NO: 2173605 - RNA, 22 nt, Human
cauauuaccacagacauacuaa

SEQ ID NO: 2173606 - RNA, 19 nt, Human
cauauguugaauacuuuuu

SEQ ID NO: 2173607 - RNA, 18 nt, Human
cauauguugaauacuuuu

SEQ ID NO: 2173608 - RNA, 14 nt, Human
cauauguaaaauaa

SEQ ID NO: 2173609 - RNA, 21 nt, Human
cauauguaccauguacaugaa

SEQ ID NO: 2173610 - RNA, 17 nt, Human
cauauguauuccugauc

SEQ ID NO: 2173611 - RNA, 22 nt, Human
cauagguucacaccauuuuguu

SEQ ID NO: 2173612 - RNA, 15 nt, Human
cauauguaccaugua

SEQ ID NO: 2173613 - RNA, 23 nt, Human
caggaccucaggugagaagcaga

SEQ ID NO: 2173614 - RNA, 16 nt, Human
caggaccucaggugag

SEQ ID NO: 2173615 - RNA, 21 nt, Human
caggacccaucacgccugugc

SEQ ID NO: 2173616 - RNA, 20 nt, Human
caggacccaccaugucugcc

SEQ ID NO: 2173617 - RNA, 16 nt, Human
caggacccagaggaag

SEQ ID NO: 2173618 - RNA, 15 nt, Human
caggacccagaggaa

SEQ ID NO: 2173619 - RNA, 14 nt, Human
caggacccagagga

SEQ ID NO: 2173620 - RNA, 13 nt, Human
caggacccagagg

SEQ ID NO: 2173621 - RNA, 16 nt, Human
caggaccaugggacca

SEQ ID NO: 2173622 - RNA, 22 nt, Human
caggaccaugggaccaggucuu

SEQ ID NO: 2173623 - RNA, 21 nt, Human
caggaccagucaaccugggca

SEQ ID NO: 2173624 - RNA, 13 nt, Human
caggaccagcuca

SEQ ID NO: 2173625 - RNA, 12 nt, Human
caggaccagcuc

SEQ ID NO: 2173626 - RNA, 21 nt, Human
caggaccagggauuuccauga

SEQ ID NO: 2173627 - RNA, 12 nt, Human
caggaccacaaa

SEQ ID NO: 2173628 - RNA, 17 nt, Human
caggacaugcugaagcc

SEQ ID NO: 2173629 - RNA, 18 nt, Human
caggacauuucucuaaga

SEQ ID NO: 2173630 - RNA, 14 nt, Human
caggacauuucucu

SEQ ID NO: 2173631 - RNA, 12 nt, Human
caggacauuucu

SEQ ID NO: 2173632 - RNA, 23 nt, Human
caggacaugcgguagccagcaca

SEQ ID NO: 2173633 - RNA, 13 nt, Human
caggacaugcuga

SEQ ID NO: 2173634 - RNA, 16 nt, Human
caggacaugcugaagc

SEQ ID NO: 2173635 - RNA, 16 nt, Human
caggaccacaaaaaug

SEQ ID NO: 2173636 - RNA, 15 nt, Human
caggaggcugagggg

SEQ ID NO: 2173637 - RNA, 21 nt, Human
caggaggcugaggcaggagga

SEQ ID NO: 2173638 - RNA, 20 nt, Human
caggaggcugaggcaggagg

SEQ ID NO: 2173639 - RNA, 19 nt, Human
caggaggcugaggcaggag

SEQ ID NO: 2173640 - RNA, 18 nt, Human
caggaggcugaggcagga

SEQ ID NO: 2173641 - RNA, 17 nt, Human
caggaggcugaggcagg

SEQ ID NO: 2173642 - RNA, 21 nt, Human
caggaggcugaggcagaagaa

SEQ ID NO: 2173643 - RNA, 20 nt, Human
caggaggcugaggcagaaga

SEQ ID NO: 2173644 - RNA, 18 nt, Human
caggaggcugaggcagaa

SEQ ID NO: 2173645 - RNA, 17 nt, Human
caggaggcugaggcaga

SEQ ID NO: 2173646 - RNA, 16 nt, Human
caggaggcugaggcag

SEQ ID NO: 2173647 - RNA, 15 nt, Human
caggaggcugaggca

SEQ ID NO: 2173648 - RNA, 13 nt, Human
caggaggcugagg

SEQ ID NO: 2173649 - RNA, 12 nt, Human
caggaggcugag

SEQ ID NO: 2173650 - RNA, 20 nt, Human
caggaggccccuggcccagc

SEQ ID NO: 2173651 - RNA, 19 nt, Human
caggaggccggggccgggu

SEQ ID NO: 2173652 - RNA, 14 nt, Human
caggcaaugcuggc

SEQ ID NO: 2173653 - RNA, 15 nt, Human
caggcaaugcuggcu

SEQ ID NO: 2173654 - RNA, 16 nt, Human
caggcaaugcuggcug

SEQ ID NO: 2173655 - RNA, 17 nt, Human
caggcaaugcuggcugu

SEQ ID NO: 2173656 - RNA, 19 nt, Human
caggaggacugccccgugc

SEQ ID NO: 2173657 - RNA, 19 nt, Human
caggaggacaauucaugaa

SEQ ID NO: 2173658 - RNA, 22 nt, Human
caggaggacaauucaugaacuu

SEQ ID NO: 2173659 - RNA, 23 nt, Human
caggaggaaucaugucaggccug

SEQ ID NO: 2173660 - RNA, 13 nt, Human
caggaggacaauu

SEQ ID NO: 2173661 - RNA, 15 nt, Human
caggaggacaauuca

SEQ ID NO: 2173662 - RNA, 16 nt, Human
caggaggacaauucau

SEQ ID NO: 2173663 - RNA, 22 nt, Human
caggaggauugcuugagcccag

SEQ ID NO: 2173664 - RNA, 15 nt, Human
caggaggaggugcca

SEQ ID NO: 2173665 - RNA, 19 nt, Human
caggaggaggugccaacag

SEQ ID NO: 2173666 - RNA, 23 nt, Human
caggaggagacuagauuuaugaa

SEQ ID NO: 2173667 - RNA, 23 nt, Human
caggaggacugccccgugcagac

SEQ ID NO: 2173668 - RNA, 21 nt, Human
caggaggacugccccgugcag

SEQ ID NO: 2173669 - RNA, 19 nt, Human
caggaggaucacuugaguc

SEQ ID NO: 2173670 - RNA, 14 nt, Human
caggaggccccugg

SEQ ID NO: 2173671 - RNA, 18 nt, Human
caggaggccaggccggcg

SEQ ID NO: 2173672 - RNA, 16 nt, Human
caggaggccccuggcc

SEQ ID NO: 2173673 - RNA, 17 nt, Human
caggaggccccuggccc

SEQ ID NO: 2173674 - RNA, 18 nt, Human
caggaggccccuggccca

SEQ ID NO: 2173675 - RNA, 19 nt, Human
caggaggccccuggcccag

SEQ ID NO: 2173676 - RNA, 22 nt, Human
caggaggccagccuugaccauu

SEQ ID NO: 2173677 - RNA, 18 nt, Human
caggaggccagccuugac

SEQ ID NO: 2173678 - RNA, 19 nt, Human
caggaggccagccuugacc

SEQ ID NO: 2173679 - RNA, 14 nt, Human
caggccaggccagc

SEQ ID NO: 2173680 - RNA, 14 nt, Human
caggccaggccacc

SEQ ID NO: 2173681 - RNA, 16 nt, Human
caggccaggccaccag

SEQ ID NO: 2173682 - RNA, 18 nt, Human
caggccaggccaccagga

SEQ ID NO: 2173683 - RNA, 22 nt, Human
caggcacugagauaccagcgag

SEQ ID NO: 2173684 - RNA, 23 nt, Human
caggcacuagccuuuggcucugg

SEQ ID NO: 2173685 - RNA, 20 nt, Human
caggcacucaaugcagccag

SEQ ID NO: 2173686 - RNA, 11 nt, Human
caggccaggcc

SEQ ID NO: 2173687 - RNA, 12 nt, Human
caggccaggccc

SEQ ID NO: 2173688 - RNA, 21 nt, Human
caggcacgaacccaccugcug

SEQ ID NO: 2173689 - RNA, 20 nt, Human
caggcacgaacccaccugcu

SEQ ID NO: 2173690 - RNA, 16 nt, Human
caggcacuagccuuug

SEQ ID NO: 2173691 - RNA, 22 nt, Human
caggcacuagccuuuggcucug

SEQ ID NO: 2173692 - RNA, 22 nt, Human
caggcacgaacccaccugcuga

SEQ ID NO: 2173693 - RNA, 19 nt, Human
caggcacgaacccaccugc

SEQ ID NO: 2173694 - RNA, 17 nt, Human
caggcacgaacccaccu

SEQ ID NO: 2173695 - RNA, 16 nt, Human
caggcacgaacccacc

SEQ ID NO: 2173696 - RNA, 19 nt, Human
caggcaccuuaguggcuuu

SEQ ID NO: 2173697 - RNA, 15 nt, Human
caggcaccucacaga

SEQ ID NO: 2173698 - RNA, 16 nt, Human
caggcaccucacagaa

SEQ ID NO: 2173699 - RNA, 20 nt, Human
caggcaccucacagaaauga

SEQ ID NO: 2173700 - RNA, 17 nt, Human
caggcaccgagaauguu

SEQ ID NO: 2173701 - RNA, 16 nt, Human
caggcaccgagaaugu

SEQ ID NO: 2173702 - RNA, 13 nt, Human
caggcaccgagaa

SEQ ID NO: 2173703 - RNA, 13 nt, Human
caggcacccuucu

SEQ ID NO: 2173704 - RNA, 16 nt, Human
caggcacccuucuuuc

SEQ ID NO: 2173705 - RNA, 21 nt, Human
caggcacccuucuuuccucuu

SEQ ID NO: 2173706 - RNA, 23 nt, Human
caggcacccuucuuuccucuucc

SEQ ID NO: 2173707 - RNA, 21 nt, Human
caggaggcuuggaaagcauca

SEQ ID NO: 2173708 - RNA, 18 nt, Human
caggcacccccuggagag

SEQ ID NO: 2173709 - RNA, 21 nt, Human
caggcacccccuggagagaag

SEQ ID NO: 2173710 - RNA, 19 nt, Human
cagggagaccgagcgcuuu

SEQ ID NO: 2173711 - RNA, 22 nt, Human
cagggagaccgagcgcuuucug

SEQ ID NO: 2173712 - RNA, 19 nt, Human
cagggagacccguccauuu

SEQ ID NO: 2173713 - RNA, 12 nt, Human
cagggagacaga

SEQ ID NO: 2173714 - RNA, 18 nt, Human
caggcuacucuccucggc

SEQ ID NO: 2173715 - RNA, 18 nt, Human
caggcugggcaaggaggc

SEQ ID NO: 2173716 - RNA, 13 nt, Human
cagggagaagcuc

SEQ ID NO: 2173717 - RNA, 15 nt, Human
caggcuacucuccuc

SEQ ID NO: 2173718 - RNA, 16 nt, Human
caggcuacucuccucg

SEQ ID NO: 2173719 - RNA, 22 nt, Human
caggcugggagagccuuccagg

SEQ ID NO: 2173720 - RNA, 23 nt, Human
caggcugggagagccuuccaggg

SEQ ID NO: 2173721 - RNA, 21 nt, Human
cagggagcaggcggugggcac

SEQ ID NO: 2173722 - RNA, 17 nt, Human
cagggagaggccaugau

SEQ ID NO: 2173723 - RNA, 16 nt, Human
cagggagaggccauga

SEQ ID NO: 2173724 - RNA, 23 nt, Human
cagggagaggagugacugagcuu

SEQ ID NO: 2173725 - RNA, 19 nt, Human
cagggagcauuuuccucca

SEQ ID NO: 2173726 - RNA, 15 nt, Human
cagggagcauggcug

SEQ ID NO: 2173727 - RNA, 15 nt, Human
cagggcuacccuccc

SEQ ID NO: 2173728 - RNA, 17 nt, Human
cagggcuaagagcuagc

SEQ ID NO: 2173729 - RNA, 17 nt, Human
cagggcuacccuccccc

SEQ ID NO: 2173730 - RNA, 14 nt, Human
cagggcuacccuga

SEQ ID NO: 2173731 - RNA, 18 nt, Human
cagggcuacccugagcug

SEQ ID NO: 2173732 - RNA, 16 nt, Human
cagggcuacccugagc

SEQ ID NO: 2173733 - RNA, 13 nt, Human
cagggcucugccc

SEQ ID NO: 2173734 - RNA, 19 nt, Human
cagggcucugccccagagg

SEQ ID NO: 2173735 - RNA, 20 nt, Human
cagggcucugccccagaggc

SEQ ID NO: 2173736 - RNA, 21 nt, Human
cagggcucucuuuccuucuug

SEQ ID NO: 2173737 - RNA, 22 nt, Human
cagggcucucuuuccuucuugc

SEQ ID NO: 2173738 - RNA, 24 nt, Human
cagggcucucuuuccuucuugccu

SEQ ID NO: 2173739 - RNA, 12 nt, Human
cagggcucugac

SEQ ID NO: 2173740 - RNA, 15 nt, Human
cagggcucugaccag

SEQ ID NO: 2173741 - RNA, 15 nt, Human
cagggcucugcccca

SEQ ID NO: 2173742 - RNA, 13 nt, Human
cagggcuccuggg

SEQ ID NO: 2173743 - RNA, 23 nt, Human
cagggcuccugccuucuguccug

SEQ ID NO: 2173744 - RNA, 12 nt, Human
cagggcuccugg

SEQ ID NO: 2173745 - RNA, 20 nt, Human
cagggcuccugccuucuguc

SEQ ID NO: 2173746 - RNA, 22 nt, Human
cagggcuccugccuucuguccu

SEQ ID NO: 2173747 - RNA, 20 nt, Human
cagggcucucuuuccuucuu

SEQ ID NO: 2173748 - RNA, 14 nt, Human
cagggcucagccug

SEQ ID NO: 2173749 - RNA, 13 nt, Human
cagggcucagccu

SEQ ID NO: 2173750 - RNA, 12 nt, Human
cagggcucagcc

SEQ ID NO: 2173751 - RNA, 11 nt, Human
cagggcuccug

SEQ ID NO: 2173752 - RNA, 12 nt, Human
cagggcuccugc

SEQ ID NO: 2173753 - RNA, 14 nt, Human
cagggcuccugcac

SEQ ID NO: 2173754 - RNA, 19 nt, Human
cagggcucacgugggaacc

SEQ ID NO: 2173755 - RNA, 13 nt, Human
cagggcuccugcc

SEQ ID NO: 2173756 - RNA, 24 nt, Human
cagggcuacccugagcugaggcag

SEQ ID NO: 2173757 - RNA, 23 nt, Human
cagggcuacccugagcugaggca

SEQ ID NO: 2173758 - RNA, 22 nt, Human
cagggcuacccugagcugaggc

SEQ ID NO: 2173759 - RNA, 19 nt, Human
cagggcuacccugagcuga

SEQ ID NO: 2173760 - RNA, 14 nt, Human
cagggcuagugacu

SEQ ID NO: 2173761 - RNA, 15 nt, Human
cagggcuagugacuu

SEQ ID NO: 2173762 - RNA, 18 nt, Human
cagggcuagugacuugug

SEQ ID NO: 2173763 - RNA, 19 nt, Human
cagggagcauggcugugag

SEQ ID NO: 2173764 - RNA, 19 nt, Human
cagggcuauagcucaggac

SEQ ID NO: 2173765 - RNA, 17 nt, Human
caggggaaaaucagccu

SEQ ID NO: 2173766 - RNA, 14 nt, Human
caggggaaaagagg

SEQ ID NO: 2173767 - RNA, 16 nt, Human
caggggaaaagaggag

SEQ ID NO: 2173768 - RNA, 22 nt, Human
caggccuuaucuccaagaccag

SEQ ID NO: 2173769 - RNA, 17 nt, Human
caggccuuaucuccaag

SEQ ID NO: 2173770 - RNA, 16 nt, Human
caggccuuaucuccaa

SEQ ID NO: 2173771 - RNA, 12 nt, Human
caggccugugug

SEQ ID NO: 2173772 - RNA, 16 nt, Human
caggcgauccaccugu

SEQ ID NO: 2173773 - RNA, 15 nt, Human
caggcgaggccugga

SEQ ID NO: 2173774 - RNA, 11 nt, Human
caggccuugcg

SEQ ID NO: 2173775 - RNA, 19 nt, Human
caggcgauccaccugucuc

SEQ ID NO: 2173776 - RNA, 13 nt, Human
caggcguucagcu

SEQ ID NO: 2173777 - RNA, 21 nt, Human
caggcgugagccaccgugccu

SEQ ID NO: 2173778 - RNA, 21 nt, Human
caggcugggagagccuuccag

SEQ ID NO: 2173779 - RNA, 14 nt, Human
caggcuacucuccu

SEQ ID NO: 2173780 - RNA, 20 nt, Human
caggcuacacugacacuggu

SEQ ID NO: 2173781 - RNA, 19 nt, Human
caggcuaaggcguggagcu

SEQ ID NO: 2173782 - RNA, 13 nt, Human
caggcuacacuga

SEQ ID NO: 2173783 - RNA, 23 nt, Human
caggcuaaacauccaauauuuuc

SEQ ID NO: 2173784 - RNA, 22 nt, Human
caggcguucagcucacuguucu

SEQ ID NO: 2173785 - RNA, 22 nt, Human
caggcguagaucaccagaauaa

SEQ ID NO: 2173786 - RNA, 19 nt, Human
caggcguucagcucacugu

SEQ ID NO: 2173787 - RNA, 11 nt, Human
caggcuacugu

SEQ ID NO: 2173788 - RNA, 15 nt, Human
caggccguggcugcc

SEQ ID NO: 2173789 - RNA, 22 nt, Human
caggccguccucccgggcccuc

SEQ ID NO: 2173790 - RNA, 22 nt, Human
caggccggugugggcugugucg

SEQ ID NO: 2173791 - RNA, 20 nt, Human
caggccgggguggagcaugg

SEQ ID NO: 2173792 - RNA, 18 nt, Human
caggccguccucccgggc

SEQ ID NO: 2173793 - RNA, 19 nt, Human
caggccggugugggcugug

SEQ ID NO: 2173794 - RNA, 19 nt, Human
caggccgggguggagcaug

SEQ ID NO: 2173795 - RNA, 17 nt, Human
caggccguggcugccca

SEQ ID NO: 2173796 - RNA, 19 nt, Human
caggccguggcugcccaca

SEQ ID NO: 2173797 - RNA, 12 nt, Human
caggccuccuac

SEQ ID NO: 2173798 - RNA, 18 nt, Human
caggccugggucuguguc

SEQ ID NO: 2173799 - RNA, 16 nt, Human
caggccugggucugug

SEQ ID NO: 2173800 - RNA, 19 nt, Human
caggccucuuggcagucac

SEQ ID NO: 2173801 - RNA, 20 nt, Human
caggccugggucugugucuc

SEQ ID NO: 2173802 - RNA, 19 nt, Human
caggccugggucugugucu

SEQ ID NO: 2173803 - RNA, 15 nt, Human
caggccugaaagagg

SEQ ID NO: 2173804 - RNA, 20 nt, Human
caggccugaaagaggcugag

SEQ ID NO: 2173805 - RNA, 22 nt, Human
caggccucuguguccuucccug

SEQ ID NO: 2173806 - RNA, 12 nt, Human
caggccucuugg

SEQ ID NO: 2173807 - RNA, 15 nt, Human
caggccucuuggcag

SEQ ID NO: 2173808 - RNA, 18 nt, Human
caggccucuuggcaguca

SEQ ID NO: 2173809 - RNA, 12 nt, Human
caggccucugug

SEQ ID NO: 2173810 - RNA, 13 nt, Human
caggccucugugu

SEQ ID NO: 2173811 - RNA, 14 nt, Human
caggccucuguguc

SEQ ID NO: 2173812 - RNA, 15 nt, Human
caggccucugugucc

SEQ ID NO: 2173813 - RNA, 17 nt, Human
caggccucuguguccuu

SEQ ID NO: 2173814 - RNA, 14 nt, Human
caggccuccuacag

SEQ ID NO: 2173815 - RNA, 20 nt, Human
caggccggcgagcccugugg

SEQ ID NO: 2173816 - RNA, 19 nt, Human
cagcgcuggguccacccca

SEQ ID NO: 2173817 - RNA, 20 nt, Human
cagcgcuggccgggaccccg

SEQ ID NO: 2173818 - RNA, 22 nt, Human
cagcggagguguggagccgagg

SEQ ID NO: 2173819 - RNA, 13 nt, Human
cagcggccccucc

SEQ ID NO: 2173820 - RNA, 15 nt, Human
cagcggccccuccca

SEQ ID NO: 2173821 - RNA, 16 nt, Human
cagcggccccucccac

SEQ ID NO: 2173822 - RNA, 12 nt, Human
cagcuaaagcaa

SEQ ID NO: 2173823 - RNA, 15 nt, Human
cagcggccccugcau

SEQ ID NO: 2173824 - RNA, 16 nt, Human
cagcggccccugcauc

SEQ ID NO: 2173825 - RNA, 20 nt, Human
cagcguuugaggggcuggcc

SEQ ID NO: 2173826 - RNA, 22 nt, Human
cagcguuugaggggcuggccuu

SEQ ID NO: 2173827 - RNA, 17 nt, Human
cagcggccccucccaca

SEQ ID NO: 2173828 - RNA, 18 nt, Human
cagcggccccucccacac

SEQ ID NO: 2173829 - RNA, 19 nt, Human
cagcggccccucccacaca

SEQ ID NO: 2173830 - RNA, 14 nt, Human
cagcggccccugca

SEQ ID NO: 2173831 - RNA, 22 nt, Human
cagcuaaagcccaaccuccuga

SEQ ID NO: 2173832 - RNA, 17 nt, Human
cagcuaacaauugugaa

SEQ ID NO: 2173833 - RNA, 15 nt, Human
cagcuaacacacagc

SEQ ID NO: 2173834 - RNA, 18 nt, Human
cagcuaaagcccaaccuc

SEQ ID NO: 2173835 - RNA, 19 nt, Human
cagcuaaagcaauaugcau

SEQ ID NO: 2173836 - RNA, 15 nt, Human
cagcuaacauggaag

SEQ ID NO: 2173837 - RNA, 16 nt, Human
cagcuaacacacagcu

SEQ ID NO: 2173838 - RNA, 17 nt, Human
cagcuaacacacagcuc

SEQ ID NO: 2173839 - RNA, 18 nt, Human
cagcuaacacacagcucc

SEQ ID NO: 2173840 - RNA, 20 nt, Human
cagcuaacacacagcuccca

SEQ ID NO: 2173841 - RNA, 16 nt, Human
cagccugcuccagcug

SEQ ID NO: 2173842 - RNA, 15 nt, Human
cagccugcuccagcu

SEQ ID NO: 2173843 - RNA, 22 nt, Human
cagcgccuuucccaacucuagc

SEQ ID NO: 2173844 - RNA, 14 nt, Human
cagcgccuuuccca

SEQ ID NO: 2173845 - RNA, 19 nt, Human
cagccugcuccagcuguuc

SEQ ID NO: 2173846 - RNA, 17 nt, Human
cagccugcuccagcugu

SEQ ID NO: 2173847 - RNA, 14 nt, Human
cagcugccucacuu

SEQ ID NO: 2173848 - RNA, 18 nt, Human
cagcugagcgccaggaug

SEQ ID NO: 2173849 - RNA, 16 nt, Human
cagcugagcgccagga

SEQ ID NO: 2173850 - RNA, 14 nt, Human
cagcugagcgccag

SEQ ID NO: 2173851 - RNA, 21 nt, Human
cagcugacuuuucuguccgag

SEQ ID NO: 2173852 - RNA, 21 nt, Human
cagcugagagacuuuuaauca

SEQ ID NO: 2173853 - RNA, 17 nt, Human
cagcugagagaaaauaa

SEQ ID NO: 2173854 - RNA, 22 nt, Human
cagcugagcacauucuggcuca

SEQ ID NO: 2173855 - RNA, 17 nt, Human
cagcugucccugucacc

SEQ ID NO: 2173856 - RNA, 16 nt, Human
cagcugucccugucac

SEQ ID NO: 2173857 - RNA, 15 nt, Human
cagcugucccuguca

SEQ ID NO: 2173858 - RNA, 14 nt, Human
cagcugucccuguc

SEQ ID NO: 2173859 - RNA, 13 nt, Human
cagcugucccugu

SEQ ID NO: 2173860 - RNA, 12 nt, Human
cagcugucccug

SEQ ID NO: 2173861 - RNA, 14 nt, Human
cagcuuauugucua

SEQ ID NO: 2173862 - RNA, 17 nt, Human
cagcugccucacuuccu

SEQ ID NO: 2173863 - RNA, 20 nt, Human
cagcuguaugauucccagcc

SEQ ID NO: 2173864 - RNA, 18 nt, Human
cagcugucccugucacca

SEQ ID NO: 2173865 - RNA, 13 nt, Human
cagcuucaccaga

SEQ ID NO: 2173866 - RNA, 14 nt, Human
cagcuucaccagag

SEQ ID NO: 2173867 - RNA, 20 nt, Human
cagcuuauugucuagugaaa

SEQ ID NO: 2173868 - RNA, 20 nt, Human
caggaaacuccacaucugcc

SEQ ID NO: 2173869 - RNA, 21 nt, Human
caggaaacuccacaucugccu

SEQ ID NO: 2173870 - RNA, 22 nt, Human
caggaaacuccacaucugccuu

SEQ ID NO: 2173871 - RNA, 23 nt, Human
caggaaacuccacaucugccuua

SEQ ID NO: 2173872 - RNA, 16 nt, Human
cagcuucaccagagca

SEQ ID NO: 2173873 - RNA, 19 nt, Human
caggaaacuccacaucugc

SEQ ID NO: 2173874 - RNA, 19 nt, Human
caggaaaggcuccaggagc

SEQ ID NO: 2173875 - RNA, 20 nt, Human
caggaaaggcuccaggagca

SEQ ID NO: 2173876 - RNA, 16 nt, Human
caggaaaggcuccagg

SEQ ID NO: 2173877 - RNA, 17 nt, Human
caggaaaggcuccagga

SEQ ID NO: 2173878 - RNA, 16 nt, Human
caggaaagagaacuuc

SEQ ID NO: 2173879 - RNA, 20 nt, Human
caggaaagagaacuuccaga

SEQ ID NO: 2173880 - RNA, 13 nt, Human
cagacuccugagg

SEQ ID NO: 2173881 - RNA, 14 nt, Human
cagacuccugagga

SEQ ID NO: 2173882 - RNA, 20 nt, Human
cagacucccauuccugaaga

SEQ ID NO: 2173883 - RNA, 19 nt, Human
cagacucccauuccugaag

SEQ ID NO: 2173884 - RNA, 18 nt, Human
cagacaggguucauugaa

SEQ ID NO: 2173885 - RNA, 19 nt, Human
cagacaguguuuucuggga

SEQ ID NO: 2173886 - RNA, 22 nt, Human
cagacucgauucauauugaaua

SEQ ID NO: 2173887 - RNA, 21 nt, Human
cagacuccugugcaacuuucc

SEQ ID NO: 2173888 - RNA, 16 nt, Human
cagacuccugaggaca

SEQ ID NO: 2173889 - RNA, 20 nt, Human
cagacuccugaggacagcug

SEQ ID NO: 2173890 - RNA, 17 nt, Human
cagacucuacagaggcc

SEQ ID NO: 2173891 - RNA, 22 nt, Human
cagacaggcaagcaccuccugc

SEQ ID NO: 2173892 - RNA, 23 nt, Human
cagacaggcaagcaccuccugcc

SEQ ID NO: 2173893 - RNA, 22 nt, Human
cagacaggcucuuagcagcuuc

SEQ ID NO: 2173894 - RNA, 18 nt, Human
cagacaggcucuuagcag

SEQ ID NO: 2173895 - RNA, 20 nt, Human
cagacaggcucuuagcagcu

SEQ ID NO: 2173896 - RNA, 20 nt, Human
cagacaggccccgugaggca

SEQ ID NO: 2173897 - RNA, 14 nt, Human
cagacaggcucuua

SEQ ID NO: 2173898 - RNA, 15 nt, Human
cagacaggccccgug

SEQ ID NO: 2173899 - RNA, 18 nt, Human
cagacaggcaaauaaaag

SEQ ID NO: 2173900 - RNA, 20 nt, Human
cagacugaacuuaccgugag

SEQ ID NO: 2173901 - RNA, 20 nt, Human
cagacugacaaauguguauc

SEQ ID NO: 2173902 - RNA, 23 nt, Human
cagacucuuuuuguaccugguga

SEQ ID NO: 2173903 - RNA, 14 nt, Human
cagacucuggucuu

SEQ ID NO: 2173904 - RNA, 12 nt, Human
cagacucucugu

SEQ ID NO: 2173905 - RNA, 17 nt, Human
cagacucucugugaacc

SEQ ID NO: 2173906 - RNA, 23 nt, Human
cagacucuacagaggccaugggc

SEQ ID NO: 2173907 - RNA, 21 nt, Human
cagacuccugaggacagcugu

SEQ ID NO: 2173908 - RNA, 18 nt, Human
cagacucuacagaggcca

SEQ ID NO: 2173909 - RNA, 19 nt, Human
cagacucuacagaggccau

SEQ ID NO: 2173910 - RNA, 20 nt, Human
cagacucuacagaggccaug

SEQ ID NO: 2173911 - RNA, 21 nt, Human
cagacucuacagaggccaugg

SEQ ID NO: 2173912 - RNA, 18 nt, Human
cagacugcgauuuguccc

SEQ ID NO: 2173913 - RNA, 13 nt, Human
cagacugcuggga

SEQ ID NO: 2173914 - RNA, 16 nt, Human
cagacugcugggacug

SEQ ID NO: 2173915 - RNA, 15 nt, Human
cagacugcugggacu

SEQ ID NO: 2173916 - RNA, 23 nt, Human
cagacugcugggacuggccaggu

SEQ ID NO: 2173917 - RNA, 20 nt, Human
cagacugcugggacuggcca

SEQ ID NO: 2173918 - RNA, 20 nt, Human
cagacugcuuccaauuuucu

SEQ ID NO: 2173919 - RNA, 14 nt, Human
cagacugcuuccaa

SEQ ID NO: 2173920 - RNA, 13 nt, Human
cagacuggaagca

SEQ ID NO: 2173921 - RNA, 14 nt, Human
cagacuggaagcac

SEQ ID NO: 2173922 - RNA, 16 nt, Human
cagacuggaagcacag

SEQ ID NO: 2173923 - RNA, 17 nt, Human
cagacuggaagcacagc

SEQ ID NO: 2173924 - RNA, 18 nt, Human
cagacuggaagcacagcu

SEQ ID NO: 2173925 - RNA, 17 nt, Human
cagacuggugagcagac

SEQ ID NO: 2173926 - RNA, 15 nt, Human
cagacuggugagcag

SEQ ID NO: 2173927 - RNA, 18 nt, Human
cagacuggguuucuagcc

SEQ ID NO: 2173928 - RNA, 20 nt, Human
cagacuggguuucuagccca

SEQ ID NO: 2173929 - RNA, 12 nt, Human
cagacuggaggg

SEQ ID NO: 2173930 - RNA, 15 nt, Human
cagacuggguuucua

SEQ ID NO: 2173931 - RNA, 16 nt, Human
cagacuggcuggcugc

SEQ ID NO: 2173932 - RNA, 11 nt, Human
cagacuggagg

SEQ ID NO: 2173933 - RNA, 18 nt, Human
cagacugcauguaguugg

SEQ ID NO: 2173934 - RNA, 23 nt, Human
cagacuggcacaguuuucugaga

SEQ ID NO: 2173935 - RNA, 22 nt, Human
cagacuggcacaguuuucugag

SEQ ID NO: 2173936 - RNA, 20 nt, Human
cagacuggaagcacagcuuc

SEQ ID NO: 2173937 - RNA, 21 nt, Human
cagacuggaagcacagcuuca

SEQ ID NO: 2173938 - RNA, 18 nt, Human
cagacuggcacaguuuuc

SEQ ID NO: 2173939 - RNA, 17 nt, Human
cagacuggcacaguuuu

SEQ ID NO: 2173940 - RNA, 14 nt, Human
cagacagacacaca

SEQ ID NO: 2173941 - RNA, 15 nt, Human
cagacagacacacac

SEQ ID NO: 2173942 - RNA, 16 nt, Human
cagacagcagcucagg

SEQ ID NO: 2173943 - RNA, 15 nt, Human
cagacagcagcucag

SEQ ID NO: 2173944 - RNA, 13 nt, Human
cagacagcagcuc

SEQ ID NO: 2173945 - RNA, 21 nt, Human
cagacagcaacggggaggcca

SEQ ID NO: 2173946 - RNA, 21 nt, Human
cagacagauggaaaagggaga

SEQ ID NO: 2173947 - RNA, 19 nt, Human
cagacagaggaugagcucu

SEQ ID NO: 2173948 - RNA, 16 nt, Human
cagacagacacacaca

SEQ ID NO: 2173949 - RNA, 19 nt, Human
cagacagacaucucugcac

SEQ ID NO: 2173950 - RNA, 14 nt, Human
cagacagaggauga

SEQ ID NO: 2173951 - RNA, 12 nt, Human
cagacagaggau

SEQ ID NO: 2173952 - RNA, 19 nt, Human
cagacagcagcucaggcac

SEQ ID NO: 2173953 - RNA, 18 nt, Human
cagacagcagcucaggca

SEQ ID NO: 2173954 - RNA, 17 nt, Human
cagacagcagcucaggc

SEQ ID NO: 2173955 - RNA, 14 nt, Human
cagacagcccucca

SEQ ID NO: 2173956 - RNA, 12 nt, Human
cagacagccugu

SEQ ID NO: 2173957 - RNA, 13 nt, Human
cagacagccugua

SEQ ID NO: 2173958 - RNA, 14 nt, Human
cagacagccuguau

SEQ ID NO: 2173959 - RNA, 16 nt, Human
cagacagccuguaucu

SEQ ID NO: 2173960 - RNA, 13 nt, Human
cagacagcugccu

SEQ ID NO: 2173961 - RNA, 14 nt, Human
cagacagcugccug

SEQ ID NO: 2173962 - RNA, 20 nt, Human
cagacaggaaagggaaggcc

SEQ ID NO: 2173963 - RNA, 15 nt, Human
cagacaggaaaggga

SEQ ID NO: 2173964 - RNA, 19 nt, Human
cagacagcucccucugccu

SEQ ID NO: 2173965 - RNA, 17 nt, Human
cagacagcucccucugc

SEQ ID NO: 2173966 - RNA, 12 nt, Human
cagacagcuccc

SEQ ID NO: 2173967 - RNA, 11 nt, Human
cagacagcucc

SEQ ID NO: 2173968 - RNA, 21 nt, Human
cagacagcuccacccuggccg

SEQ ID NO: 2173969 - RNA, 13 nt, Human
cagacaggaccag

SEQ ID NO: 2173970 - RNA, 15 nt, Human
cagacaggaccaggg

SEQ ID NO: 2173971 - RNA, 16 nt, Human
cagacaggaccaggga

SEQ ID NO: 2173972 - RNA, 15 nt, Human
cagacagcugccugg

SEQ ID NO: 2173973 - RNA, 16 nt, Human
cagacagcugccuggg

SEQ ID NO: 2173974 - RNA, 17 nt, Human
cagacagcugccuggga

SEQ ID NO: 2173975 - RNA, 18 nt, Human
cagacagcugccugggau

SEQ ID NO: 2173976 - RNA, 11 nt, Human
cagacaggcaa

SEQ ID NO: 2173977 - RNA, 23 nt, Human
cagacaggaaagggaaggcccca

SEQ ID NO: 2173978 - RNA, 21 nt, Human
cagacaggagaaaugcaucca

SEQ ID NO: 2173979 - RNA, 12 nt, Human
cagacaggagga

SEQ ID NO: 2173980 - RNA, 13 nt, Human
cagacaggagaaa

SEQ ID NO: 2173981 - RNA, 17 nt, Human
cagacaggaccagggau

SEQ ID NO: 2173982 - RNA, 24 nt, Human
cagacaggaccagggauuuccaug

SEQ ID NO: 2173983 - RNA, 13 nt, Human
cagacaggcaagc

SEQ ID NO: 2173984 - RNA, 18 nt, Human
cagacaggcaagcaccuc

SEQ ID NO: 2173985 - RNA, 20 nt, Human
cagacaggcaagcaccuccu

SEQ ID NO: 2173986 - RNA, 21 nt, Human
cagacaggcaagcaccuccug

SEQ ID NO: 2173987 - RNA, 14 nt, Human
cagacuuaccagga

SEQ ID NO: 2173988 - RNA, 23 nt, Human
cagacuguuagaaaauggacacu

SEQ ID NO: 2173989 - RNA, 24 nt, Human
cagacuguuagaaaauggacacug

SEQ ID NO: 2173990 - RNA, 18 nt, Human
cagacuuaccaggaagca

SEQ ID NO: 2173991 - RNA, 14 nt, Human
cagacuucacacug

SEQ ID NO: 2173992 - RNA, 20 nt, Human
cagacuggugagcagacugg

SEQ ID NO: 2173993 - RNA, 21 nt, Human
cagacuguguaaaaagagagc

SEQ ID NO: 2173994 - RNA, 23 nt, Human
cagacugguugaguucagguagc

SEQ ID NO: 2173995 - RNA, 22 nt, Human
cagacuguguaaaaagagagcu

SEQ ID NO: 2173996 - RNA, 12 nt, Human
cagacuguguau

SEQ ID NO: 2173997 - RNA, 14 nt, Human
cagacuguguauuc

SEQ ID NO: 2173998 - RNA, 23 nt, Human
cagacuguguauucauugaaguc

SEQ ID NO: 2173999 - RNA, 15 nt, Human
cagccaggccccagg

SEQ ID NO: 2174000 - RNA, 12 nt, Human
cagccaggcggg

SEQ ID NO: 2174001 - RNA, 13 nt, Human
cagccaggcgggc

SEQ ID NO: 2174002 - RNA, 18 nt, Human
cagccaggccacuggccc

SEQ ID NO: 2174003 - RNA, 16 nt, Human
cagccagcccagccca

SEQ ID NO: 2174004 - RNA, 15 nt, Human
cagccagcccagccc

SEQ ID NO: 2174005 - RNA, 14 nt, Human
cagccagcccagcc

SEQ ID NO: 2174006 - RNA, 13 nt, Human
cagccagcccagc

SEQ ID NO: 2174007 - RNA, 19 nt, Human
cagccagcccagcccagcu

SEQ ID NO: 2174008 - RNA, 17 nt, Human
cagccagcccagcccag

SEQ ID NO: 2174009 - RNA, 20 nt, Human
cagccagcccagcccagcug

SEQ ID NO: 2174010 - RNA, 12 nt, Human
cagccagcccag

SEQ ID NO: 2174011 - RNA, 11 nt, Human
cagccagccca

SEQ ID NO: 2174012 - RNA, 20 nt, Human
cagccagacuggcacaguuu

SEQ ID NO: 2174013 - RNA, 18 nt, Human
cagccagacuggcacagu

SEQ ID NO: 2174014 - RNA, 15 nt, Human
cagccagacuggcac

SEQ ID NO: 2174015 - RNA, 19 nt, Human
cagcacuaaagcaguggac

SEQ ID NO: 2174016 - RNA, 17 nt, Human
cagcacuaaagcagugg

SEQ ID NO: 2174017 - RNA, 14 nt, Human
cagcacuaaagcag

SEQ ID NO: 2174018 - RNA, 10 nt, Human
cagcacuaac

SEQ ID NO: 2174019 - RNA, 20 nt, Human
cagcacuaaagcaguggaca

SEQ ID NO: 2174020 - RNA, 11 nt, Human
cagcacuacuc

SEQ ID NO: 2174021 - RNA, 14 nt, Human
cagcacuacucugu

SEQ ID NO: 2174022 - RNA, 15 nt, Human
cagcacucacacagg

SEQ ID NO: 2174023 - RNA, 20 nt, Human
cagccagaccuauuccuccu

SEQ ID NO: 2174024 - RNA, 22 nt, Human
cagccagaccuauuccuccugg

SEQ ID NO: 2174025 - RNA, 14 nt, Human
cagccagacuggca

SEQ ID NO: 2174026 - RNA, 18 nt, Human
cagcacgggggccaagga

SEQ ID NO: 2174027 - RNA, 17 nt, Human
cagcacguguggccugu

SEQ ID NO: 2174028 - RNA, 13 nt, Human
cagcaccugucuc

SEQ ID NO: 2174029 - RNA, 12 nt, Human
cagcaccuggca

SEQ ID NO: 2174030 - RNA, 15 nt, Human
cagcacgauuucugu

SEQ ID NO: 2174031 - RNA, 14 nt, Human
cagcacgauuucug

SEQ ID NO: 2174032 - RNA, 12 nt, Human
cagccaggcugc

SEQ ID NO: 2174033 - RNA, 22 nt, Human
cagccaggcucugugcugaccc

SEQ ID NO: 2174034 - RNA, 23 nt, Human
cagccaggcucugugcugacccu

SEQ ID NO: 2174035 - RNA, 15 nt, Human
cagccaggcucugug

SEQ ID NO: 2174036 - RNA, 16 nt, Human
cagccaggcucugugc

SEQ ID NO: 2174037 - RNA, 17 nt, Human
cagccaggcucugugcu

SEQ ID NO: 2174038 - RNA, 18 nt, Human
cagccaggcucugugcug

SEQ ID NO: 2174039 - RNA, 14 nt, Human
cagccaggcucugu

SEQ ID NO: 2174040 - RNA, 19 nt, Human
cagccaggcgggcucaagg

SEQ ID NO: 2174041 - RNA, 20 nt, Human
cagccaggcgggcucaagga

SEQ ID NO: 2174042 - RNA, 14 nt, Human
cagccaggcgggcu

SEQ ID NO: 2174043 - RNA, 15 nt, Human
cagccaggcgggcuc

SEQ ID NO: 2174044 - RNA, 16 nt, Human
cagccaggcgggcuca

SEQ ID NO: 2174045 - RNA, 18 nt, Human
cagccaggcgggcucaag

SEQ ID NO: 2174046 - RNA, 16 nt, Human
cagccaggcugccaag

SEQ ID NO: 2174047 - RNA, 13 nt, Human
cagccaggcugcc

SEQ ID NO: 2174048 - RNA, 22 nt, Human
cagccaggcugccaaggccaga

SEQ ID NO: 2174049 - RNA, 16 nt, Human
cagcaccccugucucu

SEQ ID NO: 2174050 - RNA, 13 nt, Human
cagcaccccuucc

SEQ ID NO: 2174051 - RNA, 14 nt, Human
cagcaccccuucca

SEQ ID NO: 2174052 - RNA, 15 nt, Human
cagcaccccuuccau

SEQ ID NO: 2174053 - RNA, 16 nt, Human
cagcaccccuuccaug

SEQ ID NO: 2174054 - RNA, 18 nt, Human
cagcacccagcaacucca

SEQ ID NO: 2174055 - RNA, 21 nt, Human
cagcaccauccgccagggccc

SEQ ID NO: 2174056 - RNA, 20 nt, Human
cagcaccauccgccagggcc

SEQ ID NO: 2174057 - RNA, 19 nt, Human
cagcaccaucucuccuccu

SEQ ID NO: 2174058 - RNA, 24 nt, Human
cagauuuccagucuccaccaggaa

SEQ ID NO: 2174059 - RNA, 19 nt, Human
cagauuucacucuccuugg

SEQ ID NO: 2174060 - RNA, 16 nt, Human
cagauuuccagucucc

SEQ ID NO: 2174061 - RNA, 19 nt, Human
cagauuugaacucuucaau

SEQ ID NO: 2174062 - RNA, 22 nt, Human
cagcaccacccuagucccuucc

SEQ ID NO: 2174063 - RNA, 17 nt, Human
cagcaccaucucuccuc

SEQ ID NO: 2174064 - RNA, 20 nt, Human
cagauuuagugaaagcuaga

SEQ ID NO: 2174065 - RNA, 17 nt, Human
cagauuuagugaaagcu

SEQ ID NO: 2174066 - RNA, 22 nt, Human
cagauuuagugaaagcuagaga

SEQ ID NO: 2174067 - RNA, 20 nt, Human
cagauuucacucuccuuggu

SEQ ID NO: 2174068 - RNA, 13 nt, Human
cagauuuacacug

SEQ ID NO: 2174069 - RNA, 14 nt, Human
cagauuuacacugg

SEQ ID NO: 2174070 - RNA, 17 nt, Human
cagauuuacacugggag

SEQ ID NO: 2174071 - RNA, 18 nt, Human
cagauuuacacugggaga

SEQ ID NO: 2174072 - RNA, 13 nt, Human
cagauuuaugcau

SEQ ID NO: 2174073 - RNA, 19 nt, Human
cagauugcaacaggcuggg

SEQ ID NO: 2174074 - RNA, 20 nt, Human
cagauugcaacaggcugggc

SEQ ID NO: 2174075 - RNA, 21 nt, Human
cagauuggcucacacugagaa

SEQ ID NO: 2174076 - RNA, 22 nt, Human
cagauuggcucacacugagaau

SEQ ID NO: 2174077 - RNA, 14 nt, Human
cagauuguuaucua

SEQ ID NO: 2174078 - RNA, 18 nt, Human
cagauugcaacaggcugg

SEQ ID NO: 2174079 - RNA, 22 nt, Human
cagauauaaaagacugaccaau

SEQ ID NO: 2174080 - RNA, 19 nt, Human
cagauauauuaagugacug

SEQ ID NO: 2174081 - RNA, 22 nt, Human
cagauauaaauggcugguuuuu

SEQ ID NO: 2174082 - RNA, 20 nt, Human
cagauauauaucauauuggu

SEQ ID NO: 2174083 - RNA, 18 nt, Human
cagauauaaauggcuggu

SEQ ID NO: 2174084 - RNA, 20 nt, Human
cagauauaaauggcugguuu

SEQ ID NO: 2174085 - RNA, 23 nt, Human
cagauauaaauggcugguuuuua

SEQ ID NO: 2174086 - RNA, 19 nt, Human
cagaggggcuuucuggaga

SEQ ID NO: 2174087 - RNA, 19 nt, Human
cagauagauauaugcucug

SEQ ID NO: 2174088 - RNA, 19 nt, Human
cagauacuuggggggcuga

SEQ ID NO: 2174089 - RNA, 14 nt, Human
cagaggggguggcc

SEQ ID NO: 2174090 - RNA, 16 nt, Human
cagaggggguggccuc

SEQ ID NO: 2174091 - RNA, 18 nt, Human
cagauauauuuuucacag

SEQ ID NO: 2174092 - RNA, 16 nt, Human
cagauauauuuuucac

SEQ ID NO: 2174093 - RNA, 15 nt, Human
cagauaugauaugua

SEQ ID NO: 2174094 - RNA, 15 nt, Human
cagauauauuuuuca

SEQ ID NO: 2174095 - RNA, 14 nt, Human
cagauauauuuuuc

SEQ ID NO: 2174096 - RNA, 13 nt, Human
cagauauauuuuu

SEQ ID NO: 2174097 - RNA, 18 nt, Human
cagauaugauauguaaac

SEQ ID NO: 2174098 - RNA, 19 nt, Human
cagauauauuuuucacagu

SEQ ID NO: 2174099 - RNA, 23 nt, Human
cagauccagggacagaggcccca

SEQ ID NO: 2174100 - RNA, 15 nt, Human
cagauccagggacag

SEQ ID NO: 2174101 - RNA, 14 nt, Human
cagauccagggaca

SEQ ID NO: 2174102 - RNA, 13 nt, Human
cagauccagggac

SEQ ID NO: 2174103 - RNA, 13 nt, Human
cagauccaggacu

SEQ ID NO: 2174104 - RNA, 12 nt, Human
cagauccaggac

SEQ ID NO: 2174105 - RNA, 22 nt, Human
cagaucccagaaggaccuccug

SEQ ID NO: 2174106 - RNA, 15 nt, Human
cagauccagggacug

SEQ ID NO: 2174107 - RNA, 14 nt, Human
cagaucccagcuca

SEQ ID NO: 2174108 - RNA, 12 nt, Human
cagaucccagcu

SEQ ID NO: 2174109 - RNA, 15 nt, Human
cagaucccagcucac

SEQ ID NO: 2174110 - RNA, 14 nt, Human
cagauccccaagcc

SEQ ID NO: 2174111 - RNA, 20 nt, Human
cagagagggggccaccuccc

SEQ ID NO: 2174112 - RNA, 22 nt, Human
cagagagggggccaccucccca

SEQ ID NO: 2174113 - RNA, 13 nt, Human
cagagaggguggg

SEQ ID NO: 2174114 - RNA, 17 nt, Human
cagagaggguggugacc

SEQ ID NO: 2174115 - RNA, 20 nt, Human
cagagaggguggugaccucu

SEQ ID NO: 2174116 - RNA, 22 nt, Human
cagagaggguggugaccucugc

SEQ ID NO: 2174117 - RNA, 15 nt, Human
cagagagggggccac

SEQ ID NO: 2174118 - RNA, 16 nt, Human
cagagagggcaggcau

SEQ ID NO: 2174119 - RNA, 18 nt, Human
cagagagggcaggcauga

SEQ ID NO: 2174120 - RNA, 12 nt, Human
cagagagggcag

SEQ ID NO: 2174121 - RNA, 13 nt, Human
cagagagggcagg

SEQ ID NO: 2174122 - RNA, 14 nt, Human
cagagagggcaggc

SEQ ID NO: 2174123 - RNA, 15 nt, Human
cagagagggcaggca

SEQ ID NO: 2174124 - RNA, 12 nt, Human
cagagagggugg

SEQ ID NO: 2174125 - RNA, 21 nt, Human
cagagagagaagugccccugc

SEQ ID NO: 2174126 - RNA, 20 nt, Human
cagagagagaagugccccug

SEQ ID NO: 2174127 - RNA, 19 nt, Human
cagagagagaagugccccu

SEQ ID NO: 2174128 - RNA, 23 nt, Human
cagagagagaagugccccugcug

SEQ ID NO: 2174129 - RNA, 22 nt, Human
cagagagagaagugccccugcu

SEQ ID NO: 2174130 - RNA, 12 nt, Human
cagagagaagcc

SEQ ID NO: 2174131 - RNA, 14 nt, Human
cagagagaagccug

SEQ ID NO: 2174132 - RNA, 15 nt, Human
cagagacuugggaca

SEQ ID NO: 2174133 - RNA, 18 nt, Human
cagagacuugggacauug

SEQ ID NO: 2174134 - RNA, 20 nt, Human
cagagacuugggacauugcc

SEQ ID NO: 2174135 - RNA, 14 nt, Human
cagagacugcugug

SEQ ID NO: 2174136 - RNA, 23 nt, Human
cagagacuccugcaggcagccag

SEQ ID NO: 2174137 - RNA, 12 nt, Human
cagagcucacaa

SEQ ID NO: 2174138 - RNA, 22 nt, Human
cagagagucccacugccucagg

SEQ ID NO: 2174139 - RNA, 17 nt, Human
cagagcuacuugggcca

SEQ ID NO: 2174140 - RNA, 14 nt, Human
cagagcucuccagc

SEQ ID NO: 2174141 - RNA, 15 nt, Human
cagagcucuccagcu

SEQ ID NO: 2174142 - RNA, 20 nt, Human
cagagcucuccagcuccaag

SEQ ID NO: 2174143 - RNA, 17 nt, Human
cagagcucuccagcucc

SEQ ID NO: 2174144 - RNA, 14 nt, Human
cagagcugacacag

SEQ ID NO: 2174145 - RNA, 15 nt, Human
cagagcugacacagg

SEQ ID NO: 2174146 - RNA, 13 nt, Human
cagagcugccacc

SEQ ID NO: 2174147 - RNA, 21 nt, Human
cagagaggucaagcccaggag

SEQ ID NO: 2174148 - RNA, 12 nt, Human
cagagaguccca

SEQ ID NO: 2174149 - RNA, 14 nt, Human
cagagagucccacu

SEQ ID NO: 2174150 - RNA, 18 nt, Human
cagagagucccacugccu

SEQ ID NO: 2174151 - RNA, 20 nt, Human
cagagagucccacugccuca

SEQ ID NO: 2174152 - RNA, 20 nt, Human
cagagagguuaaggugggua

SEQ ID NO: 2174153 - RNA, 19 nt, Human
cagagaggucaagcccagg

SEQ ID NO: 2174154 - RNA, 18 nt, Human
cagagagggugacaagau

SEQ ID NO: 2174155 - RNA, 21 nt, Human
cagagagggcaggcaugaagu

SEQ ID NO: 2174156 - RNA, 17 nt, Human
cagagagggugacaaga

SEQ ID NO: 2174157 - RNA, 23 nt, Human
cagagagggugggagugggccca

SEQ ID NO: 2174158 - RNA, 23 nt, Human
cagagaggguggugaccucugcc

SEQ ID NO: 2174159 - RNA, 18 nt, Human
cagaggggcuuucuggag

SEQ ID NO: 2174160 - RNA, 13 nt, Human
cagaggggguggc

SEQ ID NO: 2174161 - RNA, 17 nt, Human
cagaggaaagcaaagga

SEQ ID NO: 2174162 - RNA, 19 nt, Human
cagaggaaagcaaaggaga

SEQ ID NO: 2174163 - RNA, 23 nt, Human
cagagcuucuuccaggugcccag

SEQ ID NO: 2174164 - RNA, 20 nt, Human
cagagcuucuuccaggugcc

SEQ ID NO: 2174165 - RNA, 15 nt, Human
cagagcuuggacugg

SEQ ID NO: 2174166 - RNA, 16 nt, Human
cagagcuuggacugga

SEQ ID NO: 2174167 - RNA, 19 nt, Human
cagagcuuggacuggaugc

SEQ ID NO: 2174168 - RNA, 19 nt, Human
cagagcugacacaggauga

SEQ ID NO: 2174169 - RNA, 23 nt, Human
cagagcuucccugacucauucug

SEQ ID NO: 2174170 - RNA, 15 nt, Human
auuacaggcuugagc

SEQ ID NO: 2174171 - RNA, 13 nt, Human
auuacagguguga

SEQ ID NO: 2174172 - RNA, 19 nt, Human
auuacaggcuccugccacc

SEQ ID NO: 2174173 - RNA, 17 nt, Human
auuacaggcuccugcca

SEQ ID NO: 2174174 - RNA, 12 nt, Human
auuacagagagg

SEQ ID NO: 2174175 - RNA, 20 nt, Human
auuacacuguauuuguaucu

SEQ ID NO: 2174176 - RNA, 21 nt, Human
auuaauuuuuuuauuguuuaa

SEQ ID NO: 2174177 - RNA, 17 nt, Human
auuacagagaggagaaa

SEQ ID NO: 2174178 - RNA, 15 nt, Human
auuacagagaggaga

SEQ ID NO: 2174179 - RNA, 16 nt, Human
auuacaggcuccugcc

SEQ ID NO: 2174180 - RNA, 15 nt, Human
auuacaggcuccugc

SEQ ID NO: 2174181 - RNA, 22 nt, Human
auuacaagcgugagccacugca

SEQ ID NO: 2174182 - RNA, 18 nt, Human
auuaauuuuuuuauuguu

SEQ ID NO: 2174183 - RNA, 19 nt, Human
auuaauuuuuuuauuguuu

SEQ ID NO: 2174184 - RNA, 16 nt, Human
auuaauuuuuuuauug

SEQ ID NO: 2174185 - RNA, 17 nt, Human
auuaauuuuuuuauugu

SEQ ID NO: 2174186 - RNA, 21 nt, Human
auuacaccagccucgucuuca

SEQ ID NO: 2174187 - RNA, 17 nt, Human
auuacacaaaacaaaug

SEQ ID NO: 2174188 - RNA, 18 nt, Human
auuacacaaaacaaaugc

SEQ ID NO: 2174189 - RNA, 14 nt, Human
auuacacccaaaga

SEQ ID NO: 2174190 - RNA, 18 nt, Human
auuacacuguauuuguau

SEQ ID NO: 2174191 - RNA, 19 nt, Human
auuacacuguauuuguauc

SEQ ID NO: 2174192 - RNA, 13 nt, Human
auuacacaaaaca

SEQ ID NO: 2174193 - RNA, 14 nt, Human
auuacacaaaacaa

SEQ ID NO: 2174194 - RNA, 18 nt, Human
auuaaugccuuuaaagua

SEQ ID NO: 2174195 - RNA, 21 nt, Human
auuaaugccuuuaaaguauga

SEQ ID NO: 2174196 - RNA, 15 nt, Human
auuaauggaaauguu

SEQ ID NO: 2174197 - RNA, 20 nt, Human
auuaaugccauuaucccuga

SEQ ID NO: 2174198 - RNA, 15 nt, Human
auuaaugccuuuaaa

SEQ ID NO: 2174199 - RNA, 16 nt, Human
auuaaugccuuuaaag

SEQ ID NO: 2174200 - RNA, 17 nt, Human
auuaaugccuuuaaagu

SEQ ID NO: 2174201 - RNA, 13 nt, Human
auuaaugcacuuu

SEQ ID NO: 2174202 - RNA, 14 nt, Human
auuaaugcacuuuc

SEQ ID NO: 2174203 - RNA, 15 nt, Human
auuaaugcacuuucu

SEQ ID NO: 2174204 - RNA, 16 nt, Human
auuaaugcacuuucua

SEQ ID NO: 2174205 - RNA, 12 nt, Human
auuaaugcacuu

SEQ ID NO: 2174206 - RNA, 20 nt, Human
auuaauuggcagcagauuuu

SEQ ID NO: 2174207 - RNA, 21 nt, Human
auuaauuggcagcagauuuua

SEQ ID NO: 2174208 - RNA, 18 nt, Human
auuaauuguuuugcacuu

SEQ ID NO: 2174209 - RNA, 19 nt, Human
auuaauuguuuugcacuuu

SEQ ID NO: 2174210 - RNA, 20 nt, Human
auuaauuguuuugcacuuuu

SEQ ID NO: 2174211 - RNA, 11 nt, Human
auuaacacugc

SEQ ID NO: 2174212 - RNA, 20 nt, Human
auuaacaaauuauguuacau

SEQ ID NO: 2174213 - RNA, 18 nt, Human
auuaacaacaauaacacu

SEQ ID NO: 2174214 - RNA, 22 nt, Human
auuaacaguuuuccaugaaaac

SEQ ID NO: 2174215 - RNA, 21 nt, Human
auuaacaguuuuccaugaaaa

SEQ ID NO: 2174216 - RNA, 19 nt, Human
auuaacaguuuuccaugaa

SEQ ID NO: 2174217 - RNA, 18 nt, Human
auuaacaguuuuccauga

SEQ ID NO: 2174218 - RNA, 16 nt, Human
auuaacaguuuuccau

SEQ ID NO: 2174219 - RNA, 14 nt, Human
auuaacaguuuucc

SEQ ID NO: 2174220 - RNA, 12 nt, Human
auuaacaguuuu

SEQ ID NO: 2174221 - RNA, 18 nt, Human
auuaacauaggugaaagu

SEQ ID NO: 2174222 - RNA, 23 nt, Human
auuaacaguuuuccaugaaaacg

SEQ ID NO: 2174223 - RNA, 21 nt, Human
auuaacaugaauauuuagugu

SEQ ID NO: 2174224 - RNA, 14 nt, Human
auuaacaaauuaug

SEQ ID NO: 2174225 - RNA, 13 nt, Human
auucauauugaau

SEQ ID NO: 2174226 - RNA, 14 nt, Human
auucauauugaaua

SEQ ID NO: 2174227 - RNA, 17 nt, Human
auucauauugaauauaa

SEQ ID NO: 2174228 - RNA, 17 nt, Human
auucauggccuggggga

SEQ ID NO: 2174229 - RNA, 14 nt, Human
auucauauuuacuu

SEQ ID NO: 2174230 - RNA, 18 nt, Human
auucauuccauucuggaa

SEQ ID NO: 2174231 - RNA, 19 nt, Human
auucauuccauucuggaag

SEQ ID NO: 2174232 - RNA, 19 nt, Human
auucauuauuuuuccacuu

SEQ ID NO: 2174233 - RNA, 20 nt, Human
auucauuauuuuuccacuuu

SEQ ID NO: 2174234 - RNA, 17 nt, Human
auucauuccauucugga

SEQ ID NO: 2174235 - RNA, 12 nt, Human
auucauuccauu

SEQ ID NO: 2174236 - RNA, 15 nt, Human
auucauguuucuuaa

SEQ ID NO: 2174237 - RNA, 13 nt, Human
auucauguuucuu

SEQ ID NO: 2174238 - RNA, 12 nt, Human
auucauguuucu

SEQ ID NO: 2174239 - RNA, 12 nt, Human
auucauguaaac

SEQ ID NO: 2174240 - RNA, 14 nt, Human
auucauuacagcuu

SEQ ID NO: 2174241 - RNA, 19 nt, Human
auucauaguaacuucuuau

SEQ ID NO: 2174242 - RNA, 12 nt, Human
auucaauaaagu

SEQ ID NO: 2174243 - RNA, 13 nt, Human
auucaauaaagua

SEQ ID NO: 2174244 - RNA, 14 nt, Human
auucaauaaaguau

SEQ ID NO: 2174245 - RNA, 17 nt, Human
auucaauaaaguauuua

SEQ ID NO: 2174246 - RNA, 16 nt, Human
auucaaguuauuguac

SEQ ID NO: 2174247 - RNA, 16 nt, Human
auucaaguguacagug

SEQ ID NO: 2174248 - RNA, 21 nt, Human
auucaagucuaugaugcuguu

SEQ ID NO: 2174249 - RNA, 14 nt, Human
auucaaguuauugu

SEQ ID NO: 2174250 - RNA, 15 nt, Human
auucaaguuauugua

SEQ ID NO: 2174251 - RNA, 20 nt, Human
auucaaguguaaaauauuuu

SEQ ID NO: 2174252 - RNA, 21 nt, Human
auucaaguguaaaauauuuug

SEQ ID NO: 2174253 - RNA, 15 nt, Human
auucaagguggccaa

SEQ ID NO: 2174254 - RNA, 21 nt, Human
auucaaggcauuucuaucaca

SEQ ID NO: 2174255 - RNA, 12 nt, Human
auucaaguauua

SEQ ID NO: 2174256 - RNA, 20 nt, Human
auucaaguauuagggguaau

SEQ ID NO: 2174257 - RNA, 23 nt, Human
auuaugugccagauuuaugcaua

SEQ ID NO: 2174258 - RNA, 13 nt, Human
auuaugugccaga

SEQ ID NO: 2174259 - RNA, 21 nt, Human
auuaugugccagauuuaugca

SEQ ID NO: 2174260 - RNA, 17 nt, Human
auuauguauguuuacau

SEQ ID NO: 2174261 - RNA, 17 nt, Human
auuauguccacugugua

SEQ ID NO: 2174262 - RNA, 19 nt, Human
auuauguccacuguguaua

SEQ ID NO: 2174263 - RNA, 15 nt, Human
auuauguauguuuac

SEQ ID NO: 2174264 - RNA, 16 nt, Human
auuauguauguuuaca

SEQ ID NO: 2174265 - RNA, 13 nt, Human
auuagaugugauu

SEQ ID NO: 2174266 - RNA, 14 nt, Human
auuagaugugauuu

SEQ ID NO: 2174267 - RNA, 15 nt, Human
auuagaugugauuua

SEQ ID NO: 2174268 - RNA, 21 nt, Human
auuagaugugauuuaauagug

SEQ ID NO: 2174269 - RNA, 22 nt, Human
auuagaugugauuuaauagugu

SEQ ID NO: 2174270 - RNA, 15 nt, Human
auuagagucagccuu

SEQ ID NO: 2174271 - RNA, 16 nt, Human
auuagagugucuuucc

SEQ ID NO: 2174272 - RNA, 23 nt, Human
auuagagugucuuuccacggagc

SEQ ID NO: 2174273 - RNA, 17 nt, Human
auuagagugucuuucca

SEQ ID NO: 2174274 - RNA, 19 nt, Human
auuagagggaggagaauga

SEQ ID NO: 2174275 - RNA, 21 nt, Human
auuagagggaggagaaugagc

SEQ ID NO: 2174276 - RNA, 13 nt, Human
auuagagggaggu

SEQ ID NO: 2174277 - RNA, 22 nt, Human
auuagagggagguguuuaaaga

SEQ ID NO: 2174278 - RNA, 13 nt, Human
auuagauguucuc

SEQ ID NO: 2174279 - RNA, 14 nt, Human
auuagauguucucu

SEQ ID NO: 2174280 - RNA, 16 nt, Human
auuagauguucucuau

SEQ ID NO: 2174281 - RNA, 20 nt, Human
auucgcccaaagccagacag

SEQ ID NO: 2174282 - RNA, 21 nt, Human
auucgcccaaagccagacagc

SEQ ID NO: 2174283 - RNA, 19 nt, Human
auucgcccaaagccagaca

SEQ ID NO: 2174284 - RNA, 17 nt, Human
auucgagacagaaccuu

SEQ ID NO: 2174285 - RNA, 16 nt, Human
auucgagacagaaccu

SEQ ID NO: 2174286 - RNA, 18 nt, Human
auuccuuuuguguacagu

SEQ ID NO: 2174287 - RNA, 20 nt, Human
auuccuuugaagaggaaaau

SEQ ID NO: 2174288 - RNA, 18 nt, Human
auuccuuuguguuucuau

SEQ ID NO: 2174289 - RNA, 16 nt, Human
auucgaccugauuuac

SEQ ID NO: 2174290 - RNA, 15 nt, Human
auucgaaccaggaaa

SEQ ID NO: 2174291 - RNA, 18 nt, Human
auucgaccugauuuacag

SEQ ID NO: 2174292 - RNA, 20 nt, Human
auucgaccugauuuacaguu

SEQ ID NO: 2174293 - RNA, 21 nt, Human
auucgaccugauuuacaguuu

SEQ ID NO: 2174294 - RNA, 11 nt, Human
auucauuucaa

SEQ ID NO: 2174295 - RNA, 17 nt, Human
auuccuuucuaucauuu

SEQ ID NO: 2174296 - RNA, 16 nt, Human
auuccuuucuaucauu

SEQ ID NO: 2174297 - RNA, 15 nt, Human
auuccuuucucaucc

SEQ ID NO: 2174298 - RNA, 17 nt, Human
auuccuuucucauccca

SEQ ID NO: 2174299 - RNA, 16 nt, Human
auuccuuugaagagga

SEQ ID NO: 2174300 - RNA, 18 nt, Human
auuccuuugaagaggaaa

SEQ ID NO: 2174301 - RNA, 17 nt, Human
auucauuuaaaaugauu

SEQ ID NO: 2174302 - RNA, 13 nt, Human
auucauuuaaaau

SEQ ID NO: 2174303 - RNA, 14 nt, Human
auucauuuaaaaug

SEQ ID NO: 2174304 - RNA, 15 nt, Human
auucauuuaaaauga

SEQ ID NO: 2174305 - RNA, 16 nt, Human
auucauuuaaaaugau

SEQ ID NO: 2174306 - RNA, 19 nt, Human
auucauuguauaaaaauag

SEQ ID NO: 2174307 - RNA, 15 nt, Human
auucauugaagucag

SEQ ID NO: 2174308 - RNA, 20 nt, Human
auucauugaagucagaugug

SEQ ID NO: 2174309 - RNA, 16 nt, Human
auucauuguauaaaaa

SEQ ID NO: 2174310 - RNA, 10 nt, Human
auucauuuaa

SEQ ID NO: 2174311 - RNA, 14 nt, Human
auucauucuuagcu

SEQ ID NO: 2174312 - RNA, 19 nt, Human
auucauucuuagcucuuaa

SEQ ID NO: 2174313 - RNA, 14 nt, Human
auucucuuauccaa

SEQ ID NO: 2174314 - RNA, 12 nt, Human
auucucuuaucc

SEQ ID NO: 2174315 - RNA, 19 nt, Human
auucucuccaaaaaugcac

SEQ ID NO: 2174316 - RNA, 15 nt, Human
auucucuccaaaaau

SEQ ID NO: 2174317 - RNA, 14 nt, Human
auucucuccaaaaa

SEQ ID NO: 2174318 - RNA, 23 nt, Human
auucucuaguuugauuaaauucu

SEQ ID NO: 2174319 - RNA, 23 nt, Human
auucguggugaucaauuaaaugu

SEQ ID NO: 2174320 - RNA, 21 nt, Human
auucgugcagcauaugaggau

SEQ ID NO: 2174321 - RNA, 23 nt, Human
auucgguguggugcagugugaaa

SEQ ID NO: 2174322 - RNA, 21 nt, Human
auucggugugcaccaggguug

SEQ ID NO: 2174323 - RNA, 21 nt, Human
auucgguauccccccaucuug

SEQ ID NO: 2174324 - RNA, 20 nt, Human
auucucuaguuugauuaaau

SEQ ID NO: 2174325 - RNA, 13 nt, Human
auucguucugugg

SEQ ID NO: 2174326 - RNA, 22 nt, Human
auucuuuccauuaugauucuuu

SEQ ID NO: 2174327 - RNA, 21 nt, Human
auucuuuccauuaugauucuu

SEQ ID NO: 2174328 - RNA, 17 nt, Human
auucuuuccauuaugau

SEQ ID NO: 2174329 - RNA, 16 nt, Human
auucuuuccauuauga

SEQ ID NO: 2174330 - RNA, 19 nt, Human
auucuuucaagugaaucua

SEQ ID NO: 2174331 - RNA, 23 nt, Human
auucuuuauacaacagugcuaaa

SEQ ID NO: 2174332 - RNA, 15 nt, Human
auucucuuauccaac

SEQ ID NO: 2174333 - RNA, 17 nt, Human
auucuuuaaauuucauc

SEQ ID NO: 2174334 - RNA, 13 nt, Human
auucuuuauacaa

SEQ ID NO: 2174335 - RNA, 18 nt, Human
auucuuuauacaacagug

SEQ ID NO: 2174336 - RNA, 19 nt, Human
auucuuuauacaacagugc

SEQ ID NO: 2174337 - RNA, 21 nt, Human
auucuuuauacaacagugcua

SEQ ID NO: 2174338 - RNA, 17 nt, Human
auucuuuaucuugacau

SEQ ID NO: 2174339 - RNA, 12 nt, Human
auugaggccugc

SEQ ID NO: 2174340 - RNA, 21 nt, Human
auugaggccugcccucaggga

SEQ ID NO: 2174341 - RNA, 22 nt, Human
auugaggacacugauauggguc

SEQ ID NO: 2174342 - RNA, 20 nt, Human
auuuucuauuguuacucugg

SEQ ID NO: 2174343 - RNA, 23 nt, Human
auuuuaguuucuguucuguggaa

SEQ ID NO: 2174344 - RNA, 19 nt, Human
auuuucuauaauuuaaaua

SEQ ID NO: 2174345 - RNA, 18 nt, Human
auuuucuauaauuuaaau

SEQ ID NO: 2174346 - RNA, 17 nt, Human
auuuucuauaauuuaaa

SEQ ID NO: 2174347 - RNA, 17 nt, Human
auuuugaaaaauuccua

SEQ ID NO: 2174348 - RNA, 20 nt, Human
auuuucuuuuuaauaaaaag

SEQ ID NO: 2174349 - RNA, 20 nt, Human
auuuucugguagauagaaau

SEQ ID NO: 2174350 - RNA, 17 nt, Human
auuuucugguagauaga

SEQ ID NO: 2174351 - RNA, 18 nt, Human
auuuucugguagauagaa

SEQ ID NO: 2174352 - RNA, 15 nt, Human
auuuugaaaaacugc

SEQ ID NO: 2174353 - RNA, 13 nt, Human
auuuugaaaaacu

SEQ ID NO: 2174354 - RNA, 22 nt, Human
auuuucuggaauacaugaaaua

SEQ ID NO: 2174355 - RNA, 19 nt, Human
auuuucuggaauacaugaa

SEQ ID NO: 2174356 - RNA, 18 nt, Human
auuuucuggaauacauga

SEQ ID NO: 2174357 - RNA, 22 nt, Human
auuuucucuguguuuguuccua

SEQ ID NO: 2174358 - RNA, 18 nt, Human
auuuucucuguguuuguu

SEQ ID NO: 2174359 - RNA, 12 nt, Human
auuuucugcaag

SEQ ID NO: 2174360 - RNA, 16 nt, Human
auuuucugcaagccug

SEQ ID NO: 2174361 - RNA, 16 nt, Human
auuuucuauuguuacu

SEQ ID NO: 2174362 - RNA, 23 nt, Human
auuuucucccaggaagcuuugau

SEQ ID NO: 2174363 - RNA, 15 nt, Human
auuuucucccaggaa

SEQ ID NO: 2174364 - RNA, 17 nt, Human
auuuucucccaggaagc

SEQ ID NO: 2174365 - RNA, 12 nt, Human
auuuguuaaugg

SEQ ID NO: 2174366 - RNA, 17 nt, Human
auuuguuauuuguacag

SEQ ID NO: 2174367 - RNA, 18 nt, Human
auuuguuauuuguacagu

SEQ ID NO: 2174368 - RNA, 19 nt, Human
auuuguuauuuguacaguu

SEQ ID NO: 2174369 - RNA, 17 nt, Human
auuuguuauuuugcaac

SEQ ID NO: 2174370 - RNA, 19 nt, Human
auuuguucuauagcuuuuc

SEQ ID NO: 2174371 - RNA, 16 nt, Human
auuuguuauuuugcaa

SEQ ID NO: 2174372 - RNA, 17 nt, Human
auuuguuauuuucagua

SEQ ID NO: 2174373 - RNA, 21 nt, Human
auuuguucauagacccucuca

SEQ ID NO: 2174374 - RNA, 16 nt, Human
auuuguugaaauuaug

SEQ ID NO: 2174375 - RNA, 18 nt, Human
auuuguugaaauuaugua

SEQ ID NO: 2174376 - RNA, 23 nt, Human
auuuuagguguugauuuucuguu

SEQ ID NO: 2174377 - RNA, 22 nt, Human
auuuguucauagacccucucaa

SEQ ID NO: 2174378 - RNA, 14 nt, Human
auuuguugaaauua

SEQ ID NO: 2174379 - RNA, 18 nt, Human
auuuuaguuacagcugug

SEQ ID NO: 2174380 - RNA, 14 nt, Human
auuuuaguuucugu

SEQ ID NO: 2174381 - RNA, 15 nt, Human
auuuuaguuucuguu

SEQ ID NO: 2174382 - RNA, 16 nt, Human
auuuuaguuucuguuc

SEQ ID NO: 2174383 - RNA, 18 nt, Human
auuuuaguuucuguucug

SEQ ID NO: 2174384 - RNA, 19 nt, Human
auuuuaguuucuguucugu

SEQ ID NO: 2174385 - RNA, 21 nt, Human
auuuuaguuucuguucugugg

SEQ ID NO: 2174386 - RNA, 23 nt, Human
auuuuagugacagcucugccugu

SEQ ID NO: 2174387 - RNA, 23 nt, Human
auuuuagucacacguggucuuuc

SEQ ID NO: 2174388 - RNA, 14 nt, Human
auuuuagucacuuu

SEQ ID NO: 2174389 - RNA, 15 nt, Human
auuuuagucacuuuu

SEQ ID NO: 2174390 - RNA, 14 nt, Human
auuugugugugugc

SEQ ID NO: 2174391 - RNA, 12 nt, Human
auuugugugugu

SEQ ID NO: 2174392 - RNA, 20 nt, Human
auuugugugugugcaagugu

SEQ ID NO: 2174393 - RNA, 15 nt, Human
auuugugugugugca

SEQ ID NO: 2174394 - RNA, 15 nt, Human
auuugcagagacagg

SEQ ID NO: 2174395 - RNA, 16 nt, Human
auuugcacccuccgcc

SEQ ID NO: 2174396 - RNA, 22 nt, Human
auuugcagagacaggaccugac

SEQ ID NO: 2174397 - RNA, 19 nt, Human
auuugcagagacaggaccu

SEQ ID NO: 2174398 - RNA, 21 nt, Human
auuugcacuggaguucuaugc

SEQ ID NO: 2174399 - RNA, 18 nt, Human
auuuguuaaauauuuaca

SEQ ID NO: 2174400 - RNA, 17 nt, Human
auuuguuaaauauuuac

SEQ ID NO: 2174401 - RNA, 16 nt, Human
auuuguuaaauauuua

SEQ ID NO: 2174402 - RNA, 15 nt, Human
auuuguuaaauauuu

SEQ ID NO: 2174403 - RNA, 21 nt, Human
auuuguguuuuaauuuaaaca

SEQ ID NO: 2174404 - RNA, 14 nt, Human
auuuguuauaauga

SEQ ID NO: 2174405 - RNA, 13 nt, Human
auuuguguuuuaa

SEQ ID NO: 2174406 - RNA, 20 nt, Human
auuuguguuuuaauuuaaac

SEQ ID NO: 2174407 - RNA, 22 nt, Human
auuuugaaaaauuccuauugug

SEQ ID NO: 2174408 - RNA, 18 nt, Human
auuuugaaaaauuccuau

SEQ ID NO: 2174409 - RNA, 19 nt, Human
auuuugaaaaauuccuauu

SEQ ID NO: 2174410 - RNA, 20 nt, Human
auuuugaaaucaugaagaua

SEQ ID NO: 2174411 - RNA, 18 nt, Human
caaacaugugguuaaugc

SEQ ID NO: 2174412 - RNA, 13 nt, Human
caaaccagaagca

SEQ ID NO: 2174413 - RNA, 20 nt, Human
caaacaugggguuggcuggg

SEQ ID NO: 2174414 - RNA, 23 nt, Human
caaacaugggguuggcugggccc

SEQ ID NO: 2174415 - RNA, 22 nt, Human
caaacaugaaguguguuuccuu

SEQ ID NO: 2174416 - RNA, 21 nt, Human
caaacaugacccuaaaucuug

SEQ ID NO: 2174417 - RNA, 14 nt, Human
caaaccaucauuga

SEQ ID NO: 2174418 - RNA, 16 nt, Human
caaaccaucauugaaa

SEQ ID NO: 2174419 - RNA, 17 nt, Human
caaaccaucauugaaau

SEQ ID NO: 2174420 - RNA, 17 nt, Human
caaaccaguaucgcuca

SEQ ID NO: 2174421 - RNA, 15 nt, Human
caaaccauaaacuuc

SEQ ID NO: 2174422 - RNA, 12 nt, Human
auuuuuaucuuu

SEQ ID NO: 2174423 - RNA, 15 nt, Human
auuuuuaucuuucgu

SEQ ID NO: 2174424 - RNA, 19 nt, Human
auuuuuaucuuucgugaua

SEQ ID NO: 2174425 - RNA, 14 nt, Human
auuuuuauggaauu

SEQ ID NO: 2174426 - RNA, 12 nt, Human
auuuuuauggaa

SEQ ID NO: 2174427 - RNA, 15 nt, Human
auuuuuauggaauuu

SEQ ID NO: 2174428 - RNA, 19 nt, Human
auuuuuaaaauuuuaauau

SEQ ID NO: 2174429 - RNA, 19 nt, Human
auuuuuauauuugaaauau

SEQ ID NO: 2174430 - RNA, 22 nt, Human
auuuuguuuuugucuuaaaaag

SEQ ID NO: 2174431 - RNA, 17 nt, Human
auuuuuaaaacccauuu

SEQ ID NO: 2174432 - RNA, 16 nt, Human
auuuuuaaaacccauu

SEQ ID NO: 2174433 - RNA, 22 nt, Human
auuuuuaaaaugcaacaugugu

SEQ ID NO: 2174434 - RNA, 16 nt, Human
auuuuuaaaauauuua

SEQ ID NO: 2174435 - RNA, 17 nt, Human
auuuuuaaaauauuuau

SEQ ID NO: 2174436 - RNA, 13 nt, Human
auuuuuuucuacc

SEQ ID NO: 2174437 - RNA, 20 nt, Human
auuuuuuucuaccuugaggu

SEQ ID NO: 2174438 - RNA, 14 nt, Human
auuuuuuucugauu

SEQ ID NO: 2174439 - RNA, 15 nt, Human
auuuuuuucugauug

SEQ ID NO: 2174440 - RNA, 15 nt, Human
auuuuuuucugaauu

SEQ ID NO: 2174441 - RNA, 14 nt, Human
auuuuuauuucaaa

SEQ ID NO: 2174442 - RNA, 14 nt, Human
auuuuuauuuauau

SEQ ID NO: 2174443 - RNA, 13 nt, Human
auuuuuauucaua

SEQ ID NO: 2174444 - RNA, 14 nt, Human
auuuuuauucauaa

SEQ ID NO: 2174445 - RNA, 22 nt, Human
auuuuuuucacuggaguuacau

SEQ ID NO: 2174446 - RNA, 15 nt, Human
auuuuuauucauaag

SEQ ID NO: 2174447 - RNA, 16 nt, Human
auuuuuauuuuucuaa

SEQ ID NO: 2174448 - RNA, 16 nt, Human
auuuuuauuaaauuau

SEQ ID NO: 2174449 - RNA, 15 nt, Human
auuuuuauuauuugu

SEQ ID NO: 2174450 - RNA, 12 nt, Human
auuuuuauucau

SEQ ID NO: 2174451 - RNA, 18 nt, Human
auuuuuuuuaaguauuua

SEQ ID NO: 2174452 - RNA, 20 nt, Human
auuuuuuuucuguuauauaa

SEQ ID NO: 2174453 - RNA, 19 nt, Human
auuuuuuuucuguuauaua

SEQ ID NO: 2174454 - RNA, 18 nt, Human
auuuuuuuucuguuauau

SEQ ID NO: 2174455 - RNA, 20 nt, Human
auuuuuuuucauguuuuaac

SEQ ID NO: 2174456 - RNA, 16 nt, Human
auuuuuuuucauguuu

SEQ ID NO: 2174457 - RNA, 15 nt, Human
auuuuuuuucauguu

SEQ ID NO: 2174458 - RNA, 14 nt, Human
auuuuuuuucaugu

SEQ ID NO: 2174459 - RNA, 17 nt, Human
auuuuuuuucuguuaua

SEQ ID NO: 2174460 - RNA, 15 nt, Human
auuuuuuuucuguua

SEQ ID NO: 2174461 - RNA, 15 nt, Human
auuuuuuuuguuuca

SEQ ID NO: 2174462 - RNA, 16 nt, Human
auuuuuuuuucauaca

SEQ ID NO: 2174463 - RNA, 14 nt, Human
auuuuuuuuucaua

SEQ ID NO: 2174464 - RNA, 14 nt, Human
caaaagcacccuug

SEQ ID NO: 2174465 - RNA, 16 nt, Human
caaaagcaagacuguu

SEQ ID NO: 2174466 - RNA, 23 nt, Human
caaaagcaagacuguugcucaaa

SEQ ID NO: 2174467 - RNA, 15 nt, Human
caaaagcaaaugaga

SEQ ID NO: 2174468 - RNA, 14 nt, Human
caaaagcaagacug

SEQ ID NO: 2174469 - RNA, 22 nt, Human
caaaagauugcugaaauuuuau

SEQ ID NO: 2174470 - RNA, 21 nt, Human
auuuuuuuuucauacacuuau

SEQ ID NO: 2174471 - RNA, 20 nt, Human
auuuuuuuuucauacacuua

SEQ ID NO: 2174472 - RNA, 19 nt, Human
auuuuuuuuucauacacuu

SEQ ID NO: 2174473 - RNA, 22 nt, Human
caaaaggguuuaaacugauuca

SEQ ID NO: 2174474 - RNA, 20 nt, Human
caaaaggguuuaaacugauu

SEQ ID NO: 2174475 - RNA, 19 nt, Human
caaaagcccauucauucca

SEQ ID NO: 2174476 - RNA, 15 nt, Human
caaaagcccauucau

SEQ ID NO: 2174477 - RNA, 21 nt, Human
caaaagguauuuuaaucacca

SEQ ID NO: 2174478 - RNA, 13 nt, Human
caaaagcauguga

SEQ ID NO: 2174479 - RNA, 19 nt, Human
caaaagcaucuaugugaga

SEQ ID NO: 2174480 - RNA, 21 nt, Human
caaacaugaaguguguuuccu

SEQ ID NO: 2174481 - RNA, 14 nt, Human
caaacaugaagugu

SEQ ID NO: 2174482 - RNA, 12 nt, Human
caaacaugaagu

SEQ ID NO: 2174483 - RNA, 23 nt, Human
caaaaggugccugugaggcaggg

SEQ ID NO: 2174484 - RNA, 17 nt, Human
caaacaucacucugcug

SEQ ID NO: 2174485 - RNA, 18 nt, Human
caaacauccuaucaacaa

SEQ ID NO: 2174486 - RNA, 18 nt, Human
caaacaucacucugcugc

SEQ ID NO: 2174487 - RNA, 21 nt, Human
caaacaucacucugcugcuua

SEQ ID NO: 2174488 - RNA, 22 nt, Human
caaaaggugccugugaggcagg

SEQ ID NO: 2174489 - RNA, 18 nt, Human
caaaaggugccugugagg

SEQ ID NO: 2174490 - RNA, 15 nt, Human
caaaaggugccugug

SEQ ID NO: 2174491 - RNA, 13 nt, Human
caaaaggugccug

SEQ ID NO: 2174492 - RNA, 19 nt, Human
caaaagguucacuaaagca

SEQ ID NO: 2174493 - RNA, 20 nt, Human
caaaagguuaauaaaguaau

SEQ ID NO: 2174494 - RNA, 13 nt, Human
auuucuuaaacaa

SEQ ID NO: 2174495 - RNA, 21 nt, Human
auuucuuaaacaaauguauga

SEQ ID NO: 2174496 - RNA, 23 nt, Human
auuucugagaagguccuuaauga

SEQ ID NO: 2174497 - RNA, 16 nt, Human
auuucugcagguucuu

SEQ ID NO: 2174498 - RNA, 13 nt, Human
auuucugcauaug

SEQ ID NO: 2174499 - RNA, 21 nt, Human
auuucuguuuagauaauacac

SEQ ID NO: 2174500 - RNA, 20 nt, Human
auuucucuuacugcaaaugu

SEQ ID NO: 2174501 - RNA, 20 nt, Human
auuucugaaaugaccucaag

SEQ ID NO: 2174502 - RNA, 18 nt, Human
auuucugaaguggacucu

SEQ ID NO: 2174503 - RNA, 17 nt, Human
auuucugagaagguccu

SEQ ID NO: 2174504 - RNA, 11 nt, Human
auuucugagaa

SEQ ID NO: 2174505 - RNA, 23 nt, Human
auuucugaguuucauucuccugc

SEQ ID NO: 2174506 - RNA, 19 nt, Human
auuucuguuuagauaauac

SEQ ID NO: 2174507 - RNA, 20 nt, Human
auuucuguuuagauaauaca

SEQ ID NO: 2174508 - RNA, 21 nt, Human
auuucagguuuuguaaagaug

SEQ ID NO: 2174509 - RNA, 20 nt, Human
auuucagguuuuguaaagau

SEQ ID NO: 2174510 - RNA, 22 nt, Human
auuucaggggucgucaccaccu

SEQ ID NO: 2174511 - RNA, 19 nt, Human
auuucaggggucgucacca

SEQ ID NO: 2174512 - RNA, 14 nt, Human
auuucagugccaau

SEQ ID NO: 2174513 - RNA, 20 nt, Human
auuucuccuuugauaaaaua

SEQ ID NO: 2174514 - RNA, 21 nt, Human
auuucuccuuugauaaaauaa

SEQ ID NO: 2174515 - RNA, 19 nt, Human
auuucucugauuugcaaaa

SEQ ID NO: 2174516 - RNA, 18 nt, Human
auuucucuuacugcaaau

SEQ ID NO: 2174517 - RNA, 15 nt, Human
auuugcacaaguuuu

SEQ ID NO: 2174518 - RNA, 21 nt, Human
auuucacauuaauauuugcug

SEQ ID NO: 2174519 - RNA, 22 nt, Human
auuucacauuaauauuugcuga

SEQ ID NO: 2174520 - RNA, 21 nt, Human
auuucaccccucccuuucucc

SEQ ID NO: 2174521 - RNA, 14 nt, Human
auuucaccuguaaa

SEQ ID NO: 2174522 - RNA, 15 nt, Human
auuucaccccucccu

SEQ ID NO: 2174523 - RNA, 20 nt, Human
auuucaccccucccuuucuc

SEQ ID NO: 2174524 - RNA, 12 nt, Human
auuucacucucc

SEQ ID NO: 2174525 - RNA, 19 nt, Human
auuucaccuguaaaccuga

SEQ ID NO: 2174526 - RNA, 18 nt, Human
auuucaccuguaaaccug

SEQ ID NO: 2174527 - RNA, 16 nt, Human
auuucaccuguaaacc

SEQ ID NO: 2174528 - RNA, 15 nt, Human
auuucaccuguaaac

SEQ ID NO: 2174529 - RNA, 22 nt, Human
auuucaggauacucugucagau

SEQ ID NO: 2174530 - RNA, 19 nt, Human
auuucaggauacucuguca

SEQ ID NO: 2174531 - RNA, 15 nt, Human
auuucaggagggauu

SEQ ID NO: 2174532 - RNA, 22 nt, Human
auuucacuauuuuuauuuauau

SEQ ID NO: 2174533 - RNA, 15 nt, Human
auuucaggagcagcc

SEQ ID NO: 2174534 - RNA, 14 nt, Human
auuucacuauuuuu

SEQ ID NO: 2174535 - RNA, 20 nt, Human
auuucacgucgucuucugua

SEQ ID NO: 2174536 - RNA, 16 nt, Human
auuucagcagcugcag

SEQ ID NO: 2174537 - RNA, 14 nt, Human
auuucacucuccuu

SEQ ID NO: 2174538 - RNA, 21 nt, Human
auuucaauuuccaagagcuga

SEQ ID NO: 2174539 - RNA, 16 nt, Human
auuuaucucuauuuaa

SEQ ID NO: 2174540 - RNA, 14 nt, Human
auuuaucucuauuu

SEQ ID NO: 2174541 - RNA, 13 nt, Human
auuucacauuaau

SEQ ID NO: 2174542 - RNA, 23 nt, Human
auuucacaguguguuugugauug

SEQ ID NO: 2174543 - RNA, 13 nt, Human
auuucacaacaga

SEQ ID NO: 2174544 - RNA, 15 nt, Human
auuucacaacagauc

SEQ ID NO: 2174545 - RNA, 20 nt, Human
auuucacaacagaucaauuu

SEQ ID NO: 2174546 - RNA, 23 nt, Human
auuuaucagugacagaguucacu

SEQ ID NO: 2174547 - RNA, 18 nt, Human
auuuauauauuuauaacu

SEQ ID NO: 2174548 - RNA, 17 nt, Human
auuuauauauuuauaac

SEQ ID NO: 2174549 - RNA, 16 nt, Human
auuuauauauuuauaa

SEQ ID NO: 2174550 - RNA, 15 nt, Human
auuuauauauuuaua

SEQ ID NO: 2174551 - RNA, 19 nt, Human
auuuauauauuuauaacuc

SEQ ID NO: 2174552 - RNA, 15 nt, Human
auuuauauauuggua

SEQ ID NO: 2174553 - RNA, 18 nt, Human
auuuauccugaaauuuca

SEQ ID NO: 2174554 - RNA, 20 nt, Human
auuuauccugaaauuucaga

SEQ ID NO: 2174555 - RNA, 19 nt, Human
auuuauccugaaauuucag

SEQ ID NO: 2174556 - RNA, 21 nt, Human
auuuauccugaaauuucagau

SEQ ID NO: 2174557 - RNA, 19 nt, Human
auuuaagugcguguguaga

SEQ ID NO: 2174558 - RNA, 14 nt, Human
auuuaagugcgugu

SEQ ID NO: 2174559 - RNA, 21 nt, Human
auuuaagccucauauuuaaag

SEQ ID NO: 2174560 - RNA, 18 nt, Human
auuuaagcuuaugucaga

SEQ ID NO: 2174561 - RNA, 17 nt, Human
auuuaagccucauauuu

SEQ ID NO: 2174562 - RNA, 19 nt, Human
auuuaagccucauauuuaa

SEQ ID NO: 2174563 - RNA, 15 nt, Human
auuuaagauaguuuu

SEQ ID NO: 2174564 - RNA, 11 nt, Human
auuuaagcauu

SEQ ID NO: 2174565 - RNA, 15 nt, Human
auuuaagauaauuau

SEQ ID NO: 2174566 - RNA, 15 nt, Human
auuuaagcauuguuu

SEQ ID NO: 2174567 - RNA, 14 nt, Human
auuuaagcauuguu

SEQ ID NO: 2174568 - RNA, 13 nt, Human
auuuaagcauugu

SEQ ID NO: 2174569 - RNA, 12 nt, Human
auuuaagcauug

SEQ ID NO: 2174570 - RNA, 19 nt, Human
auuuaaguucauauuccau

SEQ ID NO: 2174571 - RNA, 20 nt, Human
auuuaagugcguguguagag

SEQ ID NO: 2174572 - RNA, 21 nt, Human
auuuaagugcguguguagagu

SEQ ID NO: 2174573 - RNA, 22 nt, Human
auuuaagugcguguguagaguu

SEQ ID NO: 2174574 - RNA, 16 nt, Human
auuuaauaaaaaaaca

SEQ ID NO: 2174575 - RNA, 19 nt, Human
auuuaauaaaauaauucua

SEQ ID NO: 2174576 - RNA, 21 nt, Human
auuuaauaaaauaauucuaaa

SEQ ID NO: 2174577 - RNA, 22 nt, Human
auuuaauaaaauaauucuaaag

SEQ ID NO: 2174578 - RNA, 13 nt, Human
auuuaauacagca

SEQ ID NO: 2174579 - RNA, 15 nt, Human
auuuaauacagcagu

SEQ ID NO: 2174580 - RNA, 15 nt, Human
auuuauauaaauuuu

SEQ ID NO: 2174581 - RNA, 15 nt, Human
auuuaauucucuuga

SEQ ID NO: 2174582 - RNA, 22 nt, Human
auuuauaguuuguacaugcauu

SEQ ID NO: 2174583 - RNA, 19 nt, Human
auuuauauacaaccugcuu

SEQ ID NO: 2174584 - RNA, 15 nt, Human
auuuauauagauuau

SEQ ID NO: 2174585 - RNA, 14 nt, Human
auuuauauauuuau

SEQ ID NO: 2174586 - RNA, 14 nt, Human
auuuauauauugaa

SEQ ID NO: 2174587 - RNA, 14 nt, Human
auuuauauauguau

SEQ ID NO: 2174588 - RNA, 15 nt, Human
auuuauauauguauu

SEQ ID NO: 2174589 - RNA, 13 nt, Human
auuuaauucucuu

SEQ ID NO: 2174590 - RNA, 16 nt, Human
auuuaauucucuugaa

SEQ ID NO: 2174591 - RNA, 17 nt, Human
auuuaauucauguuucu

SEQ ID NO: 2174592 - RNA, 15 nt, Human
auuuaauucauguuu

SEQ ID NO: 2174593 - RNA, 23 nt, Human
auuuaauuagugcuaagugugaa

SEQ ID NO: 2174594 - RNA, 20 nt, Human
auuuaauuagugcuaagugu

SEQ ID NO: 2174595 - RNA, 22 nt, Human
auuuaauaguguuaaucaauuu

SEQ ID NO: 2174596 - RNA, 23 nt, Human
auuuaauaguguuaaucaauuua

SEQ ID NO: 2174597 - RNA, 21 nt, Human
auuuaauuagugcuaagugug

SEQ ID NO: 2174598 - RNA, 22 nt, Human
auuuaauuagugcuaaguguga

SEQ ID NO: 2174599 - RNA, 14 nt, Human
auuuaauaguguua

SEQ ID NO: 2174600 - RNA, 15 nt, Human
auuuaauaguguuaa

SEQ ID NO: 2174601 - RNA, 17 nt, Human
auuuaauaguguuaauc

SEQ ID NO: 2174602 - RNA, 18 nt, Human
auuuaauaguguuaauca

SEQ ID NO: 2174603 - RNA, 19 nt, Human
auuuaauaguguuaaucaa

SEQ ID NO: 2174604 - RNA, 20 nt, Human
auuuaauaguguuaaucaau

SEQ ID NO: 2174605 - RNA, 21 nt, Human
auuuaauaguguuaaucaauu

SEQ ID NO: 2174606 - RNA, 15 nt, Human
auuuaagacacugaa

SEQ ID NO: 2174607 - RNA, 16 nt, Human
auuuaagacacugaaa

SEQ ID NO: 2174608 - RNA, 16 nt, Human
auuuaagagacaguca

SEQ ID NO: 2174609 - RNA, 20 nt, Human
auuuaacuuguuuccaaugu

SEQ ID NO: 2174610 - RNA, 23 nt, Human
auuuaacuugaggguaauaaacu

SEQ ID NO: 2174611 - RNA, 17 nt, Human
auuuaacuuguuuccaa

SEQ ID NO: 2174612 - RNA, 18 nt, Human
auuuaacuugaggguaau

SEQ ID NO: 2174613 - RNA, 20 nt, Human
auuuaacuugaggguaauaa

SEQ ID NO: 2174614 - RNA, 21 nt, Human
auuuaacuugaggguaauaaa

SEQ ID NO: 2174615 - RNA, 22 nt, Human
auuuaacuugaggguaauaaac

SEQ ID NO: 2174616 - RNA, 22 nt, Human
auugaggggauuaauaugaaaa

SEQ ID NO: 2174617 - RNA, 17 nt, Human
auugaggggauuaauau

SEQ ID NO: 2174618 - RNA, 22 nt, Human
auugauaagagggcacacacug

SEQ ID NO: 2174619 - RNA, 23 nt, Human
auugauaagagggcacacacugu

SEQ ID NO: 2174620 - RNA, 20 nt, Human
cacgcuucuucuuuugagca

SEQ ID NO: 2174621 - RNA, 19 nt, Human
cacgcuugcguaugucugu

SEQ ID NO: 2174622 - RNA, 14 nt, Human
cacgcuuucuagcu

SEQ ID NO: 2174623 - RNA, 14 nt, Human
cacgcuuuccugaa

SEQ ID NO: 2174624 - RNA, 22 nt, Human
cacgcugugggcaggugggagc

SEQ ID NO: 2174625 - RNA, 18 nt, Human
cacgcugugggcaggugg

SEQ ID NO: 2174626 - RNA, 16 nt, Human
cacgcugugggcaggu

SEQ ID NO: 2174627 - RNA, 23 nt, Human
cacgcugucuccagacccccacc

SEQ ID NO: 2174628 - RNA, 20 nt, Human
cacgcugucuccagaccccc

SEQ ID NO: 2174629 - RNA, 19 nt, Human
cacgcugucuccagacccc

SEQ ID NO: 2174630 - RNA, 18 nt, Human
cacgcugucuccagaccc

SEQ ID NO: 2174631 - RNA, 21 nt, Human
cacgcuggagugcagugagcc

SEQ ID NO: 2174632 - RNA, 17 nt, Human
cacgcugucuccagacc

SEQ ID NO: 2174633 - RNA, 16 nt, Human
cacgcugucuccagac

SEQ ID NO: 2174634 - RNA, 15 nt, Human
cacgcugucuccaga

SEQ ID NO: 2174635 - RNA, 14 nt, Human
cacgcugucuccag

SEQ ID NO: 2174636 - RNA, 13 nt, Human
cacgcugucucca

SEQ ID NO: 2174637 - RNA, 16 nt, Human
cacgcuggagugcagu

SEQ ID NO: 2174638 - RNA, 17 nt, Human
cacgcuggagugcagug

SEQ ID NO: 2174639 - RNA, 18 nt, Human
cacgcuggagugcaguga

SEQ ID NO: 2174640 - RNA, 20 nt, Human
cacgcuggagugcagugagc

SEQ ID NO: 2174641 - RNA, 15 nt, Human
cacgcuggagugcag

SEQ ID NO: 2174642 - RNA, 21 nt, Human
cacuacugcuaccacaacuau

SEQ ID NO: 2174643 - RNA, 15 nt, Human
cacuacauucauuua

SEQ ID NO: 2174644 - RNA, 15 nt, Human
cacuacauucuguua

SEQ ID NO: 2174645 - RNA, 17 nt, Human
cacuagaacucuccauc

SEQ ID NO: 2174646 - RNA, 15 nt, Human
cacuagaacucucca

SEQ ID NO: 2174647 - RNA, 16 nt, Human
cacuagacccacugga

SEQ ID NO: 2174648 - RNA, 19 nt, Human
cacuccaccacccaaaagu

SEQ ID NO: 2174649 - RNA, 11 nt, Human
cacuccaccac

SEQ ID NO: 2174650 - RNA, 10 nt, Human
cacuccacca

SEQ ID NO: 2174651 - RNA, 19 nt, Human
cacuagcccaaugaaauga

SEQ ID NO: 2174652 - RNA, 14 nt, Human
cacuccagaccccu

SEQ ID NO: 2174653 - RNA, 16 nt, Human
cacuccagaccccugg

SEQ ID NO: 2174654 - RNA, 22 nt, Human
cacuccaauuaaggauuuuaug

SEQ ID NO: 2174655 - RNA, 21 nt, Human
cacuccaauuaaggauuuuau

SEQ ID NO: 2174656 - RNA, 16 nt, Human
cacuagcccaaugaaa

SEQ ID NO: 2174657 - RNA, 20 nt, Human
cacuagccagacacucugcu

SEQ ID NO: 2174658 - RNA, 16 nt, Human
cacuagccagacacuc

SEQ ID NO: 2174659 - RNA, 14 nt, Human
cacggaaguuuuca

SEQ ID NO: 2174660 - RNA, 17 nt, Human
cacgcuuucuagcuguu

SEQ ID NO: 2174661 - RNA, 15 nt, Human
cacggaaguuuucaa

SEQ ID NO: 2174662 - RNA, 18 nt, Human
cacggacguuuccaucag

SEQ ID NO: 2174663 - RNA, 15 nt, Human
cacggagccacuccu

SEQ ID NO: 2174664 - RNA, 17 nt, Human
cacggacguuuccauca

SEQ ID NO: 2174665 - RNA, 22 nt, Human
cacggaagagccuugcggaagg

SEQ ID NO: 2174666 - RNA, 16 nt, Human
cacggaagagccuugc

SEQ ID NO: 2174667 - RNA, 14 nt, Human
cacuacauucuguu

SEQ ID NO: 2174668 - RNA, 13 nt, Human
cacuacauucugu

SEQ ID NO: 2174669 - RNA, 23 nt, Human
cacggagccacuccucugacuca

SEQ ID NO: 2174670 - RNA, 21 nt, Human
cacggagccacuccucugacu

SEQ ID NO: 2174671 - RNA, 21 nt, Human
cacuacauuauaaaugucucu

SEQ ID NO: 2174672 - RNA, 19 nt, Human
cacggagccacuccucuga

SEQ ID NO: 2174673 - RNA, 18 nt, Human
cacggagccacuccucug

SEQ ID NO: 2174674 - RNA, 17 nt, Human
cacggagccacuccucu

SEQ ID NO: 2174675 - RNA, 16 nt, Human
cacggagccacuccuc

SEQ ID NO: 2174676 - RNA, 18 nt, Human
cacuccaccacccaaaag

SEQ ID NO: 2174677 - RNA, 13 nt, Human
cacuccagugcca

SEQ ID NO: 2174678 - RNA, 15 nt, Human
cacuccaccacccaa

SEQ ID NO: 2174679 - RNA, 14 nt, Human
cacuccaccaccca

SEQ ID NO: 2174680 - RNA, 17 nt, Human
cacuccagaccccuggc

SEQ ID NO: 2174681 - RNA, 13 nt, Human
cacucccaagucu

SEQ ID NO: 2174682 - RNA, 23 nt, Human
cacuccaugcuuagucacugccu

SEQ ID NO: 2174683 - RNA, 16 nt, Human
cacuccagugccagca

SEQ ID NO: 2174684 - RNA, 17 nt, Human
cacuccagugccagcaa

SEQ ID NO: 2174685 - RNA, 21 nt, Human
cacuccaugcuuagucacugc

SEQ ID NO: 2174686 - RNA, 22 nt, Human
cacuccaugcuuagucacugcc

SEQ ID NO: 2174687 - RNA, 21 nt, Human
cacuccagugagacagcucug

SEQ ID NO: 2174688 - RNA, 16 nt, Human
cacuccagugagacag

SEQ ID NO: 2174689 - RNA, 13 nt, Human
cacugaagcuggg

SEQ ID NO: 2174690 - RNA, 12 nt, Human
cacucccaagcc

SEQ ID NO: 2174691 - RNA, 17 nt, Human
cacugaagcugggauuc

SEQ ID NO: 2174692 - RNA, 18 nt, Human
cacugaaggccuggccca

SEQ ID NO: 2174693 - RNA, 19 nt, Human
cacugaaguagugugcagu

SEQ ID NO: 2174694 - RNA, 23 nt, Human
cacugaagaagcaccaaucauga

SEQ ID NO: 2174695 - RNA, 22 nt, Human
cacugaaguuaacagagacaga

SEQ ID NO: 2174696 - RNA, 19 nt, Human
cacugaaguuaacagagac

SEQ ID NO: 2174697 - RNA, 20 nt, Human
caccugcggugcuaucuccc

SEQ ID NO: 2174698 - RNA, 16 nt, Human
caccugcggugcuauc

SEQ ID NO: 2174699 - RNA, 14 nt, Human
caccugcccugccc

SEQ ID NO: 2174700 - RNA, 17 nt, Human
caccugcggugcuaucu

SEQ ID NO: 2174701 - RNA, 19 nt, Human
caccugcggugcuaucucc

SEQ ID NO: 2174702 - RNA, 22 nt, Human
cacccugauuuaggagaagcca

SEQ ID NO: 2174703 - RNA, 12 nt, Human
cacccugccuua

SEQ ID NO: 2174704 - RNA, 13 nt, Human
cacccugccuuau

SEQ ID NO: 2174705 - RNA, 23 nt, Human
cacccugaaugguuccaugccug

SEQ ID NO: 2174706 - RNA, 12 nt, Human
cacccugagccc

SEQ ID NO: 2174707 - RNA, 17 nt, Human
cacccugagccccuucc

SEQ ID NO: 2174708 - RNA, 18 nt, Human
cacccugagccccuuccu

SEQ ID NO: 2174709 - RNA, 21 nt, Human
cacccuggaggauuucaucuc

SEQ ID NO: 2174710 - RNA, 21 nt, Human
cacccuggauugaucggagcc

SEQ ID NO: 2174711 - RNA, 11 nt, Human
cacccuggaau

SEQ ID NO: 2174712 - RNA, 22 nt, Human
cacccuggccgaguccaagcug

SEQ ID NO: 2174713 - RNA, 21 nt, Human
cacccuggccgaguccaagcu

SEQ ID NO: 2174714 - RNA, 12 nt, Human
cacccugcucuc

SEQ ID NO: 2174715 - RNA, 12 nt, Human
cacccugcuaca

SEQ ID NO: 2174716 - RNA, 18 nt, Human
cacccugccuuaucuugc

SEQ ID NO: 2174717 - RNA, 19 nt, Human
cacccugccuuaucuugca

SEQ ID NO: 2174718 - RNA, 12 nt, Human
cacccuccuuuc

SEQ ID NO: 2174719 - RNA, 20 nt, Human
cacccuccugucuucccagg

SEQ ID NO: 2174720 - RNA, 21 nt, Human
cacccuccugucuucccaggg

SEQ ID NO: 2174721 - RNA, 23 nt, Human
cacccucgaagcgcgccacucgc

SEQ ID NO: 2174722 - RNA, 19 nt, Human
cacccucgaagcgcgccac

SEQ ID NO: 2174723 - RNA, 24 nt, Human
cacccucgaagcgcgccacucgcu

SEQ ID NO: 2174724 - RNA, 16 nt, Human
cacccucgaagcgcgc

SEQ ID NO: 2174725 - RNA, 22 nt, Human
cacccuccugucuucccagggu

SEQ ID NO: 2174726 - RNA, 19 nt, Human
caccuauaaaacaggucaa

SEQ ID NO: 2174727 - RNA, 16 nt, Human
caccuauaaaacaggu

SEQ ID NO: 2174728 - RNA, 14 nt, Human
caccuauaaaacag

SEQ ID NO: 2174729 - RNA, 23 nt, Human
caccuaguggcuguccagugccc

SEQ ID NO: 2174730 - RNA, 18 nt, Human
caccuaguggcuguccag

SEQ ID NO: 2174731 - RNA, 19 nt, Human
caccuaguggcuguccagu

SEQ ID NO: 2174732 - RNA, 21 nt, Human
caccuaguggcuguccagugc

SEQ ID NO: 2174733 - RNA, 22 nt, Human
caccuaguggcuguccagugcc

SEQ ID NO: 2174734 - RNA, 23 nt, Human
cacccuguccaaacugccuaagc

SEQ ID NO: 2174735 - RNA, 15 nt, Human
cacccugucccccag

SEQ ID NO: 2174736 - RNA, 15 nt, Human
caccuaguccaguga

SEQ ID NO: 2174737 - RNA, 14 nt, Human
caccuaguggcugu

SEQ ID NO: 2174738 - RNA, 15 nt, Human
caccuaguggcuguc

SEQ ID NO: 2174739 - RNA, 16 nt, Human
caccuaguggcugucc

SEQ ID NO: 2174740 - RNA, 17 nt, Human
caccuaguggcugucca

SEQ ID NO: 2174741 - RNA, 20 nt, Human
cacccuguccaaacugccua

SEQ ID NO: 2174742 - RNA, 23 nt, Human
cacccuguacuguucugugucuu

SEQ ID NO: 2174743 - RNA, 17 nt, Human
cacccuggggagaaagu

SEQ ID NO: 2174744 - RNA, 22 nt, Human
cacccugggcccugggcuggaa

SEQ ID NO: 2174745 - RNA, 13 nt, Human
cacccuggggccu

SEQ ID NO: 2174746 - RNA, 12 nt, Human
cacccugggccc

SEQ ID NO: 2174747 - RNA, 14 nt, Human
cacccugggcccug

SEQ ID NO: 2174748 - RNA, 17 nt, Human
cacccugggcccugggc

SEQ ID NO: 2174749 - RNA, 21 nt, Human
cacccugggcccugggcugga

SEQ ID NO: 2174750 - RNA, 16 nt, Human
cacccuggugggccaa

SEQ ID NO: 2174751 - RNA, 16 nt, Human
cacccuguacuguucu

SEQ ID NO: 2174752 - RNA, 17 nt, Human
cacccuguacuguucug

SEQ ID NO: 2174753 - RNA, 21 nt, Human
cacccuguacuguucuguguc

SEQ ID NO: 2174754 - RNA, 15 nt, Human
cacccuggugggcca

SEQ ID NO: 2174755 - RNA, 21 nt, Human
cacccuggggccuggaccugc

SEQ ID NO: 2174756 - RNA, 22 nt, Human
cacccuggggccuggaccugcc

SEQ ID NO: 2174757 - RNA, 14 nt, Human
cacccuggggccug

SEQ ID NO: 2174758 - RNA, 15 nt, Human
cacccuggggccugg

SEQ ID NO: 2174759 - RNA, 19 nt, Human
cacccuggggccuggaccu

SEQ ID NO: 2174760 - RNA, 20 nt, Human
cacccuggggccuggaccug

SEQ ID NO: 2174761 - RNA, 20 nt, Human
caccugccagccuggcuucu

SEQ ID NO: 2174762 - RNA, 17 nt, Human
caccugccagccuggcu

SEQ ID NO: 2174763 - RNA, 16 nt, Human
caccugccagccuggc

SEQ ID NO: 2174764 - RNA, 15 nt, Human
caccugccagccugg

SEQ ID NO: 2174765 - RNA, 14 nt, Human
caccugccagccug

SEQ ID NO: 2174766 - RNA, 13 nt, Human
caccugccagccu

SEQ ID NO: 2174767 - RNA, 16 nt, Human
caccuauagucccagc

SEQ ID NO: 2174768 - RNA, 18 nt, Human
caccuaucucgugggaga

SEQ ID NO: 2174769 - RNA, 20 nt, Human
caccuaucucgugggagagc

SEQ ID NO: 2174770 - RNA, 11 nt, Human
caccugccagg

SEQ ID NO: 2174771 - RNA, 12 nt, Human
caccugccaggg

SEQ ID NO: 2174772 - RNA, 22 nt, Human
caccugccagccuggcuucugg

SEQ ID NO: 2174773 - RNA, 13 nt, Human
caccugcccugcc

SEQ ID NO: 2174774 - RNA, 12 nt, Human
caccugcccugc

SEQ ID NO: 2174775 - RNA, 18 nt, Human
caccugccccucaacucu

SEQ ID NO: 2174776 - RNA, 21 nt, Human
caccugccccucaacucuccu

SEQ ID NO: 2174777 - RNA, 23 nt, Human
cacaucuugcucugcugacagac

SEQ ID NO: 2174778 - RNA, 13 nt, Human
cacaucuuggcac

SEQ ID NO: 2174779 - RNA, 15 nt, Human
cacaucuuuaucugu

SEQ ID NO: 2174780 - RNA, 22 nt, Human
cacaucuuuaucuguucuugcu

SEQ ID NO: 2174781 - RNA, 21 nt, Human
cacaucuuucacacuuccacc

SEQ ID NO: 2174782 - RNA, 19 nt, Human
cacaucuuucacacuucca

SEQ ID NO: 2174783 - RNA, 18 nt, Human
cacaucuuucacacuucc

SEQ ID NO: 2174784 - RNA, 12 nt, Human
cacaucuuucac

SEQ ID NO: 2174785 - RNA, 18 nt, Human
cacaugaaaccuuauuuu

SEQ ID NO: 2174786 - RNA, 14 nt, Human
cacaucuuuccugu

SEQ ID NO: 2174787 - RNA, 15 nt, Human
cacaucuuuccuguc

SEQ ID NO: 2174788 - RNA, 12 nt, Human
cacauuguuuua

SEQ ID NO: 2174789 - RNA, 17 nt, Human
cacauuuauucugcuca

SEQ ID NO: 2174790 - RNA, 15 nt, Human
cacauuguuuuaaaa

SEQ ID NO: 2174791 - RNA, 16 nt, Human
cacauuguuuuaaaaa

SEQ ID NO: 2174792 - RNA, 18 nt, Human
cacauuguuuuaaaaaga

SEQ ID NO: 2174793 - RNA, 23 nt, Human
cacauuguuuuaaaaagaaacaa

SEQ ID NO: 2174794 - RNA, 19 nt, Human
cacauuuaagagacaguca

SEQ ID NO: 2174795 - RNA, 18 nt, Human
cacauuuauucugcucac

SEQ ID NO: 2174796 - RNA, 17 nt, Human
caccagccccagugccc

SEQ ID NO: 2174797 - RNA, 17 nt, Human
caccaggagucccuggu

SEQ ID NO: 2174798 - RNA, 19 nt, Human
caccaggagaaccacuaca

SEQ ID NO: 2174799 - RNA, 17 nt, Human
caccaggagaaccacua

SEQ ID NO: 2174800 - RNA, 16 nt, Human
caccaggagaaccacu

SEQ ID NO: 2174801 - RNA, 21 nt, Human
caccaggaauguuaaagucag

SEQ ID NO: 2174802 - RNA, 17 nt, Human
caccaggaauguuaaag

SEQ ID NO: 2174803 - RNA, 12 nt, Human
caccaggaaugu

SEQ ID NO: 2174804 - RNA, 11 nt, Human
caccaggaagg

SEQ ID NO: 2174805 - RNA, 19 nt, Human
caccagcccggccugcucc

SEQ ID NO: 2174806 - RNA, 19 nt, Human
caccagcccuuagcaggga

SEQ ID NO: 2174807 - RNA, 16 nt, Human
caccagccccugcccc

SEQ ID NO: 2174808 - RNA, 17 nt, Human
caccagccccugcccca

SEQ ID NO: 2174809 - RNA, 19 nt, Human
caccagccccugccccagc

SEQ ID NO: 2174810 - RNA, 21 nt, Human
caccagccccugccccagccc

SEQ ID NO: 2174811 - RNA, 15 nt, Human
caccagcccggccug

SEQ ID NO: 2174812 - RNA, 16 nt, Human
caccagcccggccugc

SEQ ID NO: 2174813 - RNA, 17 nt, Human
caccagcccggccugcu

SEQ ID NO: 2174814 - RNA, 18 nt, Human
caccagcccggccugcuc

SEQ ID NO: 2174815 - RNA, 18 nt, Human
caccagccccagugccca

SEQ ID NO: 2174816 - RNA, 21 nt, Human
caccagccccagugcccacag

SEQ ID NO: 2174817 - RNA, 22 nt, Human
caccagccccagugcccacagg

SEQ ID NO: 2174818 - RNA, 13 nt, Human
caccagccccugc

SEQ ID NO: 2174819 - RNA, 14 nt, Human
caccagccccugcc

SEQ ID NO: 2174820 - RNA, 15 nt, Human
caccagccccugccc

SEQ ID NO: 2174821 - RNA, 16 nt, Human
cacauuuaagagacag

SEQ ID NO: 2174822 - RNA, 10 nt, Human
cacccagccc

SEQ ID NO: 2174823 - RNA, 11 nt, Human
cacccagccca

SEQ ID NO: 2174824 - RNA, 18 nt, Human
cacccagcaacuccaacu

SEQ ID NO: 2174825 - RNA, 12 nt, Human
cacccagcccac

SEQ ID NO: 2174826 - RNA, 20 nt, Human
cacccaggcuggagugcaau

SEQ ID NO: 2174827 - RNA, 20 nt, Human
cacccaggcuggaguacagu

SEQ ID NO: 2174828 - RNA, 23 nt, Human
caccaggaauguuaaagucagug

SEQ ID NO: 2174829 - RNA, 15 nt, Human
caccaggauggcccu

SEQ ID NO: 2174830 - RNA, 13 nt, Human
caccaggauggcc

SEQ ID NO: 2174831 - RNA, 21 nt, Human
caccaggauggcccuucccac

SEQ ID NO: 2174832 - RNA, 20 nt, Human
caccaggcaccucacagaaa

SEQ ID NO: 2174833 - RNA, 22 nt, Human
caccaggcaccucacagaaaug

SEQ ID NO: 2174834 - RNA, 23 nt, Human
caccaggcaccucacagaaauga

SEQ ID NO: 2174835 - RNA, 22 nt, Human
caccaggcacgaacccaccugc

SEQ ID NO: 2174836 - RNA, 21 nt, Human
caccaggcacgaacccaccug

SEQ ID NO: 2174837 - RNA, 20 nt, Human
caccaggcacgaacccaccu

SEQ ID NO: 2174838 - RNA, 19 nt, Human
caccaggcacgaacccacc

SEQ ID NO: 2174839 - RNA, 24 nt, Human
caccaggcacgaacccaccugcug

SEQ ID NO: 2174840 - RNA, 23 nt, Human
caccaggcacgaacccaccugcu

SEQ ID NO: 2174841 - RNA, 22 nt, Human
cacccagacagcucccucugcc

SEQ ID NO: 2174842 - RNA, 16 nt, Human
cacccagacagcuccc

SEQ ID NO: 2174843 - RNA, 14 nt, Human
cacccagacagcuc

SEQ ID NO: 2174844 - RNA, 21 nt, Human
cacccacucuccucugccuca

SEQ ID NO: 2174845 - RNA, 21 nt, Human
cacccagaugggggaaagcac

SEQ ID NO: 2174846 - RNA, 14 nt, Human
cacccaugaagaca

SEQ ID NO: 2174847 - RNA, 15 nt, Human
cacccaugaagacag

SEQ ID NO: 2174848 - RNA, 23 nt, Human
cacccauccuaucagccugucuc

SEQ ID NO: 2174849 - RNA, 22 nt, Human
cacccauccuaccaaugcaugc

SEQ ID NO: 2174850 - RNA, 23 nt, Human
cacccauccuaccaaugcaugca

SEQ ID NO: 2174851 - RNA, 18 nt, Human
cacccaucuguuuuuugu

SEQ ID NO: 2174852 - RNA, 13 nt, Human
cacccaucuguuu

SEQ ID NO: 2174853 - RNA, 17 nt, Human
cacccagucuguucccc

SEQ ID NO: 2174854 - RNA, 17 nt, Human
cacccagugagcacucc

SEQ ID NO: 2174855 - RNA, 20 nt, Human
cacccagugagcacucccaa

SEQ ID NO: 2174856 - RNA, 23 nt, Human
cacccagugagcacucccaaguc

SEQ ID NO: 2174857 - RNA, 13 nt, Human
cacaucuugcucu

SEQ ID NO: 2174858 - RNA, 14 nt, Human
cacaucuugcucug

SEQ ID NO: 2174859 - RNA, 21 nt, Human
cacauccacacacgcaggaac

SEQ ID NO: 2174860 - RNA, 21 nt, Human
cacauccauuucaucuauuuc

SEQ ID NO: 2174861 - RNA, 23 nt, Human
cacauccauuucaucuauuucug

SEQ ID NO: 2174862 - RNA, 22 nt, Human
cacaucuucccuagaggguucc

SEQ ID NO: 2174863 - RNA, 20 nt, Human
cacaucuugaucugcucagc

SEQ ID NO: 2174864 - RNA, 15 nt, Human
cacaucuugcucugc

SEQ ID NO: 2174865 - RNA, 20 nt, Human
cacaucuugcucugcugaca

SEQ ID NO: 2174866 - RNA, 21 nt, Human
cacaucuugcucugcugacag

SEQ ID NO: 2174867 - RNA, 22 nt, Human
cacaucuugcucugcugacaga

SEQ ID NO: 2174868 - RNA, 17 nt, Human
cacaucagucacaaguu

SEQ ID NO: 2174869 - RNA, 23 nt, Human
cacaucagcuugcccuguuaaaa

SEQ ID NO: 2174870 - RNA, 13 nt, Human
cacaucagcuugc

SEQ ID NO: 2174871 - RNA, 17 nt, Human
caagauuuucuacuuuu

SEQ ID NO: 2174872 - RNA, 14 nt, Human
caagcaaaaucaug

SEQ ID NO: 2174873 - RNA, 22 nt, Human
caagcaaaaucauggaaugguu

SEQ ID NO: 2174874 - RNA, 23 nt, Human
caagcaaaaucauggaaugguua

SEQ ID NO: 2174875 - RNA, 15 nt, Human
caagcaaaugugaau

SEQ ID NO: 2174876 - RNA, 17 nt, Human
caagcaaaugugaauca

SEQ ID NO: 2174877 - RNA, 19 nt, Human
caagcaaaugugaaucauu

SEQ ID NO: 2174878 - RNA, 19 nt, Human
caagcaaccuggguccaaa

SEQ ID NO: 2174879 - RNA, 22 nt, Human
caagcaaccuggguccaaauaa

SEQ ID NO: 2174880 - RNA, 18 nt, Human
caagcaagaaacacuggg

SEQ ID NO: 2174881 - RNA, 19 nt, Human
caagcaaaggugaagagac

SEQ ID NO: 2174882 - RNA, 16 nt, Human
caagcaaccugggucc

SEQ ID NO: 2174883 - RNA, 17 nt, Human
caagcaaccugggucca

SEQ ID NO: 2174884 - RNA, 13 nt, Human
caagcaagaaaca

SEQ ID NO: 2174885 - RNA, 12 nt, Human
caagcaagcucc

SEQ ID NO: 2174886 - RNA, 23 nt, Human
caagcaagcucccaagggauggu

SEQ ID NO: 2174887 - RNA, 14 nt, Human
caagcaaguauuag

SEQ ID NO: 2174888 - RNA, 16 nt, Human
caagcaaaaggagaga

SEQ ID NO: 2174889 - RNA, 22 nt, Human
caagauuuugaaugcuuccuga

SEQ ID NO: 2174890 - RNA, 21 nt, Human
caagauuuuccuuuuuuauac

SEQ ID NO: 2174891 - RNA, 22 nt, Human
caagauuuuccuuuuuuauaca

SEQ ID NO: 2174892 - RNA, 18 nt, Human
caagauuuuccacaagau

SEQ ID NO: 2174893 - RNA, 12 nt, Human
caagauuuuccu

SEQ ID NO: 2174894 - RNA, 15 nt, Human
caagauuuuccuuuu

SEQ ID NO: 2174895 - RNA, 16 nt, Human
caagauuuuccuuuuu

SEQ ID NO: 2174896 - RNA, 17 nt, Human
caagauuuuccuuuuuu

SEQ ID NO: 2174897 - RNA, 19 nt, Human
caagauuuuccuuuuuuau

SEQ ID NO: 2174898 - RNA, 14 nt, Human
caagaucuuucagg

SEQ ID NO: 2174899 - RNA, 13 nt, Human
caagaucuuucag

SEQ ID NO: 2174900 - RNA, 12 nt, Human
caagaucuuuca

SEQ ID NO: 2174901 - RNA, 20 nt, Human
caagaucugugcagccccgc

SEQ ID NO: 2174902 - RNA, 22 nt, Human
caagauccugucuuuaaggaaa

SEQ ID NO: 2174903 - RNA, 16 nt, Human
caagaucgcgccacug

SEQ ID NO: 2174904 - RNA, 15 nt, Human
caagaucugugcagc

SEQ ID NO: 2174905 - RNA, 19 nt, Human
caagaugagagaacuggag

SEQ ID NO: 2174906 - RNA, 15 nt, Human
caagaucuuucagga

SEQ ID NO: 2174907 - RNA, 18 nt, Human
caagaugaaggagaggca

SEQ ID NO: 2174908 - RNA, 19 nt, Human
caagaccaccacuucgaaa

SEQ ID NO: 2174909 - RNA, 23 nt, Human
caagauauuuuaaaaucugucac

SEQ ID NO: 2174910 - RNA, 21 nt, Human
caagauauuuuaaaaucuguc

SEQ ID NO: 2174911 - RNA, 19 nt, Human
caagauccugucuuuaagg

SEQ ID NO: 2174912 - RNA, 18 nt, Human
caagaucauguaccccaa

SEQ ID NO: 2174913 - RNA, 16 nt, Human
caagauauuuauauau

SEQ ID NO: 2174914 - RNA, 16 nt, Human
caagaccacguuucua

SEQ ID NO: 2174915 - RNA, 14 nt, Human
caagaccacguuuc

SEQ ID NO: 2174916 - RNA, 14 nt, Human
caagcaccuccugc

SEQ ID NO: 2174917 - RNA, 18 nt, Human
caagcaccuagccucgcu

SEQ ID NO: 2174918 - RNA, 17 nt, Human
caagcacagugccugca

SEQ ID NO: 2174919 - RNA, 13 nt, Human
caagcacaguggu

SEQ ID NO: 2174920 - RNA, 15 nt, Human
caagcacaguggugg

SEQ ID NO: 2174921 - RNA, 17 nt, Human
caagcacagcagccugg

SEQ ID NO: 2174922 - RNA, 14 nt, Human
caagcacagcagcc

SEQ ID NO: 2174923 - RNA, 13 nt, Human
caagcacagcagc

SEQ ID NO: 2174924 - RNA, 12 nt, Human
caagcacagcag

SEQ ID NO: 2174925 - RNA, 20 nt, Human
caagcacaucugcauuuuca

SEQ ID NO: 2174926 - RNA, 17 nt, Human
caagcacaucugcauuu

SEQ ID NO: 2174927 - RNA, 16 nt, Human
caagcacagugguggc

SEQ ID NO: 2174928 - RNA, 19 nt, Human
caagcacagugguggcagg

SEQ ID NO: 2174929 - RNA, 20 nt, Human
caagcacagugguggcaggg

SEQ ID NO: 2174930 - RNA, 21 nt, Human
caagcacagugguggcagggc

SEQ ID NO: 2174931 - RNA, 13 nt, Human
caagcaccuccug

SEQ ID NO: 2174932 - RNA, 18 nt, Human
caagaauagaugcugacu

SEQ ID NO: 2174933 - RNA, 23 nt, Human
caagaauaaucacgcuuuccuga

SEQ ID NO: 2174934 - RNA, 22 nt, Human
caagaauaaucacgcuuuccug

SEQ ID NO: 2174935 - RNA, 21 nt, Human
caagaauaaucacgcuuuccu

SEQ ID NO: 2174936 - RNA, 20 nt, Human
caagaauaaucacgcuuucc

SEQ ID NO: 2174937 - RNA, 22 nt, Human
caagaagcuuuaauauuuaaau

SEQ ID NO: 2174938 - RNA, 15 nt, Human
caagaagccuuuccu

SEQ ID NO: 2174939 - RNA, 21 nt, Human
caagaagcgugagacgccacc

SEQ ID NO: 2174940 - RNA, 18 nt, Human
caagaagcccaggaaagg

SEQ ID NO: 2174941 - RNA, 17 nt, Human
caagaaggaugauucaa

SEQ ID NO: 2174942 - RNA, 19 nt, Human
caagaaucagugcaaagau

SEQ ID NO: 2174943 - RNA, 18 nt, Human
caagaaucagugcaaaga

SEQ ID NO: 2174944 - RNA, 23 nt, Human
caagaaucagucuauccacagag

SEQ ID NO: 2174945 - RNA, 18 nt, Human
caagacauugucaauaaa

SEQ ID NO: 2174946 - RNA, 17 nt, Human
caagacauugucaauaa

SEQ ID NO: 2174947 - RNA, 14 nt, Human
caagacauugucaa

SEQ ID NO: 2174948 - RNA, 13 nt, Human
caagacauuguca

SEQ ID NO: 2174949 - RNA, 11 nt, Human
caagacauugu

SEQ ID NO: 2174950 - RNA, 15 nt, Human
caagacauuaaaucu

SEQ ID NO: 2174951 - RNA, 17 nt, Human
caagacaugucuguucu

SEQ ID NO: 2174952 - RNA, 15 nt, Human
caagacaugucuguu

SEQ ID NO: 2174953 - RNA, 14 nt, Human
caagacaugucugu

SEQ ID NO: 2174954 - RNA, 17 nt, Human
caacuccaguagcuugg

SEQ ID NO: 2174955 - RNA, 20 nt, Human
caacucccugccccccagcc

SEQ ID NO: 2174956 - RNA, 19 nt, Human
caacucccugccccccagc

SEQ ID NO: 2174957 - RNA, 21 nt, Human
caacucccugccccccagccc

SEQ ID NO: 2174958 - RNA, 19 nt, Human
caacuccuagggccacuga

SEQ ID NO: 2174959 - RNA, 15 nt, Human
caagaagcccaggaa

SEQ ID NO: 2174960 - RNA, 14 nt, Human
caacuauggccugu

SEQ ID NO: 2174961 - RNA, 17 nt, Human
caacuauggaucagaau

SEQ ID NO: 2174962 - RNA, 16 nt, Human
caacuauggaucagaa

SEQ ID NO: 2174963 - RNA, 12 nt, Human
caacuccagaaa

SEQ ID NO: 2174964 - RNA, 15 nt, Human
caacuauuuuuccaa

SEQ ID NO: 2174965 - RNA, 14 nt, Human
caacccccacccca

SEQ ID NO: 2174966 - RNA, 13 nt, Human
caacccccacccc

SEQ ID NO: 2174967 - RNA, 12 nt, Human
caacccccaccc

SEQ ID NO: 2174968 - RNA, 11 nt, Human
caacccccacc

SEQ ID NO: 2174969 - RNA, 13 nt, Human
caaccccaggcug

SEQ ID NO: 2174970 - RNA, 13 nt, Human
caaccccaguucu

SEQ ID NO: 2174971 - RNA, 14 nt, Human
caaccccaguucug

SEQ ID NO: 2174972 - RNA, 17 nt, Human
caaccccaguucugcuc

SEQ ID NO: 2174973 - RNA, 19 nt, Human
caaccccaguucugcuccu

SEQ ID NO: 2174974 - RNA, 20 nt, Human
caaccccaguucugcuccuc

SEQ ID NO: 2174975 - RNA, 22 nt, Human
caaccccaguucugcuccucuc

SEQ ID NO: 2174976 - RNA, 23 nt, Human
caacccccaccccacacuuguuc

SEQ ID NO: 2174977 - RNA, 13 nt, Human
caacccccagcac

SEQ ID NO: 2174978 - RNA, 15 nt, Human
caacccccagcaccc

SEQ ID NO: 2174979 - RNA, 18 nt, Human
caacccccaccccacacu

SEQ ID NO: 2174980 - RNA, 17 nt, Human
caacccccaccccacac

SEQ ID NO: 2174981 - RNA, 14 nt, Human
caacccccagccug

SEQ ID NO: 2174982 - RNA, 15 nt, Human
caaccccagccgcuc

SEQ ID NO: 2174983 - RNA, 23 nt, Human
caaccccagccgcucggaggccc

SEQ ID NO: 2174984 - RNA, 19 nt, Human
caacuauauuaucaugcaa

SEQ ID NO: 2174985 - RNA, 18 nt, Human
caacuauauuaucaugca

SEQ ID NO: 2174986 - RNA, 19 nt, Human
caacuauaagcccacuguu

SEQ ID NO: 2174987 - RNA, 13 nt, Human
caacuauggccug

SEQ ID NO: 2174988 - RNA, 19 nt, Human
caacuauauuguuugcuaa

SEQ ID NO: 2174989 - RNA, 19 nt, Human
caacuaucucauuuccaag

SEQ ID NO: 2174990 - RNA, 22 nt, Human
caaccccuguggagcccgcacc

SEQ ID NO: 2174991 - RNA, 20 nt, Human
caacccccagcacccgggcu

SEQ ID NO: 2174992 - RNA, 16 nt, Human
caaccccuguggagcc

SEQ ID NO: 2174993 - RNA, 17 nt, Human
caacuaggcuucagcau

SEQ ID NO: 2174994 - RNA, 21 nt, Human
caaccccuguggagcccgcac

SEQ ID NO: 2174995 - RNA, 17 nt, Human
caaccccuucgcuccug

SEQ ID NO: 2174996 - RNA, 14 nt, Human
caaccccuucgcuc

SEQ ID NO: 2174997 - RNA, 16 nt, Human
caaccccuucgcuccu

SEQ ID NO: 2174998 - RNA, 15 nt, Human
caaggccauccuucc

SEQ ID NO: 2174999 - RNA, 22 nt, Human
caaggccagaguggccuggcca

SEQ ID NO: 2175000 - RNA, 21 nt, Human
caaggccagaguggccuggcc

SEQ ID NO: 2175001 - RNA, 20 nt, Human
caaggccagaguggccuggc

SEQ ID NO: 2175002 - RNA, 19 nt, Human
caaggccagaguggccugg

SEQ ID NO: 2175003 - RNA, 18 nt, Human
caaggccagaguggccug

SEQ ID NO: 2175004 - RNA, 16 nt, Human
caaggcaaggcaggug

SEQ ID NO: 2175005 - RNA, 18 nt, Human
caaggcaaggcaggugcc

SEQ ID NO: 2175006 - RNA, 17 nt, Human
caaggccagaguggccu

SEQ ID NO: 2175007 - RNA, 14 nt, Human
caaggcaaggcagg

SEQ ID NO: 2175008 - RNA, 15 nt, Human
caaggcaaggcaggu

SEQ ID NO: 2175009 - RNA, 14 nt, Human
caaggcaaggcugu

SEQ ID NO: 2175010 - RNA, 19 nt, Human
caaggauugcuacuguccu

SEQ ID NO: 2175011 - RNA, 22 nt, Human
caagcuccuccucccugcaucu

SEQ ID NO: 2175012 - RNA, 20 nt, Human
caaggauugcuacuguccua

SEQ ID NO: 2175013 - RNA, 17 nt, Human
caaggccauccuucccu

SEQ ID NO: 2175014 - RNA, 23 nt, Human
caaggccauccuucccugucugc

SEQ ID NO: 2175015 - RNA, 17 nt, Human
caaggccaucugggcuc

SEQ ID NO: 2175016 - RNA, 14 nt, Human
caaggccaucuggg

SEQ ID NO: 2175017 - RNA, 12 nt, Human
caaggccccaga

SEQ ID NO: 2175018 - RNA, 15 nt, Human
caaggccccagagac

SEQ ID NO: 2175019 - RNA, 14 nt, Human
caaggccccagaga

SEQ ID NO: 2175020 - RNA, 21 nt, Human
caaggccccagagacucagag

SEQ ID NO: 2175021 - RNA, 22 nt, Human
caaggcccccgggccgacggag

SEQ ID NO: 2175022 - RNA, 17 nt, Human
caaggccccagagacuc

SEQ ID NO: 2175023 - RNA, 16 nt, Human
caaggccccagagacu

SEQ ID NO: 2175024 - RNA, 21 nt, Human
caagguuuaggcugguggccc

SEQ ID NO: 2175025 - RNA, 23 nt, Human
caagguuuaggcugguggcccag

SEQ ID NO: 2175026 - RNA, 22 nt, Human
caagguuuaggcugguggccca

SEQ ID NO: 2175027 - RNA, 24 nt, Human
caagguuuaggcugguggcccagg

SEQ ID NO: 2175028 - RNA, 19 nt, Human
caagguuuuauaaggcuga

SEQ ID NO: 2175029 - RNA, 22 nt, Human
caaguaagaagacaugaaccaa

SEQ ID NO: 2175030 - RNA, 13 nt, Human
caaguaagaagac

SEQ ID NO: 2175031 - RNA, 13 nt, Human
caaguaaacauuc

SEQ ID NO: 2175032 - RNA, 16 nt, Human
caaguaagaagacaug

SEQ ID NO: 2175033 - RNA, 14 nt, Human
caaguaagaagaca

SEQ ID NO: 2175034 - RNA, 18 nt, Human
caaguaagaagacaugaa

SEQ ID NO: 2175035 - RNA, 13 nt, Human
caaguauuauacc

SEQ ID NO: 2175036 - RNA, 22 nt, Human
caaguauuauaccuuuuuuaga

SEQ ID NO: 2175037 - RNA, 17 nt, Human
caaguauuauaccuuuu

SEQ ID NO: 2175038 - RNA, 21 nt, Human
caagcuccaucuccacuccag

SEQ ID NO: 2175039 - RNA, 13 nt, Human
caagcucccaagg

SEQ ID NO: 2175040 - RNA, 18 nt, Human
caagcucccaagggaugg

SEQ ID NO: 2175041 - RNA, 22 nt, Human
caagcucccaagggauggugcc

SEQ ID NO: 2175042 - RNA, 17 nt, Human
caagcuccaucuccacu

SEQ ID NO: 2175043 - RNA, 19 nt, Human
caagcuccaagcucccagg

SEQ ID NO: 2175044 - RNA, 21 nt, Human
caagcuccaagcucccaggca

SEQ ID NO: 2175045 - RNA, 17 nt, Human
caagcuccaagcuccca

SEQ ID NO: 2175046 - RNA, 18 nt, Human
caagcuccaagcucccag

SEQ ID NO: 2175047 - RNA, 15 nt, Human
caagcucugcuccuc

SEQ ID NO: 2175048 - RNA, 20 nt, Human
caagcuccgccucccggguu

SEQ ID NO: 2175049 - RNA, 14 nt, Human
caagcucccaggcc

SEQ ID NO: 2175050 - RNA, 16 nt, Human
caagcucugcuccucu

SEQ ID NO: 2175051 - RNA, 17 nt, Human
caagcuccuccucccug

SEQ ID NO: 2175052 - RNA, 16 nt, Human
caagcuccuccucccu

SEQ ID NO: 2175053 - RNA, 15 nt, Human
caagcuccuccuccc

SEQ ID NO: 2175054 - RNA, 14 nt, Human
caagcuccuccucc

SEQ ID NO: 2175055 - RNA, 23 nt, Human
caagcuccuccucccugcaucug

SEQ ID NO: 2175056 - RNA, 12 nt, Human
caagcucccagg

SEQ ID NO: 2175057 - RNA, 14 nt, Human
caagcucccaggca

SEQ ID NO: 2175058 - RNA, 15 nt, Human
caagcucccaggcau

SEQ ID NO: 2175059 - RNA, 17 nt, Human
caagcucccaggcauuc

SEQ ID NO: 2175060 - RNA, 19 nt, Human
caaguuauugacaaacucu

SEQ ID NO: 2175061 - RNA, 12 nt, Human
caaguuauugua

SEQ ID NO: 2175062 - RNA, 20 nt, Human
caaguuauuguacagcuguu

SEQ ID NO: 2175063 - RNA, 22 nt, Human
caaguauuugggaagugaagac

SEQ ID NO: 2175064 - RNA, 19 nt, Human
caaguauuugggaagugaa

SEQ ID NO: 2175065 - RNA, 12 nt, Human
caaguucaaucu

SEQ ID NO: 2175066 - RNA, 17 nt, Human
caaguucaaucuguuuu

SEQ ID NO: 2175067 - RNA, 21 nt, Human
caaguuccucuagugcccucc

SEQ ID NO: 2175068 - RNA, 18 nt, Human
caaguuccaaguugcuaa

SEQ ID NO: 2175069 - RNA, 21 nt, Human
caauuucaaaaaaauaaaaua

SEQ ID NO: 2175070 - RNA, 20 nt, Human
caauuucaaaaaaauaaaau

SEQ ID NO: 2175071 - RNA, 17 nt, Human
caauuuauucaagaaaa

SEQ ID NO: 2175072 - RNA, 14 nt, Human
caauuuauucaaga

SEQ ID NO: 2175073 - RNA, 17 nt, Human
caauugucauuuauaaa

SEQ ID NO: 2175074 - RNA, 13 nt, Human
caauuuauuaugg

SEQ ID NO: 2175075 - RNA, 21 nt, Human
caauugugagccaccacgucc

SEQ ID NO: 2175076 - RNA, 18 nt, Human
caauugugagccaccacg

SEQ ID NO: 2175077 - RNA, 15 nt, Human
caauugucauuuaua

SEQ ID NO: 2175078 - RNA, 16 nt, Human
caauugucauuuauaa

SEQ ID NO: 2175079 - RNA, 20 nt, Human
caauuuauuauggcacauca

SEQ ID NO: 2175080 - RNA, 15 nt, Human
cacaagcuggaagca

SEQ ID NO: 2175081 - RNA, 13 nt, Human
cacaagcuggaag

SEQ ID NO: 2175082 - RNA, 14 nt, Human
cacaagcuggaagc

SEQ ID NO: 2175083 - RNA, 16 nt, Human
cacaagcuggaagcac

SEQ ID NO: 2175084 - RNA, 11 nt, Human
caauuucaagu

SEQ ID NO: 2175085 - RNA, 14 nt, Human
caauuucagacucc

SEQ ID NO: 2175086 - RNA, 22 nt, Human
cacaaggauagaugcuggccca

SEQ ID NO: 2175087 - RNA, 21 nt, Human
cacaaggauagaugcuggccc

SEQ ID NO: 2175088 - RNA, 18 nt, Human
cacaaggauagaugcugg

SEQ ID NO: 2175089 - RNA, 17 nt, Human
cacaaggauagaugcug

SEQ ID NO: 2175090 - RNA, 22 nt, Human
cacaaggacuuccuguccagcu

SEQ ID NO: 2175091 - RNA, 16 nt, Human
cacaaggacuuccugu

SEQ ID NO: 2175092 - RNA, 14 nt, Human
cacaaggacuuccu

SEQ ID NO: 2175093 - RNA, 12 nt, Human
cacaaggacuuc

SEQ ID NO: 2175094 - RNA, 11 nt, Human
caauauuuucc

SEQ ID NO: 2175095 - RNA, 13 nt, Human
caauauuuuccau

SEQ ID NO: 2175096 - RNA, 15 nt, Human
caauauuuuccauga

SEQ ID NO: 2175097 - RNA, 15 nt, Human
caauauuuguagaag

SEQ ID NO: 2175098 - RNA, 14 nt, Human
caauauuuguagaa

SEQ ID NO: 2175099 - RNA, 13 nt, Human
caauauuuguaga

SEQ ID NO: 2175100 - RNA, 16 nt, Human
caauauuuuccaugaa

SEQ ID NO: 2175101 - RNA, 19 nt, Human
caauauuuuccaugaaaau

SEQ ID NO: 2175102 - RNA, 20 nt, Human
caauauuuuccaugaaaaug

SEQ ID NO: 2175103 - RNA, 22 nt, Human
caauauuuuccaugaaaaugca

SEQ ID NO: 2175104 - RNA, 16 nt, Human
caauauuuucuuuaau

SEQ ID NO: 2175105 - RNA, 20 nt, Human
caauauuuucuuuaaugcuu

SEQ ID NO: 2175106 - RNA, 19 nt, Human
caauauuuucuuuaaugcu

SEQ ID NO: 2175107 - RNA, 14 nt, Human
caauauuuuuagau

SEQ ID NO: 2175108 - RNA, 17 nt, Human
caauauuguacaguuuu

SEQ ID NO: 2175109 - RNA, 18 nt, Human
caauauuguacaguuuuu

SEQ ID NO: 2175110 - RNA, 14 nt, Human
caauauuguuucua

SEQ ID NO: 2175111 - RNA, 16 nt, Human
caauauugucauuccu

SEQ ID NO: 2175112 - RNA, 12 nt, Human
caauauuuauua

SEQ ID NO: 2175113 - RNA, 13 nt, Human
caauauuuaaaca

SEQ ID NO: 2175114 - RNA, 14 nt, Human
caauauuuaaacau

SEQ ID NO: 2175115 - RNA, 14 nt, Human
caauauuuauuauu

SEQ ID NO: 2175116 - RNA, 13 nt, Human
caauauuuauuau

SEQ ID NO: 2175117 - RNA, 14 nt, Human
caauauuuccucau

SEQ ID NO: 2175118 - RNA, 19 nt, Human
caauauuuccucaugugau

SEQ ID NO: 2175119 - RNA, 17 nt, Human
caauauuuccucaugug

SEQ ID NO: 2175120 - RNA, 15 nt, Human
caauauuguacaguu

SEQ ID NO: 2175121 - RNA, 16 nt, Human
caauauuguacaguuu

SEQ ID NO: 2175122 - RNA, 12 nt, Human
caaugcuggcug

SEQ ID NO: 2175123 - RNA, 12 nt, Human
caauuggaggaa

SEQ ID NO: 2175124 - RNA, 22 nt, Human
caauugggauggcgcuaggcau

SEQ ID NO: 2175125 - RNA, 16 nt, Human
caauugguuaaucuuu

SEQ ID NO: 2175126 - RNA, 19 nt, Human
caauuguaaaacugaggca

SEQ ID NO: 2175127 - RNA, 14 nt, Human
caauugucauuuau

SEQ ID NO: 2175128 - RNA, 14 nt, Human
caauuguaaauuga

SEQ ID NO: 2175129 - RNA, 13 nt, Human
caauugucuuuuu

SEQ ID NO: 2175130 - RNA, 13 nt, Human
caauggcagccuu

SEQ ID NO: 2175131 - RNA, 21 nt, Human
caaugcugauuuggugaccaa

SEQ ID NO: 2175132 - RNA, 16 nt, Human
caaugcugauuuggug

SEQ ID NO: 2175133 - RNA, 14 nt, Human
caaugcugauuugg

SEQ ID NO: 2175134 - RNA, 13 nt, Human
caaugcugauguc

SEQ ID NO: 2175135 - RNA, 20 nt, Human
caaugcugauguccucacca

SEQ ID NO: 2175136 - RNA, 14 nt, Human
caauggcagccuug

SEQ ID NO: 2175137 - RNA, 15 nt, Human
caauggcagccuugg

SEQ ID NO: 2175138 - RNA, 18 nt, Human
caaucaaaggaaaauagu

SEQ ID NO: 2175139 - RNA, 12 nt, Human
caauauuuuucu

SEQ ID NO: 2175140 - RNA, 17 nt, Human
caaucaaagcacuugga

SEQ ID NO: 2175141 - RNA, 14 nt, Human
caaucaaaucugcu

SEQ ID NO: 2175142 - RNA, 15 nt, Human
caaucaacucuaaua

SEQ ID NO: 2175143 - RNA, 20 nt, Human
caaugccauccucaaacacu

SEQ ID NO: 2175144 - RNA, 20 nt, Human
caaugcccguaaugcuuaga

SEQ ID NO: 2175145 - RNA, 14 nt, Human
caaugccaucaucu

SEQ ID NO: 2175146 - RNA, 16 nt, Human
caaugccauccucaaa

SEQ ID NO: 2175147 - RNA, 18 nt, Human
caaugccauccucaaaca

SEQ ID NO: 2175148 - RNA, 13 nt, Human
caaugccaucauc

SEQ ID NO: 2175149 - RNA, 18 nt, Human
caaucagcuccuuccugg

SEQ ID NO: 2175150 - RNA, 16 nt, Human
caaucagcuccuuccu

SEQ ID NO: 2175151 - RNA, 15 nt, Human
caaucagcuccuucc

SEQ ID NO: 2175152 - RNA, 17 nt, Human
caaucagccuaguugau

SEQ ID NO: 2175153 - RNA, 22 nt, Human
auuucgugggucuguuuuccuu

SEQ ID NO: 2175154 - RNA, 21 nt, Human
auuucuaaaaaacagaggcca

SEQ ID NO: 2175155 - RNA, 13 nt, Human
auuucuuacaggc

SEQ ID NO: 2175156 - RNA, 20 nt, Human
auuucuuacuaaacauuuug

SEQ ID NO: 2175157 - RNA, 21 nt, Human
auuucgccguugaagaggaag

SEQ ID NO: 2175158 - RNA, 19 nt, Human
auuuccuuuuuuguuauua

SEQ ID NO: 2175159 - RNA, 20 nt, Human
auuucuaaaaaacagaggcc

SEQ ID NO: 2175160 - RNA, 14 nt, Human
auuucuaaaaaaca

SEQ ID NO: 2175161 - RNA, 20 nt, Human
auuucgugggucuguuuucc

SEQ ID NO: 2175162 - RNA, 21 nt, Human
auuucgucuguuuauaaacau

SEQ ID NO: 2175163 - RNA, 20 nt, Human
auuuccuauguaacugcauu

SEQ ID NO: 2175164 - RNA, 19 nt, Human
auuuccuauuuuuggaaga

SEQ ID NO: 2175165 - RNA, 22 nt, Human
auuuccucaacguugcucccca

SEQ ID NO: 2175166 - RNA, 24 nt, Human
auuuccucaacguugcuccccauc

SEQ ID NO: 2175167 - RNA, 20 nt, Human
auuuccuccgucaccucaga

SEQ ID NO: 2175168 - RNA, 11 nt, Human
auuuccucuau

SEQ ID NO: 2175169 - RNA, 16 nt, Human
auuuccuccacaaauu

SEQ ID NO: 2175170 - RNA, 21 nt, Human
auuuccucaugugaucacaau

SEQ ID NO: 2175171 - RNA, 22 nt, Human
auuuccucaugugaucacaauu

SEQ ID NO: 2175172 - RNA, 22 nt, Human
auuuccucuauugauguacagu

SEQ ID NO: 2175173 - RNA, 18 nt, Human
auuuccucuauugaugua

SEQ ID NO: 2175174 - RNA, 19 nt, Human
auuuccucuauugauguac

SEQ ID NO: 2175175 - RNA, 13 nt, Human
auuuccugcccuu

SEQ ID NO: 2175176 - RNA, 20 nt, Human
auuuccugcccuuccucagu

SEQ ID NO: 2175177 - RNA, 23 nt, Human
auuuccuugaauguggcuugaga

SEQ ID NO: 2175178 - RNA, 18 nt, Human
auuuccuuuggagcuuuu

SEQ ID NO: 2175179 - RNA, 13 nt, Human
auuuccuuuauaa

SEQ ID NO: 2175180 - RNA, 21 nt, Human
auuuccuaaauauauuuuaag

SEQ ID NO: 2175181 - RNA, 18 nt, Human
auuuccuaucaccuauuu

SEQ ID NO: 2175182 - RNA, 22 nt, Human
auuuccuaguucuguagaaaug

SEQ ID NO: 2175183 - RNA, 18 nt, Human
auuuccuaguucuguaga

SEQ ID NO: 2175184 - RNA, 20 nt, Human
auuuccuaguucuguagaaa

SEQ ID NO: 2175185 - RNA, 15 nt, Human
auuuccuaguucugu

SEQ ID NO: 2175186 - RNA, 19 nt, Human
auuuccuaauuuugagaaa

SEQ ID NO: 2175187 - RNA, 14 nt, Human
auuuccuaaauaua

SEQ ID NO: 2175188 - RNA, 17 nt, Human
auuuccguuaaaauacc

SEQ ID NO: 2175189 - RNA, 14 nt, Human
auuucccaaagcag

SEQ ID NO: 2175190 - RNA, 16 nt, Human
auuucccaaagcagug

SEQ ID NO: 2175191 - RNA, 14 nt, Human
auuucaaaacucau

SEQ ID NO: 2175192 - RNA, 18 nt, Human
auuucaucugcucuccuu

SEQ ID NO: 2175193 - RNA, 19 nt, Human
auuucaucugcucuccuuc

SEQ ID NO: 2175194 - RNA, 19 nt, Human
auuucaaaaaaauaaaaua

SEQ ID NO: 2175195 - RNA, 20 nt, Human
auuucaaaaaaauaaaauaa

SEQ ID NO: 2175196 - RNA, 14 nt, Human
auuucaaaaauaua

SEQ ID NO: 2175197 - RNA, 15 nt, Human
auuucaaaaauauaa

SEQ ID NO: 2175198 - RNA, 17 nt, Human
auuucaaaaauauaacu

SEQ ID NO: 2175199 - RNA, 18 nt, Human
auuucaaaaauauaacuu

SEQ ID NO: 2175200 - RNA, 20 nt, Human
auuucaucugcucuccuucc

SEQ ID NO: 2175201 - RNA, 21 nt, Human
auuucaucugcucuccuuccu

SEQ ID NO: 2175202 - RNA, 14 nt, Human
auuucaugaaaauu

SEQ ID NO: 2175203 - RNA, 19 nt, Human
auuucaaaaauauaacuua

SEQ ID NO: 2175204 - RNA, 15 nt, Human
auuucaugauuucau

SEQ ID NO: 2175205 - RNA, 18 nt, Human
auuucaugcuaucucugu

SEQ ID NO: 2175206 - RNA, 17 nt, Human
auuuccauuauuuauau

SEQ ID NO: 2175207 - RNA, 15 nt, Human
auuuccauuauuuau

SEQ ID NO: 2175208 - RNA, 15 nt, Human
auuuccauuccagaa

SEQ ID NO: 2175209 - RNA, 16 nt, Human
auuuccauuccagaau

SEQ ID NO: 2175210 - RNA, 17 nt, Human
auuuccauuccagaaua

SEQ ID NO: 2175211 - RNA, 15 nt, Human
auuuccauauggauu

SEQ ID NO: 2175212 - RNA, 17 nt, Human
auuuccauauggauuuu

SEQ ID NO: 2175213 - RNA, 14 nt, Human
auuucauuccuaac

SEQ ID NO: 2175214 - RNA, 14 nt, Human
auuucaugugucaa

SEQ ID NO: 2175215 - RNA, 22 nt, Human
auuucaugugucaacuucaaca

SEQ ID NO: 2175216 - RNA, 22 nt, Human
auuuauuguuuauuuaucagug

SEQ ID NO: 2175217 - RNA, 21 nt, Human
auuuauuguuuauuuaucagu

SEQ ID NO: 2175218 - RNA, 20 nt, Human
auuuauuguuuauuuaucag

SEQ ID NO: 2175219 - RNA, 19 nt, Human
auuuauuguuuauuuauca

SEQ ID NO: 2175220 - RNA, 21 nt, Human
auuuauuuuaauaauguuuca

SEQ ID NO: 2175221 - RNA, 20 nt, Human
auuuauuuuccuccccagca

SEQ ID NO: 2175222 - RNA, 13 nt, Human
auuuauuuuccuc

SEQ ID NO: 2175223 - RNA, 17 nt, Human
auuuauuuuccucccca

SEQ ID NO: 2175224 - RNA, 14 nt, Human
auuuauuuuuuaca

SEQ ID NO: 2175225 - RNA, 18 nt, Human
auuuauuuuuuacauuau

SEQ ID NO: 2175226 - RNA, 21 nt, Human
auuuauuuuucucaugaaucu

SEQ ID NO: 2175227 - RNA, 19 nt, Human
auuuauuuuuuacauuauu

SEQ ID NO: 2175228 - RNA, 17 nt, Human
auuuauuuuugcauggc

SEQ ID NO: 2175229 - RNA, 14 nt, Human
auuuauugcuuuau

SEQ ID NO: 2175230 - RNA, 12 nt, Human
auuuauugcuuu

SEQ ID NO: 2175231 - RNA, 13 nt, Human
auuuauugcuuua

SEQ ID NO: 2175232 - RNA, 20 nt, Human
auuuauugcuugauacuuuu

SEQ ID NO: 2175233 - RNA, 19 nt, Human
auuuauugcuugauacuuu

SEQ ID NO: 2175234 - RNA, 14 nt, Human
auuuauuaccucug

SEQ ID NO: 2175235 - RNA, 15 nt, Human
auuuauuaccucuga

SEQ ID NO: 2175236 - RNA, 19 nt, Human
auuuauuacuguaagaaaa

SEQ ID NO: 2175237 - RNA, 20 nt, Human
auuuauuacuguaagaaaau

SEQ ID NO: 2175238 - RNA, 19 nt, Human
auuuacagaugaauguauu

SEQ ID NO: 2175239 - RNA, 21 nt, Human
auuuacagccucacuugaaug

SEQ ID NO: 2175240 - RNA, 20 nt, Human
auuuacagugaaaauguaag

SEQ ID NO: 2175241 - RNA, 15 nt, Human
auuuacauaugaaau

SEQ ID NO: 2175242 - RNA, 14 nt, Human
auuuacauaugaaa

SEQ ID NO: 2175243 - RNA, 15 nt, Human
auuuacaguuucaaa

SEQ ID NO: 2175244 - RNA, 24 nt, Human
auuuacaguuucaaaaacuguauu

SEQ ID NO: 2175245 - RNA, 21 nt, Human
auuuacagugaaaauguaagc

SEQ ID NO: 2175246 - RNA, 22 nt, Human
auuuacagugaaaauguaagcu

SEQ ID NO: 2175247 - RNA, 23 nt, Human
auuuacagugaaaauguaagcug

SEQ ID NO: 2175248 - RNA, 13 nt, Human
auuuacaguuuca

SEQ ID NO: 2175249 - RNA, 17 nt, Human
auuuaaaugucuaaugu

SEQ ID NO: 2175250 - RNA, 14 nt, Human
auuuacacugggag

SEQ ID NO: 2175251 - RNA, 16 nt, Human
auuuaaauauuaaaua

SEQ ID NO: 2175252 - RNA, 23 nt, Human
auuuaaauauaauucuguaaaug

SEQ ID NO: 2175253 - RNA, 18 nt, Human
auuuaaauauaauucugu

SEQ ID NO: 2175254 - RNA, 19 nt, Human
auuuaaauauaauucugua

SEQ ID NO: 2175255 - RNA, 20 nt, Human
auuuaaauauaauucuguaa

SEQ ID NO: 2175256 - RNA, 22 nt, Human
auuuaaauauaauucuguaaau

SEQ ID NO: 2175257 - RNA, 13 nt, Human
auuuaaauauaau

SEQ ID NO: 2175258 - RNA, 15 nt, Human
auuuaaauauaauuc

SEQ ID NO: 2175259 - RNA, 21 nt, Human
auuuaaaauguguuucuuaca

SEQ ID NO: 2175260 - RNA, 21 nt, Human
auuuaaauacagucuuccauu

SEQ ID NO: 2175261 - RNA, 15 nt, Human
auuuaaaauugugau

SEQ ID NO: 2175262 - RNA, 13 nt, Human
auuuaaaaugauu

SEQ ID NO: 2175263 - RNA, 14 nt, Human
auuuaaaaugauua

SEQ ID NO: 2175264 - RNA, 16 nt, Human
auuuaaaaugauuaga

SEQ ID NO: 2175265 - RNA, 17 nt, Human
auuuaccacagcagcug

SEQ ID NO: 2175266 - RNA, 18 nt, Human
auuuaccacagcagcuga

SEQ ID NO: 2175267 - RNA, 22 nt, Human
auuuacauguauuauuucauua

SEQ ID NO: 2175268 - RNA, 15 nt, Human
auuuaccacagcagc

SEQ ID NO: 2175269 - RNA, 22 nt, Human
auuuaccacuuguguuuugcaa

SEQ ID NO: 2175270 - RNA, 21 nt, Human
auuuacauaugaaauuuaaua

SEQ ID NO: 2175271 - RNA, 16 nt, Human
auuuacauaugaaauu

SEQ ID NO: 2175272 - RNA, 18 nt, Human
auuuacaugaauugcauu

SEQ ID NO: 2175273 - RNA, 21 nt, Human
auuuacaugaauugcauuuua

SEQ ID NO: 2175274 - RNA, 20 nt, Human
auuuacaugaauugcauuuu

SEQ ID NO: 2175275 - RNA, 16 nt, Human
auuuacauguauuauu

SEQ ID NO: 2175276 - RNA, 19 nt, Human
auuuacauguauuauuuca

SEQ ID NO: 2175277 - RNA, 15 nt, Human
auuuaccacuugugu

SEQ ID NO: 2175278 - RNA, 22 nt, Human
auuuacucauucauuuauucau

SEQ ID NO: 2175279 - RNA, 13 nt, Human
auuuacugagcuu

SEQ ID NO: 2175280 - RNA, 20 nt, Human
auuuacugagcuucucugug

SEQ ID NO: 2175281 - RNA, 23 nt, Human
auuuacuaagccacaagaaauuu

SEQ ID NO: 2175282 - RNA, 21 nt, Human
auuuacuaagccacaagaaau

SEQ ID NO: 2175283 - RNA, 22 nt, Human
auuuacuaagccacaagaaauu

SEQ ID NO: 2175284 - RNA, 15 nt, Human
auuuacuacuuuugc

SEQ ID NO: 2175285 - RNA, 21 nt, Human
auuuaccacagcagcugaaca

SEQ ID NO: 2175286 - RNA, 15 nt, Human
auuuacuaagccaca

SEQ ID NO: 2175287 - RNA, 14 nt, Human
auuuaaaaaaaauc

SEQ ID NO: 2175288 - RNA, 19 nt, Human
auuuaaaaaaaaaagagga

SEQ ID NO: 2175289 - RNA, 18 nt, Human
auuguuuugguuugcuac

SEQ ID NO: 2175290 - RNA, 18 nt, Human
auuuaaaagauucauuuu

SEQ ID NO: 2175291 - RNA, 19 nt, Human
auuuaaaagauucauuuuu

SEQ ID NO: 2175292 - RNA, 15 nt, Human
auuuaaaagggaagu

SEQ ID NO: 2175293 - RNA, 19 nt, Human
auuuaaaagggaagucuag

SEQ ID NO: 2175294 - RNA, 21 nt, Human
auuuaaaagggaagucuagag

SEQ ID NO: 2175295 - RNA, 19 nt, Human
auuguuuucaguguacaug

SEQ ID NO: 2175296 - RNA, 18 nt, Human
auuguuuucaguguacau

SEQ ID NO: 2175297 - RNA, 17 nt, Human
auuuaaaaaaaaaccug

SEQ ID NO: 2175298 - RNA, 18 nt, Human
auuguuuuaucaugacau

SEQ ID NO: 2175299 - RNA, 20 nt, Human
auuguuuugagcuuuccaug

SEQ ID NO: 2175300 - RNA, 15 nt, Human
auuguuuugcacuuu

SEQ ID NO: 2175301 - RNA, 18 nt, Human
auuguuuugccaacauug

SEQ ID NO: 2175302 - RNA, 17 nt, Human
auuguauaaaaauagaa

SEQ ID NO: 2175303 - RNA, 13 nt, Human
auuguuuuaucau

SEQ ID NO: 2175304 - RNA, 10 nt, Human
auuguuuuca

SEQ ID NO: 2175305 - RNA, 15 nt, Human
auuguauaaaaauag

SEQ ID NO: 2175306 - RNA, 14 nt, Human
auuguauaaaaaua

SEQ ID NO: 2175307 - RNA, 17 nt, Human
auuguuuucaguguaca

SEQ ID NO: 2175308 - RNA, 18 nt, Human
auuguacucaauggauuu

SEQ ID NO: 2175309 - RNA, 22 nt, Human
auuguacucaauggauuugaug

SEQ ID NO: 2175310 - RNA, 15 nt, Human
auuguagcauuucuu

SEQ ID NO: 2175311 - RNA, 14 nt, Human
auuguaguuaauga

SEQ ID NO: 2175312 - RNA, 16 nt, Human
auuguagcauuucuug

SEQ ID NO: 2175313 - RNA, 18 nt, Human
auuguagcauuucuugau

SEQ ID NO: 2175314 - RNA, 16 nt, Human
auuguaguccuguaau

SEQ ID NO: 2175315 - RNA, 17 nt, Human
auuguagagccagaggu

SEQ ID NO: 2175316 - RNA, 18 nt, Human
auuguagagccagagguc

SEQ ID NO: 2175317 - RNA, 14 nt, Human
auuuauugcuugau

SEQ ID NO: 2175318 - RNA, 16 nt, Human
auuuaguucuuuguua

SEQ ID NO: 2175319 - RNA, 12 nt, Human
auuuaguucuuu

SEQ ID NO: 2175320 - RNA, 16 nt, Human
auuuaguuauaguuuc

SEQ ID NO: 2175321 - RNA, 13 nt, Human
auuuaguuauuga

SEQ ID NO: 2175322 - RNA, 17 nt, Human
auuuaguucuuuguuau

SEQ ID NO: 2175323 - RNA, 23 nt, Human
auuuauaaaaauaaaaaacacug

SEQ ID NO: 2175324 - RNA, 17 nt, Human
auuuaguguucauaaau

SEQ ID NO: 2175325 - RNA, 20 nt, Human
auuuacuugccauuacucaa

SEQ ID NO: 2175326 - RNA, 21 nt, Human
auuuaguguuuuuaccucugu

SEQ ID NO: 2175327 - RNA, 13 nt, Human
auuuaguuauagu

SEQ ID NO: 2175328 - RNA, 14 nt, Human
auuuaguuauaguu

SEQ ID NO: 2175329 - RNA, 20 nt, Human
auuuacuucuuauacauuug

SEQ ID NO: 2175330 - RNA, 19 nt, Human
auuuacuucuuauacauuu

SEQ ID NO: 2175331 - RNA, 15 nt, Human
auuuacuuugaauuu

SEQ ID NO: 2175332 - RNA, 22 nt, Human
auuuacuugccauuacucaauu

SEQ ID NO: 2175333 - RNA, 16 nt, Human
auuuaguguucauaaa

SEQ ID NO: 2175334 - RNA, 18 nt, Human
auuuauguagaugugcau

SEQ ID NO: 2175335 - RNA, 14 nt, Human
auuuauguagaugu

SEQ ID NO: 2175336 - RNA, 12 nt, Human
auuuauguagau

SEQ ID NO: 2175337 - RNA, 12 nt, Human
auuuauguaaac

SEQ ID NO: 2175338 - RNA, 21 nt, Human
auuuauguagaugugcauuuu

SEQ ID NO: 2175339 - RNA, 20 nt, Human
auuuauguagaugugcauuu

SEQ ID NO: 2175340 - RNA, 22 nt, Human
auuuaugucuauuuaagccuca

SEQ ID NO: 2175341 - RNA, 22 nt, Human
auuuaugugugaggagcugcug

SEQ ID NO: 2175342 - RNA, 19 nt, Human
auuuaugugugaggagcug

SEQ ID NO: 2175343 - RNA, 18 nt, Human
auuuaugugugaggagcu

SEQ ID NO: 2175344 - RNA, 13 nt, Human
auuuaugugugag

SEQ ID NO: 2175345 - RNA, 18 nt, Human
auuuauuaauugcuuuga

SEQ ID NO: 2175346 - RNA, 17 nt, Human
auuuauuaauugcuuug

SEQ ID NO: 2175347 - RNA, 16 nt, Human
auuuauuaauugcuuu

SEQ ID NO: 2175348 - RNA, 13 nt, Human
auuuauguuugca

SEQ ID NO: 2175349 - RNA, 13 nt, Human
auuuauaacucau

SEQ ID NO: 2175350 - RNA, 15 nt, Human
auuuauaaaugcuau

SEQ ID NO: 2175351 - RNA, 16 nt, Human
auuuauaaaugcuauu

SEQ ID NO: 2175352 - RNA, 22 nt, Human
auuuauaaauauauuuaagaua

SEQ ID NO: 2175353 - RNA, 13 nt, Human
auuuauaaaugcu

SEQ ID NO: 2175354 - RNA, 14 nt, Human
auuuauaaaugcua

SEQ ID NO: 2175355 - RNA, 23 nt, Human
auuuauguaaacugcauuagaaa

SEQ ID NO: 2175356 - RNA, 14 nt, Human
auuuauaacucauc

SEQ ID NO: 2175357 - RNA, 17 nt, Human
auuuauaaaugcuauuu

SEQ ID NO: 2175358 - RNA, 18 nt, Human
auuuauggucaacacuua

SEQ ID NO: 2175359 - RNA, 15 nt, Human
auuuauaaacuuuuu

SEQ ID NO: 2175360 - RNA, 21 nt, Human
auuuauaaagcuaaaauaacc

SEQ ID NO: 2175361 - RNA, 17 nt, Human
auuuauaaagcuaaaau

SEQ ID NO: 2175362 - RNA, 15 nt, Human
auuuauaaaacuucu

SEQ ID NO: 2175363 - RNA, 14 nt, Human
auuuauaaaacuuc

SEQ ID NO: 2175364 - RNA, 21 nt, Human
auuuauaaaacuucucaagau

SEQ ID NO: 2175365 - RNA, 20 nt, Human
auuugguuuggccaucucug

SEQ ID NO: 2175366 - RNA, 22 nt, Human
auuugguuuggccaucucugga

SEQ ID NO: 2175367 - RNA, 15 nt, Human
auuugguucuaauag

SEQ ID NO: 2175368 - RNA, 18 nt, Human
auuugguucuaggccggg

SEQ ID NO: 2175369 - RNA, 21 nt, Human
auuugguucauuaauucuaua

SEQ ID NO: 2175370 - RNA, 16 nt, Human
auuugguucauuaauu

SEQ ID NO: 2175371 - RNA, 19 nt, Human
auuuggcaaugccaucauc

SEQ ID NO: 2175372 - RNA, 21 nt, Human
auuuggugguuucagaaaugu

SEQ ID NO: 2175373 - RNA, 13 nt, Human
auuuguacaaaaa

SEQ ID NO: 2175374 - RNA, 23 nt, Human
auuuguaauugcuuacauuuuua

SEQ ID NO: 2175375 - RNA, 21 nt, Human
auuuguacauaguuauuuauu

SEQ ID NO: 2175376 - RNA, 13 nt, Human
auuuguacaguuc

SEQ ID NO: 2175377 - RNA, 15 nt, Human
auuuguacaguucag

SEQ ID NO: 2175378 - RNA, 15 nt, Human
auuuguaauugcuua

SEQ ID NO: 2175379 - RNA, 19 nt, Human
auuuguaauugcuuacauu

SEQ ID NO: 2175380 - RNA, 20 nt, Human
auuuguaauugcuuacauuu

SEQ ID NO: 2175381 - RNA, 20 nt, Human
auuugauaguauugugcaua

SEQ ID NO: 2175382 - RNA, 14 nt, Human
auuugauaucacag

SEQ ID NO: 2175383 - RNA, 23 nt, Human
auuugaucguuccaguucccacu

SEQ ID NO: 2175384 - RNA, 15 nt, Human
auuugauaucacagu

SEQ ID NO: 2175385 - RNA, 17 nt, Human
auuugaucguuccaguu

SEQ ID NO: 2175386 - RNA, 21 nt, Human
auuugagauguauuucaacuu

SEQ ID NO: 2175387 - RNA, 18 nt, Human
auuugagagaaauaugaa

SEQ ID NO: 2175388 - RNA, 21 nt, Human
auuugaggucuguucuuucca

SEQ ID NO: 2175389 - RNA, 14 nt, Human
auuugaugcuaaau

SEQ ID NO: 2175390 - RNA, 16 nt, Human
auuugaugcuggagag

SEQ ID NO: 2175391 - RNA, 15 nt, Human
auuugaugccaggac

SEQ ID NO: 2175392 - RNA, 17 nt, Human
auuugaugcuggagagg

SEQ ID NO: 2175393 - RNA, 19 nt, Human
auuugaugcuggagagguu

SEQ ID NO: 2175394 - RNA, 16 nt, Human
auuugaugcuguuuga

SEQ ID NO: 2175395 - RNA, 23 nt, Human
auuugaugcuguuugacaaaguu

SEQ ID NO: 2175396 - RNA, 11 nt, Human
auuuggagacu

SEQ ID NO: 2175397 - RNA, 17 nt, Human
auuuggagacucugugg

SEQ ID NO: 2175398 - RNA, 21 nt, Human
auuuggaguguuccccuucca

SEQ ID NO: 2175399 - RNA, 14 nt, Human
auuugagaauauaa

SEQ ID NO: 2175400 - RNA, 21 nt, Human
auuugagaauauaaaaaacuu

SEQ ID NO: 2175401 - RNA, 17 nt, Human
auuugagagaaauauga

SEQ ID NO: 2175402 - RNA, 17 nt, Human
auuugagaaaugcauau

SEQ ID NO: 2175403 - RNA, 14 nt, Human
auuugagaaaugca

SEQ ID NO: 2175404 - RNA, 16 nt, Human
auuugagaaaugcaua

SEQ ID NO: 2175405 - RNA, 12 nt, Human
auuugagaaaug

SEQ ID NO: 2175406 - RNA, 19 nt, Human
auuugaauguuaagcagau

SEQ ID NO: 2175407 - RNA, 15 nt, Human
auuugagcagggcuc

SEQ ID NO: 2175408 - RNA, 16 nt, Human
auuugagcagggcuca

SEQ ID NO: 2175409 - RNA, 18 nt, Human
auuugaggucuguucuuu

SEQ ID NO: 2175410 - RNA, 17 nt, Human
auuugaggucuguucuu

SEQ ID NO: 2175411 - RNA, 13 nt, Human
auuucuucacugu

SEQ ID NO: 2175412 - RNA, 15 nt, Human
auuucuuaucaccac

SEQ ID NO: 2175413 - RNA, 18 nt, Human
auuucuuaucaccacagu

SEQ ID NO: 2175414 - RNA, 11 nt, Human
auuucuuauag

SEQ ID NO: 2175415 - RNA, 14 nt, Human
auuucuuauauaug

SEQ ID NO: 2175416 - RNA, 21 nt, Human
auuucuuauauaugugaacau

SEQ ID NO: 2175417 - RNA, 19 nt, Human
auuucuuaucaccacagua

SEQ ID NO: 2175418 - RNA, 21 nt, Human
auuucuugaguuuuguuuuaa

SEQ ID NO: 2175419 - RNA, 16 nt, Human
auuucuuccacaagag

SEQ ID NO: 2175420 - RNA, 20 nt, Human
auuucuugagguaaaagcau

SEQ ID NO: 2175421 - RNA, 16 nt, Human
auuucuugggcccucc

SEQ ID NO: 2175422 - RNA, 14 nt, Human
auuucuugggcccu

SEQ ID NO: 2175423 - RNA, 19 nt, Human
auuucuugguaagaagccg

SEQ ID NO: 2175424 - RNA, 18 nt, Human
auuucuugggcccuccug

SEQ ID NO: 2175425 - RNA, 17 nt, Human
auuucuugggcccuccu

SEQ ID NO: 2175426 - RNA, 20 nt, Human
auuucuugguaagaagccgg

SEQ ID NO: 2175427 - RNA, 20 nt, Human
auuucuugggcccuccugaa

SEQ ID NO: 2175428 - RNA, 13 nt, Human
auuucuugugccu

SEQ ID NO: 2175429 - RNA, 23 nt, Human
auuugaauguaugcuucauacag

SEQ ID NO: 2175430 - RNA, 13 nt, Human
auuucuuuccaga

SEQ ID NO: 2175431 - RNA, 14 nt, Human
auuucuuuccagag

SEQ ID NO: 2175432 - RNA, 13 nt, Human
auuugaauguuaa

SEQ ID NO: 2175433 - RNA, 18 nt, Human
auuugaauguuaagcaga

SEQ ID NO: 2175434 - RNA, 15 nt, Human
auuucuuugccuguu

SEQ ID NO: 2175435 - RNA, 18 nt, Human
auugaaucuauuuaagua

SEQ ID NO: 2175436 - RNA, 17 nt, Human
auuggcucacacugaga

SEQ ID NO: 2175437 - RNA, 14 nt, Human
auuggaagaaauuc

SEQ ID NO: 2175438 - RNA, 18 nt, Human
auuggaagaaauuccugu

SEQ ID NO: 2175439 - RNA, 19 nt, Human
auuggaagaaauuccugua

SEQ ID NO: 2175440 - RNA, 16 nt, Human
auuggaagaccccacc

SEQ ID NO: 2175441 - RNA, 16 nt, Human
auuggaacagaauguu

SEQ ID NO: 2175442 - RNA, 18 nt, Human
auuggaaugggcagcuca

SEQ ID NO: 2175443 - RNA, 15 nt, Human
auuggacccuuccau

SEQ ID NO: 2175444 - RNA, 23 nt, Human
auugccuuuagugaucacagcag

SEQ ID NO: 2175445 - RNA, 16 nt, Human
auugcauauauacaua

SEQ ID NO: 2175446 - RNA, 22 nt, Human
auugcauauaacuuauauugua

SEQ ID NO: 2175447 - RNA, 18 nt, Human
auugcauauaacuuauau

SEQ ID NO: 2175448 - RNA, 16 nt, Human
auugcauauaacuuau

SEQ ID NO: 2175449 - RNA, 13 nt, Human
auugcacucuaaa

SEQ ID NO: 2175450 - RNA, 15 nt, Human
auugcaucucccaga

SEQ ID NO: 2175451 - RNA, 21 nt, Human
auugcaucuggguagcuguaa

SEQ ID NO: 2175452 - RNA, 20 nt, Human
auugcaucuggguagcugua

SEQ ID NO: 2175453 - RNA, 23 nt, Human
auugcaucucccagauaauguga

SEQ ID NO: 2175454 - RNA, 22 nt, Human
auugcaucucccagauaaugug

SEQ ID NO: 2175455 - RNA, 17 nt, Human
auugccugcagagagaa

SEQ ID NO: 2175456 - RNA, 18 nt, Human
auugccuuaacuggagcc

SEQ ID NO: 2175457 - RNA, 18 nt, Human
auugcaugugacucugaa

SEQ ID NO: 2175458 - RNA, 16 nt, Human
auugccugcagagaga

SEQ ID NO: 2175459 - RNA, 11 nt, Human
auugcauugac

SEQ ID NO: 2175460 - RNA, 14 nt, Human
auugcaugugacuc

SEQ ID NO: 2175461 - RNA, 13 nt, Human
auugcaugugacu

SEQ ID NO: 2175462 - RNA, 23 nt, Human
auugcauuaaauauaauaugcac

SEQ ID NO: 2175463 - RNA, 17 nt, Human
auugcaugugacucuga

SEQ ID NO: 2175464 - RNA, 15 nt, Human
auugcaugugacucu

SEQ ID NO: 2175465 - RNA, 15 nt, Human
auugcaucuguauaa

SEQ ID NO: 2175466 - RNA, 19 nt, Human
auugcaucuguauaaguaa

SEQ ID NO: 2175467 - RNA, 22 nt, Human
auugcaucuggguagcuguaag

SEQ ID NO: 2175468 - RNA, 13 nt, Human
auugcaucuguau

SEQ ID NO: 2175469 - RNA, 14 nt, Human
auugcaucuguaua

SEQ ID NO: 2175470 - RNA, 19 nt, Human
auuggcuauuuaaagacaa

SEQ ID NO: 2175471 - RNA, 13 nt, Human
auuggcucacacu

SEQ ID NO: 2175472 - RNA, 15 nt, Human
auuggcucacacuga

SEQ ID NO: 2175473 - RNA, 16 nt, Human
auuggcucacacugag

SEQ ID NO: 2175474 - RNA, 23 nt, Human
auuggcuagagguucaaagauau

SEQ ID NO: 2175475 - RNA, 17 nt, Human
auuggcuauuuaaaacu

SEQ ID NO: 2175476 - RNA, 18 nt, Human
auuggcuauuuaaaacuu

SEQ ID NO: 2175477 - RNA, 18 nt, Human
auuggagaguaaaaacug

SEQ ID NO: 2175478 - RNA, 18 nt, Human
auuggcagcaggugcugc

SEQ ID NO: 2175479 - RNA, 17 nt, Human
auuggagccaccaugcc

SEQ ID NO: 2175480 - RNA, 19 nt, Human
auuggcagcaggugcugcu

SEQ ID NO: 2175481 - RNA, 22 nt, Human
auuggcagcaggugcugcuacc

SEQ ID NO: 2175482 - RNA, 15 nt, Human
auuggcagcagauuu

SEQ ID NO: 2175483 - RNA, 22 nt, Human
auuggagaaguaauccuaggga

SEQ ID NO: 2175484 - RNA, 17 nt, Human
auuggagauagggaaag

SEQ ID NO: 2175485 - RNA, 16 nt, Human
auuggagcucguggaa

SEQ ID NO: 2175486 - RNA, 17 nt, Human
auuggagcucgugggac

SEQ ID NO: 2175487 - RNA, 22 nt, Human
auuggccauucuauuguggcaa

SEQ ID NO: 2175488 - RNA, 17 nt, Human
auuggcauguguauguu

SEQ ID NO: 2175489 - RNA, 11 nt, Human
auuggccugga

SEQ ID NO: 2175490 - RNA, 12 nt, Human
auuggccuggag

SEQ ID NO: 2175491 - RNA, 14 nt, Human
auuggcauguguau

SEQ ID NO: 2175492 - RNA, 19 nt, Human
auuggcuagagguucaaag

SEQ ID NO: 2175493 - RNA, 22 nt, Human
auuggcuagagguucaaagaua

SEQ ID NO: 2175494 - RNA, 20 nt, Human
auuggcuagagguucaaaga

SEQ ID NO: 2175495 - RNA, 14 nt, Human
auugaacccaggag

SEQ ID NO: 2175496 - RNA, 16 nt, Human
auugaaauuuauacac

SEQ ID NO: 2175497 - RNA, 15 nt, Human
auugaacccaggagg

SEQ ID NO: 2175498 - RNA, 20 nt, Human
auugaacacaaacuguaaau

SEQ ID NO: 2175499 - RNA, 19 nt, Human
auugaacacaaacuguaaa

SEQ ID NO: 2175500 - RNA, 18 nt, Human
auugaacacaaacuguaa

SEQ ID NO: 2175501 - RNA, 17 nt, Human
auugaacacaaacugua

SEQ ID NO: 2175502 - RNA, 16 nt, Human
auugaacacaaacugu

SEQ ID NO: 2175503 - RNA, 15 nt, Human
auugaacacaaacug

SEQ ID NO: 2175504 - RNA, 17 nt, Human
auuccuaccucccugca

SEQ ID NO: 2175505 - RNA, 17 nt, Human
auuccuauauaguuuau

SEQ ID NO: 2175506 - RNA, 21 nt, Human
auuccuauacgcagcgugcuu

SEQ ID NO: 2175507 - RNA, 22 nt, Human
auugaacaaguuguuucauuga

SEQ ID NO: 2175508 - RNA, 14 nt, Human
auugaacacaaacu

SEQ ID NO: 2175509 - RNA, 21 nt, Human
auugaaauuguacauauuugu

SEQ ID NO: 2175510 - RNA, 17 nt, Human
auugaaauuguacauau

SEQ ID NO: 2175511 - RNA, 14 nt, Human
auugaaauuuauac

SEQ ID NO: 2175512 - RNA, 17 nt, Human
auuccuauugugauuug

SEQ ID NO: 2175513 - RNA, 14 nt, Human
auuccuauugugau

SEQ ID NO: 2175514 - RNA, 13 nt, Human
auugaaauucuga

SEQ ID NO: 2175515 - RNA, 17 nt, Human
auugaaauucugagaaa

SEQ ID NO: 2175516 - RNA, 16 nt, Human
auugaaauuguacaua

SEQ ID NO: 2175517 - RNA, 10 nt, Human
auugaaucua

SEQ ID NO: 2175518 - RNA, 14 nt, Human
auugaaucauguag

SEQ ID NO: 2175519 - RNA, 20 nt, Human
auugaaucauguaguaucaa

SEQ ID NO: 2175520 - RNA, 14 nt, Human
auugaaucuauuua

SEQ ID NO: 2175521 - RNA, 16 nt, Human
auugaaucuauuuaag

SEQ ID NO: 2175522 - RNA, 13 nt, Human
auugaauuaucuu

SEQ ID NO: 2175523 - RNA, 14 nt, Human
auugaaucugauug

SEQ ID NO: 2175524 - RNA, 23 nt, Human
auugaaucugauuggacauuuuc

SEQ ID NO: 2175525 - RNA, 16 nt, Human
auugaauguuuccaac

SEQ ID NO: 2175526 - RNA, 23 nt, Human
auugaauucuugguugaggaaac

SEQ ID NO: 2175527 - RNA, 22 nt, Human
auugaauucuugguugaggaaa

SEQ ID NO: 2175528 - RNA, 20 nt, Human
auugaauucuugguugagga

SEQ ID NO: 2175529 - RNA, 21 nt, Human
auugaauuaucuugguugaaa

SEQ ID NO: 2175530 - RNA, 23 nt, Human
auugaauauaauauauuugugua

SEQ ID NO: 2175531 - RNA, 20 nt, Human
auugaaucaguauaaacaaa

SEQ ID NO: 2175532 - RNA, 13 nt, Human
auugaaucaugua

SEQ ID NO: 2175533 - RNA, 13 nt, Human
auugaaucaguau

SEQ ID NO: 2175534 - RNA, 19 nt, Human
auugaauaaaguugaagcu

SEQ ID NO: 2175535 - RNA, 14 nt, Human
auugaauaauggua

SEQ ID NO: 2175536 - RNA, 22 nt, Human
auugaauaaugguaccagauaa

SEQ ID NO: 2175537 - RNA, 16 nt, Human
auugaaguaaugaauu

SEQ ID NO: 2175538 - RNA, 19 nt, Human
auugaaguauuuugcugga

SEQ ID NO: 2175539 - RNA, 16 nt, Human
auugaagucagaugug

SEQ ID NO: 2175540 - RNA, 18 nt, Human
auugaagucagauguggu

SEQ ID NO: 2175541 - RNA, 15 nt, Human
auugaaguaaugaau

SEQ ID NO: 2175542 - RNA, 14 nt, Human
auugaaguaaugaa

SEQ ID NO: 2175543 - RNA, 19 nt, Human
auugcacuccagccugggc

SEQ ID NO: 2175544 - RNA, 20 nt, Human
auugcacucuaaaagguuca

SEQ ID NO: 2175545 - RNA, 18 nt, Human
auugcacuccagccuggg

SEQ ID NO: 2175546 - RNA, 16 nt, Human
auugcacuccagccug

SEQ ID NO: 2175547 - RNA, 17 nt, Human
auugcacuccagccugg

SEQ ID NO: 2175548 - RNA, 15 nt, Human
auugcacuccagccu

SEQ ID NO: 2175549 - RNA, 23 nt, Human
auugcacguggccucuugagcag

SEQ ID NO: 2175550 - RNA, 15 nt, Human
auugcacauuguaaa

SEQ ID NO: 2175551 - RNA, 19 nt, Human
auugcaaaauagcauuugu

SEQ ID NO: 2175552 - RNA, 15 nt, Human
auugcacguggccuc

SEQ ID NO: 2175553 - RNA, 16 nt, Human
auugcacguggccucu

SEQ ID NO: 2175554 - RNA, 17 nt, Human
auugcacguggccucuu

SEQ ID NO: 2175555 - RNA, 19 nt, Human
auugcacguggccucuuga

SEQ ID NO: 2175556 - RNA, 17 nt, Human
auugcaacaggcugggc

SEQ ID NO: 2175557 - RNA, 18 nt, Human
auugcaacaggcugggcu

SEQ ID NO: 2175558 - RNA, 12 nt, Human
auugcaccacug

SEQ ID NO: 2175559 - RNA, 19 nt, Human
auugcaacaggcugggcuu

SEQ ID NO: 2175560 - RNA, 16 nt, Human
auugauggggaaggag

SEQ ID NO: 2175561 - RNA, 21 nt, Human
auugauguacagucugucaug

SEQ ID NO: 2175562 - RNA, 12 nt, Human
auugauguguuu

SEQ ID NO: 2175563 - RNA, 13 nt, Human
auugacaaacucu

SEQ ID NO: 2175564 - RNA, 14 nt, Human
auugacaaacucuc

SEQ ID NO: 2175565 - RNA, 13 nt, Human
auugauggggaag

SEQ ID NO: 2175566 - RNA, 22 nt, Human
auugauguacagucugucauga

SEQ ID NO: 2175567 - RNA, 19 nt, Human
auugauguguuuauuuaua

SEQ ID NO: 2175568 - RNA, 21 nt, Human
auugauuucugccuuccuugc

SEQ ID NO: 2175569 - RNA, 16 nt, Human
auugauuugaagaaca

SEQ ID NO: 2175570 - RNA, 14 nt, Human
auugauuugaagaa

SEQ ID NO: 2175571 - RNA, 20 nt, Human
auugauuucugccuuccuug

SEQ ID NO: 2175572 - RNA, 12 nt, Human
auugauuugcau

SEQ ID NO: 2175573 - RNA, 15 nt, Human
auugauuugcauuga

SEQ ID NO: 2175574 - RNA, 13 nt, Human
auugauuugcauu

SEQ ID NO: 2175575 - RNA, 20 nt, Human
auugauuugcauugaacaca

SEQ ID NO: 2175576 - RNA, 16 nt, Human
auugauuugcauugaa

SEQ ID NO: 2175577 - RNA, 15 nt, Human
auugcaaaauagcau

SEQ ID NO: 2175578 - RNA, 23 nt, Human
uuuucuguugaaguuuacaauca

SEQ ID NO: 2175579 - RNA, 12 nt, Human
uuuucuguuaua

SEQ ID NO: 2175580 - RNA, 13 nt, Human
uuuucuguucuuu

SEQ ID NO: 2175581 - RNA, 21 nt, Human
uuuucuuaaccagaucauugu

SEQ ID NO: 2175582 - RNA, 23 nt, Human
uuuucuuaaauaauaaagaucau

SEQ ID NO: 2175583 - RNA, 14 nt, Human
uuuucuuaaauaau

SEQ ID NO: 2175584 - RNA, 12 nt, Human
uuuucugcccug

SEQ ID NO: 2175585 - RNA, 13 nt, Human
uuuucugcccugg

SEQ ID NO: 2175586 - RNA, 15 nt, Human
uuuucugcccuggcu

SEQ ID NO: 2175587 - RNA, 16 nt, Human
uuuucugcccuggcug

SEQ ID NO: 2175588 - RNA, 16 nt, Human
uuuucugcuuuugaaa

SEQ ID NO: 2175589 - RNA, 17 nt, Human
uuuucuggaauacauga

SEQ ID NO: 2175590 - RNA, 21 nt, Human
uuuucuggaauacaugaaaua

SEQ ID NO: 2175591 - RNA, 13 nt, Human
uuuucugcacuga

SEQ ID NO: 2175592 - RNA, 16 nt, Human
uuuucugcacugagca

SEQ ID NO: 2175593 - RNA, 20 nt, Human
uuuucugcacugagcagagu

SEQ ID NO: 2175594 - RNA, 23 nt, Human
uuuucugauuguaacguugcugu

SEQ ID NO: 2175595 - RNA, 16 nt, Human
uuuucugcaagccugc

SEQ ID NO: 2175596 - RNA, 17 nt, Human
uuuucucuuucucuccu

SEQ ID NO: 2175597 - RNA, 14 nt, Human
uuuucugauuguaa

SEQ ID NO: 2175598 - RNA, 21 nt, Human
uuuucugauuguaacguugcu

SEQ ID NO: 2175599 - RNA, 17 nt, Human
auguuggccaggcuggu

SEQ ID NO: 2175600 - RNA, 12 nt, Human
uuuucuuaacca

SEQ ID NO: 2175601 - RNA, 12 nt, Human
auguuggcuggg

SEQ ID NO: 2175602 - RNA, 19 nt, Human
auguugggaaacuuggcuc

SEQ ID NO: 2175603 - RNA, 20 nt, Human
auguugggaaacuuggcucg

SEQ ID NO: 2175604 - RNA, 12 nt, Human
auguugggacug

SEQ ID NO: 2175605 - RNA, 14 nt, Human
auguugguguucca

SEQ ID NO: 2175606 - RNA, 13 nt, Human
auguuggcuggga

SEQ ID NO: 2175607 - RNA, 18 nt, Human
auguuggucauuuuaugu

SEQ ID NO: 2175608 - RNA, 17 nt, Human
auguuuaacuuaaucaa

SEQ ID NO: 2175609 - RNA, 19 nt, Human
auguuuaacuuaaucaauu

SEQ ID NO: 2175610 - RNA, 16 nt, Human
auguuuacaaauggac

SEQ ID NO: 2175611 - RNA, 16 nt, Human
auguuuacacucuuug

SEQ ID NO: 2175612 - RNA, 18 nt, Human
auguuuacacucuuugua

SEQ ID NO: 2175613 - RNA, 19 nt, Human
auguuuacacucuuuguaa

SEQ ID NO: 2175614 - RNA, 21 nt, Human
auguuuacacucuuuguaaga

SEQ ID NO: 2175615 - RNA, 22 nt, Human
auguuuuuuagaucaaauacuu

SEQ ID NO: 2175616 - RNA, 22 nt, Human
auguuuuuuaaaauauuuaucu

SEQ ID NO: 2175617 - RNA, 19 nt, Human
auguuuuuuagaucaaaua

SEQ ID NO: 2175618 - RNA, 15 nt, Human
auguuuuuuuuuaaa

SEQ ID NO: 2175619 - RNA, 20 nt, Human
auuaaaaaaaaagaucuguu

SEQ ID NO: 2175620 - RNA, 14 nt, Human
auuaaaaaaaaaga

SEQ ID NO: 2175621 - RNA, 14 nt, Human
auuaaaaaaaacaa

SEQ ID NO: 2175622 - RNA, 15 nt, Human
auuaaaaaaaacaaa

SEQ ID NO: 2175623 - RNA, 19 nt, Human
auuaaaaaaaacaaaaaga

SEQ ID NO: 2175624 - RNA, 20 nt, Human
auuaaaaaaaacaaaaagaa

SEQ ID NO: 2175625 - RNA, 23 nt, Human
auuaaaaaaaacaaaaagaacaa

SEQ ID NO: 2175626 - RNA, 12 nt, Human
auuaaaaaacaa

SEQ ID NO: 2175627 - RNA, 22 nt, Human
auuaaaaaugaaauuauuuaua

SEQ ID NO: 2175628 - RNA, 23 nt, Human
auuaaaaaucucaaauuucuaaa

SEQ ID NO: 2175629 - RNA, 21 nt, Human
auuaaaacaauauuguuucua

SEQ ID NO: 2175630 - RNA, 20 nt, Human
auuaaaacaauauuguuucu

SEQ ID NO: 2175631 - RNA, 18 nt, Human
auuaaaacaauauuguuu

SEQ ID NO: 2175632 - RNA, 14 nt, Human
auuaaaacaauauu

SEQ ID NO: 2175633 - RNA, 19 nt, Human
auuaaaacacaacaucuuu

SEQ ID NO: 2175634 - RNA, 22 nt, Human
auguuuuucugccagggagcuu

SEQ ID NO: 2175635 - RNA, 21 nt, Human
auguuuuucugccagggagcu

SEQ ID NO: 2175636 - RNA, 15 nt, Human
auguuuuucaugaaa

SEQ ID NO: 2175637 - RNA, 23 nt, Human
auguuuuuaaaaguuucaaugug

SEQ ID NO: 2175638 - RNA, 18 nt, Human
auguuuauuccugauaau

SEQ ID NO: 2175639 - RNA, 22 nt, Human
auguuuuuaaaaguuucaaugu

SEQ ID NO: 2175640 - RNA, 14 nt, Human
auguuuauuccuga

SEQ ID NO: 2175641 - RNA, 14 nt, Human
auguuuauuccuug

SEQ ID NO: 2175642 - RNA, 17 nt, Human
uuuucuacuuuuuuuaa

SEQ ID NO: 2175643 - RNA, 18 nt, Human
uuuucuagcccgaauaca

SEQ ID NO: 2175644 - RNA, 13 nt, Human
uuuucuagacuuu

SEQ ID NO: 2175645 - RNA, 14 nt, Human
uuuucuagacuuuc

SEQ ID NO: 2175646 - RNA, 12 nt, Human
uuuuccaggcug

SEQ ID NO: 2175647 - RNA, 20 nt, Human
uuuuccagcuggaugagaau

SEQ ID NO: 2175648 - RNA, 13 nt, Human
uuuuccagcuccu

SEQ ID NO: 2175649 - RNA, 16 nt, Human
uuuucuauaauuuaaa

SEQ ID NO: 2175650 - RNA, 18 nt, Human
uuuucuagacuuucuguu

SEQ ID NO: 2175651 - RNA, 21 nt, Human
uuuucuagcccgaauacaaac

SEQ ID NO: 2175652 - RNA, 22 nt, Human
uuuucucuuucuccuuagucuu

SEQ ID NO: 2175653 - RNA, 15 nt, Human
uuuucucuuucucuc

SEQ ID NO: 2175654 - RNA, 14 nt, Human
uuuucucuuucucc

SEQ ID NO: 2175655 - RNA, 12 nt, Human
uuuucucuuucu

SEQ ID NO: 2175656 - RNA, 22 nt, Human
uuuucucuugggcugagacugg

SEQ ID NO: 2175657 - RNA, 21 nt, Human
uuuucucugguaauauugacu

SEQ ID NO: 2175658 - RNA, 14 nt, Human
uuuucucugguaau

SEQ ID NO: 2175659 - RNA, 16 nt, Human
uuuucucugguaauau

SEQ ID NO: 2175660 - RNA, 14 nt, Human
uuuucaguguacau

SEQ ID NO: 2175661 - RNA, 19 nt, Human
uuuuccaaagagugauagu

SEQ ID NO: 2175662 - RNA, 11 nt, Human
uuuuccaaaug

SEQ ID NO: 2175663 - RNA, 18 nt, Human
uuuuccaagugugcauau

SEQ ID NO: 2175664 - RNA, 22 nt, Human
uuuuccaaauguaauaaacuuu

SEQ ID NO: 2175665 - RNA, 15 nt, Human
uuuuccacccuggaa

SEQ ID NO: 2175666 - RNA, 22 nt, Human
uuuuccacaagauucccagaga

SEQ ID NO: 2175667 - RNA, 15 nt, Human
uuuuccaaugucugc

SEQ ID NO: 2175668 - RNA, 14 nt, Human
uuuuccaaugucug

SEQ ID NO: 2175669 - RNA, 15 nt, Human
uuuuccacuacugcu

SEQ ID NO: 2175670 - RNA, 13 nt, Human
uuuuccacuacug

SEQ ID NO: 2175671 - RNA, 13 nt, Human
uuuuccacuuugu

SEQ ID NO: 2175672 - RNA, 11 nt, Human
uuuuauugugu

SEQ ID NO: 2175673 - RNA, 10 nt, Human
uuuuauuguu

SEQ ID NO: 2175674 - RNA, 22 nt, Human
uuuuauuguaacagacauuguu

SEQ ID NO: 2175675 - RNA, 20 nt, Human
uuuuauuguauaaacuauca

SEQ ID NO: 2175676 - RNA, 17 nt, Human
uuuuauuguuuaaagca

SEQ ID NO: 2175677 - RNA, 20 nt, Human
uuuucaggcuagauguaugu

SEQ ID NO: 2175678 - RNA, 23 nt, Human
uuuucaguagggcuacaaaaccu

SEQ ID NO: 2175679 - RNA, 23 nt, Human
uuuucaguauuuuggagaaauua

SEQ ID NO: 2175680 - RNA, 15 nt, Human
uuuucagucauauaa

SEQ ID NO: 2175681 - RNA, 23 nt, Human
uuuucagucauauaaaagcuaug

SEQ ID NO: 2175682 - RNA, 16 nt, Human
uuuucaguauuuugga

SEQ ID NO: 2175683 - RNA, 12 nt, Human
uuuucagcuucu

SEQ ID NO: 2175684 - RNA, 15 nt, Human
uuuucagcuucugcu

SEQ ID NO: 2175685 - RNA, 20 nt, Human
uuuucagcuucugcugggcu

SEQ ID NO: 2175686 - RNA, 17 nt, Human
uuuucagcuucugcugg

SEQ ID NO: 2175687 - RNA, 19 nt, Human
uuuuauugaaucuauuuaa

SEQ ID NO: 2175688 - RNA, 16 nt, Human
uuuuauugacacagaa

SEQ ID NO: 2175689 - RNA, 19 nt, Human
uuuuauugagaauuuuaaa

SEQ ID NO: 2175690 - RNA, 18 nt, Human
uuuuauugacacagaaaa

SEQ ID NO: 2175691 - RNA, 16 nt, Human
uuuuauuguaacagac

SEQ ID NO: 2175692 - RNA, 19 nt, Human
uuuuauuguaacagacauu

SEQ ID NO: 2175693 - RNA, 20 nt, Human
uuuuauuguaacagacauug

SEQ ID NO: 2175694 - RNA, 21 nt, Human
uuuuauuguaacagacauugu

SEQ ID NO: 2175695 - RNA, 15 nt, Human
uuuuauuccuguaug

SEQ ID NO: 2175696 - RNA, 18 nt, Human
uuuuauuccuguauguug

SEQ ID NO: 2175697 - RNA, 15 nt, Human
uuuuauuccacaucu

SEQ ID NO: 2175698 - RNA, 13 nt, Human
uuuuauuccacau

SEQ ID NO: 2175699 - RNA, 11 nt, Human
uuuuauuaaug

SEQ ID NO: 2175700 - RNA, 13 nt, Human
uuuuauuaaugca

SEQ ID NO: 2175701 - RNA, 12 nt, Human
uuuuauuaaauu

SEQ ID NO: 2175702 - RNA, 21 nt, Human
uuuuauggcuuuugugcauua

SEQ ID NO: 2175703 - RNA, 19 nt, Human
uuuuauuaauaaacauucu

SEQ ID NO: 2175704 - RNA, 22 nt, Human
uuuuauuaauaaacauucuauc

SEQ ID NO: 2175705 - RNA, 12 nt, Human
uuuuauuaauaa

SEQ ID NO: 2175706 - RNA, 23 nt, Human
uuuuagacaaauacucaugugua

SEQ ID NO: 2175707 - RNA, 18 nt, Human
uuuuagugauuuuaauaa

SEQ ID NO: 2175708 - RNA, 13 nt, Human
uuuuagucacuuu

SEQ ID NO: 2175709 - RNA, 14 nt, Human
uuuuagucacuuuu

SEQ ID NO: 2175710 - RNA, 15 nt, Human
uuuuaguagagacag

SEQ ID NO: 2175711 - RNA, 21 nt, Human
uuuuagacagucucacuuugu

SEQ ID NO: 2175712 - RNA, 21 nt, Human
uuuuagacaaauacucaugug

SEQ ID NO: 2175713 - RNA, 22 nt, Human
uuuuagacaaauacucaugugu

SEQ ID NO: 2175714 - RNA, 16 nt, Human
uuuuaguucuuuggaa

SEQ ID NO: 2175715 - RNA, 18 nt, Human
uuuuaguuaaauuucugg

SEQ ID NO: 2175716 - RNA, 22 nt, Human
uuuuauggcacuaguauuucua

SEQ ID NO: 2175717 - RNA, 19 nt, Human
uuuuauggcuuuugugcau

SEQ ID NO: 2175718 - RNA, 18 nt, Human
uuuuauggcuuuugugca

SEQ ID NO: 2175719 - RNA, 17 nt, Human
auguugcuuaggaugug

SEQ ID NO: 2175720 - RNA, 19 nt, Human
auguugcuggacugucaua

SEQ ID NO: 2175721 - RNA, 17 nt, Human
auguuggaagagaaagc

SEQ ID NO: 2175722 - RNA, 15 nt, Human
auguugcuggacugu

SEQ ID NO: 2175723 - RNA, 11 nt, Human
auguugcugcc

SEQ ID NO: 2175724 - RNA, 13 nt, Human
auguugcugccaa

SEQ ID NO: 2175725 - RNA, 20 nt, Human
auguugcugaggagugagga

SEQ ID NO: 2175726 - RNA, 19 nt, Human
auguugcucagucucccuu

SEQ ID NO: 2175727 - RNA, 20 nt, Human
auguugcucagucucccuuu

SEQ ID NO: 2175728 - RNA, 19 nt, Human
auguugaaaagucaaacug

SEQ ID NO: 2175729 - RNA, 21 nt, Human
uuuuagacccuauugcugcuu

SEQ ID NO: 2175730 - RNA, 17 nt, Human
uuuuagaguugauacua

SEQ ID NO: 2175731 - RNA, 18 nt, Human
uuuuagacaaauacucau

SEQ ID NO: 2175732 - RNA, 20 nt, Human
uuuuagacaaauacucaugu

SEQ ID NO: 2175733 - RNA, 20 nt, Human
auguuggauuuauaaaugcu

SEQ ID NO: 2175734 - RNA, 21 nt, Human
auguuggauuuauaaaugcua

SEQ ID NO: 2175735 - RNA, 16 nt, Human
auguuggauuuauaaa

SEQ ID NO: 2175736 - RNA, 18 nt, Human
auguuggauuuauaaaug

SEQ ID NO: 2175737 - RNA, 18 nt, Human
auguugaaagaucaaaag

SEQ ID NO: 2175738 - RNA, 13 nt, Human
auguugcccaggc

SEQ ID NO: 2175739 - RNA, 14 nt, Human
auguugcccaggca

SEQ ID NO: 2175740 - RNA, 15 nt, Human
auguugcccaggcag

SEQ ID NO: 2175741 - RNA, 22 nt, Human
auguucaacuggagacacuauu

SEQ ID NO: 2175742 - RNA, 14 nt, Human
auguucacuuuuga

SEQ ID NO: 2175743 - RNA, 18 nt, Human
auguucacuuuugacaaa

SEQ ID NO: 2175744 - RNA, 14 nt, Human
auguucaacuggag

SEQ ID NO: 2175745 - RNA, 22 nt, Human
auguuauuuguuauuuucagua

SEQ ID NO: 2175746 - RNA, 20 nt, Human
auguuauuuuuuaauuauua

SEQ ID NO: 2175747 - RNA, 12 nt, Human
auguugaaagau

SEQ ID NO: 2175748 - RNA, 16 nt, Human
auguugaaaagucaaa

SEQ ID NO: 2175749 - RNA, 20 nt, Human
auguuaaaucccauucauaa

SEQ ID NO: 2175750 - RNA, 12 nt, Human
auguuaaauuug

SEQ ID NO: 2175751 - RNA, 14 nt, Human
auguuaaauuugua

SEQ ID NO: 2175752 - RNA, 15 nt, Human
auguuaaauuuguaa

SEQ ID NO: 2175753 - RNA, 16 nt, Human
auguuaaauuuguaag

SEQ ID NO: 2175754 - RNA, 17 nt, Human
auguuaaauuuguaagu

SEQ ID NO: 2175755 - RNA, 18 nt, Human
auguuaaauuuguaaguu

SEQ ID NO: 2175756 - RNA, 20 nt, Human
auguuaaauuuguaaguuuc

SEQ ID NO: 2175757 - RNA, 23 nt, Human
auguuaaauuuguaaguuucagg

SEQ ID NO: 2175758 - RNA, 22 nt, Human
auguuaaauuuguaaguuucag

SEQ ID NO: 2175759 - RNA, 12 nt, Human
auguuaacacau

SEQ ID NO: 2175760 - RNA, 13 nt, Human
auguuaacacauu

SEQ ID NO: 2175761 - RNA, 15 nt, Human
auguuaacacauuuu

SEQ ID NO: 2175762 - RNA, 16 nt, Human
auguuaacacauuuug

SEQ ID NO: 2175763 - RNA, 18 nt, Human
auguuaacacauuuugua

SEQ ID NO: 2175764 - RNA, 18 nt, Human
auguuaaaucccauucau

SEQ ID NO: 2175765 - RNA, 22 nt, Human
auguuaaauaaauuguauauuc

SEQ ID NO: 2175766 - RNA, 19 nt, Human
auguuaaauaaauuguaua

SEQ ID NO: 2175767 - RNA, 20 nt, Human
auguuaaauaaauuguauau

SEQ ID NO: 2175768 - RNA, 14 nt, Human
auguuaaauaaauu

SEQ ID NO: 2175769 - RNA, 16 nt, Human
auguuaaauaaauugu

SEQ ID NO: 2175770 - RNA, 17 nt, Human
auguuaaauaaauugua

SEQ ID NO: 2175771 - RNA, 18 nt, Human
auguuaaauaaauuguau

SEQ ID NO: 2175772 - RNA, 21 nt, Human
auguuaaccucagugucauuu

SEQ ID NO: 2175773 - RNA, 18 nt, Human
auguuaaccucaguguca

SEQ ID NO: 2175774 - RNA, 23 nt, Human
auguuaaccagaauaaaguucug

SEQ ID NO: 2175775 - RNA, 20 nt, Human
auguuaacacauuuuguaua

SEQ ID NO: 2175776 - RNA, 21 nt, Human
auguuaacacauuuuguauaa

SEQ ID NO: 2175777 - RNA, 22 nt, Human
auguuaacacauuuuguauaau

SEQ ID NO: 2175778 - RNA, 23 nt, Human
auguuaacacauuuuguauaauu

SEQ ID NO: 2175779 - RNA, 12 nt, Human
auguuaagcaga

SEQ ID NO: 2175780 - RNA, 19 nt, Human
auguuacauaagauaaaug

SEQ ID NO: 2175781 - RNA, 13 nt, Human
auguuaagcagau

SEQ ID NO: 2175782 - RNA, 17 nt, Human
auguuaugcauaaaguc

SEQ ID NO: 2175783 - RNA, 21 nt, Human
auguuaccuccuauaaacuua

SEQ ID NO: 2175784 - RNA, 14 nt, Human
auguuacauuguuu

SEQ ID NO: 2175785 - RNA, 17 nt, Human
auguuacacuaagggug

SEQ ID NO: 2175786 - RNA, 20 nt, Human
auguuacaucuguuuuaaau

SEQ ID NO: 2175787 - RNA, 17 nt, Human
auguuacaucacagugu

SEQ ID NO: 2175788 - RNA, 14 nt, Human
auguuacauuauua

SEQ ID NO: 2175789 - RNA, 20 nt, Human
auguuacauaagauaaaugu

SEQ ID NO: 2175790 - RNA, 21 nt, Human
auguuauuuucuguugaaguu

SEQ ID NO: 2175791 - RNA, 18 nt, Human
auguuauuuucuguugaa

SEQ ID NO: 2175792 - RNA, 17 nt, Human
auguuauuuuuuaauua

SEQ ID NO: 2175793 - RNA, 19 nt, Human
auguuauuuuuuaauuauu

SEQ ID NO: 2175794 - RNA, 12 nt, Human
auguuauuuaua

SEQ ID NO: 2175795 - RNA, 18 nt, Human
auguuauuuauauauugg

SEQ ID NO: 2175796 - RNA, 20 nt, Human
auguuauuuguuauuuucag

SEQ ID NO: 2175797 - RNA, 20 nt, Human
auguuauuuauauauuggua

SEQ ID NO: 2175798 - RNA, 15 nt, Human
auguuauugcauaau

SEQ ID NO: 2175799 - RNA, 23 nt, Human
auguuauuuaacagcugaauuau

SEQ ID NO: 2175800 - RNA, 13 nt, Human
auguuauuuaaca

SEQ ID NO: 2175801 - RNA, 18 nt, Human
auguuaugcauaaaguca

SEQ ID NO: 2175802 - RNA, 13 nt, Human
auguuauguaaaa

SEQ ID NO: 2175803 - RNA, 18 nt, Human
auguuaugcccagcguuu

SEQ ID NO: 2175804 - RNA, 21 nt, Human
auguuauguaaaaggccaaac

SEQ ID NO: 2175805 - RNA, 14 nt, Human
auguuauguaaaag

SEQ ID NO: 2175806 - RNA, 19 nt, Human
auguguguuuaaauaaagu

SEQ ID NO: 2175807 - RNA, 15 nt, Human
auguguguuuuaaaa

SEQ ID NO: 2175808 - RNA, 23 nt, Human
auguguguccacgacugucucca

SEQ ID NO: 2175809 - RNA, 12 nt, Human
auguguguuuaa

SEQ ID NO: 2175810 - RNA, 15 nt, Human
auguguguuuaaaua

SEQ ID NO: 2175811 - RNA, 16 nt, Human
auguguguuuaaauaa

SEQ ID NO: 2175812 - RNA, 17 nt, Human
auguguguuuaaauaaa

SEQ ID NO: 2175813 - RNA, 21 nt, Human
auguuaaacuuacuuaguguu

SEQ ID NO: 2175814 - RNA, 14 nt, Human
auguguuuucugaa

SEQ ID NO: 2175815 - RNA, 15 nt, Human
auguguuuucugaau

SEQ ID NO: 2175816 - RNA, 13 nt, Human
auguuaaauaaau

SEQ ID NO: 2175817 - RNA, 18 nt, Human
auguguuugguucugggg

SEQ ID NO: 2175818 - RNA, 12 nt, Human
auguguuugugu

SEQ ID NO: 2175819 - RNA, 16 nt, Human
auguguuugugugugu

SEQ ID NO: 2175820 - RNA, 15 nt, Human
auguguuugaacuuc

SEQ ID NO: 2175821 - RNA, 12 nt, Human
auguguuuccau

SEQ ID NO: 2175822 - RNA, 15 nt, Human
auguguggcagauuu

SEQ ID NO: 2175823 - RNA, 19 nt, Human
auguggaaagugaauuuga

SEQ ID NO: 2175824 - RNA, 10 nt, Human
auguguguau

SEQ ID NO: 2175825 - RNA, 17 nt, Human
auguguguaagugugug

SEQ ID NO: 2175826 - RNA, 19 nt, Human
auguguguagacaaauauu

SEQ ID NO: 2175827 - RNA, 14 nt, Human
auguguggccugca

SEQ ID NO: 2175828 - RNA, 17 nt, Human
auguggaaagugaauuu

SEQ ID NO: 2175829 - RNA, 16 nt, Human
auguggaaagugaauu

SEQ ID NO: 2175830 - RNA, 15 nt, Human
auguggaaagugaau

SEQ ID NO: 2175831 - RNA, 13 nt, Human
auguggaaaacag

SEQ ID NO: 2175832 - RNA, 23 nt, Human
auguggaaaagccaagaggcugc

SEQ ID NO: 2175833 - RNA, 15 nt, Human
augugcuuuucucca

SEQ ID NO: 2175834 - RNA, 16 nt, Human
augugcuuuucuccaa

SEQ ID NO: 2175835 - RNA, 17 nt, Human
augugcuuuucuccaau

SEQ ID NO: 2175836 - RNA, 20 nt, Human
augugcuguguaaaguuagu

SEQ ID NO: 2175837 - RNA, 13 nt, Human
augugcuuuucuc

SEQ ID NO: 2175838 - RNA, 20 nt, Human
auguguguaugggugugugu

SEQ ID NO: 2175839 - RNA, 22 nt, Human
auguguguauauguaugugugu

SEQ ID NO: 2175840 - RNA, 18 nt, Human
auguguguauauguaugu

SEQ ID NO: 2175841 - RNA, 17 nt, Human
auguguguauauguaug

SEQ ID NO: 2175842 - RNA, 16 nt, Human
auguguguauauguau

SEQ ID NO: 2175843 - RNA, 12 nt, Human
auguguguauau

SEQ ID NO: 2175844 - RNA, 14 nt, Human
auguguguauaugu

SEQ ID NO: 2175845 - RNA, 20 nt, Human
auguguguagacaaauauuu

SEQ ID NO: 2175846 - RNA, 23 nt, Human
auguguguguguuguguguggga

SEQ ID NO: 2175847 - RNA, 22 nt, Human
auguguguguguuguguguggg

SEQ ID NO: 2175848 - RNA, 22 nt, Human
auguguguccacgacugucucc

SEQ ID NO: 2175849 - RNA, 21 nt, Human
auguguguccacgacugucuc

SEQ ID NO: 2175850 - RNA, 18 nt, Human
uuuuaaaaaacugcugac

SEQ ID NO: 2175851 - RNA, 16 nt, Human
uuuguuuuuuuccaac

SEQ ID NO: 2175852 - RNA, 22 nt, Human
uuuguuuuuuuccaacuguguu

SEQ ID NO: 2175853 - RNA, 13 nt, Human
uuuguuuuuuggu

SEQ ID NO: 2175854 - RNA, 21 nt, Human
uuuuaaaaaacugcugacugu

SEQ ID NO: 2175855 - RNA, 22 nt, Human
augugcacccaugggcucugac

SEQ ID NO: 2175856 - RNA, 13 nt, Human
uuuuaaaaaaaua

SEQ ID NO: 2175857 - RNA, 18 nt, Human
uuuuaaaaaaauaaaaca

SEQ ID NO: 2175858 - RNA, 19 nt, Human
uuuuaaaaaaauaaaacau

SEQ ID NO: 2175859 - RNA, 20 nt, Human
uuuuaaaaaaauaaaacauu

SEQ ID NO: 2175860 - RNA, 17 nt, Human
augugcagguuuguuac

SEQ ID NO: 2175861 - RNA, 22 nt, Human
augugcacugucacuuugcucu

SEQ ID NO: 2175862 - RNA, 21 nt, Human
uuuuaaaaaaauaaaacauuu

SEQ ID NO: 2175863 - RNA, 22 nt, Human
uuuuaaaaaaauaaaacauuuu

SEQ ID NO: 2175864 - RNA, 15 nt, Human
augugcacugucacu

SEQ ID NO: 2175865 - RNA, 18 nt, Human
augugcacugucacuuug

SEQ ID NO: 2175866 - RNA, 14 nt, Human
uuuguuuuuaugaa

SEQ ID NO: 2175867 - RNA, 13 nt, Human
uuuguuuuuaauu

SEQ ID NO: 2175868 - RNA, 12 nt, Human
uuuguuuuucau

SEQ ID NO: 2175869 - RNA, 18 nt, Human
uuuguuuugcuuuuucug

SEQ ID NO: 2175870 - RNA, 12 nt, Human
uuuguuuugcac

SEQ ID NO: 2175871 - RNA, 14 nt, Human
uuuguuuucauggu

SEQ ID NO: 2175872 - RNA, 13 nt, Human
uuuguuuucuuug

SEQ ID NO: 2175873 - RNA, 21 nt, Human
augugcauuuuugugaaauga

SEQ ID NO: 2175874 - RNA, 20 nt, Human
augugcauuuuugugaaaug

SEQ ID NO: 2175875 - RNA, 19 nt, Human
augugcagguuuguuacau

SEQ ID NO: 2175876 - RNA, 20 nt, Human
augugcauucuuuuaaaaga

SEQ ID NO: 2175877 - RNA, 19 nt, Human
augugcauucuuuuaaaag

SEQ ID NO: 2175878 - RNA, 23 nt, Human
augugcaguguagcccacacuug

SEQ ID NO: 2175879 - RNA, 13 nt, Human
augugccaaggug

SEQ ID NO: 2175880 - RNA, 15 nt, Human
augugccaagguggg

SEQ ID NO: 2175881 - RNA, 21 nt, Human
augugccagggcaaugaugaa

SEQ ID NO: 2175882 - RNA, 20 nt, Human
augugccagggcaaugauga

SEQ ID NO: 2175883 - RNA, 21 nt, Human
augugccagguuuuuggucug

SEQ ID NO: 2175884 - RNA, 20 nt, Human
augugcuaguaauuggaaag

SEQ ID NO: 2175885 - RNA, 11 nt, Human
augugcugugu

SEQ ID NO: 2175886 - RNA, 18 nt, Human
augugcugcgugccugug

SEQ ID NO: 2175887 - RNA, 13 nt, Human
augugcuguguaa

SEQ ID NO: 2175888 - RNA, 14 nt, Human
augugcuguguaaa

SEQ ID NO: 2175889 - RNA, 15 nt, Human
augugcuguguaaag

SEQ ID NO: 2175890 - RNA, 16 nt, Human
augugcuguguaaagu

SEQ ID NO: 2175891 - RNA, 17 nt, Human
augugcuguguaaaguu

SEQ ID NO: 2175892 - RNA, 18 nt, Human
augugcuguguaaaguua

SEQ ID NO: 2175893 - RNA, 19 nt, Human
augugcuguguaaaguuag

SEQ ID NO: 2175894 - RNA, 18 nt, Human
augugcuauacugcauac

SEQ ID NO: 2175895 - RNA, 19 nt, Human
augugcuauacugcauacu

SEQ ID NO: 2175896 - RNA, 21 nt, Human
augugcuaguaauuggaaagg

SEQ ID NO: 2175897 - RNA, 16 nt, Human
uuugacuguuuuuacc

SEQ ID NO: 2175898 - RNA, 19 nt, Human
uuugacuguuuuuacccau

SEQ ID NO: 2175899 - RNA, 21 nt, Human
uuugagaaacaacaauuucua

SEQ ID NO: 2175900 - RNA, 13 nt, Human
uuugagaaaugca

SEQ ID NO: 2175901 - RNA, 18 nt, Human
uuugaccucugcagcaau

SEQ ID NO: 2175902 - RNA, 23 nt, Human
uuugaccuguugggagugaggau

SEQ ID NO: 2175903 - RNA, 13 nt, Human
uuugaccuuuuau

SEQ ID NO: 2175904 - RNA, 20 nt, Human
uuugacuguuuuuacccaua

SEQ ID NO: 2175905 - RNA, 16 nt, Human
uuugagaccagccugg

SEQ ID NO: 2175906 - RNA, 20 nt, Human
uuugagacaguuucuuagcu

SEQ ID NO: 2175907 - RNA, 22 nt, Human
uuugagacaguuucuuagcuuu

SEQ ID NO: 2175908 - RNA, 19 nt, Human
uuugagaccagccugggca

SEQ ID NO: 2175909 - RNA, 21 nt, Human
uuugagagaaauaugaagaac

SEQ ID NO: 2175910 - RNA, 18 nt, Human
uuugagaagaaaacaucu

SEQ ID NO: 2175911 - RNA, 15 nt, Human
uuugagacaguuucu

SEQ ID NO: 2175912 - RNA, 14 nt, Human
uuugagaagaaaac

SEQ ID NO: 2175913 - RNA, 16 nt, Human
uuugagacaguuucuu

SEQ ID NO: 2175914 - RNA, 17 nt, Human
uuugagacaguuucuua

SEQ ID NO: 2175915 - RNA, 18 nt, Human
uuugagacaguuucuuag

SEQ ID NO: 2175916 - RNA, 19 nt, Human
uuugagacaguuucuuagc

SEQ ID NO: 2175917 - RNA, 13 nt, Human
uuugagacaggag

SEQ ID NO: 2175918 - RNA, 16 nt, Human
uuugagaaauuaagua

SEQ ID NO: 2175919 - RNA, 13 nt, Human
uuugagacagagu

SEQ ID NO: 2175920 - RNA, 10 nt, Human
uuugagacgg

SEQ ID NO: 2175921 - RNA, 14 nt, Human
uuugagaguucuaa

SEQ ID NO: 2175922 - RNA, 15 nt, Human
uuugaugaguuguga

SEQ ID NO: 2175923 - RNA, 14 nt, Human
uuugauccaagcug

SEQ ID NO: 2175924 - RNA, 13 nt, Human
uuugagaguucua

SEQ ID NO: 2175925 - RNA, 15 nt, Human
uuugauccaagcugg

SEQ ID NO: 2175926 - RNA, 14 nt, Human
uuugauuauuguau

SEQ ID NO: 2175927 - RNA, 18 nt, Human
uuugauuaauccagaaua

SEQ ID NO: 2175928 - RNA, 16 nt, Human
uuugauuauuguauuu

SEQ ID NO: 2175929 - RNA, 16 nt, Human
uuugaugccaagaaag

SEQ ID NO: 2175930 - RNA, 16 nt, Human
uuugaugcuggagagg

SEQ ID NO: 2175931 - RNA, 18 nt, Human
uuugaugcuggagagguu

SEQ ID NO: 2175932 - RNA, 15 nt, Human
uuugauucagacagc

SEQ ID NO: 2175933 - RNA, 22 nt, Human
uuucccugcuuaaugaaaagcu

SEQ ID NO: 2175934 - RNA, 12 nt, Human
uuucccugugcu

SEQ ID NO: 2175935 - RNA, 16 nt, Human
uuucccuucaguaccc

SEQ ID NO: 2175936 - RNA, 14 nt, Human
uuucccugacuccu

SEQ ID NO: 2175937 - RNA, 13 nt, Human
uuucccugugcug

SEQ ID NO: 2175938 - RNA, 13 nt, Human
uuucccugaccuc

SEQ ID NO: 2175939 - RNA, 16 nt, Human
uuucccugccucucau

SEQ ID NO: 2175940 - RNA, 14 nt, Human
uuucccucgcuggg

SEQ ID NO: 2175941 - RNA, 23 nt, Human
uuucccucccuuccucuuuccau

SEQ ID NO: 2175942 - RNA, 19 nt, Human
uuucccuccacuccuuccu

SEQ ID NO: 2175943 - RNA, 15 nt, Human
uuucccuugaggaaa

SEQ ID NO: 2175944 - RNA, 14 nt, Human
uuucccuuaucaaa

SEQ ID NO: 2175945 - RNA, 19 nt, Human
uuucccuucaguacccucu

SEQ ID NO: 2175946 - RNA, 20 nt, Human
uuucccuucaguacccucuc

SEQ ID NO: 2175947 - RNA, 20 nt, Human
uuugacaacguuucagcgac

SEQ ID NO: 2175948 - RNA, 15 nt, Human
uuugacaacaaauua

SEQ ID NO: 2175949 - RNA, 16 nt, Human
uuugaauuuucugugu

SEQ ID NO: 2175950 - RNA, 15 nt, Human
uuugacacuauaucu

SEQ ID NO: 2175951 - RNA, 17 nt, Human
uuugacacuauaucugu

SEQ ID NO: 2175952 - RNA, 18 nt, Human
uuugacacuauaucugua

SEQ ID NO: 2175953 - RNA, 18 nt, Human
uuugacaaagguaaauca

SEQ ID NO: 2175954 - RNA, 14 nt, Human
uuugacaaggggca

SEQ ID NO: 2175955 - RNA, 21 nt, Human
uuugaccucugcagcaauaaa

SEQ ID NO: 2175956 - RNA, 19 nt, Human
uuugaccucugcagcaaua

SEQ ID NO: 2175957 - RNA, 22 nt, Human
uuugcuaacuagcuuggaaacu

SEQ ID NO: 2175958 - RNA, 19 nt, Human
uuugcugggcaguuuuucu

SEQ ID NO: 2175959 - RNA, 18 nt, Human
uuuggauugacucugcau

SEQ ID NO: 2175960 - RNA, 20 nt, Human
uuuggauucuuauguagcag

SEQ ID NO: 2175961 - RNA, 18 nt, Human
uuuggauucuuauguagc

SEQ ID NO: 2175962 - RNA, 19 nt, Human
uuugcuguacuagagaucu

SEQ ID NO: 2175963 - RNA, 22 nt, Human
uuuggauuggaugaauuccaaa

SEQ ID NO: 2175964 - RNA, 16 nt, Human
uuuggauuugacauug

SEQ ID NO: 2175965 - RNA, 14 nt, Human
uuuggauuguauau

SEQ ID NO: 2175966 - RNA, 20 nt, Human
uuuggauuggggucccucua

SEQ ID NO: 2175967 - RNA, 22 nt, Human
uuugcuggggccgaaagaacag

SEQ ID NO: 2175968 - RNA, 19 nt, Human
uuugcuggggccgaaagaa

SEQ ID NO: 2175969 - RNA, 20 nt, Human
uuugcuggagcucugcccau

SEQ ID NO: 2175970 - RNA, 19 nt, Human
uuugcuaagcauuccaacu

SEQ ID NO: 2175971 - RNA, 15 nt, Human
uuugauucugugugu

SEQ ID NO: 2175972 - RNA, 21 nt, Human
uuugauucuccuucagcccuc

SEQ ID NO: 2175973 - RNA, 15 nt, Human
uuugauugauuugaa

SEQ ID NO: 2175974 - RNA, 21 nt, Human
uuugauugagaguaacuuaag

SEQ ID NO: 2175975 - RNA, 22 nt, Human
uuugauugagaguaacuuaagu

SEQ ID NO: 2175976 - RNA, 18 nt, Human
uuugauucagacagcugc

SEQ ID NO: 2175977 - RNA, 12 nt, Human
uuugauuuaugc

SEQ ID NO: 2175978 - RNA, 14 nt, Human
uuugauuuaauguu

SEQ ID NO: 2175979 - RNA, 13 nt, Human
uuugauuucuauu

SEQ ID NO: 2175980 - RNA, 14 nt, Human
uuugauuucauuaa

SEQ ID NO: 2175981 - RNA, 12 nt, Human
uuugccugugcc

SEQ ID NO: 2175982 - RNA, 14 nt, Human
uuugccuguucagu

SEQ ID NO: 2175983 - RNA, 15 nt, Human
uuugccuguucaguu

SEQ ID NO: 2175984 - RNA, 16 nt, Human
uuugccuguucaguua

SEQ ID NO: 2175985 - RNA, 12 nt, Human
uuugcaaaauuu

SEQ ID NO: 2175986 - RNA, 15 nt, Human
uuugcaaaggagcuc

SEQ ID NO: 2175987 - RNA, 19 nt, Human
uuugcaaacuuuauuuuca

SEQ ID NO: 2175988 - RNA, 21 nt, Human
uuugccuugggcugcuccuca

SEQ ID NO: 2175989 - RNA, 19 nt, Human
uuugccuguucaguuacag

SEQ ID NO: 2175990 - RNA, 20 nt, Human
uuugccuguucaguuacaga

SEQ ID NO: 2175991 - RNA, 23 nt, Human
uuugccuguucaguuacagaaag

SEQ ID NO: 2175992 - RNA, 19 nt, Human
uuugccuuuugcaaacuuu

SEQ ID NO: 2175993 - RNA, 22 nt, Human
uuugccuguucaguuacagaaa

SEQ ID NO: 2175994 - RNA, 12 nt, Human
uuugccuuuugc

SEQ ID NO: 2175995 - RNA, 14 nt, Human
auguauaauauuuu

SEQ ID NO: 2175996 - RNA, 23 nt, Human
auguauaauauuuuuaauuaaau

SEQ ID NO: 2175997 - RNA, 21 nt, Human
auguauaauucaaagcaccaa

SEQ ID NO: 2175998 - RNA, 17 nt, Human
auguauauaaacaugcu

SEQ ID NO: 2175999 - RNA, 21 nt, Human
uuugggguacccacugcucug

SEQ ID NO: 2176000 - RNA, 13 nt, Human
uuuggggaagaac

SEQ ID NO: 2176001 - RNA, 17 nt, Human
uuuggguaccuauuuuc

SEQ ID NO: 2176002 - RNA, 20 nt, Human
uuugggguagcuagaggaac

SEQ ID NO: 2176003 - RNA, 22 nt, Human
uuugggguacccacugcucugg

SEQ ID NO: 2176004 - RNA, 17 nt, Human
uuugggaggcugaggcg

SEQ ID NO: 2176005 - RNA, 22 nt, Human
uuugggauaggaaaaaugagua

SEQ ID NO: 2176006 - RNA, 22 nt, Human
uuuggcugaaauucuccuggag

SEQ ID NO: 2176007 - RNA, 13 nt, Human
uuuggcugugucu

SEQ ID NO: 2176008 - RNA, 14 nt, Human
uuuggcugugucua

SEQ ID NO: 2176009 - RNA, 15 nt, Human
uuuggcugugucuaa

SEQ ID NO: 2176010 - RNA, 17 nt, Human
uuuggcugugucuaaac

SEQ ID NO: 2176011 - RNA, 19 nt, Human
uuuggcugugucuaaacug

SEQ ID NO: 2176012 - RNA, 14 nt, Human
uuuggcuuccauga

SEQ ID NO: 2176013 - RNA, 14 nt, Human
uuugggcugcccug

SEQ ID NO: 2176014 - RNA, 15 nt, Human
uuugggccccucucc

SEQ ID NO: 2176015 - RNA, 12 nt, Human
uuugggcccagg

SEQ ID NO: 2176016 - RNA, 14 nt, Human
uuugggcccaggga

SEQ ID NO: 2176017 - RNA, 15 nt, Human
uuugggcccagggac

SEQ ID NO: 2176018 - RNA, 20 nt, Human
uuugggcagaagggagaagg

SEQ ID NO: 2176019 - RNA, 12 nt, Human
uuuggcugcuga

SEQ ID NO: 2176020 - RNA, 13 nt, Human
uuuggcugcugaa

SEQ ID NO: 2176021 - RNA, 23 nt, Human
uuuggcucuccucagaagaaaga

SEQ ID NO: 2176022 - RNA, 20 nt, Human
uuuggcugaaauucuccugg

SEQ ID NO: 2176023 - RNA, 21 nt, Human
uuuggcugaaauucuccugga

SEQ ID NO: 2176024 - RNA, 18 nt, Human
uuuggcaaacucuccacc

SEQ ID NO: 2176025 - RNA, 14 nt, Human
uuuggauuugacau

SEQ ID NO: 2176026 - RNA, 19 nt, Human
uuuggcaaacgcuaaagag

SEQ ID NO: 2176027 - RNA, 16 nt, Human
auguauauacauuuau

SEQ ID NO: 2176028 - RNA, 20 nt, Human
auguauauacccacacacau

SEQ ID NO: 2176029 - RNA, 16 nt, Human
auguauauguguucau

SEQ ID NO: 2176030 - RNA, 19 nt, Human
auguauauuuuauaucaau

SEQ ID NO: 2176031 - RNA, 12 nt, Human
auguaucaauga

SEQ ID NO: 2176032 - RNA, 19 nt, Human
auguauauuuaaaagaaag

SEQ ID NO: 2176033 - RNA, 14 nt, Human
augucaucauacau

SEQ ID NO: 2176034 - RNA, 15 nt, Human
augucaucauacaug

SEQ ID NO: 2176035 - RNA, 21 nt, Human
augucauguguacaaaaguuu

SEQ ID NO: 2176036 - RNA, 17 nt, Human
augucauauauuacuag

SEQ ID NO: 2176037 - RNA, 20 nt, Human
augucauuaaaauaaauaaa

SEQ ID NO: 2176038 - RNA, 18 nt, Human
augucauugaguaauaua

SEQ ID NO: 2176039 - RNA, 17 nt, Human
augucauuaaaauaaau

SEQ ID NO: 2176040 - RNA, 13 nt, Human
augucauuaaaug

SEQ ID NO: 2176041 - RNA, 18 nt, Human
augucauuucauuuccua

SEQ ID NO: 2176042 - RNA, 15 nt, Human
augucauuucauuuc

SEQ ID NO: 2176043 - RNA, 16 nt, Human
augucccuuucuuggc

SEQ ID NO: 2176044 - RNA, 16 nt, Human
auguccuaaggacaca

SEQ ID NO: 2176045 - RNA, 20 nt, Human
augucccuuucuuggccagu

SEQ ID NO: 2176046 - RNA, 17 nt, Human
auguccuaaggacacac

SEQ ID NO: 2176047 - RNA, 18 nt, Human
auguccuaaggacacacu

SEQ ID NO: 2176048 - RNA, 19 nt, Human
auguccuaaggacacacua

SEQ ID NO: 2176049 - RNA, 20 nt, Human
auguccuaaggacacacuaa

SEQ ID NO: 2176050 - RNA, 13 nt, Human
augucauuuccuu

SEQ ID NO: 2176051 - RNA, 14 nt, Human
augucccuugcugu

SEQ ID NO: 2176052 - RNA, 19 nt, Human
auguccuccagaagccucu

SEQ ID NO: 2176053 - RNA, 18 nt, Human
auguccuccagaagccuc

SEQ ID NO: 2176054 - RNA, 16 nt, Human
auguccuccagaagcc

SEQ ID NO: 2176055 - RNA, 17 nt, Human
auguccucaccacaugc

SEQ ID NO: 2176056 - RNA, 15 nt, Human
auguccucaccacau

SEQ ID NO: 2176057 - RNA, 19 nt, Human
auguccuauauuggcuaaa

SEQ ID NO: 2176058 - RNA, 21 nt, Human
auguccuaaggacacacuaau

SEQ ID NO: 2176059 - RNA, 16 nt, Human
auguccaagaagccca

SEQ ID NO: 2176060 - RNA, 17 nt, Human
auguccaagaagcccag

SEQ ID NO: 2176061 - RNA, 13 nt, Human
augugacauuuau

SEQ ID NO: 2176062 - RNA, 14 nt, Human
augugacauuuaua

SEQ ID NO: 2176063 - RNA, 19 nt, Human
augugacauuuauauauug

SEQ ID NO: 2176064 - RNA, 19 nt, Human
augugacaugcgggcuggg

SEQ ID NO: 2176065 - RNA, 17 nt, Human
augucuaaaugcugaaa

SEQ ID NO: 2176066 - RNA, 11 nt, Human
augugacacau

SEQ ID NO: 2176067 - RNA, 16 nt, Human
augugacagguaaacu

SEQ ID NO: 2176068 - RNA, 21 nt, Human
augugacaauuuuguacaaau

SEQ ID NO: 2176069 - RNA, 20 nt, Human
augugacaauuuuguacaaa

SEQ ID NO: 2176070 - RNA, 18 nt, Human
augugacaauuuuguaca

SEQ ID NO: 2176071 - RNA, 11 nt, Human
augucuaaaga

SEQ ID NO: 2176072 - RNA, 13 nt, Human
augucuaaagagc

SEQ ID NO: 2176073 - RNA, 22 nt, Human
augucgugaccaacuagacauu

SEQ ID NO: 2176074 - RNA, 22 nt, Human
auguccuccagaagccucuggc

SEQ ID NO: 2176075 - RNA, 20 nt, Human
auguccuccagaagccucug

SEQ ID NO: 2176076 - RNA, 23 nt, Human
auguccuccagaagccucuggcu

SEQ ID NO: 2176077 - RNA, 15 nt, Human
augucgccucugcau

SEQ ID NO: 2176078 - RNA, 17 nt, Human
auguccuccuuguucua

SEQ ID NO: 2176079 - RNA, 13 nt, Human
augucggccucua

SEQ ID NO: 2176080 - RNA, 19 nt, Human
augucgugaccaacuagac

SEQ ID NO: 2176081 - RNA, 20 nt, Human
augucgugaccaacuagaca

SEQ ID NO: 2176082 - RNA, 21 nt, Human
augucgugaccaacuagacau

SEQ ID NO: 2176083 - RNA, 23 nt, Human
augucgucaaagcugaaauggac

SEQ ID NO: 2176084 - RNA, 17 nt, Human
augugagagguuugacu

SEQ ID NO: 2176085 - RNA, 20 nt, Human
augugauaaggaucagaaca

SEQ ID NO: 2176086 - RNA, 21 nt, Human
augugauaaguucuuaugcca

SEQ ID NO: 2176087 - RNA, 21 nt, Human
augugauacccauagcuucca

SEQ ID NO: 2176088 - RNA, 13 nt, Human
augugauauauaa

SEQ ID NO: 2176089 - RNA, 15 nt, Human
augugauauauaagu

SEQ ID NO: 2176090 - RNA, 15 nt, Human
augugagagaaagug

SEQ ID NO: 2176091 - RNA, 16 nt, Human
augugagagguuugac

SEQ ID NO: 2176092 - RNA, 14 nt, Human
augugagagaaagu

SEQ ID NO: 2176093 - RNA, 18 nt, Human
augugacuuugcaucagc

SEQ ID NO: 2176094 - RNA, 14 nt, Human
augugagacugguu

SEQ ID NO: 2176095 - RNA, 13 nt, Human
augugagaccauu

SEQ ID NO: 2176096 - RNA, 15 nt, Human
uuuguuuuaaaauua

SEQ ID NO: 2176097 - RNA, 16 nt, Human
uuuguuucugaaaggg

SEQ ID NO: 2176098 - RNA, 15 nt, Human
uuuguuucuaccucc

SEQ ID NO: 2176099 - RNA, 18 nt, Human
uuuguuucucccccuggg

SEQ ID NO: 2176100 - RNA, 15 nt, Human
uuuguuuccuuuguu

SEQ ID NO: 2176101 - RNA, 14 nt, Human
uuuguuuccuuugu

SEQ ID NO: 2176102 - RNA, 14 nt, Human
uuuguuucugaaag

SEQ ID NO: 2176103 - RNA, 20 nt, Human
uuugugauucaaucuguaaa

SEQ ID NO: 2176104 - RNA, 17 nt, Human
uuugugauuuagaacug

SEQ ID NO: 2176105 - RNA, 22 nt, Human
uuugugcauuaucuagauacug

SEQ ID NO: 2176106 - RNA, 13 nt, Human
uuuguuucauauu

SEQ ID NO: 2176107 - RNA, 13 nt, Human
uuugugccagccg

SEQ ID NO: 2176108 - RNA, 22 nt, Human
uuugugcugaauguugggacug

SEQ ID NO: 2176109 - RNA, 23 nt, Human
uuugugcuaucagacuguaggau

SEQ ID NO: 2176110 - RNA, 14 nt, Human
uuugucuuaaaaag

SEQ ID NO: 2176111 - RNA, 13 nt, Human
uuugucuuaaaaa

SEQ ID NO: 2176112 - RNA, 23 nt, Human
uuugucuuaaaaaguggaaaaau

SEQ ID NO: 2176113 - RNA, 16 nt, Human
uuugugauacaaugcu

SEQ ID NO: 2176114 - RNA, 15 nt, Human
uuugugauucaaucu

SEQ ID NO: 2176115 - RNA, 19 nt, Human
uuugugauauggagcccug

SEQ ID NO: 2176116 - RNA, 20 nt, Human
uuugugauauggagcccugu

SEQ ID NO: 2176117 - RNA, 19 nt, Human
uuugugcauuaucuagaua

SEQ ID NO: 2176118 - RNA, 15 nt, Human
uuugugauacaaugc

SEQ ID NO: 2176119 - RNA, 20 nt, Human
uuugucuuauauauauuucu

SEQ ID NO: 2176120 - RNA, 14 nt, Human
uuugucuuauauau

SEQ ID NO: 2176121 - RNA, 19 nt, Human
uuugucuuauauauauuuc

SEQ ID NO: 2176122 - RNA, 22 nt, Human
uuugugauacaaugcugugccc

SEQ ID NO: 2176123 - RNA, 18 nt, Human
uuuguacaguuugcugua

SEQ ID NO: 2176124 - RNA, 19 nt, Human
uuuguacauaguuauuuau

SEQ ID NO: 2176125 - RNA, 17 nt, Human
uuuguaguguuggagaa

SEQ ID NO: 2176126 - RNA, 18 nt, Human
uuuguacagacguaugcu

SEQ ID NO: 2176127 - RNA, 10 nt, Human
uuuguacaga

SEQ ID NO: 2176128 - RNA, 21 nt, Human
uuuguacaauugaacuuaaau

SEQ ID NO: 2176129 - RNA, 22 nt, Human
uuuguacagacguaugcuuauu

SEQ ID NO: 2176130 - RNA, 19 nt, Human
uuuguacagacguaugcuu

SEQ ID NO: 2176131 - RNA, 17 nt, Human
uuuguacaguuugcugu

SEQ ID NO: 2176132 - RNA, 14 nt, Human
uuuguacagacaac

SEQ ID NO: 2176133 - RNA, 21 nt, Human
uuuguaaguuucaggugacau

SEQ ID NO: 2176134 - RNA, 21 nt, Human
uuuguaaguuuaugucuaaag

SEQ ID NO: 2176135 - RNA, 14 nt, Human
uuuguaaguuucag

SEQ ID NO: 2176136 - RNA, 23 nt, Human
uuuguacaaaaaaaaaguuuuau

SEQ ID NO: 2176137 - RNA, 16 nt, Human
uuuguaauuuuuuuau

SEQ ID NO: 2176138 - RNA, 13 nt, Human
uuuguaaguuuau

SEQ ID NO: 2176139 - RNA, 22 nt, Human
uuuguaaguuagguaacuguau

SEQ ID NO: 2176140 - RNA, 15 nt, Human
uuuguaagaugcugg

SEQ ID NO: 2176141 - RNA, 23 nt, Human
uuuguaagaguguagaagcauuc

SEQ ID NO: 2176142 - RNA, 22 nt, Human
uuuguaagaguguagaagcauu

SEQ ID NO: 2176143 - RNA, 14 nt, Human
uuuguaagaugcug

SEQ ID NO: 2176144 - RNA, 12 nt, Human
uuuguaagagug

SEQ ID NO: 2176145 - RNA, 16 nt, Human
uuuguaagaguguaga

SEQ ID NO: 2176146 - RNA, 17 nt, Human
uuuguaagaguguagaa

SEQ ID NO: 2176147 - RNA, 18 nt, Human
uuuguaagaguguagaag

SEQ ID NO: 2176148 - RNA, 19 nt, Human
uuuguaagaguguagaagc

SEQ ID NO: 2176149 - RNA, 21 nt, Human
uuuguaagaguguagaagcau

SEQ ID NO: 2176150 - RNA, 15 nt, Human
augugaugagaggaa

SEQ ID NO: 2176151 - RNA, 19 nt, Human
augugaugaauacuguauu

SEQ ID NO: 2176152 - RNA, 17 nt, Human
augugaugaauacugua

SEQ ID NO: 2176153 - RNA, 18 nt, Human
augugauccuuuuggagu

SEQ ID NO: 2176154 - RNA, 16 nt, Human
augugauccuuuuaug

SEQ ID NO: 2176155 - RNA, 17 nt, Human
augugauccuuuuaugu

SEQ ID NO: 2176156 - RNA, 18 nt, Human
augugauccuuuuauguu

SEQ ID NO: 2176157 - RNA, 21 nt, Human
augugauccuuuuauguuauu

SEQ ID NO: 2176158 - RNA, 23 nt, Human
augugauccuuuuauguuauuua

SEQ ID NO: 2176159 - RNA, 16 nt, Human
augugauauauaagug

SEQ ID NO: 2176160 - RNA, 17 nt, Human
augugauauauaagugu

SEQ ID NO: 2176161 - RNA, 19 nt, Human
augugauauauaaguguac

SEQ ID NO: 2176162 - RNA, 21 nt, Human
augugauauauaaguguacau

SEQ ID NO: 2176163 - RNA, 22 nt, Human
augugauauauaaguguacaua

SEQ ID NO: 2176164 - RNA, 23 nt, Human
augugauauauaaguguacauau

SEQ ID NO: 2176165 - RNA, 14 nt, Human
auucacuugcauuu

SEQ ID NO: 2176166 - RNA, 12 nt, Human
auucagaaaaaa

SEQ ID NO: 2176167 - RNA, 16 nt, Human
auucacuuauauguuc

SEQ ID NO: 2176168 - RNA, 20 nt, Human
auucacugcccccagcucuu

SEQ ID NO: 2176169 - RNA, 15 nt, Human
auucacugcccccag

SEQ ID NO: 2176170 - RNA, 21 nt, Human
auucacucccacacccaagaa

SEQ ID NO: 2176171 - RNA, 19 nt, Human
auucacucuuccagaaucc

SEQ ID NO: 2176172 - RNA, 19 nt, Human
auucagcacugauuucaca

SEQ ID NO: 2176173 - RNA, 20 nt, Human
auucagcacugauuucacaa

SEQ ID NO: 2176174 - RNA, 21 nt, Human
auucagcacugauuucacaac

SEQ ID NO: 2176175 - RNA, 14 nt, Human
auucagccuggcuu

SEQ ID NO: 2176176 - RNA, 14 nt, Human
auucagcacugauu

SEQ ID NO: 2176177 - RNA, 17 nt, Human
auucagcacugauuuca

SEQ ID NO: 2176178 - RNA, 14 nt, Human
auucagauuuuaaa

SEQ ID NO: 2176179 - RNA, 19 nt, Human
auucagauuuuaaaaaguc

SEQ ID NO: 2176180 - RNA, 17 nt, Human
auucagauuguuaucua

SEQ ID NO: 2176181 - RNA, 19 nt, Human
auucagugcuucuuaaaga

SEQ ID NO: 2176182 - RNA, 17 nt, Human
auucaguucccagaauc

SEQ ID NO: 2176183 - RNA, 19 nt, Human
auucaguucccagaaucaa

SEQ ID NO: 2176184 - RNA, 16 nt, Human
auucaguucccagaau

SEQ ID NO: 2176185 - RNA, 19 nt, Human
auucaguguuaaaugugau

SEQ ID NO: 2176186 - RNA, 14 nt, Human
auucagugucacug

SEQ ID NO: 2176187 - RNA, 22 nt, Human
auucagugcuguggccugggca

SEQ ID NO: 2176188 - RNA, 21 nt, Human
auucagugcuguggccugggc

SEQ ID NO: 2176189 - RNA, 17 nt, Human
auucagugcuucuuaaa

SEQ ID NO: 2176190 - RNA, 14 nt, Human
auucagugcuucuu

SEQ ID NO: 2176191 - RNA, 19 nt, Human
auucaguggcgagaaauaa

SEQ ID NO: 2176192 - RNA, 20 nt, Human
auucagugcuguggccuggg

SEQ ID NO: 2176193 - RNA, 17 nt, Human
auucagugcuguggccu

SEQ ID NO: 2176194 - RNA, 15 nt, Human
auucagugauuacug

SEQ ID NO: 2176195 - RNA, 19 nt, Human
auucagugauuacugucaa

SEQ ID NO: 2176196 - RNA, 17 nt, Human
auucagugauuacuguc

SEQ ID NO: 2176197 - RNA, 16 nt, Human
auucaggcugcuuggg

SEQ ID NO: 2176198 - RNA, 13 nt, Human
auucaggcugcuu

SEQ ID NO: 2176199 - RNA, 11 nt, Human
auucaggcugc

SEQ ID NO: 2176200 - RNA, 22 nt, Human
auucaggacuuaacggcuccag

SEQ ID NO: 2176201 - RNA, 21 nt, Human
auucaggagaguagaacagau

SEQ ID NO: 2176202 - RNA, 22 nt, Human
auucaggagaguagaacagaua

SEQ ID NO: 2176203 - RNA, 21 nt, Human
auucagugagggucuucuuac

SEQ ID NO: 2176204 - RNA, 16 nt, Human
auucagugagggucuu

SEQ ID NO: 2176205 - RNA, 17 nt, Human
auucagguauguugccu

SEQ ID NO: 2176206 - RNA, 18 nt, Human
auucagguauguugccuu

SEQ ID NO: 2176207 - RNA, 13 nt, Human
auucagguauguu

SEQ ID NO: 2176208 - RNA, 18 nt, Human
auuccuacaaagauguuu

SEQ ID NO: 2176209 - RNA, 20 nt, Human
auuccuaaacuaucuuuuuu

SEQ ID NO: 2176210 - RNA, 20 nt, Human
auuccuaacacagcaugugu

SEQ ID NO: 2176211 - RNA, 15 nt, Human
auuccccauucuucc

SEQ ID NO: 2176212 - RNA, 13 nt, Human
auuccccauugcc

SEQ ID NO: 2176213 - RNA, 17 nt, Human
auuccccauugccuccu

SEQ ID NO: 2176214 - RNA, 20 nt, Human
auuccccauugccuccuccu

SEQ ID NO: 2176215 - RNA, 15 nt, Human
auuccuaaacuaucu

SEQ ID NO: 2176216 - RNA, 17 nt, Human
auuccuaaacuaucuuu

SEQ ID NO: 2176217 - RNA, 19 nt, Human
auuccuaaacuaucuuuuu

SEQ ID NO: 2176218 - RNA, 22 nt, Human
auuccccagguggcugacccag

SEQ ID NO: 2176219 - RNA, 21 nt, Human
auuccccagguggcugaccca

SEQ ID NO: 2176220 - RNA, 14 nt, Human
auucccaccaaggu

SEQ ID NO: 2176221 - RNA, 15 nt, Human
auucccaccaagguc

SEQ ID NO: 2176222 - RNA, 14 nt, Human
auuccccauucuuc

SEQ ID NO: 2176223 - RNA, 22 nt, Human
auuccccaggaggccagccuug

SEQ ID NO: 2176224 - RNA, 18 nt, Human
auuccagagacaucagca

SEQ ID NO: 2176225 - RNA, 18 nt, Human
auucccacaccuccacag

SEQ ID NO: 2176226 - RNA, 19 nt, Human
auucccacaccuccacagu

SEQ ID NO: 2176227 - RNA, 20 nt, Human
auuccccaggaggccagccu

SEQ ID NO: 2176228 - RNA, 18 nt, Human
auucccaagcucugcucc

SEQ ID NO: 2176229 - RNA, 19 nt, Human
auucccaagcucugcuccu

SEQ ID NO: 2176230 - RNA, 17 nt, Human
auucccaagcucugcuc

SEQ ID NO: 2176231 - RNA, 18 nt, Human
auuccagagaguggcucc

SEQ ID NO: 2176232 - RNA, 23 nt, Human
auuccagacugcuuccaauuuuc

SEQ ID NO: 2176233 - RNA, 18 nt, Human
auuccagaccugaagaau

SEQ ID NO: 2176234 - RNA, 17 nt, Human
auuccagaccugaagaa

SEQ ID NO: 2176235 - RNA, 23 nt, Human
auuccagaaugcuguacaucuau

SEQ ID NO: 2176236 - RNA, 20 nt, Human
auuccagaaugcuguacauc

SEQ ID NO: 2176237 - RNA, 18 nt, Human
auuccagaauaucuggga

SEQ ID NO: 2176238 - RNA, 14 nt, Human
auuccagaaugcug

SEQ ID NO: 2176239 - RNA, 19 nt, Human
auuccagaaugcuguacau

SEQ ID NO: 2176240 - RNA, 15 nt, Human
auuccagaaugcugu

SEQ ID NO: 2176241 - RNA, 12 nt, Human
auuccacagcug

SEQ ID NO: 2176242 - RNA, 18 nt, Human
auuccaauaugaugacuc

SEQ ID NO: 2176243 - RNA, 17 nt, Human
auuccaauaugaugacu

SEQ ID NO: 2176244 - RNA, 16 nt, Human
auuccagaauaucugg

SEQ ID NO: 2176245 - RNA, 17 nt, Human
auuccaagugauugaaa

SEQ ID NO: 2176246 - RNA, 13 nt, Human
auuaguuuugauu

SEQ ID NO: 2176247 - RNA, 21 nt, Human
auuauaacugaaggagaaggu

SEQ ID NO: 2176248 - RNA, 15 nt, Human
auuauaaauuauguu

SEQ ID NO: 2176249 - RNA, 15 nt, Human
auuauaacuuaaaau

SEQ ID NO: 2176250 - RNA, 22 nt, Human
auuauaacuuaaaaaaaugaca

SEQ ID NO: 2176251 - RNA, 15 nt, Human
auuauaacuuaaaaa

SEQ ID NO: 2176252 - RNA, 19 nt, Human
auuauaucaauuuccucau

SEQ ID NO: 2176253 - RNA, 16 nt, Human
auuauaucuaauuauu

SEQ ID NO: 2176254 - RNA, 20 nt, Human
auuauauggcuugaguuuaa

SEQ ID NO: 2176255 - RNA, 14 nt, Human
auuauucaguguca

SEQ ID NO: 2176256 - RNA, 13 nt, Human
auuauucaguguc

SEQ ID NO: 2176257 - RNA, 22 nt, Human
auucaaacuggggccuccagaa

SEQ ID NO: 2176258 - RNA, 19 nt, Human
auucaaagcaccaaaauaa

SEQ ID NO: 2176259 - RNA, 17 nt, Human
auucaaagcucuauuaa

SEQ ID NO: 2176260 - RNA, 19 nt, Human
auucaaacuggggccucca

SEQ ID NO: 2176261 - RNA, 17 nt, Human
auucaaacuggggccuc

SEQ ID NO: 2176262 - RNA, 22 nt, Human
auucaaacagucucaggaaauc

SEQ ID NO: 2176263 - RNA, 14 nt, Human
auucacccagacag

SEQ ID NO: 2176264 - RNA, 19 nt, Human
auucacccagacagcuccc

SEQ ID NO: 2176265 - RNA, 22 nt, Human
auucacccccuuuccuggacac

SEQ ID NO: 2176266 - RNA, 19 nt, Human
auucaccugccccaacucu

SEQ ID NO: 2176267 - RNA, 13 nt, Human
auucaccugagca

SEQ ID NO: 2176268 - RNA, 16 nt, Human
auucacccccuuuccu

SEQ ID NO: 2176269 - RNA, 16 nt, Human
auucacccccaaacag

SEQ ID NO: 2176270 - RNA, 23 nt, Human
auucaccuuccagugucucggag

SEQ ID NO: 2176271 - RNA, 15 nt, Human
auucacucuuccaga

SEQ ID NO: 2176272 - RNA, 12 nt, Human
auucacucccac

SEQ ID NO: 2176273 - RNA, 13 nt, Human
auucacucccaca

SEQ ID NO: 2176274 - RNA, 20 nt, Human
auucacuauuggcugggagu

SEQ ID NO: 2176275 - RNA, 14 nt, Human
auucacuauuggcu

SEQ ID NO: 2176276 - RNA, 21 nt, Human
auucacucauacaucuggccg

SEQ ID NO: 2176277 - RNA, 12 nt, Human
auuauugcauua

SEQ ID NO: 2176278 - RNA, 15 nt, Human
auuauucagugucac

SEQ ID NO: 2176279 - RNA, 13 nt, Human
auuauugcuguug

SEQ ID NO: 2176280 - RNA, 14 nt, Human
auuauuggaauuaa

SEQ ID NO: 2176281 - RNA, 18 nt, Human
auuauuggaauuaaccug

SEQ ID NO: 2176282 - RNA, 23 nt, Human
auuauuguguguuauuuaaauga

SEQ ID NO: 2176283 - RNA, 18 nt, Human
auuauuguugcauuaaaa

SEQ ID NO: 2176284 - RNA, 13 nt, Human
auuauuguauuua

SEQ ID NO: 2176285 - RNA, 16 nt, Human
auuauuguauuuauuc

SEQ ID NO: 2176286 - RNA, 19 nt, Human
auuauugugauuucccgug

SEQ ID NO: 2176287 - RNA, 11 nt, Human
auuauuuaaac

SEQ ID NO: 2176288 - RNA, 12 nt, Human
auuauuuaaaca

SEQ ID NO: 2176289 - RNA, 13 nt, Human
auuauuuuuucag

SEQ ID NO: 2176290 - RNA, 14 nt, Human
auuauuuuuucaga

SEQ ID NO: 2176291 - RNA, 15 nt, Human
auuauuuuuucagac

SEQ ID NO: 2176292 - RNA, 16 nt, Human
auuauuuuuucagacc

SEQ ID NO: 2176293 - RNA, 21 nt, Human
auuauuuuuucagaccgaaaa

SEQ ID NO: 2176294 - RNA, 19 nt, Human
auuauuuuuccacuuuguu

SEQ ID NO: 2176295 - RNA, 22 nt, Human
auuauuuuuccacuuuguucuu

SEQ ID NO: 2176296 - RNA, 12 nt, Human
auuauuuaauaa

SEQ ID NO: 2176297 - RNA, 13 nt, Human
auuauuuaauaaa

SEQ ID NO: 2176298 - RNA, 21 nt, Human
auuauuuaauaaaaaaacaau

SEQ ID NO: 2176299 - RNA, 17 nt, Human
auucaaaaaguguuuau

SEQ ID NO: 2176300 - RNA, 14 nt, Human
auucaaaaaguguu

SEQ ID NO: 2176301 - RNA, 16 nt, Human
auucaaaaaguguuua

SEQ ID NO: 2176302 - RNA, 17 nt, Human
auuauuuuuucagaccg

SEQ ID NO: 2176303 - RNA, 19 nt, Human
auuauuuuuucagaccgaa

SEQ ID NO: 2176304 - RNA, 15 nt, Human
auucagccuggcuuc

SEQ ID NO: 2176305 - RNA, 19 nt, Human
uuuuuauuuguuugugcau

SEQ ID NO: 2176306 - RNA, 12 nt, Human
uuuuuauuucug

SEQ ID NO: 2176307 - RNA, 17 nt, Human
uuuuuauauuugaaaua

SEQ ID NO: 2176308 - RNA, 16 nt, Human
uuuuucaauauuuauu

SEQ ID NO: 2176309 - RNA, 19 nt, Human
uuuuucaaagauguguugc

SEQ ID NO: 2176310 - RNA, 23 nt, Human
uuuuugaaggcagaaagcaaaau

SEQ ID NO: 2176311 - RNA, 22 nt, Human
uuuuugaaggcagaaagcaaaa

SEQ ID NO: 2176312 - RNA, 12 nt, Human
uuuuucaauuaa

SEQ ID NO: 2176313 - RNA, 11 nt, Human
uuuuugaagug

SEQ ID NO: 2176314 - RNA, 12 nt, Human
uuuuugaagugu

SEQ ID NO: 2176315 - RNA, 14 nt, Human
uuuuugaaguguag

SEQ ID NO: 2176316 - RNA, 24 nt, Human
uuuuugaaguguaggcagacacag

SEQ ID NO: 2176317 - RNA, 15 nt, Human
uuuuugaagcuguau

SEQ ID NO: 2176318 - RNA, 21 nt, Human
uuuuuggagaagguuaucaaa

SEQ ID NO: 2176319 - RNA, 22 nt, Human
uuuuuggagggguuuaugcuca

SEQ ID NO: 2176320 - RNA, 15 nt, Human
uuuuuggaggugcuu

SEQ ID NO: 2176321 - RNA, 22 nt, Human
uuuuuggaagaggacuccuuaa

SEQ ID NO: 2176322 - RNA, 18 nt, Human
uuuuugcaggagcaguau

SEQ ID NO: 2176323 - RNA, 22 nt, Human
uuuuugcaccccaugcuguuga

SEQ ID NO: 2176324 - RNA, 23 nt, Human
uuuuugcaccccaugcuguugau

SEQ ID NO: 2176325 - RNA, 20 nt, Human
uuuuugcacauguuuccucu

SEQ ID NO: 2176326 - RNA, 19 nt, Human
uuuuugcaccccaugcugu

SEQ ID NO: 2176327 - RNA, 20 nt, Human
uuuuugcaccccaugcuguu

SEQ ID NO: 2176328 - RNA, 21 nt, Human
uuuuugcauggcacuugcauc

SEQ ID NO: 2176329 - RNA, 14 nt, Human
uuuuugccuucauu

SEQ ID NO: 2176330 - RNA, 17 nt, Human
uuuuugcauuuaaaaca

SEQ ID NO: 2176331 - RNA, 14 nt, Human
uuuuugauagcuuu

SEQ ID NO: 2176332 - RNA, 21 nt, Human
uuuuugauaaaguuucucaga

SEQ ID NO: 2176333 - RNA, 18 nt, Human
uuuuugcaagugaagguu

SEQ ID NO: 2176334 - RNA, 15 nt, Human
uuuuugcaagugaag

SEQ ID NO: 2176335 - RNA, 20 nt, Human
uuuuugaggcuaugaauaua

SEQ ID NO: 2176336 - RNA, 12 nt, Human
uuuuuguauguu

SEQ ID NO: 2176337 - RNA, 11 nt, Human
uuuuuguauuu

SEQ ID NO: 2176338 - RNA, 15 nt, Human
auuaagccuuccaca

SEQ ID NO: 2176339 - RNA, 16 nt, Human
auuaagcccucuucca

SEQ ID NO: 2176340 - RNA, 17 nt, Human
auuaagcccucuuccau

SEQ ID NO: 2176341 - RNA, 13 nt, Human
auuaaggaagaca

SEQ ID NO: 2176342 - RNA, 20 nt, Human
auuaaggauuuuaugcuuua

SEQ ID NO: 2176343 - RNA, 17 nt, Human
auuaaggauuuuaugcu

SEQ ID NO: 2176344 - RNA, 15 nt, Human
auuaaggauuuuaug

SEQ ID NO: 2176345 - RNA, 19 nt, Human
auuaaguacuauguaucaa

SEQ ID NO: 2176346 - RNA, 17 nt, Human
auuaaguaucugacauc

SEQ ID NO: 2176347 - RNA, 18 nt, Human
auuaaguacuauguauca

SEQ ID NO: 2176348 - RNA, 16 nt, Human
uuuuuggggauaugcu

SEQ ID NO: 2176349 - RNA, 12 nt, Human
uuuuuggggaua

SEQ ID NO: 2176350 - RNA, 22 nt, Human
uuuuugggaaaagaaaagucaa

SEQ ID NO: 2176351 - RNA, 20 nt, Human
uuuuuggcuuuagacacugg

SEQ ID NO: 2176352 - RNA, 20 nt, Human
uuuuuggaggugcuuaagca

SEQ ID NO: 2176353 - RNA, 14 nt, Human
uuuuuguaaagugu

SEQ ID NO: 2176354 - RNA, 16 nt, Human
uuuuuguagccuuccu

SEQ ID NO: 2176355 - RNA, 18 nt, Human
uuuuugguugucaauauu

SEQ ID NO: 2176356 - RNA, 10 nt, Human
uuuuuguaaa

SEQ ID NO: 2176357 - RNA, 16 nt, Human
uuuuuguaaagugugg

SEQ ID NO: 2176358 - RNA, 14 nt, Human
uuuuguuccccucc

SEQ ID NO: 2176359 - RNA, 16 nt, Human
uuuuguuaccuuuaug

SEQ ID NO: 2176360 - RNA, 15 nt, Human
uuuuguuccccuccu

SEQ ID NO: 2176361 - RNA, 19 nt, Human
uuuuguuccccuccuccac

SEQ ID NO: 2176362 - RNA, 19 nt, Human
uuuuguucuuaauugcacu

SEQ ID NO: 2176363 - RNA, 23 nt, Human
uuuuguucgcauggucacacacu

SEQ ID NO: 2176364 - RNA, 16 nt, Human
uuuuguuuuugucuua

SEQ ID NO: 2176365 - RNA, 16 nt, Human
uuuuguuuuaaaauua

SEQ ID NO: 2176366 - RNA, 15 nt, Human
uuuuguuuuggcuga

SEQ ID NO: 2176367 - RNA, 15 nt, Human
uuuuguuuucauuau

SEQ ID NO: 2176368 - RNA, 12 nt, Human
uuuuuaauuuug

SEQ ID NO: 2176369 - RNA, 18 nt, Human
uuuuuaauuuuguauuuu

SEQ ID NO: 2176370 - RNA, 18 nt, Human
uuuuuacaaguuuuaaau

SEQ ID NO: 2176371 - RNA, 16 nt, Human
uuuuuaauuuauuuau

SEQ ID NO: 2176372 - RNA, 21 nt, Human
uuuuuaauuuauuauugaaau

SEQ ID NO: 2176373 - RNA, 23 nt, Human
uuuuuaauuuacaaaaauauaaa

SEQ ID NO: 2176374 - RNA, 18 nt, Human
uuuuuaauuguuguuucu

SEQ ID NO: 2176375 - RNA, 20 nt, Human
uuuuuaauuguuguuucuuu

SEQ ID NO: 2176376 - RNA, 17 nt, Human
uuuuguuuuucauucag

SEQ ID NO: 2176377 - RNA, 12 nt, Human
uuuuuaauuauu

SEQ ID NO: 2176378 - RNA, 19 nt, Human
uuuuuaauucaccaaagua

SEQ ID NO: 2176379 - RNA, 21 nt, Human
uuuuuaaugugcuguguaaag

SEQ ID NO: 2176380 - RNA, 14 nt, Human
uuuuuauauauaca

SEQ ID NO: 2176381 - RNA, 19 nt, Human
uuuuuacaaguuuuaaaua

SEQ ID NO: 2176382 - RNA, 13 nt, Human
uuuuuacaauaaa

SEQ ID NO: 2176383 - RNA, 15 nt, Human
uuuuuauauuuaguu

SEQ ID NO: 2176384 - RNA, 21 nt, Human
uuuugugaaguuuaauugacu

SEQ ID NO: 2176385 - RNA, 14 nt, Human
uuuugugaacuuuu

SEQ ID NO: 2176386 - RNA, 19 nt, Human
uuuugugaauggauuggau

SEQ ID NO: 2176387 - RNA, 14 nt, Human
uuuugugaagacug

SEQ ID NO: 2176388 - RNA, 23 nt, Human
uuuugugaauggauuggauuauu

SEQ ID NO: 2176389 - RNA, 23 nt, Human
uuuugugacuauauagagauguu

SEQ ID NO: 2176390 - RNA, 24 nt, Human
uuuugugaaaugaaaacauguaau

SEQ ID NO: 2176391 - RNA, 22 nt, Human
uuuugugaaaugaaaacaugua

SEQ ID NO: 2176392 - RNA, 20 nt, Human
uuuuggagaagguuaucaaa

SEQ ID NO: 2176393 - RNA, 13 nt, Human
uuuuggaggugcu

SEQ ID NO: 2176394 - RNA, 15 nt, Human
uuuuggaggugcuua

SEQ ID NO: 2176395 - RNA, 14 nt, Human
uuuugugaagcaaa

SEQ ID NO: 2176396 - RNA, 13 nt, Human
uuuuguguacagu

SEQ ID NO: 2176397 - RNA, 21 nt, Human
uuuuguggucauuaagcauug

SEQ ID NO: 2176398 - RNA, 13 nt, Human
uuuugugagaugu

SEQ ID NO: 2176399 - RNA, 23 nt, Human
uuuugugcauuaucuagauacug

SEQ ID NO: 2176400 - RNA, 18 nt, Human
auuaaacagauuuuuaca

SEQ ID NO: 2176401 - RNA, 20 nt, Human
auuaaaaugauuguaaaaua

SEQ ID NO: 2176402 - RNA, 13 nt, Human
auuaaaaugaaua

SEQ ID NO: 2176403 - RNA, 15 nt, Human
auuaaaaucuuaaac

SEQ ID NO: 2176404 - RNA, 18 nt, Human
auuaaaaugauuguaaaa

SEQ ID NO: 2176405 - RNA, 19 nt, Human
auuaaaaugauuguaaaau

SEQ ID NO: 2176406 - RNA, 13 nt, Human
auuaaaaucuuaa

SEQ ID NO: 2176407 - RNA, 12 nt, Human
auuaaaaucuua

SEQ ID NO: 2176408 - RNA, 11 nt, Human
auuaaaaucuu

SEQ ID NO: 2176409 - RNA, 22 nt, Human
auuaaaauauggcuauaaauau

SEQ ID NO: 2176410 - RNA, 16 nt, Human
auuaaaauccucaauc

SEQ ID NO: 2176411 - RNA, 14 nt, Human
auuaaaauccucaa

SEQ ID NO: 2176412 - RNA, 18 nt, Human
uuuugcuguuuccuuuua

SEQ ID NO: 2176413 - RNA, 21 nt, Human
uuuugcuguuguuucuaaaca

SEQ ID NO: 2176414 - RNA, 17 nt, Human
uuuugcuuuuucugacu

SEQ ID NO: 2176415 - RNA, 21 nt, Human
uuuugcuuuuggcaaaacucu

SEQ ID NO: 2176416 - RNA, 21 nt, Human
uuuugcuuucgaacugcuagu

SEQ ID NO: 2176417 - RNA, 20 nt, Human
uuuugcuuuuucugacucca

SEQ ID NO: 2176418 - RNA, 13 nt, Human
auuagagaagaga

SEQ ID NO: 2176419 - RNA, 22 nt, Human
auuagacuguaggaagaguagc

SEQ ID NO: 2176420 - RNA, 13 nt, Human
auuagacuccucc

SEQ ID NO: 2176421 - RNA, 16 nt, Human
auuagacuccuccucc

SEQ ID NO: 2176422 - RNA, 15 nt, Human
auuagacuccuccuc

SEQ ID NO: 2176423 - RNA, 14 nt, Human
auuacuucugcuac

SEQ ID NO: 2176424 - RNA, 12 nt, Human
auuacuucugcu

SEQ ID NO: 2176425 - RNA, 13 nt, Human
auuacuucugcua

SEQ ID NO: 2176426 - RNA, 18 nt, Human
auuacugucugguuuuaa

SEQ ID NO: 2176427 - RNA, 14 nt, Human
auuaaucaucuaua

SEQ ID NO: 2176428 - RNA, 19 nt, Human
auuaaucaucuauaaagaa

SEQ ID NO: 2176429 - RNA, 15 nt, Human
auuaaucaugaaugu

SEQ ID NO: 2176430 - RNA, 20 nt, Human
auuacuguuugucuucuccc

SEQ ID NO: 2176431 - RNA, 13 nt, Human
auuacuguuuguc

SEQ ID NO: 2176432 - RNA, 15 nt, Human
auuacugguccaaaa

SEQ ID NO: 2176433 - RNA, 15 nt, Human
auuacuguaagaaaa

SEQ ID NO: 2176434 - RNA, 16 nt, Human
auuacuguaagaaaau

SEQ ID NO: 2176435 - RNA, 14 nt, Human
auuaauauuuuaau

SEQ ID NO: 2176436 - RNA, 19 nt, Human
auuaauauucauuguauaa

SEQ ID NO: 2176437 - RNA, 17 nt, Human
auuaauauucauuguau

SEQ ID NO: 2176438 - RNA, 20 nt, Human
auuaagcccucuuccaucau

SEQ ID NO: 2176439 - RNA, 17 nt, Human
auuaauauuccucaguu

SEQ ID NO: 2176440 - RNA, 16 nt, Human
auuaauauucauugua

SEQ ID NO: 2176441 - RNA, 24 nt, Human
auuaagucugugagauucauucau

SEQ ID NO: 2176442 - RNA, 13 nt, Human
auuaaguuaucuu

SEQ ID NO: 2176443 - RNA, 16 nt, Human
auuaaucacuauuguu

SEQ ID NO: 2176444 - RNA, 13 nt, Human
auuaaucacuauu

SEQ ID NO: 2176445 - RNA, 23 nt, Human
auuaaucaaucaucugugugaaa

SEQ ID NO: 2176446 - RNA, 21 nt, Human
uugugucaaugggcaaugaca

SEQ ID NO: 2176447 - RNA, 23 nt, Human
uuguguauuuacgcuuugauuca

SEQ ID NO: 2176448 - RNA, 22 nt, Human
uuguguauuuacgcuuugauuc

SEQ ID NO: 2176449 - RNA, 20 nt, Human
uuguguauuuacgcuuugau

SEQ ID NO: 2176450 - RNA, 19 nt, Human
uugugucauguuuaagaaa

SEQ ID NO: 2176451 - RNA, 21 nt, Human
uuguguaucguaaccagccag

SEQ ID NO: 2176452 - RNA, 18 nt, Human
uugugucccaugaucccu

SEQ ID NO: 2176453 - RNA, 21 nt, Human
uuguguauuuaacagggaggg

SEQ ID NO: 2176454 - RNA, 19 nt, Human
uuguguauuuacgcuuuga

SEQ ID NO: 2176455 - RNA, 13 nt, Human
uuguguauuuaac

SEQ ID NO: 2176456 - RNA, 14 nt, Human
uuguguauuuaaca

SEQ ID NO: 2176457 - RNA, 20 nt, Human
uuguguauccauuaucaugu

SEQ ID NO: 2176458 - RNA, 21 nt, Human
uuguguauccauuaucaugug

SEQ ID NO: 2176459 - RNA, 22 nt, Human
uuguguauccauuaucaugugu

SEQ ID NO: 2176460 - RNA, 23 nt, Human
uuguguauccauuaucaugugua

SEQ ID NO: 2176461 - RNA, 20 nt, Human
uuguguaucguaaccagcca

SEQ ID NO: 2176462 - RNA, 13 nt, Human
uugugucugcagg

SEQ ID NO: 2176463 - RNA, 13 nt, Human
uugugucuguaca

SEQ ID NO: 2176464 - RNA, 14 nt, Human
uugugucuguacac

SEQ ID NO: 2176465 - RNA, 15 nt, Human
uugugucuguacacg

SEQ ID NO: 2176466 - RNA, 20 nt, Human
uuguucaauaauaaauauuu

SEQ ID NO: 2176467 - RNA, 15 nt, Human
uuguucaauuagaau

SEQ ID NO: 2176468 - RNA, 13 nt, Human
uuguucaauuaga

SEQ ID NO: 2176469 - RNA, 17 nt, Human
uugugucugcaggauug

SEQ ID NO: 2176470 - RNA, 15 nt, Human
uugugucuuuugcau

SEQ ID NO: 2176471 - RNA, 22 nt, Human
uuguucaauaauaaauauuuuu

SEQ ID NO: 2176472 - RNA, 13 nt, Human
uuguucacacucu

SEQ ID NO: 2176473 - RNA, 15 nt, Human
uuguguacagugugu

SEQ ID NO: 2176474 - RNA, 19 nt, Human
uuguguaauagaaaacuga

SEQ ID NO: 2176475 - RNA, 21 nt, Human
uuguguaauagaaaacugaaa

SEQ ID NO: 2176476 - RNA, 15 nt, Human
uuguguacaguuauu

SEQ ID NO: 2176477 - RNA, 14 nt, Human
uugugauucugccu

SEQ ID NO: 2176478 - RNA, 23 nt, Human
uugugauuucccguggccccagc

SEQ ID NO: 2176479 - RNA, 23 nt, Human
uugugauucaaucuguaaacugu

SEQ ID NO: 2176480 - RNA, 19 nt, Human
uugugauucaaucuguaaa

SEQ ID NO: 2176481 - RNA, 17 nt, Human
uugugauuauuucacuu

SEQ ID NO: 2176482 - RNA, 18 nt, Human
uugugauuauuucacuuu

SEQ ID NO: 2176483 - RNA, 22 nt, Human
uugugauuauuucacuuuagau

SEQ ID NO: 2176484 - RNA, 23 nt, Human
uugugauuauuucacuuuagaug

SEQ ID NO: 2176485 - RNA, 23 nt, Human
uugugaucagaccauaauguuac

SEQ ID NO: 2176486 - RNA, 17 nt, Human
uugugauauggagcccu

SEQ ID NO: 2176487 - RNA, 19 nt, Human
uugugauagcacuuucuac

SEQ ID NO: 2176488 - RNA, 16 nt, Human
uugugauagcacuuuc

SEQ ID NO: 2176489 - RNA, 20 nt, Human
uugugauagcuaacauuuua

SEQ ID NO: 2176490 - RNA, 21 nt, Human
uugugauagcacuuucuacaa

SEQ ID NO: 2176491 - RNA, 16 nt, Human
uugugauauggagccc

SEQ ID NO: 2176492 - RNA, 18 nt, Human
uugugaugucccaacuug

SEQ ID NO: 2176493 - RNA, 22 nt, Human
uugugaugucccaacuuguaaa

SEQ ID NO: 2176494 - RNA, 12 nt, Human
uugugauguguc

SEQ ID NO: 2176495 - RNA, 18 nt, Human
uugugaugugaguugcac

SEQ ID NO: 2176496 - RNA, 16 nt, Human
uugugaccugaaguuc

SEQ ID NO: 2176497 - RNA, 16 nt, Human
uugugaccaaguuaua

SEQ ID NO: 2176498 - RNA, 16 nt, Human
uugugaggaaagucau

SEQ ID NO: 2176499 - RNA, 17 nt, Human
uugugaggaaagucauu

SEQ ID NO: 2176500 - RNA, 13 nt, Human
uugugaggaagcc

SEQ ID NO: 2176501 - RNA, 19 nt, Human
uugugacagauuauacaga

SEQ ID NO: 2176502 - RNA, 15 nt, Human
uugugaauggauugg

SEQ ID NO: 2176503 - RNA, 13 nt, Human
uugugaauggauu

SEQ ID NO: 2176504 - RNA, 14 nt, Human
uugugaauggauug

SEQ ID NO: 2176505 - RNA, 21 nt, Human
uugugaauggauuggauuauu

SEQ ID NO: 2176506 - RNA, 20 nt, Human
uugugauacaaugcugugcc

SEQ ID NO: 2176507 - RNA, 15 nt, Human
uugugauagcacuuu

SEQ ID NO: 2176508 - RNA, 22 nt, Human
uugugaggaaagucauuggcuu

SEQ ID NO: 2176509 - RNA, 17 nt, Human
uugugaggaagccgcug

SEQ ID NO: 2176510 - RNA, 18 nt, Human
uugugaggaagccgcugg

SEQ ID NO: 2176511 - RNA, 11 nt, Human
uuguccccagu

SEQ ID NO: 2176512 - RNA, 15 nt, Human
uuguccccacacucc

SEQ ID NO: 2176513 - RNA, 17 nt, Human
uuguccccacacuccua

SEQ ID NO: 2176514 - RNA, 15 nt, Human
uuguccccgacccuu

SEQ ID NO: 2176515 - RNA, 16 nt, Human
uuguccccgacccuug

SEQ ID NO: 2176516 - RNA, 20 nt, Human
uugucccacucaagccaagc

SEQ ID NO: 2176517 - RNA, 13 nt, Human
uuguccagcgccu

SEQ ID NO: 2176518 - RNA, 23 nt, Human
uugucccauuucuaaaggccucu

SEQ ID NO: 2176519 - RNA, 21 nt, Human
uugucccagaggcugccccac

SEQ ID NO: 2176520 - RNA, 23 nt, Human
uuguccccaaauccgaaccuccu

SEQ ID NO: 2176521 - RNA, 11 nt, Human
uuguccccaca

SEQ ID NO: 2176522 - RNA, 12 nt, Human
uuguccccacac

SEQ ID NO: 2176523 - RNA, 19 nt, Human
uugucccacuaucugggug

SEQ ID NO: 2176524 - RNA, 19 nt, Human
uuguccagcugagcgccag

SEQ ID NO: 2176525 - RNA, 13 nt, Human
uuguccauugucc

SEQ ID NO: 2176526 - RNA, 18 nt, Human
uuguccccaccgcagaca

SEQ ID NO: 2176527 - RNA, 20 nt, Human
uuguccccaccgcagacagg

SEQ ID NO: 2176528 - RNA, 16 nt, Human
augagucccaguggga

SEQ ID NO: 2176529 - RNA, 18 nt, Human
augaguuggcugggaaua

SEQ ID NO: 2176530 - RNA, 23 nt, Human
augaguccccuguuuguuucuga

SEQ ID NO: 2176531 - RNA, 15 nt, Human
augagucccaguggg

SEQ ID NO: 2176532 - RNA, 19 nt, Human
augagucaaugugcagugu

SEQ ID NO: 2176533 - RNA, 16 nt, Human
augagucaaugugcag

SEQ ID NO: 2176534 - RNA, 17 nt, Human
augagucaaugugcagu

SEQ ID NO: 2176535 - RNA, 13 nt, Human
augaguccccugu

SEQ ID NO: 2176536 - RNA, 23 nt, Human
augaguuguuuucagacucagac

SEQ ID NO: 2176537 - RNA, 22 nt, Human
augaguuguuuucagacucaga

SEQ ID NO: 2176538 - RNA, 20 nt, Human
augaguuguuuucagacuca

SEQ ID NO: 2176539 - RNA, 19 nt, Human
augaguuguuuucagacuc

SEQ ID NO: 2176540 - RNA, 15 nt, Human
augaguuucauagcu

SEQ ID NO: 2176541 - RNA, 20 nt, Human
augaguuucauagcuaagaa

SEQ ID NO: 2176542 - RNA, 22 nt, Human
augaguuugcccugguuucacu

SEQ ID NO: 2176543 - RNA, 15 nt, Human
augaguuugcccugg

SEQ ID NO: 2176544 - RNA, 14 nt, Human
augaguuugcuuau

SEQ ID NO: 2176545 - RNA, 20 nt, Human
uugucaauaaaauccauaca

SEQ ID NO: 2176546 - RNA, 17 nt, Human
uugucacacacuuuggc

SEQ ID NO: 2176547 - RNA, 20 nt, Human
uugucaagucucugcuggcc

SEQ ID NO: 2176548 - RNA, 14 nt, Human
uugucaauauuaaa

SEQ ID NO: 2176549 - RNA, 18 nt, Human
uugucaauauuaaauaca

SEQ ID NO: 2176550 - RNA, 19 nt, Human
uugucaauauuaaauacag

SEQ ID NO: 2176551 - RNA, 19 nt, Human
uugucaauauuuaaacaug

SEQ ID NO: 2176552 - RNA, 23 nt, Human
uugucacaauccuaacacauuau

SEQ ID NO: 2176553 - RNA, 20 nt, Human
uugucagacuuuaaagaaua

SEQ ID NO: 2176554 - RNA, 18 nt, Human
uugucagacuuuaaagaa

SEQ ID NO: 2176555 - RNA, 14 nt, Human
uugucagacuuuaa

SEQ ID NO: 2176556 - RNA, 12 nt, Human
uugucagacuuu

SEQ ID NO: 2176557 - RNA, 12 nt, Human
uugucagcuacu

SEQ ID NO: 2176558 - RNA, 18 nt, Human
uugucagauaugauaugu

SEQ ID NO: 2176559 - RNA, 15 nt, Human
uugucagagcuggga

SEQ ID NO: 2176560 - RNA, 13 nt, Human
uugucagagcugg

SEQ ID NO: 2176561 - RNA, 15 nt, Human
uugucaguaucugua

SEQ ID NO: 2176562 - RNA, 15 nt, Human
uugucagugacagua

SEQ ID NO: 2176563 - RNA, 21 nt, Human
uugucauauaagauucauauu

SEQ ID NO: 2176564 - RNA, 21 nt, Human
uuguccaacccgaggcccgca

SEQ ID NO: 2176565 - RNA, 19 nt, Human
uuguccaauuguugacagu

SEQ ID NO: 2176566 - RNA, 22 nt, Human
uuguccaauuguugacaguucu

SEQ ID NO: 2176567 - RNA, 14 nt, Human
uuguccacccaccu

SEQ ID NO: 2176568 - RNA, 22 nt, Human
uuguagccuuccuccacauccu

SEQ ID NO: 2176569 - RNA, 16 nt, Human
uuguagccuuccucca

SEQ ID NO: 2176570 - RNA, 14 nt, Human
uuguacaaaauaaa

SEQ ID NO: 2176571 - RNA, 16 nt, Human
uuguagcauuucuuga

SEQ ID NO: 2176572 - RNA, 12 nt, Human
uuguacaaaaua

SEQ ID NO: 2176573 - RNA, 16 nt, Human
uuguacaaaaaaaaag

SEQ ID NO: 2176574 - RNA, 22 nt, Human
uuguacaaaaaaaaaguuuuau

SEQ ID NO: 2176575 - RNA, 23 nt, Human
uuguaauuuuuuuaauuuacaaa

SEQ ID NO: 2176576 - RNA, 15 nt, Human
augagguacugagag

SEQ ID NO: 2176577 - RNA, 18 nt, Human
augagguacugagaguga

SEQ ID NO: 2176578 - RNA, 17 nt, Human
augagguacugagagug

SEQ ID NO: 2176579 - RNA, 22 nt, Human
augaggucagagccugcaguua

SEQ ID NO: 2176580 - RNA, 22 nt, Human
augagguucaacuguugauugc

SEQ ID NO: 2176581 - RNA, 18 nt, Human
augagguugcuuacuaag

SEQ ID NO: 2176582 - RNA, 15 nt, Human
augaguaaaggagua

SEQ ID NO: 2176583 - RNA, 19 nt, Human
augaggucagagccugcag

SEQ ID NO: 2176584 - RNA, 20 nt, Human
augaggucagagccugcagu

SEQ ID NO: 2176585 - RNA, 15 nt, Human
augaggucagagccu

SEQ ID NO: 2176586 - RNA, 21 nt, Human
augagguacaaccuguucugc

SEQ ID NO: 2176587 - RNA, 16 nt, Human
augaggucagagccug

SEQ ID NO: 2176588 - RNA, 18 nt, Human
augaggucagagccugca

SEQ ID NO: 2176589 - RNA, 19 nt, Human
augcaaaaauuagccgggc

SEQ ID NO: 2176590 - RNA, 23 nt, Human
augcaaaagguucacuaaagcag

SEQ ID NO: 2176591 - RNA, 12 nt, Human
augcaaaaagaa

SEQ ID NO: 2176592 - RNA, 15 nt, Human
augcaaagaggcaag

SEQ ID NO: 2176593 - RNA, 14 nt, Human
augcaaagaggcaa

SEQ ID NO: 2176594 - RNA, 20 nt, Human
augcaaaaguucugacuuga

SEQ ID NO: 2176595 - RNA, 21 nt, Human
augcaaaaguucugacuugac

SEQ ID NO: 2176596 - RNA, 21 nt, Human
augcaaaauaauaccugucca

SEQ ID NO: 2176597 - RNA, 21 nt, Human
augauuuuuuuuucauacacu

SEQ ID NO: 2176598 - RNA, 17 nt, Human
augauuuuuuuuucaua

SEQ ID NO: 2176599 - RNA, 22 nt, Human
augauuuuuagaugagauuguu

SEQ ID NO: 2176600 - RNA, 15 nt, Human
augauuuuugucauc

SEQ ID NO: 2176601 - RNA, 20 nt, Human
augauuuccaaagagaaaaa

SEQ ID NO: 2176602 - RNA, 13 nt, Human
augauuuccuuga

SEQ ID NO: 2176603 - RNA, 16 nt, Human
augauuuccuugaaug

SEQ ID NO: 2176604 - RNA, 15 nt, Human
augauuuccuugaau

SEQ ID NO: 2176605 - RNA, 20 nt, Human
augauuuccuugaauguggc

SEQ ID NO: 2176606 - RNA, 19 nt, Human
augauuuccuugaaugugg

SEQ ID NO: 2176607 - RNA, 18 nt, Human
augauuuccuugaaugug

SEQ ID NO: 2176608 - RNA, 17 nt, Human
augauuuccuugaaugu

SEQ ID NO: 2176609 - RNA, 20 nt, Human
augauuuauaguuuguacau

SEQ ID NO: 2176610 - RNA, 14 nt, Human
augauuuauaguuu

SEQ ID NO: 2176611 - RNA, 15 nt, Human
augauuuauaguuug

SEQ ID NO: 2176612 - RNA, 14 nt, Human
augauuucauuuca

SEQ ID NO: 2176613 - RNA, 13 nt, Human
augauuucauuca

SEQ ID NO: 2176614 - RNA, 22 nt, Human
augauuuaauaaaauaauucua

SEQ ID NO: 2176615 - RNA, 13 nt, Human
augauuuauaguu

SEQ ID NO: 2176616 - RNA, 18 nt, Human
augauuuaauaaaauaau

SEQ ID NO: 2176617 - RNA, 19 nt, Human
augauuuaauaaaauaauu

SEQ ID NO: 2176618 - RNA, 16 nt, Human
augauuuaaaagggaa

SEQ ID NO: 2176619 - RNA, 13 nt, Human
augauuuaauaaa

SEQ ID NO: 2176620 - RNA, 14 nt, Human
augauuuaauaaaa

SEQ ID NO: 2176621 - RNA, 16 nt, Human
augauuuaauaaaaua

SEQ ID NO: 2176622 - RNA, 22 nt, Human
augauugugcacauacuugaga

SEQ ID NO: 2176623 - RNA, 15 nt, Human
augauuguaaaauag

SEQ ID NO: 2176624 - RNA, 18 nt, Human
augauuguaaaauagcuu

SEQ ID NO: 2176625 - RNA, 13 nt, Human
augauuuaaaaca

SEQ ID NO: 2176626 - RNA, 14 nt, Human
augauuuaaaacau

SEQ ID NO: 2176627 - RNA, 18 nt, Human
augauuuaaaacauguaa

SEQ ID NO: 2176628 - RNA, 14 nt, Human
uuguucuucuuaaa

SEQ ID NO: 2176629 - RNA, 17 nt, Human
uuguucuuaauugcacu

SEQ ID NO: 2176630 - RNA, 19 nt, Human
uuguucuugguuuguaaau

SEQ ID NO: 2176631 - RNA, 17 nt, Human
uuguucuugguuuguaa

SEQ ID NO: 2176632 - RNA, 14 nt, Human
augcacucagcucu

SEQ ID NO: 2176633 - RNA, 13 nt, Human
augcacugugaag

SEQ ID NO: 2176634 - RNA, 12 nt, Human
augcacugugaa

SEQ ID NO: 2176635 - RNA, 22 nt, Human
augcacgugugcacacacacca

SEQ ID NO: 2176636 - RNA, 14 nt, Human
augcacgaccuugg

SEQ ID NO: 2176637 - RNA, 16 nt, Human
augcacgaccuuggga

SEQ ID NO: 2176638 - RNA, 13 nt, Human
augcacuaugagg

SEQ ID NO: 2176639 - RNA, 16 nt, Human
augcacuaugaggaau

SEQ ID NO: 2176640 - RNA, 21 nt, Human
augcacuuuguucuggcucuu

SEQ ID NO: 2176641 - RNA, 19 nt, Human
augcacugugaaggacccu

SEQ ID NO: 2176642 - RNA, 18 nt, Human
augcacugugaaggaccc

SEQ ID NO: 2176643 - RNA, 20 nt, Human
augcacugugaaggacccuu

SEQ ID NO: 2176644 - RNA, 21 nt, Human
augcacuguucccccugugca

SEQ ID NO: 2176645 - RNA, 16 nt, Human
augcaaagaggcaaga

SEQ ID NO: 2176646 - RNA, 21 nt, Human
augcaccuugugucuguacac

SEQ ID NO: 2176647 - RNA, 14 nt, Human
augcaaagcacuga

SEQ ID NO: 2176648 - RNA, 13 nt, Human
augcaaagcacug

SEQ ID NO: 2176649 - RNA, 12 nt, Human
augcaaagcacu

SEQ ID NO: 2176650 - RNA, 18 nt, Human
augcagagguccacaaca

SEQ ID NO: 2176651 - RNA, 17 nt, Human
augcagagguccacaac

SEQ ID NO: 2176652 - RNA, 16 nt, Human
augcagagagccauuu

SEQ ID NO: 2176653 - RNA, 19 nt, Human
augcagagagccauuuugu

SEQ ID NO: 2176654 - RNA, 20 nt, Human
augcagagagccauuuugug

SEQ ID NO: 2176655 - RNA, 21 nt, Human
augcagagagccauuuuguga

SEQ ID NO: 2176656 - RNA, 22 nt, Human
augcagagagccauuuugugaa

SEQ ID NO: 2176657 - RNA, 23 nt, Human
augcagagagccauuuugugaau

SEQ ID NO: 2176658 - RNA, 21 nt, Human
augcagagcgccgugaguucu

SEQ ID NO: 2176659 - RNA, 23 nt, Human
augcagagcgccgugaguucuca

SEQ ID NO: 2176660 - RNA, 18 nt, Human
uuuaaaaaaauuccaagu

SEQ ID NO: 2176661 - RNA, 20 nt, Human
augcagaauguuuuuaaaau

SEQ ID NO: 2176662 - RNA, 22 nt, Human
augcagacaugagugcgugcuc

SEQ ID NO: 2176663 - RNA, 13 nt, Human
augcagagagcca

SEQ ID NO: 2176664 - RNA, 14 nt, Human
augcagagagccau

SEQ ID NO: 2176665 - RNA, 13 nt, Human
augcagaaggaag

SEQ ID NO: 2176666 - RNA, 14 nt, Human
augcagaauacuuu

SEQ ID NO: 2176667 - RNA, 23 nt, Human
augcacuuuguucuggcucuucc

SEQ ID NO: 2176668 - RNA, 22 nt, Human
augcacuguucccccugugcag

SEQ ID NO: 2176669 - RNA, 17 nt, Human
uuuaagacguguuugug

SEQ ID NO: 2176670 - RNA, 19 nt, Human
uuuaagacguguuuguguu

SEQ ID NO: 2176671 - RNA, 14 nt, Human
uuuaagacuguaau

SEQ ID NO: 2176672 - RNA, 12 nt, Human
uuuaagagaaau

SEQ ID NO: 2176673 - RNA, 11 nt, Human
uuuaagcuguu

SEQ ID NO: 2176674 - RNA, 14 nt, Human
uuuaagaggcaggg

SEQ ID NO: 2176675 - RNA, 14 nt, Human
uuuaagagacagcc

SEQ ID NO: 2176676 - RNA, 12 nt, Human
uuuaagcuguuu

SEQ ID NO: 2176677 - RNA, 13 nt, Human
uuuaagcuguuuc

SEQ ID NO: 2176678 - RNA, 22 nt, Human
uuuaagcuuauuuaauuaaaaa

SEQ ID NO: 2176679 - RNA, 18 nt, Human
uuuaagcuguuuccauag

SEQ ID NO: 2176680 - RNA, 21 nt, Human
uuuaagcuguuacugucuuca

SEQ ID NO: 2176681 - RNA, 12 nt, Human
uuuaaggaauau

SEQ ID NO: 2176682 - RNA, 14 nt, Human
uuuaagcuguaaaa

SEQ ID NO: 2176683 - RNA, 11 nt, Human
uuuaaggaaaa

SEQ ID NO: 2176684 - RNA, 12 nt, Human
uuuaaggaaaca

SEQ ID NO: 2176685 - RNA, 19 nt, Human
uuuaaggaugcuuguacau

SEQ ID NO: 2176686 - RNA, 17 nt, Human
uuuaaggguuuguggaa

SEQ ID NO: 2176687 - RNA, 20 nt, Human
uuuaaggguuuguggaaaau

SEQ ID NO: 2176688 - RNA, 16 nt, Human
uuuaaugaaagacugu

SEQ ID NO: 2176689 - RNA, 22 nt, Human
uuuaaggguuuguggaaaauga

SEQ ID NO: 2176690 - RNA, 18 nt, Human
uuuaaggcuaaaacuuaa

SEQ ID NO: 2176691 - RNA, 22 nt, Human
uuuaaggaugcuuguacauaau

SEQ ID NO: 2176692 - RNA, 21 nt, Human
uuuaaggaugcuuguacauaa

SEQ ID NO: 2176693 - RNA, 20 nt, Human
uuuaaggaugcuuguacaua

SEQ ID NO: 2176694 - RNA, 21 nt, Human
uuuaaauauaugcuaagucuu

SEQ ID NO: 2176695 - RNA, 16 nt, Human
uuuaaauguaaaacau

SEQ ID NO: 2176696 - RNA, 14 nt, Human
uuuaaauggacaga

SEQ ID NO: 2176697 - RNA, 18 nt, Human
uuuaaauguaaagauauu

SEQ ID NO: 2176698 - RNA, 15 nt, Human
uuuaaauguaaagau

SEQ ID NO: 2176699 - RNA, 11 nt, Human
uuuaaaugcac

SEQ ID NO: 2176700 - RNA, 18 nt, Human
uuuaaaugcauaaaugca

SEQ ID NO: 2176701 - RNA, 14 nt, Human
uuuaaaugaagaaa

SEQ ID NO: 2176702 - RNA, 14 nt, Human
uuuaaaucugugau

SEQ ID NO: 2176703 - RNA, 23 nt, Human
uuuaaaaauacagauagauauau

SEQ ID NO: 2176704 - RNA, 15 nt, Human
uuuaaaaagucuuca

SEQ ID NO: 2176705 - RNA, 21 nt, Human
uuuaaaaacuauuuaacuuga

SEQ ID NO: 2176706 - RNA, 15 nt, Human
uuuaaaaaccuugua

SEQ ID NO: 2176707 - RNA, 14 nt, Human
uuuaaaaacuauuu

SEQ ID NO: 2176708 - RNA, 23 nt, Human
uuuaaaaacuauuuaacuugagc

SEQ ID NO: 2176709 - RNA, 21 nt, Human
uuuaaaaagaaacaagaugcu

SEQ ID NO: 2176710 - RNA, 21 nt, Human
uuuaaaaaaauaaaacauuuu

SEQ ID NO: 2176711 - RNA, 16 nt, Human
uuuaaaaaaauuuaag

SEQ ID NO: 2176712 - RNA, 17 nt, Human
uuuaaaaaaauuuaagu

SEQ ID NO: 2176713 - RNA, 18 nt, Human
uuuaaaaaaauuuaagug

SEQ ID NO: 2176714 - RNA, 17 nt, Human
augcagagucagcagaa

SEQ ID NO: 2176715 - RNA, 16 nt, Human
augcagagucagcaga

SEQ ID NO: 2176716 - RNA, 15 nt, Human
augcagagucagcag

SEQ ID NO: 2176717 - RNA, 23 nt, Human
augcagagguaaaagugugagca

SEQ ID NO: 2176718 - RNA, 16 nt, Human
augcagaguugacaug

SEQ ID NO: 2176719 - RNA, 19 nt, Human
augcagaguugacaugaga

SEQ ID NO: 2176720 - RNA, 21 nt, Human
uuuaaaaaauuaaucugggcc

SEQ ID NO: 2176721 - RNA, 14 nt, Human
augcucagaccagc

SEQ ID NO: 2176722 - RNA, 12 nt, Human
augcucagacca

SEQ ID NO: 2176723 - RNA, 15 nt, Human
augcucacagucuca

SEQ ID NO: 2176724 - RNA, 20 nt, Human
augcucaaguuuuucagaaa

SEQ ID NO: 2176725 - RNA, 15 nt, Human
augcucaaguuuuuc

SEQ ID NO: 2176726 - RNA, 16 nt, Human
augcucaaguuuuuca

SEQ ID NO: 2176727 - RNA, 21 nt, Human
uuuaucagugacagaguucac

SEQ ID NO: 2176728 - RNA, 14 nt, Human
augcucaaguuuuu

SEQ ID NO: 2176729 - RNA, 18 nt, Human
uuuaucagugacagaguu

SEQ ID NO: 2176730 - RNA, 13 nt, Human
uuuaucagugaca

SEQ ID NO: 2176731 - RNA, 14 nt, Human
uuuaucagaauucu

SEQ ID NO: 2176732 - RNA, 22 nt, Human
uuuaucacauguauguuuuggu

SEQ ID NO: 2176733 - RNA, 17 nt, Human
augcucagaccagcucu

SEQ ID NO: 2176734 - RNA, 13 nt, Human
augcucagcccug

SEQ ID NO: 2176735 - RNA, 18 nt, Human
augcucagcccugacugg

SEQ ID NO: 2176736 - RNA, 21 nt, Human
augcucauaacggaucagaaa

SEQ ID NO: 2176737 - RNA, 13 nt, Human
augcucaucugcu

SEQ ID NO: 2176738 - RNA, 16 nt, Human
augcucauaacggauc

SEQ ID NO: 2176739 - RNA, 22 nt, Human
augcucccuccccugcccuggu

SEQ ID NO: 2176740 - RNA, 20 nt, Human
augcucccuccccugcccug

SEQ ID NO: 2176741 - RNA, 19 nt, Human
augcucccuccccugcccu

SEQ ID NO: 2176742 - RNA, 18 nt, Human
augcucccuccccugccc

SEQ ID NO: 2176743 - RNA, 17 nt, Human
augcucccuccccugcc

SEQ ID NO: 2176744 - RNA, 16 nt, Human
augcucccuccccugc

SEQ ID NO: 2176745 - RNA, 14 nt, Human
augcucaucugcug

SEQ ID NO: 2176746 - RNA, 16 nt, Human
augcucaucugcuggu

SEQ ID NO: 2176747 - RNA, 19 nt, Human
augcuccuggcccacugca

SEQ ID NO: 2176748 - RNA, 22 nt, Human
augcuggacggcauuccugcuu

SEQ ID NO: 2176749 - RNA, 21 nt, Human
augcuggacggcauuccugcu

SEQ ID NO: 2176750 - RNA, 12 nt, Human
augcuggagaag

SEQ ID NO: 2176751 - RNA, 15 nt, Human
augcuccaaaugcug

SEQ ID NO: 2176752 - RNA, 14 nt, Human
augcuccuggccca

SEQ ID NO: 2176753 - RNA, 23 nt, Human
augcuggagccuguguaacagcu

SEQ ID NO: 2176754 - RNA, 17 nt, Human
augcuggaugucugcca

SEQ ID NO: 2176755 - RNA, 19 nt, Human
augcuggaugcuccuucca

SEQ ID NO: 2176756 - RNA, 18 nt, Human
augcuggagccuguguaa

SEQ ID NO: 2176757 - RNA, 22 nt, Human
augcuggagccuguguaacagc

SEQ ID NO: 2176758 - RNA, 18 nt, Human
augcuggcuguuggcugg

SEQ ID NO: 2176759 - RNA, 14 nt, Human
augcuggagaagag

SEQ ID NO: 2176760 - RNA, 15 nt, Human
augcuggagaagaga

SEQ ID NO: 2176761 - RNA, 16 nt, Human
augcuggagaagagag

SEQ ID NO: 2176762 - RNA, 17 nt, Human
augcuggagaagagagg

SEQ ID NO: 2176763 - RNA, 18 nt, Human
augcuggagaagagagga

SEQ ID NO: 2176764 - RNA, 19 nt, Human
augcuggagaagagaggag

SEQ ID NO: 2176765 - RNA, 23 nt, Human
augcuggagaagagaggagagga

SEQ ID NO: 2176766 - RNA, 12 nt, Human
augcuggagagg

SEQ ID NO: 2176767 - RNA, 13 nt, Human
augcuggagaggu

SEQ ID NO: 2176768 - RNA, 14 nt, Human
augcuggagagguu

SEQ ID NO: 2176769 - RNA, 15 nt, Human
augcuggagagguua

SEQ ID NO: 2176770 - RNA, 11 nt, Human
augcuggagcc

SEQ ID NO: 2176771 - RNA, 12 nt, Human
augcuggagccu

SEQ ID NO: 2176772 - RNA, 13 nt, Human
augcuggagccug

SEQ ID NO: 2176773 - RNA, 14 nt, Human
augcuggagccugu

SEQ ID NO: 2176774 - RNA, 16 nt, Human
augcuggagccugugu

SEQ ID NO: 2176775 - RNA, 14 nt, Human
augcuguugccuca

SEQ ID NO: 2176776 - RNA, 23 nt, Human
augcuguugauugcuaaauguaa

SEQ ID NO: 2176777 - RNA, 21 nt, Human
augcuguugauugcuaaaugu

SEQ ID NO: 2176778 - RNA, 22 nt, Human
augcuguugauugcuaaaugua

SEQ ID NO: 2176779 - RNA, 16 nt, Human
augcuguugauugcua

SEQ ID NO: 2176780 - RNA, 17 nt, Human
augcuguugauugcuaa

SEQ ID NO: 2176781 - RNA, 18 nt, Human
augcuguugauugcuaaa

SEQ ID NO: 2176782 - RNA, 19 nt, Human
augcuguugauugcuaaau

SEQ ID NO: 2176783 - RNA, 18 nt, Human
augcuguugccucaucua

SEQ ID NO: 2176784 - RNA, 17 nt, Human
augcuguugccucaucu

SEQ ID NO: 2176785 - RNA, 16 nt, Human
augcuguugccucauc

SEQ ID NO: 2176786 - RNA, 15 nt, Human
augcuguugccucau

SEQ ID NO: 2176787 - RNA, 22 nt, Human
augcugucaacuaugauauggu

SEQ ID NO: 2176788 - RNA, 20 nt, Human
augcugucaacuaugauaug

SEQ ID NO: 2176789 - RNA, 11 nt, Human
augcuguugau

SEQ ID NO: 2176790 - RNA, 12 nt, Human
augcuguugauu

SEQ ID NO: 2176791 - RNA, 15 nt, Human
augcuguugauugcu

SEQ ID NO: 2176792 - RNA, 23 nt, Human
augcuguauuuuaaaagaaugau

SEQ ID NO: 2176793 - RNA, 19 nt, Human
augcuggcuguuggcuggg

SEQ ID NO: 2176794 - RNA, 20 nt, Human
augcuggcuguuggcugggg

SEQ ID NO: 2176795 - RNA, 19 nt, Human
augcuguauuuuaaaagaa

SEQ ID NO: 2176796 - RNA, 22 nt, Human
augcuguauuuuaaaagaauga

SEQ ID NO: 2176797 - RNA, 20 nt, Human
augcuucucacugccaugcc

SEQ ID NO: 2176798 - RNA, 16 nt, Human
augcuucucacugcca

SEQ ID NO: 2176799 - RNA, 21 nt, Human
augcuucuguuuuauaauuuu

SEQ ID NO: 2176800 - RNA, 17 nt, Human
augcuucugacuucaua

SEQ ID NO: 2176801 - RNA, 16 nt, Human
auggaagauuuuaaau

SEQ ID NO: 2176802 - RNA, 17 nt, Human
auggaagauuuuaaauu

SEQ ID NO: 2176803 - RNA, 14 nt, Human
augcuucugggaga

SEQ ID NO: 2176804 - RNA, 14 nt, Human
auggaaggggcuga

SEQ ID NO: 2176805 - RNA, 17 nt, Human
auggaagacagcucuua

SEQ ID NO: 2176806 - RNA, 18 nt, Human
auggaagacagcucuuau

SEQ ID NO: 2176807 - RNA, 22 nt, Human
uuucaccuguuuuuaagcuguu

SEQ ID NO: 2176808 - RNA, 18 nt, Human
uuucaccuguaaaccuga

SEQ ID NO: 2176809 - RNA, 17 nt, Human
uuucaccuguaaaccug

SEQ ID NO: 2176810 - RNA, 14 nt, Human
uuucaccuguaaac

SEQ ID NO: 2176811 - RNA, 21 nt, Human
uuucacauucuuauaaauaug

SEQ ID NO: 2176812 - RNA, 15 nt, Human
uuucacauucuuaua

SEQ ID NO: 2176813 - RNA, 16 nt, Human
uuucacauucuuauaa

SEQ ID NO: 2176814 - RNA, 13 nt, Human
uuucaccuguaaa

SEQ ID NO: 2176815 - RNA, 13 nt, Human
uuucacauucuua

SEQ ID NO: 2176816 - RNA, 15 nt, Human
uuucacgggagauuu

SEQ ID NO: 2176817 - RNA, 18 nt, Human
uuucacggaaguuuucaa

SEQ ID NO: 2176818 - RNA, 19 nt, Human
uuucacggaaguuuucaau

SEQ ID NO: 2176819 - RNA, 23 nt, Human
uuucacggaaguuuucaaugaug

SEQ ID NO: 2176820 - RNA, 22 nt, Human
uuucacggugccagguuuucug

SEQ ID NO: 2176821 - RNA, 23 nt, Human
uuucaccuguuuuuaagcuguuu

SEQ ID NO: 2176822 - RNA, 14 nt, Human
uuucacggaaguuu

SEQ ID NO: 2176823 - RNA, 21 nt, Human
uuucagaaagaaguggggaca

SEQ ID NO: 2176824 - RNA, 19 nt, Human
uuucacuauuuuuauuuau

SEQ ID NO: 2176825 - RNA, 16 nt, Human
uuucacuauuuccuuu

SEQ ID NO: 2176826 - RNA, 15 nt, Human
uuucacuauuuccuu

SEQ ID NO: 2176827 - RNA, 16 nt, Human
uuucagaaauaugugg

SEQ ID NO: 2176828 - RNA, 15 nt, Human
auggaaugcuugaaa

SEQ ID NO: 2176829 - RNA, 15 nt, Human
auggaagcuuccagu

SEQ ID NO: 2176830 - RNA, 22 nt, Human
auggaagcuuccaguccaaucu

SEQ ID NO: 2176831 - RNA, 16 nt, Human
auggaaugcuugaaaa

SEQ ID NO: 2176832 - RNA, 20 nt, Human
auggaaugcuugaaaaaugu

SEQ ID NO: 2176833 - RNA, 16 nt, Human
auggaaugguuauaaa

SEQ ID NO: 2176834 - RNA, 18 nt, Human
auggaaugguuauaaaag

SEQ ID NO: 2176835 - RNA, 21 nt, Human
auggaaugcuguguuaaauaa

SEQ ID NO: 2176836 - RNA, 17 nt, Human
auggaaugcuguguuaa

SEQ ID NO: 2176837 - RNA, 16 nt, Human
auggaauugauuugca

SEQ ID NO: 2176838 - RNA, 15 nt, Human
auggaauugauuugc

SEQ ID NO: 2176839 - RNA, 14 nt, Human
auggaauugauuug

SEQ ID NO: 2176840 - RNA, 13 nt, Human
auggaauugauuu

SEQ ID NO: 2176841 - RNA, 20 nt, Human
auggaaugguuauaaaagug

SEQ ID NO: 2176842 - RNA, 19 nt, Human
auggaaugguuauaaaagu

SEQ ID NO: 2176843 - RNA, 15 nt, Human
uuucacauuaauauu

SEQ ID NO: 2176844 - RNA, 14 nt, Human
uuucacaugaacau

SEQ ID NO: 2176845 - RNA, 20 nt, Human
uuucaaacuccugacuuugu

SEQ ID NO: 2176846 - RNA, 15 nt, Human
uuucaaacuuuacua

SEQ ID NO: 2176847 - RNA, 12 nt, Human
uuucaaacuuua

SEQ ID NO: 2176848 - RNA, 19 nt, Human
uuucaaacauauauaacaa

SEQ ID NO: 2176849 - RNA, 16 nt, Human
uuucaucucuuguaua

SEQ ID NO: 2176850 - RNA, 18 nt, Human
uuucaucuauuucugaga

SEQ ID NO: 2176851 - RNA, 13 nt, Human
uuucaucuauuuc

SEQ ID NO: 2176852 - RNA, 16 nt, Human
uuucaucuauuucuga

SEQ ID NO: 2176853 - RNA, 11 nt, Human
uuucaucugcu

SEQ ID NO: 2176854 - RNA, 15 nt, Human
uuucaucugcucucc

SEQ ID NO: 2176855 - RNA, 16 nt, Human
uuucaucugcucuccu

SEQ ID NO: 2176856 - RNA, 17 nt, Human
uuucaucugcucuccuu

SEQ ID NO: 2176857 - RNA, 18 nt, Human
uuucaucugcucuccuuc

SEQ ID NO: 2176858 - RNA, 19 nt, Human
uuucaucugcucuccuucc

SEQ ID NO: 2176859 - RNA, 20 nt, Human
uuucaucugcucuccuuccu

SEQ ID NO: 2176860 - RNA, 20 nt, Human
uuucagaaauaugugguuuc

SEQ ID NO: 2176861 - RNA, 20 nt, Human
uuucauccacuagugcaaau

SEQ ID NO: 2176862 - RNA, 21 nt, Human
uuucauccacuagugcaaauc

SEQ ID NO: 2176863 - RNA, 23 nt, Human
uuucaucccuaugggauucagug

SEQ ID NO: 2176864 - RNA, 12 nt, Human
uuucagaaaugu

SEQ ID NO: 2176865 - RNA, 11 nt, Human
uuucagaaaug

SEQ ID NO: 2176866 - RNA, 22 nt, Human
uuucauggggugaugcugggcu

SEQ ID NO: 2176867 - RNA, 18 nt, Human
uuucauggacacuuugaa

SEQ ID NO: 2176868 - RNA, 13 nt, Human
uuucauggacacu

SEQ ID NO: 2176869 - RNA, 20 nt, Human
uuucauggugaaaauguacu

SEQ ID NO: 2176870 - RNA, 21 nt, Human
uuucauggugaaaauguacug

SEQ ID NO: 2176871 - RNA, 22 nt, Human
uuucauggugaaaauguacuga

SEQ ID NO: 2176872 - RNA, 18 nt, Human
uuucauguacaagaugaa

SEQ ID NO: 2176873 - RNA, 12 nt, Human
uuucauguacaa

SEQ ID NO: 2176874 - RNA, 19 nt, Human
uuucauguaaacugugcac

SEQ ID NO: 2176875 - RNA, 18 nt, Human
uuucauguaaacugugca

SEQ ID NO: 2176876 - RNA, 13 nt, Human
uuuccauuauuua

SEQ ID NO: 2176877 - RNA, 17 nt, Human
uuuccauguugcugcca

SEQ ID NO: 2176878 - RNA, 14 nt, Human
uuuccauguugcug

SEQ ID NO: 2176879 - RNA, 19 nt, Human
uuuccaugcguguuucuga

SEQ ID NO: 2176880 - RNA, 13 nt, Human
uuuccauguaucu

SEQ ID NO: 2176881 - RNA, 21 nt, Human
uuuccauuauuuauauuaguu

SEQ ID NO: 2176882 - RNA, 13 nt, Human
uuuccauuccaga

SEQ ID NO: 2176883 - RNA, 14 nt, Human
uuuccauuccagaa

SEQ ID NO: 2176884 - RNA, 21 nt, Human
uuuccauugguuuaccuguga

SEQ ID NO: 2176885 - RNA, 14 nt, Human
uuuccauuguuuga

SEQ ID NO: 2176886 - RNA, 15 nt, Human
uuucccaauuaggaa

SEQ ID NO: 2176887 - RNA, 12 nt, Human
uuucccaacucu

SEQ ID NO: 2176888 - RNA, 20 nt, Human
uuucccuaagccaagggccu

SEQ ID NO: 2176889 - RNA, 15 nt, Human
uuucccaauucacau

SEQ ID NO: 2176890 - RNA, 12 nt, Human
uuucccaauuca

SEQ ID NO: 2176891 - RNA, 16 nt, Human
uuucccuauuagagaa

SEQ ID NO: 2176892 - RNA, 14 nt, Human
uuuacuguuuguua

SEQ ID NO: 2176893 - RNA, 14 nt, Human
uuuacuuaaagauu

SEQ ID NO: 2176894 - RNA, 15 nt, Human
uuuacuuaaagauuu

SEQ ID NO: 2176895 - RNA, 16 nt, Human
uuuacuuaaagauuua

SEQ ID NO: 2176896 - RNA, 11 nt, Human
uuuacuuaaac

SEQ ID NO: 2176897 - RNA, 20 nt, Human
uuuacugucaaaauaauuuu

SEQ ID NO: 2176898 - RNA, 17 nt, Human
uuuacugugaaacuggc

SEQ ID NO: 2176899 - RNA, 22 nt, Human
uuuacugccaaagggaaauauc

SEQ ID NO: 2176900 - RNA, 11 nt, Human
uuuacugccac

SEQ ID NO: 2176901 - RNA, 12 nt, Human
uuuacugccacu

SEQ ID NO: 2176902 - RNA, 14 nt, Human
uuuacugaagccuu

SEQ ID NO: 2176903 - RNA, 13 nt, Human
uuuacugaacaau

SEQ ID NO: 2176904 - RNA, 18 nt, Human
uuuacuccccuugagcug

SEQ ID NO: 2176905 - RNA, 13 nt, Human
uuuacuccccuug

SEQ ID NO: 2176906 - RNA, 12 nt, Human
uuuacuccccuu

SEQ ID NO: 2176907 - RNA, 13 nt, Human
uuuacuccagugg

SEQ ID NO: 2176908 - RNA, 21 nt, Human
uuuacuccaguggugaagaaa

SEQ ID NO: 2176909 - RNA, 14 nt, Human
uuuacugagcuucu

SEQ ID NO: 2176910 - RNA, 17 nt, Human
uuuacugagcuucucug

SEQ ID NO: 2176911 - RNA, 18 nt, Human
uuuacugagcuucucugu

SEQ ID NO: 2176912 - RNA, 21 nt, Human
uuuacugagcuucucugugaa

SEQ ID NO: 2176913 - RNA, 16 nt, Human
uuuacugcagcuuugu

SEQ ID NO: 2176914 - RNA, 16 nt, Human
augcguguuucugacu

SEQ ID NO: 2176915 - RNA, 16 nt, Human
augcgugugugugugu

SEQ ID NO: 2176916 - RNA, 12 nt, Human
augcuaaaccuu

SEQ ID NO: 2176917 - RNA, 17 nt, Human
augcguguuucugacuc

SEQ ID NO: 2176918 - RNA, 14 nt, Human
augcuaaaccuuag

SEQ ID NO: 2176919 - RNA, 20 nt, Human
augcuaaaccuuaguacuga

SEQ ID NO: 2176920 - RNA, 22 nt, Human
augcuaaaccuuaguacugagu

SEQ ID NO: 2176921 - RNA, 23 nt, Human
augcuaccuugugacccagcacu

SEQ ID NO: 2176922 - RNA, 14 nt, Human
augcuacgugugau

SEQ ID NO: 2176923 - RNA, 15 nt, Human
augcuacgugugauu

SEQ ID NO: 2176924 - RNA, 16 nt, Human
augcuacgugugauuu

SEQ ID NO: 2176925 - RNA, 17 nt, Human
augcuacgugugauuuu

SEQ ID NO: 2176926 - RNA, 19 nt, Human
augcuacgugugauuuuuc

SEQ ID NO: 2176927 - RNA, 20 nt, Human
augcuacgugugauuuuucu

SEQ ID NO: 2176928 - RNA, 22 nt, Human
augcuacgugugauuuuucugg

SEQ ID NO: 2176929 - RNA, 20 nt, Human
uuuacccuucuuuucugacu

SEQ ID NO: 2176930 - RNA, 21 nt, Human
augcuacuacaaaaaaguugu

SEQ ID NO: 2176931 - RNA, 14 nt, Human
augcuacugucuca

SEQ ID NO: 2176932 - RNA, 23 nt, Human
augcuacugucucacugaaacau

SEQ ID NO: 2176933 - RNA, 20 nt, Human
augcuacugucucacugaaa

SEQ ID NO: 2176934 - RNA, 19 nt, Human
uuuaccuaccacagugucu

SEQ ID NO: 2176935 - RNA, 13 nt, Human
uuuacccuuggcu

SEQ ID NO: 2176936 - RNA, 18 nt, Human
uuuaccguuucuucccug

SEQ ID NO: 2176937 - RNA, 18 nt, Human
uuuaccuaccacaguguc

SEQ ID NO: 2176938 - RNA, 15 nt, Human
uuuaccuauguaaca

SEQ ID NO: 2176939 - RNA, 22 nt, Human
uuuaccugaagucuuuguacag

SEQ ID NO: 2176940 - RNA, 18 nt, Human
uuuaccugaagucuuugu

SEQ ID NO: 2176941 - RNA, 13 nt, Human
uuuaguggcuuca

SEQ ID NO: 2176942 - RNA, 13 nt, Human
uuuaguuauaguu

SEQ ID NO: 2176943 - RNA, 20 nt, Human
uuuagggcuguaaaaugcau

SEQ ID NO: 2176944 - RNA, 16 nt, Human
uuuagggccaggcagg

SEQ ID NO: 2176945 - RNA, 19 nt, Human
uuuagugaucacagcagcu

SEQ ID NO: 2176946 - RNA, 17 nt, Human
uuuauauguacaugaga

SEQ ID NO: 2176947 - RNA, 19 nt, Human
uuuaucacauguauguuuu

SEQ ID NO: 2176948 - RNA, 23 nt, Human
uuuauauggaugauucagaaauu

SEQ ID NO: 2176949 - RNA, 17 nt, Human
uuuaguuaaauuucugg

SEQ ID NO: 2176950 - RNA, 16 nt, Human
uuuaguuacagcugug

SEQ ID NO: 2176951 - RNA, 14 nt, Human
uuuauauguacaug

SEQ ID NO: 2176952 - RNA, 13 nt, Human
uuuauauguacau

SEQ ID NO: 2176953 - RNA, 21 nt, Human
uuuauaugcuucuguuuuaua

SEQ ID NO: 2176954 - RNA, 15 nt, Human
uuuacuucuuauaca

SEQ ID NO: 2176955 - RNA, 14 nt, Human
uuuacuucuuauac

SEQ ID NO: 2176956 - RNA, 13 nt, Human
uuuacuucuuaua

SEQ ID NO: 2176957 - RNA, 23 nt, Human
uuuacuuaaagauuuaucaaauc

SEQ ID NO: 2176958 - RNA, 20 nt, Human
uuuacuuaaagauuuaucaa

SEQ ID NO: 2176959 - RNA, 22 nt, Human
uuuacuuaaagauuuaucaaau

SEQ ID NO: 2176960 - RNA, 16 nt, Human
uuuacuuaucuuaugc

SEQ ID NO: 2176961 - RNA, 17 nt, Human
uuuacuuaucuuaugcc

SEQ ID NO: 2176962 - RNA, 13 nt, Human
uuuagggcagcuu

SEQ ID NO: 2176963 - RNA, 15 nt, Human
uuuagggcagcuugc

SEQ ID NO: 2176964 - RNA, 14 nt, Human
uuuagggccaggca

SEQ ID NO: 2176965 - RNA, 21 nt, Human
uuuagggagagucauauuuug

SEQ ID NO: 2176966 - RNA, 19 nt, Human
uuuagggagagucauauuu

SEQ ID NO: 2176967 - RNA, 19 nt, Human
uuuaggcagggauuugagg

SEQ ID NO: 2176968 - RNA, 18 nt, Human
uuuaggcugguggcccag

SEQ ID NO: 2176969 - RNA, 23 nt, Human
uuuagggacucaauuucucccca

SEQ ID NO: 2176970 - RNA, 20 nt, Human
uuuaggagggaguuaucuaa

SEQ ID NO: 2176971 - RNA, 17 nt, Human
uuuaggauaaaauaaug

SEQ ID NO: 2176972 - RNA, 23 nt, Human
uuuaaugaaagacuguacaaagu

SEQ ID NO: 2176973 - RNA, 21 nt, Human
uuuaaugaaagacuguacaaa

SEQ ID NO: 2176974 - RNA, 22 nt, Human
augccagagacggaagccuuuu

SEQ ID NO: 2176975 - RNA, 17 nt, Human
augccacugccuucgcu

SEQ ID NO: 2176976 - RNA, 18 nt, Human
augccacugccuucgcuu

SEQ ID NO: 2176977 - RNA, 19 nt, Human
augccagcucagucccauc

SEQ ID NO: 2176978 - RNA, 12 nt, Human
augccaggacac

SEQ ID NO: 2176979 - RNA, 18 nt, Human
augccagcucagucccau

SEQ ID NO: 2176980 - RNA, 16 nt, Human
augccagcuacuuccu

SEQ ID NO: 2176981 - RNA, 18 nt, Human
augccagguucuauuugg

SEQ ID NO: 2176982 - RNA, 19 nt, Human
augccagguucuauuugga

SEQ ID NO: 2176983 - RNA, 22 nt, Human
augccaguaacgcgucuuccug

SEQ ID NO: 2176984 - RNA, 20 nt, Human
augccagguucuauuuggaa

SEQ ID NO: 2176985 - RNA, 21 nt, Human
augccagguucuauuuggaau

SEQ ID NO: 2176986 - RNA, 23 nt, Human
augccaguaacgcgucuuccuga

SEQ ID NO: 2176987 - RNA, 20 nt, Human
augccaguaggcucaacuag

SEQ ID NO: 2176988 - RNA, 16 nt, Human
augcccagcucagagg

SEQ ID NO: 2176989 - RNA, 15 nt, Human
augcccagcguuuga

SEQ ID NO: 2176990 - RNA, 21 nt, Human
augcccagggccacucugccu

SEQ ID NO: 2176991 - RNA, 17 nt, Human
augcccagccccuucug

SEQ ID NO: 2176992 - RNA, 18 nt, Human
augccccgucccccucug

SEQ ID NO: 2176993 - RNA, 21 nt, Human
augccccgucccccucuggcu

SEQ ID NO: 2176994 - RNA, 17 nt, Human
augccaucugugggcac

SEQ ID NO: 2176995 - RNA, 23 nt, Human
augccauccucaaacacugcagg

SEQ ID NO: 2176996 - RNA, 15 nt, Human
augcccagccccuuc

SEQ ID NO: 2176997 - RNA, 16 nt, Human
augcccagccccuucu

SEQ ID NO: 2176998 - RNA, 21 nt, Human
augccaugaggaacaaggcaa

SEQ ID NO: 2176999 - RNA, 16 nt, Human
augccaucaucuccug

SEQ ID NO: 2177000 - RNA, 12 nt, Human
augccauccuca

SEQ ID NO: 2177001 - RNA, 21 nt, Human
augccauccucaaacacugca

SEQ ID NO: 2177002 - RNA, 15 nt, Human
augccaucaucuccu

SEQ ID NO: 2177003 - RNA, 14 nt, Human
augccaucaucucc

SEQ ID NO: 2177004 - RNA, 17 nt, Human
augcccagggccacucu

SEQ ID NO: 2177005 - RNA, 17 nt, Human
augcccggcuaauuuuu

SEQ ID NO: 2177006 - RNA, 20 nt, Human
augccccuguacuccagccu

SEQ ID NO: 2177007 - RNA, 16 nt, Human
augccccuggcuggga

SEQ ID NO: 2177008 - RNA, 13 nt, Human
augcccuccucuc

SEQ ID NO: 2177009 - RNA, 16 nt, Human
augccucuccuuugua

SEQ ID NO: 2177010 - RNA, 14 nt, Human
augcccucagggga

SEQ ID NO: 2177011 - RNA, 13 nt, Human
augccucucucag

SEQ ID NO: 2177012 - RNA, 14 nt, Human
augccucucucagg

SEQ ID NO: 2177013 - RNA, 15 nt, Human
augccucucucaggc

SEQ ID NO: 2177014 - RNA, 14 nt, Human
augccuuuucccaa

SEQ ID NO: 2177015 - RNA, 20 nt, Human
augccuuuucccaacuccag

SEQ ID NO: 2177016 - RNA, 22 nt, Human
augccuuuucccaacuccagaa

SEQ ID NO: 2177017 - RNA, 13 nt, Human
augcgcaggcugg

SEQ ID NO: 2177018 - RNA, 19 nt, Human
augcgagugcucauuucag

SEQ ID NO: 2177019 - RNA, 17 nt, Human
augccucuccuuuguau

SEQ ID NO: 2177020 - RNA, 20 nt, Human
augccucuccuuuguauauu

SEQ ID NO: 2177021 - RNA, 21 nt, Human
augccucuccuuuguauauua

SEQ ID NO: 2177022 - RNA, 22 nt, Human
augcgcaggcuggcccugcccu

SEQ ID NO: 2177023 - RNA, 20 nt, Human
augcgcaggcuggcccugcc

SEQ ID NO: 2177024 - RNA, 18 nt, Human
augcgcaggcuggcccug

SEQ ID NO: 2177025 - RNA, 14 nt, Human
augcgcaggcuggc

SEQ ID NO: 2177026 - RNA, 18 nt, Human
augcuacaggauuugaaa

SEQ ID NO: 2177027 - RNA, 12 nt, Human
augcgugugugu

SEQ ID NO: 2177028 - RNA, 20 nt, Human
augcgugcauaccacuuuug

SEQ ID NO: 2177029 - RNA, 22 nt, Human
augcgugcauaccacuuuuguu

SEQ ID NO: 2177030 - RNA, 10 nt, Human
uugagaaacc

SEQ ID NO: 2177031 - RNA, 22 nt, Human
uugagaaaccuuauuguaccuc

SEQ ID NO: 2177032 - RNA, 16 nt, Human
uugacuuuuugcauuu

SEQ ID NO: 2177033 - RNA, 17 nt, Human
uugacuuuuugcauuua

SEQ ID NO: 2177034 - RNA, 17 nt, Human
uugaccauucuccaccu

SEQ ID NO: 2177035 - RNA, 12 nt, Human
uugacuuuuuau

SEQ ID NO: 2177036 - RNA, 22 nt, Human
uugaccagcagaucccagcuca

SEQ ID NO: 2177037 - RNA, 21 nt, Human
uugaccagcagaucccagcuc

SEQ ID NO: 2177038 - RNA, 11 nt, Human
uugaccaggcc

SEQ ID NO: 2177039 - RNA, 22 nt, Human
uugaccaagcaggaagcucaga

SEQ ID NO: 2177040 - RNA, 20 nt, Human
uugaccaagcaggaagcuca

SEQ ID NO: 2177041 - RNA, 18 nt, Human
uugaccaagcaggaagcu

SEQ ID NO: 2177042 - RNA, 16 nt, Human
uugaccaagcaggaag

SEQ ID NO: 2177043 - RNA, 18 nt, Human
uugacauugcguuugacc

SEQ ID NO: 2177044 - RNA, 22 nt, Human
uugacauguggaaagugaauuu

SEQ ID NO: 2177045 - RNA, 14 nt, Human
uugacauguggaaa

SEQ ID NO: 2177046 - RNA, 13 nt, Human
uugacauguacag

SEQ ID NO: 2177047 - RNA, 14 nt, Human
uugacauguacaga

SEQ ID NO: 2177048 - RNA, 18 nt, Human
uugacauguacagagaac

SEQ ID NO: 2177049 - RNA, 14 nt, Human
uugacauugcguuu

SEQ ID NO: 2177050 - RNA, 16 nt, Human
uugagcagggcucagc

SEQ ID NO: 2177051 - RNA, 13 nt, Human
uugagccagcaga

SEQ ID NO: 2177052 - RNA, 14 nt, Human
uugagccagcagac

SEQ ID NO: 2177053 - RNA, 19 nt, Human
uugagcaguggcuggucca

SEQ ID NO: 2177054 - RNA, 12 nt, Human
uugagcagggcu

SEQ ID NO: 2177055 - RNA, 18 nt, Human
uugagcaacuuucuuaca

SEQ ID NO: 2177056 - RNA, 18 nt, Human
uugagcagggauccuggu

SEQ ID NO: 2177057 - RNA, 22 nt, Human
uugagacacugguuuacacuuu

SEQ ID NO: 2177058 - RNA, 18 nt, Human
uugagaaugguuacaaag

SEQ ID NO: 2177059 - RNA, 22 nt, Human
uugagaauugugcucaaaauuu

SEQ ID NO: 2177060 - RNA, 23 nt, Human
uugagaaucccaaauuugauuga

SEQ ID NO: 2177061 - RNA, 20 nt, Human
uugagaaacaaauaauuugu

SEQ ID NO: 2177062 - RNA, 19 nt, Human
uugagaaagagcacuuaag

SEQ ID NO: 2177063 - RNA, 23 nt, Human
uugagaaaccuuauuguaccucu

SEQ ID NO: 2177064 - RNA, 16 nt, Human
uugagaaguuuuguac

SEQ ID NO: 2177065 - RNA, 18 nt, Human
uugagaaguuuuguacag

SEQ ID NO: 2177066 - RNA, 19 nt, Human
uugagaaguuuuguacaga

SEQ ID NO: 2177067 - RNA, 13 nt, Human
uugagaauuuuaa

SEQ ID NO: 2177068 - RNA, 20 nt, Human
uugagacacugguuuacacu

SEQ ID NO: 2177069 - RNA, 22 nt, Human
uugagacacggagcccagcccu

SEQ ID NO: 2177070 - RNA, 10 nt, Human
uugagacaga

SEQ ID NO: 2177071 - RNA, 11 nt, Human
uugagacagag

SEQ ID NO: 2177072 - RNA, 21 nt, Human
aucccuuccuuuuagccuagu

SEQ ID NO: 2177073 - RNA, 19 nt, Human
aucccuuccuuuuagccua

SEQ ID NO: 2177074 - RNA, 14 nt, Human
aucccuugaccagg

SEQ ID NO: 2177075 - RNA, 18 nt, Human
aucccuugaccaggccug

SEQ ID NO: 2177076 - RNA, 14 nt, Human
aucccuuuauuacc

SEQ ID NO: 2177077 - RNA, 13 nt, Human
aucccuuuauuac

SEQ ID NO: 2177078 - RNA, 13 nt, Human
uugacacaggucu

SEQ ID NO: 2177079 - RNA, 22 nt, Human
uugacacaggucuuuccuaagg

SEQ ID NO: 2177080 - RNA, 19 nt, Human
uugacacaggucuuuccua

SEQ ID NO: 2177081 - RNA, 12 nt, Human
uugacaccugcu

SEQ ID NO: 2177082 - RNA, 18 nt, Human
uugacacaaguggaccuu

SEQ ID NO: 2177083 - RNA, 16 nt, Human
uugacacagaaaaugu

SEQ ID NO: 2177084 - RNA, 17 nt, Human
uugacacaaguggaccu

SEQ ID NO: 2177085 - RNA, 14 nt, Human
uugacacaagugga

SEQ ID NO: 2177086 - RNA, 22 nt, Human
aucccuugaccaggccugggcc

SEQ ID NO: 2177087 - RNA, 18 nt, Human
aucccuuuuugaagugua

SEQ ID NO: 2177088 - RNA, 22 nt, Human
aucccuuuauuacccccuccuu

SEQ ID NO: 2177089 - RNA, 18 nt, Human
uugacaauaauuucaggu

SEQ ID NO: 2177090 - RNA, 14 nt, Human
auccgaaucucuuu

SEQ ID NO: 2177091 - RNA, 16 nt, Human
auccgaaccuccucug

SEQ ID NO: 2177092 - RNA, 20 nt, Human
auccgaaccuccucugugaa

SEQ ID NO: 2177093 - RNA, 19 nt, Human
auccgaaccuccucuguga

SEQ ID NO: 2177094 - RNA, 19 nt, Human
uugacaggauuauuggaaa

SEQ ID NO: 2177095 - RNA, 23 nt, Human
uugacacuagcccaaugaaauga

SEQ ID NO: 2177096 - RNA, 22 nt, Human
uugacaccagcuguucuguccc

SEQ ID NO: 2177097 - RNA, 14 nt, Human
uugacacuauaucu

SEQ ID NO: 2177098 - RNA, 18 nt, Human
uugacacuauaucuguau

SEQ ID NO: 2177099 - RNA, 19 nt, Human
uugacacuauaucuguaua

SEQ ID NO: 2177100 - RNA, 22 nt, Human
uugacacuauaucuguauauaa

SEQ ID NO: 2177101 - RNA, 10 nt, Human
uugacagggc

SEQ ID NO: 2177102 - RNA, 12 nt, Human
uugacagggcac

SEQ ID NO: 2177103 - RNA, 13 nt, Human
uugacaucaacug

SEQ ID NO: 2177104 - RNA, 16 nt, Human
uugacaucaacugcau

SEQ ID NO: 2177105 - RNA, 19 nt, Human
uugacagcuuugcugcuga

SEQ ID NO: 2177106 - RNA, 23 nt, Human
uugacaugagauuuauaagguuu

SEQ ID NO: 2177107 - RNA, 13 nt, Human
uugacaugggaca

SEQ ID NO: 2177108 - RNA, 16 nt, Human
aucuaauuauuuugca

SEQ ID NO: 2177109 - RNA, 14 nt, Human
aucuaauauuaaaa

SEQ ID NO: 2177110 - RNA, 20 nt, Human
aucuaauauguaacaagcca

SEQ ID NO: 2177111 - RNA, 23 nt, Human
aucuaauauguaacaagccaccc

SEQ ID NO: 2177112 - RNA, 14 nt, Human
aucuacccaaagga

SEQ ID NO: 2177113 - RNA, 15 nt, Human
aucuacccaaaggau

SEQ ID NO: 2177114 - RNA, 21 nt, Human
aucuacccaaaggauacugua

SEQ ID NO: 2177115 - RNA, 17 nt, Human
aucuaccccuuacuuau

SEQ ID NO: 2177116 - RNA, 21 nt, Human
aucuaccucacuauucaagua

SEQ ID NO: 2177117 - RNA, 18 nt, Human
aucuagauacuguaucau

SEQ ID NO: 2177118 - RNA, 19 nt, Human
aucuacuaauuccacaccu

SEQ ID NO: 2177119 - RNA, 15 nt, Human
aucuacuaauuccac

SEQ ID NO: 2177120 - RNA, 22 nt, Human
aucuaccuuccagucaggauga

SEQ ID NO: 2177121 - RNA, 15 nt, Human
aucuaccuucuguag

SEQ ID NO: 2177122 - RNA, 17 nt, Human
aucuaccuucuguaguu

SEQ ID NO: 2177123 - RNA, 21 nt, Human
aucuaccuucuguaguuuuau

SEQ ID NO: 2177124 - RNA, 17 nt, Human
uugauacuuguucaaaa

SEQ ID NO: 2177125 - RNA, 16 nt, Human
uugauacuuguucaaa

SEQ ID NO: 2177126 - RNA, 18 nt, Human
uugagccagcagacauug

SEQ ID NO: 2177127 - RNA, 13 nt, Human
uugauagcaaagc

SEQ ID NO: 2177128 - RNA, 18 nt, Human
uugauagcacagacccug

SEQ ID NO: 2177129 - RNA, 17 nt, Human
uugauacuacaguuugu

SEQ ID NO: 2177130 - RNA, 15 nt, Human
uugauacuacaguuu

SEQ ID NO: 2177131 - RNA, 19 nt, Human
uugaguggaugauguuucg

SEQ ID NO: 2177132 - RNA, 17 nt, Human
uugaguggaugauguuu

SEQ ID NO: 2177133 - RNA, 15 nt, Human
uugagugcucugauc

SEQ ID NO: 2177134 - RNA, 14 nt, Human
uugagugcucugau

SEQ ID NO: 2177135 - RNA, 17 nt, Human
uugaguguuuuaagaua

SEQ ID NO: 2177136 - RNA, 17 nt, Human
uugagccagcagacauu

SEQ ID NO: 2177137 - RNA, 23 nt, Human
uugagugggguuaucucuguguu

SEQ ID NO: 2177138 - RNA, 21 nt, Human
uugagugcugucuccauguuu

SEQ ID NO: 2177139 - RNA, 11 nt, Human
uugagugccuu

SEQ ID NO: 2177140 - RNA, 22 nt, Human
aucuauuuuggauuguauauug

SEQ ID NO: 2177141 - RNA, 19 nt, Human
aucuaggaagacuuuggaa

SEQ ID NO: 2177142 - RNA, 17 nt, Human
aucuaggaagacuuugg

SEQ ID NO: 2177143 - RNA, 18 nt, Human
aucuaggaagacuuugga

SEQ ID NO: 2177144 - RNA, 15 nt, Human
aucuagcaaucacaa

SEQ ID NO: 2177145 - RNA, 18 nt, Human
aucuagcaaauguuaugc

SEQ ID NO: 2177146 - RNA, 22 nt, Human
aucuagcaaucacaacacuggc

SEQ ID NO: 2177147 - RNA, 14 nt, Human
aucuagcaaauguu

SEQ ID NO: 2177148 - RNA, 19 nt, Human
aucuagauuauggagcuuu

SEQ ID NO: 2177149 - RNA, 13 nt, Human
aucuacucccaag

SEQ ID NO: 2177150 - RNA, 16 nt, Human
aucuacucagaaauuu

SEQ ID NO: 2177151 - RNA, 18 nt, Human
aucuacucccaaguaugg

SEQ ID NO: 2177152 - RNA, 16 nt, Human
aucuagauaucgacuu

SEQ ID NO: 2177153 - RNA, 19 nt, Human
aucuagauacuguaucaug

SEQ ID NO: 2177154 - RNA, 14 nt, Human
aucucaaaaaauaa

SEQ ID NO: 2177155 - RNA, 23 nt, Human
aucuauuuuuggcagucugaauu

SEQ ID NO: 2177156 - RNA, 19 nt, Human
aucuauuuuuggcagucug

SEQ ID NO: 2177157 - RNA, 15 nt, Human
aucucaaaacugcac

SEQ ID NO: 2177158 - RNA, 20 nt, Human
aucucaaaacugcacuguca

SEQ ID NO: 2177159 - RNA, 19 nt, Human
aucucaaaacugcacuguc

SEQ ID NO: 2177160 - RNA, 21 nt, Human
aucucaaauaacuaaaaggua

SEQ ID NO: 2177161 - RNA, 14 nt, Human
aucucaaauaacua

SEQ ID NO: 2177162 - RNA, 23 nt, Human
aucucaaauaacuaaaagguaug

SEQ ID NO: 2177163 - RNA, 14 nt, Human
aucucaaauuucua

SEQ ID NO: 2177164 - RNA, 22 nt, Human
uugccaagcuccaagccccauc

SEQ ID NO: 2177165 - RNA, 15 nt, Human
uugccaagcucagga

SEQ ID NO: 2177166 - RNA, 23 nt, Human
uugccaaccuguaauaaauauga

SEQ ID NO: 2177167 - RNA, 22 nt, Human
uugccaaccuuauagggaugag

SEQ ID NO: 2177168 - RNA, 16 nt, Human
uugccaaauauguccu

SEQ ID NO: 2177169 - RNA, 17 nt, Human
uugccaaauauguccug

SEQ ID NO: 2177170 - RNA, 18 nt, Human
uugccaaauauguccugg

SEQ ID NO: 2177171 - RNA, 13 nt, Human
uugccaacauugc

SEQ ID NO: 2177172 - RNA, 16 nt, Human
uugccaacauugccua

SEQ ID NO: 2177173 - RNA, 18 nt, Human
uugccaaccuguaauaaa

SEQ ID NO: 2177174 - RNA, 19 nt, Human
uugccaaccuguaauaaau

SEQ ID NO: 2177175 - RNA, 21 nt, Human
uugccaaccuguaauaaauau

SEQ ID NO: 2177176 - RNA, 22 nt, Human
uugccaaccuguaauaaauaug

SEQ ID NO: 2177177 - RNA, 17 nt, Human
uugcaccuaccucacag

SEQ ID NO: 2177178 - RNA, 14 nt, Human
uugcaccugcucuc

SEQ ID NO: 2177179 - RNA, 14 nt, Human
uugcaugauguauu

SEQ ID NO: 2177180 - RNA, 12 nt, Human
uugcaugaggcu

SEQ ID NO: 2177181 - RNA, 14 nt, Human
uugcaugaggcuag

SEQ ID NO: 2177182 - RNA, 15 nt, Human
uugcaugauguauuu

SEQ ID NO: 2177183 - RNA, 19 nt, Human
uugcauggcacuugcaucu

SEQ ID NO: 2177184 - RNA, 19 nt, Human
uugcauggcaucaccucca

SEQ ID NO: 2177185 - RNA, 19 nt, Human
uugcauggcuccagaaaug

SEQ ID NO: 2177186 - RNA, 20 nt, Human
uugcauggcuccagaaaugu

SEQ ID NO: 2177187 - RNA, 17 nt, Human
uugcaugggcuaaugaa

SEQ ID NO: 2177188 - RNA, 18 nt, Human
uugcaugggcuaaugaag

SEQ ID NO: 2177189 - RNA, 22 nt, Human
uugcaugggcuaaugaagauca

SEQ ID NO: 2177190 - RNA, 14 nt, Human
uugcaauaauacuu

SEQ ID NO: 2177191 - RNA, 20 nt, Human
uugcaauaauacuucucaaa

SEQ ID NO: 2177192 - RNA, 14 nt, Human
uugcaauggcagcc

SEQ ID NO: 2177193 - RNA, 20 nt, Human
uugauguuuguggccucaga

SEQ ID NO: 2177194 - RNA, 22 nt, Human
uugcaacuucaugucaacuucu

SEQ ID NO: 2177195 - RNA, 15 nt, Human
uugcaagugaagguu

SEQ ID NO: 2177196 - RNA, 13 nt, Human
uugcaauaauacu

SEQ ID NO: 2177197 - RNA, 18 nt, Human
uugcaagugaagguuuac

SEQ ID NO: 2177198 - RNA, 21 nt, Human
uugcaccacugcacuccagcc

SEQ ID NO: 2177199 - RNA, 12 nt, Human
uugcacccagcc

SEQ ID NO: 2177200 - RNA, 13 nt, Human
uugcacccagccc

SEQ ID NO: 2177201 - RNA, 15 nt, Human
uugcacccagcccug

SEQ ID NO: 2177202 - RNA, 20 nt, Human
uugcaauccacaaucugaca

SEQ ID NO: 2177203 - RNA, 21 nt, Human
uugcaccccaaagcuuuccug

SEQ ID NO: 2177204 - RNA, 16 nt, Human
uugcacccagcccugg

SEQ ID NO: 2177205 - RNA, 19 nt, Human
uugcacccagcccuggucu

SEQ ID NO: 2177206 - RNA, 22 nt, Human
uugcaccccaaagcuuuccugc

SEQ ID NO: 2177207 - RNA, 19 nt, Human
uugcaccccaugcuguuga

SEQ ID NO: 2177208 - RNA, 13 nt, Human
uugcaccccucac

SEQ ID NO: 2177209 - RNA, 22 nt, Human
uugcaccccucacucuggccuc

SEQ ID NO: 2177210 - RNA, 24 nt, Human
uugcaccccucacucuggccucag

SEQ ID NO: 2177211 - RNA, 12 nt, Human
uugcaccccucc

SEQ ID NO: 2177212 - RNA, 13 nt, Human
uugcaccccuccc

SEQ ID NO: 2177213 - RNA, 14 nt, Human
uugcaccccuccca

SEQ ID NO: 2177214 - RNA, 15 nt, Human
uugcaccccucccau

SEQ ID NO: 2177215 - RNA, 16 nt, Human
uugcaccccucccauu

SEQ ID NO: 2177216 - RNA, 16 nt, Human
uugcacccgccucucc

SEQ ID NO: 2177217 - RNA, 16 nt, Human
uugccaccaggagaac

SEQ ID NO: 2177218 - RNA, 15 nt, Human
uugccaccaggagaa

SEQ ID NO: 2177219 - RNA, 14 nt, Human
uugccaccaggaga

SEQ ID NO: 2177220 - RNA, 13 nt, Human
uugccaccaggag

SEQ ID NO: 2177221 - RNA, 19 nt, Human
uugccacaggccucccugu

SEQ ID NO: 2177222 - RNA, 11 nt, Human
uugccacaggc

SEQ ID NO: 2177223 - RNA, 15 nt, Human
uugccacaggccucc

SEQ ID NO: 2177224 - RNA, 16 nt, Human
uugccacaggccuccc

SEQ ID NO: 2177225 - RNA, 21 nt, Human
uugccaaugaggucugaaaug

SEQ ID NO: 2177226 - RNA, 13 nt, Human
uugccacagcucu

SEQ ID NO: 2177227 - RNA, 15 nt, Human
uugccacaacccugu

SEQ ID NO: 2177228 - RNA, 18 nt, Human
uugccacaggacacaguc

SEQ ID NO: 2177229 - RNA, 13 nt, Human
uugcccaggcagg

SEQ ID NO: 2177230 - RNA, 14 nt, Human
uugcccaggcaggu

SEQ ID NO: 2177231 - RNA, 16 nt, Human
uugcccaggcaggucu

SEQ ID NO: 2177232 - RNA, 18 nt, Human
uugcccaggcaggucuug

SEQ ID NO: 2177233 - RNA, 11 nt, Human
uugcccaggcu

SEQ ID NO: 2177234 - RNA, 12 nt, Human
uugcccaggcug

SEQ ID NO: 2177235 - RNA, 14 nt, Human
uugcccaggcuggc

SEQ ID NO: 2177236 - RNA, 23 nt, Human
uugcccaggcuggcgugcagugg

SEQ ID NO: 2177237 - RNA, 20 nt, Human
uugcccagggcucagccugg

SEQ ID NO: 2177238 - RNA, 19 nt, Human
uugcccagggcucagccug

SEQ ID NO: 2177239 - RNA, 18 nt, Human
uugcccagggcucagccu

SEQ ID NO: 2177240 - RNA, 17 nt, Human
uugcccagggcucagcc

SEQ ID NO: 2177241 - RNA, 18 nt, Human
uugcccaggcuggucuca

SEQ ID NO: 2177242 - RNA, 19 nt, Human
uugccaccccacccucccu

SEQ ID NO: 2177243 - RNA, 18 nt, Human
uugccacaggccucccug

SEQ ID NO: 2177244 - RNA, 12 nt, Human
uugccaccccac

SEQ ID NO: 2177245 - RNA, 17 nt, Human
uugccaccccacccucc

SEQ ID NO: 2177246 - RNA, 18 nt, Human
uugccaccccacccuccc

SEQ ID NO: 2177247 - RNA, 14 nt, Human
uugccccaaccccc

SEQ ID NO: 2177248 - RNA, 15 nt, Human
uugccccaaccccca

SEQ ID NO: 2177249 - RNA, 14 nt, Human
uugcccauccaucu

SEQ ID NO: 2177250 - RNA, 15 nt, Human
uugcccauccaucug

SEQ ID NO: 2177251 - RNA, 15 nt, Human
uugcccccagggcac

SEQ ID NO: 2177252 - RNA, 22 nt, Human
uugcccccagggcacuucacag

SEQ ID NO: 2177253 - RNA, 16 nt, Human
uugccccaacccccag

SEQ ID NO: 2177254 - RNA, 17 nt, Human
uugccccaacccccagc

SEQ ID NO: 2177255 - RNA, 21 nt, Human
uugccccaacccccagcaccc

SEQ ID NO: 2177256 - RNA, 13 nt, Human
aucugagaaucuu

SEQ ID NO: 2177257 - RNA, 22 nt, Human
aucugagaaaagcuuugaaccc

SEQ ID NO: 2177258 - RNA, 14 nt, Human
aucugagaaucuuu

SEQ ID NO: 2177259 - RNA, 16 nt, Human
aucugagaaucuuuau

SEQ ID NO: 2177260 - RNA, 21 nt, Human
aucugacccagugcccccacu

SEQ ID NO: 2177261 - RNA, 20 nt, Human
aucugacccagugcccccac

SEQ ID NO: 2177262 - RNA, 18 nt, Human
aucugagaaaagcuuuga

SEQ ID NO: 2177263 - RNA, 13 nt, Human
aucugaaggagau

SEQ ID NO: 2177264 - RNA, 18 nt, Human
aucugacucacaagaaga

SEQ ID NO: 2177265 - RNA, 19 nt, Human
uugauguuuguggccucag

SEQ ID NO: 2177266 - RNA, 18 nt, Human
uugauguuuguggccuca

SEQ ID NO: 2177267 - RNA, 17 nt, Human
uugauguuuguggccuc

SEQ ID NO: 2177268 - RNA, 16 nt, Human
uugauguuuguggccu

SEQ ID NO: 2177269 - RNA, 15 nt, Human
uugauguuuguggcc

SEQ ID NO: 2177270 - RNA, 13 nt, Human
uugauguuugugg

SEQ ID NO: 2177271 - RNA, 16 nt, Human
uugauguuggcuggga

SEQ ID NO: 2177272 - RNA, 13 nt, Human
uugauguuggcug

SEQ ID NO: 2177273 - RNA, 14 nt, Human
uugauguuaacaca

SEQ ID NO: 2177274 - RNA, 16 nt, Human
uugauguuaacacauu

SEQ ID NO: 2177275 - RNA, 23 nt, Human
uugauguucuuucacccuuuucu

SEQ ID NO: 2177276 - RNA, 14 nt, Human
uugcaagaaucagu

SEQ ID NO: 2177277 - RNA, 18 nt, Human
uugcaacuuuguauaaaa

SEQ ID NO: 2177278 - RNA, 16 nt, Human
uugcaacuuuguauaa

SEQ ID NO: 2177279 - RNA, 17 nt, Human
uugcaacuuuguauaaa

SEQ ID NO: 2177280 - RNA, 21 nt, Human
uugauuaaauucuugcaaagu

SEQ ID NO: 2177281 - RNA, 20 nt, Human
uugauuaaauucuugcaaag

SEQ ID NO: 2177282 - RNA, 16 nt, Human
uugauuaaauucuugc

SEQ ID NO: 2177283 - RNA, 15 nt, Human
uugauuaaauucuug

SEQ ID NO: 2177284 - RNA, 19 nt, Human
aucucuuuuugcuuucgaa

SEQ ID NO: 2177285 - RNA, 15 nt, Human
aucucuuugaauuuu

SEQ ID NO: 2177286 - RNA, 21 nt, Human
aucucuuugaauuuucugugu

SEQ ID NO: 2177287 - RNA, 21 nt, Human
aucugaagagcuauuauauaa

SEQ ID NO: 2177288 - RNA, 22 nt, Human
aucucuuuugaauccaugcuug

SEQ ID NO: 2177289 - RNA, 22 nt, Human
aucucuuuguucuaaagaugga

SEQ ID NO: 2177290 - RNA, 15 nt, Human
aucucuugaggccag

SEQ ID NO: 2177291 - RNA, 16 nt, Human
aucucuuguuuaaauu

SEQ ID NO: 2177292 - RNA, 13 nt, Human
aucugacccagug

SEQ ID NO: 2177293 - RNA, 15 nt, Human
aucugaaggagauuu

SEQ ID NO: 2177294 - RNA, 18 nt, Human
aucugacccagugccccc

SEQ ID NO: 2177295 - RNA, 14 nt, Human
aucugacccagugc

SEQ ID NO: 2177296 - RNA, 23 nt, Human
aucucaccccaucccacacccug

SEQ ID NO: 2177297 - RNA, 22 nt, Human
aucucaccccaucccacacccu

SEQ ID NO: 2177298 - RNA, 16 nt, Human
aucucaccccauccca

SEQ ID NO: 2177299 - RNA, 14 nt, Human
aucucaccccaucc

SEQ ID NO: 2177300 - RNA, 13 nt, Human
aucucaccccauc

SEQ ID NO: 2177301 - RNA, 17 nt, Human
aucucaaauuucuaaau

SEQ ID NO: 2177302 - RNA, 16 nt, Human
aucucaaauuucuaaa

SEQ ID NO: 2177303 - RNA, 19 nt, Human
aucucaaauucucaaccua

SEQ ID NO: 2177304 - RNA, 23 nt, Human
aucucacacaugagcaucaggcc

SEQ ID NO: 2177305 - RNA, 23 nt, Human
aucuugggggacagggcuggccc

SEQ ID NO: 2177306 - RNA, 12 nt, Human
aucuugguaaau

SEQ ID NO: 2177307 - RNA, 16 nt, Human
aucuuggggggguggc

SEQ ID NO: 2177308 - RNA, 22 nt, Human
aucuuggggacaucucuuugaa

SEQ ID NO: 2177309 - RNA, 23 nt, Human
aucuuggggacaucucuuugaau

SEQ ID NO: 2177310 - RNA, 20 nt, Human
aucuuggggggguggccgcu

SEQ ID NO: 2177311 - RNA, 23 nt, Human
aucuuggggggguggccgcugag

SEQ ID NO: 2177312 - RNA, 23 nt, Human
aucuuggcacauuuaagagacag

SEQ ID NO: 2177313 - RNA, 15 nt, Human
aucuuggcucacugc

SEQ ID NO: 2177314 - RNA, 13 nt, Human
aucuugggacugg

SEQ ID NO: 2177315 - RNA, 17 nt, Human
aucuugggacuggguuu

SEQ ID NO: 2177316 - RNA, 18 nt, Human
aucuugggacuggguuug

SEQ ID NO: 2177317 - RNA, 17 nt, Human
aucuuggggacaucucu

SEQ ID NO: 2177318 - RNA, 15 nt, Human
aucuugcucugcuga

SEQ ID NO: 2177319 - RNA, 16 nt, Human
aucuugcucugcugac

SEQ ID NO: 2177320 - RNA, 21 nt, Human
aucuuggacugacauuuagcg

SEQ ID NO: 2177321 - RNA, 19 nt, Human
aucuuggacugacauuuag

SEQ ID NO: 2177322 - RNA, 16 nt, Human
aucuuggacugacauu

SEQ ID NO: 2177323 - RNA, 14 nt, Human
aucuuggacugaca

SEQ ID NO: 2177324 - RNA, 12 nt, Human
aucuuaauuuug

SEQ ID NO: 2177325 - RNA, 13 nt, Human
aucuuaauuuugg

SEQ ID NO: 2177326 - RNA, 14 nt, Human
aucuugcucugcug

SEQ ID NO: 2177327 - RNA, 16 nt, Human
aucuuaauuauuguac

SEQ ID NO: 2177328 - RNA, 16 nt, Human
aucuuauaauuuaaaa

SEQ ID NO: 2177329 - RNA, 19 nt, Human
aucuuaaaguguguuucua

SEQ ID NO: 2177330 - RNA, 16 nt, Human
aucuuaaggggcagcu

SEQ ID NO: 2177331 - RNA, 15 nt, Human
aucuuauaauuuaaa

SEQ ID NO: 2177332 - RNA, 12 nt, Human
aucugugaugau

SEQ ID NO: 2177333 - RNA, 22 nt, Human
aucugugcaaauccuugauacu

SEQ ID NO: 2177334 - RNA, 17 nt, Human
aucugugcccagagaug

SEQ ID NO: 2177335 - RNA, 14 nt, Human
aucugugcccagag

SEQ ID NO: 2177336 - RNA, 16 nt, Human
aucugugcacugccca

SEQ ID NO: 2177337 - RNA, 18 nt, Human
aucugucacaccagccau

SEQ ID NO: 2177338 - RNA, 17 nt, Human
aucugugauaauuuucu

SEQ ID NO: 2177339 - RNA, 23 nt, Human
aucugugccccaugccuguccag

SEQ ID NO: 2177340 - RNA, 15 nt, Human
aucugugccccaugc

SEQ ID NO: 2177341 - RNA, 13 nt, Human
aucugugccccau

SEQ ID NO: 2177342 - RNA, 12 nt, Human
aucugugcccca

SEQ ID NO: 2177343 - RNA, 19 nt, Human
aucugugcgugaaacacac

SEQ ID NO: 2177344 - RNA, 18 nt, Human
aucugugcgugaaacaca

SEQ ID NO: 2177345 - RNA, 19 nt, Human
aucugugcucaggacucag

SEQ ID NO: 2177346 - RNA, 17 nt, Human
aucugugcgugaaacac

SEQ ID NO: 2177347 - RNA, 16 nt, Human
aucugugcgugaaaca

SEQ ID NO: 2177348 - RNA, 21 nt, Human
aucugugcccagagaugggac

SEQ ID NO: 2177349 - RNA, 19 nt, Human
aucugugggcauggucaaa

SEQ ID NO: 2177350 - RNA, 18 nt, Human
aucugugcuuuccagcuc

SEQ ID NO: 2177351 - RNA, 19 nt, Human
aucugugcuuuccagcuca

SEQ ID NO: 2177352 - RNA, 15 nt, Human
aucugugcuuuccag

SEQ ID NO: 2177353 - RNA, 16 nt, Human
aucugugcuuuccagc

SEQ ID NO: 2177354 - RNA, 17 nt, Human
aucugugcuuuccagcu

SEQ ID NO: 2177355 - RNA, 22 nt, Human
aucugugggcauggucaaaggc

SEQ ID NO: 2177356 - RNA, 15 nt, Human
aucuguguacaaaga

SEQ ID NO: 2177357 - RNA, 16 nt, Human
aucuguguacaaagaa

SEQ ID NO: 2177358 - RNA, 17 nt, Human
aucuguguacaaagaaa

SEQ ID NO: 2177359 - RNA, 22 nt, Human
aucuguguacaaagaaauaaca

SEQ ID NO: 2177360 - RNA, 18 nt, Human
aucuguguacaaagaaau

SEQ ID NO: 2177361 - RNA, 12 nt, Human
aucugugucuug

SEQ ID NO: 2177362 - RNA, 14 nt, Human
aucugugucuuguu

SEQ ID NO: 2177363 - RNA, 13 nt, Human
aucugugucuugu

SEQ ID NO: 2177364 - RNA, 19 nt, Human
uugcccggauucugggagg

SEQ ID NO: 2177365 - RNA, 12 nt, Human
uugcccucccau

SEQ ID NO: 2177366 - RNA, 15 nt, Human
uugcccucccauccc

SEQ ID NO: 2177367 - RNA, 12 nt, Human
uugcccugaccu

SEQ ID NO: 2177368 - RNA, 13 nt, Human
uugcccugaccuc

SEQ ID NO: 2177369 - RNA, 15 nt, Human
uugcccugaccuccc

SEQ ID NO: 2177370 - RNA, 23 nt, Human
aucugucaagugggaucugucac

SEQ ID NO: 2177371 - RNA, 17 nt, Human
aucugucacaccagcca

SEQ ID NO: 2177372 - RNA, 19 nt, Human
uugccccccaccccagccu

SEQ ID NO: 2177373 - RNA, 16 nt, Human
uugccccccaccccag

SEQ ID NO: 2177374 - RNA, 13 nt, Human
uugccccccaccc

SEQ ID NO: 2177375 - RNA, 12 nt, Human
uugccccccacc

SEQ ID NO: 2177376 - RNA, 13 nt, Human
uugccccugagac

SEQ ID NO: 2177377 - RNA, 17 nt, Human
uugcccggauucuggga

SEQ ID NO: 2177378 - RNA, 22 nt, Human
uugccccggccccggccccagc

SEQ ID NO: 2177379 - RNA, 23 nt, Human
uugccccggccccggccccagcc

SEQ ID NO: 2177380 - RNA, 12 nt, Human
aucugucauuug

SEQ ID NO: 2177381 - RNA, 17 nt, Human
aucugucauuugagcag

SEQ ID NO: 2177382 - RNA, 22 nt, Human
aucugucauuugagcagggcuc

SEQ ID NO: 2177383 - RNA, 22 nt, Human
aucugugaggggcucucucaug

SEQ ID NO: 2177384 - RNA, 21 nt, Human
aucugugaggggcucucucau

SEQ ID NO: 2177385 - RNA, 16 nt, Human
uugcuuuguaugcacu

SEQ ID NO: 2177386 - RNA, 20 nt, Human
uugcuuugugauuuuuguaa

SEQ ID NO: 2177387 - RNA, 21 nt, Human
uuggaaaaauccagaaagaaa

SEQ ID NO: 2177388 - RNA, 14 nt, Human
uuggaaaagaauac

SEQ ID NO: 2177389 - RNA, 13 nt, Human
uuggaaaaaguga

SEQ ID NO: 2177390 - RNA, 17 nt, Human
uuggaaaaagugaugga

SEQ ID NO: 2177391 - RNA, 17 nt, Human
uuggaaaauaaauuauu

SEQ ID NO: 2177392 - RNA, 12 nt, Human
uuggaaaauaaa

SEQ ID NO: 2177393 - RNA, 15 nt, Human
uuggaaaauaaauca

SEQ ID NO: 2177394 - RNA, 14 nt, Human
uuggacugacauuu

SEQ ID NO: 2177395 - RNA, 17 nt, Human
uuggacucuugcucuuu

SEQ ID NO: 2177396 - RNA, 15 nt, Human
uuggacucuugcucu

SEQ ID NO: 2177397 - RNA, 16 nt, Human
uuggacucuugcucuu

SEQ ID NO: 2177398 - RNA, 15 nt, Human
uuggacugacauuua

SEQ ID NO: 2177399 - RNA, 15 nt, Human
uuggacuggaugcau

SEQ ID NO: 2177400 - RNA, 13 nt, Human
uuggacuugagga

SEQ ID NO: 2177401 - RNA, 22 nt, Human
uuggaaaagaauacagaaagau

SEQ ID NO: 2177402 - RNA, 19 nt, Human
uuggaaaagaauacagaaa

SEQ ID NO: 2177403 - RNA, 15 nt, Human
uuggaaaaugcauug

SEQ ID NO: 2177404 - RNA, 15 nt, Human
uuggagaagaacuga

SEQ ID NO: 2177405 - RNA, 17 nt, Human
uuggagaagaacugaaa

SEQ ID NO: 2177406 - RNA, 22 nt, Human
uuggagaagaacugaaaucaua

SEQ ID NO: 2177407 - RNA, 18 nt, Human
uuggagaguuuccugaaa

SEQ ID NO: 2177408 - RNA, 13 nt, Human
uuggagccugcag

SEQ ID NO: 2177409 - RNA, 15 nt, Human
uuggagccugcagag

SEQ ID NO: 2177410 - RNA, 11 nt, Human
uuggagccugc

SEQ ID NO: 2177411 - RNA, 20 nt, Human
uuggagauaaucuagaacac

SEQ ID NO: 2177412 - RNA, 14 nt, Human
uuggagaucaagga

SEQ ID NO: 2177413 - RNA, 13 nt, Human
uuggagaauuuag

SEQ ID NO: 2177414 - RNA, 15 nt, Human
uuggagaaauuauuu

SEQ ID NO: 2177415 - RNA, 18 nt, Human
uuggagaagguuaucaaa

SEQ ID NO: 2177416 - RNA, 20 nt, Human
uuggagaagcccgugugaga

SEQ ID NO: 2177417 - RNA, 14 nt, Human
uuggagaaauuauu

SEQ ID NO: 2177418 - RNA, 21 nt, Human
uuggagaguuuccugaaacaa

SEQ ID NO: 2177419 - RNA, 18 nt, Human
uuggagaauuuagguuuu

SEQ ID NO: 2177420 - RNA, 18 nt, Human
uuggagacacaacuauuu

SEQ ID NO: 2177421 - RNA, 14 nt, Human
uugcucuggcugag

SEQ ID NO: 2177422 - RNA, 19 nt, Human
uugcucuuaaguuguggag

SEQ ID NO: 2177423 - RNA, 14 nt, Human
uugcucugggugga

SEQ ID NO: 2177424 - RNA, 23 nt, Human
uugcucuguaaucucguuucaaa

SEQ ID NO: 2177425 - RNA, 23 nt, Human
aucuuguuuuuccacuacugcua

SEQ ID NO: 2177426 - RNA, 15 nt, Human
aucuuguuuuuccac

SEQ ID NO: 2177427 - RNA, 15 nt, Human
aucuuuaaaauacac

SEQ ID NO: 2177428 - RNA, 12 nt, Human
aucuuuaaaaua

SEQ ID NO: 2177429 - RNA, 14 nt, Human
uugcugaaagaucu

SEQ ID NO: 2177430 - RNA, 22 nt, Human
uugcuuagucacuuauuucaua

SEQ ID NO: 2177431 - RNA, 16 nt, Human
uugcucuuucuacucu

SEQ ID NO: 2177432 - RNA, 17 nt, Human
uugcugaaaaugguauu

SEQ ID NO: 2177433 - RNA, 18 nt, Human
uugcucuugaugccuggc

SEQ ID NO: 2177434 - RNA, 14 nt, Human
uugcucuugaugcc

SEQ ID NO: 2177435 - RNA, 17 nt, Human
uugcucuugaugccugg

SEQ ID NO: 2177436 - RNA, 23 nt, Human
uugcuuauuguuccaagacauug

SEQ ID NO: 2177437 - RNA, 22 nt, Human
uugcuuauuguuccaagacauu

SEQ ID NO: 2177438 - RNA, 12 nt, Human
uugcuucacuca

SEQ ID NO: 2177439 - RNA, 14 nt, Human
uugcuucauaaaug

SEQ ID NO: 2177440 - RNA, 20 nt, Human
uugcuuauuguuccaagaca

SEQ ID NO: 2177441 - RNA, 18 nt, Human
uugcuuauuguuccaaga

SEQ ID NO: 2177442 - RNA, 16 nt, Human
uugcuuauuguuccaa

SEQ ID NO: 2177443 - RNA, 15 nt, Human
uugcuuauuguucca

SEQ ID NO: 2177444 - RNA, 13 nt, Human
uugcuuaugacau

SEQ ID NO: 2177445 - RNA, 20 nt, Human
uugcuucauaaaugaagcag

SEQ ID NO: 2177446 - RNA, 15 nt, Human
uugcuucauaaauga

SEQ ID NO: 2177447 - RNA, 17 nt, Human
uugcuucauaaaugaag

SEQ ID NO: 2177448 - RNA, 15 nt, Human
uugcuuuauuccaga

SEQ ID NO: 2177449 - RNA, 14 nt, Human
uugcuuugaagcag

SEQ ID NO: 2177450 - RNA, 15 nt, Human
uugcuuucugcucag

SEQ ID NO: 2177451 - RNA, 15 nt, Human
uugcuuugaagcagu

SEQ ID NO: 2177452 - RNA, 11 nt, Human
uugcuuugagc

SEQ ID NO: 2177453 - RNA, 16 nt, Human
uugcuuugaagcaguu

SEQ ID NO: 2177454 - RNA, 22 nt, Human
uugcuuugaagcaguuguguca

SEQ ID NO: 2177455 - RNA, 13 nt, Human
uugcuuucugaaa

SEQ ID NO: 2177456 - RNA, 20 nt, Human
uugcuuuaugccuucuuauu

SEQ ID NO: 2177457 - RNA, 16 nt, Human
uugcuuuauaaauaaa

SEQ ID NO: 2177458 - RNA, 15 nt, Human
uugcuuucugaaauu

SEQ ID NO: 2177459 - RNA, 14 nt, Human
uugcuuucugaaau

SEQ ID NO: 2177460 - RNA, 20 nt, Human
uugcuuucugcucagcuucu

SEQ ID NO: 2177461 - RNA, 13 nt, Human
uugcuuuguaugc

SEQ ID NO: 2177462 - RNA, 14 nt, Human
uugcuuugcccagc

SEQ ID NO: 2177463 - RNA, 13 nt, Human
uugcuuugcccug

SEQ ID NO: 2177464 - RNA, 15 nt, Human
uugcuuugugauuuu

SEQ ID NO: 2177465 - RNA, 15 nt, Human
augaagcaaacacau

SEQ ID NO: 2177466 - RNA, 22 nt, Human
augaagauucuccugugcuaga

SEQ ID NO: 2177467 - RNA, 13 nt, Human
augaagcagcuuu

SEQ ID NO: 2177468 - RNA, 15 nt, Human
augaagcagcuuuaa

SEQ ID NO: 2177469 - RNA, 15 nt, Human
augaagcaaugcuuc

SEQ ID NO: 2177470 - RNA, 21 nt, Human
augaaucccacccacauguga

SEQ ID NO: 2177471 - RNA, 15 nt, Human
augaaucgcuucucu

SEQ ID NO: 2177472 - RNA, 18 nt, Human
augaaucccacccacaug

SEQ ID NO: 2177473 - RNA, 22 nt, Human
augaagcagcuuuaaacaaauu

SEQ ID NO: 2177474 - RNA, 17 nt, Human
augaaucgcuucucuuu

SEQ ID NO: 2177475 - RNA, 20 nt, Human
augaaucgcuucucuuuuga

SEQ ID NO: 2177476 - RNA, 14 nt, Human
augaaucuaagcag

SEQ ID NO: 2177477 - RNA, 16 nt, Human
augaaucuaagcagca

SEQ ID NO: 2177478 - RNA, 11 nt, Human
augaaucuaug

SEQ ID NO: 2177479 - RNA, 14 nt, Human
augaaucuaugcca

SEQ ID NO: 2177480 - RNA, 21 nt, Human
augaaucuaugccaaagauca

SEQ ID NO: 2177481 - RNA, 16 nt, Human
augaaucuauuauacu

SEQ ID NO: 2177482 - RNA, 16 nt, Human
augaauguaucaggaa

SEQ ID NO: 2177483 - RNA, 16 nt, Human
augaauguaugugcac

SEQ ID NO: 2177484 - RNA, 17 nt, Human
augaauguaugugcacu

SEQ ID NO: 2177485 - RNA, 18 nt, Human
augaauguaugugcacug

SEQ ID NO: 2177486 - RNA, 15 nt, Human
augaauguaucagga

SEQ ID NO: 2177487 - RNA, 16 nt, Human
augaaucuuuuccacu

SEQ ID NO: 2177488 - RNA, 14 nt, Human
augaaugaaugaau

SEQ ID NO: 2177489 - RNA, 20 nt, Human
augaauguauuuauuuggga

SEQ ID NO: 2177490 - RNA, 19 nt, Human
augaauguaugugcacugu

SEQ ID NO: 2177491 - RNA, 17 nt, Human
augaauguauuuauuug

SEQ ID NO: 2177492 - RNA, 15 nt, Human
augaauguauuuauu

SEQ ID NO: 2177493 - RNA, 17 nt, Human
augaaugaaacauuuug

SEQ ID NO: 2177494 - RNA, 23 nt, Human
augaaucuauuauacuguauuaa

SEQ ID NO: 2177495 - RNA, 18 nt, Human
augaaucuauuauacugu

SEQ ID NO: 2177496 - RNA, 14 nt, Human
augaagcaaacaca

SEQ ID NO: 2177497 - RNA, 19 nt, Human
augaagauucuccugugcu

SEQ ID NO: 2177498 - RNA, 22 nt, Human
augaagauguuucaaaaaaucu

SEQ ID NO: 2177499 - RNA, 21 nt, Human
augaagaugucuaauaguuau

SEQ ID NO: 2177500 - RNA, 14 nt, Human
augaagcaaugcuu

SEQ ID NO: 2177501 - RNA, 22 nt, Human
augaagaaaagugggccagugu

SEQ ID NO: 2177502 - RNA, 21 nt, Human
augaagaaaagugggccagug

SEQ ID NO: 2177503 - RNA, 19 nt, Human
augaagaaaaucacuuagg

SEQ ID NO: 2177504 - RNA, 14 nt, Human
augaagaaagugga

SEQ ID NO: 2177505 - RNA, 14 nt, Human
augaagaacugagg

SEQ ID NO: 2177506 - RNA, 17 nt, Human
augaaccuucuggccuc

SEQ ID NO: 2177507 - RNA, 14 nt, Human
augaaccuucuggc

SEQ ID NO: 2177508 - RNA, 23 nt, Human
augaaccucaagcugcaucuaga

SEQ ID NO: 2177509 - RNA, 17 nt, Human
augaaccgcugaauaug

SEQ ID NO: 2177510 - RNA, 13 nt, Human
augaaccuggagg

SEQ ID NO: 2177511 - RNA, 16 nt, Human
augaacacuuaauaaa

SEQ ID NO: 2177512 - RNA, 21 nt, Human
augaacccaggacgcuucuga

SEQ ID NO: 2177513 - RNA, 22 nt, Human
augaacccaggacgcuucugaa

SEQ ID NO: 2177514 - RNA, 19 nt, Human
augaagaaaagugggccag

SEQ ID NO: 2177515 - RNA, 22 nt, Human
augaagaaaaaauacauuuuau

SEQ ID NO: 2177516 - RNA, 20 nt, Human
augaagaaaaaauacauuuu

SEQ ID NO: 2177517 - RNA, 19 nt, Human
augaagaaaaaauacauuu

SEQ ID NO: 2177518 - RNA, 17 nt, Human
augaagaaaaaauacau

SEQ ID NO: 2177519 - RNA, 15 nt, Human
augaagaaaaaauac

SEQ ID NO: 2177520 - RNA, 17 nt, Human
augaaccuggagggcua

SEQ ID NO: 2177521 - RNA, 17 nt, Human
augaacuuucucuucau

SEQ ID NO: 2177522 - RNA, 18 nt, Human
augaacuuguaaaggaau

SEQ ID NO: 2177523 - RNA, 14 nt, Human
augaaauaaagaaa

SEQ ID NO: 2177524 - RNA, 20 nt, Human
augaaauaacuccuucuugu

SEQ ID NO: 2177525 - RNA, 22 nt, Human
augaaauaacuccuucuuguag

SEQ ID NO: 2177526 - RNA, 16 nt, Human
uuggaggccuuuagau

SEQ ID NO: 2177527 - RNA, 15 nt, Human
uuggaggccagccag

SEQ ID NO: 2177528 - RNA, 21 nt, Human
uuggagcuuuuuucuuuaaga

SEQ ID NO: 2177529 - RNA, 14 nt, Human
uuggagcuucaugg

SEQ ID NO: 2177530 - RNA, 18 nt, Human
uuggagccugcagagcug

SEQ ID NO: 2177531 - RNA, 14 nt, Human
uuggagccugcagg

SEQ ID NO: 2177532 - RNA, 14 nt, Human
uuggagcugagccu

SEQ ID NO: 2177533 - RNA, 16 nt, Human
uuggccaucucuggau

SEQ ID NO: 2177534 - RNA, 16 nt, Human
uuggcccaagcucuug

SEQ ID NO: 2177535 - RNA, 23 nt, Human
augaaccacaucuugcucugcug

SEQ ID NO: 2177536 - RNA, 22 nt, Human
augaaccacaucuugcucugcu

SEQ ID NO: 2177537 - RNA, 15 nt, Human
augaacacacugugu

SEQ ID NO: 2177538 - RNA, 22 nt, Human
augaacacacuguguccuggug

SEQ ID NO: 2177539 - RNA, 13 nt, Human
augaacacacugu

SEQ ID NO: 2177540 - RNA, 15 nt, Human
augaacaaauugaac

SEQ ID NO: 2177541 - RNA, 18 nt, Human
augaacaaauugaacucu

SEQ ID NO: 2177542 - RNA, 19 nt, Human
augaaauaucagacuagug

SEQ ID NO: 2177543 - RNA, 15 nt, Human
augaaauaucuguau

SEQ ID NO: 2177544 - RNA, 13 nt, Human
augaaauaucaga

SEQ ID NO: 2177545 - RNA, 13 nt, Human
augaaauaugcau

SEQ ID NO: 2177546 - RNA, 15 nt, Human
augaaauaugcaucu

SEQ ID NO: 2177547 - RNA, 22 nt, Human
augaaauacuguuugagguuuu

SEQ ID NO: 2177548 - RNA, 17 nt, Human
augaaauacuauuuaaa

SEQ ID NO: 2177549 - RNA, 19 nt, Human
augaaauacacaaguaaac

SEQ ID NO: 2177550 - RNA, 20 nt, Human
augaaauacacaaguaaaca

SEQ ID NO: 2177551 - RNA, 20 nt, Human
augaaauuuuccaaugucug

SEQ ID NO: 2177552 - RNA, 21 nt, Human
augaaauuuaauauagcuauu

SEQ ID NO: 2177553 - RNA, 22 nt, Human
augaaauuuucuagacuuucug

SEQ ID NO: 2177554 - RNA, 19 nt, Human
augaaauuuucuagacuuu

SEQ ID NO: 2177555 - RNA, 21 nt, Human
augaaauuuucuagacuuucu

SEQ ID NO: 2177556 - RNA, 23 nt, Human
augaaauuuucuagacuuucugu

SEQ ID NO: 2177557 - RNA, 13 nt, Human
uugguguugacau

SEQ ID NO: 2177558 - RNA, 16 nt, Human
uugguguguggagaug

SEQ ID NO: 2177559 - RNA, 18 nt, Human
uugguuugcagaugacaa

SEQ ID NO: 2177560 - RNA, 20 nt, Human
uugguuuggccaucucugga

SEQ ID NO: 2177561 - RNA, 14 nt, Human
uugguuuguaaauu

SEQ ID NO: 2177562 - RNA, 12 nt, Human
uuggugguuuuu

SEQ ID NO: 2177563 - RNA, 20 nt, Human
uugguguaaagccaacaccc

SEQ ID NO: 2177564 - RNA, 17 nt, Human
uuggugucgggcaugac

SEQ ID NO: 2177565 - RNA, 18 nt, Human
uuggugucgggcaugaca

SEQ ID NO: 2177566 - RNA, 19 nt, Human
uuggugucgggcaugacac

SEQ ID NO: 2177567 - RNA, 14 nt, Human
uuggguggagaagc

SEQ ID NO: 2177568 - RNA, 15 nt, Human
uuggguggagaagcc

SEQ ID NO: 2177569 - RNA, 16 nt, Human
uuggguggagaagcca

SEQ ID NO: 2177570 - RNA, 17 nt, Human
uuggguggagaagccau

SEQ ID NO: 2177571 - RNA, 18 nt, Human
uuggguggagaagccauu

SEQ ID NO: 2177572 - RNA, 19 nt, Human
uuggguggagaagccauug

SEQ ID NO: 2177573 - RNA, 16 nt, Human
uugggguuuuuuaaua

SEQ ID NO: 2177574 - RNA, 14 nt, Human
uuggguccuggguc

SEQ ID NO: 2177575 - RNA, 19 nt, Human
uuggugguuucagaaaugu

SEQ ID NO: 2177576 - RNA, 18 nt, Human
uuggugguuucagaaaug

SEQ ID NO: 2177577 - RNA, 19 nt, Human
uugggucaccccuccagga

SEQ ID NO: 2177578 - RNA, 14 nt, Human
uuggguaggcggga

SEQ ID NO: 2177579 - RNA, 18 nt, Human
uuggguaccuauuuucau

SEQ ID NO: 2177580 - RNA, 20 nt, Human
uugggguggguauaaaagau

SEQ ID NO: 2177581 - RNA, 15 nt, Human
uugggguuguguugu

SEQ ID NO: 2177582 - RNA, 16 nt, Human
uugggguuguguuguc

SEQ ID NO: 2177583 - RNA, 18 nt, Human
uugggguggguauaaaag

SEQ ID NO: 2177584 - RNA, 16 nt, Human
augaaugucaguguga

SEQ ID NO: 2177585 - RNA, 18 nt, Human
augaaugucagugugacu

SEQ ID NO: 2177586 - RNA, 13 nt, Human
uugguuuugacug

SEQ ID NO: 2177587 - RNA, 13 nt, Human
uuguaaauuguca

SEQ ID NO: 2177588 - RNA, 14 nt, Human
uuguaacagacauu

SEQ ID NO: 2177589 - RNA, 15 nt, Human
uuguaacagacauug

SEQ ID NO: 2177590 - RNA, 19 nt, Human
uuguaaauuuaugugaugg

SEQ ID NO: 2177591 - RNA, 15 nt, Human
uugguuuugacugga

SEQ ID NO: 2177592 - RNA, 15 nt, Human
uuguaagaguguaga

SEQ ID NO: 2177593 - RNA, 20 nt, Human
uuguaagaguggaaccaaca

SEQ ID NO: 2177594 - RNA, 22 nt, Human
uuguaagacaaagguuuuccuc

SEQ ID NO: 2177595 - RNA, 16 nt, Human
uuguaagacaauccau

SEQ ID NO: 2177596 - RNA, 19 nt, Human
uuguaagacaauccaugua

SEQ ID NO: 2177597 - RNA, 17 nt, Human
uuguaagaaauacugua

SEQ ID NO: 2177598 - RNA, 21 nt, Human
uuguaagacaaagguuuuccu

SEQ ID NO: 2177599 - RNA, 18 nt, Human
uuguaagacaaagguuuu

SEQ ID NO: 2177600 - RNA, 22 nt, Human
uuguaacccagauuuugcugua

SEQ ID NO: 2177601 - RNA, 14 nt, Human
uuguaaccucagcu

SEQ ID NO: 2177602 - RNA, 15 nt, Human
uuguaaccucagcuc

SEQ ID NO: 2177603 - RNA, 16 nt, Human
uuguaacccagauuuu

SEQ ID NO: 2177604 - RNA, 16 nt, Human
uuguaacagacauugu

SEQ ID NO: 2177605 - RNA, 17 nt, Human
uuguaacagacauuguu

SEQ ID NO: 2177606 - RNA, 15 nt, Human
uuguaacguugcugu

SEQ ID NO: 2177607 - RNA, 16 nt, Human
uuguaacguugcugug

SEQ ID NO: 2177608 - RNA, 19 nt, Human
uuguaacguugcuguggga

SEQ ID NO: 2177609 - RNA, 16 nt, Human
uuguaaccucagcucu

SEQ ID NO: 2177610 - RNA, 18 nt, Human
uuguaaccucagcucugg

SEQ ID NO: 2177611 - RNA, 19 nt, Human
uuguaaccucagcucuggg

SEQ ID NO: 2177612 - RNA, 20 nt, Human
uuguaaccucagcucuggga

SEQ ID NO: 2177613 - RNA, 20 nt, Human
uuguaaucguuaugugugua

SEQ ID NO: 2177614 - RNA, 15 nt, Human
uuguaaucguuaugu

SEQ ID NO: 2177615 - RNA, 14 nt, Human
uuguaaucacuguu

SEQ ID NO: 2177616 - RNA, 12 nt, Human
uuguaaugaaaa

SEQ ID NO: 2177617 - RNA, 12 nt, Human
uuguaauuauug

SEQ ID NO: 2177618 - RNA, 14 nt, Human
uuguaauucuaaau

SEQ ID NO: 2177619 - RNA, 17 nt, Human
uuguaauucuaaaugaa

SEQ ID NO: 2177620 - RNA, 14 nt, Human
uuguaauuauugug

SEQ ID NO: 2177621 - RNA, 18 nt, Human
uuguaauuauugugauuu

SEQ ID NO: 2177622 - RNA, 23 nt, Human
uuguaauuuaaacaggcccagca

SEQ ID NO: 2177623 - RNA, 21 nt, Human
uuguaauuuaaacaggcccag

SEQ ID NO: 2177624 - RNA, 22 nt, Human
uuguaauuuaaacaggcccagc

SEQ ID NO: 2177625 - RNA, 23 nt, Human
uuguaauucuaaaugaauguuua

SEQ ID NO: 2177626 - RNA, 19 nt, Human
uuguaauugcuuacauuuu

SEQ ID NO: 2177627 - RNA, 17 nt, Human
uuguaauugcuuacauu

SEQ ID NO: 2177628 - RNA, 18 nt, Human
uuguaauugcuuacauuu

SEQ ID NO: 2177629 - RNA, 13 nt, Human
uuguaagaugcug

SEQ ID NO: 2177630 - RNA, 15 nt, Human
uuguaagaugcuggg

SEQ ID NO: 2177631 - RNA, 17 nt, Human
uuguaagaguguagaag

SEQ ID NO: 2177632 - RNA, 19 nt, Human
uuguaagaguguagaagca

SEQ ID NO: 2177633 - RNA, 21 nt, Human
uuguaagaguguagaagcauu

SEQ ID NO: 2177634 - RNA, 22 nt, Human
uuguaagaguguagaagcauuc

SEQ ID NO: 2177635 - RNA, 13 nt, Human
uuguaaguuucag

SEQ ID NO: 2177636 - RNA, 17 nt, Human
uuguaagaugcuggguu

SEQ ID NO: 2177637 - RNA, 16 nt, Human
uuguaaguuucaggug

SEQ ID NO: 2177638 - RNA, 17 nt, Human
uuguaaguuucagguga

SEQ ID NO: 2177639 - RNA, 18 nt, Human
uuguaaguuucaggugac

SEQ ID NO: 2177640 - RNA, 19 nt, Human
uuguaaguuucaggugaca

SEQ ID NO: 2177641 - RNA, 22 nt, Human
uuguaaguuucaggugacaugu

SEQ ID NO: 2177642 - RNA, 21 nt, Human
uucauggggugaugcugggcu

SEQ ID NO: 2177643 - RNA, 13 nt, Human
auaugugaacauu

SEQ ID NO: 2177644 - RNA, 17 nt, Human
uucauggcagaaggcaa

SEQ ID NO: 2177645 - RNA, 18 nt, Human
uucauguaaacugugcac

SEQ ID NO: 2177646 - RNA, 17 nt, Human
uucauguaaacugugca

SEQ ID NO: 2177647 - RNA, 14 nt, Human
uucauguaaacugu

SEQ ID NO: 2177648 - RNA, 19 nt, Human
uucauggugaaaauguacu

SEQ ID NO: 2177649 - RNA, 19 nt, Human
uucauguaaacaaaauuua

SEQ ID NO: 2177650 - RNA, 17 nt, Human
uucauguacaagaugaa

SEQ ID NO: 2177651 - RNA, 22 nt, Human
uucaugucaacuucuggcuccu

SEQ ID NO: 2177652 - RNA, 21 nt, Human
uucauguacaagaugaaggag

SEQ ID NO: 2177653 - RNA, 18 nt, Human
uucauguaauccucaaga

SEQ ID NO: 2177654 - RNA, 19 nt, Human
uucauguaaacugugcacc

SEQ ID NO: 2177655 - RNA, 14 nt, Human
auaugucagggcgu

SEQ ID NO: 2177656 - RNA, 11 nt, Human
auauguccugg

SEQ ID NO: 2177657 - RNA, 16 nt, Human
auaugugaacauuuau

SEQ ID NO: 2177658 - RNA, 14 nt, Human
auaugucaagccau

SEQ ID NO: 2177659 - RNA, 14 nt, Human
auauguauuguaaa

SEQ ID NO: 2177660 - RNA, 21 nt, Human
auauguauuguaaacaugugu

SEQ ID NO: 2177661 - RNA, 16 nt, Human
auaugcaaugugaagc

SEQ ID NO: 2177662 - RNA, 13 nt, Human
auaugcacacauu

SEQ ID NO: 2177663 - RNA, 15 nt, Human
auauguaugugugua

SEQ ID NO: 2177664 - RNA, 16 nt, Human
auauguauguguguau

SEQ ID NO: 2177665 - RNA, 16 nt, Human
auauguauuaauauuc

SEQ ID NO: 2177666 - RNA, 19 nt, Human
auaugcacacagugcuuuc

SEQ ID NO: 2177667 - RNA, 15 nt, Human
auaugcacaauagca

SEQ ID NO: 2177668 - RNA, 20 nt, Human
auaugauuuaaaacauguaa

SEQ ID NO: 2177669 - RNA, 15 nt, Human
auaugauuuaaaaca

SEQ ID NO: 2177670 - RNA, 16 nt, Human
auaugauuuaaaacau

SEQ ID NO: 2177671 - RNA, 23 nt, Human
auaugcaaagcacugacuucuaa

SEQ ID NO: 2177672 - RNA, 13 nt, Human
auaugauuuaaaa

SEQ ID NO: 2177673 - RNA, 15 nt, Human
auaugauucugcuuu

SEQ ID NO: 2177674 - RNA, 16 nt, Human
auaugcaaagcacuga

SEQ ID NO: 2177675 - RNA, 19 nt, Human
auaucuucugauuuguccc

SEQ ID NO: 2177676 - RNA, 15 nt, Human
auaucuugaaaugaa

SEQ ID NO: 2177677 - RNA, 20 nt, Human
auaugauuuaaaucagccgu

SEQ ID NO: 2177678 - RNA, 12 nt, Human
auaucugcuguc

SEQ ID NO: 2177679 - RNA, 13 nt, Human
auaucugcugucc

SEQ ID NO: 2177680 - RNA, 18 nt, Human
auaucugcuguccagaca

SEQ ID NO: 2177681 - RNA, 23 nt, Human
auaucugccuuuauuguguuugu

SEQ ID NO: 2177682 - RNA, 11 nt, Human
auaucugcugu

SEQ ID NO: 2177683 - RNA, 17 nt, Human
auaucugggauucuacu

SEQ ID NO: 2177684 - RNA, 21 nt, Human
auaucugggauucuacuuuaa

SEQ ID NO: 2177685 - RNA, 13 nt, Human
auaucugcuucag

SEQ ID NO: 2177686 - RNA, 16 nt, Human
auaucugcuucagugg

SEQ ID NO: 2177687 - RNA, 15 nt, Human
auaucuggacaagcc

SEQ ID NO: 2177688 - RNA, 20 nt, Human
auaucuguauuuaauuuuga

SEQ ID NO: 2177689 - RNA, 15 nt, Human
auaucuguauauaaa

SEQ ID NO: 2177690 - RNA, 18 nt, Human
auaucuguauuuaauuuu

SEQ ID NO: 2177691 - RNA, 24 nt, Human
auaucuguauuuaauuuugacacu

SEQ ID NO: 2177692 - RNA, 14 nt, Human
auaucuaucuuaua

SEQ ID NO: 2177693 - RNA, 13 nt, Human
auaucuaucuuau

SEQ ID NO: 2177694 - RNA, 21 nt, Human
auaucuaucuuauauaguuua

SEQ ID NO: 2177695 - RNA, 20 nt, Human
auaucuaucuuauauaguuu

SEQ ID NO: 2177696 - RNA, 22 nt, Human
auaucugaaaauguauguguaa

SEQ ID NO: 2177697 - RNA, 14 nt, Human
auaucugccuuuau

SEQ ID NO: 2177698 - RNA, 16 nt, Human
auaucugccuuuauug

SEQ ID NO: 2177699 - RNA, 18 nt, Human
auaucugccuuuauugug

SEQ ID NO: 2177700 - RNA, 20 nt, Human
auaucugccuuuauuguguu

SEQ ID NO: 2177701 - RNA, 15 nt, Human
auaucugaaauguga

SEQ ID NO: 2177702 - RNA, 14 nt, Human
auauccuuugccuc

SEQ ID NO: 2177703 - RNA, 15 nt, Human
auauauucccaauag

SEQ ID NO: 2177704 - RNA, 17 nt, Human
auaucgacuuguuuuug

SEQ ID NO: 2177705 - RNA, 13 nt, Human
auaucuaaauuga

SEQ ID NO: 2177706 - RNA, 14 nt, Human
auaucuaaauugaa

SEQ ID NO: 2177707 - RNA, 18 nt, Human
auauauucagccuggcuu

SEQ ID NO: 2177708 - RNA, 20 nt, Human
auaucuaauuauuuugcagu

SEQ ID NO: 2177709 - RNA, 17 nt, Human
auaucuaaauugaauaa

SEQ ID NO: 2177710 - RNA, 18 nt, Human
auaucuaaauugaauaau

SEQ ID NO: 2177711 - RNA, 14 nt, Human
auaucuaaauuuag

SEQ ID NO: 2177712 - RNA, 22 nt, Human
auaucuaaauugaauaauggua

SEQ ID NO: 2177713 - RNA, 18 nt, Human
uucaucauccuaagcuau

SEQ ID NO: 2177714 - RNA, 21 nt, Human
uucaucauccuaagcuauuca

SEQ ID NO: 2177715 - RNA, 16 nt, Human
uucauccaauccucac

SEQ ID NO: 2177716 - RNA, 22 nt, Human
uucauccaauccucacugggug

SEQ ID NO: 2177717 - RNA, 21 nt, Human
uucauccaauccucacugggu

SEQ ID NO: 2177718 - RNA, 20 nt, Human
uucauccaauccucacuggg

SEQ ID NO: 2177719 - RNA, 18 nt, Human
uucauccaauccucacug

SEQ ID NO: 2177720 - RNA, 18 nt, Human
auauauguuuuugaaggc

SEQ ID NO: 2177721 - RNA, 15 nt, Human
uucauccacuagugc

SEQ ID NO: 2177722 - RNA, 16 nt, Human
auauauuaaaaauaua

SEQ ID NO: 2177723 - RNA, 17 nt, Human
auauauuaaaaauauaa

SEQ ID NO: 2177724 - RNA, 18 nt, Human
auauauuaaaaauauaaa

SEQ ID NO: 2177725 - RNA, 22 nt, Human
auauauuaaaaauauaaaacug

SEQ ID NO: 2177726 - RNA, 16 nt, Human
uucaguauaauuuaac

SEQ ID NO: 2177727 - RNA, 17 nt, Human
uucaguaccuggaggag

SEQ ID NO: 2177728 - RNA, 15 nt, Human
uucaguaccuggagg

SEQ ID NO: 2177729 - RNA, 16 nt, Human
uucaguaccuggagga

SEQ ID NO: 2177730 - RNA, 23 nt, Human
uucaguaccuggaggaggagcag

SEQ ID NO: 2177731 - RNA, 23 nt, Human
uucaguauaauuuaacuucagag

SEQ ID NO: 2177732 - RNA, 20 nt, Human
uucaguauaauuuaacuuca

SEQ ID NO: 2177733 - RNA, 19 nt, Human
uucaguauguugucaaaga

SEQ ID NO: 2177734 - RNA, 17 nt, Human
uucaguauuuuggagaa

SEQ ID NO: 2177735 - RNA, 16 nt, Human
uucauagacccucuca

SEQ ID NO: 2177736 - RNA, 17 nt, Human
uucaguauguugucaaa

SEQ ID NO: 2177737 - RNA, 14 nt, Human
uucauacucuagau

SEQ ID NO: 2177738 - RNA, 17 nt, Human
uucauacucuagauuuu

SEQ ID NO: 2177739 - RNA, 19 nt, Human
uucauaccuacauguauuu

SEQ ID NO: 2177740 - RNA, 16 nt, Human
uucauaccuacaugua

SEQ ID NO: 2177741 - RNA, 21 nt, Human
uucauauuuacuucuuauaca

SEQ ID NO: 2177742 - RNA, 16 nt, Human
uucauauuuacuucuu

SEQ ID NO: 2177743 - RNA, 19 nt, Human
uucauagggucucuucagg

SEQ ID NO: 2177744 - RNA, 14 nt, Human
uucauagauuuccu

SEQ ID NO: 2177745 - RNA, 19 nt, Human
uucauagcuaagaaauaaa

SEQ ID NO: 2177746 - RNA, 13 nt, Human
uucauagcccagu

SEQ ID NO: 2177747 - RNA, 17 nt, Human
uucauagacccucucaa

SEQ ID NO: 2177748 - RNA, 13 nt, Human
uucagggucauag

SEQ ID NO: 2177749 - RNA, 22 nt, Human
uucagggggguugugaggccug

SEQ ID NO: 2177750 - RNA, 22 nt, Human
uucagggggccaggugcacaga

SEQ ID NO: 2177751 - RNA, 23 nt, Human
uucaggggcugcccgcucccagu

SEQ ID NO: 2177752 - RNA, 21 nt, Human
uucagggggguugugaggccu

SEQ ID NO: 2177753 - RNA, 13 nt, Human
uucagggggccag

SEQ ID NO: 2177754 - RNA, 22 nt, Human
uucaggggcugcccgcucccag

SEQ ID NO: 2177755 - RNA, 23 nt, Human
uucaggggacucagcccugaggu

SEQ ID NO: 2177756 - RNA, 21 nt, Human
uucaggggagucccgucagga

SEQ ID NO: 2177757 - RNA, 14 nt, Human
uucaguaauaacuc

SEQ ID NO: 2177758 - RNA, 21 nt, Human
uucaguacccucucagcucca

SEQ ID NO: 2177759 - RNA, 22 nt, Human
uucaguacccucucagcuccag

SEQ ID NO: 2177760 - RNA, 16 nt, Human
uucaggguccugagau

SEQ ID NO: 2177761 - RNA, 15 nt, Human
uucagggugaugcca

SEQ ID NO: 2177762 - RNA, 20 nt, Human
uucaguaauaaacuguguuu

SEQ ID NO: 2177763 - RNA, 23 nt, Human
uucagccuagccgaccucagccu

SEQ ID NO: 2177764 - RNA, 12 nt, Human
uucagccucugg

SEQ ID NO: 2177765 - RNA, 15 nt, Human
uucagccucuuucug

SEQ ID NO: 2177766 - RNA, 22 nt, Human
uucagccuagccgaccucagcc

SEQ ID NO: 2177767 - RNA, 21 nt, Human
uucagccuagccgaccucagc

SEQ ID NO: 2177768 - RNA, 20 nt, Human
uucagccuagccgaccucag

SEQ ID NO: 2177769 - RNA, 23 nt, Human
uucagcccuaaaucuagacucaa

SEQ ID NO: 2177770 - RNA, 20 nt, Human
uucaggggacucagcccuga

SEQ ID NO: 2177771 - RNA, 19 nt, Human
uucaggggacucagcccug

SEQ ID NO: 2177772 - RNA, 17 nt, Human
uucaggggacucagccc

SEQ ID NO: 2177773 - RNA, 16 nt, Human
uucaggggacucagcc

SEQ ID NO: 2177774 - RNA, 18 nt, Human
uucagggcagggcucuga

SEQ ID NO: 2177775 - RNA, 22 nt, Human
uucagggaauuucaggaacuag

SEQ ID NO: 2177776 - RNA, 13 nt, Human
auauaaacacuau

SEQ ID NO: 2177777 - RNA, 15 nt, Human
auauaaacacuauau

SEQ ID NO: 2177778 - RNA, 14 nt, Human
auauaaaccuaaaa

SEQ ID NO: 2177779 - RNA, 19 nt, Human
auauaaaccuaaaaaagau

SEQ ID NO: 2177780 - RNA, 13 nt, Human
auauaaaauauuu

SEQ ID NO: 2177781 - RNA, 16 nt, Human
auaguuuuauuaauaa

SEQ ID NO: 2177782 - RNA, 23 nt, Human
auaguuuuacuuuuaaacugugu

SEQ ID NO: 2177783 - RNA, 21 nt, Human
auauaaaaggcaaauguguac

SEQ ID NO: 2177784 - RNA, 23 nt, Human
auauaaaaggcaaauguguacau

SEQ ID NO: 2177785 - RNA, 15 nt, Human
auauaaaauaaauau

SEQ ID NO: 2177786 - RNA, 16 nt, Human
auauaaaauaaauaua

SEQ ID NO: 2177787 - RNA, 14 nt, Human
auauaaaauaugaa

SEQ ID NO: 2177788 - RNA, 18 nt, Human
auauaaaauaaauauaua

SEQ ID NO: 2177789 - RNA, 21 nt, Human
auauaaaauaaauauauauaa

SEQ ID NO: 2177790 - RNA, 24 nt, Human
auauaaaauaaauauauauaaacc

SEQ ID NO: 2177791 - RNA, 17 nt, Human
auauaaauauauauaaa

SEQ ID NO: 2177792 - RNA, 20 nt, Human
auauaaaccuaaaaaagaua

SEQ ID NO: 2177793 - RNA, 21 nt, Human
auauaaaccuaaaaaagauau

SEQ ID NO: 2177794 - RNA, 16 nt, Human
auauaaauauuagaaa

SEQ ID NO: 2177795 - RNA, 22 nt, Human
auauaaauauuagaaacagcuu

SEQ ID NO: 2177796 - RNA, 23 nt, Human
auauaaauauauauauauauaaa

SEQ ID NO: 2177797 - RNA, 20 nt, Human
auauaaauauauauaaauau

SEQ ID NO: 2177798 - RNA, 21 nt, Human
auauaaauauauauaaauaua

SEQ ID NO: 2177799 - RNA, 17 nt, Human
auauaaaugguuaaaag

SEQ ID NO: 2177800 - RNA, 23 nt, Human
auauaaauggcugguuuuuagaa

SEQ ID NO: 2177801 - RNA, 22 nt, Human
auauaaaugcaauauuaaugcc

SEQ ID NO: 2177802 - RNA, 14 nt, Human
auaguuucagauau

SEQ ID NO: 2177803 - RNA, 21 nt, Human
auaguuucagauauauaucau

SEQ ID NO: 2177804 - RNA, 17 nt, Human
auaguccagcuuuguuc

SEQ ID NO: 2177805 - RNA, 22 nt, Human
auaguuuuacuuuuaaacugug

SEQ ID NO: 2177806 - RNA, 21 nt, Human
auaguuuuacuuuuaaacugu

SEQ ID NO: 2177807 - RNA, 15 nt, Human
auaguuuuacuuuua

SEQ ID NO: 2177808 - RNA, 13 nt, Human
auaguuuguacau

SEQ ID NO: 2177809 - RNA, 15 nt, Human
auaguuuguacaugc

SEQ ID NO: 2177810 - RNA, 16 nt, Human
auagggucucuucagg

SEQ ID NO: 2177811 - RNA, 22 nt, Human
auagggccuggucccugggagg

SEQ ID NO: 2177812 - RNA, 21 nt, Human
auagggucucuucagguucuu

SEQ ID NO: 2177813 - RNA, 21 nt, Human
auagucaagaaaaauuauugu

SEQ ID NO: 2177814 - RNA, 14 nt, Human
auagucacaagagc

SEQ ID NO: 2177815 - RNA, 22 nt, Human
auagucauguaagcugaaaaua

SEQ ID NO: 2177816 - RNA, 19 nt, Human
auagucaauguuucuuuua

SEQ ID NO: 2177817 - RNA, 22 nt, Human
auagucaagaaaaauuauugua

SEQ ID NO: 2177818 - RNA, 17 nt, Human
auagucaaauuguguga

SEQ ID NO: 2177819 - RNA, 18 nt, Human
auagucaaauugugugaa

SEQ ID NO: 2177820 - RNA, 18 nt, Human
auauaaauggcugguuuu

SEQ ID NO: 2177821 - RNA, 22 nt, Human
auauaaaugcuuuuaaaaaucu

SEQ ID NO: 2177822 - RNA, 15 nt, Human
auauaaauggcuggu

SEQ ID NO: 2177823 - RNA, 17 nt, Human
auauaaauuuuuuuugu

SEQ ID NO: 2177824 - RNA, 22 nt, Human
auauaaauuuuuuuuguuucau

SEQ ID NO: 2177825 - RNA, 12 nt, Human
auauaacaaugc

SEQ ID NO: 2177826 - RNA, 15 nt, Human
auauaacaaugcugu

SEQ ID NO: 2177827 - RNA, 23 nt, Human
auauaaggaaagcaauaaaugaa

SEQ ID NO: 2177828 - RNA, 14 nt, Human
auauaagaauaaaa

SEQ ID NO: 2177829 - RNA, 17 nt, Human
auauaacaaugcuguau

SEQ ID NO: 2177830 - RNA, 19 nt, Human
auauaagcuuguauuccuu

SEQ ID NO: 2177831 - RNA, 16 nt, Human
auauauacaguaacuu

SEQ ID NO: 2177832 - RNA, 10 nt, Human
auauauaaaa

SEQ ID NO: 2177833 - RNA, 18 nt, Human
auauauacaguaacuuua

SEQ ID NO: 2177834 - RNA, 19 nt, Human
auauauaaaaagaaaagau

SEQ ID NO: 2177835 - RNA, 19 nt, Human
auauauaacaaugcuguau

SEQ ID NO: 2177836 - RNA, 17 nt, Human
auauauaacaaugcugu

SEQ ID NO: 2177837 - RNA, 18 nt, Human
auauauaacaaugcugua

SEQ ID NO: 2177838 - RNA, 23 nt, Human
auauagguuuuguuugcuaucuu

SEQ ID NO: 2177839 - RNA, 16 nt, Human
auauaguuuacuauuu

SEQ ID NO: 2177840 - RNA, 12 nt, Human
auauaguuuuac

SEQ ID NO: 2177841 - RNA, 23 nt, Human
auauaguuuuacuuuuaaacugu

SEQ ID NO: 2177842 - RNA, 18 nt, Human
auauaguuuuacuuuuaa

SEQ ID NO: 2177843 - RNA, 16 nt, Human
auauaguuuuacuuuu

SEQ ID NO: 2177844 - RNA, 13 nt, Human
auauaguuuuacu

SEQ ID NO: 2177845 - RNA, 14 nt, Human
auauagguuuuguu

SEQ ID NO: 2177846 - RNA, 22 nt, Human
auauagguugugcaaauuaaca

SEQ ID NO: 2177847 - RNA, 15 nt, Human
auauagguugugcaa

SEQ ID NO: 2177848 - RNA, 16 nt, Human
auauagguugugcaaa

SEQ ID NO: 2177849 - RNA, 18 nt, Human
auauagguuuuguuugcu

SEQ ID NO: 2177850 - RNA, 19 nt, Human
auauagguuuuguuugcua

SEQ ID NO: 2177851 - RNA, 20 nt, Human
auauagguuuuguuugcuau

SEQ ID NO: 2177852 - RNA, 21 nt, Human
auauagguuuuguuugcuauc

SEQ ID NO: 2177853 - RNA, 23 nt, Human
uucagaaguuuggcaauaguuug

SEQ ID NO: 2177854 - RNA, 15 nt, Human
uucagaaucacuucu

SEQ ID NO: 2177855 - RNA, 20 nt, Human
uucagaaguuuggcaauagu

SEQ ID NO: 2177856 - RNA, 12 nt, Human
uucagaagagau

SEQ ID NO: 2177857 - RNA, 21 nt, Human
uucagaagugagcuuugcugc

SEQ ID NO: 2177858 - RNA, 16 nt, Human
uucagaaggggagggg

SEQ ID NO: 2177859 - RNA, 22 nt, Human
uucagaagugagcuuugcugcu

SEQ ID NO: 2177860 - RNA, 23 nt, Human
uucagaagugagcuuugcugcua

SEQ ID NO: 2177861 - RNA, 15 nt, Human
uucagaaagaagugg

SEQ ID NO: 2177862 - RNA, 13 nt, Human
uucagaaagcauu

SEQ ID NO: 2177863 - RNA, 19 nt, Human
uucagaaagcauuacauuu

SEQ ID NO: 2177864 - RNA, 18 nt, Human
uucacuguauaaauagga

SEQ ID NO: 2177865 - RNA, 19 nt, Human
uucacuguauaaauaggag

SEQ ID NO: 2177866 - RNA, 21 nt, Human
uucagaaaauauuauguguuu

SEQ ID NO: 2177867 - RNA, 13 nt, Human
uucacuggcccaa

SEQ ID NO: 2177868 - RNA, 20 nt, Human
uucacuguaagacucauucc

SEQ ID NO: 2177869 - RNA, 22 nt, Human
uucacuguagaaugauuucaug

SEQ ID NO: 2177870 - RNA, 15 nt, Human
uucacuguagaauga

SEQ ID NO: 2177871 - RNA, 20 nt, Human
uucacuggccacaguuguuu

SEQ ID NO: 2177872 - RNA, 17 nt, Human
uucacuggaguuacauu

SEQ ID NO: 2177873 - RNA, 19 nt, Human
uucacuggaguuacauuaa

SEQ ID NO: 2177874 - RNA, 13 nt, Human
uucagaaaauauu

SEQ ID NO: 2177875 - RNA, 13 nt, Human
uucacuguauaaa

SEQ ID NO: 2177876 - RNA, 15 nt, Human
uucacuguauaaaua

SEQ ID NO: 2177877 - RNA, 16 nt, Human
uucacuguauaaauag

SEQ ID NO: 2177878 - RNA, 14 nt, Human
uucagaaaauauua

SEQ ID NO: 2177879 - RNA, 20 nt, Human
uucagaaaauauuauguguu

SEQ ID NO: 2177880 - RNA, 14 nt, Human
auauauacauauau

SEQ ID NO: 2177881 - RNA, 20 nt, Human
auauauacaguaacuuuaug

SEQ ID NO: 2177882 - RNA, 21 nt, Human
auauauacaguaacuuuaugu

SEQ ID NO: 2177883 - RNA, 23 nt, Human
auauauacaguaacuuuaugugu

SEQ ID NO: 2177884 - RNA, 22 nt, Human
auauauacauagcaugacauuu

SEQ ID NO: 2177885 - RNA, 13 nt, Human
auauauagaaucu

SEQ ID NO: 2177886 - RNA, 11 nt, Human
auauauauaaa

SEQ ID NO: 2177887 - RNA, 12 nt, Human
auauauauaaac

SEQ ID NO: 2177888 - RNA, 13 nt, Human
auauauauaaacc

SEQ ID NO: 2177889 - RNA, 14 nt, Human
auauauauaaaccu

SEQ ID NO: 2177890 - RNA, 13 nt, Human
uucacugccccca

SEQ ID NO: 2177891 - RNA, 16 nt, Human
uucacugccuuugcuc

SEQ ID NO: 2177892 - RNA, 12 nt, Human
uucacugcugca

SEQ ID NO: 2177893 - RNA, 13 nt, Human
uucacugcuggcu

SEQ ID NO: 2177894 - RNA, 15 nt, Human
uucacugcuggcugc

SEQ ID NO: 2177895 - RNA, 16 nt, Human
uucacugcuggcugcc

SEQ ID NO: 2177896 - RNA, 17 nt, Human
uucacugcuggcugccu

SEQ ID NO: 2177897 - RNA, 18 nt, Human
uucacugcuggcugccuu

SEQ ID NO: 2177898 - RNA, 19 nt, Human
uucacugcuggcugccuua

SEQ ID NO: 2177899 - RNA, 13 nt, Human
uucacugcugcaa

SEQ ID NO: 2177900 - RNA, 19 nt, Human
uucacugcugcaaggccuu

SEQ ID NO: 2177901 - RNA, 23 nt, Human
uucacugcugcaaggccuuucug

SEQ ID NO: 2177902 - RNA, 16 nt, Human
uucacuggaguuacau

SEQ ID NO: 2177903 - RNA, 23 nt, Human
uucagcaccuacaguguacaguc

SEQ ID NO: 2177904 - RNA, 22 nt, Human
uucagcaccuacaguguacagu

SEQ ID NO: 2177905 - RNA, 16 nt, Human
uucagcaccacccuag

SEQ ID NO: 2177906 - RNA, 14 nt, Human
uucagccaagaauu

SEQ ID NO: 2177907 - RNA, 13 nt, Human
uucagcacugucc

SEQ ID NO: 2177908 - RNA, 19 nt, Human
uucagccaagaauucuuaa

SEQ ID NO: 2177909 - RNA, 23 nt, Human
uucagccccuccucugccaccuc

SEQ ID NO: 2177910 - RNA, 20 nt, Human
uucagccccuccucugccac

SEQ ID NO: 2177911 - RNA, 19 nt, Human
uucagccccuccucugcca

SEQ ID NO: 2177912 - RNA, 18 nt, Human
uucagccccuccucugcc

SEQ ID NO: 2177913 - RNA, 17 nt, Human
uucagccccuccucugc

SEQ ID NO: 2177914 - RNA, 16 nt, Human
uucagccccuccucug

SEQ ID NO: 2177915 - RNA, 15 nt, Human
uucagccccuccucu

SEQ ID NO: 2177916 - RNA, 14 nt, Human
uucagccccuccuc

SEQ ID NO: 2177917 - RNA, 12 nt, Human
uucagcccucac

SEQ ID NO: 2177918 - RNA, 16 nt, Human
uucagcccucaccccu

SEQ ID NO: 2177919 - RNA, 12 nt, Human
uucagccaggag

SEQ ID NO: 2177920 - RNA, 13 nt, Human
uucagccaggagc

SEQ ID NO: 2177921 - RNA, 18 nt, Human
uucagccaccagccccug

SEQ ID NO: 2177922 - RNA, 11 nt, Human
uucagccaagg

SEQ ID NO: 2177923 - RNA, 13 nt, Human
uucagccccuccu

SEQ ID NO: 2177924 - RNA, 20 nt, Human
uucagcccauauuucaucgu

SEQ ID NO: 2177925 - RNA, 13 nt, Human
uucagcccaucuc

SEQ ID NO: 2177926 - RNA, 17 nt, Human
uucagccaggagcuggg

SEQ ID NO: 2177927 - RNA, 21 nt, Human
uucagccaucaacaagaguug

SEQ ID NO: 2177928 - RNA, 19 nt, Human
uucagaaucacuucugaga

SEQ ID NO: 2177929 - RNA, 21 nt, Human
uucagaaucacuucugagaac

SEQ ID NO: 2177930 - RNA, 21 nt, Human
uucagacaagcaacagguuuu

SEQ ID NO: 2177931 - RNA, 20 nt, Human
uucagacaagcaacagguuu

SEQ ID NO: 2177932 - RNA, 15 nt, Human
uucagacaagcaaca

SEQ ID NO: 2177933 - RNA, 17 nt, Human
uucagaucagugcuuga

SEQ ID NO: 2177934 - RNA, 16 nt, Human
uucagaucauggcauc

SEQ ID NO: 2177935 - RNA, 17 nt, Human
uucagaucucuaacuuc

SEQ ID NO: 2177936 - RNA, 19 nt, Human
uucagaugcuucugggaga

SEQ ID NO: 2177937 - RNA, 20 nt, Human
uucagaaagcauuacauuuc

SEQ ID NO: 2177938 - RNA, 15 nt, Human
uucagaugcuucugg

SEQ ID NO: 2177939 - RNA, 20 nt, Human
uucagaugucuucugccugu

SEQ ID NO: 2177940 - RNA, 23 nt, Human
uucagaugucuucugccuguuau

SEQ ID NO: 2177941 - RNA, 14 nt, Human
uucagaugucuucu

SEQ ID NO: 2177942 - RNA, 17 nt, Human
uucagaugucuucugcc

SEQ ID NO: 2177943 - RNA, 18 nt, Human
uucagaugucuucugccu

SEQ ID NO: 2177944 - RNA, 19 nt, Human
uucagaugucuucugccug

SEQ ID NO: 2177945 - RNA, 13 nt, Human
uucagcaagacaa

SEQ ID NO: 2177946 - RNA, 20 nt, Human
uucagcaaacucuuuuccca

SEQ ID NO: 2177947 - RNA, 22 nt, Human
auagcuucaccccaaucccagc

SEQ ID NO: 2177948 - RNA, 19 nt, Human
auagcuugcgcauucucau

SEQ ID NO: 2177949 - RNA, 23 nt, Human
auagcuugcgcauucucauggag

SEQ ID NO: 2177950 - RNA, 14 nt, Human
auagcuuguauagu

SEQ ID NO: 2177951 - RNA, 17 nt, Human
auagcuuguauagugua

SEQ ID NO: 2177952 - RNA, 20 nt, Human
auagcuuguauaguguaaaa

SEQ ID NO: 2177953 - RNA, 21 nt, Human
auagcuucaccccaaucccag

SEQ ID NO: 2177954 - RNA, 22 nt, Human
auagcuuacaagccagcuggag

SEQ ID NO: 2177955 - RNA, 24 nt, Human
uucaccauuuggcaaugccaucau

SEQ ID NO: 2177956 - RNA, 22 nt, Human
uucaccauguuggccaggcugg

SEQ ID NO: 2177957 - RNA, 22 nt, Human
uucaccauguuggccaggcugc

SEQ ID NO: 2177958 - RNA, 23 nt, Human
auagcuuuauuuuuuaaguauuu

SEQ ID NO: 2177959 - RNA, 22 nt, Human
auagcuuuauuuuuuaaguauu

SEQ ID NO: 2177960 - RNA, 21 nt, Human
auaggaauugacccacaagaa

SEQ ID NO: 2177961 - RNA, 21 nt, Human
auagcuuuauuuuuuaaguau

SEQ ID NO: 2177962 - RNA, 19 nt, Human
auagcuuuauuuuuuaagu

SEQ ID NO: 2177963 - RNA, 18 nt, Human
auagcuuuauuuuuuaag

SEQ ID NO: 2177964 - RNA, 10 nt, Human
auagcuuuau

SEQ ID NO: 2177965 - RNA, 19 nt, Human
auaggaacuuaaauaaugu

SEQ ID NO: 2177966 - RNA, 22 nt, Human
auaggccaaacuggcaaacuuc

SEQ ID NO: 2177967 - RNA, 17 nt, Human
auaggcagacuggguuu

SEQ ID NO: 2177968 - RNA, 20 nt, Human
auaggcagacuggguuucua

SEQ ID NO: 2177969 - RNA, 21 nt, Human
auaggcuggagaagcucaccc

SEQ ID NO: 2177970 - RNA, 16 nt, Human
auaggcuggagaagcu

SEQ ID NO: 2177971 - RNA, 18 nt, Human
auaggcuggagaagcuca

SEQ ID NO: 2177972 - RNA, 13 nt, Human
auaggcuggagaa

SEQ ID NO: 2177973 - RNA, 14 nt, Human
auaggcuggagaag

SEQ ID NO: 2177974 - RNA, 15 nt, Human
auagggagaaaccaa

SEQ ID NO: 2177975 - RNA, 14 nt, Human
auagggucuaacuc

SEQ ID NO: 2177976 - RNA, 14 nt, Human
auagggcugagcuc

SEQ ID NO: 2177977 - RNA, 17 nt, Human
auagggcugagcucucu

SEQ ID NO: 2177978 - RNA, 23 nt, Human
auaggaucauuuguuggaaugaa

SEQ ID NO: 2177979 - RNA, 18 nt, Human
auaggaaugugaaagcac

SEQ ID NO: 2177980 - RNA, 22 nt, Human
auaggcaccuaccaccacgccc

SEQ ID NO: 2177981 - RNA, 17 nt, Human
auaggcacaggaaacca

SEQ ID NO: 2177982 - RNA, 19 nt, Human
uucaauaaaguaucuacau

SEQ ID NO: 2177983 - RNA, 14 nt, Human
uucaauaaaguauc

SEQ ID NO: 2177984 - RNA, 14 nt, Human
uucaauaaaguauu

SEQ ID NO: 2177985 - RNA, 18 nt, Human
uucaauaaaguauuuaau

SEQ ID NO: 2177986 - RNA, 19 nt, Human
uucaauaaaguauuuaauu

SEQ ID NO: 2177987 - RNA, 12 nt, Human
uucaauaaagua

SEQ ID NO: 2177988 - RNA, 13 nt, Human
uucaauaaaguau

SEQ ID NO: 2177989 - RNA, 20 nt, Human
uucaauaaagcauuuauaaa

SEQ ID NO: 2177990 - RNA, 23 nt, Human
uucacagcucuguguugccaugu

SEQ ID NO: 2177991 - RNA, 15 nt, Human
uucacagcucugugu

SEQ ID NO: 2177992 - RNA, 17 nt, Human
uucacagcuccucccac

SEQ ID NO: 2177993 - RNA, 21 nt, Human
uucaauaaaguauuuaauuag

SEQ ID NO: 2177994 - RNA, 13 nt, Human
uucacagcuccuc

SEQ ID NO: 2177995 - RNA, 15 nt, Human
uucacagcuccuccc

SEQ ID NO: 2177996 - RNA, 17 nt, Human
uucacauagaugucccu

SEQ ID NO: 2177997 - RNA, 19 nt, Human
uucacauagagaucauccu

SEQ ID NO: 2177998 - RNA, 17 nt, Human
uucacauacccuccccc

SEQ ID NO: 2177999 - RNA, 17 nt, Human
uucacauagagaucauc

SEQ ID NO: 2178000 - RNA, 22 nt, Human
uucacaguguuucgacagcuga

SEQ ID NO: 2178001 - RNA, 18 nt, Human
uucacauaagcucagaau

SEQ ID NO: 2178002 - RNA, 20 nt, Human
uucacauaagcucagaaucc

SEQ ID NO: 2178003 - RNA, 15 nt, Human
uucacauacccuccc

SEQ ID NO: 2178004 - RNA, 19 nt, Human
uucacauaaaauagauuuu

SEQ ID NO: 2178005 - RNA, 12 nt, Human
uucacaguguuu

SEQ ID NO: 2178006 - RNA, 19 nt, Human
uucacaggcgaggccugga

SEQ ID NO: 2178007 - RNA, 10 nt, Human
uucacaggcg

SEQ ID NO: 2178008 - RNA, 18 nt, Human
uucacauccuguguuucu

SEQ ID NO: 2178009 - RNA, 15 nt, Human
uucacauagcugucu

SEQ ID NO: 2178010 - RNA, 19 nt, Human
uucacauuguauucagagu

SEQ ID NO: 2178011 - RNA, 17 nt, Human
uucacauauugauuucc

SEQ ID NO: 2178012 - RNA, 22 nt, Human
uucaccacaugugcacaugcac

SEQ ID NO: 2178013 - RNA, 19 nt, Human
uucacauuuuccuuuucaa

SEQ ID NO: 2178014 - RNA, 18 nt, Human
uucaccagauuugcuaau

SEQ ID NO: 2178015 - RNA, 19 nt, Human
uucaccagaggaaucacuc

SEQ ID NO: 2178016 - RNA, 17 nt, Human
uucacauuuuuguauuu

SEQ ID NO: 2178017 - RNA, 18 nt, Human
uucacauagcugucuaga

SEQ ID NO: 2178018 - RNA, 12 nt, Human
uucaccagagca

SEQ ID NO: 2178019 - RNA, 15 nt, Human
uucaaacauauauaa

SEQ ID NO: 2178020 - RNA, 21 nt, Human
uucaaacuggggccuccagaa

SEQ ID NO: 2178021 - RNA, 16 nt, Human
uucaaacuggggccuc

SEQ ID NO: 2178022 - RNA, 15 nt, Human
uucaaacuggggccu

SEQ ID NO: 2178023 - RNA, 18 nt, Human
uucaaaaugucuguagcu

SEQ ID NO: 2178024 - RNA, 14 nt, Human
uucaaaaugucugu

SEQ ID NO: 2178025 - RNA, 16 nt, Human
uucaaaauggagggaa

SEQ ID NO: 2178026 - RNA, 16 nt, Human
uucaaaauauguucuu

SEQ ID NO: 2178027 - RNA, 20 nt, Human
uucaaaaugcuuuuuauuau

SEQ ID NO: 2178028 - RNA, 17 nt, Human
uucaaaaugcuuuuuau

SEQ ID NO: 2178029 - RNA, 21 nt, Human
uuauuuccuaguucuguagaa

SEQ ID NO: 2178030 - RNA, 14 nt, Human
uuauuucucugauu

SEQ ID NO: 2178031 - RNA, 22 nt, Human
uuauuucucagacuuuggaaaa

SEQ ID NO: 2178032 - RNA, 19 nt, Human
uuauuucuaggaagaauuu

SEQ ID NO: 2178033 - RNA, 15 nt, Human
uuauuuuuuucugau

SEQ ID NO: 2178034 - RNA, 16 nt, Human
uuauuuuuuucugauu

SEQ ID NO: 2178035 - RNA, 22 nt, Human
uuauuucugcauauguugaaua

SEQ ID NO: 2178036 - RNA, 20 nt, Human
uuauuucugcauauguugaa

SEQ ID NO: 2178037 - RNA, 15 nt, Human
uuauuucugcauaug

SEQ ID NO: 2178038 - RNA, 13 nt, Human
uuauuucugcaua

SEQ ID NO: 2178039 - RNA, 12 nt, Human
uuauuucugcau

SEQ ID NO: 2178040 - RNA, 16 nt, Human
uuauuucucugauuug

SEQ ID NO: 2178041 - RNA, 14 nt, Human
uucaaaaaaacacu

SEQ ID NO: 2178042 - RNA, 17 nt, Human
uucaaaaaaacacuagu

SEQ ID NO: 2178043 - RNA, 16 nt, Human
uucaaaaaacuuguaa

SEQ ID NO: 2178044 - RNA, 21 nt, Human
uucaaaaagucuacgcucucc

SEQ ID NO: 2178045 - RNA, 15 nt, Human
uucaaaaacuguauu

SEQ ID NO: 2178046 - RNA, 18 nt, Human
uucaaaaaaacacuaguu

SEQ ID NO: 2178047 - RNA, 18 nt, Human
uucaaaaaaauaaaauaa

SEQ ID NO: 2178048 - RNA, 17 nt, Human
uucaaaaacacaguguu

SEQ ID NO: 2178049 - RNA, 23 nt, Human
uucaaaaacacaguguuuuugua

SEQ ID NO: 2178050 - RNA, 15 nt, Human
uucaaaaauauaacu

SEQ ID NO: 2178051 - RNA, 13 nt, Human
uucaaaaaguguu

SEQ ID NO: 2178052 - RNA, 14 nt, Human
uucaaaaaguguuu

SEQ ID NO: 2178053 - RNA, 17 nt, Human
uucaaaaaguguuuauu

SEQ ID NO: 2178054 - RNA, 16 nt, Human
uucaaggccauccuuc

SEQ ID NO: 2178055 - RNA, 17 nt, Human
uucaaggccauccuucc

SEQ ID NO: 2178056 - RNA, 20 nt, Human
uucaaggcaucaugcagagu

SEQ ID NO: 2178057 - RNA, 22 nt, Human
uucaagugauucucaugccuca

SEQ ID NO: 2178058 - RNA, 20 nt, Human
uucaagugauucucaugccu

SEQ ID NO: 2178059 - RNA, 18 nt, Human
uucaauaaagcauuuaua

SEQ ID NO: 2178060 - RNA, 16 nt, Human
uucaauaaagcauuua

SEQ ID NO: 2178061 - RNA, 14 nt, Human
uucaaguucaaucc

SEQ ID NO: 2178062 - RNA, 20 nt, Human
uucaaguuauuguacagcug

SEQ ID NO: 2178063 - RNA, 17 nt, Human
uucaaguuagcucagga

SEQ ID NO: 2178064 - RNA, 14 nt, Human
uucaaguuauugua

SEQ ID NO: 2178065 - RNA, 17 nt, Human
uucaaguuauuguacag

SEQ ID NO: 2178066 - RNA, 23 nt, Human
uucaaguuccaaguugcuaauac

SEQ ID NO: 2178067 - RNA, 17 nt, Human
uucaaguuaaauuuuau

SEQ ID NO: 2178068 - RNA, 16 nt, Human
uucaaguuagcucagg

SEQ ID NO: 2178069 - RNA, 13 nt, Human
uucaaguuaaagu

SEQ ID NO: 2178070 - RNA, 22 nt, Human
uucaaguggggcucgccaugcc

SEQ ID NO: 2178071 - RNA, 19 nt, Human
uucaaguguaaaauauuuu

SEQ ID NO: 2178072 - RNA, 20 nt, Human
uucaagugauucuccugccu

SEQ ID NO: 2178073 - RNA, 22 nt, Human
uucaagugcaugcucucugcag

SEQ ID NO: 2178074 - RNA, 18 nt, Human
uucaaguggggcucgcca

SEQ ID NO: 2178075 - RNA, 19 nt, Human
uucaagaaaaguaagcccu

SEQ ID NO: 2178076 - RNA, 23 nt, Human
uucaagaaacugaggaauuuucu

SEQ ID NO: 2178077 - RNA, 22 nt, Human
uucaagaaagcuucaaacugca

SEQ ID NO: 2178078 - RNA, 15 nt, Human
uucaaggauccugag

SEQ ID NO: 2178079 - RNA, 12 nt, Human
uucaagaaacug

SEQ ID NO: 2178080 - RNA, 20 nt, Human
uucaagaaacugaggaauuu

SEQ ID NO: 2178081 - RNA, 13 nt, Human
uucaagaaacuga

SEQ ID NO: 2178082 - RNA, 22 nt, Human
uucaagaaaacaacuucaauau

SEQ ID NO: 2178083 - RNA, 12 nt, Human
uucaacuuuucc

SEQ ID NO: 2178084 - RNA, 16 nt, Human
uucaaggauccugagc

SEQ ID NO: 2178085 - RNA, 18 nt, Human
uucaaggauccugagcca

SEQ ID NO: 2178086 - RNA, 19 nt, Human
uucaaggauccugagccag

SEQ ID NO: 2178087 - RNA, 21 nt, Human
uucaaggauccugagccagau

SEQ ID NO: 2178088 - RNA, 20 nt, Human
auagcggguuacuuucacau

SEQ ID NO: 2178089 - RNA, 15 nt, Human
auagcuaacauuuua

SEQ ID NO: 2178090 - RNA, 22 nt, Human
auagcuaacauuuuaaauaaaa

SEQ ID NO: 2178091 - RNA, 23 nt, Human
auagcuaacauuuuaaauaaaag

SEQ ID NO: 2178092 - RNA, 17 nt, Human
auagcuacuaauuuuaa

SEQ ID NO: 2178093 - RNA, 14 nt, Human
auagcuacuaauuu

SEQ ID NO: 2178094 - RNA, 17 nt, Human
auaagauaaaugugcug

SEQ ID NO: 2178095 - RNA, 13 nt, Human
auaagauaaaugu

SEQ ID NO: 2178096 - RNA, 18 nt, Human
auagccugccucuucucu

SEQ ID NO: 2178097 - RNA, 16 nt, Human
auaagaguagaaacug

SEQ ID NO: 2178098 - RNA, 16 nt, Human
auaagauauuuuucau

SEQ ID NO: 2178099 - RNA, 15 nt, Human
auaagauauuuuuca

SEQ ID NO: 2178100 - RNA, 16 nt, Human
auaacuucaagcaaac

SEQ ID NO: 2178101 - RNA, 19 nt, Human
auaacuucuuaaaaguugu

SEQ ID NO: 2178102 - RNA, 16 nt, Human
auaacuucuuaaaagu

SEQ ID NO: 2178103 - RNA, 17 nt, Human
auaacuucuuaaaaguu

SEQ ID NO: 2178104 - RNA, 21 nt, Human
auaagaggcugauaauuccag

SEQ ID NO: 2178105 - RNA, 17 nt, Human
auaagagggcacacacu

SEQ ID NO: 2178106 - RNA, 19 nt, Human
auaagagggcacacacugu

SEQ ID NO: 2178107 - RNA, 20 nt, Human
auaagagagucauaaaccuu

SEQ ID NO: 2178108 - RNA, 13 nt, Human
auaacuugucuaa

SEQ ID NO: 2178109 - RNA, 12 nt, Human
auaacuuugcuu

SEQ ID NO: 2178110 - RNA, 14 nt, Human
auaacuuugcuugc

SEQ ID NO: 2178111 - RNA, 21 nt, Human
auaacuuugcuugcaguagau

SEQ ID NO: 2178112 - RNA, 22 nt, Human
auagcucaguuuauccaaggug

SEQ ID NO: 2178113 - RNA, 20 nt, Human
auagcuccugcuccacagcc

SEQ ID NO: 2178114 - RNA, 23 nt, Human
auagcuccccgcuucugccugca

SEQ ID NO: 2178115 - RNA, 21 nt, Human
auagcugagauuccugguucg

SEQ ID NO: 2178116 - RNA, 17 nt, Human
auagcugagauuccugg

SEQ ID NO: 2178117 - RNA, 15 nt, Human
auagcucuuucaggg

SEQ ID NO: 2178118 - RNA, 20 nt, Human
auagcucuuuggcagucuau

SEQ ID NO: 2178119 - RNA, 12 nt, Human
auagcugggacu

SEQ ID NO: 2178120 - RNA, 20 nt, Human
auagcucaggugucccugca

SEQ ID NO: 2178121 - RNA, 21 nt, Human
auagcucaggugucccugcac

SEQ ID NO: 2178122 - RNA, 18 nt, Human
auagcuauuuuuauggaa

SEQ ID NO: 2178123 - RNA, 12 nt, Human
auagcuauuuuu

SEQ ID NO: 2178124 - RNA, 18 nt, Human
auagcuauuacugucugg

SEQ ID NO: 2178125 - RNA, 22 nt, Human
auagcuauuacugucugguuuu

SEQ ID NO: 2178126 - RNA, 13 nt, Human
auagcucaguuua

SEQ ID NO: 2178127 - RNA, 20 nt, Human
auagcuauuuuuauggaauu

SEQ ID NO: 2178128 - RNA, 20 nt, Human
auagcuccccgcuucugccu

SEQ ID NO: 2178129 - RNA, 22 nt, Human
auagcucaggugucccugcacu

SEQ ID NO: 2178130 - RNA, 15 nt, Human
auagcuacaggaagc

SEQ ID NO: 2178131 - RNA, 21 nt, Human
auagcuaagaaauaaaacugu

SEQ ID NO: 2178132 - RNA, 23 nt, Human
auagcuauauccauguacuguag

SEQ ID NO: 2178133 - RNA, 14 nt, Human
auagcuauuacugu

SEQ ID NO: 2178134 - RNA, 22 nt, Human
auagcuauauccauguacugua

SEQ ID NO: 2178135 - RNA, 20 nt, Human
auagcuauauccauguacug

SEQ ID NO: 2178136 - RNA, 19 nt, Human
auagcuauauccauguacu

SEQ ID NO: 2178137 - RNA, 17 nt, Human
auagcuauauccaugua

SEQ ID NO: 2178138 - RNA, 16 nt, Human
auagcuauauccaugu

SEQ ID NO: 2178139 - RNA, 14 nt, Human
auagcuauauccau

SEQ ID NO: 2178140 - RNA, 19 nt, Human
auagcucaggugucccugc

SEQ ID NO: 2178141 - RNA, 16 nt, Human
auagcuacaggaagca

SEQ ID NO: 2178142 - RNA, 18 nt, Human
auagcuacuaauuuuaaa

SEQ ID NO: 2178143 - RNA, 22 nt, Human
uuauuguuccaagacauuguca

SEQ ID NO: 2178144 - RNA, 19 nt, Human
uuauuguuccaagacauug

SEQ ID NO: 2178145 - RNA, 18 nt, Human
uuauuguuccaagacauu

SEQ ID NO: 2178146 - RNA, 17 nt, Human
uuauuguuccaagacau

SEQ ID NO: 2178147 - RNA, 23 nt, Human
uuauuguuccaagacauugucaa

SEQ ID NO: 2178148 - RNA, 12 nt, Human
uuauuguuuaaa

SEQ ID NO: 2178149 - RNA, 13 nt, Human
uuauuuaaaagau

SEQ ID NO: 2178150 - RNA, 17 nt, Human
uuauuuaaaagauucau

SEQ ID NO: 2178151 - RNA, 18 nt, Human
uuauuuaaaagauucauu

SEQ ID NO: 2178152 - RNA, 22 nt, Human
uuauuguuuaaagcaacugucu

SEQ ID NO: 2178153 - RNA, 14 nt, Human
uuauuuaaaagauu

SEQ ID NO: 2178154 - RNA, 15 nt, Human
uuauuuaaaagauuc

SEQ ID NO: 2178155 - RNA, 16 nt, Human
uuauuuaaaagauuca

SEQ ID NO: 2178156 - RNA, 14 nt, Human
uuauuuaaauuuua

SEQ ID NO: 2178157 - RNA, 20 nt, Human
uuauuuaaacucuguugcaa

SEQ ID NO: 2178158 - RNA, 12 nt, Human
uuauuuaaauga

SEQ ID NO: 2178159 - RNA, 13 nt, Human
uuauuuaacagcu

SEQ ID NO: 2178160 - RNA, 20 nt, Human
uuauuuaaaugucuaaugua

SEQ ID NO: 2178161 - RNA, 15 nt, Human
uuauuuaaaugucua

SEQ ID NO: 2178162 - RNA, 16 nt, Human
uuauuuaaaugucuaa

SEQ ID NO: 2178163 - RNA, 23 nt, Human
uuauuuaacagcugaauuaucua

SEQ ID NO: 2178164 - RNA, 10 nt, Human
uuauuuaaua

SEQ ID NO: 2178165 - RNA, 12 nt, Human
uuauuuaauaac

SEQ ID NO: 2178166 - RNA, 13 nt, Human
uuauuuaauaaca

SEQ ID NO: 2178167 - RNA, 14 nt, Human
uuauuuaauaacaa

SEQ ID NO: 2178168 - RNA, 14 nt, Human
uuauuuaauaacau

SEQ ID NO: 2178169 - RNA, 15 nt, Human
uuauuuaauaacauu

SEQ ID NO: 2178170 - RNA, 22 nt, Human
uuauuuaaugaaagacuguaca

SEQ ID NO: 2178171 - RNA, 18 nt, Human
uuauuuaaugaaagacug

SEQ ID NO: 2178172 - RNA, 16 nt, Human
uuauuguuccaagaca

SEQ ID NO: 2178173 - RNA, 13 nt, Human
uuauuguuccaag

SEQ ID NO: 2178174 - RNA, 20 nt, Human
uuauuguguuuuuaauuuau

SEQ ID NO: 2178175 - RNA, 20 nt, Human
uuauuguguuugucauuagc

SEQ ID NO: 2178176 - RNA, 22 nt, Human
uuauuguguuugucauuagccu

SEQ ID NO: 2178177 - RNA, 17 nt, Human
uuauuguuuaaaaucau

SEQ ID NO: 2178178 - RNA, 22 nt, Human
auagcuguauugaaucauguag

SEQ ID NO: 2178179 - RNA, 19 nt, Human
uuauuguguuugucauuag

SEQ ID NO: 2178180 - RNA, 23 nt, Human
auagcuguacaaauauaagaaua

SEQ ID NO: 2178181 - RNA, 18 nt, Human
auagcuguacaaauauaa

SEQ ID NO: 2178182 - RNA, 13 nt, Human
auagcuguauuga

SEQ ID NO: 2178183 - RNA, 15 nt, Human
auagcuguauugaau

SEQ ID NO: 2178184 - RNA, 16 nt, Human
auagcuguauugaauc

SEQ ID NO: 2178185 - RNA, 17 nt, Human
auagcuguauugaauca

SEQ ID NO: 2178186 - RNA, 18 nt, Human
auagcuguauugaaucau

SEQ ID NO: 2178187 - RNA, 17 nt, Human
auagcugggacuacagg

SEQ ID NO: 2178188 - RNA, 22 nt, Human
auagcuggucuuauuuguaaag

SEQ ID NO: 2178189 - RNA, 23 nt, Human
auagcuggucuuauuuguaaagc

SEQ ID NO: 2178190 - RNA, 15 nt, Human
auagcuguacaaaua

SEQ ID NO: 2178191 - RNA, 17 nt, Human
auagcuguacaaauaua

SEQ ID NO: 2178192 - RNA, 21 nt, Human
uuauuuagggaacugcuugac

SEQ ID NO: 2178193 - RNA, 18 nt, Human
uuauuuagggaacugcuu

SEQ ID NO: 2178194 - RNA, 17 nt, Human
uuauuuagggaacugcu

SEQ ID NO: 2178195 - RNA, 18 nt, Human
uuauuuagacucaucuua

SEQ ID NO: 2178196 - RNA, 16 nt, Human
uuauuuaguuccuuga

SEQ ID NO: 2178197 - RNA, 15 nt, Human
uuauuuaguauuuau

SEQ ID NO: 2178198 - RNA, 17 nt, Human
uuauuuauaaucacuuu

SEQ ID NO: 2178199 - RNA, 16 nt, Human
uuauuuaggcuuugua

SEQ ID NO: 2178200 - RNA, 15 nt, Human
uuauuuauacacugu

SEQ ID NO: 2178201 - RNA, 17 nt, Human
uuauuuacugagcuucu

SEQ ID NO: 2178202 - RNA, 21 nt, Human
uuauuuacugagcuucucugu

SEQ ID NO: 2178203 - RNA, 17 nt, Human
uuauuuacuaauuuucu

SEQ ID NO: 2178204 - RNA, 14 nt, Human
uuauuuaauuaaaa

SEQ ID NO: 2178205 - RNA, 16 nt, Human
uuauuuaauguuaugu

SEQ ID NO: 2178206 - RNA, 19 nt, Human
uuauuuaauaacauuaccu

SEQ ID NO: 2178207 - RNA, 20 nt, Human
uuauuuacagaugaauguau

SEQ ID NO: 2178208 - RNA, 15 nt, Human
uuauuuacagaugaa

SEQ ID NO: 2178209 - RNA, 22 nt, Human
uuauuuacugagcuucucugug

SEQ ID NO: 2178210 - RNA, 15 nt, Human
uuauuuacugcuagu

SEQ ID NO: 2178211 - RNA, 14 nt, Human
uuauuuagacaaga

SEQ ID NO: 2178212 - RNA, 15 nt, Human
uuauuuagacaagag

SEQ ID NO: 2178213 - RNA, 16 nt, Human
uuauuuagacaagaga

SEQ ID NO: 2178214 - RNA, 17 nt, Human
uuauuuagcaccaggga

SEQ ID NO: 2178215 - RNA, 18 nt, Human
uuauuuagacaagagaug

SEQ ID NO: 2178216 - RNA, 17 nt, Human
uuauuuagacucaucuu

SEQ ID NO: 2178217 - RNA, 23 nt, Human
uuauuuagacucaucuuacugua

SEQ ID NO: 2178218 - RNA, 17 nt, Human
uuauuucagaaauguac

SEQ ID NO: 2178219 - RNA, 15 nt, Human
uuauuucagaaaugu

SEQ ID NO: 2178220 - RNA, 11 nt, Human
uuauuucagaa

SEQ ID NO: 2178221 - RNA, 20 nt, Human
uuauuucacuuuagaugcug

SEQ ID NO: 2178222 - RNA, 21 nt, Human
uuauuucacuuuagaugcuga

SEQ ID NO: 2178223 - RNA, 23 nt, Human
uuauuucaaaauauacauucaaa

SEQ ID NO: 2178224 - RNA, 15 nt, Human
uuauuuauuuaugga

SEQ ID NO: 2178225 - RNA, 14 nt, Human
uuauuuauuuaaua

SEQ ID NO: 2178226 - RNA, 20 nt, Human
uuauuucaucauauuauaca

SEQ ID NO: 2178227 - RNA, 15 nt, Human
uuauuucaugaaaau

SEQ ID NO: 2178228 - RNA, 18 nt, Human
uuauuucauaaacaacuu

SEQ ID NO: 2178229 - RNA, 17 nt, Human
uuauuuccaaauaaaau

SEQ ID NO: 2178230 - RNA, 19 nt, Human
uuauuuccaaauaaaauga

SEQ ID NO: 2178231 - RNA, 18 nt, Human
uuauuuccuaguucugua

SEQ ID NO: 2178232 - RNA, 19 nt, Human
uuauuuccuaguucuguag

SEQ ID NO: 2178233 - RNA, 15 nt, Human
uuauuuauuaagaug

SEQ ID NO: 2178234 - RNA, 14 nt, Human
uuauuuauuaagau

SEQ ID NO: 2178235 - RNA, 17 nt, Human
uuauuuauucagcuuca

SEQ ID NO: 2178236 - RNA, 22 nt, Human
uuauuuauucagcuucauuugu

SEQ ID NO: 2178237 - RNA, 13 nt, Human
uuauuuauuaaga

SEQ ID NO: 2178238 - RNA, 15 nt, Human
uuauuuauuggagau

SEQ ID NO: 2178239 - RNA, 15 nt, Human
uuauuuauuuaaaug

SEQ ID NO: 2178240 - RNA, 13 nt, Human
uuauuuauuuaau

SEQ ID NO: 2178241 - RNA, 18 nt, Human
uuauuuaucagugacaga

SEQ ID NO: 2178242 - RNA, 14 nt, Human
uuauuuaucaguga

SEQ ID NO: 2178243 - RNA, 14 nt, Human
uuauuuaugccucu

SEQ ID NO: 2178244 - RNA, 20 nt, Human
uuauuuaugccucuguauuu

SEQ ID NO: 2178245 - RNA, 20 nt, Human
uuccuuuugaacgccccccc

SEQ ID NO: 2178246 - RNA, 18 nt, Human
uuccuuuucuaacucucc

SEQ ID NO: 2178247 - RNA, 16 nt, Human
uuccuuuucccugcuu

SEQ ID NO: 2178248 - RNA, 17 nt, Human
uuccuuuucccugcuuc

SEQ ID NO: 2178249 - RNA, 15 nt, Human
uuccuuuuguguaca

SEQ ID NO: 2178250 - RNA, 17 nt, Human
uuccuuuuguguacagu

SEQ ID NO: 2178251 - RNA, 23 nt, Human
uuccuuuugaacgccccccccca

SEQ ID NO: 2178252 - RNA, 13 nt, Human
uucuaggccuggg

SEQ ID NO: 2178253 - RNA, 21 nt, Human
uuccuuuuuuaaaaaugcaaa

SEQ ID NO: 2178254 - RNA, 15 nt, Human
uuccuuuuuuauaca

SEQ ID NO: 2178255 - RNA, 15 nt, Human
uucuaguuucccaca

SEQ ID NO: 2178256 - RNA, 22 nt, Human
uucuaguuucccacaauauaaa

SEQ ID NO: 2178257 - RNA, 15 nt, Human
uucuagguucuaaaa

SEQ ID NO: 2178258 - RNA, 23 nt, Human
uucuagguggcaaggcugugcuc

SEQ ID NO: 2178259 - RNA, 15 nt, Human
uucuagggaaaugaa

SEQ ID NO: 2178260 - RNA, 18 nt, Human
uucuagguggcaaggcug

SEQ ID NO: 2178261 - RNA, 23 nt, Human
uucuaggcuacaauuuucuccca

SEQ ID NO: 2178262 - RNA, 22 nt, Human
uucuaggcuacaauuuucuccc

SEQ ID NO: 2178263 - RNA, 13 nt, Human
uucuauaaggcca

SEQ ID NO: 2178264 - RNA, 21 nt, Human
uucuauaaggccauaaaacag

SEQ ID NO: 2178265 - RNA, 14 nt, Human
uucuauaaggccau

SEQ ID NO: 2178266 - RNA, 13 nt, Human
uucuaguuuuguc

SEQ ID NO: 2178267 - RNA, 14 nt, Human
uucuaguuuucagu

SEQ ID NO: 2178268 - RNA, 19 nt, Human
uucuaguuuucaguuugua

SEQ ID NO: 2178269 - RNA, 14 nt, Human
uucuaguuugcauu

SEQ ID NO: 2178270 - RNA, 15 nt, Human
uucuaguuugcauuc

SEQ ID NO: 2178271 - RNA, 14 nt, Human
uucucaacuccaaa

SEQ ID NO: 2178272 - RNA, 18 nt, Human
uucucaacuccaaacuga

SEQ ID NO: 2178273 - RNA, 14 nt, Human
uucucaagcccugc

SEQ ID NO: 2178274 - RNA, 15 nt, Human
uucucaagcccugca

SEQ ID NO: 2178275 - RNA, 11 nt, Human
uucucaagugc

SEQ ID NO: 2178276 - RNA, 15 nt, Human
uucucaagugccuua

SEQ ID NO: 2178277 - RNA, 22 nt, Human
uucucaagauacugcuacugua

SEQ ID NO: 2178278 - RNA, 15 nt, Human
uucucaaccuaccac

SEQ ID NO: 2178279 - RNA, 22 nt, Human
uucucaacaaagcacaguguua

SEQ ID NO: 2178280 - RNA, 14 nt, Human
uucucaaccuacca

SEQ ID NO: 2178281 - RNA, 23 nt, Human
uucuauaaggccauaaaacaggu

SEQ ID NO: 2178282 - RNA, 23 nt, Human
uucuaguuuucaguuuguauaua

SEQ ID NO: 2178283 - RNA, 17 nt, Human
uucucaagugccuuaau

SEQ ID NO: 2178284 - RNA, 12 nt, Human
aucagaaggaga

SEQ ID NO: 2178285 - RNA, 14 nt, Human
aucagaagauaacu

SEQ ID NO: 2178286 - RNA, 17 nt, Human
aucagaagauaacuuga

SEQ ID NO: 2178287 - RNA, 22 nt, Human
aucagagaugcaccaccaagcc

SEQ ID NO: 2178288 - RNA, 14 nt, Human
aucagaggccuaua

SEQ ID NO: 2178289 - RNA, 15 nt, Human
aucagaggccuauaa

SEQ ID NO: 2178290 - RNA, 21 nt, Human
aucagagcagcagugaaaaca

SEQ ID NO: 2178291 - RNA, 14 nt, Human
aucagaacagcaga

SEQ ID NO: 2178292 - RNA, 13 nt, Human
aucagaacagcag

SEQ ID NO: 2178293 - RNA, 23 nt, Human
aucagaacucaaauggggccaga

SEQ ID NO: 2178294 - RNA, 22 nt, Human
aucagaacucaaauggggccag

SEQ ID NO: 2178295 - RNA, 23 nt, Human
aucagaagaccacaaaaauugac

SEQ ID NO: 2178296 - RNA, 22 nt, Human
aucagaagaccacaaaaauuga

SEQ ID NO: 2178297 - RNA, 13 nt, Human
aucagaagauaac

SEQ ID NO: 2178298 - RNA, 20 nt, Human
uucucauaggaaaaguacau

SEQ ID NO: 2178299 - RNA, 22 nt, Human
uucucauagcauuaacuaaucu

SEQ ID NO: 2178300 - RNA, 21 nt, Human
uucucauagcauuaacuaauc

SEQ ID NO: 2178301 - RNA, 18 nt, Human
uucucauagcauuaacua

SEQ ID NO: 2178302 - RNA, 17 nt, Human
uucucauagcauuaacu

SEQ ID NO: 2178303 - RNA, 14 nt, Human
uucucauagcauua

SEQ ID NO: 2178304 - RNA, 13 nt, Human
uucucauagcauu

SEQ ID NO: 2178305 - RNA, 17 nt, Human
uucucaucccacgcacu

SEQ ID NO: 2178306 - RNA, 16 nt, Human
uucucaucacuccccu

SEQ ID NO: 2178307 - RNA, 17 nt, Human
uucucaucacuccccuc

SEQ ID NO: 2178308 - RNA, 22 nt, Human
uucucauaggaaaaguacauuu

SEQ ID NO: 2178309 - RNA, 24 nt, Human
uucucauaggaaaaguacauuuaa

SEQ ID NO: 2178310 - RNA, 15 nt, Human
uucucaucacucccc

SEQ ID NO: 2178311 - RNA, 14 nt, Human
aucagaaauacaga

SEQ ID NO: 2178312 - RNA, 15 nt, Human
aucagaaauacagau

SEQ ID NO: 2178313 - RNA, 19 nt, Human
aucagaaauacagauuuug

SEQ ID NO: 2178314 - RNA, 23 nt, Human
aucagaaauacagauuuugauag

SEQ ID NO: 2178315 - RNA, 22 nt, Human
uucucagaaucucaaauaacua

SEQ ID NO: 2178316 - RNA, 19 nt, Human
uucucagaaucucaaauaa

SEQ ID NO: 2178317 - RNA, 14 nt, Human
uucucacacccacc

SEQ ID NO: 2178318 - RNA, 15 nt, Human
uucucacacccaccg

SEQ ID NO: 2178319 - RNA, 18 nt, Human
uucucacacccaccgucc

SEQ ID NO: 2178320 - RNA, 22 nt, Human
uucucacacccaccguccgccc

SEQ ID NO: 2178321 - RNA, 22 nt, Human
uucucagucaguaauugccaaa

SEQ ID NO: 2178322 - RNA, 23 nt, Human
uucucagaaucucaaauaacuaa

SEQ ID NO: 2178323 - RNA, 23 nt, Human
uucucagacuuuggaaaaugcau

SEQ ID NO: 2178324 - RNA, 15 nt, Human
uucucaguuuucaua

SEQ ID NO: 2178325 - RNA, 22 nt, Human
uucucagacuuuggaaaaugca

SEQ ID NO: 2178326 - RNA, 14 nt, Human
uucucaguuuucau

SEQ ID NO: 2178327 - RNA, 17 nt, Human
aucaguguccucuugcu

SEQ ID NO: 2178328 - RNA, 19 nt, Human
aucaguguaccauuugccu

SEQ ID NO: 2178329 - RNA, 16 nt, Human
aucagugucuuuccac

SEQ ID NO: 2178330 - RNA, 19 nt, Human
aucagugguuauuuaggga

SEQ ID NO: 2178331 - RNA, 22 nt, Human
aucaguggcauggcuccagucu

SEQ ID NO: 2178332 - RNA, 13 nt, Human
aucaguggagcca

SEQ ID NO: 2178333 - RNA, 14 nt, Human
aucaguccuuugau

SEQ ID NO: 2178334 - RNA, 19 nt, Human
aucagucuauccacagaga

SEQ ID NO: 2178335 - RNA, 21 nt, Human
aucaguccucuuucaaaggua

SEQ ID NO: 2178336 - RNA, 21 nt, Human
aucagucccuauguauuugca

SEQ ID NO: 2178337 - RNA, 13 nt, Human
aucaguccccucc

SEQ ID NO: 2178338 - RNA, 15 nt, Human
aucaguccccuccca

SEQ ID NO: 2178339 - RNA, 16 nt, Human
aucaguccccucccau

SEQ ID NO: 2178340 - RNA, 17 nt, Human
aucaguccccucccauc

SEQ ID NO: 2178341 - RNA, 22 nt, Human
aucaguccccucccaucuggga

SEQ ID NO: 2178342 - RNA, 23 nt, Human
aucaguccccucccaucugggag

SEQ ID NO: 2178343 - RNA, 16 nt, Human
aucagucccuauguau

SEQ ID NO: 2178344 - RNA, 15 nt, Human
aucauagaaauguaa

SEQ ID NO: 2178345 - RNA, 12 nt, Human
aucauagaaaug

SEQ ID NO: 2178346 - RNA, 17 nt, Human
aucauacacuuccuucu

SEQ ID NO: 2178347 - RNA, 20 nt, Human
aucagugugucuaaauuuga

SEQ ID NO: 2178348 - RNA, 17 nt, Human
aucauaagauauuuuuc

SEQ ID NO: 2178349 - RNA, 15 nt, Human
aucagugugcccccc

SEQ ID NO: 2178350 - RNA, 22 nt, Human
aucagugugccccccauccugg

SEQ ID NO: 2178351 - RNA, 19 nt, Human
aucagugugucuaaauuug

SEQ ID NO: 2178352 - RNA, 14 nt, Human
aucagugucucaca

SEQ ID NO: 2178353 - RNA, 15 nt, Human
aucagugucucacac

SEQ ID NO: 2178354 - RNA, 13 nt, Human
aucagugugcccc

SEQ ID NO: 2178355 - RNA, 14 nt, Human
aucagugugccccc

SEQ ID NO: 2178356 - RNA, 18 nt, Human
aucagaucauuucaaaac

SEQ ID NO: 2178357 - RNA, 17 nt, Human
aucagaggccuauaaug

SEQ ID NO: 2178358 - RNA, 17 nt, Human
aucagaguugcugcaaa

SEQ ID NO: 2178359 - RNA, 23 nt, Human
aucagaugaacucuuagaaauga

SEQ ID NO: 2178360 - RNA, 22 nt, Human
aucagaucauuucaaaacucau

SEQ ID NO: 2178361 - RNA, 22 nt, Human
aucagaugaacucuuagaaaug

SEQ ID NO: 2178362 - RNA, 16 nt, Human
aucagcacgauuucug

SEQ ID NO: 2178363 - RNA, 15 nt, Human
aucagcacgauuucu

SEQ ID NO: 2178364 - RNA, 18 nt, Human
aucagcacgauuucuguu

SEQ ID NO: 2178365 - RNA, 17 nt, Human
aucagcacgauuucugu

SEQ ID NO: 2178366 - RNA, 18 nt, Human
aucaguauaaacaaaguu

SEQ ID NO: 2178367 - RNA, 14 nt, Human
aucaguauaauucu

SEQ ID NO: 2178368 - RNA, 16 nt, Human
aucaguauaaacaaag

SEQ ID NO: 2178369 - RNA, 16 nt, Human
aucaguauaauucugu

SEQ ID NO: 2178370 - RNA, 21 nt, Human
aucaguauaauucuguacuga

SEQ ID NO: 2178371 - RNA, 22 nt, Human
aucaguauaauucuguacugau

SEQ ID NO: 2178372 - RNA, 13 nt, Human
aucagucaauauu

SEQ ID NO: 2178373 - RNA, 19 nt, Human
aucagucauaacuaaauaa

SEQ ID NO: 2178374 - RNA, 22 nt, Human
aucaguauugaagcauuuuaua

SEQ ID NO: 2178375 - RNA, 15 nt, Human
aucaguauugaagca

SEQ ID NO: 2178376 - RNA, 22 nt, Human
aucauucauucuuagcucuuaa

SEQ ID NO: 2178377 - RNA, 14 nt, Human
aucauugaaaucuu

SEQ ID NO: 2178378 - RNA, 15 nt, Human
aucauugaaaucuuu

SEQ ID NO: 2178379 - RNA, 22 nt, Human
aucauuaaagccugaguuugcu

SEQ ID NO: 2178380 - RNA, 16 nt, Human
aucauuauguaauguc

SEQ ID NO: 2178381 - RNA, 16 nt, Human
aucauguuugcucucc

SEQ ID NO: 2178382 - RNA, 12 nt, Human
aucauguuugcu

SEQ ID NO: 2178383 - RNA, 13 nt, Human
aucauguuugcuc

SEQ ID NO: 2178384 - RNA, 14 nt, Human
aucauguuugcucu

SEQ ID NO: 2178385 - RNA, 15 nt, Human
aucauguuugcucuc

SEQ ID NO: 2178386 - RNA, 14 nt, Human
aucauucauuuucu

SEQ ID NO: 2178387 - RNA, 12 nt, Human
aucauucaagug

SEQ ID NO: 2178388 - RNA, 15 nt, Human
aucaucaguauugaa

SEQ ID NO: 2178389 - RNA, 19 nt, Human
aucaucaaggcacugccug

SEQ ID NO: 2178390 - RNA, 20 nt, Human
aucaucagcauaccuuuauu

SEQ ID NO: 2178391 - RNA, 22 nt, Human
aucaucagcauaccuuuauugu

SEQ ID NO: 2178392 - RNA, 17 nt, Human
aucaucaguauugaagc

SEQ ID NO: 2178393 - RNA, 23 nt, Human
aucauguuuacagaggacaguau

SEQ ID NO: 2178394 - RNA, 18 nt, Human
aucauguuuacagaggac

SEQ ID NO: 2178395 - RNA, 12 nt, Human
aucauaguacag

SEQ ID NO: 2178396 - RNA, 18 nt, Human
aucauagguauuucaaaa

SEQ ID NO: 2178397 - RNA, 16 nt, Human
aucauagguauuucaa

SEQ ID NO: 2178398 - RNA, 17 nt, Human
aucauagguauuucaaa

SEQ ID NO: 2178399 - RNA, 21 nt, Human
aucauaggaagggaccaaggc

SEQ ID NO: 2178400 - RNA, 22 nt, Human
aucauaggaagggaccaaggca

SEQ ID NO: 2178401 - RNA, 16 nt, Human
aucauauuauacagac

SEQ ID NO: 2178402 - RNA, 15 nt, Human
aucauauuauacaga

SEQ ID NO: 2178403 - RNA, 21 nt, Human
aucauauugguauucacuaau

SEQ ID NO: 2178404 - RNA, 18 nt, Human
aucaucaaggcacugccu

SEQ ID NO: 2178405 - RNA, 13 nt, Human
aucaucaaggcac

SEQ ID NO: 2178406 - RNA, 19 nt, Human
uucugaaaauuaacacugc

SEQ ID NO: 2178407 - RNA, 15 nt, Human
uucugaaagggacgc

SEQ ID NO: 2178408 - RNA, 15 nt, Human
uucucuuaauuuaau

SEQ ID NO: 2178409 - RNA, 23 nt, Human
uucucuuacugcaaaugucauca

SEQ ID NO: 2178410 - RNA, 14 nt, Human
uucucuuacugcaa

SEQ ID NO: 2178411 - RNA, 16 nt, Human
uucucuuacugcaaau

SEQ ID NO: 2178412 - RNA, 15 nt, Human
uucugaaaauauaac

SEQ ID NO: 2178413 - RNA, 13 nt, Human
uucucuucacuca

SEQ ID NO: 2178414 - RNA, 12 nt, Human
uucucugugaac

SEQ ID NO: 2178415 - RNA, 20 nt, Human
uucucugugaacgauuuaga

SEQ ID NO: 2178416 - RNA, 24 nt, Human
uucucuguguuuguuccuacagcc

SEQ ID NO: 2178417 - RNA, 18 nt, Human
uucucuguguuuguuccu

SEQ ID NO: 2178418 - RNA, 19 nt, Human
uucucuguguuuguuccua

SEQ ID NO: 2178419 - RNA, 17 nt, Human
uucucugucucaugugu

SEQ ID NO: 2178420 - RNA, 17 nt, Human
uucucugucucauccau

SEQ ID NO: 2178421 - RNA, 20 nt, Human
aucauugaaaucuuuuugcu

SEQ ID NO: 2178422 - RNA, 13 nt, Human
uucucugucucau

SEQ ID NO: 2178423 - RNA, 19 nt, Human
aucauugaaaucuuuuugc

SEQ ID NO: 2178424 - RNA, 12 nt, Human
uucugaagaaga

SEQ ID NO: 2178425 - RNA, 13 nt, Human
uucugaagaagau

SEQ ID NO: 2178426 - RNA, 21 nt, Human
uucugcauuuugcuauuguaa

SEQ ID NO: 2178427 - RNA, 17 nt, Human
uucugcauuuugcuauu

SEQ ID NO: 2178428 - RNA, 18 nt, Human
uucugcauuuugcuauug

SEQ ID NO: 2178429 - RNA, 23 nt, Human
uucugcauuuuauucuggaugga

SEQ ID NO: 2178430 - RNA, 14 nt, Human
uucugaagaagaug

SEQ ID NO: 2178431 - RNA, 23 nt, Human
uucugcaucagcugcugaaacaa

SEQ ID NO: 2178432 - RNA, 22 nt, Human
uucugggagacacccaaagggu

SEQ ID NO: 2178433 - RNA, 16 nt, Human
uucugggaggaagcag

SEQ ID NO: 2178434 - RNA, 14 nt, Human
uucuggguggccuc

SEQ ID NO: 2178435 - RNA, 13 nt, Human
uucugggugucca

SEQ ID NO: 2178436 - RNA, 18 nt, Human
uucuggguggccucggga

SEQ ID NO: 2178437 - RNA, 19 nt, Human
uucuggguggggcaguggg

SEQ ID NO: 2178438 - RNA, 15 nt, Human
uucugguacucuccu

SEQ ID NO: 2178439 - RNA, 18 nt, Human
uucugguagauagaaaua

SEQ ID NO: 2178440 - RNA, 17 nt, Human
uucugguagauagaaau

SEQ ID NO: 2178441 - RNA, 18 nt, Human
uucugguacucuccuaga

SEQ ID NO: 2178442 - RNA, 19 nt, Human
uucugguagauagaaauaa

SEQ ID NO: 2178443 - RNA, 19 nt, Human
uucuggugaggccuugcuc

SEQ ID NO: 2178444 - RNA, 21 nt, Human
uucuggucucuaggcugggga

SEQ ID NO: 2178445 - RNA, 17 nt, Human
uucuguaccaaaguguu

SEQ ID NO: 2178446 - RNA, 22 nt, Human
uucuguacauagccuauauuua

SEQ ID NO: 2178447 - RNA, 22 nt, Human
uucuguacaugcauugagcucu

SEQ ID NO: 2178448 - RNA, 15 nt, Human
uucuguacauagccu

SEQ ID NO: 2178449 - RNA, 16 nt, Human
uucuguacauagccua

SEQ ID NO: 2178450 - RNA, 18 nt, Human
uucuguacauagccuaua

SEQ ID NO: 2178451 - RNA, 19 nt, Human
uucuguacauagccuauau

SEQ ID NO: 2178452 - RNA, 19 nt, Human
uucuggugggguguguucc

SEQ ID NO: 2178453 - RNA, 12 nt, Human
uucuggugugaa

SEQ ID NO: 2178454 - RNA, 18 nt, Human
uucugccggcccuggggc

SEQ ID NO: 2178455 - RNA, 17 nt, Human
uucugccggcccugggg

SEQ ID NO: 2178456 - RNA, 16 nt, Human
uucugccgugugcccu

SEQ ID NO: 2178457 - RNA, 13 nt, Human
uucugccucucaa

SEQ ID NO: 2178458 - RNA, 16 nt, Human
uucugccgcagcccug

SEQ ID NO: 2178459 - RNA, 14 nt, Human
uucugccacuuccc

SEQ ID NO: 2178460 - RNA, 17 nt, Human
uucugccacuucccagg

SEQ ID NO: 2178461 - RNA, 23 nt, Human
uucugccgcagcccugcagaggg

SEQ ID NO: 2178462 - RNA, 10 nt, Human
uucugggaca

SEQ ID NO: 2178463 - RNA, 14 nt, Human
uucugccucugagg

SEQ ID NO: 2178464 - RNA, 11 nt, Human
uucugggacac

SEQ ID NO: 2178465 - RNA, 22 nt, Human
uucugggacacaguucaauucu

SEQ ID NO: 2178466 - RNA, 23 nt, Human
aucccaggggaccacaccucccu

SEQ ID NO: 2178467 - RNA, 20 nt, Human
aucccaggggaccacaccuc

SEQ ID NO: 2178468 - RNA, 17 nt, Human
aucccaggggcccaagg

SEQ ID NO: 2178469 - RNA, 19 nt, Human
aucccaggggcccaaggcg

SEQ ID NO: 2178470 - RNA, 19 nt, Human
aucccaggggaccacaccu

SEQ ID NO: 2178471 - RNA, 12 nt, Human
aucccaggggac

SEQ ID NO: 2178472 - RNA, 19 nt, Human
aucccaggcuucacccuga

SEQ ID NO: 2178473 - RNA, 16 nt, Human
aucccauaugccuggg

SEQ ID NO: 2178474 - RNA, 17 nt, Human
aucccauaugccugggc

SEQ ID NO: 2178475 - RNA, 17 nt, Human
aucccucaucugucccu

SEQ ID NO: 2178476 - RNA, 13 nt, Human
aucccucaucugu

SEQ ID NO: 2178477 - RNA, 15 nt, Human
aucccuccccaguuc

SEQ ID NO: 2178478 - RNA, 16 nt, Human
aucccuccccaguuca

SEQ ID NO: 2178479 - RNA, 22 nt, Human
aucccucccccccaugcacugu

SEQ ID NO: 2178480 - RNA, 21 nt, Human
aucccucccccccaugcacug

SEQ ID NO: 2178481 - RNA, 19 nt, Human
aucccucccccccaugcac

SEQ ID NO: 2178482 - RNA, 18 nt, Human
aucccucccccccaugca

SEQ ID NO: 2178483 - RNA, 11 nt, Human
aucccucaucu

SEQ ID NO: 2178484 - RNA, 17 nt, Human
aucccucuacagagcuu

SEQ ID NO: 2178485 - RNA, 18 nt, Human
aucccugggcauugcuuu

SEQ ID NO: 2178486 - RNA, 17 nt, Human
aucccugggcauugcuu

SEQ ID NO: 2178487 - RNA, 16 nt, Human
aucccugggcauugcu

SEQ ID NO: 2178488 - RNA, 14 nt, Human
aucccucuccuccc

SEQ ID NO: 2178489 - RNA, 14 nt, Human
aucccucucuggau

SEQ ID NO: 2178490 - RNA, 16 nt, Human
aucccucucuggauug

SEQ ID NO: 2178491 - RNA, 11 nt, Human
aucccucucca

SEQ ID NO: 2178492 - RNA, 12 nt, Human
aucccucuccau

SEQ ID NO: 2178493 - RNA, 22 nt, Human
aucccucuccauaaccccaccc

SEQ ID NO: 2178494 - RNA, 23 nt, Human
aucccucuacagagcuucccuga

SEQ ID NO: 2178495 - RNA, 22 nt, Human
aucccucuacagagcuucccug

SEQ ID NO: 2178496 - RNA, 21 nt, Human
aucccucuacagagcuucccu

SEQ ID NO: 2178497 - RNA, 20 nt, Human
aucccucuacagagcuuccc

SEQ ID NO: 2178498 - RNA, 13 nt, Human
aucccuguuuaau

SEQ ID NO: 2178499 - RNA, 19 nt, Human
aucccuguuacccagagaa

SEQ ID NO: 2178500 - RNA, 14 nt, Human
aucccuguuuaaua

SEQ ID NO: 2178501 - RNA, 15 nt, Human
aucccuguuuaauau

SEQ ID NO: 2178502 - RNA, 16 nt, Human
aucccuguuuaauauu

SEQ ID NO: 2178503 - RNA, 22 nt, Human
aucccuguuuaauauuuaaaca

SEQ ID NO: 2178504 - RNA, 23 nt, Human
aucccuguuuaauauuuaaacag

SEQ ID NO: 2178505 - RNA, 17 nt, Human
aucccuguuuaauauuu

SEQ ID NO: 2178506 - RNA, 18 nt, Human
aucccuguuuaauauuua

SEQ ID NO: 2178507 - RNA, 20 nt, Human
aucccuguuuaauauuuaaa

SEQ ID NO: 2178508 - RNA, 21 nt, Human
aucccuguuuaauauuuaaac

SEQ ID NO: 2178509 - RNA, 18 nt, Human
aucccuguuacccagaga

SEQ ID NO: 2178510 - RNA, 18 nt, Human
aucccuguguugucucua

SEQ ID NO: 2178511 - RNA, 20 nt, Human
auccauguuaguuuuuacuu

SEQ ID NO: 2178512 - RNA, 19 nt, Human
auccauguuaguuuuuacu

SEQ ID NO: 2178513 - RNA, 16 nt, Human
auccauguuuguaaaa

SEQ ID NO: 2178514 - RNA, 14 nt, Human
auccauuaucaugu

SEQ ID NO: 2178515 - RNA, 15 nt, Human
auccauuaucaugug

SEQ ID NO: 2178516 - RNA, 18 nt, Human
auccauuccucagggaca

SEQ ID NO: 2178517 - RNA, 14 nt, Human
auccauuccucagg

SEQ ID NO: 2178518 - RNA, 22 nt, Human
auccauuccucagggacagaga

SEQ ID NO: 2178519 - RNA, 16 nt, Human
auccauuaucaugugu

SEQ ID NO: 2178520 - RNA, 17 nt, Human
auccauuaucaugugua

SEQ ID NO: 2178521 - RNA, 18 nt, Human
auccauuaucauguguaa

SEQ ID NO: 2178522 - RNA, 18 nt, Human
auccauguuaguuuuuac

SEQ ID NO: 2178523 - RNA, 20 nt, Human
auccauguacuguaguuuuu

SEQ ID NO: 2178524 - RNA, 22 nt, Human
auccauguacuguaguuuuucu

SEQ ID NO: 2178525 - RNA, 18 nt, Human
auccauguacuguaguuu

SEQ ID NO: 2178526 - RNA, 14 nt, Human
auccauguacugua

SEQ ID NO: 2178527 - RNA, 12 nt, Human
auccauguacug

SEQ ID NO: 2178528 - RNA, 19 nt, Human
auccauguaagguaucagu

SEQ ID NO: 2178529 - RNA, 17 nt, Human
aucccaggauguacaag

SEQ ID NO: 2178530 - RNA, 21 nt, Human
aucccaagaucugugcagccc

SEQ ID NO: 2178531 - RNA, 23 nt, Human
aucccaggaucgcaagagccaug

SEQ ID NO: 2178532 - RNA, 23 nt, Human
aucccaacugucuuuuuuucccu

SEQ ID NO: 2178533 - RNA, 17 nt, Human
aucccaacugucuuuuu

SEQ ID NO: 2178534 - RNA, 17 nt, Human
aucccaagacccagggc

SEQ ID NO: 2178535 - RNA, 19 nt, Human
aucccaagaucugugcagc

SEQ ID NO: 2178536 - RNA, 15 nt, Human
aucccaacugucuuu

SEQ ID NO: 2178537 - RNA, 15 nt, Human
auccagguucagcuu

SEQ ID NO: 2178538 - RNA, 16 nt, Human
auccagguucagcuug

SEQ ID NO: 2178539 - RNA, 17 nt, Human
auccaggguggugguga

SEQ ID NO: 2178540 - RNA, 14 nt, Human
aucauuuuaauuau

SEQ ID NO: 2178541 - RNA, 15 nt, Human
aucauuuuaauuauu

SEQ ID NO: 2178542 - RNA, 14 nt, Human
auccagguaaucca

SEQ ID NO: 2178543 - RNA, 22 nt, Human
aucauuucuugggcccuccuga

SEQ ID NO: 2178544 - RNA, 19 nt, Human
aucauuucuugggcccucc

SEQ ID NO: 2178545 - RNA, 18 nt, Human
aucauuucuugggcccuc

SEQ ID NO: 2178546 - RNA, 15 nt, Human
aucauuucuugggcc

SEQ ID NO: 2178547 - RNA, 14 nt, Human
uucuguacugauuu

SEQ ID NO: 2178548 - RNA, 20 nt, Human
uucuguacugauuuuuguaa

SEQ ID NO: 2178549 - RNA, 18 nt, Human
uucuguacucaaauguag

SEQ ID NO: 2178550 - RNA, 17 nt, Human
aucauuugaacaacuag

SEQ ID NO: 2178551 - RNA, 12 nt, Human
aucauuuguuca

SEQ ID NO: 2178552 - RNA, 15 nt, Human
aucauuugcccuuaa

SEQ ID NO: 2178553 - RNA, 18 nt, Human
aucauuugcccuuaagga

SEQ ID NO: 2178554 - RNA, 19 nt, Human
aucauuuguucaaagcugu

SEQ ID NO: 2178555 - RNA, 18 nt, Human
aucauuuguuggaaugaa

SEQ ID NO: 2178556 - RNA, 13 nt, Human
aucauuugcuuuu

SEQ ID NO: 2178557 - RNA, 21 nt, Human
uuccucuauugauguacaguc

SEQ ID NO: 2178558 - RNA, 23 nt, Human
uuccucuagugcccuccacagcc

SEQ ID NO: 2178559 - RNA, 17 nt, Human
uuccucuagaagccaag

SEQ ID NO: 2178560 - RNA, 17 nt, Human
uuccucuauugauguac

SEQ ID NO: 2178561 - RNA, 17 nt, Human
uuccucuaguucuuugu

SEQ ID NO: 2178562 - RNA, 16 nt, Human
uuccucuuccccuugc

SEQ ID NO: 2178563 - RNA, 13 nt, Human
uuccucuucccca

SEQ ID NO: 2178564 - RNA, 20 nt, Human
uuccucuucuauuuuguaaa

SEQ ID NO: 2178565 - RNA, 18 nt, Human
uuccucuuccccuugccc

SEQ ID NO: 2178566 - RNA, 19 nt, Human
uuccucuuccccuugcccu

SEQ ID NO: 2178567 - RNA, 12 nt, Human
uuccucugggaa

SEQ ID NO: 2178568 - RNA, 21 nt, Human
uuccucuguuucuccuucuga

SEQ ID NO: 2178569 - RNA, 19 nt, Human
uuccucuagugcccuccac

SEQ ID NO: 2178570 - RNA, 15 nt, Human
uuccucuagaagcca

SEQ ID NO: 2178571 - RNA, 14 nt, Human
uuccucgcccuggg

SEQ ID NO: 2178572 - RNA, 15 nt, Human
uuccuccuuccaugg

SEQ ID NO: 2178573 - RNA, 18 nt, Human
uuccucgcagagaggcca

SEQ ID NO: 2178574 - RNA, 17 nt, Human
uuccuccuguguacagg

SEQ ID NO: 2178575 - RNA, 23 nt, Human
uuccuccugggcccucucugcuc

SEQ ID NO: 2178576 - RNA, 14 nt, Human
uuccuccuggcaga

SEQ ID NO: 2178577 - RNA, 13 nt, Human
uuccuccugugua

SEQ ID NO: 2178578 - RNA, 22 nt, Human
uuccuaauaaaguucuguacuc

SEQ ID NO: 2178579 - RNA, 14 nt, Human
uuccuccuggaaau

SEQ ID NO: 2178580 - RNA, 21 nt, Human
uuccuccugggcccucucugc

SEQ ID NO: 2178581 - RNA, 15 nt, Human
uuccuccugggcccu

SEQ ID NO: 2178582 - RNA, 14 nt, Human
uuccuccugggccc

SEQ ID NO: 2178583 - RNA, 11 nt, Human
uuccuccuggg

SEQ ID NO: 2178584 - RNA, 15 nt, Human
uuccuaauaaaguuc

SEQ ID NO: 2178585 - RNA, 19 nt, Human
uuccuaauaaaguucugua

SEQ ID NO: 2178586 - RNA, 16 nt, Human
uuccuaauaaaguucu

SEQ ID NO: 2178587 - RNA, 24 nt, Human
auauuuucaaauuguaucuagugc

SEQ ID NO: 2178588 - RNA, 13 nt, Human
uuccuaagugauu

SEQ ID NO: 2178589 - RNA, 17 nt, Human
auauuuucaaauuguau

SEQ ID NO: 2178590 - RNA, 20 nt, Human
auauuuuaugugagagaaag

SEQ ID NO: 2178591 - RNA, 15 nt, Human
auauuuuauuauaua

SEQ ID NO: 2178592 - RNA, 13 nt, Human
uuccuaauccucu

SEQ ID NO: 2178593 - RNA, 15 nt, Human
uuccuaauccucuag

SEQ ID NO: 2178594 - RNA, 15 nt, Human
auauuuuaugugaga

SEQ ID NO: 2178595 - RNA, 14 nt, Human
auauuuuauaauuu

SEQ ID NO: 2178596 - RNA, 12 nt, Human
auauuuuaaaua

SEQ ID NO: 2178597 - RNA, 14 nt, Human
auauuuuaagacga

SEQ ID NO: 2178598 - RNA, 20 nt, Human
uuccuguucuuaagacguga

SEQ ID NO: 2178599 - RNA, 15 nt, Human
uuccuguucugaacu

SEQ ID NO: 2178600 - RNA, 13 nt, Human
uuccuguucugaa

SEQ ID NO: 2178601 - RNA, 15 nt, Human
uuccuucagcuucca

SEQ ID NO: 2178602 - RNA, 19 nt, Human
uuccuguuggauuuguuua

SEQ ID NO: 2178603 - RNA, 20 nt, Human
uuccuguuggauuuguuuaa

SEQ ID NO: 2178604 - RNA, 11 nt, Human
uuccuucagug

SEQ ID NO: 2178605 - RNA, 14 nt, Human
uuccuucagugccu

SEQ ID NO: 2178606 - RNA, 22 nt, Human
uuccuucagugcaucugggaag

SEQ ID NO: 2178607 - RNA, 21 nt, Human
auauuuucaccauuugauuau

SEQ ID NO: 2178608 - RNA, 22 nt, Human
uuccuucagggugaugccaggu

SEQ ID NO: 2178609 - RNA, 23 nt, Human
auauuuucaugacuuuuccaugu

SEQ ID NO: 2178610 - RNA, 19 nt, Human
auauuuucaacgcagcccu

SEQ ID NO: 2178611 - RNA, 20 nt, Human
auauuuucaacgcagcccug

SEQ ID NO: 2178612 - RNA, 15 nt, Human
uuccuucagugccuu

SEQ ID NO: 2178613 - RNA, 14 nt, Human
uuccuucaggguga

SEQ ID NO: 2178614 - RNA, 15 nt, Human
uuccuucagggugau

SEQ ID NO: 2178615 - RNA, 15 nt, Human
uuccugguacccagc

SEQ ID NO: 2178616 - RNA, 11 nt, Human
uuccucuuucc

SEQ ID NO: 2178617 - RNA, 17 nt, Human
uuccuguucccaugaga

SEQ ID NO: 2178618 - RNA, 22 nt, Human
uuccuguguguccaaaacugcc

SEQ ID NO: 2178619 - RNA, 23 nt, Human
uuccuguuagguauuagaaagug

SEQ ID NO: 2178620 - RNA, 21 nt, Human
uuccuguguguccaaaacugc

SEQ ID NO: 2178621 - RNA, 20 nt, Human
uuccuggugccaauuucaag

SEQ ID NO: 2178622 - RNA, 19 nt, Human
uuccuggugccaauuucaa

SEQ ID NO: 2178623 - RNA, 16 nt, Human
uuccugguacccagcc

SEQ ID NO: 2178624 - RNA, 17 nt, Human
uuccugguacccagcca

SEQ ID NO: 2178625 - RNA, 18 nt, Human
uuccugguacccagccau

SEQ ID NO: 2178626 - RNA, 14 nt, Human
uuccuggucuguag

SEQ ID NO: 2178627 - RNA, 19 nt, Human
uuccugguacccagccauc

SEQ ID NO: 2178628 - RNA, 21 nt, Human
uuccugguacccagccaucug

SEQ ID NO: 2178629 - RNA, 18 nt, Human
auauuuucuuuaaugcuu

SEQ ID NO: 2178630 - RNA, 21 nt, Human
auauuuucuuuaaaagacaaa

SEQ ID NO: 2178631 - RNA, 12 nt, Human
auauuuugaauc

SEQ ID NO: 2178632 - RNA, 13 nt, Human
auauuuugaauca

SEQ ID NO: 2178633 - RNA, 19 nt, Human
auauuuugaaucaauaaua

SEQ ID NO: 2178634 - RNA, 14 nt, Human
auauuuugaaucaa

SEQ ID NO: 2178635 - RNA, 13 nt, Human
auauuuugauuau

SEQ ID NO: 2178636 - RNA, 17 nt, Human
auauuuugauuauugua

SEQ ID NO: 2178637 - RNA, 19 nt, Human
auauuuugauuauuguauu

SEQ ID NO: 2178638 - RNA, 21 nt, Human
auauuuugcacaguuagcaaa

SEQ ID NO: 2178639 - RNA, 19 nt, Human
auauuuugggaaucuuuuc

SEQ ID NO: 2178640 - RNA, 19 nt, Human
aucaagagcugcccuccuu

SEQ ID NO: 2178641 - RNA, 20 nt, Human
aucaagagcugcccuccuug

SEQ ID NO: 2178642 - RNA, 22 nt, Human
aucaagaugagagaacuggagg

SEQ ID NO: 2178643 - RNA, 15 nt, Human
aucaagagcugcccu

SEQ ID NO: 2178644 - RNA, 16 nt, Human
aucaagagcugcccuc

SEQ ID NO: 2178645 - RNA, 17 nt, Human
aucaagagcugcccucc

SEQ ID NO: 2178646 - RNA, 15 nt, Human
aucaagacuggaagg

SEQ ID NO: 2178647 - RNA, 15 nt, Human
aucaagaaaguguug

SEQ ID NO: 2178648 - RNA, 23 nt, Human
aucaagaauggggaucacagaga

SEQ ID NO: 2178649 - RNA, 21 nt, Human
auauuuuguauauaucugcuu

SEQ ID NO: 2178650 - RNA, 13 nt, Human
auauuuuguauau

SEQ ID NO: 2178651 - RNA, 14 nt, Human
auauuuuguauaua

SEQ ID NO: 2178652 - RNA, 12 nt, Human
aucaagaaaguc

SEQ ID NO: 2178653 - RNA, 13 nt, Human
aucaaucaaaccc

SEQ ID NO: 2178654 - RNA, 18 nt, Human
aucaauauugucauuccu

SEQ ID NO: 2178655 - RNA, 20 nt, Human
aucaauauugucauuccugu

SEQ ID NO: 2178656 - RNA, 13 nt, Human
aucaaucaacuua

SEQ ID NO: 2178657 - RNA, 22 nt, Human
aucaauauugucauuccuguau

SEQ ID NO: 2178658 - RNA, 19 nt, Human
aucaauacacuaguuguuu

SEQ ID NO: 2178659 - RNA, 16 nt, Human
aucaauaauauauuuu

SEQ ID NO: 2178660 - RNA, 18 nt, Human
aucaauaauauauuuucu

SEQ ID NO: 2178661 - RNA, 20 nt, Human
aucaauaauauauuuucugu

SEQ ID NO: 2178662 - RNA, 21 nt, Human
aucaauaauauauuuucuguu

SEQ ID NO: 2178663 - RNA, 12 nt, Human
aucaauacacua

SEQ ID NO: 2178664 - RNA, 17 nt, Human
aucaauacacuaguugu

SEQ ID NO: 2178665 - RNA, 18 nt, Human
aucaagaugucagacugg

SEQ ID NO: 2178666 - RNA, 13 nt, Human
aucaaguauuaua

SEQ ID NO: 2178667 - RNA, 18 nt, Human
aucaaguauuauaccuuu

SEQ ID NO: 2178668 - RNA, 14 nt, Human
aucaaguauuauac

SEQ ID NO: 2178669 - RNA, 15 nt, Human
uuccuuuggagcuuu

SEQ ID NO: 2178670 - RNA, 21 nt, Human
aucacugucuuuccuagaugg

SEQ ID NO: 2178671 - RNA, 18 nt, Human
aucacuggcaaugaaaaa

SEQ ID NO: 2178672 - RNA, 16 nt, Human
aucacuggcaaugaaa

SEQ ID NO: 2178673 - RNA, 23 nt, Human
aucacuggcaaugaaaaauucuc

SEQ ID NO: 2178674 - RNA, 22 nt, Human
aucacuggcaaugaaaaauucu

SEQ ID NO: 2178675 - RNA, 19 nt, Human
aucacugucuuuccuagau

SEQ ID NO: 2178676 - RNA, 18 nt, Human
aucacugucuuuccuaga

SEQ ID NO: 2178677 - RNA, 16 nt, Human
aucacugucuuuccua

SEQ ID NO: 2178678 - RNA, 15 nt, Human
aucacugucuuuccu

SEQ ID NO: 2178679 - RNA, 14 nt, Human
aucacugucuuucc

SEQ ID NO: 2178680 - RNA, 12 nt, Human
aucacugucuuu

SEQ ID NO: 2178681 - RNA, 22 nt, Human
aucacugguugcacuuaugauu

SEQ ID NO: 2178682 - RNA, 12 nt, Human
uuccuuuuauca

SEQ ID NO: 2178683 - RNA, 14 nt, Human
uuccuuuucccugc

SEQ ID NO: 2178684 - RNA, 15 nt, Human
uuccuuuucccugcu

SEQ ID NO: 2178685 - RNA, 20 nt, Human
uuccuuuuagccuaguucau

SEQ ID NO: 2178686 - RNA, 21 nt, Human
uuccuuuguuuuuuuuuccug

SEQ ID NO: 2178687 - RNA, 12 nt, Human
uuccuuuuaauu

SEQ ID NO: 2178688 - RNA, 21 nt, Human
uuccuuuuaaaacacuuccau

SEQ ID NO: 2178689 - RNA, 22 nt, Human
uuccuuuuaaaacacuuccaua

SEQ ID NO: 2178690 - RNA, 20 nt, Human
uuccuuuuaaaacacuucca

SEQ ID NO: 2178691 - RNA, 18 nt, Human
uuccuuuguguuucuauu

SEQ ID NO: 2178692 - RNA, 14 nt, Human
aucacguaaagcua

SEQ ID NO: 2178693 - RNA, 21 nt, Human
aucacguaaagcuagaaauga

SEQ ID NO: 2178694 - RNA, 20 nt, Human
aucacuaauacuaauucauu

SEQ ID NO: 2178695 - RNA, 14 nt, Human
aucacuacugcagu

SEQ ID NO: 2178696 - RNA, 22 nt, Human
aucacggucgccaccuggcauu

SEQ ID NO: 2178697 - RNA, 13 nt, Human
aucacuacugcag

SEQ ID NO: 2178698 - RNA, 22 nt, Human
aucacggcucacugcagccuca

SEQ ID NO: 2178699 - RNA, 22 nt, Human
aucacaacgugcauugugcuuc

SEQ ID NO: 2178700 - RNA, 20 nt, Human
aucaaucaucugugugaaaa

SEQ ID NO: 2178701 - RNA, 14 nt, Human
aucaaucacagcuu

SEQ ID NO: 2178702 - RNA, 20 nt, Human
aucaaucacagcuuguauuu

SEQ ID NO: 2178703 - RNA, 19 nt, Human
aucaaucaucugugugaaa

SEQ ID NO: 2178704 - RNA, 22 nt, Human
aucaaucaucugugugaaaaug

SEQ ID NO: 2178705 - RNA, 16 nt, Human
aucacaacaagaaauu

SEQ ID NO: 2178706 - RNA, 17 nt, Human
aucacaacacuggcuga

SEQ ID NO: 2178707 - RNA, 15 nt, Human
aucacaacgugcauu

SEQ ID NO: 2178708 - RNA, 17 nt, Human
aucacaacgugcauugu

SEQ ID NO: 2178709 - RNA, 18 nt, Human
aucacaacgugcauugug

SEQ ID NO: 2178710 - RNA, 21 nt, Human
aucacaacgugcauugugcuu

SEQ ID NO: 2178711 - RNA, 14 nt, Human
auauucuuauguau

SEQ ID NO: 2178712 - RNA, 16 nt, Human
auauucuguuggccag

SEQ ID NO: 2178713 - RNA, 22 nt, Human
auauucucacgggcaguagcug

SEQ ID NO: 2178714 - RNA, 21 nt, Human
auauuccugcagccuggaggc

SEQ ID NO: 2178715 - RNA, 18 nt, Human
auauuccauauauuagca

SEQ ID NO: 2178716 - RNA, 15 nt, Human
auauucauuuggaaa

SEQ ID NO: 2178717 - RNA, 13 nt, Human
auauucauuugga

SEQ ID NO: 2178718 - RNA, 13 nt, Human
auauucauuucaa

SEQ ID NO: 2178719 - RNA, 18 nt, Human
auauuccccuaucucuag

SEQ ID NO: 2178720 - RNA, 19 nt, Human
auauuccaugaauguauca

SEQ ID NO: 2178721 - RNA, 16 nt, Human
auauuccaugaaugua

SEQ ID NO: 2178722 - RNA, 15 nt, Human
auauuccaugaaugu

SEQ ID NO: 2178723 - RNA, 23 nt, Human
auauucccuagaaacuuccaaau

SEQ ID NO: 2178724 - RNA, 17 nt, Human
auauucccuagaaacuu

SEQ ID NO: 2178725 - RNA, 23 nt, Human
auauuccugaaugaaauaucaga

SEQ ID NO: 2178726 - RNA, 22 nt, Human
auauuccugaaugaaauaucag

SEQ ID NO: 2178727 - RNA, 18 nt, Human
auauuccugaaugaaaua

SEQ ID NO: 2178728 - RNA, 17 nt, Human
auauuccugaaugaaau

SEQ ID NO: 2178729 - RNA, 15 nt, Human
auauuccugaaugaa

SEQ ID NO: 2178730 - RNA, 18 nt, Human
auauugaauauaauauau

SEQ ID NO: 2178731 - RNA, 21 nt, Human
auauugaauauaauauauuug

SEQ ID NO: 2178732 - RNA, 13 nt, Human
auauugaugugug

SEQ ID NO: 2178733 - RNA, 19 nt, Human
auauugauuuccguuaaaa

SEQ ID NO: 2178734 - RNA, 22 nt, Human
auauugauuuccguuaaaauac

SEQ ID NO: 2178735 - RNA, 21 nt, Human
auauugauuuccguuaaaaua

SEQ ID NO: 2178736 - RNA, 23 nt, Human
auauucuuauguaugugaaaguu

SEQ ID NO: 2178737 - RNA, 16 nt, Human
auauugaaaaaauaga

SEQ ID NO: 2178738 - RNA, 15 nt, Human
auauugauccagaaa

SEQ ID NO: 2178739 - RNA, 22 nt, Human
auauugauccagaaagaaaacu

SEQ ID NO: 2178740 - RNA, 20 nt, Human
auauguuuuaagaggcaggg

SEQ ID NO: 2178741 - RNA, 21 nt, Human
auauguuuugugggaacagau

SEQ ID NO: 2178742 - RNA, 14 nt, Human
auauguuuuuuaga

SEQ ID NO: 2178743 - RNA, 17 nt, Human
auauguuuuuuagauca

SEQ ID NO: 2178744 - RNA, 18 nt, Human
auauguuuuaagaggcag

SEQ ID NO: 2178745 - RNA, 13 nt, Human
uucauguuucuua

SEQ ID NO: 2178746 - RNA, 12 nt, Human
uucauguuucuu

SEQ ID NO: 2178747 - RNA, 22 nt, Human
uucauguugcacacccacucag

SEQ ID NO: 2178748 - RNA, 18 nt, Human
uucauguuuuaacaaaaa

SEQ ID NO: 2178749 - RNA, 16 nt, Human
uucauguuuugugacu

SEQ ID NO: 2178750 - RNA, 17 nt, Human
uucauguuuugugacua

SEQ ID NO: 2178751 - RNA, 18 nt, Human
uucauguuuugugacuau

SEQ ID NO: 2178752 - RNA, 17 nt, Human
uucauguuuuaacaaaa

SEQ ID NO: 2178753 - RNA, 15 nt, Human
uucauguuuuaacaa

SEQ ID NO: 2178754 - RNA, 14 nt, Human
uucauguuugcuuc

SEQ ID NO: 2178755 - RNA, 23 nt, Human
auauuaaauauguuagcaaagag

SEQ ID NO: 2178756 - RNA, 19 nt, Human
auauuaaauacagacacua

SEQ ID NO: 2178757 - RNA, 20 nt, Human
auauuaaauacagacacuaa

SEQ ID NO: 2178758 - RNA, 14 nt, Human
auauuaaaggaguu

SEQ ID NO: 2178759 - RNA, 12 nt, Human
auauuaaauaca

SEQ ID NO: 2178760 - RNA, 13 nt, Human
auauuaaauacag

SEQ ID NO: 2178761 - RNA, 17 nt, Human
auauuaaauacagacac

SEQ ID NO: 2178762 - RNA, 13 nt, Human
auauuaaaucugc

SEQ ID NO: 2178763 - RNA, 12 nt, Human
auauuaaaucug

SEQ ID NO: 2178764 - RNA, 22 nt, Human
auauuaaggaagacaaugugaa

SEQ ID NO: 2178765 - RNA, 24 nt, Human
auauuaagaaagacuaucuaaaug

SEQ ID NO: 2178766 - RNA, 23 nt, Human
auauucauuguauaaaaauagaa

SEQ ID NO: 2178767 - RNA, 21 nt, Human
auauucauuguauaaaaauag

SEQ ID NO: 2178768 - RNA, 19 nt, Human
auauuaauauauaucugcu

SEQ ID NO: 2178769 - RNA, 15 nt, Human
auauuaaugccuuua

SEQ ID NO: 2178770 - RNA, 14 nt, Human
auauuaauauuccu

SEQ ID NO: 2178771 - RNA, 14 nt, Human
auauuaaugccuuu

SEQ ID NO: 2178772 - RNA, 15 nt, Human
auauuugaaucuugu

SEQ ID NO: 2178773 - RNA, 16 nt, Human
auauuugaaucuuguc

SEQ ID NO: 2178774 - RNA, 20 nt, Human
auauuuguaaauuuauguga

SEQ ID NO: 2178775 - RNA, 12 nt, Human
auauuuguacau

SEQ ID NO: 2178776 - RNA, 13 nt, Human
auauuuguacaua

SEQ ID NO: 2178777 - RNA, 11 nt, Human
auauuuguaca

SEQ ID NO: 2178778 - RNA, 13 nt, Human
auauuuguacaaa

SEQ ID NO: 2178779 - RNA, 14 nt, Human
auauuuguacaaaa

SEQ ID NO: 2178780 - RNA, 11 nt, Human
auauuugaauc

SEQ ID NO: 2178781 - RNA, 13 nt, Human
auauuugaaucuu

SEQ ID NO: 2178782 - RNA, 14 nt, Human
auauuugaaucuug

SEQ ID NO: 2178783 - RNA, 23 nt, Human
auauuugaaauauugacuuuuua

SEQ ID NO: 2178784 - RNA, 14 nt, Human
auauuugaaauauu

SEQ ID NO: 2178785 - RNA, 19 nt, Human
auauuugaaauauugacuu

SEQ ID NO: 2178786 - RNA, 14 nt, Human
auauuuguggaaua

SEQ ID NO: 2178787 - RNA, 17 nt, Human
auauuuguguauuuaac

SEQ ID NO: 2178788 - RNA, 22 nt, Human
auauuugugauagcacuuucua

SEQ ID NO: 2178789 - RNA, 21 nt, Human
auauuugugauagcacuuucu

SEQ ID NO: 2178790 - RNA, 20 nt, Human
auauuugugauagcacuuuc

SEQ ID NO: 2178791 - RNA, 12 nt, Human
auauuuguagaa

SEQ ID NO: 2178792 - RNA, 18 nt, Human
auauuuguauaguugcuu

SEQ ID NO: 2178793 - RNA, 22 nt, Human
auauuuguaucacaaaucuuaa

SEQ ID NO: 2178794 - RNA, 22 nt, Human
auauuuguuaaauauuuacaua

SEQ ID NO: 2178795 - RNA, 21 nt, Human
auauuuguuaaauauuuacau

SEQ ID NO: 2178796 - RNA, 13 nt, Human
auauuuguuaaau

SEQ ID NO: 2178797 - RNA, 15 nt, Human
auauuuguuauguag

SEQ ID NO: 2178798 - RNA, 14 nt, Human
auauuuuaaaauga

SEQ ID NO: 2178799 - RNA, 16 nt, Human
auauuuuaaaaugaga

SEQ ID NO: 2178800 - RNA, 12 nt, Human
auauuuuaacuu

SEQ ID NO: 2178801 - RNA, 15 nt, Human
auauuucgaaagcug

SEQ ID NO: 2178802 - RNA, 22 nt, Human
auauuuaaaggcccuaucuguu

SEQ ID NO: 2178803 - RNA, 23 nt, Human
auauuuaaacaugguuacaauca

SEQ ID NO: 2178804 - RNA, 21 nt, Human
auauuuaaacaugguuacaau

SEQ ID NO: 2178805 - RNA, 14 nt, Human
auauuuaaagacag

SEQ ID NO: 2178806 - RNA, 15 nt, Human
auauuuaaaagaaag

SEQ ID NO: 2178807 - RNA, 12 nt, Human
auauuuaaacag

SEQ ID NO: 2178808 - RNA, 14 nt, Human
auauuuaaacagca

SEQ ID NO: 2178809 - RNA, 18 nt, Human
auauuuaaacagcagugu

SEQ ID NO: 2178810 - RNA, 15 nt, Human
auauuucugauauaa

SEQ ID NO: 2178811 - RNA, 13 nt, Human
auauuugaaauau

SEQ ID NO: 2178812 - RNA, 20 nt, Human
auauuguuauuauauaauua

SEQ ID NO: 2178813 - RNA, 21 nt, Human
auauuguguuuguguauuuac

SEQ ID NO: 2178814 - RNA, 17 nt, Human
auauuguguuuguguau

SEQ ID NO: 2178815 - RNA, 20 nt, Human
auauuguuuucaguguacau

SEQ ID NO: 2178816 - RNA, 22 nt, Human
auauugcugagagaaauaugga

SEQ ID NO: 2178817 - RNA, 17 nt, Human
auauuguguugugaaug

SEQ ID NO: 2178818 - RNA, 13 nt, Human
auauuguguuugu

SEQ ID NO: 2178819 - RNA, 18 nt, Human
auauuguguugugaaugu

SEQ ID NO: 2178820 - RNA, 17 nt, Human
auauugcugauggugca

SEQ ID NO: 2178821 - RNA, 21 nt, Human
auauugcugauggugcaauga

SEQ ID NO: 2178822 - RNA, 16 nt, Human
auauugcauaugcaua

SEQ ID NO: 2178823 - RNA, 16 nt, Human
auauugccgcacuagg

SEQ ID NO: 2178824 - RNA, 19 nt, Human
auauugcacaugucuuaau

SEQ ID NO: 2178825 - RNA, 20 nt, Human
auauugcacaugucuuaaug

SEQ ID NO: 2178826 - RNA, 21 nt, Human
auauugcacaugucuuaauga

SEQ ID NO: 2178827 - RNA, 16 nt, Human
auauugauuucugccu

SEQ ID NO: 2178828 - RNA, 22 nt, Human
auauugauuucugccuuccuug

SEQ ID NO: 2178829 - RNA, 13 nt, Human
auauugcacaugu

SEQ ID NO: 2178830 - RNA, 15 nt, Human
auauugcacaugucu

SEQ ID NO: 2178831 - RNA, 16 nt, Human
auauugcacaugucuu

SEQ ID NO: 2178832 - RNA, 17 nt, Human
auauugcacaugucuua

SEQ ID NO: 2178833 - RNA, 12 nt, Human
ugugcccaaguu

SEQ ID NO: 2178834 - RNA, 22 nt, Human
ugugccauuuuaaaaaaaaagg

SEQ ID NO: 2178835 - RNA, 17 nt, Human
ugugcccacaucccagg

SEQ ID NO: 2178836 - RNA, 20 nt, Human
ugugcccacaucccaggcuu

SEQ ID NO: 2178837 - RNA, 21 nt, Human
ugugcccacaucccaggcuuc

SEQ ID NO: 2178838 - RNA, 23 nt, Human
ugugcccacccuccacucuccuc

SEQ ID NO: 2178839 - RNA, 14 nt, Human
ugugcccacccucc

SEQ ID NO: 2178840 - RNA, 12 nt, Human
ugugccaugugc

SEQ ID NO: 2178841 - RNA, 16 nt, Human
ugugccaugugccagg

SEQ ID NO: 2178842 - RNA, 20 nt, Human
ugugccagguuuuuggucug

SEQ ID NO: 2178843 - RNA, 20 nt, Human
ugugccagauuuaugcauau

SEQ ID NO: 2178844 - RNA, 18 nt, Human
ugugccauagaguuuaac

SEQ ID NO: 2178845 - RNA, 20 nt, Human
ugugccauagaguuuaacac

SEQ ID NO: 2178846 - RNA, 21 nt, Human
ugugccauagaguuuaacaca

SEQ ID NO: 2178847 - RNA, 21 nt, Human
ugugccagggcaaugaugaau

SEQ ID NO: 2178848 - RNA, 18 nt, Human
ugugccagggcaaugaug

SEQ ID NO: 2178849 - RNA, 16 nt, Human
ugugccauagucacau

SEQ ID NO: 2178850 - RNA, 18 nt, Human
ugugccauagucacaugg

SEQ ID NO: 2178851 - RNA, 21 nt, Human
ugugccauagucacauggccu

SEQ ID NO: 2178852 - RNA, 22 nt, Human
ugugccauagaguuuaacacaa

SEQ ID NO: 2178853 - RNA, 17 nt, Human
ugugauuugacuguuuu

SEQ ID NO: 2178854 - RNA, 22 nt, Human
ugugauuugacuguuuuuaccc

SEQ ID NO: 2178855 - RNA, 23 nt, Human
ugugauuugacuguuuuuaccca

SEQ ID NO: 2178856 - RNA, 23 nt, Human
ugugauuucccguggccccagcc

SEQ ID NO: 2178857 - RNA, 24 nt, Human
ugugauuucccguggccccagccu

SEQ ID NO: 2178858 - RNA, 23 nt, Human
ugugauuuccuacuaaccuguuc

SEQ ID NO: 2178859 - RNA, 12 nt, Human
ugugauuugacu

SEQ ID NO: 2178860 - RNA, 13 nt, Human
ugugauuugacug

SEQ ID NO: 2178861 - RNA, 14 nt, Human
ugugauuugacugu

SEQ ID NO: 2178862 - RNA, 15 nt, Human
ugugauuugacuguu

SEQ ID NO: 2178863 - RNA, 22 nt, Human
ugugcauuuuugugaaaugaaa

SEQ ID NO: 2178864 - RNA, 16 nt, Human
ugugccaauauguauu

SEQ ID NO: 2178865 - RNA, 21 nt, Human
ugugcauuuuugugaaaugaa

SEQ ID NO: 2178866 - RNA, 17 nt, Human
ugugccaauauguauug

SEQ ID NO: 2178867 - RNA, 20 nt, Human
ugugccacccaccagggcga

SEQ ID NO: 2178868 - RNA, 16 nt, Human
ugugccacccaccagg

SEQ ID NO: 2178869 - RNA, 18 nt, Human
ugugccaauauguauugu

SEQ ID NO: 2178870 - RNA, 18 nt, Human
ugugccagauuuaugcau

SEQ ID NO: 2178871 - RNA, 12 nt, Human
ugugccacccug

SEQ ID NO: 2178872 - RNA, 14 nt, Human
ugugccacccuggg

SEQ ID NO: 2178873 - RNA, 15 nt, Human
ugugccacccugggc

SEQ ID NO: 2178874 - RNA, 16 nt, Human
ugugccacccugggcu

SEQ ID NO: 2178875 - RNA, 17 nt, Human
ugugccacccugggcuc

SEQ ID NO: 2178876 - RNA, 21 nt, Human
ugugccacccugggcucugug

SEQ ID NO: 2178877 - RNA, 22 nt, Human
ugugccacccugggcucugugg

SEQ ID NO: 2178878 - RNA, 23 nt, Human
ugugccacucaccgaagccacuu

SEQ ID NO: 2178879 - RNA, 14 nt, Human
ugugauugugccua

SEQ ID NO: 2178880 - RNA, 14 nt, Human
ugugauuguggaau

SEQ ID NO: 2178881 - RNA, 16 nt, Human
ugugauguauucuagc

SEQ ID NO: 2178882 - RNA, 19 nt, Human
ugugaugguucguucuguu

SEQ ID NO: 2178883 - RNA, 22 nt, Human
ugugaugguucguucuguuuac

SEQ ID NO: 2178884 - RNA, 14 nt, Human
ugugauguauucua

SEQ ID NO: 2178885 - RNA, 18 nt, Human
ugugaugacaacuggaau

SEQ ID NO: 2178886 - RNA, 17 nt, Human
ugugauuguggaaugga

SEQ ID NO: 2178887 - RNA, 23 nt, Human
ugugaugguucguucuguuuaca

SEQ ID NO: 2178888 - RNA, 15 nt, Human
ugugauuuaauagug

SEQ ID NO: 2178889 - RNA, 16 nt, Human
ugugauuuaauagugu

SEQ ID NO: 2178890 - RNA, 17 nt, Human
ugugauuuaauaguguu

SEQ ID NO: 2178891 - RNA, 19 nt, Human
ugugauuuaauaguguuaa

SEQ ID NO: 2178892 - RNA, 20 nt, Human
ugugauuuaauaguguuaau

SEQ ID NO: 2178893 - RNA, 22 nt, Human
ugugauuuaauaguguuaauca

SEQ ID NO: 2178894 - RNA, 17 nt, Human
ugugauuuagaacugua

SEQ ID NO: 2178895 - RNA, 18 nt, Human
ugugauuuagaacuguau

SEQ ID NO: 2178896 - RNA, 23 nt, Human
ugugauuuagaacuguaugucag

SEQ ID NO: 2178897 - RNA, 15 nt, Human
ugugauuucccgugg

SEQ ID NO: 2178898 - RNA, 19 nt, Human
ugugauuucccguggcccc

SEQ ID NO: 2178899 - RNA, 20 nt, Human
ugugauuucccguggcccca

SEQ ID NO: 2178900 - RNA, 22 nt, Human
ugugauuucccguggccccagc

SEQ ID NO: 2178901 - RNA, 15 nt, Human
ugugaugaacuuucu

SEQ ID NO: 2178902 - RNA, 14 nt, Human
ugugaugaauacug

SEQ ID NO: 2178903 - RNA, 18 nt, Human
ugugaugaauacuguauu

SEQ ID NO: 2178904 - RNA, 16 nt, Human
ugugaugaauacugua

SEQ ID NO: 2178905 - RNA, 18 nt, Human
ugugaugagaggaaauca

SEQ ID NO: 2178906 - RNA, 18 nt, Human
ugugauggggcccugccu

SEQ ID NO: 2178907 - RNA, 19 nt, Human
ugugauggggcccugccuc

SEQ ID NO: 2178908 - RNA, 20 nt, Human
ugugauggggcccugccucc

SEQ ID NO: 2178909 - RNA, 23 nt, Human
ugugaucccaagugccagucuug

SEQ ID NO: 2178910 - RNA, 18 nt, Human
ugugaucccaagugccag

SEQ ID NO: 2178911 - RNA, 13 nt, Human
ugugaucgucuga

SEQ ID NO: 2178912 - RNA, 17 nt, Human
ugugauccuuuuauguu

SEQ ID NO: 2178913 - RNA, 21 nt, Human
ugugauccuuuuauguuauuu

SEQ ID NO: 2178914 - RNA, 20 nt, Human
ugugaucuaucaauagucaa

SEQ ID NO: 2178915 - RNA, 20 nt, Human
agugaacaaauuuacagaga

SEQ ID NO: 2178916 - RNA, 16 nt, Human
agugaacaaauuuaca

SEQ ID NO: 2178917 - RNA, 16 nt, Human
agugaaagcuagagau

SEQ ID NO: 2178918 - RNA, 15 nt, Human
agugaaagaaaauaa

SEQ ID NO: 2178919 - RNA, 19 nt, Human
uguggagggcacauuccuu

SEQ ID NO: 2178920 - RNA, 12 nt, Human
uguggagugggg

SEQ ID NO: 2178921 - RNA, 16 nt, Human
uguggaguggggcagu

SEQ ID NO: 2178922 - RNA, 18 nt, Human
uguggaguggggcaguag

SEQ ID NO: 2178923 - RNA, 17 nt, Human
uguggaguucaucuuga

SEQ ID NO: 2178924 - RNA, 21 nt, Human
uguggagguacacucuuauag

SEQ ID NO: 2178925 - RNA, 21 nt, Human
uguggaggaaggauuguaaaa

SEQ ID NO: 2178926 - RNA, 13 nt, Human
uguggagggcaca

SEQ ID NO: 2178927 - RNA, 20 nt, Human
uguggaggaguccaggccau

SEQ ID NO: 2178928 - RNA, 21 nt, Human
ugugcugggagcuccacucug

SEQ ID NO: 2178929 - RNA, 14 nt, Human
uguggcaggcagcg

SEQ ID NO: 2178930 - RNA, 21 nt, Human
uguggaguucaucuugaauug

SEQ ID NO: 2178931 - RNA, 23 nt, Human
uguggcaguuuggcaaacucucc

SEQ ID NO: 2178932 - RNA, 23 nt, Human
uguggcaggcagcgccaagcaac

SEQ ID NO: 2178933 - RNA, 11 nt, Human
uguggcagugg

SEQ ID NO: 2178934 - RNA, 12 nt, Human
uguggcaguggu

SEQ ID NO: 2178935 - RNA, 15 nt, Human
uguggcagugguuuu

SEQ ID NO: 2178936 - RNA, 16 nt, Human
uguggcagugguuuug

SEQ ID NO: 2178937 - RNA, 16 nt, Human
ugugcccccagacgca

SEQ ID NO: 2178938 - RNA, 22 nt, Human
ugugcccccagacgcacguggg

SEQ ID NO: 2178939 - RNA, 19 nt, Human
ugugccccaugccugucca

SEQ ID NO: 2178940 - RNA, 15 nt, Human
ugugccccaugccug

SEQ ID NO: 2178941 - RNA, 23 nt, Human
ugugccccaugccuguccagccu

SEQ ID NO: 2178942 - RNA, 22 nt, Human
ugugcccaugggcacugcuggg

SEQ ID NO: 2178943 - RNA, 14 nt, Human
ugugccccaugccu

SEQ ID NO: 2178944 - RNA, 20 nt, Human
ugugcccaugggcacugcug

SEQ ID NO: 2178945 - RNA, 21 nt, Human
ugugcccaugggcacugcugg

SEQ ID NO: 2178946 - RNA, 14 nt, Human
ugugcccaugggca

SEQ ID NO: 2178947 - RNA, 18 nt, Human
ugugcccaugggcacugc

SEQ ID NO: 2178948 - RNA, 19 nt, Human
ugugcccaugggcacugcu

SEQ ID NO: 2178949 - RNA, 19 nt, Human
ugugcccagcccggaccuu

SEQ ID NO: 2178950 - RNA, 21 nt, Human
ugugcccccauguaagcaccc

SEQ ID NO: 2178951 - RNA, 18 nt, Human
ugugcuggaauucuaaca

SEQ ID NO: 2178952 - RNA, 13 nt, Human
ugugcuggagaug

SEQ ID NO: 2178953 - RNA, 18 nt, Human
ugugcuggagauguuuua

SEQ ID NO: 2178954 - RNA, 21 nt, Human
ugugcuggauggagcccaggc

SEQ ID NO: 2178955 - RNA, 10 nt, Human
ugugcuggga

SEQ ID NO: 2178956 - RNA, 12 nt, Human
ugugcugggagc

SEQ ID NO: 2178957 - RNA, 17 nt, Human
ugugcugggagcuccac

SEQ ID NO: 2178958 - RNA, 13 nt, Human
ugugcuggagcca

SEQ ID NO: 2178959 - RNA, 14 nt, Human
ugugcuggagccac

SEQ ID NO: 2178960 - RNA, 15 nt, Human
ugugcuggagccacu

SEQ ID NO: 2178961 - RNA, 19 nt, Human
ugugcuggagccacuaacu

SEQ ID NO: 2178962 - RNA, 20 nt, Human
ugugcuggagccacuaacua

SEQ ID NO: 2178963 - RNA, 15 nt, Human
ugugcuggaggacug

SEQ ID NO: 2178964 - RNA, 19 nt, Human
ugugcuggauggagcccag

SEQ ID NO: 2178965 - RNA, 20 nt, Human
ugugcuggauggagcccagg

SEQ ID NO: 2178966 - RNA, 12 nt, Human
agugagggccug

SEQ ID NO: 2178967 - RNA, 20 nt, Human
agugagggcuugucauuacc

SEQ ID NO: 2178968 - RNA, 18 nt, Human
agugaggggaaaccaggg

SEQ ID NO: 2178969 - RNA, 15 nt, Human
agugagggucagaga

SEQ ID NO: 2178970 - RNA, 13 nt, Human
agugagggucaga

SEQ ID NO: 2178971 - RNA, 22 nt, Human
agugagggguaaaagcugaucu

SEQ ID NO: 2178972 - RNA, 24 nt, Human
agugagggguaaaagcugaucugg

SEQ ID NO: 2178973 - RNA, 14 nt, Human
agugaggugcccag

SEQ ID NO: 2178974 - RNA, 20 nt, Human
agugaggguuucugagcugc

SEQ ID NO: 2178975 - RNA, 21 nt, Human
agugaggguuucugagcugcu

SEQ ID NO: 2178976 - RNA, 23 nt, Human
agugagggucagagaggagucag

SEQ ID NO: 2178977 - RNA, 17 nt, Human
agugaggguuucugagc

SEQ ID NO: 2178978 - RNA, 22 nt, Human
agugagggucagagaggaguca

SEQ ID NO: 2178979 - RNA, 16 nt, Human
agugagggucagagag

SEQ ID NO: 2178980 - RNA, 15 nt, Human
agugagucgaggaca

SEQ ID NO: 2178981 - RNA, 21 nt, Human
agugaguugauagcacagacc

SEQ ID NO: 2178982 - RNA, 14 nt, Human
agugagggauuauc

SEQ ID NO: 2178983 - RNA, 19 nt, Human
agugagggagggcugucau

SEQ ID NO: 2178984 - RNA, 20 nt, Human
uguggccagggugagagcug

SEQ ID NO: 2178985 - RNA, 21 nt, Human
agugaggcucugcccuugguu

SEQ ID NO: 2178986 - RNA, 19 nt, Human
agugaggcucugcccuugg

SEQ ID NO: 2178987 - RNA, 20 nt, Human
agugaggcucugcccuuggu

SEQ ID NO: 2178988 - RNA, 18 nt, Human
uguggccaaguucuuagu

SEQ ID NO: 2178989 - RNA, 19 nt, Human
uguggccaaggagcugcua

SEQ ID NO: 2178990 - RNA, 18 nt, Human
uguggccaaggagcugcu

SEQ ID NO: 2178991 - RNA, 17 nt, Human
uguggccaaggagcugc

SEQ ID NO: 2178992 - RNA, 15 nt, Human
uguggccaaggagcu

SEQ ID NO: 2178993 - RNA, 21 nt, Human
uguggccaaggagcugcuaua

SEQ ID NO: 2178994 - RNA, 20 nt, Human
uguggccaaggagcugcuau

SEQ ID NO: 2178995 - RNA, 19 nt, Human
uguggccagggugagagcu

SEQ ID NO: 2178996 - RNA, 21 nt, Human
uguggcaucuuugccuugggc

SEQ ID NO: 2178997 - RNA, 17 nt, Human
uguggcaucuuugccuu

SEQ ID NO: 2178998 - RNA, 16 nt, Human
uguggccaaaggaggg

SEQ ID NO: 2178999 - RNA, 24 nt, Human
uguggccaaaggagggucaggaag

SEQ ID NO: 2179000 - RNA, 14 nt, Human
uguggccaaggagc

SEQ ID NO: 2179001 - RNA, 15 nt, Human
agugaggcucugccc

SEQ ID NO: 2179002 - RNA, 14 nt, Human
agugaggcucugcc

SEQ ID NO: 2179003 - RNA, 16 nt, Human
agugaggcucugcccu

SEQ ID NO: 2179004 - RNA, 17 nt, Human
agugaggcucugcccuu

SEQ ID NO: 2179005 - RNA, 17 nt, Human
agucuugacgaguguga

SEQ ID NO: 2179006 - RNA, 16 nt, Human
agucuugcagcaggau

SEQ ID NO: 2179007 - RNA, 21 nt, Human
agucuugcuaccucagucagu

SEQ ID NO: 2179008 - RNA, 15 nt, Human
agucuuggcggcagc

SEQ ID NO: 2179009 - RNA, 14 nt, Human
agucuuccaaacca

SEQ ID NO: 2179010 - RNA, 19 nt, Human
agucuucacucucugaaga

SEQ ID NO: 2179011 - RNA, 15 nt, Human
agucucuucuccacu

SEQ ID NO: 2179012 - RNA, 16 nt, Human
agucucuucuccacug

SEQ ID NO: 2179013 - RNA, 12 nt, Human
agucucuucaga

SEQ ID NO: 2179014 - RNA, 15 nt, Human
agucuuaucaagcag

SEQ ID NO: 2179015 - RNA, 16 nt, Human
agucuuaucaagcagc

SEQ ID NO: 2179016 - RNA, 17 nt, Human
agucucuucuccacugg

SEQ ID NO: 2179017 - RNA, 23 nt, Human
agucuucaagcagauuggagaaa

SEQ ID NO: 2179018 - RNA, 17 nt, Human
agucuucacucucugaa

SEQ ID NO: 2179019 - RNA, 16 nt, Human
agucuucacucucuga

SEQ ID NO: 2179020 - RNA, 20 nt, Human
agucuuucuuagugccugug

SEQ ID NO: 2179021 - RNA, 15 nt, Human
agucuuggcucacug

SEQ ID NO: 2179022 - RNA, 21 nt, Human
agucuuggcggcagcagccau

SEQ ID NO: 2179023 - RNA, 22 nt, Human
agucuuggcggcagcagccauc

SEQ ID NO: 2179024 - RNA, 17 nt, Human
agucuuggggcaggaug

SEQ ID NO: 2179025 - RNA, 16 nt, Human
agucuuguauuaaguu

SEQ ID NO: 2179026 - RNA, 18 nt, Human
agucuuguauuaaguugu

SEQ ID NO: 2179027 - RNA, 24 nt, Human
agugaaacugcuuguuuccuagca

SEQ ID NO: 2179028 - RNA, 21 nt, Human
agugaaacugcuuguuuccua

SEQ ID NO: 2179029 - RNA, 13 nt, Human
agugaaacugcuu

SEQ ID NO: 2179030 - RNA, 14 nt, Human
agucuuuguacaga

SEQ ID NO: 2179031 - RNA, 16 nt, Human
agucucuaucauuaaa

SEQ ID NO: 2179032 - RNA, 17 nt, Human
agucucuaucauuaaag

SEQ ID NO: 2179033 - RNA, 18 nt, Human
agucucuaucauuaaagu

SEQ ID NO: 2179034 - RNA, 19 nt, Human
agucucuaucauuaaaguu

SEQ ID NO: 2179035 - RNA, 22 nt, Human
agucucucuggggccacacaga

SEQ ID NO: 2179036 - RNA, 20 nt, Human
agucucuaucauuaaaguuc

SEQ ID NO: 2179037 - RNA, 21 nt, Human
agucucuaucauuaaaguucu

SEQ ID NO: 2179038 - RNA, 19 nt, Human
agucucucucucucucucc

SEQ ID NO: 2179039 - RNA, 20 nt, Human
agucucucucucucucuccc

SEQ ID NO: 2179040 - RNA, 13 nt, Human
agucucuucucca

SEQ ID NO: 2179041 - RNA, 14 nt, Human
agucucuucuccac

SEQ ID NO: 2179042 - RNA, 17 nt, Human
agucucaggagcauggg

SEQ ID NO: 2179043 - RNA, 13 nt, Human
agucucaggagca

SEQ ID NO: 2179044 - RNA, 19 nt, Human
agucucaguggcuucaucu

SEQ ID NO: 2179045 - RNA, 10 nt, Human
agucucaguu

SEQ ID NO: 2179046 - RNA, 18 nt, Human
agucucaguuuguguguc

SEQ ID NO: 2179047 - RNA, 20 nt, Human
agucucaguuugugugucuu

SEQ ID NO: 2179048 - RNA, 21 nt, Human
agucucaguuugugugucuua

SEQ ID NO: 2179049 - RNA, 15 nt, Human
agucucuaucauuaa

SEQ ID NO: 2179050 - RNA, 15 nt, Human
ugugacugaauuucu

SEQ ID NO: 2179051 - RNA, 16 nt, Human
ugugacugaauuucuu

SEQ ID NO: 2179052 - RNA, 16 nt, Human
ugugagagguuugacu

SEQ ID NO: 2179053 - RNA, 15 nt, Human
ugugagagguuugac

SEQ ID NO: 2179054 - RNA, 20 nt, Human
ugugacuauauagagauguu

SEQ ID NO: 2179055 - RNA, 23 nt, Human
ugugacucuuuuuagggccaggc

SEQ ID NO: 2179056 - RNA, 19 nt, Human
ugugagaugcuagaacucc

SEQ ID NO: 2179057 - RNA, 15 nt, Human
ugugagaugcuagaa

SEQ ID NO: 2179058 - RNA, 22 nt, Human
agucucaggaaaucaaauaugc

SEQ ID NO: 2179059 - RNA, 18 nt, Human
ugugaccuuaguguuucu

SEQ ID NO: 2179060 - RNA, 19 nt, Human
ugugaccuuaguguuucug

SEQ ID NO: 2179061 - RNA, 15 nt, Human
ugugacuaauuguau

SEQ ID NO: 2179062 - RNA, 17 nt, Human
ugugacuaauuguauaa

SEQ ID NO: 2179063 - RNA, 18 nt, Human
ugugacuaauuguauaac

SEQ ID NO: 2179064 - RNA, 19 nt, Human
ugugacuaauuguauaaca

SEQ ID NO: 2179065 - RNA, 22 nt, Human
ugugacuaauuguauaacaggu

SEQ ID NO: 2179066 - RNA, 23 nt, Human
ugugacuaauuguauaacagguu

SEQ ID NO: 2179067 - RNA, 18 nt, Human
ugugacuauauagagaug

SEQ ID NO: 2179068 - RNA, 22 nt, Human
ugugacuauauagagauguuuu

SEQ ID NO: 2179069 - RNA, 18 nt, Human
ugugaacuuuauuaaaua

SEQ ID NO: 2179070 - RNA, 14 nt, Human
ugugacccucugaa

SEQ ID NO: 2179071 - RNA, 16 nt, Human
ugugacccucugaaug

SEQ ID NO: 2179072 - RNA, 13 nt, Human
ugugaccucaggc

SEQ ID NO: 2179073 - RNA, 14 nt, Human
ugugaccucaggca

SEQ ID NO: 2179074 - RNA, 14 nt, Human
ugugaagagaacca

SEQ ID NO: 2179075 - RNA, 14 nt, Human
ugugaccugagggc

SEQ ID NO: 2179076 - RNA, 16 nt, Human
ugugaccugaaguuca

SEQ ID NO: 2179077 - RNA, 13 nt, Human
ugugaccugaggg

SEQ ID NO: 2179078 - RNA, 20 nt, Human
ugugaccucaggcacuagcc

SEQ ID NO: 2179079 - RNA, 21 nt, Human
ugugaccucaggcacuagccu

SEQ ID NO: 2179080 - RNA, 14 nt, Human
ugugaccugaaguu

SEQ ID NO: 2179081 - RNA, 15 nt, Human
ugugaccugaaguuc

SEQ ID NO: 2179082 - RNA, 15 nt, Human
ugugaccuuaguguu

SEQ ID NO: 2179083 - RNA, 16 nt, Human
ugugaccuuaguguuu

SEQ ID NO: 2179084 - RNA, 19 nt, Human
ugugaaccaccacacccag

SEQ ID NO: 2179085 - RNA, 15 nt, Human
ugugaacagcggcug

SEQ ID NO: 2179086 - RNA, 20 nt, Human
ugugaaccaccacacccagc

SEQ ID NO: 2179087 - RNA, 21 nt, Human
ugugaaccaccacacccagcc

SEQ ID NO: 2179088 - RNA, 20 nt, Human
ugugaacuuggggaacaagg

SEQ ID NO: 2179089 - RNA, 20 nt, Human
ugugaacaaaagaugcucuu

SEQ ID NO: 2179090 - RNA, 19 nt, Human
ugugaacuggacccuguug

SEQ ID NO: 2179091 - RNA, 21 nt, Human
ugugaacuggacccuguugcu

SEQ ID NO: 2179092 - RNA, 22 nt, Human
ugugaacuggacccuguugcua

SEQ ID NO: 2179093 - RNA, 14 nt, Human
ugugaaaugcuggc

SEQ ID NO: 2179094 - RNA, 12 nt, Human
ugugaaauuauu

SEQ ID NO: 2179095 - RNA, 15 nt, Human
ugucuuguguuucuu

SEQ ID NO: 2179096 - RNA, 21 nt, Human
ugugaaagucagaugcccaga

SEQ ID NO: 2179097 - RNA, 19 nt, Human
ugucuuggcuuucauguua

SEQ ID NO: 2179098 - RNA, 22 nt, Human
ugugaaagucagaugcccagag

SEQ ID NO: 2179099 - RNA, 20 nt, Human
ugugaaauaaaacuggcuuu

SEQ ID NO: 2179100 - RNA, 20 nt, Human
ugugaaaggaagcuccacug

SEQ ID NO: 2179101 - RNA, 21 nt, Human
ugugaaauaguucaaagccaa

SEQ ID NO: 2179102 - RNA, 14 nt, Human
ugugaaaugaaaac

SEQ ID NO: 2179103 - RNA, 21 nt, Human
ugugaaauaaaacuggcuuug

SEQ ID NO: 2179104 - RNA, 15 nt, Human
ugugaaaggaaagag

SEQ ID NO: 2179105 - RNA, 16 nt, Human
ugucuuguacaugugu

SEQ ID NO: 2179106 - RNA, 17 nt, Human
ugucuuguacaugugua

SEQ ID NO: 2179107 - RNA, 20 nt, Human
ugucuuguacauguguagcc

SEQ ID NO: 2179108 - RNA, 22 nt, Human
ugucuuguacauguguagccug

SEQ ID NO: 2179109 - RNA, 18 nt, Human
ugugaaaggaaagaggcu

SEQ ID NO: 2179110 - RNA, 21 nt, Human
ugugaaaggaaagagggaggu

SEQ ID NO: 2179111 - RNA, 21 nt, Human
ugucagaaaccaguuauguga

SEQ ID NO: 2179112 - RNA, 21 nt, Human
ugucagaacuagaauuugauu

SEQ ID NO: 2179113 - RNA, 16 nt, Human
ugucagaaaccaguua

SEQ ID NO: 2179114 - RNA, 18 nt, Human
agucacguggaggagcag

SEQ ID NO: 2179115 - RNA, 21 nt, Human
agucacguggaggagcagugc

SEQ ID NO: 2179116 - RNA, 18 nt, Human
ugucacuuugcucugggu

SEQ ID NO: 2179117 - RNA, 11 nt, Human
ugucagagcug

SEQ ID NO: 2179118 - RNA, 23 nt, Human
ugucagacuuuaaagaauaauau

SEQ ID NO: 2179119 - RNA, 14 nt, Human
ugucagacuuuaaa

SEQ ID NO: 2179120 - RNA, 13 nt, Human
ugucagacuggcu

SEQ ID NO: 2179121 - RNA, 12 nt, Human
ugucagacuuua

SEQ ID NO: 2179122 - RNA, 20 nt, Human
ugucagaccuauuugacaua

SEQ ID NO: 2179123 - RNA, 23 nt, Human
ugucagacauccauguuuguaaa

SEQ ID NO: 2179124 - RNA, 13 nt, Human
ugucuuguacaug

SEQ ID NO: 2179125 - RNA, 21 nt, Human
ugucuugggcagagcuggcuc

SEQ ID NO: 2179126 - RNA, 22 nt, Human
ugucuugggcagagcuggcucu

SEQ ID NO: 2179127 - RNA, 19 nt, Human
ugucuuggacacuguacaa

SEQ ID NO: 2179128 - RNA, 12 nt, Human
ugucuugggcag

SEQ ID NO: 2179129 - RNA, 13 nt, Human
ugucuugggcaga

SEQ ID NO: 2179130 - RNA, 16 nt, Human
ugucuugggcagagcu

SEQ ID NO: 2179131 - RNA, 14 nt, Human
uguggugucugugu

SEQ ID NO: 2179132 - RNA, 23 nt, Human
uguggugugucccccucugucca

SEQ ID NO: 2179133 - RNA, 16 nt, Human
uguggucccaacagga

SEQ ID NO: 2179134 - RNA, 13 nt, Human
uguggucccaccc

SEQ ID NO: 2179135 - RNA, 15 nt, Human
uguggucccacccca

SEQ ID NO: 2179136 - RNA, 21 nt, Human
ugugguguuuccugcaggcca

SEQ ID NO: 2179137 - RNA, 14 nt, Human
uguguaacagcucc

SEQ ID NO: 2179138 - RNA, 20 nt, Human
ugugguguuuccuggcacug

SEQ ID NO: 2179139 - RNA, 15 nt, Human
uguguaacagcuccu

SEQ ID NO: 2179140 - RNA, 14 nt, Human
ugugguguuuccug

SEQ ID NO: 2179141 - RNA, 16 nt, Human
ugugguguuuccuggc

SEQ ID NO: 2179142 - RNA, 20 nt, Human
agugcuguggccugggcaag

SEQ ID NO: 2179143 - RNA, 18 nt, Human
agugcuguggccugggca

SEQ ID NO: 2179144 - RNA, 17 nt, Human
agugcuguggccugggc

SEQ ID NO: 2179145 - RNA, 16 nt, Human
agugcuguggccuggg

SEQ ID NO: 2179146 - RNA, 14 nt, Human
agugcuguggccug

SEQ ID NO: 2179147 - RNA, 16 nt, Human
agugcugugaaaaaaa

SEQ ID NO: 2179148 - RNA, 14 nt, Human
agugcugugaaaaa

SEQ ID NO: 2179149 - RNA, 13 nt, Human
agugcugugaaaa

SEQ ID NO: 2179150 - RNA, 12 nt, Human
agugcugugaaa

SEQ ID NO: 2179151 - RNA, 21 nt, Human
uguggguuucuaaagcugcca

SEQ ID NO: 2179152 - RNA, 13 nt, Human
ugugggugggaga

SEQ ID NO: 2179153 - RNA, 17 nt, Human
uguggguggauauaaau

SEQ ID NO: 2179154 - RNA, 20 nt, Human
uguggguggauauaaauaua

SEQ ID NO: 2179155 - RNA, 22 nt, Human
uguggguggauauaaauauaua

SEQ ID NO: 2179156 - RNA, 23 nt, Human
uguggguuucuaaagcugccagc

SEQ ID NO: 2179157 - RNA, 20 nt, Human
uguggucacaggaaguagag

SEQ ID NO: 2179158 - RNA, 20 nt, Human
agugcugggauuacaggugu

SEQ ID NO: 2179159 - RNA, 19 nt, Human
agugcugcauuuaaaagau

SEQ ID NO: 2179160 - RNA, 17 nt, Human
agugcugcauuuaaaag

SEQ ID NO: 2179161 - RNA, 16 nt, Human
agugcugcauuuaaaa

SEQ ID NO: 2179162 - RNA, 12 nt, Human
agugcuguaaaa

SEQ ID NO: 2179163 - RNA, 12 nt, Human
agugcuguauaa

SEQ ID NO: 2179164 - RNA, 13 nt, Human
agugcuguauaaa

SEQ ID NO: 2179165 - RNA, 21 nt, Human
agugcugggauuacaggugug

SEQ ID NO: 2179166 - RNA, 14 nt, Human
agugcuguauaaaa

SEQ ID NO: 2179167 - RNA, 15 nt, Human
agugcuguauaaaau

SEQ ID NO: 2179168 - RNA, 16 nt, Human
agugcuguauaaaauc

SEQ ID NO: 2179169 - RNA, 17 nt, Human
agugcuguauaaaauca

SEQ ID NO: 2179170 - RNA, 19 nt, Human
agugcuguauaaaaucagc

SEQ ID NO: 2179171 - RNA, 22 nt, Human
agugcuguauaaaaucagccaa

SEQ ID NO: 2179172 - RNA, 19 nt, Human
agugcugucugaucugugc

SEQ ID NO: 2179173 - RNA, 20 nt, Human
agugcugucugaucugugcu

SEQ ID NO: 2179174 - RNA, 21 nt, Human
agugcugucugaucugugcuu

SEQ ID NO: 2179175 - RNA, 22 nt, Human
agugcugucugaucugugcuuu

SEQ ID NO: 2179176 - RNA, 12 nt, Human
agugcugagacc

SEQ ID NO: 2179177 - RNA, 13 nt, Human
agugcugcauuua

SEQ ID NO: 2179178 - RNA, 12 nt, Human
agugcugcauuu

SEQ ID NO: 2179179 - RNA, 16 nt, Human
agugcugaacagugga

SEQ ID NO: 2179180 - RNA, 22 nt, Human
agugaggguuucugagcugcuc

SEQ ID NO: 2179181 - RNA, 15 nt, Human
agugaggugcccagc

SEQ ID NO: 2179182 - RNA, 22 nt, Human
agugaguugauagcacagaccc

SEQ ID NO: 2179183 - RNA, 23 nt, Human
agugaguugauagcacagacccu

SEQ ID NO: 2179184 - RNA, 20 nt, Human
uguguucgcgugugugggug

SEQ ID NO: 2179185 - RNA, 24 nt, Human
uguguuccuggcaauaguguguuc

SEQ ID NO: 2179186 - RNA, 16 nt, Human
uguguuccuggcaaua

SEQ ID NO: 2179187 - RNA, 15 nt, Human
uguguuccuggcaau

SEQ ID NO: 2179188 - RNA, 10 nt, Human
uguguuccug

SEQ ID NO: 2179189 - RNA, 11 nt, Human
uguguuccugg

SEQ ID NO: 2179190 - RNA, 19 nt, Human
uguguucccauuucagcug

SEQ ID NO: 2179191 - RNA, 15 nt, Human
uguguuccccaaagg

SEQ ID NO: 2179192 - RNA, 13 nt, Human
uguguguuucacu

SEQ ID NO: 2179193 - RNA, 15 nt, Human
uguguguuucacuuu

SEQ ID NO: 2179194 - RNA, 17 nt, Human
uguguucccauuucagc

SEQ ID NO: 2179195 - RNA, 19 nt, Human
uguguuaaguauguguaaa

SEQ ID NO: 2179196 - RNA, 17 nt, Human
uguguucugauuagaaa

SEQ ID NO: 2179197 - RNA, 18 nt, Human
uguuaaauaaauuguaua

SEQ ID NO: 2179198 - RNA, 20 nt, Human
uguuaaauaaauuguauauu

SEQ ID NO: 2179199 - RNA, 13 nt, Human
uguuaaauaaauu

SEQ ID NO: 2179200 - RNA, 14 nt, Human
uguuaaauaaauug

SEQ ID NO: 2179201 - RNA, 16 nt, Human
uguuaaauaaauugua

SEQ ID NO: 2179202 - RNA, 24 nt, Human
uguuaaaucccauucauaacuuuc

SEQ ID NO: 2179203 - RNA, 16 nt, Human
uguuaaauauuuacau

SEQ ID NO: 2179204 - RNA, 22 nt, Human
uguuaaauaucaguagaaacuc

SEQ ID NO: 2179205 - RNA, 19 nt, Human
uguuaaaugaaauuguaaa

SEQ ID NO: 2179206 - RNA, 14 nt, Human
uguuaaaugaaacc

SEQ ID NO: 2179207 - RNA, 18 nt, Human
uguuaaaugaaauuguaa

SEQ ID NO: 2179208 - RNA, 18 nt, Human
uguuaaauugcuguguau

SEQ ID NO: 2179209 - RNA, 14 nt, Human
uguuaaauuuguaa

SEQ ID NO: 2179210 - RNA, 15 nt, Human
uguuaaauuuguaag

SEQ ID NO: 2179211 - RNA, 16 nt, Human
uguuaaauuuguaagu

SEQ ID NO: 2179212 - RNA, 17 nt, Human
uguuaaauuuguaaguu

SEQ ID NO: 2179213 - RNA, 18 nt, Human
uguuaaauuuguaaguuu

SEQ ID NO: 2179214 - RNA, 19 nt, Human
uguuaaauuuguaaguuuc

SEQ ID NO: 2179215 - RNA, 21 nt, Human
uguuaaauuuguaaguuucag

SEQ ID NO: 2179216 - RNA, 23 nt, Human
uguuaaggaaacucuuaucucag

SEQ ID NO: 2179217 - RNA, 20 nt, Human
uguuaagggaagaauuccag

SEQ ID NO: 2179218 - RNA, 21 nt, Human
uguuaaggaaacucuuaucuc

SEQ ID NO: 2179219 - RNA, 22 nt, Human
uguuaaggaaacucuuaucuca

SEQ ID NO: 2179220 - RNA, 14 nt, Human
uguuaaggaaacuc

SEQ ID NO: 2179221 - RNA, 15 nt, Human
uguuaaggaaacucu

SEQ ID NO: 2179222 - RNA, 16 nt, Human
uguuaaggaaacucuu

SEQ ID NO: 2179223 - RNA, 17 nt, Human
uguuaaggaaacucuua

SEQ ID NO: 2179224 - RNA, 20 nt, Human
uguuaaggaaacucuuaucu

SEQ ID NO: 2179225 - RNA, 17 nt, Human
uguuaaguauuuucaua

SEQ ID NO: 2179226 - RNA, 15 nt, Human
uguuaaguauuuuca

SEQ ID NO: 2179227 - RNA, 12 nt, Human
uguuaauuauac

SEQ ID NO: 2179228 - RNA, 15 nt, Human
uguuaauucagcacu

SEQ ID NO: 2179229 - RNA, 20 nt, Human
uguuaauucagcacugauuu

SEQ ID NO: 2179230 - RNA, 22 nt, Human
uguuaauucagcacugauuuca

SEQ ID NO: 2179231 - RNA, 15 nt, Human
uguuaaguaugugua

SEQ ID NO: 2179232 - RNA, 16 nt, Human
uguuaaguauguguaa

SEQ ID NO: 2179233 - RNA, 16 nt, Human
uguguaauagaaaacu

SEQ ID NO: 2179234 - RNA, 13 nt, Human
uguguaaguagau

SEQ ID NO: 2179235 - RNA, 17 nt, Human
ugugucucuugguccug

SEQ ID NO: 2179236 - RNA, 20 nt, Human
ugugucucuugguccugcug

SEQ ID NO: 2179237 - RNA, 21 nt, Human
ugugucuugcaauggcagccu

SEQ ID NO: 2179238 - RNA, 18 nt, Human
uguguaauagaaaacuga

SEQ ID NO: 2179239 - RNA, 21 nt, Human
ugugucucuugguccugcugc

SEQ ID NO: 2179240 - RNA, 13 nt, Human
uguguguguaugu

SEQ ID NO: 2179241 - RNA, 14 nt, Human
uguguguguaugcu

SEQ ID NO: 2179242 - RNA, 13 nt, Human
ugugugugguuuu

SEQ ID NO: 2179243 - RNA, 19 nt, Human
ugugugugggcugugagug

SEQ ID NO: 2179244 - RNA, 16 nt, Human
ugugucuuuugcauga

SEQ ID NO: 2179245 - RNA, 20 nt, Human
ugugugugguuuuuuuucua

SEQ ID NO: 2179246 - RNA, 14 nt, Human
uguguguguauguu

SEQ ID NO: 2179247 - RNA, 13 nt, Human
ugugugugugaau

SEQ ID NO: 2179248 - RNA, 19 nt, Human
uguguguuuauugucaaag

SEQ ID NO: 2179249 - RNA, 23 nt, Human
uguguguuuauugucaaaguggu

SEQ ID NO: 2179250 - RNA, 14 nt, Human
uguguguguaugug

SEQ ID NO: 2179251 - RNA, 20 nt, Human
ugugugugggaguguguaau

SEQ ID NO: 2179252 - RNA, 12 nt, Human
ugugugugggag

SEQ ID NO: 2179253 - RNA, 20 nt, Human
ugugugaaagguacuucaaa

SEQ ID NO: 2179254 - RNA, 18 nt, Human
ugugucuuucacagcucc

SEQ ID NO: 2179255 - RNA, 22 nt, Human
ugugucuuucacagcuccuccc

SEQ ID NO: 2179256 - RNA, 22 nt, Human
ugugugaaaggaagcuccacug

SEQ ID NO: 2179257 - RNA, 14 nt, Human
ugugucuuuugcau

SEQ ID NO: 2179258 - RNA, 14 nt, Human
uguucccucugcuc

SEQ ID NO: 2179259 - RNA, 22 nt, Human
uguucccagugacacuucagag

SEQ ID NO: 2179260 - RNA, 16 nt, Human
uguucccucugcuccu

SEQ ID NO: 2179261 - RNA, 18 nt, Human
uguucccucugcuccugg

SEQ ID NO: 2179262 - RNA, 19 nt, Human
uguucccucugcuccugga

SEQ ID NO: 2179263 - RNA, 15 nt, Human
uguuccuacagcccc

SEQ ID NO: 2179264 - RNA, 22 nt, Human
uguuccgaaaccaaagaagaaa

SEQ ID NO: 2179265 - RNA, 19 nt, Human
uguuccuacagccccuuuu

SEQ ID NO: 2179266 - RNA, 21 nt, Human
uguuccgugguuaaacucgcu

SEQ ID NO: 2179267 - RNA, 17 nt, Human
uguucccaccugcugga

SEQ ID NO: 2179268 - RNA, 21 nt, Human
uguucccaccaggcugcucag

SEQ ID NO: 2179269 - RNA, 20 nt, Human
uguucccaccaggcugcuca

SEQ ID NO: 2179270 - RNA, 14 nt, Human
uguuccagcucuuu

SEQ ID NO: 2179271 - RNA, 18 nt, Human
uguuccaguaaucuaaua

SEQ ID NO: 2179272 - RNA, 17 nt, Human
uguuccagccugcccuc

SEQ ID NO: 2179273 - RNA, 16 nt, Human
uguucugggacacagu

SEQ ID NO: 2179274 - RNA, 16 nt, Human
uguuccuagaguagag

SEQ ID NO: 2179275 - RNA, 14 nt, Human
uguuccuagaguag

SEQ ID NO: 2179276 - RNA, 15 nt, Human
uguuccuacgggcuu

SEQ ID NO: 2179277 - RNA, 21 nt, Human
uguucuggugaggccuugcuc

SEQ ID NO: 2179278 - RNA, 20 nt, Human
uguucuggugaggccuugcu

SEQ ID NO: 2179279 - RNA, 18 nt, Human
uguuccuagugaaagagg

SEQ ID NO: 2179280 - RNA, 14 nt, Human
uguuccuagugaaa

SEQ ID NO: 2179281 - RNA, 19 nt, Human
agugugugcacaugugugc

SEQ ID NO: 2179282 - RNA, 18 nt, Human
agugugugcacaugugug

SEQ ID NO: 2179283 - RNA, 17 nt, Human
agugugugcaaguaugu

SEQ ID NO: 2179284 - RNA, 21 nt, Human
agugugugauuuuuugcauuc

SEQ ID NO: 2179285 - RNA, 15 nt, Human
uguuauaaucuuuca

SEQ ID NO: 2179286 - RNA, 21 nt, Human
aguguguccaagugugugugc

SEQ ID NO: 2179287 - RNA, 18 nt, Human
aguguguccaagugugug

SEQ ID NO: 2179288 - RNA, 21 nt, Human
aguguguauuguucccaguga

SEQ ID NO: 2179289 - RNA, 19 nt, Human
aguguguauuguucccagu

SEQ ID NO: 2179290 - RNA, 14 nt, Human
agugugucuaaauu

SEQ ID NO: 2179291 - RNA, 20 nt, Human
agugugucuuagugugugca

SEQ ID NO: 2179292 - RNA, 20 nt, Human
uguuccacaaguuaaauaaa

SEQ ID NO: 2179293 - RNA, 14 nt, Human
uguuccagcaguuu

SEQ ID NO: 2179294 - RNA, 18 nt, Human
uguuccagauucaaucga

SEQ ID NO: 2179295 - RNA, 18 nt, Human
uguuauagguuguuggau

SEQ ID NO: 2179296 - RNA, 13 nt, Human
uguuauauaaaug

SEQ ID NO: 2179297 - RNA, 14 nt, Human
uguuauauaaaugg

SEQ ID NO: 2179298 - RNA, 16 nt, Human
uguugauugcuaaaug

SEQ ID NO: 2179299 - RNA, 17 nt, Human
uguugauugcuaaaugu

SEQ ID NO: 2179300 - RNA, 18 nt, Human
uguugauugcuaaaugua

SEQ ID NO: 2179301 - RNA, 19 nt, Human
uguugauugcuaaauguaa

SEQ ID NO: 2179302 - RNA, 13 nt, Human
uguucuguuuaau

SEQ ID NO: 2179303 - RNA, 19 nt, Human
uguucuguuuaauacucau

SEQ ID NO: 2179304 - RNA, 15 nt, Human
uguucugugauauaa

SEQ ID NO: 2179305 - RNA, 18 nt, Human
uguucugugauauaagug

SEQ ID NO: 2179306 - RNA, 23 nt, Human
uguucugugaugaggggaggggg

SEQ ID NO: 2179307 - RNA, 13 nt, Human
uguucuguggaaa

SEQ ID NO: 2179308 - RNA, 17 nt, Human
uguucuguggaaagugu

SEQ ID NO: 2179309 - RNA, 18 nt, Human
uguucuguggaaagugua

SEQ ID NO: 2179310 - RNA, 19 nt, Human
uguucuguggaaaguguaa

SEQ ID NO: 2179311 - RNA, 20 nt, Human
uguucuguggaaaguguaaa

SEQ ID NO: 2179312 - RNA, 13 nt, Human
uguucugugucuu

SEQ ID NO: 2179313 - RNA, 21 nt, Human
uguucuguggaaaguguaaag

SEQ ID NO: 2179314 - RNA, 22 nt, Human
uguucuguggaaaguguaaagc

SEQ ID NO: 2179315 - RNA, 14 nt, Human
uguucugugucuuu

SEQ ID NO: 2179316 - RNA, 17 nt, Human
uguugcaaguacugcug

SEQ ID NO: 2179317 - RNA, 19 nt, Human
uguugcaaguacugcugua

SEQ ID NO: 2179318 - RNA, 17 nt, Human
uguugcaagugcaauaa

SEQ ID NO: 2179319 - RNA, 19 nt, Human
uguugauuucuuuccagag

SEQ ID NO: 2179320 - RNA, 20 nt, Human
uguugauuucuuuccagagg

SEQ ID NO: 2179321 - RNA, 14 nt, Human
uguugauuuucugu

SEQ ID NO: 2179322 - RNA, 18 nt, Human
uguugauuuucuguugua

SEQ ID NO: 2179323 - RNA, 15 nt, Human
uguugauuuucuguu

SEQ ID NO: 2179324 - RNA, 13 nt, Human
uguugcccaggca

SEQ ID NO: 2179325 - RNA, 12 nt, Human
uguugcccaggc

SEQ ID NO: 2179326 - RNA, 15 nt, Human
uguugcccaggcagg

SEQ ID NO: 2179327 - RNA, 16 nt, Human
uguugcccaggcaggu

SEQ ID NO: 2179328 - RNA, 17 nt, Human
uguugcccaggcagguc

SEQ ID NO: 2179329 - RNA, 18 nt, Human
uguugcccaggcaggucu

SEQ ID NO: 2179330 - RNA, 23 nt, Human
agugugguguuuccugcaggcca

SEQ ID NO: 2179331 - RNA, 22 nt, Human
agugugccccccauccuggccc

SEQ ID NO: 2179332 - RNA, 23 nt, Human
agugugccccccauccuggccca

SEQ ID NO: 2179333 - RNA, 17 nt, Human
agugugguguuuccugg

SEQ ID NO: 2179334 - RNA, 16 nt, Human
aguguguauuguuccc

SEQ ID NO: 2179335 - RNA, 15 nt, Human
aguguguauuguucc

SEQ ID NO: 2179336 - RNA, 22 nt, Human
aguguguauuaaaaaaaacaaa

SEQ ID NO: 2179337 - RNA, 23 nt, Human
aguguguauuaaaaaaaacaaaa

SEQ ID NO: 2179338 - RNA, 20 nt, Human
agugugguguuuccuggcac

SEQ ID NO: 2179339 - RNA, 20 nt, Human
aguguguauuaaaaaaaaca

SEQ ID NO: 2179340 - RNA, 19 nt, Human
agugugguguuuccuggca

SEQ ID NO: 2179341 - RNA, 22 nt, Human
agugugcacuaaggggcccggc

SEQ ID NO: 2179342 - RNA, 17 nt, Human
agugugcacuaaggggc

SEQ ID NO: 2179343 - RNA, 21 nt, Human
agugugcaguucuaguuugca

SEQ ID NO: 2179344 - RNA, 15 nt, Human
agugugcauauugua

SEQ ID NO: 2179345 - RNA, 16 nt, Human
agugugcauauuguac

SEQ ID NO: 2179346 - RNA, 14 nt, Human
agugugcaaaauau

SEQ ID NO: 2179347 - RNA, 23 nt, Human
agugugauugggaauaaauaugc

SEQ ID NO: 2179348 - RNA, 12 nt, Human
agugugcaaaau

SEQ ID NO: 2179349 - RNA, 19 nt, Human
agugugauugggaauaaau

SEQ ID NO: 2179350 - RNA, 20 nt, Human
agugugauugggaauaaaua

SEQ ID NO: 2179351 - RNA, 21 nt, Human
agugugauugggaauaaauau

SEQ ID NO: 2179352 - RNA, 22 nt, Human
agugugauugggaauaaauaug

SEQ ID NO: 2179353 - RNA, 16 nt, Human
agugugguguuuccug

SEQ ID NO: 2179354 - RNA, 17 nt, Human
agugugcauauuguaca

SEQ ID NO: 2179355 - RNA, 18 nt, Human
agugugcauauuguacac

SEQ ID NO: 2179356 - RNA, 19 nt, Human
agugugcauauuguacacu

SEQ ID NO: 2179357 - RNA, 13 nt, Human
agugugcccccca

SEQ ID NO: 2179358 - RNA, 17 nt, Human
agugugccccccauccu

SEQ ID NO: 2179359 - RNA, 19 nt, Human
agugugccccccauccugg

SEQ ID NO: 2179360 - RNA, 20 nt, Human
agugugccccccauccuggc

SEQ ID NO: 2179361 - RNA, 17 nt, Human
aguguacuuaacuauuc

SEQ ID NO: 2179362 - RNA, 19 nt, Human
aguguacccccgcccaggc

SEQ ID NO: 2179363 - RNA, 20 nt, Human
aguguacccccgcccaggcu

SEQ ID NO: 2179364 - RNA, 22 nt, Human
aguguacccccgcccaggcugg

SEQ ID NO: 2179365 - RNA, 23 nt, Human
aguguacccccgcccaggcuggc

SEQ ID NO: 2179366 - RNA, 18 nt, Human
agugugauugggaauaaa

SEQ ID NO: 2179367 - RNA, 17 nt, Human
aguguagaagcauuccu

SEQ ID NO: 2179368 - RNA, 18 nt, Human
aguguagaagcauuccuu

SEQ ID NO: 2179369 - RNA, 19 nt, Human
aguguagaagcauuccuuc

SEQ ID NO: 2179370 - RNA, 20 nt, Human
aguguagaagcauuccuucu

SEQ ID NO: 2179371 - RNA, 12 nt, Human
aguguagaagca

SEQ ID NO: 2179372 - RNA, 13 nt, Human
aguguagaagcau

SEQ ID NO: 2179373 - RNA, 14 nt, Human
aguguagaagcauu

SEQ ID NO: 2179374 - RNA, 15 nt, Human
aguguagaagcauuc

SEQ ID NO: 2179375 - RNA, 16 nt, Human
aguguagaagcauucc

SEQ ID NO: 2179376 - RNA, 17 nt, Human
aguguaacagcugaggu

SEQ ID NO: 2179377 - RNA, 16 nt, Human
aguguaacagcugagg

SEQ ID NO: 2179378 - RNA, 15 nt, Human
aguguaacagcugag

SEQ ID NO: 2179379 - RNA, 14 nt, Human
aguguaacagcuga

SEQ ID NO: 2179380 - RNA, 13 nt, Human
aguguaacagcug

SEQ ID NO: 2179381 - RNA, 21 nt, Human
aguguaaauccuuuuucuuua

SEQ ID NO: 2179382 - RNA, 14 nt, Human
aguguaaauccuuu

SEQ ID NO: 2179383 - RNA, 21 nt, Human
aguguaaauaguuacuccagu

SEQ ID NO: 2179384 - RNA, 13 nt, Human
aguguaaagcauu

SEQ ID NO: 2179385 - RNA, 14 nt, Human
aguguaaagcauuc

SEQ ID NO: 2179386 - RNA, 16 nt, Human
aguguaaagcauucca

SEQ ID NO: 2179387 - RNA, 17 nt, Human
aguguaaagcauuccaa

SEQ ID NO: 2179388 - RNA, 18 nt, Human
aguguaaagcauuccaac

SEQ ID NO: 2179389 - RNA, 20 nt, Human
aguguaaagcauuccaacaa

SEQ ID NO: 2179390 - RNA, 22 nt, Human
aguguaaagcauuccaacaaag

SEQ ID NO: 2179391 - RNA, 15 nt, Human
aguggugugaucuca

SEQ ID NO: 2179392 - RNA, 14 nt, Human
aguguaaaauauuu

SEQ ID NO: 2179393 - RNA, 18 nt, Human
aguguaaaauauuuugaa

SEQ ID NO: 2179394 - RNA, 21 nt, Human
aguguaaaauauuuugaauca

SEQ ID NO: 2179395 - RNA, 14 nt, Human
uguuacaaauugua

SEQ ID NO: 2179396 - RNA, 18 nt, Human
uguuacaaaguuguaugu

SEQ ID NO: 2179397 - RNA, 22 nt, Human
aguggacaccaggagucccugg

SEQ ID NO: 2179398 - RNA, 20 nt, Human
aguggacaccaggagucccu

SEQ ID NO: 2179399 - RNA, 13 nt, Human
aguggacaggagu

SEQ ID NO: 2179400 - RNA, 17 nt, Human
aguggaauaguauccuc

SEQ ID NO: 2179401 - RNA, 19 nt, Human
aguggaauaguauccucca

SEQ ID NO: 2179402 - RNA, 20 nt, Human
aguggaauaguauccuccag

SEQ ID NO: 2179403 - RNA, 21 nt, Human
aguggaauaguauccuccagg

SEQ ID NO: 2179404 - RNA, 22 nt, Human
aguggaauaguauccuccaggu

SEQ ID NO: 2179405 - RNA, 23 nt, Human
aguggaauaguauccuccagguu

SEQ ID NO: 2179406 - RNA, 22 nt, Human
aguggaaugcuuccuagaaguu

SEQ ID NO: 2179407 - RNA, 17 nt, Human
aguggugcgaucugggu

SEQ ID NO: 2179408 - RNA, 15 nt, Human
aguggaccaggacag

SEQ ID NO: 2179409 - RNA, 14 nt, Human
aguggaccaggaca

SEQ ID NO: 2179410 - RNA, 13 nt, Human
aguggaccaggac

SEQ ID NO: 2179411 - RNA, 20 nt, Human
aguggacauuguuggcagca

SEQ ID NO: 2179412 - RNA, 19 nt, Human
aguggaccaggacaggacc

SEQ ID NO: 2179413 - RNA, 16 nt, Human
aguggaccaggacagg

SEQ ID NO: 2179414 - RNA, 20 nt, Human
aguggaccaggacaggacca

SEQ ID NO: 2179415 - RNA, 13 nt, Human
aguggugcucagu

SEQ ID NO: 2179416 - RNA, 15 nt, Human
aguggugcucaguug

SEQ ID NO: 2179417 - RNA, 16 nt, Human
aguggugcucaguugu

SEQ ID NO: 2179418 - RNA, 17 nt, Human
aguggugcucaguugua

SEQ ID NO: 2179419 - RNA, 20 nt, Human
aguggugcucaguuguagaa

SEQ ID NO: 2179420 - RNA, 22 nt, Human
aguggugcucaguuguagaaug

SEQ ID NO: 2179421 - RNA, 11 nt, Human
agugguggcag

SEQ ID NO: 2179422 - RNA, 13 nt, Human
agugguggcaggg

SEQ ID NO: 2179423 - RNA, 14 nt, Human
agugguggcagggc

SEQ ID NO: 2179424 - RNA, 15 nt, Human
agugguggcagggcc

SEQ ID NO: 2179425 - RNA, 16 nt, Human
agugguggcagggccu

SEQ ID NO: 2179426 - RNA, 18 nt, Human
agugguggcagggccuag

SEQ ID NO: 2179427 - RNA, 19 nt, Human
aguggugguaacccuggug

SEQ ID NO: 2179428 - RNA, 18 nt, Human
aguggugguaacccuggu

SEQ ID NO: 2179429 - RNA, 20 nt, Human
aguggugguaacccuggugg

SEQ ID NO: 2179430 - RNA, 21 nt, Human
agugguggugaacagaacaaa

SEQ ID NO: 2179431 - RNA, 18 nt, Human
aguggugguuuucuguuc

SEQ ID NO: 2179432 - RNA, 17 nt, Human
aguggugguuuucuguu

SEQ ID NO: 2179433 - RNA, 23 nt, Human
aguggugguuuucuguucuuucu

SEQ ID NO: 2179434 - RNA, 21 nt, Human
aguggugguuuucuguucuuu

SEQ ID NO: 2179435 - RNA, 20 nt, Human
aguggugguuuucuguucuu

SEQ ID NO: 2179436 - RNA, 19 nt, Human
aguggugguuuucuguucu

SEQ ID NO: 2179437 - RNA, 21 nt, Human
uguuugacgggaaacaaaacu

SEQ ID NO: 2179438 - RNA, 21 nt, Human
uguuugacaaagaaacccaag

SEQ ID NO: 2179439 - RNA, 22 nt, Human
uguuugaaucccacgcuucucu

SEQ ID NO: 2179440 - RNA, 17 nt, Human
uguuugaagccugcccu

SEQ ID NO: 2179441 - RNA, 22 nt, Human
uguuugacaaagaaacccaagu

SEQ ID NO: 2179442 - RNA, 22 nt, Human
uguuugacaaaguuacugauuc

SEQ ID NO: 2179443 - RNA, 14 nt, Human
uguuugagaaauua

SEQ ID NO: 2179444 - RNA, 13 nt, Human
uguuugagcucag

SEQ ID NO: 2179445 - RNA, 18 nt, Human
uguuugaaacaaagaagg

SEQ ID NO: 2179446 - RNA, 13 nt, Human
uguuugaaaucuu

SEQ ID NO: 2179447 - RNA, 15 nt, Human
uguuucuuuucacau

SEQ ID NO: 2179448 - RNA, 13 nt, Human
uguuucuuuugua

SEQ ID NO: 2179449 - RNA, 14 nt, Human
uguuucuuuuguau

SEQ ID NO: 2179450 - RNA, 20 nt, Human
uguuucuuuuguauguaaau

SEQ ID NO: 2179451 - RNA, 21 nt, Human
uguuucuuuuguauguaaaug

SEQ ID NO: 2179452 - RNA, 23 nt, Human
uguuugagcucagacccccacuc

SEQ ID NO: 2179453 - RNA, 14 nt, Human
uguuugagcucaga

SEQ ID NO: 2179454 - RNA, 22 nt, Human
uguuugagguuuuuaagccuua

SEQ ID NO: 2179455 - RNA, 18 nt, Human
uguuugagcucugcagcc

SEQ ID NO: 2179456 - RNA, 22 nt, Human
uguuugaggauauauuuucacu

SEQ ID NO: 2179457 - RNA, 19 nt, Human
uguuugaugcauuaaaaga

SEQ ID NO: 2179458 - RNA, 16 nt, Human
uguuugaugcauuaaa

SEQ ID NO: 2179459 - RNA, 13 nt, Human
uguuugaugcauu

SEQ ID NO: 2179460 - RNA, 17 nt, Human
uguuugauucagacagc

SEQ ID NO: 2179461 - RNA, 22 nt, Human
uguuugauucagacagcugccu

SEQ ID NO: 2179462 - RNA, 15 nt, Human
uguuuauuuaucagu

SEQ ID NO: 2179463 - RNA, 12 nt, Human
uguuucuguuau

SEQ ID NO: 2179464 - RNA, 13 nt, Human
uguuucuguuauu

SEQ ID NO: 2179465 - RNA, 23 nt, Human
uguuuauuuauaagcagauuuaa

SEQ ID NO: 2179466 - RNA, 22 nt, Human
uguuuauuuauaagcagauuua

SEQ ID NO: 2179467 - RNA, 14 nt, Human
uguuuauuuauaga

SEQ ID NO: 2179468 - RNA, 24 nt, Human
uguuuauuuauagaguguacuuaa

SEQ ID NO: 2179469 - RNA, 19 nt, Human
uguuucuuccaaagcacau

SEQ ID NO: 2179470 - RNA, 17 nt, Human
uguuucuuccaaagcac

SEQ ID NO: 2179471 - RNA, 17 nt, Human
uguuucuguucaccuuc

SEQ ID NO: 2179472 - RNA, 14 nt, Human
uguuucuguuauua

SEQ ID NO: 2179473 - RNA, 15 nt, Human
uguuucuguuauuaa

SEQ ID NO: 2179474 - RNA, 19 nt, Human
uguuucuguuauuaacaaa

SEQ ID NO: 2179475 - RNA, 18 nt, Human
uguuucuuccaaagcaca

SEQ ID NO: 2179476 - RNA, 13 nt, Human
uguuucuuucuag

SEQ ID NO: 2179477 - RNA, 18 nt, Human
uguuucuuuguaaugaaa

SEQ ID NO: 2179478 - RNA, 19 nt, Human
uguuucuuuguaaugaaaa

SEQ ID NO: 2179479 - RNA, 19 nt, Human
uguugcccaggcaggucuu

SEQ ID NO: 2179480 - RNA, 22 nt, Human
uguugcacacccacucagcucc

SEQ ID NO: 2179481 - RNA, 21 nt, Human
uguugcacacccacucagcuc

SEQ ID NO: 2179482 - RNA, 20 nt, Human
uguugcacacccacucagcu

SEQ ID NO: 2179483 - RNA, 19 nt, Human
uguugccuugcauaauggu

SEQ ID NO: 2179484 - RNA, 11 nt, Human
uguugcuaagc

SEQ ID NO: 2179485 - RNA, 18 nt, Human
uguugccuuuaugguuuc

SEQ ID NO: 2179486 - RNA, 19 nt, Human
uguugcucaaaaaaugagc

SEQ ID NO: 2179487 - RNA, 22 nt, Human
uguugcuaagccccagcaagca

SEQ ID NO: 2179488 - RNA, 12 nt, Human
uguugcuaagcc

SEQ ID NO: 2179489 - RNA, 21 nt, Human
uguugcuaagccccagcaagc

SEQ ID NO: 2179490 - RNA, 14 nt, Human
uguugcucagucuc

SEQ ID NO: 2179491 - RNA, 21 nt, Human
uguugcucaaaucuauucaga

SEQ ID NO: 2179492 - RNA, 11 nt, Human
uguugcugaau

SEQ ID NO: 2179493 - RNA, 14 nt, Human
uguuuaguugcaga

SEQ ID NO: 2179494 - RNA, 23 nt, Human
uguugcucaaaucuauucagaca

SEQ ID NO: 2179495 - RNA, 13 nt, Human
uguugcugaauag

SEQ ID NO: 2179496 - RNA, 14 nt, Human
uguuuauauaaaug

SEQ ID NO: 2179497 - RNA, 16 nt, Human
uguuuauauaaaugcu

SEQ ID NO: 2179498 - RNA, 20 nt, Human
uguuuauauaaaugcuuuua

SEQ ID NO: 2179499 - RNA, 15 nt, Human
uguuuauacagcuca

SEQ ID NO: 2179500 - RNA, 16 nt, Human
uguuuauaccuuugcc

SEQ ID NO: 2179501 - RNA, 21 nt, Human
uguuuauagcaaacuuggaau

SEQ ID NO: 2179502 - RNA, 16 nt, Human
uguuuauaaacauugu

SEQ ID NO: 2179503 - RNA, 13 nt, Human
uguuuaugugugu

SEQ ID NO: 2179504 - RNA, 16 nt, Human
uguuuaugugugugug

SEQ ID NO: 2179505 - RNA, 19 nt, Human
uguuuauuaacaaauuaug

SEQ ID NO: 2179506 - RNA, 16 nt, Human
uguuuauuaacaaauu

SEQ ID NO: 2179507 - RNA, 14 nt, Human
uguuuauuaacaaa

SEQ ID NO: 2179508 - RNA, 13 nt, Human
uguuuauuaacaa

SEQ ID NO: 2179509 - RNA, 17 nt, Human
uguuuauugucaaagug

SEQ ID NO: 2179510 - RNA, 19 nt, Human
uguuuauugucaaaguggu

SEQ ID NO: 2179511 - RNA, 11 nt, Human
uguuuucuucu

SEQ ID NO: 2179512 - RNA, 17 nt, Human
uguuuucuuuugguaaa

SEQ ID NO: 2179513 - RNA, 16 nt, Human
uguuuucccugaccuc

SEQ ID NO: 2179514 - RNA, 17 nt, Human
uguuuucugaauaacau

SEQ ID NO: 2179515 - RNA, 12 nt, Human
uguuuucugaau

SEQ ID NO: 2179516 - RNA, 23 nt, Human
uguuuucugagcccgggcugccu

SEQ ID NO: 2179517 - RNA, 17 nt, Human
uguuuugaaggcaaaau

SEQ ID NO: 2179518 - RNA, 19 nt, Human
uguuuugaaugguguugua

SEQ ID NO: 2179519 - RNA, 22 nt, Human
uguuuugaaugguguuguaugc

SEQ ID NO: 2179520 - RNA, 17 nt, Human
uguuuugacggaugauu

SEQ ID NO: 2179521 - RNA, 16 nt, Human
uguuuugagcuuucca

SEQ ID NO: 2179522 - RNA, 18 nt, Human
uguuuugagcuuuccaug

SEQ ID NO: 2179523 - RNA, 19 nt, Human
uguuuugagcuuuccaugu

SEQ ID NO: 2179524 - RNA, 12 nt, Human
uguuuugauaaa

SEQ ID NO: 2179525 - RNA, 20 nt, Human
uguuuucauggugaaaaugu

SEQ ID NO: 2179526 - RNA, 15 nt, Human
uguuuucauaauaaa

SEQ ID NO: 2179527 - RNA, 14 nt, Human
uguuuuauuccugu

SEQ ID NO: 2179528 - RNA, 15 nt, Human
uguuuuauuccugua

SEQ ID NO: 2179529 - RNA, 19 nt, Human
uguuuucauuaucucaaaa

SEQ ID NO: 2179530 - RNA, 12 nt, Human
uguuuucccuga

SEQ ID NO: 2179531 - RNA, 18 nt, Human
uguuuuccauuguuugaa

SEQ ID NO: 2179532 - RNA, 23 nt, Human
uguuuucccgagcaaagucuaaa

SEQ ID NO: 2179533 - RNA, 22 nt, Human
uguuuucccgagcaaagucuaa

SEQ ID NO: 2179534 - RNA, 15 nt, Human
uguuuuccagcuccu

SEQ ID NO: 2179535 - RNA, 17 nt, Human
uguuuuccagcuccuca

SEQ ID NO: 2179536 - RNA, 20 nt, Human
uguuuuccaugaguccccug

SEQ ID NO: 2179537 - RNA, 23 nt, Human
uguuugcuuauuguuccaagaca

SEQ ID NO: 2179538 - RNA, 18 nt, Human
uguuugcuucauaaauga

SEQ ID NO: 2179539 - RNA, 21 nt, Human
uguuugcuuauuguuccaaga

SEQ ID NO: 2179540 - RNA, 20 nt, Human
uguuugcuuauuguuccaag

SEQ ID NO: 2179541 - RNA, 18 nt, Human
uguuuggaauauugucca

SEQ ID NO: 2179542 - RNA, 18 nt, Human
uguuugcuuauuguucca

SEQ ID NO: 2179543 - RNA, 16 nt, Human
uguuugcuuauuguuc

SEQ ID NO: 2179544 - RNA, 15 nt, Human
uguuugcuuauuguu

SEQ ID NO: 2179545 - RNA, 24 nt, Human
uguuugcucucccgguucuuccag

SEQ ID NO: 2179546 - RNA, 23 nt, Human
uguuugcacguuaugguguuucu

SEQ ID NO: 2179547 - RNA, 21 nt, Human
uguuugaugcauuaaaagaaa

SEQ ID NO: 2179548 - RNA, 22 nt, Human
uguuugcacguuaugguguuuc

SEQ ID NO: 2179549 - RNA, 23 nt, Human
uguuuuaucaugacauguuauau

SEQ ID NO: 2179550 - RNA, 12 nt, Human
uguuuuaucaug

SEQ ID NO: 2179551 - RNA, 18 nt, Human
uguuuuaugacuucauua

SEQ ID NO: 2179552 - RNA, 13 nt, Human
uguuuggagacag

SEQ ID NO: 2179553 - RNA, 21 nt, Human
uguuuuauuuuaauucaguug

SEQ ID NO: 2179554 - RNA, 20 nt, Human
aguucugcuccucuccaggc

SEQ ID NO: 2179555 - RNA, 21 nt, Human
aguucugcuccucuccaggca

SEQ ID NO: 2179556 - RNA, 16 nt, Human
aguucugcuccucucc

SEQ ID NO: 2179557 - RNA, 17 nt, Human
aguucugcuccucucca

SEQ ID NO: 2179558 - RNA, 18 nt, Human
aguucugcuccucuccag

SEQ ID NO: 2179559 - RNA, 19 nt, Human
aguucugcuccucuccagg

SEQ ID NO: 2179560 - RNA, 12 nt, Human
aguucugcuccu

SEQ ID NO: 2179561 - RNA, 14 nt, Human
aguucugcuccucu

SEQ ID NO: 2179562 - RNA, 15 nt, Human
aguucugcuccucuc

SEQ ID NO: 2179563 - RNA, 16 nt, Human
aguucuuaguugcugu

SEQ ID NO: 2179564 - RNA, 23 nt, Human
aguucuguacucaaauguagcca

SEQ ID NO: 2179565 - RNA, 12 nt, Human
aguucuguagaa

SEQ ID NO: 2179566 - RNA, 17 nt, Human
aguucugggugcucccu

SEQ ID NO: 2179567 - RNA, 14 nt, Human
aguucuguaaaaua

SEQ ID NO: 2179568 - RNA, 19 nt, Human
aguucugggugcucccuac

SEQ ID NO: 2179569 - RNA, 12 nt, Human
aguucugggugc

SEQ ID NO: 2179570 - RNA, 12 nt, Human
aguucugcucua

SEQ ID NO: 2179571 - RNA, 11 nt, Human
aguucugggca

SEQ ID NO: 2179572 - RNA, 14 nt, Human
aguucugguuccua

SEQ ID NO: 2179573 - RNA, 22 nt, Human
aguucugaguguuuuuacuaca

SEQ ID NO: 2179574 - RNA, 21 nt, Human
aguucugcagauaaacaguag

SEQ ID NO: 2179575 - RNA, 15 nt, Human
aguucugaguguuuu

SEQ ID NO: 2179576 - RNA, 14 nt, Human
aguucugaguguuu

SEQ ID NO: 2179577 - RNA, 13 nt, Human
aguucugaagaau

SEQ ID NO: 2179578 - RNA, 14 nt, Human
aguucugacuugac

SEQ ID NO: 2179579 - RNA, 16 nt, Human
aguucugcagauaaac

SEQ ID NO: 2179580 - RNA, 20 nt, Human
uguuuugauguuuguggccu

SEQ ID NO: 2179581 - RNA, 18 nt, Human
uguuuugauaaaguagua

SEQ ID NO: 2179582 - RNA, 20 nt, Human
uguuuugauaaaguaguaaa

SEQ ID NO: 2179583 - RNA, 12 nt, Human
uguuuugcacuu

SEQ ID NO: 2179584 - RNA, 13 nt, Human
uguuuugcacuuu

SEQ ID NO: 2179585 - RNA, 14 nt, Human
uguuuugcaagcca

SEQ ID NO: 2179586 - RNA, 14 nt, Human
uguuuugcacuuuu

SEQ ID NO: 2179587 - RNA, 16 nt, Human
uguuuugccaacauug

SEQ ID NO: 2179588 - RNA, 13 nt, Human
uuaacagggaggg

SEQ ID NO: 2179589 - RNA, 22 nt, Human
uuaacagggucucuagugcugu

SEQ ID NO: 2179590 - RNA, 15 nt, Human
uuaacagucauuuaa

SEQ ID NO: 2179591 - RNA, 16 nt, Human
uuaacaguuuuccaug

SEQ ID NO: 2179592 - RNA, 14 nt, Human
uuaacaguuuucca

SEQ ID NO: 2179593 - RNA, 13 nt, Human
uuaacaguuuucc

SEQ ID NO: 2179594 - RNA, 16 nt, Human
uuaacagucauuuaaa

SEQ ID NO: 2179595 - RNA, 17 nt, Human
uuaacagucauuuaaaa

SEQ ID NO: 2179596 - RNA, 14 nt, Human
uuaacaacuugucu

SEQ ID NO: 2179597 - RNA, 22 nt, Human
uuaacaacaauaacacugucuc

SEQ ID NO: 2179598 - RNA, 21 nt, Human
uuaacaguuuuccaugaaaac

SEQ ID NO: 2179599 - RNA, 20 nt, Human
uuaacaguuuuccaugaaaa

SEQ ID NO: 2179600 - RNA, 19 nt, Human
uuaacaguuuuccaugaaa

SEQ ID NO: 2179601 - RNA, 17 nt, Human
uuaacaguuuuccauga

SEQ ID NO: 2179602 - RNA, 16 nt, Human
aguuucaauucagugc

SEQ ID NO: 2179603 - RNA, 17 nt, Human
aguuucaauucagugcu

SEQ ID NO: 2179604 - RNA, 15 nt, Human
aguuucacugacuua

SEQ ID NO: 2179605 - RNA, 12 nt, Human
aguuucagagaa

SEQ ID NO: 2179606 - RNA, 17 nt, Human
aguuucacugccauaua

SEQ ID NO: 2179607 - RNA, 18 nt, Human
aguuucagagaaguucug

SEQ ID NO: 2179608 - RNA, 14 nt, Human
aguuucagauauau

SEQ ID NO: 2179609 - RNA, 15 nt, Human
aguuucagauauaua

SEQ ID NO: 2179610 - RNA, 17 nt, Human
aguuucagauauauauc

SEQ ID NO: 2179611 - RNA, 23 nt, Human
aguuucagauauauaucauauug

SEQ ID NO: 2179612 - RNA, 15 nt, Human
uuaaauuucuaccgc

SEQ ID NO: 2179613 - RNA, 16 nt, Human
uuaaauugcuguguau

SEQ ID NO: 2179614 - RNA, 20 nt, Human
uuaaauucuugcaaaguauc

SEQ ID NO: 2179615 - RNA, 16 nt, Human
uuaaauaauaaagauc

SEQ ID NO: 2179616 - RNA, 15 nt, Human
uuaaauuuuaauuua

SEQ ID NO: 2179617 - RNA, 21 nt, Human
uuaaauuuguaaguuucaggu

SEQ ID NO: 2179618 - RNA, 16 nt, Human
uuaaauuuuaauuuau

SEQ ID NO: 2179619 - RNA, 13 nt, Human
uuaaauuuguaag

SEQ ID NO: 2179620 - RNA, 14 nt, Human
uuaaauuuguaagu

SEQ ID NO: 2179621 - RNA, 15 nt, Human
uuaaauuuguaaguu

SEQ ID NO: 2179622 - RNA, 17 nt, Human
uuaaauuuguaaguuuc

SEQ ID NO: 2179623 - RNA, 22 nt, Human
uuaacaaacaucacucugcugc

SEQ ID NO: 2179624 - RNA, 23 nt, Human
uuaacaaacaucacucugcugcu

SEQ ID NO: 2179625 - RNA, 21 nt, Human
uuaacaacaauaacacugucu

SEQ ID NO: 2179626 - RNA, 15 nt, Human
uuaacaaaagcaaga

SEQ ID NO: 2179627 - RNA, 12 nt, Human
uuaaaauuuauu

SEQ ID NO: 2179628 - RNA, 18 nt, Human
uuaaaauugugauguguc

SEQ ID NO: 2179629 - RNA, 13 nt, Human
uuaaaauugugau

SEQ ID NO: 2179630 - RNA, 23 nt, Human
uuaaaaagggcagggcaucuccu

SEQ ID NO: 2179631 - RNA, 13 nt, Human
uuaaaauguucac

SEQ ID NO: 2179632 - RNA, 16 nt, Human
uuaaaaacuauuuaac

SEQ ID NO: 2179633 - RNA, 17 nt, Human
uuaaaaagaaacaagau

SEQ ID NO: 2179634 - RNA, 20 nt, Human
uuaaaaagaaacaagaugcu

SEQ ID NO: 2179635 - RNA, 17 nt, Human
aguuuaguaaggcugug

SEQ ID NO: 2179636 - RNA, 16 nt, Human
aguuuauacucaccuu

SEQ ID NO: 2179637 - RNA, 16 nt, Human
uuaaaaaauguccaug

SEQ ID NO: 2179638 - RNA, 13 nt, Human
uuaaaaaaugucc

SEQ ID NO: 2179639 - RNA, 12 nt, Human
uuaaaaaauguc

SEQ ID NO: 2179640 - RNA, 15 nt, Human
uuaaaggcuguggua

SEQ ID NO: 2179641 - RNA, 15 nt, Human
uuaaaggcuucucuc

SEQ ID NO: 2179642 - RNA, 16 nt, Human
uuaaaggcuucucucu

SEQ ID NO: 2179643 - RNA, 17 nt, Human
uuaaaggauguuggugu

SEQ ID NO: 2179644 - RNA, 18 nt, Human
uuaaaggcaccaucuaau

SEQ ID NO: 2179645 - RNA, 20 nt, Human
uuaaaggaagguucuggugu

SEQ ID NO: 2179646 - RNA, 17 nt, Human
uuaaaggaaaaaauguu

SEQ ID NO: 2179647 - RNA, 12 nt, Human
uuaaaggaguua

SEQ ID NO: 2179648 - RNA, 22 nt, Human
uuaaaggaagguucugguguga

SEQ ID NO: 2179649 - RNA, 15 nt, Human
uuaaaauuuauugcu

SEQ ID NO: 2179650 - RNA, 12 nt, Human
uuaaaggaaaaa

SEQ ID NO: 2179651 - RNA, 16 nt, Human
uuaaaggaaaaaaugu

SEQ ID NO: 2179652 - RNA, 20 nt, Human
uuaaauaaaugucauuaaaa

SEQ ID NO: 2179653 - RNA, 18 nt, Human
uuaaauaaaugucauuaa

SEQ ID NO: 2179654 - RNA, 13 nt, Human
uuaaauaaauugu

SEQ ID NO: 2179655 - RNA, 15 nt, Human
uuaaauaaauuguau

SEQ ID NO: 2179656 - RNA, 17 nt, Human
uuaaauaaauuguauau

SEQ ID NO: 2179657 - RNA, 21 nt, Human
uuaaauaaaugucauuaaaau

SEQ ID NO: 2179658 - RNA, 18 nt, Human
uuaaauaaauuguauauu

SEQ ID NO: 2179659 - RNA, 20 nt, Human
uuaaauaaauuguauauuca

SEQ ID NO: 2179660 - RNA, 21 nt, Human
uuaaaggggcagaaaaacucu

SEQ ID NO: 2179661 - RNA, 19 nt, Human
uuaaaggguguacuuauau

SEQ ID NO: 2179662 - RNA, 15 nt, Human
uuaaaggugucuucc

SEQ ID NO: 2179663 - RNA, 20 nt, Human
uuaaaggcuucucucucacc

SEQ ID NO: 2179664 - RNA, 17 nt, Human
uuaaaggcuucucucuc

SEQ ID NO: 2179665 - RNA, 19 nt, Human
uuaaaggcuucucucucac

SEQ ID NO: 2179666 - RNA, 20 nt, Human
aguucuuaguugcuguaugu

SEQ ID NO: 2179667 - RNA, 21 nt, Human
aguucuuaguugcuguauguc

SEQ ID NO: 2179668 - RNA, 22 nt, Human
aguucuuaaggauugugauauu

SEQ ID NO: 2179669 - RNA, 15 nt, Human
aguucuucgggaaga

SEQ ID NO: 2179670 - RNA, 16 nt, Human
aguugcagauucauuu

SEQ ID NO: 2179671 - RNA, 22 nt, Human
aguugcagacucaguuugucag

SEQ ID NO: 2179672 - RNA, 18 nt, Human
aguugcagacucaguuug

SEQ ID NO: 2179673 - RNA, 17 nt, Human
aguugcagacucaguuu

SEQ ID NO: 2179674 - RNA, 16 nt, Human
aguugcagacucaguu

SEQ ID NO: 2179675 - RNA, 11 nt, Human
aguugcagaaa

SEQ ID NO: 2179676 - RNA, 20 nt, Human
aguugcacuuggccucugga

SEQ ID NO: 2179677 - RNA, 20 nt, Human
aguugcacggcugcugaggc

SEQ ID NO: 2179678 - RNA, 15 nt, Human
aguugcacugauauu

SEQ ID NO: 2179679 - RNA, 17 nt, Human
aguucuucgggaagaga

SEQ ID NO: 2179680 - RNA, 17 nt, Human
aguugcacagcuaugaa

SEQ ID NO: 2179681 - RNA, 15 nt, Human
aguugcacggcugcu

SEQ ID NO: 2179682 - RNA, 16 nt, Human
aguugcacggcugcug

SEQ ID NO: 2179683 - RNA, 17 nt, Human
aguugcacggcugcuga

SEQ ID NO: 2179684 - RNA, 23 nt, Human
aguugcagacucaguuugucaga

SEQ ID NO: 2179685 - RNA, 20 nt, Human
aguugcguggacucugcaca

SEQ ID NO: 2179686 - RNA, 15 nt, Human
aguugggagcacugg

SEQ ID NO: 2179687 - RNA, 13 nt, Human
aguugggagcacu

SEQ ID NO: 2179688 - RNA, 21 nt, Human
aguuggguggaugccuggugg

SEQ ID NO: 2179689 - RNA, 23 nt, Human
aguugggaacuucagauggaccu

SEQ ID NO: 2179690 - RNA, 13 nt, Human
aguuggcuucuaa

SEQ ID NO: 2179691 - RNA, 17 nt, Human
aguuggguggaugccug

SEQ ID NO: 2179692 - RNA, 21 nt, Human
aguugcuccgccucugcuggc

SEQ ID NO: 2179693 - RNA, 16 nt, Human
aguugcguggacucug

SEQ ID NO: 2179694 - RNA, 17 nt, Human
aguugcugcaaaccuga

SEQ ID NO: 2179695 - RNA, 16 nt, Human
aguugcugcaaaccug

SEQ ID NO: 2179696 - RNA, 16 nt, Human
aguuggccagagagcc

SEQ ID NO: 2179697 - RNA, 18 nt, Human
aguuggcuaggggagcag

SEQ ID NO: 2179698 - RNA, 18 nt, Human
aguuggcuggaugaaauu

SEQ ID NO: 2179699 - RNA, 16 nt, Human
aguuggcuaggacccc

SEQ ID NO: 2179700 - RNA, 19 nt, Human
aguuguuuucagacucaga

SEQ ID NO: 2179701 - RNA, 13 nt, Human
aguuguuugcaug

SEQ ID NO: 2179702 - RNA, 12 nt, Human
aguuuaaaaaaa

SEQ ID NO: 2179703 - RNA, 14 nt, Human
aguuuaaggaauau

SEQ ID NO: 2179704 - RNA, 22 nt, Human
aguuuaacacaaguccugugaa

SEQ ID NO: 2179705 - RNA, 23 nt, Human
aguuuaaccaaaaagaccagacu

SEQ ID NO: 2179706 - RNA, 22 nt, Human
aguuuaauccuucuaguuuccc

SEQ ID NO: 2179707 - RNA, 20 nt, Human
aguuuaauggugccuucauu

SEQ ID NO: 2179708 - RNA, 16 nt, Human
aguuuaggauaaaaua

SEQ ID NO: 2179709 - RNA, 13 nt, Human
aguuggugacaga

SEQ ID NO: 2179710 - RNA, 16 nt, Human
aguugggagcacugga

SEQ ID NO: 2179711 - RNA, 18 nt, Human
aguuggucccccuuccau

SEQ ID NO: 2179712 - RNA, 13 nt, Human
aguuguaaauaua

SEQ ID NO: 2179713 - RNA, 14 nt, Human
aguuguaaauauau

SEQ ID NO: 2179714 - RNA, 15 nt, Human
aguuguaaauauaua

SEQ ID NO: 2179715 - RNA, 16 nt, Human
aguuguaaauauauaa

SEQ ID NO: 2179716 - RNA, 17 nt, Human
aguuguaaauauauaaa

SEQ ID NO: 2179717 - RNA, 18 nt, Human
aguuguaaauauauaaau

SEQ ID NO: 2179718 - RNA, 20 nt, Human
aguuguaaauauauaaauau

SEQ ID NO: 2179719 - RNA, 22 nt, Human
aguuguaaauauauaaauauau

SEQ ID NO: 2179720 - RNA, 21 nt, Human
aguuguuugauucagacagcu

SEQ ID NO: 2179721 - RNA, 23 nt, Human
aguuguuugauucagacagcugc

SEQ ID NO: 2179722 - RNA, 18 nt, Human
uuacaucaaggcuucaaa

SEQ ID NO: 2179723 - RNA, 22 nt, Human
uuacauaucaccucauggccua

SEQ ID NO: 2179724 - RNA, 16 nt, Human
uuacauagguauauau

SEQ ID NO: 2179725 - RNA, 22 nt, Human
uuacauauuugcauauguauga

SEQ ID NO: 2179726 - RNA, 13 nt, Human
uuacaucauuuuu

SEQ ID NO: 2179727 - RNA, 14 nt, Human
uuacaucauuuuug

SEQ ID NO: 2179728 - RNA, 18 nt, Human
uuacaucauuuuuguauc

SEQ ID NO: 2179729 - RNA, 20 nt, Human
uuacaucauuuuuguaucua

SEQ ID NO: 2179730 - RNA, 13 nt, Human
uuacauccuuaaa

SEQ ID NO: 2179731 - RNA, 14 nt, Human
uuacauacugcugu

SEQ ID NO: 2179732 - RNA, 19 nt, Human
uuacagugaaaauguaagc

SEQ ID NO: 2179733 - RNA, 20 nt, Human
uuacagugaaaauguaagcu

SEQ ID NO: 2179734 - RNA, 21 nt, Human
uuacauaaucuguacaaugaa

SEQ ID NO: 2179735 - RNA, 20 nt, Human
uuacauaagauaaaugugcu

SEQ ID NO: 2179736 - RNA, 13 nt, Human
uuaccugugaaau

SEQ ID NO: 2179737 - RNA, 22 nt, Human
uuaccuguuuucgcaccuacca

SEQ ID NO: 2179738 - RNA, 14 nt, Human
uuaccuuacagaag

SEQ ID NO: 2179739 - RNA, 14 nt, Human
uuacaucuguuuua

SEQ ID NO: 2179740 - RNA, 18 nt, Human
uuaccugggcauucuugu

SEQ ID NO: 2179741 - RNA, 12 nt, Human
uuaccugggaaa

SEQ ID NO: 2179742 - RNA, 14 nt, Human
uuacugagcuucuc

SEQ ID NO: 2179743 - RNA, 16 nt, Human
uuacugagcuucucug

SEQ ID NO: 2179744 - RNA, 17 nt, Human
uuacugagcuucucugu

SEQ ID NO: 2179745 - RNA, 18 nt, Human
uuacugagcuucucugug

SEQ ID NO: 2179746 - RNA, 12 nt, Human
uuacugaccagc

SEQ ID NO: 2179747 - RNA, 13 nt, Human
uuacugagcuucu

SEQ ID NO: 2179748 - RNA, 12 nt, Human
uuacucagcccu

SEQ ID NO: 2179749 - RNA, 23 nt, Human
uuacugaaugcaccauggucaaa

SEQ ID NO: 2179750 - RNA, 21 nt, Human
uuacugaucaugcauuguuga

SEQ ID NO: 2179751 - RNA, 18 nt, Human
uuacugaucaugcauugu

SEQ ID NO: 2179752 - RNA, 17 nt, Human
uuacugaucaugcauug

SEQ ID NO: 2179753 - RNA, 16 nt, Human
uuacugaucaugcauu

SEQ ID NO: 2179754 - RNA, 15 nt, Human
uuacugaucaugcau

SEQ ID NO: 2179755 - RNA, 14 nt, Human
uuacugaucaugca

SEQ ID NO: 2179756 - RNA, 13 nt, Human
uuacugaucaugc

SEQ ID NO: 2179757 - RNA, 19 nt, Human
uuacugagcuucucuguga

SEQ ID NO: 2179758 - RNA, 22 nt, Human
uuacugauagggauacaugcuc

SEQ ID NO: 2179759 - RNA, 23 nt, Human
uuacugauauauuuuacaauuuu

SEQ ID NO: 2179760 - RNA, 14 nt, Human
uuacugauauauuu

SEQ ID NO: 2179761 - RNA, 23 nt, Human
uuaccuguuuucgcaccuaccau

SEQ ID NO: 2179762 - RNA, 21 nt, Human
uuaccuuagauuagcucugga

SEQ ID NO: 2179763 - RNA, 19 nt, Human
uuacuauuuuacuucuaga

SEQ ID NO: 2179764 - RNA, 15 nt, Human
uuacucaacccucuc

SEQ ID NO: 2179765 - RNA, 19 nt, Human
uuaccuuagauuagcucug

SEQ ID NO: 2179766 - RNA, 23 nt, Human
uuacucagaauucucuaguuuga

SEQ ID NO: 2179767 - RNA, 18 nt, Human
uuacucagaauucucuag

SEQ ID NO: 2179768 - RNA, 14 nt, Human
uuacugguccaaaa

SEQ ID NO: 2179769 - RNA, 17 nt, Human
uuacugguccaaaagau

SEQ ID NO: 2179770 - RNA, 15 nt, Human
uuacugguccaaaag

SEQ ID NO: 2179771 - RNA, 18 nt, Human
uuacugcaaaugucauca

SEQ ID NO: 2179772 - RNA, 19 nt, Human
uuacugaucaugcauuguu

SEQ ID NO: 2179773 - RNA, 13 nt, Human
uuacugcaaaugu

SEQ ID NO: 2179774 - RNA, 18 nt, Human
uuacugguccaaaagauu

SEQ ID NO: 2179775 - RNA, 15 nt, Human
uuacuguaagaaaau

SEQ ID NO: 2179776 - RNA, 14 nt, Human
uuagaaauauaauu

SEQ ID NO: 2179777 - RNA, 12 nt, Human
uuagaaauauaa

SEQ ID NO: 2179778 - RNA, 15 nt, Human
uuagaaauagacagu

SEQ ID NO: 2179779 - RNA, 13 nt, Human
uuagaaauagaca

SEQ ID NO: 2179780 - RNA, 11 nt, Human
uuagaaauaua

SEQ ID NO: 2179781 - RNA, 13 nt, Human
uuagaaccuuucu

SEQ ID NO: 2179782 - RNA, 12 nt, Human
uuagaacauuuu

SEQ ID NO: 2179783 - RNA, 15 nt, Human
uuagaagaagugugu

SEQ ID NO: 2179784 - RNA, 14 nt, Human
uuagaagaagugug

SEQ ID NO: 2179785 - RNA, 23 nt, Human
uuagaagauauuagucuuggggc

SEQ ID NO: 2179786 - RNA, 16 nt, Human
uuagaagaaguguguc

SEQ ID NO: 2179787 - RNA, 18 nt, Human
uuagaacauuuuaauuca

SEQ ID NO: 2179788 - RNA, 18 nt, Human
uuagaagauauuagucuu

SEQ ID NO: 2179789 - RNA, 11 nt, Human
uuagacagagu

SEQ ID NO: 2179790 - RNA, 15 nt, Human
uuagacaaauacuca

SEQ ID NO: 2179791 - RNA, 18 nt, Human
uuagacaaauacucaugu

SEQ ID NO: 2179792 - RNA, 19 nt, Human
uuagacaaauacucaugug

SEQ ID NO: 2179793 - RNA, 20 nt, Human
uuagacaaauacucaugugu

SEQ ID NO: 2179794 - RNA, 21 nt, Human
uuagacaaauacucaugugua

SEQ ID NO: 2179795 - RNA, 22 nt, Human
uuagacaaauacucauguguau

SEQ ID NO: 2179796 - RNA, 16 nt, Human
uuagacaagagauggg

SEQ ID NO: 2179797 - RNA, 23 nt, Human
uuagacaaauacucauguguaug

SEQ ID NO: 2179798 - RNA, 23 nt, Human
uuagacacuggcugccagcuauu

SEQ ID NO: 2179799 - RNA, 20 nt, Human
auaacuuauauuguaagaaa

SEQ ID NO: 2179800 - RNA, 23 nt, Human
auaacuuauauuguaagaaauac

SEQ ID NO: 2179801 - RNA, 22 nt, Human
auaacuuauauuguaagaaaua

SEQ ID NO: 2179802 - RNA, 21 nt, Human
auaacuuauauuguaagaaau

SEQ ID NO: 2179803 - RNA, 13 nt, Human
auaaaguguaaua

SEQ ID NO: 2179804 - RNA, 17 nt, Human
auaaacacccaugaauc

SEQ ID NO: 2179805 - RNA, 16 nt, Human
auaaaguuggugacag

SEQ ID NO: 2179806 - RNA, 17 nt, Human
auaaaguuggugacaga

SEQ ID NO: 2179807 - RNA, 21 nt, Human
auaaaguucugaguguuuuua

SEQ ID NO: 2179808 - RNA, 22 nt, Human
auaaaguugaagcuaagauuua

SEQ ID NO: 2179809 - RNA, 15 nt, Human
auaaaguucuguacu

SEQ ID NO: 2179810 - RNA, 12 nt, Human
auaaauaacuuu

SEQ ID NO: 2179811 - RNA, 19 nt, Human
auaaaguuugcuuagaaaa

SEQ ID NO: 2179812 - RNA, 14 nt, Human
auaaauaacuuuuu

SEQ ID NO: 2179813 - RNA, 18 nt, Human
auaaaguuggugacagau

SEQ ID NO: 2179814 - RNA, 13 nt, Human
auaaaguuucuca

SEQ ID NO: 2179815 - RNA, 12 nt, Human
auaaaguuugcu

SEQ ID NO: 2179816 - RNA, 21 nt, Human
auaaauaaucggcccacagcu

SEQ ID NO: 2179817 - RNA, 15 nt, Human
auaaauaaucuguac

SEQ ID NO: 2179818 - RNA, 14 nt, Human
auaaauaccucuua

SEQ ID NO: 2179819 - RNA, 18 nt, Human
auaaauaccucuuagcug

SEQ ID NO: 2179820 - RNA, 23 nt, Human
auaaauaccucuuagcugagugg

SEQ ID NO: 2179821 - RNA, 11 nt, Human
auaaauagcua

SEQ ID NO: 2179822 - RNA, 20 nt, Human
auaaauauauauaaauauau

SEQ ID NO: 2179823 - RNA, 21 nt, Human
auaaauauauauaaauauaua

SEQ ID NO: 2179824 - RNA, 21 nt, Human
auaaauauauauauauauaaa

SEQ ID NO: 2179825 - RNA, 22 nt, Human
auaaauauauauauauauaaaa

SEQ ID NO: 2179826 - RNA, 23 nt, Human
auaaauauauauauauauaaaau

SEQ ID NO: 2179827 - RNA, 14 nt, Human
auaaauaugaagcu

SEQ ID NO: 2179828 - RNA, 14 nt, Human
auaaauaugagugc

SEQ ID NO: 2179829 - RNA, 15 nt, Human
auaaauaugagugcc

SEQ ID NO: 2179830 - RNA, 12 nt, Human
auaaauaugaag

SEQ ID NO: 2179831 - RNA, 20 nt, Human
auaaauauauauauccucug

SEQ ID NO: 2179832 - RNA, 11 nt, Human
auaaaugaagc

SEQ ID NO: 2179833 - RNA, 17 nt, Human
auaaaugaagcagcuuu

SEQ ID NO: 2179834 - RNA, 14 nt, Human
auaaaucuguugcc

SEQ ID NO: 2179835 - RNA, 22 nt, Human
auaaauauuauauuauauauau

SEQ ID NO: 2179836 - RNA, 12 nt, Human
auaaauauuaua

SEQ ID NO: 2179837 - RNA, 13 nt, Human
auaaauaugcagu

SEQ ID NO: 2179838 - RNA, 14 nt, Human
auaaauaugcagug

SEQ ID NO: 2179839 - RNA, 22 nt, Human
auaaauaugccucuccuuugua

SEQ ID NO: 2179840 - RNA, 17 nt, Human
uuacagugaaaauguaa

SEQ ID NO: 2179841 - RNA, 19 nt, Human
uuacaguaggagcccagcu

SEQ ID NO: 2179842 - RNA, 11 nt, Human
uuacagcugug

SEQ ID NO: 2179843 - RNA, 14 nt, Human
uuacagcugccugc

SEQ ID NO: 2179844 - RNA, 21 nt, Human
uuacagcgagaggcagagaaa

SEQ ID NO: 2179845 - RNA, 20 nt, Human
uuacagcuggguggcacugc

SEQ ID NO: 2179846 - RNA, 21 nt, Human
uuacagcuggguggcacugcc

SEQ ID NO: 2179847 - RNA, 14 nt, Human
uuacaggaaguacu

SEQ ID NO: 2179848 - RNA, 18 nt, Human
auaacuacuguguuccug

SEQ ID NO: 2179849 - RNA, 16 nt, Human
auaacuacuguguucc

SEQ ID NO: 2179850 - RNA, 19 nt, Human
auaacuacuguguuccugg

SEQ ID NO: 2179851 - RNA, 19 nt, Human
auaacuagauggugcugag

SEQ ID NO: 2179852 - RNA, 17 nt, Human
uuacagccucacuugaa

SEQ ID NO: 2179853 - RNA, 21 nt, Human
auaacuagauggugcugagaa

SEQ ID NO: 2179854 - RNA, 20 nt, Human
auaacuagauggugcugaga

SEQ ID NO: 2179855 - RNA, 13 nt, Human
uuacagcugccug

SEQ ID NO: 2179856 - RNA, 15 nt, Human
uuacagcgagaggca

SEQ ID NO: 2179857 - RNA, 14 nt, Human
uuacagccucugac

SEQ ID NO: 2179858 - RNA, 15 nt, Human
uuacagccucugacu

SEQ ID NO: 2179859 - RNA, 15 nt, Human
auaacuacuguguuc

SEQ ID NO: 2179860 - RNA, 13 nt, Human
auaacuacugugu

SEQ ID NO: 2179861 - RNA, 19 nt, Human
auaacuacuccggagacag

SEQ ID NO: 2179862 - RNA, 20 nt, Human
auaacuacuccggagacagg

SEQ ID NO: 2179863 - RNA, 17 nt, Human
auaaaugucauuaaaau

SEQ ID NO: 2179864 - RNA, 15 nt, Human
auaaauguaucuuau

SEQ ID NO: 2179865 - RNA, 18 nt, Human
auaaauguaucuuauuca

SEQ ID NO: 2179866 - RNA, 16 nt, Human
auaacuaaaagguaug

SEQ ID NO: 2179867 - RNA, 14 nt, Human
auaacuaaauaaag

SEQ ID NO: 2179868 - RNA, 11 nt, Human
auaaaugaaug

SEQ ID NO: 2179869 - RNA, 18 nt, Human
auaaaugaagcagcuuua

SEQ ID NO: 2179870 - RNA, 20 nt, Human
auaaaugaagcagcuuuaaa

SEQ ID NO: 2179871 - RNA, 16 nt, Human
auaaaugaauuuuagu

SEQ ID NO: 2179872 - RNA, 22 nt, Human
auaaaugguauagcaaauguuu

SEQ ID NO: 2179873 - RNA, 16 nt, Human
auaaaugguuaaaaga

SEQ ID NO: 2179874 - RNA, 17 nt, Human
auaaaugaauuuuaguu

SEQ ID NO: 2179875 - RNA, 17 nt, Human
auaaaugagcuauguau

SEQ ID NO: 2179876 - RNA, 18 nt, Human
auaaaugagcuauguauu

SEQ ID NO: 2179877 - RNA, 20 nt, Human
auaaaugagcuauguauuaa

SEQ ID NO: 2179878 - RNA, 15 nt, Human
auaaauguacauuaa

SEQ ID NO: 2179879 - RNA, 13 nt, Human
auaaauguaucau

SEQ ID NO: 2179880 - RNA, 21 nt, Human
auaaauguaucauagaaaugu

SEQ ID NO: 2179881 - RNA, 17 nt, Human
auaaauguaucauagaa

SEQ ID NO: 2179882 - RNA, 22 nt, Human
auaaaugguuaaaagagguuuu

SEQ ID NO: 2179883 - RNA, 15 nt, Human
auaaaaugaccagua

SEQ ID NO: 2179884 - RNA, 20 nt, Human
auaaaaucauguacauuucu

SEQ ID NO: 2179885 - RNA, 18 nt, Human
auaaaaucauguacauuu

SEQ ID NO: 2179886 - RNA, 19 nt, Human
auaaaaugaggacauguuu

SEQ ID NO: 2179887 - RNA, 13 nt, Human
auaaaaugaccag

SEQ ID NO: 2179888 - RNA, 18 nt, Human
auaaaaugaggacauguu

SEQ ID NO: 2179889 - RNA, 20 nt, Human
auaaaaugugauuuuucuga

SEQ ID NO: 2179890 - RNA, 13 nt, Human
auaaaaugugauu

SEQ ID NO: 2179891 - RNA, 12 nt, Human
auaaaauguuga

SEQ ID NO: 2179892 - RNA, 13 nt, Human
auaaaauguugaa

SEQ ID NO: 2179893 - RNA, 16 nt, Human
auaaaauguugaaaag

SEQ ID NO: 2179894 - RNA, 17 nt, Human
auaaaauguugaaaagu

SEQ ID NO: 2179895 - RNA, 16 nt, Human
auaaaauaaaguauau

SEQ ID NO: 2179896 - RNA, 16 nt, Human
auaaaaucagccaauu

SEQ ID NO: 2179897 - RNA, 18 nt, Human
auaaaaucagccaauuau

SEQ ID NO: 2179898 - RNA, 22 nt, Human
auaaaaucagccaauuauguua

SEQ ID NO: 2179899 - RNA, 23 nt, Human
auaaaaucagccaauuauguuaa

SEQ ID NO: 2179900 - RNA, 18 nt, Human
auaaaauccauacauuug

SEQ ID NO: 2179901 - RNA, 19 nt, Human
auaaaauccauacauuugu

SEQ ID NO: 2179902 - RNA, 15 nt, Human
auaaaaguacauguu

SEQ ID NO: 2179903 - RNA, 21 nt, Human
auaaaaguacauguuaaacuu

SEQ ID NO: 2179904 - RNA, 21 nt, Human
auaaaagugauuguuggcaca

SEQ ID NO: 2179905 - RNA, 14 nt, Human
auaaaagugauugu

SEQ ID NO: 2179906 - RNA, 18 nt, Human
auaaaagugauuguuggc

SEQ ID NO: 2179907 - RNA, 22 nt, Human
auaaaagugaucaauaaaaugu

SEQ ID NO: 2179908 - RNA, 18 nt, Human
auaaaagugaucaauaaa

SEQ ID NO: 2179909 - RNA, 17 nt, Human
auaaaagugaucaauaa

SEQ ID NO: 2179910 - RNA, 13 nt, Human
auaaaagugauca

SEQ ID NO: 2179911 - RNA, 18 nt, Human
aguuucagguguuuaguu

SEQ ID NO: 2179912 - RNA, 20 nt, Human
auaaaaggucggaccagcuu

SEQ ID NO: 2179913 - RNA, 22 nt, Human
auaaaagggacugagaaauuua

SEQ ID NO: 2179914 - RNA, 21 nt, Human
aguuucaggugacaugugaaa

SEQ ID NO: 2179915 - RNA, 22 nt, Human
aguuucaggugacaugugaaac

SEQ ID NO: 2179916 - RNA, 20 nt, Human
aguuucaggauacaugugcc

SEQ ID NO: 2179917 - RNA, 11 nt, Human
aguuucaggug

SEQ ID NO: 2179918 - RNA, 14 nt, Human
aguuucaggugaca

SEQ ID NO: 2179919 - RNA, 15 nt, Human
aguuucaggugacau

SEQ ID NO: 2179920 - RNA, 16 nt, Human
aguuucaggugacaug

SEQ ID NO: 2179921 - RNA, 17 nt, Human
aguuucaggugacaugu

SEQ ID NO: 2179922 - RNA, 18 nt, Human
aguuucaggugacaugug

SEQ ID NO: 2179923 - RNA, 20 nt, Human
aguuucaggugacaugugaa

SEQ ID NO: 2179924 - RNA, 14 nt, Human
auaaaauaaaguau

SEQ ID NO: 2179925 - RNA, 13 nt, Human
auaaaauaaagua

SEQ ID NO: 2179926 - RNA, 16 nt, Human
auaaaauaauuuuuau

SEQ ID NO: 2179927 - RNA, 21 nt, Human
auaaaauaauuuuuauauuug

SEQ ID NO: 2179928 - RNA, 22 nt, Human
auaaaauaauuuuuauauuuga

SEQ ID NO: 2179929 - RNA, 18 nt, Human
uuaaguuagggaauggca

SEQ ID NO: 2179930 - RNA, 21 nt, Human
uuaaguguuguaaauauuuau

SEQ ID NO: 2179931 - RNA, 22 nt, Human
uuaaguuacacauuuuucagau

SEQ ID NO: 2179932 - RNA, 16 nt, Human
uuaagugcuuuguaau

SEQ ID NO: 2179933 - RNA, 17 nt, Human
uuaagugcguguguaga

SEQ ID NO: 2179934 - RNA, 18 nt, Human
uuaagugcguguguagag

SEQ ID NO: 2179935 - RNA, 19 nt, Human
uuaagugcguguguagagu

SEQ ID NO: 2179936 - RNA, 21 nt, Human
uuaagugcguguguagaguua

SEQ ID NO: 2179937 - RNA, 16 nt, Human
uuaagugaugaacauu

SEQ ID NO: 2179938 - RNA, 13 nt, Human
uuaagugaauguc

SEQ ID NO: 2179939 - RNA, 22 nt, Human
uuaagugcugcauuuaaaagau

SEQ ID NO: 2179940 - RNA, 17 nt, Human
uuaaguacuauguauca

SEQ ID NO: 2179941 - RNA, 18 nt, Human
uuaaguaaugauaacugg

SEQ ID NO: 2179942 - RNA, 21 nt, Human
uuaagucuguuuuaugacuuc

SEQ ID NO: 2179943 - RNA, 20 nt, Human
uuaagucuguuuuaugacuu

SEQ ID NO: 2179944 - RNA, 18 nt, Human
uuaagucuguuuuaugac

SEQ ID NO: 2179945 - RNA, 17 nt, Human
uuaagucuguuuuauga

SEQ ID NO: 2179946 - RNA, 22 nt, Human
uuaagguuauuuauuuaaaugu

SEQ ID NO: 2179947 - RNA, 23 nt, Human
uuaagagccauauaaguuugaag

SEQ ID NO: 2179948 - RNA, 23 nt, Human
uuaagaagcuguuguacauuuau

SEQ ID NO: 2179949 - RNA, 20 nt, Human
uuaagaggcagaaaauugca

SEQ ID NO: 2179950 - RNA, 18 nt, Human
uuaaguaaggaauuuuau

SEQ ID NO: 2179951 - RNA, 15 nt, Human
uuaagaggcaggguc

SEQ ID NO: 2179952 - RNA, 16 nt, Human
uuaagaggcagggucu

SEQ ID NO: 2179953 - RNA, 13 nt, Human
uuaagaggcaggg

SEQ ID NO: 2179954 - RNA, 14 nt, Human
uuaagaaggcaaaa

SEQ ID NO: 2179955 - RNA, 12 nt, Human
uuaagaaggcaa

SEQ ID NO: 2179956 - RNA, 18 nt, Human
uuaagaagcuguuguaca

SEQ ID NO: 2179957 - RNA, 20 nt, Human
uuaagaagcuguuguacauu

SEQ ID NO: 2179958 - RNA, 21 nt, Human
uuaagaagcuguuguacauuu

SEQ ID NO: 2179959 - RNA, 22 nt, Human
uuaagaagcuguuguacauuua

SEQ ID NO: 2179960 - RNA, 22 nt, Human
uuaagaagacugcauuauauuu

SEQ ID NO: 2179961 - RNA, 19 nt, Human
auaaaauguugaaaaguca

SEQ ID NO: 2179962 - RNA, 11 nt, Human
uuaagaagcug

SEQ ID NO: 2179963 - RNA, 13 nt, Human
uuaagaagcuguu

SEQ ID NO: 2179964 - RNA, 14 nt, Human
uuaagaagcuguug

SEQ ID NO: 2179965 - RNA, 16 nt, Human
uuaagaagcuguugua

SEQ ID NO: 2179966 - RNA, 17 nt, Human
uuaauuuuuuuaaccaa

SEQ ID NO: 2179967 - RNA, 18 nt, Human
uuaauuuuuuuaaccaaa

SEQ ID NO: 2179968 - RNA, 23 nt, Human
uuaauuuacaaaaauauaaaaua

SEQ ID NO: 2179969 - RNA, 14 nt, Human
uuaauuuacaaaaa

SEQ ID NO: 2179970 - RNA, 22 nt, Human
uuaauuuacaaaaauauaaaau

SEQ ID NO: 2179971 - RNA, 18 nt, Human
uuacaaaaauauaaaaua

SEQ ID NO: 2179972 - RNA, 22 nt, Human
uuaauuuuuuuaaccaaaggug

SEQ ID NO: 2179973 - RNA, 23 nt, Human
uuaauuuuuuuaaccaaagguga

SEQ ID NO: 2179974 - RNA, 15 nt, Human
uuaauuuuuuuauug

SEQ ID NO: 2179975 - RNA, 17 nt, Human
uuaauuuuuuuauuguu

SEQ ID NO: 2179976 - RNA, 19 nt, Human
uuaauuuuuuugagacaga

SEQ ID NO: 2179977 - RNA, 16 nt, Human
auaaaauuaaagcuga

SEQ ID NO: 2179978 - RNA, 20 nt, Human
uuacaaaacuacaugagaac

SEQ ID NO: 2179979 - RNA, 18 nt, Human
uuacaaaacuacaugaga

SEQ ID NO: 2179980 - RNA, 17 nt, Human
uuacaaaacuacaugag

SEQ ID NO: 2179981 - RNA, 13 nt, Human
auaaaauuaugcc

SEQ ID NO: 2179982 - RNA, 13 nt, Human
auaaaauuauucc

SEQ ID NO: 2179983 - RNA, 23 nt, Human
auaaaauuauagaugggaaugaa

SEQ ID NO: 2179984 - RNA, 20 nt, Human
auaaaauuauagaugggaau

SEQ ID NO: 2179985 - RNA, 21 nt, Human
auaaaauuauagaugggaaug

SEQ ID NO: 2179986 - RNA, 13 nt, Human
auaaaauuauaga

SEQ ID NO: 2179987 - RNA, 14 nt, Human
auaaaauuauagau

SEQ ID NO: 2179988 - RNA, 22 nt, Human
auaaaauucuauuacaguaugu

SEQ ID NO: 2179989 - RNA, 11 nt, Human
auaaaauugua

SEQ ID NO: 2179990 - RNA, 21 nt, Human
auaaaauuguaaaauuguaua

SEQ ID NO: 2179991 - RNA, 13 nt, Human
auaaaauuauuuu

SEQ ID NO: 2179992 - RNA, 18 nt, Human
auaaaauuauuuuggauu

SEQ ID NO: 2179993 - RNA, 20 nt, Human
auaaaauuuuuaaucuuuaa

SEQ ID NO: 2179994 - RNA, 15 nt, Human
auaaacaaaguuacu

SEQ ID NO: 2179995 - RNA, 23 nt, Human
auaaaauuuuuuuucauguuuua

SEQ ID NO: 2179996 - RNA, 16 nt, Human
auaaacaacuuaaugu

SEQ ID NO: 2179997 - RNA, 19 nt, Human
auaaacaacuuaauguucu

SEQ ID NO: 2179998 - RNA, 19 nt, Human
auaaaauuuuuuuucaugu

SEQ ID NO: 2179999 - RNA, 17 nt, Human
auaaaauuuuuuuucau

SEQ ID NO: 2180000 - RNA, 16 nt, Human
auaaaauuuguugcau

SEQ ID NO: 2180001 - RNA, 13 nt, Human
auaaaauuuguug

SEQ ID NO: 2180002 - RNA, 23 nt, Human
auaaaauuguaaaauuguauaga

SEQ ID NO: 2180003 - RNA, 22 nt, Human
auaaacaagaccacguuucuaa

SEQ ID NO: 2180004 - RNA, 15 nt, Human
auaaacaagaccacg

SEQ ID NO: 2180005 - RNA, 23 nt, Human
auaaacaagaccacguuucuaaa

SEQ ID NO: 2180006 - RNA, 19 nt, Human
uuaauuguuuugcacuuuu

SEQ ID NO: 2180007 - RNA, 18 nt, Human
uuaauuuaaacaccuccu

SEQ ID NO: 2180008 - RNA, 18 nt, Human
uuaauuguuuugcacuuu

SEQ ID NO: 2180009 - RNA, 16 nt, Human
uuaauuguuguuucuu

SEQ ID NO: 2180010 - RNA, 19 nt, Human
uuaauuguuguuucuuucu

SEQ ID NO: 2180011 - RNA, 20 nt, Human
uuaauuguuguuucuuucua

SEQ ID NO: 2180012 - RNA, 22 nt, Human
uuaauuguuguuucuuucuagu

SEQ ID NO: 2180013 - RNA, 14 nt, Human
uuaauucucuugaa

SEQ ID NO: 2180014 - RNA, 22 nt, Human
uuaauuccaugaaucgcuucuc

SEQ ID NO: 2180015 - RNA, 17 nt, Human
uuaauucucaugugauc

SEQ ID NO: 2180016 - RNA, 17 nt, Human
uuaauucucuuucaaag

SEQ ID NO: 2180017 - RNA, 15 nt, Human
uuaauuguucauuuu

SEQ ID NO: 2180018 - RNA, 13 nt, Human
uuaauuguuguuu

SEQ ID NO: 2180019 - RNA, 15 nt, Human
uuaauucuuagcuca

SEQ ID NO: 2180020 - RNA, 16 nt, Human
uuaauuccuuucucau

SEQ ID NO: 2180021 - RNA, 15 nt, Human
uuaauucauguuucu

SEQ ID NO: 2180022 - RNA, 19 nt, Human
uuaauuccaauaugaugac

SEQ ID NO: 2180023 - RNA, 21 nt, Human
uuaauuccaugaaucgcuucu

SEQ ID NO: 2180024 - RNA, 17 nt, Human
uuaauuccaauuauaug

SEQ ID NO: 2180025 - RNA, 14 nt, Human
uuaauucauguuuc

SEQ ID NO: 2180026 - RNA, 14 nt, Human
uuaaugaaguuuga

SEQ ID NO: 2180027 - RNA, 23 nt, Human
uuaaugaagaaaguggaaaacaa

SEQ ID NO: 2180028 - RNA, 18 nt, Human
uuaaugaagaaaguggaa

SEQ ID NO: 2180029 - RNA, 14 nt, Human
uuaaugaagaaagu

SEQ ID NO: 2180030 - RNA, 22 nt, Human
uuaaugaaauaucuguauuuaa

SEQ ID NO: 2180031 - RNA, 17 nt, Human
uuaaugaaauaucugua

SEQ ID NO: 2180032 - RNA, 21 nt, Human
uuaaugaaauaucuguauuua

SEQ ID NO: 2180033 - RNA, 13 nt, Human
uuaauaaagacag

SEQ ID NO: 2180034 - RNA, 14 nt, Human
uuaauaaagacagg

SEQ ID NO: 2180035 - RNA, 12 nt, Human
uuaauaacaauu

SEQ ID NO: 2180036 - RNA, 18 nt, Human
uuaauaaauuauuuauua

SEQ ID NO: 2180037 - RNA, 20 nt, Human
uuaauaaauuauuuauuauu

SEQ ID NO: 2180038 - RNA, 20 nt, Human
uuaaugaaagacuguacaaa

SEQ ID NO: 2180039 - RNA, 23 nt, Human
uuaaugaaagacuguacaaagua

SEQ ID NO: 2180040 - RNA, 22 nt, Human
uuaauaaacuuuuuuuugagaa

SEQ ID NO: 2180041 - RNA, 18 nt, Human
uuaaguugcugaugaacu

SEQ ID NO: 2180042 - RNA, 17 nt, Human
uuaauaaacacucuuga

SEQ ID NO: 2180043 - RNA, 12 nt, Human
uuaaguuacuuc

SEQ ID NO: 2180044 - RNA, 22 nt, Human
uuaaguucuggaugcauuucuc

SEQ ID NO: 2180045 - RNA, 13 nt, Human
uuaauaaacacuc

SEQ ID NO: 2180046 - RNA, 21 nt, Human
ugggagacaagaaaucccugu

SEQ ID NO: 2180047 - RNA, 19 nt, Human
ugggagacacccaaagggu

SEQ ID NO: 2180048 - RNA, 14 nt, Human
ugggagacauguga

SEQ ID NO: 2180049 - RNA, 15 nt, Human
ugggagacaugugac

SEQ ID NO: 2180050 - RNA, 18 nt, Human
ugggagaccuguaaucau

SEQ ID NO: 2180051 - RNA, 22 nt, Human
ugggagacaagaaaucccuguu

SEQ ID NO: 2180052 - RNA, 16 nt, Human
ugggagacaugugaca

SEQ ID NO: 2180053 - RNA, 19 nt, Human
ugggagagaagagaaugca

SEQ ID NO: 2180054 - RNA, 21 nt, Human
ugggagagaagagaaugcaca

SEQ ID NO: 2180055 - RNA, 18 nt, Human
ugggaggaucucuugagc

SEQ ID NO: 2180056 - RNA, 16 nt, Human
ugggagagccuuccag

SEQ ID NO: 2180057 - RNA, 18 nt, Human
ugggagagcccagccauu

SEQ ID NO: 2180058 - RNA, 14 nt, Human
ugggagagcccagc

SEQ ID NO: 2180059 - RNA, 21 nt, Human
ugggagagagacguguacaua

SEQ ID NO: 2180060 - RNA, 18 nt, Human
ugggagacugcugaguca

SEQ ID NO: 2180061 - RNA, 22 nt, Human
ugggagaauucuuacauguuuu

SEQ ID NO: 2180062 - RNA, 21 nt, Human
ugggagaauucuuacauguuu

SEQ ID NO: 2180063 - RNA, 22 nt, Human
ugggagaaugucaguaugugga

SEQ ID NO: 2180064 - RNA, 20 nt, Human
ugggagaaugucaguaugug

SEQ ID NO: 2180065 - RNA, 19 nt, Human
ugggagaaugucaguaugu

SEQ ID NO: 2180066 - RNA, 23 nt, Human
ugggagaaccucaggcuuccuug

SEQ ID NO: 2180067 - RNA, 22 nt, Human
ugggagaaccucaggcuuccuu

SEQ ID NO: 2180068 - RNA, 15 nt, Human
ugggagaaccucagg

SEQ ID NO: 2180069 - RNA, 14 nt, Human
ugggagaaccucag

SEQ ID NO: 2180070 - RNA, 22 nt, Human
ugggagaaccaaaaagaggcua

SEQ ID NO: 2180071 - RNA, 23 nt, Human
ugggacuggccagguuucugccc

SEQ ID NO: 2180072 - RNA, 18 nt, Human
ugggacugcugcuucuua

SEQ ID NO: 2180073 - RNA, 20 nt, Human
ugggacugagccagucccag

SEQ ID NO: 2180074 - RNA, 17 nt, Human
ugggacugcuaaauaaa

SEQ ID NO: 2180075 - RNA, 18 nt, Human
ugggacugcuaaauaaaa

SEQ ID NO: 2180076 - RNA, 14 nt, Human
ugggacugagccag

SEQ ID NO: 2180077 - RNA, 15 nt, Human
ugggacugagccagu

SEQ ID NO: 2180078 - RNA, 16 nt, Human
ugggacugagccaguc

SEQ ID NO: 2180079 - RNA, 17 nt, Human
ugggacucagccuucag

SEQ ID NO: 2180080 - RNA, 23 nt, Human
ugggacucagccuucagacagag

SEQ ID NO: 2180081 - RNA, 23 nt, Human
agggaggaggccaccucuccaag

SEQ ID NO: 2180082 - RNA, 21 nt, Human
ugggacguggcucagccagca

SEQ ID NO: 2180083 - RNA, 13 nt, Human
ugggacucagccu

SEQ ID NO: 2180084 - RNA, 20 nt, Human
ugggacucaaugcacugaca

SEQ ID NO: 2180085 - RNA, 19 nt, Human
agggagcaaguccuucccu

SEQ ID NO: 2180086 - RNA, 21 nt, Human
agggagcaaguccuucccuuu

SEQ ID NO: 2180087 - RNA, 19 nt, Human
agggagagucauauuuuga

SEQ ID NO: 2180088 - RNA, 13 nt, Human
agggagagggagg

SEQ ID NO: 2180089 - RNA, 14 nt, Human
agggagagggaggu

SEQ ID NO: 2180090 - RNA, 16 nt, Human
agggagagguggagca

SEQ ID NO: 2180091 - RNA, 17 nt, Human
agggagcagacaggagg

SEQ ID NO: 2180092 - RNA, 14 nt, Human
agggagcagacagg

SEQ ID NO: 2180093 - RNA, 13 nt, Human
agggagcacuggg

SEQ ID NO: 2180094 - RNA, 13 nt, Human
agggagcugggac

SEQ ID NO: 2180095 - RNA, 15 nt, Human
agggaggaagaagcu

SEQ ID NO: 2180096 - RNA, 21 nt, Human
agggaggaagaagcuuaggca

SEQ ID NO: 2180097 - RNA, 23 nt, Human
agggaggaagaagcuuaggcagg

SEQ ID NO: 2180098 - RNA, 20 nt, Human
agggacagagacaccugcac

SEQ ID NO: 2180099 - RNA, 19 nt, Human
agggacagagacaccugca

SEQ ID NO: 2180100 - RNA, 18 nt, Human
agggacagagacaccugc

SEQ ID NO: 2180101 - RNA, 10 nt, Human
agggacagag

SEQ ID NO: 2180102 - RNA, 19 nt, Human
agggacaaguggacucagg

SEQ ID NO: 2180103 - RNA, 14 nt, Human
agggacaccagcca

SEQ ID NO: 2180104 - RNA, 15 nt, Human
agggacaccagccag

SEQ ID NO: 2180105 - RNA, 16 nt, Human
agggacaccagccagg

SEQ ID NO: 2180106 - RNA, 18 nt, Human
agggacaccagccaggcu

SEQ ID NO: 2180107 - RNA, 20 nt, Human
agggacaccagccaggcucu

SEQ ID NO: 2180108 - RNA, 21 nt, Human
agggacaccagccaggcucug

SEQ ID NO: 2180109 - RNA, 16 nt, Human
agggagagcggggcag

SEQ ID NO: 2180110 - RNA, 13 nt, Human
agggagaggagug

SEQ ID NO: 2180111 - RNA, 17 nt, Human
agggagaggagugacug

SEQ ID NO: 2180112 - RNA, 14 nt, Human
agggagagcggggc

SEQ ID NO: 2180113 - RNA, 15 nt, Human
agggagagccagcuc

SEQ ID NO: 2180114 - RNA, 23 nt, Human
agggagagagagagagagaggac

SEQ ID NO: 2180115 - RNA, 16 nt, Human
agggacagaggcccca

SEQ ID NO: 2180116 - RNA, 14 nt, Human
agggacagagccau

SEQ ID NO: 2180117 - RNA, 22 nt, Human
agggagagagagagagagagga

SEQ ID NO: 2180118 - RNA, 23 nt, Human
agggaggaaucgaggaaccagag

SEQ ID NO: 2180119 - RNA, 22 nt, Human
agggaggaaucgaggaaccaga

SEQ ID NO: 2180120 - RNA, 21 nt, Human
agggaggaaucgaggaaccag

SEQ ID NO: 2180121 - RNA, 15 nt, Human
agggaggaggccacc

SEQ ID NO: 2180122 - RNA, 22 nt, Human
agggaggaccagggcagggcca

SEQ ID NO: 2180123 - RNA, 23 nt, Human
agggaggacgcucucuggccuuc

SEQ ID NO: 2180124 - RNA, 22 nt, Human
agggaggacgcucucuggccuu

SEQ ID NO: 2180125 - RNA, 21 nt, Human
agggaggacgcucucuggccu

SEQ ID NO: 2180126 - RNA, 14 nt, Human
ugggacuacaggca

SEQ ID NO: 2180127 - RNA, 20 nt, Human
ugggacguggcucagccagc

SEQ ID NO: 2180128 - RNA, 20 nt, Human
agggaggaggccaccucucc

SEQ ID NO: 2180129 - RNA, 21 nt, Human
agggaggaggccaccucucca

SEQ ID NO: 2180130 - RNA, 16 nt, Human
agggaggaggccaccu

SEQ ID NO: 2180131 - RNA, 17 nt, Human
agggaggaggccaccuc

SEQ ID NO: 2180132 - RNA, 19 nt, Human
agggaggaggccaccucuc

SEQ ID NO: 2180133 - RNA, 15 nt, Human
ugggacuacaggcac

SEQ ID NO: 2180134 - RNA, 16 nt, Human
ugggacuacaggcacc

SEQ ID NO: 2180135 - RNA, 15 nt, Human
agggaauggcacagc

SEQ ID NO: 2180136 - RNA, 15 nt, Human
agggaauuucaggaa

SEQ ID NO: 2180137 - RNA, 21 nt, Human
agggaauuucuucaacucccu

SEQ ID NO: 2180138 - RNA, 16 nt, Human
agggaauugcagagua

SEQ ID NO: 2180139 - RNA, 18 nt, Human
agggaauugaggucugcu

SEQ ID NO: 2180140 - RNA, 22 nt, Human
agggacaaguggacucagggca

SEQ ID NO: 2180141 - RNA, 13 nt, Human
agggaaguuuugu

SEQ ID NO: 2180142 - RNA, 15 nt, Human
agggaaguccccagg

SEQ ID NO: 2180143 - RNA, 22 nt, Human
agggaaguaacaguaacgcagg

SEQ ID NO: 2180144 - RNA, 21 nt, Human
agggaaugaaggugucagaau

SEQ ID NO: 2180145 - RNA, 18 nt, Human
agggaaugaaccuggagg

SEQ ID NO: 2180146 - RNA, 23 nt, Human
agggaaugagacaggaccuagga

SEQ ID NO: 2180147 - RNA, 13 nt, Human
agggaaugccuga

SEQ ID NO: 2180148 - RNA, 14 nt, Human
agggaaugccugag

SEQ ID NO: 2180149 - RNA, 18 nt, Human
agggaaugccugagugcc

SEQ ID NO: 2180150 - RNA, 21 nt, Human
agggaaugccugagugccugg

SEQ ID NO: 2180151 - RNA, 22 nt, Human
agggaaugccugagugccuggc

SEQ ID NO: 2180152 - RNA, 16 nt, Human
agggaauccccgaagg

SEQ ID NO: 2180153 - RNA, 18 nt, Human
agggaauccccgaaggug

SEQ ID NO: 2180154 - RNA, 20 nt, Human
agggaauccccgaaggugcu

SEQ ID NO: 2180155 - RNA, 23 nt, Human
agggaauccccgaaggugcugga

SEQ ID NO: 2180156 - RNA, 16 nt, Human
agggaaggccccacag

SEQ ID NO: 2180157 - RNA, 18 nt, Human
agggaaggaacucuggcu

SEQ ID NO: 2180158 - RNA, 22 nt, Human
agggaaggauacaaaagcaugu

SEQ ID NO: 2180159 - RNA, 20 nt, Human
agggaaggggaggcagccgg

SEQ ID NO: 2180160 - RNA, 18 nt, Human
agggaagggccugccaca

SEQ ID NO: 2180161 - RNA, 21 nt, Human
agggaaggggaggcagccggc

SEQ ID NO: 2180162 - RNA, 12 nt, Human
agggaagggugg

SEQ ID NO: 2180163 - RNA, 16 nt, Human
agggaaguaacaguaa

SEQ ID NO: 2180164 - RNA, 22 nt, Human
agggaaggggacaaggacuagg

SEQ ID NO: 2180165 - RNA, 13 nt, Human
agggaaggggaca

SEQ ID NO: 2180166 - RNA, 16 nt, Human
agggaagggccugcca

SEQ ID NO: 2180167 - RNA, 14 nt, Human
agggaagggccugc

SEQ ID NO: 2180168 - RNA, 13 nt, Human
agggaagggccug

SEQ ID NO: 2180169 - RNA, 15 nt, Human
aggcccguccggcag

SEQ ID NO: 2180170 - RNA, 14 nt, Human
aggcccggggcugg

SEQ ID NO: 2180171 - RNA, 13 nt, Human
aggcccggggcug

SEQ ID NO: 2180172 - RNA, 20 nt, Human
aggcccgcucuacaucuucu

SEQ ID NO: 2180173 - RNA, 21 nt, Human
aggcccggcuccaggcuccuu

SEQ ID NO: 2180174 - RNA, 18 nt, Human
aggcccggcuccaggcuc

SEQ ID NO: 2180175 - RNA, 20 nt, Human
aggcccggcuccaggcuccu

SEQ ID NO: 2180176 - RNA, 15 nt, Human
aggcccggggcuggc

SEQ ID NO: 2180177 - RNA, 22 nt, Human
aggcccuaucuguuuacagugu

SEQ ID NO: 2180178 - RNA, 20 nt, Human
aggcccucccuguuccccag

SEQ ID NO: 2180179 - RNA, 13 nt, Human
agggaaauuucag

SEQ ID NO: 2180180 - RNA, 23 nt, Human
aggcccucccuguuccccagaga

SEQ ID NO: 2180181 - RNA, 22 nt, Human
aggcccucccuguuccccagag

SEQ ID NO: 2180182 - RNA, 19 nt, Human
agggaacgggguccuucaa

SEQ ID NO: 2180183 - RNA, 14 nt, Human
agggaaccuguguc

SEQ ID NO: 2180184 - RNA, 22 nt, Human
agggaaccguuauuauaauugu

SEQ ID NO: 2180185 - RNA, 19 nt, Human
agggaaccguuauuauaau

SEQ ID NO: 2180186 - RNA, 16 nt, Human
agggaagaaaagagcu

SEQ ID NO: 2180187 - RNA, 14 nt, Human
agggaacucugggg

SEQ ID NO: 2180188 - RNA, 15 nt, Human
agggaacucuggggu

SEQ ID NO: 2180189 - RNA, 20 nt, Human
agggaacagacaggagaaau

SEQ ID NO: 2180190 - RNA, 19 nt, Human
agggaacagacaggagaaa

SEQ ID NO: 2180191 - RNA, 18 nt, Human
agggaacagacaggagaa

SEQ ID NO: 2180192 - RNA, 17 nt, Human
agggaacagacaggaga

SEQ ID NO: 2180193 - RNA, 21 nt, Human
agggaacagacaggagaaaug

SEQ ID NO: 2180194 - RNA, 14 nt, Human
agggaacagugagg

SEQ ID NO: 2180195 - RNA, 15 nt, Human
agggaacagacagga

SEQ ID NO: 2180196 - RNA, 14 nt, Human
agggaacagacagg

SEQ ID NO: 2180197 - RNA, 13 nt, Human
agggaacagacag

SEQ ID NO: 2180198 - RNA, 15 nt, Human
agggaagagaaagug

SEQ ID NO: 2180199 - RNA, 12 nt, Human
agggaagagcag

SEQ ID NO: 2180200 - RNA, 14 nt, Human
agggaagagugcau

SEQ ID NO: 2180201 - RNA, 16 nt, Human
agggaagccugaaaaa

SEQ ID NO: 2180202 - RNA, 13 nt, Human
agggaagcuggcc

SEQ ID NO: 2180203 - RNA, 16 nt, Human
agggaagcuacagguu

SEQ ID NO: 2180204 - RNA, 19 nt, Human
agggaagcuacagguuaca

SEQ ID NO: 2180205 - RNA, 19 nt, Human
agggaagcacugccucccu

SEQ ID NO: 2180206 - RNA, 13 nt, Human
agggaagcuacag

SEQ ID NO: 2180207 - RNA, 16 nt, Human
agggaagcuggccgag

SEQ ID NO: 2180208 - RNA, 21 nt, Human
agggaagcuacagguuacaac

SEQ ID NO: 2180209 - RNA, 23 nt, Human
agggaaggaacucuggcuuccag

SEQ ID NO: 2180210 - RNA, 17 nt, Human
agggcagcgccaggcug

SEQ ID NO: 2180211 - RNA, 16 nt, Human
agggcacugguggccc

SEQ ID NO: 2180212 - RNA, 14 nt, Human
agggcagcugggcc

SEQ ID NO: 2180213 - RNA, 15 nt, Human
agggcagcugggccc

SEQ ID NO: 2180214 - RNA, 16 nt, Human
agggcagcugggccca

SEQ ID NO: 2180215 - RNA, 17 nt, Human
agggcagcugggcccaa

SEQ ID NO: 2180216 - RNA, 18 nt, Human
agggcagcugggcccaac

SEQ ID NO: 2180217 - RNA, 20 nt, Human
agggcagcugggcccaaccc

SEQ ID NO: 2180218 - RNA, 11 nt, Human
agggcagcuug

SEQ ID NO: 2180219 - RNA, 16 nt, Human
agggcacugcugcugc

SEQ ID NO: 2180220 - RNA, 21 nt, Human
agggcacccuaguucuaccuc

SEQ ID NO: 2180221 - RNA, 19 nt, Human
agggcaccagggguuucuc

SEQ ID NO: 2180222 - RNA, 21 nt, Human
agggcaccagggguuucucgc

SEQ ID NO: 2180223 - RNA, 14 nt, Human
agggcacugguggc

SEQ ID NO: 2180224 - RNA, 21 nt, Human
agggcacauuccuugccugca

SEQ ID NO: 2180225 - RNA, 13 nt, Human
agggcacuggagc

SEQ ID NO: 2180226 - RNA, 15 nt, Human
agggcacuggagcug

SEQ ID NO: 2180227 - RNA, 14 nt, Human
agggcaccaggggu

SEQ ID NO: 2180228 - RNA, 19 nt, Human
agggcacauuccuugccug

SEQ ID NO: 2180229 - RNA, 20 nt, Human
agggcacauuccuugccugc

SEQ ID NO: 2180230 - RNA, 16 nt, Human
agggagggcuccagac

SEQ ID NO: 2180231 - RNA, 14 nt, Human
agggagggcuccag

SEQ ID NO: 2180232 - RNA, 15 nt, Human
agggagggcuccaga

SEQ ID NO: 2180233 - RNA, 16 nt, Human
agggcaucuccugugc

SEQ ID NO: 2180234 - RNA, 14 nt, Human
agggcaucuccugu

SEQ ID NO: 2180235 - RNA, 13 nt, Human
agggcaucuccug

SEQ ID NO: 2180236 - RNA, 11 nt, Human
agggcaggcau

SEQ ID NO: 2180237 - RNA, 23 nt, Human
agggcaucuccugugcaugggug

SEQ ID NO: 2180238 - RNA, 21 nt, Human
agggcaucuccugugcauggg

SEQ ID NO: 2180239 - RNA, 12 nt, Human
agggcaucuccu

SEQ ID NO: 2180240 - RNA, 18 nt, Human
agggcaggaaggagagcc

SEQ ID NO: 2180241 - RNA, 16 nt, Human
agggcaggaaggagag

SEQ ID NO: 2180242 - RNA, 13 nt, Human
agggcagcuugcc

SEQ ID NO: 2180243 - RNA, 17 nt, Human
agggcagcuugccccgg

SEQ ID NO: 2180244 - RNA, 18 nt, Human
agggcagcuugccccggc

SEQ ID NO: 2180245 - RNA, 23 nt, Human
agggcagcuugccccggccccgg

SEQ ID NO: 2180246 - RNA, 21 nt, Human
agggcaggaaggagagccugc

SEQ ID NO: 2180247 - RNA, 19 nt, Human
agggcaggaaggagagccu

SEQ ID NO: 2180248 - RNA, 23 nt, Human
agggcaggaaggagagccugcug

SEQ ID NO: 2180249 - RNA, 21 nt, Human
agggcaugcgcacaaggcuga

SEQ ID NO: 2180250 - RNA, 17 nt, Human
agggcaugcgcacaagg

SEQ ID NO: 2180251 - RNA, 23 nt, Human
agggcaugccccggccaccucug

SEQ ID NO: 2180252 - RNA, 20 nt, Human
agggccacaugggaggcuca

SEQ ID NO: 2180253 - RNA, 16 nt, Human
agggccacgugccagg

SEQ ID NO: 2180254 - RNA, 15 nt, Human
agggccacgugccag

SEQ ID NO: 2180255 - RNA, 21 nt, Human
agggccacaugggaggcucac

SEQ ID NO: 2180256 - RNA, 18 nt, Human
agggcaugcauuuugcag

SEQ ID NO: 2180257 - RNA, 22 nt, Human
agggcaugccacgugggcucau

SEQ ID NO: 2180258 - RNA, 15 nt, Human
agggcaugccccggc

SEQ ID NO: 2180259 - RNA, 20 nt, Human
agggcaugccccggccaccu

SEQ ID NO: 2180260 - RNA, 21 nt, Human
agggcaugccccggccaccuc

SEQ ID NO: 2180261 - RNA, 22 nt, Human
agggcaugccccggccaccucu

SEQ ID NO: 2180262 - RNA, 22 nt, Human
agggcaucuugguccaggaaau

SEQ ID NO: 2180263 - RNA, 17 nt, Human
agggcaucuuagcuucu

SEQ ID NO: 2180264 - RNA, 14 nt, Human
agggccacugaaga

SEQ ID NO: 2180265 - RNA, 18 nt, Human
agggccacucugccucug

SEQ ID NO: 2180266 - RNA, 15 nt, Human
agggccacucugccu

SEQ ID NO: 2180267 - RNA, 14 nt, Human
agggccacucugcc

SEQ ID NO: 2180268 - RNA, 20 nt, Human
agggccacgugccaggcccg

SEQ ID NO: 2180269 - RNA, 19 nt, Human
agggccacgugccaggccc

SEQ ID NO: 2180270 - RNA, 18 nt, Human
agggccacgugccaggcc

SEQ ID NO: 2180271 - RNA, 14 nt, Human
agggccagagccag

SEQ ID NO: 2180272 - RNA, 13 nt, Human
agggccagagcca

SEQ ID NO: 2180273 - RNA, 12 nt, Human
agggccagagcc

SEQ ID NO: 2180274 - RNA, 11 nt, Human
agggccagagc

SEQ ID NO: 2180275 - RNA, 23 nt, Human
agggccaguccugccuggccagg

SEQ ID NO: 2180276 - RNA, 22 nt, Human
agggccaguccugccuggccag

SEQ ID NO: 2180277 - RNA, 15 nt, Human
agggccagucugggc

SEQ ID NO: 2180278 - RNA, 21 nt, Human
agggccaguccugccuggcca

SEQ ID NO: 2180279 - RNA, 19 nt, Human
agggccaguccugccuggc

SEQ ID NO: 2180280 - RNA, 16 nt, Human
agggccagagccaggg

SEQ ID NO: 2180281 - RNA, 15 nt, Human
agggccagagccagg

SEQ ID NO: 2180282 - RNA, 17 nt, Human
agggccaugccugcccc

SEQ ID NO: 2180283 - RNA, 18 nt, Human
agggccaugcugaaggga

SEQ ID NO: 2180284 - RNA, 19 nt, Human
agggccaugcugaggccug

SEQ ID NO: 2180285 - RNA, 20 nt, Human
agggccaugcugaggccugg

SEQ ID NO: 2180286 - RNA, 21 nt, Human
agggccaugcugaggccuggg

SEQ ID NO: 2180287 - RNA, 22 nt, Human
agggccaugcugaggccugggc

SEQ ID NO: 2180288 - RNA, 23 nt, Human
agggccaugcugaggccugggcc

SEQ ID NO: 2180289 - RNA, 19 nt, Human
agggcccaagucccuguuu

SEQ ID NO: 2180290 - RNA, 22 nt, Human
agggcccaagucccuguuuucu

SEQ ID NO: 2180291 - RNA, 19 nt, Human
agggccaugcugaagggac

SEQ ID NO: 2180292 - RNA, 16 nt, Human
agggcccaagucccug

SEQ ID NO: 2180293 - RNA, 17 nt, Human
agggcccaagucccugu

SEQ ID NO: 2180294 - RNA, 11 nt, Human
agggcccagag

SEQ ID NO: 2180295 - RNA, 13 nt, Human
agggccccucugc

SEQ ID NO: 2180296 - RNA, 14 nt, Human
agggccccucugcc

SEQ ID NO: 2180297 - RNA, 15 nt, Human
agggccccucugccc

SEQ ID NO: 2180298 - RNA, 16 nt, Human
agggccccucugccca

SEQ ID NO: 2180299 - RNA, 17 nt, Human
agggccccucugcccag

SEQ ID NO: 2180300 - RNA, 18 nt, Human
agggccccucugcccagc

SEQ ID NO: 2180301 - RNA, 19 nt, Human
agggccccucugcccagcu

SEQ ID NO: 2180302 - RNA, 20 nt, Human
agggccccucugcccagcuu

SEQ ID NO: 2180303 - RNA, 19 nt, Human
agggcucagcggggacagc

SEQ ID NO: 2180304 - RNA, 20 nt, Human
agggcucagcggggacagcu

SEQ ID NO: 2180305 - RNA, 22 nt, Human
agggcucagcggggacagcucc

SEQ ID NO: 2180306 - RNA, 23 nt, Human
agggcucagcggggacagcuccu

SEQ ID NO: 2180307 - RNA, 13 nt, Human
agggcucagccug

SEQ ID NO: 2180308 - RNA, 12 nt, Human
agggcucagccu

SEQ ID NO: 2180309 - RNA, 13 nt, Human
agggcccuggugu

SEQ ID NO: 2180310 - RNA, 24 nt, Human
agggcccugguguuucuagcacug

SEQ ID NO: 2180311 - RNA, 15 nt, Human
agggcccuucacugc

SEQ ID NO: 2180312 - RNA, 13 nt, Human
agggcccugcaga

SEQ ID NO: 2180313 - RNA, 12 nt, Human
agggcccugcag

SEQ ID NO: 2180314 - RNA, 18 nt, Human
agggcccugagcugaggg

SEQ ID NO: 2180315 - RNA, 19 nt, Human
agggcccugagcugagggc

SEQ ID NO: 2180316 - RNA, 13 nt, Human
agggcccuaccug

SEQ ID NO: 2180317 - RNA, 21 nt, Human
agggccccucugcccagcuug

SEQ ID NO: 2180318 - RNA, 23 nt, Human
agggccccucugcccagcuuggg

SEQ ID NO: 2180319 - RNA, 16 nt, Human
agggcccugagcucgg

SEQ ID NO: 2180320 - RNA, 15 nt, Human
agggcccugagcuga

SEQ ID NO: 2180321 - RNA, 19 nt, Human
ugggcacgcugugggcagg

SEQ ID NO: 2180322 - RNA, 21 nt, Human
ugggcacgcugugggcaggug

SEQ ID NO: 2180323 - RNA, 14 nt, Human
ugggcacugcuggg

SEQ ID NO: 2180324 - RNA, 16 nt, Human
ugggcacugcugggug

SEQ ID NO: 2180325 - RNA, 17 nt, Human
ugggcacugcugggugg

SEQ ID NO: 2180326 - RNA, 20 nt, Human
ugggcaccuggggaguggga

SEQ ID NO: 2180327 - RNA, 19 nt, Human
ugggcaccuggggaguggg

SEQ ID NO: 2180328 - RNA, 17 nt, Human
ugggcaccuggggagug

SEQ ID NO: 2180329 - RNA, 18 nt, Human
ugggaggccccacugggg

SEQ ID NO: 2180330 - RNA, 15 nt, Human
ugggcaccuggggag

SEQ ID NO: 2180331 - RNA, 20 nt, Human
ugggaggccccacuggggaa

SEQ ID NO: 2180332 - RNA, 16 nt, Human
ugggaggccccacugg

SEQ ID NO: 2180333 - RNA, 14 nt, Human
ugggaggccaagga

SEQ ID NO: 2180334 - RNA, 23 nt, Human
ugggaggcaagagggguggagac

SEQ ID NO: 2180335 - RNA, 18 nt, Human
ugggaggcauggcccugg

SEQ ID NO: 2180336 - RNA, 16 nt, Human
ugggaggcauggcccu

SEQ ID NO: 2180337 - RNA, 18 nt, Human
ugggaggcaagaggggug

SEQ ID NO: 2180338 - RNA, 19 nt, Human
ugggaggcaagaggggugg

SEQ ID NO: 2180339 - RNA, 20 nt, Human
ugggaggccaaggugggagg

SEQ ID NO: 2180340 - RNA, 19 nt, Human
ugggaggccaaggugggag

SEQ ID NO: 2180341 - RNA, 22 nt, Human
ugggaggaucucuugagccugg

SEQ ID NO: 2180342 - RNA, 21 nt, Human
ugggaggaucucuugagccug

SEQ ID NO: 2180343 - RNA, 20 nt, Human
ugggaggaucucuugagccu

SEQ ID NO: 2180344 - RNA, 15 nt, Human
ugggcagaaggccaa

SEQ ID NO: 2180345 - RNA, 23 nt, Human
ugggcacugcuggguggcccauc

SEQ ID NO: 2180346 - RNA, 15 nt, Human
ugggcacugggauga

SEQ ID NO: 2180347 - RNA, 16 nt, Human
ugggcacugggaugag

SEQ ID NO: 2180348 - RNA, 15 nt, Human
ugggcacuuuuuaau

SEQ ID NO: 2180349 - RNA, 16 nt, Human
ugggcagaaggccaag

SEQ ID NO: 2180350 - RNA, 17 nt, Human
ugggcagaaggccaaga

SEQ ID NO: 2180351 - RNA, 18 nt, Human
ugggcagaaggccaagag

SEQ ID NO: 2180352 - RNA, 15 nt, Human
ugggcagaagggaga

SEQ ID NO: 2180353 - RNA, 17 nt, Human
ugggcagaagggagaag

SEQ ID NO: 2180354 - RNA, 21 nt, Human
ugggcacugcuggguggccca

SEQ ID NO: 2180355 - RNA, 22 nt, Human
ugggcacugcuggguggcccau

SEQ ID NO: 2180356 - RNA, 22 nt, Human
ugggcacugggaugagccgcug

SEQ ID NO: 2180357 - RNA, 12 nt, Human
ugggcagaagga

SEQ ID NO: 2180358 - RNA, 11 nt, Human
ugggcagagca

SEQ ID NO: 2180359 - RNA, 12 nt, Human
ugggcagagcag

SEQ ID NO: 2180360 - RNA, 18 nt, Human
ugggccaggagccuccug

SEQ ID NO: 2180361 - RNA, 13 nt, Human
ugggcagagcaga

SEQ ID NO: 2180362 - RNA, 15 nt, Human
ugggccccucuccca

SEQ ID NO: 2180363 - RNA, 19 nt, Human
ugggccccucaucugcuca

SEQ ID NO: 2180364 - RNA, 23 nt, Human
ugggccccucaucugcucagcag

SEQ ID NO: 2180365 - RNA, 21 nt, Human
ugggcccccaaauggaaaugg

SEQ ID NO: 2180366 - RNA, 22 nt, Human
ugggccccaguuguauuuauuu

SEQ ID NO: 2180367 - RNA, 15 nt, Human
ugggccccagccuuc

SEQ ID NO: 2180368 - RNA, 16 nt, Human
ugggcccccaaaugga

SEQ ID NO: 2180369 - RNA, 14 nt, Human
ugggccaguguggg

SEQ ID NO: 2180370 - RNA, 15 nt, Human
ugggccauacuggcc

SEQ ID NO: 2180371 - RNA, 20 nt, Human
ugggccagucuguggaucag

SEQ ID NO: 2180372 - RNA, 16 nt, Human
ugggccagucugugga

SEQ ID NO: 2180373 - RNA, 18 nt, Human
ugggcagaagggagaagg

SEQ ID NO: 2180374 - RNA, 19 nt, Human
ugggcagaagggagaagga

SEQ ID NO: 2180375 - RNA, 24 nt, Human
ugggccauacuggccucgccuggc

SEQ ID NO: 2180376 - RNA, 18 nt, Human
ugggccauagcuccugcu

SEQ ID NO: 2180377 - RNA, 16 nt, Human
ugggccauacuggccu

SEQ ID NO: 2180378 - RNA, 17 nt, Human
ugggccauacuggccuc

SEQ ID NO: 2180379 - RNA, 18 nt, Human
ugggccauacuggccucg

SEQ ID NO: 2180380 - RNA, 20 nt, Human
ugggccauacuggccucgcc

SEQ ID NO: 2180381 - RNA, 18 nt, Human
ugggccccaguuguauuu

SEQ ID NO: 2180382 - RNA, 17 nt, Human
ugggccccagcccaccc

SEQ ID NO: 2180383 - RNA, 18 nt, Human
ugggccccagcccacccu

SEQ ID NO: 2180384 - RNA, 20 nt, Human
ugggccccagcccacccucc

SEQ ID NO: 2180385 - RNA, 22 nt, Human
ugggccccagcccacccuccug

SEQ ID NO: 2180386 - RNA, 18 nt, Human
ugggaggccuaggcgggc

SEQ ID NO: 2180387 - RNA, 14 nt, Human
agggaggcaagccc

SEQ ID NO: 2180388 - RNA, 13 nt, Human
agggaggcaagcc

SEQ ID NO: 2180389 - RNA, 16 nt, Human
agggaggcaagcccug

SEQ ID NO: 2180390 - RNA, 15 nt, Human
ugggccccugccaga

SEQ ID NO: 2180391 - RNA, 15 nt, Human
ugggccccugccucu

SEQ ID NO: 2180392 - RNA, 19 nt, Human
ugggccccugccucucugc

SEQ ID NO: 2180393 - RNA, 15 nt, Human
agggagggagggcuc

SEQ ID NO: 2180394 - RNA, 13 nt, Human
agggagggcucca

SEQ ID NO: 2180395 - RNA, 15 nt, Human
agggaggcaagcccu

SEQ ID NO: 2180396 - RNA, 18 nt, Human
agggagggacauggcccc

SEQ ID NO: 2180397 - RNA, 14 nt, Human
ugggguccagggag

SEQ ID NO: 2180398 - RNA, 20 nt, Human
uggggucaugcccuccucuc

SEQ ID NO: 2180399 - RNA, 18 nt, Human
uggggucaugcccuccuc

SEQ ID NO: 2180400 - RNA, 13 nt, Human
uggggucaugccc

SEQ ID NO: 2180401 - RNA, 12 nt, Human
ugggguccuggc

SEQ ID NO: 2180402 - RNA, 13 nt, Human
uggggucccucua

SEQ ID NO: 2180403 - RNA, 20 nt, Human
ugggguccuggagcagacca

SEQ ID NO: 2180404 - RNA, 13 nt, Human
ugggguccccauc

SEQ ID NO: 2180405 - RNA, 22 nt, Human
uggggucucccucuccugccua

SEQ ID NO: 2180406 - RNA, 21 nt, Human
uggggucucccucuccugccu

SEQ ID NO: 2180407 - RNA, 19 nt, Human
uggggucucccucuccugc

SEQ ID NO: 2180408 - RNA, 13 nt, Human
uggggucucccuc

SEQ ID NO: 2180409 - RNA, 23 nt, Human
uggggucucacaguguugcccag

SEQ ID NO: 2180410 - RNA, 21 nt, Human
uggggucucacaguguugccc

SEQ ID NO: 2180411 - RNA, 16 nt, Human
ugggguccuggggccu

SEQ ID NO: 2180412 - RNA, 16 nt, Human
ugggguccuggccauc

SEQ ID NO: 2180413 - RNA, 15 nt, Human
ugggguccuggccau

SEQ ID NO: 2180414 - RNA, 19 nt, Human
ugggguccuggccauccca

SEQ ID NO: 2180415 - RNA, 16 nt, Human
uggggcugggcagcua

SEQ ID NO: 2180416 - RNA, 20 nt, Human
ugggguauuuaccacagcag

SEQ ID NO: 2180417 - RNA, 24 nt, Human
ugggguauuuaccacagcagcuga

SEQ ID NO: 2180418 - RNA, 21 nt, Human
ugggguauuuggggcuuauuu

SEQ ID NO: 2180419 - RNA, 16 nt, Human
uggggucacucuggca

SEQ ID NO: 2180420 - RNA, 21 nt, Human
uggggucagccagggccaggg

SEQ ID NO: 2180421 - RNA, 18 nt, Human
uggggucagccagggcca

SEQ ID NO: 2180422 - RNA, 19 nt, Human
uggggucagccagggccag

SEQ ID NO: 2180423 - RNA, 17 nt, Human
uggggucagagacugcu

SEQ ID NO: 2180424 - RNA, 13 nt, Human
uggggucagccag

SEQ ID NO: 2180425 - RNA, 14 nt, Human
uggggucagccagg

SEQ ID NO: 2180426 - RNA, 15 nt, Human
uggggucagccaggg

SEQ ID NO: 2180427 - RNA, 22 nt, Human
uggggucacucuggcagcucag

SEQ ID NO: 2180428 - RNA, 17 nt, Human
uggggcugcuccuccag

SEQ ID NO: 2180429 - RNA, 16 nt, Human
uggggcugcuccucca

SEQ ID NO: 2180430 - RNA, 15 nt, Human
uggggcugcuccucc

SEQ ID NO: 2180431 - RNA, 14 nt, Human
uggggcugcuccuc

SEQ ID NO: 2180432 - RNA, 21 nt, Human
uggggcugcuccuccagggcc

SEQ ID NO: 2180433 - RNA, 19 nt, Human
uggggcugcuccuccaggg

SEQ ID NO: 2180434 - RNA, 12 nt, Human
uggggcugcugg

SEQ ID NO: 2180435 - RNA, 13 nt, Human
uggggcugcuggc

SEQ ID NO: 2180436 - RNA, 14 nt, Human
uggggcuggccucc

SEQ ID NO: 2180437 - RNA, 14 nt, Human
uggggcuggcacaa

SEQ ID NO: 2180438 - RNA, 17 nt, Human
ugggguacccacugcuc

SEQ ID NO: 2180439 - RNA, 18 nt, Human
ugggguacccacugcucu

SEQ ID NO: 2180440 - RNA, 19 nt, Human
ugggguacccacugcucug

SEQ ID NO: 2180441 - RNA, 13 nt, Human
uggggucacucug

SEQ ID NO: 2180442 - RNA, 14 nt, Human
uggggucacucugg

SEQ ID NO: 2180443 - RNA, 19 nt, Human
aggggaauaauagaagaac

SEQ ID NO: 2180444 - RNA, 18 nt, Human
aggggaauaauagaagaa

SEQ ID NO: 2180445 - RNA, 17 nt, Human
aggggaauaauagaaga

SEQ ID NO: 2180446 - RNA, 23 nt, Human
aggggaagggccagucugggcug

SEQ ID NO: 2180447 - RNA, 14 nt, Human
aggggaagggccag

SEQ ID NO: 2180448 - RNA, 13 nt, Human
aggggaauguuug

SEQ ID NO: 2180449 - RNA, 22 nt, Human
aggggaagaguguacugggggu

SEQ ID NO: 2180450 - RNA, 21 nt, Human
aggggaauaaacuguugaguc

SEQ ID NO: 2180451 - RNA, 16 nt, Human
aggggaagaguguacu

SEQ ID NO: 2180452 - RNA, 18 nt, Human
aggggaagaguguacugg

SEQ ID NO: 2180453 - RNA, 22 nt, Human
aggggaaaaucagccugcucca

SEQ ID NO: 2180454 - RNA, 18 nt, Human
aggggaaaaucagccugc

SEQ ID NO: 2180455 - RNA, 14 nt, Human
aggggaacagacug

SEQ ID NO: 2180456 - RNA, 21 nt, Human
aggggaaaccaguguagccuu

SEQ ID NO: 2180457 - RNA, 20 nt, Human
aggggaaaccaguguagccu

SEQ ID NO: 2180458 - RNA, 23 nt, Human
aggggaaaccaguguagccuugc

SEQ ID NO: 2180459 - RNA, 13 nt, Human
aggggaaaaugaa

SEQ ID NO: 2180460 - RNA, 15 nt, Human
uggggugccgccugc

SEQ ID NO: 2180461 - RNA, 17 nt, Human
uggggugccgccugccc

SEQ ID NO: 2180462 - RNA, 13 nt, Human
uggggugcuggga

SEQ ID NO: 2180463 - RNA, 17 nt, Human
uggggugaugcugggcu

SEQ ID NO: 2180464 - RNA, 17 nt, Human
uggggugaggaccacuc

SEQ ID NO: 2180465 - RNA, 14 nt, Human
uggggugaggacca

SEQ ID NO: 2180466 - RNA, 16 nt, Human
uggggucuguaaaauc

SEQ ID NO: 2180467 - RNA, 21 nt, Human
uggggucuggaguugaucugg

SEQ ID NO: 2180468 - RNA, 14 nt, Human
uggggucugacccc

SEQ ID NO: 2180469 - RNA, 17 nt, Human
uggggucuggcagccuc

SEQ ID NO: 2180470 - RNA, 14 nt, Human
uggggucuggcagc

SEQ ID NO: 2180471 - RNA, 18 nt, Human
uggggucuggcagccucc

SEQ ID NO: 2180472 - RNA, 13 nt, Human
uggggucuguaaa

SEQ ID NO: 2180473 - RNA, 15 nt, Human
uggggugggagaggu

SEQ ID NO: 2180474 - RNA, 13 nt, Human
uggggugggagag

SEQ ID NO: 2180475 - RNA, 12 nt, Human
uggggugggccu

SEQ ID NO: 2180476 - RNA, 16 nt, Human
uggggugggccucugg

SEQ ID NO: 2180477 - RNA, 18 nt, Human
uggggugcugggaggagg

SEQ ID NO: 2180478 - RNA, 18 nt, Human
agggcuuuguuuugcaca

SEQ ID NO: 2180479 - RNA, 13 nt, Human
aggggaaaagagg

SEQ ID NO: 2180480 - RNA, 22 nt, Human
uggggaggcggacguuccagcc

SEQ ID NO: 2180481 - RNA, 14 nt, Human
uggggagggauuug

SEQ ID NO: 2180482 - RNA, 23 nt, Human
uggggaggcggacguuccagccg

SEQ ID NO: 2180483 - RNA, 18 nt, Human
uggggagggauucugguu

SEQ ID NO: 2180484 - RNA, 17 nt, Human
uggggagcagagacacu

SEQ ID NO: 2180485 - RNA, 15 nt, Human
uggggagcagagaca

SEQ ID NO: 2180486 - RNA, 16 nt, Human
uggggagccaacagaa

SEQ ID NO: 2180487 - RNA, 22 nt, Human
uggggagccaacagaagcuucc

SEQ ID NO: 2180488 - RNA, 18 nt, Human
uggggagcccgucucagu

SEQ ID NO: 2180489 - RNA, 19 nt, Human
uggggagcccgucucagug

SEQ ID NO: 2180490 - RNA, 21 nt, Human
uggggagcccgucucaguguu

SEQ ID NO: 2180491 - RNA, 21 nt, Human
agggcucugauauuccaugaa

SEQ ID NO: 2180492 - RNA, 15 nt, Human
agggcucuuuagcca

SEQ ID NO: 2180493 - RNA, 17 nt, Human
agggcucugauauucca

SEQ ID NO: 2180494 - RNA, 20 nt, Human
agggcugacacguccacccc

SEQ ID NO: 2180495 - RNA, 14 nt, Human
agggcugaaagcca

SEQ ID NO: 2180496 - RNA, 17 nt, Human
uggggagacugggcuga

SEQ ID NO: 2180497 - RNA, 21 nt, Human
uggggagacugggcugaggga

SEQ ID NO: 2180498 - RNA, 16 nt, Human
uggggaccucaggccu

SEQ ID NO: 2180499 - RNA, 17 nt, Human
uggggaccucaggccug

SEQ ID NO: 2180500 - RNA, 22 nt, Human
agggcucugauauuccaugaau

SEQ ID NO: 2180501 - RNA, 15 nt, Human
agggcucugauauuc

SEQ ID NO: 2180502 - RNA, 14 nt, Human
agggcucugaccag

SEQ ID NO: 2180503 - RNA, 15 nt, Human
agggcucugaccagu

SEQ ID NO: 2180504 - RNA, 19 nt, Human
agggcucucuuuccuucuu

SEQ ID NO: 2180505 - RNA, 21 nt, Human
agggcucucuuuccuucuugc

SEQ ID NO: 2180506 - RNA, 14 nt, Human
uggggaccucaggc

SEQ ID NO: 2180507 - RNA, 15 nt, Human
uggggaccucaggcc

SEQ ID NO: 2180508 - RNA, 15 nt, Human
agggcucuaaaaaaa

SEQ ID NO: 2180509 - RNA, 23 nt, Human
agggcucuaaaaaaagccccaaa

SEQ ID NO: 2180510 - RNA, 24 nt, Human
agggcucaggauuucgugggucug

SEQ ID NO: 2180511 - RNA, 13 nt, Human
agggcucaggauu

SEQ ID NO: 2180512 - RNA, 23 nt, Human
agggcucaggauuucgugggucu

SEQ ID NO: 2180513 - RNA, 15 nt, Human
agggcucagccuggu

SEQ ID NO: 2180514 - RNA, 14 nt, Human
agggcucagccugg

SEQ ID NO: 2180515 - RNA, 15 nt, Human
agggcuccagacaca

SEQ ID NO: 2180516 - RNA, 12 nt, Human
agggcuccagac

SEQ ID NO: 2180517 - RNA, 12 nt, Human
uggggccucugu

SEQ ID NO: 2180518 - RNA, 20 nt, Human
uggggccuaucagugugccc

SEQ ID NO: 2180519 - RNA, 11 nt, Human
uggggccucug

SEQ ID NO: 2180520 - RNA, 20 nt, Human
uggggccuccagaacucacu

SEQ ID NO: 2180521 - RNA, 14 nt, Human
uggggccuccagaa

SEQ ID NO: 2180522 - RNA, 19 nt, Human
uggggccuaucagugugcc

SEQ ID NO: 2180523 - RNA, 22 nt, Human
uggggccuaucagugugccccc

SEQ ID NO: 2180524 - RNA, 22 nt, Human
uggggccccuuuuuacuccccu

SEQ ID NO: 2180525 - RNA, 21 nt, Human
uggggccccuuuuuacucccc

SEQ ID NO: 2180526 - RNA, 23 nt, Human
uggggaggggcgcuggcccagcc

SEQ ID NO: 2180527 - RNA, 12 nt, Human
uggggcccugcc

SEQ ID NO: 2180528 - RNA, 21 nt, Human
uggggccaguuggucccccuu

SEQ ID NO: 2180529 - RNA, 22 nt, Human
uggggagggauuuggggcucag

SEQ ID NO: 2180530 - RNA, 22 nt, Human
uggggagggauucugguuccag

SEQ ID NO: 2180531 - RNA, 17 nt, Human
uggggagggccguaccc

SEQ ID NO: 2180532 - RNA, 21 nt, Human
uggggagggccguaccccacc

SEQ ID NO: 2180533 - RNA, 21 nt, Human
uggggaggggcgcuggcccag

SEQ ID NO: 2180534 - RNA, 22 nt, Human
uggggaggggcgcuggcccagc

SEQ ID NO: 2180535 - RNA, 12 nt, Human
uggggaggggcg

SEQ ID NO: 2180536 - RNA, 15 nt, Human
uggggaggggcgcug

SEQ ID NO: 2180537 - RNA, 19 nt, Human
uggggaggggcgcuggccc

SEQ ID NO: 2180538 - RNA, 20 nt, Human
uggggaggggcgcuggccca

SEQ ID NO: 2180539 - RNA, 14 nt, Human
uggggcucccgccc

SEQ ID NO: 2180540 - RNA, 11 nt, Human
uggggcuccuu

SEQ ID NO: 2180541 - RNA, 21 nt, Human
uggggcuccuuucuccagcca

SEQ ID NO: 2180542 - RNA, 23 nt, Human
uggggcuccuuucuccagccagc

SEQ ID NO: 2180543 - RNA, 13 nt, Human
uggggcucgccau

SEQ ID NO: 2180544 - RNA, 17 nt, Human
uggggcucgccaugccg

SEQ ID NO: 2180545 - RNA, 22 nt, Human
uggggcugcaccggcuggccug

SEQ ID NO: 2180546 - RNA, 23 nt, Human
uggggcugcaccggcuggccugg

SEQ ID NO: 2180547 - RNA, 15 nt, Human
uggggcucagagugg

SEQ ID NO: 2180548 - RNA, 20 nt, Human
uggggcuagggggagccccu

SEQ ID NO: 2180549 - RNA, 17 nt, Human
uggggcucacacaccug

SEQ ID NO: 2180550 - RNA, 19 nt, Human
uggggccugauggggaggg

SEQ ID NO: 2180551 - RNA, 15 nt, Human
uggggccuggaccug

SEQ ID NO: 2180552 - RNA, 16 nt, Human
uggggccuggaccugc

SEQ ID NO: 2180553 - RNA, 17 nt, Human
uggggccuggaccugcc

SEQ ID NO: 2180554 - RNA, 19 nt, Human
uggggccuggaccugccuc

SEQ ID NO: 2180555 - RNA, 20 nt, Human
uggggccuggaccugccucc

SEQ ID NO: 2180556 - RNA, 15 nt, Human
uggggccuggagcag

SEQ ID NO: 2180557 - RNA, 21 nt, Human
ugggugagaugcuggagaaga

SEQ ID NO: 2180558 - RNA, 23 nt, Human
ugggugccccccuugccagacau

SEQ ID NO: 2180559 - RNA, 17 nt, Human
ugggugcccaagcucag

SEQ ID NO: 2180560 - RNA, 18 nt, Human
ugggugcccaagcucaga

SEQ ID NO: 2180561 - RNA, 13 nt, Human
ugggugcgacccc

SEQ ID NO: 2180562 - RNA, 18 nt, Human
uggguccuuuucagaagu

SEQ ID NO: 2180563 - RNA, 15 nt, Human
ugggugaagggagag

SEQ ID NO: 2180564 - RNA, 14 nt, Human
ugggugacagagca

SEQ ID NO: 2180565 - RNA, 17 nt, Human
ugggugacagagcaaga

SEQ ID NO: 2180566 - RNA, 12 nt, Human
ugggugacauuu

SEQ ID NO: 2180567 - RNA, 23 nt, Human
ugggugaccaguugcacuuggcc

SEQ ID NO: 2180568 - RNA, 13 nt, Human
ugggugagaacaa

SEQ ID NO: 2180569 - RNA, 18 nt, Human
ugggugagaugcuggaga

SEQ ID NO: 2180570 - RNA, 19 nt, Human
ugggugagaugcuggagaa

SEQ ID NO: 2180571 - RNA, 17 nt, Human
ugggucccccacgugac

SEQ ID NO: 2180572 - RNA, 18 nt, Human
uggguccucacaucuuuc

SEQ ID NO: 2180573 - RNA, 21 nt, Human
uggguccugggucuuucaugg

SEQ ID NO: 2180574 - RNA, 22 nt, Human
ugggucccacuuccccuccuac

SEQ ID NO: 2180575 - RNA, 17 nt, Human
ugggucccacuuccccu

SEQ ID NO: 2180576 - RNA, 19 nt, Human
ugggucccacuuccccucc

SEQ ID NO: 2180577 - RNA, 20 nt, Human
ugggucccacuuccccuccu

SEQ ID NO: 2180578 - RNA, 16 nt, Human
ugggucgcccuggacu

SEQ ID NO: 2180579 - RNA, 18 nt, Human
ugggucgcccuggacugu

SEQ ID NO: 2180580 - RNA, 17 nt, Human
agggucuucccuaccuc

SEQ ID NO: 2180581 - RNA, 14 nt, Human
agggucuugggaaa

SEQ ID NO: 2180582 - RNA, 15 nt, Human
agggucuucccuacc

SEQ ID NO: 2180583 - RNA, 15 nt, Human
agggucuggagaagc

SEQ ID NO: 2180584 - RNA, 17 nt, Human
agggucugggcaggacu

SEQ ID NO: 2180585 - RNA, 19 nt, Human
agggucuggagaagcagug

SEQ ID NO: 2180586 - RNA, 14 nt, Human
agggucuggagaag

SEQ ID NO: 2180587 - RNA, 13 nt, Human
agggucuggagaa

SEQ ID NO: 2180588 - RNA, 23 nt, Human
agggucugcucuuucucugccag

SEQ ID NO: 2180589 - RNA, 21 nt, Human
agggucugcucuuucucugcc

SEQ ID NO: 2180590 - RNA, 22 nt, Human
agggucugcucuuucucugcca

SEQ ID NO: 2180591 - RNA, 13 nt, Human
agggucugcucuu

SEQ ID NO: 2180592 - RNA, 14 nt, Human
agggucugcucuuu

SEQ ID NO: 2180593 - RNA, 17 nt, Human
agggucugcucuuucuc

SEQ ID NO: 2180594 - RNA, 20 nt, Human
agggucugcucuuucucugc

SEQ ID NO: 2180595 - RNA, 18 nt, Human
agggugggauggaggaga

SEQ ID NO: 2180596 - RNA, 17 nt, Human
agggugggauggaggag

SEQ ID NO: 2180597 - RNA, 15 nt, Human
agggucuugggaaau

SEQ ID NO: 2180598 - RNA, 16 nt, Human
agggucuugggaaaua

SEQ ID NO: 2180599 - RNA, 16 nt, Human
aggguggugaccucug

SEQ ID NO: 2180600 - RNA, 18 nt, Human
uggguccaugggcagagc

SEQ ID NO: 2180601 - RNA, 14 nt, Human
agggugggcuucag

SEQ ID NO: 2180602 - RNA, 21 nt, Human
uggguggcaccagcagccugg

SEQ ID NO: 2180603 - RNA, 19 nt, Human
ugggugcgaccccaucugc

SEQ ID NO: 2180604 - RNA, 20 nt, Human
ugggugcgaccccaucugcc

SEQ ID NO: 2180605 - RNA, 21 nt, Human
ugggugcgaccccaucugccc

SEQ ID NO: 2180606 - RNA, 22 nt, Human
ugggugcgaccccaucugccca

SEQ ID NO: 2180607 - RNA, 20 nt, Human
uggguggcaccagcagccug

SEQ ID NO: 2180608 - RNA, 17 nt, Human
uggguggcaccagcagc

SEQ ID NO: 2180609 - RNA, 21 nt, Human
ugguaaauuaguauuuauuua

SEQ ID NO: 2180610 - RNA, 16 nt, Human
ugguaaauuuccccaa

SEQ ID NO: 2180611 - RNA, 19 nt, Human
ugguaaauuuccccaacag

SEQ ID NO: 2180612 - RNA, 23 nt, Human
ugggugcgaccccaucugcccag

SEQ ID NO: 2180613 - RNA, 21 nt, Human
ugguaacauccuuucuauuga

SEQ ID NO: 2180614 - RNA, 18 nt, Human
ugguaacaguucauguuu

SEQ ID NO: 2180615 - RNA, 21 nt, Human
ugguaacaguucauguuugcu

SEQ ID NO: 2180616 - RNA, 20 nt, Human
ugguaaauuuccccaacagu

SEQ ID NO: 2180617 - RNA, 22 nt, Human
ugguaaauuuccccaacagugu

SEQ ID NO: 2180618 - RNA, 23 nt, Human
ugguaaauuuccccaacagugug

SEQ ID NO: 2180619 - RNA, 17 nt, Human
ugguaacaguucauguu

SEQ ID NO: 2180620 - RNA, 22 nt, Human
ugguaagaagccgggaacagac

SEQ ID NO: 2180621 - RNA, 13 nt, Human
ugguaacuguuaa

SEQ ID NO: 2180622 - RNA, 20 nt, Human
ugguagagugugccugaagu

SEQ ID NO: 2180623 - RNA, 20 nt, Human
ugguagaauuggagaguaaa

SEQ ID NO: 2180624 - RNA, 23 nt, Human
ugguacuuuuaugauguauauuu

SEQ ID NO: 2180625 - RNA, 21 nt, Human
ugguacuuuuaugauguauau

SEQ ID NO: 2180626 - RNA, 22 nt, Human
ugguacuuuuaugauguauauu

SEQ ID NO: 2180627 - RNA, 19 nt, Human
ugguagccaguugaauuua

SEQ ID NO: 2180628 - RNA, 12 nt, Human
ugguagcucagg

SEQ ID NO: 2180629 - RNA, 17 nt, Human
ugguagaccaaaauaaa

SEQ ID NO: 2180630 - RNA, 22 nt, Human
ugguagagaccgagccucuguc

SEQ ID NO: 2180631 - RNA, 13 nt, Human
ugguagagauuca

SEQ ID NO: 2180632 - RNA, 14 nt, Human
ugguaccagauaaa

SEQ ID NO: 2180633 - RNA, 15 nt, Human
ugguaccagauaaaa

SEQ ID NO: 2180634 - RNA, 18 nt, Human
ugguaccagauaaaauua

SEQ ID NO: 2180635 - RNA, 15 nt, Human
ugguaccaggucucc

SEQ ID NO: 2180636 - RNA, 18 nt, Human
ugguaccaggucuccucc

SEQ ID NO: 2180637 - RNA, 13 nt, Human
ugguacccagcca

SEQ ID NO: 2180638 - RNA, 14 nt, Human
ugguacccagccau

SEQ ID NO: 2180639 - RNA, 15 nt, Human
ugguacccuccuggc

SEQ ID NO: 2180640 - RNA, 16 nt, Human
ugguacccuccuggcu

SEQ ID NO: 2180641 - RNA, 21 nt, Human
ugguacccuccuggcucuuga

SEQ ID NO: 2180642 - RNA, 14 nt, Human
ugguacccucugga

SEQ ID NO: 2180643 - RNA, 17 nt, Human
ugguacccagccaucug

SEQ ID NO: 2180644 - RNA, 18 nt, Human
ugguacccagccaucugc

SEQ ID NO: 2180645 - RNA, 19 nt, Human
ugguacccagccaucugcc

SEQ ID NO: 2180646 - RNA, 21 nt, Human
ugguacccagccaucugccca

SEQ ID NO: 2180647 - RNA, 22 nt, Human
ugguacccagccaucugcccag

SEQ ID NO: 2180648 - RNA, 16 nt, Human
ugguacccccuucugg

SEQ ID NO: 2180649 - RNA, 17 nt, Human
ugguacccccuucuggg

SEQ ID NO: 2180650 - RNA, 20 nt, Human
ugguacccccuucugggcau

SEQ ID NO: 2180651 - RNA, 10 nt, Human
agggggccac

SEQ ID NO: 2180652 - RNA, 15 nt, Human
agggggccaccuccc

SEQ ID NO: 2180653 - RNA, 21 nt, Human
aggggcugcuuccuccuggaa

SEQ ID NO: 2180654 - RNA, 19 nt, Human
agggggccaccuccccagg

SEQ ID NO: 2180655 - RNA, 15 nt, Human
agggggccaggugca

SEQ ID NO: 2180656 - RNA, 22 nt, Human
aggggcugcugaccuccacagc

SEQ ID NO: 2180657 - RNA, 23 nt, Human
aggggcuccuggaaaggcucagu

SEQ ID NO: 2180658 - RNA, 14 nt, Human
aggggcuccuggaa

SEQ ID NO: 2180659 - RNA, 13 nt, Human
aggggcuccugga

SEQ ID NO: 2180660 - RNA, 11 nt, Human
aggggagcccu

SEQ ID NO: 2180661 - RNA, 12 nt, Human
aggggagcccuc

SEQ ID NO: 2180662 - RNA, 15 nt, Human
aggggcucuggagag

SEQ ID NO: 2180663 - RNA, 17 nt, Human
aggggcucuggagagaa

SEQ ID NO: 2180664 - RNA, 21 nt, Human
aggggcucuggagagaaacaa

SEQ ID NO: 2180665 - RNA, 17 nt, Human
aggggcucucagcucag

SEQ ID NO: 2180666 - RNA, 16 nt, Human
aggggagcccuccacg

SEQ ID NO: 2180667 - RNA, 22 nt, Human
aggggcucucagcucagcgcca

SEQ ID NO: 2180668 - RNA, 15 nt, Human
aggggcugcuuccuc

SEQ ID NO: 2180669 - RNA, 16 nt, Human
aggggcugcuuccucc

SEQ ID NO: 2180670 - RNA, 18 nt, Human
aggggcugcuuccuccug

SEQ ID NO: 2180671 - RNA, 20 nt, Human
aggggcugcuuccuccugga

SEQ ID NO: 2180672 - RNA, 20 nt, Human
aggggcugaaagaacaugga

SEQ ID NO: 2180673 - RNA, 12 nt, Human
aggggcugcccg

SEQ ID NO: 2180674 - RNA, 13 nt, Human
aggggcugcccgc

SEQ ID NO: 2180675 - RNA, 15 nt, Human
aggggcugcccgcuc

SEQ ID NO: 2180676 - RNA, 16 nt, Human
aggggcugcccgcucc

SEQ ID NO: 2180677 - RNA, 17 nt, Human
aggggcugcccgcuccc

SEQ ID NO: 2180678 - RNA, 19 nt, Human
aggggcugcccgcucccag

SEQ ID NO: 2180679 - RNA, 20 nt, Human
aggggcugcccgcucccagu

SEQ ID NO: 2180680 - RNA, 19 nt, Human
aggggaauguuugccucug

SEQ ID NO: 2180681 - RNA, 20 nt, Human
aggggaauguuugccucugc

SEQ ID NO: 2180682 - RNA, 21 nt, Human
aggggaauguuugccucugcc

SEQ ID NO: 2180683 - RNA, 16 nt, Human
aggggaauugaggaca

SEQ ID NO: 2180684 - RNA, 18 nt, Human
aggggagcaugggaagug

SEQ ID NO: 2180685 - RNA, 16 nt, Human
aggggaaucagaacuc

SEQ ID NO: 2180686 - RNA, 15 nt, Human
aggggaaucagaacu

SEQ ID NO: 2180687 - RNA, 12 nt, Human
aggggagcccac

SEQ ID NO: 2180688 - RNA, 24 nt, Human
aggggagcccacuguccugggccu

SEQ ID NO: 2180689 - RNA, 21 nt, Human
aggggagcccacuguccuggg

SEQ ID NO: 2180690 - RNA, 17 nt, Human
aggggagcccacugucc

SEQ ID NO: 2180691 - RNA, 13 nt, Human
aggggagcccacu

SEQ ID NO: 2180692 - RNA, 20 nt, Human
agggguugguugagguggaa

SEQ ID NO: 2180693 - RNA, 17 nt, Human
agggguuuggucuggga

SEQ ID NO: 2180694 - RNA, 20 nt, Human
agggguuuuaggucucuucc

SEQ ID NO: 2180695 - RNA, 23 nt, Human
agggguugguugagguggaagcc

SEQ ID NO: 2180696 - RNA, 19 nt, Human
agggguugguugaggugga

SEQ ID NO: 2180697 - RNA, 21 nt, Human
agggguggcugccucauuuag

SEQ ID NO: 2180698 - RNA, 20 nt, Human
agggguggcugccucauuua

SEQ ID NO: 2180699 - RNA, 20 nt, Human
agggguggagacugcuuccc

SEQ ID NO: 2180700 - RNA, 22 nt, Human
agggguugccacaggccucccu

SEQ ID NO: 2180701 - RNA, 23 nt, Human
agggguugccacaggccucccug

SEQ ID NO: 2180702 - RNA, 21 nt, Human
agggguuuucgaagcucagcc

SEQ ID NO: 2180703 - RNA, 22 nt, Human
agggguuuuaggucucuucccc

SEQ ID NO: 2180704 - RNA, 22 nt, Human
agggguuuucgaagcucagccc

SEQ ID NO: 2180705 - RNA, 15 nt, Human
aggguaaggcugugg

SEQ ID NO: 2180706 - RNA, 14 nt, Human
agggucucacucug

SEQ ID NO: 2180707 - RNA, 15 nt, Human
agggucucacucugu

SEQ ID NO: 2180708 - RNA, 14 nt, Human
aggguaaggugccu

SEQ ID NO: 2180709 - RNA, 16 nt, Human
agggucucacucuguc

SEQ ID NO: 2180710 - RNA, 15 nt, Human
aggggucaggcucca

SEQ ID NO: 2180711 - RNA, 13 nt, Human
aggggugauuuca

SEQ ID NO: 2180712 - RNA, 17 nt, Human
aggggugauuucagaga

SEQ ID NO: 2180713 - RNA, 13 nt, Human
aggggucaggcuc

SEQ ID NO: 2180714 - RNA, 16 nt, Human
aggggucaaagaaaug

SEQ ID NO: 2180715 - RNA, 22 nt, Human
aggggugauuucagagagggca

SEQ ID NO: 2180716 - RNA, 11 nt, Human
aggggugcccc

SEQ ID NO: 2180717 - RNA, 13 nt, Human
aggggugcccccu

SEQ ID NO: 2180718 - RNA, 16 nt, Human
aggggugcccccuccu

SEQ ID NO: 2180719 - RNA, 17 nt, Human
aggggugcccccuccuc

SEQ ID NO: 2180720 - RNA, 20 nt, Human
aggggugcccccuccucucc

SEQ ID NO: 2180721 - RNA, 21 nt, Human
aggggugcccccuccucuccc

SEQ ID NO: 2180722 - RNA, 18 nt, Human
aggggugggacacccugu

SEQ ID NO: 2180723 - RNA, 23 nt, Human
aggggugcccccuccucucccau

SEQ ID NO: 2180724 - RNA, 17 nt, Human
agggguggagacugcuu

SEQ ID NO: 2180725 - RNA, 15 nt, Human
agggguggagacugc

SEQ ID NO: 2180726 - RNA, 22 nt, Human
aggggguuugggggcuugcaag

SEQ ID NO: 2180727 - RNA, 16 nt, Human
aggggguuugggggcu

SEQ ID NO: 2180728 - RNA, 20 nt, Human
aggggguuugcuggggaacu

SEQ ID NO: 2180729 - RNA, 19 nt, Human
agggguaauauauugcugc

SEQ ID NO: 2180730 - RNA, 22 nt, Human
agggguacauuucccugugcug

SEQ ID NO: 2180731 - RNA, 14 nt, Human
aggggucaaagaaa

SEQ ID NO: 2180732 - RNA, 17 nt, Human
agggguaggcagagccu

SEQ ID NO: 2180733 - RNA, 19 nt, Human
agggguaggcagagccuuu

SEQ ID NO: 2180734 - RNA, 20 nt, Human
aggggguggccucccaacuc

SEQ ID NO: 2180735 - RNA, 20 nt, Human
agggggugucucaggccaca

SEQ ID NO: 2180736 - RNA, 15 nt, Human
ugguuauaaaaguga

SEQ ID NO: 2180737 - RNA, 20 nt, Human
ugguuauaaaagugauuguu

SEQ ID NO: 2180738 - RNA, 16 nt, Human
ugguuauaaaagugau

SEQ ID NO: 2180739 - RNA, 14 nt, Human
ugguuauggagagg

SEQ ID NO: 2180740 - RNA, 19 nt, Human
ugguuuccucauuccugaa

SEQ ID NO: 2180741 - RNA, 17 nt, Human
ugguuucccccuucuac

SEQ ID NO: 2180742 - RNA, 13 nt, Human
ugguuuccugccc

SEQ ID NO: 2180743 - RNA, 12 nt, Human
ugguuuccugcc

SEQ ID NO: 2180744 - RNA, 20 nt, Human
ugguuuccugcccugggagg

SEQ ID NO: 2180745 - RNA, 19 nt, Human
ugguuugcagaugacaaaa

SEQ ID NO: 2180746 - RNA, 20 nt, Human
ugguuucccccuucuacauu

SEQ ID NO: 2180747 - RNA, 17 nt, Human
ugguuugcagaugacaa

SEQ ID NO: 2180748 - RNA, 15 nt, Human
ugguuuccugcccug

SEQ ID NO: 2180749 - RNA, 14 nt, Human
ugguuuccugcccu

SEQ ID NO: 2180750 - RNA, 14 nt, Human
ugguuugcuacuuc

SEQ ID NO: 2180751 - RNA, 16 nt, Human
ugguuuggaaugcuuc

SEQ ID NO: 2180752 - RNA, 22 nt, Human
ugguuuggaaugcuucuucuca

SEQ ID NO: 2180753 - RNA, 19 nt, Human
ugguuuggccaucucugga

SEQ ID NO: 2180754 - RNA, 20 nt, Human
ugguuuggccaucucuggau

SEQ ID NO: 2180755 - RNA, 21 nt, Human
ugguuuggcccuucuccuuuu

SEQ ID NO: 2180756 - RNA, 22 nt, Human
ugguuuggcccuucuccuuuug

SEQ ID NO: 2180757 - RNA, 23 nt, Human
ugguuuggcccuucuccuuuuga

SEQ ID NO: 2180758 - RNA, 19 nt, Human
ugguuuggggcgaggcaga

SEQ ID NO: 2180759 - RNA, 14 nt, Human
ugguuuucaaaaua

SEQ ID NO: 2180760 - RNA, 15 nt, Human
ugguuuguaaauuaa

SEQ ID NO: 2180761 - RNA, 17 nt, Human
ugguuuucaaaauaaaa

SEQ ID NO: 2180762 - RNA, 15 nt, Human
ugguuuucaaaauaa

SEQ ID NO: 2180763 - RNA, 14 nt, Human
ugguuuuccccucc

SEQ ID NO: 2180764 - RNA, 18 nt, Human
ugguuuuccccucccugg

SEQ ID NO: 2180765 - RNA, 19 nt, Human
uguaaacuguguauuccaa

SEQ ID NO: 2180766 - RNA, 20 nt, Human
ugguuuuccccucccugggu

SEQ ID NO: 2180767 - RNA, 21 nt, Human
ugguuuuccccucccuggguu

SEQ ID NO: 2180768 - RNA, 22 nt, Human
ugguuuggggcgaggcagagga

SEQ ID NO: 2180769 - RNA, 23 nt, Human
ugguuuggggcgaggcagaggac

SEQ ID NO: 2180770 - RNA, 18 nt, Human
uguaaaguauguaaacag

SEQ ID NO: 2180771 - RNA, 17 nt, Human
uguaaaguguaaauccu

SEQ ID NO: 2180772 - RNA, 16 nt, Human
uguaaaguguaaaucc

SEQ ID NO: 2180773 - RNA, 12 nt, Human
uguaaagugugg

SEQ ID NO: 2180774 - RNA, 13 nt, Human
uguaaaguguggu

SEQ ID NO: 2180775 - RNA, 19 nt, Human
uguaaaguaggaaaaauaa

SEQ ID NO: 2180776 - RNA, 21 nt, Human
uguaaaggagucaaaacuaca

SEQ ID NO: 2180777 - RNA, 19 nt, Human
uguaaaggagucaaaacua

SEQ ID NO: 2180778 - RNA, 16 nt, Human
uguaaaggaauuuaaa

SEQ ID NO: 2180779 - RNA, 22 nt, Human
uguaaagaaagagagaaaauaa

SEQ ID NO: 2180780 - RNA, 16 nt, Human
uguaaaggagucaaaa

SEQ ID NO: 2180781 - RNA, 21 nt, Human
uguaaagaaagagagaaaaua

SEQ ID NO: 2180782 - RNA, 20 nt, Human
uguaaagaaagagagaaaau

SEQ ID NO: 2180783 - RNA, 13 nt, Human
uguaaagaaagag

SEQ ID NO: 2180784 - RNA, 15 nt, Human
uguaaagaaagagag

SEQ ID NO: 2180785 - RNA, 14 nt, Human
uguaaagaaagaga

SEQ ID NO: 2180786 - RNA, 19 nt, Human
uguaaagaaagagagaaaa

SEQ ID NO: 2180787 - RNA, 18 nt, Human
uguaaagaaagagagaaa

SEQ ID NO: 2180788 - RNA, 17 nt, Human
uguaaagaaagagagaa

SEQ ID NO: 2180789 - RNA, 16 nt, Human
uguaaagaaagagaga

SEQ ID NO: 2180790 - RNA, 13 nt, Human
uguaaacuuuuug

SEQ ID NO: 2180791 - RNA, 22 nt, Human
uguaaacuguguauuccaagac

SEQ ID NO: 2180792 - RNA, 14 nt, Human
uguaaauaaaaaga

SEQ ID NO: 2180793 - RNA, 22 nt, Human
uguaaaguguggucccaacagg

SEQ ID NO: 2180794 - RNA, 12 nt, Human
uguaaaguuagu

SEQ ID NO: 2180795 - RNA, 14 nt, Human
uguaaaguuagucu

SEQ ID NO: 2180796 - RNA, 17 nt, Human
uguaaaguuagucuacu

SEQ ID NO: 2180797 - RNA, 13 nt, Human
uguaaauaaagcc

SEQ ID NO: 2180798 - RNA, 14 nt, Human
uguaaauaaagccc

SEQ ID NO: 2180799 - RNA, 19 nt, Human
uguaaauaaagaacuagca

SEQ ID NO: 2180800 - RNA, 18 nt, Human
uguaaauaaagcccuggg

SEQ ID NO: 2180801 - RNA, 17 nt, Human
uguaaauaaaggaacca

SEQ ID NO: 2180802 - RNA, 15 nt, Human
uguaaauagcucagg

SEQ ID NO: 2180803 - RNA, 16 nt, Human
uguaaauagcucaggu

SEQ ID NO: 2180804 - RNA, 21 nt, Human
uguaaauacuguuuuuaacaa

SEQ ID NO: 2180805 - RNA, 16 nt, Human
aggugauauauuuaaa

SEQ ID NO: 2180806 - RNA, 16 nt, Human
uguaaauaguauuuga

SEQ ID NO: 2180807 - RNA, 14 nt, Human
aggugucuuccucc

SEQ ID NO: 2180808 - RNA, 21 nt, Human
aggugucugcacccaggggug

SEQ ID NO: 2180809 - RNA, 15 nt, Human
aggugucuuccuccc

SEQ ID NO: 2180810 - RNA, 14 nt, Human
aggugucugcaccc

SEQ ID NO: 2180811 - RNA, 16 nt, Human
aggugucugcacccag

SEQ ID NO: 2180812 - RNA, 17 nt, Human
aggugucugcacccagg

SEQ ID NO: 2180813 - RNA, 17 nt, Human
aggugugaaccaccaca

SEQ ID NO: 2180814 - RNA, 15 nt, Human
aggugugcucugauc

SEQ ID NO: 2180815 - RNA, 20 nt, Human
aggugugcucugaucaucca

SEQ ID NO: 2180816 - RNA, 22 nt, Human
aggugggguauuuaccacagca

SEQ ID NO: 2180817 - RNA, 17 nt, Human
agguggggcgggaaagc

SEQ ID NO: 2180818 - RNA, 19 nt, Human
agguggggucacucuggca

SEQ ID NO: 2180819 - RNA, 21 nt, Human
agguggggcgggaaagccagu

SEQ ID NO: 2180820 - RNA, 23 nt, Human
aggugggguauuuaccacagcag

SEQ ID NO: 2180821 - RNA, 14 nt, Human
agguuuaagcuguu

SEQ ID NO: 2180822 - RNA, 17 nt, Human
agguuuaacucagauca

SEQ ID NO: 2180823 - RNA, 18 nt, Human
agguuuaacucagaucac

SEQ ID NO: 2180824 - RNA, 19 nt, Human
agguuuaacucagaucacu

SEQ ID NO: 2180825 - RNA, 20 nt, Human
agguuuaacucagaucacua

SEQ ID NO: 2180826 - RNA, 23 nt, Human
agguuuaacucagaucacuacug

SEQ ID NO: 2180827 - RNA, 16 nt, Human
agguuuacaauuuaca

SEQ ID NO: 2180828 - RNA, 17 nt, Human
agguuuacaauuuacaa

SEQ ID NO: 2180829 - RNA, 15 nt, Human
agguuuaacucagau

SEQ ID NO: 2180830 - RNA, 17 nt, Human
agguucuuagugucacu

SEQ ID NO: 2180831 - RNA, 17 nt, Human
agguucuggugugaacu

SEQ ID NO: 2180832 - RNA, 14 nt, Human
agguucucuccucc

SEQ ID NO: 2180833 - RNA, 17 nt, Human
agguucucuccucccca

SEQ ID NO: 2180834 - RNA, 22 nt, Human
agguucucuccuccccaaggag

SEQ ID NO: 2180835 - RNA, 15 nt, Human
agguucuauuuggaa

SEQ ID NO: 2180836 - RNA, 17 nt, Human
agguucuauuuggaauu

SEQ ID NO: 2180837 - RNA, 19 nt, Human
agguucuccguuagcuccu

SEQ ID NO: 2180838 - RNA, 20 nt, Human
agguucuccguuagcuccug

SEQ ID NO: 2180839 - RNA, 21 nt, Human
agguucuccguuagcuccugu

SEQ ID NO: 2180840 - RNA, 22 nt, Human
agguucuccguuagcuccugug

SEQ ID NO: 2180841 - RNA, 20 nt, Human
aggugucuuccucccaagug

SEQ ID NO: 2180842 - RNA, 14 nt, Human
aggugugggggcug

SEQ ID NO: 2180843 - RNA, 16 nt, Human
aggugugggggcugca

SEQ ID NO: 2180844 - RNA, 17 nt, Human
aggugugggggcugcag

SEQ ID NO: 2180845 - RNA, 18 nt, Human
aggugugggggcugcagc

SEQ ID NO: 2180846 - RNA, 20 nt, Human
agguguggagccgaggccua

SEQ ID NO: 2180847 - RNA, 16 nt, Human
aggugucuuccuccca

SEQ ID NO: 2180848 - RNA, 19 nt, Human
aggugucuuccucccaagu

SEQ ID NO: 2180849 - RNA, 22 nt, Human
aggugcccuuggaggccagcca

SEQ ID NO: 2180850 - RNA, 21 nt, Human
aggugcccuuggaggccagcc

SEQ ID NO: 2180851 - RNA, 20 nt, Human
aggugcccuuggaggccagc

SEQ ID NO: 2180852 - RNA, 19 nt, Human
aggugcccuuggaggccag

SEQ ID NO: 2180853 - RNA, 12 nt, Human
aggugccuccag

SEQ ID NO: 2180854 - RNA, 14 nt, Human
aggugccuccaggu

SEQ ID NO: 2180855 - RNA, 15 nt, Human
aggugccuccaggug

SEQ ID NO: 2180856 - RNA, 16 nt, Human
aggugccuccaggugu

SEQ ID NO: 2180857 - RNA, 18 nt, Human
aggugccucaagagaagg

SEQ ID NO: 2180858 - RNA, 23 nt, Human
aggugggauaucccuaugcugcc

SEQ ID NO: 2180859 - RNA, 17 nt, Human
aggugccugugaggcag

SEQ ID NO: 2180860 - RNA, 11 nt, Human
aggugccugug

SEQ ID NO: 2180861 - RNA, 18 nt, Human
aggugccuccaggugugc

SEQ ID NO: 2180862 - RNA, 17 nt, Human
aggugccugucccaccc

SEQ ID NO: 2180863 - RNA, 18 nt, Human
aggugccugucccacccc

SEQ ID NO: 2180864 - RNA, 15 nt, Human
aggugggauccucca

SEQ ID NO: 2180865 - RNA, 16 nt, Human
agguggggcagcuuga

SEQ ID NO: 2180866 - RNA, 18 nt, Human
aggugggauccuccaggu

SEQ ID NO: 2180867 - RNA, 23 nt, Human
agguggggcagcuugaggguugg

SEQ ID NO: 2180868 - RNA, 16 nt, Human
aggugggauccuccag

SEQ ID NO: 2180869 - RNA, 17 nt, Human
aggugggauccuccagg

SEQ ID NO: 2180870 - RNA, 21 nt, Human
aggugcccagaauaaguuauu

SEQ ID NO: 2180871 - RNA, 18 nt, Human
aggugccagcaacugaau

SEQ ID NO: 2180872 - RNA, 19 nt, Human
aggugccagcaacugaaua

SEQ ID NO: 2180873 - RNA, 20 nt, Human
aggugccagcaacugaauaa

SEQ ID NO: 2180874 - RNA, 21 nt, Human
aggugccagcaacugaauaaa

SEQ ID NO: 2180875 - RNA, 16 nt, Human
aggugccagcaaagcc

SEQ ID NO: 2180876 - RNA, 18 nt, Human
aggugccagcaaagcccc

SEQ ID NO: 2180877 - RNA, 19 nt, Human
aggugccagcaaagcccca

SEQ ID NO: 2180878 - RNA, 20 nt, Human
aggugccagcaaagccccau

SEQ ID NO: 2180879 - RNA, 14 nt, Human
aggugccagcaacu

SEQ ID NO: 2180880 - RNA, 15 nt, Human
aggugccagcaacug

SEQ ID NO: 2180881 - RNA, 17 nt, Human
aggugccccaaaaugca

SEQ ID NO: 2180882 - RNA, 17 nt, Human
aggugcccaucccugga

SEQ ID NO: 2180883 - RNA, 22 nt, Human
aggugcccagaaugaggcugcu

SEQ ID NO: 2180884 - RNA, 18 nt, Human
aggugcccagaaugaggc

SEQ ID NO: 2180885 - RNA, 14 nt, Human
aggugauccaccca

SEQ ID NO: 2180886 - RNA, 20 nt, Human
aggugauccacccaccucag

SEQ ID NO: 2180887 - RNA, 23 nt, Human
aggugcaucuggggaacuagagg

SEQ ID NO: 2180888 - RNA, 21 nt, Human
aggugcaucuggggaacuaga

SEQ ID NO: 2180889 - RNA, 20 nt, Human
aggugcauauuuauaaaaau

SEQ ID NO: 2180890 - RNA, 22 nt, Human
aggugauauccauucuuucuga

SEQ ID NO: 2180891 - RNA, 19 nt, Human
aggugauauccauucuuuc

SEQ ID NO: 2180892 - RNA, 18 nt, Human
aggugauauccauucuuu

SEQ ID NO: 2180893 - RNA, 18 nt, Human
aggugauauauuuaaaaa

SEQ ID NO: 2180894 - RNA, 22 nt, Human
aggugaguuugagcugccuucc

SEQ ID NO: 2180895 - RNA, 20 nt, Human
aggugaguuugagcugccuu

SEQ ID NO: 2180896 - RNA, 21 nt, Human
aggugaguuugagcugccuuc

SEQ ID NO: 2180897 - RNA, 13 nt, Human
aggugagggaugu

SEQ ID NO: 2180898 - RNA, 19 nt, Human
aggugaguuugagcugccu

SEQ ID NO: 2180899 - RNA, 20 nt, Human
uggugcccuguucucuacca

SEQ ID NO: 2180900 - RNA, 10 nt, Human
uggugccuga

SEQ ID NO: 2180901 - RNA, 13 nt, Human
uggugccugagag

SEQ ID NO: 2180902 - RNA, 22 nt, Human
uggugccuaaaguuuaaccaaa

SEQ ID NO: 2180903 - RNA, 12 nt, Human
uggugccuggcc

SEQ ID NO: 2180904 - RNA, 19 nt, Human
uggugccugagaggcaggc

SEQ ID NO: 2180905 - RNA, 20 nt, Human
uggugccugagaggcaggca

SEQ ID NO: 2180906 - RNA, 14 nt, Human
uggugccugagagg

SEQ ID NO: 2180907 - RNA, 15 nt, Human
uggugccugagaggc

SEQ ID NO: 2180908 - RNA, 17 nt, Human
uggugccugagaggcag

SEQ ID NO: 2180909 - RNA, 18 nt, Human
uggugccugagaggcagg

SEQ ID NO: 2180910 - RNA, 13 nt, Human
uggugccuggccu

SEQ ID NO: 2180911 - RNA, 14 nt, Human
uggugccuggccug

SEQ ID NO: 2180912 - RNA, 17 nt, Human
uggugccuggccuggca

SEQ ID NO: 2180913 - RNA, 18 nt, Human
uggugccuggccuggcac

SEQ ID NO: 2180914 - RNA, 19 nt, Human
uggugccuggccuggcaca

SEQ ID NO: 2180915 - RNA, 22 nt, Human
uggugccuggccuggcacacau

SEQ ID NO: 2180916 - RNA, 23 nt, Human
uggugccuggccuggcacacauc

SEQ ID NO: 2180917 - RNA, 24 nt, Human
uggugccuggccuggcacacauca

SEQ ID NO: 2180918 - RNA, 14 nt, Human
uggugccuucauuu

SEQ ID NO: 2180919 - RNA, 12 nt, Human
uggugccuucau

SEQ ID NO: 2180920 - RNA, 21 nt, Human
uggugccugauucggcugucu

SEQ ID NO: 2180921 - RNA, 11 nt, Human
uggugccuuca

SEQ ID NO: 2180922 - RNA, 16 nt, Human
uggugcgaucuggguu

SEQ ID NO: 2180923 - RNA, 16 nt, Human
uggugcuacgccugca

SEQ ID NO: 2180924 - RNA, 18 nt, Human
uggugcuauaggcuggag

SEQ ID NO: 2180925 - RNA, 17 nt, Human
uggugcgaucuggguuc

SEQ ID NO: 2180926 - RNA, 15 nt, Human
uggugcucucugcca

SEQ ID NO: 2180927 - RNA, 21 nt, Human
uggugcucaguuguagaaugu

SEQ ID NO: 2180928 - RNA, 15 nt, Human
uggugcucaguugua

SEQ ID NO: 2180929 - RNA, 17 nt, Human
uggugcucaguuguaga

SEQ ID NO: 2180930 - RNA, 22 nt, Human
uggugcuauaggcuggagaagc

SEQ ID NO: 2180931 - RNA, 23 nt, Human
uggugcuauaggcuggagaagcu

SEQ ID NO: 2180932 - RNA, 11 nt, Human
uggugcucagu

SEQ ID NO: 2180933 - RNA, 14 nt, Human
uggugcucaguugu

SEQ ID NO: 2180934 - RNA, 13 nt, Human
uggugcugccaca

SEQ ID NO: 2180935 - RNA, 13 nt, Human
uggugcugagaag

SEQ ID NO: 2180936 - RNA, 15 nt, Human
uggugcugaccucug

SEQ ID NO: 2180937 - RNA, 16 nt, Human
uggugcucucugccac

SEQ ID NO: 2180938 - RNA, 13 nt, Human
uggugcugaccuc

SEQ ID NO: 2180939 - RNA, 18 nt, Human
uggugcuggauauuuuca

SEQ ID NO: 2180940 - RNA, 13 nt, Human
uggugcugggacu

SEQ ID NO: 2180941 - RNA, 14 nt, Human
uggugcugggacug

SEQ ID NO: 2180942 - RNA, 15 nt, Human
uggugcugggacuga

SEQ ID NO: 2180943 - RNA, 21 nt, Human
uggugcuggauauuuucaaau

SEQ ID NO: 2180944 - RNA, 17 nt, Human
uggugcuggauauuuuc

SEQ ID NO: 2180945 - RNA, 12 nt, Human
uggugcuggaua

SEQ ID NO: 2180946 - RNA, 19 nt, Human
uggugcugcugcugcugug

SEQ ID NO: 2180947 - RNA, 15 nt, Human
uggugcugagaagcu

SEQ ID NO: 2180948 - RNA, 18 nt, Human
uggugcugccacacuuca

SEQ ID NO: 2180949 - RNA, 13 nt, Human
ugguuaaugccau

SEQ ID NO: 2180950 - RNA, 13 nt, Human
ugguuagaaaagu

SEQ ID NO: 2180951 - RNA, 14 nt, Human
ugguuagaaaugca

SEQ ID NO: 2180952 - RNA, 13 nt, Human
ugguuagaaaugc

SEQ ID NO: 2180953 - RNA, 18 nt, Human
ugguuaggcauuguggga

SEQ ID NO: 2180954 - RNA, 20 nt, Human
ugguuaggcauugugggaag

SEQ ID NO: 2180955 - RNA, 15 nt, Human
uggugugaaagucag

SEQ ID NO: 2180956 - RNA, 19 nt, Human
uggugucuggauucccagg

SEQ ID NO: 2180957 - RNA, 16 nt, Human
ugguggcacugagccc

SEQ ID NO: 2180958 - RNA, 11 nt, Human
uggugucucca

SEQ ID NO: 2180959 - RNA, 15 nt, Human
ugguggcacaggccc

SEQ ID NO: 2180960 - RNA, 19 nt, Human
uggugucuccaacccccca

SEQ ID NO: 2180961 - RNA, 20 nt, Human
uggugucuccaaccccccag

SEQ ID NO: 2180962 - RNA, 23 nt, Human
uggugugaccacugcagaagaca

SEQ ID NO: 2180963 - RNA, 23 nt, Human
uggugugaacuaaacuuucacac

SEQ ID NO: 2180964 - RNA, 11 nt, Human
uggugugaagg

SEQ ID NO: 2180965 - RNA, 12 nt, Human
uggugugaaggu

SEQ ID NO: 2180966 - RNA, 22 nt, Human
uggugugaacuaaacuuucaca

SEQ ID NO: 2180967 - RNA, 14 nt, Human
uggugugaacuaaa

SEQ ID NO: 2180968 - RNA, 14 nt, Human
ugguggcagcugcg

SEQ ID NO: 2180969 - RNA, 13 nt, Human
ugguggcagcugc

SEQ ID NO: 2180970 - RNA, 15 nt, Human
ugguggcagcugcgg

SEQ ID NO: 2180971 - RNA, 12 nt, Human
ugguggcagugg

SEQ ID NO: 2180972 - RNA, 19 nt, Human
ugguggaagaggggacagg

SEQ ID NO: 2180973 - RNA, 16 nt, Human
ugguggcaagagcccc

SEQ ID NO: 2180974 - RNA, 18 nt, Human
ugguggacaguccuggga

SEQ ID NO: 2180975 - RNA, 13 nt, Human
ugguggagggcca

SEQ ID NO: 2180976 - RNA, 17 nt, Human
ugguggacaguccuggg

SEQ ID NO: 2180977 - RNA, 16 nt, Human
ugguggacaguccugg

SEQ ID NO: 2180978 - RNA, 21 nt, Human
ugguggagaggcccggccucu

SEQ ID NO: 2180979 - RNA, 18 nt, Human
ugguggaagaggggacag

SEQ ID NO: 2180980 - RNA, 20 nt, Human
uggugcuguggccaggguga

SEQ ID NO: 2180981 - RNA, 22 nt, Human
uggugcuuacacaucucagacc

SEQ ID NO: 2180982 - RNA, 21 nt, Human
uggugcugggacugagccagu

SEQ ID NO: 2180983 - RNA, 16 nt, Human
uggugcugggacugag

SEQ ID NO: 2180984 - RNA, 19 nt, Human
uggugcugggacugagcca

SEQ ID NO: 2180985 - RNA, 12 nt, Human
uggugcuguggc

SEQ ID NO: 2180986 - RNA, 13 nt, Human
uggugcuguggcc

SEQ ID NO: 2180987 - RNA, 17 nt, Human
uggugcuguggccaggg

SEQ ID NO: 2180988 - RNA, 13 nt, Human
uggucacugccau

SEQ ID NO: 2180989 - RNA, 14 nt, Human
uggucacugccaug

SEQ ID NO: 2180990 - RNA, 22 nt, Human
uggucacugccauggaggcaca

SEQ ID NO: 2180991 - RNA, 14 nt, Human
ugguagcucaggug

SEQ ID NO: 2180992 - RNA, 13 nt, Human
uggucacugcugu

SEQ ID NO: 2180993 - RNA, 15 nt, Human
uggucagauuugaac

SEQ ID NO: 2180994 - RNA, 16 nt, Human
uggucagauuugaacu

SEQ ID NO: 2180995 - RNA, 13 nt, Human
aggucagagccug

SEQ ID NO: 2180996 - RNA, 14 nt, Human
aggucagagccugc

SEQ ID NO: 2180997 - RNA, 15 nt, Human
aggucagagccugca

SEQ ID NO: 2180998 - RNA, 17 nt, Human
aggucagagccugcagu

SEQ ID NO: 2180999 - RNA, 18 nt, Human
aggucagagccugcaguu

SEQ ID NO: 2181000 - RNA, 16 nt, Human
aggucaggaguuccua

SEQ ID NO: 2181001 - RNA, 21 nt, Human
aggucaggaguuagaggccag

SEQ ID NO: 2181002 - RNA, 19 nt, Human
aggucaggaguuagaggcc

SEQ ID NO: 2181003 - RNA, 15 nt, Human
aggucaggaguuccu

SEQ ID NO: 2181004 - RNA, 19 nt, Human
agguccacaacacacagau

SEQ ID NO: 2181005 - RNA, 18 nt, Human
aggucagcuugcugcccu

SEQ ID NO: 2181006 - RNA, 16 nt, Human
aggucagcuugcugcc

SEQ ID NO: 2181007 - RNA, 16 nt, Human
aggucagcaugucuau

SEQ ID NO: 2181008 - RNA, 19 nt, Human
aggucagcgugcuuagccu

SEQ ID NO: 2181009 - RNA, 15 nt, Human
aggucagcaugucua

SEQ ID NO: 2181010 - RNA, 14 nt, Human
uggucacugcuguc

SEQ ID NO: 2181011 - RNA, 15 nt, Human
uggucacugcuguca

SEQ ID NO: 2181012 - RNA, 16 nt, Human
aggucuugaacuccug

SEQ ID NO: 2181013 - RNA, 15 nt, Human
agguccagcucugga

SEQ ID NO: 2181014 - RNA, 16 nt, Human
agguccagcucuggag

SEQ ID NO: 2181015 - RNA, 17 nt, Human
agguccagcucuggagg

SEQ ID NO: 2181016 - RNA, 23 nt, Human
agguccagcccuggcugaaggac

SEQ ID NO: 2181017 - RNA, 21 nt, Human
agguccacggucuguucuuga

SEQ ID NO: 2181018 - RNA, 22 nt, Human
agguccacggucuguucuugaa

SEQ ID NO: 2181019 - RNA, 16 nt, Human
agguccagcccuggcu

SEQ ID NO: 2181020 - RNA, 17 nt, Human
agguccagcccuggcug

SEQ ID NO: 2181021 - RNA, 13 nt, Human
agguccagcucug

SEQ ID NO: 2181022 - RNA, 14 nt, Human
agguccagcucugg

SEQ ID NO: 2181023 - RNA, 18 nt, Human
agguccagcccuggcuga

SEQ ID NO: 2181024 - RNA, 20 nt, Human
agguccagcccuggcugaag

SEQ ID NO: 2181025 - RNA, 21 nt, Human
agguccagcccuggcugaagg

SEQ ID NO: 2181026 - RNA, 22 nt, Human
agguccagcccuggcugaagga

SEQ ID NO: 2181027 - RNA, 16 nt, Human
aggugaccuucuggga

SEQ ID NO: 2181028 - RNA, 20 nt, Human
aggugaccuugcaacuucau

SEQ ID NO: 2181029 - RNA, 19 nt, Human
aggugacugggcccugccu

SEQ ID NO: 2181030 - RNA, 19 nt, Human
aggugaccaaaucagugug

SEQ ID NO: 2181031 - RNA, 22 nt, Human
aggugaccaaaauccccuucuc

SEQ ID NO: 2181032 - RNA, 19 nt, Human
aggugacccaaugauucag

SEQ ID NO: 2181033 - RNA, 16 nt, Human
aggugagaagcagagg

SEQ ID NO: 2181034 - RNA, 20 nt, Human
aggugacugggcccugccuc

SEQ ID NO: 2181035 - RNA, 22 nt, Human
aggugacugggcccugccucug

SEQ ID NO: 2181036 - RNA, 23 nt, Human
aggugagaagcagaggaaggaga

SEQ ID NO: 2181037 - RNA, 21 nt, Human
aggugagaagcagaggaagga

SEQ ID NO: 2181038 - RNA, 13 nt, Human
aggugagggaagc

SEQ ID NO: 2181039 - RNA, 22 nt, Human
aggugagcacggccaacaaagc

SEQ ID NO: 2181040 - RNA, 18 nt, Human
aggugagcacggccaaca

SEQ ID NO: 2181041 - RNA, 20 nt, Human
aggugagcccauggcccucc

SEQ ID NO: 2181042 - RNA, 21 nt, Human
aggugagcaaccaguuggcua

SEQ ID NO: 2181043 - RNA, 22 nt, Human
aggugagcaaccaguuggcuag

SEQ ID NO: 2181044 - RNA, 22 nt, Human
aggugacagagugagacucugu

SEQ ID NO: 2181045 - RNA, 14 nt, Human
aggugacaugugaa

SEQ ID NO: 2181046 - RNA, 15 nt, Human
aggugacaugugaaa

SEQ ID NO: 2181047 - RNA, 16 nt, Human
aggugacaugugaaac

SEQ ID NO: 2181048 - RNA, 20 nt, Human
aggugacaugugaaaccuuu

SEQ ID NO: 2181049 - RNA, 20 nt, Human
aggugaccaaaauccccuuc

SEQ ID NO: 2181050 - RNA, 13 nt, Human
aggugaccccagg

SEQ ID NO: 2181051 - RNA, 18 nt, Human
aggucuugaacuccuggc

SEQ ID NO: 2181052 - RNA, 21 nt, Human
aggucuucaucgaaucuacua

SEQ ID NO: 2181053 - RNA, 20 nt, Human
aggucuucaucgaaucuacu

SEQ ID NO: 2181054 - RNA, 17 nt, Human
aggucuugaacuccugg

SEQ ID NO: 2181055 - RNA, 13 nt, Human
aggugacagagug

SEQ ID NO: 2181056 - RNA, 15 nt, Human
aggugacagagugag

SEQ ID NO: 2181057 - RNA, 20 nt, Human
aguagcauguugagccaggc

SEQ ID NO: 2181058 - RNA, 23 nt, Human
aguagaccuuguuacuucugagg

SEQ ID NO: 2181059 - RNA, 11 nt, Human
aguagagacag

SEQ ID NO: 2181060 - RNA, 14 nt, Human
aguagaauugcauu

SEQ ID NO: 2181061 - RNA, 20 nt, Human
aguagaccuuguuacuucug

SEQ ID NO: 2181062 - RNA, 21 nt, Human
aguagaccuuguuacuucuga

SEQ ID NO: 2181063 - RNA, 15 nt, Human
aguagaauugcauug

SEQ ID NO: 2181064 - RNA, 22 nt, Human
aguagacauuucucuuacugca

SEQ ID NO: 2181065 - RNA, 13 nt, Human
aguagcauuucau

SEQ ID NO: 2181066 - RNA, 14 nt, Human
aguagcauuucauu

SEQ ID NO: 2181067 - RNA, 15 nt, Human
aguagcauuucauuc

SEQ ID NO: 2181068 - RNA, 15 nt, Human
aguagcccuuucugu

SEQ ID NO: 2181069 - RNA, 23 nt, Human
aguagccaggguguggcccugcc

SEQ ID NO: 2181070 - RNA, 16 nt, Human
aguagccgagagccug

SEQ ID NO: 2181071 - RNA, 15 nt, Human
aguagccgagagccu

SEQ ID NO: 2181072 - RNA, 20 nt, Human
aguagcccuuucugugugca

SEQ ID NO: 2181073 - RNA, 21 nt, Human
aguagcccuuucugugugcac

SEQ ID NO: 2181074 - RNA, 22 nt, Human
aguagccaggguguggcccugc

SEQ ID NO: 2181075 - RNA, 16 nt, Human
aguagcccuuucugug

SEQ ID NO: 2181076 - RNA, 17 nt, Human
aguagcccuuucugugu

SEQ ID NO: 2181077 - RNA, 19 nt, Human
aguagcccuuucugugugc

SEQ ID NO: 2181078 - RNA, 19 nt, Human
aguagccgagagccugcuc

SEQ ID NO: 2181079 - RNA, 22 nt, Human
aguagccuaacacacuccaaga

SEQ ID NO: 2181080 - RNA, 18 nt, Human
aguagccgagagccugcu

SEQ ID NO: 2181081 - RNA, 17 nt, Human
aguagccgagagccugc

SEQ ID NO: 2181082 - RNA, 11 nt, Human
uguaggcagac

SEQ ID NO: 2181083 - RNA, 12 nt, Human
uguaggcagaca

SEQ ID NO: 2181084 - RNA, 15 nt, Human
uguaguauaaagaaa

SEQ ID NO: 2181085 - RNA, 14 nt, Human
uguaguagucucau

SEQ ID NO: 2181086 - RNA, 14 nt, Human
uguaguaucaaaua

SEQ ID NO: 2181087 - RNA, 13 nt, Human
uguaguagucuca

SEQ ID NO: 2181088 - RNA, 20 nt, Human
uguaggccaaauuuguagug

SEQ ID NO: 2181089 - RNA, 18 nt, Human
uguaguagcccuuucugu

SEQ ID NO: 2181090 - RNA, 18 nt, Human
uguaguaucaaauauuag

SEQ ID NO: 2181091 - RNA, 19 nt, Human
uguaguaucaaauauuaga

SEQ ID NO: 2181092 - RNA, 21 nt, Human
uguaguaucaaauauuagaug

SEQ ID NO: 2181093 - RNA, 23 nt, Human
uguaguaucaaauauuagaugug

SEQ ID NO: 2181094 - RNA, 12 nt, Human
uguagggaacuc

SEQ ID NO: 2181095 - RNA, 13 nt, Human
uguagggagggcg

SEQ ID NO: 2181096 - RNA, 18 nt, Human
uguaguaauugacaugug

SEQ ID NO: 2181097 - RNA, 19 nt, Human
uguaguaauugacaugugc

SEQ ID NO: 2181098 - RNA, 17 nt, Human
uguaggcuuaguuugug

SEQ ID NO: 2181099 - RNA, 13 nt, Human
uguaggcagacac

SEQ ID NO: 2181100 - RNA, 14 nt, Human
uguaggcagacaca

SEQ ID NO: 2181101 - RNA, 15 nt, Human
uguaggcagacacag

SEQ ID NO: 2181102 - RNA, 16 nt, Human
uguaggcagacacagg

SEQ ID NO: 2181103 - RNA, 17 nt, Human
uguaggcauaaagucag

SEQ ID NO: 2181104 - RNA, 20 nt, Human
uguaggcauaaagucagggg

SEQ ID NO: 2181105 - RNA, 14 nt, Human
aguacauguuaaac

SEQ ID NO: 2181106 - RNA, 12 nt, Human
aguacauuuaau

SEQ ID NO: 2181107 - RNA, 13 nt, Human
aguacauuuaaua

SEQ ID NO: 2181108 - RNA, 21 nt, Human
aguacauuuaauacagcagug

SEQ ID NO: 2181109 - RNA, 17 nt, Human
aguacauauuaggaaaa

SEQ ID NO: 2181110 - RNA, 22 nt, Human
aguacauaaaggugguaugugu

SEQ ID NO: 2181111 - RNA, 18 nt, Human
aguacauauuaggaaaau

SEQ ID NO: 2181112 - RNA, 21 nt, Human
aguacagguaaggugagggaa

SEQ ID NO: 2181113 - RNA, 20 nt, Human
aguaauuaucgggaacagug

SEQ ID NO: 2181114 - RNA, 22 nt, Human
aguaauuaucgggaacaguguu

SEQ ID NO: 2181115 - RNA, 23 nt, Human
aguacagguaaggugagggaaua

SEQ ID NO: 2181116 - RNA, 13 nt, Human
aguaauuaucggg

SEQ ID NO: 2181117 - RNA, 15 nt, Human
aguaauucaagaaaa

SEQ ID NO: 2181118 - RNA, 22 nt, Human
aguaauggguuucauauuucuu

SEQ ID NO: 2181119 - RNA, 23 nt, Human
aguaauggguuucauauuucuua

SEQ ID NO: 2181120 - RNA, 17 nt, Human
aguaaugcuacguguga

SEQ ID NO: 2181121 - RNA, 18 nt, Human
aguaaugcuacgugugau

SEQ ID NO: 2181122 - RNA, 19 nt, Human
aguaaugcuacgugugauu

SEQ ID NO: 2181123 - RNA, 20 nt, Human
aguaaugcuacgugugauuu

SEQ ID NO: 2181124 - RNA, 21 nt, Human
aguaaugcuacgugugauuuu

SEQ ID NO: 2181125 - RNA, 15 nt, Human
aguaauggguuucau

SEQ ID NO: 2181126 - RNA, 21 nt, Human
aguaauggguuucauauuucu

SEQ ID NO: 2181127 - RNA, 22 nt, Human
aguacccaaaagcucagccagc

SEQ ID NO: 2181128 - RNA, 21 nt, Human
aguaccauuuauacaaauuag

SEQ ID NO: 2181129 - RNA, 14 nt, Human
aguaccauuuauac

SEQ ID NO: 2181130 - RNA, 15 nt, Human
aguacccaaaagcuc

SEQ ID NO: 2181131 - RNA, 21 nt, Human
aguacccaaaagcucagccag

SEQ ID NO: 2181132 - RNA, 16 nt, Human
aguacauuuggagaca

SEQ ID NO: 2181133 - RNA, 21 nt, Human
aguaccuauaaaguaaagcua

SEQ ID NO: 2181134 - RNA, 23 nt, Human
aguaccuauaaaguaaagcuaaa

SEQ ID NO: 2181135 - RNA, 15 nt, Human
aguaccuccugcccc

SEQ ID NO: 2181136 - RNA, 15 nt, Human
aguaccuauaaagua

SEQ ID NO: 2181137 - RNA, 19 nt, Human
aguacccguucacauuuuu

SEQ ID NO: 2181138 - RNA, 16 nt, Human
aguacccucucagcuc

SEQ ID NO: 2181139 - RNA, 18 nt, Human
aguacccucucagcucca

SEQ ID NO: 2181140 - RNA, 19 nt, Human
aguacccucucagcuccag

SEQ ID NO: 2181141 - RNA, 20 nt, Human
aguagaagucuuagauguau

SEQ ID NO: 2181142 - RNA, 19 nt, Human
aguagaagucuuagaugua

SEQ ID NO: 2181143 - RNA, 21 nt, Human
aguagaagucuuagauguaua

SEQ ID NO: 2181144 - RNA, 12 nt, Human
aguaccuccugu

SEQ ID NO: 2181145 - RNA, 22 nt, Human
aguaccuccugucucuggccug

SEQ ID NO: 2181146 - RNA, 14 nt, Human
aguaauagagcaaa

SEQ ID NO: 2181147 - RNA, 15 nt, Human
aguaauaugcacaca

SEQ ID NO: 2181148 - RNA, 14 nt, Human
aguaauaugcacac

SEQ ID NO: 2181149 - RNA, 17 nt, Human
aguaaugauaacuggaa

SEQ ID NO: 2181150 - RNA, 18 nt, Human
aguaaugauaacuggaaa

SEQ ID NO: 2181151 - RNA, 20 nt, Human
aguaaugauaacuggaaacu

SEQ ID NO: 2181152 - RNA, 14 nt, Human
aguaaaacuugcug

SEQ ID NO: 2181153 - RNA, 19 nt, Human
agguuuuuguuuguuuccu

SEQ ID NO: 2181154 - RNA, 13 nt, Human
aguaaaauccaca

SEQ ID NO: 2181155 - RNA, 17 nt, Human
agguuuuauaaggcuga

SEQ ID NO: 2181156 - RNA, 20 nt, Human
agguuuuuauuaguaccaua

SEQ ID NO: 2181157 - RNA, 15 nt, Human
agguuuuuauuagua

SEQ ID NO: 2181158 - RNA, 12 nt, Human
agguuuuucaau

SEQ ID NO: 2181159 - RNA, 13 nt, Human
agguuuuucaauu

SEQ ID NO: 2181160 - RNA, 13 nt, Human
agguuuuuauuag

SEQ ID NO: 2181161 - RNA, 14 nt, Human
agguuuuauuuugu

SEQ ID NO: 2181162 - RNA, 20 nt, Human
agguuuuuggaauuaugucu

SEQ ID NO: 2181163 - RNA, 13 nt, Human
agguuuuucuuaa

SEQ ID NO: 2181164 - RNA, 23 nt, Human
agguuuuucaauuaaacggauua

SEQ ID NO: 2181165 - RNA, 14 nt, Human
agguuuuucaauua

SEQ ID NO: 2181166 - RNA, 15 nt, Human
agguuuuucaauuaa

SEQ ID NO: 2181167 - RNA, 16 nt, Human
agguuuuucaauuaaa

SEQ ID NO: 2181168 - RNA, 17 nt, Human
agguuuuucaauuaaac

SEQ ID NO: 2181169 - RNA, 18 nt, Human
agguuuuucaauuaaacg

SEQ ID NO: 2181170 - RNA, 20 nt, Human
agguuuuucaauuaaacgga

SEQ ID NO: 2181171 - RNA, 21 nt, Human
agguuuuucaauuaaacggau

SEQ ID NO: 2181172 - RNA, 22 nt, Human
agguuuuucaauuaaacggauu

SEQ ID NO: 2181173 - RNA, 11 nt, Human
uguacuuugug

SEQ ID NO: 2181174 - RNA, 22 nt, Human
uguacuuggaguauuggggucu

SEQ ID NO: 2181175 - RNA, 15 nt, Human
uguacuugucaaaga

SEQ ID NO: 2181176 - RNA, 18 nt, Human
uguagaaaagggaacuga

SEQ ID NO: 2181177 - RNA, 19 nt, Human
uguagaaaagggaacugaa

SEQ ID NO: 2181178 - RNA, 20 nt, Human
uguagaaaagggaacugaac

SEQ ID NO: 2181179 - RNA, 21 nt, Human
uguagaaaagggaacugaaca

SEQ ID NO: 2181180 - RNA, 22 nt, Human
uguacuugcucuugaugccugg

SEQ ID NO: 2181181 - RNA, 23 nt, Human
uguacuugcucuugaugccuggc

SEQ ID NO: 2181182 - RNA, 19 nt, Human
uguacuugcucuugaugcc

SEQ ID NO: 2181183 - RNA, 21 nt, Human
agguuuaggcugguggcccag

SEQ ID NO: 2181184 - RNA, 20 nt, Human
agguuuaggcugguggccca

SEQ ID NO: 2181185 - RNA, 18 nt, Human
agguuuaggcugguggcc

SEQ ID NO: 2181186 - RNA, 23 nt, Human
agguuuacaauuuacaaagugug

SEQ ID NO: 2181187 - RNA, 18 nt, Human
agguuuacaauuuacaaa

SEQ ID NO: 2181188 - RNA, 22 nt, Human
agguuuacaauuuacaaagugu

SEQ ID NO: 2181189 - RNA, 23 nt, Human
uguagaaaagggaacugaacauu

SEQ ID NO: 2181190 - RNA, 21 nt, Human
uguagaaaugaugauguggaa

SEQ ID NO: 2181191 - RNA, 23 nt, Human
uguagaaaauuuguuauuuugca

SEQ ID NO: 2181192 - RNA, 13 nt, Human
uguagaaaugguu

SEQ ID NO: 2181193 - RNA, 21 nt, Human
uguagaaaugguuguauuaga

SEQ ID NO: 2181194 - RNA, 14 nt, Human
uguacuuuguacaa

SEQ ID NO: 2181195 - RNA, 16 nt, Human
uguagagccagggucu

SEQ ID NO: 2181196 - RNA, 18 nt, Human
uguagagccagggucuca

SEQ ID NO: 2181197 - RNA, 14 nt, Human
uguagagcuucugg

SEQ ID NO: 2181198 - RNA, 23 nt, Human
agguuuguuuagaagaagugugu

SEQ ID NO: 2181199 - RNA, 16 nt, Human
uguagaggagaaacug

SEQ ID NO: 2181200 - RNA, 15 nt, Human
agguuuuaaagugau

SEQ ID NO: 2181201 - RNA, 17 nt, Human
agguuuuaaagugauua

SEQ ID NO: 2181202 - RNA, 21 nt, Human
agguuuuaaagugauuaaacg

SEQ ID NO: 2181203 - RNA, 14 nt, Human
agguuuuaaguugu

SEQ ID NO: 2181204 - RNA, 19 nt, Human
agguuuuaaguuguuugca

SEQ ID NO: 2181205 - RNA, 11 nt, Human
uguauguuuac

SEQ ID NO: 2181206 - RNA, 13 nt, Human
uguauguuuacau

SEQ ID NO: 2181207 - RNA, 15 nt, Human
uguauguuuacauau

SEQ ID NO: 2181208 - RNA, 16 nt, Human
uguauguuuacauauc

SEQ ID NO: 2181209 - RNA, 22 nt, Human
uguauguuugcacacuugugug

SEQ ID NO: 2181210 - RNA, 11 nt, Human
uguauguuuug

SEQ ID NO: 2181211 - RNA, 16 nt, Human
uguauguuugcacacu

SEQ ID NO: 2181212 - RNA, 14 nt, Human
uguauguuugcaca

SEQ ID NO: 2181213 - RNA, 19 nt, Human
uguauguuuugguaucugu

SEQ ID NO: 2181214 - RNA, 13 nt, Human
uguauuacaaauc

SEQ ID NO: 2181215 - RNA, 17 nt, Human
uguauucccaguuacuu

SEQ ID NO: 2181216 - RNA, 20 nt, Human
uguauucuagcuaauguaau

SEQ ID NO: 2181217 - RNA, 17 nt, Human
uguauguuuuuuuucug

SEQ ID NO: 2181218 - RNA, 21 nt, Human
uguauuaauauucauuguaua

SEQ ID NO: 2181219 - RNA, 22 nt, Human
uguauuacaaauccaaugaaau

SEQ ID NO: 2181220 - RNA, 16 nt, Human
ugucaagucucugcug

SEQ ID NO: 2181221 - RNA, 19 nt, Human
ugucaaggcugcuuagaau

SEQ ID NO: 2181222 - RNA, 18 nt, Human
ugucaaggcugcuuagaa

SEQ ID NO: 2181223 - RNA, 22 nt, Human
ugucaaacaaagccagaagcug

SEQ ID NO: 2181224 - RNA, 21 nt, Human
ugucaaacaaagccagaagcu

SEQ ID NO: 2181225 - RNA, 17 nt, Human
ugucaaacaaagccaga

SEQ ID NO: 2181226 - RNA, 16 nt, Human
ugucaaacaaagccag

SEQ ID NO: 2181227 - RNA, 15 nt, Human
ugucaaaauaauuuu

SEQ ID NO: 2181228 - RNA, 23 nt, Human
ugucaaaaaugucuuggguaggc

SEQ ID NO: 2181229 - RNA, 14 nt, Human
ugucaaaaaaaaaa

SEQ ID NO: 2181230 - RNA, 17 nt, Human
uguauuuuuuugcaagu

SEQ ID NO: 2181231 - RNA, 20 nt, Human
uguauuuuuuugcaagugaa

SEQ ID NO: 2181232 - RNA, 21 nt, Human
uguauuuuuuuuucuaagaga

SEQ ID NO: 2181233 - RNA, 22 nt, Human
uguauuuuuuuuucuaagagaa

SEQ ID NO: 2181234 - RNA, 22 nt, Human
uguauucuagcuaauguaauaa

SEQ ID NO: 2181235 - RNA, 20 nt, Human
uguauucucuccuguaccuc

SEQ ID NO: 2181236 - RNA, 19 nt, Human
uguauucucuccuguaccu

SEQ ID NO: 2181237 - RNA, 21 nt, Human
uguaucaggaaauauauaugu

SEQ ID NO: 2181238 - RNA, 18 nt, Human
uguaucagaggccuauaa

SEQ ID NO: 2181239 - RNA, 21 nt, Human
uguaucaggugcccaucccug

SEQ ID NO: 2181240 - RNA, 15 nt, Human
uguaucauagaaaug

SEQ ID NO: 2181241 - RNA, 17 nt, Human
uguaucauuugaacaac

SEQ ID NO: 2181242 - RNA, 21 nt, Human
uguaucaucuggauaggagcc

SEQ ID NO: 2181243 - RNA, 17 nt, Human
uguaucauagaaaugua

SEQ ID NO: 2181244 - RNA, 16 nt, Human
uguaucauagaaaugu

SEQ ID NO: 2181245 - RNA, 13 nt, Human
uguauguauaauu

SEQ ID NO: 2181246 - RNA, 15 nt, Human
uguauguauaauuca

SEQ ID NO: 2181247 - RNA, 18 nt, Human
uguaugucucgugguagg

SEQ ID NO: 2181248 - RNA, 14 nt, Human
uguaugucuuggac

SEQ ID NO: 2181249 - RNA, 19 nt, Human
uguaugucuuggacacugu

SEQ ID NO: 2181250 - RNA, 12 nt, Human
uguauguggggg

SEQ ID NO: 2181251 - RNA, 21 nt, Human
uguaugucagacauccauguu

SEQ ID NO: 2181252 - RNA, 11 nt, Human
uguaugugcac

SEQ ID NO: 2181253 - RNA, 16 nt, Human
uguaugugcacuguca

SEQ ID NO: 2181254 - RNA, 17 nt, Human
uguaugugcacugucac

SEQ ID NO: 2181255 - RNA, 14 nt, Human
uguauguguguaug

SEQ ID NO: 2181256 - RNA, 19 nt, Human
uguaugugcacugucacuu

SEQ ID NO: 2181257 - RNA, 20 nt, Human
uguaugugggggucugugug

SEQ ID NO: 2181258 - RNA, 17 nt, Human
uguaugugcgugugugc

SEQ ID NO: 2181259 - RNA, 21 nt, Human
uguagugccucuuucauccac

SEQ ID NO: 2181260 - RNA, 14 nt, Human
uguaguguuggaga

SEQ ID NO: 2181261 - RNA, 22 nt, Human
uguauauuugugauagcacuuu

SEQ ID NO: 2181262 - RNA, 22 nt, Human
uguauauuuuaagaaauaacag

SEQ ID NO: 2181263 - RNA, 15 nt, Human
uguaguguuggagaa

SEQ ID NO: 2181264 - RNA, 17 nt, Human
uguaucaaugaguaaca

SEQ ID NO: 2181265 - RNA, 23 nt, Human
uguauauuugugauagcacuuuc

SEQ ID NO: 2181266 - RNA, 18 nt, Human
uguaucacaaaucuuaac

SEQ ID NO: 2181267 - RNA, 15 nt, Human
uguaucacaaaucuu

SEQ ID NO: 2181268 - RNA, 13 nt, Human
aguagggucaggc

SEQ ID NO: 2181269 - RNA, 13 nt, Human
aguaggugcuuga

SEQ ID NO: 2181270 - RNA, 20 nt, Human
aguagguuggaagcuagcuc

SEQ ID NO: 2181271 - RNA, 23 nt, Human
aguagguuggaagcuagcucccc

SEQ ID NO: 2181272 - RNA, 13 nt, Human
aguaguaaaaauu

SEQ ID NO: 2181273 - RNA, 16 nt, Human
aguaguaauagagcaa

SEQ ID NO: 2181274 - RNA, 19 nt, Human
ugucaauuacaggaaguac

SEQ ID NO: 2181275 - RNA, 17 nt, Human
ugucaauuacaggaagu

SEQ ID NO: 2181276 - RNA, 18 nt, Human
ugucaagucucugcuggc

SEQ ID NO: 2181277 - RNA, 17 nt, Human
ugucaagucucugcugg

SEQ ID NO: 2181278 - RNA, 19 nt, Human
ugucaagucucugcuggcc

SEQ ID NO: 2181279 - RNA, 18 nt, Human
ugucaaguuccuuugggu

SEQ ID NO: 2181280 - RNA, 19 nt, Human
ugucaagugggaucuguca

SEQ ID NO: 2181281 - RNA, 14 nt, Human
ugucaaguugugcu

SEQ ID NO: 2181282 - RNA, 15 nt, Human
ugucaaguugugcuu

SEQ ID NO: 2181283 - RNA, 16 nt, Human
ugucaaguugugcuug

SEQ ID NO: 2181284 - RNA, 17 nt, Human
ugucaaguugugcuugu

SEQ ID NO: 2181285 - RNA, 14 nt, Human
ugucaauuacagga

SEQ ID NO: 2181286 - RNA, 15 nt, Human
ugucaauuacaggaa

SEQ ID NO: 2181287 - RNA, 15 nt, Human
aguaugguggcuggg

SEQ ID NO: 2181288 - RNA, 16 nt, Human
aguaugguggcugggu

SEQ ID NO: 2181289 - RNA, 18 nt, Human
aguaguaccaaaugcuuu

SEQ ID NO: 2181290 - RNA, 19 nt, Human
aguaguaccaaaugcuuua

SEQ ID NO: 2181291 - RNA, 21 nt, Human
aguaguaccaaaugcuuuaaa

SEQ ID NO: 2181292 - RNA, 14 nt, Human
aguaguacuugaaa

SEQ ID NO: 2181293 - RNA, 17 nt, Human
aguaguaccaaaugcuu

SEQ ID NO: 2181294 - RNA, 14 nt, Human
aguaguaaaaauua

SEQ ID NO: 2181295 - RNA, 18 nt, Human
aguaguaaaaauuaaaaa

SEQ ID NO: 2181296 - RNA, 22 nt, Human
aguaguaccaaaugcuuuaaaa

SEQ ID NO: 2181297 - RNA, 15 nt, Human
aguauuacuucugcu

SEQ ID NO: 2181298 - RNA, 17 nt, Human
aguaugguggcuggguu

SEQ ID NO: 2181299 - RNA, 18 nt, Human
aguauuacuucugcuaca

SEQ ID NO: 2181300 - RNA, 18 nt, Human
aguauuagaauaccacag

SEQ ID NO: 2181301 - RNA, 14 nt, Human
aguaugguggcugg

SEQ ID NO: 2181302 - RNA, 14 nt, Human
aguauugaagcauu

SEQ ID NO: 2181303 - RNA, 18 nt, Human
aguauucuugucaaaaaa

SEQ ID NO: 2181304 - RNA, 12 nt, Human
aguauucuucuc

SEQ ID NO: 2181305 - RNA, 14 nt, Human
aguauucuucucuu

SEQ ID NO: 2181306 - RNA, 15 nt, Human
aguauucuugucaaa

SEQ ID NO: 2181307 - RNA, 21 nt, Human
aguauugaagcauuuuauaaa

SEQ ID NO: 2181308 - RNA, 20 nt, Human
aguauugaagcauuuuauaa

SEQ ID NO: 2181309 - RNA, 18 nt, Human
aguauugaagcauuuuau

SEQ ID NO: 2181310 - RNA, 15 nt, Human
aguauugaagcauuu

SEQ ID NO: 2181311 - RNA, 23 nt, Human
agucacacaguauuacuucugcu

SEQ ID NO: 2181312 - RNA, 18 nt, Human
aguauuucuaugaaauau

SEQ ID NO: 2181313 - RNA, 17 nt, Human
aguauuucuaugaaaua

SEQ ID NO: 2181314 - RNA, 16 nt, Human
aguauuucuaugaaau

SEQ ID NO: 2181315 - RNA, 15 nt, Human
agucacacagugagu

SEQ ID NO: 2181316 - RNA, 23 nt, Human
agucacacagugagucgaggaca

SEQ ID NO: 2181317 - RNA, 19 nt, Human
agucaccccggccaccugc

SEQ ID NO: 2181318 - RNA, 16 nt, Human
agucacacgggggcag

SEQ ID NO: 2181319 - RNA, 19 nt, Human
agucacccuaccugugccu

SEQ ID NO: 2181320 - RNA, 19 nt, Human
agucacacgggggcagcug

SEQ ID NO: 2181321 - RNA, 14 nt, Human
agucaccucaugga

SEQ ID NO: 2181322 - RNA, 15 nt, Human
agucaccucauggaa

SEQ ID NO: 2181323 - RNA, 17 nt, Human
agucaccucauggaauu

SEQ ID NO: 2181324 - RNA, 20 nt, Human
agucacccuaccugugccug

SEQ ID NO: 2181325 - RNA, 20 nt, Human
agcuggguaaucgauggggg

SEQ ID NO: 2181326 - RNA, 14 nt, Human
agcugggucaggca

SEQ ID NO: 2181327 - RNA, 19 nt, Human
agcugugcagguggggaga

SEQ ID NO: 2181328 - RNA, 12 nt, Human
agcugugccacc

SEQ ID NO: 2181329 - RNA, 13 nt, Human
agcugugccaccc

SEQ ID NO: 2181330 - RNA, 18 nt, Human
agcugugccacccugggc

SEQ ID NO: 2181331 - RNA, 19 nt, Human
agcugugccacccugggcu

SEQ ID NO: 2181332 - RNA, 20 nt, Human
agcugugccacccugggcuc

SEQ ID NO: 2181333 - RNA, 22 nt, Human
agcugggguggggaccucaggc

SEQ ID NO: 2181334 - RNA, 23 nt, Human
agcugggguggggaccucaggcc

SEQ ID NO: 2181335 - RNA, 20 nt, Human
agcugggacuacaggcaccc

SEQ ID NO: 2181336 - RNA, 23 nt, Human
agcugggacuacaggcacccacc

SEQ ID NO: 2181337 - RNA, 16 nt, Human
agcugggacuacaggu

SEQ ID NO: 2181338 - RNA, 20 nt, Human
agcugggguggggaccucag

SEQ ID NO: 2181339 - RNA, 14 nt, Human
agcugugugaaaua

SEQ ID NO: 2181340 - RNA, 13 nt, Human
agcugugugaaau

SEQ ID NO: 2181341 - RNA, 24 nt, Human
agcuguguccuugcaccugcaucc

SEQ ID NO: 2181342 - RNA, 21 nt, Human
agcuguguccuugcaccugca

SEQ ID NO: 2181343 - RNA, 14 nt, Human
agcuguuacugucu

SEQ ID NO: 2181344 - RNA, 18 nt, Human
agcuguuacugucuucag

SEQ ID NO: 2181345 - RNA, 21 nt, Human
agcuguggguacagagagguc

SEQ ID NO: 2181346 - RNA, 20 nt, Human
agcuguguccuugcaccugc

SEQ ID NO: 2181347 - RNA, 18 nt, Human
agcuguguccuugcaccu

SEQ ID NO: 2181348 - RNA, 15 nt, Human
agcuguguccuugca

SEQ ID NO: 2181349 - RNA, 17 nt, Human
agcugugcucuggacag

SEQ ID NO: 2181350 - RNA, 18 nt, Human
agcugugcucuggacagg

SEQ ID NO: 2181351 - RNA, 21 nt, Human
agcugugccacccugggcucu

SEQ ID NO: 2181352 - RNA, 22 nt, Human
agcugugccacccugggcucug

SEQ ID NO: 2181353 - RNA, 19 nt, Human
agcuguggacuuuguucac

SEQ ID NO: 2181354 - RNA, 16 nt, Human
ugccuuaacuggagcc

SEQ ID NO: 2181355 - RNA, 17 nt, Human
ugccuuaaagucaguaa

SEQ ID NO: 2181356 - RNA, 22 nt, Human
ugccuguucaguuacagaaagu

SEQ ID NO: 2181357 - RNA, 20 nt, Human
ugccuuacccucauguucuu

SEQ ID NO: 2181358 - RNA, 16 nt, Human
ugccuguugggccagg

SEQ ID NO: 2181359 - RNA, 17 nt, Human
ugccuguugggccagga

SEQ ID NO: 2181360 - RNA, 19 nt, Human
ugccuugggcugcuccuca

SEQ ID NO: 2181361 - RNA, 18 nt, Human
ugccuuggggaauuuccu

SEQ ID NO: 2181362 - RNA, 19 nt, Human
ugccuuggggaauuuccuc

SEQ ID NO: 2181363 - RNA, 17 nt, Human
ugccuugggcugcuccu

SEQ ID NO: 2181364 - RNA, 16 nt, Human
ugccuugggcugcucc

SEQ ID NO: 2181365 - RNA, 16 nt, Human
ugccuuggggacaaga

SEQ ID NO: 2181366 - RNA, 17 nt, Human
ugccuuaccuccugccc

SEQ ID NO: 2181367 - RNA, 16 nt, Human
ugccuuaccuccugcc

SEQ ID NO: 2181368 - RNA, 15 nt, Human
ugccuuaccuccugc

SEQ ID NO: 2181369 - RNA, 14 nt, Human
ugccuuaccuccug

SEQ ID NO: 2181370 - RNA, 23 nt, Human
ugccuuaauaagaaugguugccu

SEQ ID NO: 2181371 - RNA, 21 nt, Human
ugccuuacccucauguucuua

SEQ ID NO: 2181372 - RNA, 16 nt, Human
ugccugugccacccac

SEQ ID NO: 2181373 - RNA, 17 nt, Human
ugccugugaggcagggg

SEQ ID NO: 2181374 - RNA, 14 nt, Human
ugccugugccaccc

SEQ ID NO: 2181375 - RNA, 23 nt, Human
agcugugugaaauaccagugugg

SEQ ID NO: 2181376 - RNA, 19 nt, Human
agcuguuauuucuauuuuu

SEQ ID NO: 2181377 - RNA, 20 nt, Human
ugccugugccacccaccagg

SEQ ID NO: 2181378 - RNA, 19 nt, Human
ugccugugccacccaccag

SEQ ID NO: 2181379 - RNA, 14 nt, Human
ugccuguggaacug

SEQ ID NO: 2181380 - RNA, 12 nt, Human
ugccugugccug

SEQ ID NO: 2181381 - RNA, 19 nt, Human
agcuguuacugucuucagu

SEQ ID NO: 2181382 - RNA, 14 nt, Human
agcuguucacagcc

SEQ ID NO: 2181383 - RNA, 14 nt, Human
ugccuguucccauu

SEQ ID NO: 2181384 - RNA, 18 nt, Human
ugccuguucaguuacaga

SEQ ID NO: 2181385 - RNA, 19 nt, Human
ugccuguucaguuacagaa

SEQ ID NO: 2181386 - RNA, 20 nt, Human
ugccuguucaguuacagaaa

SEQ ID NO: 2181387 - RNA, 21 nt, Human
ugccuguucaguuacagaaag

SEQ ID NO: 2181388 - RNA, 21 nt, Human
ugccuguguccaugcgcucag

SEQ ID NO: 2181389 - RNA, 22 nt, Human
ugccuguguccaugcgcucagg

SEQ ID NO: 2181390 - RNA, 12 nt, Human
ugccuguucagu

SEQ ID NO: 2181391 - RNA, 13 nt, Human
ugccuguucaguu

SEQ ID NO: 2181392 - RNA, 17 nt, Human
ugccuguucaguuacag

SEQ ID NO: 2181393 - RNA, 11 nt, Human
ugccuguggcg

SEQ ID NO: 2181394 - RNA, 19 nt, Human
ugccuguggaaucuggagu

SEQ ID NO: 2181395 - RNA, 21 nt, Human
ugccuguggaaucuggaguga

SEQ ID NO: 2181396 - RNA, 21 nt, Human
ugccuguggcgccgucuccag

SEQ ID NO: 2181397 - RNA, 22 nt, Human
ugccuguggcgccgucuccagg

SEQ ID NO: 2181398 - RNA, 23 nt, Human
ugccuguggcgccgucuccaggg

SEQ ID NO: 2181399 - RNA, 15 nt, Human
ugccuguguccaugc

SEQ ID NO: 2181400 - RNA, 19 nt, Human
ugccuguguccaugcgcuc

SEQ ID NO: 2181401 - RNA, 19 nt, Human
ugccucagcccugacccug

SEQ ID NO: 2181402 - RNA, 13 nt, Human
ugccuccacuccc

SEQ ID NO: 2181403 - RNA, 14 nt, Human
ugccuccacuccca

SEQ ID NO: 2181404 - RNA, 15 nt, Human
ugccuccacucccac

SEQ ID NO: 2181405 - RNA, 16 nt, Human
ugccuccacucccacu

SEQ ID NO: 2181406 - RNA, 17 nt, Human
ugccuccacucccacuu

SEQ ID NO: 2181407 - RNA, 14 nt, Human
ugccucagccuccc

SEQ ID NO: 2181408 - RNA, 17 nt, Human
ugccuccaggaaccaca

SEQ ID NO: 2181409 - RNA, 14 nt, Human
ugccuccaggaacc

SEQ ID NO: 2181410 - RNA, 19 nt, Human
ugccuccacucccacuucc

SEQ ID NO: 2181411 - RNA, 20 nt, Human
ugccuccacucccacuuccc

SEQ ID NO: 2181412 - RNA, 20 nt, Human
ugccuccaggaaccacacca

SEQ ID NO: 2181413 - RNA, 19 nt, Human
ugccuccaggaaccacacc

SEQ ID NO: 2181414 - RNA, 12 nt, Human
ugccuccagggc

SEQ ID NO: 2181415 - RNA, 14 nt, Human
ugccuccagggcug

SEQ ID NO: 2181416 - RNA, 15 nt, Human
ugccuccagggcugg

SEQ ID NO: 2181417 - RNA, 16 nt, Human
ugccuccagggcugga

SEQ ID NO: 2181418 - RNA, 17 nt, Human
ugccuccagggcuggac

SEQ ID NO: 2181419 - RNA, 18 nt, Human
ugccucugccucugacac

SEQ ID NO: 2181420 - RNA, 20 nt, Human
ugccucugccucugacacac

SEQ ID NO: 2181421 - RNA, 17 nt, Human
ugccucugccucugaca

SEQ ID NO: 2181422 - RNA, 18 nt, Human
ugccuccagggcuggacu

SEQ ID NO: 2181423 - RNA, 19 nt, Human
ugccuccagggcuggacug

SEQ ID NO: 2181424 - RNA, 20 nt, Human
ugccuccagggcuggacuga

SEQ ID NO: 2181425 - RNA, 21 nt, Human
ugccuccagggcuggacugag

SEQ ID NO: 2181426 - RNA, 22 nt, Human
ugccugcuuuuuauggccugug

SEQ ID NO: 2181427 - RNA, 20 nt, Human
ugccugcuuuuuauggccug

SEQ ID NO: 2181428 - RNA, 21 nt, Human
ugccugcuuuuuauggccugu

SEQ ID NO: 2181429 - RNA, 12 nt, Human
ugccucugccug

SEQ ID NO: 2181430 - RNA, 23 nt, Human
ugccuccagggcuggacugaggc

SEQ ID NO: 2181431 - RNA, 11 nt, Human
ugccuccaggu

SEQ ID NO: 2181432 - RNA, 20 nt, Human
ugccugcccaggccccugcc

SEQ ID NO: 2181433 - RNA, 22 nt, Human
ugccugcccaggccccugccac

SEQ ID NO: 2181434 - RNA, 23 nt, Human
ugccugcccaggccccugccacc

SEQ ID NO: 2181435 - RNA, 23 nt, Human
agcuggccgaggguccuggcucc

SEQ ID NO: 2181436 - RNA, 23 nt, Human
agcugcuucucccacuuggccaa

SEQ ID NO: 2181437 - RNA, 18 nt, Human
agcuggccgggagccuga

SEQ ID NO: 2181438 - RNA, 19 nt, Human
agcuggccgggagccugau

SEQ ID NO: 2181439 - RNA, 22 nt, Human
agcuggccgcgccaaauaaugu

SEQ ID NO: 2181440 - RNA, 16 nt, Human
agcuggccgugggccu

SEQ ID NO: 2181441 - RNA, 17 nt, Human
agcuggccgugggccug

SEQ ID NO: 2181442 - RNA, 15 nt, Human
agcuggcgucugucu

SEQ ID NO: 2181443 - RNA, 21 nt, Human
agcuggcgucaugcaaaguca

SEQ ID NO: 2181444 - RNA, 18 nt, Human
agcuggcgucugucuuca

SEQ ID NO: 2181445 - RNA, 19 nt, Human
agcuggccgugggccuggg

SEQ ID NO: 2181446 - RNA, 17 nt, Human
agcugcuggcuugcagu

SEQ ID NO: 2181447 - RNA, 14 nt, Human
agcugcuggcuugc

SEQ ID NO: 2181448 - RNA, 14 nt, Human
agcugcuggagacu

SEQ ID NO: 2181449 - RNA, 23 nt, Human
agcugcuggagacuccuaggcag

SEQ ID NO: 2181450 - RNA, 21 nt, Human
ugccuggacauuugccuugcu

SEQ ID NO: 2181451 - RNA, 23 nt, Human
ugccugcuuuucacugcugcaag

SEQ ID NO: 2181452 - RNA, 20 nt, Human
agcugcuugggcuucauccu

SEQ ID NO: 2181453 - RNA, 12 nt, Human
agcugcuucucc

SEQ ID NO: 2181454 - RNA, 22 nt, Human
agcugcuucucccacuuggcca

SEQ ID NO: 2181455 - RNA, 16 nt, Human
agcugcuugggcuuca

SEQ ID NO: 2181456 - RNA, 18 nt, Human
agcugccuguucagcucc

SEQ ID NO: 2181457 - RNA, 14 nt, Human
agcugccuguucag

SEQ ID NO: 2181458 - RNA, 16 nt, Human
agcugccuguucagcu

SEQ ID NO: 2181459 - RNA, 16 nt, Human
ugccuggauggggcug

SEQ ID NO: 2181460 - RNA, 17 nt, Human
ugccuggauggggcugc

SEQ ID NO: 2181461 - RNA, 20 nt, Human
ugccuggauggggcugcacc

SEQ ID NO: 2181462 - RNA, 21 nt, Human
ugccuggauggggcugcaccg

SEQ ID NO: 2181463 - RNA, 15 nt, Human
ugccauacuuugucu

SEQ ID NO: 2181464 - RNA, 22 nt, Human
ugccauaaaacauuaagaaaau

SEQ ID NO: 2181465 - RNA, 20 nt, Human
ugccauaaaacauuaagaaa

SEQ ID NO: 2181466 - RNA, 21 nt, Human
ugccauaaaacauuaagaaaa

SEQ ID NO: 2181467 - RNA, 23 nt, Human
ugccauaaaacauuaagaaaauc

SEQ ID NO: 2181468 - RNA, 13 nt, Human
ugccauagaguuu

SEQ ID NO: 2181469 - RNA, 18 nt, Human
ugccauagaguuuaacac

SEQ ID NO: 2181470 - RNA, 22 nt, Human
ugccauacuuugucugaaaaau

SEQ ID NO: 2181471 - RNA, 17 nt, Human
ugccauacuuugucuga

SEQ ID NO: 2181472 - RNA, 18 nt, Human
ugccauacuuugucugaa

SEQ ID NO: 2181473 - RNA, 17 nt, Human
ugccauagucacauggc

SEQ ID NO: 2181474 - RNA, 21 nt, Human
ugccauauugcacaugucuua

SEQ ID NO: 2181475 - RNA, 16 nt, Human
ugccauagucacaugg

SEQ ID NO: 2181476 - RNA, 21 nt, Human
ugccauagaguuuaacacaag

SEQ ID NO: 2181477 - RNA, 17 nt, Human
ugccauauuuucaccau

SEQ ID NO: 2181478 - RNA, 14 nt, Human
ugccauauuuucac

SEQ ID NO: 2181479 - RNA, 13 nt, Human
ugccauauuuuca

SEQ ID NO: 2181480 - RNA, 23 nt, Human
ugccaucaucuccugccuuccuc

SEQ ID NO: 2181481 - RNA, 16 nt, Human
ugccaucauguuuaca

SEQ ID NO: 2181482 - RNA, 16 nt, Human
ugccaucaucuccugc

SEQ ID NO: 2181483 - RNA, 15 nt, Human
ugccaucaucuccug

SEQ ID NO: 2181484 - RNA, 13 nt, Human
ugccaucaucucc

SEQ ID NO: 2181485 - RNA, 20 nt, Human
ugccauagaguuuaacacaa

SEQ ID NO: 2181486 - RNA, 14 nt, Human
agcucccaggccga

SEQ ID NO: 2181487 - RNA, 21 nt, Human
agcucccaggccgagaagcca

SEQ ID NO: 2181488 - RNA, 13 nt, Human
agcucccaggccg

SEQ ID NO: 2181489 - RNA, 13 nt, Human
agcucccaggaac

SEQ ID NO: 2181490 - RNA, 14 nt, Human
agcucccaggaaca

SEQ ID NO: 2181491 - RNA, 23 nt, Human
agcucccaggcauuccccaggag

SEQ ID NO: 2181492 - RNA, 17 nt, Human
agcucccauuucuacuc

SEQ ID NO: 2181493 - RNA, 15 nt, Human
agcuccuucuguccu

SEQ ID NO: 2181494 - RNA, 13 nt, Human
agcuccaguucga

SEQ ID NO: 2181495 - RNA, 13 nt, Human
agcuccaucucca

SEQ ID NO: 2181496 - RNA, 15 nt, Human
agcuccaucuccacu

SEQ ID NO: 2181497 - RNA, 16 nt, Human
agcuccaucuccacuc

SEQ ID NO: 2181498 - RNA, 12 nt, Human
agcucccaggaa

SEQ ID NO: 2181499 - RNA, 13 nt, Human
agcucccaggcau

SEQ ID NO: 2181500 - RNA, 22 nt, Human
agcuccuugggaggccccacug

SEQ ID NO: 2181501 - RNA, 16 nt, Human
agcucccauuucuacu

SEQ ID NO: 2181502 - RNA, 16 nt, Human
agcuccuucuguccua

SEQ ID NO: 2181503 - RNA, 21 nt, Human
agcuccuucuguccuacucug

SEQ ID NO: 2181504 - RNA, 20 nt, Human
agcucgguggacccagggau

SEQ ID NO: 2181505 - RNA, 17 nt, Human
agcucguguauccuggg

SEQ ID NO: 2181506 - RNA, 11 nt, Human
agcucucugca

SEQ ID NO: 2181507 - RNA, 18 nt, Human
agcucugaaaccaguguu

SEQ ID NO: 2181508 - RNA, 19 nt, Human
agcucgguggacccaggga

SEQ ID NO: 2181509 - RNA, 18 nt, Human
agcucgguggacccaggg

SEQ ID NO: 2181510 - RNA, 17 nt, Human
agcucgguggacccagg

SEQ ID NO: 2181511 - RNA, 16 nt, Human
agcucgguggacccag

SEQ ID NO: 2181512 - RNA, 15 nt, Human
agcucgguggaccca

SEQ ID NO: 2181513 - RNA, 14 nt, Human
agcucgguggaccc

SEQ ID NO: 2181514 - RNA, 12 nt, Human
agcucgguggac

SEQ ID NO: 2181515 - RNA, 20 nt, Human
agcucuggcuuccagaaaac

SEQ ID NO: 2181516 - RNA, 12 nt, Human
agcucuggcuuc

SEQ ID NO: 2181517 - RNA, 15 nt, Human
agcucugggagagga

SEQ ID NO: 2181518 - RNA, 18 nt, Human
agcucugggagaggauuu

SEQ ID NO: 2181519 - RNA, 23 nt, Human
agcucuggcugaacccugugcug

SEQ ID NO: 2181520 - RNA, 23 nt, Human
agcucugaagucacaucacagga

SEQ ID NO: 2181521 - RNA, 21 nt, Human
agcucugaagucacaucacag

SEQ ID NO: 2181522 - RNA, 19 nt, Human
agcucugaaaccaguguua

SEQ ID NO: 2181523 - RNA, 15 nt, Human
agcucucugcaucua

SEQ ID NO: 2181524 - RNA, 14 nt, Human
agcucuguccuggg

SEQ ID NO: 2181525 - RNA, 17 nt, Human
agcucugguccauagag

SEQ ID NO: 2181526 - RNA, 12 nt, Human
agcucuggucca

SEQ ID NO: 2181527 - RNA, 16 nt, Human
ugccucagcccugacc

SEQ ID NO: 2181528 - RNA, 15 nt, Human
ugccucagcccugac

SEQ ID NO: 2181529 - RNA, 18 nt, Human
ugccgcaccccagagugu

SEQ ID NO: 2181530 - RNA, 14 nt, Human
ugccgcagcccugc

SEQ ID NO: 2181531 - RNA, 12 nt, Human
ugccgcagcccu

SEQ ID NO: 2181532 - RNA, 12 nt, Human
ugccucagccuc

SEQ ID NO: 2181533 - RNA, 13 nt, Human
ugccucagccucc

SEQ ID NO: 2181534 - RNA, 15 nt, Human
ugccgcaccccagag

SEQ ID NO: 2181535 - RNA, 13 nt, Human
ugccgcaccccag

SEQ ID NO: 2181536 - RNA, 12 nt, Human
ugccgcacccca

SEQ ID NO: 2181537 - RNA, 22 nt, Human
ugccgcaauggccaugugggga

SEQ ID NO: 2181538 - RNA, 20 nt, Human
ugccgcaagucugcagcccg

SEQ ID NO: 2181539 - RNA, 17 nt, Human
ugccgcaauacaggaac

SEQ ID NO: 2181540 - RNA, 13 nt, Human
ugccgcagagcug

SEQ ID NO: 2181541 - RNA, 14 nt, Human
ugccgcagagcugg

SEQ ID NO: 2181542 - RNA, 15 nt, Human
ugccgcagagcuggc

SEQ ID NO: 2181543 - RNA, 17 nt, Human
ugccgcagagcuggccg

SEQ ID NO: 2181544 - RNA, 22 nt, Human
ugccgaccucguccucccccug

SEQ ID NO: 2181545 - RNA, 14 nt, Human
ugccgacuccuggg

SEQ ID NO: 2181546 - RNA, 15 nt, Human
ugccgacuccugggu

SEQ ID NO: 2181547 - RNA, 21 nt, Human
ugccgauauacucuagaugaa

SEQ ID NO: 2181548 - RNA, 21 nt, Human
ugccgaccucguccucccccu

SEQ ID NO: 2181549 - RNA, 17 nt, Human
ugccgaccucguccucc

SEQ ID NO: 2181550 - RNA, 15 nt, Human
ugccgaccucguccu

SEQ ID NO: 2181551 - RNA, 14 nt, Human
ugccgaccucgucc

SEQ ID NO: 2181552 - RNA, 23 nt, Human
ugccgaccgaggcuggagcuggc

SEQ ID NO: 2181553 - RNA, 22 nt, Human
ugccgaccgaggcuggagcugg

SEQ ID NO: 2181554 - RNA, 16 nt, Human
ugccgaccgaggcugg

SEQ ID NO: 2181555 - RNA, 15 nt, Human
ugccgaccgaggcug

SEQ ID NO: 2181556 - RNA, 22 nt, Human
ugccgaccagagccccacacgg

SEQ ID NO: 2181557 - RNA, 21 nt, Human
ugccgaccagagccccacacg

SEQ ID NO: 2181558 - RNA, 15 nt, Human
ugccgaccagagccc

SEQ ID NO: 2181559 - RNA, 15 nt, Human
ugccgacagaaggaa

SEQ ID NO: 2181560 - RNA, 18 nt, Human
ugcccuuacacuuacugu

SEQ ID NO: 2181561 - RNA, 20 nt, Human
ugcccuuacacuuacuguug

SEQ ID NO: 2181562 - RNA, 15 nt, Human
ugcccuuaaaucaua

SEQ ID NO: 2181563 - RNA, 19 nt, Human
ugcccuguuguguauagau

SEQ ID NO: 2181564 - RNA, 20 nt, Human
ugcccuguuguguauagaug

SEQ ID NO: 2181565 - RNA, 22 nt, Human
ugccgaaugugcagguuuguua

SEQ ID NO: 2181566 - RNA, 18 nt, Human
ugcccuuaccugccagga

SEQ ID NO: 2181567 - RNA, 22 nt, Human
agcugcccuccuuguccaccca

SEQ ID NO: 2181568 - RNA, 17 nt, Human
ugcccuguucucuacca

SEQ ID NO: 2181569 - RNA, 19 nt, Human
ugcccuguucucuaccaag

SEQ ID NO: 2181570 - RNA, 20 nt, Human
ugcccuguuaaaagaugaaa

SEQ ID NO: 2181571 - RNA, 16 nt, Human
agcugcagagccaccc

SEQ ID NO: 2181572 - RNA, 17 nt, Human
agcugccauccagggau

SEQ ID NO: 2181573 - RNA, 16 nt, Human
agcugccccagccaga

SEQ ID NO: 2181574 - RNA, 14 nt, Human
agcugccccagcca

SEQ ID NO: 2181575 - RNA, 15 nt, Human
agcugccccagccag

SEQ ID NO: 2181576 - RNA, 14 nt, Human
agcugcccagaguu

SEQ ID NO: 2181577 - RNA, 18 nt, Human
agcugcccagaguugcug

SEQ ID NO: 2181578 - RNA, 20 nt, Human
agcugccccggggaggggcg

SEQ ID NO: 2181579 - RNA, 14 nt, Human
agcugccccuggcu

SEQ ID NO: 2181580 - RNA, 11 nt, Human
agcugcccucc

SEQ ID NO: 2181581 - RNA, 11 nt, Human
agcugcagaac

SEQ ID NO: 2181582 - RNA, 15 nt, Human
agcugcagagacaga

SEQ ID NO: 2181583 - RNA, 22 nt, Human
agcugcacugaugcugccccuc

SEQ ID NO: 2181584 - RNA, 20 nt, Human
agcugcacugaugcugcccc

SEQ ID NO: 2181585 - RNA, 17 nt, Human
agcugcagagacagaga

SEQ ID NO: 2181586 - RNA, 18 nt, Human
agcugcagagacagagag

SEQ ID NO: 2181587 - RNA, 19 nt, Human
agcugcagagacagagagg

SEQ ID NO: 2181588 - RNA, 13 nt, Human
agcugcagagcca

SEQ ID NO: 2181589 - RNA, 20 nt, Human
agcugccagccgagauagcc

SEQ ID NO: 2181590 - RNA, 18 nt, Human
agcugcaagugacaucuc

SEQ ID NO: 2181591 - RNA, 15 nt, Human
agcugcaagugacau

SEQ ID NO: 2181592 - RNA, 21 nt, Human
agcugcaagugacaucucuuu

SEQ ID NO: 2181593 - RNA, 11 nt, Human
agcugcacuga

SEQ ID NO: 2181594 - RNA, 19 nt, Human
agcugcacugaugcugccc

SEQ ID NO: 2181595 - RNA, 17 nt, Human
agcugcacugaugcugc

SEQ ID NO: 2181596 - RNA, 15 nt, Human
agcugcacagggcag

SEQ ID NO: 2181597 - RNA, 19 nt, Human
agcugcacagggcagcugg

SEQ ID NO: 2181598 - RNA, 20 nt, Human
agcugcacagggcagcuggg

SEQ ID NO: 2181599 - RNA, 21 nt, Human
agcugcacagggcagcugggc

SEQ ID NO: 2181600 - RNA, 22 nt, Human
agcugcacagggcagcugggcc

SEQ ID NO: 2181601 - RNA, 23 nt, Human
agcugcacagggcagcugggccc

SEQ ID NO: 2181602 - RNA, 24 nt, Human
agcugcacagggcagcugggccca

SEQ ID NO: 2181603 - RNA, 16 nt, Human
agcucuguccugggag

SEQ ID NO: 2181604 - RNA, 21 nt, Human
agcucuguccugggagugagc

SEQ ID NO: 2181605 - RNA, 20 nt, Human
agcugauuuuaacaauaacu

SEQ ID NO: 2181606 - RNA, 13 nt, Human
agcugcaaaggac

SEQ ID NO: 2181607 - RNA, 19 nt, Human
agcugcaaaggacagaucc

SEQ ID NO: 2181608 - RNA, 16 nt, Human
agcugcaaaggacaga

SEQ ID NO: 2181609 - RNA, 15 nt, Human
agcugcaaaggacag

SEQ ID NO: 2181610 - RNA, 14 nt, Human
agcugcaaaggaca

SEQ ID NO: 2181611 - RNA, 23 nt, Human
agcucuguccugggagugagcug

SEQ ID NO: 2181612 - RNA, 16 nt, Human
aggaagaucuuaaauu

SEQ ID NO: 2181613 - RNA, 16 nt, Human
aggaagcaaacuaagc

SEQ ID NO: 2181614 - RNA, 19 nt, Human
aggaagaugggggcaagaa

SEQ ID NO: 2181615 - RNA, 20 nt, Human
aggaagaugggggcaagaag

SEQ ID NO: 2181616 - RNA, 18 nt, Human
aggaagaucuuaaauuuu

SEQ ID NO: 2181617 - RNA, 15 nt, Human
aggaagaugaaagag

SEQ ID NO: 2181618 - RNA, 17 nt, Human
aggaagaugaaagagga

SEQ ID NO: 2181619 - RNA, 18 nt, Human
aggaagaugggggcaaga

SEQ ID NO: 2181620 - RNA, 19 nt, Human
aggaagcaacgaagggaaa

SEQ ID NO: 2181621 - RNA, 21 nt, Human
aggaagcagaauaaagcaauu

SEQ ID NO: 2181622 - RNA, 22 nt, Human
aggaagcagaauaaagcaauuu

SEQ ID NO: 2181623 - RNA, 23 nt, Human
aggaagcagaauaaagcaauuuu

SEQ ID NO: 2181624 - RNA, 13 nt, Human
aggaagcaacgaa

SEQ ID NO: 2181625 - RNA, 22 nt, Human
aggaagaugggggcaagaagau

SEQ ID NO: 2181626 - RNA, 18 nt, Human
aggaagcauucagagagc

SEQ ID NO: 2181627 - RNA, 19 nt, Human
aggaagcauucagagagca

SEQ ID NO: 2181628 - RNA, 18 nt, Human
aggaagcagcuuucccca

SEQ ID NO: 2181629 - RNA, 13 nt, Human
aggaagccagcag

SEQ ID NO: 2181630 - RNA, 15 nt, Human
aggaagccaaagagu

SEQ ID NO: 2181631 - RNA, 13 nt, Human
aggaagcucaggg

SEQ ID NO: 2181632 - RNA, 14 nt, Human
aggaagcucagggc

SEQ ID NO: 2181633 - RNA, 15 nt, Human
aggaagccacagcug

SEQ ID NO: 2181634 - RNA, 16 nt, Human
aggaagccacagcugg

SEQ ID NO: 2181635 - RNA, 16 nt, Human
aggaagcucagggccu

SEQ ID NO: 2181636 - RNA, 15 nt, Human
aggaagcucagggcc

SEQ ID NO: 2181637 - RNA, 18 nt, Human
aggaagccacagcuggug

SEQ ID NO: 2181638 - RNA, 17 nt, Human
aggaaggaugagcauuu

SEQ ID NO: 2181639 - RNA, 14 nt, Human
aggaaggaugagca

SEQ ID NO: 2181640 - RNA, 14 nt, Human
aggaaggauuguaa

SEQ ID NO: 2181641 - RNA, 15 nt, Human
aggaaggauuguaaa

SEQ ID NO: 2181642 - RNA, 14 nt, Human
aggaaggcaagagg

SEQ ID NO: 2181643 - RNA, 15 nt, Human
aggaaggcaggaaga

SEQ ID NO: 2181644 - RNA, 17 nt, Human
aggaaggcaggaagaga

SEQ ID NO: 2181645 - RNA, 16 nt, Human
aggaaggauuguaaaa

SEQ ID NO: 2181646 - RNA, 17 nt, Human
aggaaggauuguaaaaa

SEQ ID NO: 2181647 - RNA, 18 nt, Human
aggaaggauuguaaaaaa

SEQ ID NO: 2181648 - RNA, 13 nt, Human
aggaaggcaagag

SEQ ID NO: 2181649 - RNA, 23 nt, Human
aggaauuaaguuagggaauggca

SEQ ID NO: 2181650 - RNA, 22 nt, Human
aggaauguuaaagucaguggga

SEQ ID NO: 2181651 - RNA, 22 nt, Human
aggaauucccagcccaaagcug

SEQ ID NO: 2181652 - RNA, 17 nt, Human
aggaauuaaguuaucuu

SEQ ID NO: 2181653 - RNA, 18 nt, Human
aggaauguagcugguuuc

SEQ ID NO: 2181654 - RNA, 21 nt, Human
aggaaugggggccucuucaaa

SEQ ID NO: 2181655 - RNA, 13 nt, Human
aggaaugggcugu

SEQ ID NO: 2181656 - RNA, 20 nt, Human
aggaaugggggccucuucaa

SEQ ID NO: 2181657 - RNA, 14 nt, Human
aggaauguuaaagu

SEQ ID NO: 2181658 - RNA, 16 nt, Human
aggaauguguggccug

SEQ ID NO: 2181659 - RNA, 19 nt, Human
aggaaggcaggaagagagc

SEQ ID NO: 2181660 - RNA, 13 nt, Human
aggaaggcggggc

SEQ ID NO: 2181661 - RNA, 20 nt, Human
aggaaggcucuucuccccag

SEQ ID NO: 2181662 - RNA, 21 nt, Human
aggaaggcucuucuccccaga

SEQ ID NO: 2181663 - RNA, 22 nt, Human
ugcugagagacccaaggaggaa

SEQ ID NO: 2181664 - RNA, 20 nt, Human
ugcugagauuacagguguga

SEQ ID NO: 2181665 - RNA, 21 nt, Human
ugcugagagacccaaggagga

SEQ ID NO: 2181666 - RNA, 18 nt, Human
ugcugagagacccaagga

SEQ ID NO: 2181667 - RNA, 17 nt, Human
ugcugagagacccaagg

SEQ ID NO: 2181668 - RNA, 15 nt, Human
ugcugagagacccaa

SEQ ID NO: 2181669 - RNA, 23 nt, Human
ugcugagagaaauauggaacuua

SEQ ID NO: 2181670 - RNA, 17 nt, Human
ugcugagaagcuuuuga

SEQ ID NO: 2181671 - RNA, 14 nt, Human
ugcugagagaaaua

SEQ ID NO: 2181672 - RNA, 14 nt, Human
ugcugagccucugc

SEQ ID NO: 2181673 - RNA, 12 nt, Human
ugcugagccucu

SEQ ID NO: 2181674 - RNA, 17 nt, Human
ugcugagccucugcucc

SEQ ID NO: 2181675 - RNA, 16 nt, Human
ugcugagccucugcuc

SEQ ID NO: 2181676 - RNA, 20 nt, Human
ugcugagccucugcucccca

SEQ ID NO: 2181677 - RNA, 23 nt, Human
ugcugagccuguaaaauaaaagg

SEQ ID NO: 2181678 - RNA, 13 nt, Human
aggaaagggaagg

SEQ ID NO: 2181679 - RNA, 19 nt, Human
aggaaagggggucccagug

SEQ ID NO: 2181680 - RNA, 21 nt, Human
aggaaagggggucccaguggg

SEQ ID NO: 2181681 - RNA, 13 nt, Human
aggaaagucauug

SEQ ID NO: 2181682 - RNA, 23 nt, Human
aggaaaggcuccaggagcagcca

SEQ ID NO: 2181683 - RNA, 17 nt, Human
ugcugaggccugggccg

SEQ ID NO: 2181684 - RNA, 17 nt, Human
ugcugaggccuccagcu

SEQ ID NO: 2181685 - RNA, 16 nt, Human
ugcugaggcucugacc

SEQ ID NO: 2181686 - RNA, 13 nt, Human
ugcugaggccugg

SEQ ID NO: 2181687 - RNA, 14 nt, Human
ugcugaggccuggg

SEQ ID NO: 2181688 - RNA, 15 nt, Human
ugcugaggccugggc

SEQ ID NO: 2181689 - RNA, 16 nt, Human
ugcugaggccugggcc

SEQ ID NO: 2181690 - RNA, 14 nt, Human
aggaagagggacag

SEQ ID NO: 2181691 - RNA, 21 nt, Human
aggaagaguagcauuucauuc

SEQ ID NO: 2181692 - RNA, 16 nt, Human
aggaaauaaaaccuuu

SEQ ID NO: 2181693 - RNA, 22 nt, Human
aggaaaucaaauaugcaaagca

SEQ ID NO: 2181694 - RNA, 21 nt, Human
aggaaaucaaauaugcaaagc

SEQ ID NO: 2181695 - RNA, 22 nt, Human
aggaaagucauuggcuuuaucc

SEQ ID NO: 2181696 - RNA, 23 nt, Human
aggaaagucauuggcuuuauccu

SEQ ID NO: 2181697 - RNA, 16 nt, Human
aggaaagucauuggcu

SEQ ID NO: 2181698 - RNA, 17 nt, Human
aggaaagucauuggcuu

SEQ ID NO: 2181699 - RNA, 19 nt, Human
aggaaagucauuggcuuua

SEQ ID NO: 2181700 - RNA, 20 nt, Human
aggaaagucauuggcuuuau

SEQ ID NO: 2181701 - RNA, 17 nt, Human
aggaaauaaaaccuuuc

SEQ ID NO: 2181702 - RNA, 14 nt, Human
aggaaauaaaaccu

SEQ ID NO: 2181703 - RNA, 20 nt, Human
aggaaaucaaauaugcaaag

SEQ ID NO: 2181704 - RNA, 15 nt, Human
aggaaacaacagcuu

SEQ ID NO: 2181705 - RNA, 14 nt, Human
aggaaacaacagcu

SEQ ID NO: 2181706 - RNA, 21 nt, Human
aggaaacaaagcuuagcagga

SEQ ID NO: 2181707 - RNA, 12 nt, Human
aggaaacaguua

SEQ ID NO: 2181708 - RNA, 13 nt, Human
aggaaaauuucac

SEQ ID NO: 2181709 - RNA, 15 nt, Human
aggaaaaugaucuga

SEQ ID NO: 2181710 - RNA, 16 nt, Human
aggaaaagcugcugac

SEQ ID NO: 2181711 - RNA, 13 nt, Human
ugcuaucuccccc

SEQ ID NO: 2181712 - RNA, 22 nt, Human
ugcuaucgcaccacuguguauu

SEQ ID NO: 2181713 - RNA, 16 nt, Human
aggaaaccacagcugc

SEQ ID NO: 2181714 - RNA, 17 nt, Human
aggaaaccacagcugcu

SEQ ID NO: 2181715 - RNA, 14 nt, Human
ugcuaucuccccca

SEQ ID NO: 2181716 - RNA, 17 nt, Human
ugcuaucucccccagcc

SEQ ID NO: 2181717 - RNA, 15 nt, Human
ugcucaaaaaaugag

SEQ ID NO: 2181718 - RNA, 15 nt, Human
ugcucaaaaaucugu

SEQ ID NO: 2181719 - RNA, 14 nt, Human
ugcucaagaaacaa

SEQ ID NO: 2181720 - RNA, 14 nt, Human
ugcucaagaagaca

SEQ ID NO: 2181721 - RNA, 19 nt, Human
ugcucaaaucuauucagac

SEQ ID NO: 2181722 - RNA, 21 nt, Human
ugcucaaaucuauucagacaa

SEQ ID NO: 2181723 - RNA, 14 nt, Human
ugcucaaaauuuga

SEQ ID NO: 2181724 - RNA, 18 nt, Human
ugcucaaaauuugaagaa

SEQ ID NO: 2181725 - RNA, 21 nt, Human
ugcucaaaauuugaagaauga

SEQ ID NO: 2181726 - RNA, 19 nt, Human
ugcucaaaauuugaagaau

SEQ ID NO: 2181727 - RNA, 18 nt, Human
ugcucaaaucuauucaga

SEQ ID NO: 2181728 - RNA, 13 nt, Human
ugcuaugaaugau

SEQ ID NO: 2181729 - RNA, 20 nt, Human
aggaaaccacagcugcugga

SEQ ID NO: 2181730 - RNA, 22 nt, Human
ugcuaugagcuggggaugucuc

SEQ ID NO: 2181731 - RNA, 19 nt, Human
ugcuauggggagaaaagac

SEQ ID NO: 2181732 - RNA, 18 nt, Human
ugcuauggggagaaaaga

SEQ ID NO: 2181733 - RNA, 12 nt, Human
ugcuauggggag

SEQ ID NO: 2181734 - RNA, 16 nt, Human
ugcuauggauggcuuc

SEQ ID NO: 2181735 - RNA, 18 nt, Human
ugcuaucucccccagccc

SEQ ID NO: 2181736 - RNA, 16 nt, Human
ugcuaugagcugggga

SEQ ID NO: 2181737 - RNA, 20 nt, Human
ugcuaugagcuggggauguc

SEQ ID NO: 2181738 - RNA, 19 nt, Human
ugcuaugagcuggggaugu

SEQ ID NO: 2181739 - RNA, 21 nt, Human
ugcuccagcuguucagcuggu

SEQ ID NO: 2181740 - RNA, 20 nt, Human
ugcuccagcuguucagcugg

SEQ ID NO: 2181741 - RNA, 22 nt, Human
ugcuccaggcaggcuaaggcgu

SEQ ID NO: 2181742 - RNA, 23 nt, Human
ugcuccagucaacaaacuauuuc

SEQ ID NO: 2181743 - RNA, 12 nt, Human
ugcuccaggcag

SEQ ID NO: 2181744 - RNA, 14 nt, Human
ugcuccaggcaggc

SEQ ID NO: 2181745 - RNA, 12 nt, Human
ugcucuccuuuc

SEQ ID NO: 2181746 - RNA, 19 nt, Human
ugcucucgcaccuuuccaa

SEQ ID NO: 2181747 - RNA, 15 nt, Human
ugcucucugcagcca

SEQ ID NO: 2181748 - RNA, 14 nt, Human
ugcucucugcagcc

SEQ ID NO: 2181749 - RNA, 13 nt, Human
ugcucucugcagc

SEQ ID NO: 2181750 - RNA, 22 nt, Human
ugcucucgcaccuuuccaaagu

SEQ ID NO: 2181751 - RNA, 21 nt, Human
ugcucucugcagccagcccag

SEQ ID NO: 2181752 - RNA, 12 nt, Human
ugcucucugcca

SEQ ID NO: 2181753 - RNA, 20 nt, Human
ugcucucugcagccagccca

SEQ ID NO: 2181754 - RNA, 17 nt, Human
ugcucucugcagccagc

SEQ ID NO: 2181755 - RNA, 22 nt, Human
ugcucugaauuaguccuugcuu

SEQ ID NO: 2181756 - RNA, 13 nt, Human
ugcucucugccac

SEQ ID NO: 2181757 - RNA, 16 nt, Human
ugcucugaggcuucca

SEQ ID NO: 2181758 - RNA, 17 nt, Human
ugcucugaggcuuccag

SEQ ID NO: 2181759 - RNA, 18 nt, Human
ugcucugaggcuuccaga

SEQ ID NO: 2181760 - RNA, 20 nt, Human
ugcucugaggcuuccagaga

SEQ ID NO: 2181761 - RNA, 11 nt, Human
ugcucugcccu

SEQ ID NO: 2181762 - RNA, 12 nt, Human
ugcucugcccuu

SEQ ID NO: 2181763 - RNA, 13 nt, Human
ugcucuucagugg

SEQ ID NO: 2181764 - RNA, 13 nt, Human
ugcucuucugugg

SEQ ID NO: 2181765 - RNA, 15 nt, Human
ugcucuugaacuccu

SEQ ID NO: 2181766 - RNA, 22 nt, Human
ugcucuugaacuccugaccuca

SEQ ID NO: 2181767 - RNA, 20 nt, Human
ugcucuugaacuccugaccu

SEQ ID NO: 2181768 - RNA, 23 nt, Human
ugcucuucuguggaccacugcau

SEQ ID NO: 2181769 - RNA, 14 nt, Human
ugcucuucuuuaga

SEQ ID NO: 2181770 - RNA, 14 nt, Human
ugcugagaagcuuu

SEQ ID NO: 2181771 - RNA, 15 nt, Human
ugcugagaaaacaug

SEQ ID NO: 2181772 - RNA, 14 nt, Human
ugcucugcugacag

SEQ ID NO: 2181773 - RNA, 15 nt, Human
ugcucugcugacaga

SEQ ID NO: 2181774 - RNA, 23 nt, Human
ugcucugcgugucaccugugcuu

SEQ ID NO: 2181775 - RNA, 22 nt, Human
ugcucugcgugucaccugugcu

SEQ ID NO: 2181776 - RNA, 14 nt, Human
ugcucuucaagaaa

SEQ ID NO: 2181777 - RNA, 18 nt, Human
ugcucuuagcugucugcu

SEQ ID NO: 2181778 - RNA, 20 nt, Human
aggaaaagcggacaucagcu

SEQ ID NO: 2181779 - RNA, 17 nt, Human
aggaaaagccucugugu

SEQ ID NO: 2181780 - RNA, 19 nt, Human
aggaaaagccucuguguca

SEQ ID NO: 2181781 - RNA, 16 nt, Human
aggaaaagcaaauuga

SEQ ID NO: 2181782 - RNA, 14 nt, Human
aggaaaagccucug

SEQ ID NO: 2181783 - RNA, 15 nt, Human
aggaaaagccucugu

SEQ ID NO: 2181784 - RNA, 14 nt, Human
aggaaaagcugcug

SEQ ID NO: 2181785 - RNA, 13 nt, Human
aggaaaagaaaag

SEQ ID NO: 2181786 - RNA, 21 nt, Human
agcuuuggcuaugagggccuu

SEQ ID NO: 2181787 - RNA, 17 nt, Human
agcuuuggugcaauggc

SEQ ID NO: 2181788 - RNA, 20 nt, Human
agcuuugcuucucucucuaa

SEQ ID NO: 2181789 - RNA, 22 nt, Human
agcuuugcugcugaaggcucau

SEQ ID NO: 2181790 - RNA, 13 nt, Human
agcuuugcugcug

SEQ ID NO: 2181791 - RNA, 23 nt, Human
agcuuugcucuuugguagaaaag

SEQ ID NO: 2181792 - RNA, 12 nt, Human
agcuuugcugcu

SEQ ID NO: 2181793 - RNA, 13 nt, Human
agcuuugcugcua

SEQ ID NO: 2181794 - RNA, 21 nt, Human
agcuuugcucuuugguagaaa

SEQ ID NO: 2181795 - RNA, 18 nt, Human
agcuuugcucuuugguag

SEQ ID NO: 2181796 - RNA, 16 nt, Human
agcuuuggaaacagga

SEQ ID NO: 2181797 - RNA, 18 nt, Human
agcuuuggaccuaaucca

SEQ ID NO: 2181798 - RNA, 19 nt, Human
agcuuuggaccuaauccaa

SEQ ID NO: 2181799 - RNA, 20 nt, Human
agcuuuggcuaugagggccu

SEQ ID NO: 2181800 - RNA, 15 nt, Human
agcuuugauuuuuac

SEQ ID NO: 2181801 - RNA, 22 nt, Human
agcuuugagguggaagagggcu

SEQ ID NO: 2181802 - RNA, 20 nt, Human
agcuuuccugccccaggccu

SEQ ID NO: 2181803 - RNA, 21 nt, Human
agcuuuccugccccaggccug

SEQ ID NO: 2181804 - RNA, 22 nt, Human
agcuuuccugccccaggccuga

SEQ ID NO: 2181805 - RNA, 23 nt, Human
agcuuuccugccccaggccugaa

SEQ ID NO: 2181806 - RNA, 10 nt, Human
agcuuugcuc

SEQ ID NO: 2181807 - RNA, 21 nt, Human
agcuuugcuaccaaagcaccu

SEQ ID NO: 2181808 - RNA, 16 nt, Human
agcuuugcuaccaaag

SEQ ID NO: 2181809 - RNA, 10 nt, Human
agcuuugcua

SEQ ID NO: 2181810 - RNA, 18 nt, Human
agcuuugcauguuccacu

SEQ ID NO: 2181811 - RNA, 22 nt, Human
agcuuugcauguuccacuaacc

SEQ ID NO: 2181812 - RNA, 16 nt, Human
agcuuugccagcugcu

SEQ ID NO: 2181813 - RNA, 17 nt, Human
agcuuugccagcugcug

SEQ ID NO: 2181814 - RNA, 19 nt, Human
agcuuugccagcugcugcu

SEQ ID NO: 2181815 - RNA, 20 nt, Human
agcuuugccagcugcugcug

SEQ ID NO: 2181816 - RNA, 15 nt, Human
agcuuugcccaacac

SEQ ID NO: 2181817 - RNA, 22 nt, Human
agcuuugcccaacaccagcccc

SEQ ID NO: 2181818 - RNA, 22 nt, Human
agcuuuccccaugucucgacuc

SEQ ID NO: 2181819 - RNA, 16 nt, Human
agcuuucccugccucu

SEQ ID NO: 2181820 - RNA, 12 nt, Human
agcuuucccugc

SEQ ID NO: 2181821 - RNA, 12 nt, Human
agcuuuccugcc

SEQ ID NO: 2181822 - RNA, 13 nt, Human
agcuuuccugccc

SEQ ID NO: 2181823 - RNA, 14 nt, Human
agcuuuccugcccc

SEQ ID NO: 2181824 - RNA, 15 nt, Human
agcuuuccugcccca

SEQ ID NO: 2181825 - RNA, 22 nt, Human
agcuuucauguaaacugugcac

SEQ ID NO: 2181826 - RNA, 16 nt, Human
agcuuuccauguugcu

SEQ ID NO: 2181827 - RNA, 17 nt, Human
agcuuuccauguugcug

SEQ ID NO: 2181828 - RNA, 21 nt, Human
agcuuucccaaauaaacucua

SEQ ID NO: 2181829 - RNA, 19 nt, Human
agcuuuccauguugcugcc

SEQ ID NO: 2181830 - RNA, 20 nt, Human
agcuuuccauguugcugcca

SEQ ID NO: 2181831 - RNA, 15 nt, Human
agcuuucaauuccgu

SEQ ID NO: 2181832 - RNA, 15 nt, Human
agcuuacaagccagc

SEQ ID NO: 2181833 - RNA, 17 nt, Human
agcuuacaagccagcug

SEQ ID NO: 2181834 - RNA, 20 nt, Human
agcuugaccgugaggccaga

SEQ ID NO: 2181835 - RNA, 22 nt, Human
agcuugaccgugaggccagaga

SEQ ID NO: 2181836 - RNA, 18 nt, Human
agcuugauaaagggccaa

SEQ ID NO: 2181837 - RNA, 14 nt, Human
agcuugccccggcc

SEQ ID NO: 2181838 - RNA, 18 nt, Human
agcuugccccggccccgg

SEQ ID NO: 2181839 - RNA, 20 nt, Human
agcuugcccuggugccucac

SEQ ID NO: 2181840 - RNA, 22 nt, Human
agcuugaggguugggcuggugu

SEQ ID NO: 2181841 - RNA, 14 nt, Human
agcuugaccugagg

SEQ ID NO: 2181842 - RNA, 16 nt, Human
agcuugaccugaggcu

SEQ ID NO: 2181843 - RNA, 23 nt, Human
agcuugaccgugaggccagagac

SEQ ID NO: 2181844 - RNA, 14 nt, Human
agcuugcucuucag

SEQ ID NO: 2181845 - RNA, 15 nt, Human
agcuugcucacaucu

SEQ ID NO: 2181846 - RNA, 17 nt, Human
agcuugcucacaucuug

SEQ ID NO: 2181847 - RNA, 23 nt, Human
agcuugcguuagaaugaggagga

SEQ ID NO: 2181848 - RNA, 23 nt, Human
agcuugcgcauucucauggagaa

SEQ ID NO: 2181849 - RNA, 21 nt, Human
agcuugcgcauucucauggag

SEQ ID NO: 2181850 - RNA, 22 nt, Human
agcuugcgcauucucauggaga

SEQ ID NO: 2181851 - RNA, 19 nt, Human
agcuugcccuguuaaaaga

SEQ ID NO: 2181852 - RNA, 18 nt, Human
agcuugcccuguuaaaag

SEQ ID NO: 2181853 - RNA, 16 nt, Human
agcuugcccuguuaaa

SEQ ID NO: 2181854 - RNA, 22 nt, Human
agcuuguccaacccgaggcccg

SEQ ID NO: 2181855 - RNA, 20 nt, Human
agcuuguauaguguaaaaua

SEQ ID NO: 2181856 - RNA, 12 nt, Human
agcuuguauuuu

SEQ ID NO: 2181857 - RNA, 18 nt, Human
agcuuguauaguguaaaa

SEQ ID NO: 2181858 - RNA, 21 nt, Human
agcuuguauaguguaaaauaa

SEQ ID NO: 2181859 - RNA, 16 nt, Human
agcuugcugcccuagg

SEQ ID NO: 2181860 - RNA, 22 nt, Human
agcuugcucuucagugggagaa

SEQ ID NO: 2181861 - RNA, 19 nt, Human
agcuugcucuucaguggga

SEQ ID NO: 2181862 - RNA, 22 nt, Human
agcuugucuaugguacaaaaau

SEQ ID NO: 2181863 - RNA, 22 nt, Human
agcuuguauuuugugaagacug

SEQ ID NO: 2181864 - RNA, 23 nt, Human
agcuuguccaacccgaggcccgc

SEQ ID NO: 2181865 - RNA, 19 nt, Human
agcuugugcacaauucugu

SEQ ID NO: 2181866 - RNA, 14 nt, Human
agcuuguggagccc

SEQ ID NO: 2181867 - RNA, 17 nt, Human
agcuuguggagccccac

SEQ ID NO: 2181868 - RNA, 18 nt, Human
agcuuguggagccccaca

SEQ ID NO: 2181869 - RNA, 16 nt, Human
agcuuguuauuuauaa

SEQ ID NO: 2181870 - RNA, 17 nt, Human
agcuuguucccugucuu

SEQ ID NO: 2181871 - RNA, 20 nt, Human
agcuuguguauccauuauca

SEQ ID NO: 2181872 - RNA, 12 nt, Human
agcuuguguauc

SEQ ID NO: 2181873 - RNA, 19 nt, Human
ugcuaaucagugucucaca

SEQ ID NO: 2181874 - RNA, 17 nt, Human
ugcuaaucuucagggca

SEQ ID NO: 2181875 - RNA, 13 nt, Human
ugcuaaucuucuu

SEQ ID NO: 2181876 - RNA, 22 nt, Human
ugcuaaucuucuuaugcaauuu

SEQ ID NO: 2181877 - RNA, 20 nt, Human
ugcuaaucuucuuaugcaau

SEQ ID NO: 2181878 - RNA, 18 nt, Human
ugcuaauuuauccugaaa

SEQ ID NO: 2181879 - RNA, 12 nt, Human
ugcuaauaaaac

SEQ ID NO: 2181880 - RNA, 21 nt, Human
ugcuaauauaaguuucuuugc

SEQ ID NO: 2181881 - RNA, 17 nt, Human
ugcuaagugugaacugg

SEQ ID NO: 2181882 - RNA, 19 nt, Human
ugcuaagugugaacuggac

SEQ ID NO: 2181883 - RNA, 22 nt, Human
ugcuaaucagggaggucauuuu

SEQ ID NO: 2181884 - RNA, 23 nt, Human
ugcuaaucagggaggucauuuug

SEQ ID NO: 2181885 - RNA, 13 nt, Human
ugcuaaucagugu

SEQ ID NO: 2181886 - RNA, 14 nt, Human
ugcuaaucaguguc

SEQ ID NO: 2181887 - RNA, 18 nt, Human
ugcuaaguauuucccagc

SEQ ID NO: 2181888 - RNA, 18 nt, Human
ugcgguagccagcacaca

SEQ ID NO: 2181889 - RNA, 17 nt, Human
ugcggguuugaggauag

SEQ ID NO: 2181890 - RNA, 17 nt, Human
ugcgguauccgccccca

SEQ ID NO: 2181891 - RNA, 13 nt, Human
ugcuaagugugaa

SEQ ID NO: 2181892 - RNA, 14 nt, Human
ugcuaagugugaac

SEQ ID NO: 2181893 - RNA, 15 nt, Human
ugcuaagugugaacu

SEQ ID NO: 2181894 - RNA, 16 nt, Human
ugcuaagugugaacug

SEQ ID NO: 2181895 - RNA, 14 nt, Human
ugcgguccacccag

SEQ ID NO: 2181896 - RNA, 15 nt, Human
ugcgguccacccagg

SEQ ID NO: 2181897 - RNA, 17 nt, Human
ugcgguagccagcacac

SEQ ID NO: 2181898 - RNA, 16 nt, Human
ugcgguagccagcaca

SEQ ID NO: 2181899 - RNA, 15 nt, Human
ugcgguagccagcac

SEQ ID NO: 2181900 - RNA, 21 nt, Human
ugccuuuugcaccccucccau

SEQ ID NO: 2181901 - RNA, 17 nt, Human
ugccuuuugcaccccuc

SEQ ID NO: 2181902 - RNA, 18 nt, Human
ugccuuuugcaccccucc

SEQ ID NO: 2181903 - RNA, 19 nt, Human
ugccuuuugcaccccuccc

SEQ ID NO: 2181904 - RNA, 20 nt, Human
ugccuuuugcaccccuccca

SEQ ID NO: 2181905 - RNA, 22 nt, Human
ugccuuuugcaccccucccauu

SEQ ID NO: 2181906 - RNA, 16 nt, Human
ugccuuggugugcugu

SEQ ID NO: 2181907 - RNA, 20 nt, Human
ugccuuggggaauuuccucu

SEQ ID NO: 2181908 - RNA, 21 nt, Human
ugccuuggggaauuuccucua

SEQ ID NO: 2181909 - RNA, 17 nt, Human
ugccuuuucccaacucc

SEQ ID NO: 2181910 - RNA, 19 nt, Human
ugccuuuucccaacuccag

SEQ ID NO: 2181911 - RNA, 15 nt, Human
ugccuuuucuagccc

SEQ ID NO: 2181912 - RNA, 14 nt, Human
ugccuuuugcaccc

SEQ ID NO: 2181913 - RNA, 15 nt, Human
ugccuuuugcacccc

SEQ ID NO: 2181914 - RNA, 14 nt, Human
ugcuacacaguaua

SEQ ID NO: 2181915 - RNA, 13 nt, Human
ugcuaccaaagca

SEQ ID NO: 2181916 - RNA, 11 nt, Human
ugcuacacacu

SEQ ID NO: 2181917 - RNA, 15 nt, Human
ugcuacaaaaacaca

SEQ ID NO: 2181918 - RNA, 14 nt, Human
ugcuacaaaaacac

SEQ ID NO: 2181919 - RNA, 16 nt, Human
ugcuaauuuugaaaaa

SEQ ID NO: 2181920 - RNA, 18 nt, Human
ugcuaauuuugaaaaacu

SEQ ID NO: 2181921 - RNA, 19 nt, Human
ugcuaauuuugaaaaacug

SEQ ID NO: 2181922 - RNA, 20 nt, Human
ugcuaauuuugaaaaacugc

SEQ ID NO: 2181923 - RNA, 13 nt, Human
agcuguuuaugca

SEQ ID NO: 2181924 - RNA, 18 nt, Human
agcuguuuauggccucag

SEQ ID NO: 2181925 - RNA, 17 nt, Human
agcuguuuauggccuca

SEQ ID NO: 2181926 - RNA, 21 nt, Human
agcuguuuauggccucagcug

SEQ ID NO: 2181927 - RNA, 20 nt, Human
agcuguuuauggccucagcu

SEQ ID NO: 2181928 - RNA, 19 nt, Human
agcuguuuauggccucagc

SEQ ID NO: 2181929 - RNA, 16 nt, Human
agcuguuuaagauggg

SEQ ID NO: 2181930 - RNA, 19 nt, Human
agcuguuuauuuuauauua

SEQ ID NO: 2181931 - RNA, 13 nt, Human
agcuuaacagugu

SEQ ID NO: 2181932 - RNA, 23 nt, Human
ugcuacccaugacuuuauaugga

SEQ ID NO: 2181933 - RNA, 22 nt, Human
agcuguuguacauuuaugauuu

SEQ ID NO: 2181934 - RNA, 23 nt, Human
agcuguuguacauuuaugauuua

SEQ ID NO: 2181935 - RNA, 14 nt, Human
ugcuacccucccug

SEQ ID NO: 2181936 - RNA, 15 nt, Human
ugcuacccucccugc

SEQ ID NO: 2181937 - RNA, 18 nt, Human
agcuguuguacauuuaug

SEQ ID NO: 2181938 - RNA, 20 nt, Human
agcuguuguacauuuaugau

SEQ ID NO: 2181939 - RNA, 12 nt, Human
agcuguuuaaga

SEQ ID NO: 2181940 - RNA, 22 nt, Human
agcuguuuacuagggaucccuc

SEQ ID NO: 2181941 - RNA, 16 nt, Human
agcuguuuacuaggga

SEQ ID NO: 2181942 - RNA, 21 nt, Human
aggcagggucccauuucucac

SEQ ID NO: 2181943 - RNA, 23 nt, Human
aggcagggucaggagaggggcag

SEQ ID NO: 2181944 - RNA, 20 nt, Human
aggcagggucaggagagggg

SEQ ID NO: 2181945 - RNA, 22 nt, Human
aggcaggucuugaacuccuggc

SEQ ID NO: 2181946 - RNA, 19 nt, Human
aggcagggucaggagaggg

SEQ ID NO: 2181947 - RNA, 17 nt, Human
aggcagggucaggagag

SEQ ID NO: 2181948 - RNA, 14 nt, Human
aggcagggucagga

SEQ ID NO: 2181949 - RNA, 22 nt, Human
aggcagggguggggguggaggc

SEQ ID NO: 2181950 - RNA, 23 nt, Human
aggcagggguggggguggaggcu

SEQ ID NO: 2181951 - RNA, 12 nt, Human
aggcagggucuc

SEQ ID NO: 2181952 - RNA, 17 nt, Human
aggcaggugggauggau

SEQ ID NO: 2181953 - RNA, 14 nt, Human
aggcaggugccucc

SEQ ID NO: 2181954 - RNA, 15 nt, Human
aggcaggugccucca

SEQ ID NO: 2181955 - RNA, 17 nt, Human
aggcaggugccuccagg

SEQ ID NO: 2181956 - RNA, 18 nt, Human
aggcaggugccuccaggu

SEQ ID NO: 2181957 - RNA, 20 nt, Human
aggcaggugccuccaggugu

SEQ ID NO: 2181958 - RNA, 15 nt, Human
aggcaggugccugga

SEQ ID NO: 2181959 - RNA, 21 nt, Human
aggcaggugccuccaggugug

SEQ ID NO: 2181960 - RNA, 13 nt, Human
aggcaggugccug

SEQ ID NO: 2181961 - RNA, 15 nt, Human
aggcauaaagucagg

SEQ ID NO: 2181962 - RNA, 14 nt, Human
aggcauuguuugag

SEQ ID NO: 2181963 - RNA, 12 nt, Human
aggcauuuccua

SEQ ID NO: 2181964 - RNA, 20 nt, Human
aggcauuucuaucacauauu

SEQ ID NO: 2181965 - RNA, 18 nt, Human
aggcauugugggaagggg

SEQ ID NO: 2181966 - RNA, 20 nt, Human
aggcauuuaggccaugggac

SEQ ID NO: 2181967 - RNA, 15 nt, Human
aggcauaggccuggg

SEQ ID NO: 2181968 - RNA, 14 nt, Human
aggcauaggccugg

SEQ ID NO: 2181969 - RNA, 13 nt, Human
aggcauaggccug

SEQ ID NO: 2181970 - RNA, 22 nt, Human
aggcauagaggcuucuccgcca

SEQ ID NO: 2181971 - RNA, 14 nt, Human
aggcauugccaagg

SEQ ID NO: 2181972 - RNA, 13 nt, Human
aggcauugccaag

SEQ ID NO: 2181973 - RNA, 21 nt, Human
aggcauugccaagggcuuugu

SEQ ID NO: 2181974 - RNA, 20 nt, Human
aggcauugccaagggcuuug

SEQ ID NO: 2181975 - RNA, 18 nt, Human
aggcauugccaagggcuu

SEQ ID NO: 2181976 - RNA, 16 nt, Human
aggcauugccaagggc

SEQ ID NO: 2181977 - RNA, 22 nt, Human
aggcauaaagucagggguuccc

SEQ ID NO: 2181978 - RNA, 15 nt, Human
aggcauagaggcuuc

SEQ ID NO: 2181979 - RNA, 20 nt, Human
aggcagcuuuuucucuccca

SEQ ID NO: 2181980 - RNA, 22 nt, Human
aggcagcuuuaaccauuaaaac

SEQ ID NO: 2181981 - RNA, 23 nt, Human
aggcagcuuuaaccauuaaaacu

SEQ ID NO: 2181982 - RNA, 15 nt, Human
aggcagcuugaaacu

SEQ ID NO: 2181983 - RNA, 17 nt, Human
aggcaggaagggcagga

SEQ ID NO: 2181984 - RNA, 16 nt, Human
aggcaggaagggcagg

SEQ ID NO: 2181985 - RNA, 20 nt, Human
aggcaggaagggcaggaagg

SEQ ID NO: 2181986 - RNA, 14 nt, Human
aggcaggacaugcu

SEQ ID NO: 2181987 - RNA, 19 nt, Human
aggcaggacaugcugaagc

SEQ ID NO: 2181988 - RNA, 21 nt, Human
aggcaggacaugcugaagcca

SEQ ID NO: 2181989 - RNA, 14 nt, Human
aggcacacagcugc

SEQ ID NO: 2181990 - RNA, 23 nt, Human
aggcacacacugugcuuucuauu

SEQ ID NO: 2181991 - RNA, 18 nt, Human
aggcacacagcugcagag

SEQ ID NO: 2181992 - RNA, 23 nt, Human
aggcacacagcugcagagacaga

SEQ ID NO: 2181993 - RNA, 20 nt, Human
aggcacacuucuucuugguc

SEQ ID NO: 2181994 - RNA, 16 nt, Human
aggcacacuucuucuu

SEQ ID NO: 2181995 - RNA, 15 nt, Human
aggcacacuucuucu

SEQ ID NO: 2181996 - RNA, 12 nt, Human
aggcacacuucu

SEQ ID NO: 2181997 - RNA, 12 nt, Human
aggcacagcaca

SEQ ID NO: 2181998 - RNA, 22 nt, Human
aggcagcuggaugagacuucca

SEQ ID NO: 2181999 - RNA, 17 nt, Human
aggcagcugccugcucu

SEQ ID NO: 2182000 - RNA, 18 nt, Human
aggcagcuggaugagacu

SEQ ID NO: 2182001 - RNA, 22 nt, Human
aggcagggccuugcccagagau

SEQ ID NO: 2182002 - RNA, 22 nt, Human
aggcagggaaaggcucugaaag

SEQ ID NO: 2182003 - RNA, 23 nt, Human
aggcagggccuugcccagagaug

SEQ ID NO: 2182004 - RNA, 21 nt, Human
aggcagggccuugcccagaga

SEQ ID NO: 2182005 - RNA, 14 nt, Human
aggcaggcuuuguu

SEQ ID NO: 2182006 - RNA, 23 nt, Human
aggcaggcuaaggcguggagcug

SEQ ID NO: 2182007 - RNA, 18 nt, Human
aggcaggcuaaggcgugg

SEQ ID NO: 2182008 - RNA, 22 nt, Human
aggcaggcuaaggcguggagcu

SEQ ID NO: 2182009 - RNA, 22 nt, Human
aggcaggcauagaggcuucucc

SEQ ID NO: 2182010 - RNA, 22 nt, Human
aggcaggccaaggccuucuccu

SEQ ID NO: 2182011 - RNA, 21 nt, Human
aggcaggccaaggccuucucc

SEQ ID NO: 2182012 - RNA, 13 nt, Human
aggcaggggcgga

SEQ ID NO: 2182013 - RNA, 23 nt, Human
aggcagggggaaggugggguccu

SEQ ID NO: 2182014 - RNA, 15 nt, Human
aggcagggguggggg

SEQ ID NO: 2182015 - RNA, 16 nt, Human
aggcaggggugggggu

SEQ ID NO: 2182016 - RNA, 19 nt, Human
aggcaggggugggggugga

SEQ ID NO: 2182017 - RNA, 20 nt, Human
aggcagggguggggguggag

SEQ ID NO: 2182018 - RNA, 22 nt, Human
aggcagggcucucuuuccuucu

SEQ ID NO: 2182019 - RNA, 22 nt, Human
uggagaaacuguagucucagga

SEQ ID NO: 2182020 - RNA, 14 nt, Human
uggagaaagcacug

SEQ ID NO: 2182021 - RNA, 17 nt, Human
uggagaaacuguagucu

SEQ ID NO: 2182022 - RNA, 17 nt, Human
uggagaaacccuugaaa

SEQ ID NO: 2182023 - RNA, 19 nt, Human
uggagaaagcacugaccug

SEQ ID NO: 2182024 - RNA, 17 nt, Human
uggagaaagcacugacc

SEQ ID NO: 2182025 - RNA, 18 nt, Human
uggagaaagcacugaccu

SEQ ID NO: 2182026 - RNA, 16 nt, Human
uggagaaacccugucu

SEQ ID NO: 2182027 - RNA, 14 nt, Human
uggagaaacccugu

SEQ ID NO: 2182028 - RNA, 20 nt, Human
uggacuucuuuuacucauga

SEQ ID NO: 2182029 - RNA, 22 nt, Human
uggacuucacauaagcucagaa

SEQ ID NO: 2182030 - RNA, 15 nt, Human
uggagaaaggaguga

SEQ ID NO: 2182031 - RNA, 21 nt, Human
uggagaaauaaaaauaccucu

SEQ ID NO: 2182032 - RNA, 23 nt, Human
uggagaaauaaaaauaccucuuu

SEQ ID NO: 2182033 - RNA, 11 nt, Human
uggagaaauua

SEQ ID NO: 2182034 - RNA, 15 nt, Human
uggagaaauuauuua

SEQ ID NO: 2182035 - RNA, 17 nt, Human
uggagaaauuauuuaau

SEQ ID NO: 2182036 - RNA, 19 nt, Human
uggagaaauuauuuaauaa

SEQ ID NO: 2182037 - RNA, 21 nt, Human
uggagcaaagugagggccgag

SEQ ID NO: 2182038 - RNA, 17 nt, Human
uggagcaccaggcacga

SEQ ID NO: 2182039 - RNA, 14 nt, Human
uggagcagaaucag

SEQ ID NO: 2182040 - RNA, 16 nt, Human
uggagcagaggggcug

SEQ ID NO: 2182041 - RNA, 13 nt, Human
uggagcagagggg

SEQ ID NO: 2182042 - RNA, 12 nt, Human
uggagcagaggg

SEQ ID NO: 2182043 - RNA, 21 nt, Human
uggagcagagcaagucugcag

SEQ ID NO: 2182044 - RNA, 22 nt, Human
uggagcagagcaagucugcagg

SEQ ID NO: 2182045 - RNA, 15 nt, Human
uggagcagaaucagu

SEQ ID NO: 2182046 - RNA, 13 nt, Human
uggagcagaccac

SEQ ID NO: 2182047 - RNA, 17 nt, Human
uggagcagaccaccccg

SEQ ID NO: 2182048 - RNA, 12 nt, Human
uggagcagagca

SEQ ID NO: 2182049 - RNA, 20 nt, Human
uggagcagagcaagucugca

SEQ ID NO: 2182050 - RNA, 17 nt, Human
uggaagccggcggccca

SEQ ID NO: 2182051 - RNA, 15 nt, Human
uggacuuagaaagca

SEQ ID NO: 2182052 - RNA, 16 nt, Human
uggacuuagaaagcag

SEQ ID NO: 2182053 - RNA, 18 nt, Human
uggacuuagaaagcaggg

SEQ ID NO: 2182054 - RNA, 22 nt, Human
uggacuguuuucucucggcucc

SEQ ID NO: 2182055 - RNA, 17 nt, Human
uggacuguucccugagg

SEQ ID NO: 2182056 - RNA, 17 nt, Human
uggacuguuuucucucg

SEQ ID NO: 2182057 - RNA, 20 nt, Human
uggacuguuuucucucggcu

SEQ ID NO: 2182058 - RNA, 20 nt, Human
uggacuuagaaagcaggggc

SEQ ID NO: 2182059 - RNA, 21 nt, Human
uggacuuagaaagcaggggcu

SEQ ID NO: 2182060 - RNA, 18 nt, Human
uggacuucacauaagcuc

SEQ ID NO: 2182061 - RNA, 23 nt, Human
uggacuucacauaagcucagaau

SEQ ID NO: 2182062 - RNA, 14 nt, Human
uggagaaaauggac

SEQ ID NO: 2182063 - RNA, 18 nt, Human
aggauugcuacuguccua

SEQ ID NO: 2182064 - RNA, 16 nt, Human
uggacuguucccugag

SEQ ID NO: 2182065 - RNA, 15 nt, Human
aggauugcuacuguc

SEQ ID NO: 2182066 - RNA, 17 nt, Human
aggauugcuacuguccu

SEQ ID NO: 2182067 - RNA, 20 nt, Human
aggcaagcaccuccugccuc

SEQ ID NO: 2182068 - RNA, 12 nt, Human
aggcaagcccug

SEQ ID NO: 2182069 - RNA, 18 nt, Human
aggcaagcaccuccugcc

SEQ ID NO: 2182070 - RNA, 19 nt, Human
aggcaagcaccuccugccu

SEQ ID NO: 2182071 - RNA, 17 nt, Human
aggcaaggcugucaauu

SEQ ID NO: 2182072 - RNA, 14 nt, Human
aggcacacacugug

SEQ ID NO: 2182073 - RNA, 16 nt, Human
aggcacacacugugcu

SEQ ID NO: 2182074 - RNA, 19 nt, Human
aggcacacacugugcuuuc

SEQ ID NO: 2182075 - RNA, 20 nt, Human
aggcacacacugugcuuucu

SEQ ID NO: 2182076 - RNA, 21 nt, Human
aggcacacacugugcuuucua

SEQ ID NO: 2182077 - RNA, 16 nt, Human
aggcaaggcugucaau

SEQ ID NO: 2182078 - RNA, 13 nt, Human
aggcaaggcaggu

SEQ ID NO: 2182079 - RNA, 14 nt, Human
aggcaaggcaggug

SEQ ID NO: 2182080 - RNA, 15 nt, Human
aggcaaggcaggugc

SEQ ID NO: 2182081 - RNA, 19 nt, Human
aggcaaggcaggugccucc

SEQ ID NO: 2182082 - RNA, 22 nt, Human
aggcaaggcaggugccuccagg

SEQ ID NO: 2182083 - RNA, 20 nt, Human
aggcaaggcaggugccucca

SEQ ID NO: 2182084 - RNA, 11 nt, Human
uggagcaucug

SEQ ID NO: 2182085 - RNA, 17 nt, Human
uggagcagaggggcuga

SEQ ID NO: 2182086 - RNA, 18 nt, Human
uggagcaggacucuauuu

SEQ ID NO: 2182087 - RNA, 17 nt, Human
uggagcauuggcugaga

SEQ ID NO: 2182088 - RNA, 16 nt, Human
uggagccaacugcugc

SEQ ID NO: 2182089 - RNA, 15 nt, Human
uggagcaucugacuc

SEQ ID NO: 2182090 - RNA, 16 nt, Human
uggagcaucugacuca

SEQ ID NO: 2182091 - RNA, 17 nt, Human
uggagcaugggccuggc

SEQ ID NO: 2182092 - RNA, 18 nt, Human
uggagcaugggccuggcc

SEQ ID NO: 2182093 - RNA, 16 nt, Human
uggagccaaguccaga

SEQ ID NO: 2182094 - RNA, 16 nt, Human
uggagccacuaacuag

SEQ ID NO: 2182095 - RNA, 13 nt, Human
uggagccagcucc

SEQ ID NO: 2182096 - RNA, 17 nt, Human
uggagccaaggguucag

SEQ ID NO: 2182097 - RNA, 17 nt, Human
uggagccaacugcugcu

SEQ ID NO: 2182098 - RNA, 15 nt, Human
uggagccaaguccag

SEQ ID NO: 2182099 - RNA, 17 nt, Human
uggagccaauggagacu

SEQ ID NO: 2182100 - RNA, 17 nt, Human
aggcaagcaccuccugc

SEQ ID NO: 2182101 - RNA, 21 nt, Human
uggagcucgugggacagucac

SEQ ID NO: 2182102 - RNA, 17 nt, Human
uggagcucguggaacag

SEQ ID NO: 2182103 - RNA, 21 nt, Human
uggagcucguggaacaguuac

SEQ ID NO: 2182104 - RNA, 17 nt, Human
aggccccgaggacccag

SEQ ID NO: 2182105 - RNA, 18 nt, Human
aggccccgaggacccaga

SEQ ID NO: 2182106 - RNA, 19 nt, Human
aggccccgaggacccagac

SEQ ID NO: 2182107 - RNA, 20 nt, Human
aggccccgaggacccagacc

SEQ ID NO: 2182108 - RNA, 14 nt, Human
aggccccgcccagg

SEQ ID NO: 2182109 - RNA, 15 nt, Human
aggcccccaggugcc

SEQ ID NO: 2182110 - RNA, 23 nt, Human
aggcccccagcccagggcuccug

SEQ ID NO: 2182111 - RNA, 13 nt, Human
aggcccggcucca

SEQ ID NO: 2182112 - RNA, 15 nt, Human
aggcccggccucuca

SEQ ID NO: 2182113 - RNA, 17 nt, Human
aggcccggcuccaggcu

SEQ ID NO: 2182114 - RNA, 19 nt, Human
aggcccgcaugcggcccag

SEQ ID NO: 2182115 - RNA, 21 nt, Human
aggccccgaggacccagaccc

SEQ ID NO: 2182116 - RNA, 23 nt, Human
aggccccgaggacccagacccag

SEQ ID NO: 2182117 - RNA, 14 nt, Human
aggcccggccucuc

SEQ ID NO: 2182118 - RNA, 13 nt, Human
aggcccggccucu

SEQ ID NO: 2182119 - RNA, 13 nt, Human
aggcccagagggc

SEQ ID NO: 2182120 - RNA, 20 nt, Human
aggcccaagagaugaagagu

SEQ ID NO: 2182121 - RNA, 12 nt, Human
aggcccaagaga

SEQ ID NO: 2182122 - RNA, 19 nt, Human
aggccagcugccccagcca

SEQ ID NO: 2182123 - RNA, 13 nt, Human
aggcccccaagcc

SEQ ID NO: 2182124 - RNA, 13 nt, Human
aggcccccacuug

SEQ ID NO: 2182125 - RNA, 16 nt, Human
aggccccaggaagccg

SEQ ID NO: 2182126 - RNA, 15 nt, Human
aggccccaggaagcc

SEQ ID NO: 2182127 - RNA, 14 nt, Human
aggccccaggaagc

SEQ ID NO: 2182128 - RNA, 17 nt, Human
aggcccccacuugccuc

SEQ ID NO: 2182129 - RNA, 18 nt, Human
aggcccccacuugccucu

SEQ ID NO: 2182130 - RNA, 20 nt, Human
aggcccccacuugccucuuc

SEQ ID NO: 2182131 - RNA, 14 nt, Human
aggcccccagccca

SEQ ID NO: 2182132 - RNA, 17 nt, Human
aggcccccagcccaggg

SEQ ID NO: 2182133 - RNA, 18 nt, Human
aggcccccagcccagggc

SEQ ID NO: 2182134 - RNA, 19 nt, Human
aggcccccagcccagggcu

SEQ ID NO: 2182135 - RNA, 22 nt, Human
aggcccccagcccagggcuccu

SEQ ID NO: 2182136 - RNA, 13 nt, Human
aggccagcugccu

SEQ ID NO: 2182137 - RNA, 15 nt, Human
aggccagccuugacc

SEQ ID NO: 2182138 - RNA, 13 nt, Human
aggccagccuuga

SEQ ID NO: 2182139 - RNA, 17 nt, Human
aggccaccugcccccuu

SEQ ID NO: 2182140 - RNA, 16 nt, Human
aggccaccugcccccu

SEQ ID NO: 2182141 - RNA, 15 nt, Human
aggccaccugccccc

SEQ ID NO: 2182142 - RNA, 14 nt, Human
aggccaccugcccc

SEQ ID NO: 2182143 - RNA, 19 nt, Human
aggccaccugcccccuucu

SEQ ID NO: 2182144 - RNA, 18 nt, Human
aggccaccugcccccuuc

SEQ ID NO: 2182145 - RNA, 13 nt, Human
aggccagccuggc

SEQ ID NO: 2182146 - RNA, 13 nt, Human
aggccaccugccc

SEQ ID NO: 2182147 - RNA, 19 nt, Human
aggccaccucuccaagggc

SEQ ID NO: 2182148 - RNA, 23 nt, Human
aggccaccucuccaagggcuucu

SEQ ID NO: 2182149 - RNA, 16 nt, Human
aggccaccuccagaaa

SEQ ID NO: 2182150 - RNA, 17 nt, Human
aggccaccuccccagca

SEQ ID NO: 2182151 - RNA, 11 nt, Human
aggccaccucu

SEQ ID NO: 2182152 - RNA, 12 nt, Human
aggccaccucuc

SEQ ID NO: 2182153 - RNA, 13 nt, Human
aggccaccucucc

SEQ ID NO: 2182154 - RNA, 14 nt, Human
aggccaccucucca

SEQ ID NO: 2182155 - RNA, 15 nt, Human
aggccaccucuccaa

SEQ ID NO: 2182156 - RNA, 16 nt, Human
aggccaccucuccaag

SEQ ID NO: 2182157 - RNA, 17 nt, Human
aggccaccucuccaagg

SEQ ID NO: 2182158 - RNA, 18 nt, Human
aggccaccucuccaaggg

SEQ ID NO: 2182159 - RNA, 18 nt, Human
uggcacccggccccugcu

SEQ ID NO: 2182160 - RNA, 16 nt, Human
uggcaccagacaccca

SEQ ID NO: 2182161 - RNA, 14 nt, Human
uggcaccagacacc

SEQ ID NO: 2182162 - RNA, 19 nt, Human
uggcacccggccccugcug

SEQ ID NO: 2182163 - RNA, 20 nt, Human
uggcacccggccccugcugg

SEQ ID NO: 2182164 - RNA, 13 nt, Human
uggcagcucagag

SEQ ID NO: 2182165 - RNA, 14 nt, Human
aggccaccucccca

SEQ ID NO: 2182166 - RNA, 15 nt, Human
aggccaccuccccag

SEQ ID NO: 2182167 - RNA, 23 nt, Human
uggcagcucaccucucccuugga

SEQ ID NO: 2182168 - RNA, 21 nt, Human
uggcagcucaccucucccuug

SEQ ID NO: 2182169 - RNA, 22 nt, Human
uggcagcucaccucucccuugg

SEQ ID NO: 2182170 - RNA, 18 nt, Human
uggauucauuacagcuua

SEQ ID NO: 2182171 - RNA, 13 nt, Human
uggauucauuucc

SEQ ID NO: 2182172 - RNA, 15 nt, Human
uggauucauuuccug

SEQ ID NO: 2182173 - RNA, 17 nt, Human
uggauucauuuccugcc

SEQ ID NO: 2182174 - RNA, 18 nt, Human
uggauucauuuccugccc

SEQ ID NO: 2182175 - RNA, 19 nt, Human
uggauucauuuccugcccu

SEQ ID NO: 2182176 - RNA, 20 nt, Human
uggauucauuuccugcccuu

SEQ ID NO: 2182177 - RNA, 23 nt, Human
uggaugcggaacccaaauuacgu

SEQ ID NO: 2182178 - RNA, 22 nt, Human
uggaguugaucuggaacccaga

SEQ ID NO: 2182179 - RNA, 13 nt, Human
uggauggaagggg

SEQ ID NO: 2182180 - RNA, 17 nt, Human
uggauuauuuaauaaca

SEQ ID NO: 2182181 - RNA, 18 nt, Human
uggauuauuuaauaacau

SEQ ID NO: 2182182 - RNA, 20 nt, Human
uggauuauuuaauaacauua

SEQ ID NO: 2182183 - RNA, 23 nt, Human
uggauuauuuaauaacauuaccu

SEQ ID NO: 2182184 - RNA, 21 nt, Human
uggaugccugguggcagcugc

SEQ ID NO: 2182185 - RNA, 23 nt, Human
uggaugccugguggcagcugcgg

SEQ ID NO: 2182186 - RNA, 19 nt, Human
uggaguugaucuggaaccc

SEQ ID NO: 2182187 - RNA, 17 nt, Human
uggaguugaucuggaac

SEQ ID NO: 2182188 - RNA, 15 nt, Human
uggaguugaucugga

SEQ ID NO: 2182189 - RNA, 16 nt, Human
uggaguucuugugcca

SEQ ID NO: 2182190 - RNA, 14 nt, Human
uggaguucuugugc

SEQ ID NO: 2182191 - RNA, 15 nt, Human
uggaguucuugugcc

SEQ ID NO: 2182192 - RNA, 19 nt, Human
uggauucucagauauuuau

SEQ ID NO: 2182193 - RNA, 17 nt, Human
uggauucuuauguagca

SEQ ID NO: 2182194 - RNA, 13 nt, Human
uggauugagggua

SEQ ID NO: 2182195 - RNA, 17 nt, Human
uggauucugagagcugu

SEQ ID NO: 2182196 - RNA, 16 nt, Human
uggauucugagagcug

SEQ ID NO: 2182197 - RNA, 16 nt, Human
uggauucucagauauu

SEQ ID NO: 2182198 - RNA, 15 nt, Human
uggauucucagauau

SEQ ID NO: 2182199 - RNA, 14 nt, Human
uggauucucagaua

SEQ ID NO: 2182200 - RNA, 13 nt, Human
uggauucucagau

SEQ ID NO: 2182201 - RNA, 12 nt, Human
uggauucucaga

SEQ ID NO: 2182202 - RNA, 17 nt, Human
uggauuccaaccccaac

SEQ ID NO: 2182203 - RNA, 21 nt, Human
uggcaccacugcacuccagcc

SEQ ID NO: 2182204 - RNA, 19 nt, Human
uggcaccacugcacuccag

SEQ ID NO: 2182205 - RNA, 18 nt, Human
uggcaccacugcacucca

SEQ ID NO: 2182206 - RNA, 21 nt, Human
uggcacauuuccccagaccug

SEQ ID NO: 2182207 - RNA, 15 nt, Human
uggcacauccuaugc

SEQ ID NO: 2182208 - RNA, 18 nt, Human
uggcacauccuaugcaau

SEQ ID NO: 2182209 - RNA, 19 nt, Human
uggcacauccuaugcaaua

SEQ ID NO: 2182210 - RNA, 23 nt, Human
uggcacauccuaugcaauauauc

SEQ ID NO: 2182211 - RNA, 18 nt, Human
uggcacauuuaagagaca

SEQ ID NO: 2182212 - RNA, 23 nt, Human
uggcacaucagcacgauuucugu

SEQ ID NO: 2182213 - RNA, 23 nt, Human
uggauuggagaaguaauccuagg

SEQ ID NO: 2182214 - RNA, 17 nt, Human
uggauugcacguggccu

SEQ ID NO: 2182215 - RNA, 21 nt, Human
uggauugcacguggccucuug

SEQ ID NO: 2182216 - RNA, 17 nt, Human
uggagugcaaugacaca

SEQ ID NO: 2182217 - RNA, 14 nt, Human
uggagugcagugag

SEQ ID NO: 2182218 - RNA, 14 nt, Human
uggagguggggccu

SEQ ID NO: 2182219 - RNA, 15 nt, Human
uggaggugggguugg

SEQ ID NO: 2182220 - RNA, 17 nt, Human
uggaggugggguuggga

SEQ ID NO: 2182221 - RNA, 16 nt, Human
uggaggugucaggcug

SEQ ID NO: 2182222 - RNA, 18 nt, Human
uggaggugggagcaggag

SEQ ID NO: 2182223 - RNA, 20 nt, Human
uggaggugggagcaggagau

SEQ ID NO: 2182224 - RNA, 19 nt, Human
uggagguggggccuggagc

SEQ ID NO: 2182225 - RNA, 19 nt, Human
uggagguuaaggcugagga

SEQ ID NO: 2182226 - RNA, 17 nt, Human
uggagguuaaggcugag

SEQ ID NO: 2182227 - RNA, 18 nt, Human
uggaggugucaggcugcu

SEQ ID NO: 2182228 - RNA, 20 nt, Human
uggaggugucaggcugcugg

SEQ ID NO: 2182229 - RNA, 21 nt, Human
uggaggugucaggcugcuggc

SEQ ID NO: 2182230 - RNA, 22 nt, Human
uggaggugucaggcugcuggcg

SEQ ID NO: 2182231 - RNA, 20 nt, Human
aggcauuugcugaauacaga

SEQ ID NO: 2182232 - RNA, 16 nt, Human
aggcauuugcugaaua

SEQ ID NO: 2182233 - RNA, 20 nt, Human
uggaggucgguagguucagc

SEQ ID NO: 2182234 - RNA, 18 nt, Human
uggaggucacauucagga

SEQ ID NO: 2182235 - RNA, 20 nt, Human
uggaggucacauucaggaag

SEQ ID NO: 2182236 - RNA, 12 nt, Human
uggaggugggag

SEQ ID NO: 2182237 - RNA, 13 nt, Human
uggaggugggagc

SEQ ID NO: 2182238 - RNA, 17 nt, Human
uggaggugggagcagga

SEQ ID NO: 2182239 - RNA, 22 nt, Human
uggaggucacauucaggaagau

SEQ ID NO: 2182240 - RNA, 17 nt, Human
uggaggugccagcaaag

SEQ ID NO: 2182241 - RNA, 19 nt, Human
uggaggugccagcaaagcc

SEQ ID NO: 2182242 - RNA, 20 nt, Human
uggaggugccagcaaagccc

SEQ ID NO: 2182243 - RNA, 15 nt, Human
uggagugcagggagg

SEQ ID NO: 2182244 - RNA, 17 nt, Human
uggagugcagggaggag

SEQ ID NO: 2182245 - RNA, 19 nt, Human
uggagugcagggaggagag

SEQ ID NO: 2182246 - RNA, 13 nt, Human
uggaguggccacu

SEQ ID NO: 2182247 - RNA, 14 nt, Human
uggaguguaugacu

SEQ ID NO: 2182248 - RNA, 13 nt, Human
uggaguggggcag

SEQ ID NO: 2182249 - RNA, 16 nt, Human
uggaguggggcaguag

SEQ ID NO: 2182250 - RNA, 17 nt, Human
uggaguguggcugagga

SEQ ID NO: 2182251 - RNA, 17 nt, Human
uggaguguaugacugca

SEQ ID NO: 2182252 - RNA, 19 nt, Human
uggaguguaugacugcaca

SEQ ID NO: 2182253 - RNA, 20 nt, Human
uggaguguguauuguuccca

SEQ ID NO: 2182254 - RNA, 15 nt, Human
uggaguguguauugu

SEQ ID NO: 2182255 - RNA, 17 nt, Human
uggaguggggcaguaga

SEQ ID NO: 2182256 - RNA, 22 nt, Human
uggaguguuccccuuccacuga

SEQ ID NO: 2182257 - RNA, 19 nt, Human
uggaguguuccccuuccac

SEQ ID NO: 2182258 - RNA, 19 nt, Human
uggaguguguauuguuccc

SEQ ID NO: 2182259 - RNA, 20 nt, Human
uggaguuaacgggugaauaa

SEQ ID NO: 2182260 - RNA, 17 nt, Human
uggaguuacauuaaugu

SEQ ID NO: 2182261 - RNA, 18 nt, Human
uggaguuacauuaauguu

SEQ ID NO: 2182262 - RNA, 20 nt, Human
uggaguuacauuaauguuaa

SEQ ID NO: 2182263 - RNA, 14 nt, Human
uggaguugaaaauc

SEQ ID NO: 2182264 - RNA, 17 nt, Human
ugcuuuggcuuacuugu

SEQ ID NO: 2182265 - RNA, 16 nt, Human
ugcuuugugugauuga

SEQ ID NO: 2182266 - RNA, 17 nt, Human
ugcuuugugauuuuugu

SEQ ID NO: 2182267 - RNA, 17 nt, Human
ugcuuugugugauugaa

SEQ ID NO: 2182268 - RNA, 16 nt, Human
ugcuuugggcugcccu

SEQ ID NO: 2182269 - RNA, 22 nt, Human
ugcuuugugauuuuuguaauuu

SEQ ID NO: 2182270 - RNA, 23 nt, Human
ugcuuuuuaauauugauaugcuu

SEQ ID NO: 2182271 - RNA, 20 nt, Human
ugcuuuugucuaugggacuc

SEQ ID NO: 2182272 - RNA, 18 nt, Human
ugcuuuuggucuguguga

SEQ ID NO: 2182273 - RNA, 17 nt, Human
ugcuuuuaaaaaaaaau

SEQ ID NO: 2182274 - RNA, 23 nt, Human
aggagcccuuaucugugcucagg

SEQ ID NO: 2182275 - RNA, 17 nt, Human
aggagccuccugcccuu

SEQ ID NO: 2182276 - RNA, 20 nt, Human
ugcuugacauaauuucacug

SEQ ID NO: 2182277 - RNA, 16 nt, Human
ugcuugacaacaucug

SEQ ID NO: 2182278 - RNA, 15 nt, Human
ugcuugacaacaucu

SEQ ID NO: 2182279 - RNA, 15 nt, Human
ugcuugagcucagga

SEQ ID NO: 2182280 - RNA, 14 nt, Human
ugcuugagcccagg

SEQ ID NO: 2182281 - RNA, 13 nt, Human
ugcuugagcccag

SEQ ID NO: 2182282 - RNA, 16 nt, Human
ugcuugagcccaggag

SEQ ID NO: 2182283 - RNA, 12 nt, Human
ugcuugaggaaa

SEQ ID NO: 2182284 - RNA, 13 nt, Human
ugcuugaggaaaa

SEQ ID NO: 2182285 - RNA, 18 nt, Human
ugcuuuggaccuaaaugg

SEQ ID NO: 2182286 - RNA, 16 nt, Human
ugcuugaggaaaacaa

SEQ ID NO: 2182287 - RNA, 14 nt, Human
ugcuuugggcugcc

SEQ ID NO: 2182288 - RNA, 15 nt, Human
ugcuuugggcugccc

SEQ ID NO: 2182289 - RNA, 15 nt, Human
ugcuuugggaagccg

SEQ ID NO: 2182290 - RNA, 23 nt, Human
ugcuuuggaccuaaauggccuca

SEQ ID NO: 2182291 - RNA, 21 nt, Human
ugcuuuggaccuaaauggccu

SEQ ID NO: 2182292 - RNA, 22 nt, Human
ugcuuuggaccuaaauggccuc

SEQ ID NO: 2182293 - RNA, 23 nt, Human
uggaaagugaauuugaaugaaaa

SEQ ID NO: 2182294 - RNA, 21 nt, Human
uggaaagugaauuugaaugaa

SEQ ID NO: 2182295 - RNA, 20 nt, Human
uggaaagugaauuugaauga

SEQ ID NO: 2182296 - RNA, 17 nt, Human
uggaaagugaauuugaa

SEQ ID NO: 2182297 - RNA, 13 nt, Human
uggaaaguguaaa

SEQ ID NO: 2182298 - RNA, 14 nt, Human
uggaaaguguaaag

SEQ ID NO: 2182299 - RNA, 15 nt, Human
uggaaaguguaaagc

SEQ ID NO: 2182300 - RNA, 16 nt, Human
uggaaaguguaaagca

SEQ ID NO: 2182301 - RNA, 16 nt, Human
uggaaagugaauuuga

SEQ ID NO: 2182302 - RNA, 15 nt, Human
uggaaagugaauuug

SEQ ID NO: 2182303 - RNA, 14 nt, Human
uggaaagugaauuu

SEQ ID NO: 2182304 - RNA, 17 nt, Human
ugcuuuuugagguggca

SEQ ID NO: 2182305 - RNA, 20 nt, Human
ugcuuuuugagguggcacuu

SEQ ID NO: 2182306 - RNA, 21 nt, Human
ugcuuuuugagguggcacuuu

SEQ ID NO: 2182307 - RNA, 23 nt, Human
uggaaauaaauguaucauagaaa

SEQ ID NO: 2182308 - RNA, 15 nt, Human
uggaaauaaauguau

SEQ ID NO: 2182309 - RNA, 13 nt, Human
uggaaauaaaugu

SEQ ID NO: 2182310 - RNA, 17 nt, Human
uggaaaguguaaagcau

SEQ ID NO: 2182311 - RNA, 18 nt, Human
uggaaaguguaaagcauu

SEQ ID NO: 2182312 - RNA, 21 nt, Human
uggaaaguguaaagcauucca

SEQ ID NO: 2182313 - RNA, 17 nt, Human
ugcuuuuuaaguguuaa

SEQ ID NO: 2182314 - RNA, 15 nt, Human
ugcuuuuuauuucug

SEQ ID NO: 2182315 - RNA, 16 nt, Human
ugcuuuuuauggccug

SEQ ID NO: 2182316 - RNA, 19 nt, Human
ugcuuuuuauuucugcaua

SEQ ID NO: 2182317 - RNA, 18 nt, Human
ugcuuuuuauuucugcau

SEQ ID NO: 2182318 - RNA, 15 nt, Human
ugcuuuuucaccaga

SEQ ID NO: 2182319 - RNA, 12 nt, Human
ugcuuuuucuga

SEQ ID NO: 2182320 - RNA, 13 nt, Human
ugcuuuuucuaau

SEQ ID NO: 2182321 - RNA, 14 nt, Human
ugcuuuuucuaaug

SEQ ID NO: 2182322 - RNA, 13 nt, Human
ugcuuuuucugac

SEQ ID NO: 2182323 - RNA, 23 nt, Human
uggaaauuuguuauaaugaauga

SEQ ID NO: 2182324 - RNA, 21 nt, Human
uggaaauuuguuauaaugaau

SEQ ID NO: 2182325 - RNA, 13 nt, Human
uggaagaccccac

SEQ ID NO: 2182326 - RNA, 15 nt, Human
uggaagaccccaccc

SEQ ID NO: 2182327 - RNA, 15 nt, Human
uggaagacagcucuu

SEQ ID NO: 2182328 - RNA, 16 nt, Human
uggaagacagcucuua

SEQ ID NO: 2182329 - RNA, 23 nt, Human
uggaagagccugcaggugcugcu

SEQ ID NO: 2182330 - RNA, 15 nt, Human
uggaagagccugcag

SEQ ID NO: 2182331 - RNA, 15 nt, Human
uggaagagggcugca

SEQ ID NO: 2182332 - RNA, 17 nt, Human
uggaagaccccacccaa

SEQ ID NO: 2182333 - RNA, 18 nt, Human
aggaucuuuugaacccag

SEQ ID NO: 2182334 - RNA, 13 nt, Human
aggaucuuuugaa

SEQ ID NO: 2182335 - RNA, 21 nt, Human
aggaucauuuguuggaaugaa

SEQ ID NO: 2182336 - RNA, 22 nt, Human
aggaugaaugaggucccaggca

SEQ ID NO: 2182337 - RNA, 21 nt, Human
aggaugaaugaggucccaggc

SEQ ID NO: 2182338 - RNA, 20 nt, Human
aggaugaaugaggucccagg

SEQ ID NO: 2182339 - RNA, 19 nt, Human
aggaugaaugaggucccag

SEQ ID NO: 2182340 - RNA, 20 nt, Human
aggaugaccuggauaacuua

SEQ ID NO: 2182341 - RNA, 20 nt, Human
aggaugacgguauuaugcuu

SEQ ID NO: 2182342 - RNA, 23 nt, Human
aggaugacgguauuaugcuucuu

SEQ ID NO: 2182343 - RNA, 22 nt, Human
aggaucaugguguaauaagaca

SEQ ID NO: 2182344 - RNA, 12 nt, Human
aggaugaaugua

SEQ ID NO: 2182345 - RNA, 18 nt, Human
aggaugaauguaugugca

SEQ ID NO: 2182346 - RNA, 20 nt, Human
aggaugaauguaugugcacu

SEQ ID NO: 2182347 - RNA, 13 nt, Human
aggaugagagccc

SEQ ID NO: 2182348 - RNA, 14 nt, Human
aggaugagagccca

SEQ ID NO: 2182349 - RNA, 15 nt, Human
aggaugagagcccag

SEQ ID NO: 2182350 - RNA, 16 nt, Human
aggaugagagcccaga

SEQ ID NO: 2182351 - RNA, 17 nt, Human
aggaugagagcccagag

SEQ ID NO: 2182352 - RNA, 18 nt, Human
aggaugagagcccagagg

SEQ ID NO: 2182353 - RNA, 19 nt, Human
aggaugagagcccagaggu

SEQ ID NO: 2182354 - RNA, 20 nt, Human
aggaugagagcccagaggua

SEQ ID NO: 2182355 - RNA, 13 nt, Human
aggaucagucuga

SEQ ID NO: 2182356 - RNA, 21 nt, Human
aggauauauuuucacuuugug

SEQ ID NO: 2182357 - RNA, 15 nt, Human
aggauaucuucucca

SEQ ID NO: 2182358 - RNA, 15 nt, Human
aggaucaugguguaa

SEQ ID NO: 2182359 - RNA, 20 nt, Human
aggaucauuuguuggaauga

SEQ ID NO: 2182360 - RNA, 17 nt, Human
aggaucaugguguaaua

SEQ ID NO: 2182361 - RNA, 18 nt, Human
aggaucaugguguaauaa

SEQ ID NO: 2182362 - RNA, 16 nt, Human
aggaugauuuuggccu

SEQ ID NO: 2182363 - RNA, 18 nt, Human
aggaugcagagucagcag

SEQ ID NO: 2182364 - RNA, 13 nt, Human
aggauugaagagc

SEQ ID NO: 2182365 - RNA, 14 nt, Human
aggauugaagagca

SEQ ID NO: 2182366 - RNA, 22 nt, Human
aggauugaagagcauugcaugg

SEQ ID NO: 2182367 - RNA, 17 nt, Human
aggauugauuaugcaga

SEQ ID NO: 2182368 - RNA, 19 nt, Human
aggauucuuccucccuccc

SEQ ID NO: 2182369 - RNA, 17 nt, Human
aggauucuuccucccuc

SEQ ID NO: 2182370 - RNA, 19 nt, Human
aggaugagcucuacccagg

SEQ ID NO: 2182371 - RNA, 23 nt, Human
aggaugagagcccagagguaaca

SEQ ID NO: 2182372 - RNA, 22 nt, Human
aggaugcacagaguuguuacau

SEQ ID NO: 2182373 - RNA, 22 nt, Human
aggaugaucuaggaagacuuug

SEQ ID NO: 2182374 - RNA, 23 nt, Human
aggaugaucuaggaagacuuugg

SEQ ID NO: 2182375 - RNA, 16 nt, Human
aggaggcuggcaggua

SEQ ID NO: 2182376 - RNA, 13 nt, Human
aggaggcuggcug

SEQ ID NO: 2182377 - RNA, 14 nt, Human
aggaggcuggcugg

SEQ ID NO: 2182378 - RNA, 13 nt, Human
aggaggcuggcag

SEQ ID NO: 2182379 - RNA, 13 nt, Human
aggaggcuggcuu

SEQ ID NO: 2182380 - RNA, 14 nt, Human
aggauagaugcugg

SEQ ID NO: 2182381 - RNA, 15 nt, Human
aggauagaugcuggc

SEQ ID NO: 2182382 - RNA, 19 nt, Human
aggauagaugcuggcccag

SEQ ID NO: 2182383 - RNA, 18 nt, Human
aggauagaugcuggccca

SEQ ID NO: 2182384 - RNA, 14 nt, Human
aggauauauuuuca

SEQ ID NO: 2182385 - RNA, 18 nt, Human
aggauauauuuucacuuu

SEQ ID NO: 2182386 - RNA, 16 nt, Human
aggauaggaguucacu

SEQ ID NO: 2182387 - RNA, 21 nt, Human
aggauaggaguucacuucauc

SEQ ID NO: 2182388 - RNA, 22 nt, Human
aggauagaugcuggcccagggc

SEQ ID NO: 2182389 - RNA, 14 nt, Human
aggauagcauuuuu

SEQ ID NO: 2182390 - RNA, 21 nt, Human
aggauagaugcuggcccaggg

SEQ ID NO: 2182391 - RNA, 20 nt, Human
aggauagaugcuggcccagg

SEQ ID NO: 2182392 - RNA, 13 nt, Human
aggaggcugaggg

SEQ ID NO: 2182393 - RNA, 19 nt, Human
aggaggcugaggcaggagg

SEQ ID NO: 2182394 - RNA, 17 nt, Human
aggaggcugaggcagga

SEQ ID NO: 2182395 - RNA, 17 nt, Human
aggaggcugaggcagaa

SEQ ID NO: 2182396 - RNA, 16 nt, Human
aggaggcugaggcaga

SEQ ID NO: 2182397 - RNA, 19 nt, Human
aggaggcuccagagggcac

SEQ ID NO: 2182398 - RNA, 18 nt, Human
aggaggcuccagagggca

SEQ ID NO: 2182399 - RNA, 17 nt, Human
aggaggcuccagagggc

SEQ ID NO: 2182400 - RNA, 15 nt, Human
aggaggagcaggggc

SEQ ID NO: 2182401 - RNA, 23 nt, Human
aggaggcgcacuuuccuccuggc

SEQ ID NO: 2182402 - RNA, 16 nt, Human
aggaggcuccagaggg

SEQ ID NO: 2182403 - RNA, 13 nt, Human
aggaggcuccaga

SEQ ID NO: 2182404 - RNA, 19 nt, Human
uggaagcccuccuuccacg

SEQ ID NO: 2182405 - RNA, 14 nt, Human
aggaggaaggcaag

SEQ ID NO: 2182406 - RNA, 17 nt, Human
uggaagccggagggugu

SEQ ID NO: 2182407 - RNA, 17 nt, Human
aggaggaaggcaagagg

SEQ ID NO: 2182408 - RNA, 22 nt, Human
aggaggaaucaugucaggccug

SEQ ID NO: 2182409 - RNA, 23 nt, Human
aggaggaaucaugucaggccugu

SEQ ID NO: 2182410 - RNA, 13 nt, Human
aggaggacaauuc

SEQ ID NO: 2182411 - RNA, 14 nt, Human
aggaggacaauuca

SEQ ID NO: 2182412 - RNA, 22 nt, Human
aggaggacaauucaugaacuuc

SEQ ID NO: 2182413 - RNA, 19 nt, Human
uggaagcauguaggagaau

SEQ ID NO: 2182414 - RNA, 17 nt, Human
uggaagcauguaggaga

SEQ ID NO: 2182415 - RNA, 15 nt, Human
uggaagccagcuuuc

SEQ ID NO: 2182416 - RNA, 18 nt, Human
uggaagccagcuuucccu

SEQ ID NO: 2182417 - RNA, 16 nt, Human
uggaagccagcuuucc

SEQ ID NO: 2182418 - RNA, 17 nt, Human
uggaagcccuccuucca

SEQ ID NO: 2182419 - RNA, 16 nt, Human
uggaagcccuccuucc

SEQ ID NO: 2182420 - RNA, 15 nt, Human
uggaagcccuccuuc

SEQ ID NO: 2182421 - RNA, 13 nt, Human
uggaagcccuccu

SEQ ID NO: 2182422 - RNA, 12 nt, Human
uggaagcccucc

SEQ ID NO: 2182423 - RNA, 22 nt, Human
uggaagcauguaggagaaucca

SEQ ID NO: 2182424 - RNA, 19 nt, Human
uggaagcauauuguuauua

SEQ ID NO: 2182425 - RNA, 15 nt, Human
uggaagaggggacag

SEQ ID NO: 2182426 - RNA, 15 nt, Human
aggagcacaggcagc

SEQ ID NO: 2182427 - RNA, 22 nt, Human
aggagcacaggcagcuggauga

SEQ ID NO: 2182428 - RNA, 17 nt, Human
aggagcaaauguuucug

SEQ ID NO: 2182429 - RNA, 18 nt, Human
aggagcaaauguuucugc

SEQ ID NO: 2182430 - RNA, 19 nt, Human
aggagcaaauguuucugca

SEQ ID NO: 2182431 - RNA, 20 nt, Human
aggagauggaaguugcagug

SEQ ID NO: 2182432 - RNA, 22 nt, Human
aggagaugcuccuugggcccuu

SEQ ID NO: 2182433 - RNA, 18 nt, Human
aggagaugcuccuugggc

SEQ ID NO: 2182434 - RNA, 17 nt, Human
aggagaugcuccuuggg

SEQ ID NO: 2182435 - RNA, 12 nt, Human
aggagcagccac

SEQ ID NO: 2182436 - RNA, 13 nt, Human
aggagcagccaca

SEQ ID NO: 2182437 - RNA, 12 nt, Human
aggagauaaauc

SEQ ID NO: 2182438 - RNA, 21 nt, Human
aggagagucccagagcaggag

SEQ ID NO: 2182439 - RNA, 24 nt, Human
aggagagucccagagcaggaggcc

SEQ ID NO: 2182440 - RNA, 21 nt, Human
aggagauaaaucuaguauaca

SEQ ID NO: 2182441 - RNA, 14 nt, Human
aggagauaucugag

SEQ ID NO: 2182442 - RNA, 18 nt, Human
aggagauaucugagggag

SEQ ID NO: 2182443 - RNA, 19 nt, Human
aggagauaucugagggagg

SEQ ID NO: 2182444 - RNA, 23 nt, Human
aggagauaucugagggaggaggc

SEQ ID NO: 2182445 - RNA, 16 nt, Human
aggagaugcuccuugg

SEQ ID NO: 2182446 - RNA, 20 nt, Human
aggagauaucugagggagga

SEQ ID NO: 2182447 - RNA, 12 nt, Human
aggagaaaugca

SEQ ID NO: 2182448 - RNA, 21 nt, Human
aggacuugaaagcauccaugu

SEQ ID NO: 2182449 - RNA, 19 nt, Human
aggacuugaaagcauccau

SEQ ID NO: 2182450 - RNA, 16 nt, Human
aggacuugaaagcauc

SEQ ID NO: 2182451 - RNA, 16 nt, Human
aggagaaaugcaucca

SEQ ID NO: 2182452 - RNA, 20 nt, Human
aggagagucccagagcagga

SEQ ID NO: 2182453 - RNA, 17 nt, Human
aggagagucccagagca

SEQ ID NO: 2182454 - RNA, 17 nt, Human
aggagaguagaacagau

SEQ ID NO: 2182455 - RNA, 16 nt, Human
aggagccuccugcccu

SEQ ID NO: 2182456 - RNA, 17 nt, Human
aggagccccgaggccuu

SEQ ID NO: 2182457 - RNA, 23 nt, Human
aggagcccugggaggcucuggag

SEQ ID NO: 2182458 - RNA, 21 nt, Human
aggagcccuuaucugugcuca

SEQ ID NO: 2182459 - RNA, 22 nt, Human
aggagcaaauguuucugcagua

SEQ ID NO: 2182460 - RNA, 21 nt, Human
aggagccccauuccugggaaa

SEQ ID NO: 2182461 - RNA, 19 nt, Human
aggagccccauuccuggga

SEQ ID NO: 2182462 - RNA, 18 nt, Human
aggagccccauuccuggg

SEQ ID NO: 2182463 - RNA, 16 nt, Human
aggagccccauuccug

SEQ ID NO: 2182464 - RNA, 15 nt, Human
aggagccccauuccu

SEQ ID NO: 2182465 - RNA, 14 nt, Human
aggagccccagcua

SEQ ID NO: 2182466 - RNA, 21 nt, Human
aggacugccgaccgaggcugg

SEQ ID NO: 2182467 - RNA, 17 nt, Human
aggacugccgaccgagg

SEQ ID NO: 2182468 - RNA, 13 nt, Human
aggacugccgacc

SEQ ID NO: 2182469 - RNA, 21 nt, Human
aggacugccccgugcagacug

SEQ ID NO: 2182470 - RNA, 18 nt, Human
aggacugccccgugcaga

SEQ ID NO: 2182471 - RNA, 22 nt, Human
aggacugccgaccgaggcugga

SEQ ID NO: 2182472 - RNA, 11 nt, Human
aggacugggcc

SEQ ID NO: 2182473 - RNA, 12 nt, Human
aggacugggcca

SEQ ID NO: 2182474 - RNA, 15 nt, Human
aggacugggccacuu

SEQ ID NO: 2182475 - RNA, 15 nt, Human
aggacuguauuugug

SEQ ID NO: 2182476 - RNA, 16 nt, Human
aggacuguauuuguga

SEQ ID NO: 2182477 - RNA, 22 nt, Human
aggacuuccuguccagcuccaa

SEQ ID NO: 2182478 - RNA, 17 nt, Human
aggacuguauuugugac

SEQ ID NO: 2182479 - RNA, 18 nt, Human
aggacuguauuugugacu

SEQ ID NO: 2182480 - RNA, 21 nt, Human
aggacuuccuguccagcucca

SEQ ID NO: 2182481 - RNA, 12 nt, Human
aggacucugccu

SEQ ID NO: 2182482 - RNA, 13 nt, Human
aggacucugccuc

SEQ ID NO: 2182483 - RNA, 14 nt, Human
aggacucugccucc

SEQ ID NO: 2182484 - RNA, 16 nt, Human
aggacucugccuccuc

SEQ ID NO: 2182485 - RNA, 17 nt, Human
aggacucugccuccucu

SEQ ID NO: 2182486 - RNA, 18 nt, Human
aggacucugccuccucuu

SEQ ID NO: 2182487 - RNA, 21 nt, Human
aggacugcacagcguccuguc

SEQ ID NO: 2182488 - RNA, 23 nt, Human
aggacugcacagcguccugucca

SEQ ID NO: 2182489 - RNA, 22 nt, Human
aggacuuuucuuuguggcuucc

SEQ ID NO: 2182490 - RNA, 17 nt, Human
aggagaaacuggaacuc

SEQ ID NO: 2182491 - RNA, 19 nt, Human
aggagaaacuggaacucuc

SEQ ID NO: 2182492 - RNA, 18 nt, Human
aggagaaacuggaacucu

SEQ ID NO: 2182493 - RNA, 17 nt, Human
aggacuuuucuuugugg

SEQ ID NO: 2182494 - RNA, 19 nt, Human
aggacuuuucuuuguggcu

SEQ ID NO: 2182495 - RNA, 14 nt, Human
aggacgugggcggc

SEQ ID NO: 2182496 - RNA, 20 nt, Human
aggacgugggcggcagagag

SEQ ID NO: 2182497 - RNA, 13 nt, Human
aggacgcuucuga

SEQ ID NO: 2182498 - RNA, 14 nt, Human
aggacgcuucugaa

SEQ ID NO: 2182499 - RNA, 15 nt, Human
aggacgcuucugaau

SEQ ID NO: 2182500 - RNA, 15 nt, Human
aggacgccacccagc

SEQ ID NO: 2182501 - RNA, 13 nt, Human
aggacggccggcu

SEQ ID NO: 2182502 - RNA, 15 nt, Human
aggacggggccggcc

SEQ ID NO: 2182503 - RNA, 16 nt, Human
aggacggggccggcca

SEQ ID NO: 2182504 - RNA, 19 nt, Human
aggacggggccggccaggu

SEQ ID NO: 2182505 - RNA, 20 nt, Human
aggacggggccggccaggug

SEQ ID NO: 2182506 - RNA, 21 nt, Human
aggacggggccggccaggugg

SEQ ID NO: 2182507 - RNA, 22 nt, Human
aggacggggccggccagguggg

SEQ ID NO: 2182508 - RNA, 16 nt, Human
aggacggugcaaccca

SEQ ID NO: 2182509 - RNA, 15 nt, Human
aggacuaggguccug

SEQ ID NO: 2182510 - RNA, 19 nt, Human
aggacuacguuaagggaag

SEQ ID NO: 2182511 - RNA, 20 nt, Human
aggacuacguuaagggaagg

SEQ ID NO: 2182512 - RNA, 17 nt, Human
aggacuagaaccuggag

SEQ ID NO: 2182513 - RNA, 18 nt, Human
aggacuaggguccugggg

SEQ ID NO: 2182514 - RNA, 16 nt, Human
aggacuaggguccugg

SEQ ID NO: 2182515 - RNA, 19 nt, Human
aggacuaggguccugggga

SEQ ID NO: 2182516 - RNA, 18 nt, Human
aggacuagaaccuggagg

SEQ ID NO: 2182517 - RNA, 22 nt, Human
aggacuagaaccuggagggcug

SEQ ID NO: 2182518 - RNA, 16 nt, Human
aggacuauagcccagg

SEQ ID NO: 2182519 - RNA, 18 nt, Human
aggacuauagcccagguc

SEQ ID NO: 2182520 - RNA, 20 nt, Human
aggacuauauuugggccugc

SEQ ID NO: 2182521 - RNA, 19 nt, Human
aggacuauagcccaggucc

SEQ ID NO: 2182522 - RNA, 20 nt, Human
aggacuauagcccagguccu

SEQ ID NO: 2182523 - RNA, 18 nt, Human
aggacucagaagccucug

SEQ ID NO: 2182524 - RNA, 13 nt, Human
aggacucagcucc

SEQ ID NO: 2182525 - RNA, 14 nt, Human
aggacucagcuccc

SEQ ID NO: 2182526 - RNA, 17 nt, Human
aggacucccuccucacc

SEQ ID NO: 2182527 - RNA, 16 nt, Human
aggacucccuccucac

SEQ ID NO: 2182528 - RNA, 15 nt, Human
aggacucccuccuca

SEQ ID NO: 2182529 - RNA, 14 nt, Human
aggacucccuccuc

SEQ ID NO: 2182530 - RNA, 13 nt, Human
aggacucccuccu

SEQ ID NO: 2182531 - RNA, 12 nt, Human
aggacucccucc

SEQ ID NO: 2182532 - RNA, 16 nt, Human
aggacuccccaggcca

SEQ ID NO: 2182533 - RNA, 17 nt, Human
aggacuccccaggccag

SEQ ID NO: 2182534 - RNA, 18 nt, Human
aggacuccccaggccagg

SEQ ID NO: 2182535 - RNA, 19 nt, Human
aggacuccccaggccaggc

SEQ ID NO: 2182536 - RNA, 17 nt, Human
aggacuccacccauccu

SEQ ID NO: 2182537 - RNA, 17 nt, Human
aggacucagcuccccag

SEQ ID NO: 2182538 - RNA, 18 nt, Human
aggacucagcuccccaga

SEQ ID NO: 2182539 - RNA, 19 nt, Human
aggacucagcuccccagag

SEQ ID NO: 2182540 - RNA, 20 nt, Human
aggacucagcuccccagagu

SEQ ID NO: 2182541 - RNA, 13 nt, Human
aggacuccccagg

SEQ ID NO: 2182542 - RNA, 18 nt, Human
aggacucugcccagacca

SEQ ID NO: 2182543 - RNA, 15 nt, Human
aggacucugcccaga

SEQ ID NO: 2182544 - RNA, 17 nt, Human
aggacucugaggcucuu

SEQ ID NO: 2182545 - RNA, 14 nt, Human
aggacucugaggcu

SEQ ID NO: 2182546 - RNA, 13 nt, Human
aggacucugaggc

SEQ ID NO: 2182547 - RNA, 12 nt, Human
aggacucucagg

SEQ ID NO: 2182548 - RNA, 19 nt, Human
aggacucccuccucaccuc

SEQ ID NO: 2182549 - RNA, 18 nt, Human
aggacucccuccucaccu

SEQ ID NO: 2182550 - RNA, 23 nt, Human
aggacucccuccucaccucugga

SEQ ID NO: 2182551 - RNA, 20 nt, Human
aggacuccccaggccaggcc

SEQ ID NO: 2182552 - RNA, 17 nt, Human
aggacuccuuaaauuug

SEQ ID NO: 2182553 - RNA, 21 nt, Human
aggaccuguggccaaguucuu

SEQ ID NO: 2182554 - RNA, 16 nt, Human
aggaccuuaucugugc

SEQ ID NO: 2182555 - RNA, 15 nt, Human
aggaccuuaucugug

SEQ ID NO: 2182556 - RNA, 19 nt, Human
aggaccuucgggcugugcc

SEQ ID NO: 2182557 - RNA, 18 nt, Human
aggaccuucgggcugugc

SEQ ID NO: 2182558 - RNA, 13 nt, Human
aggacacagucag

SEQ ID NO: 2182559 - RNA, 23 nt, Human
aggacacagaugaaacacaaaca

SEQ ID NO: 2182560 - RNA, 13 nt, Human
aggacacacuaau

SEQ ID NO: 2182561 - RNA, 23 nt, Human
aggacacacuaaucgaacuauga

SEQ ID NO: 2182562 - RNA, 18 nt, Human
aggacaauucaugaacuu

SEQ ID NO: 2182563 - RNA, 14 nt, Human
aggacaauuucaaa

SEQ ID NO: 2182564 - RNA, 15 nt, Human
aggacaauuucaaaa

SEQ ID NO: 2182565 - RNA, 16 nt, Human
aggacaauuucaaaaa

SEQ ID NO: 2182566 - RNA, 16 nt, Human
aggacaacgaggaagc

SEQ ID NO: 2182567 - RNA, 22 nt, Human
aggaauucuaggcaucccaggg

SEQ ID NO: 2182568 - RNA, 23 nt, Human
aggaauucccagcccaaagcugu

SEQ ID NO: 2182569 - RNA, 20 nt, Human
aggaauuccccaaagaaugu

SEQ ID NO: 2182570 - RNA, 14 nt, Human
aggacaacgaggaa

SEQ ID NO: 2182571 - RNA, 18 nt, Human
aggacaacgaggaagccc

SEQ ID NO: 2182572 - RNA, 17 nt, Human
aggacaacgaggaagcc

SEQ ID NO: 2182573 - RNA, 14 nt, Human
aggacaaggcuaga

SEQ ID NO: 2182574 - RNA, 17 nt, Human
aggacaaucaguccccu

SEQ ID NO: 2182575 - RNA, 18 nt, Human
aggacaaucaguccccuc

SEQ ID NO: 2182576 - RNA, 19 nt, Human
aggacaaucaguccccucc

SEQ ID NO: 2182577 - RNA, 20 nt, Human
aggacaaucaguccccuccc

SEQ ID NO: 2182578 - RNA, 21 nt, Human
aggacaaucaguccccuccca

SEQ ID NO: 2182579 - RNA, 22 nt, Human
aggacaaucaguccccucccau

SEQ ID NO: 2182580 - RNA, 23 nt, Human
aggacaaucaguccccucccauc

SEQ ID NO: 2182581 - RNA, 14 nt, Human
aggacgcucucugg

SEQ ID NO: 2182582 - RNA, 13 nt, Human
aggacgcucucug

SEQ ID NO: 2182583 - RNA, 21 nt, Human
aggaccuuuccaccacagcca

SEQ ID NO: 2182584 - RNA, 20 nt, Human
aggaccuucgggcugugccc

SEQ ID NO: 2182585 - RNA, 20 nt, Human
aggacgaacauccaaccuuc

SEQ ID NO: 2182586 - RNA, 22 nt, Human
aggaccuuuccaccacagccag

SEQ ID NO: 2182587 - RNA, 14 nt, Human
aggacgccacccag

SEQ ID NO: 2182588 - RNA, 20 nt, Human
aggacgcucucuggccuucg

SEQ ID NO: 2182589 - RNA, 19 nt, Human
aggacgcucucuggccuuc

SEQ ID NO: 2182590 - RNA, 17 nt, Human
aggacgcucucuggccu

SEQ ID NO: 2182591 - RNA, 16 nt, Human
aggacgcucucuggcc

SEQ ID NO: 2182592 - RNA, 16 nt, Human
agcccugggaucacug

SEQ ID NO: 2182593 - RNA, 18 nt, Human
agcccugggaucacugug

SEQ ID NO: 2182594 - RNA, 16 nt, Human
agcccugggccccacc

SEQ ID NO: 2182595 - RNA, 23 nt, Human
agcccugggccccaccaccuagg

SEQ ID NO: 2182596 - RNA, 19 nt, Human
agcccugggccccaccacc

SEQ ID NO: 2182597 - RNA, 17 nt, Human
agcccugggccccacca

SEQ ID NO: 2182598 - RNA, 22 nt, Human
ugcacaugucuuguacaugugu

SEQ ID NO: 2182599 - RNA, 13 nt, Human
ugcacaugugugc

SEQ ID NO: 2182600 - RNA, 21 nt, Human
agcccugggccccaccaccua

SEQ ID NO: 2182601 - RNA, 23 nt, Human
ugcacaugucuuguacaugugua

SEQ ID NO: 2182602 - RNA, 13 nt, Human
ugcacauguuucc

SEQ ID NO: 2182603 - RNA, 14 nt, Human
ugcacauguuuccu

SEQ ID NO: 2182604 - RNA, 16 nt, Human
ugcacauguuuccucu

SEQ ID NO: 2182605 - RNA, 17 nt, Human
ugcacauguuuccucua

SEQ ID NO: 2182606 - RNA, 18 nt, Human
ugcacauguuuccucuag

SEQ ID NO: 2182607 - RNA, 20 nt, Human
agcccugcagugugguagcg

SEQ ID NO: 2182608 - RNA, 17 nt, Human
agcccugggaggcucug

SEQ ID NO: 2182609 - RNA, 18 nt, Human
agcccugggaggcucugg

SEQ ID NO: 2182610 - RNA, 20 nt, Human
agcccugggaggcucuggag

SEQ ID NO: 2182611 - RNA, 19 nt, Human
ugcacaugugugcgugugc

SEQ ID NO: 2182612 - RNA, 15 nt, Human
ugcaccacugcacuc

SEQ ID NO: 2182613 - RNA, 15 nt, Human
ugcaccaacccagcc

SEQ ID NO: 2182614 - RNA, 21 nt, Human
ugcaccacugcacuccagccu

SEQ ID NO: 2182615 - RNA, 13 nt, Human
ugcaccagcccuu

SEQ ID NO: 2182616 - RNA, 16 nt, Human
ugcaccccccugggcu

SEQ ID NO: 2182617 - RNA, 15 nt, Human
ugcaccccccugggc

SEQ ID NO: 2182618 - RNA, 12 nt, Human
ugcacccccucc

SEQ ID NO: 2182619 - RNA, 14 nt, Human
ugcacccccuccug

SEQ ID NO: 2182620 - RNA, 14 nt, Human
ugcaccccccuggg

SEQ ID NO: 2182621 - RNA, 16 nt, Human
ugcaccccaugcuguu

SEQ ID NO: 2182622 - RNA, 14 nt, Human
ugcaccccaugcug

SEQ ID NO: 2182623 - RNA, 20 nt, Human
ugcaccccaaagcuuuccug

SEQ ID NO: 2182624 - RNA, 21 nt, Human
ugcaccccaaagcuuuccugc

SEQ ID NO: 2182625 - RNA, 22 nt, Human
ugcaccccaaagcuuuccugcc

SEQ ID NO: 2182626 - RNA, 23 nt, Human
ugcaccccaaagcuuuccugccc

SEQ ID NO: 2182627 - RNA, 16 nt, Human
ugcaccaacccagccg

SEQ ID NO: 2182628 - RNA, 14 nt, Human
agcccuggucucag

SEQ ID NO: 2182629 - RNA, 19 nt, Human
ugcaccaacccagccgcug

SEQ ID NO: 2182630 - RNA, 23 nt, Human
ugcaccaggguugaccccagagg

SEQ ID NO: 2182631 - RNA, 15 nt, Human
ugcaccaucccuuuu

SEQ ID NO: 2182632 - RNA, 18 nt, Human
ugcaccccaaagcuuucc

SEQ ID NO: 2182633 - RNA, 19 nt, Human
ugcaccccaaagcuuuccu

SEQ ID NO: 2182634 - RNA, 14 nt, Human
ugcacucagcucuu

SEQ ID NO: 2182635 - RNA, 22 nt, Human
ugcacccuggggccuggaccug

SEQ ID NO: 2182636 - RNA, 16 nt, Human
ugcaccggcuggccug

SEQ ID NO: 2182637 - RNA, 14 nt, Human
ugcacuccagccug

SEQ ID NO: 2182638 - RNA, 15 nt, Human
ugcacuccagccuga

SEQ ID NO: 2182639 - RNA, 15 nt, Human
ugcacccuggggccu

SEQ ID NO: 2182640 - RNA, 15 nt, Human
ugcaccccucccauu

SEQ ID NO: 2182641 - RNA, 15 nt, Human
ugcacccccuccugc

SEQ ID NO: 2182642 - RNA, 16 nt, Human
ugcacccccuccugcu

SEQ ID NO: 2182643 - RNA, 17 nt, Human
ugcacccccuccugcug

SEQ ID NO: 2182644 - RNA, 18 nt, Human
ugcacccccuccugcugc

SEQ ID NO: 2182645 - RNA, 19 nt, Human
ugcacccccuccugcugca

SEQ ID NO: 2182646 - RNA, 12 nt, Human
ugcaccccuccc

SEQ ID NO: 2182647 - RNA, 13 nt, Human
ugcaccccuccca

SEQ ID NO: 2182648 - RNA, 14 nt, Human
ugcaccccucccau

SEQ ID NO: 2182649 - RNA, 14 nt, Human
ugcaccggcuggcc

SEQ ID NO: 2182650 - RNA, 15 nt, Human
ugcaccggcuggccu

SEQ ID NO: 2182651 - RNA, 15 nt, Human
ugcacuccagccugg

SEQ ID NO: 2182652 - RNA, 17 nt, Human
ugcacuccagccugagc

SEQ ID NO: 2182653 - RNA, 18 nt, Human
ugcacuccagccugggca

SEQ ID NO: 2182654 - RNA, 17 nt, Human
ugcacuccagccugggc

SEQ ID NO: 2182655 - RNA, 13 nt, Human
ugcacuccagccu

SEQ ID NO: 2182656 - RNA, 12 nt, Human
ugcacuccagcc

SEQ ID NO: 2182657 - RNA, 16 nt, Human
ugcacuccagccuggg

SEQ ID NO: 2182658 - RNA, 18 nt, Human
ugcacuccagccugggcg

SEQ ID NO: 2182659 - RNA, 20 nt, Human
ugcacuccagccugggcaac

SEQ ID NO: 2182660 - RNA, 15 nt, Human
ugcagaaggaaaaau

SEQ ID NO: 2182661 - RNA, 16 nt, Human
ugcagaaggaaaaaug

SEQ ID NO: 2182662 - RNA, 19 nt, Human
ugcagaaggaaaaaugugu

SEQ ID NO: 2182663 - RNA, 22 nt, Human
ugcagaagacaguauggcagcu

SEQ ID NO: 2182664 - RNA, 13 nt, Human
ugcagaaggccaa

SEQ ID NO: 2182665 - RNA, 15 nt, Human
ugcagaaggccaaga

SEQ ID NO: 2182666 - RNA, 20 nt, Human
ugcagaaggaaaaaugugua

SEQ ID NO: 2182667 - RNA, 21 nt, Human
ugcagaaggaaaaauguguaa

SEQ ID NO: 2182668 - RNA, 22 nt, Human
ugcagaaggaaaaauguguaau

SEQ ID NO: 2182669 - RNA, 23 nt, Human
ugcagaaggaagggcauccuucu

SEQ ID NO: 2182670 - RNA, 21 nt, Human
ugcagaauacaguaagcugcu

SEQ ID NO: 2182671 - RNA, 23 nt, Human
agcccugaguuccuagccaccgc

SEQ ID NO: 2182672 - RNA, 20 nt, Human
agcccugaguuccuagccac

SEQ ID NO: 2182673 - RNA, 16 nt, Human
agcccgggcucugccu

SEQ ID NO: 2182674 - RNA, 18 nt, Human
agcccugaguuccuagcc

SEQ ID NO: 2182675 - RNA, 15 nt, Human
agccccuucucagaa

SEQ ID NO: 2182676 - RNA, 16 nt, Human
agccccuucucagaau

SEQ ID NO: 2182677 - RNA, 18 nt, Human
agccccuucucagaaucu

SEQ ID NO: 2182678 - RNA, 19 nt, Human
agccccuucucagaaucua

SEQ ID NO: 2182679 - RNA, 14 nt, Human
agcccugcagaggg

SEQ ID NO: 2182680 - RNA, 15 nt, Human
agcccugcagagggc

SEQ ID NO: 2182681 - RNA, 16 nt, Human
agcccugcagagggca

SEQ ID NO: 2182682 - RNA, 19 nt, Human
agcccugcagagggcacag

SEQ ID NO: 2182683 - RNA, 14 nt, Human
agccccuucugacc

SEQ ID NO: 2182684 - RNA, 14 nt, Human
agccccuuagcccc

SEQ ID NO: 2182685 - RNA, 18 nt, Human
agccccuguggagacugg

SEQ ID NO: 2182686 - RNA, 13 nt, Human
agccccuucccca

SEQ ID NO: 2182687 - RNA, 15 nt, Human
agccccuuccccaug

SEQ ID NO: 2182688 - RNA, 17 nt, Human
agccccuuccccauggg

SEQ ID NO: 2182689 - RNA, 17 nt, Human
agccccuuccuugcucu

SEQ ID NO: 2182690 - RNA, 23 nt, Human
agccccuuccuugcucugcaccc

SEQ ID NO: 2182691 - RNA, 15 nt, Human
agccccuucugaccc

SEQ ID NO: 2182692 - RNA, 16 nt, Human
agccccuucugaccca

SEQ ID NO: 2182693 - RNA, 19 nt, Human
agccccuucugacccaugc

SEQ ID NO: 2182694 - RNA, 13 nt, Human
agcccgggcucug

SEQ ID NO: 2182695 - RNA, 14 nt, Human
agcccgggcucugc

SEQ ID NO: 2182696 - RNA, 15 nt, Human
agcccgggcucugcc

SEQ ID NO: 2182697 - RNA, 19 nt, Human
agcccccuggccucugugc

SEQ ID NO: 2182698 - RNA, 17 nt, Human
agcccccuggccucugu

SEQ ID NO: 2182699 - RNA, 16 nt, Human
agcccccuggccucug

SEQ ID NO: 2182700 - RNA, 22 nt, Human
agcccaggccgggguggagcau

SEQ ID NO: 2182701 - RNA, 15 nt, Human
agcccccuggccucu

SEQ ID NO: 2182702 - RNA, 14 nt, Human
agcccaggccuccu

SEQ ID NO: 2182703 - RNA, 19 nt, Human
agcccaggccuccuacagc

SEQ ID NO: 2182704 - RNA, 18 nt, Human
agccccgcgccuccuucc

SEQ ID NO: 2182705 - RNA, 15 nt, Human
agccccgcgccuccu

SEQ ID NO: 2182706 - RNA, 16 nt, Human
agccccgccuccaggc

SEQ ID NO: 2182707 - RNA, 23 nt, Human
agccccgcagaccuccccagccc

SEQ ID NO: 2182708 - RNA, 14 nt, Human
agccccgaggccuu

SEQ ID NO: 2182709 - RNA, 16 nt, Human
agcccccuugacaccg

SEQ ID NO: 2182710 - RNA, 18 nt, Human
agcccccuuugggcccag

SEQ ID NO: 2182711 - RNA, 19 nt, Human
agcccccuuugggcccagg

SEQ ID NO: 2182712 - RNA, 20 nt, Human
agcccccuuugggcccaggg

SEQ ID NO: 2182713 - RNA, 21 nt, Human
agcccccuuugggcccaggga

SEQ ID NO: 2182714 - RNA, 22 nt, Human
agccccuccucugccaccuccc

SEQ ID NO: 2182715 - RNA, 21 nt, Human
agccccuccucugccaccucc

SEQ ID NO: 2182716 - RNA, 20 nt, Human
agccccuccucugccaccuc

SEQ ID NO: 2182717 - RNA, 19 nt, Human
agccccuccucugccaccu

SEQ ID NO: 2182718 - RNA, 23 nt, Human
agccccuccucugccaccucccc

SEQ ID NO: 2182719 - RNA, 12 nt, Human
agccccucuggu

SEQ ID NO: 2182720 - RNA, 13 nt, Human
agccccucugguc

SEQ ID NO: 2182721 - RNA, 16 nt, Human
agccccucuggucgcu

SEQ ID NO: 2182722 - RNA, 23 nt, Human
agccccugucuagagagggaggc

SEQ ID NO: 2182723 - RNA, 22 nt, Human
agccccugucuagagagggagg

SEQ ID NO: 2182724 - RNA, 14 nt, Human
agccccuguggaga

SEQ ID NO: 2182725 - RNA, 15 nt, Human
agccccuguggagac

SEQ ID NO: 2182726 - RNA, 21 nt, Human
agccccugucuagagagggag

SEQ ID NO: 2182727 - RNA, 20 nt, Human
agccccugucuagagaggga

SEQ ID NO: 2182728 - RNA, 12 nt, Human
agccccugggug

SEQ ID NO: 2182729 - RNA, 14 nt, Human
agccccugguccug

SEQ ID NO: 2182730 - RNA, 18 nt, Human
agccccuguauggcacug

SEQ ID NO: 2182731 - RNA, 11 nt, Human
agccccuccuc

SEQ ID NO: 2182732 - RNA, 23 nt, Human
agccccucccaccacagcaggug

SEQ ID NO: 2182733 - RNA, 18 nt, Human
agccccuccucugccacc

SEQ ID NO: 2182734 - RNA, 17 nt, Human
agccccuccucugccac

SEQ ID NO: 2182735 - RNA, 16 nt, Human
agccccuccucugcca

SEQ ID NO: 2182736 - RNA, 15 nt, Human
agccccuccucugcc

SEQ ID NO: 2182737 - RNA, 14 nt, Human
agccccuccucugc

SEQ ID NO: 2182738 - RNA, 13 nt, Human
agccccuccucug

SEQ ID NO: 2182739 - RNA, 12 nt, Human
agccccuccucu

SEQ ID NO: 2182740 - RNA, 18 nt, Human
agccccgugggguuccuc

SEQ ID NO: 2182741 - RNA, 18 nt, Human
agccccucccaccacagc

SEQ ID NO: 2182742 - RNA, 21 nt, Human
agccccggcccugggcucgga

SEQ ID NO: 2182743 - RNA, 24 nt, Human
agccccggggugaguccauucucc

SEQ ID NO: 2182744 - RNA, 22 nt, Human
agccccgcagaccuccccagcc

SEQ ID NO: 2182745 - RNA, 14 nt, Human
agccccggcccugg

SEQ ID NO: 2182746 - RNA, 16 nt, Human
agccccggcccugggc

SEQ ID NO: 2182747 - RNA, 18 nt, Human
agccccggcccugggcuc

SEQ ID NO: 2182748 - RNA, 13 nt, Human
ugcaacaacaugu

SEQ ID NO: 2182749 - RNA, 15 nt, Human
ugcaacaacauguau

SEQ ID NO: 2182750 - RNA, 14 nt, Human
ugcaacacacagac

SEQ ID NO: 2182751 - RNA, 13 nt, Human
ugcaacacacaga

SEQ ID NO: 2182752 - RNA, 12 nt, Human
ugcaacacacag

SEQ ID NO: 2182753 - RNA, 13 nt, Human
ugcaacaaaauuc

SEQ ID NO: 2182754 - RNA, 15 nt, Human
ugcaacacacagaca

SEQ ID NO: 2182755 - RNA, 13 nt, Human
ugcaacagcacug

SEQ ID NO: 2182756 - RNA, 14 nt, Human
ugcaacagcacugg

SEQ ID NO: 2182757 - RNA, 17 nt, Human
ugcaacagcacuggcuc

SEQ ID NO: 2182758 - RNA, 13 nt, Human
ugcaacaggcugg

SEQ ID NO: 2182759 - RNA, 15 nt, Human
ugcaaauccuaugug

SEQ ID NO: 2182760 - RNA, 14 nt, Human
ugcaaauccuaugu

SEQ ID NO: 2182761 - RNA, 12 nt, Human
ugcaaauccuau

SEQ ID NO: 2182762 - RNA, 21 nt, Human
ugcaaauauuuuuuuguagau

SEQ ID NO: 2182763 - RNA, 10 nt, Human
ugcaaauccu

SEQ ID NO: 2182764 - RNA, 18 nt, Human
ugcaaauauuuuuuugua

SEQ ID NO: 2182765 - RNA, 22 nt, Human
ugcaaaugucagauacaaugua

SEQ ID NO: 2182766 - RNA, 18 nt, Human
ugcaaaugucaucagaac

SEQ ID NO: 2182767 - RNA, 14 nt, Human
ugcaaauuaacagu

SEQ ID NO: 2182768 - RNA, 15 nt, Human
ugcaaaugcuguauu

SEQ ID NO: 2182769 - RNA, 21 nt, Human
ugcaaaugcuaugagaugcau

SEQ ID NO: 2182770 - RNA, 14 nt, Human
ugcaaaucuugaaa

SEQ ID NO: 2182771 - RNA, 19 nt, Human
ugcaaauccuaugugauuu

SEQ ID NO: 2182772 - RNA, 21 nt, Human
ugcaaauccuaugugauuuua

SEQ ID NO: 2182773 - RNA, 18 nt, Human
ugcaaauccuaugugauu

SEQ ID NO: 2182774 - RNA, 17 nt, Human
ugcaaauccuaugugau

SEQ ID NO: 2182775 - RNA, 23 nt, Human
ugcaagccccugcuccagaagau

SEQ ID NO: 2182776 - RNA, 20 nt, Human
ugcaagcagggcucugcccc

SEQ ID NO: 2182777 - RNA, 16 nt, Human
ugcaagcagggcucug

SEQ ID NO: 2182778 - RNA, 17 nt, Human
ugcaagcagggcucugc

SEQ ID NO: 2182779 - RNA, 19 nt, Human
ugcaaggaagccacagcug

SEQ ID NO: 2182780 - RNA, 12 nt, Human
ugcaagccugcg

SEQ ID NO: 2182781 - RNA, 14 nt, Human
ugcaagccugcguu

SEQ ID NO: 2182782 - RNA, 20 nt, Human
ugcaaggaagccacagcugg

SEQ ID NO: 2182783 - RNA, 12 nt, Human
ugcaaggaagga

SEQ ID NO: 2182784 - RNA, 16 nt, Human
ugcaaggaaggaaaga

SEQ ID NO: 2182785 - RNA, 15 nt, Human
ugcaaggaaggaaag

SEQ ID NO: 2182786 - RNA, 15 nt, Human
ugcaaggaccaggac

SEQ ID NO: 2182787 - RNA, 14 nt, Human
ugcaaggaccagga

SEQ ID NO: 2182788 - RNA, 13 nt, Human
ugcaaggaccagg

SEQ ID NO: 2182789 - RNA, 19 nt, Human
ugcaaggaaggaaagaaag

SEQ ID NO: 2182790 - RNA, 14 nt, Human
ugcaagagccuugg

SEQ ID NO: 2182791 - RNA, 19 nt, Human
ugcaagagacucuggccuc

SEQ ID NO: 2182792 - RNA, 24 nt, Human
ugcaacagcacuggcucucuccag

SEQ ID NO: 2182793 - RNA, 15 nt, Human
ugcaacaggcacuca

SEQ ID NO: 2182794 - RNA, 23 nt, Human
ugcaagagccuugguguccaccu

SEQ ID NO: 2182795 - RNA, 18 nt, Human
ugcaagauucugaaacau

SEQ ID NO: 2182796 - RNA, 15 nt, Human
ugcaagccagauuuu

SEQ ID NO: 2182797 - RNA, 21 nt, Human
ugcaagccagauuuuccugaa

SEQ ID NO: 2182798 - RNA, 13 nt, Human
ugcaaggcaaaga

SEQ ID NO: 2182799 - RNA, 17 nt, Human
ugcaaggaccaggacuc

SEQ ID NO: 2182800 - RNA, 24 nt, Human
ugcaaggccgcuguucacccacag

SEQ ID NO: 2182801 - RNA, 23 nt, Human
ugcaaggccgcuguucacccaca

SEQ ID NO: 2182802 - RNA, 22 nt, Human
ugcaagggcagaacacuaaccu

SEQ ID NO: 2182803 - RNA, 15 nt, Human
ugcaagggcucccca

SEQ ID NO: 2182804 - RNA, 16 nt, Human
ugcaagggcuccccac

SEQ ID NO: 2182805 - RNA, 21 nt, Human
ugcaagggacuguguguugcc

SEQ ID NO: 2182806 - RNA, 20 nt, Human
ugcaagggcagaacacuaac

SEQ ID NO: 2182807 - RNA, 21 nt, Human
ugcaagggcagaacacuaacc

SEQ ID NO: 2182808 - RNA, 16 nt, Human
ugcaagggacugugug

SEQ ID NO: 2182809 - RNA, 14 nt, Human
ugcaaggccuuucu

SEQ ID NO: 2182810 - RNA, 11 nt, Human
ugcaagggaaa

SEQ ID NO: 2182811 - RNA, 22 nt, Human
ugcaaguguguaugugcgugug

SEQ ID NO: 2182812 - RNA, 19 nt, Human
ugcaaguguguaugugcgu

SEQ ID NO: 2182813 - RNA, 19 nt, Human
ugcaaguacugcuguaaau

SEQ ID NO: 2182814 - RNA, 15 nt, Human
ugcaaguacugcugu

SEQ ID NO: 2182815 - RNA, 23 nt, Human
ugcaagguuuaggcugguggccc

SEQ ID NO: 2182816 - RNA, 16 nt, Human
ugcaaggucuuugguu

SEQ ID NO: 2182817 - RNA, 15 nt, Human
ugcaagguggcucca

SEQ ID NO: 2182818 - RNA, 18 nt, Human
ugcaaggggaaaaucuca

SEQ ID NO: 2182819 - RNA, 20 nt, Human
ugcaagggcuccccacugcc

SEQ ID NO: 2182820 - RNA, 15 nt, Human
ugcaaggucauuuuu

SEQ ID NO: 2182821 - RNA, 23 nt, Human
ugcaagugugugcacaugugugc

SEQ ID NO: 2182822 - RNA, 21 nt, Human
ugcaagugugugcacaugugu

SEQ ID NO: 2182823 - RNA, 14 nt, Human
ugcaagugugugca

SEQ ID NO: 2182824 - RNA, 13 nt, Human
ugcaagugugugc

SEQ ID NO: 2182825 - RNA, 23 nt, Human
ugcaagugugugcaugugugcga

SEQ ID NO: 2182826 - RNA, 18 nt, Human
ugcaagugugugcaugug

SEQ ID NO: 2182827 - RNA, 22 nt, Human
ugcaauauaucuaaauugaaua

SEQ ID NO: 2182828 - RNA, 23 nt, Human
ugcaauauaucuaaauugaauaa

SEQ ID NO: 2182829 - RNA, 14 nt, Human
ugcaauauguauua

SEQ ID NO: 2182830 - RNA, 18 nt, Human
ugcaauauuaaugccuuu

SEQ ID NO: 2182831 - RNA, 21 nt, Human
ugcaauauuaaugccuuuaaa

SEQ ID NO: 2182832 - RNA, 16 nt, Human
ugcaauauuuccucau

SEQ ID NO: 2182833 - RNA, 19 nt, Human
ugcaauauuuccucaugug

SEQ ID NO: 2182834 - RNA, 19 nt, Human
ugcaauccugucuuucuga

SEQ ID NO: 2182835 - RNA, 22 nt, Human
ugcaauauuuccucaugugauc

SEQ ID NO: 2182836 - RNA, 22 nt, Human
ugcaaucguaauguacagaugg

SEQ ID NO: 2182837 - RNA, 13 nt, Human
agcccaggccccu

SEQ ID NO: 2182838 - RNA, 12 nt, Human
agcccaggccuc

SEQ ID NO: 2182839 - RNA, 17 nt, Human
ugauuucccguggcccc

SEQ ID NO: 2182840 - RNA, 18 nt, Human
ugauuucccguggcccca

SEQ ID NO: 2182841 - RNA, 18 nt, Human
ugauuuccaaagagaaaa

SEQ ID NO: 2182842 - RNA, 21 nt, Human
ugauuuccccuccaagguaug

SEQ ID NO: 2182843 - RNA, 19 nt, Human
ugauuucccguggccccag

SEQ ID NO: 2182844 - RNA, 20 nt, Human
ugauuucccguggccccagc

SEQ ID NO: 2182845 - RNA, 21 nt, Human
ugauuucccguggccccagcc

SEQ ID NO: 2182846 - RNA, 22 nt, Human
ugauuucccguggccccagccu

SEQ ID NO: 2182847 - RNA, 23 nt, Human
ugauuugacuguuuuuacccaua

SEQ ID NO: 2182848 - RNA, 12 nt, Human
ugauuugcauug

SEQ ID NO: 2182849 - RNA, 23 nt, Human
ugauuucccguggccccagccug

SEQ ID NO: 2182850 - RNA, 14 nt, Human
ugauuugacuguuu

SEQ ID NO: 2182851 - RNA, 18 nt, Human
ugauuugacuguuuuuac

SEQ ID NO: 2182852 - RNA, 20 nt, Human
ugauuugacuguuuuuaccc

SEQ ID NO: 2182853 - RNA, 12 nt, Human
ugauuuggaaaa

SEQ ID NO: 2182854 - RNA, 15 nt, Human
ugauuugcauugaac

SEQ ID NO: 2182855 - RNA, 18 nt, Human
ugauuugcauugaacaca

SEQ ID NO: 2182856 - RNA, 14 nt, Human
ugauuugcauugaa

SEQ ID NO: 2182857 - RNA, 13 nt, Human
ugauuugcauuga

SEQ ID NO: 2182858 - RNA, 12 nt, Human
ugcaaaccauca

SEQ ID NO: 2182859 - RNA, 13 nt, Human
ugcaaaccaucau

SEQ ID NO: 2182860 - RNA, 17 nt, Human
agccacggccaggccag

SEQ ID NO: 2182861 - RNA, 18 nt, Human
agccacggccaggccaga

SEQ ID NO: 2182862 - RNA, 16 nt, Human
ugauuuauaguuugua

SEQ ID NO: 2182863 - RNA, 22 nt, Human
ugauuuauaguuuguacaugca

SEQ ID NO: 2182864 - RNA, 13 nt, Human
ugauuuaugcaug

SEQ ID NO: 2182865 - RNA, 22 nt, Human
ugauuuaugcauggaaaccuga

SEQ ID NO: 2182866 - RNA, 14 nt, Human
ugauuuccaaagag

SEQ ID NO: 2182867 - RNA, 17 nt, Human
ugauuucauuucaacug

SEQ ID NO: 2182868 - RNA, 13 nt, Human
ugauuucauuuca

SEQ ID NO: 2182869 - RNA, 13 nt, Human
ugauuucauucaa

SEQ ID NO: 2182870 - RNA, 16 nt, Human
ugauuucacaacagau

SEQ ID NO: 2182871 - RNA, 19 nt, Human
ugauuucacaacagaucaa

SEQ ID NO: 2182872 - RNA, 19 nt, Human
ugcaaagaggcaagaggcu

SEQ ID NO: 2182873 - RNA, 15 nt, Human
ugcaaagaggcaaga

SEQ ID NO: 2182874 - RNA, 13 nt, Human
ugcaaagaggcaa

SEQ ID NO: 2182875 - RNA, 16 nt, Human
ugcaaagaaaaucaga

SEQ ID NO: 2182876 - RNA, 12 nt, Human
ugcaaagaaaau

SEQ ID NO: 2182877 - RNA, 12 nt, Human
ugcaaacuuuau

SEQ ID NO: 2182878 - RNA, 17 nt, Human
ugcaaacuuuauuuuca

SEQ ID NO: 2182879 - RNA, 18 nt, Human
ugcaaaccaucauugaaa

SEQ ID NO: 2182880 - RNA, 20 nt, Human
ugcaaaccaucauugaaauc

SEQ ID NO: 2182881 - RNA, 12 nt, Human
ugcaaagaucug

SEQ ID NO: 2182882 - RNA, 23 nt, Human
ugcaaagaucuguccucagccuu

SEQ ID NO: 2182883 - RNA, 18 nt, Human
ugcaaagcacugacuucu

SEQ ID NO: 2182884 - RNA, 22 nt, Human
ugcaaagcacugacuucuaagu

SEQ ID NO: 2182885 - RNA, 20 nt, Human
ugcaaagcacugacuucuaa

SEQ ID NO: 2182886 - RNA, 12 nt, Human
ugcaaagauuug

SEQ ID NO: 2182887 - RNA, 13 nt, Human
ugcaaaggacaga

SEQ ID NO: 2182888 - RNA, 12 nt, Human
ugcaaaggacug

SEQ ID NO: 2182889 - RNA, 15 nt, Human
ugcaaaggacagauc

SEQ ID NO: 2182890 - RNA, 12 nt, Human
ugcaaaggcugg

SEQ ID NO: 2182891 - RNA, 13 nt, Human
ugcaaaggcuggg

SEQ ID NO: 2182892 - RNA, 21 nt, Human
ugcaaaggguaucaggugcug

SEQ ID NO: 2182893 - RNA, 16 nt, Human
ugcaaaggaaauacca

SEQ ID NO: 2182894 - RNA, 13 nt, Human
ugcaaaggaaaua

SEQ ID NO: 2182895 - RNA, 17 nt, Human
ugcaaagcccagcuuga

SEQ ID NO: 2182896 - RNA, 15 nt, Human
ugcaaagcccagcuu

SEQ ID NO: 2182897 - RNA, 14 nt, Human
ugcaaagcccagcu

SEQ ID NO: 2182898 - RNA, 23 nt, Human
ugcaaaguucccuacuuccugug

SEQ ID NO: 2182899 - RNA, 22 nt, Human
ugcaaagucaugcaaaggcugg

SEQ ID NO: 2182900 - RNA, 23 nt, Human
ugcaaagucaugcaaaggcuggg

SEQ ID NO: 2182901 - RNA, 21 nt, Human
ugcaaagucaugcaaaggcug

SEQ ID NO: 2182902 - RNA, 20 nt, Human
ugcaaagucaugcaaaggcu

SEQ ID NO: 2182903 - RNA, 14 nt, Human
ugcaaaggcuggga

SEQ ID NO: 2182904 - RNA, 20 nt, Human
ugcaaaguaucccuacugua

SEQ ID NO: 2182905 - RNA, 15 nt, Human
agccuguaaucccag

SEQ ID NO: 2182906 - RNA, 18 nt, Human
agccuguaaucccagcua

SEQ ID NO: 2182907 - RNA, 16 nt, Human
agccuguaucuugggg

SEQ ID NO: 2182908 - RNA, 17 nt, Human
agccuguaaucccagcu

SEQ ID NO: 2182909 - RNA, 16 nt, Human
agccuguaaucccagc

SEQ ID NO: 2182910 - RNA, 19 nt, Human
agccugucccauggacacu

SEQ ID NO: 2182911 - RNA, 11 nt, Human
agccuguccug

SEQ ID NO: 2182912 - RNA, 14 nt, Human
agccuguccugggc

SEQ ID NO: 2182913 - RNA, 17 nt, Human
agccuguccugggcugg

SEQ ID NO: 2182914 - RNA, 18 nt, Human
agccuguccugggcuggu

SEQ ID NO: 2182915 - RNA, 14 nt, Human
agccugucucuucc

SEQ ID NO: 2182916 - RNA, 15 nt, Human
agccugucucuucca

SEQ ID NO: 2182917 - RNA, 16 nt, Human
agccugucucuuccau

SEQ ID NO: 2182918 - RNA, 19 nt, Human
agccugugccucugggacu

SEQ ID NO: 2182919 - RNA, 18 nt, Human
agccugugccucugggac

SEQ ID NO: 2182920 - RNA, 17 nt, Human
agccugugccucuggga

SEQ ID NO: 2182921 - RNA, 21 nt, Human
agccugugcauguaugucuug

SEQ ID NO: 2182922 - RNA, 13 nt, Human
ugcauggagcagg

SEQ ID NO: 2182923 - RNA, 19 nt, Human
ugcauggcacuugcaucug

SEQ ID NO: 2182924 - RNA, 19 nt, Human
ugcauggaauuuguaaguu

SEQ ID NO: 2182925 - RNA, 23 nt, Human
ugcauggacaccccuuauccagg

SEQ ID NO: 2182926 - RNA, 23 nt, Human
ugcauggaaauucccuucaucug

SEQ ID NO: 2182927 - RNA, 19 nt, Human
ugcauggaaauucccuuca

SEQ ID NO: 2182928 - RNA, 20 nt, Human
ugcauggcacuugcaucugu

SEQ ID NO: 2182929 - RNA, 16 nt, Human
ugcauggcuccagaaa

SEQ ID NO: 2182930 - RNA, 11 nt, Human
agccugaggcu

SEQ ID NO: 2182931 - RNA, 18 nt, Human
ugcauggcuccagaaaug

SEQ ID NO: 2182932 - RNA, 19 nt, Human
ugcauggcuccagaaaugu

SEQ ID NO: 2182933 - RNA, 17 nt, Human
agccugaggcugagacu

SEQ ID NO: 2182934 - RNA, 13 nt, Human
agccugaguagaa

SEQ ID NO: 2182935 - RNA, 19 nt, Human
agccugagucaccugcaga

SEQ ID NO: 2182936 - RNA, 23 nt, Human
agccugaguagaaaggccuuuaa

SEQ ID NO: 2182937 - RNA, 15 nt, Human
agccugagucuccug

SEQ ID NO: 2182938 - RNA, 16 nt, Human
agccugagucaccugc

SEQ ID NO: 2182939 - RNA, 17 nt, Human
agccugaguagaaaggc

SEQ ID NO: 2182940 - RNA, 22 nt, Human
agccugaguagaaaggccuuua

SEQ ID NO: 2182941 - RNA, 19 nt, Human
agccuugcggaagguucua

SEQ ID NO: 2182942 - RNA, 21 nt, Human
agccuugaccauucuccaccu

SEQ ID NO: 2182943 - RNA, 18 nt, Human
agccuugaccauucucca

SEQ ID NO: 2182944 - RNA, 19 nt, Human
agccuugaccauucuccac

SEQ ID NO: 2182945 - RNA, 16 nt, Human
agccuuggauguauau

SEQ ID NO: 2182946 - RNA, 23 nt, Human
agccuuggauaaugcuguugccu

SEQ ID NO: 2182947 - RNA, 22 nt, Human
agccuuggauaaugcuguugcc

SEQ ID NO: 2182948 - RNA, 20 nt, Human
agccuuggauaaugcuguug

SEQ ID NO: 2182949 - RNA, 19 nt, Human
agccuuggauaaugcuguu

SEQ ID NO: 2182950 - RNA, 23 nt, Human
agccuugggaacaugcgugugac

SEQ ID NO: 2182951 - RNA, 16 nt, Human
agccuuggcaucuaga

SEQ ID NO: 2182952 - RNA, 16 nt, Human
agccuugggaccccug

SEQ ID NO: 2182953 - RNA, 23 nt, Human
agccuuggggauucuuccaucug

SEQ ID NO: 2182954 - RNA, 16 nt, Human
agccuuggggauucuu

SEQ ID NO: 2182955 - RNA, 11 nt, Human
agcgccccucc

SEQ ID NO: 2182956 - RNA, 15 nt, Human
agcgccccucccuag

SEQ ID NO: 2182957 - RNA, 19 nt, Human
agcgcccgcugggcugagc

SEQ ID NO: 2182958 - RNA, 16 nt, Human
agcgccccucccuagu

SEQ ID NO: 2182959 - RNA, 14 nt, Human
agcgcccgcugggc

SEQ ID NO: 2182960 - RNA, 15 nt, Human
agcgcccgcugggcu

SEQ ID NO: 2182961 - RNA, 16 nt, Human
agcgcccgcugggcug

SEQ ID NO: 2182962 - RNA, 20 nt, Human
agccuuagaagucacacagu

SEQ ID NO: 2182963 - RNA, 22 nt, Human
agccuuagaagucacacaguau

SEQ ID NO: 2182964 - RNA, 14 nt, Human
agccuucucuguuc

SEQ ID NO: 2182965 - RNA, 20 nt, Human
agccuguuuuaaguucugga

SEQ ID NO: 2182966 - RNA, 18 nt, Human
agccuguuuuguuggaag

SEQ ID NO: 2182967 - RNA, 18 nt, Human
agccuuaaucagguccuc

SEQ ID NO: 2182968 - RNA, 15 nt, Human
agccuguuuaagaga

SEQ ID NO: 2182969 - RNA, 12 nt, Human
agccugugccuc

SEQ ID NO: 2182970 - RNA, 20 nt, Human
agccuucugaggacauucca

SEQ ID NO: 2182971 - RNA, 15 nt, Human
agccuucuguaggaa

SEQ ID NO: 2182972 - RNA, 23 nt, Human
agccuucucuguucauuuccuca

SEQ ID NO: 2182973 - RNA, 22 nt, Human
agccuucucuguucauuuccuc

SEQ ID NO: 2182974 - RNA, 21 nt, Human
agccuucucuguucauuuccu

SEQ ID NO: 2182975 - RNA, 20 nt, Human
agccuucucuguucauuucc

SEQ ID NO: 2182976 - RNA, 19 nt, Human
agccuucucuguucauuuc

SEQ ID NO: 2182977 - RNA, 15 nt, Human
agccuucucuguuca

SEQ ID NO: 2182978 - RNA, 19 nt, Human
agccuucuuugcuugccuc

SEQ ID NO: 2182979 - RNA, 23 nt, Human
agccuucuuugcuugccucucug

SEQ ID NO: 2182980 - RNA, 18 nt, Human
agccuucuuccaucccag

SEQ ID NO: 2182981 - RNA, 20 nt, Human
agccuucuuccaucccagga

SEQ ID NO: 2182982 - RNA, 22 nt, Human
agccuucuuccaucccaggaca

SEQ ID NO: 2182983 - RNA, 15 nt, Human
agccuucuuugcuug

SEQ ID NO: 2182984 - RNA, 23 nt, Human
agccuugaacuuugaccucugca

SEQ ID NO: 2182985 - RNA, 13 nt, Human
agccuugaacuuu

SEQ ID NO: 2182986 - RNA, 18 nt, Human
ugcauuguaucgauguua

SEQ ID NO: 2182987 - RNA, 21 nt, Human
agcgccuaguggggucucccu

SEQ ID NO: 2182988 - RNA, 24 nt, Human
agcgccgugaguucucagggcucc

SEQ ID NO: 2182989 - RNA, 20 nt, Human
ugcauuggaagaccccaccc

SEQ ID NO: 2182990 - RNA, 16 nt, Human
agcgcccuuccucucc

SEQ ID NO: 2182991 - RNA, 17 nt, Human
agcgcccuuccucucca

SEQ ID NO: 2182992 - RNA, 17 nt, Human
agcgccgugaguucuca

SEQ ID NO: 2182993 - RNA, 19 nt, Human
agcgccgugaguucucagg

SEQ ID NO: 2182994 - RNA, 20 nt, Human
agcgccgugaguucucaggg

SEQ ID NO: 2182995 - RNA, 21 nt, Human
agcgccgugaguucucagggc

SEQ ID NO: 2182996 - RNA, 22 nt, Human
agcgccgugaguucucagggcu

SEQ ID NO: 2182997 - RNA, 23 nt, Human
agcgccgugaguucucagggcuc

SEQ ID NO: 2182998 - RNA, 12 nt, Human
agcgcccuuccu

SEQ ID NO: 2182999 - RNA, 13 nt, Human
agcgcccuuccuc

SEQ ID NO: 2183000 - RNA, 14 nt, Human
agcgcccuuccucu

SEQ ID NO: 2183001 - RNA, 15 nt, Human
agcgcccuuccucuc

SEQ ID NO: 2183002 - RNA, 19 nt, Human
ugccaagcacagugccugc

SEQ ID NO: 2183003 - RNA, 14 nt, Human
ugccaagcacugug

SEQ ID NO: 2183004 - RNA, 15 nt, Human
ugccaagcacugugc

SEQ ID NO: 2183005 - RNA, 17 nt, Human
ugccaagcacugugcuc

SEQ ID NO: 2183006 - RNA, 22 nt, Human
ugcauuuaaaacagacacuggc

SEQ ID NO: 2183007 - RNA, 20 nt, Human
ugcauuuaaaacagacacug

SEQ ID NO: 2183008 - RNA, 16 nt, Human
ugcauuuaaaagauac

SEQ ID NO: 2183009 - RNA, 12 nt, Human
ugcauugugcuu

SEQ ID NO: 2183010 - RNA, 15 nt, Human
ugcauugugcuucuu

SEQ ID NO: 2183011 - RNA, 13 nt, Human
ugcauugugcuuc

SEQ ID NO: 2183012 - RNA, 15 nt, Human
ugcauuuaaaacaga

SEQ ID NO: 2183013 - RNA, 19 nt, Human
ugcauuuaaaacagacacu

SEQ ID NO: 2183014 - RNA, 17 nt, Human
ugcauuuaaaacagaca

SEQ ID NO: 2183015 - RNA, 14 nt, Human
ugccaagcucagga

SEQ ID NO: 2183016 - RNA, 22 nt, Human
ugccaagcauuuaauguagcca

SEQ ID NO: 2183017 - RNA, 15 nt, Human
ugccaagcucaggac

SEQ ID NO: 2183018 - RNA, 13 nt, Human
ugccaagcuccaa

SEQ ID NO: 2183019 - RNA, 18 nt, Human
ugccaagcucaggaccag

SEQ ID NO: 2183020 - RNA, 22 nt, Human
ugccaagcucaggaccaggcaa

SEQ ID NO: 2183021 - RNA, 15 nt, Human
ugccaagcuccaagc

SEQ ID NO: 2183022 - RNA, 16 nt, Human
ugccaagcuccaagcc

SEQ ID NO: 2183023 - RNA, 23 nt, Human
ugccaagcuccaagccccaucuu

SEQ ID NO: 2183024 - RNA, 21 nt, Human
ugccaaggccagaguggccug

SEQ ID NO: 2183025 - RNA, 20 nt, Human
ugccaaggccagaguggccu

SEQ ID NO: 2183026 - RNA, 16 nt, Human
ugccaaggccagagug

SEQ ID NO: 2183027 - RNA, 21 nt, Human
ugccaaugaggucugaaaugg

SEQ ID NO: 2183028 - RNA, 19 nt, Human
ugccaauauuaaaucugcu

SEQ ID NO: 2183029 - RNA, 22 nt, Human
ugccaaggccagaguggccugg

SEQ ID NO: 2183030 - RNA, 21 nt, Human
ugccaauauuaaaucugcugg

SEQ ID NO: 2183031 - RNA, 20 nt, Human
ugccaaugaggucugaaaug

SEQ ID NO: 2183032 - RNA, 14 nt, Human
ugccaauggaaccu

SEQ ID NO: 2183033 - RNA, 18 nt, Human
ugccaauggaaccuccuu

SEQ ID NO: 2183034 - RNA, 18 nt, Human
ugccaaugggagcucaug

SEQ ID NO: 2183035 - RNA, 15 nt, Human
ugccacagagcgggg

SEQ ID NO: 2183036 - RNA, 19 nt, Human
ugccaauggaaccuccuuu

SEQ ID NO: 2183037 - RNA, 14 nt, Human
ugccacagagcggg

SEQ ID NO: 2183038 - RNA, 16 nt, Human
ugccacagagcgggga

SEQ ID NO: 2183039 - RNA, 13 nt, Human
ugccaauggacua

SEQ ID NO: 2183040 - RNA, 14 nt, Human
ugccaaugggagcu

SEQ ID NO: 2183041 - RNA, 12 nt, Human
ugccacagcucu

SEQ ID NO: 2183042 - RNA, 22 nt, Human
ugccacagccuccccugccagg

SEQ ID NO: 2183043 - RNA, 12 nt, Human
ugccacaggaca

SEQ ID NO: 2183044 - RNA, 21 nt, Human
ugccacagccuccccugccag

SEQ ID NO: 2183045 - RNA, 17 nt, Human
ugccacagccuccccug

SEQ ID NO: 2183046 - RNA, 13 nt, Human
ugccacagccucc

SEQ ID NO: 2183047 - RNA, 22 nt, Human
ugccagccagcagccagcucuc

SEQ ID NO: 2183048 - RNA, 17 nt, Human
ugccagccagcagccag

SEQ ID NO: 2183049 - RNA, 16 nt, Human
ugccagccagcagcca

SEQ ID NO: 2183050 - RNA, 14 nt, Human
ugccacaggccucc

SEQ ID NO: 2183051 - RNA, 20 nt, Human
ugccacaggacacagucaga

SEQ ID NO: 2183052 - RNA, 11 nt, Human
ugccacaggcc

SEQ ID NO: 2183053 - RNA, 12 nt, Human
ugccacaggccu

SEQ ID NO: 2183054 - RNA, 13 nt, Human
ugccacaggccuc

SEQ ID NO: 2183055 - RNA, 18 nt, Human
ugccacaggacacaguca

SEQ ID NO: 2183056 - RNA, 14 nt, Human
ugccacaggacaca

SEQ ID NO: 2183057 - RNA, 13 nt, Human
ugccacaggacac

SEQ ID NO: 2183058 - RNA, 15 nt, Human
ugccagccuggcuuc

SEQ ID NO: 2183059 - RNA, 12 nt, Human
ugccagccuggc

SEQ ID NO: 2183060 - RNA, 19 nt, Human
ugccagccgugaugcucag

SEQ ID NO: 2183061 - RNA, 20 nt, Human
ugccagccgugaugcucagg

SEQ ID NO: 2183062 - RNA, 21 nt, Human
ugccagccgugaugcucaggc

SEQ ID NO: 2183063 - RNA, 22 nt, Human
ugccagccgagauagccaaggc

SEQ ID NO: 2183064 - RNA, 23 nt, Human
ugccagccagcagccagcucuca

SEQ ID NO: 2183065 - RNA, 17 nt, Human
ugccagccgagauagcc

SEQ ID NO: 2183066 - RNA, 23 nt, Human
ugccagccuggcuucuggagccc

SEQ ID NO: 2183067 - RNA, 12 nt, Human
ugccagccuucc

SEQ ID NO: 2183068 - RNA, 14 nt, Human
ugccagccuuccuc

SEQ ID NO: 2183069 - RNA, 22 nt, Human
ugccagccuggcuucuggagcc

SEQ ID NO: 2183070 - RNA, 21 nt, Human
ugccagccuggcuucuggagc

SEQ ID NO: 2183071 - RNA, 20 nt, Human
ugccagccuggcuucuggag

SEQ ID NO: 2183072 - RNA, 18 nt, Human
ugccagccuggcuucugg

SEQ ID NO: 2183073 - RNA, 17 nt, Human
ugccagccuggcuucug

SEQ ID NO: 2183074 - RNA, 16 nt, Human
ugccagccuggcuucu

SEQ ID NO: 2183075 - RNA, 23 nt, Human
ugccagugccuuaccuccugccc

SEQ ID NO: 2183076 - RNA, 22 nt, Human
ugccagugccuuaccuccugcc

SEQ ID NO: 2183077 - RNA, 21 nt, Human
ugccagugccuuaccuccugc

SEQ ID NO: 2183078 - RNA, 20 nt, Human
ugccagugccuuaccuccug

SEQ ID NO: 2183079 - RNA, 17 nt, Human
ugccagcucagucccau

SEQ ID NO: 2183080 - RNA, 19 nt, Human
ugccagcuacuuccuccuc

SEQ ID NO: 2183081 - RNA, 21 nt, Human
ugccagccuuccucugcagcu

SEQ ID NO: 2183082 - RNA, 13 nt, Human
ugccagcuauuuu

SEQ ID NO: 2183083 - RNA, 17 nt, Human
ugccagccuuccucugc

SEQ ID NO: 2183084 - RNA, 18 nt, Human
ugccagccuuccucugca

SEQ ID NO: 2183085 - RNA, 23 nt, Human
ugccagccuuccucugcagcuga

SEQ ID NO: 2183086 - RNA, 17 nt, Human
ugccaguuauggcuaua

SEQ ID NO: 2183087 - RNA, 19 nt, Human
ugccaguuuuguuuccuuu

SEQ ID NO: 2183088 - RNA, 23 nt, Human
ugccaguuuaaucauugccuggu

SEQ ID NO: 2183089 - RNA, 12 nt, Human
ugccauaaaaca

SEQ ID NO: 2183090 - RNA, 13 nt, Human
ugccauaaaacau

SEQ ID NO: 2183091 - RNA, 14 nt, Human
ugccauaaaacauu

SEQ ID NO: 2183092 - RNA, 16 nt, Human
ugccauaaaacauuaa

SEQ ID NO: 2183093 - RNA, 13 nt, Human
ugccauaauuacu

SEQ ID NO: 2183094 - RNA, 17 nt, Human
ugcauagagccacguau

SEQ ID NO: 2183095 - RNA, 19 nt, Human
ugcauacuucaaaaguauu

SEQ ID NO: 2183096 - RNA, 23 nt, Human
ugcauacuuuuuaaauguaaaga

SEQ ID NO: 2183097 - RNA, 20 nt, Human
ugcauagauucccugagcag

SEQ ID NO: 2183098 - RNA, 17 nt, Human
ugcauagaauaaaauuu

SEQ ID NO: 2183099 - RNA, 22 nt, Human
ugcauacuuuuuaaauguaaag

SEQ ID NO: 2183100 - RNA, 19 nt, Human
ugcauacuuuuuaaaugua

SEQ ID NO: 2183101 - RNA, 18 nt, Human
ugcauacuuuuuaaaugu

SEQ ID NO: 2183102 - RNA, 21 nt, Human
ugcauacuucaaaaguauuuu

SEQ ID NO: 2183103 - RNA, 13 nt, Human
ugcagucaucuug

SEQ ID NO: 2183104 - RNA, 17 nt, Human
ugcagucacuggagguu

SEQ ID NO: 2183105 - RNA, 14 nt, Human
ugcauaccacuuuu

SEQ ID NO: 2183106 - RNA, 13 nt, Human
ugcauacucauua

SEQ ID NO: 2183107 - RNA, 19 nt, Human
ugcauacucauuaggaugg

SEQ ID NO: 2183108 - RNA, 14 nt, Human
ugcauacuucaaaa

SEQ ID NO: 2183109 - RNA, 15 nt, Human
ugcauacuucaaaag

SEQ ID NO: 2183110 - RNA, 16 nt, Human
ugcauacuucaaaagu

SEQ ID NO: 2183111 - RNA, 17 nt, Human
ugcauacuucaaaagua

SEQ ID NO: 2183112 - RNA, 18 nt, Human
ugcauacuucaaaaguau

SEQ ID NO: 2183113 - RNA, 21 nt, Human
ugcagucagucaugauggcac

SEQ ID NO: 2183114 - RNA, 14 nt, Human
ugcagucacuggag

SEQ ID NO: 2183115 - RNA, 15 nt, Human
ugcagucacuggagg

SEQ ID NO: 2183116 - RNA, 21 nt, Human
ugcagucacguggaggagcag

SEQ ID NO: 2183117 - RNA, 19 nt, Human
ugcagucacguggaggagc

SEQ ID NO: 2183118 - RNA, 16 nt, Human
ugcauaccacuuuugu

SEQ ID NO: 2183119 - RNA, 20 nt, Human
ugcauaccacuuuuguucuu

SEQ ID NO: 2183120 - RNA, 18 nt, Human
ugcauaccacuuuuguuc

SEQ ID NO: 2183121 - RNA, 20 nt, Human
ugcagguucuucuuccugaa

SEQ ID NO: 2183122 - RNA, 23 nt, Human
ugcagguugggccauacuggccu

SEQ ID NO: 2183123 - RNA, 15 nt, Human
ugcagguuuguuaca

SEQ ID NO: 2183124 - RNA, 16 nt, Human
ugcaguagauuuucuu

SEQ ID NO: 2183125 - RNA, 16 nt, Human
ugcagguuuguuacau

SEQ ID NO: 2183126 - RNA, 19 nt, Human
ugcaguagauuuucuuuaa

SEQ ID NO: 2183127 - RNA, 20 nt, Human
ugcaguagauuuucuuuaaa

SEQ ID NO: 2183128 - RNA, 15 nt, Human
ugcaguagucucugu

SEQ ID NO: 2183129 - RNA, 18 nt, Human
ugcaguagucucugugcu

SEQ ID NO: 2183130 - RNA, 15 nt, Human
ugcaguaugaaaaua

SEQ ID NO: 2183131 - RNA, 17 nt, Human
ugcaguauugagcacug

SEQ ID NO: 2183132 - RNA, 16 nt, Human
ugcaguaugaaaauaa

SEQ ID NO: 2183133 - RNA, 21 nt, Human
ugcaguaucaugcccugugca

SEQ ID NO: 2183134 - RNA, 16 nt, Human
ugcaguaucaugcccu

SEQ ID NO: 2183135 - RNA, 21 nt, Human
ugcaguagucucugugcuuug

SEQ ID NO: 2183136 - RNA, 19 nt, Human
ugcauagagccacguaugu

SEQ ID NO: 2183137 - RNA, 17 nt, Human
ugcaucguuucaucuuc

SEQ ID NO: 2183138 - RNA, 14 nt, Human
ugcaucuacuccca

SEQ ID NO: 2183139 - RNA, 19 nt, Human
ugcauagagguaccagcaa

SEQ ID NO: 2183140 - RNA, 21 nt, Human
ugcaucuagaggcuuccuuca

SEQ ID NO: 2183141 - RNA, 18 nt, Human
ugcaucuagauuauggag

SEQ ID NO: 2183142 - RNA, 21 nt, Human
ugcaucucacuggaugcaaag

SEQ ID NO: 2183143 - RNA, 19 nt, Human
ugcaucuacucccaaguau

SEQ ID NO: 2183144 - RNA, 13 nt, Human
ugcaucucagccc

SEQ ID NO: 2183145 - RNA, 14 nt, Human
ugcaucucagccca

SEQ ID NO: 2183146 - RNA, 13 nt, Human
ugcaucuguccuc

SEQ ID NO: 2183147 - RNA, 19 nt, Human
ugcaugaagguuucugaaa

SEQ ID NO: 2183148 - RNA, 21 nt, Human
ugcaugaagguuucugaaaau

SEQ ID NO: 2183149 - RNA, 13 nt, Human
ugcaugaagguuu

SEQ ID NO: 2183150 - RNA, 18 nt, Human
ugcaugaagguuucugaa

SEQ ID NO: 2183151 - RNA, 11 nt, Human
ugcaugaaaau

SEQ ID NO: 2183152 - RNA, 18 nt, Human
ugcaucuuacugaaggua

SEQ ID NO: 2183153 - RNA, 17 nt, Human
ugcaucuuacugaaggu

SEQ ID NO: 2183154 - RNA, 14 nt, Human
ugcaucuuacugaa

SEQ ID NO: 2183155 - RNA, 14 nt, Human
ugcaucuguccuca

SEQ ID NO: 2183156 - RNA, 19 nt, Human
ugcaucuguccucaugugu

SEQ ID NO: 2183157 - RNA, 22 nt, Human
ugcaucuuacugaagguaaaau

SEQ ID NO: 2183158 - RNA, 20 nt, Human
ugcaucuuggggacaucucu

SEQ ID NO: 2183159 - RNA, 19 nt, Human
ugcaugcucucugcagcca

SEQ ID NO: 2183160 - RNA, 18 nt, Human
ugcaugcucucugcagcc

SEQ ID NO: 2183161 - RNA, 17 nt, Human
ugcaugcucucugcagc

SEQ ID NO: 2183162 - RNA, 16 nt, Human
ugcaugcucucugcag

SEQ ID NO: 2183163 - RNA, 17 nt, Human
ugcaugcugcuggacag

SEQ ID NO: 2183164 - RNA, 15 nt, Human
ugcauggaaaccuga

SEQ ID NO: 2183165 - RNA, 19 nt, Human
ugcauggaaaccugaaaaa

SEQ ID NO: 2183166 - RNA, 11 nt, Human
ugcauggaaau

SEQ ID NO: 2183167 - RNA, 19 nt, Human
ugcaugcugucccuuacgu

SEQ ID NO: 2183168 - RNA, 21 nt, Human
ugcaugcugucccuuacguga

SEQ ID NO: 2183169 - RNA, 14 nt, Human
ugcaugccuggucu

SEQ ID NO: 2183170 - RNA, 13 nt, Human
ugcaugcggccca

SEQ ID NO: 2183171 - RNA, 15 nt, Human
ugcaugcggcccagc

SEQ ID NO: 2183172 - RNA, 16 nt, Human
ugcaugcggcccagcc

SEQ ID NO: 2183173 - RNA, 18 nt, Human
ugcaugcggcccagcccg

SEQ ID NO: 2183174 - RNA, 21 nt, Human
ugcaugcggcccagcccggcu

SEQ ID NO: 2183175 - RNA, 18 nt, Human
ugcaugcugucccuuacg

SEQ ID NO: 2183176 - RNA, 18 nt, Human
ugcaugauuuuguaaccc

SEQ ID NO: 2183177 - RNA, 19 nt, Human
ugcaugcacuguucccccu

SEQ ID NO: 2183178 - RNA, 14 nt, Human
ugcaugauuuugua

SEQ ID NO: 2183179 - RNA, 18 nt, Human
ugcaugcagccacugugc

SEQ ID NO: 2183180 - RNA, 22 nt, Human
ugcaugcacuguucccccugug

SEQ ID NO: 2183181 - RNA, 22 nt, Human
ugcaugcagccacugugcugaa

SEQ ID NO: 2183182 - RNA, 22 nt, Human
ugcaugccaaauuguaguucuu

SEQ ID NO: 2183183 - RNA, 19 nt, Human
ugcaggugagcccauggcc

SEQ ID NO: 2183184 - RNA, 13 nt, Human
ugcaggugcacca

SEQ ID NO: 2183185 - RNA, 15 nt, Human
ugcaggucucaaccc

SEQ ID NO: 2183186 - RNA, 13 nt, Human
ugcagguggggag

SEQ ID NO: 2183187 - RNA, 16 nt, Human
ugcaggugcugcugcg

SEQ ID NO: 2183188 - RNA, 23 nt, Human
ugcaggugagcccauggcccucc

SEQ ID NO: 2183189 - RNA, 14 nt, Human
ugcaggugcugcug

SEQ ID NO: 2183190 - RNA, 20 nt, Human
ugcaggguggugcugggacu

SEQ ID NO: 2183191 - RNA, 18 nt, Human
ugcaggguggugcuggga

SEQ ID NO: 2183192 - RNA, 19 nt, Human
ugcaggguggugcugggac

SEQ ID NO: 2183193 - RNA, 22 nt, Human
ugcaggucccuaauaaagcugu

SEQ ID NO: 2183194 - RNA, 13 nt, Human
ugcaggggcucug

SEQ ID NO: 2183195 - RNA, 20 nt, Human
ugcaggggauugaagcccuc

SEQ ID NO: 2183196 - RNA, 21 nt, Human
ugcaggggauugaagcccucc

SEQ ID NO: 2183197 - RNA, 22 nt, Human
ugcagggggugugucugcucag

SEQ ID NO: 2183198 - RNA, 17 nt, Human
ugcaggguggugcuggg

SEQ ID NO: 2183199 - RNA, 19 nt, Human
ugcagggggugugucugcu

SEQ ID NO: 2183200 - RNA, 21 nt, Human
ugcaggggcucuggagagaaa

SEQ ID NO: 2183201 - RNA, 22 nt, Human
ugcaggggauugaagcccucca

SEQ ID NO: 2183202 - RNA, 14 nt, Human
ugcaggggcucugg

SEQ ID NO: 2183203 - RNA, 18 nt, Human
ugcaggggcucuggagag

SEQ ID NO: 2183204 - RNA, 19 nt, Human
ugcaggggcucuggagaga

SEQ ID NO: 2183205 - RNA, 23 nt, Human
agccucuuaaagcugccuguagu

SEQ ID NO: 2183206 - RNA, 22 nt, Human
agccucuuaaagcugccuguag

SEQ ID NO: 2183207 - RNA, 20 nt, Human
agccucuuaaagcugccugu

SEQ ID NO: 2183208 - RNA, 21 nt, Human
agccucugugucacuggcugc

SEQ ID NO: 2183209 - RNA, 13 nt, Human
agccucuguguca

SEQ ID NO: 2183210 - RNA, 14 nt, Human
agccucugugucac

SEQ ID NO: 2183211 - RNA, 15 nt, Human
agccucugugucacu

SEQ ID NO: 2183212 - RNA, 18 nt, Human
agccucugugucacuggc

SEQ ID NO: 2183213 - RNA, 19 nt, Human
agccucugugucacuggcu

SEQ ID NO: 2183214 - RNA, 20 nt, Human
agccucugugucacuggcug

SEQ ID NO: 2183215 - RNA, 23 nt, Human
agccucugugucacuggcugccu

SEQ ID NO: 2183216 - RNA, 20 nt, Human
agccucuccggcagaaggga

SEQ ID NO: 2183217 - RNA, 23 nt, Human
agccucugggucagugguccaca

SEQ ID NO: 2183218 - RNA, 22 nt, Human
agccucugggucagugguccac

SEQ ID NO: 2183219 - RNA, 14 nt, Human
agccucugucacug

SEQ ID NO: 2183220 - RNA, 22 nt, Human
agccucugucacugcaggcacu

SEQ ID NO: 2183221 - RNA, 21 nt, Human
agccucugucacugcaggcac

SEQ ID NO: 2183222 - RNA, 11 nt, Human
agccucugugu

SEQ ID NO: 2183223 - RNA, 18 nt, Human
agccucuuucugucccuu

SEQ ID NO: 2183224 - RNA, 15 nt, Human
agccucuuucugucc

SEQ ID NO: 2183225 - RNA, 18 nt, Human
ugcagccucacaguccuu

SEQ ID NO: 2183226 - RNA, 17 nt, Human
ugcagccucacaguccu

SEQ ID NO: 2183227 - RNA, 21 nt, Human
agccucuuucugucccuucug

SEQ ID NO: 2183228 - RNA, 21 nt, Human
ugcagccucacaguccuuacc

SEQ ID NO: 2183229 - RNA, 19 nt, Human
agccuccugaguagcugga

SEQ ID NO: 2183230 - RNA, 20 nt, Human
agccuccugaguagcuggga

SEQ ID NO: 2183231 - RNA, 11 nt, Human
agccuccugcc

SEQ ID NO: 2183232 - RNA, 13 nt, Human
agccuccugccca

SEQ ID NO: 2183233 - RNA, 14 nt, Human
agccuccugcccag

SEQ ID NO: 2183234 - RNA, 15 nt, Human
agccuccugcccagu

SEQ ID NO: 2183235 - RNA, 16 nt, Human
agccuccugcccaguc

SEQ ID NO: 2183236 - RNA, 13 nt, Human
agccuccugcccu

SEQ ID NO: 2183237 - RNA, 14 nt, Human
agccuccugcccuu

SEQ ID NO: 2183238 - RNA, 18 nt, Human
agccuccugcccuuaccu

SEQ ID NO: 2183239 - RNA, 12 nt, Human
ugcagacaggca

SEQ ID NO: 2183240 - RNA, 13 nt, Human
ugcagacaggcaa

SEQ ID NO: 2183241 - RNA, 21 nt, Human
ugcagacaggcaagcaccucc

SEQ ID NO: 2183242 - RNA, 21 nt, Human
agccuccuguguagcugggau

SEQ ID NO: 2183243 - RNA, 18 nt, Human
agccuccugcccaguccc

SEQ ID NO: 2183244 - RNA, 18 nt, Human
agccucgacacagagugg

SEQ ID NO: 2183245 - RNA, 17 nt, Human
agccucgacacagagug

SEQ ID NO: 2183246 - RNA, 20 nt, Human
agccucgccgucugugaauu

SEQ ID NO: 2183247 - RNA, 14 nt, Human
agccucuccaggaa

SEQ ID NO: 2183248 - RNA, 13 nt, Human
agccucuccccug

SEQ ID NO: 2183249 - RNA, 23 nt, Human
agccucuccccagguccagcucu

SEQ ID NO: 2183250 - RNA, 18 nt, Human
agccucuccccaggucca

SEQ ID NO: 2183251 - RNA, 22 nt, Human
agccucuccccagguccagcuc

SEQ ID NO: 2183252 - RNA, 12 nt, Human
agccucuccagg

SEQ ID NO: 2183253 - RNA, 18 nt, Human
agccucucaccuguacuc

SEQ ID NO: 2183254 - RNA, 23 nt, Human
agccucuccaggaaugccuccuc

SEQ ID NO: 2183255 - RNA, 16 nt, Human
agccucuccccagguc

SEQ ID NO: 2183256 - RNA, 18 nt, Human
agccucuagggaccccuc

SEQ ID NO: 2183257 - RNA, 16 nt, Human
agccucgucuucauua

SEQ ID NO: 2183258 - RNA, 20 nt, Human
agccucuagggaccccuccu

SEQ ID NO: 2183259 - RNA, 21 nt, Human
agccucuagggaccccuccuc

SEQ ID NO: 2183260 - RNA, 22 nt, Human
agccucuagggaccccuccucc

SEQ ID NO: 2183261 - RNA, 15 nt, Human
ugaguggcauggcca

SEQ ID NO: 2183262 - RNA, 13 nt, Human
ugaguggcagggg

SEQ ID NO: 2183263 - RNA, 21 nt, Human
ugaguggcaggggacaggagu

SEQ ID NO: 2183264 - RNA, 18 nt, Human
ugaguggaugauguuucg

SEQ ID NO: 2183265 - RNA, 12 nt, Human
ugagugccuggc

SEQ ID NO: 2183266 - RNA, 14 nt, Human
ugagugccuggcca

SEQ ID NO: 2183267 - RNA, 15 nt, Human
ugagugcaguccuga

SEQ ID NO: 2183268 - RNA, 16 nt, Human
ugagugccuuacacaa

SEQ ID NO: 2183269 - RNA, 14 nt, Human
ugagugauuauuug

SEQ ID NO: 2183270 - RNA, 19 nt, Human
ugagugcagccguuugaga

SEQ ID NO: 2183271 - RNA, 17 nt, Human
ugagugcagcucuggag

SEQ ID NO: 2183272 - RNA, 13 nt, Human
ugagugccuuaca

SEQ ID NO: 2183273 - RNA, 14 nt, Human
ugagugccuuacac

SEQ ID NO: 2183274 - RNA, 20 nt, Human
ugagugauccuccaacuuca

SEQ ID NO: 2183275 - RNA, 20 nt, Human
ugagugaugcggcagauuga

SEQ ID NO: 2183276 - RNA, 15 nt, Human
ugagugauccuccaa

SEQ ID NO: 2183277 - RNA, 17 nt, Human
ugagugagccuggcucu

SEQ ID NO: 2183278 - RNA, 19 nt, Human
ugagugagccuggcucuug

SEQ ID NO: 2183279 - RNA, 22 nt, Human
ugagugaggguuucugagcugc

SEQ ID NO: 2183280 - RNA, 14 nt, Human
ugagugauagagcu

SEQ ID NO: 2183281 - RNA, 20 nt, Human
ugagugauuauuuguuauuu

SEQ ID NO: 2183282 - RNA, 22 nt, Human
ugagucaugaucucccugccgc

SEQ ID NO: 2183283 - RNA, 20 nt, Human
ugagucaugaucucccugcc

SEQ ID NO: 2183284 - RNA, 20 nt, Human
ugagucagguuugaguagag

SEQ ID NO: 2183285 - RNA, 21 nt, Human
ugagucaugaucucccugccg

SEQ ID NO: 2183286 - RNA, 14 nt, Human
ugagugagccuggc

SEQ ID NO: 2183287 - RNA, 16 nt, Human
ugagugagccuggcuc

SEQ ID NO: 2183288 - RNA, 16 nt, Human
ugagucacccaugaag

SEQ ID NO: 2183289 - RNA, 20 nt, Human
ugagucacccuaccugugcc

SEQ ID NO: 2183290 - RNA, 13 nt, Human
ugagucaccagga

SEQ ID NO: 2183291 - RNA, 22 nt, Human
ugagucacccuaccugugccug

SEQ ID NO: 2183292 - RNA, 18 nt, Human
ugagucaccaagcccagu

SEQ ID NO: 2183293 - RNA, 20 nt, Human
ugaguacguugugcauuugg

SEQ ID NO: 2183294 - RNA, 15 nt, Human
ugaguacagcagaaa

SEQ ID NO: 2183295 - RNA, 14 nt, Human
ugaguacuacaguc

SEQ ID NO: 2183296 - RNA, 22 nt, Human
ugaguguuuuuacuacaguugu

SEQ ID NO: 2183297 - RNA, 16 nt, Human
ugaguuacagccuguu

SEQ ID NO: 2183298 - RNA, 18 nt, Human
ugaguucauacccuguua

SEQ ID NO: 2183299 - RNA, 15 nt, Human
ugaguuacuuccuau

SEQ ID NO: 2183300 - RNA, 24 nt, Human
ugaguuacuugcugcccugugcuc

SEQ ID NO: 2183301 - RNA, 14 nt, Human
ugaguuccuagcca

SEQ ID NO: 2183302 - RNA, 18 nt, Human
ugaguuccuagccaccgc

SEQ ID NO: 2183303 - RNA, 21 nt, Human
ugagugggggaucacagccuc

SEQ ID NO: 2183304 - RNA, 17 nt, Human
ugaguguguccaagugu

SEQ ID NO: 2183305 - RNA, 18 nt, Human
ugaguguggcuccccucu

SEQ ID NO: 2183306 - RNA, 17 nt, Human
ugaguguggcuccccuc

SEQ ID NO: 2183307 - RNA, 16 nt, Human
ugaguguggcuccccu

SEQ ID NO: 2183308 - RNA, 14 nt, Human
ugaguguggcuccc

SEQ ID NO: 2183309 - RNA, 12 nt, Human
ugaguguggaag

SEQ ID NO: 2183310 - RNA, 15 nt, Human
ugaguguggaagccg

SEQ ID NO: 2183311 - RNA, 19 nt, Human
ugauaauauuguggugcca

SEQ ID NO: 2183312 - RNA, 15 nt, Human
ugauacaaugcugug

SEQ ID NO: 2183313 - RNA, 14 nt, Human
ugauacaaugcugu

SEQ ID NO: 2183314 - RNA, 15 nt, Human
ugaguucuacauaag

SEQ ID NO: 2183315 - RNA, 20 nt, Human
ugaguucuacauaaguaauu

SEQ ID NO: 2183316 - RNA, 22 nt, Human
ugaguucuacauaaguaauuca

SEQ ID NO: 2183317 - RNA, 16 nt, Human
ugauaaguaaaugcua

SEQ ID NO: 2183318 - RNA, 17 nt, Human
agcaguaacugacaacu

SEQ ID NO: 2183319 - RNA, 17 nt, Human
agcagguuuuucuccuc

SEQ ID NO: 2183320 - RNA, 22 nt, Human
agcagguugaggggcuccugga

SEQ ID NO: 2183321 - RNA, 21 nt, Human
agcagguugaggggcuccugg

SEQ ID NO: 2183322 - RNA, 20 nt, Human
agcagguugaggggcuccug

SEQ ID NO: 2183323 - RNA, 23 nt, Human
agcagguucccaagcucagaggc

SEQ ID NO: 2183324 - RNA, 20 nt, Human
agcaggugguccugagaccu

SEQ ID NO: 2183325 - RNA, 21 nt, Human
agcaggugguccugagaccug

SEQ ID NO: 2183326 - RNA, 16 nt, Human
agcagguucccaagcu

SEQ ID NO: 2183327 - RNA, 18 nt, Human
agcagguucccaagcuca

SEQ ID NO: 2183328 - RNA, 17 nt, Human
agcagguucccaagcuc

SEQ ID NO: 2183329 - RNA, 22 nt, Human
agcaguagaaauaauaugcauu

SEQ ID NO: 2183330 - RNA, 21 nt, Human
agcaguagaaauaauaugcau

SEQ ID NO: 2183331 - RNA, 16 nt, Human
agcaguaucaugaagc

SEQ ID NO: 2183332 - RNA, 17 nt, Human
agcagucaggaaagaga

SEQ ID NO: 2183333 - RNA, 18 nt, Human
agcagucaggaaagagaa

SEQ ID NO: 2183334 - RNA, 19 nt, Human
agcauaaaaauuagccaag

SEQ ID NO: 2183335 - RNA, 14 nt, Human
agcaguuugcuuug

SEQ ID NO: 2183336 - RNA, 19 nt, Human
agcaguuucuguccugcug

SEQ ID NO: 2183337 - RNA, 20 nt, Human
agcaguuucuguccugcugg

SEQ ID NO: 2183338 - RNA, 18 nt, Human
agcaguuucuguccugcu

SEQ ID NO: 2183339 - RNA, 22 nt, Human
agcaguccugccucagccuccg

SEQ ID NO: 2183340 - RNA, 19 nt, Human
agcaguccugccucagccu

SEQ ID NO: 2183341 - RNA, 19 nt, Human
agcagucaggaaagagaac

SEQ ID NO: 2183342 - RNA, 16 nt, Human
agcagucgugccugug

SEQ ID NO: 2183343 - RNA, 17 nt, Human
agcagucgugccugugu

SEQ ID NO: 2183344 - RNA, 14 nt, Human
agcagucgugccug

SEQ ID NO: 2183345 - RNA, 12 nt, Human
agcauacaacuu

SEQ ID NO: 2183346 - RNA, 20 nt, Human
agcauacauuuauaauguuu

SEQ ID NO: 2183347 - RNA, 14 nt, Human
agcauacauuuaua

SEQ ID NO: 2183348 - RNA, 13 nt, Human
agcauacauuuau

SEQ ID NO: 2183349 - RNA, 13 nt, Human
agcauaccaacac

SEQ ID NO: 2183350 - RNA, 23 nt, Human
agcauaaaaauuagccaagugug

SEQ ID NO: 2183351 - RNA, 22 nt, Human
agcaguuuucaagucaaauuaa

SEQ ID NO: 2183352 - RNA, 21 nt, Human
agcaguuuucaagucaaauua

SEQ ID NO: 2183353 - RNA, 18 nt, Human
agcaguuuucaagucaaa

SEQ ID NO: 2183354 - RNA, 17 nt, Human
agcaguuuucaagucaa

SEQ ID NO: 2183355 - RNA, 13 nt, Human
agcaguuuucaag

SEQ ID NO: 2183356 - RNA, 16 nt, Human
agcauagaaggcaggu

SEQ ID NO: 2183357 - RNA, 22 nt, Human
agcauaccaacacgagcaggcu

SEQ ID NO: 2183358 - RNA, 19 nt, Human
agcauaccaacacgagcag

SEQ ID NO: 2183359 - RNA, 13 nt, Human
agcauaucugccu

SEQ ID NO: 2183360 - RNA, 23 nt, Human
ugaguaagagcuggugucugauu

SEQ ID NO: 2183361 - RNA, 21 nt, Human
ugaguaagagcuggugucuga

SEQ ID NO: 2183362 - RNA, 18 nt, Human
ugaguaagagcugguguc

SEQ ID NO: 2183363 - RNA, 17 nt, Human
ugaguaagagcuggugu

SEQ ID NO: 2183364 - RNA, 16 nt, Human
ugaguaagagcuggug

SEQ ID NO: 2183365 - RNA, 14 nt, Human
ugaguaagagcugg

SEQ ID NO: 2183366 - RNA, 15 nt, Human
agcauaucugccuuu

SEQ ID NO: 2183367 - RNA, 19 nt, Human
ugaguacguugugcauuug

SEQ ID NO: 2183368 - RNA, 18 nt, Human
ugaguacguugugcauuu

SEQ ID NO: 2183369 - RNA, 17 nt, Human
ugaguacguugugcauu

SEQ ID NO: 2183370 - RNA, 16 nt, Human
ugaguacguugugcau

SEQ ID NO: 2183371 - RNA, 13 nt, Human
agcagggaaacag

SEQ ID NO: 2183372 - RNA, 15 nt, Human
agcaggcugugaguu

SEQ ID NO: 2183373 - RNA, 13 nt, Human
agcaggcuggcag

SEQ ID NO: 2183374 - RNA, 14 nt, Human
agcaggcuggcagc

SEQ ID NO: 2183375 - RNA, 16 nt, Human
agcaggcuggcagcuc

SEQ ID NO: 2183376 - RNA, 17 nt, Human
agcaggcuggcagcucu

SEQ ID NO: 2183377 - RNA, 14 nt, Human
agcagggaaacagc

SEQ ID NO: 2183378 - RNA, 15 nt, Human
agcagggaaacagcu

SEQ ID NO: 2183379 - RNA, 21 nt, Human
agcaggcucucaggccagcug

SEQ ID NO: 2183380 - RNA, 22 nt, Human
agcaggcucucaggccagcugc

SEQ ID NO: 2183381 - RNA, 23 nt, Human
agcaggcucucaggccagcugcu

SEQ ID NO: 2183382 - RNA, 16 nt, Human
agcaggcuacacugac

SEQ ID NO: 2183383 - RNA, 22 nt, Human
agcaggcuacacugacacuggu

SEQ ID NO: 2183384 - RNA, 17 nt, Human
agcaggcucgggcuccc

SEQ ID NO: 2183385 - RNA, 13 nt, Human
agcaggcucucag

SEQ ID NO: 2183386 - RNA, 14 nt, Human
agcaggcucucagg

SEQ ID NO: 2183387 - RNA, 15 nt, Human
agcaggcucucaggc

SEQ ID NO: 2183388 - RNA, 16 nt, Human
agcaggcucucaggcc

SEQ ID NO: 2183389 - RNA, 17 nt, Human
agcaggcucucaggcca

SEQ ID NO: 2183390 - RNA, 18 nt, Human
agcaggcucucaggccag

SEQ ID NO: 2183391 - RNA, 19 nt, Human
agcaggcucucaggccagc

SEQ ID NO: 2183392 - RNA, 14 nt, Human
agcagguggggagg

SEQ ID NO: 2183393 - RNA, 13 nt, Human
agcaggugguccu

SEQ ID NO: 2183394 - RNA, 17 nt, Human
agcaggugguccugaga

SEQ ID NO: 2183395 - RNA, 18 nt, Human
agcaggugguccugagac

SEQ ID NO: 2183396 - RNA, 13 nt, Human
agcagguggggag

SEQ ID NO: 2183397 - RNA, 17 nt, Human
agcaggugggaaauggu

SEQ ID NO: 2183398 - RNA, 16 nt, Human
agcagguggcaucucu

SEQ ID NO: 2183399 - RNA, 19 nt, Human
agcagguggcaucucuaau

SEQ ID NO: 2183400 - RNA, 13 nt, Human
agcaggugcugac

SEQ ID NO: 2183401 - RNA, 15 nt, Human
agcaggugcugcuac

SEQ ID NO: 2183402 - RNA, 16 nt, Human
agcaggugcugcuacc

SEQ ID NO: 2183403 - RNA, 17 nt, Human
agcaggugcugcuaccc

SEQ ID NO: 2183404 - RNA, 18 nt, Human
agcaggugcugcuacccu

SEQ ID NO: 2183405 - RNA, 20 nt, Human
agcaggugcugcuacccucc

SEQ ID NO: 2183406 - RNA, 14 nt, Human
agcagguaccacug

SEQ ID NO: 2183407 - RNA, 15 nt, Human
agcagggugcugugg

SEQ ID NO: 2183408 - RNA, 17 nt, Human
agcaggguguugggaua

SEQ ID NO: 2183409 - RNA, 20 nt, Human
agcagguccccagcuuuggc

SEQ ID NO: 2183410 - RNA, 21 nt, Human
agcagguccccagcuuuggcu

SEQ ID NO: 2183411 - RNA, 21 nt, Human
agcaggguagucugguuucua

SEQ ID NO: 2183412 - RNA, 18 nt, Human
agcaggguagucugguuu

SEQ ID NO: 2183413 - RNA, 22 nt, Human
agcagggguccuuggugugacc

SEQ ID NO: 2183414 - RNA, 16 nt, Human
agcaggggcuacaaga

SEQ ID NO: 2183415 - RNA, 19 nt, Human
agcaggggcuacaagaggg

SEQ ID NO: 2183416 - RNA, 20 nt, Human
agcaggggcuacaagaggga

SEQ ID NO: 2183417 - RNA, 21 nt, Human
agcaggggcuacaagagggaa

SEQ ID NO: 2183418 - RNA, 16 nt, Human
agcagggucugggcag

SEQ ID NO: 2183419 - RNA, 17 nt, Human
agcagggucugggcagg

SEQ ID NO: 2183420 - RNA, 16 nt, Human
agcagggucuuuucau

SEQ ID NO: 2183421 - RNA, 18 nt, Human
agcagggucuuuucaucu

SEQ ID NO: 2183422 - RNA, 19 nt, Human
agcagggucuuuucaucug

SEQ ID NO: 2183423 - RNA, 20 nt, Human
agcagggucuuuucaucugg

SEQ ID NO: 2183424 - RNA, 22 nt, Human
agcagggucuuuucaucuggga

SEQ ID NO: 2183425 - RNA, 23 nt, Human
agcagggucuuuucaucugggaa

SEQ ID NO: 2183426 - RNA, 22 nt, Human
agcagggcucagcggggacagc

SEQ ID NO: 2183427 - RNA, 23 nt, Human
agcagggcuacccugagcugagg

SEQ ID NO: 2183428 - RNA, 16 nt, Human
agcagggcucugcccc

SEQ ID NO: 2183429 - RNA, 23 nt, Human
agcagggcucugccccagaggcc

SEQ ID NO: 2183430 - RNA, 16 nt, Human
agcagggcugcuguga

SEQ ID NO: 2183431 - RNA, 16 nt, Human
agcaggggcguggagg

SEQ ID NO: 2183432 - RNA, 20 nt, Human
agcagggagggcuucugcca

SEQ ID NO: 2183433 - RNA, 20 nt, Human
agcagggaaaauauauaucu

SEQ ID NO: 2183434 - RNA, 24 nt, Human
agcaggcuggcagcucuccaguca

SEQ ID NO: 2183435 - RNA, 20 nt, Human
agcaggcuggcagcucucca

SEQ ID NO: 2183436 - RNA, 22 nt, Human
agcaggcuggcagcucuccagu

SEQ ID NO: 2183437 - RNA, 21 nt, Human
agcagggaaaaugcagcaggg

SEQ ID NO: 2183438 - RNA, 11 nt, Human
agcagggagga

SEQ ID NO: 2183439 - RNA, 22 nt, Human
agcagggaugcccuggaggugg

SEQ ID NO: 2183440 - RNA, 17 nt, Human
agcagggaugcccugga

SEQ ID NO: 2183441 - RNA, 19 nt, Human
agcagggauuaaccucugc

SEQ ID NO: 2183442 - RNA, 19 nt, Human
agcagggcauggcugggaa

SEQ ID NO: 2183443 - RNA, 13 nt, Human
agcagggcucagc

SEQ ID NO: 2183444 - RNA, 24 nt, Human
agcagggaugcccuggagguggcu

SEQ ID NO: 2183445 - RNA, 22 nt, Human
agcagggauuaaccucugcacu

SEQ ID NO: 2183446 - RNA, 20 nt, Human
agcagggauuaaccucugca

SEQ ID NO: 2183447 - RNA, 21 nt, Human
agcagggauuaaccucugcac

SEQ ID NO: 2183448 - RNA, 14 nt, Human
agcagggcucagcg

SEQ ID NO: 2183449 - RNA, 15 nt, Human
agcagggcucagcgg

SEQ ID NO: 2183450 - RNA, 18 nt, Human
ugacccagccccuugaga

SEQ ID NO: 2183451 - RNA, 19 nt, Human
ugacccagccccuugagaa

SEQ ID NO: 2183452 - RNA, 21 nt, Human
ugacccagccccuugagaaac

SEQ ID NO: 2183453 - RNA, 17 nt, Human
ugacccaugcugcccug

SEQ ID NO: 2183454 - RNA, 18 nt, Human
ugacccaugcugcccugu

SEQ ID NO: 2183455 - RNA, 19 nt, Human
ugacccaugcugcccugug

SEQ ID NO: 2183456 - RNA, 20 nt, Human
agcagcaccguucugugcac

SEQ ID NO: 2183457 - RNA, 15 nt, Human
ugacccaggccgcag

SEQ ID NO: 2183458 - RNA, 23 nt, Human
ugacccagccccuugagaaaccu

SEQ ID NO: 2183459 - RNA, 20 nt, Human
ugacccagcacugcccaaag

SEQ ID NO: 2183460 - RNA, 12 nt, Human
ugacccaggccg

SEQ ID NO: 2183461 - RNA, 19 nt, Human
agcagcaccguucugugca

SEQ ID NO: 2183462 - RNA, 13 nt, Human
ugacccaggccgc

SEQ ID NO: 2183463 - RNA, 14 nt, Human
ugacccaggccgca

SEQ ID NO: 2183464 - RNA, 20 nt, Human
ugacccaugcugcccuguga

SEQ ID NO: 2183465 - RNA, 22 nt, Human
agcagccaagcuccuugggagg

SEQ ID NO: 2183466 - RNA, 21 nt, Human
agcagccaagcuccuugggag

SEQ ID NO: 2183467 - RNA, 20 nt, Human
agcagccaagcuccuuggga

SEQ ID NO: 2183468 - RNA, 15 nt, Human
agcagccacauuccu

SEQ ID NO: 2183469 - RNA, 11 nt, Human
agcagccacau

SEQ ID NO: 2183470 - RNA, 14 nt, Human
agcaggaagcucag

SEQ ID NO: 2183471 - RNA, 12 nt, Human
agcaggaagcuc

SEQ ID NO: 2183472 - RNA, 20 nt, Human
agcagccaagggaugaaaga

SEQ ID NO: 2183473 - RNA, 13 nt, Human
agcaggacaugga

SEQ ID NO: 2183474 - RNA, 18 nt, Human
agcagcaucugcuaauaa

SEQ ID NO: 2183475 - RNA, 23 nt, Human
agcagcagugaaaacaagugcug

SEQ ID NO: 2183476 - RNA, 16 nt, Human
agcagcagugaaaaca

SEQ ID NO: 2183477 - RNA, 18 nt, Human
agcagcagugaaaacaag

SEQ ID NO: 2183478 - RNA, 19 nt, Human
agcagcagccuuuaaugca

SEQ ID NO: 2183479 - RNA, 16 nt, Human
agcagcagggagggcu

SEQ ID NO: 2183480 - RNA, 15 nt, Human
agcaggaagcucaga

SEQ ID NO: 2183481 - RNA, 13 nt, Human
agcaggaccucug

SEQ ID NO: 2183482 - RNA, 23 nt, Human
agcaggacugaauuguccccagu

SEQ ID NO: 2183483 - RNA, 22 nt, Human
agcaggaccucugaaacccugg

SEQ ID NO: 2183484 - RNA, 14 nt, Human
agcaggagaggaga

SEQ ID NO: 2183485 - RNA, 16 nt, Human
agcaggagaggagagc

SEQ ID NO: 2183486 - RNA, 17 nt, Human
agcaggagaggagagcc

SEQ ID NO: 2183487 - RNA, 19 nt, Human
agcaggagaggagagccag

SEQ ID NO: 2183488 - RNA, 20 nt, Human
agcaggagaggagagccaga

SEQ ID NO: 2183489 - RNA, 21 nt, Human
agcaggagaggagagccagag

SEQ ID NO: 2183490 - RNA, 22 nt, Human
agcaggagaggagagccagaga

SEQ ID NO: 2183491 - RNA, 23 nt, Human
agcaggagaggagagccagagaa

SEQ ID NO: 2183492 - RNA, 15 nt, Human
agcaggagauugaga

SEQ ID NO: 2183493 - RNA, 18 nt, Human
agcaggagauugagaagg

SEQ ID NO: 2183494 - RNA, 19 nt, Human
agcaggagauugagaagga

SEQ ID NO: 2183495 - RNA, 22 nt, Human
agcaggauaguugcuccgccuc

SEQ ID NO: 2183496 - RNA, 19 nt, Human
agcaggcacauggaggagc

SEQ ID NO: 2183497 - RNA, 14 nt, Human
agcaggcacaugga

SEQ ID NO: 2183498 - RNA, 21 nt, Human
agcaggauaguugcuccgccu

SEQ ID NO: 2183499 - RNA, 16 nt, Human
agcaggcacauggagg

SEQ ID NO: 2183500 - RNA, 20 nt, Human
agcaggcacuugauuccuug

SEQ ID NO: 2183501 - RNA, 15 nt, Human
agcaggaggccccug

SEQ ID NO: 2183502 - RNA, 16 nt, Human
agcaggaggccccugg

SEQ ID NO: 2183503 - RNA, 20 nt, Human
agcaggaggccccuggccca

SEQ ID NO: 2183504 - RNA, 23 nt, Human
agcaggaggccccuggcccagcg

SEQ ID NO: 2183505 - RNA, 15 nt, Human
agcaggaggccaggc

SEQ ID NO: 2183506 - RNA, 14 nt, Human
agcaggaggccagg

SEQ ID NO: 2183507 - RNA, 20 nt, Human
agcaggagauugagaaggag

SEQ ID NO: 2183508 - RNA, 21 nt, Human
agcaggagauugagaaggaga

SEQ ID NO: 2183509 - RNA, 23 nt, Human
agcaggagauugagaaggagaga

SEQ ID NO: 2183510 - RNA, 16 nt, Human
agcaggaggaggugcc

SEQ ID NO: 2183511 - RNA, 21 nt, Human
agcaggccuugcgcuguugcg

SEQ ID NO: 2183512 - RNA, 21 nt, Human
agcaggcguucagcucacugu

SEQ ID NO: 2183513 - RNA, 12 nt, Human
agcaggccuugc

SEQ ID NO: 2183514 - RNA, 13 nt, Human
agcaggccuugcg

SEQ ID NO: 2183515 - RNA, 14 nt, Human
agcaggcuacuguc

SEQ ID NO: 2183516 - RNA, 20 nt, Human
agcaggcuacugucagcucc

SEQ ID NO: 2183517 - RNA, 19 nt, Human
agcaggcuacugucagcuc

SEQ ID NO: 2183518 - RNA, 17 nt, Human
agcaggcuacugucagc

SEQ ID NO: 2183519 - RNA, 16 nt, Human
agcaggcuacugucag

SEQ ID NO: 2183520 - RNA, 22 nt, Human
ugauggcacuuagcuaucagaa

SEQ ID NO: 2183521 - RNA, 20 nt, Human
ugauggcaggauggccuggc

SEQ ID NO: 2183522 - RNA, 22 nt, Human
ugauggcaccacugcacuccag

SEQ ID NO: 2183523 - RNA, 17 nt, Human
ugauggcaauuuuguaa

SEQ ID NO: 2183524 - RNA, 23 nt, Human
ugauggcaacagaucuggaaccu

SEQ ID NO: 2183525 - RNA, 15 nt, Human
ugauggcaauuuugu

SEQ ID NO: 2183526 - RNA, 21 nt, Human
ugaugaucuuugcagacaggc

SEQ ID NO: 2183527 - RNA, 16 nt, Human
ugauggcaacagaucu

SEQ ID NO: 2183528 - RNA, 19 nt, Human
ugauggcaacagaucugga

SEQ ID NO: 2183529 - RNA, 18 nt, Human
ugauggcaacagaucugg

SEQ ID NO: 2183530 - RNA, 13 nt, Human
ugauggcuucucc

SEQ ID NO: 2183531 - RNA, 15 nt, Human
ugauggcuucuccag

SEQ ID NO: 2183532 - RNA, 21 nt, Human
ugaugggcaacccccagccug

SEQ ID NO: 2183533 - RNA, 22 nt, Human
ugaugggcaacccccagccugc

SEQ ID NO: 2183534 - RNA, 13 nt, Human
ugauggggcccug

SEQ ID NO: 2183535 - RNA, 22 nt, Human
ugaugaaaugaggucagagccu

SEQ ID NO: 2183536 - RNA, 18 nt, Human
ugaugaaaauauuuaaag

SEQ ID NO: 2183537 - RNA, 17 nt, Human
ugaucuagagccaguua

SEQ ID NO: 2183538 - RNA, 14 nt, Human
ugaucuaggaagac

SEQ ID NO: 2183539 - RNA, 15 nt, Human
ugaucuaggaagacu

SEQ ID NO: 2183540 - RNA, 23 nt, Human
ugaugaaaugaggucagagccug

SEQ ID NO: 2183541 - RNA, 18 nt, Human
ugaugaaauguaaauacu

SEQ ID NO: 2183542 - RNA, 19 nt, Human
ugaugaucuuugcagacag

SEQ ID NO: 2183543 - RNA, 20 nt, Human
ugaugaucuuugcagacagg

SEQ ID NO: 2183544 - RNA, 17 nt, Human
ugauggggaaggaggcu

SEQ ID NO: 2183545 - RNA, 15 nt, Human
ugaugggucaguugu

SEQ ID NO: 2183546 - RNA, 22 nt, Human
ugauggggcccugccuccuuug

SEQ ID NO: 2183547 - RNA, 15 nt, Human
ugauggucagcuccc

SEQ ID NO: 2183548 - RNA, 16 nt, Human
ugauggucagcucccu

SEQ ID NO: 2183549 - RNA, 21 nt, Human
ugauggucagcucccuucucu

SEQ ID NO: 2183550 - RNA, 14 nt, Human
ugauggggaaggag

SEQ ID NO: 2183551 - RNA, 15 nt, Human
ugaugggggaggggg

SEQ ID NO: 2183552 - RNA, 23 nt, Human
ugauggguuaguggauggaaggg

SEQ ID NO: 2183553 - RNA, 19 nt, Human
ugauggguuaguggaugga

SEQ ID NO: 2183554 - RNA, 23 nt, Human
ugauguuuuccaugaguccccug

SEQ ID NO: 2183555 - RNA, 16 nt, Human
ugauggucuucagccu

SEQ ID NO: 2183556 - RNA, 19 nt, Human
ugauguuuuccaugagucc

SEQ ID NO: 2183557 - RNA, 21 nt, Human
ugauguuuuaaggaugcuugu

SEQ ID NO: 2183558 - RNA, 17 nt, Human
ugauguuuuccaugagu

SEQ ID NO: 2183559 - RNA, 20 nt, Human
ugauuaaccacuucagcuga

SEQ ID NO: 2183560 - RNA, 17 nt, Human
ugauuaaauucuugcaa

SEQ ID NO: 2183561 - RNA, 16 nt, Human
ugauuaaauucuugca

SEQ ID NO: 2183562 - RNA, 13 nt, Human
ugauuaaauucuu

SEQ ID NO: 2183563 - RNA, 16 nt, Human
agccacggccaggcca

SEQ ID NO: 2183564 - RNA, 16 nt, Human
ugauuaaguaaugaua

SEQ ID NO: 2183565 - RNA, 15 nt, Human
ugauuaaguaaugau

SEQ ID NO: 2183566 - RNA, 22 nt, Human
agccacagaagccaggagcaaa

SEQ ID NO: 2183567 - RNA, 22 nt, Human
agccacaggccugagauuucau

SEQ ID NO: 2183568 - RNA, 23 nt, Human
agccacaggccugagauuucauc

SEQ ID NO: 2183569 - RNA, 14 nt, Human
agccacaggccuga

SEQ ID NO: 2183570 - RNA, 16 nt, Human
agccacaggccugaga

SEQ ID NO: 2183571 - RNA, 17 nt, Human
agccacaggccugagau

SEQ ID NO: 2183572 - RNA, 21 nt, Human
agccacaggccugagauuuca

SEQ ID NO: 2183573 - RNA, 23 nt, Human
agccaccaugcccagcucagagg

SEQ ID NO: 2183574 - RNA, 17 nt, Human
agccaccaucuuugcag

SEQ ID NO: 2183575 - RNA, 13 nt, Human
agccaccaucuuu

SEQ ID NO: 2183576 - RNA, 16 nt, Human
agccaccaucuuugca

SEQ ID NO: 2183577 - RNA, 17 nt, Human
agccaccacguccagcu

SEQ ID NO: 2183578 - RNA, 13 nt, Human
agccaccacgccc

SEQ ID NO: 2183579 - RNA, 21 nt, Human
agccacacucugggcuccaga

SEQ ID NO: 2183580 - RNA, 21 nt, Human
agccacacugugggacucuuc

SEQ ID NO: 2183581 - RNA, 23 nt, Human
agccacacacacagaaaauauac

SEQ ID NO: 2183582 - RNA, 22 nt, Human
agccacacacacagaaaauaua

SEQ ID NO: 2183583 - RNA, 13 nt, Human
agccacagcuggu

SEQ ID NO: 2183584 - RNA, 13 nt, Human
agccacaggccug

SEQ ID NO: 2183585 - RNA, 23 nt, Human
agccacagaagccaggagcaaau

SEQ ID NO: 2183586 - RNA, 10 nt, Human
agccacagaa

SEQ ID NO: 2183587 - RNA, 12 nt, Human
agccacagaagc

SEQ ID NO: 2183588 - RNA, 17 nt, Human
agccacagaagccagga

SEQ ID NO: 2183589 - RNA, 18 nt, Human
agccacagaagccaggag

SEQ ID NO: 2183590 - RNA, 19 nt, Human
agccacagaagccaggagc

SEQ ID NO: 2183591 - RNA, 20 nt, Human
agccacagaagccaggagca

SEQ ID NO: 2183592 - RNA, 19 nt, Human
agccacaagaaauuugauu

SEQ ID NO: 2183593 - RNA, 16 nt, Human
agccaauuuuucugca

SEQ ID NO: 2183594 - RNA, 17 nt, Human
agccaauuuuucugcac

SEQ ID NO: 2183595 - RNA, 20 nt, Human
agccaauuuuucugcacuga

SEQ ID NO: 2183596 - RNA, 23 nt, Human
agccaauuuuucugcacugagca

SEQ ID NO: 2183597 - RNA, 13 nt, Human
agccacacacaca

SEQ ID NO: 2183598 - RNA, 12 nt, Human
agccacacacac

SEQ ID NO: 2183599 - RNA, 10 nt, Human
agccacacac

SEQ ID NO: 2183600 - RNA, 19 nt, Human
agccacaaaauaaauguug

SEQ ID NO: 2183601 - RNA, 17 nt, Human
agccacacaaacguuua

SEQ ID NO: 2183602 - RNA, 21 nt, Human
agccacacacacagaaaauau

SEQ ID NO: 2183603 - RNA, 20 nt, Human
agccacacacacagaaaaua

SEQ ID NO: 2183604 - RNA, 19 nt, Human
agccacacacacagaaaau

SEQ ID NO: 2183605 - RNA, 18 nt, Human
agccacacacacagaaaa

SEQ ID NO: 2183606 - RNA, 17 nt, Human
agccacacacacagaaa

SEQ ID NO: 2183607 - RNA, 16 nt, Human
agccacacacacagaa

SEQ ID NO: 2183608 - RNA, 15 nt, Human
agccacacacacaga

SEQ ID NO: 2183609 - RNA, 14 nt, Human
agccacacacacag

SEQ ID NO: 2183610 - RNA, 16 nt, Human
agccaaacccugucug

SEQ ID NO: 2183611 - RNA, 13 nt, Human
agccaaacccuug

SEQ ID NO: 2183612 - RNA, 19 nt, Human
agccaaacccuugucagug

SEQ ID NO: 2183613 - RNA, 21 nt, Human
agccaauccccuccuugggca

SEQ ID NO: 2183614 - RNA, 15 nt, Human
agccaauuauguuaa

SEQ ID NO: 2183615 - RNA, 13 nt, Human
agccaaugcuuac

SEQ ID NO: 2183616 - RNA, 22 nt, Human
agccaauccccuccuugggcac

SEQ ID NO: 2183617 - RNA, 13 nt, Human
agccaaugcuguc

SEQ ID NO: 2183618 - RNA, 18 nt, Human
agccaauucagacaggca

SEQ ID NO: 2183619 - RNA, 17 nt, Human
agccaauucagacaggc

SEQ ID NO: 2183620 - RNA, 13 nt, Human
agccaauuuuucu

SEQ ID NO: 2183621 - RNA, 14 nt, Human
agccaauuuuucug

SEQ ID NO: 2183622 - RNA, 15 nt, Human
agccaauuuuucugc

SEQ ID NO: 2183623 - RNA, 16 nt, Human
agccaauucagacagg

SEQ ID NO: 2183624 - RNA, 20 nt, Human
agccaauuauguuaaacuag

SEQ ID NO: 2183625 - RNA, 16 nt, Human
agccaauuauguuaaa

SEQ ID NO: 2183626 - RNA, 17 nt, Human
agccaauuauguuaaac

SEQ ID NO: 2183627 - RNA, 13 nt, Human
ugaucccagcacu

SEQ ID NO: 2183628 - RNA, 12 nt, Human
ugaucccagcac

SEQ ID NO: 2183629 - RNA, 18 nt, Human
ugauccccaagugugaac

SEQ ID NO: 2183630 - RNA, 19 nt, Human
ugaucccuguguugucucu

SEQ ID NO: 2183631 - RNA, 18 nt, Human
ugauccucccaccucagc

SEQ ID NO: 2183632 - RNA, 22 nt, Human
ugauccguuccauugcaagcuu

SEQ ID NO: 2183633 - RNA, 21 nt, Human
ugaucccuguuacccagagaa

SEQ ID NO: 2183634 - RNA, 20 nt, Human
ugaucccuguguugucucua

SEQ ID NO: 2183635 - RNA, 22 nt, Human
ugaucgugcuaaauuuucagua

SEQ ID NO: 2183636 - RNA, 15 nt, Human
ugaucgugcuaaauu

SEQ ID NO: 2183637 - RNA, 13 nt, Human
ugaucuaggaaga

SEQ ID NO: 2183638 - RNA, 19 nt, Human
ugauccucccaccucagcc

SEQ ID NO: 2183639 - RNA, 20 nt, Human
ugauccucccaccucagccu

SEQ ID NO: 2183640 - RNA, 23 nt, Human
agccaccccgggcucucugcugu

SEQ ID NO: 2183641 - RNA, 21 nt, Human
agccaccccgggcucucugcu

SEQ ID NO: 2183642 - RNA, 20 nt, Human
agccaccccgggcucucugc

SEQ ID NO: 2183643 - RNA, 19 nt, Human
agccaccccgggcucucug

SEQ ID NO: 2183644 - RNA, 20 nt, Human
agccaccccagaaaugguga

SEQ ID NO: 2183645 - RNA, 14 nt, Human
agccaccccgggcu

SEQ ID NO: 2183646 - RNA, 18 nt, Human
agccaccccagaaauggu

SEQ ID NO: 2183647 - RNA, 14 nt, Human
ugauccacucgccu

SEQ ID NO: 2183648 - RNA, 18 nt, Human
ugauccacucgccuucau

SEQ ID NO: 2183649 - RNA, 13 nt, Human
ugauccagaaaga

SEQ ID NO: 2183650 - RNA, 19 nt, Human
ugaucccaagugccagucu

SEQ ID NO: 2183651 - RNA, 15 nt, Human
ugauccagagcacag

SEQ ID NO: 2183652 - RNA, 23 nt, Human
ugauccagaaagaaaacuuguau

SEQ ID NO: 2183653 - RNA, 13 nt, Human
agccaccccugag

SEQ ID NO: 2183654 - RNA, 17 nt, Human
agcaucacuugggauua

SEQ ID NO: 2183655 - RNA, 20 nt, Human
agcaucaccucaggccaggu

SEQ ID NO: 2183656 - RNA, 19 nt, Human
agcaucaccucaggccagg

SEQ ID NO: 2183657 - RNA, 16 nt, Human
agcaucaccucaggcc

SEQ ID NO: 2183658 - RNA, 15 nt, Human
agcaucaccucaggc

SEQ ID NO: 2183659 - RNA, 14 nt, Human
agcaucaccucagg

SEQ ID NO: 2183660 - RNA, 13 nt, Human
agcaucaccucag

SEQ ID NO: 2183661 - RNA, 14 nt, Human
ugaucacagcagcu

SEQ ID NO: 2183662 - RNA, 16 nt, Human
agcauauucaggaagc

SEQ ID NO: 2183663 - RNA, 22 nt, Human
agcaucaggguuaagaagacuu

SEQ ID NO: 2183664 - RNA, 23 nt, Human
agcaucaggccaggcccucugcc

SEQ ID NO: 2183665 - RNA, 22 nt, Human
agcaucaggccaggcccucugc

SEQ ID NO: 2183666 - RNA, 21 nt, Human
agcaucaggccaggcccucug

SEQ ID NO: 2183667 - RNA, 21 nt, Human
agcaucauuauuugcagagac

SEQ ID NO: 2183668 - RNA, 16 nt, Human
agcaucauuuugcauu

SEQ ID NO: 2183669 - RNA, 18 nt, Human
agcaucauuuugcauuca

SEQ ID NO: 2183670 - RNA, 19 nt, Human
agcaucauuuugcauucaa

SEQ ID NO: 2183671 - RNA, 20 nt, Human
agcaucauuuugcauucaaa

SEQ ID NO: 2183672 - RNA, 24 nt, Human
agcauccauguguggacucaaguc

SEQ ID NO: 2183673 - RNA, 20 nt, Human
agcaucccugaggagccagg

SEQ ID NO: 2183674 - RNA, 22 nt, Human
agcaucauuuugcauucaaauu

SEQ ID NO: 2183675 - RNA, 15 nt, Human
agcauccaccuccuu

SEQ ID NO: 2183676 - RNA, 16 nt, Human
agcauccaccuccuuc

SEQ ID NO: 2183677 - RNA, 17 nt, Human
agcauccaccuccuucu

SEQ ID NO: 2183678 - RNA, 18 nt, Human
agcauccaccuccuucuc

SEQ ID NO: 2183679 - RNA, 20 nt, Human
agcauccaccuccuucucug

SEQ ID NO: 2183680 - RNA, 22 nt, Human
agcaucccaggaucgcaagagc

SEQ ID NO: 2183681 - RNA, 21 nt, Human
agcauccugccuuagagccag

SEQ ID NO: 2183682 - RNA, 21 nt, Human
agcaucccuugaccaggccug

SEQ ID NO: 2183683 - RNA, 22 nt, Human
agcaucccuugaccaggccugg

SEQ ID NO: 2183684 - RNA, 23 nt, Human
agcaucccuugaccaggccuggg

SEQ ID NO: 2183685 - RNA, 13 nt, Human
agcauggcugcca

SEQ ID NO: 2183686 - RNA, 21 nt, Human
ugaucaauaaaaugugauuuu

SEQ ID NO: 2183687 - RNA, 19 nt, Human
ugaucaauaaaaugugauu

SEQ ID NO: 2183688 - RNA, 19 nt, Human
ugauaccgaauugugacuc

SEQ ID NO: 2183689 - RNA, 14 nt, Human
ugaucaaugacaga

SEQ ID NO: 2183690 - RNA, 18 nt, Human
ugaucaaugacagagccu

SEQ ID NO: 2183691 - RNA, 19 nt, Human
ugaucaaugacagagccuu

SEQ ID NO: 2183692 - RNA, 17 nt, Human
ugauaccccccucuguc

SEQ ID NO: 2183693 - RNA, 18 nt, Human
ugauaccccccucugucu

SEQ ID NO: 2183694 - RNA, 19 nt, Human
ugauaccccccucugucuu

SEQ ID NO: 2183695 - RNA, 17 nt, Human
ugaucaauuaaauguag

SEQ ID NO: 2183696 - RNA, 16 nt, Human
ugaucaauuaaaugua

SEQ ID NO: 2183697 - RNA, 15 nt, Human
ugaucaauuaaaugu

SEQ ID NO: 2183698 - RNA, 14 nt, Human
ugaucaauuaaaug

SEQ ID NO: 2183699 - RNA, 12 nt, Human
ugaucacacucu

SEQ ID NO: 2183700 - RNA, 13 nt, Human
ugaucacacucug

SEQ ID NO: 2183701 - RNA, 15 nt, Human
ugaucacacucuggg

SEQ ID NO: 2183702 - RNA, 21 nt, Human
ugauacccauagcuuccauga

SEQ ID NO: 2183703 - RNA, 18 nt, Human
ugauacccauagcuucca

SEQ ID NO: 2183704 - RNA, 15 nt, Human
ugauaccccccucug

SEQ ID NO: 2183705 - RNA, 14 nt, Human
ugauaccagcugga

SEQ ID NO: 2183706 - RNA, 13 nt, Human
ugauacccagagc

SEQ ID NO: 2183707 - RNA, 22 nt, Human
ugauacauccaaagcagacagc

SEQ ID NO: 2183708 - RNA, 20 nt, Human
ugauacaaauugcagacugu

SEQ ID NO: 2183709 - RNA, 16 nt, Human
ugauacaagauuagaa

SEQ ID NO: 2183710 - RNA, 17 nt, Human
ugauacaagauuagaag

SEQ ID NO: 2183711 - RNA, 16 nt, Human
ugauacauccaaagca

SEQ ID NO: 2183712 - RNA, 18 nt, Human
ugaucacggcucacugca

SEQ ID NO: 2183713 - RNA, 14 nt, Human
ugaucaccugcccu

SEQ ID NO: 2183714 - RNA, 15 nt, Human
ugaucacggcucacu

SEQ ID NO: 2183715 - RNA, 13 nt, Human
ugaucacggcuca

SEQ ID NO: 2183716 - RNA, 14 nt, Human
ugaucacggcucac

SEQ ID NO: 2183717 - RNA, 17 nt, Human
agcauauucaggaagcu

SEQ ID NO: 2183718 - RNA, 19 nt, Human
agcauauucaggaagcuca

SEQ ID NO: 2183719 - RNA, 20 nt, Human
agcaucacaugaacuuguaa

SEQ ID NO: 2183720 - RNA, 21 nt, Human
agcauauucaggaagcucagg

SEQ ID NO: 2183721 - RNA, 17 nt, Human
agcauggcugugaggau

SEQ ID NO: 2183722 - RNA, 14 nt, Human
agcaugggccuggc

SEQ ID NO: 2183723 - RNA, 22 nt, Human
agcauccugccuuagagccagg

SEQ ID NO: 2183724 - RNA, 23 nt, Human
agcauccugccuuagagccaggc

SEQ ID NO: 2183725 - RNA, 13 nt, Human
agcauggcuguga

SEQ ID NO: 2183726 - RNA, 16 nt, Human
agcauggcugugagga

SEQ ID NO: 2183727 - RNA, 19 nt, Human
agcauggcugccaauggga

SEQ ID NO: 2183728 - RNA, 13 nt, Human
agcauguaauggu

SEQ ID NO: 2183729 - RNA, 19 nt, Human
agcaugggccuggccaccu

SEQ ID NO: 2183730 - RNA, 12 nt, Human
agcauguacagu

SEQ ID NO: 2183731 - RNA, 14 nt, Human
agcauguacagugu

SEQ ID NO: 2183732 - RNA, 15 nt, Human
agcauguacaguguu

SEQ ID NO: 2183733 - RNA, 16 nt, Human
agcauguacaguguuc

SEQ ID NO: 2183734 - RNA, 17 nt, Human
agcauuacaaauugcuu

SEQ ID NO: 2183735 - RNA, 19 nt, Human
agcauuaugauguggguca

SEQ ID NO: 2183736 - RNA, 17 nt, Human
agcauuagauuucucau

SEQ ID NO: 2183737 - RNA, 17 nt, Human
agcauuacgugagccag

SEQ ID NO: 2183738 - RNA, 18 nt, Human
agcauuacgugagccagg

SEQ ID NO: 2183739 - RNA, 19 nt, Human
agcauuacgugagccaggu

SEQ ID NO: 2183740 - RNA, 20 nt, Human
agcauuacgugagccaggua

SEQ ID NO: 2183741 - RNA, 23 nt, Human
agcauucaauuuauucaagaaaa

SEQ ID NO: 2183742 - RNA, 22 nt, Human
agcauucaauuuauucaagaaa

SEQ ID NO: 2183743 - RNA, 18 nt, Human
agcauucacaacuuguuu

SEQ ID NO: 2183744 - RNA, 14 nt, Human
agcauucagagagc

SEQ ID NO: 2183745 - RNA, 15 nt, Human
agcauucagagagca

SEQ ID NO: 2183746 - RNA, 16 nt, Human
agcauucagagagcag

SEQ ID NO: 2183747 - RNA, 17 nt, Human
agcauucagagagcagc

SEQ ID NO: 2183748 - RNA, 13 nt, Human
agcauuccaacaa

SEQ ID NO: 2183749 - RNA, 14 nt, Human
agcauuccaacaaa

SEQ ID NO: 2183750 - RNA, 15 nt, Human
agcauuccaacaaag

SEQ ID NO: 2183751 - RNA, 18 nt, Human
agcauucucacuccuacc

SEQ ID NO: 2183752 - RNA, 20 nt, Human
agcauucucacuccuaccug

SEQ ID NO: 2183753 - RNA, 19 nt, Human
agcauucgagacagaaccu

SEQ ID NO: 2183754 - RNA, 14 nt, Human
agcauuccuuuuga

SEQ ID NO: 2183755 - RNA, 24 nt, Human
agcauuccuucuuugauaauguua

SEQ ID NO: 2183756 - RNA, 19 nt, Human
agcauuccuucuuugauaa

SEQ ID NO: 2183757 - RNA, 21 nt, Human
agcauuccuucuuugauaaug

SEQ ID NO: 2183758 - RNA, 22 nt, Human
agcauuccuucuuugauaaugu

SEQ ID NO: 2183759 - RNA, 23 nt, Human
agcauuccuucuuugauaauguu

SEQ ID NO: 2183760 - RNA, 15 nt, Human
agcauuccuucuuug

SEQ ID NO: 2183761 - RNA, 16 nt, Human
agcauuccuucuuuga

SEQ ID NO: 2183762 - RNA, 17 nt, Human
agcauuccuucuuugau

SEQ ID NO: 2183763 - RNA, 18 nt, Human
agcauuccuucuuugaua

SEQ ID NO: 2183764 - RNA, 16 nt, Human
agcauuccagccccuc

SEQ ID NO: 2183765 - RNA, 17 nt, Human
agcauuccaacaaaggg

SEQ ID NO: 2183766 - RNA, 19 nt, Human
agcauuccaacaaaggguu

SEQ ID NO: 2183767 - RNA, 19 nt, Human
agcauuccagccccucugg

SEQ ID NO: 2183768 - RNA, 20 nt, Human
agcauuccagccccucuggu

SEQ ID NO: 2183769 - RNA, 23 nt, Human
agcauuguuugcuuauuguucca

SEQ ID NO: 2183770 - RNA, 22 nt, Human
agcauuguuugcuuauuguucc

SEQ ID NO: 2183771 - RNA, 21 nt, Human
agcauuguuugcuuauuguuc

SEQ ID NO: 2183772 - RNA, 17 nt, Human
agcauuuaauguagcca

SEQ ID NO: 2183773 - RNA, 22 nt, Human
agcauuuagauguauagguuga

SEQ ID NO: 2183774 - RNA, 22 nt, Human
agcauucucacuccuaccuggu

SEQ ID NO: 2183775 - RNA, 12 nt, Human
agcauucugucu

SEQ ID NO: 2183776 - RNA, 16 nt, Human
agcauuuuugauuuau

SEQ ID NO: 2183777 - RNA, 18 nt, Human
agcauuuuugauuuaugc

SEQ ID NO: 2183778 - RNA, 17 nt, Human
agccaaaauguaggcuu

SEQ ID NO: 2183779 - RNA, 22 nt, Human
agccaaaauguaggcuuaguuu

SEQ ID NO: 2183780 - RNA, 15 nt, Human
agccaaacccugucu

SEQ ID NO: 2183781 - RNA, 14 nt, Human
agccaaacccuguc

SEQ ID NO: 2183782 - RNA, 19 nt, Human
agccaaacccaugaggcaa

SEQ ID NO: 2183783 - RNA, 18 nt, Human
agccaaacccaugaggca

SEQ ID NO: 2183784 - RNA, 18 nt, Human
agccaaacauccuacaag

SEQ ID NO: 2183785 - RNA, 15 nt, Human
agcauuuugcuaaau

SEQ ID NO: 2183786 - RNA, 15 nt, Human
agcauuuuguauuug

SEQ ID NO: 2183787 - RNA, 22 nt, Human
agcauuuugcuaaaugugaaug

SEQ ID NO: 2183788 - RNA, 12 nt, Human
agcauuuuccuc

SEQ ID NO: 2183789 - RNA, 20 nt, Human
agcauuuuauaaaucgcuuu

SEQ ID NO: 2183790 - RNA, 23 nt, Human
agcauuuuagcaauuuauacaau

SEQ ID NO: 2183791 - RNA, 13 nt, Human
agcauuuuauaaa

SEQ ID NO: 2183792 - RNA, 15 nt, Human
agcauuuuauaaauc

SEQ ID NO: 2183793 - RNA, 14 nt, Human
agcauuuuauaaau

SEQ ID NO: 2183794 - RNA, 20 nt, Human
agcauuuaauguagccaugg

SEQ ID NO: 2183795 - RNA, 17 nt, Human
agcauuuacuuugaauu

SEQ ID NO: 2183796 - RNA, 15 nt, Human
agcauuuacuuugaa

SEQ ID NO: 2183797 - RNA, 21 nt, Human
agcauuuaguccaaugucuuu

SEQ ID NO: 2183798 - RNA, 13 nt, Human
agcauuuauguuu

SEQ ID NO: 2183799 - RNA, 16 nt, Human
agcauuugaaugcauu

SEQ ID NO: 2183800 - RNA, 17 nt, Human
agcauuugaaugcauuu

SEQ ID NO: 2183801 - RNA, 20 nt, Human
agcauuuaguccaaugucuu

SEQ ID NO: 2183802 - RNA, 14 nt, Human
agcauuuauaaauu

SEQ ID NO: 2183803 - RNA, 16 nt, Human
agcauuugucaacaaa

SEQ ID NO: 2183804 - RNA, 17 nt, Human
ugaaccugaugcugacu

SEQ ID NO: 2183805 - RNA, 21 nt, Human
ugaacuaggauuguaguccca

SEQ ID NO: 2183806 - RNA, 23 nt, Human
ugaacuaggguggugcauuuuug

SEQ ID NO: 2183807 - RNA, 17 nt, Human
ugaacucaaacugagga

SEQ ID NO: 2183808 - RNA, 16 nt, Human
ugaacucaaacugagg

SEQ ID NO: 2183809 - RNA, 14 nt, Human
ugaacucaaacuga

SEQ ID NO: 2183810 - RNA, 23 nt, Human
ugaacuauuccccagcagggucu

SEQ ID NO: 2183811 - RNA, 14 nt, Human
ugaacuccuggccu

SEQ ID NO: 2183812 - RNA, 15 nt, Human
ugaacuccuggccuc

SEQ ID NO: 2183813 - RNA, 12 nt, Human
ugaacuccuggc

SEQ ID NO: 2183814 - RNA, 18 nt, Human
ugaacucacuuuccuccu

SEQ ID NO: 2183815 - RNA, 17 nt, Human
ugaacucaacuuugaca

SEQ ID NO: 2183816 - RNA, 18 nt, Human
ugaacucaaacugaggaa

SEQ ID NO: 2183817 - RNA, 21 nt, Human
ugaaccuaggagugccccauu

SEQ ID NO: 2183818 - RNA, 22 nt, Human
ugaaccuaggagugccccauuc

SEQ ID NO: 2183819 - RNA, 12 nt, Human
ugaaccuggagg

SEQ ID NO: 2183820 - RNA, 15 nt, Human
ugaaccugaugcuga

SEQ ID NO: 2183821 - RNA, 20 nt, Human
ugaaccuaccuucauuucag

SEQ ID NO: 2183822 - RNA, 22 nt, Human
ugaaccgaugagaaauaaaguu

SEQ ID NO: 2183823 - RNA, 16 nt, Human
ugaaccgcugaauaug

SEQ ID NO: 2183824 - RNA, 14 nt, Human
ugaaccuaccuuca

SEQ ID NO: 2183825 - RNA, 20 nt, Human
ugaaauuuucuagacuuucu

SEQ ID NO: 2183826 - RNA, 18 nt, Human
ugaaauuuucuagacuuu

SEQ ID NO: 2183827 - RNA, 19 nt, Human
ugaaauuuucuagacuuuc

SEQ ID NO: 2183828 - RNA, 15 nt, Human
ugaaauuuuuauuaa

SEQ ID NO: 2183829 - RNA, 18 nt, Human
ugaacaaauuuacagaga

SEQ ID NO: 2183830 - RNA, 20 nt, Human
ugaacaaauuuacagagaca

SEQ ID NO: 2183831 - RNA, 19 nt, Human
ugaacaaauuuacagagac

SEQ ID NO: 2183832 - RNA, 18 nt, Human
ugaagaaaagugggccag

SEQ ID NO: 2183833 - RNA, 15 nt, Human
ugaagaaaagugggc

SEQ ID NO: 2183834 - RNA, 19 nt, Human
ugaagaaaaaauacauuuu

SEQ ID NO: 2183835 - RNA, 17 nt, Human
ugaagaaaacuccuuua

SEQ ID NO: 2183836 - RNA, 18 nt, Human
ugaagaaaaaauacauuu

SEQ ID NO: 2183837 - RNA, 17 nt, Human
ugaagaaaaaauacauu

SEQ ID NO: 2183838 - RNA, 15 nt, Human
ugaagaaaaaauaca

SEQ ID NO: 2183839 - RNA, 21 nt, Human
ugaacuauggacggugcucca

SEQ ID NO: 2183840 - RNA, 16 nt, Human
ugaacuuugcugagcc

SEQ ID NO: 2183841 - RNA, 13 nt, Human
ugaacuuuuugua

SEQ ID NO: 2183842 - RNA, 15 nt, Human
ugaagaaaaucacuu

SEQ ID NO: 2183843 - RNA, 21 nt, Human
ugaagaaaaucacuuaggaaa

SEQ ID NO: 2183844 - RNA, 22 nt, Human
ugaacuuugaccucugcagcaa

SEQ ID NO: 2183845 - RNA, 15 nt, Human
ugaacuuugcugagc

SEQ ID NO: 2183846 - RNA, 11 nt, Human
ugaacuuugcu

SEQ ID NO: 2183847 - RNA, 20 nt, Human
ugaacuuugaccucugcagc

SEQ ID NO: 2183848 - RNA, 19 nt, Human
ugaacuuugaccucugcag

SEQ ID NO: 2183849 - RNA, 23 nt, Human
agagcugcucuggaaaaugugac

SEQ ID NO: 2183850 - RNA, 14 nt, Human
agagcugcucugga

SEQ ID NO: 2183851 - RNA, 15 nt, Human
agagcugcucuggaa

SEQ ID NO: 2183852 - RNA, 16 nt, Human
agagcugcucuggaaa

SEQ ID NO: 2183853 - RNA, 22 nt, Human
agagcugcucuggaaaauguga

SEQ ID NO: 2183854 - RNA, 14 nt, Human
agagcugccucucg

SEQ ID NO: 2183855 - RNA, 21 nt, Human
ugaagaaaccuucagauuugu

SEQ ID NO: 2183856 - RNA, 20 nt, Human
ugaagaaaggguguuuuucu

SEQ ID NO: 2183857 - RNA, 14 nt, Human
agagcugcgggcug

SEQ ID NO: 2183858 - RNA, 15 nt, Human
agagcuggagccugg

SEQ ID NO: 2183859 - RNA, 17 nt, Human
agagcuggagccuggug

SEQ ID NO: 2183860 - RNA, 12 nt, Human
agagcuggagcc

SEQ ID NO: 2183861 - RNA, 12 nt, Human
agagcuggcucu

SEQ ID NO: 2183862 - RNA, 18 nt, Human
agagcuggagccuggugc

SEQ ID NO: 2183863 - RNA, 19 nt, Human
agagcuggagccuggugcc

SEQ ID NO: 2183864 - RNA, 15 nt, Human
agagcuggcaaaggu

SEQ ID NO: 2183865 - RNA, 18 nt, Human
agagcuggcaaagguggc

SEQ ID NO: 2183866 - RNA, 21 nt, Human
agagcuguuuauggccucagc

SEQ ID NO: 2183867 - RNA, 20 nt, Human
agagcuguuuauggccucag

SEQ ID NO: 2183868 - RNA, 19 nt, Human
agagcuguuuauggccuca

SEQ ID NO: 2183869 - RNA, 20 nt, Human
agagcuguucccaaauuuuc

SEQ ID NO: 2183870 - RNA, 21 nt, Human
agagcuguucacagccagacu

SEQ ID NO: 2183871 - RNA, 21 nt, Human
agagcuuaaugauaauauugu

SEQ ID NO: 2183872 - RNA, 15 nt, Human
agagcuuaacagugu

SEQ ID NO: 2183873 - RNA, 22 nt, Human
agagcuucuguugcugccucau

SEQ ID NO: 2183874 - RNA, 15 nt, Human
agagcuucuuccagg

SEQ ID NO: 2183875 - RNA, 15 nt, Human
agaggcagagagcgg

SEQ ID NO: 2183876 - RNA, 24 nt, Human
agaggcagccccauucugccugcc

SEQ ID NO: 2183877 - RNA, 13 nt, Human
agaggcagcccca

SEQ ID NO: 2183878 - RNA, 19 nt, Human
agaggcagccccauucugc

SEQ ID NO: 2183879 - RNA, 17 nt, Human
agaggaaaaaaaugacu

SEQ ID NO: 2183880 - RNA, 16 nt, Human
agaggaaaaaaaugac

SEQ ID NO: 2183881 - RNA, 18 nt, Human
agaggaaaaguaaggugc

SEQ ID NO: 2183882 - RNA, 19 nt, Human
agaggaaaaguaaggugca

SEQ ID NO: 2183883 - RNA, 21 nt, Human
agaggaaaaguaaggugcagu

SEQ ID NO: 2183884 - RNA, 22 nt, Human
agaggaaaaguaaggugcaguu

SEQ ID NO: 2183885 - RNA, 22 nt, Human
agaggcagagaaagaagagaca

SEQ ID NO: 2183886 - RNA, 12 nt, Human
agaggcagagag

SEQ ID NO: 2183887 - RNA, 13 nt, Human
agaggcagagagc

SEQ ID NO: 2183888 - RNA, 14 nt, Human
agaggcagagagcg

SEQ ID NO: 2183889 - RNA, 23 nt, Human
agaggcagagagcggucucaggc

SEQ ID NO: 2183890 - RNA, 22 nt, Human
agagcuuucuucccgaacccca

SEQ ID NO: 2183891 - RNA, 23 nt, Human
agagcuuucuguccuuuuggcac

SEQ ID NO: 2183892 - RNA, 23 nt, Human
agagcuuggacuggaugcauguu

SEQ ID NO: 2183893 - RNA, 22 nt, Human
agagcuuucuguccuuuuggca

SEQ ID NO: 2183894 - RNA, 17 nt, Human
agagcuugaugccagua

SEQ ID NO: 2183895 - RNA, 13 nt, Human
agagcuuggacug

SEQ ID NO: 2183896 - RNA, 14 nt, Human
agagcuuggacugg

SEQ ID NO: 2183897 - RNA, 23 nt, Human
agagcuucuuccaggugcccagc

SEQ ID NO: 2183898 - RNA, 22 nt, Human
agagcuucuuccaggugcccag

SEQ ID NO: 2183899 - RNA, 19 nt, Human
agaggccaugggccuccug

SEQ ID NO: 2183900 - RNA, 22 nt, Human
agaggccauguuccaauaaaca

SEQ ID NO: 2183901 - RNA, 22 nt, Human
agaggcucguugacuggcugug

SEQ ID NO: 2183902 - RNA, 19 nt, Human
agaggcuauuauuuucacu

SEQ ID NO: 2183903 - RNA, 17 nt, Human
agaggcuaugugagcac

SEQ ID NO: 2183904 - RNA, 23 nt, Human
agaggccauggcagaauaaucuu

SEQ ID NO: 2183905 - RNA, 20 nt, Human
agaggccauggcagaauaau

SEQ ID NO: 2183906 - RNA, 16 nt, Human
agaggccauggcagaa

SEQ ID NO: 2183907 - RNA, 15 nt, Human
agaggccauggcaga

SEQ ID NO: 2183908 - RNA, 17 nt, Human
agaggcagggaggggac

SEQ ID NO: 2183909 - RNA, 22 nt, Human
agaggcaggggcuugcuuugca

SEQ ID NO: 2183910 - RNA, 13 nt, Human
agaggcagggagg

SEQ ID NO: 2183911 - RNA, 14 nt, Human
agaggccauggcag

SEQ ID NO: 2183912 - RNA, 19 nt, Human
agaggccaugauucgccca

SEQ ID NO: 2183913 - RNA, 10 nt, Human
agaggcaggg

SEQ ID NO: 2183914 - RNA, 13 nt, Human
agaggcagggucu

SEQ ID NO: 2183915 - RNA, 12 nt, Human
agagguuuuguu

SEQ ID NO: 2183916 - RNA, 19 nt, Human
agagguuuuaaagugauua

SEQ ID NO: 2183917 - RNA, 22 nt, Human
agaguaauccaagcaaauguga

SEQ ID NO: 2183918 - RNA, 18 nt, Human
agagguuuuaaagugauu

SEQ ID NO: 2183919 - RNA, 22 nt, Human
agagguuugacuagaugaugga

SEQ ID NO: 2183920 - RNA, 14 nt, Human
agaguaauggguuu

SEQ ID NO: 2183921 - RNA, 17 nt, Human
agaguaauggguuucau

SEQ ID NO: 2183922 - RNA, 18 nt, Human
agaguaauggguuucaua

SEQ ID NO: 2183923 - RNA, 16 nt, Human
agaguagaauugcauu

SEQ ID NO: 2183924 - RNA, 15 nt, Human
agaguagaauugcau

SEQ ID NO: 2183925 - RNA, 19 nt, Human
agaguacagugagccaaga

SEQ ID NO: 2183926 - RNA, 16 nt, Human
agaguacagugagcca

SEQ ID NO: 2183927 - RNA, 15 nt, Human
ugaagcaaaucagaa

SEQ ID NO: 2183928 - RNA, 14 nt, Human
ugaagcaaaucaga

SEQ ID NO: 2183929 - RNA, 18 nt, Human
ugaagcaaaucagaaacu

SEQ ID NO: 2183930 - RNA, 23 nt, Human
agaguagcaaguucuagagaaga

SEQ ID NO: 2183931 - RNA, 12 nt, Human
agaguagcaagu

SEQ ID NO: 2183932 - RNA, 22 nt, Human
agaguagcaaguucuagagaag

SEQ ID NO: 2183933 - RNA, 17 nt, Human
ugaagcaaagcaccagc

SEQ ID NO: 2183934 - RNA, 18 nt, Human
ugaagcaaagcaccagcu

SEQ ID NO: 2183935 - RNA, 13 nt, Human
agaguagacauuu

SEQ ID NO: 2183936 - RNA, 21 nt, Human
agaguagauggugaaauuuau

SEQ ID NO: 2183937 - RNA, 22 nt, Human
agaguagauggugaaauuuauu

SEQ ID NO: 2183938 - RNA, 18 nt, Human
agaguagaauugcauuga

SEQ ID NO: 2183939 - RNA, 17 nt, Human
agaguagaauugcauug

SEQ ID NO: 2183940 - RNA, 17 nt, Human
agagguucauuucaaau

SEQ ID NO: 2183941 - RNA, 16 nt, Human
agaggucuuuuuuaaa

SEQ ID NO: 2183942 - RNA, 13 nt, Human
agagguuucagug

SEQ ID NO: 2183943 - RNA, 15 nt, Human
agagguugcagugag

SEQ ID NO: 2183944 - RNA, 12 nt, Human
agaggucuuuuu

SEQ ID NO: 2183945 - RNA, 19 nt, Human
agaggucugugcugaggcc

SEQ ID NO: 2183946 - RNA, 16 nt, Human
agaggucugugcugag

SEQ ID NO: 2183947 - RNA, 18 nt, Human
agaggucugugcugaggc

SEQ ID NO: 2183948 - RNA, 22 nt, Human
agaggucucugccggcucuuuc

SEQ ID NO: 2183949 - RNA, 13 nt, Human
agaggucugugcu

SEQ ID NO: 2183950 - RNA, 14 nt, Human
agaggucugugcug

SEQ ID NO: 2183951 - RNA, 19 nt, Human
agagguccacaacacacag

SEQ ID NO: 2183952 - RNA, 16 nt, Human
agagguagggcugcca

SEQ ID NO: 2183953 - RNA, 13 nt, Human
agaggcugaggca

SEQ ID NO: 2183954 - RNA, 20 nt, Human
agaggucaagcccaggagga

SEQ ID NO: 2183955 - RNA, 18 nt, Human
agaggucaagcccaggag

SEQ ID NO: 2183956 - RNA, 16 nt, Human
agaggucaagcccagg

SEQ ID NO: 2183957 - RNA, 17 nt, Human
agagguauuuaucuuua

SEQ ID NO: 2183958 - RNA, 13 nt, Human
agaggcugaggac

SEQ ID NO: 2183959 - RNA, 19 nt, Human
agaggcugaaagaggccaa

SEQ ID NO: 2183960 - RNA, 13 nt, Human
agaggcugaaaga

SEQ ID NO: 2183961 - RNA, 14 nt, Human
agaggcugaggccu

SEQ ID NO: 2183962 - RNA, 17 nt, Human
agaggcugaggccugga

SEQ ID NO: 2183963 - RNA, 18 nt, Human
agaggcugaggccuggac

SEQ ID NO: 2183964 - RNA, 19 nt, Human
agaggcugaggccuggacu

SEQ ID NO: 2183965 - RNA, 18 nt, Human
ugaaauaugcuggcugga

SEQ ID NO: 2183966 - RNA, 12 nt, Human
ugaaauaugcau

SEQ ID NO: 2183967 - RNA, 18 nt, Human
ugaaauauuauguuaaaa

SEQ ID NO: 2183968 - RNA, 15 nt, Human
ugaaauuguauuaca

SEQ ID NO: 2183969 - RNA, 15 nt, Human
ugaaauauacacaca

SEQ ID NO: 2183970 - RNA, 19 nt, Human
ugaaauaguucaaagccaa

SEQ ID NO: 2183971 - RNA, 17 nt, Human
ugaaauauacacacagc

SEQ ID NO: 2183972 - RNA, 16 nt, Human
ugaaauauacacacag

SEQ ID NO: 2183973 - RNA, 15 nt, Human
ugaaauaucuguauu

SEQ ID NO: 2183974 - RNA, 14 nt, Human
ugaaauaauaaauc

SEQ ID NO: 2183975 - RNA, 19 nt, Human
ugaaauacacaaguaaaca

SEQ ID NO: 2183976 - RNA, 22 nt, Human
ugaaauuuuaaccuaugauauu

SEQ ID NO: 2183977 - RNA, 20 nt, Human
ugaaauuuuaaccuaugaua

SEQ ID NO: 2183978 - RNA, 14 nt, Human
ugaaauuuuaaccu

SEQ ID NO: 2183979 - RNA, 19 nt, Human
ugaaauuuuaaaaauuguu

SEQ ID NO: 2183980 - RNA, 22 nt, Human
ugaaauuuuauaugcuuacuga

SEQ ID NO: 2183981 - RNA, 17 nt, Human
ugaaauuuuaaacuaua

SEQ ID NO: 2183982 - RNA, 17 nt, Human
ugaaauuuuccaauguc

SEQ ID NO: 2183983 - RNA, 18 nt, Human
ugaaauuuuauaugcuua

SEQ ID NO: 2183984 - RNA, 16 nt, Human
ugaaauuuuauaugcu

SEQ ID NO: 2183985 - RNA, 18 nt, Human
ugaaauuuuccaaugucu

SEQ ID NO: 2183986 - RNA, 19 nt, Human
ugaaauuuuccaaugucug

SEQ ID NO: 2183987 - RNA, 20 nt, Human
ugaaauuuuccaaugucugc

SEQ ID NO: 2183988 - RNA, 17 nt, Human
ugaaauuuucuagacuu

SEQ ID NO: 2183989 - RNA, 21 nt, Human
ugaaauuuucuagacuuucug

SEQ ID NO: 2183990 - RNA, 23 nt, Human
ugaaauuguuuaaguguuguaaa

SEQ ID NO: 2183991 - RNA, 18 nt, Human
ugaaauuguuuaaguguu

SEQ ID NO: 2183992 - RNA, 23 nt, Human
ugaaauuguacauauuuguggaa

SEQ ID NO: 2183993 - RNA, 22 nt, Human
ugaaauugucuagcagagcagg

SEQ ID NO: 2183994 - RNA, 14 nt, Human
ugaaauuguacaua

SEQ ID NO: 2183995 - RNA, 17 nt, Human
ugaaauuguacauauuu

SEQ ID NO: 2183996 - RNA, 20 nt, Human
agagcugcccuccuugucca

SEQ ID NO: 2183997 - RNA, 21 nt, Human
agagcugcccuccuuguccac

SEQ ID NO: 2183998 - RNA, 13 nt, Human
agagcugcccucc

SEQ ID NO: 2183999 - RNA, 21 nt, Human
agagcuaacccuuaucuguaa

SEQ ID NO: 2184000 - RNA, 18 nt, Human
agagcugccaccugccug

SEQ ID NO: 2184001 - RNA, 23 nt, Human
agagcgccugccccucccagaac

SEQ ID NO: 2184002 - RNA, 21 nt, Human
agagcgccugccccucccaga

SEQ ID NO: 2184003 - RNA, 20 nt, Human
agagcgccugccccucccag

SEQ ID NO: 2184004 - RNA, 15 nt, Human
agagcgccugccccu

SEQ ID NO: 2184005 - RNA, 14 nt, Human
agagcgccugcccc

SEQ ID NO: 2184006 - RNA, 22 nt, Human
agagcgccgugaguucucaggg

SEQ ID NO: 2184007 - RNA, 20 nt, Human
agagcgccgugaguucucag

SEQ ID NO: 2184008 - RNA, 21 nt, Human
agagcgccgugaguucucagg

SEQ ID NO: 2184009 - RNA, 13 nt, Human
agagcgcgucugg

SEQ ID NO: 2184010 - RNA, 14 nt, Human
agagcggucucagg

SEQ ID NO: 2184011 - RNA, 23 nt, Human
agagcggucucaggcugguggga

SEQ ID NO: 2184012 - RNA, 21 nt, Human
agagcgugcuccagccuggcu

SEQ ID NO: 2184013 - RNA, 23 nt, Human
agagccuugguguccaccuggcc

SEQ ID NO: 2184014 - RNA, 22 nt, Human
agagccuugguguccaccuggc

SEQ ID NO: 2184015 - RNA, 21 nt, Human
agagccuuuggaugaccagaa

SEQ ID NO: 2184016 - RNA, 23 nt, Human
agagccuuuggaugaccagaaca

SEQ ID NO: 2184017 - RNA, 18 nt, Human
agagccuuuuucuaggcc

SEQ ID NO: 2184018 - RNA, 17 nt, Human
agagcgagagucugucu

SEQ ID NO: 2184019 - RNA, 13 nt, Human
agagcgccccucc

SEQ ID NO: 2184020 - RNA, 18 nt, Human
agagcgccgugaguucuc

SEQ ID NO: 2184021 - RNA, 11 nt, Human
ugaaagugacu

SEQ ID NO: 2184022 - RNA, 20 nt, Human
ugaaaguuuucagaaccucu

SEQ ID NO: 2184023 - RNA, 18 nt, Human
ugaaaguuuucagaaccu

SEQ ID NO: 2184024 - RNA, 17 nt, Human
ugaaaguuugcacugua

SEQ ID NO: 2184025 - RNA, 15 nt, Human
ugaaaguuaauccac

SEQ ID NO: 2184026 - RNA, 23 nt, Human
ugaaauaagccagacaucaacag

SEQ ID NO: 2184027 - RNA, 20 nt, Human
ugaaauaagccagacaucaa

SEQ ID NO: 2184028 - RNA, 18 nt, Human
ugaaauaagccagacauc

SEQ ID NO: 2184029 - RNA, 17 nt, Human
ugaaauaagccagacau

SEQ ID NO: 2184030 - RNA, 14 nt, Human
agagcaaaauugau

SEQ ID NO: 2184031 - RNA, 23 nt, Human
agagcaagauccugucuuuaagg

SEQ ID NO: 2184032 - RNA, 14 nt, Human
agagcacacuguag

SEQ ID NO: 2184033 - RNA, 20 nt, Human
agagcacacuuggcccaagu

SEQ ID NO: 2184034 - RNA, 11 nt, Human
agagcacagcc

SEQ ID NO: 2184035 - RNA, 13 nt, Human
agagcacagcccu

SEQ ID NO: 2184036 - RNA, 14 nt, Human
agagcacagcccuc

SEQ ID NO: 2184037 - RNA, 15 nt, Human
agagcacagcccucc

SEQ ID NO: 2184038 - RNA, 16 nt, Human
agagcacagcccuccc

SEQ ID NO: 2184039 - RNA, 14 nt, Human
agagcaagucugga

SEQ ID NO: 2184040 - RNA, 16 nt, Human
agagcaagucugcagg

SEQ ID NO: 2184041 - RNA, 14 nt, Human
agagcaagucugca

SEQ ID NO: 2184042 - RNA, 21 nt, Human
agagcaaugcccguaaugcuu

SEQ ID NO: 2184043 - RNA, 15 nt, Human
agagcacuuaagaga

SEQ ID NO: 2184044 - RNA, 21 nt, Human
agagcacuggguugcagggga

SEQ ID NO: 2184045 - RNA, 20 nt, Human
agagcacuggguugcagggg

SEQ ID NO: 2184046 - RNA, 16 nt, Human
agagcaccccucucug

SEQ ID NO: 2184047 - RNA, 17 nt, Human
agagcaccccucucugc

SEQ ID NO: 2184048 - RNA, 18 nt, Human
agagcaccuaguccagug

SEQ ID NO: 2184049 - RNA, 19 nt, Human
agagcaccuaguccaguga

SEQ ID NO: 2184050 - RNA, 19 nt, Human
agagcacuuaagagaauau

SEQ ID NO: 2184051 - RNA, 20 nt, Human
agagcacuuaagagaauauu

SEQ ID NO: 2184052 - RNA, 21 nt, Human
agagcacuuaagagaauauuu

SEQ ID NO: 2184053 - RNA, 22 nt, Human
agagcacuuaagagaauauuuu

SEQ ID NO: 2184054 - RNA, 12 nt, Human
agagcagagacc

SEQ ID NO: 2184055 - RNA, 21 nt, Human
agagacaggaaaauccucugg

SEQ ID NO: 2184056 - RNA, 13 nt, Human
agagacaggaaaa

SEQ ID NO: 2184057 - RNA, 15 nt, Human
ucuuugggaauauuu

SEQ ID NO: 2184058 - RNA, 22 nt, Human
ucuuuggcuccccuguaccuuu

SEQ ID NO: 2184059 - RNA, 14 nt, Human
ucuuuggcuccccu

SEQ ID NO: 2184060 - RNA, 17 nt, Human
ucuuuggacccugaggc

SEQ ID NO: 2184061 - RNA, 21 nt, Human
ucuuuggacccugaggcccag

SEQ ID NO: 2184062 - RNA, 13 nt, Human
agagauuuuucau

SEQ ID NO: 2184063 - RNA, 18 nt, Human
agagcaaaauaauuuuaa

SEQ ID NO: 2184064 - RNA, 12 nt, Human
agagauuucaag

SEQ ID NO: 2184065 - RNA, 13 nt, Human
agagauuuaauua

SEQ ID NO: 2184066 - RNA, 16 nt, Human
agagauuuaauuaauc

SEQ ID NO: 2184067 - RNA, 16 nt, Human
ucuuugggaauauuug

SEQ ID NO: 2184068 - RNA, 18 nt, Human
ucuuugggaauauuugaa

SEQ ID NO: 2184069 - RNA, 20 nt, Human
ucuuugggaauauuugaauc

SEQ ID NO: 2184070 - RNA, 20 nt, Human
agagcauuuccaacaccaca

SEQ ID NO: 2184071 - RNA, 19 nt, Human
agagccaccaagagggacg

SEQ ID NO: 2184072 - RNA, 15 nt, Human
agagccaccaagagg

SEQ ID NO: 2184073 - RNA, 15 nt, Human
agagcauugccauuc

SEQ ID NO: 2184074 - RNA, 18 nt, Human
agagcauugccauucccu

SEQ ID NO: 2184075 - RNA, 19 nt, Human
agagcauugaauuggagag

SEQ ID NO: 2184076 - RNA, 17 nt, Human
agagcauugcauggaca

SEQ ID NO: 2184077 - RNA, 19 nt, Human
agagcauuacgugagccag

SEQ ID NO: 2184078 - RNA, 20 nt, Human
agagcauuacgugagccagg

SEQ ID NO: 2184079 - RNA, 21 nt, Human
agagcauuacgugagccaggu

SEQ ID NO: 2184080 - RNA, 22 nt, Human
agagcauuacgugagccaggua

SEQ ID NO: 2184081 - RNA, 16 nt, Human
agagcagugggccugg

SEQ ID NO: 2184082 - RNA, 21 nt, Human
agagccuugguguccaccugg

SEQ ID NO: 2184083 - RNA, 20 nt, Human
agagccuugguguccaccug

SEQ ID NO: 2184084 - RNA, 19 nt, Human
agagccuugguguccaccu

SEQ ID NO: 2184085 - RNA, 17 nt, Human
agagccuugguguccac

SEQ ID NO: 2184086 - RNA, 18 nt, Human
agagccagagaagugaca

SEQ ID NO: 2184087 - RNA, 21 nt, Human
agagccuugcggaagguucua

SEQ ID NO: 2184088 - RNA, 11 nt, Human
agagccuugcg

SEQ ID NO: 2184089 - RNA, 22 nt, Human
agagccagaaccuggagggcua

SEQ ID NO: 2184090 - RNA, 16 nt, Human
agagccacccuguguu

SEQ ID NO: 2184091 - RNA, 10 nt, Human
agagccagag

SEQ ID NO: 2184092 - RNA, 13 nt, Human
agagccagagaag

SEQ ID NO: 2184093 - RNA, 15 nt, Human
agagccagagaagug

SEQ ID NO: 2184094 - RNA, 16 nt, Human
agagccagagaaguga

SEQ ID NO: 2184095 - RNA, 17 nt, Human
agagccagagaagugac

SEQ ID NO: 2184096 - RNA, 14 nt, Human
agagcagaggcagc

SEQ ID NO: 2184097 - RNA, 12 nt, Human
agagcagaugca

SEQ ID NO: 2184098 - RNA, 20 nt, Human
agagcagaacggagccccag

SEQ ID NO: 2184099 - RNA, 23 nt, Human
agagcagaacggagccccaggcc

SEQ ID NO: 2184100 - RNA, 20 nt, Human
agagcagagaccaucccuga

SEQ ID NO: 2184101 - RNA, 17 nt, Human
agagcagagaccauccc

SEQ ID NO: 2184102 - RNA, 18 nt, Human
agagcagagaccaucccu

SEQ ID NO: 2184103 - RNA, 22 nt, Human
agagcagggguccuugguguga

SEQ ID NO: 2184104 - RNA, 23 nt, Human
agagcaggcuggcagcucuccag

SEQ ID NO: 2184105 - RNA, 24 nt, Human
agagcagggauuaaccucugcacu

SEQ ID NO: 2184106 - RNA, 22 nt, Human
agagcagggauuaaccucugca

SEQ ID NO: 2184107 - RNA, 17 nt, Human
agagcaggcuggcagcu

SEQ ID NO: 2184108 - RNA, 22 nt, Human
agagcaggcuggcagcucucca

SEQ ID NO: 2184109 - RNA, 19 nt, Human
agagcaggcguucagcuca

SEQ ID NO: 2184110 - RNA, 13 nt, Human
agagcaggcuggc

SEQ ID NO: 2184111 - RNA, 20 nt, Human
agagcaggcacauggaggag

SEQ ID NO: 2184112 - RNA, 19 nt, Human
agagcaggcacauggagga

SEQ ID NO: 2184113 - RNA, 18 nt, Human
agagcaggcacauggagg

SEQ ID NO: 2184114 - RNA, 13 nt, Human
agagcaggcacau

SEQ ID NO: 2184115 - RNA, 12 nt, Human
agagcaggcaca

SEQ ID NO: 2184116 - RNA, 22 nt, Human
agagcaggaggccccuggccca

SEQ ID NO: 2184117 - RNA, 23 nt, Human
agagcaggaggccccuggcccag

SEQ ID NO: 2184118 - RNA, 19 nt, Human
agagcagaugcagagagcc

SEQ ID NO: 2184119 - RNA, 15 nt, Human
agagcaggaggcccc

SEQ ID NO: 2184120 - RNA, 20 nt, Human
agagcaggaggccccuggcc

SEQ ID NO: 2184121 - RNA, 14 nt, Human
agagcagaugcaga

SEQ ID NO: 2184122 - RNA, 15 nt, Human
agagcagaugcagag

SEQ ID NO: 2184123 - RNA, 18 nt, Human
agagcagaugcagagagc

SEQ ID NO: 2184124 - RNA, 17 nt, Human
agauaugggacauuuuu

SEQ ID NO: 2184125 - RNA, 17 nt, Human
agauauggcagcgaaag

SEQ ID NO: 2184126 - RNA, 15 nt, Human
agauauuaccaguuu

SEQ ID NO: 2184127 - RNA, 21 nt, Human
agauauugugaaguacauauu

SEQ ID NO: 2184128 - RNA, 23 nt, Human
agauauuuacaugaauugcauuu

SEQ ID NO: 2184129 - RNA, 13 nt, Human
agauauuuauaua

SEQ ID NO: 2184130 - RNA, 19 nt, Human
agauauugugaaguacaua

SEQ ID NO: 2184131 - RNA, 18 nt, Human
agauauugugaaguacau

SEQ ID NO: 2184132 - RNA, 22 nt, Human
agauauugucagaguucugcuc

SEQ ID NO: 2184133 - RNA, 12 nt, Human
agauauucaagu

SEQ ID NO: 2184134 - RNA, 15 nt, Human
agaucaccagaauaa

SEQ ID NO: 2184135 - RNA, 14 nt, Human
agaucaauuuguaa

SEQ ID NO: 2184136 - RNA, 21 nt, Human
agaucaauuuguaauugcuua

SEQ ID NO: 2184137 - RNA, 14 nt, Human
agauauuuauauau

SEQ ID NO: 2184138 - RNA, 12 nt, Human
agaucaagcugu

SEQ ID NO: 2184139 - RNA, 14 nt, Human
agaucaagcuguga

SEQ ID NO: 2184140 - RNA, 18 nt, Human
agaucaagcugugagaca

SEQ ID NO: 2184141 - RNA, 16 nt, Human
agaucaaggagaggag

SEQ ID NO: 2184142 - RNA, 14 nt, Human
agaucacgccacug

SEQ ID NO: 2184143 - RNA, 15 nt, Human
agaucacgccacugc

SEQ ID NO: 2184144 - RNA, 16 nt, Human
agaucacgccacugca

SEQ ID NO: 2184145 - RNA, 15 nt, Human
agaguuuaacacaag

SEQ ID NO: 2184146 - RNA, 14 nt, Human
agauaaauauuaua

SEQ ID NO: 2184147 - RNA, 12 nt, Human
agauaaaugugc

SEQ ID NO: 2184148 - RNA, 18 nt, Human
agauaaagauuucuugag

SEQ ID NO: 2184149 - RNA, 22 nt, Human
agaguuuaacacaaguccugug

SEQ ID NO: 2184150 - RNA, 12 nt, Human
agauaaauauua

SEQ ID NO: 2184151 - RNA, 17 nt, Human
agauaaagguucaugca

SEQ ID NO: 2184152 - RNA, 19 nt, Human
agauacgacuuuauuuucu

SEQ ID NO: 2184153 - RNA, 18 nt, Human
agauaacaagaucuuuca

SEQ ID NO: 2184154 - RNA, 21 nt, Human
agauaacaagaucuuucagga

SEQ ID NO: 2184155 - RNA, 13 nt, Human
agauaaauuauaa

SEQ ID NO: 2184156 - RNA, 14 nt, Human
agauaaaucuagua

SEQ ID NO: 2184157 - RNA, 20 nt, Human
agauacgacuuuauuuucug

SEQ ID NO: 2184158 - RNA, 21 nt, Human
agauacuggaaguuuugcauu

SEQ ID NO: 2184159 - RNA, 20 nt, Human
agauacuggaaguuuugcau

SEQ ID NO: 2184160 - RNA, 19 nt, Human
agauacuggaaguuuugca

SEQ ID NO: 2184161 - RNA, 19 nt, Human
agauacugcuacuguaauu

SEQ ID NO: 2184162 - RNA, 23 nt, Human
agauacugcuacuguaauuuuau

SEQ ID NO: 2184163 - RNA, 23 nt, Human
ugaauuuuuuucaucuucucugg

SEQ ID NO: 2184164 - RNA, 21 nt, Human
ugaauuuuuuucaucuucucu

SEQ ID NO: 2184165 - RNA, 20 nt, Human
ugacacacagcucuguccug

SEQ ID NO: 2184166 - RNA, 19 nt, Human
ugacaaaaaguuuccauau

SEQ ID NO: 2184167 - RNA, 18 nt, Human
ugacaaaaauucaacuca

SEQ ID NO: 2184168 - RNA, 20 nt, Human
ugaauuuuuuuuuccuagcc

SEQ ID NO: 2184169 - RNA, 19 nt, Human
ugaauuuuuuuuuccuagc

SEQ ID NO: 2184170 - RNA, 16 nt, Human
ugaauuuuuuuuuccu

SEQ ID NO: 2184171 - RNA, 13 nt, Human
ugaauuuucacau

SEQ ID NO: 2184172 - RNA, 15 nt, Human
ugaauuuucacauga

SEQ ID NO: 2184173 - RNA, 16 nt, Human
ugaauuuucacaugaa

SEQ ID NO: 2184174 - RNA, 17 nt, Human
ugaauuuucacaugaac

SEQ ID NO: 2184175 - RNA, 18 nt, Human
ugaauuuucacaugaaca

SEQ ID NO: 2184176 - RNA, 19 nt, Human
ugaauuuucacaugaacau

SEQ ID NO: 2184177 - RNA, 22 nt, Human
ugaauuuuucucuaacucagaa

SEQ ID NO: 2184178 - RNA, 23 nt, Human
ugaauuuucuuuuuaauaaaaag

SEQ ID NO: 2184179 - RNA, 15 nt, Human
ugaauuuucuguguu

SEQ ID NO: 2184180 - RNA, 20 nt, Human
ugaauuuucccacugcaccc

SEQ ID NO: 2184181 - RNA, 13 nt, Human
ugaauuuucugug

SEQ ID NO: 2184182 - RNA, 14 nt, Human
ugaauuuucugugu

SEQ ID NO: 2184183 - RNA, 14 nt, Human
ugaauuuucccacu

SEQ ID NO: 2184184 - RNA, 15 nt, Human
ugaauuuucccacug

SEQ ID NO: 2184185 - RNA, 16 nt, Human
ugaauuuucccacugc

SEQ ID NO: 2184186 - RNA, 17 nt, Human
ugaauuuucccacugca

SEQ ID NO: 2184187 - RNA, 20 nt, Human
ugaauuucuucacuguugaa

SEQ ID NO: 2184188 - RNA, 15 nt, Human
agaucacgcuccccg

SEQ ID NO: 2184189 - RNA, 16 nt, Human
agaucacgcuccccgc

SEQ ID NO: 2184190 - RNA, 13 nt, Human
ugaauuucuaaaa

SEQ ID NO: 2184191 - RNA, 15 nt, Human
ugaauuucuuuugcc

SEQ ID NO: 2184192 - RNA, 21 nt, Human
ugaauuucuucacuguugaaa

SEQ ID NO: 2184193 - RNA, 23 nt, Human
ugaauuucuucacuguugaaaau

SEQ ID NO: 2184194 - RNA, 22 nt, Human
agaucacgccacugcacuccag

SEQ ID NO: 2184195 - RNA, 14 nt, Human
agaucaccagcccg

SEQ ID NO: 2184196 - RNA, 15 nt, Human
agaucaccagcccgg

SEQ ID NO: 2184197 - RNA, 16 nt, Human
agaucaccagcccggc

SEQ ID NO: 2184198 - RNA, 21 nt, Human
agaucaccagcccggccugcu

SEQ ID NO: 2184199 - RNA, 17 nt, Human
agaucacgccacugcac

SEQ ID NO: 2184200 - RNA, 18 nt, Human
agaucacgccacugcacu

SEQ ID NO: 2184201 - RNA, 22 nt, Human
agaguuguaaauauauaaauau

SEQ ID NO: 2184202 - RNA, 19 nt, Human
agaguugugcacauggcuu

SEQ ID NO: 2184203 - RNA, 16 nt, Human
agaguuguuacauuuu

SEQ ID NO: 2184204 - RNA, 14 nt, Human
agaguuuaacacaa

SEQ ID NO: 2184205 - RNA, 21 nt, Human
agaguuguuacauuuuuaagu

SEQ ID NO: 2184206 - RNA, 16 nt, Human
agaguuuagcuggaaa

SEQ ID NO: 2184207 - RNA, 17 nt, Human
agaguuuagcuggaaaa

SEQ ID NO: 2184208 - RNA, 16 nt, Human
agaguugcugggagcu

SEQ ID NO: 2184209 - RNA, 16 nt, Human
agagugaaaauugucu

SEQ ID NO: 2184210 - RNA, 20 nt, Human
agaguugaugguuguacaua

SEQ ID NO: 2184211 - RNA, 12 nt, Human
agaguuguuaca

SEQ ID NO: 2184212 - RNA, 13 nt, Human
agaguuguaaaua

SEQ ID NO: 2184213 - RNA, 15 nt, Human
agaguuguaaauaua

SEQ ID NO: 2184214 - RNA, 16 nt, Human
agaguuguaaauauau

SEQ ID NO: 2184215 - RNA, 17 nt, Human
agaguuguaaauauaua

SEQ ID NO: 2184216 - RNA, 18 nt, Human
agaguuguaaauauauaa

SEQ ID NO: 2184217 - RNA, 19 nt, Human
agaguuguaaauauauaaa

SEQ ID NO: 2184218 - RNA, 20 nt, Human
agaguuguaaauauauaaau

SEQ ID NO: 2184219 - RNA, 21 nt, Human
agaguuguaaauauauaaaua

SEQ ID NO: 2184220 - RNA, 12 nt, Human
agagucugucuc

SEQ ID NO: 2184221 - RNA, 23 nt, Human
agagucuggugaagcucacuucu

SEQ ID NO: 2184222 - RNA, 17 nt, Human
agaguugauacuacagu

SEQ ID NO: 2184223 - RNA, 22 nt, Human
agaguugauacuacaguuuguu

SEQ ID NO: 2184224 - RNA, 20 nt, Human
agaguugauacuacaguuug

SEQ ID NO: 2184225 - RNA, 14 nt, Human
agaguccucacucc

SEQ ID NO: 2184226 - RNA, 13 nt, Human
agaguccucacuc

SEQ ID NO: 2184227 - RNA, 12 nt, Human
agaguccuauuu

SEQ ID NO: 2184228 - RNA, 12 nt, Human
agagucugaaca

SEQ ID NO: 2184229 - RNA, 13 nt, Human
agagucugaacag

SEQ ID NO: 2184230 - RNA, 16 nt, Human
agagucugaacagcug

SEQ ID NO: 2184231 - RNA, 17 nt, Human
agagucugaacagcugu

SEQ ID NO: 2184232 - RNA, 18 nt, Human
agagucuggugaagcuca

SEQ ID NO: 2184233 - RNA, 13 nt, Human
ugaaugguaugga

SEQ ID NO: 2184234 - RNA, 19 nt, Human
ugaaugggcaaaacugaau

SEQ ID NO: 2184235 - RNA, 20 nt, Human
ugaaugggcaaaacugaauu

SEQ ID NO: 2184236 - RNA, 17 nt, Human
ugaagcaccaagcucaa

SEQ ID NO: 2184237 - RNA, 17 nt, Human
ugaauggguccauuuug

SEQ ID NO: 2184238 - RNA, 13 nt, Human
ugaauggucagcg

SEQ ID NO: 2184239 - RNA, 20 nt, Human
ugaaugguauggaacucucu

SEQ ID NO: 2184240 - RNA, 21 nt, Human
ugaauggucagcguugcaugu

SEQ ID NO: 2184241 - RNA, 14 nt, Human
ugaaugguccaggg

SEQ ID NO: 2184242 - RNA, 15 nt, Human
ugaaugguccagggu

SEQ ID NO: 2184243 - RNA, 15 nt, Human
ugaaugguguuguau

SEQ ID NO: 2184244 - RNA, 20 nt, Human
ugaaugguuuucaaaauaaa

SEQ ID NO: 2184245 - RNA, 16 nt, Human
ugaaugucauucacaa

SEQ ID NO: 2184246 - RNA, 23 nt, Human
ugaaugucuuuugaauauuccca

SEQ ID NO: 2184247 - RNA, 20 nt, Human
ugaaugucuaaggucacaca

SEQ ID NO: 2184248 - RNA, 15 nt, Human
ugaaugucuuuugaa

SEQ ID NO: 2184249 - RNA, 19 nt, Human
ugaaugucagugugacuga

SEQ ID NO: 2184250 - RNA, 23 nt, Human
ugaaugguuccaugccugagggu

SEQ ID NO: 2184251 - RNA, 21 nt, Human
ugaaugguuccaugccugagg

SEQ ID NO: 2184252 - RNA, 22 nt, Human
ugaaugguuccaugccugaggg

SEQ ID NO: 2184253 - RNA, 18 nt, Human
ugaaugguguuguaugcc

SEQ ID NO: 2184254 - RNA, 20 nt, Human
ugaaugguguuguaugccuu

SEQ ID NO: 2184255 - RNA, 21 nt, Human
ugaaugguguuguaugccuuu

SEQ ID NO: 2184256 - RNA, 19 nt, Human
ugaaugguuccaugccuga

SEQ ID NO: 2184257 - RNA, 16 nt, Human
agagucagcagaacug

SEQ ID NO: 2184258 - RNA, 14 nt, Human
ugaaugugucacua

SEQ ID NO: 2184259 - RNA, 14 nt, Human
ugaauguguguggu

SEQ ID NO: 2184260 - RNA, 18 nt, Human
ugaauguggcuugagaaa

SEQ ID NO: 2184261 - RNA, 18 nt, Human
agagucagccuucccccu

SEQ ID NO: 2184262 - RNA, 15 nt, Human
agagucauauuuuga

SEQ ID NO: 2184263 - RNA, 17 nt, Human
agagucauauuuugauu

SEQ ID NO: 2184264 - RNA, 13 nt, Human
agagucauauuuu

SEQ ID NO: 2184265 - RNA, 18 nt, Human
agagucaucuccaucagc

SEQ ID NO: 2184266 - RNA, 14 nt, Human
agagucaucuccau

SEQ ID NO: 2184267 - RNA, 13 nt, Human
agagucaucucca

SEQ ID NO: 2184268 - RNA, 18 nt, Human
agagucauauuuugauua

SEQ ID NO: 2184269 - RNA, 21 nt, Human
agagucaucuccaucagcugu

SEQ ID NO: 2184270 - RNA, 19 nt, Human
agagucaucuccaucagcu

SEQ ID NO: 2184271 - RNA, 16 nt, Human
agaguccaggccccaa

SEQ ID NO: 2184272 - RNA, 15 nt, Human
agaguccaggcccca

SEQ ID NO: 2184273 - RNA, 14 nt, Human
agaguccaggcccc

SEQ ID NO: 2184274 - RNA, 13 nt, Human
agagucccacugc

SEQ ID NO: 2184275 - RNA, 14 nt, Human
agagucccacugcc

SEQ ID NO: 2184276 - RNA, 15 nt, Human
agagucccacugccu

SEQ ID NO: 2184277 - RNA, 18 nt, Human
agagucccacugccucag

SEQ ID NO: 2184278 - RNA, 21 nt, Human
agagucccagagcaggaggcc

SEQ ID NO: 2184279 - RNA, 19 nt, Human
agagucccacugccucagg

SEQ ID NO: 2184280 - RNA, 20 nt, Human
agagucccacugccucaggu

SEQ ID NO: 2184281 - RNA, 21 nt, Human
agagucccacugccucagguu

SEQ ID NO: 2184282 - RNA, 22 nt, Human
agagucccacugccucagguuc

SEQ ID NO: 2184283 - RNA, 22 nt, Human
agauguucuaagucuuuccauu

SEQ ID NO: 2184284 - RNA, 21 nt, Human
agauguucuaagucuuuccau

SEQ ID NO: 2184285 - RNA, 20 nt, Human
agauguucuaagucuuucca

SEQ ID NO: 2184286 - RNA, 12 nt, Human
agauguucucua

SEQ ID NO: 2184287 - RNA, 15 nt, Human
agauguucucuauca

SEQ ID NO: 2184288 - RNA, 17 nt, Human
agauguucucuaucauu

SEQ ID NO: 2184289 - RNA, 23 nt, Human
ugaccauucuccaccugccaggg

SEQ ID NO: 2184290 - RNA, 18 nt, Human
agauguucucuaucauuu

SEQ ID NO: 2184291 - RNA, 19 nt, Human
agauguucucuaucauuua

SEQ ID NO: 2184292 - RNA, 17 nt, Human
ugacccacaagaaauga

SEQ ID NO: 2184293 - RNA, 16 nt, Human
ugacccaaagaccaau

SEQ ID NO: 2184294 - RNA, 11 nt, Human
ugacccacccc

SEQ ID NO: 2184295 - RNA, 12 nt, Human
ugacccaccccu

SEQ ID NO: 2184296 - RNA, 13 nt, Human
ugacccaccccug

SEQ ID NO: 2184297 - RNA, 15 nt, Human
ugacccaccccugug

SEQ ID NO: 2184298 - RNA, 16 nt, Human
ugacccaccccugugc

SEQ ID NO: 2184299 - RNA, 17 nt, Human
ugacccaccccugugcu

SEQ ID NO: 2184300 - RNA, 18 nt, Human
ugacccaccccugugcuc

SEQ ID NO: 2184301 - RNA, 23 nt, Human
ugacccaccccugugcuccgugc

SEQ ID NO: 2184302 - RNA, 12 nt, Human
ugacccacugcu

SEQ ID NO: 2184303 - RNA, 13 nt, Human
ugacccacugcuu

SEQ ID NO: 2184304 - RNA, 21 nt, Human
agauguggccuuccauuuaua

SEQ ID NO: 2184305 - RNA, 12 nt, Human
agauguuaaaaa

SEQ ID NO: 2184306 - RNA, 17 nt, Human
agauguuagaucagggg

SEQ ID NO: 2184307 - RNA, 21 nt, Human
agauguucagauugcuuugau

SEQ ID NO: 2184308 - RNA, 17 nt, Human
agauguucuaagucuuu

SEQ ID NO: 2184309 - RNA, 17 nt, Human
agauguucagucauuuu

SEQ ID NO: 2184310 - RNA, 18 nt, Human
agauguucagucauuuuu

SEQ ID NO: 2184311 - RNA, 13 nt, Human
agaugugcaccca

SEQ ID NO: 2184312 - RNA, 15 nt, Human
agaugugcacccaug

SEQ ID NO: 2184313 - RNA, 17 nt, Human
agauguggaaaagccaa

SEQ ID NO: 2184314 - RNA, 22 nt, Human
agauguggaaaagccaagaggc

SEQ ID NO: 2184315 - RNA, 15 nt, Human
agaugcuucucacug

SEQ ID NO: 2184316 - RNA, 23 nt, Human
agaugcuggguuggugcacagug

SEQ ID NO: 2184317 - RNA, 12 nt, Human
agaugugauuua

SEQ ID NO: 2184318 - RNA, 20 nt, Human
agaugugauuuaauaguguu

SEQ ID NO: 2184319 - RNA, 16 nt, Human
agaugugcaaaugcaa

SEQ ID NO: 2184320 - RNA, 18 nt, Human
agaugugcaaaugcaagc

SEQ ID NO: 2184321 - RNA, 21 nt, Human
agaugugcacccaugggcucu

SEQ ID NO: 2184322 - RNA, 21 nt, Human
agaucccagaaggaccuccug

SEQ ID NO: 2184323 - RNA, 21 nt, Human
agaugcaccaccaagccaagg

SEQ ID NO: 2184324 - RNA, 23 nt, Human
agaugcaccaccaagccaaggga

SEQ ID NO: 2184325 - RNA, 22 nt, Human
agauccagggacagaggcccca

SEQ ID NO: 2184326 - RNA, 19 nt, Human
agauccagggacagaggcc

SEQ ID NO: 2184327 - RNA, 14 nt, Human
agaucauggcaucc

SEQ ID NO: 2184328 - RNA, 16 nt, Human
agauccagggacugaa

SEQ ID NO: 2184329 - RNA, 14 nt, Human
agaugcaccagccc

SEQ ID NO: 2184330 - RNA, 15 nt, Human
agaugcaccagcccu

SEQ ID NO: 2184331 - RNA, 17 nt, Human
agaugcaguucugaaga

SEQ ID NO: 2184332 - RNA, 12 nt, Human
agaugcagagag

SEQ ID NO: 2184333 - RNA, 13 nt, Human
agaugcagagagc

SEQ ID NO: 2184334 - RNA, 14 nt, Human
agaugcagagagcc

SEQ ID NO: 2184335 - RNA, 15 nt, Human
agaugcagagagcca

SEQ ID NO: 2184336 - RNA, 17 nt, Human
agaugcagagagccauu

SEQ ID NO: 2184337 - RNA, 15 nt, Human
agaugccugaagcca

SEQ ID NO: 2184338 - RNA, 18 nt, Human
agaugcaguucugaagaa

SEQ ID NO: 2184339 - RNA, 19 nt, Human
agaugcaguucugaagaag

SEQ ID NO: 2184340 - RNA, 15 nt, Human
agaugcuagaacucc

SEQ ID NO: 2184341 - RNA, 14 nt, Human
agaugcuagaacuc

SEQ ID NO: 2184342 - RNA, 22 nt, Human
agaugcuggcccagggcccaga

SEQ ID NO: 2184343 - RNA, 21 nt, Human
agaugcuggcccagggcccag

SEQ ID NO: 2184344 - RNA, 20 nt, Human
agaugcuggcccagggccca

SEQ ID NO: 2184345 - RNA, 23 nt, Human
agaugcuggcccagggcccagag

SEQ ID NO: 2184346 - RNA, 18 nt, Human
agaugcagagagccauuu

SEQ ID NO: 2184347 - RNA, 18 nt, Human
agaugcuggguuggugca

SEQ ID NO: 2184348 - RNA, 13 nt, Human
agaugcuggguug

SEQ ID NO: 2184349 - RNA, 21 nt, Human
ugacaguggccgcccaaggcc

SEQ ID NO: 2184350 - RNA, 21 nt, Human
ugacagugccugggaauguau

SEQ ID NO: 2184351 - RNA, 20 nt, Human
ugacagggcacaccgggcac

SEQ ID NO: 2184352 - RNA, 16 nt, Human
ugacaguucugaagaa

SEQ ID NO: 2184353 - RNA, 23 nt, Human
ugacaguuuuccauaaagaagau

SEQ ID NO: 2184354 - RNA, 19 nt, Human
ugacaguguugaaaauguu

SEQ ID NO: 2184355 - RNA, 16 nt, Human
ugacaguguugaaaau

SEQ ID NO: 2184356 - RNA, 23 nt, Human
ugacagggaagcuacagguuaca

SEQ ID NO: 2184357 - RNA, 11 nt, Human
ugacagggcac

SEQ ID NO: 2184358 - RNA, 16 nt, Human
ugacagggcacaccgg

SEQ ID NO: 2184359 - RNA, 20 nt, Human
ugacaggcagccuggacaua

SEQ ID NO: 2184360 - RNA, 15 nt, Human
ugacaggcagcagag

SEQ ID NO: 2184361 - RNA, 16 nt, Human
ugacaggcagcagaga

SEQ ID NO: 2184362 - RNA, 19 nt, Human
ugacaggcagcagagacuu

SEQ ID NO: 2184363 - RNA, 18 nt, Human
ugacaggcagccuggaca

SEQ ID NO: 2184364 - RNA, 12 nt, Human
ugacagggaagc

SEQ ID NO: 2184365 - RNA, 13 nt, Human
ugacagggaagcu

SEQ ID NO: 2184366 - RNA, 14 nt, Human
ugacagggaagcua

SEQ ID NO: 2184367 - RNA, 16 nt, Human
ugacagggaagcuaca

SEQ ID NO: 2184368 - RNA, 17 nt, Human
ugacagggaagcuacag

SEQ ID NO: 2184369 - RNA, 19 nt, Human
ugacagggaagcuacaggu

SEQ ID NO: 2184370 - RNA, 20 nt, Human
ugacagggaagcuacagguu

SEQ ID NO: 2184371 - RNA, 21 nt, Human
ugacagggaagcuacagguua

SEQ ID NO: 2184372 - RNA, 14 nt, Human
ugacagcugucccu

SEQ ID NO: 2184373 - RNA, 12 nt, Human
ugacagcugucc

SEQ ID NO: 2184374 - RNA, 22 nt, Human
ugacagcugcuccuagagggag

SEQ ID NO: 2184375 - RNA, 21 nt, Human
ugacagcugcuccuagaggga

SEQ ID NO: 2184376 - RNA, 18 nt, Human
ugacagcugcuccuagag

SEQ ID NO: 2184377 - RNA, 15 nt, Human
ugacagcugcuccua

SEQ ID NO: 2184378 - RNA, 14 nt, Human
ugacagcugcuccu

SEQ ID NO: 2184379 - RNA, 13 nt, Human
ugacagcugcucc

SEQ ID NO: 2184380 - RNA, 12 nt, Human
ugacagcugcuc

SEQ ID NO: 2184381 - RNA, 21 nt, Human
ugacagcugucccugucacca

SEQ ID NO: 2184382 - RNA, 20 nt, Human
ugacagcugucccugucacc

SEQ ID NO: 2184383 - RNA, 13 nt, Human
ugacaggcagcag

SEQ ID NO: 2184384 - RNA, 14 nt, Human
ugacaggcagcaga

SEQ ID NO: 2184385 - RNA, 18 nt, Human
ugacagcugucccuguca

SEQ ID NO: 2184386 - RNA, 17 nt, Human
ugacagcugucccuguc

SEQ ID NO: 2184387 - RNA, 16 nt, Human
ugacagcugucccugu

SEQ ID NO: 2184388 - RNA, 23 nt, Human
ugacagcugcuccuagagggagg

SEQ ID NO: 2184389 - RNA, 20 nt, Human
ugacaggcaaugcuggcugu

SEQ ID NO: 2184390 - RNA, 19 nt, Human
ugacagccucccaccccca

SEQ ID NO: 2184391 - RNA, 17 nt, Human
ugacagccucccacccc

SEQ ID NO: 2184392 - RNA, 22 nt, Human
ugacagccucccacccccaucu

SEQ ID NO: 2184393 - RNA, 19 nt, Human
ugacacagaaaauguugag

SEQ ID NO: 2184394 - RNA, 18 nt, Human
ugacacagaaaauguuga

SEQ ID NO: 2184395 - RNA, 21 nt, Human
ugacacacagcucuguccugg

SEQ ID NO: 2184396 - RNA, 14 nt, Human
ugacaaaaauucaa

SEQ ID NO: 2184397 - RNA, 17 nt, Human
ugaccaauauuguacag

SEQ ID NO: 2184398 - RNA, 18 nt, Human
ugaccaauauuguacagu

SEQ ID NO: 2184399 - RNA, 23 nt, Human
ugaccaauauuauacuaagaaaa

SEQ ID NO: 2184400 - RNA, 16 nt, Human
ugacauuuauauauug

SEQ ID NO: 2184401 - RNA, 15 nt, Human
ugacauuuauauauu

SEQ ID NO: 2184402 - RNA, 19 nt, Human
ugaccaauauuguacaguu

SEQ ID NO: 2184403 - RNA, 21 nt, Human
ugaccaauauuguacaguuuu

SEQ ID NO: 2184404 - RNA, 18 nt, Human
ugaccaaugauggucacc

SEQ ID NO: 2184405 - RNA, 20 nt, Human
ugacauuguuggccaaagcc

SEQ ID NO: 2184406 - RNA, 21 nt, Human
ugacauuguuggccaaagcca

SEQ ID NO: 2184407 - RNA, 22 nt, Human
ugacauuguagagcuucuggca

SEQ ID NO: 2184408 - RNA, 17 nt, Human
ugacaguucugaagaau

SEQ ID NO: 2184409 - RNA, 20 nt, Human
ugacauuguggcacauucuu

SEQ ID NO: 2184410 - RNA, 15 nt, Human
agaucagccugggca

SEQ ID NO: 2184411 - RNA, 13 nt, Human
agaucagccuggg

SEQ ID NO: 2184412 - RNA, 15 nt, Human
agaucaguguaccau

SEQ ID NO: 2184413 - RNA, 14 nt, Human
ugaccaaugucuug

SEQ ID NO: 2184414 - RNA, 13 nt, Human
ugaccaaugucuu

SEQ ID NO: 2184415 - RNA, 21 nt, Human
agaucaguguaccauuugccu

SEQ ID NO: 2184416 - RNA, 18 nt, Human
agaucaguguaccauuug

SEQ ID NO: 2184417 - RNA, 12 nt, Human
agaucaugaaga

SEQ ID NO: 2184418 - RNA, 18 nt, Human
agaucauccuuuccagca

SEQ ID NO: 2184419 - RNA, 12 nt, Human
agaucauuguga

SEQ ID NO: 2184420 - RNA, 13 nt, Human
agauccaggacua

SEQ ID NO: 2184421 - RNA, 16 nt, Human
agaucauauacgugaa

SEQ ID NO: 2184422 - RNA, 21 nt, Human
agaucauccagaaguuccuca

SEQ ID NO: 2184423 - RNA, 18 nt, Human
agaucauauacgugaaaa

SEQ ID NO: 2184424 - RNA, 13 nt, Human
agaucauccuuuc

SEQ ID NO: 2184425 - RNA, 15 nt, Human
agaucauccuuucca

SEQ ID NO: 2184426 - RNA, 16 nt, Human
agaucauccuuuccag

SEQ ID NO: 2184427 - RNA, 20 nt, Human
agaccucagccugugcugcc

SEQ ID NO: 2184428 - RNA, 18 nt, Human
agaccucagccaugagga

SEQ ID NO: 2184429 - RNA, 15 nt, Human
agaccucaucaggau

SEQ ID NO: 2184430 - RNA, 16 nt, Human
agaccucaucaggaug

SEQ ID NO: 2184431 - RNA, 17 nt, Human
agaccucaucaggauga

SEQ ID NO: 2184432 - RNA, 20 nt, Human
agaccucagugccuuccugu

SEQ ID NO: 2184433 - RNA, 18 nt, Human
agaccucagugccuuccu

SEQ ID NO: 2184434 - RNA, 13 nt, Human
agaccugaagaau

SEQ ID NO: 2184435 - RNA, 18 nt, Human
agaccucaucaggaugaa

SEQ ID NO: 2184436 - RNA, 19 nt, Human
agaccucaucaggaugaac

SEQ ID NO: 2184437 - RNA, 22 nt, Human
agaccucaucaggaugaaccca

SEQ ID NO: 2184438 - RNA, 14 nt, Human
agaccuccccagcc

SEQ ID NO: 2184439 - RNA, 15 nt, Human
agaccuccccagccc

SEQ ID NO: 2184440 - RNA, 17 nt, Human
agaccuccccagccccu

SEQ ID NO: 2184441 - RNA, 20 nt, Human
agaccuccccagccccuagc

SEQ ID NO: 2184442 - RNA, 23 nt, Human
agaccuccccagccccuagccca

SEQ ID NO: 2184443 - RNA, 19 nt, Human
agaccucagccugugcugc

SEQ ID NO: 2184444 - RNA, 17 nt, Human
agaccucagccugugcu

SEQ ID NO: 2184445 - RNA, 16 nt, Human
agaccucagccugugc

SEQ ID NO: 2184446 - RNA, 15 nt, Human
agaccucagccugug

SEQ ID NO: 2184447 - RNA, 14 nt, Human
agaccucagccugu

SEQ ID NO: 2184448 - RNA, 13 nt, Human
agaccucagccug

SEQ ID NO: 2184449 - RNA, 12 nt, Human
agaccucagccu

SEQ ID NO: 2184450 - RNA, 14 nt, Human
agaccucagccaug

SEQ ID NO: 2184451 - RNA, 12 nt, Human
agaccucagcca

SEQ ID NO: 2184452 - RNA, 19 nt, Human
agaccuagggaggaccuua

SEQ ID NO: 2184453 - RNA, 16 nt, Human
agaccuauuccuccug

SEQ ID NO: 2184454 - RNA, 19 nt, Human
agaccuauuccuccugggc

SEQ ID NO: 2184455 - RNA, 11 nt, Human
agaccucagcc

SEQ ID NO: 2184456 - RNA, 16 nt, Human
agaccuauuugacaua

SEQ ID NO: 2184457 - RNA, 15 nt, Human
agaccuagggaggac

SEQ ID NO: 2184458 - RNA, 14 nt, Human
agaccuagggagga

SEQ ID NO: 2184459 - RNA, 20 nt, Human
agaccguccucaccccuguc

SEQ ID NO: 2184460 - RNA, 14 nt, Human
agacccggcugcgu

SEQ ID NO: 2184461 - RNA, 15 nt, Human
agacccgaggaaacu

SEQ ID NO: 2184462 - RNA, 19 nt, Human
agacccuaagccuccuuuu

SEQ ID NO: 2184463 - RNA, 21 nt, Human
agaccccuggcuuuucacugc

SEQ ID NO: 2184464 - RNA, 15 nt, Human
agaccccuggcuuuu

SEQ ID NO: 2184465 - RNA, 14 nt, Human
agaccccuggcuuu

SEQ ID NO: 2184466 - RNA, 13 nt, Human
agaccaaaauaaa

SEQ ID NO: 2184467 - RNA, 18 nt, Human
agaccguccucaccccug

SEQ ID NO: 2184468 - RNA, 19 nt, Human
agaccguccucaccccugu

SEQ ID NO: 2184469 - RNA, 13 nt, Human
agaccguccucac

SEQ ID NO: 2184470 - RNA, 14 nt, Human
agaccguccucacc

SEQ ID NO: 2184471 - RNA, 15 nt, Human
agaccguccucaccc

SEQ ID NO: 2184472 - RNA, 16 nt, Human
agaccguccucacccc

SEQ ID NO: 2184473 - RNA, 17 nt, Human
agaccgaacuguuguau

SEQ ID NO: 2184474 - RNA, 18 nt, Human
agacccuaccccaccacg

SEQ ID NO: 2184475 - RNA, 16 nt, Human
agacccuaccccacca

SEQ ID NO: 2184476 - RNA, 20 nt, Human
agaccgaacuguuguauaaa

SEQ ID NO: 2184477 - RNA, 21 nt, Human
agaccgagcgcuuucuggaaa

SEQ ID NO: 2184478 - RNA, 16 nt, Human
agaccgagugaaccua

SEQ ID NO: 2184479 - RNA, 13 nt, Human
agacucaaaugcu

SEQ ID NO: 2184480 - RNA, 18 nt, Human
agacuauuuaacuugagg

SEQ ID NO: 2184481 - RNA, 13 nt, Human
agaccuggagccc

SEQ ID NO: 2184482 - RNA, 16 nt, Human
agaccuggagccccug

SEQ ID NO: 2184483 - RNA, 19 nt, Human
agaccuggagccccugggu

SEQ ID NO: 2184484 - RNA, 20 nt, Human
agaccuggagccccugggug

SEQ ID NO: 2184485 - RNA, 17 nt, Human
agacuauuuaacuugag

SEQ ID NO: 2184486 - RNA, 20 nt, Human
agacucacaaccugaaccua

SEQ ID NO: 2184487 - RNA, 23 nt, Human
agacucagguuguaguaaagaaa

SEQ ID NO: 2184488 - RNA, 22 nt, Human
agacucagguuguaguaaagaa

SEQ ID NO: 2184489 - RNA, 14 nt, Human
agacucaccucugc

SEQ ID NO: 2184490 - RNA, 12 nt, Human
agacucaccucu

SEQ ID NO: 2184491 - RNA, 21 nt, Human
agacucaagguucccagagau

SEQ ID NO: 2184492 - RNA, 22 nt, Human
agacucaagguucccagagaug

SEQ ID NO: 2184493 - RNA, 20 nt, Human
agaccugcugagggaccagc

SEQ ID NO: 2184494 - RNA, 23 nt, Human
agacuauucaaacagucucagga

SEQ ID NO: 2184495 - RNA, 13 nt, Human
agaccugccccuc

SEQ ID NO: 2184496 - RNA, 15 nt, Human
agaccugaauucuuu

SEQ ID NO: 2184497 - RNA, 16 nt, Human
agaccucgagcagaug

SEQ ID NO: 2184498 - RNA, 16 nt, Human
agaccugccccuccuc

SEQ ID NO: 2184499 - RNA, 23 nt, Human
agaccugccccuccucucugccc

SEQ ID NO: 2184500 - RNA, 22 nt, Human
agaccugccccuccucucugcc

SEQ ID NO: 2184501 - RNA, 22 nt, Human
agaccuggagccccuggguggg

SEQ ID NO: 2184502 - RNA, 21 nt, Human
agacucaguuugucagacuuu

SEQ ID NO: 2184503 - RNA, 17 nt, Human
agacucaguuugucaga

SEQ ID NO: 2184504 - RNA, 16 nt, Human
agacucaguuugucag

SEQ ID NO: 2184505 - RNA, 15 nt, Human
agacucaguuuguca

SEQ ID NO: 2184506 - RNA, 12 nt, Human
agacucaguuug

SEQ ID NO: 2184507 - RNA, 13 nt, Human
agacucaguguuc

SEQ ID NO: 2184508 - RNA, 12 nt, Human
agacucaguguu

SEQ ID NO: 2184509 - RNA, 15 nt, Human
agacucaccucugcc

SEQ ID NO: 2184510 - RNA, 21 nt, Human
agacucaguggggaggggcug

SEQ ID NO: 2184511 - RNA, 15 nt, Human
agacucauucuucug

SEQ ID NO: 2184512 - RNA, 17 nt, Human
ucuugagccuugaacuu

SEQ ID NO: 2184513 - RNA, 21 nt, Human
ucuugaguuuuguuuuaaaau

SEQ ID NO: 2184514 - RNA, 22 nt, Human
ucuugaguuugucgcucaugug

SEQ ID NO: 2184515 - RNA, 14 nt, Human
ucuugauaagacca

SEQ ID NO: 2184516 - RNA, 18 nt, Human
agacucaucuuacuguac

SEQ ID NO: 2184517 - RNA, 22 nt, Human
ucuugauaagaccaccaccuca

SEQ ID NO: 2184518 - RNA, 21 nt, Human
ucuugaguuugucgcucaugu

SEQ ID NO: 2184519 - RNA, 16 nt, Human
agacucaucuuacugu

SEQ ID NO: 2184520 - RNA, 17 nt, Human
agacucaucuuacugua

SEQ ID NO: 2184521 - RNA, 19 nt, Human
ucuugagccuugaacuuug

SEQ ID NO: 2184522 - RNA, 18 nt, Human
ucuugagccuugaacuuu

SEQ ID NO: 2184523 - RNA, 23 nt, Human
agacaugccacaaggacuuccug

SEQ ID NO: 2184524 - RNA, 15 nt, Human
agacaugcugacuuu

SEQ ID NO: 2184525 - RNA, 13 nt, Human
agacauggagacu

SEQ ID NO: 2184526 - RNA, 18 nt, Human
agacauggagacuccugc

SEQ ID NO: 2184527 - RNA, 19 nt, Human
agacauggagacuccugcc

SEQ ID NO: 2184528 - RNA, 17 nt, Human
agacaugaaugcacacu

SEQ ID NO: 2184529 - RNA, 17 nt, Human
agacaugaauaugauua

SEQ ID NO: 2184530 - RNA, 15 nt, Human
agacaugauuuccuu

SEQ ID NO: 2184531 - RNA, 22 nt, Human
agacaugauuuccuugaaugug

SEQ ID NO: 2184532 - RNA, 20 nt, Human
agacaugagugcgugcucag

SEQ ID NO: 2184533 - RNA, 14 nt, Human
agacaugaauauga

SEQ ID NO: 2184534 - RNA, 23 nt, Human
agacauacuugaagggccagagc

SEQ ID NO: 2184535 - RNA, 21 nt, Human
agacauacuugaagggccaga

SEQ ID NO: 2184536 - RNA, 20 nt, Human
agacauacuugaagggccag

SEQ ID NO: 2184537 - RNA, 14 nt, Human
agacauagaauuaa

SEQ ID NO: 2184538 - RNA, 12 nt, Human
agacauggggag

SEQ ID NO: 2184539 - RNA, 22 nt, Human
agacauggcuugccacagcucu

SEQ ID NO: 2184540 - RNA, 15 nt, Human
agacauuuauacucu

SEQ ID NO: 2184541 - RNA, 17 nt, Human
agacauuuauacucuuu

SEQ ID NO: 2184542 - RNA, 21 nt, Human
agacauuuauacucuuuuuuc

SEQ ID NO: 2184543 - RNA, 23 nt, Human
agacauuuauacucuuuuuucau

SEQ ID NO: 2184544 - RNA, 16 nt, Human
agacauggcuugccac

SEQ ID NO: 2184545 - RNA, 22 nt, Human
agacauggagacuccugcccug

SEQ ID NO: 2184546 - RNA, 22 nt, Human
agacauuuguaaauguaaaacu

SEQ ID NO: 2184547 - RNA, 21 nt, Human
agacauuugcuaugagcuggg

SEQ ID NO: 2184548 - RNA, 23 nt, Human
agacauuucucuuacugcaaaug

SEQ ID NO: 2184549 - RNA, 15 nt, Human
ucuucuucuucagaa

SEQ ID NO: 2184550 - RNA, 21 nt, Human
ucuucuugaacacucaugcug

SEQ ID NO: 2184551 - RNA, 22 nt, Human
ucuucuugaacacucaugcuga

SEQ ID NO: 2184552 - RNA, 23 nt, Human
ucuucuugaacacucaugcugaa

SEQ ID NO: 2184553 - RNA, 22 nt, Human
agacauacuccuuccaucaaau

SEQ ID NO: 2184554 - RNA, 13 nt, Human
agacauacuugaa

SEQ ID NO: 2184555 - RNA, 19 nt, Human
agacauacuugaagggcca

SEQ ID NO: 2184556 - RNA, 17 nt, Human
agacauacuugaagggc

SEQ ID NO: 2184557 - RNA, 16 nt, Human
agacauacuugaaggg

SEQ ID NO: 2184558 - RNA, 14 nt, Human
agacauacuugaag

SEQ ID NO: 2184559 - RNA, 14 nt, Human
ucuucuucuucaga

SEQ ID NO: 2184560 - RNA, 22 nt, Human
ucuucuucccucccuaucuaac

SEQ ID NO: 2184561 - RNA, 19 nt, Human
ucuucuuccugaagcugag

SEQ ID NO: 2184562 - RNA, 17 nt, Human
ucuucuugaaauuuuaa

SEQ ID NO: 2184563 - RNA, 13 nt, Human
ucuucuugaaauu

SEQ ID NO: 2184564 - RNA, 23 nt, Human
agacauacuaaccagcagaaaug

SEQ ID NO: 2184565 - RNA, 20 nt, Human
ucuucuguacgucugacagg

SEQ ID NO: 2184566 - RNA, 15 nt, Human
ucuucuuacaugcau

SEQ ID NO: 2184567 - RNA, 23 nt, Human
ucuucuguacgucugacaggcaa

SEQ ID NO: 2184568 - RNA, 16 nt, Human
ucuucuucagaagaca

SEQ ID NO: 2184569 - RNA, 13 nt, Human
ucuucuucccucc

SEQ ID NO: 2184570 - RNA, 14 nt, Human
ucuucuucagaaga

SEQ ID NO: 2184571 - RNA, 15 nt, Human
ucuucuucaccauuu

SEQ ID NO: 2184572 - RNA, 12 nt, Human
ucuucuuaugca

SEQ ID NO: 2184573 - RNA, 14 nt, Human
ucuucuucaccauu

SEQ ID NO: 2184574 - RNA, 13 nt, Human
ucuucuucaccau

SEQ ID NO: 2184575 - RNA, 14 nt, Human
ucuucugacgugcc

SEQ ID NO: 2184576 - RNA, 15 nt, Human
ucuucugacgugccu

SEQ ID NO: 2184577 - RNA, 17 nt, Human
ucuucugacgugccuuu

SEQ ID NO: 2184578 - RNA, 21 nt, Human
ucuucugagcuauuucaucua

SEQ ID NO: 2184579 - RNA, 19 nt, Human
ucuucugagcuauuucauc

SEQ ID NO: 2184580 - RNA, 21 nt, Human
ucuucugacuuaagugugcaa

SEQ ID NO: 2184581 - RNA, 16 nt, Human
ucuuauuucauuucuu

SEQ ID NO: 2184582 - RNA, 11 nt, Human
ucuuauuugcu

SEQ ID NO: 2184583 - RNA, 16 nt, Human
ucuuauuucaugaaaa

SEQ ID NO: 2184584 - RNA, 18 nt, Human
ucuuauuucaugaaaauu

SEQ ID NO: 2184585 - RNA, 17 nt, Human
ucuuauucaguaaaaaa

SEQ ID NO: 2184586 - RNA, 18 nt, Human
ucuuauucaguaaaaaac

SEQ ID NO: 2184587 - RNA, 17 nt, Human
ucuuauuuaaugaaaga

SEQ ID NO: 2184588 - RNA, 22 nt, Human
ucuuauugcaaaauagcauuug

SEQ ID NO: 2184589 - RNA, 15 nt, Human
ucuuauucucacucc

SEQ ID NO: 2184590 - RNA, 13 nt, Human
ucuuauuuauuau

SEQ ID NO: 2184591 - RNA, 14 nt, Human
ucuuauuucaugaa

SEQ ID NO: 2184592 - RNA, 15 nt, Human
ucuuauuucauuucu

SEQ ID NO: 2184593 - RNA, 21 nt, Human
ucuucuguacgucugacaggc

SEQ ID NO: 2184594 - RNA, 22 nt, Human
ucuucuguacgucugacaggca

SEQ ID NO: 2184595 - RNA, 19 nt, Human
ucuucuggagucuccagug

SEQ ID NO: 2184596 - RNA, 17 nt, Human
ucuucuggagucuccag

SEQ ID NO: 2184597 - RNA, 13 nt, Human
ucuucuggcucaa

SEQ ID NO: 2184598 - RNA, 12 nt, Human
ucuucuggcuca

SEQ ID NO: 2184599 - RNA, 21 nt, Human
ucuucuggcucaaaaagagaa

SEQ ID NO: 2184600 - RNA, 18 nt, Human
ucuucuggcucaaaaaga

SEQ ID NO: 2184601 - RNA, 20 nt, Human
ucuucugggagggcagcagg

SEQ ID NO: 2184602 - RNA, 17 nt, Human
ucuucugggagggcagc

SEQ ID NO: 2184603 - RNA, 22 nt, Human
ucuucugcuucagccucccgag

SEQ ID NO: 2184604 - RNA, 13 nt, Human
ucuucugcuccac

SEQ ID NO: 2184605 - RNA, 12 nt, Human
ucuucugcucca

SEQ ID NO: 2184606 - RNA, 11 nt, Human
ucuucugcucc

SEQ ID NO: 2184607 - RNA, 12 nt, Human
ucuucugccugu

SEQ ID NO: 2184608 - RNA, 15 nt, Human
ucuucugccuguuau

SEQ ID NO: 2184609 - RNA, 16 nt, Human
ucuucugccuguuaua

SEQ ID NO: 2184610 - RNA, 22 nt, Human
ucuucugcuaugugacuugcau

SEQ ID NO: 2184611 - RNA, 19 nt, Human
ucuucugccggcccugggg

SEQ ID NO: 2184612 - RNA, 18 nt, Human
ucuucugccggcccuggg

SEQ ID NO: 2184613 - RNA, 20 nt, Human
ucuucugcccaauuggagga

SEQ ID NO: 2184614 - RNA, 18 nt, Human
ucuuguaaauaaagcccu

SEQ ID NO: 2184615 - RNA, 20 nt, Human
ucuuuaaugucacaggcagg

SEQ ID NO: 2184616 - RNA, 13 nt, Human
ucuuguaaauaaa

SEQ ID NO: 2184617 - RNA, 17 nt, Human
ucuuguaaauaaagccc

SEQ ID NO: 2184618 - RNA, 15 nt, Human
ucuugguuuccuucc

SEQ ID NO: 2184619 - RNA, 16 nt, Human
ucuugguuuguaaauu

SEQ ID NO: 2184620 - RNA, 15 nt, Human
ucuuuaguuuuugug

SEQ ID NO: 2184621 - RNA, 19 nt, Human
ucuuguaauccgaaucucu

SEQ ID NO: 2184622 - RNA, 22 nt, Human
ucuuuaaugucacaggcagguc

SEQ ID NO: 2184623 - RNA, 14 nt, Human
ucuuuaauuuuaca

SEQ ID NO: 2184624 - RNA, 14 nt, Human
ucuugguuuguaaa

SEQ ID NO: 2184625 - RNA, 15 nt, Human
ucuugguugaggaaa

SEQ ID NO: 2184626 - RNA, 17 nt, Human
ucuugguuggcuggccu

SEQ ID NO: 2184627 - RNA, 14 nt, Human
ucuugguuuccaaa

SEQ ID NO: 2184628 - RNA, 13 nt, Human
ucuugguugagga

SEQ ID NO: 2184629 - RNA, 23 nt, Human
ucuugguugaaaauaaaaagauc

SEQ ID NO: 2184630 - RNA, 19 nt, Human
ucuugguuccagccugcca

SEQ ID NO: 2184631 - RNA, 19 nt, Human
ucuugguugaaaauaaaaa

SEQ ID NO: 2184632 - RNA, 18 nt, Human
ucuugguucauaaaugaa

SEQ ID NO: 2184633 - RNA, 21 nt, Human
ucuugguucauaaaugaauuu

SEQ ID NO: 2184634 - RNA, 18 nt, Human
ucuugguuccagccugcc

SEQ ID NO: 2184635 - RNA, 17 nt, Human
ucuugguuccagccugc

SEQ ID NO: 2184636 - RNA, 20 nt, Human
ucuugaucaacaucuuuucu

SEQ ID NO: 2184637 - RNA, 23 nt, Human
ucuugaucaacaucuuuucuugc

SEQ ID NO: 2184638 - RNA, 13 nt, Human
ucuugguuccagc

SEQ ID NO: 2184639 - RNA, 15 nt, Human
ucuuggucuucccag

SEQ ID NO: 2184640 - RNA, 17 nt, Human
ucuuggucuucccaggc

SEQ ID NO: 2184641 - RNA, 17 nt, Human
ucuugaucaacaucuuu

SEQ ID NO: 2184642 - RNA, 22 nt, Human
ucuugauaccccccucugucuu

SEQ ID NO: 2184643 - RNA, 18 nt, Human
ucuugaucaacaucuuuu

SEQ ID NO: 2184644 - RNA, 19 nt, Human
ucuugaucaacaucuuuuc

SEQ ID NO: 2184645 - RNA, 17 nt, Human
ucuugauaccccccucu

SEQ ID NO: 2184646 - RNA, 20 nt, Human
ucuugauaccccccucuguc

SEQ ID NO: 2184647 - RNA, 21 nt, Human
ucuugauaccccccucugucu

SEQ ID NO: 2184648 - RNA, 20 nt, Human
agacucgauucauauugaau

SEQ ID NO: 2184649 - RNA, 19 nt, Human
agacucgagaacuuucauu

SEQ ID NO: 2184650 - RNA, 15 nt, Human
agacucgagaacuuu

SEQ ID NO: 2184651 - RNA, 18 nt, Human
agacucgagaacuuucau

SEQ ID NO: 2184652 - RNA, 14 nt, Human
agacucgagaacuu

SEQ ID NO: 2184653 - RNA, 20 nt, Human
agacuccuugagagaccagg

SEQ ID NO: 2184654 - RNA, 16 nt, Human
agacuccugcccuguu

SEQ ID NO: 2184655 - RNA, 14 nt, Human
agacuccugcccug

SEQ ID NO: 2184656 - RNA, 15 nt, Human
agacuccugcccugu

SEQ ID NO: 2184657 - RNA, 17 nt, Human
ucuuucuuccucugcug

SEQ ID NO: 2184658 - RNA, 19 nt, Human
ucuuucuuagaaauuuauu

SEQ ID NO: 2184659 - RNA, 15 nt, Human
ucuuucuuccucugc

SEQ ID NO: 2184660 - RNA, 16 nt, Human
ucuuucuuccucugcu

SEQ ID NO: 2184661 - RNA, 15 nt, Human
agacucgcgacaaug

SEQ ID NO: 2184662 - RNA, 17 nt, Human
agacucgcgacaaugca

SEQ ID NO: 2184663 - RNA, 18 nt, Human
agacucgcgacaaugcaa

SEQ ID NO: 2184664 - RNA, 19 nt, Human
agacucgcgacaaugcaaa

SEQ ID NO: 2184665 - RNA, 22 nt, Human
ucuuucugcagaaacagaaagg

SEQ ID NO: 2184666 - RNA, 21 nt, Human
ucuuucugcagaaacagaaag

SEQ ID NO: 2184667 - RNA, 13 nt, Human
ucuuucuggaguc

SEQ ID NO: 2184668 - RNA, 18 nt, Human
ucuuucuggcuaugcauu

SEQ ID NO: 2184669 - RNA, 14 nt, Human
ucuuucuuccucug

SEQ ID NO: 2184670 - RNA, 19 nt, Human
ucuuucuggcuaugcauuu

SEQ ID NO: 2184671 - RNA, 15 nt, Human
ucuuucuuagaaauu

SEQ ID NO: 2184672 - RNA, 16 nt, Human
ucuuucuuagaaauuu

SEQ ID NO: 2184673 - RNA, 13 nt, Human
ucuuucugcuuug

SEQ ID NO: 2184674 - RNA, 20 nt, Human
ucuuuauacaacagugcuaa

SEQ ID NO: 2184675 - RNA, 21 nt, Human
ucuuuauacaacagugcuaaa

SEQ ID NO: 2184676 - RNA, 16 nt, Human
ucuuuauacuguaauu

SEQ ID NO: 2184677 - RNA, 20 nt, Human
ucuuuauaauucuacuuuga

SEQ ID NO: 2184678 - RNA, 13 nt, Human
ucuuuauacaaca

SEQ ID NO: 2184679 - RNA, 14 nt, Human
ucuuuauacaacag

SEQ ID NO: 2184680 - RNA, 17 nt, Human
ucuuuauacaacagugc

SEQ ID NO: 2184681 - RNA, 15 nt, Human
agagaaaaacaaauu

SEQ ID NO: 2184682 - RNA, 17 nt, Human
agagaauguagauauug

SEQ ID NO: 2184683 - RNA, 13 nt, Human
agagaaaaacaaa

SEQ ID NO: 2184684 - RNA, 19 nt, Human
agagaauuguuugaacccg

SEQ ID NO: 2184685 - RNA, 16 nt, Human
agagaaugucugaucu

SEQ ID NO: 2184686 - RNA, 17 nt, Human
agagaauggaaaacaga

SEQ ID NO: 2184687 - RNA, 21 nt, Human
agagacaaacaccucccagga

SEQ ID NO: 2184688 - RNA, 19 nt, Human
agagacaaacaccucccag

SEQ ID NO: 2184689 - RNA, 23 nt, Human
agagaauuucuaccauuucagag

SEQ ID NO: 2184690 - RNA, 22 nt, Human
agagaauuucuaccauuucaga

SEQ ID NO: 2184691 - RNA, 13 nt, Human
agagacagagagg

SEQ ID NO: 2184692 - RNA, 23 nt, Human
agagacagaagcaggcuggaggu

SEQ ID NO: 2184693 - RNA, 13 nt, Human
agagacagaagca

SEQ ID NO: 2184694 - RNA, 20 nt, Human
agagacaaacaccucccagg

SEQ ID NO: 2184695 - RNA, 14 nt, Human
agagacagaagcag

SEQ ID NO: 2184696 - RNA, 15 nt, Human
agagacagaagcagg

SEQ ID NO: 2184697 - RNA, 17 nt, Human
agagacagaagcaggcu

SEQ ID NO: 2184698 - RNA, 20 nt, Human
agagacagaagcaggcugga

SEQ ID NO: 2184699 - RNA, 24 nt, Human
agagacagaaagcagaacagugau

SEQ ID NO: 2184700 - RNA, 22 nt, Human
agagaaaaaauauuuuccugcc

SEQ ID NO: 2184701 - RNA, 21 nt, Human
agagaaaaaaaguuugccaga

SEQ ID NO: 2184702 - RNA, 19 nt, Human
agacuuuuuuuaaauagua

SEQ ID NO: 2184703 - RNA, 19 nt, Human
agacuuuucuuucagccaa

SEQ ID NO: 2184704 - RNA, 12 nt, Human
agacuuucuguu

SEQ ID NO: 2184705 - RNA, 20 nt, Human
agacuuuacaugacacagcu

SEQ ID NO: 2184706 - RNA, 14 nt, Human
agacuuuaaagaau

SEQ ID NO: 2184707 - RNA, 19 nt, Human
agacuuuacaugacacagc

SEQ ID NO: 2184708 - RNA, 18 nt, Human
agacuuguaugaaagaug

SEQ ID NO: 2184709 - RNA, 19 nt, Human
agacuugguguccuuuccc

SEQ ID NO: 2184710 - RNA, 16 nt, Human
agacuucgacucagga

SEQ ID NO: 2184711 - RNA, 20 nt, Human
agacuucgacucaggaucca

SEQ ID NO: 2184712 - RNA, 23 nt, Human
agacuugguguccuuucccucca

SEQ ID NO: 2184713 - RNA, 22 nt, Human
agacuugguguccuuucccucc

SEQ ID NO: 2184714 - RNA, 23 nt, Human
agacucgauucauauugaauaua

SEQ ID NO: 2184715 - RNA, 20 nt, Human
agacucgcgacaaugcaaac

SEQ ID NO: 2184716 - RNA, 15 nt, Human
agacuggguuucuag

SEQ ID NO: 2184717 - RNA, 15 nt, Human
agacugguccugugu

SEQ ID NO: 2184718 - RNA, 17 nt, Human
agacugguccugugugc

SEQ ID NO: 2184719 - RNA, 18 nt, Human
agacugguccugugugca

SEQ ID NO: 2184720 - RNA, 16 nt, Human
agacuguacaaaguag

SEQ ID NO: 2184721 - RNA, 15 nt, Human
agacuguacaaagua

SEQ ID NO: 2184722 - RNA, 14 nt, Human
agacuguacaaagu

SEQ ID NO: 2184723 - RNA, 22 nt, Human
agacuguaggaagaguagcauu

SEQ ID NO: 2184724 - RNA, 21 nt, Human
agacugucagcuuccaaacau

SEQ ID NO: 2184725 - RNA, 23 nt, Human
agacuguuuuucagggagguggc

SEQ ID NO: 2184726 - RNA, 17 nt, Human
agacuuaauagaaacau

SEQ ID NO: 2184727 - RNA, 18 nt, Human
agacuguagccuggauau

SEQ ID NO: 2184728 - RNA, 20 nt, Human
agacuguaggaagaguagca

SEQ ID NO: 2184729 - RNA, 23 nt, Human
agacuuaauagaaacauugaaga

SEQ ID NO: 2184730 - RNA, 15 nt, Human
agacuuaccaggaag

SEQ ID NO: 2184731 - RNA, 16 nt, Human
agacuuagggcaccag

SEQ ID NO: 2184732 - RNA, 19 nt, Human
agacuuacuuuacucauuu

SEQ ID NO: 2184733 - RNA, 20 nt, Human
agacuuacuuuacucauuuu

SEQ ID NO: 2184734 - RNA, 17 nt, Human
agacuucauuuuuccua

SEQ ID NO: 2184735 - RNA, 19 nt, Human
agacuuccaaaccugacag

SEQ ID NO: 2184736 - RNA, 20 nt, Human
agacuuccaaaccugacaga

SEQ ID NO: 2184737 - RNA, 18 nt, Human
agacuuaguauauuuucu

SEQ ID NO: 2184738 - RNA, 21 nt, Human
agacuuacuuuacucauuuuu

SEQ ID NO: 2184739 - RNA, 17 nt, Human
agacuuagggcaccagg

SEQ ID NO: 2184740 - RNA, 22 nt, Human
agacuuaguauauuuucuuuuc

SEQ ID NO: 2184741 - RNA, 19 nt, Human
agacuuaguauauuuucuu

SEQ ID NO: 2184742 - RNA, 21 nt, Human
agacuuccaaaccugacagau

SEQ ID NO: 2184743 - RNA, 19 nt, Human
agacuucccugaauguauu

SEQ ID NO: 2184744 - RNA, 15 nt, Human
agacuucccugaaug

SEQ ID NO: 2184745 - RNA, 16 nt, Human
agacuuccuugagaca

SEQ ID NO: 2184746 - RNA, 14 nt, Human
agacuuccuugaga

SEQ ID NO: 2184747 - RNA, 14 nt, Human
ucuuacaaacaugu

SEQ ID NO: 2184748 - RNA, 20 nt, Human
ucuuaauuuugguuguauuc

SEQ ID NO: 2184749 - RNA, 21 nt, Human
ucuuaauuuugguuguauucu

SEQ ID NO: 2184750 - RNA, 19 nt, Human
ucuuacaauaauucuauga

SEQ ID NO: 2184751 - RNA, 23 nt, Human
ucuuaauuuaaucuuuuuuaugu

SEQ ID NO: 2184752 - RNA, 17 nt, Human
ucuuaauuuugguugua

SEQ ID NO: 2184753 - RNA, 19 nt, Human
ucuuaauuuugguuguauu

SEQ ID NO: 2184754 - RNA, 23 nt, Human
ucuuaaugaaguuugaauguuaa

SEQ ID NO: 2184755 - RNA, 21 nt, Human
ucuuaaugaaguuugaauguu

SEQ ID NO: 2184756 - RNA, 22 nt, Human
ucuuaaugaaguuugaauguua

SEQ ID NO: 2184757 - RNA, 21 nt, Human
ucuuaaucuuuucacaaauaa

SEQ ID NO: 2184758 - RNA, 22 nt, Human
ucuuaaucuuuucacaaauaaa

SEQ ID NO: 2184759 - RNA, 15 nt, Human
ucuuaaugaaguuug

SEQ ID NO: 2184760 - RNA, 16 nt, Human
ucuuaaugaaguuuga

SEQ ID NO: 2184761 - RNA, 17 nt, Human
ucuuaaugaaguuugaa

SEQ ID NO: 2184762 - RNA, 18 nt, Human
ucuuaaugaaguuugaau

SEQ ID NO: 2184763 - RNA, 19 nt, Human
ucuuaaugaaguuugaaug

SEQ ID NO: 2184764 - RNA, 20 nt, Human
ucuuaaugaaguuugaaugu

SEQ ID NO: 2184765 - RNA, 20 nt, Human
agacaguugggugagaacaa

SEQ ID NO: 2184766 - RNA, 14 nt, Human
agacaguucaagaa

SEQ ID NO: 2184767 - RNA, 15 nt, Human
agacagugggaaaua

SEQ ID NO: 2184768 - RNA, 19 nt, Human
ucuuaaucuuuucacaaau

SEQ ID NO: 2184769 - RNA, 20 nt, Human
ucuuaaucuuuucacaaaua

SEQ ID NO: 2184770 - RNA, 15 nt, Human
agacaguucaagaaa

SEQ ID NO: 2184771 - RNA, 13 nt, Human
agacaguuucuua

SEQ ID NO: 2184772 - RNA, 14 nt, Human
agacaguuucuuag

SEQ ID NO: 2184773 - RNA, 17 nt, Human
agacagucaccccagga

SEQ ID NO: 2184774 - RNA, 15 nt, Human
agacaguccagccug

SEQ ID NO: 2184775 - RNA, 12 nt, Human
agacagugaucu

SEQ ID NO: 2184776 - RNA, 17 nt, Human
agacaguccagccugga

SEQ ID NO: 2184777 - RNA, 13 nt, Human
agacagugggaaa

SEQ ID NO: 2184778 - RNA, 14 nt, Human
agacagugggaaau

SEQ ID NO: 2184779 - RNA, 21 nt, Human
agacagugaucuccauauguu

SEQ ID NO: 2184780 - RNA, 20 nt, Human
agacagugaucuccauaugu

SEQ ID NO: 2184781 - RNA, 18 nt, Human
agacagugaucuccauau

SEQ ID NO: 2184782 - RNA, 17 nt, Human
agacagugaucuccaua

SEQ ID NO: 2184783 - RNA, 15 nt, Human
agacagugaucucca

SEQ ID NO: 2184784 - RNA, 13 nt, Human
agacagucccugc

SEQ ID NO: 2184785 - RNA, 14 nt, Human
agacagucccugcc

SEQ ID NO: 2184786 - RNA, 19 nt, Human
agacagucccugccaaugg

SEQ ID NO: 2184787 - RNA, 20 nt, Human
agacagucaaggaguggcuu

SEQ ID NO: 2184788 - RNA, 17 nt, Human
agacagucaaggagugg

SEQ ID NO: 2184789 - RNA, 18 nt, Human
agacagaagcugaagugc

SEQ ID NO: 2184790 - RNA, 22 nt, Human
agacaguaugagucaaugugca

SEQ ID NO: 2184791 - RNA, 12 nt, Human
agacagucccug

SEQ ID NO: 2184792 - RNA, 15 nt, Human
agacagcugccuggg

SEQ ID NO: 2184793 - RNA, 16 nt, Human
agacagcugccuggga

SEQ ID NO: 2184794 - RNA, 12 nt, Human
ucuuagauguau

SEQ ID NO: 2184795 - RNA, 23 nt, Human
ucuuagaugcaguucugaagaag

SEQ ID NO: 2184796 - RNA, 22 nt, Human
ucuuacuuuccuuuccccagcc

SEQ ID NO: 2184797 - RNA, 23 nt, Human
ucuuacuuuccuuuccccagccc

SEQ ID NO: 2184798 - RNA, 18 nt, Human
ucuuauguaugugaaagu

SEQ ID NO: 2184799 - RNA, 18 nt, Human
ucuuagauggauucucca

SEQ ID NO: 2184800 - RNA, 13 nt, Human
ucuuagaaaugaa

SEQ ID NO: 2184801 - RNA, 22 nt, Human
ucuuagauggauucuccacuca

SEQ ID NO: 2184802 - RNA, 17 nt, Human
ucuuauuagggagaaaa

SEQ ID NO: 2184803 - RNA, 22 nt, Human
ucuuauuagaacaggcaaguga

SEQ ID NO: 2184804 - RNA, 23 nt, Human
ucuuacugaagguaaaauugaaa

SEQ ID NO: 2184805 - RNA, 13 nt, Human
ucuuacugcaaau

SEQ ID NO: 2184806 - RNA, 14 nt, Human
ucuuacugcaaaug

SEQ ID NO: 2184807 - RNA, 15 nt, Human
ucuuacugcaaaugu

SEQ ID NO: 2184808 - RNA, 13 nt, Human
ucuuacugaaggu

SEQ ID NO: 2184809 - RNA, 18 nt, Human
ucuuacuguaccuguucc

SEQ ID NO: 2184810 - RNA, 22 nt, Human
ucuuacugcaaaugucaucaga

SEQ ID NO: 2184811 - RNA, 19 nt, Human
ucuuacugucuuuuuucua

SEQ ID NO: 2184812 - RNA, 16 nt, Human
ucuuacuaaacauuuu

SEQ ID NO: 2184813 - RNA, 24 nt, Human
ucuuacuaaacauuuuguuauugg

SEQ ID NO: 2184814 - RNA, 19 nt, Human
ucuuacgcccaacccuucc

SEQ ID NO: 2184815 - RNA, 18 nt, Human
ucuuacgauggcacccag

SEQ ID NO: 2184816 - RNA, 14 nt, Human
ucuuacuaaacauu

SEQ ID NO: 2184817 - RNA, 21 nt, Human
ucuuaccuguaugucuccagu

SEQ ID NO: 2184818 - RNA, 23 nt, Human
ucuuaccuguaugucuccaguau

SEQ ID NO: 2184819 - RNA, 14 nt, Human
ucuuacauguuuuc

SEQ ID NO: 2184820 - RNA, 17 nt, Human
ucuuacaggcacaaaau

SEQ ID NO: 2184821 - RNA, 19 nt, Human
ucuuacaggcacaaaauga

SEQ ID NO: 2184822 - RNA, 15 nt, Human
ucuuacauguuuucu

SEQ ID NO: 2184823 - RNA, 15 nt, Human
agacacuugccuucu

SEQ ID NO: 2184824 - RNA, 12 nt, Human
agacagaaaaaa

SEQ ID NO: 2184825 - RNA, 21 nt, Human
agacacggagcccagcccucc

SEQ ID NO: 2184826 - RNA, 16 nt, Human
agacacgcucuucuau

SEQ ID NO: 2184827 - RNA, 13 nt, Human
agacagcugccug

SEQ ID NO: 2184828 - RNA, 14 nt, Human
agacagcugccugg

SEQ ID NO: 2184829 - RNA, 18 nt, Human
agacagaaccuuguuauu

SEQ ID NO: 2184830 - RNA, 17 nt, Human
agacagaaccccuacau

SEQ ID NO: 2184831 - RNA, 17 nt, Human
agacagaaccuuguuau

SEQ ID NO: 2184832 - RNA, 15 nt, Human
agacagaagcaggcu

SEQ ID NO: 2184833 - RNA, 16 nt, Human
agacagaagcaggcug

SEQ ID NO: 2184834 - RNA, 17 nt, Human
agacagaagcaggcugg

SEQ ID NO: 2184835 - RNA, 19 nt, Human
agacagaagcaggcuggag

SEQ ID NO: 2184836 - RNA, 20 nt, Human
agacagaagcaggcuggagg

SEQ ID NO: 2184837 - RNA, 17 nt, Human
agacacagaagaggcug

SEQ ID NO: 2184838 - RNA, 13 nt, Human
agacacaggcccu

SEQ ID NO: 2184839 - RNA, 18 nt, Human
agacacagaagaggcugg

SEQ ID NO: 2184840 - RNA, 23 nt, Human
agacacaggcccggcuccaggcu

SEQ ID NO: 2184841 - RNA, 21 nt, Human
agacacauguccaagaagccc

SEQ ID NO: 2184842 - RNA, 22 nt, Human
agacacauguccaagaagccca

SEQ ID NO: 2184843 - RNA, 19 nt, Human
agacaccuugacagggcac

SEQ ID NO: 2184844 - RNA, 24 nt, Human
agacacauguccaagaagcccagg

SEQ ID NO: 2184845 - RNA, 22 nt, Human
agacaccuugacagggcacacc

SEQ ID NO: 2184846 - RNA, 22 nt, Human
agacaccuuggacauccuccuc

SEQ ID NO: 2184847 - RNA, 15 nt, Human
agacacagggacuug

SEQ ID NO: 2184848 - RNA, 22 nt, Human
agaauucugcuaccucacuggg

SEQ ID NO: 2184849 - RNA, 20 nt, Human
agaauucugcuaccucacug

SEQ ID NO: 2184850 - RNA, 13 nt, Human
agaauucugcuac

SEQ ID NO: 2184851 - RNA, 17 nt, Human
agaauucucuuauccaa

SEQ ID NO: 2184852 - RNA, 19 nt, Human
agaauucucuaguuugauu

SEQ ID NO: 2184853 - RNA, 18 nt, Human
agaauucucuaguuugau

SEQ ID NO: 2184854 - RNA, 14 nt, Human
agacacaagccuuc

SEQ ID NO: 2184855 - RNA, 13 nt, Human
agacacaagccuu

SEQ ID NO: 2184856 - RNA, 19 nt, Human
agacacaacuauuuuucca

SEQ ID NO: 2184857 - RNA, 20 nt, Human
agacacaacuauuuuuccaa

SEQ ID NO: 2184858 - RNA, 19 nt, Human
agacacaggcccggcucca

SEQ ID NO: 2184859 - RNA, 20 nt, Human
agacacaggcccggcuccag

SEQ ID NO: 2184860 - RNA, 21 nt, Human
agacacaggcccggcuccagg

SEQ ID NO: 2184861 - RNA, 22 nt, Human
agacacaggcccggcuccaggc

SEQ ID NO: 2184862 - RNA, 18 nt, Human
agacacacgcacacacac

SEQ ID NO: 2184863 - RNA, 17 nt, Human
agacacacgcacacaca

SEQ ID NO: 2184864 - RNA, 11 nt, Human
agacacacaca

SEQ ID NO: 2184865 - RNA, 10 nt, Human
agacacacac

SEQ ID NO: 2184866 - RNA, 16 nt, Human
agacacacugaagaag

SEQ ID NO: 2184867 - RNA, 17 nt, Human
agacacaggcccggcuc

SEQ ID NO: 2184868 - RNA, 17 nt, Human
agacacacugaagaagc

SEQ ID NO: 2184869 - RNA, 16 nt, Human
ucuguauauuuuggga

SEQ ID NO: 2184870 - RNA, 15 nt, Human
ucuguauauuuuggg

SEQ ID NO: 2184871 - RNA, 15 nt, Human
ucuguauauacuuuu

SEQ ID NO: 2184872 - RNA, 15 nt, Human
ucuguauauacaaua

SEQ ID NO: 2184873 - RNA, 17 nt, Human
ucuguagaaaugguugu

SEQ ID NO: 2184874 - RNA, 21 nt, Human
ucuguagaaaugguuguauua

SEQ ID NO: 2184875 - RNA, 12 nt, Human
ucuguagaaaug

SEQ ID NO: 2184876 - RNA, 13 nt, Human
ucuguaucucucu

SEQ ID NO: 2184877 - RNA, 21 nt, Human
ucuguaucggagacagugauc

SEQ ID NO: 2184878 - RNA, 12 nt, Human
ucuguaucucuc

SEQ ID NO: 2184879 - RNA, 19 nt, Human
ucuguaucggagacaguga

SEQ ID NO: 2184880 - RNA, 18 nt, Human
ucuguaucggagacagug

SEQ ID NO: 2184881 - RNA, 20 nt, Human
ucuguaucaggacccagagg

SEQ ID NO: 2184882 - RNA, 15 nt, Human
ucuguauuuaauuuu

SEQ ID NO: 2184883 - RNA, 20 nt, Human
ucugguagauuuuuaacgaa

SEQ ID NO: 2184884 - RNA, 18 nt, Human
ucugguagauagaaauaa

SEQ ID NO: 2184885 - RNA, 16 nt, Human
ucugguagauagaaau

SEQ ID NO: 2184886 - RNA, 18 nt, Human
ucuguacgucugacaggc

SEQ ID NO: 2184887 - RNA, 15 nt, Human
ucugugaauucagau

SEQ ID NO: 2184888 - RNA, 16 nt, Human
ucugugaauaagccau

SEQ ID NO: 2184889 - RNA, 18 nt, Human
ucugugaccaaugucuug

SEQ ID NO: 2184890 - RNA, 16 nt, Human
ucugugaccaaugucu

SEQ ID NO: 2184891 - RNA, 13 nt, Human
ucugugaauaagc

SEQ ID NO: 2184892 - RNA, 12 nt, Human
ucugugaauaag

SEQ ID NO: 2184893 - RNA, 11 nt, Human
ucugugaauaa

SEQ ID NO: 2184894 - RNA, 20 nt, Human
ucugucccgggguccugugg

SEQ ID NO: 2184895 - RNA, 19 nt, Human
ucugucccgggguccugug

SEQ ID NO: 2184896 - RNA, 21 nt, Human
ucuguccccuucucucaucuc

SEQ ID NO: 2184897 - RNA, 22 nt, Human
ucuguccccuucucucaucucu

SEQ ID NO: 2184898 - RNA, 20 nt, Human
ucuguccagggcccugagcu

SEQ ID NO: 2184899 - RNA, 19 nt, Human
ucuguccagggcccugagc

SEQ ID NO: 2184900 - RNA, 17 nt, Human
ucuguccagggcccuga

SEQ ID NO: 2184901 - RNA, 13 nt, Human
ucuguccagggcc

SEQ ID NO: 2184902 - RNA, 23 nt, Human
ucuguauuuaugugugaggagcu

SEQ ID NO: 2184903 - RNA, 20 nt, Human
ucuguauuuccccaacaugu

SEQ ID NO: 2184904 - RNA, 23 nt, Human
ucuguauuuccccaacauguaau

SEQ ID NO: 2184905 - RNA, 13 nt, Human
ucugucccagguu

SEQ ID NO: 2184906 - RNA, 17 nt, Human
ucugucccacuuggcau

SEQ ID NO: 2184907 - RNA, 21 nt, Human
ucugucccacuuggcaucagc

SEQ ID NO: 2184908 - RNA, 15 nt, Human
ucuguccccuucucu

SEQ ID NO: 2184909 - RNA, 19 nt, Human
ucuguccccuucucucauc

SEQ ID NO: 2184910 - RNA, 20 nt, Human
ucuguccccuucucucaucu

SEQ ID NO: 2184911 - RNA, 18 nt, Human
ucuguucuuuaauuuauu

SEQ ID NO: 2184912 - RNA, 13 nt, Human
ucuguucuugaag

SEQ ID NO: 2184913 - RNA, 14 nt, Human
ucuguucuugcuac

SEQ ID NO: 2184914 - RNA, 23 nt, Human
ucuguuuagauaauacaccacua

SEQ ID NO: 2184915 - RNA, 19 nt, Human
ucuguuuagauaauacacc

SEQ ID NO: 2184916 - RNA, 16 nt, Human
ucuguuuagauaauac

SEQ ID NO: 2184917 - RNA, 19 nt, Human
ucuguucugcacacagcac

SEQ ID NO: 2184918 - RNA, 21 nt, Human
ucugugggugacccagguccu

SEQ ID NO: 2184919 - RNA, 12 nt, Human
ucuguucugugg

SEQ ID NO: 2184920 - RNA, 14 nt, Human
ucuguucuguggaa

SEQ ID NO: 2184921 - RNA, 23 nt, Human
ucuguucuguggaaaguguaaag

SEQ ID NO: 2184922 - RNA, 15 nt, Human
ucuguucuguggaaa

SEQ ID NO: 2184923 - RNA, 16 nt, Human
ucuguucuguggaaag

SEQ ID NO: 2184924 - RNA, 19 nt, Human
ucuguucuguggaaagugu

SEQ ID NO: 2184925 - RNA, 22 nt, Human
ucuguucuguggaaaguguaaa

SEQ ID NO: 2184926 - RNA, 18 nt, Human
ucuguucugcacacagca

SEQ ID NO: 2184927 - RNA, 17 nt, Human
ucuguucugcacacagc

SEQ ID NO: 2184928 - RNA, 19 nt, Human
ucugugggugacccagguc

SEQ ID NO: 2184929 - RNA, 21 nt, Human
ucugugggcugcacucugugc

SEQ ID NO: 2184930 - RNA, 23 nt, Human
ucugugggcugcacucugugccc

SEQ ID NO: 2184931 - RNA, 15 nt, Human
ucugugggcugcacu

SEQ ID NO: 2184932 - RNA, 16 nt, Human
ucugugggcugcacuc

SEQ ID NO: 2184933 - RNA, 19 nt, Human
ucugugggcugcacucugu

SEQ ID NO: 2184934 - RNA, 20 nt, Human
ucugugggcugcacucugug

SEQ ID NO: 2184935 - RNA, 15 nt, Human
ucugugcccaugggc

SEQ ID NO: 2184936 - RNA, 22 nt, Human
ucugugcaugguggcaccagcg

SEQ ID NO: 2184937 - RNA, 19 nt, Human
ucugugcacgcaguggccu

SEQ ID NO: 2184938 - RNA, 21 nt, Human
ucugugcacgcaguggccuuc

SEQ ID NO: 2184939 - RNA, 17 nt, Human
ucugugcaugguggcac

SEQ ID NO: 2184940 - RNA, 19 nt, Human
ucugugcaugguggcacca

SEQ ID NO: 2184941 - RNA, 19 nt, Human
ucugugaccaaugucuuga

SEQ ID NO: 2184942 - RNA, 13 nt, Human
ucugugaccucag

SEQ ID NO: 2184943 - RNA, 14 nt, Human
ucugugaccucagg

SEQ ID NO: 2184944 - RNA, 15 nt, Human
ucugugaccucaggc

SEQ ID NO: 2184945 - RNA, 16 nt, Human
ucugugaccucaggca

SEQ ID NO: 2184946 - RNA, 23 nt, Human
ucugugaccucaggcacuagccu

SEQ ID NO: 2184947 - RNA, 16 nt, Human
ucugugaugauccuca

SEQ ID NO: 2184948 - RNA, 17 nt, Human
ucugugccccaugccug

SEQ ID NO: 2184949 - RNA, 12 nt, Human
ucugugcugugu

SEQ ID NO: 2184950 - RNA, 15 nt, Human
ucugugccccaugcc

SEQ ID NO: 2184951 - RNA, 14 nt, Human
ucugugcuuuccag

SEQ ID NO: 2184952 - RNA, 16 nt, Human
ucugugcuuuccagcu

SEQ ID NO: 2184953 - RNA, 17 nt, Human
ucugugcuuuccagcuc

SEQ ID NO: 2184954 - RNA, 14 nt, Human
ucugugccccaugc

SEQ ID NO: 2184955 - RNA, 21 nt, Human
ucugugcccaugggcacugcu

SEQ ID NO: 2184956 - RNA, 22 nt, Human
ucugugcccaugggcacugcug

SEQ ID NO: 2184957 - RNA, 16 nt, Human
ucugugcccaugggca

SEQ ID NO: 2184958 - RNA, 19 nt, Human
ucugugcccaugggcacug

SEQ ID NO: 2184959 - RNA, 20 nt, Human
ucugugcccaugggcacugc

SEQ ID NO: 2184960 - RNA, 22 nt, Human
ucuguggaccacugcaugagcu

SEQ ID NO: 2184961 - RNA, 23 nt, Human
ucugugggaugggaugguggagg

SEQ ID NO: 2184962 - RNA, 12 nt, Human
ucugugggcugc

SEQ ID NO: 2184963 - RNA, 21 nt, Human
ucugugcuuuccagcucaccc

SEQ ID NO: 2184964 - RNA, 20 nt, Human
ucugugcuuugacucaccug

SEQ ID NO: 2184965 - RNA, 22 nt, Human
ucugugcuuugacucaccuguu

SEQ ID NO: 2184966 - RNA, 14 nt, Human
ucuguggaaagugu

SEQ ID NO: 2184967 - RNA, 15 nt, Human
ucuguggaaagugua

SEQ ID NO: 2184968 - RNA, 16 nt, Human
ucuguggaaaguguaa

SEQ ID NO: 2184969 - RNA, 20 nt, Human
ucuguggaaaguguaaagca

SEQ ID NO: 2184970 - RNA, 22 nt, Human
ucuguggaaaguguaaagcauu

SEQ ID NO: 2184971 - RNA, 19 nt, Human
agaauucccucucucugac

SEQ ID NO: 2184972 - RNA, 20 nt, Human
agaauucccucucucugacu

SEQ ID NO: 2184973 - RNA, 22 nt, Human
agaauucccucucucugacucu

SEQ ID NO: 2184974 - RNA, 20 nt, Human
agaauuccaggguauggcca

SEQ ID NO: 2184975 - RNA, 20 nt, Human
agaauuauaauuaguuccuc

SEQ ID NO: 2184976 - RNA, 23 nt, Human
agaauucuagugcugcugaagau

SEQ ID NO: 2184977 - RNA, 14 nt, Human
agaauucuagugcu

SEQ ID NO: 2184978 - RNA, 18 nt, Human
agaauucuagugcugcug

SEQ ID NO: 2184979 - RNA, 12 nt, Human
agaauuccuuca

SEQ ID NO: 2184980 - RNA, 18 nt, Human
agaauuccuucaggguga

SEQ ID NO: 2184981 - RNA, 20 nt, Human
agaauuccuucagggugaug

SEQ ID NO: 2184982 - RNA, 20 nt, Human
agaauucucagaaucucaaa

SEQ ID NO: 2184983 - RNA, 13 nt, Human
ucugggcuccaga

SEQ ID NO: 2184984 - RNA, 14 nt, Human
agaauucucuaguu

SEQ ID NO: 2184985 - RNA, 22 nt, Human
ucugggcugcuacccagaaauc

SEQ ID NO: 2184986 - RNA, 17 nt, Human
ucugggcugcuacccag

SEQ ID NO: 2184987 - RNA, 19 nt, Human
ucugggcugucuauucuag

SEQ ID NO: 2184988 - RNA, 17 nt, Human
ucugggguuaugauggc

SEQ ID NO: 2184989 - RNA, 22 nt, Human
ucuggggucuuuuuaugcauuu

SEQ ID NO: 2184990 - RNA, 19 nt, Human
ucugggcuuggggcuuccu

SEQ ID NO: 2184991 - RNA, 21 nt, Human
ucugggcuuggggcuuccuaa

SEQ ID NO: 2184992 - RNA, 23 nt, Human
ucuggguuccuuccucugagccu

SEQ ID NO: 2184993 - RNA, 15 nt, Human
ucugguacucuccua

SEQ ID NO: 2184994 - RNA, 21 nt, Human
ucugguaauauugacuuguau

SEQ ID NO: 2184995 - RNA, 22 nt, Human
ucugguaauauugacuuguaua

SEQ ID NO: 2184996 - RNA, 23 nt, Human
ucugggguucagccccuccucug

SEQ ID NO: 2184997 - RNA, 15 nt, Human
ucugggucagugguc

SEQ ID NO: 2184998 - RNA, 22 nt, Human
ucuggguuccuuccucugagcc

SEQ ID NO: 2184999 - RNA, 19 nt, Human
ucugggguucagccccucc

SEQ ID NO: 2185000 - RNA, 18 nt, Human
ucugggguucagccccuc

SEQ ID NO: 2185001 - RNA, 17 nt, Human
ucugggguucagccccu

SEQ ID NO: 2185002 - RNA, 16 nt, Human
ucugggguucagcccc

SEQ ID NO: 2185003 - RNA, 22 nt, Human
ucugggguucagccccuccucu

SEQ ID NO: 2185004 - RNA, 21 nt, Human
ucugggguucagccccuccuc

SEQ ID NO: 2185005 - RNA, 18 nt, Human
ucuggguagcuguaaggc

SEQ ID NO: 2185006 - RNA, 19 nt, Human
agaauguuuuacugugaaa

SEQ ID NO: 2185007 - RNA, 19 nt, Human
agaauuaguggcacuugcu

SEQ ID NO: 2185008 - RNA, 18 nt, Human
agaauguuguauucagug

SEQ ID NO: 2185009 - RNA, 18 nt, Human
agaauguuuuacugugaa

SEQ ID NO: 2185010 - RNA, 19 nt, Human
agaauguuguauucaguga

SEQ ID NO: 2185011 - RNA, 15 nt, Human
agaauguuguauuca

SEQ ID NO: 2185012 - RNA, 15 nt, Human
ucugcaggcagacac

SEQ ID NO: 2185013 - RNA, 17 nt, Human
agaauguguuuucugaa

SEQ ID NO: 2185014 - RNA, 18 nt, Human
agaauguguuuucugaau

SEQ ID NO: 2185015 - RNA, 21 nt, Human
agaauguguuuaaacuugguu

SEQ ID NO: 2185016 - RNA, 19 nt, Human
agaaugucaguauguggaa

SEQ ID NO: 2185017 - RNA, 17 nt, Human
agaaugucaguaugugg

SEQ ID NO: 2185018 - RNA, 14 nt, Human
agaaauuuccagag

SEQ ID NO: 2185019 - RNA, 13 nt, Human
agaaauuuauuuc

SEQ ID NO: 2185020 - RNA, 15 nt, Human
agaaauuuauuuccu

SEQ ID NO: 2185021 - RNA, 23 nt, Human
agaaauuuauuuccuaguucugu

SEQ ID NO: 2185022 - RNA, 23 nt, Human
agaaccccaggguccuguagccc

SEQ ID NO: 2185023 - RNA, 15 nt, Human
agaaauuugauuucu

SEQ ID NO: 2185024 - RNA, 16 nt, Human
agaaauuuccagagaa

SEQ ID NO: 2185025 - RNA, 14 nt, Human
agaaccgagcaaag

SEQ ID NO: 2185026 - RNA, 15 nt, Human
agaaccgagcaaaga

SEQ ID NO: 2185027 - RNA, 16 nt, Human
agaaccgagcaaagau

SEQ ID NO: 2185028 - RNA, 16 nt, Human
agaaugucaguaugug

SEQ ID NO: 2185029 - RNA, 15 nt, Human
agaaugucaguaugu

SEQ ID NO: 2185030 - RNA, 22 nt, Human
agaaccccuggcuccaggccag

SEQ ID NO: 2185031 - RNA, 20 nt, Human
agaacccuuggcuugcccac

SEQ ID NO: 2185032 - RNA, 20 nt, Human
agaacccugcguggggacag

SEQ ID NO: 2185033 - RNA, 19 nt, Human
agaaccccuacaugaaaca

SEQ ID NO: 2185034 - RNA, 17 nt, Human
agaaccccuacaugaaa

SEQ ID NO: 2185035 - RNA, 16 nt, Human
agaaauuugauuucua

SEQ ID NO: 2185036 - RNA, 15 nt, Human
agaaacagagacagg

SEQ ID NO: 2185037 - RNA, 19 nt, Human
agaaacagagacaggccca

SEQ ID NO: 2185038 - RNA, 14 nt, Human
agaaacagagacag

SEQ ID NO: 2185039 - RNA, 20 nt, Human
agaaacaguuaacuuucaga

SEQ ID NO: 2185040 - RNA, 17 nt, Human
agaaaccuuaauaugug

SEQ ID NO: 2185041 - RNA, 16 nt, Human
agaaaccuuauuguac

SEQ ID NO: 2185042 - RNA, 18 nt, Human
agaaaccuuauuguaccu

SEQ ID NO: 2185043 - RNA, 13 nt, Human
agaaacaguuaac

SEQ ID NO: 2185044 - RNA, 13 nt, Human
agaaacagugagu

SEQ ID NO: 2185045 - RNA, 12 nt, Human
agaaacagugag

SEQ ID NO: 2185046 - RNA, 15 nt, Human
agaaacgucuucuaa

SEQ ID NO: 2185047 - RNA, 20 nt, Human
agaaaccuuauuguaccucu

SEQ ID NO: 2185048 - RNA, 18 nt, Human
agaaaccuuuuuaaaaau

SEQ ID NO: 2185049 - RNA, 21 nt, Human
agaaacgucuucuaaacuucc

SEQ ID NO: 2185050 - RNA, 19 nt, Human
agaaacguuuggaacaauc

SEQ ID NO: 2185051 - RNA, 18 nt, Human
agaaacgucuucuaaacu

SEQ ID NO: 2185052 - RNA, 16 nt, Human
agaaacgucuucuaaa

SEQ ID NO: 2185053 - RNA, 14 nt, Human
agaaacuuccaaau

SEQ ID NO: 2185054 - RNA, 16 nt, Human
agaaacucuacauaau

SEQ ID NO: 2185055 - RNA, 22 nt, Human
agaaacucacccccaaggggca

SEQ ID NO: 2185056 - RNA, 15 nt, Human
agaaacucaccccca

SEQ ID NO: 2185057 - RNA, 23 nt, Human
agaaacucacccccaaggggcag

SEQ ID NO: 2185058 - RNA, 20 nt, Human
agaaacguuuggaacaaucu

SEQ ID NO: 2185059 - RNA, 21 nt, Human
agaaacguuuggaacaaucua

SEQ ID NO: 2185060 - RNA, 20 nt, Human
agaaaaagcaauaaccucaa

SEQ ID NO: 2185061 - RNA, 17 nt, Human
agaaaaaggaugcacag

SEQ ID NO: 2185062 - RNA, 21 nt, Human
agaaaacuuguauuaugugug

SEQ ID NO: 2185063 - RNA, 19 nt, Human
agaaaacuuguauuaugug

SEQ ID NO: 2185064 - RNA, 23 nt, Human
agaaacacgaacuuuagcugcau

SEQ ID NO: 2185065 - RNA, 17 nt, Human
agaaacacccucacacu

SEQ ID NO: 2185066 - RNA, 17 nt, Human
agaaaagacaugaauau

SEQ ID NO: 2185067 - RNA, 18 nt, Human
agaaaagaaaaaaaaaga

SEQ ID NO: 2185068 - RNA, 17 nt, Human
agaaaagaaaaaaaaag

SEQ ID NO: 2185069 - RNA, 20 nt, Human
agaaaaagcuccuguccucc

SEQ ID NO: 2185070 - RNA, 9 nt, Human
agaaaagaa

SEQ ID NO: 2185071 - RNA, 13 nt, Human
agaaaagaaaaaa

SEQ ID NO: 2185072 - RNA, 12 nt, Human
agaaaagaaaaa

SEQ ID NO: 2185073 - RNA, 11 nt, Human
agaaaagaaaa

SEQ ID NO: 2185074 - RNA, 10 nt, Human
agaaaagaaa

SEQ ID NO: 2185075 - RNA, 20 nt, Human
ucucuuuaaucuucaguuuu

SEQ ID NO: 2185076 - RNA, 17 nt, Human
ucucuuuaaucuucagu

SEQ ID NO: 2185077 - RNA, 16 nt, Human
ucucuuuaaucuucag

SEQ ID NO: 2185078 - RNA, 13 nt, Human
agaaaaagaaaaa

SEQ ID NO: 2185079 - RNA, 20 nt, Human
ucucuuuaaugucacaggca

SEQ ID NO: 2185080 - RNA, 21 nt, Human
ucucuuuaaugucacaggcag

SEQ ID NO: 2185081 - RNA, 22 nt, Human
ucucuugagggagcuuagccaa

SEQ ID NO: 2185082 - RNA, 13 nt, Human
ucucuugagggag

SEQ ID NO: 2185083 - RNA, 14 nt, Human
ucucuugaguuugu

SEQ ID NO: 2185084 - RNA, 12 nt, Human
ucucuugauuuu

SEQ ID NO: 2185085 - RNA, 15 nt, Human
ucucuugaguuuguc

SEQ ID NO: 2185086 - RNA, 17 nt, Human
ucucuugcacccgccuc

SEQ ID NO: 2185087 - RNA, 22 nt, Human
ucucuugcacccgccucucccg

SEQ ID NO: 2185088 - RNA, 12 nt, Human
ucucuugcaccc

SEQ ID NO: 2185089 - RNA, 13 nt, Human
ucucuugcacccg

SEQ ID NO: 2185090 - RNA, 14 nt, Human
ucucuugcacccgc

SEQ ID NO: 2185091 - RNA, 15 nt, Human
ucucuugcacccgcc

SEQ ID NO: 2185092 - RNA, 23 nt, Human
ucucuugggaacugaacucacuu

SEQ ID NO: 2185093 - RNA, 16 nt, Human
ucucuugggaacugaa

SEQ ID NO: 2185094 - RNA, 17 nt, Human
ucucuugagccugggag

SEQ ID NO: 2185095 - RNA, 23 nt, Human
ucucuggccuucggccuccaucc

SEQ ID NO: 2185096 - RNA, 22 nt, Human
ucucuggccuucggccuccauc

SEQ ID NO: 2185097 - RNA, 21 nt, Human
ucucuggccuucggccuccau

SEQ ID NO: 2185098 - RNA, 18 nt, Human
ucucuugaggccaggagu

SEQ ID NO: 2185099 - RNA, 18 nt, Human
ucucuugagccugggagg

SEQ ID NO: 2185100 - RNA, 14 nt, Human
ucucuugauucaua

SEQ ID NO: 2185101 - RNA, 16 nt, Human
ucucuugauucauaau

SEQ ID NO: 2185102 - RNA, 22 nt, Human
ucucuggaaaggggggagcugg

SEQ ID NO: 2185103 - RNA, 19 nt, Human
ucucugcuugagucagguu

SEQ ID NO: 2185104 - RNA, 18 nt, Human
ucucugcuugagucaggu

SEQ ID NO: 2185105 - RNA, 11 nt, Human
ucucugcugua

SEQ ID NO: 2185106 - RNA, 15 nt, Human
ucucuggaauuugaa

SEQ ID NO: 2185107 - RNA, 19 nt, Human
ucucugcuggcccagccaa

SEQ ID NO: 2185108 - RNA, 16 nt, Human
ucucugcuggcccagc

SEQ ID NO: 2185109 - RNA, 15 nt, Human
ucucugcuggcccag

SEQ ID NO: 2185110 - RNA, 14 nt, Human
ucucugcuggccca

SEQ ID NO: 2185111 - RNA, 12 nt, Human
ucucugcuggcc

SEQ ID NO: 2185112 - RNA, 12 nt, Human
ucucugcugccg

SEQ ID NO: 2185113 - RNA, 13 nt, Human
ucucugcugccgc

SEQ ID NO: 2185114 - RNA, 13 nt, Human
ucucugcugaagg

SEQ ID NO: 2185115 - RNA, 11 nt, Human
ucucugcugcc

SEQ ID NO: 2185116 - RNA, 23 nt, Human
ucucugcucugcgugucaccugu

SEQ ID NO: 2185117 - RNA, 19 nt, Human
ucucuggcccuucuugccu

SEQ ID NO: 2185118 - RNA, 11 nt, Human
ucucuggccuc

SEQ ID NO: 2185119 - RNA, 14 nt, Human
ucucuggaugccug

SEQ ID NO: 2185120 - RNA, 15 nt, Human
ucucuggccccaagg

SEQ ID NO: 2185121 - RNA, 15 nt, Human
ucucuggccucccac

SEQ ID NO: 2185122 - RNA, 17 nt, Human
ucucuggccucccaccc

SEQ ID NO: 2185123 - RNA, 18 nt, Human
ucucuggccucccacccg

SEQ ID NO: 2185124 - RNA, 19 nt, Human
ucucuggccucccacccga

SEQ ID NO: 2185125 - RNA, 12 nt, Human
ucucuggccuuc

SEQ ID NO: 2185126 - RNA, 19 nt, Human
ucucuggaauuugaaacac

SEQ ID NO: 2185127 - RNA, 18 nt, Human
ucucuggagccaagucca

SEQ ID NO: 2185128 - RNA, 20 nt, Human
ucucuggagccaaguccaga

SEQ ID NO: 2185129 - RNA, 22 nt, Human
ucucuggagccaaguccagauu

SEQ ID NO: 2185130 - RNA, 22 nt, Human
ucucuggagugagcucuguuuc

SEQ ID NO: 2185131 - RNA, 15 nt, Human
ucucuggaugccuga

SEQ ID NO: 2185132 - RNA, 13 nt, Human
ucucuccucccca

SEQ ID NO: 2185133 - RNA, 20 nt, Human
ucucucccucccuuugaaau

SEQ ID NO: 2185134 - RNA, 21 nt, Human
ucucucccuccccugccauuu

SEQ ID NO: 2185135 - RNA, 14 nt, Human
ucucuccuguaccu

SEQ ID NO: 2185136 - RNA, 11 nt, Human
ucucuccuccu

SEQ ID NO: 2185137 - RNA, 17 nt, Human
ucucuccuguaccucuu

SEQ ID NO: 2185138 - RNA, 16 nt, Human
ucucuccuguaccucu

SEQ ID NO: 2185139 - RNA, 11 nt, Human
ucucugcccuc

SEQ ID NO: 2185140 - RNA, 15 nt, Human
ucucugcccuccaag

SEQ ID NO: 2185141 - RNA, 16 nt, Human
ucucugcccuccaaga

SEQ ID NO: 2185142 - RNA, 17 nt, Human
ucucugcccuccaagac

SEQ ID NO: 2185143 - RNA, 20 nt, Human
ucucucaauaugcuuacaaa

SEQ ID NO: 2185144 - RNA, 13 nt, Human
ucucucacuccuu

SEQ ID NO: 2185145 - RNA, 15 nt, Human
ucucucacuccuuga

SEQ ID NO: 2185146 - RNA, 18 nt, Human
acuuugaccucugcagca

SEQ ID NO: 2185147 - RNA, 16 nt, Human
ucucucaauaugcuua

SEQ ID NO: 2185148 - RNA, 18 nt, Human
acuuucucaguuuucaua

SEQ ID NO: 2185149 - RNA, 22 nt, Human
acuuucuauagcagauugugua

SEQ ID NO: 2185150 - RNA, 19 nt, Human
acuuucucuucauacuuuu

SEQ ID NO: 2185151 - RNA, 16 nt, Human
acuuugaccucugcag

SEQ ID NO: 2185152 - RNA, 15 nt, Human
acuuugaccucugca

SEQ ID NO: 2185153 - RNA, 17 nt, Human
ucucuccagccccugga

SEQ ID NO: 2185154 - RNA, 16 nt, Human
ucucuccagccccugg

SEQ ID NO: 2185155 - RNA, 18 nt, Human
ucucuccagccccuggau

SEQ ID NO: 2185156 - RNA, 19 nt, Human
ucucuccagccccuggaug

SEQ ID NO: 2185157 - RNA, 22 nt, Human
ucucucaugaaccucaagcugc

SEQ ID NO: 2185158 - RNA, 16 nt, Human
ucucucauugucugug

SEQ ID NO: 2185159 - RNA, 22 nt, Human
ucucucaucucuuagcuccccu

SEQ ID NO: 2185160 - RNA, 12 nt, Human
ucucucaugaac

SEQ ID NO: 2185161 - RNA, 17 nt, Human
ucucucaugaaccucaa

SEQ ID NO: 2185162 - RNA, 15 nt, Human
ucucucaugaaccuc

SEQ ID NO: 2185163 - RNA, 14 nt, Human
ucucucaucucuua

SEQ ID NO: 2185164 - RNA, 19 nt, Human
ucucucaucucuuagcucc

SEQ ID NO: 2185165 - RNA, 23 nt, Human
ucucucaucucuuagcuccccuc

SEQ ID NO: 2185166 - RNA, 19 nt, Human
ucugcagccagcccagccc

SEQ ID NO: 2185167 - RNA, 18 nt, Human
ucugcagccagcccagcc

SEQ ID NO: 2185168 - RNA, 13 nt, Human
ucugcagcccagg

SEQ ID NO: 2185169 - RNA, 15 nt, Human
ucugcagcccaggga

SEQ ID NO: 2185170 - RNA, 23 nt, Human
ucugcagcccggcgccaccaucc

SEQ ID NO: 2185171 - RNA, 16 nt, Human
ucugcagccagcccag

SEQ ID NO: 2185172 - RNA, 15 nt, Human
ucugcagccagccca

SEQ ID NO: 2185173 - RNA, 14 nt, Human
ucugcagccagccc

SEQ ID NO: 2185174 - RNA, 20 nt, Human
ucugcagcaugaccugugac

SEQ ID NO: 2185175 - RNA, 16 nt, Human
ucugcagcaugaccug

SEQ ID NO: 2185176 - RNA, 11 nt, Human
ucugauuccac

SEQ ID NO: 2185177 - RNA, 13 nt, Human
ucugauuccacuu

SEQ ID NO: 2185178 - RNA, 20 nt, Human
ucugcacuccccugcugggu

SEQ ID NO: 2185179 - RNA, 18 nt, Human
ucugcagcaauaaagcag

SEQ ID NO: 2185180 - RNA, 22 nt, Human
ucugcaggauugauuaugcaga

SEQ ID NO: 2185181 - RNA, 15 nt, Human
ucugcagcuguuuua

SEQ ID NO: 2185182 - RNA, 14 nt, Human
ucugcaggcaccuu

SEQ ID NO: 2185183 - RNA, 17 nt, Human
ucugcaggcaccuuagu

SEQ ID NO: 2185184 - RNA, 13 nt, Human
ucugcagcugacc

SEQ ID NO: 2185185 - RNA, 14 nt, Human
ucugcagcugaccu

SEQ ID NO: 2185186 - RNA, 20 nt, Human
ucugcagcugaccucuguug

SEQ ID NO: 2185187 - RNA, 15 nt, Human
ucugcaggucccuaa

SEQ ID NO: 2185188 - RNA, 16 nt, Human
ucugcaggucccuaau

SEQ ID NO: 2185189 - RNA, 17 nt, Human
ucugcaggucccuaaua

SEQ ID NO: 2185190 - RNA, 13 nt, Human
agaaauuccugua

SEQ ID NO: 2185191 - RNA, 14 nt, Human
ucugcaggcagaca

SEQ ID NO: 2185192 - RNA, 14 nt, Human
agaaauuauuuaau

SEQ ID NO: 2185193 - RNA, 16 nt, Human
agaaauuauuuaauaa

SEQ ID NO: 2185194 - RNA, 17 nt, Human
agaaauuauuuaauaaa

SEQ ID NO: 2185195 - RNA, 22 nt, Human
agaaauuaugugccagauuuau

SEQ ID NO: 2185196 - RNA, 16 nt, Human
agaaauuuauaaacuu

SEQ ID NO: 2185197 - RNA, 17 nt, Human
agaaauuuauaaacuuu

SEQ ID NO: 2185198 - RNA, 14 nt, Human
ucugcaggucccua

SEQ ID NO: 2185199 - RNA, 22 nt, Human
ucugcaggcaccuuaguggcuu

SEQ ID NO: 2185200 - RNA, 13 nt, Human
ucugcaggcagac

SEQ ID NO: 2185201 - RNA, 18 nt, Human
ucugcaggucccuaauaa

SEQ ID NO: 2185202 - RNA, 13 nt, Human
agaaauuaugugc

SEQ ID NO: 2185203 - RNA, 21 nt, Human
agaaauuaugugccagauuua

SEQ ID NO: 2185204 - RNA, 24 nt, Human
ucugaguguuuuuacuacaguugu

SEQ ID NO: 2185205 - RNA, 14 nt, Human
ucugacucacaaga

SEQ ID NO: 2185206 - RNA, 17 nt, Human
ucugaguuccugcaugc

SEQ ID NO: 2185207 - RNA, 15 nt, Human
ucugaguuucauucu

SEQ ID NO: 2185208 - RNA, 20 nt, Human
ucugaguuucauucuccugc

SEQ ID NO: 2185209 - RNA, 22 nt, Human
ucugaguuucauucuccugccu

SEQ ID NO: 2185210 - RNA, 22 nt, Human
ucugagacucucuuaggagcag

SEQ ID NO: 2185211 - RNA, 20 nt, Human
ucugacgugccuuuugcacc

SEQ ID NO: 2185212 - RNA, 23 nt, Human
ucugacgugccuuuugcaccccu

SEQ ID NO: 2185213 - RNA, 22 nt, Human
ucugacuacugggcaaagagug

SEQ ID NO: 2185214 - RNA, 23 nt, Human
ucugacuacugggcaaagagugu

SEQ ID NO: 2185215 - RNA, 22 nt, Human
ucugagacucgcgacaaugcaa

SEQ ID NO: 2185216 - RNA, 23 nt, Human
ucugagacucgcgacaaugcaaa

SEQ ID NO: 2185217 - RNA, 15 nt, Human
ucugauggcuucucc

SEQ ID NO: 2185218 - RNA, 18 nt, Human
ucugauggcuucuccagg

SEQ ID NO: 2185219 - RNA, 13 nt, Human
ucugauggcuucu

SEQ ID NO: 2185220 - RNA, 23 nt, Human
ucugaugcaagcaagaaacacug

SEQ ID NO: 2185221 - RNA, 22 nt, Human
ucugauaacuagauggugcuga

SEQ ID NO: 2185222 - RNA, 15 nt, Human
ucugauaaugaaaau

SEQ ID NO: 2185223 - RNA, 19 nt, Human
ucugauaagagaaucaaca

SEQ ID NO: 2185224 - RNA, 21 nt, Human
ucugauaacuagauggugcug

SEQ ID NO: 2185225 - RNA, 20 nt, Human
ucugauaacuagauggugcu

SEQ ID NO: 2185226 - RNA, 14 nt, Human
ucugauaacuagau

SEQ ID NO: 2185227 - RNA, 24 nt, Human
ucugaguuucauucuccugccugu

SEQ ID NO: 2185228 - RNA, 18 nt, Human
ucugauucccaagcucug

SEQ ID NO: 2185229 - RNA, 18 nt, Human
ucugauuacacaaaacaa

SEQ ID NO: 2185230 - RNA, 18 nt, Human
ucugcacuccccugcugg

SEQ ID NO: 2185231 - RNA, 19 nt, Human
ucugcacuccccugcuggg

SEQ ID NO: 2185232 - RNA, 20 nt, Human
agaaauaucugaaaauguau

SEQ ID NO: 2185233 - RNA, 17 nt, Human
agaaaucaaagagagaa

SEQ ID NO: 2185234 - RNA, 19 nt, Human
agaaauaucugaaaaugua

SEQ ID NO: 2185235 - RNA, 14 nt, Human
agaaauauaauuga

SEQ ID NO: 2185236 - RNA, 19 nt, Human
agaaaucccuguuuaauau

SEQ ID NO: 2185237 - RNA, 15 nt, Human
agaaaucuaaaaaac

SEQ ID NO: 2185238 - RNA, 17 nt, Human
agaaaugaaaaaauaua

SEQ ID NO: 2185239 - RNA, 21 nt, Human
agaaaucauuuggguuaauau

SEQ ID NO: 2185240 - RNA, 17 nt, Human
agaaaucacagaaucau

SEQ ID NO: 2185241 - RNA, 18 nt, Human
agaaaucaguaauauuua

SEQ ID NO: 2185242 - RNA, 12 nt, Human
agaaaucuaaaa

SEQ ID NO: 2185243 - RNA, 13 nt, Human
agaaacuugugaa

SEQ ID NO: 2185244 - RNA, 19 nt, Human
agaaacuuccaaauccccu

SEQ ID NO: 2185245 - RNA, 23 nt, Human
agaaacuugugaaguggaaaugu

SEQ ID NO: 2185246 - RNA, 13 nt, Human
agaaacuucgccu

SEQ ID NO: 2185247 - RNA, 12 nt, Human
agaaacuuuauu

SEQ ID NO: 2185248 - RNA, 14 nt, Human
agaaagaaaaucag

SEQ ID NO: 2185249 - RNA, 22 nt, Human
agaaacuuuauucaaguaaaaa

SEQ ID NO: 2185250 - RNA, 18 nt, Human
agaaagccugggugacau

SEQ ID NO: 2185251 - RNA, 19 nt, Human
agaaagccugggugacauu

SEQ ID NO: 2185252 - RNA, 20 nt, Human
agaaagccugggugacauuu

SEQ ID NO: 2185253 - RNA, 21 nt, Human
agaaagccugggugacauuug

SEQ ID NO: 2185254 - RNA, 22 nt, Human
agaaagccuguuccccucacug

SEQ ID NO: 2185255 - RNA, 19 nt, Human
agaaagccuguuccccuca

SEQ ID NO: 2185256 - RNA, 20 nt, Human
agaaagccuguuccccucac

SEQ ID NO: 2185257 - RNA, 13 nt, Human
agaaagcugccug

SEQ ID NO: 2185258 - RNA, 16 nt, Human
agaaagcugguaaacu

SEQ ID NO: 2185259 - RNA, 19 nt, Human
agaaagcugguaaacuauu

SEQ ID NO: 2185260 - RNA, 20 nt, Human
agaaagcugguaaacuauuu

SEQ ID NO: 2185261 - RNA, 23 nt, Human
ucugaagucacaucacaggacac

SEQ ID NO: 2185262 - RNA, 22 nt, Human
ucugaagucacaucacaggaca

SEQ ID NO: 2185263 - RNA, 20 nt, Human
ucugaagucacaucacagga

SEQ ID NO: 2185264 - RNA, 17 nt, Human
ucugaagucacaucaca

SEQ ID NO: 2185265 - RNA, 12 nt, Human
ucugaagcagau

SEQ ID NO: 2185266 - RNA, 12 nt, Human
ucugaagcaugu

SEQ ID NO: 2185267 - RNA, 13 nt, Human
ucugaagcauguu

SEQ ID NO: 2185268 - RNA, 14 nt, Human
ucugaagcauguuu

SEQ ID NO: 2185269 - RNA, 21 nt, Human
ucugaagcauguuucauguuu

SEQ ID NO: 2185270 - RNA, 15 nt, Human
ucugaagcauguuuc

SEQ ID NO: 2185271 - RNA, 20 nt, Human
ucugaagcauguuucauguu

SEQ ID NO: 2185272 - RNA, 22 nt, Human
ucugaagaguggguuucacaag

SEQ ID NO: 2185273 - RNA, 22 nt, Human
ucugaagaccucgagcagauga

SEQ ID NO: 2185274 - RNA, 12 nt, Human
ucugaagaagau

SEQ ID NO: 2185275 - RNA, 18 nt, Human
agaaaugaaaaaauauau

SEQ ID NO: 2185276 - RNA, 23 nt, Human
agaaaugaaaaaauauauaucaa

SEQ ID NO: 2185277 - RNA, 16 nt, Human
agaaaugaaaaaauau

SEQ ID NO: 2185278 - RNA, 22 nt, Human
agaaaucccuguuuaauauuua

SEQ ID NO: 2185279 - RNA, 14 nt, Human
agaaaugaaagcag

SEQ ID NO: 2185280 - RNA, 21 nt, Human
ucugaccugcaggccaagagc

SEQ ID NO: 2185281 - RNA, 19 nt, Human
ucugaccugcaggccaaga

SEQ ID NO: 2185282 - RNA, 17 nt, Human
ucugaccugcaggccaa

SEQ ID NO: 2185283 - RNA, 16 nt, Human
ucugaccugcaggcca

SEQ ID NO: 2185284 - RNA, 12 nt, Human
ucugacacacag

SEQ ID NO: 2185285 - RNA, 16 nt, Human
ucugacaacagacuuc

SEQ ID NO: 2185286 - RNA, 15 nt, Human
ucugacaacagacuu

SEQ ID NO: 2185287 - RNA, 15 nt, Human
ucugaagucacugca

SEQ ID NO: 2185288 - RNA, 16 nt, Human
ucugaagucacugcac

SEQ ID NO: 2185289 - RNA, 18 nt, Human
ucugaagucacugcacag

SEQ ID NO: 2185290 - RNA, 16 nt, Human
acuuccuugcucuccc

SEQ ID NO: 2185291 - RNA, 19 nt, Human
acuuccuugcucucccucu

SEQ ID NO: 2185292 - RNA, 15 nt, Human
acuucgacucaggau

SEQ ID NO: 2185293 - RNA, 19 nt, Human
acuucgacucaggauccag

SEQ ID NO: 2185294 - RNA, 22 nt, Human
acuucgggaggucgaggcagga

SEQ ID NO: 2185295 - RNA, 17 nt, Human
acuuccuguccagagag

SEQ ID NO: 2185296 - RNA, 17 nt, Human
acuuccuguuugggccc

SEQ ID NO: 2185297 - RNA, 23 nt, Human
acuuccuguccagcuccaaccug

SEQ ID NO: 2185298 - RNA, 15 nt, Human
acuuccugugacuuc

SEQ ID NO: 2185299 - RNA, 22 nt, Human
acuuccuugagacacggagccc

SEQ ID NO: 2185300 - RNA, 14 nt, Human
acuuccuugagaca

SEQ ID NO: 2185301 - RNA, 18 nt, Human
acuuccuguuugggcccc

SEQ ID NO: 2185302 - RNA, 21 nt, Human
acuuccuguuugggccccucu

SEQ ID NO: 2185303 - RNA, 22 nt, Human
acuuccuuacuaagcauagcaa

SEQ ID NO: 2185304 - RNA, 16 nt, Human
ucucacuauaccagua

SEQ ID NO: 2185305 - RNA, 13 nt, Human
ucucacuccuuga

SEQ ID NO: 2185306 - RNA, 12 nt, Human
ucucacucuguc

SEQ ID NO: 2185307 - RNA, 22 nt, Human
acuuccuguccagcuccaaccu

SEQ ID NO: 2185308 - RNA, 18 nt, Human
acuuccuguccagcucca

SEQ ID NO: 2185309 - RNA, 14 nt, Human
acuucuccacccug

SEQ ID NO: 2185310 - RNA, 23 nt, Human
acuucuacuucugcccuugccaa

SEQ ID NO: 2185311 - RNA, 22 nt, Human
acuucucaaaccuguuuaaaua

SEQ ID NO: 2185312 - RNA, 22 nt, Human
acuucuaauauauuuuuauauu

SEQ ID NO: 2185313 - RNA, 17 nt, Human
acuucuaaaugcauauc

SEQ ID NO: 2185314 - RNA, 11 nt, Human
acuucuaauau

SEQ ID NO: 2185315 - RNA, 15 nt, Human
acuucuaauauauuu

SEQ ID NO: 2185316 - RNA, 18 nt, Human
acuucgucuucuaauuuc

SEQ ID NO: 2185317 - RNA, 15 nt, Human
acuucgucuucuaau

SEQ ID NO: 2185318 - RNA, 19 nt, Human
acuucgucuucuaauuuca

SEQ ID NO: 2185319 - RNA, 20 nt, Human
acuucgucuucuaauuucaa

SEQ ID NO: 2185320 - RNA, 13 nt, Human
acuucgugggauc

SEQ ID NO: 2185321 - RNA, 22 nt, Human
acuucgugggaucugccccucc

SEQ ID NO: 2185322 - RNA, 23 nt, Human
acuucgugggaucugccccuccc

SEQ ID NO: 2185323 - RNA, 16 nt, Human
acuucuaaaugaagug

SEQ ID NO: 2185324 - RNA, 15 nt, Human
acuucuaaaugaagu

SEQ ID NO: 2185325 - RNA, 23 nt, Human
acuucuaaguaaaaccacagcag

SEQ ID NO: 2185326 - RNA, 23 nt, Human
ucucacacccaccguccgcccug

SEQ ID NO: 2185327 - RNA, 14 nt, Human
ucucacacuggcgu

SEQ ID NO: 2185328 - RNA, 21 nt, Human
ucucacacuggcguagaaguu

SEQ ID NO: 2185329 - RNA, 20 nt, Human
ucucacgggcaguagcugug

SEQ ID NO: 2185330 - RNA, 15 nt, Human
ucucaccuguacucu

SEQ ID NO: 2185331 - RNA, 11 nt, Human
ucucacuccuu

SEQ ID NO: 2185332 - RNA, 15 nt, Human
ucucacuaaacuuua

SEQ ID NO: 2185333 - RNA, 17 nt, Human
ucucacuaaacuuuacc

SEQ ID NO: 2185334 - RNA, 21 nt, Human
ucucacgggcaugggcacucc

SEQ ID NO: 2185335 - RNA, 22 nt, Human
ucucacgggcaugggcacuccc

SEQ ID NO: 2185336 - RNA, 23 nt, Human
ucucacgggcaugggcacucccu

SEQ ID NO: 2185337 - RNA, 13 nt, Human
ucucacuaaacuu

SEQ ID NO: 2185338 - RNA, 16 nt, Human
acuucagcugacuuuu

SEQ ID NO: 2185339 - RNA, 11 nt, Human
acuucagcuga

SEQ ID NO: 2185340 - RNA, 14 nt, Human
acuucaggcucuuc

SEQ ID NO: 2185341 - RNA, 17 nt, Human
acuuauaucaucagcau

SEQ ID NO: 2185342 - RNA, 22 nt, Human
acuuauaucaucagcauaccuu

SEQ ID NO: 2185343 - RNA, 15 nt, Human
ucuauuucugagaag

SEQ ID NO: 2185344 - RNA, 13 nt, Human
ucuauuucugaga

SEQ ID NO: 2185345 - RNA, 12 nt, Human
ucuauuucugag

SEQ ID NO: 2185346 - RNA, 17 nt, Human
ucuauuucuaugagaaa

SEQ ID NO: 2185347 - RNA, 20 nt, Human
ucuauuucugagaagguccu

SEQ ID NO: 2185348 - RNA, 11 nt, Human
ucuauuucugc

SEQ ID NO: 2185349 - RNA, 12 nt, Human
ucuauuucugcu

SEQ ID NO: 2185350 - RNA, 23 nt, Human
ucucacacaugagcaucaggcca

SEQ ID NO: 2185351 - RNA, 21 nt, Human
ucuauuucugcugaauuuuca

SEQ ID NO: 2185352 - RNA, 13 nt, Human
ucuauuucugcug

SEQ ID NO: 2185353 - RNA, 14 nt, Human
ucucacacccaccg

SEQ ID NO: 2185354 - RNA, 15 nt, Human
ucuauuuccuggaau

SEQ ID NO: 2185355 - RNA, 11 nt, Human
ucuauuucuag

SEQ ID NO: 2185356 - RNA, 20 nt, Human
ucuauuucuccuccauggga

SEQ ID NO: 2185357 - RNA, 16 nt, Human
ucuauuucuccuccau

SEQ ID NO: 2185358 - RNA, 15 nt, Human
ucuauuucuccucca

SEQ ID NO: 2185359 - RNA, 14 nt, Human
ucuauuucuccucc

SEQ ID NO: 2185360 - RNA, 23 nt, Human
acuugcucucuggccuuuuccua

SEQ ID NO: 2185361 - RNA, 20 nt, Human
acuugccuucuucacccagc

SEQ ID NO: 2185362 - RNA, 23 nt, Human
acuugagcuuuaaaaaucauugu

SEQ ID NO: 2185363 - RNA, 13 nt, Human
acuugccucuucc

SEQ ID NO: 2185364 - RNA, 17 nt, Human
acuugccucuuccuuga

SEQ ID NO: 2185365 - RNA, 14 nt, Human
acuugcucuugaug

SEQ ID NO: 2185366 - RNA, 19 nt, Human
acuuggagccccagugcca

SEQ ID NO: 2185367 - RNA, 11 nt, Human
acuuggagccg

SEQ ID NO: 2185368 - RNA, 20 nt, Human
acuuggaggguugguccucu

SEQ ID NO: 2185369 - RNA, 14 nt, Human
acuuggccucugga

SEQ ID NO: 2185370 - RNA, 10 nt, Human
acuuggccaa

SEQ ID NO: 2185371 - RNA, 19 nt, Human
acuuggccaagcagggagg

SEQ ID NO: 2185372 - RNA, 18 nt, Human
acuuggcaucagcuggcg

SEQ ID NO: 2185373 - RNA, 15 nt, Human
acuuggcaacagaag

SEQ ID NO: 2185374 - RNA, 16 nt, Human
acuuggcaacagaagc

SEQ ID NO: 2185375 - RNA, 16 nt, Human
acuuguggacacagcu

SEQ ID NO: 2185376 - RNA, 22 nt, Human
acuuguccccaaauccgaaccu

SEQ ID NO: 2185377 - RNA, 17 nt, Human
acuuguccccaaauccg

SEQ ID NO: 2185378 - RNA, 18 nt, Human
acuugucccacuaucugg

SEQ ID NO: 2185379 - RNA, 17 nt, Human
acuuguggacacagcuc

SEQ ID NO: 2185380 - RNA, 18 nt, Human
acuuguggacacagcucu

SEQ ID NO: 2185381 - RNA, 13 nt, Human
acuugucauguga

SEQ ID NO: 2185382 - RNA, 20 nt, Human
acuugucaauauuuaaacau

SEQ ID NO: 2185383 - RNA, 16 nt, Human
acuugucaauauuuaa

SEQ ID NO: 2185384 - RNA, 17 nt, Human
acuugucaauauuuaaa

SEQ ID NO: 2185385 - RNA, 21 nt, Human
acuuggcucgaaucucugugc

SEQ ID NO: 2185386 - RNA, 13 nt, Human
acuugucaauauu

SEQ ID NO: 2185387 - RNA, 14 nt, Human
acuugucaauauuu

SEQ ID NO: 2185388 - RNA, 16 nt, Human
acuugucaauaaaauc

SEQ ID NO: 2185389 - RNA, 17 nt, Human
acuuggcuacacaggga

SEQ ID NO: 2185390 - RNA, 18 nt, Human
acuuggcucgaaucucug

SEQ ID NO: 2185391 - RNA, 19 nt, Human
acuuggcucgaaucucugu

SEQ ID NO: 2185392 - RNA, 20 nt, Human
acuuggcucgaaucucugug

SEQ ID NO: 2185393 - RNA, 15 nt, Human
acuugagcuuuaaaa

SEQ ID NO: 2185394 - RNA, 20 nt, Human
acuugagcaccgucauggcu

SEQ ID NO: 2185395 - RNA, 16 nt, Human
acuugagaggaugaau

SEQ ID NO: 2185396 - RNA, 19 nt, Human
acuugagaggaugaaugua

SEQ ID NO: 2185397 - RNA, 16 nt, Human
acuugaaugugucacu

SEQ ID NO: 2185398 - RNA, 12 nt, Human
acuugagaggau

SEQ ID NO: 2185399 - RNA, 19 nt, Human
acuugaauccuagggccug

SEQ ID NO: 2185400 - RNA, 19 nt, Human
acuugagcccagagugaac

SEQ ID NO: 2185401 - RNA, 21 nt, Human
acuugaacccgggaggcagag

SEQ ID NO: 2185402 - RNA, 14 nt, Human
acuugaagggccag

SEQ ID NO: 2185403 - RNA, 15 nt, Human
acuugaagggccaga

SEQ ID NO: 2185404 - RNA, 20 nt, Human
acuugaagggccagagccag

SEQ ID NO: 2185405 - RNA, 19 nt, Human
acuugaagggccagagcca

SEQ ID NO: 2185406 - RNA, 18 nt, Human
acuugaagggccagagcc

SEQ ID NO: 2185407 - RNA, 17 nt, Human
acuugaagggccagagc

SEQ ID NO: 2185408 - RNA, 22 nt, Human
acuugaagggccagagccaggg

SEQ ID NO: 2185409 - RNA, 21 nt, Human
acuugaagggccagagccagg

SEQ ID NO: 2185410 - RNA, 11 nt, Human
acuugaaguug

SEQ ID NO: 2185411 - RNA, 12 nt, Human
acuugaaguugu

SEQ ID NO: 2185412 - RNA, 13 nt, Human
acuugaaguuguu

SEQ ID NO: 2185413 - RNA, 20 nt, Human
acuugaaguuguuacuaacu

SEQ ID NO: 2185414 - RNA, 22 nt, Human
acuugaaguuguuacuaacuaa

SEQ ID NO: 2185415 - RNA, 16 nt, Human
acuugaaucaaagcag

SEQ ID NO: 2185416 - RNA, 15 nt, Human
acuucuccacccugc

SEQ ID NO: 2185417 - RNA, 16 nt, Human
acuucuccacccugcu

SEQ ID NO: 2185418 - RNA, 20 nt, Human
acuugaacccgggaggcaga

SEQ ID NO: 2185419 - RNA, 19 nt, Human
acuugaacccgggaggcag

SEQ ID NO: 2185420 - RNA, 21 nt, Human
acuugaacccauauuuguaca

SEQ ID NO: 2185421 - RNA, 19 nt, Human
ucuccaggucucacgggca

SEQ ID NO: 2185422 - RNA, 19 nt, Human
ucuccaguauccacuuugc

SEQ ID NO: 2185423 - RNA, 23 nt, Human
ucuccaggggcugcuuccuccug

SEQ ID NO: 2185424 - RNA, 17 nt, Human
ucuccaggggcugcuuc

SEQ ID NO: 2185425 - RNA, 18 nt, Human
ucuccaggggcugcuucc

SEQ ID NO: 2185426 - RNA, 20 nt, Human
ucuccaggggcugcuuccuc

SEQ ID NO: 2185427 - RNA, 22 nt, Human
ucuccaggggcugcuuccuccu

SEQ ID NO: 2185428 - RNA, 16 nt, Human
ucuccaggcuguaucc

SEQ ID NO: 2185429 - RNA, 18 nt, Human
ucuccaagaaugcugaaa

SEQ ID NO: 2185430 - RNA, 20 nt, Human
ucuccagggaguccccuccc

SEQ ID NO: 2185431 - RNA, 14 nt, Human
ucuccaagaaugcu

SEQ ID NO: 2185432 - RNA, 15 nt, Human
ucuccaagaaugcug

SEQ ID NO: 2185433 - RNA, 16 nt, Human
ucuccaagaaugcuga

SEQ ID NO: 2185434 - RNA, 17 nt, Human
ucuccaagaaugcugaa

SEQ ID NO: 2185435 - RNA, 14 nt, Human
ucuccauauguuac

SEQ ID NO: 2185436 - RNA, 23 nt, Human
ucuccauaaccccacccuugccc

SEQ ID NO: 2185437 - RNA, 21 nt, Human
ucuccauaaccccacccuugc

SEQ ID NO: 2185438 - RNA, 22 nt, Human
ucuccauaaccccacccuugcc

SEQ ID NO: 2185439 - RNA, 20 nt, Human
ucuccagugguugcuguuga

SEQ ID NO: 2185440 - RNA, 17 nt, Human
ucuccauaaccccaccc

SEQ ID NO: 2185441 - RNA, 18 nt, Human
ucuccauaaccccacccu

SEQ ID NO: 2185442 - RNA, 20 nt, Human
ucuccauaaccccacccuug

SEQ ID NO: 2185443 - RNA, 15 nt, Human
ucuccaguuuucagu

SEQ ID NO: 2185444 - RNA, 21 nt, Human
ucuccagggaguccccucccc

SEQ ID NO: 2185445 - RNA, 18 nt, Human
ucuccagugguugcuguu

SEQ ID NO: 2185446 - RNA, 17 nt, Human
ucuccagugguugcugu

SEQ ID NO: 2185447 - RNA, 13 nt, Human
ucuccaucagcug

SEQ ID NO: 2185448 - RNA, 15 nt, Human
ucuccauauguuaca

SEQ ID NO: 2185449 - RNA, 17 nt, Human
ucuccaucagcuguaag

SEQ ID NO: 2185450 - RNA, 13 nt, Human
ucuccauccacau

SEQ ID NO: 2185451 - RNA, 19 nt, Human
ucuccauccacaugggagc

SEQ ID NO: 2185452 - RNA, 17 nt, Human
ucuccauccuuucugcc

SEQ ID NO: 2185453 - RNA, 19 nt, Human
ucuccauccuuucugccuc

SEQ ID NO: 2185454 - RNA, 22 nt, Human
ucuccauccuuucugccucuca

SEQ ID NO: 2185455 - RNA, 11 nt, Human
ucuccaucucu

SEQ ID NO: 2185456 - RNA, 14 nt, Human
ucuccaucucucug

SEQ ID NO: 2185457 - RNA, 16 nt, Human
ucuccaucucucuggc

SEQ ID NO: 2185458 - RNA, 15 nt, Human
ucuccaaccuggaca

SEQ ID NO: 2185459 - RNA, 23 nt, Human
ucuccaaccccccagcacugagg

SEQ ID NO: 2185460 - RNA, 21 nt, Human
ucuccaaccccccagcacuga

SEQ ID NO: 2185461 - RNA, 22 nt, Human
ucuccaaccccccagcacugag

SEQ ID NO: 2185462 - RNA, 24 nt, Human
ucuccaaaugagaucuaagccuuu

SEQ ID NO: 2185463 - RNA, 12 nt, Human
ucuccaaaugag

SEQ ID NO: 2185464 - RNA, 23 nt, Human
ucuccaaacugaagcagccucuc

SEQ ID NO: 2185465 - RNA, 17 nt, Human
ucuccaaccccccagca

SEQ ID NO: 2185466 - RNA, 18 nt, Human
ucuccaaccccccagcac

SEQ ID NO: 2185467 - RNA, 19 nt, Human
ucuccaaccccccagcacu

SEQ ID NO: 2185468 - RNA, 20 nt, Human
ucuccaaccccccagcacug

SEQ ID NO: 2185469 - RNA, 22 nt, Human
ucuccaaaauaaaacuuuuuaa

SEQ ID NO: 2185470 - RNA, 22 nt, Human
ucuccaaacugaagcagccucu

SEQ ID NO: 2185471 - RNA, 19 nt, Human
ucuccaaaauaaaacuuuu

SEQ ID NO: 2185472 - RNA, 17 nt, Human
ucuccaaaauaaaacuu

SEQ ID NO: 2185473 - RNA, 14 nt, Human
ucucauuccccagg

SEQ ID NO: 2185474 - RNA, 15 nt, Human
ucucauugcuuacaa

SEQ ID NO: 2185475 - RNA, 16 nt, Human
ucucauuccccaggug

SEQ ID NO: 2185476 - RNA, 19 nt, Human
ucucauuggacccuuccau

SEQ ID NO: 2185477 - RNA, 13 nt, Human
ucucauuccccag

SEQ ID NO: 2185478 - RNA, 19 nt, Human
ucucauuccaacagugagu

SEQ ID NO: 2185479 - RNA, 17 nt, Human
ucucauuccaacaguga

SEQ ID NO: 2185480 - RNA, 16 nt, Human
ucucauuccagaggaa

SEQ ID NO: 2185481 - RNA, 13 nt, Human
ucucagggcuccu

SEQ ID NO: 2185482 - RNA, 12 nt, Human
ucucagggcucc

SEQ ID NO: 2185483 - RNA, 16 nt, Human
ucucauuacuuuugaa

SEQ ID NO: 2185484 - RNA, 15 nt, Human
ucucagggccugguc

SEQ ID NO: 2185485 - RNA, 14 nt, Human
ucucagggccuggu

SEQ ID NO: 2185486 - RNA, 19 nt, Human
ucucaggcuggugggaggg

SEQ ID NO: 2185487 - RNA, 11 nt, Human
ucucagggcuc

SEQ ID NO: 2185488 - RNA, 19 nt, Human
ucucagggccuggucguuu

SEQ ID NO: 2185489 - RNA, 13 nt, Human
ucucagccuccca

SEQ ID NO: 2185490 - RNA, 12 nt, Human
ucucagccuccc

SEQ ID NO: 2185491 - RNA, 15 nt, Human
acuuguggacacagc

SEQ ID NO: 2185492 - RNA, 11 nt, Human
ucucagcuccc

SEQ ID NO: 2185493 - RNA, 17 nt, Human
ucucagcucccauuucu

SEQ ID NO: 2185494 - RNA, 18 nt, Human
ucucagcucccauuucua

SEQ ID NO: 2185495 - RNA, 16 nt, Human
ucucagcuccaggugg

SEQ ID NO: 2185496 - RNA, 21 nt, Human
ucucagcuccagguggcucug

SEQ ID NO: 2185497 - RNA, 22 nt, Human
ucucagcucccauuucuacucu

SEQ ID NO: 2185498 - RNA, 17 nt, Human
ucucagcucccccuguc

SEQ ID NO: 2185499 - RNA, 18 nt, Human
ucucagcucccccugucc

SEQ ID NO: 2185500 - RNA, 19 nt, Human
ucucagcucccccuguccc

SEQ ID NO: 2185501 - RNA, 21 nt, Human
ucucagcucccccuguccccu

SEQ ID NO: 2185502 - RNA, 22 nt, Human
ucucagcucccccuguccccuc

SEQ ID NO: 2185503 - RNA, 19 nt, Human
ucucagcucuucugacuua

SEQ ID NO: 2185504 - RNA, 20 nt, Human
ucucaggcucugcccugccc

SEQ ID NO: 2185505 - RNA, 19 nt, Human
ucucaggcucugcccugcc

SEQ ID NO: 2185506 - RNA, 18 nt, Human
ucucaggcuggugggagg

SEQ ID NO: 2185507 - RNA, 17 nt, Human
ucucaggcucugcccug

SEQ ID NO: 2185508 - RNA, 15 nt, Human
ucucaggcucugccc

SEQ ID NO: 2185509 - RNA, 14 nt, Human
ucucaggcucugcc

SEQ ID NO: 2185510 - RNA, 12 nt, Human
ucucaggaaauc

SEQ ID NO: 2185511 - RNA, 13 nt, Human
ucucagggccugg

SEQ ID NO: 2185512 - RNA, 12 nt, Human
ucucagggccug

SEQ ID NO: 2185513 - RNA, 19 nt, Human
ucucccacuagacaagucc

SEQ ID NO: 2185514 - RNA, 23 nt, Human
ucucccagauaaugugaaaaugg

SEQ ID NO: 2185515 - RNA, 21 nt, Human
ucucccagauaaugugaaaau

SEQ ID NO: 2185516 - RNA, 18 nt, Human
ucucccagauaaugugaa

SEQ ID NO: 2185517 - RNA, 16 nt, Human
ucucccagauaaugug

SEQ ID NO: 2185518 - RNA, 14 nt, Human
ucucccaccuagca

SEQ ID NO: 2185519 - RNA, 14 nt, Human
ucucccacguggga

SEQ ID NO: 2185520 - RNA, 15 nt, Human
ucucccacgugggag

SEQ ID NO: 2185521 - RNA, 16 nt, Human
ucucccacgugggaga

SEQ ID NO: 2185522 - RNA, 15 nt, Human
ucucccaccccugcc

SEQ ID NO: 2185523 - RNA, 17 nt, Human
ucuccaucuggcagggu

SEQ ID NO: 2185524 - RNA, 18 nt, Human
ucuccaucucucuggccc

SEQ ID NO: 2185525 - RNA, 14 nt, Human
ucuccaucuguuug

SEQ ID NO: 2185526 - RNA, 14 nt, Human
ucuccauggcccug

SEQ ID NO: 2185527 - RNA, 18 nt, Human
ucuccaucuucagcuucu

SEQ ID NO: 2185528 - RNA, 15 nt, Human
ucuccauggccaccu

SEQ ID NO: 2185529 - RNA, 18 nt, Human
ucuccauggcccugcaaa

SEQ ID NO: 2185530 - RNA, 15 nt, Human
ucuccauggcccugc

SEQ ID NO: 2185531 - RNA, 16 nt, Human
ucuccauguuugaugu

SEQ ID NO: 2185532 - RNA, 17 nt, Human
ucuccauggcuuccucc

SEQ ID NO: 2185533 - RNA, 20 nt, Human
ucuccauggcuuccuccucc

SEQ ID NO: 2185534 - RNA, 20 nt, Human
ucuccauggccaccuuuuca

SEQ ID NO: 2185535 - RNA, 19 nt, Human
ucuccauggcuuccuccuc

SEQ ID NO: 2185536 - RNA, 11 nt, Human
ucucccauccc

SEQ ID NO: 2185537 - RNA, 12 nt, Human
ucucccaucccc

SEQ ID NO: 2185538 - RNA, 13 nt, Human
ucucccauccccc

SEQ ID NO: 2185539 - RNA, 17 nt, Human
ucucccagcucuagaca

SEQ ID NO: 2185540 - RNA, 11 nt, Human
ucucccaggaa

SEQ ID NO: 2185541 - RNA, 23 nt, Human
ucucccauccagugucucacagc

SEQ ID NO: 2185542 - RNA, 13 nt, Human
ucucccauggagc

SEQ ID NO: 2185543 - RNA, 19 nt, Human
ucucccaucccccugcccu

SEQ ID NO: 2185544 - RNA, 20 nt, Human
ucucccaucccccugcccuc

SEQ ID NO: 2185545 - RNA, 14 nt, Human
ucucccaucccccu

SEQ ID NO: 2185546 - RNA, 15 nt, Human
ucucccaucccccug

SEQ ID NO: 2185547 - RNA, 17 nt, Human
ucucccaucccccugcc

SEQ ID NO: 2185548 - RNA, 18 nt, Human
ucucccaucccccugccc

SEQ ID NO: 2185549 - RNA, 10 nt, Human
ucuccccaca

SEQ ID NO: 2185550 - RNA, 19 nt, Human
ucucccauugucccucugc

SEQ ID NO: 2185551 - RNA, 18 nt, Human
ucucccauugucccucug

SEQ ID NO: 2185552 - RNA, 17 nt, Human
ucucccauugucccucu

SEQ ID NO: 2185553 - RNA, 22 nt, Human
ucucccauggcuuaaugcuucu

SEQ ID NO: 2185554 - RNA, 21 nt, Human
ucucccauggagccccagccc

SEQ ID NO: 2185555 - RNA, 22 nt, Human
ucucccauggagccccagcccc

SEQ ID NO: 2185556 - RNA, 22 nt, Human
ucucccaucccccugcccucgu

SEQ ID NO: 2185557 - RNA, 15 nt, Human
ucucccauggagccc

SEQ ID NO: 2185558 - RNA, 18 nt, Human
ucucccauggagccccag

SEQ ID NO: 2185559 - RNA, 20 nt, Human
ucucccauggagccccagcc

SEQ ID NO: 2185560 - RNA, 13 nt, Human
ucuccccacacua

SEQ ID NO: 2185561 - RNA, 11 nt, Human
ucuccccacac

SEQ ID NO: 2185562 - RNA, 20 nt, Human
ucuccguuagcuccuguggc

SEQ ID NO: 2185563 - RNA, 21 nt, Human
ucuccguuagcuccuguggcc

SEQ ID NO: 2185564 - RNA, 22 nt, Human
ucuccguuagcuccuguggccc

SEQ ID NO: 2185565 - RNA, 23 nt, Human
ucuccguuagcuccuguggcccc

SEQ ID NO: 2185566 - RNA, 23 nt, Human
ucuccuagacugacccugaucag

SEQ ID NO: 2185567 - RNA, 19 nt, Human
ucuccuagagacagaagca

SEQ ID NO: 2185568 - RNA, 20 nt, Human
ucuccuagagacagaagcag

SEQ ID NO: 2185569 - RNA, 17 nt, Human
ucuccuagacugacccu

SEQ ID NO: 2185570 - RNA, 23 nt, Human
ucuccuauccugguuuuuguagc

SEQ ID NO: 2185571 - RNA, 18 nt, Human
acuuuaaguuucaggaua

SEQ ID NO: 2185572 - RNA, 19 nt, Human
acuuuaauuaccaaccugu

SEQ ID NO: 2185573 - RNA, 16 nt, Human
acuuuaagcacuacau

SEQ ID NO: 2185574 - RNA, 19 nt, Human
acuuuaagcagcucuugcu

SEQ ID NO: 2185575 - RNA, 23 nt, Human
acuuuaagcagcucuugcuaauc

SEQ ID NO: 2185576 - RNA, 15 nt, Human
acuuuaaguuucagg

SEQ ID NO: 2185577 - RNA, 14 nt, Human
acuuuaagaggaca

SEQ ID NO: 2185578 - RNA, 13 nt, Human
acuuuaagcacua

SEQ ID NO: 2185579 - RNA, 14 nt, Human
acuuuaagcacuac

SEQ ID NO: 2185580 - RNA, 15 nt, Human
acuuuaagcacuaca

SEQ ID NO: 2185581 - RNA, 17 nt, Human
acuuuaagacugagcac

SEQ ID NO: 2185582 - RNA, 21 nt, Human
acuuguucaaaauauguucuu

SEQ ID NO: 2185583 - RNA, 12 nt, Human
acuuuaaaggaa

SEQ ID NO: 2185584 - RNA, 21 nt, Human
acuuuaaaggaaaaaauguug

SEQ ID NO: 2185585 - RNA, 20 nt, Human
acuuuaaaggaaaaaauguu

SEQ ID NO: 2185586 - RNA, 17 nt, Human
acuuucucaguuuucau

SEQ ID NO: 2185587 - RNA, 14 nt, Human
acuuucucaguuuu

SEQ ID NO: 2185588 - RNA, 14 nt, Human
acuuugaccucugc

SEQ ID NO: 2185589 - RNA, 16 nt, Human
acuuucuagccagagg

SEQ ID NO: 2185590 - RNA, 13 nt, Human
acuuucucaguuu

SEQ ID NO: 2185591 - RNA, 17 nt, Human
acuuucuauccucugua

SEQ ID NO: 2185592 - RNA, 17 nt, Human
acuuucuagccagagga

SEQ ID NO: 2185593 - RNA, 15 nt, Human
acuuuaaaauaaaau

SEQ ID NO: 2185594 - RNA, 16 nt, Human
acuuguuccagcucuu

SEQ ID NO: 2185595 - RNA, 15 nt, Human
acuuguuccagcucu

SEQ ID NO: 2185596 - RNA, 16 nt, Human
ucuccucuccccucua

SEQ ID NO: 2185597 - RNA, 16 nt, Human
acuuguguuuugcaag

SEQ ID NO: 2185598 - RNA, 20 nt, Human
ucuccucaaguccccaagau

SEQ ID NO: 2185599 - RNA, 14 nt, Human
ucuccuauguguaa

SEQ ID NO: 2185600 - RNA, 15 nt, Human
ucuccuauguguaag

SEQ ID NO: 2185601 - RNA, 20 nt, Human
ucuccuccaugggagaaaau

SEQ ID NO: 2185602 - RNA, 19 nt, Human
ucuccuauguguaagguga

SEQ ID NO: 2185603 - RNA, 13 nt, Human
ucuccucacuccc

SEQ ID NO: 2185604 - RNA, 12 nt, Human
ucuccucccagg

SEQ ID NO: 2185605 - RNA, 12 nt, Human
ucuccuccccaa

SEQ ID NO: 2185606 - RNA, 15 nt, Human
ucuccuccccacccg

SEQ ID NO: 2185607 - RNA, 18 nt, Human
ucuccuccccacccgccc

SEQ ID NO: 2185608 - RNA, 13 nt, Human
ucuccucccuucc

SEQ ID NO: 2185609 - RNA, 14 nt, Human
ucuccucccuuccu

SEQ ID NO: 2185610 - RNA, 13 nt, Human
ucuccucuccccu

SEQ ID NO: 2185611 - RNA, 16 nt, Human
ucuccucucagccccu

SEQ ID NO: 2185612 - RNA, 14 nt, Human
ucuccucggccccc

SEQ ID NO: 2185613 - RNA, 21 nt, Human
ucuccucggcccccuccaucg

SEQ ID NO: 2185614 - RNA, 16 nt, Human
ucuccucgcaagcugg

SEQ ID NO: 2185615 - RNA, 16 nt, Human
ucuccuccugcccacc

SEQ ID NO: 2185616 - RNA, 14 nt, Human
ucuccuccugccca

SEQ ID NO: 2185617 - RNA, 23 nt, Human
ucuccucccuuccuuuucccugc

SEQ ID NO: 2185618 - RNA, 21 nt, Human
ucuccuccuuuucacaguucu

SEQ ID NO: 2185619 - RNA, 19 nt, Human
acuguuaugaaauaaagaa

SEQ ID NO: 2185620 - RNA, 23 nt, Human
acuguuaugaaauaaagaaauug

SEQ ID NO: 2185621 - RNA, 20 nt, Human
acuguuagaaaauggacacu

SEQ ID NO: 2185622 - RNA, 13 nt, Human
ucuacccaaagga

SEQ ID NO: 2185623 - RNA, 21 nt, Human
ucuacccaaaggauacuguaa

SEQ ID NO: 2185624 - RNA, 22 nt, Human
ucuacccagagaagccccuucc

SEQ ID NO: 2185625 - RNA, 21 nt, Human
acuguuaccugaucaaugaca

SEQ ID NO: 2185626 - RNA, 23 nt, Human
acuguuaccugaucaaugacaga

SEQ ID NO: 2185627 - RNA, 21 nt, Human
ucuaccagacuguguauucau

SEQ ID NO: 2185628 - RNA, 18 nt, Human
ucuaccauuucagagagg

SEQ ID NO: 2185629 - RNA, 15 nt, Human
ucuaccauuucagag

SEQ ID NO: 2185630 - RNA, 14 nt, Human
ucuaccauuucaga

SEQ ID NO: 2185631 - RNA, 19 nt, Human
ucuaccaugaacagaaaac

SEQ ID NO: 2185632 - RNA, 16 nt, Human
ucuaccagacugugua

SEQ ID NO: 2185633 - RNA, 17 nt, Human
ucuaccagacuguguau

SEQ ID NO: 2185634 - RNA, 22 nt, Human
ucuaccagccucccuauuuuuu

SEQ ID NO: 2185635 - RNA, 20 nt, Human
ucuaccaagcuauccuggcu

SEQ ID NO: 2185636 - RNA, 13 nt, Human
ucuaccagacugu

SEQ ID NO: 2185637 - RNA, 22 nt, Human
ucuacauaaguaauucaagaaa

SEQ ID NO: 2185638 - RNA, 23 nt, Human
ucuacagugguuuuauacugaag

SEQ ID NO: 2185639 - RNA, 22 nt, Human
ucuacagugguuuuauacugaa

SEQ ID NO: 2185640 - RNA, 18 nt, Human
acuguucucuucuugaac

SEQ ID NO: 2185641 - RNA, 21 nt, Human
acuguucucugcccuccaaga

SEQ ID NO: 2185642 - RNA, 15 nt, Human
acuguucucugcccu

SEQ ID NO: 2185643 - RNA, 20 nt, Human
acuguucucugcccuccaag

SEQ ID NO: 2185644 - RNA, 20 nt, Human
acuguucccucugcuccugg

SEQ ID NO: 2185645 - RNA, 22 nt, Human
acuguucccucugcuccuggag

SEQ ID NO: 2185646 - RNA, 14 nt, Human
acuguucucugccc

SEQ ID NO: 2185647 - RNA, 13 nt, Human
acuguuauuuaua

SEQ ID NO: 2185648 - RNA, 19 nt, Human
acuguucccugagguggga

SEQ ID NO: 2185649 - RNA, 16 nt, Human
acuguucccugaggug

SEQ ID NO: 2185650 - RNA, 18 nt, Human
ucuaagccuuuccauaag

SEQ ID NO: 2185651 - RNA, 19 nt, Human
ucuaaggaugucacagggc

SEQ ID NO: 2185652 - RNA, 23 nt, Human
ucuaaggaugucacagggccaac

SEQ ID NO: 2185653 - RNA, 20 nt, Human
ucuaaggaugucacagggcc

SEQ ID NO: 2185654 - RNA, 16 nt, Human
ucuaaagcugccagcc

SEQ ID NO: 2185655 - RNA, 18 nt, Human
ucuaaagccuuaagucuu

SEQ ID NO: 2185656 - RNA, 15 nt, Human
ucuaaagcugccagc

SEQ ID NO: 2185657 - RNA, 20 nt, Human
ucuaaagccauuguaguccu

SEQ ID NO: 2185658 - RNA, 13 nt, Human
ucuaaagcugcca

SEQ ID NO: 2185659 - RNA, 14 nt, Human
ucuaaagcugccag

SEQ ID NO: 2185660 - RNA, 16 nt, Human
ucuacauacuauggaa

SEQ ID NO: 2185661 - RNA, 17 nt, Human
ucuacauaaguaauuca

SEQ ID NO: 2185662 - RNA, 20 nt, Human
ucuacauaaguaauucaaga

SEQ ID NO: 2185663 - RNA, 23 nt, Human
ucuaaguaaaaccacagcaguug

SEQ ID NO: 2185664 - RNA, 12 nt, Human
ucuacagugguu

SEQ ID NO: 2185665 - RNA, 13 nt, Human
ucuacagugguuu

SEQ ID NO: 2185666 - RNA, 21 nt, Human
ucuacagugguuuuauacuga

SEQ ID NO: 2185667 - RNA, 22 nt, Human
ucuaaguaaaaccacagcaguu

SEQ ID NO: 2185668 - RNA, 21 nt, Human
ucuaaguaaaaccacagcagu

SEQ ID NO: 2185669 - RNA, 16 nt, Human
acuuaccauaugugcu

SEQ ID NO: 2185670 - RNA, 21 nt, Human
acuuaccgugagcgacaaaga

SEQ ID NO: 2185671 - RNA, 23 nt, Human
acuuacauuguucaauuagaaua

SEQ ID NO: 2185672 - RNA, 14 nt, Human
acuuacaugauuca

SEQ ID NO: 2185673 - RNA, 19 nt, Human
acuuacaugauucauuuua

SEQ ID NO: 2185674 - RNA, 18 nt, Human
acuuacaugauucauuuu

SEQ ID NO: 2185675 - RNA, 17 nt, Human
acuuacaugauucauuu

SEQ ID NO: 2185676 - RNA, 20 nt, Human
acuuaccuucaauaaaguau

SEQ ID NO: 2185677 - RNA, 19 nt, Human
acuuaccuucaauaaagua

SEQ ID NO: 2185678 - RNA, 17 nt, Human
acuuaccuucaauaaag

SEQ ID NO: 2185679 - RNA, 15 nt, Human
acuuacuugcuuauu

SEQ ID NO: 2185680 - RNA, 17 nt, Human
acuuaccuagauuuaca

SEQ ID NO: 2185681 - RNA, 19 nt, Human
acuuaccuaaacagauaua

SEQ ID NO: 2185682 - RNA, 16 nt, Human
acuuaccuucaauaaa

SEQ ID NO: 2185683 - RNA, 15 nt, Human
acuuaccuucaauaa

SEQ ID NO: 2185684 - RNA, 16 nt, Human
acuuaaucuaaaugga

SEQ ID NO: 2185685 - RNA, 15 nt, Human
acuuaaucuaaaugg

SEQ ID NO: 2185686 - RNA, 19 nt, Human
acuuaaucaauuaauuuuu

SEQ ID NO: 2185687 - RNA, 18 nt, Human
acuuaaucaauuaauuuu

SEQ ID NO: 2185688 - RNA, 15 nt, Human
acuuaauagaaacau

SEQ ID NO: 2185689 - RNA, 14 nt, Human
acuuaauagaaaca

SEQ ID NO: 2185690 - RNA, 13 nt, Human
acuuaaucuaaau

SEQ ID NO: 2185691 - RNA, 14 nt, Human
acuucagcucuguu

SEQ ID NO: 2185692 - RNA, 20 nt, Human
acuuagugcggacaaguuuu

SEQ ID NO: 2185693 - RNA, 17 nt, Human
acuuauaauuuuccuaa

SEQ ID NO: 2185694 - RNA, 16 nt, Human
acuuagaaauugcauu

SEQ ID NO: 2185695 - RNA, 16 nt, Human
acuuagaaagcagggg

SEQ ID NO: 2185696 - RNA, 19 nt, Human
acuuagaaagcaggggcua

SEQ ID NO: 2185697 - RNA, 15 nt, Human
acuuagaauaaaauu

SEQ ID NO: 2185698 - RNA, 16 nt, Human
acuuagaauaaaauug

SEQ ID NO: 2185699 - RNA, 15 nt, Human
acuuagaaagcaggg

SEQ ID NO: 2185700 - RNA, 16 nt, Human
acuuacuugcuuauuu

SEQ ID NO: 2185701 - RNA, 22 nt, Human
acuuagaauaaaauuguaaaau

SEQ ID NO: 2185702 - RNA, 17 nt, Human
acuuagaauaaaauugu

SEQ ID NO: 2185703 - RNA, 18 nt, Human
acuuagaauaaaauugua

SEQ ID NO: 2185704 - RNA, 12 nt, Human
acuuagaggaaa

SEQ ID NO: 2185705 - RNA, 13 nt, Human
acuuagaggaaau

SEQ ID NO: 2185706 - RNA, 12 nt, Human
acuguugcccag

SEQ ID NO: 2185707 - RNA, 13 nt, Human
acuguucuguguc

SEQ ID NO: 2185708 - RNA, 15 nt, Human
acuguucugugucuu

SEQ ID NO: 2185709 - RNA, 16 nt, Human
acuguucugugucuuu

SEQ ID NO: 2185710 - RNA, 17 nt, Human
acuguucugugucuuuc

SEQ ID NO: 2185711 - RNA, 13 nt, Human
acuguugcccagg

SEQ ID NO: 2185712 - RNA, 14 nt, Human
acuguugcccaggc

SEQ ID NO: 2185713 - RNA, 17 nt, Human
acuguugcccaggcugg

SEQ ID NO: 2185714 - RNA, 18 nt, Human
acuguugcccaggcuggc

SEQ ID NO: 2185715 - RNA, 18 nt, Human
acuguugggguggguaua

SEQ ID NO: 2185716 - RNA, 21 nt, Human
acuguucucuucuugaacacu

SEQ ID NO: 2185717 - RNA, 12 nt, Human
acuguugcucaa

SEQ ID NO: 2185718 - RNA, 21 nt, Human
acuguugcucaaaucuauuca

SEQ ID NO: 2185719 - RNA, 20 nt, Human
acuguugggguggguauaaa

SEQ ID NO: 2185720 - RNA, 21 nt, Human
acuguugggguggguauaaaa

SEQ ID NO: 2185721 - RNA, 22 nt, Human
acuguugggguggguauaaaag

SEQ ID NO: 2185722 - RNA, 17 nt, Human
acuuaauaaauucagau

SEQ ID NO: 2185723 - RNA, 13 nt, Human
acuuaauaaauuc

SEQ ID NO: 2185724 - RNA, 19 nt, Human
acuuaaguugguccuuuac

SEQ ID NO: 2185725 - RNA, 17 nt, Human
acuuaagggagaaaaaa

SEQ ID NO: 2185726 - RNA, 15 nt, Human
acuuaaguuaaacau

SEQ ID NO: 2185727 - RNA, 13 nt, Human
acuguuguauaaa

SEQ ID NO: 2185728 - RNA, 20 nt, Human
acuguuguaacuaggcucag

SEQ ID NO: 2185729 - RNA, 13 nt, Human
acuuaauaaugug

SEQ ID NO: 2185730 - RNA, 17 nt, Human
acuuaauaauguguaca

SEQ ID NO: 2185731 - RNA, 21 nt, Human
acuuaauacuaccuugaaaau

SEQ ID NO: 2185732 - RNA, 19 nt, Human
acuuaauacuaccuugaaa

SEQ ID NO: 2185733 - RNA, 18 nt, Human
acuuaauacuaccuugaa

SEQ ID NO: 2185734 - RNA, 17 nt, Human
acuuaauacuaccuuga

SEQ ID NO: 2185735 - RNA, 12 nt, Human
acuguuguauaa

SEQ ID NO: 2185736 - RNA, 15 nt, Human
acuuaaauaauguga

SEQ ID NO: 2185737 - RNA, 16 nt, Human
acuuaaauaaugugaa

SEQ ID NO: 2185738 - RNA, 18 nt, Human
acuuaaauaaugugaaac

SEQ ID NO: 2185739 - RNA, 17 nt, Human
acuuaaauaaugugaaa

SEQ ID NO: 2185740 - RNA, 13 nt, Human
ucuaaaaugaguu

SEQ ID NO: 2185741 - RNA, 23 nt, Human
ucuaaaagguucagggaaccguu

SEQ ID NO: 2185742 - RNA, 11 nt, Human
ucuaaaagaaa

SEQ ID NO: 2185743 - RNA, 17 nt, Human
ucuaaaagauccuuuuu

SEQ ID NO: 2185744 - RNA, 16 nt, Human
ucuaaaagguucaggg

SEQ ID NO: 2185745 - RNA, 14 nt, Human
ucuaaaaacaccaa

SEQ ID NO: 2185746 - RNA, 18 nt, Human
ucuaaaaaacagaggcca

SEQ ID NO: 2185747 - RNA, 11 nt, Human
ucuaaaacaau

SEQ ID NO: 2185748 - RNA, 15 nt, Human
ucuaaaacaauaaaa

SEQ ID NO: 2185749 - RNA, 15 nt, Human
ucuaaaacuaaauag

SEQ ID NO: 2185750 - RNA, 21 nt, Human
ucuaaaacuaaauagcaugua

SEQ ID NO: 2185751 - RNA, 17 nt, Human
ucuaaaacuaaauagca

SEQ ID NO: 2185752 - RNA, 20 nt, Human
ucuaaaacuaaauagcaugu

SEQ ID NO: 2185753 - RNA, 17 nt, Human
ucguuugaaucacagua

SEQ ID NO: 2185754 - RNA, 21 nt, Human
ucguuucaaaaacacaguguu

SEQ ID NO: 2185755 - RNA, 12 nt, Human
ucguuucuguau

SEQ ID NO: 2185756 - RNA, 13 nt, Human
ucguuucuguaua

SEQ ID NO: 2185757 - RNA, 22 nt, Human
ucguuuucaaaauuguuacaaa

SEQ ID NO: 2185758 - RNA, 19 nt, Human
ucgguuucuaacuuggagc

SEQ ID NO: 2185759 - RNA, 20 nt, Human
ucguaaccagccagauccuc

SEQ ID NO: 2185760 - RNA, 13 nt, Human
ucgguuucuccaa

SEQ ID NO: 2185761 - RNA, 15 nt, Human
ucgguuccacguccc

SEQ ID NO: 2185762 - RNA, 23 nt, Human
ucgguuccacgucccccuggggc

SEQ ID NO: 2185763 - RNA, 16 nt, Human
ucguaaaauuaagaaa

SEQ ID NO: 2185764 - RNA, 22 nt, Human
ucgguggagacuaucagcccaa

SEQ ID NO: 2185765 - RNA, 13 nt, Human
ucguaaaauuaag

SEQ ID NO: 2185766 - RNA, 13 nt, Human
ucgguacucccau

SEQ ID NO: 2185767 - RNA, 16 nt, Human
ucgguagguucagcca

SEQ ID NO: 2185768 - RNA, 20 nt, Human
ucgguauccccccaucuugc

SEQ ID NO: 2185769 - RNA, 21 nt, Human
ucgggaggucgaggcaggagg

SEQ ID NO: 2185770 - RNA, 19 nt, Human
ucgggaggucgaggcagga

SEQ ID NO: 2185771 - RNA, 14 nt, Human
ucgggaacaguguu

SEQ ID NO: 2185772 - RNA, 17 nt, Human
ucggcuuuucucagcug

SEQ ID NO: 2185773 - RNA, 16 nt, Human
ucggcugaccaugcuc

SEQ ID NO: 2185774 - RNA, 17 nt, Human
ucgggaggucgaggcag

SEQ ID NO: 2185775 - RNA, 15 nt, Human
ucggcugaccaugcu

SEQ ID NO: 2185776 - RNA, 15 nt, Human
ucggcuccugcugca

SEQ ID NO: 2185777 - RNA, 16 nt, Human
ucggcuccugcugcac

SEQ ID NO: 2185778 - RNA, 17 nt, Human
ucggcuccugcugcacc

SEQ ID NO: 2185779 - RNA, 18 nt, Human
ucggcuccugcugcacca

SEQ ID NO: 2185780 - RNA, 19 nt, Human
ucggcuccccauguguccu

SEQ ID NO: 2185781 - RNA, 12 nt, Human
ucggcucccugg

SEQ ID NO: 2185782 - RNA, 14 nt, Human
ucggcucccuggag

SEQ ID NO: 2185783 - RNA, 11 nt, Human
ucggcuccugc

SEQ ID NO: 2185784 - RNA, 12 nt, Human
ucggcuccugcu

SEQ ID NO: 2185785 - RNA, 13 nt, Human
ucggcuccugcug

SEQ ID NO: 2185786 - RNA, 14 nt, Human
ucggcuccugcugc

SEQ ID NO: 2185787 - RNA, 18 nt, Human
acuguguggacugugaug

SEQ ID NO: 2185788 - RNA, 17 nt, Human
acuguguggacugugau

SEQ ID NO: 2185789 - RNA, 19 nt, Human
acugugugcagacucaaua

SEQ ID NO: 2185790 - RNA, 21 nt, Human
acuguguccuggugcucucug

SEQ ID NO: 2185791 - RNA, 19 nt, Human
acuguguggacugugaugc

SEQ ID NO: 2185792 - RNA, 10 nt, Human
acugugugug

SEQ ID NO: 2185793 - RNA, 18 nt, Human
ucggcucacugcauccuc

SEQ ID NO: 2185794 - RNA, 15 nt, Human
ucgggaacaguguuu

SEQ ID NO: 2185795 - RNA, 14 nt, Human
ucgggcccaccugg

SEQ ID NO: 2185796 - RNA, 17 nt, Human
ucgggcccaccuggcca

SEQ ID NO: 2185797 - RNA, 18 nt, Human
ucgggcccaccuggccac

SEQ ID NO: 2185798 - RNA, 15 nt, Human
ucgggcccagccccc

SEQ ID NO: 2185799 - RNA, 17 nt, Human
ucgggcccaggccaucu

SEQ ID NO: 2185800 - RNA, 21 nt, Human
ucgggcccaccuggccaccug

SEQ ID NO: 2185801 - RNA, 11 nt, Human
ucgggcccagc

SEQ ID NO: 2185802 - RNA, 12 nt, Human
ucgggcccagcc

SEQ ID NO: 2185803 - RNA, 14 nt, Human
ucgggcccagcccc

SEQ ID NO: 2185804 - RNA, 11 nt, Human
ucgggcaugac

SEQ ID NO: 2185805 - RNA, 12 nt, Human
ucgggcaugaca

SEQ ID NO: 2185806 - RNA, 13 nt, Human
ucgggcccuuccc

SEQ ID NO: 2185807 - RNA, 16 nt, Human
ucggggggacagcucc

SEQ ID NO: 2185808 - RNA, 12 nt, Human
ucgggcuccugu

SEQ ID NO: 2185809 - RNA, 13 nt, Human
ucgggggcuggcc

SEQ ID NO: 2185810 - RNA, 16 nt, Human
ucgggggcuggccuag

SEQ ID NO: 2185811 - RNA, 21 nt, Human
ucgguaaguugaauggccugc

SEQ ID NO: 2185812 - RNA, 22 nt, Human
ucggguuuuauuguuuaaaauc

SEQ ID NO: 2185813 - RNA, 13 nt, Human
acuguguccuggu

SEQ ID NO: 2185814 - RNA, 21 nt, Human
acuguguauuccaagacaugu

SEQ ID NO: 2185815 - RNA, 14 nt, Human
acuguguccuggug

SEQ ID NO: 2185816 - RNA, 16 nt, Human
acuguguccuggugcu

SEQ ID NO: 2185817 - RNA, 12 nt, Human
acugugugcuca

SEQ ID NO: 2185818 - RNA, 16 nt, Human
acuguguauuccaaga

SEQ ID NO: 2185819 - RNA, 15 nt, Human
acuguguauuccaag

SEQ ID NO: 2185820 - RNA, 12 nt, Human
acuguguauaga

SEQ ID NO: 2185821 - RNA, 17 nt, Human
acuguguacauaacuga

SEQ ID NO: 2185822 - RNA, 23 nt, Human
acuguguacaguaaauggcuuau

SEQ ID NO: 2185823 - RNA, 15 nt, Human
acugugugcucagga

SEQ ID NO: 2185824 - RNA, 19 nt, Human
acugugugcucaggagccc

SEQ ID NO: 2185825 - RNA, 20 nt, Human
acugugugcucaggagcccu

SEQ ID NO: 2185826 - RNA, 21 nt, Human
acugugugcucaggagcccug

SEQ ID NO: 2185827 - RNA, 18 nt, Human
acuguguacauaacugaa

SEQ ID NO: 2185828 - RNA, 16 nt, Human
acuguguacauaacug

SEQ ID NO: 2185829 - RNA, 12 nt, Human
acuguguacaua

SEQ ID NO: 2185830 - RNA, 14 nt, Human
acugugguccuaug

SEQ ID NO: 2185831 - RNA, 18 nt, Human
acuguggguagacacaca

SEQ ID NO: 2185832 - RNA, 12 nt, Human
acuguggaggaa

SEQ ID NO: 2185833 - RNA, 15 nt, Human
acuguggaggaagga

SEQ ID NO: 2185834 - RNA, 16 nt, Human
acuguggaggaaggau

SEQ ID NO: 2185835 - RNA, 17 nt, Human
acuguggaggaaggauu

SEQ ID NO: 2185836 - RNA, 18 nt, Human
acuguggaggaaggauug

SEQ ID NO: 2185837 - RNA, 21 nt, Human
acugucacuguuucucugcug

SEQ ID NO: 2185838 - RNA, 20 nt, Human
acugucacuguuucucugcu

SEQ ID NO: 2185839 - RNA, 16 nt, Human
acugucacuguuucuc

SEQ ID NO: 2185840 - RNA, 15 nt, Human
acugucacuguuucu

SEQ ID NO: 2185841 - RNA, 21 nt, Human
acugucagcuccccucggaga

SEQ ID NO: 2185842 - RNA, 23 nt, Human
acugucacucauugcugagccuc

SEQ ID NO: 2185843 - RNA, 21 nt, Human
acugggaccuuuagugguggc

SEQ ID NO: 2185844 - RNA, 24 nt, Human
acugucacucauugcugagccucu

SEQ ID NO: 2185845 - RNA, 15 nt, Human
acugucacuguuccu

SEQ ID NO: 2185846 - RNA, 16 nt, Human
acugggaagugacuua

SEQ ID NO: 2185847 - RNA, 23 nt, Human
acugggaagauaggcucugcaca

SEQ ID NO: 2185848 - RNA, 22 nt, Human
acugggaagauaggcucugcac

SEQ ID NO: 2185849 - RNA, 19 nt, Human
acugggaagauaggcucug

SEQ ID NO: 2185850 - RNA, 23 nt, Human
acuggcuuuuauuaaugcacuuu

SEQ ID NO: 2185851 - RNA, 20 nt, Human
acuggcuuuuauuaaugcac

SEQ ID NO: 2185852 - RNA, 21 nt, Human
acuggcuuuuauuaaugcacu

SEQ ID NO: 2185853 - RNA, 16 nt, Human
acugggagaaaugaaa

SEQ ID NO: 2185854 - RNA, 18 nt, Human
acugggacaggggagaac

SEQ ID NO: 2185855 - RNA, 18 nt, Human
acuguccuacccacccuc

SEQ ID NO: 2185856 - RNA, 23 nt, Human
acuguccuacccacccuccuuuc

SEQ ID NO: 2185857 - RNA, 17 nt, Human
acuguccuacccacccu

SEQ ID NO: 2185858 - RNA, 16 nt, Human
acugucagccgggccc

SEQ ID NO: 2185859 - RNA, 19 nt, Human
acugucacuuugcucuggg

SEQ ID NO: 2185860 - RNA, 15 nt, Human
acugucacuuugcuc

SEQ ID NO: 2185861 - RNA, 18 nt, Human
acugucacuuugcucugg

SEQ ID NO: 2185862 - RNA, 19 nt, Human
acuguggaaaaauauuuaa

SEQ ID NO: 2185863 - RNA, 17 nt, Human
acuguggaaaaauauuu

SEQ ID NO: 2185864 - RNA, 15 nt, Human
acuguggaaaaauau

SEQ ID NO: 2185865 - RNA, 14 nt, Human
acuguggaaaaaua

SEQ ID NO: 2185866 - RNA, 11 nt, Human
acugugcuuuc

SEQ ID NO: 2185867 - RNA, 12 nt, Human
acugugcuuucu

SEQ ID NO: 2185868 - RNA, 13 nt, Human
acugugcuuucua

SEQ ID NO: 2185869 - RNA, 14 nt, Human
acugugcuuucuau

SEQ ID NO: 2185870 - RNA, 20 nt, Human
acugugcuuucuauuguaca

SEQ ID NO: 2185871 - RNA, 21 nt, Human
acugugcuuucuauuguacag

SEQ ID NO: 2185872 - RNA, 22 nt, Human
acugugcuuucuauuguacaga

SEQ ID NO: 2185873 - RNA, 22 nt, Human
acugugcuggagccacuaacua

SEQ ID NO: 2185874 - RNA, 18 nt, Human
acugugcuggagccacua

SEQ ID NO: 2185875 - RNA, 21 nt, Human
acugugcuggagccacuaacu

SEQ ID NO: 2185876 - RNA, 16 nt, Human
acugucccuugccuca

SEQ ID NO: 2185877 - RNA, 18 nt, Human
acugucagccgggcccug

SEQ ID NO: 2185878 - RNA, 15 nt, Human
acugugcuggagcca

SEQ ID NO: 2185879 - RNA, 23 nt, Human
acugucccucaaaugacccaaag

SEQ ID NO: 2185880 - RNA, 18 nt, Human
acugcuuguguuuuuaac

SEQ ID NO: 2185881 - RNA, 13 nt, Human
acugcuuguuucc

SEQ ID NO: 2185882 - RNA, 16 nt, Human
acugcuuguuuccuag

SEQ ID NO: 2185883 - RNA, 19 nt, Human
acugcuucaugacauuccu

SEQ ID NO: 2185884 - RNA, 23 nt, Human
acugcuuucuuucguuuguuugu

SEQ ID NO: 2185885 - RNA, 17 nt, Human
acugcuuucuuucguuu

SEQ ID NO: 2185886 - RNA, 14 nt, Human
acuggaguuacauu

SEQ ID NO: 2185887 - RNA, 15 nt, Human
acuggaguuacauua

SEQ ID NO: 2185888 - RNA, 16 nt, Human
acuggaguuacauuaa

SEQ ID NO: 2185889 - RNA, 17 nt, Human
acuggaguuacauuaau

SEQ ID NO: 2185890 - RNA, 13 nt, Human
acuggaguucuau

SEQ ID NO: 2185891 - RNA, 15 nt, Human
acuggaguucuaugc

SEQ ID NO: 2185892 - RNA, 16 nt, Human
acugcuuguguuuuua

SEQ ID NO: 2185893 - RNA, 21 nt, Human
acugcuugugaaaggaaagag

SEQ ID NO: 2185894 - RNA, 17 nt, Human
acugcuuccagugaggc

SEQ ID NO: 2185895 - RNA, 20 nt, Human
acugcuuaacuucacauauu

SEQ ID NO: 2185896 - RNA, 18 nt, Human
acuggauacugcccgggg

SEQ ID NO: 2185897 - RNA, 19 nt, Human
acuggaguucuaugcucuc

SEQ ID NO: 2185898 - RNA, 10 nt, Human
acuggaugaa

SEQ ID NO: 2185899 - RNA, 11 nt, Human
acuggaugaaa

SEQ ID NO: 2185900 - RNA, 22 nt, Human
acuggaugaaauaacuccuucu

SEQ ID NO: 2185901 - RNA, 13 nt, Human
acuggaugaagau

SEQ ID NO: 2185902 - RNA, 15 nt, Human
acuggauuaaacuua

SEQ ID NO: 2185903 - RNA, 18 nt, Human
acuggaugcagaaacagu

SEQ ID NO: 2185904 - RNA, 17 nt, Human
acuggaugcagaaacag

SEQ ID NO: 2185905 - RNA, 14 nt, Human
acuggaugaagauu

SEQ ID NO: 2185906 - RNA, 13 nt, Human
acuggcacaguuu

SEQ ID NO: 2185907 - RNA, 16 nt, Human
acuggccacaguuguu

SEQ ID NO: 2185908 - RNA, 14 nt, Human
acuggccaccaggc

SEQ ID NO: 2185909 - RNA, 15 nt, Human
acuggccaccaggcu

SEQ ID NO: 2185910 - RNA, 17 nt, Human
acuggcauugucccugu

SEQ ID NO: 2185911 - RNA, 21 nt, Human
acuggcauugucccugugccu

SEQ ID NO: 2185912 - RNA, 20 nt, Human
acuggcacaguuuucugaga

SEQ ID NO: 2185913 - RNA, 19 nt, Human
acuggcacaguuuucugag

SEQ ID NO: 2185914 - RNA, 23 nt, Human
acugcuacaaauacucuuaggaa

SEQ ID NO: 2185915 - RNA, 20 nt, Human
acugcuaaguauuucccagc

SEQ ID NO: 2185916 - RNA, 17 nt, Human
acugcuaaguauuuccc

SEQ ID NO: 2185917 - RNA, 18 nt, Human
acugcuaaguauuuccca

SEQ ID NO: 2185918 - RNA, 19 nt, Human
acugcuaaguauuucccag

SEQ ID NO: 2185919 - RNA, 13 nt, Human
acugcuacuguaa

SEQ ID NO: 2185920 - RNA, 19 nt, Human
acugcuccccagcccuggc

SEQ ID NO: 2185921 - RNA, 20 nt, Human
acugcuccccagcccuggcu

SEQ ID NO: 2185922 - RNA, 21 nt, Human
acugcuccccagcccuggcuc

SEQ ID NO: 2185923 - RNA, 18 nt, Human
acugcuaagaauauuuga

SEQ ID NO: 2185924 - RNA, 16 nt, Human
acugcuaagaauauuu

SEQ ID NO: 2185925 - RNA, 16 nt, Human
acugcuaaauaaaauu

SEQ ID NO: 2185926 - RNA, 17 nt, Human
acugcuaaauaaaauuu

SEQ ID NO: 2185927 - RNA, 19 nt, Human
acugcuaaauaaaauuugu

SEQ ID NO: 2185928 - RNA, 20 nt, Human
acugcuaaauaaaauuuguu

SEQ ID NO: 2185929 - RNA, 13 nt, Human
acugccuucucaa

SEQ ID NO: 2185930 - RNA, 19 nt, Human
acugccuucucaacuccaa

SEQ ID NO: 2185931 - RNA, 20 nt, Human
acugccuucucaacuccaaa

SEQ ID NO: 2185932 - RNA, 23 nt, Human
acugccuucgcuucuugccucug

SEQ ID NO: 2185933 - RNA, 13 nt, Human
acugcuaaauaaa

SEQ ID NO: 2185934 - RNA, 14 nt, Human
acugcuaaauaaaa

SEQ ID NO: 2185935 - RNA, 15 nt, Human
acugcuaaauaaaau

SEQ ID NO: 2185936 - RNA, 22 nt, Human
acugcuguaaauaaaugcuuua

SEQ ID NO: 2185937 - RNA, 21 nt, Human
acugcugugcugugcccaagu

SEQ ID NO: 2185938 - RNA, 18 nt, Human
acugcuuaacuucacaua

SEQ ID NO: 2185939 - RNA, 19 nt, Human
acugcugggacuggccagg

SEQ ID NO: 2185940 - RNA, 18 nt, Human
acugcugggacuggccag

SEQ ID NO: 2185941 - RNA, 13 nt, Human
acugcugggacug

SEQ ID NO: 2185942 - RNA, 12 nt, Human
acugcugggugg

SEQ ID NO: 2185943 - RNA, 13 nt, Human
acugcuggguggc

SEQ ID NO: 2185944 - RNA, 16 nt, Human
acugcuggguggccca

SEQ ID NO: 2185945 - RNA, 17 nt, Human
acugcuggguggcccau

SEQ ID NO: 2185946 - RNA, 18 nt, Human
acugcuggguggcccauc

SEQ ID NO: 2185947 - RNA, 19 nt, Human
acugcuggguggcccaucc

SEQ ID NO: 2185948 - RNA, 20 nt, Human
acugcuggguggcccauccc

SEQ ID NO: 2185949 - RNA, 14 nt, Human
acugcuggcugccu

SEQ ID NO: 2185950 - RNA, 15 nt, Human
acugcuggcugccuu

SEQ ID NO: 2185951 - RNA, 23 nt, Human
acugcucccugaagccagccuuc

SEQ ID NO: 2185952 - RNA, 15 nt, Human
acugcucccugaagc

SEQ ID NO: 2185953 - RNA, 16 nt, Human
acugcucccugaagcc

SEQ ID NO: 2185954 - RNA, 17 nt, Human
acugcucccugaagcca

SEQ ID NO: 2185955 - RNA, 18 nt, Human
acugcucccugaagccag

SEQ ID NO: 2185956 - RNA, 19 nt, Human
acugcucccugaagccagc

SEQ ID NO: 2185957 - RNA, 20 nt, Human
acugcucccugaagccagcc

SEQ ID NO: 2185958 - RNA, 21 nt, Human
acugcucccugaagccagccu

SEQ ID NO: 2185959 - RNA, 22 nt, Human
acugcucccugaagccagccuu

SEQ ID NO: 2185960 - RNA, 22 nt, Human
acugcauaccaaccugggcaau

SEQ ID NO: 2185961 - RNA, 21 nt, Human
uccuagagggaggggccuagg

SEQ ID NO: 2185962 - RNA, 20 nt, Human
uccuagagggaggggccuag

SEQ ID NO: 2185963 - RNA, 17 nt, Human
uccuagagggaggggcc

SEQ ID NO: 2185964 - RNA, 14 nt, Human
uccuagaggaccug

SEQ ID NO: 2185965 - RNA, 15 nt, Human
uccuagaggaccuga

SEQ ID NO: 2185966 - RNA, 18 nt, Human
uccuagagacagaagcag

SEQ ID NO: 2185967 - RNA, 19 nt, Human
uccuagagacagaagcagg

SEQ ID NO: 2185968 - RNA, 16 nt, Human
acugcauaugaaagga

SEQ ID NO: 2185969 - RNA, 18 nt, Human
acugcauacuuuuuaaau

SEQ ID NO: 2185970 - RNA, 17 nt, Human
acugcauacuuuuuaaa

SEQ ID NO: 2185971 - RNA, 16 nt, Human
acugcauacuuuuuaa

SEQ ID NO: 2185972 - RNA, 13 nt, Human
acugcauacuuuu

SEQ ID NO: 2185973 - RNA, 22 nt, Human
uccuagaaauuccccacccuga

SEQ ID NO: 2185974 - RNA, 21 nt, Human
uccuagaaauuccccacccug

SEQ ID NO: 2185975 - RNA, 19 nt, Human
uccuagaaguuacugaaug

SEQ ID NO: 2185976 - RNA, 20 nt, Human
uccuagaaguuacugaaugc

SEQ ID NO: 2185977 - RNA, 21 nt, Human
uccuagaaguuacugaaugca

SEQ ID NO: 2185978 - RNA, 17 nt, Human
uccuagagaacgcagcc

SEQ ID NO: 2185979 - RNA, 18 nt, Human
uccuagagaacgcagccc

SEQ ID NO: 2185980 - RNA, 19 nt, Human
uccuagagaacgcagcccu

SEQ ID NO: 2185981 - RNA, 23 nt, Human
uccuagagaacgcagcccuagag

SEQ ID NO: 2185982 - RNA, 20 nt, Human
acugcauccuccgccucccg

SEQ ID NO: 2185983 - RNA, 17 nt, Human
acugcauccuccgccuc

SEQ ID NO: 2185984 - RNA, 23 nt, Human
acugcauacuuuuuaaauguaaa

SEQ ID NO: 2185985 - RNA, 20 nt, Human
acugcauacuuuuuaaaugu

SEQ ID NO: 2185986 - RNA, 20 nt, Human
acugcaucaagaugugacau

SEQ ID NO: 2185987 - RNA, 22 nt, Human
acugcaucaagaugugacaugu

SEQ ID NO: 2185988 - RNA, 23 nt, Human
acugcauccuccgccucccgggu

SEQ ID NO: 2185989 - RNA, 14 nt, Human
acugcaugcacuuc

SEQ ID NO: 2185990 - RNA, 12 nt, Human
acugcaugcacu

SEQ ID NO: 2185991 - RNA, 17 nt, Human
acugcaugcugcuggac

SEQ ID NO: 2185992 - RNA, 16 nt, Human
acugcaugcugcugga

SEQ ID NO: 2185993 - RNA, 13 nt, Human
acugcaugcugcu

SEQ ID NO: 2185994 - RNA, 18 nt, Human
acugcaugcacuucuuac

SEQ ID NO: 2185995 - RNA, 16 nt, Human
acugcauguuugugau

SEQ ID NO: 2185996 - RNA, 15 nt, Human
acugcauguuuguga

SEQ ID NO: 2185997 - RNA, 22 nt, Human
acugccucgggaaccucacucu

SEQ ID NO: 2185998 - RNA, 19 nt, Human
acugccucgaaacacagaa

SEQ ID NO: 2185999 - RNA, 17 nt, Human
acugccucgaaacacag

SEQ ID NO: 2186000 - RNA, 15 nt, Human
acugcauugagaacu

SEQ ID NO: 2186001 - RNA, 12 nt, Human
acugccucaggu

SEQ ID NO: 2186002 - RNA, 13 nt, Human
acugccucagguu

SEQ ID NO: 2186003 - RNA, 15 nt, Human
acugccucagguucc

SEQ ID NO: 2186004 - RNA, 16 nt, Human
acugccucagguuccu

SEQ ID NO: 2186005 - RNA, 16 nt, Human
acugccuauuuuaaua

SEQ ID NO: 2186006 - RNA, 21 nt, Human
acugccuauuuuaauaaacac

SEQ ID NO: 2186007 - RNA, 20 nt, Human
acugcauuaccgcguuguaa

SEQ ID NO: 2186008 - RNA, 21 nt, Human
acugcauuaccgcguuguaaa

SEQ ID NO: 2186009 - RNA, 22 nt, Human
acugcauuaccgcguuguaaaa

SEQ ID NO: 2186010 - RNA, 21 nt, Human
acugcauguaccauuugcaug

SEQ ID NO: 2186011 - RNA, 14 nt, Human
acugcauuauauuu

SEQ ID NO: 2186012 - RNA, 16 nt, Human
acugcauuagaaauua

SEQ ID NO: 2186013 - RNA, 23 nt, Human
acugcauuaccgcguuguaaaau

SEQ ID NO: 2186014 - RNA, 15 nt, Human
acugcauuauauuua

SEQ ID NO: 2186015 - RNA, 16 nt, Human
acugccucucccuggc

SEQ ID NO: 2186016 - RNA, 18 nt, Human
acugccucucccuggccc

SEQ ID NO: 2186017 - RNA, 17 nt, Human
acugccucucccuggcc

SEQ ID NO: 2186018 - RNA, 19 nt, Human
acugccucucccuggcccu

SEQ ID NO: 2186019 - RNA, 14 nt, Human
acugccucuuccuc

SEQ ID NO: 2186020 - RNA, 15 nt, Human
acugccucuuccucc

SEQ ID NO: 2186021 - RNA, 23 nt, Human
acugccugcccacccguggagau

SEQ ID NO: 2186022 - RNA, 22 nt, Human
acugccugcccacccguggaga

SEQ ID NO: 2186023 - RNA, 19 nt, Human
acugccugcccacccgugg

SEQ ID NO: 2186024 - RNA, 16 nt, Human
acugccugcccacccg

SEQ ID NO: 2186025 - RNA, 14 nt, Human
acugccugcccacc

SEQ ID NO: 2186026 - RNA, 13 nt, Human
acugccugcccac

SEQ ID NO: 2186027 - RNA, 12 nt, Human
acugccugccca

SEQ ID NO: 2186028 - RNA, 24 nt, Human
acugccugcagaggucugugcuga

SEQ ID NO: 2186029 - RNA, 9 nt, Human
acugccugc

SEQ ID NO: 2186030 - RNA, 22 nt, Human
acugccugcagaggucugugcu

SEQ ID NO: 2186031 - RNA, 23 nt, Human
acugccugcagaggucugugcug

SEQ ID NO: 2186032 - RNA, 17 nt, Human
acugccugauggaccug

SEQ ID NO: 2186033 - RNA, 20 nt, Human
acugccugauggaccuguca

SEQ ID NO: 2186034 - RNA, 14 nt, Human
acugccuuaaaacu

SEQ ID NO: 2186035 - RNA, 14 nt, Human
acugccugggcucc

SEQ ID NO: 2186036 - RNA, 15 nt, Human
acugccuuaaaacuu

SEQ ID NO: 2186037 - RNA, 16 nt, Human
acugccuuaaaacuuu

SEQ ID NO: 2186038 - RNA, 15 nt, Human
acugccuucgcuucu

SEQ ID NO: 2186039 - RNA, 16 nt, Human
acugccuucgcuucuu

SEQ ID NO: 2186040 - RNA, 17 nt, Human
acugccuucgcuucuug

SEQ ID NO: 2186041 - RNA, 21 nt, Human
acugccuucgcuucuugccuc

SEQ ID NO: 2186042 - RNA, 22 nt, Human
acugccuucgcuucuugccucu

SEQ ID NO: 2186043 - RNA, 14 nt, Human
ucgacuugcauuuu

SEQ ID NO: 2186044 - RNA, 16 nt, Human
ucgaauuaauagcuuu

SEQ ID NO: 2186045 - RNA, 21 nt, Human
ucgaauuaauagcuuuuauug

SEQ ID NO: 2186046 - RNA, 14 nt, Human
ucgagaacuuucau

SEQ ID NO: 2186047 - RNA, 20 nt, Human
ucgaaucuacuaauuccaca

SEQ ID NO: 2186048 - RNA, 14 nt, Human
ucgaaucucugugc

SEQ ID NO: 2186049 - RNA, 16 nt, Human
ucgaaucucugugccu

SEQ ID NO: 2186050 - RNA, 17 nt, Human
ucgaaucucugugccuu

SEQ ID NO: 2186051 - RNA, 15 nt, Human
ucgaauuaauagcuu

SEQ ID NO: 2186052 - RNA, 22 nt, Human
ucgaaucucugugccuucgucu

SEQ ID NO: 2186053 - RNA, 13 nt, Human
ucgagaccagccu

SEQ ID NO: 2186054 - RNA, 18 nt, Human
ucgagaccaaccugacca

SEQ ID NO: 2186055 - RNA, 14 nt, Human
ucgagacagaaccu

SEQ ID NO: 2186056 - RNA, 21 nt, Human
ucgagaagcugcucuggaauu

SEQ ID NO: 2186057 - RNA, 16 nt, Human
ucgagacacagugaag

SEQ ID NO: 2186058 - RNA, 14 nt, Human
ucgagacacuugcc

SEQ ID NO: 2186059 - RNA, 22 nt, Human
ucgagaacuuucauuuuuuucc

SEQ ID NO: 2186060 - RNA, 19 nt, Human
ucgagaagcugcucuggaa

SEQ ID NO: 2186061 - RNA, 15 nt, Human
ucgagaacuuucauu

SEQ ID NO: 2186062 - RNA, 16 nt, Human
ucgagaacuuucauuu

SEQ ID NO: 2186063 - RNA, 17 nt, Human
ucgagaccagccuggcc

SEQ ID NO: 2186064 - RNA, 16 nt, Human
ucgagaccagccuggc

SEQ ID NO: 2186065 - RNA, 14 nt, Human
ucgagaccagccug

SEQ ID NO: 2186066 - RNA, 15 nt, Human
ucgagaccagccugg

SEQ ID NO: 2186067 - RNA, 18 nt, Human
ucgagaccagccuggcca

SEQ ID NO: 2186068 - RNA, 19 nt, Human
ucgagaccagccuggccaa

SEQ ID NO: 2186069 - RNA, 22 nt, Human
uccuuuagcgcccaguugggug

SEQ ID NO: 2186070 - RNA, 23 nt, Human
uccuuuagcgcccaguugggugg

SEQ ID NO: 2186071 - RNA, 23 nt, Human
uccuuucucagccgcuucugacu

SEQ ID NO: 2186072 - RNA, 15 nt, Human
uccuuucucauccca

SEQ ID NO: 2186073 - RNA, 16 nt, Human
uccuuucuccagccag

SEQ ID NO: 2186074 - RNA, 14 nt, Human
uccuuucucagccg

SEQ ID NO: 2186075 - RNA, 15 nt, Human
uccuuucuauugaaa

SEQ ID NO: 2186076 - RNA, 13 nt, Human
uccuuucucaccg

SEQ ID NO: 2186077 - RNA, 19 nt, Human
uccuuuacacucaggcuuu

SEQ ID NO: 2186078 - RNA, 21 nt, Human
uccuuucuaucauuuuuguac

SEQ ID NO: 2186079 - RNA, 11 nt, Human
uccuuucuauc

SEQ ID NO: 2186080 - RNA, 19 nt, Human
ucgaagcucagcccacccc

SEQ ID NO: 2186081 - RNA, 18 nt, Human
ucgaagcucagcccaccc

SEQ ID NO: 2186082 - RNA, 20 nt, Human
uccuuucuuuuucuucuucc

SEQ ID NO: 2186083 - RNA, 14 nt, Human
uccuuucuuuuucu

SEQ ID NO: 2186084 - RNA, 16 nt, Human
uccuuucuuuuucuuc

SEQ ID NO: 2186085 - RNA, 17 nt, Human
uccuuucuuuuucuucu

SEQ ID NO: 2186086 - RNA, 17 nt, Human
uccuuucuccagccagc

SEQ ID NO: 2186087 - RNA, 18 nt, Human
uccuuucuccagccagca

SEQ ID NO: 2186088 - RNA, 15 nt, Human
uccuuucuuucuaac

SEQ ID NO: 2186089 - RNA, 22 nt, Human
uccuuucuugguucauaaauga

SEQ ID NO: 2186090 - RNA, 20 nt, Human
uccuuucuugguucauaaau

SEQ ID NO: 2186091 - RNA, 16 nt, Human
ucgcggcggagcuggc

SEQ ID NO: 2186092 - RNA, 18 nt, Human
ucgcggcggagcuggccc

SEQ ID NO: 2186093 - RNA, 19 nt, Human
ucgcggcggagcuggcccc

SEQ ID NO: 2186094 - RNA, 20 nt, Human
ucgcggcggagcuggccccg

SEQ ID NO: 2186095 - RNA, 15 nt, Human
ucgcgcugccugugu

SEQ ID NO: 2186096 - RNA, 16 nt, Human
ucgcgcugccugugug

SEQ ID NO: 2186097 - RNA, 14 nt, Human
ucgcgcucagcaug

SEQ ID NO: 2186098 - RNA, 12 nt, Human
ucgcgcugccug

SEQ ID NO: 2186099 - RNA, 13 nt, Human
ucgcgcugccugu

SEQ ID NO: 2186100 - RNA, 18 nt, Human
ucgcucaaucaagaaaau

SEQ ID NO: 2186101 - RNA, 18 nt, Human
ucgcuauugucaccaggg

SEQ ID NO: 2186102 - RNA, 20 nt, Human
ucgcgugcccucgcugcuuc

SEQ ID NO: 2186103 - RNA, 16 nt, Human
ucgcgugcccucgcug

SEQ ID NO: 2186104 - RNA, 18 nt, Human
ucgcgugcccucgcugcu

SEQ ID NO: 2186105 - RNA, 14 nt, Human
acuggcuuuuauua

SEQ ID NO: 2186106 - RNA, 18 nt, Human
acuggcuuuuauuaaugc

SEQ ID NO: 2186107 - RNA, 19 nt, Human
acuggcuuuuauuaaugca

SEQ ID NO: 2186108 - RNA, 18 nt, Human
acuggcuuuggcuucuug

SEQ ID NO: 2186109 - RNA, 16 nt, Human
acuggcuuuggcuucu

SEQ ID NO: 2186110 - RNA, 15 nt, Human
acuggcuuuggcuuc

SEQ ID NO: 2186111 - RNA, 13 nt, Human
acuggcuuuggcu

SEQ ID NO: 2186112 - RNA, 21 nt, Human
acuggcugucaguaugacauu

SEQ ID NO: 2186113 - RNA, 17 nt, Human
acuggcugucaguauga

SEQ ID NO: 2186114 - RNA, 17 nt, Human
ucgaggaaccagagcca

SEQ ID NO: 2186115 - RNA, 19 nt, Human
ucgcgacaaugcaaaccau

SEQ ID NO: 2186116 - RNA, 16 nt, Human
ucgcgacaaugcaaac

SEQ ID NO: 2186117 - RNA, 16 nt, Human
ucgagcaugccuggau

SEQ ID NO: 2186118 - RNA, 18 nt, Human
ucgagcaugccuggaugg

SEQ ID NO: 2186119 - RNA, 14 nt, Human
ucgagaccagucug

SEQ ID NO: 2186120 - RNA, 12 nt, Human
uccuuccaccuc

SEQ ID NO: 2186121 - RNA, 22 nt, Human
acuggccucgccuggccugagg

SEQ ID NO: 2186122 - RNA, 23 nt, Human
acuggccucgccuggccugaggu

SEQ ID NO: 2186123 - RNA, 14 nt, Human
uccuuccaccuccc

SEQ ID NO: 2186124 - RNA, 13 nt, Human
uccuuccaggccc

SEQ ID NO: 2186125 - RNA, 17 nt, Human
uccuuccaccucccucc

SEQ ID NO: 2186126 - RNA, 16 nt, Human
uccuucagugccuuau

SEQ ID NO: 2186127 - RNA, 17 nt, Human
uccuucagugccuuaug

SEQ ID NO: 2186128 - RNA, 13 nt, Human
uccuuccaugaaa

SEQ ID NO: 2186129 - RNA, 17 nt, Human
uccuuccaucccuaccc

SEQ ID NO: 2186130 - RNA, 16 nt, Human
uccuuccaucccuacc

SEQ ID NO: 2186131 - RNA, 21 nt, Human
uccuuccaggcccccaccacu

SEQ ID NO: 2186132 - RNA, 16 nt, Human
uccuuccaggccccca

SEQ ID NO: 2186133 - RNA, 15 nt, Human
uccuuccaucaaaua

SEQ ID NO: 2186134 - RNA, 21 nt, Human
uccuuccaguguccuuagaac

SEQ ID NO: 2186135 - RNA, 16 nt, Human
uccuuccuucccuggc

SEQ ID NO: 2186136 - RNA, 15 nt, Human
uccuuccuucccugg

SEQ ID NO: 2186137 - RNA, 14 nt, Human
uccuuccuucccug

SEQ ID NO: 2186138 - RNA, 15 nt, Human
uccuuccuucccacc

SEQ ID NO: 2186139 - RNA, 19 nt, Human
uccuuccuguucugaacug

SEQ ID NO: 2186140 - RNA, 14 nt, Human
uccuuccuucccac

SEQ ID NO: 2186141 - RNA, 16 nt, Human
uccuuccuguucugaa

SEQ ID NO: 2186142 - RNA, 23 nt, Human
uccuucccaaaggacuccaccca

SEQ ID NO: 2186143 - RNA, 18 nt, Human
uccuucccaaaggacucc

SEQ ID NO: 2186144 - RNA, 14 nt, Human
acuggccccugggu

SEQ ID NO: 2186145 - RNA, 15 nt, Human
acuggccccuggguc

SEQ ID NO: 2186146 - RNA, 21 nt, Human
acuggccccuagaaucagccu

SEQ ID NO: 2186147 - RNA, 12 nt, Human
acuggccccugg

SEQ ID NO: 2186148 - RNA, 13 nt, Human
acuggccccuggg

SEQ ID NO: 2186149 - RNA, 23 nt, Human
acuggccaguggcuggaucugug

SEQ ID NO: 2186150 - RNA, 13 nt, Human
acuggccaucucc

SEQ ID NO: 2186151 - RNA, 14 nt, Human
acuggccaucucca

SEQ ID NO: 2186152 - RNA, 23 nt, Human
acuggccaccaggcuggcgcagc

SEQ ID NO: 2186153 - RNA, 21 nt, Human
acuggccaccaggcuggcgca

SEQ ID NO: 2186154 - RNA, 22 nt, Human
acuggccaccaggcuggcgcag

SEQ ID NO: 2186155 - RNA, 16 nt, Human
acuggccaccaggcug

SEQ ID NO: 2186156 - RNA, 17 nt, Human
acuggccaccaggcugg

SEQ ID NO: 2186157 - RNA, 18 nt, Human
acuggccaccaggcuggc

SEQ ID NO: 2186158 - RNA, 19 nt, Human
acuggccaccaggcuggcg

SEQ ID NO: 2186159 - RNA, 17 nt, Human
acuggccccugggucag

SEQ ID NO: 2186160 - RNA, 19 nt, Human
acuggccggagucagugcc

SEQ ID NO: 2186161 - RNA, 22 nt, Human
acuggccggucugcaagucaga

SEQ ID NO: 2186162 - RNA, 16 nt, Human
acuggccucgccuggc

SEQ ID NO: 2186163 - RNA, 23 nt, Human
acuggccggucugcaagucagag

SEQ ID NO: 2186164 - RNA, 14 nt, Human
acuggccucugcug

SEQ ID NO: 2186165 - RNA, 17 nt, Human
acuggccucgccuggcc

SEQ ID NO: 2186166 - RNA, 18 nt, Human
acuggccucgccuggccu

SEQ ID NO: 2186167 - RNA, 19 nt, Human
acuggccucgccuggccug

SEQ ID NO: 2186168 - RNA, 14 nt, Human
uccuucagugccuu

SEQ ID NO: 2186169 - RNA, 15 nt, Human
uccuucagugccuua

SEQ ID NO: 2186170 - RNA, 17 nt, Human
uccuucugaccacagca

SEQ ID NO: 2186171 - RNA, 21 nt, Human
uccuuggugugacccucugaa

SEQ ID NO: 2186172 - RNA, 18 nt, Human
uccuucugccugagcuuc

SEQ ID NO: 2186173 - RNA, 13 nt, Human
uccuucuccuccu

SEQ ID NO: 2186174 - RNA, 12 nt, Human
uccuucucuguc

SEQ ID NO: 2186175 - RNA, 15 nt, Human
uccuucucugucuca

SEQ ID NO: 2186176 - RNA, 15 nt, Human
uccuucugaaguguu

SEQ ID NO: 2186177 - RNA, 20 nt, Human
uccuucucucaccuccuaaa

SEQ ID NO: 2186178 - RNA, 12 nt, Human
uccuucucccuu

SEQ ID NO: 2186179 - RNA, 18 nt, Human
uccuucuaguuucccaca

SEQ ID NO: 2186180 - RNA, 16 nt, Human
uccuuccuugaccagc

SEQ ID NO: 2186181 - RNA, 17 nt, Human
uccuucuaguuucccac

SEQ ID NO: 2186182 - RNA, 16 nt, Human
uccuucuaguuuccca

SEQ ID NO: 2186183 - RNA, 19 nt, Human
uccuuccuugcuguccuag

SEQ ID NO: 2186184 - RNA, 12 nt, Human
uccuugugcaug

SEQ ID NO: 2186185 - RNA, 18 nt, Human
uccuuguggccugggccu

SEQ ID NO: 2186186 - RNA, 19 nt, Human
uccuuguggccugggccuc

SEQ ID NO: 2186187 - RNA, 17 nt, Human
uccuugugguuuauguc

SEQ ID NO: 2186188 - RNA, 15 nt, Human
uccuuguauuuaaau

SEQ ID NO: 2186189 - RNA, 13 nt, Human
uccuugucacugg

SEQ ID NO: 2186190 - RNA, 15 nt, Human
uccuuguccacccac

SEQ ID NO: 2186191 - RNA, 16 nt, Human
uccuuguccacccacc

SEQ ID NO: 2186192 - RNA, 13 nt, Human
uccuuguccccac

SEQ ID NO: 2186193 - RNA, 14 nt, Human
uccuuguccccaca

SEQ ID NO: 2186194 - RNA, 16 nt, Human
uccuuguccccacacu

SEQ ID NO: 2186195 - RNA, 17 nt, Human
uccuuguccccacacuc

SEQ ID NO: 2186196 - RNA, 18 nt, Human
uccuuguccccacacucc

SEQ ID NO: 2186197 - RNA, 19 nt, Human
uccuuguccccacacuccu

SEQ ID NO: 2186198 - RNA, 20 nt, Human
uccuuguccccacacuccua

SEQ ID NO: 2186199 - RNA, 22 nt, Human
uccuuguccccacacuccuaca

SEQ ID NO: 2186200 - RNA, 21 nt, Human
uccuuuaauuuuuuacuauuu

SEQ ID NO: 2186201 - RNA, 21 nt, Human
uccuuuaaaaaaauuuaagug

SEQ ID NO: 2186202 - RNA, 12 nt, Human
uccuuuacacau

SEQ ID NO: 2186203 - RNA, 22 nt, Human
uccuuuacacauucggcucccu

SEQ ID NO: 2186204 - RNA, 15 nt, Human
uccuuuagcgcccag

SEQ ID NO: 2186205 - RNA, 19 nt, Human
uccuuuagcgcccaguugg

SEQ ID NO: 2186206 - RNA, 17 nt, Human
uccuuuaaauccuucca

SEQ ID NO: 2186207 - RNA, 22 nt, Human
uccuuguuucaaacacaaaugc

SEQ ID NO: 2186208 - RNA, 16 nt, Human
uccuuuaaaaaaauuu

SEQ ID NO: 2186209 - RNA, 22 nt, Human
uccuuuaaaaaaauuuaagugc

SEQ ID NO: 2186210 - RNA, 14 nt, Human
uccuuguuccuaga

SEQ ID NO: 2186211 - RNA, 19 nt, Human
uccuugugguuuaugucau

SEQ ID NO: 2186212 - RNA, 22 nt, Human
uccuugugguuuaugucaucau

SEQ ID NO: 2186213 - RNA, 13 nt, Human
uccuuguuucaaa

SEQ ID NO: 2186214 - RNA, 14 nt, Human
uccuuguuucaaac

SEQ ID NO: 2186215 - RNA, 23 nt, Human
uccuuguguuacuaaguuuuuau

SEQ ID NO: 2186216 - RNA, 14 nt, Human
uccuuguguuacua

SEQ ID NO: 2186217 - RNA, 14 nt, Human
ucccuggggugggg

SEQ ID NO: 2186218 - RNA, 20 nt, Human
ucccugggggaagcccugga

SEQ ID NO: 2186219 - RNA, 19 nt, Human
ucccugggggaagcccugg

SEQ ID NO: 2186220 - RNA, 18 nt, Human
ucccugggggaagcccug

SEQ ID NO: 2186221 - RNA, 21 nt, Human
acuccugcaggcagccaggcc

SEQ ID NO: 2186222 - RNA, 19 nt, Human
ucccuggucccuuggagac

SEQ ID NO: 2186223 - RNA, 14 nt, Human
ucccuggucccuug

SEQ ID NO: 2186224 - RNA, 21 nt, Human
ucccugguaauaaguacugug

SEQ ID NO: 2186225 - RNA, 13 nt, Human
ucccuggucccuu

SEQ ID NO: 2186226 - RNA, 21 nt, Human
ucccugggggaagcccuggau

SEQ ID NO: 2186227 - RNA, 15 nt, Human
ucccuguccuccucg

SEQ ID NO: 2186228 - RNA, 20 nt, Human
ucccugugccuaacaccagc

SEQ ID NO: 2186229 - RNA, 16 nt, Human
ucccugucggccuggu

SEQ ID NO: 2186230 - RNA, 14 nt, Human
ucccuguccuccuc

SEQ ID NO: 2186231 - RNA, 12 nt, Human
ucccuguccucc

SEQ ID NO: 2186232 - RNA, 14 nt, Human
ucccugucccucua

SEQ ID NO: 2186233 - RNA, 12 nt, Human
ucccugucccag

SEQ ID NO: 2186234 - RNA, 15 nt, Human
ucccugguggcagcu

SEQ ID NO: 2186235 - RNA, 19 nt, Human
ucccuuuccuuccaucccu

SEQ ID NO: 2186236 - RNA, 18 nt, Human
ucccuuuccuuccauccc

SEQ ID NO: 2186237 - RNA, 23 nt, Human
ucccuuuccuuccaucccuaccc

SEQ ID NO: 2186238 - RNA, 14 nt, Human
ucccuuucuccccu

SEQ ID NO: 2186239 - RNA, 15 nt, Human
ucccuuucuccccug

SEQ ID NO: 2186240 - RNA, 16 nt, Human
ucccuuucuccccugc

SEQ ID NO: 2186241 - RNA, 17 nt, Human
ucccuuucuccccugcc

SEQ ID NO: 2186242 - RNA, 18 nt, Human
ucccuuucuccccugccc

SEQ ID NO: 2186243 - RNA, 17 nt, Human
ucccuuuccuuccaucc

SEQ ID NO: 2186244 - RNA, 14 nt, Human
ucccuuuccuucca

SEQ ID NO: 2186245 - RNA, 17 nt, Human
ucccuuacgugaguccu

SEQ ID NO: 2186246 - RNA, 11 nt, Human
ucccuguuuuc

SEQ ID NO: 2186247 - RNA, 15 nt, Human
ucccuguuuucugag

SEQ ID NO: 2186248 - RNA, 18 nt, Human
ucccuguuuucugagccc

SEQ ID NO: 2186249 - RNA, 19 nt, Human
ucccuguuuucugagcccg

SEQ ID NO: 2186250 - RNA, 21 nt, Human
ucccuguuuucugagcccggg

SEQ ID NO: 2186251 - RNA, 20 nt, Human
ucccugugcugacggaagcc

SEQ ID NO: 2186252 - RNA, 22 nt, Human
ucccuuaaacaaaaauuaaaau

SEQ ID NO: 2186253 - RNA, 18 nt, Human
ucccuuaaaauagaaaua

SEQ ID NO: 2186254 - RNA, 15 nt, Human
ucccuuaaacaaaaa

SEQ ID NO: 2186255 - RNA, 22 nt, Human
ucccuguuuucugagcccgggc

SEQ ID NO: 2186256 - RNA, 23 nt, Human
ucccuguuuucugagcccgggcu

SEQ ID NO: 2186257 - RNA, 16 nt, Human
uccuagaaauucccca

SEQ ID NO: 2186258 - RNA, 14 nt, Human
uccuacuuccccuu

SEQ ID NO: 2186259 - RNA, 16 nt, Human
uccuaacacagcaugu

SEQ ID NO: 2186260 - RNA, 16 nt, Human
uccuaagagugcuggg

SEQ ID NO: 2186261 - RNA, 13 nt, Human
uccuaagaaagag

SEQ ID NO: 2186262 - RNA, 20 nt, Human
uccuaagaaagaggagugcu

SEQ ID NO: 2186263 - RNA, 22 nt, Human
uccuaagaaagaggagugcuug

SEQ ID NO: 2186264 - RNA, 19 nt, Human
uccuaaaugcagugaauug

SEQ ID NO: 2186265 - RNA, 15 nt, Human
uccuaaaugcaguga

SEQ ID NO: 2186266 - RNA, 20 nt, Human
uccggguuugagauggacac

SEQ ID NO: 2186267 - RNA, 19 nt, Human
uccuaaauauauuuuaaga

SEQ ID NO: 2186268 - RNA, 17 nt, Human
uccggucccugucccag

SEQ ID NO: 2186269 - RNA, 22 nt, Human
uccgggggcagcucuggagggg

SEQ ID NO: 2186270 - RNA, 22 nt, Human
uccggguuugagauggacacac

SEQ ID NO: 2186271 - RNA, 21 nt, Human
ucccuuucuuggccaguuauc

SEQ ID NO: 2186272 - RNA, 20 nt, Human
ucccuuuuacauacugcugu

SEQ ID NO: 2186273 - RNA, 12 nt, Human
ucccuuuuccuu

SEQ ID NO: 2186274 - RNA, 19 nt, Human
ucccuuuuacauacugcug

SEQ ID NO: 2186275 - RNA, 17 nt, Human
ucccuuuuacauacugc

SEQ ID NO: 2186276 - RNA, 17 nt, Human
ucccuuucuuggccagu

SEQ ID NO: 2186277 - RNA, 16 nt, Human
ucccuuucuuggccag

SEQ ID NO: 2186278 - RNA, 13 nt, Human
ucccuuuuacaua

SEQ ID NO: 2186279 - RNA, 13 nt, Human
ucccuuucuuggc

SEQ ID NO: 2186280 - RNA, 23 nt, Human
ucccuuucuccccugcccccagg

SEQ ID NO: 2186281 - RNA, 19 nt, Human
ucccuuucugcuuguguua

SEQ ID NO: 2186282 - RNA, 20 nt, Human
ucccuuuuuauaucccauuu

SEQ ID NO: 2186283 - RNA, 15 nt, Human
ucccuuuugcaucau

SEQ ID NO: 2186284 - RNA, 23 nt, Human
ucccuuuugcggaugggaggggu

SEQ ID NO: 2186285 - RNA, 14 nt, Human
ucccuuuuuccuug

SEQ ID NO: 2186286 - RNA, 15 nt, Human
ucccuuuuuccuugu

SEQ ID NO: 2186287 - RNA, 16 nt, Human
ucccuuuuuccuuguc

SEQ ID NO: 2186288 - RNA, 17 nt, Human
ucccuuuuuccuugucc

SEQ ID NO: 2186289 - RNA, 21 nt, Human
ucccuuuuuccuuguccccac

SEQ ID NO: 2186290 - RNA, 15 nt, Human
ucccuuuuugaagug

SEQ ID NO: 2186291 - RNA, 16 nt, Human
ucccuuuuugaagugu

SEQ ID NO: 2186292 - RNA, 16 nt, Human
uccggggagcgcccgc

SEQ ID NO: 2186293 - RNA, 23 nt, Human
uccgggagggugcggcugugcag

SEQ ID NO: 2186294 - RNA, 21 nt, Human
uccgggaccuggugcugccuc

SEQ ID NO: 2186295 - RNA, 14 nt, Human
uccggcuccugugc

SEQ ID NO: 2186296 - RNA, 16 nt, Human
uccggcuccugugcuu

SEQ ID NO: 2186297 - RNA, 17 nt, Human
uccggcuccugugcuuu

SEQ ID NO: 2186298 - RNA, 22 nt, Human
uccggcuccugugcuuucccug

SEQ ID NO: 2186299 - RNA, 13 nt, Human
acucauguguaug

SEQ ID NO: 2186300 - RNA, 21 nt, Human
acucauguguaugggcaaaaa

SEQ ID NO: 2186301 - RNA, 10 nt, Human
acucaugugu

SEQ ID NO: 2186302 - RNA, 11 nt, Human
acucaugugua

SEQ ID NO: 2186303 - RNA, 12 nt, Human
acucauguguau

SEQ ID NO: 2186304 - RNA, 15 nt, Human
acucagaaacaucag

SEQ ID NO: 2186305 - RNA, 14 nt, Human
acucagaaacauca

SEQ ID NO: 2186306 - RNA, 15 nt, Human
acucacuuucuagau

SEQ ID NO: 2186307 - RNA, 15 nt, Human
acucauucuucugua

SEQ ID NO: 2186308 - RNA, 14 nt, Human
acucauugaccuga

SEQ ID NO: 2186309 - RNA, 23 nt, Human
acucauucagggauagcacugag

SEQ ID NO: 2186310 - RNA, 13 nt, Human
acucauuccugua

SEQ ID NO: 2186311 - RNA, 19 nt, Human
acucauucugaaggagccc

SEQ ID NO: 2186312 - RNA, 15 nt, Human
acucauucugaagga

SEQ ID NO: 2186313 - RNA, 21 nt, Human
acucauucaaaaguugaaauu

SEQ ID NO: 2186314 - RNA, 13 nt, Human
acucauucaaaag

SEQ ID NO: 2186315 - RNA, 15 nt, Human
acucauugaccugag

SEQ ID NO: 2186316 - RNA, 14 nt, Human
acuccaaagaaaug

SEQ ID NO: 2186317 - RNA, 18 nt, Human
acuccaaagaaauguaag

SEQ ID NO: 2186318 - RNA, 15 nt, Human
acuccaaagaaaugu

SEQ ID NO: 2186319 - RNA, 21 nt, Human
acuccaaagaaauguaaggga

SEQ ID NO: 2186320 - RNA, 15 nt, Human
acuccagaauuuccc

SEQ ID NO: 2186321 - RNA, 17 nt, Human
acuccagaauuucccaa

SEQ ID NO: 2186322 - RNA, 14 nt, Human
acuccagccugggc

SEQ ID NO: 2186323 - RNA, 13 nt, Human
acuccuccuagcc

SEQ ID NO: 2186324 - RNA, 14 nt, Human
acuccuccuagcca

SEQ ID NO: 2186325 - RNA, 13 nt, Human
acuccagccuggg

SEQ ID NO: 2186326 - RNA, 18 nt, Human
acuccuccuagccaccca

SEQ ID NO: 2186327 - RNA, 23 nt, Human
acuccuccuccaaaggcccccua

SEQ ID NO: 2186328 - RNA, 16 nt, Human
acuccuccuagccacc

SEQ ID NO: 2186329 - RNA, 15 nt, Human
acuccuccuagccac

SEQ ID NO: 2186330 - RNA, 19 nt, Human
acuccagccuggcgacaga

SEQ ID NO: 2186331 - RNA, 20 nt, Human
acuccagccugagcaacaga

SEQ ID NO: 2186332 - RNA, 19 nt, Human
acuccagccugagcaacag

SEQ ID NO: 2186333 - RNA, 15 nt, Human
acuccagccugagca

SEQ ID NO: 2186334 - RNA, 12 nt, Human
acuccagccugg

SEQ ID NO: 2186335 - RNA, 14 nt, Human
acuccagccugagc

SEQ ID NO: 2186336 - RNA, 13 nt, Human
acuccagccugag

SEQ ID NO: 2186337 - RNA, 23 nt, Human
acuccagaauuucccaaagcagu

SEQ ID NO: 2186338 - RNA, 14 nt, Human
acuccucuguccag

SEQ ID NO: 2186339 - RNA, 14 nt, Human
acuccucuuauuug

SEQ ID NO: 2186340 - RNA, 16 nt, Human
acuccucuuauuugcu

SEQ ID NO: 2186341 - RNA, 13 nt, Human
acuccucugucca

SEQ ID NO: 2186342 - RNA, 20 nt, Human
acuccucugcagugccuugg

SEQ ID NO: 2186343 - RNA, 20 nt, Human
acuccucugacucagggcuc

SEQ ID NO: 2186344 - RNA, 12 nt, Human
acuccucugcag

SEQ ID NO: 2186345 - RNA, 17 nt, Human
acuccucugcagugccu

SEQ ID NO: 2186346 - RNA, 14 nt, Human
acuccucugacuca

SEQ ID NO: 2186347 - RNA, 21 nt, Human
acuccucuaagccacucuucc

SEQ ID NO: 2186348 - RNA, 23 nt, Human
acuccucuaagccacucuuccaa

SEQ ID NO: 2186349 - RNA, 16 nt, Human
acuccucggccuggcu

SEQ ID NO: 2186350 - RNA, 21 nt, Human
acuccuccuccaaaggccccc

SEQ ID NO: 2186351 - RNA, 22 nt, Human
acuccuccuccaaaggcccccu

SEQ ID NO: 2186352 - RNA, 17 nt, Human
acuccucggccuggcuc

SEQ ID NO: 2186353 - RNA, 19 nt, Human
acuccucggccuggcuccu

SEQ ID NO: 2186354 - RNA, 23 nt, Human
acuccucggccuggcuccuaccc

SEQ ID NO: 2186355 - RNA, 18 nt, Human
acuccucgguacucccau

SEQ ID NO: 2186356 - RNA, 18 nt, Human
acuccugcaggcagccag

SEQ ID NO: 2186357 - RNA, 19 nt, Human
acuccugcaggcagccagg

SEQ ID NO: 2186358 - RNA, 17 nt, Human
acuccugcaggcagcca

SEQ ID NO: 2186359 - RNA, 19 nt, Human
acuccugacagucuugugc

SEQ ID NO: 2186360 - RNA, 21 nt, Human
acuccugacagucuugugcuu

SEQ ID NO: 2186361 - RNA, 15 nt, Human
acuccugacagucuu

SEQ ID NO: 2186362 - RNA, 21 nt, Human
uccccuuuguauuccuuaaau

SEQ ID NO: 2186363 - RNA, 20 nt, Human
uccccuuuucuuuucuaccc

SEQ ID NO: 2186364 - RNA, 20 nt, Human
ucccgaauagcugggacuac

SEQ ID NO: 2186365 - RNA, 15 nt, Human
ucccgaguagcuggg

SEQ ID NO: 2186366 - RNA, 17 nt, Human
uccccuuuuauugcugc

SEQ ID NO: 2186367 - RNA, 19 nt, Human
ucccgagcaaagucuaaag

SEQ ID NO: 2186368 - RNA, 20 nt, Human
ucccgagcaaagucuaaagu

SEQ ID NO: 2186369 - RNA, 22 nt, Human
ucccgagcaccuccacauccuc

SEQ ID NO: 2186370 - RNA, 18 nt, Human
ucccgaguagcugggacu

SEQ ID NO: 2186371 - RNA, 20 nt, Human
ucccgaguagcugagauuau

SEQ ID NO: 2186372 - RNA, 16 nt, Human
ucccgaguagcuggga

SEQ ID NO: 2186373 - RNA, 17 nt, Human
ucccgaguagcugggac

SEQ ID NO: 2186374 - RNA, 17 nt, Human
uccccuugggcggcuga

SEQ ID NO: 2186375 - RNA, 22 nt, Human
uccccuugggcggcugagagcc

SEQ ID NO: 2186376 - RNA, 14 nt, Human
uccccuugggcggc

SEQ ID NO: 2186377 - RNA, 19 nt, Human
uccccuugcccuugcccug

SEQ ID NO: 2186378 - RNA, 20 nt, Human
uccccuugcccuugcccuga

SEQ ID NO: 2186379 - RNA, 21 nt, Human
uccccuugcccuugcccugac

SEQ ID NO: 2186380 - RNA, 23 nt, Human
uccccuugcccuugcccugaccu

SEQ ID NO: 2186381 - RNA, 24 nt, Human
uccccuugcccagggcucagccug

SEQ ID NO: 2186382 - RNA, 14 nt, Human
uccccuugcccuug

SEQ ID NO: 2186383 - RNA, 18 nt, Human
uccccuugcccuugcccu

SEQ ID NO: 2186384 - RNA, 22 nt, Human
uccccuugcccagggcucagcc

SEQ ID NO: 2186385 - RNA, 20 nt, Human
uccccuugcccagggcucag

SEQ ID NO: 2186386 - RNA, 16 nt, Human
uccccucuccuuccug

SEQ ID NO: 2186387 - RNA, 17 nt, Human
uccccuugcccagggcu

SEQ ID NO: 2186388 - RNA, 15 nt, Human
uccccucuccuuccu

SEQ ID NO: 2186389 - RNA, 22 nt, Human
uccccuccuugccuccugugua

SEQ ID NO: 2186390 - RNA, 21 nt, Human
uccccucccuggcucccauga

SEQ ID NO: 2186391 - RNA, 19 nt, Human
uccccucccuggcucccau

SEQ ID NO: 2186392 - RNA, 16 nt, Human
uccccucccuggcucc

SEQ ID NO: 2186393 - RNA, 15 nt, Human
uccccucccuggcuc

SEQ ID NO: 2186394 - RNA, 16 nt, Human
uccccucggagaagag

SEQ ID NO: 2186395 - RNA, 17 nt, Human
uccccucuauuuagcau

SEQ ID NO: 2186396 - RNA, 23 nt, Human
uccccuccuugccuccuguguaa

SEQ ID NO: 2186397 - RNA, 12 nt, Human
uccccuccuugg

SEQ ID NO: 2186398 - RNA, 14 nt, Human
uccccuccuugggc

SEQ ID NO: 2186399 - RNA, 18 nt, Human
uccccuccuugggcacuu

SEQ ID NO: 2186400 - RNA, 17 nt, Human
uccccucggagaagagc

SEQ ID NO: 2186401 - RNA, 17 nt, Human
acuacucagggaaugaa

SEQ ID NO: 2186402 - RNA, 15 nt, Human
acuacucagggaaug

SEQ ID NO: 2186403 - RNA, 20 nt, Human
acuacuccggagacaggguu

SEQ ID NO: 2186404 - RNA, 14 nt, Human
acuacuccucugca

SEQ ID NO: 2186405 - RNA, 19 nt, Human
acuacuccucugcagugcc

SEQ ID NO: 2186406 - RNA, 21 nt, Human
acuacuccucugcagugccuu

SEQ ID NO: 2186407 - RNA, 21 nt, Human
acucacauuuauucugcucac

SEQ ID NO: 2186408 - RNA, 12 nt, Human
acucaccccagc

SEQ ID NO: 2186409 - RNA, 17 nt, Human
acucaccaguguccccu

SEQ ID NO: 2186410 - RNA, 19 nt, Human
acucaccaguguccccucc

SEQ ID NO: 2186411 - RNA, 23 nt, Human
acucaccaguguccccuccacug

SEQ ID NO: 2186412 - RNA, 13 nt, Human
acucaccaucugu

SEQ ID NO: 2186413 - RNA, 15 nt, Human
acucaccaucugugc

SEQ ID NO: 2186414 - RNA, 17 nt, Human
acuacucccccaggugg

SEQ ID NO: 2186415 - RNA, 17 nt, Human
acuaccuccucagggau

SEQ ID NO: 2186416 - RNA, 19 nt, Human
acuaccuccucagggaugg

SEQ ID NO: 2186417 - RNA, 14 nt, Human
acuacuagggaaau

SEQ ID NO: 2186418 - RNA, 21 nt, Human
acuacuagggaaaugccuuug

SEQ ID NO: 2186419 - RNA, 13 nt, Human
uccccuaaugccu

SEQ ID NO: 2186420 - RNA, 17 nt, Human
uccccuaccacugucuu

SEQ ID NO: 2186421 - RNA, 17 nt, Human
uccccuaguaagugccu

SEQ ID NO: 2186422 - RNA, 23 nt, Human
uccccuacccccuccucucugcc

SEQ ID NO: 2186423 - RNA, 12 nt, Human
acucacccaagc

SEQ ID NO: 2186424 - RNA, 17 nt, Human
acucacccaugugccaa

SEQ ID NO: 2186425 - RNA, 15 nt, Human
acucaccauguaaaa

SEQ ID NO: 2186426 - RNA, 14 nt, Human
acucaccaucugug

SEQ ID NO: 2186427 - RNA, 20 nt, Human
uccccuaagcagaccacuga

SEQ ID NO: 2186428 - RNA, 18 nt, Human
acucacccaugugccaag

SEQ ID NO: 2186429 - RNA, 21 nt, Human
acucacccaugugccaaggug

SEQ ID NO: 2186430 - RNA, 17 nt, Human
uccccuauccacccagc

SEQ ID NO: 2186431 - RNA, 16 nt, Human
uccccuauccacccag

SEQ ID NO: 2186432 - RNA, 15 nt, Human
uccccuauccaccca

SEQ ID NO: 2186433 - RNA, 22 nt, Human
uccccuaguaagugccuuccau

SEQ ID NO: 2186434 - RNA, 18 nt, Human
uccccuaguaagugccuu

SEQ ID NO: 2186435 - RNA, 20 nt, Human
uccccuaguaagugccuucc

SEQ ID NO: 2186436 - RNA, 21 nt, Human
uccccuaguaagugccuucca

SEQ ID NO: 2186437 - RNA, 21 nt, Human
uccccuauccacccagcccau

SEQ ID NO: 2186438 - RNA, 20 nt, Human
uccccuauccacccagccca

SEQ ID NO: 2186439 - RNA, 18 nt, Human
uccccuauccacccagcc

SEQ ID NO: 2186440 - RNA, 19 nt, Human
uccccuauggggauggucc

SEQ ID NO: 2186441 - RNA, 14 nt, Human
uccccucaaagucu

SEQ ID NO: 2186442 - RNA, 13 nt, Human
uccccucccuggc

SEQ ID NO: 2186443 - RNA, 16 nt, Human
uccccucccuccucug

SEQ ID NO: 2186444 - RNA, 12 nt, Human
uccccucccugg

SEQ ID NO: 2186445 - RNA, 14 nt, Human
uccccucccuccuc

SEQ ID NO: 2186446 - RNA, 17 nt, Human
uccccuccccugcugca

SEQ ID NO: 2186447 - RNA, 15 nt, Human
uccccuccccugcug

SEQ ID NO: 2186448 - RNA, 16 nt, Human
uccccuccccugcugc

SEQ ID NO: 2186449 - RNA, 14 nt, Human
uccccucccaucug

SEQ ID NO: 2186450 - RNA, 15 nt, Human
uccccucccaucugg

SEQ ID NO: 2186451 - RNA, 17 nt, Human
uccccucccaucuggga

SEQ ID NO: 2186452 - RNA, 18 nt, Human
uccccuccccggcccuac

SEQ ID NO: 2186453 - RNA, 13 nt, Human
uccccuccccugc

SEQ ID NO: 2186454 - RNA, 14 nt, Human
uccccuccccugcu

SEQ ID NO: 2186455 - RNA, 13 nt, Human
uccccucacagcc

SEQ ID NO: 2186456 - RNA, 17 nt, Human
uccccucaaagucugca

SEQ ID NO: 2186457 - RNA, 18 nt, Human
uccccucaaagucugcaa

SEQ ID NO: 2186458 - RNA, 16 nt, Human
uccccucacagccucu

SEQ ID NO: 2186459 - RNA, 21 nt, Human
uccccucaaagucugcaacuu

SEQ ID NO: 2186460 - RNA, 14 nt, Human
uccccucacagccu

SEQ ID NO: 2186461 - RNA, 11 nt, Human
uccccucccau

SEQ ID NO: 2186462 - RNA, 18 nt, Human
ucccuccacguucacccc

SEQ ID NO: 2186463 - RNA, 19 nt, Human
ucccuccacguucaccccu

SEQ ID NO: 2186464 - RNA, 20 nt, Human
ucccuccacguucaccccuc

SEQ ID NO: 2186465 - RNA, 23 nt, Human
ucccuccacuccuuccugccacc

SEQ ID NO: 2186466 - RNA, 13 nt, Human
ucccucccaccuc

SEQ ID NO: 2186467 - RNA, 14 nt, Human
ucccucccaccucu

SEQ ID NO: 2186468 - RNA, 15 nt, Human
ucccucccaccucug

SEQ ID NO: 2186469 - RNA, 16 nt, Human
ucccucccaccucugu

SEQ ID NO: 2186470 - RNA, 19 nt, Human
ucccucccaccucugugac

SEQ ID NO: 2186471 - RNA, 21 nt, Human
ucccucccaccucugugaccu

SEQ ID NO: 2186472 - RNA, 22 nt, Human
ucccggcugcccuuucugggca

SEQ ID NO: 2186473 - RNA, 18 nt, Human
ucccggcugcccuuucug

SEQ ID NO: 2186474 - RNA, 15 nt, Human
ucccggcugcccuuu

SEQ ID NO: 2186475 - RNA, 14 nt, Human
ucccggcugcccuu

SEQ ID NO: 2186476 - RNA, 13 nt, Human
ucccggcugcccu

SEQ ID NO: 2186477 - RNA, 14 nt, Human
ucccucuuucccuc

SEQ ID NO: 2186478 - RNA, 20 nt, Human
ucccucuuucccucccuucc

SEQ ID NO: 2186479 - RNA, 18 nt, Human
ucccucuuucccucccuu

SEQ ID NO: 2186480 - RNA, 21 nt, Human
ucccucuuucccucccuuccu

SEQ ID NO: 2186481 - RNA, 20 nt, Human
ucccugaaggaaccaaagcg

SEQ ID NO: 2186482 - RNA, 20 nt, Human
ucccucccggcaugggaaag

SEQ ID NO: 2186483 - RNA, 11 nt, Human
ucccugaaggc

SEQ ID NO: 2186484 - RNA, 15 nt, Human
ucccugaaggccccg

SEQ ID NO: 2186485 - RNA, 13 nt, Human
acucacuccugag

SEQ ID NO: 2186486 - RNA, 14 nt, Human
acucacuccugaga

SEQ ID NO: 2186487 - RNA, 16 nt, Human
acucacuccugagacc

SEQ ID NO: 2186488 - RNA, 21 nt, Human
acucacuaggcccccacuugc

SEQ ID NO: 2186489 - RNA, 22 nt, Human
acucacuaggcccccacuugcc

SEQ ID NO: 2186490 - RNA, 14 nt, Human
acucacuaggcccc

SEQ ID NO: 2186491 - RNA, 15 nt, Human
acucacuaggccccc

SEQ ID NO: 2186492 - RNA, 17 nt, Human
acucacuaggcccccac

SEQ ID NO: 2186493 - RNA, 22 nt, Human
acucacuggggccuacagcuuu

SEQ ID NO: 2186494 - RNA, 15 nt, Human
acucacugcucaaga

SEQ ID NO: 2186495 - RNA, 22 nt, Human
acucacugcucaagaagacaug

SEQ ID NO: 2186496 - RNA, 22 nt, Human
acucacuccugagaccccuggc

SEQ ID NO: 2186497 - RNA, 20 nt, Human
acucacuccugagaccccug

SEQ ID NO: 2186498 - RNA, 21 nt, Human
acucacuccugagaccccugg

SEQ ID NO: 2186499 - RNA, 23 nt, Human
acucacgauaaauaaucggccca

SEQ ID NO: 2186500 - RNA, 23 nt, Human
acucaccuggggcugcuggccug

SEQ ID NO: 2186501 - RNA, 15 nt, Human
acucaccuguuacuu

SEQ ID NO: 2186502 - RNA, 14 nt, Human
acucaccuggggcu

SEQ ID NO: 2186503 - RNA, 18 nt, Human
acucaccuggggcugcug

SEQ ID NO: 2186504 - RNA, 19 nt, Human
acucaccuggggcugcugg

SEQ ID NO: 2186505 - RNA, 20 nt, Human
acucaccuggggcugcuggc

SEQ ID NO: 2186506 - RNA, 20 nt, Human
acucaccugcuggccccuca

SEQ ID NO: 2186507 - RNA, 12 nt, Human
acucaccugggg

SEQ ID NO: 2186508 - RNA, 19 nt, Human
acucaccugcuggccccuc

SEQ ID NO: 2186509 - RNA, 18 nt, Human
acucaccugcuggccccu

SEQ ID NO: 2186510 - RNA, 17 nt, Human
acucaccugcuggcccc

SEQ ID NO: 2186511 - RNA, 16 nt, Human
acucaccugcuggccc

SEQ ID NO: 2186512 - RNA, 13 nt, Human
acucaccugcugg

SEQ ID NO: 2186513 - RNA, 21 nt, Human
ucccugagucaccaggaaugu

SEQ ID NO: 2186514 - RNA, 17 nt, Human
ucccugagucaccagga

SEQ ID NO: 2186515 - RNA, 19 nt, Human
ucccugauaacaaccugga

SEQ ID NO: 2186516 - RNA, 21 nt, Human
ucccugauaacaaccuggaga

SEQ ID NO: 2186517 - RNA, 15 nt, Human
ucccugcaaccaacu

SEQ ID NO: 2186518 - RNA, 16 nt, Human
ucccugcaaccaacua

SEQ ID NO: 2186519 - RNA, 16 nt, Human
ucccugagucaccagg

SEQ ID NO: 2186520 - RNA, 15 nt, Human
ucccugagucaccag

SEQ ID NO: 2186521 - RNA, 14 nt, Human
ucccugagucacca

SEQ ID NO: 2186522 - RNA, 22 nt, Human
ucccugaggcagguccccagac

SEQ ID NO: 2186523 - RNA, 21 nt, Human
ucccugaggcagguccccaga

SEQ ID NO: 2186524 - RNA, 20 nt, Human
ucccugaggcagguccccag

SEQ ID NO: 2186525 - RNA, 15 nt, Human
ucccugacugggagu

SEQ ID NO: 2186526 - RNA, 11 nt, Human
ucccugaggca

SEQ ID NO: 2186527 - RNA, 18 nt, Human
ucccugacucucugugac

SEQ ID NO: 2186528 - RNA, 17 nt, Human
ucccugacucucuguga

SEQ ID NO: 2186529 - RNA, 20 nt, Human
ucccugacucucugugaccu

SEQ ID NO: 2186530 - RNA, 14 nt, Human
ucccugacugggag

SEQ ID NO: 2186531 - RNA, 11 nt, Human
ucccugagcag

SEQ ID NO: 2186532 - RNA, 16 nt, Human
ucccugacucucugug

SEQ ID NO: 2186533 - RNA, 22 nt, Human
ucccucccggcaugggaaagcc

SEQ ID NO: 2186534 - RNA, 22 nt, Human
ucccugacucauucugaaggag

SEQ ID NO: 2186535 - RNA, 16 nt, Human
ucccugaaggccccgc

SEQ ID NO: 2186536 - RNA, 22 nt, Human
acuacaauuuaaagcaaaggag

SEQ ID NO: 2186537 - RNA, 17 nt, Human
acuacaauuuaaagcaa

SEQ ID NO: 2186538 - RNA, 19 nt, Human
acuacaaccaagcucucug

SEQ ID NO: 2186539 - RNA, 11 nt, Human
acuacaggcac

SEQ ID NO: 2186540 - RNA, 20 nt, Human
acuacacagucugcaagauu

SEQ ID NO: 2186541 - RNA, 20 nt, Human
acuacacaucccuaaugugu

SEQ ID NO: 2186542 - RNA, 15 nt, Human
acuacaggcacccac

SEQ ID NO: 2186543 - RNA, 17 nt, Human
acuacaguccucccauc

SEQ ID NO: 2186544 - RNA, 14 nt, Human
acuacaguuuguua

SEQ ID NO: 2186545 - RNA, 13 nt, Human
acuacaguuuguu

SEQ ID NO: 2186546 - RNA, 21 nt, Human
acguuccuuacugcagaauag

SEQ ID NO: 2186547 - RNA, 15 nt, Human
acguucucacaccca

SEQ ID NO: 2186548 - RNA, 16 nt, Human
acguugagccccugga

SEQ ID NO: 2186549 - RNA, 13 nt, Human
acguugcucccca

SEQ ID NO: 2186550 - RNA, 17 nt, Human
acguucucacacccacc

SEQ ID NO: 2186551 - RNA, 11 nt, Human
acguugcugug

SEQ ID NO: 2186552 - RNA, 12 nt, Human
acguugcugugg

SEQ ID NO: 2186553 - RNA, 14 nt, Human
acguugcuguggga

SEQ ID NO: 2186554 - RNA, 15 nt, Human
acguugcugugggaa

SEQ ID NO: 2186555 - RNA, 17 nt, Human
acuaacagauaagcaag

SEQ ID NO: 2186556 - RNA, 17 nt, Human
acuaacaggauauuuaa

SEQ ID NO: 2186557 - RNA, 15 nt, Human
acuaacauauaaugu

SEQ ID NO: 2186558 - RNA, 17 nt, Human
acuaacauauaauguug

SEQ ID NO: 2186559 - RNA, 12 nt, Human
acuaaccacgcu

SEQ ID NO: 2186560 - RNA, 21 nt, Human
acuacaaacaaaauuucuauu

SEQ ID NO: 2186561 - RNA, 20 nt, Human
acuacaaacaaaauuucuau

SEQ ID NO: 2186562 - RNA, 19 nt, Human
acuacaaaucaaguauuug

SEQ ID NO: 2186563 - RNA, 13 nt, Human
acuacaaaucaag

SEQ ID NO: 2186564 - RNA, 11 nt, Human
acuacaaauca

SEQ ID NO: 2186565 - RNA, 22 nt, Human
acuacaaacaaaauuucuauua

SEQ ID NO: 2186566 - RNA, 23 nt, Human
acuacaaagcuucuaucccagga

SEQ ID NO: 2186567 - RNA, 23 nt, Human
ucccagcacaugaaaccuuauuu

SEQ ID NO: 2186568 - RNA, 13 nt, Human
ucccagcacuuug

SEQ ID NO: 2186569 - RNA, 16 nt, Human
ucccagcacuuuggga

SEQ ID NO: 2186570 - RNA, 18 nt, Human
ucccagcacuuugggagg

SEQ ID NO: 2186571 - RNA, 21 nt, Human
ucccagcacuuugggaggccu

SEQ ID NO: 2186572 - RNA, 23 nt, Human
ucccagcacuuugggaggccaag

SEQ ID NO: 2186573 - RNA, 22 nt, Human
ucccagcacuuugggaggccua

SEQ ID NO: 2186574 - RNA, 21 nt, Human
ucccagcacuuugggaggcca

SEQ ID NO: 2186575 - RNA, 19 nt, Human
ucccagcacuuugggaggc

SEQ ID NO: 2186576 - RNA, 14 nt, Human
acuacauucuguua

SEQ ID NO: 2186577 - RNA, 23 nt, Human
ucccagauuggcucacacugaga

SEQ ID NO: 2186578 - RNA, 13 nt, Human
acuacauucuguu

SEQ ID NO: 2186579 - RNA, 12 nt, Human
acuacauucugu

SEQ ID NO: 2186580 - RNA, 11 nt, Human
acuacauucug

SEQ ID NO: 2186581 - RNA, 15 nt, Human
acuacaguuuguuag

SEQ ID NO: 2186582 - RNA, 21 nt, Human
ucccagcucucccucuggccc

SEQ ID NO: 2186583 - RNA, 19 nt, Human
ucccagcucucccucuggc

SEQ ID NO: 2186584 - RNA, 18 nt, Human
ucccagcucucccucugg

SEQ ID NO: 2186585 - RNA, 16 nt, Human
ucccagcucucccucu

SEQ ID NO: 2186586 - RNA, 14 nt, Human
ucccagcucucccu

SEQ ID NO: 2186587 - RNA, 15 nt, Human
ucccagcccaaagcu

SEQ ID NO: 2186588 - RNA, 12 nt, Human
ucccagccccaa

SEQ ID NO: 2186589 - RNA, 22 nt, Human
ucccagccacucgggaggcuga

SEQ ID NO: 2186590 - RNA, 17 nt, Human
ucccagcugaaauacug

SEQ ID NO: 2186591 - RNA, 16 nt, Human
ucccagcugacagucc

SEQ ID NO: 2186592 - RNA, 23 nt, Human
ucccagcucucccucuggcccug

SEQ ID NO: 2186593 - RNA, 22 nt, Human
ucccagcucucccucuggcccu

SEQ ID NO: 2186594 - RNA, 17 nt, Human
ucccagcugacaguccu

SEQ ID NO: 2186595 - RNA, 18 nt, Human
ucccagcugacaguccuc

SEQ ID NO: 2186596 - RNA, 20 nt, Human
ucccagcugacaguccucuc

SEQ ID NO: 2186597 - RNA, 22 nt, Human
ucccagcugacaguccucucca

SEQ ID NO: 2186598 - RNA, 17 nt, Human
ucccagcugugcucugg

SEQ ID NO: 2186599 - RNA, 24 nt, Human
ucccagccaccccgggcucucugc

SEQ ID NO: 2186600 - RNA, 16 nt, Human
ucccagccacucggga

SEQ ID NO: 2186601 - RNA, 20 nt, Human
ucccagccacucgggaggcu

SEQ ID NO: 2186602 - RNA, 20 nt, Human
ucccagccaccccgggcucu

SEQ ID NO: 2186603 - RNA, 14 nt, Human
ucccagccaccccg

SEQ ID NO: 2186604 - RNA, 13 nt, Human
ucccagccacccc

SEQ ID NO: 2186605 - RNA, 12 nt, Human
ucccagccaccc

SEQ ID NO: 2186606 - RNA, 18 nt, Human
ucccagcagggccacucc

SEQ ID NO: 2186607 - RNA, 20 nt, Human
ucccagcaugcugagauuac

SEQ ID NO: 2186608 - RNA, 13 nt, Human
ucccagcagcccu

SEQ ID NO: 2186609 - RNA, 18 nt, Human
ucccagcagcccuaagga

SEQ ID NO: 2186610 - RNA, 21 nt, Human
ucccagcagcccuaaggaucu

SEQ ID NO: 2186611 - RNA, 18 nt, Human
ucccauccuacccucggg

SEQ ID NO: 2186612 - RNA, 20 nt, Human
ucccauccuacccucgggcc

SEQ ID NO: 2186613 - RNA, 14 nt, Human
ucccauccuacccu

SEQ ID NO: 2186614 - RNA, 15 nt, Human
uccccaccaccccag

SEQ ID NO: 2186615 - RNA, 18 nt, Human
uccccacaggagcccugc

SEQ ID NO: 2186616 - RNA, 13 nt, Human
uccccaccccugc

SEQ ID NO: 2186617 - RNA, 14 nt, Human
uccccaccccugcc

SEQ ID NO: 2186618 - RNA, 13 nt, Human
ucccauccccugg

SEQ ID NO: 2186619 - RNA, 15 nt, Human
ucccauccccuggac

SEQ ID NO: 2186620 - RNA, 16 nt, Human
ucccaucccccugccc

SEQ ID NO: 2186621 - RNA, 17 nt, Human
ucccaucccccugcccu

SEQ ID NO: 2186622 - RNA, 18 nt, Human
ucccaucccccugcccuc

SEQ ID NO: 2186623 - RNA, 19 nt, Human
ucccaucccccugcccucg

SEQ ID NO: 2186624 - RNA, 16 nt, Human
ucccaucccagcugaa

SEQ ID NO: 2186625 - RNA, 18 nt, Human
ucccaucccacugcuccc

SEQ ID NO: 2186626 - RNA, 22 nt, Human
ucccaucccagcugaaauacug

SEQ ID NO: 2186627 - RNA, 13 nt, Human
ucccaucccccug

SEQ ID NO: 2186628 - RNA, 14 nt, Human
ucccaucccccugc

SEQ ID NO: 2186629 - RNA, 15 nt, Human
ucccaucccccugcc

SEQ ID NO: 2186630 - RNA, 14 nt, Human
ucccaucacuggag

SEQ ID NO: 2186631 - RNA, 12 nt, Human
ucccauccaggc

SEQ ID NO: 2186632 - RNA, 22 nt, Human
ucccaucacuggagcaccaggc

SEQ ID NO: 2186633 - RNA, 13 nt, Human
ucccauccagggc

SEQ ID NO: 2186634 - RNA, 13 nt, Human
ucccauccaggca

SEQ ID NO: 2186635 - RNA, 14 nt, Human
ucccauccaggcag

SEQ ID NO: 2186636 - RNA, 14 nt, Human
ucccauccagggcc

SEQ ID NO: 2186637 - RNA, 15 nt, Human
ucccauccaggcagu

SEQ ID NO: 2186638 - RNA, 18 nt, Human
ucccauccagugucucac

SEQ ID NO: 2186639 - RNA, 20 nt, Human
ucccaguccaaauguccucc

SEQ ID NO: 2186640 - RNA, 22 nt, Human
ucccagucaccuuguggcaagc

SEQ ID NO: 2186641 - RNA, 15 nt, Human
ucccagucuacccag

SEQ ID NO: 2186642 - RNA, 17 nt, Human
ucccagucuacccagag

SEQ ID NO: 2186643 - RNA, 18 nt, Human
ucccagucuacccagaga

SEQ ID NO: 2186644 - RNA, 22 nt, Human
ucccauaugccugggcagaagg

SEQ ID NO: 2186645 - RNA, 14 nt, Human
ucccaucaaaacuc

SEQ ID NO: 2186646 - RNA, 22 nt, Human
ucccagucuacccagagaagcc

SEQ ID NO: 2186647 - RNA, 15 nt, Human
ucccaucacccgcua

SEQ ID NO: 2186648 - RNA, 24 nt, Human
ucccagcugacaguccucuccacc

SEQ ID NO: 2186649 - RNA, 18 nt, Human
ucccagcugccauguuuc

SEQ ID NO: 2186650 - RNA, 23 nt, Human
ucccaguaccuccugucucuggc

SEQ ID NO: 2186651 - RNA, 17 nt, Human
ucccaguaccuccuguc

SEQ ID NO: 2186652 - RNA, 22 nt, Human
ucccagucauuuaauaaaugug

SEQ ID NO: 2186653 - RNA, 14 nt, Human
ucccagucauuuaa

SEQ ID NO: 2186654 - RNA, 23 nt, Human
uccccaugggaagacgaggcccu

SEQ ID NO: 2186655 - RNA, 11 nt, Human
uccccauggga

SEQ ID NO: 2186656 - RNA, 16 nt, Human
uccccauggagccagc

SEQ ID NO: 2186657 - RNA, 15 nt, Human
uccccauggagccag

SEQ ID NO: 2186658 - RNA, 21 nt, Human
uccccauuagagucagccuuc

SEQ ID NO: 2186659 - RNA, 19 nt, Human
uccccauuagagucagccu

SEQ ID NO: 2186660 - RNA, 17 nt, Human
uccccaugucucgacuc

SEQ ID NO: 2186661 - RNA, 22 nt, Human
uccccaccgcagacaggaccag

SEQ ID NO: 2186662 - RNA, 19 nt, Human
uccccaucuucuaaaccca

SEQ ID NO: 2186663 - RNA, 13 nt, Human
uccccauggagcc

SEQ ID NO: 2186664 - RNA, 14 nt, Human
uccccaucuucuaa

SEQ ID NO: 2186665 - RNA, 16 nt, Human
uccccaugcagacaug

SEQ ID NO: 2186666 - RNA, 15 nt, Human
uccccaccccugccc

SEQ ID NO: 2186667 - RNA, 16 nt, Human
uccccaccccugcccc

SEQ ID NO: 2186668 - RNA, 18 nt, Human
uccccaccccugccccca

SEQ ID NO: 2186669 - RNA, 22 nt, Human
uccccaccccugcccccagccc

SEQ ID NO: 2186670 - RNA, 17 nt, Human
uccccaccgcagacagg

SEQ ID NO: 2186671 - RNA, 18 nt, Human
uccccaccgcagacagga

SEQ ID NO: 2186672 - RNA, 21 nt, Human
uccccaccgcagacaggacca

SEQ ID NO: 2186673 - RNA, 20 nt, Human
ucccccaacccccaccccac

SEQ ID NO: 2186674 - RNA, 19 nt, Human
ucccccaacccccacccca

SEQ ID NO: 2186675 - RNA, 17 nt, Human
ucccccaacccccaccc

SEQ ID NO: 2186676 - RNA, 16 nt, Human
ucccccaacccccacc

SEQ ID NO: 2186677 - RNA, 15 nt, Human
ucccccaacccccac

SEQ ID NO: 2186678 - RNA, 14 nt, Human
ucccccaaccccca

SEQ ID NO: 2186679 - RNA, 20 nt, Human
uccccauuucccaucugcac

SEQ ID NO: 2186680 - RNA, 12 nt, Human
ucccccaacaga

SEQ ID NO: 2186681 - RNA, 15 nt, Human
ucccccaaccccagc

SEQ ID NO: 2186682 - RNA, 24 nt, Human
uccccauuagcuuucaauuccgua

SEQ ID NO: 2186683 - RNA, 14 nt, Human
uccccauucuuccu

SEQ ID NO: 2186684 - RNA, 22 nt, Human
uccccauucuuccuaguuuucu

SEQ ID NO: 2186685 - RNA, 17 nt, Human
uccccauucuuccuagu

SEQ ID NO: 2186686 - RNA, 19 nt, Human
uccccauuuagguuucuga

SEQ ID NO: 2186687 - RNA, 18 nt, Human
uccccauugccuccuccu

SEQ ID NO: 2186688 - RNA, 15 nt, Human
uccccauuucccauc

SEQ ID NO: 2186689 - RNA, 16 nt, Human
uccccauuucccaucu

SEQ ID NO: 2186690 - RNA, 17 nt, Human
uccccauuucccaucug

SEQ ID NO: 2186691 - RNA, 18 nt, Human
uccccauuucccaucugc

SEQ ID NO: 2186692 - RNA, 19 nt, Human
uccccauuucccaucugca

SEQ ID NO: 2186693 - RNA, 21 nt, Human
ucccccaacccccaccccaca

SEQ ID NO: 2186694 - RNA, 21 nt, Human
acuaccaagaggcccugucug

SEQ ID NO: 2186695 - RNA, 15 nt, Human
acuacauucuguuaa

SEQ ID NO: 2186696 - RNA, 14 nt, Human
acuaccuccucagg

SEQ ID NO: 2186697 - RNA, 15 nt, Human
acuaccuccucaggg

SEQ ID NO: 2186698 - RNA, 18 nt, Human
acuacccuauucucucuu

SEQ ID NO: 2186699 - RNA, 21 nt, Human
acuacccacguucucacaccc

SEQ ID NO: 2186700 - RNA, 23 nt, Human
acuacccacguucucacacccac

SEQ ID NO: 2186701 - RNA, 16 nt, Human
uccaugaaaaugcaac

SEQ ID NO: 2186702 - RNA, 17 nt, Human
uccaucucucuggcccu

SEQ ID NO: 2186703 - RNA, 15 nt, Human
uccaugaaaaugcaa

SEQ ID NO: 2186704 - RNA, 13 nt, Human
uccaugaagaugu

SEQ ID NO: 2186705 - RNA, 15 nt, Human
uccauuccucaggga

SEQ ID NO: 2186706 - RNA, 14 nt, Human
uccauuccucaggg

SEQ ID NO: 2186707 - RNA, 13 nt, Human
uccauuccucagg

SEQ ID NO: 2186708 - RNA, 23 nt, Human
uccaugaagaccacauccacaca

SEQ ID NO: 2186709 - RNA, 12 nt, Human
uccauuccucag

SEQ ID NO: 2186710 - RNA, 20 nt, Human
uccaugaagaccacauccac

SEQ ID NO: 2186711 - RNA, 21 nt, Human
uccaugaagaccacauccaca

SEQ ID NO: 2186712 - RNA, 21 nt, Human
uccaugaagauguagaggaga

SEQ ID NO: 2186713 - RNA, 14 nt, Human
uccauucucccagg

SEQ ID NO: 2186714 - RNA, 15 nt, Human
uccauucucccaggu

SEQ ID NO: 2186715 - RNA, 12 nt, Human
uccauucuggaa

SEQ ID NO: 2186716 - RNA, 16 nt, Human
uccauucucccaggua

SEQ ID NO: 2186717 - RNA, 18 nt, Human
uccauucuuucugauaac

SEQ ID NO: 2186718 - RNA, 14 nt, Human
uccauucuuucuga

SEQ ID NO: 2186719 - RNA, 12 nt, Human
uccauucuuucu

SEQ ID NO: 2186720 - RNA, 14 nt, Human
uccauucuggaagu

SEQ ID NO: 2186721 - RNA, 13 nt, Human
uccauucuggaag

SEQ ID NO: 2186722 - RNA, 19 nt, Human
uccauucuuucugauaacu

SEQ ID NO: 2186723 - RNA, 14 nt, Human
uccauugacaugua

SEQ ID NO: 2186724 - RNA, 15 nt, Human
uccauugacauguac

SEQ ID NO: 2186725 - RNA, 16 nt, Human
uccauugacauguaca

SEQ ID NO: 2186726 - RNA, 17 nt, Human
uccauugacauguacag

SEQ ID NO: 2186727 - RNA, 18 nt, Human
uccauugacauguacaga

SEQ ID NO: 2186728 - RNA, 19 nt, Human
uccauugacauguacagag

SEQ ID NO: 2186729 - RNA, 16 nt, Human
uccaucucgccacccc

SEQ ID NO: 2186730 - RNA, 16 nt, Human
uccaucucucuggccc

SEQ ID NO: 2186731 - RNA, 23 nt, Human
uccaucucgccaccccuccuucc

SEQ ID NO: 2186732 - RNA, 14 nt, Human
uccaucucgccacc

SEQ ID NO: 2186733 - RNA, 21 nt, Human
uccaucuccaagaaugcugaa

SEQ ID NO: 2186734 - RNA, 18 nt, Human
uccaucuaaacugccccc

SEQ ID NO: 2186735 - RNA, 21 nt, Human
uccaucuaaauaccugcccug

SEQ ID NO: 2186736 - RNA, 16 nt, Human
uccaucuccaagaaug

SEQ ID NO: 2186737 - RNA, 18 nt, Human
uccaucuccaagaaugcu

SEQ ID NO: 2186738 - RNA, 20 nt, Human
uccaucuccaagaaugcuga

SEQ ID NO: 2186739 - RNA, 17 nt, Human
uccauccuuucugccuc

SEQ ID NO: 2186740 - RNA, 20 nt, Human
uccauccuugagucaaaaaa

SEQ ID NO: 2186741 - RNA, 16 nt, Human
uccaucuaaacugccc

SEQ ID NO: 2186742 - RNA, 22 nt, Human
acgccagauucuuuccugaggc

SEQ ID NO: 2186743 - RNA, 23 nt, Human
acgccagauucuuuccugaggcu

SEQ ID NO: 2186744 - RNA, 21 nt, Human
uccauccugaggcuccacuug

SEQ ID NO: 2186745 - RNA, 20 nt, Human
uccauccugaggcuccacuu

SEQ ID NO: 2186746 - RNA, 13 nt, Human
ucccaaagugcug

SEQ ID NO: 2186747 - RNA, 14 nt, Human
ucccaaagugcugg

SEQ ID NO: 2186748 - RNA, 21 nt, Human
ucccaaguagcugggauuaca

SEQ ID NO: 2186749 - RNA, 20 nt, Human
ucccaaguagcugggauuac

SEQ ID NO: 2186750 - RNA, 21 nt, Human
ucccaaagcagugcaugcugu

SEQ ID NO: 2186751 - RNA, 16 nt, Human
ucccaaaggacuccac

SEQ ID NO: 2186752 - RNA, 22 nt, Human
ucccaaaggacuccacccaucc

SEQ ID NO: 2186753 - RNA, 19 nt, Human
ucccaaagccagaaccaga

SEQ ID NO: 2186754 - RNA, 22 nt, Human
ucccaaagccuugugucuacag

SEQ ID NO: 2186755 - RNA, 17 nt, Human
ucccaaagcagugcaug

SEQ ID NO: 2186756 - RNA, 18 nt, Human
ucccaaagcagugcaugc

SEQ ID NO: 2186757 - RNA, 14 nt, Human
uccauuugaaagaa

SEQ ID NO: 2186758 - RNA, 14 nt, Human
uccauuucucaugu

SEQ ID NO: 2186759 - RNA, 17 nt, Human
uccauuucucauguuuu

SEQ ID NO: 2186760 - RNA, 23 nt, Human
uccauuuuuucaagguaauuucu

SEQ ID NO: 2186761 - RNA, 20 nt, Human
ucccaaaagcccauucauuc

SEQ ID NO: 2186762 - RNA, 23 nt, Human
uccauuucaucuauuucugagaa

SEQ ID NO: 2186763 - RNA, 21 nt, Human
uccauuucaucuauuucugag

SEQ ID NO: 2186764 - RNA, 20 nt, Human
uccauuucgccccucauuua

SEQ ID NO: 2186765 - RNA, 20 nt, Human
uccauuuaguucuuuguuau

SEQ ID NO: 2186766 - RNA, 14 nt, Human
uccauuuaguucuu

SEQ ID NO: 2186767 - RNA, 14 nt, Human
ucccaaaauuguuu

SEQ ID NO: 2186768 - RNA, 15 nt, Human
ucccaaaauuguuuu

SEQ ID NO: 2186769 - RNA, 22 nt, Human
ucccaaaauuguuuugagcuuu

SEQ ID NO: 2186770 - RNA, 18 nt, Human
ucccaaacccuucagugc

SEQ ID NO: 2186771 - RNA, 21 nt, Human
ucccaaacgccuccccugccc

SEQ ID NO: 2186772 - RNA, 15 nt, Human
ucccaaacgccuccc

SEQ ID NO: 2186773 - RNA, 16 nt, Human
ucccaaagcagugcau

SEQ ID NO: 2186774 - RNA, 20 nt, Human
acguauguuuuuguguauuu

SEQ ID NO: 2186775 - RNA, 16 nt, Human
acguauugguccagcu

SEQ ID NO: 2186776 - RNA, 18 nt, Human
acguacuuagcagcuauc

SEQ ID NO: 2186777 - RNA, 17 nt, Human
acguagcugaggccgga

SEQ ID NO: 2186778 - RNA, 20 nt, Human
acguagcugcaaaggacaga

SEQ ID NO: 2186779 - RNA, 16 nt, Human
acguagcugcaaagga

SEQ ID NO: 2186780 - RNA, 24 nt, Human
acguagcuucuaccaugaacagaa

SEQ ID NO: 2186781 - RNA, 13 nt, Human
acguaugcaugug

SEQ ID NO: 2186782 - RNA, 14 nt, Human
acguaugcauguga

SEQ ID NO: 2186783 - RNA, 18 nt, Human
acguggcuuuuagacaga

SEQ ID NO: 2186784 - RNA, 11 nt, Human
acgugggagac

SEQ ID NO: 2186785 - RNA, 16 nt, Human
acgugggagacaagaa

SEQ ID NO: 2186786 - RNA, 16 nt, Human
acgugggcaaacaggc

SEQ ID NO: 2186787 - RNA, 23 nt, Human
acguggcugcuucaaggauccug

SEQ ID NO: 2186788 - RNA, 17 nt, Human
acgguuuuacugcagcu

SEQ ID NO: 2186789 - RNA, 15 nt, Human
acgguuuuacugcag

SEQ ID NO: 2186790 - RNA, 20 nt, Human
acguacguaucagcggcccc

SEQ ID NO: 2186791 - RNA, 17 nt, Human
acgguuugaagccugga

SEQ ID NO: 2186792 - RNA, 16 nt, Human
acguacuuagcagcua

SEQ ID NO: 2186793 - RNA, 22 nt, Human
acguauaaaagccuguuuaaga

SEQ ID NO: 2186794 - RNA, 16 nt, Human
acguuccuauugucau

SEQ ID NO: 2186795 - RNA, 18 nt, Human
acguuccuauugucauua

SEQ ID NO: 2186796 - RNA, 20 nt, Human
acguuccuauugucauuaaa

SEQ ID NO: 2186797 - RNA, 11 nt, Human
acguuccagcc

SEQ ID NO: 2186798 - RNA, 12 nt, Human
acguuccagccg

SEQ ID NO: 2186799 - RNA, 14 nt, Human
acguuccagccggc

SEQ ID NO: 2186800 - RNA, 14 nt, Human
acguucggggcaug

SEQ ID NO: 2186801 - RNA, 20 nt, Human
acguuccuuacugcagaaua

SEQ ID NO: 2186802 - RNA, 19 nt, Human
acguuccuuacugcagaau

SEQ ID NO: 2186803 - RNA, 18 nt, Human
acguuccuuacugcagaa

SEQ ID NO: 2186804 - RNA, 16 nt, Human
acguuccuuacugcag

SEQ ID NO: 2186805 - RNA, 21 nt, Human
acguuccuauugucauuaaag

SEQ ID NO: 2186806 - RNA, 14 nt, Human
acguucaccccucc

SEQ ID NO: 2186807 - RNA, 16 nt, Human
acguucaccccuccac

SEQ ID NO: 2186808 - RNA, 16 nt, Human
acgugugugacucaga

SEQ ID NO: 2186809 - RNA, 11 nt, Human
acgugugugac

SEQ ID NO: 2186810 - RNA, 12 nt, Human
acgugugauuuu

SEQ ID NO: 2186811 - RNA, 15 nt, Human
acgugugauuuuucu

SEQ ID NO: 2186812 - RNA, 18 nt, Human
acguguacuacaauuuaa

SEQ ID NO: 2186813 - RNA, 14 nt, Human
acguguagcuauau

SEQ ID NO: 2186814 - RNA, 22 nt, Human
acgugggucuucagggggccag

SEQ ID NO: 2186815 - RNA, 14 nt, Human
acguggggcagcac

SEQ ID NO: 2186816 - RNA, 15 nt, Human
acguggggcagcaca

SEQ ID NO: 2186817 - RNA, 19 nt, Human
acguggggcagcacagaga

SEQ ID NO: 2186818 - RNA, 20 nt, Human
acguggggcagcacagagag

SEQ ID NO: 2186819 - RNA, 20 nt, Human
acgugggcggcagagaggac

SEQ ID NO: 2186820 - RNA, 15 nt, Human
acgugggcggcagag

SEQ ID NO: 2186821 - RNA, 19 nt, Human
acgugggcaaacaggcagu

SEQ ID NO: 2186822 - RNA, 22 nt, Human
ucccacacugcuaggugggcca

SEQ ID NO: 2186823 - RNA, 18 nt, Human
ucccacacuggugacugc

SEQ ID NO: 2186824 - RNA, 17 nt, Human
ucccacaccuccacagu

SEQ ID NO: 2186825 - RNA, 18 nt, Human
ucccacaccuccacaguu

SEQ ID NO: 2186826 - RNA, 18 nt, Human
ucccacaccguguaaacc

SEQ ID NO: 2186827 - RNA, 15 nt, Human
ucccacaccuccaca

SEQ ID NO: 2186828 - RNA, 16 nt, Human
ucccacaccuccacag

SEQ ID NO: 2186829 - RNA, 13 nt, Human
ucccacacccugg

SEQ ID NO: 2186830 - RNA, 22 nt, Human
ucccacaaucuuaaggggcagc

SEQ ID NO: 2186831 - RNA, 23 nt, Human
ucccacaaucuuaaggggcagcu

SEQ ID NO: 2186832 - RNA, 16 nt, Human
ucccacaagugguggu

SEQ ID NO: 2186833 - RNA, 23 nt, Human
ucccacaauauaaaacuguacuu

SEQ ID NO: 2186834 - RNA, 14 nt, Human
ucccacaaguggug

SEQ ID NO: 2186835 - RNA, 15 nt, Human
ucccaccccacacac

SEQ ID NO: 2186836 - RNA, 20 nt, Human
ucccaccccacacacgccag

SEQ ID NO: 2186837 - RNA, 17 nt, Human
ucccaagugccagucuu

SEQ ID NO: 2186838 - RNA, 12 nt, Human
ucccaaguggug

SEQ ID NO: 2186839 - RNA, 16 nt, Human
ucccaaguggugccua

SEQ ID NO: 2186840 - RNA, 18 nt, Human
ucccaaguggugccuaaa

SEQ ID NO: 2186841 - RNA, 18 nt, Human
ucccaaguuuuaggacaa

SEQ ID NO: 2186842 - RNA, 14 nt, Human
ucccaagucuacag

SEQ ID NO: 2186843 - RNA, 15 nt, Human
ucccaagucuacaga

SEQ ID NO: 2186844 - RNA, 17 nt, Human
ucccaauaggcagacug

SEQ ID NO: 2186845 - RNA, 23 nt, Human
ucccaaguuuuaggacaaacagc

SEQ ID NO: 2186846 - RNA, 22 nt, Human
ucccaauagcaacguagcuucu

SEQ ID NO: 2186847 - RNA, 16 nt, Human
ucccacaaaggagagc

SEQ ID NO: 2186848 - RNA, 13 nt, Human
ucccaccccaccc

SEQ ID NO: 2186849 - RNA, 12 nt, Human
ucccaccccacc

SEQ ID NO: 2186850 - RNA, 13 nt, Human
ucccacagcgcug

SEQ ID NO: 2186851 - RNA, 22 nt, Human
ucccaccccacccccuucagug

SEQ ID NO: 2186852 - RNA, 20 nt, Human
ucccaccccacccccuucag

SEQ ID NO: 2186853 - RNA, 18 nt, Human
ucccaccccacccccuuc

SEQ ID NO: 2186854 - RNA, 16 nt, Human
ucccaccccacccccu

SEQ ID NO: 2186855 - RNA, 20 nt, Human
ucccaccccauuuucugugg

SEQ ID NO: 2186856 - RNA, 22 nt, Human
ucccaccccauuuucugugggc

SEQ ID NO: 2186857 - RNA, 20 nt, Human
acgggaggguaaggcugugg

SEQ ID NO: 2186858 - RNA, 16 nt, Human
acgggacugacgcaac

SEQ ID NO: 2186859 - RNA, 18 nt, Human
ucccacccccacccccag

SEQ ID NO: 2186860 - RNA, 20 nt, Human
ucccacccccacccccagcu

SEQ ID NO: 2186861 - RNA, 14 nt, Human
acgggcugcccugc

SEQ ID NO: 2186862 - RNA, 16 nt, Human
acgggcaguagcugug

SEQ ID NO: 2186863 - RNA, 18 nt, Human
acgggcaugggcacuccc

SEQ ID NO: 2186864 - RNA, 19 nt, Human
acgguucaccagccucucu

SEQ ID NO: 2186865 - RNA, 16 nt, Human
acgguucaccagccuc

SEQ ID NO: 2186866 - RNA, 23 nt, Human
acgggcuuguugcuguugauguu

SEQ ID NO: 2186867 - RNA, 21 nt, Human
acggugggccuugcuggggac

SEQ ID NO: 2186868 - RNA, 21 nt, Human
acgguggucacuggaacucag

SEQ ID NO: 2186869 - RNA, 13 nt, Human
ucauuaccacagg

SEQ ID NO: 2186870 - RNA, 20 nt, Human
ucauuaccuuuuuugauaaa

SEQ ID NO: 2186871 - RNA, 14 nt, Human
ucauuaauucuaua

SEQ ID NO: 2186872 - RNA, 13 nt, Human
ucauuaauucuau

SEQ ID NO: 2186873 - RNA, 22 nt, Human
ucauuaaugacacuugucccca

SEQ ID NO: 2186874 - RNA, 19 nt, Human
ucauuaaugacacuugucc

SEQ ID NO: 2186875 - RNA, 15 nt, Human
ucauuaaugacacuu

SEQ ID NO: 2186876 - RNA, 14 nt, Human
ucaugauuagcaag

SEQ ID NO: 2186877 - RNA, 16 nt, Human
ucaugauuagcaaguu

SEQ ID NO: 2186878 - RNA, 13 nt, Human
ucauuaaugacac

SEQ ID NO: 2186879 - RNA, 14 nt, Human
ucauuaaugacacu

SEQ ID NO: 2186880 - RNA, 13 nt, Human
ucaugauuagcaa

SEQ ID NO: 2186881 - RNA, 22 nt, Human
ucaugaucucccugccgccuca

SEQ ID NO: 2186882 - RNA, 19 nt, Human
ucaugaucucccugccgcc

SEQ ID NO: 2186883 - RNA, 18 nt, Human
ucaugaucucccugccgc

SEQ ID NO: 2186884 - RNA, 17 nt, Human
ucaugaucucccugccg

SEQ ID NO: 2186885 - RNA, 16 nt, Human
ucaugaucucccugcc

SEQ ID NO: 2186886 - RNA, 15 nt, Human
ucaugaucucccugc

SEQ ID NO: 2186887 - RNA, 14 nt, Human
ucaugaucucccug

SEQ ID NO: 2186888 - RNA, 13 nt, Human
ucaugaucucccu

SEQ ID NO: 2186889 - RNA, 18 nt, Human
ucaugaucuugugacaua

SEQ ID NO: 2186890 - RNA, 17 nt, Human
ucaugaucuugugacau

SEQ ID NO: 2186891 - RNA, 16 nt, Human
ucaugaucuugugaca

SEQ ID NO: 2186892 - RNA, 21 nt, Human
ucaugaauuaguuuuauaugc

SEQ ID NO: 2186893 - RNA, 16 nt, Human
ucaugauccaacuaau

SEQ ID NO: 2186894 - RNA, 13 nt, Human
ucaugauccaacu

SEQ ID NO: 2186895 - RNA, 17 nt, Human
ucauucuugaaagcugu

SEQ ID NO: 2186896 - RNA, 18 nt, Human
ucauucuugaaagcugug

SEQ ID NO: 2186897 - RNA, 12 nt, Human
ucauucuucugu

SEQ ID NO: 2186898 - RNA, 12 nt, Human
ucauugaaaucu

SEQ ID NO: 2186899 - RNA, 13 nt, Human
ucauugaaaucuu

SEQ ID NO: 2186900 - RNA, 18 nt, Human
ucauuacuuuaccacccc

SEQ ID NO: 2186901 - RNA, 21 nt, Human
ucauuaaugacacuugucccc

SEQ ID NO: 2186902 - RNA, 16 nt, Human
ucauucucugucucau

SEQ ID NO: 2186903 - RNA, 15 nt, Human
ucauucucugucuca

SEQ ID NO: 2186904 - RNA, 14 nt, Human
ucauucucugucuc

SEQ ID NO: 2186905 - RNA, 20 nt, Human
ucauuacuuuaccaccccca

SEQ ID NO: 2186906 - RNA, 16 nt, Human
ucauuacuuuugaagu

SEQ ID NO: 2186907 - RNA, 18 nt, Human
ucauucugaaggagcccc

SEQ ID NO: 2186908 - RNA, 19 nt, Human
ucauucucugucucaucca

SEQ ID NO: 2186909 - RNA, 18 nt, Human
ucauucucugucucaucc

SEQ ID NO: 2186910 - RNA, 14 nt, Human
ucauucuuauuuca

SEQ ID NO: 2186911 - RNA, 16 nt, Human
ucauucuuagcucuua

SEQ ID NO: 2186912 - RNA, 18 nt, Human
ucauucuuauuucaugaa

SEQ ID NO: 2186913 - RNA, 13 nt, Human
ucauucuucucua

SEQ ID NO: 2186914 - RNA, 17 nt, Human
ucauucuucucuagcug

SEQ ID NO: 2186915 - RNA, 18 nt, Human
accucuaaaacaguccuu

SEQ ID NO: 2186916 - RNA, 21 nt, Human
accucguccucccccugccag

SEQ ID NO: 2186917 - RNA, 20 nt, Human
accucguccucccccugcca

SEQ ID NO: 2186918 - RNA, 18 nt, Human
accucguccucccccugc

SEQ ID NO: 2186919 - RNA, 15 nt, Human
accucguccuccccc

SEQ ID NO: 2186920 - RNA, 14 nt, Human
accucguccucccc

SEQ ID NO: 2186921 - RNA, 23 nt, Human
accuccuucucugucucaugugu

SEQ ID NO: 2186922 - RNA, 21 nt, Human
accuccuuguaacaucaggga

SEQ ID NO: 2186923 - RNA, 12 nt, Human
accuccuucucu

SEQ ID NO: 2186924 - RNA, 19 nt, Human
accucggugccuuccucuu

SEQ ID NO: 2186925 - RNA, 13 nt, Human
accuccugggcua

SEQ ID NO: 2186926 - RNA, 22 nt, Human
ucauugcugagccucugcuccc

SEQ ID NO: 2186927 - RNA, 17 nt, Human
ucauugcugagccucug

SEQ ID NO: 2186928 - RNA, 23 nt, Human
ucauugcugagccucugcucccc

SEQ ID NO: 2186929 - RNA, 23 nt, Human
ucauugcugaaaaugguauuuuc

SEQ ID NO: 2186930 - RNA, 17 nt, Human
accuccugucucuggcc

SEQ ID NO: 2186931 - RNA, 15 nt, Human
accuccugucucugg

SEQ ID NO: 2186932 - RNA, 16 nt, Human
accuccugucucuggc

SEQ ID NO: 2186933 - RNA, 18 nt, Human
ucauugauugucagcuac

SEQ ID NO: 2186934 - RNA, 18 nt, Human
ucauugcccccagggcac

SEQ ID NO: 2186935 - RNA, 14 nt, Human
ucauugaaguauuu

SEQ ID NO: 2186936 - RNA, 17 nt, Human
ucauugaagucagaugu

SEQ ID NO: 2186937 - RNA, 19 nt, Human
ucauugauaugaaaaauau

SEQ ID NO: 2186938 - RNA, 14 nt, Human
ucauugcugaaaau

SEQ ID NO: 2186939 - RNA, 17 nt, Human
ucauugcugaaaauggu

SEQ ID NO: 2186940 - RNA, 18 nt, Human
ucauugcugaaaauggua

SEQ ID NO: 2186941 - RNA, 16 nt, Human
ucauugcugagccucu

SEQ ID NO: 2186942 - RNA, 15 nt, Human
ucauugcugagccuc

SEQ ID NO: 2186943 - RNA, 20 nt, Human
ucauugccuuaacuggagcc

SEQ ID NO: 2186944 - RNA, 23 nt, Human
ucauugccuuaacuggagcccca

SEQ ID NO: 2186945 - RNA, 17 nt, Human
ucauugccuuaacugga

SEQ ID NO: 2186946 - RNA, 22 nt, Human
ucauugaaaucuuuuugcuuug

SEQ ID NO: 2186947 - RNA, 12 nt, Human
ucauugaccuga

SEQ ID NO: 2186948 - RNA, 14 nt, Human
ucauugaccugagg

SEQ ID NO: 2186949 - RNA, 15 nt, Human
ucauugaccugaggc

SEQ ID NO: 2186950 - RNA, 13 nt, Human
accucucccaggg

SEQ ID NO: 2186951 - RNA, 23 nt, Human
accucuccaucuucagcuucuuc

SEQ ID NO: 2186952 - RNA, 17 nt, Human
accucuccccuggaacu

SEQ ID NO: 2186953 - RNA, 20 nt, Human
accucuccaucuucagcuuc

SEQ ID NO: 2186954 - RNA, 19 nt, Human
accucuuuauuuuuugauu

SEQ ID NO: 2186955 - RNA, 22 nt, Human
accucuuuauuuuuugauugaa

SEQ ID NO: 2186956 - RNA, 15 nt, Human
accugaaaaaaaguu

SEQ ID NO: 2186957 - RNA, 18 nt, Human
accugaaaaaaaguuuac

SEQ ID NO: 2186958 - RNA, 19 nt, Human
accugaaaaaaaguuuaca

SEQ ID NO: 2186959 - RNA, 20 nt, Human
accugaaaacacugugcaca

SEQ ID NO: 2186960 - RNA, 19 nt, Human
accugaaaacacugugcac

SEQ ID NO: 2186961 - RNA, 18 nt, Human
accugaaaacacugugca

SEQ ID NO: 2186962 - RNA, 11 nt, Human
accugaaaaca

SEQ ID NO: 2186963 - RNA, 22 nt, Human
accucguccucccccugccagu

SEQ ID NO: 2186964 - RNA, 15 nt, Human
accucuccaucuuca

SEQ ID NO: 2186965 - RNA, 19 nt, Human
accucuccaucuucagcuu

SEQ ID NO: 2186966 - RNA, 20 nt, Human
accucuccaagggcuucugc

SEQ ID NO: 2186967 - RNA, 22 nt, Human
accucuccaagggcuucugcac

SEQ ID NO: 2186968 - RNA, 18 nt, Human
accucucaucaguguccu

SEQ ID NO: 2186969 - RNA, 10 nt, Human
accucuccaa

SEQ ID NO: 2186970 - RNA, 11 nt, Human
accucuccaag

SEQ ID NO: 2186971 - RNA, 13 nt, Human
accucuccaaggg

SEQ ID NO: 2186972 - RNA, 12 nt, Human
accugaaaagua

SEQ ID NO: 2186973 - RNA, 21 nt, Human
accugaaaacacugugcacau

SEQ ID NO: 2186974 - RNA, 21 nt, Human
accugaaaaaaaguuuacaag

SEQ ID NO: 2186975 - RNA, 23 nt, Human
accugaccccugcucaguaaagc

SEQ ID NO: 2186976 - RNA, 14 nt, Human
accugaccgugggc

SEQ ID NO: 2186977 - RNA, 18 nt, Human
accugaccgugggcgggg

SEQ ID NO: 2186978 - RNA, 17 nt, Human
accugaccccugcucag

SEQ ID NO: 2186979 - RNA, 16 nt, Human
accugaccccugcuca

SEQ ID NO: 2186980 - RNA, 22 nt, Human
accugacucgucugacugugug

SEQ ID NO: 2186981 - RNA, 13 nt, Human
accugacucugaa

SEQ ID NO: 2186982 - RNA, 14 nt, Human
accugacucugaaa

SEQ ID NO: 2186983 - RNA, 15 nt, Human
accugacucugaaau

SEQ ID NO: 2186984 - RNA, 16 nt, Human
accugacucugaaauc

SEQ ID NO: 2186985 - RNA, 17 nt, Human
accugacucugaaaucu

SEQ ID NO: 2186986 - RNA, 18 nt, Human
accugacucugaaaucug

SEQ ID NO: 2186987 - RNA, 19 nt, Human
accugacucugaaaucuga

SEQ ID NO: 2186988 - RNA, 20 nt, Human
accugacuauugaaguugca

SEQ ID NO: 2186989 - RNA, 19 nt, Human
accugacguagcugcaaag

SEQ ID NO: 2186990 - RNA, 20 nt, Human
accugaccgugggcggggcc

SEQ ID NO: 2186991 - RNA, 22 nt, Human
accugacucugaaaucugaaga

SEQ ID NO: 2186992 - RNA, 23 nt, Human
accugacucugaaaucugaagac

SEQ ID NO: 2186993 - RNA, 23 nt, Human
accugagaccaguugggagcacu

SEQ ID NO: 2186994 - RNA, 14 nt, Human
accugagcucccca

SEQ ID NO: 2186995 - RNA, 20 nt, Human
accugagcuagaagcuggag

SEQ ID NO: 2186996 - RNA, 19 nt, Human
accugagcuagaagcugga

SEQ ID NO: 2186997 - RNA, 18 nt, Human
accugagcugccauccag

SEQ ID NO: 2186998 - RNA, 12 nt, Human
accugagcugcc

SEQ ID NO: 2186999 - RNA, 15 nt, Human
accugagcuccccac

SEQ ID NO: 2187000 - RNA, 13 nt, Human
accugaggaagcg

SEQ ID NO: 2187001 - RNA, 14 nt, Human
accugaggcccuuc

SEQ ID NO: 2187002 - RNA, 19 nt, Human
accugcauccguaguuccc

SEQ ID NO: 2187003 - RNA, 22 nt, Human
accugcagguugggccauacug

SEQ ID NO: 2187004 - RNA, 13 nt, Human
accugcagguugg

SEQ ID NO: 2187005 - RNA, 17 nt, Human
accugcagguugggcca

SEQ ID NO: 2187006 - RNA, 22 nt, Human
accugcauccguaguucccuga

SEQ ID NO: 2187007 - RNA, 21 nt, Human
accugcauccguaguucccug

SEQ ID NO: 2187008 - RNA, 19 nt, Human
accugcaggccaagagcag

SEQ ID NO: 2187009 - RNA, 15 nt, Human
accugcaggccaaga

SEQ ID NO: 2187010 - RNA, 21 nt, Human
accugcaccuccccccacugc

SEQ ID NO: 2187011 - RNA, 22 nt, Human
accugcaccuccccccacugca

SEQ ID NO: 2187012 - RNA, 23 nt, Human
accugcacuggggagcccgucuc

SEQ ID NO: 2187013 - RNA, 14 nt, Human
accugauugugucu

SEQ ID NO: 2187014 - RNA, 17 nt, Human
accugaucaaugacaga

SEQ ID NO: 2187015 - RNA, 20 nt, Human
accugaucaaugacagagcc

SEQ ID NO: 2187016 - RNA, 15 nt, Human
accugauuuacaguu

SEQ ID NO: 2187017 - RNA, 21 nt, Human
accugauuuacaguuucaaaa

SEQ ID NO: 2187018 - RNA, 18 nt, Human
accugagucugcuauauu

SEQ ID NO: 2187019 - RNA, 16 nt, Human
accugaucaaugacag

SEQ ID NO: 2187020 - RNA, 14 nt, Human
accugaucaaugac

SEQ ID NO: 2187021 - RNA, 15 nt, Human
accugauugugucuc

SEQ ID NO: 2187022 - RNA, 17 nt, Human
accugauugugucucuu

SEQ ID NO: 2187023 - RNA, 18 nt, Human
accugauugugucucuug

SEQ ID NO: 2187024 - RNA, 22 nt, Human
accugaggcccuucucuccagc

SEQ ID NO: 2187025 - RNA, 21 nt, Human
accugagucguacagaaagcu

SEQ ID NO: 2187026 - RNA, 23 nt, Human
accugagucacccuaccugugcc

SEQ ID NO: 2187027 - RNA, 22 nt, Human
accugagucacccuaccugugc

SEQ ID NO: 2187028 - RNA, 23 nt, Human
accugaggugggcccaggaccag

SEQ ID NO: 2187029 - RNA, 24 nt, Human
accugaggugggcccaggaccagc

SEQ ID NO: 2187030 - RNA, 12 nt, Human
accugagguggg

SEQ ID NO: 2187031 - RNA, 14 nt, Human
accugaggugggcc

SEQ ID NO: 2187032 - RNA, 16 nt, Human
accugaggugggccca

SEQ ID NO: 2187033 - RNA, 17 nt, Human
accugaggugggcccag

SEQ ID NO: 2187034 - RNA, 18 nt, Human
accugaggugggcccagg

SEQ ID NO: 2187035 - RNA, 19 nt, Human
accugaggugggcccagga

SEQ ID NO: 2187036 - RNA, 21 nt, Human
accugaggugggcccaggacc

SEQ ID NO: 2187037 - RNA, 22 nt, Human
accugaggugggcccaggacca

SEQ ID NO: 2187038 - RNA, 15 nt, Human
accugaggcccuucu

SEQ ID NO: 2187039 - RNA, 16 nt, Human
accugaggcccuucuc

SEQ ID NO: 2187040 - RNA, 20 nt, Human
accugaggcccuucucucca

SEQ ID NO: 2187041 - RNA, 21 nt, Human
accugaggcccuucucuccag

SEQ ID NO: 2187042 - RNA, 16 nt, Human
accucaaccaaugcca

SEQ ID NO: 2187043 - RNA, 16 nt, Human
accucaaccugugaug

SEQ ID NO: 2187044 - RNA, 19 nt, Human
accucaacccccauuucua

SEQ ID NO: 2187045 - RNA, 21 nt, Human
accucaacccccauuucuauu

SEQ ID NO: 2187046 - RNA, 20 nt, Human
accucccugaaccaucccug

SEQ ID NO: 2187047 - RNA, 15 nt, Human
accucccugaaccau

SEQ ID NO: 2187048 - RNA, 14 nt, Human
accucccugaacca

SEQ ID NO: 2187049 - RNA, 22 nt, Human
accucaacugccuacuccaaaa

SEQ ID NO: 2187050 - RNA, 15 nt, Human
accucccucccggca

SEQ ID NO: 2187051 - RNA, 22 nt, Human
accucaacccccauuucuauuu

SEQ ID NO: 2187052 - RNA, 16 nt, Human
accucaacugccuacu

SEQ ID NO: 2187053 - RNA, 10 nt, Human
accucccucc

SEQ ID NO: 2187054 - RNA, 13 nt, Human
accuccugccucg

SEQ ID NO: 2187055 - RNA, 12 nt, Human
accuccugccuc

SEQ ID NO: 2187056 - RNA, 14 nt, Human
accucccugccucc

SEQ ID NO: 2187057 - RNA, 13 nt, Human
accucccugccuc

SEQ ID NO: 2187058 - RNA, 14 nt, Human
accucccugcaacc

SEQ ID NO: 2187059 - RNA, 13 nt, Human
accucccugaccc

SEQ ID NO: 2187060 - RNA, 17 nt, Human
accucccugacccgucu

SEQ ID NO: 2187061 - RNA, 17 nt, Human
ucauccccucacuugcc

SEQ ID NO: 2187062 - RNA, 21 nt, Human
ucauccccaggggucccagcc

SEQ ID NO: 2187063 - RNA, 20 nt, Human
ucauccccaggggucccagc

SEQ ID NO: 2187064 - RNA, 12 nt, Human
ucauccccaggg

SEQ ID NO: 2187065 - RNA, 20 nt, Human
ucauccccaccugucuucaa

SEQ ID NO: 2187066 - RNA, 16 nt, Human
accuccgccucccggg

SEQ ID NO: 2187067 - RNA, 18 nt, Human
ucaucccauucugcguca

SEQ ID NO: 2187068 - RNA, 23 nt, Human
accuccugccucgaacuggcugc

SEQ ID NO: 2187069 - RNA, 14 nt, Human
ucaucccauguaca

SEQ ID NO: 2187070 - RNA, 17 nt, Human
ucauccggcagccugga

SEQ ID NO: 2187071 - RNA, 15 nt, Human
ucauccggcagccug

SEQ ID NO: 2187072 - RNA, 19 nt, Human
ucauccggcagccuggaug

SEQ ID NO: 2187073 - RNA, 15 nt, Human
ucauccuaagcuauu

SEQ ID NO: 2187074 - RNA, 21 nt, Human
ucaucccuaugggauucagug

SEQ ID NO: 2187075 - RNA, 17 nt, Human
ucaucccuaaugcugca

SEQ ID NO: 2187076 - RNA, 18 nt, Human
ucaucccuaaugcugcag

SEQ ID NO: 2187077 - RNA, 23 nt, Human
ucaucccgagcaccuccacaucc

SEQ ID NO: 2187078 - RNA, 21 nt, Human
ucaucccgagcaccuccacau

SEQ ID NO: 2187079 - RNA, 15 nt, Human
ucauccgaggcaggg

SEQ ID NO: 2187080 - RNA, 14 nt, Human
ucauccgaggcagg

SEQ ID NO: 2187081 - RNA, 12 nt, Human
ucauccugcagg

SEQ ID NO: 2187082 - RNA, 13 nt, Human
ucauccugcaggc

SEQ ID NO: 2187083 - RNA, 14 nt, Human
ucauccuucuggaa

SEQ ID NO: 2187084 - RNA, 16 nt, Human
ucauccugacucugcc

SEQ ID NO: 2187085 - RNA, 17 nt, Human
ucauccugacucugccc

SEQ ID NO: 2187086 - RNA, 19 nt, Human
ucauccugacucugccccc

SEQ ID NO: 2187087 - RNA, 20 nt, Human
ucauccugacucugcccccu

SEQ ID NO: 2187088 - RNA, 18 nt, Human
ucauccucauacccaccc

SEQ ID NO: 2187089 - RNA, 13 nt, Human
ucauccuccucag

SEQ ID NO: 2187090 - RNA, 19 nt, Human
ucauccuccucagaucuuc

SEQ ID NO: 2187091 - RNA, 17 nt, Human
ucaucuauuucugagaa

SEQ ID NO: 2187092 - RNA, 16 nt, Human
ucaucuauuucugaga

SEQ ID NO: 2187093 - RNA, 15 nt, Human
ucaucuauuucugag

SEQ ID NO: 2187094 - RNA, 14 nt, Human
ucaucuauuucuga

SEQ ID NO: 2187095 - RNA, 11 nt, Human
ucaucuauuuc

SEQ ID NO: 2187096 - RNA, 13 nt, Human
ucaucuauaaaga

SEQ ID NO: 2187097 - RNA, 23 nt, Human
ucaucuauaaagaagaacuugca

SEQ ID NO: 2187098 - RNA, 18 nt, Human
ucaucuauuucugagaag

SEQ ID NO: 2187099 - RNA, 13 nt, Human
ucaugaagcccaa

SEQ ID NO: 2187100 - RNA, 16 nt, Human
ucaugaaucugcaaug

SEQ ID NO: 2187101 - RNA, 16 nt, Human
ucaugaauuaguuuua

SEQ ID NO: 2187102 - RNA, 13 nt, Human
ucaucuaguuuua

SEQ ID NO: 2187103 - RNA, 18 nt, Human
ucaucuagguaaauuaca

SEQ ID NO: 2187104 - RNA, 14 nt, Human
ucaucuaggauuuu

SEQ ID NO: 2187105 - RNA, 22 nt, Human
ucauccuucuggaauaaggaga

SEQ ID NO: 2187106 - RNA, 15 nt, Human
accuaaauggccuca

SEQ ID NO: 2187107 - RNA, 18 nt, Human
accuaacauuauuuauuc

SEQ ID NO: 2187108 - RNA, 16 nt, Human
accuaaccccuuuccu

SEQ ID NO: 2187109 - RNA, 15 nt, Human
accuaaccccuuucc

SEQ ID NO: 2187110 - RNA, 22 nt, Human
accuaaaaggaaaucucacccc

SEQ ID NO: 2187111 - RNA, 21 nt, Human
accuaaaaggaaaucucaccc

SEQ ID NO: 2187112 - RNA, 13 nt, Human
accuaaaagagau

SEQ ID NO: 2187113 - RNA, 21 nt, Human
accuaaaagagauuucaagag

SEQ ID NO: 2187114 - RNA, 16 nt, Human
accuaaaaaagauaua

SEQ ID NO: 2187115 - RNA, 19 nt, Human
accuaaaaaagauauauua

SEQ ID NO: 2187116 - RNA, 23 nt, Human
accuaaacauagaaauugccuga

SEQ ID NO: 2187117 - RNA, 19 nt, Human
accuaaaauuugcccuccc

SEQ ID NO: 2187118 - RNA, 21 nt, Human
accuaaaauuugcccucccau

SEQ ID NO: 2187119 - RNA, 22 nt, Human
accuaaaauuugcccucccauc

SEQ ID NO: 2187120 - RNA, 15 nt, Human
accuaaacagauaua

SEQ ID NO: 2187121 - RNA, 14 nt, Human
accgcuccccagcc

SEQ ID NO: 2187122 - RNA, 15 nt, Human
accuaaaaaagauau

SEQ ID NO: 2187123 - RNA, 13 nt, Human
accgcuccccagc

SEQ ID NO: 2187124 - RNA, 13 nt, Human
accgcguuguaaa

SEQ ID NO: 2187125 - RNA, 15 nt, Human
accgcguuguaaaau

SEQ ID NO: 2187126 - RNA, 18 nt, Human
accgcguuguaaaauaua

SEQ ID NO: 2187127 - RNA, 19 nt, Human
accgcguuguaaaauauag

SEQ ID NO: 2187128 - RNA, 15 nt, Human
accgcgucuggugac

SEQ ID NO: 2187129 - RNA, 20 nt, Human
accgcgacuaauuucaaaau

SEQ ID NO: 2187130 - RNA, 18 nt, Human
ucaggaacagcuauggga

SEQ ID NO: 2187131 - RNA, 17 nt, Human
accgcgacuaauuucaa

SEQ ID NO: 2187132 - RNA, 16 nt, Human
accgcgacuaauuuca

SEQ ID NO: 2187133 - RNA, 16 nt, Human
ucaggaacagaaggau

SEQ ID NO: 2187134 - RNA, 14 nt, Human
ucaggaacagaagg

SEQ ID NO: 2187135 - RNA, 15 nt, Human
ucaggaagcucaggg

SEQ ID NO: 2187136 - RNA, 13 nt, Human
ucaggaagcucag

SEQ ID NO: 2187137 - RNA, 14 nt, Human
ucaggaagcucagg

SEQ ID NO: 2187138 - RNA, 13 nt, Human
ucaggaacagaag

SEQ ID NO: 2187139 - RNA, 21 nt, Human
ucaggaaauauauaugugugu

SEQ ID NO: 2187140 - RNA, 20 nt, Human
ucaggaaauauauaugugug

SEQ ID NO: 2187141 - RNA, 19 nt, Human
ucaggaaauauauaugugu

SEQ ID NO: 2187142 - RNA, 18 nt, Human
ucaggaaauauauaugug

SEQ ID NO: 2187143 - RNA, 22 nt, Human
ucaggaaaggaaucauuucuau

SEQ ID NO: 2187144 - RNA, 12 nt, Human
ucaggaagcuca

SEQ ID NO: 2187145 - RNA, 23 nt, Human
ucaggaaaucaaauaugcaaagc

SEQ ID NO: 2187146 - RNA, 22 nt, Human
ucaggaaaucaaauaugcaaag

SEQ ID NO: 2187147 - RNA, 18 nt, Human
accuauaaaguaaagcua

SEQ ID NO: 2187148 - RNA, 23 nt, Human
accucaaacuuccagucagguag

SEQ ID NO: 2187149 - RNA, 19 nt, Human
accuauaaaguaaagcuaa

SEQ ID NO: 2187150 - RNA, 18 nt, Human
accuauaaaacaggucaa

SEQ ID NO: 2187151 - RNA, 16 nt, Human
accuauaaaguaaagc

SEQ ID NO: 2187152 - RNA, 15 nt, Human
accuauaaaacaggu

SEQ ID NO: 2187153 - RNA, 22 nt, Human
accuaguggcuguccagugccc

SEQ ID NO: 2187154 - RNA, 19 nt, Human
accucaaaaugucuaagau

SEQ ID NO: 2187155 - RNA, 15 nt, Human
accuaguagucauuu

SEQ ID NO: 2187156 - RNA, 13 nt, Human
accuagucuaagg

SEQ ID NO: 2187157 - RNA, 16 nt, Human
accuaccucagguugc

SEQ ID NO: 2187158 - RNA, 14 nt, Human
accuaguuuuccau

SEQ ID NO: 2187159 - RNA, 23 nt, Human
accuaguggcuguccagugccca

SEQ ID NO: 2187160 - RNA, 16 nt, Human
accuaguggcugucca

SEQ ID NO: 2187161 - RNA, 17 nt, Human
accuaguggcuguccag

SEQ ID NO: 2187162 - RNA, 19 nt, Human
accuaguggcuguccagug

SEQ ID NO: 2187163 - RNA, 21 nt, Human
accuaguggcuguccagugcc

SEQ ID NO: 2187164 - RNA, 19 nt, Human
accuaccacagugucugua

SEQ ID NO: 2187165 - RNA, 12 nt, Human
accuaccacaug

SEQ ID NO: 2187166 - RNA, 17 nt, Human
accuaccacagugucug

SEQ ID NO: 2187167 - RNA, 16 nt, Human
accuaccacagugucu

SEQ ID NO: 2187168 - RNA, 16 nt, Human
accuaccaccacgccc

SEQ ID NO: 2187169 - RNA, 20 nt, Human
accuaccaccacgcccggcu

SEQ ID NO: 2187170 - RNA, 15 nt, Human
accuaccacaugcca

SEQ ID NO: 2187171 - RNA, 18 nt, Human
accuaccaccccuuccug

SEQ ID NO: 2187172 - RNA, 19 nt, Human
accuaccaccccuuccugu

SEQ ID NO: 2187173 - RNA, 21 nt, Human
accuaccaccccuuccugucc

SEQ ID NO: 2187174 - RNA, 14 nt, Human
accuaccaucaggg

SEQ ID NO: 2187175 - RNA, 12 nt, Human
accuaccucagg

SEQ ID NO: 2187176 - RNA, 13 nt, Human
accuaccucaggu

SEQ ID NO: 2187177 - RNA, 14 nt, Human
accuaccucagguu

SEQ ID NO: 2187178 - RNA, 15 nt, Human
accuaccucagguug

SEQ ID NO: 2187179 - RNA, 21 nt, Human
accuagggugauauuaaccag

SEQ ID NO: 2187180 - RNA, 15 nt, Human
accuacaguguacag

SEQ ID NO: 2187181 - RNA, 19 nt, Human
accuaauuagagcagauga

SEQ ID NO: 2187182 - RNA, 22 nt, Human
accuacaccauuaucuuggaaa

SEQ ID NO: 2187183 - RNA, 15 nt, Human
accuaauuagagcag

SEQ ID NO: 2187184 - RNA, 16 nt, Human
accuaauuagagcaga

SEQ ID NO: 2187185 - RNA, 20 nt, Human
accuaauguuuaugagccag

SEQ ID NO: 2187186 - RNA, 19 nt, Human
accuaauguuuaugagcca

SEQ ID NO: 2187187 - RNA, 12 nt, Human
accuaauguuua

SEQ ID NO: 2187188 - RNA, 20 nt, Human
accuaaugcuccuuguuccu

SEQ ID NO: 2187189 - RNA, 21 nt, Human
accuaauccaggcagauccag

SEQ ID NO: 2187190 - RNA, 22 nt, Human
accuaauccaggcagauccagg

SEQ ID NO: 2187191 - RNA, 16 nt, Human
accuacaguguacagu

SEQ ID NO: 2187192 - RNA, 17 nt, Human
accuacaguguacaguc

SEQ ID NO: 2187193 - RNA, 18 nt, Human
accuacaguguacagucu

SEQ ID NO: 2187194 - RNA, 20 nt, Human
accuacaguguacagucuug

SEQ ID NO: 2187195 - RNA, 15 nt, Human
accuaccacaguguc

SEQ ID NO: 2187196 - RNA, 14 nt, Human
accuaccaaaaaau

SEQ ID NO: 2187197 - RNA, 15 nt, Human
accuacauguauuug

SEQ ID NO: 2187198 - RNA, 14 nt, Human
accuacauguauuu

SEQ ID NO: 2187199 - RNA, 13 nt, Human
accuacauguauu

SEQ ID NO: 2187200 - RNA, 16 nt, Human
accuuauuuuuuccca

SEQ ID NO: 2187201 - RNA, 20 nt, Human
accuuauuguaccucucuua

SEQ ID NO: 2187202 - RNA, 22 nt, Human
accuuauuguaccucucuuaua

SEQ ID NO: 2187203 - RNA, 18 nt, Human
accuuauuuuuucccaaa

SEQ ID NO: 2187204 - RNA, 19 nt, Human
accuucaaacuagggccaa

SEQ ID NO: 2187205 - RNA, 12 nt, Human
accuucaauaaa

SEQ ID NO: 2187206 - RNA, 23 nt, Human
accuuaucugugcgugaaacaca

SEQ ID NO: 2187207 - RNA, 14 nt, Human
accuuauuguaccu

SEQ ID NO: 2187208 - RNA, 17 nt, Human
accuuauuguaccucuc

SEQ ID NO: 2187209 - RNA, 18 nt, Human
accuuauuguaccucucu

SEQ ID NO: 2187210 - RNA, 22 nt, Human
accuuagauguucuaagucuuu

SEQ ID NO: 2187211 - RNA, 22 nt, Human
accuuaucugugcgugaaacac

SEQ ID NO: 2187212 - RNA, 16 nt, Human
accuucaauuccuggg

SEQ ID NO: 2187213 - RNA, 20 nt, Human
accuucaauaaaguaucuac

SEQ ID NO: 2187214 - RNA, 19 nt, Human
accuucaauaaaguaucua

SEQ ID NO: 2187215 - RNA, 17 nt, Human
accuucaauaaaguauc

SEQ ID NO: 2187216 - RNA, 15 nt, Human
accuucaauaaagua

SEQ ID NO: 2187217 - RNA, 14 nt, Human
accuucaauaaagu

SEQ ID NO: 2187218 - RNA, 13 nt, Human
accuucaauaaag

SEQ ID NO: 2187219 - RNA, 14 nt, Human
accuuuugagugcc

SEQ ID NO: 2187220 - RNA, 17 nt, Human
accuuuugagugccuua

SEQ ID NO: 2187221 - RNA, 20 nt, Human
accuuuugagugccuuacac

SEQ ID NO: 2187222 - RNA, 18 nt, Human
uccacgacugucuccaug

SEQ ID NO: 2187223 - RNA, 17 nt, Human
uccacgacugucuccau

SEQ ID NO: 2187224 - RNA, 18 nt, Human
uccacuccuccuagccac

SEQ ID NO: 2187225 - RNA, 15 nt, Human
uccacuccuccuagc

SEQ ID NO: 2187226 - RNA, 15 nt, Human
uccacucaguugcaa

SEQ ID NO: 2187227 - RNA, 12 nt, Human
uccacucccacu

SEQ ID NO: 2187228 - RNA, 19 nt, Human
uccacgacugucuccaugg

SEQ ID NO: 2187229 - RNA, 13 nt, Human
uccacucccacuu

SEQ ID NO: 2187230 - RNA, 14 nt, Human
uccacucccaggca

SEQ ID NO: 2187231 - RNA, 19 nt, Human
uccacucccaggcagcccu

SEQ ID NO: 2187232 - RNA, 13 nt, Human
uccacucccagug

SEQ ID NO: 2187233 - RNA, 23 nt, Human
accuucaauaaaguaucuacaug

SEQ ID NO: 2187234 - RNA, 21 nt, Human
accuuuugcaccugcucucuu

SEQ ID NO: 2187235 - RNA, 19 nt, Human
accuuuugggaauguuuua

SEQ ID NO: 2187236 - RNA, 16 nt, Human
accuuuugggaauguu

SEQ ID NO: 2187237 - RNA, 22 nt, Human
accuuuugggaauguuuuaaau

SEQ ID NO: 2187238 - RNA, 16 nt, Human
uccaccuucccaugcc

SEQ ID NO: 2187239 - RNA, 18 nt, Human
uccaccuucccaugcccu

SEQ ID NO: 2187240 - RNA, 19 nt, Human
uccaccuucccaugcccug

SEQ ID NO: 2187241 - RNA, 16 nt, Human
uccacgacugucucca

SEQ ID NO: 2187242 - RNA, 15 nt, Human
uccacgacugucucc

SEQ ID NO: 2187243 - RNA, 14 nt, Human
uccacgacugucuc

SEQ ID NO: 2187244 - RNA, 14 nt, Human
uccagagacuggga

SEQ ID NO: 2187245 - RNA, 19 nt, Human
uccagagagagaagugccc

SEQ ID NO: 2187246 - RNA, 20 nt, Human
uccagacuuccuugagacac

SEQ ID NO: 2187247 - RNA, 19 nt, Human
uccagacuuccuugagaca

SEQ ID NO: 2187248 - RNA, 14 nt, Human
uccagacuuccuug

SEQ ID NO: 2187249 - RNA, 23 nt, Human
uccagacugcuuccaauuuucug

SEQ ID NO: 2187250 - RNA, 22 nt, Human
uccagaccugauccuggaggcc

SEQ ID NO: 2187251 - RNA, 19 nt, Human
uccagaccugauccuggag

SEQ ID NO: 2187252 - RNA, 18 nt, Human
uccagaccugauccugga

SEQ ID NO: 2187253 - RNA, 13 nt, Human
uccagaccugauc

SEQ ID NO: 2187254 - RNA, 22 nt, Human
uccagacugcuuccaauuuucu

SEQ ID NO: 2187255 - RNA, 14 nt, Human
uccagacucucugu

SEQ ID NO: 2187256 - RNA, 15 nt, Human
uccagacucucugug

SEQ ID NO: 2187257 - RNA, 21 nt, Human
uccagaccuuguucacacucu

SEQ ID NO: 2187258 - RNA, 18 nt, Human
uccagacguaggggaggg

SEQ ID NO: 2187259 - RNA, 24 nt, Human
uccagacaaaccagaagcaacaga

SEQ ID NO: 2187260 - RNA, 19 nt, Human
uccagacaaaccagaagca

SEQ ID NO: 2187261 - RNA, 11 nt, Human
uccagaccuga

SEQ ID NO: 2187262 - RNA, 16 nt, Human
uccagaccugaagaau

SEQ ID NO: 2187263 - RNA, 15 nt, Human
uccagaccugaagaa

SEQ ID NO: 2187264 - RNA, 19 nt, Human
uccagacccggcugcgugg

SEQ ID NO: 2187265 - RNA, 15 nt, Human
uccagacccggcugc

SEQ ID NO: 2187266 - RNA, 18 nt, Human
uccagacccggcugcgug

SEQ ID NO: 2187267 - RNA, 17 nt, Human
uccacuggacuugagcu

SEQ ID NO: 2187268 - RNA, 22 nt, Human
uccacuggccggagucagugcc

SEQ ID NO: 2187269 - RNA, 18 nt, Human
uccacuggggauugggcc

SEQ ID NO: 2187270 - RNA, 14 nt, Human
uccagacccggcug

SEQ ID NO: 2187271 - RNA, 13 nt, Human
uccagacacaugu

SEQ ID NO: 2187272 - RNA, 20 nt, Human
uccagaauuucccaaagcag

SEQ ID NO: 2187273 - RNA, 22 nt, Human
uccagaauuucccaaagcagug

SEQ ID NO: 2187274 - RNA, 21 nt, Human
uccacuccuccuagccaccca

SEQ ID NO: 2187275 - RNA, 15 nt, Human
uccacugagggcagu

SEQ ID NO: 2187276 - RNA, 13 nt, Human
uccacugccuucg

SEQ ID NO: 2187277 - RNA, 15 nt, Human
uccacugccuucgau

SEQ ID NO: 2187278 - RNA, 22 nt, Human
uccacugccuucgauacaccgg

SEQ ID NO: 2187279 - RNA, 16 nt, Human
uccacuggacuugagc

SEQ ID NO: 2187280 - RNA, 12 nt, Human
uccacuggacuu

SEQ ID NO: 2187281 - RNA, 10 nt, Human
uccacuggac

SEQ ID NO: 2187282 - RNA, 15 nt, Human
uccacucccagugcu

SEQ ID NO: 2187283 - RNA, 12 nt, Human
uccacugccugg

SEQ ID NO: 2187284 - RNA, 16 nt, Human
uccagaauuucccaaa

SEQ ID NO: 2187285 - RNA, 21 nt, Human
uccaggccccaaaaccacagc

SEQ ID NO: 2187286 - RNA, 17 nt, Human
uccaggccauggaggca

SEQ ID NO: 2187287 - RNA, 18 nt, Human
uccaggccagggggccag

SEQ ID NO: 2187288 - RNA, 14 nt, Human
uccaggcuguaucc

SEQ ID NO: 2187289 - RNA, 23 nt, Human
uccaggcacccuucuuuccucuu

SEQ ID NO: 2187290 - RNA, 16 nt, Human
uccaggccagggggcc

SEQ ID NO: 2187291 - RNA, 22 nt, Human
uccaggcagucgggggcuggcc

SEQ ID NO: 2187292 - RNA, 14 nt, Human
uccaggcaggcuaa

SEQ ID NO: 2187293 - RNA, 23 nt, Human
uccaggcagucgggggcuggccu

SEQ ID NO: 2187294 - RNA, 21 nt, Human
uccaggcagauccaggacuau

SEQ ID NO: 2187295 - RNA, 20 nt, Human
uccaggcagauccaggacua

SEQ ID NO: 2187296 - RNA, 19 nt, Human
uccaggcagauccaggacu

SEQ ID NO: 2187297 - RNA, 18 nt, Human
uccaggcagauccaggac

SEQ ID NO: 2187298 - RNA, 17 nt, Human
uccaggcagauccagga

SEQ ID NO: 2187299 - RNA, 16 nt, Human
uccaggcagauccagg

SEQ ID NO: 2187300 - RNA, 15 nt, Human
uccaggcagauccag

SEQ ID NO: 2187301 - RNA, 14 nt, Human
uccaggcagaucca

SEQ ID NO: 2187302 - RNA, 16 nt, Human
uccagagaguggcucc

SEQ ID NO: 2187303 - RNA, 17 nt, Human
uccagagaguggcuccu

SEQ ID NO: 2187304 - RNA, 23 nt, Human
uccagagagagaagugccccugc

SEQ ID NO: 2187305 - RNA, 15 nt, Human
uccagagaguccucu

SEQ ID NO: 2187306 - RNA, 21 nt, Human
uccagagagagaagugccccu

SEQ ID NO: 2187307 - RNA, 15 nt, Human
uccagagaguggcuc

SEQ ID NO: 2187308 - RNA, 12 nt, Human
uccagccccugg

SEQ ID NO: 2187309 - RNA, 14 nt, Human
uccagccccucugg

SEQ ID NO: 2187310 - RNA, 18 nt, Human
uccagagaguccucugga

SEQ ID NO: 2187311 - RNA, 19 nt, Human
uccagagaguccucuggau

SEQ ID NO: 2187312 - RNA, 15 nt, Human
uccagccccucuggu

SEQ ID NO: 2187313 - RNA, 16 nt, Human
uccagccccucugguc

SEQ ID NO: 2187314 - RNA, 18 nt, Human
uccagccccucuggucgc

SEQ ID NO: 2187315 - RNA, 23 nt, Human
uccagccccucuggucgcuccug

SEQ ID NO: 2187316 - RNA, 13 nt, Human
uccagccccugga

SEQ ID NO: 2187317 - RNA, 13 nt, Human
uccaggcagaucc

SEQ ID NO: 2187318 - RNA, 16 nt, Human
uccaggcacugagaua

SEQ ID NO: 2187319 - RNA, 14 nt, Human
uccaggcacugaga

SEQ ID NO: 2187320 - RNA, 20 nt, Human
uccaggcacccuucuuuccu

SEQ ID NO: 2187321 - RNA, 21 nt, Human
uccaggcacccuucuuuccuc

SEQ ID NO: 2187322 - RNA, 15 nt, Human
uccaggcacccuucu

SEQ ID NO: 2187323 - RNA, 16 nt, Human
uccaggcacccuucuu

SEQ ID NO: 2187324 - RNA, 19 nt, Human
uccaggcacccuucuuucc

SEQ ID NO: 2187325 - RNA, 19 nt, Human
acgagaucaagagaucaag

SEQ ID NO: 2187326 - RNA, 21 nt, Human
acgagaggggaagaguguacu

SEQ ID NO: 2187327 - RNA, 18 nt, Human
acgagagguaugccugua

SEQ ID NO: 2187328 - RNA, 20 nt, Human
acgagaggggaagaguguac

SEQ ID NO: 2187329 - RNA, 18 nt, Human
uccagggaagcuggccga

SEQ ID NO: 2187330 - RNA, 15 nt, Human
acgagaaagaucauu

SEQ ID NO: 2187331 - RNA, 17 nt, Human
uccagggaagcuggccg

SEQ ID NO: 2187332 - RNA, 20 nt, Human
acgagacccuacaggagagg

SEQ ID NO: 2187333 - RNA, 19 nt, Human
acgagacccuacaggagag

SEQ ID NO: 2187334 - RNA, 20 nt, Human
acgagcaggcuacugucagc

SEQ ID NO: 2187335 - RNA, 19 nt, Human
acgagcaggcuacugucag

SEQ ID NO: 2187336 - RNA, 12 nt, Human
acgaggaagccc

SEQ ID NO: 2187337 - RNA, 11 nt, Human
acgaggcccuc

SEQ ID NO: 2187338 - RNA, 19 nt, Human
acgagcuguuuacuaggga

SEQ ID NO: 2187339 - RNA, 16 nt, Human
acgagcaggcuucuuc

SEQ ID NO: 2187340 - RNA, 19 nt, Human
acgccagauucuuuccuga

SEQ ID NO: 2187341 - RNA, 17 nt, Human
acgccagauucuuuccu

SEQ ID NO: 2187342 - RNA, 13 nt, Human
acgaggcccucgg

SEQ ID NO: 2187343 - RNA, 16 nt, Human
acgaggcccucgggcc

SEQ ID NO: 2187344 - RNA, 18 nt, Human
acgaggcccucgggccca

SEQ ID NO: 2187345 - RNA, 19 nt, Human
acgaggcccucgggcccag

SEQ ID NO: 2187346 - RNA, 21 nt, Human
uccaggcuguaucccaugagc

SEQ ID NO: 2187347 - RNA, 20 nt, Human
uccaggcugucuuucacuga

SEQ ID NO: 2187348 - RNA, 17 nt, Human
uccaggcuuggauguaa

SEQ ID NO: 2187349 - RNA, 12 nt, Human
uccagggaagcu

SEQ ID NO: 2187350 - RNA, 20 nt, Human
accuuuuuuauacauaaaca

SEQ ID NO: 2187351 - RNA, 19 nt, Human
accuuuuuuauacauaaac

SEQ ID NO: 2187352 - RNA, 16 nt, Human
uccagggaagcuggcc

SEQ ID NO: 2187353 - RNA, 14 nt, Human
uccagggaagcugg

SEQ ID NO: 2187354 - RNA, 22 nt, Human
accuuuuuuauacauaaacaag

SEQ ID NO: 2187355 - RNA, 21 nt, Human
accuuuuuuauacauaaacaa

SEQ ID NO: 2187356 - RNA, 14 nt, Human
acgagaaaacaaua

SEQ ID NO: 2187357 - RNA, 20 nt, Human
accuguuuuuaagcuguuuc

SEQ ID NO: 2187358 - RNA, 16 nt, Human
accuguuuuuaagcug

SEQ ID NO: 2187359 - RNA, 18 nt, Human
accuguuuucgcaccuac

SEQ ID NO: 2187360 - RNA, 18 nt, Human
accuguuuuuaagcuguu

SEQ ID NO: 2187361 - RNA, 19 nt, Human
accuguuuuuaagcuguuu

SEQ ID NO: 2187362 - RNA, 21 nt, Human
accuggucacaggacucugcc

SEQ ID NO: 2187363 - RNA, 19 nt, Human
accuguuucugcagccacu

SEQ ID NO: 2187364 - RNA, 18 nt, Human
accuuagacagucccugc

SEQ ID NO: 2187365 - RNA, 19 nt, Human
accuuagacagucccugcc

SEQ ID NO: 2187366 - RNA, 20 nt, Human
accuuagacagucccugcca

SEQ ID NO: 2187367 - RNA, 22 nt, Human
accuggguucccuuuccuucca

SEQ ID NO: 2187368 - RNA, 17 nt, Human
accuggguucccuuucc

SEQ ID NO: 2187369 - RNA, 15 nt, Human
accuggguccuuuuc

SEQ ID NO: 2187370 - RNA, 16 nt, Human
accugguacccuccug

SEQ ID NO: 2187371 - RNA, 18 nt, Human
accugguacccuccuggc

SEQ ID NO: 2187372 - RNA, 19 nt, Human
accugguacccuccuggcu

SEQ ID NO: 2187373 - RNA, 23 nt, Human
accuggguccaaauaaaaacuaa

SEQ ID NO: 2187374 - RNA, 20 nt, Human
accuggguccaaauaaaaac

SEQ ID NO: 2187375 - RNA, 21 nt, Human
accuggguccaaauaaaaacu

SEQ ID NO: 2187376 - RNA, 15 nt, Human
accuggguccaaaua

SEQ ID NO: 2187377 - RNA, 16 nt, Human
accuggguccaaauaa

SEQ ID NO: 2187378 - RNA, 17 nt, Human
accuggguccaaauaaa

SEQ ID NO: 2187379 - RNA, 18 nt, Human
accuggguccaaauaaaa

SEQ ID NO: 2187380 - RNA, 19 nt, Human
accuggcugagccuggcug

SEQ ID NO: 2187381 - RNA, 13 nt, Human
accuggcugaggu

SEQ ID NO: 2187382 - RNA, 19 nt, Human
accuggcugagguuccucu

SEQ ID NO: 2187383 - RNA, 21 nt, Human
accuggcugagguuccucugc

SEQ ID NO: 2187384 - RNA, 23 nt, Human
accuggcugagguuccucugccu

SEQ ID NO: 2187385 - RNA, 22 nt, Human
accuggcugagguuccucugcc

SEQ ID NO: 2187386 - RNA, 14 nt, Human
accuggguccaaau

SEQ ID NO: 2187387 - RNA, 23 nt, Human
accuggccucugcacuccccugc

SEQ ID NO: 2187388 - RNA, 18 nt, Human
accuggccucugcacucc

SEQ ID NO: 2187389 - RNA, 20 nt, Human
accuggccucugcacucccc

SEQ ID NO: 2187390 - RNA, 17 nt, Human
uccacccagcccauucu

SEQ ID NO: 2187391 - RNA, 15 nt, Human
uccacccagcccauu

SEQ ID NO: 2187392 - RNA, 14 nt, Human
uccacccagcccau

SEQ ID NO: 2187393 - RNA, 13 nt, Human
uccacccagccca

SEQ ID NO: 2187394 - RNA, 18 nt, Human
accuggagccccugggug

SEQ ID NO: 2187395 - RNA, 13 nt, Human
accuggagggcua

SEQ ID NO: 2187396 - RNA, 21 nt, Human
accuggagggcuagaaccuag

SEQ ID NO: 2187397 - RNA, 20 nt, Human
accuggagggcuagaaccug

SEQ ID NO: 2187398 - RNA, 22 nt, Human
accuggagggcuagaaccugga

SEQ ID NO: 2187399 - RNA, 23 nt, Human
accuggagggcuagaaccuggag

SEQ ID NO: 2187400 - RNA, 22 nt, Human
accuggagggcuagaaccuggc

SEQ ID NO: 2187401 - RNA, 15 nt, Human
accuggagggcugga

SEQ ID NO: 2187402 - RNA, 14 nt, Human
accuggaggggcua

SEQ ID NO: 2187403 - RNA, 19 nt, Human
accuggaguuccugaaccu

SEQ ID NO: 2187404 - RNA, 22 nt, Human
accuggaggggcuagaaccuag

SEQ ID NO: 2187405 - RNA, 16 nt, Human
accuggaguuccugaa

SEQ ID NO: 2187406 - RNA, 14 nt, Human
accuggcagcucug

SEQ ID NO: 2187407 - RNA, 15 nt, Human
accuggcacugcugu

SEQ ID NO: 2187408 - RNA, 17 nt, Human
accuggcacugcugugc

SEQ ID NO: 2187409 - RNA, 20 nt, Human
accuggcaagcuagaaccug

SEQ ID NO: 2187410 - RNA, 22 nt, Human
accuggcaagcuagaaccugga

SEQ ID NO: 2187411 - RNA, 23 nt, Human
accuggcaagcuagaaccuggag

SEQ ID NO: 2187412 - RNA, 14 nt, Human
accuggcacugcug

SEQ ID NO: 2187413 - RNA, 14 nt, Human
accuggccucugca

SEQ ID NO: 2187414 - RNA, 17 nt, Human
accuggcagcucuggac

SEQ ID NO: 2187415 - RNA, 21 nt, Human
accuggcaucgcaccauucug

SEQ ID NO: 2187416 - RNA, 18 nt, Human
accuggcacugcugugcu

SEQ ID NO: 2187417 - RNA, 13 nt, Human
accuggccaccug

SEQ ID NO: 2187418 - RNA, 16 nt, Human
accuggccaccugagg

SEQ ID NO: 2187419 - RNA, 18 nt, Human
accuggccaccugaggug

SEQ ID NO: 2187420 - RNA, 16 nt, Human
accuggccucugcacu

SEQ ID NO: 2187421 - RNA, 17 nt, Human
accuggccucugcacuc

SEQ ID NO: 2187422 - RNA, 15 nt, Human
uccaaucucauggag

SEQ ID NO: 2187423 - RNA, 17 nt, Human
uccacccaccucagccu

SEQ ID NO: 2187424 - RNA, 18 nt, Human
uccacccaccucagccuc

SEQ ID NO: 2187425 - RNA, 19 nt, Human
uccacccaccucagccucc

SEQ ID NO: 2187426 - RNA, 12 nt, Human
uccacccagccc

SEQ ID NO: 2187427 - RNA, 12 nt, Human
uccacccagcaa

SEQ ID NO: 2187428 - RNA, 17 nt, Human
uccacccaccuuggccu

SEQ ID NO: 2187429 - RNA, 12 nt, Human
uccacccaggag

SEQ ID NO: 2187430 - RNA, 14 nt, Human
uccacccaggagcc

SEQ ID NO: 2187431 - RNA, 15 nt, Human
uccacccaggagccc

SEQ ID NO: 2187432 - RNA, 13 nt, Human
accugccacucac

SEQ ID NO: 2187433 - RNA, 14 nt, Human
accugccacucaca

SEQ ID NO: 2187434 - RNA, 16 nt, Human
accugccacucacaca

SEQ ID NO: 2187435 - RNA, 17 nt, Human
accugccacucacacag

SEQ ID NO: 2187436 - RNA, 15 nt, Human
accugccagccuggc

SEQ ID NO: 2187437 - RNA, 14 nt, Human
accugccagccugg

SEQ ID NO: 2187438 - RNA, 19 nt, Human
accugccacucacacagcc

SEQ ID NO: 2187439 - RNA, 20 nt, Human
accugccacucacacagcca

SEQ ID NO: 2187440 - RNA, 21 nt, Human
accugccacucacacagccag

SEQ ID NO: 2187441 - RNA, 22 nt, Human
accugccacucacacagccagg

SEQ ID NO: 2187442 - RNA, 12 nt, Human
accugccaggaa

SEQ ID NO: 2187443 - RNA, 14 nt, Human
accugccaggaagc

SEQ ID NO: 2187444 - RNA, 22 nt, Human
uccaacccaugaugagcuccuc

SEQ ID NO: 2187445 - RNA, 17 nt, Human
uccaacccauuagccau

SEQ ID NO: 2187446 - RNA, 14 nt, Human
uccaaccccaacuc

SEQ ID NO: 2187447 - RNA, 15 nt, Human
uccaaccccaacucc

SEQ ID NO: 2187448 - RNA, 16 nt, Human
uccaaccccaacucca

SEQ ID NO: 2187449 - RNA, 18 nt, Human
uccaaccccaacuccagu

SEQ ID NO: 2187450 - RNA, 19 nt, Human
uccaaccccaacuccagua

SEQ ID NO: 2187451 - RNA, 17 nt, Human
uccaaccccccaccugc

SEQ ID NO: 2187452 - RNA, 14 nt, Human
uccaaccccccagc

SEQ ID NO: 2187453 - RNA, 17 nt, Human
uccaaccccccagcacu

SEQ ID NO: 2187454 - RNA, 18 nt, Human
uccaaccccccagcacug

SEQ ID NO: 2187455 - RNA, 15 nt, Human
uccaacccaugauga

SEQ ID NO: 2187456 - RNA, 21 nt, Human
accugccagccuggcuucugg

SEQ ID NO: 2187457 - RNA, 18 nt, Human
accugccagccuggcuuc

SEQ ID NO: 2187458 - RNA, 16 nt, Human
accugccagccuggcu

SEQ ID NO: 2187459 - RNA, 15 nt, Human
accugccaggaagcc

SEQ ID NO: 2187460 - RNA, 16 nt, Human
uccaacccgaggcccg

SEQ ID NO: 2187461 - RNA, 23 nt, Human
uccaaccccccagcacugaggaa

SEQ ID NO: 2187462 - RNA, 19 nt, Human
uccaaccccccagcacuga

SEQ ID NO: 2187463 - RNA, 20 nt, Human
uccaaccccccagcacugag

SEQ ID NO: 2187464 - RNA, 21 nt, Human
uccaaccccccagcacugagg

SEQ ID NO: 2187465 - RNA, 22 nt, Human
uccaaccccccagcacugagga

SEQ ID NO: 2187466 - RNA, 14 nt, Human
uccaacccucauca

SEQ ID NO: 2187467 - RNA, 23 nt, Human
uccaacccucaucaccaacgucu

SEQ ID NO: 2187468 - RNA, 16 nt, Human
uccaacccucaucacc

SEQ ID NO: 2187469 - RNA, 17 nt, Human
uccaacccucaucacca

SEQ ID NO: 2187470 - RNA, 17 nt, Human
uccaagucucaguggcu

SEQ ID NO: 2187471 - RNA, 15 nt, Human
uccaagguggucugc

SEQ ID NO: 2187472 - RNA, 20 nt, Human
uccaaggaaaccacagcugc

SEQ ID NO: 2187473 - RNA, 21 nt, Human
uccaaggaaaccacagcugcu

SEQ ID NO: 2187474 - RNA, 23 nt, Human
uccaagguggucugcucgggccc

SEQ ID NO: 2187475 - RNA, 21 nt, Human
uccaagcuggucccacucagu

SEQ ID NO: 2187476 - RNA, 18 nt, Human
uccaaggguacuaaggaa

SEQ ID NO: 2187477 - RNA, 12 nt, Human
uccaagcuuuug

SEQ ID NO: 2187478 - RNA, 19 nt, Human
uccaaggaaaccacagcug

SEQ ID NO: 2187479 - RNA, 18 nt, Human
uccaaucccaccaacccu

SEQ ID NO: 2187480 - RNA, 21 nt, Human
uccaagugaacacuagccaga

SEQ ID NO: 2187481 - RNA, 15 nt, Human
uccaagugccaauau

SEQ ID NO: 2187482 - RNA, 17 nt, Human
uccaagugccagaggug

SEQ ID NO: 2187483 - RNA, 18 nt, Human
uccaagugccagaggugg

SEQ ID NO: 2187484 - RNA, 17 nt, Human
uccaagugaacacuagc

SEQ ID NO: 2187485 - RNA, 20 nt, Human
uccaagugaacacuagccag

SEQ ID NO: 2187486 - RNA, 18 nt, Human
uccaauccugcccccuga

SEQ ID NO: 2187487 - RNA, 19 nt, Human
uccaaucuaaccacaucaa

SEQ ID NO: 2187488 - RNA, 18 nt, Human
uccaauccucacugggug

SEQ ID NO: 2187489 - RNA, 13 nt, Human
uccaauccugccc

SEQ ID NO: 2187490 - RNA, 14 nt, Human
uccaauccugcccc

SEQ ID NO: 2187491 - RNA, 16 nt, Human
uccaauccugcccccu

SEQ ID NO: 2187492 - RNA, 17 nt, Human
uccaauccucacugggu

SEQ ID NO: 2187493 - RNA, 16 nt, Human
uccaauccucacuggg

SEQ ID NO: 2187494 - RNA, 15 nt, Human
uccaauccucacugg

SEQ ID NO: 2187495 - RNA, 14 nt, Human
uccaauccucacug

SEQ ID NO: 2187496 - RNA, 22 nt, Human
uccaaucccauagaugggucug

SEQ ID NO: 2187497 - RNA, 16 nt, Human
uccaauccuauguuuu

SEQ ID NO: 2187498 - RNA, 17 nt, Human
uccaaccuggacaacaa

SEQ ID NO: 2187499 - RNA, 14 nt, Human
uccaaccuggacaa

SEQ ID NO: 2187500 - RNA, 21 nt, Human
uccaaccugcaaagaucuguc

SEQ ID NO: 2187501 - RNA, 13 nt, Human
uccaaccuuccca

SEQ ID NO: 2187502 - RNA, 23 nt, Human
uccaaccuaaccccuuuccugcg

SEQ ID NO: 2187503 - RNA, 21 nt, Human
uccaaccuaaccccuuuccug

SEQ ID NO: 2187504 - RNA, 20 nt, Human
uccaaccuaaccccuuuccu

SEQ ID NO: 2187505 - RNA, 18 nt, Human
uccaaccuaaccccuuuc

SEQ ID NO: 2187506 - RNA, 13 nt, Human
uccaacuccagga

SEQ ID NO: 2187507 - RNA, 21 nt, Human
uccaaccuggggggcaguggu

SEQ ID NO: 2187508 - RNA, 21 nt, Human
uccaacuggauuauaaauaaa

SEQ ID NO: 2187509 - RNA, 15 nt, Human
uccaacuucauuuga

SEQ ID NO: 2187510 - RNA, 18 nt, Human
uccaacuguguucauuag

SEQ ID NO: 2187511 - RNA, 20 nt, Human
uccaacuguauauauuccca

SEQ ID NO: 2187512 - RNA, 19 nt, Human
uccaacuguguucauuaga

SEQ ID NO: 2187513 - RNA, 12 nt, Human
uccaagaagccc

SEQ ID NO: 2187514 - RNA, 16 nt, Human
uccaagcuggucccac

SEQ ID NO: 2187515 - RNA, 20 nt, Human
uccaagcuggucccacucag

SEQ ID NO: 2187516 - RNA, 15 nt, Human
uaugaagaagagagu

SEQ ID NO: 2187517 - RNA, 17 nt, Human
uaugaagaacugaggag

SEQ ID NO: 2187518 - RNA, 16 nt, Human
uaugaagaacugagga

SEQ ID NO: 2187519 - RNA, 13 nt, Human
uauuucauuucuu

SEQ ID NO: 2187520 - RNA, 21 nt, Human
uaugaagcuaccucaaacuuc

SEQ ID NO: 2187521 - RNA, 14 nt, Human
uaugaagacauaaa

SEQ ID NO: 2187522 - RNA, 19 nt, Human
uaugaagauaaguguauuu

SEQ ID NO: 2187523 - RNA, 17 nt, Human
uaugaagcucaccuguu

SEQ ID NO: 2187524 - RNA, 18 nt, Human
uauuuccauucaacaaga

SEQ ID NO: 2187525 - RNA, 16 nt, Human
uaugaagaaaaaauac

SEQ ID NO: 2187526 - RNA, 15 nt, Human
uaugaagaaaaaaua

SEQ ID NO: 2187527 - RNA, 13 nt, Human
uaugaagaaaaaa

SEQ ID NO: 2187528 - RNA, 20 nt, Human
uaugaagaaaaaauacauuu

SEQ ID NO: 2187529 - RNA, 14 nt, Human
uaugaagaacugag

SEQ ID NO: 2187530 - RNA, 21 nt, Human
uaugaaauauuauguuaaaac

SEQ ID NO: 2187531 - RNA, 14 nt, Human
uaugaaauaaagaa

SEQ ID NO: 2187532 - RNA, 19 nt, Human
uaugaaauaaagaaauugc

SEQ ID NO: 2187533 - RNA, 22 nt, Human
uauuucccucaccuuucccauc

SEQ ID NO: 2187534 - RNA, 22 nt, Human
uauuucccugaaggaaccaaag

SEQ ID NO: 2187535 - RNA, 15 nt, Human
uauuucccuccccug

SEQ ID NO: 2187536 - RNA, 20 nt, Human
uauuucccuccccuggggac

SEQ ID NO: 2187537 - RNA, 21 nt, Human
uauuuccccaggggaaaauga

SEQ ID NO: 2187538 - RNA, 22 nt, Human
uauuuccccaggggaaaaugaa

SEQ ID NO: 2187539 - RNA, 21 nt, Human
uauuuccauuccagaauaucu

SEQ ID NO: 2187540 - RNA, 21 nt, Human
uauuuccccaacauguaauaa

SEQ ID NO: 2187541 - RNA, 23 nt, Human
uauuuccuauauuguuuucagug

SEQ ID NO: 2187542 - RNA, 18 nt, Human
uauuucccucucauuuug

SEQ ID NO: 2187543 - RNA, 19 nt, Human
uauuuccuuaaacugugug

SEQ ID NO: 2187544 - RNA, 15 nt, Human
uauuuccuuaaacug

SEQ ID NO: 2187545 - RNA, 19 nt, Human
uauuuccucaugugaucac

SEQ ID NO: 2187546 - RNA, 15 nt, Human
uauuucgaaagcugc

SEQ ID NO: 2187547 - RNA, 16 nt, Human
uauuucuaggaagaau

SEQ ID NO: 2187548 - RNA, 17 nt, Human
uauuucuaggaagaauu

SEQ ID NO: 2187549 - RNA, 19 nt, Human
uauuucuaggaagaauuuu

SEQ ID NO: 2187550 - RNA, 19 nt, Human
acaguuucuuuuuucuuac

SEQ ID NO: 2187551 - RNA, 22 nt, Human
acaguuucuuagcuuuuuaauu

SEQ ID NO: 2187552 - RNA, 15 nt, Human
acaguuugaacaaaa

SEQ ID NO: 2187553 - RNA, 14 nt, Human
acaguuugcucuag

SEQ ID NO: 2187554 - RNA, 12 nt, Human
acaguuugcugu

SEQ ID NO: 2187555 - RNA, 13 nt, Human
acaguuugcugua

SEQ ID NO: 2187556 - RNA, 12 nt, Human
acaguuucuuag

SEQ ID NO: 2187557 - RNA, 14 nt, Human
acaguuucuuagcu

SEQ ID NO: 2187558 - RNA, 16 nt, Human
acaguuucuuagcuuu

SEQ ID NO: 2187559 - RNA, 17 nt, Human
acaguuucuuagcuuuu

SEQ ID NO: 2187560 - RNA, 18 nt, Human
acaguuucuuagcuuuuu

SEQ ID NO: 2187561 - RNA, 20 nt, Human
acaguuucuuagcuuuuuaa

SEQ ID NO: 2187562 - RNA, 20 nt, Human
acaguuuaauaccacagcuu

SEQ ID NO: 2187563 - RNA, 15 nt, Human
acaguuguuggccuc

SEQ ID NO: 2187564 - RNA, 14 nt, Human
acaguugggugaga

SEQ ID NO: 2187565 - RNA, 22 nt, Human
acaguuguuugaugcauuaaaa

SEQ ID NO: 2187566 - RNA, 15 nt, Human
acaguuguuugaugc

SEQ ID NO: 2187567 - RNA, 13 nt, Human
acaguuguuugau

SEQ ID NO: 2187568 - RNA, 12 nt, Human
acaguuguuuga

SEQ ID NO: 2187569 - RNA, 11 nt, Human
acaguuguuug

SEQ ID NO: 2187570 - RNA, 16 nt, Human
acaguugaaaaacagc

SEQ ID NO: 2187571 - RNA, 15 nt, Human
acaguugaaaaacag

SEQ ID NO: 2187572 - RNA, 21 nt, Human
acaguucuuugggccagacau

SEQ ID NO: 2187573 - RNA, 22 nt, Human
uauuucuaggaagaauuuuaaa

SEQ ID NO: 2187574 - RNA, 22 nt, Human
acaguugcugucauaagaauga

SEQ ID NO: 2187575 - RNA, 16 nt, Human
acaguuggccuucaga

SEQ ID NO: 2187576 - RNA, 21 nt, Human
acaguugcugucauaagaaug

SEQ ID NO: 2187577 - RNA, 15 nt, Human
acaguugcugucaua

SEQ ID NO: 2187578 - RNA, 18 nt, Human
acaguuggaaauccaucc

SEQ ID NO: 2187579 - RNA, 20 nt, Human
acaguugaaaaacagcugag

SEQ ID NO: 2187580 - RNA, 22 nt, Human
acaguucuuugggccagacaug

SEQ ID NO: 2187581 - RNA, 20 nt, Human
acaguucuuugggccagaca

SEQ ID NO: 2187582 - RNA, 21 nt, Human
acauacccuggccgcccccug

SEQ ID NO: 2187583 - RNA, 13 nt, Human
acauacuaaccag

SEQ ID NO: 2187584 - RNA, 15 nt, Human
acauaccagcuuaga

SEQ ID NO: 2187585 - RNA, 14 nt, Human
acauacccuccccc

SEQ ID NO: 2187586 - RNA, 20 nt, Human
acauacccuggccgcccccu

SEQ ID NO: 2187587 - RNA, 13 nt, Human
acauacucccauc

SEQ ID NO: 2187588 - RNA, 22 nt, Human
acauacuaaccagcagaaaugc

SEQ ID NO: 2187589 - RNA, 21 nt, Human
acauacuaaccagcagaaaug

SEQ ID NO: 2187590 - RNA, 12 nt, Human
acauacugcugu

SEQ ID NO: 2187591 - RNA, 24 nt, Human
acauacuccuuccaucaaauagaa

SEQ ID NO: 2187592 - RNA, 12 nt, Human
acauacuucagc

SEQ ID NO: 2187593 - RNA, 16 nt, Human
acauacuggcugguga

SEQ ID NO: 2187594 - RNA, 15 nt, Human
acauacuugaagggc

SEQ ID NO: 2187595 - RNA, 18 nt, Human
acauacuggccuggacug

SEQ ID NO: 2187596 - RNA, 19 nt, Human
acauacuggccuggacugu

SEQ ID NO: 2187597 - RNA, 14 nt, Human
acauacucugcuua

SEQ ID NO: 2187598 - RNA, 17 nt, Human
acauacucccaucugug

SEQ ID NO: 2187599 - RNA, 23 nt, Human
acauacuugaagggccagagcca

SEQ ID NO: 2187600 - RNA, 22 nt, Human
acauacuugaagggccagagcc

SEQ ID NO: 2187601 - RNA, 21 nt, Human
acauacuugaagggccagagc

SEQ ID NO: 2187602 - RNA, 20 nt, Human
acauacuugaagggccagag

SEQ ID NO: 2187603 - RNA, 19 nt, Human
acauacuugaagggccaga

SEQ ID NO: 2187604 - RNA, 18 nt, Human
acauacuugaagggccag

SEQ ID NO: 2187605 - RNA, 17 nt, Human
acauacuugaagggcca

SEQ ID NO: 2187606 - RNA, 16 nt, Human
acauacuugaagggcc

SEQ ID NO: 2187607 - RNA, 21 nt, Human
acauagaaauugccugacgaa

SEQ ID NO: 2187608 - RNA, 16 nt, Human
acauagaaauugccug

SEQ ID NO: 2187609 - RNA, 22 nt, Human
acauacuuucauccugacucug

SEQ ID NO: 2187610 - RNA, 12 nt, Human
acauagaaaguu

SEQ ID NO: 2187611 - RNA, 23 nt, Human
acauacuuucauccugacucugc

SEQ ID NO: 2187612 - RNA, 23 nt, Human
acaguuuugucagucuuucuuag

SEQ ID NO: 2187613 - RNA, 24 nt, Human
acaguuuugguugcuuuaauauca

SEQ ID NO: 2187614 - RNA, 19 nt, Human
acaguuuugguugcuuuaa

SEQ ID NO: 2187615 - RNA, 18 nt, Human
acaguuuugguugcuuua

SEQ ID NO: 2187616 - RNA, 22 nt, Human
acaguuuuccuucucaucugug

SEQ ID NO: 2187617 - RNA, 14 nt, Human
acaguuuuccuucu

SEQ ID NO: 2187618 - RNA, 21 nt, Human
acaguuuucuggcuggagccu

SEQ ID NO: 2187619 - RNA, 15 nt, Human
acaguuuuuauugcu

SEQ ID NO: 2187620 - RNA, 21 nt, Human
acaguuuucugagaaagacua

SEQ ID NO: 2187621 - RNA, 20 nt, Human
acaguuuucugagaaagacu

SEQ ID NO: 2187622 - RNA, 19 nt, Human
acaguuuucugagaaagac

SEQ ID NO: 2187623 - RNA, 18 nt, Human
acaguuuucugagaaaga

SEQ ID NO: 2187624 - RNA, 23 nt, Human
acaguuuuccaugaaaacguuuu

SEQ ID NO: 2187625 - RNA, 21 nt, Human
acaguuuuccaugaaaacguu

SEQ ID NO: 2187626 - RNA, 19 nt, Human
acaguuuuccaugaaaacg

SEQ ID NO: 2187627 - RNA, 18 nt, Human
acaguuuuccaugaaaac

SEQ ID NO: 2187628 - RNA, 17 nt, Human
acaguuuuccaugaaaa

SEQ ID NO: 2187629 - RNA, 16 nt, Human
acaguuuuccaugaaa

SEQ ID NO: 2187630 - RNA, 15 nt, Human
acaguuuuccaugaa

SEQ ID NO: 2187631 - RNA, 14 nt, Human
acaguuuuccauga

SEQ ID NO: 2187632 - RNA, 15 nt, Human
acaguuuucugagaa

SEQ ID NO: 2187633 - RNA, 17 nt, Human
acaguuuucugagaaag

SEQ ID NO: 2187634 - RNA, 16 nt, Human
acaguuuucugagaaa

SEQ ID NO: 2187635 - RNA, 12 nt, Human
acaguuuuccau

SEQ ID NO: 2187636 - RNA, 22 nt, Human
acaguuuguuuacacacgugca

SEQ ID NO: 2187637 - RNA, 14 nt, Human
acaguuugucacau

SEQ ID NO: 2187638 - RNA, 14 nt, Human
acaguuuguuuaca

SEQ ID NO: 2187639 - RNA, 15 nt, Human
acaguuuguuuacac

SEQ ID NO: 2187640 - RNA, 16 nt, Human
acaguuuguuuacaca

SEQ ID NO: 2187641 - RNA, 20 nt, Human
acaguuuguuaguaugaggc

SEQ ID NO: 2187642 - RNA, 16 nt, Human
acaguuuguuaguaug

SEQ ID NO: 2187643 - RNA, 11 nt, Human
acaucugccuu

SEQ ID NO: 2187644 - RNA, 12 nt, Human
acaucugccuua

SEQ ID NO: 2187645 - RNA, 13 nt, Human
acaucugaaagcc

SEQ ID NO: 2187646 - RNA, 23 nt, Human
acaucucuuugaauuuucugugu

SEQ ID NO: 2187647 - RNA, 15 nt, Human
acaucuguccuguga

SEQ ID NO: 2187648 - RNA, 16 nt, Human
acaucugugucuuguu

SEQ ID NO: 2187649 - RNA, 15 nt, Human
acaucugugucuugu

SEQ ID NO: 2187650 - RNA, 20 nt, Human
acaucucuuugaugucauau

SEQ ID NO: 2187651 - RNA, 14 nt, Human
acaucucuuugaau

SEQ ID NO: 2187652 - RNA, 17 nt, Human
acaucucuuugaauuuu

SEQ ID NO: 2187653 - RNA, 15 nt, Human
acaucucugcuugag

SEQ ID NO: 2187654 - RNA, 12 nt, Human
acaucucugcuu

SEQ ID NO: 2187655 - RNA, 13 nt, Human
acaucucuuccuc

SEQ ID NO: 2187656 - RNA, 23 nt, Human
acaucucuuccuccgaggccagu

SEQ ID NO: 2187657 - RNA, 21 nt, Human
acaucuccuccauacucagga

SEQ ID NO: 2187658 - RNA, 22 nt, Human
acaucucugcacccuggggccu

SEQ ID NO: 2187659 - RNA, 13 nt, Human
acaucuugcucug

SEQ ID NO: 2187660 - RNA, 20 nt, Human
acaucuugaucugcucagcc

SEQ ID NO: 2187661 - RNA, 21 nt, Human
acaucuugaucugcucagccc

SEQ ID NO: 2187662 - RNA, 22 nt, Human
acaucuugaucugcucagcccu

SEQ ID NO: 2187663 - RNA, 23 nt, Human
acaucuugaucugcucagcccug

SEQ ID NO: 2187664 - RNA, 13 nt, Human
acaucuucaaagc

SEQ ID NO: 2187665 - RNA, 16 nt, Human
acaucuucagcaaaua

SEQ ID NO: 2187666 - RNA, 23 nt, Human
acaucuucccuagaggguuccug

SEQ ID NO: 2187667 - RNA, 14 nt, Human
acaucuugaucugc

SEQ ID NO: 2187668 - RNA, 17 nt, Human
acaucuguuuuaaauuu

SEQ ID NO: 2187669 - RNA, 16 nt, Human
acaucuguuuuaaauu

SEQ ID NO: 2187670 - RNA, 23 nt, Human
acaucugccuuaaaaccaaagag

SEQ ID NO: 2187671 - RNA, 17 nt, Human
acaucuguguuucaagu

SEQ ID NO: 2187672 - RNA, 18 nt, Human
acaucuuaguauuugcau

SEQ ID NO: 2187673 - RNA, 14 nt, Human
acaucuuaguauuu

SEQ ID NO: 2187674 - RNA, 17 nt, Human
uauuugguacuguauuu

SEQ ID NO: 2187675 - RNA, 16 nt, Human
acaugaaaacacauuu

SEQ ID NO: 2187676 - RNA, 23 nt, Human
uauuuguaaaagaacaguaaaca

SEQ ID NO: 2187677 - RNA, 21 nt, Human
uauuugguuuggccaucucug

SEQ ID NO: 2187678 - RNA, 19 nt, Human
acaugaaaacacauuuuuc

SEQ ID NO: 2187679 - RNA, 18 nt, Human
acaugaaaacacauuuuu

SEQ ID NO: 2187680 - RNA, 21 nt, Human
acaucuugcucugcugacaga

SEQ ID NO: 2187681 - RNA, 17 nt, Human
acaugaaaacacauuuu

SEQ ID NO: 2187682 - RNA, 18 nt, Human
acaucuugcucugcugac

SEQ ID NO: 2187683 - RNA, 19 nt, Human
acaucuugcucugcugaca

SEQ ID NO: 2187684 - RNA, 13 nt, Human
acaucacaggaca

SEQ ID NO: 2187685 - RNA, 13 nt, Human
acaucacacacac

SEQ ID NO: 2187686 - RNA, 16 nt, Human
acaucaccacaguuua

SEQ ID NO: 2187687 - RNA, 22 nt, Human
acaucacccuuaccaugugccu

SEQ ID NO: 2187688 - RNA, 20 nt, Human
acaucaccgacgcgucuccu

SEQ ID NO: 2187689 - RNA, 21 nt, Human
acaucaccgacgcgucuccug

SEQ ID NO: 2187690 - RNA, 23 nt, Human
acaucaccgacgcgucuccuguu

SEQ ID NO: 2187691 - RNA, 22 nt, Human
acaucaccgacgcgucuccugu

SEQ ID NO: 2187692 - RNA, 16 nt, Human
acaucacucugcugcu

SEQ ID NO: 2187693 - RNA, 19 nt, Human
acaucacucugcugcuuag

SEQ ID NO: 2187694 - RNA, 19 nt, Human
acaucacuuguacaaaaua

SEQ ID NO: 2187695 - RNA, 11 nt, Human
acaucagaaag

SEQ ID NO: 2187696 - RNA, 13 nt, Human
acaucagaaagga

SEQ ID NO: 2187697 - RNA, 16 nt, Human
acaucacuuguacaaa

SEQ ID NO: 2187698 - RNA, 15 nt, Human
acaucacuuguacaa

SEQ ID NO: 2187699 - RNA, 20 nt, Human
acaucucaggggccagagga

SEQ ID NO: 2187700 - RNA, 19 nt, Human
acaucucaggggccagagg

SEQ ID NO: 2187701 - RNA, 23 nt, Human
acaucuauuuuggauuguauauu

SEQ ID NO: 2187702 - RNA, 12 nt, Human
acaucucagacc

SEQ ID NO: 2187703 - RNA, 22 nt, Human
acaucucagacccuuuagccaa

SEQ ID NO: 2187704 - RNA, 15 nt, Human
acaucagaaaggaau

SEQ ID NO: 2187705 - RNA, 21 nt, Human
acaucuaagccugaaggggcg

SEQ ID NO: 2187706 - RNA, 19 nt, Human
acaucuauuuuggauugua

SEQ ID NO: 2187707 - RNA, 18 nt, Human
acaucuauuuuggauugu

SEQ ID NO: 2187708 - RNA, 14 nt, Human
acaucuauucucuc

SEQ ID NO: 2187709 - RNA, 12 nt, Human
acauauucauuu

SEQ ID NO: 2187710 - RNA, 18 nt, Human
acauauuuccaagaaguu

SEQ ID NO: 2187711 - RNA, 20 nt, Human
acauauucauuuggaaauaa

SEQ ID NO: 2187712 - RNA, 15 nt, Human
acauauuuguggaau

SEQ ID NO: 2187713 - RNA, 16 nt, Human
acauauuuguggaaua

SEQ ID NO: 2187714 - RNA, 17 nt, Human
acauauuuguggaauaa

SEQ ID NO: 2187715 - RNA, 19 nt, Human
acauauuuguggaauaaug

SEQ ID NO: 2187716 - RNA, 19 nt, Human
acauauuuguuaaauauuu

SEQ ID NO: 2187717 - RNA, 14 nt, Human
acauauuuguuaaa

SEQ ID NO: 2187718 - RNA, 16 nt, Human
acauauuuuauagaac

SEQ ID NO: 2187719 - RNA, 18 nt, Human
acauauuuuauagaacuu

SEQ ID NO: 2187720 - RNA, 20 nt, Human
acauauuuguuaaauauuua

SEQ ID NO: 2187721 - RNA, 12 nt, Human
acaucaaagagg

SEQ ID NO: 2187722 - RNA, 13 nt, Human
acaucaacagaua

SEQ ID NO: 2187723 - RNA, 16 nt, Human
acaucaauguucauug

SEQ ID NO: 2187724 - RNA, 15 nt, Human
acaucaauguucauu

SEQ ID NO: 2187725 - RNA, 14 nt, Human
acaucaauguucau

SEQ ID NO: 2187726 - RNA, 23 nt, Human
acaucaauauugucauuccugua

SEQ ID NO: 2187727 - RNA, 18 nt, Human
acaucaauguucauugua

SEQ ID NO: 2187728 - RNA, 17 nt, Human
acaucaauguucauugu

SEQ ID NO: 2187729 - RNA, 20 nt, Human
acaucaauguucauuguaau

SEQ ID NO: 2187730 - RNA, 13 nt, Human
acaucaauguuca

SEQ ID NO: 2187731 - RNA, 18 nt, Human
acaucaauauugucauuc

SEQ ID NO: 2187732 - RNA, 20 nt, Human
acaucaauauugucauuccu

SEQ ID NO: 2187733 - RNA, 18 nt, Human
acaucaagcacagaagga

SEQ ID NO: 2187734 - RNA, 14 nt, Human
acaucaagcacaga

SEQ ID NO: 2187735 - RNA, 18 nt, Human
acaucaacccgagucauu

SEQ ID NO: 2187736 - RNA, 18 nt, Human
acaucaacaucuugguca

SEQ ID NO: 2187737 - RNA, 16 nt, Human
acaucaacaucuuggu

SEQ ID NO: 2187738 - RNA, 19 nt, Human
acauagcgaauacaaaauu

SEQ ID NO: 2187739 - RNA, 19 nt, Human
acauagccuauauuuacag

SEQ ID NO: 2187740 - RNA, 20 nt, Human
acauagccuauauuuacagu

SEQ ID NO: 2187741 - RNA, 22 nt, Human
acauagcccaucccugccuggu

SEQ ID NO: 2187742 - RNA, 13 nt, Human
acauagccuauau

SEQ ID NO: 2187743 - RNA, 16 nt, Human
acauagccuauauuua

SEQ ID NO: 2187744 - RNA, 17 nt, Human
acauagccuauauuuac

SEQ ID NO: 2187745 - RNA, 21 nt, Human
acauagcuuacaagccagcug

SEQ ID NO: 2187746 - RNA, 19 nt, Human
acauagcuaucaagugugc

SEQ ID NO: 2187747 - RNA, 15 nt, Human
acauagaugucccuu

SEQ ID NO: 2187748 - RNA, 21 nt, Human
acauagcaugacauuucuuug

SEQ ID NO: 2187749 - RNA, 19 nt, Human
acauagcaugacauuucuu

SEQ ID NO: 2187750 - RNA, 18 nt, Human
acauagcaugacauuucu

SEQ ID NO: 2187751 - RNA, 16 nt, Human
acauagcaugacauuu

SEQ ID NO: 2187752 - RNA, 14 nt, Human
acauagcccauccc

SEQ ID NO: 2187753 - RNA, 18 nt, Human
acauagcccaucccugcc

SEQ ID NO: 2187754 - RNA, 19 nt, Human
acauagcccaucccugccu

SEQ ID NO: 2187755 - RNA, 13 nt, Human
acauagauguccc

SEQ ID NO: 2187756 - RNA, 20 nt, Human
acauagagagggagaagaag

SEQ ID NO: 2187757 - RNA, 23 nt, Human
acauagagagggagaagaaguca

SEQ ID NO: 2187758 - RNA, 22 nt, Human
acauagagaucauccuuuccag

SEQ ID NO: 2187759 - RNA, 18 nt, Human
acauagaauuaacacaug

SEQ ID NO: 2187760 - RNA, 14 nt, Human
acauagaauuaaca

SEQ ID NO: 2187761 - RNA, 22 nt, Human
acauagcuugauaaagggccaa

SEQ ID NO: 2187762 - RNA, 16 nt, Human
acauaggacucaaagu

SEQ ID NO: 2187763 - RNA, 16 nt, Human
acauagugaugguucc

SEQ ID NO: 2187764 - RNA, 21 nt, Human
acauagugaugguuccccugu

SEQ ID NO: 2187765 - RNA, 23 nt, Human
acauauaauguuguuauuuaaag

SEQ ID NO: 2187766 - RNA, 19 nt, Human
acauauauaacaaugcugu

SEQ ID NO: 2187767 - RNA, 15 nt, Human
acauaguuauuuauu

SEQ ID NO: 2187768 - RNA, 20 nt, Human
acauauaaacaucacacaca

SEQ ID NO: 2187769 - RNA, 13 nt, Human
acauaguuuuuaa

SEQ ID NO: 2187770 - RNA, 21 nt, Human
acauauaaagcacuauacaga

SEQ ID NO: 2187771 - RNA, 15 nt, Human
acauaugaaaauaca

SEQ ID NO: 2187772 - RNA, 18 nt, Human
acauaucuuuauuaauca

SEQ ID NO: 2187773 - RNA, 16 nt, Human
acauaucuuuauuaau

SEQ ID NO: 2187774 - RNA, 18 nt, Human
acauaugaaauuuaauau

SEQ ID NO: 2187775 - RNA, 15 nt, Human
acauaugaaauuuaa

SEQ ID NO: 2187776 - RNA, 19 nt, Human
acauaucuuuauuaaucac

SEQ ID NO: 2187777 - RNA, 14 nt, Human
acauaugaggggga

SEQ ID NO: 2187778 - RNA, 19 nt, Human
acauaugaguguggaagcc

SEQ ID NO: 2187779 - RNA, 21 nt, Human
acauaugaguguggaagccgg

SEQ ID NO: 2187780 - RNA, 23 nt, Human
acauauggacucugcacaugaau

SEQ ID NO: 2187781 - RNA, 19 nt, Human
acauaugcaccuugugucu

SEQ ID NO: 2187782 - RNA, 20 nt, Human
acauaugcaccuugugucug

SEQ ID NO: 2187783 - RNA, 15 nt, Human
acauaugcaccuugu

SEQ ID NO: 2187784 - RNA, 16 nt, Human
acauaugcaccuugug

SEQ ID NO: 2187785 - RNA, 17 nt, Human
acauaugcaccuugugu

SEQ ID NO: 2187786 - RNA, 18 nt, Human
acauaugcaccuuguguc

SEQ ID NO: 2187787 - RNA, 15 nt, Human
acauaucuuuauuaa

SEQ ID NO: 2187788 - RNA, 14 nt, Human
acauauuaugucuu

SEQ ID NO: 2187789 - RNA, 18 nt, Human
acauauuaggaaaauaug

SEQ ID NO: 2187790 - RNA, 23 nt, Human
acauauugauuuccguuaaaaua

SEQ ID NO: 2187791 - RNA, 22 nt, Human
acauauugauuuccguuaaaau

SEQ ID NO: 2187792 - RNA, 18 nt, Human
acauauugauuuccguua

SEQ ID NO: 2187793 - RNA, 14 nt, Human
acauauguaaaaua

SEQ ID NO: 2187794 - RNA, 13 nt, Human
acauauguaaaau

SEQ ID NO: 2187795 - RNA, 13 nt, Human
acauaugugaaua

SEQ ID NO: 2187796 - RNA, 21 nt, Human
acauaugugcuggaauucuaa

SEQ ID NO: 2187797 - RNA, 16 nt, Human
acauauugauuuccgu

SEQ ID NO: 2187798 - RNA, 14 nt, Human
acauauugauuucc

SEQ ID NO: 2187799 - RNA, 18 nt, Human
ucaaagggcccacaguga

SEQ ID NO: 2187800 - RNA, 13 nt, Human
ucaaaguuuugaa

SEQ ID NO: 2187801 - RNA, 14 nt, Human
ucaaaguuuugaaa

SEQ ID NO: 2187802 - RNA, 15 nt, Human
ucaaaguuuugaaaa

SEQ ID NO: 2187803 - RNA, 17 nt, Human
ucaaaguuuugaaaagc

SEQ ID NO: 2187804 - RNA, 18 nt, Human
ucaaaguuuugaaaagcu

SEQ ID NO: 2187805 - RNA, 19 nt, Human
ucaaaguuuugaaaagcua

SEQ ID NO: 2187806 - RNA, 20 nt, Human
ucaaaguuuugaaaagcuau

SEQ ID NO: 2187807 - RNA, 23 nt, Human
ucaaagccagcguccuccucugu

SEQ ID NO: 2187808 - RNA, 22 nt, Human
ucaaagccagcguccuccucug

SEQ ID NO: 2187809 - RNA, 12 nt, Human
ucaaagccagcg

SEQ ID NO: 2187810 - RNA, 19 nt, Human
ucaaaggcacagugaaggc

SEQ ID NO: 2187811 - RNA, 15 nt, Human
ucaaaggacaaagug

SEQ ID NO: 2187812 - RNA, 16 nt, Human
ucaaagcuuuuuccag

SEQ ID NO: 2187813 - RNA, 14 nt, Human
ucaaagcuugaaga

SEQ ID NO: 2187814 - RNA, 20 nt, Human
ucaaagcuugaagaucguua

SEQ ID NO: 2187815 - RNA, 15 nt, Human
ucaaagcuuuuucca

SEQ ID NO: 2187816 - RNA, 15 nt, Human
ucaaagccacacucu

SEQ ID NO: 2187817 - RNA, 18 nt, Human
ucaaagccaaguuuauau

SEQ ID NO: 2187818 - RNA, 19 nt, Human
ucaaagcaggggaguaugc

SEQ ID NO: 2187819 - RNA, 16 nt, Human
ucaaacacugcaggca

SEQ ID NO: 2187820 - RNA, 20 nt, Human
ucaaacacaguuacacuugu

SEQ ID NO: 2187821 - RNA, 14 nt, Human
ucaaacacugcagg

SEQ ID NO: 2187822 - RNA, 10 nt, Human
ucaaagcaga

SEQ ID NO: 2187823 - RNA, 14 nt, Human
ucaaagcugaaaug

SEQ ID NO: 2187824 - RNA, 19 nt, Human
ucaaacaaacucucugaac

SEQ ID NO: 2187825 - RNA, 17 nt, Human
ucaaacaaagccagaag

SEQ ID NO: 2187826 - RNA, 16 nt, Human
ucaaacaaagccagaa

SEQ ID NO: 2187827 - RNA, 15 nt, Human
ucaaacaaagccaga

SEQ ID NO: 2187828 - RNA, 14 nt, Human
ucaaacaaagccag

SEQ ID NO: 2187829 - RNA, 16 nt, Human
ucaaaauuugaagaau

SEQ ID NO: 2187830 - RNA, 24 nt, Human
ucaaaauuagugcuuuuuguguca

SEQ ID NO: 2187831 - RNA, 21 nt, Human
ucaaacaaagccagaagcuga

SEQ ID NO: 2187832 - RNA, 15 nt, Human
ucaaacaacacuggu

SEQ ID NO: 2187833 - RNA, 17 nt, Human
ucaaacaacacuggugu

SEQ ID NO: 2187834 - RNA, 14 nt, Human
ucaaacacaaaugc

SEQ ID NO: 2187835 - RNA, 12 nt, Human
ucaaacacugca

SEQ ID NO: 2187836 - RNA, 11 nt, Human
ucaaacacagu

SEQ ID NO: 2187837 - RNA, 17 nt, Human
ucaaacacaguuacacu

SEQ ID NO: 2187838 - RNA, 15 nt, Human
ucaaacacaaaugca

SEQ ID NO: 2187839 - RNA, 16 nt, Human
ucaaacacaaaugcag

SEQ ID NO: 2187840 - RNA, 17 nt, Human
ucaaacacaaaugcagg

SEQ ID NO: 2187841 - RNA, 17 nt, Human
acaugaucuucuuuaua

SEQ ID NO: 2187842 - RNA, 15 nt, Human
acaugaucuucuuua

SEQ ID NO: 2187843 - RNA, 18 nt, Human
acaugagucccaguggga

SEQ ID NO: 2187844 - RNA, 20 nt, Human
acaugagcaucaggccaggc

SEQ ID NO: 2187845 - RNA, 22 nt, Human
acaugcuacacacugcauguuu

SEQ ID NO: 2187846 - RNA, 17 nt, Human
acaugagcaucaggcca

SEQ ID NO: 2187847 - RNA, 18 nt, Human
acaugagcaucaggccag

SEQ ID NO: 2187848 - RNA, 19 nt, Human
acaugagcaucaggccagg

SEQ ID NO: 2187849 - RNA, 19 nt, Human
acaugauccugcaauucca

SEQ ID NO: 2187850 - RNA, 18 nt, Human
ucaaauaacuaaaaggua

SEQ ID NO: 2187851 - RNA, 22 nt, Human
ucaaaguuuugaaaagcuauua

SEQ ID NO: 2187852 - RNA, 11 nt, Human
ucaaauaaaca

SEQ ID NO: 2187853 - RNA, 13 nt, Human
ucaaauaaacacu

SEQ ID NO: 2187854 - RNA, 14 nt, Human
ucaaauaaacacug

SEQ ID NO: 2187855 - RNA, 15 nt, Human
ucaaauaaacacugu

SEQ ID NO: 2187856 - RNA, 13 nt, Human
ucaaauacaucuu

SEQ ID NO: 2187857 - RNA, 16 nt, Human
ucaaauaaacacugug

SEQ ID NO: 2187858 - RNA, 13 nt, Human
acaugaagaagcu

SEQ ID NO: 2187859 - RNA, 16 nt, Human
acaugaagaagcuaaa

SEQ ID NO: 2187860 - RNA, 18 nt, Human
acaugaagauucuuuccc

SEQ ID NO: 2187861 - RNA, 17 nt, Human
acaugaagauucuuucc

SEQ ID NO: 2187862 - RNA, 15 nt, Human
acaugaagauucuuu

SEQ ID NO: 2187863 - RNA, 22 nt, Human
acaugaagauucuuucccaauu

SEQ ID NO: 2187864 - RNA, 16 nt, Human
acaugaaguccaagca

SEQ ID NO: 2187865 - RNA, 18 nt, Human
uauuugugaugacaacug

SEQ ID NO: 2187866 - RNA, 18 nt, Human
uauuugugauagcacuuu

SEQ ID NO: 2187867 - RNA, 21 nt, Human
uauuugugacuaauuguauaa

SEQ ID NO: 2187868 - RNA, 19 nt, Human
uauuugugacuaauuguau

SEQ ID NO: 2187869 - RNA, 20 nt, Human
uauuugugacuaauuguaua

SEQ ID NO: 2187870 - RNA, 12 nt, Human
uauuugugacua

SEQ ID NO: 2187871 - RNA, 14 nt, Human
uauuugugacuaau

SEQ ID NO: 2187872 - RNA, 17 nt, Human
uauuugugacuaauugu

SEQ ID NO: 2187873 - RNA, 22 nt, Human
uauuugugacuaauuguauaac

SEQ ID NO: 2187874 - RNA, 16 nt, Human
uauuuguaaauuuaug

SEQ ID NO: 2187875 - RNA, 22 nt, Human
uauuuguaaauuuaugugaugg

SEQ ID NO: 2187876 - RNA, 17 nt, Human
uauuuguaaauuuaugu

SEQ ID NO: 2187877 - RNA, 13 nt, Human
uauuuguguauuu

SEQ ID NO: 2187878 - RNA, 15 nt, Human
uauuuguguauuuaa

SEQ ID NO: 2187879 - RNA, 12 nt, Human
uauuuguggaau

SEQ ID NO: 2187880 - RNA, 14 nt, Human
uauuuguggaauaa

SEQ ID NO: 2187881 - RNA, 13 nt, Human
uauuuguguaaua

SEQ ID NO: 2187882 - RNA, 14 nt, Human
uauuuguguaauag

SEQ ID NO: 2187883 - RNA, 17 nt, Human
uauuuguguauuuaaca

SEQ ID NO: 2187884 - RNA, 18 nt, Human
uauuuguguauuuaacag

SEQ ID NO: 2187885 - RNA, 17 nt, Human
uauuuuuaauuaaauaa

SEQ ID NO: 2187886 - RNA, 17 nt, Human
uauuuguguaauagaaa

SEQ ID NO: 2187887 - RNA, 18 nt, Human
uauuuuuacugccacucu

SEQ ID NO: 2187888 - RNA, 19 nt, Human
uauuuuuauagauuugacc

SEQ ID NO: 2187889 - RNA, 18 nt, Human
uauuuuuacauucugaau

SEQ ID NO: 2187890 - RNA, 12 nt, Human
uauuuuuacugc

SEQ ID NO: 2187891 - RNA, 15 nt, Human
uauuuuuacugccac

SEQ ID NO: 2187892 - RNA, 16 nt, Human
uauuuuuacugccacu

SEQ ID NO: 2187893 - RNA, 21 nt, Human
uauuuuuauauuuaguuauag

SEQ ID NO: 2187894 - RNA, 14 nt, Human
uauuuuucuaaggu

SEQ ID NO: 2187895 - RNA, 12 nt, Human
uauuuuuaucuu

SEQ ID NO: 2187896 - RNA, 14 nt, Human
uauuuuucucauga

SEQ ID NO: 2187897 - RNA, 19 nt, Human
ucaaaagaaucagaaacag

SEQ ID NO: 2187898 - RNA, 18 nt, Human
ucaaaagaaaaggcaaaa

SEQ ID NO: 2187899 - RNA, 12 nt, Human
ucaaaagacaau

SEQ ID NO: 2187900 - RNA, 14 nt, Human
ucaaaagacaauuc

SEQ ID NO: 2187901 - RNA, 15 nt, Human
ucaaaagacaauucu

SEQ ID NO: 2187902 - RNA, 16 nt, Human
ucaaaagacaauucuu

SEQ ID NO: 2187903 - RNA, 18 nt, Human
ucaaaagacaauucuuua

SEQ ID NO: 2187904 - RNA, 19 nt, Human
ucaaaagacaauucuuuau

SEQ ID NO: 2187905 - RNA, 18 nt, Human
ucaaaagaaagaaaauca

SEQ ID NO: 2187906 - RNA, 22 nt, Human
uauuuuugaaaggcauguuccu

SEQ ID NO: 2187907 - RNA, 12 nt, Human
uauuuuugcaug

SEQ ID NO: 2187908 - RNA, 17 nt, Human
uauuuuugcauggcacu

SEQ ID NO: 2187909 - RNA, 13 nt, Human
uauuuuugcccug

SEQ ID NO: 2187910 - RNA, 14 nt, Human
ucaaaaugucugua

SEQ ID NO: 2187911 - RNA, 14 nt, Human
ucaaaaugucuaag

SEQ ID NO: 2187912 - RNA, 19 nt, Human
ucaaaaugcuuuuuauuuc

SEQ ID NO: 2187913 - RNA, 17 nt, Human
ucaaaaugcuuuuuauu

SEQ ID NO: 2187914 - RNA, 12 nt, Human
ucaaaaugcuuu

SEQ ID NO: 2187915 - RNA, 16 nt, Human
ucaaaauuguuacaaa

SEQ ID NO: 2187916 - RNA, 19 nt, Human
ucaaaauuguuacaaauug

SEQ ID NO: 2187917 - RNA, 15 nt, Human
ucaaaaugacagcca

SEQ ID NO: 2187918 - RNA, 18 nt, Human
ucaaaauauuuguacaua

SEQ ID NO: 2187919 - RNA, 19 nt, Human
ucaaaauauuuguacauag

SEQ ID NO: 2187920 - RNA, 17 nt, Human
ucaaaauauuuguacau

SEQ ID NO: 2187921 - RNA, 16 nt, Human
ucaaaauauuuguaca

SEQ ID NO: 2187922 - RNA, 16 nt, Human
ucaaaaguugaaauua

SEQ ID NO: 2187923 - RNA, 15 nt, Human
ucaaaaguugaaauu

SEQ ID NO: 2187924 - RNA, 14 nt, Human
ucaaaaguugaaau

SEQ ID NO: 2187925 - RNA, 18 nt, Human
ucaaaagcaaaugagauc

SEQ ID NO: 2187926 - RNA, 15 nt, Human
ucaaaagcuggauua

SEQ ID NO: 2187927 - RNA, 23 nt, Human
ucaaaagacaauucuuuauacaa

SEQ ID NO: 2187928 - RNA, 12 nt, Human
ucaaaauaaaaa

SEQ ID NO: 2187929 - RNA, 21 nt, Human
ucaaaauaccaugccauuuaa

SEQ ID NO: 2187930 - RNA, 23 nt, Human
ucaaaauaaaaagugacacagca

SEQ ID NO: 2187931 - RNA, 14 nt, Human
ucaaaauaauuuua

SEQ ID NO: 2187932 - RNA, 20 nt, Human
ucaaaauaaaaaccaagaag

SEQ ID NO: 2187933 - RNA, 13 nt, Human
ucaaaauaaaaac

SEQ ID NO: 2187934 - RNA, 20 nt, Human
ucaaaauaaaaagugacaca

SEQ ID NO: 2187935 - RNA, 21 nt, Human
ucaaaauaaaaagugacacag

SEQ ID NO: 2187936 - RNA, 23 nt, Human
ucaaaauaccaugccauuuaaag

SEQ ID NO: 2187937 - RNA, 15 nt, Human
ucaaaauauguucuu

SEQ ID NO: 2187938 - RNA, 21 nt, Human
ucaaaauaugccccauucaac

SEQ ID NO: 2187939 - RNA, 15 nt, Human
acauucaugccuggc

SEQ ID NO: 2187940 - RNA, 23 nt, Human
acauucaauaagcaucaaacucu

SEQ ID NO: 2187941 - RNA, 16 nt, Human
acauucaggaagauga

SEQ ID NO: 2187942 - RNA, 12 nt, Human
acauucaauguu

SEQ ID NO: 2187943 - RNA, 13 nt, Human
acauucaccugcc

SEQ ID NO: 2187944 - RNA, 20 nt, Human
acauucaccugccccaacuc

SEQ ID NO: 2187945 - RNA, 14 nt, Human
acauucaccugccc

SEQ ID NO: 2187946 - RNA, 15 nt, Human
acauucaauaagcau

SEQ ID NO: 2187947 - RNA, 18 nt, Human
acauucaacccuggagag

SEQ ID NO: 2187948 - RNA, 13 nt, Human
acauucaaggcau

SEQ ID NO: 2187949 - RNA, 20 nt, Human
acauuaacaguuuuccauga

SEQ ID NO: 2187950 - RNA, 18 nt, Human
acauuaacaguuuuccau

SEQ ID NO: 2187951 - RNA, 17 nt, Human
acauuaacaguuuucca

SEQ ID NO: 2187952 - RNA, 16 nt, Human
acauuaacaguuuucc

SEQ ID NO: 2187953 - RNA, 22 nt, Human
acauuaacaguuuuccaugaaa

SEQ ID NO: 2187954 - RNA, 12 nt, Human
acauuaagaaaa

SEQ ID NO: 2187955 - RNA, 13 nt, Human
acauuaagaaaau

SEQ ID NO: 2187956 - RNA, 14 nt, Human
acauuaagaaaauc

SEQ ID NO: 2187957 - RNA, 16 nt, Human
acauuaagaaaaucau

SEQ ID NO: 2187958 - RNA, 17 nt, Human
acauuaagaaaaucaua

SEQ ID NO: 2187959 - RNA, 21 nt, Human
acauuaagaaaaucauauugc

SEQ ID NO: 2187960 - RNA, 18 nt, Human
acauuagcaguuugcuuu

SEQ ID NO: 2187961 - RNA, 22 nt, Human
acauuagcaguuugcuuuguau

SEQ ID NO: 2187962 - RNA, 14 nt, Human
acaugcugagucuc

SEQ ID NO: 2187963 - RNA, 21 nt, Human
acaugcugagucucccaaggc

SEQ ID NO: 2187964 - RNA, 19 nt, Human
acaugcucuuagaaaauuc

SEQ ID NO: 2187965 - RNA, 14 nt, Human
acaugcugaagcca

SEQ ID NO: 2187966 - RNA, 17 nt, Human
acaugcugaagccaaag

SEQ ID NO: 2187967 - RNA, 21 nt, Human
acauguccaagaagcccagga

SEQ ID NO: 2187968 - RNA, 19 nt, Human
acauguccaagaagcccag

SEQ ID NO: 2187969 - RNA, 12 nt, Human
acauuaacaguu

SEQ ID NO: 2187970 - RNA, 11 nt, Human
acauuaacagu

SEQ ID NO: 2187971 - RNA, 12 nt, Human
acaugucuuaau

SEQ ID NO: 2187972 - RNA, 18 nt, Human
acaugucuguucuacaua

SEQ ID NO: 2187973 - RNA, 15 nt, Human
acaugucccuacacc

SEQ ID NO: 2187974 - RNA, 21 nt, Human
acauguccuuguguguuuuga

SEQ ID NO: 2187975 - RNA, 16 nt, Human
acauguccuugugugu

SEQ ID NO: 2187976 - RNA, 17 nt, Human
acaugucuguucuacau

SEQ ID NO: 2187977 - RNA, 16 nt, Human
acaugucuccuauccu

SEQ ID NO: 2187978 - RNA, 18 nt, Human
acaugucuccuauccugg

SEQ ID NO: 2187979 - RNA, 10 nt, Human
acauucuuau

SEQ ID NO: 2187980 - RNA, 23 nt, Human
acauucugucgccuuagcauguu

SEQ ID NO: 2187981 - RNA, 14 nt, Human
acauucuuauaaau

SEQ ID NO: 2187982 - RNA, 14 nt, Human
ucaaauuucuaaau

SEQ ID NO: 2187983 - RNA, 15 nt, Human
acauucuguuaauca

SEQ ID NO: 2187984 - RNA, 16 nt, Human
ucaaauuucuaaaucu

SEQ ID NO: 2187985 - RNA, 15 nt, Human
ucaaauuucuaaauc

SEQ ID NO: 2187986 - RNA, 12 nt, Human
acauucugcuuu

SEQ ID NO: 2187987 - RNA, 16 nt, Human
acauucugccaggccc

SEQ ID NO: 2187988 - RNA, 19 nt, Human
acauucugauuuggaaaaa

SEQ ID NO: 2187989 - RNA, 15 nt, Human
acauuccaagacagu

SEQ ID NO: 2187990 - RNA, 17 nt, Human
acauuccaagacaguau

SEQ ID NO: 2187991 - RNA, 11 nt, Human
acauuccaaga

SEQ ID NO: 2187992 - RNA, 13 nt, Human
acauuccaagaca

SEQ ID NO: 2187993 - RNA, 14 nt, Human
acauuccaagacag

SEQ ID NO: 2187994 - RNA, 16 nt, Human
acauucaugccuggcu

SEQ ID NO: 2187995 - RNA, 14 nt, Human
acauucuguaaaau

SEQ ID NO: 2187996 - RNA, 22 nt, Human
acauucugucgccuuagcaugu

SEQ ID NO: 2187997 - RNA, 18 nt, Human
acauucugcuuucaucuu

SEQ ID NO: 2187998 - RNA, 20 nt, Human
acauucuggcucagggaggu

SEQ ID NO: 2187999 - RNA, 12 nt, Human
acauucuguuaa

SEQ ID NO: 2188000 - RNA, 23 nt, Human
ucaacacuuaaggguuuuagaaa

SEQ ID NO: 2188001 - RNA, 20 nt, Human
ucaacaagggagagaccuca

SEQ ID NO: 2188002 - RNA, 19 nt, Human
ucaacaagggagagaccuc

SEQ ID NO: 2188003 - RNA, 22 nt, Human
ucaacaagggagagaccucauc

SEQ ID NO: 2188004 - RNA, 15 nt, Human
acauucuuauaaaua

SEQ ID NO: 2188005 - RNA, 16 nt, Human
acauucuuauaaauau

SEQ ID NO: 2188006 - RNA, 17 nt, Human
ucaaauuucuaaaucuc

SEQ ID NO: 2188007 - RNA, 18 nt, Human
ucaacaggagaauuuuac

SEQ ID NO: 2188008 - RNA, 18 nt, Human
ucaacagcuaugcuggua

SEQ ID NO: 2188009 - RNA, 15 nt, Human
ucaacagcuccccau

SEQ ID NO: 2188010 - RNA, 16 nt, Human
ucaacagguuuuccug

SEQ ID NO: 2188011 - RNA, 22 nt, Human
ucaacagagaaggcaggaaugu

SEQ ID NO: 2188012 - RNA, 19 nt, Human
ucaacagagaaggcaggaa

SEQ ID NO: 2188013 - RNA, 17 nt, Human
ucaacagagaaggcagg

SEQ ID NO: 2188014 - RNA, 12 nt, Human
ucaacagagaag

SEQ ID NO: 2188015 - RNA, 18 nt, Human
ucaacacucccuucccau

SEQ ID NO: 2188016 - RNA, 16 nt, Human
ucaacagcuaugcugg

SEQ ID NO: 2188017 - RNA, 15 nt, Human
ucaaguauuauaccu

SEQ ID NO: 2188018 - RNA, 11 nt, Human
ucaaguauuau

SEQ ID NO: 2188019 - RNA, 12 nt, Human
ucaaguauuugg

SEQ ID NO: 2188020 - RNA, 23 nt, Human
ucaaguauuauaccuuuuuuaga

SEQ ID NO: 2188021 - RNA, 21 nt, Human
ucaaguauuauaccuuuuuua

SEQ ID NO: 2188022 - RNA, 16 nt, Human
ucaaguauuauaccuu

SEQ ID NO: 2188023 - RNA, 20 nt, Human
ucaagauguccuccuuguuc

SEQ ID NO: 2188024 - RNA, 15 nt, Human
ucaagaucauguacc

SEQ ID NO: 2188025 - RNA, 18 nt, Human
ucaagaugucagacuggc

SEQ ID NO: 2188026 - RNA, 17 nt, Human
ucaaggcugcuuagaau

SEQ ID NO: 2188027 - RNA, 18 nt, Human
ucaaggcugcuuagaauc

SEQ ID NO: 2188028 - RNA, 21 nt, Human
ucaagggaauguaacugcuga

SEQ ID NO: 2188029 - RNA, 19 nt, Human
ucaagggaauguaacugcu

SEQ ID NO: 2188030 - RNA, 20 nt, Human
ucaagggaauguaacugcug

SEQ ID NO: 2188031 - RNA, 16 nt, Human
ucaagggggacugucu

SEQ ID NO: 2188032 - RNA, 17 nt, Human
ucaagaugucagacugg

SEQ ID NO: 2188033 - RNA, 22 nt, Human
ucaagaucaaugaaaugauguc

SEQ ID NO: 2188034 - RNA, 16 nt, Human
ucaagaucaaugaaau

SEQ ID NO: 2188035 - RNA, 22 nt, Human
ucaagaugaugaugaucuuuaa

SEQ ID NO: 2188036 - RNA, 15 nt, Human
ucaagagcacacuug

SEQ ID NO: 2188037 - RNA, 22 nt, Human
ucaagauacugcuacuguaauu

SEQ ID NO: 2188038 - RNA, 21 nt, Human
ucaagauacugcuacuguaau

SEQ ID NO: 2188039 - RNA, 17 nt, Human
ucaagagcugcccuccu

SEQ ID NO: 2188040 - RNA, 19 nt, Human
ucaagauacugcuacugua

SEQ ID NO: 2188041 - RNA, 13 nt, Human
ucaagagcugccc

SEQ ID NO: 2188042 - RNA, 16 nt, Human
ucaagagcugcccucc

SEQ ID NO: 2188043 - RNA, 16 nt, Human
ucaagaccuucucccc

SEQ ID NO: 2188044 - RNA, 15 nt, Human
ucaagagauuuaauu

SEQ ID NO: 2188045 - RNA, 18 nt, Human
ucaagagauuuaauuaau

SEQ ID NO: 2188046 - RNA, 19 nt, Human
ucaagagaguaauggguuu

SEQ ID NO: 2188047 - RNA, 19 nt, Human
ucaagacuggaaggugggg

SEQ ID NO: 2188048 - RNA, 20 nt, Human
ucaagacuggaaggugggga

SEQ ID NO: 2188049 - RNA, 20 nt, Human
ucaagacauuaaaucuauga

SEQ ID NO: 2188050 - RNA, 17 nt, Human
ucaagacauuaaaucua

SEQ ID NO: 2188051 - RNA, 21 nt, Human
ucaagaauaaucacgcuuucc

SEQ ID NO: 2188052 - RNA, 22 nt, Human
ucaagaauggggaucacagaga

SEQ ID NO: 2188053 - RNA, 21 nt, Human
ucaagaaagcuucaaacugca

SEQ ID NO: 2188054 - RNA, 21 nt, Human
ucaagaaauaaaaggaagcca

SEQ ID NO: 2188055 - RNA, 20 nt, Human
ucaagaaauaaaaggaagcc

SEQ ID NO: 2188056 - RNA, 22 nt, Human
ucaagaaauaaaaggaagccaa

SEQ ID NO: 2188057 - RNA, 23 nt, Human
ucaagaagaagauggauuggugu

SEQ ID NO: 2188058 - RNA, 12 nt, Human
ucaagaagacau

SEQ ID NO: 2188059 - RNA, 19 nt, Human
ucaagaagacauggagacu

SEQ ID NO: 2188060 - RNA, 23 nt, Human
ucaagaagcaggcuacacugaca

SEQ ID NO: 2188061 - RNA, 21 nt, Human
ucaacauguuacugaccagca

SEQ ID NO: 2188062 - RNA, 20 nt, Human
ucaacauguuacugaccagc

SEQ ID NO: 2188063 - RNA, 22 nt, Human
ucaacauguuacugaccagcaa

SEQ ID NO: 2188064 - RNA, 15 nt, Human
ucaacaucuuuuaca

SEQ ID NO: 2188065 - RNA, 21 nt, Human
ucaacaucaauguucauugua

SEQ ID NO: 2188066 - RNA, 19 nt, Human
ucaacauguuacugaccag

SEQ ID NO: 2188067 - RNA, 15 nt, Human
ucaacauguuacuga

SEQ ID NO: 2188068 - RNA, 23 nt, Human
ucaagaaacugaggaauuuucuu

SEQ ID NO: 2188069 - RNA, 22 nt, Human
ucaagaaacugaggaauuuucu

SEQ ID NO: 2188070 - RNA, 20 nt, Human
ucaagaaacugaggaauuuu

SEQ ID NO: 2188071 - RNA, 18 nt, Human
ucaagaaacugaggaauu

SEQ ID NO: 2188072 - RNA, 17 nt, Human
ucaagaaacugaggaau

SEQ ID NO: 2188073 - RNA, 13 nt, Human
ucaagaaacugag

SEQ ID NO: 2188074 - RNA, 12 nt, Human
ucaagaaacuga

SEQ ID NO: 2188075 - RNA, 23 nt, Human
ucaacaucaauguucauuguaau

SEQ ID NO: 2188076 - RNA, 20 nt, Human
ucaacaucaauguucauugu

SEQ ID NO: 2188077 - RNA, 19 nt, Human
ucaacaucaauguucauug

SEQ ID NO: 2188078 - RNA, 12 nt, Human
ucaacaucuuuu

SEQ ID NO: 2188079 - RNA, 18 nt, Human
ucaacaucaauguucauu

SEQ ID NO: 2188080 - RNA, 17 nt, Human
ucaacaucaauguucau

SEQ ID NO: 2188081 - RNA, 16 nt, Human
ucaacaucaauguuca

SEQ ID NO: 2188082 - RNA, 15 nt, Human
ucaacaucaauguuc

SEQ ID NO: 2188083 - RNA, 14 nt, Human
ucaacaucaauguu

SEQ ID NO: 2188084 - RNA, 15 nt, Human
accccugguucucau

SEQ ID NO: 2188085 - RNA, 16 nt, Human
accccugguucucauc

SEQ ID NO: 2188086 - RNA, 20 nt, Human
accccugguucucaucuuuc

SEQ ID NO: 2188087 - RNA, 22 nt, Human
accccugguucucaucuuucuu

SEQ ID NO: 2188088 - RNA, 14 nt, Human
accccugguucuca

SEQ ID NO: 2188089 - RNA, 21 nt, Human
acccccgcccaggcuggccag

SEQ ID NO: 2188090 - RNA, 23 nt, Human
acccccgcccaggcuggccagcc

SEQ ID NO: 2188091 - RNA, 15 nt, Human
acccccgcccaggcu

SEQ ID NO: 2188092 - RNA, 16 nt, Human
acccccgcccaggcug

SEQ ID NO: 2188093 - RNA, 19 nt, Human
acccccgcccaggcuggcc

SEQ ID NO: 2188094 - RNA, 20 nt, Human
acccccgcccaggcuggcca

SEQ ID NO: 2188095 - RNA, 22 nt, Human
acccccgaguuuggucccuggg

SEQ ID NO: 2188096 - RNA, 13 nt, Human
acccccgcccagg

SEQ ID NO: 2188097 - RNA, 20 nt, Human
accccccagaaccuguccuu

SEQ ID NO: 2188098 - RNA, 19 nt, Human
accccccagcacugaggaa

SEQ ID NO: 2188099 - RNA, 15 nt, Human
accccccagcacuga

SEQ ID NO: 2188100 - RNA, 17 nt, Human
accccccagcacugagg

SEQ ID NO: 2188101 - RNA, 15 nt, Human
accccccugggcuga

SEQ ID NO: 2188102 - RNA, 12 nt, Human
accccccugggc

SEQ ID NO: 2188103 - RNA, 11 nt, Human
accccccucug

SEQ ID NO: 2188104 - RNA, 12 nt, Human
accccccucauu

SEQ ID NO: 2188105 - RNA, 14 nt, Human
acccccaccccaca

SEQ ID NO: 2188106 - RNA, 12 nt, Human
acccccacccca

SEQ ID NO: 2188107 - RNA, 13 nt, Human
accccccagcacu

SEQ ID NO: 2188108 - RNA, 14 nt, Human
accccccagcacug

SEQ ID NO: 2188109 - RNA, 12 nt, Human
acccccacccaa

SEQ ID NO: 2188110 - RNA, 22 nt, Human
ucagccuuggauaaugcuguug

SEQ ID NO: 2188111 - RNA, 18 nt, Human
ucagcgauguaugcagcu

SEQ ID NO: 2188112 - RNA, 23 nt, Human
ucagcgacuccguuggccacucc

SEQ ID NO: 2188113 - RNA, 21 nt, Human
ucagcgauguaugcagcuauc

SEQ ID NO: 2188114 - RNA, 22 nt, Human
ucagcggccccuugacucuggg

SEQ ID NO: 2188115 - RNA, 17 nt, Human
ucagccuugccagagau

SEQ ID NO: 2188116 - RNA, 16 nt, Human
ucagccuugccagaga

SEQ ID NO: 2188117 - RNA, 19 nt, Human
ucagcgacuccguuggcca

SEQ ID NO: 2188118 - RNA, 20 nt, Human
ucagcgacuccguuggccac

SEQ ID NO: 2188119 - RNA, 16 nt, Human
accccuucgcuccugu

SEQ ID NO: 2188120 - RNA, 14 nt, Human
accccuuccugucc

SEQ ID NO: 2188121 - RNA, 12 nt, Human
accccuuccugu

SEQ ID NO: 2188122 - RNA, 15 nt, Human
ucagccuugccagag

SEQ ID NO: 2188123 - RNA, 14 nt, Human
ucagccuugccaga

SEQ ID NO: 2188124 - RNA, 14 nt, Human
accccuucgcuccu

SEQ ID NO: 2188125 - RNA, 15 nt, Human
accccuucgcuccug

SEQ ID NO: 2188126 - RNA, 18 nt, Human
accccuguggagcccgca

SEQ ID NO: 2188127 - RNA, 13 nt, Human
accccuguggagc

SEQ ID NO: 2188128 - RNA, 21 nt, Human
accccugugcuccgugccucc

SEQ ID NO: 2188129 - RNA, 22 nt, Human
accccugugcuccgugccucca

SEQ ID NO: 2188130 - RNA, 19 nt, Human
accccuguggagcccgcac

SEQ ID NO: 2188131 - RNA, 23 nt, Human
accccuuccccacugccugccca

SEQ ID NO: 2188132 - RNA, 15 nt, Human
accccuguccucacu

SEQ ID NO: 2188133 - RNA, 16 nt, Human
accccuguccucacug

SEQ ID NO: 2188134 - RNA, 17 nt, Human
accccuguccucacugc

SEQ ID NO: 2188135 - RNA, 18 nt, Human
accccuguccucacugcu

SEQ ID NO: 2188136 - RNA, 19 nt, Human
accccuguccucacugcuc

SEQ ID NO: 2188137 - RNA, 21 nt, Human
accccuguccucacugcuccc

SEQ ID NO: 2188138 - RNA, 17 nt, Human
accccugucucuagcca

SEQ ID NO: 2188139 - RNA, 14 nt, Human
accccugugcuccg

SEQ ID NO: 2188140 - RNA, 14 nt, Human
ucagcuucuuaaua

SEQ ID NO: 2188141 - RNA, 23 nt, Human
ucagcuucugcugggcuggggcc

SEQ ID NO: 2188142 - RNA, 14 nt, Human
ucagcuucuucauc

SEQ ID NO: 2188143 - RNA, 20 nt, Human
ucagcuuuuugucuuuucug

SEQ ID NO: 2188144 - RNA, 22 nt, Human
ucaggaaaacugacagaggagg

SEQ ID NO: 2188145 - RNA, 21 nt, Human
ucaggaaaacugacagaggag

SEQ ID NO: 2188146 - RNA, 20 nt, Human
ucaggaaaacugacagagga

SEQ ID NO: 2188147 - RNA, 15 nt, Human
ucagcuugcugcccu

SEQ ID NO: 2188148 - RNA, 16 nt, Human
ucaggaaaagccucug

SEQ ID NO: 2188149 - RNA, 17 nt, Human
ucaggaaaagccucugu

SEQ ID NO: 2188150 - RNA, 18 nt, Human
ucaggaaaagccucugug

SEQ ID NO: 2188151 - RNA, 19 nt, Human
ucaggaaaagccucugugu

SEQ ID NO: 2188152 - RNA, 13 nt, Human
ucaggaaagagaa

SEQ ID NO: 2188153 - RNA, 14 nt, Human
ucaggaaagacgga

SEQ ID NO: 2188154 - RNA, 15 nt, Human
ucaggaaaggaauca

SEQ ID NO: 2188155 - RNA, 19 nt, Human
ucaggaaagagaacuucca

SEQ ID NO: 2188156 - RNA, 21 nt, Human
ucaggaaaucaaauaugcaaa

SEQ ID NO: 2188157 - RNA, 20 nt, Human
ucaggaaaucaaauaugcaa

SEQ ID NO: 2188158 - RNA, 13 nt, Human
ucagcuucuuaau

SEQ ID NO: 2188159 - RNA, 21 nt, Human
ucagcuucugcugggcugggg

SEQ ID NO: 2188160 - RNA, 22 nt, Human
ucagcuucugcugggcuggggc

SEQ ID NO: 2188161 - RNA, 16 nt, Human
ucagcuucugcugggc

SEQ ID NO: 2188162 - RNA, 17 nt, Human
ucagcuucugcugggcu

SEQ ID NO: 2188163 - RNA, 18 nt, Human
ucagcuucugcugggcug

SEQ ID NO: 2188164 - RNA, 19 nt, Human
ucagcuucugcugggcugg

SEQ ID NO: 2188165 - RNA, 20 nt, Human
ucagcuuguaaauagcucag

SEQ ID NO: 2188166 - RNA, 14 nt, Human
ucagcucacuguuc

SEQ ID NO: 2188167 - RNA, 18 nt, Human
ucagcucagcgccagccu

SEQ ID NO: 2188168 - RNA, 23 nt, Human
ucagcuuccuacccacaccucug

SEQ ID NO: 2188169 - RNA, 20 nt, Human
ucagcuucuauccuugacuu

SEQ ID NO: 2188170 - RNA, 14 nt, Human
ucagcuucugcugg

SEQ ID NO: 2188171 - RNA, 15 nt, Human
ucagcuucugcuggg

SEQ ID NO: 2188172 - RNA, 21 nt, Human
ucagcuucguuuauuuucaag

SEQ ID NO: 2188173 - RNA, 19 nt, Human
ucagcuucguuuauuuuca

SEQ ID NO: 2188174 - RNA, 14 nt, Human
ucagcggggacagc

SEQ ID NO: 2188175 - RNA, 19 nt, Human
ucagcuacugauuuuugug

SEQ ID NO: 2188176 - RNA, 19 nt, Human
ucagcuauuuacugccaaa

SEQ ID NO: 2188177 - RNA, 22 nt, Human
ucagcuauuuaaaaaaaaaaga

SEQ ID NO: 2188178 - RNA, 20 nt, Human
ucagcuauuuacugccaaag

SEQ ID NO: 2188179 - RNA, 23 nt, Human
ucagcuauuuaaaaaaaaaagag

SEQ ID NO: 2188180 - RNA, 16 nt, Human
ucagcucacugcaacc

SEQ ID NO: 2188181 - RNA, 13 nt, Human
ucagcucacugca

SEQ ID NO: 2188182 - RNA, 18 nt, Human
ucagccaucaacaagagu

SEQ ID NO: 2188183 - RNA, 23 nt, Human
ucagccaugaggaguugcuguuu

SEQ ID NO: 2188184 - RNA, 14 nt, Human
ucagccauguauuu

SEQ ID NO: 2188185 - RNA, 19 nt, Human
ucagccaggagcugggcag

SEQ ID NO: 2188186 - RNA, 20 nt, Human
ucagccaagcacaguggugg

SEQ ID NO: 2188187 - RNA, 12 nt, Human
ucagccagggcc

SEQ ID NO: 2188188 - RNA, 13 nt, Human
ucagccagggcca

SEQ ID NO: 2188189 - RNA, 14 nt, Human
ucagccagggccag

SEQ ID NO: 2188190 - RNA, 16 nt, Human
ucagccagggccaggg

SEQ ID NO: 2188191 - RNA, 18 nt, Human
ucagccagggccaggggu

SEQ ID NO: 2188192 - RNA, 23 nt, Human
ucagccaaauguaauugaauaaa

SEQ ID NO: 2188193 - RNA, 12 nt, Human
ucagccaagcac

SEQ ID NO: 2188194 - RNA, 14 nt, Human
ucagccaagcacag

SEQ ID NO: 2188195 - RNA, 15 nt, Human
ucagccaagcacagu

SEQ ID NO: 2188196 - RNA, 22 nt, Human
ucagccaagguuuuauaaggcu

SEQ ID NO: 2188197 - RNA, 23 nt, Human
ucagccaagguuuuauaaggcug

SEQ ID NO: 2188198 - RNA, 22 nt, Human
ucagccaagaauucuuaaauau

SEQ ID NO: 2188199 - RNA, 19 nt, Human
ucagcauuuccacaccaag

SEQ ID NO: 2188200 - RNA, 18 nt, Human
ucagagcugacacaggau

SEQ ID NO: 2188201 - RNA, 21 nt, Human
ucagccaacgaguaauuuauu

SEQ ID NO: 2188202 - RNA, 22 nt, Human
ucagccaaauguaauugaauaa

SEQ ID NO: 2188203 - RNA, 16 nt, Human
ucagccaaauguaauu

SEQ ID NO: 2188204 - RNA, 14 nt, Human
ucagccaaauguaa

SEQ ID NO: 2188205 - RNA, 11 nt, Human
ucagagagggu

SEQ ID NO: 2188206 - RNA, 22 nt, Human
ucagagaggccuuuuggaaugu

SEQ ID NO: 2188207 - RNA, 21 nt, Human
ucagagaggccuuuuggaaug

SEQ ID NO: 2188208 - RNA, 16 nt, Human
ucagagcuacuugggc

SEQ ID NO: 2188209 - RNA, 17 nt, Human
ucagagcuacuugggcc

SEQ ID NO: 2188210 - RNA, 18 nt, Human
ucagagcuacuugggcca

SEQ ID NO: 2188211 - RNA, 14 nt, Human
ucagagcugacaca

SEQ ID NO: 2188212 - RNA, 21 nt, Human
ucagccaugaggaguugcugu

SEQ ID NO: 2188213 - RNA, 14 nt, Human
ucagccaugugcug

SEQ ID NO: 2188214 - RNA, 16 nt, Human
ucagccauucacugcc

SEQ ID NO: 2188215 - RNA, 16 nt, Human
ucagcccaagaugcuu

SEQ ID NO: 2188216 - RNA, 13 nt, Human
ucagcccaccccc

SEQ ID NO: 2188217 - RNA, 12 nt, Human
ucagcccacccc

SEQ ID NO: 2188218 - RNA, 22 nt, Human
ucagcccaaaccaccagaagcc

SEQ ID NO: 2188219 - RNA, 21 nt, Human
ucagcccaaaccaccagaagc

SEQ ID NO: 2188220 - RNA, 23 nt, Human
ucagcccugggccccaccaccua

SEQ ID NO: 2188221 - RNA, 22 nt, Human
ucagcccugggccccaccaccu

SEQ ID NO: 2188222 - RNA, 21 nt, Human
ucagcccugggccccaccacc

SEQ ID NO: 2188223 - RNA, 14 nt, Human
ucagcccacccccc

SEQ ID NO: 2188224 - RNA, 18 nt, Human
ucagccgagccgggccug

SEQ ID NO: 2188225 - RNA, 19 nt, Human
ucagccgagccgggccugg

SEQ ID NO: 2188226 - RNA, 20 nt, Human
ucagccgagccgggccuggg

SEQ ID NO: 2188227 - RNA, 21 nt, Human
ucagccgagccgggccugggg

SEQ ID NO: 2188228 - RNA, 23 nt, Human
ucagccguguaaccauggaccca

SEQ ID NO: 2188229 - RNA, 19 nt, Human
acccagcgagcccuggugg

SEQ ID NO: 2188230 - RNA, 23 nt, Human
acccagcgagcccugguggcagu

SEQ ID NO: 2188231 - RNA, 22 nt, Human
ucagccuagccgaccucagccu

SEQ ID NO: 2188232 - RNA, 21 nt, Human
ucagccuagccgaccucagcc

SEQ ID NO: 2188233 - RNA, 20 nt, Human
ucagccuagccgaccucagc

SEQ ID NO: 2188234 - RNA, 19 nt, Human
ucagccuagccgaccucag

SEQ ID NO: 2188235 - RNA, 18 nt, Human
ucagccuagccgaccuca

SEQ ID NO: 2188236 - RNA, 16 nt, Human
ucagccgggcccugag

SEQ ID NO: 2188237 - RNA, 22 nt, Human
ucagccgagccgggccuggggc

SEQ ID NO: 2188238 - RNA, 16 nt, Human
acccccaaauuuucuu

SEQ ID NO: 2188239 - RNA, 13 nt, Human
acccccacacaca

SEQ ID NO: 2188240 - RNA, 12 nt, Human
acccccacacac

SEQ ID NO: 2188241 - RNA, 20 nt, Human
accccaggcugaagcagguu

SEQ ID NO: 2188242 - RNA, 10 nt, Human
accccagggc

SEQ ID NO: 2188243 - RNA, 16 nt, Human
acccccaaggggcagu

SEQ ID NO: 2188244 - RNA, 10 nt, Human
acccccacca

SEQ ID NO: 2188245 - RNA, 13 nt, Human
acccccaccaagg

SEQ ID NO: 2188246 - RNA, 15 nt, Human
acccccaccaagggc

SEQ ID NO: 2188247 - RNA, 17 nt, Human
acccccacaccucaguu

SEQ ID NO: 2188248 - RNA, 15 nt, Human
acccccacaccucag

SEQ ID NO: 2188249 - RNA, 21 nt, Human
acccccacacacacacacaug

SEQ ID NO: 2188250 - RNA, 20 nt, Human
acccccacacacacacacau

SEQ ID NO: 2188251 - RNA, 15 nt, Human
acccccacacacaca

SEQ ID NO: 2188252 - RNA, 14 nt, Human
acccccacacacac

SEQ ID NO: 2188253 - RNA, 18 nt, Human
accccagacgaugucuuc

SEQ ID NO: 2188254 - RNA, 23 nt, Human
accccagcuggggccaggcuggg

SEQ ID NO: 2188255 - RNA, 17 nt, Human
accccacuuaucccucu

SEQ ID NO: 2188256 - RNA, 18 nt, Human
accccacuuaucccucuc

SEQ ID NO: 2188257 - RNA, 17 nt, Human
accccagcugugagccu

SEQ ID NO: 2188258 - RNA, 18 nt, Human
accccagcugugagccuu

SEQ ID NO: 2188259 - RNA, 19 nt, Human
accccagcugugagccuug

SEQ ID NO: 2188260 - RNA, 20 nt, Human
accccagcugugagccuugg

SEQ ID NO: 2188261 - RNA, 21 nt, Human
accccagcugugagccuuggc

SEQ ID NO: 2188262 - RNA, 22 nt, Human
accccagcugugagccuuggcu

SEQ ID NO: 2188263 - RNA, 12 nt, Human
accccaggcccc

SEQ ID NO: 2188264 - RNA, 13 nt, Human
accccaggccccg

SEQ ID NO: 2188265 - RNA, 14 nt, Human
accccaggccccga

SEQ ID NO: 2188266 - RNA, 15 nt, Human
accccaggccccgag

SEQ ID NO: 2188267 - RNA, 19 nt, Human
acccaggcuggagugcagu

SEQ ID NO: 2188268 - RNA, 12 nt, Human
acccaggcuggg

SEQ ID NO: 2188269 - RNA, 13 nt, Human
acccaggcugggc

SEQ ID NO: 2188270 - RNA, 14 nt, Human
acccaggcugggca

SEQ ID NO: 2188271 - RNA, 20 nt, Human
acccaggcugggcaaggagg

SEQ ID NO: 2188272 - RNA, 22 nt, Human
acccaggcugggcaaggaggcc

SEQ ID NO: 2188273 - RNA, 20 nt, Human
acccaggcuggagugcaaug

SEQ ID NO: 2188274 - RNA, 23 nt, Human
acccaggccgcagcucuugcccu

SEQ ID NO: 2188275 - RNA, 20 nt, Human
acccaggcuggaguacagug

SEQ ID NO: 2188276 - RNA, 17 nt, Human
acccaggaguguggcca

SEQ ID NO: 2188277 - RNA, 15 nt, Human
acccaggccgcagcu

SEQ ID NO: 2188278 - RNA, 15 nt, Human
acccaggcaccugca

SEQ ID NO: 2188279 - RNA, 22 nt, Human
acccaggccgcagcucuugccc

SEQ ID NO: 2188280 - RNA, 24 nt, Human
acccagcgagcccugguggcagug

SEQ ID NO: 2188281 - RNA, 13 nt, Human
accccacccuucc

SEQ ID NO: 2188282 - RNA, 20 nt, Human
accccacccucccuggagug

SEQ ID NO: 2188283 - RNA, 21 nt, Human
acccagggcccaggcaaauca

SEQ ID NO: 2188284 - RNA, 16 nt, Human
accccacccucccugg

SEQ ID NO: 2188285 - RNA, 17 nt, Human
accccacccucccugga

SEQ ID NO: 2188286 - RNA, 18 nt, Human
accccacccucccuggag

SEQ ID NO: 2188287 - RNA, 14 nt, Human
acccagggccugca

SEQ ID NO: 2188288 - RNA, 13 nt, Human
acccagggccugc

SEQ ID NO: 2188289 - RNA, 12 nt, Human
acccagggccug

SEQ ID NO: 2188290 - RNA, 19 nt, Human
accccacccuuccccuccu

SEQ ID NO: 2188291 - RNA, 19 nt, Human
accccacccucccuggagu

SEQ ID NO: 2188292 - RNA, 15 nt, Human
accccacccuugccc

SEQ ID NO: 2188293 - RNA, 16 nt, Human
accccacccuugccca

SEQ ID NO: 2188294 - RNA, 17 nt, Human
accccacccuugcccac

SEQ ID NO: 2188295 - RNA, 18 nt, Human
accccacccuugcccacc

SEQ ID NO: 2188296 - RNA, 20 nt, Human
accccacccuugcccacccc

SEQ ID NO: 2188297 - RNA, 14 nt, Human
accccacuacacag

SEQ ID NO: 2188298 - RNA, 22 nt, Human
accccacccuugcccaccccac

SEQ ID NO: 2188299 - RNA, 16 nt, Human
ucacucuugccaaccu

SEQ ID NO: 2188300 - RNA, 22 nt, Human
accauggucggaaaacaugcua

SEQ ID NO: 2188301 - RNA, 21 nt, Human
accauguaaagaacauaaaua

SEQ ID NO: 2188302 - RNA, 14 nt, Human
accauguacauagc

SEQ ID NO: 2188303 - RNA, 11 nt, Human
accauguacau

SEQ ID NO: 2188304 - RNA, 17 nt, Human
accauguacaugaagaa

SEQ ID NO: 2188305 - RNA, 17 nt, Human
accauguagaaaauuug

SEQ ID NO: 2188306 - RNA, 18 nt, Human
ucacucuuccugcaagga

SEQ ID NO: 2188307 - RNA, 19 nt, Human
ucacucuuccugcaaggac

SEQ ID NO: 2188308 - RNA, 13 nt, Human
ucacucuuggagc

SEQ ID NO: 2188309 - RNA, 15 nt, Human
ucacuccuaccuggu

SEQ ID NO: 2188310 - RNA, 21 nt, Human
ucacucccuucuaccugccac

SEQ ID NO: 2188311 - RNA, 15 nt, Human
ucacucuuccagaau

SEQ ID NO: 2188312 - RNA, 17 nt, Human
ucacucuuccagaaucc

SEQ ID NO: 2188313 - RNA, 21 nt, Human
ucacucuuccagaaucccaag

SEQ ID NO: 2188314 - RNA, 21 nt, Human
ucacucuuauugcccacgcug

SEQ ID NO: 2188315 - RNA, 23 nt, Human
ucacucuuauugcccacgcugga

SEQ ID NO: 2188316 - RNA, 24 nt, Human
accauucugacucgguuucuccaa

SEQ ID NO: 2188317 - RNA, 21 nt, Human
accauucagugauuacuguca

SEQ ID NO: 2188318 - RNA, 18 nt, Human
accauugaauucuugguu

SEQ ID NO: 2188319 - RNA, 18 nt, Human
accauuaugaagaagaga

SEQ ID NO: 2188320 - RNA, 12 nt, Human
accauuaaaacu

SEQ ID NO: 2188321 - RNA, 21 nt, Human
accauguuugagcucagaccc

SEQ ID NO: 2188322 - RNA, 20 nt, Human
accauguuugagcucagacc

SEQ ID NO: 2188323 - RNA, 13 nt, Human
accauuaaaacug

SEQ ID NO: 2188324 - RNA, 20 nt, Human
accauuaaaacugaagucug

SEQ ID NO: 2188325 - RNA, 21 nt, Human
accauuaaaacugaagucuga

SEQ ID NO: 2188326 - RNA, 22 nt, Human
accauuaaaacugaagucugaa

SEQ ID NO: 2188327 - RNA, 23 nt, Human
accauuaaaacugaagucugaaa

SEQ ID NO: 2188328 - RNA, 22 nt, Human
acccagaccuguuagcagacag

SEQ ID NO: 2188329 - RNA, 20 nt, Human
acccacucuccucugccuca

SEQ ID NO: 2188330 - RNA, 10 nt, Human
acccagaccc

SEQ ID NO: 2188331 - RNA, 13 nt, Human
acccagacccagu

SEQ ID NO: 2188332 - RNA, 14 nt, Human
acccagacccagug

SEQ ID NO: 2188333 - RNA, 15 nt, Human
acccagacccagugg

SEQ ID NO: 2188334 - RNA, 17 nt, Human
acccagagaggaaucag

SEQ ID NO: 2188335 - RNA, 18 nt, Human
acccagagaauauauaca

SEQ ID NO: 2188336 - RNA, 23 nt, Human
acccagagcauuacgugagccag

SEQ ID NO: 2188337 - RNA, 24 nt, Human
acccagagcauuacgugagccagg

SEQ ID NO: 2188338 - RNA, 14 nt, Human
acccagcccauucu

SEQ ID NO: 2188339 - RNA, 15 nt, Human
acccagacucagaca

SEQ ID NO: 2188340 - RNA, 17 nt, Human
acccagagaagccccuu

SEQ ID NO: 2188341 - RNA, 18 nt, Human
acccagagaagccccuuc

SEQ ID NO: 2188342 - RNA, 19 nt, Human
acccagagaagccccuucc

SEQ ID NO: 2188343 - RNA, 22 nt, Human
acccagagaagccccuucccca

SEQ ID NO: 2188344 - RNA, 14 nt, Human
acccagagaauaua

SEQ ID NO: 2188345 - RNA, 16 nt, Human
acccagagaauauaua

SEQ ID NO: 2188346 - RNA, 13 nt, Human
acccacugcucug

SEQ ID NO: 2188347 - RNA, 14 nt, Human
acccacugcucugg

SEQ ID NO: 2188348 - RNA, 15 nt, Human
acccacugcucuggu

SEQ ID NO: 2188349 - RNA, 11 nt, Human
acccacugcuu

SEQ ID NO: 2188350 - RNA, 10 nt, Human
acccacugcu

SEQ ID NO: 2188351 - RNA, 11 nt, Human
acccacugcuc

SEQ ID NO: 2188352 - RNA, 18 nt, Human
acccacucuccucugccu

SEQ ID NO: 2188353 - RNA, 15 nt, Human
acccacucaucagaa

SEQ ID NO: 2188354 - RNA, 13 nt, Human
acccacucagcuc

SEQ ID NO: 2188355 - RNA, 23 nt, Human
acccaccuuguuggagccugcag

SEQ ID NO: 2188356 - RNA, 20 nt, Human
acccacguguaacugucagc

SEQ ID NO: 2188357 - RNA, 21 nt, Human
acccacguucucacacccacc

SEQ ID NO: 2188358 - RNA, 14 nt, Human
accauugucuuguu

SEQ ID NO: 2188359 - RNA, 22 nt, Human
accauuugcauggcuccagaaa

SEQ ID NO: 2188360 - RNA, 23 nt, Human
accauuucuugagguaaaagcau

SEQ ID NO: 2188361 - RNA, 12 nt, Human
ucagaagggagg

SEQ ID NO: 2188362 - RNA, 20 nt, Human
ucagaaggcucuucugacua

SEQ ID NO: 2188363 - RNA, 13 nt, Human
ucagaagggaggc

SEQ ID NO: 2188364 - RNA, 19 nt, Human
ucagaaggagaaggaagga

SEQ ID NO: 2188365 - RNA, 12 nt, Human
ucagaaggcucu

SEQ ID NO: 2188366 - RNA, 20 nt, Human
ucagaaggggaggggagaca

SEQ ID NO: 2188367 - RNA, 16 nt, Human
ucagaagggaggcugg

SEQ ID NO: 2188368 - RNA, 15 nt, Human
ucagaaggggagggg

SEQ ID NO: 2188369 - RNA, 18 nt, Human
ucagaaggagaaggaagg

SEQ ID NO: 2188370 - RNA, 16 nt, Human
ucagaaggagaaggaa

SEQ ID NO: 2188371 - RNA, 14 nt, Human
ucagaaggagaagg

SEQ ID NO: 2188372 - RNA, 13 nt, Human
ucagaaggagaag

SEQ ID NO: 2188373 - RNA, 12 nt, Human
ucagaaggagaa

SEQ ID NO: 2188374 - RNA, 14 nt, Human
ucagaagccuuugg

SEQ ID NO: 2188375 - RNA, 23 nt, Human
ucagaaggagaaggaaggagacu

SEQ ID NO: 2188376 - RNA, 18 nt, Human
ucagaaggcaaaugacuu

SEQ ID NO: 2188377 - RNA, 22 nt, Human
ucagaaggcaaaugacuuugga

SEQ ID NO: 2188378 - RNA, 19 nt, Human
ucagaaggcaaaugacuuu

SEQ ID NO: 2188379 - RNA, 19 nt, Human
ucagaaguuucucagcucc

SEQ ID NO: 2188380 - RNA, 21 nt, Human
ucagaagugagcuuugcugcu

SEQ ID NO: 2188381 - RNA, 19 nt, Human
ucagaagugagcuuugcug

SEQ ID NO: 2188382 - RNA, 15 nt, Human
ucagaagugagcuuu

SEQ ID NO: 2188383 - RNA, 19 nt, Human
ucagaaguuucugccgcag

SEQ ID NO: 2188384 - RNA, 22 nt, Human
ucagaaguuucugccgcagccc

SEQ ID NO: 2188385 - RNA, 23 nt, Human
acccagcccauucucucuccugu

SEQ ID NO: 2188386 - RNA, 22 nt, Human
acccagcccauucucucuccug

SEQ ID NO: 2188387 - RNA, 14 nt, Human
acccagccccaggg

SEQ ID NO: 2188388 - RNA, 19 nt, Human
acccagcccauucucucuc

SEQ ID NO: 2188389 - RNA, 19 nt, Human
acccagaguuuuuauguag

SEQ ID NO: 2188390 - RNA, 22 nt, Human
acccagaggaaggggccagagg

SEQ ID NO: 2188391 - RNA, 16 nt, Human
acccagccccuugaga

SEQ ID NO: 2188392 - RNA, 17 nt, Human
acccagccccuugagaa

SEQ ID NO: 2188393 - RNA, 20 nt, Human
acccagccccuugagaaacc

SEQ ID NO: 2188394 - RNA, 21 nt, Human
acccagccccuugagaaaccu

SEQ ID NO: 2188395 - RNA, 16 nt, Human
acccagcccucauccc

SEQ ID NO: 2188396 - RNA, 15 nt, Human
acccagcccucaucc

SEQ ID NO: 2188397 - RNA, 12 nt, Human
acccagcccugg

SEQ ID NO: 2188398 - RNA, 13 nt, Human
acccagcccuggu

SEQ ID NO: 2188399 - RNA, 14 nt, Human
acccagcccugguc

SEQ ID NO: 2188400 - RNA, 15 nt, Human
acccagcccuggucu

SEQ ID NO: 2188401 - RNA, 16 nt, Human
acccagcccuggucuc

SEQ ID NO: 2188402 - RNA, 19 nt, Human
acccagcccuggucucagc

SEQ ID NO: 2188403 - RNA, 21 nt, Human
acccagcccuggucucagcag

SEQ ID NO: 2188404 - RNA, 13 nt, Human
acccagccgcugc

SEQ ID NO: 2188405 - RNA, 14 nt, Human
acccagccgcugcc

SEQ ID NO: 2188406 - RNA, 16 nt, Human
acccagccgcugcccg

SEQ ID NO: 2188407 - RNA, 18 nt, Human
acccagccgcugcccggc

SEQ ID NO: 2188408 - RNA, 12 nt, Human
acccagccucag

SEQ ID NO: 2188409 - RNA, 20 nt, Human
ucagaagccugaggcuggga

SEQ ID NO: 2188410 - RNA, 15 nt, Human
ucagaagccugaggc

SEQ ID NO: 2188411 - RNA, 13 nt, Human
ucagaagccugag

SEQ ID NO: 2188412 - RNA, 16 nt, Human
ucagaagccucugggu

SEQ ID NO: 2188413 - RNA, 14 nt, Human
ucagaagauaacuu

SEQ ID NO: 2188414 - RNA, 13 nt, Human
acccagccucagu

SEQ ID NO: 2188415 - RNA, 17 nt, Human
acccagccucaguccuc

SEQ ID NO: 2188416 - RNA, 12 nt, Human
ucagaagauaac

SEQ ID NO: 2188417 - RNA, 14 nt, Human
ucagaagacacuga

SEQ ID NO: 2188418 - RNA, 17 nt, Human
ucagaaucucucuucuu

SEQ ID NO: 2188419 - RNA, 19 nt, Human
ucagaaucucaaauaacua

SEQ ID NO: 2188420 - RNA, 18 nt, Human
ucagaaucucaaauaacu

SEQ ID NO: 2188421 - RNA, 21 nt, Human
ucagagacuccugcaggcagc

SEQ ID NO: 2188422 - RNA, 16 nt, Human
ucagagaggccuuuug

SEQ ID NO: 2188423 - RNA, 16 nt, Human
ucagagacuccugcag

SEQ ID NO: 2188424 - RNA, 17 nt, Human
ucagagacuccugcagg

SEQ ID NO: 2188425 - RNA, 20 nt, Human
ucagagacuccugcaggcag

SEQ ID NO: 2188426 - RNA, 12 nt, Human
ucagagccugca

SEQ ID NO: 2188427 - RNA, 23 nt, Human
ucagagagggugggagugggccc

SEQ ID NO: 2188428 - RNA, 16 nt, Human
ucagagagggugggag

SEQ ID NO: 2188429 - RNA, 21 nt, Human
ucagagagggugggagugggc

SEQ ID NO: 2188430 - RNA, 13 nt, Human
ucagagccugcag

SEQ ID NO: 2188431 - RNA, 14 nt, Human
ucagagccugcagu

SEQ ID NO: 2188432 - RNA, 15 nt, Human
ucagagccugcaguu

SEQ ID NO: 2188433 - RNA, 18 nt, Human
ucagagccugcaguuauu

SEQ ID NO: 2188434 - RNA, 20 nt, Human
ucacuaccuccucagggaug

SEQ ID NO: 2188435 - RNA, 19 nt, Human
ucacuacucacagucucuu

SEQ ID NO: 2188436 - RNA, 21 nt, Human
ucaccuucguuuacuaugccu

SEQ ID NO: 2188437 - RNA, 14 nt, Human
ucacuaccuccuca

SEQ ID NO: 2188438 - RNA, 15 nt, Human
ucacuaccuccucag

SEQ ID NO: 2188439 - RNA, 16 nt, Human
ucacuaccuccucagg

SEQ ID NO: 2188440 - RNA, 18 nt, Human
ucacuaccuccucaggga

SEQ ID NO: 2188441 - RNA, 19 nt, Human
ucacuaccuccucagggau

SEQ ID NO: 2188442 - RNA, 22 nt, Human
ucacuacucacagucucuuuaa

SEQ ID NO: 2188443 - RNA, 21 nt, Human
ucacuacucacagucucuuua

SEQ ID NO: 2188444 - RNA, 12 nt, Human
ucacuacugcag

SEQ ID NO: 2188445 - RNA, 17 nt, Human
ucacuagauggcgagca

SEQ ID NO: 2188446 - RNA, 14 nt, Human
ucacuacugcaguc

SEQ ID NO: 2188447 - RNA, 14 nt, Human
ucacuagccaugau

SEQ ID NO: 2188448 - RNA, 19 nt, Human
ucacuaggcccccacuugc

SEQ ID NO: 2188449 - RNA, 21 nt, Human
ucacuaggcccccacuugccu

SEQ ID NO: 2188450 - RNA, 20 nt, Human
ucaccuuaggcagggaagug

SEQ ID NO: 2188451 - RNA, 18 nt, Human
ucaccuuaggcagggaag

SEQ ID NO: 2188452 - RNA, 15 nt, Human
ucaccuuaggcaggg

SEQ ID NO: 2188453 - RNA, 21 nt, Human
ucaccuguuuuuaagcuguuu

SEQ ID NO: 2188454 - RNA, 22 nt, Human
ucaccuguuuuuaagcuguuuc

SEQ ID NO: 2188455 - RNA, 23 nt, Human
ucaccugcccagaucccagaagg

SEQ ID NO: 2188456 - RNA, 14 nt, Human
ucaccuguugcuua

SEQ ID NO: 2188457 - RNA, 18 nt, Human
ucaccuguugcuuacaau

SEQ ID NO: 2188458 - RNA, 19 nt, Human
ucaccuguugcuuacaauu

SEQ ID NO: 2188459 - RNA, 21 nt, Human
ucaccugugcuucgggcccuu

SEQ ID NO: 2188460 - RNA, 20 nt, Human
ucaccugugcuucgggcccu

SEQ ID NO: 2188461 - RNA, 18 nt, Human
ucaccuguuuuuaagcug

SEQ ID NO: 2188462 - RNA, 20 nt, Human
ucaccuguugcuuacaauuu

SEQ ID NO: 2188463 - RNA, 21 nt, Human
ucaccuguugcuuacaauuuu

SEQ ID NO: 2188464 - RNA, 19 nt, Human
ucaccuguuuuuaagcugu

SEQ ID NO: 2188465 - RNA, 20 nt, Human
ucaccuguuuuuaagcuguu

SEQ ID NO: 2188466 - RNA, 23 nt, Human
ucacuccggugugccugcagccc

SEQ ID NO: 2188467 - RNA, 22 nt, Human
ucacuccggugugccugcagcc

SEQ ID NO: 2188468 - RNA, 21 nt, Human
ucacuccggugugccugcagc

SEQ ID NO: 2188469 - RNA, 20 nt, Human
ucacuccggugugccugcag

SEQ ID NO: 2188470 - RNA, 19 nt, Human
ucacuccggugugccugca

SEQ ID NO: 2188471 - RNA, 17 nt, Human
ucacuccggugugccug

SEQ ID NO: 2188472 - RNA, 14 nt, Human
ucacuccggugugc

SEQ ID NO: 2188473 - RNA, 14 nt, Human
ucacucccagucca

SEQ ID NO: 2188474 - RNA, 22 nt, Human
ucacuaggcccccacuugccuc

SEQ ID NO: 2188475 - RNA, 15 nt, Human
ucacucccuccauca

SEQ ID NO: 2188476 - RNA, 13 nt, Human
ucacuccccucca

SEQ ID NO: 2188477 - RNA, 15 nt, Human
ucacucccuucuacc

SEQ ID NO: 2188478 - RNA, 19 nt, Human
ucacucccuucuaccugcc

SEQ ID NO: 2188479 - RNA, 20 nt, Human
ucacucccuucuaccugcca

SEQ ID NO: 2188480 - RNA, 18 nt, Human
ucacuauguugcccaggc

SEQ ID NO: 2188481 - RNA, 17 nt, Human
ucacuauguugcccagg

SEQ ID NO: 2188482 - RNA, 19 nt, Human
ucacuauguugcccaggca

SEQ ID NO: 2188483 - RNA, 20 nt, Human
ucacuauguugcccaggcag

SEQ ID NO: 2188484 - RNA, 18 nt, Human
accaggcuugccugcagg

SEQ ID NO: 2188485 - RNA, 17 nt, Human
accaggcuggcgcagcc

SEQ ID NO: 2188486 - RNA, 19 nt, Human
accaggcuggcgcagccaa

SEQ ID NO: 2188487 - RNA, 20 nt, Human
accaggcuggcgcagccaag

SEQ ID NO: 2188488 - RNA, 22 nt, Human
accaggcuggcgcagccaaggc

SEQ ID NO: 2188489 - RNA, 14 nt, Human
accagggacugagg

SEQ ID NO: 2188490 - RNA, 23 nt, Human
accagccucucuugguuuccuuc

SEQ ID NO: 2188491 - RNA, 16 nt, Human
accaggccguccuccc

SEQ ID NO: 2188492 - RNA, 19 nt, Human
accagccucgucuucauua

SEQ ID NO: 2188493 - RNA, 18 nt, Human
accaggccguccucccgg

SEQ ID NO: 2188494 - RNA, 20 nt, Human
accagccuccguauuucaga

SEQ ID NO: 2188495 - RNA, 17 nt, Human
accagccucgucuucau

SEQ ID NO: 2188496 - RNA, 23 nt, Human
accaggcgagagacuuguggccu

SEQ ID NO: 2188497 - RNA, 12 nt, Human
accaggccuggg

SEQ ID NO: 2188498 - RNA, 19 nt, Human
accaggccguccucccggg

SEQ ID NO: 2188499 - RNA, 20 nt, Human
accaggccguccucccgggc

SEQ ID NO: 2188500 - RNA, 19 nt, Human
accaggcugcucagggcug

SEQ ID NO: 2188501 - RNA, 16 nt, Human
accaggcuggcgcagc

SEQ ID NO: 2188502 - RNA, 17 nt, Human
accagagcccaccuugg

SEQ ID NO: 2188503 - RNA, 21 nt, Human
accagacuguggagaaauaaa

SEQ ID NO: 2188504 - RNA, 13 nt, Human
accagacugugga

SEQ ID NO: 2188505 - RNA, 18 nt, Human
accagacuguggagaaau

SEQ ID NO: 2188506 - RNA, 20 nt, Human
accagacuguggagaaauaa

SEQ ID NO: 2188507 - RNA, 14 nt, Human
accagccuccaugc

SEQ ID NO: 2188508 - RNA, 19 nt, Human
accagccuccaugcugccu

SEQ ID NO: 2188509 - RNA, 20 nt, Human
accagccuccaugcugccuc

SEQ ID NO: 2188510 - RNA, 21 nt, Human
accagccuccaugcugccucc

SEQ ID NO: 2188511 - RNA, 20 nt, Human
ucaccucuaaaacaguccuu

SEQ ID NO: 2188512 - RNA, 19 nt, Human
accaggcuugccugcaggc

SEQ ID NO: 2188513 - RNA, 15 nt, Human
ucaccucucccuugg

SEQ ID NO: 2188514 - RNA, 15 nt, Human
ucaccucugccucaa

SEQ ID NO: 2188515 - RNA, 14 nt, Human
ucaccucugccuca

SEQ ID NO: 2188516 - RNA, 13 nt, Human
ucaccucugccuc

SEQ ID NO: 2188517 - RNA, 12 nt, Human
ucaccucugccu

SEQ ID NO: 2188518 - RNA, 23 nt, Human
accaggcuggcgcagccaaggcc

SEQ ID NO: 2188519 - RNA, 19 nt, Human
ucaccucuggacuggcuag

SEQ ID NO: 2188520 - RNA, 18 nt, Human
ucaccucuggacuggcua

SEQ ID NO: 2188521 - RNA, 16 nt, Human
ucaccugaagacucau

SEQ ID NO: 2188522 - RNA, 17 nt, Human
ucaccucuuaaagaaaa

SEQ ID NO: 2188523 - RNA, 17 nt, Human
ucaccugaggucgggag

SEQ ID NO: 2188524 - RNA, 18 nt, Human
ucaccugauucaacuaaa

SEQ ID NO: 2188525 - RNA, 12 nt, Human
ucaccugauuca

SEQ ID NO: 2188526 - RNA, 19 nt, Human
ucaccugagucacccuacc

SEQ ID NO: 2188527 - RNA, 13 nt, Human
ucaccugccccuc

SEQ ID NO: 2188528 - RNA, 15 nt, Human
ucaccugccccucaa

SEQ ID NO: 2188529 - RNA, 16 nt, Human
ucaccugccccaacuc

SEQ ID NO: 2188530 - RNA, 21 nt, Human
ucaccugauucaacuaaaaaa

SEQ ID NO: 2188531 - RNA, 19 nt, Human
ucaccugauucaacuaaaa

SEQ ID NO: 2188532 - RNA, 14 nt, Human
accacuggccacca

SEQ ID NO: 2188533 - RNA, 12 nt, Human
accacuggccac

SEQ ID NO: 2188534 - RNA, 23 nt, Human
accacugcucugaugaagaggag

SEQ ID NO: 2188535 - RNA, 17 nt, Human
accacugcucugaugaa

SEQ ID NO: 2188536 - RNA, 15 nt, Human
accacugcucugaug

SEQ ID NO: 2188537 - RNA, 18 nt, Human
accacugcacuccagccu

SEQ ID NO: 2188538 - RNA, 21 nt, Human
accacugcacuccagccuggg

SEQ ID NO: 2188539 - RNA, 20 nt, Human
accacugcacuccagccugg

SEQ ID NO: 2188540 - RNA, 17 nt, Human
accacugcacuccagcc

SEQ ID NO: 2188541 - RNA, 17 nt, Human
ucaccccggccaccugc

SEQ ID NO: 2188542 - RNA, 18 nt, Human
ucaccccggccaccugcg

SEQ ID NO: 2188543 - RNA, 20 nt, Human
accacuguaaaaugaaauua

SEQ ID NO: 2188544 - RNA, 13 nt, Human
accacugucuucu

SEQ ID NO: 2188545 - RNA, 19 nt, Human
accacuguaaaaugaaauu

SEQ ID NO: 2188546 - RNA, 21 nt, Human
accacuggccaccaggcuggc

SEQ ID NO: 2188547 - RNA, 16 nt, Human
accacuguguauuuaa

SEQ ID NO: 2188548 - RNA, 16 nt, Human
accacuggucuguagg

SEQ ID NO: 2188549 - RNA, 19 nt, Human
accacuggccaccaggcug

SEQ ID NO: 2188550 - RNA, 20 nt, Human
accacuggccaccaggcugg

SEQ ID NO: 2188551 - RNA, 15 nt, Human
accacuggccaccag

SEQ ID NO: 2188552 - RNA, 16 nt, Human
accacuggccaccagg

SEQ ID NO: 2188553 - RNA, 17 nt, Human
accacuggccaccaggc

SEQ ID NO: 2188554 - RNA, 18 nt, Human
accacuggccaccaggcu

SEQ ID NO: 2188555 - RNA, 17 nt, Human
accacuucuuuuauaac

SEQ ID NO: 2188556 - RNA, 16 nt, Human
accacuucuuuuauaa

SEQ ID NO: 2188557 - RNA, 15 nt, Human
accacuucuuuuaua

SEQ ID NO: 2188558 - RNA, 13 nt, Human
accacuucgaaac

SEQ ID NO: 2188559 - RNA, 13 nt, Human
accacuucauucu

SEQ ID NO: 2188560 - RNA, 17 nt, Human
accacuucauucuugaa

SEQ ID NO: 2188561 - RNA, 15 nt, Human
accacugucuucuuc

SEQ ID NO: 2188562 - RNA, 21 nt, Human
accacuuuuguucuugguuug

SEQ ID NO: 2188563 - RNA, 16 nt, Human
accacuuuuguucuug

SEQ ID NO: 2188564 - RNA, 15 nt, Human
accacuuuuguucuu

SEQ ID NO: 2188565 - RNA, 18 nt, Human
accacuuguguuuugcaa

SEQ ID NO: 2188566 - RNA, 14 nt, Human
accagaagccaaag

SEQ ID NO: 2188567 - RNA, 15 nt, Human
accagaagcaacaga

SEQ ID NO: 2188568 - RNA, 15 nt, Human
accagacacccagga

SEQ ID NO: 2188569 - RNA, 14 nt, Human
accagacacccagg

SEQ ID NO: 2188570 - RNA, 13 nt, Human
accagaagcccag

SEQ ID NO: 2188571 - RNA, 16 nt, Human
accagaagcccagaau

SEQ ID NO: 2188572 - RNA, 14 nt, Human
accagaagcccaga

SEQ ID NO: 2188573 - RNA, 13 nt, Human
accagaacaaggu

SEQ ID NO: 2188574 - RNA, 22 nt, Human
accacuuuuguucuugguuugu

SEQ ID NO: 2188575 - RNA, 12 nt, Human
accagagcccac

SEQ ID NO: 2188576 - RNA, 14 nt, Human
accagagcccaccu

SEQ ID NO: 2188577 - RNA, 16 nt, Human
accagagcccaccuug

SEQ ID NO: 2188578 - RNA, 20 nt, Human
accagacgguucaccagccu

SEQ ID NO: 2188579 - RNA, 19 nt, Human
accagacgguucaccagcc

SEQ ID NO: 2188580 - RNA, 17 nt, Human
accagacacccaggacu

SEQ ID NO: 2188581 - RNA, 16 nt, Human
accagacacccaggac

SEQ ID NO: 2188582 - RNA, 14 nt, Human
accagacaccuuga

SEQ ID NO: 2188583 - RNA, 11 nt, Human
accagacaggu

SEQ ID NO: 2188584 - RNA, 16 nt, Human
accaauugguuaaucu

SEQ ID NO: 2188585 - RNA, 16 nt, Human
accaauucaacccuuu

SEQ ID NO: 2188586 - RNA, 14 nt, Human
accaauugccaaag

SEQ ID NO: 2188587 - RNA, 13 nt, Human
accaaucauuuua

SEQ ID NO: 2188588 - RNA, 14 nt, Human
accacaaaaaugaa

SEQ ID NO: 2188589 - RNA, 15 nt, Human
accacacccagccuc

SEQ ID NO: 2188590 - RNA, 16 nt, Human
accacacccagccuca

SEQ ID NO: 2188591 - RNA, 17 nt, Human
accacacccagccucag

SEQ ID NO: 2188592 - RNA, 22 nt, Human
accacacccagccucaguccuc

SEQ ID NO: 2188593 - RNA, 17 nt, Human
accaauugauuuuaaac

SEQ ID NO: 2188594 - RNA, 14 nt, Human
accacaaaaauuga

SEQ ID NO: 2188595 - RNA, 16 nt, Human
accacacuggacuccg

SEQ ID NO: 2188596 - RNA, 15 nt, Human
ucaauuccucuggga

SEQ ID NO: 2188597 - RNA, 13 nt, Human
accacacuggacu

SEQ ID NO: 2188598 - RNA, 22 nt, Human
accacaccucccugaaccaucc

SEQ ID NO: 2188599 - RNA, 17 nt, Human
ucaauuccugggcccca

SEQ ID NO: 2188600 - RNA, 12 nt, Human
ucaauucucaaa

SEQ ID NO: 2188601 - RNA, 13 nt, Human
ucaauuccugggc

SEQ ID NO: 2188602 - RNA, 16 nt, Human
ucaauuccucugggaa

SEQ ID NO: 2188603 - RNA, 15 nt, Human
accacaccucccuga

SEQ ID NO: 2188604 - RNA, 16 nt, Human
accacaccgcagaagc

SEQ ID NO: 2188605 - RNA, 17 nt, Human
accacacccuguacugu

SEQ ID NO: 2188606 - RNA, 24 nt, Human
accacacccagccucaguccuccc

SEQ ID NO: 2188607 - RNA, 13 nt, Human
accacacccugua

SEQ ID NO: 2188608 - RNA, 14 nt, Human
accacacuccagcu

SEQ ID NO: 2188609 - RNA, 22 nt, Human
accacacguaaugaaacuugga

SEQ ID NO: 2188610 - RNA, 16 nt, Human
accacaccucccugaa

SEQ ID NO: 2188611 - RNA, 20 nt, Human
ucaauuuuugguugaauaaa

SEQ ID NO: 2188612 - RNA, 11 nt, Human
ucacaaauaaa

SEQ ID NO: 2188613 - RNA, 23 nt, Human
ucaauuuuucuuauuucauuucu

SEQ ID NO: 2188614 - RNA, 20 nt, Human
ucaauuuuucuuauuucauu

SEQ ID NO: 2188615 - RNA, 15 nt, Human
ucaauucuugccaaa

SEQ ID NO: 2188616 - RNA, 19 nt, Human
ucaauucuucccuaucuuu

SEQ ID NO: 2188617 - RNA, 17 nt, Human
ucaauucuucccuaucu

SEQ ID NO: 2188618 - RNA, 23 nt, Human
ucaauucuucccuaucuuugcca

SEQ ID NO: 2188619 - RNA, 16 nt, Human
ucaauuuuaucccuca

SEQ ID NO: 2188620 - RNA, 21 nt, Human
ucaauuuuaucccucaccugu

SEQ ID NO: 2188621 - RNA, 22 nt, Human
ucaauuuuaucccucaccugua

SEQ ID NO: 2188622 - RNA, 18 nt, Human
accaauauuguacaguuu

SEQ ID NO: 2188623 - RNA, 18 nt, Human
accaacaucccauugccc

SEQ ID NO: 2188624 - RNA, 19 nt, Human
accaauauuguacaguuuu

SEQ ID NO: 2188625 - RNA, 15 nt, Human
accaauauuguacag

SEQ ID NO: 2188626 - RNA, 14 nt, Human
accaauauuguaca

SEQ ID NO: 2188627 - RNA, 16 nt, Human
accaauauuguacagu

SEQ ID NO: 2188628 - RNA, 17 nt, Human
accaauauuguacaguu

SEQ ID NO: 2188629 - RNA, 16 nt, Human
accaauauuuguagaa

SEQ ID NO: 2188630 - RNA, 13 nt, Human
accaauauuugua

SEQ ID NO: 2188631 - RNA, 11 nt, Human
accaauauuug

SEQ ID NO: 2188632 - RNA, 13 nt, Human
accaaucaugaau

SEQ ID NO: 2188633 - RNA, 15 nt, Human
accaauguucucucu

SEQ ID NO: 2188634 - RNA, 15 nt, Human
accaaucaugaauua

SEQ ID NO: 2188635 - RNA, 23 nt, Human
ucaagugaaaaaggaggaagaga

SEQ ID NO: 2188636 - RNA, 19 nt, Human
ucaagugaaucuaaaagcu

SEQ ID NO: 2188637 - RNA, 15 nt, Human
ucaagugaaucuaaa

SEQ ID NO: 2188638 - RNA, 15 nt, Human
ucaagucacucccaa

SEQ ID NO: 2188639 - RNA, 17 nt, Human
ucaagugauucucaugc

SEQ ID NO: 2188640 - RNA, 15 nt, Human
ucaagucaccuccuu

SEQ ID NO: 2188641 - RNA, 15 nt, Human
ucaagucaaauuaau

SEQ ID NO: 2188642 - RNA, 15 nt, Human
ucaagugaaaaagga

SEQ ID NO: 2188643 - RNA, 17 nt, Human
accaacauacucccauc

SEQ ID NO: 2188644 - RNA, 20 nt, Human
ucaagugauucucaugccuc

SEQ ID NO: 2188645 - RNA, 19 nt, Human
accaacauacucccaucug

SEQ ID NO: 2188646 - RNA, 21 nt, Human
accaacauacucccaucugug

SEQ ID NO: 2188647 - RNA, 22 nt, Human
accaacauacucccaucuguga

SEQ ID NO: 2188648 - RNA, 12 nt, Human
ucaccccacccu

SEQ ID NO: 2188649 - RNA, 12 nt, Human
ucacccaugugc

SEQ ID NO: 2188650 - RNA, 22 nt, Human
ucaccccacuuaucccucucca

SEQ ID NO: 2188651 - RNA, 13 nt, Human
ucaccccagcccc

SEQ ID NO: 2188652 - RNA, 14 nt, Human
ucaccccagcccca

SEQ ID NO: 2188653 - RNA, 20 nt, Human
ucaccccagccccaaaacuc

SEQ ID NO: 2188654 - RNA, 13 nt, Human
ucaccccacccuu

SEQ ID NO: 2188655 - RNA, 12 nt, Human
ucaccccagggc

SEQ ID NO: 2188656 - RNA, 15 nt, Human
ucaccccagggccug

SEQ ID NO: 2188657 - RNA, 13 nt, Human
ucaccccagggcc

SEQ ID NO: 2188658 - RNA, 21 nt, Human
ucaccccagggccugagccug

SEQ ID NO: 2188659 - RNA, 20 nt, Human
ucaccccagggccugagccu

SEQ ID NO: 2188660 - RNA, 19 nt, Human
ucaccccagggccugagcc

SEQ ID NO: 2188661 - RNA, 16 nt, Human
ucaccccagggccuga

SEQ ID NO: 2188662 - RNA, 13 nt, Human
ucaccccauccca

SEQ ID NO: 2188663 - RNA, 12 nt, Human
ucaccccauccc

SEQ ID NO: 2188664 - RNA, 22 nt, Human
ucaccccaccccaccccaccuc

SEQ ID NO: 2188665 - RNA, 21 nt, Human
ucaccccaguggccacucagc

SEQ ID NO: 2188666 - RNA, 15 nt, Human
ucaccccggccaccu

SEQ ID NO: 2188667 - RNA, 16 nt, Human
ucaccaucucaggcca

SEQ ID NO: 2188668 - RNA, 15 nt, Human
ucaccaucucaggcc

SEQ ID NO: 2188669 - RNA, 16 nt, Human
ucacccagccccaggg

SEQ ID NO: 2188670 - RNA, 17 nt, Human
ucacccagcuaaucugu

SEQ ID NO: 2188671 - RNA, 21 nt, Human
ucacccagcuaaucuguaggg

SEQ ID NO: 2188672 - RNA, 17 nt, Human
ucacccaugaagacagg

SEQ ID NO: 2188673 - RNA, 17 nt, Human
ucaccaguguccccucc

SEQ ID NO: 2188674 - RNA, 20 nt, Human
ucaccaguguccccuccacu

SEQ ID NO: 2188675 - RNA, 14 nt, Human
ucaccaucucaggc

SEQ ID NO: 2188676 - RNA, 21 nt, Human
ucaccaguguccccuccacug

SEQ ID NO: 2188677 - RNA, 19 nt, Human
ucaccagugcgauucugga

SEQ ID NO: 2188678 - RNA, 13 nt, Human
ucaccaguguccc

SEQ ID NO: 2188679 - RNA, 22 nt, Human
ucaccaggggcaggcacagcac

SEQ ID NO: 2188680 - RNA, 22 nt, Human
ucaccaggaauguuaaagucag

SEQ ID NO: 2188681 - RNA, 20 nt, Human
ucaccagcugccucuucugu

SEQ ID NO: 2188682 - RNA, 15 nt, Human
ucaccagcugccucu

SEQ ID NO: 2188683 - RNA, 17 nt, Human
ucaccagcugccucuuc

SEQ ID NO: 2188684 - RNA, 20 nt, Human
ucacaugaccacauagcaug

SEQ ID NO: 2188685 - RNA, 18 nt, Human
ucacaugaccacauagca

SEQ ID NO: 2188686 - RNA, 23 nt, Human
ucacaugagcuauuuccauucca

SEQ ID NO: 2188687 - RNA, 18 nt, Human
ucaccaggggcaggcaca

SEQ ID NO: 2188688 - RNA, 19 nt, Human
ucaccaggggcaggcacag

SEQ ID NO: 2188689 - RNA, 21 nt, Human
ucaccaggggcaggcacagca

SEQ ID NO: 2188690 - RNA, 15 nt, Human
ucaccaggggcaggc

SEQ ID NO: 2188691 - RNA, 17 nt, Human
ucacaucuuucacacuu

SEQ ID NO: 2188692 - RNA, 14 nt, Human
ucacaucuuucaca

SEQ ID NO: 2188693 - RNA, 15 nt, Human
ucacaucuuggcaca

SEQ ID NO: 2188694 - RNA, 22 nt, Human
ucacaucuuucacacuuccacc

SEQ ID NO: 2188695 - RNA, 20 nt, Human
ucacaucuuucacacuucca

SEQ ID NO: 2188696 - RNA, 21 nt, Human
ucacaugaacauacuggcugg

SEQ ID NO: 2188697 - RNA, 13 nt, Human
ucacaugaccaca

SEQ ID NO: 2188698 - RNA, 14 nt, Human
ucacaugaccacau

SEQ ID NO: 2188699 - RNA, 14 nt, Human
ucacaguguuucga

SEQ ID NO: 2188700 - RNA, 13 nt, Human
ucacacucugggu

SEQ ID NO: 2188701 - RNA, 11 nt, Human
ucacaguguuu

SEQ ID NO: 2188702 - RNA, 14 nt, Human
ucacaguguuugca

SEQ ID NO: 2188703 - RNA, 18 nt, Human
ucacaguguuugcaaugg

SEQ ID NO: 2188704 - RNA, 22 nt, Human
ucacaguguuugcaaugguguu

SEQ ID NO: 2188705 - RNA, 23 nt, Human
ucacaguguuugcaaugguguug

SEQ ID NO: 2188706 - RNA, 17 nt, Human
ucacaguguugcccagg

SEQ ID NO: 2188707 - RNA, 23 nt, Human
ucacacugagaauguaagaacua

SEQ ID NO: 2188708 - RNA, 20 nt, Human
ucacacugagaauguaagaa

SEQ ID NO: 2188709 - RNA, 21 nt, Human
ucacacugagaauguaagaac

SEQ ID NO: 2188710 - RNA, 11 nt, Human
ucacacugaga

SEQ ID NO: 2188711 - RNA, 16 nt, Human
ucacacucucacaugu

SEQ ID NO: 2188712 - RNA, 17 nt, Human
ucacacucucacauguu

SEQ ID NO: 2188713 - RNA, 12 nt, Human
ucacacugagaa

SEQ ID NO: 2188714 - RNA, 19 nt, Human
ucacacugagaauguaaga

SEQ ID NO: 2188715 - RNA, 17 nt, Human
ucacacgggggcagcug

SEQ ID NO: 2188716 - RNA, 18 nt, Human
ucacacgggggcagcuga

SEQ ID NO: 2188717 - RNA, 17 nt, Human
ucacacgggguauuuua

SEQ ID NO: 2188718 - RNA, 22 nt, Human
ucacacgucuggcuucacagau

SEQ ID NO: 2188719 - RNA, 19 nt, Human
ucacaccuguaaucccaac

SEQ ID NO: 2188720 - RNA, 19 nt, Human
ucacacgaggggccccgug

SEQ ID NO: 2188721 - RNA, 12 nt, Human
ucacaacagauc

SEQ ID NO: 2188722 - RNA, 21 nt, Human
ucacaacagauuauuaccuua

SEQ ID NO: 2188723 - RNA, 16 nt, Human
ucacaacaaccugguc

SEQ ID NO: 2188724 - RNA, 20 nt, Human
ucacaaauccuaaaagaagc

SEQ ID NO: 2188725 - RNA, 12 nt, Human
ucacauaucugu

SEQ ID NO: 2188726 - RNA, 15 nt, Human
ucacauaucugucau

SEQ ID NO: 2188727 - RNA, 17 nt, Human
ucacauccuguguuucu

SEQ ID NO: 2188728 - RNA, 18 nt, Human
ucacauccuggccuggca

SEQ ID NO: 2188729 - RNA, 19 nt, Human
ucacauccuggccuggcac

SEQ ID NO: 2188730 - RNA, 10 nt, Human
ucacauccug

SEQ ID NO: 2188731 - RNA, 11 nt, Human
ucacauccugg

SEQ ID NO: 2188732 - RNA, 15 nt, Human
ucacauccuggccug

SEQ ID NO: 2188733 - RNA, 19 nt, Human
ucacauccuguguuucuag

SEQ ID NO: 2188734 - RNA, 18 nt, Human
ucacauccuguguuucua

SEQ ID NO: 2188735 - RNA, 23 nt, Human
ucacauccuggccuggcacauca

SEQ ID NO: 2188736 - RNA, 22 nt, Human
ucacaguuccucgcccuggguc

SEQ ID NO: 2188737 - RNA, 21 nt, Human
ucacaguuccucgcccugggu

SEQ ID NO: 2188738 - RNA, 20 nt, Human
ucacaguuccucgcccuggg

SEQ ID NO: 2188739 - RNA, 19 nt, Human
ucacaguuccucgcccugg

SEQ ID NO: 2188740 - RNA, 18 nt, Human
ucacaguuccucgcccug

SEQ ID NO: 2188741 - RNA, 17 nt, Human
ucacaguuccucgcccu

SEQ ID NO: 2188742 - RNA, 16 nt, Human
ucacaguuccucgccc

SEQ ID NO: 2188743 - RNA, 14 nt, Human
ucacaguuccucgc

SEQ ID NO: 2188744 - RNA, 13 nt, Human
ucacaguuccucg

SEQ ID NO: 2188745 - RNA, 22 nt, Human
ucacaguuacccuaaacucucu

SEQ ID NO: 2188746 - RNA, 15 nt, Human
ucacaguucucuccu

SEQ ID NO: 2188747 - RNA, 21 nt, Human
acaauggcuaauucccagagu

SEQ ID NO: 2188748 - RNA, 17 nt, Human
acaauggggauguugug

SEQ ID NO: 2188749 - RNA, 18 nt, Human
acaaugcuguauuuuaaa

SEQ ID NO: 2188750 - RNA, 15 nt, Human
acaaugguuuucuug

SEQ ID NO: 2188751 - RNA, 14 nt, Human
acaaugcuguauuu

SEQ ID NO: 2188752 - RNA, 17 nt, Human
acaaugcuguauuuuaa

SEQ ID NO: 2188753 - RNA, 19 nt, Human
uagcuuagaccucagccug

SEQ ID NO: 2188754 - RNA, 18 nt, Human
uagcuuagaccucagccu

SEQ ID NO: 2188755 - RNA, 17 nt, Human
uagcuuagaccucagcc

SEQ ID NO: 2188756 - RNA, 16 nt, Human
uagcuuagaccucagc

SEQ ID NO: 2188757 - RNA, 23 nt, Human
uagcuuagaccucagccugugcu

SEQ ID NO: 2188758 - RNA, 20 nt, Human
uagcuuagaccucagccugu

SEQ ID NO: 2188759 - RNA, 13 nt, Human
uagcuuagagccu

SEQ ID NO: 2188760 - RNA, 17 nt, Human
uagcuuagagccucccu

SEQ ID NO: 2188761 - RNA, 19 nt, Human
uagcuuagagccucccuca

SEQ ID NO: 2188762 - RNA, 17 nt, Human
acaaugcugauuuggug

SEQ ID NO: 2188763 - RNA, 21 nt, Human
acaaugguuuucuuguguguu

SEQ ID NO: 2188764 - RNA, 14 nt, Human
acacaacuauauug

SEQ ID NO: 2188765 - RNA, 17 nt, Human
acacaacuauauuguuu

SEQ ID NO: 2188766 - RNA, 18 nt, Human
acacaacuauuuuuccaa

SEQ ID NO: 2188767 - RNA, 19 nt, Human
acaauguauuuauuuaaaa

SEQ ID NO: 2188768 - RNA, 14 nt, Human
acaauguauuuauu

SEQ ID NO: 2188769 - RNA, 17 nt, Human
acaauguauuuauuuaa

SEQ ID NO: 2188770 - RNA, 22 nt, Human
acacaagaagaagggcacccua

SEQ ID NO: 2188771 - RNA, 16 nt, Human
acacacacagaaaaua

SEQ ID NO: 2188772 - RNA, 16 nt, Human
acacacacacgcacgc

SEQ ID NO: 2188773 - RNA, 15 nt, Human
acacacacagaaaau

SEQ ID NO: 2188774 - RNA, 14 nt, Human
acacacacagaaaa

SEQ ID NO: 2188775 - RNA, 13 nt, Human
acacacacagaaa

SEQ ID NO: 2188776 - RNA, 12 nt, Human
acacacacagaa

SEQ ID NO: 2188777 - RNA, 17 nt, Human
acacacacacaugcaua

SEQ ID NO: 2188778 - RNA, 13 nt, Human
acacacacacgca

SEQ ID NO: 2188779 - RNA, 14 nt, Human
acacacacacgcac

SEQ ID NO: 2188780 - RNA, 15 nt, Human
acacacaugcauaca

SEQ ID NO: 2188781 - RNA, 14 nt, Human
acacacaugcauac

SEQ ID NO: 2188782 - RNA, 19 nt, Human
acacacaugcauacacaca

SEQ ID NO: 2188783 - RNA, 18 nt, Human
acacacaugcauacacac

SEQ ID NO: 2188784 - RNA, 17 nt, Human
acacacaugcauacaca

SEQ ID NO: 2188785 - RNA, 16 nt, Human
acacacaugcauacac

SEQ ID NO: 2188786 - RNA, 22 nt, Human
acacaccaggcugugggccuca

SEQ ID NO: 2188787 - RNA, 16 nt, Human
acacaccaggcugugg

SEQ ID NO: 2188788 - RNA, 12 nt, Human
acacaccaggcu

SEQ ID NO: 2188789 - RNA, 15 nt, Human
acacaccacacauac

SEQ ID NO: 2188790 - RNA, 21 nt, Human
acacacaugcauacacacaca

SEQ ID NO: 2188791 - RNA, 20 nt, Human
acacacaugcauacacacac

SEQ ID NO: 2188792 - RNA, 23 nt, Human
acacacgcacacacacacacagg

SEQ ID NO: 2188793 - RNA, 13 nt, Human
acacacgcacgca

SEQ ID NO: 2188794 - RNA, 24 nt, Human
acacaccuguagucccagcuacuc

SEQ ID NO: 2188795 - RNA, 14 nt, Human
acacacgcacgcac

SEQ ID NO: 2188796 - RNA, 15 nt, Human
acacacgcacgcaca

SEQ ID NO: 2188797 - RNA, 16 nt, Human
acacacgcacgcacac

SEQ ID NO: 2188798 - RNA, 17 nt, Human
acacacgcacgcacaca

SEQ ID NO: 2188799 - RNA, 18 nt, Human
acacaccaggcugugggc

SEQ ID NO: 2188800 - RNA, 17 nt, Human
acacaccuaagggacau

SEQ ID NO: 2188801 - RNA, 21 nt, Human
acacaccuaagggacauguuu

SEQ ID NO: 2188802 - RNA, 22 nt, Human
acacaccuaagggacauguuuu

SEQ ID NO: 2188803 - RNA, 11 nt, Human
acacaccugua

SEQ ID NO: 2188804 - RNA, 20 nt, Human
acacaccuguagcacuuacu

SEQ ID NO: 2188805 - RNA, 13 nt, Human
acacacugaagaa

SEQ ID NO: 2188806 - RNA, 20 nt, Human
acacacucaaaucaagaaac

SEQ ID NO: 2188807 - RNA, 13 nt, Human
acacacaggagga

SEQ ID NO: 2188808 - RNA, 12 nt, Human
acacacagcucc

SEQ ID NO: 2188809 - RNA, 20 nt, Human
acacacagcuaacacacagc

SEQ ID NO: 2188810 - RNA, 19 nt, Human
acacacagcucuguccugg

SEQ ID NO: 2188811 - RNA, 17 nt, Human
acacacaggcaacugag

SEQ ID NO: 2188812 - RNA, 21 nt, Human
acacacauauaaacaucacac

SEQ ID NO: 2188813 - RNA, 11 nt, Human
acacacagcuc

SEQ ID NO: 2188814 - RNA, 12 nt, Human
acacacagcucu

SEQ ID NO: 2188815 - RNA, 14 nt, Human
acacacacaggagg

SEQ ID NO: 2188816 - RNA, 13 nt, Human
acacacagccaca

SEQ ID NO: 2188817 - RNA, 15 nt, Human
acacacagccacaca

SEQ ID NO: 2188818 - RNA, 14 nt, Human
acacacagccacac

SEQ ID NO: 2188819 - RNA, 22 nt, Human
acacacagccacacacacagaa

SEQ ID NO: 2188820 - RNA, 21 nt, Human
acacacagccacacacacaga

SEQ ID NO: 2188821 - RNA, 18 nt, Human
acacacagccacacacac

SEQ ID NO: 2188822 - RNA, 17 nt, Human
acacacagccacacaca

SEQ ID NO: 2188823 - RNA, 11 nt, Human
acacacacagg

SEQ ID NO: 2188824 - RNA, 16 nt, Human
acacacacagccacac

SEQ ID NO: 2188825 - RNA, 15 nt, Human
acacacacagccaca

SEQ ID NO: 2188826 - RNA, 14 nt, Human
acacacacagccac

SEQ ID NO: 2188827 - RNA, 13 nt, Human
acacacacagcca

SEQ ID NO: 2188828 - RNA, 12 nt, Human
acacacacagcc

SEQ ID NO: 2188829 - RNA, 13 nt, Human
uaguaaggcugug

SEQ ID NO: 2188830 - RNA, 14 nt, Human
uaguaaggcugugu

SEQ ID NO: 2188831 - RNA, 14 nt, Human
uaguaagugccuuc

SEQ ID NO: 2188832 - RNA, 14 nt, Human
uaguaauagagcaa

SEQ ID NO: 2188833 - RNA, 16 nt, Human
uaguaagaaaacauca

SEQ ID NO: 2188834 - RNA, 15 nt, Human
uagguuuaacucaga

SEQ ID NO: 2188835 - RNA, 17 nt, Human
uagguuuaacucagauc

SEQ ID NO: 2188836 - RNA, 19 nt, Human
uagguuuaacucagaucac

SEQ ID NO: 2188837 - RNA, 21 nt, Human
uagguuuaacucagaucacua

SEQ ID NO: 2188838 - RNA, 20 nt, Human
uagguugccaauaauacacu

SEQ ID NO: 2188839 - RNA, 15 nt, Human
acacagucugcaaga

SEQ ID NO: 2188840 - RNA, 16 nt, Human
acacagucugcaagau

SEQ ID NO: 2188841 - RNA, 24 nt, Human
uagguuggaagcuagcuccccucc

SEQ ID NO: 2188842 - RNA, 15 nt, Human
uagguuggacuggaa

SEQ ID NO: 2188843 - RNA, 21 nt, Human
uagguuggcaaaaaggcagga

SEQ ID NO: 2188844 - RNA, 17 nt, Human
acacagugaccauacua

SEQ ID NO: 2188845 - RNA, 19 nt, Human
acacagucuuggcucacug

SEQ ID NO: 2188846 - RNA, 23 nt, Human
acacagucucacccagacuccag

SEQ ID NO: 2188847 - RNA, 14 nt, Human
acacaggaggagaa

SEQ ID NO: 2188848 - RNA, 11 nt, Human
acacagugagu

SEQ ID NO: 2188849 - RNA, 20 nt, Human
acacaggcaacugaggcaga

SEQ ID NO: 2188850 - RNA, 19 nt, Human
acacaggcaacugaggcag

SEQ ID NO: 2188851 - RNA, 16 nt, Human
acacaggcaacugagg

SEQ ID NO: 2188852 - RNA, 15 nt, Human
acacaggcaacugag

SEQ ID NO: 2188853 - RNA, 24 nt, Human
acacaggauccuauucucaccagg

SEQ ID NO: 2188854 - RNA, 17 nt, Human
acacaggacccccuucc

SEQ ID NO: 2188855 - RNA, 18 nt, Human
acacaggacccccuuccc

SEQ ID NO: 2188856 - RNA, 20 nt, Human
acacaggacccccuuccccu

SEQ ID NO: 2188857 - RNA, 19 nt, Human
acacagcugcagagacaga

SEQ ID NO: 2188858 - RNA, 22 nt, Human
acacagcugagagacuuuuaau

SEQ ID NO: 2188859 - RNA, 18 nt, Human
acacacugaggcagggaa

SEQ ID NO: 2188860 - RNA, 12 nt, Human
acacagcugggc

SEQ ID NO: 2188861 - RNA, 16 nt, Human
acacagcugggcugug

SEQ ID NO: 2188862 - RNA, 15 nt, Human
acacagcugggcugu

SEQ ID NO: 2188863 - RNA, 20 nt, Human
acacagcuuuaucaccagag

SEQ ID NO: 2188864 - RNA, 21 nt, Human
acacagcuuuaucaccagaga

SEQ ID NO: 2188865 - RNA, 22 nt, Human
acacagcuuuaucaccagagag

SEQ ID NO: 2188866 - RNA, 16 nt, Human
acacacugaggcaggg

SEQ ID NO: 2188867 - RNA, 15 nt, Human
acacacugaggcagg

SEQ ID NO: 2188868 - RNA, 18 nt, Human
acacacgcacgcacacac

SEQ ID NO: 2188869 - RNA, 14 nt, Human
acacacgcaggaac

SEQ ID NO: 2188870 - RNA, 16 nt, Human
acacacgcaggaacuc

SEQ ID NO: 2188871 - RNA, 20 nt, Human
acacacgcaggaacucccag

SEQ ID NO: 2188872 - RNA, 14 nt, Human
acacacugaagaag

SEQ ID NO: 2188873 - RNA, 19 nt, Human
uagucuucucauagcauua

SEQ ID NO: 2188874 - RNA, 14 nt, Human
uagucuuuugcuuu

SEQ ID NO: 2188875 - RNA, 18 nt, Human
uagucuucucauagcauu

SEQ ID NO: 2188876 - RNA, 14 nt, Human
uagucuucucauag

SEQ ID NO: 2188877 - RNA, 12 nt, Human
uagucuucucau

SEQ ID NO: 2188878 - RNA, 17 nt, Human
uagucuucaagcagauu

SEQ ID NO: 2188879 - RNA, 15 nt, Human
uagucuucaagcaga

SEQ ID NO: 2188880 - RNA, 12 nt, Human
uagucucaggac

SEQ ID NO: 2188881 - RNA, 19 nt, Human
uagucuagauggcuccucu

SEQ ID NO: 2188882 - RNA, 17 nt, Human
uagucuuaagaacugcu

SEQ ID NO: 2188883 - RNA, 12 nt, Human
uaguguuggaga

SEQ ID NO: 2188884 - RNA, 15 nt, Human
uagucuuuugcuuuu

SEQ ID NO: 2188885 - RNA, 16 nt, Human
uagucuuuugcuuuug

SEQ ID NO: 2188886 - RNA, 21 nt, Human
uagucuuuugcuuuuggcaaa

SEQ ID NO: 2188887 - RNA, 13 nt, Human
uaguguucauaaa

SEQ ID NO: 2188888 - RNA, 16 nt, Human
uaguguuggagaagaa

SEQ ID NO: 2188889 - RNA, 17 nt, Human
uaguguuggagaagaac

SEQ ID NO: 2188890 - RNA, 21 nt, Human
uagucguggagaugucuucgu

SEQ ID NO: 2188891 - RNA, 23 nt, Human
uagucuaaggaugcuaaaccuua

SEQ ID NO: 2188892 - RNA, 21 nt, Human
uagucgugagcucuugugagg

SEQ ID NO: 2188893 - RNA, 19 nt, Human
uagucguggagaugucuuc

SEQ ID NO: 2188894 - RNA, 20 nt, Human
uagucguggagaugucuucg

SEQ ID NO: 2188895 - RNA, 14 nt, Human
uagucuauuagcca

SEQ ID NO: 2188896 - RNA, 20 nt, Human
uagucuagauggcuccucuc

SEQ ID NO: 2188897 - RNA, 18 nt, Human
uagucuagauggcuccuc

SEQ ID NO: 2188898 - RNA, 22 nt, Human
uagucuacucuuaagccaucuu

SEQ ID NO: 2188899 - RNA, 20 nt, Human
uagucuacucuuaagccauc

SEQ ID NO: 2188900 - RNA, 21 nt, Human
uagucuacucuuaagccaucu

SEQ ID NO: 2188901 - RNA, 11 nt, Human
uaguccuguga

SEQ ID NO: 2188902 - RNA, 22 nt, Human
uaguccuauucuauugcaguua

SEQ ID NO: 2188903 - RNA, 12 nt, Human
uagucgugagcu

SEQ ID NO: 2188904 - RNA, 12 nt, Human
uaguccugugaa

SEQ ID NO: 2188905 - RNA, 22 nt, Human
uaguccugugaaugccacugcc

SEQ ID NO: 2188906 - RNA, 13 nt, Human
uaguagagacagg

SEQ ID NO: 2188907 - RNA, 22 nt, Human
uaguacuugaaaucuaggauua

SEQ ID NO: 2188908 - RNA, 20 nt, Human
uaguacuccugcaaaauuuu

SEQ ID NO: 2188909 - RNA, 19 nt, Human
uaguacuccugcaaaauuu

SEQ ID NO: 2188910 - RNA, 17 nt, Human
uaguacuccugcaaaau

SEQ ID NO: 2188911 - RNA, 20 nt, Human
uaguaauagagcaaaauuga

SEQ ID NO: 2188912 - RNA, 21 nt, Human
uaguacuccugcaaaauuuua

SEQ ID NO: 2188913 - RNA, 15 nt, Human
uaguacugcucuugu

SEQ ID NO: 2188914 - RNA, 13 nt, Human
uaguacugcucuu

SEQ ID NO: 2188915 - RNA, 22 nt, Human
uaguuuugauuuaauguuuuca

SEQ ID NO: 2188916 - RNA, 13 nt, Human
uaguuuugucaaa

SEQ ID NO: 2188917 - RNA, 21 nt, Human
uaguuuuuaaaauaucuuuug

SEQ ID NO: 2188918 - RNA, 10 nt, Human
uaguuuuugu

SEQ ID NO: 2188919 - RNA, 17 nt, Human
uaguuuuucuucaacau

SEQ ID NO: 2188920 - RNA, 13 nt, Human
uaguuuuuguucu

SEQ ID NO: 2188921 - RNA, 17 nt, Human
uaguuuuuguaauuuau

SEQ ID NO: 2188922 - RNA, 18 nt, Human
uaguuuuuaccuaccaca

SEQ ID NO: 2188923 - RNA, 15 nt, Human
uaguuuugucaaacu

SEQ ID NO: 2188924 - RNA, 22 nt, Human
uaguuuuuaaaauaucuuuuga

SEQ ID NO: 2188925 - RNA, 18 nt, Human
uaguucagguaacaggca

SEQ ID NO: 2188926 - RNA, 16 nt, Human
uaguuauaguuucaga

SEQ ID NO: 2188927 - RNA, 14 nt, Human
uauaaaagacugac

SEQ ID NO: 2188928 - RNA, 12 nt, Human
uauaaaacuucu

SEQ ID NO: 2188929 - RNA, 19 nt, Human
uauaaaacuguacuucacu

SEQ ID NO: 2188930 - RNA, 15 nt, Human
uauaaaacuuuccuc

SEQ ID NO: 2188931 - RNA, 14 nt, Human
uauaaaaucagcca

SEQ ID NO: 2188932 - RNA, 23 nt, Human
uauaaaauaugaagacauaaacc

SEQ ID NO: 2188933 - RNA, 21 nt, Human
uauaaaauaugaagacauaaa

SEQ ID NO: 2188934 - RNA, 16 nt, Human
uauaaaaucagccaau

SEQ ID NO: 2188935 - RNA, 17 nt, Human
uauaaaaucagccaauu

SEQ ID NO: 2188936 - RNA, 19 nt, Human
uauaaaaucagccaauuau

SEQ ID NO: 2188937 - RNA, 20 nt, Human
uauaaaaucagccaauuaug

SEQ ID NO: 2188938 - RNA, 17 nt, Human
uauaaaacaggucaaua

SEQ ID NO: 2188939 - RNA, 19 nt, Human
uauaaaacugcguuaaagg

SEQ ID NO: 2188940 - RNA, 22 nt, Human
uauaaaacugcguuaaaggcuc

SEQ ID NO: 2188941 - RNA, 16 nt, Human
uauaaaacuguacuuc

SEQ ID NO: 2188942 - RNA, 15 nt, Human
uaguuuuuguucuua

SEQ ID NO: 2188943 - RNA, 21 nt, Human
uaguuuuuguucuuaauugca

SEQ ID NO: 2188944 - RNA, 20 nt, Human
uauaaaaauaaaaaacacug

SEQ ID NO: 2188945 - RNA, 21 nt, Human
uauaaaaauaaaaaacacugg

SEQ ID NO: 2188946 - RNA, 19 nt, Human
acacaugcauacacacaca

SEQ ID NO: 2188947 - RNA, 18 nt, Human
acacaugcauacacacac

SEQ ID NO: 2188948 - RNA, 17 nt, Human
acacaugcauacacaca

SEQ ID NO: 2188949 - RNA, 16 nt, Human
acacaugcauacacac

SEQ ID NO: 2188950 - RNA, 15 nt, Human
acacaugcauacaca

SEQ ID NO: 2188951 - RNA, 15 nt, Human
uauaaaauuaagcaa

SEQ ID NO: 2188952 - RNA, 14 nt, Human
acacaugcauacac

SEQ ID NO: 2188953 - RNA, 13 nt, Human
acacaugcauaca

SEQ ID NO: 2188954 - RNA, 15 nt, Human
uauaaaauauuuuca

SEQ ID NO: 2188955 - RNA, 21 nt, Human
uauaaaaucagccaauuaugu

SEQ ID NO: 2188956 - RNA, 13 nt, Human
acacauguccaag

SEQ ID NO: 2188957 - RNA, 18 nt, Human
acacauguccaagaagcc

SEQ ID NO: 2188958 - RNA, 19 nt, Human
acacauguccaagaagccc

SEQ ID NO: 2188959 - RNA, 20 nt, Human
acacauuaucgggagcagug

SEQ ID NO: 2188960 - RNA, 23 nt, Human
acacauuaucgggagcagugucu

SEQ ID NO: 2188961 - RNA, 16 nt, Human
acacauucaauaagca

SEQ ID NO: 2188962 - RNA, 17 nt, Human
acacauucaauaagcau

SEQ ID NO: 2188963 - RNA, 18 nt, Human
acacauucggcucccugg

SEQ ID NO: 2188964 - RNA, 21 nt, Human
acacauguccaagaagcccag

SEQ ID NO: 2188965 - RNA, 22 nt, Human
acacauguccaagaagcccagg

SEQ ID NO: 2188966 - RNA, 12 nt, Human
acacccagccca

SEQ ID NO: 2188967 - RNA, 13 nt, Human
acacccagcccac

SEQ ID NO: 2188968 - RNA, 17 nt, Human
acacccaccguccgccc

SEQ ID NO: 2188969 - RNA, 15 nt, Human
acacccacucagcuc

SEQ ID NO: 2188970 - RNA, 21 nt, Human
acacccaccguccgcccugcu

SEQ ID NO: 2188971 - RNA, 22 nt, Human
acacccaccguccgcccugcuc

SEQ ID NO: 2188972 - RNA, 15 nt, Human
acacuagccucucca

SEQ ID NO: 2188973 - RNA, 13 nt, Human
acacuagccucuc

SEQ ID NO: 2188974 - RNA, 22 nt, Human
acacuagcuaauaucaauagaa

SEQ ID NO: 2188975 - RNA, 20 nt, Human
acacuagcccaaugaaauga

SEQ ID NO: 2188976 - RNA, 17 nt, Human
acacuagcccaaugaaa

SEQ ID NO: 2188977 - RNA, 22 nt, Human
uauaaccaguguuguggauuua

SEQ ID NO: 2188978 - RNA, 14 nt, Human
acacuacauuagaa

SEQ ID NO: 2188979 - RNA, 19 nt, Human
acacuagccagacacucug

SEQ ID NO: 2188980 - RNA, 21 nt, Human
acacuagccagacacucugcu

SEQ ID NO: 2188981 - RNA, 23 nt, Human
uauaaggaaagcaauaaaugaau

SEQ ID NO: 2188982 - RNA, 22 nt, Human
uauaaggaaagcaauaaaugaa

SEQ ID NO: 2188983 - RNA, 18 nt, Human
uauaacuaguccuuuacu

SEQ ID NO: 2188984 - RNA, 16 nt, Human
uauaaggaaagcaaua

SEQ ID NO: 2188985 - RNA, 19 nt, Human
uauaacuauguugauaaaa

SEQ ID NO: 2188986 - RNA, 14 nt, Human
uauaacuaguccuu

SEQ ID NO: 2188987 - RNA, 19 nt, Human
uauaacuacuccggagaca

SEQ ID NO: 2188988 - RNA, 15 nt, Human
uauaaccccagcucc

SEQ ID NO: 2188989 - RNA, 16 nt, Human
acacuaaccacgcugg

SEQ ID NO: 2188990 - RNA, 17 nt, Human
acacuaaccacgcugga

SEQ ID NO: 2188991 - RNA, 19 nt, Human
acacuaaccacgcuggacc

SEQ ID NO: 2188992 - RNA, 17 nt, Human
acacuaagagagaauga

SEQ ID NO: 2188993 - RNA, 18 nt, Human
acacuaagagagaaugag

SEQ ID NO: 2188994 - RNA, 19 nt, Human
acacuaagagagaaugaga

SEQ ID NO: 2188995 - RNA, 20 nt, Human
acaccuuggacauccuccuc

SEQ ID NO: 2188996 - RNA, 24 nt, Human
acaccugcaccuccccccacugca

SEQ ID NO: 2188997 - RNA, 19 nt, Human
acaccugcaccucccccca

SEQ ID NO: 2188998 - RNA, 18 nt, Human
acaccugcaccucccccc

SEQ ID NO: 2188999 - RNA, 16 nt, Human
acaccugcaccucccc

SEQ ID NO: 2189000 - RNA, 15 nt, Human
acaccugcaccuccc

SEQ ID NO: 2189001 - RNA, 14 nt, Human
acaccugcaccucc

SEQ ID NO: 2189002 - RNA, 12 nt, Human
acaccugcaccu

SEQ ID NO: 2189003 - RNA, 11 nt, Human
acaccugcacc

SEQ ID NO: 2189004 - RNA, 17 nt, Human
acaccugauguguacau

SEQ ID NO: 2189005 - RNA, 18 nt, Human
acaccugauguguacauc

SEQ ID NO: 2189006 - RNA, 15 nt, Human
acaccugauguguac

SEQ ID NO: 2189007 - RNA, 14 nt, Human
acaccugcccugcc

SEQ ID NO: 2189008 - RNA, 13 nt, Human
acaccugcccugc

SEQ ID NO: 2189009 - RNA, 14 nt, Human
acaccuugacaggg

SEQ ID NO: 2189010 - RNA, 14 nt, Human
acaccuucucugga

SEQ ID NO: 2189011 - RNA, 15 nt, Human
acaccuugacagggc

SEQ ID NO: 2189012 - RNA, 16 nt, Human
acaccuugacagggca

SEQ ID NO: 2189013 - RNA, 18 nt, Human
acaccucugcacaagcug

SEQ ID NO: 2189014 - RNA, 12 nt, Human
acaccucgcccc

SEQ ID NO: 2189015 - RNA, 16 nt, Human
acaccccuccccugcc

SEQ ID NO: 2189016 - RNA, 14 nt, Human
acacccccaccccu

SEQ ID NO: 2189017 - RNA, 23 nt, Human
acaccccuccccugcccuagagc

SEQ ID NO: 2189018 - RNA, 13 nt, Human
acaccucccagga

SEQ ID NO: 2189019 - RNA, 13 nt, Human
acaccucccugaa

SEQ ID NO: 2189020 - RNA, 17 nt, Human
acaccccuuauccagga

SEQ ID NO: 2189021 - RNA, 19 nt, Human
acaccucccaggagacagu

SEQ ID NO: 2189022 - RNA, 22 nt, Human
acaccucccugaaccaucccug

SEQ ID NO: 2189023 - RNA, 16 nt, Human
acaccucccugaacca

SEQ ID NO: 2189024 - RNA, 13 nt, Human
acacccauguuuc

SEQ ID NO: 2189025 - RNA, 15 nt, Human
acacccaucuguuuu

SEQ ID NO: 2189026 - RNA, 20 nt, Human
acaccccauugguggacuac

SEQ ID NO: 2189027 - RNA, 21 nt, Human
acaccccagacgaugucuuca

SEQ ID NO: 2189028 - RNA, 23 nt, Human
acacccagccucaguccuccccu

SEQ ID NO: 2189029 - RNA, 17 nt, Human
acacccagccucagucc

SEQ ID NO: 2189030 - RNA, 20 nt, Human
acacccagccucaguccucc

SEQ ID NO: 2189031 - RNA, 23 nt, Human
acacccaccguccgcccugcucc

SEQ ID NO: 2189032 - RNA, 13 nt, Human
acacccagccuca

SEQ ID NO: 2189033 - RNA, 14 nt, Human
acacccagccucag

SEQ ID NO: 2189034 - RNA, 16 nt, Human
acacccagccucaguc

SEQ ID NO: 2189035 - RNA, 17 nt, Human
acacccacucagcuccg

SEQ ID NO: 2189036 - RNA, 20 nt, Human
acacucugggcuccagagug

SEQ ID NO: 2189037 - RNA, 14 nt, Human
acacucuggcuggu

SEQ ID NO: 2189038 - RNA, 16 nt, Human
acacucugcucugccc

SEQ ID NO: 2189039 - RNA, 13 nt, Human
acacucugcucug

SEQ ID NO: 2189040 - RNA, 14 nt, Human
acacucugcucugc

SEQ ID NO: 2189041 - RNA, 12 nt, Human
acacucuuugua

SEQ ID NO: 2189042 - RNA, 16 nt, Human
acacucuuuguaagag

SEQ ID NO: 2189043 - RNA, 21 nt, Human
acacugaaauauacacacagc

SEQ ID NO: 2189044 - RNA, 20 nt, Human
acacugaaauauacacacag

SEQ ID NO: 2189045 - RNA, 18 nt, Human
acacugaaauauacacac

SEQ ID NO: 2189046 - RNA, 17 nt, Human
acacugaaauauacaca

SEQ ID NO: 2189047 - RNA, 21 nt, Human
acacucuuuugcuuuauucca

SEQ ID NO: 2189048 - RNA, 23 nt, Human
acacugaaaaaucuaagugauau

SEQ ID NO: 2189049 - RNA, 14 nt, Human
acacuguucucugc

SEQ ID NO: 2189050 - RNA, 15 nt, Human
acacuguucucugcc

SEQ ID NO: 2189051 - RNA, 12 nt, Human
acacugaagaag

SEQ ID NO: 2189052 - RNA, 14 nt, Human
acacugaagaagca

SEQ ID NO: 2189053 - RNA, 22 nt, Human
acacugaaauauacacacagca

SEQ ID NO: 2189054 - RNA, 14 nt, Human
acacuguucugaaa

SEQ ID NO: 2189055 - RNA, 20 nt, Human
acacuguucugaaagugacu

SEQ ID NO: 2189056 - RNA, 22 nt, Human
acacuguucucugcccuccaag

SEQ ID NO: 2189057 - RNA, 23 nt, Human
acacuguucucugcccuccaaga

SEQ ID NO: 2189058 - RNA, 16 nt, Human
acacuguucucugccc

SEQ ID NO: 2189059 - RNA, 17 nt, Human
acacuguucucugcccu

SEQ ID NO: 2189060 - RNA, 18 nt, Human
acacuguucucugcccuc

SEQ ID NO: 2189061 - RNA, 20 nt, Human
acacuguucucugcccucca

SEQ ID NO: 2189062 - RNA, 21 nt, Human
acacucacuccugagaccccu

SEQ ID NO: 2189063 - RNA, 18 nt, Human
acacucaccucuaaaaca

SEQ ID NO: 2189064 - RNA, 16 nt, Human
uauaaguagcaggcca

SEQ ID NO: 2189065 - RNA, 19 nt, Human
acacucaccucuaaaacag

SEQ ID NO: 2189066 - RNA, 16 nt, Human
acacucacuccugaga

SEQ ID NO: 2189067 - RNA, 16 nt, Human
acacucagcacaaggc

SEQ ID NO: 2189068 - RNA, 17 nt, Human
acacuccaauuaaggau

SEQ ID NO: 2189069 - RNA, 18 nt, Human
acacuccaauuaaggauu

SEQ ID NO: 2189070 - RNA, 13 nt, Human
acacucagcacaa

SEQ ID NO: 2189071 - RNA, 14 nt, Human
acacucagaccuga

SEQ ID NO: 2189072 - RNA, 19 nt, Human
acacucagaccugaauucu

SEQ ID NO: 2189073 - RNA, 16 nt, Human
uauaacuagcuagaag

SEQ ID NO: 2189074 - RNA, 15 nt, Human
uauaagguuuuaagu

SEQ ID NO: 2189075 - RNA, 17 nt, Human
uauaagguuuaaaaaga

SEQ ID NO: 2189076 - RNA, 16 nt, Human
acacucacccaacaau

SEQ ID NO: 2189077 - RNA, 14 nt, Human
uauaaguaagaaaa

SEQ ID NO: 2189078 - RNA, 15 nt, Human
uauaaguaagaaaau

SEQ ID NO: 2189079 - RNA, 16 nt, Human
uauaaguaagaaaaua

SEQ ID NO: 2189080 - RNA, 18 nt, Human
uauaaguaagaaaauauu

SEQ ID NO: 2189081 - RNA, 17 nt, Human
acacuccagccugagca

SEQ ID NO: 2189082 - RNA, 15 nt, Human
acacuccagccuggg

SEQ ID NO: 2189083 - RNA, 16 nt, Human
acacuccagccugagc

SEQ ID NO: 2189084 - RNA, 15 nt, Human
acacuccagccugag

SEQ ID NO: 2189085 - RNA, 14 nt, Human
acacuccagccuga

SEQ ID NO: 2189086 - RNA, 12 nt, Human
acacuccagccu

SEQ ID NO: 2189087 - RNA, 21 nt, Human
acacuccaauuaaggauuuua

SEQ ID NO: 2189088 - RNA, 13 nt, Human
acacuccuucaca

SEQ ID NO: 2189089 - RNA, 13 nt, Human
acacuccagugcc

SEQ ID NO: 2189090 - RNA, 14 nt, Human
acacuccagugcca

SEQ ID NO: 2189091 - RNA, 14 nt, Human
acacuccagugaga

SEQ ID NO: 2189092 - RNA, 11 nt, Human
acacucugaga

SEQ ID NO: 2189093 - RNA, 13 nt, Human
acacucugagacu

SEQ ID NO: 2189094 - RNA, 16 nt, Human
acacucgcccgcccac

SEQ ID NO: 2189095 - RNA, 23 nt, Human
acacucgcccgcccacuguccug

SEQ ID NO: 2189096 - RNA, 24 nt, Human
acacucgcccgcccacuguccugg

SEQ ID NO: 2189097 - RNA, 14 nt, Human
acagaaacauuuuc

SEQ ID NO: 2189098 - RNA, 20 nt, Human
acagaaaccuuuuuaaaaau

SEQ ID NO: 2189099 - RNA, 15 nt, Human
acagaaaccuuuuua

SEQ ID NO: 2189100 - RNA, 18 nt, Human
acagaaaccucuacuaaa

SEQ ID NO: 2189101 - RNA, 23 nt, Human
acacuuugaaauguguuucugua

SEQ ID NO: 2189102 - RNA, 18 nt, Human
acagaaaauucuucucca

SEQ ID NO: 2189103 - RNA, 17 nt, Human
acagaaacaaaaacacu

SEQ ID NO: 2189104 - RNA, 12 nt, Human
acagaaacaaaa

SEQ ID NO: 2189105 - RNA, 23 nt, Human
acacuuuaugccggaugugcuuu

SEQ ID NO: 2189106 - RNA, 17 nt, Human
acacuuugaaauguguu

SEQ ID NO: 2189107 - RNA, 18 nt, Human
acacuuugaaauguguuu

SEQ ID NO: 2189108 - RNA, 17 nt, Human
acacuuugcacugauau

SEQ ID NO: 2189109 - RNA, 20 nt, Human
acacuuugaaauguguuucu

SEQ ID NO: 2189110 - RNA, 21 nt, Human
acacuuugaaauguguuucug

SEQ ID NO: 2189111 - RNA, 19 nt, Human
acacuuugccauauuuuca

SEQ ID NO: 2189112 - RNA, 19 nt, Human
acacuuugcacugauauau

SEQ ID NO: 2189113 - RNA, 22 nt, Human
acacuuugcacugauauaucau

SEQ ID NO: 2189114 - RNA, 23 nt, Human
acacuugugugugggcugugagu

SEQ ID NO: 2189115 - RNA, 22 nt, Human
acacuuuaauuaccaaccuguu

SEQ ID NO: 2189116 - RNA, 12 nt, Human
acacuuuacaau

SEQ ID NO: 2189117 - RNA, 13 nt, Human
acacuuuacaaug

SEQ ID NO: 2189118 - RNA, 21 nt, Human
acacuuuaugccggaugugcu

SEQ ID NO: 2189119 - RNA, 22 nt, Human
acacuuuaugccggaugugcuu

SEQ ID NO: 2189120 - RNA, 23 nt, Human
acacuuguugauuaauggaaaug

SEQ ID NO: 2189121 - RNA, 20 nt, Human
acacuuguugauuaauggaa

SEQ ID NO: 2189122 - RNA, 23 nt, Human
acacuguuuacaagaaaaaauga

SEQ ID NO: 2189123 - RNA, 21 nt, Human
acacuguuuacaagaaaaaau

SEQ ID NO: 2189124 - RNA, 16 nt, Human
acacuguuucaaacuu

SEQ ID NO: 2189125 - RNA, 15 nt, Human
acacuguuucaaacu

SEQ ID NO: 2189126 - RNA, 15 nt, Human
acacuuaaaaauggu

SEQ ID NO: 2189127 - RNA, 13 nt, Human
acacuuaaaaaug

SEQ ID NO: 2189128 - RNA, 11 nt, Human
acacuuaacag

SEQ ID NO: 2189129 - RNA, 13 nt, Human
acacuuaacagau

SEQ ID NO: 2189130 - RNA, 23 nt, Human
acacuguuucaaacuuuacuaug

SEQ ID NO: 2189131 - RNA, 19 nt, Human
acacuuguccccaaauccg

SEQ ID NO: 2189132 - RNA, 20 nt, Human
acacuuguuccagcucuuug

SEQ ID NO: 2189133 - RNA, 19 nt, Human
acacuuguuccagcucuuu

SEQ ID NO: 2189134 - RNA, 22 nt, Human
acacuugugugugggcugugag

SEQ ID NO: 2189135 - RNA, 18 nt, Human
acacuugugugugggcug

SEQ ID NO: 2189136 - RNA, 16 nt, Human
acacuugugugugggc

SEQ ID NO: 2189137 - RNA, 13 nt, Human
acacuugugugug

SEQ ID NO: 2189138 - RNA, 17 nt, Human
acagacuggaagcacag

SEQ ID NO: 2189139 - RNA, 19 nt, Human
acagacuggaagcacagcu

SEQ ID NO: 2189140 - RNA, 21 nt, Human
acagacuggaagcacagcuuc

SEQ ID NO: 2189141 - RNA, 22 nt, Human
uauauuaucaugcaaaugcugu

SEQ ID NO: 2189142 - RNA, 18 nt, Human
acagacacaggcccggcu

SEQ ID NO: 2189143 - RNA, 22 nt, Human
acagacacaggcccggcuccag

SEQ ID NO: 2189144 - RNA, 17 nt, Human
acagacacaggcccggc

SEQ ID NO: 2189145 - RNA, 19 nt, Human
acagaaagcagaacaguga

SEQ ID NO: 2189146 - RNA, 14 nt, Human
uauauuuaaaagaa

SEQ ID NO: 2189147 - RNA, 15 nt, Human
uauauuuaaugauaa

SEQ ID NO: 2189148 - RNA, 15 nt, Human
uauauuuaacaagau

SEQ ID NO: 2189149 - RNA, 12 nt, Human
uauauuuacaaa

SEQ ID NO: 2189150 - RNA, 16 nt, Human
uauauuauuucuagga

SEQ ID NO: 2189151 - RNA, 22 nt, Human
uauauuauuucuaggaagaauu

SEQ ID NO: 2189152 - RNA, 23 nt, Human
uauauuauuucuaggaagaauuu

SEQ ID NO: 2189153 - RNA, 14 nt, Human
uauauucauauauu

SEQ ID NO: 2189154 - RNA, 21 nt, Human
uauauuccauauauuagcauu

SEQ ID NO: 2189155 - RNA, 19 nt, Human
uauauuccauauauuagca

SEQ ID NO: 2189156 - RNA, 18 nt, Human
uauauucccaauagcaac

SEQ ID NO: 2189157 - RNA, 14 nt, Human
acagagcugggaug

SEQ ID NO: 2189158 - RNA, 18 nt, Human
acagagcucuccagcucc

SEQ ID NO: 2189159 - RNA, 15 nt, Human
acagagcucuccagc

SEQ ID NO: 2189160 - RNA, 10 nt, Human
acagagcugg

SEQ ID NO: 2189161 - RNA, 18 nt, Human
acagagcugggauguuuc

SEQ ID NO: 2189162 - RNA, 21 nt, Human
acagagcugggauguuucugu

SEQ ID NO: 2189163 - RNA, 21 nt, Human
acagagcugguugggaagaca

SEQ ID NO: 2189164 - RNA, 16 nt, Human
acagaguuguuacauu

SEQ ID NO: 2189165 - RNA, 16 nt, Human
acagagcuucccugac

SEQ ID NO: 2189166 - RNA, 19 nt, Human
acagaggaagaauuuguua

SEQ ID NO: 2189167 - RNA, 20 nt, Human
acagaggaagaauuuguuau

SEQ ID NO: 2189168 - RNA, 15 nt, Human
acagagcuucccuga

SEQ ID NO: 2189169 - RNA, 14 nt, Human
acagagcuucccug

SEQ ID NO: 2189170 - RNA, 20 nt, Human
acagaguuguuacauuuuua

SEQ ID NO: 2189171 - RNA, 19 nt, Human
acagaguuguuacauuuuu

SEQ ID NO: 2189172 - RNA, 18 nt, Human
acagaguuguuacauuuu

SEQ ID NO: 2189173 - RNA, 17 nt, Human
acagaguuguuacauuu

SEQ ID NO: 2189174 - RNA, 15 nt, Human
acagagcaagacucu

SEQ ID NO: 2189175 - RNA, 14 nt, Human
acagagcaggacug

SEQ ID NO: 2189176 - RNA, 11 nt, Human
acagagccagu

SEQ ID NO: 2189177 - RNA, 21 nt, Human
acagagcaagugagacccugu

SEQ ID NO: 2189178 - RNA, 16 nt, Human
uaucucgugggagagc

SEQ ID NO: 2189179 - RNA, 16 nt, Human
uaucucuauuuaauau

SEQ ID NO: 2189180 - RNA, 17 nt, Human
uaucucuauuuaauauu

SEQ ID NO: 2189181 - RNA, 18 nt, Human
uaucucuauuuaauauuu

SEQ ID NO: 2189182 - RNA, 20 nt, Human
uaucucuauuuaauauuuau

SEQ ID NO: 2189183 - RNA, 20 nt, Human
uaucucucucucuuuuugga

SEQ ID NO: 2189184 - RNA, 12 nt, Human
uaucucucugug

SEQ ID NO: 2189185 - RNA, 13 nt, Human
uaucucucugugc

SEQ ID NO: 2189186 - RNA, 15 nt, Human
uaucucugaagcaug

SEQ ID NO: 2189187 - RNA, 16 nt, Human
uaucucugaagcaugu

SEQ ID NO: 2189188 - RNA, 17 nt, Human
uaucucugaagcauguu

SEQ ID NO: 2189189 - RNA, 23 nt, Human
uaucucugaagcauguuucaugu

SEQ ID NO: 2189190 - RNA, 18 nt, Human
uaucucugaagcauguuu

SEQ ID NO: 2189191 - RNA, 22 nt, Human
acagagagucccacugccucag

SEQ ID NO: 2189192 - RNA, 23 nt, Human
uaucucugugugcacaaauauuu

SEQ ID NO: 2189193 - RNA, 12 nt, Human
uaucucuguguu

SEQ ID NO: 2189194 - RNA, 18 nt, Human
uaucucugugugcacaaa

SEQ ID NO: 2189195 - RNA, 17 nt, Human
uaucucugugugcacaa

SEQ ID NO: 2189196 - RNA, 16 nt, Human
uaucucugugugcaca

SEQ ID NO: 2189197 - RNA, 11 nt, Human
uaucucugugu

SEQ ID NO: 2189198 - RNA, 16 nt, Human
uauauuuauacuguau

SEQ ID NO: 2189199 - RNA, 24 nt, Human
uauauuuauaacucaucauaaaau

SEQ ID NO: 2189200 - RNA, 19 nt, Human
uauauuuauuacuguaaga

SEQ ID NO: 2189201 - RNA, 23 nt, Human
uauauuuauaacucaucauaaaa

SEQ ID NO: 2189202 - RNA, 22 nt, Human
uauauuuauaacucaucauaaa

SEQ ID NO: 2189203 - RNA, 15 nt, Human
uauauuuauuacugu

SEQ ID NO: 2189204 - RNA, 12 nt, Human
uaucccucucca

SEQ ID NO: 2189205 - RNA, 16 nt, Human
uaucccggcugcccuu

SEQ ID NO: 2189206 - RNA, 15 nt, Human
uaucccuacauguau

SEQ ID NO: 2189207 - RNA, 15 nt, Human
uaucccucaccugua

SEQ ID NO: 2189208 - RNA, 20 nt, Human
uaucccuacuguaauuugug

SEQ ID NO: 2189209 - RNA, 19 nt, Human
uaucccuacuguaauuugu

SEQ ID NO: 2189210 - RNA, 15 nt, Human
uaucucagggccugg

SEQ ID NO: 2189211 - RNA, 13 nt, Human
uaucucagggccu

SEQ ID NO: 2189212 - RNA, 16 nt, Human
uaucucacuugugcca

SEQ ID NO: 2189213 - RNA, 22 nt, Human
uauccuccagguuuuucaauua

SEQ ID NO: 2189214 - RNA, 12 nt, Human
uauccuacuucu

SEQ ID NO: 2189215 - RNA, 17 nt, Human
uauccuacuuccccuuc

SEQ ID NO: 2189216 - RNA, 14 nt, Human
uauccuacuucccc

SEQ ID NO: 2189217 - RNA, 12 nt, Human
uauccuccaggu

SEQ ID NO: 2189218 - RNA, 15 nt, Human
uauccuacaacaaga

SEQ ID NO: 2189219 - RNA, 19 nt, Human
uauccuacaacaagaguuu

SEQ ID NO: 2189220 - RNA, 13 nt, Human
uauccuccagguu

SEQ ID NO: 2189221 - RNA, 14 nt, Human
uauccuccagguuu

SEQ ID NO: 2189222 - RNA, 15 nt, Human
uauccuccagguuuu

SEQ ID NO: 2189223 - RNA, 17 nt, Human
uauccuccagguuuuuc

SEQ ID NO: 2189224 - RNA, 18 nt, Human
uauccuccagguuuuuca

SEQ ID NO: 2189225 - RNA, 19 nt, Human
uauccuccagguuuuucaa

SEQ ID NO: 2189226 - RNA, 20 nt, Human
uauccuccagguuuuucaau

SEQ ID NO: 2189227 - RNA, 21 nt, Human
uauccuccagguuuuucaauu

SEQ ID NO: 2189228 - RNA, 23 nt, Human
uauccuccagguuuuucaauuaa

SEQ ID NO: 2189229 - RNA, 20 nt, Human
acagauguaaaagacuuuuu

SEQ ID NO: 2189230 - RNA, 16 nt, Human
acagaugggcaaauua

SEQ ID NO: 2189231 - RNA, 22 nt, Human
acagauggcacuuugaaggggc

SEQ ID NO: 2189232 - RNA, 23 nt, Human
acagaugggugcuuggaggaagg

SEQ ID NO: 2189233 - RNA, 22 nt, Human
acagaugccccagagcuguuua

SEQ ID NO: 2189234 - RNA, 21 nt, Human
acagaugccccagagcuguuu

SEQ ID NO: 2189235 - RNA, 12 nt, Human
acagaugccucc

SEQ ID NO: 2189236 - RNA, 17 nt, Human
acagauggauuugccug

SEQ ID NO: 2189237 - RNA, 16 nt, Human
acagauggauuugccu

SEQ ID NO: 2189238 - RNA, 21 nt, Human
acagaugcuuuucugucucug

SEQ ID NO: 2189239 - RNA, 14 nt, Human
acagaugcuuuucu

SEQ ID NO: 2189240 - RNA, 12 nt, Human
acagauguugaa

SEQ ID NO: 2189241 - RNA, 23 nt, Human
acagauguuucuuuuguauguaa

SEQ ID NO: 2189242 - RNA, 15 nt, Human
acagauucacacugu

SEQ ID NO: 2189243 - RNA, 19 nt, Human
acagauucacacugucugg

SEQ ID NO: 2189244 - RNA, 20 nt, Human
acagaugucagccgagccgg

SEQ ID NO: 2189245 - RNA, 18 nt, Human
acagcaaaacuccaucuc

SEQ ID NO: 2189246 - RNA, 17 nt, Human
acagauucacacugucu

SEQ ID NO: 2189247 - RNA, 24 nt, Human
acagauguuucuuuuguauguaaa

SEQ ID NO: 2189248 - RNA, 16 nt, Human
acagauucacacuguc

SEQ ID NO: 2189249 - RNA, 16 nt, Human
acagauuuuuacaaau

SEQ ID NO: 2189250 - RNA, 17 nt, Human
acagauuuuuacaaaug

SEQ ID NO: 2189251 - RNA, 21 nt, Human
acagauaagcaagagagaugu

SEQ ID NO: 2189252 - RNA, 16 nt, Human
acagaggaagagcagg

SEQ ID NO: 2189253 - RNA, 14 nt, Human
acagaggaagagca

SEQ ID NO: 2189254 - RNA, 15 nt, Human
acagaguuguuacau

SEQ ID NO: 2189255 - RNA, 14 nt, Human
acagauaaucagug

SEQ ID NO: 2189256 - RNA, 20 nt, Human
acagauaagcaagagagaug

SEQ ID NO: 2189257 - RNA, 22 nt, Human
acagaguuguuacauuuuuaag

SEQ ID NO: 2189258 - RNA, 21 nt, Human
acagaguuguuacauuuuuaa

SEQ ID NO: 2189259 - RNA, 19 nt, Human
acagaugccccagagcugu

SEQ ID NO: 2189260 - RNA, 18 nt, Human
acagaugccccagagcug

SEQ ID NO: 2189261 - RNA, 17 nt, Human
acagaugccccagagcu

SEQ ID NO: 2189262 - RNA, 16 nt, Human
acagaugccccagagc

SEQ ID NO: 2189263 - RNA, 14 nt, Human
acagaugccccaga

SEQ ID NO: 2189264 - RNA, 13 nt, Human
acagaugccccag

SEQ ID NO: 2189265 - RNA, 21 nt, Human
acagauacuggaaguuuugca

SEQ ID NO: 2189266 - RNA, 22 nt, Human
acagauacuggaaguuuugcau

SEQ ID NO: 2189267 - RNA, 20 nt, Human
acagauagauauaugcucug

SEQ ID NO: 2189268 - RNA, 20 nt, Human
acagauacuccuccaagguu

SEQ ID NO: 2189269 - RNA, 17 nt, Human
acagcaacaauuuauga

SEQ ID NO: 2189270 - RNA, 20 nt, Human
acagcaacaauuuaugaauu

SEQ ID NO: 2189271 - RNA, 21 nt, Human
acagcccgggcucugccuccc

SEQ ID NO: 2189272 - RNA, 22 nt, Human
acagcccgggcucugccuccca

SEQ ID NO: 2189273 - RNA, 23 nt, Human
acagcccgggcucugccucccau

SEQ ID NO: 2189274 - RNA, 14 nt, Human
acagcaaccccagg

SEQ ID NO: 2189275 - RNA, 20 nt, Human
acagcccuucuuuccacaga

SEQ ID NO: 2189276 - RNA, 21 nt, Human
acagcccuucuuuccacagaa

SEQ ID NO: 2189277 - RNA, 15 nt, Human
uaucuugucucuggg

SEQ ID NO: 2189278 - RNA, 23 nt, Human
uaucuuggugaauuuuuuuuucc

SEQ ID NO: 2189279 - RNA, 18 nt, Human
uaucuuguuuuuccacua

SEQ ID NO: 2189280 - RNA, 14 nt, Human
uaucuuguuuuucc

SEQ ID NO: 2189281 - RNA, 17 nt, Human
uaucuugucucugggcu

SEQ ID NO: 2189282 - RNA, 13 nt, Human
acagccgcagccu

SEQ ID NO: 2189283 - RNA, 19 nt, Human
acagccgauucaccugagc

SEQ ID NO: 2189284 - RNA, 20 nt, Human
acagccgcagccucccucug

SEQ ID NO: 2189285 - RNA, 22 nt, Human
uaucuuguuuuuccacuacugc

SEQ ID NO: 2189286 - RNA, 15 nt, Human
uaucuuuauuaauca

SEQ ID NO: 2189287 - RNA, 14 nt, Human
uaucuuuauuaauc

SEQ ID NO: 2189288 - RNA, 19 nt, Human
uaucuuucgcacagcaguu

SEQ ID NO: 2189289 - RNA, 23 nt, Human
uaucuuucgugauaaacuuugcu

SEQ ID NO: 2189290 - RNA, 16 nt, Human
uaucuuugauucuccu

SEQ ID NO: 2189291 - RNA, 12 nt, Human
uaucuuucuaca

SEQ ID NO: 2189292 - RNA, 13 nt, Human
uaucuuucuacag

SEQ ID NO: 2189293 - RNA, 17 nt, Human
uaucuuugauucuccuu

SEQ ID NO: 2189294 - RNA, 18 nt, Human
uaucuuugauucuccuuc

SEQ ID NO: 2189295 - RNA, 20 nt, Human
uaugaaagauggcugugccu

SEQ ID NO: 2189296 - RNA, 22 nt, Human
uaugaaagauggcugugccucu

SEQ ID NO: 2189297 - RNA, 23 nt, Human
uaugaaagauggcugugccucug

SEQ ID NO: 2189298 - RNA, 13 nt, Human
uaugaaauaaaga

SEQ ID NO: 2189299 - RNA, 18 nt, Human
aauuuaguuuuuguucuu

SEQ ID NO: 2189300 - RNA, 20 nt, Human
aauuuaguuuuuguucuuaa

SEQ ID NO: 2189301 - RNA, 17 nt, Human
aauuuaguuuuuguucu

SEQ ID NO: 2189302 - RNA, 16 nt, Human
aauuuaguuuuuguuc

SEQ ID NO: 2189303 - RNA, 15 nt, Human
aauuuauacaauauc

SEQ ID NO: 2189304 - RNA, 22 nt, Human
aauuuauaaacuuuuuucuuac

SEQ ID NO: 2189305 - RNA, 20 nt, Human
aauuuauauacaaccugcuu

SEQ ID NO: 2189306 - RNA, 17 nt, Human
aauuuauacaauaucau

SEQ ID NO: 2189307 - RNA, 17 nt, Human
aauuuaucacacuucug

SEQ ID NO: 2189308 - RNA, 19 nt, Human
aauuuauuaauugcuuuga

SEQ ID NO: 2189309 - RNA, 17 nt, Human
aauuuauuaguuaauau

SEQ ID NO: 2189310 - RNA, 18 nt, Human
aauuuauuaguuaauaua

SEQ ID NO: 2189311 - RNA, 18 nt, Human
aauuuauuaauugcuuug

SEQ ID NO: 2189312 - RNA, 15 nt, Human
aauuuauuaaaauga

SEQ ID NO: 2189313 - RNA, 17 nt, Human
aauuuauuaauugcuuu

SEQ ID NO: 2189314 - RNA, 17 nt, Human
aauuucuugguaagaag

SEQ ID NO: 2189315 - RNA, 20 nt, Human
aauuucuugguaagaagccg

SEQ ID NO: 2189316 - RNA, 22 nt, Human
aauuucuuuauguaaucuaugu

SEQ ID NO: 2189317 - RNA, 20 nt, Human
aauuucuuacuaaacauuuu

SEQ ID NO: 2189318 - RNA, 20 nt, Human
aauuucuucacuguugaaaa

SEQ ID NO: 2189319 - RNA, 21 nt, Human
aauuucuuacuaaacauuuug

SEQ ID NO: 2189320 - RNA, 19 nt, Human
aauuucucccagucauuua

SEQ ID NO: 2189321 - RNA, 13 nt, Human
aauuucuauuaaa

SEQ ID NO: 2189322 - RNA, 19 nt, Human
aauuuauuaguuaauauau

SEQ ID NO: 2189323 - RNA, 14 nt, Human
aauuuauuauggca

SEQ ID NO: 2189324 - RNA, 13 nt, Human
aauuuauuauggc

SEQ ID NO: 2189325 - RNA, 22 nt, Human
aauugcuugaaagaaaauaugc

SEQ ID NO: 2189326 - RNA, 17 nt, Human
aauugcuugaaagaaaa

SEQ ID NO: 2189327 - RNA, 15 nt, Human
aauugcuugaaagaa

SEQ ID NO: 2189328 - RNA, 22 nt, Human
aauugcuuuaccuuuuuucuua

SEQ ID NO: 2189329 - RNA, 10 nt, Human
aauugcuuug

SEQ ID NO: 2189330 - RNA, 11 nt, Human
aauugcuuuga

SEQ ID NO: 2189331 - RNA, 20 nt, Human
aauuggaagcugcccugccc

SEQ ID NO: 2189332 - RNA, 20 nt, Human
aauuggaacagaauguuuua

SEQ ID NO: 2189333 - RNA, 15 nt, Human
aauuggagcucgugg

SEQ ID NO: 2189334 - RNA, 18 nt, Human
aauuggaccauccuauuu

SEQ ID NO: 2189335 - RNA, 16 nt, Human
aauuuaaauauaauuc

SEQ ID NO: 2189336 - RNA, 19 nt, Human
aauuuaaauauaauucugu

SEQ ID NO: 2189337 - RNA, 20 nt, Human
aauuuaaauauaauucugua

SEQ ID NO: 2189338 - RNA, 23 nt, Human
aauuuaaauauaauucuguaaau

SEQ ID NO: 2189339 - RNA, 16 nt, Human
aauuuaagcauuguuu

SEQ ID NO: 2189340 - RNA, 15 nt, Human
aauuuaagcauuguu

SEQ ID NO: 2189341 - RNA, 14 nt, Human
aauuuaagcauugu

SEQ ID NO: 2189342 - RNA, 13 nt, Human
aauuuaagcauug

SEQ ID NO: 2189343 - RNA, 12 nt, Human
aauuuaagcauu

SEQ ID NO: 2189344 - RNA, 11 nt, Human
aauuuaagcau

SEQ ID NO: 2189345 - RNA, 23 nt, Human
aauuuaagcauuguuugcuuauu

SEQ ID NO: 2189346 - RNA, 21 nt, Human
aauuuaagcauuguuugcuua

SEQ ID NO: 2189347 - RNA, 14 nt, Human
aauuuaaguaucuu

SEQ ID NO: 2189348 - RNA, 14 nt, Human
aauuuaagugcgug

SEQ ID NO: 2189349 - RNA, 16 nt, Human
aauuuaagugcgugug

SEQ ID NO: 2189350 - RNA, 18 nt, Human
aauuuacaaaguguguau

SEQ ID NO: 2189351 - RNA, 15 nt, Human
aauuuaguuauugau

SEQ ID NO: 2189352 - RNA, 19 nt, Human
aauuuacaaaguguguauu

SEQ ID NO: 2189353 - RNA, 21 nt, Human
aauuuacaaaguguguauuaa

SEQ ID NO: 2189354 - RNA, 14 nt, Human
aauuuacuugccau

SEQ ID NO: 2189355 - RNA, 15 nt, Human
aauuuacauacucug

SEQ ID NO: 2189356 - RNA, 17 nt, Human
aauuuaccugaagucuu

SEQ ID NO: 2189357 - RNA, 18 nt, Human
aauuuacagagacagaaa

SEQ ID NO: 2189358 - RNA, 17 nt, Human
aauuuacagagacagaa

SEQ ID NO: 2189359 - RNA, 16 nt, Human
uacuuccuccucccca

SEQ ID NO: 2189360 - RNA, 17 nt, Human
uacuucgucuucuaauu

SEQ ID NO: 2189361 - RNA, 18 nt, Human
uacuucgucuucuaauuu

SEQ ID NO: 2189362 - RNA, 19 nt, Human
uacuuccuaucaagccagu

SEQ ID NO: 2189363 - RNA, 14 nt, Human
uacuuccuccuccc

SEQ ID NO: 2189364 - RNA, 23 nt, Human
uacuuccugugacuucagcucug

SEQ ID NO: 2189365 - RNA, 13 nt, Human
uacuucuccaccc

SEQ ID NO: 2189366 - RNA, 18 nt, Human
uacuucuccacccugcuc

SEQ ID NO: 2189367 - RNA, 23 nt, Human
uacuucccauuuuggaaguuuuc

SEQ ID NO: 2189368 - RNA, 19 nt, Human
uacuuauuuuugacagugu

SEQ ID NO: 2189369 - RNA, 17 nt, Human
uacuuauuuuugacagu

SEQ ID NO: 2189370 - RNA, 20 nt, Human
uacuuccccuuccuaauucc

SEQ ID NO: 2189371 - RNA, 18 nt, Human
uacuuccccuuccuaauu

SEQ ID NO: 2189372 - RNA, 15 nt, Human
uacuuccccuuccua

SEQ ID NO: 2189373 - RNA, 14 nt, Human
uacuuccccuuccu

SEQ ID NO: 2189374 - RNA, 13 nt, Human
uacuuauuccaga

SEQ ID NO: 2189375 - RNA, 20 nt, Human
uacuuaucauccacauuguu

SEQ ID NO: 2189376 - RNA, 14 nt, Human
uacuuauuacugcu

SEQ ID NO: 2189377 - RNA, 15 nt, Human
uacuuauuacugcua

SEQ ID NO: 2189378 - RNA, 20 nt, Human
aauuugauugauuugaagaa

SEQ ID NO: 2189379 - RNA, 17 nt, Human
aauuugauugauuugaa

SEQ ID NO: 2189380 - RNA, 15 nt, Human
aauuugauuucuauu

SEQ ID NO: 2189381 - RNA, 19 nt, Human
aauuugaaaauaauuguuc

SEQ ID NO: 2189382 - RNA, 23 nt, Human
aauuugaaaacauaaucugcaaa

SEQ ID NO: 2189383 - RNA, 18 nt, Human
aauuugaaaauaauuguu

SEQ ID NO: 2189384 - RNA, 18 nt, Human
aauuucuuugccuguuca

SEQ ID NO: 2189385 - RNA, 21 nt, Human
aauuucuucacuguugaaaau

SEQ ID NO: 2189386 - RNA, 15 nt, Human
aauuucuuugccugu

SEQ ID NO: 2189387 - RNA, 12 nt, Human
aauuugauugau

SEQ ID NO: 2189388 - RNA, 17 nt, Human
aauuugauuauuaacau

SEQ ID NO: 2189389 - RNA, 16 nt, Human
aauuugauugauuuga

SEQ ID NO: 2189390 - RNA, 15 nt, Human
aauuugauugauuug

SEQ ID NO: 2189391 - RNA, 14 nt, Human
aauuugauugauuu

SEQ ID NO: 2189392 - RNA, 13 nt, Human
aauuugauugauu

SEQ ID NO: 2189393 - RNA, 18 nt, Human
aauuugcaagucauggcu

SEQ ID NO: 2189394 - RNA, 18 nt, Human
uacuucuucauucaauac

SEQ ID NO: 2189395 - RNA, 16 nt, Human
uacuucuuugcuuugc

SEQ ID NO: 2189396 - RNA, 15 nt, Human
uacuugaaaauuaac

SEQ ID NO: 2189397 - RNA, 20 nt, Human
uacuuuccuuuccccagccc

SEQ ID NO: 2189398 - RNA, 17 nt, Human
uacuuucguacauuggc

SEQ ID NO: 2189399 - RNA, 19 nt, Human
uacuuuccuuuccccagcc

SEQ ID NO: 2189400 - RNA, 22 nt, Human
uacuuuccacuugauuuugcaa

SEQ ID NO: 2189401 - RNA, 20 nt, Human
uacuugaaaucuaggauuau

SEQ ID NO: 2189402 - RNA, 20 nt, Human
uacuuuguccuuuuuguuau

SEQ ID NO: 2189403 - RNA, 23 nt, Human
uacuuugauauuuucaacgcagc

SEQ ID NO: 2189404 - RNA, 11 nt, Human
uacuuugucag

SEQ ID NO: 2189405 - RNA, 14 nt, Human
uacuuugucugaaa

SEQ ID NO: 2189406 - RNA, 16 nt, Human
uacuuugucugaaaaa

SEQ ID NO: 2189407 - RNA, 19 nt, Human
uacuuugaaaccagaaaau

SEQ ID NO: 2189408 - RNA, 18 nt, Human
uacuuugaagucauacca

SEQ ID NO: 2189409 - RNA, 14 nt, Human
uacuuugaagucau

SEQ ID NO: 2189410 - RNA, 14 nt, Human
uacuuugacuuuuu

SEQ ID NO: 2189411 - RNA, 15 nt, Human
uacuucuuauacauu

SEQ ID NO: 2189412 - RNA, 14 nt, Human
uacuucuuauacau

SEQ ID NO: 2189413 - RNA, 16 nt, Human
uacuucuuauacauuu

SEQ ID NO: 2189414 - RNA, 14 nt, Human
uacuucuugaaggu

SEQ ID NO: 2189415 - RNA, 14 nt, Human
uacuucuccagccu

SEQ ID NO: 2189416 - RNA, 21 nt, Human
uacuucuagagauaguacaua

SEQ ID NO: 2189417 - RNA, 22 nt, Human
uacuucguguccgacucuucug

SEQ ID NO: 2189418 - RNA, 21 nt, Human
uacuucugagggcaucuuggu

SEQ ID NO: 2189419 - RNA, 13 nt, Human
uacuucugaggua

SEQ ID NO: 2189420 - RNA, 20 nt, Human
uacuucuccacccugcucuc

SEQ ID NO: 2189421 - RNA, 15 nt, Human
uacuucugcuacaua

SEQ ID NO: 2189422 - RNA, 19 nt, Human
uacuucuuaggguuaugau

SEQ ID NO: 2189423 - RNA, 18 nt, Human
uacuagggagaagguuuc

SEQ ID NO: 2189424 - RNA, 23 nt, Human
uacuaggcuuaauaccuggguga

SEQ ID NO: 2189425 - RNA, 17 nt, Human
uacuagcauaugaguuu

SEQ ID NO: 2189426 - RNA, 18 nt, Human
uacuagggaaaugccuuu

SEQ ID NO: 2189427 - RNA, 13 nt, Human
uacuagguaacuu

SEQ ID NO: 2189428 - RNA, 21 nt, Human
uacuauuuaaagccuccucau

SEQ ID NO: 2189429 - RNA, 22 nt, Human
uacuauuuaaagccuccucauc

SEQ ID NO: 2189430 - RNA, 21 nt, Human
uacuagggaucccucaucugu

SEQ ID NO: 2189431 - RNA, 12 nt, Human
uacuauuuaaag

SEQ ID NO: 2189432 - RNA, 19 nt, Human
uacuauuuaaagccuccuc

SEQ ID NO: 2189433 - RNA, 18 nt, Human
uacuauuuuacuucuaga

SEQ ID NO: 2189434 - RNA, 13 nt, Human
uacuauuuuuacu

SEQ ID NO: 2189435 - RNA, 19 nt, Human
uacuauuuuacuucuagag

SEQ ID NO: 2189436 - RNA, 14 nt, Human
uacuauuuuacuuc

SEQ ID NO: 2189437 - RNA, 13 nt, Human
uacuauuuagaua

SEQ ID NO: 2189438 - RNA, 22 nt, Human
uacucuacccucuuagaaaaac

SEQ ID NO: 2189439 - RNA, 14 nt, Human
uacuauuuuuacug

SEQ ID NO: 2189440 - RNA, 15 nt, Human
uacuauuuuuacugc

SEQ ID NO: 2189441 - RNA, 18 nt, Human
uacuauuuuuacugccac

SEQ ID NO: 2189442 - RNA, 19 nt, Human
uacuauuuuuacugccacu

SEQ ID NO: 2189443 - RNA, 14 nt, Human
uacuaaaaaugcaa

SEQ ID NO: 2189444 - RNA, 14 nt, Human
uacgucugggagaa

SEQ ID NO: 2189445 - RNA, 14 nt, Human
uacgugagccaggu

SEQ ID NO: 2189446 - RNA, 20 nt, Human
uacuaaaaguucuucuccaa

SEQ ID NO: 2189447 - RNA, 18 nt, Human
uacuaaaaauacaaaaaa

SEQ ID NO: 2189448 - RNA, 14 nt, Human
uacuagaugucuuu

SEQ ID NO: 2189449 - RNA, 19 nt, Human
uacuagagucugaacagcu

SEQ ID NO: 2189450 - RNA, 19 nt, Human
uacuagaugucuuuaggca

SEQ ID NO: 2189451 - RNA, 15 nt, Human
uacuagaugucuuua

SEQ ID NO: 2189452 - RNA, 22 nt, Human
uacuagaagaugaauacaaaca

SEQ ID NO: 2189453 - RNA, 16 nt, Human
uacgucugacaggcaa

SEQ ID NO: 2189454 - RNA, 13 nt, Human
uacgucugggaga

SEQ ID NO: 2189455 - RNA, 21 nt, Human
uacgucugggagaaauugaca

SEQ ID NO: 2189456 - RNA, 13 nt, Human
uacgugaguccug

SEQ ID NO: 2189457 - RNA, 14 nt, Human
uacuaaaaauacaa

SEQ ID NO: 2189458 - RNA, 13 nt, Human
uacggacaccccc

SEQ ID NO: 2189459 - RNA, 14 nt, Human
uacggacacccccu

SEQ ID NO: 2189460 - RNA, 15 nt, Human
uacgucugacaggca

SEQ ID NO: 2189461 - RNA, 21 nt, Human
uacgcucuccuuucuuucuaa

SEQ ID NO: 2189462 - RNA, 22 nt, Human
uacgcugaagauggcauccugu

SEQ ID NO: 2189463 - RNA, 19 nt, Human
uacgcucuccuuucuuucu

SEQ ID NO: 2189464 - RNA, 15 nt, Human
uacgcucuccuuucu

SEQ ID NO: 2189465 - RNA, 15 nt, Human
uacgcuuugauucau

SEQ ID NO: 2189466 - RNA, 14 nt, Human
uacgcuuugauuca

SEQ ID NO: 2189467 - RNA, 13 nt, Human
uacgcugaagaug

SEQ ID NO: 2189468 - RNA, 18 nt, Human
aauugacagaucaagcug

SEQ ID NO: 2189469 - RNA, 19 nt, Human
aauugaauggucagcguug

SEQ ID NO: 2189470 - RNA, 19 nt, Human
aauugacagaucaagcugu

SEQ ID NO: 2189471 - RNA, 21 nt, Human
aauugacagaucaagcuguga

SEQ ID NO: 2189472 - RNA, 21 nt, Human
aauugaaucaguauaaacaaa

SEQ ID NO: 2189473 - RNA, 13 nt, Human
uacgcucuccuuu

SEQ ID NO: 2189474 - RNA, 14 nt, Human
aauugacauugcuu

SEQ ID NO: 2189475 - RNA, 24 nt, Human
uacgcuccaucgcugucaucucag

SEQ ID NO: 2189476 - RNA, 23 nt, Human
aauugacagaucaagcugugaga

SEQ ID NO: 2189477 - RNA, 19 nt, Human
aaugugugccauagaguuu

SEQ ID NO: 2189478 - RNA, 16 nt, Human
aauguguggccugcac

SEQ ID NO: 2189479 - RNA, 22 nt, Human
aaugugugugguuuuuuuucua

SEQ ID NO: 2189480 - RNA, 23 nt, Human
aauugaauaaugguaccagauaa

SEQ ID NO: 2189481 - RNA, 17 nt, Human
aaugugugugguuuuuu

SEQ ID NO: 2189482 - RNA, 14 nt, Human
aauugaauaauggu

SEQ ID NO: 2189483 - RNA, 21 nt, Human
aauugaauaaugguaccagau

SEQ ID NO: 2189484 - RNA, 22 nt, Human
aauugaauaaugguaccagaua

SEQ ID NO: 2189485 - RNA, 19 nt, Human
aauguguaucggaugcuuu

SEQ ID NO: 2189486 - RNA, 16 nt, Human
aauguguacaacuuaa

SEQ ID NO: 2189487 - RNA, 22 nt, Human
aauguguauuacaaauauuuug

SEQ ID NO: 2189488 - RNA, 21 nt, Human
aaugugguuauuucucugauu

SEQ ID NO: 2189489 - RNA, 23 nt, Human
aaugugguuauuucucugauuug

SEQ ID NO: 2189490 - RNA, 15 nt, Human
aauguguaauuuugu

SEQ ID NO: 2189491 - RNA, 16 nt, Human
aauguguaauuuuguu

SEQ ID NO: 2189492 - RNA, 19 nt, Human
aauguguaauuuuguucua

SEQ ID NO: 2189493 - RNA, 18 nt, Human
aaugugguuauuucucug

SEQ ID NO: 2189494 - RNA, 19 nt, Human
aaugugguuauuucucuga

SEQ ID NO: 2189495 - RNA, 14 nt, Human
aaugugggcagaga

SEQ ID NO: 2189496 - RNA, 18 nt, Human
uacugguccaaaagauug

SEQ ID NO: 2189497 - RNA, 13 nt, Human
uacugguccaaaa

SEQ ID NO: 2189498 - RNA, 19 nt, Human
uacugagagugaacaaauu

SEQ ID NO: 2189499 - RNA, 16 nt, Human
uacugggagccuaccc

SEQ ID NO: 2189500 - RNA, 20 nt, Human
uacugagaaaagccucucca

SEQ ID NO: 2189501 - RNA, 15 nt, Human
uacuguaauuuguga

SEQ ID NO: 2189502 - RNA, 18 nt, Human
uacuggucuuguggaauu

SEQ ID NO: 2189503 - RNA, 23 nt, Human
uacugguccaaaagauugcugaa

SEQ ID NO: 2189504 - RNA, 17 nt, Human
uacuguaauuugugaua

SEQ ID NO: 2189505 - RNA, 16 nt, Human
uacuguaauuugugau

SEQ ID NO: 2189506 - RNA, 17 nt, Human
uacugacugagaauaua

SEQ ID NO: 2189507 - RNA, 14 nt, Human
uacugacuuucuca

SEQ ID NO: 2189508 - RNA, 17 nt, Human
uacugagagugaacaaa

SEQ ID NO: 2189509 - RNA, 20 nt, Human
uacugaaagguuacccugua

SEQ ID NO: 2189510 - RNA, 22 nt, Human
uacugacauguggggccagguc

SEQ ID NO: 2189511 - RNA, 22 nt, Human
uacugaacaaucaaagcacuug

SEQ ID NO: 2189512 - RNA, 17 nt, Human
uacucuuugagauagaa

SEQ ID NO: 2189513 - RNA, 14 nt, Human
uacucuccuagaga

SEQ ID NO: 2189514 - RNA, 16 nt, Human
uacucuuucuguauau

SEQ ID NO: 2189515 - RNA, 14 nt, Human
uacucuuuuuguuu

SEQ ID NO: 2189516 - RNA, 22 nt, Human
uacucuuugagauagaagaacu

SEQ ID NO: 2189517 - RNA, 15 nt, Human
uacucuuucuguaua

SEQ ID NO: 2189518 - RNA, 14 nt, Human
uacucuuucuguau

SEQ ID NO: 2189519 - RNA, 13 nt, Human
uacucuuucugua

SEQ ID NO: 2189520 - RNA, 12 nt, Human
uacucuccuaga

SEQ ID NO: 2189521 - RNA, 16 nt, Human
uacucuccaaccugga

SEQ ID NO: 2189522 - RNA, 14 nt, Human
uacucuccaaccug

SEQ ID NO: 2189523 - RNA, 18 nt, Human
uacucuccaaccuggaca

SEQ ID NO: 2189524 - RNA, 16 nt, Human
uacucucccauggcuu

SEQ ID NO: 2189525 - RNA, 13 nt, Human
uacucuacugaua

SEQ ID NO: 2189526 - RNA, 14 nt, Human
uacucuagaugaag

SEQ ID NO: 2189527 - RNA, 12 nt, Human
uacucuagauuu

SEQ ID NO: 2189528 - RNA, 15 nt, Human
uacucuagauuuugu

SEQ ID NO: 2189529 - RNA, 16 nt, Human
uacucuagauuuuguu

SEQ ID NO: 2189530 - RNA, 15 nt, Human
aauugagauuagagg

SEQ ID NO: 2189531 - RNA, 22 nt, Human
aauugagagaauggaaaacaga

SEQ ID NO: 2189532 - RNA, 18 nt, Human
aauugaggacacugauau

SEQ ID NO: 2189533 - RNA, 21 nt, Human
aauugacuuauuuauauaaau

SEQ ID NO: 2189534 - RNA, 18 nt, Human
aauugacuucgacuguga

SEQ ID NO: 2189535 - RNA, 19 nt, Human
uacuguacaaugacuuuau

SEQ ID NO: 2189536 - RNA, 20 nt, Human
uacuguaauuuuauaugaag

SEQ ID NO: 2189537 - RNA, 14 nt, Human
uacuguaauuuuau

SEQ ID NO: 2189538 - RNA, 12 nt, Human
uacuguaauuuu

SEQ ID NO: 2189539 - RNA, 23 nt, Human
uacuguacagacagaaaaaacug

SEQ ID NO: 2189540 - RNA, 19 nt, Human
uacuguacagacagaaaaa

SEQ ID NO: 2189541 - RNA, 16 nt, Human
uacuguaauuccucaa

SEQ ID NO: 2189542 - RNA, 15 nt, Human
uacuguaauuccuca

SEQ ID NO: 2189543 - RNA, 13 nt, Human
uacuguaauuccu

SEQ ID NO: 2189544 - RNA, 15 nt, Human
aauugauuucaagac

SEQ ID NO: 2189545 - RNA, 13 nt, Human
aauugauuugcau

SEQ ID NO: 2189546 - RNA, 22 nt, Human
aauugauuugcauugaacacaa

SEQ ID NO: 2189547 - RNA, 20 nt, Human
aauugauuugcauugaacac

SEQ ID NO: 2189548 - RNA, 16 nt, Human
aauugauuugcauuga

SEQ ID NO: 2189549 - RNA, 14 nt, Human
aauugauuugcauu

SEQ ID NO: 2189550 - RNA, 14 nt, Human
aauugauuauucug

SEQ ID NO: 2189551 - RNA, 22 nt, Human
aauugauuauucugauuccacu

SEQ ID NO: 2189552 - RNA, 23 nt, Human
aauugauuauucugauuccacuu

SEQ ID NO: 2189553 - RNA, 17 nt, Human
aauugaggggauuaaua

SEQ ID NO: 2189554 - RNA, 19 nt, Human
aauugaggacuauggaaau

SEQ ID NO: 2189555 - RNA, 23 nt, Human
aauugcuuacuuuggaauacauu

SEQ ID NO: 2189556 - RNA, 11 nt, Human
aauugcauuga

SEQ ID NO: 2189557 - RNA, 13 nt, Human
aauugcagacugu

SEQ ID NO: 2189558 - RNA, 14 nt, Human
aauugcagaacuaa

SEQ ID NO: 2189559 - RNA, 18 nt, Human
aauugcacuuuuaaaccu

SEQ ID NO: 2189560 - RNA, 15 nt, Human
aauugcacucuaaaa

SEQ ID NO: 2189561 - RNA, 14 nt, Human
aauugcacuuuuaa

SEQ ID NO: 2189562 - RNA, 21 nt, Human
aauugcacaauauugaacuuu

SEQ ID NO: 2189563 - RNA, 14 nt, Human
aauugcacucuaaa

SEQ ID NO: 2189564 - RNA, 18 nt, Human
aauugcaaaucuugaaau

SEQ ID NO: 2189565 - RNA, 14 nt, Human
aauugcaaaucuug

SEQ ID NO: 2189566 - RNA, 23 nt, Human
aauugauuugcauugaacacaaa

SEQ ID NO: 2189567 - RNA, 20 nt, Human
acaagauuuuaaagacaugu

SEQ ID NO: 2189568 - RNA, 17 nt, Human
acaagcccccccuucca

SEQ ID NO: 2189569 - RNA, 18 nt, Human
acaagcccccccuuccac

SEQ ID NO: 2189570 - RNA, 14 nt, Human
acaagcccccccuu

SEQ ID NO: 2189571 - RNA, 17 nt, Human
acaagccccaggcaggc

SEQ ID NO: 2189572 - RNA, 16 nt, Human
acaagccccaggcagg

SEQ ID NO: 2189573 - RNA, 17 nt, Human
acaagauucccagagac

SEQ ID NO: 2189574 - RNA, 16 nt, Human
acaagauucccagaga

SEQ ID NO: 2189575 - RNA, 15 nt, Human
acaagauucccagag

SEQ ID NO: 2189576 - RNA, 20 nt, Human
acaagaucuuucaggaaaga

SEQ ID NO: 2189577 - RNA, 16 nt, Human
acaagaucuuucagga

SEQ ID NO: 2189578 - RNA, 15 nt, Human
acaagaucuuucagg

SEQ ID NO: 2189579 - RNA, 14 nt, Human
acaagauucccaga

SEQ ID NO: 2189580 - RNA, 21 nt, Human
acaagauucccagagacagga

SEQ ID NO: 2189581 - RNA, 18 nt, Human
acaagauucccagagaca

SEQ ID NO: 2189582 - RNA, 19 nt, Human
acaagccccaggcaggcug

SEQ ID NO: 2189583 - RNA, 17 nt, Human
acaagcgugagccacug

SEQ ID NO: 2189584 - RNA, 13 nt, Human
acaagcuccaagc

SEQ ID NO: 2189585 - RNA, 22 nt, Human
acaagcucacagaccuuugaac

SEQ ID NO: 2189586 - RNA, 18 nt, Human
acaagauagagagcuauu

SEQ ID NO: 2189587 - RNA, 18 nt, Human
acaagaguuuauuuccaa

SEQ ID NO: 2189588 - RNA, 17 nt, Human
acaagagcgaaacuccg

SEQ ID NO: 2189589 - RNA, 16 nt, Human
acaagagcgaaacucc

SEQ ID NO: 2189590 - RNA, 14 nt, Human
acaagaucuuucag

SEQ ID NO: 2189591 - RNA, 13 nt, Human
acaagaucuuuca

SEQ ID NO: 2189592 - RNA, 22 nt, Human
acaagaguuuauuuccaaauaa

SEQ ID NO: 2189593 - RNA, 19 nt, Human
acaagagcuuaacagugug

SEQ ID NO: 2189594 - RNA, 18 nt, Human
acaagagcuuaacagugu

SEQ ID NO: 2189595 - RNA, 22 nt, Human
acaagagcccaggccuccuaca

SEQ ID NO: 2189596 - RNA, 17 nt, Human
acaagaccacguuucua

SEQ ID NO: 2189597 - RNA, 14 nt, Human
acaagacacaguga

SEQ ID NO: 2189598 - RNA, 15 nt, Human
acaagacagaagcug

SEQ ID NO: 2189599 - RNA, 19 nt, Human
acaagaccaccacuucgaa

SEQ ID NO: 2189600 - RNA, 16 nt, Human
acaagaccacguuucu

SEQ ID NO: 2189601 - RNA, 13 nt, Human
acaaauguaugau

SEQ ID NO: 2189602 - RNA, 12 nt, Human
acaaauucuguu

SEQ ID NO: 2189603 - RNA, 16 nt, Human
acaaauucuguuucuu

SEQ ID NO: 2189604 - RNA, 15 nt, Human
acaaauucuguuucu

SEQ ID NO: 2189605 - RNA, 22 nt, Human
acaaauugaacucuuugaauga

SEQ ID NO: 2189606 - RNA, 20 nt, Human
acaaauugcuuacuuuggaa

SEQ ID NO: 2189607 - RNA, 18 nt, Human
acaaauugcuugaaagaa

SEQ ID NO: 2189608 - RNA, 16 nt, Human
acaacagauuugugaa

SEQ ID NO: 2189609 - RNA, 17 nt, Human
acaacagauuugugaac

SEQ ID NO: 2189610 - RNA, 17 nt, Human
acaaauuuacagagaca

SEQ ID NO: 2189611 - RNA, 13 nt, Human
acaagacacagug

SEQ ID NO: 2189612 - RNA, 17 nt, Human
acaacaucuuuuucuac

SEQ ID NO: 2189613 - RNA, 17 nt, Human
acaacagugcuaaaaau

SEQ ID NO: 2189614 - RNA, 23 nt, Human
acaacagugcuaaaaaugggacu

SEQ ID NO: 2189615 - RNA, 18 nt, Human
acaacagauuugugaacu

SEQ ID NO: 2189616 - RNA, 16 nt, Human
acaaauggaggccugu

SEQ ID NO: 2189617 - RNA, 22 nt, Human
acaaaugcugcgcccuucccca

SEQ ID NO: 2189618 - RNA, 15 nt, Human
acaaauggacauagg

SEQ ID NO: 2189619 - RNA, 20 nt, Human
acaaaugccacacaucaccc

SEQ ID NO: 2189620 - RNA, 16 nt, Human
acaaaugccacacauc

SEQ ID NO: 2189621 - RNA, 21 nt, Human
acaaauucugucucuggauua

SEQ ID NO: 2189622 - RNA, 15 nt, Human
acaaaugccacacau

SEQ ID NO: 2189623 - RNA, 17 nt, Human
uagcaagacacaucccu

SEQ ID NO: 2189624 - RNA, 12 nt, Human
uagcaagacaca

SEQ ID NO: 2189625 - RNA, 17 nt, Human
uagcaaauguuuugaca

SEQ ID NO: 2189626 - RNA, 21 nt, Human
uagcaaauguuuugacaugaa

SEQ ID NO: 2189627 - RNA, 23 nt, Human
uagcaaauaauuuccugguguga

SEQ ID NO: 2189628 - RNA, 12 nt, Human
uagcaaauacau

SEQ ID NO: 2189629 - RNA, 24 nt, Human
uagcaagauugcuuaaaauagcaa

SEQ ID NO: 2189630 - RNA, 20 nt, Human
uagcaagauugcuuaaaaua

SEQ ID NO: 2189631 - RNA, 18 nt, Human
uagcaagacacaucccua

SEQ ID NO: 2189632 - RNA, 18 nt, Human
uagcaagugaauuuuucu

SEQ ID NO: 2189633 - RNA, 16 nt, Human
uagcaaggcaugaugu

SEQ ID NO: 2189634 - RNA, 22 nt, Human
uagcaagugaauuuuucucuaa

SEQ ID NO: 2189635 - RNA, 18 nt, Human
acaauacucauaauguga

SEQ ID NO: 2189636 - RNA, 21 nt, Human
acaauaaaauuuuuuuucaug

SEQ ID NO: 2189637 - RNA, 19 nt, Human
acaauacucauaaugugaa

SEQ ID NO: 2189638 - RNA, 20 nt, Human
acaauacucauaaugugaag

SEQ ID NO: 2189639 - RNA, 20 nt, Human
acaauaaaauuuuuuuucau

SEQ ID NO: 2189640 - RNA, 20 nt, Human
acaauaaaaauggcucagau

SEQ ID NO: 2189641 - RNA, 20 nt, Human
acaauagcuuuacccucagg

SEQ ID NO: 2189642 - RNA, 19 nt, Human
acaauagcuuuacccucag

SEQ ID NO: 2189643 - RNA, 18 nt, Human
acaauaguaaccugggua

SEQ ID NO: 2189644 - RNA, 21 nt, Human
acaauacucauaaugugaagu

SEQ ID NO: 2189645 - RNA, 15 nt, Human
acaaguuuuucuguc

SEQ ID NO: 2189646 - RNA, 16 nt, Human
acaaguuuuucuguca

SEQ ID NO: 2189647 - RNA, 22 nt, Human
acaaguuuuucugucaagaaga

SEQ ID NO: 2189648 - RNA, 15 nt, Human
acaaguuguguuuga

SEQ ID NO: 2189649 - RNA, 14 nt, Human
acaaguuuuaaaua

SEQ ID NO: 2189650 - RNA, 16 nt, Human
acaauaaaaauguuua

SEQ ID NO: 2189651 - RNA, 14 nt, Human
acaauaaaaauguu

SEQ ID NO: 2189652 - RNA, 12 nt, Human
acaauaaaacau

SEQ ID NO: 2189653 - RNA, 16 nt, Human
acaauaaaacauuaau

SEQ ID NO: 2189654 - RNA, 15 nt, Human
acaauauugacuuug

SEQ ID NO: 2189655 - RNA, 18 nt, Human
acaauauugacuuugucu

SEQ ID NO: 2189656 - RNA, 14 nt, Human
acaauauugaacuu

SEQ ID NO: 2189657 - RNA, 12 nt, Human
acaaucucaaau

SEQ ID NO: 2189658 - RNA, 20 nt, Human
acaaucucggcucacugcau

SEQ ID NO: 2189659 - RNA, 18 nt, Human
acaaucucggcucacugc

SEQ ID NO: 2189660 - RNA, 21 nt, Human
acaauaugaauacagggcaug

SEQ ID NO: 2189661 - RNA, 14 nt, Human
acaauaugcaaugu

SEQ ID NO: 2189662 - RNA, 15 nt, Human
acaauaugaauacag

SEQ ID NO: 2189663 - RNA, 19 nt, Human
acaauaugcaaugugaagc

SEQ ID NO: 2189664 - RNA, 18 nt, Human
acaauauaaaacuguacu

SEQ ID NO: 2189665 - RNA, 19 nt, Human
acaauauaaaacuguacuu

SEQ ID NO: 2189666 - RNA, 21 nt, Human
acaauauaaccacaaagcaca

SEQ ID NO: 2189667 - RNA, 16 nt, Human
acaagcuccuggucuu

SEQ ID NO: 2189668 - RNA, 22 nt, Human
acaagcugcaaaucagccaugu

SEQ ID NO: 2189669 - RNA, 15 nt, Human
acaagcucccaggcc

SEQ ID NO: 2189670 - RNA, 14 nt, Human
acaaguuguguuug

SEQ ID NO: 2189671 - RNA, 22 nt, Human
acaagcuccaagcucccaggca

SEQ ID NO: 2189672 - RNA, 15 nt, Human
acaagcuccaagcuc

SEQ ID NO: 2189673 - RNA, 16 nt, Human
acaagcuccaagcucc

SEQ ID NO: 2189674 - RNA, 17 nt, Human
acaagcuccaagcuccc

SEQ ID NO: 2189675 - RNA, 19 nt, Human
acaagcuccaagcucccag

SEQ ID NO: 2189676 - RNA, 18 nt, Human
acaaucugacauucucag

SEQ ID NO: 2189677 - RNA, 20 nt, Human
acaaucuuaaggggcagcuu

SEQ ID NO: 2189678 - RNA, 18 nt, Human
acaaucuuaaggggcagc

SEQ ID NO: 2189679 - RNA, 19 nt, Human
acaaucuuaaggggcagcu

SEQ ID NO: 2189680 - RNA, 18 nt, Human
acaaugaagauaaaaaga

SEQ ID NO: 2189681 - RNA, 13 nt, Human
uagccuuccucca

SEQ ID NO: 2189682 - RNA, 15 nt, Human
uagccuucucuguuc

SEQ ID NO: 2189683 - RNA, 14 nt, Human
uagccuucucuguu

SEQ ID NO: 2189684 - RNA, 13 nt, Human
uagccuucucugu

SEQ ID NO: 2189685 - RNA, 18 nt, Human
uagccuuccuccacaucc

SEQ ID NO: 2189686 - RNA, 23 nt, Human
uagccuuccuccacauccuuucu

SEQ ID NO: 2189687 - RNA, 22 nt, Human
uagccuugcccggauucuggga

SEQ ID NO: 2189688 - RNA, 22 nt, Human
uagccuucucuguucauuuccu

SEQ ID NO: 2189689 - RNA, 20 nt, Human
uagccuucucuguucauuuc

SEQ ID NO: 2189690 - RNA, 16 nt, Human
uagccuucucuguuca

SEQ ID NO: 2189691 - RNA, 16 nt, Human
uagccuuuggcucugg

SEQ ID NO: 2189692 - RNA, 18 nt, Human
uagccuuuggcucuggag

SEQ ID NO: 2189693 - RNA, 16 nt, Human
uagcuacuaauuuuaa

SEQ ID NO: 2189694 - RNA, 21 nt, Human
uagcuuacaagccagcuggag

SEQ ID NO: 2189695 - RNA, 15 nt, Human
uagcuuagaccucag

SEQ ID NO: 2189696 - RNA, 16 nt, Human
uagcuuaccagaagcu

SEQ ID NO: 2189697 - RNA, 16 nt, Human
uagcucaggugucccu

SEQ ID NO: 2189698 - RNA, 22 nt, Human
uagcucaggaccugggaccucc

SEQ ID NO: 2189699 - RNA, 19 nt, Human
uagcuauuuuuauggaauu

SEQ ID NO: 2189700 - RNA, 17 nt, Human
uagcuauuuuuauggaa

SEQ ID NO: 2189701 - RNA, 16 nt, Human
uagcuauuuuuaugga

SEQ ID NO: 2189702 - RNA, 11 nt, Human
uagcuauuuuu

SEQ ID NO: 2189703 - RNA, 17 nt, Human
uagcucaaacguggcuu

SEQ ID NO: 2189704 - RNA, 18 nt, Human
uagcucaaacguggcuuu

SEQ ID NO: 2189705 - RNA, 20 nt, Human
uagcuagaagugggccagga

SEQ ID NO: 2189706 - RNA, 13 nt, Human
uagcuauuacugu

SEQ ID NO: 2189707 - RNA, 14 nt, Human
uagcuauuacuguc

SEQ ID NO: 2189708 - RNA, 15 nt, Human
uagcuauuacugucu

SEQ ID NO: 2189709 - RNA, 21 nt, Human
uagcuaucagaagaccacaaa

SEQ ID NO: 2189710 - RNA, 23 nt, Human
uagcuacaggaagcaccccaugc

SEQ ID NO: 2189711 - RNA, 19 nt, Human
uagcuagaagugggccagg

SEQ ID NO: 2189712 - RNA, 14 nt, Human
uagcuagaaguggg

SEQ ID NO: 2189713 - RNA, 19 nt, Human
uagcuagaaauaugauuuu

SEQ ID NO: 2189714 - RNA, 20 nt, Human
aauuuuuuuuuuuuaacuuu

SEQ ID NO: 2189715 - RNA, 15 nt, Human
aauuuuuuuucaugu

SEQ ID NO: 2189716 - RNA, 19 nt, Human
aauuuuuuuuuccuagccc

SEQ ID NO: 2189717 - RNA, 23 nt, Human
aauuuuuuuucauguuuuaacaa

SEQ ID NO: 2189718 - RNA, 23 nt, Human
acaaaacuacaugagaacaaaca

SEQ ID NO: 2189719 - RNA, 17 nt, Human
acaaaacuacaugagaa

SEQ ID NO: 2189720 - RNA, 16 nt, Human
acaaaacuagagacuc

SEQ ID NO: 2189721 - RNA, 14 nt, Human
acaaaacuuuucua

SEQ ID NO: 2189722 - RNA, 11 nt, Human
acaaaacuucc

SEQ ID NO: 2189723 - RNA, 19 nt, Human
acaaagccaaacucugcca

SEQ ID NO: 2189724 - RNA, 23 nt, Human
acaaaagcaagacuguugcucaa

SEQ ID NO: 2189725 - RNA, 11 nt, Human
acaaagccaga

SEQ ID NO: 2189726 - RNA, 17 nt, Human
acaaagccaacagucaa

SEQ ID NO: 2189727 - RNA, 14 nt, Human
acaaagcagccacg

SEQ ID NO: 2189728 - RNA, 20 nt, Human
acaaagccagaagcugagca

SEQ ID NO: 2189729 - RNA, 16 nt, Human
acaaagccagaagcug

SEQ ID NO: 2189730 - RNA, 13 nt, Human
acaaagcccaagg

SEQ ID NO: 2189731 - RNA, 11 nt, Human
acaaagcccaa

SEQ ID NO: 2189732 - RNA, 18 nt, Human
acaaagcccuuccauguc

SEQ ID NO: 2189733 - RNA, 20 nt, Human
acaaagcccaagggaucugg

SEQ ID NO: 2189734 - RNA, 18 nt, Human
acaaagccuuaucaagug

SEQ ID NO: 2189735 - RNA, 21 nt, Human
acaaagcgugguggacaugca

SEQ ID NO: 2189736 - RNA, 23 nt, Human
acaaaguuacuagguaacuucau

SEQ ID NO: 2189737 - RNA, 21 nt, Human
acaaaguuacuagguaacuuc

SEQ ID NO: 2189738 - RNA, 15 nt, Human
acaaaguuguaugug

SEQ ID NO: 2189739 - RNA, 16 nt, Human
acaaaguguguauuaa

SEQ ID NO: 2189740 - RNA, 17 nt, Human
acaaaguguguauuaaa

SEQ ID NO: 2189741 - RNA, 18 nt, Human
acaaaguguguauuaaaa

SEQ ID NO: 2189742 - RNA, 19 nt, Human
acaaaguguguauuaaaaa

SEQ ID NO: 2189743 - RNA, 18 nt, Human
acaaagugagacagucca

SEQ ID NO: 2189744 - RNA, 12 nt, Human
acaaagugugua

SEQ ID NO: 2189745 - RNA, 13 nt, Human
acaaaguguguau

SEQ ID NO: 2189746 - RNA, 15 nt, Human
acaaaguguguauua

SEQ ID NO: 2189747 - RNA, 19 nt, Human
acaaagccuuaucaagugu

SEQ ID NO: 2189748 - RNA, 23 nt, Human
acaaagccuuaucaagugucuuc

SEQ ID NO: 2189749 - RNA, 16 nt, Human
acaaagcuuagcagga

SEQ ID NO: 2189750 - RNA, 19 nt, Human
acaaagcuuagcaggagag

SEQ ID NO: 2189751 - RNA, 21 nt, Human
acaaagcuuagcaggagagga

SEQ ID NO: 2189752 - RNA, 20 nt, Human
acaaagcuucuaucccagga

SEQ ID NO: 2189753 - RNA, 21 nt, Human
acaaagcuucuaucccaggag

SEQ ID NO: 2189754 - RNA, 22 nt, Human
acaaagcuucuaucccaggagg

SEQ ID NO: 2189755 - RNA, 23 nt, Human
acaaagcuuggaagagccugcag

SEQ ID NO: 2189756 - RNA, 23 nt, Human
acaaagcuucuaucccaggaggu

SEQ ID NO: 2189757 - RNA, 16 nt, Human
uagauccacacacaga

SEQ ID NO: 2189758 - RNA, 16 nt, Human
uagauagguaaauacc

SEQ ID NO: 2189759 - RNA, 17 nt, Human
uagauaguuagaaccug

SEQ ID NO: 2189760 - RNA, 17 nt, Human
uagauaggccaugggca

SEQ ID NO: 2189761 - RNA, 22 nt, Human
uagauaggucagugcaaauacu

SEQ ID NO: 2189762 - RNA, 11 nt, Human
acaaauaugca

SEQ ID NO: 2189763 - RNA, 19 nt, Human
acaaauauaagaauaaaau

SEQ ID NO: 2189764 - RNA, 19 nt, Human
acaaauaugcaaaagguuc

SEQ ID NO: 2189765 - RNA, 14 nt, Human
acaaauauaagaau

SEQ ID NO: 2189766 - RNA, 15 nt, Human
acaaauauaagaaua

SEQ ID NO: 2189767 - RNA, 16 nt, Human
acaaauauaagaauaa

SEQ ID NO: 2189768 - RNA, 17 nt, Human
acaaauauaagaauaaa

SEQ ID NO: 2189769 - RNA, 12 nt, Human
acaaauaugcaa

SEQ ID NO: 2189770 - RNA, 23 nt, Human
acaaauauuuauuuucuuucugu

SEQ ID NO: 2189771 - RNA, 22 nt, Human
acaaauauuuauuuucuuucug

SEQ ID NO: 2189772 - RNA, 18 nt, Human
acaaauauuuauuuucuu

SEQ ID NO: 2189773 - RNA, 12 nt, Human
acaaauauuuau

SEQ ID NO: 2189774 - RNA, 19 nt, Human
uagcaaagauaucucaucu

SEQ ID NO: 2189775 - RNA, 17 nt, Human
uagcaaagauaucucau

SEQ ID NO: 2189776 - RNA, 22 nt, Human
uagaugcucuaugugcuuguaa

SEQ ID NO: 2189777 - RNA, 10 nt, Human
uagaugcuga

SEQ ID NO: 2189778 - RNA, 21 nt, Human
uagaugcaguucugaagaaga

SEQ ID NO: 2189779 - RNA, 20 nt, Human
uagaugcaguucugaagaag

SEQ ID NO: 2189780 - RNA, 19 nt, Human
uagaucuccaggagaacug

SEQ ID NO: 2189781 - RNA, 18 nt, Human
uagauccacacacagagg

SEQ ID NO: 2189782 - RNA, 15 nt, Human
uagaucccccagacu

SEQ ID NO: 2189783 - RNA, 16 nt, Human
uagaugaaguuuuaca

SEQ ID NO: 2189784 - RNA, 15 nt, Human
uagaugaacucaacu

SEQ ID NO: 2189785 - RNA, 22 nt, Human
uagaugaaaaagcauguacagu

SEQ ID NO: 2189786 - RNA, 23 nt, Human
uagaugaaaaagcauguacagug

SEQ ID NO: 2189787 - RNA, 13 nt, Human
uagaugaaaaagc

SEQ ID NO: 2189788 - RNA, 17 nt, Human
uagaugaaaaagcaugu

SEQ ID NO: 2189789 - RNA, 18 nt, Human
uagaugaaaaagcaugua

SEQ ID NO: 2189790 - RNA, 19 nt, Human
uagaugaaaaagcauguac

SEQ ID NO: 2189791 - RNA, 20 nt, Human
uagaugaaaaagcauguaca

SEQ ID NO: 2189792 - RNA, 21 nt, Human
uagaugaaaaagcauguacag

SEQ ID NO: 2189793 - RNA, 20 nt, Human
aauuuuuaaaguauauauuu

SEQ ID NO: 2189794 - RNA, 19 nt, Human
aauuuuuaaaguauauauu

SEQ ID NO: 2189795 - RNA, 13 nt, Human
aauuuuuaaagua

SEQ ID NO: 2189796 - RNA, 22 nt, Human
aauuuuuaaucuuuaauuuuac

SEQ ID NO: 2189797 - RNA, 14 nt, Human
aauuuguuugugcu

SEQ ID NO: 2189798 - RNA, 15 nt, Human
aauuuguuugugcuu

SEQ ID NO: 2189799 - RNA, 16 nt, Human
aauuuguuugugcuuc

SEQ ID NO: 2189800 - RNA, 18 nt, Human
aauuuguugaaauuaugu

SEQ ID NO: 2189801 - RNA, 12 nt, Human
aauuuguugcau

SEQ ID NO: 2189802 - RNA, 17 nt, Human
aauuuguuugaaaucuu

SEQ ID NO: 2189803 - RNA, 13 nt, Human
aauuuguuugugc

SEQ ID NO: 2189804 - RNA, 22 nt, Human
aauuuuuaaaguauauauuuau

SEQ ID NO: 2189805 - RNA, 20 nt, Human
aauuuuuaaauguaaaacau

SEQ ID NO: 2189806 - RNA, 13 nt, Human
aauuuuuaagcaa

SEQ ID NO: 2189807 - RNA, 21 nt, Human
aauuuuucuuauuucauuucu

SEQ ID NO: 2189808 - RNA, 20 nt, Human
aauuuuugccuucauuaccu

SEQ ID NO: 2189809 - RNA, 17 nt, Human
aauuuuugccuucauua

SEQ ID NO: 2189810 - RNA, 16 nt, Human
aauuuuugccuucauu

SEQ ID NO: 2189811 - RNA, 14 nt, Human
aauuuuuuuucaug

SEQ ID NO: 2189812 - RNA, 22 nt, Human
aauuuuuuuaucgucacugcuu

SEQ ID NO: 2189813 - RNA, 18 nt, Human
aauuuuuuuagaaagcau

SEQ ID NO: 2189814 - RNA, 20 nt, Human
aauuuuuuuagaaagcauuu

SEQ ID NO: 2189815 - RNA, 19 nt, Human
aauuuuuuuaaccaaaggu

SEQ ID NO: 2189816 - RNA, 20 nt, Human
aauuuuuuuaaccaaaggug

SEQ ID NO: 2189817 - RNA, 15 nt, Human
aauuuuuuuagaaag

SEQ ID NO: 2189818 - RNA, 18 nt, Human
aauuuuuuuaauuuugua

SEQ ID NO: 2189819 - RNA, 20 nt, Human
aauuuuuuuaauuuuguauu

SEQ ID NO: 2189820 - RNA, 19 nt, Human
aauuuuuuuaauuuacaaa

SEQ ID NO: 2189821 - RNA, 16 nt, Human
aauuuuuuuaauuuug

SEQ ID NO: 2189822 - RNA, 17 nt, Human
aauuuuuuuaauuuugu

SEQ ID NO: 2189823 - RNA, 16 nt, Human
aauuuuugguugaaua

SEQ ID NO: 2189824 - RNA, 14 nt, Human
aauuuuugguugaa

SEQ ID NO: 2189825 - RNA, 18 nt, Human
aauuuuugguugaauaaa

SEQ ID NO: 2189826 - RNA, 14 nt, Human
aauuuuuguaauuu

SEQ ID NO: 2189827 - RNA, 22 nt, Human
aauuuuuucucuaggaaauauu

SEQ ID NO: 2189828 - RNA, 23 nt, Human
uacuuuguugcaaguacugcugu

SEQ ID NO: 2189829 - RNA, 21 nt, Human
uacuuuuaaacagugagccug

SEQ ID NO: 2189830 - RNA, 13 nt, Human
uacuuuuuccugg

SEQ ID NO: 2189831 - RNA, 15 nt, Human
uacuuuuaaacugug

SEQ ID NO: 2189832 - RNA, 14 nt, Human
uacuuuuaaacugu

SEQ ID NO: 2189833 - RNA, 17 nt, Human
aauuugcauuaaauuca

SEQ ID NO: 2189834 - RNA, 21 nt, Human
aauuugcauuaaauucacaaa

SEQ ID NO: 2189835 - RNA, 18 nt, Human
aauuugcauuaaauucac

SEQ ID NO: 2189836 - RNA, 14 nt, Human
uacuuuuuuucaca

SEQ ID NO: 2189837 - RNA, 15 nt, Human
aauuugcauuaaauu

SEQ ID NO: 2189838 - RNA, 14 nt, Human
uacuuuuuucuuau

SEQ ID NO: 2189839 - RNA, 18 nt, Human
uacuuuuuucuuauuuaa

SEQ ID NO: 2189840 - RNA, 13 nt, Human
uacuuuuuguuau

SEQ ID NO: 2189841 - RNA, 15 nt, Human
aauuugcccucccau

SEQ ID NO: 2189842 - RNA, 23 nt, Human
aauuugcauuaaauucacaaacu

SEQ ID NO: 2189843 - RNA, 16 nt, Human
aauuugcuucacucaa

SEQ ID NO: 2189844 - RNA, 16 nt, Human
aauuugguucuaauag

SEQ ID NO: 2189845 - RNA, 21 nt, Human
aauuugggggacuuacaugau

SEQ ID NO: 2189846 - RNA, 18 nt, Human
aauuugggggacuuacau

SEQ ID NO: 2189847 - RNA, 22 nt, Human
aauuugguucuaauagaacuca

SEQ ID NO: 2189848 - RNA, 17 nt, Human
aauuugguucuaggccg

SEQ ID NO: 2189849 - RNA, 24 nt, Human
aauuuguaaaaacagcauugcuuu

SEQ ID NO: 2189850 - RNA, 23 nt, Human
aauuuguaaaaacagcauugcuu

SEQ ID NO: 2189851 - RNA, 22 nt, Human
aauuuguaaaaacagcauugcu

SEQ ID NO: 2189852 - RNA, 16 nt, Human
aauuuguuauaaugaa

SEQ ID NO: 2189853 - RNA, 18 nt, Human
aauuuguuauuuugcaac

SEQ ID NO: 2189854 - RNA, 21 nt, Human
aauaaccacuuaaaaaauguc

SEQ ID NO: 2189855 - RNA, 14 nt, Human
aauaaccacuuaaa

SEQ ID NO: 2189856 - RNA, 14 nt, Human
aauaacauuaccuu

SEQ ID NO: 2189857 - RNA, 15 nt, Human
aauaacauuaccuua

SEQ ID NO: 2189858 - RNA, 20 nt, Human
aauaacauuaccuuacugug

SEQ ID NO: 2189859 - RNA, 13 nt, Human
aauaacauuugug

SEQ ID NO: 2189860 - RNA, 20 nt, Human
aauaacacacauauaaacau

SEQ ID NO: 2189861 - RNA, 12 nt, Human
aauaacacacau

SEQ ID NO: 2189862 - RNA, 15 nt, Human
aauaacacacagcua

SEQ ID NO: 2189863 - RNA, 13 nt, Human
aauaacauuaccu

SEQ ID NO: 2189864 - RNA, 13 nt, Human
aauaaauuguuug

SEQ ID NO: 2189865 - RNA, 13 nt, Human
aauaacaaugugc

SEQ ID NO: 2189866 - RNA, 13 nt, Human
aauaacaauguua

SEQ ID NO: 2189867 - RNA, 19 nt, Human
aauaacaaugugcucucgg

SEQ ID NO: 2189868 - RNA, 14 nt, Human
aauaacaauguuaa

SEQ ID NO: 2189869 - RNA, 15 nt, Human
aauaacaauguuaag

SEQ ID NO: 2189870 - RNA, 20 nt, Human
aauaacaauguuaaggaaac

SEQ ID NO: 2189871 - RNA, 24 nt, Human
aauaacaauguuaaggaaacucuu

SEQ ID NO: 2189872 - RNA, 18 nt, Human
aauaacccuuugguuuuu

SEQ ID NO: 2189873 - RNA, 22 nt, Human
aauaaccacuuaaaaaaugucc

SEQ ID NO: 2189874 - RNA, 18 nt, Human
aauaaccucaaagugacu

SEQ ID NO: 2189875 - RNA, 17 nt, Human
aauaaccggauauauac

SEQ ID NO: 2189876 - RNA, 15 nt, Human
aauaacgauaaaaga

SEQ ID NO: 2189877 - RNA, 19 nt, Human
aauaacucuguggcauuau

SEQ ID NO: 2189878 - RNA, 21 nt, Human
aauaacuccuucuuguaguag

SEQ ID NO: 2189879 - RNA, 13 nt, Human
aauaacugugaag

SEQ ID NO: 2189880 - RNA, 17 nt, Human
aauaaaugucauuaaaa

SEQ ID NO: 2189881 - RNA, 13 nt, Human
aauaaaugucauu

SEQ ID NO: 2189882 - RNA, 20 nt, Human
aauaaauguaucuuauucac

SEQ ID NO: 2189883 - RNA, 21 nt, Human
aauaaauguaucuuauucaca

SEQ ID NO: 2189884 - RNA, 17 nt, Human
aauaaaugguauagcaa

SEQ ID NO: 2189885 - RNA, 21 nt, Human
aauaaaugguauagcaaaugu

SEQ ID NO: 2189886 - RNA, 22 nt, Human
aauaaaugguauagcaaauguu

SEQ ID NO: 2189887 - RNA, 23 nt, Human
aauaaaugguauagcaaauguuu

SEQ ID NO: 2189888 - RNA, 13 nt, Human
aauaaaugucuuu

SEQ ID NO: 2189889 - RNA, 23 nt, Human
aauaaaugucuuuuuuuuaaugu

SEQ ID NO: 2189890 - RNA, 12 nt, Human
aauaaaugucuu

SEQ ID NO: 2189891 - RNA, 14 nt, Human
aauaaaugucuugc

SEQ ID NO: 2189892 - RNA, 16 nt, Human
aauaaauugcuccuug

SEQ ID NO: 2189893 - RNA, 20 nt, Human
aauaaauugcuccuugacau

SEQ ID NO: 2189894 - RNA, 20 nt, Human
aauaaauuguaauuguaaag

SEQ ID NO: 2189895 - RNA, 12 nt, Human
aauaaauuguau

SEQ ID NO: 2189896 - RNA, 13 nt, Human
aauaaauuguaua

SEQ ID NO: 2189897 - RNA, 15 nt, Human
aauaaauuguauauu

SEQ ID NO: 2189898 - RNA, 16 nt, Human
aauaaauuguauauuc

SEQ ID NO: 2189899 - RNA, 17 nt, Human
aauaaauuguauauuca

SEQ ID NO: 2189900 - RNA, 18 nt, Human
aauaaauuguauauucac

SEQ ID NO: 2189901 - RNA, 21 nt, Human
aauaacaaugaaaguugauaa

SEQ ID NO: 2189902 - RNA, 14 nt, Human
aauaaauauuuaug

SEQ ID NO: 2189903 - RNA, 21 nt, Human
aauaaaucauuaauacucuuc

SEQ ID NO: 2189904 - RNA, 15 nt, Human
aauaaaucugaccca

SEQ ID NO: 2189905 - RNA, 16 nt, Human
aauaaaucauaaaacu

SEQ ID NO: 2189906 - RNA, 19 nt, Human
aauaaaugcaauauguauu

SEQ ID NO: 2189907 - RNA, 17 nt, Human
aauaaaugcaauaugua

SEQ ID NO: 2189908 - RNA, 22 nt, Human
aauaaaugagcuauguauuaac

SEQ ID NO: 2189909 - RNA, 16 nt, Human
aauaaaugagcuaugu

SEQ ID NO: 2189910 - RNA, 18 nt, Human
aauaaaugagcuauguau

SEQ ID NO: 2189911 - RNA, 20 nt, Human
aauaaaucugguagaaaaau

SEQ ID NO: 2189912 - RNA, 22 nt, Human
aauaaaucuguugccaagcugg

SEQ ID NO: 2189913 - RNA, 20 nt, Human
aauaaaucugacccagugcc

SEQ ID NO: 2189914 - RNA, 17 nt, Human
aauaaaucugacccagu

SEQ ID NO: 2189915 - RNA, 16 nt, Human
aauaaaucugacccag

SEQ ID NO: 2189916 - RNA, 19 nt, Human
aauaaauaugccucuccuu

SEQ ID NO: 2189917 - RNA, 20 nt, Human
aauaaauaugccucuccuuu

SEQ ID NO: 2189918 - RNA, 13 nt, Human
aauaaauaugagu

SEQ ID NO: 2189919 - RNA, 11 nt, Human
aauaaauaugc

SEQ ID NO: 2189920 - RNA, 13 nt, Human
aauaaauaugccu

SEQ ID NO: 2189921 - RNA, 16 nt, Human
aauaaauaugccucuc

SEQ ID NO: 2189922 - RNA, 19 nt, Human
aauaaaguucugaguguuu

SEQ ID NO: 2189923 - RNA, 15 nt, Human
aauaaauaucuguac

SEQ ID NO: 2189924 - RNA, 10 nt, Human
aauaaauaug

SEQ ID NO: 2189925 - RNA, 11 nt, Human
aauaaauauga

SEQ ID NO: 2189926 - RNA, 20 nt, Human
aauaaaguauuuaauuagug

SEQ ID NO: 2189927 - RNA, 21 nt, Human
aauaaaguauuuaauuagugc

SEQ ID NO: 2189928 - RNA, 22 nt, Human
aauaaaguauuuaauuagugcu

SEQ ID NO: 2189929 - RNA, 23 nt, Human
aauaaaguauuuaauuagugcua

SEQ ID NO: 2189930 - RNA, 22 nt, Human
aauaaaaccuuucaaauuucac

SEQ ID NO: 2189931 - RNA, 21 nt, Human
aauaaaaccuuucaaauuuca

SEQ ID NO: 2189932 - RNA, 16 nt, Human
aauaaaaccuuucaaa

SEQ ID NO: 2189933 - RNA, 15 nt, Human
aauaaaaccuuucaa

SEQ ID NO: 2189934 - RNA, 12 nt, Human
aauaaaacuuuu

SEQ ID NO: 2189935 - RNA, 15 nt, Human
aauaaaacuuuuuaa

SEQ ID NO: 2189936 - RNA, 14 nt, Human
aauaaaacuuuuua

SEQ ID NO: 2189937 - RNA, 16 nt, Human
aauaaaguaucuacau

SEQ ID NO: 2189938 - RNA, 15 nt, Human
aauaaaguaucuaca

SEQ ID NO: 2189939 - RNA, 14 nt, Human
aauaaaguaucuac

SEQ ID NO: 2189940 - RNA, 13 nt, Human
aauaaaguauuua

SEQ ID NO: 2189941 - RNA, 14 nt, Human
aauaaaguauuuaa

SEQ ID NO: 2189942 - RNA, 15 nt, Human
aauaaaguauuuaau

SEQ ID NO: 2189943 - RNA, 16 nt, Human
aauaaaguauuuaauu

SEQ ID NO: 2189944 - RNA, 19 nt, Human
aauaaaguauuuaauuagu

SEQ ID NO: 2189945 - RNA, 23 nt, Human
aauaaaaccuuucaaauuucaca

SEQ ID NO: 2189946 - RNA, 15 nt, Human
aauaaaacuggcuuu

SEQ ID NO: 2189947 - RNA, 18 nt, Human
aauaaaacuuuuuaaaau

SEQ ID NO: 2189948 - RNA, 19 nt, Human
aauaaaacauuuucacaca

SEQ ID NO: 2189949 - RNA, 17 nt, Human
aauaaaacauuuucaca

SEQ ID NO: 2189950 - RNA, 11 nt, Human
aauaaaacauu

SEQ ID NO: 2189951 - RNA, 12 nt, Human
aauaaaacauuu

SEQ ID NO: 2189952 - RNA, 13 nt, Human
aauaaaacauuuu

SEQ ID NO: 2189953 - RNA, 23 nt, Human
aauaaaacauuuuaaauggacag

SEQ ID NO: 2189954 - RNA, 14 nt, Human
aauaaaaccuuuca

SEQ ID NO: 2189955 - RNA, 13 nt, Human
aauaaaaccuuuc

SEQ ID NO: 2189956 - RNA, 12 nt, Human
aauaaaaccuuu

SEQ ID NO: 2189957 - RNA, 13 nt, Human
aauaaaaccagcu

SEQ ID NO: 2189958 - RNA, 15 nt, Human
aauaaaaaguuaaaa

SEQ ID NO: 2189959 - RNA, 20 nt, Human
aauaaaaagugacacagcag

SEQ ID NO: 2189960 - RNA, 14 nt, Human
aauaaaaaguuaaa

SEQ ID NO: 2189961 - RNA, 13 nt, Human
aauaaaaaguuaa

SEQ ID NO: 2189962 - RNA, 12 nt, Human
aauaaaaaguua

SEQ ID NO: 2189963 - RNA, 13 nt, Human
aauaaaaagugac

SEQ ID NO: 2189964 - RNA, 19 nt, Human
aauaaaaagugacacagca

SEQ ID NO: 2189965 - RNA, 18 nt, Human
aauaaaaaggcaccuaua

SEQ ID NO: 2189966 - RNA, 13 nt, Human
aauaaaaaggcac

SEQ ID NO: 2189967 - RNA, 11 nt, Human
aauaaaaaggc

SEQ ID NO: 2189968 - RNA, 15 nt, Human
aauaaaaaaaagaaa

SEQ ID NO: 2189969 - RNA, 23 nt, Human
aauaaaaagaucacuuucucagu

SEQ ID NO: 2189970 - RNA, 12 nt, Human
aaguuuuuguac

SEQ ID NO: 2189971 - RNA, 13 nt, Human
aaguuuuuguacu

SEQ ID NO: 2189972 - RNA, 14 nt, Human
aaguuuuuguacug

SEQ ID NO: 2189973 - RNA, 17 nt, Human
aaguuuuuguacuguaa

SEQ ID NO: 2189974 - RNA, 14 nt, Human
aauaaaaaaaagaa

SEQ ID NO: 2189975 - RNA, 13 nt, Human
aauaaaaaaaaga

SEQ ID NO: 2189976 - RNA, 19 nt, Human
aauaaaaagaucacuuucu

SEQ ID NO: 2189977 - RNA, 17 nt, Human
aauaaaaagaucacuuu

SEQ ID NO: 2189978 - RNA, 13 nt, Human
aaguuuuguacag

SEQ ID NO: 2189979 - RNA, 14 nt, Human
aaguuuuguacaga

SEQ ID NO: 2189980 - RNA, 19 nt, Human
uaaaguauuuaauuagugc

SEQ ID NO: 2189981 - RNA, 21 nt, Human
uaaaguauuuaauuagugcua

SEQ ID NO: 2189982 - RNA, 22 nt, Human
uaaaguauuuaauuagugcuaa

SEQ ID NO: 2189983 - RNA, 20 nt, Human
aaguuuuuauggcuuuugug

SEQ ID NO: 2189984 - RNA, 13 nt, Human
uaaaguauucuuc

SEQ ID NO: 2189985 - RNA, 14 nt, Human
uaaaguauucuucu

SEQ ID NO: 2189986 - RNA, 18 nt, Human
uaaaguauucuucucuuc

SEQ ID NO: 2189987 - RNA, 12 nt, Human
uaaaguauuuaa

SEQ ID NO: 2189988 - RNA, 14 nt, Human
uaaaguauuuaauu

SEQ ID NO: 2189989 - RNA, 16 nt, Human
uaaaguauuuaauuag

SEQ ID NO: 2189990 - RNA, 17 nt, Human
uaaaguauuuaauuagu

SEQ ID NO: 2189991 - RNA, 21 nt, Human
uaaaguauguaaaguauguaa

SEQ ID NO: 2189992 - RNA, 22 nt, Human
uaaaguauguaaaguauguaaa

SEQ ID NO: 2189993 - RNA, 13 nt, Human
uaaaguauguaaa

SEQ ID NO: 2189994 - RNA, 15 nt, Human
uaaaguauguaaaca

SEQ ID NO: 2189995 - RNA, 16 nt, Human
uaaaguauguaaacag

SEQ ID NO: 2189996 - RNA, 22 nt, Human
uaaaguauguaaacaggagaca

SEQ ID NO: 2189997 - RNA, 15 nt, Human
uaaaguaucaugcau

SEQ ID NO: 2189998 - RNA, 16 nt, Human
uaaaguaucaugcauu

SEQ ID NO: 2189999 - RNA, 17 nt, Human
uaaaguaucaugcauuc

SEQ ID NO: 2190000 - RNA, 14 nt, Human
uaaaguaugaaucu

SEQ ID NO: 2190001 - RNA, 15 nt, Human
uaaaguaugaaucua

SEQ ID NO: 2190002 - RNA, 16 nt, Human
uaaaguaugaaucuau

SEQ ID NO: 2190003 - RNA, 19 nt, Human
uaaaguaugaaucuaugcc

SEQ ID NO: 2190004 - RNA, 19 nt, Human
uaaaguaugguauugaaac

SEQ ID NO: 2190005 - RNA, 23 nt, Human
guuuugaacuaauaaaagcauaa

SEQ ID NO: 2190006 - RNA, 19 nt, Human
guuuugaagcuacugugug

SEQ ID NO: 2190007 - RNA, 18 nt, Human
uaaaggguguacuuauau

SEQ ID NO: 2190008 - RNA, 20 nt, Human
uaaagguggugaggcaauaa

SEQ ID NO: 2190009 - RNA, 23 nt, Human
uaaaggugguauguguguguaug

SEQ ID NO: 2190010 - RNA, 22 nt, Human
uaaaggugguauguguguguau

SEQ ID NO: 2190011 - RNA, 21 nt, Human
uaaaggugguaugugugugua

SEQ ID NO: 2190012 - RNA, 17 nt, Human
uaaaggugguaugugug

SEQ ID NO: 2190013 - RNA, 21 nt, Human
uaaagguggugaggcaauaaa

SEQ ID NO: 2190014 - RNA, 17 nt, Human
uaaaggugucuuccucc

SEQ ID NO: 2190015 - RNA, 19 nt, Human
uaaaggugucuuccuccca

SEQ ID NO: 2190016 - RNA, 20 nt, Human
uaaaggugucuuccucccaa

SEQ ID NO: 2190017 - RNA, 22 nt, Human
uaaagguuacaagccugcacaa

SEQ ID NO: 2190018 - RNA, 22 nt, Human
guuuugaacuaauaaaagcaua

SEQ ID NO: 2190019 - RNA, 17 nt, Human
guuuugaacuaauaaaa

SEQ ID NO: 2190020 - RNA, 13 nt, Human
guuuugaaaugcu

SEQ ID NO: 2190021 - RNA, 13 nt, Human
guuuugaaaagcu

SEQ ID NO: 2190022 - RNA, 14 nt, Human
guuuugaaaagcua

SEQ ID NO: 2190023 - RNA, 15 nt, Human
guuuugaaaagcuau

SEQ ID NO: 2190024 - RNA, 21 nt, Human
guuuugaaaagcuauuagcca

SEQ ID NO: 2190025 - RNA, 18 nt, Human
guuuugaagcuacugugu

SEQ ID NO: 2190026 - RNA, 14 nt, Human
guuuucuuugaaug

SEQ ID NO: 2190027 - RNA, 14 nt, Human
uaaaguauauauuu

SEQ ID NO: 2190028 - RNA, 19 nt, Human
uaaaguauauauagaaucu

SEQ ID NO: 2190029 - RNA, 17 nt, Human
uaaaguauauauuuauu

SEQ ID NO: 2190030 - RNA, 14 nt, Human
uaaaguaucaugca

SEQ ID NO: 2190031 - RNA, 20 nt, Human
uaaaguaucaggauacuaua

SEQ ID NO: 2190032 - RNA, 21 nt, Human
uaaaguagauuagaucuuuua

SEQ ID NO: 2190033 - RNA, 19 nt, Human
uaaaguaguaaaaauuaaa

SEQ ID NO: 2190034 - RNA, 17 nt, Human
uaaaguaguccugugaa

SEQ ID NO: 2190035 - RNA, 20 nt, Human
uaaagguugacaauaaaugu

SEQ ID NO: 2190036 - RNA, 13 nt, Human
uaaaguaaagcua

SEQ ID NO: 2190037 - RNA, 14 nt, Human
uaaaguaaagcuaa

SEQ ID NO: 2190038 - RNA, 15 nt, Human
uaaaguaaagcuaaa

SEQ ID NO: 2190039 - RNA, 17 nt, Human
uaaaguaaagcuaaaau

SEQ ID NO: 2190040 - RNA, 22 nt, Human
uaaagguucaugcaaacuuuau

SEQ ID NO: 2190041 - RNA, 19 nt, Human
uaaaguaaaaacaaagaaa

SEQ ID NO: 2190042 - RNA, 21 nt, Human
uaaaguaaaaacaaagaaauu

SEQ ID NO: 2190043 - RNA, 22 nt, Human
uaaaguaaaaacaaagaaauua

SEQ ID NO: 2190044 - RNA, 12 nt, Human
aauaacuuuuuu

SEQ ID NO: 2190045 - RNA, 12 nt, Human
aauaagaaaaga

SEQ ID NO: 2190046 - RNA, 13 nt, Human
aauaagaauagaa

SEQ ID NO: 2190047 - RNA, 22 nt, Human
aauaagaaacaacucuuugaga

SEQ ID NO: 2190048 - RNA, 15 nt, Human
aauaagaaaguuuca

SEQ ID NO: 2190049 - RNA, 20 nt, Human
aauaacugugaaguuuacau

SEQ ID NO: 2190050 - RNA, 14 nt, Human
aauaacugugaagu

SEQ ID NO: 2190051 - RNA, 16 nt, Human
aauaacugugaaguuu

SEQ ID NO: 2190052 - RNA, 20 nt, Human
aauaauugauuucaagaccu

SEQ ID NO: 2190053 - RNA, 16 nt, Human
aauaauugcagaacua

SEQ ID NO: 2190054 - RNA, 21 nt, Human
aauaauugcagaacuaaacuc

SEQ ID NO: 2190055 - RNA, 14 nt, Human
aauaauugguucuu

SEQ ID NO: 2190056 - RNA, 21 nt, Human
aauaauugaucaaauucauuu

SEQ ID NO: 2190057 - RNA, 18 nt, Human
aauaauuauuuauuuaau

SEQ ID NO: 2190058 - RNA, 20 nt, Human
aauaagagagucauaaaccu

SEQ ID NO: 2190059 - RNA, 15 nt, Human
aauaagagaaagaaa

SEQ ID NO: 2190060 - RNA, 17 nt, Human
aauaagacauaacguuu

SEQ ID NO: 2190061 - RNA, 14 nt, Human
aauaagagaaagaa

SEQ ID NO: 2190062 - RNA, 18 nt, Human
aauaagaauagaaauaaa

SEQ ID NO: 2190063 - RNA, 14 nt, Human
aauaagaaugauuu

SEQ ID NO: 2190064 - RNA, 14 nt, Human
aauaagaauuuagg

SEQ ID NO: 2190065 - RNA, 16 nt, Human
aauaauuuuuauauuu

SEQ ID NO: 2190066 - RNA, 17 nt, Human
aauaauuuuuauauuug

SEQ ID NO: 2190067 - RNA, 19 nt, Human
aauaauuuuuauauuugaa

SEQ ID NO: 2190068 - RNA, 22 nt, Human
aauaauuucccaauuaggaagu

SEQ ID NO: 2190069 - RNA, 20 nt, Human
aauaauuuccuggugugaag

SEQ ID NO: 2190070 - RNA, 21 nt, Human
aauaauuuccuggugugaagg

SEQ ID NO: 2190071 - RNA, 16 nt, Human
aauaauuuuaaacaaa

SEQ ID NO: 2190072 - RNA, 21 nt, Human
aauaauuuuaagaaaucaaag

SEQ ID NO: 2190073 - RNA, 13 nt, Human
uaaauaacuuuuu

SEQ ID NO: 2190074 - RNA, 15 nt, Human
uaaauaaauauauau

SEQ ID NO: 2190075 - RNA, 16 nt, Human
uaaauaaaucauuaau

SEQ ID NO: 2190076 - RNA, 22 nt, Human
uaaauaagaaacaacucuuuga

SEQ ID NO: 2190077 - RNA, 21 nt, Human
uaaauaagaaacaacucuuug

SEQ ID NO: 2190078 - RNA, 20 nt, Human
uaaauaaguuugcaauuugg

SEQ ID NO: 2190079 - RNA, 19 nt, Human
uaaauaaugugaaacugga

SEQ ID NO: 2190080 - RNA, 22 nt, Human
uaaauaccucaaccuaugguau

SEQ ID NO: 2190081 - RNA, 13 nt, Human
uaaauaccucuua

SEQ ID NO: 2190082 - RNA, 23 nt, Human
uaaauaccucuuagcugagugga

SEQ ID NO: 2190083 - RNA, 17 nt, Human
uaaauaccagacacgua

SEQ ID NO: 2190084 - RNA, 23 nt, Human
uaaauacagucuuccauuugcaa

SEQ ID NO: 2190085 - RNA, 22 nt, Human
uaaauacagucuuccauuugca

SEQ ID NO: 2190086 - RNA, 20 nt, Human
uaaauacagucuuccauuug

SEQ ID NO: 2190087 - RNA, 18 nt, Human
uaaauacagacacuaagu

SEQ ID NO: 2190088 - RNA, 19 nt, Human
uaaauacagacacuaaguu

SEQ ID NO: 2190089 - RNA, 22 nt, Human
uaaauacagacacuaaguuaua

SEQ ID NO: 2190090 - RNA, 17 nt, Human
uaaauacagucuuccau

SEQ ID NO: 2190091 - RNA, 13 nt, Human
uaaauacagucuu

SEQ ID NO: 2190092 - RNA, 18 nt, Human
aauacaacuuaaauaaua

SEQ ID NO: 2190093 - RNA, 20 nt, Human
aauacaaacauauuuguuaa

SEQ ID NO: 2190094 - RNA, 17 nt, Human
aauacaaacauauuugu

SEQ ID NO: 2190095 - RNA, 21 nt, Human
aauacaaacauauuuguuaaa

SEQ ID NO: 2190096 - RNA, 13 nt, Human
aauacaaacaaug

SEQ ID NO: 2190097 - RNA, 17 nt, Human
aauacaaacaccuggac

SEQ ID NO: 2190098 - RNA, 13 nt, Human
aauacaaaacuuc

SEQ ID NO: 2190099 - RNA, 21 nt, Human
aauacaaaaaauuagccgggc

SEQ ID NO: 2190100 - RNA, 20 nt, Human
aauacaaaaauuagccgggc

SEQ ID NO: 2190101 - RNA, 12 nt, Human
aauacaaaacuu

SEQ ID NO: 2190102 - RNA, 20 nt, Human
aauaauuuuuauauuugaaa

SEQ ID NO: 2190103 - RNA, 12 nt, Human
uaaauaaaguuu

SEQ ID NO: 2190104 - RNA, 21 nt, Human
uaaauaaaguuuguugaaaca

SEQ ID NO: 2190105 - RNA, 21 nt, Human
uaaauaaaguaucaugcauuc

SEQ ID NO: 2190106 - RNA, 12 nt, Human
uaaauaaauaua

SEQ ID NO: 2190107 - RNA, 13 nt, Human
uaaauaaauauau

SEQ ID NO: 2190108 - RNA, 14 nt, Human
uaaauaaauauaua

SEQ ID NO: 2190109 - RNA, 22 nt, Human
aauacaacauguagcugaguuu

SEQ ID NO: 2190110 - RNA, 14 nt, Human
uaaauaaaguauca

SEQ ID NO: 2190111 - RNA, 15 nt, Human
uaaauaaaguaucau

SEQ ID NO: 2190112 - RNA, 20 nt, Human
uaaauaaaguaucaugcauu

SEQ ID NO: 2190113 - RNA, 24 nt, Human
uaaauguuuuuuuuuaaagacuuu

SEQ ID NO: 2190114 - RNA, 14 nt, Human
uaaauuaacuuuua

SEQ ID NO: 2190115 - RNA, 12 nt, Human
uaaauuaacuuu

SEQ ID NO: 2190116 - RNA, 16 nt, Human
uaaauuaacuuuuaua

SEQ ID NO: 2190117 - RNA, 15 nt, Human
uaaauuaacuuuuau

SEQ ID NO: 2190118 - RNA, 17 nt, Human
uaaauuaacuuuuauaa

SEQ ID NO: 2190119 - RNA, 18 nt, Human
uaaauuaacuuuuauaaa

SEQ ID NO: 2190120 - RNA, 17 nt, Human
uaaauuuugaguucuac

SEQ ID NO: 2190121 - RNA, 20 nt, Human
uaaauguugaaagaucaaaa

SEQ ID NO: 2190122 - RNA, 23 nt, Human
uaaauguuuuuuuuuaaagacuu

SEQ ID NO: 2190123 - RNA, 15 nt, Human
uaaauguugaaagau

SEQ ID NO: 2190124 - RNA, 18 nt, Human
uaaaugcaauauguauua

SEQ ID NO: 2190125 - RNA, 19 nt, Human
uaaaugcaauauuaaugcc

SEQ ID NO: 2190126 - RNA, 15 nt, Human
uaaaugcaauaugua

SEQ ID NO: 2190127 - RNA, 14 nt, Human
uaaaugcaauaugu

SEQ ID NO: 2190128 - RNA, 14 nt, Human
uaaaucuuuuacaa

SEQ ID NO: 2190129 - RNA, 23 nt, Human
uaaaugcaccuggaauauauaac

SEQ ID NO: 2190130 - RNA, 21 nt, Human
uaaaugcauauccugagccau

SEQ ID NO: 2190131 - RNA, 20 nt, Human
uaaaugcauauccugagcca

SEQ ID NO: 2190132 - RNA, 16 nt, Human
uaaaugcauaaaugca

SEQ ID NO: 2190133 - RNA, 14 nt, Human
uaaaugcauuauag

SEQ ID NO: 2190134 - RNA, 22 nt, Human
uaaaugcagcgaaccaauauuu

SEQ ID NO: 2190135 - RNA, 10 nt, Human
uaaaugcaua

SEQ ID NO: 2190136 - RNA, 14 nt, Human
uaaaucucuaauau

SEQ ID NO: 2190137 - RNA, 15 nt, Human
uaaaucucuaauaug

SEQ ID NO: 2190138 - RNA, 18 nt, Human
uaaaucucuaauauggca

SEQ ID NO: 2190139 - RNA, 14 nt, Human
uaaaucugacccag

SEQ ID NO: 2190140 - RNA, 20 nt, Human
uaaaucuaugaaguauauaa

SEQ ID NO: 2190141 - RNA, 22 nt, Human
uaaaucuccaaaauaaaacuuu

SEQ ID NO: 2190142 - RNA, 20 nt, Human
uaaaucugcuggaguuucau

SEQ ID NO: 2190143 - RNA, 17 nt, Human
uaaaucugacccagugc

SEQ ID NO: 2190144 - RNA, 16 nt, Human
uaaaucugacccagug

SEQ ID NO: 2190145 - RNA, 15 nt, Human
uaaaucugacccagu

SEQ ID NO: 2190146 - RNA, 15 nt, Human
uaaaucugugaugau

SEQ ID NO: 2190147 - RNA, 13 nt, Human
uaaaucugugaug

SEQ ID NO: 2190148 - RNA, 14 nt, Human
uaaaucugugauga

SEQ ID NO: 2190149 - RNA, 18 nt, Human
uaaaucuguugccaagcu

SEQ ID NO: 2190150 - RNA, 20 nt, Human
uaaaucuguugccaagcugg

SEQ ID NO: 2190151 - RNA, 12 nt, Human
uaaaucugugau

SEQ ID NO: 2190152 - RNA, 18 nt, Human
uaaauagaguuugcuauu

SEQ ID NO: 2190153 - RNA, 18 nt, Human
uaaauagaguauaugcac

SEQ ID NO: 2190154 - RNA, 12 nt, Human
uaaauagcaugu

SEQ ID NO: 2190155 - RNA, 13 nt, Human
uaaauagcaugua

SEQ ID NO: 2190156 - RNA, 14 nt, Human
uaaauagcauguau

SEQ ID NO: 2190157 - RNA, 15 nt, Human
uaaauagcauguauu

SEQ ID NO: 2190158 - RNA, 18 nt, Human
uaaauagcauguauugug

SEQ ID NO: 2190159 - RNA, 18 nt, Human
uaaaucuccaaaauaaaa

SEQ ID NO: 2190160 - RNA, 15 nt, Human
uaaaucuccaaaaua

SEQ ID NO: 2190161 - RNA, 14 nt, Human
uaaaucuccaaaau

SEQ ID NO: 2190162 - RNA, 21 nt, Human
uaaaucuaguauacauugucu

SEQ ID NO: 2190163 - RNA, 19 nt, Human
uaaauagcauguauugugu

SEQ ID NO: 2190164 - RNA, 21 nt, Human
uaaauagcauguauugugucu

SEQ ID NO: 2190165 - RNA, 15 nt, Human
uaaauagcauucucu

SEQ ID NO: 2190166 - RNA, 19 nt, Human
uaaaucuaugaaguauaua

SEQ ID NO: 2190167 - RNA, 21 nt, Human
uaaaucuaugaaguauauaau

SEQ ID NO: 2190168 - RNA, 21 nt, Human
aauagcuuuacccucaggcau

SEQ ID NO: 2190169 - RNA, 17 nt, Human
aauagcuuuuauuguau

SEQ ID NO: 2190170 - RNA, 19 nt, Human
aauaggaaaaacugauuuu

SEQ ID NO: 2190171 - RNA, 17 nt, Human
aauaggaaaaacugauu

SEQ ID NO: 2190172 - RNA, 18 nt, Human
aauaggaaaaacugauuu

SEQ ID NO: 2190173 - RNA, 23 nt, Human
aauagcuauauccauguacugua

SEQ ID NO: 2190174 - RNA, 19 nt, Human
aauagcucuuucagggggg

SEQ ID NO: 2190175 - RNA, 22 nt, Human
aauagcuauauccauguacugu

SEQ ID NO: 2190176 - RNA, 14 nt, Human
aauagcuuguauag

SEQ ID NO: 2190177 - RNA, 19 nt, Human
aauagcuuguauaguguaa

SEQ ID NO: 2190178 - RNA, 15 nt, Human
aauaggaaaaacuga

SEQ ID NO: 2190179 - RNA, 16 nt, Human
aauaggaaaaacugau

SEQ ID NO: 2190180 - RNA, 13 nt, Human
aauaggcaaaggg

SEQ ID NO: 2190181 - RNA, 23 nt, Human
aauaggagaggaugagagcccag

SEQ ID NO: 2190182 - RNA, 20 nt, Human
aauaggagaggaugagagcc

SEQ ID NO: 2190183 - RNA, 13 nt, Human
aauaggagaggau

SEQ ID NO: 2190184 - RNA, 15 nt, Human
aauaggagaggauga

SEQ ID NO: 2190185 - RNA, 18 nt, Human
aauaggcguaacuaauuu

SEQ ID NO: 2190186 - RNA, 13 nt, Human
aauaguaauguuu

SEQ ID NO: 2190187 - RNA, 14 nt, Human
aauaguauccucca

SEQ ID NO: 2190188 - RNA, 22 nt, Human
aauaguaaaagauaacaagauc

SEQ ID NO: 2190189 - RNA, 22 nt, Human
aauaggcgaucacaacgugcau

SEQ ID NO: 2190190 - RNA, 21 nt, Human
aauagggcugagcucucugug

SEQ ID NO: 2190191 - RNA, 21 nt, Human
aauagauauccacuugagaca

SEQ ID NO: 2190192 - RNA, 22 nt, Human
aauagaguuugcuauuagagca

SEQ ID NO: 2190193 - RNA, 20 nt, Human
aauagauaagaguagaaacu

SEQ ID NO: 2190194 - RNA, 20 nt, Human
aauagacaguauauuuauag

SEQ ID NO: 2190195 - RNA, 15 nt, Human
aauagacaguauauu

SEQ ID NO: 2190196 - RNA, 18 nt, Human
aauagacccacaagaggc

SEQ ID NO: 2190197 - RNA, 23 nt, Human
aauagacaauuuauuauggcaca

SEQ ID NO: 2190198 - RNA, 23 nt, Human
aauagacacuccccgaagucuuu

SEQ ID NO: 2190199 - RNA, 22 nt, Human
aauagacacuccccgaagucuu

SEQ ID NO: 2190200 - RNA, 14 nt, Human
uaaauuuuuuuccu

SEQ ID NO: 2190201 - RNA, 18 nt, Human
uaaauuaaaacugaauug

SEQ ID NO: 2190202 - RNA, 20 nt, Human
uaaauuuugucuuuaacuca

SEQ ID NO: 2190203 - RNA, 18 nt, Human
uaaauuuugaguucuaca

SEQ ID NO: 2190204 - RNA, 19 nt, Human
uaaauuuugaguucuacau

SEQ ID NO: 2190205 - RNA, 15 nt, Human
uaaauuuugugucuc

SEQ ID NO: 2190206 - RNA, 17 nt, Human
uaaauuuuguaugaaaa

SEQ ID NO: 2190207 - RNA, 13 nt, Human
uaaauuuugugau

SEQ ID NO: 2190208 - RNA, 18 nt, Human
aauagacaauuuauuaug

SEQ ID NO: 2190209 - RNA, 23 nt, Human
aauagccacugcauaccaaccug

SEQ ID NO: 2190210 - RNA, 20 nt, Human
aauagccacuuaccuucaau

SEQ ID NO: 2190211 - RNA, 22 nt, Human
aauagccaacacccaucuguuu

SEQ ID NO: 2190212 - RNA, 22 nt, Human
aauagccacuuaccuucaauaa

SEQ ID NO: 2190213 - RNA, 20 nt, Human
aauagccugccucuucucua

SEQ ID NO: 2190214 - RNA, 13 nt, Human
aauagcugggacu

SEQ ID NO: 2190215 - RNA, 14 nt, Human
aauagcugggacua

SEQ ID NO: 2190216 - RNA, 23 nt, Human
aauagccacauuuggaauacuuu

SEQ ID NO: 2190217 - RNA, 22 nt, Human
aauagccacauuuggaauacuu

SEQ ID NO: 2190218 - RNA, 20 nt, Human
aauagccacauuuggaauac

SEQ ID NO: 2190219 - RNA, 21 nt, Human
aauagccaacacccaucuguu

SEQ ID NO: 2190220 - RNA, 16 nt, Human
aauagaugcugacugu

SEQ ID NO: 2190221 - RNA, 15 nt, Human
aauagauuauaguug

SEQ ID NO: 2190222 - RNA, 16 nt, Human
uaacauaauuuguaca

SEQ ID NO: 2190223 - RNA, 14 nt, Human
uaacaugauuuggg

SEQ ID NO: 2190224 - RNA, 19 nt, Human
uaacauaauuuguacauau

SEQ ID NO: 2190225 - RNA, 14 nt, Human
uaacauggaaguac

SEQ ID NO: 2190226 - RNA, 19 nt, Human
uaaccugccagggagacag

SEQ ID NO: 2190227 - RNA, 20 nt, Human
uaaccugaccgugggcgggg

SEQ ID NO: 2190228 - RNA, 17 nt, Human
uaaccucuucagaggcc

SEQ ID NO: 2190229 - RNA, 14 nt, Human
uaaccucugcacua

SEQ ID NO: 2190230 - RNA, 16 nt, Human
uaacauggaaguacua

SEQ ID NO: 2190231 - RNA, 15 nt, Human
uaacauggaaguacu

SEQ ID NO: 2190232 - RNA, 15 nt, Human
uaacuaaaagguaug

SEQ ID NO: 2190233 - RNA, 19 nt, Human
uaaccuguacuucaaguua

SEQ ID NO: 2190234 - RNA, 23 nt, Human
uaaccuggugcuggauauuuuca

SEQ ID NO: 2190235 - RNA, 22 nt, Human
uaaccuggugcuggauauuuuc

SEQ ID NO: 2190236 - RNA, 19 nt, Human
uaaccuggugcuggauauu

SEQ ID NO: 2190237 - RNA, 18 nt, Human
uaaccuggugcuggauau

SEQ ID NO: 2190238 - RNA, 15 nt, Human
uaaccuggugcugga

SEQ ID NO: 2190239 - RNA, 12 nt, Human
uaaccuggugcu

SEQ ID NO: 2190240 - RNA, 14 nt, Human
uaacuaaaagguau

SEQ ID NO: 2190241 - RNA, 18 nt, Human
aauaucaucaguauugaa

SEQ ID NO: 2190242 - RNA, 15 nt, Human
aauaucacuugucaa

SEQ ID NO: 2190243 - RNA, 23 nt, Human
aauaucauuuauuuuuuacauua

SEQ ID NO: 2190244 - RNA, 13 nt, Human
aauaucauuuauu

SEQ ID NO: 2190245 - RNA, 16 nt, Human
aauauccccucccagu

SEQ ID NO: 2190246 - RNA, 16 nt, Human
aauaucccuacaugua

SEQ ID NO: 2190247 - RNA, 17 nt, Human
aauaucccuacauguau

SEQ ID NO: 2190248 - RNA, 18 nt, Human
aauaucccuacauguauu

SEQ ID NO: 2190249 - RNA, 19 nt, Human
aauaucccuacauguauug

SEQ ID NO: 2190250 - RNA, 13 nt, Human
aauauauguuuac

SEQ ID NO: 2190251 - RNA, 20 nt, Human
aauauauguuuaccuuuuaa

SEQ ID NO: 2190252 - RNA, 12 nt, Human
aauauauguuua

SEQ ID NO: 2190253 - RNA, 16 nt, Human
aauauauuauaaucuu

SEQ ID NO: 2190254 - RNA, 13 nt, Human
aauauauuauaau

SEQ ID NO: 2190255 - RNA, 23 nt, Human
aauauauguuuaccuuuuaauua

SEQ ID NO: 2190256 - RNA, 12 nt, Human
aauaucacuugu

SEQ ID NO: 2190257 - RNA, 13 nt, Human
aauaguauuuaug

SEQ ID NO: 2190258 - RNA, 21 nt, Human
aauaguauccuccagguuuuu

SEQ ID NO: 2190259 - RNA, 23 nt, Human
aauaguauccuccagguuuuuca

SEQ ID NO: 2190260 - RNA, 15 nt, Human
aauaguauccuccag

SEQ ID NO: 2190261 - RNA, 17 nt, Human
aauaguauccuccaggu

SEQ ID NO: 2190262 - RNA, 18 nt, Human
aauaguauccuccagguu

SEQ ID NO: 2190263 - RNA, 20 nt, Human
aauaguauccuccagguuuu

SEQ ID NO: 2190264 - RNA, 18 nt, Human
aauaguauuuaugaaaug

SEQ ID NO: 2190265 - RNA, 21 nt, Human
aauauauggcagaguuguaaa

SEQ ID NO: 2190266 - RNA, 22 nt, Human
aauauauggcagaguuguaaau

SEQ ID NO: 2190267 - RNA, 15 nt, Human
aauaguauuugagag

SEQ ID NO: 2190268 - RNA, 23 nt, Human
aauauauggcagaguuguaaaua

SEQ ID NO: 2190269 - RNA, 12 nt, Human
aauauccuuugc

SEQ ID NO: 2190270 - RNA, 11 nt, Human
uaagaccuggc

SEQ ID NO: 2190271 - RNA, 13 nt, Human
uaagaccuggcag

SEQ ID NO: 2190272 - RNA, 18 nt, Human
aauaucuaauaaaaaguc

SEQ ID NO: 2190273 - RNA, 19 nt, Human
aauaucugaaaauguaugu

SEQ ID NO: 2190274 - RNA, 18 nt, Human
aauaucugaaaauguaug

SEQ ID NO: 2190275 - RNA, 17 nt, Human
aauaucugaaaauguau

SEQ ID NO: 2190276 - RNA, 16 nt, Human
aauaucugaaaaugua

SEQ ID NO: 2190277 - RNA, 16 nt, Human
aauaugagaaucagau

SEQ ID NO: 2190278 - RNA, 19 nt, Human
aauaugaggcauuuggcau

SEQ ID NO: 2190279 - RNA, 21 nt, Human
aauaugacggaagaacauaga

SEQ ID NO: 2190280 - RNA, 17 nt, Human
aauaugacggaagaaca

SEQ ID NO: 2190281 - RNA, 22 nt, Human
aauaugacagcugucccuguca

SEQ ID NO: 2190282 - RNA, 16 nt, Human
aauaugacagcugucc

SEQ ID NO: 2190283 - RNA, 22 nt, Human
aauaugaaugcccccagcuggc

SEQ ID NO: 2190284 - RNA, 12 nt, Human
aauaugaagcuc

SEQ ID NO: 2190285 - RNA, 12 nt, Human
aauaugaaugcc

SEQ ID NO: 2190286 - RNA, 18 nt, Human
aauaugaauacagggcau

SEQ ID NO: 2190287 - RNA, 18 nt, Human
aauaugaagcucaccugu

SEQ ID NO: 2190288 - RNA, 19 nt, Human
aauaugaacggugagcauu

SEQ ID NO: 2190289 - RNA, 14 nt, Human
aauaugaaaacuua

SEQ ID NO: 2190290 - RNA, 13 nt, Human
aauaugaaaacuu

SEQ ID NO: 2190291 - RNA, 15 nt, Human
aauaucuuuugaccu

SEQ ID NO: 2190292 - RNA, 19 nt, Human
aauaucuuuuuuuuaauaa

SEQ ID NO: 2190293 - RNA, 13 nt, Human
aauaucugggauu

SEQ ID NO: 2190294 - RNA, 21 nt, Human
aauaucugggauucuacuuua

SEQ ID NO: 2190295 - RNA, 13 nt, Human
aauaucugaaaug

SEQ ID NO: 2190296 - RNA, 20 nt, Human
aauaucugaaaauguaugug

SEQ ID NO: 2190297 - RNA, 13 nt, Human
aauaucuguauuu

SEQ ID NO: 2190298 - RNA, 14 nt, Human
aauaucuguauuua

SEQ ID NO: 2190299 - RNA, 20 nt, Human
aauaucuguauuuaauuuug

SEQ ID NO: 2190300 - RNA, 21 nt, Human
aauaucuguauuuaauuuuga

SEQ ID NO: 2190301 - RNA, 22 nt, Human
aauaucuguauuuaauuuugac

SEQ ID NO: 2190302 - RNA, 23 nt, Human
aauaucuguauuuaauuuugaca

SEQ ID NO: 2190303 - RNA, 17 nt, Human
uaacuacuguguuccug

SEQ ID NO: 2190304 - RNA, 16 nt, Human
uaacuacuguguuccu

SEQ ID NO: 2190305 - RNA, 15 nt, Human
uaacuacuguguucc

SEQ ID NO: 2190306 - RNA, 14 nt, Human
uaacuacuguguuc

SEQ ID NO: 2190307 - RNA, 12 nt, Human
uaacuacugugu

SEQ ID NO: 2190308 - RNA, 21 nt, Human
uaacuacuccggagacagggu

SEQ ID NO: 2190309 - RNA, 17 nt, Human
uaacuacuccggagaca

SEQ ID NO: 2190310 - RNA, 15 nt, Human
uaacuuuuauaaacu

SEQ ID NO: 2190311 - RNA, 18 nt, Human
uaacuuuuauaaacuuua

SEQ ID NO: 2190312 - RNA, 17 nt, Human
uaacuuuuauaaacuuu

SEQ ID NO: 2190313 - RNA, 16 nt, Human
uaacuaaauuaacauu

SEQ ID NO: 2190314 - RNA, 14 nt, Human
uaacuaaauuaaca

SEQ ID NO: 2190315 - RNA, 14 nt, Human
uaacuaaacucucu

SEQ ID NO: 2190316 - RNA, 17 nt, Human
uaacuaaacucucuuug

SEQ ID NO: 2190317 - RNA, 22 nt, Human
uaacuaaucuauuggguucauu

SEQ ID NO: 2190318 - RNA, 19 nt, Human
uaacuaaucuauuggguuc

SEQ ID NO: 2190319 - RNA, 23 nt, Human
uaacuaaucuauuggguucauua

SEQ ID NO: 2190320 - RNA, 23 nt, Human
uaacuaauaugggcauuguaguu

SEQ ID NO: 2190321 - RNA, 13 nt, Human
uaagaaugaaaua

SEQ ID NO: 2190322 - RNA, 14 nt, Human
uaagaaucuuuaga

SEQ ID NO: 2190323 - RNA, 15 nt, Human
uaagaaugcugguuu

SEQ ID NO: 2190324 - RNA, 21 nt, Human
uaagaaugaaauacuguuuga

SEQ ID NO: 2190325 - RNA, 15 nt, Human
uaagaaugaaauacu

SEQ ID NO: 2190326 - RNA, 18 nt, Human
uaagaauauuugaaugua

SEQ ID NO: 2190327 - RNA, 15 nt, Human
uaagaauauuugaau

SEQ ID NO: 2190328 - RNA, 19 nt, Human
uaagaccauaacagccaac

SEQ ID NO: 2190329 - RNA, 21 nt, Human
uaagacaugcacuaugaggaa

SEQ ID NO: 2190330 - RNA, 17 nt, Human
uaagaccaccaccucag

SEQ ID NO: 2190331 - RNA, 18 nt, Human
uaagaccaccaccucaga

SEQ ID NO: 2190332 - RNA, 22 nt, Human
uaagaaugcugguuuuccuaaa

SEQ ID NO: 2190333 - RNA, 17 nt, Human
uaagaaugguugccuua

SEQ ID NO: 2190334 - RNA, 23 nt, Human
uaagaaugcugguuuuccuaaau

SEQ ID NO: 2190335 - RNA, 21 nt, Human
uaagaaugcugguuuuccuaa

SEQ ID NO: 2190336 - RNA, 17 nt, Human
uaagacauuuuuggaag

SEQ ID NO: 2190337 - RNA, 21 nt, Human
uaagacaugauuuccuugaau

SEQ ID NO: 2190338 - RNA, 20 nt, Human
uaagacaugauuuccuugaa

SEQ ID NO: 2190339 - RNA, 21 nt, Human
aauauuuuccaugaaaaugca

SEQ ID NO: 2190340 - RNA, 17 nt, Human
aauauuuuauuauauau

SEQ ID NO: 2190341 - RNA, 11 nt, Human
aauauuuucau

SEQ ID NO: 2190342 - RNA, 18 nt, Human
aauauuuucauacagcau

SEQ ID NO: 2190343 - RNA, 16 nt, Human
aaucacuuaggaaaug

SEQ ID NO: 2190344 - RNA, 11 nt, Human
aaucagaacuc

SEQ ID NO: 2190345 - RNA, 23 nt, Human
aaucagaacucaaauggggccag

SEQ ID NO: 2190346 - RNA, 12 nt, Human
aaucagaacuca

SEQ ID NO: 2190347 - RNA, 13 nt, Human
aauauuuuaagua

SEQ ID NO: 2190348 - RNA, 12 nt, Human
aauauuugaauc

SEQ ID NO: 2190349 - RNA, 13 nt, Human
aauauuugaaucu

SEQ ID NO: 2190350 - RNA, 21 nt, Human
aauauuuccuuaaacugugug

SEQ ID NO: 2190351 - RNA, 15 nt, Human
aauauuuuaaguauu

SEQ ID NO: 2190352 - RNA, 14 nt, Human
aauauuugaaucuu

SEQ ID NO: 2190353 - RNA, 17 nt, Human
aauauuuuaaguauugc

SEQ ID NO: 2190354 - RNA, 18 nt, Human
aauauuuuaaguauugca

SEQ ID NO: 2190355 - RNA, 13 nt, Human
aauauuguacagu

SEQ ID NO: 2190356 - RNA, 18 nt, Human
aauauuguguugugaaug

SEQ ID NO: 2190357 - RNA, 20 nt, Human
aauauugcuuuggucauaug

SEQ ID NO: 2190358 - RNA, 13 nt, Human
aauauuguuucua

SEQ ID NO: 2190359 - RNA, 20 nt, Human
aauauuuaaaauuuauugcu

SEQ ID NO: 2190360 - RNA, 12 nt, Human
aauauuuaaaca

SEQ ID NO: 2190361 - RNA, 14 nt, Human
aauauuuaaacagc

SEQ ID NO: 2190362 - RNA, 15 nt, Human
aauauuucagauaau

SEQ ID NO: 2190363 - RNA, 19 nt, Human
aauauuuccuuaaacugug

SEQ ID NO: 2190364 - RNA, 23 nt, Human
aauauuuccauauggauuuucua

SEQ ID NO: 2190365 - RNA, 11 nt, Human
aauauuugaau

SEQ ID NO: 2190366 - RNA, 17 nt, Human
aauauuuaaacagcagu

SEQ ID NO: 2190367 - RNA, 16 nt, Human
aauauuuaaacagcag

SEQ ID NO: 2190368 - RNA, 13 nt, Human
aauauuuccauau

SEQ ID NO: 2190369 - RNA, 16 nt, Human
aauauuuccauaugga

SEQ ID NO: 2190370 - RNA, 18 nt, Human
aauaugcacacagugcuu

SEQ ID NO: 2190371 - RNA, 17 nt, Human
aauauugauaugcuuau

SEQ ID NO: 2190372 - RNA, 18 nt, Human
aauauugauaugcuuaua

SEQ ID NO: 2190373 - RNA, 15 nt, Human
aauaugcacacauuu

SEQ ID NO: 2190374 - RNA, 24 nt, Human
aauaugcaaagcacugacuucuaa

SEQ ID NO: 2190375 - RNA, 17 nt, Human
aauaugauauugcauau

SEQ ID NO: 2190376 - RNA, 19 nt, Human
aauaugacggaagaacaua

SEQ ID NO: 2190377 - RNA, 11 nt, Human
aauaugaugac

SEQ ID NO: 2190378 - RNA, 22 nt, Human
aauaugauuaguaaagaaauga

SEQ ID NO: 2190379 - RNA, 20 nt, Human
aauaugauuaguaaagaaau

SEQ ID NO: 2190380 - RNA, 12 nt, Human
aauaugauuuua

SEQ ID NO: 2190381 - RNA, 19 nt, Human
aauaugauuaguaaagaaa

SEQ ID NO: 2190382 - RNA, 18 nt, Human
aauaugauuaguaaagaa

SEQ ID NO: 2190383 - RNA, 17 nt, Human
aauaugcaaagcacuga

SEQ ID NO: 2190384 - RNA, 15 nt, Human
aauaugcaaagcacu

SEQ ID NO: 2190385 - RNA, 11 nt, Human
aauauugcuga

SEQ ID NO: 2190386 - RNA, 17 nt, Human
aauaugcaaugugaagc

SEQ ID NO: 2190387 - RNA, 20 nt, Human
aauauugauuucugccuucc

SEQ ID NO: 2190388 - RNA, 12 nt, Human
aauauugcugau

SEQ ID NO: 2190389 - RNA, 13 nt, Human
aauauugcugaug

SEQ ID NO: 2190390 - RNA, 15 nt, Human
aauauugcugauggu

SEQ ID NO: 2190391 - RNA, 18 nt, Human
aauauugcugauggugca

SEQ ID NO: 2190392 - RNA, 21 nt, Human
aauauugcugauggugcaaug

SEQ ID NO: 2190393 - RNA, 22 nt, Human
aauauugcugauggugcaauga

SEQ ID NO: 2190394 - RNA, 16 nt, Human
aaucuagcuuauuuug

SEQ ID NO: 2190395 - RNA, 19 nt, Human
aaucuaguauuucaugcug

SEQ ID NO: 2190396 - RNA, 17 nt, Human
aaucuacuaauuccaca

SEQ ID NO: 2190397 - RNA, 22 nt, Human
aaucuagauaucgacuuguuuu

SEQ ID NO: 2190398 - RNA, 15 nt, Human
aaucucaaauaacua

SEQ ID NO: 2190399 - RNA, 12 nt, Human
aaucucaaauuu

SEQ ID NO: 2190400 - RNA, 22 nt, Human
aaucugucacguagaacuugga

SEQ ID NO: 2190401 - RNA, 14 nt, Human
aaucucaaauuucu

SEQ ID NO: 2190402 - RNA, 21 nt, Human
aaucuguccaaaggaggcugg

SEQ ID NO: 2190403 - RNA, 20 nt, Human
aaucuguccaaaggaggcug

SEQ ID NO: 2190404 - RNA, 20 nt, Human
aaucucaaauucucaaccua

SEQ ID NO: 2190405 - RNA, 16 nt, Human
aaucuuauaauuuaaa

SEQ ID NO: 2190406 - RNA, 14 nt, Human
aaucuuauaauuua

SEQ ID NO: 2190407 - RNA, 16 nt, Human
aauccucacugggugg

SEQ ID NO: 2190408 - RNA, 15 nt, Human
aauccucacugggug

SEQ ID NO: 2190409 - RNA, 21 nt, Human
aauccuaugugauuuuaacuc

SEQ ID NO: 2190410 - RNA, 20 nt, Human
aauccuauucucgggcugag

SEQ ID NO: 2190411 - RNA, 20 nt, Human
aauccuaugugauuuuaacu

SEQ ID NO: 2190412 - RNA, 14 nt, Human
aauccuaugugauu

SEQ ID NO: 2190413 - RNA, 24 nt, Human
aauccuaauuucuccucccuuccu

SEQ ID NO: 2190414 - RNA, 19 nt, Human
aauccuaauuucuccuccc

SEQ ID NO: 2190415 - RNA, 21 nt, Human
aauccuaauuucuccucccuu

SEQ ID NO: 2190416 - RNA, 16 nt, Human
aauccuaauuucuccu

SEQ ID NO: 2190417 - RNA, 16 nt, Human
aauccuaacacauuau

SEQ ID NO: 2190418 - RNA, 17 nt, Human
aauccuaccuguuuugu

SEQ ID NO: 2190419 - RNA, 15 nt, Human
aauccuaccuguuuu

SEQ ID NO: 2190420 - RNA, 12 nt, Human
aaucauuguaca

SEQ ID NO: 2190421 - RNA, 22 nt, Human
aaucauugcuuugaagcaguug

SEQ ID NO: 2190422 - RNA, 13 nt, Human
aaucauuguacag

SEQ ID NO: 2190423 - RNA, 15 nt, Human
aaucauuguacaguu

SEQ ID NO: 2190424 - RNA, 16 nt, Human
aaucauuguacaguuu

SEQ ID NO: 2190425 - RNA, 17 nt, Human
aaucauuguacaguuug

SEQ ID NO: 2190426 - RNA, 18 nt, Human
aaucauuguacaguuugu

SEQ ID NO: 2190427 - RNA, 20 nt, Human
aaucauuguacaguuuguuu

SEQ ID NO: 2190428 - RNA, 14 nt, Human
aaucauugcuuuga

SEQ ID NO: 2190429 - RNA, 19 nt, Human
aaucauugcuuugaagcag

SEQ ID NO: 2190430 - RNA, 21 nt, Human
aaucauugcuuugaagcaguu

SEQ ID NO: 2190431 - RNA, 17 nt, Human
aaucauucucgauuuaa

SEQ ID NO: 2190432 - RNA, 15 nt, Human
aaucauucucgauuu

SEQ ID NO: 2190433 - RNA, 20 nt, Human
aaucauugcugaaaauggua

SEQ ID NO: 2190434 - RNA, 22 nt, Human
aaucauuguacaguuuguuuac

SEQ ID NO: 2190435 - RNA, 19 nt, Human
aaucauuucuauuucuccu

SEQ ID NO: 2190436 - RNA, 12 nt, Human
aaucauuucuau

SEQ ID NO: 2190437 - RNA, 20 nt, Human
aaucauuucuauuucuccuc

SEQ ID NO: 2190438 - RNA, 13 nt, Human
aauccuucuaguu

SEQ ID NO: 2190439 - RNA, 14 nt, Human
aauccuucuaguuu

SEQ ID NO: 2190440 - RNA, 16 nt, Human
aauccuucuaguuucc

SEQ ID NO: 2190441 - RNA, 20 nt, Human
aauccuucuaguuucccaca

SEQ ID NO: 2190442 - RNA, 13 nt, Human
aauccuugaagau

SEQ ID NO: 2190443 - RNA, 12 nt, Human
aaucuaaaugga

SEQ ID NO: 2190444 - RNA, 18 nt, Human
aauccuugcuuaugacau

SEQ ID NO: 2190445 - RNA, 17 nt, Human
aauccuugcuuaugaca

SEQ ID NO: 2190446 - RNA, 13 nt, Human
aauccuugcuuau

SEQ ID NO: 2190447 - RNA, 21 nt, Human
aauccuucuaguuucccacaa

SEQ ID NO: 2190448 - RNA, 20 nt, Human
aaucuaaccacaucaauauu

SEQ ID NO: 2190449 - RNA, 16 nt, Human
aaucuacuaauuccac

SEQ ID NO: 2190450 - RNA, 15 nt, Human
aaucuacuaauucca

SEQ ID NO: 2190451 - RNA, 18 nt, Human
aaucuaaauggaaccacu

SEQ ID NO: 2190452 - RNA, 15 nt, Human
aaucuaaauggaacc

SEQ ID NO: 2190453 - RNA, 13 nt, Human
aaucuaaauggaa

SEQ ID NO: 2190454 - RNA, 17 nt, Human
uaauaaaaguacauguu

SEQ ID NO: 2190455 - RNA, 14 nt, Human
uaauaaaaggaaaa

SEQ ID NO: 2190456 - RNA, 20 nt, Human
uaauaaaaggaaaagcaaau

SEQ ID NO: 2190457 - RNA, 13 nt, Human
uaauaaaauaauu

SEQ ID NO: 2190458 - RNA, 19 nt, Human
uaauaaaauaauucuaaag

SEQ ID NO: 2190459 - RNA, 16 nt, Human
uaauaaaauaauucua

SEQ ID NO: 2190460 - RNA, 18 nt, Human
uaauaaaauaauucuaaa

SEQ ID NO: 2190461 - RNA, 13 nt, Human
uaauaaaaggaaa

SEQ ID NO: 2190462 - RNA, 18 nt, Human
uaaguuugaaggaaacag

SEQ ID NO: 2190463 - RNA, 15 nt, Human
aaucaucaagucuuu

SEQ ID NO: 2190464 - RNA, 15 nt, Human
aaucauccaaugcuc

SEQ ID NO: 2190465 - RNA, 15 nt, Human
aaucaucuauaaaga

SEQ ID NO: 2190466 - RNA, 18 nt, Human
aaucaucuauaaagaaga

SEQ ID NO: 2190467 - RNA, 23 nt, Human
aaucaugaauuaguuuuauaugc

SEQ ID NO: 2190468 - RNA, 19 nt, Human
aaucaugaauuaguuuuau

SEQ ID NO: 2190469 - RNA, 17 nt, Human
aaucaugaauuaguuuu

SEQ ID NO: 2190470 - RNA, 19 nt, Human
aaucauguacauuucugaa

SEQ ID NO: 2190471 - RNA, 16 nt, Human
aaucauguacauuucu

SEQ ID NO: 2190472 - RNA, 14 nt, Human
aaucauguacauuu

SEQ ID NO: 2190473 - RNA, 15 nt, Human
aaucaugguuuuucu

SEQ ID NO: 2190474 - RNA, 21 nt, Human
aaucauggaaugguuauaaaa

SEQ ID NO: 2190475 - RNA, 15 nt, Human
aaucaucugugugaa

SEQ ID NO: 2190476 - RNA, 18 nt, Human
aaucauggaaugguuaua

SEQ ID NO: 2190477 - RNA, 17 nt, Human
aaucauggugcucagag

SEQ ID NO: 2190478 - RNA, 15 nt, Human
aaucaugugaacccg

SEQ ID NO: 2190479 - RNA, 16 nt, Human
aaucaugugaacccgg

SEQ ID NO: 2190480 - RNA, 13 nt, Human
aaucauguaguau

SEQ ID NO: 2190481 - RNA, 18 nt, Human
aaucauguaguaucaaau

SEQ ID NO: 2190482 - RNA, 22 nt, Human
aaucauguaguaucaaauauua

SEQ ID NO: 2190483 - RNA, 23 nt, Human
aaucauguaguaucaaauauuag

SEQ ID NO: 2190484 - RNA, 16 nt, Human
aaucaugucaggccug

SEQ ID NO: 2190485 - RNA, 14 nt, Human
uaaguacuguguac

SEQ ID NO: 2190486 - RNA, 14 nt, Human
aaucagcaagaaga

SEQ ID NO: 2190487 - RNA, 16 nt, Human
uaaguaucugacaucu

SEQ ID NO: 2190488 - RNA, 15 nt, Human
uaaguaucugacauc

SEQ ID NO: 2190489 - RNA, 20 nt, Human
uaaguauguguaaaauguga

SEQ ID NO: 2190490 - RNA, 20 nt, Human
aaucagacccuaccccacca

SEQ ID NO: 2190491 - RNA, 13 nt, Human
aaucagacaaagu

SEQ ID NO: 2190492 - RNA, 14 nt, Human
aaucagaucauuuc

SEQ ID NO: 2190493 - RNA, 15 nt, Human
aaucagaucauuuca

SEQ ID NO: 2190494 - RNA, 15 nt, Human
aaucagaucuuuauu

SEQ ID NO: 2190495 - RNA, 14 nt, Human
aaucagacuaugaa

SEQ ID NO: 2190496 - RNA, 17 nt, Human
aaucagacuaugaaguu

SEQ ID NO: 2190497 - RNA, 14 nt, Human
uaaguauguuauuu

SEQ ID NO: 2190498 - RNA, 17 nt, Human
uaaguaucuucauguau

SEQ ID NO: 2190499 - RNA, 12 nt, Human
uaaguuauugca

SEQ ID NO: 2190500 - RNA, 14 nt, Human
uaaguuauugcagu

SEQ ID NO: 2190501 - RNA, 15 nt, Human
uaaguuauugcaguu

SEQ ID NO: 2190502 - RNA, 16 nt, Human
uaaguuauugcaguuu

SEQ ID NO: 2190503 - RNA, 20 nt, Human
uaaguuauugcaguuuauca

SEQ ID NO: 2190504 - RNA, 20 nt, Human
uaaguuauuuuuacauucug

SEQ ID NO: 2190505 - RNA, 19 nt, Human
uaaguucaaauucuucuga

SEQ ID NO: 2190506 - RNA, 20 nt, Human
uaaguucaaauucuucugaa

SEQ ID NO: 2190507 - RNA, 20 nt, Human
uaaguuuuuauggcuuuugu

SEQ ID NO: 2190508 - RNA, 18 nt, Human
uaaguuuuuuuuuaaaaa

SEQ ID NO: 2190509 - RNA, 14 nt, Human
uaaguuucugggac

SEQ ID NO: 2190510 - RNA, 19 nt, Human
uaaguuucucagcucccau

SEQ ID NO: 2190511 - RNA, 23 nt, Human
uaaguuucucagcucccauuucu

SEQ ID NO: 2190512 - RNA, 16 nt, Human
uaaguuugauuucauu

SEQ ID NO: 2190513 - RNA, 12 nt, Human
uaaguuugaagg

SEQ ID NO: 2190514 - RNA, 18 nt, Human
uaaguuucucagcuccca

SEQ ID NO: 2190515 - RNA, 20 nt, Human
aaugacucaggacauccccc

SEQ ID NO: 2190516 - RNA, 15 nt, Human
aaugacauuuugcca

SEQ ID NO: 2190517 - RNA, 16 nt, Human
aaugacagagccagug

SEQ ID NO: 2190518 - RNA, 22 nt, Human
aaugacaucucaggggccagag

SEQ ID NO: 2190519 - RNA, 13 nt, Human
aaugacaucuuca

SEQ ID NO: 2190520 - RNA, 18 nt, Human
aaugacauuuauaucaca

SEQ ID NO: 2190521 - RNA, 18 nt, Human
aaugacaucuucaaagcu

SEQ ID NO: 2190522 - RNA, 18 nt, Human
aaugacaucaccacaguu

SEQ ID NO: 2190523 - RNA, 11 nt, Human
aaugacagagc

SEQ ID NO: 2190524 - RNA, 22 nt, Human
aaugacagguuugggaccccug

SEQ ID NO: 2190525 - RNA, 20 nt, Human
aaugaaaaugucagaaacca

SEQ ID NO: 2190526 - RNA, 14 nt, Human
aaugaaaaugucag

SEQ ID NO: 2190527 - RNA, 13 nt, Human
aaugaaaauguca

SEQ ID NO: 2190528 - RNA, 12 nt, Human
aaugaaaauguc

SEQ ID NO: 2190529 - RNA, 14 nt, Human
aaugaaaauaagaa

SEQ ID NO: 2190530 - RNA, 23 nt, Human
aaugaaaaugucagaaaccaguu

SEQ ID NO: 2190531 - RNA, 13 nt, Human
aaugacacagucu

SEQ ID NO: 2190532 - RNA, 17 nt, Human
aaugacacuugucccca

SEQ ID NO: 2190533 - RNA, 15 nt, Human
aaugaaaaccacauu

SEQ ID NO: 2190534 - RNA, 17 nt, Human
aaugaaaagcugaaucc

SEQ ID NO: 2190535 - RNA, 15 nt, Human
aaugagccuggcaag

SEQ ID NO: 2190536 - RNA, 21 nt, Human
aaugagagacacacugaagaa

SEQ ID NO: 2190537 - RNA, 19 nt, Human
aaugagacccucguggccu

SEQ ID NO: 2190538 - RNA, 14 nt, Human
aaugagacuaugcg

SEQ ID NO: 2190539 - RNA, 15 nt, Human
aaugagacuugcucu

SEQ ID NO: 2190540 - RNA, 16 nt, Human
aaugagacuugcucuc

SEQ ID NO: 2190541 - RNA, 14 nt, Human
aaugaccaauauua

SEQ ID NO: 2190542 - RNA, 17 nt, Human
aaugagaaggcagccac

SEQ ID NO: 2190543 - RNA, 13 nt, Human
aaugagaaucuac

SEQ ID NO: 2190544 - RNA, 18 nt, Human
aaugacuuacuguacaug

SEQ ID NO: 2190545 - RNA, 17 nt, Human
aaugacuuacuguacau

SEQ ID NO: 2190546 - RNA, 14 nt, Human
aaugacuuacugua

SEQ ID NO: 2190547 - RNA, 15 nt, Human
uaaugguuugaauau

SEQ ID NO: 2190548 - RNA, 18 nt, Human
uaauggugccuucauuug

SEQ ID NO: 2190549 - RNA, 16 nt, Human
uaauggugccuucauu

SEQ ID NO: 2190550 - RNA, 14 nt, Human
uaaugguguuuuaa

SEQ ID NO: 2190551 - RNA, 15 nt, Human
uaaugguuucaaaga

SEQ ID NO: 2190552 - RNA, 14 nt, Human
uaauguaaaauguu

SEQ ID NO: 2190553 - RNA, 17 nt, Human
uaauguaaaauguugaa

SEQ ID NO: 2190554 - RNA, 15 nt, Human
aaucuugucucaaug

SEQ ID NO: 2190555 - RNA, 17 nt, Human
aaucuugucucaaugcu

SEQ ID NO: 2190556 - RNA, 13 nt, Human
aaucuugucucaa

SEQ ID NO: 2190557 - RNA, 15 nt, Human
uaaugagggacugga

SEQ ID NO: 2190558 - RNA, 16 nt, Human
uaaugaggaugauuau

SEQ ID NO: 2190559 - RNA, 20 nt, Human
uaauggucccauccaggcag

SEQ ID NO: 2190560 - RNA, 21 nt, Human
uaauggucccauccaggcagu

SEQ ID NO: 2190561 - RNA, 14 nt, Human
uaauggucccaucc

SEQ ID NO: 2190562 - RNA, 15 nt, Human
uaauggucccaucca

SEQ ID NO: 2190563 - RNA, 16 nt, Human
uaauggucccauccag

SEQ ID NO: 2190564 - RNA, 18 nt, Human
uaauggucccauccaggc

SEQ ID NO: 2190565 - RNA, 13 nt, Human
uaaugaggaaacu

SEQ ID NO: 2190566 - RNA, 16 nt, Human
uaaugauaacuggaaa

SEQ ID NO: 2190567 - RNA, 21 nt, Human
aaugaaaaauuuaagcauugu

SEQ ID NO: 2190568 - RNA, 22 nt, Human
aaugaaaaauuuaagcauuguu

SEQ ID NO: 2190569 - RNA, 19 nt, Human
aaugaaaaauuuaagcauu

SEQ ID NO: 2190570 - RNA, 21 nt, Human
aaucuuuuacaacugccucga

SEQ ID NO: 2190571 - RNA, 12 nt, Human
aaucuuuuacaa

SEQ ID NO: 2190572 - RNA, 21 nt, Human
aaucuuuuaaaaauucaaaug

SEQ ID NO: 2190573 - RNA, 22 nt, Human
aaucuuucuuuugauucuuccu

SEQ ID NO: 2190574 - RNA, 14 nt, Human
aaucuuucuuucuu

SEQ ID NO: 2190575 - RNA, 16 nt, Human
aaucuuucuuucuuag

SEQ ID NO: 2190576 - RNA, 17 nt, Human
aaucuuucuuucuuaga

SEQ ID NO: 2190577 - RNA, 18 nt, Human
aaucuuucuuucuuagaa

SEQ ID NO: 2190578 - RNA, 19 nt, Human
aaucuuucuuucuuagaaa

SEQ ID NO: 2190579 - RNA, 20 nt, Human
aaucuuucuuucuuagaaau

SEQ ID NO: 2190580 - RNA, 21 nt, Human
aaucuuucuuucuuagaaauu

SEQ ID NO: 2190581 - RNA, 22 nt, Human
aaucuuucuuucuuagaaauuu

SEQ ID NO: 2190582 - RNA, 21 nt, Human
aaucuugucucaaugcucaua

SEQ ID NO: 2190583 - RNA, 18 nt, Human
aaucuugucucaaugcuc

SEQ ID NO: 2190584 - RNA, 20 nt, Human
aaucuugucucaaugcucau

SEQ ID NO: 2190585 - RNA, 15 nt, Human
aaucuuucuuuaccu

SEQ ID NO: 2190586 - RNA, 17 nt, Human
aaucuuucuuuaccuga

SEQ ID NO: 2190587 - RNA, 19 nt, Human
aaucuuucuuuaccugaga

SEQ ID NO: 2190588 - RNA, 21 nt, Human
aaucuuucuuuaccugagacc

SEQ ID NO: 2190589 - RNA, 22 nt, Human
aaucuuucuuuaccugagacca

SEQ ID NO: 2190590 - RNA, 12 nt, Human
uaauacuauauu

SEQ ID NO: 2190591 - RNA, 23 nt, Human
uaauacuaguugugaccuuagug

SEQ ID NO: 2190592 - RNA, 15 nt, Human
uaauacuaguuguga

SEQ ID NO: 2190593 - RNA, 18 nt, Human
uaauacuaguugugaccu

SEQ ID NO: 2190594 - RNA, 22 nt, Human
uaauacuaguugugaccuuagu

SEQ ID NO: 2190595 - RNA, 15 nt, Human
uaauacuaccuugaa

SEQ ID NO: 2190596 - RNA, 14 nt, Human
uaauacuaccuuga

SEQ ID NO: 2190597 - RNA, 12 nt, Human
uaauacuguauu

SEQ ID NO: 2190598 - RNA, 22 nt, Human
aaucuucaguuuuaucuuuaau

SEQ ID NO: 2190599 - RNA, 20 nt, Human
aaucuucaguuuuaucuuua

SEQ ID NO: 2190600 - RNA, 20 nt, Human
aaucuuauuagggagaaaau

SEQ ID NO: 2190601 - RNA, 13 nt, Human
aaucuucugaacu

SEQ ID NO: 2190602 - RNA, 20 nt, Human
aaucuucugaacuuggcgcu

SEQ ID NO: 2190603 - RNA, 14 nt, Human
uaauacuguauuug

SEQ ID NO: 2190604 - RNA, 18 nt, Human
uaauagcuuuuauuguau

SEQ ID NO: 2190605 - RNA, 21 nt, Human
uaauagcuuuuauuguauaaa

SEQ ID NO: 2190606 - RNA, 21 nt, Human
uaauaguguuaaucaauuuaa

SEQ ID NO: 2190607 - RNA, 17 nt, Human
uaauaguguuaaucaau

SEQ ID NO: 2190608 - RNA, 20 nt, Human
uaauaguguuaaucaauuua

SEQ ID NO: 2190609 - RNA, 21 nt, Human
uaauagugcuuaaaaaucauu

SEQ ID NO: 2190610 - RNA, 13 nt, Human
uaauaguguuaau

SEQ ID NO: 2190611 - RNA, 15 nt, Human
uaauaguguuaauca

SEQ ID NO: 2190612 - RNA, 21 nt, Human
uaaucaacugggcugaacacu

SEQ ID NO: 2190613 - RNA, 14 nt, Human
uaaucaagccucug

SEQ ID NO: 2190614 - RNA, 14 nt, Human
uaaucaaguugaau

SEQ ID NO: 2190615 - RNA, 16 nt, Human
uaaucaauaaacgauu

SEQ ID NO: 2190616 - RNA, 22 nt, Human
uaaucaauaaacgauuuaauuc

SEQ ID NO: 2190617 - RNA, 17 nt, Human
uaaucaaucaucugugu

SEQ ID NO: 2190618 - RNA, 15 nt, Human
uaaucacgcuuuccu

SEQ ID NO: 2190619 - RNA, 23 nt, Human
uaaucagugugucuaaauuugaa

SEQ ID NO: 2190620 - RNA, 18 nt, Human
uaaucaauguuucuucua

SEQ ID NO: 2190621 - RNA, 22 nt, Human
uaaucaauuaauuuuuuuauug

SEQ ID NO: 2190622 - RNA, 23 nt, Human
uaaucaauuaauuuuuuuauugu

SEQ ID NO: 2190623 - RNA, 13 nt, Human
uaaucaauuuaaa

SEQ ID NO: 2190624 - RNA, 20 nt, Human
uaaucaauuuaaacccauuu

SEQ ID NO: 2190625 - RNA, 16 nt, Human
uaaugaauuuuuauga

SEQ ID NO: 2190626 - RNA, 15 nt, Human
uaaugaaacuuggau

SEQ ID NO: 2190627 - RNA, 21 nt, Human
uaaugaauuuuuaugauauuc

SEQ ID NO: 2190628 - RNA, 15 nt, Human
uaaugacacuugucc

SEQ ID NO: 2190629 - RNA, 17 nt, Human
uaaucaugaaauuacuu

SEQ ID NO: 2190630 - RNA, 23 nt, Human
uaaugaaagacuguacaaaguag

SEQ ID NO: 2190631 - RNA, 22 nt, Human
uaaugaaagacuguacaaagua

SEQ ID NO: 2190632 - RNA, 15 nt, Human
uaaugacagagccag

SEQ ID NO: 2190633 - RNA, 20 nt, Human
uaaugacaucaccacaguuu

SEQ ID NO: 2190634 - RNA, 15 nt, Human
uaaugacuuaagcac

SEQ ID NO: 2190635 - RNA, 21 nt, Human
uaaugacuuaagcacacuuga

SEQ ID NO: 2190636 - RNA, 19 nt, Human
uaaugaaagacuguacaaa

SEQ ID NO: 2190637 - RNA, 18 nt, Human
uaaugaaagacuguacaa

SEQ ID NO: 2190638 - RNA, 17 nt, Human
uaaugaaagacuguaca

SEQ ID NO: 2190639 - RNA, 14 nt, Human
uaaugaaagacugu

SEQ ID NO: 2190640 - RNA, 17 nt, Human
uaaucauccaaugcuca

SEQ ID NO: 2190641 - RNA, 16 nt, Human
uaaucaucuauaaaga

SEQ ID NO: 2190642 - RNA, 17 nt, Human
uaaucaucuauaaagaa

SEQ ID NO: 2190643 - RNA, 14 nt, Human
uaaugaaacuugga

SEQ ID NO: 2190644 - RNA, 20 nt, Human
uaaugaaacaccuucucugg

SEQ ID NO: 2190645 - RNA, 13 nt, Human
uaaucaugaaauu

SEQ ID NO: 2190646 - RNA, 16 nt, Human
uaaucaugaaauuacu

SEQ ID NO: 2190647 - RNA, 15 nt, Human
uaaucauauaauaaa

SEQ ID NO: 2190648 - RNA, 20 nt, Human
uaaucauauaauaaauguac

SEQ ID NO: 2190649 - RNA, 22 nt, Human
uaaucauauaauaaauguacau

SEQ ID NO: 2190650 - RNA, 17 nt, Human
uaaucacgcuuuccuga

SEQ ID NO: 2190651 - RNA, 17 nt, Human
aaugcagugaauuguga

SEQ ID NO: 2190652 - RNA, 13 nt, Human
aaugcauaaaaug

SEQ ID NO: 2190653 - RNA, 20 nt, Human
uacaaguagggguugugggu

SEQ ID NO: 2190654 - RNA, 19 nt, Human
uacaaaauuugaaauuuag

SEQ ID NO: 2190655 - RNA, 16 nt, Human
uacaaacaaaauuucu

SEQ ID NO: 2190656 - RNA, 20 nt, Human
uacaaaauaaacaaauaaca

SEQ ID NO: 2190657 - RNA, 18 nt, Human
uacaagggucuagggaga

SEQ ID NO: 2190658 - RNA, 17 nt, Human
uacaaggaagguggugg

SEQ ID NO: 2190659 - RNA, 14 nt, Human
uacaaggcaacaua

SEQ ID NO: 2190660 - RNA, 14 nt, Human
uacaaggacagccc

SEQ ID NO: 2190661 - RNA, 23 nt, Human
aaugccaacuuguccuuuuguac

SEQ ID NO: 2190662 - RNA, 22 nt, Human
aaugcauuguaucgauguuaug

SEQ ID NO: 2190663 - RNA, 23 nt, Human
aaugcauuuuguuugguauugua

SEQ ID NO: 2190664 - RNA, 14 nt, Human
aaugcccagccccu

SEQ ID NO: 2190665 - RNA, 15 nt, Human
aaugcccagccccuu

SEQ ID NO: 2190666 - RNA, 18 nt, Human
aaugcauauccugagcca

SEQ ID NO: 2190667 - RNA, 17 nt, Human
aaugcauuauuuugaau

SEQ ID NO: 2190668 - RNA, 23 nt, Human
aaugcauuauaggaucauuuguu

SEQ ID NO: 2190669 - RNA, 22 nt, Human
aaugcauuauaggaucauuugu

SEQ ID NO: 2190670 - RNA, 16 nt, Human
aaugcauaaaauguua

SEQ ID NO: 2190671 - RNA, 14 nt, Human
aaugcauaaaugca

SEQ ID NO: 2190672 - RNA, 21 nt, Human
aaugcauuguaucgauguuau

SEQ ID NO: 2190673 - RNA, 18 nt, Human
aaugcauuguaucgaugu

SEQ ID NO: 2190674 - RNA, 12 nt, Human
aaugcauuguau

SEQ ID NO: 2190675 - RNA, 12 nt, Human
aaugcauuuugu

SEQ ID NO: 2190676 - RNA, 18 nt, Human
aaugcauuuuguuuggua

SEQ ID NO: 2190677 - RNA, 20 nt, Human
aaugcauuuuguuugguauu

SEQ ID NO: 2190678 - RNA, 21 nt, Human
aaugcauuuuguuugguauug

SEQ ID NO: 2190679 - RNA, 19 nt, Human
aaugcuuugugugauugaa

SEQ ID NO: 2190680 - RNA, 13 nt, Human
aaugcuuuuaaaa

SEQ ID NO: 2190681 - RNA, 20 nt, Human
aaugcuuuuuauuucugcau

SEQ ID NO: 2190682 - RNA, 19 nt, Human
aaugcuuuuuauuucugca

SEQ ID NO: 2190683 - RNA, 11 nt, Human
aaugcuuuuug

SEQ ID NO: 2190684 - RNA, 14 nt, Human
aaugcuuuuugaau

SEQ ID NO: 2190685 - RNA, 17 nt, Human
aaugcuuuuugaauguu

SEQ ID NO: 2190686 - RNA, 15 nt, Human
aaugcuuuccaaaac

SEQ ID NO: 2190687 - RNA, 12 nt, Human
aaugcuuucgau

SEQ ID NO: 2190688 - RNA, 12 nt, Human
aaugcuguguua

SEQ ID NO: 2190689 - RNA, 12 nt, Human
aauggaaacuga

SEQ ID NO: 2190690 - RNA, 14 nt, Human
aauggaauacugaa

SEQ ID NO: 2190691 - RNA, 19 nt, Human
aauggacauaggacucaaa

SEQ ID NO: 2190692 - RNA, 16 nt, Human
aauggacguguuauga

SEQ ID NO: 2190693 - RNA, 19 nt, Human
aauggaaaacagacucagg

SEQ ID NO: 2190694 - RNA, 13 nt, Human
aauggaaacugaa

SEQ ID NO: 2190695 - RNA, 20 nt, Human
aauggaagguuuguauauug

SEQ ID NO: 2190696 - RNA, 18 nt, Human
aauggaagguuuguauau

SEQ ID NO: 2190697 - RNA, 13 nt, Human
aaugcugugcccu

SEQ ID NO: 2190698 - RNA, 15 nt, Human
aaugcccccagcugg

SEQ ID NO: 2190699 - RNA, 17 nt, Human
aaugcccccagcuggcc

SEQ ID NO: 2190700 - RNA, 18 nt, Human
aaugcccccagcuggccc

SEQ ID NO: 2190701 - RNA, 21 nt, Human
aaugcugugcccuaaagugua

SEQ ID NO: 2190702 - RNA, 20 nt, Human
aaugcugugcccuaaagugu

SEQ ID NO: 2190703 - RNA, 20 nt, Human
aaugcccagccccuucugac

SEQ ID NO: 2190704 - RNA, 22 nt, Human
aaugcccagccccuucugaccc

SEQ ID NO: 2190705 - RNA, 23 nt, Human
aaugcccagccccuucugaccca

SEQ ID NO: 2190706 - RNA, 24 nt, Human
aaugcccagccccuucugacccau

SEQ ID NO: 2190707 - RNA, 15 nt, Human
uaauuuaaaaaauaa

SEQ ID NO: 2190708 - RNA, 14 nt, Human
uaauuuaugaguuu

SEQ ID NO: 2190709 - RNA, 23 nt, Human
uaauuuaucuugucucugggcuu

SEQ ID NO: 2190710 - RNA, 16 nt, Human
uaauuuaaaauuguga

SEQ ID NO: 2190711 - RNA, 15 nt, Human
uaauuuaaaauugug

SEQ ID NO: 2190712 - RNA, 23 nt, Human
uaauuguuguuuguauguauaau

SEQ ID NO: 2190713 - RNA, 22 nt, Human
uaauuguuguuuguauguauaa

SEQ ID NO: 2190714 - RNA, 17 nt, Human
uaauuguuugucuuuaa

SEQ ID NO: 2190715 - RNA, 16 nt, Human
uaauuguuuugcacuu

SEQ ID NO: 2190716 - RNA, 18 nt, Human
uaauuguuuugcacuuuu

SEQ ID NO: 2190717 - RNA, 10 nt, Human
uaauuccaug

SEQ ID NO: 2190718 - RNA, 11 nt, Human
uaauuccauga

SEQ ID NO: 2190719 - RNA, 17 nt, Human
uaauuccacaccuuuua

SEQ ID NO: 2190720 - RNA, 16 nt, Human
uaauucccauuuugca

SEQ ID NO: 2190721 - RNA, 16 nt, Human
uaauuguuguuucuuu

SEQ ID NO: 2190722 - RNA, 19 nt, Human
uaauuguuguuuguaugua

SEQ ID NO: 2190723 - RNA, 18 nt, Human
uaauuguuguuuguaugu

SEQ ID NO: 2190724 - RNA, 15 nt, Human
uaauuguuguuugua

SEQ ID NO: 2190725 - RNA, 19 nt, Human
uaauuguuguuucuuucua

SEQ ID NO: 2190726 - RNA, 22 nt, Human
uaauuguuguuucuuucuagug

SEQ ID NO: 2190727 - RNA, 17 nt, Human
uaauuccacagcugcuc

SEQ ID NO: 2190728 - RNA, 14 nt, Human
uaauuccacagcug

SEQ ID NO: 2190729 - RNA, 13 nt, Human
uaauuccacagcu

SEQ ID NO: 2190730 - RNA, 15 nt, Human
uaauuccacaccuuu

SEQ ID NO: 2190731 - RNA, 19 nt, Human
uaauuccaauaugaugacu

SEQ ID NO: 2190732 - RNA, 20 nt, Human
uaauuccaauaugaugacuc

SEQ ID NO: 2190733 - RNA, 15 nt, Human
uaauucauguuucuu

SEQ ID NO: 2190734 - RNA, 15 nt, Human
uaauuccaauaugau

SEQ ID NO: 2190735 - RNA, 16 nt, Human
uaauuccaauaugaug

SEQ ID NO: 2190736 - RNA, 18 nt, Human
uaauuccaauaugaugac

SEQ ID NO: 2190737 - RNA, 13 nt, Human
uaauucaagaaaa

SEQ ID NO: 2190738 - RNA, 13 nt, Human
uaauuauuuuggu

SEQ ID NO: 2190739 - RNA, 16 nt, Human
uaauuauuuugguacu

SEQ ID NO: 2190740 - RNA, 20 nt, Human
uaauuauuuugguacuuuua

SEQ ID NO: 2190741 - RNA, 21 nt, Human
uaauucaaagcaccaaaauaa

SEQ ID NO: 2190742 - RNA, 21 nt, Human
uaauuauuuugguacuuuuau

SEQ ID NO: 2190743 - RNA, 22 nt, Human
uaauucaaagcucuauuaagau

SEQ ID NO: 2190744 - RNA, 19 nt, Human
uaauucaaagcaccaaaau

SEQ ID NO: 2190745 - RNA, 12 nt, Human
uaauucaaagca

SEQ ID NO: 2190746 - RNA, 22 nt, Human
aaugagcucgcauuugucaaug

SEQ ID NO: 2190747 - RNA, 18 nt, Human
aaugagagaauaagucau

SEQ ID NO: 2190748 - RNA, 23 nt, Human
aaugagagaauaagucauguucc

SEQ ID NO: 2190749 - RNA, 16 nt, Human
aaugagcuauguauua

SEQ ID NO: 2190750 - RNA, 16 nt, Human
aaugaggacauguuuu

SEQ ID NO: 2190751 - RNA, 13 nt, Human
aaugaggaaugua

SEQ ID NO: 2190752 - RNA, 14 nt, Human
aaugaggacauguu

SEQ ID NO: 2190753 - RNA, 19 nt, Human
uacaaaaaaaaaguuuuau

SEQ ID NO: 2190754 - RNA, 20 nt, Human
uaauuucaaaaugcuuuuua

SEQ ID NO: 2190755 - RNA, 16 nt, Human
uaauuucaaaaugcuu

SEQ ID NO: 2190756 - RNA, 15 nt, Human
uaauuucaaaaugcu

SEQ ID NO: 2190757 - RNA, 14 nt, Human
uacaaaaacacagc

SEQ ID NO: 2190758 - RNA, 13 nt, Human
uacaaaaacacag

SEQ ID NO: 2190759 - RNA, 17 nt, Human
uaauuuauuaauugcuu

SEQ ID NO: 2190760 - RNA, 19 nt, Human
uaauuuauuaauugcuuug

SEQ ID NO: 2190761 - RNA, 18 nt, Human
uaauuuauuaauugcuuu

SEQ ID NO: 2190762 - RNA, 20 nt, Human
uaauuuaugaguuuuugaua

SEQ ID NO: 2190763 - RNA, 20 nt, Human
uaauuuauuguuuuuccuug

SEQ ID NO: 2190764 - RNA, 18 nt, Human
uaauuuauuauugaaauu

SEQ ID NO: 2190765 - RNA, 20 nt, Human
uaauuuauuauugaaauugu

SEQ ID NO: 2190766 - RNA, 20 nt, Human
uaauuuauuaauugcuuuga

SEQ ID NO: 2190767 - RNA, 17 nt, Human
uaauuuauuauugaaau

SEQ ID NO: 2190768 - RNA, 14 nt, Human
uaauuuauuauuga

SEQ ID NO: 2190769 - RNA, 18 nt, Human
uaauuuauuuauuaagau

SEQ ID NO: 2190770 - RNA, 14 nt, Human
uaauuuauuuuguc

SEQ ID NO: 2190771 - RNA, 19 nt, Human
uaauuuauuuauuaagaug

SEQ ID NO: 2190772 - RNA, 17 nt, Human
uaauuuauuuauuaaga

SEQ ID NO: 2190773 - RNA, 14 nt, Human
uaauuuauuuauua

SEQ ID NO: 2190774 - RNA, 12 nt, Human
uaauuuauuuau

SEQ ID NO: 2190775 - RNA, 12 nt, Human
uaauuucaaaau

SEQ ID NO: 2190776 - RNA, 20 nt, Human
uaauuucaaaaauauaacuu

SEQ ID NO: 2190777 - RNA, 21 nt, Human
uaauuucaaaaauauaacuua

SEQ ID NO: 2190778 - RNA, 18 nt, Human
uaauuuauuuuugcaugg

SEQ ID NO: 2190779 - RNA, 17 nt, Human
uaauuucaaaaauauaa

SEQ ID NO: 2190780 - RNA, 18 nt, Human
uaauuucaaaaauauaac

SEQ ID NO: 2190781 - RNA, 19 nt, Human
uaauuucaaaaauauaacu

SEQ ID NO: 2190782 - RNA, 15 nt, Human
uacaaaaagcauaaa

SEQ ID NO: 2190783 - RNA, 16 nt, Human
uacaaaaacacagcaa

SEQ ID NO: 2190784 - RNA, 15 nt, Human
uacaaaaacacagca

SEQ ID NO: 2190785 - RNA, 20 nt, Human
uacaaaaagcauaaaaauua

SEQ ID NO: 2190786 - RNA, 14 nt, Human
uacaaaaauauaaa

SEQ ID NO: 2190787 - RNA, 17 nt, Human
uacaaaaauauaaaaua

SEQ ID NO: 2190788 - RNA, 18 nt, Human
uacaaaaauauaaaauau

SEQ ID NO: 2190789 - RNA, 19 nt, Human
uacaaaauaaacaaauaac

SEQ ID NO: 2190790 - RNA, 12 nt, Human
uacaaaacuucc

SEQ ID NO: 2190791 - RNA, 15 nt, Human
uacaaaagcauguga

SEQ ID NO: 2190792 - RNA, 20 nt, Human
uacaaaaaaaaaguuuuauu

SEQ ID NO: 2190793 - RNA, 20 nt, Human
uacaaaaauauaaaauauga

SEQ ID NO: 2190794 - RNA, 19 nt, Human
uacaaaaccugauguuaaa

SEQ ID NO: 2190795 - RNA, 12 nt, Human
aauguacugaga

SEQ ID NO: 2190796 - RNA, 21 nt, Human
uacauauuugcauauguauga

SEQ ID NO: 2190797 - RNA, 16 nt, Human
uacauauuuguggaau

SEQ ID NO: 2190798 - RNA, 17 nt, Human
uacauauuuguggaaua

SEQ ID NO: 2190799 - RNA, 12 nt, Human
aauguacugcau

SEQ ID NO: 2190800 - RNA, 19 nt, Human
uacauauuugcauauguau

SEQ ID NO: 2190801 - RNA, 13 nt, Human
uacauauuuccaa

SEQ ID NO: 2190802 - RNA, 17 nt, Human
uacauauuugagacuag

SEQ ID NO: 2190803 - RNA, 15 nt, Human
uacauauucuuuaaa

SEQ ID NO: 2190804 - RNA, 23 nt, Human
uacauauuaggaaaauauggguu

SEQ ID NO: 2190805 - RNA, 19 nt, Human
uacauauaagugauugcug

SEQ ID NO: 2190806 - RNA, 14 nt, Human
uacauauucuuuaa

SEQ ID NO: 2190807 - RNA, 19 nt, Human
uacauauuaggaaaauaug

SEQ ID NO: 2190808 - RNA, 18 nt, Human
uacauauuaggaaaauau

SEQ ID NO: 2190809 - RNA, 21 nt, Human
uacauaugugcuggaauucua

SEQ ID NO: 2190810 - RNA, 15 nt, Human
uacaguacaggcagc

SEQ ID NO: 2190811 - RNA, 15 nt, Human
uacaguaucucaggg

SEQ ID NO: 2190812 - RNA, 17 nt, Human
uacauaaugcgugcaua

SEQ ID NO: 2190813 - RNA, 20 nt, Human
uacauaaugcgugcauacca

SEQ ID NO: 2190814 - RNA, 19 nt, Human
uacauaaugcgugcauacc

SEQ ID NO: 2190815 - RNA, 23 nt, Human
uacauagcaugacauuucuuugu

SEQ ID NO: 2190816 - RNA, 13 nt, Human
uacauagccuaua

SEQ ID NO: 2190817 - RNA, 15 nt, Human
uacauagccuauauu

SEQ ID NO: 2190818 - RNA, 20 nt, Human
uacauagccuauauuuacag

SEQ ID NO: 2190819 - RNA, 21 nt, Human
uacauagccuauauuuacagu

SEQ ID NO: 2190820 - RNA, 17 nt, Human
uacauagaugcuuaguc

SEQ ID NO: 2190821 - RNA, 23 nt, Human
aauguauuuuauuguaacagaca

SEQ ID NO: 2190822 - RNA, 17 nt, Human
aauguauuuuauuguaa

SEQ ID NO: 2190823 - RNA, 21 nt, Human
aauguauuuuauuguaacaga

SEQ ID NO: 2190824 - RNA, 19 nt, Human
aauguauuguugguaauua

SEQ ID NO: 2190825 - RNA, 15 nt, Human
aauguauuuuauugu

SEQ ID NO: 2190826 - RNA, 16 nt, Human
aauguauuuuauugua

SEQ ID NO: 2190827 - RNA, 15 nt, Human
aauguauuguaccuu

SEQ ID NO: 2190828 - RNA, 16 nt, Human
aauguauuguaccuuu

SEQ ID NO: 2190829 - RNA, 22 nt, Human
aauguauuguaccuuuuaacac

SEQ ID NO: 2190830 - RNA, 23 nt, Human
aauguauuguaccuuuuaacacc

SEQ ID NO: 2190831 - RNA, 21 nt, Human
aauguauuuauuuaaaagauu

SEQ ID NO: 2190832 - RNA, 18 nt, Human
aaugugggagcagcgguu

SEQ ID NO: 2190833 - RNA, 21 nt, Human
aauguggcuugagaaauaugg

SEQ ID NO: 2190834 - RNA, 16 nt, Human
aauguggcuugagaaa

SEQ ID NO: 2190835 - RNA, 12 nt, Human
aauguggcuuga

SEQ ID NO: 2190836 - RNA, 14 nt, Human
aauguggcuccugg

SEQ ID NO: 2190837 - RNA, 16 nt, Human
aaugugaugaauacug

SEQ ID NO: 2190838 - RNA, 11 nt, Human
aaugugauaug

SEQ ID NO: 2190839 - RNA, 20 nt, Human
aaugugaugaauacuguauu

SEQ ID NO: 2190840 - RNA, 12 nt, Human
aaugugaugaau

SEQ ID NO: 2190841 - RNA, 16 nt, Human
aaugugauauuauaca

SEQ ID NO: 2190842 - RNA, 14 nt, Human
aauguauguguaag

SEQ ID NO: 2190843 - RNA, 12 nt, Human
aauguaugugua

SEQ ID NO: 2190844 - RNA, 18 nt, Human
aauguauuauucugcagc

SEQ ID NO: 2190845 - RNA, 20 nt, Human
aauguaugugcacugucacu

SEQ ID NO: 2190846 - RNA, 21 nt, Human
aauguaugugcacugucacuu

SEQ ID NO: 2190847 - RNA, 22 nt, Human
aauguauuauucugcagcauga

SEQ ID NO: 2190848 - RNA, 19 nt, Human
aauguauugaacuuggaaa

SEQ ID NO: 2190849 - RNA, 13 nt, Human
aauguauuguacc

SEQ ID NO: 2190850 - RNA, 14 nt, Human
aauguauuguaccu

SEQ ID NO: 2190851 - RNA, 18 nt, Human
aauguauugaacuuggaa

SEQ ID NO: 2190852 - RNA, 18 nt, Human
aauguacugcauaugaaa

SEQ ID NO: 2190853 - RNA, 14 nt, Human
aauguacugcauau

SEQ ID NO: 2190854 - RNA, 21 nt, Human
aauguaugcuucauacaggga

SEQ ID NO: 2190855 - RNA, 13 nt, Human
aauguaugugcac

SEQ ID NO: 2190856 - RNA, 18 nt, Human
aauguaugugcacuguca

SEQ ID NO: 2190857 - RNA, 18 nt, Human
aauguaugcuucauacag

SEQ ID NO: 2190858 - RNA, 15 nt, Human
aauguacugagauuu

SEQ ID NO: 2190859 - RNA, 15 nt, Human
uacacauuuuucaga

SEQ ID NO: 2190860 - RNA, 17 nt, Human
uacacauuuuucagaua

SEQ ID NO: 2190861 - RNA, 15 nt, Human
aauggaggaauauga

SEQ ID NO: 2190862 - RNA, 20 nt, Human
aauggagauucaguuuucau

SEQ ID NO: 2190863 - RNA, 20 nt, Human
aauggagauuugaaggucug

SEQ ID NO: 2190864 - RNA, 21 nt, Human
uacacauuuuucagauauaaa

SEQ ID NO: 2190865 - RNA, 19 nt, Human
uacacauuuuucagauaua

SEQ ID NO: 2190866 - RNA, 18 nt, Human
uacaccaccucacuccug

SEQ ID NO: 2190867 - RNA, 19 nt, Human
aauggacuuuuguacauag

SEQ ID NO: 2190868 - RNA, 19 nt, Human
uacaccagagauaauauga

SEQ ID NO: 2190869 - RNA, 19 nt, Human
uacaccaccucacuccugu

SEQ ID NO: 2190870 - RNA, 20 nt, Human
uacaccagagauaauaugag

SEQ ID NO: 2190871 - RNA, 17 nt, Human
uacaccagcauuccuuu

SEQ ID NO: 2190872 - RNA, 19 nt, Human
uacaccauguuugagcuca

SEQ ID NO: 2190873 - RNA, 18 nt, Human
uacaccagcauuccuuuu

SEQ ID NO: 2190874 - RNA, 20 nt, Human
uacaccagcauuccuuuuga

SEQ ID NO: 2190875 - RNA, 20 nt, Human
uacaccacuacauucuguua

SEQ ID NO: 2190876 - RNA, 19 nt, Human
uacaccacuacauucuguu

SEQ ID NO: 2190877 - RNA, 18 nt, Human
uacaccacuacauucugu

SEQ ID NO: 2190878 - RNA, 17 nt, Human
uacaccacuacauucug

SEQ ID NO: 2190879 - RNA, 16 nt, Human
uacaccacuacauucu

SEQ ID NO: 2190880 - RNA, 15 nt, Human
uacaccacuacauuc

SEQ ID NO: 2190881 - RNA, 20 nt, Human
uacacuaaggguguaaguaa

SEQ ID NO: 2190882 - RNA, 14 nt, Human
uacacuaguuguuu

SEQ ID NO: 2190883 - RNA, 19 nt, Human
uacaccauuaucuuggaaa

SEQ ID NO: 2190884 - RNA, 24 nt, Human
uacaccauguuugagcucagaccc

SEQ ID NO: 2190885 - RNA, 19 nt, Human
uacacuaagagagaaugag

SEQ ID NO: 2190886 - RNA, 16 nt, Human
uacacuccagccugag

SEQ ID NO: 2190887 - RNA, 15 nt, Human
uacacuccagccuga

SEQ ID NO: 2190888 - RNA, 13 nt, Human
uacacuaucuuaa

SEQ ID NO: 2190889 - RNA, 16 nt, Human
uacacucaggcuuuca

SEQ ID NO: 2190890 - RNA, 18 nt, Human
uacacucaggcuuucacu

SEQ ID NO: 2190891 - RNA, 18 nt, Human
uacacuccagccugagca

SEQ ID NO: 2190892 - RNA, 17 nt, Human
uacacuccagccugagc

SEQ ID NO: 2190893 - RNA, 14 nt, Human
uacacuccagugag

SEQ ID NO: 2190894 - RNA, 15 nt, Human
uacaggcauagaguu

SEQ ID NO: 2190895 - RNA, 18 nt, Human
uacagaggacaguauuug

SEQ ID NO: 2190896 - RNA, 18 nt, Human
uacagaggccaugggccu

SEQ ID NO: 2190897 - RNA, 15 nt, Human
uacagagcuucccug

SEQ ID NO: 2190898 - RNA, 23 nt, Human
uacagagcccacgcccccacugg

SEQ ID NO: 2190899 - RNA, 14 nt, Human
uacagaggacagua

SEQ ID NO: 2190900 - RNA, 16 nt, Human
uacagagcuucccuga

SEQ ID NO: 2190901 - RNA, 22 nt, Human
uacaggcgugagccaccgugcc

SEQ ID NO: 2190902 - RNA, 15 nt, Human
uacaggcuccugcca

SEQ ID NO: 2190903 - RNA, 14 nt, Human
uacaggcuccugcc

SEQ ID NO: 2190904 - RNA, 17 nt, Human
uacaggcuccugccacc

SEQ ID NO: 2190905 - RNA, 16 nt, Human
uacagggaaugccuga

SEQ ID NO: 2190906 - RNA, 20 nt, Human
uacagggaaugccugagugc

SEQ ID NO: 2190907 - RNA, 13 nt, Human
uacagggagccuc

SEQ ID NO: 2190908 - RNA, 16 nt, Human
uacaguaacuuuaugu

SEQ ID NO: 2190909 - RNA, 17 nt, Human
uacaguaacuuuaugug

SEQ ID NO: 2190910 - RNA, 18 nt, Human
uacaguaacuuuaugugu

SEQ ID NO: 2190911 - RNA, 20 nt, Human
uacaguaacuuuauguguaa

SEQ ID NO: 2190912 - RNA, 23 nt, Human
uacaguaacuuuauguguaaaua

SEQ ID NO: 2190913 - RNA, 18 nt, Human
uacaguaggagcccagcu

SEQ ID NO: 2190914 - RNA, 15 nt, Human
uacaguaggagccca

SEQ ID NO: 2190915 - RNA, 14 nt, Human
uacaguaggagccc

SEQ ID NO: 2190916 - RNA, 13 nt, Human
uacaguaggagcc

SEQ ID NO: 2190917 - RNA, 17 nt, Human
uacaguagauuuuccaa

SEQ ID NO: 2190918 - RNA, 21 nt, Human
uacaguagauuuuccaaaugu

SEQ ID NO: 2190919 - RNA, 14 nt, Human
uacaguaagcugcu

SEQ ID NO: 2190920 - RNA, 18 nt, Human
uacaguaagcugcucuau

SEQ ID NO: 2190921 - RNA, 21 nt, Human
uacaguaagcugcucuauugu

SEQ ID NO: 2190922 - RNA, 22 nt, Human
uacaguaggagcccagcucuga

SEQ ID NO: 2190923 - RNA, 20 nt, Human
uacaguaggagcccagcucu

SEQ ID NO: 2190924 - RNA, 19 nt, Human
aacuuggggaacaagggug

SEQ ID NO: 2190925 - RNA, 15 nt, Human
aacuuuaagaggaca

SEQ ID NO: 2190926 - RNA, 13 nt, Human
aacuuuaagagga

SEQ ID NO: 2190927 - RNA, 16 nt, Human
aacuuuaagcagcucu

SEQ ID NO: 2190928 - RNA, 18 nt, Human
aacuuuaagcagcucuug

SEQ ID NO: 2190929 - RNA, 18 nt, Human
aacuuuaaguuucaggau

SEQ ID NO: 2190930 - RNA, 21 nt, Human
aacuuuaaguuucaggauaca

SEQ ID NO: 2190931 - RNA, 20 nt, Human
aacuuuaauucucuuucaaa

SEQ ID NO: 2190932 - RNA, 21 nt, Human
aacuuuaauucucuuucaaag

SEQ ID NO: 2190933 - RNA, 13 nt, Human
aacuuuaccuuuu

SEQ ID NO: 2190934 - RNA, 16 nt, Human
aagaaaaaaaaaauau

SEQ ID NO: 2190935 - RNA, 19 nt, Human
aagaaaaaaaaagaaaaaa

SEQ ID NO: 2190936 - RNA, 18 nt, Human
aagaaaaaaaaagaaaaa

SEQ ID NO: 2190937 - RNA, 15 nt, Human
aagaaaaaaaaagaa

SEQ ID NO: 2190938 - RNA, 14 nt, Human
aagaaaaaaaaaga

SEQ ID NO: 2190939 - RNA, 20 nt, Human
aacuuuacccaaaaacuaaa

SEQ ID NO: 2190940 - RNA, 17 nt, Human
aagaaaaaaaagaaagc

SEQ ID NO: 2190941 - RNA, 19 nt, Human
aacuugucuaaauaaguuu

SEQ ID NO: 2190942 - RNA, 22 nt, Human
aacuugucuuuggacccugagg

SEQ ID NO: 2190943 - RNA, 18 nt, Human
aacuugucuuuggacccu

SEQ ID NO: 2190944 - RNA, 15 nt, Human
aacuuguauuaugug

SEQ ID NO: 2190945 - RNA, 23 nt, Human
aacuuggggaguuaagaccuggc

SEQ ID NO: 2190946 - RNA, 16 nt, Human
aacuuguauuaugugu

SEQ ID NO: 2190947 - RNA, 21 nt, Human
aacuuggcucgaaucucugug

SEQ ID NO: 2190948 - RNA, 22 nt, Human
aacuuggcucgaaucucugugc

SEQ ID NO: 2190949 - RNA, 23 nt, Human
aacuuggcucgaaucucugugcc

SEQ ID NO: 2190950 - RNA, 11 nt, Human
gugccuuaugg

SEQ ID NO: 2190951 - RNA, 17 nt, Human
aacuuggcgcugccccu

SEQ ID NO: 2190952 - RNA, 13 nt, Human
aacuuggggaaca

SEQ ID NO: 2190953 - RNA, 22 nt, Human
aacuuggggaguuaagaccugg

SEQ ID NO: 2190954 - RNA, 21 nt, Human
aacuuggggaguuaagaccug

SEQ ID NO: 2190955 - RNA, 12 nt, Human
aacuugggaacu

SEQ ID NO: 2190956 - RNA, 21 nt, Human
gugaaccaccacacccagccc

SEQ ID NO: 2190957 - RNA, 22 nt, Human
gugaaccaaagagacuggagca

SEQ ID NO: 2190958 - RNA, 23 nt, Human
gugaaccaaagagacuggagcau

SEQ ID NO: 2190959 - RNA, 23 nt, Human
gugccgccugcccgucucucucc

SEQ ID NO: 2190960 - RNA, 17 nt, Human
gugccgccgccucgccc

SEQ ID NO: 2190961 - RNA, 18 nt, Human
gugccgccgccucgccca

SEQ ID NO: 2190962 - RNA, 20 nt, Human
gugccgccgccucgcccacc

SEQ ID NO: 2190963 - RNA, 22 nt, Human
gugccgccgccucgcccaccgc

SEQ ID NO: 2190964 - RNA, 23 nt, Human
gugccgccgccucgcccaccgca

SEQ ID NO: 2190965 - RNA, 13 nt, Human
gugccgccugccc

SEQ ID NO: 2190966 - RNA, 14 nt, Human
gugccgccugcccg

SEQ ID NO: 2190967 - RNA, 15 nt, Human
gugccucaagagaag

SEQ ID NO: 2190968 - RNA, 21 nt, Human
gugccguuacucuccaaccug

SEQ ID NO: 2190969 - RNA, 18 nt, Human
gugccguuacucuccaac

SEQ ID NO: 2190970 - RNA, 15 nt, Human
gugccguuacucucc

SEQ ID NO: 2190971 - RNA, 22 nt, Human
gugccguuacucuccaaccugg

SEQ ID NO: 2190972 - RNA, 21 nt, Human
gugccuaggauugugccugua

SEQ ID NO: 2190973 - RNA, 15 nt, Human
gugccucugccuguc

SEQ ID NO: 2190974 - RNA, 14 nt, Human
gugccuuauggaac

SEQ ID NO: 2190975 - RNA, 21 nt, Human
gugccuuauggaacacucuga

SEQ ID NO: 2190976 - RNA, 23 nt, Human
gugccuuauggaacacucugaga

SEQ ID NO: 2190977 - RNA, 13 nt, Human
gugccucugggac

SEQ ID NO: 2190978 - RNA, 12 nt, Human
gugccucuggga

SEQ ID NO: 2190979 - RNA, 13 nt, Human
gugccucugccug

SEQ ID NO: 2190980 - RNA, 20 nt, Human
gugccuccaccaccacuggc

SEQ ID NO: 2190981 - RNA, 21 nt, Human
gugccuccaccaccacuggcc

SEQ ID NO: 2190982 - RNA, 22 nt, Human
gugccuccaccaccacuggcca

SEQ ID NO: 2190983 - RNA, 23 nt, Human
gugccuccaccaccacuggccac

SEQ ID NO: 2190984 - RNA, 14 nt, Human
gugccucauugcuu

SEQ ID NO: 2190985 - RNA, 15 nt, Human
gugccuccaccacca

SEQ ID NO: 2190986 - RNA, 17 nt, Human
gugccuccaccaccacu

SEQ ID NO: 2190987 - RNA, 17 nt, Human
aagaaggaaaaggcagg

SEQ ID NO: 2190988 - RNA, 23 nt, Human
aagaaggaaaaugaucugagucc

SEQ ID NO: 2190989 - RNA, 16 nt, Human
aagaagcuuaggcagg

SEQ ID NO: 2190990 - RNA, 21 nt, Human
aagaagcuuuaauauuuaaau

SEQ ID NO: 2190991 - RNA, 11 nt, Human
aagaaggaagu

SEQ ID NO: 2190992 - RNA, 16 nt, Human
aagaaggaaaaugauc

SEQ ID NO: 2190993 - RNA, 14 nt, Human
aagaaggcaaaaau

SEQ ID NO: 2190994 - RNA, 14 nt, Human
aagaaaucccuguu

SEQ ID NO: 2190995 - RNA, 13 nt, Human
aagaaaucccugu

SEQ ID NO: 2190996 - RNA, 14 nt, Human
aagaaaucacagaa

SEQ ID NO: 2190997 - RNA, 18 nt, Human
aagaaaucacagaaucau

SEQ ID NO: 2190998 - RNA, 23 nt, Human
aagaaaucccuguuuaauauuua

SEQ ID NO: 2190999 - RNA, 16 nt, Human
aagaagcuguuguaca

SEQ ID NO: 2191000 - RNA, 17 nt, Human
aagaagcuguuguacau

SEQ ID NO: 2191001 - RNA, 18 nt, Human
aagaagcuguuguacauu

SEQ ID NO: 2191002 - RNA, 19 nt, Human
aagaagcuguuguacauuu

SEQ ID NO: 2191003 - RNA, 21 nt, Human
aagaagcuguuguacauuuau

SEQ ID NO: 2191004 - RNA, 22 nt, Human
aagaagcuguuguacauuuaug

SEQ ID NO: 2191005 - RNA, 23 nt, Human
aagaagcuguuguacauuuauga

SEQ ID NO: 2191006 - RNA, 16 nt, Human
aagaaggcaaaaaugu

SEQ ID NO: 2191007 - RNA, 14 nt, Human
aagaauacagaaag

SEQ ID NO: 2191008 - RNA, 22 nt, Human
aagaauacaaacauauuuguua

SEQ ID NO: 2191009 - RNA, 18 nt, Human
aagaauacaaacauauuu

SEQ ID NO: 2191010 - RNA, 19 nt, Human
aagaagugugucacccuua

SEQ ID NO: 2191011 - RNA, 22 nt, Human
aagaagugaaaaucuacacucc

SEQ ID NO: 2191012 - RNA, 16 nt, Human
aagaagugaaaaucua

SEQ ID NO: 2191013 - RNA, 13 nt, Human
aagaauacagaaa

SEQ ID NO: 2191014 - RNA, 18 nt, Human
gugcuaggaacacuccuu

SEQ ID NO: 2191015 - RNA, 22 nt, Human
gugcuaggaacacuccuucaca

SEQ ID NO: 2191016 - RNA, 20 nt, Human
gugcuagggaaacuucccgu

SEQ ID NO: 2191017 - RNA, 21 nt, Human
gugcuaucucccccagcccca

SEQ ID NO: 2191018 - RNA, 18 nt, Human
gugcuaguaauuggaaag

SEQ ID NO: 2191019 - RNA, 13 nt, Human
aagaaauauaccu

SEQ ID NO: 2191020 - RNA, 15 nt, Human
aagaaagaaggaagu

SEQ ID NO: 2191021 - RNA, 17 nt, Human
aagaaagagaaggagcc

SEQ ID NO: 2191022 - RNA, 13 nt, Human
aagaaauacugua

SEQ ID NO: 2191023 - RNA, 15 nt, Human
aagaaauacuguaca

SEQ ID NO: 2191024 - RNA, 22 nt, Human
aagaaagacuaucuaaauguug

SEQ ID NO: 2191025 - RNA, 20 nt, Human
aagaaagacuaucuaaaugu

SEQ ID NO: 2191026 - RNA, 14 nt, Human
aagaaagaaggaag

SEQ ID NO: 2191027 - RNA, 13 nt, Human
aagaaagaaggaa

SEQ ID NO: 2191028 - RNA, 20 nt, Human
aagaaaaaagagaaaagaaa

SEQ ID NO: 2191029 - RNA, 18 nt, Human
aagaaaaaagagaaaaga

SEQ ID NO: 2191030 - RNA, 11 nt, Human
aagaaaaaagu

SEQ ID NO: 2191031 - RNA, 15 nt, Human
aagaaaaagaagaac

SEQ ID NO: 2191032 - RNA, 17 nt, Human
aagaaaaaggaugcaca

SEQ ID NO: 2191033 - RNA, 15 nt, Human
aagaaaaaggaugca

SEQ ID NO: 2191034 - RNA, 16 nt, Human
aagaaacucaccccca

SEQ ID NO: 2191035 - RNA, 17 nt, Human
aagaaacuauacaucau

SEQ ID NO: 2191036 - RNA, 21 nt, Human
aagaaacgucuauguguacag

SEQ ID NO: 2191037 - RNA, 18 nt, Human
aagaaaaaggaugcacag

SEQ ID NO: 2191038 - RNA, 16 nt, Human
aagaaacugaggaauu

SEQ ID NO: 2191039 - RNA, 20 nt, Human
aagaaacugaggaauuuucu

SEQ ID NO: 2191040 - RNA, 19 nt, Human
aagaaacugaggaauuuuc

SEQ ID NO: 2191041 - RNA, 21 nt, Human
aagaaacugaggaauuuucuu

SEQ ID NO: 2191042 - RNA, 19 nt, Human
guggaugucuuccuuggag

SEQ ID NO: 2191043 - RNA, 13 nt, Human
guggaugucuucc

SEQ ID NO: 2191044 - RNA, 15 nt, Human
guggaugucuuccuu

SEQ ID NO: 2191045 - RNA, 16 nt, Human
guggaugucuuccuug

SEQ ID NO: 2191046 - RNA, 15 nt, Human
guggauggccccagc

SEQ ID NO: 2191047 - RNA, 16 nt, Human
guggauggccccagca

SEQ ID NO: 2191048 - RNA, 19 nt, Human
guggauggccccagcacag

SEQ ID NO: 2191049 - RNA, 22 nt, Human
guggauggccccagcacagcuu

SEQ ID NO: 2191050 - RNA, 21 nt, Human
guggaugccugguggcagcug

SEQ ID NO: 2191051 - RNA, 21 nt, Human
guggauggaaggggcugacag

SEQ ID NO: 2191052 - RNA, 13 nt, Human
guggauggcccca

SEQ ID NO: 2191053 - RNA, 14 nt, Human
guggaccuuccugc

SEQ ID NO: 2191054 - RNA, 22 nt, Human
guggacccagggaugacauguc

SEQ ID NO: 2191055 - RNA, 18 nt, Human
guggaccaggacaggacc

SEQ ID NO: 2191056 - RNA, 14 nt, Human
guggaccaggacag

SEQ ID NO: 2191057 - RNA, 13 nt, Human
guggaccaggaca

SEQ ID NO: 2191058 - RNA, 15 nt, Human
guggacaguccuggg

SEQ ID NO: 2191059 - RNA, 14 nt, Human
guggacaguccugg

SEQ ID NO: 2191060 - RNA, 16 nt, Human
guggacaguccuggga

SEQ ID NO: 2191061 - RNA, 13 nt, Human
guggaccuuccug

SEQ ID NO: 2191062 - RNA, 21 nt, Human
guggaccuuaggccuuccucu

SEQ ID NO: 2191063 - RNA, 15 nt, Human
guggaccuuccugcc

SEQ ID NO: 2191064 - RNA, 18 nt, Human
guggaccuuaggccuucc

SEQ ID NO: 2191065 - RNA, 17 nt, Human
guggaccuuaggccuuc

SEQ ID NO: 2191066 - RNA, 18 nt, Human
guggaauauaaggaaagc

SEQ ID NO: 2191067 - RNA, 13 nt, Human
guggaauauaaag

SEQ ID NO: 2191068 - RNA, 15 nt, Human
guggaauuauuuuaa

SEQ ID NO: 2191069 - RNA, 18 nt, Human
guggaauuauuuuaaaag

SEQ ID NO: 2191070 - RNA, 16 nt, Human
guggaauuauuuuaaa

SEQ ID NO: 2191071 - RNA, 22 nt, Human
guggaagugugggucugugugu

SEQ ID NO: 2191072 - RNA, 21 nt, Human
guggaagugugggucugugug

SEQ ID NO: 2191073 - RNA, 14 nt, Human
guggaauaaaauac

SEQ ID NO: 2191074 - RNA, 18 nt, Human
guggaauaguauccucca

SEQ ID NO: 2191075 - RNA, 19 nt, Human
guggaauaguauccuccag

SEQ ID NO: 2191076 - RNA, 20 nt, Human
guggaauaguauccuccagg

SEQ ID NO: 2191077 - RNA, 21 nt, Human
guggaauaguauccuccaggu

SEQ ID NO: 2191078 - RNA, 22 nt, Human
guggaauaguauccuccagguu

SEQ ID NO: 2191079 - RNA, 23 nt, Human
guggaauaguauccuccagguuu

SEQ ID NO: 2191080 - RNA, 13 nt, Human
guggacaguccug

SEQ ID NO: 2191081 - RNA, 19 nt, Human
guggaauuauuuuaaaaga

SEQ ID NO: 2191082 - RNA, 23 nt, Human
guggacacagcucuucuccaggc

SEQ ID NO: 2191083 - RNA, 18 nt, Human
guggacacagcucuucuc

SEQ ID NO: 2191084 - RNA, 22 nt, Human
guggacacagcucuucuccagg

SEQ ID NO: 2191085 - RNA, 20 nt, Human
gugcugggauuacaggcgug

SEQ ID NO: 2191086 - RNA, 20 nt, Human
gugcugggauuacaggugug

SEQ ID NO: 2191087 - RNA, 20 nt, Human
guggaagugugggucugugu

SEQ ID NO: 2191088 - RNA, 19 nt, Human
guggaagugugggucugug

SEQ ID NO: 2191089 - RNA, 15 nt, Human
guggaaguguggguc

SEQ ID NO: 2191090 - RNA, 14 nt, Human
guggaagugugggu

SEQ ID NO: 2191091 - RNA, 15 nt, Human
gugcugggagggaua

SEQ ID NO: 2191092 - RNA, 23 nt, Human
gugcugggaggagggagagggag

SEQ ID NO: 2191093 - RNA, 18 nt, Human
gugcugggaggagggaga

SEQ ID NO: 2191094 - RNA, 19 nt, Human
gugcugggaggagggagag

SEQ ID NO: 2191095 - RNA, 23 nt, Human
gugcugggagcuccacucugcuu

SEQ ID NO: 2191096 - RNA, 15 nt, Human
gugcugggaggaggg

SEQ ID NO: 2191097 - RNA, 17 nt, Human
gugcugggaggagggag

SEQ ID NO: 2191098 - RNA, 22 nt, Human
gugcugggacugagccaguccc

SEQ ID NO: 2191099 - RNA, 16 nt, Human
gugcugggagcuccac

SEQ ID NO: 2191100 - RNA, 22 nt, Human
gugcugggagcuccacucugcu

SEQ ID NO: 2191101 - RNA, 21 nt, Human
gugcugggauuacaagcguga

SEQ ID NO: 2191102 - RNA, 22 nt, Human
gugcugggauuacaagcgugag

SEQ ID NO: 2191103 - RNA, 13 nt, Human
gugcuaugaauuu

SEQ ID NO: 2191104 - RNA, 19 nt, Human
gugcuauggauggcuucua

SEQ ID NO: 2191105 - RNA, 22 nt, Human
gugcuaucucccccagccccau

SEQ ID NO: 2191106 - RNA, 12 nt, Human
gugcuauguucu

SEQ ID NO: 2191107 - RNA, 23 nt, Human
gugcuauuguagagccagagguc

SEQ ID NO: 2191108 - RNA, 15 nt, Human
gugcuggcugcccag

SEQ ID NO: 2191109 - RNA, 13 nt, Human
gugcugggacuga

SEQ ID NO: 2191110 - RNA, 18 nt, Human
gugcuggcugcccagacc

SEQ ID NO: 2191111 - RNA, 17 nt, Human
gugcugggacugagcca

SEQ ID NO: 2191112 - RNA, 18 nt, Human
gugcugggacugagccag

SEQ ID NO: 2191113 - RNA, 19 nt, Human
gugcugggacugagccagu

SEQ ID NO: 2191114 - RNA, 20 nt, Human
gugcugggacugagccaguc

SEQ ID NO: 2191115 - RNA, 22 nt, Human
gugcucaggacucagaagccuc

SEQ ID NO: 2191116 - RNA, 18 nt, Human
gugcucaggacucagaag

SEQ ID NO: 2191117 - RNA, 21 nt, Human
gugcuauuuuguuuguuuugu

SEQ ID NO: 2191118 - RNA, 15 nt, Human
gugcucaggagcccu

SEQ ID NO: 2191119 - RNA, 20 nt, Human
aagaauugaacccaggaggu

SEQ ID NO: 2191120 - RNA, 19 nt, Human
aagaauugaacccaggagg

SEQ ID NO: 2191121 - RNA, 20 nt, Human
aagaauugucuuucugucuc

SEQ ID NO: 2191122 - RNA, 15 nt, Human
aagaauuuagggaga

SEQ ID NO: 2191123 - RNA, 14 nt, Human
aagacaaacugcau

SEQ ID NO: 2191124 - RNA, 17 nt, Human
aagacaaaucaaagcag

SEQ ID NO: 2191125 - RNA, 17 nt, Human
aagacaaagguuuuccu

SEQ ID NO: 2191126 - RNA, 13 nt, Human
aagacccuucucg

SEQ ID NO: 2191127 - RNA, 13 nt, Human
aagacccuccccg

SEQ ID NO: 2191128 - RNA, 18 nt, Human
aagacaaauucuguuucu

SEQ ID NO: 2191129 - RNA, 16 nt, Human
aagacaaauucuguuu

SEQ ID NO: 2191130 - RNA, 12 nt, Human
aagacaacauua

SEQ ID NO: 2191131 - RNA, 22 nt, Human
aagaaugcugguuuuccuaaau

SEQ ID NO: 2191132 - RNA, 18 nt, Human
aagaaugggcaguuacau

SEQ ID NO: 2191133 - RNA, 17 nt, Human
aagaaugggcaguuaca

SEQ ID NO: 2191134 - RNA, 16 nt, Human
aagaauugaagcagga

SEQ ID NO: 2191135 - RNA, 20 nt, Human
aagaaugggcaguuacaugc

SEQ ID NO: 2191136 - RNA, 21 nt, Human
aagaaugggcaguuacaugca

SEQ ID NO: 2191137 - RNA, 20 nt, Human
aagaauggggaucacagaga

SEQ ID NO: 2191138 - RNA, 19 nt, Human
aagaaugcugguuuuccua

SEQ ID NO: 2191139 - RNA, 18 nt, Human
aagaaugcugguuuuccu

SEQ ID NO: 2191140 - RNA, 15 nt, Human
aagaaugcugguuuu

SEQ ID NO: 2191141 - RNA, 16 nt, Human
aagaaugcugaaacca

SEQ ID NO: 2191142 - RNA, 9 nt, Human
aagaaugcu

SEQ ID NO: 2191143 - RNA, 12 nt, Human
aagaaugcugaa

SEQ ID NO: 2191144 - RNA, 13 nt, Human
aagaaugcugaaa

SEQ ID NO: 2191145 - RNA, 14 nt, Human
aagaaugcugaaac

SEQ ID NO: 2191146 - RNA, 18 nt, Human
aagaaugauuaugaauua

SEQ ID NO: 2191147 - RNA, 14 nt, Human
guggcagcccugua

SEQ ID NO: 2191148 - RNA, 23 nt, Human
aagaaucagucuauccacagaga

SEQ ID NO: 2191149 - RNA, 20 nt, Human
guggcagcucaccucucccu

SEQ ID NO: 2191150 - RNA, 14 nt, Human
guggcagcucaccu

SEQ ID NO: 2191151 - RNA, 16 nt, Human
guggcagcucaccucu

SEQ ID NO: 2191152 - RNA, 16 nt, Human
aagaaucuaucugcuu

SEQ ID NO: 2191153 - RNA, 17 nt, Human
aagaaucuaucugcuua

SEQ ID NO: 2191154 - RNA, 19 nt, Human
aagaaucuaucugcuuaug

SEQ ID NO: 2191155 - RNA, 15 nt, Human
aagaaucuuuagaga

SEQ ID NO: 2191156 - RNA, 14 nt, Human
aagaaugaaagagu

SEQ ID NO: 2191157 - RNA, 21 nt, Human
aagaaugagaaggagucagaa

SEQ ID NO: 2191158 - RNA, 22 nt, Human
aagaaugagccuacgcugaaga

SEQ ID NO: 2191159 - RNA, 19 nt, Human
aagaaugaacaaauugaac

SEQ ID NO: 2191160 - RNA, 16 nt, Human
aagaaugauuaugaau

SEQ ID NO: 2191161 - RNA, 13 nt, Human
guggcagcccugu

SEQ ID NO: 2191162 - RNA, 12 nt, Human
guggcagcccug

SEQ ID NO: 2191163 - RNA, 14 nt, Human
guggcacugagccc

SEQ ID NO: 2191164 - RNA, 15 nt, Human
guggcacugagcccc

SEQ ID NO: 2191165 - RNA, 16 nt, Human
guggcacugagccccc

SEQ ID NO: 2191166 - RNA, 12 nt, Human
guggcacugcca

SEQ ID NO: 2191167 - RNA, 18 nt, Human
guggcaccagcagccugg

SEQ ID NO: 2191168 - RNA, 19 nt, Human
guggauugcacguggccuc

SEQ ID NO: 2191169 - RNA, 13 nt, Human
guggauugagggu

SEQ ID NO: 2191170 - RNA, 20 nt, Human
guggcaccagcgaagggagu

SEQ ID NO: 2191171 - RNA, 19 nt, Human
guggcacgucaucuaguuu

SEQ ID NO: 2191172 - RNA, 16 nt, Human
guggcacucaacauga

SEQ ID NO: 2191173 - RNA, 19 nt, Human
guggcaccagcagccugga

SEQ ID NO: 2191174 - RNA, 19 nt, Human
guggauuuaacagaaaugu

SEQ ID NO: 2191175 - RNA, 18 nt, Human
guggauuuaacagaaaug

SEQ ID NO: 2191176 - RNA, 17 nt, Human
aagaccucaccuagaaa

SEQ ID NO: 2191177 - RNA, 16 nt, Human
aagaccucaccuagaa

SEQ ID NO: 2191178 - RNA, 17 nt, Human
aagaccuguugguucca

SEQ ID NO: 2191179 - RNA, 17 nt, Human
aagaccuggcagcucug

SEQ ID NO: 2191180 - RNA, 12 nt, Human
aagaccuggcaa

SEQ ID NO: 2191181 - RNA, 21 nt, Human
aagaccuggcaaggacacaga

SEQ ID NO: 2191182 - RNA, 17 nt, Human
aagacuaucuaaauguu

SEQ ID NO: 2191183 - RNA, 16 nt, Human
aagacuaucuaaaugu

SEQ ID NO: 2191184 - RNA, 22 nt, Human
aagacccuuguggucccacccc

SEQ ID NO: 2191185 - RNA, 18 nt, Human
aagacccuugugguccca

SEQ ID NO: 2191186 - RNA, 21 nt, Human
aagacccuuguggucccaccc

SEQ ID NO: 2191187 - RNA, 21 nt, Human
aagaccuucuccaaaugagau

SEQ ID NO: 2191188 - RNA, 19 nt, Human
aagaccuguugguuccaag

SEQ ID NO: 2191189 - RNA, 13 nt, Human
aagacuauucaaa

SEQ ID NO: 2191190 - RNA, 18 nt, Human
aagacuaucuaaauguug

SEQ ID NO: 2191191 - RNA, 17 nt, Human
aagacugaguacguugu

SEQ ID NO: 2191192 - RNA, 22 nt, Human
aagacucuaccagacuguguau

SEQ ID NO: 2191193 - RNA, 15 nt, Human
aagacuguggcugcu

SEQ ID NO: 2191194 - RNA, 12 nt, Human
aagacuguggcu

SEQ ID NO: 2191195 - RNA, 15 nt, Human
aagacugagcaccug

SEQ ID NO: 2191196 - RNA, 19 nt, Human
aagacugagcaccugcuuc

SEQ ID NO: 2191197 - RNA, 17 nt, Human
aagacuguacaaaguag

SEQ ID NO: 2191198 - RNA, 22 nt, Human
aagacugaguacguugugcauu

SEQ ID NO: 2191199 - RNA, 21 nt, Human
aagacugaguacguugugcau

SEQ ID NO: 2191200 - RNA, 18 nt, Human
guggcccgacagccuggc

SEQ ID NO: 2191201 - RNA, 19 nt, Human
guggcccgacagccuggca

SEQ ID NO: 2191202 - RNA, 13 nt, Human
aagaggaaaauga

SEQ ID NO: 2191203 - RNA, 14 nt, Human
aagaggaaaaugaa

SEQ ID NO: 2191204 - RNA, 21 nt, Human
aagaggaaaaugaauaauaca

SEQ ID NO: 2191205 - RNA, 14 nt, Human
aagaggaaagaaug

SEQ ID NO: 2191206 - RNA, 15 nt, Human
aagaggaaagaauga

SEQ ID NO: 2191207 - RNA, 16 nt, Human
aagagcuuaacagugu

SEQ ID NO: 2191208 - RNA, 22 nt, Human
aagagccuugguguccaccugg

SEQ ID NO: 2191209 - RNA, 21 nt, Human
aagagccuugguguccaccug

SEQ ID NO: 2191210 - RNA, 20 nt, Human
aagagccuugguguccaccu

SEQ ID NO: 2191211 - RNA, 17 nt, Human
aagagccuggagaagcu

SEQ ID NO: 2191212 - RNA, 21 nt, Human
aagagccuggagaagcugaug

SEQ ID NO: 2191213 - RNA, 18 nt, Human
aagacuguggcugcuagc

SEQ ID NO: 2191214 - RNA, 16 nt, Human
aagacuguugcucaaa

SEQ ID NO: 2191215 - RNA, 24 nt, Human
aagacuguugcucaaaucuauuca

SEQ ID NO: 2191216 - RNA, 17 nt, Human
aagacuguugcucaaau

SEQ ID NO: 2191217 - RNA, 18 nt, Human
aagacuucaguauguugu

SEQ ID NO: 2191218 - RNA, 20 nt, Human
aagacuucaguauguuguca

SEQ ID NO: 2191219 - RNA, 17 nt, Human
aagagauuguuguuugc

SEQ ID NO: 2191220 - RNA, 14 nt, Human
aagagauuuaauua

SEQ ID NO: 2191221 - RNA, 16 nt, Human
aagagauuuaauuaau

SEQ ID NO: 2191222 - RNA, 13 nt, Human
aagagauuuuuca

SEQ ID NO: 2191223 - RNA, 13 nt, Human
aagagauuucaag

SEQ ID NO: 2191224 - RNA, 14 nt, Human
aagagauuucaaga

SEQ ID NO: 2191225 - RNA, 14 nt, Human
aagagauuuuucau

SEQ ID NO: 2191226 - RNA, 15 nt, Human
aagagauuuuucaug

SEQ ID NO: 2191227 - RNA, 17 nt, Human
aagagauuuuucaugau

SEQ ID NO: 2191228 - RNA, 15 nt, Human
aagagauuucaagag

SEQ ID NO: 2191229 - RNA, 15 nt, Human
aagagcaagucugga

SEQ ID NO: 2191230 - RNA, 13 nt, Human
aagagcacacuug

SEQ ID NO: 2191231 - RNA, 12 nt, Human
aagagcacagcc

SEQ ID NO: 2191232 - RNA, 13 nt, Human
aagagcacagccc

SEQ ID NO: 2191233 - RNA, 14 nt, Human
aagagcacagcccu

SEQ ID NO: 2191234 - RNA, 15 nt, Human
aagagcacagcccuc

SEQ ID NO: 2191235 - RNA, 19 nt, Human
aagagcacagcccucccgc

SEQ ID NO: 2191236 - RNA, 19 nt, Human
aagagcaccuuccucacuu

SEQ ID NO: 2191237 - RNA, 16 nt, Human
aagagcacuuaagaga

SEQ ID NO: 2191238 - RNA, 17 nt, Human
aagagcacuuaagagaa

SEQ ID NO: 2191239 - RNA, 21 nt, Human
aagagcacuuaagagaauauu

SEQ ID NO: 2191240 - RNA, 14 nt, Human
aagagcccuugccu

SEQ ID NO: 2191241 - RNA, 16 nt, Human
aagagcccuugccucc

SEQ ID NO: 2191242 - RNA, 18 nt, Human
aagagcccuugccucccc

SEQ ID NO: 2191243 - RNA, 14 nt, Human
aagagccggagccu

SEQ ID NO: 2191244 - RNA, 19 nt, Human
aagagccggagccuccagc

SEQ ID NO: 2191245 - RNA, 12 nt, Human
aagagccugcag

SEQ ID NO: 2191246 - RNA, 16 nt, Human
aagagccugcaggugc

SEQ ID NO: 2191247 - RNA, 20 nt, Human
aagagccugcaggugcugcu

SEQ ID NO: 2191248 - RNA, 22 nt, Human
aagagccugcaggugcugcugc

SEQ ID NO: 2191249 - RNA, 11 nt, Human
aagagccugga

SEQ ID NO: 2191250 - RNA, 13 nt, Human
aagagccuggaga

SEQ ID NO: 2191251 - RNA, 14 nt, Human
aagagccuggagaa

SEQ ID NO: 2191252 - RNA, 16 nt, Human
aagagccuggagaagc

SEQ ID NO: 2191253 - RNA, 21 nt, Human
gugggaggggcgcccaccucc

SEQ ID NO: 2191254 - RNA, 16 nt, Human
gugggaggggcaggcu

SEQ ID NO: 2191255 - RNA, 17 nt, Human
gugggaggggcaggcug

SEQ ID NO: 2191256 - RNA, 12 nt, Human
gugggaggggca

SEQ ID NO: 2191257 - RNA, 13 nt, Human
gugggaggggcag

SEQ ID NO: 2191258 - RNA, 14 nt, Human
gugggaggggcagg

SEQ ID NO: 2191259 - RNA, 15 nt, Human
gugggaggggcaggc

SEQ ID NO: 2191260 - RNA, 17 nt, Human
gugggagguggaagaag

SEQ ID NO: 2191261 - RNA, 13 nt, Human
gugggagggagca

SEQ ID NO: 2191262 - RNA, 14 nt, Human
gugggagggagcag

SEQ ID NO: 2191263 - RNA, 15 nt, Human
gugggagggagcaga

SEQ ID NO: 2191264 - RNA, 19 nt, Human
gugggagggagcagacagg

SEQ ID NO: 2191265 - RNA, 23 nt, Human
gugggaggaucucuugagccugg

SEQ ID NO: 2191266 - RNA, 19 nt, Human
gugggacggugcccaagcc

SEQ ID NO: 2191267 - RNA, 20 nt, Human
gugggacggugcccaagcca

SEQ ID NO: 2191268 - RNA, 13 nt, Human
gugggagugggcc

SEQ ID NO: 2191269 - RNA, 14 nt, Human
gugggagugggccc

SEQ ID NO: 2191270 - RNA, 13 nt, Human
gugggauccucca

SEQ ID NO: 2191271 - RNA, 14 nt, Human
gugggaguguguaa

SEQ ID NO: 2191272 - RNA, 13 nt, Human
gugggagugugua

SEQ ID NO: 2191273 - RNA, 15 nt, Human
gugggacagagucug

SEQ ID NO: 2191274 - RNA, 21 nt, Human
gugggacagucaccucaugga

SEQ ID NO: 2191275 - RNA, 17 nt, Human
guggcggugccugggug

SEQ ID NO: 2191276 - RNA, 14 nt, Human
guggcggugccugg

SEQ ID NO: 2191277 - RNA, 13 nt, Human
guggcggugccug

SEQ ID NO: 2191278 - RNA, 15 nt, Human
guggcgggcgccugu

SEQ ID NO: 2191279 - RNA, 22 nt, Human
gugggacacccugugauggggc

SEQ ID NO: 2191280 - RNA, 19 nt, Human
guggcccuggccugcuggg

SEQ ID NO: 2191281 - RNA, 18 nt, Human
guggcccuggccugcugg

SEQ ID NO: 2191282 - RNA, 16 nt, Human
guggcccugucccucc

SEQ ID NO: 2191283 - RNA, 17 nt, Human
guggcccugucccuccc

SEQ ID NO: 2191284 - RNA, 21 nt, Human
guggcccugucccucccaccu

SEQ ID NO: 2191285 - RNA, 17 nt, Human
guggcccuggccugcug

SEQ ID NO: 2191286 - RNA, 16 nt, Human
guggcccuggccugcu

SEQ ID NO: 2191287 - RNA, 13 nt, Human
guggcccuggccu

SEQ ID NO: 2191288 - RNA, 21 nt, Human
guggcccugccaucuucccag

SEQ ID NO: 2191289 - RNA, 13 nt, Human
guggcccugccau

SEQ ID NO: 2191290 - RNA, 17 nt, Human
guggcccugccaucuuc

SEQ ID NO: 2191291 - RNA, 22 nt, Human
guggcccugccaucuucccagc

SEQ ID NO: 2191292 - RNA, 23 nt, Human
guggcgcagcauauucaggaagc

SEQ ID NO: 2191293 - RNA, 22 nt, Human
guggcgccgucuccaggggcug

SEQ ID NO: 2191294 - RNA, 17 nt, Human
guggcgccgucuccagg

SEQ ID NO: 2191295 - RNA, 21 nt, Human
guggcgccgucuccaggggcu

SEQ ID NO: 2191296 - RNA, 13 nt, Human
gugggucuucagg

SEQ ID NO: 2191297 - RNA, 17 nt, Human
guggguacuauucugau

SEQ ID NO: 2191298 - RNA, 16 nt, Human
gugggucugugugugu

SEQ ID NO: 2191299 - RNA, 13 nt, Human
gugggucugugug

SEQ ID NO: 2191300 - RNA, 17 nt, Human
gugggucuucagggggc

SEQ ID NO: 2191301 - RNA, 21 nt, Human
gugggucuucagggggccagg

SEQ ID NO: 2191302 - RNA, 15 nt, Human
gugggugagaugcug

SEQ ID NO: 2191303 - RNA, 20 nt, Human
gugggugagaugcuggagaa

SEQ ID NO: 2191304 - RNA, 19 nt, Human
guggguggaaccaggaacc

SEQ ID NO: 2191305 - RNA, 23 nt, Human
gugggugagaugcuggagaagag

SEQ ID NO: 2191306 - RNA, 18 nt, Human
guggguggauauaaauau

SEQ ID NO: 2191307 - RNA, 20 nt, Human
guggguggauauaaauauau

SEQ ID NO: 2191308 - RNA, 21 nt, Human
guggguggauauaaauauaua

SEQ ID NO: 2191309 - RNA, 18 nt, Human
guggugggacagggaccc

SEQ ID NO: 2191310 - RNA, 12 nt, Human
gugguggggagg

SEQ ID NO: 2191311 - RNA, 16 nt, Human
guggugguaacccugg

SEQ ID NO: 2191312 - RNA, 22 nt, Human
gugguggguucuuuggaaggag

SEQ ID NO: 2191313 - RNA, 20 nt, Human
gugguggggaggggcgcugg

SEQ ID NO: 2191314 - RNA, 22 nt, Human
gugguggggaggggcgcuggcc

SEQ ID NO: 2191315 - RNA, 20 nt, Human
guggugguaacccugguggu

SEQ ID NO: 2191316 - RNA, 19 nt, Human
guggugguaacccuggugg

SEQ ID NO: 2191317 - RNA, 14 nt, Human
guggugguuuucug

SEQ ID NO: 2191318 - RNA, 16 nt, Human
gugguuucagaaaugu

SEQ ID NO: 2191319 - RNA, 22 nt, Human
gugggggcagagggcagaggcu

SEQ ID NO: 2191320 - RNA, 15 nt, Human
guggggggcuucaua

SEQ ID NO: 2191321 - RNA, 16 nt, Human
guggggggcuucauac

SEQ ID NO: 2191322 - RNA, 20 nt, Human
gugggggaucacagccucug

SEQ ID NO: 2191323 - RNA, 18 nt, Human
gugggggcagagggcaga

SEQ ID NO: 2191324 - RNA, 17 nt, Human
gugggggcagagggcag

SEQ ID NO: 2191325 - RNA, 14 nt, Human
gugggggcagaggg

SEQ ID NO: 2191326 - RNA, 17 nt, Human
gugggauaucccuaugc

SEQ ID NO: 2191327 - RNA, 15 nt, Human
gugggagucaucuca

SEQ ID NO: 2191328 - RNA, 15 nt, Human
guggguacagagagg

SEQ ID NO: 2191329 - RNA, 22 nt, Human
gugggguguguuccaacugccc

SEQ ID NO: 2191330 - RNA, 14 nt, Human
guggguacgggagg

SEQ ID NO: 2191331 - RNA, 17 nt, Human
guggggugaggaccacu

SEQ ID NO: 2191332 - RNA, 12 nt, Human
gugggggcugca

SEQ ID NO: 2191333 - RNA, 13 nt, Human
guggggugugcug

SEQ ID NO: 2191334 - RNA, 16 nt, Human
guggggugugcuggga

SEQ ID NO: 2191335 - RNA, 19 nt, Human
guggggugugcugggagcu

SEQ ID NO: 2191336 - RNA, 11 nt, Human
aagcaaaggug

SEQ ID NO: 2191337 - RNA, 17 nt, Human
aagcaaaggugaagaga

SEQ ID NO: 2191338 - RNA, 18 nt, Human
aagcaaccuggguccaaa

SEQ ID NO: 2191339 - RNA, 20 nt, Human
aagcaaccuggguccaaaua

SEQ ID NO: 2191340 - RNA, 21 nt, Human
aagcaaccuggguccaaauaa

SEQ ID NO: 2191341 - RNA, 22 nt, Human
aagcaaccuggguccaaauaaa

SEQ ID NO: 2191342 - RNA, 12 nt, Human
aagcaaaggaga

SEQ ID NO: 2191343 - RNA, 13 nt, Human
aagcaaaggagau

SEQ ID NO: 2191344 - RNA, 15 nt, Human
aagcaagaaagaaac

SEQ ID NO: 2191345 - RNA, 14 nt, Human
aagcaacuguuaug

SEQ ID NO: 2191346 - RNA, 18 nt, Human
aagcaagagagauguuuu

SEQ ID NO: 2191347 - RNA, 15 nt, Human
aagcaagagagaugu

SEQ ID NO: 2191348 - RNA, 16 nt, Human
aagcaacugucuauuu

SEQ ID NO: 2191349 - RNA, 23 nt, Human
aagcaaccuggguccaaauaaaa

SEQ ID NO: 2191350 - RNA, 17 nt, Human
aagcaacugucuauuuc

SEQ ID NO: 2191351 - RNA, 18 nt, Human
aagcaacugucuauuucu

SEQ ID NO: 2191352 - RNA, 21 nt, Human
aagcaacugucuauuucugcu

SEQ ID NO: 2191353 - RNA, 22 nt, Human
aagcaacugucuauuucugcug

SEQ ID NO: 2191354 - RNA, 23 nt, Human
aagcaacugucuauuucugcuga

SEQ ID NO: 2191355 - RNA, 15 nt, Human
aagcaagauuucaga

SEQ ID NO: 2191356 - RNA, 17 nt, Human
aagcaagagagauguuu

SEQ ID NO: 2191357 - RNA, 17 nt, Human
aagcaauaaagaagagu

SEQ ID NO: 2191358 - RNA, 16 nt, Human
aagcaauaaaugaaug

SEQ ID NO: 2191359 - RNA, 14 nt, Human
aagcaauaaaugaa

SEQ ID NO: 2191360 - RNA, 20 nt, Human
aagcaauaauggucccaucc

SEQ ID NO: 2191361 - RNA, 21 nt, Human
aagcaauaauggucccaucca

SEQ ID NO: 2191362 - RNA, 22 nt, Human
aagcaauaauggucccauccag

SEQ ID NO: 2191363 - RNA, 21 nt, Human
aagaugcugaaacaggagaga

SEQ ID NO: 2191364 - RNA, 17 nt, Human
aagaugcucuucugugg

SEQ ID NO: 2191365 - RNA, 10 nt, Human
aagaugcugg

SEQ ID NO: 2191366 - RNA, 22 nt, Human
aagaugcuggaugucugccaau

SEQ ID NO: 2191367 - RNA, 11 nt, Human
aagaugcuggg

SEQ ID NO: 2191368 - RNA, 14 nt, Human
aagaugcuggguug

SEQ ID NO: 2191369 - RNA, 16 nt, Human
aagaugcuggguuggu

SEQ ID NO: 2191370 - RNA, 20 nt, Human
aagaugcuggguuggugcac

SEQ ID NO: 2191371 - RNA, 20 nt, Human
aagauguccuccuuguucua

SEQ ID NO: 2191372 - RNA, 15 nt, Human
aagaugcucuuuuaa

SEQ ID NO: 2191373 - RNA, 22 nt, Human
aagaugcucuaucuugcucugu

SEQ ID NO: 2191374 - RNA, 15 nt, Human
aagaugcucuucugu

SEQ ID NO: 2191375 - RNA, 24 nt, Human
aagaugcccacugaggaaugauga

SEQ ID NO: 2191376 - RNA, 15 nt, Human
aagaugcucuaucuu

SEQ ID NO: 2191377 - RNA, 21 nt, Human
aagaugcucuaucuugcucug

SEQ ID NO: 2191378 - RNA, 22 nt, Human
aagcaaagacuuuccucuuagu

SEQ ID NO: 2191379 - RNA, 17 nt, Human
aagcaaagcaccagcuu

SEQ ID NO: 2191380 - RNA, 14 nt, Human
aagaugugacaugu

SEQ ID NO: 2191381 - RNA, 18 nt, Human
aagaugugacauguuuua

SEQ ID NO: 2191382 - RNA, 20 nt, Human
aagauauauuaaaaauauaa

SEQ ID NO: 2191383 - RNA, 19 nt, Human
aagauaugggacauuuuug

SEQ ID NO: 2191384 - RNA, 16 nt, Human
aagauaugggacauuu

SEQ ID NO: 2191385 - RNA, 12 nt, Human
aagauauggaca

SEQ ID NO: 2191386 - RNA, 21 nt, Human
aagauauauacacaggauccu

SEQ ID NO: 2191387 - RNA, 11 nt, Human
aagauauauua

SEQ ID NO: 2191388 - RNA, 14 nt, Human
aagauauauuaaaa

SEQ ID NO: 2191389 - RNA, 15 nt, Human
aagauauauuaaaaa

SEQ ID NO: 2191390 - RNA, 19 nt, Human
aagauauauuaaaaauaua

SEQ ID NO: 2191391 - RNA, 21 nt, Human
aagauauauuaaaaauauaaa

SEQ ID NO: 2191392 - RNA, 13 nt, Human
aagauauuuauau

SEQ ID NO: 2191393 - RNA, 19 nt, Human
aagauauuuuaaaaucugu

SEQ ID NO: 2191394 - RNA, 18 nt, Human
aagauauuuauauauauu

SEQ ID NO: 2191395 - RNA, 15 nt, Human
aagauauuuauauau

SEQ ID NO: 2191396 - RNA, 18 nt, Human
aagaucuguccucagccu

SEQ ID NO: 2191397 - RNA, 20 nt, Human
aagaucuguccucagccuug

SEQ ID NO: 2191398 - RNA, 19 nt, Human
aagaucuguccucagccuu

SEQ ID NO: 2191399 - RNA, 13 nt, Human
aagaucuuucagg

SEQ ID NO: 2191400 - RNA, 12 nt, Human
aagaugcagccg

SEQ ID NO: 2191401 - RNA, 22 nt, Human
aagaucuguuuugaaggcaaaa

SEQ ID NO: 2191402 - RNA, 21 nt, Human
aagaucuguuuugaaggcaaa

SEQ ID NO: 2191403 - RNA, 20 nt, Human
aagaucuguuuugaaggcaa

SEQ ID NO: 2191404 - RNA, 17 nt, Human
aagaucugugcagcccc

SEQ ID NO: 2191405 - RNA, 19 nt, Human
aagaucugugcagccccgc

SEQ ID NO: 2191406 - RNA, 17 nt, Human
aagaucuuaaauuuugu

SEQ ID NO: 2191407 - RNA, 14 nt, Human
aagaucuuaaauuu

SEQ ID NO: 2191408 - RNA, 15 nt, Human
aagaucuuaaauuuu

SEQ ID NO: 2191409 - RNA, 16 nt, Human
gugguuugagacacug

SEQ ID NO: 2191410 - RNA, 20 nt, Human
guggugguuuucuguucuuu

SEQ ID NO: 2191411 - RNA, 16 nt, Human
gugguuugguguguuc

SEQ ID NO: 2191412 - RNA, 20 nt, Human
gugguuuuauacugaaggaa

SEQ ID NO: 2191413 - RNA, 16 nt, Human
gugguuuuccccuccc

SEQ ID NO: 2191414 - RNA, 18 nt, Human
gugguuuuccccucccug

SEQ ID NO: 2191415 - RNA, 19 nt, Human
gugguuuuccccucccugg

SEQ ID NO: 2191416 - RNA, 17 nt, Human
aagagguguuuuuucua

SEQ ID NO: 2191417 - RNA, 20 nt, Human
gugguuuuccccucccuggg

SEQ ID NO: 2191418 - RNA, 21 nt, Human
gugguuuuccccucccugggu

SEQ ID NO: 2191419 - RNA, 24 nt, Human
gugguuuuccccucccuggguuca

SEQ ID NO: 2191420 - RNA, 17 nt, Human
gugguuuucuguucuuu

SEQ ID NO: 2191421 - RNA, 18 nt, Human
aagagguuuuaaaaaaau

SEQ ID NO: 2191422 - RNA, 20 nt, Human
aagauauaagugcuguauaa

SEQ ID NO: 2191423 - RNA, 21 nt, Human
aagauauaagugcuguauaaa

SEQ ID NO: 2191424 - RNA, 19 nt, Human
aagauauaagugcuguaua

SEQ ID NO: 2191425 - RNA, 13 nt, Human
aagaguagaaacu

SEQ ID NO: 2191426 - RNA, 16 nt, Human
aagagguuuuucuuaa

SEQ ID NO: 2191427 - RNA, 17 nt, Human
aagaguaaaggaaauga

SEQ ID NO: 2191428 - RNA, 18 nt, Human
aagaguaaaggaaaugau

SEQ ID NO: 2191429 - RNA, 21 nt, Human
gugucuuuucuguagagcaua

SEQ ID NO: 2191430 - RNA, 18 nt, Human
gugucuuucacagcuccu

SEQ ID NO: 2191431 - RNA, 17 nt, Human
gugucuuuccacuccuc

SEQ ID NO: 2191432 - RNA, 20 nt, Human
gugucuucuccaccacgcug

SEQ ID NO: 2191433 - RNA, 17 nt, Human
gugucuugcaauggcag

SEQ ID NO: 2191434 - RNA, 18 nt, Human
gugucuugcaauggcagc

SEQ ID NO: 2191435 - RNA, 15 nt, Human
gugucuuccauaaug

SEQ ID NO: 2191436 - RNA, 13 nt, Human
gugucuuccauaa

SEQ ID NO: 2191437 - RNA, 14 nt, Human
gugucuuccuccca

SEQ ID NO: 2191438 - RNA, 15 nt, Human
gugucuuccucccaa

SEQ ID NO: 2191439 - RNA, 19 nt, Human
gugucuuccucccaagugg

SEQ ID NO: 2191440 - RNA, 12 nt, Human
gugucuuccugu

SEQ ID NO: 2191441 - RNA, 13 nt, Human
gugucuuccugug

SEQ ID NO: 2191442 - RNA, 14 nt, Human
gugucuuccugugg

SEQ ID NO: 2191443 - RNA, 12 nt, Human
gugucuuccaua

SEQ ID NO: 2191444 - RNA, 16 nt, Human
aagcaauuuuccuuga

SEQ ID NO: 2191445 - RNA, 17 nt, Human
aagcaauuuuccuugaa

SEQ ID NO: 2191446 - RNA, 16 nt, Human
aagcaauuccaaccuu

SEQ ID NO: 2191447 - RNA, 13 nt, Human
aagcaauuuuccu

SEQ ID NO: 2191448 - RNA, 14 nt, Human
aagcaauuuuccuu

SEQ ID NO: 2191449 - RNA, 11 nt, Human
aagcaaugcau

SEQ ID NO: 2191450 - RNA, 13 nt, Human
aagcaaugcauuu

SEQ ID NO: 2191451 - RNA, 16 nt, Human
aagcaaugcauuuugg

SEQ ID NO: 2191452 - RNA, 15 nt, Human
aagcaauuagacaag

SEQ ID NO: 2191453 - RNA, 15 nt, Human
aagcaauuccaaccu

SEQ ID NO: 2191454 - RNA, 15 nt, Human
aagcaauccuaggua

SEQ ID NO: 2191455 - RNA, 19 nt, Human
aagcaauaugcauuuaaau

SEQ ID NO: 2191456 - RNA, 13 nt, Human
aagcaauaugcau

SEQ ID NO: 2191457 - RNA, 19 nt, Human
gugugaggagcugcuggcu

SEQ ID NO: 2191458 - RNA, 18 nt, Human
gugugaggagcugcuggc

SEQ ID NO: 2191459 - RNA, 16 nt, Human
gugugaggagcugcug

SEQ ID NO: 2191460 - RNA, 13 nt, Human
gugugagcaguga

SEQ ID NO: 2191461 - RNA, 21 nt, Human
gugugagaagugaaugcuggg

SEQ ID NO: 2191462 - RNA, 22 nt, Human
gugugagaagugaaugcuggga

SEQ ID NO: 2191463 - RNA, 13 nt, Human
gugugaccugagg

SEQ ID NO: 2191464 - RNA, 14 nt, Human
guguguagccaagg

SEQ ID NO: 2191465 - RNA, 21 nt, Human
guguguagaguuaagaagcug

SEQ ID NO: 2191466 - RNA, 19 nt, Human
guguguagacaaauauuug

SEQ ID NO: 2191467 - RNA, 13 nt, Human
guguguagaguua

SEQ ID NO: 2191468 - RNA, 16 nt, Human
guguguagaguuaaga

SEQ ID NO: 2191469 - RNA, 17 nt, Human
guguguagaguuaagaa

SEQ ID NO: 2191470 - RNA, 15 nt, Human
gugugaccugagggc

SEQ ID NO: 2191471 - RNA, 17 nt, Human
guguguagacaaauauu

SEQ ID NO: 2191472 - RNA, 14 nt, Human
guguguaauuuaaa

SEQ ID NO: 2191473 - RNA, 17 nt, Human
gugugacuacuccccca

SEQ ID NO: 2191474 - RNA, 21 nt, Human
gugugaaaggaagcuccacug

SEQ ID NO: 2191475 - RNA, 18 nt, Human
gugucuuuuuucacuaca

SEQ ID NO: 2191476 - RNA, 17 nt, Human
gugugaaaaugugugug

SEQ ID NO: 2191477 - RNA, 13 nt, Human
gugugaaaauggg

SEQ ID NO: 2191478 - RNA, 15 nt, Human
gugucuuuugcauga

SEQ ID NO: 2191479 - RNA, 16 nt, Human
gugucuuuugcaugau

SEQ ID NO: 2191480 - RNA, 14 nt, Human
guguuguaugccuu

SEQ ID NO: 2191481 - RNA, 21 nt, Human
guguuggcuaaugaagggaaa

SEQ ID NO: 2191482 - RNA, 21 nt, Human
guguugggauacugcagggcc

SEQ ID NO: 2191483 - RNA, 22 nt, Human
guguugguuuugacuggauauu

SEQ ID NO: 2191484 - RNA, 20 nt, Human
guguugcccaggcuggucuc

SEQ ID NO: 2191485 - RNA, 21 nt, Human
guguugccuugaaccacuucc

SEQ ID NO: 2191486 - RNA, 18 nt, Human
guguugccacaggacaca

SEQ ID NO: 2191487 - RNA, 17 nt, Human
guguugccacaggacac

SEQ ID NO: 2191488 - RNA, 15 nt, Human
guguugccacaggac

SEQ ID NO: 2191489 - RNA, 18 nt, Human
guguugcgugucgugggu

SEQ ID NO: 2191490 - RNA, 16 nt, Human
guguuggcccaagcuc

SEQ ID NO: 2191491 - RNA, 17 nt, Human
guguuggcccaagcucu

SEQ ID NO: 2191492 - RNA, 18 nt, Human
guguuggcccaagcucuu

SEQ ID NO: 2191493 - RNA, 23 nt, Human
guguuuccuggcacugcuuccag

SEQ ID NO: 2191494 - RNA, 18 nt, Human
guguuuccauauuuuaua

SEQ ID NO: 2191495 - RNA, 20 nt, Human
guguuuauuuuucauauugu

SEQ ID NO: 2191496 - RNA, 18 nt, Human
guguuucacuuuuaggga

SEQ ID NO: 2191497 - RNA, 15 nt, Human
guguuguguguggga

SEQ ID NO: 2191498 - RNA, 20 nt, Human
guguugugauagcuaacauu

SEQ ID NO: 2191499 - RNA, 18 nt, Human
guguugucuugaaagauu

SEQ ID NO: 2191500 - RNA, 16 nt, Human
guguuuauuuuucaua

SEQ ID NO: 2191501 - RNA, 14 nt, Human
guguugucccuucu

SEQ ID NO: 2191502 - RNA, 12 nt, Human
guguugucucua

SEQ ID NO: 2191503 - RNA, 15 nt, Human
guguugucucuugag

SEQ ID NO: 2191504 - RNA, 14 nt, Human
guguugggauacug

SEQ ID NO: 2191505 - RNA, 16 nt, Human
guguugucuugaaaga

SEQ ID NO: 2191506 - RNA, 13 nt, Human
guguugcagaagg

SEQ ID NO: 2191507 - RNA, 19 nt, Human
guguugauuuucuguugua

SEQ ID NO: 2191508 - RNA, 17 nt, Human
guguugccaaauauguc

SEQ ID NO: 2191509 - RNA, 15 nt, Human
guguugaucccaaga

SEQ ID NO: 2191510 - RNA, 19 nt, Human
guguugccaaauauguccu

SEQ ID NO: 2191511 - RNA, 20 nt, Human
guguugccaaauauguccug

SEQ ID NO: 2191512 - RNA, 14 nt, Human
guguugccaagcuc

SEQ ID NO: 2191513 - RNA, 18 nt, Human
guguugccaagcuccaag

SEQ ID NO: 2191514 - RNA, 22 nt, Human
gugugucuguucacuuuuccuc

SEQ ID NO: 2191515 - RNA, 15 nt, Human
gugugucuguucacu

SEQ ID NO: 2191516 - RNA, 16 nt, Human
gugugucugcucagua

SEQ ID NO: 2191517 - RNA, 15 nt, Human
gugugucugcucagu

SEQ ID NO: 2191518 - RNA, 14 nt, Human
gugugucuuaauua

SEQ ID NO: 2191519 - RNA, 21 nt, Human
gugugucuuaauuauuauuug

SEQ ID NO: 2191520 - RNA, 20 nt, Human
guguguccuugugcaugagc

SEQ ID NO: 2191521 - RNA, 12 nt, Human
guguguccuugu

SEQ ID NO: 2191522 - RNA, 18 nt, Human
guguguccuugugcauga

SEQ ID NO: 2191523 - RNA, 18 nt, Human
gugugucccccucugucc

SEQ ID NO: 2191524 - RNA, 10 nt, Human
guguguccuu

SEQ ID NO: 2191525 - RNA, 11 nt, Human
guguguccuug

SEQ ID NO: 2191526 - RNA, 17 nt, Human
gugugucccccucuguc

SEQ ID NO: 2191527 - RNA, 16 nt, Human
gugugucccccucugu

SEQ ID NO: 2191528 - RNA, 20 nt, Human
guguguccacgacugucucc

SEQ ID NO: 2191529 - RNA, 19 nt, Human
guguguccacgacugucuc

SEQ ID NO: 2191530 - RNA, 20 nt, Human
guguguaugugcgugugugc

SEQ ID NO: 2191531 - RNA, 18 nt, Human
guguguaugggugugugu

SEQ ID NO: 2191532 - RNA, 19 nt, Human
guguguccaaaacugccuc

SEQ ID NO: 2191533 - RNA, 12 nt, Human
guguguaugugg

SEQ ID NO: 2191534 - RNA, 21 nt, Human
guguguaugacuaaagagaga

SEQ ID NO: 2191535 - RNA, 20 nt, Human
guguguagaguuaagaagcu

SEQ ID NO: 2191536 - RNA, 18 nt, Human
guguguaugcgugugugu

SEQ ID NO: 2191537 - RNA, 21 nt, Human
guuugggcagaagggagaagg

SEQ ID NO: 2191538 - RNA, 22 nt, Human
guuugggaccccuggugguuca

SEQ ID NO: 2191539 - RNA, 23 nt, Human
guuuggcugugucuaaacugcau

SEQ ID NO: 2191540 - RNA, 16 nt, Human
guuugggaccccuggu

SEQ ID NO: 2191541 - RNA, 13 nt, Human
guuugccucugcc

SEQ ID NO: 2191542 - RNA, 16 nt, Human
guuugccucugccucu

SEQ ID NO: 2191543 - RNA, 22 nt, Human
guuugccauacuuugucugaaa

SEQ ID NO: 2191544 - RNA, 14 nt, Human
guuugccauacuuu

SEQ ID NO: 2191545 - RNA, 15 nt, Human
guuugccauacuuug

SEQ ID NO: 2191546 - RNA, 21 nt, Human
guuugauuuuagcugcagaac

SEQ ID NO: 2191547 - RNA, 12 nt, Human
guuugcauuccu

SEQ ID NO: 2191548 - RNA, 15 nt, Human
guuugcacacuugug

SEQ ID NO: 2191549 - RNA, 20 nt, Human
guuugccacuuugcaaagga

SEQ ID NO: 2191550 - RNA, 17 nt, Human
guuugcaaggaagccac

SEQ ID NO: 2191551 - RNA, 22 nt, Human
guuugcaaggaagccacagcug

SEQ ID NO: 2191552 - RNA, 22 nt, Human
guuugcacguuaugguguuucu

SEQ ID NO: 2191553 - RNA, 13 nt, Human
guuugcaaggaag

SEQ ID NO: 2191554 - RNA, 14 nt, Human
guuugcaaggaagc

SEQ ID NO: 2191555 - RNA, 15 nt, Human
guuugcaaggaagcc

SEQ ID NO: 2191556 - RNA, 13 nt, Human
guuucugugcaug

SEQ ID NO: 2191557 - RNA, 17 nt, Human
guuucugugcauggugg

SEQ ID NO: 2191558 - RNA, 16 nt, Human
guuucuguccugcugg

SEQ ID NO: 2191559 - RNA, 14 nt, Human
guuucuguuauuaa

SEQ ID NO: 2191560 - RNA, 14 nt, Human
guuucuguucugug

SEQ ID NO: 2191561 - RNA, 15 nt, Human
guuucuguucugugg

SEQ ID NO: 2191562 - RNA, 20 nt, Human
guuucuguucuguggaaagu

SEQ ID NO: 2191563 - RNA, 15 nt, Human
guuugauuucauuaa

SEQ ID NO: 2191564 - RNA, 17 nt, Human
guuucuguucuguggaa

SEQ ID NO: 2191565 - RNA, 18 nt, Human
guuucuguucuguggaaa

SEQ ID NO: 2191566 - RNA, 22 nt, Human
guuucuguucuguggaaagugu

SEQ ID NO: 2191567 - RNA, 22 nt, Human
guuugauucagacagcugccug

SEQ ID NO: 2191568 - RNA, 17 nt, Human
guuucuguccugcuggu

SEQ ID NO: 2191569 - RNA, 17 nt, Human
guuucugucaggagagc

SEQ ID NO: 2191570 - RNA, 21 nt, Human
guuucugucaggagagcagcg

SEQ ID NO: 2191571 - RNA, 23 nt, Human
guuucuaaaggcuaccuuuguau

SEQ ID NO: 2191572 - RNA, 22 nt, Human
guuucuaaaggcuaccuuugua

SEQ ID NO: 2191573 - RNA, 20 nt, Human
guuuggggagcagagacacu

SEQ ID NO: 2191574 - RNA, 23 nt, Human
guuuuacaauaaaaucuugaaaa

SEQ ID NO: 2191575 - RNA, 18 nt, Human
guuuggggaugagaaagg

SEQ ID NO: 2191576 - RNA, 15 nt, Human
guuuggggagcagag

SEQ ID NO: 2191577 - RNA, 22 nt, Human
guuuggggaaugcggccgcauu

SEQ ID NO: 2191578 - RNA, 16 nt, Human
guuugggccccucucc

SEQ ID NO: 2191579 - RNA, 20 nt, Human
guuugggccccagaggcugg

SEQ ID NO: 2191580 - RNA, 21 nt, Human
guuuuaggacaaacagcucag

SEQ ID NO: 2191581 - RNA, 20 nt, Human
guuuuagccauuguuggcuu

SEQ ID NO: 2191582 - RNA, 20 nt, Human
guuuuagcuccuugacuccu

SEQ ID NO: 2191583 - RNA, 21 nt, Human
guuuuagcuccuugacuccuu

SEQ ID NO: 2191584 - RNA, 17 nt, Human
guuuuagacaaauacuc

SEQ ID NO: 2191585 - RNA, 16 nt, Human
guuuuagaagguucuc

SEQ ID NO: 2191586 - RNA, 18 nt, Human
guuuuagacaaauacuca

SEQ ID NO: 2191587 - RNA, 19 nt, Human
guuuuagaguuaacaauga

SEQ ID NO: 2191588 - RNA, 22 nt, Human
guuuuagacaaauacucaugug

SEQ ID NO: 2191589 - RNA, 23 nt, Human
guuuuagacaaauacucaugugu

SEQ ID NO: 2191590 - RNA, 14 nt, Human
guuuuacuaaagaa

SEQ ID NO: 2191591 - RNA, 13 nt, Human
guuuuagaaaaca

SEQ ID NO: 2191592 - RNA, 21 nt, Human
guuuuacauuguugagcuauu

SEQ ID NO: 2191593 - RNA, 12 nt, Human
guuuuacauugu

SEQ ID NO: 2191594 - RNA, 21 nt, Human
guuuuaguugcagaaacauuu

SEQ ID NO: 2191595 - RNA, 15 nt, Human
guuuuaguuaaauuu

SEQ ID NO: 2191596 - RNA, 23 nt, Human
guuuucugagaaagacuauucaa

SEQ ID NO: 2191597 - RNA, 14 nt, Human
guuuuaguugcaga

SEQ ID NO: 2191598 - RNA, 13 nt, Human
guuuucugagccc

SEQ ID NO: 2191599 - RNA, 14 nt, Human
guuuucugagcccg

SEQ ID NO: 2191600 - RNA, 15 nt, Human
guuuucugagcccgg

SEQ ID NO: 2191601 - RNA, 17 nt, Human
guuuucugagcccgggc

SEQ ID NO: 2191602 - RNA, 11 nt, Human
guuuucuguuc

SEQ ID NO: 2191603 - RNA, 20 nt, Human
guuuucuucccaucacugga

SEQ ID NO: 2191604 - RNA, 15 nt, Human
guuuucuucccauca

SEQ ID NO: 2191605 - RNA, 12 nt, Human
guuuucuuccca

SEQ ID NO: 2191606 - RNA, 17 nt, Human
guuuucuuaaccaucuu

SEQ ID NO: 2191607 - RNA, 16 nt, Human
guuuucuuaacuuaaa

SEQ ID NO: 2191608 - RNA, 16 nt, Human
guuuucuuaaccaucu

SEQ ID NO: 2191609 - RNA, 17 nt, Human
guuuucuggguguccaa

SEQ ID NO: 2191610 - RNA, 19 nt, Human
guuuucuguucuuucuggc

SEQ ID NO: 2191611 - RNA, 20 nt, Human
guuuucuuaaccagaucauu

SEQ ID NO: 2191612 - RNA, 12 nt, Human
guuuucuguucu

SEQ ID NO: 2191613 - RNA, 19 nt, Human
guuuucugagcccgggcug

SEQ ID NO: 2191614 - RNA, 17 nt, Human
guuuucuggcuggagcc

SEQ ID NO: 2191615 - RNA, 18 nt, Human
guuuucuggcuggagccu

SEQ ID NO: 2191616 - RNA, 16 nt, Human
guuuucugggugucca

SEQ ID NO: 2191617 - RNA, 22 nt, Human
aaggggaauguuugccucugcc

SEQ ID NO: 2191618 - RNA, 23 nt, Human
aaggggaauguuugccucugccu

SEQ ID NO: 2191619 - RNA, 14 nt, Human
aaggggugcuuuua

SEQ ID NO: 2191620 - RNA, 17 nt, Human
aaggggugcuuuuauag

SEQ ID NO: 2191621 - RNA, 21 nt, Human
aagggguaggauuacuaggug

SEQ ID NO: 2191622 - RNA, 17 nt, Human
aagggcuagaaccugga

SEQ ID NO: 2191623 - RNA, 19 nt, Human
aagggcuagaaccuggaga

SEQ ID NO: 2191624 - RNA, 22 nt, Human
aagggcuucugcacccuccacc

SEQ ID NO: 2191625 - RNA, 23 nt, Human
aagggcuucugcacccuccaccc

SEQ ID NO: 2191626 - RNA, 18 nt, Human
aagggcuuuguuuugcac

SEQ ID NO: 2191627 - RNA, 19 nt, Human
aagggccuggccugagcug

SEQ ID NO: 2191628 - RNA, 14 nt, Human
aagggccuggccug

SEQ ID NO: 2191629 - RNA, 17 nt, Human
aagggccuggccugagc

SEQ ID NO: 2191630 - RNA, 13 nt, Human
aagggccuggccu

SEQ ID NO: 2191631 - RNA, 12 nt, Human
aaggcuucucuc

SEQ ID NO: 2191632 - RNA, 14 nt, Human
aaggcuucucucuc

SEQ ID NO: 2191633 - RNA, 17 nt, Human
aaggcuucucucugugg

SEQ ID NO: 2191634 - RNA, 15 nt, Human
aaggcuucucucuca

SEQ ID NO: 2191635 - RNA, 16 nt, Human
aaggcuucucucucac

SEQ ID NO: 2191636 - RNA, 18 nt, Human
aaggcuucucucuguggg

SEQ ID NO: 2191637 - RNA, 17 nt, Human
aaggcuucucucucacc

SEQ ID NO: 2191638 - RNA, 23 nt, Human
guuucaaaauaaaaaccaagaag

SEQ ID NO: 2191639 - RNA, 18 nt, Human
guuucaaacacaaaugca

SEQ ID NO: 2191640 - RNA, 19 nt, Human
guuucaaacacaaaugcag

SEQ ID NO: 2191641 - RNA, 21 nt, Human
guuucaaacauauauaacaau

SEQ ID NO: 2191642 - RNA, 19 nt, Human
guuucaaaauaaaaaccaa

SEQ ID NO: 2191643 - RNA, 16 nt, Human
guuucaaaauaaaaac

SEQ ID NO: 2191644 - RNA, 15 nt, Human
guuucaaaauaaaaa

SEQ ID NO: 2191645 - RNA, 19 nt, Human
guuucaaaaacuguauuga

SEQ ID NO: 2191646 - RNA, 16 nt, Human
guuuauuuuucauauu

SEQ ID NO: 2191647 - RNA, 18 nt, Human
guuuauuuuucauauugu

SEQ ID NO: 2191648 - RNA, 17 nt, Human
guuuauuuuucauauug

SEQ ID NO: 2191649 - RNA, 19 nt, Human
guuucaaaaacacaguguu

SEQ ID NO: 2191650 - RNA, 20 nt, Human
guuucaaaaacacaguguuu

SEQ ID NO: 2191651 - RNA, 17 nt, Human
guuucaaaaacuguauu

SEQ ID NO: 2191652 - RNA, 16 nt, Human
aagguaaaauugaaag

SEQ ID NO: 2191653 - RNA, 17 nt, Human
aagguaauuucuugugc

SEQ ID NO: 2191654 - RNA, 13 nt, Human
aagguacuucaaa

SEQ ID NO: 2191655 - RNA, 14 nt, Human
aagguuuucuccac

SEQ ID NO: 2191656 - RNA, 20 nt, Human
aagguuuuccucuucuauuu

SEQ ID NO: 2191657 - RNA, 16 nt, Human
aagguuuuauuuugua

SEQ ID NO: 2191658 - RNA, 13 nt, Human
aagguuuucucca

SEQ ID NO: 2191659 - RNA, 15 nt, Human
aagguuuuauuuugu

SEQ ID NO: 2191660 - RNA, 16 nt, Human
aaggguaucaggugcu

SEQ ID NO: 2191661 - RNA, 20 nt, Human
aagggguugguugaggugga

SEQ ID NO: 2191662 - RNA, 21 nt, Human
aaggguuuuccacccuggaau

SEQ ID NO: 2191663 - RNA, 13 nt, Human
aaggguaaagaag

SEQ ID NO: 2191664 - RNA, 19 nt, Human
aaggguuuuccacccugga

SEQ ID NO: 2191665 - RNA, 12 nt, Human
aagguaaaauug

SEQ ID NO: 2191666 - RNA, 13 nt, Human
aaguaaaaacaaa

SEQ ID NO: 2191667 - RNA, 20 nt, Human
aaguaaaaacaaagaaauua

SEQ ID NO: 2191668 - RNA, 22 nt, Human
aaguaaaaacaaagaaauuaug

SEQ ID NO: 2191669 - RNA, 12 nt, Human
aaguaauaugca

SEQ ID NO: 2191670 - RNA, 19 nt, Human
guuucuaaaggcuaccuuu

SEQ ID NO: 2191671 - RNA, 16 nt, Human
aaguaauaugcacaca

SEQ ID NO: 2191672 - RNA, 15 nt, Human
aaguaauaugcacac

SEQ ID NO: 2191673 - RNA, 20 nt, Human
guuguagaauguauuguacc

SEQ ID NO: 2191674 - RNA, 18 nt, Human
guuguaucagcacgugug

SEQ ID NO: 2191675 - RNA, 21 nt, Human
guuguauaaauuuauuuacug

SEQ ID NO: 2191676 - RNA, 19 nt, Human
guuguauaaauuuauuuac

SEQ ID NO: 2191677 - RNA, 17 nt, Human
guuguauaaauuuauuu

SEQ ID NO: 2191678 - RNA, 16 nt, Human
guuguauaaauuuauu

SEQ ID NO: 2191679 - RNA, 15 nt, Human
guuguauuagauguu

SEQ ID NO: 2191680 - RNA, 14 nt, Human
guuguauuagaugu

SEQ ID NO: 2191681 - RNA, 23 nt, Human
guuguaugccuuuaaaucuguga

SEQ ID NO: 2191682 - RNA, 22 nt, Human
guuguauucuuugauguuaaca

SEQ ID NO: 2191683 - RNA, 16 nt, Human
guugucaaagagaggg

SEQ ID NO: 2191684 - RNA, 14 nt, Human
guuguaugccuuua

SEQ ID NO: 2191685 - RNA, 13 nt, Human
guuguauucuuug

SEQ ID NO: 2191686 - RNA, 14 nt, Human
guuguauucuuuga

SEQ ID NO: 2191687 - RNA, 20 nt, Human
guuguauucuuugauguuaa

SEQ ID NO: 2191688 - RNA, 13 nt, Human
guuguagaaugua

SEQ ID NO: 2191689 - RNA, 14 nt, Human
guuguaguaaagaa

SEQ ID NO: 2191690 - RNA, 16 nt, Human
guuguacauuuaugau

SEQ ID NO: 2191691 - RNA, 18 nt, Human
guuguacauuuaugauuu

SEQ ID NO: 2191692 - RNA, 20 nt, Human
guuguacauuuaugauuuaa

SEQ ID NO: 2191693 - RNA, 23 nt, Human
guuguacauuuaugauuuaauaa

SEQ ID NO: 2191694 - RNA, 15 nt, Human
guugguguugcagaa

SEQ ID NO: 2191695 - RNA, 18 nt, Human
guugguguuccacguguu

SEQ ID NO: 2191696 - RNA, 23 nt, Human
guuguacaaauaaagucccaggu

SEQ ID NO: 2191697 - RNA, 18 nt, Human
guuguaccgcaaugugac

SEQ ID NO: 2191698 - RNA, 19 nt, Human
guugcugucauaagaauga

SEQ ID NO: 2191699 - RNA, 14 nt, Human
guugcugugggaac

SEQ ID NO: 2191700 - RNA, 16 nt, Human
guugcugugugguuug

SEQ ID NO: 2191701 - RNA, 19 nt, Human
guugcuguuuuccucccuu

SEQ ID NO: 2191702 - RNA, 18 nt, Human
guugcuguuuuccucccu

SEQ ID NO: 2191703 - RNA, 17 nt, Human
guugcuguuuuccuccc

SEQ ID NO: 2191704 - RNA, 22 nt, Human
guugcugugggaacgagagggg

SEQ ID NO: 2191705 - RNA, 19 nt, Human
guugcugguugcugugugg

SEQ ID NO: 2191706 - RNA, 17 nt, Human
guugcugguugcugugu

SEQ ID NO: 2191707 - RNA, 18 nt, Human
guugcugguugcugugug

SEQ ID NO: 2191708 - RNA, 15 nt, Human
guugcugguugcugu

SEQ ID NO: 2191709 - RNA, 16 nt, Human
guugcugguugcugug

SEQ ID NO: 2191710 - RNA, 12 nt, Human
guugcugccuca

SEQ ID NO: 2191711 - RNA, 16 nt, Human
guugcugggagcugaa

SEQ ID NO: 2191712 - RNA, 22 nt, Human
guugcugggagcugaaaaauca

SEQ ID NO: 2191713 - RNA, 16 nt, Human
guuggucgguggguug

SEQ ID NO: 2191714 - RNA, 18 nt, Human
guuggucccccuuccaug

SEQ ID NO: 2191715 - RNA, 13 nt, Human
guugguaguuucu

SEQ ID NO: 2191716 - RNA, 15 nt, Human
guuggguucaucuga

SEQ ID NO: 2191717 - RNA, 23 nt, Human
guugcuguuuuccucccuucugc

SEQ ID NO: 2191718 - RNA, 21 nt, Human
guugcuguuuuccucccuucu

SEQ ID NO: 2191719 - RNA, 14 nt, Human
guugcuuacaauuu

SEQ ID NO: 2191720 - RNA, 15 nt, Human
guugcuuacaauuuu

SEQ ID NO: 2191721 - RNA, 13 nt, Human
guuggguggaugc

SEQ ID NO: 2191722 - RNA, 22 nt, Human
guuuacaagcccccccuuccac

SEQ ID NO: 2191723 - RNA, 16 nt, Human
guuuacaaguguauau

SEQ ID NO: 2191724 - RNA, 18 nt, Human
guuuacaaguguauauca

SEQ ID NO: 2191725 - RNA, 19 nt, Human
guuuacaaguguauaucag

SEQ ID NO: 2191726 - RNA, 23 nt, Human
guuuacaaguguauaucagaaaa

SEQ ID NO: 2191727 - RNA, 15 nt, Human
guuuacaauuuacaa

SEQ ID NO: 2191728 - RNA, 21 nt, Human
guuuacacacgugcaauuugu

SEQ ID NO: 2191729 - RNA, 19 nt, Human
guuuaugucccuucacaua

SEQ ID NO: 2191730 - RNA, 16 nt, Human
guuuacaauuuacaaa

SEQ ID NO: 2191731 - RNA, 18 nt, Human
guuuacaauuuacaaagu

SEQ ID NO: 2191732 - RNA, 19 nt, Human
guuuacaauuuacaaagug

SEQ ID NO: 2191733 - RNA, 23 nt, Human
guuuacaauuuacaaagugugua

SEQ ID NO: 2191734 - RNA, 18 nt, Human
guuuacaagcccccccuu

SEQ ID NO: 2191735 - RNA, 19 nt, Human
guuuacaagcccccccuuc

SEQ ID NO: 2191736 - RNA, 20 nt, Human
guuuacaaauggacauagga

SEQ ID NO: 2191737 - RNA, 14 nt, Human
guuuauuuuucaua

SEQ ID NO: 2191738 - RNA, 23 nt, Human
guuuauuaacaaauuauguuaca

SEQ ID NO: 2191739 - RNA, 18 nt, Human
guuuauuaacaaauuaug

SEQ ID NO: 2191740 - RNA, 13 nt, Human
guuuauuaacaaa

SEQ ID NO: 2191741 - RNA, 13 nt, Human
guuuaugucuaaa

SEQ ID NO: 2191742 - RNA, 15 nt, Human
guuuaugucuaaaga

SEQ ID NO: 2191743 - RNA, 16 nt, Human
guuuaugugugugugu

SEQ ID NO: 2191744 - RNA, 13 nt, Human
guuuaugugugug

SEQ ID NO: 2191745 - RNA, 21 nt, Human
guuuaaacugauucauaauaa

SEQ ID NO: 2191746 - RNA, 17 nt, Human
guuuaaacuucucugaa

SEQ ID NO: 2191747 - RNA, 16 nt, Human
guuuaaacugauucau

SEQ ID NO: 2191748 - RNA, 12 nt, Human
guuuaaacugau

SEQ ID NO: 2191749 - RNA, 18 nt, Human
guuuaaacuucucugaag

SEQ ID NO: 2191750 - RNA, 23 nt, Human
guuuaaacuucucugaagggagg

SEQ ID NO: 2191751 - RNA, 23 nt, Human
guuguauuuuaacucauaccuuu

SEQ ID NO: 2191752 - RNA, 16 nt, Human
guuuaaaaucauuucu

SEQ ID NO: 2191753 - RNA, 10 nt, Human
guuuaaaauc

SEQ ID NO: 2191754 - RNA, 12 nt, Human
guuuaacucaga

SEQ ID NO: 2191755 - RNA, 23 nt, Human
guuuaaccaaaaagaccagacua

SEQ ID NO: 2191756 - RNA, 14 nt, Human
guuuaacucagauc

SEQ ID NO: 2191757 - RNA, 15 nt, Human
guuuaacucagauca

SEQ ID NO: 2191758 - RNA, 22 nt, Human
guuuaaccaaaaagaccagacu

SEQ ID NO: 2191759 - RNA, 23 nt, Human
guuuaagaaaaaauaacacacau

SEQ ID NO: 2191760 - RNA, 16 nt, Human
guuuaacucagaucac

SEQ ID NO: 2191761 - RNA, 17 nt, Human
guuuaacucagaucacu

SEQ ID NO: 2191762 - RNA, 19 nt, Human
guuuaacucagaucacuac

SEQ ID NO: 2191763 - RNA, 22 nt, Human
guuuaacucagaucacuacugc

SEQ ID NO: 2191764 - RNA, 20 nt, Human
guuuaagacuguaaugaauc

SEQ ID NO: 2191765 - RNA, 23 nt, Human
guuuaacucagaucacuacugca

SEQ ID NO: 2191766 - RNA, 22 nt, Human
guuuaacuuaaucaauuaauuu

SEQ ID NO: 2191767 - RNA, 20 nt, Human
guuuaagacauuuuuggaag

SEQ ID NO: 2191768 - RNA, 23 nt, Human
guuuaaggaauaugggagaaaua

SEQ ID NO: 2191769 - RNA, 19 nt, Human
aaggccaagaggcuguucc

SEQ ID NO: 2191770 - RNA, 16 nt, Human
aaggaugugggggaag

SEQ ID NO: 2191771 - RNA, 21 nt, Human
aaggccaauuccuauacgcag

SEQ ID NO: 2191772 - RNA, 17 nt, Human
aaggaugucacagggcc

SEQ ID NO: 2191773 - RNA, 21 nt, Human
aaggccaauaaagaguuagaa

SEQ ID NO: 2191774 - RNA, 18 nt, Human
aaggccaaaggaagcaca

SEQ ID NO: 2191775 - RNA, 22 nt, Human
aaggaugugauuguggaaugga

SEQ ID NO: 2191776 - RNA, 17 nt, Human
aaggaugugauugugga

SEQ ID NO: 2191777 - RNA, 15 nt, Human
aaggaugugauugug

SEQ ID NO: 2191778 - RNA, 15 nt, Human
aaggaugucacaggg

SEQ ID NO: 2191779 - RNA, 16 nt, Human
aaggaugucacagggc

SEQ ID NO: 2191780 - RNA, 17 nt, Human
aaggcucagucucagga

SEQ ID NO: 2191781 - RNA, 16 nt, Human
aaggcucagucucagg

SEQ ID NO: 2191782 - RNA, 15 nt, Human
aaggcuauacuuguc

SEQ ID NO: 2191783 - RNA, 23 nt, Human
aaggccagaguggccuggccagg

SEQ ID NO: 2191784 - RNA, 22 nt, Human
aaggccagaguggccuggccag

SEQ ID NO: 2191785 - RNA, 23 nt, Human
aaggcuauggggauagaugugug

SEQ ID NO: 2191786 - RNA, 21 nt, Human
aaggccagaguggccuggcca

SEQ ID NO: 2191787 - RNA, 20 nt, Human
aaggccagaguggccuggcc

SEQ ID NO: 2191788 - RNA, 19 nt, Human
aaggccagaguggccuggc

SEQ ID NO: 2191789 - RNA, 17 nt, Human
aaggccagaguggccug

SEQ ID NO: 2191790 - RNA, 19 nt, Human
aaggcuaccuuuguauucu

SEQ ID NO: 2191791 - RNA, 17 nt, Human
guugcccaggcaggucu

SEQ ID NO: 2191792 - RNA, 14 nt, Human
aaggcuccaggagc

SEQ ID NO: 2191793 - RNA, 18 nt, Human
guugcccaggcaggucuu

SEQ ID NO: 2191794 - RNA, 19 nt, Human
guugcccaggcaggucuug

SEQ ID NO: 2191795 - RNA, 21 nt, Human
guugcccaggcuggcgugcag

SEQ ID NO: 2191796 - RNA, 15 nt, Human
guugcccaggcaggu

SEQ ID NO: 2191797 - RNA, 17 nt, Human
guugcccaggcuggcgu

SEQ ID NO: 2191798 - RNA, 23 nt, Human
aaggaugaaugaggucccaggca

SEQ ID NO: 2191799 - RNA, 18 nt, Human
aaggaugcacagaguugu

SEQ ID NO: 2191800 - RNA, 16 nt, Human
aaggaugcuuguacau

SEQ ID NO: 2191801 - RNA, 15 nt, Human
aaggaugcuuguaca

SEQ ID NO: 2191802 - RNA, 16 nt, Human
aaggauguacauuucc

SEQ ID NO: 2191803 - RNA, 14 nt, Human
aaggaugucacagg

SEQ ID NO: 2191804 - RNA, 15 nt, Human
aaggauguacauuuc

SEQ ID NO: 2191805 - RNA, 23 nt, Human
aaggauguaaacagugccugcug

SEQ ID NO: 2191806 - RNA, 20 nt, Human
aaggauguaaacagugccug

SEQ ID NO: 2191807 - RNA, 19 nt, Human
aaggauguaaacagugccu

SEQ ID NO: 2191808 - RNA, 17 nt, Human
aaggauguaaacagugc

SEQ ID NO: 2191809 - RNA, 19 nt, Human
aaggaugccccgucccccu

SEQ ID NO: 2191810 - RNA, 19 nt, Human
aaggaugcuuguacauaau

SEQ ID NO: 2191811 - RNA, 17 nt, Human
aaggaugcuuguacaua

SEQ ID NO: 2191812 - RNA, 23 nt, Human
guugaugaucuuugcagacaggc

SEQ ID NO: 2191813 - RNA, 21 nt, Human
guugaugccugugaacugaac

SEQ ID NO: 2191814 - RNA, 22 nt, Human
guugaucuggaacccagacuca

SEQ ID NO: 2191815 - RNA, 13 nt, Human
guugauaacuuug

SEQ ID NO: 2191816 - RNA, 15 nt, Human
guugaugaggccucu

SEQ ID NO: 2191817 - RNA, 16 nt, Human
guugaugaggccucuu

SEQ ID NO: 2191818 - RNA, 14 nt, Human
aaggauccugagcc

SEQ ID NO: 2191819 - RNA, 13 nt, Human
aaggauccugagc

SEQ ID NO: 2191820 - RNA, 15 nt, Human
aaggauccugagcca

SEQ ID NO: 2191821 - RNA, 17 nt, Human
aaggauccugagccaga

SEQ ID NO: 2191822 - RNA, 18 nt, Human
aaggaugaucuaggaaga

SEQ ID NO: 2191823 - RNA, 23 nt, Human
aaggaugaucuaggaagacuuug

SEQ ID NO: 2191824 - RNA, 21 nt, Human
guuaagcauuaccacucaggc

SEQ ID NO: 2191825 - RNA, 16 nt, Human
guuaagccuuuggaaa

SEQ ID NO: 2191826 - RNA, 13 nt, Human
guuaagccuuugg

SEQ ID NO: 2191827 - RNA, 12 nt, Human
guuaagccuuug

SEQ ID NO: 2191828 - RNA, 11 nt, Human
guguuuguguu

SEQ ID NO: 2191829 - RNA, 12 nt, Human
guguuuguguga

SEQ ID NO: 2191830 - RNA, 22 nt, Human
guguuuuaauuccaauaugaug

SEQ ID NO: 2191831 - RNA, 12 nt, Human
guguuuguuccu

SEQ ID NO: 2191832 - RNA, 15 nt, Human
guguuuuaauuccaa

SEQ ID NO: 2191833 - RNA, 13 nt, Human
guguuuuaauuua

SEQ ID NO: 2191834 - RNA, 20 nt, Human
guuaagcauuaccacucagg

SEQ ID NO: 2191835 - RNA, 15 nt, Human
guguuucuagggaaa

SEQ ID NO: 2191836 - RNA, 12 nt, Human
guguuugucauu

SEQ ID NO: 2191837 - RNA, 13 nt, Human
guguuugucauua

SEQ ID NO: 2191838 - RNA, 15 nt, Human
guguuugucauuagc

SEQ ID NO: 2191839 - RNA, 18 nt, Human
guguuuuaaaaugagaaa

SEQ ID NO: 2191840 - RNA, 11 nt, Human
guguuucuagg

SEQ ID NO: 2191841 - RNA, 19 nt, Human
guguuucuagcacuggccu

SEQ ID NO: 2191842 - RNA, 22 nt, Human
guguuucuagcacuggccugca

SEQ ID NO: 2191843 - RNA, 21 nt, Human
guguuugggucaccccuccag

SEQ ID NO: 2191844 - RNA, 12 nt, Human
guguuucccaua

SEQ ID NO: 2191845 - RNA, 18 nt, Human
guguuuccacagccugca

SEQ ID NO: 2191846 - RNA, 16 nt, Human
guguuucuagcacugg

SEQ ID NO: 2191847 - RNA, 15 nt, Human
guguuucccauaauu

SEQ ID NO: 2191848 - RNA, 12 nt, Human
guuaaggaaacu

SEQ ID NO: 2191849 - RNA, 14 nt, Human
guuaaggaaacucu

SEQ ID NO: 2191850 - RNA, 21 nt, Human
guuaaggaaacucuuaucuca

SEQ ID NO: 2191851 - RNA, 16 nt, Human
guuaaggaaacucuua

SEQ ID NO: 2191852 - RNA, 19 nt, Human
guuaaggaaacucuuaucu

SEQ ID NO: 2191853 - RNA, 16 nt, Human
guuaaggcugaggaaa

SEQ ID NO: 2191854 - RNA, 17 nt, Human
guuaaggcugaggaaag

SEQ ID NO: 2191855 - RNA, 22 nt, Human
guuaagggaaggaacucuggcu

SEQ ID NO: 2191856 - RNA, 13 nt, Human
guuaagggaagga

SEQ ID NO: 2191857 - RNA, 14 nt, Human
guuaagggaaggaa

SEQ ID NO: 2191858 - RNA, 22 nt, Human
guuaagucuaaauauuuccuua

SEQ ID NO: 2191859 - RNA, 13 nt, Human
guuaagucuguuu

SEQ ID NO: 2191860 - RNA, 14 nt, Human
guuaaguaugugua

SEQ ID NO: 2191861 - RNA, 22 nt, Human
guuaaguugauggugaugaaau

SEQ ID NO: 2191862 - RNA, 22 nt, Human
guuaagucuguuuuaugacuuc

SEQ ID NO: 2191863 - RNA, 15 nt, Human
guuaagucuguuuua

SEQ ID NO: 2191864 - RNA, 20 nt, Human
guuaauguaaucugauggcu

SEQ ID NO: 2191865 - RNA, 17 nt, Human
guuaaugaaaaugucag

SEQ ID NO: 2191866 - RNA, 22 nt, Human
guuaaugaugguugauggguuc

SEQ ID NO: 2191867 - RNA, 23 nt, Human
guuaaugaugguugauggguucu

SEQ ID NO: 2191868 - RNA, 18 nt, Human
guuaaugauagcuacugu

SEQ ID NO: 2191869 - RNA, 16 nt, Human
guuaaugaaaauguca

SEQ ID NO: 2191870 - RNA, 12 nt, Human
guuaaucuuagg

SEQ ID NO: 2191871 - RNA, 22 nt, Human
guuaaguuacuucacuuuaauu

SEQ ID NO: 2191872 - RNA, 21 nt, Human
guuacacacuuuuuaagaaau

SEQ ID NO: 2191873 - RNA, 21 nt, Human
guuacacaaaggaccucagcu

SEQ ID NO: 2191874 - RNA, 22 nt, Human
guuagaguccaacguggggcag

SEQ ID NO: 2191875 - RNA, 20 nt, Human
guuagcucaggaggcuugga

SEQ ID NO: 2191876 - RNA, 21 nt, Human
guuagauuuuguauucagggg

SEQ ID NO: 2191877 - RNA, 12 nt, Human
guuagcuccugu

SEQ ID NO: 2191878 - RNA, 13 nt, Human
guuagcagacagg

SEQ ID NO: 2191879 - RNA, 15 nt, Human
guuagcaaacuuugu

SEQ ID NO: 2191880 - RNA, 18 nt, Human
guuagcagacaggccccg

SEQ ID NO: 2191881 - RNA, 17 nt, Human
guuagccaauauuuuuc

SEQ ID NO: 2191882 - RNA, 18 nt, Human
guuaauucagcacugauu

SEQ ID NO: 2191883 - RNA, 13 nt, Human
guuacaacagauu

SEQ ID NO: 2191884 - RNA, 14 nt, Human
guuacaacagauuu

SEQ ID NO: 2191885 - RNA, 18 nt, Human
guuacaacagauuuguga

SEQ ID NO: 2191886 - RNA, 19 nt, Human
guuacaacagauuugugaa

SEQ ID NO: 2191887 - RNA, 20 nt, Human
guuacaacagauuugugaac

SEQ ID NO: 2191888 - RNA, 21 nt, Human
guuacaacagauuugugaacu

SEQ ID NO: 2191889 - RNA, 18 nt, Human
guuacaaucauugcugaa

SEQ ID NO: 2191890 - RNA, 22 nt, Human
guuacaacagauuugugaacuc

SEQ ID NO: 2191891 - RNA, 23 nt, Human
guuacaacagauuugugaacuca

SEQ ID NO: 2191892 - RNA, 17 nt, Human
guuacacaaaggaccuc

SEQ ID NO: 2191893 - RNA, 18 nt, Human
guuagguagagggaguug

SEQ ID NO: 2191894 - RNA, 23 nt, Human
guuagggugcucuggaagagagg

SEQ ID NO: 2191895 - RNA, 21 nt, Human
guuagguagagggaguuguca

SEQ ID NO: 2191896 - RNA, 13 nt, Human
guuagggaggggu

SEQ ID NO: 2191897 - RNA, 11 nt, Human
guuagggaggg

SEQ ID NO: 2191898 - RNA, 14 nt, Human
guuagcuccugugg

SEQ ID NO: 2191899 - RNA, 15 nt, Human
guuagcuccuguggc

SEQ ID NO: 2191900 - RNA, 16 nt, Human
guuaguagcauguuga

SEQ ID NO: 2191901 - RNA, 17 nt, Human
guuaguaucuaacaugu

SEQ ID NO: 2191902 - RNA, 16 nt, Human
guuaguaucuaacaug

SEQ ID NO: 2191903 - RNA, 21 nt, Human
guuaguagcauguugagccag

SEQ ID NO: 2191904 - RNA, 23 nt, Human
guuaguaacaugaggggacauuu

SEQ ID NO: 2191905 - RNA, 17 nt, Human
guuaguaugaggcauuu

SEQ ID NO: 2191906 - RNA, 20 nt, Human
guuaguaugaggcauuuguu

SEQ ID NO: 2191907 - RNA, 22 nt, Human
guuagucauuugcugagcaugu

SEQ ID NO: 2191908 - RNA, 18 nt, Human
guuagucgugagcucuug

SEQ ID NO: 2191909 - RNA, 12 nt, Human
guuagucauuug

SEQ ID NO: 2191910 - RNA, 22 nt, Human
guuagucucuuguauuaaacuc

SEQ ID NO: 2191911 - RNA, 20 nt, Human
guuagucgugagcucuugug

SEQ ID NO: 2191912 - RNA, 22 nt, Human
guuagucgugagcucuugugag

SEQ ID NO: 2191913 - RNA, 16 nt, Human
guuagucuacucuuaa

SEQ ID NO: 2191914 - RNA, 21 nt, Human
guuagucuacucuuaagccau

SEQ ID NO: 2191915 - RNA, 22 nt, Human
guuagucuacucuuaagccauc

SEQ ID NO: 2191916 - RNA, 13 nt, Human
guucauaaaugaa

SEQ ID NO: 2191917 - RNA, 12 nt, Human
guucaguuacag

SEQ ID NO: 2191918 - RNA, 13 nt, Human
guucaguuacaga

SEQ ID NO: 2191919 - RNA, 14 nt, Human
guucaguuacagaa

SEQ ID NO: 2191920 - RNA, 15 nt, Human
guucaguuacagaaa

SEQ ID NO: 2191921 - RNA, 16 nt, Human
guucaguuacagaaag

SEQ ID NO: 2191922 - RNA, 17 nt, Human
guucaguuacagaaagu

SEQ ID NO: 2191923 - RNA, 20 nt, Human
guucaguuccucuuugcaug

SEQ ID NO: 2191924 - RNA, 12 nt, Human
guucauaaauga

SEQ ID NO: 2191925 - RNA, 17 nt, Human
guucaggguuggccccu

SEQ ID NO: 2191926 - RNA, 18 nt, Human
guucaggguuggccccug

SEQ ID NO: 2191927 - RNA, 19 nt, Human
guucaggguuggccccugc

SEQ ID NO: 2191928 - RNA, 11 nt, Human
guucaguuaca

SEQ ID NO: 2191929 - RNA, 16 nt, Human
guucagugucccgggc

SEQ ID NO: 2191930 - RNA, 20 nt, Human
guuauuuguacaguucaguu

SEQ ID NO: 2191931 - RNA, 19 nt, Human
guucaguguaauuucuuug

SEQ ID NO: 2191932 - RNA, 13 nt, Human
guuauuuaaauga

SEQ ID NO: 2191933 - RNA, 23 nt, Human
guuagucuacucuuaagccaucu

SEQ ID NO: 2191934 - RNA, 17 nt, Human
guuaguuauagaugucu

SEQ ID NO: 2191935 - RNA, 11 nt, Human
guuauuuaaau

SEQ ID NO: 2191936 - RNA, 15 nt, Human
guuauuuaaaugagu

SEQ ID NO: 2191937 - RNA, 23 nt, Human
guuauuuaacagcugaauuaucu

SEQ ID NO: 2191938 - RNA, 19 nt, Human
guuaguuauagaugucuag

SEQ ID NO: 2191939 - RNA, 20 nt, Human
guuauuuauaaucacuuuuu

SEQ ID NO: 2191940 - RNA, 13 nt, Human
guuauuuguacag

SEQ ID NO: 2191941 - RNA, 14 nt, Human
guuauuucuuacag

SEQ ID NO: 2191942 - RNA, 19 nt, Human
guuauuucuuacaggcaca

SEQ ID NO: 2191943 - RNA, 17 nt, Human
guuauuuauuuaaaugu

SEQ ID NO: 2191944 - RNA, 14 nt, Human
guuauuuauaauca

SEQ ID NO: 2191945 - RNA, 12 nt, Human
guuauuuagacu

SEQ ID NO: 2191946 - RNA, 14 nt, Human
guuauuuauauauu

SEQ ID NO: 2191947 - RNA, 20 nt, Human
guucaggggacucagcccug

SEQ ID NO: 2191948 - RNA, 14 nt, Human
guuauuuguacagu

SEQ ID NO: 2191949 - RNA, 18 nt, Human
guuauuuguuauuuucag

SEQ ID NO: 2191950 - RNA, 15 nt, Human
guucagcuccagcuc

SEQ ID NO: 2191951 - RNA, 18 nt, Human
guucagcuccagcucacc

SEQ ID NO: 2191952 - RNA, 16 nt, Human
guucagcuccagcuca

SEQ ID NO: 2191953 - RNA, 17 nt, Human
guucagcuccagcucac

SEQ ID NO: 2191954 - RNA, 17 nt, Human
aagcuaggccuggccag

SEQ ID NO: 2191955 - RNA, 18 nt, Human
aagcuaggccuggccaga

SEQ ID NO: 2191956 - RNA, 20 nt, Human
aagcuauagacccgaggaaa

SEQ ID NO: 2191957 - RNA, 21 nt, Human
aagcuauaaauuccucuuugc

SEQ ID NO: 2191958 - RNA, 17 nt, Human
aagccuggucagcccaa

SEQ ID NO: 2191959 - RNA, 16 nt, Human
aagcuaggccuggcca

SEQ ID NO: 2191960 - RNA, 22 nt, Human
aagcuaggccuggccagaugca

SEQ ID NO: 2191961 - RNA, 23 nt, Human
aagccugccuaggaauucccagc

SEQ ID NO: 2191962 - RNA, 21 nt, Human
aagccugccuaggaauuccca

SEQ ID NO: 2191963 - RNA, 20 nt, Human
aagccugcccuugucugaga

SEQ ID NO: 2191964 - RNA, 11 nt, Human
aagccugcccu

SEQ ID NO: 2191965 - RNA, 15 nt, Human
aagccugcccuuguc

SEQ ID NO: 2191966 - RNA, 17 nt, Human
aagccugcccuugucug

SEQ ID NO: 2191967 - RNA, 18 nt, Human
aagccugcccuugucuga

SEQ ID NO: 2191968 - RNA, 19 nt, Human
aagccugcuuuuuaagugu

SEQ ID NO: 2191969 - RNA, 21 nt, Human
aagccuggccuacaugguuga

SEQ ID NO: 2191970 - RNA, 17 nt, Human
aagccugggauugacag

SEQ ID NO: 2191971 - RNA, 15 nt, Human
aagccuggucagccc

SEQ ID NO: 2191972 - RNA, 18 nt, Human
guucauagggucucuuca

SEQ ID NO: 2191973 - RNA, 17 nt, Human
guucauagggucucuuc

SEQ ID NO: 2191974 - RNA, 14 nt, Human
guucauagcccagu

SEQ ID NO: 2191975 - RNA, 22 nt, Human
guucauagggucucuucagguu

SEQ ID NO: 2191976 - RNA, 20 nt, Human
guucauagggucucuucagg

SEQ ID NO: 2191977 - RNA, 19 nt, Human
guucauauguaccauguac

SEQ ID NO: 2191978 - RNA, 19 nt, Human
aagccuccuccagccgcca

SEQ ID NO: 2191979 - RNA, 13 nt, Human
guucauagcccag

SEQ ID NO: 2191980 - RNA, 14 nt, Human
guucauacauuuga

SEQ ID NO: 2191981 - RNA, 17 nt, Human
guucauagacccucuca

SEQ ID NO: 2191982 - RNA, 16 nt, Human
guucauacauuugagg

SEQ ID NO: 2191983 - RNA, 23 nt, Human
aagccucuggcuagaggccagcc

SEQ ID NO: 2191984 - RNA, 20 nt, Human
guucauaggucacuggcucu

SEQ ID NO: 2191985 - RNA, 12 nt, Human
aagccucuggga

SEQ ID NO: 2191986 - RNA, 13 nt, Human
aagccucuguguc

SEQ ID NO: 2191987 - RNA, 17 nt, Human
aagccucugugucacug

SEQ ID NO: 2191988 - RNA, 18 nt, Human
aagccucugugucacugg

SEQ ID NO: 2191989 - RNA, 20 nt, Human
aagccucugugucacuggcu

SEQ ID NO: 2191990 - RNA, 14 nt, Human
aagccugcaggagu

SEQ ID NO: 2191991 - RNA, 10 nt, Human
aagccugccc

SEQ ID NO: 2191992 - RNA, 21 nt, Human
aagccugaaggggcgucuguu

SEQ ID NO: 2191993 - RNA, 22 nt, Human
aagccugcacaauaaaaauguu

SEQ ID NO: 2191994 - RNA, 21 nt, Human
aagccucugugucacuggcug

SEQ ID NO: 2191995 - RNA, 22 nt, Human
aagccucugugucacuggcugc

SEQ ID NO: 2191996 - RNA, 23 nt, Human
aagccucugugucacuggcugcc

SEQ ID NO: 2191997 - RNA, 24 nt, Human
aagccucugugucacuggcugccu

SEQ ID NO: 2191998 - RNA, 14 nt, Human
aagccucuggcuag

SEQ ID NO: 2191999 - RNA, 12 nt, Human
aagccucuggcu

SEQ ID NO: 2192000 - RNA, 14 nt, Human
aagccucugcugcc

SEQ ID NO: 2192001 - RNA, 11 nt, Human
aagccucugcu

SEQ ID NO: 2192002 - RNA, 15 nt, Human
aagccucgacacaga

SEQ ID NO: 2192003 - RNA, 22 nt, Human
guucauauguaccauguacaug

SEQ ID NO: 2192004 - RNA, 19 nt, Human
aagcuuuauacguguagcu

SEQ ID NO: 2192005 - RNA, 16 nt, Human
aagcuuccaugauucu

SEQ ID NO: 2192006 - RNA, 12 nt, Human
aagcuuguguau

SEQ ID NO: 2192007 - RNA, 13 nt, Human
aagcuuguguauc

SEQ ID NO: 2192008 - RNA, 16 nt, Human
aagcuuguguauccau

SEQ ID NO: 2192009 - RNA, 21 nt, Human
aagcuuguguauccauuauca

SEQ ID NO: 2192010 - RNA, 22 nt, Human
aagcuuguguauccauuaucau

SEQ ID NO: 2192011 - RNA, 23 nt, Human
aagcuuguguauccauuaucaug

SEQ ID NO: 2192012 - RNA, 23 nt, Human
aagcuuucauguaaacugugcac

SEQ ID NO: 2192013 - RNA, 22 nt, Human
aagcuuucauguaaacugugca

SEQ ID NO: 2192014 - RNA, 21 nt, Human
aagcuuucaguauuagugaug

SEQ ID NO: 2192015 - RNA, 20 nt, Human
aagcuuuauacguguagcua

SEQ ID NO: 2192016 - RNA, 22 nt, Human
aagcuuuauacguguagcuaua

SEQ ID NO: 2192017 - RNA, 12 nt, Human
aagcuuuccugc

SEQ ID NO: 2192018 - RNA, 23 nt, Human
guuccaugaagaccacauccaca

SEQ ID NO: 2192019 - RNA, 16 nt, Human
guuccaugaugcuggg

SEQ ID NO: 2192020 - RNA, 14 nt, Human
guuccaugccugag

SEQ ID NO: 2192021 - RNA, 15 nt, Human
guuccaugccugagg

SEQ ID NO: 2192022 - RNA, 17 nt, Human
guucccauguagccccc

SEQ ID NO: 2192023 - RNA, 22 nt, Human
guucccagugacacuucagaga

SEQ ID NO: 2192024 - RNA, 21 nt, Human
guucccagugacacuucagag

SEQ ID NO: 2192025 - RNA, 15 nt, Human
guucccagaaucaaa

SEQ ID NO: 2192026 - RNA, 14 nt, Human
guucccacuuggag

SEQ ID NO: 2192027 - RNA, 19 nt, Human
guucccaccaggcugcuca

SEQ ID NO: 2192028 - RNA, 19 nt, Human
guucccaagcucagaggcg

SEQ ID NO: 2192029 - RNA, 20 nt, Human
guuccauggccucuucagau

SEQ ID NO: 2192030 - RNA, 17 nt, Human
guuccaugccugagggu

SEQ ID NO: 2192031 - RNA, 20 nt, Human
guuccaugccugagggugga

SEQ ID NO: 2192032 - RNA, 21 nt, Human
guuccauuguuuggagacauu

SEQ ID NO: 2192033 - RNA, 19 nt, Human
guuccauuguuuggagaca

SEQ ID NO: 2192034 - RNA, 14 nt, Human
guucccauguuaaa

SEQ ID NO: 2192035 - RNA, 16 nt, Human
guucccauuucagcug

SEQ ID NO: 2192036 - RNA, 19 nt, Human
guucccauguagcccccug

SEQ ID NO: 2192037 - RNA, 18 nt, Human
guucccauguagcccccu

SEQ ID NO: 2192038 - RNA, 16 nt, Human
guucccauuugcuccu

SEQ ID NO: 2192039 - RNA, 22 nt, Human
guuccccuuccacugagggcag

SEQ ID NO: 2192040 - RNA, 15 nt, Human
guuccccuuccacug

SEQ ID NO: 2192041 - RNA, 20 nt, Human
guucccauuugcuccuuucu

SEQ ID NO: 2192042 - RNA, 19 nt, Human
guucccuuuccuuccaucc

SEQ ID NO: 2192043 - RNA, 19 nt, Human
guucccuuggccucagaau

SEQ ID NO: 2192044 - RNA, 18 nt, Human
guucccuuggccucagaa

SEQ ID NO: 2192045 - RNA, 22 nt, Human
guucccucugagaauuccaagg

SEQ ID NO: 2192046 - RNA, 17 nt, Human
guucccucucccuguug

SEQ ID NO: 2192047 - RNA, 12 nt, Human
guucccucugag

SEQ ID NO: 2192048 - RNA, 14 nt, Human
guucccucugagaa

SEQ ID NO: 2192049 - RNA, 15 nt, Human
guucccucucccugu

SEQ ID NO: 2192050 - RNA, 20 nt, Human
guucccuacuuccugugacu

SEQ ID NO: 2192051 - RNA, 21 nt, Human
guucccuaggggacacuuccc

SEQ ID NO: 2192052 - RNA, 19 nt, Human
guucccguuucuccaccua

SEQ ID NO: 2192053 - RNA, 14 nt, Human
guucccguuucucc

SEQ ID NO: 2192054 - RNA, 16 nt, Human
guucccguuucuccac

SEQ ID NO: 2192055 - RNA, 18 nt, Human
guucccguuucuccaccu

SEQ ID NO: 2192056 - RNA, 19 nt, Human
aagcuccuggucuugagau

SEQ ID NO: 2192057 - RNA, 23 nt, Human
aagcuccucuccccagcccagag

SEQ ID NO: 2192058 - RNA, 16 nt, Human
aagcuccucuccccag

SEQ ID NO: 2192059 - RNA, 13 nt, Human
aagcuccuguccu

SEQ ID NO: 2192060 - RNA, 14 nt, Human
aagcuccuguccuc

SEQ ID NO: 2192061 - RNA, 15 nt, Human
aagcuccuguccucc

SEQ ID NO: 2192062 - RNA, 22 nt, Human
aagcuccucuccccagcccaga

SEQ ID NO: 2192063 - RNA, 21 nt, Human
aagcuccucuccccagcccag

SEQ ID NO: 2192064 - RNA, 20 nt, Human
aagcuccucuccccagccca

SEQ ID NO: 2192065 - RNA, 19 nt, Human
aagcuccucuccccagccc

SEQ ID NO: 2192066 - RNA, 21 nt, Human
aagcucuacugaggugcuaug

SEQ ID NO: 2192067 - RNA, 17 nt, Human
aagcuccuguccuccca

SEQ ID NO: 2192068 - RNA, 20 nt, Human
aagcuccuguccucccaucc

SEQ ID NO: 2192069 - RNA, 22 nt, Human
aagcuccuguccucccaucccc

SEQ ID NO: 2192070 - RNA, 18 nt, Human
aagcucgaaaacaauugu

SEQ ID NO: 2192071 - RNA, 22 nt, Human
aagcuauucaguaauaacucua

SEQ ID NO: 2192072 - RNA, 18 nt, Human
aagcuccucuccccagcc

SEQ ID NO: 2192073 - RNA, 21 nt, Human
aagcuauuagccaggaucaug

SEQ ID NO: 2192074 - RNA, 22 nt, Human
aagcuauggugagaugcagcug

SEQ ID NO: 2192075 - RNA, 23 nt, Human
aagcuauggugagaugcagcugg

SEQ ID NO: 2192076 - RNA, 16 nt, Human
aagcuauuagccagga

SEQ ID NO: 2192077 - RNA, 19 nt, Human
aagcuauuagccaggauca

SEQ ID NO: 2192078 - RNA, 17 nt, Human
aagcuaucguaaaauua

SEQ ID NO: 2192079 - RNA, 22 nt, Human
aagcuauaucaaucucucuuag

SEQ ID NO: 2192080 - RNA, 17 nt, Human
aagcuauccaaauaacu

SEQ ID NO: 2192081 - RNA, 17 nt, Human
aagcuauccuggcucuu

SEQ ID NO: 2192082 - RNA, 12 nt, Human
aagcuaugguga

SEQ ID NO: 2192083 - RNA, 15 nt, Human
aagcuauggugagau

SEQ ID NO: 2192084 - RNA, 18 nt, Human
aagcuauggugagaugca

SEQ ID NO: 2192085 - RNA, 21 nt, Human
aagcuauggugagaugcagcu

SEQ ID NO: 2192086 - RNA, 23 nt, Human
aagcugaauacauucugcuuuca

SEQ ID NO: 2192087 - RNA, 13 nt, Human
aagcugaauacau

SEQ ID NO: 2192088 - RNA, 14 nt, Human
aagcugaagugcau

SEQ ID NO: 2192089 - RNA, 17 nt, Human
aagcugaagugcaucca

SEQ ID NO: 2192090 - RNA, 19 nt, Human
aagcugaagugcauccaaa

SEQ ID NO: 2192091 - RNA, 21 nt, Human
aagcugaagugcauccaaagg

SEQ ID NO: 2192092 - RNA, 17 nt, Human
aagcugacgaacuucca

SEQ ID NO: 2192093 - RNA, 17 nt, Human
aagcugaccacaggcag

SEQ ID NO: 2192094 - RNA, 22 nt, Human
aagcugaaguuucacuccggag

SEQ ID NO: 2192095 - RNA, 20 nt, Human
aagcugacgaacuuccaugg

SEQ ID NO: 2192096 - RNA, 19 nt, Human
aagcugacgaacuuccaug

SEQ ID NO: 2192097 - RNA, 22 nt, Human
aagcugacgaacuuccauggcc

SEQ ID NO: 2192098 - RNA, 14 nt, Human
aagcugaggcggga

SEQ ID NO: 2192099 - RNA, 17 nt, Human
aagcugaggcgggagaa

SEQ ID NO: 2192100 - RNA, 19 nt, Human
aagcuuccaguccaaucuc

SEQ ID NO: 2192101 - RNA, 15 nt, Human
aagcuucaguuuccu

SEQ ID NO: 2192102 - RNA, 15 nt, Human
aagcuuccaugauuc

SEQ ID NO: 2192103 - RNA, 21 nt, Human
aagcuuccaguccaaucucau

SEQ ID NO: 2192104 - RNA, 20 nt, Human
aagcuuccaugauucuauuu

SEQ ID NO: 2192105 - RNA, 14 nt, Human
aagcuuauuuaauu

SEQ ID NO: 2192106 - RNA, 18 nt, Human
aagcuucaaacugcauga

SEQ ID NO: 2192107 - RNA, 22 nt, Human
guucucuaaguuccacugagcu

SEQ ID NO: 2192108 - RNA, 18 nt, Human
guucuccuuuuccucucu

SEQ ID NO: 2192109 - RNA, 22 nt, Human
guucuccuuuuccucucucccg

SEQ ID NO: 2192110 - RNA, 18 nt, Human
guucuccucuccccucua

SEQ ID NO: 2192111 - RNA, 17 nt, Human
guucuccucuccccucu

SEQ ID NO: 2192112 - RNA, 13 nt, Human
guucuccuuuucc

SEQ ID NO: 2192113 - RNA, 17 nt, Human
guucucuaucauuuaau

SEQ ID NO: 2192114 - RNA, 18 nt, Human
guucucuaucauuuaaua

SEQ ID NO: 2192115 - RNA, 22 nt, Human
guucucuaucauuuaauaauau

SEQ ID NO: 2192116 - RNA, 21 nt, Human
guucucucccaggggcuggcu

SEQ ID NO: 2192117 - RNA, 16 nt, Human
guucucuccuccccaa

SEQ ID NO: 2192118 - RNA, 15 nt, Human
guucuggggccccuu

SEQ ID NO: 2192119 - RNA, 14 nt, Human
guucuggggccccu

SEQ ID NO: 2192120 - RNA, 15 nt, Human
guucuggugaggccu

SEQ ID NO: 2192121 - RNA, 14 nt, Human
guucuggugaggcc

SEQ ID NO: 2192122 - RNA, 15 nt, Human
guucuggugugaacu

SEQ ID NO: 2192123 - RNA, 16 nt, Human
guucuggugaggccuu

SEQ ID NO: 2192124 - RNA, 19 nt, Human
guucuggugaggccuugcu

SEQ ID NO: 2192125 - RNA, 22 nt, Human
guucugguuuuuaaccauuguc

SEQ ID NO: 2192126 - RNA, 14 nt, Human
guucuguagaaaug

SEQ ID NO: 2192127 - RNA, 20 nt, Human
guucuggugaggccuugcuc

SEQ ID NO: 2192128 - RNA, 18 nt, Human
guucuggugugaacuaaa

SEQ ID NO: 2192129 - RNA, 22 nt, Human
guucuguagaaaugguuguauu

SEQ ID NO: 2192130 - RNA, 22 nt, Human
guucuuaccuguaugucuccag

SEQ ID NO: 2192131 - RNA, 19 nt, Human
guucuuaauugcacucuaa

SEQ ID NO: 2192132 - RNA, 16 nt, Human
guucuacacucaucuu

SEQ ID NO: 2192133 - RNA, 22 nt, Human
guucccuuuccuuccaucccua

SEQ ID NO: 2192134 - RNA, 20 nt, Human
guucuaccucaggcagcuca

SEQ ID NO: 2192135 - RNA, 21 nt, Human
guucuaccucaggcagcucaa

SEQ ID NO: 2192136 - RNA, 21 nt, Human
guucuccguuagcuccugugg

SEQ ID NO: 2192137 - RNA, 15 nt, Human
guucuagagaagagg

SEQ ID NO: 2192138 - RNA, 23 nt, Human
guucuagagaagaggcuggugcu

SEQ ID NO: 2192139 - RNA, 22 nt, Human
guucuccguuagcuccuguggc

SEQ ID NO: 2192140 - RNA, 23 nt, Human
guucuccguuagcuccuguggcc

SEQ ID NO: 2192141 - RNA, 20 nt, Human
guucccuuugacgccauccc

SEQ ID NO: 2192142 - RNA, 21 nt, Human
guucccuuugacgccauccca

SEQ ID NO: 2192143 - RNA, 22 nt, Human
guucccuuugacgccaucccag

SEQ ID NO: 2192144 - RNA, 16 nt, Human
guucuacccaggugcu

SEQ ID NO: 2192145 - RNA, 19 nt, Human
guucuuaguugcuguaugu

SEQ ID NO: 2192146 - RNA, 17 nt, Human
guucuuaguucucacug

SEQ ID NO: 2192147 - RNA, 21 nt, Human
guucuugguuuguaaauuaac

SEQ ID NO: 2192148 - RNA, 17 nt, Human
guucuuaguuugcaguu

SEQ ID NO: 2192149 - RNA, 17 nt, Human
guucuuguauuaagaau

SEQ ID NO: 2192150 - RNA, 12 nt, Human
guucuugucuga

SEQ ID NO: 2192151 - RNA, 21 nt, Human
guucuuguauuaagaaugaaa

SEQ ID NO: 2192152 - RNA, 18 nt, Human
guucuuguauuaagaaug

SEQ ID NO: 2192153 - RNA, 13 nt, Human
guugacaugggac

SEQ ID NO: 2192154 - RNA, 23 nt, Human
guugagguggucugaauguucug

SEQ ID NO: 2192155 - RNA, 23 nt, Human
guugagguggaagcccuccuucc

SEQ ID NO: 2192156 - RNA, 20 nt, Human
guugagguggaagcccuccu

SEQ ID NO: 2192157 - RNA, 18 nt, Human
guugaggggcuccuggaa

SEQ ID NO: 2192158 - RNA, 21 nt, Human
guugagguccagcccuggcug

SEQ ID NO: 2192159 - RNA, 22 nt, Human
guugagguccagcccuggcuga

SEQ ID NO: 2192160 - RNA, 17 nt, Human
guugaggggcuccugga

SEQ ID NO: 2192161 - RNA, 16 nt, Human
guugaggggcuccugg

SEQ ID NO: 2192162 - RNA, 23 nt, Human
guugagggaacagacaggagaaa

SEQ ID NO: 2192163 - RNA, 22 nt, Human
guugagggaacagacaggagaa

SEQ ID NO: 2192164 - RNA, 19 nt, Human
guugagggaacagacagga

SEQ ID NO: 2192165 - RNA, 21 nt, Human
guugauaaauuccacuggacu

SEQ ID NO: 2192166 - RNA, 18 nt, Human
guugauaaauuccacugg

SEQ ID NO: 2192167 - RNA, 22 nt, Human
guugaguucagguagcugcccc

SEQ ID NO: 2192168 - RNA, 21 nt, Human
guugaguucagguagcugccc

SEQ ID NO: 2192169 - RNA, 16 nt, Human
guugagguggucugaa

SEQ ID NO: 2192170 - RNA, 22 nt, Human
guugaugaucuuugcagacagg

SEQ ID NO: 2192171 - RNA, 17 nt, Human
guugagggaacagacag

SEQ ID NO: 2192172 - RNA, 21 nt, Human
guugagcuucauauaccagca

SEQ ID NO: 2192173 - RNA, 16 nt, Human
guucuuuaggagauuu

SEQ ID NO: 2192174 - RNA, 14 nt, Human
guucuuuaauuuau

SEQ ID NO: 2192175 - RNA, 15 nt, Human
guucuuuaggagauu

SEQ ID NO: 2192176 - RNA, 14 nt, Human
guugacaugggaca

SEQ ID NO: 2192177 - RNA, 18 nt, Human
guugacaugggacauuug

SEQ ID NO: 2192178 - RNA, 21 nt, Human
aaccucuccucauguucugcu

SEQ ID NO: 2192179 - RNA, 18 nt, Human
aaccucucacuucacccu

SEQ ID NO: 2192180 - RNA, 23 nt, Human
aaccucuacuaaaaagaaggaaa

SEQ ID NO: 2192181 - RNA, 20 nt, Human
aaccucuaauuuauuuuguc

SEQ ID NO: 2192182 - RNA, 21 nt, Human
aaccucuaauuuauuuugucg

SEQ ID NO: 2192183 - RNA, 13 nt, Human
aaccucuguucag

SEQ ID NO: 2192184 - RNA, 12 nt, Human
aaccucuguuca

SEQ ID NO: 2192185 - RNA, 16 nt, Human
aaccucuguucagugu

SEQ ID NO: 2192186 - RNA, 15 nt, Human
aaccucuguucagug

SEQ ID NO: 2192187 - RNA, 18 nt, Human
aaccucuucagaggcccu

SEQ ID NO: 2192188 - RNA, 12 nt, Human
aaccucuucccc

SEQ ID NO: 2192189 - RNA, 11 nt, Human
aaccucuuccc

SEQ ID NO: 2192190 - RNA, 14 nt, Human
aaccucuuccccag

SEQ ID NO: 2192191 - RNA, 18 nt, Human
aaccucuguucaguguaa

SEQ ID NO: 2192192 - RNA, 17 nt, Human
aaccucuucuggcucaa

SEQ ID NO: 2192193 - RNA, 23 nt, Human
gucugcucagacagaaccccuac

SEQ ID NO: 2192194 - RNA, 19 nt, Human
gucugcugcccuccauccc

SEQ ID NO: 2192195 - RNA, 18 nt, Human
gucugcugcccuccaucc

SEQ ID NO: 2192196 - RNA, 16 nt, Human
gucugcugcccuccau

SEQ ID NO: 2192197 - RNA, 15 nt, Human
gucugcugcccucca

SEQ ID NO: 2192198 - RNA, 13 nt, Human
gucugcugcccuc

SEQ ID NO: 2192199 - RNA, 17 nt, Human
gucugcugaauaauaaa

SEQ ID NO: 2192200 - RNA, 19 nt, Human
gucugcugaauaauaaacu

SEQ ID NO: 2192201 - RNA, 16 nt, Human
gucuggcugagcccug

SEQ ID NO: 2192202 - RNA, 15 nt, Human
gucuggcugagcuga

SEQ ID NO: 2192203 - RNA, 17 nt, Human
gucugcucgggcccagg

SEQ ID NO: 2192204 - RNA, 19 nt, Human
gucugcucgggcccaggcc

SEQ ID NO: 2192205 - RNA, 15 nt, Human
gucugcucuuucucu

SEQ ID NO: 2192206 - RNA, 21 nt, Human
gucugcucgggcccaggccau

SEQ ID NO: 2192207 - RNA, 22 nt, Human
gucugcucgggcccaggccauc

SEQ ID NO: 2192208 - RNA, 17 nt, Human
gucugcucuuucucugc

SEQ ID NO: 2192209 - RNA, 19 nt, Human
gucugcucuuucucugcca

SEQ ID NO: 2192210 - RNA, 20 nt, Human
gucugcucuuucucugccag

SEQ ID NO: 2192211 - RNA, 22 nt, Human
gucugcucuuucucugccagug

SEQ ID NO: 2192212 - RNA, 20 nt, Human
gucugggaggaauggacaga

SEQ ID NO: 2192213 - RNA, 21 nt, Human
gucugggacuuccuugcucuc

SEQ ID NO: 2192214 - RNA, 24 nt, Human
gucugggacuuccuugcucucccu

SEQ ID NO: 2192215 - RNA, 16 nt, Human
gucugggagaaauuga

SEQ ID NO: 2192216 - RNA, 21 nt, Human
gucugggagaaauugacagau

SEQ ID NO: 2192217 - RNA, 15 nt, Human
gucuggcuucacaga

SEQ ID NO: 2192218 - RNA, 18 nt, Human
gucugggacuuccuugcu

SEQ ID NO: 2192219 - RNA, 20 nt, Human
gucugggacuuccuugcucu

SEQ ID NO: 2192220 - RNA, 14 nt, Human
gucuggcugcagag

SEQ ID NO: 2192221 - RNA, 13 nt, Human
gucuggcugcaga

SEQ ID NO: 2192222 - RNA, 12 nt, Human
gucuggcugcag

SEQ ID NO: 2192223 - RNA, 21 nt, Human
gucuuaauuaaaagaauauuu

SEQ ID NO: 2192224 - RNA, 19 nt, Human
gucuuaauuaaaagaauau

SEQ ID NO: 2192225 - RNA, 22 nt, Human
gucuuaauuaaaagaauauuuu

SEQ ID NO: 2192226 - RNA, 13 nt, Human
gucuuaauuauua

SEQ ID NO: 2192227 - RNA, 18 nt, Human
gucuuaauuauuauuugu

SEQ ID NO: 2192228 - RNA, 21 nt, Human
gucuuaauuauuauuuguguu

SEQ ID NO: 2192229 - RNA, 17 nt, Human
gucuuuggacccugagg

SEQ ID NO: 2192230 - RNA, 14 nt, Human
gucuuuggacccug

SEQ ID NO: 2192231 - RNA, 15 nt, Human
gucuuuggacccuga

SEQ ID NO: 2192232 - RNA, 14 nt, Human
gucuuuugaauauu

SEQ ID NO: 2192233 - RNA, 19 nt, Human
gucuuuugaauauucccaa

SEQ ID NO: 2192234 - RNA, 24 nt, Human
gucuuuucuugcaugaggcuagug

SEQ ID NO: 2192235 - RNA, 14 nt, Human
gucuuuucuugcau

SEQ ID NO: 2192236 - RNA, 19 nt, Human
gucuuuucuugcaugaggc

SEQ ID NO: 2192237 - RNA, 23 nt, Human
gucuuagaaguggaccaggacag

SEQ ID NO: 2192238 - RNA, 22 nt, Human
gucuuagaaguggaccaggaca

SEQ ID NO: 2192239 - RNA, 20 nt, Human
gucuuagaaguggaccagga

SEQ ID NO: 2192240 - RNA, 19 nt, Human
gucuuagaaguggaccagg

SEQ ID NO: 2192241 - RNA, 11 nt, Human
gucugggcuga

SEQ ID NO: 2192242 - RNA, 19 nt, Human
gucuuaauuauuauuugug

SEQ ID NO: 2192243 - RNA, 15 nt, Human
gucuuagauguauau

SEQ ID NO: 2192244 - RNA, 16 nt, Human
gucuucccuaccucag

SEQ ID NO: 2192245 - RNA, 15 nt, Human
gucuuaguuguacaa

SEQ ID NO: 2192246 - RNA, 23 nt, Human
gucuuagacuugaaauacuacuu

SEQ ID NO: 2192247 - RNA, 18 nt, Human
gucuuagacuugaaauac

SEQ ID NO: 2192248 - RNA, 24 nt, Human
gucuuagacuugaaauacuacuua

SEQ ID NO: 2192249 - RNA, 18 nt, Human
gucuuccugaaaugcagu

SEQ ID NO: 2192250 - RNA, 13 nt, Human
gucuuccucccaa

SEQ ID NO: 2192251 - RNA, 14 nt, Human
gucuuccucccaag

SEQ ID NO: 2192252 - RNA, 23 nt, Human
gucuuccucccaaguggugccua

SEQ ID NO: 2192253 - RNA, 19 nt, Human
gucuuccugacacuuuaau

SEQ ID NO: 2192254 - RNA, 12 nt, Human
gucuuccugagu

SEQ ID NO: 2192255 - RNA, 18 nt, Human
gucuuccugacacuuuaa

SEQ ID NO: 2192256 - RNA, 14 nt, Human
gucuuccugacacu

SEQ ID NO: 2192257 - RNA, 21 nt, Human
gucuucccuaccucaggcagg

SEQ ID NO: 2192258 - RNA, 18 nt, Human
gucuucccuaccucaggc

SEQ ID NO: 2192259 - RNA, 22 nt, Human
aacuacaaccaagcucucugca

SEQ ID NO: 2192260 - RNA, 13 nt, Human
aacuacaaaucaa

SEQ ID NO: 2192261 - RNA, 20 nt, Human
aacuagauggugcugagaag

SEQ ID NO: 2192262 - RNA, 17 nt, Human
aacuagauggugcugag

SEQ ID NO: 2192263 - RNA, 14 nt, Human
aacuagauggugcu

SEQ ID NO: 2192264 - RNA, 13 nt, Human
aacuacaugagaa

SEQ ID NO: 2192265 - RNA, 22 nt, Human
aacuaaucuauuggguucauua

SEQ ID NO: 2192266 - RNA, 20 nt, Human
aacuaaucuauuggguucau

SEQ ID NO: 2192267 - RNA, 19 nt, Human
aacuaaucuauuggguuca

SEQ ID NO: 2192268 - RNA, 15 nt, Human
aacuaaugccuuacu

SEQ ID NO: 2192269 - RNA, 12 nt, Human
aacuaaugccuu

SEQ ID NO: 2192270 - RNA, 15 nt, Human
aacuacaaacaaaau

SEQ ID NO: 2192271 - RNA, 19 nt, Human
aacuacaaacaaaauuucu

SEQ ID NO: 2192272 - RNA, 15 nt, Human
aacuaaauagcaugu

SEQ ID NO: 2192273 - RNA, 17 nt, Human
aacuaaauagcauguau

SEQ ID NO: 2192274 - RNA, 22 nt, Human
aacuaauaugggcauuguaguu

SEQ ID NO: 2192275 - RNA, 20 nt, Human
aacuaaauagcauguauugu

SEQ ID NO: 2192276 - RNA, 16 nt, Human
aacuaaauuguaaacu

SEQ ID NO: 2192277 - RNA, 15 nt, Human
aacuaaacuuucaca

SEQ ID NO: 2192278 - RNA, 17 nt, Human
aacuaaacuuucacacc

SEQ ID NO: 2192279 - RNA, 18 nt, Human
aacuaaacucauuuauaa

SEQ ID NO: 2192280 - RNA, 17 nt, Human
aacuaaacucauuuaua

SEQ ID NO: 2192281 - RNA, 16 nt, Human
aacuaaacucucuuug

SEQ ID NO: 2192282 - RNA, 13 nt, Human
aacuaaacuuuca

SEQ ID NO: 2192283 - RNA, 19 nt, Human
aaccuggagagcuagaacc

SEQ ID NO: 2192284 - RNA, 10 nt, Human
aaccuggaga

SEQ ID NO: 2192285 - RNA, 16 nt, Human
aacuaaacucauuuau

SEQ ID NO: 2192286 - RNA, 15 nt, Human
aacuaaacucauuua

SEQ ID NO: 2192287 - RNA, 10 nt, Human
aaccuggagg

SEQ ID NO: 2192288 - RNA, 22 nt, Human
aacguggcugcuucaaggaucc

SEQ ID NO: 2192289 - RNA, 16 nt, Human
aacguggcugcuucaa

SEQ ID NO: 2192290 - RNA, 19 nt, Human
aacguggcugcuucaagga

SEQ ID NO: 2192291 - RNA, 22 nt, Human
aaccugcuuggguggagaagcc

SEQ ID NO: 2192292 - RNA, 23 nt, Human
aaccugcuuggguggagaagcca

SEQ ID NO: 2192293 - RNA, 20 nt, Human
aaccugcucuccucuugcca

SEQ ID NO: 2192294 - RNA, 15 nt, Human
aacguggcugcuuca

SEQ ID NO: 2192295 - RNA, 11 nt, Human
aaccugcucuc

SEQ ID NO: 2192296 - RNA, 19 nt, Human
aaccugccugacauuugga

SEQ ID NO: 2192297 - RNA, 17 nt, Human
aaccugcccugccugag

SEQ ID NO: 2192298 - RNA, 19 nt, Human
aaccugcccugccugaggg

SEQ ID NO: 2192299 - RNA, 15 nt, Human
aaccugcucuccucu

SEQ ID NO: 2192300 - RNA, 18 nt, Human
aacuagcuuggaaacugg

SEQ ID NO: 2192301 - RNA, 20 nt, Human
aacuagcucuauguuuacaa

SEQ ID NO: 2192302 - RNA, 14 nt, Human
aacuccagaaagug

SEQ ID NO: 2192303 - RNA, 20 nt, Human
aacuagauuacauucaguug

SEQ ID NO: 2192304 - RNA, 14 nt, Human
aacuagcauaucug

SEQ ID NO: 2192305 - RNA, 17 nt, Human
aacuagcauaucugccu

SEQ ID NO: 2192306 - RNA, 18 nt, Human
aacuagcauaucugccuu

SEQ ID NO: 2192307 - RNA, 19 nt, Human
aacuagcauaucugccuuu

SEQ ID NO: 2192308 - RNA, 14 nt, Human
aacuagcaccaggg

SEQ ID NO: 2192309 - RNA, 15 nt, Human
aacuagccaccaacu

SEQ ID NO: 2192310 - RNA, 18 nt, Human
aacuagccaccaacucuu

SEQ ID NO: 2192311 - RNA, 22 nt, Human
aacucccagcaacacaagcugg

SEQ ID NO: 2192312 - RNA, 19 nt, Human
aacuccccuuccucacugc

SEQ ID NO: 2192313 - RNA, 19 nt, Human
aacucccugccccccagcc

SEQ ID NO: 2192314 - RNA, 13 nt, Human
aacucccugcccc

SEQ ID NO: 2192315 - RNA, 13 nt, Human
aacuccaguagcu

SEQ ID NO: 2192316 - RNA, 21 nt, Human
aacuccagaaagugacaagcu

SEQ ID NO: 2192317 - RNA, 22 nt, Human
aacucuaauucccauuuugcaa

SEQ ID NO: 2192318 - RNA, 13 nt, Human
aacucuaauucua

SEQ ID NO: 2192319 - RNA, 19 nt, Human
aacucuagcuggggguggg

SEQ ID NO: 2192320 - RNA, 12 nt, Human
aacucuagcugg

SEQ ID NO: 2192321 - RNA, 21 nt, Human
aacucuaauucccauuuugca

SEQ ID NO: 2192322 - RNA, 15 nt, Human
aacucuaauagugcu

SEQ ID NO: 2192323 - RNA, 15 nt, Human
gugaacacaucagcu

SEQ ID NO: 2192324 - RNA, 19 nt, Human
gugaaccaccacacccagc

SEQ ID NO: 2192325 - RNA, 23 nt, Human
aacucuagcugggggugggccag

SEQ ID NO: 2192326 - RNA, 21 nt, Human
gugaacacuagccagacacuc

SEQ ID NO: 2192327 - RNA, 24 nt, Human
gugaacauuuaucaaucaguauaa

SEQ ID NO: 2192328 - RNA, 12 nt, Human
gugaaccaaaga

SEQ ID NO: 2192329 - RNA, 14 nt, Human
aacucccuuucaac

SEQ ID NO: 2192330 - RNA, 13 nt, Human
aacucccuuucaa

SEQ ID NO: 2192331 - RNA, 18 nt, Human
aacucguuaauuuguagu

SEQ ID NO: 2192332 - RNA, 14 nt, Human
aacucuaaaagauc

SEQ ID NO: 2192333 - RNA, 23 nt, Human
aacuccccuuccucacugcccaa

SEQ ID NO: 2192334 - RNA, 19 nt, Human
aacucuaaaagauccuuuu

SEQ ID NO: 2192335 - RNA, 15 nt, Human
aacccaguugccauc

SEQ ID NO: 2192336 - RNA, 12 nt, Human
aacccaggaggu

SEQ ID NO: 2192337 - RNA, 17 nt, Human
aacccaggacgcuucug

SEQ ID NO: 2192338 - RNA, 18 nt, Human
aacccaggacgcuucuga

SEQ ID NO: 2192339 - RNA, 19 nt, Human
aacccaggacgcuucugaa

SEQ ID NO: 2192340 - RNA, 13 nt, Human
aacccaggagcau

SEQ ID NO: 2192341 - RNA, 16 nt, Human
aacccaggacgcuucu

SEQ ID NO: 2192342 - RNA, 17 nt, Human
aacccagcucuggucca

SEQ ID NO: 2192343 - RNA, 20 nt, Human
aacccaucaacaaaaauugu

SEQ ID NO: 2192344 - RNA, 20 nt, Human
aacccaggagcauccaccuc

SEQ ID NO: 2192345 - RNA, 22 nt, Human
aacccaggagcauccaccuccu

SEQ ID NO: 2192346 - RNA, 20 nt, Human
aacccauauuuguacaccaa

SEQ ID NO: 2192347 - RNA, 19 nt, Human
aacccaucagaaggagaag

SEQ ID NO: 2192348 - RNA, 17 nt, Human
aacccaucagaaggaga

SEQ ID NO: 2192349 - RNA, 15 nt, Human
aacccaucagaagga

SEQ ID NO: 2192350 - RNA, 11 nt, Human
aacccaggagg

SEQ ID NO: 2192351 - RNA, 15 nt, Human
aacccaugagauuca

SEQ ID NO: 2192352 - RNA, 16 nt, Human
aaccccaacuccagua

SEQ ID NO: 2192353 - RNA, 13 nt, Human
aacccauuuuagu

SEQ ID NO: 2192354 - RNA, 20 nt, Human
aaccccacccuugcccaccc

SEQ ID NO: 2192355 - RNA, 22 nt, Human
aaccauggcugaaggaaaccag

SEQ ID NO: 2192356 - RNA, 16 nt, Human
aaccauggcugaagga

SEQ ID NO: 2192357 - RNA, 17 nt, Human
aaccauguagaaaauuu

SEQ ID NO: 2192358 - RNA, 20 nt, Human
aaccauguaaagaacauaaa

SEQ ID NO: 2192359 - RNA, 23 nt, Human
aaccaugucagcaaaaagcaaaa

SEQ ID NO: 2192360 - RNA, 17 nt, Human
aaccaugucagcaaaaa

SEQ ID NO: 2192361 - RNA, 21 nt, Human
aaccaugucagcaaaaagcaa

SEQ ID NO: 2192362 - RNA, 20 nt, Human
aaccauuuuuuuucagcaga

SEQ ID NO: 2192363 - RNA, 23 nt, Human
aaccauuuugcugucccuuuucc

SEQ ID NO: 2192364 - RNA, 13 nt, Human
aacccaaauguuc

SEQ ID NO: 2192365 - RNA, 13 nt, Human
aacccagcucugg

SEQ ID NO: 2192366 - RNA, 14 nt, Human
aacccagcucuggu

SEQ ID NO: 2192367 - RNA, 11 nt, Human
aacccagcucu

SEQ ID NO: 2192368 - RNA, 18 nt, Human
aacccaaauguucaucaa

SEQ ID NO: 2192369 - RNA, 23 nt, Human
aaccuauuuugaaaaauuccuau

SEQ ID NO: 2192370 - RNA, 21 nt, Human
aaccuauuuugaaaaauuccu

SEQ ID NO: 2192371 - RNA, 22 nt, Human
aaccuauuuugaaaaauuccua

SEQ ID NO: 2192372 - RNA, 17 nt, Human
aaccucaaaaugucuaa

SEQ ID NO: 2192373 - RNA, 16 nt, Human
aaccuauuuugaaaaa

SEQ ID NO: 2192374 - RNA, 22 nt, Human
aaccuaugauauuuucugugcc

SEQ ID NO: 2192375 - RNA, 16 nt, Human
aaccuauaugauuuau

SEQ ID NO: 2192376 - RNA, 20 nt, Human
aaccuagggugauauuaacc

SEQ ID NO: 2192377 - RNA, 19 nt, Human
aacccccagcacccgggcu

SEQ ID NO: 2192378 - RNA, 11 nt, Human
aaccccagccg

SEQ ID NO: 2192379 - RNA, 13 nt, Human
aaccccaggcccc

SEQ ID NO: 2192380 - RNA, 12 nt, Human
aaccccagcucc

SEQ ID NO: 2192381 - RNA, 14 nt, Human
aaccccagcauccu

SEQ ID NO: 2192382 - RNA, 13 nt, Human
aacccccagccug

SEQ ID NO: 2192383 - RNA, 14 nt, Human
aacccccagccugc

SEQ ID NO: 2192384 - RNA, 15 nt, Human
aacccccagccugcu

SEQ ID NO: 2192385 - RNA, 22 nt, Human
aaccucacgcaccucccauccu

SEQ ID NO: 2192386 - RNA, 19 nt, Human
aaccucacgcaccucccau

SEQ ID NO: 2192387 - RNA, 12 nt, Human
aaccucacucuu

SEQ ID NO: 2192388 - RNA, 13 nt, Human
aaccucacucuug

SEQ ID NO: 2192389 - RNA, 21 nt, Human
aaccucacccgaggcugccca

SEQ ID NO: 2192390 - RNA, 15 nt, Human
aaccucaaagugacu

SEQ ID NO: 2192391 - RNA, 16 nt, Human
aaccucaacugccuac

SEQ ID NO: 2192392 - RNA, 18 nt, Human
aaccucaacugccuacuc

SEQ ID NO: 2192393 - RNA, 17 nt, Human
aaccucaacugccuacu

SEQ ID NO: 2192394 - RNA, 12 nt, Human
aaccucagccug

SEQ ID NO: 2192395 - RNA, 11 nt, Human
aaccucagccu

SEQ ID NO: 2192396 - RNA, 15 nt, Human
aaccucacucuugcc

SEQ ID NO: 2192397 - RNA, 16 nt, Human
aaccucacucuugcca

SEQ ID NO: 2192398 - RNA, 17 nt, Human
aaccucacucuugccaa

SEQ ID NO: 2192399 - RNA, 19 nt, Human
aaccucagacuuaccagga

SEQ ID NO: 2192400 - RNA, 14 nt, Human
aaccucagccuggc

SEQ ID NO: 2192401 - RNA, 13 nt, Human
aaccucagccugg

SEQ ID NO: 2192402 - RNA, 16 nt, Human
aaccucagccuggcca

SEQ ID NO: 2192403 - RNA, 22 nt, Human
aaccucagacuuaccaggaagc

SEQ ID NO: 2192404 - RNA, 17 nt, Human
aaccuccgccucuuggg

SEQ ID NO: 2192405 - RNA, 13 nt, Human
aaccuccucugug

SEQ ID NO: 2192406 - RNA, 12 nt, Human
aaccuccucugu

SEQ ID NO: 2192407 - RNA, 19 nt, Human
aaccuccgccucccggguu

SEQ ID NO: 2192408 - RNA, 14 nt, Human
aaccuccugggcua

SEQ ID NO: 2192409 - RNA, 19 nt, Human
aaccucuaauuuauuuugu

SEQ ID NO: 2192410 - RNA, 15 nt, Human
aaccuccucugugaa

SEQ ID NO: 2192411 - RNA, 14 nt, Human
aaccuccucuguga

SEQ ID NO: 2192412 - RNA, 13 nt, Human
aaccuccuggaca

SEQ ID NO: 2192413 - RNA, 13 nt, Human
aaccaauccugga

SEQ ID NO: 2192414 - RNA, 15 nt, Human
aaccaauauuuguag

SEQ ID NO: 2192415 - RNA, 19 nt, Human
aaccaaagcgaauuuuaaa

SEQ ID NO: 2192416 - RNA, 21 nt, Human
aaccaaaagaacaagaauuuc

SEQ ID NO: 2192417 - RNA, 19 nt, Human
aaccaaaaagaccagacua

SEQ ID NO: 2192418 - RNA, 20 nt, Human
aaccaaaaagaccagacuaa

SEQ ID NO: 2192419 - RNA, 13 nt, Human
aaccaaagaagaa

SEQ ID NO: 2192420 - RNA, 19 nt, Human
aaccaaagagacuggagca

SEQ ID NO: 2192421 - RNA, 23 nt, Human
aaccaaagagacuggagcaucug

SEQ ID NO: 2192422 - RNA, 19 nt, Human
aaccaaagagggcuuccuc

SEQ ID NO: 2192423 - RNA, 16 nt, Human
aaccaaagagacugga

SEQ ID NO: 2192424 - RNA, 13 nt, Human
aaccacaccacau

SEQ ID NO: 2192425 - RNA, 23 nt, Human
aaccacaccacaucuaagccuga

SEQ ID NO: 2192426 - RNA, 21 nt, Human
aaccacaccacaucuaagccu

SEQ ID NO: 2192427 - RNA, 18 nt, Human
aaccacaucuugcucugc

SEQ ID NO: 2192428 - RNA, 12 nt, Human
aaccacagcagu

SEQ ID NO: 2192429 - RNA, 20 nt, Human
aaccacaucuugcucugcug

SEQ ID NO: 2192430 - RNA, 22 nt, Human
aaccacaucuugcucugcugac

SEQ ID NO: 2192431 - RNA, 19 nt, Human
aaccaucauugaaaucuuu

SEQ ID NO: 2192432 - RNA, 20 nt, Human
aaccaucauugaaaucuuuu

SEQ ID NO: 2192433 - RNA, 23 nt, Human
aaccaucauugaaaucuuuuugc

SEQ ID NO: 2192434 - RNA, 21 nt, Human
aaccaucauugaaaucuuuuu

SEQ ID NO: 2192435 - RNA, 18 nt, Human
aaccaaaaagaccagacu

SEQ ID NO: 2192436 - RNA, 22 nt, Human
aacauuuuguggucauuaagca

SEQ ID NO: 2192437 - RNA, 23 nt, Human
gucuccucuuaaaaaauaaaaac

SEQ ID NO: 2192438 - RNA, 22 nt, Human
gucuccucuuaaaaaauaaaaa

SEQ ID NO: 2192439 - RNA, 14 nt, Human
gucuccucuuaaaa

SEQ ID NO: 2192440 - RNA, 15 nt, Human
gucuccucucagccc

SEQ ID NO: 2192441 - RNA, 14 nt, Human
gucuccuccaccgc

SEQ ID NO: 2192442 - RNA, 12 nt, Human
gucuccuccacc

SEQ ID NO: 2192443 - RNA, 21 nt, Human
gucuccuccaccgccauggcu

SEQ ID NO: 2192444 - RNA, 23 nt, Human
gucuccucagccuccucaucugg

SEQ ID NO: 2192445 - RNA, 14 nt, Human
gucuccucagccuc

SEQ ID NO: 2192446 - RNA, 17 nt, Human
gucuccucagccuccuc

SEQ ID NO: 2192447 - RNA, 16 nt, Human
gucucccucccuuggg

SEQ ID NO: 2192448 - RNA, 14 nt, Human
gucuccuauccugg

SEQ ID NO: 2192449 - RNA, 18 nt, Human
gucuccuauccugguuuu

SEQ ID NO: 2192450 - RNA, 14 nt, Human
gucuccucacuccc

SEQ ID NO: 2192451 - RNA, 15 nt, Human
gucuccucacucccu

SEQ ID NO: 2192452 - RNA, 21 nt, Human
gucuccucacucccuucuacc

SEQ ID NO: 2192453 - RNA, 13 nt, Human
gucuccucagccu

SEQ ID NO: 2192454 - RNA, 21 nt, Human
guccuucccucuccccaagac

SEQ ID NO: 2192455 - RNA, 12 nt, Human
guccuucccucu

SEQ ID NO: 2192456 - RNA, 22 nt, Human
guccuuccaggcccccaccacu

SEQ ID NO: 2192457 - RNA, 14 nt, Human
guccuuccaggccc

SEQ ID NO: 2192458 - RNA, 17 nt, Human
guccuucucucaccucc

SEQ ID NO: 2192459 - RNA, 18 nt, Human
guccuucucucaccuccu

SEQ ID NO: 2192460 - RNA, 19 nt, Human
guccuucucucaccuccua

SEQ ID NO: 2192461 - RNA, 14 nt, Human
guccuugaaaauau

SEQ ID NO: 2192462 - RNA, 15 nt, Human
gucucaguuucacuu

SEQ ID NO: 2192463 - RNA, 22 nt, Human
gucucaguggcuucaucuguca

SEQ ID NO: 2192464 - RNA, 18 nt, Human
gucucaguggcuucaucu

SEQ ID NO: 2192465 - RNA, 11 nt, Human
guccuugaaaa

SEQ ID NO: 2192466 - RNA, 21 nt, Human
gucucaguuugugugucuuaa

SEQ ID NO: 2192467 - RNA, 18 nt, Human
gucucaguuugugugucu

SEQ ID NO: 2192468 - RNA, 19 nt, Human
gucucaguuugugugucuu

SEQ ID NO: 2192469 - RNA, 15 nt, Human
gucucauccccaggg

SEQ ID NO: 2192470 - RNA, 14 nt, Human
gucucauccccagg

SEQ ID NO: 2192471 - RNA, 16 nt, Human
gucucauccccagggg

SEQ ID NO: 2192472 - RNA, 13 nt, Human
gucucauccccag

SEQ ID NO: 2192473 - RNA, 11 nt, Human
gucucauccca

SEQ ID NO: 2192474 - RNA, 12 nt, Human
gucucaucccau

SEQ ID NO: 2192475 - RNA, 16 nt, Human
gucucauccaucauca

SEQ ID NO: 2192476 - RNA, 15 nt, Human
gucucauccaucauc

SEQ ID NO: 2192477 - RNA, 17 nt, Human
gucucccacgugggaga

SEQ ID NO: 2192478 - RNA, 12 nt, Human
gucucccaaggc

SEQ ID NO: 2192479 - RNA, 11 nt, Human
gucucaugugu

SEQ ID NO: 2192480 - RNA, 16 nt, Human
aacacugucuugaaga

SEQ ID NO: 2192481 - RNA, 22 nt, Human
aacacugugcacaucugugucu

SEQ ID NO: 2192482 - RNA, 20 nt, Human
aacacugugcacaucugugu

SEQ ID NO: 2192483 - RNA, 18 nt, Human
aacacugugcccuggugg

SEQ ID NO: 2192484 - RNA, 21 nt, Human
aacacugugcccugguggaga

SEQ ID NO: 2192485 - RNA, 12 nt, Human
aacacugugaaa

SEQ ID NO: 2192486 - RNA, 13 nt, Human
aacacugugcccu

SEQ ID NO: 2192487 - RNA, 15 nt, Human
aacacugugcccugg

SEQ ID NO: 2192488 - RNA, 16 nt, Human
aacacugugcccuggu

SEQ ID NO: 2192489 - RNA, 15 nt, Human
aacacuguucucugc

SEQ ID NO: 2192490 - RNA, 20 nt, Human
aacacuguucucugcccucc

SEQ ID NO: 2192491 - RNA, 15 nt, Human
aacacugagcuguca

SEQ ID NO: 2192492 - RNA, 19 nt, Human
aacacucuuuugcuuuauu

SEQ ID NO: 2192493 - RNA, 16 nt, Human
aacacucuuuugcuuu

SEQ ID NO: 2192494 - RNA, 17 nt, Human
aacacugcuuguguuuu

SEQ ID NO: 2192495 - RNA, 14 nt, Human
aacacugcaggcau

SEQ ID NO: 2192496 - RNA, 22 nt, Human
aacacugccaucuuaguuugga

SEQ ID NO: 2192497 - RNA, 14 nt, Human
aacacugcuugugu

SEQ ID NO: 2192498 - RNA, 13 nt, Human
aacacucuauauu

SEQ ID NO: 2192499 - RNA, 12 nt, Human
aacacucuuuug

SEQ ID NO: 2192500 - RNA, 14 nt, Human
aacacucugagacu

SEQ ID NO: 2192501 - RNA, 12 nt, Human
aacacucugaga

SEQ ID NO: 2192502 - RNA, 13 nt, Human
aacacucugagac

SEQ ID NO: 2192503 - RNA, 12 nt, Human
aacacuccuuca

SEQ ID NO: 2192504 - RNA, 11 nt, Human
aacacucugag

SEQ ID NO: 2192505 - RNA, 21 nt, Human
aacacucauugaccugaggcc

SEQ ID NO: 2192506 - RNA, 17 nt, Human
aacacuccaauuaagga

SEQ ID NO: 2192507 - RNA, 17 nt, Human
aacacucauugaccuga

SEQ ID NO: 2192508 - RNA, 17 nt, Human
guccaagugugugugcg

SEQ ID NO: 2192509 - RNA, 16 nt, Human
guccaagugugugugc

SEQ ID NO: 2192510 - RNA, 15 nt, Human
guccaagugugugug

SEQ ID NO: 2192511 - RNA, 19 nt, Human
guccaagugugugugcgug

SEQ ID NO: 2192512 - RNA, 12 nt, Human
guccaauccuau

SEQ ID NO: 2192513 - RNA, 17 nt, Human
guccaauccuauguuuu

SEQ ID NO: 2192514 - RNA, 22 nt, Human
guccaaggaaacuugaaucaaa

SEQ ID NO: 2192515 - RNA, 15 nt, Human
guccaagcugggaga

SEQ ID NO: 2192516 - RNA, 17 nt, Human
guccaaggaaaccacag

SEQ ID NO: 2192517 - RNA, 22 nt, Human
guccaaggaaaccacagcugcu

SEQ ID NO: 2192518 - RNA, 21 nt, Human
guccaagcauuuagauguaua

SEQ ID NO: 2192519 - RNA, 16 nt, Human
guccacagaugccucc

SEQ ID NO: 2192520 - RNA, 22 nt, Human
guccauugacauguacagagaa

SEQ ID NO: 2192521 - RNA, 16 nt, Human
guccauuguccaaucc

SEQ ID NO: 2192522 - RNA, 21 nt, Human
guccauuguccaauccuaugu

SEQ ID NO: 2192523 - RNA, 22 nt, Human
guccauuuggcagggguggcug

SEQ ID NO: 2192524 - RNA, 19 nt, Human
guccaauuuguaaaaacag

SEQ ID NO: 2192525 - RNA, 20 nt, Human
guccacaaaauaaccaaucc

SEQ ID NO: 2192526 - RNA, 12 nt, Human
guccaauguggc

SEQ ID NO: 2192527 - RNA, 17 nt, Human
guccacagaugccucca

SEQ ID NO: 2192528 - RNA, 15 nt, Human
guccacagaugccuc

SEQ ID NO: 2192529 - RNA, 15 nt, Human
guccacaacacacag

SEQ ID NO: 2192530 - RNA, 22 nt, Human
aacacuuaaggguuuuagaaaa

SEQ ID NO: 2192531 - RNA, 21 nt, Human
aacacuguucucugcccucca

SEQ ID NO: 2192532 - RNA, 21 nt, Human
gucauuugagcagggcucagc

SEQ ID NO: 2192533 - RNA, 11 nt, Human
aacacuuccau

SEQ ID NO: 2192534 - RNA, 22 nt, Human
gucauuugagcagggcucagcg

SEQ ID NO: 2192535 - RNA, 21 nt, Human
gucauuugcugagcauguacu

SEQ ID NO: 2192536 - RNA, 21 nt, Human
gucauuuuaacuuuaucacau

SEQ ID NO: 2192537 - RNA, 22 nt, Human
gucauuugcugagcauguacug

SEQ ID NO: 2192538 - RNA, 24 nt, Human
guccaagcauaccaacacgagcag

SEQ ID NO: 2192539 - RNA, 14 nt, Human
aacaaugauauaug

SEQ ID NO: 2192540 - RNA, 15 nt, Human
aacaaugauauaugg

SEQ ID NO: 2192541 - RNA, 15 nt, Human
aacaaugacauuuau

SEQ ID NO: 2192542 - RNA, 17 nt, Human
aacaauccuagugcuuu

SEQ ID NO: 2192543 - RNA, 18 nt, Human
aacaaugaagauaaaaag

SEQ ID NO: 2192544 - RNA, 14 nt, Human
aacaaugaagauaa

SEQ ID NO: 2192545 - RNA, 14 nt, Human
aacaauugugaagu

SEQ ID NO: 2192546 - RNA, 13 nt, Human
aacaauuuaugaa

SEQ ID NO: 2192547 - RNA, 20 nt, Human
aacaauuuccuuuauauuua

SEQ ID NO: 2192548 - RNA, 16 nt, Human
aacaauuuaugaauug

SEQ ID NO: 2192549 - RNA, 21 nt, Human
aacaauuuccuuuauauuuag

SEQ ID NO: 2192550 - RNA, 22 nt, Human
aacaauuuccuuuauauuuagu

SEQ ID NO: 2192551 - RNA, 13 nt, Human
aacaauuucuguc

SEQ ID NO: 2192552 - RNA, 13 nt, Human
aacaauuuuaaug

SEQ ID NO: 2192553 - RNA, 23 nt, Human
aacaauuuuaggaggaccagagc

SEQ ID NO: 2192554 - RNA, 20 nt, Human
aacaauuugagauguauuuc

SEQ ID NO: 2192555 - RNA, 23 nt, Human
aacaaucaaagcacuuggacucu

SEQ ID NO: 2192556 - RNA, 22 nt, Human
aacaauccuagugcuuuccuuu

SEQ ID NO: 2192557 - RNA, 16 nt, Human
aacaauauuguuucua

SEQ ID NO: 2192558 - RNA, 21 nt, Human
aacaauacucauaaugugaag

SEQ ID NO: 2192559 - RNA, 20 nt, Human
aacaauacucauaaugugaa

SEQ ID NO: 2192560 - RNA, 18 nt, Human
aacaauaggcuguuccca

SEQ ID NO: 2192561 - RNA, 18 nt, Human
aacaauaguaauucucag

SEQ ID NO: 2192562 - RNA, 21 nt, Human
aacaauaacuacuguguuccu

SEQ ID NO: 2192563 - RNA, 20 nt, Human
aacaauaacuacuguguucc

SEQ ID NO: 2192564 - RNA, 19 nt, Human
aacaauaacuacuguguuc

SEQ ID NO: 2192565 - RNA, 18 nt, Human
aacaauaacuacuguguu

SEQ ID NO: 2192566 - RNA, 17 nt, Human
aacaauaacuacugugu

SEQ ID NO: 2192567 - RNA, 15 nt, Human
aacaauaacuacugu

SEQ ID NO: 2192568 - RNA, 19 nt, Human
aacaauaaauguuggcuug

SEQ ID NO: 2192569 - RNA, 19 nt, Human
aacaauacucauaauguga

SEQ ID NO: 2192570 - RNA, 15 nt, Human
aacaauaaaugugca

SEQ ID NO: 2192571 - RNA, 16 nt, Human
aacaagucccuguaau

SEQ ID NO: 2192572 - RNA, 16 nt, Human
aacaagguaguuuuua

SEQ ID NO: 2192573 - RNA, 19 nt, Human
aacaaggguggcaucccag

SEQ ID NO: 2192574 - RNA, 21 nt, Human
aacaagggagagaccucauca

SEQ ID NO: 2192575 - RNA, 20 nt, Human
aacaagggagagaccucauc

SEQ ID NO: 2192576 - RNA, 23 nt, Human
aacaaggcaaggcugucaauuac

SEQ ID NO: 2192577 - RNA, 21 nt, Human
aaauuuugugauauggagccc

SEQ ID NO: 2192578 - RNA, 15 nt, Human
aaauuuuuauuuuuc

SEQ ID NO: 2192579 - RNA, 23 nt, Human
aaauuuuuaaucuuuaauuuuac

SEQ ID NO: 2192580 - RNA, 20 nt, Human
aaauuuuucagaugcuucug

SEQ ID NO: 2192581 - RNA, 18 nt, Human
aaauuuuucagaugcuuc

SEQ ID NO: 2192582 - RNA, 17 nt, Human
aaauuuuucagaugcuu

SEQ ID NO: 2192583 - RNA, 21 nt, Human
aaauuuuucagaugcuucugg

SEQ ID NO: 2192584 - RNA, 16 nt, Human
gucacaggcaggucca

SEQ ID NO: 2192585 - RNA, 14 nt, Human
gucacacagggcag

SEQ ID NO: 2192586 - RNA, 13 nt, Human
gucacaggcaggu

SEQ ID NO: 2192587 - RNA, 15 nt, Human
gucacaggcaggucc

SEQ ID NO: 2192588 - RNA, 14 nt, Human
aacaaggaagucaa

SEQ ID NO: 2192589 - RNA, 15 nt, Human
aacaaggaugaauua

SEQ ID NO: 2192590 - RNA, 21 nt, Human
aacaagccuccuuuuaaagua

SEQ ID NO: 2192591 - RNA, 20 nt, Human
aacaagaccacguuucuaaa

SEQ ID NO: 2192592 - RNA, 19 nt, Human
aacaagaccacguuucuaa

SEQ ID NO: 2192593 - RNA, 17 nt, Human
aacaagaccacguuucu

SEQ ID NO: 2192594 - RNA, 16 nt, Human
aacaagaccacguuuc

SEQ ID NO: 2192595 - RNA, 19 nt, Human
aacagacucgauucauauu

SEQ ID NO: 2192596 - RNA, 13 nt, Human
aacagacucaggu

SEQ ID NO: 2192597 - RNA, 20 nt, Human
aacagacuauuuaacuugag

SEQ ID NO: 2192598 - RNA, 13 nt, Human
aacagacuauuua

SEQ ID NO: 2192599 - RNA, 17 nt, Human
aacagacuauuuaacuu

SEQ ID NO: 2192600 - RNA, 19 nt, Human
aacagacuggaagcacagc

SEQ ID NO: 2192601 - RNA, 22 nt, Human
aacaggcugggcuucaguggca

SEQ ID NO: 2192602 - RNA, 13 nt, Human
aacaggcugggcu

SEQ ID NO: 2192603 - RNA, 23 nt, Human
aacaggcugggcuucaguggcag

SEQ ID NO: 2192604 - RNA, 14 nt, Human
aacaguaaaugugc

SEQ ID NO: 2192605 - RNA, 22 nt, Human
aacaguagugauaguuguaccg

SEQ ID NO: 2192606 - RNA, 18 nt, Human
aacaguguuucccauaau

SEQ ID NO: 2192607 - RNA, 13 nt, Human
aacaguguuuccc

SEQ ID NO: 2192608 - RNA, 22 nt, Human
aacaguguuaggccuggcacag

SEQ ID NO: 2192609 - RNA, 23 nt, Human
aacaguguuaggccuggcacagu

SEQ ID NO: 2192610 - RNA, 15 nt, Human
aacaguguuucccau

SEQ ID NO: 2192611 - RNA, 14 nt, Human
aacaguuuuccaug

SEQ ID NO: 2192612 - RNA, 13 nt, Human
aacaguuuuccau

SEQ ID NO: 2192613 - RNA, 11 nt, Human
aacaguuuucc

SEQ ID NO: 2192614 - RNA, 14 nt, Human
aacaguuuguacag

SEQ ID NO: 2192615 - RNA, 13 nt, Human
aacaguuuguaca

SEQ ID NO: 2192616 - RNA, 20 nt, Human
aacaguguuaggccuggcac

SEQ ID NO: 2192617 - RNA, 22 nt, Human
aacagugugaaguuagaauucc

SEQ ID NO: 2192618 - RNA, 13 nt, Human
aacagugugaagu

SEQ ID NO: 2192619 - RNA, 14 nt, Human
aacagugugaaguu

SEQ ID NO: 2192620 - RNA, 15 nt, Human
aacagugugaaguua

SEQ ID NO: 2192621 - RNA, 16 nt, Human
aacagugugaaguuag

SEQ ID NO: 2192622 - RNA, 17 nt, Human
aacagugugaaguuaga

SEQ ID NO: 2192623 - RNA, 18 nt, Human
aacagugugaaguuagaa

SEQ ID NO: 2192624 - RNA, 20 nt, Human
aacagugugaaguuagaauu

SEQ ID NO: 2192625 - RNA, 12 nt, Human
aacaguagcaua

SEQ ID NO: 2192626 - RNA, 15 nt, Human
aacaguggaauauaa

SEQ ID NO: 2192627 - RNA, 20 nt, Human
aacagugcuugccacagagc

SEQ ID NO: 2192628 - RNA, 23 nt, Human
aacagugcuaaaaaugggacuuc

SEQ ID NO: 2192629 - RNA, 15 nt, Human
aacagugcuaaaaau

SEQ ID NO: 2192630 - RNA, 16 nt, Human
aacagugcuaaaaaug

SEQ ID NO: 2192631 - RNA, 15 nt, Human
aacagacaggagaaa

SEQ ID NO: 2192632 - RNA, 14 nt, Human
aacagacaggagaa

SEQ ID NO: 2192633 - RNA, 11 nt, Human
aacagacauug

SEQ ID NO: 2192634 - RNA, 12 nt, Human
aacagacauugu

SEQ ID NO: 2192635 - RNA, 11 nt, Human
aacagacagga

SEQ ID NO: 2192636 - RNA, 20 nt, Human
aacagaacaucauuagaaca

SEQ ID NO: 2192637 - RNA, 18 nt, Human
aacagacccccucuagaa

SEQ ID NO: 2192638 - RNA, 22 nt, Human
aacagacauuguuuugccaaca

SEQ ID NO: 2192639 - RNA, 19 nt, Human
aacagacccccucuagaaa

SEQ ID NO: 2192640 - RNA, 18 nt, Human
aacagaccuaaugcuccu

SEQ ID NO: 2192641 - RNA, 13 nt, Human
aacagacauuguu

SEQ ID NO: 2192642 - RNA, 14 nt, Human
aacagacauuguuu

SEQ ID NO: 2192643 - RNA, 15 nt, Human
aacagacauuguuuu

SEQ ID NO: 2192644 - RNA, 18 nt, Human
aacagacauuguuuugcc

SEQ ID NO: 2192645 - RNA, 13 nt, Human
aacagaacagcuu

SEQ ID NO: 2192646 - RNA, 14 nt, Human
aacagaacagcuuc

SEQ ID NO: 2192647 - RNA, 15 nt, Human
aacagaacagcuuca

SEQ ID NO: 2192648 - RNA, 16 nt, Human
aacagaacagcuucag

SEQ ID NO: 2192649 - RNA, 18 nt, Human
aacagaaagggcaacaau

SEQ ID NO: 2192650 - RNA, 16 nt, Human
aacagaaacaaaaaca

SEQ ID NO: 2192651 - RNA, 22 nt, Human
aacagaaagccugggugacauu

SEQ ID NO: 2192652 - RNA, 21 nt, Human
aacagaaauguacagcaagga

SEQ ID NO: 2192653 - RNA, 11 nt, Human
aacagaaaugu

SEQ ID NO: 2192654 - RNA, 10 nt, Human
aacagaaaug

SEQ ID NO: 2192655 - RNA, 21 nt, Human
guccggucccugucccagugc

SEQ ID NO: 2192656 - RNA, 23 nt, Human
guccgcgcgccagcacagaaaca

SEQ ID NO: 2192657 - RNA, 18 nt, Human
guccggacacuccuagag

SEQ ID NO: 2192658 - RNA, 22 nt, Human
guccgcugggugguacccucug

SEQ ID NO: 2192659 - RNA, 21 nt, Human
guccgcccugcuccucccugg

SEQ ID NO: 2192660 - RNA, 23 nt, Human
guccgcccugcuccucccuggcu

SEQ ID NO: 2192661 - RNA, 14 nt, Human
aacagaaaacauuc

SEQ ID NO: 2192662 - RNA, 19 nt, Human
aacagaaaacauucugauu

SEQ ID NO: 2192663 - RNA, 13 nt, Human
aacagaaacaaaa

SEQ ID NO: 2192664 - RNA, 18 nt, Human
aacacuuuacaauguuca

SEQ ID NO: 2192665 - RNA, 17 nt, Human
guccggacacuccuaga

SEQ ID NO: 2192666 - RNA, 16 nt, Human
gucccaaggaaagccc

SEQ ID NO: 2192667 - RNA, 21 nt, Human
gucccaagcugggccccagcc

SEQ ID NO: 2192668 - RNA, 22 nt, Human
gucccaagcugggccccagccc

SEQ ID NO: 2192669 - RNA, 23 nt, Human
gucccaacaggaggacaauucau

SEQ ID NO: 2192670 - RNA, 13 nt, Human
gucccaagcuggg

SEQ ID NO: 2192671 - RNA, 15 nt, Human
gucccaagcugggcc

SEQ ID NO: 2192672 - RNA, 16 nt, Human
gucccaagcugggccc

SEQ ID NO: 2192673 - RNA, 15 nt, Human
gucccaacuuguaaa

SEQ ID NO: 2192674 - RNA, 20 nt, Human
gucccaacaggaggacaauu

SEQ ID NO: 2192675 - RNA, 21 nt, Human
gucccaacaggaggacaauuc

SEQ ID NO: 2192676 - RNA, 12 nt, Human
guccgcccugcu

SEQ ID NO: 2192677 - RNA, 18 nt, Human
guccgcccugcuccuccc

SEQ ID NO: 2192678 - RNA, 20 nt, Human
guccgcccugcuccucccug

SEQ ID NO: 2192679 - RNA, 23 nt, Human
gucccaagcugggccccagccca

SEQ ID NO: 2192680 - RNA, 15 nt, Human
guccgaucuuugacu

SEQ ID NO: 2192681 - RNA, 13 nt, Human
guccgagcuuuga

SEQ ID NO: 2192682 - RNA, 14 nt, Human
guccuuccaccucg

SEQ ID NO: 2192683 - RNA, 21 nt, Human
guccuucaccucacugaaaac

SEQ ID NO: 2192684 - RNA, 15 nt, Human
guccuucagauggaa

SEQ ID NO: 2192685 - RNA, 15 nt, Human
guccuucaccucacu

SEQ ID NO: 2192686 - RNA, 20 nt, Human
guccugccuggccaggcaga

SEQ ID NO: 2192687 - RNA, 19 nt, Human
guccugccuggccaggcag

SEQ ID NO: 2192688 - RNA, 23 nt, Human
guccugccugucugaagccaaug

SEQ ID NO: 2192689 - RNA, 11 nt, Human
guccugccugu

SEQ ID NO: 2192690 - RNA, 13 nt, Human
guccugccugugg

SEQ ID NO: 2192691 - RNA, 14 nt, Human
guccugccuguggc

SEQ ID NO: 2192692 - RNA, 15 nt, Human
guccugccuguggcg

SEQ ID NO: 2192693 - RNA, 15 nt, Human
guccugccuggccag

SEQ ID NO: 2192694 - RNA, 14 nt, Human
guccugccuggcca

SEQ ID NO: 2192695 - RNA, 13 nt, Human
guccugccuggcc

SEQ ID NO: 2192696 - RNA, 17 nt, Human
guccugccucagccucc

SEQ ID NO: 2192697 - RNA, 15 nt, Human
guccugccucagccu

SEQ ID NO: 2192698 - RNA, 18 nt, Human
guccugccaccuggggca

SEQ ID NO: 2192699 - RNA, 17 nt, Human
guccugccaccuggggc

SEQ ID NO: 2192700 - RNA, 16 nt, Human
guccugccaccugggg

SEQ ID NO: 2192701 - RNA, 14 nt, Human
guccugccaccugg

SEQ ID NO: 2192702 - RNA, 15 nt, Human
guccugaucagagcc

SEQ ID NO: 2192703 - RNA, 19 nt, Human
guccugcagucuggcugag

SEQ ID NO: 2192704 - RNA, 18 nt, Human
guccugaggguccccacc

SEQ ID NO: 2192705 - RNA, 21 nt, Human
guccugaggguccccaccugg

SEQ ID NO: 2192706 - RNA, 17 nt, Human
guccucugaaugaaccu

SEQ ID NO: 2192707 - RNA, 13 nt, Human
guccucugaauga

SEQ ID NO: 2192708 - RNA, 16 nt, Human
guccucucuggcuggg

SEQ ID NO: 2192709 - RNA, 17 nt, Human
guccucucuggcugggg

SEQ ID NO: 2192710 - RNA, 23 nt, Human
guccucugucagucacagccacc

SEQ ID NO: 2192711 - RNA, 20 nt, Human
guccucugucagucacagcc

SEQ ID NO: 2192712 - RNA, 19 nt, Human
guccucugucagucacagc

SEQ ID NO: 2192713 - RNA, 18 nt, Human
guccucugucagucacag

SEQ ID NO: 2192714 - RNA, 18 nt, Human
guccucucuggcugggga

SEQ ID NO: 2192715 - RNA, 19 nt, Human
guccucugauacccagagc

SEQ ID NO: 2192716 - RNA, 11 nt, Human
guccucuggau

SEQ ID NO: 2192717 - RNA, 18 nt, Human
guccucuggauggcacca

SEQ ID NO: 2192718 - RNA, 21 nt, Human
guccucuggauggcaccagag

SEQ ID NO: 2192719 - RNA, 13 nt, Human
guccugacucaac

SEQ ID NO: 2192720 - RNA, 23 nt, Human
guccugaccacccuccccucucu

SEQ ID NO: 2192721 - RNA, 17 nt, Human
guccugacuucaggggc

SEQ ID NO: 2192722 - RNA, 13 nt, Human
guccugagaccug

SEQ ID NO: 2192723 - RNA, 20 nt, Human
guccugacuucaggggcugc

SEQ ID NO: 2192724 - RNA, 21 nt, Human
guccugacuucaggggcugcc

SEQ ID NO: 2192725 - RNA, 23 nt, Human
guccugacuucaggggcugcccg

SEQ ID NO: 2192726 - RNA, 15 nt, Human
guccugaccugucuc

SEQ ID NO: 2192727 - RNA, 16 nt, Human
guccugaccugucuca

SEQ ID NO: 2192728 - RNA, 17 nt, Human
guccucuugccuccugg

SEQ ID NO: 2192729 - RNA, 17 nt, Human
guccugaccacccuccc

SEQ ID NO: 2192730 - RNA, 19 nt, Human
guccugaccacccuccccu

SEQ ID NO: 2192731 - RNA, 21 nt, Human
guccugaccacccuccccucu

SEQ ID NO: 2192732 - RNA, 13 nt, Human
guccucuucugca

SEQ ID NO: 2192733 - RNA, 14 nt, Human
guccucuugccucc

SEQ ID NO: 2192734 - RNA, 21 nt, Human
aacauugcauauaacuuauau

SEQ ID NO: 2192735 - RNA, 20 nt, Human
aacauugcauauaacuuaua

SEQ ID NO: 2192736 - RNA, 13 nt, Human
aacauuguguucc

SEQ ID NO: 2192737 - RNA, 22 nt, Human
aacauugcauauaacuuauauu

SEQ ID NO: 2192738 - RNA, 17 nt, Human
aacauucugauuuggaa

SEQ ID NO: 2192739 - RNA, 14 nt, Human
aacauuuacaugua

SEQ ID NO: 2192740 - RNA, 23 nt, Human
aacauuguguucccauuucagcu

SEQ ID NO: 2192741 - RNA, 15 nt, Human
aacauuguuccagau

SEQ ID NO: 2192742 - RNA, 17 nt, Human
aacauuguuccagauuc

SEQ ID NO: 2192743 - RNA, 18 nt, Human
aacauuguuccagauuca

SEQ ID NO: 2192744 - RNA, 19 nt, Human
aacauuguuccagauucaa

SEQ ID NO: 2192745 - RNA, 22 nt, Human
aacauuucaagggcaauaccgu

SEQ ID NO: 2192746 - RNA, 16 nt, Human
aacauuucucaauaau

SEQ ID NO: 2192747 - RNA, 20 nt, Human
aacauuuguucuauagcuuu

SEQ ID NO: 2192748 - RNA, 18 nt, Human
aacauuugguaaggggaa

SEQ ID NO: 2192749 - RNA, 19 nt, Human
aacauugaaguaaugaauu

SEQ ID NO: 2192750 - RNA, 18 nt, Human
aacauugaaguaaugaau

SEQ ID NO: 2192751 - RNA, 16 nt, Human
aacauugaaguaauga

SEQ ID NO: 2192752 - RNA, 18 nt, Human
aacauucugauuuggaaa

SEQ ID NO: 2192753 - RNA, 16 nt, Human
aacauucugauuugga

SEQ ID NO: 2192754 - RNA, 18 nt, Human
aacaguuuuccaugaaaa

SEQ ID NO: 2192755 - RNA, 17 nt, Human
aacaguuuuccaugaaa

SEQ ID NO: 2192756 - RNA, 16 nt, Human
aacaguuuuccaugaa

SEQ ID NO: 2192757 - RNA, 15 nt, Human
aacaguuuuccauga

SEQ ID NO: 2192758 - RNA, 18 nt, Human
aacauaauucuuguauau

SEQ ID NO: 2192759 - RNA, 19 nt, Human
aacaguuuuccaugaaaac

SEQ ID NO: 2192760 - RNA, 17 nt, Human
aacauaauucuuguaua

SEQ ID NO: 2192761 - RNA, 14 nt, Human
aacauacucccauc

SEQ ID NO: 2192762 - RNA, 15 nt, Human
aacauacucccaucu

SEQ ID NO: 2192763 - RNA, 16 nt, Human
aaaugcaacaacaugu

SEQ ID NO: 2192764 - RNA, 14 nt, Human
aaaugcaaauccua

SEQ ID NO: 2192765 - RNA, 21 nt, Human
aaaugcaaacacacaaaggua

SEQ ID NO: 2192766 - RNA, 13 nt, Human
aaaugcaaauccu

SEQ ID NO: 2192767 - RNA, 17 nt, Human
aaaugcaaacacacaaa

SEQ ID NO: 2192768 - RNA, 16 nt, Human
aaaugcaauauguauu

SEQ ID NO: 2192769 - RNA, 15 nt, Human
aaaugcaauauguau

SEQ ID NO: 2192770 - RNA, 14 nt, Human
aaaugcaauauuaa

SEQ ID NO: 2192771 - RNA, 17 nt, Human
aaaugcaauauuaaugc

SEQ ID NO: 2192772 - RNA, 14 nt, Human
aaaugcaagauuuu

SEQ ID NO: 2192773 - RNA, 13 nt, Human
aaaugcaauaugu

SEQ ID NO: 2192774 - RNA, 21 nt, Human
aaaugcaaauccuaugugauu

SEQ ID NO: 2192775 - RNA, 14 nt, Human
aaaugcaccuggaa

SEQ ID NO: 2192776 - RNA, 16 nt, Human
aaaugaucuuuucaag

SEQ ID NO: 2192777 - RNA, 19 nt, Human
aaaugaugauguggaagaa

SEQ ID NO: 2192778 - RNA, 19 nt, Human
aaaugaucugagucccagg

SEQ ID NO: 2192779 - RNA, 16 nt, Human
aaaugaucaguuuuuu

SEQ ID NO: 2192780 - RNA, 22 nt, Human
aaaugauccccaagugugaaca

SEQ ID NO: 2192781 - RNA, 22 nt, Human
aaaugaugauguggaagaacuu

SEQ ID NO: 2192782 - RNA, 20 nt, Human
aaaugaucugagucccagga

SEQ ID NO: 2192783 - RNA, 18 nt, Human
aaaugauguguacccaaa

SEQ ID NO: 2192784 - RNA, 23 nt, Human
aaaugauguucauuuagauugaa

SEQ ID NO: 2192785 - RNA, 15 nt, Human
aaaugauucuuagug

SEQ ID NO: 2192786 - RNA, 15 nt, Human
aaaugauuguaaaau

SEQ ID NO: 2192787 - RNA, 22 nt, Human
aaaugauuguaaaauagcuugu

SEQ ID NO: 2192788 - RNA, 21 nt, Human
aaaugauuuuaucugugaauu

SEQ ID NO: 2192789 - RNA, 23 nt, Human
aaaugauuuuuacaaguuuuaaa

SEQ ID NO: 2192790 - RNA, 22 nt, Human
aaaugcauccauuccucaggga

SEQ ID NO: 2192791 - RNA, 20 nt, Human
aaaugcauccauuccucagg

SEQ ID NO: 2192792 - RNA, 16 nt, Human
aaaugcauccauuccu

SEQ ID NO: 2192793 - RNA, 20 nt, Human
aaaugcauauccugagccau

SEQ ID NO: 2192794 - RNA, 19 nt, Human
aaaugcauauccugagcca

SEQ ID NO: 2192795 - RNA, 11 nt, Human
aaaugcauauu

SEQ ID NO: 2192796 - RNA, 15 nt, Human
aaaugcauauuguau

SEQ ID NO: 2192797 - RNA, 23 nt, Human
aaaugcauccauuccucagggac

SEQ ID NO: 2192798 - RNA, 13 nt, Human
aaaugcauguugc

SEQ ID NO: 2192799 - RNA, 18 nt, Human
aaaugcaugauuuuguaa

SEQ ID NO: 2192800 - RNA, 14 nt, Human
aaaugcaugauuuu

SEQ ID NO: 2192801 - RNA, 21 nt, Human
aaaugcaugauuuuguaaccc

SEQ ID NO: 2192802 - RNA, 20 nt, Human
aaaugcaugauuuuguaacc

SEQ ID NO: 2192803 - RNA, 20 nt, Human
aaaugcauuauaggaucauu

SEQ ID NO: 2192804 - RNA, 19 nt, Human
aaaugcacauagcuaucaa

SEQ ID NO: 2192805 - RNA, 20 nt, Human
aaaugcacccaacuagcucu

SEQ ID NO: 2192806 - RNA, 23 nt, Human
aaaugcagcgaaccaauauuugu

SEQ ID NO: 2192807 - RNA, 21 nt, Human
aaaugcagcgaaccaauauuu

SEQ ID NO: 2192808 - RNA, 22 nt, Human
aaaugcagggauugcugccacu

SEQ ID NO: 2192809 - RNA, 12 nt, Human
aaaugcagugaa

SEQ ID NO: 2192810 - RNA, 15 nt, Human
aaaugcauaaaugca

SEQ ID NO: 2192811 - RNA, 22 nt, Human
aaaugcaccuggaauauauaac

SEQ ID NO: 2192812 - RNA, 18 nt, Human
aaaugcaccuggaauaua

SEQ ID NO: 2192813 - RNA, 22 nt, Human
aaaugcccuuacacuuacuguu

SEQ ID NO: 2192814 - RNA, 16 nt, Human
aaaugccucaguguau

SEQ ID NO: 2192815 - RNA, 17 nt, Human
aaaugccucaguguauu

SEQ ID NO: 2192816 - RNA, 18 nt, Human
aaaugccucaguguauuu

SEQ ID NO: 2192817 - RNA, 19 nt, Human
aaaugccucaguguauuug

SEQ ID NO: 2192818 - RNA, 21 nt, Human
aaaugccucaguguauuugua

SEQ ID NO: 2192819 - RNA, 19 nt, Human
aaauggcuuccuggcaaua

SEQ ID NO: 2192820 - RNA, 16 nt, Human
aaaugggacuuaacuc

SEQ ID NO: 2192821 - RNA, 15 nt, Human
aaaugggacuucuuu

SEQ ID NO: 2192822 - RNA, 22 nt, Human
aaaugccucaguguauuuguau

SEQ ID NO: 2192823 - RNA, 23 nt, Human
aaaugccucaguguauuuguauu

SEQ ID NO: 2192824 - RNA, 15 nt, Human
aaaugggcagagcag

SEQ ID NO: 2192825 - RNA, 18 nt, Human
aaaugggcagagcagaga

SEQ ID NO: 2192826 - RNA, 20 nt, Human
aaaugggcagagcagagacc

SEQ ID NO: 2192827 - RNA, 13 nt, Human
aaaugcccagcuu

SEQ ID NO: 2192828 - RNA, 18 nt, Human
aaaugcccagccccuucu

SEQ ID NO: 2192829 - RNA, 14 nt, Human
aaaugcccagcccc

SEQ ID NO: 2192830 - RNA, 15 nt, Human
aaaugcccagccccu

SEQ ID NO: 2192831 - RNA, 13 nt, Human
aaaugcauggagg

SEQ ID NO: 2192832 - RNA, 12 nt, Human
aaaugcauugua

SEQ ID NO: 2192833 - RNA, 20 nt, Human
aaaugcauuguaucgauguu

SEQ ID NO: 2192834 - RNA, 13 nt, Human
aaaugcauuguau

SEQ ID NO: 2192835 - RNA, 13 nt, Human
aaaugcccagccc

SEQ ID NO: 2192836 - RNA, 14 nt, Human
aaaugcauuucuaa

SEQ ID NO: 2192837 - RNA, 21 nt, Human
aaaugaguuaccuacauuuua

SEQ ID NO: 2192838 - RNA, 22 nt, Human
aaaugaguuuuuauggggcuga

SEQ ID NO: 2192839 - RNA, 23 nt, Human
aaaugauccccagcuguuuaugc

SEQ ID NO: 2192840 - RNA, 15 nt, Human
aaaugaucaguuuuu

SEQ ID NO: 2192841 - RNA, 18 nt, Human
aaaugaguguguuuguca

SEQ ID NO: 2192842 - RNA, 12 nt, Human
aaaugagugugu

SEQ ID NO: 2192843 - RNA, 9 nt, Human
aaaugaggg

SEQ ID NO: 2192844 - RNA, 23 nt, Human
aaaugagguacucuccuggaaau

SEQ ID NO: 2192845 - RNA, 16 nt, Human
aaaugagguacucucc

SEQ ID NO: 2192846 - RNA, 17 nt, Human
aaaugaggucagagccu

SEQ ID NO: 2192847 - RNA, 19 nt, Human
aaaugaggucagagccugc

SEQ ID NO: 2192848 - RNA, 13 nt, Human
aaaugaggaaacu

SEQ ID NO: 2192849 - RNA, 14 nt, Human
aaaugaggaaugua

SEQ ID NO: 2192850 - RNA, 17 nt, Human
aaaugaggaauguauau

SEQ ID NO: 2192851 - RNA, 18 nt, Human
aaaugaggaauguauaug

SEQ ID NO: 2192852 - RNA, 19 nt, Human
aaaugaggaauguauaugu

SEQ ID NO: 2192853 - RNA, 14 nt, Human
aaaugaggacaugu

SEQ ID NO: 2192854 - RNA, 16 nt, Human
aaaugaggacauguuu

SEQ ID NO: 2192855 - RNA, 23 nt, Human
aaaugagcucgcauuugucaaug

SEQ ID NO: 2192856 - RNA, 13 nt, Human
aaaugagccauga

SEQ ID NO: 2192857 - RNA, 17 nt, Human
aaaugagaucaggcucu

SEQ ID NO: 2192858 - RNA, 22 nt, Human
aaaugagaucaggcucugccuc

SEQ ID NO: 2192859 - RNA, 19 nt, Human
aaaugagccuggcaagaau

SEQ ID NO: 2192860 - RNA, 13 nt, Human
aaaugagccuggc

SEQ ID NO: 2192861 - RNA, 20 nt, Human
aaaugagacccucguggccu

SEQ ID NO: 2192862 - RNA, 21 nt, Human
aaaugagaaggcagccaccag

SEQ ID NO: 2192863 - RNA, 20 nt, Human
aaaugagagggcaguguuuc

SEQ ID NO: 2192864 - RNA, 15 nt, Human
aaaugagaucaggcu

SEQ ID NO: 2192865 - RNA, 13 nt, Human
aaaugagaaggaa

SEQ ID NO: 2192866 - RNA, 16 nt, Human
aaaugagaaaucuaaa

SEQ ID NO: 2192867 - RNA, 13 nt, Human
aaaugagaaaucu

SEQ ID NO: 2192868 - RNA, 14 nt, Human
aaaugagaaaucua

SEQ ID NO: 2192869 - RNA, 14 nt, Human
aaaugaacugaagu

SEQ ID NO: 2192870 - RNA, 21 nt, Human
aaaugaacugaaguuucacau

SEQ ID NO: 2192871 - RNA, 11 nt, Human
aaaugaagaaa

SEQ ID NO: 2192872 - RNA, 11 nt, Human
aaaugaagugc

SEQ ID NO: 2192873 - RNA, 19 nt, Human
aaaugaagguuaggauuua

SEQ ID NO: 2192874 - RNA, 18 nt, Human
aaaugaagcagcuuuaaa

SEQ ID NO: 2192875 - RNA, 12 nt, Human
aaaugaaauugu

SEQ ID NO: 2192876 - RNA, 14 nt, Human
aaaugaaauuguaa

SEQ ID NO: 2192877 - RNA, 15 nt, Human
aaaugaaauuguaaa

SEQ ID NO: 2192878 - RNA, 15 nt, Human
aaaugaaagcaugug

SEQ ID NO: 2192879 - RNA, 18 nt, Human
aaaugaaagcaugucuca

SEQ ID NO: 2192880 - RNA, 22 nt, Human
aaaugaaauuacuacaaaauuu

SEQ ID NO: 2192881 - RNA, 20 nt, Human
aaaugaaaguauaacugagu

SEQ ID NO: 2192882 - RNA, 22 nt, Human
aaaugaaagcagggacuugaac

SEQ ID NO: 2192883 - RNA, 21 nt, Human
aaaugaaagcagggacuugaa

SEQ ID NO: 2192884 - RNA, 11 nt, Human
aaaugaauuuu

SEQ ID NO: 2192885 - RNA, 22 nt, Human
aaaugaaugugugugguuuuuu

SEQ ID NO: 2192886 - RNA, 15 nt, Human
aaaugaauguugucu

SEQ ID NO: 2192887 - RNA, 11 nt, Human
aaaugaaugug

SEQ ID NO: 2192888 - RNA, 12 nt, Human
aaaugaaugugu

SEQ ID NO: 2192889 - RNA, 14 nt, Human
aaaugaaugugugu

SEQ ID NO: 2192890 - RNA, 15 nt, Human
aaaugaaugugugug

SEQ ID NO: 2192891 - RNA, 17 nt, Human
aaaugaauguguguggu

SEQ ID NO: 2192892 - RNA, 19 nt, Human
aaaugaaugugugugguuu

SEQ ID NO: 2192893 - RNA, 18 nt, Human
aaaugaauaauuucccaa

SEQ ID NO: 2192894 - RNA, 17 nt, Human
aaaugaauaauuuccca

SEQ ID NO: 2192895 - RNA, 15 nt, Human
aaaugaauaauuucc

SEQ ID NO: 2192896 - RNA, 22 nt, Human
aaaugaagguuaggauuuaaca

SEQ ID NO: 2192897 - RNA, 20 nt, Human
aaaugaagugcaaauuugau

SEQ ID NO: 2192898 - RNA, 16 nt, Human
aaaugaauggcucacu

SEQ ID NO: 2192899 - RNA, 22 nt, Human
aaaugacuaaaaaacaaagaag

SEQ ID NO: 2192900 - RNA, 19 nt, Human
aaaugacuaaaaaacaaag

SEQ ID NO: 2192901 - RNA, 21 nt, Human
aaaugaccaguaauugugaaa

SEQ ID NO: 2192902 - RNA, 14 nt, Human
aaaugacccaaaga

SEQ ID NO: 2192903 - RNA, 16 nt, Human
aaaugacccaaagacc

SEQ ID NO: 2192904 - RNA, 17 nt, Human
aaaugacccaaagacca

SEQ ID NO: 2192905 - RNA, 14 nt, Human
aaaugacagauguu

SEQ ID NO: 2192906 - RNA, 15 nt, Human
aaaugaccaauauua

SEQ ID NO: 2192907 - RNA, 19 nt, Human
aaaugaccaguaauuguga

SEQ ID NO: 2192908 - RNA, 20 nt, Human
aaaugacuaaaaauauuaua

SEQ ID NO: 2192909 - RNA, 17 nt, Human
aaaugacuaaaaauauu

SEQ ID NO: 2192910 - RNA, 11 nt, Human
aaaugagaaau

SEQ ID NO: 2192911 - RNA, 13 nt, Human
aaaucuaugccac

SEQ ID NO: 2192912 - RNA, 14 nt, Human
aaaucuaugccacu

SEQ ID NO: 2192913 - RNA, 20 nt, Human
aaaucuaugccacucagaau

SEQ ID NO: 2192914 - RNA, 13 nt, Human
aaaucuauucaga

SEQ ID NO: 2192915 - RNA, 19 nt, Human
aaaucuauucagacaagca

SEQ ID NO: 2192916 - RNA, 16 nt, Human
aaaucuaugauuccag

SEQ ID NO: 2192917 - RNA, 14 nt, Human
aaaucuaugauucc

SEQ ID NO: 2192918 - RNA, 22 nt, Human
aaaucuagacucaagguuccca

SEQ ID NO: 2192919 - RNA, 16 nt, Human
aaaucuaccuucugua

SEQ ID NO: 2192920 - RNA, 17 nt, Human
aaaucuaccuucuguag

SEQ ID NO: 2192921 - RNA, 18 nt, Human
aaaucuaccuucuguagu

SEQ ID NO: 2192922 - RNA, 22 nt, Human
aaaucuaguauuucaugcuggg

SEQ ID NO: 2192923 - RNA, 14 nt, Human
aaaucuacaguaca

SEQ ID NO: 2192924 - RNA, 15 nt, Human
aaaucuaccuucugu

SEQ ID NO: 2192925 - RNA, 19 nt, Human
aaaucuaauauuaaaaaua

SEQ ID NO: 2192926 - RNA, 18 nt, Human
aaaucuaauauuaaaaau

SEQ ID NO: 2192927 - RNA, 19 nt, Human
aaaucuacacuccagugag

SEQ ID NO: 2192928 - RNA, 22 nt, Human
aaaucggaucuggggcucuggg

SEQ ID NO: 2192929 - RNA, 15 nt, Human
aaaucgcuuuugaua

SEQ ID NO: 2192930 - RNA, 14 nt, Human
aaaucgcuuuugau

SEQ ID NO: 2192931 - RNA, 13 nt, Human
aaaucgcuuuuga

SEQ ID NO: 2192932 - RNA, 17 nt, Human
aaaucuaauauuaaaaa

SEQ ID NO: 2192933 - RNA, 23 nt, Human
aaaucggaucuggggcucuggga

SEQ ID NO: 2192934 - RNA, 17 nt, Human
aaaugaaaaucgugaca

SEQ ID NO: 2192935 - RNA, 18 nt, Human
aaaugaaaacauguaaua

SEQ ID NO: 2192936 - RNA, 15 nt, Human
aaaugaaaaugucuu

SEQ ID NO: 2192937 - RNA, 17 nt, Human
aaaugaaaaugucuugu

SEQ ID NO: 2192938 - RNA, 16 nt, Human
aaaugaaaaugucuug

SEQ ID NO: 2192939 - RNA, 12 nt, Human
aaaugaaagaaa

SEQ ID NO: 2192940 - RNA, 11 nt, Human
aaaugaaaauu

SEQ ID NO: 2192941 - RNA, 19 nt, Human
aaaucucaaauuucuaaau

SEQ ID NO: 2192942 - RNA, 17 nt, Human
aaaucucaaauuucuaa

SEQ ID NO: 2192943 - RNA, 16 nt, Human
aaaucucaaauuucua

SEQ ID NO: 2192944 - RNA, 15 nt, Human
aaaucucaaauuucu

SEQ ID NO: 2192945 - RNA, 18 nt, Human
aaaucccuuaccucggug

SEQ ID NO: 2192946 - RNA, 15 nt, Human
aaaucccauuuaaaa

SEQ ID NO: 2192947 - RNA, 21 nt, Human
aaauccucuuccucugaggcu

SEQ ID NO: 2192948 - RNA, 12 nt, Human
aaauccucuggc

SEQ ID NO: 2192949 - RNA, 13 nt, Human
aaauccucuuccu

SEQ ID NO: 2192950 - RNA, 11 nt, Human
aaauccucugg

SEQ ID NO: 2192951 - RNA, 23 nt, Human
aaauccuaugugauuuuaacucu

SEQ ID NO: 2192952 - RNA, 14 nt, Human
aaauccucuuccuc

SEQ ID NO: 2192953 - RNA, 15 nt, Human
aaauccucuuccucu

SEQ ID NO: 2192954 - RNA, 17 nt, Human
aaauccucuuccucuga

SEQ ID NO: 2192955 - RNA, 18 nt, Human
aaauccucuuccucugag

SEQ ID NO: 2192956 - RNA, 21 nt, Human
aaaucccauucauaacuuuca

SEQ ID NO: 2192957 - RNA, 13 nt, Human
aaauccccuucuc

SEQ ID NO: 2192958 - RNA, 20 nt, Human
aaauccgaaccuccucugug

SEQ ID NO: 2192959 - RNA, 19 nt, Human
aaauccgaaccuccucugu

SEQ ID NO: 2192960 - RNA, 15 nt, Human
aaauccgaaccuccu

SEQ ID NO: 2192961 - RNA, 17 nt, Human
aaaucccuguuuaauau

SEQ ID NO: 2192962 - RNA, 15 nt, Human
aaauccuacugaaug

SEQ ID NO: 2192963 - RNA, 21 nt, Human
aaauccgaaccuccucuguga

SEQ ID NO: 2192964 - RNA, 21 nt, Human
aaauccuaugugauuuuaacu

SEQ ID NO: 2192965 - RNA, 16 nt, Human
aaauccuaugugauuu

SEQ ID NO: 2192966 - RNA, 14 nt, Human
aaauccuaugugau

SEQ ID NO: 2192967 - RNA, 16 nt, Human
aaauccuuccaugaaa

SEQ ID NO: 2192968 - RNA, 16 nt, Human
aaauccuuuacuguua

SEQ ID NO: 2192969 - RNA, 14 nt, Human
aaauccuugaagau

SEQ ID NO: 2192970 - RNA, 19 nt, Human
aaauccuuuuucuuuauaa

SEQ ID NO: 2192971 - RNA, 18 nt, Human
aaauccuuuuucuuuaua

SEQ ID NO: 2192972 - RNA, 17 nt, Human
aaauccuuuuucuuuau

SEQ ID NO: 2192973 - RNA, 14 nt, Human
aaaucgauuggcuu

SEQ ID NO: 2192974 - RNA, 15 nt, Human
aaaucgauuggcuuu

SEQ ID NO: 2192975 - RNA, 13 nt, Human
aaaucgaugcagu

SEQ ID NO: 2192976 - RNA, 19 nt, Human
guaggacuuuccuaaaugu

SEQ ID NO: 2192977 - RNA, 15 nt, Human
guaggacuguagaaa

SEQ ID NO: 2192978 - RNA, 19 nt, Human
guaggaccaagcaucuugg

SEQ ID NO: 2192979 - RNA, 18 nt, Human
guaggaagguuaauguuc

SEQ ID NO: 2192980 - RNA, 15 nt, Human
guaggaaguaggaag

SEQ ID NO: 2192981 - RNA, 19 nt, Human
guaggaaaaauaaaaacag

SEQ ID NO: 2192982 - RNA, 17 nt, Human
guaggaagaguagcauu

SEQ ID NO: 2192983 - RNA, 21 nt, Human
guaggaacgguaaauuucugu

SEQ ID NO: 2192984 - RNA, 16 nt, Human
guaggaacugcugggc

SEQ ID NO: 2192985 - RNA, 15 nt, Human
guaggaagacuuugg

SEQ ID NO: 2192986 - RNA, 18 nt, Human
guaggaacgguaaauuuc

SEQ ID NO: 2192987 - RNA, 12 nt, Human
guagcuuugcuc

SEQ ID NO: 2192988 - RNA, 17 nt, Human
guagcuuaccagaagcu

SEQ ID NO: 2192989 - RNA, 17 nt, Human
guagcuuucccaaauaa

SEQ ID NO: 2192990 - RNA, 23 nt, Human
guaggcaugagggaucacagggc

SEQ ID NO: 2192991 - RNA, 14 nt, Human
guaggcauuuccua

SEQ ID NO: 2192992 - RNA, 22 nt, Human
guaggcaugagggaucacaggg

SEQ ID NO: 2192993 - RNA, 20 nt, Human
guaggcaugagggaucacag

SEQ ID NO: 2192994 - RNA, 17 nt, Human
guaggcaugagggauca

SEQ ID NO: 2192995 - RNA, 14 nt, Human
guaggcagagccuu

SEQ ID NO: 2192996 - RNA, 15 nt, Human
guaggcagagccuuu

SEQ ID NO: 2192997 - RNA, 14 nt, Human
guaggagguuugga

SEQ ID NO: 2192998 - RNA, 23 nt, Human
guaggagcugccuuggcucagac

SEQ ID NO: 2192999 - RNA, 17 nt, Human
guaggaggaugggcucg

SEQ ID NO: 2193000 - RNA, 22 nt, Human
guaggagcugccuuggcucaga

SEQ ID NO: 2193001 - RNA, 14 nt, Human
guaggagcugccuu

SEQ ID NO: 2193002 - RNA, 18 nt, Human
guaggagcccagcucuga

SEQ ID NO: 2193003 - RNA, 11 nt, Human
guaggcagaca

SEQ ID NO: 2193004 - RNA, 12 nt, Human
guaggcagacac

SEQ ID NO: 2193005 - RNA, 13 nt, Human
guaggcagacaca

SEQ ID NO: 2193006 - RNA, 22 nt, Human
guaggcagacacagggacuuga

SEQ ID NO: 2193007 - RNA, 23 nt, Human
guaggcagacacagggacuugaa

SEQ ID NO: 2193008 - RNA, 13 nt, Human
guaggcagagccu

SEQ ID NO: 2193009 - RNA, 13 nt, Human
guaggauuacuag

SEQ ID NO: 2193010 - RNA, 17 nt, Human
guagcuggauuacaggc

SEQ ID NO: 2193011 - RNA, 15 nt, Human
guagcugccccuggc

SEQ ID NO: 2193012 - RNA, 12 nt, Human
guagcugccccu

SEQ ID NO: 2193013 - RNA, 16 nt, Human
guagcugccccuggcu

SEQ ID NO: 2193014 - RNA, 12 nt, Human
guagcugggacu

SEQ ID NO: 2193015 - RNA, 18 nt, Human
guagcugggacuacaggc

SEQ ID NO: 2193016 - RNA, 19 nt, Human
guagcugggacuacaggca

SEQ ID NO: 2193017 - RNA, 21 nt, Human
guagcugggacuacaggcacc

SEQ ID NO: 2193018 - RNA, 18 nt, Human
guagcugggauuacaggc

SEQ ID NO: 2193019 - RNA, 18 nt, Human
guagcuguggugaggugg

SEQ ID NO: 2193020 - RNA, 22 nt, Human
guagcuuaccagaagcuuccau

SEQ ID NO: 2193021 - RNA, 20 nt, Human
guagcuguaaggcaugaagg

SEQ ID NO: 2193022 - RNA, 12 nt, Human
aaaggauauuuu

SEQ ID NO: 2193023 - RNA, 15 nt, Human
aaaggauauuuucuu

SEQ ID NO: 2193024 - RNA, 18 nt, Human
aaaggaucuuuguggcca

SEQ ID NO: 2193025 - RNA, 16 nt, Human
aaaggauacuguaaca

SEQ ID NO: 2193026 - RNA, 18 nt, Human
aaaggauacuguaacacu

SEQ ID NO: 2193027 - RNA, 19 nt, Human
aaaggaucuuuguggccaa

SEQ ID NO: 2193028 - RNA, 17 nt, Human
guagcugcaaaggacag

SEQ ID NO: 2193029 - RNA, 16 nt, Human
aaaggagucaaaacua

SEQ ID NO: 2193030 - RNA, 14 nt, Human
aaaggaggcuggca

SEQ ID NO: 2193031 - RNA, 13 nt, Human
aaaggaggcuggc

SEQ ID NO: 2193032 - RNA, 19 nt, Human
aaaggagagaagagagaaa

SEQ ID NO: 2193033 - RNA, 22 nt, Human
aaaggacuguuuuuuccugagc

SEQ ID NO: 2193034 - RNA, 20 nt, Human
aaaggacuguuuuuuccuga

SEQ ID NO: 2193035 - RNA, 12 nt, Human
aaaggacucugg

SEQ ID NO: 2193036 - RNA, 15 nt, Human
aaaggacucuggggu

SEQ ID NO: 2193037 - RNA, 16 nt, Human
aaaggacucugggguu

SEQ ID NO: 2193038 - RNA, 15 nt, Human
aaauguacugagauu

SEQ ID NO: 2193039 - RNA, 16 nt, Human
aaauguagguaugaau

SEQ ID NO: 2193040 - RNA, 20 nt, Human
aaauguaggcuuaguuugug

SEQ ID NO: 2193041 - RNA, 16 nt, Human
guaguuaguagcaugu

SEQ ID NO: 2193042 - RNA, 23 nt, Human
guaguucccugaaaacccagaga

SEQ ID NO: 2193043 - RNA, 15 nt, Human
guaguuccugcuaca

SEQ ID NO: 2193044 - RNA, 20 nt, Human
guaguucccugaaaacccag

SEQ ID NO: 2193045 - RNA, 17 nt, Human
guaguucccugaaaacc

SEQ ID NO: 2193046 - RNA, 13 nt, Human
guaguucccugaa

SEQ ID NO: 2193047 - RNA, 11 nt, Human
guauaaaagau

SEQ ID NO: 2193048 - RNA, 12 nt, Human
guauaaaagaug

SEQ ID NO: 2193049 - RNA, 17 nt, Human
guauaaaagccuguuua

SEQ ID NO: 2193050 - RNA, 12 nt, Human
aaauguaauuga

SEQ ID NO: 2193051 - RNA, 22 nt, Human
aaauguaagggaaacugccagc

SEQ ID NO: 2193052 - RNA, 18 nt, Human
aaaugggggugcauuuga

SEQ ID NO: 2193053 - RNA, 17 nt, Human
aaaugggggugcauuug

SEQ ID NO: 2193054 - RNA, 16 nt, Human
aaaugggggugcauuu

SEQ ID NO: 2193055 - RNA, 15 nt, Human
aaaugggggugcauu

SEQ ID NO: 2193056 - RNA, 22 nt, Human
aaauggggccagauccagccug

SEQ ID NO: 2193057 - RNA, 21 nt, Human
aaauggggccagauccagccu

SEQ ID NO: 2193058 - RNA, 17 nt, Human
aaauggggccagaucca

SEQ ID NO: 2193059 - RNA, 16 nt, Human
aaauggggccagaucc

SEQ ID NO: 2193060 - RNA, 13 nt, Human
aaauggggccaga

SEQ ID NO: 2193061 - RNA, 16 nt, Human
aaaugggacuucuuuu

SEQ ID NO: 2193062 - RNA, 20 nt, Human
aaaugggacuucuuuucaca

SEQ ID NO: 2193063 - RNA, 21 nt, Human
aaaugggacuucuuuucacau

SEQ ID NO: 2193064 - RNA, 22 nt, Human
aaaugggacuucuuuucacauu

SEQ ID NO: 2193065 - RNA, 14 nt, Human
guauaaacaaaguu

SEQ ID NO: 2193066 - RNA, 23 nt, Human
guauaaaaucagccaauuauguu

SEQ ID NO: 2193067 - RNA, 15 nt, Human
guauaaaaucagcca

SEQ ID NO: 2193068 - RNA, 17 nt, Human
guauaaaaucagccaau

SEQ ID NO: 2193069 - RNA, 18 nt, Human
guauaaaagggacugaga

SEQ ID NO: 2193070 - RNA, 13 nt, Human
guauaaaagaugg

SEQ ID NO: 2193071 - RNA, 23 nt, Human
guauaaaagauggggucuguaaa

SEQ ID NO: 2193072 - RNA, 18 nt, Human
guauaaaagccuguuuaa

SEQ ID NO: 2193073 - RNA, 21 nt, Human
guauaaaagccuguuuaagag

SEQ ID NO: 2193074 - RNA, 13 nt, Human
guauaaagaaaag

SEQ ID NO: 2193075 - RNA, 14 nt, Human
guauaaagaaaagu

SEQ ID NO: 2193076 - RNA, 12 nt, Human
guauaaagaaca

SEQ ID NO: 2193077 - RNA, 13 nt, Human
guauaaacuauca

SEQ ID NO: 2193078 - RNA, 17 nt, Human
guauaaacuaucaguuu

SEQ ID NO: 2193079 - RNA, 18 nt, Human
guauaaauaggagaggau

SEQ ID NO: 2193080 - RNA, 12 nt, Human
guauaaaugguu

SEQ ID NO: 2193081 - RNA, 17 nt, Human
guauaaaugguugucug

SEQ ID NO: 2193082 - RNA, 13 nt, Human
guauaaauaggag

SEQ ID NO: 2193083 - RNA, 21 nt, Human
guauaaagcaacuguuaugaa

SEQ ID NO: 2193084 - RNA, 23 nt, Human
guauaaagcaacuguuaugaaau

SEQ ID NO: 2193085 - RNA, 20 nt, Human
guauaaagcaacuguuauga

SEQ ID NO: 2193086 - RNA, 18 nt, Human
guauaaagcaacuguuau

SEQ ID NO: 2193087 - RNA, 16 nt, Human
guauauucauuucaaa

SEQ ID NO: 2193088 - RNA, 19 nt, Human
guaucaaauauuagaugug

SEQ ID NO: 2193089 - RNA, 20 nt, Human
guaucaaauauuagauguga

SEQ ID NO: 2193090 - RNA, 21 nt, Human
guaucaaauauuagaugugau

SEQ ID NO: 2193091 - RNA, 24 nt, Human
guaucaaauauuagaugugauuua

SEQ ID NO: 2193092 - RNA, 22 nt, Human
guauauugauccagaaagaaaa

SEQ ID NO: 2193093 - RNA, 14 nt, Human
guauauucauuuca

SEQ ID NO: 2193094 - RNA, 15 nt, Human
guauauucauauauu

SEQ ID NO: 2193095 - RNA, 12 nt, Human
guauauucacuu

SEQ ID NO: 2193096 - RNA, 15 nt, Human
guauauuauuucuag

SEQ ID NO: 2193097 - RNA, 16 nt, Human
guauauuauguauuua

SEQ ID NO: 2193098 - RNA, 21 nt, Human
guauauuauguauuuauauuu

SEQ ID NO: 2193099 - RNA, 23 nt, Human
guauauuauguauuuauauuuug

SEQ ID NO: 2193100 - RNA, 11 nt, Human
guauauuauuu

SEQ ID NO: 2193101 - RNA, 22 nt, Human
guauauuauuucuaggaagaau

SEQ ID NO: 2193102 - RNA, 20 nt, Human
guauaacacaauaugaauac

SEQ ID NO: 2193103 - RNA, 13 nt, Human
guauaacagguua

SEQ ID NO: 2193104 - RNA, 15 nt, Human
guauaacagguuauu

SEQ ID NO: 2193105 - RNA, 20 nt, Human
guauaacagguuauuuuagu

SEQ ID NO: 2193106 - RNA, 22 nt, Human
guauaacagguuauuuuaguuu

SEQ ID NO: 2193107 - RNA, 23 nt, Human
guauaaauuuauuuacugcuagu

SEQ ID NO: 2193108 - RNA, 14 nt, Human
guauaaauuuauuu

SEQ ID NO: 2193109 - RNA, 13 nt, Human
guauaaauuuauu

SEQ ID NO: 2193110 - RNA, 12 nt, Human
guauaaauuuau

SEQ ID NO: 2193111 - RNA, 20 nt, Human
guauaacuucuuaaaaguug

SEQ ID NO: 2193112 - RNA, 15 nt, Human
guauaaguaagaaaa

SEQ ID NO: 2193113 - RNA, 16 nt, Human
guauaaguaagaaaau

SEQ ID NO: 2193114 - RNA, 17 nt, Human
guauaaguaagaaaaua

SEQ ID NO: 2193115 - RNA, 18 nt, Human
guaucaauccuuguucag

SEQ ID NO: 2193116 - RNA, 20 nt, Human
guaucacugucuuuccuaga

SEQ ID NO: 2193117 - RNA, 18 nt, Human
guaucacugucuuuccua

SEQ ID NO: 2193118 - RNA, 17 nt, Human
guaucacugucuuuccu

SEQ ID NO: 2193119 - RNA, 12 nt, Human
guaucagaggcc

SEQ ID NO: 2193120 - RNA, 14 nt, Human
guaucagaggccua

SEQ ID NO: 2193121 - RNA, 15 nt, Human
guaucagaggccuau

SEQ ID NO: 2193122 - RNA, 16 nt, Human
guaucagaggccuaua

SEQ ID NO: 2193123 - RNA, 21 nt, Human
guaucaggaaauauauaugug

SEQ ID NO: 2193124 - RNA, 17 nt, Human
guaucagaggccuauaa

SEQ ID NO: 2193125 - RNA, 14 nt, Human
guaucaggacccag

SEQ ID NO: 2193126 - RNA, 21 nt, Human
guaucaggacccagaggaagg

SEQ ID NO: 2193127 - RNA, 18 nt, Human
guaucaggacccagagga

SEQ ID NO: 2193128 - RNA, 22 nt, Human
guaucaggacccagaggaaggg

SEQ ID NO: 2193129 - RNA, 14 nt, Human
guauccccccaucu

SEQ ID NO: 2193130 - RNA, 22 nt, Human
guauccucauuugggguagcua

SEQ ID NO: 2193131 - RNA, 20 nt, Human
guauccccccccuguauagu

SEQ ID NO: 2193132 - RNA, 13 nt, Human
guauccuccaggu

SEQ ID NO: 2193133 - RNA, 14 nt, Human
guauccuccagguu

SEQ ID NO: 2193134 - RNA, 15 nt, Human
guauccuccagguuu

SEQ ID NO: 2193135 - RNA, 16 nt, Human
guauccuccagguuuu

SEQ ID NO: 2193136 - RNA, 17 nt, Human
guauccuccagguuuuu

SEQ ID NO: 2193137 - RNA, 19 nt, Human
guauccuccagguuuuuca

SEQ ID NO: 2193138 - RNA, 22 nt, Human
guaugaucacggcucacugcag

SEQ ID NO: 2193139 - RNA, 15 nt, Human
guaucccuacuguaa

SEQ ID NO: 2193140 - RNA, 17 nt, Human
guauccccccaucuugc

SEQ ID NO: 2193141 - RNA, 18 nt, Human
guauccccccaucuugcu

SEQ ID NO: 2193142 - RNA, 18 nt, Human
guaucccuguuacugaua

SEQ ID NO: 2193143 - RNA, 17 nt, Human
guauggaauacaguguu

SEQ ID NO: 2193144 - RNA, 19 nt, Human
guauggaauacaauguaau

SEQ ID NO: 2193145 - RNA, 18 nt, Human
guauggacuaucugucug

SEQ ID NO: 2193146 - RNA, 18 nt, Human
guauggaauacaguguua

SEQ ID NO: 2193147 - RNA, 13 nt, Human
guauggagcucag

SEQ ID NO: 2193148 - RNA, 18 nt, Human
guauggagagaaaacaga

SEQ ID NO: 2193149 - RNA, 18 nt, Human
guauggagcucagagagg

SEQ ID NO: 2193150 - RNA, 15 nt, Human
guauggagcucagag

SEQ ID NO: 2193151 - RNA, 22 nt, Human
guauggcacuggcauugucccu

SEQ ID NO: 2193152 - RNA, 14 nt, Human
guaugggagagaag

SEQ ID NO: 2193153 - RNA, 21 nt, Human
guauccuccagguuuuucaau

SEQ ID NO: 2193154 - RNA, 20 nt, Human
guauccuccagguuuuucaa

SEQ ID NO: 2193155 - RNA, 13 nt, Human
guaugauguguug

SEQ ID NO: 2193156 - RNA, 16 nt, Human
guaugauguguuguga

SEQ ID NO: 2193157 - RNA, 17 nt, Human
guaugauguguugugau

SEQ ID NO: 2193158 - RNA, 14 nt, Human
guaugauucccagc

SEQ ID NO: 2193159 - RNA, 13 nt, Human
guauggaaauaaa

SEQ ID NO: 2193160 - RNA, 12 nt, Human
guaugcauguga

SEQ ID NO: 2193161 - RNA, 15 nt, Human
guaugcaugugaaga

SEQ ID NO: 2193162 - RNA, 16 nt, Human
guaugcuuugaaugua

SEQ ID NO: 2193163 - RNA, 16 nt, Human
guaugugcacugucac

SEQ ID NO: 2193164 - RNA, 15 nt, Human
guauguggaagugug

SEQ ID NO: 2193165 - RNA, 17 nt, Human
guauguggaaguguggg

SEQ ID NO: 2193166 - RNA, 16 nt, Human
guauguggaagugugg

SEQ ID NO: 2193167 - RNA, 20 nt, Human
guaugugggggucugugugu

SEQ ID NO: 2193168 - RNA, 19 nt, Human
guaugugggggucugugug

SEQ ID NO: 2193169 - RNA, 21 nt, Human
guauguggaagugugggucug

SEQ ID NO: 2193170 - RNA, 18 nt, Human
guauguggaagugugggu

SEQ ID NO: 2193171 - RNA, 15 nt, Human
guauggguguguguu

SEQ ID NO: 2193172 - RNA, 21 nt, Human
guauggguuagggaaaacauu

SEQ ID NO: 2193173 - RNA, 16 nt, Human
guaugggacuggccuc

SEQ ID NO: 2193174 - RNA, 15 nt, Human
guaugggagagaaga

SEQ ID NO: 2193175 - RNA, 14 nt, Human
guaugggcaaaaaa

SEQ ID NO: 2193176 - RNA, 13 nt, Human
guaugucuccagu

SEQ ID NO: 2193177 - RNA, 13 nt, Human
guaugguggcugg

SEQ ID NO: 2193178 - RNA, 15 nt, Human
guauucuuauuuaau

SEQ ID NO: 2193179 - RNA, 16 nt, Human
guauucuucucuuccu

SEQ ID NO: 2193180 - RNA, 22 nt, Human
guauucuucucuuccuuuuauc

SEQ ID NO: 2193181 - RNA, 15 nt, Human
guauugcaucuguau

SEQ ID NO: 2193182 - RNA, 23 nt, Human
guauugcaucuguauaaguaaga

SEQ ID NO: 2193183 - RNA, 18 nt, Human
guauugcacauuguaaaa

SEQ ID NO: 2193184 - RNA, 21 nt, Human
guauugcacauuguaaaaagu

SEQ ID NO: 2193185 - RNA, 15 nt, Human
guauucuucaaccuc

SEQ ID NO: 2193186 - RNA, 13 nt, Human
guauugcacauug

SEQ ID NO: 2193187 - RNA, 14 nt, Human
guauugcacauugu

SEQ ID NO: 2193188 - RNA, 16 nt, Human
guauugcacauuguaa

SEQ ID NO: 2193189 - RNA, 19 nt, Human
guauucucugagcugugca

SEQ ID NO: 2193190 - RNA, 13 nt, Human
guauucucugagc

SEQ ID NO: 2193191 - RNA, 12 nt, Human
guauucucugag

SEQ ID NO: 2193192 - RNA, 11 nt, Human
guauucucuga

SEQ ID NO: 2193193 - RNA, 21 nt, Human
guauguguacgugugugugcg

SEQ ID NO: 2193194 - RNA, 20 nt, Human
aaauuacucaggaagaacac

SEQ ID NO: 2193195 - RNA, 21 nt, Human
aaauuacuuaucauccacauu

SEQ ID NO: 2193196 - RNA, 15 nt, Human
aaauuacuacaaaau

SEQ ID NO: 2193197 - RNA, 19 nt, Human
aaauuaccagaguuguucu

SEQ ID NO: 2193198 - RNA, 23 nt, Human
aaauuaacuuuuauaaacuuuac

SEQ ID NO: 2193199 - RNA, 22 nt, Human
aaauuaacuuuuauaaacuuua

SEQ ID NO: 2193200 - RNA, 20 nt, Human
aaauguuaaguugaugguga

SEQ ID NO: 2193201 - RNA, 19 nt, Human
aaauuaacuuuuauaaacu

SEQ ID NO: 2193202 - RNA, 15 nt, Human
aaauguuauuuaaca

SEQ ID NO: 2193203 - RNA, 21 nt, Human
aaauuaacuuuuauaaacuuu

SEQ ID NO: 2193204 - RNA, 13 nt, Human
guauuuaauuuug

SEQ ID NO: 2193205 - RNA, 16 nt, Human
aaauguuaaaauguau

SEQ ID NO: 2193206 - RNA, 16 nt, Human
guauuuaauuuugaca

SEQ ID NO: 2193207 - RNA, 16 nt, Human
guauuuaauucauguu

SEQ ID NO: 2193208 - RNA, 18 nt, Human
guauuuaauuagugcuaa

SEQ ID NO: 2193209 - RNA, 19 nt, Human
guauuuaauuagugcuaag

SEQ ID NO: 2193210 - RNA, 20 nt, Human
guauuuaauuagugcuaagu

SEQ ID NO: 2193211 - RNA, 21 nt, Human
guauuuaauuagugcuaagug

SEQ ID NO: 2193212 - RNA, 15 nt, Human
guauuggccuggagg

SEQ ID NO: 2193213 - RNA, 12 nt, Human
guauuuaauuag

SEQ ID NO: 2193214 - RNA, 12 nt, Human
guauuggccugg

SEQ ID NO: 2193215 - RNA, 14 nt, Human
guauuggccuggag

SEQ ID NO: 2193216 - RNA, 22 nt, Human
guauuggcuagagguucaaaga

SEQ ID NO: 2193217 - RNA, 20 nt, Human
aaauucagauauauuuuuca

SEQ ID NO: 2193218 - RNA, 21 nt, Human
aaauucaaaaaguguuuauuu

SEQ ID NO: 2193219 - RNA, 16 nt, Human
aaauucacuauuggcu

SEQ ID NO: 2193220 - RNA, 18 nt, Human
aaauucacuauuggcugg

SEQ ID NO: 2193221 - RNA, 14 nt, Human
aaauucaugcugcu

SEQ ID NO: 2193222 - RNA, 22 nt, Human
aaauucacccccuuuccuggac

SEQ ID NO: 2193223 - RNA, 17 nt, Human
aaauuauuuuaaacaaa

SEQ ID NO: 2193224 - RNA, 14 nt, Human
aaauucaaaaagug

SEQ ID NO: 2193225 - RNA, 15 nt, Human
aaauucccuggccuu

SEQ ID NO: 2193226 - RNA, 22 nt, Human
aaauucauuuuuuucacuggag

SEQ ID NO: 2193227 - RNA, 18 nt, Human
aaauucccuggccuuuca

SEQ ID NO: 2193228 - RNA, 16 nt, Human
aaauucccuucaucug

SEQ ID NO: 2193229 - RNA, 19 nt, Human
aaauucccuucaucuggaa

SEQ ID NO: 2193230 - RNA, 17 nt, Human
aaauucaguccuaagaa

SEQ ID NO: 2193231 - RNA, 16 nt, Human
aaauucauauucuguc

SEQ ID NO: 2193232 - RNA, 21 nt, Human
aaauucaucaaauggaagaca

SEQ ID NO: 2193233 - RNA, 13 nt, Human
aaauucauuuuuu

SEQ ID NO: 2193234 - RNA, 12 nt, Human
aaauucauuuua

SEQ ID NO: 2193235 - RNA, 16 nt, Human
aaauuauuuuggauuu

SEQ ID NO: 2193236 - RNA, 15 nt, Human
aaauuauuuuaaaca

SEQ ID NO: 2193237 - RNA, 16 nt, Human
aaauuauuuuaaacaa

SEQ ID NO: 2193238 - RNA, 22 nt, Human
aaauuauuuguguaauagaaaa

SEQ ID NO: 2193239 - RNA, 23 nt, Human
aaauuauuuguguaauagaaaac

SEQ ID NO: 2193240 - RNA, 15 nt, Human
aaauuauaucaauuu

SEQ ID NO: 2193241 - RNA, 20 nt, Human
aaauuagaaaauguuauuua

SEQ ID NO: 2193242 - RNA, 11 nt, Human
aaauuagaaaa

SEQ ID NO: 2193243 - RNA, 23 nt, Human
aaauuagaaaccuuaauaugugg

SEQ ID NO: 2193244 - RNA, 12 nt, Human
aaauuagaaaau

SEQ ID NO: 2193245 - RNA, 14 nt, Human
aaauuacuuuguga

SEQ ID NO: 2193246 - RNA, 17 nt, Human
aaauuacuuugugaaua

SEQ ID NO: 2193247 - RNA, 14 nt, Human
aaauuagaugaacu

SEQ ID NO: 2193248 - RNA, 20 nt, Human
aaauuauagaugggaaugaa

SEQ ID NO: 2193249 - RNA, 22 nt, Human
aaauuuccccaacagugugaag

SEQ ID NO: 2193250 - RNA, 23 nt, Human
aaauuuccccaacagugugaagu

SEQ ID NO: 2193251 - RNA, 23 nt, Human
guauuuuuuuaucuugggacugg

SEQ ID NO: 2193252 - RNA, 20 nt, Human
gucaaaaaguuugguucugu

SEQ ID NO: 2193253 - RNA, 18 nt, Human
guauuuuuuuuucuaaga

SEQ ID NO: 2193254 - RNA, 22 nt, Human
guauuuuuuuuucuaagagaag

SEQ ID NO: 2193255 - RNA, 14 nt, Human
guauuuuuuugcaa

SEQ ID NO: 2193256 - RNA, 16 nt, Human
guauuuuuuugcaagu

SEQ ID NO: 2193257 - RNA, 17 nt, Human
guauuuuuuugcaagug

SEQ ID NO: 2193258 - RNA, 16 nt, Human
guauuuuuuuuucuaa

SEQ ID NO: 2193259 - RNA, 21 nt, Human
guauuuuuuuacuaauagaca

SEQ ID NO: 2193260 - RNA, 17 nt, Human
guauuuuuuuacuaaua

SEQ ID NO: 2193261 - RNA, 19 nt, Human
gucaaaguggugagaggca

SEQ ID NO: 2193262 - RNA, 12 nt, Human
gucaaauaaaca

SEQ ID NO: 2193263 - RNA, 13 nt, Human
gucaaauaaacac

SEQ ID NO: 2193264 - RNA, 14 nt, Human
gucaaauaaacacu

SEQ ID NO: 2193265 - RNA, 15 nt, Human
gucaaauaaacacug

SEQ ID NO: 2193266 - RNA, 17 nt, Human
gucaaauaaacacugug

SEQ ID NO: 2193267 - RNA, 18 nt, Human
gucaaaguggugagaggc

SEQ ID NO: 2193268 - RNA, 23 nt, Human
gucaaaaaguuugguucuguguc

SEQ ID NO: 2193269 - RNA, 15 nt, Human
gucaaauuauguauu

SEQ ID NO: 2193270 - RNA, 22 nt, Human
gucaaaugguaggcauuuccua

SEQ ID NO: 2193271 - RNA, 16 nt, Human
gucaaauugugugaaa

SEQ ID NO: 2193272 - RNA, 13 nt, Human
gucaaccuccugg

SEQ ID NO: 2193273 - RNA, 19 nt, Human
gucaaccugggcaaagccu

SEQ ID NO: 2193274 - RNA, 14 nt, Human
gucaaccugggcaa

SEQ ID NO: 2193275 - RNA, 14 nt, Human
gucaaccuccugga

SEQ ID NO: 2193276 - RNA, 15 nt, Human
gucaaccuccuggac

SEQ ID NO: 2193277 - RNA, 17 nt, Human
gucacaagagcccagca

SEQ ID NO: 2193278 - RNA, 13 nt, Human
gucacacacugau

SEQ ID NO: 2193279 - RNA, 17 nt, Human
gucaacuucaacauuua

SEQ ID NO: 2193280 - RNA, 16 nt, Human
gucaaccuccuggaca

SEQ ID NO: 2193281 - RNA, 21 nt, Human
gucacaaauccuaaaagaagc

SEQ ID NO: 2193282 - RNA, 16 nt, Human
gucacacacuuuggcu

SEQ ID NO: 2193283 - RNA, 20 nt, Human
gucacacaguauuacuucug

SEQ ID NO: 2193284 - RNA, 16 nt, Human
aaauuuccaguaccuu

SEQ ID NO: 2193285 - RNA, 12 nt, Human
aaauuucagauu

SEQ ID NO: 2193286 - RNA, 19 nt, Human
aaauuuccagugagcuuau

SEQ ID NO: 2193287 - RNA, 16 nt, Human
aaauuuccccaacagu

SEQ ID NO: 2193288 - RNA, 23 nt, Human
aaauuuccaguaccuuugucaca

SEQ ID NO: 2193289 - RNA, 22 nt, Human
aaauuuccaguaccuuugucac

SEQ ID NO: 2193290 - RNA, 17 nt, Human
aaauuuccccaacagug

SEQ ID NO: 2193291 - RNA, 18 nt, Human
aaauuuccccaacagugu

SEQ ID NO: 2193292 - RNA, 19 nt, Human
aaauuuccccaacagugug

SEQ ID NO: 2193293 - RNA, 20 nt, Human
aaauuuccccaacaguguga

SEQ ID NO: 2193294 - RNA, 18 nt, Human
aaauuuaguuuuuguucu

SEQ ID NO: 2193295 - RNA, 20 nt, Human
aaauuuauacaccaauugau

SEQ ID NO: 2193296 - RNA, 15 nt, Human
aaauuuaguuuuugu

SEQ ID NO: 2193297 - RNA, 15 nt, Human
guauuuuuuuacuaa

SEQ ID NO: 2193298 - RNA, 14 nt, Human
guauuuuuuuacua

SEQ ID NO: 2193299 - RNA, 15 nt, Human
aaauuccuauuguga

SEQ ID NO: 2193300 - RNA, 18 nt, Human
aaauucccuucaucugga

SEQ ID NO: 2193301 - RNA, 16 nt, Human
aaauuccuauugugau

SEQ ID NO: 2193302 - RNA, 17 nt, Human
aaauuccuauugugauu

SEQ ID NO: 2193303 - RNA, 18 nt, Human
aaauuccuauugugauuu

SEQ ID NO: 2193304 - RNA, 22 nt, Human
aaauuccuauugugauuugacu

SEQ ID NO: 2193305 - RNA, 18 nt, Human
aaauuuaauucauguuuc

SEQ ID NO: 2193306 - RNA, 17 nt, Human
aaauuuaauucauguuu

SEQ ID NO: 2193307 - RNA, 19 nt, Human
aaauuccucuuugcuuugc

SEQ ID NO: 2193308 - RNA, 18 nt, Human
aaauuccucuuugcuuug

SEQ ID NO: 2193309 - RNA, 14 nt, Human
aaauuccucuuugc

SEQ ID NO: 2193310 - RNA, 23 nt, Human
aaauuccuauugugauuugacug

SEQ ID NO: 2193311 - RNA, 18 nt, Human
aaauuucagcagcugcag

SEQ ID NO: 2193312 - RNA, 17 nt, Human
aaauuucagcagcugca

SEQ ID NO: 2193313 - RNA, 15 nt, Human
aaaacaccuagcuuu

SEQ ID NO: 2193314 - RNA, 17 nt, Human
aaaacacauuuuucuua

SEQ ID NO: 2193315 - RNA, 14 nt, Human
aaaacacuaguuuu

SEQ ID NO: 2193316 - RNA, 18 nt, Human
aaaacacugccaucuuag

SEQ ID NO: 2193317 - RNA, 13 nt, Human
aaaacagaagccu

SEQ ID NO: 2193318 - RNA, 17 nt, Human
aaaacagacacuggcau

SEQ ID NO: 2193319 - RNA, 18 nt, Human
aaaacagaacaucauuag

SEQ ID NO: 2193320 - RNA, 21 nt, Human
aaaacagaacaucauuagaac

SEQ ID NO: 2193321 - RNA, 22 nt, Human
aaaacagaacaucauuagaaca

SEQ ID NO: 2193322 - RNA, 22 nt, Human
aaaacaccuagcuuuauucuuc

SEQ ID NO: 2193323 - RNA, 21 nt, Human
aaaacacuaaaaauaaaaaug

SEQ ID NO: 2193324 - RNA, 13 nt, Human
aaaacacugugca

SEQ ID NO: 2193325 - RNA, 19 nt, Human
aaaacacuguucucugccc

SEQ ID NO: 2193326 - RNA, 20 nt, Human
aaaacuuuuuauauuuuaua

SEQ ID NO: 2193327 - RNA, 17 nt, Human
aaaacuuuuuauauuuu

SEQ ID NO: 2193328 - RNA, 15 nt, Human
aaaacuuuucucaga

SEQ ID NO: 2193329 - RNA, 12 nt, Human
aaaagaaaaaaa

SEQ ID NO: 2193330 - RNA, 11 nt, Human
aaaagaaaaaa

SEQ ID NO: 2193331 - RNA, 9 nt, Human
aaaagaaaa

SEQ ID NO: 2193332 - RNA, 11 nt, Human
aaaagaaaaag

SEQ ID NO: 2193333 - RNA, 19 nt, Human
aaaagaaaaaaaaagaaaa

SEQ ID NO: 2193334 - RNA, 18 nt, Human
aaaagaaaaaaaaagaaa

SEQ ID NO: 2193335 - RNA, 17 nt, Human
aaaagaaaaaaaaagaa

SEQ ID NO: 2193336 - RNA, 16 nt, Human
aaaagaaaaaaaaaga

SEQ ID NO: 2193337 - RNA, 11 nt, Human
aaaacuuugga

SEQ ID NO: 2193338 - RNA, 13 nt, Human
aaaacuuuucuca

SEQ ID NO: 2193339 - RNA, 18 nt, Human
aaaacagccucacagaag

SEQ ID NO: 2193340 - RNA, 20 nt, Human
aaaacagcauugcuuucuga

SEQ ID NO: 2193341 - RNA, 16 nt, Human
aaaacagcauugcuuu

SEQ ID NO: 2193342 - RNA, 15 nt, Human
aaaacagacucaggu

SEQ ID NO: 2193343 - RNA, 13 nt, Human
aaaagacagggcu

SEQ ID NO: 2193344 - RNA, 13 nt, Human
aaaagaccagacu

SEQ ID NO: 2193345 - RNA, 13 nt, Human
aaaagacuccaaa

SEQ ID NO: 2193346 - RNA, 16 nt, Human
aaaagaaugggcaguu

SEQ ID NO: 2193347 - RNA, 20 nt, Human
aaaagaaugggcaguuacau

SEQ ID NO: 2193348 - RNA, 13 nt, Human
aaaagacaauucu

SEQ ID NO: 2193349 - RNA, 14 nt, Human
aaaagacaauucuu

SEQ ID NO: 2193350 - RNA, 19 nt, Human
aaaagacaauucuuuauac

SEQ ID NO: 2193351 - RNA, 11 nt, Human
aaaagaaugau

SEQ ID NO: 2193352 - RNA, 16 nt, Human
aaaagaauacagaaag

SEQ ID NO: 2193353 - RNA, 13 nt, Human
aaaagaaggaaaa

SEQ ID NO: 2193354 - RNA, 13 nt, Human
aaaagaauauuuu

SEQ ID NO: 2193355 - RNA, 20 nt, Human
aaaagacaaggaaaaaauaa

SEQ ID NO: 2193356 - RNA, 17 nt, Human
aaaagaacaauauugac

SEQ ID NO: 2193357 - RNA, 10 nt, Human
aaaagaaagc

SEQ ID NO: 2193358 - RNA, 17 nt, Human
aaaagaacacuagaguc

SEQ ID NO: 2193359 - RNA, 16 nt, Human
aaaagaacaguaaaca

SEQ ID NO: 2193360 - RNA, 11 nt, Human
aaaagaaggaa

SEQ ID NO: 2193361 - RNA, 12 nt, Human
aaaagaauauuu

SEQ ID NO: 2193362 - RNA, 22 nt, Human
aaaagaaaaaaaaagaaaaaag

SEQ ID NO: 2193363 - RNA, 14 nt, Human
aaaagaaaauaaaa

SEQ ID NO: 2193364 - RNA, 16 nt, Human
aaaagaaaagucaagg

SEQ ID NO: 2193365 - RNA, 15 nt, Human
aaaagaaaauaaaaa

SEQ ID NO: 2193366 - RNA, 17 nt, Human
aaaagaaagaaaaucag

SEQ ID NO: 2193367 - RNA, 15 nt, Human
aaaagaggggcuggg

SEQ ID NO: 2193368 - RNA, 12 nt, Human
aaaagagggggg

SEQ ID NO: 2193369 - RNA, 14 nt, Human
aaaagagauuucaa

SEQ ID NO: 2193370 - RNA, 22 nt, Human
aaaagaggaaagaaugaaagag

SEQ ID NO: 2193371 - RNA, 21 nt, Human
aaaagagauauuuuaaaauga

SEQ ID NO: 2193372 - RNA, 19 nt, Human
aaaagagauggccugagaa

SEQ ID NO: 2193373 - RNA, 16 nt, Human
aaaagagauuucaaga

SEQ ID NO: 2193374 - RNA, 22 nt, Human
aaaagagguuuuucuuaaauaa

SEQ ID NO: 2193375 - RNA, 21 nt, Human
aaaagagguuuuucuuaaaua

SEQ ID NO: 2193376 - RNA, 17 nt, Human
aaaagagguuuuucuua

SEQ ID NO: 2193377 - RNA, 13 nt, Human
aaaagauaaagau

SEQ ID NO: 2193378 - RNA, 14 nt, Human
aaaagauaaauauu

SEQ ID NO: 2193379 - RNA, 14 nt, Human
aaaagauaaagaug

SEQ ID NO: 2193380 - RNA, 17 nt, Human
aaaagauaaagaugauc

SEQ ID NO: 2193381 - RNA, 18 nt, Human
aaaagauaaagaugaucu

SEQ ID NO: 2193382 - RNA, 20 nt, Human
aaaagauaaagaugaucuac

SEQ ID NO: 2193383 - RNA, 16 nt, Human
aaaagacucaguguuc

SEQ ID NO: 2193384 - RNA, 16 nt, Human
aaaagagaaaagaaaa

SEQ ID NO: 2193385 - RNA, 14 nt, Human
aaaagagaaaagaa

SEQ ID NO: 2193386 - RNA, 13 nt, Human
aaaagagaaaaga

SEQ ID NO: 2193387 - RNA, 19 nt, Human
aaaagagaugaugaaaaua

SEQ ID NO: 2193388 - RNA, 16 nt, Human
aaaagagaugaugaaa

SEQ ID NO: 2193389 - RNA, 19 nt, Human
aaaagagagaaaacuuauu

SEQ ID NO: 2193390 - RNA, 21 nt, Human
aaaagagagaaaacuuauuug

SEQ ID NO: 2193391 - RNA, 14 nt, Human
aaaagagauauuuu

SEQ ID NO: 2193392 - RNA, 16 nt, Human
aaaagagauauuuuaa

SEQ ID NO: 2193393 - RNA, 13 nt, Human
aaaagaucgcagu

SEQ ID NO: 2193394 - RNA, 16 nt, Human
aaaagauccuuuuuaa

SEQ ID NO: 2193395 - RNA, 11 nt, Human
aaaagauauau

SEQ ID NO: 2193396 - RNA, 16 nt, Human
aaaagauauauuaaaa

SEQ ID NO: 2193397 - RNA, 21 nt, Human
aaaagauauauuaaaaauaua

SEQ ID NO: 2193398 - RNA, 22 nt, Human
aaaagauauauuaaaaauauaa

SEQ ID NO: 2193399 - RNA, 15 nt, Human
aaaagauauaagugc

SEQ ID NO: 2193400 - RNA, 18 nt, Human
aaaagauauaagugcugu

SEQ ID NO: 2193401 - RNA, 19 nt, Human
aaaagauauaagugcugua

SEQ ID NO: 2193402 - RNA, 23 nt, Human
aaaagauauaagugcuguauaaa

SEQ ID NO: 2193403 - RNA, 17 nt, Human
aaaagauaaauauuaua

SEQ ID NO: 2193404 - RNA, 20 nt, Human
aaaagauacgacuuuauuuu

SEQ ID NO: 2193405 - RNA, 12 nt, Human
aaaagauauaag

SEQ ID NO: 2193406 - RNA, 13 nt, Human
aaaagauauaagu

SEQ ID NO: 2193407 - RNA, 14 nt, Human
aaaagauauaagug

SEQ ID NO: 2193408 - RNA, 23 nt, Human
aaaagaucuguuuugaaggcaaa

SEQ ID NO: 2193409 - RNA, 19 nt, Human
aaaagucagacugcuggga

SEQ ID NO: 2193410 - RNA, 15 nt, Human
aaaagucaaaaggug

SEQ ID NO: 2193411 - RNA, 19 nt, Human
aaaagucuucacucucuga

SEQ ID NO: 2193412 - RNA, 23 nt, Human
aaaagucuucacucucugaagau

SEQ ID NO: 2193413 - RNA, 21 nt, Human
aaaagugaucaauaaaaugug

SEQ ID NO: 2193414 - RNA, 13 nt, Human
aaaagugacacag

SEQ ID NO: 2193415 - RNA, 14 nt, Human
aaaagugacacagc

SEQ ID NO: 2193416 - RNA, 15 nt, Human
aaaagugacacagca

SEQ ID NO: 2193417 - RNA, 17 nt, Human
aaaagugacacagcagc

SEQ ID NO: 2193418 - RNA, 23 nt, Human
aaaaguuggguuuucuccauuca

SEQ ID NO: 2193419 - RNA, 14 nt, Human
aaaauaaaacuuuu

SEQ ID NO: 2193420 - RNA, 18 nt, Human
aaaauaaaaauaaauuca

SEQ ID NO: 2193421 - RNA, 13 nt, Human
aaaauaaaacauu

SEQ ID NO: 2193422 - RNA, 14 nt, Human
aaaauaaaacauuu

SEQ ID NO: 2193423 - RNA, 15 nt, Human
aaaauaaaacauuuu

SEQ ID NO: 2193424 - RNA, 16 nt, Human
aaaauaaaacauuuua

SEQ ID NO: 2193425 - RNA, 22 nt, Human
aaaauaaaacauuuuaaaugga

SEQ ID NO: 2193426 - RNA, 15 nt, Human
aaaauaaaaaguuaa

SEQ ID NO: 2193427 - RNA, 13 nt, Human
aaaauaaaaaugg

SEQ ID NO: 2193428 - RNA, 19 nt, Human
aaaauaaaaaguuaaaaag

SEQ ID NO: 2193429 - RNA, 16 nt, Human
aaaauaaaaaguuaaa

SEQ ID NO: 2193430 - RNA, 21 nt, Human
aaaaucagccugcuccagcug

SEQ ID NO: 2193431 - RNA, 17 nt, Human
aaaaucagccugcucca

SEQ ID NO: 2193432 - RNA, 13 nt, Human
aaaaucagccugc

SEQ ID NO: 2193433 - RNA, 16 nt, Human
aaaauaaaacuuuuua

SEQ ID NO: 2193434 - RNA, 24 nt, Human
aaaaucagccaauuauguuaaacu

SEQ ID NO: 2193435 - RNA, 22 nt, Human
aaaaucagccaauuauguuaaa

SEQ ID NO: 2193436 - RNA, 10 nt, Human
aaaaucauuu

SEQ ID NO: 2193437 - RNA, 12 nt, Human
aaaaucauuucu

SEQ ID NO: 2193438 - RNA, 11 nt, Human
aaaaucauuuc

SEQ ID NO: 2193439 - RNA, 20 nt, Human
aaaaucuauuuuguaacuuu

SEQ ID NO: 2193440 - RNA, 17 nt, Human
aaaaucuaccuucugua

SEQ ID NO: 2193441 - RNA, 18 nt, Human
aaaaucuaccuucuguag

SEQ ID NO: 2193442 - RNA, 20 nt, Human
aaaaucuaccuucuguaguu

SEQ ID NO: 2193443 - RNA, 21 nt, Human
aaaaucuaccuucuguaguuu

SEQ ID NO: 2193444 - RNA, 21 nt, Human
aaaaucauuucugcaucagcu

SEQ ID NO: 2193445 - RNA, 16 nt, Human
aaaaucucaaauuucu

SEQ ID NO: 2193446 - RNA, 15 nt, Human
aaaaucucaaauuuc

SEQ ID NO: 2193447 - RNA, 18 nt, Human
aaaaucucaaauuucuaa

SEQ ID NO: 2193448 - RNA, 19 nt, Human
aaaccaguguagccuugcc

SEQ ID NO: 2193449 - RNA, 19 nt, Human
aaaccaguguuagggaagg

SEQ ID NO: 2193450 - RNA, 15 nt, Human
aaacccaauccaaau

SEQ ID NO: 2193451 - RNA, 13 nt, Human
aaaccauaaacuu

SEQ ID NO: 2193452 - RNA, 15 nt, Human
aaaccauaaacuuca

SEQ ID NO: 2193453 - RNA, 12 nt, Human
aaaccagggagc

SEQ ID NO: 2193454 - RNA, 16 nt, Human
aaacucuuaucucagu

SEQ ID NO: 2193455 - RNA, 20 nt, Human
aaacucuguugcaagugcaa

SEQ ID NO: 2193456 - RNA, 13 nt, Human
aaacucuuaucuc

SEQ ID NO: 2193457 - RNA, 15 nt, Human
aaacucuuaucucag

SEQ ID NO: 2193458 - RNA, 15 nt, Human
aaacugcacugucaa

SEQ ID NO: 2193459 - RNA, 11 nt, Human
aaagaaaaaaa

SEQ ID NO: 2193460 - RNA, 9 nt, Human
aaagaaaaa

SEQ ID NO: 2193461 - RNA, 23 nt, Human
aaacucuuaaaacccaagugccu

SEQ ID NO: 2193462 - RNA, 12 nt, Human
aaacucuuaaaa

SEQ ID NO: 2193463 - RNA, 22 nt, Human
aaacugauuuuuuuuuccuuca

SEQ ID NO: 2193464 - RNA, 23 nt, Human
aaacugauuuuuuuuuccuucag

SEQ ID NO: 2193465 - RNA, 11 nt, Human
aaacccagaga

SEQ ID NO: 2193466 - RNA, 15 nt, Human
aaacccagacugaac

SEQ ID NO: 2193467 - RNA, 12 nt, Human
aaacccagagag

SEQ ID NO: 2193468 - RNA, 23 nt, Human
aaaccgccagcgaacuugacaau

SEQ ID NO: 2193469 - RNA, 19 nt, Human
aaacucuguugcaagugca

SEQ ID NO: 2193470 - RNA, 16 nt, Human
aaaccgccaaggcugg

SEQ ID NO: 2193471 - RNA, 15 nt, Human
aaaccgccaaggcug

SEQ ID NO: 2193472 - RNA, 23 nt, Human
aaacccaccuuguuggagccugc

SEQ ID NO: 2193473 - RNA, 12 nt, Human
aaacccagcucu

SEQ ID NO: 2193474 - RNA, 16 nt, Human
aaacccagcucugguc

SEQ ID NO: 2193475 - RNA, 18 nt, Human
aaagcauuccaacaaagg

SEQ ID NO: 2193476 - RNA, 19 nt, Human
aaagccagugacuccagga

SEQ ID NO: 2193477 - RNA, 17 nt, Human
aaagccagugacuccag

SEQ ID NO: 2193478 - RNA, 15 nt, Human
aaagcccaaaguggu

SEQ ID NO: 2193479 - RNA, 13 nt, Human
aaagccugcaauu

SEQ ID NO: 2193480 - RNA, 16 nt, Human
aaagccucugcugcca

SEQ ID NO: 2193481 - RNA, 13 nt, Human
aaagccucugugu

SEQ ID NO: 2193482 - RNA, 21 nt, Human
aaagccucugugucacuggcu

SEQ ID NO: 2193483 - RNA, 18 nt, Human
aaagccugcaauuucaua

SEQ ID NO: 2193484 - RNA, 24 nt, Human
aaagccucugugucacuggcugcc

SEQ ID NO: 2193485 - RNA, 17 nt, Human
aaagccugggugacauu

SEQ ID NO: 2193486 - RNA, 18 nt, Human
aaagccugggugacauuu

SEQ ID NO: 2193487 - RNA, 13 nt, Human
aaagcaugucuca

SEQ ID NO: 2193488 - RNA, 15 nt, Human
aaagcauguacagug

SEQ ID NO: 2193489 - RNA, 16 nt, Human
aaagcauguacagugu

SEQ ID NO: 2193490 - RNA, 22 nt, Human
aaagcauucaauuuauucaaga

SEQ ID NO: 2193491 - RNA, 21 nt, Human
aaagcauguacaguguucugu

SEQ ID NO: 2193492 - RNA, 12 nt, Human
aaagcauguaca

SEQ ID NO: 2193493 - RNA, 13 nt, Human
aaagcauguacag

SEQ ID NO: 2193494 - RNA, 14 nt, Human
aaagcauguacagu

SEQ ID NO: 2193495 - RNA, 17 nt, Human
aaagcauuguaaaugug

SEQ ID NO: 2193496 - RNA, 15 nt, Human
aaagcauuguaaaug

SEQ ID NO: 2193497 - RNA, 18 nt, Human
aaagaaaaaauaauugau

SEQ ID NO: 2193498 - RNA, 16 nt, Human
aaagauauuuuuaucu

SEQ ID NO: 2193499 - RNA, 20 nt, Human
aaagauauuuugcuuuguga

SEQ ID NO: 2193500 - RNA, 18 nt, Human
aaagaaaaaagagaaaag

SEQ ID NO: 2193501 - RNA, 18 nt, Human
aaagaaaaaaaagaaagc

SEQ ID NO: 2193502 - RNA, 13 nt, Human
aaagaaaaaaaau

SEQ ID NO: 2193503 - RNA, 16 nt, Human
aaagaaaaaaaaagaa

SEQ ID NO: 2193504 - RNA, 17 nt, Human
aaacuuuuuuuugagaa

SEQ ID NO: 2193505 - RNA, 10 nt, Human
aaagaaaaaa

SEQ ID NO: 2193506 - RNA, 13 nt, Human
aaagaucuguuuu

SEQ ID NO: 2193507 - RNA, 21 nt, Human
aaagaucuguccucagccuug

SEQ ID NO: 2193508 - RNA, 16 nt, Human
aaagaucuguuuugaa

SEQ ID NO: 2193509 - RNA, 22 nt, Human
aaacucuuaucucagucaugca

SEQ ID NO: 2193510 - RNA, 20 nt, Human
aaagaucuguccucagccuu

SEQ ID NO: 2193511 - RNA, 19 nt, Human
aaagaucuguccucagccu

SEQ ID NO: 2193512 - RNA, 18 nt, Human
aaagaucuguccucagcc

SEQ ID NO: 2193513 - RNA, 15 nt, Human
aaagaucauguaaaa

SEQ ID NO: 2193514 - RNA, 20 nt, Human
aaagaucaaaauaaaaagug

SEQ ID NO: 2193515 - RNA, 22 nt, Human
aaagaucacuuguuguuuuacu

SEQ ID NO: 2193516 - RNA, 14 nt, Human
aaagaucaaaauaa

SEQ ID NO: 2193517 - RNA, 15 nt, Human
aaagaucaaaauaaa

SEQ ID NO: 2193518 - RNA, 16 nt, Human
aaagaucaaaauaaaa

SEQ ID NO: 2193519 - RNA, 17 nt, Human
aaagaucaaaauaaaaa

SEQ ID NO: 2193520 - RNA, 21 nt, Human
aacaugaagucguugugaggg

SEQ ID NO: 2193521 - RNA, 18 nt, Human
aacaugaggggacauuuu

SEQ ID NO: 2193522 - RNA, 20 nt, Human
aacaugacccuaaaucuuga

SEQ ID NO: 2193523 - RNA, 19 nt, Human
aacauggagaaacccuguc

SEQ ID NO: 2193524 - RNA, 23 nt, Human
aacauggacuuguauauuuguac

SEQ ID NO: 2193525 - RNA, 19 nt, Human
aacauggacuuguauauuu

SEQ ID NO: 2193526 - RNA, 20 nt, Human
aacauggacuuguauauuug

SEQ ID NO: 2193527 - RNA, 21 nt, Human
aacaugaggggacauuuuggu

SEQ ID NO: 2193528 - RNA, 15 nt, Human
aacauggacuuguau

SEQ ID NO: 2193529 - RNA, 16 nt, Human
aacauggacuuguaua

SEQ ID NO: 2193530 - RNA, 18 nt, Human
aacauggacuuguauauu

SEQ ID NO: 2193531 - RNA, 22 nt, Human
aacauggccuuugcuugaaaga

SEQ ID NO: 2193532 - RNA, 21 nt, Human
aacaggcucaauauuccugaa

SEQ ID NO: 2193533 - RNA, 11 nt, Human
aacaucuuuuc

SEQ ID NO: 2193534 - RNA, 15 nt, Human
aacaucuuuucuugc

SEQ ID NO: 2193535 - RNA, 20 nt, Human
aacaggcucaauauuccuga

SEQ ID NO: 2193536 - RNA, 18 nt, Human
aacaggcuacucuccucg

SEQ ID NO: 2193537 - RNA, 12 nt, Human
aacaggcccagc

SEQ ID NO: 2193538 - RNA, 13 nt, Human
aacaggcccagca

SEQ ID NO: 2193539 - RNA, 23 nt, Human
aacaggcccagcauugcugguuc

SEQ ID NO: 2193540 - RNA, 18 nt, Human
aacagccacuacauuacu

SEQ ID NO: 2193541 - RNA, 16 nt, Human
aacagccaacaggugg

SEQ ID NO: 2193542 - RNA, 17 nt, Human
aacagcauugcuuucug

SEQ ID NO: 2193543 - RNA, 15 nt, Human
aacagccaacaggug

SEQ ID NO: 2193544 - RNA, 20 nt, Human
aacagcauugcuuucugaaa

SEQ ID NO: 2193545 - RNA, 16 nt, Human
aacagcauugcuuucu

SEQ ID NO: 2193546 - RNA, 11 nt, Human
aacaggcagau

SEQ ID NO: 2193547 - RNA, 11 nt, Human
aacaggcccag

SEQ ID NO: 2193548 - RNA, 14 nt, Human
aacaggcaagugaa

SEQ ID NO: 2193549 - RNA, 14 nt, Human
aacagccucacaga

SEQ ID NO: 2193550 - RNA, 13 nt, Human
aacagccucacag

SEQ ID NO: 2193551 - RNA, 22 nt, Human
aacagccgucagccaaauguaa

SEQ ID NO: 2193552 - RNA, 21 nt, Human
aacagccgcuccugucugcca

SEQ ID NO: 2193553 - RNA, 20 nt, Human
aacagccgcuccugucugcc

SEQ ID NO: 2193554 - RNA, 23 nt, Human
aaauucuucugaacucaaacuga

SEQ ID NO: 2193555 - RNA, 18 nt, Human
aaauucuugcaaaguauc

SEQ ID NO: 2193556 - RNA, 15 nt, Human
aaauucuugcaaagu

SEQ ID NO: 2193557 - RNA, 23 nt, Human
aaauucuucuccacuuucuagcc

SEQ ID NO: 2193558 - RNA, 22 nt, Human
aacaugguaaacgcugucccua

SEQ ID NO: 2193559 - RNA, 18 nt, Human
aacauggugucuggauuc

SEQ ID NO: 2193560 - RNA, 20 nt, Human
aacaugguuacaaucauugc

SEQ ID NO: 2193561 - RNA, 23 nt, Human
aacaugggguuggcugggcccag

SEQ ID NO: 2193562 - RNA, 20 nt, Human
aacauggagaaacccugucu

SEQ ID NO: 2193563 - RNA, 23 nt, Human
aacauggccuuugcuugaaagaa

SEQ ID NO: 2193564 - RNA, 15 nt, Human
aacccucccucagcc

SEQ ID NO: 2193565 - RNA, 14 nt, Human
aacccucccucagc

SEQ ID NO: 2193566 - RNA, 13 nt, Human
aacccucccucag

SEQ ID NO: 2193567 - RNA, 19 nt, Human
aacccucagagccaccccu

SEQ ID NO: 2193568 - RNA, 12 nt, Human
aacccucagagc

SEQ ID NO: 2193569 - RNA, 19 nt, Human
aacccuccuaucaccuccc

SEQ ID NO: 2193570 - RNA, 23 nt, Human
aacccucccucagccccucuugc

SEQ ID NO: 2193571 - RNA, 21 nt, Human
aacccucccucagccccucuu

SEQ ID NO: 2193572 - RNA, 20 nt, Human
aacccucccucagccccucu

SEQ ID NO: 2193573 - RNA, 19 nt, Human
aacccucccucagccccuc

SEQ ID NO: 2193574 - RNA, 18 nt, Human
aacccucccucagccccu

SEQ ID NO: 2193575 - RNA, 17 nt, Human
aacccucccucagcccc

SEQ ID NO: 2193576 - RNA, 16 nt, Human
aacccucccucagccc

SEQ ID NO: 2193577 - RNA, 23 nt, Human
aaccggggagcccccgccccgcc

SEQ ID NO: 2193578 - RNA, 15 nt, Human
aaccgucaauaggca

SEQ ID NO: 2193579 - RNA, 21 nt, Human
aacccucucaggugaccaaaa

SEQ ID NO: 2193580 - RNA, 21 nt, Human
aacccuccuaucaccuccccu

SEQ ID NO: 2193581 - RNA, 17 nt, Human
aacccugcaaaggacug

SEQ ID NO: 2193582 - RNA, 22 nt, Human
aaccgucuguuaugcugugaca

SEQ ID NO: 2193583 - RNA, 18 nt, Human
aaccgucuguuaugcugu

SEQ ID NO: 2193584 - RNA, 16 nt, Human
aaccgucuguuaugcu

SEQ ID NO: 2193585 - RNA, 15 nt, Human
aaccguuauuauaau

SEQ ID NO: 2193586 - RNA, 20 nt, Human
aaccuaaaauaauugguucu

SEQ ID NO: 2193587 - RNA, 16 nt, Human
aaccuaaaaaagauau

SEQ ID NO: 2193588 - RNA, 21 nt, Human
aaccuaaaauaauugguucuu

SEQ ID NO: 2193589 - RNA, 18 nt, Human
aaccguuuugaagcuacu

SEQ ID NO: 2193590 - RNA, 17 nt, Human
aaccguuuugaagcuac

SEQ ID NO: 2193591 - RNA, 22 nt, Human
aaccguuauuauaauuguauca

SEQ ID NO: 2193592 - RNA, 13 nt, Human
aaccuaaaaaaga

SEQ ID NO: 2193593 - RNA, 14 nt, Human
aaccuaaaaaagau

SEQ ID NO: 2193594 - RNA, 15 nt, Human
aaccuaaaaaagaua

SEQ ID NO: 2193595 - RNA, 18 nt, Human
aaccuuuguuugcaucug

SEQ ID NO: 2193596 - RNA, 16 nt, Human
aaccuuuugagugccu

SEQ ID NO: 2193597 - RNA, 23 nt, Human
aaccuuuugagugccuuacacaa

SEQ ID NO: 2193598 - RNA, 15 nt, Human
aaccuuuuuuaagau

SEQ ID NO: 2193599 - RNA, 12 nt, Human
aaccuuuuuaaa

SEQ ID NO: 2193600 - RNA, 16 nt, Human
aaauauuuugcuaguu

SEQ ID NO: 2193601 - RNA, 12 nt, Human
aaauauuuuguc

SEQ ID NO: 2193602 - RNA, 14 nt, Human
aaauauuuugucua

SEQ ID NO: 2193603 - RNA, 15 nt, Human
aaauauuuugucuaa

SEQ ID NO: 2193604 - RNA, 16 nt, Human
aaauauuuugucuaaa

SEQ ID NO: 2193605 - RNA, 17 nt, Human
aaauauuuugucuaaaa

SEQ ID NO: 2193606 - RNA, 22 nt, Human
aaauauuuugucuaaaaugccu

SEQ ID NO: 2193607 - RNA, 14 nt, Human
aaauauuuuuagua

SEQ ID NO: 2193608 - RNA, 15 nt, Human
aaauauuuuuauaga

SEQ ID NO: 2193609 - RNA, 14 nt, Human
aaauauuuccuuaa

SEQ ID NO: 2193610 - RNA, 12 nt, Human
aaauauuuggag

SEQ ID NO: 2193611 - RNA, 15 nt, Human
aaauauuuguacaua

SEQ ID NO: 2193612 - RNA, 14 nt, Human
aaauauuuguacau

SEQ ID NO: 2193613 - RNA, 22 nt, Human
aaauauuuguacauaguuauuu

SEQ ID NO: 2193614 - RNA, 22 nt, Human
aaauauuuugaaucaauaauau

SEQ ID NO: 2193615 - RNA, 12 nt, Human
aaauauuuccuu

SEQ ID NO: 2193616 - RNA, 14 nt, Human
aaauauuucaagac

SEQ ID NO: 2193617 - RNA, 12 nt, Human
aaauauuucaag

SEQ ID NO: 2193618 - RNA, 13 nt, Human
aaauauuucaaga

SEQ ID NO: 2193619 - RNA, 15 nt, Human
aaauauuuauguaaa

SEQ ID NO: 2193620 - RNA, 15 nt, Human
aaauauuuauuuauu

SEQ ID NO: 2193621 - RNA, 21 nt, Human
aaauauuuauuuuaauaaugu

SEQ ID NO: 2193622 - RNA, 21 nt, Human
aaauauuuacauaugaaauuu

SEQ ID NO: 2193623 - RNA, 16 nt, Human
aaauauuuagcaaaua

SEQ ID NO: 2193624 - RNA, 19 nt, Human
aaauauuuacauaugaaau

SEQ ID NO: 2193625 - RNA, 17 nt, Human
aaauauuuacauaugaa

SEQ ID NO: 2193626 - RNA, 15 nt, Human
aaauauuuacauaug

SEQ ID NO: 2193627 - RNA, 12 nt, Human
aaauauuuaucu

SEQ ID NO: 2193628 - RNA, 19 nt, Human
aaauauuuauaaaacuucu

SEQ ID NO: 2193629 - RNA, 10 nt, Human
aaauauuuau

SEQ ID NO: 2193630 - RNA, 19 nt, Human
aaauagaguuugcuauuag

SEQ ID NO: 2193631 - RNA, 16 nt, Human
aaauagcaauccuaaa

SEQ ID NO: 2193632 - RNA, 21 nt, Human
aaauagauaagaguagaaacu

SEQ ID NO: 2193633 - RNA, 12 nt, Human
aaauauuuaaga

SEQ ID NO: 2193634 - RNA, 21 nt, Human
aaauagcauguauugugucuu

SEQ ID NO: 2193635 - RNA, 16 nt, Human
aaauagcauguauugu

SEQ ID NO: 2193636 - RNA, 18 nt, Human
aaauagcauguauugugu

SEQ ID NO: 2193637 - RNA, 14 nt, Human
aaauagcauguauu

SEQ ID NO: 2193638 - RNA, 15 nt, Human
aaauagcauguauug

SEQ ID NO: 2193639 - RNA, 17 nt, Human
aaauagaguauaugcac

SEQ ID NO: 2193640 - RNA, 19 nt, Human
aaauagaguauaugcacuu

SEQ ID NO: 2193641 - RNA, 22 nt, Human
aaaugcuuuaaaaacuauuuaa

SEQ ID NO: 2193642 - RNA, 18 nt, Human
aaaugcuuuaugcaaacc

SEQ ID NO: 2193643 - RNA, 19 nt, Human
aaaugcuuuaaaaacuauu

SEQ ID NO: 2193644 - RNA, 21 nt, Human
aaaugcuuuaaaaacuauuua

SEQ ID NO: 2193645 - RNA, 13 nt, Human
aaauggauacugg

SEQ ID NO: 2193646 - RNA, 22 nt, Human
aaauggagguccuucugcugga

SEQ ID NO: 2193647 - RNA, 19 nt, Human
aaaugcuuugugugauuga

SEQ ID NO: 2193648 - RNA, 18 nt, Human
aaaugcuuuuuauuucug

SEQ ID NO: 2193649 - RNA, 22 nt, Human
aaaugcugguuuuucaguuuuc

SEQ ID NO: 2193650 - RNA, 21 nt, Human
aaaugcugcgcccuuccccag

SEQ ID NO: 2193651 - RNA, 22 nt, Human
aaauagcauguauugugucuuu

SEQ ID NO: 2193652 - RNA, 19 nt, Human
aaaugcuguaacuuucuga

SEQ ID NO: 2193653 - RNA, 20 nt, Human
aaaugcugcgcccuucccca

SEQ ID NO: 2193654 - RNA, 18 nt, Human
aaaucuuuuagucauuau

SEQ ID NO: 2193655 - RNA, 11 nt, Human
aaaucuuuuac

SEQ ID NO: 2193656 - RNA, 14 nt, Human
aaaucuuuucuauu

SEQ ID NO: 2193657 - RNA, 14 nt, Human
aaaugaaaaaauau

SEQ ID NO: 2193658 - RNA, 17 nt, Human
aaaucucaccccauccc

SEQ ID NO: 2193659 - RNA, 16 nt, Human
aaaucucaauucuucc

SEQ ID NO: 2193660 - RNA, 15 nt, Human
aaaucucagcaauga

SEQ ID NO: 2193661 - RNA, 22 nt, Human
aaaucucagaauuccuuuucua

SEQ ID NO: 2193662 - RNA, 19 nt, Human
aaaucuccaaaauaaaacu

SEQ ID NO: 2193663 - RNA, 22 nt, Human
aaaucuuucuuucuuagaaauu

SEQ ID NO: 2193664 - RNA, 22 nt, Human
aaaucuuuuaaaaauucaaaug

SEQ ID NO: 2193665 - RNA, 23 nt, Human
aaaucuuucuuucuuagaaauuu

SEQ ID NO: 2193666 - RNA, 13 nt, Human
aaaucuuuuugcu

SEQ ID NO: 2193667 - RNA, 14 nt, Human
aaaucuuuuugcuu

SEQ ID NO: 2193668 - RNA, 20 nt, Human
aaauauuuuuuuguagauga

SEQ ID NO: 2193669 - RNA, 21 nt, Human
aaauauuuuuuuguagaugaa

SEQ ID NO: 2193670 - RNA, 12 nt, Human
aaauauuuuugg

SEQ ID NO: 2193671 - RNA, 23 nt, Human
aaauauuuuuauagauuugaccu

SEQ ID NO: 2193672 - RNA, 22 nt, Human
aaauauuuuuggucauuguaau

SEQ ID NO: 2193673 - RNA, 21 nt, Human
aaauauuuuuucuuuucuauu

SEQ ID NO: 2193674 - RNA, 22 nt, Human
aaauauuuuuuauauauacagu

SEQ ID NO: 2193675 - RNA, 17 nt, Human
aaauauuuuuuuguaga

SEQ ID NO: 2193676 - RNA, 18 nt, Human
aaaucucaauauuucaga

SEQ ID NO: 2193677 - RNA, 23 nt, Human
aaaucucaaauuuggauugcuaa

SEQ ID NO: 2193678 - RNA, 16 nt, Human
aaaggauguugguguu

SEQ ID NO: 2193679 - RNA, 18 nt, Human
aaaggauucauguggaau

SEQ ID NO: 2193680 - RNA, 13 nt, Human
aaaggaugugauu

SEQ ID NO: 2193681 - RNA, 23 nt, Human
aaaggaugugauauauaagugua

SEQ ID NO: 2193682 - RNA, 21 nt, Human
aaaggauguaaacagugccug

SEQ ID NO: 2193683 - RNA, 20 nt, Human
aaaggauguaaacagugccu

SEQ ID NO: 2193684 - RNA, 19 nt, Human
aaaggauguaaacagugcc

SEQ ID NO: 2193685 - RNA, 20 nt, Human
aaagccuguuccccucacug

SEQ ID NO: 2193686 - RNA, 14 nt, Human
aaaggaugcacaga

SEQ ID NO: 2193687 - RNA, 12 nt, Human
aaaggaugugau

SEQ ID NO: 2193688 - RNA, 14 nt, Human
aaaggaugugauau

SEQ ID NO: 2193689 - RNA, 17 nt, Human
aaaggaugugauauaua

SEQ ID NO: 2193690 - RNA, 19 nt, Human
aaaggaugugauauauaag

SEQ ID NO: 2193691 - RNA, 20 nt, Human
aaaggaugcccaaagaugca

SEQ ID NO: 2193692 - RNA, 17 nt, Human
aaagccuguauucucaa

SEQ ID NO: 2193693 - RNA, 13 nt, Human
aaagccuguuccc

SEQ ID NO: 2193694 - RNA, 18 nt, Human
aaauguuuuagcaauuua

SEQ ID NO: 2193695 - RNA, 19 nt, Human
aaauguuggauuuauaaau

SEQ ID NO: 2193696 - RNA, 20 nt, Human
aaauguuggauuuauaaaug

SEQ ID NO: 2193697 - RNA, 22 nt, Human
aaauguuggauuuauaaaugcu

SEQ ID NO: 2193698 - RNA, 21 nt, Human
aaauguuggauuuauaaaugc

SEQ ID NO: 2193699 - RNA, 19 nt, Human
aaauguugagaaucccaaa

SEQ ID NO: 2193700 - RNA, 18 nt, Human
aaauguuggauuuauaaa

SEQ ID NO: 2193701 - RNA, 23 nt, Human
aaauguugacaugggacauuugc

SEQ ID NO: 2193702 - RNA, 16 nt, Human
aaauguuuuucugcca

SEQ ID NO: 2193703 - RNA, 17 nt, Human
aaauguuuuucuaugua

SEQ ID NO: 2193704 - RNA, 23 nt, Human
aaauguuuuucugccagggagcu

SEQ ID NO: 2193705 - RNA, 21 nt, Human
aaauguuuuucugccagggag

SEQ ID NO: 2193706 - RNA, 15 nt, Human
aaauucuguuucuug

SEQ ID NO: 2193707 - RNA, 14 nt, Human
aaauucuguuucuu

SEQ ID NO: 2193708 - RNA, 13 nt, Human
aaauguucaucaa

SEQ ID NO: 2193709 - RNA, 16 nt, Human
aaauguucacuuuuga

SEQ ID NO: 2193710 - RNA, 13 nt, Human
aaauguucacuuu

SEQ ID NO: 2193711 - RNA, 21 nt, Human
aaauguucagaagguugcucu

SEQ ID NO: 2193712 - RNA, 15 nt, Human
aaauguucagaaggu

SEQ ID NO: 2193713 - RNA, 17 nt, Human
aaauguucaucaaugaa

SEQ ID NO: 2193714 - RNA, 22 nt, Human
aaauguugacaugggacauuug

SEQ ID NO: 2193715 - RNA, 21 nt, Human
aaauguuauuuuuuaauuauu

SEQ ID NO: 2193716 - RNA, 20 nt, Human
aaauguuauuuuuuaauuau

SEQ ID NO: 2193717 - RNA, 13 nt, Human
aaauggccauuug

SEQ ID NO: 2193718 - RNA, 16 nt, Human
aaauggccauuugcuu

SEQ ID NO: 2193719 - RNA, 15 nt, Human
aagaguccucugaau

SEQ ID NO: 2193720 - RNA, 22 nt, Human
aagaguaguugauguugcauuu

SEQ ID NO: 2193721 - RNA, 23 nt, Human
aagaguaguugauguugcauuuu

SEQ ID NO: 2193722 - RNA, 19 nt, Human
aagaguaguugauguugca

SEQ ID NO: 2193723 - RNA, 16 nt, Human
aagaguaguaauagag

SEQ ID NO: 2193724 - RNA, 20 nt, Human
aagaguaggaagacuuugga

SEQ ID NO: 2193725 - RNA, 23 nt, Human
aagaguguccuaggaguauccuc

SEQ ID NO: 2193726 - RNA, 22 nt, Human
aagaguguagaagcauuccuuc

SEQ ID NO: 2193727 - RNA, 19 nt, Human
aagaguguagaucagagca

SEQ ID NO: 2193728 - RNA, 14 nt, Human
aagaguguagaagc

SEQ ID NO: 2193729 - RNA, 15 nt, Human
aagaguguagaagca

SEQ ID NO: 2193730 - RNA, 16 nt, Human
aagaguguagaagcau

SEQ ID NO: 2193731 - RNA, 18 nt, Human
aagaguguagaagcauuc

SEQ ID NO: 2193732 - RNA, 13 nt, Human
aagaguguacugg

SEQ ID NO: 2193733 - RNA, 14 nt, Human
aagaguguacuggg

SEQ ID NO: 2193734 - RNA, 15 nt, Human
aagaguguacugggg

SEQ ID NO: 2193735 - RNA, 12 nt, Human
aagaguguagaa

SEQ ID NO: 2193736 - RNA, 13 nt, Human
aagaguguagaag

SEQ ID NO: 2193737 - RNA, 23 nt, Human
aagaguucuuaaggauugugaua

SEQ ID NO: 2193738 - RNA, 19 nt, Human
aagaguugagugauagagc

SEQ ID NO: 2193739 - RNA, 23 nt, Human
aagacaauggcuuacuccaggag

SEQ ID NO: 2193740 - RNA, 11 nt, Human
aagacaauucu

SEQ ID NO: 2193741 - RNA, 12 nt, Human
aagacaauucuu

SEQ ID NO: 2193742 - RNA, 15 nt, Human
aagacaauucuuuau

SEQ ID NO: 2193743 - RNA, 19 nt, Human
aagacaauucuuuauacaa

SEQ ID NO: 2193744 - RNA, 20 nt, Human
aagacaaugugaaaagaaaa

SEQ ID NO: 2193745 - RNA, 22 nt, Human
aagacacugaaauauacacaca

SEQ ID NO: 2193746 - RNA, 21 nt, Human
aagacacugaaauauacacac

SEQ ID NO: 2193747 - RNA, 14 nt, Human
aagacacugaaaua

SEQ ID NO: 2193748 - RNA, 13 nt, Human
aagacaccagagc

SEQ ID NO: 2193749 - RNA, 14 nt, Human
aagacaccagagca

SEQ ID NO: 2193750 - RNA, 15 nt, Human
aagacaccagagcag

SEQ ID NO: 2193751 - RNA, 16 nt, Human
aagacaccagagcaga

SEQ ID NO: 2193752 - RNA, 20 nt, Human
aagacaccagagcagaugca

SEQ ID NO: 2193753 - RNA, 21 nt, Human
aagacaccagagcagaugcag

SEQ ID NO: 2193754 - RNA, 22 nt, Human
aagacaccagagcagaugcaga

SEQ ID NO: 2193755 - RNA, 19 nt, Human
aagacaaugugaaaagaaa

SEQ ID NO: 2193756 - RNA, 22 nt, Human
aagacaaugacuuacuguacau

SEQ ID NO: 2193757 - RNA, 21 nt, Human
aagacaacauuaaaacaauau

SEQ ID NO: 2193758 - RNA, 15 nt, Human
aagacaacauuaaaa

SEQ ID NO: 2193759 - RNA, 16 nt, Human
aagacaauccauguaa

SEQ ID NO: 2193760 - RNA, 13 nt, Human
aagacaauauaau

SEQ ID NO: 2193761 - RNA, 13 nt, Human
aagacaagcugca

SEQ ID NO: 2193762 - RNA, 15 nt, Human
aagacaagacuucag

SEQ ID NO: 2193763 - RNA, 16 nt, Human
aagaagacaugaacca

SEQ ID NO: 2193764 - RNA, 17 nt, Human
aagaagacauggagacu

SEQ ID NO: 2193765 - RNA, 13 nt, Human
aagaagacauguu

SEQ ID NO: 2193766 - RNA, 12 nt, Human
aagaagacauga

SEQ ID NO: 2193767 - RNA, 15 nt, Human
aagaagacugcauua

SEQ ID NO: 2193768 - RNA, 16 nt, Human
aagaagaaacgucuau

SEQ ID NO: 2193769 - RNA, 21 nt, Human
aagaagaaaauugcugugccu

SEQ ID NO: 2193770 - RNA, 13 nt, Human
aagaagaagggca

SEQ ID NO: 2193771 - RNA, 15 nt, Human
aagaagaacuugcau

SEQ ID NO: 2193772 - RNA, 21 nt, Human
aagacaaggaaaaaauaacaa

SEQ ID NO: 2193773 - RNA, 20 nt, Human
aagaagacugcauuauauuu

SEQ ID NO: 2193774 - RNA, 21 nt, Human
aagaagaccagacuguggaga

SEQ ID NO: 2193775 - RNA, 14 nt, Human
aagaagacauguuu

SEQ ID NO: 2193776 - RNA, 15 nt, Human
aagaagacauguuuu

SEQ ID NO: 2193777 - RNA, 17 nt, Human
aagaagacauguuuuag

SEQ ID NO: 2193778 - RNA, 19 nt, Human
aagaagaccagacugugga

SEQ ID NO: 2193779 - RNA, 15 nt, Human
aagaacuugcaugga

SEQ ID NO: 2193780 - RNA, 20 nt, Human
aagaacuguguuucaaguuc

SEQ ID NO: 2193781 - RNA, 23 nt, Human
aagaacugcaggcccuggccucc

SEQ ID NO: 2193782 - RNA, 12 nt, Human
aagaacugcuuu

SEQ ID NO: 2193783 - RNA, 18 nt, Human
aagaacugcaggcccugg

SEQ ID NO: 2193784 - RNA, 22 nt, Human
aagaacugcaggcccuggccuc

SEQ ID NO: 2193785 - RNA, 15 nt, Human
aagaacugaaaucau

SEQ ID NO: 2193786 - RNA, 23 nt, Human
aagaacuauaugugaauccucuu

SEQ ID NO: 2193787 - RNA, 11 nt, Human
aagaacugaaa

SEQ ID NO: 2193788 - RNA, 12 nt, Human
aagaacugaaau

SEQ ID NO: 2193789 - RNA, 13 nt, Human
aagaacugaaauc

SEQ ID NO: 2193790 - RNA, 13 nt, Human
aacgcauggagug

SEQ ID NO: 2193791 - RNA, 18 nt, Human
aacgcauggaguguguau

SEQ ID NO: 2193792 - RNA, 22 nt, Human
aacgcauggaguguguauuguu

SEQ ID NO: 2193793 - RNA, 21 nt, Human
aacgcauggaguguguauugu

SEQ ID NO: 2193794 - RNA, 23 nt, Human
aacgcauggaguguguauuguuc

SEQ ID NO: 2193795 - RNA, 18 nt, Human
aacgccuccccugcccca

SEQ ID NO: 2193796 - RNA, 22 nt, Human
aacgccccagauaccagccccu

SEQ ID NO: 2193797 - RNA, 17 nt, Human
aacgccuccccugcccc

SEQ ID NO: 2193798 - RNA, 18 nt, Human
aagaacauggacuuguau

SEQ ID NO: 2193799 - RNA, 19 nt, Human
aagaacauggacuuguaua

SEQ ID NO: 2193800 - RNA, 21 nt, Human
aagaacauggacuuguauauu

SEQ ID NO: 2193801 - RNA, 22 nt, Human
aagaacauggacuuguauauuu

SEQ ID NO: 2193802 - RNA, 12 nt, Human
aacgcagcccug

SEQ ID NO: 2193803 - RNA, 16 nt, Human
aacgcagcccugcuuu

SEQ ID NO: 2193804 - RNA, 20 nt, Human
aacgcaggcccccaggugcc

SEQ ID NO: 2193805 - RNA, 14 nt, Human
aagaacuagcauaa

SEQ ID NO: 2193806 - RNA, 20 nt, Human
aagaacuacaaacaaaauuu

SEQ ID NO: 2193807 - RNA, 21 nt, Human
aagaacuacaaacaaaauuuc

SEQ ID NO: 2193808 - RNA, 18 nt, Human
aagaacggggcucuucuc

SEQ ID NO: 2193809 - RNA, 21 nt, Human
aagaacggggcucuucucauu

SEQ ID NO: 2193810 - RNA, 22 nt, Human
aagaacggggcucuucucauuu

SEQ ID NO: 2193811 - RNA, 23 nt, Human
aagaacggggcucuucucauuuc

SEQ ID NO: 2193812 - RNA, 14 nt, Human
aagaaccuggaacu

SEQ ID NO: 2193813 - RNA, 17 nt, Human
aagaacggggcucuucu

SEQ ID NO: 2193814 - RNA, 20 nt, Human
aagaaccaguccccccaccc

SEQ ID NO: 2193815 - RNA, 17 nt, Human
aagaaccagucccccca

SEQ ID NO: 2193816 - RNA, 11 nt, Human
aagaacaugug

SEQ ID NO: 2193817 - RNA, 22 nt, Human
aagaaccaaaaguuuuccugag

SEQ ID NO: 2193818 - RNA, 12 nt, Human
aagaccagacua

SEQ ID NO: 2193819 - RNA, 17 nt, Human
aagacuuuuccaacccu

SEQ ID NO: 2193820 - RNA, 22 nt, Human
aagagaaaaaaaguuugccaga

SEQ ID NO: 2193821 - RNA, 11 nt, Human
aagagaaaaga

SEQ ID NO: 2193822 - RNA, 13 nt, Human
aagagaaaagaaa

SEQ ID NO: 2193823 - RNA, 12 nt, Human
aagagaaaagaa

SEQ ID NO: 2193824 - RNA, 16 nt, Human
aagagaaaagaaaaaa

SEQ ID NO: 2193825 - RNA, 15 nt, Human
aagagaaaagaaaaa

SEQ ID NO: 2193826 - RNA, 14 nt, Human
aagagaaaagaaaa

SEQ ID NO: 2193827 - RNA, 14 nt, Human
aagagagaaaauaa

SEQ ID NO: 2193828 - RNA, 15 nt, Human
aagagagaaaauaaa

SEQ ID NO: 2193829 - RNA, 13 nt, Human
aagagagaaaaua

SEQ ID NO: 2193830 - RNA, 12 nt, Human
aagagagaaaau

SEQ ID NO: 2193831 - RNA, 16 nt, Human
aagagagaaaaacaaa

SEQ ID NO: 2193832 - RNA, 18 nt, Human
aagagagaaaacuuauuu

SEQ ID NO: 2193833 - RNA, 22 nt, Human
aagagacagucaccccaggacu

SEQ ID NO: 2193834 - RNA, 18 nt, Human
aagagaaagugauuucua

SEQ ID NO: 2193835 - RNA, 21 nt, Human
aagagaccuaccucagguugc

SEQ ID NO: 2193836 - RNA, 16 nt, Human
aagagaccuaccucag

SEQ ID NO: 2193837 - RNA, 17 nt, Human
aagagaccuaccucagg

SEQ ID NO: 2193838 - RNA, 18 nt, Human
aagagaccuaccucaggu

SEQ ID NO: 2193839 - RNA, 15 nt, Human
aagagacucuggccu

SEQ ID NO: 2193840 - RNA, 16 nt, Human
aagagacucuggccuc

SEQ ID NO: 2193841 - RNA, 14 nt, Human
aagagacuggagca

SEQ ID NO: 2193842 - RNA, 18 nt, Human
aagagacuggagcaucug

SEQ ID NO: 2193843 - RNA, 12 nt, Human
aagagagaaaaa

SEQ ID NO: 2193844 - RNA, 14 nt, Human
aagagagucauaaa

SEQ ID NO: 2193845 - RNA, 20 nt, Human
aagagagucauaaaccuuaa

SEQ ID NO: 2193846 - RNA, 22 nt, Human
aagagaggaguucaaugaucua

SEQ ID NO: 2193847 - RNA, 11 nt, Human
aagagagguua

SEQ ID NO: 2193848 - RNA, 12 nt, Human
aagagauauuuu

SEQ ID NO: 2193849 - RNA, 20 nt, Human
aagagauauuuuaaaaugag

SEQ ID NO: 2193850 - RNA, 21 nt, Human
aagagauauuuuaaaaugaga

SEQ ID NO: 2193851 - RNA, 18 nt, Human
aagagagaaaauaaaaag

SEQ ID NO: 2193852 - RNA, 11 nt, Human
aagagaggagu

SEQ ID NO: 2193853 - RNA, 17 nt, Human
aagagagaaaauaaaaa

SEQ ID NO: 2193854 - RNA, 16 nt, Human
aagagagaaaauaaaa

SEQ ID NO: 2193855 - RNA, 14 nt, Human
aagagaggaguuca

SEQ ID NO: 2193856 - RNA, 15 nt, Human
aagagaggaguucaa

SEQ ID NO: 2193857 - RNA, 16 nt, Human
aagagaggaguucaau

SEQ ID NO: 2193858 - RNA, 17 nt, Human
aagagaggaguucaaug

SEQ ID NO: 2193859 - RNA, 18 nt, Human
aagagaggaguucaauga

SEQ ID NO: 2193860 - RNA, 19 nt, Human
aagagaggaguucaaugau

SEQ ID NO: 2193861 - RNA, 20 nt, Human
aagagaggaguucaaugauc

SEQ ID NO: 2193862 - RNA, 21 nt, Human
aagagaggaguucaaugaucu

SEQ ID NO: 2193863 - RNA, 13 nt, Human
aagagaugaagag

SEQ ID NO: 2193864 - RNA, 15 nt, Human
aagacagagcuggga

SEQ ID NO: 2193865 - RNA, 16 nt, Human
aagacagagcugggau

SEQ ID NO: 2193866 - RNA, 12 nt, Human
aagacagagucu

SEQ ID NO: 2193867 - RNA, 23 nt, Human
aagacagauacuccuccaagguu

SEQ ID NO: 2193868 - RNA, 12 nt, Human
aagacagaagcc

SEQ ID NO: 2193869 - RNA, 13 nt, Human
aagacagaagccu

SEQ ID NO: 2193870 - RNA, 23 nt, Human
aagacaccagagcagaugcagag

SEQ ID NO: 2193871 - RNA, 22 nt, Human
aagacagaugccccagagcugu

SEQ ID NO: 2193872 - RNA, 20 nt, Human
aagacagaugccccagagcu

SEQ ID NO: 2193873 - RNA, 17 nt, Human
aagacagaugccccaga

SEQ ID NO: 2193874 - RNA, 16 nt, Human
aagacagaugccccag

SEQ ID NO: 2193875 - RNA, 14 nt, Human
aagacauaacguuu

SEQ ID NO: 2193876 - RNA, 18 nt, Human
aagacauaacguuuuucc

SEQ ID NO: 2193877 - RNA, 19 nt, Human
aagacauaacguuuuuccu

SEQ ID NO: 2193878 - RNA, 20 nt, Human
aagacauaacguuuuuccuu

SEQ ID NO: 2193879 - RNA, 21 nt, Human
aagacauaacguuuuuccuuu

SEQ ID NO: 2193880 - RNA, 22 nt, Human
aagacauaacguuuuuccuuua

SEQ ID NO: 2193881 - RNA, 23 nt, Human
aagacauacuccuuccaucaaau

SEQ ID NO: 2193882 - RNA, 17 nt, Human
aagacauccauaaagaa

SEQ ID NO: 2193883 - RNA, 21 nt, Human
aagacauccauaaagaagcaa

SEQ ID NO: 2193884 - RNA, 18 nt, Human
aagacaugaaugcacacu

SEQ ID NO: 2193885 - RNA, 13 nt, Human
aagacaugaacca

SEQ ID NO: 2193886 - RNA, 15 nt, Human
aagacaugaauauga

SEQ ID NO: 2193887 - RNA, 20 nt, Human
aagacaugauuuccuugaau

SEQ ID NO: 2193888 - RNA, 16 nt, Human
aagacaugauuuccuu

SEQ ID NO: 2193889 - RNA, 15 nt, Human
aagacaugauuuccu

SEQ ID NO: 2193890 - RNA, 14 nt, Human
aagacaugauuucc

SEQ ID NO: 2193891 - RNA, 13 nt, Human
aagagaaaaaaua

SEQ ID NO: 2193892 - RNA, 19 nt, Human
aagacuuuucuuucagcca

SEQ ID NO: 2193893 - RNA, 21 nt, Human
aagacuuuuccaacccucauc

SEQ ID NO: 2193894 - RNA, 12 nt, Human
aagacuuuucuu

SEQ ID NO: 2193895 - RNA, 17 nt, Human
aagacauugucaauaaa

SEQ ID NO: 2193896 - RNA, 17 nt, Human
aagaccacaaaaauuga

SEQ ID NO: 2193897 - RNA, 16 nt, Human
aagaccaccaccucag

SEQ ID NO: 2193898 - RNA, 19 nt, Human
aagaccaccaccucagagu

SEQ ID NO: 2193899 - RNA, 18 nt, Human
aagaccaccacuucgaaa

SEQ ID NO: 2193900 - RNA, 21 nt, Human
aagacaugauuuccuugaaug

SEQ ID NO: 2193901 - RNA, 19 nt, Human
aagacaugcacuaugagga

SEQ ID NO: 2193902 - RNA, 14 nt, Human
aagacauugucaau

SEQ ID NO: 2193903 - RNA, 18 nt, Human
aagacauuuauacucuuu

SEQ ID NO: 2193904 - RNA, 17 nt, Human
aagaccacguuucuaaa

SEQ ID NO: 2193905 - RNA, 15 nt, Human
aagaccacguuucua

SEQ ID NO: 2193906 - RNA, 13 nt, Human
aaggcaagagggg

SEQ ID NO: 2193907 - RNA, 19 nt, Human
aaggcaagaggggguggag

SEQ ID NO: 2193908 - RNA, 18 nt, Human
aaggcaagcacuuguggg

SEQ ID NO: 2193909 - RNA, 13 nt, Human
aaggcaaggcugu

SEQ ID NO: 2193910 - RNA, 18 nt, Human
aaggcaaauguguacaug

SEQ ID NO: 2193911 - RNA, 19 nt, Human
aaggagaaacagagacagg

SEQ ID NO: 2193912 - RNA, 15 nt, Human
aaggagaaggaagga

SEQ ID NO: 2193913 - RNA, 17 nt, Human
aaggacuugacuugcaa

SEQ ID NO: 2193914 - RNA, 14 nt, Human
aaggcaggugccuc

SEQ ID NO: 2193915 - RNA, 16 nt, Human
aaggcaggugccucca

SEQ ID NO: 2193916 - RNA, 17 nt, Human
aaggcaggugccuccag

SEQ ID NO: 2193917 - RNA, 20 nt, Human
aaggcaggugccuccaggug

SEQ ID NO: 2193918 - RNA, 22 nt, Human
aaggcagggagggccugggccc

SEQ ID NO: 2193919 - RNA, 19 nt, Human
aaggcagggagggccuggg

SEQ ID NO: 2193920 - RNA, 21 nt, Human
aaggcaagaggggguggaggg

SEQ ID NO: 2193921 - RNA, 15 nt, Human
aaggcaaggcuguca

SEQ ID NO: 2193922 - RNA, 20 nt, Human
aagcugcaaaucagccaugu

SEQ ID NO: 2193923 - RNA, 17 nt, Human
aagcuagaaccuggagg

SEQ ID NO: 2193924 - RNA, 17 nt, Human
aagcuagaaggccacau

SEQ ID NO: 2193925 - RNA, 19 nt, Human
aagcuagaaggccacaugu

SEQ ID NO: 2193926 - RNA, 10 nt, Human
aagcuagaau

SEQ ID NO: 2193927 - RNA, 22 nt, Human
aaggacuugaaagcauccaugu

SEQ ID NO: 2193928 - RNA, 19 nt, Human
aaggacuugaaagcaucca

SEQ ID NO: 2193929 - RNA, 17 nt, Human
aaggacuugaaagcauc

SEQ ID NO: 2193930 - RNA, 12 nt, Human
aaggacuugaaa

SEQ ID NO: 2193931 - RNA, 19 nt, Human
aagcugcacccucaggcag

SEQ ID NO: 2193932 - RNA, 13 nt, Human
aagcugcacccuc

SEQ ID NO: 2193933 - RNA, 19 nt, Human
aaggcauaucagucucuga

SEQ ID NO: 2193934 - RNA, 22 nt, Human
aaggcaggugccuccaggugug

SEQ ID NO: 2193935 - RNA, 13 nt, Human
aagcuagaaauga

SEQ ID NO: 2193936 - RNA, 23 nt, Human
aagcuacugugugugugaaugaa

SEQ ID NO: 2193937 - RNA, 17 nt, Human
aagcgugagacgccacc

SEQ ID NO: 2193938 - RNA, 16 nt, Human
aagcuagaaccuggag

SEQ ID NO: 2193939 - RNA, 19 nt, Human
aagcuacugugugugugaa

SEQ ID NO: 2193940 - RNA, 22 nt, Human
aagcuacugugugugugaauga

SEQ ID NO: 2193941 - RNA, 16 nt, Human
aagcgugagccacugc

SEQ ID NO: 2193942 - RNA, 23 nt, Human
aagcgugaaggccgagaagcaag

SEQ ID NO: 2193943 - RNA, 15 nt, Human
aagcgugagccacug

SEQ ID NO: 2193944 - RNA, 14 nt, Human
aagcggcuggcagc

SEQ ID NO: 2193945 - RNA, 21 nt, Human
aagcgaugaauuuggagacuc

SEQ ID NO: 2193946 - RNA, 20 nt, Human
aagcgaugaauuuggagacu

SEQ ID NO: 2193947 - RNA, 14 nt, Human
aagcgauucuccug

SEQ ID NO: 2193948 - RNA, 18 nt, Human
aagcgaggucaacagaga

SEQ ID NO: 2193949 - RNA, 18 nt, Human
aagcgaucacuuccuaua

SEQ ID NO: 2193950 - RNA, 16 nt, Human
aagccuuuuuccccaa

SEQ ID NO: 2193951 - RNA, 14 nt, Human
aagccuuuccauaa

SEQ ID NO: 2193952 - RNA, 15 nt, Human
aagccuuuccauaag

SEQ ID NO: 2193953 - RNA, 10 nt, Human
aagccuuugu

SEQ ID NO: 2193954 - RNA, 22 nt, Human
aagauaacaagaucuuucagga

SEQ ID NO: 2193955 - RNA, 15 nt, Human
aagauaacuugagca

SEQ ID NO: 2193956 - RNA, 21 nt, Human
aagauaaguguauuuuucaau

SEQ ID NO: 2193957 - RNA, 21 nt, Human
aagauaacaagaucuuucagg

SEQ ID NO: 2193958 - RNA, 20 nt, Human
aagauaacaagaucuuucag

SEQ ID NO: 2193959 - RNA, 19 nt, Human
aagauaacaagaucuuuca

SEQ ID NO: 2193960 - RNA, 14 nt, Human
aagauaaaugugcu

SEQ ID NO: 2193961 - RNA, 21 nt, Human
aagauaauauuaaggaagaca

SEQ ID NO: 2193962 - RNA, 19 nt, Human
aagauaauauuaaggaaga

SEQ ID NO: 2193963 - RNA, 15 nt, Human
aagauaauaauauau

SEQ ID NO: 2193964 - RNA, 12 nt, Human
aagauaauuaua

SEQ ID NO: 2193965 - RNA, 22 nt, Human
aagauacagaacucuuucaaaa

SEQ ID NO: 2193966 - RNA, 20 nt, Human
aagauacagaacucuuucaa

SEQ ID NO: 2193967 - RNA, 17 nt, Human
aagauacaguuacucag

SEQ ID NO: 2193968 - RNA, 23 nt, Human
aagccaggaauuucccaggaccc

SEQ ID NO: 2193969 - RNA, 16 nt, Human
aagauaauaauauaug

SEQ ID NO: 2193970 - RNA, 22 nt, Human
aagauacagccugcaaguggua

SEQ ID NO: 2193971 - RNA, 21 nt, Human
aagccaggcagguagccaggg

SEQ ID NO: 2193972 - RNA, 24 nt, Human
aagccaggaauuucccaggacccu

SEQ ID NO: 2193973 - RNA, 18 nt, Human
aagccaggagcaaauguu

SEQ ID NO: 2193974 - RNA, 21 nt, Human
aagccaggagcaaauguuucu

SEQ ID NO: 2193975 - RNA, 17 nt, Human
aagccagugacuccagg

SEQ ID NO: 2193976 - RNA, 18 nt, Human
aagccagugacuccagga

SEQ ID NO: 2193977 - RNA, 17 nt, Human
aagccagugcggcaggu

SEQ ID NO: 2193978 - RNA, 22 nt, Human
aagccagugacuccaggagagg

SEQ ID NO: 2193979 - RNA, 15 nt, Human
aaugauggacccaau

SEQ ID NO: 2193980 - RNA, 22 nt, Human
aaugauggacccaaugcacaca

SEQ ID NO: 2193981 - RNA, 17 nt, Human
aaugauggcaauuuugu

SEQ ID NO: 2193982 - RNA, 14 nt, Human
aaugauggcaauuu

SEQ ID NO: 2193983 - RNA, 20 nt, Human
aaugaugccaugaggaacaa

SEQ ID NO: 2193984 - RNA, 19 nt, Human
aaugauggcaauuuuguaa

SEQ ID NO: 2193985 - RNA, 18 nt, Human
aaugauggcaauuuugua

SEQ ID NO: 2193986 - RNA, 20 nt, Human
aaugauguauguugaagccu

SEQ ID NO: 2193987 - RNA, 21 nt, Human
aaugaauaauaauuauccaga

SEQ ID NO: 2193988 - RNA, 16 nt, Human
aaugaauaauuuccca

SEQ ID NO: 2193989 - RNA, 15 nt, Human
aaugaauaauaauua

SEQ ID NO: 2193990 - RNA, 19 nt, Human
aaugaaguuugaauguuaa

SEQ ID NO: 2193991 - RNA, 20 nt, Human
aaugaaguuugaauguuaaa

SEQ ID NO: 2193992 - RNA, 21 nt, Human
aaugaaguuugaauguuaaau

SEQ ID NO: 2193993 - RNA, 22 nt, Human
aaugaaguuugaauguuaaaua

SEQ ID NO: 2193994 - RNA, 20 nt, Human
aaugaauacuuuauaaagga

SEQ ID NO: 2193995 - RNA, 20 nt, Human
aaugaaagacuguacaaagu

SEQ ID NO: 2193996 - RNA, 18 nt, Human
aaugaaagacuguacaaa

SEQ ID NO: 2193997 - RNA, 21 nt, Human
aaugaaagacuguacaaagua

SEQ ID NO: 2193998 - RNA, 19 nt, Human
aaugaaagaguaaaggaaa

SEQ ID NO: 2193999 - RNA, 15 nt, Human
aaugaagcagcuuua

SEQ ID NO: 2194000 - RNA, 17 nt, Human
aaugaagcagcuuuaaa

SEQ ID NO: 2194001 - RNA, 15 nt, Human
aaugaaagcaugugg

SEQ ID NO: 2194002 - RNA, 17 nt, Human
aaugaaagcaugucuca

SEQ ID NO: 2194003 - RNA, 14 nt, Human
aaugaagcaaugcu

SEQ ID NO: 2194004 - RNA, 17 nt, Human
aaugaaguuugaauguu

SEQ ID NO: 2194005 - RNA, 18 nt, Human
aaugaaguuugaauguua

SEQ ID NO: 2194006 - RNA, 17 nt, Human
aaugaagcuuguguauc

SEQ ID NO: 2194007 - RNA, 19 nt, Human
aaugaagcuuguguaucca

SEQ ID NO: 2194008 - RNA, 22 nt, Human
aaugaagcuuguguauccauua

SEQ ID NO: 2194009 - RNA, 19 nt, Human
aaugaagcuuuauacgugu

SEQ ID NO: 2194010 - RNA, 15 nt, Human
aaugaagccuuagcc

SEQ ID NO: 2194011 - RNA, 19 nt, Human
aaugaagcagcuuuaaaca

SEQ ID NO: 2194012 - RNA, 22 nt, Human
aaugaagcagcuuuaaacaaau

SEQ ID NO: 2194013 - RNA, 12 nt, Human
aaugaagcuugu

SEQ ID NO: 2194014 - RNA, 14 nt, Human
aaugaagcuugugu

SEQ ID NO: 2194015 - RNA, 15 nt, Human
aaugaagcuugugua

SEQ ID NO: 2194016 - RNA, 16 nt, Human
aaugaagcuuguguau

SEQ ID NO: 2194017 - RNA, 17 nt, Human
aaucugauggcuucucc

SEQ ID NO: 2194018 - RNA, 18 nt, Human
aaucugauuggacauuuu

SEQ ID NO: 2194019 - RNA, 19 nt, Human
aaucugauuggacauuuuc

SEQ ID NO: 2194020 - RNA, 17 nt, Human
aaucugaggccuccucu

SEQ ID NO: 2194021 - RNA, 12 nt, Human
aaucugacccag

SEQ ID NO: 2194022 - RNA, 17 nt, Human
aaucugacccagugccc

SEQ ID NO: 2194023 - RNA, 15 nt, Human
aaucugacccagugc

SEQ ID NO: 2194024 - RNA, 14 nt, Human
aaucugacccagug

SEQ ID NO: 2194025 - RNA, 13 nt, Human
aaucugacccagu

SEQ ID NO: 2194026 - RNA, 13 nt, Human
aaucucaccccau

SEQ ID NO: 2194027 - RNA, 17 nt, Human
aaucucaauucuucccu

SEQ ID NO: 2194028 - RNA, 16 nt, Human
aaucucaauauuucag

SEQ ID NO: 2194029 - RNA, 22 nt, Human
aaucucagcaaugauuacucuu

SEQ ID NO: 2194030 - RNA, 23 nt, Human
aaucucagagguagggcugccac

SEQ ID NO: 2194031 - RNA, 22 nt, Human
aaucucagagguagggcugcca

SEQ ID NO: 2194032 - RNA, 22 nt, Human
aaucucaccccaucccacaccc

SEQ ID NO: 2194033 - RNA, 13 nt, Human
aauauuaagaaag

SEQ ID NO: 2194034 - RNA, 21 nt, Human
aauauuaaaucugcuggaguu

SEQ ID NO: 2194035 - RNA, 13 nt, Human
aauauuaaaucug

SEQ ID NO: 2194036 - RNA, 20 nt, Human
aauauuaaauacagacacua

SEQ ID NO: 2194037 - RNA, 22 nt, Human
aauauuaaauacagacacuaag

SEQ ID NO: 2194038 - RNA, 22 nt, Human
aauauguugaugaaaaauagca

SEQ ID NO: 2194039 - RNA, 13 nt, Human
aauauuaaauaca

SEQ ID NO: 2194040 - RNA, 14 nt, Human
aauauuaaauacag

SEQ ID NO: 2194041 - RNA, 16 nt, Human
aauauuaaauacagac

SEQ ID NO: 2194042 - RNA, 17 nt, Human
aauauuaaauacagaca

SEQ ID NO: 2194043 - RNA, 19 nt, Human
aauauuaaauacagacacu

SEQ ID NO: 2194044 - RNA, 20 nt, Human
aauauguucuuuaaaaauau

SEQ ID NO: 2194045 - RNA, 22 nt, Human
aauauguuaaccucagugucau

SEQ ID NO: 2194046 - RNA, 16 nt, Human
aauauguuagcaaaga

SEQ ID NO: 2194047 - RNA, 21 nt, Human
aauauguuaaccucaguguca

SEQ ID NO: 2194048 - RNA, 12 nt, Human
aauauguccugg

SEQ ID NO: 2194049 - RNA, 22 nt, Human
aauauauauauauauaaaauaa

SEQ ID NO: 2194050 - RNA, 16 nt, Human
aauauauauaaauaaa

SEQ ID NO: 2194051 - RNA, 18 nt, Human
aauauauauauauauaaa

SEQ ID NO: 2194052 - RNA, 19 nt, Human
aauauauauauauauaaaa

SEQ ID NO: 2194053 - RNA, 21 nt, Human
aauauauauauauauaaaaua

SEQ ID NO: 2194054 - RNA, 14 nt, Human
aauauauauauccu

SEQ ID NO: 2194055 - RNA, 13 nt, Human
aauauguccuggg

SEQ ID NO: 2194056 - RNA, 23 nt, Human
aauauguggaguucaucuugaau

SEQ ID NO: 2194057 - RNA, 14 nt, Human
aauauauaaauaua

SEQ ID NO: 2194058 - RNA, 12 nt, Human
aauauauauaaa

SEQ ID NO: 2194059 - RNA, 13 nt, Human
aauauauauaaac

SEQ ID NO: 2194060 - RNA, 14 nt, Human
aauauauauaaacc

SEQ ID NO: 2194061 - RNA, 15 nt, Human
aauauauauaaaccu

SEQ ID NO: 2194062 - RNA, 13 nt, Human
aauauauauaaau

SEQ ID NO: 2194063 - RNA, 15 nt, Human
aauauauauaaauaa

SEQ ID NO: 2194064 - RNA, 19 nt, Human
aauauauauaaauauauau

SEQ ID NO: 2194065 - RNA, 11 nt, Human
aauauauaaau

SEQ ID NO: 2194066 - RNA, 13 nt, Human
aauauauaaauau

SEQ ID NO: 2194067 - RNA, 17 nt, Human
aauauauaaauauauau

SEQ ID NO: 2194068 - RNA, 13 nt, Human
aaucaauaaacga

SEQ ID NO: 2194069 - RNA, 23 nt, Human
aaucaaguuggcuucuaaucaaa

SEQ ID NO: 2194070 - RNA, 18 nt, Human
aaucaaagcaaugcauuu

SEQ ID NO: 2194071 - RNA, 22 nt, Human
aaucaaagcaaugcauuuugga

SEQ ID NO: 2194072 - RNA, 16 nt, Human
aaucaauaaacgauuu

SEQ ID NO: 2194073 - RNA, 12 nt, Human
aaucaauaauau

SEQ ID NO: 2194074 - RNA, 14 nt, Human
aaucaauacacuag

SEQ ID NO: 2194075 - RNA, 18 nt, Human
aaucaauacacuaguugu

SEQ ID NO: 2194076 - RNA, 20 nt, Human
aaucaauacacuaguuguuu

SEQ ID NO: 2194077 - RNA, 19 nt, Human
aaucaauacacuaguuguu

SEQ ID NO: 2194078 - RNA, 13 nt, Human
aaucaaaauaugu

SEQ ID NO: 2194079 - RNA, 20 nt, Human
aaucaaaauaacgccccaga

SEQ ID NO: 2194080 - RNA, 16 nt, Human
aaucaaagacauggaa

SEQ ID NO: 2194081 - RNA, 16 nt, Human
aaucaaagcaaugcau

SEQ ID NO: 2194082 - RNA, 18 nt, Human
aaucaaaacucuccuaca

SEQ ID NO: 2194083 - RNA, 10 nt, Human
aaucaaaacu

SEQ ID NO: 2194084 - RNA, 17 nt, Human
aauauuuuuuuguagau

SEQ ID NO: 2194085 - RNA, 21 nt, Human
aauauuuuuuuguagaugaaa

SEQ ID NO: 2194086 - RNA, 15 nt, Human
aauauuaaugccuuu

SEQ ID NO: 2194087 - RNA, 22 nt, Human
aauauuaaugccuuuaaaguau

SEQ ID NO: 2194088 - RNA, 17 nt, Human
aaucaaugucacuuaaa

SEQ ID NO: 2194089 - RNA, 22 nt, Human
aaucaaugcuauaacuauguug

SEQ ID NO: 2194090 - RNA, 21 nt, Human
aaucaccgaaaacguggcugc

SEQ ID NO: 2194091 - RNA, 16 nt, Human
aaucacgcuuuccuga

SEQ ID NO: 2194092 - RNA, 23 nt, Human
aaucaccgaaaacguggcugcuu

SEQ ID NO: 2194093 - RNA, 22 nt, Human
aagugcuggcaaccacuaagaa

SEQ ID NO: 2194094 - RNA, 21 nt, Human
aagugcuggcaccaccaggca

SEQ ID NO: 2194095 - RNA, 23 nt, Human
aagugcuggcaaccacuaagaau

SEQ ID NO: 2194096 - RNA, 22 nt, Human
aagugcugcauuuaaaagauac

SEQ ID NO: 2194097 - RNA, 13 nt, Human
aaguggccucuuu

SEQ ID NO: 2194098 - RNA, 22 nt, Human
aaguggccucuuugucuaaaac

SEQ ID NO: 2194099 - RNA, 17 nt, Human
aaguggccucuuugucu

SEQ ID NO: 2194100 - RNA, 14 nt, Human
aaguggccucuuug

SEQ ID NO: 2194101 - RNA, 17 nt, Human
aaguugaagcuaagauu

SEQ ID NO: 2194102 - RNA, 12 nt, Human
aaguggcugcug

SEQ ID NO: 2194103 - RNA, 17 nt, Human
aaguugaaauuaaccau

SEQ ID NO: 2194104 - RNA, 20 nt, Human
aaguugaaagaguccuauuu

SEQ ID NO: 2194105 - RNA, 14 nt, Human
aaguggcugcugac

SEQ ID NO: 2194106 - RNA, 21 nt, Human
aaguugaauggccugccuuga

SEQ ID NO: 2194107 - RNA, 18 nt, Human
aaguugaagcuaagauuu

SEQ ID NO: 2194108 - RNA, 23 nt, Human
aaguugaauugaggggauuaaua

SEQ ID NO: 2194109 - RNA, 20 nt, Human
aaguggaccuugagaccaca

SEQ ID NO: 2194110 - RNA, 23 nt, Human
aaguggacucuuugguggcuuug

SEQ ID NO: 2194111 - RNA, 18 nt, Human
aaguggacuggccccugg

SEQ ID NO: 2194112 - RNA, 16 nt, Human
aaguggaggcacuuua

SEQ ID NO: 2194113 - RNA, 20 nt, Human
aaguggacuggccccugggu

SEQ ID NO: 2194114 - RNA, 20 nt, Human
aaguggaccaggacaggacc

SEQ ID NO: 2194115 - RNA, 22 nt, Human
aaguggaccuuaggccuuccuc

SEQ ID NO: 2194116 - RNA, 17 nt, Human
aaguggacucagggcag

SEQ ID NO: 2194117 - RNA, 12 nt, Human
aagugcugggau

SEQ ID NO: 2194118 - RNA, 23 nt, Human
aaguugguccuuuacacucaggc

SEQ ID NO: 2194119 - RNA, 17 nt, Human
aaguuuaaagcucgaaa

SEQ ID NO: 2194120 - RNA, 13 nt, Human
aaguuguuugcau

SEQ ID NO: 2194121 - RNA, 15 nt, Human
aaguuuaaggaauau

SEQ ID NO: 2194122 - RNA, 14 nt, Human
aaguuuaaggaaua

SEQ ID NO: 2194123 - RNA, 15 nt, Human
aaguuguuugagaaa

SEQ ID NO: 2194124 - RNA, 21 nt, Human
aaguuguuugagaaauuaagu

SEQ ID NO: 2194125 - RNA, 22 nt, Human
aaguuguuugagaaauuaagua

SEQ ID NO: 2194126 - RNA, 17 nt, Human
aaguuguuugucaucuu

SEQ ID NO: 2194127 - RNA, 10 nt, Human
aauaaacacu

SEQ ID NO: 2194128 - RNA, 23 nt, Human
aaguuuaaggaauaugggagaaa

SEQ ID NO: 2194129 - RNA, 11 nt, Human
aauaaacacuc

SEQ ID NO: 2194130 - RNA, 16 nt, Human
aauaaacacucuugaa

SEQ ID NO: 2194131 - RNA, 23 nt, Human
aauaaacauccuucaagaacucu

SEQ ID NO: 2194132 - RNA, 13 nt, Human
aauaaacauccuu

SEQ ID NO: 2194133 - RNA, 12 nt, Human
aauaaacaggag

SEQ ID NO: 2194134 - RNA, 12 nt, Human
aauaaacacugu

SEQ ID NO: 2194135 - RNA, 13 nt, Human
aauaaacacugug

SEQ ID NO: 2194136 - RNA, 19 nt, Human
aauaaacacucuugaaaaa

SEQ ID NO: 2194137 - RNA, 13 nt, Human
aauaaacuuuaau

SEQ ID NO: 2194138 - RNA, 22 nt, Human
aauaaacuuagaauaaaauugu

SEQ ID NO: 2194139 - RNA, 17 nt, Human
aauaaacuuuuuuuuga

SEQ ID NO: 2194140 - RNA, 20 nt, Human
aauaaacuuuuuuuugagaa

SEQ ID NO: 2194141 - RNA, 12 nt, Human
aauaaacuuuuu

SEQ ID NO: 2194142 - RNA, 15 nt, Human
aauaaugugaaucau

SEQ ID NO: 2194143 - RNA, 19 nt, Human
aauaauguuaacauggaca

SEQ ID NO: 2194144 - RNA, 11 nt, Human
aauaaagcccu

SEQ ID NO: 2194145 - RNA, 23 nt, Human
aauaaagcaauuuuccuugaagc

SEQ ID NO: 2194146 - RNA, 24 nt, Human
aauaaagcaauuuuccuugaagcc

SEQ ID NO: 2194147 - RNA, 16 nt, Human
aauaaagcaauuuucc

SEQ ID NO: 2194148 - RNA, 17 nt, Human
aauaaagcaauuuuccu

SEQ ID NO: 2194149 - RNA, 18 nt, Human
aauaaagcaauuuuccuu

SEQ ID NO: 2194150 - RNA, 22 nt, Human
aauaaagcaauuuuccuugaag

SEQ ID NO: 2194151 - RNA, 14 nt, Human
aauaaagcagcguu

SEQ ID NO: 2194152 - RNA, 22 nt, Human
aauaaugugaaacuggauuaaa

SEQ ID NO: 2194153 - RNA, 17 nt, Human
aauaaugugaaacugga

SEQ ID NO: 2194154 - RNA, 11 nt, Human
aauaaagacag

SEQ ID NO: 2194155 - RNA, 12 nt, Human
aauaaagacagg

SEQ ID NO: 2194156 - RNA, 13 nt, Human
aauaaagaaauug

SEQ ID NO: 2194157 - RNA, 20 nt, Human
aauaaagaucauguaaaagu

SEQ ID NO: 2194158 - RNA, 12 nt, Human
aauaaagcaauu

SEQ ID NO: 2194159 - RNA, 13 nt, Human
aauaaagcaauuu

SEQ ID NO: 2194160 - RNA, 15 nt, Human
aauaaagcaauuuuc

SEQ ID NO: 2194161 - RNA, 19 nt, Human
aauaaagaucauguaaaag

SEQ ID NO: 2194162 - RNA, 14 nt, Human
aauaaagaucaugu

SEQ ID NO: 2194163 - RNA, 15 nt, Human
aauaaagaguuagaa

SEQ ID NO: 2194164 - RNA, 18 nt, Human
aauaaagaguuagaauga

SEQ ID NO: 2194165 - RNA, 19 nt, Human
acacgcaggaacucccagc

SEQ ID NO: 2194166 - RNA, 15 nt, Human
acacgcacgcacaca

SEQ ID NO: 2194167 - RNA, 16 nt, Human
acacgcacgcacacac

SEQ ID NO: 2194168 - RNA, 17 nt, Human
acacgcacgcacacaca

SEQ ID NO: 2194169 - RNA, 18 nt, Human
acacgcacgcacacacac

SEQ ID NO: 2194170 - RNA, 19 nt, Human
acacgccuuguucuuggcc

SEQ ID NO: 2194171 - RNA, 16 nt, Human
acaccagcauuccuuu

SEQ ID NO: 2194172 - RNA, 14 nt, Human
acaccagcauuccu

SEQ ID NO: 2194173 - RNA, 19 nt, Human
acaccagcauuccuuuuga

SEQ ID NO: 2194174 - RNA, 12 nt, Human
acaccagccagg

SEQ ID NO: 2194175 - RNA, 13 nt, Human
acacgcaccugcc

SEQ ID NO: 2194176 - RNA, 17 nt, Human
acacgcaccugccucag

SEQ ID NO: 2194177 - RNA, 13 nt, Human
acacgcacgcaca

SEQ ID NO: 2194178 - RNA, 14 nt, Human
acacgcacgcacac

SEQ ID NO: 2194179 - RNA, 16 nt, Human
acacgcaccugccuca

SEQ ID NO: 2194180 - RNA, 14 nt, Human
acacgcaccugccu

SEQ ID NO: 2194181 - RNA, 17 nt, Human
acacguggaggaaugcu

SEQ ID NO: 2194182 - RNA, 23 nt, Human
acacgugcaauuuguuugugcuu

SEQ ID NO: 2194183 - RNA, 16 nt, Human
acacgugagaaucccu

SEQ ID NO: 2194184 - RNA, 21 nt, Human
acacgugagaaucccuggcaa

SEQ ID NO: 2194185 - RNA, 19 nt, Human
acacgucugacccucucca

SEQ ID NO: 2194186 - RNA, 17 nt, Human
acacgucugacccucuc

SEQ ID NO: 2194187 - RNA, 13 nt, Human
acacgugagaauc

SEQ ID NO: 2194188 - RNA, 14 nt, Human
acacguccacccca

SEQ ID NO: 2194189 - RNA, 23 nt, Human
acacguacuuaaaugaaagcaug

SEQ ID NO: 2194190 - RNA, 20 nt, Human
acacgcacgcacacacacaa

SEQ ID NO: 2194191 - RNA, 22 nt, Human
acacgccugcaaacgcugccug

SEQ ID NO: 2194192 - RNA, 24 nt, Human
acacguggaggaaugcucccccau

SEQ ID NO: 2194193 - RNA, 22 nt, Human
acacguggaggaaugcuccccc

SEQ ID NO: 2194194 - RNA, 21 nt, Human
acacguggaggaaugcucccc

SEQ ID NO: 2194195 - RNA, 20 nt, Human
acacguggaggaaugcuccc

SEQ ID NO: 2194196 - RNA, 12 nt, Human
acacguguccug

SEQ ID NO: 2194197 - RNA, 14 nt, Human
acaccagccaggcu

SEQ ID NO: 2194198 - RNA, 18 nt, Human
acacagcucuucuccagg

SEQ ID NO: 2194199 - RNA, 16 nt, Human
acaccaagcacagcag

SEQ ID NO: 2194200 - RNA, 14 nt, Human
acaccaagcacagc

SEQ ID NO: 2194201 - RNA, 21 nt, Human
acaccaagcacagcagccugg

SEQ ID NO: 2194202 - RNA, 20 nt, Human
acaccaagcacagcagccug

SEQ ID NO: 2194203 - RNA, 19 nt, Human
acaccaagcacagcagccu

SEQ ID NO: 2194204 - RNA, 18 nt, Human
acaccaagcacagcagcc

SEQ ID NO: 2194205 - RNA, 13 nt, Human
acaccaagcagca

SEQ ID NO: 2194206 - RNA, 16 nt, Human
acaccaagcagcaaca

SEQ ID NO: 2194207 - RNA, 16 nt, Human
acaccaagcugugcca

SEQ ID NO: 2194208 - RNA, 17 nt, Human
acaccaagcugugccac

SEQ ID NO: 2194209 - RNA, 18 nt, Human
acaccaagcugugccacc

SEQ ID NO: 2194210 - RNA, 20 nt, Human
acaccaagcugugccacccu

SEQ ID NO: 2194211 - RNA, 21 nt, Human
acaccaagcugugccacccug

SEQ ID NO: 2194212 - RNA, 22 nt, Human
acaccaagcugugccacccugg

SEQ ID NO: 2194213 - RNA, 18 nt, Human
acaccagagcccaccuug

SEQ ID NO: 2194214 - RNA, 23 nt, Human
acaccagagcccaccuuggcuca

SEQ ID NO: 2194215 - RNA, 13 nt, Human
acaccagagccca

SEQ ID NO: 2194216 - RNA, 15 nt, Human
acaccaauauucaua

SEQ ID NO: 2194217 - RNA, 14 nt, Human
acacacuuuuuaag

SEQ ID NO: 2194218 - RNA, 19 nt, Human
acacacuuuuuaagaaaua

SEQ ID NO: 2194219 - RNA, 12 nt, Human
acacagaaaaua

SEQ ID NO: 2194220 - RNA, 11 nt, Human
acacagaaaau

SEQ ID NO: 2194221 - RNA, 20 nt, Human
acacagaaaauauacuguaa

SEQ ID NO: 2194222 - RNA, 19 nt, Human
acacagaaaauauacugua

SEQ ID NO: 2194223 - RNA, 18 nt, Human
acacagaaaauauacugu

SEQ ID NO: 2194224 - RNA, 17 nt, Human
acacagaaaauauacug

SEQ ID NO: 2194225 - RNA, 16 nt, Human
acacagaaaauauacu

SEQ ID NO: 2194226 - RNA, 15 nt, Human
acacagaaaauauac

SEQ ID NO: 2194227 - RNA, 14 nt, Human
acacagaaaauaua

SEQ ID NO: 2194228 - RNA, 13 nt, Human
acacagaaaauau

SEQ ID NO: 2194229 - RNA, 15 nt, Human
acacagcauguguau

SEQ ID NO: 2194230 - RNA, 14 nt, Human
acacagcaugugua

SEQ ID NO: 2194231 - RNA, 22 nt, Human
acacagcagcuucaccagagca

SEQ ID NO: 2194232 - RNA, 20 nt, Human
acacagaaaauguugagaau

SEQ ID NO: 2194233 - RNA, 19 nt, Human
acacagaaaauguugagaa

SEQ ID NO: 2194234 - RNA, 18 nt, Human
acacagaaaauguugaga

SEQ ID NO: 2194235 - RNA, 23 nt, Human
acacagaaaauauacuguaaaga

SEQ ID NO: 2194236 - RNA, 22 nt, Human
acacagaaaauauacuguaaag

SEQ ID NO: 2194237 - RNA, 21 nt, Human
acacagaaaauauacuguaaa

SEQ ID NO: 2194238 - RNA, 12 nt, Human
acacagccacac

SEQ ID NO: 2194239 - RNA, 11 nt, Human
acacagccaca

SEQ ID NO: 2194240 - RNA, 18 nt, Human
acacagccacacacacag

SEQ ID NO: 2194241 - RNA, 15 nt, Human
acacagccacacaca

SEQ ID NO: 2194242 - RNA, 14 nt, Human
acacagccacacac

SEQ ID NO: 2194243 - RNA, 13 nt, Human
acacagccacaca

SEQ ID NO: 2194244 - RNA, 14 nt, Human
acacagcucuucuc

SEQ ID NO: 2194245 - RNA, 16 nt, Human
acacagcucuucucca

SEQ ID NO: 2194246 - RNA, 23 nt, Human
acacagccgauucaccugagcag

SEQ ID NO: 2194247 - RNA, 20 nt, Human
acacagccaggugccuugga

SEQ ID NO: 2194248 - RNA, 19 nt, Human
acacagccgauucaccuga

SEQ ID NO: 2194249 - RNA, 23 nt, Human
acacagccacacacacagaaaau

SEQ ID NO: 2194250 - RNA, 22 nt, Human
acacagccacacacacagaaaa

SEQ ID NO: 2194251 - RNA, 21 nt, Human
acacagccacacacacagaaa

SEQ ID NO: 2194252 - RNA, 20 nt, Human
acacagccacacacacagaa

SEQ ID NO: 2194253 - RNA, 19 nt, Human
acacagccacacacacaga

SEQ ID NO: 2194254 - RNA, 13 nt, Human
acaagugguggua

SEQ ID NO: 2194255 - RNA, 19 nt, Human
acaaguggacucagggcag

SEQ ID NO: 2194256 - RNA, 18 nt, Human
acaaguggacucagggca

SEQ ID NO: 2194257 - RNA, 15 nt, Human
acaaguggacucagg

SEQ ID NO: 2194258 - RNA, 12 nt, Human
acaagugcuggc

SEQ ID NO: 2194259 - RNA, 13 nt, Human
acaagugcuggca

SEQ ID NO: 2194260 - RNA, 14 nt, Human
acaagugcugaaca

SEQ ID NO: 2194261 - RNA, 15 nt, Human
acaaguuaaauaaau

SEQ ID NO: 2194262 - RNA, 18 nt, Human
acaaguguauaucagaaa

SEQ ID NO: 2194263 - RNA, 19 nt, Human
acaaguguauaucagaaaa

SEQ ID NO: 2194264 - RNA, 20 nt, Human
acaaguguauaucagaaaag

SEQ ID NO: 2194265 - RNA, 18 nt, Human
acaagggucuagggagag

SEQ ID NO: 2194266 - RNA, 17 nt, Human
acaagggucuagggaga

SEQ ID NO: 2194267 - RNA, 19 nt, Human
acaagggagagaccucauc

SEQ ID NO: 2194268 - RNA, 22 nt, Human
acaacuuaaguugguccuuuac

SEQ ID NO: 2194269 - RNA, 16 nt, Human
acaagguaguuuuuac

SEQ ID NO: 2194270 - RNA, 20 nt, Human
acaagggucuagggagagac

SEQ ID NO: 2194271 - RNA, 19 nt, Human
acaagggucuagggagaga

SEQ ID NO: 2194272 - RNA, 21 nt, Human
acaagguaccccuuucuggcu

SEQ ID NO: 2194273 - RNA, 14 nt, Human
acaagguaguuuuu

SEQ ID NO: 2194274 - RNA, 17 nt, Human
acaagguccaagauacc

SEQ ID NO: 2194275 - RNA, 22 nt, Human
acaagguagcccuggccagagg

SEQ ID NO: 2194276 - RNA, 18 nt, Human
acaaggguggcaucccag

SEQ ID NO: 2194277 - RNA, 23 nt, Human
acaagguccucugucagucacag

SEQ ID NO: 2194278 - RNA, 13 nt, Human
acaagguucuucc

SEQ ID NO: 2194279 - RNA, 22 nt, Human
acaagguucuucccuuuuacau

SEQ ID NO: 2194280 - RNA, 19 nt, Human
acaagguucccucugagaa

SEQ ID NO: 2194281 - RNA, 20 nt, Human
acaagguucccucugagaau

SEQ ID NO: 2194282 - RNA, 15 nt, Human
acaacuuaaauaaua

SEQ ID NO: 2194283 - RNA, 13 nt, Human
acaacuuaaguug

SEQ ID NO: 2194284 - RNA, 14 nt, Human
acaacuuaaauaau

SEQ ID NO: 2194285 - RNA, 22 nt, Human
acaacugccucgaaacacagaa

SEQ ID NO: 2194286 - RNA, 19 nt, Human
acaacuggaauaguuuuuu

SEQ ID NO: 2194287 - RNA, 20 nt, Human
acaacuggaauaguuuuuuu

SEQ ID NO: 2194288 - RNA, 20 nt, Human
acaacuccuagggccacuga

SEQ ID NO: 2194289 - RNA, 21 nt, Human
acaacugccucgaaacacaga

SEQ ID NO: 2194290 - RNA, 19 nt, Human
acaacugaguccuuaaaca

SEQ ID NO: 2194291 - RNA, 12 nt, Human
acaacugagucc

SEQ ID NO: 2194292 - RNA, 13 nt, Human
acaacugaguccu

SEQ ID NO: 2194293 - RNA, 14 nt, Human
acaacugaguccuu

SEQ ID NO: 2194294 - RNA, 16 nt, Human
acaaggcaaggcuguc

SEQ ID NO: 2194295 - RNA, 17 nt, Human
acaaggcaaggcuguca

SEQ ID NO: 2194296 - RNA, 19 nt, Human
acaaggcaaggcugucaau

SEQ ID NO: 2194297 - RNA, 18 nt, Human
acaagggagagaccucau

SEQ ID NO: 2194298 - RNA, 15 nt, Human
acaaacucucugaac

SEQ ID NO: 2194299 - RNA, 14 nt, Human
acaaacaugacccu

SEQ ID NO: 2194300 - RNA, 16 nt, Human
acaaacuacauguaau

SEQ ID NO: 2194301 - RNA, 22 nt, Human
acaaacuauuucuuauauaugu

SEQ ID NO: 2194302 - RNA, 22 nt, Human
acaaacucucugaaccccuccc

SEQ ID NO: 2194303 - RNA, 20 nt, Human
acaaacucaccaucugugca

SEQ ID NO: 2194304 - RNA, 13 nt, Human
acaaacuguaaau

SEQ ID NO: 2194305 - RNA, 18 nt, Human
acaaccaagcucucugca

SEQ ID NO: 2194306 - RNA, 20 nt, Human
acaaccaccgcuccccagcc

SEQ ID NO: 2194307 - RNA, 21 nt, Human
acaaccaccuaaucaggcuga

SEQ ID NO: 2194308 - RNA, 19 nt, Human
acaaccaccgcuccccagc

SEQ ID NO: 2194309 - RNA, 15 nt, Human
acaaccaccgcuccc

SEQ ID NO: 2194310 - RNA, 17 nt, Human
acaaccacucauucaaa

SEQ ID NO: 2194311 - RNA, 15 nt, Human
acaaccacuggucug

SEQ ID NO: 2194312 - RNA, 14 nt, Human
acaaccauuccaga

SEQ ID NO: 2194313 - RNA, 14 nt, Human
acaacauguauaau

SEQ ID NO: 2194314 - RNA, 22 nt, Human
acaacauguauaauauuuuuaa

SEQ ID NO: 2194315 - RNA, 16 nt, Human
acaacauuaaaacaau

SEQ ID NO: 2194316 - RNA, 22 nt, Human
acaaacauauuuguuaaauauu

SEQ ID NO: 2194317 - RNA, 14 nt, Human
acaaacaucacucu

SEQ ID NO: 2194318 - RNA, 19 nt, Human
acaaacauauuuguuaaau

SEQ ID NO: 2194319 - RNA, 13 nt, Human
acaaacagcucag

SEQ ID NO: 2194320 - RNA, 19 nt, Human
acaaacaugugguuaaugc

SEQ ID NO: 2194321 - RNA, 20 nt, Human
acaaacaauggaaacugaau

SEQ ID NO: 2194322 - RNA, 15 nt, Human
acaaacaccucccag

SEQ ID NO: 2194323 - RNA, 18 nt, Human
acaaacaauggaaacuga

SEQ ID NO: 2194324 - RNA, 16 nt, Human
aauuaucuauacauau

SEQ ID NO: 2194325 - RNA, 14 nt, Human
aauuaucuauacau

SEQ ID NO: 2194326 - RNA, 23 nt, Human
aauuaucgggaacaguguuuccc

SEQ ID NO: 2194327 - RNA, 20 nt, Human
aauuaucgggaacaguguuu

SEQ ID NO: 2194328 - RNA, 19 nt, Human
aauuaucgggaacaguguu

SEQ ID NO: 2194329 - RNA, 17 nt, Human
aauuaucgggaacagug

SEQ ID NO: 2194330 - RNA, 21 nt, Human
aauuaucggaagcagugccuu

SEQ ID NO: 2194331 - RNA, 20 nt, Human
aauuaucggaagcagugccu

SEQ ID NO: 2194332 - RNA, 17 nt, Human
aauuaucggaagcagug

SEQ ID NO: 2194333 - RNA, 15 nt, Human
aauuaucggaagcag

SEQ ID NO: 2194334 - RNA, 15 nt, Human
aauuauccagaguuu

SEQ ID NO: 2194335 - RNA, 19 nt, Human
aauuaugaguuauuuuuau

SEQ ID NO: 2194336 - RNA, 21 nt, Human
aauuccuuggcaugccuucca

SEQ ID NO: 2194337 - RNA, 23 nt, Human
aauuccuucagggugaugccagg

SEQ ID NO: 2194338 - RNA, 17 nt, Human
aauuccuguagcaucuu

SEQ ID NO: 2194339 - RNA, 16 nt, Human
aauuccuucaggguga

SEQ ID NO: 2194340 - RNA, 23 nt, Human
aauuccuuagcuuagaccucagc

SEQ ID NO: 2194341 - RNA, 13 nt, Human
aauuccuuagcuu

SEQ ID NO: 2194342 - RNA, 19 nt, Human
aauuccuuuucuaacucuc

SEQ ID NO: 2194343 - RNA, 15 nt, Human
aauucgaaccaggaa

SEQ ID NO: 2194344 - RNA, 14 nt, Human
aauucgaccugauu

SEQ ID NO: 2194345 - RNA, 18 nt, Human
aauucgcugcaaccuguu

SEQ ID NO: 2194346 - RNA, 15 nt, Human
aauucggugugcacc

SEQ ID NO: 2194347 - RNA, 11 nt, Human
aauuccugggc

SEQ ID NO: 2194348 - RNA, 19 nt, Human
aauuccucuuugcuuugcu

SEQ ID NO: 2194349 - RNA, 18 nt, Human
aauuccucuuugcuuugc

SEQ ID NO: 2194350 - RNA, 17 nt, Human
aauuccucuuugcuuug

SEQ ID NO: 2194351 - RNA, 21 nt, Human
aauuauguauguuuacauauc

SEQ ID NO: 2194352 - RNA, 21 nt, Human
aauuccuguagcaucuucugg

SEQ ID NO: 2194353 - RNA, 15 nt, Human
aauuaugacaguuau

SEQ ID NO: 2194354 - RNA, 12 nt, Human
aauuaugacagu

SEQ ID NO: 2194355 - RNA, 22 nt, Human
aauuaucuauacauaucuuuau

SEQ ID NO: 2194356 - RNA, 17 nt, Human
aauuaugccuuuuuuga

SEQ ID NO: 2194357 - RNA, 13 nt, Human
aauuaugacaguu

SEQ ID NO: 2194358 - RNA, 19 nt, Human
aauuaugccuuuuuugauc

SEQ ID NO: 2194359 - RNA, 15 nt, Human
aauuauguauguuua

SEQ ID NO: 2194360 - RNA, 16 nt, Human
aauuauguauguuuac

SEQ ID NO: 2194361 - RNA, 18 nt, Human
aauuauguauguuuacau

SEQ ID NO: 2194362 - RNA, 22 nt, Human
aauuauaucaguccucuuucaa

SEQ ID NO: 2194363 - RNA, 20 nt, Human
aauuauauagguugugcaaa

SEQ ID NO: 2194364 - RNA, 21 nt, Human
aauuauauagguugugcaaau

SEQ ID NO: 2194365 - RNA, 22 nt, Human
aauuauagugauguaaucuuga

SEQ ID NO: 2194366 - RNA, 20 nt, Human
aauuauacuggagaagucuu

SEQ ID NO: 2194367 - RNA, 19 nt, Human
aauuauacccccugcaaag

SEQ ID NO: 2194368 - RNA, 15 nt, Human
aauuauagaugggaa

SEQ ID NO: 2194369 - RNA, 19 nt, Human
aauuauagaugggaaugaa

SEQ ID NO: 2194370 - RNA, 14 nt, Human
aauucuaacuuuuu

SEQ ID NO: 2194371 - RNA, 19 nt, Human
aauucuaaaugaauguuua

SEQ ID NO: 2194372 - RNA, 13 nt, Human
aauucuaaaugaa

SEQ ID NO: 2194373 - RNA, 23 nt, Human
aauucgaaccaggaaauggaacc

SEQ ID NO: 2194374 - RNA, 14 nt, Human
aauucuacuuugag

SEQ ID NO: 2194375 - RNA, 15 nt, Human
aauucuacauuguca

SEQ ID NO: 2194376 - RNA, 22 nt, Human
aauucuagcuuugagcuuaaga

SEQ ID NO: 2194377 - RNA, 23 nt, Human
aauucuaggcaucccaggggacc

SEQ ID NO: 2194378 - RNA, 12 nt, Human
aauucuagugcu

SEQ ID NO: 2194379 - RNA, 16 nt, Human
aauucuagugcugcug

SEQ ID NO: 2194380 - RNA, 17 nt, Human
aauucuagugcugcuga

SEQ ID NO: 2194381 - RNA, 16 nt, Human
aauucuauaaggccau

SEQ ID NO: 2194382 - RNA, 18 nt, Human
aauucuagugcugcugaa

SEQ ID NO: 2194383 - RNA, 21 nt, Human
aauucuagugcugcugaagau

SEQ ID NO: 2194384 - RNA, 22 nt, Human
aauucuauaaggccauaaaaca

SEQ ID NO: 2194385 - RNA, 19 nt, Human
aauucucagaaucucaaau

SEQ ID NO: 2194386 - RNA, 14 nt, Human
aauucuauuugcug

SEQ ID NO: 2194387 - RNA, 17 nt, Human
aauucucaaccuaccac

SEQ ID NO: 2194388 - RNA, 22 nt, Human
aauucucaaccuaccaccccuu

SEQ ID NO: 2194389 - RNA, 13 nt, Human
aauucucauguga

SEQ ID NO: 2194390 - RNA, 16 nt, Human
aauucucaugugaucc

SEQ ID NO: 2194391 - RNA, 19 nt, Human
aauucucaugugauccuuu

SEQ ID NO: 2194392 - RNA, 20 nt, Human
aauucucaugugauccuuuu

SEQ ID NO: 2194393 - RNA, 21 nt, Human
aauucucaugugauccuuuua

SEQ ID NO: 2194394 - RNA, 15 nt, Human
aauucucuuauccaa

SEQ ID NO: 2194395 - RNA, 14 nt, Human
aauucucuuucaaa

SEQ ID NO: 2194396 - RNA, 17 nt, Human
aauucucuaguuugauu

SEQ ID NO: 2194397 - RNA, 15 nt, Human
aauucucuaguuuga

SEQ ID NO: 2194398 - RNA, 21 nt, Human
aauucucauuugucacacacu

SEQ ID NO: 2194399 - RNA, 14 nt, Human
aauucuccugccuc

SEQ ID NO: 2194400 - RNA, 15 nt, Human
aauucuccuggaggu

SEQ ID NO: 2194401 - RNA, 12 nt, Human
aauucuccugga

SEQ ID NO: 2194402 - RNA, 13 nt, Human
aauucuccuggag

SEQ ID NO: 2194403 - RNA, 16 nt, Human
aauucuccugccucag

SEQ ID NO: 2194404 - RNA, 15 nt, Human
aauucuccugccuca

SEQ ID NO: 2194405 - RNA, 14 nt, Human
aauucuuaaaauau

SEQ ID NO: 2194406 - RNA, 16 nt, Human
aauuggaggaaagcaa

SEQ ID NO: 2194407 - RNA, 18 nt, Human
aauucuguuuuucuaggc

SEQ ID NO: 2194408 - RNA, 14 nt, Human
aauucuguuuuucu

SEQ ID NO: 2194409 - RNA, 22 nt, Human
aauuguaaggaaugauuaauua

SEQ ID NO: 2194410 - RNA, 21 nt, Human
aauugggagcuugggaaugga

SEQ ID NO: 2194411 - RNA, 18 nt, Human
aauuggcauguguauguu

SEQ ID NO: 2194412 - RNA, 14 nt, Human
aauuggcagcagau

SEQ ID NO: 2194413 - RNA, 22 nt, Human
aauuggcagcagauuuuaggaa

SEQ ID NO: 2194414 - RNA, 11 nt, Human
aauuggcagca

SEQ ID NO: 2194415 - RNA, 16 nt, Human
aauucugcuaccucac

SEQ ID NO: 2194416 - RNA, 15 nt, Human
aauucugcuaccuca

SEQ ID NO: 2194417 - RNA, 19 nt, Human
aauucugcuaccucacugg

SEQ ID NO: 2194418 - RNA, 12 nt, Human
aauucuguaaau

SEQ ID NO: 2194419 - RNA, 12 nt, Human
aauucuguacau

SEQ ID NO: 2194420 - RNA, 17 nt, Human
aauucuguacauagccu

SEQ ID NO: 2194421 - RNA, 19 nt, Human
aauucuguacauagccuau

SEQ ID NO: 2194422 - RNA, 19 nt, Human
aauucugcaauguuuuccu

SEQ ID NO: 2194423 - RNA, 20 nt, Human
aauucugcaauguuuuccuu

SEQ ID NO: 2194424 - RNA, 21 nt, Human
aauucugagaaaacuucuuuu

SEQ ID NO: 2194425 - RNA, 10 nt, Human
aauucugaau

SEQ ID NO: 2194426 - RNA, 13 nt, Human
aauucuguuucuu

SEQ ID NO: 2194427 - RNA, 12 nt, Human
aauucuguuucu

SEQ ID NO: 2194428 - RNA, 16 nt, Human
aauucuguuucuugag

SEQ ID NO: 2194429 - RNA, 12 nt, Human
aauucuguuuua

SEQ ID NO: 2194430 - RNA, 21 nt, Human
aauucuguuuuagguuaaaaa

SEQ ID NO: 2194431 - RNA, 20 nt, Human
aauucuguacauagccuaua

SEQ ID NO: 2194432 - RNA, 21 nt, Human
aauucuguacauagccuauau

SEQ ID NO: 2194433 - RNA, 22 nt, Human
aauucuguacugauuuuuguaa

SEQ ID NO: 2194434 - RNA, 19 nt, Human
aauucugucacucaccacu

SEQ ID NO: 2194435 - RNA, 11 nt, Human
aauuuccagag

SEQ ID NO: 2194436 - RNA, 21 nt, Human
aauuuccacaaaaucugucca

SEQ ID NO: 2194437 - RNA, 16 nt, Human
aauuucauaugcugua

SEQ ID NO: 2194438 - RNA, 18 nt, Human
aauuucauaugcuguaua

SEQ ID NO: 2194439 - RNA, 15 nt, Human
aauuucccaaagcag

SEQ ID NO: 2194440 - RNA, 17 nt, Human
aauuucccaaagcagug

SEQ ID NO: 2194441 - RNA, 19 nt, Human
aauuucccaauuaggaagu

SEQ ID NO: 2194442 - RNA, 24 nt, Human
aauuuccagugagcuuaucaugcu

SEQ ID NO: 2194443 - RNA, 20 nt, Human
aauuuccaguaccuuuguca

SEQ ID NO: 2194444 - RNA, 17 nt, Human
aauuuccaguaccuuug

SEQ ID NO: 2194445 - RNA, 15 nt, Human
aauuuccaguaccuu

SEQ ID NO: 2194446 - RNA, 15 nt, Human
aauuuccagagaaga

SEQ ID NO: 2194447 - RNA, 15 nt, Human
aauuucccaggaccc

SEQ ID NO: 2194448 - RNA, 14 nt, Human
aauuucccaggacc

SEQ ID NO: 2194449 - RNA, 12 nt, Human
aauuucccagga

SEQ ID NO: 2194450 - RNA, 22 nt, Human
aauuucccacaccguguaaacc

SEQ ID NO: 2194451 - RNA, 22 nt, Human
aauuucccaggacccugaaggg

SEQ ID NO: 2194452 - RNA, 21 nt, Human
aauuucccaggacccugaagg

SEQ ID NO: 2194453 - RNA, 17 nt, Human
aauuucccaggacccug

SEQ ID NO: 2194454 - RNA, 16 nt, Human
aauuucccaggacccu

SEQ ID NO: 2194455 - RNA, 14 nt, Human
aauuuccccaacag

SEQ ID NO: 2194456 - RNA, 15 nt, Human
aauuuccccaacagu

SEQ ID NO: 2194457 - RNA, 17 nt, Human
aauuuccccaacagugu

SEQ ID NO: 2194458 - RNA, 18 nt, Human
aauuuccccaacagugug

SEQ ID NO: 2194459 - RNA, 19 nt, Human
aauuuccccaacaguguga

SEQ ID NO: 2194460 - RNA, 20 nt, Human
aauuuccccaacagugugaa

SEQ ID NO: 2194461 - RNA, 21 nt, Human
aauuuccccaacagugugaag

SEQ ID NO: 2194462 - RNA, 22 nt, Human
aauuuccccaacagugugaagu

SEQ ID NO: 2194463 - RNA, 18 nt, Human
aauuguaggggugugugu

SEQ ID NO: 2194464 - RNA, 13 nt, Human
aauuguauaacag

SEQ ID NO: 2194465 - RNA, 14 nt, Human
aauuguauaacagg

SEQ ID NO: 2194466 - RNA, 15 nt, Human
aauuguacauauuug

SEQ ID NO: 2194467 - RNA, 21 nt, Human
aauuguacauauuuguggaau

SEQ ID NO: 2194468 - RNA, 14 nt, Human
aauuguacauauuu

SEQ ID NO: 2194469 - RNA, 16 nt, Human
aauuguauagagauau

SEQ ID NO: 2194470 - RNA, 22 nt, Human
aauuucauaccuaucaucuuaa

SEQ ID NO: 2194471 - RNA, 15 nt, Human
aauuguauaacaggu

SEQ ID NO: 2194472 - RNA, 16 nt, Human
aauuguauaacagguu

SEQ ID NO: 2194473 - RNA, 17 nt, Human
aauuguauaacagguua

SEQ ID NO: 2194474 - RNA, 18 nt, Human
aauuguauaacagguuau

SEQ ID NO: 2194475 - RNA, 19 nt, Human
aauuguauaacagguuauu

SEQ ID NO: 2194476 - RNA, 13 nt, Human
aauuguauagaga

SEQ ID NO: 2194477 - RNA, 15 nt, Human
aauuguauagagaua

SEQ ID NO: 2194478 - RNA, 11 nt, Human
aauuguaauag

SEQ ID NO: 2194479 - RNA, 13 nt, Human
aauuuccucuauu

SEQ ID NO: 2194480 - RNA, 17 nt, Human
acaugcacucagcucuu

SEQ ID NO: 2194481 - RNA, 16 nt, Human
acaugcacuaugagga

SEQ ID NO: 2194482 - RNA, 17 nt, Human
acaugcacuaugaggaa

SEQ ID NO: 2194483 - RNA, 18 nt, Human
acaugcacucagcucuug

SEQ ID NO: 2194484 - RNA, 22 nt, Human
acaugcacuuggcugcauaaau

SEQ ID NO: 2194485 - RNA, 18 nt, Human
acaugcacuuggcugcau

SEQ ID NO: 2194486 - RNA, 13 nt, Human
acaugcacgugug

SEQ ID NO: 2194487 - RNA, 18 nt, Human
acauccccccgccaaaag

SEQ ID NO: 2194488 - RNA, 14 nt, Human
acauccccacccuu

SEQ ID NO: 2194489 - RNA, 18 nt, Human
acaucccauugcccuggu

SEQ ID NO: 2194490 - RNA, 17 nt, Human
acaucccauugcccugg

SEQ ID NO: 2194491 - RNA, 16 nt, Human
acaucccauugcccug

SEQ ID NO: 2194492 - RNA, 20 nt, Human
acaucccauguaacagaaag

SEQ ID NO: 2194493 - RNA, 13 nt, Human
acauccaagcuuc

SEQ ID NO: 2194494 - RNA, 18 nt, Human
acaucccauguaacagaa

SEQ ID NO: 2194495 - RNA, 19 nt, Human
acauccaaagcagacagcu

SEQ ID NO: 2194496 - RNA, 17 nt, Human
acaucccugccagcucu

SEQ ID NO: 2194497 - RNA, 16 nt, Human
acaucccugccagcuc

SEQ ID NO: 2194498 - RNA, 23 nt, Human
acaucccuacaaaaaauuagaaa

SEQ ID NO: 2194499 - RNA, 18 nt, Human
acaucccgggacgcagca

SEQ ID NO: 2194500 - RNA, 15 nt, Human
acaucccugccagcu

SEQ ID NO: 2194501 - RNA, 13 nt, Human
acaugugguuuau

SEQ ID NO: 2194502 - RNA, 16 nt, Human
acaugugguuuauaga

SEQ ID NO: 2194503 - RNA, 23 nt, Human
acauguggugggacagggaccca

SEQ ID NO: 2194504 - RNA, 15 nt, Human
acauguggugggaca

SEQ ID NO: 2194505 - RNA, 16 nt, Human
acaugugugcgugugc

SEQ ID NO: 2194506 - RNA, 19 nt, Human
acauguggaaagugaauuu

SEQ ID NO: 2194507 - RNA, 20 nt, Human
acaugugccgaaugugcagg

SEQ ID NO: 2194508 - RNA, 18 nt, Human
acauguggaaagugaauu

SEQ ID NO: 2194509 - RNA, 16 nt, Human
acauguggggccaggu

SEQ ID NO: 2194510 - RNA, 18 nt, Human
acauguggggccagguca

SEQ ID NO: 2194511 - RNA, 22 nt, Human
acaugugccagggcaaugauga

SEQ ID NO: 2194512 - RNA, 17 nt, Human
acaugugccgaaugugc

SEQ ID NO: 2194513 - RNA, 19 nt, Human
acaugugccgaaugugcag

SEQ ID NO: 2194514 - RNA, 17 nt, Human
acaugcgguagccagca

SEQ ID NO: 2194515 - RNA, 23 nt, Human
acaugcggagaacaaaugugaag

SEQ ID NO: 2194516 - RNA, 14 nt, Human
acaugcgggcuggg

SEQ ID NO: 2194517 - RNA, 16 nt, Human
acaugcgggcugggca

SEQ ID NO: 2194518 - RNA, 22 nt, Human
acaugccugccccaaacaaaua

SEQ ID NO: 2194519 - RNA, 17 nt, Human
acaugcggagaacaaau

SEQ ID NO: 2194520 - RNA, 17 nt, Human
acaugcgggcugggcag

SEQ ID NO: 2194521 - RNA, 19 nt, Human
acaugcgggcugggcagcu

SEQ ID NO: 2194522 - RNA, 21 nt, Human
acaugcgggcugggcagcugu

SEQ ID NO: 2194523 - RNA, 22 nt, Human
acaugcgggcugggcagcuguu

SEQ ID NO: 2194524 - RNA, 15 nt, Human
acaugccugccccaa

SEQ ID NO: 2194525 - RNA, 21 nt, Human
acaugccugccccaaacaaau

SEQ ID NO: 2194526 - RNA, 20 nt, Human
acaugccucucucaggccaa

SEQ ID NO: 2194527 - RNA, 17 nt, Human
acaugcagcccaugccc

SEQ ID NO: 2194528 - RNA, 15 nt, Human
acaugcagcccaugc

SEQ ID NO: 2194529 - RNA, 18 nt, Human
acaugcagcccaugccca

SEQ ID NO: 2194530 - RNA, 14 nt, Human
acauaacguuuuuc

SEQ ID NO: 2194531 - RNA, 15 nt, Human
acauaacguuuuucc

SEQ ID NO: 2194532 - RNA, 16 nt, Human
acauaacguuuuuccu

SEQ ID NO: 2194533 - RNA, 18 nt, Human
acauaacguuuuuccuuu

SEQ ID NO: 2194534 - RNA, 20 nt, Human
acauaacguuuuuccuuuaa

SEQ ID NO: 2194535 - RNA, 21 nt, Human
acauaacguuuuuccuuuaaa

SEQ ID NO: 2194536 - RNA, 20 nt, Human
acauaaguaauucaagaaaa

SEQ ID NO: 2194537 - RNA, 20 nt, Human
acauaacugaaaaugugcua

SEQ ID NO: 2194538 - RNA, 12 nt, Human
acauaacugaaa

SEQ ID NO: 2194539 - RNA, 23 nt, Human
acauaacguuuuuccuuuaaaaa

SEQ ID NO: 2194540 - RNA, 20 nt, Human
acauaaguauuuaauucaug

SEQ ID NO: 2194541 - RNA, 21 nt, Human
acauaaguaauucaagaaaac

SEQ ID NO: 2194542 - RNA, 19 nt, Human
acauaaguuuaggauaaaa

SEQ ID NO: 2194543 - RNA, 20 nt, Human
acauacaggaagguagaaau

SEQ ID NO: 2194544 - RNA, 15 nt, Human
acauacaccagcauu

SEQ ID NO: 2194545 - RNA, 14 nt, Human
acauacaccagcau

SEQ ID NO: 2194546 - RNA, 13 nt, Human
acauacaccagca

SEQ ID NO: 2194547 - RNA, 16 nt, Human
acauacacacauaugu

SEQ ID NO: 2194548 - RNA, 16 nt, Human
acauacaauuccaaac

SEQ ID NO: 2194549 - RNA, 22 nt, Human
acauaacguuuuuccuuuaaaa

SEQ ID NO: 2194550 - RNA, 14 nt, Human
acauaagaccauaa

SEQ ID NO: 2194551 - RNA, 23 nt, Human
acauaaucuucugccuucucaug

SEQ ID NO: 2194552 - RNA, 21 nt, Human
acauacaccuaugucauuuca

SEQ ID NO: 2194553 - RNA, 21 nt, Human
acauccaaaauaguuaagaca

SEQ ID NO: 2194554 - RNA, 18 nt, Human
acauccaaagcagacagc

SEQ ID NO: 2194555 - RNA, 17 nt, Human
acauccaaagcagacag

SEQ ID NO: 2194556 - RNA, 16 nt, Human
acauccaaagcagaca

SEQ ID NO: 2194557 - RNA, 15 nt, Human
acauccaaagcagac

SEQ ID NO: 2194558 - RNA, 19 nt, Human
acauguuuuucuucucccu

SEQ ID NO: 2194559 - RNA, 13 nt, Human
acauguuuugaua

SEQ ID NO: 2194560 - RNA, 15 nt, Human
acauguuuugauaaa

SEQ ID NO: 2194561 - RNA, 17 nt, Human
acauguuuugauaaagu

SEQ ID NO: 2194562 - RNA, 18 nt, Human
acauguuuugauaaagua

SEQ ID NO: 2194563 - RNA, 20 nt, Human
acauguuuugauaaaguagu

SEQ ID NO: 2194564 - RNA, 21 nt, Human
acauguuuugauaaaguagua

SEQ ID NO: 2194565 - RNA, 23 nt, Human
acauguuuuagacaaauacucau

SEQ ID NO: 2194566 - RNA, 21 nt, Human
acauguuuuagacaaauacuc

SEQ ID NO: 2194567 - RNA, 22 nt, Human
acauguuuuagacaaauacuca

SEQ ID NO: 2194568 - RNA, 12 nt, Human
acauguguuuua

SEQ ID NO: 2194569 - RNA, 21 nt, Human
acauguguuuuaauuccaaua

SEQ ID NO: 2194570 - RNA, 20 nt, Human
acauguuuuagacaaauacu

SEQ ID NO: 2194571 - RNA, 17 nt, Human
acauguuuuagacaaau

SEQ ID NO: 2194572 - RNA, 17 nt, Human
acauguguuggcagccu

SEQ ID NO: 2194573 - RNA, 20 nt, Human
acauguguagccugugcaug

SEQ ID NO: 2194574 - RNA, 20 nt, Human
acauguguuaaguauuuuca

SEQ ID NO: 2194575 - RNA, 17 nt, Human
acauguguagccugugc

SEQ ID NO: 2194576 - RNA, 18 nt, Human
acauguguagccugugca

SEQ ID NO: 2194577 - RNA, 23 nt, Human
acauguuuugauaaaguaguaaa

SEQ ID NO: 2194578 - RNA, 22 nt, Human
acauguuuugauaaaguaguaa

SEQ ID NO: 2194579 - RNA, 18 nt, Human
accacgucugucuucaca

SEQ ID NO: 2194580 - RNA, 23 nt, Human
accacgugcuacccccaugcugg

SEQ ID NO: 2194581 - RNA, 12 nt, Human
accagagcugcc

SEQ ID NO: 2194582 - RNA, 13 nt, Human
accagagcugcca

SEQ ID NO: 2194583 - RNA, 14 nt, Human
accagagcugccac

SEQ ID NO: 2194584 - RNA, 16 nt, Human
accagagcugccaccu

SEQ ID NO: 2194585 - RNA, 19 nt, Human
accaccccagcugcucccc

SEQ ID NO: 2194586 - RNA, 23 nt, Human
accacccacucuccucugccuca

SEQ ID NO: 2194587 - RNA, 19 nt, Human
accaacccuguuuccugag

SEQ ID NO: 2194588 - RNA, 17 nt, Human
accaccagaagcccaga

SEQ ID NO: 2194589 - RNA, 16 nt, Human
accaccagaagcccag

SEQ ID NO: 2194590 - RNA, 15 nt, Human
accaccagaagccca

SEQ ID NO: 2194591 - RNA, 18 nt, Human
accaagccuggucagccc

SEQ ID NO: 2194592 - RNA, 13 nt, Human
accaaccugacca

SEQ ID NO: 2194593 - RNA, 14 nt, Human
accaagccguggcu

SEQ ID NO: 2194594 - RNA, 21 nt, Human
accaacgucugugccauuuug

SEQ ID NO: 2194595 - RNA, 15 nt, Human
accaagccguggcuu

SEQ ID NO: 2194596 - RNA, 16 nt, Human
accaagccguggcuuc

SEQ ID NO: 2194597 - RNA, 17 nt, Human
accaagccguggcuucc

SEQ ID NO: 2194598 - RNA, 18 nt, Human
accaagccguggcuuccc

SEQ ID NO: 2194599 - RNA, 18 nt, Human
accacggaaaagagcgca

SEQ ID NO: 2194600 - RNA, 14 nt, Human
accacggaaaagag

SEQ ID NO: 2194601 - RNA, 15 nt, Human
accaccccccacucu

SEQ ID NO: 2194602 - RNA, 20 nt, Human
accacggacguuuccaucag

SEQ ID NO: 2194603 - RNA, 21 nt, Human
accacggacguuuccaucagg

SEQ ID NO: 2194604 - RNA, 14 nt, Human
accacggccacugg

SEQ ID NO: 2194605 - RNA, 17 nt, Human
accacgucugucuucac

SEQ ID NO: 2194606 - RNA, 18 nt, Human
accacggccacuggccau

SEQ ID NO: 2194607 - RNA, 22 nt, Human
accacggccacuggccaucucc

SEQ ID NO: 2194608 - RNA, 14 nt, Human
accacguccagcug

SEQ ID NO: 2194609 - RNA, 14 nt, Human
accacguuucuaaa

SEQ ID NO: 2194610 - RNA, 13 nt, Human
accacguuucuaa

SEQ ID NO: 2194611 - RNA, 22 nt, Human
accaccccagcugcuccccucc

SEQ ID NO: 2194612 - RNA, 20 nt, Human
accaccccagcugcuccccu

SEQ ID NO: 2194613 - RNA, 14 nt, Human
accaccccccacuc

SEQ ID NO: 2194614 - RNA, 16 nt, Human
accacgcuggggucug

SEQ ID NO: 2194615 - RNA, 18 nt, Human
accaccccgccugcccuc

SEQ ID NO: 2194616 - RNA, 18 nt, Human
accacgcuggaccuugaa

SEQ ID NO: 2194617 - RNA, 14 nt, Human
accacgcuggaccu

SEQ ID NO: 2194618 - RNA, 16 nt, Human
accacgcuggaccuug

SEQ ID NO: 2194619 - RNA, 23 nt, Human
acauuucuuagacuacauuuaga

SEQ ID NO: 2194620 - RNA, 13 nt, Human
acauuugccuugc

SEQ ID NO: 2194621 - RNA, 19 nt, Human
acauuucuuugugcuuugg

SEQ ID NO: 2194622 - RNA, 14 nt, Human
accaacgucugugc

SEQ ID NO: 2194623 - RNA, 17 nt, Human
accaacgucugugccau

SEQ ID NO: 2194624 - RNA, 14 nt, Human
accaacccuguuuc

SEQ ID NO: 2194625 - RNA, 16 nt, Human
accaacccuguuuccu

SEQ ID NO: 2194626 - RNA, 17 nt, Human
accaacccuguuuccug

SEQ ID NO: 2194627 - RNA, 14 nt, Human
acauuugccuugcu

SEQ ID NO: 2194628 - RNA, 15 nt, Human
acauuugccuugcug

SEQ ID NO: 2194629 - RNA, 21 nt, Human
acauuuguauaaaauaauuuu

SEQ ID NO: 2194630 - RNA, 15 nt, Human
acauuugcucaugga

SEQ ID NO: 2194631 - RNA, 16 nt, Human
acauuugcucauggaa

SEQ ID NO: 2194632 - RNA, 16 nt, Human
acauuuguauaaaaua

SEQ ID NO: 2194633 - RNA, 19 nt, Human
acauuuguauaaaauaauu

SEQ ID NO: 2194634 - RNA, 21 nt, Human
acaguggcucacgccuguaau

SEQ ID NO: 2194635 - RNA, 12 nt, Human
acagugggaaau

SEQ ID NO: 2194636 - RNA, 14 nt, Human
acagugggaaauau

SEQ ID NO: 2194637 - RNA, 13 nt, Human
acagugggagcca

SEQ ID NO: 2194638 - RNA, 15 nt, Human
acagugggaaauauu

SEQ ID NO: 2194639 - RNA, 14 nt, Human
acagugggagccag

SEQ ID NO: 2194640 - RNA, 15 nt, Human
acagugggagccagg

SEQ ID NO: 2194641 - RNA, 16 nt, Human
acagugggagccaggg

SEQ ID NO: 2194642 - RNA, 17 nt, Human
acagugggagccagggc

SEQ ID NO: 2194643 - RNA, 14 nt, Human
acagugaucuccau

SEQ ID NO: 2194644 - RNA, 21 nt, Human
acaggcaccgagaauguugua

SEQ ID NO: 2194645 - RNA, 20 nt, Human
acaggcaccgagaauguugu

SEQ ID NO: 2194646 - RNA, 17 nt, Human
acaggcaccgagaaugu

SEQ ID NO: 2194647 - RNA, 14 nt, Human
acaggcaccgagaa

SEQ ID NO: 2194648 - RNA, 23 nt, Human
acaggcacccaccaucaugucug

SEQ ID NO: 2194649 - RNA, 13 nt, Human
acagugcaucuca

SEQ ID NO: 2194650 - RNA, 19 nt, Human
acagugauuaccagggacu

SEQ ID NO: 2194651 - RNA, 21 nt, Human
acagugaucuccauauguuac

SEQ ID NO: 2194652 - RNA, 19 nt, Human
acagugaucuccauauguu

SEQ ID NO: 2194653 - RNA, 18 nt, Human
acagugaucuccauaugu

SEQ ID NO: 2194654 - RNA, 15 nt, Human
acagugaucuccaua

SEQ ID NO: 2194655 - RNA, 15 nt, Human
acagugcaucucagc

SEQ ID NO: 2194656 - RNA, 17 nt, Human
acagugcaucucagccc

SEQ ID NO: 2194657 - RNA, 18 nt, Human
acagugcaucucagccca

SEQ ID NO: 2194658 - RNA, 18 nt, Human
acaguggaauauaaggaa

SEQ ID NO: 2194659 - RNA, 17 nt, Human
acaguggauugcauuuc

SEQ ID NO: 2194660 - RNA, 22 nt, Human
acagugcuucagccugaggcug

SEQ ID NO: 2194661 - RNA, 20 nt, Human
acagugcuugccacagagcg

SEQ ID NO: 2194662 - RNA, 21 nt, Human
acagugcuugccacagagcgg

SEQ ID NO: 2194663 - RNA, 21 nt, Human
acagugcuucagccugaggcu

SEQ ID NO: 2194664 - RNA, 20 nt, Human
acagugcuucagccugaggc

SEQ ID NO: 2194665 - RNA, 18 nt, Human
acagugcuucagccugag

SEQ ID NO: 2194666 - RNA, 17 nt, Human
acagugcuucagccuga

SEQ ID NO: 2194667 - RNA, 15 nt, Human
acagugcuucagccu

SEQ ID NO: 2194668 - RNA, 14 nt, Human
acagugcuucagcc

SEQ ID NO: 2194669 - RNA, 21 nt, Human
acagugccugggaauguauua

SEQ ID NO: 2194670 - RNA, 17 nt, Human
acagugccuucaauaaa

SEQ ID NO: 2194671 - RNA, 20 nt, Human
acagugccugggaauguauu

SEQ ID NO: 2194672 - RNA, 18 nt, Human
acagugccugggaaugua

SEQ ID NO: 2194673 - RNA, 20 nt, Human
acagugccuucaauaaaugg

SEQ ID NO: 2194674 - RNA, 21 nt, Human
acagugccuucaauaaauggu

SEQ ID NO: 2194675 - RNA, 14 nt, Human
acagugcuaaaaau

SEQ ID NO: 2194676 - RNA, 16 nt, Human
acagugcuaaaaaugg

SEQ ID NO: 2194677 - RNA, 14 nt, Human
acagugccugggaa

SEQ ID NO: 2194678 - RNA, 14 nt, Human
acagugccugcuga

SEQ ID NO: 2194679 - RNA, 13 nt, Human
acagugccugcug

SEQ ID NO: 2194680 - RNA, 22 nt, Human
acagugaucuccauauguuaca

SEQ ID NO: 2194681 - RNA, 11 nt, Human
acagugccugc

SEQ ID NO: 2194682 - RNA, 24 nt, Human
acagugaugcugugcuaugaauuu

SEQ ID NO: 2194683 - RNA, 14 nt, Human
acagugcugucuga

SEQ ID NO: 2194684 - RNA, 22 nt, Human
acagugcugucugaucugugcu

SEQ ID NO: 2194685 - RNA, 23 nt, Human
acagugcugucugaucugugcuu

SEQ ID NO: 2194686 - RNA, 15 nt, Human
acaggauuagacagu

SEQ ID NO: 2194687 - RNA, 23 nt, Human
acagcugagcacauucuggcuca

SEQ ID NO: 2194688 - RNA, 22 nt, Human
acagcugagagacuuuuaauca

SEQ ID NO: 2194689 - RNA, 18 nt, Human
acagcugagcacauucug

SEQ ID NO: 2194690 - RNA, 24 nt, Human
acaggaugguucccuugaugaaga

SEQ ID NO: 2194691 - RNA, 22 nt, Human
acaggaugguucccuugaugaa

SEQ ID NO: 2194692 - RNA, 15 nt, Human
acaggcaaugcuggc

SEQ ID NO: 2194693 - RNA, 16 nt, Human
acaggcaaugcuggcu

SEQ ID NO: 2194694 - RNA, 14 nt, Human
acaggcacccacca

SEQ ID NO: 2194695 - RNA, 17 nt, Human
acaggcaaugcuggcug

SEQ ID NO: 2194696 - RNA, 19 nt, Human
acagcucuucuccaggcug

SEQ ID NO: 2194697 - RNA, 20 nt, Human
acagcucuucuccaggcugu

SEQ ID NO: 2194698 - RNA, 16 nt, Human
acagcugaauuaucua

SEQ ID NO: 2194699 - RNA, 15 nt, Human
acagcugagagacuu

SEQ ID NO: 2194700 - RNA, 16 nt, Human
acagcugagagacuuu

SEQ ID NO: 2194701 - RNA, 19 nt, Human
acagcugagagacuuuuaa

SEQ ID NO: 2194702 - RNA, 13 nt, Human
accuccacagcuu

SEQ ID NO: 2194703 - RNA, 12 nt, Human
accuccacagcu

SEQ ID NO: 2194704 - RNA, 11 nt, Human
accuccacagc

SEQ ID NO: 2194705 - RNA, 20 nt, Human
accuccaaaacuccugcccc

SEQ ID NO: 2194706 - RNA, 21 nt, Human
accuccaaaacuccugccccu

SEQ ID NO: 2194707 - RNA, 21 nt, Human
accucaugcccacccccugcc

SEQ ID NO: 2194708 - RNA, 22 nt, Human
accucaugcccacccccugccc

SEQ ID NO: 2194709 - RNA, 17 nt, Human
accucauugacaagaac

SEQ ID NO: 2194710 - RNA, 19 nt, Human
accuccaaaacuccugccc

SEQ ID NO: 2194711 - RNA, 14 nt, Human
accuccacagcuuc

SEQ ID NO: 2194712 - RNA, 23 nt, Human
accgggcugggagcucugcagag

SEQ ID NO: 2194713 - RNA, 18 nt, Human
accgugaggccagagaca

SEQ ID NO: 2194714 - RNA, 21 nt, Human
accgggcugggagcucugcag

SEQ ID NO: 2194715 - RNA, 22 nt, Human
accgggccaguaucuauauaug

SEQ ID NO: 2194716 - RNA, 16 nt, Human
accgggccgcuagaug

SEQ ID NO: 2194717 - RNA, 19 nt, Human
accggcuuuaccaaaccgc

SEQ ID NO: 2194718 - RNA, 19 nt, Human
acccugugacauggugccu

SEQ ID NO: 2194719 - RNA, 21 nt, Human
acccugugacauggugccuga

SEQ ID NO: 2194720 - RNA, 22 nt, Human
accggggagcccccgccccgcc

SEQ ID NO: 2194721 - RNA, 17 nt, Human
accguggaccuuccugc

SEQ ID NO: 2194722 - RNA, 19 nt, Human
accgugccuggccacgccc

SEQ ID NO: 2194723 - RNA, 23 nt, Human
accgugaggccagagacacaagc

SEQ ID NO: 2194724 - RNA, 12 nt, Human
accucagccucc

SEQ ID NO: 2194725 - RNA, 11 nt, Human
accucagccuc

SEQ ID NO: 2194726 - RNA, 12 nt, Human
accgggcacuca

SEQ ID NO: 2194727 - RNA, 14 nt, Human
accgggcacucaga

SEQ ID NO: 2194728 - RNA, 20 nt, Human
accgggccacagagaaagua

SEQ ID NO: 2194729 - RNA, 16 nt, Human
accgggcacucagaag

SEQ ID NO: 2194730 - RNA, 17 nt, Human
acccugugauggggccc

SEQ ID NO: 2194731 - RNA, 19 nt, Human
acccugugauggggcccug

SEQ ID NO: 2194732 - RNA, 20 nt, Human
acccugugauggggcccugc

SEQ ID NO: 2194733 - RNA, 21 nt, Human
acccugugauggggcccugcc

SEQ ID NO: 2194734 - RNA, 14 nt, Human
accucagccuugga

SEQ ID NO: 2194735 - RNA, 12 nt, Human
accucagcucug

SEQ ID NO: 2194736 - RNA, 20 nt, Human
accucagccuuccccuugcc

SEQ ID NO: 2194737 - RNA, 19 nt, Human
accucagccugugcugccc

SEQ ID NO: 2194738 - RNA, 18 nt, Human
accucagccugugcugcc

SEQ ID NO: 2194739 - RNA, 17 nt, Human
accucagccugugcugc

SEQ ID NO: 2194740 - RNA, 16 nt, Human
accucagccugugcug

SEQ ID NO: 2194741 - RNA, 12 nt, Human
accucagccugu

SEQ ID NO: 2194742 - RNA, 12 nt, Human
accucaggcagc

SEQ ID NO: 2194743 - RNA, 15 nt, Human
accucaggcagcuca

SEQ ID NO: 2194744 - RNA, 13 nt, Human
accucagcugcuu

SEQ ID NO: 2194745 - RNA, 17 nt, Human
accucaggcacuagccu

SEQ ID NO: 2194746 - RNA, 18 nt, Human
accucaggcacuagccuu

SEQ ID NO: 2194747 - RNA, 19 nt, Human
accucaggcacuagccuuu

SEQ ID NO: 2194748 - RNA, 14 nt, Human
accucagcucuggg

SEQ ID NO: 2194749 - RNA, 15 nt, Human
accucagcucuggga

SEQ ID NO: 2194750 - RNA, 17 nt, Human
accucagcucugggaga

SEQ ID NO: 2194751 - RNA, 18 nt, Human
accucagcucugggagag

SEQ ID NO: 2194752 - RNA, 22 nt, Human
accucagcucugggagaggauu

SEQ ID NO: 2194753 - RNA, 23 nt, Human
accucagcucugggagaggauuu

SEQ ID NO: 2194754 - RNA, 15 nt, Human
accucagcugcuucu

SEQ ID NO: 2194755 - RNA, 11 nt, Human
accucagccug

SEQ ID NO: 2194756 - RNA, 18 nt, Human
accguggaccuuccugcc

SEQ ID NO: 2194757 - RNA, 15 nt, Human
accguggaggaggaa

SEQ ID NO: 2194758 - RNA, 22 nt, Human
accguggaggaggaaggcaaga

SEQ ID NO: 2194759 - RNA, 15 nt, Human
accucagccuccugu

SEQ ID NO: 2194760 - RNA, 18 nt, Human
accguggaggaggaaggc

SEQ ID NO: 2194761 - RNA, 13 nt, Human
accucagccuggc

SEQ ID NO: 2194762 - RNA, 21 nt, Human
accucagccuggccagacaca

SEQ ID NO: 2194763 - RNA, 20 nt, Human
accucagccuggccagacac

SEQ ID NO: 2194764 - RNA, 19 nt, Human
accucagccuggccagaca

SEQ ID NO: 2194765 - RNA, 17 nt, Human
accucagccuggccaga

SEQ ID NO: 2194766 - RNA, 16 nt, Human
accucagccuggccag

SEQ ID NO: 2194767 - RNA, 15 nt, Human
accucagccuggcca

SEQ ID NO: 2194768 - RNA, 14 nt, Human
accucagccuggcc

SEQ ID NO: 2194769 - RNA, 21 nt, Human
accucaggccaggugcagugg

SEQ ID NO: 2194770 - RNA, 23 nt, Human
accucaggcacuagccuuuggcu

SEQ ID NO: 2194771 - RNA, 14 nt, Human
accucagguugcug

SEQ ID NO: 2194772 - RNA, 20 nt, Human
accucaggccaggugcagug

SEQ ID NO: 2194773 - RNA, 13 nt, Human
accucaggccagg

SEQ ID NO: 2194774 - RNA, 15 nt, Human
accucagucaguauu

SEQ ID NO: 2194775 - RNA, 15 nt, Human
accucagguugcugg

SEQ ID NO: 2194776 - RNA, 16 nt, Human
accucagguugcuggu

SEQ ID NO: 2194777 - RNA, 17 nt, Human
accucagguugcugguu

SEQ ID NO: 2194778 - RNA, 19 nt, Human
accucagguugcugguugc

SEQ ID NO: 2194779 - RNA, 22 nt, Human
accucagucaguauuguuuugg

SEQ ID NO: 2194780 - RNA, 17 nt, Human
accucagucaguauugu

SEQ ID NO: 2194781 - RNA, 18 nt, Human
accucagucaguauuguu

SEQ ID NO: 2194782 - RNA, 16 nt, Human
accucaugcaucucca

SEQ ID NO: 2194783 - RNA, 18 nt, Human
accucaugcaucuccacc

SEQ ID NO: 2194784 - RNA, 19 nt, Human
accucaugcaucuccaccu

SEQ ID NO: 2194785 - RNA, 20 nt, Human
accucaugcaucuccaccug

SEQ ID NO: 2194786 - RNA, 21 nt, Human
accucaugcaucuccaccugc

SEQ ID NO: 2194787 - RNA, 13 nt, Human
accucaugcccac

SEQ ID NO: 2194788 - RNA, 16 nt, Human
accucaugcccacccc

SEQ ID NO: 2194789 - RNA, 20 nt, Human
accucaugcccacccccugc

SEQ ID NO: 2194790 - RNA, 23 nt, Human
accucaugcccacccccugcccu

SEQ ID NO: 2194791 - RNA, 15 nt, Human
accucaggcaggaag

SEQ ID NO: 2194792 - RNA, 12 nt, Human
accucaggcagg

SEQ ID NO: 2194793 - RNA, 16 nt, Human
accucaggcagcucaa

SEQ ID NO: 2194794 - RNA, 17 nt, Human
accucaggcagcucaag

SEQ ID NO: 2194795 - RNA, 11 nt, Human
accucaggccu

SEQ ID NO: 2194796 - RNA, 20 nt, Human
accucaggugauccacccac

SEQ ID NO: 2194797 - RNA, 21 nt, Human
accucaggugauccacccacc

SEQ ID NO: 2194798 - RNA, 22 nt, Human
acccuaaggucauuaccacagg

SEQ ID NO: 2194799 - RNA, 16 nt, Human
acccuaagacuccucg

SEQ ID NO: 2194800 - RNA, 14 nt, Human
acccuaccccacca

SEQ ID NO: 2194801 - RNA, 16 nt, Human
acccuaagccuccuuu

SEQ ID NO: 2194802 - RNA, 13 nt, Human
acccuaccugugc

SEQ ID NO: 2194803 - RNA, 17 nt, Human
acccuaccugugccuga

SEQ ID NO: 2194804 - RNA, 16 nt, Human
acccuaccugugccug

SEQ ID NO: 2194805 - RNA, 15 nt, Human
acccuaccccaccac

SEQ ID NO: 2194806 - RNA, 13 nt, Human
acccuaccuguuc

SEQ ID NO: 2194807 - RNA, 14 nt, Human
acccuacuucuuuu

SEQ ID NO: 2194808 - RNA, 18 nt, Human
acccuacuucuuuugcuc

SEQ ID NO: 2194809 - RNA, 23 nt, Human
acccuagccauuccugguaccca

SEQ ID NO: 2194810 - RNA, 16 nt, Human
acccuagccauuccug

SEQ ID NO: 2194811 - RNA, 17 nt, Human
acccuagccauuccugg

SEQ ID NO: 2194812 - RNA, 19 nt, Human
acccuagccauuccuggua

SEQ ID NO: 2194813 - RNA, 19 nt, Human
acccuaaaaagcagagcuu

SEQ ID NO: 2194814 - RNA, 23 nt, Human
acccguucugcuggccuggaucu

SEQ ID NO: 2194815 - RNA, 16 nt, Human
acccuaaaucuugacu

SEQ ID NO: 2194816 - RNA, 16 nt, Human
acccguucacauuuuu

SEQ ID NO: 2194817 - RNA, 21 nt, Human
acccguucaacuuuuccuuug

SEQ ID NO: 2194818 - RNA, 13 nt, Human
acccguucaacuu

SEQ ID NO: 2194819 - RNA, 18 nt, Human
acccguucugcuggccug

SEQ ID NO: 2194820 - RNA, 20 nt, Human
acccguucugcuggccugga

SEQ ID NO: 2194821 - RNA, 22 nt, Human
acccguucugcuggccuggauc

SEQ ID NO: 2194822 - RNA, 19 nt, Human
acccuauugcugcuugagg

SEQ ID NO: 2194823 - RNA, 14 nt, Human
acccuauugcugcu

SEQ ID NO: 2194824 - RNA, 11 nt, Human
acccucagagc

SEQ ID NO: 2194825 - RNA, 18 nt, Human
acccucagaaacacuggg

SEQ ID NO: 2194826 - RNA, 21 nt, Human
acccucagaaacacuggggcu

SEQ ID NO: 2194827 - RNA, 21 nt, Human
acccucaaccucuucuggcuc

SEQ ID NO: 2194828 - RNA, 15 nt, Human
acccucacacuggga

SEQ ID NO: 2194829 - RNA, 17 nt, Human
acccuauauguaguaua

SEQ ID NO: 2194830 - RNA, 13 nt, Human
acccuauugcugc

SEQ ID NO: 2194831 - RNA, 22 nt, Human
acccuagucccuuccccucccu

SEQ ID NO: 2194832 - RNA, 15 nt, Human
acccuaguucuaccu

SEQ ID NO: 2194833 - RNA, 16 nt, Human
acccuaguuucccuga

SEQ ID NO: 2194834 - RNA, 21 nt, Human
acccuaguucuaccucaggca

SEQ ID NO: 2194835 - RNA, 23 nt, Human
acccuauauuuugcauaguacca

SEQ ID NO: 2194836 - RNA, 22 nt, Human
acccuggccgcccccugccccc

SEQ ID NO: 2194837 - RNA, 23 nt, Human
acccugggaccuaggggcgccgc

SEQ ID NO: 2194838 - RNA, 12 nt, Human
acccugggaccu

SEQ ID NO: 2194839 - RNA, 14 nt, Human
acccugggcccugg

SEQ ID NO: 2194840 - RNA, 15 nt, Human
acccugggcccuggg

SEQ ID NO: 2194841 - RNA, 17 nt, Human
acccugggcccugggcu

SEQ ID NO: 2194842 - RNA, 22 nt, Human
acccuggccgaguccaagcugg

SEQ ID NO: 2194843 - RNA, 16 nt, Human
acccuggccgcccccu

SEQ ID NO: 2194844 - RNA, 17 nt, Human
acccuggccgcccccug

SEQ ID NO: 2194845 - RNA, 19 nt, Human
acccuggccgcccccugcc

SEQ ID NO: 2194846 - RNA, 21 nt, Human
acccuggccgaguccaagcug

SEQ ID NO: 2194847 - RNA, 18 nt, Human
acccuggccgaguccaag

SEQ ID NO: 2194848 - RNA, 22 nt, Human
acccugggcccugggcuggaau

SEQ ID NO: 2194849 - RNA, 18 nt, Human
acccugggcccugggcug

SEQ ID NO: 2194850 - RNA, 20 nt, Human
acccugggcccugggcugga

SEQ ID NO: 2194851 - RNA, 19 nt, Human
acccugggcucugggagca

SEQ ID NO: 2194852 - RNA, 20 nt, Human
acccugggcucugggagcag

SEQ ID NO: 2194853 - RNA, 21 nt, Human
acccugggcucugggagcagc

SEQ ID NO: 2194854 - RNA, 17 nt, Human
acccugggcucuguggg

SEQ ID NO: 2194855 - RNA, 18 nt, Human
acccugggcucugugggc

SEQ ID NO: 2194856 - RNA, 19 nt, Human
acccugggcucugugggcu

SEQ ID NO: 2194857 - RNA, 16 nt, Human
acccuggggagaaagu

SEQ ID NO: 2194858 - RNA, 17 nt, Human
acccuggggccuggacc

SEQ ID NO: 2194859 - RNA, 18 nt, Human
acccuggggccuggaccu

SEQ ID NO: 2194860 - RNA, 19 nt, Human
acccuggggccuggaccug

SEQ ID NO: 2194861 - RNA, 13 nt, Human
acccuggggccug

SEQ ID NO: 2194862 - RNA, 20 nt, Human
acccugggcucugugggcug

SEQ ID NO: 2194863 - RNA, 15 nt, Human
acccuguauauagcc

SEQ ID NO: 2194864 - RNA, 18 nt, Human
acccuguauauagcccag

SEQ ID NO: 2194865 - RNA, 20 nt, Human
acccuguacuguucuguguc

SEQ ID NO: 2194866 - RNA, 22 nt, Human
acccuguacuguucugugucuu

SEQ ID NO: 2194867 - RNA, 20 nt, Human
acccuguauauagcccagcc

SEQ ID NO: 2194868 - RNA, 19 nt, Human
acccuguccaaacugccua

SEQ ID NO: 2194869 - RNA, 17 nt, Human
acccuggugguugcugu

SEQ ID NO: 2194870 - RNA, 15 nt, Human
acccuggugggccaa

SEQ ID NO: 2194871 - RNA, 19 nt, Human
acccuggugguugcuguuu

SEQ ID NO: 2194872 - RNA, 18 nt, Human
acccuggugguugcuguu

SEQ ID NO: 2194873 - RNA, 22 nt, Human
acccuggggccuggaccugccu

SEQ ID NO: 2194874 - RNA, 18 nt, Human
acccugggugggcucugu

SEQ ID NO: 2194875 - RNA, 19 nt, Human
acccugggugggcucugug

SEQ ID NO: 2194876 - RNA, 20 nt, Human
acccugggugggcucugugc

SEQ ID NO: 2194877 - RNA, 11 nt, Human
acccugucucu

SEQ ID NO: 2194878 - RNA, 20 nt, Human
acccugucccccagcucugg

SEQ ID NO: 2194879 - RNA, 21 nt, Human
acccugucccccagcucuggu

SEQ ID NO: 2194880 - RNA, 14 nt, Human
acccugucccccag

SEQ ID NO: 2194881 - RNA, 16 nt, Human
acccugucccccagcu

SEQ ID NO: 2194882 - RNA, 19 nt, Human
acccugucccccagcucug

SEQ ID NO: 2194883 - RNA, 21 nt, Human
acccugucucuacuaaaaaua

SEQ ID NO: 2194884 - RNA, 21 nt, Human
acccugucucuuaaagaaaaa

SEQ ID NO: 2194885 - RNA, 22 nt, Human
acccugucccccagcucuggug

SEQ ID NO: 2194886 - RNA, 14 nt, Human
acccugucucuacu

SEQ ID NO: 2194887 - RNA, 22 nt, Human
acccugucuguagagggcccug

SEQ ID NO: 2194888 - RNA, 23 nt, Human
acccugucuguagagggcccugg

SEQ ID NO: 2194889 - RNA, 16 nt, Human
acccugugauggggcc

SEQ ID NO: 2194890 - RNA, 16 nt, Human
acccucaggcaggugg

SEQ ID NO: 2194891 - RNA, 15 nt, Human
acccucaggcaggug

SEQ ID NO: 2194892 - RNA, 23 nt, Human
acccucaggcauaggccugggug

SEQ ID NO: 2194893 - RNA, 22 nt, Human
acccucaggcauaggccugggu

SEQ ID NO: 2194894 - RNA, 20 nt, Human
acccucaggcauaggccugg

SEQ ID NO: 2194895 - RNA, 19 nt, Human
acccucaggcauaggccug

SEQ ID NO: 2194896 - RNA, 13 nt, Human
acccucaucacca

SEQ ID NO: 2194897 - RNA, 14 nt, Human
acccucaggcaggu

SEQ ID NO: 2194898 - RNA, 13 nt, Human
acccucaggcagg

SEQ ID NO: 2194899 - RNA, 18 nt, Human
acccucagagccaccccu

SEQ ID NO: 2194900 - RNA, 14 nt, Human
acccucagcacccc

SEQ ID NO: 2194901 - RNA, 16 nt, Human
acccucagcaccccuu

SEQ ID NO: 2194902 - RNA, 17 nt, Human
acccucagcaccccuuc

SEQ ID NO: 2194903 - RNA, 18 nt, Human
acccucagcaccccuucc

SEQ ID NO: 2194904 - RNA, 19 nt, Human
acccucagcaccccuucca

SEQ ID NO: 2194905 - RNA, 22 nt, Human
acccucagcaccccuuccaugu

SEQ ID NO: 2194906 - RNA, 15 nt, Human
acccucaggacaaug

SEQ ID NO: 2194907 - RNA, 13 nt, Human
acccucaugcugu

SEQ ID NO: 2194908 - RNA, 16 nt, Human
acccuggaucaguccu

SEQ ID NO: 2194909 - RNA, 13 nt, Human
acccuggagccca

SEQ ID NO: 2194910 - RNA, 23 nt, Human
acccuggcacuauaauguaagcu

SEQ ID NO: 2194911 - RNA, 15 nt, Human
acccuggcauuaugu

SEQ ID NO: 2194912 - RNA, 18 nt, Human
acccuggcacccagggug

SEQ ID NO: 2194913 - RNA, 23 nt, Human
acccucaucaccaacgucugugc

SEQ ID NO: 2194914 - RNA, 12 nt, Human
acccucaugcug

SEQ ID NO: 2194915 - RNA, 17 nt, Human
acgcaaagggcugaaag

SEQ ID NO: 2194916 - RNA, 12 nt, Human
acgcacacacac

SEQ ID NO: 2194917 - RNA, 13 nt, Human
acgcacacacaca

SEQ ID NO: 2194918 - RNA, 21 nt, Human
acgcaaagggcugaaagccau

SEQ ID NO: 2194919 - RNA, 20 nt, Human
acgcacacacacacacagga

SEQ ID NO: 2194920 - RNA, 19 nt, Human
acgcacacacacacacagg

SEQ ID NO: 2194921 - RNA, 18 nt, Human
acgcacacacacacacag

SEQ ID NO: 2194922 - RNA, 14 nt, Human
acgcacacacacaa

SEQ ID NO: 2194923 - RNA, 21 nt, Human
acgcacacacacacacaggag

SEQ ID NO: 2194924 - RNA, 22 nt, Human
acgcacacguacuuaaaugaaa

SEQ ID NO: 2194925 - RNA, 14 nt, Human
acgcaccacaucuc

SEQ ID NO: 2194926 - RNA, 15 nt, Human
acgcacagccaagga

SEQ ID NO: 2194927 - RNA, 17 nt, Human
acgcacagccaaggacu

SEQ ID NO: 2194928 - RNA, 19 nt, Human
acgauuucuguuuagauaa

SEQ ID NO: 2194929 - RNA, 23 nt, Human
acgauuucuguuuagauaauaca

SEQ ID NO: 2194930 - RNA, 20 nt, Human
acgauuucuguuuagauaau

SEQ ID NO: 2194931 - RNA, 15 nt, Human
acggacacccccucg

SEQ ID NO: 2194932 - RNA, 16 nt, Human
acggacacccccucgc

SEQ ID NO: 2194933 - RNA, 17 nt, Human
acggacacucaaaagcu

SEQ ID NO: 2194934 - RNA, 19 nt, Human
acggaauaguuggcuagga

SEQ ID NO: 2194935 - RNA, 13 nt, Human
acgcuucuucuuu

SEQ ID NO: 2194936 - RNA, 20 nt, Human
acgcuugcguaugucuguua

SEQ ID NO: 2194937 - RNA, 12 nt, Human
acgucugugcca

SEQ ID NO: 2194938 - RNA, 13 nt, Human
acgucugugccau

SEQ ID NO: 2194939 - RNA, 12 nt, Human
acgucuucuaaa

SEQ ID NO: 2194940 - RNA, 15 nt, Human
acgcuugcucauuuu

SEQ ID NO: 2194941 - RNA, 23 nt, Human
acgucuuccuucugccugagcuu

SEQ ID NO: 2194942 - RNA, 14 nt, Human
acgcugugggcagg

SEQ ID NO: 2194943 - RNA, 21 nt, Human
acgcuuaaaggugucuuccuc

SEQ ID NO: 2194944 - RNA, 15 nt, Human
acgcugugggcaggu

SEQ ID NO: 2194945 - RNA, 16 nt, Human
acgcaggaacucccag

SEQ ID NO: 2194946 - RNA, 17 nt, Human
acgcaggaacucccagc

SEQ ID NO: 2194947 - RNA, 18 nt, Human
acgcuugcguaugucugu

SEQ ID NO: 2194948 - RNA, 18 nt, Human
acgcuucugaaugcugcu

SEQ ID NO: 2194949 - RNA, 22 nt, Human
acgcuucugaaugcugcuacuu

SEQ ID NO: 2194950 - RNA, 12 nt, Human
acgcuucugaau

SEQ ID NO: 2194951 - RNA, 13 nt, Human
acgcuucugaaug

SEQ ID NO: 2194952 - RNA, 22 nt, Human
acgcugugcugcccugcccacc

SEQ ID NO: 2194953 - RNA, 19 nt, Human
acgcugugcugcccugccc

SEQ ID NO: 2194954 - RNA, 19 nt, Human
acgcaccucccauccuaau

SEQ ID NO: 2194955 - RNA, 18 nt, Human
acgcagcccuagagccug

SEQ ID NO: 2194956 - RNA, 19 nt, Human
acgcagcccuagagccugc

SEQ ID NO: 2194957 - RNA, 20 nt, Human
acgcagcccuagagccugcc

SEQ ID NO: 2194958 - RNA, 14 nt, Human
acgcagcccuagag

SEQ ID NO: 2194959 - RNA, 16 nt, Human
acgcaccugccucagg

SEQ ID NO: 2194960 - RNA, 15 nt, Human
acgcaccucccaucc

SEQ ID NO: 2194961 - RNA, 13 nt, Human
acgcaccucccau

SEQ ID NO: 2194962 - RNA, 15 nt, Human
acgcaccugccucag

SEQ ID NO: 2194963 - RNA, 14 nt, Human
acgcaccugccuca

SEQ ID NO: 2194964 - RNA, 12 nt, Human
acgcagcccugc

SEQ ID NO: 2194965 - RNA, 21 nt, Human
acgcagcccuagagccugccu

SEQ ID NO: 2194966 - RNA, 22 nt, Human
acgcagcccuagagccugccug

SEQ ID NO: 2194967 - RNA, 23 nt, Human
acgcagcccuagagccugccugg

SEQ ID NO: 2194968 - RNA, 24 nt, Human
acgcagcccuagagccugccugga

SEQ ID NO: 2194969 - RNA, 22 nt, Human
acgcagcccugcuuugggcugc

SEQ ID NO: 2194970 - RNA, 23 nt, Human
acgcagcccugcuuugggcugcc

SEQ ID NO: 2194971 - RNA, 18 nt, Human
acuaauggggcggugaga

SEQ ID NO: 2194972 - RNA, 19 nt, Human
acuaaugccuuacucuucu

SEQ ID NO: 2194973 - RNA, 24 nt, Human
acuaaugccuuacucuucuugaaa

SEQ ID NO: 2194974 - RNA, 23 nt, Human
acuaaugccuuacucuucuugaa

SEQ ID NO: 2194975 - RNA, 21 nt, Human
acgugccaggcccggggcugg

SEQ ID NO: 2194976 - RNA, 15 nt, Human
acgugccuuuugcac

SEQ ID NO: 2194977 - RNA, 17 nt, Human
acgugccuuuugcaccc

SEQ ID NO: 2194978 - RNA, 19 nt, Human
acgugccuuuugcaccccu

SEQ ID NO: 2194979 - RNA, 19 nt, Human
acgugccaggcccggggcu

SEQ ID NO: 2194980 - RNA, 18 nt, Human
acgugccaggcccggggc

SEQ ID NO: 2194981 - RNA, 14 nt, Human
acgugccaggcccg

SEQ ID NO: 2194982 - RNA, 13 nt, Human
acgugccaggccc

SEQ ID NO: 2194983 - RNA, 20 nt, Human
acgugccuuuugcaccccuc

SEQ ID NO: 2194984 - RNA, 21 nt, Human
acgugccuuuugcaccccucc

SEQ ID NO: 2194985 - RNA, 22 nt, Human
acgugccuuuugcaccccuccc

SEQ ID NO: 2194986 - RNA, 19 nt, Human
acguggagagcuggugccc

SEQ ID NO: 2194987 - RNA, 18 nt, Human
acguggagagcuggugcc

SEQ ID NO: 2194988 - RNA, 16 nt, Human
acguggagagcuggug

SEQ ID NO: 2194989 - RNA, 15 nt, Human
acguggagagcuggu

SEQ ID NO: 2194990 - RNA, 17 nt, Human
acguggacguuuuuaau

SEQ ID NO: 2194991 - RNA, 14 nt, Human
acguggagagcugg

SEQ ID NO: 2194992 - RNA, 19 nt, Human
accuguaaucccagcacuu

SEQ ID NO: 2194993 - RNA, 16 nt, Human
accuguaaucccagca

SEQ ID NO: 2194994 - RNA, 19 nt, Human
accuguaaucccagcuacu

SEQ ID NO: 2194995 - RNA, 20 nt, Human
accuguaaucccagcuacuu

SEQ ID NO: 2194996 - RNA, 19 nt, Human
accugugaguuuaaagcaa

SEQ ID NO: 2194997 - RNA, 14 nt, Human
accugugccucggc

SEQ ID NO: 2194998 - RNA, 18 nt, Human
accugugaguuuaaagca

SEQ ID NO: 2194999 - RNA, 14 nt, Human
accuguaaucccag

SEQ ID NO: 2195000 - RNA, 15 nt, Human
accuguaaucccagc

SEQ ID NO: 2195001 - RNA, 11 nt, Human
accuguaauca

SEQ ID NO: 2195002 - RNA, 21 nt, Human
accuguaauaaauaugagugc

SEQ ID NO: 2195003 - RNA, 23 nt, Human
accuguaauaaauaugagugcca

SEQ ID NO: 2195004 - RNA, 20 nt, Human
accuguaacuuuuguaaaua

SEQ ID NO: 2195005 - RNA, 13 nt, Human
accuguaauaaau

SEQ ID NO: 2195006 - RNA, 15 nt, Human
accuguaauaaauau

SEQ ID NO: 2195007 - RNA, 16 nt, Human
accuguaauaaauaug

SEQ ID NO: 2195008 - RNA, 17 nt, Human
accuguaauaaauauga

SEQ ID NO: 2195009 - RNA, 18 nt, Human
accuguaauaaauaugag

SEQ ID NO: 2195010 - RNA, 17 nt, Human
accuguggccaaguucu

SEQ ID NO: 2195011 - RNA, 19 nt, Human
accugugaugaggggagga

SEQ ID NO: 2195012 - RNA, 23 nt, Human
accugugcuucgggcccuuccca

SEQ ID NO: 2195013 - RNA, 16 nt, Human
accugugccucggcuu

SEQ ID NO: 2195014 - RNA, 15 nt, Human
accugugccucggcu

SEQ ID NO: 2195015 - RNA, 22 nt, Human
accugugcuucgggcccuuccc

SEQ ID NO: 2195016 - RNA, 19 nt, Human
accugugcuucgggcccuu

SEQ ID NO: 2195017 - RNA, 17 nt, Human
accuguaacuuuuguaa

SEQ ID NO: 2195018 - RNA, 23 nt, Human
accugccccgcccagcugcaccu

SEQ ID NO: 2195019 - RNA, 15 nt, Human
accuguaacuuuugu

SEQ ID NO: 2195020 - RNA, 17 nt, Human
accugccccgcccagcu

SEQ ID NO: 2195021 - RNA, 16 nt, Human
accugccccgcccagc

SEQ ID NO: 2195022 - RNA, 20 nt, Human
accugccccucaacucuccu

SEQ ID NO: 2195023 - RNA, 12 nt, Human
accugccccuca

SEQ ID NO: 2195024 - RNA, 15 nt, Human
accugccccucaacu

SEQ ID NO: 2195025 - RNA, 23 nt, Human
accugcccccuucucccacacug

SEQ ID NO: 2195026 - RNA, 22 nt, Human
accugcccccuucucccacacu

SEQ ID NO: 2195027 - RNA, 20 nt, Human
accugcccccuucucccaca

SEQ ID NO: 2195028 - RNA, 19 nt, Human
accugcccccuucucccac

SEQ ID NO: 2195029 - RNA, 14 nt, Human
accucuguuguccu

SEQ ID NO: 2195030 - RNA, 16 nt, Human
accucuguuguccucc

SEQ ID NO: 2195031 - RNA, 13 nt, Human
accugccaggcag

SEQ ID NO: 2195032 - RNA, 15 nt, Human
accugccaggcaggg

SEQ ID NO: 2195033 - RNA, 23 nt, Human
accugccaggaagccagcaggcu

SEQ ID NO: 2195034 - RNA, 21 nt, Human
accugccaggaagccagcagg

SEQ ID NO: 2195035 - RNA, 22 nt, Human
accugccaggaagccagcaggc

SEQ ID NO: 2195036 - RNA, 19 nt, Human
accucugucuuggcuuuca

SEQ ID NO: 2195037 - RNA, 22 nt, Human
accucugucuuggcuuucaugu

SEQ ID NO: 2195038 - RNA, 14 nt, Human
accucugugaccuc

SEQ ID NO: 2195039 - RNA, 15 nt, Human
accucugugaccuca

SEQ ID NO: 2195040 - RNA, 16 nt, Human
accucugugaccucag

SEQ ID NO: 2195041 - RNA, 17 nt, Human
accucugugaccucagg

SEQ ID NO: 2195042 - RNA, 18 nt, Human
accucugugaccucaggc

SEQ ID NO: 2195043 - RNA, 19 nt, Human
accucugugaccucaggca

SEQ ID NO: 2195044 - RNA, 15 nt, Human
accucugugugcucc

SEQ ID NO: 2195045 - RNA, 15 nt, Human
accucuguucagugu

SEQ ID NO: 2195046 - RNA, 14 nt, Human
accucuguucagug

SEQ ID NO: 2195047 - RNA, 11 nt, Human
accucugugug

SEQ ID NO: 2195048 - RNA, 12 nt, Human
accucugugugc

SEQ ID NO: 2195049 - RNA, 22 nt, Human
accucuguucaguguaaauagu

SEQ ID NO: 2195050 - RNA, 19 nt, Human
accucuguucaguguaaau

SEQ ID NO: 2195051 - RNA, 18 nt, Human
accucuguucaguguaaa

SEQ ID NO: 2195052 - RNA, 17 nt, Human
accucuguucaguguaa

SEQ ID NO: 2195053 - RNA, 17 nt, Human
accucuguuguccuccc

SEQ ID NO: 2195054 - RNA, 12 nt, Human
accucugccuga

SEQ ID NO: 2195055 - RNA, 20 nt, Human
accucugccugaagucacac

SEQ ID NO: 2195056 - RNA, 23 nt, Human
accucugccugaagucacacagu

SEQ ID NO: 2195057 - RNA, 18 nt, Human
accuuggcaccagacacc

SEQ ID NO: 2195058 - RNA, 17 nt, Human
accuuggcaccagacac

SEQ ID NO: 2195059 - RNA, 16 nt, Human
accuuggcaccagaca

SEQ ID NO: 2195060 - RNA, 14 nt, Human
accuuggcaccaga

SEQ ID NO: 2195061 - RNA, 19 nt, Human
accuugcuuugauggaaua

SEQ ID NO: 2195062 - RNA, 18 nt, Human
accuuggacauccuccuc

SEQ ID NO: 2195063 - RNA, 19 nt, Human
accuuggacauccuccucc

SEQ ID NO: 2195064 - RNA, 22 nt, Human
accuuggcaccagacacccagg

SEQ ID NO: 2195065 - RNA, 22 nt, Human
acuucuuggcuuggugaggaaa

SEQ ID NO: 2195066 - RNA, 16 nt, Human
acuucaaacugagauc

SEQ ID NO: 2195067 - RNA, 16 nt, Human
acuucagagagcuggu

SEQ ID NO: 2195068 - RNA, 15 nt, Human
acuucagagagcugg

SEQ ID NO: 2195069 - RNA, 19 nt, Human
acuucagacugaacaugua

SEQ ID NO: 2195070 - RNA, 13 nt, Human
acuucagacugaa

SEQ ID NO: 2195071 - RNA, 21 nt, Human
acuucagacauagaauuaaca

SEQ ID NO: 2195072 - RNA, 20 nt, Human
acuucagagagcugguaguu

SEQ ID NO: 2195073 - RNA, 18 nt, Human
acuucagagagcugguag

SEQ ID NO: 2195074 - RNA, 17 nt, Human
acuucagagagcuggua

SEQ ID NO: 2195075 - RNA, 20 nt, Human
acuucuugaaggugcugacg

SEQ ID NO: 2195076 - RNA, 23 nt, Human
acuuggggggcugaggugggagg

SEQ ID NO: 2195077 - RNA, 15 nt, Human
acuugggucuucccu

SEQ ID NO: 2195078 - RNA, 13 nt, Human
acuuggucuguga

SEQ ID NO: 2195079 - RNA, 12 nt, Human
acuugaaaauua

SEQ ID NO: 2195080 - RNA, 14 nt, Human
acuugaaaauuaac

SEQ ID NO: 2195081 - RNA, 14 nt, Human
acuuguauauuugu

SEQ ID NO: 2195082 - RNA, 15 nt, Human
acuuguauauuugua

SEQ ID NO: 2195083 - RNA, 17 nt, Human
acuuguagggaugccuu

SEQ ID NO: 2195084 - RNA, 14 nt, Human
acuuggucaccagc

SEQ ID NO: 2195085 - RNA, 18 nt, Human
acuuguaauuuuuuuaau

SEQ ID NO: 2195086 - RNA, 20 nt, Human
acuuguacaaaauaaacaaa

SEQ ID NO: 2195087 - RNA, 18 nt, Human
acuuguacaaaauaaaca

SEQ ID NO: 2195088 - RNA, 14 nt, Human
acuuguacaaaaua

SEQ ID NO: 2195089 - RNA, 18 nt, Human
acuuguauauuuguacaa

SEQ ID NO: 2195090 - RNA, 16 nt, Human
acuuguauauuuguac

SEQ ID NO: 2195091 - RNA, 17 nt, Human
acuuguauauuuguaca

SEQ ID NO: 2195092 - RNA, 14 nt, Human
acuuaaaaaauguc

SEQ ID NO: 2195093 - RNA, 23 nt, Human
acuuaaaaaacuuguaaaugcug

SEQ ID NO: 2195094 - RNA, 13 nt, Human
acuuaaaaaacuu

SEQ ID NO: 2195095 - RNA, 22 nt, Human
acuuaaaaaaaugacagauguu

SEQ ID NO: 2195096 - RNA, 17 nt, Human
acuuaaaaaaaugacag

SEQ ID NO: 2195097 - RNA, 16 nt, Human
acuuaaaaaaaugaca

SEQ ID NO: 2195098 - RNA, 15 nt, Human
acuuaaaaaaaugac

SEQ ID NO: 2195099 - RNA, 14 nt, Human
acuuaaaaaaauga

SEQ ID NO: 2195100 - RNA, 13 nt, Human
acuuaaaaaaaug

SEQ ID NO: 2195101 - RNA, 19 nt, Human
acuguuuuuuccugagcuu

SEQ ID NO: 2195102 - RNA, 18 nt, Human
acuguuuuuuccugagcu

SEQ ID NO: 2195103 - RNA, 17 nt, Human
acuguuuuuuccugagc

SEQ ID NO: 2195104 - RNA, 19 nt, Human
acuuaaaaauguaaauauu

SEQ ID NO: 2195105 - RNA, 23 nt, Human
acuuaaaaauguaaauauucuau

SEQ ID NO: 2195106 - RNA, 14 nt, Human
acuuaaaaauguaa

SEQ ID NO: 2195107 - RNA, 16 nt, Human
acuuaaaaauguaaau

SEQ ID NO: 2195108 - RNA, 17 nt, Human
acuuaaaaauguaaaua

SEQ ID NO: 2195109 - RNA, 18 nt, Human
acuuaaaaauguaaauau

SEQ ID NO: 2195110 - RNA, 22 nt, Human
acuuaaaaaugguuuaaauggu

SEQ ID NO: 2195111 - RNA, 17 nt, Human
acuucaaauccuugaag

SEQ ID NO: 2195112 - RNA, 18 nt, Human
acuucaaauccuugaaga

SEQ ID NO: 2195113 - RNA, 23 nt, Human
acuguuuuucagggagguggcug

SEQ ID NO: 2195114 - RNA, 14 nt, Human
acuguuuuuaccca

SEQ ID NO: 2195115 - RNA, 15 nt, Human
acuguuuuuacccau

SEQ ID NO: 2195116 - RNA, 16 nt, Human
acuguuuuuacccaua

SEQ ID NO: 2195117 - RNA, 17 nt, Human
acuguuuuuacccauau

SEQ ID NO: 2195118 - RNA, 21 nt, Human
acuguuuuuacccauaucccc

SEQ ID NO: 2195119 - RNA, 23 nt, Human
acuguuuuuacccauauccccuc

SEQ ID NO: 2195120 - RNA, 14 nt, Human
acuguuuuuuccug

SEQ ID NO: 2195121 - RNA, 12 nt, Human
acuguuucucug

SEQ ID NO: 2195122 - RNA, 19 nt, Human
acuguuucaaacuuuacua

SEQ ID NO: 2195123 - RNA, 18 nt, Human
acuguuucaaacuuuacu

SEQ ID NO: 2195124 - RNA, 15 nt, Human
acuguuucaaacuuu

SEQ ID NO: 2195125 - RNA, 17 nt, Human
acugcccacccccucaa

SEQ ID NO: 2195126 - RNA, 15 nt, Human
acugcccacccccuc

SEQ ID NO: 2195127 - RNA, 16 nt, Human
acugcccacccccuca

SEQ ID NO: 2195128 - RNA, 14 nt, Human
acugcccaaagugc

SEQ ID NO: 2195129 - RNA, 19 nt, Human
acugcccaaagugcuucca

SEQ ID NO: 2195130 - RNA, 13 nt, Human
acugcccaccccc

SEQ ID NO: 2195131 - RNA, 14 nt, Human
acugcccacccccu

SEQ ID NO: 2195132 - RNA, 16 nt, Human
acugcccauggacagg

SEQ ID NO: 2195133 - RNA, 19 nt, Human
acugcccaggccugccugu

SEQ ID NO: 2195134 - RNA, 23 nt, Human
acugccgaccgaggcuggagcug

SEQ ID NO: 2195135 - RNA, 22 nt, Human
acugccgaccgaggcuggagcu

SEQ ID NO: 2195136 - RNA, 22 nt, Human
acugccgcaagucugcagcccg

SEQ ID NO: 2195137 - RNA, 18 nt, Human
acugccgaccgaggcugg

SEQ ID NO: 2195138 - RNA, 19 nt, Human
acugccgaccgaggcugga

SEQ ID NO: 2195139 - RNA, 14 nt, Human
acugccuaagcccu

SEQ ID NO: 2195140 - RNA, 15 nt, Human
acugccuaagcccuc

SEQ ID NO: 2195141 - RNA, 18 nt, Human
acugccauggaggcacac

SEQ ID NO: 2195142 - RNA, 21 nt, Human
acugccauggaggcacacagc

SEQ ID NO: 2195143 - RNA, 14 nt, Human
acugccaugccagc

SEQ ID NO: 2195144 - RNA, 11 nt, Human
acuggagcccc

SEQ ID NO: 2195145 - RNA, 15 nt, Human
acuggaaccagggag

SEQ ID NO: 2195146 - RNA, 16 nt, Human
acuggaaccagggaga

SEQ ID NO: 2195147 - RNA, 16 nt, Human
acuggaggagagaaga

SEQ ID NO: 2195148 - RNA, 16 nt, Human
acuggagcccaggagu

SEQ ID NO: 2195149 - RNA, 17 nt, Human
acuggaggagagaagaa

SEQ ID NO: 2195150 - RNA, 18 nt, Human
acuggaggagagaagaau

SEQ ID NO: 2195151 - RNA, 20 nt, Human
acuggaggagagaagaauga

SEQ ID NO: 2195152 - RNA, 12 nt, Human
acuggaacucuc

SEQ ID NO: 2195153 - RNA, 20 nt, Human
acuggaaaggggagagccug

SEQ ID NO: 2195154 - RNA, 21 nt, Human
acuggaaaggggagagccugc

SEQ ID NO: 2195155 - RNA, 22 nt, Human
acuggaaaggggagagccugcu

SEQ ID NO: 2195156 - RNA, 23 nt, Human
acuggaaaggggagagccugcug

SEQ ID NO: 2195157 - RNA, 15 nt, Human
acugccuauuuuaau

SEQ ID NO: 2195158 - RNA, 14 nt, Human
acugccuacugcau

SEQ ID NO: 2195159 - RNA, 16 nt, Human
acugccuacugcaucg

SEQ ID NO: 2195160 - RNA, 17 nt, Human
acuggaaaggggagagc

SEQ ID NO: 2195161 - RNA, 15 nt, Human
acuggaaaggggaga

SEQ ID NO: 2195162 - RNA, 17 nt, Human
acuggaguccagucucu

SEQ ID NO: 2195163 - RNA, 13 nt, Human
acuggagugcagg

SEQ ID NO: 2195164 - RNA, 17 nt, Human
acuggagugcagggagg

SEQ ID NO: 2195165 - RNA, 12 nt, Human
acuggaguccag

SEQ ID NO: 2195166 - RNA, 19 nt, Human
acuggagguugaagccaag

SEQ ID NO: 2195167 - RNA, 17 nt, Human
acuggagguugaagcca

SEQ ID NO: 2195168 - RNA, 18 nt, Human
acuggagguugaagccaa

SEQ ID NO: 2195169 - RNA, 22 nt, Human
acuggaggggacgcugguagag

SEQ ID NO: 2195170 - RNA, 21 nt, Human
acuggaggggacgcugguaga

SEQ ID NO: 2195171 - RNA, 14 nt, Human
acuggaggucacau

SEQ ID NO: 2195172 - RNA, 19 nt, Human
acuggaggucacauucagg

SEQ ID NO: 2195173 - RNA, 20 nt, Human
acuggaggucacauucagga

SEQ ID NO: 2195174 - RNA, 21 nt, Human
acuggaggucacauucaggaa

SEQ ID NO: 2195175 - RNA, 23 nt, Human
acuggaggucacauucaggaaga

SEQ ID NO: 2195176 - RNA, 16 nt, Human
acuggagguugaagcc

SEQ ID NO: 2195177 - RNA, 17 nt, Human
acuggaguggagcauug

SEQ ID NO: 2195178 - RNA, 18 nt, Human
acuggagugcagggagga

SEQ ID NO: 2195179 - RNA, 14 nt, Human
acuggaguggagca

SEQ ID NO: 2195180 - RNA, 16 nt, Human
acuggugagcagacug

SEQ ID NO: 2195181 - RNA, 14 nt, Human
acuggugagcagac

SEQ ID NO: 2195182 - RNA, 12 nt, Human
acuggugacugc

SEQ ID NO: 2195183 - RNA, 21 nt, Human
acuggugacugcgaucuucag

SEQ ID NO: 2195184 - RNA, 12 nt, Human
acugguggcccg

SEQ ID NO: 2195185 - RNA, 17 nt, Human
acuguaaaauaauaacu

SEQ ID NO: 2195186 - RNA, 16 nt, Human
acuguaaaaugaaauu

SEQ ID NO: 2195187 - RNA, 23 nt, Human
acuggugcuauaggcuggagaag

SEQ ID NO: 2195188 - RNA, 16 nt, Human
acuguaaagaaagaga

SEQ ID NO: 2195189 - RNA, 15 nt, Human
acuguaaagaaagag

SEQ ID NO: 2195190 - RNA, 14 nt, Human
acuguaaagaaaga

SEQ ID NO: 2195191 - RNA, 13 nt, Human
acuguaaagaaag

SEQ ID NO: 2195192 - RNA, 16 nt, Human
acugucuuuuuucuaa

SEQ ID NO: 2195193 - RNA, 17 nt, Human
acuguaaagagaccuac

SEQ ID NO: 2195194 - RNA, 23 nt, Human
acuguaaagagaccuaccucagg

SEQ ID NO: 2195195 - RNA, 20 nt, Human
acuguaacacuuuacaaugu

SEQ ID NO: 2195196 - RNA, 10 nt, Human
acuguaacac

SEQ ID NO: 2195197 - RNA, 13 nt, Human
acuguaacacuuu

SEQ ID NO: 2195198 - RNA, 18 nt, Human
acuguaaauaaaaagaaa

SEQ ID NO: 2195199 - RNA, 23 nt, Human
acuguaaagaaagagagaaaaua

SEQ ID NO: 2195200 - RNA, 22 nt, Human
acuguaaagaaagagagaaaau

SEQ ID NO: 2195201 - RNA, 21 nt, Human
acuguaaagaaagagagaaaa

SEQ ID NO: 2195202 - RNA, 20 nt, Human
acuguaaagaaagagagaaa

SEQ ID NO: 2195203 - RNA, 19 nt, Human
acuguaaagaaagagagaa

SEQ ID NO: 2195204 - RNA, 18 nt, Human
acuguaaagaaagagaga

SEQ ID NO: 2195205 - RNA, 16 nt, Human
acugugaagagaacca

SEQ ID NO: 2195206 - RNA, 22 nt, Human
acuguaacugugucaugauuca

SEQ ID NO: 2195207 - RNA, 14 nt, Human
acugucuuuccuag

SEQ ID NO: 2195208 - RNA, 16 nt, Human
acugugccaugugcca

SEQ ID NO: 2195209 - RNA, 22 nt, Human
acugucuuuuuucuaaaguaaa

SEQ ID NO: 2195210 - RNA, 23 nt, Human
acugucuuuuuucuaaaguaaaa

SEQ ID NO: 2195211 - RNA, 17 nt, Human
acugugccaugugccag

SEQ ID NO: 2195212 - RNA, 18 nt, Human
acugugccaugugccagg

SEQ ID NO: 2195213 - RNA, 21 nt, Human
acugucuuuuuuucccuacca

SEQ ID NO: 2195214 - RNA, 12 nt, Human
acugugcccugg

SEQ ID NO: 2195215 - RNA, 13 nt, Human
acugugcccuggu

SEQ ID NO: 2195216 - RNA, 14 nt, Human
acugugcccuggug

SEQ ID NO: 2195217 - RNA, 15 nt, Human
acugugcccuggugg

SEQ ID NO: 2195218 - RNA, 17 nt, Human
acugugcccugguggag

SEQ ID NO: 2195219 - RNA, 18 nt, Human
acugugcccugguggaga

SEQ ID NO: 2195220 - RNA, 13 nt, Human
acuccggcccucc

SEQ ID NO: 2195221 - RNA, 15 nt, Human
acuccggagacaggg

SEQ ID NO: 2195222 - RNA, 16 nt, Human
acuccggagacagggu

SEQ ID NO: 2195223 - RNA, 23 nt, Human
acuccggagugagaagcuuugcc

SEQ ID NO: 2195224 - RNA, 21 nt, Human
acucccuucuaccugccacuc

SEQ ID NO: 2195225 - RNA, 14 nt, Human
acuccgcuggaggu

SEQ ID NO: 2195226 - RNA, 22 nt, Human
acuccgcuggagguggggccug

SEQ ID NO: 2195227 - RNA, 14 nt, Human
acuccggagacagg

SEQ ID NO: 2195228 - RNA, 14 nt, Human
acucccuuucaaca

SEQ ID NO: 2195229 - RNA, 22 nt, Human
acuccgagaggugggccagucu

SEQ ID NO: 2195230 - RNA, 23 nt, Human
acuccgagaggugggccagucug

SEQ ID NO: 2195231 - RNA, 17 nt, Human
acucccuucuaccugcc

SEQ ID NO: 2195232 - RNA, 18 nt, Human
acucccuucuaccugcca

SEQ ID NO: 2195233 - RNA, 19 nt, Human
acucccuucuaccugccac

SEQ ID NO: 2195234 - RNA, 20 nt, Human
acucccuucuaccugccacu

SEQ ID NO: 2195235 - RNA, 22 nt, Human
acucccuccucaccucuggacu

SEQ ID NO: 2195236 - RNA, 20 nt, Human
acucccuccucaccucugga

SEQ ID NO: 2195237 - RNA, 19 nt, Human
acucccuccucaccucugg

SEQ ID NO: 2195238 - RNA, 16 nt, Human
acucccuccucaccuc

SEQ ID NO: 2195239 - RNA, 15 nt, Human
acucccuccucaccu

SEQ ID NO: 2195240 - RNA, 22 nt, Human
acucccauuccugaagaaccag

SEQ ID NO: 2195241 - RNA, 15 nt, Human
acucccuucccauaa

SEQ ID NO: 2195242 - RNA, 21 nt, Human
acucccuucccaugacccagg

SEQ ID NO: 2195243 - RNA, 23 nt, Human
acucccuucccaugacccaggcu

SEQ ID NO: 2195244 - RNA, 15 nt, Human
acucccuucuaccug

SEQ ID NO: 2195245 - RNA, 18 nt, Human
acucccuggcucucagaa

SEQ ID NO: 2195246 - RNA, 13 nt, Human
acucccuucccau

SEQ ID NO: 2195247 - RNA, 17 nt, Human
acucccuggcucucaga

SEQ ID NO: 2195248 - RNA, 18 nt, Human
acucccugccccccagcc

SEQ ID NO: 2195249 - RNA, 21 nt, Human
acucccucgucgagcuggaug

SEQ ID NO: 2195250 - RNA, 22 nt, Human
acucccaguccaaauguccucc

SEQ ID NO: 2195251 - RNA, 13 nt, Human
acucccaggcagc

SEQ ID NO: 2195252 - RNA, 20 nt, Human
acucccauuccugaagaacc

SEQ ID NO: 2195253 - RNA, 16 nt, Human
acucccauuccugaag

SEQ ID NO: 2195254 - RNA, 13 nt, Human
acucccauuccug

SEQ ID NO: 2195255 - RNA, 17 nt, Human
acucccagacacccacc

SEQ ID NO: 2195256 - RNA, 17 nt, Human
acucccacuucccugac

SEQ ID NO: 2195257 - RNA, 20 nt, Human
acucccacuucccugacacu

SEQ ID NO: 2195258 - RNA, 14 nt, Human
acucccacuucccu

SEQ ID NO: 2195259 - RNA, 16 nt, Human
acucccacuucccuga

SEQ ID NO: 2195260 - RNA, 22 nt, Human
acucccaucugugaaaggaaag

SEQ ID NO: 2195261 - RNA, 17 nt, Human
acuccaugagcacccca

SEQ ID NO: 2195262 - RNA, 21 nt, Human
acuccaugcuuagucacugcc

SEQ ID NO: 2195263 - RNA, 17 nt, Human
acuccaugagaagccgu

SEQ ID NO: 2195264 - RNA, 13 nt, Human
acuccaugagcac

SEQ ID NO: 2195265 - RNA, 15 nt, Human
acucccaagcuggac

SEQ ID NO: 2195266 - RNA, 14 nt, Human
acucccaaguaugg

SEQ ID NO: 2195267 - RNA, 23 nt, Human
acucccaaguaugggguucaaga

SEQ ID NO: 2195268 - RNA, 19 nt, Human
acucccaagucuacagagu

SEQ ID NO: 2195269 - RNA, 16 nt, Human
acucccacacccaaga

SEQ ID NO: 2195270 - RNA, 14 nt, Human
acuccggcccuccu

SEQ ID NO: 2195271 - RNA, 18 nt, Human
acuccggagugagaagcu

SEQ ID NO: 2195272 - RNA, 15 nt, Human
acuccggcccuccua

SEQ ID NO: 2195273 - RNA, 19 nt, Human
acuccggccugaugacaga

SEQ ID NO: 2195274 - RNA, 23 nt, Human
acuccggccugaugacagagcga

SEQ ID NO: 2195275 - RNA, 16 nt, Human
acuccggugugccugc

SEQ ID NO: 2195276 - RNA, 15 nt, Human
acuccggugugccug

SEQ ID NO: 2195277 - RNA, 17 nt, Human
acuccggggagcgcccg

SEQ ID NO: 2195278 - RNA, 20 nt, Human
acuccggugugccugcagcc

SEQ ID NO: 2195279 - RNA, 19 nt, Human
acuccggugugccugcagc

SEQ ID NO: 2195280 - RNA, 21 nt, Human
acuccggugugccugcagccc

SEQ ID NO: 2195281 - RNA, 15 nt, Human
acuccgucucaagga

SEQ ID NO: 2195282 - RNA, 22 nt, Human
acuccggguuugagauggacac

SEQ ID NO: 2195283 - RNA, 15 nt, Human
acuccguuggccacu

SEQ ID NO: 2195284 - RNA, 17 nt, Human
acuccguuggccacucc

SEQ ID NO: 2195285 - RNA, 16 nt, Human
acuccgucucaaggaa

SEQ ID NO: 2195286 - RNA, 18 nt, Human
acuccguuggccacuccg

SEQ ID NO: 2195287 - RNA, 21 nt, Human
acuccguuggccacuccgaga

SEQ ID NO: 2195288 - RNA, 15 nt, Human
acucuacagaggcca

SEQ ID NO: 2195289 - RNA, 16 nt, Human
acucuacacugugaac

SEQ ID NO: 2195290 - RNA, 14 nt, Human
acucuaccagacug

SEQ ID NO: 2195291 - RNA, 13 nt, Human
acucuacauaauu

SEQ ID NO: 2195292 - RNA, 19 nt, Human
acucuacauaauuuagagu

SEQ ID NO: 2195293 - RNA, 12 nt, Human
acucuaaaagau

SEQ ID NO: 2195294 - RNA, 14 nt, Human
acucuaaaagaucc

SEQ ID NO: 2195295 - RNA, 15 nt, Human
acucuaaaagauccu

SEQ ID NO: 2195296 - RNA, 21 nt, Human
acucuaaaagauccuuuuuaa

SEQ ID NO: 2195297 - RNA, 15 nt, Human
acucuaaaagguuca

SEQ ID NO: 2195298 - RNA, 16 nt, Human
acucuaaaagguucag

SEQ ID NO: 2195299 - RNA, 18 nt, Human
acucuaaaagguucaggg

SEQ ID NO: 2195300 - RNA, 19 nt, Human
acucuaaaagguucaggga

SEQ ID NO: 2195301 - RNA, 14 nt, Human
acucguuaauuugu

SEQ ID NO: 2195302 - RNA, 19 nt, Human
acucguuaauuuguagugu

SEQ ID NO: 2195303 - RNA, 13 nt, Human
acugauuuccuuu

SEQ ID NO: 2195304 - RNA, 14 nt, Human
acugauuuccuuug

SEQ ID NO: 2195305 - RNA, 16 nt, Human
acugauuuggagauau

SEQ ID NO: 2195306 - RNA, 22 nt, Human
acugauuuuguuauuuuuauau

SEQ ID NO: 2195307 - RNA, 14 nt, Human
acugauuuuuguaa

SEQ ID NO: 2195308 - RNA, 16 nt, Human
acugauuuuuuuuucc

SEQ ID NO: 2195309 - RNA, 17 nt, Human
acugauuuuuuuuuccu

SEQ ID NO: 2195310 - RNA, 18 nt, Human
acugauuuuuuuuuccuu

SEQ ID NO: 2195311 - RNA, 19 nt, Human
acugauuuuuuuuuccuuc

SEQ ID NO: 2195312 - RNA, 20 nt, Human
acugauuuuuuuuuccuuca

SEQ ID NO: 2195313 - RNA, 15 nt, Human
acugaucacaaaaac

SEQ ID NO: 2195314 - RNA, 18 nt, Human
acugaucaugcauuguug

SEQ ID NO: 2195315 - RNA, 16 nt, Human
acugaucaugcauugu

SEQ ID NO: 2195316 - RNA, 15 nt, Human
acugaucaugcauug

SEQ ID NO: 2195317 - RNA, 17 nt, Human
acugauccagcccugag

SEQ ID NO: 2195318 - RNA, 16 nt, Human
acugauccagcccuga

SEQ ID NO: 2195319 - RNA, 17 nt, Human
acugauauauuuuacaa

SEQ ID NO: 2195320 - RNA, 22 nt, Human
acugacauguggggccagguca

SEQ ID NO: 2195321 - RNA, 20 nt, Human
acugacaggcagccuggaca

SEQ ID NO: 2195322 - RNA, 19 nt, Human
acugauaugggucuugaua

SEQ ID NO: 2195323 - RNA, 20 nt, Human
acugauguaugaggaauuuc

SEQ ID NO: 2195324 - RNA, 17 nt, Human
acugaucaugcauuguu

SEQ ID NO: 2195325 - RNA, 23 nt, Human
acugaugggcaacccccagccug

SEQ ID NO: 2195326 - RNA, 21 nt, Human
acugauguuacaucacagugu

SEQ ID NO: 2195327 - RNA, 22 nt, Human
acugauguuacaucacaguguu

SEQ ID NO: 2195328 - RNA, 14 nt, Human
acugauuacugccu

SEQ ID NO: 2195329 - RNA, 17 nt, Human
acugaauuguccccagu

SEQ ID NO: 2195330 - RNA, 23 nt, Human
acugaauuucuuuugccguuauu

SEQ ID NO: 2195331 - RNA, 16 nt, Human
acugacacccauguuu

SEQ ID NO: 2195332 - RNA, 21 nt, Human
acugacacccauguuucucug

SEQ ID NO: 2195333 - RNA, 22 nt, Human
acugacacccauguuucucugg

SEQ ID NO: 2195334 - RNA, 23 nt, Human
acugacacaaaaaguagauuaag

SEQ ID NO: 2195335 - RNA, 18 nt, Human
acugacagccucccaccc

SEQ ID NO: 2195336 - RNA, 21 nt, Human
acugacaggcagccuggacau

SEQ ID NO: 2195337 - RNA, 12 nt, Human
acugacaugugg

SEQ ID NO: 2195338 - RNA, 18 nt, Human
acugacauguggggccag

SEQ ID NO: 2195339 - RNA, 17 nt, Human
acugacaccuuugcagg

SEQ ID NO: 2195340 - RNA, 20 nt, Human
acugacaccuuugcaggcau

SEQ ID NO: 2195341 - RNA, 17 nt, Human
acugacauuguuggcca

SEQ ID NO: 2195342 - RNA, 18 nt, Human
acugacauuguuggccaa

SEQ ID NO: 2195343 - RNA, 22 nt, Human
acugaaugcuucugacuucaua

SEQ ID NO: 2195344 - RNA, 21 nt, Human
acugaaugccucaaugugacc

SEQ ID NO: 2195345 - RNA, 16 nt, Human
acugaaugcucugugc

SEQ ID NO: 2195346 - RNA, 19 nt, Human
acugaauguuuauuccuug

SEQ ID NO: 2195347 - RNA, 23 nt, Human
acugaaugaaacccccacacaca

SEQ ID NO: 2195348 - RNA, 20 nt, Human
acugaaugaggucagcaugu

SEQ ID NO: 2195349 - RNA, 12 nt, Human
acugaaugaggu

SEQ ID NO: 2195350 - RNA, 19 nt, Human
acucuacccucccaccccc

SEQ ID NO: 2195351 - RNA, 18 nt, Human
acucuacccucccacccc

SEQ ID NO: 2195352 - RNA, 16 nt, Human
acucuacccucccacc

SEQ ID NO: 2195353 - RNA, 15 nt, Human
acucuacccucccac

SEQ ID NO: 2195354 - RNA, 13 nt, Human
acucuacccuccc

SEQ ID NO: 2195355 - RNA, 19 nt, Human
acucuacccauauuacaga

SEQ ID NO: 2195356 - RNA, 17 nt, Human
acucuacccauauuaca

SEQ ID NO: 2195357 - RNA, 19 nt, Human
acucuaccagacuguguau

SEQ ID NO: 2195358 - RNA, 22 nt, Human
acugaauuaaugacagagccag

SEQ ID NO: 2195359 - RNA, 21 nt, Human
acugaauuaaucaucuauaaa

SEQ ID NO: 2195360 - RNA, 13 nt, Human
acugaauuaauca

SEQ ID NO: 2195361 - RNA, 12 nt, Human
acugaauuucuu

SEQ ID NO: 2195362 - RNA, 19 nt, Human
acugaauuauaagaggcug

SEQ ID NO: 2195363 - RNA, 23 nt, Human
acugaauuauaagaggcugauaa

SEQ ID NO: 2195364 - RNA, 15 nt, Human
acugauuuuugugau

SEQ ID NO: 2195365 - RNA, 15 nt, Human
acugauuuuuguaag

SEQ ID NO: 2195366 - RNA, 18 nt, Human
acugauuuuuguaagaca

SEQ ID NO: 2195367 - RNA, 19 nt, Human
acugauuuuuguaagacaa

SEQ ID NO: 2195368 - RNA, 14 nt, Human
acugauuuuuguga

SEQ ID NO: 2195369 - RNA, 22 nt, Human
aggaaaaaaaucguccagggag

SEQ ID NO: 2195370 - RNA, 15 nt, Human
aggaaaaaaaugacu

SEQ ID NO: 2195371 - RNA, 14 nt, Human
aggaaaaaaaugac

SEQ ID NO: 2195372 - RNA, 23 nt, Human
aggaaaaaauguuggauuuauaa

SEQ ID NO: 2195373 - RNA, 17 nt, Human
aggaaaaacacaagcaa

SEQ ID NO: 2195374 - RNA, 19 nt, Human
aggaaaaacacaagcaaaa

SEQ ID NO: 2195375 - RNA, 19 nt, Human
aggaaaaccaagccguggc

SEQ ID NO: 2195376 - RNA, 13 nt, Human
aggaaaaacaggu

SEQ ID NO: 2195377 - RNA, 15 nt, Human
aggaaaaauguguaa

SEQ ID NO: 2195378 - RNA, 19 nt, Human
aggaaaaauguguaauuuu

SEQ ID NO: 2195379 - RNA, 18 nt, Human
aggaaaaaauaacaauga

SEQ ID NO: 2195380 - RNA, 21 nt, Human
aggaaaaaaaucguccaggga

SEQ ID NO: 2195381 - RNA, 18 nt, Human
agcuuuuuuacacaaaug

SEQ ID NO: 2195382 - RNA, 21 nt, Human
agcuuuuuuccuuaauccagc

SEQ ID NO: 2195383 - RNA, 14 nt, Human
agcuuuuuucuuua

SEQ ID NO: 2195384 - RNA, 17 nt, Human
agcuuuuugucuuuucu

SEQ ID NO: 2195385 - RNA, 21 nt, Human
agcuuuguuuguugucagcug

SEQ ID NO: 2195386 - RNA, 22 nt, Human
agcuuuguuuguugucagcuga

SEQ ID NO: 2195387 - RNA, 19 nt, Human
agcuuuguuucaaccaagu

SEQ ID NO: 2195388 - RNA, 18 nt, Human
agcuuuguucuucuuaaa

SEQ ID NO: 2195389 - RNA, 12 nt, Human
agcuuuguucuu

SEQ ID NO: 2195390 - RNA, 21 nt, Human
agcuuugugacuguauauaaa

SEQ ID NO: 2195391 - RNA, 13 nt, Human
aggaagaaaucac

SEQ ID NO: 2195392 - RNA, 15 nt, Human
aggaagaaaucacag

SEQ ID NO: 2195393 - RNA, 14 nt, Human
aggaacuuccaggu

SEQ ID NO: 2195394 - RNA, 19 nt, Human
aggaacauaugaaaauaca

SEQ ID NO: 2195395 - RNA, 23 nt, Human
aggaacacccgacuccucaaaag

SEQ ID NO: 2195396 - RNA, 16 nt, Human
aggaacauaugaaaau

SEQ ID NO: 2195397 - RNA, 23 nt, Human
aggaacuuaaauaaugugaaacu

SEQ ID NO: 2195398 - RNA, 21 nt, Human
aggaacagcuaugggagcccc

SEQ ID NO: 2195399 - RNA, 21 nt, Human
aggaacagaaggaugaaugag

SEQ ID NO: 2195400 - RNA, 14 nt, Human
aggaacagaaggau

SEQ ID NO: 2195401 - RNA, 13 nt, Human
aggaacagaagga

SEQ ID NO: 2195402 - RNA, 15 nt, Human
aggaacacuccuuca

SEQ ID NO: 2195403 - RNA, 20 nt, Human
aggaaaaccaagccguggcu

SEQ ID NO: 2195404 - RNA, 21 nt, Human
aggaaaaccaagccguggcuu

SEQ ID NO: 2195405 - RNA, 22 nt, Human
aggaaaaccaagccguggcuuc

SEQ ID NO: 2195406 - RNA, 23 nt, Human
aggaaaaccaagccguggcuucc

SEQ ID NO: 2195407 - RNA, 12 nt, Human
aggaacacuccu

SEQ ID NO: 2195408 - RNA, 23 nt, Human
aggaagaauuuuaaaaaugaauc

SEQ ID NO: 2195409 - RNA, 17 nt, Human
aggaagaauuuuaaaaa

SEQ ID NO: 2195410 - RNA, 20 nt, Human
aggaagaauuuuaaaaauga

SEQ ID NO: 2195411 - RNA, 14 nt, Human
aggaagguagaaau

SEQ ID NO: 2195412 - RNA, 16 nt, Human
aggaagaagcuuaggc

SEQ ID NO: 2195413 - RNA, 17 nt, Human
aggaagaagcuuaggca

SEQ ID NO: 2195414 - RNA, 18 nt, Human
aggaagaagcuuaggcag

SEQ ID NO: 2195415 - RNA, 15 nt, Human
aggaagaauuuuaaa

SEQ ID NO: 2195416 - RNA, 20 nt, Human
aggaagaagcuuaggcaggg

SEQ ID NO: 2195417 - RNA, 21 nt, Human
aggaagaacacccucuaaaug

SEQ ID NO: 2195418 - RNA, 12 nt, Human
aggaagaacggg

SEQ ID NO: 2195419 - RNA, 18 nt, Human
aggaagaacggggcucuu

SEQ ID NO: 2195420 - RNA, 22 nt, Human
aggaagaacggggcucuucuca

SEQ ID NO: 2195421 - RNA, 15 nt, Human
aggaagguggauggc

SEQ ID NO: 2195422 - RNA, 16 nt, Human
aggaagguggauggcc

SEQ ID NO: 2195423 - RNA, 21 nt, Human
aggaagguucuggugugaacu

SEQ ID NO: 2195424 - RNA, 16 nt, Human
aggaagguucuggugu

SEQ ID NO: 2195425 - RNA, 14 nt, Human
aggaagguucuggu

SEQ ID NO: 2195426 - RNA, 14 nt, Human
aggaaggugguggg

SEQ ID NO: 2195427 - RNA, 11 nt, Human
aggaaguacug

SEQ ID NO: 2195428 - RNA, 15 nt, Human
aggaaguacuggaga

SEQ ID NO: 2195429 - RNA, 15 nt, Human
agcuguauugaauca

SEQ ID NO: 2195430 - RNA, 16 nt, Human
agcuguauugaaucau

SEQ ID NO: 2195431 - RNA, 11 nt, Human
agcuguauuga

SEQ ID NO: 2195432 - RNA, 17 nt, Human
agcugguuagaaaugca

SEQ ID NO: 2195433 - RNA, 19 nt, Human
agcuguauugaaucaugua

SEQ ID NO: 2195434 - RNA, 17 nt, Human
agcuguaugauucccag

SEQ ID NO: 2195435 - RNA, 18 nt, Human
agcuguaugauucccagc

SEQ ID NO: 2195436 - RNA, 21 nt, Human
agcuggugguaucugaguuga

SEQ ID NO: 2195437 - RNA, 15 nt, Human
agcuggugggaagcg

SEQ ID NO: 2195438 - RNA, 13 nt, Human
agcuggugggaag

SEQ ID NO: 2195439 - RNA, 12 nt, Human
agcuggugguuu

SEQ ID NO: 2195440 - RNA, 14 nt, Human
agcuggugguuuca

SEQ ID NO: 2195441 - RNA, 16 nt, Human
agcuggugguuucacg

SEQ ID NO: 2195442 - RNA, 18 nt, Human
agcuggugucugauuguu

SEQ ID NO: 2195443 - RNA, 15 nt, Human
agcugguuagaaaug

SEQ ID NO: 2195444 - RNA, 15 nt, Human
agcugguaguuagua

SEQ ID NO: 2195445 - RNA, 20 nt, Human
agcugguaaucuugcucugc

SEQ ID NO: 2195446 - RNA, 18 nt, Human
agcugcgcuugcuuuucu

SEQ ID NO: 2195447 - RNA, 20 nt, Human
agcuggguuggaaaacagua

SEQ ID NO: 2195448 - RNA, 16 nt, Human
agcuggguuggaaaac

SEQ ID NO: 2195449 - RNA, 14 nt, Human
agcuggguuggaaa

SEQ ID NO: 2195450 - RNA, 21 nt, Human
agcugguaguuaguagcaugu

SEQ ID NO: 2195451 - RNA, 19 nt, Human
agcugguaguuaguagcau

SEQ ID NO: 2195452 - RNA, 22 nt, Human
agcugguaguuaguagcauguu

SEQ ID NO: 2195453 - RNA, 15 nt, Human
agcuggucccacuca

SEQ ID NO: 2195454 - RNA, 22 nt, Human
agcugccuugagccuuaaaacc

SEQ ID NO: 2195455 - RNA, 17 nt, Human
agcugcgcuugcuuuuc

SEQ ID NO: 2195456 - RNA, 20 nt, Human
agcugccuuggcucagacau

SEQ ID NO: 2195457 - RNA, 19 nt, Human
agcugccuuggcucagaca

SEQ ID NO: 2195458 - RNA, 17 nt, Human
agcugccuuggcucaga

SEQ ID NO: 2195459 - RNA, 16 nt, Human
agcugccuuggcucag

SEQ ID NO: 2195460 - RNA, 14 nt, Human
agcugccuuggcuc

SEQ ID NO: 2195461 - RNA, 16 nt, Human
agcugccuucccuagc

SEQ ID NO: 2195462 - RNA, 17 nt, Human
agcugccuucccuagcu

SEQ ID NO: 2195463 - RNA, 18 nt, Human
agcugccuucccuagcuu

SEQ ID NO: 2195464 - RNA, 19 nt, Human
agcugccuucccuagcuuu

SEQ ID NO: 2195465 - RNA, 10 nt, Human
agcugccuuc

SEQ ID NO: 2195466 - RNA, 12 nt, Human
agcugccuuccc

SEQ ID NO: 2195467 - RNA, 13 nt, Human
agcugccuucccu

SEQ ID NO: 2195468 - RNA, 14 nt, Human
agcugccuucccua

SEQ ID NO: 2195469 - RNA, 20 nt, Human
agcugcugaaacaacaaaua

SEQ ID NO: 2195470 - RNA, 16 nt, Human
agcugcugaaacaaca

SEQ ID NO: 2195471 - RNA, 15 nt, Human
agcugcugaaacaac

SEQ ID NO: 2195472 - RNA, 14 nt, Human
agcugcugaaacaa

SEQ ID NO: 2195473 - RNA, 19 nt, Human
agcugacgaacuuccaugg

SEQ ID NO: 2195474 - RNA, 22 nt, Human
agcucuuuggcagucuauaugu

SEQ ID NO: 2195475 - RNA, 23 nt, Human
agcucuuuccuccuuccauggaa

SEQ ID NO: 2195476 - RNA, 22 nt, Human
agcucuuuccuccuuccaugga

SEQ ID NO: 2195477 - RNA, 21 nt, Human
agcugaccucuguuguccucc

SEQ ID NO: 2195478 - RNA, 22 nt, Human
agcugaccucuguuguccuccc

SEQ ID NO: 2195479 - RNA, 21 nt, Human
agcugacuuuucuguccgagc

SEQ ID NO: 2195480 - RNA, 15 nt, Human
agcugacuuuucugu

SEQ ID NO: 2195481 - RNA, 16 nt, Human
agcucuuggcuccacu

SEQ ID NO: 2195482 - RNA, 15 nt, Human
agcucuugcuaauca

SEQ ID NO: 2195483 - RNA, 19 nt, Human
agcucuugcuaaucagugu

SEQ ID NO: 2195484 - RNA, 20 nt, Human
agcucuugcuaaucaguguc

SEQ ID NO: 2195485 - RNA, 21 nt, Human
agcucuugcuaaucagugucu

SEQ ID NO: 2195486 - RNA, 15 nt, Human
agcuccucugggcag

SEQ ID NO: 2195487 - RNA, 18 nt, Human
agcucuugcccuucccug

SEQ ID NO: 2195488 - RNA, 14 nt, Human
agcuccucugggca

SEQ ID NO: 2195489 - RNA, 12 nt, Human
agcuccucuggg

SEQ ID NO: 2195490 - RNA, 19 nt, Human
agcucuugcccuucccugu

SEQ ID NO: 2195491 - RNA, 21 nt, Human
agcucuugcccuucccugucc

SEQ ID NO: 2195492 - RNA, 22 nt, Human
agcucuugcccuucccuguccc

SEQ ID NO: 2195493 - RNA, 13 nt, Human
agcucuugcuaau

SEQ ID NO: 2195494 - RNA, 17 nt, Human
agcucuuuccuccuucc

SEQ ID NO: 2195495 - RNA, 15 nt, Human
agcucuuuccuccuu

SEQ ID NO: 2195496 - RNA, 13 nt, Human
agcucuuuccucc

SEQ ID NO: 2195497 - RNA, 23 nt, Human
agcucuugcuaaucagugucuca

SEQ ID NO: 2195498 - RNA, 12 nt, Human
agcucuuuccuc

SEQ ID NO: 2195499 - RNA, 21 nt, Human
agcucuugugaggaaagucau

SEQ ID NO: 2195500 - RNA, 12 nt, Human
agcucuugugag

SEQ ID NO: 2195501 - RNA, 13 nt, Human
agcucuugugagg

SEQ ID NO: 2195502 - RNA, 16 nt, Human
agcucuugugaggaaa

SEQ ID NO: 2195503 - RNA, 17 nt, Human
agcucuugugaggaaag

SEQ ID NO: 2195504 - RNA, 24 nt, Human
agcuccucuccccagcccagagac

SEQ ID NO: 2195505 - RNA, 13 nt, Human
agcuccucuccug

SEQ ID NO: 2195506 - RNA, 14 nt, Human
agcuccucuccugg

SEQ ID NO: 2195507 - RNA, 15 nt, Human
agcuccucuccugga

SEQ ID NO: 2195508 - RNA, 16 nt, Human
agcuccucuccuggag

SEQ ID NO: 2195509 - RNA, 17 nt, Human
agcuccucuccuggagg

SEQ ID NO: 2195510 - RNA, 18 nt, Human
agcuccucuccuggagga

SEQ ID NO: 2195511 - RNA, 23 nt, Human
agcuccucuccccagcccagaga

SEQ ID NO: 2195512 - RNA, 22 nt, Human
agcuccucuccccagcccagag

SEQ ID NO: 2195513 - RNA, 21 nt, Human
agcuccucuccccagcccaga

SEQ ID NO: 2195514 - RNA, 20 nt, Human
agcuccucuccccagcccag

SEQ ID NO: 2195515 - RNA, 19 nt, Human
agcuccucuccccagccca

SEQ ID NO: 2195516 - RNA, 18 nt, Human
agcuccucuccccagccc

SEQ ID NO: 2195517 - RNA, 17 nt, Human
agcuccucuccccagcc

SEQ ID NO: 2195518 - RNA, 16 nt, Human
agcuccucuccccagc

SEQ ID NO: 2195519 - RNA, 17 nt, Human
agcuccucgagggcagg

SEQ ID NO: 2195520 - RNA, 20 nt, Human
agcuccucgagggcagggac

SEQ ID NO: 2195521 - RNA, 23 nt, Human
agcucacaguuccucgcccuggg

SEQ ID NO: 2195522 - RNA, 21 nt, Human
agcucacaguuccucgcccug

SEQ ID NO: 2195523 - RNA, 17 nt, Human
agcucacccaauaaaca

SEQ ID NO: 2195524 - RNA, 22 nt, Human
agcucaccagccccagugccca

SEQ ID NO: 2195525 - RNA, 23 nt, Human
agcucaccagccccagugcccac

SEQ ID NO: 2195526 - RNA, 15 nt, Human
agccuuucuuuugga

SEQ ID NO: 2195527 - RNA, 23 nt, Human
agccuuuccauaaggaauguagc

SEQ ID NO: 2195528 - RNA, 16 nt, Human
agccuuucucccaggc

SEQ ID NO: 2195529 - RNA, 22 nt, Human
agccuuuccauaaggaauguag

SEQ ID NO: 2195530 - RNA, 14 nt, Human
agccuuuccauaag

SEQ ID NO: 2195531 - RNA, 18 nt, Human
agccugggcagccaggcu

SEQ ID NO: 2195532 - RNA, 17 nt, Human
agccugggcagccaggc

SEQ ID NO: 2195533 - RNA, 20 nt, Human
agccuugugucuacagagaa

SEQ ID NO: 2195534 - RNA, 13 nt, Human
agccuuuaaugca

SEQ ID NO: 2195535 - RNA, 23 nt, Human
agccuugugucuacagagaaccu

SEQ ID NO: 2195536 - RNA, 14 nt, Human
agccuuuaaugcau

SEQ ID NO: 2195537 - RNA, 15 nt, Human
agccuuuaaugcauc

SEQ ID NO: 2195538 - RNA, 12 nt, Human
agcgaaacuccg

SEQ ID NO: 2195539 - RNA, 18 nt, Human
agcgaaccaauauuugua

SEQ ID NO: 2195540 - RNA, 16 nt, Human
agccuuugccuccccg

SEQ ID NO: 2195541 - RNA, 21 nt, Human
agccuuugaauaaaaaugcac

SEQ ID NO: 2195542 - RNA, 15 nt, Human
agccuuugccucccc

SEQ ID NO: 2195543 - RNA, 11 nt, Human
agccuuugaau

SEQ ID NO: 2195544 - RNA, 16 nt, Human
agccuuuuucuaggcc

SEQ ID NO: 2195545 - RNA, 15 nt, Human
agccugggcagccag

SEQ ID NO: 2195546 - RNA, 20 nt, Human
agccugggcagcauagcaag

SEQ ID NO: 2195547 - RNA, 17 nt, Human
agccugggcagcauagc

SEQ ID NO: 2195548 - RNA, 20 nt, Human
agccugggcaacagagcaag

SEQ ID NO: 2195549 - RNA, 18 nt, Human
agccugggcaaugugaua

SEQ ID NO: 2195550 - RNA, 20 nt, Human
agccugggaggucaaggcug

SEQ ID NO: 2195551 - RNA, 18 nt, Human
agccugggcaacagagca

SEQ ID NO: 2195552 - RNA, 17 nt, Human
agccugggcaacagagc

SEQ ID NO: 2195553 - RNA, 15 nt, Human
agccugggcaacaga

SEQ ID NO: 2195554 - RNA, 18 nt, Human
agccuggccagacacagg

SEQ ID NO: 2195555 - RNA, 16 nt, Human
agccuggccagacaca

SEQ ID NO: 2195556 - RNA, 15 nt, Human
agccuggccagacac

SEQ ID NO: 2195557 - RNA, 14 nt, Human
agccuggccagaca

SEQ ID NO: 2195558 - RNA, 22 nt, Human
agccuggccagacacaggcccu

SEQ ID NO: 2195559 - RNA, 21 nt, Human
agccuggccagacacaggccc

SEQ ID NO: 2195560 - RNA, 17 nt, Human
agccuggccagccuaca

SEQ ID NO: 2195561 - RNA, 12 nt, Human
agccuggcccag

SEQ ID NO: 2195562 - RNA, 13 nt, Human
agccuggcccagc

SEQ ID NO: 2195563 - RNA, 17 nt, Human
agccuggccccaugguc

SEQ ID NO: 2195564 - RNA, 16 nt, Human
agccuggccccauggu

SEQ ID NO: 2195565 - RNA, 18 nt, Human
agccuggcccagcucccc

SEQ ID NO: 2195566 - RNA, 14 nt, Human
agccuggcccagcu

SEQ ID NO: 2195567 - RNA, 15 nt, Human
agccuggcccagcuc

SEQ ID NO: 2195568 - RNA, 16 nt, Human
agccuggcccagcucc

SEQ ID NO: 2195569 - RNA, 17 nt, Human
agccuggcccagcuccc

SEQ ID NO: 2195570 - RNA, 12 nt, Human
agccugcugcau

SEQ ID NO: 2195571 - RNA, 10 nt, Human
agccugcugg

SEQ ID NO: 2195572 - RNA, 17 nt, Human
agccugcuggcacccac

SEQ ID NO: 2195573 - RNA, 11 nt, Human
agccugcuggc

SEQ ID NO: 2195574 - RNA, 18 nt, Human
agccugcuggcacccacc

SEQ ID NO: 2195575 - RNA, 20 nt, Human
agccugcuggucacagccuc

SEQ ID NO: 2195576 - RNA, 21 nt, Human
agccugcuggucacagccucc

SEQ ID NO: 2195577 - RNA, 22 nt, Human
agccugcuggucacagccuccu

SEQ ID NO: 2195578 - RNA, 23 nt, Human
agccugcuggucacagccuccuc

SEQ ID NO: 2195579 - RNA, 11 nt, Human
agccugcugca

SEQ ID NO: 2195580 - RNA, 17 nt, Human
agccugcugccugcuuu

SEQ ID NO: 2195581 - RNA, 14 nt, Human
agccuggacccugu

SEQ ID NO: 2195582 - RNA, 14 nt, Human
agccugcuuuuuaa

SEQ ID NO: 2195583 - RNA, 15 nt, Human
agccuggacccccag

SEQ ID NO: 2195584 - RNA, 19 nt, Human
agccuggaacaucaucaag

SEQ ID NO: 2195585 - RNA, 20 nt, Human
agccuggaacaucaucaagg

SEQ ID NO: 2195586 - RNA, 21 nt, Human
agccuggaacaucaucaaggc

SEQ ID NO: 2195587 - RNA, 16 nt, Human
agccuggacccccagc

SEQ ID NO: 2195588 - RNA, 17 nt, Human
agccuggacccccagcu

SEQ ID NO: 2195589 - RNA, 18 nt, Human
agccuggacccccagcuu

SEQ ID NO: 2195590 - RNA, 11 nt, Human
agccuggagaa

SEQ ID NO: 2195591 - RNA, 13 nt, Human
agccuggagaagc

SEQ ID NO: 2195592 - RNA, 14 nt, Human
agccuggagaagcu

SEQ ID NO: 2195593 - RNA, 14 nt, Human
agccuggccaacau

SEQ ID NO: 2195594 - RNA, 20 nt, Human
agccuggcacagggcagugg

SEQ ID NO: 2195595 - RNA, 13 nt, Human
agccuggccagac

SEQ ID NO: 2195596 - RNA, 12 nt, Human
agccuggccaga

SEQ ID NO: 2195597 - RNA, 23 nt, Human
agccuggaggccgggugcucagg

SEQ ID NO: 2195598 - RNA, 11 nt, Human
agccuggaggc

SEQ ID NO: 2195599 - RNA, 17 nt, Human
agccuggcacagggcag

SEQ ID NO: 2195600 - RNA, 18 nt, Human
agccuggcacagggcagu

SEQ ID NO: 2195601 - RNA, 21 nt, Human
agcuacaccuuucuccuuugu

SEQ ID NO: 2195602 - RNA, 22 nt, Human
agcuacaccuuucuccuuugua

SEQ ID NO: 2195603 - RNA, 16 nt, Human
agcucacacaugagau

SEQ ID NO: 2195604 - RNA, 20 nt, Human
agcucacaguuccucgcccu

SEQ ID NO: 2195605 - RNA, 21 nt, Human
agcucacaauaaaaauggcuc

SEQ ID NO: 2195606 - RNA, 13 nt, Human
agcuacaaaugca

SEQ ID NO: 2195607 - RNA, 13 nt, Human
agcucaccagccc

SEQ ID NO: 2195608 - RNA, 14 nt, Human
agcucaccagcccc

SEQ ID NO: 2195609 - RNA, 15 nt, Human
agcucaccagcccca

SEQ ID NO: 2195610 - RNA, 21 nt, Human
agcucaccagccccagugccc

SEQ ID NO: 2195611 - RNA, 19 nt, Human
agcuaaggacauuucccag

SEQ ID NO: 2195612 - RNA, 16 nt, Human
agcuaaggacauuucc

SEQ ID NO: 2195613 - RNA, 18 nt, Human
agcuaagcuaggaaugaa

SEQ ID NO: 2195614 - RNA, 16 nt, Human
agcuaagaaccuggaa

SEQ ID NO: 2195615 - RNA, 14 nt, Human
agcuaagaaccugg

SEQ ID NO: 2195616 - RNA, 17 nt, Human
agcuaagaaccuggaac

SEQ ID NO: 2195617 - RNA, 17 nt, Human
agcuaagcuaggaauga

SEQ ID NO: 2195618 - RNA, 23 nt, Human
agcuaaucuguagggcuggaccu

SEQ ID NO: 2195619 - RNA, 19 nt, Human
agcuaaucuguagggcugg

SEQ ID NO: 2195620 - RNA, 20 nt, Human
agcuaaucuguagggcugga

SEQ ID NO: 2195621 - RNA, 19 nt, Human
agcuaagugaaaaggucau

SEQ ID NO: 2195622 - RNA, 13 nt, Human
agcuaaucuguag

SEQ ID NO: 2195623 - RNA, 17 nt, Human
agcuaaucuguagggcu

SEQ ID NO: 2195624 - RNA, 13 nt, Human
agcuaaugggaca

SEQ ID NO: 2195625 - RNA, 14 nt, Human
agcuaaugggacac

SEQ ID NO: 2195626 - RNA, 15 nt, Human
agcuaaugggacacu

SEQ ID NO: 2195627 - RNA, 12 nt, Human
agcuacaaaugc

SEQ ID NO: 2195628 - RNA, 17 nt, Human
agcgauucuucugcuuc

SEQ ID NO: 2195629 - RNA, 19 nt, Human
agcgauucuucugcuucag

SEQ ID NO: 2195630 - RNA, 15 nt, Human
agcgauucuucugcu

SEQ ID NO: 2195631 - RNA, 14 nt, Human
agcgacaaagauga

SEQ ID NO: 2195632 - RNA, 15 nt, Human
agcgacaaagaugau

SEQ ID NO: 2195633 - RNA, 15 nt, Human
agcgacagugagacu

SEQ ID NO: 2195634 - RNA, 13 nt, Human
agcgacagugaga

SEQ ID NO: 2195635 - RNA, 16 nt, Human
agcgaauuuuaaaaga

SEQ ID NO: 2195636 - RNA, 15 nt, Human
agcgaauuuuaaaag

SEQ ID NO: 2195637 - RNA, 13 nt, Human
agcgaauuuuaaa

SEQ ID NO: 2195638 - RNA, 12 nt, Human
agcgaagggagu

SEQ ID NO: 2195639 - RNA, 16 nt, Human
agcgaacuugacaauu

SEQ ID NO: 2195640 - RNA, 20 nt, Human
agcgaaugcuaggucucgga

SEQ ID NO: 2195641 - RNA, 23 nt, Human
agcuaacccccuucuacugagcc

SEQ ID NO: 2195642 - RNA, 22 nt, Human
agcuaacauuuuaaauaaaaga

SEQ ID NO: 2195643 - RNA, 18 nt, Human
agcuaacauuuuaaauaa

SEQ ID NO: 2195644 - RNA, 20 nt, Human
agcuaacauuuuaaauaaaa

SEQ ID NO: 2195645 - RNA, 23 nt, Human
agcuaacauuuuaaauaaaagaa

SEQ ID NO: 2195646 - RNA, 14 nt, Human
agcuaagaaaagau

SEQ ID NO: 2195647 - RNA, 13 nt, Human
agcuaagaaauaa

SEQ ID NO: 2195648 - RNA, 15 nt, Human
agcuaagaaauaaaa

SEQ ID NO: 2195649 - RNA, 19 nt, Human
agcuaagaaauaaaacugu

SEQ ID NO: 2195650 - RNA, 13 nt, Human
agcuaagaaccug

SEQ ID NO: 2195651 - RNA, 12 nt, Human
agcuaagaaccu

SEQ ID NO: 2195652 - RNA, 20 nt, Human
agcuaacauggaaguacuau

SEQ ID NO: 2195653 - RNA, 17 nt, Human
agcuaacauuuuaaaua

SEQ ID NO: 2195654 - RNA, 19 nt, Human
agcuaacacuggccccuag

SEQ ID NO: 2195655 - RNA, 18 nt, Human
agcuaacacuggccccua

SEQ ID NO: 2195656 - RNA, 17 nt, Human
agcuaacacuggccccu

SEQ ID NO: 2195657 - RNA, 16 nt, Human
agcuaacacuggcccc

SEQ ID NO: 2195658 - RNA, 16 nt, Human
agcuaacacacagcuc

SEQ ID NO: 2195659 - RNA, 17 nt, Human
agcuaacacacagcucc

SEQ ID NO: 2195660 - RNA, 18 nt, Human
agcuaacacacagcuccc

SEQ ID NO: 2195661 - RNA, 19 nt, Human
agcuaacacacagcuccca

SEQ ID NO: 2195662 - RNA, 19 nt, Human
agcuaacauggaaguacua

SEQ ID NO: 2195663 - RNA, 16 nt, Human
agcuaaagcccaaccu

SEQ ID NO: 2195664 - RNA, 21 nt, Human
agcuaaagaggcugaaagagg

SEQ ID NO: 2195665 - RNA, 15 nt, Human
agcuaaagaggcuga

SEQ ID NO: 2195666 - RNA, 13 nt, Human
agcuaaagaggcu

SEQ ID NO: 2195667 - RNA, 13 nt, Human
agcuaaauccuuu

SEQ ID NO: 2195668 - RNA, 18 nt, Human
agcuaaauuacaauuguc

SEQ ID NO: 2195669 - RNA, 17 nt, Human
agcuaaacggauuccaa

SEQ ID NO: 2195670 - RNA, 18 nt, Human
agcuaaacggauuccaaa

SEQ ID NO: 2195671 - RNA, 14 nt, Human
aggcuuacacccac

SEQ ID NO: 2195672 - RNA, 18 nt, Human
aggcuuaauaccugggug

SEQ ID NO: 2195673 - RNA, 19 nt, Human
agggaccaaggaccccuca

SEQ ID NO: 2195674 - RNA, 21 nt, Human
agggacucugaagccucuggg

SEQ ID NO: 2195675 - RNA, 21 nt, Human
agggaccaaggaccccucacc

SEQ ID NO: 2195676 - RNA, 20 nt, Human
agggacucugaagccucugg

SEQ ID NO: 2195677 - RNA, 18 nt, Human
agggaccaaggaccccuc

SEQ ID NO: 2195678 - RNA, 14 nt, Human
agggaccaaggacc

SEQ ID NO: 2195679 - RNA, 19 nt, Human
agggaccaacugggcccaa

SEQ ID NO: 2195680 - RNA, 17 nt, Human
agggaccaacugggccc

SEQ ID NO: 2195681 - RNA, 16 nt, Human
agggaccaacugggcc

SEQ ID NO: 2195682 - RNA, 20 nt, Human
agggacauguuuugauaaag

SEQ ID NO: 2195683 - RNA, 22 nt, Human
agggacauguuuugauaaagua

SEQ ID NO: 2195684 - RNA, 24 nt, Human
agggacauguuuugauaaaguagu

SEQ ID NO: 2195685 - RNA, 23 nt, Human
agggacauauucauuuggaaaua

SEQ ID NO: 2195686 - RNA, 15 nt, Human
agggacauauucauu

SEQ ID NO: 2195687 - RNA, 19 nt, Human
agggacauguuuugauaaa

SEQ ID NO: 2195688 - RNA, 13 nt, Human
agggacauauuca

SEQ ID NO: 2195689 - RNA, 17 nt, Human
agggacaggauaagagg

SEQ ID NO: 2195690 - RNA, 24 nt, Human
aggcuguaucccaugagccucagc

SEQ ID NO: 2195691 - RNA, 17 nt, Human
aggcugccaaggccaga

SEQ ID NO: 2195692 - RNA, 19 nt, Human
aggcugucaauuacaggaa

SEQ ID NO: 2195693 - RNA, 20 nt, Human
aggcuguucccauguagccc

SEQ ID NO: 2195694 - RNA, 12 nt, Human
aggcugucaauu

SEQ ID NO: 2195695 - RNA, 19 nt, Human
aggcugcagugagccgaga

SEQ ID NO: 2195696 - RNA, 17 nt, Human
aggcugcagugagccga

SEQ ID NO: 2195697 - RNA, 21 nt, Human
aggcugcagucagucaugaug

SEQ ID NO: 2195698 - RNA, 14 nt, Human
aggcugaggcagaa

SEQ ID NO: 2195699 - RNA, 23 nt, Human
aggcuguaucccaugagccucag

SEQ ID NO: 2195700 - RNA, 21 nt, Human
aggcucugugcugacccuccu

SEQ ID NO: 2195701 - RNA, 22 nt, Human
aggcucugugcugacccuccug

SEQ ID NO: 2195702 - RNA, 16 nt, Human
aggcucugugcugacc

SEQ ID NO: 2195703 - RNA, 17 nt, Human
aggcucugugcugaccc

SEQ ID NO: 2195704 - RNA, 18 nt, Human
aggcucugugcugacccu

SEQ ID NO: 2195705 - RNA, 16 nt, Human
aggcucuucuccccag

SEQ ID NO: 2195706 - RNA, 17 nt, Human
aggcucuucuccccaga

SEQ ID NO: 2195707 - RNA, 18 nt, Human
aggcucuucuccccagag

SEQ ID NO: 2195708 - RNA, 19 nt, Human
aggcucuuagcagcuucca

SEQ ID NO: 2195709 - RNA, 22 nt, Human
aggcucuuagcagcuuccagau

SEQ ID NO: 2195710 - RNA, 22 nt, Human
aggcucuggagcccacuguacu

SEQ ID NO: 2195711 - RNA, 13 nt, Human
aggcucugugcug

SEQ ID NO: 2195712 - RNA, 18 nt, Human
aggcuagcuucugcuuuu

SEQ ID NO: 2195713 - RNA, 15 nt, Human
aggcuagcuucugcu

SEQ ID NO: 2195714 - RNA, 17 nt, Human
aggcuagcuucugcuuu

SEQ ID NO: 2195715 - RNA, 11 nt, Human
aggcugaggca

SEQ ID NO: 2195716 - RNA, 22 nt, Human
aggcugaggaaaggccagcugg

SEQ ID NO: 2195717 - RNA, 18 nt, Human
aggcugaggcaagagaau

SEQ ID NO: 2195718 - RNA, 13 nt, Human
aggcugaggacuu

SEQ ID NO: 2195719 - RNA, 20 nt, Human
aggcugaggaaaggccagcu

SEQ ID NO: 2195720 - RNA, 19 nt, Human
aggcugaggaaaggccagc

SEQ ID NO: 2195721 - RNA, 18 nt, Human
aggcugaggaaaggccag

SEQ ID NO: 2195722 - RNA, 15 nt, Human
aggcugaggaaaggc

SEQ ID NO: 2195723 - RNA, 11 nt, Human
aggcugaggac

SEQ ID NO: 2195724 - RNA, 13 nt, Human
aggcucuucuccu

SEQ ID NO: 2195725 - RNA, 11 nt, Human
aggcugagccu

SEQ ID NO: 2195726 - RNA, 14 nt, Human
aggcugaggaaagg

SEQ ID NO: 2195727 - RNA, 19 nt, Human
aggcucuucuccccagagu

SEQ ID NO: 2195728 - RNA, 13 nt, Human
aggcugagccuca

SEQ ID NO: 2195729 - RNA, 12 nt, Human
aggccaggguca

SEQ ID NO: 2195730 - RNA, 23 nt, Human
aggccagggcuauagcucaggac

SEQ ID NO: 2195731 - RNA, 20 nt, Human
aggccagggucacugaaggc

SEQ ID NO: 2195732 - RNA, 19 nt, Human
aggcccucugcccacuccc

SEQ ID NO: 2195733 - RNA, 20 nt, Human
aggcccucugcccacucccu

SEQ ID NO: 2195734 - RNA, 20 nt, Human
agggauucugguuccagggu

SEQ ID NO: 2195735 - RNA, 22 nt, Human
agggauuuggggcucagagugg

SEQ ID NO: 2195736 - RNA, 13 nt, Human
agggccuggcuca

SEQ ID NO: 2195737 - RNA, 14 nt, Human
agggccuggcucag

SEQ ID NO: 2195738 - RNA, 19 nt, Human
agggcguggaaaggggcag

SEQ ID NO: 2195739 - RNA, 19 nt, Human
agggcgugacucacccaag

SEQ ID NO: 2195740 - RNA, 17 nt, Human
agggcgugacucaccca

SEQ ID NO: 2195741 - RNA, 13 nt, Human
agggcuaagagcu

SEQ ID NO: 2195742 - RNA, 13 nt, Human
agggcguggaggg

SEQ ID NO: 2195743 - RNA, 14 nt, Human
agggcgugggagcg

SEQ ID NO: 2195744 - RNA, 23 nt, Human
agggcuaagagcuagcgcugccg

SEQ ID NO: 2195745 - RNA, 22 nt, Human
agggcuaagagcuagcgcugcc

SEQ ID NO: 2195746 - RNA, 21 nt, Human
agggcuaagagcuagcgcugc

SEQ ID NO: 2195747 - RNA, 14 nt, Human
agggcuaagagcua

SEQ ID NO: 2195748 - RNA, 19 nt, Human
agggcuacccucccccagg

SEQ ID NO: 2195749 - RNA, 15 nt, Human
agggcuacccugagc

SEQ ID NO: 2195750 - RNA, 16 nt, Human
agggauugcugccacu

SEQ ID NO: 2195751 - RNA, 12 nt, Human
agggauuugagg

SEQ ID NO: 2195752 - RNA, 18 nt, Human
agggccuggcucaggugg

SEQ ID NO: 2195753 - RNA, 19 nt, Human
aggggcauguauuggccug

SEQ ID NO: 2195754 - RNA, 18 nt, Human
aggggcauggccagcagc

SEQ ID NO: 2195755 - RNA, 22 nt, Human
aggggcaucugccccuccccca

SEQ ID NO: 2195756 - RNA, 21 nt, Human
aggggcaucugccccuccccc

SEQ ID NO: 2195757 - RNA, 20 nt, Human
aggggcaucugccccucccc

SEQ ID NO: 2195758 - RNA, 19 nt, Human
aggggcaucugccccuccc

SEQ ID NO: 2195759 - RNA, 17 nt, Human
aggggcaucugccccuc

SEQ ID NO: 2195760 - RNA, 16 nt, Human
aggggcaucugccccu

SEQ ID NO: 2195761 - RNA, 20 nt, Human
agggcuagaaucuggagagc

SEQ ID NO: 2195762 - RNA, 16 nt, Human
agggcuagcaucccug

SEQ ID NO: 2195763 - RNA, 22 nt, Human
agggcuagaaccuguagagcua

SEQ ID NO: 2195764 - RNA, 17 nt, Human
agggcuagaacuggaga

SEQ ID NO: 2195765 - RNA, 18 nt, Human
agggcuagaacuggagag

SEQ ID NO: 2195766 - RNA, 18 nt, Human
agggcuagaaucuggaga

SEQ ID NO: 2195767 - RNA, 19 nt, Human
agggcuauagcucaggacc

SEQ ID NO: 2195768 - RNA, 22 nt, Human
agggcuagugacuuguguccca

SEQ ID NO: 2195769 - RNA, 24 nt, Human
agggcuagugacuugugucccaug

SEQ ID NO: 2195770 - RNA, 23 nt, Human
agggcuacccugagcugaggcag

SEQ ID NO: 2195771 - RNA, 22 nt, Human
agggcuacccugagcugaggca

SEQ ID NO: 2195772 - RNA, 21 nt, Human
agggcuacugcagcuuuacau

SEQ ID NO: 2195773 - RNA, 17 nt, Human
agggcuagaaccuagaa

SEQ ID NO: 2195774 - RNA, 21 nt, Human
agggcuagaaccuagaagggc

SEQ ID NO: 2195775 - RNA, 22 nt, Human
agggcuagaaccuagaagggcu

SEQ ID NO: 2195776 - RNA, 21 nt, Human
agggcuacccugagcugaggc

SEQ ID NO: 2195777 - RNA, 20 nt, Human
agggcuacccugagcugagg

SEQ ID NO: 2195778 - RNA, 18 nt, Human
agggcuacccugagcuga

SEQ ID NO: 2195779 - RNA, 17 nt, Human
agggcuacccugagcug

SEQ ID NO: 2195780 - RNA, 16 nt, Human
agggcuagaaccugga

SEQ ID NO: 2195781 - RNA, 17 nt, Human
agggcuagaaccuggaa

SEQ ID NO: 2195782 - RNA, 18 nt, Human
agggcuagaaccuggaag

SEQ ID NO: 2195783 - RNA, 19 nt, Human
agggcuagaaccuggaagg

SEQ ID NO: 2195784 - RNA, 22 nt, Human
agggcuagaaccuggaagggcu

SEQ ID NO: 2195785 - RNA, 17 nt, Human
agggcuagaaccuggag

SEQ ID NO: 2195786 - RNA, 18 nt, Human
agggcuagaaccuggaga

SEQ ID NO: 2195787 - RNA, 19 nt, Human
agggcuagaaccuggagaa

SEQ ID NO: 2195788 - RNA, 19 nt, Human
agggcuagaaccuggagag

SEQ ID NO: 2195789 - RNA, 20 nt, Human
agggcuagaaccuggagagc

SEQ ID NO: 2195790 - RNA, 18 nt, Human
agggcuagaaccuggagg

SEQ ID NO: 2195791 - RNA, 22 nt, Human
agggcuagaaccuggagggcua

SEQ ID NO: 2195792 - RNA, 22 nt, Human
agggcuagaaccuggagggcug

SEQ ID NO: 2195793 - RNA, 21 nt, Human
agggcuagaaccuggaggggc

SEQ ID NO: 2195794 - RNA, 23 nt, Human
agggcuagaaccuggaggggcua

SEQ ID NO: 2195795 - RNA, 18 nt, Human
agggcuagaaccuggcag

SEQ ID NO: 2195796 - RNA, 22 nt, Human
agggaucugguccuacccaucc

SEQ ID NO: 2195797 - RNA, 19 nt, Human
agggaucuugcauucccag

SEQ ID NO: 2195798 - RNA, 20 nt, Human
agggaucuugcauucccagu

SEQ ID NO: 2195799 - RNA, 15 nt, Human
agggaugacuaaaau

SEQ ID NO: 2195800 - RNA, 22 nt, Human
agggaucuugcauucccagugg

SEQ ID NO: 2195801 - RNA, 17 nt, Human
agggaugaaagagaagg

SEQ ID NO: 2195802 - RNA, 17 nt, Human
agggaugaggugcuggg

SEQ ID NO: 2195803 - RNA, 16 nt, Human
agggaugaggugcugg

SEQ ID NO: 2195804 - RNA, 20 nt, Human
agggaugagcauggagcugg

SEQ ID NO: 2195805 - RNA, 21 nt, Human
agggaugagcauggagcuggc

SEQ ID NO: 2195806 - RNA, 22 nt, Human
agggaugacuaaaauauuuauu

SEQ ID NO: 2195807 - RNA, 18 nt, Human
agggaugaaggccucccu

SEQ ID NO: 2195808 - RNA, 19 nt, Human
agggaugagcauggagcug

SEQ ID NO: 2195809 - RNA, 19 nt, Human
agggaugcugccugaguca

SEQ ID NO: 2195810 - RNA, 18 nt, Human
agggaugcugccugaguc

SEQ ID NO: 2195811 - RNA, 17 nt, Human
agggaugcugccugagu

SEQ ID NO: 2195812 - RNA, 16 nt, Human
agggaugcugccugag

SEQ ID NO: 2195813 - RNA, 22 nt, Human
agggauggaaaaggaagacuag

SEQ ID NO: 2195814 - RNA, 15 nt, Human
agggauggaaaagga

SEQ ID NO: 2195815 - RNA, 21 nt, Human
agggaugcccuggagguggcu

SEQ ID NO: 2195816 - RNA, 13 nt, Human
agggauggacuga

SEQ ID NO: 2195817 - RNA, 17 nt, Human
agggauggacugaugcu

SEQ ID NO: 2195818 - RNA, 18 nt, Human
agggaugccaucuguggg

SEQ ID NO: 2195819 - RNA, 20 nt, Human
agggaugcccuggagguggc

SEQ ID NO: 2195820 - RNA, 19 nt, Human
agggaugcccuggaggugg

SEQ ID NO: 2195821 - RNA, 17 nt, Human
agggaugcccuggaggu

SEQ ID NO: 2195822 - RNA, 15 nt, Human
agggaugcccuggag

SEQ ID NO: 2195823 - RNA, 23 nt, Human
agggaugaggugcugggagggau

SEQ ID NO: 2195824 - RNA, 19 nt, Human
agggaugaggugcugggag

SEQ ID NO: 2195825 - RNA, 16 nt, Human
agggaugaugccacac

SEQ ID NO: 2195826 - RNA, 18 nt, Human
agggaugaugccacacca

SEQ ID NO: 2195827 - RNA, 15 nt, Human
agggaugcauggaga

SEQ ID NO: 2195828 - RNA, 15 nt, Human
agggauucaggcugc

SEQ ID NO: 2195829 - RNA, 14 nt, Human
agggauucaggcug

SEQ ID NO: 2195830 - RNA, 13 nt, Human
agggauggugccc

SEQ ID NO: 2195831 - RNA, 18 nt, Human
agggauucacaucugcau

SEQ ID NO: 2195832 - RNA, 18 nt, Human
agggauucaggcugcuug

SEQ ID NO: 2195833 - RNA, 16 nt, Human
agggauucaggcugcu

SEQ ID NO: 2195834 - RNA, 19 nt, Human
agggauucaggcugcuugg

SEQ ID NO: 2195835 - RNA, 13 nt, Human
agggauggcgggu

SEQ ID NO: 2195836 - RNA, 18 nt, Human
agggauggacugaugcuu

SEQ ID NO: 2195837 - RNA, 16 nt, Human
agggauggauuccaac

SEQ ID NO: 2195838 - RNA, 17 nt, Human
agggauggauuccaacc

SEQ ID NO: 2195839 - RNA, 15 nt, Human
agggauggccguugg

SEQ ID NO: 2195840 - RNA, 19 nt, Human
agggauggccguuggccac

SEQ ID NO: 2195841 - RNA, 18 nt, Human
agggauggcggguggggg

SEQ ID NO: 2195842 - RNA, 17 nt, Human
agggacugagaaauuua

SEQ ID NO: 2195843 - RNA, 14 nt, Human
agggacugaagcca

SEQ ID NO: 2195844 - RNA, 22 nt, Human
agggacucugaagccucuggga

SEQ ID NO: 2195845 - RNA, 15 nt, Human
agggacugagaaauu

SEQ ID NO: 2195846 - RNA, 13 nt, Human
agggacugagaaa

SEQ ID NO: 2195847 - RNA, 14 nt, Human
agggacugagaaau

SEQ ID NO: 2195848 - RNA, 17 nt, Human
aggaguucgaggcugca

SEQ ID NO: 2195849 - RNA, 16 nt, Human
aggaguucgaggcugc

SEQ ID NO: 2195850 - RNA, 22 nt, Human
aggaguucgagaccagccuggc

SEQ ID NO: 2195851 - RNA, 18 nt, Human
aggaguuucguuuucaaa

SEQ ID NO: 2195852 - RNA, 14 nt, Human
aggaguugcuguuu

SEQ ID NO: 2195853 - RNA, 21 nt, Human
aggaguugcuguuuguuugac

SEQ ID NO: 2195854 - RNA, 12 nt, Human
aggauggagggg

SEQ ID NO: 2195855 - RNA, 19 nt, Human
aggaguuucgagguagagu

SEQ ID NO: 2195856 - RNA, 15 nt, Human
aggauggccaguguc

SEQ ID NO: 2195857 - RNA, 19 nt, Human
aggauggaggggugguccu

SEQ ID NO: 2195858 - RNA, 16 nt, Human
aggauggccagugucu

SEQ ID NO: 2195859 - RNA, 18 nt, Human
aggauggccagugucugu

SEQ ID NO: 2195860 - RNA, 19 nt, Human
aggauggccagugucuguc

SEQ ID NO: 2195861 - RNA, 23 nt, Human
aggaguucagggucauagcaugc

SEQ ID NO: 2195862 - RNA, 18 nt, Human
aggaguggaggaggccug

SEQ ID NO: 2195863 - RNA, 19 nt, Human
aggaguucaaugaucuagg

SEQ ID NO: 2195864 - RNA, 21 nt, Human
aggaguucgagaccagccugg

SEQ ID NO: 2195865 - RNA, 16 nt, Human
aggaguucgagaccag

SEQ ID NO: 2195866 - RNA, 20 nt, Human
aggaguuccuugaucuguau

SEQ ID NO: 2195867 - RNA, 19 nt, Human
aggaguuccuaaccagccu

SEQ ID NO: 2195868 - RNA, 14 nt, Human
aggagugagcacua

SEQ ID NO: 2195869 - RNA, 22 nt, Human
aggagugaaaccuuuagggcag

SEQ ID NO: 2195870 - RNA, 23 nt, Human
aggagugaaaccuuuagggcagc

SEQ ID NO: 2195871 - RNA, 17 nt, Human
aggagugagaggggaca

SEQ ID NO: 2195872 - RNA, 14 nt, Human
aggagugagaucau

SEQ ID NO: 2195873 - RNA, 21 nt, Human
aggagugagaucauuuucuua

SEQ ID NO: 2195874 - RNA, 12 nt, Human
aggagugaggaa

SEQ ID NO: 2195875 - RNA, 22 nt, Human
aggagugaggaaggcaggaaga

SEQ ID NO: 2195876 - RNA, 23 nt, Human
aggagguggcagcccuguaggga

SEQ ID NO: 2195877 - RNA, 21 nt, Human
aggagguggcagcccuguagg

SEQ ID NO: 2195878 - RNA, 20 nt, Human
aggagguggcagcccuguag

SEQ ID NO: 2195879 - RNA, 18 nt, Human
aggagguggcagcccugu

SEQ ID NO: 2195880 - RNA, 17 nt, Human
aggagguggcagcccug

SEQ ID NO: 2195881 - RNA, 14 nt, Human
aggagguggcagcc

SEQ ID NO: 2195882 - RNA, 20 nt, Human
aggagguggagguugcagug

SEQ ID NO: 2195883 - RNA, 16 nt, Human
aggaggugccaacagu

SEQ ID NO: 2195884 - RNA, 20 nt, Human
aggagguggaggcugcagug

SEQ ID NO: 2195885 - RNA, 15 nt, Human
aggaggucucuaaga

SEQ ID NO: 2195886 - RNA, 13 nt, Human
aggaggugaggga

SEQ ID NO: 2195887 - RNA, 14 nt, Human
aggaggugagggau

SEQ ID NO: 2195888 - RNA, 15 nt, Human
aggaggugccaacag

SEQ ID NO: 2195889 - RNA, 12 nt, Human
aggagugagcac

SEQ ID NO: 2195890 - RNA, 21 nt, Human
aggaguaaucuguguacaaag

SEQ ID NO: 2195891 - RNA, 18 nt, Human
aggaguacaggugaagca

SEQ ID NO: 2195892 - RNA, 24 nt, Human
aggagucugcacaugcagcugcac

SEQ ID NO: 2195893 - RNA, 18 nt, Human
aggagguuuaggucaaga

SEQ ID NO: 2195894 - RNA, 14 nt, Human
aggagguuuggaug

SEQ ID NO: 2195895 - RNA, 23 nt, Human
aggagguuuggggucugccacca

SEQ ID NO: 2195896 - RNA, 20 nt, Human
aggaguaaucuguguacaaa

SEQ ID NO: 2195897 - RNA, 14 nt, Human
aggagacccacagg

SEQ ID NO: 2195898 - RNA, 17 nt, Human
aggagaccaaggcggga

SEQ ID NO: 2195899 - RNA, 11 nt, Human
aggagacucac

SEQ ID NO: 2195900 - RNA, 21 nt, Human
aggagaccuggcacuggaugc

SEQ ID NO: 2195901 - RNA, 21 nt, Human
aggagacucaccucugccuca

SEQ ID NO: 2195902 - RNA, 19 nt, Human
aggagacucaccucugccu

SEQ ID NO: 2195903 - RNA, 18 nt, Human
aggagacucaccucugcc

SEQ ID NO: 2195904 - RNA, 17 nt, Human
aggagacucaccucugc

SEQ ID NO: 2195905 - RNA, 16 nt, Human
aggagacucaccucug

SEQ ID NO: 2195906 - RNA, 15 nt, Human
aggagacucaccucu

SEQ ID NO: 2195907 - RNA, 14 nt, Human
aggagacucaccuc

SEQ ID NO: 2195908 - RNA, 13 nt, Human
aggagacucaccu

SEQ ID NO: 2195909 - RNA, 16 nt, Human
aggagagcccuucauu

SEQ ID NO: 2195910 - RNA, 14 nt, Human
aggagagccagaga

SEQ ID NO: 2195911 - RNA, 15 nt, Human
aggagagccagagaa

SEQ ID NO: 2195912 - RNA, 21 nt, Human
aggagagccagagaagugaca

SEQ ID NO: 2195913 - RNA, 23 nt, Human
aggagagccagagaagugacagg

SEQ ID NO: 2195914 - RNA, 12 nt, Human
aggagagccaga

SEQ ID NO: 2195915 - RNA, 11 nt, Human
aggagagcagc

SEQ ID NO: 2195916 - RNA, 12 nt, Human
aggagagcagcg

SEQ ID NO: 2195917 - RNA, 14 nt, Human
aggagagaguugaa

SEQ ID NO: 2195918 - RNA, 14 nt, Human
aggaagguuuucuc

SEQ ID NO: 2195919 - RNA, 18 nt, Human
aggaagguuuucuccacu

SEQ ID NO: 2195920 - RNA, 14 nt, Human
aggagaccaaggcg

SEQ ID NO: 2195921 - RNA, 18 nt, Human
aggagacaguucaagaaa

SEQ ID NO: 2195922 - RNA, 19 nt, Human
aggaaguacuggagaaaau

SEQ ID NO: 2195923 - RNA, 13 nt, Human
aggaaguagagga

SEQ ID NO: 2195924 - RNA, 20 nt, Human
aggagagccugcugcauggg

SEQ ID NO: 2195925 - RNA, 18 nt, Human
aggagagccugcugcaug

SEQ ID NO: 2195926 - RNA, 16 nt, Human
aggagagccugcugca

SEQ ID NO: 2195927 - RNA, 15 nt, Human
aggagagccugcugc

SEQ ID NO: 2195928 - RNA, 14 nt, Human
aggagagccugcug

SEQ ID NO: 2195929 - RNA, 13 nt, Human
aggagagccugcu

SEQ ID NO: 2195930 - RNA, 12 nt, Human
aggagagccugc

SEQ ID NO: 2195931 - RNA, 15 nt, Human
aggagagccagcccu

SEQ ID NO: 2195932 - RNA, 14 nt, Human
aggagagccagccc

SEQ ID NO: 2195933 - RNA, 23 nt, Human
aggagggagguauucgugcagca

SEQ ID NO: 2195934 - RNA, 16 nt, Human
aggagagccagcccuc

SEQ ID NO: 2195935 - RNA, 15 nt, Human
aggagggagggggcu

SEQ ID NO: 2195936 - RNA, 19 nt, Human
aggagggaugcugccugag

SEQ ID NO: 2195937 - RNA, 16 nt, Human
aggagggcaagggcca

SEQ ID NO: 2195938 - RNA, 20 nt, Human
aggagggcaagggccaugcu

SEQ ID NO: 2195939 - RNA, 22 nt, Human
aggagggcgugacucacccaag

SEQ ID NO: 2195940 - RNA, 17 nt, Human
aggagggcgugacucac

SEQ ID NO: 2195941 - RNA, 18 nt, Human
aggagggucaggaaggau

SEQ ID NO: 2195942 - RNA, 20 nt, Human
aggagggcccuaccugauug

SEQ ID NO: 2195943 - RNA, 14 nt, Human
aggagggcagcaga

SEQ ID NO: 2195944 - RNA, 18 nt, Human
aggaggguuagggagggg

SEQ ID NO: 2195945 - RNA, 14 nt, Human
aggaggucucuaag

SEQ ID NO: 2195946 - RNA, 22 nt, Human
aggaugggucugguuugcagag

SEQ ID NO: 2195947 - RNA, 19 nt, Human
aggaugucacucagaugga

SEQ ID NO: 2195948 - RNA, 13 nt, Human
aggaugucugggc

SEQ ID NO: 2195949 - RNA, 14 nt, Human
aggaugugauauau

SEQ ID NO: 2195950 - RNA, 18 nt, Human
aggauggcuuugaaugcg

SEQ ID NO: 2195951 - RNA, 22 nt, Human
aggauggccuggccagggccug

SEQ ID NO: 2195952 - RNA, 23 nt, Human
aggauggccuggccagggccugg

SEQ ID NO: 2195953 - RNA, 20 nt, Human
aggauggccagugucugucc

SEQ ID NO: 2195954 - RNA, 13 nt, Human
aggauggccuggc

SEQ ID NO: 2195955 - RNA, 16 nt, Human
aggauggccuggccag

SEQ ID NO: 2195956 - RNA, 17 nt, Human
aggauggccuggccagg

SEQ ID NO: 2195957 - RNA, 12 nt, Human
aggaugggaagg

SEQ ID NO: 2195958 - RNA, 11 nt, Human
aggaugggcuc

SEQ ID NO: 2195959 - RNA, 17 nt, Human
aggaugggaaggaggga

SEQ ID NO: 2195960 - RNA, 19 nt, Human
aggaugggggcuggccucu

SEQ ID NO: 2195961 - RNA, 14 nt, Human
aggaugugugcaug

SEQ ID NO: 2195962 - RNA, 16 nt, Human
aggaugugugcaugug

SEQ ID NO: 2195963 - RNA, 21 nt, Human
aggaugugggggaagaccugg

SEQ ID NO: 2195964 - RNA, 15 nt, Human
aggaugugugcaugu

SEQ ID NO: 2195965 - RNA, 20 nt, Human
aggaugugauuguggaaugg

SEQ ID NO: 2195966 - RNA, 18 nt, Human
aggaugugauauauaagu

SEQ ID NO: 2195967 - RNA, 21 nt, Human
aggaugugauauauaagugua

SEQ ID NO: 2195968 - RNA, 22 nt, Human
aggcaugugccacccacccaac

SEQ ID NO: 2195969 - RNA, 14 nt, Human
aggcaugccugugu

SEQ ID NO: 2195970 - RNA, 13 nt, Human
aggcaugccugug

SEQ ID NO: 2195971 - RNA, 22 nt, Human
aggcaugagggaucacagggcc

SEQ ID NO: 2195972 - RNA, 20 nt, Human
aggcaugagggaucacaggg

SEQ ID NO: 2195973 - RNA, 12 nt, Human
aggcauguucuc

SEQ ID NO: 2195974 - RNA, 23 nt, Human
aggcaugugaugagaggaaauca

SEQ ID NO: 2195975 - RNA, 24 nt, Human
aggcaugugaugagaggaaaucac

SEQ ID NO: 2195976 - RNA, 19 nt, Human
aggcaucugugggcauggu

SEQ ID NO: 2195977 - RNA, 23 nt, Human
aggcaugagggaucacagggccc

SEQ ID NO: 2195978 - RNA, 15 nt, Human
aggcaugagggauca

SEQ ID NO: 2195979 - RNA, 14 nt, Human
aggcaucugcaccc

SEQ ID NO: 2195980 - RNA, 11 nt, Human
aggcaugaagg

SEQ ID NO: 2195981 - RNA, 17 nt, Human
aggcaucgcaauguaag

SEQ ID NO: 2195982 - RNA, 13 nt, Human
aggcauucucuga

SEQ ID NO: 2195983 - RNA, 24 nt, Human
aggcauuccagcuccuccgugcuu

SEQ ID NO: 2195984 - RNA, 12 nt, Human
aggcauucaagu

SEQ ID NO: 2195985 - RNA, 13 nt, Human
aggcauuccagcu

SEQ ID NO: 2195986 - RNA, 12 nt, Human
aggccagcugcu

SEQ ID NO: 2195987 - RNA, 22 nt, Human
aggcauuccccaggaggccagc

SEQ ID NO: 2195988 - RNA, 23 nt, Human
aggcauuccccaggaggccagcc

SEQ ID NO: 2195989 - RNA, 16 nt, Human
aggcaugccuguguga

SEQ ID NO: 2195990 - RNA, 15 nt, Human
aggcaugccugugug

SEQ ID NO: 2195991 - RNA, 14 nt, Human
aggcauuaaauuuu

SEQ ID NO: 2195992 - RNA, 22 nt, Human
aggcauuaaauuuuagcaaaga

SEQ ID NO: 2195993 - RNA, 21 nt, Human
aggcauuccccaggaggccag

SEQ ID NO: 2195994 - RNA, 20 nt, Human
aggcauguucucugaggaca

SEQ ID NO: 2195995 - RNA, 22 nt, Human
aggcauguucucugaggacacu

SEQ ID NO: 2195996 - RNA, 14 nt, Human
aggccaugggccuc

SEQ ID NO: 2195997 - RNA, 16 nt, Human
aggccaugggccuccu

SEQ ID NO: 2195998 - RNA, 17 nt, Human
aggccaugggccuccug

SEQ ID NO: 2195999 - RNA, 17 nt, Human
aggcccucugcccacuc

SEQ ID NO: 2196000 - RNA, 22 nt, Human
aggccaggcuccuuccugucuu

SEQ ID NO: 2196001 - RNA, 17 nt, Human
aggccaggcuccuuccu

SEQ ID NO: 2196002 - RNA, 12 nt, Human
aggccaggcucc

SEQ ID NO: 2196003 - RNA, 15 nt, Human
aggccagggcagagu

SEQ ID NO: 2196004 - RNA, 13 nt, Human
aggccagggcaga

SEQ ID NO: 2196005 - RNA, 11 nt, Human
aggccaggcuc

SEQ ID NO: 2196006 - RNA, 18 nt, Human
aggcauugcacagggaga

SEQ ID NO: 2196007 - RNA, 12 nt, Human
aggccaggccgg

SEQ ID NO: 2196008 - RNA, 23 nt, Human
aggccagggggccagucccugag

SEQ ID NO: 2196009 - RNA, 19 nt, Human
aggccagggggccaguccc

SEQ ID NO: 2196010 - RNA, 23 nt, Human
aggccaugggcacuguggguaga

SEQ ID NO: 2196011 - RNA, 13 nt, Human
aggccagcugcuu

SEQ ID NO: 2196012 - RNA, 14 nt, Human
aggccagcugcuug

SEQ ID NO: 2196013 - RNA, 16 nt, Human
aggccagcugcuuggg

SEQ ID NO: 2196014 - RNA, 16 nt, Human
aggccaggcccucugc

SEQ ID NO: 2196015 - RNA, 17 nt, Human
aggccaggcccucugcc

SEQ ID NO: 2196016 - RNA, 18 nt, Human
aggccaggcccucugccc

SEQ ID NO: 2196017 - RNA, 19 nt, Human
aggccaggcccucugccca

SEQ ID NO: 2196018 - RNA, 23 nt, Human
aggccaggcccucugcccacucc

SEQ ID NO: 2196019 - RNA, 11 nt, Human
aggcagaucca

SEQ ID NO: 2196020 - RNA, 16 nt, Human
aggcagauccaggacu

SEQ ID NO: 2196021 - RNA, 15 nt, Human
aggcagauccaggac

SEQ ID NO: 2196022 - RNA, 14 nt, Human
aggcagccaggcca

SEQ ID NO: 2196023 - RNA, 15 nt, Human
aggcagccaggccac

SEQ ID NO: 2196024 - RNA, 16 nt, Human
aggcagccaggccaca

SEQ ID NO: 2196025 - RNA, 15 nt, Human
aggcagaagaauuga

SEQ ID NO: 2196026 - RNA, 21 nt, Human
aggcagaagaauugaacccag

SEQ ID NO: 2196027 - RNA, 22 nt, Human
aggcagaacucaucuagguaaa

SEQ ID NO: 2196028 - RNA, 13 nt, Human
aggcagauacagg

SEQ ID NO: 2196029 - RNA, 20 nt, Human
aggcagagguugcagugagc

SEQ ID NO: 2196030 - RNA, 22 nt, Human
aggcacuuuagggcuguaaaau

SEQ ID NO: 2196031 - RNA, 19 nt, Human
aggcagaaagcaaaauuau

SEQ ID NO: 2196032 - RNA, 16 nt, Human
aggcagaaagcaaaau

SEQ ID NO: 2196033 - RNA, 14 nt, Human
aggcagaaagcaaa

SEQ ID NO: 2196034 - RNA, 20 nt, Human
aggcacuuuagggcuguaaa

SEQ ID NO: 2196035 - RNA, 16 nt, Human
aggcagaaaauugcac

SEQ ID NO: 2196036 - RNA, 20 nt, Human
agaccuuugaggauaucaaa

SEQ ID NO: 2196037 - RNA, 22 nt, Human
agaccuuguucacacucucaca

SEQ ID NO: 2196038 - RNA, 12 nt, Human
agaccuuuucaa

SEQ ID NO: 2196039 - RNA, 17 nt, Human
agaccuuuucaacuugg

SEQ ID NO: 2196040 - RNA, 18 nt, Human
agacgaaacauuuguucu

SEQ ID NO: 2196041 - RNA, 16 nt, Human
agaccaugcagagcgc

SEQ ID NO: 2196042 - RNA, 17 nt, Human
agaccaugcagagcgcc

SEQ ID NO: 2196043 - RNA, 14 nt, Human
agaccacguuucua

SEQ ID NO: 2196044 - RNA, 23 nt, Human
agaccaucccugaaggccccgcc

SEQ ID NO: 2196045 - RNA, 13 nt, Human
agacagcccucca

SEQ ID NO: 2196046 - RNA, 11 nt, Human
agacagccugu

SEQ ID NO: 2196047 - RNA, 20 nt, Human
agacagccuguaucuugggg

SEQ ID NO: 2196048 - RNA, 14 nt, Human
agaccaccccgccu

SEQ ID NO: 2196049 - RNA, 19 nt, Human
agaccacgcccguccugcc

SEQ ID NO: 2196050 - RNA, 16 nt, Human
agaccaccccgccugc

SEQ ID NO: 2196051 - RNA, 20 nt, Human
agaccacgcccguccugccu

SEQ ID NO: 2196052 - RNA, 21 nt, Human
agaccacgcccguccugccug

SEQ ID NO: 2196053 - RNA, 23 nt, Human
agaccacgcccguccugccugug

SEQ ID NO: 2196054 - RNA, 24 nt, Human
agaccacgcccguccugccugugg

SEQ ID NO: 2196055 - RNA, 21 nt, Human
agacagcccgggcucugccuc

SEQ ID NO: 2196056 - RNA, 14 nt, Human
agacaauuuauuau

SEQ ID NO: 2196057 - RNA, 22 nt, Human
agacagcccgggcucugccucc

SEQ ID NO: 2196058 - RNA, 23 nt, Human
agacagcccgggcucugccuccc

SEQ ID NO: 2196059 - RNA, 17 nt, Human
agacuauauuguacaca

SEQ ID NO: 2196060 - RNA, 15 nt, Human
agacuaucagcccaa

SEQ ID NO: 2196061 - RNA, 22 nt, Human
agacuaguuuuuauuccuugug

SEQ ID NO: 2196062 - RNA, 19 nt, Human
agacuagauugccuuuguu

SEQ ID NO: 2196063 - RNA, 16 nt, Human
agacuagauugccuuu

SEQ ID NO: 2196064 - RNA, 20 nt, Human
agacgcugugcugcccugcc

SEQ ID NO: 2196065 - RNA, 22 nt, Human
agacuagaauucuagugcugcu

SEQ ID NO: 2196066 - RNA, 23 nt, Human
agacuagaauucuagugcugcug

SEQ ID NO: 2196067 - RNA, 17 nt, Human
agacgcugugcugcccu

SEQ ID NO: 2196068 - RNA, 21 nt, Human
agacgacaaggaaaggcaaau

SEQ ID NO: 2196069 - RNA, 15 nt, Human
agacgagaggacgag

SEQ ID NO: 2196070 - RNA, 13 nt, Human
agacgaggcccuc

SEQ ID NO: 2196071 - RNA, 17 nt, Human
agacgaggcccucgggc

SEQ ID NO: 2196072 - RNA, 20 nt, Human
agacgaggcccucgggccca

SEQ ID NO: 2196073 - RNA, 22 nt, Human
agacgaggcccucgggcccagc

SEQ ID NO: 2196074 - RNA, 23 nt, Human
agacgaggcccucgggcccagcc

SEQ ID NO: 2196075 - RNA, 18 nt, Human
agacgcugugcugcccug

SEQ ID NO: 2196076 - RNA, 19 nt, Human
agacgcugugcugcccugc

SEQ ID NO: 2196077 - RNA, 13 nt, Human
agacaauucuuua

SEQ ID NO: 2196078 - RNA, 22 nt, Human
agacaauucuuuauacaacagu

SEQ ID NO: 2196079 - RNA, 14 nt, Human
agacaauucuuuau

SEQ ID NO: 2196080 - RNA, 18 nt, Human
agacaauucuuuauacaa

SEQ ID NO: 2196081 - RNA, 20 nt, Human
agacaaugugaaaagaaaaa

SEQ ID NO: 2196082 - RNA, 23 nt, Human
agacaaugacuuacuguacauga

SEQ ID NO: 2196083 - RNA, 16 nt, Human
agacaagguagcccug

SEQ ID NO: 2196084 - RNA, 13 nt, Human
agacaagcugcaa

SEQ ID NO: 2196085 - RNA, 17 nt, Human
agacaagccuggccuac

SEQ ID NO: 2196086 - RNA, 22 nt, Human
agacaaaaacagccucacagaa

SEQ ID NO: 2196087 - RNA, 17 nt, Human
agacaaaaacagccuca

SEQ ID NO: 2196088 - RNA, 14 nt, Human
agacaagcaacagg

SEQ ID NO: 2196089 - RNA, 19 nt, Human
agacaaggaaaaaauaaca

SEQ ID NO: 2196090 - RNA, 21 nt, Human
agaauuuucagaccccagcgg

SEQ ID NO: 2196091 - RNA, 20 nt, Human
agaauuuucagaccccagcg

SEQ ID NO: 2196092 - RNA, 15 nt, Human
agaauuuugagcagg

SEQ ID NO: 2196093 - RNA, 16 nt, Human
agacaaaaacagccuc

SEQ ID NO: 2196094 - RNA, 14 nt, Human
agagaggcagagag

SEQ ID NO: 2196095 - RNA, 15 nt, Human
agagaggcagagagc

SEQ ID NO: 2196096 - RNA, 16 nt, Human
agagaggcagagagcg

SEQ ID NO: 2196097 - RNA, 13 nt, Human
agagaggcagaga

SEQ ID NO: 2196098 - RNA, 18 nt, Human
agagaggaguucaaugau

SEQ ID NO: 2196099 - RNA, 21 nt, Human
agagaggaguucaaugaucua

SEQ ID NO: 2196100 - RNA, 13 nt, Human
agagaggaguuca

SEQ ID NO: 2196101 - RNA, 14 nt, Human
agagaggaguucaa

SEQ ID NO: 2196102 - RNA, 15 nt, Human
agagaggaguucaau

SEQ ID NO: 2196103 - RNA, 17 nt, Human
agagaggaguucaauga

SEQ ID NO: 2196104 - RNA, 18 nt, Human
agagcccacgcccccacu

SEQ ID NO: 2196105 - RNA, 20 nt, Human
agagaggagucagagagaau

SEQ ID NO: 2196106 - RNA, 13 nt, Human
agagaggagucag

SEQ ID NO: 2196107 - RNA, 17 nt, Human
agagaggagaggagaga

SEQ ID NO: 2196108 - RNA, 14 nt, Human
agagagauguuuug

SEQ ID NO: 2196109 - RNA, 23 nt, Human
agagagcaagacgcugugcugcc

SEQ ID NO: 2196110 - RNA, 11 nt, Human
agagagcaaga

SEQ ID NO: 2196111 - RNA, 19 nt, Human
agagagcaagacgcugugc

SEQ ID NO: 2196112 - RNA, 14 nt, Human
agagcccagccauu

SEQ ID NO: 2196113 - RNA, 21 nt, Human
agagcccagcagggccucaaa

SEQ ID NO: 2196114 - RNA, 22 nt, Human
agagcccagagguaacagaaca

SEQ ID NO: 2196115 - RNA, 24 nt, Human
agagcccagagguaacagaacagc

SEQ ID NO: 2196116 - RNA, 14 nt, Human
agagcccagaggua

SEQ ID NO: 2196117 - RNA, 16 nt, Human
agagcccagagguaac

SEQ ID NO: 2196118 - RNA, 20 nt, Human
agagcccagagguaacagaa

SEQ ID NO: 2196119 - RNA, 17 nt, Human
agagcccacgcccccac

SEQ ID NO: 2196120 - RNA, 13 nt, Human
agagcccagcucc

SEQ ID NO: 2196121 - RNA, 12 nt, Human
agagcccagcuc

SEQ ID NO: 2196122 - RNA, 14 nt, Human
agagcccagcucca

SEQ ID NO: 2196123 - RNA, 11 nt, Human
agagccugagg

SEQ ID NO: 2196124 - RNA, 14 nt, Human
agagccugagggau

SEQ ID NO: 2196125 - RNA, 13 nt, Human
agagccugaggga

SEQ ID NO: 2196126 - RNA, 12 nt, Human
agagccugcugc

SEQ ID NO: 2196127 - RNA, 20 nt, Human
agagccugcucccccacccc

SEQ ID NO: 2196128 - RNA, 19 nt, Human
agagccugcucccccaccc

SEQ ID NO: 2196129 - RNA, 15 nt, Human
agagccugcugcaug

SEQ ID NO: 2196130 - RNA, 11 nt, Human
agagccugcug

SEQ ID NO: 2196131 - RNA, 18 nt, Human
agagccugcucccccacc

SEQ ID NO: 2196132 - RNA, 16 nt, Human
agagccugcuccccca

SEQ ID NO: 2196133 - RNA, 15 nt, Human
agagccugcuccccc

SEQ ID NO: 2196134 - RNA, 13 nt, Human
agagccugcuccc

SEQ ID NO: 2196135 - RNA, 15 nt, Human
agagccugccuggag

SEQ ID NO: 2196136 - RNA, 16 nt, Human
agagccugccuggagc

SEQ ID NO: 2196137 - RNA, 17 nt, Human
agagccugccuggagcg

SEQ ID NO: 2196138 - RNA, 17 nt, Human
agagccugcaggugcug

SEQ ID NO: 2196139 - RNA, 18 nt, Human
agagccugcaggugcugc

SEQ ID NO: 2196140 - RNA, 19 nt, Human
agagccugcaggugcugcu

SEQ ID NO: 2196141 - RNA, 21 nt, Human
agacugaccaauauuguacag

SEQ ID NO: 2196142 - RNA, 18 nt, Human
agagaaaauaaaaaguua

SEQ ID NO: 2196143 - RNA, 19 nt, Human
agagaaaauaaaaaguuaa

SEQ ID NO: 2196144 - RNA, 20 nt, Human
agagaaaauaaaaaguuaaa

SEQ ID NO: 2196145 - RNA, 12 nt, Human
agacugaccaau

SEQ ID NO: 2196146 - RNA, 18 nt, Human
agacugaacuuaccguga

SEQ ID NO: 2196147 - RNA, 23 nt, Human
agacucuuuuuguaccuggugac

SEQ ID NO: 2196148 - RNA, 17 nt, Human
agacugaacauguacac

SEQ ID NO: 2196149 - RNA, 22 nt, Human
agacucuuuuuguaccugguga

SEQ ID NO: 2196150 - RNA, 15 nt, Human
agacucuuugcauau

SEQ ID NO: 2196151 - RNA, 21 nt, Human
agacucuuuuuguaccuggug

SEQ ID NO: 2196152 - RNA, 15 nt, Human
agagaaagaaaauga

SEQ ID NO: 2196153 - RNA, 16 nt, Human
agagaaagaaaaugaa

SEQ ID NO: 2196154 - RNA, 18 nt, Human
agagaaagugauuucuag

SEQ ID NO: 2196155 - RNA, 19 nt, Human
agagaaagugauuucuaga

SEQ ID NO: 2196156 - RNA, 24 nt, Human
agagaaagugggugagaugcugga

SEQ ID NO: 2196157 - RNA, 14 nt, Human
agagaaagaagaga

SEQ ID NO: 2196158 - RNA, 18 nt, Human
agagaaacaauaaagaga

SEQ ID NO: 2196159 - RNA, 20 nt, Human
agagaaccucacgcaccucc

SEQ ID NO: 2196160 - RNA, 20 nt, Human
agagaaccgagcaaagauca

SEQ ID NO: 2196161 - RNA, 21 nt, Human
agagaaccgagcaaagaucaa

SEQ ID NO: 2196162 - RNA, 15 nt, Human
agagaaccgagcaaa

SEQ ID NO: 2196163 - RNA, 17 nt, Human
agagaaccgagcaaaga

SEQ ID NO: 2196164 - RNA, 23 nt, Human
agagaaccucacgcaccucccau

SEQ ID NO: 2196165 - RNA, 22 nt, Human
agagaaccucacgcaccuccca

SEQ ID NO: 2196166 - RNA, 18 nt, Human
agagaaguauacauaagu

SEQ ID NO: 2196167 - RNA, 16 nt, Human
agagaaguauuauaaa

SEQ ID NO: 2196168 - RNA, 14 nt, Human
agagaaauauggaa

SEQ ID NO: 2196169 - RNA, 14 nt, Human
agagaaauaugaag

SEQ ID NO: 2196170 - RNA, 22 nt, Human
agagaauauuagcuuuacuguu

SEQ ID NO: 2196171 - RNA, 12 nt, Human
agagaaucaaca

SEQ ID NO: 2196172 - RNA, 15 nt, Human
agagaaucaacauuu

SEQ ID NO: 2196173 - RNA, 13 nt, Human
agagaauauuuua

SEQ ID NO: 2196174 - RNA, 21 nt, Human
agagagaucaaauggaaagga

SEQ ID NO: 2196175 - RNA, 17 nt, Human
agagagaugggagcucc

SEQ ID NO: 2196176 - RNA, 18 nt, Human
agagagaugggagcuccu

SEQ ID NO: 2196177 - RNA, 19 nt, Human
agagagaugggagcuccuc

SEQ ID NO: 2196178 - RNA, 18 nt, Human
agagaagugccccugcug

SEQ ID NO: 2196179 - RNA, 17 nt, Human
agagaagugccccugcu

SEQ ID NO: 2196180 - RNA, 15 nt, Human
agagaagugccccug

SEQ ID NO: 2196181 - RNA, 14 nt, Human
agagaagugccccu

SEQ ID NO: 2196182 - RNA, 14 nt, Human
agagaagugacagg

SEQ ID NO: 2196183 - RNA, 15 nt, Human
agagaagugacaggg

SEQ ID NO: 2196184 - RNA, 17 nt, Human
agagaagugacagggaa

SEQ ID NO: 2196185 - RNA, 18 nt, Human
agagaagugacagggaag

SEQ ID NO: 2196186 - RNA, 20 nt, Human
agagaagugacagggaagcu

SEQ ID NO: 2196187 - RNA, 16 nt, Human
agacucuuuggacacu

SEQ ID NO: 2196188 - RNA, 11 nt, Human
agaacauagaa

SEQ ID NO: 2196189 - RNA, 14 nt, Human
agaacaucauuaga

SEQ ID NO: 2196190 - RNA, 21 nt, Human
agaacagugcuugccacagag

SEQ ID NO: 2196191 - RNA, 14 nt, Human
agaacaguaaacau

SEQ ID NO: 2196192 - RNA, 15 nt, Human
agaacaguuuguaca

SEQ ID NO: 2196193 - RNA, 17 nt, Human
agaacaguuuguacaga

SEQ ID NO: 2196194 - RNA, 13 nt, Human
agaacaguaaaca

SEQ ID NO: 2196195 - RNA, 22 nt, Human
agaacagugauuaccagggacu

SEQ ID NO: 2196196 - RNA, 23 nt, Human
agaacagccgcuccugucugcca

SEQ ID NO: 2196197 - RNA, 22 nt, Human
agaacagccgcuccugucugcc

SEQ ID NO: 2196198 - RNA, 18 nt, Human
agaacagcagagguucuu

SEQ ID NO: 2196199 - RNA, 12 nt, Human
agaacagcuuca

SEQ ID NO: 2196200 - RNA, 16 nt, Human
agaacaggcaagugaa

SEQ ID NO: 2196201 - RNA, 22 nt, Human
agaacagcuucagguuaucgaa

SEQ ID NO: 2196202 - RNA, 13 nt, Human
agaacagcuucag

SEQ ID NO: 2196203 - RNA, 14 nt, Human
agaacagcuucagg

SEQ ID NO: 2196204 - RNA, 16 nt, Human
agaacagcuucagguu

SEQ ID NO: 2196205 - RNA, 18 nt, Human
agaacagcuucagguuau

SEQ ID NO: 2196206 - RNA, 20 nt, Human
agaacagccgcuccugucug

SEQ ID NO: 2196207 - RNA, 19 nt, Human
agaacagccgcuccugucu

SEQ ID NO: 2196208 - RNA, 18 nt, Human
agaacagccgcuccuguc

SEQ ID NO: 2196209 - RNA, 13 nt, Human
agaacagcagagg

SEQ ID NO: 2196210 - RNA, 23 nt, Human
agaacagcaggguagucugguuu

SEQ ID NO: 2196211 - RNA, 17 nt, Human
agaacacugugaaaaca

SEQ ID NO: 2196212 - RNA, 19 nt, Human
agaacauggacuuguauau

SEQ ID NO: 2196213 - RNA, 18 nt, Human
agaacaucuguccuguga

SEQ ID NO: 2196214 - RNA, 16 nt, Human
agaacauggacuugua

SEQ ID NO: 2196215 - RNA, 13 nt, Human
agaacaugugaga

SEQ ID NO: 2196216 - RNA, 22 nt, Human
agaacaugugagagguuugacu

SEQ ID NO: 2196217 - RNA, 17 nt, Human
agaaccaaaaagaggcu

SEQ ID NO: 2196218 - RNA, 18 nt, Human
agaaccaaaaagaggcua

SEQ ID NO: 2196219 - RNA, 17 nt, Human
agaacaucccugccagc

SEQ ID NO: 2196220 - RNA, 16 nt, Human
agaacaucccugccag

SEQ ID NO: 2196221 - RNA, 18 nt, Human
agaacauccaaggagaaa

SEQ ID NO: 2196222 - RNA, 15 nt, Human
agaacauccaaggag

SEQ ID NO: 2196223 - RNA, 15 nt, Human
agaacaucauuagaa

SEQ ID NO: 2196224 - RNA, 16 nt, Human
agaacaucauuagaac

SEQ ID NO: 2196225 - RNA, 18 nt, Human
agaacaucauuagaacaa

SEQ ID NO: 2196226 - RNA, 20 nt, Human
agaacaucauuagaacaaag

SEQ ID NO: 2196227 - RNA, 19 nt, Human
agaacaucccugccagcuc

SEQ ID NO: 2196228 - RNA, 18 nt, Human
agaacaucccugccagcu

SEQ ID NO: 2196229 - RNA, 20 nt, Human
agaacaucuguauacccucu

SEQ ID NO: 2196230 - RNA, 14 nt, Human
agaacauggacuug

SEQ ID NO: 2196231 - RNA, 13 nt, Human
agaacaucccucc

SEQ ID NO: 2196232 - RNA, 17 nt, Human
agaacaucccuccuggg

SEQ ID NO: 2196233 - RNA, 14 nt, Human
agaacacugugaaa

SEQ ID NO: 2196234 - RNA, 19 nt, Human
agaacagauaaucagugug

SEQ ID NO: 2196235 - RNA, 21 nt, Human
agaacacagccgauucaccug

SEQ ID NO: 2196236 - RNA, 15 nt, Human
agaacacccucuaaa

SEQ ID NO: 2196237 - RNA, 14 nt, Human
agaacacgcuuuca

SEQ ID NO: 2196238 - RNA, 12 nt, Human
agaacacuaacc

SEQ ID NO: 2196239 - RNA, 13 nt, Human
agaacacuaaccu

SEQ ID NO: 2196240 - RNA, 14 nt, Human
agaacacuaaccug

SEQ ID NO: 2196241 - RNA, 17 nt, Human
agaacaauauugacuuu

SEQ ID NO: 2196242 - RNA, 19 nt, Human
agaacaauauugacuuugu

SEQ ID NO: 2196243 - RNA, 19 nt, Human
agaacaagguaguuuuuac

SEQ ID NO: 2196244 - RNA, 17 nt, Human
agaacaagguaguuuuu

SEQ ID NO: 2196245 - RNA, 17 nt, Human
agaacaaccaaaaucuu

SEQ ID NO: 2196246 - RNA, 20 nt, Human
agaacaaagugagacagucc

SEQ ID NO: 2196247 - RNA, 16 nt, Human
agaacacaaggucauu

SEQ ID NO: 2196248 - RNA, 19 nt, Human
agaacacagaaagccuauc

SEQ ID NO: 2196249 - RNA, 21 nt, Human
agaacacagaaagccuaucaa

SEQ ID NO: 2196250 - RNA, 20 nt, Human
agaacaauauugacuuuguc

SEQ ID NO: 2196251 - RNA, 21 nt, Human
agaacaauauugacuuugucu

SEQ ID NO: 2196252 - RNA, 15 nt, Human
agaacaaugugcuau

SEQ ID NO: 2196253 - RNA, 19 nt, Human
agaaucuacccaaaggaua

SEQ ID NO: 2196254 - RNA, 18 nt, Human
agaaucuauauuuaacaa

SEQ ID NO: 2196255 - RNA, 13 nt, Human
agaaucuggagag

SEQ ID NO: 2196256 - RNA, 16 nt, Human
agaaucuggagagcua

SEQ ID NO: 2196257 - RNA, 19 nt, Human
agaaucuguuucccagcag

SEQ ID NO: 2196258 - RNA, 15 nt, Human
agaaucuaaagccag

SEQ ID NO: 2196259 - RNA, 17 nt, Human
agaaucuacccaaagga

SEQ ID NO: 2196260 - RNA, 16 nt, Human
agaaucuaaagccagu

SEQ ID NO: 2196261 - RNA, 17 nt, Human
agaaucucaaauaacua

SEQ ID NO: 2196262 - RNA, 21 nt, Human
agaaucuuuauugagaaagag

SEQ ID NO: 2196263 - RNA, 24 nt, Human
agaaucuuuauugagaaagagcac

SEQ ID NO: 2196264 - RNA, 16 nt, Human
agaaugaaaacucauu

SEQ ID NO: 2196265 - RNA, 17 nt, Human
agaaugaaaauuguaug

SEQ ID NO: 2196266 - RNA, 12 nt, Human
agaaugaaagag

SEQ ID NO: 2196267 - RNA, 19 nt, Human
agaaugaaagaguaaagga

SEQ ID NO: 2196268 - RNA, 14 nt, Human
agaaucuuuagaga

SEQ ID NO: 2196269 - RNA, 23 nt, Human
agaaucuuuagagaaguauacau

SEQ ID NO: 2196270 - RNA, 16 nt, Human
agaaucuuuauugaga

SEQ ID NO: 2196271 - RNA, 17 nt, Human
agaaucuuuauugagaa

SEQ ID NO: 2196272 - RNA, 18 nt, Human
agaaucuuuauugagaaa

SEQ ID NO: 2196273 - RNA, 19 nt, Human
agaaucuuuauugagaaag

SEQ ID NO: 2196274 - RNA, 16 nt, Human
agaaugaggaggaagg

SEQ ID NO: 2196275 - RNA, 13 nt, Human
agaaugaggagga

SEQ ID NO: 2196276 - RNA, 12 nt, Human
agaaugagccuc

SEQ ID NO: 2196277 - RNA, 15 nt, Human
agaaugaaagcuccu

SEQ ID NO: 2196278 - RNA, 21 nt, Human
agaaugaaagaguaaaggaaa

SEQ ID NO: 2196279 - RNA, 16 nt, Human
agaaugaaagggccca

SEQ ID NO: 2196280 - RNA, 16 nt, Human
agaaugagggccaaga

SEQ ID NO: 2196281 - RNA, 17 nt, Human
agaaugaggaggaagga

SEQ ID NO: 2196282 - RNA, 23 nt, Human
agaaugcacaaacagaggccgcc

SEQ ID NO: 2196283 - RNA, 20 nt, Human
agaaugaggcugcuuuccaa

SEQ ID NO: 2196284 - RNA, 14 nt, Human
agaaugaggcugcu

SEQ ID NO: 2196285 - RNA, 13 nt, Human
agaaugaggcugc

SEQ ID NO: 2196286 - RNA, 12 nt, Human
agaaugaggcug

SEQ ID NO: 2196287 - RNA, 18 nt, Human
agaaugcucuuuacuuca

SEQ ID NO: 2196288 - RNA, 13 nt, Human
agaacauuuuaau

SEQ ID NO: 2196289 - RNA, 16 nt, Human
agaacauuuuaauuca

SEQ ID NO: 2196290 - RNA, 18 nt, Human
agaaccaaaaguuuuccu

SEQ ID NO: 2196291 - RNA, 20 nt, Human
agaaccaaaaguuuuccuga

SEQ ID NO: 2196292 - RNA, 21 nt, Human
agaaccaaaaagaggcuaugu

SEQ ID NO: 2196293 - RNA, 17 nt, Human
agaaccaggcaacuugg

SEQ ID NO: 2196294 - RNA, 16 nt, Human
agaaccaagaagggcu

SEQ ID NO: 2196295 - RNA, 18 nt, Human
agaaccaaaucuggaagc

SEQ ID NO: 2196296 - RNA, 13 nt, Human
agaaccaaaucug

SEQ ID NO: 2196297 - RNA, 16 nt, Human
agaaccaaaucuggaa

SEQ ID NO: 2196298 - RNA, 13 nt, Human
agaaccacuauga

SEQ ID NO: 2196299 - RNA, 20 nt, Human
agaaccaggcaacuugggaa

SEQ ID NO: 2196300 - RNA, 20 nt, Human
agaaccaguccccccacccu

SEQ ID NO: 2196301 - RNA, 19 nt, Human
agaaccaguccccccaccc

SEQ ID NO: 2196302 - RNA, 16 nt, Human
agaaccagucccccca

SEQ ID NO: 2196303 - RNA, 22 nt, Human
agaaccaucccuauuuuguauu

SEQ ID NO: 2196304 - RNA, 18 nt, Human
agaaccaguuucaggugu

SEQ ID NO: 2196305 - RNA, 21 nt, Human
agaagacugcauuauauuuau

SEQ ID NO: 2196306 - RNA, 22 nt, Human
agaagagaauauuagcuuuacu

SEQ ID NO: 2196307 - RNA, 13 nt, Human
agaagagcuguuc

SEQ ID NO: 2196308 - RNA, 15 nt, Human
agaagagaaugcaca

SEQ ID NO: 2196309 - RNA, 23 nt, Human
agaagagaaugcacaaacagagg

SEQ ID NO: 2196310 - RNA, 20 nt, Human
agaagagccggagccuccag

SEQ ID NO: 2196311 - RNA, 22 nt, Human
agaagauauuagucuuggggca

SEQ ID NO: 2196312 - RNA, 19 nt, Human
agaagaucacgcuccccgc

SEQ ID NO: 2196313 - RNA, 23 nt, Human
agaagaucacgcuccccgccugu

SEQ ID NO: 2196314 - RNA, 13 nt, Human
agaagauccccuc

SEQ ID NO: 2196315 - RNA, 14 nt, Human
agaagauccccuca

SEQ ID NO: 2196316 - RNA, 17 nt, Human
agaagauccuaaaacaa

SEQ ID NO: 2196317 - RNA, 18 nt, Human
agaagauccuaaaacaaa

SEQ ID NO: 2196318 - RNA, 16 nt, Human
agaagauccuacccca

SEQ ID NO: 2196319 - RNA, 20 nt, Human
agaagagcuguucacagcca

SEQ ID NO: 2196320 - RNA, 16 nt, Human
agaagggagaagaaag

SEQ ID NO: 2196321 - RNA, 13 nt, Human
agaagggagaagg

SEQ ID NO: 2196322 - RNA, 17 nt, Human
agaagaugaucagaccu

SEQ ID NO: 2196323 - RNA, 15 nt, Human
agaagggagaagaaa

SEQ ID NO: 2196324 - RNA, 14 nt, Human
agaagggagaagga

SEQ ID NO: 2196325 - RNA, 11 nt, Human
agaagggaggc

SEQ ID NO: 2196326 - RNA, 18 nt, Human
agaagaugaaugagcaaa

SEQ ID NO: 2196327 - RNA, 13 nt, Human
agaagaugaauac

SEQ ID NO: 2196328 - RNA, 16 nt, Human
agaagaugaucagacc

SEQ ID NO: 2196329 - RNA, 14 nt, Human
agaagaugaauaca

SEQ ID NO: 2196330 - RNA, 19 nt, Human
agaagaugaauacaaacaa

SEQ ID NO: 2196331 - RNA, 14 nt, Human
agaagggagaagaa

SEQ ID NO: 2196332 - RNA, 20 nt, Human
agaagggccaguccugccug

SEQ ID NO: 2196333 - RNA, 19 nt, Human
agaagggccaguccugccu

SEQ ID NO: 2196334 - RNA, 21 nt, Human
agaagggauggauuccaaccc

SEQ ID NO: 2196335 - RNA, 21 nt, Human
agaagggcuagaaccuggagg

SEQ ID NO: 2196336 - RNA, 13 nt, Human
agaagggcuagaa

SEQ ID NO: 2196337 - RNA, 14 nt, Human
agaagggcuagaac

SEQ ID NO: 2196338 - RNA, 21 nt, Human
agaagggcuagaaccuggaga

SEQ ID NO: 2196339 - RNA, 23 nt, Human
agaagggcuagaaccuggagagc

SEQ ID NO: 2196340 - RNA, 17 nt, Human
agaagucaaaguaaaac

SEQ ID NO: 2196341 - RNA, 19 nt, Human
agaagucuuagauguauau

SEQ ID NO: 2196342 - RNA, 17 nt, Human
agaagucuuagauguau

SEQ ID NO: 2196343 - RNA, 15 nt, Human
agaagucuuagacuu

SEQ ID NO: 2196344 - RNA, 21 nt, Human
agaauccuaggcuccacccca

SEQ ID NO: 2196345 - RNA, 20 nt, Human
agaauccuggcccucugugu

SEQ ID NO: 2196346 - RNA, 22 nt, Human
agaauccuggcccucuguguug

SEQ ID NO: 2196347 - RNA, 14 nt, Human
agaagucacacagu

SEQ ID NO: 2196348 - RNA, 20 nt, Human
agaagucaugaagcccaagu

SEQ ID NO: 2196349 - RNA, 13 nt, Human
agcccacccuccu

SEQ ID NO: 2196350 - RNA, 14 nt, Human
agcccacccuccug

SEQ ID NO: 2196351 - RNA, 15 nt, Human
agcccacccuccugu

SEQ ID NO: 2196352 - RNA, 13 nt, Human
agcccaaagaagg

SEQ ID NO: 2196353 - RNA, 23 nt, Human
agcccaccccucaacaccucugc

SEQ ID NO: 2196354 - RNA, 13 nt, Human
agcccaccuuggc

SEQ ID NO: 2196355 - RNA, 16 nt, Human
agcccacccuccuguc

SEQ ID NO: 2196356 - RNA, 17 nt, Human
agcccacccuccugucu

SEQ ID NO: 2196357 - RNA, 18 nt, Human
agcccacccuccugucuu

SEQ ID NO: 2196358 - RNA, 19 nt, Human
agcccacccuccugucuuc

SEQ ID NO: 2196359 - RNA, 23 nt, Human
agcccacccuccugucuucccag

SEQ ID NO: 2196360 - RNA, 21 nt, Human
agcccacccuccugucuuccc

SEQ ID NO: 2196361 - RNA, 17 nt, Human
agcccacgcccccacug

SEQ ID NO: 2196362 - RNA, 18 nt, Human
agcccacgcccccacugg

SEQ ID NO: 2196363 - RNA, 19 nt, Human
agcccacgcccccacuggu

SEQ ID NO: 2196364 - RNA, 23 nt, Human
agccaaggugggcugagcccugg

SEQ ID NO: 2196365 - RNA, 22 nt, Human
agccaaggugggcugagcccug

SEQ ID NO: 2196366 - RNA, 23 nt, Human
agccagcaggcucucaggccagc

SEQ ID NO: 2196367 - RNA, 22 nt, Human
agccagcaggcucucaggccag

SEQ ID NO: 2196368 - RNA, 21 nt, Human
agccagcaggcucucaggcca

SEQ ID NO: 2196369 - RNA, 22 nt, Human
agcccaaaccaccagaagccca

SEQ ID NO: 2196370 - RNA, 20 nt, Human
agcccaaaccaccagaagcc

SEQ ID NO: 2196371 - RNA, 19 nt, Human
agcccaaaccaccagaagc

SEQ ID NO: 2196372 - RNA, 17 nt, Human
agcccaaaccaccagaa

SEQ ID NO: 2196373 - RNA, 17 nt, Human
agccauuuugugaaugg

SEQ ID NO: 2196374 - RNA, 19 nt, Human
agccauuuugugaauggau

SEQ ID NO: 2196375 - RNA, 20 nt, Human
agccauuuuggggggccccc

SEQ ID NO: 2196376 - RNA, 14 nt, Human
agccauuuugugaa

SEQ ID NO: 2196377 - RNA, 15 nt, Human
agccauuuugugaau

SEQ ID NO: 2196378 - RNA, 16 nt, Human
agccauuuugugaaug

SEQ ID NO: 2196379 - RNA, 22 nt, Human
agccaagguuuuauaaggcuga

SEQ ID NO: 2196380 - RNA, 17 nt, Human
agccauuuguuggggca

SEQ ID NO: 2196381 - RNA, 18 nt, Human
agccauuuguuggggcag

SEQ ID NO: 2196382 - RNA, 22 nt, Human
agccauuuguuggggcaguggu

SEQ ID NO: 2196383 - RNA, 20 nt, Human
agccaaggugggcugagccc

SEQ ID NO: 2196384 - RNA, 19 nt, Human
agccaaggugggcugagcc

SEQ ID NO: 2196385 - RNA, 22 nt, Human
agccaaggguucagagacucag

SEQ ID NO: 2196386 - RNA, 15 nt, Human
agccaagggccucuu

SEQ ID NO: 2196387 - RNA, 18 nt, Human
agccaaggguucagagac

SEQ ID NO: 2196388 - RNA, 15 nt, Human
agccaagaggcugca

SEQ ID NO: 2196389 - RNA, 16 nt, Human
agccaagggaaccugu

SEQ ID NO: 2196390 - RNA, 14 nt, Human
agccaagaggcugc

SEQ ID NO: 2196391 - RNA, 17 nt, Human
agccaagggaaccugug

SEQ ID NO: 2196392 - RNA, 19 nt, Human
agccaagggaaccuguguc

SEQ ID NO: 2196393 - RNA, 20 nt, Human
agccaagggaaccugugucc

SEQ ID NO: 2196394 - RNA, 21 nt, Human
agccaagggaaccuguguccg

SEQ ID NO: 2196395 - RNA, 14 nt, Human
agccagauuucacu

SEQ ID NO: 2196396 - RNA, 17 nt, Human
agccagauuucacucuc

SEQ ID NO: 2196397 - RNA, 20 nt, Human
agccagauuucacucuccuu

SEQ ID NO: 2196398 - RNA, 22 nt, Human
agccagauuucacucuccuugg

SEQ ID NO: 2196399 - RNA, 17 nt, Human
agcaucucuugaggcca

SEQ ID NO: 2196400 - RNA, 22 nt, Human
agcaucucccucacugaaacca

SEQ ID NO: 2196401 - RNA, 20 nt, Human
agcaucucccucacugaaac

SEQ ID NO: 2196402 - RNA, 13 nt, Human
agcaucucccagu

SEQ ID NO: 2196403 - RNA, 22 nt, Human
agcaucucuugaggccaggagu

SEQ ID NO: 2196404 - RNA, 19 nt, Human
agcaucucuugaggccagg

SEQ ID NO: 2196405 - RNA, 13 nt, Human
agcaucugcuaau

SEQ ID NO: 2196406 - RNA, 15 nt, Human
agccaacuuuugcau

SEQ ID NO: 2196407 - RNA, 20 nt, Human
agccaacuuguaaauacacc

SEQ ID NO: 2196408 - RNA, 20 nt, Human
agccaacuuggcuuucccgg

SEQ ID NO: 2196409 - RNA, 15 nt, Human
agccaacuuguaaau

SEQ ID NO: 2196410 - RNA, 18 nt, Human
agccaacuuguaaauaca

SEQ ID NO: 2196411 - RNA, 19 nt, Human
agccaacuuguaaauacac

SEQ ID NO: 2196412 - RNA, 12 nt, Human
agccaacuccau

SEQ ID NO: 2196413 - RNA, 13 nt, Human
agccaacugcugc

SEQ ID NO: 2196414 - RNA, 14 nt, Human
agccaacugcugcu

SEQ ID NO: 2196415 - RNA, 21 nt, Human
agccaacugcugcuuuuugag

SEQ ID NO: 2196416 - RNA, 14 nt, Human
agccaacuuggcuu

SEQ ID NO: 2196417 - RNA, 19 nt, Human
agccaacuuggcuuucccg

SEQ ID NO: 2196418 - RNA, 21 nt, Human
agccaacgacaaagccaaacu

SEQ ID NO: 2196419 - RNA, 17 nt, Human
agccaacuauggccugu

SEQ ID NO: 2196420 - RNA, 13 nt, Human
agcaucggaggga

SEQ ID NO: 2196421 - RNA, 14 nt, Human
agcaucucaugagu

SEQ ID NO: 2196422 - RNA, 20 nt, Human
agcaucucagccuaccauga

SEQ ID NO: 2196423 - RNA, 15 nt, Human
agcaucuaucucauc

SEQ ID NO: 2196424 - RNA, 16 nt, Human
agcaucuaugugagac

SEQ ID NO: 2196425 - RNA, 19 nt, Human
agcacagagagggggccac

SEQ ID NO: 2196426 - RNA, 20 nt, Human
agcacagagagggggccacc

SEQ ID NO: 2196427 - RNA, 21 nt, Human
agcacagagagggggccaccu

SEQ ID NO: 2196428 - RNA, 23 nt, Human
agcacagagagggggccaccucc

SEQ ID NO: 2196429 - RNA, 17 nt, Human
agcacagagaagacaaa

SEQ ID NO: 2196430 - RNA, 20 nt, Human
agcacuaaggugugcucuga

SEQ ID NO: 2196431 - RNA, 17 nt, Human
agcacuacucugugcca

SEQ ID NO: 2196432 - RNA, 12 nt, Human
agcacagagagg

SEQ ID NO: 2196433 - RNA, 14 nt, Human
agcaauuuucgaac

SEQ ID NO: 2196434 - RNA, 15 nt, Human
agcacagagaagaca

SEQ ID NO: 2196435 - RNA, 21 nt, Human
agcacagacccugcccugugg

SEQ ID NO: 2196436 - RNA, 22 nt, Human
agcaauuucgccguugaagagg

SEQ ID NO: 2196437 - RNA, 21 nt, Human
agcaauuucgccguugaagag

SEQ ID NO: 2196438 - RNA, 24 nt, Human
agcaauuuaauauuuugcacaguu

SEQ ID NO: 2196439 - RNA, 12 nt, Human
agcaauuuuccu

SEQ ID NO: 2196440 - RNA, 13 nt, Human
agcaauuuuccuu

SEQ ID NO: 2196441 - RNA, 14 nt, Human
agcaauuuuccuug

SEQ ID NO: 2196442 - RNA, 15 nt, Human
agcaauuuuccuuga

SEQ ID NO: 2196443 - RNA, 16 nt, Human
agcaauuuuccuugaa

SEQ ID NO: 2196444 - RNA, 17 nt, Human
agcaauuuuccuugaag

SEQ ID NO: 2196445 - RNA, 18 nt, Human
agcaauuuuccuugaagc

SEQ ID NO: 2196446 - RNA, 19 nt, Human
agcaauuuuccuugaagcc

SEQ ID NO: 2196447 - RNA, 20 nt, Human
agcaauuuuccuugaagccg

SEQ ID NO: 2196448 - RNA, 21 nt, Human
agcaauuuuccuugaagccga

SEQ ID NO: 2196449 - RNA, 23 nt, Human
agcaauuuaauauuuugcacagu

SEQ ID NO: 2196450 - RNA, 20 nt, Human
agcaauuuauacaauaucau

SEQ ID NO: 2196451 - RNA, 20 nt, Human
agcaauucuccugccucagc

SEQ ID NO: 2196452 - RNA, 19 nt, Human
agcaauucuccugccucag

SEQ ID NO: 2196453 - RNA, 18 nt, Human
agcaauucuccugccuca

SEQ ID NO: 2196454 - RNA, 17 nt, Human
agcaauucuccugccuc

SEQ ID NO: 2196455 - RNA, 15 nt, Human
agcaauucuccugcc

SEQ ID NO: 2196456 - RNA, 15 nt, Human
agcaauuccaaccuu

SEQ ID NO: 2196457 - RNA, 23 nt, Human
agcagugccuuccauaauuauga

SEQ ID NO: 2196458 - RNA, 21 nt, Human
agcagcucaggcacacuucuu

SEQ ID NO: 2196459 - RNA, 20 nt, Human
agcagcucaaaggcacagug

SEQ ID NO: 2196460 - RNA, 17 nt, Human
agcagugcaugcugucc

SEQ ID NO: 2196461 - RNA, 15 nt, Human
agcaguggacaccag

SEQ ID NO: 2196462 - RNA, 12 nt, Human
agcaguggacac

SEQ ID NO: 2196463 - RNA, 13 nt, Human
agcagugcaggca

SEQ ID NO: 2196464 - RNA, 15 nt, Human
agcagugcaggcaca

SEQ ID NO: 2196465 - RNA, 14 nt, Human
agcagugcuucuca

SEQ ID NO: 2196466 - RNA, 19 nt, Human
agcaguggacaccaggagu

SEQ ID NO: 2196467 - RNA, 14 nt, Human
agcagugggccugg

SEQ ID NO: 2196468 - RNA, 22 nt, Human
agcaguggcugguccagggcua

SEQ ID NO: 2196469 - RNA, 11 nt, Human
agcaguggcug

SEQ ID NO: 2196470 - RNA, 12 nt, Human
agcaguggcugg

SEQ ID NO: 2196471 - RNA, 13 nt, Human
agcaguggcuggu

SEQ ID NO: 2196472 - RNA, 16 nt, Human
agcaguggcuggucca

SEQ ID NO: 2196473 - RNA, 17 nt, Human
agcaguggcugguccag

SEQ ID NO: 2196474 - RNA, 18 nt, Human
agcaguggcugguccagg

SEQ ID NO: 2196475 - RNA, 19 nt, Human
agcaguggcugguccaggg

SEQ ID NO: 2196476 - RNA, 21 nt, Human
agcaguggcugguccagggcu

SEQ ID NO: 2196477 - RNA, 14 nt, Human
agcagccuguggca

SEQ ID NO: 2196478 - RNA, 13 nt, Human
agcagccuguggc

SEQ ID NO: 2196479 - RNA, 18 nt, Human
agcagcguuucuaugaca

SEQ ID NO: 2196480 - RNA, 19 nt, Human
agcagcguuucuaugacac

SEQ ID NO: 2196481 - RNA, 20 nt, Human
agcagccuggacccugugga

SEQ ID NO: 2196482 - RNA, 23 nt, Human
agcagccugagcaacucuugauu

SEQ ID NO: 2196483 - RNA, 14 nt, Human
agcagcucaggcac

SEQ ID NO: 2196484 - RNA, 13 nt, Human
agcagcucaggca

SEQ ID NO: 2196485 - RNA, 12 nt, Human
agcagcucaggc

SEQ ID NO: 2196486 - RNA, 19 nt, Human
agcagcucaaaggcacagu

SEQ ID NO: 2196487 - RNA, 16 nt, Human
agcagcucaaaggcac

SEQ ID NO: 2196488 - RNA, 15 nt, Human
agcagcucaaaggca

SEQ ID NO: 2196489 - RNA, 19 nt, Human
agcagcuaucucucaguga

SEQ ID NO: 2196490 - RNA, 17 nt, Human
agcagcuaucucucagu

SEQ ID NO: 2196491 - RNA, 11 nt, Human
agcagcuacca

SEQ ID NO: 2196492 - RNA, 18 nt, Human
agcagccuuuaaugcauc

SEQ ID NO: 2196493 - RNA, 16 nt, Human
agcagccuuuaaugca

SEQ ID NO: 2196494 - RNA, 13 nt, Human
agcagugcaugcu

SEQ ID NO: 2196495 - RNA, 16 nt, Human
agcagugcaugcuguc

SEQ ID NO: 2196496 - RNA, 21 nt, Human
agcacuccucgguacucccau

SEQ ID NO: 2196497 - RNA, 13 nt, Human
agcacucccaagu

SEQ ID NO: 2196498 - RNA, 14 nt, Human
agcacucccaaguc

SEQ ID NO: 2196499 - RNA, 19 nt, Human
agcacucccaagucuacag

SEQ ID NO: 2196500 - RNA, 20 nt, Human
agcacucccaagucuacaga

SEQ ID NO: 2196501 - RNA, 17 nt, Human
agcacugacuucuaagu

SEQ ID NO: 2196502 - RNA, 14 nt, Human
agcacucacacagg

SEQ ID NO: 2196503 - RNA, 14 nt, Human
agcacuauacagau

SEQ ID NO: 2196504 - RNA, 16 nt, Human
agcacucacacaggac

SEQ ID NO: 2196505 - RNA, 16 nt, Human
agcacuacauaaacug

SEQ ID NO: 2196506 - RNA, 17 nt, Human
agcacuacauaaacuga

SEQ ID NO: 2196507 - RNA, 21 nt, Human
agcacuacauaaacugacuuu

SEQ ID NO: 2196508 - RNA, 16 nt, Human
agcacugagcaaagca

SEQ ID NO: 2196509 - RNA, 10 nt, Human
agcacugagg

SEQ ID NO: 2196510 - RNA, 11 nt, Human
agcacugagga

SEQ ID NO: 2196511 - RNA, 14 nt, Human
agcacugaggaaga

SEQ ID NO: 2196512 - RNA, 19 nt, Human
agcacugacuucuaaguaa

SEQ ID NO: 2196513 - RNA, 16 nt, Human
agcagccuggacccug

SEQ ID NO: 2196514 - RNA, 21 nt, Human
agcacugaggaagaacggggc

SEQ ID NO: 2196515 - RNA, 13 nt, Human
agcacugauuuca

SEQ ID NO: 2196516 - RNA, 17 nt, Human
agcacugauuucacaac

SEQ ID NO: 2196517 - RNA, 18 nt, Human
agcacugauuucacaaca

SEQ ID NO: 2196518 - RNA, 18 nt, Human
agaucucugcuuuggaaa

SEQ ID NO: 2196519 - RNA, 23 nt, Human
agaucucugcuuuggaaaucaca

SEQ ID NO: 2196520 - RNA, 21 nt, Human
agaucugacaugauuccuucc

SEQ ID NO: 2196521 - RNA, 21 nt, Human
agaucugcagggggugugucu

SEQ ID NO: 2196522 - RNA, 17 nt, Human
agaugggucuggcugag

SEQ ID NO: 2196523 - RNA, 19 nt, Human
agaugggucuggcugagcu

SEQ ID NO: 2196524 - RNA, 21 nt, Human
agaugggucuggcugagcuga

SEQ ID NO: 2196525 - RNA, 22 nt, Human
agaugggucuggcugagcugaa

SEQ ID NO: 2196526 - RNA, 20 nt, Human
agaugggugcuuggaggaag

SEQ ID NO: 2196527 - RNA, 22 nt, Human
agaugggugcuuggaggaagga

SEQ ID NO: 2196528 - RNA, 23 nt, Human
agaugggucuggcugagcugaac

SEQ ID NO: 2196529 - RNA, 19 nt, Human
agauucuacauauucuuua

SEQ ID NO: 2196530 - RNA, 12 nt, Human
agauucuuuccc

SEQ ID NO: 2196531 - RNA, 14 nt, Human
agauucuuuccuga

SEQ ID NO: 2196532 - RNA, 21 nt, Human
agauggcugugccucugccug

SEQ ID NO: 2196533 - RNA, 22 nt, Human
agauggcugugccucugccugu

SEQ ID NO: 2196534 - RNA, 16 nt, Human
agauggggucuguaaa

SEQ ID NO: 2196535 - RNA, 18 nt, Human
agauggggucuguaaaau

SEQ ID NO: 2196536 - RNA, 19 nt, Human
agauggggucuguaaaauc

SEQ ID NO: 2196537 - RNA, 17 nt, Human
agauggcugugccucug

SEQ ID NO: 2196538 - RNA, 18 nt, Human
agauggcugugccucugc

SEQ ID NO: 2196539 - RNA, 19 nt, Human
agauggcugugccucugcc

SEQ ID NO: 2196540 - RNA, 20 nt, Human
agauggcugugccucugccu

SEQ ID NO: 2196541 - RNA, 11 nt, Human
agaugacaaaa

SEQ ID NO: 2196542 - RNA, 15 nt, Human
agaugacauugcuaa

SEQ ID NO: 2196543 - RNA, 21 nt, Human
agaugacauugcuaagaugcu

SEQ ID NO: 2196544 - RNA, 22 nt, Human
agaugacauugcuaagaugcuc

SEQ ID NO: 2196545 - RNA, 18 nt, Human
agaugacaucugucuagg

SEQ ID NO: 2196546 - RNA, 16 nt, Human
agaugaaugccgugga

SEQ ID NO: 2196547 - RNA, 23 nt, Human
agaucugacaugauuccuuccug

SEQ ID NO: 2196548 - RNA, 13 nt, Human
agaugaaucaaug

SEQ ID NO: 2196549 - RNA, 18 nt, Human
agaugaaucaaugggaaa

SEQ ID NO: 2196550 - RNA, 13 nt, Human
agauugaggccug

SEQ ID NO: 2196551 - RNA, 19 nt, Human
agauugaggccugcccuca

SEQ ID NO: 2196552 - RNA, 22 nt, Human
agauugaggccugcccucaggg

SEQ ID NO: 2196553 - RNA, 16 nt, Human
agauugcaacaggcug

SEQ ID NO: 2196554 - RNA, 17 nt, Human
agauugagauguguuca

SEQ ID NO: 2196555 - RNA, 22 nt, Human
agauugagaaguuuuguacaga

SEQ ID NO: 2196556 - RNA, 19 nt, Human
agauugagagaagagacaa

SEQ ID NO: 2196557 - RNA, 18 nt, Human
agauugagagaagagaca

SEQ ID NO: 2196558 - RNA, 15 nt, Human
agauugagaaggaga

SEQ ID NO: 2196559 - RNA, 15 nt, Human
agauugacgacaagu

SEQ ID NO: 2196560 - RNA, 16 nt, Human
agauugagaaggagag

SEQ ID NO: 2196561 - RNA, 17 nt, Human
agauugagaaggagaga

SEQ ID NO: 2196562 - RNA, 18 nt, Human
agauugagaaggagagaa

SEQ ID NO: 2196563 - RNA, 19 nt, Human
agauugagaaggagagaaa

SEQ ID NO: 2196564 - RNA, 18 nt, Human
agauucuuuccugaggcu

SEQ ID NO: 2196565 - RNA, 17 nt, Human
agauugacgacaagugc

SEQ ID NO: 2196566 - RNA, 15 nt, Human
agauucuuuccugag

SEQ ID NO: 2196567 - RNA, 16 nt, Human
agauucuuuccugagg

SEQ ID NO: 2196568 - RNA, 16 nt, Human
agauugcaccacugca

SEQ ID NO: 2196569 - RNA, 17 nt, Human
agauugcaacaggcugg

SEQ ID NO: 2196570 - RNA, 19 nt, Human
agauugcaacaggcugggc

SEQ ID NO: 2196571 - RNA, 21 nt, Human
agauugcgccauugcacucca

SEQ ID NO: 2196572 - RNA, 22 nt, Human
agauugcaugugacucugaagc

SEQ ID NO: 2196573 - RNA, 13 nt, Human
agauugcugaaau

SEQ ID NO: 2196574 - RNA, 23 nt, Human
agauugcaugugacucugaagcu

SEQ ID NO: 2196575 - RNA, 19 nt, Human
agauugcaugugacucuga

SEQ ID NO: 2196576 - RNA, 18 nt, Human
agauugcaugugacucug

SEQ ID NO: 2196577 - RNA, 16 nt, Human
agauugcaugugacuc

SEQ ID NO: 2196578 - RNA, 15 nt, Human
agauugcaugugacu

SEQ ID NO: 2196579 - RNA, 13 nt, Human
agauugcauguga

SEQ ID NO: 2196580 - RNA, 15 nt, Human
agcaaaaucauuuua

SEQ ID NO: 2196581 - RNA, 14 nt, Human
agauugcugaaauu

SEQ ID NO: 2196582 - RNA, 14 nt, Human
agcaaaaucauuuu

SEQ ID NO: 2196583 - RNA, 13 nt, Human
agcaaaauugaug

SEQ ID NO: 2196584 - RNA, 19 nt, Human
agcaaaauugauguguuua

SEQ ID NO: 2196585 - RNA, 19 nt, Human
agcaaauuaauuggcagca

SEQ ID NO: 2196586 - RNA, 21 nt, Human
agcaaauuaauuggcagcaga

SEQ ID NO: 2196587 - RNA, 22 nt, Human
agcaaauuaauuggcagcagau

SEQ ID NO: 2196588 - RNA, 11 nt, Human
agcaaauugau

SEQ ID NO: 2196589 - RNA, 12 nt, Human
agcaaauuuggg

SEQ ID NO: 2196590 - RNA, 20 nt, Human
agcaaaucagaaacuuguga

SEQ ID NO: 2196591 - RNA, 16 nt, Human
agcaaaucagaaacuu

SEQ ID NO: 2196592 - RNA, 19 nt, Human
agcaaauucuguuuuucua

SEQ ID NO: 2196593 - RNA, 13 nt, Human
agcaaauguuucu

SEQ ID NO: 2196594 - RNA, 14 nt, Human
agcaaauguuucug

SEQ ID NO: 2196595 - RNA, 16 nt, Human
agcaaauguuucugca

SEQ ID NO: 2196596 - RNA, 17 nt, Human
agcaaauguuucugcag

SEQ ID NO: 2196597 - RNA, 18 nt, Human
agcaaauguuucugcagu

SEQ ID NO: 2196598 - RNA, 15 nt, Human
agcaaauuaauuggc

SEQ ID NO: 2196599 - RNA, 16 nt, Human
agcaaauuaauuggca

SEQ ID NO: 2196600 - RNA, 19 nt, Human
agcaaauaaacuaggaaau

SEQ ID NO: 2196601 - RNA, 22 nt, Human
agcaaagucuaaaguuuacagu

SEQ ID NO: 2196602 - RNA, 23 nt, Human
agcaaagucuaaaguuuacagua

SEQ ID NO: 2196603 - RNA, 11 nt, Human
agcaaauacau

SEQ ID NO: 2196604 - RNA, 19 nt, Human
agcaaagccccaugcugga

SEQ ID NO: 2196605 - RNA, 23 nt, Human
agcaaaggaguagaaagacagag

SEQ ID NO: 2196606 - RNA, 19 nt, Human
agcaaaggcugagaacacu

SEQ ID NO: 2196607 - RNA, 14 nt, Human
agcaaagucuaaag

SEQ ID NO: 2196608 - RNA, 15 nt, Human
agcaaagucuaaagu

SEQ ID NO: 2196609 - RNA, 20 nt, Human
agcaaagucuaaaguuuaca

SEQ ID NO: 2196610 - RNA, 22 nt, Human
agcaaagcaccagcuucuccag

SEQ ID NO: 2196611 - RNA, 15 nt, Human
agcaaagcaccagcu

SEQ ID NO: 2196612 - RNA, 20 nt, Human
agcaaagauaucucaucucu

SEQ ID NO: 2196613 - RNA, 22 nt, Human
agcaaagagugggcugcaucug

SEQ ID NO: 2196614 - RNA, 12 nt, Human
agcaaagaucaa

SEQ ID NO: 2196615 - RNA, 13 nt, Human
agcaaagaucaaa

SEQ ID NO: 2196616 - RNA, 14 nt, Human
agcaaagaucaaaa

SEQ ID NO: 2196617 - RNA, 15 nt, Human
agcaaagaucaaaau

SEQ ID NO: 2196618 - RNA, 17 nt, Human
agcaaagaucaaaauaa

SEQ ID NO: 2196619 - RNA, 12 nt, Human
agcaaagagugg

SEQ ID NO: 2196620 - RNA, 16 nt, Human
agcaaagagugggcug

SEQ ID NO: 2196621 - RNA, 13 nt, Human
agcaaacuuggaa

SEQ ID NO: 2196622 - RNA, 17 nt, Human
agcaaacucuuuuccca

SEQ ID NO: 2196623 - RNA, 13 nt, Human
agcaaacucuuuu

SEQ ID NO: 2196624 - RNA, 14 nt, Human
agcaaacucugcug

SEQ ID NO: 2196625 - RNA, 15 nt, Human
agcaaacucugcugu

SEQ ID NO: 2196626 - RNA, 23 nt, Human
agcaaaauuuuuucucuaggaaa

SEQ ID NO: 2196627 - RNA, 23 nt, Human
agcaaaauugauguguuuauuua

SEQ ID NO: 2196628 - RNA, 14 nt, Human
agcaaaaugugaau

SEQ ID NO: 2196629 - RNA, 15 nt, Human
agcaaaaugugaaug

SEQ ID NO: 2196630 - RNA, 23 nt, Human
agcaaaaugugaaugggaaaaga

SEQ ID NO: 2196631 - RNA, 13 nt, Human
agcaaacucugcu

SEQ ID NO: 2196632 - RNA, 15 nt, Human
agauauaaaagacug

SEQ ID NO: 2196633 - RNA, 22 nt, Human
agauaggcucugcacagaugga

SEQ ID NO: 2196634 - RNA, 21 nt, Human
agauaggcucugcacagaugg

SEQ ID NO: 2196635 - RNA, 23 nt, Human
agauaguuuugccagaacaguuu

SEQ ID NO: 2196636 - RNA, 15 nt, Human
agauauaaauggcug

SEQ ID NO: 2196637 - RNA, 17 nt, Human
agauauaaauggcuggu

SEQ ID NO: 2196638 - RNA, 20 nt, Human
agauauaacuauugcccagg

SEQ ID NO: 2196639 - RNA, 13 nt, Human
agauauaagugcu

SEQ ID NO: 2196640 - RNA, 15 nt, Human
agauauaagugcugu

SEQ ID NO: 2196641 - RNA, 16 nt, Human
agauaggcucugcaca

SEQ ID NO: 2196642 - RNA, 14 nt, Human
agauaggcucugca

SEQ ID NO: 2196643 - RNA, 13 nt, Human
agauaggcucugc

SEQ ID NO: 2196644 - RNA, 20 nt, Human
agauagauaggucagugcaa

SEQ ID NO: 2196645 - RNA, 20 nt, Human
agauagccaaggccaaagga

SEQ ID NO: 2196646 - RNA, 19 nt, Human
agauagccccacaggaggu

SEQ ID NO: 2196647 - RNA, 18 nt, Human
agaguggucuuucuggag

SEQ ID NO: 2196648 - RNA, 15 nt, Human
agagugguauuugca

SEQ ID NO: 2196649 - RNA, 18 nt, Human
agagugguauuugcagac

SEQ ID NO: 2196650 - RNA, 12 nt, Human
agaguguagaag

SEQ ID NO: 2196651 - RNA, 13 nt, Human
agaguguagaagc

SEQ ID NO: 2196652 - RNA, 14 nt, Human
agaguguagaagca

SEQ ID NO: 2196653 - RNA, 15 nt, Human
agaguguagaagcau

SEQ ID NO: 2196654 - RNA, 16 nt, Human
agaguguagaagcauu

SEQ ID NO: 2196655 - RNA, 17 nt, Human
agaguguagaagcauuc

SEQ ID NO: 2196656 - RNA, 18 nt, Human
agaguguagaagcauucc

SEQ ID NO: 2196657 - RNA, 18 nt, Human
agaguguagaucagagca

SEQ ID NO: 2196658 - RNA, 13 nt, Human
agaguugaagaca

SEQ ID NO: 2196659 - RNA, 13 nt, Human
agaguugaaccua

SEQ ID NO: 2196660 - RNA, 12 nt, Human
agaguugaaccu

SEQ ID NO: 2196661 - RNA, 22 nt, Human
agaguguagaagcauuccuucu

SEQ ID NO: 2196662 - RNA, 16 nt, Human
agauagaagaacugca

SEQ ID NO: 2196663 - RNA, 15 nt, Human
agauagaagaacugc

SEQ ID NO: 2196664 - RNA, 14 nt, Human
agauagaagaacug

SEQ ID NO: 2196665 - RNA, 13 nt, Human
agauagaagaacu

SEQ ID NO: 2196666 - RNA, 13 nt, Human
agaguugagcucu

SEQ ID NO: 2196667 - RNA, 14 nt, Human
agauagagagcuau

SEQ ID NO: 2196668 - RNA, 16 nt, Human
agauagaauuuccaau

SEQ ID NO: 2196669 - RNA, 13 nt, Human
agauagaauuucc

SEQ ID NO: 2196670 - RNA, 14 nt, Human
agaguugaagacag

SEQ ID NO: 2196671 - RNA, 15 nt, Human
agaguugaagacaga

SEQ ID NO: 2196672 - RNA, 16 nt, Human
agaguggguuucacaa

SEQ ID NO: 2196673 - RNA, 22 nt, Human
agagugggggagagcaggcugg

SEQ ID NO: 2196674 - RNA, 19 nt, Human
agagugggguagguuggga

SEQ ID NO: 2196675 - RNA, 22 nt, Human
agaguggccuggccaggagcuc

SEQ ID NO: 2196676 - RNA, 18 nt, Human
agagugggggagagcagg

SEQ ID NO: 2196677 - RNA, 20 nt, Human
agagugggggagagcaggcu

SEQ ID NO: 2196678 - RNA, 15 nt, Human
agaguggcuccuccc

SEQ ID NO: 2196679 - RNA, 19 nt, Human
agaguggccuggccaggag

SEQ ID NO: 2196680 - RNA, 17 nt, Human
agaguggccuggccagg

SEQ ID NO: 2196681 - RNA, 12 nt, Human
agaguggcuccu

SEQ ID NO: 2196682 - RNA, 13 nt, Human
agaguggcuccuc

SEQ ID NO: 2196683 - RNA, 14 nt, Human
agaguggcuccucc

SEQ ID NO: 2196684 - RNA, 20 nt, Human
agagggucugaggaauccag

SEQ ID NO: 2196685 - RNA, 18 nt, Human
agagggucuggagaagca

SEQ ID NO: 2196686 - RNA, 22 nt, Human
agagggugacaagauagagagc

SEQ ID NO: 2196687 - RNA, 19 nt, Human
agagggguggagacugcuu

SEQ ID NO: 2196688 - RNA, 19 nt, Human
agagggguacauuucccug

SEQ ID NO: 2196689 - RNA, 16 nt, Human
agagggguggagacug

SEQ ID NO: 2196690 - RNA, 16 nt, Human
agaguggccuggccag

SEQ ID NO: 2196691 - RNA, 15 nt, Human
agaguggccuggcca

SEQ ID NO: 2196692 - RNA, 14 nt, Human
agaguggccuggcc

SEQ ID NO: 2196693 - RNA, 13 nt, Human
agaguggccuggc

SEQ ID NO: 2196694 - RNA, 22 nt, Human
agagggucuggagaagcaguga

SEQ ID NO: 2196695 - RNA, 23 nt, Human
agaggggguggccucccaacuca

SEQ ID NO: 2196696 - RNA, 20 nt, Human
agagggguacauuucccugu

SEQ ID NO: 2196697 - RNA, 17 nt, Human
agauaugauauguaaac

SEQ ID NO: 2196698 - RNA, 16 nt, Human
agauaugauauguaaa

SEQ ID NO: 2196699 - RNA, 15 nt, Human
agauaugaguuguuu

SEQ ID NO: 2196700 - RNA, 18 nt, Human
agauaugaacauauuguu

SEQ ID NO: 2196701 - RNA, 17 nt, Human
agauaucuugaaaugaa

SEQ ID NO: 2196702 - RNA, 21 nt, Human
agauaucugagggaggaggcc

SEQ ID NO: 2196703 - RNA, 13 nt, Human
agauauauaucau

SEQ ID NO: 2196704 - RNA, 23 nt, Human
agauauaagugcuguauaaaauc

SEQ ID NO: 2196705 - RNA, 21 nt, Human
agauauaagugcuguauaaaa

SEQ ID NO: 2196706 - RNA, 22 nt, Human
agauauaagugcuguauaaaau

SEQ ID NO: 2196707 - RNA, 16 nt, Human
agauauaagugcugua

SEQ ID NO: 2196708 - RNA, 17 nt, Human
agauauaagugcuguau

SEQ ID NO: 2196709 - RNA, 18 nt, Human
agauauaagugcuguaua

SEQ ID NO: 2196710 - RNA, 20 nt, Human
agauauaagugcuguauaaa

SEQ ID NO: 2196711 - RNA, 16 nt, Human
aucaugacauguuaua

SEQ ID NO: 2196712 - RNA, 18 nt, Human
aucaugacauguuauaua

SEQ ID NO: 2196713 - RNA, 23 nt, Human
aucaugagugaauaaaugucuug

SEQ ID NO: 2196714 - RNA, 13 nt, Human
aucaugacauguu

SEQ ID NO: 2196715 - RNA, 16 nt, Human
aucaucuauaaagaag

SEQ ID NO: 2196716 - RNA, 16 nt, Human
aucauccuuuccagca

SEQ ID NO: 2196717 - RNA, 19 nt, Human
aucaugcaaaugcuguauu

SEQ ID NO: 2196718 - RNA, 22 nt, Human
aucaugcaucuuacugaaggua

SEQ ID NO: 2196719 - RNA, 21 nt, Human
aucaugcauguccuguaaagg

SEQ ID NO: 2196720 - RNA, 21 nt, Human
aucaugcauuguugagguggu

SEQ ID NO: 2196721 - RNA, 14 nt, Human
aucaugcauuguug

SEQ ID NO: 2196722 - RNA, 13 nt, Human
aucaugcauuguu

SEQ ID NO: 2196723 - RNA, 12 nt, Human
aucaugcauugu

SEQ ID NO: 2196724 - RNA, 22 nt, Human
aucaugcauuguugaggugguc

SEQ ID NO: 2196725 - RNA, 12 nt, Human
aucaugcccugu

SEQ ID NO: 2196726 - RNA, 19 nt, Human
aucauggaaugguuauaaa

SEQ ID NO: 2196727 - RNA, 20 nt, Human
aucauggaaugguuauaaaa

SEQ ID NO: 2196728 - RNA, 15 nt, Human
aucauccuaagcuau

SEQ ID NO: 2196729 - RNA, 14 nt, Human
aucauccagaaguu

SEQ ID NO: 2196730 - RNA, 13 nt, Human
aucaaauacuuua

SEQ ID NO: 2196731 - RNA, 18 nt, Human
aucaaaguaggcaggacc

SEQ ID NO: 2196732 - RNA, 20 nt, Human
aucaugacaaagacugagua

SEQ ID NO: 2196733 - RNA, 21 nt, Human
aucaugaauuaguuuuauaug

SEQ ID NO: 2196734 - RNA, 12 nt, Human
aucauccuacug

SEQ ID NO: 2196735 - RNA, 11 nt, Human
aucaaauacuu

SEQ ID NO: 2196736 - RNA, 14 nt, Human
aucaucccagcugc

SEQ ID NO: 2196737 - RNA, 13 nt, Human
aucauccuuucca

SEQ ID NO: 2196738 - RNA, 18 nt, Human
aucauccuuuccagcaug

SEQ ID NO: 2196739 - RNA, 19 nt, Human
auccacucugccugcuuac

SEQ ID NO: 2196740 - RNA, 23 nt, Human
auccacuuuaucuugaauaaugu

SEQ ID NO: 2196741 - RNA, 23 nt, Human
auccacucuacccucccaccccc

SEQ ID NO: 2196742 - RNA, 22 nt, Human
auccacucuacccucccacccc

SEQ ID NO: 2196743 - RNA, 21 nt, Human
auccacugugccaugugccag

SEQ ID NO: 2196744 - RNA, 20 nt, Human
auccagauacacccaaagua

SEQ ID NO: 2196745 - RNA, 22 nt, Human
auccagaguuuagaggaaaaaa

SEQ ID NO: 2196746 - RNA, 12 nt, Human
auccacuuugca

SEQ ID NO: 2196747 - RNA, 20 nt, Human
auccagaucauuccucagaa

SEQ ID NO: 2196748 - RNA, 19 nt, Human
auccagccggaggccagag

SEQ ID NO: 2196749 - RNA, 14 nt, Human
auccagccucuccc

SEQ ID NO: 2196750 - RNA, 21 nt, Human
auccagcccugaguuccuagc

SEQ ID NO: 2196751 - RNA, 12 nt, Human
auccagccuggg

SEQ ID NO: 2196752 - RNA, 16 nt, Human
auccagccucuccccu

SEQ ID NO: 2196753 - RNA, 17 nt, Human
auccagccucuccccug

SEQ ID NO: 2196754 - RNA, 21 nt, Human
auccagccucuccccugauua

SEQ ID NO: 2196755 - RNA, 24 nt, Human
auccaggcagucgggggcuggccu

SEQ ID NO: 2196756 - RNA, 19 nt, Human
auccaggcagauccaggac

SEQ ID NO: 2196757 - RNA, 22 nt, Human
auccaggcagauccaggacuau

SEQ ID NO: 2196758 - RNA, 17 nt, Human
auccagccuggggucug

SEQ ID NO: 2196759 - RNA, 21 nt, Human
auccagggacagaggccccag

SEQ ID NO: 2196760 - RNA, 20 nt, Human
auccagggacagaggcccca

SEQ ID NO: 2196761 - RNA, 19 nt, Human
auccagggacagaggcccc

SEQ ID NO: 2196762 - RNA, 16 nt, Human
auccagggacagaggc

SEQ ID NO: 2196763 - RNA, 14 nt, Human
auccagggacagag

SEQ ID NO: 2196764 - RNA, 13 nt, Human
auccagggacaga

SEQ ID NO: 2196765 - RNA, 12 nt, Human
auccagggacag

SEQ ID NO: 2196766 - RNA, 18 nt, Human
auccuuuuucuuuauaaa

SEQ ID NO: 2196767 - RNA, 15 nt, Human
aucgaaccguuuuga

SEQ ID NO: 2196768 - RNA, 20 nt, Human
aucgaaauaacaauguuaag

SEQ ID NO: 2196769 - RNA, 22 nt, Human
aucgaaauaacaauguuaagga

SEQ ID NO: 2196770 - RNA, 13 nt, Human
aucgaaauaacaa

SEQ ID NO: 2196771 - RNA, 17 nt, Human
aucgaaauaacaauguu

SEQ ID NO: 2196772 - RNA, 18 nt, Human
aucgaaauaacaauguua

SEQ ID NO: 2196773 - RNA, 19 nt, Human
aucgaaauaacaauguuaa

SEQ ID NO: 2196774 - RNA, 23 nt, Human
aucgaaauaacaauguuaaggaa

SEQ ID NO: 2196775 - RNA, 21 nt, Human
aucgacuuguuuuugcacaug

SEQ ID NO: 2196776 - RNA, 14 nt, Human
aucgaccugccucg

SEQ ID NO: 2196777 - RNA, 20 nt, Human
aucgaaucuacuaauuccac

SEQ ID NO: 2196778 - RNA, 18 nt, Human
aucgaaucuacuaauucc

SEQ ID NO: 2196779 - RNA, 17 nt, Human
auccuuccucacaccag

SEQ ID NO: 2196780 - RNA, 14 nt, Human
aucccccugcccuc

SEQ ID NO: 2196781 - RNA, 15 nt, Human
aucccccugcccucg

SEQ ID NO: 2196782 - RNA, 14 nt, Human
aucccccuugccac

SEQ ID NO: 2196783 - RNA, 18 nt, Human
aucccccuugccacccca

SEQ ID NO: 2196784 - RNA, 11 nt, Human
auccuuccucc

SEQ ID NO: 2196785 - RNA, 13 nt, Human
auccuuccuccca

SEQ ID NO: 2196786 - RNA, 14 nt, Human
auccuuccuuccca

SEQ ID NO: 2196787 - RNA, 16 nt, Human
auccuuccuucccacc

SEQ ID NO: 2196788 - RNA, 22 nt, Human
auccuuccuucccacccaucgc

SEQ ID NO: 2196789 - RNA, 12 nt, Human
auccuucuaguu

SEQ ID NO: 2196790 - RNA, 13 nt, Human
auccuucuaguuu

SEQ ID NO: 2196791 - RNA, 17 nt, Human
auccuucuaguuuccca

SEQ ID NO: 2196792 - RNA, 19 nt, Human
auccuucuaguuucccaca

SEQ ID NO: 2196793 - RNA, 22 nt, Human
auccuucuaguuucccacaaua

SEQ ID NO: 2196794 - RNA, 11 nt, Human
auccuucugcc

SEQ ID NO: 2196795 - RNA, 13 nt, Human
auccuucugccuu

SEQ ID NO: 2196796 - RNA, 12 nt, Human
auccuugaagau

SEQ ID NO: 2196797 - RNA, 19 nt, Human
aucccccccaccucucccu

SEQ ID NO: 2196798 - RNA, 20 nt, Human
auccccccaucuugcuuccc

SEQ ID NO: 2196799 - RNA, 17 nt, Human
auccccauccuccagcu

SEQ ID NO: 2196800 - RNA, 14 nt, Human
auccccccucacca

SEQ ID NO: 2196801 - RNA, 12 nt, Human
aucccccugccc

SEQ ID NO: 2196802 - RNA, 13 nt, Human
aucccccugcccu

SEQ ID NO: 2196803 - RNA, 12 nt, Human
aucccccagacu

SEQ ID NO: 2196804 - RNA, 12 nt, Human
aucccccagccu

SEQ ID NO: 2196805 - RNA, 15 nt, Human
auccccccaucuugc

SEQ ID NO: 2196806 - RNA, 17 nt, Human
auccccccaucuugcuu

SEQ ID NO: 2196807 - RNA, 18 nt, Human
auccagggaugccaucug

SEQ ID NO: 2196808 - RNA, 15 nt, Human
auccccaguaaaauu

SEQ ID NO: 2196809 - RNA, 21 nt, Human
auccccaguaaaauugccaua

SEQ ID NO: 2196810 - RNA, 19 nt, Human
auccagggcucugaccagu

SEQ ID NO: 2196811 - RNA, 15 nt, Human
auccccauccuccag

SEQ ID NO: 2196812 - RNA, 20 nt, Human
auccccauccuccagcuucu

SEQ ID NO: 2196813 - RNA, 22 nt, Human
aucuaggaagacuuuggaaaga

SEQ ID NO: 2196814 - RNA, 22 nt, Human
auagcaauccauguuaguuuuu

SEQ ID NO: 2196815 - RNA, 23 nt, Human
auagcaaauguuuugacaugaaa

SEQ ID NO: 2196816 - RNA, 22 nt, Human
auagcaagugaauuuuucucua

SEQ ID NO: 2196817 - RNA, 19 nt, Human
auagcaagugaauuuuucu

SEQ ID NO: 2196818 - RNA, 13 nt, Human
auagcaagugaau

SEQ ID NO: 2196819 - RNA, 17 nt, Human
auagcaagauugcuuaa

SEQ ID NO: 2196820 - RNA, 19 nt, Human
auagcaagacacaucccua

SEQ ID NO: 2196821 - RNA, 14 nt, Human
auagcacagacccu

SEQ ID NO: 2196822 - RNA, 16 nt, Human
aucaaacugaagccag

SEQ ID NO: 2196823 - RNA, 15 nt, Human
aucaaacugaagcca

SEQ ID NO: 2196824 - RNA, 14 nt, Human
aucaaacugaagcc

SEQ ID NO: 2196825 - RNA, 19 nt, Human
aucaaagagguuuuaaaaa

SEQ ID NO: 2196826 - RNA, 17 nt, Human
aucaaacugaagccaga

SEQ ID NO: 2196827 - RNA, 12 nt, Human
aucaaaggacac

SEQ ID NO: 2196828 - RNA, 18 nt, Human
aucaaagagagaaaauaa

SEQ ID NO: 2196829 - RNA, 20 nt, Human
aucaaaagguuaauaaagua

SEQ ID NO: 2196830 - RNA, 21 nt, Human
aucaaaaccuuucaaauauca

SEQ ID NO: 2196831 - RNA, 13 nt, Human
aucaaaagacaau

SEQ ID NO: 2196832 - RNA, 14 nt, Human
aucaaaagacaauu

SEQ ID NO: 2196833 - RNA, 15 nt, Human
aucaaaagacaauuc

SEQ ID NO: 2196834 - RNA, 16 nt, Human
aucaaaagacaauucu

SEQ ID NO: 2196835 - RNA, 17 nt, Human
aucaaaagacaauucuu

SEQ ID NO: 2196836 - RNA, 18 nt, Human
aucaaaagacaauucuuu

SEQ ID NO: 2196837 - RNA, 19 nt, Human
aucaaaagacaauucuuua

SEQ ID NO: 2196838 - RNA, 22 nt, Human
aucaaacccggcgguccccucc

SEQ ID NO: 2196839 - RNA, 24 nt, Human
aucaaaagguuaauaaaguaauua

SEQ ID NO: 2196840 - RNA, 21 nt, Human
aucaaaagacaauucuuuaua

SEQ ID NO: 2196841 - RNA, 23 nt, Human
aucaaaagacaauucuuuauaca

SEQ ID NO: 2196842 - RNA, 18 nt, Human
auauuuuuuucuuuucuu

SEQ ID NO: 2196843 - RNA, 15 nt, Human
auauuuuuuuguaga

SEQ ID NO: 2196844 - RNA, 16 nt, Human
aucaaaaauauuccau

SEQ ID NO: 2196845 - RNA, 15 nt, Human
aucaaaacuuucuuu

SEQ ID NO: 2196846 - RNA, 21 nt, Human
aucaaaacuuucuuuucugga

SEQ ID NO: 2196847 - RNA, 14 nt, Human
aucaaaagaaagaa

SEQ ID NO: 2196848 - RNA, 15 nt, Human
augggaauuguguga

SEQ ID NO: 2196849 - RNA, 18 nt, Human
augggaaugaggugggag

SEQ ID NO: 2196850 - RNA, 14 nt, Human
augggaauugugug

SEQ ID NO: 2196851 - RNA, 15 nt, Human
augggacagggagga

SEQ ID NO: 2196852 - RNA, 20 nt, Human
augggacauuugcucaugga

SEQ ID NO: 2196853 - RNA, 14 nt, Human
augggaagacauga

SEQ ID NO: 2196854 - RNA, 21 nt, Human
augggaaaguauucuguacuc

SEQ ID NO: 2196855 - RNA, 17 nt, Human
augggaaugagguggga

SEQ ID NO: 2196856 - RNA, 13 nt, Human
augggaaaguauu

SEQ ID NO: 2196857 - RNA, 23 nt, Human
augggaaagccaccucucccuca

SEQ ID NO: 2196858 - RNA, 17 nt, Human
augggaaagccaccucu

SEQ ID NO: 2196859 - RNA, 18 nt, Human
augggaaagccaccucuc

SEQ ID NO: 2196860 - RNA, 20 nt, Human
augggaaagcauuguaaaug

SEQ ID NO: 2196861 - RNA, 14 nt, Human
augggaaagcauug

SEQ ID NO: 2196862 - RNA, 21 nt, Human
auggaguguguauuguuccca

SEQ ID NO: 2196863 - RNA, 18 nt, Human
auggaguguguauuguuc

SEQ ID NO: 2196864 - RNA, 15 nt, Human
auggaguucuugugc

SEQ ID NO: 2196865 - RNA, 17 nt, Human
auggaguuaacggguga

SEQ ID NO: 2196866 - RNA, 21 nt, Human
auggaguuaacgggugaauaa

SEQ ID NO: 2196867 - RNA, 19 nt, Human
auggcuuccuccucccucc

SEQ ID NO: 2196868 - RNA, 16 nt, Human
auggaguguacaagua

SEQ ID NO: 2196869 - RNA, 19 nt, Human
auggaguggcaauauagaa

SEQ ID NO: 2196870 - RNA, 14 nt, Human
augggaaaagagau

SEQ ID NO: 2196871 - RNA, 18 nt, Human
auggcuugccacagcucu

SEQ ID NO: 2196872 - RNA, 14 nt, Human
auggcuucuaacaa

SEQ ID NO: 2196873 - RNA, 23 nt, Human
auggcuuccuggcaauagucaaa

SEQ ID NO: 2196874 - RNA, 15 nt, Human
augcuuuccaaaacc

SEQ ID NO: 2196875 - RNA, 21 nt, Human
augcuuucagauuaaaauugu

SEQ ID NO: 2196876 - RNA, 16 nt, Human
augcuuugaucccuuc

SEQ ID NO: 2196877 - RNA, 18 nt, Human
auggagagaaaacagacc

SEQ ID NO: 2196878 - RNA, 21 nt, Human
augcuuugaaguacaauugug

SEQ ID NO: 2196879 - RNA, 17 nt, Human
auggagagaggggaaua

SEQ ID NO: 2196880 - RNA, 15 nt, Human
auggagagaggggaa

SEQ ID NO: 2196881 - RNA, 14 nt, Human
auggagagagggga

SEQ ID NO: 2196882 - RNA, 13 nt, Human
auggagagagggg

SEQ ID NO: 2196883 - RNA, 20 nt, Human
auggagagcuagaacccggc

SEQ ID NO: 2196884 - RNA, 23 nt, Human
auggagauagccccacaggaggu

SEQ ID NO: 2196885 - RNA, 19 nt, Human
auggagauucaguuuucau

SEQ ID NO: 2196886 - RNA, 13 nt, Human
auggagagcugga

SEQ ID NO: 2196887 - RNA, 18 nt, Human
auggagccagcucccucu

SEQ ID NO: 2196888 - RNA, 15 nt, Human
auggagccagcuccc

SEQ ID NO: 2196889 - RNA, 23 nt, Human
auggagccagcucccucuauuua

SEQ ID NO: 2196890 - RNA, 11 nt, Human
auggagugacg

SEQ ID NO: 2196891 - RNA, 22 nt, Human
auggagugacggucccacacug

SEQ ID NO: 2196892 - RNA, 20 nt, Human
auggagauucaguuuucauu

SEQ ID NO: 2196893 - RNA, 23 nt, Human
auggagagcuggagccuggugcc

SEQ ID NO: 2196894 - RNA, 11 nt, Human
auggagccagc

SEQ ID NO: 2196895 - RNA, 23 nt, Human
augcucugugcgaggguuacuau

SEQ ID NO: 2196896 - RNA, 13 nt, Human
augcucuucugug

SEQ ID NO: 2196897 - RNA, 16 nt, Human
augcucuuagaaaauu

SEQ ID NO: 2196898 - RNA, 19 nt, Human
augcucugcauguuacaua

SEQ ID NO: 2196899 - RNA, 18 nt, Human
augcucugcauguuacau

SEQ ID NO: 2196900 - RNA, 14 nt, Human
augcuucuucagag

SEQ ID NO: 2196901 - RNA, 17 nt, Human
augcuucuucagagacu

SEQ ID NO: 2196902 - RNA, 20 nt, Human
augcuucuucagagacuccu

SEQ ID NO: 2196903 - RNA, 21 nt, Human
augcuuuaggauguacaguua

SEQ ID NO: 2196904 - RNA, 14 nt, Human
augcucuucugugg

SEQ ID NO: 2196905 - RNA, 22 nt, Human
augcuucuucagagacuccugc

SEQ ID NO: 2196906 - RNA, 11 nt, Human
augccuggugg

SEQ ID NO: 2196907 - RNA, 12 nt, Human
augccugguggc

SEQ ID NO: 2196908 - RNA, 16 nt, Human
augcauguccuguaaa

SEQ ID NO: 2196909 - RNA, 22 nt, Human
augcauggugccccaggaccag

SEQ ID NO: 2196910 - RNA, 21 nt, Human
augcauggugccccaggacca

SEQ ID NO: 2196911 - RNA, 23 nt, Human
augcauggugcaguugacagcag

SEQ ID NO: 2196912 - RNA, 13 nt, Human
augccugguggca

SEQ ID NO: 2196913 - RNA, 14 nt, Human
augccugguggcag

SEQ ID NO: 2196914 - RNA, 19 nt, Human
augccugguggcagcugcg

SEQ ID NO: 2196915 - RNA, 18 nt, Human
augccugguggcagcugc

SEQ ID NO: 2196916 - RNA, 16 nt, Human
augccuguccagccug

SEQ ID NO: 2196917 - RNA, 21 nt, Human
augccuguacucgcuugugca

SEQ ID NO: 2196918 - RNA, 23 nt, Human
augccuguacucgcuugugcaga

SEQ ID NO: 2196919 - RNA, 21 nt, Human
augccugguggcagcugcggu

SEQ ID NO: 2196920 - RNA, 19 nt, Human
augcauggugcaguugaca

SEQ ID NO: 2196921 - RNA, 16 nt, Human
augcauggugccccag

SEQ ID NO: 2196922 - RNA, 16 nt, Human
augcauggaaauuccc

SEQ ID NO: 2196923 - RNA, 23 nt, Human
augcauggagggcugcccuguac

SEQ ID NO: 2196924 - RNA, 20 nt, Human
augcauggugccccaggacc

SEQ ID NO: 2196925 - RNA, 19 nt, Human
augcauggugccccaggac

SEQ ID NO: 2196926 - RNA, 18 nt, Human
augcauggugccccagga

SEQ ID NO: 2196927 - RNA, 17 nt, Human
augcauggugccccagg

SEQ ID NO: 2196928 - RNA, 18 nt, Human
augcaucauucuuguuaa

SEQ ID NO: 2196929 - RNA, 22 nt, Human
augcauccauuccucagggaca

SEQ ID NO: 2196930 - RNA, 18 nt, Human
augcauccauuccucagg

SEQ ID NO: 2196931 - RNA, 17 nt, Human
augcauccauuccucag

SEQ ID NO: 2196932 - RNA, 14 nt, Human
augcauccauuccu

SEQ ID NO: 2196933 - RNA, 23 nt, Human
augcauccauuccucagggacag

SEQ ID NO: 2196934 - RNA, 14 nt, Human
augcaucuagauua

SEQ ID NO: 2196935 - RNA, 19 nt, Human
augcauccuuugcacuguc

SEQ ID NO: 2196936 - RNA, 15 nt, Human
augcauacuucaaaa

SEQ ID NO: 2196937 - RNA, 23 nt, Human
augcauacacacacacacacagc

SEQ ID NO: 2196938 - RNA, 22 nt, Human
augcauacacacacacacacag

SEQ ID NO: 2196939 - RNA, 20 nt, Human
augcauauuauuuuauguug

SEQ ID NO: 2196940 - RNA, 16 nt, Human
augcauacuucaaaag

SEQ ID NO: 2196941 - RNA, 17 nt, Human
augcauacuucaaaagu

SEQ ID NO: 2196942 - RNA, 18 nt, Human
augcauacuucaaaagua

SEQ ID NO: 2196943 - RNA, 20 nt, Human
augcauacuucaaaaguauu

SEQ ID NO: 2196944 - RNA, 24 nt, Human
augcauauuauuuuauguugcaua

SEQ ID NO: 2196945 - RNA, 15 nt, Human
augcauauuguauua

SEQ ID NO: 2196946 - RNA, 16 nt, Human
augcauauuguauuac

SEQ ID NO: 2196947 - RNA, 22 nt, Human
augcauacuucaaaaguauuuu

SEQ ID NO: 2196948 - RNA, 21 nt, Human
augcauacuucaaaaguauuu

SEQ ID NO: 2196949 - RNA, 13 nt, Human
augcauauuguau

SEQ ID NO: 2196950 - RNA, 14 nt, Human
augcauaaaugcau

SEQ ID NO: 2196951 - RNA, 10 nt, Human
augcauacac

SEQ ID NO: 2196952 - RNA, 12 nt, Human
augcauacacac

SEQ ID NO: 2196953 - RNA, 11 nt, Human
augcauacaca

SEQ ID NO: 2196954 - RNA, 17 nt, Human
augcauacacacacaca

SEQ ID NO: 2196955 - RNA, 15 nt, Human
augcauacacacaca

SEQ ID NO: 2196956 - RNA, 14 nt, Human
augcauacacacac

SEQ ID NO: 2196957 - RNA, 13 nt, Human
augcauacacaca

SEQ ID NO: 2196958 - RNA, 17 nt, Human
augaccuucuaggaagc

SEQ ID NO: 2196959 - RNA, 18 nt, Human
augaccuucuaggaagcu

SEQ ID NO: 2196960 - RNA, 16 nt, Human
augaccuuacauuucc

SEQ ID NO: 2196961 - RNA, 13 nt, Human
augaccuuucaau

SEQ ID NO: 2196962 - RNA, 15 nt, Human
augaccuuucaauag

SEQ ID NO: 2196963 - RNA, 14 nt, Human
augaccuuacauuu

SEQ ID NO: 2196964 - RNA, 18 nt, Human
augaccuuucaauaggaa

SEQ ID NO: 2196965 - RNA, 12 nt, Human
augagccuggca

SEQ ID NO: 2196966 - RNA, 11 nt, Human
augagccuggc

SEQ ID NO: 2196967 - RNA, 21 nt, Human
augagccucagcauccuggca

SEQ ID NO: 2196968 - RNA, 19 nt, Human
augagccucagcauccugg

SEQ ID NO: 2196969 - RNA, 21 nt, Human
augagcuggaaggagugagag

SEQ ID NO: 2196970 - RNA, 16 nt, Human
augagcucuucauguu

SEQ ID NO: 2196971 - RNA, 13 nt, Human
augagcugagggg

SEQ ID NO: 2196972 - RNA, 12 nt, Human
augagcugaggg

SEQ ID NO: 2196973 - RNA, 13 nt, Human
augagcuggaagg

SEQ ID NO: 2196974 - RNA, 18 nt, Human
augagcuuuauguaauaa

SEQ ID NO: 2196975 - RNA, 22 nt, Human
augagcuuuauguaauaaugug

SEQ ID NO: 2196976 - RNA, 20 nt, Human
augagcuuuauguaauaaug

SEQ ID NO: 2196977 - RNA, 18 nt, Human
augaggccucaguggacu

SEQ ID NO: 2196978 - RNA, 15 nt, Human
augaggccucuugga

SEQ ID NO: 2196979 - RNA, 21 nt, Human
augaggccgcuagaggccuga

SEQ ID NO: 2196980 - RNA, 15 nt, Human
augaggccgcuagag

SEQ ID NO: 2196981 - RNA, 22 nt, Human
augaggcugcuuuccaaagcca

SEQ ID NO: 2196982 - RNA, 21 nt, Human
augaggccucuuggaccucug

SEQ ID NO: 2196983 - RNA, 22 nt, Human
augaggccucuuggaccucugc

SEQ ID NO: 2196984 - RNA, 23 nt, Human
augaggccucuuggaccucugcu

SEQ ID NO: 2196985 - RNA, 13 nt, Human
augaggcuugcug

SEQ ID NO: 2196986 - RNA, 23 nt, Human
augaggccacugcugcuucucca

SEQ ID NO: 2196987 - RNA, 12 nt, Human
augaaagacugu

SEQ ID NO: 2196988 - RNA, 13 nt, Human
augaaacuuggau

SEQ ID NO: 2196989 - RNA, 23 nt, Human
augaaaccuuauuuuuucccaaa

SEQ ID NO: 2196990 - RNA, 16 nt, Human
augaagcccaauaaac

SEQ ID NO: 2196991 - RNA, 17 nt, Human
augaagcccaagugaaa

SEQ ID NO: 2196992 - RNA, 15 nt, Human
augaagcccaaguga

SEQ ID NO: 2196993 - RNA, 12 nt, Human
augaagcccaag

SEQ ID NO: 2196994 - RNA, 14 nt, Human
augaagcuaccuca

SEQ ID NO: 2196995 - RNA, 16 nt, Human
augaagccuuagccag

SEQ ID NO: 2196996 - RNA, 23 nt, Human
augaagcauuuacuuuguguuca

SEQ ID NO: 2196997 - RNA, 14 nt, Human
augaaagaaaggcc

SEQ ID NO: 2196998 - RNA, 15 nt, Human
augaagcuaccucaa

SEQ ID NO: 2196999 - RNA, 13 nt, Human
augaagcuugugu

SEQ ID NO: 2197000 - RNA, 13 nt, Human
augaaguacucau

SEQ ID NO: 2197001 - RNA, 23 nt, Human
augaaguaauaugcacacauuuu

SEQ ID NO: 2197002 - RNA, 21 nt, Human
augaaguaauaugcacacauu

SEQ ID NO: 2197003 - RNA, 14 nt, Human
augaaguaauaugc

SEQ ID NO: 2197004 - RNA, 15 nt, Human
augaauaauuuccca

SEQ ID NO: 2197005 - RNA, 23 nt, Human
augaagcucaccuguugcuuaca

SEQ ID NO: 2197006 - RNA, 15 nt, Human
augaagcuuguguau

SEQ ID NO: 2197007 - RNA, 23 nt, Human
augaaguuuuuuuuauacaggau

SEQ ID NO: 2197008 - RNA, 17 nt, Human
augaauaaagacaccua

SEQ ID NO: 2197009 - RNA, 21 nt, Human
augaauacagggcaugcauuu

SEQ ID NO: 2197010 - RNA, 22 nt, Human
augaauaauuucccaauuagga

SEQ ID NO: 2197011 - RNA, 20 nt, Human
augaauacaaacaauggaaa

SEQ ID NO: 2197012 - RNA, 21 nt, Human
augaauacuguauuuuguauu

SEQ ID NO: 2197013 - RNA, 19 nt, Human
aucuaggauuuuaagggaa

SEQ ID NO: 2197014 - RNA, 11 nt, Human
aucuaggauuu

SEQ ID NO: 2197015 - RNA, 23 nt, Human
aucuaggaagacuuuggaaagag

SEQ ID NO: 2197016 - RNA, 18 nt, Human
augaggcuugcugagagg

SEQ ID NO: 2197017 - RNA, 15 nt, Human
augaggcuugcugag

SEQ ID NO: 2197018 - RNA, 17 nt, Human
augaggcuugcugagag

SEQ ID NO: 2197019 - RNA, 17 nt, Human
auacugucucuuucaug

SEQ ID NO: 2197020 - RNA, 19 nt, Human
auacuguauuuuguauugu

SEQ ID NO: 2197021 - RNA, 15 nt, Human
auacuguugugcgca

SEQ ID NO: 2197022 - RNA, 16 nt, Human
auacuguuugagguuu

SEQ ID NO: 2197023 - RNA, 12 nt, Human
auacuguuugag

SEQ ID NO: 2197024 - RNA, 21 nt, Human
auacuuaaauggaaaaaauga

SEQ ID NO: 2197025 - RNA, 20 nt, Human
auacuguuugagguuuuuaa

SEQ ID NO: 2197026 - RNA, 19 nt, Human
auacuugaaaauuaacaug

SEQ ID NO: 2197027 - RNA, 21 nt, Human
auacugucgguuuuuuuuaaa

SEQ ID NO: 2197028 - RNA, 16 nt, Human
auacugugcuggagcc

SEQ ID NO: 2197029 - RNA, 20 nt, Human
auacugugcuggagccacua

SEQ ID NO: 2197030 - RNA, 17 nt, Human
auacugugcuggagcca

SEQ ID NO: 2197031 - RNA, 17 nt, Human
auagaaaacugaaaauc

SEQ ID NO: 2197032 - RNA, 16 nt, Human
auagaaaaacccugcc

SEQ ID NO: 2197033 - RNA, 21 nt, Human
auacuuuuuuuucuuuaaaaa

SEQ ID NO: 2197034 - RNA, 14 nt, Human
auacuuuuuuucac

SEQ ID NO: 2197035 - RNA, 15 nt, Human
auacuuuuuuucaca

SEQ ID NO: 2197036 - RNA, 16 nt, Human
auagcaacacucuaua

SEQ ID NO: 2197037 - RNA, 19 nt, Human
auagcaaauguuuugacau

SEQ ID NO: 2197038 - RNA, 19 nt, Human
auacuuuuuucuuauuuaa

SEQ ID NO: 2197039 - RNA, 20 nt, Human
auacuuuuuacaauuaaaaa

SEQ ID NO: 2197040 - RNA, 13 nt, Human
auacuuuuuacaa

SEQ ID NO: 2197041 - RNA, 19 nt, Human
auacuuuuuaaauguaaag

SEQ ID NO: 2197042 - RNA, 16 nt, Human
auacuuuugcccuuug

SEQ ID NO: 2197043 - RNA, 17 nt, Human
auacuugaagggccaga

SEQ ID NO: 2197044 - RNA, 16 nt, Human
auacuugaagggccag

SEQ ID NO: 2197045 - RNA, 21 nt, Human
auacuugaagggccagagcca

SEQ ID NO: 2197046 - RNA, 20 nt, Human
auacuugaagggccagagcc

SEQ ID NO: 2197047 - RNA, 19 nt, Human
auacuugaagggccagagc

SEQ ID NO: 2197048 - RNA, 18 nt, Human
auacuugaagggccagag

SEQ ID NO: 2197049 - RNA, 22 nt, Human
auacuugaagggccagagccag

SEQ ID NO: 2197050 - RNA, 21 nt, Human
auacacugaaguuaacagaga

SEQ ID NO: 2197051 - RNA, 19 nt, Human
auacacuaauuccuuucua

SEQ ID NO: 2197052 - RNA, 17 nt, Human
auacacgagguaugagg

SEQ ID NO: 2197053 - RNA, 21 nt, Human
auacacuaugaagauguuuca

SEQ ID NO: 2197054 - RNA, 22 nt, Human
auacacuauuugugagcaaagg

SEQ ID NO: 2197055 - RNA, 19 nt, Human
auacaccagagauaauaug

SEQ ID NO: 2197056 - RNA, 18 nt, Human
auacaccagcauuccuuu

SEQ ID NO: 2197057 - RNA, 17 nt, Human
auacaccagcauuccuu

SEQ ID NO: 2197058 - RNA, 14 nt, Human
auacaccgggccug

SEQ ID NO: 2197059 - RNA, 18 nt, Human
auacaccgggccuggaga

SEQ ID NO: 2197060 - RNA, 17 nt, Human
auacaccacuacauucu

SEQ ID NO: 2197061 - RNA, 20 nt, Human
auacaccaccucacuccugu

SEQ ID NO: 2197062 - RNA, 21 nt, Human
auacaccaccucacuccuguu

SEQ ID NO: 2197063 - RNA, 23 nt, Human
auacacauaauuaaaguguccau

SEQ ID NO: 2197064 - RNA, 16 nt, Human
auacaccaauugauuu

SEQ ID NO: 2197065 - RNA, 21 nt, Human
auaagcuaacaccagacagac

SEQ ID NO: 2197066 - RNA, 17 nt, Human
auaagcuaaagaggcug

SEQ ID NO: 2197067 - RNA, 16 nt, Human
auaagcuaaagaggcu

SEQ ID NO: 2197068 - RNA, 13 nt, Human
auaagcuaaagag

SEQ ID NO: 2197069 - RNA, 18 nt, Human
auaagcggcguaaguuua

SEQ ID NO: 2197070 - RNA, 16 nt, Human
auaagcucagaaucca

SEQ ID NO: 2197071 - RNA, 17 nt, Human
auaagguuuaaaaagau

SEQ ID NO: 2197072 - RNA, 19 nt, Human
auaagguuucguuucugua

SEQ ID NO: 2197073 - RNA, 20 nt, Human
auaagguuucguuucuguau

SEQ ID NO: 2197074 - RNA, 23 nt, Human
auaagguuucguuucuguauaca

SEQ ID NO: 2197075 - RNA, 12 nt, Human
auaaguaagaaa

SEQ ID NO: 2197076 - RNA, 13 nt, Human
auaaguaagaaaa

SEQ ID NO: 2197077 - RNA, 15 nt, Human
auaaguaaaugcuag

SEQ ID NO: 2197078 - RNA, 15 nt, Human
auaagcucagaaucc

SEQ ID NO: 2197079 - RNA, 12 nt, Human
auaauguuaaca

SEQ ID NO: 2197080 - RNA, 23 nt, Human
auaauguuaaauuuguaaguuuc

SEQ ID NO: 2197081 - RNA, 16 nt, Human
auaauguuaaauuugu

SEQ ID NO: 2197082 - RNA, 18 nt, Human
auaauguuaaauuuguaa

SEQ ID NO: 2197083 - RNA, 19 nt, Human
auaauguuaaauuuguaag

SEQ ID NO: 2197084 - RNA, 22 nt, Human
auaauguuaaauuuguaaguuu

SEQ ID NO: 2197085 - RNA, 15 nt, Human
auacaauucuacauu

SEQ ID NO: 2197086 - RNA, 20 nt, Human
auacaauguauuuauuuaaa

SEQ ID NO: 2197087 - RNA, 21 nt, Human
auacaauguauuuauuuaaaa

SEQ ID NO: 2197088 - RNA, 18 nt, Human
auacaauguauuuauuua

SEQ ID NO: 2197089 - RNA, 23 nt, Human
auacaaugcugugcccuaaagug

SEQ ID NO: 2197090 - RNA, 15 nt, Human
auacaccacuacauu

SEQ ID NO: 2197091 - RNA, 14 nt, Human
auacacaggauccu

SEQ ID NO: 2197092 - RNA, 10 nt, Human
auacacauaa

SEQ ID NO: 2197093 - RNA, 12 nt, Human
auacacauaauu

SEQ ID NO: 2197094 - RNA, 22 nt, Human
auacacauaauuaaagugucca

SEQ ID NO: 2197095 - RNA, 18 nt, Human
auaaguacuguguacaga

SEQ ID NO: 2197096 - RNA, 16 nt, Human
auaaguacuguguaca

SEQ ID NO: 2197097 - RNA, 13 nt, Human
auaaguacugugu

SEQ ID NO: 2197098 - RNA, 13 nt, Human
auaaguaaguuug

SEQ ID NO: 2197099 - RNA, 17 nt, Human
auaaguaauucaagaaa

SEQ ID NO: 2197100 - RNA, 14 nt, Human
auaaguaagaaaau

SEQ ID NO: 2197101 - RNA, 15 nt, Human
auaaguaagaaaaua

SEQ ID NO: 2197102 - RNA, 17 nt, Human
auaaguaagaaaauauu

SEQ ID NO: 2197103 - RNA, 18 nt, Human
auaaguaagaaaauauuu

SEQ ID NO: 2197104 - RNA, 13 nt, Human
auaagugcuguau

SEQ ID NO: 2197105 - RNA, 14 nt, Human
auaagugcuguaua

SEQ ID NO: 2197106 - RNA, 15 nt, Human
auaagugcuguauaa

SEQ ID NO: 2197107 - RNA, 16 nt, Human
auaagugcuguauaaa

SEQ ID NO: 2197108 - RNA, 16 nt, Human
auaaugugaaguguua

SEQ ID NO: 2197109 - RNA, 12 nt, Human
auaaugugaagu

SEQ ID NO: 2197110 - RNA, 10 nt, Human
auaauguuaa

SEQ ID NO: 2197111 - RNA, 11 nt, Human
auaauguuaaa

SEQ ID NO: 2197112 - RNA, 12 nt, Human
auaauguuaaau

SEQ ID NO: 2197113 - RNA, 20 nt, Human
auaaguggaggcacuuuagg

SEQ ID NO: 2197114 - RNA, 19 nt, Human
auaaguggaggcacuuuag

SEQ ID NO: 2197115 - RNA, 19 nt, Human
auaaguaagaaaauauuuu

SEQ ID NO: 2197116 - RNA, 18 nt, Human
auaaguggaggcacuuua

SEQ ID NO: 2197117 - RNA, 22 nt, Human
auaagugcuguauaaaaucagc

SEQ ID NO: 2197118 - RNA, 17 nt, Human
auaagugcuguauaaaa

SEQ ID NO: 2197119 - RNA, 18 nt, Human
auaagugcuguauaaaau

SEQ ID NO: 2197120 - RNA, 19 nt, Human
auaagugcuguauaaaauc

SEQ ID NO: 2197121 - RNA, 20 nt, Human
auaagugcuguauaaaauca

SEQ ID NO: 2197122 - RNA, 11 nt, Human
auaaagacagg

SEQ ID NO: 2197123 - RNA, 10 nt, Human
auaaaagaug

SEQ ID NO: 2197124 - RNA, 18 nt, Human
auaaaacauuaagaaaau

SEQ ID NO: 2197125 - RNA, 17 nt, Human
auaaaacauuaagaaaa

SEQ ID NO: 2197126 - RNA, 14 nt, Human
auaaaacauuaaga

SEQ ID NO: 2197127 - RNA, 14 nt, Human
auaaagaccacuuu

SEQ ID NO: 2197128 - RNA, 15 nt, Human
auaaagagagaaaaa

SEQ ID NO: 2197129 - RNA, 19 nt, Human
auaaagaucauguaaaagu

SEQ ID NO: 2197130 - RNA, 21 nt, Human
auaaagaugagugagcaugcc

SEQ ID NO: 2197131 - RNA, 21 nt, Human
auaaagagagaaaaacaaauu

SEQ ID NO: 2197132 - RNA, 13 nt, Human
auaaagaguuaga

SEQ ID NO: 2197133 - RNA, 18 nt, Human
auaaagaucgcccccacc

SEQ ID NO: 2197134 - RNA, 19 nt, Human
auaaagaugaucuacucag

SEQ ID NO: 2197135 - RNA, 11 nt, Human
auaaagaugau

SEQ ID NO: 2197136 - RNA, 14 nt, Human
auaaagaugaucua

SEQ ID NO: 2197137 - RNA, 14 nt, Human
auaaaaaaaauagu

SEQ ID NO: 2197138 - RNA, 17 nt, Human
auaaaaaaacaaucauu

SEQ ID NO: 2197139 - RNA, 15 nt, Human
auaaaaaaaauaguu

SEQ ID NO: 2197140 - RNA, 19 nt, Human
auaaaaaaacaaucauuug

SEQ ID NO: 2197141 - RNA, 23 nt, Human
aguuugcuagcagaaaucuagaa

SEQ ID NO: 2197142 - RNA, 18 nt, Human
auaaaaaaaagaaaaaag

SEQ ID NO: 2197143 - RNA, 17 nt, Human
auaaaaaaaagaaaaaa

SEQ ID NO: 2197144 - RNA, 21 nt, Human
auaaaaaauaaucuauuucua

SEQ ID NO: 2197145 - RNA, 17 nt, Human
auaaaaaccaagaagau

SEQ ID NO: 2197146 - RNA, 12 nt, Human
auaaaaacuaaa

SEQ ID NO: 2197147 - RNA, 16 nt, Human
auaaaaacuaaauugu

SEQ ID NO: 2197148 - RNA, 22 nt, Human
auaaaaagaaaagauaaagaug

SEQ ID NO: 2197149 - RNA, 18 nt, Human
auaaaaacuaaauuguaa

SEQ ID NO: 2197150 - RNA, 20 nt, Human
auaaaaagacauucuuccaa

SEQ ID NO: 2197151 - RNA, 14 nt, Human
auaaaaagaucacu

SEQ ID NO: 2197152 - RNA, 12 nt, Human
auaaaaacaaau

SEQ ID NO: 2197153 - RNA, 11 nt, Human
auaaaaaaugg

SEQ ID NO: 2197154 - RNA, 12 nt, Human
auaaaaaaugga

SEQ ID NO: 2197155 - RNA, 12 nt, Human
auaaaaaauggu

SEQ ID NO: 2197156 - RNA, 18 nt, Human
auaaaaaauggugccuga

SEQ ID NO: 2197157 - RNA, 12 nt, Human
auaaaaauggau

SEQ ID NO: 2197158 - RNA, 18 nt, Human
auaaaaagaucacuuucu

SEQ ID NO: 2197159 - RNA, 23 nt, Human
auaaaaauauuguguugugaaug

SEQ ID NO: 2197160 - RNA, 22 nt, Human
auaaaaagaucacuuucucagu

SEQ ID NO: 2197161 - RNA, 16 nt, Human
auaaaacaggucaaua

SEQ ID NO: 2197162 - RNA, 18 nt, Human
auaaaacaggucaauaca

SEQ ID NO: 2197163 - RNA, 12 nt, Human
auaaaacaggua

SEQ ID NO: 2197164 - RNA, 15 nt, Human
auaaaaauucugaau

SEQ ID NO: 2197165 - RNA, 14 nt, Human
auaaaaauucugaa

SEQ ID NO: 2197166 - RNA, 12 nt, Human
auaaaaauguuu

SEQ ID NO: 2197167 - RNA, 15 nt, Human
auaaaagacagugaa

SEQ ID NO: 2197168 - RNA, 16 nt, Human
auaaaagacagugaaa

SEQ ID NO: 2197169 - RNA, 21 nt, Human
aguuugcagaaaagcaccugc

SEQ ID NO: 2197170 - RNA, 20 nt, Human
aguuugcagaaaagcaccug

SEQ ID NO: 2197171 - RNA, 14 nt, Human
aguuugcagaaaag

SEQ ID NO: 2197172 - RNA, 13 nt, Human
aguuugcagaaaa

SEQ ID NO: 2197173 - RNA, 11 nt, Human
aguuugcaguu

SEQ ID NO: 2197174 - RNA, 23 nt, Human
aguuugcagaaaagcaccugccg

SEQ ID NO: 2197175 - RNA, 22 nt, Human
aguuugcagaaaagcaccugcc

SEQ ID NO: 2197176 - RNA, 15 nt, Human
aguuugcauuccuga

SEQ ID NO: 2197177 - RNA, 20 nt, Human
aguuugcauuccugauauga

SEQ ID NO: 2197178 - RNA, 21 nt, Human
aguuugcccugguuucacugg

SEQ ID NO: 2197179 - RNA, 12 nt, Human
aguuugcccugg

SEQ ID NO: 2197180 - RNA, 13 nt, Human
aguuugccagaag

SEQ ID NO: 2197181 - RNA, 17 nt, Human
aguuugaggcugcagcg

SEQ ID NO: 2197182 - RNA, 14 nt, Human
aguuugaggcugca

SEQ ID NO: 2197183 - RNA, 23 nt, Human
aguuugagcugccuucccuagcu

SEQ ID NO: 2197184 - RNA, 15 nt, Human
aguuucuuagcuuuu

SEQ ID NO: 2197185 - RNA, 16 nt, Human
aguuugagcugccuuc

SEQ ID NO: 2197186 - RNA, 17 nt, Human
aguuugauauuaaagga

SEQ ID NO: 2197187 - RNA, 14 nt, Human
aguuugauuaaauu

SEQ ID NO: 2197188 - RNA, 13 nt, Human
aguuucuguucug

SEQ ID NO: 2197189 - RNA, 15 nt, Human
aguuucuguucugug

SEQ ID NO: 2197190 - RNA, 16 nt, Human
aguuucuguucugugg

SEQ ID NO: 2197191 - RNA, 17 nt, Human
aguuucuguucugugga

SEQ ID NO: 2197192 - RNA, 18 nt, Human
aguuucuguucuguggaa

SEQ ID NO: 2197193 - RNA, 19 nt, Human
aguuucuguucuguggaaa

SEQ ID NO: 2197194 - RNA, 21 nt, Human
aguuucuguucuguggaaagu

SEQ ID NO: 2197195 - RNA, 22 nt, Human
aguuucuguucuguggaaagug

SEQ ID NO: 2197196 - RNA, 23 nt, Human
aguuucuguucuguggaaagugu

SEQ ID NO: 2197197 - RNA, 14 nt, Human
aguuucuuagcuuu

SEQ ID NO: 2197198 - RNA, 16 nt, Human
aguuucuggcccuggc

SEQ ID NO: 2197199 - RNA, 17 nt, Human
aguuucuguccugcugg

SEQ ID NO: 2197200 - RNA, 17 nt, Human
aguuucugggaccucag

SEQ ID NO: 2197201 - RNA, 13 nt, Human
aguuacacauuuu

SEQ ID NO: 2197202 - RNA, 20 nt, Human
aguuacaaauugcuugaaag

SEQ ID NO: 2197203 - RNA, 16 nt, Human
aguuacacauuuuuca

SEQ ID NO: 2197204 - RNA, 19 nt, Human
aguuacacauuuuucagau

SEQ ID NO: 2197205 - RNA, 14 nt, Human
aguucauacccugu

SEQ ID NO: 2197206 - RNA, 21 nt, Human
aguuacaacuuccuaauuuua

SEQ ID NO: 2197207 - RNA, 20 nt, Human
aguucauagggucucuucag

SEQ ID NO: 2197208 - RNA, 19 nt, Human
aguucauauuccauauuua

SEQ ID NO: 2197209 - RNA, 20 nt, Human
aguucauauuccauauuuau

SEQ ID NO: 2197210 - RNA, 18 nt, Human
aguucauauguaccaugu

SEQ ID NO: 2197211 - RNA, 22 nt, Human
aguucauauguaccauguacau

SEQ ID NO: 2197212 - RNA, 22 nt, Human
aguucauccaauccucacuggg

SEQ ID NO: 2197213 - RNA, 20 nt, Human
aguucauccaauccucacug

SEQ ID NO: 2197214 - RNA, 18 nt, Human
aguucauccaauccucac

SEQ ID NO: 2197215 - RNA, 16 nt, Human
aguucauccaauccuc

SEQ ID NO: 2197216 - RNA, 17 nt, Human
aguucauccauucuauu

SEQ ID NO: 2197217 - RNA, 18 nt, Human
aguuccaccaucaagcca

SEQ ID NO: 2197218 - RNA, 21 nt, Human
aguuccaccaucaagccacca

SEQ ID NO: 2197219 - RNA, 18 nt, Human
aguugaaaaacagcugag

SEQ ID NO: 2197220 - RNA, 14 nt, Human
aguugaaaagacuc

SEQ ID NO: 2197221 - RNA, 21 nt, Human
aguucuuuguucauagcccag

SEQ ID NO: 2197222 - RNA, 22 nt, Human
aguucuuuguucauagcccagu

SEQ ID NO: 2197223 - RNA, 16 nt, Human
aguugaagacagagcu

SEQ ID NO: 2197224 - RNA, 17 nt, Human
aguugaagacagagcua

SEQ ID NO: 2197225 - RNA, 17 nt, Human
aguugaaaaacagcuga

SEQ ID NO: 2197226 - RNA, 21 nt, Human
aguucuuugggccagacaugc

SEQ ID NO: 2197227 - RNA, 19 nt, Human
aguucuuuguucauagccc

SEQ ID NO: 2197228 - RNA, 22 nt, Human
aguuccaugaagaccacaucca

SEQ ID NO: 2197229 - RNA, 19 nt, Human
aguucuuugggccagacau

SEQ ID NO: 2197230 - RNA, 14 nt, Human
aguuccacugagcu

SEQ ID NO: 2197231 - RNA, 15 nt, Human
aguuccacugagcuc

SEQ ID NO: 2197232 - RNA, 21 nt, Human
aguuccacugagcuccaugug

SEQ ID NO: 2197233 - RNA, 22 nt, Human
aguggccacuaagcagaggagg

SEQ ID NO: 2197234 - RNA, 20 nt, Human
aguggccacuaagcagagga

SEQ ID NO: 2197235 - RNA, 19 nt, Human
aguggccacuaagcagagg

SEQ ID NO: 2197236 - RNA, 14 nt, Human
aguggccacuaagc

SEQ ID NO: 2197237 - RNA, 14 nt, Human
aguggccacucagc

SEQ ID NO: 2197238 - RNA, 21 nt, Human
aguguuuggguauauucauuu

SEQ ID NO: 2197239 - RNA, 21 nt, Human
aguguuucuguuauuaacaaa

SEQ ID NO: 2197240 - RNA, 16 nt, Human
aguggcccccacagaa

SEQ ID NO: 2197241 - RNA, 15 nt, Human
aguguuucuguuauu

SEQ ID NO: 2197242 - RNA, 16 nt, Human
aguggcauuggcagca

SEQ ID NO: 2197243 - RNA, 18 nt, Human
aguggcauuggcagcagg

SEQ ID NO: 2197244 - RNA, 20 nt, Human
aguggcauuggcagcaggug

SEQ ID NO: 2197245 - RNA, 18 nt, Human
aguggcauggcuccaguc

SEQ ID NO: 2197246 - RNA, 14 nt, Human
agugcucgcuguug

SEQ ID NO: 2197247 - RNA, 15 nt, Human
aguggcauggcucca

SEQ ID NO: 2197248 - RNA, 17 nt, Human
agugcucccucacaugu

SEQ ID NO: 2197249 - RNA, 14 nt, Human
agugcucccucaca

SEQ ID NO: 2197250 - RNA, 11 nt, Human
agugcucccuc

SEQ ID NO: 2197251 - RNA, 17 nt, Human
agugcucauuucaggau

SEQ ID NO: 2197252 - RNA, 13 nt, Human
aguguuuucuggg

SEQ ID NO: 2197253 - RNA, 18 nt, Human
aguguuuuggaauaaaau

SEQ ID NO: 2197254 - RNA, 20 nt, Human
aguguuuuaagauaaauuau

SEQ ID NO: 2197255 - RNA, 23 nt, Human
aguuaaauagaguauaugcacuu

SEQ ID NO: 2197256 - RNA, 15 nt, Human
aguguuuucugggau

SEQ ID NO: 2197257 - RNA, 21 nt, Human
aguuaaauagaguauaugcac

SEQ ID NO: 2197258 - RNA, 14 nt, Human
aguuaaauuucugg

SEQ ID NO: 2197259 - RNA, 13 nt, Human
aguuaacaaugau

SEQ ID NO: 2197260 - RNA, 16 nt, Human
aguuaacaaugauaua

SEQ ID NO: 2197261 - RNA, 17 nt, Human
aguuaacaaugauauau

SEQ ID NO: 2197262 - RNA, 12 nt, Human
aguuaacagaga

SEQ ID NO: 2197263 - RNA, 20 nt, Human
aguuaacaccuuuaaagugu

SEQ ID NO: 2197264 - RNA, 13 nt, Human
aguuaacggguga

SEQ ID NO: 2197265 - RNA, 17 nt, Human
aguuaacgggugaauaa

SEQ ID NO: 2197266 - RNA, 21 nt, Human
aguuaacgggugaauaauaaa

SEQ ID NO: 2197267 - RNA, 20 nt, Human
aguuaauuacauccucaugc

SEQ ID NO: 2197268 - RNA, 16 nt, Human
aguugaagcuaagauu

SEQ ID NO: 2197269 - RNA, 19 nt, Human
aguugaaugacaacagaag

SEQ ID NO: 2197270 - RNA, 21 nt, Human
aguugaaugacaacagaagcu

SEQ ID NO: 2197271 - RNA, 17 nt, Human
aguuguuagugugucuu

SEQ ID NO: 2197272 - RNA, 22 nt, Human
aguuguuagugugucuuagugu

SEQ ID NO: 2197273 - RNA, 20 nt, Human
aguuguucaauaauaaauau

SEQ ID NO: 2197274 - RNA, 21 nt, Human
aguaaaugggggugcauuuga

SEQ ID NO: 2197275 - RNA, 20 nt, Human
aguaaaugggggugcauuug

SEQ ID NO: 2197276 - RNA, 19 nt, Human
aguaaaugggggugcauuu

SEQ ID NO: 2197277 - RNA, 19 nt, Human
aguaaauaaauuguuugac

SEQ ID NO: 2197278 - RNA, 16 nt, Human
aguaaauaaauuguuu

SEQ ID NO: 2197279 - RNA, 18 nt, Human
aguaaauaaauuguuuga

SEQ ID NO: 2197280 - RNA, 14 nt, Human
aguaaauaaauugu

SEQ ID NO: 2197281 - RNA, 15 nt, Human
aguaaauaaauuguu

SEQ ID NO: 2197282 - RNA, 19 nt, Human
aguaaagugauaauuucug

SEQ ID NO: 2197283 - RNA, 18 nt, Human
aguaaagugauaauuucu

SEQ ID NO: 2197284 - RNA, 20 nt, Human
aguaaagaaauuuaaaagac

SEQ ID NO: 2197285 - RNA, 13 nt, Human
aguaaagaaauuu

SEQ ID NO: 2197286 - RNA, 17 nt, Human
aguaaagcuaaaaugau

SEQ ID NO: 2197287 - RNA, 19 nt, Human
aguaaaggaguaagaaccu

SEQ ID NO: 2197288 - RNA, 17 nt, Human
aguaaagccguuguuua

SEQ ID NO: 2197289 - RNA, 18 nt, Human
aguaaagccguuguuuac

SEQ ID NO: 2197290 - RNA, 14 nt, Human
aguaaagcuaaaau

SEQ ID NO: 2197291 - RNA, 17 nt, Human
aguaacuuacuuaggug

SEQ ID NO: 2197292 - RNA, 19 nt, Human
aguaacuucuuauggaauu

SEQ ID NO: 2197293 - RNA, 17 nt, Human
aguaacuucuuauggaa

SEQ ID NO: 2197294 - RNA, 14 nt, Human
aguaacuuggcuuu

SEQ ID NO: 2197295 - RNA, 15 nt, Human
aguaacuuggcuuuc

SEQ ID NO: 2197296 - RNA, 18 nt, Human
aguaacuuggcuuucauu

SEQ ID NO: 2197297 - RNA, 14 nt, Human
aguaacuuuaugug

SEQ ID NO: 2197298 - RNA, 16 nt, Human
aguaacuuuaugugua

SEQ ID NO: 2197299 - RNA, 17 nt, Human
aguaacuuuauguguaa

SEQ ID NO: 2197300 - RNA, 15 nt, Human
aguaccugaaaagua

SEQ ID NO: 2197301 - RNA, 12 nt, Human
aguaagaaaaua

SEQ ID NO: 2197302 - RNA, 17 nt, Human
aguaccugaaaaaaugc

SEQ ID NO: 2197303 - RNA, 14 nt, Human
aguaccugaaaagu

SEQ ID NO: 2197304 - RNA, 20 nt, Human
aguaacuuuauguguaaaua

SEQ ID NO: 2197305 - RNA, 19 nt, Human
aguaacuuuauguguaaau

SEQ ID NO: 2197306 - RNA, 13 nt, Human
aguaagaaaagug

SEQ ID NO: 2197307 - RNA, 14 nt, Human
aguaacugacaacu

SEQ ID NO: 2197308 - RNA, 14 nt, Human
aguaacucaucugu

SEQ ID NO: 2197309 - RNA, 19 nt, Human
aguaacugccaucaagaug

SEQ ID NO: 2197310 - RNA, 23 nt, Human
aguaaccuuuugcaccugcucuc

SEQ ID NO: 2197311 - RNA, 14 nt, Human
aguaacuuaaguua

SEQ ID NO: 2197312 - RNA, 19 nt, Human
aguaacgcgucuuccugag

SEQ ID NO: 2197313 - RNA, 22 nt, Human
aguaacgcgucuuccugagugg

SEQ ID NO: 2197314 - RNA, 16 nt, Human
aguaacgcgucuuccu

SEQ ID NO: 2197315 - RNA, 12 nt, Human
aguaaccugggu

SEQ ID NO: 2197316 - RNA, 21 nt, Human
aguaaccuuuugcaccugcuc

SEQ ID NO: 2197317 - RNA, 17 nt, Human
aguaacgcgucuuccug

SEQ ID NO: 2197318 - RNA, 18 nt, Human
aguaacgcgucuuccuga

SEQ ID NO: 2197319 - RNA, 19 nt, Human
aguacuccugcaaaauuuu

SEQ ID NO: 2197320 - RNA, 18 nt, Human
aguacuccugcaaaauuu

SEQ ID NO: 2197321 - RNA, 16 nt, Human
aguacuccugcaaaau

SEQ ID NO: 2197322 - RNA, 18 nt, Human
aguacgugcuaacaggcu

SEQ ID NO: 2197323 - RNA, 13 nt, Human
aguacguuauugu

SEQ ID NO: 2197324 - RNA, 15 nt, Human
aguacguuauuguug

SEQ ID NO: 2197325 - RNA, 21 nt, Human
aguacuccugcaaaauuuuau

SEQ ID NO: 2197326 - RNA, 20 nt, Human
aguacuccugcaaaauuuua

SEQ ID NO: 2197327 - RNA, 15 nt, Human
aguacuggcauggua

SEQ ID NO: 2197328 - RNA, 15 nt, Human
aguacuggagaaaau

SEQ ID NO: 2197329 - RNA, 15 nt, Human
aguaccuuugucaca

SEQ ID NO: 2197330 - RNA, 14 nt, Human
aguaccuuugucac

SEQ ID NO: 2197331 - RNA, 13 nt, Human
aguaccuuuguca

SEQ ID NO: 2197332 - RNA, 13 nt, Human
aguacucauacau

SEQ ID NO: 2197333 - RNA, 15 nt, Human
aguaccuggaggagg

SEQ ID NO: 2197334 - RNA, 12 nt, Human
aguaccuggagg

SEQ ID NO: 2197335 - RNA, 13 nt, Human
aguaccuggagga

SEQ ID NO: 2197336 - RNA, 14 nt, Human
aguaccuggaggag

SEQ ID NO: 2197337 - RNA, 22 nt, Human
aguauaucuggacaagccaacu

SEQ ID NO: 2197338 - RNA, 13 nt, Human
aguauaucuggac

SEQ ID NO: 2197339 - RNA, 15 nt, Human
aguauaucuggacaa

SEQ ID NO: 2197340 - RNA, 16 nt, Human
aguauaucuggacaag

SEQ ID NO: 2197341 - RNA, 18 nt, Human
aguauaucuggacaagcc

SEQ ID NO: 2197342 - RNA, 22 nt, Human
aguauauugauccagaaagaaa

SEQ ID NO: 2197343 - RNA, 13 nt, Human
aguauauuuucuu

SEQ ID NO: 2197344 - RNA, 18 nt, Human
aguauauuuauagucaca

SEQ ID NO: 2197345 - RNA, 14 nt, Human
aguauauuuauagu

SEQ ID NO: 2197346 - RNA, 14 nt, Human
aguauauuauguau

SEQ ID NO: 2197347 - RNA, 15 nt, Human
aguauauuauguauu

SEQ ID NO: 2197348 - RNA, 17 nt, Human
aguauauuauguauuua

SEQ ID NO: 2197349 - RNA, 20 nt, Human
aguacuucuccacccugcuc

SEQ ID NO: 2197350 - RNA, 19 nt, Human
aguacuucuccacccugcu

SEQ ID NO: 2197351 - RNA, 21 nt, Human
aguacuucuccacccugcucu

SEQ ID NO: 2197352 - RNA, 17 nt, Human
aguacugcucuuguuuc

SEQ ID NO: 2197353 - RNA, 19 nt, Human
aguauauaaugguuucaaa

SEQ ID NO: 2197354 - RNA, 16 nt, Human
aguaaacuauuuaucu

SEQ ID NO: 2197355 - RNA, 14 nt, Human
aguaaacuauuuau

SEQ ID NO: 2197356 - RNA, 12 nt, Human
aguaaagaaauu

SEQ ID NO: 2197357 - RNA, 15 nt, Human
aguaaagaaaugaca

SEQ ID NO: 2197358 - RNA, 13 nt, Human
aguaaagaaauga

SEQ ID NO: 2197359 - RNA, 22 nt, Human
aguaaaauugccauauugcaca

SEQ ID NO: 2197360 - RNA, 23 nt, Human
aguaaaauugccauauugcacau

SEQ ID NO: 2197361 - RNA, 17 nt, Human
aguaaaauugccauauu

SEQ ID NO: 2197362 - RNA, 19 nt, Human
aguaaaauugccauauugc

SEQ ID NO: 2197363 - RNA, 20 nt, Human
aguaaaauugccauauugca

SEQ ID NO: 2197364 - RNA, 21 nt, Human
aguaaaauugccauauugcac

SEQ ID NO: 2197365 - RNA, 14 nt, Human
aguaaaauugccau

SEQ ID NO: 2197366 - RNA, 16 nt, Human
aguaaaauugccauau

SEQ ID NO: 2197367 - RNA, 20 nt, Human
aggggcauguauuggccugg

SEQ ID NO: 2197368 - RNA, 21 nt, Human
aggggcauguauuggccugga

SEQ ID NO: 2197369 - RNA, 22 nt, Human
aggggcauguauuggccuggag

SEQ ID NO: 2197370 - RNA, 23 nt, Human
aggggcauguauuggccuggagg

SEQ ID NO: 2197371 - RNA, 15 nt, Human
aggggccagaggcuc

SEQ ID NO: 2197372 - RNA, 14 nt, Human
aggggccagaggcu

SEQ ID NO: 2197373 - RNA, 13 nt, Human
aggggccagaggc

SEQ ID NO: 2197374 - RNA, 12 nt, Human
aggggccagagg

SEQ ID NO: 2197375 - RNA, 17 nt, Human
aggggccagaggcucgu

SEQ ID NO: 2197376 - RNA, 22 nt, Human
aggggccagaggaacuguccag

SEQ ID NO: 2197377 - RNA, 14 nt, Human
aguccucugaauga

SEQ ID NO: 2197378 - RNA, 21 nt, Human
aguccucuccaccuaguggcu

SEQ ID NO: 2197379 - RNA, 22 nt, Human
aguccucuggauggcaccagag

SEQ ID NO: 2197380 - RNA, 12 nt, Human
aguccucugaau

SEQ ID NO: 2197381 - RNA, 14 nt, Human
aguccucuccaccu

SEQ ID NO: 2197382 - RNA, 19 nt, Human
aguccucuccaccuagugg

SEQ ID NO: 2197383 - RNA, 21 nt, Human
aguccucguagccaucucucu

SEQ ID NO: 2197384 - RNA, 23 nt, Human
aguccuccccucacagccucuga

SEQ ID NO: 2197385 - RNA, 13 nt, Human
aguccucuccacc

SEQ ID NO: 2197386 - RNA, 17 nt, Human
aguccucguagccaucu

SEQ ID NO: 2197387 - RNA, 15 nt, Human
aguccucguagccau

SEQ ID NO: 2197388 - RNA, 19 nt, Human
agucauuuuaacuuuauca

SEQ ID NO: 2197389 - RNA, 21 nt, Human
agucauuuuaacuuuaucaca

SEQ ID NO: 2197390 - RNA, 19 nt, Human
agucauuugcugagcaugu

SEQ ID NO: 2197391 - RNA, 22 nt, Human
agucauuugcugagcauguacu

SEQ ID NO: 2197392 - RNA, 20 nt, Human
aguccuccccucacagccuc

SEQ ID NO: 2197393 - RNA, 21 nt, Human
aguccuccccucacagccucu

SEQ ID NO: 2197394 - RNA, 22 nt, Human
aguccuccccucacagccucug

SEQ ID NO: 2197395 - RNA, 14 nt, Human
aguccucuuuucug

SEQ ID NO: 2197396 - RNA, 22 nt, Human
aguccugugaaugccacugccu

SEQ ID NO: 2197397 - RNA, 20 nt, Human
aguccucuggguaggaauca

SEQ ID NO: 2197398 - RNA, 21 nt, Human
aguccugugaaugccacugcc

SEQ ID NO: 2197399 - RNA, 13 nt, Human
aguccugugaauu

SEQ ID NO: 2197400 - RNA, 14 nt, Human
aguccugugaauuu

SEQ ID NO: 2197401 - RNA, 23 nt, Human
aguccugugaauuucuucacugu

SEQ ID NO: 2197402 - RNA, 16 nt, Human
aguccuuaccagcaga

SEQ ID NO: 2197403 - RNA, 18 nt, Human
aguccuuaccagcagagc

SEQ ID NO: 2197404 - RNA, 13 nt, Human
agucauuuaauaa

SEQ ID NO: 2197405 - RNA, 23 nt, Human
agucugucaugaacauguuccug

SEQ ID NO: 2197406 - RNA, 15 nt, Human
agucugguuucuaga

SEQ ID NO: 2197407 - RNA, 13 nt, Human
agucugucaugaa

SEQ ID NO: 2197408 - RNA, 20 nt, Human
agucugguuucuagacuugu

SEQ ID NO: 2197409 - RNA, 17 nt, Human
agucuggugggaggacg

SEQ ID NO: 2197410 - RNA, 15 nt, Human
agucuggugaagcuc

SEQ ID NO: 2197411 - RNA, 17 nt, Human
agucuggcugagcccug

SEQ ID NO: 2197412 - RNA, 14 nt, Human
agucugggcugccg

SEQ ID NO: 2197413 - RNA, 16 nt, Human
agucugggcugccggg

SEQ ID NO: 2197414 - RNA, 17 nt, Human
agucugucucaaaagaa

SEQ ID NO: 2197415 - RNA, 14 nt, Human
agucugucucuguc

SEQ ID NO: 2197416 - RNA, 15 nt, Human
agucugucucuguca

SEQ ID NO: 2197417 - RNA, 18 nt, Human
agucugucucugucaugg

SEQ ID NO: 2197418 - RNA, 18 nt, Human
agucugugagauucauuc

SEQ ID NO: 2197419 - RNA, 13 nt, Human
agugaauaaaugu

SEQ ID NO: 2197420 - RNA, 22 nt, Human
agucuggaggggcauggccagc

SEQ ID NO: 2197421 - RNA, 15 nt, Human
agucugcaagauucu

SEQ ID NO: 2197422 - RNA, 23 nt, Human
agucugcacaugcagcugcaccc

SEQ ID NO: 2197423 - RNA, 15 nt, Human
agucuggaucuggga

SEQ ID NO: 2197424 - RNA, 13 nt, Human
agucuggaggggc

SEQ ID NO: 2197425 - RNA, 17 nt, Human
agucuggaucugggacc

SEQ ID NO: 2197426 - RNA, 15 nt, Human
agucuggccaacauc

SEQ ID NO: 2197427 - RNA, 18 nt, Human
agucuggcccuuccuuuu

SEQ ID NO: 2197428 - RNA, 21 nt, Human
agucugauucccaagcucugc

SEQ ID NO: 2197429 - RNA, 22 nt, Human
agucugauucccaagcucugcu

SEQ ID NO: 2197430 - RNA, 20 nt, Human
agucugauucccaagcucug

SEQ ID NO: 2197431 - RNA, 19 nt, Human
agucgauagagcuguauua

SEQ ID NO: 2197432 - RNA, 15 nt, Human
agucgaugaacuauu

SEQ ID NO: 2197433 - RNA, 13 nt, Human
agucugcaaaaug

SEQ ID NO: 2197434 - RNA, 22 nt, Human
agucugcaaaaugaggaaugua

SEQ ID NO: 2197435 - RNA, 23 nt, Human
agucugcaacuuuaagcagcucu

SEQ ID NO: 2197436 - RNA, 18 nt, Human
aguccuugcaagaaucag

SEQ ID NO: 2197437 - RNA, 12 nt, Human
aguccuugcuug

SEQ ID NO: 2197438 - RNA, 16 nt, Human
aguccugugaauuucu

SEQ ID NO: 2197439 - RNA, 17 nt, Human
aguccuuaaacagggca

SEQ ID NO: 2197440 - RNA, 18 nt, Human
aguccuuaaacagggcau

SEQ ID NO: 2197441 - RNA, 14 nt, Human
aguccuuuaugugg

SEQ ID NO: 2197442 - RNA, 13 nt, Human
aguccuugcuugg

SEQ ID NO: 2197443 - RNA, 18 nt, Human
aguccuugcuuggcugcu

SEQ ID NO: 2197444 - RNA, 16 nt, Human
agucgaggacagggag

SEQ ID NO: 2197445 - RNA, 17 nt, Human
aguccuuuauguggaaa

SEQ ID NO: 2197446 - RNA, 16 nt, Human
aguccuuuuuuuccau

SEQ ID NO: 2197447 - RNA, 21 nt, Human
aguccuuuuuuuccaucuuua

SEQ ID NO: 2197448 - RNA, 18 nt, Human
agucgaauuaauagcuuu

SEQ ID NO: 2197449 - RNA, 21 nt, Human
agucgaauuaauagcuuuuau

SEQ ID NO: 2197450 - RNA, 19 nt, Human
aguauauuuucuuuuccuc

SEQ ID NO: 2197451 - RNA, 18 nt, Human
aguauauuuucuuuuccu

SEQ ID NO: 2197452 - RNA, 15 nt, Human
aguaucaaauauuag

SEQ ID NO: 2197453 - RNA, 19 nt, Human
aguaucaaauauuagaugu

SEQ ID NO: 2197454 - RNA, 21 nt, Human
aguaucaaauauuagauguga

SEQ ID NO: 2197455 - RNA, 22 nt, Human
aguaucaaauauuagaugugau

SEQ ID NO: 2197456 - RNA, 23 nt, Human
aguaucaaauauuagaugugauu

SEQ ID NO: 2197457 - RNA, 22 nt, Human
aguaucacugucuuuccuagau

SEQ ID NO: 2197458 - RNA, 17 nt, Human
aguaucacugucuuucc

SEQ ID NO: 2197459 - RNA, 13 nt, Human
aguaucacugucu

SEQ ID NO: 2197460 - RNA, 19 nt, Human
aguaucaauccuuguucag

SEQ ID NO: 2197461 - RNA, 15 nt, Human
aguaucaggccugcc

SEQ ID NO: 2197462 - RNA, 15 nt, Human
aguaucaggucuccc

SEQ ID NO: 2197463 - RNA, 13 nt, Human
aguaucaugaagc

SEQ ID NO: 2197464 - RNA, 18 nt, Human
aguaucaggucucccacg

SEQ ID NO: 2197465 - RNA, 15 nt, Human
aguaucaugcccugu

SEQ ID NO: 2197466 - RNA, 11 nt, Human
aguaucaugca

SEQ ID NO: 2197467 - RNA, 12 nt, Human
aguaucaugcau

SEQ ID NO: 2197468 - RNA, 19 nt, Human
aguaucaugcccugugcaa

SEQ ID NO: 2197469 - RNA, 14 nt, Human
aguaucaugcauuc

SEQ ID NO: 2197470 - RNA, 14 nt, Human
agugaauaaauguc

SEQ ID NO: 2197471 - RNA, 17 nt, Human
agugaauaaaugucuug

SEQ ID NO: 2197472 - RNA, 23 nt, Human
agugaaucuaaaagcuuuugcuu

SEQ ID NO: 2197473 - RNA, 13 nt, Human
agugaaugauuca

SEQ ID NO: 2197474 - RNA, 13 nt, Human
agugaaugaaaca

SEQ ID NO: 2197475 - RNA, 14 nt, Human
agugacagaggcag

SEQ ID NO: 2197476 - RNA, 19 nt, Human
agugaaugauucaguguua

SEQ ID NO: 2197477 - RNA, 18 nt, Human
agugaaugcucaaguuuu

SEQ ID NO: 2197478 - RNA, 17 nt, Human
agugaaugauucagugu

SEQ ID NO: 2197479 - RNA, 16 nt, Human
agugaaugauucagug

SEQ ID NO: 2197480 - RNA, 15 nt, Human
agugacagaguucac

SEQ ID NO: 2197481 - RNA, 14 nt, Human
agugaaugcuggga

SEQ ID NO: 2197482 - RNA, 19 nt, Human
agugacagaguucacuaua

SEQ ID NO: 2197483 - RNA, 16 nt, Human
agugacagaggcagcc

SEQ ID NO: 2197484 - RNA, 19 nt, Human
agugacagaggcagcccca

SEQ ID NO: 2197485 - RNA, 19 nt, Human
agugauucuccugccucag

SEQ ID NO: 2197486 - RNA, 18 nt, Human
agugauucuccugccuca

SEQ ID NO: 2197487 - RNA, 20 nt, Human
agugauucuccugccucagc

SEQ ID NO: 2197488 - RNA, 18 nt, Human
agugccuuauggaacacu

SEQ ID NO: 2197489 - RNA, 19 nt, Human
agugccuuauggaacacuc

SEQ ID NO: 2197490 - RNA, 20 nt, Human
agugccuuauggaacacucu

SEQ ID NO: 2197491 - RNA, 21 nt, Human
agugccuuauggaacacucug

SEQ ID NO: 2197492 - RNA, 22 nt, Human
agugccuuauggaacacucuga

SEQ ID NO: 2197493 - RNA, 15 nt, Human
agugccuuccauaau

SEQ ID NO: 2197494 - RNA, 13 nt, Human
agugccuuccaua

SEQ ID NO: 2197495 - RNA, 18 nt, Human
agugccuucaauaaaugg

SEQ ID NO: 2197496 - RNA, 20 nt, Human
agugccuucaauaaauggua

SEQ ID NO: 2197497 - RNA, 16 nt, Human
agugccuuccauaauu

SEQ ID NO: 2197498 - RNA, 16 nt, Human
agugccuucuaaaggu

SEQ ID NO: 2197499 - RNA, 19 nt, Human
agugccuuccuguuuuuca

SEQ ID NO: 2197500 - RNA, 21 nt, Human
agugccuuggggaauuuccuc

SEQ ID NO: 2197501 - RNA, 22 nt, Human
agugccuuggggaauuuccucu

SEQ ID NO: 2197502 - RNA, 17 nt, Human
agugcgauucuggauaa

SEQ ID NO: 2197503 - RNA, 17 nt, Human
agugcgaguauguguuu

SEQ ID NO: 2197504 - RNA, 14 nt, Human
agugcgaguaugug

SEQ ID NO: 2197505 - RNA, 15 nt, Human
agugcgaguaugugu

SEQ ID NO: 2197506 - RNA, 14 nt, Human
agugcgugcucagu

SEQ ID NO: 2197507 - RNA, 15 nt, Human
agugcguccacgagc

SEQ ID NO: 2197508 - RNA, 13 nt, Human
agugcguguguag

SEQ ID NO: 2197509 - RNA, 16 nt, Human
agugcguguguagagu

SEQ ID NO: 2197510 - RNA, 18 nt, Human
agugcguguguagaguua

SEQ ID NO: 2197511 - RNA, 22 nt, Human
agugcguguguagaguuaagaa

SEQ ID NO: 2197512 - RNA, 14 nt, Human
agugcuaaaaaugg

SEQ ID NO: 2197513 - RNA, 16 nt, Human
agugcuaaaaauggga

SEQ ID NO: 2197514 - RNA, 20 nt, Human
agugcuaaaaaugggacuuc

SEQ ID NO: 2197515 - RNA, 13 nt, Human
agugcuaagugug

SEQ ID NO: 2197516 - RNA, 19 nt, Human
agugauccucccaccucag

SEQ ID NO: 2197517 - RNA, 20 nt, Human
agugauccucccaccucagc

SEQ ID NO: 2197518 - RNA, 22 nt, Human
agugauccucccaccucagccu

SEQ ID NO: 2197519 - RNA, 23 nt, Human
agugauccucccaccucagccuc

SEQ ID NO: 2197520 - RNA, 20 nt, Human
agugauggguuaguggaugg

SEQ ID NO: 2197521 - RNA, 19 nt, Human
agugaugucacuagggcag

SEQ ID NO: 2197522 - RNA, 16 nt, Human
agugauguaccaugaa

SEQ ID NO: 2197523 - RNA, 13 nt, Human
agugauuaccagg

SEQ ID NO: 2197524 - RNA, 14 nt, Human
caauaucagacuuu

SEQ ID NO: 2197525 - RNA, 21 nt, Human
caagugcuggcaccaccaggc

SEQ ID NO: 2197526 - RNA, 13 nt, Human
caauaucagugcu

SEQ ID NO: 2197527 - RNA, 16 nt, Human
caagugccugcuuuua

SEQ ID NO: 2197528 - RNA, 14 nt, Human
caagugcugaacag

SEQ ID NO: 2197529 - RNA, 16 nt, Human
caagugcugaacagug

SEQ ID NO: 2197530 - RNA, 17 nt, Human
caagugcugaacagugg

SEQ ID NO: 2197531 - RNA, 20 nt, Human
caagugcugaacaguggagg

SEQ ID NO: 2197532 - RNA, 18 nt, Human
caagugcugaacagugga

SEQ ID NO: 2197533 - RNA, 13 nt, Human
caagugccuuaau

SEQ ID NO: 2197534 - RNA, 12 nt, Human
caagugcuggca

SEQ ID NO: 2197535 - RNA, 13 nt, Human
caauauuauaauu

SEQ ID NO: 2197536 - RNA, 17 nt, Human
caauauuaaugccuuua

SEQ ID NO: 2197537 - RNA, 23 nt, Human
caauauuaaugccuuuaaaguau

SEQ ID NO: 2197538 - RNA, 15 nt, Human
caauauuaaaucugc

SEQ ID NO: 2197539 - RNA, 23 nt, Human
caauauuaaauacagacacuaag

SEQ ID NO: 2197540 - RNA, 14 nt, Human
caauauuaaaucug

SEQ ID NO: 2197541 - RNA, 20 nt, Human
caauaucaguuauuuuuuga

SEQ ID NO: 2197542 - RNA, 23 nt, Human
caauauuauacuaagaaaagaua

SEQ ID NO: 2197543 - RNA, 22 nt, Human
caauauuauacuaagaaaagau

SEQ ID NO: 2197544 - RNA, 13 nt, Human
caauauucaaaug

SEQ ID NO: 2197545 - RNA, 15 nt, Human
caauauucaaaugcg

SEQ ID NO: 2197546 - RNA, 21 nt, Human
caauauuauacuaagaaaaga

SEQ ID NO: 2197547 - RNA, 19 nt, Human
caauauuauacuaagaaaa

SEQ ID NO: 2197548 - RNA, 18 nt, Human
caauauuauacuaagaaa

SEQ ID NO: 2197549 - RNA, 14 nt, Human
caauauuauacuaa

SEQ ID NO: 2197550 - RNA, 14 nt, Human
caauauuauaauuu

SEQ ID NO: 2197551 - RNA, 22 nt, Human
caauauuauaauuuuuuucaau

SEQ ID NO: 2197552 - RNA, 18 nt, Human
caauccugugggugaaga

SEQ ID NO: 2197553 - RNA, 17 nt, Human
caauccugucuuucuga

SEQ ID NO: 2197554 - RNA, 13 nt, Human
caauauuccugaa

SEQ ID NO: 2197555 - RNA, 20 nt, Human
caaucucaaauucucaaccu

SEQ ID NO: 2197556 - RNA, 21 nt, Human
caaucucaaauucucaaccua

SEQ ID NO: 2197557 - RNA, 22 nt, Human
caaucuauuaauagcugccuua

SEQ ID NO: 2197558 - RNA, 15 nt, Human
caaucuaaccacauc

SEQ ID NO: 2197559 - RNA, 20 nt, Human
caaucuaaccacaucaauau

SEQ ID NO: 2197560 - RNA, 20 nt, Human
caaucuauuaauagcugccu

SEQ ID NO: 2197561 - RNA, 14 nt, Human
caauccuuguucag

SEQ ID NO: 2197562 - RNA, 19 nt, Human
caaucgacuggguuuaugu

SEQ ID NO: 2197563 - RNA, 20 nt, Human
caaucgacuggguuuauguc

SEQ ID NO: 2197564 - RNA, 17 nt, Human
caaucucccgcugcugc

SEQ ID NO: 2197565 - RNA, 18 nt, Human
caaucucggcucacugca

SEQ ID NO: 2197566 - RNA, 13 nt, Human
caaugauggucac

SEQ ID NO: 2197567 - RNA, 21 nt, Human
caaugauggcaauuuuguaac

SEQ ID NO: 2197568 - RNA, 24 nt, Human
caaugauggcaauuuuguaacgaa

SEQ ID NO: 2197569 - RNA, 13 nt, Human
caaugaaaugaau

SEQ ID NO: 2197570 - RNA, 15 nt, Human
caaugaccuuucaau

SEQ ID NO: 2197571 - RNA, 16 nt, Human
caaugaccuuucaaua

SEQ ID NO: 2197572 - RNA, 17 nt, Human
caaugaaaguuugcacu

SEQ ID NO: 2197573 - RNA, 15 nt, Human
caaugaaaaaaugua

SEQ ID NO: 2197574 - RNA, 13 nt, Human
caaugaccuuuca

SEQ ID NO: 2197575 - RNA, 11 nt, Human
caaugaaauga

SEQ ID NO: 2197576 - RNA, 22 nt, Human
caaugaaauacacaaguaaaca

SEQ ID NO: 2197577 - RNA, 23 nt, Human
caaugaaauacacaaguaaacau

SEQ ID NO: 2197578 - RNA, 14 nt, Human
caaugaccuuucaa

SEQ ID NO: 2197579 - RNA, 15 nt, Human
caaugauuguuaauu

SEQ ID NO: 2197580 - RNA, 14 nt, Human
caaugauguccaga

SEQ ID NO: 2197581 - RNA, 14 nt, Human
caaugcaaaccauc

SEQ ID NO: 2197582 - RNA, 14 nt, Human
caaugauggucacc

SEQ ID NO: 2197583 - RNA, 21 nt, Human
caaugcaaaccaucauugaaa

SEQ ID NO: 2197584 - RNA, 22 nt, Human
caaugcaaaccaucauugaaau

SEQ ID NO: 2197585 - RNA, 22 nt, Human
caaugauuguuaauuuacagcu

SEQ ID NO: 2197586 - RNA, 23 nt, Human
caaugcaaaccaucauugaaauc

SEQ ID NO: 2197587 - RNA, 14 nt, Human
caaugcacugacau

SEQ ID NO: 2197588 - RNA, 13 nt, Human
caaugcacuuugu

SEQ ID NO: 2197589 - RNA, 12 nt, Human
cacaaauaaaau

SEQ ID NO: 2197590 - RNA, 10 nt, Human
cacaaauaaa

SEQ ID NO: 2197591 - RNA, 16 nt, Human
cacaaagguauaauuu

SEQ ID NO: 2197592 - RNA, 13 nt, Human
cacaaacuguaaa

SEQ ID NO: 2197593 - RNA, 17 nt, Human
cacaaagguagcuuuuc

SEQ ID NO: 2197594 - RNA, 21 nt, Human
cacaaauauuuauuuucuuuc

SEQ ID NO: 2197595 - RNA, 13 nt, Human
cacaaauauuuau

SEQ ID NO: 2197596 - RNA, 23 nt, Human
cacaaauauuuauuuucuuucug

SEQ ID NO: 2197597 - RNA, 13 nt, Human
cacaagaaaugaa

SEQ ID NO: 2197598 - RNA, 15 nt, Human
cacaagaaaugaaag

SEQ ID NO: 2197599 - RNA, 20 nt, Human
cacaacuuguuuuugguuuu

SEQ ID NO: 2197600 - RNA, 12 nt, Human
cacaacuuguuu

SEQ ID NO: 2197601 - RNA, 19 nt, Human
cacaaggcugaccaagaga

SEQ ID NO: 2197602 - RNA, 18 nt, Human
cacaaggcugaccaagag

SEQ ID NO: 2197603 - RNA, 14 nt, Human
cacaaggcugacca

SEQ ID NO: 2197604 - RNA, 15 nt, Human
cacaaggccaucugg

SEQ ID NO: 2197605 - RNA, 23 nt, Human
cacaagacccaaaaggcagaagc

SEQ ID NO: 2197606 - RNA, 23 nt, Human
cacaagaaaugaaagcagggacu

SEQ ID NO: 2197607 - RNA, 19 nt, Human
cacaagaagaccagacugu

SEQ ID NO: 2197608 - RNA, 12 nt, Human
cacaagaaauuu

SEQ ID NO: 2197609 - RNA, 14 nt, Human
cacaagaaauuuga

SEQ ID NO: 2197610 - RNA, 20 nt, Human
cacaagaaauuugauuucua

SEQ ID NO: 2197611 - RNA, 16 nt, Human
cacaagugaaaaacau

SEQ ID NO: 2197612 - RNA, 12 nt, Human
cacaagugaaaa

SEQ ID NO: 2197613 - RNA, 21 nt, Human
cacaaggcugaccaagagaga

SEQ ID NO: 2197614 - RNA, 16 nt, Human
cacaaguccugugaau

SEQ ID NO: 2197615 - RNA, 20 nt, Human
cacaaguccugugaauuucu

SEQ ID NO: 2197616 - RNA, 13 nt, Human
cacaaguaaacau

SEQ ID NO: 2197617 - RNA, 17 nt, Human
cacaaggugcaaaucaa

SEQ ID NO: 2197618 - RNA, 16 nt, Human
cacaaggcuguugcau

SEQ ID NO: 2197619 - RNA, 22 nt, Human
cacaagugccacugcccgagcu

SEQ ID NO: 2197620 - RNA, 13 nt, Human
cacaagugguggu

SEQ ID NO: 2197621 - RNA, 23 nt, Human
cacaauccuaacacauuaucggg

SEQ ID NO: 2197622 - RNA, 22 nt, Human
cacaauccuaacacauuaucgg

SEQ ID NO: 2197623 - RNA, 20 nt, Human
cacaauccuaacacauuauc

SEQ ID NO: 2197624 - RNA, 19 nt, Human
cacaaucucggcucacugc

SEQ ID NO: 2197625 - RNA, 13 nt, Human
caaugguuugcaa

SEQ ID NO: 2197626 - RNA, 16 nt, Human
caaugguuugcaagga

SEQ ID NO: 2197627 - RNA, 17 nt, Human
caaugguuugcaaggaa

SEQ ID NO: 2197628 - RNA, 18 nt, Human
caaugguuugcaaggaag

SEQ ID NO: 2197629 - RNA, 18 nt, Human
caaugguuuucuugugug

SEQ ID NO: 2197630 - RNA, 14 nt, Human
caaugcacuuuguu

SEQ ID NO: 2197631 - RNA, 16 nt, Human
caaugcacacaaaaca

SEQ ID NO: 2197632 - RNA, 22 nt, Human
caaugcacacaaaacaacccua

SEQ ID NO: 2197633 - RNA, 19 nt, Human
caaugguuugcaaggaagc

SEQ ID NO: 2197634 - RNA, 20 nt, Human
caaugguuugcaaggaagcc

SEQ ID NO: 2197635 - RNA, 16 nt, Human
caauuagggccuagcc

SEQ ID NO: 2197636 - RNA, 23 nt, Human
caauuauaucaguccucuuucaa

SEQ ID NO: 2197637 - RNA, 13 nt, Human
caauuauguuaaa

SEQ ID NO: 2197638 - RNA, 15 nt, Human
caauuauguuaaacu

SEQ ID NO: 2197639 - RNA, 12 nt, Human
caauuuuguaac

SEQ ID NO: 2197640 - RNA, 13 nt, Human
caauuauuuuuac

SEQ ID NO: 2197641 - RNA, 20 nt, Human
caauuuucuggaauacauga

SEQ ID NO: 2197642 - RNA, 18 nt, Human
caauuuugcaugcucgau

SEQ ID NO: 2197643 - RNA, 11 nt, Human
caauuuuguaa

SEQ ID NO: 2197644 - RNA, 17 nt, Human
cacaaacgggcucagca

SEQ ID NO: 2197645 - RNA, 12 nt, Human
cacaaacuguaa

SEQ ID NO: 2197646 - RNA, 15 nt, Human
cacaaaccugccugg

SEQ ID NO: 2197647 - RNA, 22 nt, Human
cacaaacguauguaaauguaua

SEQ ID NO: 2197648 - RNA, 23 nt, Human
cacaaacguuuacuuaucuuaug

SEQ ID NO: 2197649 - RNA, 13 nt, Human
cacaaacucacca

SEQ ID NO: 2197650 - RNA, 15 nt, Human
cacaaaccaugcaaa

SEQ ID NO: 2197651 - RNA, 14 nt, Human
caauuuuucugcac

SEQ ID NO: 2197652 - RNA, 13 nt, Human
cacaaaccugccu

SEQ ID NO: 2197653 - RNA, 17 nt, Human
cacaaaccugccugggu

SEQ ID NO: 2197654 - RNA, 11 nt, Human
caauuuuucca

SEQ ID NO: 2197655 - RNA, 13 nt, Human
caauuuuucugca

SEQ ID NO: 2197656 - RNA, 18 nt, Human
caauuuuucugcacugag

SEQ ID NO: 2197657 - RNA, 19 nt, Human
cacacagcaagucaggguu

SEQ ID NO: 2197658 - RNA, 15 nt, Human
cacacagcagcaguu

SEQ ID NO: 2197659 - RNA, 22 nt, Human
cacacagauuugagcucagccc

SEQ ID NO: 2197660 - RNA, 13 nt, Human
cacacagcucugu

SEQ ID NO: 2197661 - RNA, 14 nt, Human
cacacagcucuguc

SEQ ID NO: 2197662 - RNA, 15 nt, Human
cacacagcucugucc

SEQ ID NO: 2197663 - RNA, 20 nt, Human
cacaccaggcugugggccuc

SEQ ID NO: 2197664 - RNA, 13 nt, Human
cacaccaggcugu

SEQ ID NO: 2197665 - RNA, 23 nt, Human
cacaccaggccguccucccgggc

SEQ ID NO: 2197666 - RNA, 15 nt, Human
cacacagaguggucu

SEQ ID NO: 2197667 - RNA, 12 nt, Human
cacaccagccau

SEQ ID NO: 2197668 - RNA, 22 nt, Human
cacaccaggccguccucccggg

SEQ ID NO: 2197669 - RNA, 21 nt, Human
cacaccagagcccaccuuggc

SEQ ID NO: 2197670 - RNA, 22 nt, Human
cacaccagagcccaccuuggcu

SEQ ID NO: 2197671 - RNA, 19 nt, Human
cacaccaggcugugggccu

SEQ ID NO: 2197672 - RNA, 12 nt, Human
cacacccagccu

SEQ ID NO: 2197673 - RNA, 17 nt, Human
cacaccaggcugugggc

SEQ ID NO: 2197674 - RNA, 14 nt, Human
cacaccaggcugug

SEQ ID NO: 2197675 - RNA, 13 nt, Human
cacacccagccuc

SEQ ID NO: 2197676 - RNA, 14 nt, Human
cacacccagccuca

SEQ ID NO: 2197677 - RNA, 15 nt, Human
cacacccagccucag

SEQ ID NO: 2197678 - RNA, 16 nt, Human
cacacccagccucagu

SEQ ID NO: 2197679 - RNA, 14 nt, Human
cacacccagcuacu

SEQ ID NO: 2197680 - RNA, 18 nt, Human
cacacccagccucagucc

SEQ ID NO: 2197681 - RNA, 19 nt, Human
cacacccagccucaguccu

SEQ ID NO: 2197682 - RNA, 20 nt, Human
cacaccguguaaaccaaagc

SEQ ID NO: 2197683 - RNA, 16 nt, Human
cacaccuaagggacau

SEQ ID NO: 2197684 - RNA, 14 nt, Human
cacacccagcccac

SEQ ID NO: 2197685 - RNA, 20 nt, Human
cacacccagcccacuucugc

SEQ ID NO: 2197686 - RNA, 21 nt, Human
cacaccucaguucccuuggcc

SEQ ID NO: 2197687 - RNA, 20 nt, Human
cacaccucaguucccuuggc

SEQ ID NO: 2197688 - RNA, 18 nt, Human
cacaccucaguucccuug

SEQ ID NO: 2197689 - RNA, 17 nt, Human
cacaccucaguucccuu

SEQ ID NO: 2197690 - RNA, 13 nt, Human
cacaccucaguuc

SEQ ID NO: 2197691 - RNA, 23 nt, Human
cacaccuaagggacauguuuuga

SEQ ID NO: 2197692 - RNA, 15 nt, Human
cacaccucagaggcu

SEQ ID NO: 2197693 - RNA, 14 nt, Human
cacaccuagcguca

SEQ ID NO: 2197694 - RNA, 22 nt, Human
cacaccucaguucccuuggccu

SEQ ID NO: 2197695 - RNA, 12 nt, Human
cacaccuccaca

SEQ ID NO: 2197696 - RNA, 13 nt, Human
cacaccuccacag

SEQ ID NO: 2197697 - RNA, 16 nt, Human
cacaccucccugaacc

SEQ ID NO: 2197698 - RNA, 14 nt, Human
cacaccucccugaa

SEQ ID NO: 2197699 - RNA, 17 nt, Human
cacaccucccugaacca

SEQ ID NO: 2197700 - RNA, 23 nt, Human
cacacgcacacacacacacagga

SEQ ID NO: 2197701 - RNA, 16 nt, Human
cacacgcacacacaca

SEQ ID NO: 2197702 - RNA, 18 nt, Human
cacacaagaagaagggca

SEQ ID NO: 2197703 - RNA, 16 nt, Human
cacacaagaagaaggg

SEQ ID NO: 2197704 - RNA, 19 nt, Human
cacacaaggauagaugcug

SEQ ID NO: 2197705 - RNA, 24 nt, Human
cacaaucucggcucacugcauccu

SEQ ID NO: 2197706 - RNA, 23 nt, Human
cacaaucucggcucacugcaucc

SEQ ID NO: 2197707 - RNA, 22 nt, Human
cacaaucucggcucacugcauc

SEQ ID NO: 2197708 - RNA, 20 nt, Human
cacaaucucggcucacugca

SEQ ID NO: 2197709 - RNA, 15 nt, Human
cacacaccagagccc

SEQ ID NO: 2197710 - RNA, 16 nt, Human
cacacaccagagccca

SEQ ID NO: 2197711 - RNA, 20 nt, Human
cacacaccagagcccaccuu

SEQ ID NO: 2197712 - RNA, 13 nt, Human
cacacaccccaau

SEQ ID NO: 2197713 - RNA, 12 nt, Human
cacacacacaca

SEQ ID NO: 2197714 - RNA, 11 nt, Human
cacacacacac

SEQ ID NO: 2197715 - RNA, 14 nt, Human
cacacacugaugcu

SEQ ID NO: 2197716 - RNA, 20 nt, Human
cacacacucgcccgcccacu

SEQ ID NO: 2197717 - RNA, 21 nt, Human
cacacacucgcccgcccacug

SEQ ID NO: 2197718 - RNA, 14 nt, Human
cacacacuuuggcu

SEQ ID NO: 2197719 - RNA, 12 nt, Human
cacacacuuuug

SEQ ID NO: 2197720 - RNA, 22 nt, Human
cacacacugugcuuucuauugu

SEQ ID NO: 2197721 - RNA, 23 nt, Human
cacacacugugcuuucuauugua

SEQ ID NO: 2197722 - RNA, 12 nt, Human
cacacagaaaau

SEQ ID NO: 2197723 - RNA, 11 nt, Human
cacacagaaaa

SEQ ID NO: 2197724 - RNA, 21 nt, Human
cacacagaggcugccucuccc

SEQ ID NO: 2197725 - RNA, 16 nt, Human
cacacagaaaauauac

SEQ ID NO: 2197726 - RNA, 15 nt, Human
cacacagaaaauaua

SEQ ID NO: 2197727 - RNA, 14 nt, Human
cacacagaaaauau

SEQ ID NO: 2197728 - RNA, 13 nt, Human
cacacagaaaaua

SEQ ID NO: 2197729 - RNA, 20 nt, Human
cacacagaguggucuuucug

SEQ ID NO: 2197730 - RNA, 14 nt, Human
cacacagagugguc

SEQ ID NO: 2197731 - RNA, 19 nt, Human
cacacagaaaauauacugu

SEQ ID NO: 2197732 - RNA, 18 nt, Human
cacacagaaaauauacug

SEQ ID NO: 2197733 - RNA, 17 nt, Human
cacacagaaaauauacu

SEQ ID NO: 2197734 - RNA, 20 nt, Human
cacacagauuugagcucagc

SEQ ID NO: 2197735 - RNA, 18 nt, Human
cacacagauuugagcuca

SEQ ID NO: 2197736 - RNA, 13 nt, Human
cacacacacacaa

SEQ ID NO: 2197737 - RNA, 21 nt, Human
cacacuaaccuggguucccuu

SEQ ID NO: 2197738 - RNA, 15 nt, Human
caccacagacacaca

SEQ ID NO: 2197739 - RNA, 14 nt, Human
caaccucauugaca

SEQ ID NO: 2197740 - RNA, 22 nt, Human
caaccuaccaccccuuccuguc

SEQ ID NO: 2197741 - RNA, 18 nt, Human
caaccucaacugccuacu

SEQ ID NO: 2197742 - RNA, 18 nt, Human
caaccuaaccccuuuccu

SEQ ID NO: 2197743 - RNA, 13 nt, Human
caaccuaaauuug

SEQ ID NO: 2197744 - RNA, 18 nt, Human
caaccuaccaccccuucc

SEQ ID NO: 2197745 - RNA, 20 nt, Human
caaccuaccaccccuuccug

SEQ ID NO: 2197746 - RNA, 21 nt, Human
caaccuaccaccccuuccugu

SEQ ID NO: 2197747 - RNA, 16 nt, Human
caacauacucccaucu

SEQ ID NO: 2197748 - RNA, 14 nt, Human
caacaguuccuuca

SEQ ID NO: 2197749 - RNA, 20 nt, Human
caacaguguuaggccuggca

SEQ ID NO: 2197750 - RNA, 22 nt, Human
caacaguguuaggccuggcaca

SEQ ID NO: 2197751 - RNA, 23 nt, Human
caacaguguuaggccuggcacag

SEQ ID NO: 2197752 - RNA, 22 nt, Human
caacaguuuuuuaugcuaauca

SEQ ID NO: 2197753 - RNA, 14 nt, Human
caacauacucccau

SEQ ID NO: 2197754 - RNA, 15 nt, Human
caacauacucccauc

SEQ ID NO: 2197755 - RNA, 17 nt, Human
caacaggcugggcuuca

SEQ ID NO: 2197756 - RNA, 15 nt, Human
caaauuaauuggcag

SEQ ID NO: 2197757 - RNA, 11 nt, Human
caacagugagu

SEQ ID NO: 2197758 - RNA, 12 nt, Human
caacagugaguc

SEQ ID NO: 2197759 - RNA, 12 nt, Human
caacagugcuaa

SEQ ID NO: 2197760 - RNA, 12 nt, Human
caacagugugaa

SEQ ID NO: 2197761 - RNA, 18 nt, Human
caacagugcuaaaaaugg

SEQ ID NO: 2197762 - RNA, 13 nt, Human
caacagugugaag

SEQ ID NO: 2197763 - RNA, 13 nt, Human
caacagugcuaaa

SEQ ID NO: 2197764 - RNA, 14 nt, Human
caacagugcuaaaa

SEQ ID NO: 2197765 - RNA, 16 nt, Human
caacagugcuaaaaau

SEQ ID NO: 2197766 - RNA, 17 nt, Human
caacagugcuaaaaaug

SEQ ID NO: 2197767 - RNA, 14 nt, Human
caacagugugaagu

SEQ ID NO: 2197768 - RNA, 16 nt, Human
caacagugugaaguua

SEQ ID NO: 2197769 - RNA, 17 nt, Human
caacagugugaaguuag

SEQ ID NO: 2197770 - RNA, 18 nt, Human
caacagugugaaguuaga

SEQ ID NO: 2197771 - RNA, 19 nt, Human
caacagugugaaguuagaa

SEQ ID NO: 2197772 - RNA, 21 nt, Human
caacagugugaaguuagaauu

SEQ ID NO: 2197773 - RNA, 22 nt, Human
caacagugugaaguuagaauuc

SEQ ID NO: 2197774 - RNA, 23 nt, Human
caacagugugaaguuagaauucc

SEQ ID NO: 2197775 - RNA, 14 nt, Human
caacaggcugggcu

SEQ ID NO: 2197776 - RNA, 23 nt, Human
caaauuuacagagacagaaagca

SEQ ID NO: 2197777 - RNA, 17 nt, Human
caaauuuacagagacag

SEQ ID NO: 2197778 - RNA, 16 nt, Human
caaauuuacagagaca

SEQ ID NO: 2197779 - RNA, 22 nt, Human
caacugaaaagacucaguguuc

SEQ ID NO: 2197780 - RNA, 14 nt, Human
caacugaaaagacu

SEQ ID NO: 2197781 - RNA, 13 nt, Human
caacugaaaagac

SEQ ID NO: 2197782 - RNA, 16 nt, Human
caacucuuugagaaac

SEQ ID NO: 2197783 - RNA, 15 nt, Human
caacucuuugagaaa

SEQ ID NO: 2197784 - RNA, 14 nt, Human
caacucuuugagaa

SEQ ID NO: 2197785 - RNA, 12 nt, Human
caacucuugauu

SEQ ID NO: 2197786 - RNA, 17 nt, Human
caaccugcaaagaucug

SEQ ID NO: 2197787 - RNA, 21 nt, Human
caaccugccugacauuuggag

SEQ ID NO: 2197788 - RNA, 18 nt, Human
caacucuugauuauccau

SEQ ID NO: 2197789 - RNA, 16 nt, Human
caacucuugauuaucc

SEQ ID NO: 2197790 - RNA, 13 nt, Human
caacucuuugaga

SEQ ID NO: 2197791 - RNA, 17 nt, Human
caacucuugcaggucuc

SEQ ID NO: 2197792 - RNA, 17 nt, Human
caaccugauugugucuc

SEQ ID NO: 2197793 - RNA, 19 nt, Human
caaccuccgccucccgggu

SEQ ID NO: 2197794 - RNA, 19 nt, Human
caaccugauugugucucuu

SEQ ID NO: 2197795 - RNA, 21 nt, Human
caaccugauugugucucuugg

SEQ ID NO: 2197796 - RNA, 23 nt, Human
caacugucucgaugcaaugaaca

SEQ ID NO: 2197797 - RNA, 16 nt, Human
caacuguguucauuag

SEQ ID NO: 2197798 - RNA, 12 nt, Human
caacuguauaua

SEQ ID NO: 2197799 - RNA, 13 nt, Human
caacuguauauau

SEQ ID NO: 2197800 - RNA, 15 nt, Human
caacuguauauauuc

SEQ ID NO: 2197801 - RNA, 21 nt, Human
caacugucucgaugcaaugaa

SEQ ID NO: 2197802 - RNA, 18 nt, Human
caacugucuauuucugcu

SEQ ID NO: 2197803 - RNA, 21 nt, Human
caacugucuauuucugcugaa

SEQ ID NO: 2197804 - RNA, 13 nt, Human
caacugggcccaa

SEQ ID NO: 2197805 - RNA, 22 nt, Human
caacuggccggucugcaaguca

SEQ ID NO: 2197806 - RNA, 19 nt, Human
caacuggacauugucugcg

SEQ ID NO: 2197807 - RNA, 18 nt, Human
caacugaauaaauaccuc

SEQ ID NO: 2197808 - RNA, 18 nt, Human
caacugaaugaggucagc

SEQ ID NO: 2197809 - RNA, 17 nt, Human
caacugcaucaagaugu

SEQ ID NO: 2197810 - RNA, 20 nt, Human
caacugcaucaagaugugac

SEQ ID NO: 2197811 - RNA, 23 nt, Human
caacugcaucaagaugugacaug

SEQ ID NO: 2197812 - RNA, 18 nt, Human
caagccaagcagccaagc

SEQ ID NO: 2197813 - RNA, 23 nt, Human
caagguagcccuggccagaggcu

SEQ ID NO: 2197814 - RNA, 13 nt, Human
caaggucauuuuu

SEQ ID NO: 2197815 - RNA, 21 nt, Human
caagguagcccuggccagagg

SEQ ID NO: 2197816 - RNA, 16 nt, Human
caagguagcccuggcc

SEQ ID NO: 2197817 - RNA, 15 nt, Human
caagguagccauccc

SEQ ID NO: 2197818 - RNA, 16 nt, Human
caagguagccauccca

SEQ ID NO: 2197819 - RNA, 22 nt, Human
caagguaauuucuugugccucu

SEQ ID NO: 2197820 - RNA, 20 nt, Human
caaggguucagagacucagg

SEQ ID NO: 2197821 - RNA, 19 nt, Human
caaggggcagucuggaggg

SEQ ID NO: 2197822 - RNA, 16 nt, Human
caaggggcagucugga

SEQ ID NO: 2197823 - RNA, 18 nt, Human
caaggggcagucuggagg

SEQ ID NO: 2197824 - RNA, 12 nt, Human
caagggccucuu

SEQ ID NO: 2197825 - RNA, 21 nt, Human
caagggccaugcugaagggac

SEQ ID NO: 2197826 - RNA, 16 nt, Human
caaggggaaaaucuca

SEQ ID NO: 2197827 - RNA, 18 nt, Human
caaggggaaucagaacuc

SEQ ID NO: 2197828 - RNA, 23 nt, Human
caaggggaauguuugccucugcc

SEQ ID NO: 2197829 - RNA, 14 nt, Human
caagggccaugcug

SEQ ID NO: 2197830 - RNA, 20 nt, Human
caagggccaugcugaaggga

SEQ ID NO: 2197831 - RNA, 20 nt, Human
caagggcagaacacuaaccu

SEQ ID NO: 2197832 - RNA, 13 nt, Human
caagggauggugc

SEQ ID NO: 2197833 - RNA, 19 nt, Human
caagggcaaaaagucuaca

SEQ ID NO: 2197834 - RNA, 17 nt, Human
caagggcaaaauuccca

SEQ ID NO: 2197835 - RNA, 19 nt, Human
caagggcaaaauucccagg

SEQ ID NO: 2197836 - RNA, 14 nt, Human
caagggagagaccu

SEQ ID NO: 2197837 - RNA, 15 nt, Human
caagggagagaccuc

SEQ ID NO: 2197838 - RNA, 17 nt, Human
caagggagagaccucau

SEQ ID NO: 2197839 - RNA, 19 nt, Human
caagggagagaccucauca

SEQ ID NO: 2197840 - RNA, 20 nt, Human
caagggagagaccucaucag

SEQ ID NO: 2197841 - RNA, 21 nt, Human
caagggaucugguccuaccca

SEQ ID NO: 2197842 - RNA, 20 nt, Human
caagggaucugguccuaccc

SEQ ID NO: 2197843 - RNA, 17 nt, Human
caagggaucugguccua

SEQ ID NO: 2197844 - RNA, 21 nt, Human
caaggggaauguuugccucug

SEQ ID NO: 2197845 - RNA, 15 nt, Human
caagggccuggccug

SEQ ID NO: 2197846 - RNA, 13 nt, Human
caagggccuggcc

SEQ ID NO: 2197847 - RNA, 14 nt, Human
caagggccuggccu

SEQ ID NO: 2197848 - RNA, 20 nt, Human
caagugauucuccugccuca

SEQ ID NO: 2197849 - RNA, 13 nt, Human
caagugaaucuaa

SEQ ID NO: 2197850 - RNA, 20 nt, Human
caagugccagucuugugucu

SEQ ID NO: 2197851 - RNA, 21 nt, Human
caagugccagaggugggcagg

SEQ ID NO: 2197852 - RNA, 22 nt, Human
caagugccagaggugggcaggu

SEQ ID NO: 2197853 - RNA, 16 nt, Human
caagugccagaggugg

SEQ ID NO: 2197854 - RNA, 17 nt, Human
caagugccagagguggg

SEQ ID NO: 2197855 - RNA, 19 nt, Human
caagugccagaggugggca

SEQ ID NO: 2197856 - RNA, 20 nt, Human
caagugccagaggugggcag

SEQ ID NO: 2197857 - RNA, 23 nt, Human
caagugccacugcccgagcuggu

SEQ ID NO: 2197858 - RNA, 13 nt, Human
caagugccagagg

SEQ ID NO: 2197859 - RNA, 14 nt, Human
caagugccagaggu

SEQ ID NO: 2197860 - RNA, 15 nt, Human
caagugccagaggug

SEQ ID NO: 2197861 - RNA, 22 nt, Human
caagugccacugcccgagcugg

SEQ ID NO: 2197862 - RNA, 19 nt, Human
caagugcaugcucucugca

SEQ ID NO: 2197863 - RNA, 19 nt, Human
caagugagacccugucuca

SEQ ID NO: 2197864 - RNA, 15 nt, Human
caagugagacccugu

SEQ ID NO: 2197865 - RNA, 19 nt, Human
caagugauucuccugccuc

SEQ ID NO: 2197866 - RNA, 18 nt, Human
caagugauucuccugccu

SEQ ID NO: 2197867 - RNA, 16 nt, Human
caagugacaucucuuu

SEQ ID NO: 2197868 - RNA, 15 nt, Human
caagugacaucucuu

SEQ ID NO: 2197869 - RNA, 19 nt, Human
caagugaauuuuucucuaa

SEQ ID NO: 2197870 - RNA, 14 nt, Human
caagugaagguuua

SEQ ID NO: 2197871 - RNA, 21 nt, Human
caagugaagguuuacaauuua

SEQ ID NO: 2197872 - RNA, 14 nt, Human
caagugagacccug

SEQ ID NO: 2197873 - RNA, 19 nt, Human
caagugaacacuagccaga

SEQ ID NO: 2197874 - RNA, 14 nt, Human
caagugaagaaaag

SEQ ID NO: 2197875 - RNA, 11 nt, Human
caagugaaggu

SEQ ID NO: 2197876 - RNA, 12 nt, Human
caagugaagguu

SEQ ID NO: 2197877 - RNA, 17 nt, Human
caagguuuaggcuggug

SEQ ID NO: 2197878 - RNA, 23 nt, Human
caagugaaaaaggaggaagagaa

SEQ ID NO: 2197879 - RNA, 22 nt, Human
caagugaaaaaggaggaagaga

SEQ ID NO: 2197880 - RNA, 20 nt, Human
caagguuuaggcugguggcc

SEQ ID NO: 2197881 - RNA, 19 nt, Human
caagguucccucugagaau

SEQ ID NO: 2197882 - RNA, 22 nt, Human
caagguuuaaacuucucugaag

SEQ ID NO: 2197883 - RNA, 15 nt, Human
caagguucccucuga

SEQ ID NO: 2197884 - RNA, 16 nt, Human
caagguucccucugag

SEQ ID NO: 2197885 - RNA, 17 nt, Human
caagguucccucugaga

SEQ ID NO: 2197886 - RNA, 18 nt, Human
caagguucccucugagaa

SEQ ID NO: 2197887 - RNA, 13 nt, Human
caagaccuucucc

SEQ ID NO: 2197888 - RNA, 14 nt, Human
caagaccuguuggu

SEQ ID NO: 2197889 - RNA, 17 nt, Human
caagaccucagugccuu

SEQ ID NO: 2197890 - RNA, 20 nt, Human
caagacgcugugcugcccug

SEQ ID NO: 2197891 - RNA, 17 nt, Human
caagaccuguugguucc

SEQ ID NO: 2197892 - RNA, 20 nt, Human
caagaccuucaccaaacaua

SEQ ID NO: 2197893 - RNA, 21 nt, Human
caagacgcugugcugcccugc

SEQ ID NO: 2197894 - RNA, 22 nt, Human
caagacgcugugcugcccugcc

SEQ ID NO: 2197895 - RNA, 12 nt, Human
caagaaagucca

SEQ ID NO: 2197896 - RNA, 13 nt, Human
caagaaauaaaag

SEQ ID NO: 2197897 - RNA, 20 nt, Human
caagaaauaaaaggaagcca

SEQ ID NO: 2197898 - RNA, 19 nt, Human
caagaaauaaaaggaagcc

SEQ ID NO: 2197899 - RNA, 13 nt, Human
caagaaaugaaag

SEQ ID NO: 2197900 - RNA, 15 nt, Human
caagaaaucccuguu

SEQ ID NO: 2197901 - RNA, 23 nt, Human
caagacccuuguggucccacccc

SEQ ID NO: 2197902 - RNA, 21 nt, Human
caagaaauaaaaggaagccaa

SEQ ID NO: 2197903 - RNA, 14 nt, Human
caagaaaucccugu

SEQ ID NO: 2197904 - RNA, 19 nt, Human
caacuucuacuucugcccu

SEQ ID NO: 2197905 - RNA, 14 nt, Human
caacuucuggcucc

SEQ ID NO: 2197906 - RNA, 14 nt, Human
caacuucuucagag

SEQ ID NO: 2197907 - RNA, 23 nt, Human
caacuucuccauccuuucugccu

SEQ ID NO: 2197908 - RNA, 20 nt, Human
caacuucuuuuuauuuucuu

SEQ ID NO: 2197909 - RNA, 13 nt, Human
caacuugagggcc

SEQ ID NO: 2197910 - RNA, 18 nt, Human
caacuucuucagagcuga

SEQ ID NO: 2197911 - RNA, 16 nt, Human
caacuugagggcccag

SEQ ID NO: 2197912 - RNA, 19 nt, Human
caacuugagggcccagagc

SEQ ID NO: 2197913 - RNA, 20 nt, Human
caacuugagggcccagagca

SEQ ID NO: 2197914 - RNA, 21 nt, Human
caacuugagggcccagagcag

SEQ ID NO: 2197915 - RNA, 22 nt, Human
caacuugagggcccagagcagg

SEQ ID NO: 2197916 - RNA, 22 nt, Human
caacuugcauccaacuccagga

SEQ ID NO: 2197917 - RNA, 14 nt, Human
caagacuguugcuc

SEQ ID NO: 2197918 - RNA, 22 nt, Human
caagacuggaagguggggacag

SEQ ID NO: 2197919 - RNA, 18 nt, Human
caagacuguugcucaaau

SEQ ID NO: 2197920 - RNA, 16 nt, Human
caagacuguugcucaa

SEQ ID NO: 2197921 - RNA, 17 nt, Human
caagacuguugcucaaa

SEQ ID NO: 2197922 - RNA, 21 nt, Human
caagacuugguguccuuuccc

SEQ ID NO: 2197923 - RNA, 20 nt, Human
caagacuuggcaacagaagc

SEQ ID NO: 2197924 - RNA, 15 nt, Human
caagacuuggcaaca

SEQ ID NO: 2197925 - RNA, 16 nt, Human
caagacuucaguaugu

SEQ ID NO: 2197926 - RNA, 21 nt, Human
caagacuucaguauguuguca

SEQ ID NO: 2197927 - RNA, 17 nt, Human
caagagcccaggccucc

SEQ ID NO: 2197928 - RNA, 13 nt, Human
caagagccugaga

SEQ ID NO: 2197929 - RNA, 11 nt, Human
caagagccuga

SEQ ID NO: 2197930 - RNA, 17 nt, Human
caagagggcacuggugg

SEQ ID NO: 2197931 - RNA, 18 nt, Human
caagagggcacugguggc

SEQ ID NO: 2197932 - RNA, 19 nt, Human
caagagggcacugguggcc

SEQ ID NO: 2197933 - RNA, 20 nt, Human
caagagggcacugguggccc

SEQ ID NO: 2197934 - RNA, 17 nt, Human
caagagcccccuugaca

SEQ ID NO: 2197935 - RNA, 22 nt, Human
caagagcccccuugacaccggg

SEQ ID NO: 2197936 - RNA, 23 nt, Human
caagagccugagagugaggugga

SEQ ID NO: 2197937 - RNA, 22 nt, Human
caagcagccaagcuccuuggga

SEQ ID NO: 2197938 - RNA, 21 nt, Human
caagcagccugagcaacucuu

SEQ ID NO: 2197939 - RNA, 22 nt, Human
caagcagcgaccgcccccuccu

SEQ ID NO: 2197940 - RNA, 21 nt, Human
caagcagauuggagaaacccu

SEQ ID NO: 2197941 - RNA, 17 nt, Human
caagcagagguggccag

SEQ ID NO: 2197942 - RNA, 18 nt, Human
caagcagagguggccaga

SEQ ID NO: 2197943 - RNA, 14 nt, Human
caagcagccaagcu

SEQ ID NO: 2197944 - RNA, 13 nt, Human
caagcagccaagc

SEQ ID NO: 2197945 - RNA, 12 nt, Human
caagcagccaag

SEQ ID NO: 2197946 - RNA, 20 nt, Human
caagcagagguggccagagc

SEQ ID NO: 2197947 - RNA, 16 nt, Human
caagagggguggagac

SEQ ID NO: 2197948 - RNA, 21 nt, Human
caagagggguggagacugcuu

SEQ ID NO: 2197949 - RNA, 23 nt, Human
caagagggguggagacugcuucc

SEQ ID NO: 2197950 - RNA, 22 nt, Human
caagaggguccuuuaguaccug

SEQ ID NO: 2197951 - RNA, 21 nt, Human
caagagccuugguguccaccu

SEQ ID NO: 2197952 - RNA, 14 nt, Human
caagagggggugga

SEQ ID NO: 2197953 - RNA, 18 nt, Human
caagagccuuggugucca

SEQ ID NO: 2197954 - RNA, 12 nt, Human
caagagccuugg

SEQ ID NO: 2197955 - RNA, 15 nt, Human
caagaggggguggag

SEQ ID NO: 2197956 - RNA, 17 nt, Human
caagaggggguggaggg

SEQ ID NO: 2197957 - RNA, 18 nt, Human
caagaggggguggagggg

SEQ ID NO: 2197958 - RNA, 21 nt, Human
caagaggggguggaggggugu

SEQ ID NO: 2197959 - RNA, 12 nt, Human
caagagggucug

SEQ ID NO: 2197960 - RNA, 16 nt, Human
caagagggucugagga

SEQ ID NO: 2197961 - RNA, 17 nt, Human
caagagggucugaggaa

SEQ ID NO: 2197962 - RNA, 17 nt, Human
caagcccccccuuccac

SEQ ID NO: 2197963 - RNA, 22 nt, Human
caagcugugagacagugggaaa

SEQ ID NO: 2197964 - RNA, 23 nt, Human
caagcugugagacagugggaaau

SEQ ID NO: 2197965 - RNA, 12 nt, Human
caagcugugcca

SEQ ID NO: 2197966 - RNA, 14 nt, Human
caagcugugccacc

SEQ ID NO: 2197967 - RNA, 15 nt, Human
caagcugugccaccc

SEQ ID NO: 2197968 - RNA, 16 nt, Human
caagcugugccacccu

SEQ ID NO: 2197969 - RNA, 17 nt, Human
caagcugugccacccug

SEQ ID NO: 2197970 - RNA, 14 nt, Human
caagcuguuuucuu

SEQ ID NO: 2197971 - RNA, 18 nt, Human
caagcugugccacccugg

SEQ ID NO: 2197972 - RNA, 19 nt, Human
caagcugugccacccuggg

SEQ ID NO: 2197973 - RNA, 20 nt, Human
caagcugugccacccugggc

SEQ ID NO: 2197974 - RNA, 21 nt, Human
caagcugugccacccugggcu

SEQ ID NO: 2197975 - RNA, 13 nt, Human
caagcuucuuuua

SEQ ID NO: 2197976 - RNA, 13 nt, Human
caagcuuggcagc

SEQ ID NO: 2197977 - RNA, 17 nt, Human
caagcuuguccaacccg

SEQ ID NO: 2197978 - RNA, 16 nt, Human
caagcuguuuucuucu

SEQ ID NO: 2197979 - RNA, 22 nt, Human
caagcuucaguuuccuggucug

SEQ ID NO: 2197980 - RNA, 12 nt, Human
caagcuucaguu

SEQ ID NO: 2197981 - RNA, 19 nt, Human
caagcuucaguuuccuggu

SEQ ID NO: 2197982 - RNA, 19 nt, Human
caaggacuaggguccuggg

SEQ ID NO: 2197983 - RNA, 18 nt, Human
caaggacuaggguccugg

SEQ ID NO: 2197984 - RNA, 14 nt, Human
caaggacuaggguc

SEQ ID NO: 2197985 - RNA, 14 nt, Human
caagcuuggcagcc

SEQ ID NO: 2197986 - RNA, 16 nt, Human
caagcuuggcagccga

SEQ ID NO: 2197987 - RNA, 16 nt, Human
caaggacuaggguccu

SEQ ID NO: 2197988 - RNA, 21 nt, Human
caaggacuaggguccugggga

SEQ ID NO: 2197989 - RNA, 20 nt, Human
caaggacuaggguccugggg

SEQ ID NO: 2197990 - RNA, 14 nt, Human
caaggauccugagc

SEQ ID NO: 2197991 - RNA, 21 nt, Human
caaggcugggggaagaagcuc

SEQ ID NO: 2197992 - RNA, 13 nt, Human
caaggcugucaau

SEQ ID NO: 2197993 - RNA, 14 nt, Human
caaggcugucaauu

SEQ ID NO: 2197994 - RNA, 23 nt, Human
caagggaauuucuucaacucccu

SEQ ID NO: 2197995 - RNA, 17 nt, Human
caaggauccugagccag

SEQ ID NO: 2197996 - RNA, 14 nt, Human
caaggacugaggga

SEQ ID NO: 2197997 - RNA, 20 nt, Human
caagcuuggcagccgagcuc

SEQ ID NO: 2197998 - RNA, 15 nt, Human
caaggacugagggac

SEQ ID NO: 2197999 - RNA, 22 nt, Human
caaggacugagggacucugaag

SEQ ID NO: 2198000 - RNA, 15 nt, Human
caaggauccugagcc

SEQ ID NO: 2198001 - RNA, 16 nt, Human
caaggauccugagcca

SEQ ID NO: 2198002 - RNA, 14 nt, Human
caagcccccccuuc

SEQ ID NO: 2198003 - RNA, 16 nt, Human
caagcccccccuucca

SEQ ID NO: 2198004 - RNA, 18 nt, Human
caagccccaggcaggcug

SEQ ID NO: 2198005 - RNA, 17 nt, Human
caagccccaggcaggcu

SEQ ID NO: 2198006 - RNA, 15 nt, Human
caagccccaggcagg

SEQ ID NO: 2198007 - RNA, 13 nt, Human
caagccccaggca

SEQ ID NO: 2198008 - RNA, 20 nt, Human
caagcccaguucagcuuggg

SEQ ID NO: 2198009 - RNA, 14 nt, Human
caagccagcuggag

SEQ ID NO: 2198010 - RNA, 16 nt, Human
caagccaagcagccaa

SEQ ID NO: 2198011 - RNA, 12 nt, Human
caagcccaggag

SEQ ID NO: 2198012 - RNA, 17 nt, Human
caagcccagcacugcuu

SEQ ID NO: 2198013 - RNA, 15 nt, Human
caagccaagcagcca

SEQ ID NO: 2198014 - RNA, 14 nt, Human
caagccaagcagcc

SEQ ID NO: 2198015 - RNA, 13 nt, Human
caagccaagcagc

SEQ ID NO: 2198016 - RNA, 21 nt, Human
caagccaacuuguaaauacac

SEQ ID NO: 2198017 - RNA, 22 nt, Human
caagcauuuaauguagccaugg

SEQ ID NO: 2198018 - RNA, 15 nt, Human
caagccaacuuguaa

SEQ ID NO: 2198019 - RNA, 18 nt, Human
caagccaacuuguaaaua

SEQ ID NO: 2198020 - RNA, 20 nt, Human
caagccaacuuguaaauaca

SEQ ID NO: 2198021 - RNA, 19 nt, Human
caagccaacgacaaagcca

SEQ ID NO: 2198022 - RNA, 18 nt, Human
caagccaacgacaaagcc

SEQ ID NO: 2198023 - RNA, 21 nt, Human
caagcauuuaauguagccaug

SEQ ID NO: 2198024 - RNA, 14 nt, Human
caagcauucugucu

SEQ ID NO: 2198025 - RNA, 16 nt, Human
caagcauuuagaugua

SEQ ID NO: 2198026 - RNA, 19 nt, Human
caagcauuuagauguauag

SEQ ID NO: 2198027 - RNA, 21 nt, Human
caagcauaccaacacgagcag

SEQ ID NO: 2198028 - RNA, 15 nt, Human
caagcauucuccugu

SEQ ID NO: 2198029 - RNA, 13 nt, Human
caagcauucuccu

SEQ ID NO: 2198030 - RNA, 21 nt, Human
caagcaucuuggggggguggc

SEQ ID NO: 2198031 - RNA, 13 nt, Human
caagcaggaagcu

SEQ ID NO: 2198032 - RNA, 12 nt, Human
caagcaggaagc

SEQ ID NO: 2198033 - RNA, 15 nt, Human
caagcagucgugccu

SEQ ID NO: 2198034 - RNA, 23 nt, Human
caagcaggaaaugaaaaugucuu

SEQ ID NO: 2198035 - RNA, 17 nt, Human
caagcaggaaaugaaaa

SEQ ID NO: 2198036 - RNA, 16 nt, Human
caagcagucgugccug

SEQ ID NO: 2198037 - RNA, 18 nt, Human
caagcagucgugccugug

SEQ ID NO: 2198038 - RNA, 19 nt, Human
caagcagucgugccugugu

SEQ ID NO: 2198039 - RNA, 20 nt, Human
caagcagucgugccuguguc

SEQ ID NO: 2198040 - RNA, 18 nt, Human
caagcagucuacccaccu

SEQ ID NO: 2198041 - RNA, 21 nt, Human
caagcagucgugccugugucc

SEQ ID NO: 2198042 - RNA, 14 nt, Human
caagcaggaagcuc

SEQ ID NO: 2198043 - RNA, 16 nt, Human
caagcauaccaacacg

SEQ ID NO: 2198044 - RNA, 22 nt, Human
caaacugaggaauuucaccugu

SEQ ID NO: 2198045 - RNA, 13 nt, Human
auuuuaaucuaau

SEQ ID NO: 2198046 - RNA, 18 nt, Human
auuuuaaucaaguugaau

SEQ ID NO: 2198047 - RNA, 14 nt, Human
auuuuaaucaaguu

SEQ ID NO: 2198048 - RNA, 23 nt, Human
auuuuaaugaagaaaguggaaaa

SEQ ID NO: 2198049 - RNA, 17 nt, Human
caaacugccuaagcccu

SEQ ID NO: 2198050 - RNA, 18 nt, Human
caaacugccuaagcccuc

SEQ ID NO: 2198051 - RNA, 23 nt, Human
caaacugccuaagcccuccgcca

SEQ ID NO: 2198052 - RNA, 18 nt, Human
auuuuaagugcuuuguaa

SEQ ID NO: 2198053 - RNA, 17 nt, Human
auuuuaagugcuuugua

SEQ ID NO: 2198054 - RNA, 16 nt, Human
auuuuaagugcuuugu

SEQ ID NO: 2198055 - RNA, 14 nt, Human
auuuuaagugcuuu

SEQ ID NO: 2198056 - RNA, 12 nt, Human
auuuuaagugcu

SEQ ID NO: 2198057 - RNA, 22 nt, Human
auuuuaaguauugcaucuguau

SEQ ID NO: 2198058 - RNA, 23 nt, Human
auuuuaaguauugcaucuguaua

SEQ ID NO: 2198059 - RNA, 14 nt, Human
auuuuaaguauugc

SEQ ID NO: 2198060 - RNA, 16 nt, Human
auuuuaaguauugcau

SEQ ID NO: 2198061 - RNA, 19 nt, Human
auuuuaaguauugcaucug

SEQ ID NO: 2198062 - RNA, 20 nt, Human
auuuuaaguauugcaucugu

SEQ ID NO: 2198063 - RNA, 18 nt, Human
auuuuaauaauguuucaa

SEQ ID NO: 2198064 - RNA, 19 nt, Human
auuuuaauaauguuucaaa

SEQ ID NO: 2198065 - RNA, 21 nt, Human
auuuuaagacguguuuguguu

SEQ ID NO: 2198066 - RNA, 16 nt, Human
auuuuaacaaaagcaa

SEQ ID NO: 2198067 - RNA, 18 nt, Human
auuuuaacaaaagcaaga

SEQ ID NO: 2198068 - RNA, 16 nt, Human
auuuuaaauucacaau

SEQ ID NO: 2198069 - RNA, 22 nt, Human
auuuuaaauuauaacuuaaaau

SEQ ID NO: 2198070 - RNA, 13 nt, Human
auuuuaacaaaag

SEQ ID NO: 2198071 - RNA, 21 nt, Human
auuuguacauauguaaaauaa

SEQ ID NO: 2198072 - RNA, 19 nt, Human
auuuguacauauguaaaau

SEQ ID NO: 2198073 - RNA, 18 nt, Human
auuuguacauauguaaaa

SEQ ID NO: 2198074 - RNA, 16 nt, Human
auuuguacauauguaa

SEQ ID NO: 2198075 - RNA, 18 nt, Human
auuuguacaguucaguuc

SEQ ID NO: 2198076 - RNA, 20 nt, Human
auuuuaaauaaaagugauca

SEQ ID NO: 2198077 - RNA, 16 nt, Human
auuuuaaauaaaagaa

SEQ ID NO: 2198078 - RNA, 15 nt, Human
auuuuaaauaaaaga

SEQ ID NO: 2198079 - RNA, 14 nt, Human
auuuuaaauaaaag

SEQ ID NO: 2198080 - RNA, 21 nt, Human
auuuuaaauaaaagugaucaa

SEQ ID NO: 2198081 - RNA, 15 nt, Human
auuuuaaauggacag

SEQ ID NO: 2198082 - RNA, 16 nt, Human
auuuuaaauggacaga

SEQ ID NO: 2198083 - RNA, 16 nt, Human
caaagagguauuuauc

SEQ ID NO: 2198084 - RNA, 14 nt, Human
caaagaguagaauu

SEQ ID NO: 2198085 - RNA, 18 nt, Human
caaagaggugacugggcc

SEQ ID NO: 2198086 - RNA, 17 nt, Human
caaagaguagacauuuc

SEQ ID NO: 2198087 - RNA, 17 nt, Human
caaagcccaaaguggua

SEQ ID NO: 2198088 - RNA, 16 nt, Human
caaagaguuaauauau

SEQ ID NO: 2198089 - RNA, 20 nt, Human
caaagagugggcugcaucug

SEQ ID NO: 2198090 - RNA, 22 nt, Human
caaagagugggcugcaucuggg

SEQ ID NO: 2198091 - RNA, 19 nt, Human
caaagcccaaagugguaua

SEQ ID NO: 2198092 - RNA, 14 nt, Human
caaagcccaaggga

SEQ ID NO: 2198093 - RNA, 17 nt, Human
caaagaguguagaucag

SEQ ID NO: 2198094 - RNA, 13 nt, Human
caaagcccagcuu

SEQ ID NO: 2198095 - RNA, 15 nt, Human
caaagccccaugcug

SEQ ID NO: 2198096 - RNA, 16 nt, Human
caaagccccaugcugg

SEQ ID NO: 2198097 - RNA, 19 nt, Human
caaagccccaugcuggagc

SEQ ID NO: 2198098 - RNA, 20 nt, Human
caaagccccaugcuggagcc

SEQ ID NO: 2198099 - RNA, 21 nt, Human
caaagagguuuuaaaaaaauc

SEQ ID NO: 2198100 - RNA, 14 nt, Human
caaagagguuuuaa

SEQ ID NO: 2198101 - RNA, 20 nt, Human
caaagacuuaguauauuuuc

SEQ ID NO: 2198102 - RNA, 19 nt, Human
caaagacuuaguauauuuu

SEQ ID NO: 2198103 - RNA, 16 nt, Human
caaagacuuaguauau

SEQ ID NO: 2198104 - RNA, 18 nt, Human
caaagaccuuguguguau

SEQ ID NO: 2198105 - RNA, 23 nt, Human
caaagaccuuguguguaugugua

SEQ ID NO: 2198106 - RNA, 17 nt, Human
caaagacgaccuuuacc

SEQ ID NO: 2198107 - RNA, 18 nt, Human
caaagaccaaauuccuug

SEQ ID NO: 2198108 - RNA, 14 nt, Human
caaagacagaagcc

SEQ ID NO: 2198109 - RNA, 21 nt, Human
caaagaccacacauuugugua

SEQ ID NO: 2198110 - RNA, 16 nt, Human
caaagaccuugugugu

SEQ ID NO: 2198111 - RNA, 19 nt, Human
caaacugccuuggcuucag

SEQ ID NO: 2198112 - RNA, 17 nt, Human
caaacuggcaaacuuca

SEQ ID NO: 2198113 - RNA, 19 nt, Human
caaacuggcaaacuucaga

SEQ ID NO: 2198114 - RNA, 12 nt, Human
caaagaaauuau

SEQ ID NO: 2198115 - RNA, 14 nt, Human
caaagaaauguaag

SEQ ID NO: 2198116 - RNA, 15 nt, Human
caaagaauguuuaua

SEQ ID NO: 2198117 - RNA, 21 nt, Human
caaagacaaauucuguuucuu

SEQ ID NO: 2198118 - RNA, 20 nt, Human
caaagacaaauucuguuucu

SEQ ID NO: 2198119 - RNA, 13 nt, Human
caaagaaauuaug

SEQ ID NO: 2198120 - RNA, 14 nt, Human
caaagggcugaaag

SEQ ID NO: 2198121 - RNA, 17 nt, Human
caaagggcugaaagcca

SEQ ID NO: 2198122 - RNA, 21 nt, Human
caaagggcugaaagccauuug

SEQ ID NO: 2198123 - RNA, 18 nt, Human
caaagggcugaaagccau

SEQ ID NO: 2198124 - RNA, 20 nt, Human
caaaggguaucaggugcugc

SEQ ID NO: 2198125 - RNA, 21 nt, Human
caaaggguaucaggugcugcc

SEQ ID NO: 2198126 - RNA, 18 nt, Human
caaagugguauagaaaug

SEQ ID NO: 2198127 - RNA, 19 nt, Human
caaagugguauagaaaugc

SEQ ID NO: 2198128 - RNA, 23 nt, Human
caaaggguaucaggugcugccau

SEQ ID NO: 2198129 - RNA, 16 nt, Human
caaaguggugagaggc

SEQ ID NO: 2198130 - RNA, 17 nt, Human
caaaguggugagaggca

SEQ ID NO: 2198131 - RNA, 22 nt, Human
caaagggagcacuggguugacu

SEQ ID NO: 2198132 - RNA, 15 nt, Human
caaagggagcagaac

SEQ ID NO: 2198133 - RNA, 14 nt, Human
caaagggagagaga

SEQ ID NO: 2198134 - RNA, 18 nt, Human
caaagggaaauaucauuu

SEQ ID NO: 2198135 - RNA, 15 nt, Human
caaagggaaauauca

SEQ ID NO: 2198136 - RNA, 17 nt, Human
caaagggaaauaucauu

SEQ ID NO: 2198137 - RNA, 20 nt, Human
caaaggagauuggaaggaac

SEQ ID NO: 2198138 - RNA, 18 nt, Human
caaaggacuugacuugca

SEQ ID NO: 2198139 - RNA, 23 nt, Human
caaaggacuguuuuuuccugagc

SEQ ID NO: 2198140 - RNA, 20 nt, Human
caaaggagauaaaucuagua

SEQ ID NO: 2198141 - RNA, 16 nt, Human
caaaggaccucagcug

SEQ ID NO: 2198142 - RNA, 15 nt, Human
caaaggacuccaccc

SEQ ID NO: 2198143 - RNA, 14 nt, Human
caaaggagauugga

SEQ ID NO: 2198144 - RNA, 23 nt, Human
caaagccccuugcucuccccugc

SEQ ID NO: 2198145 - RNA, 15 nt, Human
caaagcccuaaaauu

SEQ ID NO: 2198146 - RNA, 21 nt, Human
caaagccccaugcuggagccu

SEQ ID NO: 2198147 - RNA, 22 nt, Human
caaagccccaugcuggagccug

SEQ ID NO: 2198148 - RNA, 17 nt, Human
caaauauuccagagacu

SEQ ID NO: 2198149 - RNA, 13 nt, Human
caaauauuccaga

SEQ ID NO: 2198150 - RNA, 14 nt, Human
caaauauuuauuuu

SEQ ID NO: 2198151 - RNA, 12 nt, Human
caaauauuuauu

SEQ ID NO: 2198152 - RNA, 16 nt, Human
caaauauuuauuuucu

SEQ ID NO: 2198153 - RNA, 15 nt, Human
caaauauuuauuuuc

SEQ ID NO: 2198154 - RNA, 21 nt, Human
caaaguucccuacuuccugug

SEQ ID NO: 2198155 - RNA, 19 nt, Human
caaaguggugagaggcauc

SEQ ID NO: 2198156 - RNA, 22 nt, Human
caaaguucccuacuuccuguga

SEQ ID NO: 2198157 - RNA, 11 nt, Human
caaauguuucu

SEQ ID NO: 2198158 - RNA, 14 nt, Human
caaauguuucugca

SEQ ID NO: 2198159 - RNA, 15 nt, Human
caaauguuuugacau

SEQ ID NO: 2198160 - RNA, 17 nt, Human
caaauguuuacagggag

SEQ ID NO: 2198161 - RNA, 18 nt, Human
caaauguuuacagggagc

SEQ ID NO: 2198162 - RNA, 20 nt, Human
caaauguuuacagggagccu

SEQ ID NO: 2198163 - RNA, 22 nt, Human
caaauguuuacagggagccucc

SEQ ID NO: 2198164 - RNA, 18 nt, Human
caaauucugucucuggau

SEQ ID NO: 2198165 - RNA, 15 nt, Human
caaauuaauaaucuu

SEQ ID NO: 2198166 - RNA, 22 nt, Human
caaauuaaggguuaagaaaaga

SEQ ID NO: 2198167 - RNA, 13 nt, Human
caaauuaacuuga

SEQ ID NO: 2198168 - RNA, 19 nt, Human
caaauugagagaauggaaa

SEQ ID NO: 2198169 - RNA, 17 nt, Human
caaauugaacucuuuga

SEQ ID NO: 2198170 - RNA, 15 nt, Human
caaauucuucugaac

SEQ ID NO: 2198171 - RNA, 15 nt, Human
caaauucuguuucuu

SEQ ID NO: 2198172 - RNA, 14 nt, Human
caaauucuucugaa

SEQ ID NO: 2198173 - RNA, 14 nt, Human
caaauucuguuucu

SEQ ID NO: 2198174 - RNA, 17 nt, Human
caaauuaauaaucuuau

SEQ ID NO: 2198175 - RNA, 16 nt, Human
caaauuaauaaucuua

SEQ ID NO: 2198176 - RNA, 17 nt, Human
caaauugcuugaaagaa

SEQ ID NO: 2198177 - RNA, 19 nt, Human
caaauugcuugaaagaaaa

SEQ ID NO: 2198178 - RNA, 22 nt, Human
caaauugcuccuaagcuucaaa

SEQ ID NO: 2198179 - RNA, 15 nt, Human
caaauuaaucuuucu

SEQ ID NO: 2198180 - RNA, 20 nt, Human
caaauugcuuacuuuggaau

SEQ ID NO: 2198181 - RNA, 21 nt, Human
caaauuggagcuucauggcag

SEQ ID NO: 2198182 - RNA, 20 nt, Human
caacaggcugggcuucagug

SEQ ID NO: 2198183 - RNA, 15 nt, Human
caaacuggggccucc

SEQ ID NO: 2198184 - RNA, 19 nt, Human
cacccaagagauuguuguu

SEQ ID NO: 2198185 - RNA, 13 nt, Human
cacccaagcuugg

SEQ ID NO: 2198186 - RNA, 14 nt, Human
cacccaagcuuggc

SEQ ID NO: 2198187 - RNA, 15 nt, Human
cacccaagcuuggca

SEQ ID NO: 2198188 - RNA, 16 nt, Human
cacccaagcaaggcca

SEQ ID NO: 2198189 - RNA, 13 nt, Human
cacccaagggccu

SEQ ID NO: 2198190 - RNA, 17 nt, Human
cacccaagcuuggcagc

SEQ ID NO: 2198191 - RNA, 19 nt, Human
cacccaagcuuggcagccg

SEQ ID NO: 2198192 - RNA, 21 nt, Human
cacccaagcuuggcagccgag

SEQ ID NO: 2198193 - RNA, 23 nt, Human
cacccaaaagucaaaaggugccu

SEQ ID NO: 2198194 - RNA, 14 nt, Human
cacccaaaagucaa

SEQ ID NO: 2198195 - RNA, 22 nt, Human
cacccaaagagguauuuaucuu

SEQ ID NO: 2198196 - RNA, 17 nt, Human
caccauuuggcaaugcc

SEQ ID NO: 2198197 - RNA, 14 nt, Human
caccauucugacuc

SEQ ID NO: 2198198 - RNA, 13 nt, Human
caccauucugacu

SEQ ID NO: 2198199 - RNA, 13 nt, Human
caccauucagguc

SEQ ID NO: 2198200 - RNA, 13 nt, Human
caccauuccugga

SEQ ID NO: 2198201 - RNA, 23 nt, Human
caccauuccuggaaaccacaguc

SEQ ID NO: 2198202 - RNA, 14 nt, Human
caccauuccuggaa

SEQ ID NO: 2198203 - RNA, 23 nt, Human
caccauguuugagcucagacccc

SEQ ID NO: 2198204 - RNA, 14 nt, Human
caccauuaaaaggg

SEQ ID NO: 2198205 - RNA, 22 nt, Human
caccauuaaaagggauuaccca

SEQ ID NO: 2198206 - RNA, 18 nt, Human
caccauguuugagcucag

SEQ ID NO: 2198207 - RNA, 22 nt, Human
caccauguuugagcucagaccc

SEQ ID NO: 2198208 - RNA, 19 nt, Human
caccauguuugagcucaga

SEQ ID NO: 2198209 - RNA, 19 nt, Human
cacagcccaaagaaggaaa

SEQ ID NO: 2198210 - RNA, 22 nt, Human
cacagccaucccagccuuggca

SEQ ID NO: 2198211 - RNA, 14 nt, Human
cacagcccacgucc

SEQ ID NO: 2198212 - RNA, 16 nt, Human
cacagccaucccagcc

SEQ ID NO: 2198213 - RNA, 17 nt, Human
cacagccaucccagccu

SEQ ID NO: 2198214 - RNA, 19 nt, Human
cacagccaucccagccuug

SEQ ID NO: 2198215 - RNA, 20 nt, Human
cacagccaucccagccuugg

SEQ ID NO: 2198216 - RNA, 15 nt, Human
cacagccaggugccu

SEQ ID NO: 2198217 - RNA, 16 nt, Human
cacagccaggugccuu

SEQ ID NO: 2198218 - RNA, 17 nt, Human
cacagccaggugccuug

SEQ ID NO: 2198219 - RNA, 19 nt, Human
cacagccaggugccuugga

SEQ ID NO: 2198220 - RNA, 20 nt, Human
cacagccaggugccuuggag

SEQ ID NO: 2198221 - RNA, 13 nt, Human
cacagccauccca

SEQ ID NO: 2198222 - RNA, 18 nt, Human
cacagcucuucuccaggc

SEQ ID NO: 2198223 - RNA, 16 nt, Human
cacagcccacguccug

SEQ ID NO: 2198224 - RNA, 17 nt, Human
cacagcccacguccugu

SEQ ID NO: 2198225 - RNA, 18 nt, Human
cacagcccacguccuguc

SEQ ID NO: 2198226 - RNA, 20 nt, Human
cacagcccacguccugucag

SEQ ID NO: 2198227 - RNA, 12 nt, Human
cacagcacagcc

SEQ ID NO: 2198228 - RNA, 15 nt, Human
cacagcacagccaac

SEQ ID NO: 2198229 - RNA, 15 nt, Human
cacagccagcaccug

SEQ ID NO: 2198230 - RNA, 16 nt, Human
cacagccagcaccugg

SEQ ID NO: 2198231 - RNA, 17 nt, Human
cacagccagcaccuggc

SEQ ID NO: 2198232 - RNA, 20 nt, Human
cacagccagcaccuggcauc

SEQ ID NO: 2198233 - RNA, 17 nt, Human
cacagcaaggcaccugc

SEQ ID NO: 2198234 - RNA, 19 nt, Human
cacagcaaggcaccugcag

SEQ ID NO: 2198235 - RNA, 16 nt, Human
cacagcaaggaggcug

SEQ ID NO: 2198236 - RNA, 18 nt, Human
cacagcaaggaggcuggc

SEQ ID NO: 2198237 - RNA, 21 nt, Human
cacagcaaggaggcuggcugg

SEQ ID NO: 2198238 - RNA, 22 nt, Human
cacagcaaggaggcuggcuggg

SEQ ID NO: 2198239 - RNA, 23 nt, Human
cacagcaaggaggcuggcugggg

SEQ ID NO: 2198240 - RNA, 15 nt, Human
cacagcaaggcaccu

SEQ ID NO: 2198241 - RNA, 17 nt, Human
cacacgccucccacugg

SEQ ID NO: 2198242 - RNA, 20 nt, Human
cacacgcaggaacucccagc

SEQ ID NO: 2198243 - RNA, 21 nt, Human
cacacgcaggaacucccagca

SEQ ID NO: 2198244 - RNA, 20 nt, Human
cacacgccucccacuggggu

SEQ ID NO: 2198245 - RNA, 22 nt, Human
cacacgcaggaacucccagcaa

SEQ ID NO: 2198246 - RNA, 13 nt, Human
cacacgcacgcac

SEQ ID NO: 2198247 - RNA, 14 nt, Human
cacacgcacgcaca

SEQ ID NO: 2198248 - RNA, 15 nt, Human
cacacgcacgcacac

SEQ ID NO: 2198249 - RNA, 17 nt, Human
cacacgcacgcacacac

SEQ ID NO: 2198250 - RNA, 19 nt, Human
cacacgcacgcacacacac

SEQ ID NO: 2198251 - RNA, 21 nt, Human
cacacgcacgcacacacacaa

SEQ ID NO: 2198252 - RNA, 14 nt, Human
cacacgcaggaacu

SEQ ID NO: 2198253 - RNA, 19 nt, Human
cacacgcaggaacucccag

SEQ ID NO: 2198254 - RNA, 22 nt, Human
cacacggacacucaaaagcugg

SEQ ID NO: 2198255 - RNA, 22 nt, Human
cacacgcuccucccucugaggc

SEQ ID NO: 2198256 - RNA, 20 nt, Human
cacacggaggcaucugcacc

SEQ ID NO: 2198257 - RNA, 18 nt, Human
cacacggaggcaucugca

SEQ ID NO: 2198258 - RNA, 19 nt, Human
cacacguaaugaaacuugg

SEQ ID NO: 2198259 - RNA, 17 nt, Human
cacacguacuuaaauga

SEQ ID NO: 2198260 - RNA, 20 nt, Human
cacacgguuugaagccugga

SEQ ID NO: 2198261 - RNA, 21 nt, Human
cacacggaggcaucugcaccc

SEQ ID NO: 2198262 - RNA, 19 nt, Human
cacacgguuugaagccugg

SEQ ID NO: 2198263 - RNA, 20 nt, Human
cacacguaaugaaacuugga

SEQ ID NO: 2198264 - RNA, 24 nt, Human
cacacgucugacccucuccacccc

SEQ ID NO: 2198265 - RNA, 20 nt, Human
cacacgucugacccucucca

SEQ ID NO: 2198266 - RNA, 19 nt, Human
cacacgucauguuucuuca

SEQ ID NO: 2198267 - RNA, 20 nt, Human
cacacgucauuucuuagcua

SEQ ID NO: 2198268 - RNA, 16 nt, Human
cacacgugcaauuugu

SEQ ID NO: 2198269 - RNA, 18 nt, Human
cacagcaaccccaggcug

SEQ ID NO: 2198270 - RNA, 17 nt, Human
cacagcaaccccaggcu

SEQ ID NO: 2198271 - RNA, 14 nt, Human
cacagcaaccccag

SEQ ID NO: 2198272 - RNA, 16 nt, Human
cacaggaugaaggcaa

SEQ ID NO: 2198273 - RNA, 19 nt, Human
cacaggauccuauucucac

SEQ ID NO: 2198274 - RNA, 20 nt, Human
cacaggauccuauucucacc

SEQ ID NO: 2198275 - RNA, 23 nt, Human
cacaggauccuauucucaccagg

SEQ ID NO: 2198276 - RNA, 17 nt, Human
cacaggaucagucugau

SEQ ID NO: 2198277 - RNA, 15 nt, Human
cacaggacucugccu

SEQ ID NO: 2198278 - RNA, 16 nt, Human
cacaggacucugccuc

SEQ ID NO: 2198279 - RNA, 16 nt, Human
cacaggacccccuucc

SEQ ID NO: 2198280 - RNA, 17 nt, Human
cacaggacccccuuccc

SEQ ID NO: 2198281 - RNA, 19 nt, Human
cacaggacccccuuccccu

SEQ ID NO: 2198282 - RNA, 17 nt, Human
cacaggacauuucucua

SEQ ID NO: 2198283 - RNA, 15 nt, Human
cacaggacauuucuc

SEQ ID NO: 2198284 - RNA, 16 nt, Human
cacaggacacagucag

SEQ ID NO: 2198285 - RNA, 19 nt, Human
cacaggacacagucagauu

SEQ ID NO: 2198286 - RNA, 17 nt, Human
cacaggacacagucaga

SEQ ID NO: 2198287 - RNA, 20 nt, Human
cacaggacaugcgguagcca

SEQ ID NO: 2198288 - RNA, 23 nt, Human
cacaggacaugcgguagccagca

SEQ ID NO: 2198289 - RNA, 22 nt, Human
cacaggacaugcgguagccagc

SEQ ID NO: 2198290 - RNA, 19 nt, Human
cacagcucuucuccaggcu

SEQ ID NO: 2198291 - RNA, 20 nt, Human
cacagcucuucuccaggcug

SEQ ID NO: 2198292 - RNA, 19 nt, Human
cacaggcaacugaggcaga

SEQ ID NO: 2198293 - RNA, 18 nt, Human
cacaggcaacugaggcag

SEQ ID NO: 2198294 - RNA, 17 nt, Human
cacaggcaacugaggca

SEQ ID NO: 2198295 - RNA, 14 nt, Human
cacaggcaacugag

SEQ ID NO: 2198296 - RNA, 24 nt, Human
cacaggauccuauucucaccagga

SEQ ID NO: 2198297 - RNA, 16 nt, Human
cacaggcaaaauccuu

SEQ ID NO: 2198298 - RNA, 13 nt, Human
cacaggcaacuga

SEQ ID NO: 2198299 - RNA, 20 nt, Human
cacaggcaaaauccuugcuu

SEQ ID NO: 2198300 - RNA, 20 nt, Human
cacaggcaacugaggcagac

SEQ ID NO: 2198301 - RNA, 20 nt, Human
cacaggcaguuacuucugag

SEQ ID NO: 2198302 - RNA, 19 nt, Human
cacaggcagguccaggguu

SEQ ID NO: 2198303 - RNA, 22 nt, Human
cacagucucuuuaaucuucagu

SEQ ID NO: 2198304 - RNA, 14 nt, Human
cacagucucucucu

SEQ ID NO: 2198305 - RNA, 16 nt, Human
cacagucuaauuuuua

SEQ ID NO: 2198306 - RNA, 17 nt, Human
cacagucuaauuuuuau

SEQ ID NO: 2198307 - RNA, 23 nt, Human
cacaguccuuaccagcagagcac

SEQ ID NO: 2198308 - RNA, 14 nt, Human
cacaggcccggcuc

SEQ ID NO: 2198309 - RNA, 12 nt, Human
cacaggcccccu

SEQ ID NO: 2198310 - RNA, 13 nt, Human
cacaggcccccuu

SEQ ID NO: 2198311 - RNA, 21 nt, Human
cacaggcccccuugagugggg

SEQ ID NO: 2198312 - RNA, 22 nt, Human
cacaggcccccuugaguggggu

SEQ ID NO: 2198313 - RNA, 23 nt, Human
cacagugacucgggcuccugugc

SEQ ID NO: 2198314 - RNA, 19 nt, Human
cacagugacucgggcuccu

SEQ ID NO: 2198315 - RNA, 20 nt, Human
cacagugacucgggcuccug

SEQ ID NO: 2198316 - RNA, 21 nt, Human
cacagugacucgggcuccugu

SEQ ID NO: 2198317 - RNA, 22 nt, Human
cacagugacucgggcuccugug

SEQ ID NO: 2198318 - RNA, 22 nt, Human
cacagugaaggcuguccuuacc

SEQ ID NO: 2198319 - RNA, 18 nt, Human
cacagugacucgggcucc

SEQ ID NO: 2198320 - RNA, 17 nt, Human
cacagugaaggcugucc

SEQ ID NO: 2198321 - RNA, 15 nt, Human
cacagugaagcaaau

SEQ ID NO: 2198322 - RNA, 15 nt, Human
cacagugaagugcug

SEQ ID NO: 2198323 - RNA, 22 nt, Human
cacaguuuucugagaaagacua

SEQ ID NO: 2198324 - RNA, 21 nt, Human
cacaguuuucugagaaagacu

SEQ ID NO: 2198325 - RNA, 19 nt, Human
cacaguuuugguugcuuua

SEQ ID NO: 2198326 - RNA, 21 nt, Human
cacaguuuucuggcuggagcc

SEQ ID NO: 2198327 - RNA, 16 nt, Human
cacaugaaguccaagc

SEQ ID NO: 2198328 - RNA, 17 nt, Human
cacaugaaguccaagca

SEQ ID NO: 2198329 - RNA, 20 nt, Human
cacaugaaguccaagcauuu

SEQ ID NO: 2198330 - RNA, 15 nt, Human
cacaugagauaauau

SEQ ID NO: 2198331 - RNA, 21 nt, Human
cacaugacaacuuugccagcu

SEQ ID NO: 2198332 - RNA, 20 nt, Human
cacaugacucgggggugggg

SEQ ID NO: 2198333 - RNA, 24 nt, Human
cacaugaaucccacccacauguga

SEQ ID NO: 2198334 - RNA, 23 nt, Human
cacaguuuugguugcuuuaauau

SEQ ID NO: 2198335 - RNA, 20 nt, Human
cacaguuuugguugcuuuaa

SEQ ID NO: 2198336 - RNA, 13 nt, Human
cacaugagcauca

SEQ ID NO: 2198337 - RNA, 17 nt, Human
cacaugagcaucaggcc

SEQ ID NO: 2198338 - RNA, 18 nt, Human
cacaugagcaucaggcca

SEQ ID NO: 2198339 - RNA, 19 nt, Human
cacaugagcaucaggccag

SEQ ID NO: 2198340 - RNA, 20 nt, Human
cacaugagcaucaggccagg

SEQ ID NO: 2198341 - RNA, 21 nt, Human
cacaugagcaucaggccaggc

SEQ ID NO: 2198342 - RNA, 14 nt, Human
cacaugcagcugca

SEQ ID NO: 2198343 - RNA, 20 nt, Human
cacaugccucucucaggcca

SEQ ID NO: 2198344 - RNA, 21 nt, Human
cacaugccucucucaggccaa

SEQ ID NO: 2198345 - RNA, 16 nt, Human
cacaugcugagucucc

SEQ ID NO: 2198346 - RNA, 17 nt, Human
cacaugcugagucuccc

SEQ ID NO: 2198347 - RNA, 18 nt, Human
cacaugcugagucuccca

SEQ ID NO: 2198348 - RNA, 21 nt, Human
cacaugcugagucucccaagg

SEQ ID NO: 2198349 - RNA, 22 nt, Human
cacaugcucaaugacucucugg

SEQ ID NO: 2198350 - RNA, 18 nt, Human
cacaugcggagaacaaau

SEQ ID NO: 2198351 - RNA, 19 nt, Human
cacauguauguuuugguau

SEQ ID NO: 2198352 - RNA, 22 nt, Human
cacaugcugagucucccaaggc

SEQ ID NO: 2198353 - RNA, 12 nt, Human
cacaugucaccg

SEQ ID NO: 2198354 - RNA, 20 nt, Human
cacaugucaguaccuucaaa

SEQ ID NO: 2198355 - RNA, 19 nt, Human
cacaugucaccguggaccu

SEQ ID NO: 2198356 - RNA, 20 nt, Human
cacaugucaccguggaccuu

SEQ ID NO: 2198357 - RNA, 22 nt, Human
cacaugucaccguggaccuucc

SEQ ID NO: 2198358 - RNA, 23 nt, Human
cacaugucaccguggaccuuccu

SEQ ID NO: 2198359 - RNA, 16 nt, Human
cacauguccaagaagc

SEQ ID NO: 2198360 - RNA, 17 nt, Human
cacauguccaagaagcc

SEQ ID NO: 2198361 - RNA, 21 nt, Human
cacaugagaucuaggugagga

SEQ ID NO: 2198362 - RNA, 18 nt, Human
cacaugagcuauuuccau

SEQ ID NO: 2198363 - RNA, 14 nt, Human
cacaugagucccag

SEQ ID NO: 2198364 - RNA, 16 nt, Human
cacaugagauaauaug

SEQ ID NO: 2198365 - RNA, 18 nt, Human
cacaugagucccaguggg

SEQ ID NO: 2198366 - RNA, 15 nt, Human
cacaugagucccagu

SEQ ID NO: 2198367 - RNA, 17 nt, Human
cacaugagucccagugg

SEQ ID NO: 2198368 - RNA, 19 nt, Human
cacaugcaaggucauuuuu

SEQ ID NO: 2198369 - RNA, 17 nt, Human
cacaugcaaggucauuu

SEQ ID NO: 2198370 - RNA, 18 nt, Human
cacaugcacgugugugca

SEQ ID NO: 2198371 - RNA, 20 nt, Human
cacaugcaaggucauuuuuu

SEQ ID NO: 2198372 - RNA, 14 nt, Human
cacaugcauacaca

SEQ ID NO: 2198373 - RNA, 13 nt, Human
cacaugcauacac

SEQ ID NO: 2198374 - RNA, 18 nt, Human
cacaugcauacacacaca

SEQ ID NO: 2198375 - RNA, 17 nt, Human
cacaugcauacacacac

SEQ ID NO: 2198376 - RNA, 16 nt, Human
cacaugcauacacaca

SEQ ID NO: 2198377 - RNA, 15 nt, Human
cacaugcauacacac

SEQ ID NO: 2198378 - RNA, 17 nt, Human
caccagucacugucccu

SEQ ID NO: 2198379 - RNA, 15 nt, Human
caccagucacugucc

SEQ ID NO: 2198380 - RNA, 16 nt, Human
caccagguagaacaca

SEQ ID NO: 2198381 - RNA, 23 nt, Human
caccaggguugaccccagaggau

SEQ ID NO: 2198382 - RNA, 22 nt, Human
caccaggguugaccccagagga

SEQ ID NO: 2198383 - RNA, 21 nt, Human
caccagugacuuuuucuaaga

SEQ ID NO: 2198384 - RNA, 13 nt, Human
caccagugucccc

SEQ ID NO: 2198385 - RNA, 14 nt, Human
caccaguguccccu

SEQ ID NO: 2198386 - RNA, 16 nt, Human
caccaguguccccucc

SEQ ID NO: 2198387 - RNA, 18 nt, Human
caccaguguccccuccac

SEQ ID NO: 2198388 - RNA, 11 nt, Human
caccagcacca

SEQ ID NO: 2198389 - RNA, 21 nt, Human
caccagaggcugcagaaggcc

SEQ ID NO: 2198390 - RNA, 23 nt, Human
caccagaggcugcagaaggccaa

SEQ ID NO: 2198391 - RNA, 21 nt, Human
caccagagcauuuccaacacc

SEQ ID NO: 2198392 - RNA, 11 nt, Human
caccagagcug

SEQ ID NO: 2198393 - RNA, 16 nt, Human
caccagaggcugcaga

SEQ ID NO: 2198394 - RNA, 20 nt, Human
caccagaggcugcagaaggc

SEQ ID NO: 2198395 - RNA, 19 nt, Human
caccaggguugaccccaga

SEQ ID NO: 2198396 - RNA, 15 nt, Human
caccagggguuucuc

SEQ ID NO: 2198397 - RNA, 20 nt, Human
caccaggggcaggcacagca

SEQ ID NO: 2198398 - RNA, 21 nt, Human
caccaggggcaggcacagcac

SEQ ID NO: 2198399 - RNA, 12 nt, Human
caccaggggcag

SEQ ID NO: 2198400 - RNA, 13 nt, Human
caccaggggcagg

SEQ ID NO: 2198401 - RNA, 16 nt, Human
caccaggggcaggcac

SEQ ID NO: 2198402 - RNA, 17 nt, Human
caccaggggcaggcaca

SEQ ID NO: 2198403 - RNA, 18 nt, Human
caccaggggcaggcacag

SEQ ID NO: 2198404 - RNA, 19 nt, Human
caccaggggcaggcacagc

SEQ ID NO: 2198405 - RNA, 18 nt, Human
caccaguuccuuucaaug

SEQ ID NO: 2198406 - RNA, 18 nt, Human
caccauaggucaccuuua

SEQ ID NO: 2198407 - RNA, 21 nt, Human
caccauauuaccacagacaua

SEQ ID NO: 2198408 - RNA, 21 nt, Human
caccauauucagugcuguggc

SEQ ID NO: 2198409 - RNA, 16 nt, Human
caccauauucagugcu

SEQ ID NO: 2198410 - RNA, 13 nt, Human
caccaucaagcca

SEQ ID NO: 2198411 - RNA, 14 nt, Human
caccaucaagccac

SEQ ID NO: 2198412 - RNA, 15 nt, Human
caccaucaagccacc

SEQ ID NO: 2198413 - RNA, 19 nt, Human
caccauguuggccaggcug

SEQ ID NO: 2198414 - RNA, 20 nt, Human
caccauguuggccaggcugg

SEQ ID NO: 2198415 - RNA, 20 nt, Human
caccauguuggccaggcugc

SEQ ID NO: 2198416 - RNA, 16 nt, Human
caccauggccagccaa

SEQ ID NO: 2198417 - RNA, 12 nt, Human
caccauggccag

SEQ ID NO: 2198418 - RNA, 18 nt, Human
caccaugggguccuacca

SEQ ID NO: 2198419 - RNA, 23 nt, Human
caccaugggguccuaccaauaga

SEQ ID NO: 2198420 - RNA, 18 nt, Human
caccauguacauagcuug

SEQ ID NO: 2198421 - RNA, 20 nt, Human
caccauguugcccaggcugg

SEQ ID NO: 2198422 - RNA, 14 nt, Human
caccaucucaggcc

SEQ ID NO: 2198423 - RNA, 13 nt, Human
caccaucucaggc

SEQ ID NO: 2198424 - RNA, 13 nt, Human
caccauccugcug

SEQ ID NO: 2198425 - RNA, 18 nt, Human
caccauccgccagggccc

SEQ ID NO: 2198426 - RNA, 15 nt, Human
caccauccugcagcc

SEQ ID NO: 2198427 - RNA, 20 nt, Human
caccauccugcagccuccuc

SEQ ID NO: 2198428 - RNA, 21 nt, Human
caccauccugcagccuccucc

SEQ ID NO: 2198429 - RNA, 21 nt, Human
caccaucucaggccaccugcc

SEQ ID NO: 2198430 - RNA, 20 nt, Human
caccaucucaggccaccugc

SEQ ID NO: 2198431 - RNA, 19 nt, Human
caccaucucaggccaccug

SEQ ID NO: 2198432 - RNA, 18 nt, Human
caccaucucaggccaccu

SEQ ID NO: 2198433 - RNA, 22 nt, Human
caccaucucaggccaccugccc

SEQ ID NO: 2198434 - RNA, 23 nt, Human
caccaucuuaagagaugccucau

SEQ ID NO: 2198435 - RNA, 14 nt, Human
caccaucuuugcag

SEQ ID NO: 2198436 - RNA, 11 nt, Human
caccaugaaac

SEQ ID NO: 2198437 - RNA, 21 nt, Human
caccaugcagugccccuagcu

SEQ ID NO: 2198438 - RNA, 22 nt, Human
caccaugcagugccccuagcuu

SEQ ID NO: 2198439 - RNA, 21 nt, Human
caccaugccaggcuaauuuuu

SEQ ID NO: 2198440 - RNA, 15 nt, Human
caccaucaugucugg

SEQ ID NO: 2198441 - RNA, 17 nt, Human
caccaucaugucuggcu

SEQ ID NO: 2198442 - RNA, 18 nt, Human
caccaucaugucuggcua

SEQ ID NO: 2198443 - RNA, 15 nt, Human
caccaucccuuuuug

SEQ ID NO: 2198444 - RNA, 16 nt, Human
caccaucccuuuuuga

SEQ ID NO: 2198445 - RNA, 19 nt, Human
caccaucccuuuuugaagu

SEQ ID NO: 2198446 - RNA, 20 nt, Human
caccaucccuuuuugaagug

SEQ ID NO: 2198447 - RNA, 21 nt, Human
caccaucccuuuuugaagugu

SEQ ID NO: 2198448 - RNA, 16 nt, Human
caccaucaagccacca

SEQ ID NO: 2198449 - RNA, 17 nt, Human
caccaucaagccaccaa

SEQ ID NO: 2198450 - RNA, 19 nt, Human
caccaucaagccaccaaca

SEQ ID NO: 2198451 - RNA, 24 nt, Human
caccaucaagccaccaacauacuc

SEQ ID NO: 2198452 - RNA, 14 nt, Human
caccaagccaaggg

SEQ ID NO: 2198453 - RNA, 14 nt, Human
caccaagcugugcc

SEQ ID NO: 2198454 - RNA, 13 nt, Human
caccaagcccagu

SEQ ID NO: 2198455 - RNA, 12 nt, Human
caccaagcccag

SEQ ID NO: 2198456 - RNA, 19 nt, Human
caccaagcacagcagccug

SEQ ID NO: 2198457 - RNA, 18 nt, Human
caccaagcacagcagccu

SEQ ID NO: 2198458 - RNA, 21 nt, Human
caccaagcaggaaaugaaaau

SEQ ID NO: 2198459 - RNA, 13 nt, Human
caccaagccaagg

SEQ ID NO: 2198460 - RNA, 18 nt, Human
caccaauugauuuuaaac

SEQ ID NO: 2198461 - RNA, 15 nt, Human
caccaagcugugcca

SEQ ID NO: 2198462 - RNA, 16 nt, Human
caccaagcugugccac

SEQ ID NO: 2198463 - RNA, 18 nt, Human
caccaagcugugccaccc

SEQ ID NO: 2198464 - RNA, 20 nt, Human
caccaagcugugccacccug

SEQ ID NO: 2198465 - RNA, 21 nt, Human
caccaagcugugccacccugg

SEQ ID NO: 2198466 - RNA, 22 nt, Human
caccaagcugugccacccuggg

SEQ ID NO: 2198467 - RNA, 23 nt, Human
caccaagcugugccacccugggc

SEQ ID NO: 2198468 - RNA, 10 nt, Human
caccaagggc

SEQ ID NO: 2198469 - RNA, 18 nt, Human
caccaagggcgcaagagu

SEQ ID NO: 2198470 - RNA, 19 nt, Human
caccaagggcgcaagagua

SEQ ID NO: 2198471 - RNA, 23 nt, Human
caccaagggcgcaagaguagcgg

SEQ ID NO: 2198472 - RNA, 14 nt, Human
caccaaggucuuca

SEQ ID NO: 2198473 - RNA, 15 nt, Human
caccaaggucuucag

SEQ ID NO: 2198474 - RNA, 20 nt, Human
caccaaggucuucagccauc

SEQ ID NO: 2198475 - RNA, 21 nt, Human
caccaaggucuucagccauca

SEQ ID NO: 2198476 - RNA, 15 nt, Human
caccaagaaagcagg

SEQ ID NO: 2198477 - RNA, 18 nt, Human
caccaacucuugcagguc

SEQ ID NO: 2198478 - RNA, 22 nt, Human
caccaagacuuguuuuaugcuc

SEQ ID NO: 2198479 - RNA, 13 nt, Human
caccaagcacagc

SEQ ID NO: 2198480 - RNA, 17 nt, Human
caccaagcacagcagcc

SEQ ID NO: 2198481 - RNA, 16 nt, Human
caccaagcacagcagc

SEQ ID NO: 2198482 - RNA, 15 nt, Human
caccaagcacagcag

SEQ ID NO: 2198483 - RNA, 14 nt, Human
caccaagcacagca

SEQ ID NO: 2198484 - RNA, 14 nt, Human
caccaacucuugca

SEQ ID NO: 2198485 - RNA, 17 nt, Human
caccaacgucugugcca

SEQ ID NO: 2198486 - RNA, 18 nt, Human
cacauguccaagaagccc

SEQ ID NO: 2198487 - RNA, 19 nt, Human
cacauguccaagaagccca

SEQ ID NO: 2198488 - RNA, 21 nt, Human
cacauguccaagaagcccagg

SEQ ID NO: 2198489 - RNA, 22 nt, Human
cacauguccaagaagcccagga

SEQ ID NO: 2198490 - RNA, 15 nt, Human
caccacgauguggcc

SEQ ID NO: 2198491 - RNA, 21 nt, Human
caccaccuucccagcucuccc

SEQ ID NO: 2198492 - RNA, 22 nt, Human
caccaccuucccagcucucccu

SEQ ID NO: 2198493 - RNA, 19 nt, Human
caccaccuucccagcucuc

SEQ ID NO: 2198494 - RNA, 18 nt, Human
caccaccuucccagcucu

SEQ ID NO: 2198495 - RNA, 16 nt, Human
caccaccuucccagcu

SEQ ID NO: 2198496 - RNA, 15 nt, Human
caccaccuucccagc

SEQ ID NO: 2198497 - RNA, 21 nt, Human
caccacgauguggcccuggcc

SEQ ID NO: 2198498 - RNA, 20 nt, Human
caccacgauguggcccuggc

SEQ ID NO: 2198499 - RNA, 19 nt, Human
caccacgauguggcccugg

SEQ ID NO: 2198500 - RNA, 18 nt, Human
caccacgauguggcccug

SEQ ID NO: 2198501 - RNA, 14 nt, Human
caccacgcccggcu

SEQ ID NO: 2198502 - RNA, 15 nt, Human
caccacgcccggcua

SEQ ID NO: 2198503 - RNA, 19 nt, Human
caccacgcuggggucuggg

SEQ ID NO: 2198504 - RNA, 16 nt, Human
caccacggccacuggc

SEQ ID NO: 2198505 - RNA, 14 nt, Human
caccagacacccag

SEQ ID NO: 2198506 - RNA, 18 nt, Human
caccagacacccaggacu

SEQ ID NO: 2198507 - RNA, 17 nt, Human
caccagacacccaggac

SEQ ID NO: 2198508 - RNA, 16 nt, Human
caccagacacccagga

SEQ ID NO: 2198509 - RNA, 15 nt, Human
caccagacacccagg

SEQ ID NO: 2198510 - RNA, 14 nt, Human
caccaccuucccag

SEQ ID NO: 2198511 - RNA, 13 nt, Human
caccaccuuccca

SEQ ID NO: 2198512 - RNA, 14 nt, Human
caccacagacacac

SEQ ID NO: 2198513 - RNA, 17 nt, Human
caccacacccagccuca

SEQ ID NO: 2198514 - RNA, 18 nt, Human
caccacacccagccucag

SEQ ID NO: 2198515 - RNA, 12 nt, Human
caccacagacac

SEQ ID NO: 2198516 - RNA, 13 nt, Human
caccacagacaca

SEQ ID NO: 2198517 - RNA, 19 nt, Human
caccacacugauccagccc

SEQ ID NO: 2198518 - RNA, 15 nt, Human
caccacacucagccc

SEQ ID NO: 2198519 - RNA, 19 nt, Human
caccacacccagcccacuu

SEQ ID NO: 2198520 - RNA, 14 nt, Human
caccacacucagcc

SEQ ID NO: 2198521 - RNA, 24 nt, Human
caccaauugguuaaucuuuccuga

SEQ ID NO: 2198522 - RNA, 15 nt, Human
caccacacccagccu

SEQ ID NO: 2198523 - RNA, 16 nt, Human
caccacacccagccuc

SEQ ID NO: 2198524 - RNA, 17 nt, Human
caccagagcccaccuug

SEQ ID NO: 2198525 - RNA, 18 nt, Human
caccagagcccaccuugg

SEQ ID NO: 2198526 - RNA, 20 nt, Human
caccagagcccaccuuggcu

SEQ ID NO: 2198527 - RNA, 22 nt, Human
caccagagcccaccuuggcuca

SEQ ID NO: 2198528 - RNA, 22 nt, Human
caccacgauguggcccuggccu

SEQ ID NO: 2198529 - RNA, 16 nt, Human
caccagagaccguccu

SEQ ID NO: 2198530 - RNA, 19 nt, Human
caccagagaccguccucac

SEQ ID NO: 2198531 - RNA, 20 nt, Human
caccagagaccguccucacc

SEQ ID NO: 2198532 - RNA, 21 nt, Human
caccagagaccguccucaccc

SEQ ID NO: 2198533 - RNA, 14 nt, Human
caccagagagggac

SEQ ID NO: 2198534 - RNA, 20 nt, Human
caccagacacccaggacuua

SEQ ID NO: 2198535 - RNA, 19 nt, Human
caccagacacccaggacuu

SEQ ID NO: 2198536 - RNA, 11 nt, Human
caccagagacc

SEQ ID NO: 2198537 - RNA, 15 nt, Human
caccagagcccaccu

SEQ ID NO: 2198538 - RNA, 21 nt, Human
caccagagagggacugacacc

SEQ ID NO: 2198539 - RNA, 12 nt, Human
caccagagcaga

SEQ ID NO: 2198540 - RNA, 16 nt, Human
caccagagcagaugca

SEQ ID NO: 2198541 - RNA, 17 nt, Human
caccagagcagaugcag

SEQ ID NO: 2198542 - RNA, 18 nt, Human
caccagagcagaugcaga

SEQ ID NO: 2198543 - RNA, 19 nt, Human
caccagagcagaugcagag

SEQ ID NO: 2198544 - RNA, 20 nt, Human
caccagagcagaugcagaga

SEQ ID NO: 2198545 - RNA, 23 nt, Human
uuuucacacaauacaauaaguua

SEQ ID NO: 2198546 - RNA, 14 nt, Human
uuuucacaaauaaa

SEQ ID NO: 2198547 - RNA, 18 nt, Human
uuuucaauuuugcaugcu

SEQ ID NO: 2198548 - RNA, 19 nt, Human
uuuucacugcuggcugccu

SEQ ID NO: 2198549 - RNA, 20 nt, Human
uuuucacugcuggcugccuu

SEQ ID NO: 2198550 - RNA, 20 nt, Human
uuuucacggaaguuuucaau

SEQ ID NO: 2198551 - RNA, 19 nt, Human
uuuucacggaaguuuucaa

SEQ ID NO: 2198552 - RNA, 21 nt, Human
uuuucacuggaguuacauuaa

SEQ ID NO: 2198553 - RNA, 15 nt, Human
uuuucagaaaauauu

SEQ ID NO: 2198554 - RNA, 16 nt, Human
uuuucacuguagaaug

SEQ ID NO: 2198555 - RNA, 18 nt, Human
uuuucacuuugugauuau

SEQ ID NO: 2198556 - RNA, 14 nt, Human
uuuucaauauuuau

SEQ ID NO: 2198557 - RNA, 16 nt, Human
uuuucaauauuuauua

SEQ ID NO: 2198558 - RNA, 10 nt, Human
uuuucaauua

SEQ ID NO: 2198559 - RNA, 12 nt, Human
uuuucaauuaaa

SEQ ID NO: 2198560 - RNA, 13 nt, Human
uuuucaauuaaac

SEQ ID NO: 2198561 - RNA, 14 nt, Human
uuuucaauuaaacg

SEQ ID NO: 2198562 - RNA, 15 nt, Human
uuuucaauuaaacgg

SEQ ID NO: 2198563 - RNA, 16 nt, Human
uuuucaauuaaacgga

SEQ ID NO: 2198564 - RNA, 17 nt, Human
uuuucaauuaaacggau

SEQ ID NO: 2198565 - RNA, 18 nt, Human
uuuucaauuaaacggauu

SEQ ID NO: 2198566 - RNA, 21 nt, Human
uuuucaauuaaacggauuauu

SEQ ID NO: 2198567 - RNA, 14 nt, Human
uuuucaauuuugca

SEQ ID NO: 2198568 - RNA, 22 nt, Human
uuuucaauuaaacggauuauuu

SEQ ID NO: 2198569 - RNA, 13 nt, Human
uuuucacaaauaa

SEQ ID NO: 2198570 - RNA, 15 nt, Human
uuuucacaguucucu

SEQ ID NO: 2198571 - RNA, 16 nt, Human
uuuucaagaauaauca

SEQ ID NO: 2198572 - RNA, 16 nt, Human
uuuucaaggcccucag

SEQ ID NO: 2198573 - RNA, 23 nt, Human
uuuucaacugccaaaaugcucua

SEQ ID NO: 2198574 - RNA, 13 nt, Human
uuuucaacugcca

SEQ ID NO: 2198575 - RNA, 15 nt, Human
uuuucaagaaacuga

SEQ ID NO: 2198576 - RNA, 14 nt, Human
uuuucaagaaacug

SEQ ID NO: 2198577 - RNA, 17 nt, Human
uuuucaacgcagcccug

SEQ ID NO: 2198578 - RNA, 15 nt, Human
uuuuaugcaaauauu

SEQ ID NO: 2198579 - RNA, 23 nt, Human
uuuuaugcaaauauuuuuuugua

SEQ ID NO: 2198580 - RNA, 21 nt, Human
uuuucaacgcagcccugcuuu

SEQ ID NO: 2198581 - RNA, 22 nt, Human
uuuucaacgcagcccugcuuug

SEQ ID NO: 2198582 - RNA, 17 nt, Human
uuuuaucccucaccugu

SEQ ID NO: 2198583 - RNA, 19 nt, Human
uuuuccuccgggagagggg

SEQ ID NO: 2198584 - RNA, 21 nt, Human
uuuuccucccuucugcuacug

SEQ ID NO: 2198585 - RNA, 20 nt, Human
uuuuccucccuucugcuacu

SEQ ID NO: 2198586 - RNA, 21 nt, Human
uuuuccucccuuggguucuga

SEQ ID NO: 2198587 - RNA, 22 nt, Human
uuuuccucccuuggguucugau

SEQ ID NO: 2198588 - RNA, 13 nt, Human
uuuuccugaaaac

SEQ ID NO: 2198589 - RNA, 13 nt, Human
uuuucccaaagcc

SEQ ID NO: 2198590 - RNA, 17 nt, Human
uuuuccucccuucugcu

SEQ ID NO: 2198591 - RNA, 14 nt, Human
uuuuccucccuucu

SEQ ID NO: 2198592 - RNA, 13 nt, Human
uuuuccucccuca

SEQ ID NO: 2198593 - RNA, 13 nt, Human
uuuuccuauuugu

SEQ ID NO: 2198594 - RNA, 18 nt, Human
uuuuccuauuuucagccc

SEQ ID NO: 2198595 - RNA, 16 nt, Human
uuuuccauugguuuac

SEQ ID NO: 2198596 - RNA, 14 nt, Human
uuuuccauguaucu

SEQ ID NO: 2198597 - RNA, 17 nt, Human
uuuuccauuguuugaaa

SEQ ID NO: 2198598 - RNA, 20 nt, Human
uuuuccaugcguguuucuga

SEQ ID NO: 2198599 - RNA, 16 nt, Human
uuuucagaaaauauua

SEQ ID NO: 2198600 - RNA, 18 nt, Human
uuuuccaugaguccccug

SEQ ID NO: 2198601 - RNA, 19 nt, Human
uuuuccaugaguccccugu

SEQ ID NO: 2198602 - RNA, 19 nt, Human
uuuucgaagcucagcccac

SEQ ID NO: 2198603 - RNA, 14 nt, Human
uuuucuucucccuc

SEQ ID NO: 2198604 - RNA, 18 nt, Human
uuuucuucuucccucccu

SEQ ID NO: 2198605 - RNA, 14 nt, Human
uuuucuucuucccu

SEQ ID NO: 2198606 - RNA, 15 nt, Human
uuuucuucuucccuc

SEQ ID NO: 2198607 - RNA, 17 nt, Human
uuuucuugcaugaggcu

SEQ ID NO: 2198608 - RNA, 15 nt, Human
uuuuccuugaagccg

SEQ ID NO: 2198609 - RNA, 17 nt, Human
uuuuccuuugaauccuc

SEQ ID NO: 2198610 - RNA, 16 nt, Human
uuuuccuuguccccac

SEQ ID NO: 2198611 - RNA, 12 nt, Human
uuuuccuuuaaa

SEQ ID NO: 2198612 - RNA, 19 nt, Human
uuuuccuuuuuuauacaca

SEQ ID NO: 2198613 - RNA, 21 nt, Human
uuuuccuuuaaaaaaauuuaa

SEQ ID NO: 2198614 - RNA, 16 nt, Human
uuuuccuuugucauca

SEQ ID NO: 2198615 - RNA, 23 nt, Human
uuuucgaacauucuuugccuggu

SEQ ID NO: 2198616 - RNA, 18 nt, Human
uuuuccucuucuauuuug

SEQ ID NO: 2198617 - RNA, 14 nt, Human
uuuuccuugaagcc

SEQ ID NO: 2198618 - RNA, 15 nt, Human
uuuuccuucagugcc

SEQ ID NO: 2198619 - RNA, 15 nt, Human
uuuuacugaagccuu

SEQ ID NO: 2198620 - RNA, 13 nt, Human
uuuuacugaacaa

SEQ ID NO: 2198621 - RNA, 11 nt, Human
uuuuacugaac

SEQ ID NO: 2198622 - RNA, 19 nt, Human
uuuuacugaagccuuucuu

SEQ ID NO: 2198623 - RNA, 14 nt, Human
uuuuacugaacaau

SEQ ID NO: 2198624 - RNA, 14 nt, Human
uuuuacugccacuc

SEQ ID NO: 2198625 - RNA, 22 nt, Human
uuuuacuugcauugaauauauu

SEQ ID NO: 2198626 - RNA, 17 nt, Human
uuuuacugccacucuuu

SEQ ID NO: 2198627 - RNA, 15 nt, Human
uuuuauauauacagu

SEQ ID NO: 2198628 - RNA, 14 nt, Human
uuuuacuguacaga

SEQ ID NO: 2198629 - RNA, 20 nt, Human
uuuuauaucaauuuaaaaaa

SEQ ID NO: 2198630 - RNA, 22 nt, Human
uuuuauaugaagauaaguguau

SEQ ID NO: 2198631 - RNA, 15 nt, Human
uuuuauaugcuucug

SEQ ID NO: 2198632 - RNA, 20 nt, Human
uuuuauaugcuucuguuuua

SEQ ID NO: 2198633 - RNA, 19 nt, Human
uuuuaucauuuucaaaaug

SEQ ID NO: 2198634 - RNA, 18 nt, Human
uuuuaucgucacugcuua

SEQ ID NO: 2198635 - RNA, 16 nt, Human
uuuuaugauacuugaa

SEQ ID NO: 2198636 - RNA, 20 nt, Human
uuuuaugauacuugaaaauu

SEQ ID NO: 2198637 - RNA, 15 nt, Human
uuuuaucaugacaug

SEQ ID NO: 2198638 - RNA, 12 nt, Human
uuuuaucaguag

SEQ ID NO: 2198639 - RNA, 16 nt, Human
uuuuaucaugcauguc

SEQ ID NO: 2198640 - RNA, 17 nt, Human
uuuuaucaugacauguu

SEQ ID NO: 2198641 - RNA, 19 nt, Human
uuuuaucaugacauguuau

SEQ ID NO: 2198642 - RNA, 11 nt, Human
uuuuauauuua

SEQ ID NO: 2198643 - RNA, 22 nt, Human
uuuuauauugauaacagcacug

SEQ ID NO: 2198644 - RNA, 15 nt, Human
uuuuaucacauguau

SEQ ID NO: 2198645 - RNA, 17 nt, Human
uuuuaucacauguaugu

SEQ ID NO: 2198646 - RNA, 17 nt, Human
uuuuauauuaaaauaag

SEQ ID NO: 2198647 - RNA, 14 nt, Human
uuuuauaugucaaa

SEQ ID NO: 2198648 - RNA, 23 nt, Human
uuuuauauuaaaauaagcacugu

SEQ ID NO: 2198649 - RNA, 10 nt, Human
uuuuauauuu

SEQ ID NO: 2198650 - RNA, 13 nt, Human
uuuuaauuugaua

SEQ ID NO: 2198651 - RNA, 22 nt, Human
uuuuaauuuauuuauuaagaug

SEQ ID NO: 2198652 - RNA, 12 nt, Human
uuuuaauuuugu

SEQ ID NO: 2198653 - RNA, 14 nt, Human
uuuuaauuuuaacc

SEQ ID NO: 2198654 - RNA, 13 nt, Human
uuuuaauuuugua

SEQ ID NO: 2198655 - RNA, 16 nt, Human
uuuuaauuuuguauuu

SEQ ID NO: 2198656 - RNA, 15 nt, Human
uuuuaauuuuguauu

SEQ ID NO: 2198657 - RNA, 16 nt, Human
uuuuacagcugccugc

SEQ ID NO: 2198658 - RNA, 16 nt, Human
uuuuacauacugcugu

SEQ ID NO: 2198659 - RNA, 15 nt, Human
uuuuacauacugcug

SEQ ID NO: 2198660 - RNA, 15 nt, Human
uuuuacauucugaau

SEQ ID NO: 2198661 - RNA, 13 nt, Human
uuuuacuccccuu

SEQ ID NO: 2198662 - RNA, 15 nt, Human
uuuuacuccaguggu

SEQ ID NO: 2198663 - RNA, 18 nt, Human
uuuuacccauauccccuc

SEQ ID NO: 2198664 - RNA, 15 nt, Human
uuuuacuagaacaca

SEQ ID NO: 2198665 - RNA, 15 nt, Human
uuuuacuacugugga

SEQ ID NO: 2198666 - RNA, 22 nt, Human
uuuuaccaugccccugagcaau

SEQ ID NO: 2198667 - RNA, 14 nt, Human
uuuuacccauaucc

SEQ ID NO: 2198668 - RNA, 13 nt, Human
uuuuaccaaguuu

SEQ ID NO: 2198669 - RNA, 21 nt, Human
uuuuaauuuauuuauacuauu

SEQ ID NO: 2198670 - RNA, 23 nt, Human
uuuuaauuuaugaguuuuugaua

SEQ ID NO: 2198671 - RNA, 20 nt, Human
uuuuaaacaaaauagaagcu

SEQ ID NO: 2198672 - RNA, 16 nt, Human
uuuuaaacaaaauaga

SEQ ID NO: 2198673 - RNA, 12 nt, Human
uuuuaaaaugag

SEQ ID NO: 2198674 - RNA, 19 nt, Human
uuuuaaaaugagagucacu

SEQ ID NO: 2198675 - RNA, 22 nt, Human
uuuuaaaaugagaaaucuaaaa

SEQ ID NO: 2198676 - RNA, 10 nt, Human
uuuguuguua

SEQ ID NO: 2198677 - RNA, 12 nt, Human
uuuguuuacaca

SEQ ID NO: 2198678 - RNA, 14 nt, Human
uuuguuuaaaagga

SEQ ID NO: 2198679 - RNA, 17 nt, Human
uuuuaaaaucuuuucua

SEQ ID NO: 2198680 - RNA, 18 nt, Human
uuuuaaaaucuuuucuau

SEQ ID NO: 2198681 - RNA, 15 nt, Human
uuuuaaaaugagaaa

SEQ ID NO: 2198682 - RNA, 23 nt, Human
uuugcauaguaccaaucauuuua

SEQ ID NO: 2198683 - RNA, 22 nt, Human
uuugcauaggugaucucauuua

SEQ ID NO: 2198684 - RNA, 21 nt, Human
uuugcauagauucccugagca

SEQ ID NO: 2198685 - RNA, 15 nt, Human
uuugccagugggaac

SEQ ID NO: 2198686 - RNA, 16 nt, Human
uuugccagugggaacu

SEQ ID NO: 2198687 - RNA, 14 nt, Human
uuugccaugggcuu

SEQ ID NO: 2198688 - RNA, 20 nt, Human
uuugccaugggcuucacugu

SEQ ID NO: 2198689 - RNA, 18 nt, Human
uuugccauguuggccagg

SEQ ID NO: 2198690 - RNA, 18 nt, Human
uuugauaguauugugcau

SEQ ID NO: 2198691 - RNA, 15 nt, Human
uuugauacuuguuca

SEQ ID NO: 2198692 - RNA, 19 nt, Human
uuugauaucacagucuaau

SEQ ID NO: 2198693 - RNA, 17 nt, Human
uuugauaucacagucua

SEQ ID NO: 2198694 - RNA, 20 nt, Human
uuugauaucacagucuaauu

SEQ ID NO: 2198695 - RNA, 17 nt, Human
uuugcacuguaugcugg

SEQ ID NO: 2198696 - RNA, 21 nt, Human
uuugcacuugugauuauuuau

SEQ ID NO: 2198697 - RNA, 14 nt, Human
uuugcagacaggca

SEQ ID NO: 2198698 - RNA, 21 nt, Human
uuugcagcagugagucucuuc

SEQ ID NO: 2198699 - RNA, 16 nt, Human
uuugcagaugacaaaa

SEQ ID NO: 2198700 - RNA, 21 nt, Human
uuugcagcugagagaaaauaa

SEQ ID NO: 2198701 - RNA, 22 nt, Human
uuugcagaaaagcaccugccga

SEQ ID NO: 2198702 - RNA, 20 nt, Human
uuugcagaaaagcaccugcc

SEQ ID NO: 2198703 - RNA, 19 nt, Human
uuugcagaaaagcaccugc

SEQ ID NO: 2198704 - RNA, 15 nt, Human
uuugcagaugacaaa

SEQ ID NO: 2198705 - RNA, 19 nt, Human
uuugcauaacguauaaaag

SEQ ID NO: 2198706 - RNA, 23 nt, Human
uuugcauaacguauaaaagccug

SEQ ID NO: 2198707 - RNA, 15 nt, Human
uuugagcaacuuucu

SEQ ID NO: 2198708 - RNA, 15 nt, Human
uuugagcaauuuucg

SEQ ID NO: 2198709 - RNA, 12 nt, Human
uuucuuagcuuu

SEQ ID NO: 2198710 - RNA, 13 nt, Human
uuucuuagcuuuu

SEQ ID NO: 2198711 - RNA, 16 nt, Human
uuucuuagcuuuuuaa

SEQ ID NO: 2198712 - RNA, 15 nt, Human
uuugagcagggcuca

SEQ ID NO: 2198713 - RNA, 22 nt, Human
uuucuuacaggcacaaaaugau

SEQ ID NO: 2198714 - RNA, 22 nt, Human
uuucuuagaaauuuauuuccua

SEQ ID NO: 2198715 - RNA, 14 nt, Human
uuucuuagaaauuu

SEQ ID NO: 2198716 - RNA, 20 nt, Human
uuucuuacugauuuuuaagu

SEQ ID NO: 2198717 - RNA, 22 nt, Human
uuucuuacugucuuuuuucuaa

SEQ ID NO: 2198718 - RNA, 18 nt, Human
uuucugaggagaaacaaa

SEQ ID NO: 2198719 - RNA, 16 nt, Human
uuucugaggagaaaca

SEQ ID NO: 2198720 - RNA, 21 nt, Human
uuucugagcccgggcugccug

SEQ ID NO: 2198721 - RNA, 10 nt, Human
uuucugagcg

SEQ ID NO: 2198722 - RNA, 14 nt, Human
uuucugagcgauua

SEQ ID NO: 2198723 - RNA, 15 nt, Human
uuucugagcugcucu

SEQ ID NO: 2198724 - RNA, 16 nt, Human
uuucugaguuccugca

SEQ ID NO: 2198725 - RNA, 17 nt, Human
uuucuuacauaauuuuu

SEQ ID NO: 2198726 - RNA, 16 nt, Human
uuugauacauauguga

SEQ ID NO: 2198727 - RNA, 16 nt, Human
uuugagugaggguuuc

SEQ ID NO: 2198728 - RNA, 16 nt, Human
uuugagugauuauuug

SEQ ID NO: 2198729 - RNA, 23 nt, Human
uuugauaauguuaaauuuguaag

SEQ ID NO: 2198730 - RNA, 19 nt, Human
uuugauacauaugugaaua

SEQ ID NO: 2198731 - RNA, 19 nt, Human
uuugauaauguuaaauuug

SEQ ID NO: 2198732 - RNA, 17 nt, Human
uuugauaauguuaaauu

SEQ ID NO: 2198733 - RNA, 16 nt, Human
uuugagguggaagagg

SEQ ID NO: 2198734 - RNA, 20 nt, Human
uuugagguuuuuaagccuua

SEQ ID NO: 2198735 - RNA, 19 nt, Human
uuugagcuuagugaaauua

SEQ ID NO: 2198736 - RNA, 17 nt, Human
uuugagcugccuucccu

SEQ ID NO: 2198737 - RNA, 19 nt, Human
uuugagcugaaaugcugca

SEQ ID NO: 2198738 - RNA, 21 nt, Human
uuugagcugaaaugcugcauu

SEQ ID NO: 2198739 - RNA, 12 nt, Human
uuugagcugccu

SEQ ID NO: 2198740 - RNA, 14 nt, Human
uuugagcugccuuc

SEQ ID NO: 2198741 - RNA, 20 nt, Human
uuugagcucugcagcccagg

SEQ ID NO: 2198742 - RNA, 14 nt, Human
uuugagcucagccc

SEQ ID NO: 2198743 - RNA, 22 nt, Human
uuugaggucuguucuuuccaaa

SEQ ID NO: 2198744 - RNA, 17 nt, Human
uuugaggucuguucuuu

SEQ ID NO: 2198745 - RNA, 12 nt, Human
uuuguuccccuc

SEQ ID NO: 2198746 - RNA, 13 nt, Human
uuuguuccccucc

SEQ ID NO: 2198747 - RNA, 15 nt, Human
uuuguuccccuccuc

SEQ ID NO: 2198748 - RNA, 16 nt, Human
uuuguugucagcugaa

SEQ ID NO: 2198749 - RNA, 16 nt, Human
uuuguuccccuccucc

SEQ ID NO: 2198750 - RNA, 18 nt, Human
uuuguuccccuccuccac

SEQ ID NO: 2198751 - RNA, 12 nt, Human
uuuguucaucug

SEQ ID NO: 2198752 - RNA, 13 nt, Human
uuuguucaucugu

SEQ ID NO: 2198753 - RNA, 15 nt, Human
uuuguuauuuugcaa

SEQ ID NO: 2198754 - RNA, 17 nt, Human
uuuguuaaauauuuaca

SEQ ID NO: 2198755 - RNA, 22 nt, Human
uuuguuaaauauuuacauauga

SEQ ID NO: 2198756 - RNA, 18 nt, Human
uuuguuaaauauuuacau

SEQ ID NO: 2198757 - RNA, 16 nt, Human
uuuguuauuuugcaac

SEQ ID NO: 2198758 - RNA, 20 nt, Human
uuuguguuguuggaaaaagu

SEQ ID NO: 2198759 - RNA, 21 nt, Human
uuuguguuguuggaaaaaguc

SEQ ID NO: 2198760 - RNA, 22 nt, Human
uuuguguuucagccauguauuu

SEQ ID NO: 2198761 - RNA, 12 nt, Human
uuugucccaggu

SEQ ID NO: 2198762 - RNA, 17 nt, Human
uuuguccuaaaacaccu

SEQ ID NO: 2198763 - RNA, 17 nt, Human
uuugucaucagccacca

SEQ ID NO: 2198764 - RNA, 21 nt, Human
uuugucaugaauucuuaugcu

SEQ ID NO: 2198765 - RNA, 20 nt, Human
uuugucauuagccugaguag

SEQ ID NO: 2198766 - RNA, 23 nt, Human
uuugucauuagccugaguagaaa

SEQ ID NO: 2198767 - RNA, 13 nt, Human
uuuguccccaccg

SEQ ID NO: 2198768 - RNA, 21 nt, Human
uuuguccccaccgcagacagg

SEQ ID NO: 2198769 - RNA, 14 nt, Human
uuugguguguuccc

SEQ ID NO: 2198770 - RNA, 18 nt, Human
uuugguuaagucuguuuu

SEQ ID NO: 2198771 - RNA, 20 nt, Human
uuugguuaagucuguuuuau

SEQ ID NO: 2198772 - RNA, 19 nt, Human
uuugguuaagucuguuuua

SEQ ID NO: 2198773 - RNA, 19 nt, Human
uuugguguguggagaugca

SEQ ID NO: 2198774 - RNA, 12 nt, Human
uuugguguguuc

SEQ ID NO: 2198775 - RNA, 13 nt, Human
uuugguguguucc

SEQ ID NO: 2198776 - RNA, 14 nt, Human
uuuggaaguuuuca

SEQ ID NO: 2198777 - RNA, 13 nt, Human
uuuggaauaaagu

SEQ ID NO: 2198778 - RNA, 13 nt, Human
uuuggaauacuuu

SEQ ID NO: 2198779 - RNA, 16 nt, Human
uuuggaauacauuucu

SEQ ID NO: 2198780 - RNA, 19 nt, Human
uuuggugguuucagaaaug

SEQ ID NO: 2198781 - RNA, 17 nt, Human
uuuggaauacuuuuugu

SEQ ID NO: 2198782 - RNA, 15 nt, Human
uuuggaauacuuuuu

SEQ ID NO: 2198783 - RNA, 22 nt, Human
uuugguuaagucuguuuuauga

SEQ ID NO: 2198784 - RNA, 15 nt, Human
uuuguaaauuaacuu

SEQ ID NO: 2198785 - RNA, 17 nt, Human
uuuguaaauuaacuuuu

SEQ ID NO: 2198786 - RNA, 16 nt, Human
uuuguaaauuaacuuu

SEQ ID NO: 2198787 - RNA, 18 nt, Human
uuuguauaacuucuuaaa

SEQ ID NO: 2198788 - RNA, 19 nt, Human
uuuguauaacuucuuaaaa

SEQ ID NO: 2198789 - RNA, 13 nt, Human
uuuguauaauugu

SEQ ID NO: 2198790 - RNA, 16 nt, Human
uuuguauaauuguauc

SEQ ID NO: 2198791 - RNA, 17 nt, Human
uuuguauaauuguaucg

SEQ ID NO: 2198792 - RNA, 18 nt, Human
uuuguauaauuguaucgu

SEQ ID NO: 2198793 - RNA, 20 nt, Human
uuuguauaauuguaucguau

SEQ ID NO: 2198794 - RNA, 22 nt, Human
uuuguaaauuaacuuuuauaaa

SEQ ID NO: 2198795 - RNA, 21 nt, Human
uuuguauaaaauaauuuuuau

SEQ ID NO: 2198796 - RNA, 11 nt, Human
uuugucaauga

SEQ ID NO: 2198797 - RNA, 23 nt, Human
uuugucaaacuguagaaaugaug

SEQ ID NO: 2198798 - RNA, 17 nt, Human
uuugucaaacuguagaa

SEQ ID NO: 2198799 - RNA, 16 nt, Human
uuugucaaacuguaga

SEQ ID NO: 2198800 - RNA, 16 nt, Human
uuuguauaguaaagug

SEQ ID NO: 2198801 - RNA, 14 nt, Human
uuugucaaacugua

SEQ ID NO: 2198802 - RNA, 17 nt, Human
uuugucaaugacaguuu

SEQ ID NO: 2198803 - RNA, 23 nt, Human
uuugucacaauccuaacacauua

SEQ ID NO: 2198804 - RNA, 14 nt, Human
uuugucagacuuua

SEQ ID NO: 2198805 - RNA, 20 nt, Human
uuugucagaacuagaauuug

SEQ ID NO: 2198806 - RNA, 22 nt, Human
uuugucagaacuagaauuugau

SEQ ID NO: 2198807 - RNA, 13 nt, Human
uuuauuucuuaaa

SEQ ID NO: 2198808 - RNA, 20 nt, Human
uuuauuuguuugugcauuug

SEQ ID NO: 2198809 - RNA, 21 nt, Human
uuuauuuuaaaacagaagaau

SEQ ID NO: 2198810 - RNA, 20 nt, Human
uuucaauaggaaaaacugau

SEQ ID NO: 2198811 - RNA, 22 nt, Human
uuucaauaggaaaaacugauuu

SEQ ID NO: 2198812 - RNA, 14 nt, Human
uuuauuuauuaaga

SEQ ID NO: 2198813 - RNA, 14 nt, Human
uuuauuuaucagug

SEQ ID NO: 2198814 - RNA, 14 nt, Human
uuuauuuauuuaca

SEQ ID NO: 2198815 - RNA, 13 nt, Human
uuuauuuauuuau

SEQ ID NO: 2198816 - RNA, 15 nt, Human
uuuauuuauuuuauc

SEQ ID NO: 2198817 - RNA, 13 nt, Human
uuuauuuccagug

SEQ ID NO: 2198818 - RNA, 16 nt, Human
uuuauuucugcauaug

SEQ ID NO: 2198819 - RNA, 16 nt, Human
uuucagagaccauugc

SEQ ID NO: 2198820 - RNA, 17 nt, Human
uuucagagaccauugca

SEQ ID NO: 2198821 - RNA, 15 nt, Human
uuucagauaaucaca

SEQ ID NO: 2198822 - RNA, 17 nt, Human
uuucaauauuuuccuuc

SEQ ID NO: 2198823 - RNA, 21 nt, Human
uuucagacucccauuccugaa

SEQ ID NO: 2198824 - RNA, 18 nt, Human
uuucagauaacuguuauu

SEQ ID NO: 2198825 - RNA, 21 nt, Human
uuucagauaaucacaauacau

SEQ ID NO: 2198826 - RNA, 15 nt, Human
uuucagcagcugcag

SEQ ID NO: 2198827 - RNA, 14 nt, Human
uuucauuguaaaac

SEQ ID NO: 2198828 - RNA, 15 nt, Human
uuucauuguaugaug

SEQ ID NO: 2198829 - RNA, 16 nt, Human
uuucauuguaugaugu

SEQ ID NO: 2198830 - RNA, 24 nt, Human
uuuccaaaaguggccucuuugucu

SEQ ID NO: 2198831 - RNA, 17 nt, Human
uuucauuguaugaugug

SEQ ID NO: 2198832 - RNA, 18 nt, Human
uuucauuguaugaugugu

SEQ ID NO: 2198833 - RNA, 14 nt, Human
uuuccaaaauaauu

SEQ ID NO: 2198834 - RNA, 15 nt, Human
uuuccaaaguacacu

SEQ ID NO: 2198835 - RNA, 12 nt, Human
uuuccaaaguac

SEQ ID NO: 2198836 - RNA, 15 nt, Human
uuuccaaauucacaa

SEQ ID NO: 2198837 - RNA, 14 nt, Human
uuuccaaaggcauu

SEQ ID NO: 2198838 - RNA, 15 nt, Human
uuuccaaauaaaaug

SEQ ID NO: 2198839 - RNA, 13 nt, Human
uuuccaaaggcau

SEQ ID NO: 2198840 - RNA, 23 nt, Human
uuuccacuuuguucuuuaggaga

SEQ ID NO: 2198841 - RNA, 19 nt, Human
uuuccagacuuccuugaga

SEQ ID NO: 2198842 - RNA, 18 nt, Human
uuuccagacuuccuugag

SEQ ID NO: 2198843 - RNA, 19 nt, Human
uuuccagaggcuauuauuu

SEQ ID NO: 2198844 - RNA, 13 nt, Human
uuuccaggaaggc

SEQ ID NO: 2198845 - RNA, 14 nt, Human
uuucagcuucugcu

SEQ ID NO: 2198846 - RNA, 16 nt, Human
uuucagccaagaauuc

SEQ ID NO: 2198847 - RNA, 15 nt, Human
uuucagccaagaauu

SEQ ID NO: 2198848 - RNA, 21 nt, Human
uuucaggauacucugucagau

SEQ ID NO: 2198849 - RNA, 20 nt, Human
uuucaggauacucugucaga

SEQ ID NO: 2198850 - RNA, 19 nt, Human
uuucaggauacucugucag

SEQ ID NO: 2198851 - RNA, 16 nt, Human
uuucaggauacucugu

SEQ ID NO: 2198852 - RNA, 13 nt, Human
uuucaggauacuc

SEQ ID NO: 2198853 - RNA, 22 nt, Human
uuucaggagagaguugaaccua

SEQ ID NO: 2198854 - RNA, 19 nt, Human
uuucagcuucugcugggcu

SEQ ID NO: 2198855 - RNA, 20 nt, Human
uuucagcuucugcugggcug

SEQ ID NO: 2198856 - RNA, 16 nt, Human
uuucaggaccuuuuga

SEQ ID NO: 2198857 - RNA, 17 nt, Human
uuucaggagcagccuca

SEQ ID NO: 2198858 - RNA, 22 nt, Human
uuucauugauaugaaaaauaug

SEQ ID NO: 2198859 - RNA, 21 nt, Human
uuucauugauaugaaaaauau

SEQ ID NO: 2198860 - RNA, 22 nt, Human
uuucauugacuaucaaacugaa

SEQ ID NO: 2198861 - RNA, 15 nt, Human
uuucauucuccugcc

SEQ ID NO: 2198862 - RNA, 13 nt, Human
uuucauucuucuc

SEQ ID NO: 2198863 - RNA, 22 nt, Human
uuucauugcugggcuugucugu

SEQ ID NO: 2198864 - RNA, 19 nt, Human
uuucagggagguggcuggg

SEQ ID NO: 2198865 - RNA, 22 nt, Human
uuucagggagguggcuggguuu

SEQ ID NO: 2198866 - RNA, 21 nt, Human
uuucaggggucgucaccaccu

SEQ ID NO: 2198867 - RNA, 22 nt, Human
uuucagggcuaacgaccacagg

SEQ ID NO: 2198868 - RNA, 13 nt, Human
uuucaggugacau

SEQ ID NO: 2198869 - RNA, 22 nt, Human
uuuccucuucuauuuuguaaac

SEQ ID NO: 2198870 - RNA, 21 nt, Human
uuuccucuucuauuuuguaaa

SEQ ID NO: 2198871 - RNA, 22 nt, Human
uuuccucaaaacuucagacaua

SEQ ID NO: 2198872 - RNA, 23 nt, Human
uuuccugacagaaggacucaggu

SEQ ID NO: 2198873 - RNA, 21 nt, Human
uuuccugaaacaacuuggaaa

SEQ ID NO: 2198874 - RNA, 21 nt, Human
uuuccucuuuggucuacacug

SEQ ID NO: 2198875 - RNA, 18 nt, Human
uuuccuagcacacacuuu

SEQ ID NO: 2198876 - RNA, 24 nt, Human
uuuccuacucucaggaucaagaaa

SEQ ID NO: 2198877 - RNA, 22 nt, Human
uuuccaggcugguucggauuug

SEQ ID NO: 2198878 - RNA, 15 nt, Human
uuuccaggcugguuc

SEQ ID NO: 2198879 - RNA, 23 nt, Human
uuuccuagauggcagucacugaa

SEQ ID NO: 2198880 - RNA, 21 nt, Human
uuuccuaguucuguagaaaug

SEQ ID NO: 2198881 - RNA, 23 nt, Human
uuuccuagcccucucacauuuau

SEQ ID NO: 2198882 - RNA, 21 nt, Human
uuuccuagcacacacuuuugg

SEQ ID NO: 2198883 - RNA, 17 nt, Human
uuuccuagcccucucac

SEQ ID NO: 2198884 - RNA, 13 nt, Human
uuucuaagagaag

SEQ ID NO: 2198885 - RNA, 11 nt, Human
uuucuaagaga

SEQ ID NO: 2198886 - RNA, 16 nt, Human
uuucuaagagaaguua

SEQ ID NO: 2198887 - RNA, 19 nt, Human
uuucuaaaggccucuuccu

SEQ ID NO: 2198888 - RNA, 18 nt, Human
uuucuaaaggcuaccuuu

SEQ ID NO: 2198889 - RNA, 22 nt, Human
uuuccugagcuuggccagaagg

SEQ ID NO: 2198890 - RNA, 18 nt, Human
uuuccugagcuuggccag

SEQ ID NO: 2198891 - RNA, 13 nt, Human
uuuccugagcuug

SEQ ID NO: 2198892 - RNA, 20 nt, Human
uuuccugagaccacagagag

SEQ ID NO: 2198893 - RNA, 14 nt, Human
uuucuaaaggcuac

SEQ ID NO: 2198894 - RNA, 14 nt, Human
uuucuaaagcugcc

SEQ ID NO: 2198895 - RNA, 17 nt, Human
uuucuaaagcugccagc

SEQ ID NO: 2198896 - RNA, 12 nt, Human
uuucucuuucuc

SEQ ID NO: 2198897 - RNA, 16 nt, Human
uuucucuuucucuccu

SEQ ID NO: 2198898 - RNA, 14 nt, Human
uuucucuuucuccu

SEQ ID NO: 2198899 - RNA, 19 nt, Human
uuucugagaagguccuuaa

SEQ ID NO: 2198900 - RNA, 16 nt, Human
uuucugagaagguccu

SEQ ID NO: 2198901 - RNA, 16 nt, Human
uuucugagcacacuuu

SEQ ID NO: 2198902 - RNA, 11 nt, Human
uuucugagccc

SEQ ID NO: 2198903 - RNA, 12 nt, Human
uuucugagcccg

SEQ ID NO: 2198904 - RNA, 15 nt, Human
uuucugagcccgggc

SEQ ID NO: 2198905 - RNA, 22 nt, Human
uuucugagaaagacuauucaaa

SEQ ID NO: 2198906 - RNA, 20 nt, Human
uuucuccuuagucuucucau

SEQ ID NO: 2198907 - RNA, 19 nt, Human
uuucuccuuagucuucuca

SEQ ID NO: 2198908 - RNA, 15 nt, Human
uuucuccucccuucc

SEQ ID NO: 2198909 - RNA, 16 nt, Human
uuucuccucccuuccu

SEQ ID NO: 2198910 - RNA, 16 nt, Human
uuucuccuuugauaaa

SEQ ID NO: 2198911 - RNA, 17 nt, Human
uuucucuuacugcaaau

SEQ ID NO: 2198912 - RNA, 17 nt, Human
uuucucuguguuuguuc

SEQ ID NO: 2198913 - RNA, 18 nt, Human
uuucucuguguuuguucc

SEQ ID NO: 2198914 - RNA, 12 nt, Human
uuucucuugggc

SEQ ID NO: 2198915 - RNA, 21 nt, Human
uuucucuugggcugagacugg

SEQ ID NO: 2198916 - RNA, 13 nt, Human
uuucucuugggcu

SEQ ID NO: 2198917 - RNA, 16 nt, Human
uuucucuucauacuuu

SEQ ID NO: 2198918 - RNA, 19 nt, Human
uuucuagcuagaaauauga

SEQ ID NO: 2198919 - RNA, 20 nt, Human
uuucuagcccgaauacaaac

SEQ ID NO: 2198920 - RNA, 20 nt, Human
uuucuagcuagaaauaugau

SEQ ID NO: 2198921 - RNA, 22 nt, Human
uuucuagcuagaaauaugauuu

SEQ ID NO: 2198922 - RNA, 19 nt, Human
uuucuagcuguugagcugu

SEQ ID NO: 2198923 - RNA, 21 nt, Human
uuucuagcuguugagcuguuu

SEQ ID NO: 2198924 - RNA, 19 nt, Human
uuucuagcccgaauacaaa

SEQ ID NO: 2198925 - RNA, 16 nt, Human
uuucuagauuaagaua

SEQ ID NO: 2198926 - RNA, 13 nt, Human
uuucuaauguggu

SEQ ID NO: 2198927 - RNA, 14 nt, Human
uuucuaaugagaua

SEQ ID NO: 2198928 - RNA, 15 nt, Human
uuucuagccagagga

SEQ ID NO: 2198929 - RNA, 14 nt, Human
uuucuccuccaugg

SEQ ID NO: 2198930 - RNA, 15 nt, Human
uuucuccucccagga

SEQ ID NO: 2198931 - RNA, 22 nt, Human
uuucucccucucacugucugag

SEQ ID NO: 2198932 - RNA, 13 nt, Human
uuucucccucugg

SEQ ID NO: 2198933 - RNA, 17 nt, Human
uuucucccuaaacugua

SEQ ID NO: 2198934 - RNA, 13 nt, Human
uuucucccucuca

SEQ ID NO: 2198935 - RNA, 20 nt, Human
uuucucccucucacugucug

SEQ ID NO: 2198936 - RNA, 21 nt, Human
uuucucccucucacugucuga

SEQ ID NO: 2198937 - RNA, 14 nt, Human
uuucuaggaagaau

SEQ ID NO: 2198938 - RNA, 16 nt, Human
uuucuaggaagaauuu

SEQ ID NO: 2198939 - RNA, 21 nt, Human
uuucuaggaagaauuuuaaaa

SEQ ID NO: 2198940 - RNA, 22 nt, Human
uuucuaggaagaauuuuaaaaa

SEQ ID NO: 2198941 - RNA, 22 nt, Human
uuucuccccugcccccaggacu

SEQ ID NO: 2198942 - RNA, 20 nt, Human
uuucuccccugcccccagga

SEQ ID NO: 2198943 - RNA, 23 nt, Human
uuucuccccugcccccaggacug

SEQ ID NO: 2198944 - RNA, 24 nt, Human
uuucuccccugcccccaggacugg

SEQ ID NO: 2198945 - RNA, 14 nt, Human
uuuaauccagaauu

SEQ ID NO: 2198946 - RNA, 21 nt, Human
uuuaauccuucuaguuuccca

SEQ ID NO: 2198947 - RNA, 23 nt, Human
uuuaauccuucuaguuucccaca

SEQ ID NO: 2198948 - RNA, 13 nt, Human
uuuaaucuucagu

SEQ ID NO: 2198949 - RNA, 12 nt, Human
uuuacaagaaaa

SEQ ID NO: 2198950 - RNA, 21 nt, Human
uuuacaagaaaaaaugaauuu

SEQ ID NO: 2198951 - RNA, 19 nt, Human
uuuacaagaaaaaaugaau

SEQ ID NO: 2198952 - RNA, 21 nt, Human
uuuaauccagaauugaccuuu

SEQ ID NO: 2198953 - RNA, 15 nt, Human
uuuaauccccaguaa

SEQ ID NO: 2198954 - RNA, 16 nt, Human
uuuaauccccaguaaa

SEQ ID NO: 2198955 - RNA, 22 nt, Human
uuuaauccccaguaaaauugcc

SEQ ID NO: 2198956 - RNA, 13 nt, Human
uuuaaucaugaaa

SEQ ID NO: 2198957 - RNA, 14 nt, Human
uuuaaucaugaaau

SEQ ID NO: 2198958 - RNA, 19 nt, Human
uuuaaucaugaaauuacuu

SEQ ID NO: 2198959 - RNA, 24 nt, Human
uuuaaucaugaaauuacuuaucau

SEQ ID NO: 2198960 - RNA, 14 nt, Human
uuuaaucauugccu

SEQ ID NO: 2198961 - RNA, 15 nt, Human
uuuaaucauugccug

SEQ ID NO: 2198962 - RNA, 15 nt, Human
uuuacaagccccccc

SEQ ID NO: 2198963 - RNA, 21 nt, Human
uuuacaagcccccccuuccac

SEQ ID NO: 2198964 - RNA, 15 nt, Human
uuuacaaguguauau

SEQ ID NO: 2198965 - RNA, 21 nt, Human
uuuacaaguguauaucagaaa

SEQ ID NO: 2198966 - RNA, 21 nt, Human
uuuacaaucagccacauucua

SEQ ID NO: 2198967 - RNA, 16 nt, Human
uuuacaauaaauaauc

SEQ ID NO: 2198968 - RNA, 23 nt, Human
uuuacaauuguaaaacugaggca

SEQ ID NO: 2198969 - RNA, 18 nt, Human
uuuacaauuuacaaagug

SEQ ID NO: 2198970 - RNA, 16 nt, Human
uuuacaauugaaauga

SEQ ID NO: 2198971 - RNA, 15 nt, Human
uuuacaauugaaaug

SEQ ID NO: 2198972 - RNA, 19 nt, Human
uuuacaauuuuuuaucaug

SEQ ID NO: 2198973 - RNA, 15 nt, Human
uuguauuguuucaau

SEQ ID NO: 2198974 - RNA, 18 nt, Human
uuguauucuuugauguua

SEQ ID NO: 2198975 - RNA, 19 nt, Human
uuguauucuuugauguuaa

SEQ ID NO: 2198976 - RNA, 14 nt, Human
uuguauucucugag

SEQ ID NO: 2198977 - RNA, 16 nt, Human
uuguauucucugagcu

SEQ ID NO: 2198978 - RNA, 15 nt, Human
uuguauucucugagc

SEQ ID NO: 2198979 - RNA, 13 nt, Human
uuguauucuuuga

SEQ ID NO: 2198980 - RNA, 17 nt, Human
uuguauucuuugauguu

SEQ ID NO: 2198981 - RNA, 22 nt, Human
uuguauucucugagcugugcag

SEQ ID NO: 2198982 - RNA, 20 nt, Human
uuguauucucugagcugugc

SEQ ID NO: 2198983 - RNA, 14 nt, Human
uuguauuuuaacuc

SEQ ID NO: 2198984 - RNA, 18 nt, Human
uuguauuuauuccauauu

SEQ ID NO: 2198985 - RNA, 15 nt, Human
uuguauuuauuuagu

SEQ ID NO: 2198986 - RNA, 20 nt, Human
uuguauuuuacuaauaaaau

SEQ ID NO: 2198987 - RNA, 12 nt, Human
uuuaaucaugaa

SEQ ID NO: 2198988 - RNA, 16 nt, Human
uuguauuguuucaauu

SEQ ID NO: 2198989 - RNA, 14 nt, Human
uuguauuuauucaa

SEQ ID NO: 2198990 - RNA, 15 nt, Human
uuguauuuauucaau

SEQ ID NO: 2198991 - RNA, 16 nt, Human
uuguauuuauucaaua

SEQ ID NO: 2198992 - RNA, 20 nt, Human
uuguauuuauucaauaaagu

SEQ ID NO: 2198993 - RNA, 20 nt, Human
uuuagaaacacaacuauauu

SEQ ID NO: 2198994 - RNA, 17 nt, Human
uuuagaagaaguguguc

SEQ ID NO: 2198995 - RNA, 14 nt, Human
uuuagaagacucua

SEQ ID NO: 2198996 - RNA, 15 nt, Human
uuuagaagacucuac

SEQ ID NO: 2198997 - RNA, 19 nt, Human
uuuagaagaagugugucac

SEQ ID NO: 2198998 - RNA, 21 nt, Human
uuuagagaugaauuaaauuua

SEQ ID NO: 2198999 - RNA, 15 nt, Human
uuuagagaggaaaag

SEQ ID NO: 2199000 - RNA, 18 nt, Human
uuuagagaacuguggccg

SEQ ID NO: 2199001 - RNA, 20 nt, Human
uuuagacuuaauagaaacau

SEQ ID NO: 2199002 - RNA, 18 nt, Human
uuuacaugggguuuucaa

SEQ ID NO: 2199003 - RNA, 19 nt, Human
uuuacaauuuacaaagugu

SEQ ID NO: 2199004 - RNA, 15 nt, Human
uuuacauguaguagu

SEQ ID NO: 2199005 - RNA, 13 nt, Human
uuuacauuguaaa

SEQ ID NO: 2199006 - RNA, 15 nt, Human
uuuacuuuguguuca

SEQ ID NO: 2199007 - RNA, 20 nt, Human
uuuacauuguaaauaguauu

SEQ ID NO: 2199008 - RNA, 15 nt, Human
uuuacauuguaaaua

SEQ ID NO: 2199009 - RNA, 13 nt, Human
uuuacuuugaauu

SEQ ID NO: 2199010 - RNA, 15 nt, Human
uuuacuuuuaaacag

SEQ ID NO: 2199011 - RNA, 15 nt, Human
uuuacuuuuaaacug

SEQ ID NO: 2199012 - RNA, 18 nt, Human
uuuacuuuuaaacaguga

SEQ ID NO: 2199013 - RNA, 19 nt, Human
uuuacaugggguuuucaau

SEQ ID NO: 2199014 - RNA, 16 nt, Human
uuuacuuuuaaauguc

SEQ ID NO: 2199015 - RNA, 16 nt, Human
uuuacuuuuaaacugu

SEQ ID NO: 2199016 - RNA, 12 nt, Human
uuuagaaacaca

SEQ ID NO: 2199017 - RNA, 13 nt, Human
uuuauugcuuguu

SEQ ID NO: 2199018 - RNA, 14 nt, Human
uuuauugcuuuaua

SEQ ID NO: 2199019 - RNA, 16 nt, Human
uuuauuggcugagaua

SEQ ID NO: 2199020 - RNA, 17 nt, Human
uuuauugcuugauacuu

SEQ ID NO: 2199021 - RNA, 24 nt, Human
uuuauugcaucuggguagcuguaa

SEQ ID NO: 2199022 - RNA, 23 nt, Human
uuuauugcaucuggguagcugua

SEQ ID NO: 2199023 - RNA, 19 nt, Human
uuuauuccauauucaugua

SEQ ID NO: 2199024 - RNA, 23 nt, Human
uuuauuccagaaugcuguacauc

SEQ ID NO: 2199025 - RNA, 22 nt, Human
uuuauuccagaaugcuguacau

SEQ ID NO: 2199026 - RNA, 19 nt, Human
uuuauuccagaaugcugua

SEQ ID NO: 2199027 - RNA, 18 nt, Human
uuuauuccagaaugcugu

SEQ ID NO: 2199028 - RNA, 17 nt, Human
uuuauucaauuccucug

SEQ ID NO: 2199029 - RNA, 13 nt, Human
uuuauucaauaaa

SEQ ID NO: 2199030 - RNA, 17 nt, Human
uuuauucagcuucauuu

SEQ ID NO: 2199031 - RNA, 19 nt, Human
uuuauucagcuucauuugu

SEQ ID NO: 2199032 - RNA, 21 nt, Human
uuuauucagcuucauuugugu

SEQ ID NO: 2199033 - RNA, 22 nt, Human
uuuauucagcuucauuuguguc

SEQ ID NO: 2199034 - RNA, 17 nt, Human
uuuauuauuuucaccug

SEQ ID NO: 2199035 - RNA, 17 nt, Human
uuuauucaaguuauugu

SEQ ID NO: 2199036 - RNA, 18 nt, Human
uuuaugcaaggaaggaaa

SEQ ID NO: 2199037 - RNA, 17 nt, Human
uuuaugcaaggaaggaa

SEQ ID NO: 2199038 - RNA, 15 nt, Human
uuuaugcaaggaagg

SEQ ID NO: 2199039 - RNA, 14 nt, Human
uuuaugcauauuau

SEQ ID NO: 2199040 - RNA, 17 nt, Human
uuuauuguguuuuuaau

SEQ ID NO: 2199041 - RNA, 20 nt, Human
uuuauuguuaacucuugucu

SEQ ID NO: 2199042 - RNA, 17 nt, Human
uuuauuuauacacuguc

SEQ ID NO: 2199043 - RNA, 21 nt, Human
uuuauuguguuugucauuagc

SEQ ID NO: 2199044 - RNA, 22 nt, Human
uuuauuguguuugucauuagcc

SEQ ID NO: 2199045 - RNA, 15 nt, Human
uuuauuuauacuauu

SEQ ID NO: 2199046 - RNA, 15 nt, Human
uuuauuuaucaguga

SEQ ID NO: 2199047 - RNA, 16 nt, Human
uuuauuguguuuguca

SEQ ID NO: 2199048 - RNA, 17 nt, Human
uuuauuguguuugucau

SEQ ID NO: 2199049 - RNA, 13 nt, Human
uuuauugugaucu

SEQ ID NO: 2199050 - RNA, 22 nt, Human
uuuauuguuuaaaaucauuucu

SEQ ID NO: 2199051 - RNA, 19 nt, Human
uuuauuuaguuccuugagu

SEQ ID NO: 2199052 - RNA, 14 nt, Human
uuuauugucaaagu

SEQ ID NO: 2199053 - RNA, 16 nt, Human
uuuauugucaaagugg

SEQ ID NO: 2199054 - RNA, 16 nt, Human
uuuauuguaacagaca

SEQ ID NO: 2199055 - RNA, 13 nt, Human
uuuauuguauaaa

SEQ ID NO: 2199056 - RNA, 20 nt, Human
uuuauuguaacagacauugu

SEQ ID NO: 2199057 - RNA, 22 nt, Human
uuuauuguaacagacauuguuu

SEQ ID NO: 2199058 - RNA, 13 nt, Human
uuuaugaaaagag

SEQ ID NO: 2199059 - RNA, 18 nt, Human
uuuaugaaagguuuacau

SEQ ID NO: 2199060 - RNA, 19 nt, Human
uuuaugaaagguuuacauu

SEQ ID NO: 2199061 - RNA, 18 nt, Human
uuuaucuuugauucuccu

SEQ ID NO: 2199062 - RNA, 19 nt, Human
uuuaucuuugauucuccuu

SEQ ID NO: 2199063 - RNA, 18 nt, Human
uuuaucuuuauaugaaga

SEQ ID NO: 2199064 - RNA, 16 nt, Human
uuuaugcaaauauuuu

SEQ ID NO: 2199065 - RNA, 14 nt, Human
uuuaugauguauau

SEQ ID NO: 2199066 - RNA, 12 nt, Human
uuuaugauuuaa

SEQ ID NO: 2199067 - RNA, 14 nt, Human
uuuaugauuuaaua

SEQ ID NO: 2199068 - RNA, 18 nt, Human
uuuaugauuuaauaaaau

SEQ ID NO: 2199069 - RNA, 17 nt, Human
uuuaugaaggcaaaaaa

SEQ ID NO: 2199070 - RNA, 22 nt, Human
uuuaugauacuugaaaauuaac

SEQ ID NO: 2199071 - RNA, 22 nt, Human
uuuaugaagaaaaaauacauuu

SEQ ID NO: 2199072 - RNA, 12 nt, Human
uuuaugaagaaa

SEQ ID NO: 2199073 - RNA, 19 nt, Human
uuuaugaagaaaaaauaca

SEQ ID NO: 2199074 - RNA, 18 nt, Human
uuuaugaagaaaaaauac

SEQ ID NO: 2199075 - RNA, 21 nt, Human
uuuaugaaaugguuaagaauu

SEQ ID NO: 2199076 - RNA, 18 nt, Human
uuuagaguagcaugagag

SEQ ID NO: 2199077 - RNA, 16 nt, Human
uuuagagcauugccau

SEQ ID NO: 2199078 - RNA, 16 nt, Human
uuuagaguuagacugu

SEQ ID NO: 2199079 - RNA, 17 nt, Human
uuuagaguuagacuguu

SEQ ID NO: 2199080 - RNA, 14 nt, Human
uuuauaaaacuucu

SEQ ID NO: 2199081 - RNA, 23 nt, Human
uuuauaaaagaauaaaauugcac

SEQ ID NO: 2199082 - RNA, 18 nt, Human
uuuagaguuagacuguug

SEQ ID NO: 2199083 - RNA, 14 nt, Human
uuuauaaacuuuac

SEQ ID NO: 2199084 - RNA, 20 nt, Human
uuuaucuaauaccucugugu

SEQ ID NO: 2199085 - RNA, 16 nt, Human
uuuauaaaccucuaau

SEQ ID NO: 2199086 - RNA, 17 nt, Human
uuuauaaaccucuaauu

SEQ ID NO: 2199087 - RNA, 21 nt, Human
uuuaucgucacugcuuaacuu

SEQ ID NO: 2199088 - RNA, 16 nt, Human
uuuauaaacuuuaccu

SEQ ID NO: 2199089 - RNA, 16 nt, Human
uuuaucgucacugcuu

SEQ ID NO: 2199090 - RNA, 21 nt, Human
uuuucuugccaaugaggucug

SEQ ID NO: 2199091 - RNA, 13 nt, Human
uuuucuuguaauu

SEQ ID NO: 2199092 - RNA, 18 nt, Human
uuuugaaaaauuccuauu

SEQ ID NO: 2199093 - RNA, 13 nt, Human
uuuugaaaaacug

SEQ ID NO: 2199094 - RNA, 18 nt, Human
uuuucuugccucuguccc

SEQ ID NO: 2199095 - RNA, 19 nt, Human
uuuucuugccucugucccc

SEQ ID NO: 2199096 - RNA, 21 nt, Human
uuuucuugccucuguccccuu

SEQ ID NO: 2199097 - RNA, 22 nt, Human
uuuugaaaaauuccuauuguga

SEQ ID NO: 2199098 - RNA, 15 nt, Human
uuuugaaaagcuauu

SEQ ID NO: 2199099 - RNA, 16 nt, Human
uuuugaaaagcuauua

SEQ ID NO: 2199100 - RNA, 23 nt, Human
uuuugaaaagcuauuagccagga

SEQ ID NO: 2199101 - RNA, 22 nt, Human
uuuugaaauauuaaacccugga

SEQ ID NO: 2199102 - RNA, 21 nt, Human
uuuugaaaccaugaagagauu

SEQ ID NO: 2199103 - RNA, 21 nt, Human
uuuuucuggagguugauaacu

SEQ ID NO: 2199104 - RNA, 17 nt, Human
uuuuucugcuuuugaaa

SEQ ID NO: 2199105 - RNA, 14 nt, Human
uuuuucugcuuuug

SEQ ID NO: 2199106 - RNA, 22 nt, Human
uuuuucugcacugagcagaguc

SEQ ID NO: 2199107 - RNA, 23 nt, Human
uuuuucugcacugagcagagucu

SEQ ID NO: 2199108 - RNA, 20 nt, Human
uuuugaaaucuguaucugua

SEQ ID NO: 2199109 - RNA, 13 nt, Human
uuuuucugauugu

SEQ ID NO: 2199110 - RNA, 17 nt, Human
uuuuucugcacugagca

SEQ ID NO: 2199111 - RNA, 14 nt, Human
uuuuucugcacuga

SEQ ID NO: 2199112 - RNA, 15 nt, Human
uuuuuuagaucaaau

SEQ ID NO: 2199113 - RNA, 23 nt, Human
uuuuuuagaaagcauuugaaugc

SEQ ID NO: 2199114 - RNA, 16 nt, Human
uuuuucuucuguauuu

SEQ ID NO: 2199115 - RNA, 20 nt, Human
uuuuuuauacaggaugauga

SEQ ID NO: 2199116 - RNA, 23 nt, Human
uuuuucuuaaauaauaaagauca

SEQ ID NO: 2199117 - RNA, 14 nt, Human
uuuuucuguuauau

SEQ ID NO: 2199118 - RNA, 12 nt, Human
uuuuuuacuaau

SEQ ID NO: 2199119 - RNA, 15 nt, Human
uuuuuuauacacaua

SEQ ID NO: 2199120 - RNA, 16 nt, Human
uuuuuuagaucaaaua

SEQ ID NO: 2199121 - RNA, 13 nt, Human
uuuuuuaugcuaa

SEQ ID NO: 2199122 - RNA, 17 nt, Human
uuuuuuccuucagugcc

SEQ ID NO: 2199123 - RNA, 15 nt, Human
uuuuuucuaagagaa

SEQ ID NO: 2199124 - RNA, 12 nt, Human
uuuuuucuaaga

SEQ ID NO: 2199125 - RNA, 20 nt, Human
uuuuuuauacacuguaauga

SEQ ID NO: 2199126 - RNA, 16 nt, Human
uuuuuuaugcuaauca

SEQ ID NO: 2199127 - RNA, 11 nt, Human
uuuuuucuacc

SEQ ID NO: 2199128 - RNA, 12 nt, Human
uuuuuucugaau

SEQ ID NO: 2199129 - RNA, 11 nt, Human
uuuuuucugag

SEQ ID NO: 2199130 - RNA, 11 nt, Human
uucaauuaaac

SEQ ID NO: 2199131 - RNA, 12 nt, Human
uucaauuaaacg

SEQ ID NO: 2199132 - RNA, 14 nt, Human
uucaauuaaacgga

SEQ ID NO: 2199133 - RNA, 15 nt, Human
uucaauuaaacggau

SEQ ID NO: 2199134 - RNA, 16 nt, Human
uucaauuaaacggauu

SEQ ID NO: 2199135 - RNA, 18 nt, Human
uucaauuaaacggauuau

SEQ ID NO: 2199136 - RNA, 19 nt, Human
uucaauuaaacggauuauu

SEQ ID NO: 2199137 - RNA, 13 nt, Human
uucaauucagugc

SEQ ID NO: 2199138 - RNA, 17 nt, Human
uucaauucaacacuccc

SEQ ID NO: 2199139 - RNA, 19 nt, Human
uucaauucagugcuguacu

SEQ ID NO: 2199140 - RNA, 12 nt, Human
uucaauuccucu

SEQ ID NO: 2199141 - RNA, 13 nt, Human
uucaauuccuggg

SEQ ID NO: 2199142 - RNA, 16 nt, Human
uucaauuccucuggga

SEQ ID NO: 2199143 - RNA, 18 nt, Human
uucaauucucauuuguca

SEQ ID NO: 2199144 - RNA, 23 nt, Human
uucaaugguuugcaaggaagcca

SEQ ID NO: 2199145 - RNA, 23 nt, Human
uucaaugaucuagguuuaacuca

SEQ ID NO: 2199146 - RNA, 21 nt, Human
uucaaugugauucuaaugucu

SEQ ID NO: 2199147 - RNA, 20 nt, Human
uucaaugguuugcaaggaag

SEQ ID NO: 2199148 - RNA, 22 nt, Human
uucaaugguuugcaaggaagcc

SEQ ID NO: 2199149 - RNA, 19 nt, Human
uucaaugaucuagguuuaa

SEQ ID NO: 2199150 - RNA, 22 nt, Human
uucaaugaucuagguuuaacuc

SEQ ID NO: 2199151 - RNA, 16 nt, Human
uucaauggcugcugaa

SEQ ID NO: 2199152 - RNA, 16 nt, Human
uucaaugauaguaaga

SEQ ID NO: 2199153 - RNA, 12 nt, Human
uucaaugaucua

SEQ ID NO: 2199154 - RNA, 15 nt, Human
uucaaugaucuaggu

SEQ ID NO: 2199155 - RNA, 20 nt, Human
uucaaucuguaaacugugua

SEQ ID NO: 2199156 - RNA, 18 nt, Human
uucaaucuguaaacugug

SEQ ID NO: 2199157 - RNA, 17 nt, Human
uucaaucuguaaacugu

SEQ ID NO: 2199158 - RNA, 16 nt, Human
uucaaucuguaaacug

SEQ ID NO: 2199159 - RNA, 23 nt, Human
uucaacagacccccucuagaaau

SEQ ID NO: 2199160 - RNA, 16 nt, Human
uucaacaggagaauuu

SEQ ID NO: 2199161 - RNA, 17 nt, Human
uucaaccauuccccaug

SEQ ID NO: 2199162 - RNA, 20 nt, Human
uucaaccauuccccauggga

SEQ ID NO: 2199163 - RNA, 13 nt, Human
uucaacgcagccc

SEQ ID NO: 2199164 - RNA, 13 nt, Human
uucaacccuggag

SEQ ID NO: 2199165 - RNA, 14 nt, Human
uucaacgcagcccu

SEQ ID NO: 2199166 - RNA, 15 nt, Human
uucaacgcagcccug

SEQ ID NO: 2199167 - RNA, 15 nt, Human
uucaacccuggagag

SEQ ID NO: 2199168 - RNA, 16 nt, Human
uucaaucccaggaugu

SEQ ID NO: 2199169 - RNA, 15 nt, Human
uucaaucuguaaacu

SEQ ID NO: 2199170 - RNA, 14 nt, Human
uucaaucuguaaac

SEQ ID NO: 2199171 - RNA, 20 nt, Human
uucaaucucccgcugcugcu

SEQ ID NO: 2199172 - RNA, 17 nt, Human
uucaaagauucaaaauu

SEQ ID NO: 2199173 - RNA, 23 nt, Human
uucaaauuguaagcaugcacaaa

SEQ ID NO: 2199174 - RNA, 13 nt, Human
uucaaauuucaca

SEQ ID NO: 2199175 - RNA, 23 nt, Human
uucaaagccaaguuuauauacaa

SEQ ID NO: 2199176 - RNA, 21 nt, Human
uucaaagccagcguccuccuc

SEQ ID NO: 2199177 - RNA, 13 nt, Human
uucaaagccagcg

SEQ ID NO: 2199178 - RNA, 23 nt, Human
uucaaagcaccaaaauaagaaaa

SEQ ID NO: 2199179 - RNA, 21 nt, Human
uucaaagcaccaaaauaagaa

SEQ ID NO: 2199180 - RNA, 19 nt, Human
uucaaagcaccaaaauaag

SEQ ID NO: 2199181 - RNA, 21 nt, Human
uuauuuucugguagauagaaa

SEQ ID NO: 2199182 - RNA, 17 nt, Human
uuauuuucuuugaaauu

SEQ ID NO: 2199183 - RNA, 11 nt, Human
uuauuuugaug

SEQ ID NO: 2199184 - RNA, 15 nt, Human
uucaaagcaaauguc

SEQ ID NO: 2199185 - RNA, 13 nt, Human
uucaaagauauuu

SEQ ID NO: 2199186 - RNA, 15 nt, Human
uuauuuuccucccca

SEQ ID NO: 2199187 - RNA, 14 nt, Human
uuauuuuccucccc

SEQ ID NO: 2199188 - RNA, 13 nt, Human
uuauuuuccaaaa

SEQ ID NO: 2199189 - RNA, 16 nt, Human
uuauuuuccuccccag

SEQ ID NO: 2199190 - RNA, 12 nt, Human
uuauuuucuaca

SEQ ID NO: 2199191 - RNA, 12 nt, Human
uuauuuucacug

SEQ ID NO: 2199192 - RNA, 11 nt, Human
uuacuaaagaa

SEQ ID NO: 2199193 - RNA, 18 nt, Human
uuacuaaagaaaauaucu

SEQ ID NO: 2199194 - RNA, 22 nt, Human
uuacuaaagaaaauaucugaaa

SEQ ID NO: 2199195 - RNA, 14 nt, Human
uuauuuucaccugu

SEQ ID NO: 2199196 - RNA, 12 nt, Human
uuauuuucagua

SEQ ID NO: 2199197 - RNA, 14 nt, Human
uuauuuucaguauu

SEQ ID NO: 2199198 - RNA, 13 nt, Human
uuacuaaacauuu

SEQ ID NO: 2199199 - RNA, 16 nt, Human
uuacuaaacauuuugu

SEQ ID NO: 2199200 - RNA, 21 nt, Human
uuacuaaacauuuuguuauug

SEQ ID NO: 2199201 - RNA, 13 nt, Human
uuacgugaguccu

SEQ ID NO: 2199202 - RNA, 14 nt, Human
uuacgugaguccug

SEQ ID NO: 2199203 - RNA, 15 nt, Human
uuacgugagccaggu

SEQ ID NO: 2199204 - RNA, 17 nt, Human
uucaccccaaucccagc

SEQ ID NO: 2199205 - RNA, 18 nt, Human
uucacccagcuaaucugu

SEQ ID NO: 2199206 - RNA, 14 nt, Human
uucaccccacccuu

SEQ ID NO: 2199207 - RNA, 13 nt, Human
uucaccccacccu

SEQ ID NO: 2199208 - RNA, 15 nt, Human
uucacccagacagcu

SEQ ID NO: 2199209 - RNA, 13 nt, Human
uucaauucucaaa

SEQ ID NO: 2199210 - RNA, 16 nt, Human
uucaauuccugggccc

SEQ ID NO: 2199211 - RNA, 14 nt, Human
uucaauuccugggc

SEQ ID NO: 2199212 - RNA, 22 nt, Human
uucaccccagggccugagccug

SEQ ID NO: 2199213 - RNA, 22 nt, Human
uucaccccaguggccacucagc

SEQ ID NO: 2199214 - RNA, 20 nt, Human
uucaccccagggccugagcc

SEQ ID NO: 2199215 - RNA, 17 nt, Human
uucaccccagggccuga

SEQ ID NO: 2199216 - RNA, 19 nt, Human
uucacccccuuuccuggac

SEQ ID NO: 2199217 - RNA, 21 nt, Human
uucaccccaguggccacucag

SEQ ID NO: 2199218 - RNA, 17 nt, Human
uucaccccccacucacc

SEQ ID NO: 2199219 - RNA, 23 nt, Human
uucaccccccacucaccaguguc

SEQ ID NO: 2199220 - RNA, 22 nt, Human
uucaccccccacucaccagugu

SEQ ID NO: 2199221 - RNA, 13 nt, Human
uucacucucugaa

SEQ ID NO: 2199222 - RNA, 12 nt, Human
uucaccccuccc

SEQ ID NO: 2199223 - RNA, 16 nt, Human
uucacccccuuuccug

SEQ ID NO: 2199224 - RNA, 14 nt, Human
uucacucuccuugg

SEQ ID NO: 2199225 - RNA, 14 nt, Human
uucacucuuggagc

SEQ ID NO: 2199226 - RNA, 14 nt, Human
uucacucuuccaga

SEQ ID NO: 2199227 - RNA, 12 nt, Human
uucacucucuga

SEQ ID NO: 2199228 - RNA, 15 nt, Human
uucacucuuccagaa

SEQ ID NO: 2199229 - RNA, 19 nt, Human
uucacucuuggagccugca

SEQ ID NO: 2199230 - RNA, 18 nt, Human
uucacucuuggagccugc

SEQ ID NO: 2199231 - RNA, 10 nt, Human
uucagacccc

SEQ ID NO: 2199232 - RNA, 16 nt, Human
uucacucuuccagaau

SEQ ID NO: 2199233 - RNA, 22 nt, Human
uucacugaagaaaccuucagau

SEQ ID NO: 2199234 - RNA, 13 nt, Human
uucagacucagac

SEQ ID NO: 2199235 - RNA, 12 nt, Human
uucagacucaga

SEQ ID NO: 2199236 - RNA, 15 nt, Human
uucagaccccagcgg

SEQ ID NO: 2199237 - RNA, 13 nt, Human
uucagaccccagc

SEQ ID NO: 2199238 - RNA, 21 nt, Human
uucagacucccauuccugaag

SEQ ID NO: 2199239 - RNA, 20 nt, Human
uucagacucccauuccugaa

SEQ ID NO: 2199240 - RNA, 20 nt, Human
uucagagacucagggcccca

SEQ ID NO: 2199241 - RNA, 15 nt, Human
uucagagacucaggg

SEQ ID NO: 2199242 - RNA, 14 nt, Human
uucagacucagacu

SEQ ID NO: 2199243 - RNA, 19 nt, Human
uucagacuuugcuucccau

SEQ ID NO: 2199244 - RNA, 15 nt, Human
uucagagacuccugc

SEQ ID NO: 2199245 - RNA, 21 nt, Human
uucagagacucagggccccag

SEQ ID NO: 2199246 - RNA, 23 nt, Human
uucagaggcccucgcugccagcu

SEQ ID NO: 2199247 - RNA, 22 nt, Human
uucagaggcccucgcugccagc

SEQ ID NO: 2199248 - RNA, 20 nt, Human
uucacugcauggcucccaca

SEQ ID NO: 2199249 - RNA, 15 nt, Human
uucaggaagcucagg

SEQ ID NO: 2199250 - RNA, 20 nt, Human
uucaggaagcucagggccug

SEQ ID NO: 2199251 - RNA, 17 nt, Human
uucaggaagcucagggc

SEQ ID NO: 2199252 - RNA, 19 nt, Human
uucaggaagcucagggccu

SEQ ID NO: 2199253 - RNA, 12 nt, Human
uucaggagggau

SEQ ID NO: 2199254 - RNA, 16 nt, Human
uucaggagcagccuca

SEQ ID NO: 2199255 - RNA, 20 nt, Human
uucaggagcagccucagaac

SEQ ID NO: 2199256 - RNA, 22 nt, Human
uucaggagcagccucagaacaa

SEQ ID NO: 2199257 - RNA, 21 nt, Human
uucaggacuuaacggcuccag

SEQ ID NO: 2199258 - RNA, 19 nt, Human
uucaggaauguguggccug

SEQ ID NO: 2199259 - RNA, 21 nt, Human
uucaggagagaguugaaccua

SEQ ID NO: 2199260 - RNA, 20 nt, Human
uucaggagagaguugaaccu

SEQ ID NO: 2199261 - RNA, 17 nt, Human
uucaggauacucuguca

SEQ ID NO: 2199262 - RNA, 16 nt, Human
uucaggauacaugugc

SEQ ID NO: 2199263 - RNA, 17 nt, Human
uucaggagucccaagga

SEQ ID NO: 2199264 - RNA, 21 nt, Human
uucaggauacucugucagaug

SEQ ID NO: 2199265 - RNA, 15 nt, Human
uucaggcucuucucc

SEQ ID NO: 2199266 - RNA, 20 nt, Human
uucaggcgauucuccugccu

SEQ ID NO: 2199267 - RNA, 17 nt, Human
uucagcugacuuuucug

SEQ ID NO: 2199268 - RNA, 18 nt, Human
uucagcugcauacaguuu

SEQ ID NO: 2199269 - RNA, 13 nt, Human
uucagcugcccca

SEQ ID NO: 2199270 - RNA, 16 nt, Human
uucaggaagcucaggg

SEQ ID NO: 2199271 - RNA, 24 nt, Human
uucagcucugcaagaauugaagca

SEQ ID NO: 2199272 - RNA, 17 nt, Human
uucagcucugcaagaau

SEQ ID NO: 2199273 - RNA, 17 nt, Human
uucagagggaaaguaaa

SEQ ID NO: 2199274 - RNA, 23 nt, Human
uucagcuccagcucaccagcccc

SEQ ID NO: 2199275 - RNA, 14 nt, Human
uucauuuucugcaa

SEQ ID NO: 2199276 - RNA, 19 nt, Human
uucauuuugagcugaaaug

SEQ ID NO: 2199277 - RNA, 20 nt, Human
uucauuuugagcugaaaugc

SEQ ID NO: 2199278 - RNA, 18 nt, Human
uucauuuucugcaagccu

SEQ ID NO: 2199279 - RNA, 17 nt, Human
uucauuuugaaaaacac

SEQ ID NO: 2199280 - RNA, 13 nt, Human
uucauuuugagcu

SEQ ID NO: 2199281 - RNA, 17 nt, Human
uucauuuugagcugaaa

SEQ ID NO: 2199282 - RNA, 15 nt, Human
uuccacugagggcag

SEQ ID NO: 2199283 - RNA, 15 nt, Human
uuccacugagcucca

SEQ ID NO: 2199284 - RNA, 20 nt, Human
uuccacugagcuccaugugc

SEQ ID NO: 2199285 - RNA, 14 nt, Human
uucauuuuuaauca

SEQ ID NO: 2199286 - RNA, 12 nt, Human
uuccacugagcu

SEQ ID NO: 2199287 - RNA, 13 nt, Human
uuccacugagcuc

SEQ ID NO: 2199288 - RNA, 14 nt, Human
uuccacugagcucc

SEQ ID NO: 2199289 - RNA, 22 nt, Human
uuccacuggacuugagcuuggc

SEQ ID NO: 2199290 - RNA, 12 nt, Human
uuccacuggacu

SEQ ID NO: 2199291 - RNA, 16 nt, Human
uuccacugagggcagu

SEQ ID NO: 2199292 - RNA, 23 nt, Human
uuccacugccugggaugaugcag

SEQ ID NO: 2199293 - RNA, 17 nt, Human
uuccacugcguugucca

SEQ ID NO: 2199294 - RNA, 20 nt, Human
uuccacugucaagaaagagc

SEQ ID NO: 2199295 - RNA, 21 nt, Human
uuccacuuagaaauugcauuu

SEQ ID NO: 2199296 - RNA, 19 nt, Human
uuccacuuauaggaauuga

SEQ ID NO: 2199297 - RNA, 20 nt, Human
uuccacuuuuuuuuguaugu

SEQ ID NO: 2199298 - RNA, 17 nt, Human
uuccagaaaaccccagc

SEQ ID NO: 2199299 - RNA, 18 nt, Human
uuccacuugauuuugcaa

SEQ ID NO: 2199300 - RNA, 12 nt, Human
uuccacuuggcu

SEQ ID NO: 2199301 - RNA, 19 nt, Human
uuccacuuggcuacacagg

SEQ ID NO: 2199302 - RNA, 15 nt, Human
uuccacuuuguucuu

SEQ ID NO: 2199303 - RNA, 21 nt, Human
uuccagaaaaccccagcaucc

SEQ ID NO: 2199304 - RNA, 18 nt, Human
uuccagaaaaccccagca

SEQ ID NO: 2199305 - RNA, 23 nt, Human
uuccacuuuguucuuuaggagau

SEQ ID NO: 2199306 - RNA, 12 nt, Human
uuccagccaggg

SEQ ID NO: 2199307 - RNA, 14 nt, Human
uuccagccccucug

SEQ ID NO: 2199308 - RNA, 15 nt, Human
uuccagccagggcug

SEQ ID NO: 2199309 - RNA, 16 nt, Human
uuccagccagggcugc

SEQ ID NO: 2199310 - RNA, 21 nt, Human
uuccaucccuacccccuaaga

SEQ ID NO: 2199311 - RNA, 15 nt, Human
uuccaucccuacccc

SEQ ID NO: 2199312 - RNA, 16 nt, Human
uuccagccugccacuc

SEQ ID NO: 2199313 - RNA, 23 nt, Human
uuccaucucgccaccccuccuuc

SEQ ID NO: 2199314 - RNA, 14 nt, Human
uuccaucccagagg

SEQ ID NO: 2199315 - RNA, 14 nt, Human
uuccagccugccac

SEQ ID NO: 2199316 - RNA, 12 nt, Human
uuccagccugcc

SEQ ID NO: 2199317 - RNA, 21 nt, Human
uuccagccggcauggcuggga

SEQ ID NO: 2199318 - RNA, 20 nt, Human
uuccagccccucuggucgcu

SEQ ID NO: 2199319 - RNA, 16 nt, Human
uuccagccccucuggu

SEQ ID NO: 2199320 - RNA, 17 nt, Human
uuccagccccucugguc

SEQ ID NO: 2199321 - RNA, 15 nt, Human
uuccaugaaaaugca

SEQ ID NO: 2199322 - RNA, 24 nt, Human
uuccaugaaaaugcaacaacaugu

SEQ ID NO: 2199323 - RNA, 22 nt, Human
uuccaugaaaacguuuuauugu

SEQ ID NO: 2199324 - RNA, 15 nt, Human
uuccaugaaaacguu

SEQ ID NO: 2199325 - RNA, 13 nt, Human
uuccaugaaaacg

SEQ ID NO: 2199326 - RNA, 12 nt, Human
uuccaucugauu

SEQ ID NO: 2199327 - RNA, 18 nt, Human
uuccaucuuuacaaaacu

SEQ ID NO: 2199328 - RNA, 13 nt, Human
uuccaucuuuaca

SEQ ID NO: 2199329 - RNA, 18 nt, Human
uuccaugagaacagcagg

SEQ ID NO: 2199330 - RNA, 20 nt, Human
uuccaugaauguaucaggaa

SEQ ID NO: 2199331 - RNA, 15 nt, Human
uuccaugaauguauc

SEQ ID NO: 2199332 - RNA, 16 nt, Human
uuccaugaaggcagag

SEQ ID NO: 2199333 - RNA, 18 nt, Human
uuccaugaagaccacauc

SEQ ID NO: 2199334 - RNA, 20 nt, Human
uuccaugaaguuugaacuuc

SEQ ID NO: 2199335 - RNA, 12 nt, Human
uuccaugaaugu

SEQ ID NO: 2199336 - RNA, 15 nt, Human
uuccaugaaucgcuu

SEQ ID NO: 2199337 - RNA, 20 nt, Human
uuccaugaaucgcuucucuu

SEQ ID NO: 2199338 - RNA, 17 nt, Human
uuccaugucgccucugc

SEQ ID NO: 2199339 - RNA, 16 nt, Human
uuccaugucgccucug

SEQ ID NO: 2199340 - RNA, 14 nt, Human
uuccaugccugagg

SEQ ID NO: 2199341 - RNA, 15 nt, Human
uuccaugccugaggg

SEQ ID NO: 2199342 - RNA, 18 nt, Human
uuccaugucgccucugca

SEQ ID NO: 2199343 - RNA, 19 nt, Human
uuccaugucgccucugcau

SEQ ID NO: 2199344 - RNA, 17 nt, Human
uuccaugaguccccugu

SEQ ID NO: 2199345 - RNA, 18 nt, Human
uuccaugauucuauuuau

SEQ ID NO: 2199346 - RNA, 18 nt, Human
uuccaugaugcugggauu

SEQ ID NO: 2199347 - RNA, 13 nt, Human
uuccaugccugag

SEQ ID NO: 2199348 - RNA, 17 nt, Human
uuccaugauucuauuua

SEQ ID NO: 2199349 - RNA, 13 nt, Human
uuccaugaugcug

SEQ ID NO: 2199350 - RNA, 13 nt, Human
uucccauuuugga

SEQ ID NO: 2199351 - RNA, 19 nt, Human
uucccauuuugcaaaauuu

SEQ ID NO: 2199352 - RNA, 17 nt, Human
uucccauuuugcaaaau

SEQ ID NO: 2199353 - RNA, 14 nt, Human
uucccauuuugcaa

SEQ ID NO: 2199354 - RNA, 16 nt, Human
uucccaaacgccuccc

SEQ ID NO: 2199355 - RNA, 21 nt, Human
uucccaaaagcccauucauuc

SEQ ID NO: 2199356 - RNA, 11 nt, Human
uucccaaaagc

SEQ ID NO: 2199357 - RNA, 18 nt, Human
uuccccaaccacuucauu

SEQ ID NO: 2199358 - RNA, 19 nt, Human
uuccccaacagugugaagu

SEQ ID NO: 2199359 - RNA, 20 nt, Human
uuccccaacagugugaaguu

SEQ ID NO: 2199360 - RNA, 15 nt, Human
uuccccaaagucuua

SEQ ID NO: 2199361 - RNA, 13 nt, Human
uuccccaacagug

SEQ ID NO: 2199362 - RNA, 15 nt, Human
uuccccaacagugug

SEQ ID NO: 2199363 - RNA, 16 nt, Human
uuccccaacaguguga

SEQ ID NO: 2199364 - RNA, 23 nt, Human
uuccccaacagugugaaguuaga

SEQ ID NO: 2199365 - RNA, 14 nt, Human
uuccccaagacauu

SEQ ID NO: 2199366 - RNA, 13 nt, Human
uuccauuguguga

SEQ ID NO: 2199367 - RNA, 15 nt, Human
uuccaugucggccuc

SEQ ID NO: 2199368 - RNA, 16 nt, Human
uuccaugucggccucu

SEQ ID NO: 2199369 - RNA, 15 nt, Human
uuccauuguuugaaa

SEQ ID NO: 2199370 - RNA, 17 nt, Human
uuccauuguuugaaaca

SEQ ID NO: 2199371 - RNA, 22 nt, Human
uuccauuguuugaaacaaagaa

SEQ ID NO: 2199372 - RNA, 18 nt, Human
uuccauuguuuggagaca

SEQ ID NO: 2199373 - RNA, 20 nt, Human
uuccaugucgccucugcauu

SEQ ID NO: 2199374 - RNA, 21 nt, Human
uuccaugucgccucugcauuc

SEQ ID NO: 2199375 - RNA, 14 nt, Human
uuccauuugugugu

SEQ ID NO: 2199376 - RNA, 17 nt, Human
uuccauuugcaagggaa

SEQ ID NO: 2199377 - RNA, 20 nt, Human
uuccauuguuuggagacauu

SEQ ID NO: 2199378 - RNA, 21 nt, Human
uuccauuguuuggagacauuc

SEQ ID NO: 2199379 - RNA, 13 nt, Human
uuccauuugcaag

SEQ ID NO: 2199380 - RNA, 19 nt, Human
uuccauuuaucuuucuaca

SEQ ID NO: 2199381 - RNA, 16 nt, Human
uucaugaguuuuuccc

SEQ ID NO: 2199382 - RNA, 23 nt, Human
uucaugacuuuuccauguaucua

SEQ ID NO: 2199383 - RNA, 17 nt, Human
uucaugauuucauuuca

SEQ ID NO: 2199384 - RNA, 19 nt, Human
uucauuuaggugaggaagc

SEQ ID NO: 2199385 - RNA, 23 nt, Human
uucaugauuucauuucaacuguu

SEQ ID NO: 2199386 - RNA, 19 nt, Human
uucauuuagucaugugacc

SEQ ID NO: 2199387 - RNA, 13 nt, Human
uucauuuguguca

SEQ ID NO: 2199388 - RNA, 15 nt, Human
uucauuugugucaau

SEQ ID NO: 2199389 - RNA, 21 nt, Human
uucauuuuaacaucugagaaa

SEQ ID NO: 2199390 - RNA, 18 nt, Human
uucauuuuaacaucugag

SEQ ID NO: 2199391 - RNA, 19 nt, Human
uucauuuggaaauaagcug

SEQ ID NO: 2199392 - RNA, 16 nt, Human
uucauuuccuccguca

SEQ ID NO: 2199393 - RNA, 22 nt, Human
uucauuugguucauuaauucua

SEQ ID NO: 2199394 - RNA, 15 nt, Human
uucauuucaacuguu

SEQ ID NO: 2199395 - RNA, 16 nt, Human
uucauuuccucaaaaa

SEQ ID NO: 2199396 - RNA, 13 nt, Human
uucauuuccucaa

SEQ ID NO: 2199397 - RNA, 12 nt, Human
uucauuucauug

SEQ ID NO: 2199398 - RNA, 13 nt, Human
uucauuucauugu

SEQ ID NO: 2199399 - RNA, 15 nt, Human
uucauuucauuguau

SEQ ID NO: 2199400 - RNA, 18 nt, Human
uucaucuauuucugagaa

SEQ ID NO: 2199401 - RNA, 14 nt, Human
uucaucuccaggga

SEQ ID NO: 2199402 - RNA, 17 nt, Human
uucaucuauuucugaga

SEQ ID NO: 2199403 - RNA, 16 nt, Human
uucaucuauuucugag

SEQ ID NO: 2199404 - RNA, 22 nt, Human
uucaucucccaccuagcagcac

SEQ ID NO: 2199405 - RNA, 15 nt, Human
uucaucuccagggag

SEQ ID NO: 2199406 - RNA, 22 nt, Human
uucaucuccagggaguccccuc

SEQ ID NO: 2199407 - RNA, 14 nt, Human
uucaucucucagaa

SEQ ID NO: 2199408 - RNA, 17 nt, Human
uucaucucucagaaggg

SEQ ID NO: 2199409 - RNA, 21 nt, Human
uucaucucucagaagggaggc

SEQ ID NO: 2199410 - RNA, 20 nt, Human
uucaucuuccaacucaaacu

SEQ ID NO: 2199411 - RNA, 11 nt, Human
uucaucuugaa

SEQ ID NO: 2199412 - RNA, 12 nt, Human
uucaucuugaau

SEQ ID NO: 2199413 - RNA, 21 nt, Human
uucaugaacuucgcaucaaaa

SEQ ID NO: 2199414 - RNA, 22 nt, Human
uucaugaacuucgcaucaaaag

SEQ ID NO: 2199415 - RNA, 13 nt, Human
uucaugaaauccu

SEQ ID NO: 2199416 - RNA, 14 nt, Human
uucauaaucuuugc

SEQ ID NO: 2199417 - RNA, 17 nt, Human
uucauaaguauuucaaa

SEQ ID NO: 2199418 - RNA, 20 nt, Human
uucauaaguauuaugucucu

SEQ ID NO: 2199419 - RNA, 19 nt, Human
uucauaaguauuaugucuc

SEQ ID NO: 2199420 - RNA, 17 nt, Human
uucauaacuuucauuaa

SEQ ID NO: 2199421 - RNA, 21 nt, Human
uucaguuuucauuugguucau

SEQ ID NO: 2199422 - RNA, 12 nt, Human
uucauaaguauu

SEQ ID NO: 2199423 - RNA, 14 nt, Human
uucauaagccaauu

SEQ ID NO: 2199424 - RNA, 22 nt, Human
uucauaagccaauuuuucugca

SEQ ID NO: 2199425 - RNA, 12 nt, Human
uucaguuuucag

SEQ ID NO: 2199426 - RNA, 17 nt, Human
uucaguuuuaucuuuaa

SEQ ID NO: 2199427 - RNA, 19 nt, Human
uucaguuuuaccagaugau

SEQ ID NO: 2199428 - RNA, 13 nt, Human
uucaguuuguaua

SEQ ID NO: 2199429 - RNA, 19 nt, Human
uucaguuucaauucagugc

SEQ ID NO: 2199430 - RNA, 23 nt, Human
uucauaagccaauuuuucugcac

SEQ ID NO: 2199431 - RNA, 23 nt, Human
uucaucuauuuuuggcagucuga

SEQ ID NO: 2199432 - RNA, 15 nt, Human
uucaucuaggauuuu

SEQ ID NO: 2199433 - RNA, 13 nt, Human
uucauaaugacuu

SEQ ID NO: 2199434 - RNA, 23 nt, Human
uucauaaugacuuaagcacacuu

SEQ ID NO: 2199435 - RNA, 16 nt, Human
uucaggcugcuuggga

SEQ ID NO: 2199436 - RNA, 13 nt, Human
uucaggcugcuug

SEQ ID NO: 2199437 - RNA, 16 nt, Human
uucaggcucuucuccu

SEQ ID NO: 2199438 - RNA, 23 nt, Human
uucagggaaccguuauuauaauu

SEQ ID NO: 2199439 - RNA, 19 nt, Human
uucagugccuuauggaaca

SEQ ID NO: 2199440 - RNA, 21 nt, Human
uucagugccuuauggaacacu

SEQ ID NO: 2199441 - RNA, 16 nt, Human
uucaguugauuuuaca

SEQ ID NO: 2199442 - RNA, 12 nt, Human
uucaguggagaa

SEQ ID NO: 2199443 - RNA, 24 nt, Human
uucaguggcacgucaucuaguuuu

SEQ ID NO: 2199444 - RNA, 19 nt, Human
uucaguuggcugacuucca

SEQ ID NO: 2199445 - RNA, 13 nt, Human
uucagugcugugg

SEQ ID NO: 2199446 - RNA, 18 nt, Human
uucagggaauuucaggaa

SEQ ID NO: 2199447 - RNA, 21 nt, Human
uucagugcuguggccugggca

SEQ ID NO: 2199448 - RNA, 19 nt, Human
uucagugcuguggccuggg

SEQ ID NO: 2199449 - RNA, 13 nt, Human
uucaguggcagcu

SEQ ID NO: 2199450 - RNA, 18 nt, Human
uuccugcccuuccucagu

SEQ ID NO: 2199451 - RNA, 20 nt, Human
uuccuuccaucccuaccccc

SEQ ID NO: 2199452 - RNA, 12 nt, Human
uuccuucccacc

SEQ ID NO: 2199453 - RNA, 21 nt, Human
uuccuucccacccaucgcugu

SEQ ID NO: 2199454 - RNA, 18 nt, Human
uuccugccgcaacaguuu

SEQ ID NO: 2199455 - RNA, 17 nt, Human
uuccuucauuuccuccg

SEQ ID NO: 2199456 - RNA, 14 nt, Human
uuccuucccuggcu

SEQ ID NO: 2199457 - RNA, 16 nt, Human
uuccuucccugggcug

SEQ ID NO: 2199458 - RNA, 13 nt, Human
uuccuucccuggc

SEQ ID NO: 2199459 - RNA, 20 nt, Human
uuccuucccugggcugugcu

SEQ ID NO: 2199460 - RNA, 21 nt, Human
uuccuucccugggcugugcua

SEQ ID NO: 2199461 - RNA, 12 nt, Human
uuccuucccugg

SEQ ID NO: 2199462 - RNA, 16 nt, Human
uuccuuccuucccugg

SEQ ID NO: 2199463 - RNA, 13 nt, Human
uuccuucugaagu

SEQ ID NO: 2199464 - RNA, 17 nt, Human
uuccuucugugaaagua

SEQ ID NO: 2199465 - RNA, 21 nt, Human
uuccuuucauuuacuguggcu

SEQ ID NO: 2199466 - RNA, 17 nt, Human
uuccuucugccugagcu

SEQ ID NO: 2199467 - RNA, 20 nt, Human
uuccuucugugaaaguacau

SEQ ID NO: 2199468 - RNA, 16 nt, Human
uuccuucucaucugug

SEQ ID NO: 2199469 - RNA, 14 nt, Human
uuccuucucaucug

SEQ ID NO: 2199470 - RNA, 14 nt, Human
uuccuuccuucccu

SEQ ID NO: 2199471 - RNA, 15 nt, Human
uuccuuccuguucug

SEQ ID NO: 2199472 - RNA, 17 nt, Human
uuccuuccucugagccu

SEQ ID NO: 2199473 - RNA, 13 nt, Human
uuccuuccucuga

SEQ ID NO: 2199474 - RNA, 19 nt, Human
uuccuucauucaacccacc

SEQ ID NO: 2199475 - RNA, 23 nt, Human
uuccuucagugccuuauggaaca

SEQ ID NO: 2199476 - RNA, 16 nt, Human
uuccuucagugccuua

SEQ ID NO: 2199477 - RNA, 19 nt, Human
uuccuucagugccuuaugg

SEQ ID NO: 2199478 - RNA, 11 nt, Human
uuccugcccug

SEQ ID NO: 2199479 - RNA, 18 nt, Human
uuccugccccaggccuga

SEQ ID NO: 2199480 - RNA, 15 nt, Human
uuccuccugcucaua

SEQ ID NO: 2199481 - RNA, 13 nt, Human
uuccuccugcuca

SEQ ID NO: 2199482 - RNA, 11 nt, Human
uuccuccugga

SEQ ID NO: 2199483 - RNA, 13 nt, Human
uuccuccuggaaa

SEQ ID NO: 2199484 - RNA, 16 nt, Human
uuccugcccuuccuca

SEQ ID NO: 2199485 - RNA, 17 nt, Human
uuccugcccuuccucag

SEQ ID NO: 2199486 - RNA, 22 nt, Human
uuccugcccugggaggcaguga

SEQ ID NO: 2199487 - RNA, 16 nt, Human
uuccugcccugggagg

SEQ ID NO: 2199488 - RNA, 13 nt, Human
uuccugcccuggg

SEQ ID NO: 2199489 - RNA, 20 nt, Human
uuccuuucauuuacuguggc

SEQ ID NO: 2199490 - RNA, 14 nt, Human
uuccuuuccccagc

SEQ ID NO: 2199491 - RNA, 17 nt, Human
uuccuuuccccagccca

SEQ ID NO: 2199492 - RNA, 15 nt, Human
uuccuuuccccagcc

SEQ ID NO: 2199493 - RNA, 16 nt, Human
uuccuuuccccagccc

SEQ ID NO: 2199494 - RNA, 10 nt, Human
uuccuuucuc

SEQ ID NO: 2199495 - RNA, 12 nt, Human
uuccuuucucac

SEQ ID NO: 2199496 - RNA, 13 nt, Human
uuccuuucucacc

SEQ ID NO: 2199497 - RNA, 14 nt, Human
uuccuuucucaccg

SEQ ID NO: 2199498 - RNA, 12 nt, Human
uuccuuucucag

SEQ ID NO: 2199499 - RNA, 20 nt, Human
uuccuuucuugguucauaaa

SEQ ID NO: 2199500 - RNA, 14 nt, Human
uuccuuugaagagg

SEQ ID NO: 2199501 - RNA, 15 nt, Human
uuccuuugaagagga

SEQ ID NO: 2199502 - RNA, 22 nt, Human
uuccuuugaauccucucucugu

SEQ ID NO: 2199503 - RNA, 19 nt, Human
uucggccuccauccugagg

SEQ ID NO: 2199504 - RNA, 18 nt, Human
uucggccuccauccugag

SEQ ID NO: 2199505 - RNA, 22 nt, Human
uucggccuccauccugaggcuc

SEQ ID NO: 2199506 - RNA, 19 nt, Human
uucuaaaauauaaucaacc

SEQ ID NO: 2199507 - RNA, 23 nt, Human
uucuaaacccaauccaaauggcg

SEQ ID NO: 2199508 - RNA, 19 nt, Human
uucuaaacccaauccaaau

SEQ ID NO: 2199509 - RNA, 18 nt, Human
uucuaaacccaauccaaa

SEQ ID NO: 2199510 - RNA, 22 nt, Human
uucuaaacaagaaucagucuau

SEQ ID NO: 2199511 - RNA, 16 nt, Human
uucuaaacaagauuuu

SEQ ID NO: 2199512 - RNA, 13 nt, Human
uucuaaagaugga

SEQ ID NO: 2199513 - RNA, 16 nt, Human
uucuaaaggcuaccuu

SEQ ID NO: 2199514 - RNA, 15 nt, Human
uucuaauaaaacaaa

SEQ ID NO: 2199515 - RNA, 20 nt, Human
uucuaaaggccucuuccuug

SEQ ID NO: 2199516 - RNA, 18 nt, Human
uucuaaaggcuaccuuug

SEQ ID NO: 2199517 - RNA, 17 nt, Human
uucuaaaggcuaccuuu

SEQ ID NO: 2199518 - RNA, 21 nt, Human
uuccucccucccucuuucccu

SEQ ID NO: 2199519 - RNA, 19 nt, Human
uuccucccucccucuuucc

SEQ ID NO: 2199520 - RNA, 12 nt, Human
uuccucccuccc

SEQ ID NO: 2199521 - RNA, 15 nt, Human
uuccucaucugucca

SEQ ID NO: 2199522 - RNA, 18 nt, Human
uuccucauccaccccauc

SEQ ID NO: 2199523 - RNA, 19 nt, Human
uuccucauccaccccaucc

SEQ ID NO: 2199524 - RNA, 22 nt, Human
uuccucccucccucuuucccuc

SEQ ID NO: 2199525 - RNA, 12 nt, Human
uuccucccuucu

SEQ ID NO: 2199526 - RNA, 11 nt, Human
uuccucccuuc

SEQ ID NO: 2199527 - RNA, 17 nt, Human
uuccuccucccuccugc

SEQ ID NO: 2199528 - RNA, 16 nt, Human
uuccuccuccccacuu

SEQ ID NO: 2199529 - RNA, 15 nt, Human
uuccuccucccuccu

SEQ ID NO: 2199530 - RNA, 18 nt, Human
uuccucccuucugcuacu

SEQ ID NO: 2199531 - RNA, 16 nt, Human
uuccucccuucugcua

SEQ ID NO: 2199532 - RNA, 15 nt, Human
uuccucccuucugcu

SEQ ID NO: 2199533 - RNA, 14 nt, Human
uuccucccuucugc

SEQ ID NO: 2199534 - RNA, 14 nt, Human
uuccuccuccccac

SEQ ID NO: 2199535 - RNA, 23 nt, Human
uuccucauaguaugguggcuggg

SEQ ID NO: 2199536 - RNA, 23 nt, Human
uuccucaguucauccauucuauu

SEQ ID NO: 2199537 - RNA, 17 nt, Human
uuccucaguuacacaaa

SEQ ID NO: 2199538 - RNA, 23 nt, Human
uuccucaguuuaauccuucuagu

SEQ ID NO: 2199539 - RNA, 22 nt, Human
uuccucaggcaaggucuggccu

SEQ ID NO: 2199540 - RNA, 18 nt, Human
uuccuaguuuucuccucc

SEQ ID NO: 2199541 - RNA, 15 nt, Human
uuccuaguuuucucc

SEQ ID NO: 2199542 - RNA, 16 nt, Human
uuccuaguucuguaga

SEQ ID NO: 2199543 - RNA, 17 nt, Human
uuccuaguucuguagaa

SEQ ID NO: 2199544 - RNA, 20 nt, Human
uuccuaguucuguagaaaug

SEQ ID NO: 2199545 - RNA, 18 nt, Human
uuccuagcccucucacau

SEQ ID NO: 2199546 - RNA, 12 nt, Human
uuccuagugaaa

SEQ ID NO: 2199547 - RNA, 20 nt, Human
uuccuagguauaauucacau

SEQ ID NO: 2199548 - RNA, 22 nt, Human
uuccuagccaccgccuccuaca

SEQ ID NO: 2199549 - RNA, 19 nt, Human
uuccuagcacacacuuuug

SEQ ID NO: 2199550 - RNA, 14 nt, Human
uuccuagcccucuc

SEQ ID NO: 2199551 - RNA, 15 nt, Human
uucccuuuccuucca

SEQ ID NO: 2199552 - RNA, 22 nt, Human
uuccuagaaguuacugaaugca

SEQ ID NO: 2199553 - RNA, 19 nt, Human
uucccuuugacgccauccc

SEQ ID NO: 2199554 - RNA, 14 nt, Human
uuccuagccaccgc

SEQ ID NO: 2199555 - RNA, 22 nt, Human
uuccuagauggcagucacugaa

SEQ ID NO: 2199556 - RNA, 19 nt, Human
uuccuagauggcagucacu

SEQ ID NO: 2199557 - RNA, 17 nt, Human
uuccuagcacacacuuu

SEQ ID NO: 2199558 - RNA, 21 nt, Human
uuccuagccaccgccuccuac

SEQ ID NO: 2199559 - RNA, 15 nt, Human
uuccuagccaccgcc

SEQ ID NO: 2199560 - RNA, 15 nt, Human
uucccuuggccucag

SEQ ID NO: 2199561 - RNA, 14 nt, Human
uucccuuggccuca

SEQ ID NO: 2199562 - RNA, 12 nt, Human
uucccuuggccu

SEQ ID NO: 2199563 - RNA, 11 nt, Human
uucccuuggcc

SEQ ID NO: 2199564 - RNA, 16 nt, Human
uucccuuggccucaga

SEQ ID NO: 2199565 - RNA, 15 nt, Human
uuccccagcccaggg

SEQ ID NO: 2199566 - RNA, 18 nt, Human
uucccuugaugaagaagu

SEQ ID NO: 2199567 - RNA, 16 nt, Human
uucccuucaucuggaa

SEQ ID NO: 2199568 - RNA, 15 nt, Human
uucccuucaucugga

SEQ ID NO: 2199569 - RNA, 14 nt, Human
uucccuucaucugg

SEQ ID NO: 2199570 - RNA, 22 nt, Human
uuccccacuugagaauuacccu

SEQ ID NO: 2199571 - RNA, 12 nt, Human
uuccccagagaa

SEQ ID NO: 2199572 - RNA, 11 nt, Human
uuccccagaga

SEQ ID NO: 2199573 - RNA, 22 nt, Human
uuccccaccccagcucaugccc

SEQ ID NO: 2199574 - RNA, 17 nt, Human
uuccccacugacagccu

SEQ ID NO: 2199575 - RNA, 23 nt, Human
uuccccacugacagccucccacc

SEQ ID NO: 2199576 - RNA, 21 nt, Human
uuccccacugacagccuccca

SEQ ID NO: 2199577 - RNA, 18 nt, Human
uuccccacugccugccca

SEQ ID NO: 2199578 - RNA, 14 nt, Human
uuccccacugccug

SEQ ID NO: 2199579 - RNA, 17 nt, Human
uuccccacugcacacac

SEQ ID NO: 2199580 - RNA, 19 nt, Human
uucccuucaguacccucuc

SEQ ID NO: 2199581 - RNA, 22 nt, Human
uucccuucaguacccucucagc

SEQ ID NO: 2199582 - RNA, 23 nt, Human
uucccuucaguacccucucagcu

SEQ ID NO: 2199583 - RNA, 20 nt, Human
uucccuguauuuucuuucuc

SEQ ID NO: 2199584 - RNA, 11 nt, Human
uucccugugcu

SEQ ID NO: 2199585 - RNA, 12 nt, Human
uucccugugcug

SEQ ID NO: 2199586 - RNA, 16 nt, Human
uucccuguauuuucuu

SEQ ID NO: 2199587 - RNA, 12 nt, Human
uuccccagccca

SEQ ID NO: 2199588 - RNA, 22 nt, Human
uuccccagcagggucuuuucau

SEQ ID NO: 2199589 - RNA, 13 nt, Human
uuccccagcccag

SEQ ID NO: 2199590 - RNA, 14 nt, Human
uuccccagcccagg

SEQ ID NO: 2199591 - RNA, 20 nt, Human
uucuccaggucucacgggca

SEQ ID NO: 2199592 - RNA, 20 nt, Human
uucuccauccacaugggagc

SEQ ID NO: 2199593 - RNA, 23 nt, Human
uucuccaugagacacaucuccuc

SEQ ID NO: 2199594 - RNA, 18 nt, Human
uucuccaucuggcagggu

SEQ ID NO: 2199595 - RNA, 19 nt, Human
uucuccaucucucuggccc

SEQ ID NO: 2199596 - RNA, 21 nt, Human
uucuccauccuuucugccucu

SEQ ID NO: 2199597 - RNA, 18 nt, Human
uucuccaggcucuuuggg

SEQ ID NO: 2199598 - RNA, 15 nt, Human
uucuccaucucucug

SEQ ID NO: 2199599 - RNA, 23 nt, Human
uucucccaggccaggcuccuucc

SEQ ID NO: 2199600 - RNA, 14 nt, Human
uucucccaggaagc

SEQ ID NO: 2199601 - RNA, 15 nt, Human
uucucccaggaagcu

SEQ ID NO: 2199602 - RNA, 17 nt, Human
uucucccacuuggccaa

SEQ ID NO: 2199603 - RNA, 12 nt, Human
uucucccaggaa

SEQ ID NO: 2199604 - RNA, 13 nt, Human
uucucccaggaag

SEQ ID NO: 2199605 - RNA, 13 nt, Human
uucucccacacug

SEQ ID NO: 2199606 - RNA, 14 nt, Human
uucuccauuguaaa

SEQ ID NO: 2199607 - RNA, 22 nt, Human
uucuccauggccaccuuuucag

SEQ ID NO: 2199608 - RNA, 11 nt, Human
uucuccaggcu

SEQ ID NO: 2199609 - RNA, 15 nt, Human
uucuccacagcaacc

SEQ ID NO: 2199610 - RNA, 19 nt, Human
uucuccaauaucagugcuc

SEQ ID NO: 2199611 - RNA, 21 nt, Human
uucuccaauaucagugcucga

SEQ ID NO: 2199612 - RNA, 22 nt, Human
uucuccacagcaaccccaggcu

SEQ ID NO: 2199613 - RNA, 13 nt, Human
uucuccacccugc

SEQ ID NO: 2199614 - RNA, 16 nt, Human
uucuccaagcaggaca

SEQ ID NO: 2199615 - RNA, 18 nt, Human
uucucccccugggcucug

SEQ ID NO: 2199616 - RNA, 17 nt, Human
uucucccccugggcucu

SEQ ID NO: 2199617 - RNA, 14 nt, Human
uucucccccugggc

SEQ ID NO: 2199618 - RNA, 20 nt, Human
uucucccccccggggcuggg

SEQ ID NO: 2199619 - RNA, 21 nt, Human
uucucccccccggggcugggu

SEQ ID NO: 2199620 - RNA, 19 nt, Human
uucucccagguaccagcug

SEQ ID NO: 2199621 - RNA, 20 nt, Human
uucucccagguaccagcugc

SEQ ID NO: 2199622 - RNA, 17 nt, Human
uucucccccccggggcu

SEQ ID NO: 2199623 - RNA, 18 nt, Human
uucucuccagccccugga

SEQ ID NO: 2199624 - RNA, 23 nt, Human
uucucccccccggggcuggguug

SEQ ID NO: 2199625 - RNA, 20 nt, Human
uucucucggaguaucuggga

SEQ ID NO: 2199626 - RNA, 15 nt, Human
uucucuccuccccaa

SEQ ID NO: 2199627 - RNA, 17 nt, Human
uucucuccuccccaaau

SEQ ID NO: 2199628 - RNA, 22 nt, Human
uucucuccuguaccucuugagc

SEQ ID NO: 2199629 - RNA, 12 nt, Human
uucucucucacc

SEQ ID NO: 2199630 - RNA, 17 nt, Human
uucucucggcuccccau

SEQ ID NO: 2199631 - RNA, 16 nt, Human
uucucucuccugucca

SEQ ID NO: 2199632 - RNA, 21 nt, Human
uucucucccaggggcuggcuu

SEQ ID NO: 2199633 - RNA, 23 nt, Human
uucucucccaggggcuggcuuca

SEQ ID NO: 2199634 - RNA, 12 nt, Human
uucucuccuccc

SEQ ID NO: 2199635 - RNA, 14 nt, Human
uucucuccucccca

SEQ ID NO: 2199636 - RNA, 23 nt, Human
uucucuccucuccccaugauguu

SEQ ID NO: 2199637 - RNA, 23 nt, Human
uucucugaagaguggguuucaca

SEQ ID NO: 2199638 - RNA, 11 nt, Human
uucucugacuu

SEQ ID NO: 2199639 - RNA, 15 nt, Human
uucucugaagggagg

SEQ ID NO: 2199640 - RNA, 16 nt, Human
uucucugaagggaggu

SEQ ID NO: 2199641 - RNA, 12 nt, Human
uucucugacuuc

SEQ ID NO: 2199642 - RNA, 16 nt, Human
uucucugacuucugcc

SEQ ID NO: 2199643 - RNA, 17 nt, Human
uucucugacuucugccu

SEQ ID NO: 2199644 - RNA, 14 nt, Human
uucucugcuccacc

SEQ ID NO: 2199645 - RNA, 13 nt, Human
uucucugcuccac

SEQ ID NO: 2199646 - RNA, 11 nt, Human
uucucugcucc

SEQ ID NO: 2199647 - RNA, 22 nt, Human
uucucuggaaaggggggagcug

SEQ ID NO: 2199648 - RNA, 15 nt, Human
uucucugcuccacca

SEQ ID NO: 2199649 - RNA, 17 nt, Human
uucucuggagccaaguc

SEQ ID NO: 2199650 - RNA, 15 nt, Human
uucucuggagccaag

SEQ ID NO: 2199651 - RNA, 22 nt, Human
uucucugaguaucuccucgcaa

SEQ ID NO: 2199652 - RNA, 13 nt, Human
uucucugccagug

SEQ ID NO: 2199653 - RNA, 10 nt, Human
uucucugcca

SEQ ID NO: 2199654 - RNA, 12 nt, Human
uucucugccagu

SEQ ID NO: 2199655 - RNA, 12 nt, Human
uucucugucuca

SEQ ID NO: 2199656 - RNA, 17 nt, Human
uucucuguagggaacuc

SEQ ID NO: 2199657 - RNA, 20 nt, Human
uucugacgugccuuuugcac

SEQ ID NO: 2199658 - RNA, 16 nt, Human
uucugacucugagcua

SEQ ID NO: 2199659 - RNA, 15 nt, Human
uucugacucugagcu

SEQ ID NO: 2199660 - RNA, 18 nt, Human
uucugacucgguuucucc

SEQ ID NO: 2199661 - RNA, 19 nt, Human
uucugacucgguuucucca

SEQ ID NO: 2199662 - RNA, 14 nt, Human
uucucuguauagua

SEQ ID NO: 2199663 - RNA, 21 nt, Human
uucugacccaugcugcccugu

SEQ ID NO: 2199664 - RNA, 19 nt, Human
uucucugguaauauugacu

SEQ ID NO: 2199665 - RNA, 16 nt, Human
uucugacccaugcugc

SEQ ID NO: 2199666 - RNA, 18 nt, Human
uucugacccaugcugccc

SEQ ID NO: 2199667 - RNA, 20 nt, Human
uucugacccaugcugcccug

SEQ ID NO: 2199668 - RNA, 13 nt, Human
uucuaaugucuuc

SEQ ID NO: 2199669 - RNA, 23 nt, Human
uucuauaugaauuuaaauauaau

SEQ ID NO: 2199670 - RNA, 19 nt, Human
uucuaauauuuauugcuuu

SEQ ID NO: 2199671 - RNA, 21 nt, Human
uucuaauauuuauugcuuuau

SEQ ID NO: 2199672 - RNA, 18 nt, Human
uucuaauauuuauugcuu

SEQ ID NO: 2199673 - RNA, 22 nt, Human
uucuaauauauuuuuauauuua

SEQ ID NO: 2199674 - RNA, 18 nt, Human
uucuaauagaacucaguu

SEQ ID NO: 2199675 - RNA, 14 nt, Human
uucuaauaguuuua

SEQ ID NO: 2199676 - RNA, 12 nt, Human
uucuaauagaac

SEQ ID NO: 2199677 - RNA, 14 nt, Human
uucuaauagaacuc

SEQ ID NO: 2199678 - RNA, 17 nt, Human
uucuaugacacaugcaa

SEQ ID NO: 2199679 - RNA, 16 nt, Human
uucuaugacacaugca

SEQ ID NO: 2199680 - RNA, 22 nt, Human
uucuaugugacaauuuuguaca

SEQ ID NO: 2199681 - RNA, 15 nt, Human
uucuauguaguuuau

SEQ ID NO: 2199682 - RNA, 14 nt, Human
uucuaucacauauu

SEQ ID NO: 2199683 - RNA, 17 nt, Human
uucuaucacauauuuga

SEQ ID NO: 2199684 - RNA, 13 nt, Human
uucuaucauuuuu

SEQ ID NO: 2199685 - RNA, 18 nt, Human
uucuaucauuuuuguaca

SEQ ID NO: 2199686 - RNA, 17 nt, Human
uucuaucauuuuuguac

SEQ ID NO: 2199687 - RNA, 13 nt, Human
uucuaugagaaaa

SEQ ID NO: 2199688 - RNA, 13 nt, Human
uucuauugaaaaa

SEQ ID NO: 2199689 - RNA, 22 nt, Human
uucuauucaagguggccaaauu

SEQ ID NO: 2199690 - RNA, 20 nt, Human
uucuauuagccagucuuuac

SEQ ID NO: 2199691 - RNA, 17 nt, Human
uucuauuaacuuuaauu

SEQ ID NO: 2199692 - RNA, 17 nt, Human
uucuauugacuucaaug

SEQ ID NO: 2199693 - RNA, 14 nt, Human
uucuauugaaaaau

SEQ ID NO: 2199694 - RNA, 23 nt, Human
uucuauugacuucaaugauagua

SEQ ID NO: 2199695 - RNA, 18 nt, Human
uucuauugcaguuauaga

SEQ ID NO: 2199696 - RNA, 14 nt, Human
uucuauuguacaga

SEQ ID NO: 2199697 - RNA, 15 nt, Human
uucuauuguacagaa

SEQ ID NO: 2199698 - RNA, 14 nt, Human
uucuauuguuacuc

SEQ ID NO: 2199699 - RNA, 17 nt, Human
uucuauuguuacucugg

SEQ ID NO: 2199700 - RNA, 20 nt, Human
uucuccaaacugaagcagcc

SEQ ID NO: 2199701 - RNA, 14 nt, Human
uucuccaaaugaga

SEQ ID NO: 2199702 - RNA, 21 nt, Human
uucucaugccucagccuccug

SEQ ID NO: 2199703 - RNA, 14 nt, Human
uucucaugccucag

SEQ ID NO: 2199704 - RNA, 12 nt, Human
uucucaugccuc

SEQ ID NO: 2199705 - RNA, 11 nt, Human
uucucaugccu

SEQ ID NO: 2199706 - RNA, 15 nt, Human
uucucaucuuucuug

SEQ ID NO: 2199707 - RNA, 18 nt, Human
uucucaucuuucuugauc

SEQ ID NO: 2199708 - RNA, 14 nt, Human
uucucaugauccaa

SEQ ID NO: 2199709 - RNA, 15 nt, Human
uucucauccugcagg

SEQ ID NO: 2199710 - RNA, 21 nt, Human
uucucaaaguuuugaaaagcu

SEQ ID NO: 2199711 - RNA, 22 nt, Human
uucucaaaguuuugaaaagcua

SEQ ID NO: 2199712 - RNA, 12 nt, Human
uucucaaauaaa

SEQ ID NO: 2199713 - RNA, 21 nt, Human
uucucaacaaagcacaguguu

SEQ ID NO: 2199714 - RNA, 15 nt, Human
uucucaaaguuuuga

SEQ ID NO: 2199715 - RNA, 17 nt, Human
uucucaaaguuuugaaa

SEQ ID NO: 2199716 - RNA, 18 nt, Human
uucucaaaguuuugaaaa

SEQ ID NO: 2199717 - RNA, 23 nt, Human
uucucaaacacaguuacacuugu

SEQ ID NO: 2199718 - RNA, 22 nt, Human
uucucaaaccuguuuaaauauu

SEQ ID NO: 2199719 - RNA, 15 nt, Human
uucuauuuauuuacu

SEQ ID NO: 2199720 - RNA, 19 nt, Human
uucuauuuauauguacaug

SEQ ID NO: 2199721 - RNA, 18 nt, Human
uucuauuuauauguacau

SEQ ID NO: 2199722 - RNA, 19 nt, Human
uucuauuucuccuccaugg

SEQ ID NO: 2199723 - RNA, 17 nt, Human
uucuauuucuccuccau

SEQ ID NO: 2199724 - RNA, 19 nt, Human
uucuauuucagugccaaua

SEQ ID NO: 2199725 - RNA, 13 nt, Human
uucuauuuaaugg

SEQ ID NO: 2199726 - RNA, 17 nt, Human
uucuauuguuuauucuu

SEQ ID NO: 2199727 - RNA, 14 nt, Human
uucuauuuaaugga

SEQ ID NO: 2199728 - RNA, 15 nt, Human
uucuauuguuguaca

SEQ ID NO: 2199729 - RNA, 19 nt, Human
uucuauuguuacucugguu

SEQ ID NO: 2199730 - RNA, 22 nt, Human
uucuauuguuacucugguucuu

SEQ ID NO: 2199731 - RNA, 14 nt, Human
uucuauuguuucuu

SEQ ID NO: 2199732 - RNA, 15 nt, Human
uucuauuuuuguaga

SEQ ID NO: 2199733 - RNA, 13 nt, Human
uucucaaacacag

SEQ ID NO: 2199734 - RNA, 21 nt, Human
uucuauuuucauuuucugcaa

SEQ ID NO: 2199735 - RNA, 23 nt, Human
uucuauuuucauuuucugcaagc

SEQ ID NO: 2199736 - RNA, 16 nt, Human
uucuauuuuguaaacu

SEQ ID NO: 2199737 - RNA, 13 nt, Human
uucuauuuuguaa

SEQ ID NO: 2199738 - RNA, 17 nt, Human
uucuauuuucauuuucu

SEQ ID NO: 2199739 - RNA, 20 nt, Human
uucuauuuucauuuucugca

SEQ ID NO: 2199740 - RNA, 15 nt, Human
uucuauuugcugggc

SEQ ID NO: 2199741 - RNA, 16 nt, Human
uucuauuugcugggcu

SEQ ID NO: 2199742 - RNA, 17 nt, Human
uucuauuugcugggcuu

SEQ ID NO: 2199743 - RNA, 18 nt, Human
uucuauuugcugggcuuu

SEQ ID NO: 2199744 - RNA, 12 nt, Human
uucuauuuggaa

SEQ ID NO: 2199745 - RNA, 22 nt, Human
uucuucacuguccuccaagcca

SEQ ID NO: 2199746 - RNA, 17 nt, Human
uucuucagaagacacug

SEQ ID NO: 2199747 - RNA, 14 nt, Human
uucuucagaagaca

SEQ ID NO: 2199748 - RNA, 22 nt, Human
uucuugguugaggaaacaaaca

SEQ ID NO: 2199749 - RNA, 21 nt, Human
uucuucacccagcuaaucugu

SEQ ID NO: 2199750 - RNA, 14 nt, Human
uucuucacccagcu

SEQ ID NO: 2199751 - RNA, 16 nt, Human
uucuugguuuguaaau

SEQ ID NO: 2199752 - RNA, 13 nt, Human
uucuugguuugua

SEQ ID NO: 2199753 - RNA, 23 nt, Human
uucuugguuuguaaauuaacuuu

SEQ ID NO: 2199754 - RNA, 16 nt, Human
uucuugguugaggaaa

SEQ ID NO: 2199755 - RNA, 16 nt, Human
uucuugguuggcuggc

SEQ ID NO: 2199756 - RNA, 21 nt, Human
uucuuguaauuuaaacaggcc

SEQ ID NO: 2199757 - RNA, 20 nt, Human
uucuugguuggcuggccuuc

SEQ ID NO: 2199758 - RNA, 11 nt, Human
uucuuguaauu

SEQ ID NO: 2199759 - RNA, 18 nt, Human
uucuugguuuguaaauua

SEQ ID NO: 2199760 - RNA, 17 nt, Human
uucuugguuuguaaauu

SEQ ID NO: 2199761 - RNA, 23 nt, Human
uucuuauuuaaugaaagacugua

SEQ ID NO: 2199762 - RNA, 19 nt, Human
uucuuauuuaaugaaagac

SEQ ID NO: 2199763 - RNA, 11 nt, Human
uucuguucuuu

SEQ ID NO: 2199764 - RNA, 13 nt, Human
uucuguucugugg

SEQ ID NO: 2199765 - RNA, 16 nt, Human
uucuguucuguggaaa

SEQ ID NO: 2199766 - RNA, 22 nt, Human
uucuucaacaucaauguucauu

SEQ ID NO: 2199767 - RNA, 21 nt, Human
uucuucaacaucaauguucau

SEQ ID NO: 2199768 - RNA, 14 nt, Human
uucuucaacucccu

SEQ ID NO: 2199769 - RNA, 17 nt, Human
uucuucaacaucaaugu

SEQ ID NO: 2199770 - RNA, 19 nt, Human
uucuucaacaggagaauuu

SEQ ID NO: 2199771 - RNA, 16 nt, Human
uucuuauuucaugaaa

SEQ ID NO: 2199772 - RNA, 14 nt, Human
uucuuauuucauga

SEQ ID NO: 2199773 - RNA, 20 nt, Human
uucuguucuguggaaagugu

SEQ ID NO: 2199774 - RNA, 21 nt, Human
uucuguucuguggaaagugua

SEQ ID NO: 2199775 - RNA, 15 nt, Human
uucuuauuucauuuc

SEQ ID NO: 2199776 - RNA, 12 nt, Human
uucuguggcuca

SEQ ID NO: 2199777 - RNA, 16 nt, Human
uucuguggcucacaga

SEQ ID NO: 2199778 - RNA, 23 nt, Human
uucuguggguuucuaaagcugcc

SEQ ID NO: 2199779 - RNA, 17 nt, Human
uucuguccuacucugug

SEQ ID NO: 2199780 - RNA, 19 nt, Human
uucugaggacauuccaaga

SEQ ID NO: 2199781 - RNA, 21 nt, Human
uucuguggaaaguguaaagca

SEQ ID NO: 2199782 - RNA, 22 nt, Human
uucugugggagaauucuuacau

SEQ ID NO: 2199783 - RNA, 22 nt, Human
uucuguggaaaguguaaagcau

SEQ ID NO: 2199784 - RNA, 23 nt, Human
uucuguggaaaguguaaagcauu

SEQ ID NO: 2199785 - RNA, 21 nt, Human
uucuguccgagcuuugaaaau

SEQ ID NO: 2199786 - RNA, 17 nt, Human
uucuguccgagcuuuga

SEQ ID NO: 2199787 - RNA, 23 nt, Human
uucugagcuauuucaucuauuuu

SEQ ID NO: 2199788 - RNA, 16 nt, Human
uucugagcuauuucau

SEQ ID NO: 2199789 - RNA, 21 nt, Human
uucugagcccgggcugccugg

SEQ ID NO: 2199790 - RNA, 19 nt, Human
uucugagcccgggcugccu

SEQ ID NO: 2199791 - RNA, 20 nt, Human
uucugagcccgggcugccug

SEQ ID NO: 2199792 - RNA, 22 nt, Human
uucugacuucauagauuuccuu

SEQ ID NO: 2199793 - RNA, 12 nt, Human
uucugacuugac

SEQ ID NO: 2199794 - RNA, 13 nt, Human
uucugacugcuga

SEQ ID NO: 2199795 - RNA, 15 nt, Human
uucugacuccagugg

SEQ ID NO: 2199796 - RNA, 15 nt, Human
uucugagaaagacua

SEQ ID NO: 2199797 - RNA, 14 nt, Human
uucugagcauuuaa

SEQ ID NO: 2199798 - RNA, 23 nt, Human
uugaaucugauuggacauuuucu

SEQ ID NO: 2199799 - RNA, 14 nt, Human
uugaaucuugucuc

SEQ ID NO: 2199800 - RNA, 20 nt, Human
uugaaucuauuuaaguaaaa

SEQ ID NO: 2199801 - RNA, 15 nt, Human
uugaaucuuuccaau

SEQ ID NO: 2199802 - RNA, 24 nt, Human
uugaaucugauuggacauuuucuu

SEQ ID NO: 2199803 - RNA, 22 nt, Human
uugaaucuugucucaaugcuca

SEQ ID NO: 2199804 - RNA, 23 nt, Human
uugaaucuugucucaaugcucau

SEQ ID NO: 2199805 - RNA, 15 nt, Human
uugaaucuugucuca

SEQ ID NO: 2199806 - RNA, 16 nt, Human
uugaaucuugucucaa

SEQ ID NO: 2199807 - RNA, 17 nt, Human
uugaaucuugucucaau

SEQ ID NO: 2199808 - RNA, 20 nt, Human
uugaaucuugucucaaugcu

SEQ ID NO: 2199809 - RNA, 22 nt, Human
uugaagacacugaaauauacac

SEQ ID NO: 2199810 - RNA, 19 nt, Human
uugaagacuuuucuuucag

SEQ ID NO: 2199811 - RNA, 15 nt, Human
uugaagacacugaaa

SEQ ID NO: 2199812 - RNA, 13 nt, Human
uugaagacacuga

SEQ ID NO: 2199813 - RNA, 17 nt, Human
uugaagacagagcuaca

SEQ ID NO: 2199814 - RNA, 19 nt, Human
uugaacucuucaaucucuu

SEQ ID NO: 2199815 - RNA, 17 nt, Human
uugaaagaaaggacucu

SEQ ID NO: 2199816 - RNA, 16 nt, Human
uugaacugauaaagau

SEQ ID NO: 2199817 - RNA, 16 nt, Human
uugaacugagcuugga

SEQ ID NO: 2199818 - RNA, 15 nt, Human
uugaacugagcuugg

SEQ ID NO: 2199819 - RNA, 15 nt, Human
uugaacugauaguua

SEQ ID NO: 2199820 - RNA, 22 nt, Human
uugaacuuugaccucugcagca

SEQ ID NO: 2199821 - RNA, 15 nt, Human
uugaagaaugaacaa

SEQ ID NO: 2199822 - RNA, 16 nt, Human
uugaagaaugaacaaa

SEQ ID NO: 2199823 - RNA, 19 nt, Human
uugaagaacugcaggcccu

SEQ ID NO: 2199824 - RNA, 16 nt, Human
uugaacuuuuuuccac

SEQ ID NO: 2199825 - RNA, 13 nt, Human
uugaagaaugaac

SEQ ID NO: 2199826 - RNA, 16 nt, Human
uugaagaacugcaggc

SEQ ID NO: 2199827 - RNA, 22 nt, Human
uugaacuuuuuuccacugaagu

SEQ ID NO: 2199828 - RNA, 20 nt, Human
uugaagaacugcaggcccug

SEQ ID NO: 2199829 - RNA, 15 nt, Human
uugaaagaaaauaug

SEQ ID NO: 2199830 - RNA, 23 nt, Human
uugaaacugagaugugaacacau

SEQ ID NO: 2199831 - RNA, 22 nt, Human
uugaaaacacuguucucugccc

SEQ ID NO: 2199832 - RNA, 23 nt, Human
uugaaaaauuccuauugugauuu

SEQ ID NO: 2199833 - RNA, 23 nt, Human
uugaaaagacuccaaagaaaugu

SEQ ID NO: 2199834 - RNA, 22 nt, Human
uugaaaagacuccaaagaaaug

SEQ ID NO: 2199835 - RNA, 18 nt, Human
uugaaaagacuccaaaga

SEQ ID NO: 2199836 - RNA, 16 nt, Human
uugaaaagacuccaaa

SEQ ID NO: 2199837 - RNA, 18 nt, Human
uucuuuauaauucuacuu

SEQ ID NO: 2199838 - RNA, 16 nt, Human
uucuuuauacaacagu

SEQ ID NO: 2199839 - RNA, 18 nt, Human
uucuuuauacaacagugc

SEQ ID NO: 2199840 - RNA, 19 nt, Human
uucuuuauacaacagugcu

SEQ ID NO: 2199841 - RNA, 22 nt, Human
uucuuuauacaacagugcuaaa

SEQ ID NO: 2199842 - RNA, 16 nt, Human
uucuuuauacuguaau

SEQ ID NO: 2199843 - RNA, 14 nt, Human
uucuuuauaaacuu

SEQ ID NO: 2199844 - RNA, 13 nt, Human
uucuuuauaaacu

SEQ ID NO: 2199845 - RNA, 22 nt, Human
uucuuuaggagauuuuaggugu

SEQ ID NO: 2199846 - RNA, 18 nt, Human
uucuuuagagcauugcca

SEQ ID NO: 2199847 - RNA, 14 nt, Human
uucuuuaggagauu

SEQ ID NO: 2199848 - RNA, 15 nt, Human
uucuuuaggagauuu

SEQ ID NO: 2199849 - RNA, 13 nt, Human
uucuuguauuaag

SEQ ID NO: 2199850 - RNA, 12 nt, Human
uucuuguauuaa

SEQ ID NO: 2199851 - RNA, 23 nt, Human
uucuuguaauuuaaacaggccca

SEQ ID NO: 2199852 - RNA, 13 nt, Human
uucuuguaguagu

SEQ ID NO: 2199853 - RNA, 22 nt, Human
uucuuucaagugaaucuaaaag

SEQ ID NO: 2199854 - RNA, 20 nt, Human
uucuuucaagugaaucuaaa

SEQ ID NO: 2199855 - RNA, 21 nt, Human
uugaaaaaugugcaaaacagc

SEQ ID NO: 2199856 - RNA, 13 nt, Human
uugaaaaauuccu

SEQ ID NO: 2199857 - RNA, 15 nt, Human
uugaaaaauuccuau

SEQ ID NO: 2199858 - RNA, 16 nt, Human
uugaaaaauuccuauu

SEQ ID NO: 2199859 - RNA, 20 nt, Human
uugaaaaauuccuauuguga

SEQ ID NO: 2199860 - RNA, 10 nt, Human
uucuuucaag

SEQ ID NO: 2199861 - RNA, 15 nt, Human
uucuuuauacuguaa

SEQ ID NO: 2199862 - RNA, 15 nt, Human
uugaaaaaugcaugu

SEQ ID NO: 2199863 - RNA, 19 nt, Human
uugaaaacacuguucucug

SEQ ID NO: 2199864 - RNA, 21 nt, Human
uugaaaacacuguucucugcc

SEQ ID NO: 2199865 - RNA, 20 nt, Human
uugauuuuugccucuuccag

SEQ ID NO: 2199866 - RNA, 14 nt, Human
uugauuuucuguug

SEQ ID NO: 2199867 - RNA, 16 nt, Human
uugauuuucuguugua

SEQ ID NO: 2199868 - RNA, 18 nt, Human
uugauuuuuaccguuucu

SEQ ID NO: 2199869 - RNA, 17 nt, Human
uugcaaaagacuaauuu

SEQ ID NO: 2199870 - RNA, 17 nt, Human
uugauuucuuuccagag

SEQ ID NO: 2199871 - RNA, 18 nt, Human
uugauuuccguuaaaaua

SEQ ID NO: 2199872 - RNA, 14 nt, Human
uugcaacaggcugg

SEQ ID NO: 2199873 - RNA, 17 nt, Human
uugcaacaggcugggcu

SEQ ID NO: 2199874 - RNA, 11 nt, Human
uugcaaaauuu

SEQ ID NO: 2199875 - RNA, 15 nt, Human
uugcaaaauuuccag

SEQ ID NO: 2199876 - RNA, 19 nt, Human
uugcaaaauagcauuuguu

SEQ ID NO: 2199877 - RNA, 23 nt, Human
uugcaaaauuuccaguaccuuug

SEQ ID NO: 2199878 - RNA, 22 nt, Human
uugcaaaauuuccaguaccuuu

SEQ ID NO: 2199879 - RNA, 21 nt, Human
uugcaaaauuuccaguaccuu

SEQ ID NO: 2199880 - RNA, 16 nt, Human
uugcaaaauuuccagu

SEQ ID NO: 2199881 - RNA, 12 nt, Human
uugcaaacuuua

SEQ ID NO: 2199882 - RNA, 18 nt, Human
uugaggguaauaaacuua

SEQ ID NO: 2199883 - RNA, 19 nt, Human
uugaucuggaacccagacu

SEQ ID NO: 2199884 - RNA, 17 nt, Human
uugaucuggaacccaga

SEQ ID NO: 2199885 - RNA, 16 nt, Human
uugaucuggaacccag

SEQ ID NO: 2199886 - RNA, 15 nt, Human
uugaucuggaaccca

SEQ ID NO: 2199887 - RNA, 21 nt, Human
uugauagcacagacccugccc

SEQ ID NO: 2199888 - RNA, 14 nt, Human
uugaucuggaaccc

SEQ ID NO: 2199889 - RNA, 13 nt, Human
uugaggguaggag

SEQ ID NO: 2199890 - RNA, 15 nt, Human
uugauugucagcuac

SEQ ID NO: 2199891 - RNA, 21 nt, Human
uugauugucagcuacuaauga

SEQ ID NO: 2199892 - RNA, 17 nt, Human
uugauugucagcuacua

SEQ ID NO: 2199893 - RNA, 20 nt, Human
uugauuguucgggugugcaa

SEQ ID NO: 2199894 - RNA, 12 nt, Human
uugauuuaugca

SEQ ID NO: 2199895 - RNA, 19 nt, Human
uugauuuaugcauggaaac

SEQ ID NO: 2199896 - RNA, 12 nt, Human
uugaugaagaag

SEQ ID NO: 2199897 - RNA, 22 nt, Human
uugcagaaacauuuugugguca

SEQ ID NO: 2199898 - RNA, 19 nt, Human
uugcagaacuaaacucauu

SEQ ID NO: 2199899 - RNA, 14 nt, Human
uugcaaccucgcug

SEQ ID NO: 2199900 - RNA, 12 nt, Human
uugcaacuucau

SEQ ID NO: 2199901 - RNA, 21 nt, Human
uugcagaacuaaacucauuua

SEQ ID NO: 2199902 - RNA, 15 nt, Human
uugcaacacacagac

SEQ ID NO: 2199903 - RNA, 12 nt, Human
uugcaaccacug

SEQ ID NO: 2199904 - RNA, 13 nt, Human
uugcaacacacag

SEQ ID NO: 2199905 - RNA, 14 nt, Human
uugcaaccgucugu

SEQ ID NO: 2199906 - RNA, 16 nt, Human
uugcagacaggcaagc

SEQ ID NO: 2199907 - RNA, 20 nt, Human
uugcaguagagucaucucca

SEQ ID NO: 2199908 - RNA, 17 nt, Human
uugcaguagauuuucuu

SEQ ID NO: 2199909 - RNA, 15 nt, Human
uugcagguugcuuug

SEQ ID NO: 2199910 - RNA, 22 nt, Human
uugcaguaaacuuuuaauuaaa

SEQ ID NO: 2199911 - RNA, 18 nt, Human
uugcagguggaacucagu

SEQ ID NO: 2199912 - RNA, 18 nt, Human
uugcagggagcauggcug

SEQ ID NO: 2199913 - RNA, 19 nt, Human
uugcagguggaacucaguc

SEQ ID NO: 2199914 - RNA, 20 nt, Human
uugcagguggaacucaguca

SEQ ID NO: 2199915 - RNA, 22 nt, Human
uugcagacaggcaagcaccucc

SEQ ID NO: 2199916 - RNA, 23 nt, Human
uugcaggagcaguaucaugaagc

SEQ ID NO: 2199917 - RNA, 21 nt, Human
uugcaggcaugcaugugcuug

SEQ ID NO: 2199918 - RNA, 13 nt, Human
uugcagugagcca

SEQ ID NO: 2199919 - RNA, 21 nt, Human
uugcauaauaagcuaaagagg

SEQ ID NO: 2199920 - RNA, 14 nt, Human
uugcauagaauaaa

SEQ ID NO: 2199921 - RNA, 16 nt, Human
uugccacccucaugcu

SEQ ID NO: 2199922 - RNA, 23 nt, Human
uugccaccccacccucccuggag

SEQ ID NO: 2199923 - RNA, 14 nt, Human
uugccacugccucu

SEQ ID NO: 2199924 - RNA, 15 nt, Human
uugccacugccucuu

SEQ ID NO: 2199925 - RNA, 22 nt, Human
uugcauaguaccaaucauuuua

SEQ ID NO: 2199926 - RNA, 13 nt, Human
uugccacccucau

SEQ ID NO: 2199927 - RNA, 21 nt, Human
uugccaccccacccucccugg

SEQ ID NO: 2199928 - RNA, 22 nt, Human
uugccaccccacccucccugga

SEQ ID NO: 2199929 - RNA, 18 nt, Human
uugcauagauucccugag

SEQ ID NO: 2199930 - RNA, 15 nt, Human
uugaggggauuaaua

SEQ ID NO: 2199931 - RNA, 21 nt, Human
uugagggcccagagcaggaag

SEQ ID NO: 2199932 - RNA, 23 nt, Human
uugagggcccagagcaggaagca

SEQ ID NO: 2199933 - RNA, 15 nt, Human
uugaggggcuccugg

SEQ ID NO: 2199934 - RNA, 20 nt, Human
uugaggggauuaauaugaaa

SEQ ID NO: 2199935 - RNA, 16 nt, Human
uugaggggauuaauau

SEQ ID NO: 2199936 - RNA, 16 nt, Human
uugaggggcuccugga

SEQ ID NO: 2199937 - RNA, 22 nt, Human
uugaggggauuaauaugaaaac

SEQ ID NO: 2199938 - RNA, 22 nt, Human
uugaggggcuggccuuccugcc

SEQ ID NO: 2199939 - RNA, 19 nt, Human
uugauagcacagacccugc

SEQ ID NO: 2199940 - RNA, 20 nt, Human
uugauagcacagacccugcc

SEQ ID NO: 2199941 - RNA, 14 nt, Human
uugagggcccagag

SEQ ID NO: 2199942 - RNA, 15 nt, Human
uugagggcccagagc

SEQ ID NO: 2199943 - RNA, 16 nt, Human
uugagggcccagagca

SEQ ID NO: 2199944 - RNA, 19 nt, Human
uugagggcccagagcagga

SEQ ID NO: 2199945 - RNA, 15 nt, Human
uugaggacacugaua

SEQ ID NO: 2199946 - RNA, 14 nt, Human
uugaggacacugau

SEQ ID NO: 2199947 - RNA, 18 nt, Human
uugaggaaacaacagcuu

SEQ ID NO: 2199948 - RNA, 23 nt, Human
uugaggaaaacaagcauucacaa

SEQ ID NO: 2199949 - RNA, 13 nt, Human
uugaggaaaacaa

SEQ ID NO: 2199950 - RNA, 18 nt, Human
uugagcuuagugaaauua

SEQ ID NO: 2199951 - RNA, 14 nt, Human
uugagcuuuccaug

SEQ ID NO: 2199952 - RNA, 21 nt, Human
uugagcuuuccauguugcugc

SEQ ID NO: 2199953 - RNA, 18 nt, Human
uugagcuguuuucccuga

SEQ ID NO: 2199954 - RNA, 21 nt, Human
uugagcuguugccucaguccc

SEQ ID NO: 2199955 - RNA, 12 nt, Human
uugagcuguuuu

SEQ ID NO: 2199956 - RNA, 23 nt, Human
uugacgagugugaagcuuccuug

SEQ ID NO: 2199957 - RNA, 23 nt, Human
uugacgaagucucuuuucuuuag

SEQ ID NO: 2199958 - RNA, 15 nt, Human
uugacggaugauugg

SEQ ID NO: 2199959 - RNA, 20 nt, Human
uugacgccaucccagcccca

SEQ ID NO: 2199960 - RNA, 23 nt, Human
uugacuagaugauggaugccaau

SEQ ID NO: 2199961 - RNA, 20 nt, Human
uugacggaugauuggauuau

SEQ ID NO: 2199962 - RNA, 17 nt, Human
uugacuaucaaacugaa

SEQ ID NO: 2199963 - RNA, 21 nt, Human
uugacuagggauucaggcugc

SEQ ID NO: 2199964 - RNA, 19 nt, Human
uugacuagggauucaggcu

SEQ ID NO: 2199965 - RNA, 12 nt, Human
uugagcugccuu

SEQ ID NO: 2199966 - RNA, 13 nt, Human
uugagcugccuuc

SEQ ID NO: 2199967 - RNA, 14 nt, Human
uugagcugccuucc

SEQ ID NO: 2199968 - RNA, 15 nt, Human
uugagcugccuuccc

SEQ ID NO: 2199969 - RNA, 16 nt, Human
uugagcugccuucccu

SEQ ID NO: 2199970 - RNA, 19 nt, Human
uugagcugccuucccuagc

SEQ ID NO: 2199971 - RNA, 16 nt, Human
uugaaugcuuccugac

SEQ ID NO: 2199972 - RNA, 16 nt, Human
uugaaugcauuuuguu

SEQ ID NO: 2199973 - RNA, 23 nt, Human
uugaaugcauuuuguuugguauu

SEQ ID NO: 2199974 - RNA, 15 nt, Human
uugaaugaaaaauuu

SEQ ID NO: 2199975 - RNA, 12 nt, Human
uugaaugaaaaa

SEQ ID NO: 2199976 - RNA, 18 nt, Human
uugaaugaaaaauuuaag

SEQ ID NO: 2199977 - RNA, 12 nt, Human
uugaaugcauuu

SEQ ID NO: 2199978 - RNA, 13 nt, Human
uugaaugcauuuu

SEQ ID NO: 2199979 - RNA, 15 nt, Human
uugaauggguccauu

SEQ ID NO: 2199980 - RNA, 23 nt, Human
uugaauggucagcguugcauguc

SEQ ID NO: 2199981 - RNA, 16 nt, Human
uugaaugguguuguau

SEQ ID NO: 2199982 - RNA, 18 nt, Human
uugaauguaugcuucaua

SEQ ID NO: 2199983 - RNA, 18 nt, Human
uugaauggccugccuuga

SEQ ID NO: 2199984 - RNA, 15 nt, Human
uugaaugcuuuuuga

SEQ ID NO: 2199985 - RNA, 17 nt, Human
uugaaugcuuuuugaau

SEQ ID NO: 2199986 - RNA, 20 nt, Human
uugaaugcuuuuugaauguu

SEQ ID NO: 2199987 - RNA, 23 nt, Human
uugaaugcuuuuugaauguuauu

SEQ ID NO: 2199988 - RNA, 15 nt, Human
uugaccucaggugau

SEQ ID NO: 2199989 - RNA, 20 nt, Human
uugaaugguguuguaugccu

SEQ ID NO: 2199990 - RNA, 12 nt, Human
uugaaugucuuu

SEQ ID NO: 2199991 - RNA, 16 nt, Human
uugaaugucuuuugaa

SEQ ID NO: 2199992 - RNA, 17 nt, Human
uugaaugucuuuugaau

SEQ ID NO: 2199993 - RNA, 20 nt, Human
uugaccgugaggccagagac

SEQ ID NO: 2199994 - RNA, 21 nt, Human
uugaccgugaggccagagaca

SEQ ID NO: 2199995 - RNA, 13 nt, Human
uugaccugaggcu

SEQ ID NO: 2199996 - RNA, 21 nt, Human
uugaccugccucccuucaugc

SEQ ID NO: 2199997 - RNA, 19 nt, Human
uugaccugaggcugugguc

SEQ ID NO: 2199998 - RNA, 22 nt, Human
uugaccugaggcccuucucucc

SEQ ID NO: 2199999 - RNA, 12 nt, Human
uugaccugaggc

SEQ ID NO: 2200000 - RNA, 19 nt, Human
uugaccugaggcccuucuc

SEQ ID NO: 2200001 - RNA, 15 nt, Human
uugacgccaucccag

SEQ ID NO: 2200002 - RNA, 21 nt, Human
uugaccuuuuauguaguaauu

SEQ ID NO: 2200003 - RNA, 16 nt, Human
uugacgaagucucuuu

SEQ ID NO: 2200004 - RNA, 22 nt, Human
uugacgccaucccagccccaau

SEQ ID NO: 2200005 - RNA, 14 nt, Human
uugacgccauccca

SEQ ID NO: 2200006 - RNA, 22 nt, Human
uugaccugccucccuucaugca

SEQ ID NO: 2200007 - RNA, 23 nt, Human
uugaccugccucccuucaugcau

SEQ ID NO: 2200008 - RNA, 12 nt, Human
uugccugcaggc

SEQ ID NO: 2200009 - RNA, 13 nt, Human
uugccugcagaga

SEQ ID NO: 2200010 - RNA, 15 nt, Human
uugccugcagagaga

SEQ ID NO: 2200011 - RNA, 19 nt, Human
uugccugcagagagaagcc

SEQ ID NO: 2200012 - RNA, 20 nt, Human
uugccugcagagagaagccu

SEQ ID NO: 2200013 - RNA, 22 nt, Human
uugccugcguuuuggaagcucu

SEQ ID NO: 2200014 - RNA, 20 nt, Human
uugccugaaguuggagugag

SEQ ID NO: 2200015 - RNA, 23 nt, Human
uugccugaacauccuuccuuccc

SEQ ID NO: 2200016 - RNA, 16 nt, Human
uugccugauauaaaug

SEQ ID NO: 2200017 - RNA, 19 nt, Human
uugccugaacauccuuccu

SEQ ID NO: 2200018 - RNA, 22 nt, Human
uugccugaacauccuuccuucc

SEQ ID NO: 2200019 - RNA, 19 nt, Human
uugccucuuccagucuucc

SEQ ID NO: 2200020 - RNA, 17 nt, Human
uugccucuuccagucuu

SEQ ID NO: 2200021 - RNA, 14 nt, Human
uugccucugugcug

SEQ ID NO: 2200022 - RNA, 19 nt, Human
uugccucugugcugugugu

SEQ ID NO: 2200023 - RNA, 21 nt, Human
uugcguggaauugugcugagu

SEQ ID NO: 2200024 - RNA, 20 nt, Human
uugcguaugucuguuaccau

SEQ ID NO: 2200025 - RNA, 15 nt, Human
uugcguggacucugc

SEQ ID NO: 2200026 - RNA, 18 nt, Human
uugcguggacucugcaca

SEQ ID NO: 2200027 - RNA, 22 nt, Human
uugcguuccaugaugcugggau

SEQ ID NO: 2200028 - RNA, 15 nt, Human
uugcuaaauguaaca

SEQ ID NO: 2200029 - RNA, 17 nt, Human
uugcguaacuggcugug

SEQ ID NO: 2200030 - RNA, 14 nt, Human
uugcggggggaggg

SEQ ID NO: 2200031 - RNA, 15 nt, Human
uugcggggggaggga

SEQ ID NO: 2200032 - RNA, 18 nt, Human
uugcguaacuggcugugu

SEQ ID NO: 2200033 - RNA, 14 nt, Human
uugcguaugucugu

SEQ ID NO: 2200034 - RNA, 16 nt, Human
uugcguaugucuguua

SEQ ID NO: 2200035 - RNA, 18 nt, Human
uugcguaugucuguuacc

SEQ ID NO: 2200036 - RNA, 15 nt, Human
uugcugauucuugag

SEQ ID NO: 2200037 - RNA, 19 nt, Human
uugcguuagaaugaggagg

SEQ ID NO: 2200038 - RNA, 22 nt, Human
uugcugauggugcaaugaccuu

SEQ ID NO: 2200039 - RNA, 12 nt, Human
uugcuaaaugua

SEQ ID NO: 2200040 - RNA, 20 nt, Human
uugcugauggugcaaugacc

SEQ ID NO: 2200041 - RNA, 15 nt, Human
uugcugcaaaccuga

SEQ ID NO: 2200042 - RNA, 13 nt, Human
uugcugcaaaccu

SEQ ID NO: 2200043 - RNA, 18 nt, Human
uugcugcaguaugaaaau

SEQ ID NO: 2200044 - RNA, 18 nt, Human
uugcugccaaccauaccu

SEQ ID NO: 2200045 - RNA, 21 nt, Human
uugcugccaaccauaccuucc

SEQ ID NO: 2200046 - RNA, 15 nt, Human
uugcugccucaugcu

SEQ ID NO: 2200047 - RNA, 12 nt, Human
uugcugccucau

SEQ ID NO: 2200048 - RNA, 11 nt, Human
uugcugccuca

SEQ ID NO: 2200049 - RNA, 20 nt, Human
uugcugccccaucagugcuc

SEQ ID NO: 2200050 - RNA, 19 nt, Human
uugcugccccaucagugcu

SEQ ID NO: 2200051 - RNA, 16 nt, Human
uugccucugccucuga

SEQ ID NO: 2200052 - RNA, 18 nt, Human
uugccucugccucugaca

SEQ ID NO: 2200053 - RNA, 17 nt, Human
uugccucuguccccuuc

SEQ ID NO: 2200054 - RNA, 18 nt, Human
uugccucuguccccuucu

SEQ ID NO: 2200055 - RNA, 15 nt, Human
uugccucucuguuug

SEQ ID NO: 2200056 - RNA, 22 nt, Human
uugccucggcuccugcugcacc

SEQ ID NO: 2200057 - RNA, 19 nt, Human
uugccucuguccccuucuc

SEQ ID NO: 2200058 - RNA, 20 nt, Human
uugccucuguccccuucucu

SEQ ID NO: 2200059 - RNA, 12 nt, Human
uugccucugugc

SEQ ID NO: 2200060 - RNA, 13 nt, Human
uugccucugugcu

SEQ ID NO: 2200061 - RNA, 11 nt, Human
uugccucugcc

SEQ ID NO: 2200062 - RNA, 14 nt, Human
uugccucugccucu

SEQ ID NO: 2200063 - RNA, 15 nt, Human
uugccuccuguguaa

SEQ ID NO: 2200064 - RNA, 22 nt, Human
uugccuccccauuucccaucug

SEQ ID NO: 2200065 - RNA, 14 nt, Human
uugccucggcuccu

SEQ ID NO: 2200066 - RNA, 15 nt, Human
uugccucggcuccug

SEQ ID NO: 2200067 - RNA, 16 nt, Human
uugccucggcuccugc

SEQ ID NO: 2200068 - RNA, 17 nt, Human
uugccucggcuccugcu

SEQ ID NO: 2200069 - RNA, 18 nt, Human
uugccucggcuccugcug

SEQ ID NO: 2200070 - RNA, 19 nt, Human
uugccucggcuccugcugc

SEQ ID NO: 2200071 - RNA, 20 nt, Human
uugccucggcuccugcugca

SEQ ID NO: 2200072 - RNA, 18 nt, Human
uugccacugccucuuccu

SEQ ID NO: 2200073 - RNA, 13 nt, Human
uugccagucaccc

SEQ ID NO: 2200074 - RNA, 18 nt, Human
uugccagucaccccggcc

SEQ ID NO: 2200075 - RNA, 18 nt, Human
uugccauacuuugucuga

SEQ ID NO: 2200076 - RNA, 22 nt, Human
uugccauacuuugucugaaaaa

SEQ ID NO: 2200077 - RNA, 13 nt, Human
uugccauauugca

SEQ ID NO: 2200078 - RNA, 15 nt, Human
uugccauauugcaca

SEQ ID NO: 2200079 - RNA, 17 nt, Human
uugccauauugcacaug

SEQ ID NO: 2200080 - RNA, 23 nt, Human
uugcccacgcuggagugcaguga

SEQ ID NO: 2200081 - RNA, 23 nt, Human
uugccauauugcacaugucuuaa

SEQ ID NO: 2200082 - RNA, 22 nt, Human
uugccauauugcacaugucuua

SEQ ID NO: 2200083 - RNA, 11 nt, Human
uugcccaggca

SEQ ID NO: 2200084 - RNA, 22 nt, Human
uugcccagagaugccuccaccg

SEQ ID NO: 2200085 - RNA, 22 nt, Human
uugcccagcauuuuacugauuc

SEQ ID NO: 2200086 - RNA, 19 nt, Human
uugcccagagaugccucca

SEQ ID NO: 2200087 - RNA, 18 nt, Human
uugcccagagaugccucc

SEQ ID NO: 2200088 - RNA, 17 nt, Human
uugcccagagaugccuc

SEQ ID NO: 2200089 - RNA, 16 nt, Human
uugcccagagaugccu

SEQ ID NO: 2200090 - RNA, 12 nt, Human
uugcccagagau

SEQ ID NO: 2200091 - RNA, 15 nt, Human
uuggaagaccccacc

SEQ ID NO: 2200092 - RNA, 19 nt, Human
uuggaaggaacguccccug

SEQ ID NO: 2200093 - RNA, 11 nt, Human
uuggaaggaac

SEQ ID NO: 2200094 - RNA, 16 nt, Human
uuggaacucugcuuga

SEQ ID NO: 2200095 - RNA, 16 nt, Human
uuggaaguuuucagga

SEQ ID NO: 2200096 - RNA, 13 nt, Human
uuggaaguuucau

SEQ ID NO: 2200097 - RNA, 16 nt, Human
uuggaaguugcauggc

SEQ ID NO: 2200098 - RNA, 18 nt, Human
uuggacauuuucuucaga

SEQ ID NO: 2200099 - RNA, 18 nt, Human
uuggauuuuugucuugug

SEQ ID NO: 2200100 - RNA, 18 nt, Human
uuggauuguauauugugu

SEQ ID NO: 2200101 - RNA, 14 nt, Human
uuggauuguauauu

SEQ ID NO: 2200102 - RNA, 14 nt, Human
uuggauuguccccg

SEQ ID NO: 2200103 - RNA, 17 nt, Human
uuggcaaaaaggcagga

SEQ ID NO: 2200104 - RNA, 20 nt, Human
uuggcaaacucuccaccaca

SEQ ID NO: 2200105 - RNA, 16 nt, Human
uuggcaaacucuccac

SEQ ID NO: 2200106 - RNA, 20 nt, Human
uuggauuauuuaauaacauu

SEQ ID NO: 2200107 - RNA, 14 nt, Human
uuggauuggggucc

SEQ ID NO: 2200108 - RNA, 15 nt, Human
uuggauucuuaugua

SEQ ID NO: 2200109 - RNA, 17 nt, Human
uuggauucugagagcug

SEQ ID NO: 2200110 - RNA, 15 nt, Human
uuggauucugagagc

SEQ ID NO: 2200111 - RNA, 18 nt, Human
uuggauuauuuaauaaca

SEQ ID NO: 2200112 - RNA, 15 nt, Human
uuggacccgcucugg

SEQ ID NO: 2200113 - RNA, 16 nt, Human
uuggacccgcucugga

SEQ ID NO: 2200114 - RNA, 17 nt, Human
uuggacccgcucuggac

SEQ ID NO: 2200115 - RNA, 19 nt, Human
uuggauuauuuaauaacau

SEQ ID NO: 2200116 - RNA, 21 nt, Human
uuggauuauuuaauaacauua

SEQ ID NO: 2200117 - RNA, 13 nt, Human
uuggaccccagcu

SEQ ID NO: 2200118 - RNA, 14 nt, Human
uuggaccccagcug

SEQ ID NO: 2200119 - RNA, 15 nt, Human
uuggaccccagcugg

SEQ ID NO: 2200120 - RNA, 16 nt, Human
uuggaccccagcuggg

SEQ ID NO: 2200121 - RNA, 17 nt, Human
uuggaccccagcuggga

SEQ ID NO: 2200122 - RNA, 19 nt, Human
uuggaccccagcugggagg

SEQ ID NO: 2200123 - RNA, 20 nt, Human
uuggaccccagcugggaggc

SEQ ID NO: 2200124 - RNA, 22 nt, Human
uuggaccccagcugggaggcaa

SEQ ID NO: 2200125 - RNA, 20 nt, Human
uugcuguagaagauggcacu

SEQ ID NO: 2200126 - RNA, 16 nt, Human
uugcugguugcugugu

SEQ ID NO: 2200127 - RNA, 21 nt, Human
uugcuguaccagcccagaugu

SEQ ID NO: 2200128 - RNA, 15 nt, Human
uugcuggucacugcc

SEQ ID NO: 2200129 - RNA, 14 nt, Human
uugcugguugcugu

SEQ ID NO: 2200130 - RNA, 15 nt, Human
uugcugguugcugug

SEQ ID NO: 2200131 - RNA, 22 nt, Human
uugcugguugcugugugguuug

SEQ ID NO: 2200132 - RNA, 21 nt, Human
uugcugccugaagaacaguaa

SEQ ID NO: 2200133 - RNA, 20 nt, Human
uugcugccacuuuuuaacua

SEQ ID NO: 2200134 - RNA, 20 nt, Human
uugcuggggccgaaagaaca

SEQ ID NO: 2200135 - RNA, 13 nt, Human
uugcuuacaauuu

SEQ ID NO: 2200136 - RNA, 14 nt, Human
uugcuuacaauuuu

SEQ ID NO: 2200137 - RNA, 15 nt, Human
uugcuuacaauuuuu

SEQ ID NO: 2200138 - RNA, 22 nt, Human
uugcuuacaauuuuuuuaauuu

SEQ ID NO: 2200139 - RNA, 23 nt, Human
uugcuuacaauuuuuuuaauuuu

SEQ ID NO: 2200140 - RNA, 13 nt, Human
uugcuuacauuuu

SEQ ID NO: 2200141 - RNA, 18 nt, Human
uugcuuacauuuuuacaa

SEQ ID NO: 2200142 - RNA, 21 nt, Human
uugcuguuuuguucugugguu

SEQ ID NO: 2200143 - RNA, 22 nt, Human
uugcuguuuuccucccuucugc

SEQ ID NO: 2200144 - RNA, 16 nt, Human
uugcuguuuuguucug

SEQ ID NO: 2200145 - RNA, 20 nt, Human
uugcuguuuuccucccuucu

SEQ ID NO: 2200146 - RNA, 19 nt, Human
uugcuguuuuccucccuuc

SEQ ID NO: 2200147 - RNA, 13 nt, Human
uugcuguuuugau

SEQ ID NO: 2200148 - RNA, 18 nt, Human
uugcuguuuuccucccuu

SEQ ID NO: 2200149 - RNA, 16 nt, Human
uugcuguuuuccuccc

SEQ ID NO: 2200150 - RNA, 14 nt, Human
uugcuguuuuccuc

SEQ ID NO: 2200151 - RNA, 11 nt, Human
uugcuguauau

SEQ ID NO: 2200152 - RNA, 23 nt, Human
uugcuguaccagcccagauguuu

SEQ ID NO: 2200153 - RNA, 14 nt, Human
uugcuguacuagag

SEQ ID NO: 2200154 - RNA, 22 nt, Human
uuggaaagcaucaccucaggcc

SEQ ID NO: 2200155 - RNA, 14 nt, Human
uuggaaaggaccag

SEQ ID NO: 2200156 - RNA, 24 nt, Human
uugcuuaggauguuuuucaugaaa

SEQ ID NO: 2200157 - RNA, 22 nt, Human
uuggaaauagaaauuuccagag

SEQ ID NO: 2200158 - RNA, 23 nt, Human
uuggaaauagaaauuuccagaga

SEQ ID NO: 2200159 - RNA, 20 nt, Human
uuggaaagcaucaccucagg

SEQ ID NO: 2200160 - RNA, 21 nt, Human
uuggaaagcagguggcaucuc

SEQ ID NO: 2200161 - RNA, 22 nt, Human
uuggaaagcuccuagcagagag

SEQ ID NO: 2200162 - RNA, 12 nt, Human
uugcuuacuaag

SEQ ID NO: 2200163 - RNA, 23 nt, Human
uugcuuacuuuggaauacauuuc

SEQ ID NO: 2200164 - RNA, 20 nt, Human
uugcuuaggaugugugcaug

SEQ ID NO: 2200165 - RNA, 23 nt, Human
uuggaaagaguaggaagacuuug

SEQ ID NO: 2200166 - RNA, 13 nt, Human
uuggaacagaaug

SEQ ID NO: 2200167 - RNA, 14 nt, Human
uuggaacagaaugu

SEQ ID NO: 2200168 - RNA, 13 nt, Human
uuggaaauauuca

SEQ ID NO: 2200169 - RNA, 12 nt, Human
uugguaaaccuu

SEQ ID NO: 2200170 - RNA, 17 nt, Human
uuggguucauuauugga

SEQ ID NO: 2200171 - RNA, 16 nt, Human
uugguaaauuucccca

SEQ ID NO: 2200172 - RNA, 21 nt, Human
uugguaaauuuccccaacagu

SEQ ID NO: 2200173 - RNA, 16 nt, Human
uugguaaagacuggcu

SEQ ID NO: 2200174 - RNA, 19 nt, Human
uugguaaagacuggcuuuu

SEQ ID NO: 2200175 - RNA, 14 nt, Human
uugguaaaccuuuu

SEQ ID NO: 2200176 - RNA, 20 nt, Human
uuggguguaacaggucuccu

SEQ ID NO: 2200177 - RNA, 19 nt, Human
uuggguguaacaggucucc

SEQ ID NO: 2200178 - RNA, 17 nt, Human
uugggugggcaggaaaa

SEQ ID NO: 2200179 - RNA, 22 nt, Human
uuggguggggggcuucauacac

SEQ ID NO: 2200180 - RNA, 21 nt, Human
uuggguggggggcuucauaca

SEQ ID NO: 2200181 - RNA, 20 nt, Human
uuggguggggggcuucauac

SEQ ID NO: 2200182 - RNA, 16 nt, Human
uuggguggaugccugg

SEQ ID NO: 2200183 - RNA, 19 nt, Human
uuggguggggggcuucaua

SEQ ID NO: 2200184 - RNA, 17 nt, Human
uuggguggggggcuuca

SEQ ID NO: 2200185 - RNA, 16 nt, Human
uugggaaacuuggcuc

SEQ ID NO: 2200186 - RNA, 17 nt, Human
uuggcuuacugcagccu

SEQ ID NO: 2200187 - RNA, 23 nt, Human
uuggcugugucuaaacugcauua

SEQ ID NO: 2200188 - RNA, 22 nt, Human
uuggcuuuggguugcaggaccu

SEQ ID NO: 2200189 - RNA, 17 nt, Human
uugggaggccccacugg

SEQ ID NO: 2200190 - RNA, 23 nt, Human
uugggaggaagcagaauaaagca

SEQ ID NO: 2200191 - RNA, 19 nt, Human
uugggaggaagcagaauaa

SEQ ID NO: 2200192 - RNA, 20 nt, Human
uugggaggaagcagaauaaa

SEQ ID NO: 2200193 - RNA, 21 nt, Human
uugggaggaagcagaauaaag

SEQ ID NO: 2200194 - RNA, 22 nt, Human
uugggaggaagcagaauaaagc

SEQ ID NO: 2200195 - RNA, 12 nt, Human
uugggaggcuga

SEQ ID NO: 2200196 - RNA, 16 nt, Human
uugggaggccauuugu

SEQ ID NO: 2200197 - RNA, 18 nt, Human
uugggaacugaacucacu

SEQ ID NO: 2200198 - RNA, 13 nt, Human
uugggaggaagca

SEQ ID NO: 2200199 - RNA, 14 nt, Human
uugggaggaagcag

SEQ ID NO: 2200200 - RNA, 15 nt, Human
uugggaggaagcaga

SEQ ID NO: 2200201 - RNA, 17 nt, Human
uugggaggaagcagaau

SEQ ID NO: 2200202 - RNA, 18 nt, Human
uugggaggaagcagaaua

SEQ ID NO: 2200203 - RNA, 15 nt, Human
uuggccaaaguguua

SEQ ID NO: 2200204 - RNA, 15 nt, Human
uuggccaagcaggga

SEQ ID NO: 2200205 - RNA, 16 nt, Human
uuggccaagcagggag

SEQ ID NO: 2200206 - RNA, 24 nt, Human
uuggccaaagccaaagcuaggccu

SEQ ID NO: 2200207 - RNA, 14 nt, Human
uuggccaggcuggu

SEQ ID NO: 2200208 - RNA, 14 nt, Human
uuggccacuccgag

SEQ ID NO: 2200209 - RNA, 21 nt, Human
uuggccacuccgagagguggg

SEQ ID NO: 2200210 - RNA, 22 nt, Human
uuggccacuccgagaggugggc

SEQ ID NO: 2200211 - RNA, 21 nt, Human
uuggcaucacagggcagagcc

SEQ ID NO: 2200212 - RNA, 15 nt, Human
uuggcaacagaagca

SEQ ID NO: 2200213 - RNA, 15 nt, Human
uuggcaucagcuggc

SEQ ID NO: 2200214 - RNA, 23 nt, Human
uuggcaaacucuccaccacacgu

SEQ ID NO: 2200215 - RNA, 16 nt, Human
uuggauuuuugacucu

SEQ ID NO: 2200216 - RNA, 16 nt, Human
uuggcaaauuccuagu

SEQ ID NO: 2200217 - RNA, 14 nt, Human
uuggcaacagaagc

SEQ ID NO: 2200218 - RNA, 13 nt, Human
uuggcauucccca
